United States Patent Application Publication US 2011/0177960 A1 - sequence listing, part 7

SEQ ID NO: 89144 - DNA, 25 bp, Artificial
  probe
  misc_feature (1)..(25): SEQ ID NO: 7051; WAN024BPE_at; Start 1237; Stop 1261
gatttgcaccatttctctttgagtg

SEQ ID NO: 89145 - DNA, 25 bp, Artificial
  probe
  misc_feature (1)..(25): SEQ ID NO: 7051; WAN024BPE_at; Start 264; Stop 288
tccgacggaagagtatggttattat

SEQ ID NO: 89146 - DNA, 25 bp, Artificial
  probe
  misc_feature (1)..(25): SEQ ID NO: 7051; WAN024BPE_at; Start 728; Stop 752
cattgttgcaaactctcaatgttga

SEQ ID NO: 89147 - DNA, 25 bp, Artificial
  probe
  misc_feature (1)..(25): SEQ ID NO: 7636; WAN024BPF_at; Start 518; Stop 542
ggaagacatttttattatcagggaa

SEQ ID NO: 89148 - DNA, 25 bp, Artificial
  probe
  misc_feature (1)..(25): SEQ ID NO: 7636; WAN024BPF_at; Start 352; Stop 376
tcagatatgatacgtgtttgtcttc

SEQ ID NO: 89149 - DNA, 25 bp, Artificial
  probe
  misc_feature (1)..(25): SEQ ID NO: 7636; WAN024BPF_at; Start 385; Stop 409
tatggtgggacttggattgattcaa

SEQ ID NO: 89150 - DNA, 25 bp, Artificial
  probe
  misc_feature (1)..(25): SEQ ID NO: 7636; WAN024BPF_at; Start 126; Stop 150
taaagataatctagaaaatagtaag

SEQ ID NO: 89151 - DNA, 25 bp, Artificial
  probe
  misc_feature (1)..(25): SEQ ID NO: 7636; WAN024BPF_at; Start 376; Stop 400
cttttgcagtatggtgggacttgga

SEQ ID NO: 89152 - DNA, 25 bp, Artificial
  probe
  misc_feature (1)..(25): SEQ ID NO: 7636; WAN024BPF_at; Start 227; Stop 251
aattagctcatgaaaatggttttga

SEQ ID NO: 89153 - DNA, 25 bp, Artificial
  probe
  misc_feature (1)..(25): SEQ ID NO: 7636; WAN024BPF_at; Start 487; Stop 511
gattattctccaaatgtttccaaga

SEQ ID NO: 89154 - DNA, 25 bp, Artificial
  probe
  misc_feature (1)..(25): SEQ ID NO: 7636; WAN024BPF_at; Start 180; Stop 204
tgataacgctcctgaaattgtaaag

SEQ ID NO: 89155 - DNA, 25 bp, Artificial
  probe
  misc_feature (1)..(25): SEQ ID NO: 7636; WAN024BPF_at; Start 406; Stop 430
tcaactgtgtttattcattcgtctt

SEQ ID NO: 89156 - DNA, 25 bp, Artificial
  probe
  misc_feature (1)..(25): SEQ ID NO: 7636; WAN024BPF_at; Start 21; Stop 45
gataggtgaaaaccaggcaagattt

SEQ ID NO: 89157 - DNA, 25 bp, Artificial
  probe
  misc_feature (1)..(25): SEQ ID NO: 7636; WAN024BPF_at; Start 221; Stop 245
tgaaaaaattagctcatgaaaatgg

SEQ ID NO: 89158 - DNA, 25 bp, Artificial
  probe
  misc_feature (1)..(25): SEQ ID NO: 7636; WAN024BPF_at; Start 343; Stop 367
gcaaatatttcagatatgatacgtg

SEQ ID NO: 89159 - DNA, 25 bp, Artificial
  probe
  misc_feature (1)..(25): SEQ ID NO: 7636; WAN024BPF_at; Start 268; Stop 292
gaatcctcctttgagcgctatgtta

SEQ ID NO: 89160 - DNA, 25 bp, Artificial
  probe
  misc_feature (1)..(25): SEQ ID NO: 7636; WAN024BPF_at; Start 475; Stop 499
ggtgagatgacagattattctccaa

SEQ ID NO: 89161 - DNA, 25 bp, Artificial
  probe
  misc_feature (1)..(25): SEQ ID NO: 7636; WAN024BPF_at; Start 164; Stop 188
tgtggtggcaaggttatgataacgc

SEQ ID NO: 89162 - DNA, 25 bp, Artificial
  probe
  misc_feature (1)..(25): SEQ ID NO: 7636; WAN024BPF_at; Start 2; Stop 26
tgggacaagtaccaaatgtgatagg

SEQ ID NO: 89163 - DNA, 25 bp, Artificial
  probe
  misc_feature (1)..(25): SEQ ID NO: 7636; WAN024BPF_at; Start 360; Stop 384
gatacgtgtttgtcttcttttgcag

SEQ ID NO: 89164 - DNA, 25 bp, Artificial
  probe
  misc_feature (1)..(25): SEQ ID NO: 7636; WAN024BPF_at; Start 464; Stop 488
caataaagactggtgagatgacaga

SEQ ID NO: 89165 - DNA, 25 bp, Artificial
  probe
  misc_feature (1)..(25): SEQ ID NO: 7636; WAN024BPF_at; Start 454; Stop 478
tcttattttacaataaagactggtg

SEQ ID NO: 89166 - DNA, 25 bp, Artificial
  probe
  misc_feature (1)..(25): SEQ ID NO: 7636; WAN024BPF_at; Start 495; Stop 519
tccaaatgtttccaagaatcgatgg

SEQ ID NO: 89167 - DNA, 25 bp, Artificial
  probe
  misc_feature (1)..(25): SEQ ID NO: 7636; WAN024BPF_at; Start 421; Stop 445
cattcgtcttttaaatgggataact

SEQ ID NO: 89168 - DNA, 25 bp, Artificial
  probe
  misc_feature (1)..(25): SEQ ID NO: 7636; WAN024BPF_at; Start 275; Stop 299
cctttgagcgctatgttaaaattcc

SEQ ID NO: 89169 - DNA, 25 bp, Artificial
  probe
  misc_feature (1)..(25): SEQ ID NO: 7636; WAN024BPF_at; Start 263; Stop 287
tagatgaatcctcctttgagcgcta

SEQ ID NO: 89170 - DNA, 25 bp, Artificial
  probe
  misc_feature (1)..(25): SEQ ID NO: 7636; WAN024BPF_at; Start 170; Stop 194
ggcaaggttatgataacgctcctga

SEQ ID NO: 89171 - DNA, 25 bp, Artificial
  probe
  misc_feature (1)..(25): SEQ ID NO: 7636; WAN024BPF_at; Start 506; Stop 530
ccaagaatcgatggaagacattttt

SEQ ID NO: 89172 - DNA, 25 bp, Artificial
  probe
  misc_feature (1)..(25): SEQ ID NO: 7636; WAN024BPF_at; Start 49; Stop 73
tgtgaaaaacgtcaccagaaaacta

SEQ ID NO: 89173 - DNA, 25 bp, Artificial
  probe
  misc_feature (1)..(25): SEQ ID NO: 7636; WAN024BPF_at; Start 391; Stop 415
gggacttggattgattcaactgtgt

SEQ ID NO: 89174 - DNA, 25 bp, Artificial
  probe
  misc_feature (1)..(25): SEQ ID NO: 7636; WAN024BPF_at; Start 14; Stop 38
caaatgtgataggtgaaaaccaggc

SEQ ID NO: 89175 - DNA, 25 bp, Artificial
  probe
  misc_feature (1)..(25): SEQ ID NO: 7636; WAN024BPF_at; Start 137; Stop 161
tagaaaatagtaagattgtttggac

SEQ ID NO: 89176 - DNA, 25 bp, Artificial
  probe
  misc_feature (1)..(25): SEQ ID NO: 7636; WAN024BPF_at; Start 372; Stop 396
tcttcttttgcagtatggtgggact

SEQ ID NO: 89177 - DNA, 25 bp, Artificial
  probe
  misc_feature (1)..(25): SEQ ID NO: 7636; WAN024BPF_at; Start 150; Stop 174
gattgtttggacattgtggtggcaa

SEQ ID NO: 89178 - DNA, 25 bp, Artificial
  probe
  misc_feature (1)..(25): SEQ ID NO: 7636; WAN024BPF_at; Start 186; Stop 210
cgctcctgaaattgtaaagtattgt

SEQ ID NO: 89179 - DNA, 25 bp, Artificial
  probe
  misc_feature (1)..(25): SEQ ID NO: 7636; WAN024BPF_at; Start 252; Stop 276
gttttattgtttagatgaatcctcc

SEQ ID NO: 89180 - DNA, 25 bp, Artificial
  probe
  misc_feature (1)..(25): SEQ ID NO: 7636; WAN024BPF_at; Start 278; Stop 302
ttgagcgctatgttaaaattcctga

SEQ ID NO: 89181 - DNA, 25 bp, Artificial
  probe
  misc_feature (1)..(25): SEQ ID NO: 6405; WAN024BPG_at; Start 955; Stop 979
caagaagagtatcaggatttggtca

SEQ ID NO: 89182 - DNA, 25 bp, Artificial
  probe
  misc_feature (1)..(25): SEQ ID NO: 6405; WAN024BPG_at; Start 196; Stop 220
tctaagttgaaggaaggcgatcagc

SEQ ID NO: 89183 - DNA, 25 bp, Artificial
  probe
  misc_feature (1)..(25): SEQ ID NO: 6405; WAN024BPG_at; Start 150; Stop 174
tattagagcccaacgacacaaggct

SEQ ID NO: 89184 - DNA, 25 bp, Artificial
  probe
  misc_feature (1)..(25): SEQ ID NO: 6405; WAN024BPG_at; Start 180; Stop 204
gctatccaaagctatctctaagttg

SEQ ID NO: 89185 - DNA, 25 bp, Artificial
  probe
  misc_feature (1)..(25): SEQ ID NO: 6405; WAN024BPG_at; Start 369; Stop 393
taaaattcgtgttcatcttcaagag

SEQ ID NO: 89186 - DNA, 25 bp, Artificial
  probe
  misc_feature (1)..(25): SEQ ID NO: 6405; WAN024BPG_at; Start 164; Stop 188
gacacaaggctaaagcgctatccaa

SEQ ID NO: 89187 - DNA, 25 bp, Artificial
  probe
  misc_feature (1)..(25): SEQ ID NO: 6405; WAN024BPG_at; Start 86; Stop 110
tagtagttcgtgagggctatagtcc

SEQ ID NO: 89188 - DNA, 25 bp, Artificial
  probe
  misc_feature (1)..(25): SEQ ID NO: 6405; WAN024BPG_at; Start 44; Stop 68
tacgaaatgcgggaaataaggctcg

SEQ ID NO: 89189 - DNA, 25 bp, Artificial
  probe
  misc_feature (1)..(25): SEQ ID NO: 6405; WAN024BPG_at; Start 934; Stop 958
gaagtattggaacatttgtctcaag

SEQ ID NO: 89190 - DNA, 25 bp, Artificial
  probe
  misc_feature (1)..(25): SEQ ID NO: 6405; WAN024BPG_at; Start 23; Stop 47
aatttctgacggattctggtgtacg

SEQ ID NO: 89191 - DNA, 25 bp, Artificial
  probe
  misc_feature (1)..(25): SEQ ID NO: 6405; WAN024BPG_at; Start 696; Stop 720
tcttccagatgaattaccatcagca

SEQ ID NO: 89192 - DNA, 25 bp, Artificial
  probe
  misc_feature (1)..(25): SEQ ID NO: 6405; WAN024BPG_at; Start 635; Stop 659
tctatggtgttggttttgatgaggc

SEQ ID NO: 89193 - DNA, 25 bp, Artificial
  probe
  misc_feature (1)..(25): SEQ ID NO: 6405; WAN024BPG_at; Start 712; Stop 736
ccatcagcattagaaggaagctttg

SEQ ID NO: 89194 - DNA, 25 bp, Artificial
  probe
  misc_feature (1)..(25): SEQ ID NO: 6405; WAN024BPG_at; Start 325; Stop 349
gaagttttgcgctatgccaatttgg

SEQ ID NO: 89195 - DNA, 25 bp, Artificial
  probe
  misc_feature (1)..(25): SEQ ID NO: 6405; WAN024BPG_at; Start 398; Stop 422
gtcttttgaaacaagctgatggtct

SEQ ID NO: 89196 - DNA, 25 bp, Artificial
  probe
  misc_feature (1)..(25): SEQ ID NO: 6405; WAN024BPG_at; Start 617; Stop 641
caagaccggcatataacctctatgg

SEQ ID NO: 89197 - DNA, 25 bp, Artificial
  probe
  misc_feature (1)..(25): SEQ ID NO: 6405; WAN024BPG_at; Start 756; Stop 780
tagttctaaaacttgtagcggcgtg

SEQ ID NO: 89198 - DNA, 25 bp, Artificial
  probe
  misc_feature (1)..(25): SEQ ID NO: 6405; WAN024BPG_at; Start 795; Stop 819
gagatacaataattcccacaaggcc

SEQ ID NO: 89199 - DNA, 25 bp, Artificial
  probe
  misc_feature (1)..(25): SEQ ID NO: 6405; WAN024BPG_at; Start 602; Stop 626
tatatgagttgcctacaagaccggc

SEQ ID NO: 89200 - DNA, 25 bp, Artificial
  probe
  misc_feature (1)..(25): SEQ ID NO: 6405; WAN024BPG_at; Start 977; Stop 1001
tcaaaaatgctaagtccgtaggtca

SEQ ID NO: 89201 - DNA, 25 bp, Artificial
  probe
  misc_feature (1)..(25): SEQ ID NO: 6405; WAN024BPG_at; Start 340; Stop 364
gccaatttggatacagtacccttaa

SEQ ID NO: 89202 - DNA, 25 bp, Artificial
  probe
  misc_feature (1)..(25): SEQ ID NO: 6405; WAN024BPG_at; Start 433; Stop 457
aatccagttatgaaatcagtgcttg

SEQ ID NO: 89203 - DNA, 25 bp, Artificial
  probe
  misc_feature (1)..(25): SEQ ID NO: 6405; WAN024BPG_at; Start 415; Stop 439
gatggtcttattgctcataatccag

SEQ ID NO: 89204 - DNA, 25 bp, Artificial
  probe
  misc_feature (1)..(25): SEQ ID NO: 6405; WAN024BPG_at; Start 859; Stop 883
gggcaatctgctttggctaatttcg

SEQ ID NO: 89205 - DNA, 25 bp, Artificial
  probe
  misc_feature (1)..(25): SEQ ID NO: 6405; WAN024BPG_at; Start 312; Stop 336
tatccatgatttagaagttttgcgc

SEQ ID NO: 89206 - DNA, 25 bp, Artificial
  probe
  misc_feature (1)..(25): SEQ ID NO: 6405; WAN024BPG_at; Start 60; Stop 84
taaggctcgaaacgatgttgaagaa

SEQ ID NO: 89207 - DNA, 25 bp, Artificial
  probe
  misc_feature (1)..(25): SEQ ID NO: 6405; WAN024BPG_at; Start 879; Stop 903
tttcgtcttagaaaaagagtgtgga

SEQ ID NO: 89208 - DNA, 25 bp, Artificial
  probe
  misc_feature (1)..(25): SEQ ID NO: 6405; WAN024BPG_at; Start 814; Stop 838
aaggcctccctttatttggcttctg

SEQ ID NO: 89209 - DNA, 25 bp, Artificial
  probe
  misc_feature (1)..(25): SEQ ID NO: 6405; WAN024BPG_at; Start 211; Stop 235
ggcgatcagctacttattcaatttc

SEQ ID NO: 89210 - DNA, 25 bp, Artificial
  probe
  misc_feature (1)..(25): SEQ ID NO: 6405; WAN024BPG_at; Start 260; Stop 284
cgactcatttagtcaaaagaatgca

SEQ ID NO: 89211 - DNA, 25 bp, Artificial
  probe
  misc_feature (1)..(25): SEQ ID NO: 6405; WAN024BPG_at; Start 652; Stop 676
gatgaggctagaaaactatccaatg

SEQ ID NO: 89212 - DNA, 25 bp, Artificial
  probe
  misc_feature (1)..(25): SEQ ID NO: 6405; WAN024BPG_at; Start 531; Stop 555
caaagaagatttatcgaaggaaggg

SEQ ID NO: 89213 - DNA, 25 bp, Artificial
  probe
  misc_feature (1)..(25): SEQ ID NO: 6405; WAN024BPG_at; Start 282; Stop 306
gcaatgtaaaggagtgaaggttcac

SEQ ID NO: 89214 - DNA, 25 bp, Artificial
  probe
  misc_feature (1)..(25): SEQ ID NO: 6405; WAN024BPG_at; Start 516; Stop 540
cccgaattatcaggacaaagaagat

SEQ ID NO: 89215 - DNA, 25 bp, Artificial
  probe
  misc_feature (1)..(25): SEQ ID NO: 7014; WAN024BPH_at; Start 918; Stop 942
cgtagattcatcgtatgttcaaatg

SEQ ID NO: 89216 - DNA, 25 bp, Artificial
  probe
  misc_feature (1)..(25): SEQ ID NO: 7014; WAN024BPH_at; Start 289; Stop 313
tttcttgtctattcagcccttctgg

SEQ ID NO: 89217 - DNA, 25 bp, Artificial
  probe
  misc_feature (1)..(25): SEQ ID NO: 7014; WAN024BPH_at; Start 364; Stop 388
gtagcgggcattcttgtactaagtg

SEQ ID NO: 89218 - DNA, 25 bp, Artificial
  probe
  misc_feature (1)..(25): SEQ ID NO: 7014; WAN024BPH_at; Start 479; Stop 503
cagattttgcatcccactgtttcta

SEQ ID NO: 89219 - DNA, 25 bp, Artificial
  probe
  misc_feature (1)..(25): SEQ ID NO: 7014; WAN024BPH_at; Start 691; Stop 715
tcaatttccccttattctgtagttc

SEQ ID NO: 89220 - DNA, 25 bp, Artificial
  probe
  misc_feature (1)..(25): SEQ ID NO: 7014; WAN024BPH_at; Start 906; Stop 930
tgattataactacgtagattcatcg

SEQ ID NO: 89221 - DNA, 25 bp, Artificial
  probe
  misc_feature (1)..(25): SEQ ID NO: 7014; WAN024BPH_at; Start 983; Stop 1007
gtatgtatgttgtaatttcgagaga

SEQ ID NO: 89222 - DNA, 25 bp, Artificial
  probe
  misc_feature (1)..(25): SEQ ID NO: 7014; WAN024BPH_at; Start 706; Stop 730
tctgtagttctatgttcgtcaataa

SEQ ID NO: 89223 - DNA, 25 bp, Artificial
  probe
  misc_feature (1)..(25): SEQ ID NO: 7014; WAN024BPH_at; Start 838; Stop 862
gatgtacatctatttggaactagag

SEQ ID NO: 89224 - DNA, 25 bp, Artificial
  probe
  misc_feature (1)..(25): SEQ ID NO: 7014; WAN024BPH_at; Start 952; Stop 976
tatggtgttatacctcttgtactgc

SEQ ID NO: 89225 - DNA, 25 bp, Artificial
  probe
  misc_feature (1)..(25): SEQ ID NO: 7014; WAN024BPH_at; Start 398; Stop 422
tatctctcttaggtgcagttcccaa

SEQ ID NO: 89226 - DNA, 25 bp, Artificial
  probe
  misc_feature (1)..(25): SEQ ID NO: 7014; WAN024BPH_at; Start 468; Stop 492
tatttatcctacagattttgcatcc

SEQ ID NO: 89227 - DNA, 25 bp, Artificial
  probe
  misc_feature (1)..(25): SEQ ID NO: 7014; WAN024BPH_at; Start 254; Stop 278
gaattttagtatattttcagactgg

SEQ ID NO: 89228 - DNA, 25 bp, Artificial
  probe
  misc_feature (1)..(25): SEQ ID NO: 7014; WAN024BPH_at; Start 852; Stop 876
tggaactagagacgtattatttaag

SEQ ID NO: 89229 - DNA, 25 bp, Artificial
  probe
  misc_feature (1)..(25): SEQ ID NO: 7014; WAN024BPH_at; Start 110; Stop 134
ctactacaatgctggatagaacttt

SEQ ID NO: 89230 - DNA, 25 bp, Artificial
  probe
  misc_feature (1)..(25): SEQ ID NO: 7014; WAN024BPH_at; Start 1054; Stop 1078
gtggctctaaactgcatgattgaag

SEQ ID NO: 89231 - DNA, 25 bp, Artificial
  probe
  misc_feature (1)..(25): SEQ ID NO: 7014; WAN024BPH_at; Start 1070; Stop 1094
tgattgaagctttttggtttgtccc

SEQ ID NO: 89232 - DNA, 25 bp, Artificial
  probe
  misc_feature (1)..(25): SEQ ID NO: 7014; WAN024BPH_at; Start 1089; Stop 1113
tgtccctacttacaatatattcatg

SEQ ID NO: 89233 - DNA, 25 bp, Artificial
  probe
  misc_feature (1)..(25): SEQ ID NO: 7014; WAN024BPH_at; Start 791; Stop 815
taattacaggtagattagctttggg

SEQ ID NO: 89234 - DNA, 25 bp, Artificial
  probe
  misc_feature (1)..(25): SEQ ID NO: 7014; WAN024BPH_at; Start 436; Stop 460
cgcgaaggagttattcggaattcat

SEQ ID NO: 89235 - DNA, 25 bp, Artificial
  probe
  misc_feature (1)..(25): SEQ ID NO: 7014; WAN024BPH_at; Start 194; Stop 218
tgtttccaacacgtatttcatttaa

SEQ ID NO: 89236 - DNA, 25 bp, Artificial
  probe
  misc_feature (1)..(25): SEQ ID NO: 7014; WAN024BPH_at; Start 891; Stop 915
aacggaggctgttattgattataac

SEQ ID NO: 89237 - DNA, 25 bp, Artificial
  probe
  misc_feature (1)..(25): SEQ ID NO: 7014; WAN024BPH_at; Start 595; Stop 619
tattgtgatgcacgtttaaatgcct

SEQ ID NO: 89238 - DNA, 25 bp, Artificial
  probe
  misc_feature (1)..(25): SEQ ID NO: 7014; WAN024BPH_at; Start 349; Stop 373
aaaacgtatctcattgtagcgggca

SEQ ID NO: 89239 - DNA, 25 bp, Artificial
  probe
  misc_feature (1)..(25): SEQ ID NO: 7014; WAN024BPH_at; Start 301; Stop 325
tcagcccttctggttttattagtta

SEQ ID NO: 89240 - DNA, 25 bp, Artificial
  probe
  misc_feature (1)..(25): SEQ ID NO: 7014; WAN024BPH_at; Start 880; Stop 904
tcaggaggtaaaacggaggctgtta

SEQ ID NO: 89241 - DNA, 25 bp, Artificial
  probe
  misc_feature (1)..(25): SEQ ID NO: 7014; WAN024BPH_at; Start 663; Stop 687
taatgaagataagaaattccggatc

SEQ ID NO: 89242 - DNA, 25 bp, Artificial
  probe
  misc_feature (1)..(25): SEQ ID NO: 7014; WAN024BPH_at; Start 100; Stop 124
aatactatatctactacaatgctgg

SEQ ID NO: 89243 - DNA, 25 bp, Artificial
  probe
  misc_feature (1)..(25): SEQ ID NO: 7014; WAN024BPH_at; Start 547; Stop 571
tggattaggtctctaataggtgtac

SEQ ID NO: 89244 - DNA, 25 bp, Artificial
  probe
  misc_feature (1)..(25): SEQ ID NO: 7014; WAN024BPH_at; Start 423; Stop 447
tttacaatataatcgcgaaggagtt

SEQ ID NO: 89245 - DNA, 25 bp, Artificial
  probe
  misc_feature (1)..(25): SEQ ID NO: 7014; WAN024BPH_at; Start 1039; Stop 1063
gtaatattatctttagtggctctaa

SEQ ID NO: 89246 - DNA, 25 bp, Artificial
  probe
  misc_feature (1)..(25): SEQ ID NO: 7014; WAN024BPH_at; Start 1000; Stop 1024
tcgagagaacagtataaacagggtc

SEQ ID NO: 89247 - DNA, 25 bp, Artificial
  probe
  misc_feature (1)..(25): SEQ ID NO: 7014; WAN024BPH_at; Start 409; Stop 433
ggtgcagttcccaatttacaatata

SEQ ID NO: 89248 - DNA, 25 bp, Artificial
  probe
  misc_feature (1)..(25): SEQ ID NO: 7014; WAN024BPH_at; Start 759; Stop 783
gggatctccatttttagtatctatc

SEQ ID NO: 89249 - DNA, 25 bp, Artificial
  probe
  misc_feature (1)..(25): SEQ ID NO: 6419; WAN024BPI_at; Start 31; Stop 55
agtttgacagtgatatttctaacag

SEQ ID NO: 89250 - DNA, 25 bp, Artificial
  probe
  misc_feature (1)..(25): SEQ ID NO: 6419; WAN024BPI_at; Start 23; Stop 47
cacctatgagtttgacagtgatatt

SEQ ID NO: 89251 - DNA, 25 bp, Artificial
  probe
  misc_feature (1)..(25): SEQ ID NO: 6419; WAN024BPI_at; Start 48; Stop 72
tctaacagttatcttcctaaaatct

SEQ ID NO: 89252 - DNA, 25 bp, Artificial
  probe
  misc_feature (1)..(25): SEQ ID NO: 6419; WAN024BPI_at; Start 9; Stop 33
aaatattgaaataacacctatgagt

SEQ ID NO: 89253 - DNA, 25 bp, Artificial
  probe
  misc_feature (1)..(25): SEQ ID NO: 6419; WAN024BPI_at; Start 26; Stop 50
ctatgagtttgacagtgatatttct

SEQ ID NO: 89254 - DNA, 25 bp, Artificial
  probe
  misc_feature (1)..(25): SEQ ID NO: 6419; WAN024BPI_at; Start 19; Stop 43
ataacacctatgagtttgacagtga

SEQ ID NO: 89255 - DNA, 25 bp, Artificial
  probe
  misc_feature (1)..(25): SEQ ID NO: 6419; WAN024BPI_at; Start 38; Stop 62
cagtgatatttctaacagttatctt

SEQ ID NO: 89256 - DNA, 25 bp, Artificial
  probe
  misc_feature (1)..(25): SEQ ID NO: 6419; WAN024BPI_at; Start 50; Stop 74
taacagttatcttcctaaaatcttc

SEQ ID NO: 89257 - DNA, 25 bp, Artificial
  probe
  misc_feature (1)..(25): SEQ ID NO: 6419; WAN024BPI_at; Start 42; Stop 66
gatatttctaacagttatcttccta

SEQ ID NO: 89258 - DNA, 25 bp, Artificial
  probe
  misc_feature (1)..(25): SEQ ID NO: 6419; WAN024BPI_at; Start 33; Stop 57
tttgacagtgatatttctaacagtt

SEQ ID NO: 89259 - DNA, 25 bp, Artificial
  probe
  misc_feature (1)..(25): SEQ ID NO: 6419; WAN024BPI_at; Start 54; Stop 78
agttatcttcctaaaatcttctagt

SEQ ID NO: 89260 - DNA, 25 bp, Artificial
  probe
  misc_feature (1)..(25): SEQ ID NO: 6419; WAN024BPI_at; Start 6; Stop 30
caaaaatattgaaataacacctatg

SEQ ID NO: 89261 - DNA, 25 bp, Artificial
  probe
  misc_feature (1)..(25): SEQ ID NO: 6419; WAN024BPI_at; Start 18; Stop 42
aataacacctatgagtttgacagtg

SEQ ID NO: 89262 - DNA, 25 bp, Artificial
  probe
  misc_feature (1)..(25): SEQ ID NO: 6419; WAN024BPI_at; Start 29; Stop 53
tgagtttgacagtgatatttctaac

SEQ ID NO: 89263 - DNA, 25 bp, Artificial
  probe
  misc_feature (1)..(25): SEQ ID NO: 6419; WAN024BPI_at; Start 40; Stop 64
gtgatatttctaacagttatcttcc

SEQ ID NO: 89264 - DNA, 25 bp, Artificial
  probe
  misc_feature (1)..(25): SEQ ID NO: 6419; WAN024BPI_at; Start 17; Stop 41
aaataacacctatgagtttgacagt

SEQ ID NO: 89265 - DNA, 25 bp, Artificial
  probe
  misc_feature (1)..(25): SEQ ID NO: 6419; WAN024BPI_at; Start 8; Stop 32
aaaatattgaaataacacctatgag

SEQ ID NO: 89266 - DNA, 25 bp, Artificial
  probe
  misc_feature (1)..(25): SEQ ID NO: 6419; WAN024BPI_at; Start 21; Stop 45
aacacctatgagtttgacagtgata

SEQ ID NO: 89267 - DNA, 25 bp, Artificial
  probe
  misc_feature (1)..(25): SEQ ID NO: 6419; WAN024BPI_at; Start 55; Stop 79
gttatcttcctaaaatcttctagtc

SEQ ID NO: 89268 - DNA, 25 bp, Artificial
  probe
  misc_feature (1)..(25): SEQ ID NO: 6419; WAN024BPI_at; Start 12; Stop 36
tattgaaataacacctatgagtttg

SEQ ID NO: 89269 - DNA, 25 bp, Artificial
  probe
  misc_feature (1)..(25): SEQ ID NO: 6419; WAN024BPI_at; Start 57; Stop 81
tatcttcctaaaatcttctagtcct

SEQ ID NO: 89270 - DNA, 25 bp, Artificial
  probe
  misc_feature (1)..(25): SEQ ID NO: 6419; WAN024BPI_at; Start 32; Stop 56
gtttgacagtgatatttctaacagt

SEQ ID NO: 89271 - DNA, 25 bp, Artificial
  probe
  misc_feature (1)..(25): SEQ ID NO: 6419; WAN024BPI_at; Start 34; Stop 58
ttgacagtgatatttctaacagtta

SEQ ID NO: 89272 - DNA, 25 bp, Artificial
  probe
  misc_feature (1)..(25): SEQ ID NO: 6419; WAN024BPI_at; Start 30; Stop 54
gagtttgacagtgatatttctaaca

SEQ ID NO: 89273 - DNA, 25 bp, Artificial
  probe
  misc_feature (1)..(25): SEQ ID NO: 6419; WAN024BPI_at; Start 53; Stop 77
cagttatcttcctaaaatcttctag

SEQ ID NO: 89274 - DNA, 25 bp, Artificial
  probe
  misc_feature (1)..(25): SEQ ID NO: 6419; WAN024BPI_at; Start 20; Stop 44
taacacctatgagtttgacagtgat

SEQ ID NO: 89275 - DNA, 25 bp, Artificial
  probe
  misc_feature (1)..(25): SEQ ID NO: 6419; WAN024BPI_at; Start 22; Stop 46
acacctatgagtttgacagtgatat

SEQ ID NO: 89276 - DNA, 25 bp, Artificial
  probe
  misc_feature (1)..(25): SEQ ID NO: 6419; WAN024BPI_at; Start 15; Stop 39
tgaaataacacctatgagtttgaca

SEQ ID NO: 89277 - DNA, 25 bp, Artificial
  probe
  misc_feature (1)..(25): SEQ ID NO: 6419; WAN024BPI_at; Start 14; Stop 38
ttgaaataacacctatgagtttgac

SEQ ID NO: 89278 - DNA, 25 bp, Artificial
  probe
  misc_feature (1)..(25): SEQ ID NO: 6419; WAN024BPI_at; Start 25; Stop 49
cctatgagtttgacagtgatatttc

SEQ ID NO: 89279 - DNA, 25 bp, Artificial
  probe
  misc_feature (1)..(25): SEQ ID NO: 6419; WAN024BPI_at; Start 16; Stop 40
gaaataacacctatgagtttgacag

SEQ ID NO: 89280 - DNA, 25 bp, Artificial
  probe
  misc_feature (1)..(25): SEQ ID NO: 6419; WAN024BPI_at; Start 36; Stop 60
gacagtgatatttctaacagttatc

SEQ ID NO: 89281 - DNA, 25 bp, Artificial
  probe
  misc_feature (1)..(25): SEQ ID NO: 6419; WAN024BPI_at; Start 2; Stop 26
tgaacaaaaatattgaaataacacc

SEQ ID NO: 89282 - DNA, 25 bp, Artificial
  probe
  misc_feature (1)..(25): SEQ ID NO: 6419; WAN024BPI_at; Start 27; Stop 51
tatgagtttgacagtgatatttcta

SEQ ID NO: 89283 - DNA, 25 bp, Artificial
  probe
  misc_feature (1)..(25): SEQ ID NO: 7500; WAN024BPJ_at; Start 38; Stop 62
tttcttctgagggtatttatgaatc

SEQ ID NO: 89284 - DNA, 25 bp, Artificial
  probe
  misc_feature (1)..(25): SEQ ID NO: 7500; WAN024BPJ_at; Start 8; Stop 32
aatatgccagagagcaaaataaagc

SEQ ID NO: 89285 - DNA, 25 bp, Artificial
  probe
  misc_feature (1)..(25): SEQ ID NO: 7500; WAN024BPJ_at; Start 40; Stop 64
tcttctgagggtatttatgaatcga

SEQ ID NO: 89286 - DNA, 25 bp, Artificial
  probe
  misc_feature (1)..(25): SEQ ID NO: 7500; WAN024BPJ_at; Start 41; Stop 65
cttctgagggtatttatgaatcgat

SEQ ID NO: 89287 - DNA, 25 bp, Artificial
  probe
  misc_feature (1)..(25): SEQ ID NO: 7500; WAN024BPJ_at; Start 43; Stop 67
tctgagggtatttatgaatcgatta

SEQ ID NO: 89288 - DNA, 25 bp, Artificial
  probe
  misc_feature (1)..(25): SEQ ID NO: 7500; WAN024BPJ_at; Start 35; Stop 59
caatttcttctgagggtatttatga

SEQ ID NO: 89289 - DNA, 25 bp, Artificial
  probe
  misc_feature (1)..(25): SEQ ID NO: 7500; WAN024BPJ_at; Start 34; Stop 58
tcaatttcttctgagggtatttatg

SEQ ID NO: 89290 - DNA, 25 bp, Artificial
  probe
  misc_feature (1)..(25): SEQ ID NO: 7500; WAN024BPJ_at; Start 53; Stop 77
tttatgaatcgattaagtattctgc

SEQ ID NO: 89291 - DNA, 25 bp, Artificial
  probe
  misc_feature (1)..(25): SEQ ID NO: 7500; WAN024BPJ_at; Start 30; Stop 54
agcatcaatttcttctgagggtatt

SEQ ID NO: 89292 - DNA, 25 bp, Artificial
  probe
  misc_feature (1)..(25): SEQ ID NO: 7500; WAN024BPJ_at; Start 13; Stop 37
gccagagagcaaaataaagcatcaa

SEQ ID NO: 89293 - DNA, 25 bp, Artificial
  probe
  misc_feature (1)..(25): SEQ ID NO: 7500; WAN024BPJ_at; Start 3; Stop 27
gatgaaatatgccagagagcaaaat

SEQ ID NO: 89294 - DNA, 25 bp, Artificial
  probe
  misc_feature (1)..(25): SEQ ID NO: 7500; WAN024BPJ_at; Start 26; Stop 50
ataaagcatcaatttcttctgaggg

SEQ ID NO: 89295 - DNA, 25 bp, Artificial
  probe
  misc_feature (1)..(25): SEQ ID NO: 7500; WAN024BPJ_at; Start 6; Stop 30
gaaatatgccagagagcaaaataaa

SEQ ID NO: 89296 - DNA, 25 bp, Artificial
  probe
  misc_feature (1)..(25): SEQ ID NO: 7500; WAN024BPJ_at; Start 12; Stop 36
tgccagagagcaaaataaagcatca

SEQ ID NO: 89297 - DNA, 25 bp, Artificial
  probe
  misc_feature (1)..(25): SEQ ID NO: 7500; WAN024BPJ_at; Start 5; Stop 29
tgaaatatgccagagagcaaaataa

SEQ ID NO: 89298 - DNA, 25 bp, Artificial
  probe
  misc_feature (1)..(25): SEQ ID NO: 7500; WAN024BPJ_at; Start 19; Stop 43
gagcaaaataaagcatcaatttctt

SEQ ID NO: 89299 - DNA, 25 bp, Artificial
  probe
  misc_feature (1)..(25): SEQ ID NO: 7500; WAN024BPJ_at; Start 25; Stop 49
aataaagcatcaatttcttctgagg

SEQ ID NO: 89300 - DNA, 25 bp, Artificial
  probe
  misc_feature (1)..(25): SEQ ID NO: 7500; WAN024BPJ_at; Start 10; Stop 34
tatgccagagagcaaaataaagcat

SEQ ID NO: 89301 - DNA, 25 bp, Artificial
  probe
  misc_feature (1)..(25): SEQ ID NO: 7500; WAN024BPJ_at; Start 27; Stop 51
taaagcatcaatttcttctgagggt

SEQ ID NO: 89302 - DNA, 25 bp, Artificial
  probe
  misc_feature (1)..(25): SEQ ID NO: 7500; WAN024BPJ_at; Start 14; Stop 38
ccagagagcaaaataaagcatcaat

SEQ ID NO: 89303 - DNA, 25 bp, Artificial
  probe
  misc_feature (1)..(25): SEQ ID NO: 7500; WAN024BPJ_at; Start 44; Stop 68
ctgagggtatttatgaatcgattaa

SEQ ID NO: 89304 - DNA, 25 bp, Artificial
  probe
  misc_feature (1)..(25): SEQ ID NO: 7500; WAN024BPJ_at; Start 17; Stop 41
gagagcaaaataaagcatcaatttc

SEQ ID NO: 89305 - DNA, 25 bp, Artificial
  probe
  misc_feature (1)..(25): SEQ ID NO: 7500; WAN024BPJ_at; Start 22; Stop 46
caaaataaagcatcaatttcttctg

SEQ ID NO: 89306 - DNA, 25 bp, Artificial
  probe
  misc_feature (1)..(25): SEQ ID NO: 7500; WAN024BPJ_at; Start 45; Stop 69
tgagggtatttatgaatcgattaag

SEQ ID NO: 89307 - DNA, 25 bp, Artificial
  probe
  misc_feature (1)..(25): SEQ ID NO: 7500; WAN024BPJ_at; Start 28; Stop 52
aaagcatcaatttcttctgagggta

SEQ ID NO: 89308 - DNA, 25 bp, Artificial
  probe
  misc_feature (1)..(25): SEQ ID NO: 7500; WAN024BPJ_at; Start 31; Stop 55
gcatcaatttcttctgagggtattt

SEQ ID NO: 89309 - DNA, 25 bp, Artificial
  probe
  misc_feature (1)..(25): SEQ ID NO: 7500; WAN024BPJ_at; Start 32; Stop 56
catcaatttcttctgagggtattta

SEQ ID NO: 89310 - DNA, 25 bp, Artificial
  probe
  misc_feature (1)..(25): SEQ ID NO: 7500; WAN024BPJ_at; Start 29; Stop 53
aagcatcaatttcttctgagggtat

SEQ ID NO: 89311 - DNA, 25 bp, Artificial
  probe
  misc_feature (1)..(25): SEQ ID NO: 7500; WAN024BPJ_at; Start 1; Stop 25
ttgatgaaatatgccagagagcaaa

SEQ ID NO: 89312 - DNA, 25 bp, Artificial
  probe
  misc_feature (1)..(25): SEQ ID NO: 7500; WAN024BPJ_at; Start 39; Stop 63
ttcttctgagggtatttatgaatcg

SEQ ID NO: 89313 - DNA, 25 bp, Artificial
  probe
  misc_feature (1)..(25): SEQ ID NO: 7500; WAN024BPJ_at; Start 21; Stop 45
gcaaaataaagcatcaatttcttct

SEQ ID NO: 89314 - DNA, 25 bp, Artificial
  probe
  misc_feature (1)..(25): SEQ ID NO: 7500; WAN024BPJ_at; Start 54; Stop 78
ttatgaatcgattaagtattctgct

SEQ ID NO: 89315 - DNA, 25 bp, Artificial
  probe
  misc_feature (1)..(25): SEQ ID NO: 7500; WAN024BPJ_at; Start 46; Stop 70
gagggtatttatgaatcgattaagt

SEQ ID NO: 89316 - DNA, 25 bp, Artificial
  probe
  misc_feature (1)..(25): SEQ ID NO: 7500; WAN024BPJ_at; Start 9; Stop 33
atatgccagagagcaaaataaagca

SEQ ID NO: 89317 - DNA, 25 bp, Artificial
  probe
  misc_feature (1)..(25): SEQ ID NO: 6773; WAN024BPK_at; Start 381; Stop 405
cggtcgtggaagtttctcgcaaata

SEQ ID NO: 89318 - DNA, 25 bp, Artificial
  probe
  misc_feature (1)..(25): SEQ ID NO: 6773; WAN024BPK_at; Start 809; Stop 833
gtcaagatgggattattgaagctct

SEQ ID NO: 89319 - DNA, 25 bp, Artificial
  probe
  misc_feature (1)..(25): SEQ ID NO: 6773; WAN024BPK_at; Start 485; Stop 509
gagtgtttaatagcttcatatctcc

SEQ ID NO: 89320 - DNA, 25 bp, Artificial
  probe
  misc_feature (1)..(25): SEQ ID NO: 6773; WAN024BPK_at; Start 1047; Stop 1071
gcctacagggaatgtctttacaact

SEQ ID NO: 89321 - DNA, 25 bp, Artificial
  probe
  misc_feature (1)..(25): SEQ ID NO: 6773; WAN024BPK_at; Start 175; Stop 199
tttattgtgacgatttcaatgctcg

SEQ ID NO: 89322 - DNA, 25 bp, Artificial
  probe
  misc_feature (1)..(25): SEQ ID NO: 6773; WAN024BPK_at; Start 566; Stop 590
tagataaatttcaactcctagttcc

SEQ ID NO: 89323 - DNA, 25 bp, Artificial
  probe
  misc_feature (1)..(25): SEQ ID NO: 6773; WAN024BPK_at; Start 1148; Stop 1172
caacttatagtaggatattgggtac

SEQ ID NO: 89324 - DNA, 25 bp, Artificial
  probe
  misc_feature (1)..(25): SEQ ID NO: 6773; WAN024BPK_at; Start 932; Stop 956
gagaacagactttttatggctttta

SEQ ID NO: 89325 - DNA, 25 bp, Artificial
  probe
  misc_feature (1)..(25): SEQ ID NO: 6773; WAN024BPK_at; Start 748; Stop 772
gtggcagttgctcctctatttgtac

SEQ ID NO: 89326 - DNA, 25 bp, Artificial
  probe
  misc_feature (1)..(25): SEQ ID NO: 6773; WAN024BPK_at; Start 347; Stop 371
gatacgaacaagctttattcagcgc

SEQ ID NO: 89327 - DNA, 25 bp, Artificial
  probe
  misc_feature (1)..(25): SEQ ID NO: 6773; WAN024BPK_at; Start 826; Stop 850
gaagctcttaatcgagaactattca

SEQ ID NO: 89328 - DNA, 25 bp, Artificial
  probe
  misc_feature (1)..(25): SEQ ID NO: 6773; WAN024BPK_at; Start 44; Stop 68
taaattatgcttttgtaagaggaga

SEQ ID NO: 89329 - DNA, 25 bp, Artificial
  probe
  misc_feature (1)..(25): SEQ ID NO: 6773; WAN024BPK_at; Start 126; Stop 150
cattttaaatgctcaagagtatgct

SEQ ID NO: 89330 - DNA, 25 bp, Artificial
  probe
  misc_feature (1)..(25): SEQ ID NO: 6773; WAN024BPK_at; Start 855; Stop 879
cattggcgctccgttattaaatttt

SEQ ID NO: 89331 - DNA, 25 bp, Artificial
  probe
  misc_feature (1)..(25): SEQ ID NO: 6773; WAN024BPK_at; Start 615; Stop 639
tatgactggtagtagagggtccttg

SEQ ID NO: 89332 - DNA, 25 bp, Artificial
  probe
  misc_feature (1)..(25): SEQ ID NO: 6773; WAN024BPK_at; Start 898; Stop 922
tatgatccgtatagaagtgactcag

SEQ ID NO: 89333 - DNA, 25 bp, Artificial
  probe
  misc_feature (1)..(25): SEQ ID NO: 6773; WAN024BPK_at; Start 540; Stop 564
tcacaattatgtggcaacaagaaga

SEQ ID NO: 89334 - DNA, 25 bp, Artificial
  probe
  misc_feature (1)..(25): SEQ ID NO: 6773; WAN024BPK_at; Start 1311; Stop 1335
aactagtgccattttagtctggata

SEQ ID NO: 89335 - DNA, 25 bp, Artificial
  probe
  misc_feature (1)..(25): SEQ ID NO: 6773; WAN024BPK_at; Start 60; Stop 84
aagaggagattattttcacccaaca

SEQ ID NO: 89336 - DNA, 25 bp, Artificial
  probe
  misc_feature (1)..(25): SEQ ID NO: 6773; WAN024BPK_at; Start 680; Stop 704
tactactgcgtaataaaggacttag

SEQ ID NO: 89337 - DNA, 25 bp, Artificial
  probe
  misc_feature (1)..(25): SEQ ID NO: 6773; WAN024BPK_at; Start 729; Stop 753
taaggtccttattgttgtagtggca

SEQ ID NO: 89338 - DNA, 25 bp, Artificial
  probe
  misc_feature (1)..(25): SEQ ID NO: 6773; WAN024BPK_at; Start 1104; Stop 1128
cggcattattccattagtatctgta

SEQ ID NO: 89339 - DNA, 25 bp, Artificial
  probe
  misc_feature (1)..(25): SEQ ID NO: 6773; WAN024BPK_at; Start 150; Stop 174
tattgagttcaatggaggtacagtt

SEQ ID NO: 89340 - DNA, 25 bp, Artificial
  probe
  misc_feature (1)..(25): SEQ ID NO: 6773; WAN024BPK_at; Start 882; Stop 906
caattttattgctggatatgatccg

SEQ ID NO: 89341 - DNA, 25 bp, Artificial
  probe
  misc_feature (1)..(25): SEQ ID NO: 6773; WAN024BPK_at; Start 101; Stop 125
cttttttgatagcaacactgttttg

SEQ ID NO: 89342 - DNA, 25 bp, Artificial
  probe
  misc_feature (1)..(25): SEQ ID NO: 6773; WAN024BPK_at; Start 1032; Stop 1056
gagtaccaatggattgcctacaggg

SEQ ID NO: 89343 - DNA, 25 bp, Artificial
  probe
  misc_feature (1)..(25): SEQ ID NO: 6773; WAN024BPK_at; Start 711; Stop 735
gagttctcgctttgcttttaaggtc

SEQ ID NO: 89344 - DNA, 25 bp, Artificial
  probe
  misc_feature (1)..(25): SEQ ID NO: 6773; WAN024BPK_at; Start 841; Stop 865
gaactattcaagtacattggcgctc

SEQ ID NO: 89345 - DNA, 25 bp, Artificial
  probe
  misc_feature (1)..(25): SEQ ID NO: 6773; WAN024BPK_at; Start 1014; Stop 1038
tagtgattcttttgtgaagagtacc

SEQ ID NO: 89346 - DNA, 25 bp, Artificial
  probe
  misc_feature (1)..(25): SEQ ID NO: 6773; WAN024BPK_at; Start 437; Stop 461
ttactgaagacttagtcggattggg

SEQ ID NO: 89347 - DNA, 25 bp, Artificial
  probe
  misc_feature (1)..(25): SEQ ID NO: 6773; WAN024BPK_at; Start 362; Stop 386
tattcagcgcttatgttggcggtcg

SEQ ID NO: 89348 - DNA, 25 bp, Artificial
  probe
  misc_feature (1)..(25): SEQ ID NO: 6773; WAN024BPK_at; Start 1163; Stop 1187
tattgggtacagaatattgtgcaaa

SEQ ID NO: 89349 - DNA, 25 bp, Artificial
  probe
  misc_feature (1)..(25): SEQ ID NO: 6773; WAN024BPK_at; Start 1084; Stop 1108
ttttatgacttcacttatttcggca

SEQ ID NO: 89350 - DNA, 25 bp, Artificial
  probe
  misc_feature (1)..(25): SEQ ID NO: 6773; WAN024BPK_at; Start 696; Stop 720
aggacttagtaaattgagttctcgc

SEQ ID NO: 89351 - DNA, 25 bp, Artificial
  probe
  misc_feature (1)..(25): SEQ ID NO: 6851; WAN024BPL_at; Start 14; Stop 38
tcacaatcacacctcgctatgctga

SEQ ID NO: 89352 - DNA, 25 bp, Artificial
  probe
  misc_feature (1)..(25): SEQ ID NO: 6851; WAN024BPL_at; Start 48; Stop 72
tgtcctccaattttatctacaattg

SEQ ID NO: 89353 - DNA, 25 bp, Artificial
  probe
  misc_feature (1)..(25): SEQ ID NO: 6851; WAN024BPL_at; Start 33; Stop 57
tgctgaaattgtaaatgtcctccaa

SEQ ID NO: 89354 - DNA, 25 bp, Artificial
  probe
  misc_feature (1)..(25): SEQ ID NO: 6851; WAN024BPL_at; Start 11; Stop 35
ttttcacaatcacacctcgctatgc

SEQ ID NO: 89355 - DNA, 25 bp, Artificial
  probe
  misc_feature (1)..(25): SEQ ID NO: 6851; WAN024BPL_at; Start 23; Stop 47
cacctcgctatgctgaaattgtaaa

SEQ ID NO: 89356 - DNA, 25 bp, Artificial
  probe
  misc_feature (1)..(25): SEQ ID NO: 6851; WAN024BPL_at; Start 21; Stop 45
cacacctcgctatgctgaaattgta

SEQ ID NO: 89357 - DNA, 25 bp, Artificial
  probe
  misc_feature (1)..(25): SEQ ID NO: 6851; WAN024BPL_at; Start 40; Stop 64
attgtaaatgtcctccaattttatc

SEQ ID NO: 89358 - DNA, 25 bp, Artificial
  probe
  misc_feature (1)..(25): SEQ ID NO: 6851; WAN024BPL_at; Start 18; Stop 42
aatcacacctcgctatgctgaaatt

SEQ ID NO: 89359 - DNA, 25 bp, Artificial
  probe
  misc_feature (1)..(25): SEQ ID NO: 6851; WAN024BPL_at; Start 19; Stop 43
atcacacctcgctatgctgaaattg

SEQ ID NO: 89360 - DNA, 25 bp, Artificial
  probe
  misc_feature (1)..(25): SEQ ID NO: 6851; WAN024BPL_at; Start 22; Stop 46
acacctcgctatgctgaaattgtaa

SEQ ID NO: 89361 - DNA, 25 bp, Artificial
  probe
  misc_feature (1)..(25): SEQ ID NO: 6851; WAN024BPL_at; Start 35; Stop 59
ctgaaattgtaaatgtcctccaatt

SEQ ID NO: 89362 - DNA, 25 bp, Artificial
  probe
  misc_feature (1)..(25): SEQ ID NO: 6851; WAN024BPL_at; Start 15; Stop 39
cacaatcacacctcgctatgctgaa

SEQ ID NO: 89363 - DNA, 25 bp, Artificial
  probe
  misc_feature (1)..(25): SEQ ID NO: 6851; WAN024BPL_at; Start 32; Stop 56
atgctgaaattgtaaatgtcctcca

SEQ ID NO: 89364 - DNA, 25 bp, Artificial
  probe
  misc_feature (1)..(25): SEQ ID NO: 6851; WAN024BPL_at; Start 41; Stop 65
ttgtaaatgtcctccaattttatct

SEQ ID NO: 89365 - DNA, 25 bp, Artificial
  probe
  misc_feature (1)..(25): SEQ ID NO: 6851; WAN024BPL_at; Start 12; Stop 36
tttcacaatcacacctcgctatgct

SEQ ID NO: 89366 - DNA, 25 bp, Artificial
  probe
  misc_feature (1)..(25): SEQ ID NO: 6851; WAN024BPL_at; Start 16; Stop 40
acaatcacacctcgctatgctgaaa

SEQ ID NO: 89367 - DNA, 25 bp, Artificial
  probe
  misc_feature (1)..(25): SEQ ID NO: 6851; WAN024BPL_at; Start 4; Stop 28
gatttccttttcacaatcacacctc

SEQ ID NO: 89368 - DNA, 25 bp, Artificial
  probe
  misc_feature (1)..(25): SEQ ID NO: 6851; WAN024BPL_at; Start 45; Stop 69
aaatgtcctccaattttatctacaa

SEQ ID NO: 89369 - DNA, 25 bp, Artificial
  probe
  misc_feature (1)..(25): SEQ ID NO: 6851; WAN024BPL_at; Start 1; Stop 25
atggatttccttttcacaatcacac

SEQ ID NO: 89370 - DNA, 25 bp, Artificial
  probe
  misc_feature (1)..(25): SEQ ID NO: 6851; WAN024BPL_at; Start 43; Stop 67
gtaaatgtcctccaattttatctac

SEQ ID NO: 89371 - DNA, 25 bp, Artificial
  probe
  misc_feature (1)..(25): SEQ ID NO: 6851; WAN024BPL_at; Start 34; Stop 58
gctgaaattgtaaatgtcctccaat

SEQ ID NO: 89372 - DNA, 25 bp, Artificial
  probe
  misc_feature (1)..(25): SEQ ID NO: 6851; WAN024BPL_at; Start 42; Stop 66
tgtaaatgtcctccaattttatcta

SEQ ID NO: 89373 - DNA, 25 bp, Artificial
  probe
  misc_feature (1)..(25): SEQ ID NO: 6851; WAN024BPL_at; Start 2; Stop 26
tggatttccttttcacaatcacacc

SEQ ID NO: 89374 - DNA, 25 bp, Artificial
  probe
  misc_feature (1)..(25): SEQ ID NO: 6851; WAN024BPL_at; Start 46; Stop 70
aatgtcctccaattttatctacaat

SEQ ID NO: 89375 - DNA, 25 bp, Artificial
  probe
  misc_feature (1)..(25): SEQ ID NO: 6851; WAN024BPL_at; Start 36; Stop 60
tgaaattgtaaatgtcctccaattt

SEQ ID NO: 89376 - DNA, 25 bp, Artificial
  probe
  misc_feature (1)..(25): SEQ ID NO: 6851; WAN024BPL_at; Start 60; Stop 84
ttatctacaattgtatcaagctggc

SEQ ID NO: 89377 - DNA, 25 bp, Artificial
  probe
  misc_feature (1)..(25): SEQ ID NO: 6851; WAN024BPL_at; Start 10; Stop 34
cttttcacaatcacacctcgctatg

SEQ ID NO: 89378 - DNA, 25 bp, Artificial
  probe
  misc_feature (1)..(25): SEQ ID NO: 6851; WAN024BPL_at; Start 49; Stop 73
gtcctccaattttatctacaattgt

SEQ ID NO: 89379 - DNA, 25 bp, Artificial
  probe
  misc_feature (1)..(25): SEQ ID NO: 6851; WAN024BPL_at; Start 44; Stop 68
taaatgtcctccaattttatctaca

SEQ ID NO: 89380 - DNA, 25 bp, Artificial
  probe
  misc_feature (1)..(25): SEQ ID NO: 6851; WAN024BPL_at; Start 5; Stop 29
atttccttttcacaatcacacctcg

SEQ ID NO: 89381 - DNA, 25 bp, Artificial
  probe
  misc_feature (1)..(25): SEQ ID NO: 6851; WAN024BPL_at; Start 13; Stop 37
ttcacaatcacacctcgctatgctg

SEQ ID NO: 89382 - DNA, 25 bp, Artificial
  probe
  misc_feature (1)..(25): SEQ ID NO: 6851; WAN024BPL_at; Start 20; Stop 44
tcacacctcgctatgctgaaattgt

SEQ ID NO: 89383 - DNA, 25 bp, Artificial
  probe
  misc_feature (1)..(25): SEQ ID NO: 6851; WAN024BPL_at; Start 59; Stop 83
tttatctacaattgtatcaagctgg

SEQ ID NO: 89384 - DNA, 25 bp, Artificial
  probe
  misc_feature (1)..(25): SEQ ID NO: 6851; WAN024BPL_at; Start 3; Stop 27
ggatttccttttcacaatcacacct

SEQ ID NO: 89385 - DNA, 25 bp, Artificial
  probe
  misc_feature (1)..(25): SEQ ID NO: 6662; WAN024BPM_at; Start 207; Stop 231
ctatctatttggaagttttcaagga

SEQ ID NO: 89386 - DNA, 25 bp, Artificial
  probe
  misc_feature (1)..(25): SEQ ID NO: 6662; WAN024BPM_at; Start 1182; Stop 1206
tcagagtactcttttaacatgcttt

SEQ ID NO: 89387 - DNA, 25 bp, Artificial
  probe
  misc_feature (1)..(25): SEQ ID NO: 6662; WAN024BPM_at; Start 602; Stop 626
ttatggcaacagaaaaaagaacagg

SEQ ID NO: 89388 - DNA, 25 bp, Artificial
  probe
  misc_feature (1)..(25): SEQ ID NO: 6662; WAN024BPM_at; Start 326; Stop 350
taataagagcatttacaaacatagg

SEQ ID NO: 89389 - DNA, 25 bp, Artificial
  probe
  misc_feature (1)..(25): SEQ ID NO: 6662; WAN024BPM_at; Start 555; Stop 579
gaaggctctcttacgtaatatacta

SEQ ID NO: 89390 - DNA, 25 bp, Artificial
  probe
  misc_feature (1)..(25): SEQ ID NO: 6662; WAN024BPM_at; Start 832; Stop 856
gacttttctgctatacataggtcaa

SEQ ID NO: 89391 - DNA, 25 bp, Artificial
  probe
  misc_feature (1)..(25): SEQ ID NO: 6662; WAN024BPM_at; Start 425; Stop 449
ctttggcgcagaaaatagaaacctt

SEQ ID NO: 89392 - DNA, 25 bp, Artificial
  probe
  misc_feature (1)..(25): SEQ ID NO: 6662; WAN024BPM_at; Start 788; Stop 812
ctcagatgataatagagaggttttc

SEQ ID NO: 89393 - DNA, 25 bp, Artificial
  probe
  misc_feature (1)..(25): SEQ ID NO: 6662; WAN024BPM_at; Start 774; Stop 798
tggtcgtagcatttctcagatgata

SEQ ID NO: 89394 - DNA, 25 bp, Artificial
  probe
  misc_feature (1)..(25): SEQ ID NO: 6662; WAN024BPM_at; Start 1107; Stop 1131
tatttcagaagtagttatgtttagc

SEQ ID NO: 89395 - DNA, 25 bp, Artificial
  probe
  misc_feature (1)..(25): SEQ ID NO: 6662; WAN024BPM_at; Start 1230; Stop 1254
tcatgattctagcaaaaggaaaggg

SEQ ID NO: 89396 - DNA, 25 bp, Artificial
  probe
  misc_feature (1)..(25): SEQ ID NO: 6662; WAN024BPM_at; Start 731; Stop 755
tcttgggatttgctttattagccat

SEQ ID NO: 89397 - DNA, 25 bp, Artificial
  probe
  misc_feature (1)..(25): SEQ ID NO: 6662; WAN024BPM_at; Start 759; Stop 783
tatgataacaatttctggtcgtagc

SEQ ID NO: 89398 - DNA, 25 bp, Artificial
  probe
  misc_feature (1)..(25): SEQ ID NO: 6662; WAN024BPM_at; Start 507; Stop 531
gacatctgtaatgctatcttctaca

SEQ ID NO: 89399 - DNA, 25 bp, Artificial
  probe
  misc_feature (1)..(25): SEQ ID NO: 6662; WAN024BPM_at; Start 849; Stop 873
taggtcaatggcttttaaaataggc

SEQ ID NO: 89400 - DNA, 25 bp, Artificial
  probe
  misc_feature (1)..(25): SEQ ID NO: 6662; WAN024BPM_at; Start 1027; Stop 1051
ggcatgatgcctttaataagtataa

SEQ ID NO: 89401 - DNA, 25 bp, Artificial
  probe
  misc_feature (1)..(25): SEQ ID NO: 6662; WAN024BPM_at; Start 1013; Stop 1037
ttttagccgattttggcatgatgcc

SEQ ID NO: 89402 - DNA, 25 bp, Artificial
  probe
  misc_feature (1)..(25): SEQ ID NO: 6662; WAN024BPM_at; Start 636; Stop 660
tagtatcgcgttgttgttctgttac

SEQ ID NO: 89403 - DNA, 25 bp, Artificial
  probe
  misc_feature (1)..(25): SEQ ID NO: 6662; WAN024BPM_at; Start 374; Stop 398
tagcagaagttttaagtcacggaca

SEQ ID NO: 89404 - DNA, 25 bp, Artificial
  probe
  misc_feature (1)..(25): SEQ ID NO: 6662; WAN024BPM_at; Start 490; Stop 514
tttgaaaatcccttagtgacatctg

SEQ ID NO: 89405 - DNA, 25 bp, Artificial
  probe
  misc_feature (1)..(25): SEQ ID NO: 6662; WAN024BPM_at; Start 143; Stop 167
tattgatatttgagcgtaaaatcgc

SEQ ID NO: 89406 - DNA, 25 bp, Artificial
  probe
  misc_feature (1)..(25): SEQ ID NO: 6662; WAN024BPM_at; Start 414; Stop 438
gaatcattatactttggcgcagaaa

SEQ ID NO: 89407 - DNA, 25 bp, Artificial
  probe
  misc_feature (1)..(25): SEQ ID NO: 6662; WAN024BPM_at; Start 1133; Stop 1157
taattgcattgcttttatcggcgag

SEQ ID NO: 89408 - DNA, 25 bp, Artificial
  probe
  misc_feature (1)..(25): SEQ ID NO: 6662; WAN024BPM_at; Start 1079; Stop 1103
agaatcttgtttcgaatgagactga

SEQ ID NO: 89409 - DNA, 25 bp, Artificial
  probe
  misc_feature (1)..(25): SEQ ID NO: 6662; WAN024BPM_at; Start 1167; Stop 1191
tattttaaactggtatcagagtact

SEQ ID NO: 89410 - DNA, 25 bp, Artificial
  probe
  misc_feature (1)..(25): SEQ ID NO: 6662; WAN024BPM_at; Start 1151; Stop 1175
cggcgagtgtgttcgatattttaaa

SEQ ID NO: 89411 - DNA, 25 bp, Artificial
  probe
  misc_feature (1)..(25): SEQ ID NO: 6662; WAN024BPM_at; Start 225; Stop 249
tcaaggatatgatagtggtggtgca

SEQ ID NO: 89412 - DNA, 25 bp, Artificial
  probe
  misc_feature (1)..(25): SEQ ID NO: 6662; WAN024BPM_at; Start 540; Stop 564
ttttatgactattgagaaggctctc

SEQ ID NO: 89413 - DNA, 25 bp, Artificial
  probe
  misc_feature (1)..(25): SEQ ID NO: 6662; WAN024BPM_at; Start 818; Stop 842
taagtagtggttcagacttttctgc

SEQ ID NO: 89414 - DNA, 25 bp, Artificial
  probe
  misc_feature (1)..(25): SEQ ID NO: 6662; WAN024BPM_at; Start 311; Stop 335
taccgcaatccaatttaataagagc

SEQ ID NO: 89415 - DNA, 25 bp, Artificial
  probe
  misc_feature (1)..(25): SEQ ID NO: 6662; WAN024BPM_at; Start 620; Stop 644
gaacaggaattctaattagtatcgc

SEQ ID NO: 89416 - DNA, 25 bp, Artificial
  probe
  misc_feature (1)..(25): SEQ ID NO: 6662; WAN024BPM_at; Start 358; Stop 382
aatacggtcattttattagcagaag

SEQ ID NO: 89417 - DNA, 25 bp, Artificial
  probe
  misc_feature (1)..(25): SEQ ID NO: 6662; WAN024BPM_at; Start 802; Stop 826
gagaggttttcatcattaagtagtg

SEQ ID NO: 89418 - DNA, 25 bp, Artificial
  probe
  misc_feature (1)..(25): SEQ ID NO: 6662; WAN024BPM_at; Start 702; Stop 726
tataataaaattcttgggaggattg

SEQ ID NO: 89419 - DNA, 25 bp, Artificial
  probe
  misc_feature (1)..(25): SEQ ID NO: 7150; WAN024BPN_at; Start 17; Stop 41
ctagagatatagtgatttataatgg

SEQ ID NO: 89420 - DNA, 25 bp, Artificial
  probe
  misc_feature (1)..(25): SEQ ID NO: 7150; WAN024BPN_at; Start 46; Stop 70
ccggttactatatattttagtattg

SEQ ID NO: 89421 - DNA, 25 bp, Artificial
  probe
  misc_feature (1)..(25): SEQ ID NO: 7150; WAN024BPN_at; Start 22; Stop 46
gatatagtgatttataatggcaaac

SEQ ID NO: 89422 - DNA, 25 bp, Artificial
  probe
  misc_feature (1)..(25): SEQ ID NO: 7150; WAN024BPN_at; Start 21; Stop 45
agatatagtgatttataatggcaaa

SEQ ID NO: 89423 - DNA, 25 bp, Artificial
  probe
  misc_feature (1)..(25): SEQ ID NO: 7150; WAN024BPN_at; Start 48; Stop 72
ggttactatatattttagtattgaa

SEQ ID NO: 89424 - DNA, 25 bp, Artificial
  probe
  misc_feature (1)..(25): SEQ ID NO: 7150; WAN024BPN_at; Start 3; Stop 27
gggttttattgaccctagagatata

SEQ ID NO: 89425 - DNA, 25 bp, Artificial
  probe
  misc_feature (1)..(25): SEQ ID NO: 7150; WAN024BPN_at; Start 16; Stop 40
cctagagatatagtgatttataatg

SEQ ID NO: 89426 - DNA, 25 bp, Artificial
  probe
  misc_feature (1)..(25): SEQ ID NO: 7150; WAN024BPN_at; Start 12; Stop 36
tgaccctagagatatagtgatttat

SEQ ID NO: 89427 - DNA, 25 bp, Artificial
  probe
  misc_feature (1)..(25): SEQ ID NO: 7150; WAN024BPN_at; Start 20; Stop 44
gagatatagtgatttataatggcaa

SEQ ID NO: 89428 - DNA, 25 bp, Artificial
  probe
  misc_feature (1)..(25): SEQ ID NO: 7150; WAN024BPN_at; Start 11; Stop 35
ttgaccctagagatatagtgattta

SEQ ID NO: 89429 - DNA, 25 bp, Artificial
  probe
  misc_feature (1)..(25): SEQ ID NO: 7150; WAN024BPN_at; Start 26; Stop 50
tagtgatttataatggcaaaccggt

SEQ ID NO: 89430 - DNA, 25 bp, Artificial
  probe
  misc_feature (1)..(25): SEQ ID NO: 7150; WAN024BPN_at; Start 25; Stop 49
atagtgatttataatggcaaaccgg

SEQ ID NO: 89431 - DNA, 25 bp, Artificial
  probe
  misc_feature (1)..(25): SEQ ID NO: 7150; WAN024BPN_at; Start 7; Stop 31
tttattgaccctagagatatagtga

SEQ ID NO: 89432 - DNA, 25 bp, Artificial
  probe
  misc_feature (1)..(25): SEQ ID NO: 7150; WAN024BPN_at; Start 9; Stop 33
tattgaccctagagatatagtgatt

SEQ ID NO: 89433 - DNA, 25 bp, Artificial
  probe
  misc_feature (1)..(25): SEQ ID NO: 7150; WAN024BPN_at; Start 23; Stop 47
atatagtgatttataatggcaaacc

SEQ ID NO: 89434 - DNA, 25 bp, Artificial
  probe
  misc_feature (1)..(25): SEQ ID NO: 7150; WAN024BPN_at; Start 18; Stop 42
tagagatatagtgatttataatggc

SEQ ID NO: 89435 - DNA, 25 bp, Artificial
  probe
  misc_feature (1)..(25): SEQ ID NO: 7150; WAN024BPN_at; Start 82; Stop 106
aatggtgaaaattattcctctcaca

SEQ ID NO: 89436 - DNA, 25 bp, Artificial
  probe
  misc_feature (1)..(25): SEQ ID NO: 7150; WAN024BPN_at; Start 10; Stop 34
attgaccctagagatatagtgattt

SEQ ID NO: 89437 - DNA, 25 bp, Artificial
  probe
  misc_feature (1)..(25): SEQ ID NO: 7150; WAN024BPN_at; Start 6; Stop 30
ttttattgaccctagagatatagtg

SEQ ID NO: 89438 - DNA, 25 bp, Artificial
  probe
  misc_feature (1)..(25): SEQ ID NO: 7150; WAN024BPN_at; Start 47; Stop 71
cggttactatatattttagtattga

SEQ ID NO: 89439 - DNA, 25 bp, Artificial
  probe
  misc_feature (1)..(25): SEQ ID NO: 7150; WAN024BPN_at; Start 14; Stop 38
accctagagatatagtgatttataa

SEQ ID NO: 89440 - DNA, 25 bp, Artificial
  probe
  misc_feature (1)..(25): SEQ ID NO: 7150; WAN024BPN_at; Start 13; Stop 37
gaccctagagatatagtgatttata

SEQ ID NO: 89441 - DNA, 25 bp, Artificial
  probe
  misc_feature (1)..(25): SEQ ID NO: 7150; WAN024BPN_at; Start 27; Stop 51
agtgatttataatggcaaaccggtt

SEQ ID NO: 89442 - DNA, 25 bp, Artificial
  probe
  misc_feature (1)..(25): SEQ ID NO: 7150; WAN024BPN_at; Start 8; Stop 32
ttattgaccctagagatatagtgat

SEQ ID NO: 89443 - DNA, 25 bp, Artificial
  probe
  misc_feature (1)..(25): SEQ ID NO: 7150; WAN024BPN_at; Start 15; Stop 39
ccctagagatatagtgatttataat

SEQ ID NO: 89444 - DNA, 25 bp, Artificial
  probe
  misc_feature (1)..(25): SEQ ID NO: 7150; WAN024BPN_at; Start 19; Stop 43
agagatatagtgatttataatggca

SEQ ID NO: 89445 - DNA, 25 bp, Artificial
  probe
  misc_feature (1)..(25): SEQ ID NO: 7150; WAN024BPN_at; Start 24; Stop 48
tatagtgatttataatggcaaaccg

SEQ ID NO: 89446 - DNA, 25 bp, Artificial
  probe
  misc_feature (1)..(25): SEQ ID NO: 7150; WAN024BPN_at; Start 4; Stop 28
ggttttattgaccctagagatatag

SEQ ID NO: 89447 - DNA, 25 bp, Artificial
  probe
  misc_feature (1)..(25): SEQ ID NO: 7150; WAN024BPN_at; Start 53; Stop 77
ctatatattttagtattgaaaaact

SEQ ID NO: 89448 - DNA, 25 bp, Artificial
  probe
  misc_feature (1)..(25): SEQ ID NO: 7150; WAN024BPN_at; Start 83; Stop 107
atggtgaaaattattcctctcacac

SEQ ID NO: 89449 - DNA, 25 bp, Artificial
  probe
  misc_feature (1)..(25): SEQ ID NO: 7150; WAN024BPN_at; Start 5; Stop 29
gttttattgaccctagagatatagt

SEQ ID NO: 89450 - DNA, 25 bp, Artificial
  probe
  misc_feature (1)..(25): SEQ ID NO: 6719; WAN024BPO_at; Start 636; Stop 660
tgataagtatggagcttacggttcc

SEQ ID NO: 89451 - DNA, 25 bp, Artificial
  probe
  misc_feature (1)..(25): SEQ ID NO: 6719; WAN024BPO_at; Start 391; Stop 415
caaagtaagaatttcagcacaatgc

SEQ ID NO: 89452 - DNA, 25 bp, Artificial
  probe
  misc_feature (1)..(25): SEQ ID NO: 6719; WAN024BPO_at; Start 510; Stop 534
tgcgtccatcttgataacagcaaca

SEQ ID NO: 89453 - DNA, 25 bp, Artificial
  probe
  misc_feature (1)..(25): SEQ ID NO: 6719; WAN024BPO_at; Start 315; Stop 339
gctttgcgataccaatattgagaat

SEQ ID NO: 89454 - DNA, 25 bp, Artificial
  probe
  misc_feature (1)..(25): SEQ ID NO: 6719; WAN024BPO_at; Start 639; Stop 663
taagtatggagcttacggttcctat

SEQ ID NO: 89455 - DNA, 25 bp, Artificial
  probe
  misc_feature (1)..(25): SEQ ID NO: 6719; WAN024BPO_at; Start 407; Stop 431
gcacaatgcttggaaccttgcgtaa

SEQ ID NO: 89456 - DNA, 25 bp, Artificial
  probe
  misc_feature (1)..(25): SEQ ID NO: 6719; WAN024BPO_at; Start 614; Stop 638
taaataaattggatatctcggttga

SEQ ID NO: 89457 - DNA, 25 bp, Artificial
  probe
  misc_feature (1)..(25): SEQ ID NO: 6719; WAN024BPO_at; Start 657; Stop 681
ttcctatggaaattatggcaaaaaa

SEQ ID NO: 89458 - DNA, 25 bp, Artificial
  probe
  misc_feature (1)..(25): SEQ ID NO: 6719; WAN024BPO_at; Start 645; Stop 669
tggagcttacggttcctatggaaat

SEQ ID NO: 89459 - DNA, 25 bp, Artificial
  probe
  misc_feature (1)..(25): SEQ ID NO: 6719; WAN024BPO_at; Start 630; Stop 654
ctcggttgataagtatggagcttac

SEQ ID NO: 89460 - DNA, 25 bp, Artificial
  probe
  misc_feature (1)..(25): SEQ ID NO: 6719; WAN024BPO_at; Start 387; Stop 411
tcttcaaagtaagaatttcagcaca

SEQ ID NO: 89461 - DNA, 25 bp, Artificial
  probe
  misc_feature (1)..(25): SEQ ID NO: 6719; WAN024BPO_at; Start 518; Stop 542
tcttgataacagcaacaggtgaggt

SEQ ID NO: 89462 - DNA, 25 bp, Artificial
  probe
  misc_feature (1)..(25): SEQ ID NO: 6719; WAN024BPO_at; Start 587; Stop 611
cagggaaactgttcctgggagttgt

SEQ ID NO: 89463 - DNA, 25 bp, Artificial
  probe
  misc_feature (1)..(25): SEQ ID NO: 6719; WAN024BPO_at; Start 521; Stop 545
tgataacagcaacaggtgaggtgaa

SEQ ID NO: 89464 - DNA, 25 bp, Artificial
  probe
  misc_feature (1)..(25): SEQ ID NO: 6719; WAN024BPO_at; Start 514; Stop 538
tccatcttgataacagcaacaggtg

SEQ ID NO: 89465 - DNA, 25 bp, Artificial
  probe
  misc_feature (1)..(25): SEQ ID NO: 6719; WAN024BPO_at; Start 523; Stop 547
ataacagcaacaggtgaggtgaata

SEQ ID NO: 89466 - DNA, 25 bp, Artificial
  probe
  misc_feature (1)..(25): SEQ ID NO: 6719; WAN024BPO_at; Start 652; Stop 676
tacggttcctatggaaattatggca

SEQ ID NO: 89467 - DNA, 25 bp, Artificial
  probe
  misc_feature (1)..(25): SEQ ID NO: 6719; WAN024BPO_at; Start 655; Stop 679
ggttcctatggaaattatggcaaaa

SEQ ID NO: 89468 - DNA, 25 bp, Artificial
  probe
  misc_feature (1)..(25): SEQ ID NO: 6719; WAN024BPO_at; Start 105; Stop 129
gaaagtattttctatcacttctgtg

SEQ ID NO: 89469 - DNA, 25 bp, Artificial
  probe
  misc_feature (1)..(25): SEQ ID NO: 6719; WAN024BPO_at; Start 399; Stop 423
gaatttcagcacaatgcttggaacc

SEQ ID NO: 89470 - DNA, 25 bp, Artificial
  probe
  misc_feature (1)..(25): SEQ ID NO: 6719; WAN024BPO_at; Start 26; Stop 50
tgaaattagaacttgcgaaaaaggc

SEQ ID NO: 89471 - DNA, 25 bp, Artificial
  probe
  misc_feature (1)..(25): SEQ ID NO: 6719; WAN024BPO_at; Start 624; Stop 648
ggatatctcggttgataagtatgga

SEQ ID NO: 89472 - DNA, 25 bp, Artificial
  probe
  misc_feature (1)..(25): SEQ ID NO: 6719; WAN024BPO_at; Start 395; Stop 419
gtaagaatttcagcacaatgcttgg

SEQ ID NO: 89473 - DNA, 25 bp, Artificial
  probe
  misc_feature (1)..(25): SEQ ID NO: 6719; WAN024BPO_at; Start 642; Stop 666
gtatggagcttacggttcctatgga

SEQ ID NO: 89474 - DNA, 25 bp, Artificial
  probe
  misc_feature (1)..(25): SEQ ID NO: 6719; WAN024BPO_at; Start 618; Stop 642
taaattggatatctcggttgataag

SEQ ID NO: 89475 - DNA, 25 bp, Artificial
  probe
  misc_feature (1)..(25): SEQ ID NO: 6719; WAN024BPO_at; Start 313; Stop 337
gggctttgcgataccaatattgaga

SEQ ID NO: 89476 - DNA, 25 bp, Artificial
  probe
  misc_feature (1)..(25): SEQ ID NO: 6719; WAN024BPO_at; Start 627; Stop 651
tatctcggttgataagtatggagct

SEQ ID NO: 89477 - DNA, 25 bp, Artificial
  probe
  misc_feature (1)..(25): SEQ ID NO: 6719; WAN024BPO_at; Start 408; Stop 432
cacaatgcttggaaccttgcgtaaa

SEQ ID NO: 89478 - DNA, 25 bp, Artificial
  probe
  misc_feature (1)..(25): SEQ ID NO: 6719; WAN024BPO_at; Start 118; Stop 142
atcacttctgtgaaagcaggagaag

SEQ ID NO: 89479 - DNA, 25 bp, Artificial
  probe
  misc_feature (1)..(25): SEQ ID NO: 6719; WAN024BPO_at; Start 583; Stop 607
caaacagggaaactgttcctgggag

SEQ ID NO: 89480 - DNA, 25 bp, Artificial
  probe
  misc_feature (1)..(25): SEQ ID NO: 6719; WAN024BPO_at; Start 516; Stop 540
catcttgataacagcaacaggtgag

SEQ ID NO: 89481 - DNA, 25 bp, Artificial
  probe
  misc_feature (1)..(25): SEQ ID NO: 6719; WAN024BPO_at; Start 404; Stop 428
tcagcacaatgcttggaaccttgcg

SEQ ID NO: 89482 - DNA, 25 bp, Artificial
  probe
  misc_feature (1)..(25): SEQ ID NO: 6719; WAN024BPO_at; Start 512; Stop 536
cgtccatcttgataacagcaacagg

SEQ ID NO: 89483 - DNA, 25 bp, Artificial
  probe
  misc_feature (1)..(25): SEQ ID NO: 6719; WAN024BPO_at; Start 647; Stop 671
gagcttacggttcctatggaaatta

SEQ ID NO: 89484 - DNA, 25 bp, Artificial
  probe
  misc_feature (1)..(25): SEQ ID NO: 7230; WAN024BPP_at; Start 1; Stop 25
gtgaagaactatattgcccatatac

SEQ ID NO: 89485 - DNA, 25 bp, Artificial
  probe
  misc_feature (1)..(25): SEQ ID NO: 7230; WAN024BPP_at; Start 7; Stop 31
aactatattgcccatatacttgggg

SEQ ID NO: 89486 - DNA, 25 bp, Artificial
  probe
  misc_feature (1)..(25): SEQ ID NO: 7230; WAN024BPP_at; Start 30; Stop 54
ggaagaaaatattattccgactctg

SEQ ID NO: 89487 - DNA, 25 bp, Artificial
  probe
  misc_feature (1)..(25): SEQ ID NO: 7230; WAN024BPP_at; Start 12; Stop 36
tattgcccatatacttggggaagaa

SEQ ID NO: 89488 - DNA, 25 bp, Artificial
  probe
  misc_feature (1)..(25): SEQ ID NO: 7230; WAN024BPP_at; Start 4; Stop 28
aagaactatattgcccatatacttg

SEQ ID NO: 89489 - DNA, 25 bp, Artificial
  probe
  misc_feature (1)..(25): SEQ ID NO: 7230; WAN024BPP_at; Start 2; Stop 26
tgaagaactatattgcccatatact

SEQ ID NO: 89490 - DNA, 25 bp, Artificial
  probe
  misc_feature (1)..(25): SEQ ID NO: 7230; WAN024BPP_at; Start 19; Stop 43
catatacttggggaagaaaatatta

SEQ ID NO: 89491 - DNA, 25 bp, Artificial
  probe
  misc_feature (1)..(25): SEQ ID NO: 7230; WAN024BPP_at; Start 33; Stop 57
agaaaatattattccgactctgggt

SEQ ID NO: 89492 - DNA, 25 bp, Artificial
  probe
  misc_feature (1)..(25): SEQ ID NO: 7230; WAN024BPP_at; Start 17; Stop 41
cccatatacttggggaagaaaatat

SEQ ID NO: 89493 - DNA, 25 bp, Artificial
  probe
  misc_feature (1)..(25): SEQ ID NO: 7230; WAN024BPP_at; Start 8; Stop 32
actatattgcccatatacttgggga

SEQ ID NO: 89494 - DNA, 25 bp, Artificial
  probe
  misc_feature (1)..(25): SEQ ID NO: 7230; WAN024BPP_at; Start 5; Stop 29
agaactatattgcccatatacttgg

SEQ ID NO: 89495 - DNA, 25 bp, Artificial
  probe
  misc_feature (1)..(25): SEQ ID NO: 7230; WAN024BPP_at; Start 44; Stop 68
ttccgactctgggtgtttataatcg

SEQ ID NO: 89496 - DNA, 25 bp, Artificial
  probe
  misc_feature (1)..(25): SEQ ID NO: 7230; WAN024BPP_at; Start 49; Stop 73
actctgggtgtttataatcgttttg

SEQ ID NO: 89497 - DNA, 25 bp, Artificial
  probe
  misc_feature (1)..(25): SEQ ID NO: 7230; WAN024BPP_at; Start 3; Stop 27
gaagaactatattgcccatatactt

SEQ ID NO: 89498 - DNA, 25 bp, Artificial
  probe
  misc_feature (1)..(25): SEQ ID NO: 7230; WAN024BPP_at; Start 45; Stop 69
tccgactctgggtgtttataatcgt

SEQ ID NO: 89499 - DNA, 25 bp, Artificial
  probe
  misc_feature (1)..(25): SEQ ID NO: 7230; WAN024BPP_at; Start 46; Stop 70
ccgactctgggtgtttataatcgtt

SEQ ID NO: 89500 - DNA, 25 bp, Artificial
  probe
  misc_feature (1)..(25): SEQ ID NO: 7230; WAN024BPP_at; Start 31; Stop 55
gaagaaaatattattccgactctgg

SEQ ID NO: 89501 - DNA, 25 bp, Artificial
  probe
  misc_feature (1)..(25): SEQ ID NO: 7230; WAN024BPP_at; Start 34; Stop 58
gaaaatattattccgactctgggtg

SEQ ID NO: 89502 - DNA, 25 bp, Artificial
  probe
  misc_feature (1)..(25): SEQ ID NO: 7230; WAN024BPP_at; Start 13; Stop 37
attgcccatatacttggggaagaaa

SEQ ID NO: 89503 - DNA, 25 bp, Artificial
  probe
  misc_feature (1)..(25): SEQ ID NO: 7230; WAN024BPP_at; Start 71; Stop 95
ttgatgagattcattttgtttcgca

SEQ ID NO: 89504 - DNA, 25 bp, Artificial
  probe
  misc_feature (1)..(25): SEQ ID NO: 7230; WAN024BPP_at; Start 36; Stop 60
aaatattattccgactctgggtgtt

SEQ ID NO: 89505 - DNA, 25 bp, Artificial
  probe
  misc_feature (1)..(25): SEQ ID NO: 7230; WAN024BPP_at; Start 9; Stop 33
ctatattgcccatatacttggggaa

SEQ ID NO: 89506 - DNA, 25 bp, Artificial
  probe
  misc_feature (1)..(25): SEQ ID NO: 7230; WAN024BPP_at; Start 32; Stop 56
aagaaaatattattccgactctggg

SEQ ID NO: 89507 - DNA, 25 bp, Artificial
  probe
  misc_feature (1)..(25): SEQ ID NO: 7230; WAN024BPP_at; Start 6; Stop 30
gaactatattgcccatatacttggg

SEQ ID NO: 89508 - DNA, 25 bp, Artificial
  probe
  misc_feature (1)..(25): SEQ ID NO: 7230; WAN024BPP_at; Start 35; Stop 59
aaaatattattccgactctgggtgt

SEQ ID NO: 89509 - DNA, 25 bp, Artificial
  probe
  misc_feature (1)..(25): SEQ ID NO: 7230; WAN024BPP_at; Start 37; Stop 61
aatattattccgactctgggtgttt

SEQ ID NO: 89510 - DNA, 25 bp, Artificial
  probe
  misc_feature (1)..(25): SEQ ID NO: 7230; WAN024BPP_at; Start 70; Stop 94
tttgatgagattcattttgtttcgc

SEQ ID NO: 89511 - DNA, 25 bp, Artificial
  probe
  misc_feature (1)..(25): SEQ ID NO: 7230; WAN024BPP_at; Start 14; Stop 38
ttgcccatatacttggggaagaaaa

SEQ ID NO: 89512 - DNA, 25 bp, Artificial
  probe
  misc_feature (1)..(25): SEQ ID NO: 7230; WAN024BPP_at; Start 47; Stop 71
cgactctgggtgtttataatcgttt

SEQ ID NO: 89513 - DNA, 25 bp, Artificial
  probe
  misc_feature (1)..(25): SEQ ID NO: 7230; WAN024BPP_at; Start 73; Stop 97
gatgagattcattttgtttcgcagg

SEQ ID NO: 89514 - DNA, 25 bp, Artificial
  probe
  misc_feature (1)..(25): SEQ ID NO: 7230; WAN024BPP_at; Start 72; Stop 96
tgatgagattcattttgtttcgcag

SEQ ID NO: 89515 - DNA, 25 bp, Artificial
  probe
  misc_feature (1)..(25): SEQ ID NO: 7230; WAN024BPP_at; Start 15; Stop 39
tgcccatatacttggggaagaaaat

SEQ ID NO: 89516 - DNA, 25 bp, Artificial
  probe
  misc_feature (1)..(25): SEQ ID NO: 7230; WAN024BPP_at; Start 10; Stop 34
tatattgcccatatacttggggaag

SEQ ID NO: 89517 - DNA, 25 bp, Artificial
  probe
  misc_feature (1)..(25): SEQ ID NO: 7230; WAN024BPP_at; Start 16; Stop 40
gcccatatacttggggaagaaaata

SEQ ID NO: 89518 - DNA, 25 bp, Artificial
  probe
  misc_feature (1)..(25): SEQ ID NO: 6451; WAN024BPQ_x_at; Start 20; Stop 44
agttgatacaacaattaccggataa

SEQ ID NO: 89519 - DNA, 25 bp, Artificial
  probe
  misc_feature (1)..(25): SEQ ID NO: 6451; WAN024BPQ_x_at; Start 23; Stop 47
tgatacaacaattaccggataaact

SEQ ID NO: 89520 - DNA, 25 bp, Artificial
  probe
  misc_feature (1)..(25): SEQ ID NO: 6451; WAN024BPQ_x_at; Start 46; Stop 70
ctatttctacaaattaaatactact

SEQ ID NO: 89521 - DNA, 25 bp, Artificial
  probe
  misc_feature (1)..(25): SEQ ID NO: 6451; WAN024BPQ_x_at; Start 21; Stop 45
gttgatacaacaattaccggataaa

SEQ ID NO: 89522 - DNA, 25 bp, Artificial
  probe
  misc_feature (1)..(25): SEQ ID NO: 6451; WAN024BPQ_x_at; Start 24; Stop 48
gatacaacaattaccggataaacta

SEQ ID NO: 89523 - DNA, 25 bp, Artificial
  probe
  misc_feature (1)..(25): SEQ ID NO: 6451; WAN024BPQ_x_at; Start 19; Stop 43
aagttgatacaacaattaccggata

SEQ ID NO: 89524 - DNA, 25 bp, Artificial
  probe
  misc_feature (1)..(25): SEQ ID NO: 6451; WAN024BPQ_x_at; Start 18; Stop 42
aaagttgatacaacaattaccggat

SEQ ID NO: 89525 - DNA, 25 bp, Artificial
  probe
  misc_feature (1)..(25): SEQ ID NO: 6451; WAN024BPQ_x_at; Start 22; Stop 46
ttgatacaacaattaccggataaac

SEQ ID NO: 89526 - DNA, 25 bp, Artificial
  probe
  misc_feature (1)..(25): SEQ ID NO: 6451; WAN024BPQ_x_at; Start 25; Stop 49
atacaacaattaccggataaactat

SEQ ID NO: 89527 - DNA, 25 bp, Artificial
  probe
  misc_feature (1)..(25): SEQ ID NO: 6451; WAN024BPQ_x_at; Start 47; Stop 71
tatttctacaaattaaatactacta

SEQ ID NO: 89528 - DNA, 25 bp, Artificial
  probe
  misc_feature (1)..(25): SEQ ID NO: 6620; WAN024BPR_at; Start 210; Stop 234
tagacatggaggctttattccatgg

SEQ ID NO: 89529 - DNA, 25 bp, Artificial
  probe
  misc_feature (1)..(25): SEQ ID NO: 6620; WAN024BPR_at; Start 377; Stop 401
gagatactaactctgaatatataaa

SEQ ID NO: 89530 - DNA, 25 bp, Artificial
  probe
  misc_feature (1)..(25): SEQ ID NO: 6620; WAN024BPR_at; Start 421; Stop 445
cagcgtaaatacagaggtgtacaaa

SEQ ID NO: 89531 - DNA, 25 bp, Artificial
  probe
  misc_feature (1)..(25): SEQ ID NO: 6620; WAN024BPR_at; Start 533; Stop 557
tagggaaaataaaatgttggcagca

SEQ ID NO: 89532 - DNA, 25 bp, Artificial
  probe
  misc_feature (1)..(25): SEQ ID NO: 6620; WAN024BPR_at; Start 114; Stop 138
agttcgtatgattgatatgctttct

SEQ ID NO: 89533 - DNA, 25 bp, Artificial
  probe
  misc_feature (1)..(25): SEQ ID NO: 6620; WAN024BPR_at; Start 356; Stop 380
taaggtattatagtgttctcagaga

SEQ ID NO: 89534 - DNA, 25 bp, Artificial
  probe
  misc_feature (1)..(25): SEQ ID NO: 6620; WAN024BPR_at; Start 226; Stop 250
attccatgggatgataatctttata

SEQ ID NO: 89535 - DNA, 25 bp, Artificial
  probe
  misc_feature (1)..(25): SEQ ID NO: 6620; WAN024BPR_at; Start 17; Stop 41
tgattatgccaaaaaataaagttta

SEQ ID NO: 89536 - DNA, 25 bp, Artificial
  probe
  misc_feature (1)..(25): SEQ ID NO: 6620; WAN024BPR_at; Start 337; Stop 361
tctagtgataaaggatttgtaaggt

SEQ ID NO: 89537 - DNA, 25 bp, Artificial
  probe
  misc_feature (1)..(25): SEQ ID NO: 6620; WAN024BPR_at; Start 101; Stop 125
tgaggaaagttcaagttcgtatgat

SEQ ID NO: 89538 - DNA, 25 bp, Artificial
  probe
  misc_feature (1)..(25): SEQ ID NO: 6620; WAN024BPR_at; Start 184; Stop 208
gcttttggaactctattaggagcta

SEQ ID NO: 89539 - DNA, 25 bp, Artificial
  probe
  misc_feature (1)..(25): SEQ ID NO: 6620; WAN024BPR_at; Start 89; Stop 113
aaggtagtgagttgaggaaagttca

SEQ ID NO: 89540 - DNA, 25 bp, Artificial
  probe
  misc_feature (1)..(25): SEQ ID NO: 6620; WAN024BPR_at; Start 168; Stop 192
catcacctatttcattgcttttgga

SEQ ID NO: 89541 - DNA, 25 bp, Artificial
  probe
  misc_feature (1)..(25): SEQ ID NO: 6620; WAN024BPR_at; Start 5; Stop 29
taaagagttttttgattatgccaaa

SEQ ID NO: 89542 - DNA, 25 bp, Artificial
  probe
  misc_feature (1)..(25): SEQ ID NO: 6620; WAN024BPR_at; Start 75; Stop 99
taaatacaattatgaaggtagtgag

SEQ ID NO: 89543 - DNA, 25 bp, Artificial
  probe
  misc_feature (1)..(25): SEQ ID NO: 6620; WAN024BPR_at; Start 50; Stop 74
gcgagacagacattgagttgaaaaa

SEQ ID NO: 89544 - DNA, 25 bp, Artificial
  probe
  misc_feature (1)..(25): SEQ ID NO: 6620; WAN024BPR_at; Start 150; Stop 174
tatatgcaaagaaaataacatcacc

SEQ ID NO: 89545 - DNA, 25 bp, Artificial
  probe
  misc_feature (1)..(25): SEQ ID NO: 6620; WAN024BPR_at; Start 307; Stop 331
ggaaactatccctatgttattcaag

SEQ ID NO: 89546 - DNA, 25 bp, Artificial
  probe
  misc_feature (1)..(25): SEQ ID NO: 6620; WAN024BPR_at; Start 448; Stop 472
gacttattcccttatggttatggtg

SEQ ID NO: 89547 - DNA, 25 bp, Artificial
  probe
  misc_feature (1)..(25): SEQ ID NO: 6620; WAN024BPR_at; Start 136; Stop 160
tcttttttgaatgatatatgcaaag

SEQ ID NO: 89548 - DNA, 25 bp, Artificial
  probe
  misc_feature (1)..(25): SEQ ID NO: 6620; WAN024BPR_at; Start 198; Stop 222
attaggagctattagacatggaggc

SEQ ID NO: 89549 - DNA, 25 bp, Artificial
  probe
  misc_feature (1)..(25): SEQ ID NO: 6620; WAN024BPR_at; Start 434; Stop 458
gaggtgtacaaattgacttattccc

SEQ ID NO: 89550 - DNA, 25 bp, Artificial
  probe
  misc_feature (1)..(25): SEQ ID NO: 6620; WAN024BPR_at; Start 296; Stop 320
taattaataatggaaactatcccta

SEQ ID NO: 89551 - DNA, 25 bp, Artificial
  probe
  misc_feature (1)..(25): SEQ ID NO: 6620; WAN024BPR_at; Start 180; Stop 204
cattgcttttggaactctattagga

SEQ ID NO: 89552 - DNA, 25 bp, Artificial
  probe
  misc_feature (1)..(25): SEQ ID NO: 6620; WAN024BPR_at; Start 315; Stop 339
tccctatgttattcaagactattct

SEQ ID NO: 89553 - DNA, 25 bp, Artificial
  probe
  misc_feature (1)..(25): SEQ ID NO: 6620; WAN024BPR_at; Start 366; Stop 390
tagtgttctcagagatactaactct

SEQ ID NO: 89554 - DNA, 25 bp, Artificial
  probe
  misc_feature (1)..(25): SEQ ID NO: 6620; WAN024BPR_at; Start 45; Stop 69
tactggcgagacagacattgagttg

SEQ ID NO: 89555 - DNA, 25 bp, Artificial
  probe
  misc_feature (1)..(25): SEQ ID NO: 6620; WAN024BPR_at; Start 415; Stop 439
cataatcagcgtaaatacagaggtg

SEQ ID NO: 89556 - DNA, 25 bp, Artificial
  probe
  misc_feature (1)..(25): SEQ ID NO: 6620; WAN024BPR_at; Start 487; Stop 511
gaacgtcttattggaaaaatatatg

SEQ ID NO: 89557 - DNA, 25 bp, Artificial
  probe
  misc_feature (1)..(25): SEQ ID NO: 6620; WAN024BPR_at; Start 401; Stop 425
aaaatgaatatcaacataatcagcg

SEQ ID NO: 89558 - DNA, 25 bp, Artificial
  probe
  misc_feature (1)..(25): SEQ ID NO: 6620; WAN024BPR_at; Start 40; Stop 64
tataatactggcgagacagacattg

SEQ ID NO: 89559 - DNA, 25 bp, Artificial
  probe
  misc_feature (1)..(25): SEQ ID NO: 6620; WAN024BPR_at; Start 328; Stop 352
caagactattctagtgataaaggat

SEQ ID NO: 89560 - DNA, 25 bp, Artificial
  probe
  misc_feature (1)..(25): SEQ ID NO: 6620; WAN024BPR_at; Start 456; Stop 480
cccttatggttatggtgtaatgaaa

SEQ ID NO: 89561 - DNA, 25 bp, Artificial
  probe
  misc_feature (1)..(25): SEQ ID NO: 6620; WAN024BPR_at; Start 33; Stop 57
taaagtttataatactggcgagaca

SEQ ID NO: 89562 - DNA, 25 bp, Artificial
  probe
  misc_feature (1)..(25): SEQ ID NO: 6456; WAN024BPS_at; Start 480; Stop 504
agcaaaatacggtgcaggagaggac

SEQ ID NO: 89563 - DNA, 25 bp, Artificial
  probe
  misc_feature (1)..(25): SEQ ID NO: 6456; WAN024BPS_at; Start 201; Stop 225
gagatcggatgctgatattattcaa

SEQ ID NO: 89564 - DNA, 25 bp, Artificial
  probe
  misc_feature (1)..(25): SEQ ID NO: 6456; WAN024BPS_at; Start 33; Stop 57
tcaacaggataacagtctgatagag

SEQ ID NO: 89565 - DNA, 25 bp, Artificial
  probe
  misc_feature (1)..(25): SEQ ID NO: 6456; WAN024BPS_at; Start 3; Stop 27
gaagtatcaactcattgtatcaaca

SEQ ID NO: 89566 - DNA, 25 bp, Artificial
  probe
  misc_feature (1)..(25): SEQ ID NO: 6456; WAN024BPS_at; Start 581; Stop 605
aagattcttctacatggtttaaagg

SEQ ID NO: 89567 - DNA, 25 bp, Artificial
  probe
  misc_feature (1)..(25): SEQ ID NO: 6456; WAN024BPS_at; Start 18; Stop 42
tgtatcaacaatgaatcaacaggat

SEQ ID NO: 89568 - DNA, 25 bp, Artificial
  probe
  misc_feature (1)..(25): SEQ ID NO: 6456; WAN024BPS_at; Start 437; Stop 461
tattgcataataacataacgttttc

SEQ ID NO: 89569 - DNA, 25 bp, Artificial
  probe
  misc_feature (1)..(25): SEQ ID NO: 6456; WAN024BPS_at; Start 498; Stop 522
agaggacgtaacatttattcaggac

SEQ ID NO: 89570 - DNA, 25 bp, Artificial
  probe
  misc_feature (1)..(25): SEQ ID NO: 6456; WAN024BPS_at; Start 137; Stop 161
cgattgtaaaatggtatgaattcaa

SEQ ID NO: 89571 - DNA, 25 bp, Artificial
  probe
  misc_feature (1)..(25): SEQ ID NO: 6456; WAN024BPS_at; Start 566; Stop 590
tttctacaatgaaacaagattcttc

SEQ ID NO: 89572 - DNA, 25 bp, Artificial
  probe
  misc_feature (1)..(25): SEQ ID NO: 6456; WAN024BPS_at; Start 513; Stop 537
tattcaggactgtatcaaggcagga

SEQ ID NO: 89573 - DNA, 25 bp, Artificial
  probe
  misc_feature (1)..(25): SEQ ID NO: 6456; WAN024BPS_at; Start 396; Stop 420
taagtttggtggtgctagaattaca

SEQ ID NO: 89574 - DNA, 25 bp, Artificial
  probe
  misc_feature (1)..(25): SEQ ID NO: 6456; WAN024BPS_at; Start 328; Stop 352
tgtcttaatgaagatcgaatgcctt

SEQ ID NO: 89575 - DNA, 25 bp, Artificial
  probe
  misc_feature (1)..(25): SEQ ID NO: 6456; WAN024BPS_at; Start 249; Stop 273
tacagatacatattatgaagacgta

SEQ ID NO: 89576 - DNA, 25 bp, Artificial
  probe
  misc_feature (1)..(25): SEQ ID NO: 6456; WAN024BPS_at; Start 234; Stop 258
tgacgatatgatttttacagataca

SEQ ID NO: 89577 - DNA, 25 bp, Artificial
  probe
  misc_feature (1)..(25): SEQ ID NO: 6456; WAN024BPS_at; Start 419; Stop 443
cagtcaggagagaaaagatattgca

SEQ ID NO: 89578 - DNA, 25 bp, Artificial
  probe
  misc_feature (1)..(25): SEQ ID NO: 6456; WAN024BPS_at; Start 406; Stop 430
ggtgctagaattacagtcaggagag

SEQ ID NO: 89579 - DNA, 25 bp, Artificial
  probe
  misc_feature (1)..(25): SEQ ID NO: 6456; WAN024BPS_at; Start 630; Stop 654
taaaggtgctttattagcagcaaat

SEQ ID NO: 89580 - DNA, 25 bp, Artificial
  probe
  misc_feature (1)..(25): SEQ ID NO: 6456; WAN024BPS_at; Start 340; Stop 364
gatcgaatgccttatcaggttaata

SEQ ID NO: 89581 - DNA, 25 bp, Artificial
  probe
  misc_feature (1)..(25): SEQ ID NO: 6456; WAN024BPS_at; Start 219; Stop 243
tattcaatttgctgatgacgatatg

SEQ ID NO: 89582 - DNA, 25 bp, Artificial
  probe
  misc_feature (1)..(25): SEQ ID NO: 6456; WAN024BPS_at; Start 99; Stop 123
aaactcattttcttaccatgagacg

SEQ ID NO: 89583 - DNA, 25 bp, Artificial
  probe
  misc_feature (1)..(25): SEQ ID NO: 6456; WAN024BPS_at; Start 649; Stop 673
gcaaatttcccttctataagtgagg

SEQ ID NO: 89584 - DNA, 25 bp, Artificial
  probe
  misc_feature (1)..(25): SEQ ID NO: 6456; WAN024BPS_at; Start 162; Stop 186
tgaaagaggtattggtttaagtcga

SEQ ID NO: 89585 - DNA, 25 bp, Artificial
  probe
  misc_feature (1)..(25): SEQ ID NO: 6456; WAN024BPS_at; Start 672; Stop 696
ggtaggagtatatatacaagctttc

SEQ ID NO: 89586 - DNA, 25 bp, Artificial
  probe
  misc_feature (1)..(25): SEQ ID NO: 6456; WAN024BPS_at; Start 280; Stop 304
gaatatcaaaaacatccagaagctg

SEQ ID NO: 89587 - DNA, 25 bp, Artificial
  probe
  misc_feature (1)..(25): SEQ ID NO: 6456; WAN024BPS_at; Start 185; Stop 209
gaaacacaggtttcatgagatcgga

SEQ ID NO: 89588 - DNA, 25 bp, Artificial
  probe
  misc_feature (1)..(25): SEQ ID NO: 6456; WAN024BPS_at; Start 45; Stop 69
cagtctgatagagaaaatgaatata

SEQ ID NO: 89589 - DNA, 25 bp, Artificial
  probe
  misc_feature (1)..(25): SEQ ID NO: 6456; WAN024BPS_at; Start 522; Stop 546
ctgtatcaaggcaggattacgggta

SEQ ID NO: 89590 - DNA, 25 bp, Artificial
  probe
  misc_feature (1)..(25): SEQ ID NO: 6456; WAN024BPS_at; Start 533; Stop 557
caggattacgggtatataaatcacc

SEQ ID NO: 89591 - DNA, 25 bp, Artificial
  probe
  misc_feature (1)..(25): SEQ ID NO: 6456; WAN024BPS_at; Start 489; Stop 513
cggtgcaggagaggacgtaacattt

SEQ ID NO: 89592 - DNA, 25 bp, Artificial
  probe
  misc_feature (1)..(25): SEQ ID NO: 6456; WAN024BPS_at; Start 682; Stop 706
tatatacaagctttcaaaaataggg

SEQ ID NO: 89593 - DNA, 25 bp, Artificial
  probe
  misc_feature (1)..(25): SEQ ID NO: 6456; WAN024BPS_at; Start 657; Stop 681
cccttctataagtgaggtaggagta

SEQ ID NO: 89594 - DNA, 25 bp, Artificial
  probe
  misc_feature (1)..(25): SEQ ID NO: 6456; WAN024BPS_at; Start 114; Stop 138
ccatgagacgaaattgaaaaattcg

SEQ ID NO: 89595 - DNA, 25 bp, Artificial
  probe
  misc_feature (1)..(25): SEQ ID NO: 6456; WAN024BPS_at; Start 298; Stop 322
gaagctgatgtaattcttttttcga

SEQ ID NO: 89596 - DNA, 25 bp, Artificial
  probe
  misc_feature (1)..(25): SEQ ID NO: 6659; WAN024BPT_at; Start 253; Stop 277
gattactatgctttctcggatcaag

SEQ ID NO: 89597 - DNA, 25 bp, Artificial
  probe
  misc_feature (1)..(25): SEQ ID NO: 6659; WAN024BPT_at; Start 318; Stop 342
gagtctttccaaatatactgggcca

SEQ ID NO: 89598 - DNA, 25 bp, Artificial
  probe
  misc_feature (1)..(25): SEQ ID NO: 6659; WAN024BPT_at; Start 67; Stop 91
gaaagtattctcaaccaagatacag

SEQ ID NO: 89599 - DNA, 25 bp, Artificial
  probe
  misc_feature (1)..(25): SEQ ID NO: 6659; WAN024BPT_at; Start 821; Stop 845
cgctaaaggcaagacttaagctgat

SEQ ID NO: 89600 - DNA, 25 bp, Artificial
  probe
  misc_feature (1)..(25): SEQ ID NO: 6659; WAN024BPT_at; Start 732; Stop 756
tcaagcagagtgtttactaaaggtt

SEQ ID NO: 89601 - DNA, 25 bp, Artificial
  probe
  misc_feature (1)..(25): SEQ ID NO: 6659; WAN024BPT_at; Start 107; Stop 131
taattattagagatgacggttcaac

SEQ ID NO: 89602 - DNA, 25 bp, Artificial
  probe
  misc_feature (1)..(25): SEQ ID NO: 6659; WAN024BPT_at; Start 706; Stop 730
aaaaagcgaacgattagtatgtacg

SEQ ID NO: 89603 - DNA, 25 bp, Artificial
  probe
  misc_feature (1)..(25): SEQ ID NO: 6659; WAN024BPT_at; Start 9; Stop 33
gagattagcaatacttatggccaca

SEQ ID NO: 89604 - DNA, 25 bp, Artificial
  probe
  misc_feature (1)..(25): SEQ ID NO: 6659; WAN024BPT_at; Start 207; Stop 231
ggcggcaagaggatttatttctttg

SEQ ID NO: 89605 - DNA, 25 bp, Artificial
  probe
  misc_feature (1)..(25): SEQ ID NO: 6659; WAN024BPT_at; Start 473; Stop 497
catctgtatttaataaagagctagc

SEQ ID NO: 89606 - DNA, 25 bp, Artificial
  probe
  misc_feature (1)..(25): SEQ ID NO: 6659; WAN024BPT_at; Start 604; Stop 628
ccatcaatgaaatatagaatgcatg

SEQ ID NO: 89607 - DNA, 25 bp, Artificial
  probe
  misc_feature (1)..(25): SEQ ID NO: 6659; WAN024BPT_at; Start 860; Stop 884
tgcagcatactacattaaataaaac

SEQ ID NO: 89608 - DNA, 25 bp, Artificial
  probe
  misc_feature (1)..(25): SEQ ID NO: 6659; WAN024BPT_at; Start 396; Stop 420
tcgtaatacacataggaagagaccg

SEQ ID NO: 89609 - DNA, 25 bp, Artificial
  probe
  misc_feature (1)..(25): SEQ ID NO: 6659; WAN024BPT_at; Start 406; Stop 430
cataggaagagaccgaactatactc

SEQ ID NO: 89610 - DNA, 25 bp, Artificial
  probe
  misc_feature (1)..(25): SEQ ID NO: 6659; WAN024BPT_at; Start 266; Stop 290
tctcggatcaagatgatgtttggaa

SEQ ID NO: 89611 - DNA, 25 bp, Artificial
  probe
  misc_feature (1)..(25): SEQ ID NO: 6659; WAN024BPT_at; Start 720; Stop 744
tagtatgtacgatcaagcagagtgt

SEQ ID NO: 89612 - DNA, 25 bp, Artificial
  probe
  misc_feature (1)..(25): SEQ ID NO: 6659; WAN024BPT_at; Start 333; Stop 357
tactgggccagcactttattgttct

SEQ ID NO: 89613 - DNA, 25 bp, Artificial
  probe
  misc_feature (1)..(25): SEQ ID NO: 6659; WAN024BPT_at; Start 441; Stop 465
tctttgtcttgctagttgtgcacaa

SEQ ID NO: 89614 - DNA, 25 bp, Artificial
  probe
  misc_feature (1)..(25): SEQ ID NO: 6659; WAN024BPT_at; Start 569; Stop 593
cactgataggtggaaagataattta

SEQ ID NO: 89615 - DNA, 25 bp, Artificial
  probe
  misc_feature (1)..(25): SEQ ID NO: 6659; WAN024BPT_at; Start 652; Stop 676
tcagctaagcaaaatgtactaaatg

SEQ ID NO: 89616 - DNA, 25 bp, Artificial
  probe
  misc_feature (1)..(25): SEQ ID NO: 6659; WAN024BPT_at; Start 590; Stop 614
tttacgacgaaattccatcaatgaa

SEQ ID NO: 89617 - DNA, 25 bp, Artificial
  probe
  misc_feature (1)..(25): SEQ ID NO: 6659; WAN024BPT_at; Start 24; Stop 48
tatggccacatataatggcgaaaaa

SEQ ID NO: 89618 - DNA, 25 bp, Artificial
  probe
  misc_feature (1)..(25): SEQ ID NO: 6659; WAN024BPT_at; Start 638; Stop 662
tatttggaatggtgtcagctaagca

SEQ ID NO: 89619 - DNA, 25 bp, Artificial
  probe
  misc_feature (1)..(25): SEQ ID NO: 6659; WAN024BPT_at; Start 416; Stop 440
gaccgaactatactcttgaatctat

SEQ ID NO: 89620 - DNA, 25 bp, Artificial
  probe
  misc_feature (1)..(25): SEQ ID NO: 6659; WAN024BPT_at; Start 304; Stop 328
cagaaaggtatatggagtctttcca

SEQ ID NO: 89621 - DNA, 25 bp, Artificial
  probe
  misc_feature (1)..(25): SEQ ID NO: 6659; WAN024BPT_at; Start 377; Stop 401
cagagttaaatagtataggtcgtaa

SEQ ID NO: 89622 - DNA, 25 bp, Artificial
  probe
  misc_feature (1)..(25): SEQ ID NO: 6659; WAN024BPT_at; Start 517; Stop 541
gatgtgcctgatacttttattatgc

SEQ ID NO: 89623 - DNA, 25 bp, Artificial
  probe
  misc_feature (1)..(25): SEQ ID NO: 6659; WAN024BPT_at; Start 552; Stop 576
gattacttgtttatgtgcactgata

SEQ ID NO: 89624 - DNA, 25 bp, Artificial
  probe
  misc_feature (1)..(25): SEQ ID NO: 6659; WAN024BPT_at; Start 455; Stop 479
gttgtgcacaaggatgtacatctgt

SEQ ID NO: 89625 - DNA, 25 bp, Artificial
  probe
  misc_feature (1)..(25): SEQ ID NO: 6659; WAN024BPT_at; Start 238; Stop 262
gataatcctggatatgattactatg

SEQ ID NO: 89626 - DNA, 25 bp, Artificial
  probe
  misc_feature (1)..(25): SEQ ID NO: 6659; WAN024BPT_at; Start 488; Stop 512
aagagctagcttcgataattcagga

SEQ ID NO: 89627 - DNA, 25 bp, Artificial
  probe
  misc_feature (1)..(25): SEQ ID NO: 6659; WAN024BPT_at; Start 118; Stop 142
gatgacggttcaacagataatacta

SEQ ID NO: 89628 - DNA, 25 bp, Artificial
  probe
  misc_feature (1)..(25): SEQ ID NO: 6659; WAN024BPT_at; Start 500; Stop 524
cgataattcaggagaatgatgtgcc

SEQ ID NO: 89629 - DNA, 25 bp, Artificial
  probe
  misc_feature (1)..(25): SEQ ID NO: 6659; WAN024BPT_at; Start 808; Stop 832
gattctaaagtatcgctaaaggcaa

SEQ ID NO: 89630 - DNA, 25 bp, Artificial
  probe
  misc_feature (1)..(25): SEQ ID NO: 6677; WAN024BPU_at; Start 816; Stop 840
aattcatagtgatcatgggattcaa

SEQ ID NO: 89631 - DNA, 25 bp, Artificial
  probe
  misc_feature (1)..(25): SEQ ID NO: 6677; WAN024BPU_at; Start 609; Stop 633
tgttctaaatatagctctcacagct

SEQ ID NO: 89632 - DNA, 25 bp, Artificial
  probe
  misc_feature (1)..(25): SEQ ID NO: 6677; WAN024BPU_at; Start 271; Stop 295
aaagggctccctgctattgtaatct

SEQ ID NO: 89633 - DNA, 25 bp, Artificial
  probe
  misc_feature (1)..(25): SEQ ID NO: 6677; WAN024BPU_at; Start 257; Stop 281
ttgctgcacaaggaaaagggctccc

SEQ ID NO: 89634 - DNA, 25 bp, Artificial
  probe
  misc_feature (1)..(25): SEQ ID NO: 6677; WAN024BPU_at; Start 683; Stop 707
tatcaacacttatgatggtgcctgt

SEQ ID NO: 89635 - DNA, 25 bp, Artificial
  probe
  misc_feature (1)..(25): SEQ ID NO: 6677; WAN024BPU_at; Start 832; Stop 856
gggattcaaattagattcttgacga

SEQ ID NO: 89636 - DNA, 25 bp, Artificial
  probe
  misc_feature (1)..(25): SEQ ID NO: 6677; WAN024BPU_at; Start 63; Stop 87
catgcttatgttatgtgttacggca

SEQ ID NO: 89637 - DNA, 25 bp, Artificial
  probe
  misc_feature (1)..(25): SEQ ID NO: 6677; WAN024BPU_at; Start 941; Stop 965
ctattgttaccggtccattaggacg

SEQ ID NO: 89638 - DNA, 25 bp, Artificial
  probe
  misc_feature (1)..(25): SEQ ID NO: 6677; WAN024BPU_at; Start 208; Stop 232
tataaagggacaataatactgggta

SEQ ID NO: 89639 - DNA, 25 bp, Artificial
  probe
  misc_feature (1)..(25): SEQ ID NO: 6677; WAN024BPU_at; Start 7; Stop 31
gacggagattttatgaatagaagac

SEQ ID NO: 89640 - DNA, 25 bp, Artificial
  probe
  misc_feature (1)..(25): SEQ ID NO: 6677; WAN024BPU_at; Start 974; Stop 998
caagcgatgtaggtttgattggact

SEQ ID NO: 89641 - DNA, 25 bp, Artificial
  probe
  misc_feature (1)..(25): SEQ ID NO: 6677; WAN024BPU_at; Start 1072; Stop 1096
gataatacgattagaattccagctc

SEQ ID NO: 89642 - DNA, 25 bp, Artificial
  probe
  misc_feature (1)..(25): SEQ ID NO: 6677; WAN024BPU_at; Start 507; Stop 531
tcctagatttacaattggagaaaca

SEQ ID NO: 89643 - DNA, 25 bp, Artificial
  probe
  misc_feature (1)..(25): SEQ ID NO: 6677; WAN024BPU_at; Start 340; Stop 364
gctttccgacctatgataaagtcaa

SEQ ID NO: 89644 - DNA, 25 bp, Artificial
  probe
  misc_feature (1)..(25): SEQ ID NO: 6677; WAN024BPU_at; Start 490; Stop 514
aaacttagaaatggtactcctagat

SEQ ID NO: 89645 - DNA, 25 bp, Artificial
  probe
  misc_feature (1)..(25): SEQ ID NO: 6677; WAN024BPU_at; Start 646; Stop 670
tatattattaaaacaaggacactga

SEQ ID NO: 89646 - DNA, 25 bp, Artificial
  probe
  misc_feature (1)..(25): SEQ ID NO: 6677; WAN024BPU_at; Start 242; Stop 266
ggttttcaggacttattgctgcaca

SEQ ID NO: 89647 - DNA, 25 bp, Artificial
  probe
  misc_feature (1)..(25): SEQ ID NO: 6677; WAN024BPU_at; Start 370; Stop 394
gacacttcattattccttcgtacta

SEQ ID NO: 89648 - DNA, 25 bp, Artificial
  probe
  misc_feature (1)..(25): SEQ ID NO: 6677; WAN024BPU_at; Start 385; Stop 409
cttcgtactatttctgctgccggtg

SEQ ID NO: 89649 - DNA, 25 bp, Artificial
  probe
  misc_feature (1)..(25): SEQ ID NO: 6677; WAN024BPU_at; Start 622; Stop 646
gctctcacagctataaatttagtgt

SEQ ID NO: 89650 - DNA, 25 bp, Artificial
  probe
  misc_feature (1)..(25): SEQ ID NO: 6677; WAN024BPU_at; Start 326; Stop 350
taatgatatttttagctttccgacc

SEQ ID NO: 89651 - DNA, 25 bp, Artificial
  probe
  misc_feature (1)..(25): SEQ ID NO: 6677; WAN024BPU_at; Start 882; Stop 906
aaatcattacttatttggagcggga

SEQ ID NO: 89652 - DNA, 25 bp, Artificial
  probe
  misc_feature (1)..(25): SEQ ID NO: 6677; WAN024BPU_at; Start 588; Stop 612
gagaaatagacgcattttccatgtt

SEQ ID NO: 89653 - DNA, 25 bp, Artificial
  probe
  misc_feature (1)..(25): SEQ ID NO: 6677; WAN024BPU_at; Start 435; Stop 459
tgaaatgttctttgccaaaagagga

SEQ ID NO: 89654 - DNA, 25 bp, Artificial
  probe
  misc_feature (1)..(25): SEQ ID NO: 6677; WAN024BPU_at; Start 1157; Stop 1181
taatcactgatgcacctagattccc

SEQ ID NO: 89655 - DNA, 25 bp, Artificial
  probe
  misc_feature (1)..(25): SEQ ID NO: 6677; WAN024BPU_at; Start 1000; Stop 1024
atgtttagaagtgggattatcgggc

SEQ ID NO: 89656 - DNA, 25 bp, Artificial
  probe
  misc_feature (1)..(25): SEQ ID NO: 6677; WAN024BPU_at; Start 1221; Stop 1245
taccttgagttatgaaaacagttct

SEQ ID NO: 89657 - DNA, 25 bp, Artificial
  probe
  misc_feature (1)..(25): SEQ ID NO: 6677; WAN024BPU_at; Start 956; Stop 980
cattaggacgttattatccaagcga

SEQ ID NO: 89658 - DNA, 25 bp, Artificial
  probe
  misc_feature (1)..(25): SEQ ID NO: 6677; WAN024BPU_at; Start 898; Stop 922
ggagcgggatatatttcttctagtc

SEQ ID NO: 89659 - DNA, 25 bp, Artificial
  probe
  misc_feature (1)..(25): SEQ ID NO: 6677; WAN024BPU_at; Start 1080; Stop 1104
gattagaattccagctcattatgac

SEQ ID NO: 89660 - DNA, 25 bp, Artificial
  probe
  misc_feature (1)..(25): SEQ ID NO: 6677; WAN024BPU_at; Start 229; Stop 253
ggtattgtaatgtggttttcaggac

SEQ ID NO: 89661 - DNA, 25 bp, Artificial
  probe
  misc_feature (1)..(25): SEQ ID NO: 6677; WAN024BPU_at; Start 1173; Stop 1197
tagattcccatatattgcattagct

SEQ ID NO: 89662 - DNA, 25 bp, Artificial
  probe
  misc_feature (1)..(25): SEQ ID NO: 6677; WAN024BPU_at; Start 400; Stop 424
gctgccggtgttatatgtaatttaa

SEQ ID NO: 89663 - DNA, 25 bp, Artificial
  probe
  misc_feature (1)..(25): SEQ ID NO: 6677; WAN024BPU_at; Start 77; Stop 101
gtgttacggcattttatgggacaaa

SEQ ID NO: 89664 - DNA, 25 bp, Artificial
  probe
  misc_feature (1)..(25): SEQ ID NO: 7213; WAN024BPV_at; Start 32; Stop 56
caacatacaatggagaagaatttat

SEQ ID NO: 89665 - DNA, 25 bp, Artificial
  probe
  misc_feature (1)..(25): SEQ ID NO: 7213; WAN024BPV_at; Start 35; Stop 59
catacaatggagaagaatttatacg

SEQ ID NO: 89666 - DNA, 25 bp, Artificial
  probe
  misc_feature (1)..(25): SEQ ID NO: 7213; WAN024BPV_at; Start 77; Stop 101
tcctttttcaaaccattacagcatg

SEQ ID NO: 89667 - DNA, 25 bp, Artificial
  probe
  misc_feature (1)..(25): SEQ ID NO: 7213; WAN024BPV_at; Start 82; Stop 106
tttcaaaccattacagcatggaaac

SEQ ID NO: 89668 - DNA, 25 bp, Artificial
  probe
  misc_feature (1)..(25): SEQ ID NO: 7213; WAN024BPV_at; Start 79; Stop 103
ctttttcaaaccattacagcatgga

SEQ ID NO: 89669 - DNA, 25 bp, Artificial
  probe
  misc_feature (1)..(25): SEQ ID NO: 7213; WAN024BPV_at; Start 70; Stop 94
gagagtatcctttttcaaaccatta

SEQ ID NO: 89670 - DNA, 25 bp, Artificial
  probe
  misc_feature (1)..(25): SEQ ID NO: 7213; WAN024BPV_at; Start 75; Stop 99
tatcctttttcaaaccattacagca

SEQ ID NO: 89671 - DNA, 25 bp, Artificial
  probe
  misc_feature (1)..(25): SEQ ID NO: 7213; WAN024BPV_at; Start 55; Stop 79
atacgtgaacagttggagagtatcc

SEQ ID NO: 89672 - DNA, 25 bp, Artificial
  probe
  misc_feature (1)..(25): SEQ ID NO: 7213; WAN024BPV_at; Start 50; Stop 74
aatttatacgtgaacagttggagag

SEQ ID NO: 89673 - DNA, 25 bp, Artificial
  probe
  misc_feature (1)..(25): SEQ ID NO: 7213; WAN024BPV_at; Start 30; Stop 54
gacaacatacaatggagaagaattt

SEQ ID NO: 89674 - DNA, 25 bp, Artificial
  probe
  misc_feature (1)..(25): SEQ ID NO: 7213; WAN024BPV_at; Start 27; Stop 51
gatgacaacatacaatggagaagaa

SEQ ID NO: 89675 - DNA, 25 bp, Artificial
  probe
  misc_feature (1)..(25): SEQ ID NO: 7213; WAN024BPV_at; Start 25; Stop 49
atgatgacaacatacaatggagaag

SEQ ID NO: 89676 - DNA, 25 bp, Artificial
  probe
  misc_feature (1)..(25): SEQ ID NO: 7213; WAN024BPV_at; Start 54; Stop 78
tatacgtgaacagttggagagtatc

SEQ ID NO: 89677 - DNA, 25 bp, Artificial
  probe
  misc_feature (1)..(25): SEQ ID NO: 7213; WAN024BPV_at; Start 40; Stop 64
aatggagaagaatttatacgtgaac

SEQ ID NO: 89678 - DNA, 25 bp, Artificial
  probe
  misc_feature (1)..(25): SEQ ID NO: 7213; WAN024BPV_at; Start 29; Stop 53
tgacaacatacaatggagaagaatt

SEQ ID NO: 89679 - DNA, 25 bp, Artificial
  probe
  misc_feature (1)..(25): SEQ ID NO: 7213; WAN024BPV_at; Start 48; Stop 72
agaatttatacgtgaacagttggag

SEQ ID NO: 89680 - DNA, 25 bp, Artificial
  probe
  misc_feature (1)..(25): SEQ ID NO: 7213; WAN024BPV_at; Start 84; Stop 108
tcaaaccattacagcatggaaacta

SEQ ID NO: 89681 - DNA, 25 bp, Artificial
  probe
  misc_feature (1)..(25): SEQ ID NO: 7213; WAN024BPV_at; Start 83; Stop 107
ttcaaaccattacagcatggaaact

SEQ ID NO: 89682 - DNA, 25 bp, Artificial
  probe
  misc_feature (1)..(25): SEQ ID NO: 7213; WAN024BPV_at; Start 52; Stop 76
tttatacgtgaacagttggagagta

SEQ ID NO: 89683 - DNA, 25 bp, Artificial
  probe
  misc_feature (1)..(25): SEQ ID NO: 7213; WAN024BPV_at; Start 22; Stop 46
attatgatgacaacatacaatggag

SEQ ID NO: 89684 - DNA, 25 bp, Artificial
  probe
  misc_feature (1)..(25): SEQ ID NO: 7213; WAN024BPV_at; Start 24; Stop 48
tatgatgacaacatacaatggagaa

SEQ ID NO: 89685 - DNA, 25 bp, Artificial
  probe
  misc_feature (1)..(25): SEQ ID NO: 7213; WAN024BPV_at; Start 12; Stop 36
tagtattttaattatgatgacaaca

SEQ ID NO: 89686 - DNA, 25 bp, Artificial
  probe
  misc_feature (1)..(25): SEQ ID NO: 7213; WAN024BPV_at; Start 80; Stop 104
tttttcaaaccattacagcatggaa

SEQ ID NO: 89687 - DNA, 25 bp, Artificial
  probe
  misc_feature (1)..(25): SEQ ID NO: 7213; WAN024BPV_at; Start 49; Stop 73
gaatttatacgtgaacagttggaga

SEQ ID NO: 89688 - DNA, 25 bp, Artificial
  probe
  misc_feature (1)..(25): SEQ ID NO: 7213; WAN024BPV_at; Start 73; Stop 97
agtatcctttttcaaaccattacag

SEQ ID NO: 89689 - DNA, 25 bp, Artificial
  probe
  misc_feature (1)..(25): SEQ ID NO: 7213; WAN024BPV_at; Start 72; Stop 96
gagtatcctttttcaaaccattaca

SEQ ID NO: 89690 - DNA, 25 bp, Artificial
  probe
  misc_feature (1)..(25): SEQ ID NO: 7213; WAN024BPV_at; Start 26; Stop 50
tgatgacaacatacaatggagaaga

SEQ ID NO: 89691 - DNA, 25 bp, Artificial
  probe
  misc_feature (1)..(25): SEQ ID NO: 7213; WAN024BPV_at; Start 78; Stop 102
cctttttcaaaccattacagcatgg

SEQ ID NO: 89692 - DNA, 25 bp, Artificial
  probe
  misc_feature (1)..(25): SEQ ID NO: 7213; WAN024BPV_at; Start 81; Stop 105
ttttcaaaccattacagcatggaaa

SEQ ID NO: 89693 - DNA, 25 bp, Artificial
  probe
  misc_feature (1)..(25): SEQ ID NO: 7213; WAN024BPV_at; Start 37; Stop 61
tacaatggagaagaatttatacgtg

SEQ ID NO: 89694 - DNA, 25 bp, Artificial
  probe
  misc_feature (1)..(25): SEQ ID NO: 7213; WAN024BPV_at; Start 39; Stop 63
caatggagaagaatttatacgtgaa

SEQ ID NO: 89695 - DNA, 25 bp, Artificial
  probe
  misc_feature (1)..(25): SEQ ID NO: 7213; WAN024BPV_at; Start 23; Stop 47
ttatgatgacaacatacaatggaga

SEQ ID NO: 89696 - DNA, 25 bp, Artificial
  probe
  misc_feature (1)..(25): SEQ ID NO: 7213; WAN024BPV_at; Start 20; Stop 44
taattatgatgacaacatacaatgg

SEQ ID NO: 89697 - DNA, 25 bp, Artificial
  probe
  misc_feature (1)..(25): SEQ ID NO: 7213; WAN024BPV_at; Start 74; Stop 98
gtatcctttttcaaaccattacagc

SEQ ID NO: 89698 - DNA, 25 bp, Artificial
  probe
  misc_feature (1)..(25): SEQ ID NO: 6417; WAN024BPW_at; Start 52; Stop 76
acgatgagtataggattcactatta

SEQ ID NO: 89699 - DNA, 25 bp, Artificial
  probe
  misc_feature (1)..(25): SEQ ID NO: 6417; WAN024BPW_at; Start 54; Stop 78
gatgagtataggattcactattatt

SEQ ID NO: 89700 - DNA, 25 bp, Artificial
  probe
  misc_feature (1)..(25): SEQ ID NO: 6417; WAN024BPW_at; Start 63; Stop 87
aggattcactattatttataatgtg

SEQ ID NO: 89701 - DNA, 25 bp, Artificial
  probe
  misc_feature (1)..(25): SEQ ID NO: 6417; WAN024BPW_at; Start 3; Stop 27
gaaatttgctagattcgtagtattt

SEQ ID NO: 89702 - DNA, 25 bp, Artificial
  probe
  misc_feature (1)..(25): SEQ ID NO: 6417; WAN024BPW_at; Start 6; Stop 30
atttgctagattcgtagtatttaaa

SEQ ID NO: 89703 - DNA, 25 bp, Artificial
  probe
  misc_feature (1)..(25): SEQ ID NO: 6417; WAN024BPW_at; Start 48; Stop 72
aaacacgatgagtataggattcact

SEQ ID NO: 89704 - DNA, 25 bp, Artificial
  probe
  misc_feature (1)..(25): SEQ ID NO: 6417; WAN024BPW_at; Start 37; Stop 61
aacaatacccaaaacacgatgagta

SEQ ID NO: 89705 - DNA, 25 bp, Artificial
  probe
  misc_feature (1)..(25): SEQ ID NO: 6417; WAN024BPW_at; Start 38; Stop 62
acaatacccaaaacacgatgagtat

SEQ ID NO: 89706 - DNA, 25 bp, Artificial
  probe
  misc_feature (1)..(25): SEQ ID NO: 6417; WAN024BPW_at; Start 42; Stop 66
tacccaaaacacgatgagtatagga

SEQ ID NO: 89707 - DNA, 25 bp, Artificial
  probe
  misc_feature (1)..(25): SEQ ID NO: 6417; WAN024BPW_at; Start 7; Stop 31
tttgctagattcgtagtatttaaaa

SEQ ID NO: 89708 - DNA, 25 bp, Artificial
  probe
  misc_feature (1)..(25): SEQ ID NO: 6417; WAN024BPW_at; Start 2; Stop 26
tgaaatttgctagattcgtagtatt

SEQ ID NO: 89709 - DNA, 25 bp, Artificial
  probe
  misc_feature (1)..(25): SEQ ID NO: 6417; WAN024BPW_at; Start 9; Stop 33
tgctagattcgtagtatttaaaaaa

SEQ ID NO: 89710 - DNA, 25 bp, Artificial
  probe
  misc_feature (1)..(25): SEQ ID NO: 6417; WAN024BPW_at; Start 56; Stop 80
tgagtataggattcactattattta

SEQ ID NO: 89711 - DNA, 25 bp, Artificial
  probe
  misc_feature (1)..(25): SEQ ID NO: 6417; WAN024BPW_at; Start 40; Stop 64
aatacccaaaacacgatgagtatag

SEQ ID NO: 89712 - DNA, 25 bp, Artificial
  probe
  misc_feature (1)..(25): SEQ ID NO: 6417; WAN024BPW_at; Start 50; Stop 74
acacgatgagtataggattcactat

SEQ ID NO: 89713 - DNA, 25 bp, Artificial
  probe
  misc_feature (1)..(25): SEQ ID NO: 6417; WAN024BPW_at; Start 47; Stop 71
aaaacacgatgagtataggattcac

SEQ ID NO: 89714 - DNA, 25 bp, Artificial
  probe
  misc_feature (1)..(25): SEQ ID NO: 6417; WAN024BPW_at; Start 45; Stop 69
ccaaaacacgatgagtataggattc

SEQ ID NO: 89715 - DNA, 25 bp, Artificial
  probe
  misc_feature (1)..(25): SEQ ID NO: 6417; WAN024BPW_at; Start 1; Stop 25
atgaaatttgctagattcgtagtat

SEQ ID NO: 89716 - DNA, 25 bp, Artificial
  probe
  misc_feature (1)..(25): SEQ ID NO: 6417; WAN024BPW_at; Start 84; Stop 108
tgtgtttgaaaaaaaatattataga

SEQ ID NO: 89717 - DNA, 25 bp, Artificial
  probe
  misc_feature (1)..(25): SEQ ID NO: 6417; WAN024BPW_at; Start 36; Stop 60
taacaatacccaaaacacgatgagt

SEQ ID NO: 89718 - DNA, 25 bp, Artificial
  probe
  misc_feature (1)..(25): SEQ ID NO: 6417; WAN024BPW_at; Start 62; Stop 86
taggattcactattatttataatgt

SEQ ID NO: 89719 - DNA, 25 bp, Artificial
  probe
  misc_feature (1)..(25): SEQ ID NO: 6417; WAN024BPW_at; Start 57; Stop 81
gagtataggattcactattatttat

SEQ ID NO: 89720 - DNA, 25 bp, Artificial
  probe
  misc_feature (1)..(25): SEQ ID NO: 6417; WAN024BPW_at; Start 5; Stop 29
aatttgctagattcgtagtatttaa

SEQ ID NO: 89721 - DNA, 25 bp, Artificial
  probe
  misc_feature (1)..(25): SEQ ID NO: 6417; WAN024BPW_at; Start 35; Stop 59
ttaacaatacccaaaacacgatgag

SEQ ID NO: 89722 - DNA, 25 bp, Artificial
  probe
  misc_feature (1)..(25): SEQ ID NO: 6417; WAN024BPW_at; Start 46; Stop 70
caaaacacgatgagtataggattca

SEQ ID NO: 89723 - DNA, 25 bp, Artificial
  probe
  misc_feature (1)..(25): SEQ ID NO: 6417; WAN024BPW_at; Start 39; Stop 63
caatacccaaaacacgatgagtata

SEQ ID NO: 89724 - DNA, 25 bp, Artificial
  probe
  misc_feature (1)..(25): SEQ ID NO: 6417; WAN024BPW_at; Start 69; Stop 93
cactattatttataatgtgtttgaa

SEQ ID NO: 89725 - DNA, 25 bp, Artificial
  probe
  misc_feature (1)..(25): SEQ ID NO: 6417; WAN024BPW_at; Start 51; Stop 75
cacgatgagtataggattcactatt

SEQ ID NO: 89726 - DNA, 25 bp, Artificial
  probe
  misc_feature (1)..(25): SEQ ID NO: 6417; WAN024BPW_at; Start 53; Stop 77
cgatgagtataggattcactattat

SEQ ID NO: 89727 - DNA, 25 bp, Artificial
  probe
  misc_feature (1)..(25): SEQ ID NO: 6417; WAN024BPW_at; Start 41; Stop 65
atacccaaaacacgatgagtatagg

SEQ ID NO: 89728 - DNA, 25 bp, Artificial
  probe
  misc_feature (1)..(25): SEQ ID NO: 6417; WAN024BPW_at; Start 49; Stop 73
aacacgatgagtataggattcacta

SEQ ID NO: 89729 - DNA, 25 bp, Artificial
  probe
  misc_feature (1)..(25): SEQ ID NO: 6417; WAN024BPW_at; Start 8; Stop 32
ttgctagattcgtagtatttaaaaa

SEQ ID NO: 89730 - DNA, 25 bp, Artificial
  probe
  misc_feature (1)..(25): SEQ ID NO: 6417; WAN024BPW_at; Start 44; Stop 68
cccaaaacacgatgagtataggatt

SEQ ID NO: 89731 - DNA, 25 bp, Artificial
  probe
  misc_feature (1)..(25): SEQ ID NO: 6417; WAN024BPW_at; Start 43; Stop 67
acccaaaacacgatgagtataggat

SEQ ID NO: 89732 - DNA, 25 bp, Artificial
  probe
  misc_feature (1)..(25): SEQ ID NO: 6572; WAN024BPX_at; Start 812; Stop 836
tattgctcgcttcttttgtactcag

SEQ ID NO: 89733 - DNA, 25 bp, Artificial
  probe
  misc_feature (1)..(25): SEQ ID NO: 6572; WAN024BPX_at; Start 660; Stop 684
tgttcctgggaattggcactcttct

SEQ ID NO: 89734 - DNA, 25 bp, Artificial
  probe
  misc_feature (1)..(25): SEQ ID NO: 6572; WAN024BPX_at; Start 828; Stop 852
tgtactcagtgtaagtaaagcagcg

SEQ ID NO: 89735 - DNA, 25 bp, Artificial
  probe
  misc_feature (1)..(25): SEQ ID NO: 6572; WAN024BPX_at; Start 221; Stop 245
tatatttgggatttggagcggatcg

SEQ ID NO: 89736 - DNA, 25 bp, Artificial
  probe
  misc_feature (1)..(25): SEQ ID NO: 6572; WAN024BPX_at; Start 1084; Stop 1108
gcttcaaaattaggttcacaaacag

SEQ ID NO: 89737 - DNA, 25 bp, Artificial
  probe
  misc_feature (1)..(25): SEQ ID NO: 6572; WAN024BPX_at; Start 1045; Stop 1069
tacccatttggtatgggagtaggga

SEQ ID NO: 89738 - DNA, 25 bp, Artificial
  probe
  misc_feature (1)..(25): SEQ ID NO: 6572; WAN024BPX_at; Start 693; Stop 717
tggcggtaaacaattaaggcgtatg

SEQ ID NO: 89739 - DNA, 25 bp, Artificial
  probe
  misc_feature (1)..(25): SEQ ID NO: 6572; WAN024BPX_at; Start 1114; Stop 1138
tcttcagaggttttagaaacaggaa

SEQ ID NO: 89740 - DNA, 25 bp, Artificial
  probe
  misc_feature (1)..(25): SEQ ID NO: 6572; WAN024BPX_at; Start 729; Stop 753
tgccgatcccgtaaatctaggttcg

SEQ ID NO: 89741 - DNA, 25 bp, Artificial
  probe
  misc_feature (1)..(25): SEQ ID NO: 6572; WAN024BPX_at; Start 764; Stop 788
cggcatttatgttagcttggtacaa

SEQ ID NO: 89742 - DNA, 25 bp, Artificial
  probe
  misc_feature (1)..(25): SEQ ID NO: 6572; WAN024BPX_at; Start 447; Stop 471
gagaaatatactagccccactactg

SEQ ID NO: 89743 - DNA, 25 bp, Artificial
  probe
  misc_feature (1)..(25): SEQ ID NO: 6572; WAN024BPX_at; Start 641; Stop 665
tggcgattgagaatagggttgttcc

SEQ ID NO: 89744 - DNA, 25 bp, Artificial
  probe
  misc_feature (1)..(25): SEQ ID NO: 6572; WAN024BPX_at; Start 676; Stop 700
cactcttctgaattaattggcggta

SEQ ID NO: 89745 - DNA, 25 bp, Artificial
  probe
  misc_feature (1)..(25): SEQ ID NO: 6572; WAN024BPX_at; Start 969; Stop 993
tagtcaagttagcagttatggtagt

SEQ ID NO: 89746 - DNA, 25 bp, Artificial
  probe
  misc_feature (1)..(25): SEQ ID NO: 6572; WAN024BPX_at; Start 100; Stop 124
tattctttgctattcatcgggattg

SEQ ID NO: 89747 - DNA, 25 bp, Artificial
  probe
  misc_feature (1)..(25): SEQ ID NO: 6572; WAN024BPX_at; Start 1100; Stop 1124
cacaaacagcactttcttcagaggt

SEQ ID NO: 89748 - DNA, 25 bp, Artificial
  probe
  misc_feature (1)..(25): SEQ ID NO: 6572; WAN024BPX_at; Start 236; Stop 260
gagcggatcgattaaattctgtcac

SEQ ID NO: 89749 - DNA, 25 bp, Artificial
  probe
  misc_feature (1)..(25): SEQ ID NO: 6572; WAN024BPX_at; Start 744; Stop 768
tctaggttcgtatctctttgcggca

SEQ ID NO: 89750 - DNA, 25 bp, Artificial
  probe
  misc_feature (1)..(25): SEQ ID NO: 6572; WAN024BPX_at; Start 406; Stop 430
atattctttcccactaccttgccag

SEQ ID NO: 89751 - DNA, 25 bp, Artificial
  probe
  misc_feature (1)..(25): SEQ ID NO: 6572; WAN024BPX_at; Start 714; Stop 738
tatggtttcaacatttgccgatccc

SEQ ID NO: 89752 - DNA, 25 bp, Artificial
  probe
  misc_feature (1)..(25): SEQ ID NO: 6572; WAN024BPX_at; Start 844; Stop 868
aaagcagcgtttttaagcatgttgg

SEQ ID NO: 89753 - DNA, 25 bp, Artificial
  probe
  misc_feature (1)..(25): SEQ ID NO: 6572; WAN024BPX_at; Start 152; Stop 176
tagcaagtgacgaagatgcgaactc

SEQ ID NO: 89754 - DNA, 25 bp, Artificial
  probe
  misc_feature (1)..(25): SEQ ID NO: 6572; WAN024BPX_at; Start 250; Stop 274
aattctgtcacactacaagttctgc

SEQ ID NO: 89755 - DNA, 25 bp, Artificial
  probe
  misc_feature (1)..(25): SEQ ID NO: 6572; WAN024BPX_at; Start 139; Stop 163
tataattctattctagcaagtgacg

SEQ ID NO: 89756 - DNA, 25 bp, Artificial
  probe
  misc_feature (1)..(25): SEQ ID NO: 6572; WAN024BPX_at; Start 1148; Stop 1172
taattgctcaattaggattcgtggg

SEQ ID NO: 89757 - DNA, 25 bp, Artificial
  probe
  misc_feature (1)..(25): SEQ ID NO: 6572; WAN024BPX_at; Start 1019; Stop 1043
ttagtgcgttaagtactcccctcca

SEQ ID NO: 89758 - DNA, 25 bp, Artificial
  probe
  misc_feature (1)..(25): SEQ ID NO: 6572; WAN024BPX_at; Start 1281; Stop 1305
taatgccttttttaacgaggttgca

SEQ ID NO: 89759 - DNA, 25 bp, Artificial
  probe
  misc_feature (1)..(25): SEQ ID NO: 6572; WAN024BPX_at; Start 883; Stop 907
tatacctgggttgtggataaaaata

SEQ ID NO: 89760 - DNA, 25 bp, Artificial
  probe
  misc_feature (1)..(25): SEQ ID NO: 6572; WAN024BPX_at; Start 113; Stop 137
tcatcgggattgtaacagtcttaaa

SEQ ID NO: 89761 - DNA, 25 bp, Artificial
  probe
  misc_feature (1)..(25): SEQ ID NO: 6572; WAN024BPX_at; Start 1068; Stop 1092
gagtgtgggagttctagcttcaaaa

SEQ ID NO: 89762 - DNA, 25 bp, Artificial
  probe
  misc_feature (1)..(25): SEQ ID NO: 6572; WAN024BPX_at; Start 990; Stop 1014
tagtataaatgcacatatcgatggt

SEQ ID NO: 89763 - DNA, 25 bp, Artificial
  probe
  misc_feature (1)..(25): SEQ ID NO: 6572; WAN024BPX_at; Start 1133; Stop 1157
caggaattggaatgataattgctca

SEQ ID NO: 89764 - DNA, 25 bp, Artificial
  probe
  misc_feature (1)..(25): SEQ ID NO: 6572; WAN024BPX_at; Start 581; Stop 605
tatacggaaatagtttatggacaag

SEQ ID NO: 89765 - DNA, 25 bp, Artificial
  probe
  misc_feature (1)..(25): SEQ ID NO: 6572; WAN024BPX_at; Start 1296; Stop 1320
cgaggttgcactttctcctaactca

SEQ ID NO: 89766 - DNA, 25 bp, Artificial
  probe
  misc_feature (1)..(25): SEQ ID NO: 6625; WAN024BPY_at; Start 411; Stop 435
gaagggtagtataggtgttgcaaat

SEQ ID NO: 89767 - DNA, 25 bp, Artificial
  probe
  misc_feature (1)..(25): SEQ ID NO: 6625; WAN024BPY_at; Start 48; Stop 72
tagtggcgataaaccatttactatc

SEQ ID NO: 89768 - DNA, 25 bp, Artificial
  probe
  misc_feature (1)..(25): SEQ ID NO: 6625; WAN024BPY_at; Start 161; Stop 185
ccacgaatatttctcaaattaagga

SEQ ID NO: 89769 - DNA, 25 bp, Artificial
  probe
  misc_feature (1)..(25): SEQ ID NO: 6625; WAN024BPY_at; Start 397; Stop 421
tatgcaaagttggagaagggtagta

SEQ ID NO: 89770 - DNA, 25 bp, Artificial
  probe
  misc_feature (1)..(25): SEQ ID NO: 6625; WAN024BPY_at; Start 370; Stop 394
aagtatctagtagttcctgaattcg

SEQ ID NO: 89771 - DNA, 25 bp, Artificial
  probe
  misc_feature (1)..(25): SEQ ID NO: 6625; WAN024BPY_at; Start 385; Stop 409
cctgaattcgtatatgcaaagttgg

SEQ ID NO: 89772 - DNA, 25 bp, Artificial
  probe
  misc_feature (1)..(25): SEQ ID NO: 6625; WAN024BPY_at; Start 789; Stop 813
tagatattctagtcaagaagacatc

SEQ ID NO: 89773 - DNA, 25 bp, Artificial
  probe
  misc_feature (1)..(25): SEQ ID NO: 6625; WAN024BPY_at; Start 322; Stop 346
gaaactaatggttatacgacagtag

SEQ ID NO: 89774 - DNA, 25 bp, Artificial
  probe
  misc_feature (1)..(25): SEQ ID NO: 6625; WAN024BPY_at; Start 605; Stop 629
aacgctgggtttcattttgtttgag

SEQ ID NO: 89775 - DNA, 25 bp, Artificial
  probe
  misc_feature (1)..(25): SEQ ID NO: 6625; WAN024BPY_at; Start 490; Stop 514
gattcaacgatgtatgtccatccag

SEQ ID NO: 89776 - DNA, 25 bp, Artificial
  probe
  misc_feature (1)..(25): SEQ ID NO: 6625; WAN024BPY_at; Start 38; Stop 62
ttcaacaatgtagtggcgataaacc

SEQ ID NO: 89777 - DNA, 25 bp, Artificial
  probe
  misc_feature (1)..(25): SEQ ID NO: 6625; WAN024BPY_at; Start 541; Stop 565
gaattttcttcgataaatcataggg

SEQ ID NO: 89778 - DNA, 25 bp, Artificial
  probe
  misc_feature (1)..(25): SEQ ID NO: 6625; WAN024BPY_at; Start 617; Stop 641
cattttgtttgagtggagagaaagg

SEQ ID NO: 89779 - DNA, 25 bp, Artificial
  probe
  misc_feature (1)..(25): SEQ ID NO: 6625; WAN024BPY_at; Start 589; Stop 613
gacaatataacaaataaacgctggg

SEQ ID NO: 89780 - DNA, 25 bp, Artificial
  probe
  misc_feature (1)..(25): SEQ ID NO: 6625; WAN024BPY_at; Start 502; Stop 526
tatgtccatccagatttccctattg

SEQ ID NO: 89781 - DNA, 25 bp, Artificial
  probe
  misc_feature (1)..(25): SEQ ID NO: 6625; WAN024BPY_at; Start 270; Stop 294
gaatgcacctgagttagtccaaagt

SEQ ID NO: 89782 - DNA, 25 bp, Artificial
  probe
  misc_feature (1)..(25): SEQ ID NO: 6625; WAN024BPY_at; Start 280; Stop 304
gagttagtccaaagtacactctatt

SEQ ID NO: 89783 - DNA, 25 bp, Artificial
  probe
  misc_feature (1)..(25): SEQ ID NO: 6625; WAN024BPY_at; Start 561; Stop 585
tagggataattccagccaatcaatg

SEQ ID NO: 89784 - DNA, 25 bp, Artificial
  probe
  misc_feature (1)..(25): SEQ ID NO: 6625; WAN024BPY_at; Start 430; Stop 454
gcaaatttttcagatttaatccgat

SEQ ID NO: 89785 - DNA, 25 bp, Artificial
  probe
  misc_feature (1)..(25): SEQ ID NO: 6625; WAN024BPY_at; Start 636; Stop 660
gaaagggaacattgtttctcgagca

SEQ ID NO: 89786 - DNA, 25 bp, Artificial
  probe
  misc_feature (1)..(25): SEQ ID NO: 6625; WAN024BPY_at; Start 475; Stop 499
ggaggaatttggttagattcaacga

SEQ ID NO: 89787 - DNA, 25 bp, Artificial
  probe
  misc_feature (1)..(25): SEQ ID NO: 6625; WAN024BPY_at; Start 849; Stop 873
caaagaagaatggtataatgaaacg

SEQ ID NO: 89788 - DNA, 25 bp, Artificial
  probe
  misc_feature (1)..(25): SEQ ID NO: 6625; WAN024BPY_at; Start 240; Stop 264
tatctggactatgtggtggcaagga

SEQ ID NO: 89789 - DNA, 25 bp, Artificial
  probe
  misc_feature (1)..(25): SEQ ID NO: 6625; WAN024BPY_at; Start 575; Stop 599
gccaatcaatggatgacaatataac

SEQ ID NO: 89790 - DNA, 25 bp, Artificial
  probe
  misc_feature (1)..(25): SEQ ID NO: 6625; WAN024BPY_at; Start 805; Stop 829
gaagacatcttttggttgagaatac

SEQ ID NO: 89791 - DNA, 25 bp, Artificial
  probe
  misc_feature (1)..(25): SEQ ID NO: 6625; WAN024BPY_at; Start 23; Stop 47
gattatcacttacgattcaacaatg

SEQ ID NO: 89792 - DNA, 25 bp, Artificial
  probe
  misc_feature (1)..(25): SEQ ID NO: 6625; WAN024BPY_at; Start 645; Stop 669
cattgtttctcgagcaatgcgagct

SEQ ID NO: 89793 - DNA, 25 bp, Artificial
  probe
  misc_feature (1)..(25): SEQ ID NO: 6625; WAN024BPY_at; Start 659; Stop 683
caatgcgagcttttttattagatca

SEQ ID NO: 89794 - DNA, 25 bp, Artificial
  probe
  misc_feature (1)..(25): SEQ ID NO: 6625; WAN024BPY_at; Start 446; Stop 470
taatccgatttatgctaatggaaca

SEQ ID NO: 89795 - DNA, 25 bp, Artificial
  probe
  misc_feature (1)..(25): SEQ ID NO: 6625; WAN024BPY_at; Start 459; Stop 483
gctaatggaacaatatggaggaatt

SEQ ID NO: 89796 - DNA, 25 bp, Artificial
  probe
  misc_feature (1)..(25): SEQ ID NO: 6625; WAN024BPY_at; Start 309; Stop 333
tagaaaatttgctgaaactaatggt

SEQ ID NO: 89797 - DNA, 25 bp, Artificial
  probe
  misc_feature (1)..(25): SEQ ID NO: 6625; WAN024BPY_at; Start 903; Stop 927
taaagaagatgaaacagtgaaagat

SEQ ID NO: 89798 - DNA, 25 bp, Artificial
  probe
  misc_feature (1)..(25): SEQ ID NO: 6625; WAN024BPY_at; Start 255; Stop 279
gtggcaaggagaagagaatgcacct

SEQ ID NO: 89799 - DNA, 25 bp, Artificial
  probe
  misc_feature (1)..(25): SEQ ID NO: 6625; WAN024BPY_at; Start 226; Stop 250
gaatttcctaaatttatctggacta

SEQ ID NO: 89800 - DNA, 25 bp, Artificial
  probe
  misc_feature (1)..(25): SEQ ID NO: 7377; WAN024BPZ_at; Start 197; Stop 221
taattgataaagaaaatggcggtca

SEQ ID NO: 89801 - DNA, 25 bp, Artificial
  probe
  misc_feature (1)..(25): SEQ ID NO: 7377; WAN024BPZ_at; Start 27; Stop 51
ggtaattccatcctacaatgcggct

SEQ ID NO: 89802 - DNA, 25 bp, Artificial
  probe
  misc_feature (1)..(25): SEQ ID NO: 7377; WAN024BPZ_at; Start 60; Stop 84
gatggaaactattccgactctagtt

SEQ ID NO: 89803 - DNA, 25 bp, Artificial
  probe
  misc_feature (1)..(25): SEQ ID NO: 7377; WAN024BPZ_at; Start 42; Stop 66
caatgcggctccatttttgatggaa

SEQ ID NO: 89804 - DNA, 25 bp, Artificial
  probe
  misc_feature (1)..(25): SEQ ID NO: 7377; WAN024BPZ_at; Start 146; Stop 170
cacttcaagtggctcagaaactgga

SEQ ID NO: 89805 - DNA, 25 bp, Artificial
  probe
  misc_feature (1)..(25): SEQ ID NO: 7377; WAN024BPZ_at; Start 15; Stop 39
aatacttagcgtggtaattccatcc

SEQ ID NO: 89806 - DNA, 25 bp, Artificial
  probe
  misc_feature (1)..(25): SEQ ID NO: 7377; WAN024BPZ_at; Start 352; Stop 376
gaaattatctctccatatacagacg

SEQ ID NO: 89807 - DNA, 25 bp, Artificial
  probe
  misc_feature (1)..(25): SEQ ID NO: 7377; WAN024BPZ_at; Start 706; Stop 730
aatcatgtcacattcgctttgcttg

SEQ ID NO: 89808 - DNA, 25 bp, Artificial
  probe
  misc_feature (1)..(25): SEQ ID NO: 7377; WAN024BPZ_at; Start 75; Stop 99
gactctagtttctattagcagcaga

SEQ ID NO: 89809 - DNA, 25 bp, Artificial
  probe
  misc_feature (1)..(25): SEQ ID NO: 7377; WAN024BPZ_at; Start 90; Stop 114
tagcagcagaaatgatattgaggtt

SEQ ID NO: 89810 - DNA, 25 bp, Artificial
  probe
  misc_feature (1)..(25): SEQ ID NO: 7377; WAN024BPZ_at; Start 827; Stop 851
caatggaagatactaaacaaggtaa

SEQ ID NO: 89811 - DNA, 25 bp, Artificial
  probe
  misc_feature (1)..(25): SEQ ID NO: 7377; WAN024BPZ_at; Start 608; Stop 632
caataacttatacgcctgactctgt

SEQ ID NO: 89812 - DNA, 25 bp, Artificial
  probe
  misc_feature (1)..(25): SEQ ID NO: 7377; WAN024BPZ_at; Start 436; Stop 460
ccataccaggattatgattatgtga

SEQ ID NO: 89813 - DNA, 25 bp, Artificial
  probe
  misc_feature (1)..(25): SEQ ID NO: 7377; WAN024BPZ_at; Start 120; Stop 144
tgtaaatgatgggtctaaagatgag

SEQ ID NO: 89814 - DNA, 25 bp, Artificial
  probe
  misc_feature (1)..(25): SEQ ID NO: 7377; WAN024BPZ_at; Start 781; Stop 805
gagacaattgctagatgtgttacta

SEQ ID NO: 89815 - DNA, 25 bp, Artificial
  probe
  misc_feature (1)..(25): SEQ ID NO: 7377; WAN024BPZ_at; Start 853; Stop 877
aaggaacttcttgattttgatcaga

SEQ ID NO: 89816 - DNA, 25 bp, Artificial
  probe
  misc_feature (1)..(25): SEQ ID NO: 7377; WAN024BPZ_at; Start 283; Stop 307
gctgatgattgggtagatagtgaaa

SEQ ID NO: 89817 - DNA, 25 bp, Artificial
  probe
  misc_feature (1)..(25): SEQ ID NO: 7377; WAN024BPZ_at; Start 897; Stop 921
tgagttctattatcataaacaaggg

SEQ ID NO: 89818 - DNA, 25 bp, Artificial
  probe
  misc_feature (1)..(25): SEQ ID NO: 7377; WAN024BPZ_at; Start 220; Stop 244
catggatctacaattaatgctggga

SEQ ID NO: 89819 - DNA, 25 bp, Artificial
  probe
  misc_feature (1)..(25): SEQ ID NO: 7377; WAN024BPZ_at; Start 371; Stop 395
cagacgtttttgaagatgatggtac

SEQ ID NO: 89820 - DNA, 25 bp, Artificial
  probe
  misc_feature (1)..(25): SEQ ID NO: 7377; WAN024BPZ_at; Start 637; Stop 661
cagtatcgtagaggttacgagggac

SEQ ID NO: 89821 - DNA, 25 bp, Artificial
  probe
  misc_feature (1)..(25): SEQ ID NO: 7377; WAN024BPZ_at; Start 341; Stop 365
cagatgccgatgaaattatctctcc

SEQ ID NO: 89822 - DNA, 25 bp, Artificial
  probe
  misc_feature (1)..(25): SEQ ID NO: 7377; WAN024BPZ_at; Start 421; Stop 445
gattgttcattaaaaccataccagg

SEQ ID NO: 89823 - DNA, 25 bp, Artificial
  probe
  misc_feature (1)..(25): SEQ ID NO: 7377; WAN024BPZ_at; Start 162; Stop 186
gaaactggaaaaagagtattctggc

SEQ ID NO: 89824 - DNA, 25 bp, Artificial
  probe
  misc_feature (1)..(25): SEQ ID NO: 7377; WAN024BPZ_at; Start 266; Stop 290
actttaaagttgttgatgctgatga

SEQ ID NO: 89825 - DNA, 25 bp, Artificial
  probe
  misc_feature (1)..(25): SEQ ID NO: 7377; WAN024BPZ_at; Start 133; Stop 157
tctaaagatgagacacttcaagtgg

SEQ ID NO: 89826 - DNA, 25 bp, Artificial
  probe
  misc_feature (1)..(25): SEQ ID NO: 7377; WAN024BPZ_at; Start 762; Stop 786
tctggaaaaactagttaaagagaca

SEQ ID NO: 89827 - DNA, 25 bp, Artificial
  probe
  misc_feature (1)..(25): SEQ ID NO: 7377; WAN024BPZ_at; Start 552; Stop 576
gaatatgttctacgttgacatggag

SEQ ID NO: 89828 - DNA, 25 bp, Artificial
  probe
  misc_feature (1)..(25): SEQ ID NO: 7377; WAN024BPZ_at; Start 812; Stop 836
caaatgtttgtctatcaatggaaga

SEQ ID NO: 89829 - DNA, 25 bp, Artificial
  probe
  misc_feature (1)..(25): SEQ ID NO: 7377; WAN024BPZ_at; Start 652; Stop 676
tacgagggacagagtacgagtattc

SEQ ID NO: 89830 - DNA, 25 bp, Artificial
  probe
  misc_feature (1)..(25): SEQ ID NO: 7377; WAN024BPZ_at; Start 325; Stop 349
caatttcttcataaaacagatgccg

SEQ ID NO: 89831 - DNA, 25 bp, Artificial
  probe
  misc_feature (1)..(25): SEQ ID NO: 7377; WAN024BPZ_at; Start 234; Stop 258
taatgctgggataagggaagctaaa

SEQ ID NO: 89832 - DNA, 25 bp, Artificial
  probe
  misc_feature (1)..(25): SEQ ID NO: 7377; WAN024BPZ_at; Start 208; Stop 232
gaaaatggcggtcatggatctacaa

SEQ ID NO: 89833 - DNA, 25 bp, Artificial
  probe
  misc_feature (1)..(25): SEQ ID NO: 7377; WAN024BPZ_at; Start 964; Stop 988
gacttgttgtctagctactctaaga

SEQ ID NO: 89834 - DNA, 25 bp, Artificial
  probe
  misc_feature (1)..(25): SEQ ID NO: 6925; WAN024BQ2_at; Start 895; Stop 919
gacgatgaacataccgaaaacttca

SEQ ID NO: 89835 - DNA, 25 bp, Artificial
  probe
  misc_feature (1)..(25): SEQ ID NO: 6925; WAN024BQ2_at; Start 810; Stop 834
tgtgggtgaatatgtgcctctggct

SEQ ID NO: 89836 - DNA, 25 bp, Artificial
  probe
  misc_feature (1)..(25): SEQ ID NO: 6925; WAN024BQ2_at; Start 219; Stop 243
tgaatggctggatgcaaatcaccct

SEQ ID NO: 89837 - DNA, 25 bp, Artificial
  probe
  misc_feature (1)..(25): SEQ ID NO: 6925; WAN024BQ2_at; Start 203; Stop 227
catatgggcatttacctgaatggct

SEQ ID NO: 89838 - DNA, 25 bp, Artificial
  probe
  misc_feature (1)..(25): SEQ ID NO: 6925; WAN024BQ2_at; Start 797; Stop 821
cacagactcttcgtgtgggtgaata

SEQ ID NO: 89839 - DNA, 25 bp, Artificial
  probe
  misc_feature (1)..(25): SEQ ID NO: 6925; WAN024BQ2_at; Start 271; Stop 295
tatattccaaaagaatacttaccga

SEQ ID NO: 89840 - DNA, 25 bp, Artificial
  probe
  misc_feature (1)..(25): SEQ ID NO: 6925; WAN024BQ2_at; Start 880; Stop 904
tttttgtgtataaacgacgatgaac

SEQ ID NO: 89841 - DNA, 25 bp, Artificial
  probe
  misc_feature (1)..(25): SEQ ID NO: 6925; WAN024BQ2_at; Start 138; Stop 162
gtttcaatattggtttcgagcggta

SEQ ID NO: 89842 - DNA, 25 bp, Artificial
  probe
  misc_feature (1)..(25): SEQ ID NO: 6925; WAN024BQ2_at; Start 333; Stop 357
gattaaggaattgagtgagcagttc

SEQ ID NO: 89843 - DNA, 25 bp, Artificial
  probe
  misc_feature (1)..(25): SEQ ID NO: 6925; WAN024BQ2_at; Start 660; Stop 684
gaaaagtacttttgcagagatttgg

SEQ ID NO: 89844 - DNA, 25 bp, Artificial
  probe
  misc_feature (1)..(25): SEQ ID NO: 6925; WAN024BQ2_at; Start 733; Stop 757
tcaactaaagatgttaaccattggt

SEQ ID NO: 89845 - DNA, 25 bp, Artificial
  probe
  misc_feature (1)..(25): SEQ ID NO: 6925; WAN024BQ2_at; Start 430; Stop 454
cgattgttgagtatatatagaccat

SEQ ID NO: 89846 - DNA, 25 bp, Artificial
  probe
  misc_feature (1)..(25): SEQ ID NO: 6925; WAN024BQ2_at; Start 171; Stop 195
tgcgccctgggttaataatatttat

SEQ ID NO: 89847 - DNA, 25 bp, Artificial
  probe
  misc_feature (1)..(25): SEQ ID NO: 6925; WAN024BQ2_at; Start 695; Stop 719
gggtacttctagatcgagtttgtaa

SEQ ID NO: 89848 - DNA, 25 bp, Artificial
  probe
  misc_feature (1)..(25): SEQ ID NO: 6925; WAN024BQ2_at; Start 747; Stop 771
taaccattggttgatgagctattgg

SEQ ID NO: 89849 - DNA, 25 bp, Artificial
  probe
  misc_feature (1)..(25): SEQ ID NO: 6925; WAN024BQ2_at; Start 27; Stop 51
tacatgggttaatggaaatgatcca

SEQ ID NO: 89850 - DNA, 25 bp, Artificial
  probe
  misc_feature (1)..(25): SEQ ID NO: 6925; WAN024BQ2_at; Start 529; Stop 553
aaaacattatcacaacataagggta

SEQ ID NO: 89851 - DNA, 25 bp, Artificial
  probe
  misc_feature (1)..(25): SEQ ID NO: 6925; WAN024BQ2_at; Start 158; Stop 182
cggtagaaaaacatgcgccctgggt

SEQ ID NO: 89852 - DNA, 25 bp, Artificial
  probe
  misc_feature (1)..(25): SEQ ID NO: 6925; WAN024BQ2_at; Start 445; Stop 469
tatagaccattaattccaactaaag

SEQ ID NO: 89853 - DNA, 25 bp, Artificial
  probe
  misc_feature (1)..(25): SEQ ID NO: 6925; WAN024BQ2_at; Start 631; Stop 655
catgatgctcatgtcgctatgcctc

SEQ ID NO: 89854 - DNA, 25 bp, Artificial
  probe
  misc_feature (1)..(25): SEQ ID NO: 6925; WAN024BQ2_at; Start 228; Stop 252
ggatgcaaatcaccctaaattgaag

SEQ ID NO: 89855 - DNA, 25 bp, Artificial
  probe
  misc_feature (1)..(25): SEQ ID NO: 6925; WAN024BQ2_at; Start 292; Stop 316
ccgacttttagttcaaatgtaattg

SEQ ID NO: 89856 - DNA, 25 bp, Artificial
  probe
  misc_feature (1)..(25): SEQ ID NO: 6925; WAN024BQ2_at; Start 416; Stop 440
aaaataacttacctcgattgttgag

SEQ ID NO: 89857 - DNA, 25 bp, Artificial
  probe
  misc_feature (1)..(25): SEQ ID NO: 6925; WAN024BQ2_at; Start 614; Stop 638
cagggattattggttatcatgatgc

SEQ ID NO: 89858 - DNA, 25 bp, Artificial
  probe
  misc_feature (1)..(25): SEQ ID NO: 6925; WAN024BQ2_at; Start 671; Stop 695
ttgcagagatttggaataaggaagg

SEQ ID NO: 89859 - DNA, 25 bp, Artificial
  probe
  misc_feature (1)..(25): SEQ ID NO: 6925; WAN024BQ2_at; Start 93; Stop 117
taggccgactttaaatgatgaaaca

SEQ ID NO: 89860 - DNA, 25 bp, Artificial
  probe
  misc_feature (1)..(25): SEQ ID NO: 6925; WAN024BQ2_at; Start 823; Stop 847
gtgcctctggcttattcaggtaaaa

SEQ ID NO: 89861 - DNA, 25 bp, Artificial
  probe
  misc_feature (1)..(25): SEQ ID NO: 6925; WAN024BQ2_at; Start 78; Stop 102
cgaagttctagatggtaggccgact

SEQ ID NO: 89862 - DNA, 25 bp, Artificial
  probe
  misc_feature (1)..(25): SEQ ID NO: 6925; WAN024BQ2_at; Start 241; Stop 265
cctaaattgaagatagtaaaacatg

SEQ ID NO: 89863 - DNA, 25 bp, Artificial
  probe
  misc_feature (1)..(25): SEQ ID NO: 6925; WAN024BQ2_at; Start 151; Stop 175
tttcgagcggtagaaaaacatgcgc

SEQ ID NO: 89864 - DNA, 25 bp, Artificial
  probe
  misc_feature (1)..(25): SEQ ID NO: 6925; WAN024BQ2_at; Start 778; Stop 802
gaaacaaattcatttatgccacaga

SEQ ID NO: 89865 - DNA, 25 bp, Artificial
  probe
  misc_feature (1)..(25): SEQ ID NO: 6925; WAN024BQ2_at; Start 349; Stop 373
gagcagttcgttctgtttagtgatg

SEQ ID NO: 89866 - DNA, 25 bp, Artificial
  probe
  misc_feature (1)..(25): SEQ ID NO: 6925; WAN024BQ2_at; Start 644; Stop 668
tcgctatgcctcatttgaaaagtac

SEQ ID NO: 89867 - DNA, 25 bp, Artificial
  probe
  misc_feature (1)..(25): SEQ ID NO: 6925; WAN024BQ2_at; Start 42; Stop 66
aaatgatccagtgtggcgtgaggaa

SEQ ID NO: 89868 - DNA, 25 bp, Artificial
  probe
  misc_feature (1)..(25): SEQ ID NO: 6329; WAN024BQ3_at; Start 974; Stop 998
gctgggcaaacttccttgatgaaat

SEQ ID NO: 89869 - DNA, 25 bp, Artificial
  probe
  misc_feature (1)..(25): SEQ ID NO: 6329; WAN024BQ3_at; Start 81; Stop 105
taatcgcgaaaaattagccttagat

SEQ ID NO: 89870 - DNA, 25 bp, Artificial
  probe
  misc_feature (1)..(25): SEQ ID NO: 6329; WAN024BQ3_at; Start 408; Stop 432
caaaattgaaaagtgggcaaccgat

SEQ ID NO: 89871 - DNA, 25 bp, Artificial
  probe
  misc_feature (1)..(25): SEQ ID NO: 6329; WAN024BQ3_at; Start 529; Stop 553
tctattttttcttctgaggcacgag

SEQ ID NO: 89872 - DNA, 25 bp, Artificial
  probe
  misc_feature (1)..(25): SEQ ID NO: 6329; WAN024BQ3_at; Start 586; Stop 610
aaatttgtgctaggtcatgtaggac

SEQ ID NO: 89873 - DNA, 25 bp, Artificial
  probe
  misc_feature (1)..(25): SEQ ID NO: 6329; WAN024BQ3_at; Start 326; Stop 350
ttccggttcgaattgtacacagcca

SEQ ID NO: 89874 - DNA, 25 bp, Artificial
  probe
  misc_feature (1)..(25): SEQ ID NO: 6329; WAN024BQ3_at; Start 442; Stop 466
tgttcgcacgaagctgcaaaatggt

SEQ ID NO: 89875 - DNA, 25 bp, Artificial
  probe
  misc_feature (1)..(25): SEQ ID NO: 6329; WAN024BQ3_at; Start 30; Stop 54
tgaaaaccctggtggagttgaatcc

SEQ ID NO: 89876 - DNA, 25 bp, Artificial
  probe
  misc_feature (1)..(25): SEQ ID NO: 6329; WAN024BQ3_at; Start 177; Stop 201
cctgacagcgagaagtaaaaatccg

SEQ ID NO: 89877 - DNA, 25 bp, Artificial
  probe
  misc_feature (1)..(25): SEQ ID NO: 6329; WAN024BQ3_at; Start 601; Stop 625
catgtaggacgtttgcattttcaga

SEQ ID NO: 89878 - DNA, 25 bp, Artificial
  probe
  misc_feature (1)..(25): SEQ ID NO: 6329; WAN024BQ3_at; Start 160; Stop 184
ggagcaagagtttttcacctgacag

SEQ ID NO: 89879 - DNA, 25 bp, Artificial
  probe
  misc_feature (1)..(25): SEQ ID NO: 6329; WAN024BQ3_at; Start 311; Stop 335
caagatattttggtattccggttcg

SEQ ID NO: 89880 - DNA, 25 bp, Artificial
  probe
  misc_feature (1)..(25): SEQ ID NO: 6329; WAN024BQ3_at; Start 1060; Stop 1084
tacgatattaagatagctgctcaga

SEQ ID NO: 89881 - DNA, 25 bp, Artificial
  probe
  misc_feature (1)..(25): SEQ ID NO: 6329; WAN024BQ3_at; Start 245; Stop 269
catctgattatcaggcaatttgggt

SEQ ID NO: 89882 - DNA, 25 bp, Artificial
  probe
  misc_feature (1)..(25): SEQ ID NO: 6329; WAN024BQ3_at; Start 1078; Stop 1102
gctcagaatcttgaaaaacaattgc

SEQ ID NO: 89883 - DNA, 25 bp, Artificial
  probe
  misc_feature (1)..(25): SEQ ID NO: 6329; WAN024BQ3_at; Start 848; Stop 872
taggaatagctgcattagaggctca

SEQ ID NO: 89884 - DNA, 25 bp, Artificial
  probe
  misc_feature (1)..(25): SEQ ID NO: 6329; WAN024BQ3_at; Start 880; Stop 904
ggtctaccgacactactctcagaag

SEQ ID NO: 89885 - DNA, 25 bp, Artificial
  probe
  misc_feature (1)..(25): SEQ ID NO: 6329; WAN024BQ3_at; Start 145; Stop 169
gaacttatttctaaaggagcaagag

SEQ ID NO: 89886 - DNA, 25 bp, Artificial
  probe
  misc_feature (1)..(25): SEQ ID NO: 6329; WAN024BQ3_at; Start 764; Stop 788
tctactttgtgggagttcagtcgaa

SEQ ID NO: 89887 - DNA, 25 bp, Artificial
  probe
  misc_feature (1)..(25): SEQ ID NO: 6329; WAN024BQ3_at; Start 720; Stop 744
caaattaaagatactggctgaggag

SEQ ID NO: 89888 - DNA, 25 bp, Artificial
  probe
  misc_feature (1)..(25): SEQ ID NO: 6329; WAN024BQ3_at; Start 896; Stop 920
tctcagaagaaggtgtaccaaagga

SEQ ID NO: 89889 - DNA, 25 bp, Artificial
  probe
  misc_feature (1)..(25): SEQ ID NO: 6329; WAN024BQ3_at; Start 541; Stop 565
tctgaggcacgagataaaattcgaa

SEQ ID NO: 89890 - DNA, 25 bp, Artificial
  probe
  misc_feature (1)..(25): SEQ ID NO: 6329; WAN024BQ3_at; Start 17; Stop 41
tattcggaatgaatgaaaaccctgg

SEQ ID NO: 89891 - DNA, 25 bp, Artificial
  probe
  misc_feature (1)..(25): SEQ ID NO: 6329; WAN024BQ3_at; Start 960; Stop 984
ggaaagtgaagaaagctgggcaaac

SEQ ID NO: 89892 - DNA, 25 bp, Artificial
  probe
  misc_feature (1)..(25): SEQ ID NO: 6329; WAN024BQ3_at; Start 663; Stop 687
acaggaatttagagacgatgtctgc

SEQ ID NO: 89893 - DNA, 25 bp, Artificial
  probe
  misc_feature (1)..(25): SEQ ID NO: 6329; WAN024BQ3_at; Start 994; Stop 1018
gaaatgattcatacaacaactcgtt

SEQ ID NO: 89894 - DNA, 25 bp, Artificial
  probe
  misc_feature (1)..(25): SEQ ID NO: 6329; WAN024BQ3_at; Start 865; Stop 889
gaggctcaagtaaatggtctaccga

SEQ ID NO: 89895 - DNA, 25 bp, Artificial
  probe
  misc_feature (1)..(25): SEQ ID NO: 6329; WAN024BQ3_at; Start 1040; Stop 1064
aaaattttgagaaatctggctacga

SEQ ID NO: 89896 - DNA, 25 bp, Artificial
  probe
  misc_feature (1)..(25): SEQ ID NO: 6329; WAN024BQ3_at; Start 780; Stop 804
tcagtcgaatatatcagaatggttg

SEQ ID NO: 89897 - DNA, 25 bp, Artificial
  probe
  misc_feature (1)..(25): SEQ ID NO: 6329; WAN024BQ3_at; Start 425; Stop 449
caaccgatttctgggcttgttcgca

SEQ ID NO: 89898 - DNA, 25 bp, Artificial
  probe
  misc_feature (1)..(25): SEQ ID NO: 6329; WAN024BQ3_at; Start 363; Stop 387
tatggataccaaacttcgtgaaaaa

SEQ ID NO: 89899 - DNA, 25 bp, Artificial
  probe
  misc_feature (1)..(25): SEQ ID NO: 6329; WAN024BQ3_at; Start 731; Stop 755
tactggctgaggagctatctattca

SEQ ID NO: 89900 - DNA, 25 bp, Artificial
  probe
  misc_feature (1)..(25): SEQ ID NO: 6329; WAN024BQ3_at; Start 748; Stop 772
tctattcaggataaggtctactttg

SEQ ID NO: 89901 - DNA, 25 bp, Artificial
  probe
  misc_feature (1)..(25): SEQ ID NO: 6329; WAN024BQ3_at; Start 697; Stop 721
gttggtcaaggtgaagatcttaaca

SEQ ID NO: 89902 - DNA, 25 bp, Artificial
  probe
  misc_feature (1)..(25): SEQ ID NO: 7513; WAN024BQ4_at; Start 173; Stop 197
tagcgaccgaaaactcaaatatacg

SEQ ID NO: 89903 - DNA, 25 bp, Artificial
  probe
  misc_feature (1)..(25): SEQ ID NO: 7513; WAN024BQ4_at; Start 730; Stop 754
gataatactattcaagaagcctttg

SEQ ID NO: 89904 - DNA, 25 bp, Artificial
  probe
  misc_feature (1)..(25): SEQ ID NO: 7513; WAN024BQ4_at; Start 952; Stop 976
catttgtatcatttagcggcattgg

SEQ ID NO: 89905 - DNA, 25 bp, Artificial
  probe
  misc_feature (1)..(25): SEQ ID NO: 7513; WAN024BQ4_at; Start 188; Stop 212
caaatatacgagtcttgaaatcaga

SEQ ID NO: 89906 - DNA, 25 bp, Artificial
  probe
  misc_feature (1)..(25): SEQ ID NO: 7513; WAN024BQ4_at; Start 637; Stop 661
gattcaccttcaacgatgaggacat

SEQ ID NO: 89907 - DNA, 25 bp, Artificial
  probe
  misc_feature (1)..(25): SEQ ID NO: 7513; WAN024BQ4_at; Start 130; Stop 154
gaaaatggttcaacagatcaatcat

SEQ ID NO: 89908 - DNA, 25 bp, Artificial
  probe
  misc_feature (1)..(25): SEQ ID NO: 7513; WAN024BQ4_at; Start 52; Stop 76
gaagatacgattattagagcagtaa

SEQ ID NO: 89909 - DNA, 25 bp, Artificial
  probe
  misc_feature (1)..(25): SEQ ID NO: 7513; WAN024BQ4_at; Start 572; Stop 596
tcagatttcttttgctgattcacag

SEQ ID NO: 89910 - DNA, 25 bp, Artificial
  probe
  misc_feature (1)..(25): SEQ ID NO: 7513; WAN024BQ4_at; Start 347; Stop 371
cagatttatgcgtttataactacga

SEQ ID NO: 89911 - DNA, 25 bp, Artificial
  probe
  misc_feature (1)..(25): SEQ ID NO: 7513; WAN024BQ4_at; Start 200; Stop 224
tcttgaaatcagataaaggaaccag

SEQ ID NO: 89912 - DNA, 25 bp, Artificial
  probe
  misc_feature (1)..(25): SEQ ID NO: 7513; WAN024BQ4_at; Start 165; Stop 189
tcaaaaattagcgaccgaaaactca

SEQ ID NO: 89913 - DNA, 25 bp, Artificial
  probe
  misc_feature (1)..(25): SEQ ID NO: 7513; WAN024BQ4_at; Start 498; Stop 522
taaaaatttgattgatgagtacggt

SEQ ID NO: 89914 - DNA, 25 bp, Artificial
  probe
  misc_feature (1)..(25): SEQ ID NO: 7513; WAN024BQ4_at; Start 532; Stop 556
aatacgaatttgagagtttcagaag

SEQ ID NO: 89915 - DNA, 25 bp, Artificial
  probe
  misc_feature (1)..(25): SEQ ID NO: 7513; WAN024BQ4_at; Start 444; Stop 468
tcaatctctttctgaacccactaaa

SEQ ID NO: 89916 - DNA, 25 bp, Artificial
  probe
  misc_feature (1)..(25): SEQ ID NO: 7513; WAN024BQ4_at; Start 867; Stop 891
gcctatgttttttgagcctatacaa

SEQ ID NO: 89917 - DNA, 25 bp, Artificial
  probe
  misc_feature (1)..(25): SEQ ID NO: 7513; WAN024BQ4_at; Start 981; Stop 1005
cattattcgagtagggcaaaacaaa

SEQ ID NO: 89918 - DNA, 25 bp, Artificial
  probe
  misc_feature (1)..(25): SEQ ID NO: 7513; WAN024BQ4_at; Start 605; Stop 629
taacttctcaaacgctataccatta

SEQ ID NO: 89919 - DNA, 25 bp, Artificial
  probe
  misc_feature (1)..(25): SEQ ID NO: 7513; WAN024BQ4_at; Start 647; Stop 671
caacgatgaggacattttcttcaga

SEQ ID NO: 89920 - DNA, 25 bp, Artificial
  probe
  misc_feature (1)..(25): SEQ ID NO: 7513; WAN024BQ4_at; Start 231; Stop 255
cagaaacgtaggaatcgaaaaatct

SEQ ID NO: 89921 - DNA, 25 bp, Artificial
  probe
  misc_feature (1)..(25): SEQ ID NO: 7513; WAN024BQ4_at; Start 691; Stop 715
gtttccttgaatgaaagctcaaaag

SEQ ID NO: 89922 - DNA, 25 bp, Artificial
  probe
  misc_feature (1)..(25): SEQ ID NO: 7513; WAN024BQ4_at; Start 211; Stop 235
gataaaggaaccagttttgccagaa

SEQ ID NO: 89923 - DNA, 25 bp, Artificial
  probe
  misc_feature (1)..(25): SEQ ID NO: 7513; WAN024BQ4_at; Start 749; Stop 773
cctttgagttatataagttggcgca

SEQ ID NO: 89924 - DNA, 25 bp, Artificial
  probe
  misc_feature (1)..(25): SEQ ID NO: 7513; WAN024BQ4_at; Start 967; Stop 991
gcggcattggtttacattattcgag

SEQ ID NO: 89925 - DNA, 25 bp, Artificial
  probe
  misc_feature (1)..(25): SEQ ID NO: 7513; WAN024BQ4_at; Start 410; Stop 434
tagagttgatagatgaccttgattc

SEQ ID NO: 89926 - DNA, 25 bp, Artificial
  probe
  misc_feature (1)..(25): SEQ ID NO: 7513; WAN024BQ4_at; Start 389; Stop 413
tagaacttttttcagaagaggtaga

SEQ ID NO: 89927 - DNA, 25 bp, Artificial
  probe
  misc_feature (1)..(25): SEQ ID NO: 7513; WAN024BQ4_at; Start 703; Stop 727
gaaagctcaaaagtattaggaaatg

SEQ ID NO: 89928 - DNA, 25 bp, Artificial
  probe
  misc_feature (1)..(25): SEQ ID NO: 7513; WAN024BQ4_at; Start 301; Stop 325
gaatcggatttagacgttattgttg

SEQ ID NO: 89929 - DNA, 25 bp, Artificial
  probe
  misc_feature (1)..(25): SEQ ID NO: 7513; WAN024BQ4_at; Start 849; Stop 873
gattagactttataagatgcctatg

SEQ ID NO: 89930 - DNA, 25 bp, Artificial
  probe
  misc_feature (1)..(25): SEQ ID NO: 7513; WAN024BQ4_at; Start 892; Stop 916
aatctatctgtatctagtgttagca

SEQ ID NO: 89931 - DNA, 25 bp, Artificial
  probe
  misc_feature (1)..(25): SEQ ID NO: 7513; WAN024BQ4_at; Start 989; Stop 1013
gagtagggcaaaacaaattcaaaga

SEQ ID NO: 89932 - DNA, 25 bp, Artificial
  probe
  misc_feature (1)..(25): SEQ ID NO: 7513; WAN024BQ4_at; Start 913; Stop 937
agcaatttatcgctagtacctctat

SEQ ID NO: 89933 - DNA, 25 bp, Artificial
  probe
  misc_feature (1)..(25): SEQ ID NO: 7513; WAN024BQ4_at; Start 38; Stop 62
cattacataatggagaagatacgat

SEQ ID NO: 89934 - DNA, 25 bp, Artificial
  probe
  misc_feature (1)..(25): SEQ ID NO: 7513; WAN024BQ4_at; Start 878; Stop 902
ttgagcctatacaaaatctatctgt

SEQ ID NO: 89935 - DNA, 25 bp, Artificial
  probe
  misc_feature (1)..(25): SEQ ID NO: 7513; WAN024BQ4_at; Start 459; Stop 483
acccactaaatatatgacagtatgg

SEQ ID NO: 89936 - DNA, 25 bp, Artificial
  probe
  misc_feature (1)..(25): SEQ ID NO: 7528; WAN024BQ5_at; Start 161; Stop 185
catatagtttggatcagataccggc

SEQ ID NO: 89937 - DNA, 25 bp, Artificial
  probe
  misc_feature (1)..(25): SEQ ID NO: 7528; WAN024BQ5_at; Start 340; Stop 364
cagtcgtctaatgtaatgttgagtg

SEQ ID NO: 89938 - DNA, 25 bp, Artificial
  probe
  misc_feature (1)..(25): SEQ ID NO: 7528; WAN024BQ5_at; Start 583; Stop 607
ggctttgcattaccgatgattgcat

SEQ ID NO: 89939 - DNA, 25 bp, Artificial
  probe
  misc_feature (1)..(25): SEQ ID NO: 7528; WAN024BQ5_at; Start 143; Stop 167
taggaatagattataccacatatag

SEQ ID NO: 89940 - DNA, 25 bp, Artificial
  probe
  misc_feature (1)..(25): SEQ ID NO: 7528; WAN024BQ5_at; Start 608; Stop 632
cattattttctttttctgggtctga

SEQ ID NO: 89941 - DNA, 25 bp, Artificial
  probe
  misc_feature (1)..(25): SEQ ID NO: 7528; WAN024BQ5_at; Start 359; Stop 383
tgagtgtgttttttcttctaaccac

SEQ ID NO: 89942 - DNA, 25 bp, Artificial
  probe
  misc_feature (1)..(25): SEQ ID NO: 7528; WAN024BQ5_at; Start 729; Stop 753
cacaatcgttatgtgtttatcggta

SEQ ID NO: 89943 - DNA, 25 bp, Artificial
  probe
  misc_feature (1)..(25): SEQ ID NO: 7528; WAN024BQ5_at; Start 567; Stop 591
tattaataggttcgttggctttgca

SEQ ID NO: 89944 - DNA, 25 bp, Artificial
  probe
  misc_feature (1)..(25): SEQ ID NO: 7528; WAN024BQ5_at; Start 858; Stop 882
tcctactccatcaagaactatttat

SEQ ID NO: 89945 - DNA, 25 bp, Artificial
  probe
  misc_feature (1)..(25): SEQ ID NO: 7528; WAN024BQ5_at; Start 431; Stop 455
cagcgattgttttttatgcgttgaa

SEQ ID NO: 89946 - DNA, 25 bp, Artificial
  probe
  misc_feature (1)..(25): SEQ ID NO: 7528; WAN024BQ5_at; Start 712; Stop 736
aaacaacaccaactattcacaatcg

SEQ ID NO: 89947 - DNA, 25 bp, Artificial
  probe
  misc_feature (1)..(25): SEQ ID NO: 7528; WAN024BQ5_at; Start 324; Stop 348
taaatatattgttcaacagtcgtct

SEQ ID NO: 89948 - DNA, 25 bp, Artificial
  probe
  misc_feature (1)..(25): SEQ ID NO: 7528; WAN024BQ5_at; Start 678; Stop 702
cgttggttctcgttattatacagga

SEQ ID NO: 89949 - DNA, 25 bp, Artificial
  probe
  misc_feature (1)..(25): SEQ ID NO: 7528; WAN024BQ5_at; Start 942; Stop 966
taggtctaaggtaatcataacaatg

SEQ ID NO: 89950 - DNA, 25 bp, Artificial
  probe
  misc_feature (1)..(25): SEQ ID NO: 7528; WAN024BQ5_at; Start 665; Stop 689
tttattcagaatacgttggttctcg

SEQ ID NO: 89951 - DNA, 25 bp, Artificial
  probe
  misc_feature (1)..(25): SEQ ID NO: 7528; WAN024BQ5_at; Start 827; Stop 851
tattactagttgcaataatcatgcc

SEQ ID NO: 89952 - DNA, 25 bp, Artificial
  probe
  misc_feature (1)..(25): SEQ ID NO: 7528; WAN024BQ5_at; Start 400; Stop 424
tctttatcaggaatacgccaatcaa

SEQ ID NO: 89953 - DNA, 25 bp, Artificial
  probe
  misc_feature (1)..(25): SEQ ID NO: 7528; WAN024BQ5_at; Start 174; Stop 198
tcagataccggctgtattagctggt

SEQ ID NO: 89954 - DNA, 25 bp, Artificial
  probe
  misc_feature (1)..(25): SEQ ID NO: 7528; WAN024BQ5_at; Start 113; Stop 137
ttatcttgataggagcacttagagc

SEQ ID NO: 89955 - DNA, 25 bp, Artificial
  probe
  misc_feature (1)..(25): SEQ ID NO: 7528; WAN024BQ5_at; Start 128; Stop 152
cacttagagcttatgtaggaataga

SEQ ID NO: 89956 - DNA, 25 bp, Artificial
  probe
  misc_feature (1)..(25): SEQ ID NO: 7528; WAN024BQ5_at; Start 1014; Stop 1038
gaggaatgcatatgaaacactaccg

SEQ ID NO: 89957 - DNA, 25 bp, Artificial
  probe
  misc_feature (1)..(25): SEQ ID NO: 7528; WAN024BQ5_at; Start 505; Stop 529
gcttgtttatttcattctagtgcag

SEQ ID NO: 89958 - DNA, 25 bp, Artificial
  probe
  misc_feature (1)..(25): SEQ ID NO: 7528; WAN024BQ5_at; Start 288; Stop 312
tgcaatatttcacattatcctgatg

SEQ ID NO: 89959 - DNA, 25 bp, Artificial
  probe
  misc_feature (1)..(25): SEQ ID NO: 7528; WAN024BQ5_at; Start 13; Stop 37
ggtacgatgcttctctcaatgttga

SEQ ID NO: 89960 - DNA, 25 bp, Artificial
  probe
  misc_feature (1)..(25): SEQ ID NO: 7528; WAN024BQ5_at; Start 622; Stop 646
tctgggtctgaatttgtatctcgaa

SEQ ID NO: 89961 - DNA, 25 bp, Artificial
  probe
  misc_feature (1)..(25): SEQ ID NO: 7528; WAN024BQ5_at; Start 413; Stop 437
tacgccaatcaatagctacagcgat

SEQ ID NO: 89962 - DNA, 25 bp, Artificial
  probe
  misc_feature (1)..(25): SEQ ID NO: 7528; WAN024BQ5_at; Start 247; Stop 271
ggttactatctagctaatcagcagc

SEQ ID NO: 89963 - DNA, 25 bp, Artificial
  probe
  misc_feature (1)..(25): SEQ ID NO: 7528; WAN024BQ5_at; Start 188; Stop 212
tattagctggtagtcagacagtcaa

SEQ ID NO: 89964 - DNA, 25 bp, Artificial
  probe
  misc_feature (1)..(25): SEQ ID NO: 7528; WAN024BQ5_at; Start 1032; Stop 1056
actaccgtaccacacaatctttgag

SEQ ID NO: 89965 - DNA, 25 bp, Artificial
  probe
  misc_feature (1)..(25): SEQ ID NO: 7528; WAN024BQ5_at; Start 842; Stop 866
taatcatgccaatacttcctactcc

SEQ ID NO: 89966 - DNA, 25 bp, Artificial
  probe
  misc_feature (1)..(25): SEQ ID NO: 7528; WAN024BQ5_at; Start 999; Stop 1023
tataacggttctacagaggaatgca

SEQ ID NO: 89967 - DNA, 25 bp, Artificial
  probe
  misc_feature (1)..(25): SEQ ID NO: 7528; WAN024BQ5_at; Start 303; Stop 327
tatcctgatgtggtttctgtataaa

SEQ ID NO: 89968 - DNA, 25 bp, Artificial
  probe
  misc_feature (1)..(25): SEQ ID NO: 7528; WAN024BQ5_at; Start 696; Stop 720
tacaggagcatatgataaacaacac

SEQ ID NO: 89969 - DNA, 25 bp, Artificial
  probe
  misc_feature (1)..(25): SEQ ID NO: 7528; WAN024BQ5_at; Start 3; Stop 27
gatttacattggtacgatgcttctc

SEQ ID NO: 89970 - DNA, 25 bp, Artificial
  probe
  misc_feature (1)..(25): SEQ ID NO: 7698; WAN024BQ6_at; Start 61; Stop 85
ttaatctcttctccagtatttgtag

SEQ ID NO: 89971 - DNA, 25 bp, Artificial
  probe
  misc_feature (1)..(25): SEQ ID NO: 7698; WAN024BQ6_at; Start 66; Stop 90
ctcttctccagtatttgtagtagaa

SEQ ID NO: 89972 - DNA, 25 bp, Artificial
  probe
  misc_feature (1)..(25): SEQ ID NO: 7698; WAN024BQ6_at; Start 4; Stop 28
tgtttgatgaatagagatgcacgta

SEQ ID NO: 89973 - DNA, 25 bp, Artificial
  probe
  misc_feature (1)..(25): SEQ ID NO: 7698; WAN024BQ6_at; Start 23; Stop 47
cacgtatcgaaattcaagatagtgg

SEQ ID NO: 89974 - DNA, 25 bp, Artificial
  probe
  misc_feature (1)..(25): SEQ ID NO: 7698; WAN024BQ6_at; Start 40; Stop 64
gatagtggtgatatcgcttgcttaa

SEQ ID NO: 89975 - DNA, 25 bp, Artificial
  probe
  misc_feature (1)..(25): SEQ ID NO: 7698; WAN024BQ6_at; Start 2; Stop 26
tgtgtttgatgaatagagatgcacg

SEQ ID NO: 89976 - DNA, 25 bp, Artificial
  probe
  misc_feature (1)..(25): SEQ ID NO: 7698; WAN024BQ6_at; Start 37; Stop 61
caagatagtggtgatatcgcttgct

SEQ ID NO: 89977 - DNA, 25 bp, Artificial
  probe
  misc_feature (1)..(25): SEQ ID NO: 7698; WAN024BQ6_at; Start 73; Stop 97
ccagtatttgtagtagaattaagtg

SEQ ID NO: 89978 - DNA, 25 bp, Artificial
  probe
  misc_feature (1)..(25): SEQ ID NO: 7698; WAN024BQ6_at; Start 13; Stop 37
aatagagatgcacgtatcgaaattc

SEQ ID NO: 89979 - DNA, 25 bp, Artificial
  probe
  misc_feature (1)..(25): SEQ ID NO: 7698; WAN024BQ6_at; Start 54; Stop 78
cgcttgcttaatctcttctccagta

SEQ ID NO: 89980 - DNA, 25 bp, Artificial
  probe
  misc_feature (1)..(25): SEQ ID NO: 7698; WAN024BQ6_at; Start 44; Stop 68
gtggtgatatcgcttgcttaatctc

SEQ ID NO: 89981 - DNA, 25 bp, Artificial
  probe
  misc_feature (1)..(25): SEQ ID NO: 7698; WAN024BQ6_at; Start 49; Stop 73
gatatcgcttgcttaatctcttctc

SEQ ID NO: 89982 - DNA, 25 bp, Artificial
  probe
  misc_feature (1)..(25): SEQ ID NO: 7698; WAN024BQ6_at; Start 36; Stop 60
tcaagatagtggtgatatcgcttgc

SEQ ID NO: 89983 - DNA, 25 bp, Artificial
  probe
  misc_feature (1)..(25): SEQ ID NO: 7698; WAN024BQ6_at; Start 19; Stop 43
gatgcacgtatcgaaattcaagata

SEQ ID NO: 89984 - DNA, 25 bp, Artificial
  probe
  misc_feature (1)..(25): SEQ ID NO: 7698; WAN024BQ6_at; Start 33; Stop 57
aattcaagatagtggtgatatcgct

SEQ ID NO: 89985 - DNA, 25 bp, Artificial
  probe
  misc_feature (1)..(25): SEQ ID NO: 7698; WAN024BQ6_at; Start 17; Stop 41
gagatgcacgtatcgaaattcaaga

SEQ ID NO: 89986 - DNA, 25 bp, Artificial
  probe
  misc_feature (1)..(25): SEQ ID NO: 7698; WAN024BQ6_at; Start 46; Stop 70
ggtgatatcgcttgcttaatctctt

SEQ ID NO: 89987 - DNA, 25 bp, Artificial
  probe
  misc_feature (1)..(25): SEQ ID NO: 7698; WAN024BQ6_at; Start 64; Stop 88
atctcttctccagtatttgtagtag

SEQ ID NO: 89988 - DNA, 25 bp, Artificial
  probe
  misc_feature (1)..(25): SEQ ID NO: 7698; WAN024BQ6_at; Start 9; Stop 33
gatgaatagagatgcacgtatcgaa

SEQ ID NO: 89989 - DNA, 25 bp, Artificial
  probe
  misc_feature (1)..(25): SEQ ID NO: 7698; WAN024BQ6_at; Start 11; Stop 35
tgaatagagatgcacgtatcgaaat

SEQ ID NO: 89990 - DNA, 25 bp, Artificial
  probe
  misc_feature (1)..(25): SEQ ID NO: 7698; WAN024BQ6_at; Start 42; Stop 66
tagtggtgatatcgcttgcttaatc

SEQ ID NO: 89991 - DNA, 25 bp, Artificial
  probe
  misc_feature (1)..(25): SEQ ID NO: 7698; WAN024BQ6_at; Start 51; Stop 75
tatcgcttgcttaatctcttctcca

SEQ ID NO: 89992 - DNA, 25 bp, Artificial
  probe
  misc_feature (1)..(25): SEQ ID NO: 7698; WAN024BQ6_at; Start 55; Stop 79
gcttgcttaatctcttctccagtat

SEQ ID NO: 89993 - DNA, 25 bp, Artificial
  probe
  misc_feature (1)..(25): SEQ ID NO: 7698; WAN024BQ6_at; Start 25; Stop 49
cgtatcgaaattcaagatagtggtg

SEQ ID NO: 89994 - DNA, 25 bp, Artificial
  probe
  misc_feature (1)..(25): SEQ ID NO: 7698; WAN024BQ6_at; Start 6; Stop 30
tttgatgaatagagatgcacgtatc

SEQ ID NO: 89995 - DNA, 25 bp, Artificial
  probe
  misc_feature (1)..(25): SEQ ID NO: 7698; WAN024BQ6_at; Start 15; Stop 39
tagagatgcacgtatcgaaattcaa

SEQ ID NO: 89996 - DNA, 25 bp, Artificial
  probe
  misc_feature (1)..(25): SEQ ID NO: 7698; WAN024BQ6_at; Start 32; Stop 56
aaattcaagatagtggtgatatcgc

SEQ ID NO: 89997 - DNA, 25 bp, Artificial
  probe
  misc_feature (1)..(25): SEQ ID NO: 7698; WAN024BQ6_at; Start 81; Stop 105
tgtagtagaattaagtgttcttgat

SEQ ID NO: 89998 - DNA, 25 bp, Artificial
  probe
  misc_feature (1)..(25): SEQ ID NO: 7698; WAN024BQ6_at; Start 27; Stop 51
tatcgaaattcaagatagtggtgat

SEQ ID NO: 89999 - DNA, 25 bp, Artificial
  probe
  misc_feature (1)..(25): SEQ ID NO: 7698; WAN024BQ6_at; Start 21; Stop 45
tgcacgtatcgaaattcaagatagt

SEQ ID NO: 90000 - DNA, 25 bp, Artificial
  probe
  misc_feature (1)..(25): SEQ ID NO: 7698; WAN024BQ6_at; Start 58; Stop 82
tgcttaatctcttctccagtatttg

SEQ ID NO: 90001 - DNA, 25 bp, Artificial
  probe
  misc_feature (1)..(25): SEQ ID NO: 7698; WAN024BQ6_at; Start 71; Stop 95
ctccagtatttgtagtagaattaag

SEQ ID NO: 90002 - DNA, 25 bp, Artificial
  probe
  misc_feature (1)..(25): SEQ ID NO: 7698; WAN024BQ6_at; Start 8; Stop 32
tgatgaatagagatgcacgtatcga

SEQ ID NO: 90003 - DNA, 25 bp, Artificial
  probe
  misc_feature (1)..(25): SEQ ID NO: 7698; WAN024BQ6_at; Start 30; Stop 54
cgaaattcaagatagtggtgatatc

SEQ ID NO: 90004 - DNA, 25 bp, Artificial
  probe
  misc_feature (1)..(25): SEQ ID NO: 7158; WAN024BQ7_at; Start 38; Stop 62
gtgaaatagctctacaaagaattct

SEQ ID NO: 90005 - DNA, 25 bp, Artificial
  probe
  misc_feature (1)..(25): SEQ ID NO: 7158; WAN024BQ7_at; Start 31; Stop 55
ccagctagtgaaatagctctacaaa

SEQ ID NO: 90006 - DNA, 25 bp, Artificial
  probe
  misc_feature (1)..(25): SEQ ID NO: 7158; WAN024BQ7_at; Start 157; Stop 181
tgtattctggtagttgcaaacaact

SEQ ID NO: 90007 - DNA, 25 bp, Artificial
  probe
  misc_feature (1)..(25): SEQ ID NO: 7158; WAN024BQ7_at; Start 34; Stop 58
gctagtgaaatagctctacaaagaa

SEQ ID NO: 90008 - DNA, 25 bp, Artificial
  probe
  misc_feature (1)..(25): SEQ ID NO: 7158; WAN024BQ7_at; Start 125; Stop 149
tattcaatgatgctaagagattctg

SEQ ID NO: 90009 - DNA, 25 bp, Artificial
  probe
  misc_feature (1)..(25): SEQ ID NO: 7158; WAN024BQ7_at; Start 120; Stop 144
tgttctattcaatgatgctaagaga

SEQ ID NO: 90010 - DNA, 25 bp, Artificial
  probe
  misc_feature (1)..(25): SEQ ID NO: 7158; WAN024BQ7_at; Start 129; Stop 153
caatgatgctaagagattctgttct

SEQ ID NO: 90011 - DNA, 25 bp, Artificial
  probe
  misc_feature (1)..(25): SEQ ID NO: 7158; WAN024BQ7_at; Start 70; Stop 94
aaagatccactttctgcaccactag

SEQ ID NO: 90012 - DNA, 25 bp, Artificial
  probe
  misc_feature (1)..(25): SEQ ID NO: 7158; WAN024BQ7_at; Start 14; Stop 38
tgaaaaacaattcttcaccagctag

SEQ ID NO: 90013 - DNA, 25 bp, Artificial
  probe
  misc_feature (1)..(25): SEQ ID NO: 7158; WAN024BQ7_at; Start 29; Stop 53
caccagctagtgaaatagctctaca

SEQ ID NO: 90014 - DNA, 25 bp, Artificial
  probe
  misc_feature (1)..(25): SEQ ID NO: 7158; WAN024BQ7_at; Start 143; Stop 167
gattctgttctttgtgtattctggt

SEQ ID NO: 90015 - DNA, 25 bp, Artificial
  probe
  misc_feature (1)..(25): SEQ ID NO: 7158; WAN024BQ7_at; Start 172; Stop 196
gcaaacaactcacaaggttcggaaa

SEQ ID NO: 90016 - DNA, 25 bp, Artificial
  probe
  misc_feature (1)..(25): SEQ ID NO: 7158; WAN024BQ7_at; Start 165; Stop 189
ggtagttgcaaacaactcacaaggt

SEQ ID NO: 90017 - DNA, 25 bp, Artificial
  probe
  misc_feature (1)..(25): SEQ ID NO: 7158; WAN024BQ7_at; Start 16; Stop 40
aaaaacaattcttcaccagctagtg

SEQ ID NO: 90018 - DNA, 25 bp, Artificial
  probe
  misc_feature (1)..(25): SEQ ID NO: 7158; WAN024BQ7_at; Start 18; Stop 42
aaacaattcttcaccagctagtgaa

SEQ ID NO: 90019 - DNA, 25 bp, Artificial
  probe
  misc_feature (1)..(25): SEQ ID NO: 7158; WAN024BQ7_at; Start 89; Stop 113
cactagttatatctgaaatttatgc

SEQ ID NO: 90020 - DNA, 25 bp, Artificial
  probe
  misc_feature (1)..(25): SEQ ID NO: 7158; WAN024BQ7_at; Start 82; Stop 106
tctgcaccactagttatatctgaaa

SEQ ID NO: 90021 - DNA, 25 bp, Artificial
  probe
  misc_feature (1)..(25): SEQ ID NO: 7158; WAN024BQ7_at; Start 40; Stop 64
gaaatagctctacaaagaattctta

SEQ ID NO: 90022 - DNA, 25 bp, Artificial
  probe
  misc_feature (1)..(25): SEQ ID NO: 7158; WAN024BQ7_at; Start 85; Stop 109
gcaccactagttatatctgaaattt

SEQ ID NO: 90023 - DNA, 25 bp, Artificial
  probe
  misc_feature (1)..(25): SEQ ID NO: 7158; WAN024BQ7_at; Start 171; Stop 195
tgcaaacaactcacaaggttcggaa

SEQ ID NO: 90024 - DNA, 25 bp, Artificial
  probe
  misc_feature (1)..(25): SEQ ID NO: 7158; WAN024BQ7_at; Start 25; Stop 49
tcttcaccagctagtgaaatagctc

SEQ ID NO: 90025 - DNA, 25 bp, Artificial
  probe
  misc_feature (1)..(25): SEQ ID NO: 7158; WAN024BQ7_at; Start 79; Stop 103
ctttctgcaccactagttatatctg

SEQ ID NO: 90026 - DNA, 25 bp, Artificial
  probe
  misc_feature (1)..(25): SEQ ID NO: 7158; WAN024BQ7_at; Start 73; Stop 97
gatccactttctgcaccactagtta

SEQ ID NO: 90027 - DNA, 25 bp, Artificial
  probe
  misc_feature (1)..(25): SEQ ID NO: 7158; WAN024BQ7_at; Start 154; Stop 178
ttgtgtattctggtagttgcaaaca

SEQ ID NO: 90028 - DNA, 25 bp, Artificial
  probe
  misc_feature (1)..(25): SEQ ID NO: 7158; WAN024BQ7_at; Start 150; Stop 174
ttctttgtgtattctggtagttgca

SEQ ID NO: 90029 - DNA, 25 bp, Artificial
  probe
  misc_feature (1)..(25): SEQ ID NO: 7158; WAN024BQ7_at; Start 132; Stop 156
tgatgctaagagattctgttctttg

SEQ ID NO: 90030 - DNA, 25 bp, Artificial
  probe
  misc_feature (1)..(25): SEQ ID NO: 7158; WAN024BQ7_at; Start 136; Stop 160
gctaagagattctgttctttgtgta

SEQ ID NO: 90031 - DNA, 25 bp, Artificial
  probe
  misc_feature (1)..(25): SEQ ID NO: 7158; WAN024BQ7_at; Start 101; Stop 125
ctgaaatttatgcagatattgttct

SEQ ID NO: 90032 - DNA, 25 bp, Artificial
  probe
  misc_feature (1)..(25): SEQ ID NO: 7158; WAN024BQ7_at; Start 56; Stop 80
gaattcttattttcaaagatccact

SEQ ID NO: 90033 - DNA, 25 bp, Artificial
  probe
  misc_feature (1)..(25): SEQ ID NO: 7158; WAN024BQ7_at; Start 113; Stop 137
cagatattgttctattcaatgatgc

SEQ ID NO: 90034 - DNA, 25 bp, Artificial
  probe
  misc_feature (1)..(25): SEQ ID NO: 7158; WAN024BQ7_at; Start 169; Stop 193
gttgcaaacaactcacaaggttcgg

SEQ ID NO: 90035 - DNA, 25 bp, Artificial
  probe
  misc_feature (1)..(25): SEQ ID NO: 7158; WAN024BQ7_at; Start 161; Stop 185
ttctggtagttgcaaacaactcaca

SEQ ID NO: 90036 - DNA, 25 bp, Artificial
  probe
  misc_feature (1)..(25): SEQ ID NO: 7158; WAN024BQ7_at; Start 46; Stop 70
gctctacaaagaattcttattttca

SEQ ID NO: 90037 - DNA, 25 bp, Artificial
  probe
  misc_feature (1)..(25): SEQ ID NO: 7158; WAN024BQ7_at; Start 63; Stop 87
tattttcaaagatccactttctgca

SEQ ID NO: 90038 - DNA, 25 bp, Artificial
  probe
  misc_feature (1)..(25): SEQ ID NO: 7722; WAN024BQ8_at; Start 58; Stop 82
cagttatttgaaacatccttagaaa

SEQ ID NO: 90039 - DNA, 25 bp, Artificial
  probe
  misc_feature (1)..(25): SEQ ID NO: 7722; WAN024BQ8_at; Start 48; Stop 72
tcctcacacacagttatttgaaaca

SEQ ID NO: 90040 - DNA, 25 bp, Artificial
  probe
  misc_feature (1)..(25): SEQ ID NO: 7722; WAN024BQ8_at; Start 57; Stop 81
acagttatttgaaacatccttagaa

SEQ ID NO: 90041 - DNA, 25 bp, Artificial
  probe
  misc_feature (1)..(25): SEQ ID NO: 7722; WAN024BQ8_at; Start 52; Stop 76
cacacacagttatttgaaacatcct

SEQ ID NO: 90042 - DNA, 25 bp, Artificial
  probe
  misc_feature (1)..(25): SEQ ID NO: 7722; WAN024BQ8_at; Start 53; Stop 77
acacacagttatttgaaacatcctt

SEQ ID NO: 90043 - DNA, 25 bp, Artificial
  probe
  misc_feature (1)..(25): SEQ ID NO: 7722; WAN024BQ8_at; Start 56; Stop 80
cacagttatttgaaacatccttaga

SEQ ID NO: 90044 - DNA, 25 bp, Artificial
  probe
  misc_feature (1)..(25): SEQ ID NO: 7722; WAN024BQ8_at; Start 62; Stop 86
tatttgaaacatccttagaaaatga

SEQ ID NO: 90045 - DNA, 25 bp, Artificial
  probe
  misc_feature (1)..(25): SEQ ID NO: 7722; WAN024BQ8_at; Start 49; Stop 73
cctcacacacagttatttgaaacat

SEQ ID NO: 90046 - DNA, 25 bp, Artificial
  probe
  misc_feature (1)..(25): SEQ ID NO: 7722; WAN024BQ8_at; Start 51; Stop 75
tcacacacagttatttgaaacatcc

SEQ ID NO: 90047 - DNA, 25 bp, Artificial
  probe
  misc_feature (1)..(25): SEQ ID NO: 7722; WAN024BQ8_at; Start 47; Stop 71
ttcctcacacacagttatttgaaac

SEQ ID NO: 90048 - DNA, 25 bp, Artificial
  probe
  misc_feature (1)..(25): SEQ ID NO: 7722; WAN024BQ8_at; Start 65; Stop 89
ttgaaacatccttagaaaatgattt

SEQ ID NO: 90049 - DNA, 25 bp, Artificial
  probe
  misc_feature (1)..(25): SEQ ID NO: 7722; WAN024BQ8_at; Start 61; Stop 85
ttatttgaaacatccttagaaaatg

SEQ ID NO: 90050 - DNA, 25 bp, Artificial
  probe
  misc_feature (1)..(25): SEQ ID NO: 7722; WAN024BQ8_at; Start 46; Stop 70
attcctcacacacagttatttgaaa

SEQ ID NO: 90051 - DNA, 25 bp, Artificial
  probe
  misc_feature (1)..(25): SEQ ID NO: 7722; WAN024BQ8_at; Start 50; Stop 74
ctcacacacagttatttgaaacatc

SEQ ID NO: 90052 - DNA, 25 bp, Artificial
  probe
  misc_feature (1)..(25): SEQ ID NO: 7722; WAN024BQ8_at; Start 55; Stop 79
acacagttatttgaaacatccttag

SEQ ID NO: 90053 - DNA, 25 bp, Artificial
  probe
  misc_feature (1)..(25): SEQ ID NO: 7722; WAN024BQ8_at; Start 66; Stop 90
tgaaacatccttagaaaatgatttt

SEQ ID NO: 90054 - DNA, 25 bp, Artificial
  probe
  misc_feature (1)..(25): SEQ ID NO: 7722; WAN024BQ8_at; Start 63; Stop 87
atttgaaacatccttagaaaatgat

SEQ ID NO: 90055 - DNA, 25 bp, Artificial
  probe
  misc_feature (1)..(25): SEQ ID NO: 7722; WAN024BQ8_at; Start 64; Stop 88
tttgaaacatccttagaaaatgatt

SEQ ID NO: 90056 - DNA, 25 bp, Artificial
  probe
  misc_feature (1)..(25): SEQ ID NO: 7722; WAN024BQ8_at; Start 54; Stop 78
cacacagttatttgaaacatcctta

SEQ ID NO: 90057 - DNA, 25 bp, Artificial
  probe
  misc_feature (1)..(25): SEQ ID NO: 6615; WAN024BQ9_at; Start 971; Stop 995
tgcagacaattaaagcattaggacg

SEQ ID NO: 90058 - DNA, 25 bp, Artificial
  probe
  misc_feature (1)..(25): SEQ ID NO: 6615; WAN024BQ9_at; Start 790; Stop 814
tctttttcacgtaagagtgtctcaa

SEQ ID NO: 90059 - DNA, 25 bp, Artificial
  probe
  misc_feature (1)..(25): SEQ ID NO: 6615; WAN024BQ9_at; Start 41; Stop 65
taacacgaatcttatccccaagtga

SEQ ID NO: 90060 - DNA, 25 bp, Artificial
  probe
  misc_feature (1)..(25): SEQ ID NO: 6615; WAN024BQ9_at; Start 558; Stop 582
caaacccttagtccaatatggctgg

SEQ ID NO: 90061 - DNA, 25 bp, Artificial
  probe
  misc_feature (1)..(25): SEQ ID NO: 6615; WAN024BQ9_at; Start 1277; Stop 1301
tacaagttgttactggtgtctctag

SEQ ID NO: 90062 - DNA, 25 bp, Artificial
  probe
  misc_feature (1)..(25): SEQ ID NO: 6615; WAN024BQ9_at; Start 56; Stop 80
ccccaagtgattacgggattattgc

SEQ ID NO: 90063 - DNA, 25 bp, Artificial
  probe
  misc_feature (1)..(25): SEQ ID NO: 6615; WAN024BQ9_at; Start 389; Stop 413
cctttttgggttcgctagtatctgc

SEQ ID NO: 90064 - DNA, 25 bp, Artificial
  probe
  misc_feature (1)..(25): SEQ ID NO: 6615; WAN024BQ9_at; Start 940; Stop 964
gcaattttatcagttataccaacgg

SEQ ID NO: 90065 - DNA, 25 bp, Artificial
  probe
  misc_feature (1)..(25): SEQ ID NO: 6615; WAN024BQ9_at; Start 669; Stop 693
tgctttttattctaaagggcgccaa

SEQ ID NO: 90066 - DNA, 25 bp, Artificial
  probe
  misc_feature (1)..(25): SEQ ID NO: 6615; WAN024BQ9_at; Start 401; Stop 425
cgctagtatctgctgttgttggaat

SEQ ID NO: 90067 - DNA, 25 bp, Artificial
  probe
  misc_feature (1)..(25): SEQ ID NO: 6615; WAN024BQ9_at; Start 898; Stop 922
tggctacctattattcccttcgttg

SEQ ID NO: 90068 - DNA, 25 bp, Artificial
  probe
  misc_feature (1)..(25): SEQ ID NO: 6615; WAN024BQ9_at; Start 293; Stop 317
gaatttttgcactgcggttacccat

SEQ ID NO: 90069 - DNA, 25 bp, Artificial
  probe
  misc_feature (1)..(25): SEQ ID NO: 6615; WAN024BQ9_at; Start 479; Stop 503
taaatacggttgttggaacagctac

SEQ ID NO: 90070 - DNA, 25 bp, Artificial
  probe
  misc_feature (1)..(25): SEQ ID NO: 6615; WAN024BQ9_at; Start 510; Stop 534
tgctatcattagttggcgtccaaaa

SEQ ID NO: 90071 - DNA, 25 bp, Artificial
  probe
  misc_feature (1)..(25): SEQ ID NO: 6615; WAN024BQ9_at; Start 851; Stop 875
taattgtgactgctgaaccactaac

SEQ ID NO: 90072 - DNA, 25 bp, Artificial
  probe
  misc_feature (1)..(25): SEQ ID NO: 6615; WAN024BQ9_at; Start 881; Stop 905
taatgtatactgaaaaatggctacc

SEQ ID NO: 90073 - DNA, 25 bp, Artificial
  probe
  misc_feature (1)..(25): SEQ ID NO: 6615; WAN024BQ9_at; Start 639; Stop 663
cattggcgcatactataattcatct

SEQ ID NO: 90074 - DNA, 25 bp, Artificial
  probe
  misc_feature (1)..(25): SEQ ID NO: 6615; WAN024BQ9_at; Start 746; Stop 770
tcccaggaatgtctcaggttaatga

SEQ ID NO: 90075 - DNA, 25 bp, Artificial
  probe
  misc_feature (1)..(25): SEQ ID NO: 6615; WAN024BQ9_at; Start 232; Stop 256
tttttagtagcaccagtccttgcag

SEQ ID NO: 90076 - DNA, 25 bp, Artificial
  probe
  misc_feature (1)..(25): SEQ ID NO: 6615; WAN024BQ9_at; Start 985; Stop 1009
gcattaggacgtagtgatttaacac

SEQ ID NO: 90077 - DNA, 25 bp, Artificial
  probe
  misc_feature (1)..(25): SEQ ID NO: 6615; WAN024BQ9_at; Start 1151; Stop 1175
taatcaagtactctttgtgggaaca

SEQ ID NO: 90078 - DNA, 25 bp, Artificial
  probe
  misc_feature (1)..(25): SEQ ID NO: 6615; WAN024BQ9_at; Start 448; Stop 472
ggtgtatgggcacttgtagcacaat

SEQ ID NO: 90079 - DNA, 25 bp, Artificial
  probe
  misc_feature (1)..(25): SEQ ID NO: 6615; WAN024BQ9_at; Start 685; Stop 709
gggcgccaattaccctatctaatta

SEQ ID NO: 90080 - DNA, 25 bp, Artificial
  probe
  misc_feature (1)..(25): SEQ ID NO: 6615; WAN024BQ9_at; Start 624; Stop 648
tttaggagactttatcattggcgca

SEQ ID NO: 90081 - DNA, 25 bp, Artificial
  probe
  misc_feature (1)..(25): SEQ ID NO: 6615; WAN024BQ9_at; Start 160; Stop 184
tcaacgagactagattataatacga

SEQ ID NO: 90082 - DNA, 25 bp, Artificial
  probe
  misc_feature (1)..(25): SEQ ID NO: 6615; WAN024BQ9_at; Start 956; Stop 980
taccaacggtaacaatgcagacaat

SEQ ID NO: 90083 - DNA, 25 bp, Artificial
  probe
  misc_feature (1)..(25): SEQ ID NO: 6615; WAN024BQ9_at; Start 918; Stop 942
cgttgtgattgtatgttcggaagca

SEQ ID NO: 90084 - DNA, 25 bp, Artificial
  probe
  misc_feature (1)..(25): SEQ ID NO: 6615; WAN024BQ9_at; Start 585; Stop 609
gataatgtttacagaccttacaggt

SEQ ID NO: 90085 - DNA, 25 bp, Artificial
  probe
  misc_feature (1)..(25): SEQ ID NO: 6615; WAN024BQ9_at; Start 493; Stop 517
ggaacagctacactatttgctatca

SEQ ID NO: 90086 - DNA, 25 bp, Artificial
  probe
  misc_feature (1)..(25): SEQ ID NO: 6615; WAN024BQ9_at; Start 1065; Stop 1089
aaactttggaatagtggctattgcc

SEQ ID NO: 90087 - DNA, 25 bp, Artificial
  probe
  misc_feature (1)..(25): SEQ ID NO: 6615; WAN024BQ9_at; Start 732; Stop 756
gataagtgtactcttcccaggaatg

SEQ ID NO: 90088 - DNA, 25 bp, Artificial
  probe
  misc_feature (1)..(25): SEQ ID NO: 6615; WAN024BQ9_at; Start 279; Stop 303
tacaccagtcattcgaatttttgca

SEQ ID NO: 90089 - DNA, 25 bp, Artificial
  probe
  misc_feature (1)..(25): SEQ ID NO: 6615; WAN024BQ9_at; Start 420; Stop 444
tggaattacaatggcttatacaggt

SEQ ID NO: 90090 - DNA, 25 bp, Artificial
  probe
  misc_feature (1)..(25): SEQ ID NO: 6615; WAN024BQ9_at; Start 598; Stop 622
gaccttacaggtacgattttcaaca

SEQ ID NO: 90091 - DNA, 25 bp, Artificial
  probe
  misc_feature (1)..(25): SEQ ID NO: 6901; WAN024BQA_at; Start 116; Stop 140
caacgaagggaataataggtagcca

SEQ ID NO: 90092 - DNA, 25 bp, Artificial
  probe
  misc_feature (1)..(25): SEQ ID NO: 6901; WAN024BQA_at; Start 230; Stop 254
cactcttacgtgaaaaagatttaat

SEQ ID NO: 90093 - DNA, 25 bp, Artificial
  probe
  misc_feature (1)..(25): SEQ ID NO: 6901; WAN024BQA_at; Start 159; Stop 183
gatagttagtggttcagcagtcaca

SEQ ID NO: 90094 - DNA, 25 bp, Artificial
  probe
  misc_feature (1)..(25): SEQ ID NO: 6901; WAN024BQA_at; Start 43; Stop 67
cgtcctaatgctttaattgtctgca

SEQ ID NO: 90095 - DNA, 25 bp, Artificial
  probe
  misc_feature (1)..(25): SEQ ID NO: 6901; WAN024BQA_at; Start 56; Stop 80
taattgtctgcattgttaccgttgg

SEQ ID NO: 90096 - DNA, 25 bp, Artificial
  probe
  misc_feature (1)..(25): SEQ ID NO: 6901; WAN024BQA_at; Start 156; Stop 180
taagatagttagtggttcagcagtc

SEQ ID NO: 90097 - DNA, 25 bp, Artificial
  probe
  misc_feature (1)..(25): SEQ ID NO: 6901; WAN024BQA_at; Start 62; Stop 86
tctgcattgttaccgttggtataac

SEQ ID NO: 90098 - DNA, 25 bp, Artificial
  probe
  misc_feature (1)..(25): SEQ ID NO: 6901; WAN024BQA_at; Start 110; Stop 134
caatcacaacgaagggaataatagg

SEQ ID NO: 90099 - DNA, 25 bp, Artificial
  probe
  misc_feature (1)..(25): SEQ ID NO: 6901; WAN024BQA_at; Start 217; Stop 241
gataagattgagacactcttacgtg

SEQ ID NO: 90100 - DNA, 25 bp, Artificial
  probe
  misc_feature (1)..(25): SEQ ID NO: 6901; WAN024BQA_at; Start 29; Stop 53
gtgttaaatcactacgtcctaatgc

SEQ ID NO: 90101 - DNA, 25 bp, Artificial
  probe
  misc_feature (1)..(25): SEQ ID NO: 6901; WAN024BQA_at; Start 153; Stop 177
cattaagatagttagtggttcagca

SEQ ID NO: 90102 - DNA, 25 bp, Artificial
  probe
  misc_feature (1)..(25): SEQ ID NO: 6901; WAN024BQA_at; Start 180; Stop 204
cacaattaaaccaaccattgttgga

SEQ ID NO: 90103 - DNA, 25 bp, Artificial
  probe
  misc_feature (1)..(25): SEQ ID NO: 6901; WAN024BQA_at; Start 119; Stop 143
cgaagggaataataggtagccattt

SEQ ID NO: 90104 - DNA, 25 bp, Artificial
  probe
  misc_feature (1)..(25): SEQ ID NO: 6901; WAN024BQA_at; Start 83; Stop 107
taactgataaaattgcttccgaaca

SEQ ID NO: 90105 - DNA, 25 bp, Artificial
  probe
  misc_feature (1)..(25): SEQ ID NO: 6901; WAN024BQA_at; Start 124; Stop 148
ggaataataggtagccatttttcag

SEQ ID NO: 90106 - DNA, 25 bp, Artificial
  probe
  misc_feature (1)..(25): SEQ ID NO: 6901; WAN024BQA_at; Start 225; Stop 249
tgagacactcttacgtgaaaaagat

SEQ ID NO: 90107 - DNA, 25 bp, Artificial
  probe
  misc_feature (1)..(25): SEQ ID NO: 6901; WAN024BQA_at; Start 252; Stop 276
aatacgttcaatatcatcattaacc

SEQ ID NO: 90108 - DNA, 25 bp, Artificial
  probe
  misc_feature (1)..(25): SEQ ID NO: 6901; WAN024BQA_at; Start 96; Stop 120
tgcttccgaacatacaatcacaacg

SEQ ID NO: 90109 - DNA, 25 bp, Artificial
  probe
  misc_feature (1)..(25): SEQ ID NO: 6901; WAN024BQA_at; Start 210; Stop 234
taaaaaagataagattgagacactc

SEQ ID NO: 90110 - DNA, 25 bp, Artificial
  probe
  misc_feature (1)..(25): SEQ ID NO: 6901; WAN024BQA_at; Start 103; Stop 127
gaacatacaatcacaacgaagggaa

SEQ ID NO: 90111 - DNA, 25 bp, Artificial
  probe
  misc_feature (1)..(25): SEQ ID NO: 6901; WAN024BQA_at; Start 247; Stop 271
gatttaatacgttcaatatcatcat

SEQ ID NO: 90112 - DNA, 25 bp, Artificial
  probe
  misc_feature (1)..(25): SEQ ID NO: 6901; WAN024BQA_at; Start 100; Stop 124
tccgaacatacaatcacaacgaagg

SEQ ID NO: 90113 - DNA, 25 bp, Artificial
  probe
  misc_feature (1)..(25): SEQ ID NO: 6901; WAN024BQA_at; Start 86; Stop 110
ctgataaaattgcttccgaacatac

SEQ ID NO: 90114 - DNA, 25 bp, Artificial
  probe
  misc_feature (1)..(25): SEQ ID NO: 6901; WAN024BQA_at; Start 106; Stop 130
catacaatcacaacgaagggaataa

SEQ ID NO: 90115 - DNA, 25 bp, Artificial
  probe
  misc_feature (1)..(25): SEQ ID NO: 6901; WAN024BQA_at; Start 52; Stop 76
gctttaattgtctgcattgttaccg

SEQ ID NO: 90116 - DNA, 25 bp, Artificial
  probe
  misc_feature (1)..(25): SEQ ID NO: 6901; WAN024BQA_at; Start 175; Stop 199
gcagtcacaattaaaccaaccattg

SEQ ID NO: 90117 - DNA, 25 bp, Artificial
  probe
  misc_feature (1)..(25): SEQ ID NO: 6901; WAN024BQA_at; Start 37; Stop 61
tcactacgtcctaatgctttaattg

SEQ ID NO: 90118 - DNA, 25 bp, Artificial
  probe
  misc_feature (1)..(25): SEQ ID NO: 6901; WAN024BQA_at; Start 137; Stop 161
gccatttttcagtatacattaagat

SEQ ID NO: 90119 - DNA, 25 bp, Artificial
  probe
  misc_feature (1)..(25): SEQ ID NO: 6901; WAN024BQA_at; Start 172; Stop 196
tcagcagtcacaattaaaccaacca

SEQ ID NO: 90120 - DNA, 25 bp, Artificial
  probe
  misc_feature (1)..(25): SEQ ID NO: 6901; WAN024BQA_at; Start 161; Stop 185
tagttagtggttcagcagtcacaat

SEQ ID NO: 90121 - DNA, 25 bp, Artificial
  probe
  misc_feature (1)..(25): SEQ ID NO: 6901; WAN024BQA_at; Start 69; Stop 93
tgttaccgttggtataactgataaa

SEQ ID NO: 90122 - DNA, 25 bp, Artificial
  probe
  misc_feature (1)..(25): SEQ ID NO: 6901; WAN024BQA_at; Start 222; Stop 246
gattgagacactcttacgtgaaaaa

SEQ ID NO: 90123 - DNA, 25 bp, Artificial
  probe
  misc_feature (1)..(25): SEQ ID NO: 6901; WAN024BQA_at; Start 165; Stop 189
tagtggttcagcagtcacaattaaa

SEQ ID NO: 90124 - DNA, 25 bp, Artificial
  probe
  misc_feature (1)..(25): SEQ ID NO: 6901; WAN024BQA_at; Start 131; Stop 155
taggtagccatttttcagtatacat

SEQ ID NO: 90125 - DNA, 25 bp, Artificial
  probe
  misc_feature (1)..(25): SEQ ID NO: 6657; WAN024BQB_at; Start 320; Stop 344
gcttcttaaaagttgtactggtaca

SEQ ID NO: 90126 - DNA, 25 bp, Artificial
  probe
  misc_feature (1)..(25): SEQ ID NO: 6657; WAN024BQB_at; Start 774; Stop 798
tagcaatcgtacctatatctggtcg

SEQ ID NO: 90127 - DNA, 25 bp, Artificial
  probe
  misc_feature (1)..(25): SEQ ID NO: 6657; WAN024BQB_at; Start 671; Stop 695
tatttataggtgttactgtcctagg

SEQ ID NO: 90128 - DNA, 25 bp, Artificial
  probe
  misc_feature (1)..(25): SEQ ID NO: 6657; WAN024BQB_at; Start 162; Stop 186
aaatttttcttccatcacctggttg

SEQ ID NO: 90129 - DNA, 25 bp, Artificial
  probe
  misc_feature (1)..(25): SEQ ID NO: 6657; WAN024BQB_at; Start 1007; Stop 1031
taaagttgagtggaccaatagcgca

SEQ ID NO: 90130 - DNA, 25 bp, Artificial
  probe
  misc_feature (1)..(25): SEQ ID NO: 6657; WAN024BQB_at; Start 646; Stop 670
cgtaagattatttcgccaaagttag

SEQ ID NO: 90131 - DNA, 25 bp, Artificial
  probe
  misc_feature (1)..(25): SEQ ID NO: 6657; WAN024BQB_at; Start 831; Stop 855
tggtctaggtttacaatcatctgat

SEQ ID NO: 90132 - DNA, 25 bp, Artificial
  probe
  misc_feature (1)..(25): SEQ ID NO: 6657; WAN024BQB_at; Start 914; Stop 938
cccataatgagtttttacaagttgc

SEQ ID NO: 90133 - DNA, 25 bp, Artificial
  probe
  misc_feature (1)..(25): SEQ ID NO: 6657; WAN024BQB_at; Start 731; Stop 755
tagagcctattgtggtacagttact

SEQ ID NO: 90134 - DNA, 25 bp, Artificial
  probe
  misc_feature (1)..(25): SEQ ID NO: 6657; WAN024BQB_at; Start 1128; Stop 1152
tgtaatgcaatatactgcagaaaga

SEQ ID NO: 90135 - DNA, 25 bp, Artificial
  probe
  misc_feature (1)..(25): SEQ ID NO: 6657; WAN024BQB_at; Start 900; Stop 924
tacggtaacccacgcccataatgag

SEQ ID NO: 90136 - DNA, 25 bp, Artificial
  probe
  misc_feature (1)..(25): SEQ ID NO: 6657; WAN024BQB_at; Start 436; Stop 460
caagaatggtttctaggttccgtca

SEQ ID NO: 90137 - DNA, 25 bp, Artificial
  probe
  misc_feature (1)..(25): SEQ ID NO: 6657; WAN024BQB_at; Start 762; Stop 786
aaaaatgacatttagcaatcgtacc

SEQ ID NO: 90138 - DNA, 25 bp, Artificial
  probe
  misc_feature (1)..(25): SEQ ID NO: 6657; WAN024BQB_at; Start 41; Stop 65
tactgctcccgttttttatgccaac

SEQ ID NO: 90139 - DNA, 25 bp, Artificial
  probe
  misc_feature (1)..(25): SEQ ID NO: 6657; WAN024BQB_at; Start 632; Stop 656
cctcgtcttggttacgtaagattat

SEQ ID NO: 90140 - DNA, 25 bp, Artificial
  probe
  misc_feature (1)..(25): SEQ ID NO: 6657; WAN024BQB_at; Start 109; Stop 133
ggcatgatgtttagcataggatata

SEQ ID NO: 90141 - DNA, 25 bp, Artificial
  probe
  misc_feature (1)..(25): SEQ ID NO: 6657; WAN024BQB_at; Start 618; Stop 642
tatcttatttgttacctcgtcttgg

SEQ ID NO: 90142 - DNA, 25 bp, Artificial
  probe
  misc_feature (1)..(25): SEQ ID NO: 6657; WAN024BQB_at; Start 929; Stop 953
tacaagttgcttttcaaacaggaat

SEQ ID NO: 90143 - DNA, 25 bp, Artificial
  probe
  misc_feature (1)..(25): SEQ ID NO: 6657; WAN024BQB_at; Start 227; Stop 251
tacaaaaaggtgaaatctatactgc

SEQ ID NO: 90144 - DNA, 25 bp, Artificial
  probe
  misc_feature (1)..(25): SEQ ID NO: 6657; WAN024BQB_at; Start 27; Stop 51
tatattattcttattactgctcccg

SEQ ID NO: 90145 - DNA, 25 bp, Artificial
  probe
  misc_feature (1)..(25): SEQ ID NO: 6657; WAN024BQB_at; Start 853; Stop 877
gattatgtcattcgattgcttggaa

SEQ ID NO: 90146 - DNA, 25 bp, Artificial
  probe
  misc_feature (1)..(25): SEQ ID NO: 6657; WAN024BQB_at; Start 787; Stop 811
tatatctggtcgaatgctgtgacag

SEQ ID NO: 90147 - DNA, 25 bp, Artificial
  probe
  misc_feature (1)..(25): SEQ ID NO: 6657; WAN024BQB_at; Start 483; Stop 507
tccagctcttgtagtagcgtggttg

SEQ ID NO: 90148 - DNA, 25 bp, Artificial
  probe
  misc_feature (1)..(25): SEQ ID NO: 6657; WAN024BQB_at; Start 715; Stop 739
caaaatgtagacttcttagagccta

SEQ ID NO: 90149 - DNA, 25 bp, Artificial
  probe
  misc_feature (1)..(25): SEQ ID NO: 6657; WAN024BQB_at; Start 420; Stop 444
tgcttatggttttacccaagaatgg

SEQ ID NO: 90150 - DNA, 25 bp, Artificial
  probe
  misc_feature (1)..(25): SEQ ID NO: 6657; WAN024BQB_at; Start 335; Stop 359
tactggtacattttgagtggttgat

SEQ ID NO: 90151 - DNA, 25 bp, Artificial
  probe
  misc_feature (1)..(25): SEQ ID NO: 6657; WAN024BQB_at; Start 566; Stop 590
taacagaattaattagaggctcagc

SEQ ID NO: 90152 - DNA, 25 bp, Artificial
  probe
  misc_feature (1)..(25): SEQ ID NO: 6657; WAN024BQB_at; Start 3; Stop 27
gattaaagtgtctaaacagaatgct

SEQ ID NO: 90153 - DNA, 25 bp, Artificial
  probe
  misc_feature (1)..(25): SEQ ID NO: 6657; WAN024BQB_at; Start 1073; Stop 1097
taacagaaacgttagaactgagtca

SEQ ID NO: 90154 - DNA, 25 bp, Artificial
  probe
  misc_feature (1)..(25): SEQ ID NO: 6657; WAN024BQB_at; Start 242; Stop 266
tctatactgcaatatggaatgcaga

SEQ ID NO: 90155 - DNA, 25 bp, Artificial
  probe
  misc_feature (1)..(25): SEQ ID NO: 6657; WAN024BQB_at; Start 1019; Stop 1043
gaccaatagcgcaaactgttatgct

SEQ ID NO: 90156 - DNA, 25 bp, Artificial
  probe
  misc_feature (1)..(25): SEQ ID NO: 6657; WAN024BQB_at; Start 987; Stop 1011
taaagtcttgatcaatgcagtaaag

SEQ ID NO: 90157 - DNA, 25 bp, Artificial
  probe
  misc_feature (1)..(25): SEQ ID NO: 6657; WAN024BQB_at; Start 91; Stop 115
tacttgttgtatagattaggcatga

SEQ ID NO: 90158 - DNA, 25 bp, Artificial
  probe
  misc_feature (1)..(25): SEQ ID NO: 6657; WAN024BQB_at; Start 177; Stop 201
cacctggttgattgttatctatgag

SEQ ID NO: 90159 - DNA, 25 bp, Artificial
  probe
  misc_feature (1)..(25): SEQ ID NO: 7220; WAN024BQC_at; Start 317; Stop 341
tatcttacctcgaccatgactatga

SEQ ID NO: 90160 - DNA, 25 bp, Artificial
  probe
  misc_feature (1)..(25): SEQ ID NO: 7220; WAN024BQC_at; Start 1354; Stop 1378
gaagagtatacggatattcatcctg

SEQ ID NO: 90161 - DNA, 25 bp, Artificial
  probe
  misc_feature (1)..(25): SEQ ID NO: 7220; WAN024BQC_at; Start 375; Stop 399
cgataaggttactccatacagatta

SEQ ID NO: 90162 - DNA, 25 bp, Artificial
  probe
  misc_feature (1)..(25): SEQ ID NO: 7220; WAN024BQC_at; Start 1586; Stop 1610
gagagttttgcagttggacaggcta

SEQ ID NO: 90163 - DNA, 25 bp, Artificial
  probe
  misc_feature (1)..(25): SEQ ID NO: 7220; WAN024BQC_at; Start 1041; Stop 1065
taaatattttagtcggcaagtcaga

SEQ ID NO: 90164 - DNA, 25 bp, Artificial
  probe
  misc_feature (1)..(25): SEQ ID NO: 7220; WAN024BQC_at; Start 962; Stop 986
taagactctatacgacttgttcaca

SEQ ID NO: 90165 - DNA, 25 bp, Artificial
  probe
  misc_feature (1)..(25): SEQ ID NO: 7220; WAN024BQC_at; Start 1794; Stop 1818
gtggacgctgtcaaacttactaaaa

SEQ ID NO: 90166 - DNA, 25 bp, Artificial
  probe
  misc_feature (1)..(25): SEQ ID NO: 7220; WAN024BQC_at; Start 1617; Stop 1641
tgcttcacggaaaaatggccgcttt

SEQ ID NO: 90167 - DNA, 25 bp, Artificial
  probe
  misc_feature (1)..(25): SEQ ID NO: 7220; WAN024BQC_at; Start 1517; Stop 1541
cacagttagaaagacaatcatttgc

SEQ ID NO: 90168 - DNA, 25 bp, Artificial
  probe
  misc_feature (1)..(25): SEQ ID NO: 7220; WAN024BQC_at; Start 1464; Stop 1488
tggtatgtgggtagatgcaacaatc

SEQ ID NO: 90169 - DNA, 25 bp, Artificial
  probe
  misc_feature (1)..(25): SEQ ID NO: 7220; WAN024BQC_at; Start 1477; Stop 1501
gatgcaacaatctactttacgagga

SEQ ID NO: 90170 - DNA, 25 bp, Artificial
  probe
  misc_feature (1)..(25): SEQ ID NO: 7220; WAN024BQC_at; Start 503; Stop 527
gatggaataaactttaccgctgtga

SEQ ID NO: 90171 - DNA, 25 bp, Artificial
  probe
  misc_feature (1)..(25): SEQ ID NO: 7220; WAN024BQC_at; Start 160; Stop 184
gaatttgcaaatcaggatagcagga

SEQ ID NO: 90172 - DNA, 25 bp, Artificial
  probe
  misc_feature (1)..(25): SEQ ID NO: 7220; WAN024BQC_at; Start 576; Stop 600
tctcggagaagatacaatttttgct

SEQ ID NO: 90173 - DNA, 25 bp, Artificial
  probe
  misc_feature (1)..(25): SEQ ID NO: 7220; WAN024BQC_at; Start 203; Stop 227
caaatggtggattagttgatgcaac

SEQ ID NO: 90174 - DNA, 25 bp, Artificial
  probe
  misc_feature (1)..(25): SEQ ID NO: 7220; WAN024BQC_at; Start 1882; Stop 1906
tttgaaccacttagcgatagcacgg

SEQ ID NO: 90175 - DNA, 25 bp, Artificial
  probe
  misc_feature (1)..(25): SEQ ID NO: 7220; WAN024BQC_at; Start 466; Stop 490
gatttagggactatttcgaatcaga

SEQ ID NO: 90176 - DNA, 25 bp, Artificial
  probe
  misc_feature (1)..(25): SEQ ID NO: 7220; WAN024BQC_at; Start 870; Stop 894
tgataaacttaagagagaaccagta

SEQ ID NO: 90177 - DNA, 25 bp, Artificial
  probe
  misc_feature (1)..(25): SEQ ID NO: 7220; WAN024BQC_at; Start 270; Stop 294
tcttgatccagatgattacattggg

SEQ ID NO: 90178 - DNA, 25 bp, Artificial
  probe
  misc_feature (1)..(25): SEQ ID NO: 7220; WAN024BQC_at; Start 84; Stop 108
gactcagagttatcaaaatttggaa

SEQ ID NO: 90179 - DNA, 25 bp, Artificial
  probe
  misc_feature (1)..(25): SEQ ID NO: 7220; WAN024BQC_at; Start 836; Stop 860
ggactaatgatccaaaacagtttta

SEQ ID NO: 90180 - DNA, 25 bp, Artificial
  probe
  misc_feature (1)..(25): SEQ ID NO: 7220; WAN024BQC_at; Start 1779; Stop 1803
tattgaagggaatatgtggacgctg

SEQ ID NO: 90181 - DNA, 25 bp, Artificial
  probe
  misc_feature (1)..(25): SEQ ID NO: 7220; WAN024BQC_at; Start 559; Stop 583
tcatataagaatgtaactctcggag

SEQ ID NO: 90182 - DNA, 25 bp, Artificial
  probe
  misc_feature (1)..(25): SEQ ID NO: 7220; WAN024BQC_at; Start 124; Stop 148
gacggttcaattgattcaagtcaac

SEQ ID NO: 90183 - DNA, 25 bp, Artificial
  probe
  misc_feature (1)..(25): SEQ ID NO: 7220; WAN024BQC_at; Start 1074; Stop 1098
tattattaaggcctatcagctattg

SEQ ID NO: 90184 - DNA, 25 bp, Artificial
  probe
  misc_feature (1)..(25): SEQ ID NO: 7220; WAN024BQC_at; Start 1544; Stop 1568
caataagtttttccacaagcaaaga

SEQ ID NO: 90185 - DNA, 25 bp, Artificial
  probe
  misc_feature (1)..(25): SEQ ID NO: 7220; WAN024BQC_at; Start 622; Stop 646
cagtcagctaaaattttgcaacaag

SEQ ID NO: 90186 - DNA, 25 bp, Artificial
  probe
  misc_feature (1)..(25): SEQ ID NO: 7220; WAN024BQC_at; Start 230; Stop 254
tatatggtgtagaaaaggctacggg

SEQ ID NO: 90187 - DNA, 25 bp, Artificial
  probe
  misc_feature (1)..(25): SEQ ID NO: 7220; WAN024BQC_at; Start 1294; Stop 1318
aagtctttgaagaagcagtatcagg

SEQ ID NO: 90188 - DNA, 25 bp, Artificial
  probe
  misc_feature (1)..(25): SEQ ID NO: 7220; WAN024BQC_at; Start 517; Stop 541
taccgctgtgatattgtcaaaagtg

SEQ ID NO: 90189 - DNA, 25 bp, Artificial
  probe
  misc_feature (1)..(25): SEQ ID NO: 7220; WAN024BQC_at; Start 1144; Stop 1168
caacttcctaagattgagggagaaa

SEQ ID NO: 90190 - DNA, 25 bp, Artificial
  probe
  misc_feature (1)..(25): SEQ ID NO: 7220; WAN024BQC_at; Start 1633; Stop 1657
ggccgctttgttcaaatgatggata

SEQ ID NO: 90191 - DNA, 25 bp, Artificial
  probe
  misc_feature (1)..(25): SEQ ID NO: 7220; WAN024BQC_at; Start 1602; Stop 1626
gacaggctattttattgcttcacgg

SEQ ID NO: 90192 - DNA, 25 bp, Artificial
  probe
  misc_feature (1)..(25): SEQ ID NO: 7220; WAN024BQC_at; Start 68; Stop 92
caatacattcagtactgactcagag

SEQ ID NO: 90193 - DNA, 25 bp, Artificial
  probe
  misc_feature (1)..(25): SEQ ID NO: 7330; WAN024BQD_at; Start 37; Stop 61
gaaaaatttaggagatcatggcgag

SEQ ID NO: 90194 - DNA, 25 bp, Artificial
  probe
  misc_feature (1)..(25): SEQ ID NO: 7330; WAN024BQD_at; Start 291; Stop 315
tcaagataaagaaggaatttcaaag

SEQ ID NO: 90195 - DNA, 25 bp, Artificial
  probe
  misc_feature (1)..(25): SEQ ID NO: 7330; WAN024BQD_at; Start 453; Stop 477
tggcaatccagcacgaataataaag

SEQ ID NO: 90196 - DNA, 25 bp, Artificial
  probe
  misc_feature (1)..(25): SEQ ID NO: 7330; WAN024BQD_at; Start 5; Stop 29
taattggtcgtctgaaacaaaggct

SEQ ID NO: 90197 - DNA, 25 bp, Artificial
  probe
  misc_feature (1)..(25): SEQ ID NO: 7330; WAN024BQD_at; Start 10; Stop 34
ggtcgtctgaaacaaaggctgaaga

SEQ ID NO: 90198 - DNA, 25 bp, Artificial
  probe
  misc_feature (1)..(25): SEQ ID NO: 7330; WAN024BQD_at; Start 383; Stop 407
ttggacaaggagctataattgcggc

SEQ ID NO: 90199 - DNA, 25 bp, Artificial
  probe
  misc_feature (1)..(25): SEQ ID NO: 7330; WAN024BQD_at; Start 419; Stop 443
taaccaaaaatgttccaccttatgc

SEQ ID NO: 90200 - DNA, 25 bp, Artificial
  probe
  misc_feature (1)..(25): SEQ ID NO: 7330; WAN024BQD_at; Start 130; Stop 154
tacacttatggaaatatcgatatcc

SEQ ID NO: 90201 - DNA, 25 bp, Artificial
  probe
  misc_feature (1)..(25): SEQ ID NO: 7330; WAN024BQD_at; Start 118; Stop 142
tcagtgggaaattacacttatggaa

SEQ ID NO: 90202 - DNA, 25 bp, Artificial
  probe
  misc_feature (1)..(25): SEQ ID NO: 7330; WAN024BQD_at; Start 222; Stop 246
tattctgaatgctgaccactgcacc

SEQ ID NO: 90203 - DNA, 25 bp, Artificial
  probe
  misc_feature (1)..(25): SEQ ID NO: 7330; WAN024BQD_at; Start 235; Stop 259
gaccactgcaccaattacttcacta

SEQ ID NO: 90204 - DNA, 25 bp, Artificial
  probe
  misc_feature (1)..(25): SEQ ID NO: 7330; WAN024BQD_at; Start 69; Stop 93
tacgcataatactacaatggcgagt

SEQ ID NO: 90205 - DNA, 25 bp, Artificial
  probe
  misc_feature (1)..(25): SEQ ID NO: 7330; WAN024BQD_at; Start 371; Stop 395
caggtgtaacgattggacaaggagc

SEQ ID NO: 90206 - DNA, 25 bp, Artificial
  probe
  misc_feature (1)..(25): SEQ ID NO: 7330; WAN024BQD_at; Start 434; Stop 458
caccttatgctatcgtcggtggcaa

SEQ ID NO: 90207 - DNA, 25 bp, Artificial
  probe
  misc_feature (1)..(25): SEQ ID NO: 7330; WAN024BQD_at; Start 565; Stop 589
caaatgtatataccattagttgagg

SEQ ID NO: 90208 - DNA, 25 bp, Artificial
  probe
  misc_feature (1)..(25): SEQ ID NO: 7330; WAN024BQD_at; Start 577; Stop 601
ccattagttgaggtaaaacaactag

SEQ ID NO: 90209 - DNA, 25 bp, Artificial
  probe
  misc_feature (1)..(25): SEQ ID NO: 7330; WAN024BQD_at; Start 599; Stop 623
tagattggatagacgacttattaca

SEQ ID NO: 90210 - DNA, 25 bp, Artificial
  probe
  misc_feature (1)..(25): SEQ ID NO: 7330; WAN024BQD_at; Start 81; Stop 105
tacaatggcgagtagtatttttgat

SEQ ID NO: 90211 - DNA, 25 bp, Artificial
  probe
  misc_feature (1)..(25): SEQ ID NO: 7330; WAN024BQD_at; Start 591; Stop 615
aaaacaactagattggatagacgac

SEQ ID NO: 90212 - DNA, 25 bp, Artificial
  probe
  misc_feature (1)..(25): SEQ ID NO: 7330; WAN024BQD_at; Start 308; Stop 332
tttcaaagggtgatattatcgtggg

SEQ ID NO: 90213 - DNA, 25 bp, Artificial
  probe
  misc_feature (1)..(25): SEQ ID NO: 7330; WAN024BQD_at; Start 358; Stop 382
gcagtcattctttcaggtgtaacga

SEQ ID NO: 90214 - DNA, 25 bp, Artificial
  probe
  misc_feature (1)..(25): SEQ ID NO: 7330; WAN024BQD_at; Start 486; Stop 510
tgaagctgaaataattgataaactg

SEQ ID NO: 90215 - DNA, 25 bp, Artificial
  probe
  misc_feature (1)..(25): SEQ ID NO: 7330; WAN024BQD_at; Start 390; Stop 414
aggagctataattgcggcaggagca

SEQ ID NO: 90216 - DNA, 25 bp, Artificial
  probe
  misc_feature (1)..(25): SEQ ID NO: 7330; WAN024BQD_at; Start 200; Stop 224
caatagcgccgaatgttaaatttat

SEQ ID NO: 90217 - DNA, 25 bp, Artificial
  probe
  misc_feature (1)..(25): SEQ ID NO: 7330; WAN024BQD_at; Start 274; Stop 298
gtaaaagttctacaaaatcaagata

SEQ ID NO: 90218 - DNA, 25 bp, Artificial
  probe
  misc_feature (1)..(25): SEQ ID NO: 7330; WAN024BQD_at; Start 103; Stop 127
gatatagataaagtttcagtgggaa

SEQ ID NO: 90219 - DNA, 25 bp, Artificial
  probe
  misc_feature (1)..(25): SEQ ID NO: 7330; WAN024BQD_at; Start 406; Stop 430
gcaggagcagtggtaaccaaaaatg

SEQ ID NO: 90220 - DNA, 25 bp, Artificial
  probe
  misc_feature (1)..(25): SEQ ID NO: 7330; WAN024BQD_at; Start 146; Stop 170
tcgatatcctagattttggaactaa

SEQ ID NO: 90221 - DNA, 25 bp, Artificial
  probe
  misc_feature (1)..(25): SEQ ID NO: 7330; WAN024BQD_at; Start 188; Stop 212
gaagtttttgttcaatagcgccgaa

SEQ ID NO: 90222 - DNA, 25 bp, Artificial
  probe
  misc_feature (1)..(25): SEQ ID NO: 7330; WAN024BQD_at; Start 22; Stop 46
caaaggctgaagattgaaaaattta

SEQ ID NO: 90223 - DNA, 25 bp, Artificial
  probe
  misc_feature (1)..(25): SEQ ID NO: 7330; WAN024BQD_at; Start 460; Stop 484
ccagcacgaataataaagtatagat

SEQ ID NO: 90224 - DNA, 25 bp, Artificial
  probe
  misc_feature (1)..(25): SEQ ID NO: 7330; WAN024BQD_at; Start 350; Stop 374
ggcttaatgcagtcattctttcagg

SEQ ID NO: 90225 - DNA, 25 bp, Artificial
  probe
  misc_feature (1)..(25): SEQ ID NO: 7330; WAN024BQD_at; Start 321; Stop 345
tattatcgtgggtgatgatgtatgg

SEQ ID NO: 90226 - DNA, 25 bp, Artificial
  probe
  misc_feature (1)..(25): SEQ ID NO: 7330; WAN024BQD_at; Start 444; Stop 468
tatcgtcggtggcaatccagcacga

SEQ ID NO: 90227 - DNA, 25 bp, Artificial
  probe
  misc_feature (1)..(25): SEQ ID NO: 6919; WAN024BQE_at; Start 796; Stop 820
gactatgatgaagtatggtcagcta

SEQ ID NO: 90228 - DNA, 25 bp, Artificial
  probe
  misc_feature (1)..(25): SEQ ID NO: 6919; WAN024BQE_at; Start 519; Stop 543
tgagaacttagaagagatgactgtt

SEQ ID NO: 90229 - DNA, 25 bp, Artificial
  probe
  misc_feature (1)..(25): SEQ ID NO: 6919; WAN024BQE_at; Start 812; Stop 836
ggtcagctattttacggcgtgaagg

SEQ ID NO: 90230 - DNA, 25 bp, Artificial
  probe
  misc_feature (1)..(25): SEQ ID NO: 6919; WAN024BQE_at; Start 766; Stop 790
cataaatattttggccgttcgctct

SEQ ID NO: 90231 - DNA, 25 bp, Artificial
  probe
  misc_feature (1)..(25): SEQ ID NO: 6919; WAN024BQE_at; Start 999; Stop 1023
tattaacgcttggaatgaatgggca

SEQ ID NO: 90232 - DNA, 25 bp, Artificial
  probe
  misc_feature (1)..(25): SEQ ID NO: 6919; WAN024BQE_at; Start 196; Stop 220
gcaaaattagctttagagtacggta

SEQ ID NO: 90233 - DNA, 25 bp, Artificial
  probe
  misc_feature (1)..(25): SEQ ID NO: 6919; WAN024BQE_at; Start 130; Stop 154
cagcctgaagttccattaaatgaag

SEQ ID NO: 90234 - DNA, 25 bp, Artificial
  probe
  misc_feature (1)..(25): SEQ ID NO: 6919; WAN024BQE_at; Start 487; Stop 511
ccaatgatgattatttacaagcctc

SEQ ID NO: 90235 - DNA, 25 bp, Artificial
  probe
  misc_feature (1)..(25): SEQ ID NO: 6919; WAN024BQE_at; Start 334; Stop 358
gctaatgagagctggtcgagaactt

SEQ ID NO: 90236 - DNA, 25 bp, Artificial
  probe
  misc_feature (1)..(25): SEQ ID NO: 6919; WAN024BQE_at; Start 42; Stop 66
cattccagaaaacgataagtggtgg

SEQ ID NO: 90237 - DNA, 25 bp, Artificial
  probe
  misc_feature (1)..(25): SEQ ID NO: 6919; WAN024BQE_at; Start 854; Stop 878
caggtgcctttgtgtcatgggataa

SEQ ID NO: 90238 - DNA, 25 bp, Artificial
  probe
  misc_feature (1)..(25): SEQ ID NO: 6919; WAN024BQE_at; Start 661; Stop 685
gaaccaatctatacggtatctgaga

SEQ ID NO: 90239 - DNA, 25 bp, Artificial
  probe
  misc_feature (1)..(25): SEQ ID NO: 6919; WAN024BQE_at; Start 746; Stop 770
ggttttcaagaaatatcagccataa

SEQ ID NO: 90240 - DNA, 25 bp, Artificial
  probe
  misc_feature (1)..(25): SEQ ID NO: 6919; WAN024BQE_at; Start 537; Stop 561
gactgtttattggaaccaattggct

SEQ ID NO: 90241 - DNA, 25 bp, Artificial
  probe
  misc_feature (1)..(25): SEQ ID NO: 6919; WAN024BQE_at; Start 100; Stop 124
aaatctcagccccaatacagaggac

SEQ ID NO: 90242 - DNA, 25 bp, Artificial
  probe
  misc_feature (1)..(25): SEQ ID NO: 6919; WAN024BQE_at; Start 349; Stop 373
tcgagaacttgggatggtgctgaaa

SEQ ID NO: 90243 - DNA, 25 bp, Artificial
  probe
  misc_feature (1)..(25): SEQ ID NO: 6919; WAN024BQE_at; Start 115; Stop 139
tacagaggacatattcagcctgaag

SEQ ID NO: 90244 - DNA, 25 bp, Artificial
  probe
  misc_feature (1)..(25): SEQ ID NO: 6919; WAN024BQE_at; Start 397; Stop 421
tactcagatactttggatggatgga

SEQ ID NO: 90245 - DNA, 25 bp, Artificial
  probe
  misc_feature (1)..(25): SEQ ID NO: 6919; WAN024BQE_at; Start 273; Stop 297
gaaacctatggagaatatgctgcaa

SEQ ID NO: 90246 - DNA, 25 bp, Artificial
  probe
  misc_feature (1)..(25): SEQ ID NO: 6919; WAN024BQE_at; Start 87; Stop 111
gactaatgtgaagaaatctcagccc

SEQ ID NO: 90247 - DNA, 25 bp, Artificial
  probe
  misc_feature (1)..(25): SEQ ID NO: 6919; WAN024BQE_at; Start 912; Stop 936
tgatggtgcaaatcctaaaaagttt

SEQ ID NO: 90248 - DNA, 25 bp, Artificial
  probe
  misc_feature (1)..(25): SEQ ID NO: 6919; WAN024BQE_at; Start 705; Stop 729
taagtcagaaaaattaaagcgggca

SEQ ID NO: 90249 - DNA, 25 bp, Artificial
  probe
  misc_feature (1)..(25): SEQ ID NO: 6919; WAN024BQE_at; Start 838; Stop 862
agaaaaaatatttcaccaggtgcct

SEQ ID NO: 90250 - DNA, 25 bp, Artificial
  probe
  misc_feature (1)..(25): SEQ ID NO: 6919; WAN024BQE_at; Start 677; Stop 701
tatctgagatgcataaaagtacaag

SEQ ID NO: 90251 - DNA, 25 bp, Artificial
  probe
  misc_feature (1)..(25): SEQ ID NO: 6919; WAN024BQE_at; Start 890; Stop 914
gcgggaaccgctctctagtatttga

SEQ ID NO: 90252 - DNA, 25 bp, Artificial
  probe
  misc_feature (1)..(25): SEQ ID NO: 6919; WAN024BQE_at; Start 959; Stop 983
tacaacgtgcgaaagaagaatatca

SEQ ID NO: 90253 - DNA, 25 bp, Artificial
  probe
  misc_feature (1)..(25): SEQ ID NO: 6919; WAN024BQE_at; Start 241; Stop 265
cattattggtttgatggaaagctcc

SEQ ID NO: 90254 - DNA, 25 bp, Artificial
  probe
  misc_feature (1)..(25): SEQ ID NO: 6919; WAN024BQE_at; Start 256; Stop 280
ggaaagctccttctggagaaaccta

SEQ ID NO: 90255 - DNA, 25 bp, Artificial
  probe
  misc_feature (1)..(25): SEQ ID NO: 6919; WAN024BQE_at; Start 577; Stop 601
aagggtattcattttggacatcagc

SEQ ID NO: 90256 - DNA, 25 bp, Artificial
  probe
  misc_feature (1)..(25): SEQ ID NO: 6919; WAN024BQE_at; Start 1061; Stop 1085
acggttatttagaagcggtgagagc

SEQ ID NO: 90257 - DNA, 25 bp, Artificial
  probe
  misc_feature (1)..(25): SEQ ID NO: 6919; WAN024BQE_at; Start 779; Stop 803
gccgttcgctcttatttgactatga

SEQ ID NO: 90258 - DNA, 25 bp, Artificial
  probe
  misc_feature (1)..(25): SEQ ID NO: 6919; WAN024BQE_at; Start 869; Stop 893
catgggataatactccgagacgcgg

SEQ ID NO: 90259 - DNA, 25 bp, Artificial
  probe
  misc_feature (1)..(25): SEQ ID NO: 6919; WAN024BQE_at; Start 945; Stop 969
ttttgctaagcaagtacaacgtgcg

SEQ ID NO: 90260 - DNA, 25 bp, Artificial
  probe
  misc_feature (1)..(25): SEQ ID NO: 6919; WAN024BQE_at; Start 1033; Stop 1057
catttagagcctgatgagcagtatg

SEQ ID NO: 90261 - DNA, 25 bp, Artificial
  probe
  misc_feature (1)..(25): SEQ ID NO: 6604; WAN024BQF_at; Start 562; Stop 586
gctttagtaattccctgtatgacaa

SEQ ID NO: 90262 - DNA, 25 bp, Artificial
  probe
  misc_feature (1)..(25): SEQ ID NO: 6604; WAN024BQF_at; Start 478; Stop 502
gacaacattgattcagttgctcgca

SEQ ID NO: 90263 - DNA, 25 bp, Artificial
  probe
  misc_feature (1)..(25): SEQ ID NO: 6604; WAN024BQF_at; Start 1373; Stop 1397
tagttggtggcaataacatcgtggt

SEQ ID NO: 90264 - DNA, 25 bp, Artificial
  probe
  misc_feature (1)..(25): SEQ ID NO: 6604; WAN024BQF_at; Start 1359; Stop 1383
tctaatctgtacactagttggtggc

SEQ ID NO: 90265 - DNA, 25 bp, Artificial
  probe
  misc_feature (1)..(25): SEQ ID NO: 6604; WAN024BQF_at; Start 172; Stop 196
gctgatttaggtttcgctaatgcaa

SEQ ID NO: 90266 - DNA, 25 bp, Artificial
  probe
  misc_feature (1)..(25): SEQ ID NO: 6604; WAN024BQF_at; Start 941; Stop 965
ggttagctacctggtttatgacatg

SEQ ID NO: 90267 - DNA, 25 bp, Artificial
  probe
  misc_feature (1)..(25): SEQ ID NO: 6604; WAN024BQF_at; Start 986; Stop 1010
catttatgcttttgtgggtaggaca

SEQ ID NO: 90268 - DNA, 25 bp, Artificial
  probe
  misc_feature (1)..(25): SEQ ID NO: 6604; WAN024BQF_at; Start 1119; Stop 1143
taaagaaaaactacggtcaattgca

SEQ ID NO: 90269 - DNA, 25 bp, Artificial
  probe
  misc_feature (1)..(25): SEQ ID NO: 6604; WAN024BQF_at; Start 770; Stop 794
ggattacgacagtgggaatttatag

SEQ ID NO: 90270 - DNA, 25 bp, Artificial
  probe
  misc_feature (1)..(25): SEQ ID NO: 6604; WAN024BQF_at; Start 207; Stop 231
tatgtataaacctcttgcccatggg

SEQ ID NO: 90271 - DNA, 25 bp, Artificial
  probe
  misc_feature (1)..(25): SEQ ID NO: 6604; WAN024BQF_at; Start 1065; Stop 1089
tcttgctgcaggtgatatgcggagc

SEQ ID NO: 90272 - DNA, 25 bp, Artificial
  probe
  misc_feature (1)..(25): SEQ ID NO: 6604; WAN024BQF_at; Start 1458; Stop 1482
tttaaaaaatgaacagacgcgtctg

SEQ ID NO: 90273 - DNA, 25 bp, Artificial
  probe
  misc_feature (1)..(25): SEQ ID NO: 6604; WAN024BQF_at; Start 125; Stop 149
tcggtattagtggactttttgcatc

SEQ ID NO: 90274 - DNA, 25 bp, Artificial
  probe
  misc_feature (1)..(25): SEQ ID NO: 6604; WAN024BQF_at; Start 341; Stop 365
tagtaaagggttcctatcctgcaga

SEQ ID NO: 90275 - DNA, 25 bp, Artificial
  probe
  misc_feature (1)..(25): SEQ ID NO: 6604; WAN024BQF_at; Start 1209; Stop 1233
gctagctactgcactaacaattttg

SEQ ID NO: 90276 - DNA, 25 bp, Artificial
  probe
  misc_feature (1)..(25): SEQ ID NO: 6604; WAN024BQF_at; Start 1133; Stop 1157
ggtcaattgcagaaacggtaggtaa

SEQ ID NO: 90277 - DNA, 25 bp, Artificial
  probe
  misc_feature (1)..(25): SEQ ID NO: 6604; WAN024BQF_at; Start 1099; Stop 1123
gacgcctcaggtttatgggataaag

SEQ ID NO: 90278 - DNA, 25 bp, Artificial
  probe
  misc_feature (1)..(25): SEQ ID NO: 6604; WAN024BQF_at; Start 491; Stop 515
cagttgctcgcataattttaagtgg

SEQ ID NO: 90279 - DNA, 25 bp, Artificial
  probe
  misc_feature (1)..(25): SEQ ID NO: 6604; WAN024BQF_at; Start 860; Stop 884
ctagtgttggacatagtgttgctac

SEQ ID NO: 90280 - DNA, 25 bp, Artificial
  probe
  misc_feature (1)..(25): SEQ ID NO: 6604; WAN024BQF_at; Start 722; Stop 746
ggattacaagaaattccctcgataa

SEQ ID NO: 90281 - DNA, 25 bp, Artificial
  probe
  misc_feature (1)..(25): SEQ ID NO: 6604; WAN024BQF_at; Start 926; Stop 950
catttggtttctcttggttagctac

SEQ ID NO: 90282 - DNA, 25 bp, Artificial
  probe
  misc_feature (1)..(25): SEQ ID NO: 6604; WAN024BQF_at; Start 1025; Stop 1049
cattttcagtcgttgttgctctctg

SEQ ID NO: 90283 - DNA, 25 bp, Artificial
  probe
  misc_feature (1)..(25): SEQ ID NO: 6604; WAN024BQF_at; Start 1080; Stop 1104
tatgcggagccaatatattgacgcc

SEQ ID NO: 90284 - DNA, 25 bp, Artificial
  probe
  misc_feature (1)..(25): SEQ ID NO: 6604; WAN024BQF_at; Start 707; Stop 731
tctacaaagtatgtgggattacaag

SEQ ID NO: 90285 - DNA, 25 bp, Artificial
  probe
  misc_feature (1)..(25): SEQ ID NO: 6604; WAN024BQF_at; Start 106; Stop 130
caattagggatacaatatgtcggta

SEQ ID NO: 90286 - DNA, 25 bp, Artificial
  probe
  misc_feature (1)..(25): SEQ ID NO: 6604; WAN024BQF_at; Start 903; Stop 927
tcatcgtgacttagaaaatcttaca

SEQ ID NO: 90287 - DNA, 25 bp, Artificial
  probe
  misc_feature (1)..(25): SEQ ID NO: 6604; WAN024BQF_at; Start 1302; Stop 1326
tttgtggaatcaagcagtatatgct

SEQ ID NO: 90288 - DNA, 25 bp, Artificial
  probe
  misc_feature (1)..(25): SEQ ID NO: 6604; WAN024BQF_at; Start 1471; Stop 1495
cagacgcgtctgtttttcaaaataa

SEQ ID NO: 90289 - DNA, 25 bp, Artificial
  probe
  misc_feature (1)..(25): SEQ ID NO: 6604; WAN024BQF_at; Start 1196; Stop 1220
ttttaggaatagtgctagctactgc

SEQ ID NO: 90290 - DNA, 25 bp, Artificial
  probe
  misc_feature (1)..(25): SEQ ID NO: 6604; WAN024BQF_at; Start 837; Stop 861
tgtggtttctacaggaatgagtgct

SEQ ID NO: 90291 - DNA, 25 bp, Artificial
  probe
  misc_feature (1)..(25): SEQ ID NO: 6604; WAN024BQF_at; Start 54; Stop 78
taagcttattgcgattgctttacca

SEQ ID NO: 90292 - DNA, 25 bp, Artificial
  probe
  misc_feature (1)..(25): SEQ ID NO: 6604; WAN024BQF_at; Start 449; Stop 473
tgttagctagtcaacgaaaagatat

SEQ ID NO: 90293 - DNA, 25 bp, Artificial
  probe
  misc_feature (1)..(25): SEQ ID NO: 6604; WAN024BQF_at; Start 302; Stop 326
taattgcgggccttttaattgtgcc

SEQ ID NO: 90294 - DNA, 25 bp, Artificial
  probe
  misc_feature (1)..(25): SEQ ID NO: 6604; WAN024BQF_at; Start 237; Stop 261
tgacactgtcggtgcacttctagga

SEQ ID NO: 90295 - DNA, 25 bp, Artificial
  probe
  misc_feature (1)..(25): SEQ ID NO: 6488; WAN024BQG_at; Start 1875; Stop 1899
aaaactatttttgcattacgaggat

SEQ ID NO: 90296 - DNA, 25 bp, Artificial
  probe
  misc_feature (1)..(25): SEQ ID NO: 6488; WAN024BQG_at; Start 1777; Stop 1801
caaatcattttgaaggatggaaaca

SEQ ID NO: 90297 - DNA, 25 bp, Artificial
  probe
  misc_feature (1)..(25): SEQ ID NO: 6488; WAN024BQG_at; Start 1586; Stop 1610
cctataagggagaagtttgtacatg

SEQ ID NO: 90298 - DNA, 25 bp, Artificial
  probe
  misc_feature (1)..(25): SEQ ID NO: 6488; WAN024BQG_at; Start 605; Stop 629
tacttctacaaaaggctcaattagg

SEQ ID NO: 90299 - DNA, 25 bp, Artificial
  probe
  misc_feature (1)..(25): SEQ ID NO: 6488; WAN024BQG_at; Start 1261; Stop 1285
gatggctttgatgagatacctgaaa

SEQ ID NO: 90300 - DNA, 25 bp, Artificial
  probe
  misc_feature (1)..(25): SEQ ID NO: 6488; WAN024BQG_at; Start 1426; Stop 1450
caaactttttcagatgtactccgat

SEQ ID NO: 90301 - DNA, 25 bp, Artificial
  probe
  misc_feature (1)..(25): SEQ ID NO: 6488; WAN024BQG_at; Start 1012; Stop 1036
tcaaaactccatgcaaaacttaagt

SEQ ID NO: 90302 - DNA, 25 bp, Artificial
  probe
  misc_feature (1)..(25): SEQ ID NO: 6488; WAN024BQG_at; Start 966; Stop 990
tctatgcaaaagtgggaaacagtac

SEQ ID NO: 90303 - DNA, 25 bp, Artificial
  probe
  misc_feature (1)..(25): SEQ ID NO: 6488; WAN024BQG_at; Start 403; Stop 427
gagaattcagtcttgactcaatcag

SEQ ID NO: 90304 - DNA, 25 bp, Artificial
  probe
  misc_feature (1)..(25): SEQ ID NO: 6488; WAN024BQG_at; Start 666; Stop 690
tgtaggtaatcctaactcaatgatg

SEQ ID NO: 90305 - DNA, 25 bp, Artificial
  probe
  misc_feature (1)..(25): SEQ ID NO: 6488; WAN024BQG_at; Start 445; Stop 469
acggactttttgtcggatacaggcg

SEQ ID NO: 90306 - DNA, 25 bp, Artificial
  probe
  misc_feature (1)..(25): SEQ ID NO: 6488; WAN024BQG_at; Start 244; Stop 268
gaggcttcgggagactatcttgctt

SEQ ID NO: 90307 - DNA, 25 bp, Artificial
  probe
  misc_feature (1)..(25): SEQ ID NO: 6488; WAN024BQG_at; Start 829; Stop 853
cgcttagagaaagaagatatggagt

SEQ ID NO: 90308 - DNA, 25 bp, Artificial
  probe
  misc_feature (1)..(25): SEQ ID NO: 6488; WAN024BQG_at; Start 733; Stop 757
gcatatcagagtcttactaagctac

SEQ ID NO: 90309 - DNA, 25 bp, Artificial
  probe
  misc_feature (1)..(25): SEQ ID NO: 6488; WAN024BQG_at; Start 138; Stop 162
tagtagcaaacagataattaacgag

SEQ ID NO: 90310 - DNA, 25 bp, Artificial
  probe
  misc_feature (1)..(25): SEQ ID NO: 6488; WAN024BQG_at; Start 156; Stop 180
taacgagtatcttaatgcagacagt

SEQ ID NO: 90311 - DNA, 25 bp, Artificial
  probe
  misc_feature (1)..(25): SEQ ID NO: 6488; WAN024BQG_at; Start 464; Stop 488
caggcgggttagctatttcaaatcg

SEQ ID NO: 90312 - DNA, 25 bp, Artificial
  probe
  misc_feature (1)..(25): SEQ ID NO: 6488; WAN024BQG_at; Start 1849; Stop 1873
ttgccatacatagaaaaactcccgc

SEQ ID NO: 90313 - DNA, 25 bp, Artificial
  probe
  misc_feature (1)..(25): SEQ ID NO: 6488; WAN024BQG_at; Start 681; Stop 705
ctcaatgatgaaggaaggagctatt

SEQ ID NO: 90314 - DNA, 25 bp, Artificial
  probe
  misc_feature (1)..(25): SEQ ID NO: 6488; WAN024BQG_at; Start 1813; Stop 1837
gcttcagttttagatcagccgttca

SEQ ID NO: 90315 - DNA, 25 bp, Artificial
  probe
  misc_feature (1)..(25): SEQ ID NO: 6488; WAN024BQG_at; Start 1795; Stop 1819
ggaaacatgttccaattagcttcag

SEQ ID NO: 90316 - DNA, 25 bp, Artificial
  probe
  misc_feature (1)..(25): SEQ ID NO: 6488; WAN024BQG_at; Start 349; Stop 373
gcggcaggttttttctatgacgatg

SEQ ID NO: 90317 - DNA, 25 bp, Artificial
  probe
  misc_feature (1)..(25): SEQ ID NO: 6488; WAN024BQG_at; Start 1639; Stop 1663
cagggacgcctagttagtatcatca

SEQ ID NO: 90318 - DNA, 25 bp, Artificial
  probe
  misc_feature (1)..(25): SEQ ID NO: 6488; WAN024BQG_at; Start 1572; Stop 1596
taaagatttcatgtcctataaggga

SEQ ID NO: 90319 - DNA, 25 bp, Artificial
  probe
  misc_feature (1)..(25): SEQ ID NO: 6488; WAN024BQG_at; Start 1467; Stop 1491
taacggaggaatgtgggttgactcc

SEQ ID NO: 90320 - DNA, 25 bp, Artificial
  probe
  misc_feature (1)..(25): SEQ ID NO: 6488; WAN024BQG_at; Start 334; Stop 358
gactatgatttcatagcggcaggtt

SEQ ID NO: 90321 - DNA, 25 bp, Artificial
  probe
  misc_feature (1)..(25): SEQ ID NO: 6488; WAN024BQG_at; Start 84; Stop 108
gcagcagacgtataagaatttagaa

SEQ ID NO: 90322 - DNA, 25 bp, Artificial
  probe
  misc_feature (1)..(25): SEQ ID NO: 6488; WAN024BQG_at; Start 121; Stop 145
gatgatggttcgacagatagtagca

SEQ ID NO: 90323 - DNA, 25 bp, Artificial
  probe
  misc_feature (1)..(25): SEQ ID NO: 6488; WAN024BQG_at; Start 1607; Stop 1631
catggtctggatttatgattgcttc

SEQ ID NO: 90324 - DNA, 25 bp, Artificial
  probe
  misc_feature (1)..(25): SEQ ID NO: 6488; WAN024BQG_at; Start 949; Stop 973
cagctattgatgattcgtctatgca

SEQ ID NO: 90325 - DNA, 25 bp, Artificial
  probe
  misc_feature (1)..(25): SEQ ID NO: 6488; WAN024BQG_at; Start 619; Stop 643
gctcaattagggaaaaccattgccc

SEQ ID NO: 90326 - DNA, 25 bp, Artificial
  probe
  misc_feature (1)..(25): SEQ ID NO: 6488; WAN024BQG_at; Start 1623; Stop 1647
gattgcttctcataaacagggacgc

SEQ ID NO: 90327 - DNA, 25 bp, Artificial
  probe
  misc_feature (1)..(25): SEQ ID NO: 6488; WAN024BQG_at; Start 204; Stop 228
aaatggaggcttagtatctgctaca

SEQ ID NO: 90328 - DNA, 25 bp, Artificial
  probe
  misc_feature (1)..(25): SEQ ID NO: 6488; WAN024BQG_at; Start 69; Stop 93
tttacctactttgaagcagcagacg

SEQ ID NO: 90329 - DNA, 25 bp, Artificial
  probe
  misc_feature (1)..(25): SEQ ID NO: 6713; WAN024BQH_at; Start 120; Stop 144
taacggagatataaaaagggcgata

SEQ ID NO: 90330 - DNA, 25 bp, Artificial
  probe
  misc_feature (1)..(25): SEQ ID NO: 6713; WAN024BQH_at; Start 369; Stop 393
gtttcctgcaacacttatagcttta

SEQ ID NO: 90331 - DNA, 25 bp, Artificial
  probe
  misc_feature (1)..(25): SEQ ID NO: 6713; WAN024BQH_at; Start 406; Stop 430
ttaggtggagtaaaaatcagagcat

SEQ ID NO: 90332 - DNA, 25 bp, Artificial
  probe
  misc_feature (1)..(25): SEQ ID NO: 6713; WAN024BQH_at; Start 21; Stop 45
tgtgacgttttcgtacatttcaaaa

SEQ ID NO: 90333 - DNA, 25 bp, Artificial
  probe
  misc_feature (1)..(25): SEQ ID NO: 6713; WAN024BQH_at; Start 536; Stop 560
aatacatacttaccccttacagagg

SEQ ID NO: 90334 - DNA, 25 bp, Artificial
  probe
  misc_feature (1)..(25): SEQ ID NO: 6713; WAN024BQH_at; Start 463; Stop 487
ttgattaaaggatcgggaacggcaa

SEQ ID NO: 90335 - DNA, 25 bp, Artificial
  probe
  misc_feature (1)..(25): SEQ ID NO: 6713; WAN024BQH_at; Start 309; Stop 333
tgcatacggaataacaaaagaatgg

SEQ ID NO: 90336 - DNA, 25 bp, Artificial
  probe
  misc_feature (1)..(25): SEQ ID NO: 6713; WAN024BQH_at; Start 279; Stop 303
cccagatggttttttccatcgtgta

SEQ ID NO: 90337 - DNA, 25 bp, Artificial
  probe
  misc_feature (1)..(25): SEQ ID NO: 6713; WAN024BQH_at; Start 644; Stop 668
tagaaaaagatttgacgttcacttc

SEQ ID NO: 90338 - DNA, 25 bp, Artificial
  probe
  misc_feature (1)..(25): SEQ ID NO: 6713; WAN024BQH_at; Start 678; Stop 702
tatttgggataacgctatgtcagca

SEQ ID NO: 90339 - DNA, 25 bp, Artificial
  probe
  misc_feature (1)..(25): SEQ ID NO: 6713; WAN024BQH_at; Start 263; Stop 287
tcactgtactatttttcccagatgg

SEQ ID NO: 90340 - DNA, 25 bp, Artificial
  probe
  misc_feature (1)..(25): SEQ ID NO: 6713; WAN024BQH_at; Start 916; Stop 940
aatgcgagactactcttttatggac

SEQ ID NO: 90341 - DNA, 25 bp, Artificial
  probe
  misc_feature (1)..(25): SEQ ID NO: 6713; WAN024BQH_at; Start 56; Stop 80
caaaattttttgtatggctagttct

SEQ ID NO: 90342 - DNA, 25 bp, Artificial
  probe
  misc_feature (1)..(25): SEQ ID NO: 6713; WAN024BQH_at; Start 555; Stop 579
cagaggtttggttatatcgtctacg

SEQ ID NO: 90343 - DNA, 25 bp, Artificial
  probe
  misc_feature (1)..(25): SEQ ID NO: 6713; WAN024BQH_at; Start 968; Stop 992
cagaaaacttagagatgcagatgat

SEQ ID NO: 90344 - DNA, 25 bp, Artificial
  probe
  misc_feature (1)..(25): SEQ ID NO: 6713; WAN024BQH_at; Start 693; Stop 717
tatgtcagcaattcgagagaagcca

SEQ ID NO: 90345 - DNA, 25 bp, Artificial
  probe
  misc_feature (1)..(25): SEQ ID NO: 6713; WAN024BQH_at; Start 901; Stop 925
tattgggatgatagaaatgcgagac

SEQ ID NO: 90346 - DNA, 25 bp, Artificial
  probe
  misc_feature (1)..(25): SEQ ID NO: 6713; WAN024BQH_at; Start 162; Stop 186
tacaggctttgtatctatgatagac

SEQ ID NO: 90347 - DNA, 25 bp, Artificial
  probe
  misc_feature (1)..(25): SEQ ID NO: 6713; WAN024BQH_at; Start 517; Stop 541
gatttagtacctcttgtcaaataca

SEQ ID NO: 90348 - DNA, 25 bp, Artificial
  probe
  misc_feature (1)..(25): SEQ ID NO: 6713; WAN024BQH_at; Start 741; Stop 765
cactgataacgtccatatattaggg

SEQ ID NO: 90349 - DNA, 25 bp, Artificial
  probe
  misc_feature (1)..(25): SEQ ID NO: 6713; WAN024BQH_at; Start 785; Stop 809
ggaaaggagccacccatgctcataa

SEQ ID NO: 90350 - DNA, 25 bp, Artificial
  probe
  misc_feature (1)..(25): SEQ ID NO: 6713; WAN024BQH_at; Start 294; Stop 318
ccatcgtgtaaatgatgcatacgga

SEQ ID NO: 90351 - DNA, 25 bp, Artificial
  probe
  misc_feature (1)..(25): SEQ ID NO: 6713; WAN024BQH_at; Start 485; Stop 509
caaaggttgggattgttgcgttgat

SEQ ID NO: 90352 - DNA, 25 bp, Artificial
  probe
  misc_feature (1)..(25): SEQ ID NO: 6713; WAN024BQH_at; Start 817; Stop 841
cttcaagttttatttcagggaggat

SEQ ID NO: 90353 - DNA, 25 bp, Artificial
  probe
  misc_feature (1)..(25): SEQ ID NO: 6713; WAN024BQH_at; Start 454; Stop 478
gctactcaattgattaaaggatcgg

SEQ ID NO: 90354 - DNA, 25 bp, Artificial
  probe
  misc_feature (1)..(25): SEQ ID NO: 6713; WAN024BQH_at; Start 231; Stop 255
cacttttgagatggttgtgtatcta

SEQ ID NO: 90355 - DNA, 25 bp, Artificial
  probe
  misc_feature (1)..(25): SEQ ID NO: 6713; WAN024BQH_at; Start 706; Stop 730
cgagagaagccatttggttacggaa

SEQ ID NO: 90356 - DNA, 25 bp, Artificial
  probe
  misc_feature (1)..(25): SEQ ID NO: 6713; WAN024BQH_at; Start 133; Stop 157
aaaagggcgatatttcaactcttgc

SEQ ID NO: 90357 - DNA, 25 bp, Artificial
  probe
  misc_feature (1)..(25): SEQ ID NO: 6713; WAN024BQH_at; Start 148; Stop 172
caactcttgctgtttacaggctttg

SEQ ID NO: 90358 - DNA, 25 bp, Artificial
  probe
  misc_feature (1)..(25): SEQ ID NO: 6713; WAN024BQH_at; Start 326; Stop 350
aagaatggtttttgggagctgataa

SEQ ID NO: 90359 - DNA, 25 bp, Artificial
  probe
  misc_feature (1)..(25): SEQ ID NO: 6713; WAN024BQH_at; Start 726; Stop 750
cggaatgatgatgttcactgataac

SEQ ID NO: 90360 - DNA, 25 bp, Artificial
  probe
  misc_feature (1)..(25): SEQ ID NO: 6713; WAN024BQH_at; Start 772; Stop 796
cctggttggatttggaaaggagcca

SEQ ID NO: 90361 - DNA, 25 bp, Artificial
  probe
  misc_feature (1)..(25): SEQ ID NO: 6713; WAN024BQH_at; Start 869; Stop 893
taattctaaagggagcaatgctatg

SEQ ID NO: 90362 - DNA, 25 bp, Artificial
  probe
  misc_feature (1)..(25): SEQ ID NO: 6713; WAN024BQH_at; Start 883; Stop 907
gcaatgctatgtcgcaaatattggg

SEQ ID NO: 90363 - DNA, 25 bp, Artificial
  probe
  misc_feature (1)..(25): SEQ ID NO: 6498; WAN024BQI_at; Start 466; Stop 490
tatcgattcgaaacagagattcgtg

SEQ ID NO: 90364 - DNA, 25 bp, Artificial
  probe
  misc_feature (1)..(25): SEQ ID NO: 6498; WAN024BQI_at; Start 544; Stop 568
gttacggaagagttgtatcagccaa

SEQ ID NO: 90365 - DNA, 25 bp, Artificial
  probe
  misc_feature (1)..(25): SEQ ID NO: 6498; WAN024BQI_at; Start 93; Stop 117
cccaatagaattggtttcagtaggg

SEQ ID NO: 90366 - DNA, 25 bp, Artificial
  probe
  misc_feature (1)..(25): SEQ ID NO: 6498; WAN024BQI_at; Start 479; Stop 503
cagagattcgtgaagaaatgaaaaa

SEQ ID NO: 90367 - DNA, 25 bp, Artificial
  probe
  misc_feature (1)..(25): SEQ ID NO: 6498; WAN024BQI_at; Start 43; Stop 67
gagtggcgaaaaaagaaccttcata

SEQ ID NO: 90368 - DNA, 25 bp, Artificial
  probe
  misc_feature (1)..(25): SEQ ID NO: 6498; WAN024BQI_at; Start 346; Stop 370
tctacaattctttcgggagttacaa

SEQ ID NO: 90369 - DNA, 25 bp, Artificial
  probe
  misc_feature (1)..(25): SEQ ID NO: 6498; WAN024BQI_at; Start 265; Stop 289
tctaaagtatttgatcaaggtgatg

SEQ ID NO: 90370 - DNA, 25 bp, Artificial
  probe
  misc_feature (1)..(25): SEQ ID NO: 6498; WAN024BQI_at; Start 11; Stop 35
gttataaacttcaatttcgacgatg

SEQ ID NO: 90371 - DNA, 25 bp, Artificial
  probe
  misc_feature (1)..(25): SEQ ID NO: 6498; WAN024BQI_at; Start 249; Stop 273
tacgtatccgttcaaatctaaagta

SEQ ID NO: 90372 - DNA, 25 bp, Artificial
  probe
  misc_feature (1)..(25): SEQ ID NO: 6498; WAN024BQI_at; Start 141; Stop 165
tgttttgtccttcaataaagagtca

SEQ ID NO: 90373 - DNA, 25 bp, Artificial
  probe
  misc_feature (1)..(25): SEQ ID NO: 6498; WAN024BQI_at; Start 218; Stop 242
tcagtgctgatcattatatcaatca

SEQ ID NO: 90374 - DNA, 25 bp, Artificial
  probe
  misc_feature (1)..(25): SEQ ID NO: 6498; WAN024BQI_at; Start 416; Stop 440
cagttcctccttacgctattgtagg

SEQ ID NO: 90375 - DNA, 25 bp, Artificial
  probe
  misc_feature (1)..(25): SEQ ID NO: 6498; WAN024BQI_at; Start 197; Stop 221
caccagaggttgcttttattctcag

SEQ ID NO: 90376 - DNA, 25 bp, Artificial
  probe
  misc_feature (1)..(25): SEQ ID NO: 6498; WAN024BQI_at; Start 125; Stop 149
cctatggtggtttgtatgttttgtc

SEQ ID NO: 90377 - DNA, 25 bp, Artificial
  probe
  misc_feature (1)..(25): SEQ ID NO: 6498; WAN024BQI_at; Start 508; Stop 532
gacttttcggagttcaaattagaga

SEQ ID NO: 90378 - DNA, 25 bp, Artificial
  probe
  misc_feature (1)..(25): SEQ ID NO: 6498; WAN024BQI_at; Start 178; Stop 202
ggaaatttctgctccattgcaccag

SEQ ID NO: 90379 - DNA, 25 bp, Artificial
  probe
  misc_feature (1)..(25): SEQ ID NO: 6498; WAN024BQI_at; Start 78; Stop 102
gcctcgaactatgttcccaatagaa

SEQ ID NO: 90380 - DNA, 25 bp, Artificial
  probe
  misc_feature (1)..(25): SEQ ID NO: 6498; WAN024BQI_at; Start 234; Stop 258
tatcaatcagttctctacgtatccg

SEQ ID NO: 90381 - DNA, 25 bp, Artificial
  probe
  misc_feature (1)..(25): SEQ ID NO: 6498; WAN024BQI_at; Start 451; Stop 475
gcaaaagtgatttcttatcgattcg

SEQ ID NO: 90382 - DNA, 25 bp, Artificial
  probe
  misc_feature (1)..(25): SEQ ID NO: 6498; WAN024BQI_at; Start 314; Stop 338
tcattgaggatgatgtatggattgg

SEQ ID NO: 90383 - DNA, 25 bp, Artificial
  probe
  misc_feature (1)..(25): SEQ ID NO: 6498; WAN024BQI_at; Start 439; Stop 463
ggtggagttccagcaaaagtgattt

SEQ ID NO: 90384 - DNA, 25 bp, Artificial
  probe
  misc_feature (1)..(25): SEQ ID NO: 6498; WAN024BQI_at; Start 25; Stop 49
tttcgacgatgtaaaaaagagtggc

SEQ ID NO: 90385 - DNA, 25 bp, Artificial
  probe
  misc_feature (1)..(25): SEQ ID NO: 6498; WAN024BQI_at; Start 392; Stop 416
gagcaggatctgtggtaactaaatc

SEQ ID NO: 90386 - DNA, 25 bp, Artificial
  probe
  misc_feature (1)..(25): SEQ ID NO: 6498; WAN024BQI_at; Start 380; Stop 404
gagctattgttggagcaggatctgt

SEQ ID NO: 90387 - DNA, 25 bp, Artificial
  probe
  misc_feature (1)..(25): SEQ ID NO: 6498; WAN024BQI_at; Start 70; Stop 94
gaaacaacgcctcgaactatgttcc

SEQ ID NO: 90388 - DNA, 25 bp, Artificial
  probe
  misc_feature (1)..(25): SEQ ID NO: 6498; WAN024BQI_at; Start 402; Stop 426
tgtggtaactaaatcagttcctcct

SEQ ID NO: 90389 - DNA, 25 bp, Artificial
  probe
  misc_feature (1)..(25): SEQ ID NO: 6498; WAN024BQI_at; Start 60; Stop 84
ccttcataatgaaacaacgcctcga

SEQ ID NO: 90390 - DNA, 25 bp, Artificial
  probe
  misc_feature (1)..(25): SEQ ID NO: 6498; WAN024BQI_at; Start 328; Stop 352
gtatggattggttttcgttctacaa

SEQ ID NO: 90391 - DNA, 25 bp, Artificial
  probe
  misc_feature (1)..(25): SEQ ID NO: 6498; WAN024BQI_at; Start 187; Stop 211
tgctccattgcaccagaggttgctt

SEQ ID NO: 90392 - DNA, 25 bp, Artificial
  probe
  misc_feature (1)..(25): SEQ ID NO: 6498; WAN024BQI_at; Start 203; Stop 227
aggttgcttttattctcagtgctga

SEQ ID NO: 90393 - DNA, 25 bp, Artificial
  probe
  misc_feature (1)..(25): SEQ ID NO: 6498; WAN024BQI_at; Start 421; Stop 445
cctccttacgctattgtaggtggag

SEQ ID NO: 90394 - DNA, 25 bp, Artificial
  probe
  misc_feature (1)..(25): SEQ ID NO: 6498; WAN024BQI_at; Start 355; Stop 379
ctttcgggagttacaattggtcagg

SEQ ID NO: 90395 - DNA, 25 bp, Artificial
  probe
  misc_feature (1)..(25): SEQ ID NO: 6498; WAN024BQI_at; Start 559; Stop 583
tatcagccaatttcgtcaataagac

SEQ ID NO: 90396 - DNA, 25 bp, Artificial
  probe
  misc_feature (1)..(25): SEQ ID NO: 6498; WAN024BQI_at; Start 369; Stop 393
aattggtcagggagctattgttgga

SEQ ID NO: 90397 - DNA, 25 bp, Artificial
  probe
  misc_feature (1)..(25): SEQ ID NO: 6956; WAN024BQJ_at; Start 194; Stop 218
tcttgattcaacaggcagaattggc

SEQ ID NO: 90398 - DNA, 25 bp, Artificial
  probe
  misc_feature (1)..(25): SEQ ID NO: 6956; WAN024BQJ_at; Start 775; Stop 799
caaaaacttgagattagaggtgaaa

SEQ ID NO: 90399 - DNA, 25 bp, Artificial
  probe
  misc_feature (1)..(25): SEQ ID NO: 6956; WAN024BQJ_at; Start 93; Stop 117
tgaatggactaatgtaaagaaagcc

SEQ ID NO: 90400 - DNA, 25 bp, Artificial
  probe
  misc_feature (1)..(25): SEQ ID NO: 6956; WAN024BQJ_at; Start 1105; Stop 1129
tatctagaggccttgaagacagtta

SEQ ID NO: 90401 - DNA, 25 bp, Artificial
  probe
  misc_feature (1)..(25): SEQ ID NO: 6956; WAN024BQJ_at; Start 919; Stop 943
aataccgctagaaataagaatgggc

SEQ ID NO: 90402 - DNA, 25 bp, Artificial
  probe
  misc_feature (1)..(25): SEQ ID NO: 6956; WAN024BQJ_at; Start 799; Stop 823
aaaaaggtgcataataaagctctct

SEQ ID NO: 90403 - DNA, 25 bp, Artificial
  probe
  misc_feature (1)..(25): SEQ ID NO: 6956; WAN024BQJ_at; Start 944; Stop 968
gagttttcgatggagctaatccaga

SEQ ID NO: 90404 - DNA, 25 bp, Artificial
  probe
  misc_feature (1)..(25): SEQ ID NO: 6956; WAN024BQJ_at; Start 1119; Stop 1143
gaagacagttatagacgagacaagg

SEQ ID NO: 90405 - DNA, 25 bp, Artificial
  probe
  misc_feature (1)..(25): SEQ ID NO: 6956; WAN024BQJ_at; Start 1051; Stop 1075
aatgaatgggcggaaggagcatacc

SEQ ID NO: 90406 - DNA, 25 bp, Artificial
  probe
  misc_feature (1)..(25): SEQ ID NO: 6956; WAN024BQJ_at; Start 561; Stop 585
cagaaatcgtgctcgaaagaatggc

SEQ ID NO: 90407 - DNA, 25 bp, Artificial
  probe
  misc_feature (1)..(25): SEQ ID NO: 6956; WAN024BQJ_at; Start 902; Stop 926
cttttgttgattgggataataccgc

SEQ ID NO: 90408 - DNA, 25 bp, Artificial
  probe
  misc_feature (1)..(25): SEQ ID NO: 6956; WAN024BQJ_at; Start 687; Stop 711
gattcatatggaaaagcacgagaga

SEQ ID NO: 90409 - DNA, 25 bp, Artificial
  probe
  misc_feature (1)..(25): SEQ ID NO: 6956; WAN024BQJ_at; Start 864; Stop 888
taatcgcccgattaaggataataag

SEQ ID NO: 90410 - DNA, 25 bp, Artificial
  probe
  misc_feature (1)..(25): SEQ ID NO: 6956; WAN024BQJ_at; Start 879; Stop 903
ggataataagatgattgctggtgct

SEQ ID NO: 90411 - DNA, 25 bp, Artificial
  probe
  misc_feature (1)..(25): SEQ ID NO: 6956; WAN024BQJ_at; Start 967; Stop 991
gaaaaatttgaaggttacatgcgac

SEQ ID NO: 90412 - DNA, 25 bp, Artificial
  probe
  misc_feature (1)..(25): SEQ ID NO: 6956; WAN024BQJ_at; Start 702; Stop 726
gcacgagagaaaaaatccagtttac

SEQ ID NO: 90413 - DNA, 25 bp, Artificial
  probe
  misc_feature (1)..(25): SEQ ID NO: 6956; WAN024BQJ_at; Start 1093; Stop 1117
catggatatggctatctagaggcct

SEQ ID NO: 90414 - DNA, 25 bp, Artificial
  probe
  misc_feature (1)..(25): SEQ ID NO: 6956; WAN024BQJ_at; Start 1066; Stop 1090
ggagcataccttgagcctgataaaa

SEQ ID NO: 90415 - DNA, 25 bp, Artificial
  probe
  misc_feature (1)..(25): SEQ ID NO: 6956; WAN024BQJ_at; Start 510; Stop 534
gatttataagccagagctaattcca

SEQ ID NO: 90416 - DNA, 25 bp, Artificial
  probe
  misc_feature (1)..(25): SEQ ID NO: 6956; WAN024BQJ_at; Start 142; Stop 166
caaccacgagttccatacaataata

SEQ ID NO: 90417 - DNA, 25 bp, Artificial
  probe
  misc_feature (1)..(25): SEQ ID NO: 6956; WAN024BQJ_at; Start 53; Stop 77
ccatcccagagaatgatgaggctca

SEQ ID NO: 90418 - DNA, 25 bp, Artificial
  probe
  misc_feature (1)..(25): SEQ ID NO: 6956; WAN024BQJ_at; Start 655; Stop 679
gatggatttgcagaattccaaccga

SEQ ID NO: 90419 - DNA, 25 bp, Artificial
  probe
  misc_feature (1)..(25): SEQ ID NO: 6956; WAN024BQJ_at; Start 127; Stop 151
tatgacgggcataatcaaccacgag

SEQ ID NO: 90420 - DNA, 25 bp, Artificial
  probe
  misc_feature (1)..(25): SEQ ID NO: 6956; WAN024BQJ_at; Start 111; Stop 135
gaaagcctatccactttatgacggg

SEQ ID NO: 90421 - DNA, 25 bp, Artificial
  probe
  misc_feature (1)..(25): SEQ ID NO: 6956; WAN024BQJ_at; Start 327; Stop 351
tatacctttttgtttgagttgggca

SEQ ID NO: 90422 - DNA, 25 bp, Artificial
  probe
  misc_feature (1)..(25): SEQ ID NO: 6956; WAN024BQJ_at; Start 348; Stop 372
ggcaaatgaaaactggactaggcgt

SEQ ID NO: 90423 - DNA, 25 bp, Artificial
  probe
  misc_feature (1)..(25): SEQ ID NO: 6956; WAN024BQJ_at; Start 830; Stop 854
ggagagattatgatgcaacatggac

SEQ ID NO: 90424 - DNA, 25 bp, Artificial
  probe
  misc_feature (1)..(25): SEQ ID NO: 6956; WAN024BQJ_at; Start 1038; Stop 1062
tataaacgcatggaatgaatgggcg

SEQ ID NO: 90425 - DNA, 25 bp, Artificial
  probe
  misc_feature (1)..(25): SEQ ID NO: 6956; WAN024BQJ_at; Start 495; Stop 519
gaaaccgctcttgttgatttataag

SEQ ID NO: 90426 - DNA, 25 bp, Artificial
  probe
  misc_feature (1)..(25): SEQ ID NO: 6956; WAN024BQJ_at; Start 298; Stop 322
gaaatgatgctagaaaacaaggatg

SEQ ID NO: 90427 - DNA, 25 bp, Artificial
  probe
  misc_feature (1)..(25): SEQ ID NO: 6956; WAN024BQJ_at; Start 396; Stop 420
cattgttgaacaaaactatgacgac

SEQ ID NO: 90428 - DNA, 25 bp, Artificial
  probe
  misc_feature (1)..(25): SEQ ID NO: 6956; WAN024BQJ_at; Start 717; Stop 741
tccagtttaccgatctgtgaaatct

SEQ ID NO: 90429 - DNA, 25 bp, Artificial
  probe
  misc_feature (1)..(25): SEQ ID NO: 6956; WAN024BQJ_at; Start 69; Stop 93
tgaggctcatggagaaggatttact

SEQ ID NO: 90430 - DNA, 25 bp, Artificial
  probe
  misc_feature (1)..(25): SEQ ID NO: 6956; WAN024BQJ_at; Start 478; Stop 502
tatattaagattgacgggaaaccgc

SEQ ID NO: 90431 - DNA, 25 bp, Artificial
  probe
  misc_feature (1)..(25): SEQ ID NO: 7214; WAN024BQK_at; Start 455; Stop 479
ggtataccaatcctatctcaacttt

SEQ ID NO: 90432 - DNA, 25 bp, Artificial
  probe
  misc_feature (1)..(25): SEQ ID NO: 7214; WAN024BQK_at; Start 160; Stop 184
tacgaagaaaaagatagacggatta

SEQ ID NO: 90433 - DNA, 25 bp, Artificial
  probe
  misc_feature (1)..(25): SEQ ID NO: 7214; WAN024BQK_at; Start 370; Stop 394
ccggtattgatttacgctgatatgc

SEQ ID NO: 90434 - DNA, 25 bp, Artificial
  probe
  misc_feature (1)..(25): SEQ ID NO: 7214; WAN024BQK_at; Start 35; Stop 59
cctacaacggagaagaatttcttcg

SEQ ID NO: 90435 - DNA, 25 bp, Artificial
  probe
  misc_feature (1)..(25): SEQ ID NO: 7214; WAN024BQK_at; Start 647; Stop 671
ctatgagttatagacgatatgggca

SEQ ID NO: 90436 - DNA, 25 bp, Artificial
  probe
  misc_feature (1)..(25): SEQ ID NO: 7214; WAN024BQK_at; Start 305; Stop 329
tctgggatgtggacaaattagaacg

SEQ ID NO: 90437 - DNA, 25 bp, Artificial
  probe
  misc_feature (1)..(25): SEQ ID NO: 7214; WAN024BQK_at; Start 274; Stop 298
gatttctatatgtttgctgatcagg

SEQ ID NO: 90438 - DNA, 25 bp, Artificial
  probe
  misc_feature (1)..(25): SEQ ID NO: 7214; WAN024BQK_at; Start 774; Stop 798
gcagaccttagtcgctacaaatttg

SEQ ID NO: 90439 - DNA, 25 bp, Artificial
  probe
  misc_feature (1)..(25): SEQ ID NO: 7214; WAN024BQK_at; Start 599; Stop 623
caaaaattgctgcattgaaagggca

SEQ ID NO: 90440 - DNA, 25 bp, Artificial
  probe
  misc_feature (1)..(25): SEQ ID NO: 7214; WAN024BQK_at; Start 741; Stop 765
tgaattagctaaagatcatgccttg

SEQ ID NO: 90441 - DNA, 25 bp, Artificial
  probe
  misc_feature (1)..(25): SEQ ID NO: 7214; WAN024BQK_at; Start 195; Stop 219
aaacatatcggaatatcatggagcc

SEQ ID NO: 90442 - DNA, 25 bp, Artificial
  probe
  misc_feature (1)..(25): SEQ ID NO: 7214; WAN024BQK_at; Start 247; Stop 271
gatgttagacaaaacgaaaatccat

SEQ ID NO: 90443 - DNA, 25 bp, Artificial
  probe
  misc_feature (1)..(25): SEQ ID NO: 7214; WAN024BQK_at; Start 922; Stop 946
cgtgttaagactataagcaggtctc

SEQ ID NO: 90444 - DNA, 25 bp, Artificial
  probe
  misc_feature (1)..(25): SEQ ID NO: 7214; WAN024BQK_at; Start 549; Stop 573
tccatgttatgctccagaattagcc

SEQ ID NO: 90445 - DNA, 25 bp, Artificial
  probe
  misc_feature (1)..(25): SEQ ID NO: 7214; WAN024BQK_at; Start 620; Stop 644
ggcatgtgtatttttatgatgagcc

SEQ ID NO: 90446 - DNA, 25 bp, Artificial
  probe
  misc_feature (1)..(25): SEQ ID NO: 7214; WAN024BQK_at; Start 211; Stop 235
catggagcctattataatttttggg

SEQ ID NO: 90447 - DNA, 25 bp, Artificial
  probe
  misc_feature (1)..(25): SEQ ID NO: 7214; WAN024BQK_at; Start 664; Stop 688
tatgggcataatgttacaagtaaac

SEQ ID NO: 90448 - DNA, 25 bp, Artificial
  probe
  misc_feature (1)..(25): SEQ ID NO: 7214; WAN024BQK_at; Start 691; Stop 715
gagtataactttacattgaagcgaa

SEQ ID NO: 90449 - DNA, 25 bp, Artificial
  probe
  misc_feature (1)..(25): SEQ ID NO: 7214; WAN024BQK_at; Start 439; Stop 463
caattgatgggaattcggtatacca

SEQ ID NO: 90450 - DNA, 25 bp, Artificial
  probe
  misc_feature (1)..(25): SEQ ID NO: 7214; WAN024BQK_at; Start 388; Stop 412
gatatgcggattatagatgctaacg

SEQ ID NO: 90451 - DNA, 25 bp, Artificial
  probe
  misc_feature (1)..(25): SEQ ID NO: 7214; WAN024BQK_at; Start 938; Stop 962
gcaggtctctgattttagcgtcaaa

SEQ ID NO: 90452 - DNA, 25 bp, Artificial
  probe
  misc_feature (1)..(25): SEQ ID NO: 7214; WAN024BQK_at; Start 92; Stop 116
tctcaacttgggaactactgattcg

SEQ ID NO: 90453 - DNA, 25 bp, Artificial
  probe
  misc_feature (1)..(25): SEQ ID NO: 7214; WAN024BQK_at; Start 565; Stop 589
gaattagccttcctatcacatgata

SEQ ID NO: 90454 - DNA, 25 bp, Artificial
  probe
  misc_feature (1)..(25): SEQ ID NO: 7214; WAN024BQK_at; Start 107; Stop 131
tactgattcgtgatgataattccaa

SEQ ID NO: 90455 - DNA, 25 bp, Artificial
  probe
  misc_feature (1)..(25): SEQ ID NO: 7214; WAN024BQK_at; Start 760; Stop 784
gccttgacttacaagcagaccttag

SEQ ID NO: 90456 - DNA, 25 bp, Artificial
  probe
  misc_feature (1)..(25): SEQ ID NO: 7214; WAN024BQK_at; Start 808; Stop 832
caaacaagtattgacactgaactcc

SEQ ID NO: 90457 - DNA, 25 bp, Artificial
  probe
  misc_feature (1)..(25): SEQ ID NO: 7214; WAN024BQK_at; Start 288; Stop 312
tgctgatcaggatgatatctgggat

SEQ ID NO: 90458 - DNA, 25 bp, Artificial
  probe
  misc_feature (1)..(25): SEQ ID NO: 7214; WAN024BQK_at; Start 708; Stop 732
gaagcgaatcttaaaacgtatctcg

SEQ ID NO: 90459 - DNA, 25 bp, Artificial
  probe
  misc_feature (1)..(25): SEQ ID NO: 7214; WAN024BQK_at; Start 123; Stop 147
taattccaatgatcaaacaagagca

SEQ ID NO: 90460 - DNA, 25 bp, Artificial
  probe
  misc_feature (1)..(25): SEQ ID NO: 7214; WAN024BQK_at; Start 79; Stop 103
ctttgtcaaaccatctcaacttggg

SEQ ID NO: 90461 - DNA, 25 bp, Artificial
  probe
  misc_feature (1)..(25): SEQ ID NO: 7214; WAN024BQK_at; Start 860; Stop 884
tcaaaaaaggtggattaaatgctgt

SEQ ID NO: 90462 - DNA, 25 bp, Artificial
  probe
  misc_feature (1)..(25): SEQ ID NO: 7214; WAN024BQK_at; Start 20; Stop 44
taatcatgatggctacctacaacgg

SEQ ID NO: 90463 - DNA, 25 bp, Artificial
  probe
  misc_feature (1)..(25): SEQ ID NO: 7214; WAN024BQK_at; Start 55; Stop 79
cttcgtgaacagttggatagtatcc

SEQ ID NO: 90464 - DNA, 25 bp, Artificial
  probe
  misc_feature (1)..(25): SEQ ID NO: 7214; WAN024BQK_at; Start 401; Stop 425
tagatgctaacggtaaagtgatagc

SEQ ID NO: 90465 - DNA, 25 bp, Artificial
  probe
  misc_feature (1)..(25): SEQ ID NO: 6330; WAN024BQL_at; Start 232; Stop 256
aaacgcagtgatgtcaaagagtatc

SEQ ID NO: 90466 - DNA, 25 bp, Artificial
  probe
  misc_feature (1)..(25): SEQ ID NO: 6330; WAN024BQL_at; Start 229; Stop 253
caaaaacgcagtgatgtcaaagagt

SEQ ID NO: 90467 - DNA, 25 bp, Artificial
  probe
  misc_feature (1)..(25): SEQ ID NO: 6330; WAN024BQL_at; Start 107; Stop 131
caagtgatgaattcaacctaattga

SEQ ID NO: 90468 - DNA, 25 bp, Artificial
  probe
  misc_feature (1)..(25): SEQ ID NO: 6330; WAN024BQL_at; Start 279; Stop 303
ggatgattggattggagaatttgat

SEQ ID NO: 90469 - DNA, 25 bp, Artificial
  probe
  misc_feature (1)..(25): SEQ ID NO: 6330; WAN024BQL_at; Start 49; Stop 73
catatcaatttattgcgacgtgcaa

SEQ ID NO: 90470 - DNA, 25 bp, Artificial
  probe
  misc_feature (1)..(25): SEQ ID NO: 6330; WAN024BQL_at; Start 152; Stop 176
tcaattatgagcatagaaaaagtct

SEQ ID NO: 90471 - DNA, 25 bp, Artificial
  probe
  misc_feature (1)..(25): SEQ ID NO: 6330; WAN024BQL_at; Start 59; Stop 83
tattgcgacgtgcaaaagaattagg

SEQ ID NO: 90472 - DNA, 25 bp, Artificial
  probe
  misc_feature (1)..(25): SEQ ID NO: 6330; WAN024BQL_at; Start 76; Stop 100
gaattaggtgactatctagtggtag

SEQ ID NO: 90473 - DNA, 25 bp, Artificial
  probe
  misc_feature (1)..(25): SEQ ID NO: 6330; WAN024BQL_at; Start 207; Stop 231
tattcctgaaacgagttgggaacaa

SEQ ID NO: 90474 - DNA, 25 bp, Artificial
  probe
  misc_feature (1)..(25): SEQ ID NO: 6330; WAN024BQL_at; Start 167; Stop 191
gaaaaagtctagttgaagctattag

SEQ ID NO: 90475 - DNA, 25 bp, Artificial
  probe
  misc_feature (1)..(25): SEQ ID NO: 6330; WAN024BQL_at; Start 87; Stop 111
ctatctagtggtagttgtttcaagt

SEQ ID NO: 90476 - DNA, 25 bp, Artificial
  probe
  misc_feature (1)..(25): SEQ ID NO: 6330; WAN024BQL_at; Start 26; Stop 50
cgtttgatttacttcatcatggaca

SEQ ID NO: 90477 - DNA, 25 bp, Artificial
  probe
  misc_feature (1)..(25): SEQ ID NO: 6330; WAN024BQL_at; Start 181; Stop 205
gaagctattagatatgttgaccttg

SEQ ID NO: 90478 - DNA, 25 bp, Artificial
  probe
  misc_feature (1)..(25): SEQ ID NO: 6330; WAN024BQL_at; Start 226; Stop 250
gaacaaaaacgcagtgatgtcaaag

SEQ ID NO: 90479 - DNA, 25 bp, Artificial
  probe
  misc_feature (1)..(25): SEQ ID NO: 6330; WAN024BQL_at; Start 218; Stop 242
cgagttgggaacaaaaacgcagtga

SEQ ID NO: 90480 - DNA, 25 bp, Artificial
  probe
  misc_feature (1)..(25): SEQ ID NO: 6330; WAN024BQL_at; Start 191; Stop 215
gatatgttgaccttgttattcctga

SEQ ID NO: 90481 - DNA, 25 bp, Artificial
  probe
  misc_feature (1)..(25): SEQ ID NO: 6330; WAN024BQL_at; Start 13; Stop 37
attacatatggaacgtttgatttac

SEQ ID NO: 90482 - DNA, 25 bp, Artificial
  probe
  misc_feature (1)..(25): SEQ ID NO: 6330; WAN024BQL_at; Start 222; Stop 246
ttgggaacaaaaacgcagtgatgtc

SEQ ID NO: 90483 - DNA, 25 bp, Artificial
  probe
  misc_feature (1)..(25): SEQ ID NO: 6330; WAN024BQL_at; Start 23; Stop 47
gaacgtttgatttacttcatcatgg

SEQ ID NO: 90484 - DNA, 25 bp, Artificial
  probe
  misc_feature (1)..(25): SEQ ID NO: 6330; WAN024BQL_at; Start 47; Stop 71
gacatatcaatttattgcgacgtgc

SEQ ID NO: 90485 - DNA, 25 bp, Artificial
  probe
  misc_feature (1)..(25): SEQ ID NO: 6330; WAN024BQL_at; Start 239; Stop 263
gtgatgtcaaagagtatcatattga

SEQ ID NO: 90486 - DNA, 25 bp, Artificial
  probe
  misc_feature (1)..(25): SEQ ID NO: 6330; WAN024BQL_at; Start 198; Stop 222
tgaccttgttattcctgaaacgagt

SEQ ID NO: 90487 - DNA, 25 bp, Artificial
  probe
  misc_feature (1)..(25): SEQ ID NO: 6330; WAN024BQL_at; Start 67; Stop 91
cgtgcaaaagaattaggtgactatc

SEQ ID NO: 90488 - DNA, 25 bp, Artificial
  probe
  misc_feature (1)..(25): SEQ ID NO: 6330; WAN024BQL_at; Start 162; Stop 186
gcatagaaaaagtctagttgaagct

SEQ ID NO: 90489 - DNA, 25 bp, Artificial
  probe
  misc_feature (1)..(25): SEQ ID NO: 6330; WAN024BQL_at; Start 112; Stop 136
gatgaattcaacctaattgaaaaaa

SEQ ID NO: 90490 - DNA, 25 bp, Artificial
  probe
  misc_feature (1)..(25): SEQ ID NO: 6330; WAN024BQL_at; Start 195; Stop 219
tgttgaccttgttattcctgaaacg

SEQ ID NO: 90491 - DNA, 25 bp, Artificial
  probe
  misc_feature (1)..(25): SEQ ID NO: 6330; WAN024BQL_at; Start 102; Stop 126
tgtttcaagtgatgaattcaaccta

SEQ ID NO: 90492 - DNA, 25 bp, Artificial
  probe
  misc_feature (1)..(25): SEQ ID NO: 6330; WAN024BQL_at; Start 235; Stop 259
cgcagtgatgtcaaagagtatcata

SEQ ID NO: 90493 - DNA, 25 bp, Artificial
  probe
  misc_feature (1)..(25): SEQ ID NO: 6330; WAN024BQL_at; Start 63; Stop 87
gcgacgtgcaaaagaattaggtgac

SEQ ID NO: 90494 - DNA, 25 bp, Artificial
  probe
  misc_feature (1)..(25): SEQ ID NO: 6330; WAN024BQL_at; Start 254; Stop 278
atcatattgatacttttgtgatggg

SEQ ID NO: 90495 - DNA, 25 bp, Artificial
  probe
  misc_feature (1)..(25): SEQ ID NO: 6330; WAN024BQL_at; Start 139; Stop 163
aaagtttgttatttcaattatgagc

SEQ ID NO: 90496 - DNA, 25 bp, Artificial
  probe
  misc_feature (1)..(25): SEQ ID NO: 6330; WAN024BQL_at; Start 291; Stop 315
tggagaatttgattatctaaaagaa

SEQ ID NO: 90497 - DNA, 25 bp, Artificial
  probe
  misc_feature (1)..(25): SEQ ID NO: 6330; WAN024BQL_at; Start 54; Stop 78
caatttattgcgacgtgcaaaagaa

SEQ ID NO: 90498 - DNA, 25 bp, Artificial
  probe
  misc_feature (1)..(25): SEQ ID NO: 6330; WAN024BQL_at; Start 202; Stop 226
cttgttattcctgaaacgagttggg

SEQ ID NO: 90499 - DNA, 25 bp, Artificial
  probe
  misc_feature (1)..(25): SEQ ID NO: 7247; WAN024BQM_at; Start 356; Stop 380
gattactgatattgaagcaagcgca

SEQ ID NO: 90500 - DNA, 25 bp, Artificial
  probe
  misc_feature (1)..(25): SEQ ID NO: 7247; WAN024BQM_at; Start 703; Stop 727
ggaatcgtattctttcaacgtaaga

SEQ ID NO: 90501 - DNA, 25 bp, Artificial
  probe
  misc_feature (1)..(25): SEQ ID NO: 7247; WAN024BQM_at; Start 674; Stop 698
gccgtagtgctattataagtactct

SEQ ID NO: 90502 - DNA, 25 bp, Artificial
  probe
  misc_feature (1)..(25): SEQ ID NO: 7247; WAN024BQM_at; Start 388; Stop 412
actgcttgcatattagctttatggg

SEQ ID NO: 90503 - DNA, 25 bp, Artificial
  probe
  misc_feature (1)..(25): SEQ ID NO: 7247; WAN024BQM_at; Start 978; Stop 1002
tctgtcactctatcactcagcaaat

SEQ ID NO: 90504 - DNA, 25 bp, Artificial
  probe
  misc_feature (1)..(25): SEQ ID NO: 7247; WAN024BQM_at; Start 687; Stop 711
tataagtactcttgtaggaatcgta

SEQ ID NO: 90505 - DNA, 25 bp, Artificial
  probe
  misc_feature (1)..(25): SEQ ID NO: 7247; WAN024BQM_at; Start 82; Stop 106
cataccttaatttttgatgcactaa

SEQ ID NO: 90506 - DNA, 25 bp, Artificial
  probe
  misc_feature (1)..(25): SEQ ID NO: 7247; WAN024BQM_at; Start 472; Stop 496
caaggaaattttctaaagagtacag

SEQ ID NO: 90507 - DNA, 25 bp, Artificial
  probe
  misc_feature (1)..(25): SEQ ID NO: 7247; WAN024BQM_at; Start 644; Stop 668
caattgtagcagcttttgttcttac

SEQ ID NO: 90508 - DNA, 25 bp, Artificial
  probe
  misc_feature (1)..(25): SEQ ID NO: 7247; WAN024BQM_at; Start 904; Stop 928
gacttatggcttcctcttctaaaag

SEQ ID NO: 90509 - DNA, 25 bp, Artificial
  probe
  misc_feature (1)..(25): SEQ ID NO: 7247; WAN024BQM_at; Start 1216; Stop 1240
gaactagcactatatacaaaaggaa

SEQ ID NO: 90510 - DNA, 25 bp, Artificial
  probe
  misc_feature (1)..(25): SEQ ID NO: 7247; WAN024BQM_at; Start 659; Stop 683
ttgttcttacatttagccgtagtgc

SEQ ID NO: 90511 - DNA, 25 bp, Artificial
  probe
  misc_feature (1)..(25): SEQ ID NO: 7247; WAN024BQM_at; Start 62; Stop 86
tagttgttgttactccgactcatac

SEQ ID NO: 90512 - DNA, 25 bp, Artificial
  probe
  misc_feature (1)..(25): SEQ ID NO: 7247; WAN024BQM_at; Start 840; Stop 864
gctctatagcagttattcttcaaca

SEQ ID NO: 90513 - DNA, 25 bp, Artificial
  probe
  misc_feature (1)..(25): SEQ ID NO: 7247; WAN024BQM_at; Start 254; Stop 278
tctgttcagataggccatttacagc

SEQ ID NO: 90514 - DNA, 25 bp, Artificial
  probe
  misc_feature (1)..(25): SEQ ID NO: 7247; WAN024BQM_at; Start 516; Stop 540
tttcggtcaacaacgagttactagc

SEQ ID NO: 90515 - DNA, 25 bp, Artificial
  probe
  misc_feature (1)..(25): SEQ ID NO: 7247; WAN024BQM_at; Start 1203; Stop 1227
cattgggatggatgaactagcacta

SEQ ID NO: 90516 - DNA, 25 bp, Artificial
  probe
  misc_feature (1)..(25): SEQ ID NO: 7247; WAN024BQM_at; Start 1098; Stop 1122
taaaaaatatttgcttagcggtgct

SEQ ID NO: 90517 - DNA, 25 bp, Artificial
  probe
  misc_feature (1)..(25): SEQ ID NO: 7247; WAN024BQM_at; Start 97; Stop 121
gatgcactaattccaacgaaaattg

SEQ ID NO: 90518 - DNA, 25 bp, Artificial
  probe
  misc_feature (1)..(25): SEQ ID NO: 7247; WAN024BQM_at; Start 1113; Stop 1137
tagcggtgctatatgctgcttagtt

SEQ ID NO: 90519 - DNA, 25 bp, Artificial
  probe
  misc_feature (1)..(25): SEQ ID NO: 7247; WAN024BQM_at; Start 753; Stop 777
tgttatgaccttggtaatcttcccc

SEQ ID NO: 90520 - DNA, 25 bp, Artificial
  probe
  misc_feature (1)..(25): SEQ ID NO: 7247; WAN024BQM_at; Start 530; Stop 554
gagttactagcactttttctgctcc

SEQ ID NO: 90521 - DNA, 25 bp, Artificial
  probe
  misc_feature (1)..(25): SEQ ID NO: 7247; WAN024BQM_at; Start 872; Stop 896
tgacagattcttcagcggttaagca

SEQ ID NO: 90522 - DNA, 25 bp, Artificial
  probe
  misc_feature (1)..(25): SEQ ID NO: 7247; WAN024BQM_at; Start 738; Stop 762
aacgacgaagattaatgttatgacc

SEQ ID NO: 90523 - DNA, 25 bp, Artificial
  probe
  misc_feature (1)..(25): SEQ ID NO: 7247; WAN024BQM_at; Start 947; Stop 971
gacttggatttggtaataatggccc

SEQ ID NO: 90524 - DNA, 25 bp, Artificial
  probe
  misc_feature (1)..(25): SEQ ID NO: 7247; WAN024BQM_at; Start 488; Stop 512
agagtacagctttttatattggtgg

SEQ ID NO: 90525 - DNA, 25 bp, Artificial
  probe
  misc_feature (1)..(25): SEQ ID NO: 7247; WAN024BQM_at; Start 963; Stop 987
taatggcccaattgttctgtcactc

SEQ ID NO: 90526 - DNA, 25 bp, Artificial
  probe
  misc_feature (1)..(25): SEQ ID NO: 7247; WAN024BQM_at; Start 368; Stop 392
tgaagcaagcgcatgtatatactgc

SEQ ID NO: 90527 - DNA, 25 bp, Artificial
  probe
  misc_feature (1)..(25): SEQ ID NO: 7247; WAN024BQM_at; Start 211; Stop 235
ggcccaataattgttatgggaggaa

SEQ ID NO: 90528 - DNA, 25 bp, Artificial
  probe
  misc_feature (1)..(25): SEQ ID NO: 7247; WAN024BQM_at; Start 340; Stop 364
aattttcgcaaggagagattactga

SEQ ID NO: 90529 - DNA, 25 bp, Artificial
  probe
  misc_feature (1)..(25): SEQ ID NO: 7247; WAN024BQM_at; Start 883; Stop 907
tcagcggttaagcatttggaagact

SEQ ID NO: 90530 - DNA, 25 bp, Artificial
  probe
  misc_feature (1)..(25): SEQ ID NO: 7247; WAN024BQM_at; Start 420; Stop 444
tcaggcgtgggtgttaaaagatcag

SEQ ID NO: 90531 - DNA, 25 bp, Artificial
  probe
  misc_feature (1)..(25): SEQ ID NO: 7247; WAN024BQM_at; Start 930; Stop 954
tattgattatcctttgggacttgga

SEQ ID NO: 90532 - DNA, 25 bp, Artificial
  probe
  misc_feature (1)..(25): SEQ ID NO: 7247; WAN024BQM_at; Start 453; Stop 477
taaaataggatatccttcccaagga

SEQ ID NO: 90533 - DNA, 25 bp, Artificial
  probe
  misc_feature (1)..(25): SEQ ID NO: 6607; WAN024BQN_at; Start 602; Stop 626
tattctactactctacagcagctat

SEQ ID NO: 90534 - DNA, 25 bp, Artificial
  probe
  misc_feature (1)..(25): SEQ ID NO: 6607; WAN024BQN_at; Start 106; Stop 130
cctctgttaagtgaattgataaaag

SEQ ID NO: 90535 - DNA, 25 bp, Artificial
  probe
  misc_feature (1)..(25): SEQ ID NO: 6607; WAN024BQN_at; Start 409; Stop 433
aactcagcaattagatcagatggga

SEQ ID NO: 90536 - DNA, 25 bp, Artificial
  probe
  misc_feature (1)..(25): SEQ ID NO: 6607; WAN024BQN_at; Start 82; Stop 106
gaaacggtttttgtaaatgcatatc

SEQ ID NO: 90537 - DNA, 25 bp, Artificial
  probe
  misc_feature (1)..(25): SEQ ID NO: 6607; WAN024BQN_at; Start 1034; Stop 1058
cactacattctacatttgatcctca

SEQ ID NO: 90538 - DNA, 25 bp, Artificial
  probe
  misc_feature (1)..(25): SEQ ID NO: 6607; WAN024BQN_at; Start 1077; Stop 1101
taatccagcgattttgtttttggga

SEQ ID NO: 90539 - DNA, 25 bp, Artificial
  probe
  misc_feature (1)..(25): SEQ ID NO: 6607; WAN024BQN_at; Start 897; Stop 921
tgtggactcttcatacctaaatatt

SEQ ID NO: 90540 - DNA, 25 bp, Artificial
  probe
  misc_feature (1)..(25): SEQ ID NO: 6607; WAN024BQN_at; Start 1064; Stop 1088
tagacatagtgtataatccagcgat

SEQ ID NO: 90541 - DNA, 25 bp, Artificial
  probe
  misc_feature (1)..(25): SEQ ID NO: 6607; WAN024BQN_at; Start 329; Stop 353
aagtttggcttatagagattatagc

SEQ ID NO: 90542 - DNA, 25 bp, Artificial
  probe
  misc_feature (1)..(25): SEQ ID NO: 6607; WAN024BQN_at; Start 589; Stop 613
gatacgagggcagtattctactact

SEQ ID NO: 90543 - DNA, 25 bp, Artificial
  probe
  misc_feature (1)..(25): SEQ ID NO: 6607; WAN024BQN_at; Start 575; Stop 599
tatatgctttaactgatacgagggc

SEQ ID NO: 90544 - DNA, 25 bp, Artificial
  probe
  misc_feature (1)..(25): SEQ ID NO: 6607; WAN024BQN_at; Start 352; Stop 376
gcattaatgatttttctagcaatat

SEQ ID NO: 90545 - DNA, 25 bp, Artificial
  probe
  misc_feature (1)..(25): SEQ ID NO: 6607; WAN024BQN_at; Start 398; Stop 422
gggaagttataaactcagcaattag

SEQ ID NO: 90546 - DNA, 25 bp, Artificial
  probe
  misc_feature (1)..(25): SEQ ID NO: 6607; WAN024BQN_at; Start 218; Stop 242
ttttaacgataggagtagtagtatc

SEQ ID NO: 90547 - DNA, 25 bp, Artificial
  probe
  misc_feature (1)..(25): SEQ ID NO: 6607; WAN024BQN_at; Start 229; Stop 253
ggagtagtagtatcttataattcag

SEQ ID NO: 90548 - DNA, 25 bp, Artificial
  probe
  misc_feature (1)..(25): SEQ ID NO: 6607; WAN024BQN_at; Start 727; Stop 751
tcatggagttatcggtatagactac

SEQ ID NO: 90549 - DNA, 25 bp, Artificial
  probe
  misc_feature (1)..(25): SEQ ID NO: 6607; WAN024BQN_at; Start 96; Stop 120
aaatgcatatcctctgttaagtgaa

SEQ ID NO: 90550 - DNA, 25 bp, Artificial
  probe
  misc_feature (1)..(25): SEQ ID NO: 6607; WAN024BQN_at; Start 273; Stop 297
gccagtagtagcactaatattaaat

SEQ ID NO: 90551 - DNA, 25 bp, Artificial
  probe
  misc_feature (1)..(25): SEQ ID NO: 6607; WAN024BQN_at; Start 176; Stop 200
tagaaccacatactaaaaagttcat

SEQ ID NO: 90552 - DNA, 25 bp, Artificial
  probe
  misc_feature (1)..(25): SEQ ID NO: 6607; WAN024BQN_at; Start 746; Stop 770
gactaccattttttgatcagttaga

SEQ ID NO: 90553 - DNA, 25 bp, Artificial
  probe
  misc_feature (1)..(25): SEQ ID NO: 6607; WAN024BQN_at; Start 1050; Stop 1074
tgatcctcaattaatagacatagtg

SEQ ID NO: 90554 - DNA, 25 bp, Artificial
  probe
  misc_feature (1)..(25): SEQ ID NO: 6607; WAN024BQN_at; Start 445; Stop 469
gctctagggtataaatattcaacat

SEQ ID NO: 90555 - DNA, 25 bp, Artificial
  probe
  misc_feature (1)..(25): SEQ ID NO: 6607; WAN024BQN_at; Start 431; Stop 455
ggaaaatacgatatgctctagggta

SEQ ID NO: 90556 - DNA, 25 bp, Artificial
  probe
  misc_feature (1)..(25): SEQ ID NO: 6607; WAN024BQN_at; Start 996; Stop 1020
tagagatacatattatacaatgatg

SEQ ID NO: 90557 - DNA, 25 bp, Artificial
  probe
  misc_feature (1)..(25): SEQ ID NO: 6607; WAN024BQN_at; Start 697; Stop 721
ttattttcagcaataatagctggag

SEQ ID NO: 90558 - DNA, 25 bp, Artificial
  probe
  misc_feature (1)..(25): SEQ ID NO: 6607; WAN024BQN_at; Start 264; Stop 288
tattttaatgccagtagtagcacta

SEQ ID NO: 90559 - DNA, 25 bp, Artificial
  probe
  misc_feature (1)..(25): SEQ ID NO: 6607; WAN024BQN_at; Start 300; Stop 324
gagtaatatagatataaccaaggtt

SEQ ID NO: 90560 - DNA, 25 bp, Artificial
  probe
  misc_feature (1)..(25): SEQ ID NO: 6607; WAN024BQN_at; Start 791; Stop 815
tacgacttggaagtgctgcttttaa

SEQ ID NO: 90561 - DNA, 25 bp, Artificial
  probe
  misc_feature (1)..(25): SEQ ID NO: 6607; WAN024BQN_at; Start 710; Stop 734
taatagctggagttttgtcatggag

SEQ ID NO: 90562 - DNA, 25 bp, Artificial
  probe
  misc_feature (1)..(25): SEQ ID NO: 6607; WAN024BQN_at; Start 424; Stop 448
tcagatgggaaaatacgatatgctc

SEQ ID NO: 90563 - DNA, 25 bp, Artificial
  probe
  misc_feature (1)..(25): SEQ ID NO: 6607; WAN024BQN_at; Start 1012; Stop 1036
acaatgatgattgtgttcttatcac

SEQ ID NO: 90564 - DNA, 25 bp, Artificial
  probe
  misc_feature (1)..(25): SEQ ID NO: 6607; WAN024BQN_at; Start 615; Stop 639
tacagcagctattgttatttgtttg

SEQ ID NO: 90565 - DNA, 25 bp, Artificial
  probe
  misc_feature (1)..(25): SEQ ID NO: 6607; WAN024BQN_at; Start 776; Stop 800
tattaacaggtagattacgacttgg

SEQ ID NO: 90566 - DNA, 25 bp, Artificial
  probe
  misc_feature (1)..(25): SEQ ID NO: 6607; WAN024BQN_at; Start 885; Stop 909
gatatataattatgtggactcttca

SEQ ID NO: 90567 - DNA, 25 bp, Artificial
  probe
  misc_feature (1)..(25): SEQ ID NO: 6690; WAN024BQO_at; Start 602; Stop 626
tgtatcagtatttcttgggtagacc

SEQ ID NO: 90568 - DNA, 25 bp, Artificial
  probe
  misc_feature (1)..(25): SEQ ID NO: 6690; WAN024BQO_at; Start 575; Stop 599
gcgattgggaatactggaatttaga

SEQ ID NO: 90569 - DNA, 25 bp, Artificial
  probe
  misc_feature (1)..(25): SEQ ID NO: 6690; WAN024BQO_at; Start 796; Stop 820
tcagatgatagagaacgattattaa

SEQ ID NO: 90570 - DNA, 25 bp, Artificial
  probe
  misc_feature (1)..(25): SEQ ID NO: 6690; WAN024BQO_at; Start 851; Stop 875
aaataaaatatacctacgactctcg

SEQ ID NO: 90571 - DNA, 25 bp, Artificial
  probe
  misc_feature (1)..(25): SEQ ID NO: 6690; WAN024BQO_at; Start 194; Stop 218
taataaacaagagtaatggtggaca

SEQ ID NO: 90572 - DNA, 25 bp, Artificial
  probe
  misc_feature (1)..(25): SEQ ID NO: 6690; WAN024BQO_at; Start 208; Stop 232
aatggtggacatggttcagcagtaa

SEQ ID NO: 90573 - DNA, 25 bp, Artificial
  probe
  misc_feature (1)..(25): SEQ ID NO: 6690; WAN024BQO_at; Start 461; Stop 485
caatgcatagtgttacatacaaaac

SEQ ID NO: 90574 - DNA, 25 bp, Artificial
  probe
  misc_feature (1)..(25): SEQ ID NO: 6690; WAN024BQO_at; Start 72; Stop 96
caatgtagaggatgagttgaagagt

SEQ ID NO: 90575 - DNA, 25 bp, Artificial
  probe
  misc_feature (1)..(25): SEQ ID NO: 6690; WAN024BQO_at; Start 544; Stop 568
cagtatatagtatttcctctgaaat

SEQ ID NO: 90576 - DNA, 25 bp, Artificial
  probe
  misc_feature (1)..(25): SEQ ID NO: 6690; WAN024BQO_at; Start 811; Stop 835
cgattattaaaggaaactacagatt

SEQ ID NO: 90577 - DNA, 25 bp, Artificial
  probe
  misc_feature (1)..(25): SEQ ID NO: 6690; WAN024BQO_at; Start 663; Stop 687
tattgagcatagtagaaaagttaca

SEQ ID NO: 90578 - DNA, 25 bp, Artificial
  probe
  misc_feature (1)..(25): SEQ ID NO: 6690; WAN024BQO_at; Start 338; Stop 362
ccaatgtagatatggttgtgacgaa

SEQ ID NO: 90579 - DNA, 25 bp, Artificial
  probe
  misc_feature (1)..(25): SEQ ID NO: 6690; WAN024BQO_at; Start 448; Stop 472
cccaaaatttttccaatgcatagtg

SEQ ID NO: 90580 - DNA, 25 bp, Artificial
  probe
  misc_feature (1)..(25): SEQ ID NO: 6690; WAN024BQO_at; Start 124; Stop 148
ggaagcacagataagactcttcaag

SEQ ID NO: 90581 - DNA, 25 bp, Artificial
  probe
  misc_feature (1)..(25): SEQ ID NO: 6690; WAN024BQO_at; Start 223; Stop 247
tcagcagtaaatagagggatagagg

SEQ ID NO: 90582 - DNA, 25 bp, Artificial
  probe
  misc_feature (1)..(25): SEQ ID NO: 6690; WAN024BQO_at; Start 865; Stop 889
tacgactctcgtatgaagacaagct

SEQ ID NO: 90583 - DNA, 25 bp, Artificial
  probe
  misc_feature (1)..(25): SEQ ID NO: 6690; WAN024BQO_at; Start 59; Stop 83
tagagtcttttctcaatgtagagga

SEQ ID NO: 90584 - DNA, 25 bp, Artificial
  probe
  misc_feature (1)..(25): SEQ ID NO: 6690; WAN024BQO_at; Start 617; Stop 641
tgggtagacctgatcaaagtatgac

SEQ ID NO: 90585 - DNA, 25 bp, Artificial
  probe
  misc_feature (1)..(25): SEQ ID NO: 6690; WAN024BQO_at; Start 755; Stop 779
tgaaaggtttacttaacacgagata

SEQ ID NO: 90586 - DNA, 25 bp, Artificial
  probe
  misc_feature (1)..(25): SEQ ID NO: 6690; WAN024BQO_at; Start 695; Stop 719
tattggaattttatagcacgttggg

SEQ ID NO: 90587 - DNA, 25 bp, Artificial
  probe
  misc_feature (1)..(25): SEQ ID NO: 6690; WAN024BQO_at; Start 738; Stop 762
tatagtgaattctcttttgaaaggt

SEQ ID NO: 90588 - DNA, 25 bp, Artificial
  probe
  misc_feature (1)..(25): SEQ ID NO: 6690; WAN024BQO_at; Start 710; Stop 734
gcacgttgggagatgtatattttaa

SEQ ID NO: 90589 - DNA, 25 bp, Artificial
  probe
  misc_feature (1)..(25): SEQ ID NO: 6690; WAN024BQO_at; Start 272; Stop 296
tagtagatggagatgattgggtaaa

SEQ ID NO: 90590 - DNA, 25 bp, Artificial
  probe
  misc_feature (1)..(25): SEQ ID NO: 6690; WAN024BQO_at; Start 768; Stop 792
taacacgagatatttattggcattc

SEQ ID NO: 90591 - DNA, 25 bp, Artificial
  probe
  misc_feature (1)..(25): SEQ ID NO: 6690; WAN024BQO_at; Start 356; Stop 380
tgacgaattttagtaagcagtatac

SEQ ID NO: 90592 - DNA, 25 bp, Artificial
  probe
  misc_feature (1)..(25): SEQ ID NO: 6690; WAN024BQO_at; Start 110; Stop 134
tgattattaatgatggaagcacaga

SEQ ID NO: 90593 - DNA, 25 bp, Artificial
  probe
  misc_feature (1)..(25): SEQ ID NO: 6690; WAN024BQO_at; Start 373; Stop 397
cagtatacttatgaaaatagagtgg

SEQ ID NO: 90594 - DNA, 25 bp, Artificial
  probe
  misc_feature (1)..(25): SEQ ID NO: 6690; WAN024BQO_at; Start 138; Stop 162
gactcttcaagtagtaacagaatta

SEQ ID NO: 90595 - DNA, 25 bp, Artificial
  probe
  misc_feature (1)..(25): SEQ ID NO: 6690; WAN024BQO_at; Start 3; Stop 27
gattttaagtattgttgttccaaca

SEQ ID NO: 90596 - DNA, 25 bp, Artificial
  probe
  misc_feature (1)..(25): SEQ ID NO: 6690; WAN024BQO_at; Start 390; Stop 414
tagagtggaattagaaaaggtaatc

SEQ ID NO: 90597 - DNA, 25 bp, Artificial
  probe
  misc_feature (1)..(25): SEQ ID NO: 6690; WAN024BQO_at; Start 559; Stop 583
cctctgaaatatattagcgattggg

SEQ ID NO: 90598 - DNA, 25 bp, Artificial
  probe
  misc_feature (1)..(25): SEQ ID NO: 6690; WAN024BQO_at; Start 240; Stop 264
gatagaggaagctaaaggaaagtat

SEQ ID NO: 90599 - DNA, 25 bp, Artificial
  probe
  misc_feature (1)..(25): SEQ ID NO: 6690; WAN024BQO_at; Start 43; Stop 67
tatatagagaggaatatagagtctt

SEQ ID NO: 90600 - DNA, 25 bp, Artificial
  probe
  misc_feature (1)..(25): SEQ ID NO: 6690; WAN024BQO_at; Start 782; Stop 806
tattggcattcttatcagatgatag

SEQ ID NO: 90601 - DNA, 25 bp, Artificial
  probe
  misc_feature (1)..(25): SEQ ID NO: 7228; WAN024BQP_at; Start 465; Stop 489
tggaaaaacagaaaatcatactccg

SEQ ID NO: 90602 - DNA, 25 bp, Artificial
  probe
  misc_feature (1)..(25): SEQ ID NO: 7228; WAN024BQP_at; Start 606; Stop 630
tataaaaattgttcgtccaggtcat

SEQ ID NO: 90603 - DNA, 25 bp, Artificial
  probe
  misc_feature (1)..(25): SEQ ID NO: 7228; WAN024BQP_at; Start 839; Stop 863
ttatttcaataagagagatggcctc

SEQ ID NO: 90604 - DNA, 25 bp, Artificial
  probe
  misc_feature (1)..(25): SEQ ID NO: 7228; WAN024BQP_at; Start 871; Stop 895
gctgaagtagctggagtagaattac

SEQ ID NO: 90605 - DNA, 25 bp, Artificial
  probe
  misc_feature (1)..(25): SEQ ID NO: 7228; WAN024BQP_at; Start 634; Stop 658
tatggtcctagcttaaaaataacag

SEQ ID NO: 90606 - DNA, 25 bp, Artificial
  probe
  misc_feature (1)..(25): SEQ ID NO: 7228; WAN024BQP_at; Start 50; Stop 74
taaaaaatatagttggcgttgagac

SEQ ID NO: 90607 - DNA, 25 bp, Artificial
  probe
  misc_feature (1)..(25): SEQ ID NO: 7228; WAN024BQP_at; Start 449; Stop 473
cgtccagtgaagtatatggaaaaac

SEQ ID NO: 90608 - DNA, 25 bp, Artificial
  probe
  misc_feature (1)..(25): SEQ ID NO: 7228; WAN024BQP_at; Start 524; Stop 548
tagatgttagagcttcctattcaag

SEQ ID NO: 90609 - DNA, 25 bp, Artificial
  probe
  misc_feature (1)..(25): SEQ ID NO: 7228; WAN024BQP_at; Start 331; Stop 355
gccagtccagatttatacattagta

SEQ ID NO: 90610 - DNA, 25 bp, Artificial
  probe
  misc_feature (1)..(25): SEQ ID NO: 7228; WAN024BQP_at; Start 853; Stop 877
gagatggcctctataatagctgaag

SEQ ID NO: 90611 - DNA, 25 bp, Artificial
  probe
  misc_feature (1)..(25): SEQ ID NO: 7228; WAN024BQP_at; Start 353; Stop 377
gtaatcctgtagatacaatgcttag

SEQ ID NO: 90612 - DNA, 25 bp, Artificial
  probe
  misc_feature (1)..(25): SEQ ID NO: 7228; WAN024BQP_at; Start 989; Stop 1013
taggtatgtttgaagctaaggaagg

SEQ ID NO: 90613 - DNA, 25 bp, Artificial
  probe
  misc_feature (1)..(25): SEQ ID NO: 7228; WAN024BQP_at; Start 311; Stop 335
taattcacggagctagtaatgccag

SEQ ID NO: 90614 - DNA, 25 bp, Artificial
  probe
  misc_feature (1)..(25): SEQ ID NO: 7228; WAN024BQP_at; Start 550; Stop 574
tcaaagcgagcaacagagacattgt

SEQ ID NO: 90615 - DNA, 25 bp, Artificial
  probe
  misc_feature (1)..(25): SEQ ID NO: 7228; WAN024BQP_at; Start 965; Stop 989
caaaattggaagagttaggatgggt

SEQ ID NO: 90616 - DNA, 25 bp, Artificial
  probe
  misc_feature (1)..(25): SEQ ID NO: 7228; WAN024BQP_at; Start 751; Stop 775
catagtttggactgtgcaagtgcaa

SEQ ID NO: 90617 - DNA, 25 bp, Artificial
  probe
  misc_feature (1)..(25): SEQ ID NO: 7228; WAN024BQP_at; Start 763; Stop 787
tgtgcaagtgcaattttgacagttc

SEQ ID NO: 90618 - DNA, 25 bp, Artificial
  probe
  misc_feature (1)..(25): SEQ ID NO: 7228; WAN024BQP_at; Start 784; Stop 808
gttcttttgaaaggtcagtctggcg

SEQ ID NO: 90619 - DNA, 25 bp, Artificial
  probe
  misc_feature (1)..(25): SEQ ID NO: 7228; WAN024BQP_at; Start 188; Stop 212
cttgtgcaaggagtgaagaaggact

SEQ ID NO: 90620 - DNA, 25 bp, Artificial
  probe
  misc_feature (1)..(25): SEQ ID NO: 7228; WAN024BQP_at; Start 676; Stop 700
gcttttatgtatgatgcaatcaggg

SEQ ID NO: 90621 - DNA, 25 bp, Artificial
  probe
  misc_feature (1)..(25): SEQ ID NO: 7228; WAN024BQP_at; Start 621; Stop 645
tccaggtcatatttatggtcctagc

SEQ ID NO: 90622 - DNA, 25 bp, Artificial
  probe
  misc_feature (1)..(25): SEQ ID NO: 7228; WAN024BQP_at; Start 481; Stop 505
catactccgtatcaagaagatgagt

SEQ ID NO: 90623 - DNA, 25 bp, Artificial
  probe
  misc_feature (1)..(25): SEQ ID NO: 7228; WAN024BQP_at; Start 88; Stop 112
tcaattcttattacgggatcgacag

SEQ ID NO: 90624 - DNA, 25 bp, Artificial
  probe
  misc_feature (1)..(25): SEQ ID NO: 7228; WAN024BQP_at; Start 496; Stop 520
gaagatgagtatgggtatgtaaaca

SEQ ID NO: 90625 - DNA, 25 bp, Artificial
  probe
  misc_feature (1)..(25): SEQ ID NO: 7228; WAN024BQP_at; Start 538; Stop 562
tcctattcaagttcaaagcgagcaa

SEQ ID NO: 90626 - DNA, 25 bp, Artificial
  probe
  misc_feature (1)..(25): SEQ ID NO: 7228; WAN024BQP_at; Start 723; Stop 747
taaaggagaacaactacgatcatat

SEQ ID NO: 90627 - DNA, 25 bp, Artificial
  probe
  misc_feature (1)..(25): SEQ ID NO: 7228; WAN024BQP_at; Start 434; Stop 458
ctatagtttatgtttcgtccagtga

SEQ ID NO: 90628 - DNA, 25 bp, Artificial
  probe
  misc_feature (1)..(25): SEQ ID NO: 7228; WAN024BQP_at; Start 104; Stop 128
gatcgacaggtcttatttgttcgac

SEQ ID NO: 90629 - DNA, 25 bp, Artificial
  probe
  misc_feature (1)..(25): SEQ ID NO: 7228; WAN024BQP_at; Start 949; Stop 973
tctagcttagatagtacaaaattgg

SEQ ID NO: 90630 - DNA, 25 bp, Artificial
  probe
  misc_feature (1)..(25): SEQ ID NO: 7228; WAN024BQP_at; Start 583; Stop 607
tattctgaacaatatgacgtatcta

SEQ ID NO: 90631 - DNA, 25 bp, Artificial
  probe
  misc_feature (1)..(25): SEQ ID NO: 7228; WAN024BQP_at; Start 1003; Stop 1027
gctaaggaaggattagaaagtacat

SEQ ID NO: 90632 - DNA, 25 bp, Artificial
  probe
  misc_feature (1)..(25): SEQ ID NO: 7228; WAN024BQP_at; Start 799; Stop 823
cagtctggcgatgcatacaatattt

SEQ ID NO: 90633 - DNA, 25 bp, Artificial
  probe
  misc_feature (1)..(25): SEQ ID NO: 7228; WAN024BQP_at; Start 171; Stop 195
cggagttaaaatttatgcttgtgca

SEQ ID NO: 90634 - DNA, 25 bp, Artificial
  probe
  misc_feature (1)..(25): SEQ ID NO: 7228; WAN024BQP_at; Start 65; Stop 89
gcgttgagactttaaaggataaatc

SEQ ID NO: 90635 - DNA, 25 bp, Artificial
  probe
  misc_feature (1)..(25): SEQ ID NO: 7436; WAN024BQQ_at; Start 195; Stop 219
caaaaaagaaaaatactacactgat

SEQ ID NO: 90636 - DNA, 25 bp, Artificial
  probe
  misc_feature (1)..(25): SEQ ID NO: 7436; WAN024BQQ_at; Start 230; Stop 254
caagcgagatgtttaaagaactagc

SEQ ID NO: 90637 - DNA, 25 bp, Artificial
  probe
  misc_feature (1)..(25): SEQ ID NO: 7436; WAN024BQQ_at; Start 265; Stop 289
cattcttgtgatatcggagttgtta

SEQ ID NO: 90638 - DNA, 25 bp, Artificial
  probe
  misc_feature (1)..(25): SEQ ID NO: 7436; WAN024BQQ_at; Start 213; Stop 237
cactgatgtaattgttacaagcgag

SEQ ID NO: 90639 - DNA, 25 bp, Artificial
  probe
  misc_feature (1)..(25): SEQ ID NO: 7436; WAN024BQQ_at; Start 295; Stop 319
tgtggtcaaagtagaacagatgttt

SEQ ID NO: 90640 - DNA, 25 bp, Artificial
  probe
  misc_feature (1)..(25): SEQ ID NO: 7436; WAN024BQQ_at; Start 677; Stop 701
aaccaatagctttttgtataagaga

SEQ ID NO: 90641 - DNA, 25 bp, Artificial
  probe
  misc_feature (1)..(25): SEQ ID NO: 7436; WAN024BQQ_at; Start 278; Stop 302
tcggagttgttaaaatctgtggtca

SEQ ID NO: 90642 - DNA, 25 bp, Artificial
  probe
  misc_feature (1)..(25): SEQ ID NO: 7436; WAN024BQQ_at; Start 741; Stop 765
gaatccgatggactacctaaaggga

SEQ ID NO: 90643 - DNA, 25 bp, Artificial
  probe
  misc_feature (1)..(25): SEQ ID NO: 7436; WAN024BQQ_at; Start 525; Stop 549
tcctgctaatatgcctaactatagt

SEQ ID NO: 90644 - DNA, 25 bp, Artificial
  probe
  misc_feature (1)..(25): SEQ ID NO: 7436; WAN024BQQ_at; Start 339; Stop 363
agttacttccaaatacattgtctgg

SEQ ID NO: 90645 - DNA, 25 bp, Artificial
  probe
  misc_feature (1)..(25): SEQ ID NO: 7436; WAN024BQQ_at; Start 407; Stop 431
ccaattcggaagaaattttgatagg

SEQ ID NO: 90646 - DNA, 25 bp, Artificial
  probe
  misc_feature (1)..(25): SEQ ID NO: 7436; WAN024BQQ_at; Start 729; Stop 753
atttatagtagagaatccgatggac

SEQ ID NO: 90647 - DNA, 25 bp, Artificial
  probe
  misc_feature (1)..(25): SEQ ID NO: 7436; WAN024BQQ_at; Start 111; Stop 135
tattatcccttctaatcaacgcgta

SEQ ID NO: 90648 - DNA, 25 bp, Artificial
  probe
  misc_feature (1)..(25): SEQ ID NO: 7436; WAN024BQQ_at; Start 490; Stop 514
aatatgatagtgaagcttcatccgc

SEQ ID NO: 90649 - DNA, 25 bp, Artificial
  probe
  misc_feature (1)..(25): SEQ ID NO: 7436; WAN024BQQ_at; Start 704; Stop 728
ttgaggattacaataaaaatagagg

SEQ ID NO: 90650 - DNA, 25 bp, Artificial
  probe
  misc_feature (1)..(25): SEQ ID NO: 7436; WAN024BQQ_at; Start 603; Stop 627
tgaattgttaagagacagtatagca

SEQ ID NO: 90651 - DNA, 25 bp, Artificial
  probe
  misc_feature (1)..(25): SEQ ID NO: 7436; WAN024BQQ_at; Start 510; Stop 534
tccgcttcaaacacttcctgctaat

SEQ ID NO: 90652 - DNA, 25 bp, Artificial
  probe
  misc_feature (1)..(25): SEQ ID NO: 7436; WAN024BQQ_at; Start 33; Stop 57
atattttataaacggcattaatggg

SEQ ID NO: 90653 - DNA, 25 bp, Artificial
  probe
  misc_feature (1)..(25): SEQ ID NO: 7436; WAN024BQQ_at; Start 139; Stop 163
caattgtggcatggtatgttcttta

SEQ ID NO: 90654 - DNA, 25 bp, Artificial
  probe
  misc_feature (1)..(25): SEQ ID NO: 7436; WAN024BQQ_at; Start 614; Stop 638
gagacagtatagcattaataacaga

SEQ ID NO: 90655 - DNA, 25 bp, Artificial
  probe
  misc_feature (1)..(25): SEQ ID NO: 7436; WAN024BQQ_at; Start 354; Stop 378
cattgtctggttgccaacatttagg

SEQ ID NO: 90656 - DNA, 25 bp, Artificial
  probe
  misc_feature (1)..(25): SEQ ID NO: 7436; WAN024BQQ_at; Start 251; Stop 275
tagctactaaagttcattcttgtga

SEQ ID NO: 90657 - DNA, 25 bp, Artificial
  probe
  misc_feature (1)..(25): SEQ ID NO: 7436; WAN024BQQ_at; Start 548; Stop 572
gtaatattcagatactgtcagaaga

SEQ ID NO: 90658 - DNA, 25 bp, Artificial
  probe
  misc_feature (1)..(25): SEQ ID NO: 7436; WAN024BQQ_at; Start 562; Stop 586
ctgtcagaagaaaagagtaggaaaa

SEQ ID NO: 90659 - DNA, 25 bp, Artificial
  probe
  misc_feature (1)..(25): SEQ ID NO: 7436; WAN024BQQ_at; Start 126; Stop 150
tcaacgcgtagtacaattgtggcat

SEQ ID NO: 90660 - DNA, 25 bp, Artificial
  probe
  misc_feature (1)..(25): SEQ ID NO: 7436; WAN024BQQ_at; Start 803; Stop 827
taaatgaaattacacataatgtgga

SEQ ID NO: 90661 - DNA, 25 bp, Artificial
  probe
  misc_feature (1)..(25): SEQ ID NO: 7436; WAN024BQQ_at; Start 367; Stop 391
ccaacatttaggcaatctgagaaat

SEQ ID NO: 90662 - DNA, 25 bp, Artificial
  probe
  misc_feature (1)..(25): SEQ ID NO: 7436; WAN024BQQ_at; Start 880; Stop 904
gatgggaataatagtaaaagattgc

SEQ ID NO: 90663 - DNA, 25 bp, Artificial
  probe
  misc_feature (1)..(25): SEQ ID NO: 7436; WAN024BQQ_at; Start 757; Stop 781
ctaaagggaaataaaatcaaatcat

SEQ ID NO: 90664 - DNA, 25 bp, Artificial
  probe
  misc_feature (1)..(25): SEQ ID NO: 7436; WAN024BQQ_at; Start 894; Stop 918
taaaagattgctagaaaaaattgga

SEQ ID NO: 90665 - DNA, 25 bp, Artificial
  probe
  misc_feature (1)..(25): SEQ ID NO: 7436; WAN024BQQ_at; Start 383; Stop 407
ctgagaaattaggatatagtgatac

SEQ ID NO: 90666 - DNA, 25 bp, Artificial
  probe
  misc_feature (1)..(25): SEQ ID NO: 7436; WAN024BQQ_at; Start 635; Stop 659
cagattattcttcagttttttacga

SEQ ID NO: 90667 - DNA, 25 bp, Artificial
  probe
  misc_feature (1)..(25): SEQ ID NO: 7436; WAN024BQQ_at; Start 426; Stop 450
gataggagattattcgtttgaagaa

SEQ ID NO: 90668 - DNA, 25 bp, Artificial
  probe
  misc_feature (1)..(25): SEQ ID NO: 7436; WAN024BQQ_at; Start 395; Stop 419
gatatagtgataccaattcggaaga

SEQ ID NO: 90669 - DNA, 25 bp, Artificial
  probe
  misc_feature (1)..(25): SEQ ID NO: 6962; WAN024BQR_at; Start 62; Stop 86
acttccacttgcctaaccaaagtgg

SEQ ID NO: 90670 - DNA, 25 bp, Artificial
  probe
  misc_feature (1)..(25): SEQ ID NO: 6962; WAN024BQR_at; Start 2; Stop 26
tgtcaacagaattttcagaattttt

SEQ ID NO: 90671 - DNA, 25 bp, Artificial
  probe
  misc_feature (1)..(25): SEQ ID NO: 6962; WAN024BQR_at; Start 61; Stop 85
aacttccacttgcctaaccaaagtg

SEQ ID NO: 90672 - DNA, 25 bp, Artificial
  probe
  misc_feature (1)..(25): SEQ ID NO: 6962; WAN024BQR_at; Start 4; Stop 28
tcaacagaattttcagaatttttga

SEQ ID NO: 90673 - DNA, 25 bp, Artificial
  probe
  misc_feature (1)..(25): SEQ ID NO: 6962; WAN024BQR_at; Start 3; Stop 27
gtcaacagaattttcagaatttttg

SEQ ID NO: 90674 - DNA, 25 bp, Artificial
  probe
  misc_feature (1)..(25): SEQ ID NO: 6962; WAN024BQR_at; Start 64; Stop 88
ttccacttgcctaaccaaagtggaa

SEQ ID NO: 90675 - DNA, 25 bp, Artificial
  probe
  misc_feature (1)..(25): SEQ ID NO: 6962; WAN024BQR_at; Start 63; Stop 87
cttccacttgcctaaccaaagtgga

SEQ ID NO: 90676 - DNA, 25 bp, Artificial
  probe
  misc_feature (1)..(25): SEQ ID NO: 6962; WAN024BQR_at; Start 66; Stop 90
ccacttgcctaaccaaagtggaaat

SEQ ID NO: 90677 - DNA, 25 bp, Artificial
  probe
  misc_feature (1)..(25): SEQ ID NO: 6962; WAN024BQR_at; Start 54; Stop 78
tcaaagtaacttccacttgcctaac

SEQ ID NO: 90678 - DNA, 25 bp, Artificial
  probe
  misc_feature (1)..(25): SEQ ID NO: 6962; WAN024BQR_at; Start 65; Stop 89
tccacttgcctaaccaaagtggaaa

SEQ ID NO: 90679 - DNA, 25 bp, Artificial
  probe
  misc_feature (1)..(25): SEQ ID NO: 6962; WAN024BQR_at; Start 1; Stop 25
atgtcaacagaattttcagaatttt

SEQ ID NO: 90680 - DNA, 25 bp, Artificial
  probe
  misc_feature (1)..(25): SEQ ID NO: 7686; WAN024BQS_at; Start 16; Stop 40
tataggactagctttgctttgggaa

SEQ ID NO: 90681 - DNA, 25 bp, Artificial
  probe
  misc_feature (1)..(25): SEQ ID NO: 7686; WAN024BQS_at; Start 22; Stop 46
actagctttgctttgggaataaatt

SEQ ID NO: 90682 - DNA, 25 bp, Artificial
  probe
  misc_feature (1)..(25): SEQ ID NO: 7686; WAN024BQS_at; Start 7; Stop 31
aacttaaattataggactagctttg

SEQ ID NO: 90683 - DNA, 25 bp, Artificial
  probe
  misc_feature (1)..(25): SEQ ID NO: 7686; WAN024BQS_at; Start 4; Stop 28
tctaacttaaattataggactagct

SEQ ID NO: 90684 - DNA, 25 bp, Artificial
  probe
  misc_feature (1)..(25): SEQ ID NO: 7686; WAN024BQS_at; Start 13; Stop 37
aattataggactagctttgctttgg

SEQ ID NO: 90685 - DNA, 25 bp, Artificial
  probe
  misc_feature (1)..(25): SEQ ID NO: 7686; WAN024BQS_at; Start 11; Stop 35
taaattataggactagctttgcttt

SEQ ID NO: 90686 - DNA, 25 bp, Artificial
  probe
  misc_feature (1)..(25): SEQ ID NO: 7686; WAN024BQS_at; Start 2; Stop 26
tgtctaacttaaattataggactag

SEQ ID NO: 90687 - DNA, 25 bp, Artificial
  probe
  misc_feature (1)..(25): SEQ ID NO: 7686; WAN024BQS_at; Start 3; Stop 27
gtctaacttaaattataggactagc

SEQ ID NO: 90688 - DNA, 25 bp, Artificial
  probe
  misc_feature (1)..(25): SEQ ID NO: 7686; WAN024BQS_at; Start 9; Stop 33
cttaaattataggactagctttgct

SEQ ID NO: 90689 - DNA, 25 bp, Artificial
  probe
  misc_feature (1)..(25): SEQ ID NO: 7686; WAN024BQS_at; Start 10; Stop 34
ttaaattataggactagctttgctt

SEQ ID NO: 90690 - DNA, 25 bp, Artificial
  probe
  misc_feature (1)..(25): SEQ ID NO: 7686; WAN024BQS_at; Start 19; Stop 43
aggactagctttgctttgggaataa

SEQ ID NO: 90691 - DNA, 25 bp, Artificial
  probe
  misc_feature (1)..(25): SEQ ID NO: 7686; WAN024BQS_at; Start 12; Stop 36
aaattataggactagctttgctttg

SEQ ID NO: 90692 - DNA, 25 bp, Artificial
  probe
  misc_feature (1)..(25): SEQ ID NO: 7686; WAN024BQS_at; Start 17; Stop 41
ataggactagctttgctttgggaat

SEQ ID NO: 90693 - DNA, 25 bp, Artificial
  probe
  misc_feature (1)..(25): SEQ ID NO: 7686; WAN024BQS_at; Start 23; Stop 47
ctagctttgctttgggaataaattt

SEQ ID NO: 90694 - DNA, 25 bp, Artificial
  probe
  misc_feature (1)..(25): SEQ ID NO: 7686; WAN024BQS_at; Start 20; Stop 44
ggactagctttgctttgggaataaa

SEQ ID NO: 90695 - DNA, 25 bp, Artificial
  probe
  misc_feature (1)..(25): SEQ ID NO: 7686; WAN024BQS_at; Start 14; Stop 38
attataggactagctttgctttggg

SEQ ID NO: 90696 - DNA, 25 bp, Artificial
  probe
  misc_feature (1)..(25): SEQ ID NO: 7686; WAN024BQS_at; Start 8; Stop 32
acttaaattataggactagctttgc

SEQ ID NO: 90697 - DNA, 25 bp, Artificial
  probe
  misc_feature (1)..(25): SEQ ID NO: 7686; WAN024BQS_at; Start 5; Stop 29
ctaacttaaattataggactagctt

SEQ ID NO: 90698 - DNA, 25 bp, Artificial
  probe
  misc_feature (1)..(25): SEQ ID NO: 7686; WAN024BQS_at; Start 21; Stop 45
gactagctttgctttgggaataaat

SEQ ID NO: 90699 - DNA, 25 bp, Artificial
  probe
  misc_feature (1)..(25): SEQ ID NO: 7686; WAN024BQS_at; Start 15; Stop 39
ttataggactagctttgctttggga

SEQ ID NO: 90700 - DNA, 25 bp, Artificial
  probe
  misc_feature (1)..(25): SEQ ID NO: 7686; WAN024BQS_at; Start 18; Stop 42
taggactagctttgctttgggaata

SEQ ID NO: 90701 - DNA, 25 bp, Artificial
  probe
  misc_feature (1)..(25): SEQ ID NO: 7686; WAN024BQS_at; Start 1; Stop 25
ttgtctaacttaaattataggacta

SEQ ID NO: 90702 - DNA, 25 bp, Artificial
  probe
  misc_feature (1)..(25): SEQ ID NO: 6894; WAN024BQT_at; Start 45; Stop 69
gattgaacgagcgctcgaagttata

SEQ ID NO: 90703 - DNA, 25 bp, Artificial
  probe
  misc_feature (1)..(25): SEQ ID NO: 6894; WAN024BQT_at; Start 48; Stop 72
tgaacgagcgctcgaagttatagaa

SEQ ID NO: 90704 - DNA, 25 bp, Artificial
  probe
  misc_feature (1)..(25): SEQ ID NO: 6894; WAN024BQT_at; Start 44; Stop 68
tgattgaacgagcgctcgaagttat

SEQ ID NO: 90705 - DNA, 25 bp, Artificial
  probe
  misc_feature (1)..(25): SEQ ID NO: 6894; WAN024BQT_at; Start 55; Stop 79
gcgctcgaagttatagaaaaagagt

SEQ ID NO: 90706 - DNA, 25 bp, Artificial
  probe
  misc_feature (1)..(25): SEQ ID NO: 6894; WAN024BQT_at; Start 50; Stop 74
aacgagcgctcgaagttatagaaaa

SEQ ID NO: 90707 - DNA, 25 bp, Artificial
  probe
  misc_feature (1)..(25): SEQ ID NO: 6894; WAN024BQT_at; Start 67; Stop 91
atagaaaaagagtttgaaaatgaca

SEQ ID NO: 90708 - DNA, 25 bp, Artificial
  probe
  misc_feature (1)..(25): SEQ ID NO: 6894; WAN024BQT_at; Start 42; Stop 66
tgtgattgaacgagcgctcgaagtt

SEQ ID NO: 90709 - DNA, 25 bp, Artificial
  probe
  misc_feature (1)..(25): SEQ ID NO: 6894; WAN024BQT_at; Start 51; Stop 75
acgagcgctcgaagttatagaaaaa

SEQ ID NO: 90710 - DNA, 25 bp, Artificial
  probe
  misc_feature (1)..(25): SEQ ID NO: 6894; WAN024BQT_at; Start 40; Stop 64
gttgtgattgaacgagcgctcgaag

SEQ ID NO: 90711 - DNA, 25 bp, Artificial
  probe
  misc_feature (1)..(25): SEQ ID NO: 6894; WAN024BQT_at; Start 56; Stop 80
cgctcgaagttatagaaaaagagtt

SEQ ID NO: 90712 - DNA, 25 bp, Artificial
  probe
  misc_feature (1)..(25): SEQ ID NO: 6894; WAN024BQT_at; Start 46; Stop 70
attgaacgagcgctcgaagttatag

SEQ ID NO: 90713 - DNA, 25 bp, Artificial
  probe
  misc_feature (1)..(25): SEQ ID NO: 6894; WAN024BQT_at; Start 53; Stop 77
gagcgctcgaagttatagaaaaaga

SEQ ID NO: 90714 - DNA, 25 bp, Artificial
  probe
  misc_feature (1)..(25): SEQ ID NO: 6894; WAN024BQT_at; Start 58; Stop 82
ctcgaagttatagaaaaagagtttg

SEQ ID NO: 90715 - DNA, 25 bp, Artificial
  probe
  misc_feature (1)..(25): SEQ ID NO: 6894; WAN024BQT_at; Start 38; Stop 62
atgttgtgattgaacgagcgctcga

SEQ ID NO: 90716 - DNA, 25 bp, Artificial
  probe
  misc_feature (1)..(25): SEQ ID NO: 6894; WAN024BQT_at; Start 43; Stop 67
gtgattgaacgagcgctcgaagtta

SEQ ID NO: 90717 - DNA, 25 bp, Artificial
  probe
  misc_feature (1)..(25): SEQ ID NO: 6894; WAN024BQT_at; Start 59; Stop 83
tcgaagttatagaaaaagagtttga

SEQ ID NO: 90718 - DNA, 25 bp, Artificial
  probe
  misc_feature (1)..(25): SEQ ID NO: 6894; WAN024BQT_at; Start 36; Stop 60
gcatgttgtgattgaacgagcgctc

SEQ ID NO: 90719 - DNA, 25 bp, Artificial
  probe
  misc_feature (1)..(25): SEQ ID NO: 6894; WAN024BQT_at; Start 66; Stop 90
tatagaaaaagagtttgaaaatgac

SEQ ID NO: 90720 - DNA, 25 bp, Artificial
  probe
  misc_feature (1)..(25): SEQ ID NO: 6894; WAN024BQT_at; Start 65; Stop 89
ttatagaaaaagagtttgaaaatga

SEQ ID NO: 90721 - DNA, 25 bp, Artificial
  probe
  misc_feature (1)..(25): SEQ ID NO: 6894; WAN024BQT_at; Start 37; Stop 61
catgttgtgattgaacgagcgctcg

SEQ ID NO: 90722 - DNA, 25 bp, Artificial
  probe
  misc_feature (1)..(25): SEQ ID NO: 6894; WAN024BQT_at; Start 41; Stop 65
ttgtgattgaacgagcgctcgaagt

SEQ ID NO: 90723 - DNA, 25 bp, Artificial
  probe
  misc_feature (1)..(25): SEQ ID NO: 6894; WAN024BQT_at; Start 39; Stop 63
tgttgtgattgaacgagcgctcgaa

SEQ ID NO: 90724 - DNA, 25 bp, Artificial
  probe
  misc_feature (1)..(25): SEQ ID NO: 6894; WAN024BQT_at; Start 49; Stop 73
gaacgagcgctcgaagttatagaaa

SEQ ID NO: 90725 - DNA, 25 bp, Artificial
  probe
  misc_feature (1)..(25): SEQ ID NO: 6894; WAN024BQT_at; Start 47; Stop 71
ttgaacgagcgctcgaagttataga

SEQ ID NO: 90726 - DNA, 25 bp, Artificial
  probe
  misc_feature (1)..(25): SEQ ID NO: 6894; WAN024BQT_at; Start 68; Stop 92
tagaaaaagagtttgaaaatgacaa

SEQ ID NO: 90727 - DNA, 25 bp, Artificial
  probe
  misc_feature (1)..(25): SEQ ID NO: 6894; WAN024BQT_at; Start 52; Stop 76
cgagcgctcgaagttatagaaaaag

SEQ ID NO: 90728 - DNA, 25 bp, Artificial
  probe
  misc_feature (1)..(25): SEQ ID NO: 6894; WAN024BQT_at; Start 54; Stop 78
agcgctcgaagttatagaaaaagag

SEQ ID NO: 90729 - DNA, 25 bp, Artificial
  probe
  misc_feature (1)..(25): SEQ ID NO: 7325; WAN024BQU_at; Start 7; Stop 31
tattctagagggctatttttgtatt

SEQ ID NO: 90730 - DNA, 25 bp, Artificial
  probe
  misc_feature (1)..(25): SEQ ID NO: 7325; WAN024BQU_at; Start 13; Stop 37
agagggctatttttgtatttagagg

SEQ ID NO: 90731 - DNA, 25 bp, Artificial
  probe
  misc_feature (1)..(25): SEQ ID NO: 7325; WAN024BQU_at; Start 17; Stop 41
ggctatttttgtatttagaggacaa

SEQ ID NO: 90732 - DNA, 25 bp, Artificial
  probe
  misc_feature (1)..(25): SEQ ID NO: 7325; WAN024BQU_at; Start 1; Stop 25
gtgtactattctagagggctatttt

SEQ ID NO: 90733 - DNA, 25 bp, Artificial
  probe
  misc_feature (1)..(25): SEQ ID NO: 7325; WAN024BQU_at; Start 2; Stop 26
tgtactattctagagggctattttt

SEQ ID NO: 90734 - DNA, 25 bp, Artificial
  probe
  misc_feature (1)..(25): SEQ ID NO: 7325; WAN024BQU_at; Start 8; Stop 32
attctagagggctatttttgtattt

SEQ ID NO: 90735 - DNA, 25 bp, Artificial
  probe
  misc_feature (1)..(25): SEQ ID NO: 7325; WAN024BQU_at; Start 6; Stop 30
ctattctagagggctatttttgtat

SEQ ID NO: 90736 - DNA, 25 bp, Artificial
  probe
  misc_feature (1)..(25): SEQ ID NO: 7325; WAN024BQU_at; Start 11; Stop 35
ctagagggctatttttgtatttaga

SEQ ID NO: 90737 - DNA, 25 bp, Artificial
  probe
  misc_feature (1)..(25): SEQ ID NO: 7325; WAN024BQU_at; Start 4; Stop 28
tactattctagagggctatttttgt

SEQ ID NO: 90738 - DNA, 25 bp, Artificial
  probe
  misc_feature (1)..(25): SEQ ID NO: 7325; WAN024BQU_at; Start 12; Stop 36
tagagggctatttttgtatttagag

SEQ ID NO: 90739 - DNA, 25 bp, Artificial
  probe
  misc_feature (1)..(25): SEQ ID NO: 7325; WAN024BQU_at; Start 5; Stop 29
actattctagagggctatttttgta

SEQ ID NO: 90740 - DNA, 25 bp, Artificial
  probe
  misc_feature (1)..(25): SEQ ID NO: 7325; WAN024BQU_at; Start 9; Stop 33
ttctagagggctatttttgtattta

SEQ ID NO: 90741 - DNA, 25 bp, Artificial
  probe
  misc_feature (1)..(25): SEQ ID NO: 7325; WAN024BQU_at; Start 18; Stop 42
gctatttttgtatttagaggacaaa

SEQ ID NO: 90742 - DNA, 25 bp, Artificial
  probe
  misc_feature (1)..(25): SEQ ID NO: 7325; WAN024BQU_at; Start 10; Stop 34
tctagagggctatttttgtatttag

SEQ ID NO: 90743 - DNA, 25 bp, Artificial
  probe
  misc_feature (1)..(25): SEQ ID NO: 7325; WAN024BQU_at; Start 16; Stop 40
gggctatttttgtatttagaggaca

SEQ ID NO: 90744 - DNA, 25 bp, Artificial
  probe
  misc_feature (1)..(25): SEQ ID NO: 7325; WAN024BQU_at; Start 3; Stop 27
gtactattctagagggctatttttg

SEQ ID NO: 90745 - DNA, 25 bp, Artificial
  probe
  misc_feature (1)..(25): SEQ ID NO: 7325; WAN024BQU_at; Start 14; Stop 38
gagggctatttttgtatttagagga

SEQ ID NO: 90746 - DNA, 25 bp, Artificial
  probe
  misc_feature (1)..(25): SEQ ID NO: 6249; WAN024BQV_at; Start 300; Stop 324
tatggttgggctagtcaattctcaa

SEQ ID NO: 90747 - DNA, 25 bp, Artificial
  probe
  misc_feature (1)..(25): SEQ ID NO: 6249; WAN024BQV_at; Start 271; Stop 295
tcggttcaaaccaatatgccaccag

SEQ ID NO: 90748 - DNA, 25 bp, Artificial
  probe
  misc_feature (1)..(25): SEQ ID NO: 6249; WAN024BQV_at; Start 207; Stop 231
tcaaaaattgacctctgcagaagcc

SEQ ID NO: 90749 - DNA, 25 bp, Artificial
  probe
  misc_feature (1)..(25): SEQ ID NO: 6249; WAN024BQV_at; Start 451; Stop 475
gaagcaagcaagacagctattaaag

SEQ ID NO: 90750 - DNA, 25 bp, Artificial
  probe
  misc_feature (1)..(25): SEQ ID NO: 6249; WAN024BQV_at; Start 256; Stop 280
caaggtctacagtcttcggttcaaa

SEQ ID NO: 90751 - DNA, 25 bp, Artificial
  probe
  misc_feature (1)..(25): SEQ ID NO: 6249; WAN024BQV_at; Start 84; Stop 108
cccagttggaaatgtgcatctagac

SEQ ID NO: 90752 - DNA, 25 bp, Artificial
  probe
  misc_feature (1)..(25): SEQ ID NO: 6249; WAN024BQV_at; Start 226; Stop 250
gaagccttgaaaaattatgatgcca

SEQ ID NO: 90753 - DNA, 25 bp, Artificial
  probe
  misc_feature (1)..(25): SEQ ID NO: 6249; WAN024BQV_at; Start 416; Stop 440
ccttgtatatgttagaagtggatca

SEQ ID NO: 90754 - DNA, 25 bp, Artificial
  probe
  misc_feature (1)..(25): SEQ ID NO: 6249; WAN024BQV_at; Start 2; Stop 26
tcttgaaattgatagaccttctggg

SEQ ID NO: 90755 - DNA, 25 bp, Artificial
  probe
  misc_feature (1)..(25): SEQ ID NO: 6249; WAN024BQV_at; Start 444; Stop 468
tagtttggaagcaagcaagacagct

SEQ ID NO: 90756 - DNA, 25 bp, Artificial
  probe
  misc_feature (1)..(25): SEQ ID NO: 6249; WAN024BQV_at; Start 285; Stop 309
tatgccaccagaaactatggttggg

SEQ ID NO: 90757 - DNA, 25 bp, Artificial
  probe
  misc_feature (1)..(25): SEQ ID NO: 6249; WAN024BQV_at; Start 34; Stop 58
gatgtatacaacgaccaagaattca

SEQ ID NO: 90758 - DNA, 25 bp, Artificial
  probe
  misc_feature (1)..(25): SEQ ID NO: 6249; WAN024BQV_at; Start 55; Stop 79
ttcacgtcacgtcatggcaattatc

SEQ ID NO: 90759 - DNA, 25 bp, Artificial
  probe
  misc_feature (1)..(25): SEQ ID NO: 6249; WAN024BQV_at; Start 70; Stop 94
ggcaattatcatttcccagttggaa

SEQ ID NO: 90760 - DNA, 25 bp, Artificial
  probe
  misc_feature (1)..(25): SEQ ID NO: 6249; WAN024BQV_at; Start 134; Stop 158
gagaacgttattcattagcaaatgg

SEQ ID NO: 90761 - DNA, 25 bp, Artificial
  probe
  misc_feature (1)..(25): SEQ ID NO: 6249; WAN024BQV_at; Start 372; Stop 396
aactggtcgtatggatcttccttca

SEQ ID NO: 90762 - DNA, 25 bp, Artificial
  probe
  misc_feature (1)..(25): SEQ ID NO: 6249; WAN024BQV_at; Start 364; Stop 388
ttaaaaggaactggtcgtatggatc

SEQ ID NO: 90763 - DNA, 25 bp, Artificial
  probe
  misc_feature (1)..(25): SEQ ID NO: 6249; WAN024BQV_at; Start 329; Stop 353
caaatggcggcaaatatactgttac

SEQ ID NO: 90764 - DNA, 25 bp, Artificial
  probe
  misc_feature (1)..(25): SEQ ID NO: 6249; WAN024BQV_at; Start 18; Stop 42
ccttctgggaggtgtagatgtatac

SEQ ID NO: 90765 - DNA, 25 bp, Artificial
  probe
  misc_feature (1)..(25): SEQ ID NO: 6249; WAN024BQV_at; Start 177; Stop 201
taatcatcaaaaagtgattgctgct

SEQ ID NO: 90766 - DNA, 25 bp, Artificial
  probe
  misc_feature (1)..(25): SEQ ID NO: 6249; WAN024BQV_at; Start 337; Stop 361
ggcaaatatactgttacaactcaag

SEQ ID NO: 90767 - DNA, 25 bp, Artificial
  probe
  misc_feature (1)..(25): SEQ ID NO: 6249; WAN024BQV_at; Start 162; Stop 186
tggcgatcgtggtcgtaatcatcaa

SEQ ID NO: 90768 - DNA, 25 bp, Artificial
  probe
  misc_feature (1)..(25): SEQ ID NO: 6249; WAN024BQV_at; Start 393; Stop 417
ttcatatgcaatgccagatagtgcc

SEQ ID NO: 90769 - DNA, 25 bp, Artificial
  probe
  misc_feature (1)..(25): SEQ ID NO: 6249; WAN024BQV_at; Start 431; Stop 455
aagtggatcagaatagtttggaagc

SEQ ID NO: 90770 - DNA, 25 bp, Artificial
  probe
  misc_feature (1)..(25): SEQ ID NO: 6249; WAN024BQV_at; Start 241; Stop 265
tatgatgccattatccaaggtctac

SEQ ID NO: 90771 - DNA, 25 bp, Artificial
  probe
  misc_feature (1)..(25): SEQ ID NO: 6249; WAN024BQV_at; Start 46; Stop 70
gaccaagaattcacgtcacgtcatg

SEQ ID NO: 90772 - DNA, 25 bp, Artificial
  probe
  misc_feature (1)..(25): SEQ ID NO: 6249; WAN024BQV_at; Start 146; Stop 170
cattagcaaatggtgatggcgatcg

SEQ ID NO: 90773 - DNA, 25 bp, Artificial
  probe
  misc_feature (1)..(25): SEQ ID NO: 6249; WAN024BQV_at; Start 90; Stop 114
tggaaatgtgcatctagactctgag

SEQ ID NO: 90774 - DNA, 25 bp, Artificial
  probe
  misc_feature (1)..(25): SEQ ID NO: 6249; WAN024BQV_at; Start 168; Stop 192
tcgtggtcgtaatcatcaaaaagtg

SEQ ID NO: 90775 - DNA, 25 bp, Artificial
  probe
  misc_feature (1)..(25): SEQ ID NO: 6249; WAN024BQV_at; Start 192; Stop 216
gattgctgctattattcaaaaattg

SEQ ID NO: 90776 - DNA, 25 bp, Artificial
  probe
  misc_feature (1)..(25): SEQ ID NO: 6249; WAN024BQV_at; Start 405; Stop 429
gccagatagtgccttgtatatgtta

SEQ ID NO: 90777 - DNA, 25 bp, Artificial
  probe
  misc_feature (1)..(25): SEQ ID NO: 6249; WAN024BQV_at; Start 215; Stop 239
tgacctctgcagaagccttgaaaaa

SEQ ID NO: 90778 - DNA, 25 bp, Artificial
  probe
  misc_feature (1)..(25): SEQ ID NO: 6249; WAN024BQV_at; Start 316; Stop 340
aattctcaactagcaaatggcggca

SEQ ID NO: 90779 - DNA, 25 bp, Artificial
  probe
  misc_feature (1)..(25): SEQ ID NO: 6249; WAN024BQV_at; Start 466; Stop 490
gctattaaagatatcatggaaggga

SEQ ID NO: 90780 - DNA, 25 bp, Artificial
  probe
  misc_feature (1)..(25): SEQ ID NO: 6520; WAN024BQW_at; Start 51; Stop 75
agttggcgatactgctcatgatttt

SEQ ID NO: 90781 - DNA, 25 bp, Artificial
  probe
  misc_feature (1)..(25): SEQ ID NO: 6520; WAN024BQW_at; Start 55; Stop 79
ggcgatactgctcatgatttttcac

SEQ ID NO: 90782 - DNA, 25 bp, Artificial
  probe
  misc_feature (1)..(25): SEQ ID NO: 6520; WAN024BQW_at; Start 47; Stop 71
ttcaagttggcgatactgctcatga

SEQ ID NO: 90783 - DNA, 25 bp, Artificial
  probe
  misc_feature (1)..(25): SEQ ID NO: 6520; WAN024BQW_at; Start 27; Stop 51
tacctttaccggatctcaacttcaa

SEQ ID NO: 90784 - DNA, 25 bp, Artificial
  probe
  misc_feature (1)..(25): SEQ ID NO: 6520; WAN024BQW_at; Start 1; Stop 25
atgacaacatttttaggaaaccctg

SEQ ID NO: 90785 - DNA, 25 bp, Artificial
  probe
  misc_feature (1)..(25): SEQ ID NO: 6520; WAN024BQW_at; Start 42; Stop 66
tcaacttcaagttggcgatactgct

SEQ ID NO: 90786 - DNA, 25 bp, Artificial
  probe
  misc_feature (1)..(25): SEQ ID NO: 6520; WAN024BQW_at; Start 56; Stop 80
gcgatactgctcatgatttttcact

SEQ ID NO: 90787 - DNA, 25 bp, Artificial
  probe
  misc_feature (1)..(25): SEQ ID NO: 6520; WAN024BQW_at; Start 78; Stop 102
actgaccactcctaacttggagaaa

SEQ ID NO: 90788 - DNA, 25 bp, Artificial
  probe
  misc_feature (1)..(25): SEQ ID NO: 6520; WAN024BQW_at; Start 80; Stop 104
tgaccactcctaacttggagaaaaa

SEQ ID NO: 90789 - DNA, 25 bp, Artificial
  probe
  misc_feature (1)..(25): SEQ ID NO: 6520; WAN024BQW_at; Start 73; Stop 97
ttttcactgaccactcctaacttgg

SEQ ID NO: 90790 - DNA, 25 bp, Artificial
  probe
  misc_feature (1)..(25): SEQ ID NO: 6520; WAN024BQW_at; Start 75; Stop 99
ttcactgaccactcctaacttggag

SEQ ID NO: 90791 - DNA, 25 bp, Artificial
  probe
  misc_feature (1)..(25): SEQ ID NO: 6520; WAN024BQW_at; Start 40; Stop 64
tctcaacttcaagttggcgatactg

SEQ ID NO: 90792 - DNA, 25 bp, Artificial
  probe
  misc_feature (1)..(25): SEQ ID NO: 6520; WAN024BQW_at; Start 126; Stop 150
caagaaaaaagtcctcagtgtgatc

SEQ ID NO: 90793 - DNA, 25 bp, Artificial
  probe
  misc_feature (1)..(25): SEQ ID NO: 6520; WAN024BQW_at; Start 64; Stop 88
gctcatgatttttcactgaccactc

SEQ ID NO: 90794 - DNA, 25 bp, Artificial
  probe
  misc_feature (1)..(25): SEQ ID NO: 6520; WAN024BQW_at; Start 125; Stop 149
gcaagaaaaaagtcctcagtgtgat

SEQ ID NO: 90795 - DNA, 25 bp, Artificial
  probe
  misc_feature (1)..(25): SEQ ID NO: 6520; WAN024BQW_at; Start 84; Stop 108
cactcctaacttggagaaaaaatct

SEQ ID NO: 90796 - DNA, 25 bp, Artificial
  probe
  misc_feature (1)..(25): SEQ ID NO: 6520; WAN024BQW_at; Start 33; Stop 57
taccggatctcaacttcaagttggc

SEQ ID NO: 90797 - DNA, 25 bp, Artificial
  probe
  misc_feature (1)..(25): SEQ ID NO: 6520; WAN024BQW_at; Start 43; Stop 67
caacttcaagttggcgatactgctc

SEQ ID NO: 90798 - DNA, 25 bp, Artificial
  probe
  misc_feature (1)..(25): SEQ ID NO: 6520; WAN024BQW_at; Start 77; Stop 101
cactgaccactcctaacttggagaa

SEQ ID NO: 90799 - DNA, 25 bp, Artificial
  probe
  misc_feature (1)..(25): SEQ ID NO: 6520; WAN024BQW_at; Start 53; Stop 77
ttggcgatactgctcatgatttttc

SEQ ID NO: 90800 - DNA, 25 bp, Artificial
  probe
  misc_feature (1)..(25): SEQ ID NO: 6520; WAN024BQW_at; Start 67; Stop 91
catgatttttcactgaccactccta

SEQ ID NO: 90801 - DNA, 25 bp, Artificial
  probe
  misc_feature (1)..(25): SEQ ID NO: 6520; WAN024BQW_at; Start 70; Stop 94
gatttttcactgaccactcctaact

SEQ ID NO: 90802 - DNA, 25 bp, Artificial
  probe
  misc_feature (1)..(25): SEQ ID NO: 6520; WAN024BQW_at; Start 31; Stop 55
tttaccggatctcaacttcaagttg

SEQ ID NO: 90803 - DNA, 25 bp, Artificial
  probe
  misc_feature (1)..(25): SEQ ID NO: 6520; WAN024BQW_at; Start 37; Stop 61
ggatctcaacttcaagttggcgata

SEQ ID NO: 90804 - DNA, 25 bp, Artificial
  probe
  misc_feature (1)..(25): SEQ ID NO: 6520; WAN024BQW_at; Start 46; Stop 70
cttcaagttggcgatactgctcatg

SEQ ID NO: 90805 - DNA, 25 bp, Artificial
  probe
  misc_feature (1)..(25): SEQ ID NO: 6520; WAN024BQW_at; Start 35; Stop 59
ccggatctcaacttcaagttggcga

SEQ ID NO: 90806 - DNA, 25 bp, Artificial
  probe
  misc_feature (1)..(25): SEQ ID NO: 6520; WAN024BQW_at; Start 48; Stop 72
tcaagttggcgatactgctcatgat

SEQ ID NO: 90807 - DNA, 25 bp, Artificial
  probe
  misc_feature (1)..(25): SEQ ID NO: 6520; WAN024BQW_at; Start 29; Stop 53
cctttaccggatctcaacttcaagt

SEQ ID NO: 90808 - DNA, 25 bp, Artificial
  probe
  misc_feature (1)..(25): SEQ ID NO: 6520; WAN024BQW_at; Start 124; Stop 148
ggcaagaaaaaagtcctcagtgtga

SEQ ID NO: 90809 - DNA, 25 bp, Artificial
  probe
  misc_feature (1)..(25): SEQ ID NO: 6520; WAN024BQW_at; Start 60; Stop 84
tactgctcatgatttttcactgacc

SEQ ID NO: 90810 - DNA, 25 bp, Artificial
  probe
  misc_feature (1)..(25): SEQ ID NO: 6520; WAN024BQW_at; Start 49; Stop 73
caagttggcgatactgctcatgatt

SEQ ID NO: 90811 - DNA, 25 bp, Artificial
  probe
  misc_feature (1)..(25): SEQ ID NO: 6520; WAN024BQW_at; Start 58; Stop 82
gatactgctcatgatttttcactga

SEQ ID NO: 90812 - DNA, 25 bp, Artificial
  probe
  misc_feature (1)..(25): SEQ ID NO: 6520; WAN024BQW_at; Start 23; Stop 47
ctgttacctttaccggatctcaact

SEQ ID NO: 90813 - DNA, 25 bp, Artificial
  probe
  misc_feature (1)..(25): SEQ ID NO: 6520; WAN024BQW_at; Start 127; Stop 151
aagaaaaaagtcctcagtgtgatcc

SEQ ID NO: 90814 - DNA, 25 bp, Artificial
  probe
  misc_feature (1)..(25): SEQ ID NO: 6664; WAN024BQX_at; Start 668; Stop 692
tttcatccggattaggtgccctagc

SEQ ID NO: 90815 - DNA, 25 bp, Artificial
  probe
  misc_feature (1)..(25): SEQ ID NO: 6664; WAN024BQX_at; Start 718; Stop 742
tacagtttcaacatcgccgtcgggt

SEQ ID NO: 90816 - DNA, 25 bp, Artificial
  probe
  misc_feature (1)..(25): SEQ ID NO: 6664; WAN024BQX_at; Start 486; Stop 510
tgttctggctcaatccatgggcgtc

SEQ ID NO: 90817 - DNA, 25 bp, Artificial
  probe
  misc_feature (1)..(25): SEQ ID NO: 6664; WAN024BQX_at; Start 388; Stop 412
caagaccaggatatgtgggtgacca

SEQ ID NO: 90818 - DNA, 25 bp, Artificial
  probe
  misc_feature (1)..(25): SEQ ID NO: 6664; WAN024BQX_at; Start 199; Stop 223
tttattggcgccattgcctttgggc

SEQ ID NO: 90819 - DNA, 25 bp, Artificial
  probe
  misc_feature (1)..(25): SEQ ID NO: 6664; WAN024BQX_at; Start 785; Stop 809
tctttatcgctcctaagcagagaaa

SEQ ID NO: 90820 - DNA, 25 bp, Artificial
  probe
  misc_feature (1)..(25): SEQ ID NO: 6664; WAN024BQX_at; Start 324; Stop 348
tgatcgggtcgctaaaagttctacc

SEQ ID NO: 90821 - DNA, 25 bp, Artificial
  probe
  misc_feature (1)..(25): SEQ ID NO: 6664; WAN024BQX_at; Start 549; Stop 573
gaccttggtttctgtcactgctatg

SEQ ID NO: 90822 - DNA, 25 bp, Artificial
  probe
  misc_feature (1)..(25): SEQ ID NO: 6664; WAN024BQX_at; Start 639; Stop 663
tgccaatagcctctggtccatgatg

SEQ ID NO: 90823 - DNA, 25 bp, Artificial
  probe
  misc_feature (1)..(25): SEQ ID NO: 6664; WAN024BQX_at; Start 69; Stop 93
tgccatcgggattgtcgctggagct

SEQ ID NO: 90824 - DNA, 25 bp, Artificial
  probe
  misc_feature (1)..(25): SEQ ID NO: 6664; WAN024BQX_at; Start 503; Stop 527
tgggcgtccgggtcaaactctatca

SEQ ID NO: 90825 - DNA, 25 bp, Artificial
  probe
  misc_feature (1)..(25): SEQ ID NO: 6664; WAN024BQX_at; Start 517; Stop 541
aaactctatcactacctgctcatgg

SEQ ID NO: 90826 - DNA, 25 bp, Artificial
  probe
  misc_feature (1)..(25): SEQ ID NO: 6664; WAN024BQX_at; Start 584; Stop 608
ggaccattctcatcgctgccatgct

SEQ ID NO: 90827 - DNA, 25 bp, Artificial
  probe
  misc_feature (1)..(25): SEQ ID NO: 6664; WAN024BQX_at; Start 166; Stop 190
gtagctctgtcctttatcctgggca

SEQ ID NO: 90828 - DNA, 25 bp, Artificial
  probe
  misc_feature (1)..(25): SEQ ID NO: 6664; WAN024BQX_at; Start 622; Stop 646
gcgacagcctatctctatgccaata

SEQ ID NO: 90829 - DNA, 25 bp, Artificial
  probe
  misc_feature (1)..(25): SEQ ID NO: 6664; WAN024BQX_at; Start 253; Stop 277
aagagcaactccatcatcaagagcg

SEQ ID NO: 90830 - DNA, 25 bp, Artificial
  probe
  misc_feature (1)..(25): SEQ ID NO: 6664; WAN024BQX_at; Start 83; Stop 107
tcgctggagctgtcggatgcttcat

SEQ ID NO: 90831 - DNA, 25 bp, Artificial
  probe
  misc_feature (1)..(25): SEQ ID NO: 6664; WAN024BQX_at; Start 653; Stop 677
ggtccatgatgctcctttcatccgg

SEQ ID NO: 90832 - DNA, 25 bp, Artificial
  probe
  misc_feature (1)..(25): SEQ ID NO: 6664; WAN024BQX_at; Start 441; Stop 465
gattgtcctgctctttcgtccccta

SEQ ID NO: 90833 - DNA, 25 bp, Artificial
  probe
  misc_feature (1)..(25): SEQ ID NO: 6664; WAN024BQX_at; Start 801; Stop 825
gcagagaaagaataagcacgctctt

SEQ ID NO: 90834 - DNA, 25 bp, Artificial
  probe
  misc_feature (1)..(25): SEQ ID NO: 6664; WAN024BQX_at; Start 54; Stop 78
cctgattacagctattgccatcggg

SEQ ID NO: 90835 - DNA, 25 bp, Artificial
  probe
  misc_feature (1)..(25): SEQ ID NO: 6664; WAN024BQX_at; Start 733; Stop 757
gccgtcgggtcttgtatcgtcctca

SEQ ID NO: 90836 - DNA, 25 bp, Artificial
  probe
  misc_feature (1)..(25): SEQ ID NO: 6664; WAN024BQX_at; Start 15; Stop 39
tatcgatggattacagcaattccac

SEQ ID NO: 90837 - DNA, 25 bp, Artificial
  probe
  misc_feature (1)..(25): SEQ ID NO: 6664; WAN024BQX_at; Start 565; Stop 589
actgctatgcagagtgtcgggacca

SEQ ID NO: 90838 - DNA, 25 bp, Artificial
  probe
  misc_feature (1)..(25): SEQ ID NO: 6664; WAN024BQX_at; Start 426; Stop 450
ggcagtcttactggtgattgtcctg

SEQ ID NO: 90839 - DNA, 25 bp, Artificial
  probe
  misc_feature (1)..(25): SEQ ID NO: 6664; WAN024BQX_at; Start 266; Stop 290
tcatcaagagcgacacggcgatggg

SEQ ID NO: 90840 - DNA, 25 bp, Artificial
  probe
  misc_feature (1)..(25): SEQ ID NO: 6664; WAN024BQX_at; Start 411; Stop 435
catcggtgttggagtggcagtctta

SEQ ID NO: 90841 - DNA, 25 bp, Artificial
  probe
  misc_feature (1)..(25): SEQ ID NO: 6664; WAN024BQX_at; Start 220; Stop 244
gggcttttagcttccatcctcatca

SEQ ID NO: 90842 - DNA, 25 bp, Artificial
  probe
  misc_feature (1)..(25): SEQ ID NO: 6664; WAN024BQX_at; Start 279; Stop 303
cacggcgatgggatacctttctctt

SEQ ID NO: 90843 - DNA, 25 bp, Artificial
  probe
  misc_feature (1)..(25): SEQ ID NO: 6664; WAN024BQX_at; Start 306; Stop 330
tcgccctaggagtcattctgatcgg

SEQ ID NO: 90844 - DNA, 25 bp, Artificial
  probe
  misc_feature (1)..(25): SEQ ID NO: 6664; WAN024BQX_at; Start 369; Stop 393
tggaaatatcctggccgtgcaagac

SEQ ID NO: 90845 - DNA, 25 bp, Artificial
  probe
  misc_feature (1)..(25): SEQ ID NO: 6664; WAN024BQX_at; Start 239; Stop 263
tcatcacctatatcaagagcaactc

SEQ ID NO: 90846 - DNA, 25 bp, Artificial
  probe
  misc_feature (1)..(25): SEQ ID NO: 6664; WAN024BQX_at; Start 698; Stop 722
tcctaggactctttatcggctacag

SEQ ID NO: 90847 - DNA, 25 bp, Artificial
  probe
  misc_feature (1)..(25): SEQ ID NO: 6664; WAN024BQX_at; Start 131; Stop 155
tgggagatgccatctcgcacgcggt

SEQ ID NO: 90848 - DNA, 25 bp, Artificial
  probe
  misc_feature (1)..(25): SEQ ID NO: 6783; WAN024BQY_at; Start 93; Stop 117
tgataactctatcgttagacgctct

SEQ ID NO: 90849 - DNA, 25 bp, Artificial
  probe
  misc_feature (1)..(25): SEQ ID NO: 6783; WAN024BQY_at; Start 877; Stop 901
aaagtcctctggataccatatacac

SEQ ID NO: 90850 - DNA, 25 bp, Artificial
  probe
  misc_feature (1)..(25): SEQ ID NO: 6783; WAN024BQY_at; Start 483; Stop 507
tatggcagctaaacgaaaatatcct

SEQ ID NO: 90851 - DNA, 25 bp, Artificial
  probe
  misc_feature (1)..(25): SEQ ID NO: 6783; WAN024BQY_at; Start 610; Stop 634
gagaaatataagattaaccagtcgg

SEQ ID NO: 90852 - DNA, 25 bp, Artificial
  probe
  misc_feature (1)..(25): SEQ ID NO: 6783; WAN024BQY_at; Start 969; Stop 993
ggatgatccattatcctttggaaaa

SEQ ID NO: 90853 - DNA, 25 bp, Artificial
  probe
  misc_feature (1)..(25): SEQ ID NO: 6783; WAN024BQY_at; Start 705; Stop 729
gacatcgacttgtgaagatttggaa

SEQ ID NO: 90854 - DNA, 25 bp, Artificial
  probe
  misc_feature (1)..(25): SEQ ID NO: 6783; WAN024BQY_at; Start 249; Stop 273
tccagacgcaggaaattcattagcg

SEQ ID NO: 90855 - DNA, 25 bp, Artificial
  probe
  misc_feature (1)..(25): SEQ ID NO: 6783; WAN024BQY_at; Start 443; Stop 467
cagtcacaactggtggagtaatgtc

SEQ ID NO: 90856 - DNA, 25 bp, Artificial
  probe
  misc_feature (1)..(25): SEQ ID NO: 6783; WAN024BQY_at; Start 234; Stop 258
taaatttatgggttttccagacgca

SEQ ID NO: 90857 - DNA, 25 bp, Artificial
  probe
  misc_feature (1)..(25): SEQ ID NO: 6783; WAN024BQY_at; Start 562; Stop 586
gcaactgaatggcttaatcttggag

SEQ ID NO: 90858 - DNA, 25 bp, Artificial
  probe
  misc_feature (1)..(25): SEQ ID NO: 6783; WAN024BQY_at; Start 290; Stop 314
taattgaagtttttctccagcagaa

SEQ ID NO: 90859 - DNA, 25 bp, Artificial
  probe
  misc_feature (1)..(25): SEQ ID NO: 6783; WAN024BQY_at; Start 756; Stop 780
tagtacggatatttggctgcacgca

SEQ ID NO: 90860 - DNA, 25 bp, Artificial
  probe
  misc_feature (1)..(25): SEQ ID NO: 6783; WAN024BQY_at; Start 625; Stop 649
aaccagtcggaattatcaaaattgc

SEQ ID NO: 90861 - DNA, 25 bp, Artificial
  probe
  misc_feature (1)..(25): SEQ ID NO: 6783; WAN024BQY_at; Start 589; Stop 613
gaggttatatactgtaagactgaga

SEQ ID NO: 90862 - DNA, 25 bp, Artificial
  probe
  misc_feature (1)..(25): SEQ ID NO: 6783; WAN024BQY_at; Start 688; Stop 712
tatgcatgcgattcaatgacatcga

SEQ ID NO: 90863 - DNA, 25 bp, Artificial
  probe
  misc_feature (1)..(25): SEQ ID NO: 6783; WAN024BQY_at; Start 771; Stop 795
gctgcacgcagatgcatgccatgga

SEQ ID NO: 90864 - DNA, 25 bp, Artificial
  probe
  misc_feature (1)..(25): SEQ ID NO: 6783; WAN024BQY_at; Start 108; Stop 132
tagacgctctaatgatagacatgag

SEQ ID NO: 90865 - DNA, 25 bp, Artificial
  probe
  misc_feature (1)..(25): SEQ ID NO: 6783; WAN024BQY_at; Start 1316; Stop 1340
gattcgttcttcgatacaatagtgg

SEQ ID NO: 90866 - DNA, 25 bp, Artificial
  probe
  misc_feature (1)..(25): SEQ ID NO: 6783; WAN024BQY_at; Start 1301; Stop 1325
taaatggtgtcaatagattcgttct

SEQ ID NO: 90867 - DNA, 25 bp, Artificial
  probe
  misc_feature (1)..(25): SEQ ID NO: 6783; WAN024BQY_at; Start 1040; Stop 1064
ggatggttatgaagacacttggaac

SEQ ID NO: 90868 - DNA, 25 bp, Artificial
  probe
  misc_feature (1)..(25): SEQ ID NO: 6783; WAN024BQY_at; Start 851; Stop 875
tcgatagttgtacgatggatccaca

SEQ ID NO: 90869 - DNA, 25 bp, Artificial
  probe
  misc_feature (1)..(25): SEQ ID NO: 6783; WAN024BQY_at; Start 362; Stop 386
cagaagttattatttggctgagaca

SEQ ID NO: 90870 - DNA, 25 bp, Artificial
  probe
  misc_feature (1)..(25): SEQ ID NO: 6783; WAN024BQY_at; Start 539; Stop 563
tagggcactactcattaagctatgc

SEQ ID NO: 90871 - DNA, 25 bp, Artificial
  probe
  misc_feature (1)..(25): SEQ ID NO: 6783; WAN024BQY_at; Start 864; Stop 888
gatggatccacataaagtcctctgg

SEQ ID NO: 90872 - DNA, 25 bp, Artificial
  probe
  misc_feature (1)..(25): SEQ ID NO: 6783; WAN024BQY_at; Start 338; Stop 362
cacctatgggaagtgaaattgaagc

SEQ ID NO: 90873 - DNA, 25 bp, Artificial
  probe
  misc_feature (1)..(25): SEQ ID NO: 6783; WAN024BQY_at; Start 265; Stop 289
tcattagcgggattggcagcagcaa

SEQ ID NO: 90874 - DNA, 25 bp, Artificial
  probe
  misc_feature (1)..(25): SEQ ID NO: 6783; WAN024BQY_at; Start 467; Stop 491
caaatacctatgctcttatggcagc

SEQ ID NO: 90875 - DNA, 25 bp, Artificial
  probe
  misc_feature (1)..(25): SEQ ID NO: 6783; WAN024BQY_at; Start 426; Stop 450
tactaaattaggaggagcagtcaca

SEQ ID NO: 90876 - DNA, 25 bp, Artificial
  probe
  misc_feature (1)..(25): SEQ ID NO: 6783; WAN024BQY_at; Start 1353; Stop 1377
taccgaagtagagttggaagatgct

SEQ ID NO: 90877 - DNA, 25 bp, Artificial
  probe
  misc_feature (1)..(25): SEQ ID NO: 6783; WAN024BQY_at; Start 324; Stop 348
taaggatatttgctcacctatggga

SEQ ID NO: 90878 - DNA, 25 bp, Artificial
  probe
  misc_feature (1)..(25): SEQ ID NO: 6783; WAN024BQY_at; Start 1055; Stop 1079
cacttggaactcagaaaataggtga

SEQ ID NO: 90879 - DNA, 25 bp, Artificial
  probe
  misc_feature (1)..(25): SEQ ID NO: 6783; WAN024BQY_at; Start 524; Stop 548
tacttccagataatatagggcacta

SEQ ID NO: 90880 - DNA, 25 bp, Artificial
  probe
  misc_feature (1)..(25): SEQ ID NO: 6783; WAN024BQY_at; Start 1181; Stop 1205
tctttcagtacactcctagattgga

SEQ ID NO: 90881 - DNA, 25 bp, Artificial
  probe
  misc_feature (1)..(25): SEQ ID NO: 6783; WAN024BQY_at; Start 141; Stop 165
gattgccccattacctaaatcagga

SEQ ID NO: 90882 - DNA, 25 bp, Artificial
  probe
  misc_feature (1)..(25): SEQ ID NO: 6875; WAN024BQZ_at; Start 20; Stop 44
caccggaattgaaaaaactgatcga

SEQ ID NO: 90883 - DNA, 25 bp, Artificial
  probe
  misc_feature (1)..(25): SEQ ID NO: 6875; WAN024BQZ_at; Start 4; Stop 28
gctaaaatgagaatatcaccggaat

SEQ ID NO: 90884 - DNA, 25 bp, Artificial
  probe
  misc_feature (1)..(25): SEQ ID NO: 6875; WAN024BQZ_at; Start 49; Stop 73
taccgctgcgtaaaagatacggaag

SEQ ID NO: 90885 - DNA, 25 bp, Artificial
  probe
  misc_feature (1)..(25): SEQ ID NO: 6875; WAN024BQZ_at; Start 15; Stop 39
aatatcaccggaattgaaaaaactg

SEQ ID NO: 90886 - DNA, 25 bp, Artificial
  probe
  misc_feature (1)..(25): SEQ ID NO: 6875; WAN024BQZ_at; Start 9; Stop 33
aatgagaatatcaccggaattgaaa

SEQ ID NO: 90887 - DNA, 25 bp, Artificial
  probe
  misc_feature (1)..(25): SEQ ID NO: 6875; WAN024BQZ_at; Start 56; Stop 80
gcgtaaaagatacggaaggaatgtc

SEQ ID NO: 90888 - DNA, 25 bp, Artificial
  probe
  misc_feature (1)..(25): SEQ ID NO: 6875; WAN024BQZ_at; Start 7; Stop 31
aaaatgagaatatcaccggaattga

SEQ ID NO: 90889 - DNA, 25 bp, Artificial
  probe
  misc_feature (1)..(25): SEQ ID NO: 6875; WAN024BQZ_at; Start 34; Stop 58
aaactgatcgaaaaataccgctgcg

SEQ ID NO: 90890 - DNA, 25 bp, Artificial
  probe
  misc_feature (1)..(25): SEQ ID NO: 6875; WAN024BQZ_at; Start 50; Stop 74
accgctgcgtaaaagatacggaagg

SEQ ID NO: 90891 - DNA, 25 bp, Artificial
  probe
  misc_feature (1)..(25): SEQ ID NO: 6875; WAN024BQZ_at; Start 33; Stop 57
aaaactgatcgaaaaataccgctgc

SEQ ID NO: 90892 - DNA, 25 bp, Artificial
  probe
  misc_feature (1)..(25): SEQ ID NO: 6875; WAN024BQZ_at; Start 48; Stop 72
ataccgctgcgtaaaagatacggaa

SEQ ID NO: 90893 - DNA, 25 bp, Artificial
  probe
  misc_feature (1)..(25): SEQ ID NO: 6875; WAN024BQZ_at; Start 19; Stop 43
tcaccggaattgaaaaaactgatcg

SEQ ID NO: 90894 - DNA, 25 bp, Artificial
  probe
  misc_feature (1)..(25): SEQ ID NO: 6875; WAN024BQZ_at; Start 38; Stop 62
tgatcgaaaaataccgctgcgtaaa

SEQ ID NO: 90895 - DNA, 25 bp, Artificial
  probe
  misc_feature (1)..(25): SEQ ID NO: 6875; WAN024BQZ_at; Start 17; Stop 41
tatcaccggaattgaaaaaactgat

SEQ ID NO: 90896 - DNA, 25 bp, Artificial
  probe
  misc_feature (1)..(25): SEQ ID NO: 6875; WAN024BQZ_at; Start 35; Stop 59
aactgatcgaaaaataccgctgcgt

SEQ ID NO: 90897 - DNA, 25 bp, Artificial
  probe
  misc_feature (1)..(25): SEQ ID NO: 6875; WAN024BQZ_at; Start 1; Stop 25
atggctaaaatgagaatatcaccgg

SEQ ID NO: 90898 - DNA, 25 bp, Artificial
  probe
  misc_feature (1)..(25): SEQ ID NO: 6875; WAN024BQZ_at; Start 32; Stop 56
aaaaactgatcgaaaaataccgctg

SEQ ID NO: 90899 - DNA, 25 bp, Artificial
  probe
  misc_feature (1)..(25): SEQ ID NO: 6875; WAN024BQZ_at; Start 46; Stop 70
aaataccgctgcgtaaaagatacgg

SEQ ID NO: 90900 - DNA, 25 bp, Artificial
  probe
  misc_feature (1)..(25): SEQ ID NO: 6875; WAN024BQZ_at; Start 42; Stop 66
cgaaaaataccgctgcgtaaaagat

SEQ ID NO: 90901 - DNA, 25 bp, Artificial
  probe
  misc_feature (1)..(25): SEQ ID NO: 6875; WAN024BQZ_at; Start 6; Stop 30
taaaatgagaatatcaccggaattg

SEQ ID NO: 90902 - DNA, 25 bp, Artificial
  probe
  misc_feature (1)..(25): SEQ ID NO: 6875; WAN024BQZ_at; Start 39; Stop 63
gatcgaaaaataccgctgcgtaaaa

SEQ ID NO: 90903 - DNA, 25 bp, Artificial
  probe
  misc_feature (1)..(25): SEQ ID NO: 6875; WAN024BQZ_at; Start 36; Stop 60
actgatcgaaaaataccgctgcgta

SEQ ID NO: 90904 - DNA, 25 bp, Artificial
  probe
  misc_feature (1)..(25): SEQ ID NO: 6875; WAN024BQZ_at; Start 8; Stop 32
aaatgagaatatcaccggaattgaa

SEQ ID NO: 90905 - DNA, 25 bp, Artificial
  probe
  misc_feature (1)..(25): SEQ ID NO: 6875; WAN024BQZ_at; Start 3; Stop 27
ggctaaaatgagaatatcaccggaa

SEQ ID NO: 90906 - DNA, 25 bp, Artificial
  probe
  misc_feature (1)..(25): SEQ ID NO: 6875; WAN024BQZ_at; Start 43; Stop 67
gaaaaataccgctgcgtaaaagata

SEQ ID NO: 90907 - DNA, 25 bp, Artificial
  probe
  misc_feature (1)..(25): SEQ ID NO: 6875; WAN024BQZ_at; Start 16; Stop 40
atatcaccggaattgaaaaaactga

SEQ ID NO: 90908 - DNA, 25 bp, Artificial
  probe
  misc_feature (1)..(25): SEQ ID NO: 6875; WAN024BQZ_at; Start 57; Stop 81
cgtaaaagatacggaaggaatgtct

SEQ ID NO: 90909 - DNA, 25 bp, Artificial
  probe
  misc_feature (1)..(25): SEQ ID NO: 6875; WAN024BQZ_at; Start 2; Stop 26
tggctaaaatgagaatatcaccgga

SEQ ID NO: 90910 - DNA, 25 bp, Artificial
  probe
  misc_feature (1)..(25): SEQ ID NO: 6875; WAN024BQZ_at; Start 53; Stop 77
gctgcgtaaaagatacggaaggaat

SEQ ID NO: 90911 - DNA, 25 bp, Artificial
  probe
  misc_feature (1)..(25): SEQ ID NO: 6875; WAN024BQZ_at; Start 51; Stop 75
ccgctgcgtaaaagatacggaagga

SEQ ID NO: 90912 - DNA, 25 bp, Artificial
  probe
  misc_feature (1)..(25): SEQ ID NO: 6875; WAN024BQZ_at; Start 10; Stop 34
atgagaatatcaccggaattgaaaa

SEQ ID NO: 90913 - DNA, 25 bp, Artificial
  probe
  misc_feature (1)..(25): SEQ ID NO: 6875; WAN024BQZ_at; Start 47; Stop 71
aataccgctgcgtaaaagatacgga

SEQ ID NO: 90914 - DNA, 25 bp, Artificial
  probe
  misc_feature (1)..(25): SEQ ID NO: 6875; WAN024BQZ_at; Start 54; Stop 78
ctgcgtaaaagatacggaaggaatg

SEQ ID NO: 90915 - DNA, 25 bp, Artificial
  probe
  misc_feature (1)..(25): SEQ ID NO: 6875; WAN024BQZ_at; Start 52; Stop 76
cgctgcgtaaaagatacggaaggaa

SEQ ID NO: 90916 - DNA, 25 bp, Artificial
  probe
  misc_feature (1)..(25): SEQ ID NO: 6508; WAN024BR2_at; Start 141; Stop 165
gattgcctttattgaaggaacgttc

SEQ ID NO: 90917 - DNA, 25 bp, Artificial
  probe
  misc_feature (1)..(25): SEQ ID NO: 6508; WAN024BR2_at; Start 103; Stop 127
gacatcatcccacaattacgtagct

SEQ ID NO: 90918 - DNA, 25 bp, Artificial
  probe
  misc_feature (1)..(25): SEQ ID NO: 6508; WAN024BR2_at; Start 29; Stop 53
ttgcctgtatgggtgtatctcttgc

SEQ ID NO: 90919 - DNA, 25 bp, Artificial
  probe
  misc_feature (1)..(25): SEQ ID NO: 6508; WAN024BR2_at; Start 50; Stop 74
ttgcagaaggtatgttgatgaacgg

SEQ ID NO: 90920 - DNA, 25 bp, Artificial
  probe
  misc_feature (1)..(25): SEQ ID NO: 6508; WAN024BR2_at; Start 66; Stop 90
gatgaacggtttgttcaaatcagca

SEQ ID NO: 90921 - DNA, 25 bp, Artificial
  probe
  misc_feature (1)..(25): SEQ ID NO: 6508; WAN024BR2_at; Start 169; Stop 193
gttaccctcgtcttttcattcgtca

SEQ ID NO: 90922 - DNA, 25 bp, Artificial
  probe
  misc_feature (1)..(25): SEQ ID NO: 6508; WAN024BR2_at; Start 57; Stop 81
aggtatgttgatgaacggtttgttc

SEQ ID NO: 90923 - DNA, 25 bp, Artificial
  probe
  misc_feature (1)..(25): SEQ ID NO: 6508; WAN024BR2_at; Start 74; Stop 98
gtttgttcaaatcagcagctcgcca

SEQ ID NO: 90924 - DNA, 25 bp, Artificial
  probe
  misc_feature (1)..(25): SEQ ID NO: 6508; WAN024BR2_at; Start 73; Stop 97
ggtttgttcaaatcagcagctcgcc

SEQ ID NO: 90925 - DNA, 25 bp, Artificial
  probe
  misc_feature (1)..(25): SEQ ID NO: 6508; WAN024BR2_at; Start 38; Stop 62
tgggtgtatctcttgcagaaggtat

SEQ ID NO: 90926 - DNA, 25 bp, Artificial
  probe
  misc_feature (1)..(25): SEQ ID NO: 6508; WAN024BR2_at; Start 21; Stop 45
tctttgtcttgcctgtatgggtgta

SEQ ID NO: 90927 - DNA, 25 bp, Artificial
  probe
  misc_feature (1)..(25): SEQ ID NO: 6508; WAN024BR2_at; Start 32; Stop 56
cctgtatgggtgtatctcttgcaga

SEQ ID NO: 90928 - DNA, 25 bp, Artificial
  probe
  misc_feature (1)..(25): SEQ ID NO: 6508; WAN024BR2_at; Start 17; Stop 41
tcggtctttgtcttgcctgtatggg

SEQ ID NO: 90929 - DNA, 25 bp, Artificial
  probe
  misc_feature (1)..(25): SEQ ID NO: 6508; WAN024BR2_at; Start 25; Stop 49
tgtcttgcctgtatgggtgtatctc

SEQ ID NO: 90930 - DNA, 25 bp, Artificial
  probe
  misc_feature (1)..(25): SEQ ID NO: 6508; WAN024BR2_at; Start 82; Stop 106
aaatcagcagctcgccaaccagaca

SEQ ID NO: 90931 - DNA, 25 bp, Artificial
  probe
  misc_feature (1)..(25): SEQ ID NO: 6508; WAN024BR2_at; Start 98; Stop 122
aaccagacatcatcccacaattacg

SEQ ID NO: 90932 - DNA, 25 bp, Artificial
  probe
  misc_feature (1)..(25): SEQ ID NO: 6508; WAN024BR2_at; Start 177; Stop 201
cgtcttttcattcgtcatcaaatag

SEQ ID NO: 90933 - DNA, 25 bp, Artificial
  probe
  misc_feature (1)..(25): SEQ ID NO: 6508; WAN024BR2_at; Start 144; Stop 168
tgcctttattgaaggaacgttcttg

SEQ ID NO: 90934 - DNA, 25 bp, Artificial
  probe
  misc_feature (1)..(25): SEQ ID NO: 6508; WAN024BR2_at; Start 11; Stop 35
catttttcggtctttgtcttgcctg

SEQ ID NO: 90935 - DNA, 25 bp, Artificial
  probe
  misc_feature (1)..(25): SEQ ID NO: 6508; WAN024BR2_at; Start 116; Stop 140
aattacgtagcttaatgatcatggg

SEQ ID NO: 90936 - DNA, 25 bp, Artificial
  probe
  misc_feature (1)..(25): SEQ ID NO: 6508; WAN024BR2_at; Start 80; Stop 104
tcaaatcagcagctcgccaaccaga

SEQ ID NO: 90937 - DNA, 25 bp, Artificial
  probe
  misc_feature (1)..(25): SEQ ID NO: 6508; WAN024BR2_at; Start 48; Stop 72
tcttgcagaaggtatgttgatgaac

SEQ ID NO: 90938 - DNA, 25 bp, Artificial
  probe
  misc_feature (1)..(25): SEQ ID NO: 6508; WAN024BR2_at; Start 108; Stop 132
catcccacaattacgtagcttaatg

SEQ ID NO: 90939 - DNA, 25 bp, Artificial
  probe
  misc_feature (1)..(25): SEQ ID NO: 6508; WAN024BR2_at; Start 125; Stop 149
gcttaatgatcatggggattgcctt

SEQ ID NO: 90940 - DNA, 25 bp, Artificial
  probe
  misc_feature (1)..(25): SEQ ID NO: 6508; WAN024BR2_at; Start 69; Stop 93
gaacggtttgttcaaatcagcagct

SEQ ID NO: 90941 - DNA, 25 bp, Artificial
  probe
  misc_feature (1)..(25): SEQ ID NO: 6508; WAN024BR2_at; Start 46; Stop 70
tctcttgcagaaggtatgttgatga

SEQ ID NO: 90942 - DNA, 25 bp, Artificial
  probe
  misc_feature (1)..(25): SEQ ID NO: 6508; WAN024BR2_at; Start 36; Stop 60
tatgggtgtatctcttgcagaaggt

SEQ ID NO: 90943 - DNA, 25 bp, Artificial
  probe
  misc_feature (1)..(25): SEQ ID NO: 6508; WAN024BR2_at; Start 105; Stop 129
catcatcccacaattacgtagctta

SEQ ID NO: 90944 - DNA, 25 bp, Artificial
  probe
  misc_feature (1)..(25): SEQ ID NO: 6508; WAN024BR2_at; Start 174; Stop 198
cctcgtcttttcattcgtcatcaaa

SEQ ID NO: 90945 - DNA, 25 bp, Artificial
  probe
  misc_feature (1)..(25): SEQ ID NO: 6508; WAN024BR2_at; Start 19; Stop 43
ggtctttgtcttgcctgtatgggtg

SEQ ID NO: 90946 - DNA, 25 bp, Artificial
  probe
  misc_feature (1)..(25): SEQ ID NO: 6508; WAN024BR2_at; Start 112; Stop 136
ccacaattacgtagcttaatgatca

SEQ ID NO: 90947 - DNA, 25 bp, Artificial
  probe
  misc_feature (1)..(25): SEQ ID NO: 6508; WAN024BR2_at; Start 42; Stop 66
tgtatctcttgcagaaggtatgttg

SEQ ID NO: 90948 - DNA, 25 bp, Artificial
  probe
  misc_feature (1)..(25): SEQ ID NO: 6508; WAN024BR2_at; Start 101; Stop 125
cagacatcatcccacaattacgtag

SEQ ID NO: 90949 - DNA, 25 bp, Artificial
  probe
  misc_feature (1)..(25): SEQ ID NO: 6508; WAN024BR2_at; Start 77; Stop 101
tgttcaaatcagcagctcgccaacc

SEQ ID NO: 90950 - DNA, 25 bp, Artificial
  probe
  misc_feature (1)..(25): SEQ ID NO: 6335; WAN024BR3_at; Start 1206; Stop 1230
ccttgaggaaaaataccatgtggag

SEQ ID NO: 90951 - DNA, 25 bp, Artificial
  probe
  misc_feature (1)..(25): SEQ ID NO: 6335; WAN024BR3_at; Start 1641; Stop 1665
gcaggaatatctctcacgggcgtat

SEQ ID NO: 90952 - DNA, 25 bp, Artificial
  probe
  misc_feature (1)..(25): SEQ ID NO: 6335; WAN024BR3_at; Start 107; Stop 131
tagataaaggcacaacaaggacaga

SEQ ID NO: 90953 - DNA, 25 bp, Artificial
  probe
  misc_feature (1)..(25): SEQ ID NO: 6335; WAN024BR3_at; Start 1189; Stop 1213
gaagtcatttgtgccatccttgagg

SEQ ID NO: 90954 - DNA, 25 bp, Artificial
  probe
  misc_feature (1)..(25): SEQ ID NO: 6335; WAN024BR3_at; Start 502; Stop 526
gacaatgacgatatggaacagtggg

SEQ ID NO: 90955 - DNA, 25 bp, Artificial
  probe
  misc_feature (1)..(25): SEQ ID NO: 6335; WAN024BR3_at; Start 730; Stop 754
gaaggtcaatctgaactatgcgggc

SEQ ID NO: 90956 - DNA, 25 bp, Artificial
  probe
  misc_feature (1)..(25): SEQ ID NO: 6335; WAN024BR3_at; Start 209; Stop 233
tcaacattatagatacgccaggcca

SEQ ID NO: 90957 - DNA, 25 bp, Artificial
  probe
  misc_feature (1)..(25): SEQ ID NO: 6335; WAN024BR3_at; Start 156; Stop 180
gggaatcactatccagacagcagtg

SEQ ID NO: 90958 - DNA, 25 bp, Artificial
  probe
  misc_feature (1)..(25): SEQ ID NO: 6335; WAN024BR3_at; Start 875; Stop 899
cagagatgtgtgttccgacaaacgg

SEQ ID NO: 90959 - DNA, 25 bp, Artificial
  probe
  misc_feature (1)..(25): SEQ ID NO: 6335; WAN024BR3_at; Start 1865; Stop 1889
gccgcccgaatagccgtatagataa

SEQ ID NO: 90960 - DNA, 25 bp, Artificial
  probe
  misc_feature (1)..(25): SEQ ID NO: 6335; WAN024BR3_at; Start 1885; Stop 1909
gataaggttcggcatatgttccaca

SEQ ID NO: 90961 - DNA, 25 bp, Artificial
  probe
  misc_feature (1)..(25): SEQ ID NO: 6335; WAN024BR3_at; Start 342; Stop 366
tgcactacagacaatgaagattccg

SEQ ID NO: 90962 - DNA, 25 bp, Artificial
  probe
  misc_feature (1)..(25): SEQ ID NO: 6335; WAN024BR3_at; Start 86; Stop 110
caattgcagaaccagggagcgtaga

SEQ ID NO: 90963 - DNA, 25 bp, Artificial
  probe
  misc_feature (1)..(25): SEQ ID NO: 6335; WAN024BR3_at; Start 768; Stop 792
tgaatattcagagaaaaggcggcgt

SEQ ID NO: 90964 - DNA, 25 bp, Artificial
  probe
  misc_feature (1)..(25): SEQ ID NO: 6335; WAN024BR3_at; Start 813; Stop 837
tagcggaacattgcatttgagggat

SEQ ID NO: 90965 - DNA, 25 bp, Artificial
  probe
  misc_feature (1)..(25): SEQ ID NO: 6335; WAN024BR3_at; Start 1725; Stop 1749
cattctgaaaggagaaatccctgcc

SEQ ID NO: 90966 - DNA, 25 bp, Artificial
  probe
  misc_feature (1)..(25): SEQ ID NO: 6335; WAN024BR3_at; Start 302; Stop 326
caaaggatggcatacaggcacagac

SEQ ID NO: 90967 - DNA, 25 bp, Artificial
  probe
  misc_feature (1)..(25): SEQ ID NO: 6335; WAN024BR3_at; Start 173; Stop 197
cagcagtgacatcttttcagtggga

SEQ ID NO: 90968 - DNA, 25 bp, Artificial
  probe
  misc_feature (1)..(25): SEQ ID NO: 6335; WAN024BR3_at; Start 1095; Stop 1119
tacagaaatttcagatggcgaccct

SEQ ID NO: 90969 - DNA, 25 bp, Artificial
  probe
  misc_feature (1)..(25): SEQ ID NO: 6335; WAN024BR3_at; Start 17; Stop 41
taggcattctggctcacgttgacgc

SEQ ID NO: 90970 - DNA, 25 bp, Artificial
  probe
  misc_feature (1)..(25): SEQ ID NO: 6335; WAN024BR3_at; Start 462; Stop 486
gaagcaaaaggttgggcagcatccc

SEQ ID NO: 90971 - DNA, 25 bp, Artificial
  probe
  misc_feature (1)..(25): SEQ ID NO: 6335; WAN024BR3_at; Start 984; Stop 1008
gaacgaaatgctgttgccgcagaga

SEQ ID NO: 90972 - DNA, 25 bp, Artificial
  probe
  misc_feature (1)..(25): SEQ ID NO: 6335; WAN024BR3_at; Start 36; Stop 60
tgacgcaggaaagacaacattaacg

SEQ ID NO: 90973 - DNA, 25 bp, Artificial
  probe
  misc_feature (1)..(25): SEQ ID NO: 6335; WAN024BR3_at; Start 1666; Stop 1690
catgatgccccaaggtattgtgcag

SEQ ID NO: 90974 - DNA, 25 bp, Artificial
  probe
  misc_feature (1)..(25): SEQ ID NO: 6335; WAN024BR3_at; Start 1330; Stop 1354
tctgtcgggttgtccatagagccgc

SEQ ID NO: 90975 - DNA, 25 bp, Artificial
  probe
  misc_feature (1)..(25): SEQ ID NO: 6335; WAN024BR3_at; Start 1621; Stop 1645
cactttgaaatttatgcaccgcagg

SEQ ID NO: 90976 - DNA, 25 bp, Artificial
  probe
  misc_feature (1)..(25): SEQ ID NO: 6335; WAN024BR3_at; Start 907; Stop 931
tattcatccgatacagcctgctctg

SEQ ID NO: 90977 - DNA, 25 bp, Artificial
  probe
  misc_feature (1)..(25): SEQ ID NO: 6335; WAN024BR3_at; Start 1355; Stop 1379
tccctattggaagcggagtgcagta

SEQ ID NO: 90978 - DNA, 25 bp, Artificial
  probe
  misc_feature (1)..(25): SEQ ID NO: 6335; WAN024BR3_at; Start 652; Stop 676
cacggaagtgctaaaaacaatctgg

SEQ ID NO: 90979 - DNA, 25 bp, Artificial
  probe
  misc_feature (1)..(25): SEQ ID NO: 6335; WAN024BR3_at; Start 1811; Stop 1835
tgacagagttaaaaggataccagcc

SEQ ID NO: 90980 - DNA, 25 bp, Artificial
  probe
  misc_feature (1)..(25): SEQ ID NO: 6335; WAN024BR3_at; Start 1288; Stop 1312
tataccatccacatagaagtcccgc

SEQ ID NO: 90981 - DNA, 25 bp, Artificial
  probe
  misc_feature (1)..(25): SEQ ID NO: 6335; WAN024BR3_at; Start 1783; Stop 1807
tatttcacaaatgggcagggagtct

SEQ ID NO: 90982 - DNA, 25 bp, Artificial
  probe
  misc_feature (1)..(25): SEQ ID NO: 6335; WAN024BR3_at; Start 189; Stop 213
tcagtgggaggatgtaaaagtcaac

SEQ ID NO: 90983 - DNA, 25 bp, Artificial
  probe
  misc_feature (1)..(25): SEQ ID NO: 6335; WAN024BR3_at; Start 1556; Stop 1580
tttcccctatcgtattggagcaggc

SEQ ID NO: 90984 - DNA, 25 bp, Artificial
  probe
  misc_feature (1)..(25): SEQ ID NO: 6936; WAN024BR4_at; Start 403; Stop 427
gactttgcatcatgggtgtttggaa

SEQ ID NO: 90985 - DNA, 25 bp, Artificial
  probe
  misc_feature (1)..(25): SEQ ID NO: 6936; WAN024BR4_at; Start 628; Stop 652
cgcattatagggaaaatagttggga

SEQ ID NO: 90986 - DNA, 25 bp, Artificial
  probe
  misc_feature (1)..(25): SEQ ID NO: 6936; WAN024BR4_at; Start 38; Stop 62
ggccaaggattatctcaatctcact

SEQ ID NO: 90987 - DNA, 25 bp, Artificial
  probe
  misc_feature (1)..(25): SEQ ID NO: 6936; WAN024BR4_at; Start 530; Stop 554
catatattaagaaagtgtatcgtga

SEQ ID NO: 90988 - DNA, 25 bp, Artificial
  probe
  misc_feature (1)..(25): SEQ ID NO: 6936; WAN024BR4_at; Start 574; Stop 598
gtttcactcaatcggaactattcag

SEQ ID NO: 90989 - DNA, 25 bp, Artificial
  probe
  misc_feature (1)..(25): SEQ ID NO: 6936; WAN024BR4_at; Start 121; Stop 145
caaaataatctaagcaaattgagtg

SEQ ID NO: 90990 - DNA, 25 bp, Artificial
  probe
  misc_feature (1)..(25): SEQ ID NO: 6936; WAN024BR4_at; Start 229; Stop 253
gaagcaacacttcattatgctacag

SEQ ID NO: 90991 - DNA, 25 bp, Artificial
  probe
  misc_feature (1)..(25): SEQ ID NO: 6936; WAN024BR4_at; Start 246; Stop 270
tgctacagaactattgaacaaacag

SEQ ID NO: 90992 - DNA, 25 bp, Artificial
  probe
  misc_feature (1)..(25): SEQ ID NO: 6936; WAN024BR4_at; Start 448; Stop 472
gaagatggttctgtagcccttatta

SEQ ID NO: 90993 - DNA, 25 bp, Artificial
  probe
  misc_feature (1)..(25): SEQ ID NO: 6936; WAN024BR4_at; Start 53; Stop 77
caatctcacttgcatccagttggga

SEQ ID NO: 90994 - DNA, 25 bp, Artificial
  probe
  misc_feature (1)..(25): SEQ ID NO: 6936; WAN024BR4_at; Start 259; Stop 283
ttgaacaaacagaatgcgaaggttg

SEQ ID NO: 90995 - DNA, 25 bp, Artificial
  probe
  misc_feature (1)..(25): SEQ ID NO: 6936; WAN024BR4_at; Start 588; Stop 612
gaactattcagataagtttgcgcct

SEQ ID NO: 90996 - DNA, 25 bp, Artificial
  probe
  misc_feature (1)..(25): SEQ ID NO: 6936; WAN024BR4_at; Start 145; Stop 169
gagattttgaatgtagaccctcgat

SEQ ID NO: 90997 - DNA, 25 bp, Artificial
  probe
  misc_feature (1)..(25): SEQ ID NO: 6936; WAN024BR4_at; Start 23; Stop 47
caggaaaaaagagaaggccaaggat

SEQ ID NO: 90998 - DNA, 25 bp, Artificial
  probe
  misc_feature (1)..(25): SEQ ID NO: 6936; WAN024BR4_at; Start 419; Stop 443
tgtttggaaattcaatggaaccgac

SEQ ID NO: 90999 - DNA, 25 bp, Artificial
  probe
  misc_feature (1)..(25): SEQ ID NO: 6936; WAN024BR4_at; Start 1; Stop 25
atggtttcacctactaaattaacag

SEQ ID NO: 91000 - DNA, 25 bp, Artificial
  probe
  misc_feature (1)..(25): SEQ ID NO: 6936; WAN024BR4_at; Start 559; Stop 583
aatgggcttcgtttagtttcactca

SEQ ID NO: 91001 - DNA, 25 bp, Artificial
  probe
  misc_feature (1)..(25): SEQ ID NO: 6936; WAN024BR4_at; Start 158; Stop 182
tagaccctcgatattttgaatcaga

SEQ ID NO: 91002 - DNA, 25 bp, Artificial
  probe
  misc_feature (1)..(25): SEQ ID NO: 6936; WAN024BR4_at; Start 616; Stop 640
gatgagaatcctcgcattataggga

SEQ ID NO: 91003 - DNA, 25 bp, Artificial
  probe
  misc_feature (1)..(25): SEQ ID NO: 6936; WAN024BR4_at; Start 545; Stop 569
tgtatcgtgaagaaaatgggcttcg

SEQ ID NO: 91004 - DNA, 25 bp, Artificial
  probe
  misc_feature (1)..(25): SEQ ID NO: 6936; WAN024BR4_at; Start 275; Stop 299
cgaaggttgtagaaattcctgagcg

SEQ ID NO: 91005 - DNA, 25 bp, Artificial
  probe
  misc_feature (1)..(25): SEQ ID NO: 6936; WAN024BR4_at; Start 431; Stop 455
caatggaaccgacatatgaagatgg

SEQ ID NO: 91006 - DNA, 25 bp, Artificial
  probe
  misc_feature (1)..(25): SEQ ID NO: 6936; WAN024BR4_at; Start 459; Stop 483
tgtagcccttattaagcaaacggga

SEQ ID NO: 91007 - DNA, 25 bp, Artificial
  probe
  misc_feature (1)..(25): SEQ ID NO: 6936; WAN024BR4_at; Start 602; Stop 626
agtttgcgccttatgatgagaatcc

SEQ ID NO: 91008 - DNA, 25 bp, Artificial
  probe
  misc_feature (1)..(25): SEQ ID NO: 6936; WAN024BR4_at; Start 215; Stop 239
cggaaaggaatcaagaagcaacact

SEQ ID NO: 91009 - DNA, 25 bp, Artificial
  probe
  misc_feature (1)..(25): SEQ ID NO: 6936; WAN024BR4_at; Start 648; Stop 672
tgggaactttatgcctttagaggac

SEQ ID NO: 91010 - DNA, 25 bp, Artificial
  probe
  misc_feature (1)..(25): SEQ ID NO: 6936; WAN024BR4_at; Start 291; Stop 315
tcctgagcgttttgcttataaagtt

SEQ ID NO: 91011 - DNA, 25 bp, Artificial
  probe
  misc_feature (1)..(25): SEQ ID NO: 6936; WAN024BR4_at; Start 354; Stop 378
tgatgatggtaattacgatacagtt

SEQ ID NO: 91012 - DNA, 25 bp, Artificial
  probe
  misc_feature (1)..(25): SEQ ID NO: 6936; WAN024BR4_at; Start 333; Stop 357
tggtacaggaacagcttattttgat

SEQ ID NO: 91013 - DNA, 25 bp, Artificial
  probe
  misc_feature (1)..(25): SEQ ID NO: 6936; WAN024BR4_at; Start 474; Stop 498
gcaaacgggatttgattatgacggg

SEQ ID NO: 91014 - DNA, 25 bp, Artificial
  probe
  misc_feature (1)..(25): SEQ ID NO: 6936; WAN024BR4_at; Start 202; Stop 226
tatctcaaactaacggaaaggaatc

SEQ ID NO: 91015 - DNA, 25 bp, Artificial
  probe
  misc_feature (1)..(25): SEQ ID NO: 6936; WAN024BR4_at; Start 67; Stop 91
tccagttgggaaataatagatcttc

SEQ ID NO: 91016 - DNA, 25 bp, Artificial
  probe
  misc_feature (1)..(25): SEQ ID NO: 6936; WAN024BR4_at; Start 503; Stop 527
tctatgccatagattgggatggtca

SEQ ID NO: 91017 - DNA, 25 bp, Artificial
  probe
  misc_feature (1)..(25): SEQ ID NO: 6936; WAN024BR4_at; Start 318; Stop 342
cgaaaaattatcagctggtacagga

SEQ ID NO: 91018 - DNA, 25 bp, Artificial
  probe
  misc_feature (1)..(25): SEQ ID NO: 7054; WAN024BR5_at; Start 1266; Stop 1290
tgctagaagcaaactcattggtggt

SEQ ID NO: 91019 - DNA, 25 bp, Artificial
  probe
  misc_feature (1)..(25): SEQ ID NO: 7054; WAN024BR5_at; Start 131; Stop 155
taccatttgatgtaaagactcgcaa

SEQ ID NO: 91020 - DNA, 25 bp, Artificial
  probe
  misc_feature (1)..(25): SEQ ID NO: 7054; WAN024BR5_at; Start 499; Stop 523
gccaatcccttattagctaagctgg

SEQ ID NO: 91021 - DNA, 25 bp, Artificial
  probe
  misc_feature (1)..(25): SEQ ID NO: 7054; WAN024BR5_at; Start 1234; Stop 1258
ggtaatgccctagatcaagcttcta

SEQ ID NO: 91022 - DNA, 25 bp, Artificial
  probe
  misc_feature (1)..(25): SEQ ID NO: 7054; WAN024BR5_at; Start 235; Stop 259
tcaaccgtgattgttccccgagaat

SEQ ID NO: 91023 - DNA, 25 bp, Artificial
  probe
  misc_feature (1)..(25): SEQ ID NO: 7054; WAN024BR5_at; Start 546; Stop 570
gactccgacaatgagagccaattgg

SEQ ID NO: 91024 - DNA, 25 bp, Artificial
  probe
  misc_feature (1)..(25): SEQ ID NO: 7054; WAN024BR5_at; Start 247; Stop 271
gttccccgagaatggatacttacca

SEQ ID NO: 91025 - DNA, 25 bp, Artificial
  probe
  misc_feature (1)..(25): SEQ ID NO: 7054; WAN024BR5_at; Start 1222; Stop 1246
tcactattgaaaggtaatgccctag

SEQ ID NO: 91026 - DNA, 25 bp, Artificial
  probe
  misc_feature (1)..(25): SEQ ID NO: 7054; WAN024BR5_at; Start 529; Stop 553
gataatgaagctaaaaagactccga

SEQ ID NO: 91027 - DNA, 25 bp, Artificial
  probe
  misc_feature (1)..(25): SEQ ID NO: 7054; WAN024BR5_at; Start 1183; Stop 1207
tccgcaatcgatgctattcgaacag

SEQ ID NO: 91028 - DNA, 25 bp, Artificial
  probe
  misc_feature (1)..(25): SEQ ID NO: 7054; WAN024BR5_at; Start 1052; Stop 1076
ttcacactaaatatacttcaggagc

SEQ ID NO: 91029 - DNA, 25 bp, Artificial
  probe
  misc_feature (1)..(25): SEQ ID NO: 7054; WAN024BR5_at; Start 270; Stop 294
cattgctgtcaacatggagattcaa

SEQ ID NO: 91030 - DNA, 25 bp, Artificial
  probe
  misc_feature (1)..(25): SEQ ID NO: 7054; WAN024BR5_at; Start 1294; Stop 1318
tcagctggaggattagatggactaa

SEQ ID NO: 91031 - DNA, 25 bp, Artificial
  probe
  misc_feature (1)..(25): SEQ ID NO: 7054; WAN024BR5_at; Start 220; Stop 244
gaggaatgggcaaaatcaaccgtga

SEQ ID NO: 91032 - DNA, 25 bp, Artificial
  probe
  misc_feature (1)..(25): SEQ ID NO: 7054; WAN024BR5_at; Start 111; Stop 135
cgttggacgttcctatgatttacca

SEQ ID NO: 91033 - DNA, 25 bp, Artificial
  probe
  misc_feature (1)..(25): SEQ ID NO: 7054; WAN024BR5_at; Start 1201; Stop 1225
cgaacagaatttgggttcacttcac

SEQ ID NO: 91034 - DNA, 25 bp, Artificial
  probe
  misc_feature (1)..(25): SEQ ID NO: 7054; WAN024BR5_at; Start 21; Stop 45
tcggctttgtgttatgagtcgtgca

SEQ ID NO: 91035 - DNA, 25 bp, Artificial
  probe
  misc_feature (1)..(25): SEQ ID NO: 7054; WAN024BR5_at; Start 171; Stop 195
tgctaagaagcaaggtttaccgaca

SEQ ID NO: 91036 - DNA, 25 bp, Artificial
  probe
  misc_feature (1)..(25): SEQ ID NO: 7054; WAN024BR5_at; Start 1281; Stop 1305
cattggtggtcattcagctggagga

SEQ ID NO: 91037 - DNA, 25 bp, Artificial
  probe
  misc_feature (1)..(25): SEQ ID NO: 7054; WAN024BR5_at; Start 468; Stop 492
tggaatctattcaactgtaggcatg

SEQ ID NO: 91038 - DNA, 25 bp, Artificial
  probe
  misc_feature (1)..(25): SEQ ID NO: 7054; WAN024BR5_at; Start 1165; Stop 1189
aaagaagaaaggctccagtccgcaa

SEQ ID NO: 91039 - DNA, 25 bp, Artificial
  probe
  misc_feature (1)..(25): SEQ ID NO: 7054; WAN024BR5_at; Start 563; Stop 587
ccaattggtcctatgaggatgtcga

SEQ ID NO: 91040 - DNA, 25 bp, Artificial
  probe
  misc_feature (1)..(25): SEQ ID NO: 7054; WAN024BR5_at; Start 805; Stop 829
tcaaaagggatagggaactctcaag

SEQ ID NO: 91041 - DNA, 25 bp, Artificial
  probe
  misc_feature (1)..(25): SEQ ID NO: 7054; WAN024BR5_at; Start 946; Stop 970
catctaggctactctaaagtggaac

SEQ ID NO: 91042 - DNA, 25 bp, Artificial
  probe
  misc_feature (1)..(25): SEQ ID NO: 7054; WAN024BR5_at; Start 742; Stop 766
gagttatggttccatgccaatggga

SEQ ID NO: 91043 - DNA, 25 bp, Artificial
  probe
  misc_feature (1)..(25): SEQ ID NO: 7054; WAN024BR5_at; Start 1069; Stop 1093
tcaggagctatcaggaatgttgcgg

SEQ ID NO: 91044 - DNA, 25 bp, Artificial
  probe
  misc_feature (1)..(25): SEQ ID NO: 7054; WAN024BR5_at; Start 514; Stop 538
gctaagctggcacttgataatgaag

SEQ ID NO: 91045 - DNA, 25 bp, Artificial
  probe
  misc_feature (1)..(25): SEQ ID NO: 7054; WAN024BR5_at; Start 715; Stop 739
aaaaaagagcttggtatcatgggtc

SEQ ID NO: 91046 - DNA, 25 bp, Artificial
  probe
  misc_feature (1)..(25): SEQ ID NO: 7054; WAN024BR5_at; Start 48; Stop 72
taattctgcgggtttaatccttgct

SEQ ID NO: 91047 - DNA, 25 bp, Artificial
  probe
  misc_feature (1)..(25): SEQ ID NO: 7054; WAN024BR5_at; Start 184; Stop 208
ggtttaccgacaacgatagactatg

SEQ ID NO: 91048 - DNA, 25 bp, Artificial
  probe
  misc_feature (1)..(25): SEQ ID NO: 7054; WAN024BR5_at; Start 869; Stop 893
tcatacttcgtgagatggcagaaca

SEQ ID NO: 91049 - DNA, 25 bp, Artificial
  probe
  misc_feature (1)..(25): SEQ ID NO: 7054; WAN024BR5_at; Start 304; Stop 328
caagattttgcagcaccagatgata

SEQ ID NO: 91050 - DNA, 25 bp, Artificial
  probe
  misc_feature (1)..(25): SEQ ID NO: 7054; WAN024BR5_at; Start 207; Stop 231
tgtccgctatatagaggaatgggca

SEQ ID NO: 91051 - DNA, 25 bp, Artificial
  probe
  misc_feature (1)..(25): SEQ ID NO: 7054; WAN024BR5_at; Start 674; Stop 698
tttcgattaaagaattggctcaggc

SEQ ID NO: 91052 - DNA, 25 bp, Artificial
  probe
  misc_feature (1)..(25): SEQ ID NO: 7303; WAN024BR6_at; Start 100; Stop 124
gagaaagttctatttgttcgtcaac

SEQ ID NO: 91053 - DNA, 25 bp, Artificial
  probe
  misc_feature (1)..(25): SEQ ID NO: 7303; WAN024BR6_at; Start 171; Stop 195
tcaaagaaaagtagtatcaggtatt

SEQ ID NO: 91054 - DNA, 25 bp, Artificial
  probe
  misc_feature (1)..(25): SEQ ID NO: 7303; WAN024BR6_at; Start 88; Stop 112
ctatcattggaagagaaagttctat

SEQ ID NO: 91055 - DNA, 25 bp, Artificial
  probe
  misc_feature (1)..(25): SEQ ID NO: 7303; WAN024BR6_at; Start 223; Stop 247
tctataaaatcagacactggttttc

SEQ ID NO: 91056 - DNA, 25 bp, Artificial
  probe
  misc_feature (1)..(25): SEQ ID NO: 7303; WAN024BR6_at; Start 108; Stop 132
tctatttgttcgtcaactttatacg

SEQ ID NO: 91057 - DNA, 25 bp, Artificial
  probe
  misc_feature (1)..(25): SEQ ID NO: 7303; WAN024BR6_at; Start 37; Stop 61
cattccagttctctttgggcagaaa

SEQ ID NO: 91058 - DNA, 25 bp, Artificial
  probe
  misc_feature (1)..(25): SEQ ID NO: 7303; WAN024BR6_at; Start 132; Stop 156
gaatgtattccctgcaacttttgtt

SEQ ID NO: 91059 - DNA, 25 bp, Artificial
  probe
  misc_feature (1)..(25): SEQ ID NO: 7303; WAN024BR6_at; Start 1; Stop 25
gtggcatggctaagtggatgcttct

SEQ ID NO: 91060 - DNA, 25 bp, Artificial
  probe
  misc_feature (1)..(25): SEQ ID NO: 7303; WAN024BR6_at; Start 5; Stop 29
catggctaagtggatgcttcttttt

SEQ ID NO: 91061 - DNA, 25 bp, Artificial
  probe
  misc_feature (1)..(25): SEQ ID NO: 7303; WAN024BR6_at; Start 188; Stop 212
caggtattgttaaagagattggaaa

SEQ ID NO: 91062 - DNA, 25 bp, Artificial
  probe
  misc_feature (1)..(25): SEQ ID NO: 7303; WAN024BR6_at; Start 40; Stop 64
tccagttctctttgggcagaaaaaa

SEQ ID NO: 91063 - DNA, 25 bp, Artificial
  probe
  misc_feature (1)..(25): SEQ ID NO: 7303; WAN024BR6_at; Start 73; Stop 97
gatatctccatttccctatcattgg

SEQ ID NO: 91064 - DNA, 25 bp, Artificial
  probe
  misc_feature (1)..(25): SEQ ID NO: 7303; WAN024BR6_at; Start 259; Stop 283
tgggaagatatactcgatatacaga

SEQ ID NO: 91065 - DNA, 25 bp, Artificial
  probe
  misc_feature (1)..(25): SEQ ID NO: 7303; WAN024BR6_at; Start 192; Stop 216
tattgttaaagagattggaaaagag

SEQ ID NO: 91066 - DNA, 25 bp, Artificial
  probe
  misc_feature (1)..(25): SEQ ID NO: 7303; WAN024BR6_at; Start 267; Stop 291
tatactcgatatacagatagaaggg

SEQ ID NO: 91067 - DNA, 25 bp, Artificial
  probe
  misc_feature (1)..(25): SEQ ID NO: 7303; WAN024BR6_at; Start 251; Stop 275
gattaaaatgggaagatatactcga

SEQ ID NO: 91068 - DNA, 25 bp, Artificial
  probe
  misc_feature (1)..(25): SEQ ID NO: 7303; WAN024BR6_at; Start 180; Stop 204
agtagtatcaggtattgttaaagag

SEQ ID NO: 91069 - DNA, 25 bp, Artificial
  probe
  misc_feature (1)..(25): SEQ ID NO: 7303; WAN024BR6_at; Start 166; Stop 190
tctaatcaaagaaaagtagtatcag

SEQ ID NO: 91070 - DNA, 25 bp, Artificial
  probe
  misc_feature (1)..(25): SEQ ID NO: 7303; WAN024BR6_at; Start 127; Stop 151
tatacgaatgtattccctgcaactt

SEQ ID NO: 91071 - DNA, 25 bp, Artificial
  probe
  misc_feature (1)..(25): SEQ ID NO: 7303; WAN024BR6_at; Start 118; Stop 142
cgtcaactttatacgaatgtattcc

SEQ ID NO: 91072 - DNA, 25 bp, Artificial
  probe
  misc_feature (1)..(25): SEQ ID NO: 7303; WAN024BR6_at; Start 227; Stop 251
taaaatcagacactggttttcttcg

SEQ ID NO: 91073 - DNA, 25 bp, Artificial
  probe
  misc_feature (1)..(25): SEQ ID NO: 7303; WAN024BR6_at; Start 13; Stop 37
agtggatgcttctttttatcagaac

SEQ ID NO: 91074 - DNA, 25 bp, Artificial
  probe
  misc_feature (1)..(25): SEQ ID NO: 7303; WAN024BR6_at; Start 123; Stop 147
actttatacgaatgtattccctgca

SEQ ID NO: 91075 - DNA, 25 bp, Artificial
  probe
  misc_feature (1)..(25): SEQ ID NO: 7303; WAN024BR6_at; Start 34; Stop 58
gaacattccagttctctttgggcag

SEQ ID NO: 91076 - DNA, 25 bp, Artificial
  probe
  misc_feature (1)..(25): SEQ ID NO: 7303; WAN024BR6_at; Start 204; Stop 228
gattggaaaagagtttatatctata

SEQ ID NO: 91077 - DNA, 25 bp, Artificial
  probe
  misc_feature (1)..(25): SEQ ID NO: 7303; WAN024BR6_at; Start 80; Stop 104
ccatttccctatcattggaagagaa

SEQ ID NO: 91078 - DNA, 25 bp, Artificial
  probe
  misc_feature (1)..(25): SEQ ID NO: 7303; WAN024BR6_at; Start 280; Stop 304
cagatagaaggggaggaattacatg

SEQ ID NO: 91079 - DNA, 25 bp, Artificial
  probe
  misc_feature (1)..(25): SEQ ID NO: 7303; WAN024BR6_at; Start 237; Stop 261
cactggttttcttcgattaaaatgg

SEQ ID NO: 91080 - DNA, 25 bp, Artificial
  probe
  misc_feature (1)..(25): SEQ ID NO: 7303; WAN024BR6_at; Start 86; Stop 110
ccctatcattggaagagaaagttct

SEQ ID NO: 91081 - DNA, 25 bp, Artificial
  probe
  misc_feature (1)..(25): SEQ ID NO: 7303; WAN024BR6_at; Start 64; Stop 88
aataaagaagatatctccatttccc

SEQ ID NO: 91082 - DNA, 25 bp, Artificial
  probe
  misc_feature (1)..(25): SEQ ID NO: 7303; WAN024BR6_at; Start 20; Stop 44
gcttctttttatcagaacattccag

SEQ ID NO: 91083 - DNA, 25 bp, Artificial
  probe
  misc_feature (1)..(25): SEQ ID NO: 7303; WAN024BR6_at; Start 9; Stop 33
gctaagtggatgcttctttttatca

SEQ ID NO: 91084 - DNA, 25 bp, Artificial
  probe
  misc_feature (1)..(25): SEQ ID NO: 7303; WAN024BR6_at; Start 233; Stop 257
cagacactggttttcttcgattaaa

SEQ ID NO: 91085 - DNA, 25 bp, Artificial
  probe
  misc_feature (1)..(25): SEQ ID NO: 7303; WAN024BR6_at; Start 219; Stop 243
tatatctataaaatcagacactggt

SEQ ID NO: 91086 - DNA, 25 bp, Artificial
  probe
  misc_feature (1)..(25): SEQ ID NO: 6500; WAN024BR7_at; Start 122; Stop 146
cagatgatattttacgcacaatggc

SEQ ID NO: 91087 - DNA, 25 bp, Artificial
  probe
  misc_feature (1)..(25): SEQ ID NO: 6500; WAN024BR7_at; Start 191; Stop 215
tagacggtcgtgatcattactttgt

SEQ ID NO: 91088 - DNA, 25 bp, Artificial
  probe
  misc_feature (1)..(25): SEQ ID NO: 6500; WAN024BR7_at; Start 144; Stop 168
ggctatgtctcaaaaacattatttt

SEQ ID NO: 91089 - DNA, 25 bp, Artificial
  probe
  misc_feature (1)..(25): SEQ ID NO: 6500; WAN024BR7_at; Start 256; Stop 280
cagtatgaatatcagagacattgtt

SEQ ID NO: 91090 - DNA, 25 bp, Artificial
  probe
  misc_feature (1)..(25): SEQ ID NO: 6500; WAN024BR7_at; Start 129; Stop 153
tattttacgcacaatggctatgtct

SEQ ID NO: 91091 - DNA, 25 bp, Artificial
  probe
  misc_feature (1)..(25): SEQ ID NO: 6500; WAN024BR7_at; Start 52; Stop 76
gattcttatttacagtttgagtcag

SEQ ID NO: 91092 - DNA, 25 bp, Artificial
  probe
  misc_feature (1)..(25): SEQ ID NO: 6500; WAN024BR7_at; Start 50; Stop 74
cagattcttatttacagtttgagtc

SEQ ID NO: 91093 - DNA, 25 bp, Artificial
  probe
  misc_feature (1)..(25): SEQ ID NO: 6500; WAN024BR7_at; Start 17; Stop 41
tatatgatgataaattacagctaga

SEQ ID NO: 91094 - DNA, 25 bp, Artificial
  probe
  misc_feature (1)..(25): SEQ ID NO: 6500; WAN024BR7_at; Start 225; Stop 249
caagatgaacaaagacagtagtggt

SEQ ID NO: 91095 - DNA, 25 bp, Artificial
  probe
  misc_feature (1)..(25): SEQ ID NO: 6500; WAN024BR7_at; Start 267; Stop 291
tcagagacattgttttaatttgtaa

SEQ ID NO: 91096 - DNA, 25 bp, Artificial
  probe
  misc_feature (1)..(25): SEQ ID NO: 6500; WAN024BR7_at; Start 62; Stop 86
tacagtttgagtcagatttttacaa

SEQ ID NO: 91097 - DNA, 25 bp, Artificial
  probe
  misc_feature (1)..(25): SEQ ID NO: 6500; WAN024BR7_at; Start 76; Stop 100
gatttttacaagtattcagctttag

SEQ ID NO: 91098 - DNA, 25 bp, Artificial
  probe
  misc_feature (1)..(25): SEQ ID NO: 6500; WAN024BR7_at; Start 91; Stop 115
tcagctttagatataccattaacat

SEQ ID NO: 91099 - DNA, 25 bp, Artificial
  probe
  misc_feature (1)..(25): SEQ ID NO: 6500; WAN024BR7_at; Start 218; Stop 242
tttctatcaagatgaacaaagacag

SEQ ID NO: 91100 - DNA, 25 bp, Artificial
  probe
  misc_feature (1)..(25): SEQ ID NO: 6500; WAN024BR7_at; Start 104; Stop 128
taccattaacatttatcacagatga

SEQ ID NO: 91101 - DNA, 25 bp, Artificial
  probe
  misc_feature (1)..(25): SEQ ID NO: 6500; WAN024BR7_at; Start 126; Stop 150
tgatattttacgcacaatggctatg

SEQ ID NO: 91102 - DNA, 25 bp, Artificial
  probe
  misc_feature (1)..(25): SEQ ID NO: 6500; WAN024BR7_at; Start 240; Stop 264
cagtagtggtattagacagtatgaa

SEQ ID NO: 91103 - DNA, 25 bp, Artificial
  probe
  misc_feature (1)..(25): SEQ ID NO: 6500; WAN024BR7_at; Start 84; Stop 108
caagtattcagctttagatatacca

SEQ ID NO: 91104 - DNA, 25 bp, Artificial
  probe
  misc_feature (1)..(25): SEQ ID NO: 6500; WAN024BR7_at; Start 34; Stop 58
cagctagattatttttcagattctt

SEQ ID NO: 91105 - DNA, 25 bp, Artificial
  probe
  misc_feature (1)..(25): SEQ ID NO: 6500; WAN024BR7_at; Start 2; Stop 26
tgaatcgtaaagaattatatgatga

SEQ ID NO: 91106 - DNA, 25 bp, Artificial
  probe
  misc_feature (1)..(25): SEQ ID NO: 6500; WAN024BR7_at; Start 180; Stop 204
aagtaaatctttagacggtcgtgat

SEQ ID NO: 91107 - DNA, 25 bp, Artificial
  probe
  misc_feature (1)..(25): SEQ ID NO: 6500; WAN024BR7_at; Start 252; Stop 276
tagacagtatgaatatcagagacat

SEQ ID NO: 91108 - DNA, 25 bp, Artificial
  probe
  misc_feature (1)..(25): SEQ ID NO: 6500; WAN024BR7_at; Start 140; Stop 164
caatggctatgtctcaaaaacatta

SEQ ID NO: 91109 - DNA, 25 bp, Artificial
  probe
  misc_feature (1)..(25): SEQ ID NO: 6500; WAN024BR7_at; Start 193; Stop 217
gacggtcgtgatcattactttgttt

SEQ ID NO: 91110 - DNA, 25 bp, Artificial
  probe
  misc_feature (1)..(25): SEQ ID NO: 6500; WAN024BR7_at; Start 117; Stop 141
tatcacagatgatattttacgcaca

SEQ ID NO: 91111 - DNA, 25 bp, Artificial
  probe
  misc_feature (1)..(25): SEQ ID NO: 6500; WAN024BR7_at; Start 222; Stop 246
tatcaagatgaacaaagacagtagt

SEQ ID NO: 91112 - DNA, 25 bp, Artificial
  probe
  misc_feature (1)..(25): SEQ ID NO: 6500; WAN024BR7_at; Start 134; Stop 158
tacgcacaatggctatgtctcaaaa

SEQ ID NO: 91113 - DNA, 25 bp, Artificial
  probe
  misc_feature (1)..(25): SEQ ID NO: 6500; WAN024BR7_at; Start 137; Stop 161
gcacaatggctatgtctcaaaaaca

SEQ ID NO: 91114 - DNA, 25 bp, Artificial
  probe
  misc_feature (1)..(25): SEQ ID NO: 6500; WAN024BR7_at; Start 187; Stop 211
tctttagacggtcgtgatcattact

SEQ ID NO: 91115 - DNA, 25 bp, Artificial
  probe
  misc_feature (1)..(25): SEQ ID NO: 6500; WAN024BR7_at; Start 234; Stop 258
caaagacagtagtggtattagacag

SEQ ID NO: 91116 - DNA, 25 bp, Artificial
  probe
  misc_feature (1)..(25): SEQ ID NO: 6500; WAN024BR7_at; Start 183; Stop 207
taaatctttagacggtcgtgatcat

SEQ ID NO: 91117 - DNA, 25 bp, Artificial
  probe
  misc_feature (1)..(25): SEQ ID NO: 6500; WAN024BR7_at; Start 70; Stop 94
gagtcagatttttacaagtattcag

SEQ ID NO: 91118 - DNA, 25 bp, Artificial
  probe
  misc_feature (1)..(25): SEQ ID NO: 6500; WAN024BR7_at; Start 205; Stop 229
cattactttgttttttctatcaaga

SEQ ID NO: 91119 - DNA, 25 bp, Artificial
  probe
  misc_feature (1)..(25): SEQ ID NO: 6500; WAN024BR7_at; Start 29; Stop 53
aattacagctagattatttttcaga

SEQ ID NO: 91120 - DNA, 25 bp, Artificial
  probe
  misc_feature (1)..(25): SEQ ID NO: 6492; WAN024BR8_at; Start 55; Stop 79
aaaggaattctaaaaagatgggatg

SEQ ID NO: 91121 - DNA, 25 bp, Artificial
  probe
  misc_feature (1)..(25): SEQ ID NO: 6492; WAN024BR8_at; Start 19; Stop 43
tctgtccgaaaattccattgcagaa

SEQ ID NO: 91122 - DNA, 25 bp, Artificial
  probe
  misc_feature (1)..(25): SEQ ID NO: 6492; WAN024BR8_at; Start 196; Stop 220
gaaagtttcttaagatggaagcaaa

SEQ ID NO: 91123 - DNA, 25 bp, Artificial
  probe
  misc_feature (1)..(25): SEQ ID NO: 6492; WAN024BR8_at; Start 111; Stop 135
taaagaaatgcgagaaaacagaaca

SEQ ID NO: 91124 - DNA, 25 bp, Artificial
  probe
  misc_feature (1)..(25): SEQ ID NO: 6492; WAN024BR8_at; Start 117; Stop 141
aatgcgagaaaacagaacattttcc

SEQ ID NO: 91125 - DNA, 25 bp, Artificial
  probe
  misc_feature (1)..(25): SEQ ID NO: 6492; WAN024BR8_at; Start 143; Stop 167
tgtatgtaattaacccaacccataa

SEQ ID NO: 91126 - DNA, 25 bp, Artificial
  probe
  misc_feature (1)..(25): SEQ ID NO: 6492; WAN024BR8_at; Start 24; Stop 48
ccgaaaattccattgcagaatggcg

SEQ ID NO: 91127 - DNA, 25 bp, Artificial
  probe
  misc_feature (1)..(25): SEQ ID NO: 6492; WAN024BR8_at; Start 168; Stop 192
acttgttttcattaatctagaagga

SEQ ID NO: 91128 - DNA, 25 bp, Artificial
  probe
  misc_feature (1)..(25): SEQ ID NO: 6492; WAN024BR8_at; Start 2; Stop 26
tgaatataaaatatatatctgtccg

SEQ ID NO: 91129 - DNA, 25 bp, Artificial
  probe
  misc_feature (1)..(25): SEQ ID NO: 6492; WAN024BR8_at; Start 15; Stop 39
tatatctgtccgaaaattccattgc

SEQ ID NO: 91130 - DNA, 25 bp, Artificial
  probe
  misc_feature (1)..(25): SEQ ID NO: 6492; WAN024BR8_at; Start 21; Stop 45
tgtccgaaaattccattgcagaatg

SEQ ID NO: 91131 - DNA, 25 bp, Artificial
  probe
  misc_feature (1)..(25): SEQ ID NO: 6492; WAN024BR8_at; Start 210; Stop 234
atggaagcaaaagcggacaaaataa

SEQ ID NO: 91132 - DNA, 25 bp, Artificial
  probe
  misc_feature (1)..(25): SEQ ID NO: 6492; WAN024BR8_at; Start 91; Stop 115
tatacattgaacagatggattaaag

SEQ ID NO: 91133 - DNA, 25 bp, Artificial
  probe
  misc_feature (1)..(25): SEQ ID NO: 6492; WAN024BR8_at; Start 102; Stop 126
cagatggattaaagaaatgcgagaa

SEQ ID NO: 91134 - DNA, 25 bp, Artificial
  probe
  misc_feature (1)..(25): SEQ ID NO: 6492; WAN024BR8_at; Start 26; Stop 50
gaaaattccattgcagaatggcgta

SEQ ID NO: 91135 - DNA, 25 bp, Artificial
  probe
  misc_feature (1)..(25): SEQ ID NO: 6492; WAN024BR8_at; Start 29; Stop 53
aattccattgcagaatggcgtataa

SEQ ID NO: 91136 - DNA, 25 bp, Artificial
  probe
  misc_feature (1)..(25): SEQ ID NO: 6492; WAN024BR8_at; Start 124; Stop 148
gaaaacagaacattttccatgtatg

SEQ ID NO: 91137 - DNA, 25 bp, Artificial
  probe
  misc_feature (1)..(25): SEQ ID NO: 6492; WAN024BR8_at; Start 17; Stop 41
tatctgtccgaaaattccattgcag

SEQ ID NO: 91138 - DNA, 25 bp, Artificial
  probe
  misc_feature (1)..(25): SEQ ID NO: 6492; WAN024BR8_at; Start 71; Stop 95
gatgggatggtttaaataaatatac

SEQ ID NO: 91139 - DNA, 25 bp, Artificial
  probe
  misc_feature (1)..(25): SEQ ID NO: 6492; WAN024BR8_at; Start 193; Stop 217
tttgaaagtttcttaagatggaagc

SEQ ID NO: 91140 - DNA, 25 bp, Artificial
  probe
  misc_feature (1)..(25): SEQ ID NO: 6492; WAN024BR8_at; Start 138; Stop 162
ttccatgtatgtaattaacccaacc

SEQ ID NO: 91141 - DNA, 25 bp, Artificial
  probe
  misc_feature (1)..(25): SEQ ID NO: 6492; WAN024BR8_at; Start 134; Stop 158
cattttccatgtatgtaattaaccc

SEQ ID NO: 91142 - DNA, 25 bp, Artificial
  probe
  misc_feature (1)..(25): SEQ ID NO: 6492; WAN024BR8_at; Start 120; Stop 144
gcgagaaaacagaacattttccatg

SEQ ID NO: 91143 - DNA, 25 bp, Artificial
  probe
  misc_feature (1)..(25): SEQ ID NO: 6492; WAN024BR8_at; Start 163; Stop 187
cataaacttgttttcattaatctag

SEQ ID NO: 91144 - DNA, 25 bp, Artificial
  probe
  misc_feature (1)..(25): SEQ ID NO: 6492; WAN024BR8_at; Start 38; Stop 62
gcagaatggcgtataaaaaaggaat

SEQ ID NO: 91145 - DNA, 25 bp, Artificial
  probe
  misc_feature (1)..(25): SEQ ID NO: 6492; WAN024BR8_at; Start 199; Stop 223
agtttcttaagatggaagcaaaagc

SEQ ID NO: 91146 - DNA, 25 bp, Artificial
  probe
  misc_feature (1)..(25): SEQ ID NO: 6492; WAN024BR8_at; Start 140; Stop 164
ccatgtatgtaattaacccaaccca

SEQ ID NO: 91147 - DNA, 25 bp, Artificial
  probe
  misc_feature (1)..(25): SEQ ID NO: 6492; WAN024BR8_at; Start 33; Stop 57
ccattgcagaatggcgtataaaaaa

SEQ ID NO: 91148 - DNA, 25 bp, Artificial
  probe
  misc_feature (1)..(25): SEQ ID NO: 6492; WAN024BR8_at; Start 36; Stop 60
ttgcagaatggcgtataaaaaagga

SEQ ID NO: 91149 - DNA, 25 bp, Artificial
  probe
  misc_feature (1)..(25): SEQ ID NO: 6492; WAN024BR8_at; Start 107; Stop 131
ggattaaagaaatgcgagaaaacag

SEQ ID NO: 91150 - DNA, 25 bp, Artificial
  probe
  misc_feature (1)..(25): SEQ ID NO: 6492; WAN024BR8_at; Start 85; Stop 109
aataaatatacattgaacagatgga

SEQ ID NO: 91151 - DNA, 25 bp, Artificial
  probe
  misc_feature (1)..(25): SEQ ID NO: 6492; WAN024BR8_at; Start 180; Stop 204
taatctagaaggatttgaaagtttc

SEQ ID NO: 91152 - DNA, 25 bp, Artificial
  probe
  misc_feature (1)..(25): SEQ ID NO: 6492; WAN024BR8_at; Start 57; Stop 81
aggaattctaaaaagatgggatggt

SEQ ID NO: 91153 - DNA, 25 bp, Artificial
  probe
  misc_feature (1)..(25): SEQ ID NO: 6492; WAN024BR8_at; Start 98; Stop 122
tgaacagatggattaaagaaatgcg

SEQ ID NO: 91154 - DNA, 25 bp, Artificial
  probe
  misc_feature (1)..(25): SEQ ID NO: 6566; WAN024BR9_at; Start 789; Stop 813
ccaagcagctggaggatttccacat

SEQ ID NO: 91155 - DNA, 25 bp, Artificial
  probe
  misc_feature (1)..(25): SEQ ID NO: 6566; WAN024BR9_at; Start 904; Stop 928
gaataccctgtagactatttagcct

SEQ ID NO: 91156 - DNA, 25 bp, Artificial
  probe
  misc_feature (1)..(25): SEQ ID NO: 6566; WAN024BR9_at; Start 315; Stop 339
taccgctaatgattttgttccagag

SEQ ID NO: 91157 - DNA, 25 bp, Artificial
  probe
  misc_feature (1)..(25): SEQ ID NO: 6566; WAN024BR9_at; Start 777; Stop 801
taaagactgttaccaagcagctgga

SEQ ID NO: 91158 - DNA, 25 bp, Artificial
  probe
  misc_feature (1)..(25): SEQ ID NO: 6566; WAN024BR9_at; Start 1317; Stop 1341
gaaagcggttttcttagtgacacca

SEQ ID NO: 91159 - DNA, 25 bp, Artificial
  probe
  misc_feature (1)..(25): SEQ ID NO: 6566; WAN024BR9_at; Start 943; Stop 967
tctaaatggacgcaaggaaatatgg

SEQ ID NO: 91160 - DNA, 25 bp, Artificial
  probe
  misc_feature (1)..(25): SEQ ID NO: 6566; WAN024BR9_at; Start 75; Stop 99
gatgccagcatttattcacaccgtt

SEQ ID NO: 91161 - DNA, 25 bp, Artificial
  probe
  misc_feature (1)..(25): SEQ ID NO: 6566; WAN024BR9_at; Start 1003; Stop 1027
tctaaactaaaatggcaggagaagt

SEQ ID NO: 91162 - DNA, 25 bp, Artificial
  probe
  misc_feature (1)..(25): SEQ ID NO: 6566; WAN024BR9_at; Start 637; Stop 661
gcgactcatgttgcttctaggaaca

SEQ ID NO: 91163 - DNA, 25 bp, Artificial
  probe
  misc_feature (1)..(25): SEQ ID NO: 6566; WAN024BR9_at; Start 701; Stop 725
cgcattggccagtgtatcagaaagt

SEQ ID NO: 91164 - DNA, 25 bp, Artificial
  probe
  misc_feature (1)..(25): SEQ ID NO: 6566; WAN024BR9_at; Start 417; Stop 441
taaacagcaggtagatgagtttgct

SEQ ID NO: 91165 - DNA, 25 bp, Artificial
  probe
  misc_feature (1)..(25): SEQ ID NO: 6566; WAN024BR9_at; Start 103; Stop 127
gacgccagtgagtatcaaggagtat

SEQ ID NO: 91166 - DNA, 25 bp, Artificial
  probe
  misc_feature (1)..(25): SEQ ID NO: 6566; WAN024BR9_at; Start 462; Stop 486
tatcagaagagatgatcgaaatggc

SEQ ID NO: 91167 - DNA, 25 bp, Artificial
  probe
  misc_feature (1)..(25): SEQ ID NO: 6566; WAN024BR9_at; Start 36; Stop 60
tacattgttactgtcatggttggca

SEQ ID NO: 91168 - DNA, 25 bp, Artificial
  probe
  misc_feature (1)..(25): SEQ ID NO: 6566; WAN024BR9_at; Start 1328; Stop 1352
tcttagtgacaccaaaagatacacg

SEQ ID NO: 91169 - DNA, 25 bp, Artificial
  probe
  misc_feature (1)..(25): SEQ ID NO: 6566; WAN024BR9_at; Start 400; Stop 424
tccaaatcagaggtttataaacagc

SEQ ID NO: 91170 - DNA, 25 bp, Artificial
  probe
  misc_feature (1)..(25): SEQ ID NO: 6566; WAN024BR9_at; Start 807; Stop 831
tccacatgttgtcgctgaagatttg

SEQ ID NO: 91171 - DNA, 25 bp, Artificial
  probe
  misc_feature (1)..(25): SEQ ID NO: 6566; WAN024BR9_at; Start 686; Stop 710
ctattggagtagattcgcattggcc

SEQ ID NO: 91172 - DNA, 25 bp, Artificial
  probe
  misc_feature (1)..(25): SEQ ID NO: 6566; WAN024BR9_at; Start 475; Stop 499
gatcgaaatggctttaaggctggta

SEQ ID NO: 91173 - DNA, 25 bp, Artificial
  probe
  misc_feature (1)..(25): SEQ ID NO: 6566; WAN024BR9_at; Start 59; Stop 83
cattgctattgcttgtgatgccagc

SEQ ID NO: 91174 - DNA, 25 bp, Artificial
  probe
  misc_feature (1)..(25): SEQ ID NO: 6566; WAN024BR9_at; Start 1120; Stop 1144
tttaaattagagtacccagcatggc

SEQ ID NO: 91175 - DNA, 25 bp, Artificial
  probe
  misc_feature (1)..(25): SEQ ID NO: 6566; WAN024BR9_at; Start 1349; Stop 1373
cacgaaaaattacagtcttagaagc

SEQ ID NO: 91176 - DNA, 25 bp, Artificial
  probe
  misc_feature (1)..(25): SEQ ID NO: 6566; WAN024BR9_at; Start 1138; Stop 1162
gcatggcttttaattccaaccgtta

SEQ ID NO: 91177 - DNA, 25 bp, Artificial
  probe
  misc_feature (1)..(25): SEQ ID NO: 6566; WAN024BR9_at; Start 862; Stop 886
gattaccatgtaggatttgctgacg

SEQ ID NO: 91178 - DNA, 25 bp, Artificial
  probe
  misc_feature (1)..(25): SEQ ID NO: 6566; WAN024BR9_at; Start 334; Stop 358
ccagagtgtttagtagaatcaatgc

SEQ ID NO: 91179 - DNA, 25 bp, Artificial
  probe
  misc_feature (1)..(25): SEQ ID NO: 6566; WAN024BR9_at; Start 1421; Stop 1445
cgatatccattttgacatcgggcaa

SEQ ID NO: 91180 - DNA, 25 bp, Artificial
  probe
  misc_feature (1)..(25): SEQ ID NO: 6566; WAN024BR9_at; Start 1046; Stop 1070
catataatttacctctaacggcagt

SEQ ID NO: 91181 - DNA, 25 bp, Artificial
  probe
  misc_feature (1)..(25): SEQ ID NO: 6566; WAN024BR9_at; Start 87; Stop 111
tattcacaccgttagagacgccagt

SEQ ID NO: 91182 - DNA, 25 bp, Artificial
  probe
  misc_feature (1)..(25): SEQ ID NO: 6566; WAN024BR9_at; Start 1405; Stop 1429
gcgtgtacgttgatgacgatatcca

SEQ ID NO: 91183 - DNA, 25 bp, Artificial
  probe
  misc_feature (1)..(25): SEQ ID NO: 6566; WAN024BR9_at; Start 672; Stop 696
catggataccttagctattggagta

SEQ ID NO: 91184 - DNA, 25 bp, Artificial
  probe
  misc_feature (1)..(25): SEQ ID NO: 6566; WAN024BR9_at; Start 888; Stop 912
tattgtttgtcaggaagaataccct

SEQ ID NO: 91185 - DNA, 25 bp, Artificial
  probe
  misc_feature (1)..(25): SEQ ID NO: 6566; WAN024BR9_at; Start 847; Stop 871
tccagaattaaaggagattaccatg

SEQ ID NO: 91186 - DNA, 25 bp, Artificial
  probe
  misc_feature (1)..(25): SEQ ID NO: 6566; WAN024BR9_at; Start 622; Stop 646
ttaggaattctacaagcgactcatg

SEQ ID NO: 91187 - DNA, 25 bp, Artificial
  probe
  misc_feature (1)..(25): SEQ ID NO: 6566; WAN024BR9_at; Start 548; Stop 572
tattagacagcgatgagattattcc

SEQ ID NO: 91188 - DNA, 25 bp, Artificial
  probe
  misc_feature (1)..(25): SEQ ID NO: 6643; WAN024BRA_at; Start 508; Stop 532
gaaacccataaaacgctcacagtgg

SEQ ID NO: 91189 - DNA, 25 bp, Artificial
  probe
  misc_feature (1)..(25): SEQ ID NO: 6643; WAN024BRA_at; Start 327; Stop 351
accagtaggacaagagtgggaagtc

SEQ ID NO: 91190 - DNA, 25 bp, Artificial
  probe
  misc_feature (1)..(25): SEQ ID NO: 6643; WAN024BRA_at; Start 700; Stop 724
gaactattgccagtagactctagca

SEQ ID NO: 91191 - DNA, 25 bp, Artificial
  probe
  misc_feature (1)..(25): SEQ ID NO: 6643; WAN024BRA_at; Start 555; Stop 579
aacttggacacggaccttggccgag

SEQ ID NO: 91192 - DNA, 25 bp, Artificial
  probe
  misc_feature (1)..(25): SEQ ID NO: 6643; WAN024BRA_at; Start 538; Stop 562
gaccaatacggtcgcccaacttgga

SEQ ID NO: 91193 - DNA, 25 bp, Artificial
  probe
  misc_feature (1)..(25): SEQ ID NO: 6643; WAN024BRA_at; Start 307; Stop 331
tacgtctttgatggaaagaaaccag

SEQ ID NO: 91194 - DNA, 25 bp, Artificial
  probe
  misc_feature (1)..(25): SEQ ID NO: 6643; WAN024BRA_at; Start 219; Stop 243
ggattttgccatcaacgtaactgga

SEQ ID NO: 91195 - DNA, 25 bp, Artificial
  probe
  misc_feature (1)..(25): SEQ ID NO: 6643; WAN024BRA_at; Start 640; Stop 664
gcagctgaggacaccacttggtatg

SEQ ID NO: 91196 - DNA, 25 bp, Artificial
  probe
  misc_feature (1)..(25): SEQ ID NO: 6643; WAN024BRA_at; Start 277; Stop 301
ggagctattctggtctatatctcaa

SEQ ID NO: 91197 - DNA, 25 bp, Artificial
  probe
  misc_feature (1)..(25): SEQ ID NO: 6643; WAN024BRA_at; Start 741; Stop 765
taaacgacctctcaactcaactatg

SEQ ID NO: 91198 - DNA, 25 bp, Artificial
  probe
  misc_feature (1)..(25): SEQ ID NO: 6643; WAN024BRA_at; Start 715; Stop 739
gactctagcaagttccccgctaagg

SEQ ID NO: 91199 - DNA, 25 bp, Artificial
  probe
  misc_feature (1)..(25): SEQ ID NO: 6643; WAN024BRA_at; Start 572; Stop 596
tggccgagttcatgacctatgtgac

SEQ ID NO: 91200 - DNA, 25 bp, Artificial
  probe
  misc_feature (1)..(25): SEQ ID NO: 6643; WAN024BRA_at; Start 791; Stop 815
gtttcgtcatcccaacctggcaaga

SEQ ID NO: 91201 - DNA, 25 bp, Artificial
  probe
  misc_feature (1)..(25): SEQ ID NO: 6643; WAN024BRA_at; Start 379; Stop 403
tacggacgtaccaagcgaatgggag

SEQ ID NO: 91202 - DNA, 25 bp, Artificial
  probe
  misc_feature (1)..(25): SEQ ID NO: 6643; WAN024BRA_at; Start 773; Stop 797
caaaggcaaaggcaacaggtttcgt

SEQ ID NO: 91203 - DNA, 25 bp, Artificial
  probe
  misc_feature (1)..(25): SEQ ID NO: 6643; WAN024BRA_at; Start 242; Stop 266
gaactgaaaatgtagccaagggctc

SEQ ID NO: 91204 - DNA, 25 bp, Artificial
  probe
  misc_feature (1)..(25): SEQ ID NO: 6643; WAN024BRA_at; Start 654; Stop 678
cacttggtatgactttgctagcgag

SEQ ID NO: 91205 - DNA, 25 bp, Artificial
  probe
  misc_feature (1)..(25): SEQ ID NO: 6643; WAN024BRA_at; Start 153; Stop 177
aactctagtctatcattgtgcagcc

SEQ ID NO: 91206 - DNA, 25 bp, Artificial
  probe
  misc_feature (1)..(25): SEQ ID NO: 6643; WAN024BRA_at; Start 76; Stop 100
tatgttgcagtggatgtgaccgaaa

SEQ ID NO: 91207 - DNA, 25 bp, Artificial
  probe
  misc_feature (1)..(25): SEQ ID NO: 6643; WAN024BRA_at; Start 485; Stop 509
tctttaccatgcaaagcctagccga

SEQ ID NO: 91208 - DNA, 25 bp, Artificial
  probe
  misc_feature (1)..(25): SEQ ID NO: 6643; WAN024BRA_at; Start 363; Stop 387
tgatccgcaaacagagtacggacgt

SEQ ID NO: 91209 - DNA, 25 bp, Artificial
  probe
  misc_feature (1)..(25): SEQ ID NO: 6643; WAN024BRA_at; Start 8; Stop 32
taattacaggtgcaaatggtcaact

SEQ ID NO: 91210 - DNA, 25 bp, Artificial
  probe
  misc_feature (1)..(25): SEQ ID NO: 6643; WAN024BRA_at; Start 433; Stop 457
cattacatcattcgtactgcttggg

SEQ ID NO: 91211 - DNA, 25 bp, Artificial
  probe
  misc_feature (1)..(25): SEQ ID NO: 6643; WAN024BRA_at; Start 134; Stop 158
tctttgctgaggttaagccaactct

SEQ ID NO: 91212 - DNA, 25 bp, Artificial
  probe
  misc_feature (1)..(25): SEQ ID NO: 6643; WAN024BRA_at; Start 23; Stop 47
atggtcaacttggtaccgaactacg

SEQ ID NO: 91213 - DNA, 25 bp, Artificial
  probe
  misc_feature (1)..(25): SEQ ID NO: 6643; WAN024BRA_at; Start 194; Stop 218
cagccgaagatgaagggaaagaact

SEQ ID NO: 91214 - DNA, 25 bp, Artificial
  probe
  misc_feature (1)..(25): SEQ ID NO: 6643; WAN024BRA_at; Start 757; Stop 781
tcaactatgagtttggcaaaggcaa

SEQ ID NO: 91215 - DNA, 25 bp, Artificial
  probe
  misc_feature (1)..(25): SEQ ID NO: 6643; WAN024BRA_at; Start 524; Stop 548
tcacagtggtcagcgaccaatacgg

SEQ ID NO: 91216 - DNA, 25 bp, Artificial
  probe
  misc_feature (1)..(25): SEQ ID NO: 6643; WAN024BRA_at; Start 625; Stop 649
cacttatcgaatgacgcagctgagg

SEQ ID NO: 91217 - DNA, 25 bp, Artificial
  probe
  misc_feature (1)..(25): SEQ ID NO: 6643; WAN024BRA_at; Start 257; Stop 281
ccaagggctctgagaaatacggagc

SEQ ID NO: 91218 - DNA, 25 bp, Artificial
  probe
  misc_feature (1)..(25): SEQ ID NO: 6643; WAN024BRA_at; Start 346; Stop 370
gaagtcgatgacatacctgatccgc

SEQ ID NO: 91219 - DNA, 25 bp, Artificial
  probe
  misc_feature (1)..(25): SEQ ID NO: 6643; WAN024BRA_at; Start 53; Stop 77
tactaaatgagcgaaatgtggacta

SEQ ID NO: 91220 - DNA, 25 bp, Artificial
  probe
  misc_feature (1)..(25): SEQ ID NO: 6643; WAN024BRA_at; Start 406; Stop 430
gaacttgttgagaaccttacgtcac

SEQ ID NO: 91221 - DNA, 25 bp, Artificial
  probe
  misc_feature (1)..(25): SEQ ID NO: 6643; WAN024BRA_at; Start 178; Stop 202
tacactgctgttgatgcagccgaag

SEQ ID NO: 91222 - DNA, 25 bp, Artificial
  probe
  misc_feature (1)..(25): SEQ ID NO: 6740; WAN024BRB_at; Start 141; Stop 165
tgcctttaataaggatacaaaggta

SEQ ID NO: 91223 - DNA, 25 bp, Artificial
  probe
  misc_feature (1)..(25): SEQ ID NO: 6740; WAN024BRB_at; Start 228; Stop 252
ggagcaaaaaggtattgttcaggta

SEQ ID NO: 91224 - DNA, 25 bp, Artificial
  probe
  misc_feature (1)..(25): SEQ ID NO: 6740; WAN024BRB_at; Start 116; Stop 140
tagaatacccagcacatgtactggt

SEQ ID NO: 91225 - DNA, 25 bp, Artificial
  probe
  misc_feature (1)..(25): SEQ ID NO: 6740; WAN024BRB_at; Start 334; Stop 358
cacattcctgaagataaagcttttg

SEQ ID NO: 91226 - DNA, 25 bp, Artificial
  probe
  misc_feature (1)..(25): SEQ ID NO: 6740; WAN024BRB_at; Start 89; Stop 113
catttagtaaaggaattgtccaagc

SEQ ID NO: 91227 - DNA, 25 bp, Artificial
  probe
  misc_feature (1)..(25): SEQ ID NO: 6740; WAN024BRB_at; Start 340; Stop 364
cctgaagataaagcttttgtttttg

SEQ ID NO: 91228 - DNA, 25 bp, Artificial
  probe
  misc_feature (1)..(25): SEQ ID NO: 6740; WAN024BRB_at; Start 53; Stop 77
cagattatagcatgacggtgaacaa

SEQ ID NO: 91229 - DNA, 25 bp, Artificial
  probe
  misc_feature (1)..(25): SEQ ID NO: 6740; WAN024BRB_at; Start 130; Stop 154
catgtactggttgcctttaataagg

SEQ ID NO: 91230 - DNA, 25 bp, Artificial
  probe
  misc_feature (1)..(25): SEQ ID NO: 6740; WAN024BRB_at; Start 154; Stop 178
gatacaaaggtaatgggtatacaag

SEQ ID NO: 91231 - DNA, 25 bp, Artificial
  probe
  misc_feature (1)..(25): SEQ ID NO: 6740; WAN024BRB_at; Start 328; Stop 352
gggattcacattcctgaagataaag

SEQ ID NO: 91232 - DNA, 25 bp, Artificial
  probe
  misc_feature (1)..(25): SEQ ID NO: 6740; WAN024BRB_at; Start 66; Stop 90
gacggtgaacaagaactttgttaca

SEQ ID NO: 91233 - DNA, 25 bp, Artificial
  probe
  misc_feature (1)..(25): SEQ ID NO: 6740; WAN024BRB_at; Start 369; Stop 393
gaaggactttgatgaactatctgat

SEQ ID NO: 91234 - DNA, 25 bp, Artificial
  probe
  misc_feature (1)..(25): SEQ ID NO: 6740; WAN024BRB_at; Start 105; Stop 129
tgtccaagctttagaatacccagca

SEQ ID NO: 91235 - DNA, 25 bp, Artificial
  probe
  misc_feature (1)..(25): SEQ ID NO: 6740; WAN024BRB_at; Start 356; Stop 380
ttgtttttgaattgaaggactttga

SEQ ID NO: 91236 - DNA, 25 bp, Artificial
  probe
  misc_feature (1)..(25): SEQ ID NO: 6740; WAN024BRB_at; Start 58; Stop 82
tatagcatgacggtgaacaagaact

SEQ ID NO: 91237 - DNA, 25 bp, Artificial
  probe
  misc_feature (1)..(25): SEQ ID NO: 6740; WAN024BRB_at; Start 378; Stop 402
tgatgaactatctgattttcgtaaa

SEQ ID NO: 91238 - DNA, 25 bp, Artificial
  probe
  misc_feature (1)..(25): SEQ ID NO: 6740; WAN024BRB_at; Start 243; Stop 267
tgttcaggtaggtcataaaacttta

SEQ ID NO: 91239 - DNA, 25 bp, Artificial
  probe
  misc_feature (1)..(25): SEQ ID NO: 6740; WAN024BRB_at; Start 313; Stop 337
cgttatagagtagaggggattcaca

SEQ ID NO: 91240 - DNA, 25 bp, Artificial
  probe
  misc_feature (1)..(25): SEQ ID NO: 6740; WAN024BRB_at; Start 234; Stop 258
aaaaggtattgttcaggtaggtcat

SEQ ID NO: 91241 - DNA, 25 bp, Artificial
  probe
  misc_feature (1)..(25): SEQ ID NO: 6740; WAN024BRB_at; Start 175; Stop 199
caagtttgtcgtgcaaaaactaggg

SEQ ID NO: 91242 - DNA, 25 bp, Artificial
  probe
  misc_feature (1)..(25): SEQ ID NO: 6740; WAN024BRB_at; Start 109; Stop 133
caagctttagaatacccagcacatg

SEQ ID NO: 91243 - DNA, 25 bp, Artificial
  probe
  misc_feature (1)..(25): SEQ ID NO: 6740; WAN024BRB_at; Start 269; Stop 293
aagaaacactcttaacaatcatgag

SEQ ID NO: 91244 - DNA, 25 bp, Artificial
  probe
  misc_feature (1)..(25): SEQ ID NO: 6740; WAN024BRB_at; Start 40; Stop 64
gaacgttactcatcagattatagca

SEQ ID NO: 91245 - DNA, 25 bp, Artificial
  probe
  misc_feature (1)..(25): SEQ ID NO: 6740; WAN024BRB_at; Start 281; Stop 305
taacaatcatgagtgaatggaaatc

SEQ ID NO: 91246 - DNA, 25 bp, Artificial
  probe
  misc_feature (1)..(25): SEQ ID NO: 6740; WAN024BRB_at; Start 46; Stop 70
tactcatcagattatagcatgacgg

SEQ ID NO: 91247 - DNA, 25 bp, Artificial
  probe
  misc_feature (1)..(25): SEQ ID NO: 6740; WAN024BRB_at; Start 62; Stop 86
gcatgacggtgaacaagaactttgt

SEQ ID NO: 91248 - DNA, 25 bp, Artificial
  probe
  misc_feature (1)..(25): SEQ ID NO: 6740; WAN024BRB_at; Start 19; Stop 43
aatcttgaagttgttaatgttgaac

SEQ ID NO: 91249 - DNA, 25 bp, Artificial
  probe
  misc_feature (1)..(25): SEQ ID NO: 6740; WAN024BRB_at; Start 390; Stop 414
tgattttcgtaaaaacgacaataga

SEQ ID NO: 91250 - DNA, 25 bp, Artificial
  probe
  misc_feature (1)..(25): SEQ ID NO: 6740; WAN024BRB_at; Start 101; Stop 125
gaattgtccaagctttagaataccc

SEQ ID NO: 91251 - DNA, 25 bp, Artificial
  probe
  misc_feature (1)..(25): SEQ ID NO: 6740; WAN024BRB_at; Start 125; Stop 149
cagcacatgtactggttgcctttaa

SEQ ID NO: 91252 - DNA, 25 bp, Artificial
  probe
  misc_feature (1)..(25): SEQ ID NO: 6740; WAN024BRB_at; Start 164; Stop 188
taatgggtatacaagtttgtcgtgc

SEQ ID NO: 91253 - DNA, 25 bp, Artificial
  probe
  misc_feature (1)..(25): SEQ ID NO: 6740; WAN024BRB_at; Start 304; Stop 328
tctgataagcgttatagagtagagg

SEQ ID NO: 91254 - DNA, 25 bp, Artificial
  probe
  misc_feature (1)..(25): SEQ ID NO: 6740; WAN024BRB_at; Start 33; Stop 57
taatgttgaacgttactcatcagat

SEQ ID NO: 91255 - DNA, 25 bp, Artificial
  probe
  misc_feature (1)..(25): SEQ ID NO: 6740; WAN024BRB_at; Start 290; Stop 314
tgagtgaatggaaatctgataagcg

SEQ ID NO: 91256 - DNA, 25 bp, Artificial
  probe
  misc_feature (1)..(25): SEQ ID NO: 6912; WAN024BRC_at; Start 922; Stop 946
tctatcataccagaatcaagatggg

SEQ ID NO: 91257 - DNA, 25 bp, Artificial
  probe
  misc_feature (1)..(25): SEQ ID NO: 6912; WAN024BRC_at; Start 410; Stop 434
tgaaggcactatcccctccagttgg

SEQ ID NO: 91258 - DNA, 25 bp, Artificial
  probe
  misc_feature (1)..(25): SEQ ID NO: 6912; WAN024BRC_at; Start 796; Stop 820
ctcagaaacgagaaatataaaggcg

SEQ ID NO: 91259 - DNA, 25 bp, Artificial
  probe
  misc_feature (1)..(25): SEQ ID NO: 6912; WAN024BRC_at; Start 749; Stop 773
cagttactggtttggagcgttggac

SEQ ID NO: 91260 - DNA, 25 bp, Artificial
  probe
  misc_feature (1)..(25): SEQ ID NO: 6912; WAN024BRC_at; Start 24; Stop 48
tacccgtcaacagaagaaaattcga

SEQ ID NO: 91261 - DNA, 25 bp, Artificial
  probe
  misc_feature (1)..(25): SEQ ID NO: 6912; WAN024BRC_at; Start 268; Stop 292
tcaggaacatcaatcaaacgacgtg

SEQ ID NO: 91262 - DNA, 25 bp, Artificial
  probe
  misc_feature (1)..(25): SEQ ID NO: 6912; WAN024BRC_at; Start 75; Stop 99
tgaaattattcctgcaaagcgagag

SEQ ID NO: 91263 - DNA, 25 bp, Artificial
  probe
  misc_feature (1)..(25): SEQ ID NO: 6912; WAN024BRC_at; Start 587; Stop 611
tgattcctacccataaccttcttgg

SEQ ID NO: 91264 - DNA, 25 bp, Artificial
  probe
  misc_feature (1)..(25): SEQ ID NO: 6912; WAN024BRC_at; Start 287; Stop 311
gacgtgaacaattccaacagatgct

SEQ ID NO: 91265 - DNA, 25 bp, Artificial
  probe
  misc_feature (1)..(25): SEQ ID NO: 6912; WAN024BRC_at; Start 347; Stop 371
tcgttaagagtgttagcaggtttgc

SEQ ID NO: 91266 - DNA, 25 bp, Artificial
  probe
  misc_feature (1)..(25): SEQ ID NO: 6912; WAN024BRC_at; Start 255; Stop 279
tgaccaaggtgcatcaggaacatca

SEQ ID NO: 91267 - DNA, 25 bp, Artificial
  probe
  misc_feature (1)..(25): SEQ ID NO: 6912; WAN024BRC_at; Start 424; Stop 448
cctccagttggaatatatatcgaag

SEQ ID NO: 91268 - DNA, 25 bp, Artificial
  probe
  misc_feature (1)..(25): SEQ ID NO: 6912; WAN024BRC_at; Start 163; Stop 187
gaatctcagtcaggtagttttgaac

SEQ ID NO: 91269 - DNA, 25 bp, Artificial
  probe
  misc_feature (1)..(25): SEQ ID NO: 6912; WAN024BRC_at; Start 1072; Stop 1096
cctagttggaaatcggaagacattc

SEQ ID NO: 91270 - DNA, 25 bp, Artificial
  probe
  misc_feature (1)..(25): SEQ ID NO: 6912; WAN024BRC_at; Start 651; Stop 675
gacagaagcaaaaattgttcgccta

SEQ ID NO: 91271 - DNA, 25 bp, Artificial
  probe
  misc_feature (1)..(25): SEQ ID NO: 6912; WAN024BRC_at; Start 953; Stop 977
tacaagaattactcaagcaacctag

SEQ ID NO: 91272 - DNA, 25 bp, Artificial
  probe
  misc_feature (1)..(25): SEQ ID NO: 6912; WAN024BRC_at; Start 603; Stop 627
ccttcttgggtatacgaaagaccag

SEQ ID NO: 91273 - DNA, 25 bp, Artificial
  probe
  misc_feature (1)..(25): SEQ ID NO: 6912; WAN024BRC_at; Start 89; Stop 113
caaagcgagagttcactgatgttaa

SEQ ID NO: 91274 - DNA, 25 bp, Artificial
  probe
  misc_feature (1)..(25): SEQ ID NO: 6912; WAN024BRC_at; Start 813; Stop 837
taaaggcgaaatcatcatgcagaag

SEQ ID NO: 91275 - DNA, 25 bp, Artificial
  probe
  misc_feature (1)..(25): SEQ ID NO: 6912; WAN024BRC_at; Start 236; Stop 260
taatggctggaatctatgctgacca

SEQ ID NO: 91276 - DNA, 25 bp, Artificial
  probe
  misc_feature (1)..(25): SEQ ID NO: 6912; WAN024BRC_at; Start 114; Stop 138
aactaagaagttacgtgttgctgca

SEQ ID NO: 91277 - DNA, 25 bp, Artificial
  probe
  misc_feature (1)..(25): SEQ ID NO: 6912; WAN024BRC_at; Start 624; Stop 648
ccagtatggtcgagtagtgatagat

SEQ ID NO: 91278 - DNA, 25 bp, Artificial
  probe
  misc_feature (1)..(25): SEQ ID NO: 6912; WAN024BRC_at; Start 1019; Stop 1043
tctacatcaagaaactcaaatctgg

SEQ ID NO: 91279 - DNA, 25 bp, Artificial
  probe
  misc_feature (1)..(25): SEQ ID NO: 6912; WAN024BRC_at; Start 132; Stop 156
tgctgcatattgtcgagtaagtact

SEQ ID NO: 91280 - DNA, 25 bp, Artificial
  probe
  misc_feature (1)..(25): SEQ ID NO: 6912; WAN024BRC_at; Start 712; Stop 736
gagattgcctctactttaatgacca

SEQ ID NO: 91281 - DNA, 25 bp, Artificial
  probe
  misc_feature (1)..(25): SEQ ID NO: 6912; WAN024BRC_at; Start 481; Stop 505
gaattcattcttggtattatggcca

SEQ ID NO: 91282 - DNA, 25 bp, Artificial
  probe
  misc_feature (1)..(25): SEQ ID NO: 6912; WAN024BRC_at; Start 548; Stop 572
catggtctgtcattgaacgctttaa

SEQ ID NO: 91283 - DNA, 25 bp, Artificial
  probe
  misc_feature (1)..(25): SEQ ID NO: 6912; WAN024BRC_at; Start 49; Stop 73
gatgcatttgtatctgagagaactg

SEQ ID NO: 91284 - DNA, 25 bp, Artificial
  probe
  misc_feature (1)..(25): SEQ ID NO: 6912; WAN024BRC_at; Start 688; Stop 712
tacatcgaaggtatgactgcaagtg

SEQ ID NO: 91285 - DNA, 25 bp, Artificial
  probe
  misc_feature (1)..(25): SEQ ID NO: 6912; WAN024BRC_at; Start 362; Stop 386
gcaggtttgctcgtaatcagctaga

SEQ ID NO: 91286 - DNA, 25 bp, Artificial
  probe
  misc_feature (1)..(25): SEQ ID NO: 6912; WAN024BRC_at; Start 565; Stop 589
cgctttaaaagagggataccaatga

SEQ ID NO: 91287 - DNA, 25 bp, Artificial
  probe
  misc_feature (1)..(25): SEQ ID NO: 6912; WAN024BRC_at; Start 532; Stop 556
aaaagtgcgtcaattacatggtctg

SEQ ID NO: 91288 - DNA, 25 bp, Artificial
  probe
  misc_feature (1)..(25): SEQ ID NO: 6912; WAN024BRC_at; Start 395; Stop 419
gtatttaccgagagttgaaggcact

SEQ ID NO: 91289 - DNA, 25 bp, Artificial
  probe
  misc_feature (1)..(25): SEQ ID NO: 6912; WAN024BRC_at; Start 498; Stop 522
tatggccatagtagctcaaggtgag

SEQ ID NO: 91290 - DNA, 25 bp, Artificial
  probe
  misc_feature (1)..(25): SEQ ID NO: 6645; WAN024BRD_at; Start 33; Stop 57
ttttttaacaagaacaagctgcagc

SEQ ID NO: 91291 - DNA, 25 bp, Artificial
  probe
  misc_feature (1)..(25): SEQ ID NO: 6645; WAN024BRD_at; Start 476; Stop 500
ccaaggttggacatgaaaactatca

SEQ ID NO: 91292 - DNA, 25 bp, Artificial
  probe
  misc_feature (1)..(25): SEQ ID NO: 6645; WAN024BRD_at; Start 163; Stop 187
tgccataactgtaaccacaaggtgc

SEQ ID NO: 91293 - DNA, 25 bp, Artificial
  probe
  misc_feature (1)..(25): SEQ ID NO: 6645; WAN024BRD_at; Start 616; Stop 640
tctagatgggcggaatcattctttc

SEQ ID NO: 91294 - DNA, 25 bp, Artificial
  probe
  misc_feature (1)..(25): SEQ ID NO: 6645; WAN024BRD_at; Start 193; Stop 217
gattacccaacagtcgtagtagatg

SEQ ID NO: 91295 - DNA, 25 bp, Artificial
  probe
  misc_feature (1)..(25): SEQ ID NO: 6645; WAN024BRD_at; Start 632; Stop 656
cattctttcgtaccagtttggcata

SEQ ID NO: 91296 - DNA, 25 bp, Artificial
  probe
  misc_feature (1)..(25): SEQ ID NO: 6645; WAN024BRD_at; Start 426; Stop 450
tcctcttgaggatggtgatattcag

SEQ ID NO: 91297 - DNA, 25 bp, Artificial
  probe
  misc_feature (1)..(25): SEQ ID NO: 6645; WAN024BRD_at; Start 529; Stop 553
gtagcatctctcgacttttctcaag

SEQ ID NO: 91298 - DNA, 25 bp, Artificial
  probe
  misc_feature (1)..(25): SEQ ID NO: 6645; WAN024BRD_at; Start 553; Stop 577
gaacaatatgagtactaccttgctg

SEQ ID NO: 91299 - DNA, 25 bp, Artificial
  probe
  misc_feature (1)..(25): SEQ ID NO: 6645; WAN024BRD_at; Start 248; Stop 272
cagatggtaatgttgatgtactttc

SEQ ID NO: 91300 - DNA, 25 bp, Artificial
  probe
  misc_feature (1)..(25): SEQ ID NO: 6645; WAN024BRD_at; Start 568; Stop 592
taccttgctgatgttgaagacctag

SEQ ID NO: 91301 - DNA, 25 bp, Artificial
  probe
  misc_feature (1)..(25): SEQ ID NO: 6645; WAN024BRD_at; Start 346; Stop 370
gagtctttcgttgagaaggtacaga

SEQ ID NO: 91302 - DNA, 25 bp, Artificial
  probe
  misc_feature (1)..(25): SEQ ID NO: 6645; WAN024BRD_at; Start 463; Stop 487
catatggttttcaccaaggttggac

SEQ ID NO: 91303 - DNA, 25 bp, Artificial
  probe
  misc_feature (1)..(25): SEQ ID NO: 6645; WAN024BRD_at; Start 97; Stop 121
gtttatgcggcgaagactcctgaga

SEQ ID NO: 91304 - DNA, 25 bp, Artificial
  probe
  misc_feature (1)..(25): SEQ ID NO: 6645; WAN024BRD_at; Start 328; Stop 352
cgagtagtttcggatatagagtctt

SEQ ID NO: 91305 - DNA, 25 bp, Artificial
  probe
  misc_feature (1)..(25): SEQ ID NO: 6645; WAN024BRD_at; Start 391; Stop 415
gatagagcaattgagcttatgaagt

SEQ ID NO: 91306 - DNA, 25 bp, Artificial
  probe
  misc_feature (1)..(25): SEQ ID NO: 6645; WAN024BRD_at; Start 411; Stop 435
gaagtatatgaatagtcctcttgag

SEQ ID NO: 91307 - DNA, 25 bp, Artificial
  probe
  misc_feature (1)..(25): SEQ ID NO: 6645; WAN024BRD_at; Start 360; Stop 384
gaaggtacagattgtttcagtaggg

SEQ ID NO: 91308 - DNA, 25 bp, Artificial
  probe
  misc_feature (1)..(25): SEQ ID NO: 6645; WAN024BRD_at; Start 108; Stop 132
gaagactcctgagattatttctgct

SEQ ID NO: 91309 - DNA, 25 bp, Artificial
  probe
  misc_feature (1)..(25): SEQ ID NO: 6645; WAN024BRD_at; Start 510; Stop 534
tattaataaccagattgcagtagca

SEQ ID NO: 91310 - DNA, 25 bp, Artificial
  probe
  misc_feature (1)..(25): SEQ ID NO: 6645; WAN024BRD_at; Start 604; Stop 628
tattacatagactctagatgggcgg

SEQ ID NO: 91311 - DNA, 25 bp, Artificial
  probe
  misc_feature (1)..(25): SEQ ID NO: 6645; WAN024BRD_at; Start 376; Stop 400
tcagtagggtatgatgatagagcaa

SEQ ID NO: 91312 - DNA, 25 bp, Artificial
  probe
  misc_feature (1)..(25): SEQ ID NO: 6645; WAN024BRD_at; Start 311; Stop 335
tcagtgagtatagaattcgagtagt

SEQ ID NO: 91313 - DNA, 25 bp, Artificial
  probe
  misc_feature (1)..(25): SEQ ID NO: 6645; WAN024BRD_at; Start 127; Stop 151
tctgctattttagactgggatttct

SEQ ID NO: 91314 - DNA, 25 bp, Artificial
  probe
  misc_feature (1)..(25): SEQ ID NO: 6645; WAN024BRD_at; Start 262; Stop 286
gatgtactttcaatgcaaatatgct

SEQ ID NO: 91315 - DNA, 25 bp, Artificial
  probe
  misc_feature (1)..(25): SEQ ID NO: 6645; WAN024BRD_at; Start 284; Stop 308
gctctttgatttcagagggtgtcaa

SEQ ID NO: 91316 - DNA, 25 bp, Artificial
  probe
  misc_feature (1)..(25): SEQ ID NO: 6645; WAN024BRD_at; Start 230; Stop 254
caattattcagtattgtgcagatgg

SEQ ID NO: 91317 - DNA, 25 bp, Artificial
  probe
  misc_feature (1)..(25): SEQ ID NO: 6645; WAN024BRD_at; Start 296; Stop 320
cagagggtgtcaatctcagtgagta

SEQ ID NO: 91318 - DNA, 25 bp, Artificial
  probe
  misc_feature (1)..(25): SEQ ID NO: 6645; WAN024BRD_at; Start 178; Stop 202
cacaaggtgctaattgattacccaa

SEQ ID NO: 91319 - DNA, 25 bp, Artificial
  probe
  misc_feature (1)..(25): SEQ ID NO: 6645; WAN024BRD_at; Start 580; Stop 604
gttgaagacctagaaactaacacat

SEQ ID NO: 91320 - DNA, 25 bp, Artificial
  probe
  misc_feature (1)..(25): SEQ ID NO: 6645; WAN024BRD_at; Start 83; Stop 107
aaagatttgatagggtttatgcggc

SEQ ID NO: 91321 - DNA, 25 bp, Artificial
  probe
  misc_feature (1)..(25): SEQ ID NO: 6645; WAN024BRD_at; Start 206; Stop 230
tcgtagtagatgaagaacaaaaaac

SEQ ID NO: 91322 - DNA, 25 bp, Artificial
  probe
  misc_feature (1)..(25): SEQ ID NO: 6645; WAN024BRD_at; Start 5; Stop 29
tgaagaggaaaattagaatgacaac

SEQ ID NO: 91323 - DNA, 25 bp, Artificial
  probe
  misc_feature (1)..(25): SEQ ID NO: 6645; WAN024BRD_at; Start 47; Stop 71
caagctgcagcaattgtggaaaaca

SEQ ID NO: 91324 - DNA, 25 bp, Artificial
  probe
  misc_feature (1)..(25): SEQ ID NO: 6293; WAN024BRE_at; Start 149; Stop 173
tgcaaccaacattaagatggtggac

SEQ ID NO: 91325 - DNA, 25 bp, Artificial
  probe
  misc_feature (1)..(25): SEQ ID NO: 6293; WAN024BRE_at; Start 135; Stop 159
tgtggatgcaaccttgcaaccaaca

SEQ ID NO: 91326 - DNA, 25 bp, Artificial
  probe
  misc_feature (1)..(25): SEQ ID NO: 6293; WAN024BRE_at; Start 130; Stop 154
cagtgtgtggatgcaaccttgcaac

SEQ ID NO: 91327 - DNA, 25 bp, Artificial
  probe
  misc_feature (1)..(25): SEQ ID NO: 6293; WAN024BRE_at; Start 146; Stop 170
ccttgcaaccaacattaagatggtg

SEQ ID NO: 91328 - DNA, 25 bp, Artificial
  probe
  misc_feature (1)..(25): SEQ ID NO: 6293; WAN024BRE_at; Start 33; Stop 57
tctatggagccaggggacgcacagt

SEQ ID NO: 91329 - DNA, 25 bp, Artificial
  probe
  misc_feature (1)..(25): SEQ ID NO: 6293; WAN024BRE_at; Start 108; Stop 132
tgattgcggctggtgcctttctcag

SEQ ID NO: 91330 - DNA, 25 bp, Artificial
  probe
  misc_feature (1)..(25): SEQ ID NO: 6293; WAN024BRE_at; Start 122; Stop 146
gcctttctcagtgtgtggatgcaac

SEQ ID NO: 91331 - DNA, 25 bp, Artificial
  probe
  misc_feature (1)..(25): SEQ ID NO: 6293; WAN024BRE_at; Start 54; Stop 78
cagtgctattgttctggcaacaaag

SEQ ID NO: 91332 - DNA, 25 bp, Artificial
  probe
  misc_feature (1)..(25): SEQ ID NO: 6293; WAN024BRE_at; Start 50; Stop 74
cgcacagtgctattgttctggcaac

SEQ ID NO: 91333 - DNA, 25 bp, Artificial
  probe
  misc_feature (1)..(25): SEQ ID NO: 6293; WAN024BRE_at; Start 158; Stop 182
cattaagatggtggaccaggtgttc

SEQ ID NO: 91334 - DNA, 25 bp, Artificial
  probe
  misc_feature (1)..(25): SEQ ID NO: 6293; WAN024BRE_at; Start 154; Stop 178
ccaacattaagatggtggaccaggt

SEQ ID NO: 91335 - DNA, 25 bp, Artificial
  probe
  misc_feature (1)..(25): SEQ ID NO: 6293; WAN024BRE_at; Start 151; Stop 175
caaccaacattaagatggtggacca

SEQ ID NO: 91336 - DNA, 25 bp, Artificial
  probe
  misc_feature (1)..(25): SEQ ID NO: 6293; WAN024BRE_at; Start 114; Stop 138
cggctggtgcctttctcagtgtgtg

SEQ ID NO: 91337 - DNA, 25 bp, Artificial
  probe
  misc_feature (1)..(25): SEQ ID NO: 6293; WAN024BRE_at; Start 119; Stop 143
ggtgcctttctcagtgtgtggatgc

SEQ ID NO: 91338 - DNA, 25 bp, Artificial
  probe
  misc_feature (1)..(25): SEQ ID NO: 6293; WAN024BRE_at; Start 124; Stop 148
ctttctcagtgtgtggatgcaacct

SEQ ID NO: 91339 - DNA, 25 bp, Artificial
  probe
  misc_feature (1)..(25): SEQ ID NO: 6293; WAN024BRE_at; Start 48; Stop 72
gacgcacagtgctattgttctggca

SEQ ID NO: 91340 - DNA, 25 bp, Artificial
  probe
  misc_feature (1)..(25): SEQ ID NO: 6293; WAN024BRE_at; Start 110; Stop 134
attgcggctggtgcctttctcagtg

SEQ ID NO: 91341 - DNA, 25 bp, Artificial
  probe
  misc_feature (1)..(25): SEQ ID NO: 6293; WAN024BRE_at; Start 87; Stop 111
tgtcgggttacaagaagggattgat

SEQ ID NO: 91342 - DNA, 25 bp, Artificial
  probe
  misc_feature (1)..(25): SEQ ID NO: 6293; WAN024BRE_at; Start 1; Stop 25
atagatgatacgcattttaaggttt

SEQ ID NO: 91343 - DNA, 25 bp, Artificial
  probe
  misc_feature (1)..(25): SEQ ID NO: 6293; WAN024BRE_at; Start 144; Stop 168
aaccttgcaaccaacattaagatgg

SEQ ID NO: 91344 - DNA, 25 bp, Artificial
  probe
  misc_feature (1)..(25): SEQ ID NO: 6293; WAN024BRE_at; Start 74; Stop 98
caaagcttattgttgtcgggttaca

SEQ ID NO: 91345 - DNA, 25 bp, Artificial
  probe
  misc_feature (1)..(25): SEQ ID NO: 6293; WAN024BRE_at; Start 77; Stop 101
agcttattgttgtcgggttacaaga

SEQ ID NO: 91346 - DNA, 25 bp, Artificial
  probe
  misc_feature (1)..(25): SEQ ID NO: 6293; WAN024BRE_at; Start 63; Stop 87
tgttctggcaacaaagcttattgtt

SEQ ID NO: 91347 - DNA, 25 bp, Artificial
  probe
  misc_feature (1)..(25): SEQ ID NO: 6293; WAN024BRE_at; Start 139; Stop 163
gatgcaaccttgcaaccaacattaa

SEQ ID NO: 91348 - DNA, 25 bp, Artificial
  probe
  misc_feature (1)..(25): SEQ ID NO: 6293; WAN024BRE_at; Start 89; Stop 113
tcgggttacaagaagggattgattg

SEQ ID NO: 91349 - DNA, 25 bp, Artificial
  probe
  misc_feature (1)..(25): SEQ ID NO: 6293; WAN024BRE_at; Start 159; Stop 183
attaagatggtggaccaggtgttcg

SEQ ID NO: 91350 - DNA, 25 bp, Artificial
  probe
  misc_feature (1)..(25): SEQ ID NO: 6293; WAN024BRE_at; Start 52; Stop 76
cacagtgctattgttctggcaacaa

SEQ ID NO: 91351 - DNA, 25 bp, Artificial
  probe
  misc_feature (1)..(25): SEQ ID NO: 6293; WAN024BRE_at; Start 127; Stop 151
tctcagtgtgtggatgcaaccttgc

SEQ ID NO: 91352 - DNA, 25 bp, Artificial
  probe
  misc_feature (1)..(25): SEQ ID NO: 6293; WAN024BRE_at; Start 69; Stop 93
ggcaacaaagcttattgttgtcggg

SEQ ID NO: 91353 - DNA, 25 bp, Artificial
  probe
  misc_feature (1)..(25): SEQ ID NO: 6293; WAN024BRE_at; Start 142; Stop 166
gcaaccttgcaaccaacattaagat

SEQ ID NO: 91354 - DNA, 25 bp, Artificial
  probe
  misc_feature (1)..(25): SEQ ID NO: 6293; WAN024BRE_at; Start 57; Stop 81
tgctattgttctggcaacaaagctt

SEQ ID NO: 91355 - DNA, 25 bp, Artificial
  probe
  misc_feature (1)..(25): SEQ ID NO: 6293; WAN024BRE_at; Start 128; Stop 152
ctcagtgtgtggatgcaaccttgca

SEQ ID NO: 91356 - DNA, 25 bp, Artificial
  probe
  misc_feature (1)..(25): SEQ ID NO: 6293; WAN024BRE_at; Start 133; Stop 157
tgtgtggatgcaaccttgcaaccaa

SEQ ID NO: 91357 - DNA, 25 bp, Artificial
  probe
  misc_feature (1)..(25): SEQ ID NO: 6293; WAN024BRE_at; Start 155; Stop 179
caacattaagatggtggaccaggtg

SEQ ID NO: 91358 - DNA, 25 bp, Artificial
  probe
  misc_feature (1)..(25): SEQ ID NO: 6577; WAN024BRF_at; Start 749; Stop 773
aatcagctccgaagaaactagtggg

SEQ ID NO: 91359 - DNA, 25 bp, Artificial
  probe
  misc_feature (1)..(25): SEQ ID NO: 6577; WAN024BRF_at; Start 86; Stop 110
cgatgacaatcattggtttggacaa

SEQ ID NO: 91360 - DNA, 25 bp, Artificial
  probe
  misc_feature (1)..(25): SEQ ID NO: 6577; WAN024BRF_at; Start 862; Stop 886
caacaggagctaatcaaggcaggag

SEQ ID NO: 91361 - DNA, 25 bp, Artificial
  probe
  misc_feature (1)..(25): SEQ ID NO: 6577; WAN024BRF_at; Start 68; Stop 92
tattggaattagaaggaacgatgac

SEQ ID NO: 91362 - DNA, 25 bp, Artificial
  probe
  misc_feature (1)..(25): SEQ ID NO: 6577; WAN024BRF_at; Start 1035; Stop 1059
gtttgcagagtggtataaagactac

SEQ ID NO: 91363 - DNA, 25 bp, Artificial
  probe
  misc_feature (1)..(25): SEQ ID NO: 6577; WAN024BRF_at; Start 876; Stop 900
caaggcaggagttttgccggaaaat

SEQ ID NO: 91364 - DNA, 25 bp, Artificial
  probe
  misc_feature (1)..(25): SEQ ID NO: 6577; WAN024BRF_at; Start 243; Stop 267
gatttttaagagttatcatcctcag

SEQ ID NO: 91365 - DNA, 25 bp, Artificial
  probe
  misc_feature (1)..(25): SEQ ID NO: 6577; WAN024BRF_at; Start 765; Stop 789
actagtgggatctgataatttaccg

SEQ ID NO: 91366 - DNA, 25 bp, Artificial
  probe
  misc_feature (1)..(25): SEQ ID NO: 6577; WAN024BRF_at; Start 285; Stop 309
tgcccaggcaggagtacgctactcc

SEQ ID NO: 91367 - DNA, 25 bp, Artificial
  probe
  misc_feature (1)..(25): SEQ ID NO: 6577; WAN024BRF_at; Start 787; Stop 811
ccgttagccccatataaagtgtaca

SEQ ID NO: 91368 - DNA, 25 bp, Artificial
  probe
  misc_feature (1)..(25): SEQ ID NO: 6577; WAN024BRF_at; Start 367; Stop 391
gaagcttgtcgtcattcgtatgaga

SEQ ID NO: 91369 - DNA, 25 bp, Artificial
  probe
  misc_feature (1)..(25): SEQ ID NO: 6577; WAN024BRF_at; Start 734; Stop 758
tagtaagggtcatgcaatcagctcc

SEQ ID NO: 91370 - DNA, 25 bp, Artificial
  probe
  misc_feature (1)..(25): SEQ ID NO: 6577; WAN024BRF_at; Start 524; Stop 548
caaatgaacttcaagcgtatgctta

SEQ ID NO: 91371 - DNA, 25 bp, Artificial
  probe
  misc_feature (1)..(25): SEQ ID NO: 6577; WAN024BRF_at; Start 849; Stop 873
tgtggatgttcttcaacaggagcta

SEQ ID NO: 91372 - DNA, 25 bp, Artificial
  probe
  misc_feature (1)..(25): SEQ ID NO: 6577; WAN024BRF_at; Start 639; Stop 663
tacagataaattgcgaagtggttcc

SEQ ID NO: 91373 - DNA, 25 bp, Artificial
  probe
  misc_feature (1)..(25): SEQ ID NO: 6577; WAN024BRF_at; Start 922; Stop 946
aaattagttcctatgcaaccaggcg

SEQ ID NO: 91374 - DNA, 25 bp, Artificial
  probe
  misc_feature (1)..(25): SEQ ID NO: 6577; WAN024BRF_at; Start 555; Stop 579
gatttacaatattccttcgacaggc

SEQ ID NO: 91375 - DNA, 25 bp, Artificial
  probe
  misc_feature (1)..(25): SEQ ID NO: 6577; WAN024BRF_at; Start 571; Stop 595
tcgacaggcttacgcttttttacag

SEQ ID NO: 91376 - DNA, 25 bp, Artificial
  probe
  misc_feature (1)..(25): SEQ ID NO: 6577; WAN024BRF_at; Start 606; Stop 630
tgctgggcgcccagatatggcctat

SEQ ID NO: 91377 - DNA, 25 bp, Artificial
  probe
  misc_feature (1)..(25): SEQ ID NO: 6577; WAN024BRF_at; Start 302; Stop 326
gctactccattacaaatccagatgt

SEQ ID NO: 91378 - DNA, 25 bp, Artificial
  probe
  misc_feature (1)..(25): SEQ ID NO: 6577; WAN024BRF_at; Start 355; Stop 379
cataatgtgttggaagcttgtcgtc

SEQ ID NO: 91379 - DNA, 25 bp, Artificial
  probe
  misc_feature (1)..(25): SEQ ID NO: 6577; WAN024BRF_at; Start 165; Stop 189
taagctaattcaggattatccagaa

SEQ ID NO: 91380 - DNA, 25 bp, Artificial
  probe
  misc_feature (1)..(25): SEQ ID NO: 6577; WAN024BRF_at; Start 29; Stop 53
gagtagctggttttattggatcaaa

SEQ ID NO: 91381 - DNA, 25 bp, Artificial
  probe
  misc_feature (1)..(25): SEQ ID NO: 6577; WAN024BRF_at; Start 390; Stop 414
gatatatgatggtggtgtggaacac

SEQ ID NO: 91382 - DNA, 25 bp, Artificial
  probe
  misc_feature (1)..(25): SEQ ID NO: 6577; WAN024BRF_at; Start 415; Stop 439
ttagtttatgcatcgtcctcatcgg

SEQ ID NO: 91383 - DNA, 25 bp, Artificial
  probe
  misc_feature (1)..(25): SEQ ID NO: 6577; WAN024BRF_at; Start 1016; Stop 1040
tacgagaaggtttgagaaagtttgc

SEQ ID NO: 91384 - DNA, 25 bp, Artificial
  probe
  misc_feature (1)..(25): SEQ ID NO: 6577; WAN024BRF_at; Start 591; Stop 615
tacagtttatggtcctgctgggcgc

SEQ ID NO: 91385 - DNA, 25 bp, Artificial
  probe
  misc_feature (1)..(25): SEQ ID NO: 6577; WAN024BRF_at; Start 14; Stop 38
caattctaattacaggagtagctgg

SEQ ID NO: 91386 - DNA, 25 bp, Artificial
  probe
  misc_feature (1)..(25): SEQ ID NO: 6577; WAN024BRF_at; Start 462; Stop 486
cccgtttgcaacagaagataaggta

SEQ ID NO: 91387 - DNA, 25 bp, Artificial
  probe
  misc_feature (1)..(25): SEQ ID NO: 6577; WAN024BRF_at; Start 489; Stop 513
caatcctatttcactatatgctgcg

SEQ ID NO: 91388 - DNA, 25 bp, Artificial
  probe
  misc_feature (1)..(25): SEQ ID NO: 6577; WAN024BRF_at; Start 270; Stop 294
tgttgttaatctagctgcccaggca

SEQ ID NO: 91389 - DNA, 25 bp, Artificial
  probe
  misc_feature (1)..(25): SEQ ID NO: 6577; WAN024BRF_at; Start 430; Stop 454
tcctcatcggtatatggtggaaata

SEQ ID NO: 91390 - DNA, 25 bp, Artificial
  probe
  misc_feature (1)..(25): SEQ ID NO: 6577; WAN024BRF_at; Start 965; Stop 989
cagatacaagtgatttagagagaga

SEQ ID NO: 91391 - DNA, 25 bp, Artificial
  probe
  misc_feature (1)..(25): SEQ ID NO: 6577; WAN024BRF_at; Start 944; Stop 968
gcgatgttcctgttacttatgcaga

SEQ ID NO: 91392 - DNA, 25 bp, Artificial
  probe
  misc_feature (1)..(25): SEQ ID NO: 6430; WAN024BRG_at; Start 983; Stop 1007
cagcaatctcttatactgtatgtgg

SEQ ID NO: 91393 - DNA, 25 bp, Artificial
  probe
  misc_feature (1)..(25): SEQ ID NO: 6430; WAN024BRG_at; Start 851; Stop 875
tacaaccaatttatatatctcaggg

SEQ ID NO: 91394 - DNA, 25 bp, Artificial
  probe
  misc_feature (1)..(25): SEQ ID NO: 6430; WAN024BRG_at; Start 866; Stop 890
tatctcagggtaaacagagtgtagc

SEQ ID NO: 91395 - DNA, 25 bp, Artificial
  probe
  misc_feature (1)..(25): SEQ ID NO: 6430; WAN024BRG_at; Start 638; Stop 662
tatttggtgattcggctaaaagaac

SEQ ID NO: 91396 - DNA, 25 bp, Artificial
  probe
  misc_feature (1)..(25): SEQ ID NO: 6430; WAN024BRG_at; Start 816; Stop 840
tttaggaagcttatcgatgattttc

SEQ ID NO: 91397 - DNA, 25 bp, Artificial
  probe
  misc_feature (1)..(25): SEQ ID NO: 6430; WAN024BRG_at; Start 609; Stop 633
gatggttccagactcatttaaagag

SEQ ID NO: 91398 - DNA, 25 bp, Artificial
  probe
  misc_feature (1)..(25): SEQ ID NO: 6430; WAN024BRG_at; Start 973; Stop 997
gcgatagcatcagcaatctcttata

SEQ ID NO: 91399 - DNA, 25 bp, Artificial
  probe
  misc_feature (1)..(25): SEQ ID NO: 6430; WAN024BRG_at; Start 963; Stop 987
tacaggagctgcgatagcatcagca

SEQ ID NO: 91400 - DNA, 25 bp, Artificial
  probe
  misc_feature (1)..(25): SEQ ID NO: 6430; WAN024BRG_at; Start 150; Stop 174
aataatagttttagctgatgttccg

SEQ ID NO: 91401 - DNA, 25 bp, Artificial
  probe
  misc_feature (1)..(25): SEQ ID NO: 6430; WAN024BRG_at; Start 679; Stop 703
gcaataaatgcaataaaagtatcat

SEQ ID NO: 91402 - DNA, 25 bp, Artificial
  probe
  misc_feature (1)..(25): SEQ ID NO: 6430; WAN024BRG_at; Start 530; Stop 554
tcataatgttgaagcaaatgtctag

SEQ ID NO: 91403 - DNA, 25 bp, Artificial
  probe
  misc_feature (1)..(25): SEQ ID NO: 6430; WAN024BRG_at; Start 575; Stop 599
acagtgtcgcagttacgttttctaa

SEQ ID NO: 91404 - DNA, 25 bp, Artificial
  probe
  misc_feature (1)..(25): SEQ ID NO: 6430; WAN024BRG_at; Start 951; Stop 975
taactaccaaattacaggagctgcg

SEQ ID NO: 91405 - DNA, 25 bp, Artificial
  probe
  misc_feature (1)..(25): SEQ ID NO: 6430; WAN024BRG_at; Start 891; Stop 915
tataaaaattttatctgtgtcggct

SEQ ID NO: 91406 - DNA, 25 bp, Artificial
  probe
  misc_feature (1)..(25): SEQ ID NO: 6430; WAN024BRG_at; Start 404; Stop 428
tatactattacaatatgttcccagt

SEQ ID NO: 91407 - DNA, 25 bp, Artificial
  probe
  misc_feature (1)..(25): SEQ ID NO: 6430; WAN024BRG_at; Start 561; Stop 585
taatgtaggtatatacagtgtcgca

SEQ ID NO: 91408 - DNA, 25 bp, Artificial
  probe
  misc_feature (1)..(25): SEQ ID NO: 6430; WAN024BRG_at; Start 756; Stop 780
gattacgctcctttatggttccagt

SEQ ID NO: 91409 - DNA, 25 bp, Artificial
  probe
  misc_feature (1)..(25): SEQ ID NO: 6430; WAN024BRG_at; Start 203; Stop 227
tgtccagtctatctattatgaaaac

SEQ ID NO: 91410 - DNA, 25 bp, Artificial
  probe
  misc_feature (1)..(25): SEQ ID NO: 6430; WAN024BRG_at; Start 597; Stop 621
taatatgtttttgatggttccagac

SEQ ID NO: 91411 - DNA, 25 bp, Artificial
  probe
  misc_feature (1)..(25): SEQ ID NO: 6430; WAN024BRG_at; Start 271; Stop 295
aataagattgtattaggagtaagcg

SEQ ID NO: 91412 - DNA, 25 bp, Artificial
  probe
  misc_feature (1)..(25): SEQ ID NO: 6430; WAN024BRG_at; Start 419; Stop 443
tgttcccagtttttgaacatattag

SEQ ID NO: 91413 - DNA, 25 bp, Artificial
  probe
  misc_feature (1)..(25): SEQ ID NO: 6430; WAN024BRG_at; Start 475; Stop 499
ggatttctttctatgattcttactc

SEQ ID NO: 91414 - DNA, 25 bp, Artificial
  probe
  misc_feature (1)..(25): SEQ ID NO: 6430; WAN024BRG_at; Start 163; Stop 187
gctgatgttccgataaattatggtg

SEQ ID NO: 91415 - DNA, 25 bp, Artificial
  probe
  misc_feature (1)..(25): SEQ ID NO: 6430; WAN024BRG_at; Start 787; Stop 811
aaggcatttcctataacattagtca

SEQ ID NO: 91416 - DNA, 25 bp, Artificial
  probe
  misc_feature (1)..(25): SEQ ID NO: 6430; WAN024BRG_at; Start 905; Stop 929
ctgtgtcggctttgataaatataag

SEQ ID NO: 91417 - DNA, 25 bp, Artificial
  probe
  misc_feature (1)..(25): SEQ ID NO: 6430; WAN024BRG_at; Start 286; Stop 310
ggagtaagcgtagtatattccgtta

SEQ ID NO: 91418 - DNA, 25 bp, Artificial
  probe
  misc_feature (1)..(25): SEQ ID NO: 6430; WAN024BRG_at; Start 739; Stop 763
tcttttggagaatttgcgattacgc

SEQ ID NO: 91419 - DNA, 25 bp, Artificial
  probe
  misc_feature (1)..(25): SEQ ID NO: 6430; WAN024BRG_at; Start 772; Stop 796
ggttccagttatataaaggcatttc

SEQ ID NO: 91420 - DNA, 25 bp, Artificial
  probe
  misc_feature (1)..(25): SEQ ID NO: 6430; WAN024BRG_at; Start 304; Stop 328
tccgttatgctagtattgttgttac

SEQ ID NO: 91421 - DNA, 25 bp, Artificial
  probe
  misc_feature (1)..(25): SEQ ID NO: 6430; WAN024BRG_at; Start 223; Stop 247
aaaacaaatcttactatgattgcag

SEQ ID NO: 91422 - DNA, 25 bp, Artificial
  probe
  misc_feature (1)..(25): SEQ ID NO: 6430; WAN024BRG_at; Start 33; Stop 57
tggagttggtttaggtcaggcttac

SEQ ID NO: 91423 - DNA, 25 bp, Artificial
  probe
  misc_feature (1)..(25): SEQ ID NO: 6430; WAN024BRG_at; Start 544; Stop 568
caaatgtctagtagttataatgtag

SEQ ID NO: 91424 - DNA, 25 bp, Artificial
  probe
  misc_feature (1)..(25): SEQ ID NO: 6430; WAN024BRG_at; Start 44; Stop 68
taggtcaggcttactcgacctttaa

SEQ ID NO: 91425 - DNA, 25 bp, Artificial
  probe
  misc_feature (1)..(25): SEQ ID NO: 6430; WAN024BRG_at; Start 189; Stop 213
ggtaataatagttttgtccagtcta

SEQ ID NO: 91426 - DNA, 25 bp, Artificial
  probe
  misc_feature (1)..(25): SEQ ID NO: 6463; WAN024BRH_at; Start 1256; Stop 1280
tcaatagaatggtgttgatatcacc

SEQ ID NO: 91427 - DNA, 25 bp, Artificial
  probe
  misc_feature (1)..(25): SEQ ID NO: 6463; WAN024BRH_at; Start 222; Stop 246
ttacccgctactctatagaatggag

SEQ ID NO: 91428 - DNA, 25 bp, Artificial
  probe
  misc_feature (1)..(25): SEQ ID NO: 6463; WAN024BRH_at; Start 472; Stop 496
tcaggtgccaatattgtgataatgt

SEQ ID NO: 91429 - DNA, 25 bp, Artificial
  probe
  misc_feature (1)..(25): SEQ ID NO: 6463; WAN024BRH_at; Start 399; Stop 423
gaatacgtttatcacaacagtagca

SEQ ID NO: 91430 - DNA, 25 bp, Artificial
  probe
  misc_feature (1)..(25): SEQ ID NO: 6463; WAN024BRH_at; Start 1177; Stop 1201
tctactcgtgctgattttgctaaca

SEQ ID NO: 91431 - DNA, 25 bp, Artificial
  probe
  misc_feature (1)..(25): SEQ ID NO: 6463; WAN024BRH_at; Start 83; Stop 107
tatgcagtgaaaataatgatgttac

SEQ ID NO: 91432 - DNA, 25 bp, Artificial
  probe
  misc_feature (1)..(25): SEQ ID NO: 6463; WAN024BRH_at; Start 178; Stop 202
ccctatgtgtggtatagtagcttct

SEQ ID NO: 91433 - DNA, 25 bp, Artificial
  probe
  misc_feature (1)..(25): SEQ ID NO: 6463; WAN024BRH_at; Start 1008; Stop 1032
caaatatggttttactcttgtggga

SEQ ID NO: 91434 - DNA, 25 bp, Artificial
  probe
  misc_feature (1)..(25): SEQ ID NO: 6463; WAN024BRH_at; Start 747; Stop 771
gattccgttatctgcagtttttaaa

SEQ ID NO: 91435 - DNA, 25 bp, Artificial
  probe
  misc_feature (1)..(25): SEQ ID NO: 6463; WAN024BRH_at; Start 1116; Stop 1140
cgctcaaagaaatatatacgggatg

SEQ ID NO: 91436 - DNA, 25 bp, Artificial
  probe
  misc_feature (1)..(25): SEQ ID NO: 6463; WAN024BRH_at; Start 1130; Stop 1154
tatacgggatgctgatatatctgta

SEQ ID NO: 91437 - DNA, 25 bp, Artificial
  probe
  misc_feature (1)..(25): SEQ ID NO: 6463; WAN024BRH_at; Start 299; Stop 323
tggcaactttgttgttaactctacc

SEQ ID NO: 91438 - DNA, 25 bp, Artificial
  probe
  misc_feature (1)..(25): SEQ ID NO: 6463; WAN024BRH_at; Start 847; Stop 871
gtatcagctagtcgtaatttacaga

SEQ ID NO: 91439 - DNA, 25 bp, Artificial
  probe
  misc_feature (1)..(25): SEQ ID NO: 6463; WAN024BRH_at; Start 612; Stop 636
ctgtctcttctctatcgttacaggg

SEQ ID NO: 91440 - DNA, 25 bp, Artificial
  probe
  misc_feature (1)..(25): SEQ ID NO: 6463; WAN024BRH_at; Start 553; Stop 577
cagttgagtactaaaaaatggagac

SEQ ID NO: 91441 - DNA, 25 bp, Artificial
  probe
  misc_feature (1)..(25): SEQ ID NO: 6463; WAN024BRH_at; Start 522; Stop 546
gattctcattcatacatatcagcta

SEQ ID NO: 91442 - DNA, 25 bp, Artificial
  probe
  misc_feature (1)..(25): SEQ ID NO: 6463; WAN024BRH_at; Start 888; Stop 912
tatgggcaattatttcgaaggtcgt

SEQ ID NO: 91443 - DNA, 25 bp, Artificial
  probe
  misc_feature (1)..(25): SEQ ID NO: 6463; WAN024BRH_at; Start 992; Stop 1016
caaacgtacattcaaccaaatatgg

SEQ ID NO: 91444 - DNA, 25 bp, Artificial
  probe
  misc_feature (1)..(25): SEQ ID NO: 6463; WAN024BRH_at; Start 165; Stop 189
taatatttttcatccctatgtgtgg

SEQ ID NO: 91445 - DNA, 25 bp, Artificial
  probe
  misc_feature (1)..(25): SEQ ID NO: 6463; WAN024BRH_at; Start 594; Stop 618
taacacagcgatagttatctgtctc

SEQ ID NO: 91446 - DNA, 25 bp, Artificial
  probe
  misc_feature (1)..(25): SEQ ID NO: 6463; WAN024BRH_at; Start 732; Stop 756
gcttgcggcactactgattccgtta

SEQ ID NO: 91447 - DNA, 25 bp, Artificial
  probe
  misc_feature (1)..(25): SEQ ID NO: 6463; WAN024BRH_at; Start 717; Stop 741
tgtaatgttagttccgcttgcggca

SEQ ID NO: 91448 - DNA, 25 bp, Artificial
  probe
  misc_feature (1)..(25): SEQ ID NO: 6463; WAN024BRH_at; Start 782; Stop 806
taagtgggcaagtttcatctataaa

SEQ ID NO: 91449 - DNA, 25 bp, Artificial
  probe
  misc_feature (1)..(25): SEQ ID NO: 6463; WAN024BRH_at; Start 68; Stop 92
cagggactttaattttatgcagtga

SEQ ID NO: 91450 - DNA, 25 bp, Artificial
  probe
  misc_feature (1)..(25): SEQ ID NO: 6463; WAN024BRH_at; Start 960; Stop 984
taatcaaacttggtttatggacacc

SEQ ID NO: 91451 - DNA, 25 bp, Artificial
  probe
  misc_feature (1)..(25): SEQ ID NO: 6463; WAN024BRH_at; Start 286; Stop 310
caatggctggctttggcaactttgt

SEQ ID NO: 91452 - DNA, 25 bp, Artificial
  probe
  misc_feature (1)..(25): SEQ ID NO: 6463; WAN024BRH_at; Start 579; Stop 603
actaaattgtaatactaacacagcg

SEQ ID NO: 91453 - DNA, 25 bp, Artificial
  probe
  misc_feature (1)..(25): SEQ ID NO: 6463; WAN024BRH_at; Start 315; Stop 339
aactctaccttctaaagccattgtg

SEQ ID NO: 91454 - DNA, 25 bp, Artificial
  probe
  misc_feature (1)..(25): SEQ ID NO: 6463; WAN024BRH_at; Start 1077; Stop 1101
tatgctaacaggctttttgatgaga

SEQ ID NO: 91455 - DNA, 25 bp, Artificial
  probe
  misc_feature (1)..(25): SEQ ID NO: 6463; WAN024BRH_at; Start 1274; Stop 1298
tatcaccattggatgaaatgggtgg

SEQ ID NO: 91456 - DNA, 25 bp, Artificial
  probe
  misc_feature (1)..(25): SEQ ID NO: 6463; WAN024BRH_at; Start 331; Stop 355
gccattgtgttaagcgaaaggaaaa

SEQ ID NO: 91457 - DNA, 25 bp, Artificial
  probe
  misc_feature (1)..(25): SEQ ID NO: 6463; WAN024BRH_at; Start 271; Stop 295
gatttgattttcatgcaatggctgg

SEQ ID NO: 91458 - DNA, 25 bp, Artificial
  probe
  misc_feature (1)..(25): SEQ ID NO: 6463; WAN024BRH_at; Start 1039; Stop 1063
tatgtgaatggaggatactttggaa

SEQ ID NO: 91459 - DNA, 25 bp, Artificial
  probe
  misc_feature (1)..(25): SEQ ID NO: 6463; WAN024BRH_at; Start 830; Stop 854
tgctagatggtgagtttgtatcagc

SEQ ID NO: 91460 - DNA, 25 bp, Artificial
  probe
  misc_feature (1)..(25): SEQ ID NO: 6398; WAN024BRI_at; Start 264; Stop 288
cgacttaatagttgttcgtattccg

SEQ ID NO: 91461 - DNA, 25 bp, Artificial
  probe
  misc_feature (1)..(25): SEQ ID NO: 6398; WAN024BRI_at; Start 404; Stop 428
tattagctccatatatatacgccaa

SEQ ID NO: 91462 - DNA, 25 bp, Artificial
  probe
  misc_feature (1)..(25): SEQ ID NO: 6398; WAN024BRI_at; Start 280; Stop 304
cgtattccgtctataattggatcaa

SEQ ID NO: 91463 - DNA, 25 bp, Artificial
  probe
  misc_feature (1)..(25): SEQ ID NO: 6398; WAN024BRI_at; Start 150; Stop 174
ccctgaaggatatcataaagcgaac

SEQ ID NO: 91464 - DNA, 25 bp, Artificial
  probe
  misc_feature (1)..(25): SEQ ID NO: 6398; WAN024BRI_at; Start 873; Stop 897
acctcgtgcggtaattgaagctatg

SEQ ID NO: 91465 - DNA, 25 bp, Artificial
  probe
  misc_feature (1)..(25): SEQ ID NO: 6398; WAN024BRI_at; Start 243; Stop 267
tattgaaggaatgattgatagcgac

SEQ ID NO: 91466 - DNA, 25 bp, Artificial
  probe
  misc_feature (1)..(25): SEQ ID NO: 6398; WAN024BRI_at; Start 206; Stop 230
tacatcaggttctatttggtcaaaa

SEQ ID NO: 91467 - DNA, 25 bp, Artificial
  probe
  misc_feature (1)..(25): SEQ ID NO: 6398; WAN024BRI_at; Start 1080; Stop 1104
tgtattaaataaacgcagaagtgac

SEQ ID NO: 91468 - DNA, 25 bp, Artificial
  probe
  misc_feature (1)..(25): SEQ ID NO: 6398; WAN024BRI_at; Start 952; Stop 976
gggccacattgtctatttactccat

SEQ ID NO: 91469 - DNA, 25 bp, Artificial
  probe
  misc_feature (1)..(25): SEQ ID NO: 6398; WAN024BRI_at; Start 508; Stop 532
aaatctaatatcgttgcttcaaatg

SEQ ID NO: 91470 - DNA, 25 bp, Artificial
  probe
  misc_feature (1)..(25): SEQ ID NO: 6398; WAN024BRI_at; Start 135; Stop 159
gaaggtggaatcataccctgaagga

SEQ ID NO: 91471 - DNA, 25 bp, Artificial
  probe
  misc_feature (1)..(25): SEQ ID NO: 6398; WAN024BRI_at; Start 628; Stop 652
tctgtgaatgtacgagccaagggcc

SEQ ID NO: 91472 - DNA, 25 bp, Artificial
  probe
  misc_feature (1)..(25): SEQ ID NO: 6398; WAN024BRI_at; Start 311; Stop 335
cagactacgcattgaagataggtaa

SEQ ID NO: 91473 - DNA, 25 bp, Artificial
  probe
  misc_feature (1)..(25): SEQ ID NO: 6398; WAN024BRI_at; Start 116; Stop 140
tactatgtagtcgttatgagaaggt

SEQ ID NO: 91474 - DNA, 25 bp, Artificial
  probe
  misc_feature (1)..(25): SEQ ID NO: 6398; WAN024BRI_at; Start 760; Stop 784
gaattgggagtagcgaatagaatcc

SEQ ID NO: 91475 - DNA, 25 bp, Artificial
  probe
  misc_feature (1)..(25): SEQ ID NO: 6398; WAN024BRI_at; Start 709; Stop 733
tattatttagcaggtgatggtgatc

SEQ ID NO: 91476 - DNA, 25 bp, Artificial
  probe
  misc_feature (1)..(25): SEQ ID NO: 6398; WAN024BRI_at; Start 564; Stop 588
gaagagccgtctttataagttgaaa

SEQ ID NO: 91477 - DNA, 25 bp, Artificial
  probe
  misc_feature (1)..(25): SEQ ID NO: 6398; WAN024BRI_at; Start 94; Stop 118
gctaaagcatttggagagattgtac

SEQ ID NO: 91478 - DNA, 25 bp, Artificial
  probe
  misc_feature (1)..(25): SEQ ID NO: 6398; WAN024BRI_at; Start 451; Stop 475
gctaattattgcatatacgtgacag

SEQ ID NO: 91479 - DNA, 25 bp, Artificial
  probe
  misc_feature (1)..(25): SEQ ID NO: 6398; WAN024BRI_at; Start 376; Stop 400
tactggtatcatagtttaaagggaa

SEQ ID NO: 91480 - DNA, 25 bp, Artificial
  probe
  misc_feature (1)..(25): SEQ ID NO: 6398; WAN024BRI_at; Start 12; Stop 36
tatagcgactgaatttagatgtaca

SEQ ID NO: 91481 - DNA, 25 bp, Artificial
  probe
  misc_feature (1)..(25): SEQ ID NO: 6398; WAN024BRI_at; Start 78; Stop 102
tatttatgagcgctatgctaaagca

SEQ ID NO: 91482 - DNA, 25 bp, Artificial
  probe
  misc_feature (1)..(25): SEQ ID NO: 6398; WAN024BRI_at; Start 917; Stop 941
tagggtctaataaagcaggaattcc

SEQ ID NO: 91483 - DNA, 25 bp, Artificial
  probe
  misc_feature (1)..(25): SEQ ID NO: 6398; WAN024BRI_at; Start 882; Stop 906
ggtaattgaagctatgagccgtgct

SEQ ID NO: 91484 - DNA, 25 bp, Artificial
  probe
  misc_feature (1)..(25): SEQ ID NO: 6398; WAN024BRI_at; Start 540; Stop 564
tacctctgtagagaatagatctttg

SEQ ID NO: 91485 - DNA, 25 bp, Artificial
  probe
  misc_feature (1)..(25): SEQ ID NO: 6398; WAN024BRI_at; Start 610; Stop 634
tcaataatgacaacagcatctgtga

SEQ ID NO: 91486 - DNA, 25 bp, Artificial
  probe
  misc_feature (1)..(25): SEQ ID NO: 6398; WAN024BRI_at; Start 296; Stop 320
ttggatcaaaaactgcagactacgc

SEQ ID NO: 91487 - DNA, 25 bp, Artificial
  probe
  misc_feature (1)..(25): SEQ ID NO: 6398; WAN024BRI_at; Start 189; Stop 213
tatccctatagaaggtctacatcag

SEQ ID NO: 91488 - DNA, 25 bp, Artificial
  probe
  misc_feature (1)..(25): SEQ ID NO: 6398; WAN024BRI_at; Start 986; Stop 1010
aagcgattgcgggatctattataga

SEQ ID NO: 91489 - DNA, 25 bp, Artificial
  probe
  misc_feature (1)..(25): SEQ ID NO: 6398; WAN024BRI_at; Start 927; Stop 951
taaagcaggaattccagagttgctg

SEQ ID NO: 91490 - DNA, 25 bp, Artificial
  probe
  misc_feature (1)..(25): SEQ ID NO: 6398; WAN024BRI_at; Start 640; Stop 664
cgagccaagggccatagatttgtat

SEQ ID NO: 91491 - DNA, 25 bp, Artificial
  probe
  misc_feature (1)..(25): SEQ ID NO: 6398; WAN024BRI_at; Start 896; Stop 920
tgagccgtgcttgcccttgtatagg

SEQ ID NO: 91492 - DNA, 25 bp, Artificial
  probe
  misc_feature (1)..(25): SEQ ID NO: 6398; WAN024BRI_at; Start 329; Stop 353
taggtaagccgtatctgacagaaat

SEQ ID NO: 91493 - DNA, 25 bp, Artificial
  probe
  misc_feature (1)..(25): SEQ ID NO: 6398; WAN024BRI_at; Start 974; Stop 998
catcctcttcacaagcgattgcggg

SEQ ID NO: 91494 - DNA, 25 bp, Artificial
  probe
  misc_feature (1)..(25): SEQ ID NO: 6490; WAN024BRJ_at; Start 285; Stop 309
taaatctggagtaaaatgtggtcct

SEQ ID NO: 91495 - DNA, 25 bp, Artificial
  probe
  misc_feature (1)..(25): SEQ ID NO: 6490; WAN024BRJ_at; Start 426; Stop 450
cattgtcttgaagggagtgagtatt

SEQ ID NO: 91496 - DNA, 25 bp, Artificial
  probe
  misc_feature (1)..(25): SEQ ID NO: 6490; WAN024BRJ_at; Start 62; Stop 86
taaaagtgtgtcgaaacaaggatct

SEQ ID NO: 91497 - DNA, 25 bp, Artificial
  probe
  misc_feature (1)..(25): SEQ ID NO: 6490; WAN024BRJ_at; Start 309; Stop 333
tggagtacttatatatgatcatgac

SEQ ID NO: 91498 - DNA, 25 bp, Artificial
  probe
  misc_feature (1)..(25): SEQ ID NO: 6490; WAN024BRJ_at; Start 109; Stop 133
tttggaaagaatgtaactgtcgaac

SEQ ID NO: 91499 - DNA, 25 bp, Artificial
  probe
  misc_feature (1)..(25): SEQ ID NO: 6490; WAN024BRJ_at; Start 526; Stop 550
cgtttatcaagggagatgaaattat

SEQ ID NO: 91500 - DNA, 25 bp, Artificial
  probe
  misc_feature (1)..(25): SEQ ID NO: 6490; WAN024BRJ_at; Start 346; Stop 370
gttccaggtggattgaaagcaaaaa

SEQ ID NO: 91501 - DNA, 25 bp, Artificial
  probe
  misc_feature (1)..(25): SEQ ID NO: 6490; WAN024BRJ_at; Start 27; Stop 51
tggtttacttcgtgcaaatatttgc

SEQ ID NO: 91502 - DNA, 25 bp, Artificial
  probe
  misc_feature (1)..(25): SEQ ID NO: 6490; WAN024BRJ_at; Start 122; Stop 146
taactgtcgaacaggaatctaatgc

SEQ ID NO: 91503 - DNA, 25 bp, Artificial
  probe
  misc_feature (1)..(25): SEQ ID NO: 6490; WAN024BRJ_at; Start 464; Stop 488
tggttgcagcaggaagtgttgtaac

SEQ ID NO: 91504 - DNA, 25 bp, Artificial
  probe
  misc_feature (1)..(25): SEQ ID NO: 6490; WAN024BRJ_at; Start 516; Stop 540
tattcagaaacgtttatcaagggag

SEQ ID NO: 91505 - DNA, 25 bp, Artificial
  probe
  misc_feature (1)..(25): SEQ ID NO: 6490; WAN024BRJ_at; Start 333; Stop 357
ctatgatgttagtgttccaggtgga

SEQ ID NO: 91506 - DNA, 25 bp, Artificial
  probe
  misc_feature (1)..(25): SEQ ID NO: 6490; WAN024BRJ_at; Start 498; Stop 522
tccagctgatactatatttattcag

SEQ ID NO: 91507 - DNA, 25 bp, Artificial
  probe
  misc_feature (1)..(25): SEQ ID NO: 6490; WAN024BRJ_at; Start 301; Stop 325
tgtggtcctggagtacttatatatg

SEQ ID NO: 91508 - DNA, 25 bp, Artificial
  probe
  misc_feature (1)..(25): SEQ ID NO: 6490; WAN024BRJ_at; Start 257; Stop 281
tgatagcttgtcgtaaatacataga

SEQ ID NO: 91509 - DNA, 25 bp, Artificial
  probe
  misc_feature (1)..(25): SEQ ID NO: 6490; WAN024BRJ_at; Start 488; Stop 512
caaaggatattccagctgatactat

SEQ ID NO: 91510 - DNA, 25 bp, Artificial
  probe
  misc_feature (1)..(25): SEQ ID NO: 6490; WAN024BRJ_at; Start 408; Stop 432
ttggattggagctaacagcattgtc

SEQ ID NO: 91511 - DNA, 25 bp, Artificial
  probe
  misc_feature (1)..(25): SEQ ID NO: 6490; WAN024BRJ_at; Start 392; Stop 416
tgattggagaaaatgtttggattgg

SEQ ID NO: 91512 - DNA, 25 bp, Artificial
  probe
  misc_feature (1)..(25): SEQ ID NO: 6490; WAN024BRJ_at; Start 328; Stop 352
catgactatgatgttagtgttccag

SEQ ID NO: 91513 - DNA, 25 bp, Artificial
  probe
  misc_feature (1)..(25): SEQ ID NO: 6490; WAN024BRJ_at; Start 129; Stop 153
cgaacaggaatctaatgctaaatta

SEQ ID NO: 91514 - DNA, 25 bp, Artificial
  probe
  misc_feature (1)..(25): SEQ ID NO: 6490; WAN024BRJ_at; Start 375; Stop 399
taagacggccccagttatgattgga

SEQ ID NO: 91515 - DNA, 25 bp, Artificial
  probe
  misc_feature (1)..(25): SEQ ID NO: 6490; WAN024BRJ_at; Start 418; Stop 442
gctaacagcattgtcttgaagggag

SEQ ID NO: 91516 - DNA, 25 bp, Artificial
  probe
  misc_feature (1)..(25): SEQ ID NO: 6490; WAN024BRJ_at; Start 479; Stop 503
gtgttgtaacaaaggatattccagc

SEQ ID NO: 91517 - DNA, 25 bp, Artificial
  probe
  misc_feature (1)..(25): SEQ ID NO: 6490; WAN024BRJ_at; Start 18; Stop 42
aaatattgttggtttacttcgtgca

SEQ ID NO: 91518 - DNA, 25 bp, Artificial
  probe
  misc_feature (1)..(25): SEQ ID NO: 6490; WAN024BRJ_at; Start 188; Stop 212
gagtattgaaagttagaaaaggagc

SEQ ID NO: 91519 - DNA, 25 bp, Artificial
  probe
  misc_feature (1)..(25): SEQ ID NO: 6490; WAN024BRJ_at; Start 380; Stop 404
cggccccagttatgattggagaaaa

SEQ ID NO: 91520 - DNA, 25 bp, Artificial
  probe
  misc_feature (1)..(25): SEQ ID NO: 6490; WAN024BRJ_at; Start 245; Stop 269
gtaataattgtatgatagcttgtcg

SEQ ID NO: 91521 - DNA, 25 bp, Artificial
  probe
  misc_feature (1)..(25): SEQ ID NO: 6490; WAN024BRJ_at; Start 50; Stop 74
gcttgatattattaaaagtgtgtcg

SEQ ID NO: 91522 - DNA, 25 bp, Artificial
  probe
  misc_feature (1)..(25): SEQ ID NO: 6490; WAN024BRJ_at; Start 271; Stop 295
aaatacatagatattaaatctggag

SEQ ID NO: 91523 - DNA, 25 bp, Artificial
  probe
  misc_feature (1)..(25): SEQ ID NO: 6490; WAN024BRJ_at; Start 201; Stop 225
tagaaaaggagcaaaactcaagatt

SEQ ID NO: 91524 - DNA, 25 bp, Artificial
  probe
  misc_feature (1)..(25): SEQ ID NO: 6490; WAN024BRJ_at; Start 211; Stop 235
gcaaaactcaagatttctgatgatg

SEQ ID NO: 91525 - DNA, 25 bp, Artificial
  probe
  misc_feature (1)..(25): SEQ ID NO: 6490; WAN024BRJ_at; Start 447; Stop 471
tattggtgagaatagtgtggttgca

SEQ ID NO: 91526 - DNA, 25 bp, Artificial
  probe
  misc_feature (1)..(25): SEQ ID NO: 6490; WAN024BRJ_at; Start 70; Stop 94
tgtcgaaacaaggatcttacttttc

SEQ ID NO: 91527 - DNA, 25 bp, Artificial
  probe
  misc_feature (1)..(25): SEQ ID NO: 6490; WAN024BRJ_at; Start 292; Stop 316
ggagtaaaatgtggtcctggagtac

SEQ ID NO: 91528 - DNA, 25 bp, Artificial
  probe
  misc_feature (1)..(25): SEQ ID NO: 6509; WAN024BRK_at; Start 930; Stop 954
aattgttaaagatagagagacaggc

SEQ ID NO: 91529 - DNA, 25 bp, Artificial
  probe
  misc_feature (1)..(25): SEQ ID NO: 6509; WAN024BRK_at; Start 903; Stop 927
tacgacagataatccaggttgcaaa

SEQ ID NO: 91530 - DNA, 25 bp, Artificial
  probe
  misc_feature (1)..(25): SEQ ID NO: 6509; WAN024BRK_at; Start 857; Stop 881
tgagcaatgtattactagaaaacgc

SEQ ID NO: 91531 - DNA, 25 bp, Artificial
  probe
  misc_feature (1)..(25): SEQ ID NO: 6509; WAN024BRK_at; Start 477; Stop 501
aactcttggcttgattttgggtgac

SEQ ID NO: 91532 - DNA, 25 bp, Artificial
  probe
  misc_feature (1)..(25): SEQ ID NO: 6509; WAN024BRK_at; Start 793; Stop 817
gatgcgatacctcatattacccgtt

SEQ ID NO: 91533 - DNA, 25 bp, Artificial
  probe
  misc_feature (1)..(25): SEQ ID NO: 6509; WAN024BRK_at; Start 356; Stop 380
taggtagtgtcttaacaatgggttc

SEQ ID NO: 91534 - DNA, 25 bp, Artificial
  probe
  misc_feature (1)..(25): SEQ ID NO: 6509; WAN024BRK_at; Start 666; Stop 690
taagagtcgatatcccaaaacagag

SEQ ID NO: 91535 - DNA, 25 bp, Artificial
  probe
  misc_feature (1)..(25): SEQ ID NO: 6509; WAN024BRK_at; Start 251; Stop 275
aatatagaccggatatagacttgac

SEQ ID NO: 91536 - DNA, 25 bp, Artificial
  probe
  misc_feature (1)..(25): SEQ ID NO: 6509; WAN024BRK_at; Start 832; Stop 856
catcccagtgtgtatggtgaaggaa

SEQ ID NO: 91537 - DNA, 25 bp, Artificial
  probe
  misc_feature (1)..(25): SEQ ID NO: 6509; WAN024BRK_at; Start 944; Stop 968
gagagacaggctatatatttcaagg

SEQ ID NO: 91538 - DNA, 25 bp, Artificial
  probe
  misc_feature (1)..(25): SEQ ID NO: 6509; WAN024BRK_at; Start 514; Stop 538
cctgggtcaggagtgaacattgaaa

SEQ ID NO: 91539 - DNA, 25 bp, Artificial
  probe
  misc_feature (1)..(25): SEQ ID NO: 6509; WAN024BRK_at; Start 815; Stop 839
gttcccatgcaattatccatcccag

SEQ ID NO: 91540 - DNA, 25 bp, Artificial
  probe
  misc_feature (1)..(25): SEQ ID NO: 6509; WAN024BRK_at; Start 287; Stop 311
aaccaaatgtatatgctagcctagc

SEQ ID NO: 91541 - DNA, 25 bp, Artificial
  probe
  misc_feature (1)..(25): SEQ ID NO: 6509; WAN024BRK_at; Start 887; Stop 911
caggacgtgttttaattacgacaga

SEQ ID NO: 91542 - DNA, 25 bp, Artificial
  probe
  misc_feature (1)..(25): SEQ ID NO: 6509; WAN024BRK_at; Start 573; Stop 597
tggaattcaaggagaaacaatcgtt

SEQ ID NO: 91543 - DNA, 25 bp, Artificial
  probe
  misc_feature (1)..(25): SEQ ID NO: 6509; WAN024BRK_at; Start 546; Stop 570
tgtgcaacagtatccaaatggtgga

SEQ ID NO: 91544 - DNA, 25 bp, Artificial
  probe
  misc_feature (1)..(25): SEQ ID NO: 6509; WAN024BRK_at; Start 979; Stop 1003
gaggaactagtctctatattggaag

SEQ ID NO: 91545 - DNA, 25 bp, Artificial
  probe
  misc_feature (1)..(25): SEQ ID NO: 6509; WAN024BRK_at; Start 389; Stop 413
gaagcctggtgttattactgtttag

SEQ ID NO: 91546 - DNA, 25 bp, Artificial
  probe
  misc_feature (1)..(25): SEQ ID NO: 6509; WAN024BRK_at; Start 775; Stop 799
tatttgggacaacaaaaagatgcga

SEQ ID NO: 91547 - DNA, 25 bp, Artificial
  probe
  misc_feature (1)..(25): SEQ ID NO: 6509; WAN024BRK_at; Start 371; Stop 395
caatgggttcttgtgtaagaagcct

SEQ ID NO: 91548 - DNA, 25 bp, Artificial
  probe
  misc_feature (1)..(25): SEQ ID NO: 6509; WAN024BRK_at; Start 699; Stop 723
tattggctttatagaaccgacagag

SEQ ID NO: 91549 - DNA, 25 bp, Artificial
  probe
  misc_feature (1)..(25): SEQ ID NO: 6509; WAN024BRK_at; Start 75; Stop 99
tatagagtcactagttgagtatggg

SEQ ID NO: 91550 - DNA, 25 bp, Artificial
  probe
  misc_feature (1)..(25): SEQ ID NO: 6509; WAN024BRK_at; Start 180; Stop 204
tattgatagaagaggaataaaccct

SEQ ID NO: 91551 - DNA, 25 bp, Artificial
  probe
  misc_feature (1)..(25): SEQ ID NO: 6509; WAN024BRK_at; Start 499; Stop 523
gactctaagctgatacctgggtcag

SEQ ID NO: 91552 - DNA, 25 bp, Artificial
  probe
  misc_feature (1)..(25): SEQ ID NO: 6509; WAN024BRK_at; Start 872; Stop 896
tagaaaacgctagttcaggacgtgt

SEQ ID NO: 91553 - DNA, 25 bp, Artificial
  probe
  misc_feature (1)..(25): SEQ ID NO: 6509; WAN024BRK_at; Start 107; Stop 131
tgctagtgtcatgtccttatggaga

SEQ ID NO: 91554 - DNA, 25 bp, Artificial
  probe
  misc_feature (1)..(25): SEQ ID NO: 6509; WAN024BRK_at; Start 266; Stop 290
tagacttgacatataccgtgaaacc

SEQ ID NO: 91555 - DNA, 25 bp, Artificial
  probe
  misc_feature (1)..(25): SEQ ID NO: 6509; WAN024BRK_at; Start 635; Stop 659
tagatacttatctggctgctgccca

SEQ ID NO: 91556 - DNA, 25 bp, Artificial
  probe
  misc_feature (1)..(25): SEQ ID NO: 6509; WAN024BRK_at; Start 712; Stop 736
gaaccgacagagagtaattatgaac

SEQ ID NO: 91557 - DNA, 25 bp, Artificial
  probe
  misc_feature (1)..(25): SEQ ID NO: 6509; WAN024BRK_at; Start 651; Stop 675
tgctgcccaaattattaagagtcga

SEQ ID NO: 91558 - DNA, 25 bp, Artificial
  probe
  misc_feature (1)..(25): SEQ ID NO: 6509; WAN024BRK_at; Start 1048; Stop 1072
caagggagaatgtatatagagcaat

SEQ ID NO: 91559 - DNA, 25 bp, Artificial
  probe
  misc_feature (1)..(25): SEQ ID NO: 6509; WAN024BRK_at; Start 531; Stop 555
cattgaaaagtatcctgtgcaacag

SEQ ID NO: 91560 - DNA, 25 bp, Artificial
  probe
  misc_feature (1)..(25): SEQ ID NO: 6509; WAN024BRK_at; Start 1032; Stop 1056
aaaagagatgggacttcaagggaga

SEQ ID NO: 91561 - DNA, 25 bp, Artificial
  probe
  misc_feature (1)..(25): SEQ ID NO: 6509; WAN024BRK_at; Start 301; Stop 325
gctagcctagctgcaacaattttag

SEQ ID NO: 91562 - DNA, 25 bp, Artificial
  probe
  misc_feature (1)..(25): SEQ ID NO: 7374; WAN024BRL_at; Start 18; Stop 42
attgttaagacactacctaaacctg

SEQ ID NO: 91563 - DNA, 25 bp, Artificial
  probe
  misc_feature (1)..(25): SEQ ID NO: 7374; WAN024BRL_at; Start 4; Stop 28
ttacacaagaacccattgttaagac

SEQ ID NO: 91564 - DNA, 25 bp, Artificial
  probe
  misc_feature (1)..(25): SEQ ID NO: 7374; WAN024BRL_at; Start 11; Stop 35
agaacccattgttaagacactacct

SEQ ID NO: 91565 - DNA, 25 bp, Artificial
  probe
  misc_feature (1)..(25): SEQ ID NO: 7374; WAN024BRL_at; Start 2; Stop 26
tcttacacaagaacccattgttaag

SEQ ID NO: 91566 - DNA, 25 bp, Artificial
  probe
  misc_feature (1)..(25): SEQ ID NO: 7374; WAN024BRL_at; Start 6; Stop 30
acacaagaacccattgttaagacac

SEQ ID NO: 91567 - DNA, 25 bp, Artificial
  probe
  misc_feature (1)..(25): SEQ ID NO: 7374; WAN024BRL_at; Start 5; Stop 29
tacacaagaacccattgttaagaca

SEQ ID NO: 91568 - DNA, 25 bp, Artificial
  probe
  misc_feature (1)..(25): SEQ ID NO: 7374; WAN024BRL_at; Start 38; Stop 62
acctgttacgttatttatatattag

SEQ ID NO: 91569 - DNA, 25 bp, Artificial
  probe
  misc_feature (1)..(25): SEQ ID NO: 7374; WAN024BRL_at; Start 7; Stop 31
cacaagaacccattgttaagacact

SEQ ID NO: 91570 - DNA, 25 bp, Artificial
  probe
  misc_feature (1)..(25): SEQ ID NO: 7374; WAN024BRL_at; Start 8; Stop 32
acaagaacccattgttaagacacta

SEQ ID NO: 91571 - DNA, 25 bp, Artificial
  probe
  misc_feature (1)..(25): SEQ ID NO: 7374; WAN024BRL_at; Start 3; Stop 27
cttacacaagaacccattgttaaga

SEQ ID NO: 91572 - DNA, 25 bp, Artificial
  probe
  misc_feature (1)..(25): SEQ ID NO: 7374; WAN024BRL_at; Start 17; Stop 41
cattgttaagacactacctaaacct

SEQ ID NO: 91573 - DNA, 25 bp, Artificial
  probe
  misc_feature (1)..(25): SEQ ID NO: 7374; WAN024BRL_at; Start 12; Stop 36
gaacccattgttaagacactaccta

SEQ ID NO: 91574 - DNA, 25 bp, Artificial
  probe
  misc_feature (1)..(25): SEQ ID NO: 7374; WAN024BRL_at; Start 9; Stop 33
caagaacccattgttaagacactac

SEQ ID NO: 91575 - DNA, 25 bp, Artificial
  probe
  misc_feature (1)..(25): SEQ ID NO: 7374; WAN024BRL_at; Start 1; Stop 25
ttcttacacaagaacccattgttaa

SEQ ID NO: 91576 - DNA, 25 bp, Artificial
  probe
  misc_feature (1)..(25): SEQ ID NO: 6834; WAN024BRM_at; Start 113; Stop 137
gcctgtcttgcttttcagtgctaac

SEQ ID NO: 91577 - DNA, 25 bp, Artificial
  probe
  misc_feature (1)..(25): SEQ ID NO: 6834; WAN024BRM_at; Start 114; Stop 138
cctgtcttgcttttcagtgctaaca

SEQ ID NO: 91578 - DNA, 25 bp, Artificial
  probe
  misc_feature (1)..(25): SEQ ID NO: 6834; WAN024BRM_at; Start 38; Stop 62
tagtatttcttgtagtgtcagtaga

SEQ ID NO: 91579 - DNA, 25 bp, Artificial
  probe
  misc_feature (1)..(25): SEQ ID NO: 6834; WAN024BRM_at; Start 141; Stop 165
cattaaaataaaagagatactctta

SEQ ID NO: 91580 - DNA, 25 bp, Artificial
  probe
  misc_feature (1)..(25): SEQ ID NO: 6834; WAN024BRM_at; Start 15; Stop 39
gatagtttcgactataatatgtata

SEQ ID NO: 91581 - DNA, 25 bp, Artificial
  probe
  misc_feature (1)..(25): SEQ ID NO: 6834; WAN024BRM_at; Start 132; Stop 156
gctaacatacattaaaataaaagag

SEQ ID NO: 91582 - DNA, 25 bp, Artificial
  probe
  misc_feature (1)..(25): SEQ ID NO: 6834; WAN024BRM_at; Start 41; Stop 65
tatttcttgtagtgtcagtagataa

SEQ ID NO: 91583 - DNA, 25 bp, Artificial
  probe
  misc_feature (1)..(25): SEQ ID NO: 6834; WAN024BRM_at; Start 118; Stop 142
tcttgcttttcagtgctaacataca

SEQ ID NO: 91584 - DNA, 25 bp, Artificial
  probe
  misc_feature (1)..(25): SEQ ID NO: 6834; WAN024BRM_at; Start 9; Stop 33
gaaaaagatagtttcgactataata

SEQ ID NO: 91585 - DNA, 25 bp, Artificial
  probe
  misc_feature (1)..(25): SEQ ID NO: 6834; WAN024BRM_at; Start 56; Stop 80
cagtagataatttttttagagactt

SEQ ID NO: 91586 - DNA, 25 bp, Artificial
  probe
  misc_feature (1)..(25): SEQ ID NO: 6834; WAN024BRM_at; Start 128; Stop 152
cagtgctaacatacattaaaataaa

SEQ ID NO: 91587 - DNA, 25 bp, Artificial
  probe
  misc_feature (1)..(25): SEQ ID NO: 6834; WAN024BRM_at; Start 139; Stop 163
tacattaaaataaaagagatactct

SEQ ID NO: 91588 - DNA, 25 bp, Artificial
  probe
  misc_feature (1)..(25): SEQ ID NO: 6834; WAN024BRM_at; Start 112; Stop 136
ggcctgtcttgcttttcagtgctaa

SEQ ID NO: 91589 - DNA, 25 bp, Artificial
  probe
  misc_feature (1)..(25): SEQ ID NO: 6834; WAN024BRM_at; Start 100; Stop 124
ttaaatattattggcctgtcttgct

SEQ ID NO: 91590 - DNA, 25 bp, Artificial
  probe
  misc_feature (1)..(25): SEQ ID NO: 6834; WAN024BRM_at; Start 111; Stop 135
tggcctgtcttgcttttcagtgcta

SEQ ID NO: 91591 - DNA, 25 bp, Artificial
  probe
  misc_feature (1)..(25): SEQ ID NO: 6834; WAN024BRM_at; Start 156; Stop 180
gatactcttaaatataagtaaatga

SEQ ID NO: 91592 - DNA, 25 bp, Artificial
  probe
  misc_feature (1)..(25): SEQ ID NO: 6834; WAN024BRM_at; Start 151; Stop 175
aaagagatactcttaaatataagta

SEQ ID NO: 91593 - DNA, 25 bp, Artificial
  probe
  misc_feature (1)..(25): SEQ ID NO: 6834; WAN024BRM_at; Start 126; Stop 150
ttcagtgctaacatacattaaaata

SEQ ID NO: 91594 - DNA, 25 bp, Artificial
  probe
  misc_feature (1)..(25): SEQ ID NO: 6834; WAN024BRM_at; Start 121; Stop 145
tgcttttcagtgctaacatacatta

SEQ ID NO: 91595 - DNA, 25 bp, Artificial
  probe
  misc_feature (1)..(25): SEQ ID NO: 6834; WAN024BRM_at; Start 119; Stop 143
cttgcttttcagtgctaacatacat

SEQ ID NO: 91596 - DNA, 25 bp, Artificial
  probe
  misc_feature (1)..(25): SEQ ID NO: 6834; WAN024BRM_at; Start 117; Stop 141
gtcttgcttttcagtgctaacatac

SEQ ID NO: 91597 - DNA, 25 bp, Artificial
  probe
  misc_feature (1)..(25): SEQ ID NO: 6834; WAN024BRM_at; Start 34; Stop 58
tgtatagtatttcttgtagtgtcag

SEQ ID NO: 91598 - DNA, 25 bp, Artificial
  probe
  misc_feature (1)..(25): SEQ ID NO: 6834; WAN024BRM_at; Start 4; Stop 28
gataagaaaaagatagtttcgacta

SEQ ID NO: 91599 - DNA, 25 bp, Artificial
  probe
  misc_feature (1)..(25): SEQ ID NO: 6834; WAN024BRM_at; Start 116; Stop 140
tgtcttgcttttcagtgctaacata

SEQ ID NO: 91600 - DNA, 25 bp, Artificial
  probe
  misc_feature (1)..(25): SEQ ID NO: 6834; WAN024BRM_at; Start 122; Stop 146
gcttttcagtgctaacatacattaa

SEQ ID NO: 91601 - DNA, 25 bp, Artificial
  probe
  misc_feature (1)..(25): SEQ ID NO: 6834; WAN024BRM_at; Start 99; Stop 123
tttaaatattattggcctgtcttgc

SEQ ID NO: 91602 - DNA, 25 bp, Artificial
  probe
  misc_feature (1)..(25): SEQ ID NO: 6834; WAN024BRM_at; Start 2; Stop 26
tggataagaaaaagatagtttcgac

SEQ ID NO: 91603 - DNA, 25 bp, Artificial
  probe
  misc_feature (1)..(25): SEQ ID NO: 6834; WAN024BRM_at; Start 32; Stop 56
tatgtatagtatttcttgtagtgtc

SEQ ID NO: 91604 - DNA, 25 bp, Artificial
  probe
  misc_feature (1)..(25): SEQ ID NO: 6834; WAN024BRM_at; Start 105; Stop 129
tattattggcctgtcttgcttttca

SEQ ID NO: 91605 - DNA, 25 bp, Artificial
  probe
  misc_feature (1)..(25): SEQ ID NO: 6834; WAN024BRM_at; Start 46; Stop 70
cttgtagtgtcagtagataattttt

SEQ ID NO: 91606 - DNA, 25 bp, Artificial
  probe
  misc_feature (1)..(25): SEQ ID NO: 6834; WAN024BRM_at; Start 106; Stop 130
attattggcctgtcttgcttttcag

SEQ ID NO: 91607 - DNA, 25 bp, Artificial
  probe
  misc_feature (1)..(25): SEQ ID NO: 6834; WAN024BRM_at; Start 109; Stop 133
attggcctgtcttgcttttcagtgc

SEQ ID NO: 91608 - DNA, 25 bp, Artificial
  probe
  misc_feature (1)..(25): SEQ ID NO: 6834; WAN024BRM_at; Start 36; Stop 60
tatagtatttcttgtagtgtcagta

SEQ ID NO: 91609 - DNA, 25 bp, Artificial
  probe
  misc_feature (1)..(25): SEQ ID NO: 6834; WAN024BRM_at; Start 108; Stop 132
tattggcctgtcttgcttttcagtg

SEQ ID NO: 91610 - DNA, 25 bp, Artificial
  probe
  misc_feature (1)..(25): SEQ ID NO: 6453; WAN024BRN_at; Start 18; Stop 42
tattattctcttcgcttttcaaacc

SEQ ID NO: 91611 - DNA, 25 bp, Artificial
  probe
  misc_feature (1)..(25): SEQ ID NO: 6453; WAN024BRN_at; Start 89; Stop 113
ctattgaattaacatcattgaattg

SEQ ID NO: 91612 - DNA, 25 bp, Artificial
  probe
  misc_feature (1)..(25): SEQ ID NO: 6453; WAN024BRN_at; Start 20; Stop 44
ttattctcttcgcttttcaaaccta

SEQ ID NO: 91613 - DNA, 25 bp, Artificial
  probe
  misc_feature (1)..(25): SEQ ID NO: 6453; WAN024BRN_at; Start 48; Stop 72
tatttatctatccataagtatctcc

SEQ ID NO: 91614 - DNA, 25 bp, Artificial
  probe
  misc_feature (1)..(25): SEQ ID NO: 6453; WAN024BRN_at; Start 153; Stop 177
tctctttattgcctatgtttttttg

SEQ ID NO: 91615 - DNA, 25 bp, Artificial
  probe
  misc_feature (1)..(25): SEQ ID NO: 6453; WAN024BRN_at; Start 108; Stop 132
gaattgttttgtcatattatttcta

SEQ ID NO: 91616 - DNA, 25 bp, Artificial
  probe
  misc_feature (1)..(25): SEQ ID NO: 6453; WAN024BRN_at; Start 82; Stop 106
caaaagactattgaattaacatcat

SEQ ID NO: 91617 - DNA, 25 bp, Artificial
  probe
  misc_feature (1)..(25): SEQ ID NO: 6453; WAN024BRN_at; Start 49; Stop 73
atttatctatccataagtatctccg

SEQ ID NO: 91618 - DNA, 25 bp, Artificial
  probe
  misc_feature (1)..(25): SEQ ID NO: 6453; WAN024BRN_at; Start 3; Stop 27
gaaggctatattctttattattctc

SEQ ID NO: 91619 - DNA, 25 bp, Artificial
  probe
  misc_feature (1)..(25): SEQ ID NO: 6453; WAN024BRN_at; Start 58; Stop 82
tccataagtatctccgataaaaaac

SEQ ID NO: 91620 - DNA, 25 bp, Artificial
  probe
  misc_feature (1)..(25): SEQ ID NO: 6453; WAN024BRN_at; Start 50; Stop 74
tttatctatccataagtatctccga

SEQ ID NO: 91621 - DNA, 25 bp, Artificial
  probe
  misc_feature (1)..(25): SEQ ID NO: 6453; WAN024BRN_at; Start 55; Stop 79
ctatccataagtatctccgataaaa

SEQ ID NO: 91622 - DNA, 25 bp, Artificial
  probe
  misc_feature (1)..(25): SEQ ID NO: 6453; WAN024BRN_at; Start 186; Stop 210
tatattaaacttgttccgtaactga

SEQ ID NO: 91623 - DNA, 25 bp, Artificial
  probe
  misc_feature (1)..(25): SEQ ID NO: 6453; WAN024BRN_at; Start 146; Stop 170
taatttttctctttattgcctatgt

SEQ ID NO: 91624 - DNA, 25 bp, Artificial
  probe
  misc_feature (1)..(25): SEQ ID NO: 6453; WAN024BRN_at; Start 100; Stop 124
acatcattgaattgttttgtcatat

SEQ ID NO: 91625 - DNA, 25 bp, Artificial
  probe
  misc_feature (1)..(25): SEQ ID NO: 6453; WAN024BRN_at; Start 7; Stop 31
gctatattctttattattctcttcg

SEQ ID NO: 91626 - DNA, 25 bp, Artificial
  probe
  misc_feature (1)..(25): SEQ ID NO: 6453; WAN024BRN_at; Start 54; Stop 78
tctatccataagtatctccgataaa

SEQ ID NO: 91627 - DNA, 25 bp, Artificial
  probe
  misc_feature (1)..(25): SEQ ID NO: 6453; WAN024BRN_at; Start 120; Stop 144
catattatttctaatctatgataaa

SEQ ID NO: 91628 - DNA, 25 bp, Artificial
  probe
  misc_feature (1)..(25): SEQ ID NO: 6453; WAN024BRN_at; Start 97; Stop 121
ttaacatcattgaattgttttgtca

SEQ ID NO: 91629 - DNA, 25 bp, Artificial
  probe
  misc_feature (1)..(25): SEQ ID NO: 6453; WAN024BRN_at; Start 31; Stop 55
gcttttcaaacctatcttatttatc

SEQ ID NO: 91630 - DNA, 25 bp, Artificial
  probe
  misc_feature (1)..(25): SEQ ID NO: 6453; WAN024BRN_at; Start 84; Stop 108
aaagactattgaattaacatcattg

SEQ ID NO: 91631 - DNA, 25 bp, Artificial
  probe
  misc_feature (1)..(25): SEQ ID NO: 6453; WAN024BRN_at; Start 51; Stop 75
ttatctatccataagtatctccgat

SEQ ID NO: 91632 - DNA, 25 bp, Artificial
  probe
  misc_feature (1)..(25): SEQ ID NO: 6453; WAN024BRN_at; Start 87; Stop 111
gactattgaattaacatcattgaat

SEQ ID NO: 91633 - DNA, 25 bp, Artificial
  probe
  misc_feature (1)..(25): SEQ ID NO: 6453; WAN024BRN_at; Start 23; Stop 47
ttctcttcgcttttcaaacctatct

SEQ ID NO: 91634 - DNA, 25 bp, Artificial
  probe
  misc_feature (1)..(25): SEQ ID NO: 6453; WAN024BRN_at; Start 26; Stop 50
tcttcgcttttcaaacctatcttat

SEQ ID NO: 91635 - DNA, 25 bp, Artificial
  probe
  misc_feature (1)..(25): SEQ ID NO: 6453; WAN024BRN_at; Start 56; Stop 80
tatccataagtatctccgataaaaa

SEQ ID NO: 91636 - DNA, 25 bp, Artificial
  probe
  misc_feature (1)..(25): SEQ ID NO: 6453; WAN024BRN_at; Start 21; Stop 45
tattctcttcgcttttcaaacctat

SEQ ID NO: 91637 - DNA, 25 bp, Artificial
  probe
  misc_feature (1)..(25): SEQ ID NO: 6453; WAN024BRN_at; Start 52; Stop 76
tatctatccataagtatctccgata

SEQ ID NO: 91638 - DNA, 25 bp, Artificial
  probe
  misc_feature (1)..(25): SEQ ID NO: 6453; WAN024BRN_at; Start 80; Stop 104
aacaaaagactattgaattaacatc

SEQ ID NO: 91639 - DNA, 25 bp, Artificial
  probe
  misc_feature (1)..(25): SEQ ID NO: 6453; WAN024BRN_at; Start 86; Stop 110
agactattgaattaacatcattgaa

SEQ ID NO: 91640 - DNA, 25 bp, Artificial
  probe
  misc_feature (1)..(25): SEQ ID NO: 6453; WAN024BRN_at; Start 59; Stop 83
ccataagtatctccgataaaaaaca

SEQ ID NO: 91641 - DNA, 25 bp, Artificial
  probe
  misc_feature (1)..(25): SEQ ID NO: 6453; WAN024BRN_at; Start 24; Stop 48
tctcttcgcttttcaaacctatctt

SEQ ID NO: 91642 - DNA, 25 bp, Artificial
  probe
  misc_feature (1)..(25): SEQ ID NO: 6453; WAN024BRN_at; Start 145; Stop 169
ttaatttttctctttattgcctatg

SEQ ID NO: 91643 - DNA, 25 bp, Artificial
  probe
  misc_feature (1)..(25): SEQ ID NO: 6453; WAN024BRN_at; Start 29; Stop 53
tcgcttttcaaacctatcttattta

SEQ ID NO: 91644 - DNA, 25 bp, Artificial
  probe
  misc_feature (1)..(25): SEQ ID NO: 6772; WAN024BRO_at; Start 7; Stop 31
tacttagttgatggattggtaggaa

SEQ ID NO: 91645 - DNA, 25 bp, Artificial
  probe
  misc_feature (1)..(25): SEQ ID NO: 6772; WAN024BRO_at; Start 5; Stop 29
tttacttagttgatggattggtagg

SEQ ID NO: 91646 - DNA, 25 bp, Artificial
  probe
  misc_feature (1)..(25): SEQ ID NO: 6772; WAN024BRO_at; Start 61; Stop 85
ctaatattttttgctttctgcaagt

SEQ ID NO: 91647 - DNA, 25 bp, Artificial
  probe
  misc_feature (1)..(25): SEQ ID NO: 6772; WAN024BRO_at; Start 80; Stop 104
gcaagttaataaatagtatagtaaa

SEQ ID NO: 91648 - DNA, 25 bp, Artificial
  probe
  misc_feature (1)..(25): SEQ ID NO: 6772; WAN024BRO_at; Start 128; Stop 152
cgaaattaagatattttagatactc

SEQ ID NO: 91649 - DNA, 25 bp, Artificial
  probe
  misc_feature (1)..(25): SEQ ID NO: 6772; WAN024BRO_at; Start 107; Stop 131
tttttattgcaaggagaataacgaa

SEQ ID NO: 91650 - DNA, 25 bp, Artificial
  probe
  misc_feature (1)..(25): SEQ ID NO: 6772; WAN024BRO_at; Start 111; Stop 135
tattgcaaggagaataacgaaatta

SEQ ID NO: 91651 - DNA, 25 bp, Artificial
  probe
  misc_feature (1)..(25): SEQ ID NO: 6772; WAN024BRO_at; Start 77; Stop 101
tctgcaagttaataaatagtatagt

SEQ ID NO: 91652 - DNA, 25 bp, Artificial
  probe
  misc_feature (1)..(25): SEQ ID NO: 6772; WAN024BRO_at; Start 73; Stop 97
gctttctgcaagttaataaatagta

SEQ ID NO: 91653 - DNA, 25 bp, Artificial
  probe
  misc_feature (1)..(25): SEQ ID NO: 6772; WAN024BRO_at; Start 137; Stop 161
gatattttagatactcaagattatt

SEQ ID NO: 91654 - DNA, 25 bp, Artificial
  probe
  misc_feature (1)..(25): SEQ ID NO: 6772; WAN024BRO_at; Start 113; Stop 137
ttgcaaggagaataacgaaattaag

SEQ ID NO: 91655 - DNA, 25 bp, Artificial
  probe
  misc_feature (1)..(25): SEQ ID NO: 6772; WAN024BRO_at; Start 72; Stop 96
tgctttctgcaagttaataaatagt

SEQ ID NO: 91656 - DNA, 25 bp, Artificial
  probe
  misc_feature (1)..(25): SEQ ID NO: 6772; WAN024BRO_at; Start 109; Stop 133
tttattgcaaggagaataacgaaat

SEQ ID NO: 91657 - DNA, 25 bp, Artificial
  probe
  misc_feature (1)..(25): SEQ ID NO: 6772; WAN024BRO_at; Start 93; Stop 117
tagtatagtaaaactttttattgca

SEQ ID NO: 91658 - DNA, 25 bp, Artificial
  probe
  misc_feature (1)..(25): SEQ ID NO: 6772; WAN024BRO_at; Start 116; Stop 140
caaggagaataacgaaattaagata

SEQ ID NO: 91659 - DNA, 25 bp, Artificial
  probe
  misc_feature (1)..(25): SEQ ID NO: 6772; WAN024BRO_at; Start 134; Stop 158
taagatattttagatactcaagatt

SEQ ID NO: 91660 - DNA, 25 bp, Artificial
  probe
  misc_feature (1)..(25): SEQ ID NO: 6772; WAN024BRO_at; Start 105; Stop 129
actttttattgcaaggagaataacg

SEQ ID NO: 91661 - DNA, 25 bp, Artificial
  probe
  misc_feature (1)..(25): SEQ ID NO: 6772; WAN024BRO_at; Start 110; Stop 134
ttattgcaaggagaataacgaaatt

SEQ ID NO: 91662 - DNA, 25 bp, Artificial
  probe
  misc_feature (1)..(25): SEQ ID NO: 6772; WAN024BRO_at; Start 74; Stop 98
ctttctgcaagttaataaatagtat

SEQ ID NO: 91663 - DNA, 25 bp, Artificial
  probe
  misc_feature (1)..(25): SEQ ID NO: 6772; WAN024BRO_at; Start 15; Stop 39
tgatggattggtaggaataaaaaac

SEQ ID NO: 91664 - DNA, 25 bp, Artificial
  probe
  misc_feature (1)..(25): SEQ ID NO: 6772; WAN024BRO_at; Start 108; Stop 132
ttttattgcaaggagaataacgaaa

SEQ ID NO: 91665 - DNA, 25 bp, Artificial
  probe
  misc_feature (1)..(25): SEQ ID NO: 6772; WAN024BRO_at; Start 8; Stop 32
acttagttgatggattggtaggaat

SEQ ID NO: 91666 - DNA, 25 bp, Artificial
  probe
  misc_feature (1)..(25): SEQ ID NO: 6772; WAN024BRO_at; Start 9; Stop 33
cttagttgatggattggtaggaata

SEQ ID NO: 91667 - DNA, 25 bp, Artificial
  probe
  misc_feature (1)..(25): SEQ ID NO: 6772; WAN024BRO_at; Start 115; Stop 139
gcaaggagaataacgaaattaagat

SEQ ID NO: 91668 - DNA, 25 bp, Artificial
  probe
  misc_feature (1)..(25): SEQ ID NO: 6772; WAN024BRO_at; Start 4; Stop 28
ctttacttagttgatggattggtag

SEQ ID NO: 91669 - DNA, 25 bp, Artificial
  probe
  misc_feature (1)..(25): SEQ ID NO: 6772; WAN024BRO_at; Start 60; Stop 84
actaatattttttgctttctgcaag

SEQ ID NO: 91670 - DNA, 25 bp, Artificial
  probe
  misc_feature (1)..(25): SEQ ID NO: 6772; WAN024BRO_at; Start 11; Stop 35
tagttgatggattggtaggaataaa

SEQ ID NO: 91671 - DNA, 25 bp, Artificial
  probe
  misc_feature (1)..(25): SEQ ID NO: 6772; WAN024BRO_at; Start 146; Stop 170
gatactcaagattattgaaatctta

SEQ ID NO: 91672 - DNA, 25 bp, Artificial
  probe
  misc_feature (1)..(25): SEQ ID NO: 6772; WAN024BRO_at; Start 114; Stop 138
tgcaaggagaataacgaaattaaga

SEQ ID NO: 91673 - DNA, 25 bp, Artificial
  probe
  misc_feature (1)..(25): SEQ ID NO: 6772; WAN024BRO_at; Start 78; Stop 102
ctgcaagttaataaatagtatagta

SEQ ID NO: 91674 - DNA, 25 bp, Artificial
  probe
  misc_feature (1)..(25): SEQ ID NO: 6772; WAN024BRO_at; Start 3; Stop 27
gctttacttagttgatggattggta

SEQ ID NO: 91675 - DNA, 25 bp, Artificial
  probe
  misc_feature (1)..(25): SEQ ID NO: 6772; WAN024BRO_at; Start 59; Stop 83
tactaatattttttgctttctgcaa

SEQ ID NO: 91676 - DNA, 25 bp, Artificial
  probe
  misc_feature (1)..(25): SEQ ID NO: 6772; WAN024BRO_at; Start 131; Stop 155
aattaagatattttagatactcaag

SEQ ID NO: 91677 - DNA, 25 bp, Artificial
  probe
  misc_feature (1)..(25): SEQ ID NO: 6772; WAN024BRO_at; Start 106; Stop 130
ctttttattgcaaggagaataacga

SEQ ID NO: 91678 - DNA, 25 bp, Artificial
  probe
  misc_feature (1)..(25): SEQ ID NO: 6673; WAN024BRP_at; Start 122; Stop 146
tatcaatcgtttatgtaatcgttga

SEQ ID NO: 91679 - DNA, 25 bp, Artificial
  probe
  misc_feature (1)..(25): SEQ ID NO: 6673; WAN024BRP_at; Start 68; Stop 92
caaagttatctaagaatgatgagaa

SEQ ID NO: 91680 - DNA, 25 bp, Artificial
  probe
  misc_feature (1)..(25): SEQ ID NO: 6673; WAN024BRP_at; Start 38; Stop 62
tactgtcttatttacttacttacaa

SEQ ID NO: 91681 - DNA, 25 bp, Artificial
  probe
  misc_feature (1)..(25): SEQ ID NO: 6673; WAN024BRP_at; Start 76; Stop 100
tctaagaatgatgagaataagatag

SEQ ID NO: 91682 - DNA, 25 bp, Artificial
  probe
  misc_feature (1)..(25): SEQ ID NO: 6673; WAN024BRP_at; Start 90; Stop 114
gaataagatagttagcaaaatttta

SEQ ID NO: 91683 - DNA, 25 bp, Artificial
  probe
  misc_feature (1)..(25): SEQ ID NO: 6673; WAN024BRP_at; Start 67; Stop 91
tcaaagttatctaagaatgatgaga

SEQ ID NO: 91684 - DNA, 25 bp, Artificial
  probe
  misc_feature (1)..(25): SEQ ID NO: 6673; WAN024BRP_at; Start 70; Stop 94
aagttatctaagaatgatgagaata

SEQ ID NO: 91685 - DNA, 25 bp, Artificial
  probe
  misc_feature (1)..(25): SEQ ID NO: 6673; WAN024BRP_at; Start 136; Stop 160
gtaatcgttgatgctttacttagtt

SEQ ID NO: 91686 - DNA, 25 bp, Artificial
  probe
  misc_feature (1)..(25): SEQ ID NO: 6673; WAN024BRP_at; Start 6; Stop 30
tcttaaatatagtattattatcgct

SEQ ID NO: 91687 - DNA, 25 bp, Artificial
  probe
  misc_feature (1)..(25): SEQ ID NO: 6673; WAN024BRP_at; Start 84; Stop 108
tgatgagaataagatagttagcaaa

SEQ ID NO: 91688 - DNA, 25 bp, Artificial
  probe
  misc_feature (1)..(25): SEQ ID NO: 6673; WAN024BRP_at; Start 133; Stop 157
tatgtaatcgttgatgctttactta

SEQ ID NO: 91689 - DNA, 25 bp, Artificial
  probe
  misc_feature (1)..(25): SEQ ID NO: 6673; WAN024BRP_at; Start 121; Stop 145
ttatcaatcgtttatgtaatcgttg

SEQ ID NO: 91690 - DNA, 25 bp, Artificial
  probe
  misc_feature (1)..(25): SEQ ID NO: 6673; WAN024BRP_at; Start 87; Stop 111
tgagaataagatagttagcaaaatt

SEQ ID NO: 91691 - DNA, 25 bp, Artificial
  probe
  misc_feature (1)..(25): SEQ ID NO: 6673; WAN024BRP_at; Start 27; Stop 51
cgctattaatttactgtcttattta

SEQ ID NO: 91692 - DNA, 25 bp, Artificial
  probe
  misc_feature (1)..(25): SEQ ID NO: 6673; WAN024BRP_at; Start 72; Stop 96
gttatctaagaatgatgagaataag

SEQ ID NO: 91693 - DNA, 25 bp, Artificial
  probe
  misc_feature (1)..(25): SEQ ID NO: 6673; WAN024BRP_at; Start 77; Stop 101
ctaagaatgatgagaataagatagt

SEQ ID NO: 91694 - DNA, 25 bp, Artificial
  probe
  misc_feature (1)..(25): SEQ ID NO: 6673; WAN024BRP_at; Start 119; Stop 143
tattatcaatcgtttatgtaatcgt

SEQ ID NO: 91695 - DNA, 25 bp, Artificial
  probe
  misc_feature (1)..(25): SEQ ID NO: 6673; WAN024BRP_at; Start 126; Stop 150
aatcgtttatgtaatcgttgatgct

SEQ ID NO: 91696 - DNA, 25 bp, Artificial
  probe
  misc_feature (1)..(25): SEQ ID NO: 6673; WAN024BRP_at; Start 21; Stop 45
tattatcgctattaatttactgtct

SEQ ID NO: 91697 - DNA, 25 bp, Artificial
  probe
  misc_feature (1)..(25): SEQ ID NO: 6673; WAN024BRP_at; Start 24; Stop 48
tatcgctattaatttactgtcttat

SEQ ID NO: 91698 - DNA, 25 bp, Artificial
  probe
  misc_feature (1)..(25): SEQ ID NO: 6673; WAN024BRP_at; Start 88; Stop 112
gagaataagatagttagcaaaattt

SEQ ID NO: 91699 - DNA, 25 bp, Artificial
  probe
  misc_feature (1)..(25): SEQ ID NO: 6673; WAN024BRP_at; Start 130; Stop 154
gtttatgtaatcgttgatgctttac

SEQ ID NO: 91700 - DNA, 25 bp, Artificial
  probe
  misc_feature (1)..(25): SEQ ID NO: 6673; WAN024BRP_at; Start 85; Stop 109
gatgagaataagatagttagcaaaa

SEQ ID NO: 91701 - DNA, 25 bp, Artificial
  probe
  misc_feature (1)..(25): SEQ ID NO: 6673; WAN024BRP_at; Start 128; Stop 152
tcgtttatgtaatcgttgatgcttt

SEQ ID NO: 91702 - DNA, 25 bp, Artificial
  probe
  misc_feature (1)..(25): SEQ ID NO: 6673; WAN024BRP_at; Start 60; Stop 84
caaaatatcaaagttatctaagaat

SEQ ID NO: 91703 - DNA, 25 bp, Artificial
  probe
  misc_feature (1)..(25): SEQ ID NO: 6673; WAN024BRP_at; Start 81; Stop 105
gaatgatgagaataagatagttagc

SEQ ID NO: 91704 - DNA, 25 bp, Artificial
  probe
  misc_feature (1)..(25): SEQ ID NO: 6673; WAN024BRP_at; Start 125; Stop 149
caatcgtttatgtaatcgttgatgc

SEQ ID NO: 91705 - DNA, 25 bp, Artificial
  probe
  misc_feature (1)..(25): SEQ ID NO: 6673; WAN024BRP_at; Start 135; Stop 159
tgtaatcgttgatgctttacttagt

SEQ ID NO: 91706 - DNA, 25 bp, Artificial
  probe
  misc_feature (1)..(25): SEQ ID NO: 6673; WAN024BRP_at; Start 54; Stop 78
tacttacaaaatatcaaagttatct

SEQ ID NO: 91707 - DNA, 25 bp, Artificial
  probe
  misc_feature (1)..(25): SEQ ID NO: 6673; WAN024BRP_at; Start 82; Stop 106
aatgatgagaataagatagttagca

SEQ ID NO: 91708 - DNA, 25 bp, Artificial
  probe
  misc_feature (1)..(25): SEQ ID NO: 6673; WAN024BRP_at; Start 20; Stop 44
ttattatcgctattaatttactgtc

SEQ ID NO: 91709 - DNA, 25 bp, Artificial
  probe
  misc_feature (1)..(25): SEQ ID NO: 6673; WAN024BRP_at; Start 129; Stop 153
cgtttatgtaatcgttgatgcttta

SEQ ID NO: 91710 - DNA, 25 bp, Artificial
  probe
  misc_feature (1)..(25): SEQ ID NO: 6673; WAN024BRP_at; Start 58; Stop 82
tacaaaatatcaaagttatctaaga

SEQ ID NO: 91711 - DNA, 25 bp, Artificial
  probe
  misc_feature (1)..(25): SEQ ID NO: 6673; WAN024BRP_at; Start 78; Stop 102
taagaatgatgagaataagatagtt

SEQ ID NO: 91712 - DNA, 25 bp, Artificial
  probe
  misc_feature (1)..(25): SEQ ID NO: 6369; WAN024BRQ_at; Start 77; Stop 101
cagcagcggcggcaaatcttaatgg

SEQ ID NO: 91713 - DNA, 25 bp, Artificial
  probe
  misc_feature (1)..(25): SEQ ID NO: 6369; WAN024BRQ_at; Start 221; Stop 245
catataagggaacgagccaagcgga

SEQ ID NO: 91714 - DNA, 25 bp, Artificial
  probe
  misc_feature (1)..(25): SEQ ID NO: 6369; WAN024BRQ_at; Start 1000; Stop 1024
aggaaattgctgaacggtacggtcg

SEQ ID NO: 91715 - DNA, 25 bp, Artificial
  probe
  misc_feature (1)..(25): SEQ ID NO: 6369; WAN024BRQ_at; Start 169; Stop 193
gactcggcatatttggctgaacacg

SEQ ID NO: 91716 - DNA, 25 bp, Artificial
  probe
  misc_feature (1)..(25): SEQ ID NO: 6369; WAN024BRQ_at; Start 478; Stop 502
ggagaacacctaattaaagcctgga

SEQ ID NO: 91717 - DNA, 25 bp, Artificial
  probe
  misc_feature (1)..(25): SEQ ID NO: 6369; WAN024BRQ_at; Start 459; Stop 483
ccgcaaccgcgtaatttcaggagaa

SEQ ID NO: 91718 - DNA, 25 bp, Artificial
  probe
  misc_feature (1)..(25): SEQ ID NO: 6369; WAN024BRQ_at; Start 1331; Stop 1355
gcgacagctcggttgcaaattcagg

SEQ ID NO: 91719 - DNA, 25 bp, Artificial
  probe
  misc_feature (1)..(25): SEQ ID NO: 6369; WAN024BRQ_at; Start 412; Stop 436
gctgatgcgaccgaagatgtaaccg

SEQ ID NO: 91720 - DNA, 25 bp, Artificial
  probe
  misc_feature (1)..(25): SEQ ID NO: 6369; WAN024BRQ_at; Start 1464; Stop 1488
ggttgtcatcaattcggaaggctgg

SEQ ID NO: 91721 - DNA, 25 bp, Artificial
  probe
  misc_feature (1)..(25): SEQ ID NO: 6369; WAN024BRQ_at; Start 120; Stop 144
tgaatggtacatgcccaatgacggc

SEQ ID NO: 91722 - DNA, 25 bp, Artificial
  probe
  misc_feature (1)..(25): SEQ ID NO: 6369; WAN024BRQ_at; Start 1262; Stop 1286
aacagtatgcgtacggagcacagca

SEQ ID NO: 91723 - DNA, 25 bp, Artificial
  probe
  misc_feature (1)..(25): SEQ ID NO: 6369; WAN024BRQ_at; Start 288; Stop 312
tcatcaaaaagggacggttcggaca

SEQ ID NO: 91724 - DNA, 25 bp, Artificial
  probe
  misc_feature (1)..(25): SEQ ID NO: 6369; WAN024BRQ_at; Start 429; Stop 453
tgtaaccgcggttgaagtcgatccc

SEQ ID NO: 91725 - DNA, 25 bp, Artificial
  probe
  misc_feature (1)..(25): SEQ ID NO: 6369; WAN024BRQ_at; Start 316; Stop 340
tacggcacaaaaggagagctgcaat

SEQ ID NO: 91726 - DNA, 25 bp, Artificial
  probe
  misc_feature (1)..(25): SEQ ID NO: 6369; WAN024BRQ_at; Start 1058; Stop 1082
tcgataaccatgatacacagccggg

SEQ ID NO: 91727 - DNA, 25 bp, Artificial
  probe
  misc_feature (1)..(25): SEQ ID NO: 6369; WAN024BRQ_at; Start 1391; Stop 1415
caaagcgaatgtatgtcggccggca

SEQ ID NO: 91728 - DNA, 25 bp, Artificial
  probe
  misc_feature (1)..(25): SEQ ID NO: 6369; WAN024BRQ_at; Start 697; Stop 721
gaccatcctgatgtcgcagcagaaa

SEQ ID NO: 91729 - DNA, 25 bp, Artificial
  probe
  misc_feature (1)..(25): SEQ ID NO: 6369; WAN024BRQ_at; Start 1182; Stop 1206
tatgtacgggacgaaaggagactcc

SEQ ID NO: 91730 - DNA, 25 bp, Artificial
  probe
  misc_feature (1)..(25): SEQ ID NO: 6369; WAN024BRQ_at; Start 586; Stop 610
gagtcccgaaagctgaaccgcatct

SEQ ID NO: 91731 - DNA, 25 bp, Artificial
  probe
  misc_feature (1)..(25): SEQ ID NO: 6369; WAN024BRQ_at; Start 562; Stop 586
cattttgacggaaccgattgggacg

SEQ ID NO: 91732 - DNA, 25 bp, Artificial
  probe
  misc_feature (1)..(25): SEQ ID NO: 6369; WAN024BRQ_at; Start 358; Stop 382
cattcccgcgacattaacgtttacg

SEQ ID NO: 91733 - DNA, 25 bp, Artificial
  probe
  misc_feature (1)..(25): SEQ ID NO: 6369; WAN024BRQ_at; Start 1432; Stop 1456
tggcatgacattaccggaaaccgtt

SEQ ID NO: 91734 - DNA, 25 bp, Artificial
  probe
  misc_feature (1)..(25): SEQ ID NO: 6369; WAN024BRQ_at; Start 962; Stop 986
tccatgctgcatcgacacagggagg

SEQ ID NO: 91735 - DNA, 25 bp, Artificial
  probe
  misc_feature (1)..(25): SEQ ID NO: 6369; WAN024BRQ_at; Start 141; Stop 165
cggccaacattggaagcgtttgcaa

SEQ ID NO: 91736 - DNA, 25 bp, Artificial
  probe
  misc_feature (1)..(25): SEQ ID NO: 6369; WAN024BRQ_at; Start 871; Stop 895
tattggcagaatgacttgggcgcgc

SEQ ID NO: 91737 - DNA, 25 bp, Artificial
  probe
  misc_feature (1)..(25): SEQ ID NO: 6369; WAN024BRQ_at; Start 1089; Stop 1113
gcttgagtcgactgtccaaacatgg

SEQ ID NO: 91738 - DNA, 25 bp, Artificial
  probe
  misc_feature (1)..(25): SEQ ID NO: 6369; WAN024BRQ_at; Start 1413; Stop 1437
gcaaaacgccggtgagacatggcat

SEQ ID NO: 91739 - DNA, 25 bp, Artificial
  probe
  misc_feature (1)..(25): SEQ ID NO: 6369; WAN024BRQ_at; Start 389; Stop 413
tggtcatcaaccacaaaggcggcgc

SEQ ID NO: 91740 - DNA, 25 bp, Artificial
  probe
  misc_feature (1)..(25): SEQ ID NO: 6369; WAN024BRQ_at; Start 300; Stop 324
gacggttcggacaaagtacggcaca

SEQ ID NO: 91741 - DNA, 25 bp, Artificial
  probe
  misc_feature (1)..(25): SEQ ID NO: 6369; WAN024BRQ_at; Start 924; Stop 948
taatcattcagtgtttgacgtgccg

SEQ ID NO: 91742 - DNA, 25 bp, Artificial
  probe
  misc_feature (1)..(25): SEQ ID NO: 6369; WAN024BRQ_at; Start 1364; Stop 1388
cattaataacagacggacccggtgg

SEQ ID NO: 91743 - DNA, 25 bp, Artificial
  probe
  misc_feature (1)..(25): SEQ ID NO: 6369; WAN024BRQ_at; Start 18; Stop 42
gctttacgcccgattgctgacgctg

SEQ ID NO: 91744 - DNA, 25 bp, Artificial
  probe
  misc_feature (1)..(25): SEQ ID NO: 6369; WAN024BRQ_at; Start 886; Stop 910
ttgggcgcgctggaaaactatttga

SEQ ID NO: 91745 - DNA, 25 bp, Artificial
  probe
  misc_feature (1)..(25): SEQ ID NO: 6369; WAN024BRQ_at; Start 524; Stop 548
gcggcagcacatacagcgattttaa

SEQ ID NO: 91746 - DNA, 25 bp, Artificial
  probe
  misc_feature (1)..(25): SEQ ID NO: 7027; WAN024BRR_at; Start 85; Stop 109
cagcagatttctcatatggtatcca

SEQ ID NO: 91747 - DNA, 25 bp, Artificial
  probe
  misc_feature (1)..(25): SEQ ID NO: 7027; WAN024BRR_at; Start 171; Stop 195
tcaggaagaagtttttggagatcgt

SEQ ID NO: 91748 - DNA, 25 bp, Artificial
  probe
  misc_feature (1)..(25): SEQ ID NO: 7027; WAN024BRR_at; Start 477; Stop 501
gagtccctctccttgggaatttgag

SEQ ID NO: 91749 - DNA, 25 bp, Artificial
  probe
  misc_feature (1)..(25): SEQ ID NO: 7027; WAN024BRR_at; Start 523; Stop 547
tacctgacgaaagagaaattttatg

SEQ ID NO: 91750 - DNA, 25 bp, Artificial
  probe
  misc_feature (1)..(25): SEQ ID NO: 7027; WAN024BRR_at; Start 359; Stop 383
ggaatacacctgagcgtattgctga

SEQ ID NO: 91751 - DNA, 25 bp, Artificial
  probe
  misc_feature (1)..(25): SEQ ID NO: 7027; WAN024BRR_at; Start 704; Stop 728
gggaaaatcttactgtaggctatcg

SEQ ID NO: 91752 - DNA, 25 bp, Artificial
  probe
  misc_feature (1)..(25): SEQ ID NO: 7027; WAN024BRR_at; Start 668; Stop 692
tatcggatttcccagaaacggagtc

SEQ ID NO: 91753 - DNA, 25 bp, Artificial
  probe
  misc_feature (1)..(25): SEQ ID NO: 7027; WAN024BRR_at; Start 320; Stop 344
caagtattgctagtattgccctgtc

SEQ ID NO: 91754 - DNA, 25 bp, Artificial
  probe
  misc_feature (1)..(25): SEQ ID NO: 7027; WAN024BRR_at; Start 375; Stop 399
tattgctgagcattatataagacgc

SEQ ID NO: 91755 - DNA, 25 bp, Artificial
  probe
  misc_feature (1)..(25): SEQ ID NO: 7027; WAN024BRR_at; Start 30; Stop 54
tgttagttgcgagactaatcagcag

SEQ ID NO: 91756 - DNA, 25 bp, Artificial
  probe
  misc_feature (1)..(25): SEQ ID NO: 7027; WAN024BRR_at; Start 249; Stop 273
tgactttatcgtagaaaaaccagct

SEQ ID NO: 91757 - DNA, 25 bp, Artificial
  probe
  misc_feature (1)..(25): SEQ ID NO: 7027; WAN024BRR_at; Start 199; Stop 223
gcaactgctttggaacaagttactg

SEQ ID NO: 91758 - DNA, 25 bp, Artificial
  probe
  misc_feature (1)..(25): SEQ ID NO: 7027; WAN024BRR_at; Start 566; Stop 590
tccaacctatcccttataatagagg

SEQ ID NO: 91759 - DNA, 25 bp, Artificial
  probe
  misc_feature (1)..(25): SEQ ID NO: 7027; WAN024BRR_at; Start 122; Stop 146
cagatggcccattgttaatcacgga

SEQ ID NO: 91760 - DNA, 25 bp, Artificial
  probe
  misc_feature (1)..(25): SEQ ID NO: 7027; WAN024BRR_at; Start 714; Stop 738
tactgtaggctatcggttgaagaga

SEQ ID NO: 91761 - DNA, 25 bp, Artificial
  probe
  misc_feature (1)..(25): SEQ ID NO: 7027; WAN024BRR_at; Start 548; Stop 572
ctttagaggatgatatgttccaacc

SEQ ID NO: 91762 - DNA, 25 bp, Artificial
  probe
  misc_feature (1)..(25): SEQ ID NO: 7027; WAN024BRR_at; Start 415; Stop 439
tataagacaactcttcaatgcgcta

SEQ ID NO: 91763 - DNA, 25 bp, Artificial
  probe
  misc_feature (1)..(25): SEQ ID NO: 7027; WAN024BRR_at; Start 587; Stop 611
gaggaaagttgattattcgaggtaa

SEQ ID NO: 91764 - DNA, 25 bp, Artificial
  probe
  misc_feature (1)..(25): SEQ ID NO: 7027; WAN024BRR_at; Start 305; Stop 329
taatggaagaggatacaagtattgc

SEQ ID NO: 91765 - DNA, 25 bp, Artificial
  probe
  misc_feature (1)..(25): SEQ ID NO: 7027; WAN024BRR_at; Start 350; Stop 374
tatctggagggaatacacctgagcg

SEQ ID NO: 91766 - DNA, 25 bp, Artificial
  probe
  misc_feature (1)..(25): SEQ ID NO: 7027; WAN024BRR_at; Start 289; Stop 313
gaagaactactgtctctaatggaag

SEQ ID NO: 91767 - DNA, 25 bp, Artificial
  probe
  misc_feature (1)..(25): SEQ ID NO: 7027; WAN024BRR_at; Start 214; Stop 238
caagttactgaagagcgagtcattg

SEQ ID NO: 91768 - DNA, 25 bp, Artificial
  probe
  misc_feature (1)..(25): SEQ ID NO: 7027; WAN024BRR_at; Start 680; Stop 704
cagaaacggagtcttttatccaggg

SEQ ID NO: 91769 - DNA, 25 bp, Artificial
  probe
  misc_feature (1)..(25): SEQ ID NO: 7027; WAN024BRR_at; Start 186; Stop 210
tggagatcgtgttgcaactgctttg

SEQ ID NO: 91770 - DNA, 25 bp, Artificial
  probe
  misc_feature (1)..(25): SEQ ID NO: 7027; WAN024BRR_at; Start 388; Stop 412
tatataagacgcacgaaatatgccc

SEQ ID NO: 91771 - DNA, 25 bp, Artificial
  probe
  misc_feature (1)..(25): SEQ ID NO: 7027; WAN024BRR_at; Start 149; Stop 173
ctagcgtaagggttttgattggtca

SEQ ID NO: 91772 - DNA, 25 bp, Artificial
  probe
  misc_feature (1)..(25): SEQ ID NO: 7027; WAN024BRR_at; Start 452; Stop 476
ctagtttgattcaattcatgaaggg

SEQ ID NO: 91773 - DNA, 25 bp, Artificial
  probe
  misc_feature (1)..(25): SEQ ID NO: 7027; WAN024BRR_at; Start 108; Stop 132
catttatgtatcatcagatggccca

SEQ ID NO: 91774 - DNA, 25 bp, Artificial
  probe
  misc_feature (1)..(25): SEQ ID NO: 7027; WAN024BRR_at; Start 68; Stop 92
tcatccagtccatgcgtcagcagat

SEQ ID NO: 91775 - DNA, 25 bp, Artificial
  probe
  misc_feature (1)..(25): SEQ ID NO: 7027; WAN024BRR_at; Start 54; Stop 78
ggtagtcaatctcctcatccagtcc

SEQ ID NO: 91776 - DNA, 25 bp, Artificial
  probe
  misc_feature (1)..(25): SEQ ID NO: 7027; WAN024BRR_at; Start 335; Stop 359
ttgccctgtcacaaatatctggagg

SEQ ID NO: 91777 - DNA, 25 bp, Artificial
  probe
  misc_feature (1)..(25): SEQ ID NO: 7027; WAN024BRR_at; Start 137; Stop 161
taatcacggatcctagcgtaagggt

SEQ ID NO: 91778 - DNA, 25 bp, Artificial
  probe
  misc_feature (1)..(25): SEQ ID NO: 7027; WAN024BRR_at; Start 45; Stop 69
taatcagcaggtagtcaatctcctc

SEQ ID NO: 91779 - DNA, 25 bp, Artificial
  probe
  misc_feature (1)..(25): SEQ ID NO: 7027; WAN024BRR_at; Start 430; Stop 454
caatgcgctatttggaagaagtcta

SEQ ID NO: 91780 - DNA, 25 bp, Artificial
  probe
  misc_feature (1)..(25): SEQ ID NO: 6960; WAN024BRS_at; Start 147; Stop 171
acgacctgttcgtaccaagctccaa

SEQ ID NO: 91781 - DNA, 25 bp, Artificial
  probe
  misc_feature (1)..(25): SEQ ID NO: 6960; WAN024BRS_at; Start 98; Stop 122
tttatgtgcacgaaattgaggcggg

SEQ ID NO: 91782 - DNA, 25 bp, Artificial
  probe
  misc_feature (1)..(25): SEQ ID NO: 6960; WAN024BRS_at; Start 1055; Stop 1079
ttatggacatcttggagggaattca

SEQ ID NO: 91783 - DNA, 25 bp, Artificial
  probe
  misc_feature (1)..(25): SEQ ID NO: 6960; WAN024BRS_at; Start 281; Stop 305
tgtggctaacaagacggcagtacgc

SEQ ID NO: 91784 - DNA, 25 bp, Artificial
  probe
  misc_feature (1)..(25): SEQ ID NO: 6960; WAN024BRS_at; Start 988; Stop 1012
gagcatgttgctcgctatgatcaaa

SEQ ID NO: 91785 - DNA, 25 bp, Artificial
  probe
  misc_feature (1)..(25): SEQ ID NO: 6960; WAN024BRS_at; Start 73; Stop 97
gccaagcatgcagaagtgactcttt

SEQ ID NO: 91786 - DNA, 25 bp, Artificial
  probe
  misc_feature (1)..(25): SEQ ID NO: 6960; WAN024BRS_at; Start 864; Stop 888
ttctacggatcgttgtaacgcagcc

SEQ ID NO: 91787 - DNA, 25 bp, Artificial
  probe
  misc_feature (1)..(25): SEQ ID NO: 6960; WAN024BRS_at; Start 1024; Stop 1048
gactataatctggaaggttcagcaa

SEQ ID NO: 91788 - DNA, 25 bp, Artificial
  probe
  misc_feature (1)..(25): SEQ ID NO: 6960; WAN024BRS_at; Start 433; Stop 457
tatatacagcaattagctcccaagg

SEQ ID NO: 91789 - DNA, 25 bp, Artificial
  probe
  misc_feature (1)..(25): SEQ ID NO: 6960; WAN024BRS_at; Start 784; Stop 808
gatgtctttgttttgcccactcgag

SEQ ID NO: 91790 - DNA, 25 bp, Artificial
  probe
  misc_feature (1)..(25): SEQ ID NO: 6960; WAN024BRS_at; Start 848; Stop 872
tgggcattcctattgtttctacgga

SEQ ID NO: 91791 - DNA, 25 bp, Artificial
  probe
  misc_feature (1)..(25): SEQ ID NO: 6960; WAN024BRS_at; Start 935; Stop 959
tgactgcggtagaattggctaacaa

SEQ ID NO: 91792 - DNA, 25 bp, Artificial
  probe
  misc_feature (1)..(25): SEQ ID NO: 6960; WAN024BRS_at; Start 391; Stop 415
aaagcggagtttgtgcttagcacca

SEQ ID NO: 91793 - DNA, 25 bp, Artificial
  probe
  misc_feature (1)..(25): SEQ ID NO: 6960; WAN024BRS_at; Start 132; Stop 156
tgagtatgtcaagctacgacctgtt

SEQ ID NO: 91794 - DNA, 25 bp, Artificial
  probe
  misc_feature (1)..(25): SEQ ID NO: 6960; WAN024BRS_at; Start 919; Stop 943
tatctgatgcaggaagtgactgcgg

SEQ ID NO: 91795 - DNA, 25 bp, Artificial
  probe
  misc_feature (1)..(25): SEQ ID NO: 6960; WAN024BRS_at; Start 266; Stop 290
tcttgatgagcagtatgtggctaac

SEQ ID NO: 91796 - DNA, 25 bp, Artificial
  probe
  misc_feature (1)..(25): SEQ ID NO: 6960; WAN024BRS_at; Start 833; Stop 857
tagaggcgctatcaatgggcattcc

SEQ ID NO: 91797 - DNA, 25 bp, Artificial
  probe
  misc_feature (1)..(25): SEQ ID NO: 6960; WAN024BRS_at; Start 59; Stop 83
tattagatgagttagccaagcatgc

SEQ ID NO: 91798 - DNA, 25 bp, Artificial
  probe
  misc_feature (1)..(25): SEQ ID NO: 6960; WAN024BRS_at; Start 339; Stop 363
tatctcacttaagcagagactgttg

SEQ ID NO: 91799 - DNA, 25 bp, Artificial
  probe
  misc_feature (1)..(25): SEQ ID NO: 6960; WAN024BRS_at; Start 165; Stop 189
gctccaatcaatcacagaactaggt

SEQ ID NO: 91800 - DNA, 25 bp, Artificial
  probe
  misc_feature (1)..(25): SEQ ID NO: 6960; WAN024BRS_at; Start 596; Stop 620
tcaatagaaaaggagtcgatgagct

SEQ ID NO: 91801 - DNA, 25 bp, Artificial
  probe
  misc_feature (1)..(25): SEQ ID NO: 6960; WAN024BRS_at; Start 519; Stop 543
ggttgcctcggatacggttttcaca

SEQ ID NO: 91802 - DNA, 25 bp, Artificial
  probe
  misc_feature (1)..(25): SEQ ID NO: 6960; WAN024BRS_at; Start 630; Stop 654
tatgaaagagcacgaagctgatact

SEQ ID NO: 91803 - DNA, 25 bp, Artificial
  probe
  misc_feature (1)..(25): SEQ ID NO: 6960; WAN024BRS_at; Start 376; Stop 400
tctgttgctctaagcaaagcggagt

SEQ ID NO: 91804 - DNA, 25 bp, Artificial
  probe
  misc_feature (1)..(25): SEQ ID NO: 6960; WAN024BRS_at; Start 234; Stop 258
ctttgatggctatactgggtgggaa

SEQ ID NO: 91805 - DNA, 25 bp, Artificial
  probe
  misc_feature (1)..(25): SEQ ID NO: 6960; WAN024BRS_at; Start 969; Stop 993
tacctttaaactagatgctgagcat

SEQ ID NO: 91806 - DNA, 25 bp, Artificial
  probe
  misc_feature (1)..(25): SEQ ID NO: 6960; WAN024BRS_at; Start 759; Stop 783
tatcctagagttgatgcgggtggca

SEQ ID NO: 91807 - DNA, 25 bp, Artificial
  probe
  misc_feature (1)..(25): SEQ ID NO: 6960; WAN024BRS_at; Start 674; Stop 698
tcggaggtacaagagaagaattgtc

SEQ ID NO: 91808 - DNA, 25 bp, Artificial
  probe
  misc_feature (1)..(25): SEQ ID NO: 6960; WAN024BRS_at; Start 448; Stop 472
gctcccaaggcaaagattaaacgac

SEQ ID NO: 91809 - DNA, 25 bp, Artificial
  probe
  misc_feature (1)..(25): SEQ ID NO: 6960; WAN024BRS_at; Start 880; Stop 904
aacgcagccttggagtttgttaggg

SEQ ID NO: 91810 - DNA, 25 bp, Artificial
  probe
  misc_feature (1)..(25): SEQ ID NO: 6960; WAN024BRS_at; Start 504; Stop 528
caaaaacatgatagaggttgcctcg

SEQ ID NO: 91811 - DNA, 25 bp, Artificial
  probe
  misc_feature (1)..(25): SEQ ID NO: 6960; WAN024BRS_at; Start 406; Stop 430
cttagcaccaataccccaacagatg

SEQ ID NO: 91812 - DNA, 25 bp, Artificial
  probe
  misc_feature (1)..(25): SEQ ID NO: 6960; WAN024BRS_at; Start 950; Stop 974
tggctaacaagcttaaggctacctt

SEQ ID NO: 91813 - DNA, 25 bp, Artificial
  probe
  misc_feature (1)..(25): SEQ ID NO: 6960; WAN024BRS_at; Start 659; Stop 683
tgcagttaattatggtcggaggtac

SEQ ID NO: 91814 - DNA, 25 bp, Artificial
  probe
  misc_feature (1)..(25): SEQ ID NO: 6642; WAN024BRT_at; Start 597; Stop 621
tatatcccgaacctcaacttttgaa

SEQ ID NO: 91815 - DNA, 25 bp, Artificial
  probe
  misc_feature (1)..(25): SEQ ID NO: 6642; WAN024BRT_at; Start 54; Stop 78
tattgccggtattcaacagcaaacc

SEQ ID NO: 91816 - DNA, 25 bp, Artificial
  probe
  misc_feature (1)..(25): SEQ ID NO: 6642; WAN024BRT_at; Start 255; Stop 279
tatgggagcggatgaccagttgcca

SEQ ID NO: 91817 - DNA, 25 bp, Artificial
  probe
  misc_feature (1)..(25): SEQ ID NO: 6642; WAN024BRT_at; Start 289; Stop 313
tttgaaaagtggaacaaggaggctc

SEQ ID NO: 91818 - DNA, 25 bp, Artificial
  probe
  misc_feature (1)..(25): SEQ ID NO: 6642; WAN024BRT_at; Start 411; Stop 435
tacagttcgcaattttagtggacct

SEQ ID NO: 91819 - DNA, 25 bp, Artificial
  probe
  misc_feature (1)..(25): SEQ ID NO: 6642; WAN024BRT_at; Start 858; Stop 882
ggatcgctttttcttaggacattag

SEQ ID NO: 91820 - DNA, 25 bp, Artificial
  probe
  misc_feature (1)..(25): SEQ ID NO: 6642; WAN024BRT_at; Start 38; Stop 62
aaaatatcggagcagttattgccgg

SEQ ID NO: 91821 - DNA, 25 bp, Artificial
  probe
  misc_feature (1)..(25): SEQ ID NO: 6642; WAN024BRT_at; Start 126; Stop 150
tacggcagctattgtacaggaaaaa

SEQ ID NO: 91822 - DNA, 25 bp, Artificial
  probe
  misc_feature (1)..(25): SEQ ID NO: 6642; WAN024BRT_at; Start 111; Stop 135
tggatctacagatgatacggcagct

SEQ ID NO: 91823 - DNA, 25 bp, Artificial
  probe
  misc_feature (1)..(25): SEQ ID NO: 6642; WAN024BRT_at; Start 821; Stop 845
tatcgggtaggcgttcatatgtact

SEQ ID NO: 91824 - DNA, 25 bp, Artificial
  probe
  misc_feature (1)..(25): SEQ ID NO: 6642; WAN024BRT_at; Start 743; Stop 767
cacgctataaaggaaatagattgcc

SEQ ID NO: 91825 - DNA, 25 bp, Artificial
  probe
  misc_feature (1)..(25): SEQ ID NO: 6642; WAN024BRT_at; Start 700; Stop 724
gaccagaagactaaacttcagcgtg

SEQ ID NO: 91826 - DNA, 25 bp, Artificial
  probe
  misc_feature (1)..(25): SEQ ID NO: 6642; WAN024BRT_at; Start 307; Stop 331
gaggctcaaaagtggaatcctgctg

SEQ ID NO: 91827 - DNA, 25 bp, Artificial
  probe
  misc_feature (1)..(25): SEQ ID NO: 6642; WAN024BRT_at; Start 353; Stop 377
gcatgcggatggtttctgactctca

SEQ ID NO: 91828 - DNA, 25 bp, Artificial
  probe
  misc_feature (1)..(25): SEQ ID NO: 6642; WAN024BRT_at; Start 165; Stop 189
gcgaattgtctttttgaatcctgga

SEQ ID NO: 91829 - DNA, 25 bp, Artificial
  probe
  misc_feature (1)..(25): SEQ ID NO: 6642; WAN024BRT_at; Start 426; Stop 450
tagtggacctcttaccttgctttca

SEQ ID NO: 91830 - DNA, 25 bp, Artificial
  probe
  misc_feature (1)..(25): SEQ ID NO: 6642; WAN024BRT_at; Start 681; Stop 705
tagcaatcacttaacagcagaccag

SEQ ID NO: 91831 - DNA, 25 bp, Artificial
  probe
  misc_feature (1)..(25): SEQ ID NO: 6642; WAN024BRT_at; Start 840; Stop 864
tgtacttaaagtcaaattggatcgc

SEQ ID NO: 91832 - DNA, 25 bp, Artificial
  probe
  misc_feature (1)..(25): SEQ ID NO: 6642; WAN024BRT_at; Start 370; Stop 394
gactctcacaagtatgatggattgg

SEQ ID NO: 91833 - DNA, 25 bp, Artificial
  probe
  misc_feature (1)..(25): SEQ ID NO: 6642; WAN024BRT_at; Start 764; Stop 788
tgccaattcttctgatgccaggtat

SEQ ID NO: 91834 - DNA, 25 bp, Artificial
  probe
  misc_feature (1)..(25): SEQ ID NO: 6642; WAN024BRT_at; Start 443; Stop 467
tgctttcaaaagagatgcaccgttt

SEQ ID NO: 91835 - DNA, 25 bp, Artificial
  probe
  misc_feature (1)..(25): SEQ ID NO: 6642; WAN024BRT_at; Start 201; Stop 225
ggtaccagcttataacttggcttca

SEQ ID NO: 91836 - DNA, 25 bp, Artificial
  probe
  misc_feature (1)..(25): SEQ ID NO: 6642; WAN024BRT_at; Start 150; Stop 174
aatcatgggagatgagcgaattgtc

SEQ ID NO: 91837 - DNA, 25 bp, Artificial
  probe
  misc_feature (1)..(25): SEQ ID NO: 6642; WAN024BRT_at; Start 640; Stop 664
catatccgtcagattatccgtcgtg

SEQ ID NO: 91838 - DNA, 25 bp, Artificial
  probe
  misc_feature (1)..(25): SEQ ID NO: 6642; WAN024BRT_at; Start 463; Stop 487
cgttttatccttcctatacctgagg

SEQ ID NO: 91839 - DNA, 25 bp, Artificial
  probe
  misc_feature (1)..(25): SEQ ID NO: 6642; WAN024BRT_at; Start 96; Stop 120
gattatcgtcaatgatggatctaca

SEQ ID NO: 91840 - DNA, 25 bp, Artificial
  probe
  misc_feature (1)..(25): SEQ ID NO: 6642; WAN024BRT_at; Start 270; Stop 294
ccagttgccattggatgcctttgaa

SEQ ID NO: 91841 - DNA, 25 bp, Artificial
  probe
  misc_feature (1)..(25): SEQ ID NO: 6642; WAN024BRT_at; Start 724; Stop 748
gaattgaaactagaagaagcacgct

SEQ ID NO: 91842 - DNA, 25 bp, Artificial
  probe
  misc_feature (1)..(25): SEQ ID NO: 6642; WAN024BRT_at; Start 339; Stop 363
ggctttaagagctcgcatgcggatg

SEQ ID NO: 91843 - DNA, 25 bp, Artificial
  probe
  misc_feature (1)..(25): SEQ ID NO: 6642; WAN024BRT_at; Start 479; Stop 503
tacctgaggcctatccgaacgaaga

SEQ ID NO: 91844 - DNA, 25 bp, Artificial
  probe
  misc_feature (1)..(25): SEQ ID NO: 6642; WAN024BRT_at; Start 183; Stop 207
tcctggaaagattggcaaggtacca

SEQ ID NO: 91845 - DNA, 25 bp, Artificial
  probe
  misc_feature (1)..(25): SEQ ID NO: 6642; WAN024BRT_at; Start 779; Stop 803
tgccaggtatttctgcagtacacag

SEQ ID NO: 91846 - DNA, 25 bp, Artificial
  probe
  misc_feature (1)..(25): SEQ ID NO: 6642; WAN024BRT_at; Start 220; Stop 244
gcttcacagtatgtaaaaggagact

SEQ ID NO: 91847 - DNA, 25 bp, Artificial
  probe
  misc_feature (1)..(25): SEQ ID NO: 6642; WAN024BRT_at; Start 70; Stop 94
cagcaaacctatgcggactttcagt

SEQ ID NO: 91848 - DNA, 25 bp, Artificial
  probe
  misc_feature (1)..(25): SEQ ID NO: 7225; WAN024BRU_at; Start 84; Stop 108
tattgttactccctatgtcactcga

SEQ ID NO: 91849 - DNA, 25 bp, Artificial
  probe
  misc_feature (1)..(25): SEQ ID NO: 7225; WAN024BRU_at; Start 107; Stop 131
gagtcttttcttcagatcattttgg

SEQ ID NO: 91850 - DNA, 25 bp, Artificial
  probe
  misc_feature (1)..(25): SEQ ID NO: 7225; WAN024BRU_at; Start 256; Stop 280
tatgcttccttactgactgtccagc

SEQ ID NO: 91851 - DNA, 25 bp, Artificial
  probe
  misc_feature (1)..(25): SEQ ID NO: 7225; WAN024BRU_at; Start 303; Stop 327
gttaacttactttctctatgtgacc

SEQ ID NO: 91852 - DNA, 25 bp, Artificial
  probe
  misc_feature (1)..(25): SEQ ID NO: 7225; WAN024BRU_at; Start 32; Stop 56
ggaactatgtgtttaatcttgccaa

SEQ ID NO: 91853 - DNA, 25 bp, Artificial
  probe
  misc_feature (1)..(25): SEQ ID NO: 7225; WAN024BRU_at; Start 229; Stop 253
catgatgagatagcagtcaatgatg

SEQ ID NO: 91854 - DNA, 25 bp, Artificial
  probe
  misc_feature (1)..(25): SEQ ID NO: 7225; WAN024BRU_at; Start 342; Stop 366
taatcaagttatttattggatccag

SEQ ID NO: 91855 - DNA, 25 bp, Artificial
  probe
  misc_feature (1)..(25): SEQ ID NO: 7225; WAN024BRU_at; Start 298; Stop 322
gccacgttaacttactttctctatg

SEQ ID NO: 91856 - DNA, 25 bp, Artificial
  probe
  misc_feature (1)..(25): SEQ ID NO: 7225; WAN024BRU_at; Start 326; Stop 350
ccttttttgtcaataataatcaagt

SEQ ID NO: 91857 - DNA, 25 bp, Artificial
  probe
  misc_feature (1)..(25): SEQ ID NO: 7225; WAN024BRU_at; Start 73; Stop 97
actattccacttattgttactccct

SEQ ID NO: 91858 - DNA, 25 bp, Artificial
  probe
  misc_feature (1)..(25): SEQ ID NO: 7225; WAN024BRU_at; Start 97; Stop 121
tatgtcactcgagtcttttcttcag

SEQ ID NO: 91859 - DNA, 25 bp, Artificial
  probe
  misc_feature (1)..(25): SEQ ID NO: 7225; WAN024BRU_at; Start 187; Stop 211
gggataagtatgtatggaagtaaga

SEQ ID NO: 91860 - DNA, 25 bp, Artificial
  probe
  misc_feature (1)..(25): SEQ ID NO: 7225; WAN024BRU_at; Start 150; Stop 174
tacagttgcttcttactttgttacc

SEQ ID NO: 91861 - DNA, 25 bp, Artificial
  probe
  misc_feature (1)..(25): SEQ ID NO: 7225; WAN024BRU_at; Start 213; Stop 237
aatttctcttaaaagacatgatgag

SEQ ID NO: 91862 - DNA, 25 bp, Artificial
  probe
  misc_feature (1)..(25): SEQ ID NO: 7225; WAN024BRU_at; Start 9; Stop 33
tctgaaacaagttagtctaaagtgg

SEQ ID NO: 91863 - DNA, 25 bp, Artificial
  probe
  misc_feature (1)..(25): SEQ ID NO: 7225; WAN024BRU_at; Start 124; Stop 148
cattttgggatttatacttatacca

SEQ ID NO: 91864 - DNA, 25 bp, Artificial
  probe
  misc_feature (1)..(25): SEQ ID NO: 7225; WAN024BRU_at; Start 16; Stop 40
caagttagtctaaagtggaactatg

SEQ ID NO: 91865 - DNA, 25 bp, Artificial
  probe
  misc_feature (1)..(25): SEQ ID NO: 7225; WAN024BRU_at; Start 288; Stop 312
tgtaggtctagccacgttaacttac

SEQ ID NO: 91866 - DNA, 25 bp, Artificial
  probe
  misc_feature (1)..(25): SEQ ID NO: 7225; WAN024BRU_at; Start 263; Stop 287
ccttactgactgtccagctgcttaa

SEQ ID NO: 91867 - DNA, 25 bp, Artificial
  probe
  misc_feature (1)..(25): SEQ ID NO: 7225; WAN024BRU_at; Start 277; Stop 301
cagctgcttaatgtaggtctagcca

SEQ ID NO: 91868 - DNA, 25 bp, Artificial
  probe
  misc_feature (1)..(25): SEQ ID NO: 7225; WAN024BRU_at; Start 314; Stop 338
ttctctatgtgaccttttttgtcaa

SEQ ID NO: 91869 - DNA, 25 bp, Artificial
  probe
  misc_feature (1)..(25): SEQ ID NO: 7225; WAN024BRU_at; Start 282; Stop 306
gcttaatgtaggtctagccacgtta

SEQ ID NO: 91870 - DNA, 25 bp, Artificial
  probe
  misc_feature (1)..(25): SEQ ID NO: 7225; WAN024BRU_at; Start 375; Stop 399
tgtgatttctgctgttttgatatga

SEQ ID NO: 91871 - DNA, 25 bp, Artificial
  probe
  misc_feature (1)..(25): SEQ ID NO: 7225; WAN024BRU_at; Start 241; Stop 265
gcagtcaatgatgaatatgcttcct

SEQ ID NO: 91872 - DNA, 25 bp, Artificial
  probe
  misc_feature (1)..(25): SEQ ID NO: 7225; WAN024BRU_at; Start 222; Stop 246
taaaagacatgatgagatagcagtc

SEQ ID NO: 91873 - DNA, 25 bp, Artificial
  probe
  misc_feature (1)..(25): SEQ ID NO: 7225; WAN024BRU_at; Start 250; Stop 274
gatgaatatgcttccttactgactg

SEQ ID NO: 91874 - DNA, 25 bp, Artificial
  probe
  misc_feature (1)..(25): SEQ ID NO: 7225; WAN024BRU_at; Start 45; Stop 69
taatcttgccaataaactattttct

SEQ ID NO: 91875 - DNA, 25 bp, Artificial
  probe
  misc_feature (1)..(25): SEQ ID NO: 7225; WAN024BRU_at; Start 197; Stop 221
tgtatggaagtaagaaaatttctct

SEQ ID NO: 91876 - DNA, 25 bp, Artificial
  probe
  misc_feature (1)..(25): SEQ ID NO: 7225; WAN024BRU_at; Start 362; Stop 386
tccagatgttgtatgtgatttctgc

SEQ ID NO: 91877 - DNA, 25 bp, Artificial
  probe
  misc_feature (1)..(25): SEQ ID NO: 7225; WAN024BRU_at; Start 270; Stop 294
gactgtccagctgcttaatgtaggt

SEQ ID NO: 91878 - DNA, 25 bp, Artificial
  probe
  misc_feature (1)..(25): SEQ ID NO: 7225; WAN024BRU_at; Start 164; Stop 188
actttgttacctttacattgatggg

SEQ ID NO: 91879 - DNA, 25 bp, Artificial
  probe
  misc_feature (1)..(25): SEQ ID NO: 7225; WAN024BRU_at; Start 355; Stop 379
tattggatccagatgttgtatgtga

SEQ ID NO: 91880 - DNA, 25 bp, Artificial
  probe
  misc_feature (1)..(25): SEQ ID NO: 7225; WAN024BRU_at; Start 59; Stop 83
aactattttctctaactattccact

SEQ ID NO: 91881 - DNA, 25 bp, Artificial
  probe
  misc_feature (1)..(25): SEQ ID NO: 7225; WAN024BRU_at; Start 138; Stop 162
tacttataccaatacagttgcttct

SEQ ID NO: 91882 - DNA, 25 bp, Artificial
  probe
  misc_feature (1)..(25): SEQ ID NO: 6805; WAN024BRV_at; Start 104; Stop 128
tctggaagtttagtgggatacctac

SEQ ID NO: 91883 - DNA, 25 bp, Artificial
  probe
  misc_feature (1)..(25): SEQ ID NO: 6805; WAN024BRV_at; Start 1088; Stop 1112
tatttgaaggttacgcgccatttgg

SEQ ID NO: 91884 - DNA, 25 bp, Artificial
  probe
  misc_feature (1)..(25): SEQ ID NO: 6805; WAN024BRV_at; Start 615; Stop 639
tatgcggtcacgagcagttctgtta

SEQ ID NO: 91885 - DNA, 25 bp, Artificial
  probe
  misc_feature (1)..(25): SEQ ID NO: 6805; WAN024BRV_at; Start 301; Stop 325
cagcaactctatttggctgtgggaa

SEQ ID NO: 91886 - DNA, 25 bp, Artificial
  probe
  misc_feature (1)..(25): SEQ ID NO: 6805; WAN024BRV_at; Start 883; Stop 907
tcaggacatgaattaacagggattg

SEQ ID NO: 91887 - DNA, 25 bp, Artificial
  probe
  misc_feature (1)..(25): SEQ ID NO: 6805; WAN024BRV_at; Start 979; Stop 1003
gttttaatagccttgtctcccatga

SEQ ID NO: 91888 - DNA, 25 bp, Artificial
  probe
  misc_feature (1)..(25): SEQ ID NO: 6805; WAN024BRV_at; Start 585; Stop 609
tagcggattgctgatttacatgtgc

SEQ ID NO: 91889 - DNA, 25 bp, Artificial
  probe
  misc_feature (1)..(25): SEQ ID NO: 6805; WAN024BRV_at; Start 731; Stop 755
taggtgcgtttttgctcaattcagc

SEQ ID NO: 91890 - DNA, 25 bp, Artificial
  probe
  misc_feature (1)..(25): SEQ ID NO: 6805; WAN024BRV_at; Start 635; Stop 659
tgttagcagctgcagtacttccgct

SEQ ID NO: 91891 - DNA, 25 bp, Artificial
  probe
  misc_feature (1)..(25): SEQ ID NO: 6805; WAN024BRV_at; Start 335; Stop 359
taggctactggaatgctgatgtgat

SEQ ID NO: 91892 - DNA, 25 bp, Artificial
  probe
  misc_feature (1)..(25): SEQ ID NO: 6805; WAN024BRV_at; Start 378; Stop 402
catcaccatgacttttttgggagca

SEQ ID NO: 91893 - DNA, 25 bp, Artificial
  probe
  misc_feature (1)..(25): SEQ ID NO: 6805; WAN024BRV_at; Start 1002; Stop 1026
gatttatgccctcttgcaacgttct

SEQ ID NO: 91894 - DNA, 25 bp, Artificial
  probe
  misc_feature (1)..(25): SEQ ID NO: 6805; WAN024BRV_at; Start 493; Stop 517
gcggcatctatctttttatcggcag

SEQ ID NO: 91895 - DNA, 25 bp, Artificial
  probe
  misc_feature (1)..(25): SEQ ID NO: 6805; WAN024BRV_at; Start 531; Stop 555
gtctctatataatcgcaagtgggca

SEQ ID NO: 91896 - DNA, 25 bp, Artificial
  probe
  misc_feature (1)..(25): SEQ ID NO: 6805; WAN024BRV_at; Start 88; Stop 112
tcgcagactccctatatctggaagt

SEQ ID NO: 91897 - DNA, 25 bp, Artificial
  probe
  misc_feature (1)..(25): SEQ ID NO: 6805; WAN024BRV_at; Start 1102; Stop 1126
gcgccatttggtcccggtgccaaga

SEQ ID NO: 91898 - DNA, 25 bp, Artificial
  probe
  misc_feature (1)..(25): SEQ ID NO: 6805; WAN024BRV_at; Start 285; Stop 309
ctttaatggtttgtctcagcaactc

SEQ ID NO: 91899 - DNA, 25 bp, Artificial
  probe
  misc_feature (1)..(25): SEQ ID NO: 6805; WAN024BRV_at; Start 805; Stop 829
tatcgaccatctagtctgactttgg

SEQ ID NO: 91900 - DNA, 25 bp, Artificial
  probe
  misc_feature (1)..(25): SEQ ID NO: 6805; WAN024BRV_at; Start 141; Stop 165
tatgcctttgtggatcctgttggga

SEQ ID NO: 91901 - DNA, 25 bp, Artificial
  probe
  misc_feature (1)..(25): SEQ ID NO: 6805; WAN024BRV_at; Start 601; Stop 625
tacatgtgcatccttatgcggtcac

SEQ ID NO: 91902 - DNA, 25 bp, Artificial
  probe
  misc_feature (1)..(25): SEQ ID NO: 6805; WAN024BRV_at; Start 320; Stop 344
tgggaattctagttttaggctactg

SEQ ID NO: 91903 - DNA, 25 bp, Artificial
  probe
  misc_feature (1)..(25): SEQ ID NO: 6805; WAN024BRV_at; Start 51; Stop 75
ttatattttgcaggcagcgattgcc

SEQ ID NO: 91904 - DNA, 25 bp, Artificial
  probe
  misc_feature (1)..(25): SEQ ID NO: 6805; WAN024BRV_at; Start 473; Stop 497
tttatcgagctaagaattcagcggc

SEQ ID NO: 91905 - DNA, 25 bp, Artificial
  probe
  misc_feature (1)..(25): SEQ ID NO: 6805; WAN024BRV_at; Start 1166; Stop 1190
cacgaattggaaaggttggtgaaca

SEQ ID NO: 91906 - DNA, 25 bp, Artificial
  probe
  misc_feature (1)..(25): SEQ ID NO: 6805; WAN024BRV_at; Start 699; Stop 723
gattggacggacattaggagtttca

SEQ ID NO: 91907 - DNA, 25 bp, Artificial
  probe
  misc_feature (1)..(25): SEQ ID NO: 6805; WAN024BRV_at; Start 1150; Stop 1174
ggttgccttctgaatacacgaattg

SEQ ID NO: 91908 - DNA, 25 bp, Artificial
  probe
  misc_feature (1)..(25): SEQ ID NO: 6805; WAN024BRV_at; Start 546; Stop 570
caagtgggcactgtggagaaaagta

SEQ ID NO: 91909 - DNA, 25 bp, Artificial
  probe
  misc_feature (1)..(25): SEQ ID NO: 6805; WAN024BRV_at; Start 668; Stop 692
tatggtttcaggagacgtctttggg

SEQ ID NO: 91910 - DNA, 25 bp, Artificial
  probe
  misc_feature (1)..(25): SEQ ID NO: 6805; WAN024BRV_at; Start 787; Stop 811
ttaagggtcacatctgaatatcgac

SEQ ID NO: 91911 - DNA, 25 bp, Artificial
  probe
  misc_feature (1)..(25): SEQ ID NO: 6805; WAN024BRV_at; Start 181; Stop 205
tctagaattgacatggaacgatcat

SEQ ID NO: 91912 - DNA, 25 bp, Artificial
  probe
  misc_feature (1)..(25): SEQ ID NO: 6805; WAN024BRV_at; Start 819; Stop 843
tctgactttggactacgtttcctcc

SEQ ID NO: 91913 - DNA, 25 bp, Artificial
  probe
  misc_feature (1)..(25): SEQ ID NO: 6805; WAN024BRV_at; Start 866; Stop 890
tctttgctaaagaaatttcaggaca

SEQ ID NO: 91914 - DNA, 25 bp, Artificial
  probe
  misc_feature (1)..(25): SEQ ID NO: 6805; WAN024BRV_at; Start 117; Stop 141
tgggatacctacacaacttctgatt

SEQ ID NO: 91915 - DNA, 25 bp, Artificial
  probe
  misc_feature (1)..(25): SEQ ID NO: 6805; WAN024BRV_at; Start 714; Stop 738
aggagtttcaacagtagtaggtgcg

SEQ ID NO: 91916 - DNA, 25 bp, Artificial
  probe
  misc_feature (1)..(25): SEQ ID NO: 6248; WAN024BRW_at; Start 115; Stop 139
tcaacttctcatcgacgaaagggaa

SEQ ID NO: 91917 - DNA, 25 bp, Artificial
  probe
  misc_feature (1)..(25): SEQ ID NO: 6248; WAN024BRW_at; Start 85; Stop 109
gcatatgcacaaggggttcggacta

SEQ ID NO: 91918 - DNA, 25 bp, Artificial
  probe
  misc_feature (1)..(25): SEQ ID NO: 6248; WAN024BRW_at; Start 2; Stop 26
tgattgacatccattcacacatagt

SEQ ID NO: 91919 - DNA, 25 bp, Artificial
  probe
  misc_feature (1)..(25): SEQ ID NO: 6248; WAN024BRW_at; Start 238; Stop 262
gaaatctattttactagcgacatcc

SEQ ID NO: 91920 - DNA, 25 bp, Artificial
  probe
  misc_feature (1)..(25): SEQ ID NO: 6248; WAN024BRW_at; Start 121; Stop 145
tctcatcgacgaaagggaatgtttg

SEQ ID NO: 91921 - DNA, 25 bp, Artificial
  probe
  misc_feature (1)..(25): SEQ ID NO: 6248; WAN024BRW_at; Start 144; Stop 168
tgagacgccagaagataagattgct

SEQ ID NO: 91922 - DNA, 25 bp, Artificial
  probe
  misc_feature (1)..(25): SEQ ID NO: 6248; WAN024BRW_at; Start 63; Stop 87
tagtcgagcattgcttgaagaagca

SEQ ID NO: 91923 - DNA, 25 bp, Artificial
  probe
  misc_feature (1)..(25): SEQ ID NO: 6248; WAN024BRW_at; Start 131; Stop 155
gaaagggaatgtttgagacgccaga

SEQ ID NO: 91924 - DNA, 25 bp, Artificial
  probe
  misc_feature (1)..(25): SEQ ID NO: 6248; WAN024BRW_at; Start 252; Stop 276
tagcgacatcctagataaattagaa

SEQ ID NO: 91925 - DNA, 25 bp, Artificial
  probe
  misc_feature (1)..(25): SEQ ID NO: 6248; WAN024BRW_at; Start 44; Stop 68
ggcctaaaactatagaagatagtcg

SEQ ID NO: 91926 - DNA, 25 bp, Artificial
  probe
  misc_feature (1)..(25): SEQ ID NO: 6248; WAN024BRW_at; Start 204; Stop 228
gatagctcctgacctaacaatctta

SEQ ID NO: 91927 - DNA, 25 bp, Artificial
  probe
  misc_feature (1)..(25): SEQ ID NO: 6248; WAN024BRW_at; Start 147; Stop 171
gacgccagaagataagattgctgct

SEQ ID NO: 91928 - DNA, 25 bp, Artificial
  probe
  misc_feature (1)..(25): SEQ ID NO: 6248; WAN024BRW_at; Start 267; Stop 291
taaattagaaaatcacatcatccct

SEQ ID NO: 91929 - DNA, 25 bp, Artificial
  probe
  misc_feature (1)..(25): SEQ ID NO: 6248; WAN024BRW_at; Start 232; Stop 256
ggtgctgaaatctattttactagcg

SEQ ID NO: 91930 - DNA, 25 bp, Artificial
  probe
  misc_feature (1)..(25): SEQ ID NO: 6248; WAN024BRW_at; Start 190; Stop 214
gaactgtctaaggagatagctcctg

SEQ ID NO: 91931 - DNA, 25 bp, Artificial
  probe
  misc_feature (1)..(25): SEQ ID NO: 6248; WAN024BRW_at; Start 108; Stop 132
tattgtttcaacttctcatcgacga

SEQ ID NO: 91932 - DNA, 25 bp, Artificial
  probe
  misc_feature (1)..(25): SEQ ID NO: 6248; WAN024BRW_at; Start 128; Stop 152
gacgaaagggaatgtttgagacgcc

SEQ ID NO: 91933 - DNA, 25 bp, Artificial
  probe
  misc_feature (1)..(25): SEQ ID NO: 6248; WAN024BRW_at; Start 140; Stop 164
tgtttgagacgccagaagataagat

SEQ ID NO: 91934 - DNA, 25 bp, Artificial
  probe
  misc_feature (1)..(25): SEQ ID NO: 6248; WAN024BRW_at; Start 166; Stop 190
gctgctaattttaaaatcgttcagg

SEQ ID NO: 91935 - DNA, 25 bp, Artificial
  probe
  misc_feature (1)..(25): SEQ ID NO: 6248; WAN024BRW_at; Start 75; Stop 99
gcttgaagaagcatatgcacaaggg

SEQ ID NO: 91936 - DNA, 25 bp, Artificial
  probe
  misc_feature (1)..(25): SEQ ID NO: 6248; WAN024BRW_at; Start 187; Stop 211
caggaactgtctaaggagatagctc

SEQ ID NO: 91937 - DNA, 25 bp, Artificial
  probe
  misc_feature (1)..(25): SEQ ID NO: 6248; WAN024BRW_at; Start 23; Stop 47
tagtttttgatgtcgatgatgggcc

SEQ ID NO: 91938 - DNA, 25 bp, Artificial
  probe
  misc_feature (1)..(25): SEQ ID NO: 6248; WAN024BRW_at; Start 53; Stop 77
ctatagaagatagtcgagcattgct

SEQ ID NO: 91939 - DNA, 25 bp, Artificial
  probe
  misc_feature (1)..(25): SEQ ID NO: 6248; WAN024BRW_at; Start 178; Stop 202
aaaatcgttcaggaactgtctaagg

SEQ ID NO: 91940 - DNA, 25 bp, Artificial
  probe
  misc_feature (1)..(25): SEQ ID NO: 6248; WAN024BRW_at; Start 37; Stop 61
gatgatgggcctaaaactatagaag

SEQ ID NO: 91941 - DNA, 25 bp, Artificial
  probe
  misc_feature (1)..(25): SEQ ID NO: 6248; WAN024BRW_at; Start 136; Stop 160
ggaatgtttgagacgccagaagata

SEQ ID NO: 91942 - DNA, 25 bp, Artificial
  probe
  misc_feature (1)..(25): SEQ ID NO: 6248; WAN024BRW_at; Start 216; Stop 240
cctaacaatcttatacggtgctgaa

SEQ ID NO: 91943 - DNA, 25 bp, Artificial
  probe
  misc_feature (1)..(25): SEQ ID NO: 6248; WAN024BRW_at; Start 198; Stop 222
taaggagatagctcctgacctaaca

SEQ ID NO: 91944 - DNA, 25 bp, Artificial
  probe
  misc_feature (1)..(25): SEQ ID NO: 6248; WAN024BRW_at; Start 151; Stop 175
ccagaagataagattgctgctaatt

SEQ ID NO: 91945 - DNA, 25 bp, Artificial
  probe
  misc_feature (1)..(25): SEQ ID NO: 6248; WAN024BRW_at; Start 7; Stop 31
gacatccattcacacatagtttttg

SEQ ID NO: 91946 - DNA, 25 bp, Artificial
  probe
  misc_feature (1)..(25): SEQ ID NO: 6248; WAN024BRW_at; Start 100; Stop 124
gttcggactattgtttcaacttctc

SEQ ID NO: 91947 - DNA, 25 bp, Artificial
  probe
  misc_feature (1)..(25): SEQ ID NO: 6248; WAN024BRW_at; Start 31; Stop 55
gatgtcgatgatgggcctaaaacta

SEQ ID NO: 91948 - DNA, 25 bp, Artificial
  probe
  misc_feature (1)..(25): SEQ ID NO: 6248; WAN024BRW_at; Start 274; Stop 298
gaaaatcacatcatccctaaactca

SEQ ID NO: 91949 - DNA, 25 bp, Artificial
  probe
  misc_feature (1)..(25): SEQ ID NO: 6248; WAN024BRW_at; Start 219; Stop 243
aacaatcttatacggtgctgaaatc

SEQ ID NO: 91950 - DNA, 25 bp, Artificial
  probe
  misc_feature (1)..(25): SEQ ID NO: 6370; WAN024BRX_at; Start 146; Stop 170
tatcgatacgactagtacatgctaa

SEQ ID NO: 91951 - DNA, 25 bp, Artificial
  probe
  misc_feature (1)..(25): SEQ ID NO: 6370; WAN024BRX_at; Start 152; Stop 176
tacgactagtacatgctaaatctga

SEQ ID NO: 91952 - DNA, 25 bp, Artificial
  probe
  misc_feature (1)..(25): SEQ ID NO: 6370; WAN024BRX_at; Start 88; Stop 112
ggaatcgttgaaacagcaacttcaa

SEQ ID NO: 91953 - DNA, 25 bp, Artificial
  probe
  misc_feature (1)..(25): SEQ ID NO: 6370; WAN024BRX_at; Start 18; Stop 42
tacagtacaattttcagaaatccgt

SEQ ID NO: 91954 - DNA, 25 bp, Artificial
  probe
  misc_feature (1)..(25): SEQ ID NO: 6370; WAN024BRX_at; Start 137; Stop 161
caactgaaatatcgatacgactagt

SEQ ID NO: 91955 - DNA, 25 bp, Artificial
  probe
  misc_feature (1)..(25): SEQ ID NO: 6370; WAN024BRX_at; Start 210; Stop 234
taagccaacaagctcatctgtgata

SEQ ID NO: 91956 - DNA, 25 bp, Artificial
  probe
  misc_feature (1)..(25): SEQ ID NO: 6370; WAN024BRX_at; Start 198; Stop 222
tacatttagcattaagccaacaagc

SEQ ID NO: 91957 - DNA, 25 bp, Artificial
  probe
  misc_feature (1)..(25): SEQ ID NO: 6370; WAN024BRX_at; Start 215; Stop 239
caacaagctcatctgtgataatcta

SEQ ID NO: 91958 - DNA, 25 bp, Artificial
  probe
  misc_feature (1)..(25): SEQ ID NO: 6370; WAN024BRX_at; Start 206; Stop 230
gcattaagccaacaagctcatctgt

SEQ ID NO: 91959 - DNA, 25 bp, Artificial
  probe
  misc_feature (1)..(25): SEQ ID NO: 6370; WAN024BRX_at; Start 163; Stop 187
catgctaaatctgaaaaccgattac

SEQ ID NO: 91960 - DNA, 25 bp, Artificial
  probe
  misc_feature (1)..(25): SEQ ID NO: 6370; WAN024BRX_at; Start 243; Stop 267
tgaggtaatcaatcgctttaaagaa

SEQ ID NO: 91961 - DNA, 25 bp, Artificial
  probe
  misc_feature (1)..(25): SEQ ID NO: 6370; WAN024BRX_at; Start 172; Stop 196
tctgaaaaccgattaccattggaat

SEQ ID NO: 91962 - DNA, 25 bp, Artificial
  probe
  misc_feature (1)..(25): SEQ ID NO: 6370; WAN024BRX_at; Start 289; Stop 313
caaggttttacgattcaatttgata

SEQ ID NO: 91963 - DNA, 25 bp, Artificial
  probe
  misc_feature (1)..(25): SEQ ID NO: 6370; WAN024BRX_at; Start 85; Stop 109
catggaatcgttgaaacagcaactt

SEQ ID NO: 91964 - DNA, 25 bp, Artificial
  probe
  misc_feature (1)..(25): SEQ ID NO: 6370; WAN024BRX_at; Start 258; Stop 282
ctttaaagaatgttacacaggtggg

SEQ ID NO: 91965 - DNA, 25 bp, Artificial
  probe
  misc_feature (1)..(25): SEQ ID NO: 6370; WAN024BRX_at; Start 223; Stop 247
tcatctgtgataatctatactgagg

SEQ ID NO: 91966 - DNA, 25 bp, Artificial
  probe
  misc_feature (1)..(25): SEQ ID NO: 6370; WAN024BRX_at; Start 26; Stop 50
aattttcagaaatccgtagcaaagg

SEQ ID NO: 91967 - DNA, 25 bp, Artificial
  probe
  misc_feature (1)..(25): SEQ ID NO: 6370; WAN024BRX_at; Start 307; Stop 331
tttgataaaaatacccttgcctctg

SEQ ID NO: 91968 - DNA, 25 bp, Artificial
  probe
  misc_feature (1)..(25): SEQ ID NO: 6370; WAN024BRX_at; Start 50; Stop 74
gatgtaatgatattgaaatgcttga

SEQ ID NO: 91969 - DNA, 25 bp, Artificial
  probe
  misc_feature (1)..(25): SEQ ID NO: 6370; WAN024BRX_at; Start 103; Stop 127
gcaacttcaaaacttcgtcagagaa

SEQ ID NO: 91970 - DNA, 25 bp, Artificial
  probe
  misc_feature (1)..(25): SEQ ID NO: 6370; WAN024BRX_at; Start 66; Stop 90
aatgcttgaaagatttttacatgga

SEQ ID NO: 91971 - DNA, 25 bp, Artificial
  probe
  misc_feature (1)..(25): SEQ ID NO: 6370; WAN024BRX_at; Start 236; Stop 260
tctatactgaggtaatcaatcgctt

SEQ ID NO: 91972 - DNA, 25 bp, Artificial
  probe
  misc_feature (1)..(25): SEQ ID NO: 6370; WAN024BRX_at; Start 158; Stop 182
tagtacatgctaaatctgaaaaccg

SEQ ID NO: 91973 - DNA, 25 bp, Artificial
  probe
  misc_feature (1)..(25): SEQ ID NO: 6370; WAN024BRX_at; Start 110; Stop 134
caaaacttcgtcagagaaaactcaa

SEQ ID NO: 91974 - DNA, 25 bp, Artificial
  probe
  misc_feature (1)..(25): SEQ ID NO: 6370; WAN024BRX_at; Start 81; Stop 105
tttacatggaatcgttgaaacagca

SEQ ID NO: 91975 - DNA, 25 bp, Artificial
  probe
  misc_feature (1)..(25): SEQ ID NO: 6370; WAN024BRX_at; Start 118; Stop 142
cgtcagagaaaactcaaaacaactg

SEQ ID NO: 91976 - DNA, 25 bp, Artificial
  probe
  misc_feature (1)..(25): SEQ ID NO: 6370; WAN024BRX_at; Start 312; Stop 336
taaaaatacccttgcctctgcatag

SEQ ID NO: 91977 - DNA, 25 bp, Artificial
  probe
  misc_feature (1)..(25): SEQ ID NO: 6370; WAN024BRX_at; Start 101; Stop 125
cagcaacttcaaaacttcgtcagag

SEQ ID NO: 91978 - DNA, 25 bp, Artificial
  probe
  misc_feature (1)..(25): SEQ ID NO: 6370; WAN024BRX_at; Start 252; Stop 276
caatcgctttaaagaatgttacaca

SEQ ID NO: 91979 - DNA, 25 bp, Artificial
  probe
  misc_feature (1)..(25): SEQ ID NO: 6370; WAN024BRX_at; Start 32; Stop 56
cagaaatccgtagcaaaggatgtaa

SEQ ID NO: 91980 - DNA, 25 bp, Artificial
  probe
  misc_feature (1)..(25): SEQ ID NO: 6370; WAN024BRX_at; Start 185; Stop 209
taccattggaatttacatttagcat

SEQ ID NO: 91981 - DNA, 25 bp, Artificial
  probe
  misc_feature (1)..(25): SEQ ID NO: 6370; WAN024BRX_at; Start 142; Stop 166
gaaatatcgatacgactagtacatg

SEQ ID NO: 91982 - DNA, 25 bp, Artificial
  probe
  misc_feature (1)..(25): SEQ ID NO: 6370; WAN024BRX_at; Start 39; Stop 63
ccgtagcaaaggatgtaatgatatt

SEQ ID NO: 91983 - DNA, 25 bp, Artificial
  probe
  misc_feature (1)..(25): SEQ ID NO: 6370; WAN024BRX_at; Start 131; Stop 155
tcaaaacaactgaaatatcgatacg

SEQ ID NO: 91984 - DNA, 25 bp, Artificial
  probe
  misc_feature (1)..(25): SEQ ID NO: 6594; WAN024BRY_at; Start 2; Stop 26
tgagggaatgtaaaatgaaatattt

SEQ ID NO: 91985 - DNA, 25 bp, Artificial
  probe
  misc_feature (1)..(25): SEQ ID NO: 6594; WAN024BRY_at; Start 120; Stop 144
gagcgttacagtctatgaagaaaac

SEQ ID NO: 91986 - DNA, 25 bp, Artificial
  probe
  misc_feature (1)..(25): SEQ ID NO: 6594; WAN024BRY_at; Start 162; Stop 186
atctggcatcgaattggaagtatga

SEQ ID NO: 91987 - DNA, 25 bp, Artificial
  probe
  misc_feature (1)..(25): SEQ ID NO: 6594; WAN024BRY_at; Start 159; Stop 183
taaatctggcatcgaattggaagta

SEQ ID NO: 91988 - DNA, 25 bp, Artificial
  probe
  misc_feature (1)..(25): SEQ ID NO: 6594; WAN024BRY_at; Start 94; Stop 118
cgcttgctactaaggaagataatcc

SEQ ID NO: 91989 - DNA, 25 bp, Artificial
  probe
  misc_feature (1)..(25): SEQ ID NO: 6594; WAN024BRY_at; Start 76; Stop 100
gattttgtgaaagctaatcgcttgc

SEQ ID NO: 91990 - DNA, 25 bp, Artificial
  probe
  misc_feature (1)..(25): SEQ ID NO: 6594; WAN024BRY_at; Start 84; Stop 108
gaaagctaatcgcttgctactaagg

SEQ ID NO: 91991 - DNA, 25 bp, Artificial
  probe
  misc_feature (1)..(25): SEQ ID NO: 6594; WAN024BRY_at; Start 30; Stop 54
ggttgagttagaaaatcctgatgaa

SEQ ID NO: 91992 - DNA, 25 bp, Artificial
  probe
  misc_feature (1)..(25): SEQ ID NO: 6594; WAN024BRY_at; Start 101; Stop 125
tactaaggaagataatccagagcgt

SEQ ID NO: 91993 - DNA, 25 bp, Artificial
  probe
  misc_feature (1)..(25): SEQ ID NO: 6594; WAN024BRY_at; Start 98; Stop 122
tgctactaaggaagataatccagag

SEQ ID NO: 91994 - DNA, 25 bp, Artificial
  probe
  misc_feature (1)..(25): SEQ ID NO: 6594; WAN024BRY_at; Start 110; Stop 134
agataatccagagcgttacagtcta

SEQ ID NO: 91995 - DNA, 25 bp, Artificial
  probe
  misc_feature (1)..(25): SEQ ID NO: 6594; WAN024BRY_at; Start 45; Stop 69
tcctgatgaatttttaaaactacaa

SEQ ID NO: 91996 - DNA, 25 bp, Artificial
  probe
  misc_feature (1)..(25): SEQ ID NO: 6594; WAN024BRY_at; Start 143; Stop 167
acttcgtcatatcctttaaatctgg

SEQ ID NO: 91997 - DNA, 25 bp, Artificial
  probe
  misc_feature (1)..(25): SEQ ID NO: 6594; WAN024BRY_at; Start 60; Stop 84
aaaactacaaacagaagattttgtg

SEQ ID NO: 91998 - DNA, 25 bp, Artificial
  probe
  misc_feature (1)..(25): SEQ ID NO: 6594; WAN024BRY_at; Start 90; Stop 114
taatcgcttgctactaaggaagata

SEQ ID NO: 91999 - DNA, 25 bp, Artificial
  probe
  misc_feature (1)..(25): SEQ ID NO: 6594; WAN024BRY_at; Start 104; Stop 128
taaggaagataatccagagcgttac

SEQ ID NO: 92000 - DNA, 25 bp, Artificial
  probe
  misc_feature (1)..(25): SEQ ID NO: 6594; WAN024BRY_at; Start 136; Stop 160
gaagaaaacttcgtcatatccttta

SEQ ID NO: 92001 - DNA, 25 bp, Artificial
  probe
  misc_feature (1)..(25): SEQ ID NO: 6594; WAN024BRY_at; Start 33; Stop 57
tgagttagaaaatcctgatgaattt

SEQ ID NO: 92002 - DNA, 25 bp, Artificial
  probe
  misc_feature (1)..(25): SEQ ID NO: 6594; WAN024BRY_at; Start 25; Stop 49
tttgaggttgagttagaaaatcctg

SEQ ID NO: 92003 - DNA, 25 bp, Artificial
  probe
  misc_feature (1)..(25): SEQ ID NO: 6594; WAN024BRY_at; Start 88; Stop 112
gctaatcgcttgctactaaggaaga

SEQ ID NO: 92004 - DNA, 25 bp, Artificial
  probe
  misc_feature (1)..(25): SEQ ID NO: 6594; WAN024BRY_at; Start 113; Stop 137
taatccagagcgttacagtctatga

SEQ ID NO: 92005 - DNA, 25 bp, Artificial
  probe
  misc_feature (1)..(25): SEQ ID NO: 6594; WAN024BRY_at; Start 18; Stop 42
gaaatattttgaggttgagttagaa

SEQ ID NO: 92006 - DNA, 25 bp, Artificial
  probe
  misc_feature (1)..(25): SEQ ID NO: 6594; WAN024BRY_at; Start 128; Stop 152
cagtctatgaagaaaacttcgtcat

SEQ ID NO: 92007 - DNA, 25 bp, Artificial
  probe
  misc_feature (1)..(25): SEQ ID NO: 6594; WAN024BRY_at; Start 67; Stop 91
caaacagaagattttgtgaaagcta

SEQ ID NO: 92008 - DNA, 25 bp, Artificial
  probe
  misc_feature (1)..(25): SEQ ID NO: 6594; WAN024BRY_at; Start 150; Stop 174
catatcctttaaatctggcatcgaa

SEQ ID NO: 92009 - DNA, 25 bp, Artificial
  probe
  misc_feature (1)..(25): SEQ ID NO: 6594; WAN024BRY_at; Start 79; Stop 103
tttgtgaaagctaatcgcttgctac

SEQ ID NO: 92010 - DNA, 25 bp, Artificial
  probe
  misc_feature (1)..(25): SEQ ID NO: 6594; WAN024BRY_at; Start 96; Stop 120
cttgctactaaggaagataatccag

SEQ ID NO: 92011 - DNA, 25 bp, Artificial
  probe
  misc_feature (1)..(25): SEQ ID NO: 6594; WAN024BRY_at; Start 71; Stop 95
cagaagattttgtgaaagctaatcg

SEQ ID NO: 92012 - DNA, 25 bp, Artificial
  probe
  misc_feature (1)..(25): SEQ ID NO: 6594; WAN024BRY_at; Start 124; Stop 148
gttacagtctatgaagaaaacttcg

SEQ ID NO: 92013 - DNA, 25 bp, Artificial
  probe
  misc_feature (1)..(25): SEQ ID NO: 6594; WAN024BRY_at; Start 118; Stop 142
cagagcgttacagtctatgaagaaa

SEQ ID NO: 92014 - DNA, 25 bp, Artificial
  probe
  misc_feature (1)..(25): SEQ ID NO: 6594; WAN024BRY_at; Start 148; Stop 172
gtcatatcctttaaatctggcatcg

SEQ ID NO: 92015 - DNA, 25 bp, Artificial
  probe
  misc_feature (1)..(25): SEQ ID NO: 6594; WAN024BRY_at; Start 154; Stop 178
tcctttaaatctggcatcgaattgg

SEQ ID NO: 92016 - DNA, 25 bp, Artificial
  probe
  misc_feature (1)..(25): SEQ ID NO: 6594; WAN024BRY_at; Start 116; Stop 140
tccagagcgttacagtctatgaaga

SEQ ID NO: 92017 - DNA, 25 bp, Artificial
  probe
  misc_feature (1)..(25): SEQ ID NO: 6594; WAN024BRY_at; Start 108; Stop 132
gaagataatccagagcgttacagtc

SEQ ID NO: 92018 - DNA, 25 bp, Artificial
  probe
  misc_feature (1)..(25): SEQ ID NO: 7633; WAN024BRZ_at; Start 116; Stop 140
tatcatttaaaagtttgctcttggc

SEQ ID NO: 92019 - DNA, 25 bp, Artificial
  probe
  misc_feature (1)..(25): SEQ ID NO: 7633; WAN024BRZ_at; Start 35; Stop 59
ggcaagcatactttttacgtagtca

SEQ ID NO: 92020 - DNA, 25 bp, Artificial
  probe
  misc_feature (1)..(25): SEQ ID NO: 7633; WAN024BRZ_at; Start 68; Stop 92
caaatgtttgtgttgcttcgaaccg

SEQ ID NO: 92021 - DNA, 25 bp, Artificial
  probe
  misc_feature (1)..(25): SEQ ID NO: 7633; WAN024BRZ_at; Start 49; Stop 73
ttacgtagtcaaggcctagcaaatg

SEQ ID NO: 92022 - DNA, 25 bp, Artificial
  probe
  misc_feature (1)..(25): SEQ ID NO: 7633; WAN024BRZ_at; Start 78; Stop 102
tgttgcttcgaaccgccgaaatggc

SEQ ID NO: 92023 - DNA, 25 bp, Artificial
  probe
  misc_feature (1)..(25): SEQ ID NO: 7633; WAN024BRZ_at; Start 151; Stop 175
cacagcctaagtaacggtgtcgcag

SEQ ID NO: 92024 - DNA, 25 bp, Artificial
  probe
  misc_feature (1)..(25): SEQ ID NO: 7633; WAN024BRZ_at; Start 92; Stop 116
gccgaaatggctgtgaactcagcgt

SEQ ID NO: 92025 - DNA, 25 bp, Artificial
  probe
  misc_feature (1)..(25): SEQ ID NO: 7633; WAN024BRZ_at; Start 54; Stop 78
tagtcaaggcctagcaaatgtttgt

SEQ ID NO: 92026 - DNA, 25 bp, Artificial
  probe
  misc_feature (1)..(25): SEQ ID NO: 7633; WAN024BRZ_at; Start 72; Stop 96
tgtttgtgttgcttcgaaccgccga

SEQ ID NO: 92027 - DNA, 25 bp, Artificial
  probe
  misc_feature (1)..(25): SEQ ID NO: 7633; WAN024BRZ_at; Start 23; Stop 47
caaaagatttttggcaagcatactt

SEQ ID NO: 92028 - DNA, 25 bp, Artificial
  probe
  misc_feature (1)..(25): SEQ ID NO: 7633; WAN024BRZ_at; Start 283; Stop 307
tgtatttatcctaaccgcgtattag

SEQ ID NO: 92029 - DNA, 25 bp, Artificial
  probe
  misc_feature (1)..(25): SEQ ID NO: 7633; WAN024BRZ_at; Start 232; Stop 256
gaaactattagcgtccgtagtctca

SEQ ID NO: 92030 - DNA, 25 bp, Artificial
  probe
  misc_feature (1)..(25): SEQ ID NO: 7633; WAN024BRZ_at; Start 2; Stop 26
tggcttgcgcagagactaagccaaa

SEQ ID NO: 92031 - DNA, 25 bp, Artificial
  probe
  misc_feature (1)..(25): SEQ ID NO: 7633; WAN024BRZ_at; Start 249; Stop 273
tagtctcatacctaggcaaaaaagc

SEQ ID NO: 92032 - DNA, 25 bp, Artificial
  probe
  misc_feature (1)..(25): SEQ ID NO: 7633; WAN024BRZ_at; Start 128; Stop 152
gtttgctcttggcaatactcagcca

SEQ ID NO: 92033 - DNA, 25 bp, Artificial
  probe
  misc_feature (1)..(25): SEQ ID NO: 7633; WAN024BRZ_at; Start 240; Stop 264
tagcgtccgtagtctcatacctagg

SEQ ID NO: 92034 - DNA, 25 bp, Artificial
  probe
  misc_feature (1)..(25): SEQ ID NO: 7633; WAN024BRZ_at; Start 196; Stop 220
gcaaacaaacttgagcttcacttac

SEQ ID NO: 92035 - DNA, 25 bp, Artificial
  probe
  misc_feature (1)..(25): SEQ ID NO: 7633; WAN024BRZ_at; Start 259; Stop 283
cctaggcaaaaaagcaattccgtct

SEQ ID NO: 92036 - DNA, 25 bp, Artificial
  probe
  misc_feature (1)..(25): SEQ ID NO: 7633; WAN024BRZ_at; Start 272; Stop 296
gcaattccgtctgtatttatcctaa

SEQ ID NO: 92037 - DNA, 25 bp, Artificial
  probe
  misc_feature (1)..(25): SEQ ID NO: 7633; WAN024BRZ_at; Start 175; Stop 199
ggtactactgtagtaaattctgcaa

SEQ ID NO: 92038 - DNA, 25 bp, Artificial
  probe
  misc_feature (1)..(25): SEQ ID NO: 7633; WAN024BRZ_at; Start 45; Stop 69
ctttttacgtagtcaaggcctagca

SEQ ID NO: 92039 - DNA, 25 bp, Artificial
  probe
  misc_feature (1)..(25): SEQ ID NO: 7633; WAN024BRZ_at; Start 146; Stop 170
tcagccacagcctaagtaacggtgt

SEQ ID NO: 92040 - DNA, 25 bp, Artificial
  probe
  misc_feature (1)..(25): SEQ ID NO: 7633; WAN024BRZ_at; Start 104; Stop 128
gtgaactcagcgtatcatttaaaag

SEQ ID NO: 92041 - DNA, 25 bp, Artificial
  probe
  misc_feature (1)..(25): SEQ ID NO: 7633; WAN024BRZ_at; Start 85; Stop 109
tcgaaccgccgaaatggctgtgaac

SEQ ID NO: 92042 - DNA, 25 bp, Artificial
  probe
  misc_feature (1)..(25): SEQ ID NO: 7633; WAN024BRZ_at; Start 8; Stop 32
gcgcagagactaagccaaaagattt

SEQ ID NO: 92043 - DNA, 25 bp, Artificial
  probe
  misc_feature (1)..(25): SEQ ID NO: 7633; WAN024BRZ_at; Start 158; Stop 182
taagtaacggtgtcgcaggtactac

SEQ ID NO: 92044 - DNA, 25 bp, Artificial
  probe
  misc_feature (1)..(25): SEQ ID NO: 7633; WAN024BRZ_at; Start 224; Stop 248
aagtgatcgaaactattagcgtccg

SEQ ID NO: 92045 - DNA, 25 bp, Artificial
  probe
  misc_feature (1)..(25): SEQ ID NO: 7633; WAN024BRZ_at; Start 208; Stop 232
gagcttcacttactaaaagtgatcg

SEQ ID NO: 92046 - DNA, 25 bp, Artificial
  probe
  misc_feature (1)..(25): SEQ ID NO: 7633; WAN024BRZ_at; Start 137; Stop 161
tggcaatactcagccacagcctaag

SEQ ID NO: 92047 - DNA, 25 bp, Artificial
  probe
  misc_feature (1)..(25): SEQ ID NO: 7633; WAN024BRZ_at; Start 263; Stop 287
ggcaaaaaagcaattccgtctgtat

SEQ ID NO: 92048 - DNA, 25 bp, Artificial
  probe
  misc_feature (1)..(25): SEQ ID NO: 7633; WAN024BRZ_at; Start 188; Stop 212
taaattctgcaaacaaacttgagct

SEQ ID NO: 92049 - DNA, 25 bp, Artificial
  probe
  misc_feature (1)..(25): SEQ ID NO: 7633; WAN024BRZ_at; Start 165; Stop 189
cggtgtcgcaggtactactgtagta

SEQ ID NO: 92050 - DNA, 25 bp, Artificial
  probe
  misc_feature (1)..(25): SEQ ID NO: 7633; WAN024BRZ_at; Start 96; Stop 120
aaatggctgtgaactcagcgtatca

SEQ ID NO: 92051 - DNA, 25 bp, Artificial
  probe
  misc_feature (1)..(25): SEQ ID NO: 7633; WAN024BRZ_at; Start 279; Stop 303
cgtctgtatttatcctaaccgcgta

SEQ ID NO: 92052 - DNA, 25 bp, Artificial
  probe
  misc_feature (1)..(25): SEQ ID NO: 7574; WAN024BS2_at; Start 246; Stop 270
cgactatgtttctattagccacgca

SEQ ID NO: 92053 - DNA, 25 bp, Artificial
  probe
  misc_feature (1)..(25): SEQ ID NO: 7574; WAN024BS2_at; Start 173; Stop 197
ttatgcacataaaactgaaagcgac

SEQ ID NO: 92054 - DNA, 25 bp, Artificial
  probe
  misc_feature (1)..(25): SEQ ID NO: 7574; WAN024BS2_at; Start 11; Stop 35
tcttttcacgtactcaagaagaagt

SEQ ID NO: 92055 - DNA, 25 bp, Artificial
  probe
  misc_feature (1)..(25): SEQ ID NO: 7574; WAN024BS2_at; Start 235; Stop 259
cgaaccaatttcgactatgtttcta

SEQ ID NO: 92056 - DNA, 25 bp, Artificial
  probe
  misc_feature (1)..(25): SEQ ID NO: 7574; WAN024BS2_at; Start 61; Stop 85
caaaccaacggtgaacccagcgtat

SEQ ID NO: 92057 - DNA, 25 bp, Artificial
  probe
  misc_feature (1)..(25): SEQ ID NO: 7574; WAN024BS2_at; Start 70; Stop 94
ggtgaacccagcgtatcttttagaa

SEQ ID NO: 92058 - DNA, 25 bp, Artificial
  probe
  misc_feature (1)..(25): SEQ ID NO: 7574; WAN024BS2_at; Start 253; Stop 277
gtttctattagccacgcattccgtc

SEQ ID NO: 92059 - DNA, 25 bp, Artificial
  probe
  misc_feature (1)..(25): SEQ ID NO: 7574; WAN024BS2_at; Start 96; Stop 120
tctgcaaaaggaaacagacagccac

SEQ ID NO: 92060 - DNA, 25 bp, Artificial
  probe
  misc_feature (1)..(25): SEQ ID NO: 7574; WAN024BS2_at; Start 203; Stop 227
gaattagtagagtccttcaaacacc

SEQ ID NO: 92061 - DNA, 25 bp, Artificial
  probe
  misc_feature (1)..(25): SEQ ID NO: 7574; WAN024BS2_at; Start 207; Stop 231
tagtagagtccttcaaacacctctg

SEQ ID NO: 92062 - DNA, 25 bp, Artificial
  probe
  misc_feature (1)..(25): SEQ ID NO: 7574; WAN024BS2_at; Start 228; Stop 252
tctgcaacgaaccaatttcgactat

SEQ ID NO: 92063 - DNA, 25 bp, Artificial
  probe
  misc_feature (1)..(25): SEQ ID NO: 7574; WAN024BS2_at; Start 106; Stop 130
gaaacagacagccacaacccaacta

SEQ ID NO: 92064 - DNA, 25 bp, Artificial
  probe
  misc_feature (1)..(25): SEQ ID NO: 7574; WAN024BS2_at; Start 218; Stop 242
ttcaaacacctctgcaacgaaccaa

SEQ ID NO: 92065 - DNA, 25 bp, Artificial
  probe
  misc_feature (1)..(25): SEQ ID NO: 7574; WAN024BS2_at; Start 142; Stop 166
ggtactactgtagcaagttctgtcg

SEQ ID NO: 92066 - DNA, 25 bp, Artificial
  probe
  misc_feature (1)..(25): SEQ ID NO: 7574; WAN024BS2_at; Start 180; Stop 204
cataaaactgaaagcgactaaacga

SEQ ID NO: 92067 - DNA, 25 bp, Artificial
  probe
  misc_feature (1)..(25): SEQ ID NO: 7574; WAN024BS2_at; Start 255; Stop 279
ttctattagccacgcattccgtcca

SEQ ID NO: 92068 - DNA, 25 bp, Artificial
  probe
  misc_feature (1)..(25): SEQ ID NO: 7574; WAN024BS2_at; Start 162; Stop 186
tgtcgactaccttatgcacataaaa

SEQ ID NO: 92069 - DNA, 25 bp, Artificial
  probe
  misc_feature (1)..(25): SEQ ID NO: 7574; WAN024BS2_at; Start 223; Stop 247
acacctctgcaacgaaccaatttcg

SEQ ID NO: 92070 - DNA, 25 bp, Artificial
  probe
  misc_feature (1)..(25): SEQ ID NO: 7574; WAN024BS2_at; Start 39; Stop 63
tgtttctactgtttccaaccaccaa

SEQ ID NO: 92071 - DNA, 25 bp, Artificial
  probe
  misc_feature (1)..(25): SEQ ID NO: 7574; WAN024BS2_at; Start 88; Stop 112
tttagaactctgcaaaaggaaacag

SEQ ID NO: 92072 - DNA, 25 bp, Artificial
  probe
  misc_feature (1)..(25): SEQ ID NO: 7574; WAN024BS2_at; Start 132; Stop 156
cgttaccgtaggtactactgtagca

SEQ ID NO: 92073 - DNA, 25 bp, Artificial
  probe
  misc_feature (1)..(25): SEQ ID NO: 7574; WAN024BS2_at; Start 155; Stop 179
caagttctgtcgactaccttatgca

SEQ ID NO: 92074 - DNA, 25 bp, Artificial
  probe
  misc_feature (1)..(25): SEQ ID NO: 7574; WAN024BS2_at; Start 72; Stop 96
tgaacccagcgtatcttttagaact

SEQ ID NO: 92075 - DNA, 25 bp, Artificial
  probe
  misc_feature (1)..(25): SEQ ID NO: 7574; WAN024BS2_at; Start 31; Stop 55
gaagtaactgtttctactgtttcca

SEQ ID NO: 92076 - DNA, 25 bp, Artificial
  probe
  misc_feature (1)..(25): SEQ ID NO: 7574; WAN024BS2_at; Start 78; Stop 102
cagcgtatcttttagaactctgcaa

SEQ ID NO: 92077 - DNA, 25 bp, Artificial
  probe
  misc_feature (1)..(25): SEQ ID NO: 7574; WAN024BS2_at; Start 17; Stop 41
cacgtactcaagaagaagtaactgt

SEQ ID NO: 92078 - DNA, 25 bp, Artificial
  probe
  misc_feature (1)..(25): SEQ ID NO: 7574; WAN024BS2_at; Start 100; Stop 124
caaaaggaaacagacagccacaacc

SEQ ID NO: 92079 - DNA, 25 bp, Artificial
  probe
  misc_feature (1)..(25): SEQ ID NO: 7574; WAN024BS2_at; Start 147; Stop 171
tactgtagcaagttctgtcgactac

SEQ ID NO: 92080 - DNA, 25 bp, Artificial
  probe
  misc_feature (1)..(25): SEQ ID NO: 7574; WAN024BS2_at; Start 66; Stop 90
caacggtgaacccagcgtatctttt

SEQ ID NO: 92081 - DNA, 25 bp, Artificial
  probe
  misc_feature (1)..(25): SEQ ID NO: 7574; WAN024BS2_at; Start 3; Stop 27
gcgtccattcttttcacgtactcaa

SEQ ID NO: 92082 - DNA, 25 bp, Artificial
  probe
  misc_feature (1)..(25): SEQ ID NO: 7574; WAN024BS2_at; Start 194; Stop 218
cgactaaacgaattagtagagtcct

SEQ ID NO: 92083 - DNA, 25 bp, Artificial
  probe
  misc_feature (1)..(25): SEQ ID NO: 7574; WAN024BS2_at; Start 137; Stop 161
ccgtaggtactactgtagcaagttc

SEQ ID NO: 92084 - DNA, 25 bp, Artificial
  probe
  misc_feature (1)..(25): SEQ ID NO: 7574; WAN024BS2_at; Start 212; Stop 236
gagtccttcaaacacctctgcaacg

SEQ ID NO: 92085 - DNA, 25 bp, Artificial
  probe
  misc_feature (1)..(25): SEQ ID NO: 7574; WAN024BS2_at; Start 185; Stop 209
aactgaaagcgactaaacgaattag

SEQ ID NO: 92086 - DNA, 25 bp, Artificial
  probe
  misc_feature (1)..(25): SEQ ID NO: 7009; WAN024BS3_at; Start 657; Stop 681
taaccaaggttctgcattaatgggt

SEQ ID NO: 92087 - DNA, 25 bp, Artificial
  probe
  misc_feature (1)..(25): SEQ ID NO: 7009; WAN024BS3_at; Start 783; Stop 807
tatgaatattactggtggcgagtca

SEQ ID NO: 92088 - DNA, 25 bp, Artificial
  probe
  misc_feature (1)..(25): SEQ ID NO: 7009; WAN024BS3_at; Start 595; Stop 619
gacttaatcgctgtttctggtgaag

SEQ ID NO: 92089 - DNA, 25 bp, Artificial
  probe
  misc_feature (1)..(25): SEQ ID NO: 7009; WAN024BS3_at; Start 691; Stop 715
tcttctggtgaaaatagagcggtag

SEQ ID NO: 92090 - DNA, 25 bp, Artificial
  probe
  misc_feature (1)..(25): SEQ ID NO: 7009; WAN024BS3_at; Start 76; Stop 100
gccgtaaaccgaatgattgaccacg

SEQ ID NO: 92091 - DNA, 25 bp, Artificial
  probe
  misc_feature (1)..(25): SEQ ID NO: 7009; WAN024BS3_at; Start 826; Stop 850
caagaggctgctgatattgtccaag

SEQ ID NO: 92092 - DNA, 25 bp, Artificial
  probe
  misc_feature (1)..(25): SEQ ID NO: 7009; WAN024BS3_at; Start 962; Stop 986
cacatggtcgtaaatctggtagcac

SEQ ID NO: 92093 - DNA, 25 bp, Artificial
  probe
  misc_feature (1)..(25): SEQ ID NO: 7009; WAN024BS3_at; Start 511; Stop 535
gatatcgttgacaaatctacgccaa

SEQ ID NO: 92094 - DNA, 25 bp, Artificial
  probe
  misc_feature (1)..(25): SEQ ID NO: 7009; WAN024BS3_at; Start 812; Stop 836
cattatttgaagcacaagaggctgc

SEQ ID NO: 92095 - DNA, 25 bp, Artificial
  probe
  misc_feature (1)..(25): SEQ ID NO: 7009; WAN024BS3_at; Start 230; Stop 254
tcggtaaaaaagctgcagaggaatc

SEQ ID NO: 92096 - DNA, 25 bp, Artificial
  probe
  misc_feature (1)..(25): SEQ ID NO: 7009; WAN024BS3_at; Start 303; Stop 327
tacttctggtatgggtggcggaact

SEQ ID NO: 92097 - DNA, 25 bp, Artificial
  probe
  misc_feature (1)..(25): SEQ ID NO: 7009; WAN024BS3_at; Start 132; Stop 156
cacagacggtcaagctttaaactta

SEQ ID NO: 92098 - DNA, 25 bp, Artificial
  probe
  misc_feature (1)..(25): SEQ ID NO: 7009; WAN024BS3_at; Start 271; Stop 295
gatgcaatccaaggtgcagacatgg

SEQ ID NO: 92099 - DNA, 25 bp, Artificial
  probe
  misc_feature (1)..(25): SEQ ID NO: 7009; WAN024BS3_at; Start 1057; Stop 1081
tcaaatgcacaagcaactgatagtg

SEQ ID NO: 92100 - DNA, 25 bp, Artificial
  probe
  misc_feature (1)..(25): SEQ ID NO: 7009; WAN024BS3_at; Start 526; Stop 550
tctacgccaatgatggaagcattta

SEQ ID NO: 92101 - DNA, 25 bp, Artificial
  probe
  misc_feature (1)..(25): SEQ ID NO: 7009; WAN024BS3_at; Start 118; Stop 142
tttatcgctatcaacacagacggtc

SEQ ID NO: 92102 - DNA, 25 bp, Artificial
  probe
  misc_feature (1)..(25): SEQ ID NO: 7009; WAN024BS3_at; Start 194; Stop 218
taacacgtggtttaggagcaggagc

SEQ ID NO: 92103 - DNA, 25 bp, Artificial
  probe
  misc_feature (1)..(25): SEQ ID NO: 7009; WAN024BS3_at; Start 569; Stop 593
tacgccaaggtgtacaaggtatctc

SEQ ID NO: 92104 - DNA, 25 bp, Artificial
  probe
  misc_feature (1)..(25): SEQ ID NO: 7009; WAN024BS3_at; Start 845; Stop 869
tccaagatgctgcagatgaagacgt

SEQ ID NO: 92105 - DNA, 25 bp, Artificial
  probe
  misc_feature (1)..(25): SEQ ID NO: 7009; WAN024BS3_at; Start 626; Stop 650
tagactttgcagacgttaagacaat

SEQ ID NO: 92106 - DNA, 25 bp, Artificial
  probe
  misc_feature (1)..(25): SEQ ID NO: 7009; WAN024BS3_at; Start 946; Stop 970
gatgacaaaccaacatcacatggtc

SEQ ID NO: 92107 - DNA, 25 bp, Artificial
  probe
  misc_feature (1)..(25): SEQ ID NO: 7009; WAN024BS3_at; Start 380; Stop 404
taactgttggtgttgtaactcgtcc

SEQ ID NO: 92108 - DNA, 25 bp, Artificial
  probe
  misc_feature (1)..(25): SEQ ID NO: 7009; WAN024BS3_at; Start 751; Stop 775
gaaacatctatcgttggtgcacaag

SEQ ID NO: 92109 - DNA, 25 bp, Artificial
  probe
  misc_feature (1)..(25): SEQ ID NO: 7009; WAN024BS3_at; Start 457; Stop 481
gctatgaaagctgcagtagatacat

SEQ ID NO: 92110 - DNA, 25 bp, Artificial
  probe
  misc_feature (1)..(25): SEQ ID NO: 7009; WAN024BS3_at; Start 434; Stop 458
ctcaagctgctgctggagtagaagc

SEQ ID NO: 92111 - DNA, 25 bp, Artificial
  probe
  misc_feature (1)..(25): SEQ ID NO: 7009; WAN024BS3_at; Start 1001; Stop 1025
gcgtaaatacttctagcaatgcaac

SEQ ID NO: 92112 - DNA, 25 bp, Artificial
  probe
  misc_feature (1)..(25): SEQ ID NO: 7009; WAN024BS3_at; Start 978; Stop 1002
tggtagcactggattcggaacaagc

SEQ ID NO: 92113 - DNA, 25 bp, Artificial
  probe
  misc_feature (1)..(25): SEQ ID NO: 7009; WAN024BS3_at; Start 245; Stop 269
cagaggaatctcgtgaacaaattga

SEQ ID NO: 92114 - DNA, 25 bp, Artificial
  probe
  misc_feature (1)..(25): SEQ ID NO: 7009; WAN024BS3_at; Start 214; Stop 238
ggagctaatcctgaaatcggtaaaa

SEQ ID NO: 92115 - DNA, 25 bp, Artificial
  probe
  misc_feature (1)..(25): SEQ ID NO: 7009; WAN024BS3_at; Start 334; Stop 358
ggtgcagcaccagtcgttgctaaaa

SEQ ID NO: 92116 - DNA, 25 bp, Artificial
  probe
  misc_feature (1)..(25): SEQ ID NO: 7009; WAN024BS3_at; Start 321; Stop 345
cggaactggtactggtgcagcacca

SEQ ID NO: 92117 - DNA, 25 bp, Artificial
  probe
  misc_feature (1)..(25): SEQ ID NO: 7009; WAN024BS3_at; Start 163; Stop 187
gctgaatctaaaatccaaatcggtg

SEQ ID NO: 92118 - DNA, 25 bp, Artificial
  probe
  misc_feature (1)..(25): SEQ ID NO: 7009; WAN024BS3_at; Start 419; Stop 443
gacgtaaacgtcaaactcaagctgc

SEQ ID NO: 92119 - DNA, 25 bp, Artificial
  probe
  misc_feature (1)..(25): SEQ ID NO: 7009; WAN024BS3_at; Start 553; Stop 577
gaagctgacaacgtgttacgccaag

SEQ ID NO: 92120 - DNA, 25 bp, Artificial
  probe
  misc_feature (1)..(25): SEQ ID NO: 7263; WAN024BS4_at; Start 54; Stop 78
tccaagattttactcccttggtcta

SEQ ID NO: 92121 - DNA, 25 bp, Artificial
  probe
  misc_feature (1)..(25): SEQ ID NO: 7263; WAN024BS4_at; Start 45; Stop 69
tacaaatactccaagattttactcc

SEQ ID NO: 92122 - DNA, 25 bp, Artificial
  probe
  misc_feature (1)..(25): SEQ ID NO: 7263; WAN024BS4_at; Start 16; Stop 40
aatactatgctaaagattctatcgg

SEQ ID NO: 92123 - DNA, 25 bp, Artificial
  probe
  misc_feature (1)..(25): SEQ ID NO: 7263; WAN024BS4_at; Start 19; Stop 43
actatgctaaagattctatcggttc

SEQ ID NO: 92124 - DNA, 25 bp, Artificial
  probe
  misc_feature (1)..(25): SEQ ID NO: 7263; WAN024BS4_at; Start 22; Stop 46
atgctaaagattctatcggttccta

SEQ ID NO: 92125 - DNA, 25 bp, Artificial
  probe
  misc_feature (1)..(25): SEQ ID NO: 7263; WAN024BS4_at; Start 9; Stop 33
taagactaatactatgctaaagatt

SEQ ID NO: 92126 - DNA, 25 bp, Artificial
  probe
  misc_feature (1)..(25): SEQ ID NO: 7263; WAN024BS4_at; Start 21; Stop 45
tatgctaaagattctatcggttcct

SEQ ID NO: 92127 - DNA, 25 bp, Artificial
  probe
  misc_feature (1)..(25): SEQ ID NO: 7263; WAN024BS4_at; Start 34; Stop 58
ctatcggttcctacaaatactccaa

SEQ ID NO: 92128 - DNA, 25 bp, Artificial
  probe
  misc_feature (1)..(25): SEQ ID NO: 7263; WAN024BS4_at; Start 20; Stop 44
ctatgctaaagattctatcggttcc

SEQ ID NO: 92129 - DNA, 25 bp, Artificial
  probe
  misc_feature (1)..(25): SEQ ID NO: 7263; WAN024BS4_at; Start 6; Stop 30
tcttaagactaatactatgctaaag

SEQ ID NO: 92130 - DNA, 25 bp, Artificial
  probe
  misc_feature (1)..(25): SEQ ID NO: 7263; WAN024BS4_at; Start 15; Stop 39
taatactatgctaaagattctatcg

SEQ ID NO: 92131 - DNA, 25 bp, Artificial
  probe
  misc_feature (1)..(25): SEQ ID NO: 7263; WAN024BS4_at; Start 28; Stop 52
aagattctatcggttcctacaaata

SEQ ID NO: 92132 - DNA, 25 bp, Artificial
  probe
  misc_feature (1)..(25): SEQ ID NO: 7263; WAN024BS4_at; Start 38; Stop 62
cggttcctacaaatactccaagatt

SEQ ID NO: 92133 - DNA, 25 bp, Artificial
  probe
  misc_feature (1)..(25): SEQ ID NO: 7263; WAN024BS4_at; Start 50; Stop 74
atactccaagattttactcccttgg

SEQ ID NO: 92134 - DNA, 25 bp, Artificial
  probe
  misc_feature (1)..(25): SEQ ID NO: 7263; WAN024BS4_at; Start 49; Stop 73
aatactccaagattttactcccttg

SEQ ID NO: 92135 - DNA, 25 bp, Artificial
  probe
  misc_feature (1)..(25): SEQ ID NO: 7263; WAN024BS4_at; Start 29; Stop 53
agattctatcggttcctacaaatac

SEQ ID NO: 92136 - DNA, 25 bp, Artificial
  probe
  misc_feature (1)..(25): SEQ ID NO: 7263; WAN024BS4_at; Start 3; Stop 27
gattcttaagactaatactatgcta

SEQ ID NO: 92137 - DNA, 25 bp, Artificial
  probe
  misc_feature (1)..(25): SEQ ID NO: 7263; WAN024BS4_at; Start 1; Stop 25
gtgattcttaagactaatactatgc

SEQ ID NO: 92138 - DNA, 25 bp, Artificial
  probe
  misc_feature (1)..(25): SEQ ID NO: 7263; WAN024BS4_at; Start 32; Stop 56
ttctatcggttcctacaaatactcc

SEQ ID NO: 92139 - DNA, 25 bp, Artificial
  probe
  misc_feature (1)..(25): SEQ ID NO: 7263; WAN024BS4_at; Start 37; Stop 61
tcggttcctacaaatactccaagat

SEQ ID NO: 92140 - DNA, 25 bp, Artificial
  probe
  misc_feature (1)..(25): SEQ ID NO: 7263; WAN024BS4_at; Start 18; Stop 42
tactatgctaaagattctatcggtt

SEQ ID NO: 92141 - DNA, 25 bp, Artificial
  probe
  misc_feature (1)..(25): SEQ ID NO: 7263; WAN024BS4_at; Start 33; Stop 57
tctatcggttcctacaaatactcca

SEQ ID NO: 92142 - DNA, 25 bp, Artificial
  probe
  misc_feature (1)..(25): SEQ ID NO: 7263; WAN024BS4_at; Start 47; Stop 71
caaatactccaagattttactccct

SEQ ID NO: 92143 - DNA, 25 bp, Artificial
  probe
  misc_feature (1)..(25): SEQ ID NO: 7263; WAN024BS4_at; Start 25; Stop 49
ctaaagattctatcggttcctacaa

SEQ ID NO: 92144 - DNA, 25 bp, Artificial
  probe
  misc_feature (1)..(25): SEQ ID NO: 7263; WAN024BS4_at; Start 12; Stop 36
gactaatactatgctaaagattcta

SEQ ID NO: 92145 - DNA, 25 bp, Artificial
  probe
  misc_feature (1)..(25): SEQ ID NO: 7263; WAN024BS4_at; Start 23; Stop 47
tgctaaagattctatcggttcctac

SEQ ID NO: 92146 - DNA, 25 bp, Artificial
  probe
  misc_feature (1)..(25): SEQ ID NO: 7263; WAN024BS4_at; Start 115; Stop 139
ttcgtacgattccgccaactaacta

SEQ ID NO: 92147 - DNA, 25 bp, Artificial
  probe
  misc_feature (1)..(25): SEQ ID NO: 7263; WAN024BS4_at; Start 42; Stop 66
tcctacaaatactccaagattttac

SEQ ID NO: 92148 - DNA, 25 bp, Artificial
  probe
  misc_feature (1)..(25): SEQ ID NO: 7263; WAN024BS4_at; Start 36; Stop 60
atcggttcctacaaatactccaaga

SEQ ID NO: 92149 - DNA, 25 bp, Artificial
  probe
  misc_feature (1)..(25): SEQ ID NO: 7263; WAN024BS4_at; Start 30; Stop 54
gattctatcggttcctacaaatact

SEQ ID NO: 92150 - DNA, 25 bp, Artificial
  probe
  misc_feature (1)..(25): SEQ ID NO: 7263; WAN024BS4_at; Start 35; Stop 59
tatcggttcctacaaatactccaag

SEQ ID NO: 92151 - DNA, 25 bp, Artificial
  probe
  misc_feature (1)..(25): SEQ ID NO: 7263; WAN024BS4_at; Start 26; Stop 50
taaagattctatcggttcctacaaa

SEQ ID NO: 92152 - DNA, 25 bp, Artificial
  probe
  misc_feature (1)..(25): SEQ ID NO: 7263; WAN024BS4_at; Start 117; Stop 141
cgtacgattccgccaactaactaat

SEQ ID NO: 92153 - DNA, 25 bp, Artificial
  probe
  misc_feature (1)..(25): SEQ ID NO: 7263; WAN024BS4_at; Start 24; Stop 48
gctaaagattctatcggttcctaca

SEQ ID NO: 92154 - DNA, 25 bp, Artificial
  probe
  misc_feature (1)..(25): SEQ ID NO: 7443; WAN024BS5_at; Start 12; Stop 36
gcaaccggtttgctcaagctatttg

SEQ ID NO: 92155 - DNA, 25 bp, Artificial
  probe
  misc_feature (1)..(25): SEQ ID NO: 7443; WAN024BS5_at; Start 34; Stop 58
ttggaaaagaaaatgtcgacctatc

SEQ ID NO: 92156 - DNA, 25 bp, Artificial
  probe
  misc_feature (1)..(25): SEQ ID NO: 7443; WAN024BS5_at; Start 4; Stop 28
acagttaggcaaccggtttgctcaa

SEQ ID NO: 92157 - DNA, 25 bp, Artificial
  probe
  misc_feature (1)..(25): SEQ ID NO: 7443; WAN024BS5_at; Start 14; Stop 38
aaccggtttgctcaagctatttgga

SEQ ID NO: 92158 - DNA, 25 bp, Artificial
  probe
  misc_feature (1)..(25): SEQ ID NO: 7443; WAN024BS5_at; Start 38; Stop 62
aaaagaaaatgtcgacctatcataa

SEQ ID NO: 92159 - DNA, 25 bp, Artificial
  probe
  misc_feature (1)..(25): SEQ ID NO: 7443; WAN024BS5_at; Start 15; Stop 39
accggtttgctcaagctatttggaa

SEQ ID NO: 92160 - DNA, 25 bp, Artificial
  probe
  misc_feature (1)..(25): SEQ ID NO: 7443; WAN024BS5_at; Start 9; Stop 33
taggcaaccggtttgctcaagctat

SEQ ID NO: 92161 - DNA, 25 bp, Artificial
  probe
  misc_feature (1)..(25): SEQ ID NO: 7443; WAN024BS5_at; Start 11; Stop 35
ggcaaccggtttgctcaagctattt

SEQ ID NO: 92162 - DNA, 25 bp, Artificial
  probe
  misc_feature (1)..(25): SEQ ID NO: 7443; WAN024BS5_at; Start 16; Stop 40
ccggtttgctcaagctatttggaaa

SEQ ID NO: 92163 - DNA, 25 bp, Artificial
  probe
  misc_feature (1)..(25): SEQ ID NO: 7443; WAN024BS5_at; Start 45; Stop 69
aatgtcgacctatcataaaaagaag

SEQ ID NO: 92164 - DNA, 25 bp, Artificial
  probe
  misc_feature (1)..(25): SEQ ID NO: 7443; WAN024BS5_at; Start 37; Stop 61
gaaaagaaaatgtcgacctatcata

SEQ ID NO: 92165 - DNA, 25 bp, Artificial
  probe
  misc_feature (1)..(25): SEQ ID NO: 7443; WAN024BS5_at; Start 35; Stop 59
tggaaaagaaaatgtcgacctatca

SEQ ID NO: 92166 - DNA, 25 bp, Artificial
  probe
  misc_feature (1)..(25): SEQ ID NO: 7443; WAN024BS5_at; Start 10; Stop 34
aggcaaccggtttgctcaagctatt

SEQ ID NO: 92167 - DNA, 25 bp, Artificial
  probe
  misc_feature (1)..(25): SEQ ID NO: 7443; WAN024BS5_at; Start 8; Stop 32
ttaggcaaccggtttgctcaagcta

SEQ ID NO: 92168 - DNA, 25 bp, Artificial
  probe
  misc_feature (1)..(25): SEQ ID NO: 7443; WAN024BS5_at; Start 43; Stop 67
aaaatgtcgacctatcataaaaaga

SEQ ID NO: 92169 - DNA, 25 bp, Artificial
  probe
  misc_feature (1)..(25): SEQ ID NO: 7443; WAN024BS5_at; Start 13; Stop 37
caaccggtttgctcaagctatttgg

SEQ ID NO: 92170 - DNA, 25 bp, Artificial
  probe
  misc_feature (1)..(25): SEQ ID NO: 7443; WAN024BS5_at; Start 24; Stop 48
ctcaagctatttggaaaagaaaatg

SEQ ID NO: 92171 - DNA, 25 bp, Artificial
  probe
  misc_feature (1)..(25): SEQ ID NO: 7443; WAN024BS5_at; Start 23; Stop 47
gctcaagctatttggaaaagaaaat

SEQ ID NO: 92172 - DNA, 25 bp, Artificial
  probe
  misc_feature (1)..(25): SEQ ID NO: 7443; WAN024BS5_at; Start 17; Stop 41
cggtttgctcaagctatttggaaaa

SEQ ID NO: 92173 - DNA, 25 bp, Artificial
  probe
  misc_feature (1)..(25): SEQ ID NO: 7443; WAN024BS5_at; Start 39; Stop 63
aaagaaaatgtcgacctatcataaa

SEQ ID NO: 92174 - DNA, 25 bp, Artificial
  probe
  misc_feature (1)..(25): SEQ ID NO: 7443; WAN024BS5_at; Start 19; Stop 43
gtttgctcaagctatttggaaaaga

SEQ ID NO: 92175 - DNA, 25 bp, Artificial
  probe
  misc_feature (1)..(25): SEQ ID NO: 7443; WAN024BS5_at; Start 7; Stop 31
gttaggcaaccggtttgctcaagct

SEQ ID NO: 92176 - DNA, 25 bp, Artificial
  probe
  misc_feature (1)..(25): SEQ ID NO: 7443; WAN024BS5_at; Start 26; Stop 50
caagctatttggaaaagaaaatgtc

SEQ ID NO: 92177 - DNA, 25 bp, Artificial
  probe
  misc_feature (1)..(25): SEQ ID NO: 7443; WAN024BS5_at; Start 42; Stop 66
gaaaatgtcgacctatcataaaaag

SEQ ID NO: 92178 - DNA, 25 bp, Artificial
  probe
  misc_feature (1)..(25): SEQ ID NO: 7443; WAN024BS5_at; Start 36; Stop 60
ggaaaagaaaatgtcgacctatcat

SEQ ID NO: 92179 - DNA, 25 bp, Artificial
  probe
  misc_feature (1)..(25): SEQ ID NO: 7443; WAN024BS5_at; Start 1; Stop 25
ttgacagttaggcaaccggtttgct

SEQ ID NO: 92180 - DNA, 25 bp, Artificial
  probe
  misc_feature (1)..(25): SEQ ID NO: 7443; WAN024BS5_at; Start 2; Stop 26
tgacagttaggcaaccggtttgctc

SEQ ID NO: 92181 - DNA, 25 bp, Artificial
  probe
  misc_feature (1)..(25): SEQ ID NO: 7443; WAN024BS5_at; Start 3; Stop 27
gacagttaggcaaccggtttgctca

SEQ ID NO: 92182 - DNA, 25 bp, Artificial
  probe
  misc_feature (1)..(25): SEQ ID NO: 7443; WAN024BS5_at; Start 22; Stop 46
tgctcaagctatttggaaaagaaaa

SEQ ID NO: 92183 - DNA, 25 bp, Artificial
  probe
  misc_feature (1)..(25): SEQ ID NO: 7443; WAN024BS5_at; Start 54; Stop 78
ctatcataaaaagaagtttttgttg

SEQ ID NO: 92184 - DNA, 25 bp, Artificial
  probe
  misc_feature (1)..(25): SEQ ID NO: 7443; WAN024BS5_at; Start 18; Stop 42
ggtttgctcaagctatttggaaaag

SEQ ID NO: 92185 - DNA, 25 bp, Artificial
  probe
  misc_feature (1)..(25): SEQ ID NO: 7443; WAN024BS5_at; Start 47; Stop 71
tgtcgacctatcataaaaagaagtt

SEQ ID NO: 92186 - DNA, 25 bp, Artificial
  probe
  misc_feature (1)..(25): SEQ ID NO: 7443; WAN024BS5_at; Start 29; Stop 53
gctatttggaaaagaaaatgtcgac

SEQ ID NO: 92187 - DNA, 25 bp, Artificial
  probe
  misc_feature (1)..(25): SEQ ID NO: 7443; WAN024BS5_at; Start 20; Stop 44
tttgctcaagctatttggaaaagaa

SEQ ID NO: 92188 - DNA, 25 bp, Artificial
  probe
  misc_feature (1)..(25): SEQ ID NO: 7320; WAN024BS6_at; Start 80; Stop 104
ctgttttctttgaacagaatgacaa

SEQ ID NO: 92189 - DNA, 25 bp, Artificial
  probe
  misc_feature (1)..(25): SEQ ID NO: 7320; WAN024BS6_at; Start 23; Stop 47
aagatgagaaagaagtcggtattat

SEQ ID NO: 92190 - DNA, 25 bp, Artificial
  probe
  misc_feature (1)..(25): SEQ ID NO: 7320; WAN024BS6_at; Start 27; Stop 51
tgagaaagaagtcggtattatagga

SEQ ID NO: 92191 - DNA, 25 bp, Artificial
  probe
  misc_feature (1)..(25): SEQ ID NO: 7320; WAN024BS6_at; Start 12; Stop 36
taaccaaaaccaagatgagaaagaa

SEQ ID NO: 92192 - DNA, 25 bp, Artificial
  probe
  misc_feature (1)..(25): SEQ ID NO: 7320; WAN024BS6_at; Start 11; Stop 35
ttaaccaaaaccaagatgagaaaga

SEQ ID NO: 92193 - DNA, 25 bp, Artificial
  probe
  misc_feature (1)..(25): SEQ ID NO: 7320; WAN024BS6_at; Start 26; Stop 50
atgagaaagaagtcggtattatagg

SEQ ID NO: 92194 - DNA, 25 bp, Artificial
  probe
  misc_feature (1)..(25): SEQ ID NO: 7320; WAN024BS6_at; Start 15; Stop 39
ccaaaaccaagatgagaaagaagtc

SEQ ID NO: 92195 - DNA, 25 bp, Artificial
  probe
  misc_feature (1)..(25): SEQ ID NO: 7320; WAN024BS6_at; Start 83; Stop 107
ttttctttgaacagaatgacaaaaa

SEQ ID NO: 92196 - DNA, 25 bp, Artificial
  probe
  misc_feature (1)..(25): SEQ ID NO: 7320; WAN024BS6_at; Start 7; Stop 31
ccagttaaccaaaaccaagatgaga

SEQ ID NO: 92197 - DNA, 25 bp, Artificial
  probe
  misc_feature (1)..(25): SEQ ID NO: 7320; WAN024BS6_at; Start 84; Stop 108
tttctttgaacagaatgacaaaaag

SEQ ID NO: 92198 - DNA, 25 bp, Artificial
  probe
  misc_feature (1)..(25): SEQ ID NO: 7320; WAN024BS6_at; Start 22; Stop 46
caagatgagaaagaagtcggtatta

SEQ ID NO: 92199 - DNA, 25 bp, Artificial
  probe
  misc_feature (1)..(25): SEQ ID NO: 7320; WAN024BS6_at; Start 73; Stop 97
aagtattctgttttctttgaacaga

SEQ ID NO: 92200 - DNA, 25 bp, Artificial
  probe
  misc_feature (1)..(25): SEQ ID NO: 7320; WAN024BS6_at; Start 19; Stop 43
aaccaagatgagaaagaagtcggta

SEQ ID NO: 92201 - DNA, 25 bp, Artificial
  probe
  misc_feature (1)..(25): SEQ ID NO: 7320; WAN024BS6_at; Start 24; Stop 48
agatgagaaagaagtcggtattata

SEQ ID NO: 92202 - DNA, 25 bp, Artificial
  probe
  misc_feature (1)..(25): SEQ ID NO: 7320; WAN024BS6_at; Start 5; Stop 29
ttccagttaaccaaaaccaagatga

SEQ ID NO: 92203 - DNA, 25 bp, Artificial
  probe
  misc_feature (1)..(25): SEQ ID NO: 7320; WAN024BS6_at; Start 79; Stop 103
tctgttttctttgaacagaatgaca

SEQ ID NO: 92204 - DNA, 25 bp, Artificial
  probe
  misc_feature (1)..(25): SEQ ID NO: 7320; WAN024BS6_at; Start 18; Stop 42
aaaccaagatgagaaagaagtcggt

SEQ ID NO: 92205 - DNA, 25 bp, Artificial
  probe
  misc_feature (1)..(25): SEQ ID NO: 7320; WAN024BS6_at; Start 20; Stop 44
accaagatgagaaagaagtcggtat

SEQ ID NO: 92206 - DNA, 25 bp, Artificial
  probe
  misc_feature (1)..(25): SEQ ID NO: 7320; WAN024BS6_at; Start 58; Stop 82
gaagtaaagattattaagtattctg

SEQ ID NO: 92207 - DNA, 25 bp, Artificial
  probe
  misc_feature (1)..(25): SEQ ID NO: 7320; WAN024BS6_at; Start 21; Stop 45
ccaagatgagaaagaagtcggtatt

SEQ ID NO: 92208 - DNA, 25 bp, Artificial
  probe
  misc_feature (1)..(25): SEQ ID NO: 7320; WAN024BS6_at; Start 59; Stop 83
aagtaaagattattaagtattctgt

SEQ ID NO: 92209 - DNA, 25 bp, Artificial
  probe
  misc_feature (1)..(25): SEQ ID NO: 7320; WAN024BS6_at; Start 25; Stop 49
gatgagaaagaagtcggtattatag

SEQ ID NO: 92210 - DNA, 25 bp, Artificial
  probe
  misc_feature (1)..(25): SEQ ID NO: 7320; WAN024BS6_at; Start 28; Stop 52
gagaaagaagtcggtattataggaa

SEQ ID NO: 92211 - DNA, 25 bp, Artificial
  probe
  misc_feature (1)..(25): SEQ ID NO: 7320; WAN024BS6_at; Start 82; Stop 106
gttttctttgaacagaatgacaaaa

SEQ ID NO: 92212 - DNA, 25 bp, Artificial
  probe
  misc_feature (1)..(25): SEQ ID NO: 7320; WAN024BS6_at; Start 78; Stop 102
ttctgttttctttgaacagaatgac

SEQ ID NO: 92213 - DNA, 25 bp, Artificial
  probe
  misc_feature (1)..(25): SEQ ID NO: 7320; WAN024BS6_at; Start 72; Stop 96
taagtattctgttttctttgaacag

SEQ ID NO: 92214 - DNA, 25 bp, Artificial
  probe
  misc_feature (1)..(25): SEQ ID NO: 7320; WAN024BS6_at; Start 17; Stop 41
aaaaccaagatgagaaagaagtcgg

SEQ ID NO: 92215 - DNA, 25 bp, Artificial
  probe
  misc_feature (1)..(25): SEQ ID NO: 7320; WAN024BS6_at; Start 8; Stop 32
cagttaaccaaaaccaagatgagaa

SEQ ID NO: 92216 - DNA, 25 bp, Artificial
  probe
  misc_feature (1)..(25): SEQ ID NO: 7320; WAN024BS6_at; Start 74; Stop 98
agtattctgttttctttgaacagaa

SEQ ID NO: 92217 - DNA, 25 bp, Artificial
  probe
  misc_feature (1)..(25): SEQ ID NO: 7320; WAN024BS6_at; Start 16; Stop 40
caaaaccaagatgagaaagaagtcg

SEQ ID NO: 92218 - DNA, 25 bp, Artificial
  probe
  misc_feature (1)..(25): SEQ ID NO: 7320; WAN024BS6_at; Start 13; Stop 37
aaccaaaaccaagatgagaaagaag

SEQ ID NO: 92219 - DNA, 25 bp, Artificial
  probe
  misc_feature (1)..(25): SEQ ID NO: 7320; WAN024BS6_at; Start 14; Stop 38
accaaaaccaagatgagaaagaagt

SEQ ID NO: 92220 - DNA, 25 bp, Artificial
  probe
  misc_feature (1)..(25): SEQ ID NO: 7320; WAN024BS6_at; Start 6; Stop 30
tccagttaaccaaaaccaagatgag

SEQ ID NO: 92221 - DNA, 25 bp, Artificial
  probe
  misc_feature (1)..(25): SEQ ID NO: 7320; WAN024BS6_at; Start 81; Stop 105
tgttttctttgaacagaatgacaaa

SEQ ID NO: 92222 - DNA, 25 bp, Artificial
  probe
  misc_feature (1)..(25): SEQ ID NO: 7645; WAN024BS7_at; Start 50; Stop 74
aaaatggctatggaactggaacgcg

SEQ ID NO: 92223 - DNA, 25 bp, Artificial
  probe
  misc_feature (1)..(25): SEQ ID NO: 7645; WAN024BS7_at; Start 29; Stop 53
caaggttgggaacatcatttgaaaa

SEQ ID NO: 92224 - DNA, 25 bp, Artificial
  probe
  misc_feature (1)..(25): SEQ ID NO: 7645; WAN024BS7_at; Start 34; Stop 58
ttgggaacatcatttgaaaatggct

SEQ ID NO: 92225 - DNA, 25 bp, Artificial
  probe
  misc_feature (1)..(25): SEQ ID NO: 7645; WAN024BS7_at; Start 46; Stop 70
tttgaaaatggctatggaactggaa

SEQ ID NO: 92226 - DNA, 25 bp, Artificial
  probe
  misc_feature (1)..(25): SEQ ID NO: 7645; WAN024BS7_at; Start 54; Stop 78
tggctatggaactggaacgcgaact

SEQ ID NO: 92227 - DNA, 25 bp, Artificial
  probe
  misc_feature (1)..(25): SEQ ID NO: 7645; WAN024BS7_at; Start 60; Stop 84
tggaactggaacgcgaactccactt

SEQ ID NO: 92228 - DNA, 25 bp, Artificial
  probe
  misc_feature (1)..(25): SEQ ID NO: 7645; WAN024BS7_at; Start 6; Stop 30
tattggtgtagaaaaccgaagaaca

SEQ ID NO: 92229 - DNA, 25 bp, Artificial
  probe
  misc_feature (1)..(25): SEQ ID NO: 7645; WAN024BS7_at; Start 48; Stop 72
tgaaaatggctatggaactggaacg

SEQ ID NO: 92230 - DNA, 25 bp, Artificial
  probe
  misc_feature (1)..(25): SEQ ID NO: 7645; WAN024BS7_at; Start 55; Stop 79
ggctatggaactggaacgcgaactc

SEQ ID NO: 92231 - DNA, 25 bp, Artificial
  probe
  misc_feature (1)..(25): SEQ ID NO: 7645; WAN024BS7_at; Start 57; Stop 81
ctatggaactggaacgcgaactcca

SEQ ID NO: 92232 - DNA, 25 bp, Artificial
  probe
  misc_feature (1)..(25): SEQ ID NO: 7645; WAN024BS7_at; Start 26; Stop 50
gaacaaggttgggaacatcatttga

SEQ ID NO: 92233 - DNA, 25 bp, Artificial
  probe
  misc_feature (1)..(25): SEQ ID NO: 7645; WAN024BS7_at; Start 58; Stop 82
tatggaactggaacgcgaactccac

SEQ ID NO: 92234 - DNA, 25 bp, Artificial
  probe
  misc_feature (1)..(25): SEQ ID NO: 7645; WAN024BS7_at; Start 28; Stop 52
acaaggttgggaacatcatttgaaa

SEQ ID NO: 92235 - DNA, 25 bp, Artificial
  probe
  misc_feature (1)..(25): SEQ ID NO: 7645; WAN024BS7_at; Start 33; Stop 57
gttgggaacatcatttgaaaatggc

SEQ ID NO: 92236 - DNA, 25 bp, Artificial
  probe
  misc_feature (1)..(25): SEQ ID NO: 7645; WAN024BS7_at; Start 22; Stop 46
cgaagaacaaggttgggaacatcat

SEQ ID NO: 92237 - DNA, 25 bp, Artificial
  probe
  misc_feature (1)..(25): SEQ ID NO: 7645; WAN024BS7_at; Start 47; Stop 71
ttgaaaatggctatggaactggaac

SEQ ID NO: 92238 - DNA, 25 bp, Artificial
  probe
  misc_feature (1)..(25): SEQ ID NO: 7645; WAN024BS7_at; Start 24; Stop 48
aagaacaaggttgggaacatcattt

SEQ ID NO: 92239 - DNA, 25 bp, Artificial
  probe
  misc_feature (1)..(25): SEQ ID NO: 7645; WAN024BS7_at; Start 51; Stop 75
aaatggctatggaactggaacgcga

SEQ ID NO: 92240 - DNA, 25 bp, Artificial
  probe
  misc_feature (1)..(25): SEQ ID NO: 7645; WAN024BS7_at; Start 37; Stop 61
ggaacatcatttgaaaatggctatg

SEQ ID NO: 92241 - DNA, 25 bp, Artificial
  probe
  misc_feature (1)..(25): SEQ ID NO: 7645; WAN024BS7_at; Start 45; Stop 69
atttgaaaatggctatggaactgga

SEQ ID NO: 92242 - DNA, 25 bp, Artificial
  probe
  misc_feature (1)..(25): SEQ ID NO: 7645; WAN024BS7_at; Start 23; Stop 47
gaagaacaaggttgggaacatcatt

SEQ ID NO: 92243 - DNA, 25 bp, Artificial
  probe
  misc_feature (1)..(25): SEQ ID NO: 7645; WAN024BS7_at; Start 49; Stop 73
gaaaatggctatggaactggaacgc

SEQ ID NO: 92244 - DNA, 25 bp, Artificial
  probe
  misc_feature (1)..(25): SEQ ID NO: 7645; WAN024BS7_at; Start 21; Stop 45
ccgaagaacaaggttgggaacatca

SEQ ID NO: 92245 - DNA, 25 bp, Artificial
  probe
  misc_feature (1)..(25): SEQ ID NO: 7645; WAN024BS7_at; Start 35; Stop 59
tgggaacatcatttgaaaatggcta

SEQ ID NO: 92246 - DNA, 25 bp, Artificial
  probe
  misc_feature (1)..(25): SEQ ID NO: 7645; WAN024BS7_at; Start 53; Stop 77
atggctatggaactggaacgcgaac

SEQ ID NO: 92247 - DNA, 25 bp, Artificial
  probe
  misc_feature (1)..(25): SEQ ID NO: 7645; WAN024BS7_at; Start 59; Stop 83
atggaactggaacgcgaactccact

SEQ ID NO: 92248 - DNA, 25 bp, Artificial
  probe
  misc_feature (1)..(25): SEQ ID NO: 7645; WAN024BS7_at; Start 52; Stop 76
aatggctatggaactggaacgcgaa

SEQ ID NO: 92249 - DNA, 25 bp, Artificial
  probe
  misc_feature (1)..(25): SEQ ID NO: 7645; WAN024BS7_at; Start 27; Stop 51
aacaaggttgggaacatcatttgaa

SEQ ID NO: 92250 - DNA, 25 bp, Artificial
  probe
  misc_feature (1)..(25): SEQ ID NO: 7645; WAN024BS7_at; Start 43; Stop 67
tcatttgaaaatggctatggaactg

SEQ ID NO: 92251 - DNA, 25 bp, Artificial
  probe
  misc_feature (1)..(25): SEQ ID NO: 7645; WAN024BS7_at; Start 32; Stop 56
ggttgggaacatcatttgaaaatgg

SEQ ID NO: 92252 - DNA, 25 bp, Artificial
  probe
  misc_feature (1)..(25): SEQ ID NO: 7645; WAN024BS7_at; Start 30; Stop 54
aaggttgggaacatcatttgaaaat

SEQ ID NO: 92253 - DNA, 25 bp, Artificial
  probe
  misc_feature (1)..(25): SEQ ID NO: 7645; WAN024BS7_at; Start 41; Stop 65
catcatttgaaaatggctatggaac

SEQ ID NO: 92254 - DNA, 25 bp, Artificial
  probe
  misc_feature (1)..(25): SEQ ID NO: 7645; WAN024BS7_at; Start 56; Stop 80
gctatggaactggaacgcgaactcc

SEQ ID NO: 92255 - DNA, 25 bp, Artificial
  probe
  misc_feature (1)..(25): SEQ ID NO: 7645; WAN024BS7_at; Start 38; Stop 62
gaacatcatttgaaaatggctatgg

SEQ ID NO: 92256 - DNA, 25 bp, Artificial
  probe
  misc_feature (1)..(25): SEQ ID NO: 7149; WAN024BS8_at; Start 62; Stop 86
tggactctataaccgtctgccgggt

SEQ ID NO: 92257 - DNA, 25 bp, Artificial
  probe
  misc_feature (1)..(25): SEQ ID NO: 7149; WAN024BS8_at; Start 93; Stop 117
cctggacagagagcttaatttaggt

SEQ ID NO: 92258 - DNA, 25 bp, Artificial
  probe
  misc_feature (1)..(25): SEQ ID NO: 7149; WAN024BS8_at; Start 85; Stop 109
gttagttccctggacagagagctta

SEQ ID NO: 92259 - DNA, 25 bp, Artificial
  probe
  misc_feature (1)..(25): SEQ ID NO: 7149; WAN024BS8_at; Start 103; Stop 127
gagcttaatttaggtcacactatcc

SEQ ID NO: 92260 - DNA, 25 bp, Artificial
  probe
  misc_feature (1)..(25): SEQ ID NO: 7149; WAN024BS8_at; Start 45; Stop 69
caatgtggtgaacggactggactct

SEQ ID NO: 92261 - DNA, 25 bp, Artificial
  probe
  misc_feature (1)..(25): SEQ ID NO: 7149; WAN024BS8_at; Start 37; Stop 61
caagtttccaatgtggtgaacggac

SEQ ID NO: 92262 - DNA, 25 bp, Artificial
  probe
  misc_feature (1)..(25): SEQ ID NO: 7149; WAN024BS8_at; Start 44; Stop 68
ccaatgtggtgaacggactggactc

SEQ ID NO: 92263 - DNA, 25 bp, Artificial
  probe
  misc_feature (1)..(25): SEQ ID NO: 7149; WAN024BS8_at; Start 1; Stop 25
ctgggtcttggagaaccagttttag

SEQ ID NO: 92264 - DNA, 25 bp, Artificial
  probe
  misc_feature (1)..(25): SEQ ID NO: 7149; WAN024BS8_at; Start 83; Stop 107
gggttagttccctggacagagagct

SEQ ID NO: 92265 - DNA, 25 bp, Artificial
  probe
  misc_feature (1)..(25): SEQ ID NO: 7149; WAN024BS8_at; Start 76; Stop 100
gtctgccgggttagttccctggaca

SEQ ID NO: 92266 - DNA, 25 bp, Artificial
  probe
  misc_feature (1)..(25): SEQ ID NO: 7149; WAN024BS8_at; Start 59; Stop 83
gactggactctataaccgtctgccg

SEQ ID NO: 92267 - DNA, 25 bp, Artificial
  probe
  misc_feature (1)..(25): SEQ ID NO: 7149; WAN024BS8_at; Start 35; Stop 59
aacaagtttccaatgtggtgaacgg

SEQ ID NO: 92268 - DNA, 25 bp, Artificial
  probe
  misc_feature (1)..(25): SEQ ID NO: 7149; WAN024BS8_at; Start 57; Stop 81
cggactggactctataaccgtctgc

SEQ ID NO: 92269 - DNA, 25 bp, Artificial
  probe
  misc_feature (1)..(25): SEQ ID NO: 7149; WAN024BS8_at; Start 101; Stop 125
gagagcttaatttaggtcacactat

SEQ ID NO: 92270 - DNA, 25 bp, Artificial
  probe
  misc_feature (1)..(25): SEQ ID NO: 7149; WAN024BS8_at; Start 108; Stop 132
taatttaggtcacactatcccactg

SEQ ID NO: 92271 - DNA, 25 bp, Artificial
  probe
  misc_feature (1)..(25): SEQ ID NO: 7149; WAN024BS8_at; Start 97; Stop 121
gacagagagcttaatttaggtcaca

SEQ ID NO: 92272 - DNA, 25 bp, Artificial
  probe
  misc_feature (1)..(25): SEQ ID NO: 7149; WAN024BS8_at; Start 40; Stop 64
gtttccaatgtggtgaacggactgg

SEQ ID NO: 92273 - DNA, 25 bp, Artificial
  probe
  misc_feature (1)..(25): SEQ ID NO: 7149; WAN024BS8_at; Start 87; Stop 111
tagttccctggacagagagcttaat

SEQ ID NO: 92274 - DNA, 25 bp, Artificial
  probe
  misc_feature (1)..(25): SEQ ID NO: 7149; WAN024BS8_at; Start 105; Stop 129
gcttaatttaggtcacactatccca

SEQ ID NO: 92275 - DNA, 25 bp, Artificial
  probe
  misc_feature (1)..(25): SEQ ID NO: 7149; WAN024BS8_at; Start 99; Stop 123
cagagagcttaatttaggtcacact

SEQ ID NO: 92276 - DNA, 25 bp, Artificial
  probe
  misc_feature (1)..(25): SEQ ID NO: 7149; WAN024BS8_at; Start 31; Stop 55
cttaaacaagtttccaatgtggtga

SEQ ID NO: 92277 - DNA, 25 bp, Artificial
  probe
  misc_feature (1)..(25): SEQ ID NO: 7149; WAN024BS8_at; Start 64; Stop 88
gactctataaccgtctgccgggtta

SEQ ID NO: 92278 - DNA, 25 bp, Artificial
  probe
  misc_feature (1)..(25): SEQ ID NO: 7149; WAN024BS8_at; Start 42; Stop 66
ttccaatgtggtgaacggactggac

SEQ ID NO: 92279 - DNA, 25 bp, Artificial
  probe
  misc_feature (1)..(25): SEQ ID NO: 7149; WAN024BS8_at; Start 54; Stop 78
gaacggactggactctataaccgtc

SEQ ID NO: 92280 - DNA, 25 bp, Artificial
  probe
  misc_feature (1)..(25): SEQ ID NO: 7149; WAN024BS8_at; Start 48; Stop 72
tgtggtgaacggactggactctata

SEQ ID NO: 92281 - DNA, 25 bp, Artificial
  probe
  misc_feature (1)..(25): SEQ ID NO: 7149; WAN024BS8_at; Start 79; Stop 103
tgccgggttagttccctggacagag

SEQ ID NO: 92282 - DNA, 25 bp, Artificial
  probe
  misc_feature (1)..(25): SEQ ID NO: 7149; WAN024BS8_at; Start 52; Stop 76
gtgaacggactggactctataaccg

SEQ ID NO: 92283 - DNA, 25 bp, Artificial
  probe
  misc_feature (1)..(25): SEQ ID NO: 7149; WAN024BS8_at; Start 66; Stop 90
ctctataaccgtctgccgggttagt

SEQ ID NO: 92284 - DNA, 25 bp, Artificial
  probe
  misc_feature (1)..(25): SEQ ID NO: 7149; WAN024BS8_at; Start 33; Stop 57
taaacaagtttccaatgtggtgaac

SEQ ID NO: 92285 - DNA, 25 bp, Artificial
  probe
  misc_feature (1)..(25): SEQ ID NO: 7149; WAN024BS8_at; Start 120; Stop 144
cactatcccactgacccgtaggctt

SEQ ID NO: 92286 - DNA, 25 bp, Artificial
  probe
  misc_feature (1)..(25): SEQ ID NO: 7149; WAN024BS8_at; Start 111; Stop 135
tttaggtcacactatcccactgacc

SEQ ID NO: 92287 - DNA, 25 bp, Artificial
  probe
  misc_feature (1)..(25): SEQ ID NO: 7149; WAN024BS8_at; Start 28; Stop 52
agtcttaaacaagtttccaatgtgg

SEQ ID NO: 92288 - DNA, 25 bp, Artificial
  probe
  misc_feature (1)..(25): SEQ ID NO: 7149; WAN024BS8_at; Start 50; Stop 74
tggtgaacggactggactctataac

SEQ ID NO: 92289 - DNA, 25 bp, Artificial
  probe
  misc_feature (1)..(25): SEQ ID NO: 7149; WAN024BS8_at; Start 91; Stop 115
tccctggacagagagcttaatttag

SEQ ID NO: 92290 - DNA, 25 bp, Artificial
  probe
  misc_feature (1)..(25): SEQ ID NO: 7169; WAN024BS9_at; Start 33; Stop 57
gatggatgtctctgacaaataccag

SEQ ID NO: 92291 - DNA, 25 bp, Artificial
  probe
  misc_feature (1)..(25): SEQ ID NO: 7169; WAN024BS9_at; Start 37; Stop 61
gatgtctctgacaaataccagaaaa

SEQ ID NO: 92292 - DNA, 25 bp, Artificial
  probe
  misc_feature (1)..(25): SEQ ID NO: 7169; WAN024BS9_at; Start 35; Stop 59
tggatgtctctgacaaataccagaa

SEQ ID NO: 92293 - DNA, 25 bp, Artificial
  probe
  misc_feature (1)..(25): SEQ ID NO: 7169; WAN024BS9_at; Start 21; Stop 45
cctcgacagcaagatggatgtctct

SEQ ID NO: 92294 - DNA, 25 bp, Artificial
  probe
  misc_feature (1)..(25): SEQ ID NO: 7169; WAN024BS9_at; Start 111; Stop 135
gcagcaggatctctattccgtgagt

SEQ ID NO: 92295 - DNA, 25 bp, Artificial
  probe
  misc_feature (1)..(25): SEQ ID NO: 7169; WAN024BS9_at; Start 88; Stop 112
aactggtacaaatggttgagtttgc

SEQ ID NO: 92296 - DNA, 25 bp, Artificial
  probe
  misc_feature (1)..(25): SEQ ID NO: 7169; WAN024BS9_at; Start 69; Stop 93
cggaatctactttttcgtcaactgg

SEQ ID NO: 92297 - DNA, 25 bp, Artificial
  probe
  misc_feature (1)..(25): SEQ ID NO: 7169; WAN024BS9_at; Start 108; Stop 132
tttgcagcaggatctctattccgtg

SEQ ID NO: 92298 - DNA, 25 bp, Artificial
  probe
  misc_feature (1)..(25): SEQ ID NO: 7169; WAN024BS9_at; Start 99; Stop 123
atggttgagtttgcagcaggatctc

SEQ ID NO: 92299 - DNA, 25 bp, Artificial
  probe
  misc_feature (1)..(25): SEQ ID NO: 7169; WAN024BS9_at; Start 2; Stop 26
tgttctcaaccttttcccacctcga

SEQ ID NO: 92300 - DNA, 25 bp, Artificial
  probe
  misc_feature (1)..(25): SEQ ID NO: 7169; WAN024BS9_at; Start 94; Stop 118
tacaaatggttgagtttgcagcagg

SEQ ID NO: 92301 - DNA, 25 bp, Artificial
  probe
  misc_feature (1)..(25): SEQ ID NO: 7169; WAN024BS9_at; Start 110; Stop 134
tgcagcaggatctctattccgtgag

SEQ ID NO: 92302 - DNA, 25 bp, Artificial
  probe
  misc_feature (1)..(25): SEQ ID NO: 7169; WAN024BS9_at; Start 71; Stop 95
gaatctactttttcgtcaactggta

SEQ ID NO: 92303 - DNA, 25 bp, Artificial
  probe
  misc_feature (1)..(25): SEQ ID NO: 7169; WAN024BS9_at; Start 91; Stop 115
tggtacaaatggttgagtttgcagc

SEQ ID NO: 92304 - DNA, 25 bp, Artificial
  probe
  misc_feature (1)..(25): SEQ ID NO: 7169; WAN024BS9_at; Start 74; Stop 98
tctactttttcgtcaactggtacaa

SEQ ID NO: 92305 - DNA, 25 bp, Artificial
  probe
  misc_feature (1)..(25): SEQ ID NO: 7169; WAN024BS9_at; Start 17; Stop 41
cccacctcgacagcaagatggatgt

SEQ ID NO: 92306 - DNA, 25 bp, Artificial
  probe
  misc_feature (1)..(25): SEQ ID NO: 7169; WAN024BS9_at; Start 16; Stop 40
tcccacctcgacagcaagatggatg

SEQ ID NO: 92307 - DNA, 25 bp, Artificial
  probe
  misc_feature (1)..(25): SEQ ID NO: 7169; WAN024BS9_at; Start 27; Stop 51
cagcaagatggatgtctctgacaaa

SEQ ID NO: 92308 - DNA, 25 bp, Artificial
  probe
  misc_feature (1)..(25): SEQ ID NO: 7169; WAN024BS9_at; Start 78; Stop 102
ctttttcgtcaactggtacaaatgg

SEQ ID NO: 92309 - DNA, 25 bp, Artificial
  probe
  misc_feature (1)..(25): SEQ ID NO: 7169; WAN024BS9_at; Start 84; Stop 108
cgtcaactggtacaaatggttgagt

SEQ ID NO: 92310 - DNA, 25 bp, Artificial
  probe
  misc_feature (1)..(25): SEQ ID NO: 7169; WAN024BS9_at; Start 96; Stop 120
caaatggttgagtttgcagcaggat

SEQ ID NO: 92311 - DNA, 25 bp, Artificial
  probe
  misc_feature (1)..(25): SEQ ID NO: 7169; WAN024BS9_at; Start 105; Stop 129
gagtttgcagcaggatctctattcc

SEQ ID NO: 92312 - DNA, 25 bp, Artificial
  probe
  misc_feature (1)..(25): SEQ ID NO: 7169; WAN024BS9_at; Start 13; Stop 37
ttttcccacctcgacagcaagatgg

SEQ ID NO: 92313 - DNA, 25 bp, Artificial
  probe
  misc_feature (1)..(25): SEQ ID NO: 7169; WAN024BS9_at; Start 106; Stop 130
agtttgcagcaggatctctattccg

SEQ ID NO: 92314 - DNA, 25 bp, Artificial
  probe
  misc_feature (1)..(25): SEQ ID NO: 7169; WAN024BS9_at; Start 41; Stop 65
tctctgacaaataccagaaaaaagg

SEQ ID NO: 92315 - DNA, 25 bp, Artificial
  probe
  misc_feature (1)..(25): SEQ ID NO: 7169; WAN024BS9_at; Start 14; Stop 38
tttcccacctcgacagcaagatgga

SEQ ID NO: 92316 - DNA, 25 bp, Artificial
  probe
  misc_feature (1)..(25): SEQ ID NO: 7169; WAN024BS9_at; Start 81; Stop 105
tttcgtcaactggtacaaatggttg

SEQ ID NO: 92317 - DNA, 25 bp, Artificial
  probe
  misc_feature (1)..(25): SEQ ID NO: 7169; WAN024BS9_at; Start 101; Stop 125
ggttgagtttgcagcaggatctcta

SEQ ID NO: 92318 - DNA, 25 bp, Artificial
  probe
  misc_feature (1)..(25): SEQ ID NO: 7169; WAN024BS9_at; Start 97; Stop 121
aaatggttgagtttgcagcaggatc

SEQ ID NO: 92319 - DNA, 25 bp, Artificial
  probe
  misc_feature (1)..(25): SEQ ID NO: 7169; WAN024BS9_at; Start 42; Stop 66
ctctgacaaataccagaaaaaaggt

SEQ ID NO: 92320 - DNA, 25 bp, Artificial
  probe
  misc_feature (1)..(25): SEQ ID NO: 7169; WAN024BS9_at; Start 25; Stop 49
gacagcaagatggatgtctctgaca

SEQ ID NO: 92321 - DNA, 25 bp, Artificial
  probe
  misc_feature (1)..(25): SEQ ID NO: 7169; WAN024BS9_at; Start 30; Stop 54
caagatggatgtctctgacaaatac

SEQ ID NO: 92322 - DNA, 25 bp, Artificial
  probe
  misc_feature (1)..(25): SEQ ID NO: 7169; WAN024BS9_at; Start 23; Stop 47
tcgacagcaagatggatgtctctga

SEQ ID NO: 92323 - DNA, 25 bp, Artificial
  probe
  misc_feature (1)..(25): SEQ ID NO: 7169; WAN024BS9_at; Start 19; Stop 43
cacctcgacagcaagatggatgtct

SEQ ID NO: 92324 - DNA, 25 bp, Artificial
  probe
  misc_feature (1)..(25): SEQ ID NO: 7130; WAN024BSA_at; Start 45; Stop 69
ggatcttttgggtgtggactatatt

SEQ ID NO: 92325 - DNA, 25 bp, Artificial
  probe
  misc_feature (1)..(25): SEQ ID NO: 7130; WAN024BSA_at; Start 42; Stop 66
cgcggatcttttgggtgtggactat

SEQ ID NO: 92326 - DNA, 25 bp, Artificial
  probe
  misc_feature (1)..(25): SEQ ID NO: 7130; WAN024BSA_at; Start 1; Stop 25
ctggacattaaaagaaaaatagaca

SEQ ID NO: 92327 - DNA, 25 bp, Artificial
  probe
  misc_feature (1)..(25): SEQ ID NO: 7130; WAN024BSA_at; Start 20; Stop 44
tagacattattcttagcaaggtcgc

SEQ ID NO: 92328 - DNA, 25 bp, Artificial
  probe
  misc_feature (1)..(25): SEQ ID NO: 7130; WAN024BSA_at; Start 56; Stop 80
gtgtggactatattgaactcgagga

SEQ ID NO: 92329 - DNA, 25 bp, Artificial
  probe
  misc_feature (1)..(25): SEQ ID NO: 7130; WAN024BSA_at; Start 53; Stop 77
tgggtgtggactatattgaactcga

SEQ ID NO: 92330 - DNA, 25 bp, Artificial
  probe
  misc_feature (1)..(25): SEQ ID NO: 7130; WAN024BSA_at; Start 29; Stop 53
ttcttagcaaggtcgcggatctttt

SEQ ID NO: 92331 - DNA, 25 bp, Artificial
  probe
  misc_feature (1)..(25): SEQ ID NO: 7130; WAN024BSA_at; Start 2; Stop 26
tggacattaaaagaaaaatagacat

SEQ ID NO: 92332 - DNA, 25 bp, Artificial
  probe
  misc_feature (1)..(25): SEQ ID NO: 7130; WAN024BSA_at; Start 28; Stop 52
attcttagcaaggtcgcggatcttt

SEQ ID NO: 92333 - DNA, 25 bp, Artificial
  probe
  misc_feature (1)..(25): SEQ ID NO: 7130; WAN024BSA_at; Start 19; Stop 43
atagacattattcttagcaaggtcg

SEQ ID NO: 92334 - DNA, 25 bp, Artificial
  probe
  misc_feature (1)..(25): SEQ ID NO: 7130; WAN024BSA_at; Start 46; Stop 70
gatcttttgggtgtggactatattg

SEQ ID NO: 92335 - DNA, 25 bp, Artificial
  probe
  misc_feature (1)..(25): SEQ ID NO: 7130; WAN024BSA_at; Start 49; Stop 73
cttttgggtgtggactatattgaac

SEQ ID NO: 92336 - DNA, 25 bp, Artificial
  probe
  misc_feature (1)..(25): SEQ ID NO: 7130; WAN024BSA_at; Start 25; Stop 49
attattcttagcaaggtcgcggatc

SEQ ID NO: 92337 - DNA, 25 bp, Artificial
  probe
  misc_feature (1)..(25): SEQ ID NO: 7130; WAN024BSA_at; Start 18; Stop 42
aatagacattattcttagcaaggtc

SEQ ID NO: 92338 - DNA, 25 bp, Artificial
  probe
  misc_feature (1)..(25): SEQ ID NO: 7130; WAN024BSA_at; Start 33; Stop 57
tagcaaggtcgcggatcttttgggt

SEQ ID NO: 92339 - DNA, 25 bp, Artificial
  probe
  misc_feature (1)..(25): SEQ ID NO: 7130; WAN024BSA_at; Start 50; Stop 74
ttttgggtgtggactatattgaact

SEQ ID NO: 92340 - DNA, 25 bp, Artificial
  probe
  misc_feature (1)..(25): SEQ ID NO: 7130; WAN024BSA_at; Start 54; Stop 78
gggtgtggactatattgaactcgag

SEQ ID NO: 92341 - DNA, 25 bp, Artificial
  probe
  misc_feature (1)..(25): SEQ ID NO: 7130; WAN024BSA_at; Start 17; Stop 41
aaatagacattattcttagcaaggt

SEQ ID NO: 92342 - DNA, 25 bp, Artificial
  probe
  misc_feature (1)..(25): SEQ ID NO: 7130; WAN024BSA_at; Start 24; Stop 48
cattattcttagcaaggtcgcggat

SEQ ID NO: 92343 - DNA, 25 bp, Artificial
  probe
  misc_feature (1)..(25): SEQ ID NO: 7130; WAN024BSA_at; Start 57; Stop 81
tgtggactatattgaactcgaggat

SEQ ID NO: 92344 - DNA, 25 bp, Artificial
  probe
  misc_feature (1)..(25): SEQ ID NO: 7130; WAN024BSA_at; Start 51; Stop 75
tttgggtgtggactatattgaactc

SEQ ID NO: 92345 - DNA, 25 bp, Artificial
  probe
  misc_feature (1)..(25): SEQ ID NO: 7130; WAN024BSA_at; Start 16; Stop 40
aaaatagacattattcttagcaagg

SEQ ID NO: 92346 - DNA, 25 bp, Artificial
  probe
  misc_feature (1)..(25): SEQ ID NO: 7130; WAN024BSA_at; Start 27; Stop 51
tattcttagcaaggtcgcggatctt

SEQ ID NO: 92347 - DNA, 25 bp, Artificial
  probe
  misc_feature (1)..(25): SEQ ID NO: 7130; WAN024BSA_at; Start 41; Stop 65
tcgcggatcttttgggtgtggacta

SEQ ID NO: 92348 - DNA, 25 bp, Artificial
  probe
  misc_feature (1)..(25): SEQ ID NO: 7130; WAN024BSA_at; Start 22; Stop 46
gacattattcttagcaaggtcgcgg

SEQ ID NO: 92349 - DNA, 25 bp, Artificial
  probe
  misc_feature (1)..(25): SEQ ID NO: 7130; WAN024BSA_at; Start 23; Stop 47
acattattcttagcaaggtcgcgga

SEQ ID NO: 92350 - DNA, 25 bp, Artificial
  probe
  misc_feature (1)..(25): SEQ ID NO: 7130; WAN024BSA_at; Start 26; Stop 50
ttattcttagcaaggtcgcggatct

SEQ ID NO: 92351 - DNA, 25 bp, Artificial
  probe
  misc_feature (1)..(25): SEQ ID NO: 7130; WAN024BSA_at; Start 48; Stop 72
tcttttgggtgtggactatattgaa

SEQ ID NO: 92352 - DNA, 25 bp, Artificial
  probe
  misc_feature (1)..(25): SEQ ID NO: 7130; WAN024BSA_at; Start 21; Stop 45
agacattattcttagcaaggtcgcg

SEQ ID NO: 92353 - DNA, 25 bp, Artificial
  probe
  misc_feature (1)..(25): SEQ ID NO: 7130; WAN024BSA_at; Start 30; Stop 54
tcttagcaaggtcgcggatcttttg

SEQ ID NO: 92354 - DNA, 25 bp, Artificial
  probe
  misc_feature (1)..(25): SEQ ID NO: 7130; WAN024BSA_at; Start 31; Stop 55
cttagcaaggtcgcggatcttttgg

SEQ ID NO: 92355 - DNA, 25 bp, Artificial
  probe
  misc_feature (1)..(25): SEQ ID NO: 7130; WAN024BSA_at; Start 44; Stop 68
cggatcttttgggtgtggactatat

SEQ ID NO: 92356 - DNA, 25 bp, Artificial
  probe
  misc_feature (1)..(25): SEQ ID NO: 7130; WAN024BSA_at; Start 55; Stop 79
ggtgtggactatattgaactcgagg

SEQ ID NO: 92357 - DNA, 25 bp, Artificial
  probe
  misc_feature (1)..(25): SEQ ID NO: 7130; WAN024BSA_at; Start 52; Stop 76
ttgggtgtggactatattgaactcg

SEQ ID NO: 92358 - DNA, 25 bp, Artificial
  probe
  misc_feature (1)..(25): SEQ ID NO: 7652; WAN024BSB_at; Start 9; Stop 33
agagctactcgtgagtctgatcgga

SEQ ID NO: 92359 - DNA, 25 bp, Artificial
  probe
  misc_feature (1)..(25): SEQ ID NO: 7652; WAN024BSB_at; Start 20; Stop 44
tgagtctgatcggagacgttgaaga

SEQ ID NO: 92360 - DNA, 25 bp, Artificial
  probe
  misc_feature (1)..(25): SEQ ID NO: 7652; WAN024BSB_at; Start 54; Stop 78
tcaagacataaaagaaaatgtaagt

SEQ ID NO: 92361 - DNA, 25 bp, Artificial
  probe
  misc_feature (1)..(25): SEQ ID NO: 7652; WAN024BSB_at; Start 25; Stop 49
ctgatcggagacgttgaagagcttt

SEQ ID NO: 92362 - DNA, 25 bp, Artificial
  probe
  misc_feature (1)..(25): SEQ ID NO: 7652; WAN024BSB_at; Start 45; Stop 69
gctttttgttcaagacataaaagaa

SEQ ID NO: 92363 - DNA, 25 bp, Artificial
  probe
  misc_feature (1)..(25): SEQ ID NO: 7652; WAN024BSB_at; Start 15; Stop 39
actcgtgagtctgatcggagacgtt

SEQ ID NO: 92364 - DNA, 25 bp, Artificial
  probe
  misc_feature (1)..(25): SEQ ID NO: 7652; WAN024BSB_at; Start 2; Stop 26
tggtgagagagctactcgtgagtct

SEQ ID NO: 92365 - DNA, 25 bp, Artificial
  probe
  misc_feature (1)..(25): SEQ ID NO: 7652; WAN024BSB_at; Start 17; Stop 41
tcgtgagtctgatcggagacgttga

SEQ ID NO: 92366 - DNA, 25 bp, Artificial
  probe
  misc_feature (1)..(25): SEQ ID NO: 7652; WAN024BSB_at; Start 41; Stop 65
aagagctttttgttcaagacataaa

SEQ ID NO: 92367 - DNA, 25 bp, Artificial
  probe
  misc_feature (1)..(25): SEQ ID NO: 7652; WAN024BSB_at; Start 16; Stop 40
ctcgtgagtctgatcggagacgttg

SEQ ID NO: 92368 - DNA, 25 bp, Artificial
  probe
  misc_feature (1)..(25): SEQ ID NO: 7652; WAN024BSB_at; Start 13; Stop 37
ctactcgtgagtctgatcggagacg

SEQ ID NO: 92369 - DNA, 25 bp, Artificial
  probe
  misc_feature (1)..(25): SEQ ID NO: 7652; WAN024BSB_at; Start 7; Stop 31
agagagctactcgtgagtctgatcg

SEQ ID NO: 92370 - DNA, 25 bp, Artificial
  probe
  misc_feature (1)..(25): SEQ ID NO: 7652; WAN024BSB_at; Start 32; Stop 56
gagacgttgaagagctttttgttca

SEQ ID NO: 92371 - DNA, 25 bp, Artificial
  probe
  misc_feature (1)..(25): SEQ ID NO: 7652; WAN024BSB_at; Start 27; Stop 51
gatcggagacgttgaagagcttttt

SEQ ID NO: 92372 - DNA, 25 bp, Artificial
  probe
  misc_feature (1)..(25): SEQ ID NO: 7652; WAN024BSB_at; Start 40; Stop 64
gaagagctttttgttcaagacataa

SEQ ID NO: 92373 - DNA, 25 bp, Artificial
  probe
  misc_feature (1)..(25): SEQ ID NO: 7652; WAN024BSB_at; Start 43; Stop 67
gagctttttgttcaagacataaaag

SEQ ID NO: 92374 - DNA, 25 bp, Artificial
  probe
  misc_feature (1)..(25): SEQ ID NO: 7652; WAN024BSB_at; Start 34; Stop 58
gacgttgaagagctttttgttcaag

SEQ ID NO: 92375 - DNA, 25 bp, Artificial
  probe
  misc_feature (1)..(25): SEQ ID NO: 7652; WAN024BSB_at; Start 10; Stop 34
gagctactcgtgagtctgatcggag

SEQ ID NO: 92376 - DNA, 25 bp, Artificial
  probe
  misc_feature (1)..(25): SEQ ID NO: 7652; WAN024BSB_at; Start 26; Stop 50
tgatcggagacgttgaagagctttt

SEQ ID NO: 92377 - DNA, 25 bp, Artificial
  probe
  misc_feature (1)..(25): SEQ ID NO: 7652; WAN024BSB_at; Start 22; Stop 46
agtctgatcggagacgttgaagagc

SEQ ID NO: 92378 - DNA, 25 bp, Artificial
  probe
  misc_feature (1)..(25): SEQ ID NO: 7652; WAN024BSB_at; Start 37; Stop 61
gttgaagagctttttgttcaagaca

SEQ ID NO: 92379 - DNA, 25 bp, Artificial
  probe
  misc_feature (1)..(25): SEQ ID NO: 7652; WAN024BSB_at; Start 12; Stop 36
gctactcgtgagtctgatcggagac

SEQ ID NO: 92380 - DNA, 25 bp, Artificial
  probe
  misc_feature (1)..(25): SEQ ID NO: 7652; WAN024BSB_at; Start 28; Stop 52
atcggagacgttgaagagctttttg

SEQ ID NO: 92381 - DNA, 25 bp, Artificial
  probe
  misc_feature (1)..(25): SEQ ID NO: 7652; WAN024BSB_at; Start 5; Stop 29
tgagagagctactcgtgagtctgat

SEQ ID NO: 92382 - DNA, 25 bp, Artificial
  probe
  misc_feature (1)..(25): SEQ ID NO: 7652; WAN024BSB_at; Start 24; Stop 48
tctgatcggagacgttgaagagctt

SEQ ID NO: 92383 - DNA, 25 bp, Artificial
  probe
  misc_feature (1)..(25): SEQ ID NO: 7652; WAN024BSB_at; Start 11; Stop 35
agctactcgtgagtctgatcggaga

SEQ ID NO: 92384 - DNA, 25 bp, Artificial
  probe
  misc_feature (1)..(25): SEQ ID NO: 7652; WAN024BSB_at; Start 29; Stop 53
tcggagacgttgaagagctttttgt

SEQ ID NO: 92385 - DNA, 25 bp, Artificial
  probe
  misc_feature (1)..(25): SEQ ID NO: 7652; WAN024BSB_at; Start 36; Stop 60
cgttgaagagctttttgttcaagac

SEQ ID NO: 92386 - DNA, 25 bp, Artificial
  probe
  misc_feature (1)..(25): SEQ ID NO: 7652; WAN024BSB_at; Start 6; Stop 30
gagagagctactcgtgagtctgatc

SEQ ID NO: 92387 - DNA, 25 bp, Artificial
  probe
  misc_feature (1)..(25): SEQ ID NO: 7652; WAN024BSB_at; Start 51; Stop 75
tgttcaagacataaaagaaaatgta

SEQ ID NO: 92388 - DNA, 25 bp, Artificial
  probe
  misc_feature (1)..(25): SEQ ID NO: 7652; WAN024BSB_at; Start 8; Stop 32
gagagctactcgtgagtctgatcgg

SEQ ID NO: 92389 - DNA, 25 bp, Artificial
  probe
  misc_feature (1)..(25): SEQ ID NO: 7652; WAN024BSB_at; Start 30; Stop 54
cggagacgttgaagagctttttgtt

SEQ ID NO: 92390 - DNA, 25 bp, Artificial
  probe
  misc_feature (1)..(25): SEQ ID NO: 7652; WAN024BSB_at; Start 14; Stop 38
tactcgtgagtctgatcggagacgt

SEQ ID NO: 92391 - DNA, 25 bp, Artificial
  probe
  misc_feature (1)..(25): SEQ ID NO: 7652; WAN024BSB_at; Start 31; Stop 55
ggagacgttgaagagctttttgttc

SEQ ID NO: 92392 - DNA, 25 bp, Artificial
  probe
  misc_feature (1)..(25): SEQ ID NO: 6934; WAN024BSC_at; Start 53; Stop 77
ggaagcgcgactcttctttattatc

SEQ ID NO: 92393 - DNA, 25 bp, Artificial
  probe
  misc_feature (1)..(25): SEQ ID NO: 6934; WAN024BSC_at; Start 106; Stop 130
gatgcagtcgcagcagaacggcata

SEQ ID NO: 92394 - DNA, 25 bp, Artificial
  probe
  misc_feature (1)..(25): SEQ ID NO: 6934; WAN024BSC_at; Start 2; Stop 26
tggtttatgaggtttaccacaccta

SEQ ID NO: 92395 - DNA, 25 bp, Artificial
  probe
  misc_feature (1)..(25): SEQ ID NO: 6934; WAN024BSC_at; Start 25; Stop 49
tactataggcatgtgtttagaacag

SEQ ID NO: 92396 - DNA, 25 bp, Artificial
  probe
  misc_feature (1)..(25): SEQ ID NO: 6934; WAN024BSC_at; Start 77; Stop 101
ctgattatgagaagcttttagagaa

SEQ ID NO: 92397 - DNA, 25 bp, Artificial
  probe
  misc_feature (1)..(25): SEQ ID NO: 6934; WAN024BSC_at; Start 32; Stop 56
ggcatgtgtttagaacagtcgggaa

SEQ ID NO: 92398 - DNA, 25 bp, Artificial
  probe
  misc_feature (1)..(25): SEQ ID NO: 6934; WAN024BSC_at; Start 16; Stop 40
taccacacctactataggcatgtgt

SEQ ID NO: 92399 - DNA, 25 bp, Artificial
  probe
  misc_feature (1)..(25): SEQ ID NO: 6934; WAN024BSC_at; Start 74; Stop 98
tatctgattatgagaagcttttaga

SEQ ID NO: 92400 - DNA, 25 bp, Artificial
  probe
  misc_feature (1)..(25): SEQ ID NO: 6934; WAN024BSC_at; Start 67; Stop 91
tctttattatctgattatgagaagc

SEQ ID NO: 92401 - DNA, 25 bp, Artificial
  probe
  misc_feature (1)..(25): SEQ ID NO: 6934; WAN024BSC_at; Start 13; Stop 37
gtttaccacacctactataggcatg

SEQ ID NO: 92402 - DNA, 25 bp, Artificial
  probe
  misc_feature (1)..(25): SEQ ID NO: 6934; WAN024BSC_at; Start 19; Stop 43
cacacctactataggcatgtgttta

SEQ ID NO: 92403 - DNA, 25 bp, Artificial
  probe
  misc_feature (1)..(25): SEQ ID NO: 6934; WAN024BSC_at; Start 28; Stop 52
tataggcatgtgtttagaacagtcg

SEQ ID NO: 92404 - DNA, 25 bp, Artificial
  probe
  misc_feature (1)..(25): SEQ ID NO: 6934; WAN024BSC_at; Start 59; Stop 83
gcgactcttctttattatctgatta

SEQ ID NO: 92405 - DNA, 25 bp, Artificial
  probe
  misc_feature (1)..(25): SEQ ID NO: 6934; WAN024BSC_at; Start 36; Stop 60
tgtgtttagaacagtcgggaagcgc

SEQ ID NO: 92406 - DNA, 25 bp, Artificial
  probe
  misc_feature (1)..(25): SEQ ID NO: 6934; WAN024BSC_at; Start 99; Stop 123
gaagtttgatgcagtcgcagcagaa

SEQ ID NO: 92407 - DNA, 25 bp, Artificial
  probe
  misc_feature (1)..(25): SEQ ID NO: 6934; WAN024BSC_at; Start 11; Stop 35
aggtttaccacacctactataggca

SEQ ID NO: 92408 - DNA, 25 bp, Artificial
  probe
  misc_feature (1)..(25): SEQ ID NO: 6934; WAN024BSC_at; Start 87; Stop 111
gaagcttttagagaagtttgatgca

SEQ ID NO: 92409 - DNA, 25 bp, Artificial
  probe
  misc_feature (1)..(25): SEQ ID NO: 6934; WAN024BSC_at; Start 42; Stop 66
tagaacagtcgggaagcgcgactct

SEQ ID NO: 92410 - DNA, 25 bp, Artificial
  probe
  misc_feature (1)..(25): SEQ ID NO: 6934; WAN024BSC_at; Start 104; Stop 128
ttgatgcagtcgcagcagaacggca

SEQ ID NO: 92411 - DNA, 25 bp, Artificial
  probe
  misc_feature (1)..(25): SEQ ID NO: 6934; WAN024BSC_at; Start 38; Stop 62
tgtttagaacagtcgggaagcgcga

SEQ ID NO: 92412 - DNA, 25 bp, Artificial
  probe
  misc_feature (1)..(25): SEQ ID NO: 6934; WAN024BSC_at; Start 5; Stop 29
tttatgaggtttaccacacctacta

SEQ ID NO: 92413 - DNA, 25 bp, Artificial
  probe
  misc_feature (1)..(25): SEQ ID NO: 6934; WAN024BSC_at; Start 51; Stop 75
cgggaagcgcgactcttctttatta

SEQ ID NO: 92414 - DNA, 25 bp, Artificial
  probe
  misc_feature (1)..(25): SEQ ID NO: 6934; WAN024BSC_at; Start 95; Stop 119
tagagaagtttgatgcagtcgcagc

SEQ ID NO: 92415 - DNA, 25 bp, Artificial
  probe
  misc_feature (1)..(25): SEQ ID NO: 6934; WAN024BSC_at; Start 108; Stop 132
tgcagtcgcagcagaacggcatatc

SEQ ID NO: 92416 - DNA, 25 bp, Artificial
  probe
  misc_feature (1)..(25): SEQ ID NO: 6934; WAN024BSC_at; Start 34; Stop 58
catgtgtttagaacagtcgggaagc

SEQ ID NO: 92417 - DNA, 25 bp, Artificial
  probe
  misc_feature (1)..(25): SEQ ID NO: 6934; WAN024BSC_at; Start 23; Stop 47
cctactataggcatgtgtttagaac

SEQ ID NO: 92418 - DNA, 25 bp, Artificial
  probe
  misc_feature (1)..(25): SEQ ID NO: 6934; WAN024BSC_at; Start 9; Stop 33
tgaggtttaccacacctactatagg

SEQ ID NO: 92419 - DNA, 25 bp, Artificial
  probe
  misc_feature (1)..(25): SEQ ID NO: 6934; WAN024BSC_at; Start 101; Stop 125
agtttgatgcagtcgcagcagaacg

SEQ ID NO: 92420 - DNA, 25 bp, Artificial
  probe
  misc_feature (1)..(25): SEQ ID NO: 6934; WAN024BSC_at; Start 45; Stop 69
aacagtcgggaagcgcgactcttct

SEQ ID NO: 92421 - DNA, 25 bp, Artificial
  probe
  misc_feature (1)..(25): SEQ ID NO: 6934; WAN024BSC_at; Start 49; Stop 73
gtcgggaagcgcgactcttctttat

SEQ ID NO: 92422 - DNA, 25 bp, Artificial
  probe
  misc_feature (1)..(25): SEQ ID NO: 6934; WAN024BSC_at; Start 30; Stop 54
taggcatgtgtttagaacagtcggg

SEQ ID NO: 92423 - DNA, 25 bp, Artificial
  probe
  misc_feature (1)..(25): SEQ ID NO: 6934; WAN024BSC_at; Start 92; Stop 116
ttttagagaagtttgatgcagtcgc

SEQ ID NO: 92424 - DNA, 25 bp, Artificial
  probe
  misc_feature (1)..(25): SEQ ID NO: 6934; WAN024BSC_at; Start 97; Stop 121
gagaagtttgatgcagtcgcagcag

SEQ ID NO: 92425 - DNA, 25 bp, Artificial
  probe
  misc_feature (1)..(25): SEQ ID NO: 6934; WAN024BSC_at; Start 56; Stop 80
agcgcgactcttctttattatctga

SEQ ID NO: 92426 - DNA, 25 bp, Artificial
  probe
  misc_feature (1)..(25): SEQ ID NO: 7322; WAN024BSD_at; Start 2; Stop 26
tggttgaaccaattggtgacatagc

SEQ ID NO: 92427 - DNA, 25 bp, Artificial
  probe
  misc_feature (1)..(25): SEQ ID NO: 7322; WAN024BSD_at; Start 31; Stop 55
gtttcaggtctgagagtctatcaaa

SEQ ID NO: 92428 - DNA, 25 bp, Artificial
  probe
  misc_feature (1)..(25): SEQ ID NO: 7322; WAN024BSD_at; Start 24; Stop 48
agctgttgtttcaggtctgagagtc

SEQ ID NO: 92429 - DNA, 25 bp, Artificial
  probe
  misc_feature (1)..(25): SEQ ID NO: 7322; WAN024BSD_at; Start 28; Stop 52
gttgtttcaggtctgagagtctatc

SEQ ID NO: 92430 - DNA, 25 bp, Artificial
  probe
  misc_feature (1)..(25): SEQ ID NO: 7322; WAN024BSD_at; Start 9; Stop 33
accaattggtgacatagctgttgtt

SEQ ID NO: 92431 - DNA, 25 bp, Artificial
  probe
  misc_feature (1)..(25): SEQ ID NO: 7322; WAN024BSD_at; Start 34; Stop 58
tcaggtctgagagtctatcaaagaa

SEQ ID NO: 92432 - DNA, 25 bp, Artificial
  probe
  misc_feature (1)..(25): SEQ ID NO: 7322; WAN024BSD_at; Start 42; Stop 66
gagagtctatcaaagaagactgact

SEQ ID NO: 92433 - DNA, 25 bp, Artificial
  probe
  misc_feature (1)..(25): SEQ ID NO: 7322; WAN024BSD_at; Start 19; Stop 43
gacatagctgttgtttcaggtctga

SEQ ID NO: 92434 - DNA, 25 bp, Artificial
  probe
  misc_feature (1)..(25): SEQ ID NO: 7322; WAN024BSD_at; Start 44; Stop 68
gagtctatcaaagaagactgactgt

SEQ ID NO: 92435 - DNA, 25 bp, Artificial
  probe
  misc_feature (1)..(25): SEQ ID NO: 7322; WAN024BSD_at; Start 22; Stop 46
atagctgttgtttcaggtctgagag

SEQ ID NO: 92436 - DNA, 25 bp, Artificial
  probe
  misc_feature (1)..(25): SEQ ID NO: 7322; WAN024BSD_at; Start 39; Stop 63
tctgagagtctatcaaagaagactg

SEQ ID NO: 92437 - DNA, 25 bp, Artificial
  probe
  misc_feature (1)..(25): SEQ ID NO: 7322; WAN024BSD_at; Start 21; Stop 45
catagctgttgtttcaggtctgaga

SEQ ID NO: 92438 - DNA, 25 bp, Artificial
  probe
  misc_feature (1)..(25): SEQ ID NO: 7322; WAN024BSD_at; Start 51; Stop 75
tcaaagaagactgactgtagcacaa

SEQ ID NO: 92439 - DNA, 25 bp, Artificial
  probe
  misc_feature (1)..(25): SEQ ID NO: 7322; WAN024BSD_at; Start 52; Stop 76
caaagaagactgactgtagcacaac

SEQ ID NO: 92440 - DNA, 25 bp, Artificial
  probe
  misc_feature (1)..(25): SEQ ID NO: 7322; WAN024BSD_at; Start 30; Stop 54
tgtttcaggtctgagagtctatcaa

SEQ ID NO: 92441 - DNA, 25 bp, Artificial
  probe
  misc_feature (1)..(25): SEQ ID NO: 7322; WAN024BSD_at; Start 11; Stop 35
caattggtgacatagctgttgtttc

SEQ ID NO: 92442 - DNA, 25 bp, Artificial
  probe
  misc_feature (1)..(25): SEQ ID NO: 7322; WAN024BSD_at; Start 41; Stop 65
tgagagtctatcaaagaagactgac

SEQ ID NO: 92443 - DNA, 25 bp, Artificial
  probe
  misc_feature (1)..(25): SEQ ID NO: 7322; WAN024BSD_at; Start 14; Stop 38
ttggtgacatagctgttgtttcagg

SEQ ID NO: 92444 - DNA, 25 bp, Artificial
  probe
  misc_feature (1)..(25): SEQ ID NO: 7322; WAN024BSD_at; Start 35; Stop 59
caggtctgagagtctatcaaagaag

SEQ ID NO: 92445 - DNA, 25 bp, Artificial
  probe
  misc_feature (1)..(25): SEQ ID NO: 7322; WAN024BSD_at; Start 33; Stop 57
ttcaggtctgagagtctatcaaaga

SEQ ID NO: 92446 - DNA, 25 bp, Artificial
  probe
  misc_feature (1)..(25): SEQ ID NO: 7322; WAN024BSD_at; Start 53; Stop 77
aaagaagactgactgtagcacaacc

SEQ ID NO: 92447 - DNA, 25 bp, Artificial
  probe
  misc_feature (1)..(25): SEQ ID NO: 7322; WAN024BSD_at; Start 49; Stop 73
tatcaaagaagactgactgtagcac

SEQ ID NO: 92448 - DNA, 25 bp, Artificial
  probe
  misc_feature (1)..(25): SEQ ID NO: 7322; WAN024BSD_at; Start 54; Stop 78
aagaagactgactgtagcacaacca

SEQ ID NO: 92449 - DNA, 25 bp, Artificial
  probe
  misc_feature (1)..(25): SEQ ID NO: 7322; WAN024BSD_at; Start 26; Stop 50
ctgttgtttcaggtctgagagtcta

SEQ ID NO: 92450 - DNA, 25 bp, Artificial
  probe
  misc_feature (1)..(25): SEQ ID NO: 7322; WAN024BSD_at; Start 8; Stop 32
aaccaattggtgacatagctgttgt

SEQ ID NO: 92451 - DNA, 25 bp, Artificial
  probe
  misc_feature (1)..(25): SEQ ID NO: 7322; WAN024BSD_at; Start 7; Stop 31
gaaccaattggtgacatagctgttg

SEQ ID NO: 92452 - DNA, 25 bp, Artificial
  probe
  misc_feature (1)..(25): SEQ ID NO: 7322; WAN024BSD_at; Start 12; Stop 36
aattggtgacatagctgttgtttca

SEQ ID NO: 92453 - DNA, 25 bp, Artificial
  probe
  misc_feature (1)..(25): SEQ ID NO: 7322; WAN024BSD_at; Start 3; Stop 27
ggttgaaccaattggtgacatagct

SEQ ID NO: 92454 - DNA, 25 bp, Artificial
  probe
  misc_feature (1)..(25): SEQ ID NO: 7322; WAN024BSD_at; Start 5; Stop 29
ttgaaccaattggtgacatagctgt

SEQ ID NO: 92455 - DNA, 25 bp, Artificial
  probe
  misc_feature (1)..(25): SEQ ID NO: 7322; WAN024BSD_at; Start 37; Stop 61
ggtctgagagtctatcaaagaagac

SEQ ID NO: 92456 - DNA, 25 bp, Artificial
  probe
  misc_feature (1)..(25): SEQ ID NO: 7322; WAN024BSD_at; Start 47; Stop 71
tctatcaaagaagactgactgtagc

SEQ ID NO: 92457 - DNA, 25 bp, Artificial
  probe
  misc_feature (1)..(25): SEQ ID NO: 7322; WAN024BSD_at; Start 20; Stop 44
acatagctgttgtttcaggtctgag

SEQ ID NO: 92458 - DNA, 25 bp, Artificial
  probe
  misc_feature (1)..(25): SEQ ID NO: 7322; WAN024BSD_at; Start 16; Stop 40
ggtgacatagctgttgtttcaggtc

SEQ ID NO: 92459 - DNA, 25 bp, Artificial
  probe
  misc_feature (1)..(25): SEQ ID NO: 7322; WAN024BSD_at; Start 32; Stop 56
tttcaggtctgagagtctatcaaag

SEQ ID NO: 92460 - DNA, 25 bp, Artificial
  probe
  misc_feature (1)..(25): SEQ ID NO: 7122; WAN024BSE_at; Start 49; Stop 73
gctattgtatcgactgaagtccctt

SEQ ID NO: 92461 - DNA, 25 bp, Artificial
  probe
  misc_feature (1)..(25): SEQ ID NO: 7122; WAN024BSE_at; Start 76; Stop 100
gaaagtcttgaaggcgatgttttcg

SEQ ID NO: 92462 - DNA, 25 bp, Artificial
  probe
  misc_feature (1)..(25): SEQ ID NO: 7122; WAN024BSE_at; Start 29; Stop 53
tcttcgtggtgaaagtaattgctat

SEQ ID NO: 92463 - DNA, 25 bp, Artificial
  probe
  misc_feature (1)..(25): SEQ ID NO: 7122; WAN024BSE_at; Start 96; Stop 120
tttcgaagtgaaagtgctgaccggc

SEQ ID NO: 92464 - DNA, 25 bp, Artificial
  probe
  misc_feature (1)..(25): SEQ ID NO: 7122; WAN024BSE_at; Start 26; Stop 50
ctgtcttcgtggtgaaagtaattgc

SEQ ID NO: 92465 - DNA, 25 bp, Artificial
  probe
  misc_feature (1)..(25): SEQ ID NO: 7122; WAN024BSE_at; Start 18; Stop 42
cgtcttatctgtcttcgtggtgaaa

SEQ ID NO: 92466 - DNA, 25 bp, Artificial
  probe
  misc_feature (1)..(25): SEQ ID NO: 7122; WAN024BSE_at; Start 110; Stop 134
tgctgaccggcaaggtaaaggttac

SEQ ID NO: 92467 - DNA, 25 bp, Artificial
  probe
  misc_feature (1)..(25): SEQ ID NO: 7122; WAN024BSE_at; Start 104; Stop 128
tgaaagtgctgaccggcaaggtaaa

SEQ ID NO: 92468 - DNA, 25 bp, Artificial
  probe
  misc_feature (1)..(25): SEQ ID NO: 7122; WAN024BSE_at; Start 3; Stop 27
gctcgttcaagcgaccgtcttatct

SEQ ID NO: 92469 - DNA, 25 bp, Artificial
  probe
  misc_feature (1)..(25): SEQ ID NO: 7122; WAN024BSE_at; Start 10; Stop 34
caagcgaccgtcttatctgtcttcg

SEQ ID NO: 92470 - DNA, 25 bp, Artificial
  probe
  misc_feature (1)..(25): SEQ ID NO: 7122; WAN024BSE_at; Start 32; Stop 56
tcgtggtgaaagtaattgctattgt

SEQ ID NO: 92471 - DNA, 25 bp, Artificial
  probe
  misc_feature (1)..(25): SEQ ID NO: 7122; WAN024BSE_at; Start 63; Stop 87
tgaagtccctttagaaagtcttgaa

SEQ ID NO: 92472 - DNA, 25 bp, Artificial
  probe
  misc_feature (1)..(25): SEQ ID NO: 7122; WAN024BSE_at; Start 54; Stop 78
tgtatcgactgaagtccctttagaa

SEQ ID NO: 92473 - DNA, 25 bp, Artificial
  probe
  misc_feature (1)..(25): SEQ ID NO: 7122; WAN024BSE_at; Start 68; Stop 92
tccctttagaaagtcttgaaggcga

SEQ ID NO: 92474 - DNA, 25 bp, Artificial
  probe
  misc_feature (1)..(25): SEQ ID NO: 7122; WAN024BSE_at; Start 81; Stop 105
tcttgaaggcgatgttttcgaagtg

SEQ ID NO: 92475 - DNA, 25 bp, Artificial
  probe
  misc_feature (1)..(25): SEQ ID NO: 7122; WAN024BSE_at; Start 43; Stop 67
gtaattgctattgtatcgactgaag

SEQ ID NO: 92476 - DNA, 25 bp, Artificial
  probe
  misc_feature (1)..(25): SEQ ID NO: 7122; WAN024BSE_at; Start 88; Stop 112
ggcgatgttttcgaagtgaaagtgc

SEQ ID NO: 92477 - DNA, 25 bp, Artificial
  probe
  misc_feature (1)..(25): SEQ ID NO: 7122; WAN024BSE_at; Start 84; Stop 108
tgaaggcgatgttttcgaagtgaaa

SEQ ID NO: 92478 - DNA, 25 bp, Artificial
  probe
  misc_feature (1)..(25): SEQ ID NO: 7122; WAN024BSE_at; Start 21; Stop 45
cttatctgtcttcgtggtgaaagta

SEQ ID NO: 92479 - DNA, 25 bp, Artificial
  probe
  misc_feature (1)..(25): SEQ ID NO: 7122; WAN024BSE_at; Start 93; Stop 117
tgttttcgaagtgaaagtgctgacc

SEQ ID NO: 92480 - DNA, 25 bp, Artificial
  probe
  misc_feature (1)..(25): SEQ ID NO: 7122; WAN024BSE_at; Start 1; Stop 25
ctgctcgttcaagcgaccgtcttat

SEQ ID NO: 92481 - DNA, 25 bp, Artificial
  probe
  misc_feature (1)..(25): SEQ ID NO: 7122; WAN024BSE_at; Start 126; Stop 150
aaaggttaccgttattagagatgtg

SEQ ID NO: 92482 - DNA, 25 bp, Artificial
  probe
  misc_feature (1)..(25): SEQ ID NO: 7122; WAN024BSE_at; Start 99; Stop 123
cgaagtgaaagtgctgaccggcaag

SEQ ID NO: 92483 - DNA, 25 bp, Artificial
  probe
  misc_feature (1)..(25): SEQ ID NO: 7122; WAN024BSE_at; Start 101; Stop 125
aagtgaaagtgctgaccggcaaggt

SEQ ID NO: 92484 - DNA, 25 bp, Artificial
  probe
  misc_feature (1)..(25): SEQ ID NO: 7122; WAN024BSE_at; Start 71; Stop 95
ctttagaaagtcttgaaggcgatgt

SEQ ID NO: 92485 - DNA, 25 bp, Artificial
  probe
  misc_feature (1)..(25): SEQ ID NO: 7122; WAN024BSE_at; Start 15; Stop 39
gaccgtcttatctgtcttcgtggtg

SEQ ID NO: 92486 - DNA, 25 bp, Artificial
  probe
  misc_feature (1)..(25): SEQ ID NO: 7122; WAN024BSE_at; Start 129; Stop 153
ggttaccgttattagagatgtggca

SEQ ID NO: 92487 - DNA, 25 bp, Artificial
  probe
  misc_feature (1)..(25): SEQ ID NO: 7122; WAN024BSE_at; Start 56; Stop 80
tatcgactgaagtccctttagaaag

SEQ ID NO: 92488 - DNA, 25 bp, Artificial
  probe
  misc_feature (1)..(25): SEQ ID NO: 7122; WAN024BSE_at; Start 47; Stop 71
ttgctattgtatcgactgaagtccc

SEQ ID NO: 92489 - DNA, 25 bp, Artificial
  probe
  misc_feature (1)..(25): SEQ ID NO: 7122; WAN024BSE_at; Start 59; Stop 83
cgactgaagtccctttagaaagtct

SEQ ID NO: 92490 - DNA, 25 bp, Artificial
  probe
  misc_feature (1)..(25): SEQ ID NO: 7122; WAN024BSE_at; Start 97; Stop 121
ttcgaagtgaaagtgctgaccggca

SEQ ID NO: 92491 - DNA, 25 bp, Artificial
  probe
  misc_feature (1)..(25): SEQ ID NO: 7122; WAN024BSE_at; Start 7; Stop 31
gttcaagcgaccgtcttatctgtct

SEQ ID NO: 92492 - DNA, 25 bp, Artificial
  probe
  misc_feature (1)..(25): SEQ ID NO: 7122; WAN024BSE_at; Start 13; Stop 37
gcgaccgtcttatctgtcttcgtgg

SEQ ID NO: 92493 - DNA, 25 bp, Artificial
  probe
  misc_feature (1)..(25): SEQ ID NO: 7122; WAN024BSE_at; Start 38; Stop 62
tgaaagtaattgctattgtatcgac

SEQ ID NO: 92494 - DNA, 25 bp, Artificial
  probe
  misc_feature (1)..(25): SEQ ID NO: 7155; WAN024BSF_at; Start 44; Stop 68
tgctcgactacgaccaaattgtcct

SEQ ID NO: 92495 - DNA, 25 bp, Artificial
  probe
  misc_feature (1)..(25): SEQ ID NO: 7155; WAN024BSF_at; Start 58; Stop 82
caaattgtcctatttattggactca

SEQ ID NO: 92496 - DNA, 25 bp, Artificial
  probe
  misc_feature (1)..(25): SEQ ID NO: 7155; WAN024BSF_at; Start 45; Stop 69
gctcgactacgaccaaattgtccta

SEQ ID NO: 92497 - DNA, 25 bp, Artificial
  probe
  misc_feature (1)..(25): SEQ ID NO: 7155; WAN024BSF_at; Start 11; Stop 35
tagacgatttagaaagaaccgaaga

SEQ ID NO: 92498 - DNA, 25 bp, Artificial
  probe
  misc_feature (1)..(25): SEQ ID NO: 7155; WAN024BSF_at; Start 29; Stop 53
ccgaagaagctaaactgctcgacta

SEQ ID NO: 92499 - DNA, 25 bp, Artificial
  probe
  misc_feature (1)..(25): SEQ ID NO: 7155; WAN024BSF_at; Start 75; Stop 99
tggactcaacagtcgtaaaaaggac

SEQ ID NO: 92500 - DNA, 25 bp, Artificial
  probe
  misc_feature (1)..(25): SEQ ID NO: 7155; WAN024BSF_at; Start 32; Stop 56
aagaagctaaactgctcgactacga

SEQ ID NO: 92501 - DNA, 25 bp, Artificial
  probe
  misc_feature (1)..(25): SEQ ID NO: 7155; WAN024BSF_at; Start 93; Stop 117
aaaggacaacgtaggtgctgtcgat

SEQ ID NO: 92502 - DNA, 25 bp, Artificial
  probe
  misc_feature (1)..(25): SEQ ID NO: 7155; WAN024BSF_at; Start 41; Stop 65
aactgctcgactacgaccaaattgt

SEQ ID NO: 92503 - DNA, 25 bp, Artificial
  probe
  misc_feature (1)..(25): SEQ ID NO: 7155; WAN024BSF_at; Start 26; Stop 50
gaaccgaagaagctaaactgctcga

SEQ ID NO: 92504 - DNA, 25 bp, Artificial
  probe
  misc_feature (1)..(25): SEQ ID NO: 7155; WAN024BSF_at; Start 27; Stop 51
aaccgaagaagctaaactgctcgac

SEQ ID NO: 92505 - DNA, 25 bp, Artificial
  probe
  misc_feature (1)..(25): SEQ ID NO: 7155; WAN024BSF_at; Start 91; Stop 115
aaaaaggacaacgtaggtgctgtcg

SEQ ID NO: 92506 - DNA, 25 bp, Artificial
  probe
  misc_feature (1)..(25): SEQ ID NO: 7155; WAN024BSF_at; Start 24; Stop 48
aagaaccgaagaagctaaactgctc

SEQ ID NO: 92507 - DNA, 25 bp, Artificial
  probe
  misc_feature (1)..(25): SEQ ID NO: 7155; WAN024BSF_at; Start 49; Stop 73
gactacgaccaaattgtcctattta

SEQ ID NO: 92508 - DNA, 25 bp, Artificial
  probe
  misc_feature (1)..(25): SEQ ID NO: 7155; WAN024BSF_at; Start 54; Stop 78
cgaccaaattgtcctatttattgga

SEQ ID NO: 92509 - DNA, 25 bp, Artificial
  probe
  misc_feature (1)..(25): SEQ ID NO: 7155; WAN024BSF_at; Start 35; Stop 59
aagctaaactgctcgactacgacca

SEQ ID NO: 92510 - DNA, 25 bp, Artificial
  probe
  misc_feature (1)..(25): SEQ ID NO: 7155; WAN024BSF_at; Start 37; Stop 61
gctaaactgctcgactacgaccaaa

SEQ ID NO: 92511 - DNA, 25 bp, Artificial
  probe
  misc_feature (1)..(25): SEQ ID NO: 7155; WAN024BSF_at; Start 90; Stop 114
taaaaaggacaacgtaggtgctgtc

SEQ ID NO: 92512 - DNA, 25 bp, Artificial
  probe
  misc_feature (1)..(25): SEQ ID NO: 7155; WAN024BSF_at; Start 23; Stop 47
aaagaaccgaagaagctaaactgct

SEQ ID NO: 92513 - DNA, 25 bp, Artificial
  probe
  misc_feature (1)..(25): SEQ ID NO: 7155; WAN024BSF_at; Start 16; Stop 40
gatttagaaagaaccgaagaagcta

SEQ ID NO: 92514 - DNA, 25 bp, Artificial
  probe
  misc_feature (1)..(25): SEQ ID NO: 7155; WAN024BSF_at; Start 34; Stop 58
gaagctaaactgctcgactacgacc

SEQ ID NO: 92515 - DNA, 25 bp, Artificial
  probe
  misc_feature (1)..(25): SEQ ID NO: 7155; WAN024BSF_at; Start 76; Stop 100
ggactcaacagtcgtaaaaaggaca

SEQ ID NO: 92516 - DNA, 25 bp, Artificial
  probe
  misc_feature (1)..(25): SEQ ID NO: 7155; WAN024BSF_at; Start 15; Stop 39
cgatttagaaagaaccgaagaagct

SEQ ID NO: 92517 - DNA, 25 bp, Artificial
  probe
  misc_feature (1)..(25): SEQ ID NO: 7155; WAN024BSF_at; Start 22; Stop 46
gaaagaaccgaagaagctaaactgc

SEQ ID NO: 92518 - DNA, 25 bp, Artificial
  probe
  misc_feature (1)..(25): SEQ ID NO: 7155; WAN024BSF_at; Start 88; Stop 112
cgtaaaaaggacaacgtaggtgctg

SEQ ID NO: 92519 - DNA, 25 bp, Artificial
  probe
  misc_feature (1)..(25): SEQ ID NO: 7155; WAN024BSF_at; Start 77; Stop 101
gactcaacagtcgtaaaaaggacaa

SEQ ID NO: 92520 - DNA, 25 bp, Artificial
  probe
  misc_feature (1)..(25): SEQ ID NO: 7155; WAN024BSF_at; Start 79; Stop 103
ctcaacagtcgtaaaaaggacaacg

SEQ ID NO: 92521 - DNA, 25 bp, Artificial
  probe
  misc_feature (1)..(25): SEQ ID NO: 7155; WAN024BSF_at; Start 47; Stop 71
tcgactacgaccaaattgtcctatt

SEQ ID NO: 92522 - DNA, 25 bp, Artificial
  probe
  misc_feature (1)..(25): SEQ ID NO: 7155; WAN024BSF_at; Start 65; Stop 89
tcctatttattggactcaacagtcg

SEQ ID NO: 92523 - DNA, 25 bp, Artificial
  probe
  misc_feature (1)..(25): SEQ ID NO: 7155; WAN024BSF_at; Start 92; Stop 116
aaaaggacaacgtaggtgctgtcga

SEQ ID NO: 92524 - DNA, 25 bp, Artificial
  probe
  misc_feature (1)..(25): SEQ ID NO: 7155; WAN024BSF_at; Start 39; Stop 63
taaactgctcgactacgaccaaatt

SEQ ID NO: 92525 - DNA, 25 bp, Artificial
  probe
  misc_feature (1)..(25): SEQ ID NO: 7155; WAN024BSF_at; Start 68; Stop 92
tatttattggactcaacagtcgtaa

SEQ ID NO: 92526 - DNA, 25 bp, Artificial
  probe
  misc_feature (1)..(25): SEQ ID NO: 7155; WAN024BSF_at; Start 31; Stop 55
gaagaagctaaactgctcgactacg

SEQ ID NO: 92527 - DNA, 25 bp, Artificial
  probe
  misc_feature (1)..(25): SEQ ID NO: 7155; WAN024BSF_at; Start 72; Stop 96
tattggactcaacagtcgtaaaaag

SEQ ID NO: 92528 - DNA, 25 bp, Artificial
  probe
  misc_feature (1)..(25): SEQ ID NO: 7592; WAN024BSG_at; Start 14; Stop 38
tttctcaggtcgaagtgcccgttac

SEQ ID NO: 92529 - DNA, 25 bp, Artificial
  probe
  misc_feature (1)..(25): SEQ ID NO: 7592; WAN024BSG_at; Start 11; Stop 35
tcctttctcaggtcgaagtgcccgt

SEQ ID NO: 92530 - DNA, 25 bp, Artificial
  probe
  misc_feature (1)..(25): SEQ ID NO: 7592; WAN024BSG_at; Start 18; Stop 42
tcaggtcgaagtgcccgttaccaac

SEQ ID NO: 92531 - DNA, 25 bp, Artificial
  probe
  misc_feature (1)..(25): SEQ ID NO: 7592; WAN024BSG_at; Start 12; Stop 36
cctttctcaggtcgaagtgcccgtt

SEQ ID NO: 92532 - DNA, 25 bp, Artificial
  probe
  misc_feature (1)..(25): SEQ ID NO: 7592; WAN024BSG_at; Start 44; Stop 68
gaaccatgctgcgaaaaggaatatt

SEQ ID NO: 92533 - DNA, 25 bp, Artificial
  probe
  misc_feature (1)..(25): SEQ ID NO: 7592; WAN024BSG_at; Start 42; Stop 66
cggaaccatgctgcgaaaaggaata

SEQ ID NO: 92534 - DNA, 25 bp, Artificial
  probe
  misc_feature (1)..(25): SEQ ID NO: 7592; WAN024BSG_at; Start 30; Stop 54
gcccgttaccaacggaaccatgctg

SEQ ID NO: 92535 - DNA, 25 bp, Artificial
  probe
  misc_feature (1)..(25): SEQ ID NO: 7592; WAN024BSG_at; Start 27; Stop 51
agtgcccgttaccaacggaaccatg

SEQ ID NO: 92536 - DNA, 25 bp, Artificial
  probe
  misc_feature (1)..(25): SEQ ID NO: 7592; WAN024BSG_at; Start 47; Stop 71
ccatgctgcgaaaaggaatattcct

SEQ ID NO: 92537 - DNA, 25 bp, Artificial
  probe
  misc_feature (1)..(25): SEQ ID NO: 7592; WAN024BSG_at; Start 15; Stop 39
ttctcaggtcgaagtgcccgttacc

SEQ ID NO: 92538 - DNA, 25 bp, Artificial
  probe
  misc_feature (1)..(25): SEQ ID NO: 7592; WAN024BSG_at; Start 65; Stop 89
tattccttctatctcaagaagttgc

SEQ ID NO: 92539 - DNA, 25 bp, Artificial
  probe
  misc_feature (1)..(25): SEQ ID NO: 7592; WAN024BSG_at; Start 29; Stop 53
tgcccgttaccaacggaaccatgct

SEQ ID NO: 92540 - DNA, 25 bp, Artificial
  probe
  misc_feature (1)..(25): SEQ ID NO: 7592; WAN024BSG_at; Start 13; Stop 37
ctttctcaggtcgaagtgcccgtta

SEQ ID NO: 92541 - DNA, 25 bp, Artificial
  probe
  misc_feature (1)..(25): SEQ ID NO: 7592; WAN024BSG_at; Start 3; Stop 27
gctcgttctcctttctcaggtcgaa

SEQ ID NO: 92542 - DNA, 25 bp, Artificial
  probe
  misc_feature (1)..(25): SEQ ID NO: 7592; WAN024BSG_at; Start 16; Stop 40
tctcaggtcgaagtgcccgttacca

SEQ ID NO: 92543 - DNA, 25 bp, Artificial
  probe
  misc_feature (1)..(25): SEQ ID NO: 7592; WAN024BSG_at; Start 38; Stop 62
ccaacggaaccatgctgcgaaaagg

SEQ ID NO: 92544 - DNA, 25 bp, Artificial
  probe
  misc_feature (1)..(25): SEQ ID NO: 7592; WAN024BSG_at; Start 48; Stop 72
catgctgcgaaaaggaatattcctt

SEQ ID NO: 92545 - DNA, 25 bp, Artificial
  probe
  misc_feature (1)..(25): SEQ ID NO: 7592; WAN024BSG_at; Start 39; Stop 63
caacggaaccatgctgcgaaaagga

SEQ ID NO: 92546 - DNA, 25 bp, Artificial
  probe
  misc_feature (1)..(25): SEQ ID NO: 7592; WAN024BSG_at; Start 72; Stop 96
tctatctcaagaagttgcagacgat

SEQ ID NO: 92547 - DNA, 25 bp, Artificial
  probe
  misc_feature (1)..(25): SEQ ID NO: 7592; WAN024BSG_at; Start 41; Stop 65
acggaaccatgctgcgaaaaggaat

SEQ ID NO: 92548 - DNA, 25 bp, Artificial
  probe
  misc_feature (1)..(25): SEQ ID NO: 7592; WAN024BSG_at; Start 2; Stop 26
tgctcgttctcctttctcaggtcga

SEQ ID NO: 92549 - DNA, 25 bp, Artificial
  probe
  misc_feature (1)..(25): SEQ ID NO: 7592; WAN024BSG_at; Start 36; Stop 60
taccaacggaaccatgctgcgaaaa

SEQ ID NO: 92550 - DNA, 25 bp, Artificial
  probe
  misc_feature (1)..(25): SEQ ID NO: 7592; WAN024BSG_at; Start 46; Stop 70
accatgctgcgaaaaggaatattcc

SEQ ID NO: 92551 - DNA, 25 bp, Artificial
  probe
  misc_feature (1)..(25): SEQ ID NO: 7592; WAN024BSG_at; Start 8; Stop 32
ttctcctttctcaggtcgaagtgcc

SEQ ID NO: 92552 - DNA, 25 bp, Artificial
  probe
  misc_feature (1)..(25): SEQ ID NO: 7592; WAN024BSG_at; Start 33; Stop 57
cgttaccaacggaaccatgctgcga

SEQ ID NO: 92553 - DNA, 25 bp, Artificial
  probe
  misc_feature (1)..(25): SEQ ID NO: 7592; WAN024BSG_at; Start 69; Stop 93
ccttctatctcaagaagttgcagac

SEQ ID NO: 92554 - DNA, 25 bp, Artificial
  probe
  misc_feature (1)..(25): SEQ ID NO: 7592; WAN024BSG_at; Start 35; Stop 59
ttaccaacggaaccatgctgcgaaa

SEQ ID NO: 92555 - DNA, 25 bp, Artificial
  probe
  misc_feature (1)..(25): SEQ ID NO: 7592; WAN024BSG_at; Start 61; Stop 85
ggaatattccttctatctcaagaag

SEQ ID NO: 92556 - DNA, 25 bp, Artificial
  probe
  misc_feature (1)..(25): SEQ ID NO: 7592; WAN024BSG_at; Start 59; Stop 83
aaggaatattccttctatctcaaga

SEQ ID NO: 92557 - DNA, 25 bp, Artificial
  probe
  misc_feature (1)..(25): SEQ ID NO: 7592; WAN024BSG_at; Start 6; Stop 30
cgttctcctttctcaggtcgaagtg

SEQ ID NO: 92558 - DNA, 25 bp, Artificial
  probe
  misc_feature (1)..(25): SEQ ID NO: 7592; WAN024BSG_at; Start 4; Stop 28
ctcgttctcctttctcaggtcgaag

SEQ ID NO: 92559 - DNA, 25 bp, Artificial
  probe
  misc_feature (1)..(25): SEQ ID NO: 7592; WAN024BSG_at; Start 40; Stop 64
aacggaaccatgctgcgaaaaggaa

SEQ ID NO: 92560 - DNA, 25 bp, Artificial
  probe
  misc_feature (1)..(25): SEQ ID NO: 7592; WAN024BSG_at; Start 34; Stop 58
gttaccaacggaaccatgctgcgaa

SEQ ID NO: 92561 - DNA, 25 bp, Artificial
  probe
  misc_feature (1)..(25): SEQ ID NO: 7592; WAN024BSG_at; Start 51; Stop 75
gctgcgaaaaggaatattccttcta

SEQ ID NO: 92562 - DNA, 25 bp, Artificial
  probe
  misc_feature (1)..(25): SEQ ID NO: 7543; WAN024BSH_at; Start 13; Stop 37
caattaaactttgcaaatcgaacac

SEQ ID NO: 92563 - DNA, 25 bp, Artificial
  probe
  misc_feature (1)..(25): SEQ ID NO: 7543; WAN024BSH_at; Start 6; Stop 30
agatgctcaattaaactttgcaaat

SEQ ID NO: 92564 - DNA, 25 bp, Artificial
  probe
  misc_feature (1)..(25): SEQ ID NO: 7543; WAN024BSH_at; Start 15; Stop 39
attaaactttgcaaatcgaacacca

SEQ ID NO: 92565 - DNA, 25 bp, Artificial
  probe
  misc_feature (1)..(25): SEQ ID NO: 7543; WAN024BSH_at; Start 2; Stop 26
tgcaagatgctcaattaaactttgc

SEQ ID NO: 92566 - DNA, 25 bp, Artificial
  probe
  misc_feature (1)..(25): SEQ ID NO: 7543; WAN024BSH_at; Start 37; Stop 61
ccatattatctaaatacctattttt

SEQ ID NO: 92567 - DNA, 25 bp, Artificial
  probe
  misc_feature (1)..(25): SEQ ID NO: 7543; WAN024BSH_at; Start 24; Stop 48
tgcaaatcgaacaccatattatcta

SEQ ID NO: 92568 - DNA, 25 bp, Artificial
  probe
  misc_feature (1)..(25): SEQ ID NO: 7543; WAN024BSH_at; Start 3; Stop 27
gcaagatgctcaattaaactttgca

SEQ ID NO: 92569 - DNA, 25 bp, Artificial
  probe
  misc_feature (1)..(25): SEQ ID NO: 7543; WAN024BSH_at; Start 4; Stop 28
caagatgctcaattaaactttgcaa

SEQ ID NO: 92570 - DNA, 25 bp, Artificial
  probe
  misc_feature (1)..(25): SEQ ID NO: 7543; WAN024BSH_at; Start 28; Stop 52
aatcgaacaccatattatctaaata

SEQ ID NO: 92571 - DNA, 25 bp, Artificial
  probe
  misc_feature (1)..(25): SEQ ID NO: 7543; WAN024BSH_at; Start 11; Stop 35
ctcaattaaactttgcaaatcgaac

SEQ ID NO: 92572 - DNA, 25 bp, Artificial
  probe
  misc_feature (1)..(25): SEQ ID NO: 7543; WAN024BSH_at; Start 18; Stop 42
aaactttgcaaatcgaacaccatat

SEQ ID NO: 92573 - DNA, 25 bp, Artificial
  probe
  misc_feature (1)..(25): SEQ ID NO: 7543; WAN024BSH_at; Start 31; Stop 55
cgaacaccatattatctaaatacct

SEQ ID NO: 92574 - DNA, 25 bp, Artificial
  probe
  misc_feature (1)..(25): SEQ ID NO: 7543; WAN024BSH_at; Start 12; Stop 36
tcaattaaactttgcaaatcgaaca

SEQ ID NO: 92575 - DNA, 25 bp, Artificial
  probe
  misc_feature (1)..(25): SEQ ID NO: 7543; WAN024BSH_at; Start 10; Stop 34
gctcaattaaactttgcaaatcgaa

SEQ ID NO: 92576 - DNA, 25 bp, Artificial
  probe
  misc_feature (1)..(25): SEQ ID NO: 7543; WAN024BSH_at; Start 27; Stop 51
aaatcgaacaccatattatctaaat

SEQ ID NO: 92577 - DNA, 25 bp, Artificial
  probe
  misc_feature (1)..(25): SEQ ID NO: 7543; WAN024BSH_at; Start 29; Stop 53
atcgaacaccatattatctaaatac

SEQ ID NO: 92578 - DNA, 25 bp, Artificial
  probe
  misc_feature (1)..(25): SEQ ID NO: 7543; WAN024BSH_at; Start 23; Stop 47
ttgcaaatcgaacaccatattatct

SEQ ID NO: 92579 - DNA, 25 bp, Artificial
  probe
  misc_feature (1)..(25): SEQ ID NO: 7543; WAN024BSH_at; Start 25; Stop 49
gcaaatcgaacaccatattatctaa

SEQ ID NO: 92580 - DNA, 25 bp, Artificial
  probe
  misc_feature (1)..(25): SEQ ID NO: 7543; WAN024BSH_at; Start 21; Stop 45
ctttgcaaatcgaacaccatattat

SEQ ID NO: 92581 - DNA, 25 bp, Artificial
  probe
  misc_feature (1)..(25): SEQ ID NO: 7543; WAN024BSH_at; Start 5; Stop 29
aagatgctcaattaaactttgcaaa

SEQ ID NO: 92582 - DNA, 25 bp, Artificial
  probe
  misc_feature (1)..(25): SEQ ID NO: 7543; WAN024BSH_at; Start 35; Stop 59
caccatattatctaaatacctattt

SEQ ID NO: 92583 - DNA, 25 bp, Artificial
  probe
  misc_feature (1)..(25): SEQ ID NO: 7543; WAN024BSH_at; Start 9; Stop 33
tgctcaattaaactttgcaaatcga

SEQ ID NO: 92584 - DNA, 25 bp, Artificial
  probe
  misc_feature (1)..(25): SEQ ID NO: 7543; WAN024BSH_at; Start 7; Stop 31
gatgctcaattaaactttgcaaatc

SEQ ID NO: 92585 - DNA, 25 bp, Artificial
  probe
  misc_feature (1)..(25): SEQ ID NO: 7543; WAN024BSH_at; Start 26; Stop 50
caaatcgaacaccatattatctaaa

SEQ ID NO: 92586 - DNA, 25 bp, Artificial
  probe
  misc_feature (1)..(25): SEQ ID NO: 7543; WAN024BSH_at; Start 1; Stop 25
ttgcaagatgctcaattaaactttg

SEQ ID NO: 92587 - DNA, 25 bp, Artificial
  probe
  misc_feature (1)..(25): SEQ ID NO: 7543; WAN024BSH_at; Start 8; Stop 32
atgctcaattaaactttgcaaatcg

SEQ ID NO: 92588 - DNA, 25 bp, Artificial
  probe
  misc_feature (1)..(25): SEQ ID NO: 7543; WAN024BSH_at; Start 19; Stop 43
aactttgcaaatcgaacaccatatt

SEQ ID NO: 92589 - DNA, 25 bp, Artificial
  probe
  misc_feature (1)..(25): SEQ ID NO: 7543; WAN024BSH_at; Start 16; Stop 40
ttaaactttgcaaatcgaacaccat

SEQ ID NO: 92590 - DNA, 25 bp, Artificial
  probe
  misc_feature (1)..(25): SEQ ID NO: 7543; WAN024BSH_at; Start 22; Stop 46
tttgcaaatcgaacaccatattatc

SEQ ID NO: 92591 - DNA, 25 bp, Artificial
  probe
  misc_feature (1)..(25): SEQ ID NO: 7543; WAN024BSH_at; Start 20; Stop 44
actttgcaaatcgaacaccatatta

SEQ ID NO: 92592 - DNA, 25 bp, Artificial
  probe
  misc_feature (1)..(25): SEQ ID NO: 7543; WAN024BSH_at; Start 30; Stop 54
tcgaacaccatattatctaaatacc

SEQ ID NO: 92593 - DNA, 25 bp, Artificial
  probe
  misc_feature (1)..(25): SEQ ID NO: 7543; WAN024BSH_at; Start 32; Stop 56
gaacaccatattatctaaataccta

SEQ ID NO: 92594 - DNA, 25 bp, Artificial
  probe
  misc_feature (1)..(25): SEQ ID NO: 7543; WAN024BSH_at; Start 17; Stop 41
taaactttgcaaatcgaacaccata

SEQ ID NO: 92595 - DNA, 25 bp, Artificial
  probe
  misc_feature (1)..(25): SEQ ID NO: 7543; WAN024BSH_at; Start 33; Stop 57
aacaccatattatctaaatacctat

SEQ ID NO: 92596 - DNA, 25 bp, Artificial
  probe
  misc_feature (1)..(25): SEQ ID NO: 7450; WAN024BSI_at; Start 40; Stop 64
gataccaatgaagttgagtcagctg

SEQ ID NO: 92597 - DNA, 25 bp, Artificial
  probe
  misc_feature (1)..(25): SEQ ID NO: 7450; WAN024BSI_at; Start 27; Stop 51
acctggcttgactgataccaatgaa

SEQ ID NO: 92598 - DNA, 25 bp, Artificial
  probe
  misc_feature (1)..(25): SEQ ID NO: 7450; WAN024BSI_at; Start 16; Stop 40
gcgcgcacagaacctggcttgactg

SEQ ID NO: 92599 - DNA, 25 bp, Artificial
  probe
  misc_feature (1)..(25): SEQ ID NO: 7450; WAN024BSI_at; Start 18; Stop 42
gcgcacagaacctggcttgactgat

SEQ ID NO: 92600 - DNA, 25 bp, Artificial
  probe
  misc_feature (1)..(25): SEQ ID NO: 7450; WAN024BSI_at; Start 13; Stop 37
acagcgcgcacagaacctggcttga

SEQ ID NO: 92601 - DNA, 25 bp, Artificial
  probe
  misc_feature (1)..(25): SEQ ID NO: 7450; WAN024BSI_at; Start 12; Stop 36
tacagcgcgcacagaacctggcttg

SEQ ID NO: 92602 - DNA, 25 bp, Artificial
  probe
  misc_feature (1)..(25): SEQ ID NO: 7450; WAN024BSI_at; Start 3; Stop 27
gaccttggatacagcgcgcacagaa

SEQ ID NO: 92603 - DNA, 25 bp, Artificial
  probe
  misc_feature (1)..(25): SEQ ID NO: 7450; WAN024BSI_at; Start 15; Stop 39
agcgcgcacagaacctggcttgact

SEQ ID NO: 92604 - DNA, 25 bp, Artificial
  probe
  misc_feature (1)..(25): SEQ ID NO: 7450; WAN024BSI_at; Start 23; Stop 47
cagaacctggcttgactgataccaa

SEQ ID NO: 92605 - DNA, 25 bp, Artificial
  probe
  misc_feature (1)..(25): SEQ ID NO: 7450; WAN024BSI_at; Start 19; Stop 43
cgcacagaacctggcttgactgata

SEQ ID NO: 92606 - DNA, 25 bp, Artificial
  probe
  misc_feature (1)..(25): SEQ ID NO: 7450; WAN024BSI_at; Start 24; Stop 48
agaacctggcttgactgataccaat

SEQ ID NO: 92607 - DNA, 25 bp, Artificial
  probe
  misc_feature (1)..(25): SEQ ID NO: 7450; WAN024BSI_at; Start 26; Stop 50
aacctggcttgactgataccaatga

SEQ ID NO: 92608 - DNA, 25 bp, Artificial
  probe
  misc_feature (1)..(25): SEQ ID NO: 7450; WAN024BSI_at; Start 36; Stop 60
gactgataccaatgaagttgagtca

SEQ ID NO: 92609 - DNA, 25 bp, Artificial
  probe
  misc_feature (1)..(25): SEQ ID NO: 7450; WAN024BSI_at; Start 28; Stop 52
cctggcttgactgataccaatgaag

SEQ ID NO: 92610 - DNA, 25 bp, Artificial
  probe
  misc_feature (1)..(25): SEQ ID NO: 7450; WAN024BSI_at; Start 45; Stop 69
caatgaagttgagtcagctgtgata

SEQ ID NO: 92611 - DNA, 25 bp, Artificial
  probe
  misc_feature (1)..(25): SEQ ID NO: 7450; WAN024BSI_at; Start 31; Stop 55
ggcttgactgataccaatgaagttg

SEQ ID NO: 92612 - DNA, 25 bp, Artificial
  probe
  misc_feature (1)..(25): SEQ ID NO: 7450; WAN024BSI_at; Start 25; Stop 49
gaacctggcttgactgataccaatg

SEQ ID NO: 92613 - DNA, 25 bp, Artificial
  probe
  misc_feature (1)..(25): SEQ ID NO: 7450; WAN024BSI_at; Start 49; Stop 73
gaagttgagtcagctgtgataaaac

SEQ ID NO: 92614 - DNA, 25 bp, Artificial
  probe
  misc_feature (1)..(25): SEQ ID NO: 7450; WAN024BSI_at; Start 43; Stop 67
accaatgaagttgagtcagctgtga

SEQ ID NO: 92615 - DNA, 25 bp, Artificial
  probe
  misc_feature (1)..(25): SEQ ID NO: 7450; WAN024BSI_at; Start 51; Stop 75
agttgagtcagctgtgataaaacag

SEQ ID NO: 92616 - DNA, 25 bp, Artificial
  probe
  misc_feature (1)..(25): SEQ ID NO: 7450; WAN024BSI_at; Start 2; Stop 26
tgaccttggatacagcgcgcacaga

SEQ ID NO: 92617 - DNA, 25 bp, Artificial
  probe
  misc_feature (1)..(25): SEQ ID NO: 7450; WAN024BSI_at; Start 39; Stop 63
tgataccaatgaagttgagtcagct

SEQ ID NO: 92618 - DNA, 25 bp, Artificial
  probe
  misc_feature (1)..(25): SEQ ID NO: 7450; WAN024BSI_at; Start 44; Stop 68
ccaatgaagttgagtcagctgtgat

SEQ ID NO: 92619 - DNA, 25 bp, Artificial
  probe
  misc_feature (1)..(25): SEQ ID NO: 7450; WAN024BSI_at; Start 4; Stop 28
accttggatacagcgcgcacagaac

SEQ ID NO: 92620 - DNA, 25 bp, Artificial
  probe
  misc_feature (1)..(25): SEQ ID NO: 7450; WAN024BSI_at; Start 11; Stop 35
atacagcgcgcacagaacctggctt

SEQ ID NO: 92621 - DNA, 25 bp, Artificial
  probe
  misc_feature (1)..(25): SEQ ID NO: 7450; WAN024BSI_at; Start 22; Stop 46
acagaacctggcttgactgatacca

SEQ ID NO: 92622 - DNA, 25 bp, Artificial
  probe
  misc_feature (1)..(25): SEQ ID NO: 7450; WAN024BSI_at; Start 17; Stop 41
cgcgcacagaacctggcttgactga

SEQ ID NO: 92623 - DNA, 25 bp, Artificial
  probe
  misc_feature (1)..(25): SEQ ID NO: 7450; WAN024BSI_at; Start 32; Stop 56
gcttgactgataccaatgaagttga

SEQ ID NO: 92624 - DNA, 25 bp, Artificial
  probe
  misc_feature (1)..(25): SEQ ID NO: 7450; WAN024BSI_at; Start 21; Stop 45
cacagaacctggcttgactgatacc

SEQ ID NO: 92625 - DNA, 25 bp, Artificial
  probe
  misc_feature (1)..(25): SEQ ID NO: 7450; WAN024BSI_at; Start 33; Stop 57
cttgactgataccaatgaagttgag

SEQ ID NO: 92626 - DNA, 25 bp, Artificial
  probe
  misc_feature (1)..(25): SEQ ID NO: 7450; WAN024BSI_at; Start 42; Stop 66
taccaatgaagttgagtcagctgtg

SEQ ID NO: 92627 - DNA, 25 bp, Artificial
  probe
  misc_feature (1)..(25): SEQ ID NO: 7450; WAN024BSI_at; Start 29; Stop 53
ctggcttgactgataccaatgaagt

SEQ ID NO: 92628 - DNA, 25 bp, Artificial
  probe
  misc_feature (1)..(25): SEQ ID NO: 7450; WAN024BSI_at; Start 1; Stop 25
ttgaccttggatacagcgcgcacag

SEQ ID NO: 92629 - DNA, 25 bp, Artificial
  probe
  misc_feature (1)..(25): SEQ ID NO: 7450; WAN024BSI_at; Start 9; Stop 33
ggatacagcgcgcacagaacctggc

SEQ ID NO: 92630 - DNA, 25 bp, Artificial
  probe
  misc_feature (1)..(25): SEQ ID NO: 7318; WAN024BSJ_at; Start 68; Stop 92
aatataaagaacattacaaagctgg

SEQ ID NO: 92631 - DNA, 25 bp, Artificial
  probe
  misc_feature (1)..(25): SEQ ID NO: 7318; WAN024BSJ_at; Start 37; Stop 61
gataagaatgaatacatggtctttt

SEQ ID NO: 92632 - DNA, 25 bp, Artificial
  probe
  misc_feature (1)..(25): SEQ ID NO: 7318; WAN024BSJ_at; Start 15; Stop 39
gacctactattcaataatctatgat

SEQ ID NO: 92633 - DNA, 25 bp, Artificial
  probe
  misc_feature (1)..(25): SEQ ID NO: 7318; WAN024BSJ_at; Start 7; Stop 31
catgtccagacctactattcaataa

SEQ ID NO: 92634 - DNA, 25 bp, Artificial
  probe
  misc_feature (1)..(25): SEQ ID NO: 7318; WAN024BSJ_at; Start 45; Stop 69
tgaatacatggtcttttttaccaaa

SEQ ID NO: 92635 - DNA, 25 bp, Artificial
  probe
  misc_feature (1)..(25): SEQ ID NO: 7318; WAN024BSJ_at; Start 2; Stop 26
tggtgcatgtccagacctactattc

SEQ ID NO: 92636 - DNA, 25 bp, Artificial
  probe
  misc_feature (1)..(25): SEQ ID NO: 7318; WAN024BSJ_at; Start 10; Stop 34
gtccagacctactattcaataatct

SEQ ID NO: 92637 - DNA, 25 bp, Artificial
  probe
  misc_feature (1)..(25): SEQ ID NO: 7318; WAN024BSJ_at; Start 3; Stop 27
ggtgcatgtccagacctactattca

SEQ ID NO: 92638 - DNA, 25 bp, Artificial
  probe
  misc_feature (1)..(25): SEQ ID NO: 7318; WAN024BSJ_at; Start 4; Stop 28
gtgcatgtccagacctactattcaa

SEQ ID NO: 92639 - DNA, 25 bp, Artificial
  probe
  misc_feature (1)..(25): SEQ ID NO: 7318; WAN024BSJ_at; Start 74; Stop 98
aagaacattacaaagctggaaccga

SEQ ID NO: 92640 - DNA, 25 bp, Artificial
  probe
  misc_feature (1)..(25): SEQ ID NO: 7318; WAN024BSJ_at; Start 69; Stop 93
atataaagaacattacaaagctgga

SEQ ID NO: 92641 - DNA, 25 bp, Artificial
  probe
  misc_feature (1)..(25): SEQ ID NO: 7318; WAN024BSJ_at; Start 78; Stop 102
acattacaaagctggaaccgagcac

SEQ ID NO: 92642 - DNA, 25 bp, Artificial
  probe
  misc_feature (1)..(25): SEQ ID NO: 7318; WAN024BSJ_at; Start 34; Stop 58
tatgataagaatgaatacatggtct

SEQ ID NO: 92643 - DNA, 25 bp, Artificial
  probe
  misc_feature (1)..(25): SEQ ID NO: 7318; WAN024BSJ_at; Start 19; Stop 43
tactattcaataatctatgataaga

SEQ ID NO: 92644 - DNA, 25 bp, Artificial
  probe
  misc_feature (1)..(25): SEQ ID NO: 7318; WAN024BSJ_at; Start 33; Stop 57
ctatgataagaatgaatacatggtc

SEQ ID NO: 92645 - DNA, 25 bp, Artificial
  probe
  misc_feature (1)..(25): SEQ ID NO: 7318; WAN024BSJ_at; Start 42; Stop 66
gaatgaatacatggtcttttttacc

SEQ ID NO: 92646 - DNA, 25 bp, Artificial
  probe
  misc_feature (1)..(25): SEQ ID NO: 7318; WAN024BSJ_at; Start 61; Stop 85
tttaccaaatataaagaacattaca

SEQ ID NO: 92647 - DNA, 25 bp, Artificial
  probe
  misc_feature (1)..(25): SEQ ID NO: 7318; WAN024BSJ_at; Start 76; Stop 100
gaacattacaaagctggaaccgagc

SEQ ID NO: 92648 - DNA, 25 bp, Artificial
  probe
  misc_feature (1)..(25): SEQ ID NO: 7318; WAN024BSJ_at; Start 6; Stop 30
gcatgtccagacctactattcaata

SEQ ID NO: 92649 - DNA, 25 bp, Artificial
  probe
  misc_feature (1)..(25): SEQ ID NO: 7318; WAN024BSJ_at; Start 77; Stop 101
aacattacaaagctggaaccgagca

SEQ ID NO: 92650 - DNA, 25 bp, Artificial
  probe
  misc_feature (1)..(25): SEQ ID NO: 7318; WAN024BSJ_at; Start 49; Stop 73
tacatggtcttttttaccaaatata

SEQ ID NO: 92651 - DNA, 25 bp, Artificial
  probe
  misc_feature (1)..(25): SEQ ID NO: 7318; WAN024BSJ_at; Start 9; Stop 33
tgtccagacctactattcaataatc

SEQ ID NO: 92652 - DNA, 25 bp, Artificial
  probe
  misc_feature (1)..(25): SEQ ID NO: 7318; WAN024BSJ_at; Start 32; Stop 56
tctatgataagaatgaatacatggt

SEQ ID NO: 92653 - DNA, 25 bp, Artificial
  probe
  misc_feature (1)..(25): SEQ ID NO: 7318; WAN024BSJ_at; Start 65; Stop 89
ccaaatataaagaacattacaaagc

SEQ ID NO: 92654 - DNA, 25 bp, Artificial
  probe
  misc_feature (1)..(25): SEQ ID NO: 7318; WAN024BSJ_at; Start 75; Stop 99
agaacattacaaagctggaaccgag

SEQ ID NO: 92655 - DNA, 25 bp, Artificial
  probe
  misc_feature (1)..(25): SEQ ID NO: 7318; WAN024BSJ_at; Start 71; Stop 95
ataaagaacattacaaagctggaac

SEQ ID NO: 92656 - DNA, 25 bp, Artificial
  probe
  misc_feature (1)..(25): SEQ ID NO: 7318; WAN024BSJ_at; Start 72; Stop 96
taaagaacattacaaagctggaacc

SEQ ID NO: 92657 - DNA, 25 bp, Artificial
  probe
  misc_feature (1)..(25): SEQ ID NO: 7318; WAN024BSJ_at; Start 13; Stop 37
cagacctactattcaataatctatg

SEQ ID NO: 92658 - DNA, 25 bp, Artificial
  probe
  misc_feature (1)..(25): SEQ ID NO: 7318; WAN024BSJ_at; Start 1; Stop 25
gtggtgcatgtccagacctactatt

SEQ ID NO: 92659 - DNA, 25 bp, Artificial
  probe
  misc_feature (1)..(25): SEQ ID NO: 7318; WAN024BSJ_at; Start 36; Stop 60
tgataagaatgaatacatggtcttt

SEQ ID NO: 92660 - DNA, 25 bp, Artificial
  probe
  misc_feature (1)..(25): SEQ ID NO: 7318; WAN024BSJ_at; Start 73; Stop 97
aaagaacattacaaagctggaaccg

SEQ ID NO: 92661 - DNA, 25 bp, Artificial
  probe
  misc_feature (1)..(25): SEQ ID NO: 7318; WAN024BSJ_at; Start 5; Stop 29
tgcatgtccagacctactattcaat

SEQ ID NO: 92662 - DNA, 25 bp, Artificial
  probe
  misc_feature (1)..(25): SEQ ID NO: 7318; WAN024BSJ_at; Start 70; Stop 94
tataaagaacattacaaagctggaa

SEQ ID NO: 92663 - DNA, 25 bp, Artificial
  probe
  misc_feature (1)..(25): SEQ ID NO: 7318; WAN024BSJ_at; Start 43; Stop 67
aatgaatacatggtcttttttacca

SEQ ID NO: 92664 - DNA, 25 bp, Artificial
  probe
  misc_feature (1)..(25): SEQ ID NO: 7332; WAN024BSK_at; Start 22; Stop 46
ccagaagaaatagttgtaggtcgcg

SEQ ID NO: 92665 - DNA, 25 bp, Artificial
  probe
  misc_feature (1)..(25): SEQ ID NO: 7332; WAN024BSK_at; Start 58; Stop 82
gcgatatctcctgaagacaaacgag

SEQ ID NO: 92666 - DNA, 25 bp, Artificial
  probe
  misc_feature (1)..(25): SEQ ID NO: 7332; WAN024BSK_at; Start 89; Stop 113
atcaactatttttcgagctccccta

SEQ ID NO: 92667 - DNA, 25 bp, Artificial
  probe
  misc_feature (1)..(25): SEQ ID NO: 7332; WAN024BSK_at; Start 36; Stop 60
tgtaggtcgcgaaaatgacgaagcg

SEQ ID NO: 92668 - DNA, 25 bp, Artificial
  probe
  misc_feature (1)..(25): SEQ ID NO: 7332; WAN024BSK_at; Start 66; Stop 90
tcctgaagacaaacgagtcctaaat

SEQ ID NO: 92669 - DNA, 25 bp, Artificial
  probe
  misc_feature (1)..(25): SEQ ID NO: 7332; WAN024BSK_at; Start 64; Stop 88
tctcctgaagacaaacgagtcctaa

SEQ ID NO: 92670 - DNA, 25 bp, Artificial
  probe
  misc_feature (1)..(25): SEQ ID NO: 7332; WAN024BSK_at; Start 52; Stop 76
gacgaagcgatatctcctgaagaca

SEQ ID NO: 92671 - DNA, 25 bp, Artificial
  probe
  misc_feature (1)..(25): SEQ ID NO: 7332; WAN024BSK_at; Start 51; Stop 75
tgacgaagcgatatctcctgaagac

SEQ ID NO: 92672 - DNA, 25 bp, Artificial
  probe
  misc_feature (1)..(25): SEQ ID NO: 7332; WAN024BSK_at; Start 54; Stop 78
cgaagcgatatctcctgaagacaaa

SEQ ID NO: 92673 - DNA, 25 bp, Artificial
  probe
  misc_feature (1)..(25): SEQ ID NO: 7332; WAN024BSK_at; Start 9; Stop 33
cgcagttagtttaccagaagaaata

SEQ ID NO: 92674 - DNA, 25 bp, Artificial
  probe
  misc_feature (1)..(25): SEQ ID NO: 7332; WAN024BSK_at; Start 44; Stop 68
gcgaaaatgacgaagcgatatctcc

SEQ ID NO: 92675 - DNA, 25 bp, Artificial
  probe
  misc_feature (1)..(25): SEQ ID NO: 7332; WAN024BSK_at; Start 80; Stop 104
gagtcctaaatcaactatttttcga

SEQ ID NO: 92676 - DNA, 25 bp, Artificial
  probe
  misc_feature (1)..(25): SEQ ID NO: 7332; WAN024BSK_at; Start 38; Stop 62
taggtcgcgaaaatgacgaagcgat

SEQ ID NO: 92677 - DNA, 25 bp, Artificial
  probe
  misc_feature (1)..(25): SEQ ID NO: 7332; WAN024BSK_at; Start 30; Stop 54
aatagttgtaggtcgcgaaaatgac

SEQ ID NO: 92678 - DNA, 25 bp, Artificial
  probe
  misc_feature (1)..(25): SEQ ID NO: 7332; WAN024BSK_at; Start 5; Stop 29
tattcgcagttagtttaccagaaga

SEQ ID NO: 92679 - DNA, 25 bp, Artificial
  probe
  misc_feature (1)..(25): SEQ ID NO: 7332; WAN024BSK_at; Start 11; Stop 35
cagttagtttaccagaagaaatagt

SEQ ID NO: 92680 - DNA, 25 bp, Artificial
  probe
  misc_feature (1)..(25): SEQ ID NO: 7332; WAN024BSK_at; Start 73; Stop 97
gacaaacgagtcctaaatcaactat

SEQ ID NO: 92681 - DNA, 25 bp, Artificial
  probe
  misc_feature (1)..(25): SEQ ID NO: 7332; WAN024BSK_at; Start 2; Stop 26
tgttattcgcagttagtttaccaga

SEQ ID NO: 92682 - DNA, 25 bp, Artificial
  probe
  misc_feature (1)..(25): SEQ ID NO: 7332; WAN024BSK_at; Start 70; Stop 94
gaagacaaacgagtcctaaatcaac

SEQ ID NO: 92683 - DNA, 25 bp, Artificial
  probe
  misc_feature (1)..(25): SEQ ID NO: 7332; WAN024BSK_at; Start 95; Stop 119
tatttttcgagctcccctatcactt

SEQ ID NO: 92684 - DNA, 25 bp, Artificial
  probe
  misc_feature (1)..(25): SEQ ID NO: 7332; WAN024BSK_at; Start 7; Stop 31
ttcgcagttagtttaccagaagaaa

SEQ ID NO: 92685 - DNA, 25 bp, Artificial
  probe
  misc_feature (1)..(25): SEQ ID NO: 7332; WAN024BSK_at; Start 35; Stop 59
ttgtaggtcgcgaaaatgacgaagc

SEQ ID NO: 92686 - DNA, 25 bp, Artificial
  probe
  misc_feature (1)..(25): SEQ ID NO: 7332; WAN024BSK_at; Start 60; Stop 84
gatatctcctgaagacaaacgagtc

SEQ ID NO: 92687 - DNA, 25 bp, Artificial
  probe
  misc_feature (1)..(25): SEQ ID NO: 7332; WAN024BSK_at; Start 55; Stop 79
gaagcgatatctcctgaagacaaac

SEQ ID NO: 92688 - DNA, 25 bp, Artificial
  probe
  misc_feature (1)..(25): SEQ ID NO: 7332; WAN024BSK_at; Start 28; Stop 52
gaaatagttgtaggtcgcgaaaatg

SEQ ID NO: 92689 - DNA, 25 bp, Artificial
  probe
  misc_feature (1)..(25): SEQ ID NO: 7332; WAN024BSK_at; Start 40; Stop 64
ggtcgcgaaaatgacgaagcgatat

SEQ ID NO: 92690 - DNA, 25 bp, Artificial
  probe
  misc_feature (1)..(25): SEQ ID NO: 7332; WAN024BSK_at; Start 46; Stop 70
gaaaatgacgaagcgatatctcctg

SEQ ID NO: 92691 - DNA, 25 bp, Artificial
  probe
  misc_feature (1)..(25): SEQ ID NO: 7332; WAN024BSK_at; Start 62; Stop 86
tatctcctgaagacaaacgagtcct

SEQ ID NO: 92692 - DNA, 25 bp, Artificial
  probe
  misc_feature (1)..(25): SEQ ID NO: 7332; WAN024BSK_at; Start 49; Stop 73
aatgacgaagcgatatctcctgaag

SEQ ID NO: 92693 - DNA, 25 bp, Artificial
  probe
  misc_feature (1)..(25): SEQ ID NO: 7332; WAN024BSK_at; Start 42; Stop 66
tcgcgaaaatgacgaagcgatatct

SEQ ID NO: 92694 - DNA, 25 bp, Artificial
  probe
  misc_feature (1)..(25): SEQ ID NO: 7332; WAN024BSK_at; Start 1; Stop 25
gtgttattcgcagttagtttaccag

SEQ ID NO: 92695 - DNA, 25 bp, Artificial
  probe
  misc_feature (1)..(25): SEQ ID NO: 7332; WAN024BSK_at; Start 92; Stop 116
aactatttttcgagctcccctatca

SEQ ID NO: 92696 - DNA, 25 bp, Artificial
  probe
  misc_feature (1)..(25): SEQ ID NO: 7332; WAN024BSK_at; Start 86; Stop 110
taaatcaactatttttcgagctccc

SEQ ID NO: 92697 - DNA, 25 bp, Artificial
  probe
  misc_feature (1)..(25): SEQ ID NO: 7332; WAN024BSK_at; Start 25; Stop 49
gaagaaatagttgtaggtcgcgaaa

SEQ ID NO: 92698 - DNA, 25 bp, Artificial
  probe
  misc_feature (1)..(25): SEQ ID NO: 7384; WAN024BSL_at; Start 21; Stop 45
aattggaactaagatggaaatagac

SEQ ID NO: 92699 - DNA, 25 bp, Artificial
  probe
  misc_feature (1)..(25): SEQ ID NO: 7384; WAN024BSL_at; Start 50; Stop 74
aaggaaacgctgacatgctgcgaac

SEQ ID NO: 92700 - DNA, 25 bp, Artificial
  probe
  misc_feature (1)..(25): SEQ ID NO: 7384; WAN024BSL_at; Start 62; Stop 86
acatgctgcgaactattaagcgcta

SEQ ID NO: 92701 - DNA, 25 bp, Artificial
  probe
  misc_feature (1)..(25): SEQ ID NO: 7384; WAN024BSL_at; Start 65; Stop 89
tgctgcgaactattaagcgctatga

SEQ ID NO: 92702 - DNA, 25 bp, Artificial
  probe
  misc_feature (1)..(25): SEQ ID NO: 7384; WAN024BSL_at; Start 72; Stop 96
aactattaagcgctatgaaaattta

SEQ ID NO: 92703 - DNA, 25 bp, Artificial
  probe
  misc_feature (1)..(25): SEQ ID NO: 7384; WAN024BSL_at; Start 37; Stop 61
gaaatagacgatgaaggaaacgctg

SEQ ID NO: 92704 - DNA, 25 bp, Artificial
  probe
  misc_feature (1)..(25): SEQ ID NO: 7384; WAN024BSL_at; Start 61; Stop 85
gacatgctgcgaactattaagcgct

SEQ ID NO: 92705 - DNA, 25 bp, Artificial
  probe
  misc_feature (1)..(25): SEQ ID NO: 7384; WAN024BSL_at; Start 63; Stop 87
catgctgcgaactattaagcgctat

SEQ ID NO: 92706 - DNA, 25 bp, Artificial
  probe
  misc_feature (1)..(25): SEQ ID NO: 7384; WAN024BSL_at; Start 41; Stop 65
tagacgatgaaggaaacgctgacat

SEQ ID NO: 92707 - DNA, 25 bp, Artificial
  probe
  misc_feature (1)..(25): SEQ ID NO: 7384; WAN024BSL_at; Start 45; Stop 69
cgatgaaggaaacgctgacatgctg

SEQ ID NO: 92708 - DNA, 25 bp, Artificial
  probe
  misc_feature (1)..(25): SEQ ID NO: 7384; WAN024BSL_at; Start 26; Stop 50
gaactaagatggaaatagacgatga

SEQ ID NO: 92709 - DNA, 25 bp, Artificial
  probe
  misc_feature (1)..(25): SEQ ID NO: 7384; WAN024BSL_at; Start 49; Stop 73
gaaggaaacgctgacatgctgcgaa

SEQ ID NO: 92710 - DNA, 25 bp, Artificial
  probe
  misc_feature (1)..(25): SEQ ID NO: 7384; WAN024BSL_at; Start 59; Stop 83
ctgacatgctgcgaactattaagcg

SEQ ID NO: 92711 - DNA, 25 bp, Artificial
  probe
  misc_feature (1)..(25): SEQ ID NO: 7384; WAN024BSL_at; Start 53; Stop 77
gaaacgctgacatgctgcgaactat

SEQ ID NO: 92712 - DNA, 25 bp, Artificial
  probe
  misc_feature (1)..(25): SEQ ID NO: 7384; WAN024BSL_at; Start 60; Stop 84
tgacatgctgcgaactattaagcgc

SEQ ID NO: 92713 - DNA, 25 bp, Artificial
  probe
  misc_feature (1)..(25): SEQ ID NO: 7384; WAN024BSL_at; Start 14; Stop 38
ctaaggtaattggaactaagatgga

SEQ ID NO: 92714 - DNA, 25 bp, Artificial
  probe
  misc_feature (1)..(25): SEQ ID NO: 7384; WAN024BSL_at; Start 47; Stop 71
atgaaggaaacgctgacatgctgcg

SEQ ID NO: 92715 - DNA, 25 bp, Artificial
  probe
  misc_feature (1)..(25): SEQ ID NO: 7384; WAN024BSL_at; Start 57; Stop 81
cgctgacatgctgcgaactattaag

SEQ ID NO: 92716 - DNA, 25 bp, Artificial
  probe
  misc_feature (1)..(25): SEQ ID NO: 7384; WAN024BSL_at; Start 36; Stop 60
ggaaatagacgatgaaggaaacgct

SEQ ID NO: 92717 - DNA, 25 bp, Artificial
  probe
  misc_feature (1)..(25): SEQ ID NO: 7384; WAN024BSL_at; Start 68; Stop 92
tgcgaactattaagcgctatgaaaa

SEQ ID NO: 92718 - DNA, 25 bp, Artificial
  probe
  misc_feature (1)..(25): SEQ ID NO: 7384; WAN024BSL_at; Start 55; Stop 79
aacgctgacatgctgcgaactatta

SEQ ID NO: 92719 - DNA, 25 bp, Artificial
  probe
  misc_feature (1)..(25): SEQ ID NO: 7384; WAN024BSL_at; Start 25; Stop 49
ggaactaagatggaaatagacgatg

SEQ ID NO: 92720 - DNA, 25 bp, Artificial
  probe
  misc_feature (1)..(25): SEQ ID NO: 7384; WAN024BSL_at; Start 33; Stop 57
gatggaaatagacgatgaaggaaac

SEQ ID NO: 92721 - DNA, 25 bp, Artificial
  probe
  misc_feature (1)..(25): SEQ ID NO: 7384; WAN024BSL_at; Start 35; Stop 59
tggaaatagacgatgaaggaaacgc

SEQ ID NO: 92722 - DNA, 25 bp, Artificial
  probe
  misc_feature (1)..(25): SEQ ID NO: 7384; WAN024BSL_at; Start 48; Stop 72
tgaaggaaacgctgacatgctgcga

SEQ ID NO: 92723 - DNA, 25 bp, Artificial
  probe
  misc_feature (1)..(25): SEQ ID NO: 7384; WAN024BSL_at; Start 15; Stop 39
taaggtaattggaactaagatggaa

SEQ ID NO: 92724 - DNA, 25 bp, Artificial
  probe
  misc_feature (1)..(25): SEQ ID NO: 7384; WAN024BSL_at; Start 23; Stop 47
ttggaactaagatggaaatagacga

SEQ ID NO: 92725 - DNA, 25 bp, Artificial
  probe
  misc_feature (1)..(25): SEQ ID NO: 7384; WAN024BSL_at; Start 66; Stop 90
gctgcgaactattaagcgctatgaa

SEQ ID NO: 92726 - DNA, 25 bp, Artificial
  probe
  misc_feature (1)..(25): SEQ ID NO: 7384; WAN024BSL_at; Start 13; Stop 37
tctaaggtaattggaactaagatgg

SEQ ID NO: 92727 - DNA, 25 bp, Artificial
  probe
  misc_feature (1)..(25): SEQ ID NO: 7384; WAN024BSL_at; Start 30; Stop 54
taagatggaaatagacgatgaagga

SEQ ID NO: 92728 - DNA, 25 bp, Artificial
  probe
  misc_feature (1)..(25): SEQ ID NO: 7384; WAN024BSL_at; Start 39; Stop 63
aatagacgatgaaggaaacgctgac

SEQ ID NO: 92729 - DNA, 25 bp, Artificial
  probe
  misc_feature (1)..(25): SEQ ID NO: 7384; WAN024BSL_at; Start 69; Stop 93
gcgaactattaagcgctatgaaaat

SEQ ID NO: 92730 - DNA, 25 bp, Artificial
  probe
  misc_feature (1)..(25): SEQ ID NO: 7384; WAN024BSL_at; Start 43; Stop 67
gacgatgaaggaaacgctgacatgc

SEQ ID NO: 92731 - DNA, 25 bp, Artificial
  probe
  misc_feature (1)..(25): SEQ ID NO: 7384; WAN024BSL_at; Start 52; Stop 76
ggaaacgctgacatgctgcgaacta

SEQ ID NO: 92732 - DNA, 25 bp, Artificial
  probe
  misc_feature (1)..(25): SEQ ID NO: 6397; WAN024BSM_at; Start 342; Stop 366
tgtagtagaggctaagagtggaaac

SEQ ID NO: 92733 - DNA, 25 bp, Artificial
  probe
  misc_feature (1)..(25): SEQ ID NO: 6397; WAN024BSM_at; Start 67; Stop 91
cctcaagcaggaaaggcttttgaac

SEQ ID NO: 92734 - DNA, 25 bp, Artificial
  probe
  misc_feature (1)..(25): SEQ ID NO: 6397; WAN024BSM_at; Start 535; Stop 559
gcttggcgtgaaaaaggaactctta

SEQ ID NO: 92735 - DNA, 25 bp, Artificial
  probe
  misc_feature (1)..(25): SEQ ID NO: 6397; WAN024BSM_at; Start 201; Stop 225
tagcgcaatcgaatggacagttaga

SEQ ID NO: 92736 - DNA, 25 bp, Artificial
  probe
  misc_feature (1)..(25): SEQ ID NO: 6397; WAN024BSM_at; Start 218; Stop 242
cagttagattgaatggagaaaagca

SEQ ID NO: 92737 - DNA, 25 bp, Artificial
  probe
  misc_feature (1)..(25): SEQ ID NO: 6397; WAN024BSM_at; Start 482; Stop 506
atgagtcttatattgcaacgcttcc

SEQ ID NO: 92738 - DNA, 25 bp, Artificial
  probe
  misc_feature (1)..(25): SEQ ID NO: 6397; WAN024BSM_at; Start 97; Stop 121
gaagactgggcatttaaaggtggca

SEQ ID NO: 92739 - DNA, 25 bp, Artificial
  probe
  misc_feature (1)..(25): SEQ ID NO: 6397; WAN024BSM_at; Start 182; Stop 206
tgttagatttacctagtactagcgc

SEQ ID NO: 92740 - DNA, 25 bp, Artificial
  probe
  misc_feature (1)..(25): SEQ ID NO: 6397; WAN024BSM_at; Start 84; Stop 108
ttttgaacttaaagaagactgggca

SEQ ID NO: 92741 - DNA, 25 bp, Artificial
  probe
  misc_feature (1)..(25): SEQ ID NO: 6397; WAN024BSM_at; Start 241; Stop 265
caaaatactaacttcttagcggagg

SEQ ID NO: 92742 - DNA, 25 bp, Artificial
  probe
  misc_feature (1)..(25): SEQ ID NO: 6397; WAN024BSM_at; Start 467; Stop 491
catgggattccgtaaatgagtctta

SEQ ID NO: 92743 - DNA, 25 bp, Artificial
  probe
  misc_feature (1)..(25): SEQ ID NO: 6397; WAN024BSM_at; Start 228; Stop 252
gaatggagaaaagcaaaatactaac

SEQ ID NO: 92744 - DNA, 25 bp, Artificial
  probe
  misc_feature (1)..(25): SEQ ID NO: 6397; WAN024BSM_at; Start 111; Stop 135
taaaggtggcattcgatacgagaat

SEQ ID NO: 92745 - DNA, 25 bp, Artificial
  probe
  misc_feature (1)..(25): SEQ ID NO: 6397; WAN024BSM_at; Start 53; Stop 77
ttttattgactttacctcaagcagg

SEQ ID NO: 92746 - DNA, 25 bp, Artificial
  probe
  misc_feature (1)..(25): SEQ ID NO: 6397; WAN024BSM_at; Start 455; Stop 479
tcttagaaagttcatgggattccgt

SEQ ID NO: 92747 - DNA, 25 bp, Artificial
  probe
  misc_feature (1)..(25): SEQ ID NO: 6397; WAN024BSM_at; Start 423; Stop 447
gagtggctactttattctcgatggg

SEQ ID NO: 92748 - DNA, 25 bp, Artificial
  probe
  misc_feature (1)..(25): SEQ ID NO: 6397; WAN024BSM_at; Start 265; Stop 289
gaaagaactgtatctaaaactgaag

SEQ ID NO: 92749 - DNA, 25 bp, Artificial
  probe
  misc_feature (1)..(25): SEQ ID NO: 6397; WAN024BSM_at; Start 303; Stop 327
cttgcacttttatatcccctatgga

SEQ ID NO: 92750 - DNA, 25 bp, Artificial
  probe
  misc_feature (1)..(25): SEQ ID NO: 6397; WAN024BSM_at; Start 312; Stop 336
ttatatcccctatggatatcgtggg

SEQ ID NO: 92751 - DNA, 25 bp, Artificial
  probe
  misc_feature (1)..(25): SEQ ID NO: 6397; WAN024BSM_at; Start 362; Stop 386
gaaacgaagtgaagacttggtctac

SEQ ID NO: 92752 - DNA, 25 bp, Artificial
  probe
  misc_feature (1)..(25): SEQ ID NO: 6397; WAN024BSM_at; Start 410; Stop 434
cagattctgctaagagtggctactt

SEQ ID NO: 92753 - DNA, 25 bp, Artificial
  probe
  misc_feature (1)..(25): SEQ ID NO: 6397; WAN024BSM_at; Start 506; Stop 530
caactgtaacatcaggaaaaactgt

SEQ ID NO: 92754 - DNA, 25 bp, Artificial
  probe
  misc_feature (1)..(25): SEQ ID NO: 6397; WAN024BSM_at; Start 496; Stop 520
gcaacgcttccaactgtaacatcag

SEQ ID NO: 92755 - DNA, 25 bp, Artificial
  probe
  misc_feature (1)..(25): SEQ ID NO: 6397; WAN024BSM_at; Start 123; Stop 147
tcgatacgagaatgggaaagtcagc

SEQ ID NO: 92756 - DNA, 25 bp, Artificial
  probe
  misc_feature (1)..(25): SEQ ID NO: 6397; WAN024BSM_at; Start 397; Stop 421
gacgatgtttattcagattctgcta

SEQ ID NO: 92757 - DNA, 25 bp, Artificial
  probe
  misc_feature (1)..(25): SEQ ID NO: 6397; WAN024BSM_at; Start 137; Stop 161
ggaaagtcagcaaaattaataatgg

SEQ ID NO: 92758 - DNA, 25 bp, Artificial
  probe
  misc_feature (1)..(25): SEQ ID NO: 6397; WAN024BSM_at; Start 191; Stop 215
tacctagtactagcgcaatcgaatg

SEQ ID NO: 92759 - DNA, 25 bp, Artificial
  probe
  misc_feature (1)..(25): SEQ ID NO: 6397; WAN024BSM_at; Start 375; Stop 399
gacttggtctactaaggtagttgac

SEQ ID NO: 92760 - DNA, 25 bp, Artificial
  probe
  misc_feature (1)..(25): SEQ ID NO: 6397; WAN024BSM_at; Start 353; Stop 377
ctaagagtggaaacgaagtgaagac

SEQ ID NO: 92761 - DNA, 25 bp, Artificial
  probe
  misc_feature (1)..(25): SEQ ID NO: 6397; WAN024BSM_at; Start 288; Stop 312
agataagggacgtttcttgcacttt

SEQ ID NO: 92762 - DNA, 25 bp, Artificial
  probe
  misc_feature (1)..(25): SEQ ID NO: 6397; WAN024BSM_at; Start 23; Stop 47
cactatttagtttgtcttttgcagg

SEQ ID NO: 92763 - DNA, 25 bp, Artificial
  probe
  misc_feature (1)..(25): SEQ ID NO: 6397; WAN024BSM_at; Start 254; Stop 278
tcttagcggaggaaagaactgtatc

SEQ ID NO: 92764 - DNA, 25 bp, Artificial
  probe
  misc_feature (1)..(25): SEQ ID NO: 6397; WAN024BSM_at; Start 275; Stop 299
tatctaaaactgaagataagggacg

SEQ ID NO: 92765 - DNA, 25 bp, Artificial
  probe
  misc_feature (1)..(25): SEQ ID NO: 6397; WAN024BSM_at; Start 521; Stop 545
gaaaaactgttgttgcttggcgtga

SEQ ID NO: 92766 - DNA, 25 bp, Artificial
  probe
  misc_feature (1)..(25): SEQ ID NO: 7487; WAN024BSN_at; Start 1; Stop 25
ttgatagaggtagccacggtgcgaa

SEQ ID NO: 92767 - DNA, 25 bp, Artificial
  probe
  misc_feature (1)..(25): SEQ ID NO: 7487; WAN024BSN_at; Start 27; Stop 51
ccgtgtcattgtgctagcatctagg

SEQ ID NO: 92768 - DNA, 25 bp, Artificial
  probe
  misc_feature (1)..(25): SEQ ID NO: 7487; WAN024BSN_at; Start 15; Stop 39
cacggtgcgaatccgtgtcattgtg

SEQ ID NO: 92769 - DNA, 25 bp, Artificial
  probe
  misc_feature (1)..(25): SEQ ID NO: 7487; WAN024BSN_at; Start 36; Stop 60
tgtgctagcatctaggaaactaggt

SEQ ID NO: 92770 - DNA, 25 bp, Artificial
  probe
  misc_feature (1)..(25): SEQ ID NO: 7487; WAN024BSN_at; Start 26; Stop 50
tccgtgtcattgtgctagcatctag

SEQ ID NO: 92771 - DNA, 25 bp, Artificial
  probe
  misc_feature (1)..(25): SEQ ID NO: 7487; WAN024BSN_at; Start 37; Stop 61
gtgctagcatctaggaaactaggtg

SEQ ID NO: 92772 - DNA, 25 bp, Artificial
  probe
  misc_feature (1)..(25): SEQ ID NO: 7487; WAN024BSN_at; Start 38; Stop 62
tgctagcatctaggaaactaggtgc

SEQ ID NO: 92773 - DNA, 25 bp, Artificial
  probe
  misc_feature (1)..(25): SEQ ID NO: 7487; WAN024BSN_at; Start 40; Stop 64
ctagcatctaggaaactaggtgctt

SEQ ID NO: 92774 - DNA, 25 bp, Artificial
  probe
  misc_feature (1)..(25): SEQ ID NO: 7487; WAN024BSN_at; Start 39; Stop 63
gctagcatctaggaaactaggtgct

SEQ ID NO: 92775 - DNA, 25 bp, Artificial
  probe
  misc_feature (1)..(25): SEQ ID NO: 7487; WAN024BSN_at; Start 23; Stop 47
gaatccgtgtcattgtgctagcatc

SEQ ID NO: 92776 - DNA, 25 bp, Artificial
  probe
  misc_feature (1)..(25): SEQ ID NO: 7487; WAN024BSN_at; Start 14; Stop 38
ccacggtgcgaatccgtgtcattgt

SEQ ID NO: 92777 - DNA, 25 bp, Artificial
  probe
  misc_feature (1)..(25): SEQ ID NO: 7487; WAN024BSN_at; Start 41; Stop 65
tagcatctaggaaactaggtgcttt

SEQ ID NO: 92778 - DNA, 25 bp, Artificial
  probe
  misc_feature (1)..(25): SEQ ID NO: 7487; WAN024BSN_at; Start 32; Stop 56
tcattgtgctagcatctaggaaact

SEQ ID NO: 92779 - DNA, 25 bp, Artificial
  probe
  misc_feature (1)..(25): SEQ ID NO: 7487; WAN024BSN_at; Start 19; Stop 43
gtgcgaatccgtgtcattgtgctag

SEQ ID NO: 92780 - DNA, 25 bp, Artificial
  probe
  misc_feature (1)..(25): SEQ ID NO: 7487; WAN024BSN_at; Start 29; Stop 53
gtgtcattgtgctagcatctaggaa

SEQ ID NO: 92781 - DNA, 25 bp, Artificial
  probe
  misc_feature (1)..(25): SEQ ID NO: 7487; WAN024BSN_at; Start 30; Stop 54
tgtcattgtgctagcatctaggaaa

SEQ ID NO: 92782 - DNA, 25 bp, Artificial
  probe
  misc_feature (1)..(25): SEQ ID NO: 7487; WAN024BSN_at; Start 43; Stop 67
gcatctaggaaactaggtgcttttt

SEQ ID NO: 92783 - DNA, 25 bp, Artificial
  probe
  misc_feature (1)..(25): SEQ ID NO: 7487; WAN024BSN_at; Start 17; Stop 41
cggtgcgaatccgtgtcattgtgct

SEQ ID NO: 92784 - DNA, 25 bp, Artificial
  probe
  misc_feature (1)..(25): SEQ ID NO: 7487; WAN024BSN_at; Start 33; Stop 57
cattgtgctagcatctaggaaacta

SEQ ID NO: 92785 - DNA, 25 bp, Artificial
  probe
  misc_feature (1)..(25): SEQ ID NO: 7487; WAN024BSN_at; Start 8; Stop 32
aggtagccacggtgcgaatccgtgt

SEQ ID NO: 92786 - DNA, 25 bp, Artificial
  probe
  misc_feature (1)..(25): SEQ ID NO: 7487; WAN024BSN_at; Start 13; Stop 37
gccacggtgcgaatccgtgtcattg

SEQ ID NO: 92787 - DNA, 25 bp, Artificial
  probe
  misc_feature (1)..(25): SEQ ID NO: 7487; WAN024BSN_at; Start 44; Stop 68
catctaggaaactaggtgcttttta

SEQ ID NO: 92788 - DNA, 25 bp, Artificial
  probe
  misc_feature (1)..(25): SEQ ID NO: 7487; WAN024BSN_at; Start 21; Stop 45
gcgaatccgtgtcattgtgctagca

SEQ ID NO: 92789 - DNA, 25 bp, Artificial
  probe
  misc_feature (1)..(25): SEQ ID NO: 7487; WAN024BSN_at; Start 18; Stop 42
ggtgcgaatccgtgtcattgtgcta

SEQ ID NO: 92790 - DNA, 25 bp, Artificial
  probe
  misc_feature (1)..(25): SEQ ID NO: 7487; WAN024BSN_at; Start 20; Stop 44
tgcgaatccgtgtcattgtgctagc

SEQ ID NO: 92791 - DNA, 25 bp, Artificial
  probe
  misc_feature (1)..(25): SEQ ID NO: 7487; WAN024BSN_at; Start 35; Stop 59
ttgtgctagcatctaggaaactagg

SEQ ID NO: 92792 - DNA, 25 bp, Artificial
  probe
  misc_feature (1)..(25): SEQ ID NO: 7487; WAN024BSN_at; Start 22; Stop 46
cgaatccgtgtcattgtgctagcat

SEQ ID NO: 92793 - DNA, 25 bp, Artificial
  probe
  misc_feature (1)..(25): SEQ ID NO: 7487; WAN024BSN_at; Start 11; Stop 35
tagccacggtgcgaatccgtgtcat

SEQ ID NO: 92794 - DNA, 25 bp, Artificial
  probe
  misc_feature (1)..(25): SEQ ID NO: 7487; WAN024BSN_at; Start 24; Stop 48
aatccgtgtcattgtgctagcatct

SEQ ID NO: 92795 - DNA, 25 bp, Artificial
  probe
  misc_feature (1)..(25): SEQ ID NO: 7487; WAN024BSN_at; Start 28; Stop 52
cgtgtcattgtgctagcatctagga

SEQ ID NO: 92796 - DNA, 25 bp, Artificial
  probe
  misc_feature (1)..(25): SEQ ID NO: 7487; WAN024BSN_at; Start 25; Stop 49
atccgtgtcattgtgctagcatcta

SEQ ID NO: 92797 - DNA, 25 bp, Artificial
  probe
  misc_feature (1)..(25): SEQ ID NO: 7487; WAN024BSN_at; Start 4; Stop 28
atagaggtagccacggtgcgaatcc

SEQ ID NO: 92798 - DNA, 25 bp, Artificial
  probe
  misc_feature (1)..(25): SEQ ID NO: 7487; WAN024BSN_at; Start 31; Stop 55
gtcattgtgctagcatctaggaaac

SEQ ID NO: 92799 - DNA, 25 bp, Artificial
  probe
  misc_feature (1)..(25): SEQ ID NO: 7487; WAN024BSN_at; Start 9; Stop 33
ggtagccacggtgcgaatccgtgtc

SEQ ID NO: 92800 - DNA, 25 bp, Artificial
  probe
  misc_feature (1)..(25): SEQ ID NO: 6872; WAN024BSO_at; Start 277; Stop 301
tggcatttagcgtacctacttgggt

SEQ ID NO: 92801 - DNA, 25 bp, Artificial
  probe
  misc_feature (1)..(25): SEQ ID NO: 6872; WAN024BSO_at; Start 664; Stop 688
gcacaaagtgtaaaaagaagtcact

SEQ ID NO: 92802 - DNA, 25 bp, Artificial
  probe
  misc_feature (1)..(25): SEQ ID NO: 6872; WAN024BSO_at; Start 235; Stop 259
tacttggcaagtgacccggatagag

SEQ ID NO: 92803 - DNA, 25 bp, Artificial
  probe
  misc_feature (1)..(25): SEQ ID NO: 6872; WAN024BSO_at; Start 592; Stop 616
tttaaaaaagctcgcaagaaattca

SEQ ID NO: 92804 - DNA, 25 bp, Artificial
  probe
  misc_feature (1)..(25): SEQ ID NO: 6872; WAN024BSO_at; Start 223; Stop 247
gctcaaaaagtttacttggcaagtg

SEQ ID NO: 92805 - DNA, 25 bp, Artificial
  probe
  misc_feature (1)..(25): SEQ ID NO: 6872; WAN024BSO_at; Start 265; Stop 289
gaagcgattgcttggcatttagcgt

SEQ ID NO: 92806 - DNA, 25 bp, Artificial
  probe
  misc_feature (1)..(25): SEQ ID NO: 6872; WAN024BSO_at; Start 154; Stop 178
gaaccccattatatttctatacgcg

SEQ ID NO: 92807 - DNA, 25 bp, Artificial
  probe
  misc_feature (1)..(25): SEQ ID NO: 6872; WAN024BSO_at; Start 34; Stop 58
cctgcaaaagccaagacaattgaga

SEQ ID NO: 92808 - DNA, 25 bp, Artificial
  probe
  misc_feature (1)..(25): SEQ ID NO: 6872; WAN024BSO_at; Start 171; Stop 195
tatacgcggaaaaggcgatgtcatc

SEQ ID NO: 92809 - DNA, 25 bp, Artificial
  probe
  misc_feature (1)..(25): SEQ ID NO: 6872; WAN024BSO_at; Start 356; Stop 380
tcaaagcagcttttaaggaaccaag

SEQ ID NO: 92810 - DNA, 25 bp, Artificial
  probe
  misc_feature (1)..(25): SEQ ID NO: 6872; WAN024BSO_at; Start 528; Stop 552
tattgaccgtgaaaaagagatccga

SEQ ID NO: 92811 - DNA, 25 bp, Artificial
  probe
  misc_feature (1)..(25): SEQ ID NO: 6872; WAN024BSO_at; Start 462; Stop 486
tctctggcgtaaggtcaagaaaggg

SEQ ID NO: 92812 - DNA, 25 bp, Artificial
  probe
  misc_feature (1)..(25): SEQ ID NO: 6872; WAN024BSO_at; Start 341; Stop 365
tcacaaaagacgcagtcaaagcagc

SEQ ID NO: 92813 - DNA, 25 bp, Artificial
  probe
  misc_feature (1)..(25): SEQ ID NO: 6872; WAN024BSO_at; Start 332; Stop 356
tcaatgaaatcacaaaagacgcagt

SEQ ID NO: 92814 - DNA, 25 bp, Artificial
  probe
  misc_feature (1)..(25): SEQ ID NO: 6872; WAN024BSO_at; Start 291; Stop 315
cctacttgggttggatctgaaagaa

SEQ ID NO: 92815 - DNA, 25 bp, Artificial
  probe
  misc_feature (1)..(25): SEQ ID NO: 6872; WAN024BSO_at; Start 249; Stop 273
cccggatagagaaggagaagcgatt

SEQ ID NO: 92816 - DNA, 25 bp, Artificial
  probe
  misc_feature (1)..(25): SEQ ID NO: 6872; WAN024BSO_at; Start 195; Stop 219
caaaagcctgaaagccgcagcaaaa

SEQ ID NO: 92817 - DNA, 25 bp, Artificial
  probe
  misc_feature (1)..(25): SEQ ID NO: 6872; WAN024BSO_at; Start 544; Stop 568
gagatccgagaatttgttccagaag

SEQ ID NO: 92818 - DNA, 25 bp, Artificial
  probe
  misc_feature (1)..(25): SEQ ID NO: 6872; WAN024BSO_at; Start 75; Stop 99
ctataaagtaatggccagtgttggc

SEQ ID NO: 92819 - DNA, 25 bp, Artificial
  probe
  misc_feature (1)..(25): SEQ ID NO: 6872; WAN024BSO_at; Start 187; Stop 211
gatgtcatcaaaagcctgaaagccg

SEQ ID NO: 92820 - DNA, 25 bp, Artificial
  probe
  misc_feature (1)..(25): SEQ ID NO: 6872; WAN024BSO_at; Start 21; Stop 45
gattgtagaatcacctgcaaaagcc

SEQ ID NO: 92821 - DNA, 25 bp, Artificial
  probe
  misc_feature (1)..(25): SEQ ID NO: 6872; WAN024BSO_at; Start 563; Stop 587
cagaagaatattggagcatcgacgg

SEQ ID NO: 92822 - DNA, 25 bp, Artificial
  probe
  misc_feature (1)..(25): SEQ ID NO: 6872; WAN024BSO_at; Start 93; Stop 117
tgttggccatataagagatttaccg

SEQ ID NO: 92823 - DNA, 25 bp, Artificial
  probe
  misc_feature (1)..(25): SEQ ID NO: 6872; WAN024BSO_at; Start 493; Stop 517
gcaggacgtgtccaatctgtcgctt

SEQ ID NO: 92824 - DNA, 25 bp, Artificial
  probe
  misc_feature (1)..(25): SEQ ID NO: 6872; WAN024BSO_at; Start 367; Stop 391
tttaaggaaccaagaacgatcgatg

SEQ ID NO: 92825 - DNA, 25 bp, Artificial
  probe
  misc_feature (1)..(25): SEQ ID NO: 6872; WAN024BSO_at; Start 450; Stop 474
gatcagtcctattctctggcgtaag

SEQ ID NO: 92826 - DNA, 25 bp, Artificial
  probe
  misc_feature (1)..(25): SEQ ID NO: 6872; WAN024BSO_at; Start 412; Stop 436
caagctcgtcgtaccttagacagaa

SEQ ID NO: 92827 - DNA, 25 bp, Artificial
  probe
  misc_feature (1)..(25): SEQ ID NO: 6872; WAN024BSO_at; Start 420; Stop 444
tcgtaccttagacagaatcgttggt

SEQ ID NO: 92828 - DNA, 25 bp, Artificial
  probe
  misc_feature (1)..(25): SEQ ID NO: 6872; WAN024BSO_at; Start 434; Stop 458
gaatcgttggttattcgatcagtcc

SEQ ID NO: 92829 - DNA, 25 bp, Artificial
  probe
  misc_feature (1)..(25): SEQ ID NO: 6872; WAN024BSO_at; Start 649; Stop 673
aagaaattaccagatgcacaaagtg

SEQ ID NO: 92830 - DNA, 25 bp, Artificial
  probe
  misc_feature (1)..(25): SEQ ID NO: 6872; WAN024BSO_at; Start 398; Stop 422
tagtagatgcacagcaagctcgtcg

SEQ ID NO: 92831 - DNA, 25 bp, Artificial
  probe
  misc_feature (1)..(25): SEQ ID NO: 6872; WAN024BSO_at; Start 48; Stop 72
gacaattgagaaatatcttggacga

SEQ ID NO: 92832 - DNA, 25 bp, Artificial
  probe
  misc_feature (1)..(25): SEQ ID NO: 6872; WAN024BSO_at; Start 383; Stop 407
cgatcgatgtagatttagtagatgc

SEQ ID NO: 92833 - DNA, 25 bp, Artificial
  probe
  misc_feature (1)..(25): SEQ ID NO: 6872; WAN024BSO_at; Start 477; Stop 501
caagaaagggttaagtgcaggacgt

SEQ ID NO: 92834 - DNA, 25 bp, Artificial
  probe
  misc_feature (1)..(25): SEQ ID NO: 6749; WAN024BSP_at; Start 48; Stop 72
ctttgagaccgtcaaaacgagagtg

SEQ ID NO: 92835 - DNA, 25 bp, Artificial
  probe
  misc_feature (1)..(25): SEQ ID NO: 6749; WAN024BSP_at; Start 172; Stop 196
gaaaaactatgtaatggtgaagacc

SEQ ID NO: 92836 - DNA, 25 bp, Artificial
  probe
  misc_feature (1)..(25): SEQ ID NO: 6749; WAN024BSP_at; Start 76; Stop 100
tcagattttgaaagctatttgaagc

SEQ ID NO: 92837 - DNA, 25 bp, Artificial
  probe
  misc_feature (1)..(25): SEQ ID NO: 6749; WAN024BSP_at; Start 11; Stop 35
ggatatcagtcaattatgaaattac

SEQ ID NO: 92838 - DNA, 25 bp, Artificial
  probe
  misc_feature (1)..(25): SEQ ID NO: 6749; WAN024BSP_at; Start 204; Stop 228
tttaagtaaagaaataaggcatcaa

SEQ ID NO: 92839 - DNA, 25 bp, Artificial
  probe
  misc_feature (1)..(25): SEQ ID NO: 6749; WAN024BSP_at; Start 43; Stop 67
gaagactttgagaccgtcaaaacga

SEQ ID NO: 92840 - DNA, 25 bp, Artificial
  probe
  misc_feature (1)..(25): SEQ ID NO: 6749; WAN024BSP_at; Start 35; Stop 59
ctgaagacgaagactttgagaccgt

SEQ ID NO: 92841 - DNA, 25 bp, Artificial
  probe
  misc_feature (1)..(25): SEQ ID NO: 6749; WAN024BSP_at; Start 37; Stop 61
gaagacgaagactttgagaccgtca

SEQ ID NO: 92842 - DNA, 25 bp, Artificial
  probe
  misc_feature (1)..(25): SEQ ID NO: 6749; WAN024BSP_at; Start 222; Stop 246
gcatcaaatccaagataggaattcc

SEQ ID NO: 92843 - DNA, 25 bp, Artificial
  probe
  misc_feature (1)..(25): SEQ ID NO: 6749; WAN024BSP_at; Start 123; Stop 147
aagtctcaagaaagttattaagtct

SEQ ID NO: 92844 - DNA, 25 bp, Artificial
  probe
  misc_feature (1)..(25): SEQ ID NO: 6749; WAN024BSP_at; Start 150; Stop 174
tacctttagtaaactcattggagaa

SEQ ID NO: 92845 - DNA, 25 bp, Artificial
  probe
  misc_feature (1)..(25): SEQ ID NO: 6749; WAN024BSP_at; Start 106; Stop 130
aatggcaagtttgaagaaagtctca

SEQ ID NO: 92846 - DNA, 25 bp, Artificial
  probe
  misc_feature (1)..(25): SEQ ID NO: 6749; WAN024BSP_at; Start 50; Stop 74
ttgagaccgtcaaaacgagagtgat

SEQ ID NO: 92847 - DNA, 25 bp, Artificial
  probe
  misc_feature (1)..(25): SEQ ID NO: 6749; WAN024BSP_at; Start 2; Stop 26
tgctatattggatatcagtcaatta

SEQ ID NO: 92848 - DNA, 25 bp, Artificial
  probe
  misc_feature (1)..(25): SEQ ID NO: 6749; WAN024BSP_at; Start 28; Stop 52
gaaattactgaagacgaagactttg

SEQ ID NO: 92849 - DNA, 25 bp, Artificial
  probe
  misc_feature (1)..(25): SEQ ID NO: 6749; WAN024BSP_at; Start 96; Stop 120
gaagcttctaaatggcaagtttgaa

SEQ ID NO: 92850 - DNA, 25 bp, Artificial
  probe
  misc_feature (1)..(25): SEQ ID NO: 6749; WAN024BSP_at; Start 214; Stop 238
gaaataaggcatcaaatccaagata

SEQ ID NO: 92851 - DNA, 25 bp, Artificial
  probe
  misc_feature (1)..(25): SEQ ID NO: 6749; WAN024BSP_at; Start 103; Stop 127
ctaaatggcaagtttgaagaaagtc

SEQ ID NO: 92852 - DNA, 25 bp, Artificial
  probe
  misc_feature (1)..(25): SEQ ID NO: 6749; WAN024BSP_at; Start 159; Stop 183
taaactcattggagaaaaactatgt

SEQ ID NO: 92853 - DNA, 25 bp, Artificial
  probe
  misc_feature (1)..(25): SEQ ID NO: 6749; WAN024BSP_at; Start 40; Stop 64
gacgaagactttgagaccgtcaaaa

SEQ ID NO: 92854 - DNA, 25 bp, Artificial
  probe
  misc_feature (1)..(25): SEQ ID NO: 6749; WAN024BSP_at; Start 56; Stop 80
ccgtcaaaacgagagtgatatcaga

SEQ ID NO: 92855 - DNA, 25 bp, Artificial
  probe
  misc_feature (1)..(25): SEQ ID NO: 6749; WAN024BSP_at; Start 209; Stop 233
gtaaagaaataaggcatcaaatcca

SEQ ID NO: 92856 - DNA, 25 bp, Artificial
  probe
  misc_feature (1)..(25): SEQ ID NO: 6749; WAN024BSP_at; Start 33; Stop 57
tactgaagacgaagactttgagacc

SEQ ID NO: 92857 - DNA, 25 bp, Artificial
  probe
  misc_feature (1)..(25): SEQ ID NO: 6749; WAN024BSP_at; Start 54; Stop 78
gaccgtcaaaacgagagtgatatca

SEQ ID NO: 92858 - DNA, 25 bp, Artificial
  probe
  misc_feature (1)..(25): SEQ ID NO: 6749; WAN024BSP_at; Start 117; Stop 141
tgaagaaagtctcaagaaagttatt

SEQ ID NO: 92859 - DNA, 25 bp, Artificial
  probe
  misc_feature (1)..(25): SEQ ID NO: 6749; WAN024BSP_at; Start 89; Stop 113
gctatttgaagcttctaaatggcaa

SEQ ID NO: 92860 - DNA, 25 bp, Artificial
  probe
  misc_feature (1)..(25): SEQ ID NO: 6749; WAN024BSP_at; Start 110; Stop 134
gcaagtttgaagaaagtctcaagaa

SEQ ID NO: 92861 - DNA, 25 bp, Artificial
  probe
  misc_feature (1)..(25): SEQ ID NO: 6749; WAN024BSP_at; Start 174; Stop 198
aaaactatgtaatggtgaagaccta

SEQ ID NO: 92862 - DNA, 25 bp, Artificial
  probe
  misc_feature (1)..(25): SEQ ID NO: 6749; WAN024BSP_at; Start 46; Stop 70
gactttgagaccgtcaaaacgagag

SEQ ID NO: 92863 - DNA, 25 bp, Artificial
  probe
  misc_feature (1)..(25): SEQ ID NO: 6749; WAN024BSP_at; Start 59; Stop 83
tcaaaacgagagtgatatcagattt

SEQ ID NO: 92864 - DNA, 25 bp, Artificial
  probe
  misc_feature (1)..(25): SEQ ID NO: 6749; WAN024BSP_at; Start 25; Stop 49
tatgaaattactgaagacgaagact

SEQ ID NO: 92865 - DNA, 25 bp, Artificial
  probe
  misc_feature (1)..(25): SEQ ID NO: 6749; WAN024BSP_at; Start 218; Stop 242
taaggcatcaaatccaagataggaa

SEQ ID NO: 92866 - DNA, 25 bp, Artificial
  probe
  misc_feature (1)..(25): SEQ ID NO: 6749; WAN024BSP_at; Start 66; Stop 90
gagagtgatatcagattttgaaagc

SEQ ID NO: 92867 - DNA, 25 bp, Artificial
  probe
  misc_feature (1)..(25): SEQ ID NO: 6749; WAN024BSP_at; Start 179; Stop 203
tatgtaatggtgaagacctaaaaaa

SEQ ID NO: 92868 - DNA, 25 bp, Artificial
  probe
  misc_feature (1)..(25): SEQ ID NO: 6610; WAN024BSQ_at; Start 450; Stop 474
tgcctactataaaaaattgtttgca

SEQ ID NO: 92869 - DNA, 25 bp, Artificial
  probe
  misc_feature (1)..(25): SEQ ID NO: 6610; WAN024BSQ_at; Start 309; Stop 333
catggaaattgggacgttaacacct

SEQ ID NO: 92870 - DNA, 25 bp, Artificial
  probe
  misc_feature (1)..(25): SEQ ID NO: 6610; WAN024BSQ_at; Start 180; Stop 204
cataacaacttttttcaaggtatct

SEQ ID NO: 92871 - DNA, 25 bp, Artificial
  probe
  misc_feature (1)..(25): SEQ ID NO: 6610; WAN024BSQ_at; Start 402; Stop 426
tatgataaggcaggtaaggatgagc

SEQ ID NO: 92872 - DNA, 25 bp, Artificial
  probe
  misc_feature (1)..(25): SEQ ID NO: 6610; WAN024BSQ_at; Start 259; Stop 283
gaatggcgagaaattgcaaggcaaa

SEQ ID NO: 92873 - DNA, 25 bp, Artificial
  probe
  misc_feature (1)..(25): SEQ ID NO: 6610; WAN024BSQ_at; Start 422; Stop 446
tgagctatgttattaaaatggtcgc

SEQ ID NO: 92874 - DNA, 25 bp, Artificial
  probe
  misc_feature (1)..(25): SEQ ID NO: 6610; WAN024BSQ_at; Start 323; Stop 347
cgttaacacctagattatatttaga

SEQ ID NO: 92875 - DNA, 25 bp, Artificial
  probe
  misc_feature (1)..(25): SEQ ID NO: 6610; WAN024BSQ_at; Start 216; Stop 240
gattgaaaaagcctataacgagaca

SEQ ID NO: 92876 - DNA, 25 bp, Artificial
  probe
  misc_feature (1)..(25): SEQ ID NO: 6610; WAN024BSQ_at; Start 194; Stop 218
tcaaggtatcttcttcaagcgtgat

SEQ ID NO: 92877 - DNA, 25 bp, Artificial
  probe
  misc_feature (1)..(25): SEQ ID NO: 6610; WAN024BSQ_at; Start 124; Stop 148
gaatcaatcatcactaataagttag

SEQ ID NO: 92878 - DNA, 25 bp, Artificial
  probe
  misc_feature (1)..(25): SEQ ID NO: 6610; WAN024BSQ_at; Start 2; Stop 26
tgagtcgtacttatataaatataag

SEQ ID NO: 92879 - DNA, 25 bp, Artificial
  probe
  misc_feature (1)..(25): SEQ ID NO: 6610; WAN024BSQ_at; Start 317; Stop 341
ttgggacgttaacacctagattata

SEQ ID NO: 92880 - DNA, 25 bp, Artificial
  probe
  misc_feature (1)..(25): SEQ ID NO: 6610; WAN024BSQ_at; Start 205; Stop 229
tcttcaagcgtgattgaaaaagcct

SEQ ID NO: 92881 - DNA, 25 bp, Artificial
  probe
  misc_feature (1)..(25): SEQ ID NO: 6610; WAN024BSQ_at; Start 242; Stop 266
aaaattacactacttcagaatggcg

SEQ ID NO: 92882 - DNA, 25 bp, Artificial
  probe
  misc_feature (1)..(25): SEQ ID NO: 6610; WAN024BSQ_at; Start 28; Stop 52
cttgcatacgaaaccaagtattggt

SEQ ID NO: 92883 - DNA, 25 bp, Artificial
  probe
  misc_feature (1)..(25): SEQ ID NO: 6610; WAN024BSQ_at; Start 226; Stop 250
gcctataacgagacaaaaaattaca

SEQ ID NO: 92884 - DNA, 25 bp, Artificial
  probe
  misc_feature (1)..(25): SEQ ID NO: 6610; WAN024BSQ_at; Start 390; Stop 414
caaaagtgatgatatgataaggcag

SEQ ID NO: 92885 - DNA, 25 bp, Artificial
  probe
  misc_feature (1)..(25): SEQ ID NO: 6610; WAN024BSQ_at; Start 274; Stop 298
gcaaggcaaatgaatttggcaaaag

SEQ ID NO: 92886 - DNA, 25 bp, Artificial
  probe
  misc_feature (1)..(25): SEQ ID NO: 6610; WAN024BSQ_at; Start 441; Stop 465
ggtcgcatttgcctactataaaaaa

SEQ ID NO: 92887 - DNA, 25 bp, Artificial
  probe
  misc_feature (1)..(25): SEQ ID NO: 6610; WAN024BSQ_at; Start 357; Stop 381
tatttcagaattagagaagtatcaa

SEQ ID NO: 92888 - DNA, 25 bp, Artificial
  probe
  misc_feature (1)..(25): SEQ ID NO: 6610; WAN024BSQ_at; Start 432; Stop 456
tattaaaatggtcgcatttgcctac

SEQ ID NO: 92889 - DNA, 25 bp, Artificial
  probe
  misc_feature (1)..(25): SEQ ID NO: 6610; WAN024BSQ_at; Start 88; Stop 112
gatgctttaattaatgaacaagata

SEQ ID NO: 92890 - DNA, 25 bp, Artificial
  probe
  misc_feature (1)..(25): SEQ ID NO: 6610; WAN024BSQ_at; Start 113; Stop 137
tagaggagttagaatcaatcatcac

SEQ ID NO: 92891 - DNA, 25 bp, Artificial
  probe
  misc_feature (1)..(25): SEQ ID NO: 6610; WAN024BSQ_at; Start 289; Stop 313
ttggcaaaagttaagcaaaacatgg

SEQ ID NO: 92892 - DNA, 25 bp, Artificial
  probe
  misc_feature (1)..(25): SEQ ID NO: 6610; WAN024BSQ_at; Start 98; Stop 122
ttaatgaacaagatatagaggagtt

SEQ ID NO: 92893 - DNA, 25 bp, Artificial
  probe
  misc_feature (1)..(25): SEQ ID NO: 6610; WAN024BSQ_at; Start 247; Stop 271
tacactacttcagaatggcgagaaa

SEQ ID NO: 92894 - DNA, 25 bp, Artificial
  probe
  misc_feature (1)..(25): SEQ ID NO: 6610; WAN024BSQ_at; Start 19; Stop 43
aatataagacttgcatacgaaacca

SEQ ID NO: 92895 - DNA, 25 bp, Artificial
  probe
  misc_feature (1)..(25): SEQ ID NO: 6610; WAN024BSQ_at; Start 164; Stop 188
tattgggggctgtttccataacaac

SEQ ID NO: 92896 - DNA, 25 bp, Artificial
  probe
  misc_feature (1)..(25): SEQ ID NO: 6610; WAN024BSQ_at; Start 41; Stop 65
ccaagtattggttagaatgtataca

SEQ ID NO: 92897 - DNA, 25 bp, Artificial
  probe
  misc_feature (1)..(25): SEQ ID NO: 6610; WAN024BSQ_at; Start 407; Stop 431
taaggcaggtaaggatgagctatgt

SEQ ID NO: 92898 - DNA, 25 bp, Artificial
  probe
  misc_feature (1)..(25): SEQ ID NO: 6610; WAN024BSQ_at; Start 300; Stop 324
taagcaaaacatggaaattgggacg

SEQ ID NO: 92899 - DNA, 25 bp, Artificial
  probe
  misc_feature (1)..(25): SEQ ID NO: 6610; WAN024BSQ_at; Start 256; Stop 280
tcagaatggcgagaaattgcaaggc

SEQ ID NO: 92900 - DNA, 25 bp, Artificial
  probe
  misc_feature (1)..(25): SEQ ID NO: 6610; WAN024BSQ_at; Start 53; Stop 77
tagaatgtatacaagaagaggttca

SEQ ID NO: 92901 - DNA, 25 bp, Artificial
  probe
  misc_feature (1)..(25): SEQ ID NO: 6610; WAN024BSQ_at; Start 235; Stop 259
gagacaaaaaattacactacttcag

SEQ ID NO: 92902 - DNA, 25 bp, Artificial
  probe
  misc_feature (1)..(25): SEQ ID NO: 6716; WAN024BSR_at; Start 510; Stop 534
taattatttagtcaaggctctggca

SEQ ID NO: 92903 - DNA, 25 bp, Artificial
  probe
  misc_feature (1)..(25): SEQ ID NO: 6716; WAN024BSR_at; Start 42; Stop 66
cattatagatggagggaagcttaga

SEQ ID NO: 92904 - DNA, 25 bp, Artificial
  probe
  misc_feature (1)..(25): SEQ ID NO: 6716; WAN024BSR_at; Start 436; Stop 460
tcaaaagaaattcctaaaggcactg

SEQ ID NO: 92905 - DNA, 25 bp, Artificial
  probe
  misc_feature (1)..(25): SEQ ID NO: 6716; WAN024BSR_at; Start 308; Stop 332
ggaagacagggatatacttctttga

SEQ ID NO: 92906 - DNA, 25 bp, Artificial
  probe
  misc_feature (1)..(25): SEQ ID NO: 6716; WAN024BSR_at; Start 117; Stop 141
aacatcagactcaattactaaagaa

SEQ ID NO: 92907 - DNA, 25 bp, Artificial
  probe
  misc_feature (1)..(25): SEQ ID NO: 6716; WAN024BSR_at; Start 226; Stop 250
gatattttaaatgtatggaacacgc

SEQ ID NO: 92908 - DNA, 25 bp, Artificial
  probe
  misc_feature (1)..(25): SEQ ID NO: 6716; WAN024BSR_at; Start 485; Stop 509
gattagggttgaataggattaagta

SEQ ID NO: 92909 - DNA, 25 bp, Artificial
  probe
  misc_feature (1)..(25): SEQ ID NO: 6716; WAN024BSR_at; Start 447; Stop 471
tcctaaaggcactgatatgtattat

SEQ ID NO: 92910 - DNA, 25 bp, Artificial
  probe
  misc_feature (1)..(25): SEQ ID NO: 6716; WAN024BSR_at; Start 51; Stop 75
tggagggaagcttagaatgatttct

SEQ ID NO: 92911 - DNA, 25 bp, Artificial
  probe
  misc_feature (1)..(25): SEQ ID NO: 6716; WAN024BSR_at; Start 90; Stop 114
cttacatggcttgaggtacgaattc

SEQ ID NO: 92912 - DNA, 25 bp, Artificial
  probe
  misc_feature (1)..(25): SEQ ID NO: 6716; WAN024BSR_at; Start 300; Stop 324
tatagatgggaagacagggatatac

SEQ ID NO: 92913 - DNA, 25 bp, Artificial
  probe
  misc_feature (1)..(25): SEQ ID NO: 6716; WAN024BSR_at; Start 175; Stop 199
tctgatccagaaggaaagagtggaa

SEQ ID NO: 92914 - DNA, 25 bp, Artificial
  probe
  misc_feature (1)..(25): SEQ ID NO: 6716; WAN024BSR_at; Start 277; Stop 301
gggagtttaaaagcggatgatgtta

SEQ ID NO: 92915 - DNA, 25 bp, Artificial
  probe
  misc_feature (1)..(25): SEQ ID NO: 6716; WAN024BSR_at; Start 287; Stop 311
aagcggatgatgttatagatgggaa

SEQ ID NO: 92916 - DNA, 25 bp, Artificial
  probe
  misc_feature (1)..(25): SEQ ID NO: 6716; WAN024BSR_at; Start 528; Stop 552
tctggcaggcgcaatacagaaggat

SEQ ID NO: 92917 - DNA, 25 bp, Artificial
  probe
  misc_feature (1)..(25): SEQ ID NO: 6716; WAN024BSR_at; Start 354; Stop 378
tacggatgatgttatagaaaatgtt

SEQ ID NO: 92918 - DNA, 25 bp, Artificial
  probe
  misc_feature (1)..(25): SEQ ID NO: 6716; WAN024BSR_at; Start 150; Stop 174
aaaaatacgtcaagctttaagagat

SEQ ID NO: 92919 - DNA, 25 bp, Artificial
  probe
  misc_feature (1)..(25): SEQ ID NO: 6716; WAN024BSR_at; Start 83; Stop 107
gcccagacttacatggcttgaggta

SEQ ID NO: 92920 - DNA, 25 bp, Artificial
  probe
  misc_feature (1)..(25): SEQ ID NO: 6716; WAN024BSR_at; Start 380; Stop 404
aaattaatcacaaaagcttagtacg

SEQ ID NO: 92921 - DNA, 25 bp, Artificial
  probe
  misc_feature (1)..(25): SEQ ID NO: 6716; WAN024BSR_at; Start 75; Stop 99
taagttttgcccagacttacatggc

SEQ ID NO: 92922 - DNA, 25 bp, Artificial
  probe
  misc_feature (1)..(25): SEQ ID NO: 6716; WAN024BSR_at; Start 253; Stop 277
tgtagaacacgagattttataacgg

SEQ ID NO: 92923 - DNA, 25 bp, Artificial
  probe
  misc_feature (1)..(25): SEQ ID NO: 6716; WAN024BSR_at; Start 65; Stop 89
gaatgatttctaagttttgcccaga

SEQ ID NO: 92924 - DNA, 25 bp, Artificial
  probe
  misc_feature (1)..(25): SEQ ID NO: 6716; WAN024BSR_at; Start 37; Stop 61
gatagcattatagatggagggaagc

SEQ ID NO: 92925 - DNA, 25 bp, Artificial
  probe
  misc_feature (1)..(25): SEQ ID NO: 6716; WAN024BSR_at; Start 20; Stop 44
ctgaaaaatacagtttagatagcat

SEQ ID NO: 92926 - DNA, 25 bp, Artificial
  probe
  misc_feature (1)..(25): SEQ ID NO: 6716; WAN024BSR_at; Start 239; Stop 263
tatggaacacgctatgtagaacacg

SEQ ID NO: 92927 - DNA, 25 bp, Artificial
  probe
  misc_feature (1)..(25): SEQ ID NO: 6716; WAN024BSR_at; Start 246; Stop 270
cacgctatgtagaacacgagatttt

SEQ ID NO: 92928 - DNA, 25 bp, Artificial
  probe
  misc_feature (1)..(25): SEQ ID NO: 6716; WAN024BSR_at; Start 516; Stop 540
tttagtcaaggctctggcaggcgca

SEQ ID NO: 92929 - DNA, 25 bp, Artificial
  probe
  misc_feature (1)..(25): SEQ ID NO: 6716; WAN024BSR_at; Start 3; Stop 27
gccaaaattattagagactgaaaaa

SEQ ID NO: 92930 - DNA, 25 bp, Artificial
  probe
  misc_feature (1)..(25): SEQ ID NO: 6716; WAN024BSR_at; Start 160; Stop 184
caagctttaagagattctgatccag

SEQ ID NO: 92931 - DNA, 25 bp, Artificial
  probe
  misc_feature (1)..(25): SEQ ID NO: 6716; WAN024BSR_at; Start 392; Stop 416
aaagcttagtacgaaatgttgatga

SEQ ID NO: 92932 - DNA, 25 bp, Artificial
  probe
  misc_feature (1)..(25): SEQ ID NO: 6716; WAN024BSR_at; Start 472; Stop 496
tatgttttgtatagattagggttga

SEQ ID NO: 92933 - DNA, 25 bp, Artificial
  probe
  misc_feature (1)..(25): SEQ ID NO: 6716; WAN024BSR_at; Start 322; Stop 346
tacttctttgatgttaatacgtcta

SEQ ID NO: 92934 - DNA, 25 bp, Artificial
  probe
  misc_feature (1)..(25): SEQ ID NO: 6716; WAN024BSR_at; Start 102; Stop 126
gaggtacgaattcaaaacatcagac

SEQ ID NO: 92935 - DNA, 25 bp, Artificial
  probe
  misc_feature (1)..(25): SEQ ID NO: 6716; WAN024BSR_at; Start 339; Stop 363
tacgtctaatgtaattacggatgat

SEQ ID NO: 92936 - DNA, 25 bp, Artificial
  probe
  misc_feature (1)..(25): SEQ ID NO: 7588; WAN024BSS_at; Start 162; Stop 186
gcaagcctatttttcatcacgcaac

SEQ ID NO: 92937 - DNA, 25 bp, Artificial
  probe
  misc_feature (1)..(25): SEQ ID NO: 7588; WAN024BSS_at; Start 159; Stop 183
aaagcaagcctatttttcatcacgc

SEQ ID NO: 92938 - DNA, 25 bp, Artificial
  probe
  misc_feature (1)..(25): SEQ ID NO: 7588; WAN024BSS_at; Start 166; Stop 190
gcctatttttcatcacgcaacttga

SEQ ID NO: 92939 - DNA, 25 bp, Artificial
  probe
  misc_feature (1)..(25): SEQ ID NO: 7588; WAN024BSS_at; Start 173; Stop 197
tttcatcacgcaacttgaaaaagcc

SEQ ID NO: 92940 - DNA, 25 bp, Artificial
  probe
  misc_feature (1)..(25): SEQ ID NO: 7588; WAN024BSS_at; Start 62; Stop 86
caaataaagttgacgttgacagcaa

SEQ ID NO: 92941 - DNA, 25 bp, Artificial
  probe
  misc_feature (1)..(25): SEQ ID NO: 7588; WAN024BSS_at; Start 91; Stop 115
aatcgcggtcgatatgtcacaaagt

SEQ ID NO: 92942 - DNA, 25 bp, Artificial
  probe
  misc_feature (1)..(25): SEQ ID NO: 7588; WAN024BSS_at; Start 9; Stop 33
cagtgttccctatattccacataag

SEQ ID NO: 92943 - DNA, 25 bp, Artificial
  probe
  misc_feature (1)..(25): SEQ ID NO: 7588; WAN024BSS_at; Start 72; Stop 96
tgacgttgacagcaaagaaaatcgc

SEQ ID NO: 92944 - DNA, 25 bp, Artificial
  probe
  misc_feature (1)..(25): SEQ ID NO: 7588; WAN024BSS_at; Start 53; Stop 77
ggcatggagcaaataaagttgacgt

SEQ ID NO: 92945 - DNA, 25 bp, Artificial
  probe
  misc_feature (1)..(25): SEQ ID NO: 7588; WAN024BSS_at; Start 81; Stop 105
cagcaaagaaaatcgcggtcgatat

SEQ ID NO: 92946 - DNA, 25 bp, Artificial
  probe
  misc_feature (1)..(25): SEQ ID NO: 7588; WAN024BSS_at; Start 146; Stop 170
tggaaaacttcggaaagcaagccta

SEQ ID NO: 92947 - DNA, 25 bp, Artificial
  probe
  misc_feature (1)..(25): SEQ ID NO: 7588; WAN024BSS_at; Start 120; Stop 144
tgaaaaaggtattggacaagaattg

SEQ ID NO: 92948 - DNA, 25 bp, Artificial
  probe
  misc_feature (1)..(25): SEQ ID NO: 7588; WAN024BSS_at; Start 104; Stop 128
atgtcacaaagtattttgaaaaagg

SEQ ID NO: 92949 - DNA, 25 bp, Artificial
  probe
  misc_feature (1)..(25): SEQ ID NO: 7588; WAN024BSS_at; Start 77; Stop 101
ttgacagcaaagaaaatcgcggtcg

SEQ ID NO: 92950 - DNA, 25 bp, Artificial
  probe
  misc_feature (1)..(25): SEQ ID NO: 7588; WAN024BSS_at; Start 143; Stop 167
tgttggaaaacttcggaaagcaagc

SEQ ID NO: 92951 - DNA, 25 bp, Artificial
  probe
  misc_feature (1)..(25): SEQ ID NO: 7588; WAN024BSS_at; Start 38; Stop 62
tattagaactttgggggcatggagc

SEQ ID NO: 92952 - DNA, 25 bp, Artificial
  probe
  misc_feature (1)..(25): SEQ ID NO: 7588; WAN024BSS_at; Start 244; Stop 268
tcagtcgtactatatgaaacggaat

SEQ ID NO: 92953 - DNA, 25 bp, Artificial
  probe
  misc_feature (1)..(25): SEQ ID NO: 7588; WAN024BSS_at; Start 79; Stop 103
gacagcaaagaaaatcgcggtcgat

SEQ ID NO: 92954 - DNA, 25 bp, Artificial
  probe
  misc_feature (1)..(25): SEQ ID NO: 7588; WAN024BSS_at; Start 249; Stop 273
cgtactatatgaaacggaatacaac

SEQ ID NO: 92955 - DNA, 25 bp, Artificial
  probe
  misc_feature (1)..(25): SEQ ID NO: 7588; WAN024BSS_at; Start 57; Stop 81
tggagcaaataaagttgacgttgac

SEQ ID NO: 92956 - DNA, 25 bp, Artificial
  probe
  misc_feature (1)..(25): SEQ ID NO: 7588; WAN024BSS_at; Start 194; Stop 218
agcctgatgaagataaattttacac

SEQ ID NO: 92957 - DNA, 25 bp, Artificial
  probe
  misc_feature (1)..(25): SEQ ID NO: 7588; WAN024BSS_at; Start 186; Stop 210
cttgaaaaagcctgatgaagataaa

SEQ ID NO: 92958 - DNA, 25 bp, Artificial
  probe
  misc_feature (1)..(25): SEQ ID NO: 7588; WAN024BSS_at; Start 231; Stop 255
taactatgatagttcagtcgtacta

SEQ ID NO: 92959 - DNA, 25 bp, Artificial
  probe
  misc_feature (1)..(25): SEQ ID NO: 7588; WAN024BSS_at; Start 97; Stop 121
ggtcgatatgtcacaaagtattttg

SEQ ID NO: 92960 - DNA, 25 bp, Artificial
  probe
  misc_feature (1)..(25): SEQ ID NO: 7588; WAN024BSS_at; Start 3; Stop 27
gctattcagtgttccctatattcca

SEQ ID NO: 92961 - DNA, 25 bp, Artificial
  probe
  misc_feature (1)..(25): SEQ ID NO: 7588; WAN024BSS_at; Start 75; Stop 99
cgttgacagcaaagaaaatcgcggt

SEQ ID NO: 92962 - DNA, 25 bp, Artificial
  probe
  misc_feature (1)..(25): SEQ ID NO: 7588; WAN024BSS_at; Start 214; Stop 238
tacacttatgaagattttaactatg

SEQ ID NO: 92963 - DNA, 25 bp, Artificial
  probe
  misc_feature (1)..(25): SEQ ID NO: 7588; WAN024BSS_at; Start 94; Stop 118
cgcggtcgatatgtcacaaagtatt

SEQ ID NO: 92964 - DNA, 25 bp, Artificial
  probe
  misc_feature (1)..(25): SEQ ID NO: 7588; WAN024BSS_at; Start 28; Stop 52
cataagcaattattagaactttggg

SEQ ID NO: 92965 - DNA, 25 bp, Artificial
  probe
  misc_feature (1)..(25): SEQ ID NO: 7588; WAN024BSS_at; Start 88; Stop 112
gaaaatcgcggtcgatatgtcacaa

SEQ ID NO: 92966 - DNA, 25 bp, Artificial
  probe
  misc_feature (1)..(25): SEQ ID NO: 7588; WAN024BSS_at; Start 66; Stop 90
taaagttgacgttgacagcaaagaa

SEQ ID NO: 92967 - DNA, 25 bp, Artificial
  probe
  misc_feature (1)..(25): SEQ ID NO: 7588; WAN024BSS_at; Start 13; Stop 37
gttccctatattccacataagcaat

SEQ ID NO: 92968 - DNA, 25 bp, Artificial
  probe
  misc_feature (1)..(25): SEQ ID NO: 7588; WAN024BSS_at; Start 240; Stop 264
tagttcagtcgtactatatgaaacg

SEQ ID NO: 92969 - DNA, 25 bp, Artificial
  probe
  misc_feature (1)..(25): SEQ ID NO: 7588; WAN024BSS_at; Start 127; Stop 151
ggtattggacaagaattgttggaaa

SEQ ID NO: 92970 - DNA, 25 bp, Artificial
  probe
  misc_feature (1)..(25): SEQ ID NO: 6858; WAN024BST_at; Start 954; Stop 978
gatacgcatacacgattttaggcac

SEQ ID NO: 92971 - DNA, 25 bp, Artificial
  probe
  misc_feature (1)..(25): SEQ ID NO: 6858; WAN024BST_at; Start 352; Stop 376
gaacatcttaggcaaaaagtagcta

SEQ ID NO: 92972 - DNA, 25 bp, Artificial
  probe
  misc_feature (1)..(25): SEQ ID NO: 6858; WAN024BST_at; Start 450; Stop 474
tggtttgcgaaaaggctattactcc

SEQ ID NO: 92973 - DNA, 25 bp, Artificial
  probe
  misc_feature (1)..(25): SEQ ID NO: 6858; WAN024BST_at; Start 716; Stop 740
aaggagtaactcatatcagcacaac

SEQ ID NO: 92974 - DNA, 25 bp, Artificial
  probe
  misc_feature (1)..(25): SEQ ID NO: 6858; WAN024BST_at; Start 98; Stop 122
gctataagacgaaaaaagaagctat

SEQ ID NO: 92975 - DNA, 25 bp, Artificial
  probe
  misc_feature (1)..(25): SEQ ID NO: 6858; WAN024BST_at; Start 1039; Stop 1063
ggacatgcttctataacaaccacga

SEQ ID NO: 92976 - DNA, 25 bp, Artificial
  probe
  misc_feature (1)..(25): SEQ ID NO: 6858; WAN024BST_at; Start 1012; Stop 1036
gattatctagttgtaaaagagcgac

SEQ ID NO: 92977 - DNA, 25 bp, Artificial
  probe
  misc_feature (1)..(25): SEQ ID NO: 6858; WAN024BST_at; Start 201; Stop 225
tgaactacttaaggaagaagatagc

SEQ ID NO: 92978 - DNA, 25 bp, Artificial
  probe
  misc_feature (1)..(25): SEQ ID NO: 6858; WAN024BST_at; Start 936; Stop 960
tgatagcacactaaaaaagatacgc

SEQ ID NO: 92979 - DNA, 25 bp, Artificial
  probe
  misc_feature (1)..(25): SEQ ID NO: 6858; WAN024BST_at; Start 469; Stop 493
tactcctccaatccagcaaaattga

SEQ ID NO: 92980 - DNA, 25 bp, Artificial
  probe
  misc_feature (1)..(25): SEQ ID NO: 6858; WAN024BST_at; Start 637; Stop 661
gaagctcttgccctaacatggcaag

SEQ ID NO: 92981 - DNA, 25 bp, Artificial
  probe
  misc_feature (1)..(25): SEQ ID NO: 6858; WAN024BST_at; Start 829; Stop 853
ttagagcaatttaccaacaatagcc

SEQ ID NO: 92982 - DNA, 25 bp, Artificial
  probe
  misc_feature (1)..(25): SEQ ID NO: 6858; WAN024BST_at; Start 340; Stop 364
taccaatttagagaacatcttaggc

SEQ ID NO: 92983 - DNA, 25 bp, Artificial
  probe
  misc_feature (1)..(25): SEQ ID NO: 6858; WAN024BST_at; Start 142; Stop 166
cgaagtgtagagttaaaagaacgct

SEQ ID NO: 92984 - DNA, 25 bp, Artificial
  probe
  misc_feature (1)..(25): SEQ ID NO: 6858; WAN024BST_at; Start 805; Stop 829
tgggaaaagcgacaaaaacatctat

SEQ ID NO: 92985 - DNA, 25 bp, Artificial
  probe
  misc_feature (1)..(25): SEQ ID NO: 6858; WAN024BST_at; Start 1080; Stop 1104
cttgtacccaagtaagcaaaaggat

SEQ ID NO: 92986 - DNA, 25 bp, Artificial
  probe
  misc_feature (1)..(25): SEQ ID NO: 6858; WAN024BST_at; Start 653; Stop 677
catggcaagacatcgacttttcaag

SEQ ID NO: 92987 - DNA, 25 bp, Artificial
  probe
  misc_feature (1)..(25): SEQ ID NO: 6858; WAN024BST_at; Start 531; Stop 555
ttggacagtcaaagaatttcagaag

SEQ ID NO: 92988 - DNA, 25 bp, Artificial
  probe
  misc_feature (1)..(25): SEQ ID NO: 6858; WAN024BST_at; Start 39; Stop 63
tgatattagcaacggttttgaccca

SEQ ID NO: 92989 - DNA, 25 bp, Artificial
  probe
  misc_feature (1)..(25): SEQ ID NO: 6858; WAN024BST_at; Start 298; Stop 322
tctatggtcgataatgtcggaaaac

SEQ ID NO: 92990 - DNA, 25 bp, Artificial
  probe
  misc_feature (1)..(25): SEQ ID NO: 6858; WAN024BST_at; Start 784; Stop 808
ttaagccaagaattacaagattggg

SEQ ID NO: 92991 - DNA, 25 bp, Artificial
  probe
  misc_feature (1)..(25): SEQ ID NO: 6858; WAN024BST_at; Start 1062; Stop 1086
gattgatacctactctcacttgtac

SEQ ID NO: 92992 - DNA, 25 bp, Artificial
  probe
  misc_feature (1)..(25): SEQ ID NO: 6858; WAN024BST_at; Start 862; Stop 886
caagtgtttcaaaatagtcctatca

SEQ ID NO: 92993 - DNA, 25 bp, Artificial
  probe
  misc_feature (1)..(25): SEQ ID NO: 6858; WAN024BST_at; Start 224; Stop 248
gcataaatcatcgaaaagcaagcta

SEQ ID NO: 92994 - DNA, 25 bp, Artificial
  probe
  misc_feature (1)..(25): SEQ ID NO: 6858; WAN024BST_at; Start 316; Stop 340
ggaaaactaacctatgaagacatct

SEQ ID NO: 92995 - DNA, 25 bp, Artificial
  probe
  misc_feature (1)..(25): SEQ ID NO: 6858; WAN024BST_at; Start 921; Stop 945
gaaaatcattgaacgtgatagcaca

SEQ ID NO: 92996 - DNA, 25 bp, Artificial
  probe
  misc_feature (1)..(25): SEQ ID NO: 6858; WAN024BST_at; Start 76; Stop 100
caacgtagacttgtcagaaagggct

SEQ ID NO: 92997 - DNA, 25 bp, Artificial
  probe
  misc_feature (1)..(25): SEQ ID NO: 6858; WAN024BST_at; Start 967; Stop 991
gattttaggcactcacacgcttccc

SEQ ID NO: 92998 - DNA, 25 bp, Artificial
  probe
  misc_feature (1)..(25): SEQ ID NO: 6858; WAN024BST_at; Start 1025; Stop 1049
taaaagagcgactaggacatgcttc

SEQ ID NO: 92999 - DNA, 25 bp, Artificial
  probe
  misc_feature (1)..(25): SEQ ID NO: 6858; WAN024BST_at; Start 982; Stop 1006
cacgcttccctgctgattaaccaag

SEQ ID NO: 93000 - DNA, 25 bp, Artificial
  probe
  misc_feature (1)..(25): SEQ ID NO: 6858; WAN024BST_at; Start 57; Stop 81
tgacccaataacactaaagcaacgt

SEQ ID NO: 93001 - DNA, 25 bp, Artificial
  probe
  misc_feature (1)..(25): SEQ ID NO: 6858; WAN024BST_at; Start 731; Stop 755
tcagcacaacaaaaactaaagcagg

SEQ ID NO: 93002 - DNA, 25 bp, Artificial
  probe
  misc_feature (1)..(25): SEQ ID NO: 6858; WAN024BST_at; Start 385; Stop 409
gataaaccgttaagcacaaatacta

SEQ ID NO: 93003 - DNA, 25 bp, Artificial
  probe
  misc_feature (1)..(25): SEQ ID NO: 6858; WAN024BST_at; Start 557; Stop 581
ttttgacactatttgaacccgaaga

SEQ ID NO: 93004 - DNA, 25 bp, Artificial
  probe
  misc_feature (1)..(25): SEQ ID NO: 6839; WAN024BSU_at; Start 333; Stop 357
taattcagatttaacaagactacca

SEQ ID NO: 93005 - DNA, 25 bp, Artificial
  probe
  misc_feature (1)..(25): SEQ ID NO: 6839; WAN024BSU_at; Start 350; Stop 374
gactaccattaattactgaaaaaga

SEQ ID NO: 93006 - DNA, 25 bp, Artificial
  probe
  misc_feature (1)..(25): SEQ ID NO: 6839; WAN024BSU_at; Start 60; Stop 84
aattgatagagcaggaattgactac

SEQ ID NO: 93007 - DNA, 25 bp, Artificial
  probe
  misc_feature (1)..(25): SEQ ID NO: 6839; WAN024BSU_at; Start 264; Stop 288
tcaatcttatctcaatctagtaaag

SEQ ID NO: 93008 - DNA, 25 bp, Artificial
  probe
  misc_feature (1)..(25): SEQ ID NO: 6839; WAN024BSU_at; Start 279; Stop 303
tctagtaaagaaaaatgaactcgct

SEQ ID NO: 93009 - DNA, 25 bp, Artificial
  probe
  misc_feature (1)..(25): SEQ ID NO: 6839; WAN024BSU_at; Start 208; Stop 232
tcaaaaaacattatagaagccgtcg

SEQ ID NO: 93010 - DNA, 25 bp, Artificial
  probe
  misc_feature (1)..(25): SEQ ID NO: 6839; WAN024BSU_at; Start 120; Stop 144
aactgatgaagagaaagctgtcgcc

SEQ ID NO: 93011 - DNA, 25 bp, Artificial
  probe
  misc_feature (1)..(25): SEQ ID NO: 6839; WAN024BSU_at; Start 163; Stop 187
gaagatacttcactaaccctactag

SEQ ID NO: 93012 - DNA, 25 bp, Artificial
  probe
  misc_feature (1)..(25): SEQ ID NO: 6839; WAN024BSU_at; Start 387; Stop 411
taagaaatacagttctgctattaga

SEQ ID NO: 93013 - DNA, 25 bp, Artificial
  probe
  misc_feature (1)..(25): SEQ ID NO: 6839; WAN024BSU_at; Start 223; Stop 247
gaagccgtcgatatactcacaaaga

SEQ ID NO: 93014 - DNA, 25 bp, Artificial
  probe
  misc_feature (1)..(25): SEQ ID NO: 6839; WAN024BSU_at; Start 377; Stop 401
tagagagaaataagaaatacagttc

SEQ ID NO: 93015 - DNA, 25 bp, Artificial
  probe
  misc_feature (1)..(25): SEQ ID NO: 6839; WAN024BSU_at; Start 319; Stop 343
gcggatttacggcataattcagatt

SEQ ID NO: 93016 - DNA, 25 bp, Artificial
  probe
  misc_feature (1)..(25): SEQ ID NO: 6839; WAN024BSU_at; Start 13; Stop 37
caagtaataaaagcacatgaagtag

SEQ ID NO: 93017 - DNA, 25 bp, Artificial
  probe
  misc_feature (1)..(25): SEQ ID NO: 6839; WAN024BSU_at; Start 2; Stop 26
tggatacatcacaagtaataaaagc

SEQ ID NO: 93018 - DNA, 25 bp, Artificial
  probe
  misc_feature (1)..(25): SEQ ID NO: 6839; WAN024BSU_at; Start 311; Stop 335
taaagttggcggatttacggcataa

SEQ ID NO: 93019 - DNA, 25 bp, Artificial
  probe
  misc_feature (1)..(25): SEQ ID NO: 6839; WAN024BSU_at; Start 232; Stop 256
gatatactcacaaagaaaaaaggac

SEQ ID NO: 93020 - DNA, 25 bp, Artificial
  probe
  misc_feature (1)..(25): SEQ ID NO: 6839; WAN024BSU_at; Start 127; Stop 151
gaagagaaagctgtcgcctatctac

SEQ ID NO: 93021 - DNA, 25 bp, Artificial
  probe
  misc_feature (1)..(25): SEQ ID NO: 6839; WAN024BSU_at; Start 25; Stop 49
gcacatgaagtagctaaaaaagcac

SEQ ID NO: 93022 - DNA, 25 bp, Artificial
  probe
  misc_feature (1)..(25): SEQ ID NO: 6839; WAN024BSU_at; Start 296; Stop 320
aactcgctagagttgtaaagttggc

SEQ ID NO: 93023 - DNA, 25 bp, Artificial
  probe
  misc_feature (1)..(25): SEQ ID NO: 6839; WAN024BSU_at; Start 363; Stop 387
tactgaaaaagacttagagagaaat

SEQ ID NO: 93024 - DNA, 25 bp, Artificial
  probe
  misc_feature (1)..(25): SEQ ID NO: 6839; WAN024BSU_at; Start 246; Stop 270
gaaaaaaggacaagattatcaatct

SEQ ID NO: 93025 - DNA, 25 bp, Artificial
  probe
  misc_feature (1)..(25): SEQ ID NO: 6839; WAN024BSU_at; Start 132; Stop 156
gaaagctgtcgcctatctacatgat

SEQ ID NO: 93026 - DNA, 25 bp, Artificial
  probe
  misc_feature (1)..(25): SEQ ID NO: 6839; WAN024BSU_at; Start 98; Stop 122
aaacagtagctagttttgtcgcaac

SEQ ID NO: 93027 - DNA, 25 bp, Artificial
  probe
  misc_feature (1)..(25): SEQ ID NO: 6839; WAN024BSU_at; Start 108; Stop 132
tagttttgtcgcaactgatgaagag

SEQ ID NO: 93028 - DNA, 25 bp, Artificial
  probe
  misc_feature (1)..(25): SEQ ID NO: 6839; WAN024BSU_at; Start 49; Stop 73
cactttggacaaattgatagagcag

SEQ ID NO: 93029 - DNA, 25 bp, Artificial
  probe
  misc_feature (1)..(25): SEQ ID NO: 6839; WAN024BSU_at; Start 74; Stop 98
gaattgactacattaaacaccctga

SEQ ID NO: 93030 - DNA, 25 bp, Artificial
  probe
  misc_feature (1)..(25): SEQ ID NO: 6839; WAN024BSU_at; Start 87; Stop 111
taaacaccctgaaacagtagctagt

SEQ ID NO: 93031 - DNA, 25 bp, Artificial
  probe
  misc_feature (1)..(25): SEQ ID NO: 6839; WAN024BSU_at; Start 34; Stop 58
gtagctaaaaaagcacactttggac

SEQ ID NO: 93032 - DNA, 25 bp, Artificial
  probe
  misc_feature (1)..(25): SEQ ID NO: 6839; WAN024BSU_at; Start 284; Stop 308
taaagaaaaatgaactcgctagagt

SEQ ID NO: 93033 - DNA, 25 bp, Artificial
  probe
  misc_feature (1)..(25): SEQ ID NO: 6839; WAN024BSU_at; Start 166; Stop 190
gatacttcactaaccctactagacc

SEQ ID NO: 93034 - DNA, 25 bp, Artificial
  probe
  misc_feature (1)..(25): SEQ ID NO: 6839; WAN024BSU_at; Start 149; Stop 173
tacatgatgtaattgaagatacttc

SEQ ID NO: 93035 - DNA, 25 bp, Artificial
  probe
  misc_feature (1)..(25): SEQ ID NO: 6839; WAN024BSU_at; Start 403; Stop 427
gctattagatttttaagagcaaaga

SEQ ID NO: 93036 - DNA, 25 bp, Artificial
  probe
  misc_feature (1)..(25): SEQ ID NO: 6839; WAN024BSU_at; Start 136; Stop 160
gctgtcgcctatctacatgatgtaa

SEQ ID NO: 93037 - DNA, 25 bp, Artificial
  probe
  misc_feature (1)..(25): SEQ ID NO: 6839; WAN024BSU_at; Start 114; Stop 138
tgtcgcaactgatgaagagaaagct

SEQ ID NO: 93038 - DNA, 25 bp, Artificial
  probe
  misc_feature (1)..(25): SEQ ID NO: 6484; WAN024BSV_at; Start 142; Stop 166
tatgatattaaggtcgctgatgaag

SEQ ID NO: 93039 - DNA, 25 bp, Artificial
  probe
  misc_feature (1)..(25): SEQ ID NO: 6484; WAN024BSV_at; Start 210; Stop 234
tgaagaaatgatgagacgctatggc

SEQ ID NO: 93040 - DNA, 25 bp, Artificial
  probe
  misc_feature (1)..(25): SEQ ID NO: 6484; WAN024BSV_at; Start 171; Stop 195
taaaaaatgggttgaatgtggcaaa

SEQ ID NO: 93041 - DNA, 25 bp, Artificial
  probe
  misc_feature (1)..(25): SEQ ID NO: 6484; WAN024BSV_at; Start 46; Stop 70
gagttaaattctttattaaatgcta

SEQ ID NO: 93042 - DNA, 25 bp, Artificial
  probe
  misc_feature (1)..(25): SEQ ID NO: 6484; WAN024BSV_at; Start 149; Stop 173
ttaaggtcgctgatgaagcttataa

SEQ ID NO: 93043 - DNA, 25 bp, Artificial
  probe
  misc_feature (1)..(25): SEQ ID NO: 6484; WAN024BSV_at; Start 2; Stop 26
tgaataatgttgttactacacaaat

SEQ ID NO: 93044 - DNA, 25 bp, Artificial
  probe
  misc_feature (1)..(25): SEQ ID NO: 6484; WAN024BSV_at; Start 22; Stop 46
caaatttctattcaacttagtcaag

SEQ ID NO: 93045 - DNA, 25 bp, Artificial
  probe
  misc_feature (1)..(25): SEQ ID NO: 6484; WAN024BSV_at; Start 114; Stop 138
agctgttatagagaaaattgaagat

SEQ ID NO: 93046 - DNA, 25 bp, Artificial
  probe
  misc_feature (1)..(25): SEQ ID NO: 6484; WAN024BSV_at; Start 10; Stop 34
gttgttactacacaaatttctattc

SEQ ID NO: 93047 - DNA, 25 bp, Artificial
  probe
  misc_feature (1)..(25): SEQ ID NO: 6484; WAN024BSV_at; Start 162; Stop 186
tgaagcttataaaaaatgggttgaa

SEQ ID NO: 93048 - DNA, 25 bp, Artificial
  probe
  misc_feature (1)..(25): SEQ ID NO: 6484; WAN024BSV_at; Start 28; Stop 52
tctattcaacttagtcaagagttaa

SEQ ID NO: 93049 - DNA, 25 bp, Artificial
  probe
  misc_feature (1)..(25): SEQ ID NO: 6484; WAN024BSV_at; Start 187; Stop 211
tgtggcaaaaaagctatctcacatg

SEQ ID NO: 93050 - DNA, 25 bp, Artificial
  probe
  misc_feature (1)..(25): SEQ ID NO: 6484; WAN024BSV_at; Start 176; Stop 200
aatgggttgaatgtggcaaaaaagc

SEQ ID NO: 93051 - DNA, 25 bp, Artificial
  probe
  misc_feature (1)..(25): SEQ ID NO: 6484; WAN024BSV_at; Start 59; Stop 83
tattaaatgctattgttgaagaaaa

SEQ ID NO: 93052 - DNA, 25 bp, Artificial
  probe
  misc_feature (1)..(25): SEQ ID NO: 6484; WAN024BSV_at; Start 76; Stop 100
gaagaaaataatacaacaaagactg

SEQ ID NO: 93053 - DNA, 25 bp, Artificial
  probe
  misc_feature (1)..(25): SEQ ID NO: 6484; WAN024BSV_at; Start 199; Stop 223
gctatctcacatgaagaaatgatga

SEQ ID NO: 93054 - DNA, 25 bp, Artificial
  probe
  misc_feature (1)..(25): SEQ ID NO: 6484; WAN024BSV_at; Start 205; Stop 229
tcacatgaagaaatgatgagacgct

SEQ ID NO: 93055 - DNA, 25 bp, Artificial
  probe
  misc_feature (1)..(25): SEQ ID NO: 6484; WAN024BSV_at; Start 92; Stop 116
caaagactgactttattagacaagc

SEQ ID NO: 93056 - DNA, 25 bp, Artificial
  probe
  misc_feature (1)..(25): SEQ ID NO: 6484; WAN024BSV_at; Start 105; Stop 129
tattagacaagctgttatagagaaa

SEQ ID NO: 93057 - DNA, 25 bp, Artificial
  probe
  misc_feature (1)..(25): SEQ ID NO: 6484; WAN024BSV_at; Start 144; Stop 168
tgatattaaggtcgctgatgaagct

SEQ ID NO: 93058 - DNA, 25 bp, Artificial
  probe
  misc_feature (1)..(25): SEQ ID NO: 6484; WAN024BSV_at; Start 134; Stop 158
aagatatgtatgatattaaggtcgc

SEQ ID NO: 93059 - DNA, 25 bp, Artificial
  probe
  misc_feature (1)..(25): SEQ ID NO: 6484; WAN024BSV_at; Start 100; Stop 124
gactttattagacaagctgttatag

SEQ ID NO: 93060 - DNA, 25 bp, Artificial
  probe
  misc_feature (1)..(25): SEQ ID NO: 6484; WAN024BSV_at; Start 138; Stop 162
tatgtatgatattaaggtcgctgat

SEQ ID NO: 93061 - DNA, 25 bp, Artificial
  probe
  misc_feature (1)..(25): SEQ ID NO: 6484; WAN024BSV_at; Start 184; Stop 208
gaatgtggcaaaaaagctatctcac

SEQ ID NO: 93062 - DNA, 25 bp, Artificial
  probe
  misc_feature (1)..(25): SEQ ID NO: 6484; WAN024BSV_at; Start 96; Stop 120
gactgactttattagacaagctgtt

SEQ ID NO: 93063 - DNA, 25 bp, Artificial
  probe
  misc_feature (1)..(25): SEQ ID NO: 6484; WAN024BSV_at; Start 110; Stop 134
gacaagctgttatagagaaaattga

SEQ ID NO: 93064 - DNA, 25 bp, Artificial
  probe
  misc_feature (1)..(25): SEQ ID NO: 6484; WAN024BSV_at; Start 192; Stop 216
caaaaaagctatctcacatgaagaa

SEQ ID NO: 93065 - DNA, 25 bp, Artificial
  probe
  misc_feature (1)..(25): SEQ ID NO: 6484; WAN024BSV_at; Start 34; Stop 58
caacttagtcaagagttaaattctt

SEQ ID NO: 93066 - DNA, 25 bp, Artificial
  probe
  misc_feature (1)..(25): SEQ ID NO: 6484; WAN024BSV_at; Start 206; Stop 230
cacatgaagaaatgatgagacgcta

SEQ ID NO: 93067 - DNA, 25 bp, Artificial
  probe
  misc_feature (1)..(25): SEQ ID NO: 6484; WAN024BSV_at; Start 79; Stop 103
gaaaataatacaacaaagactgact

SEQ ID NO: 93068 - DNA, 25 bp, Artificial
  probe
  misc_feature (1)..(25): SEQ ID NO: 6484; WAN024BSV_at; Start 147; Stop 171
tattaaggtcgctgatgaagcttat

SEQ ID NO: 93069 - DNA, 25 bp, Artificial
  probe
  misc_feature (1)..(25): SEQ ID NO: 6484; WAN024BSV_at; Start 180; Stop 204
ggttgaatgtggcaaaaaagctatc

SEQ ID NO: 93070 - DNA, 25 bp, Artificial
  probe
  misc_feature (1)..(25): SEQ ID NO: 6484; WAN024BSV_at; Start 190; Stop 214
ggcaaaaaagctatctcacatgaag

SEQ ID NO: 93071 - DNA, 25 bp, Artificial
  probe
  misc_feature (1)..(25): SEQ ID NO: 6484; WAN024BSV_at; Start 169; Stop 193
tataaaaaatgggttgaatgtggca

SEQ ID NO: 93072 - DNA, 25 bp, Artificial
  probe
  misc_feature (1)..(25): SEQ ID NO: 6876; WAN024BSW_at; Start 121; Stop 145
gataatggacttcaatcttttcaag

SEQ ID NO: 93073 - DNA, 25 bp, Artificial
  probe
  misc_feature (1)..(25): SEQ ID NO: 6876; WAN024BSW_at; Start 3; Stop 27
ggctaaattatacgcaatatctgat

SEQ ID NO: 93074 - DNA, 25 bp, Artificial
  probe
  misc_feature (1)..(25): SEQ ID NO: 6876; WAN024BSW_at; Start 663; Stop 687
tgtaacgaatagcaaaacaatacct

SEQ ID NO: 93075 - DNA, 25 bp, Artificial
  probe
  misc_feature (1)..(25): SEQ ID NO: 6876; WAN024BSW_at; Start 278; Stop 302
taaaaagcttcttctctccagagga

SEQ ID NO: 93076 - DNA, 25 bp, Artificial
  probe
  misc_feature (1)..(25): SEQ ID NO: 6876; WAN024BSW_at; Start 323; Stop 347
cgaatgctaacaactttgaaacagg

SEQ ID NO: 93077 - DNA, 25 bp, Artificial
  probe
  misc_feature (1)..(25): SEQ ID NO: 6876; WAN024BSW_at; Start 564; Stop 588
tatttcgggccatattgcttcttgg

SEQ ID NO: 93078 - DNA, 25 bp, Artificial
  probe
  misc_feature (1)..(25): SEQ ID NO: 6876; WAN024BSW_at; Start 503; Stop 527
cgagttcagagatatttacaaacaa

SEQ ID NO: 93079 - DNA, 25 bp, Artificial
  probe
  misc_feature (1)..(25): SEQ ID NO: 6876; WAN024BSW_at; Start 521; Stop 545
caaacaaatttcctattaccactgg

SEQ ID NO: 93080 - DNA, 25 bp, Artificial
  probe
  misc_feature (1)..(25): SEQ ID NO: 6876; WAN024BSW_at; Start 441; Stop 465
tacccaaatttttgttcatgctggc

SEQ ID NO: 93081 - DNA, 25 bp, Artificial
  probe
  misc_feature (1)..(25): SEQ ID NO: 6876; WAN024BSW_at; Start 456; Stop 480
tcatgctggcattgatgaagaagcc

SEQ ID NO: 93082 - DNA, 25 bp, Artificial
  probe
  misc_feature (1)..(25): SEQ ID NO: 6876; WAN024BSW_at; Start 262; Stop 286
gcatttccagaaacaataaaaagct

SEQ ID NO: 93083 - DNA, 25 bp, Artificial
  probe
  misc_feature (1)..(25): SEQ ID NO: 6876; WAN024BSW_at; Start 407; Stop 431
aacgatatagggataaacgctatta

SEQ ID NO: 93084 - DNA, 25 bp, Artificial
  probe
  misc_feature (1)..(25): SEQ ID NO: 6876; WAN024BSW_at; Start 608; Stop 632
gatacctgggtaagatttactatga

SEQ ID NO: 93085 - DNA, 25 bp, Artificial
  probe
  misc_feature (1)..(25): SEQ ID NO: 6876; WAN024BSW_at; Start 22; Stop 46
tctgatatacatggatacttggatg

SEQ ID NO: 93086 - DNA, 25 bp, Artificial
  probe
  misc_feature (1)..(25): SEQ ID NO: 6876; WAN024BSW_at; Start 471; Stop 495
tgaagaagccggaaagctttggaaa

SEQ ID NO: 93087 - DNA, 25 bp, Artificial
  probe
  misc_feature (1)..(25): SEQ ID NO: 6876; WAN024BSW_at; Start 651; Stop 675
tattgatggagatgtaacgaatagc

SEQ ID NO: 93088 - DNA, 25 bp, Artificial
  probe
  misc_feature (1)..(25): SEQ ID NO: 6876; WAN024BSW_at; Start 680; Stop 704
caatacctattctttgctatgatac

SEQ ID NO: 93089 - DNA, 25 bp, Artificial
  probe
  misc_feature (1)..(25): SEQ ID NO: 6876; WAN024BSW_at; Start 53; Stop 77
gagacgctctcaataaagtaaattt

SEQ ID NO: 93090 - DNA, 25 bp, Artificial
  probe
  misc_feature (1)..(25): SEQ ID NO: 6876; WAN024BSW_at; Start 290; Stop 314
tctctccagaggaattgaactatat

SEQ ID NO: 93091 - DNA, 25 bp, Artificial
  probe
  misc_feature (1)..(25): SEQ ID NO: 6876; WAN024BSW_at; Start 375; Stop 399
caaattcaatccatttataaactgg

SEQ ID NO: 93092 - DNA, 25 bp, Artificial
  probe
  misc_feature (1)..(25): SEQ ID NO: 6876; WAN024BSW_at; Start 486; Stop 510
gctttggaaagaactaacgagttca

SEQ ID NO: 93093 - DNA, 25 bp, Artificial
  probe
  misc_feature (1)..(25): SEQ ID NO: 6876; WAN024BSW_at; Start 552; Stop 576
tcataaagctattatttcgggccat

SEQ ID NO: 93094 - DNA, 25 bp, Artificial
  probe
  misc_feature (1)..(25): SEQ ID NO: 6876; WAN024BSW_at; Start 249; Stop 273
gcctactgcttcagcatttccagaa

SEQ ID NO: 93095 - DNA, 25 bp, Artificial
  probe
  misc_feature (1)..(25): SEQ ID NO: 6876; WAN024BSW_at; Start 537; Stop 561
taccactggtagatttcataaagct

SEQ ID NO: 93096 - DNA, 25 bp, Artificial
  probe
  misc_feature (1)..(25): SEQ ID NO: 6876; WAN024BSW_at; Start 147; Stop 171
catttccaaaataatcgaacttgag

SEQ ID NO: 93097 - DNA, 25 bp, Artificial
  probe
  misc_feature (1)..(25): SEQ ID NO: 6876; WAN024BSW_at; Start 187; Stop 211
caaattattactcttctagggaatc

SEQ ID NO: 93098 - DNA, 25 bp, Artificial
  probe
  misc_feature (1)..(25): SEQ ID NO: 6876; WAN024BSW_at; Start 161; Stop 185
tcgaacttgaggaagtttatcctaa

SEQ ID NO: 93099 - DNA, 25 bp, Artificial
  probe
  misc_feature (1)..(25): SEQ ID NO: 6876; WAN024BSW_at; Start 37; Stop 61
tacttggatgaattcagagacgctc

SEQ ID NO: 93100 - DNA, 25 bp, Artificial
  probe
  misc_feature (1)..(25): SEQ ID NO: 6876; WAN024BSW_at; Start 593; Stop 617
tagctaaagatagaagatacctggg

SEQ ID NO: 93101 - DNA, 25 bp, Artificial
  probe
  misc_feature (1)..(25): SEQ ID NO: 6876; WAN024BSW_at; Start 579; Stop 603
tgcttcttgggaagtagctaaagat

SEQ ID NO: 93102 - DNA, 25 bp, Artificial
  probe
  misc_feature (1)..(25): SEQ ID NO: 6876; WAN024BSW_at; Start 233; Stop 257
ggttgattttagataagcctactgc

SEQ ID NO: 93103 - DNA, 25 bp, Artificial
  probe
  misc_feature (1)..(25): SEQ ID NO: 6876; WAN024BSW_at; Start 422; Stop 446
aacgctattatgaaactgataccca

SEQ ID NO: 93104 - DNA, 25 bp, Artificial
  probe
  misc_feature (1)..(25): SEQ ID NO: 6876; WAN024BSW_at; Start 201; Stop 225
tctagggaatcatgaagaatggttt

SEQ ID NO: 93105 - DNA, 25 bp, Artificial
  probe
  misc_feature (1)..(25): SEQ ID NO: 6876; WAN024BSW_at; Start 88; Stop 112
gataatcgcctatttttactaggag

SEQ ID NO: 93106 - DNA, 25 bp, Artificial
  probe
  misc_feature (1)..(25): SEQ ID NO: 7526; WAN024BSX_at; Start 32; Stop 56
tagatgaaaatcttgttattgttca

SEQ ID NO: 93107 - DNA, 25 bp, Artificial
  probe
  misc_feature (1)..(25): SEQ ID NO: 7526; WAN024BSX_at; Start 5; Stop 29
ttgttgttgagtataactatttttg

SEQ ID NO: 93108 - DNA, 25 bp, Artificial
  probe
  misc_feature (1)..(25): SEQ ID NO: 7526; WAN024BSX_at; Start 23; Stop 47
atttttgtatagatgaaaatcttgt

SEQ ID NO: 93109 - DNA, 25 bp, Artificial
  probe
  misc_feature (1)..(25): SEQ ID NO: 7526; WAN024BSX_at; Start 6; Stop 30
tgttgttgagtataactatttttgt

SEQ ID NO: 93110 - DNA, 25 bp, Artificial
  probe
  misc_feature (1)..(25): SEQ ID NO: 7526; WAN024BSX_at; Start 2; Stop 26
tgattgttgttgagtataactattt

SEQ ID NO: 93111 - DNA, 25 bp, Artificial
  probe
  misc_feature (1)..(25): SEQ ID NO: 7526; WAN024BSX_at; Start 44; Stop 68
ttgttattgttcaagatgttttgat

SEQ ID NO: 93112 - DNA, 25 bp, Artificial
  probe
  misc_feature (1)..(25): SEQ ID NO: 7526; WAN024BSX_at; Start 29; Stop 53
gtatagatgaaaatcttgttattgt

SEQ ID NO: 93113 - DNA, 25 bp, Artificial
  probe
  misc_feature (1)..(25): SEQ ID NO: 7526; WAN024BSX_at; Start 22; Stop 46
tatttttgtatagatgaaaatcttg

SEQ ID NO: 93114 - DNA, 25 bp, Artificial
  probe
  misc_feature (1)..(25): SEQ ID NO: 7526; WAN024BSX_at; Start 20; Stop 44
actatttttgtatagatgaaaatct

SEQ ID NO: 93115 - DNA, 25 bp, Artificial
  probe
  misc_feature (1)..(25): SEQ ID NO: 7526; WAN024BSX_at; Start 7; Stop 31
gttgttgagtataactatttttgta

SEQ ID NO: 93116 - DNA, 25 bp, Artificial
  probe
  misc_feature (1)..(25): SEQ ID NO: 7526; WAN024BSX_at; Start 35; Stop 59
atgaaaatcttgttattgttcaaga

SEQ ID NO: 93117 - DNA, 25 bp, Artificial
  probe
  misc_feature (1)..(25): SEQ ID NO: 7526; WAN024BSX_at; Start 3; Stop 27
gattgttgttgagtataactatttt

SEQ ID NO: 93118 - DNA, 25 bp, Artificial
  probe
  misc_feature (1)..(25): SEQ ID NO: 7526; WAN024BSX_at; Start 33; Stop 57
agatgaaaatcttgttattgttcaa

SEQ ID NO: 93119 - DNA, 25 bp, Artificial
  probe
  misc_feature (1)..(25): SEQ ID NO: 7526; WAN024BSX_at; Start 15; Stop 39
gtataactatttttgtatagatgaa

SEQ ID NO: 93120 - DNA, 25 bp, Artificial
  probe
  misc_feature (1)..(25): SEQ ID NO: 7526; WAN024BSX_at; Start 24; Stop 48
tttttgtatagatgaaaatcttgtt

SEQ ID NO: 93121 - DNA, 25 bp, Artificial
  probe
  misc_feature (1)..(25): SEQ ID NO: 7526; WAN024BSX_at; Start 36; Stop 60
tgaaaatcttgttattgttcaagat

SEQ ID NO: 93122 - DNA, 25 bp, Artificial
  probe
  misc_feature (1)..(25): SEQ ID NO: 7526; WAN024BSX_at; Start 38; Stop 62
aaaatcttgttattgttcaagatgt

SEQ ID NO: 93123 - DNA, 25 bp, Artificial
  probe
  misc_feature (1)..(25): SEQ ID NO: 7526; WAN024BSX_at; Start 13; Stop 37
gagtataactatttttgtatagatg

SEQ ID NO: 93124 - DNA, 25 bp, Artificial
  probe
  misc_feature (1)..(25): SEQ ID NO: 7526; WAN024BSX_at; Start 25; Stop 49
ttttgtatagatgaaaatcttgtta

SEQ ID NO: 93125 - DNA, 25 bp, Artificial
  probe
  misc_feature (1)..(25): SEQ ID NO: 7526; WAN024BSX_at; Start 37; Stop 61
gaaaatcttgttattgttcaagatg

SEQ ID NO: 93126 - DNA, 25 bp, Artificial
  probe
  misc_feature (1)..(25): SEQ ID NO: 7526; WAN024BSX_at; Start 9; Stop 33
tgttgagtataactatttttgtata

SEQ ID NO: 93127 - DNA, 25 bp, Artificial
  probe
  misc_feature (1)..(25): SEQ ID NO: 7526; WAN024BSX_at; Start 34; Stop 58
gatgaaaatcttgttattgttcaag

SEQ ID NO: 93128 - DNA, 25 bp, Artificial
  probe
  misc_feature (1)..(25): SEQ ID NO: 7526; WAN024BSX_at; Start 19; Stop 43
aactatttttgtatagatgaaaatc

SEQ ID NO: 93129 - DNA, 25 bp, Artificial
  probe
  misc_feature (1)..(25): SEQ ID NO: 7526; WAN024BSX_at; Start 8; Stop 32
ttgttgagtataactatttttgtat

SEQ ID NO: 93130 - DNA, 25 bp, Artificial
  probe
  misc_feature (1)..(25): SEQ ID NO: 7526; WAN024BSX_at; Start 10; Stop 34
gttgagtataactatttttgtatag

SEQ ID NO: 93131 - DNA, 25 bp, Artificial
  probe
  misc_feature (1)..(25): SEQ ID NO: 7526; WAN024BSX_at; Start 46; Stop 70
gttattgttcaagatgttttgatga

SEQ ID NO: 93132 - DNA, 25 bp, Artificial
  probe
  misc_feature (1)..(25): SEQ ID NO: 7526; WAN024BSX_at; Start 16; Stop 40
tataactatttttgtatagatgaaa

SEQ ID NO: 93133 - DNA, 25 bp, Artificial
  probe
  misc_feature (1)..(25): SEQ ID NO: 7526; WAN024BSX_at; Start 21; Stop 45
ctatttttgtatagatgaaaatctt

SEQ ID NO: 93134 - DNA, 25 bp, Artificial
  probe
  misc_feature (1)..(25): SEQ ID NO: 7526; WAN024BSX_at; Start 43; Stop 67
cttgttattgttcaagatgttttga

SEQ ID NO: 93135 - DNA, 25 bp, Artificial
  probe
  misc_feature (1)..(25): SEQ ID NO: 7526; WAN024BSX_at; Start 1; Stop 25
ttgattgttgttgagtataactatt

SEQ ID NO: 93136 - DNA, 25 bp, Artificial
  probe
  misc_feature (1)..(25): SEQ ID NO: 7526; WAN024BSX_at; Start 26; Stop 50
tttgtatagatgaaaatcttgttat

SEQ ID NO: 93137 - DNA, 25 bp, Artificial
  probe
  misc_feature (1)..(25): SEQ ID NO: 7526; WAN024BSX_at; Start 14; Stop 38
agtataactatttttgtatagatga

SEQ ID NO: 93138 - DNA, 25 bp, Artificial
  probe
  misc_feature (1)..(25): SEQ ID NO: 7526; WAN024BSX_at; Start 28; Stop 52
tgtatagatgaaaatcttgttattg

SEQ ID NO: 93139 - DNA, 25 bp, Artificial
  probe
  misc_feature (1)..(25): SEQ ID NO: 7526; WAN024BSX_at; Start 45; Stop 69
tgttattgttcaagatgttttgatg

SEQ ID NO: 93140 - DNA, 25 bp, Artificial
  probe
  misc_feature (1)..(25): SEQ ID NO: 6505; WAN024BSY_at; Start 156; Stop 180
tgtggtagtacttcccatccctact

SEQ ID NO: 93141 - DNA, 25 bp, Artificial
  probe
  misc_feature (1)..(25): SEQ ID NO: 6505; WAN024BSY_at; Start 157; Stop 181
gtggtagtacttcccatccctactg

SEQ ID NO: 93142 - DNA, 25 bp, Artificial
  probe
  misc_feature (1)..(25): SEQ ID NO: 6505; WAN024BSY_at; Start 173; Stop 197
tccctactgctttccaattttataa

SEQ ID NO: 93143 - DNA, 25 bp, Artificial
  probe
  misc_feature (1)..(25): SEQ ID NO: 6505; WAN024BSY_at; Start 161; Stop 185
tagtacttcccatccctactgcttt

SEQ ID NO: 93144 - DNA, 25 bp, Artificial
  probe
  misc_feature (1)..(25): SEQ ID NO: 6505; WAN024BSY_at; Start 148; Stop 172
aataaatctgtggtagtacttccca

SEQ ID NO: 93145 - DNA, 25 bp, Artificial
  probe
  misc_feature (1)..(25): SEQ ID NO: 6505; WAN024BSY_at; Start 65; Stop 89
tcaacaacaatcaaactaaagaacc

SEQ ID NO: 93146 - DNA, 25 bp, Artificial
  probe
  misc_feature (1)..(25): SEQ ID NO: 6505; WAN024BSY_at; Start 85; Stop 109
gaaccaaataaatatagcttaacat

SEQ ID NO: 93147 - DNA, 25 bp, Artificial
  probe
  misc_feature (1)..(25): SEQ ID NO: 6505; WAN024BSY_at; Start 48; Stop 72
tacaaaaatagttatactcaacaac

SEQ ID NO: 93148 - DNA, 25 bp, Artificial
  probe
  misc_feature (1)..(25): SEQ ID NO: 6505; WAN024BSY_at; Start 150; Stop 174
taaatctgtggtagtacttcccatc

SEQ ID NO: 93149 - DNA, 25 bp, Artificial
  probe
  misc_feature (1)..(25): SEQ ID NO: 6505; WAN024BSY_at; Start 117; Stop 141
ttggatttcaaacaatactgataaa

SEQ ID NO: 93150 - DNA, 25 bp, Artificial
  probe
  misc_feature (1)..(25): SEQ ID NO: 6505; WAN024BSY_at; Start 159; Stop 183
ggtagtacttcccatccctactgct

SEQ ID NO: 93151 - DNA, 25 bp, Artificial
  probe
  misc_feature (1)..(25): SEQ ID NO: 6505; WAN024BSY_at; Start 58; Stop 82
gttatactcaacaacaatcaaacta

SEQ ID NO: 93152 - DNA, 25 bp, Artificial
  probe
  misc_feature (1)..(25): SEQ ID NO: 6505; WAN024BSY_at; Start 152; Stop 176
aatctgtggtagtacttcccatccc

SEQ ID NO: 93153 - DNA, 25 bp, Artificial
  probe
  misc_feature (1)..(25): SEQ ID NO: 6505; WAN024BSY_at; Start 80; Stop 104
ctaaagaaccaaataaatatagctt

SEQ ID NO: 93154 - DNA, 25 bp, Artificial
  probe
  misc_feature (1)..(25): SEQ ID NO: 6505; WAN024BSY_at; Start 119; Stop 143
ggatttcaaacaatactgataaaat

SEQ ID NO: 93155 - DNA, 25 bp, Artificial
  probe
  misc_feature (1)..(25): SEQ ID NO: 6505; WAN024BSY_at; Start 62; Stop 86
tactcaacaacaatcaaactaaaga

SEQ ID NO: 93156 - DNA, 25 bp, Artificial
  probe
  misc_feature (1)..(25): SEQ ID NO: 6505; WAN024BSY_at; Start 21; Stop 45
cttgaacaataacaagattttcatc

SEQ ID NO: 93157 - DNA, 25 bp, Artificial
  probe
  misc_feature (1)..(25): SEQ ID NO: 6505; WAN024BSY_at; Start 27; Stop 51
caataacaagattttcatctataca

SEQ ID NO: 93158 - DNA, 25 bp, Artificial
  probe
  misc_feature (1)..(25): SEQ ID NO: 6505; WAN024BSY_at; Start 9; Stop 33
tcatcaaaacatcttgaacaataac

SEQ ID NO: 93159 - DNA, 25 bp, Artificial
  probe
  misc_feature (1)..(25): SEQ ID NO: 6505; WAN024BSY_at; Start 170; Stop 194
ccatccctactgctttccaatttta

SEQ ID NO: 93160 - DNA, 25 bp, Artificial
  probe
  misc_feature (1)..(25): SEQ ID NO: 6505; WAN024BSY_at; Start 113; Stop 137
ttttttggatttcaaacaatactga

SEQ ID NO: 93161 - DNA, 25 bp, Artificial
  probe
  misc_feature (1)..(25): SEQ ID NO: 6505; WAN024BSY_at; Start 136; Stop 160
gataaaattaataataaatctgtgg

SEQ ID NO: 93162 - DNA, 25 bp, Artificial
  probe
  misc_feature (1)..(25): SEQ ID NO: 6505; WAN024BSY_at; Start 12; Stop 36
tcaaaacatcttgaacaataacaag

SEQ ID NO: 93163 - DNA, 25 bp, Artificial
  probe
  misc_feature (1)..(25): SEQ ID NO: 6505; WAN024BSY_at; Start 175; Stop 199
cctactgctttccaattttataata

SEQ ID NO: 93164 - DNA, 25 bp, Artificial
  probe
  misc_feature (1)..(25): SEQ ID NO: 6505; WAN024BSY_at; Start 88; Stop 112
ccaaataaatatagcttaacatact

SEQ ID NO: 93165 - DNA, 25 bp, Artificial
  probe
  misc_feature (1)..(25): SEQ ID NO: 6505; WAN024BSY_at; Start 154; Stop 178
tctgtggtagtacttcccatcccta

SEQ ID NO: 93166 - DNA, 25 bp, Artificial
  probe
  misc_feature (1)..(25): SEQ ID NO: 6505; WAN024BSY_at; Start 56; Stop 80
tagttatactcaacaacaatcaaac

SEQ ID NO: 93167 - DNA, 25 bp, Artificial
  probe
  misc_feature (1)..(25): SEQ ID NO: 6505; WAN024BSY_at; Start 69; Stop 93
caacaatcaaactaaagaaccaaat

SEQ ID NO: 93168 - DNA, 25 bp, Artificial
  probe
  misc_feature (1)..(25): SEQ ID NO: 6505; WAN024BSY_at; Start 151; Stop 175
aaatctgtggtagtacttcccatcc

SEQ ID NO: 93169 - DNA, 25 bp, Artificial
  probe
  misc_feature (1)..(25): SEQ ID NO: 6505; WAN024BSY_at; Start 97; Stop 121
tatagcttaacatactttttttgga

SEQ ID NO: 93170 - DNA, 25 bp, Artificial
  probe
  misc_feature (1)..(25): SEQ ID NO: 6505; WAN024BSY_at; Start 18; Stop 42
catcttgaacaataacaagattttc

SEQ ID NO: 93171 - DNA, 25 bp, Artificial
  probe
  misc_feature (1)..(25): SEQ ID NO: 6505; WAN024BSY_at; Start 30; Stop 54
taacaagattttcatctatacaaaa

SEQ ID NO: 93172 - DNA, 25 bp, Artificial
  probe
  misc_feature (1)..(25): SEQ ID NO: 6505; WAN024BSY_at; Start 147; Stop 171
taataaatctgtggtagtacttccc

SEQ ID NO: 93173 - DNA, 25 bp, Artificial
  probe
  misc_feature (1)..(25): SEQ ID NO: 6505; WAN024BSY_at; Start 36; Stop 60
gattttcatctatacaaaaatagtt

SEQ ID NO: 93174 - DNA, 25 bp, Artificial
  probe
  misc_feature (1)..(25): SEQ ID NO: 7600; WAN024BSZ_at; Start 26; Stop 50
agcaatttgacaaatctagcaacaa

SEQ ID NO: 93175 - DNA, 25 bp, Artificial
  probe
  misc_feature (1)..(25): SEQ ID NO: 7600; WAN024BSZ_at; Start 18; Stop 42
ttattttaagcaatttgacaaatct

SEQ ID NO: 93176 - DNA, 25 bp, Artificial
  probe
  misc_feature (1)..(25): SEQ ID NO: 7600; WAN024BSZ_at; Start 29; Stop 53
aatttgacaaatctagcaacaaaaa

SEQ ID NO: 93177 - DNA, 25 bp, Artificial
  probe
  misc_feature (1)..(25): SEQ ID NO: 7600; WAN024BSZ_at; Start 25; Stop 49
aagcaatttgacaaatctagcaaca

SEQ ID NO: 93178 - DNA, 25 bp, Artificial
  probe
  misc_feature (1)..(25): SEQ ID NO: 7600; WAN024BSZ_at; Start 24; Stop 48
taagcaatttgacaaatctagcaac

SEQ ID NO: 93179 - DNA, 25 bp, Artificial
  probe
  misc_feature (1)..(25): SEQ ID NO: 7600; WAN024BSZ_at; Start 33; Stop 57
tgacaaatctagcaacaaaaaattc

SEQ ID NO: 93180 - DNA, 25 bp, Artificial
  probe
  misc_feature (1)..(25): SEQ ID NO: 7600; WAN024BSZ_at; Start 34; Stop 58
gacaaatctagcaacaaaaaattct

SEQ ID NO: 93181 - DNA, 25 bp, Artificial
  probe
  misc_feature (1)..(25): SEQ ID NO: 7600; WAN024BSZ_at; Start 19; Stop 43
tattttaagcaatttgacaaatcta

SEQ ID NO: 93182 - DNA, 25 bp, Artificial
  probe
  misc_feature (1)..(25): SEQ ID NO: 7600; WAN024BSZ_at; Start 39; Stop 63
atctagcaacaaaaaattctataaa

SEQ ID NO: 93183 - DNA, 25 bp, Artificial
  probe
  misc_feature (1)..(25): SEQ ID NO: 7600; WAN024BSZ_at; Start 27; Stop 51
gcaatttgacaaatctagcaacaaa

SEQ ID NO: 93184 - DNA, 25 bp, Artificial
  probe
  misc_feature (1)..(25): SEQ ID NO: 7600; WAN024BSZ_at; Start 31; Stop 55
tttgacaaatctagcaacaaaaaat

SEQ ID NO: 93185 - DNA, 25 bp, Artificial
  probe
  misc_feature (1)..(25): SEQ ID NO: 7600; WAN024BSZ_at; Start 32; Stop 56
ttgacaaatctagcaacaaaaaatt

SEQ ID NO: 93186 - DNA, 25 bp, Artificial
  probe
  misc_feature (1)..(25): SEQ ID NO: 7600; WAN024BSZ_at; Start 36; Stop 60
caaatctagcaacaaaaaattctat

SEQ ID NO: 93187 - DNA, 25 bp, Artificial
  probe
  misc_feature (1)..(25): SEQ ID NO: 7600; WAN024BSZ_at; Start 23; Stop 47
ttaagcaatttgacaaatctagcaa

SEQ ID NO: 93188 - DNA, 25 bp, Artificial
  probe
  misc_feature (1)..(25): SEQ ID NO: 7600; WAN024BSZ_at; Start 22; Stop 46
tttaagcaatttgacaaatctagca

SEQ ID NO: 93189 - DNA, 25 bp, Artificial
  probe
  misc_feature (1)..(25): SEQ ID NO: 7600; WAN024BSZ_at; Start 20; Stop 44
attttaagcaatttgacaaatctag

SEQ ID NO: 93190 - DNA, 25 bp, Artificial
  probe
  misc_feature (1)..(25): SEQ ID NO: 7600; WAN024BSZ_at; Start 38; Stop 62
aatctagcaacaaaaaattctataa

SEQ ID NO: 93191 - DNA, 25 bp, Artificial
  probe
  misc_feature (1)..(25): SEQ ID NO: 7600; WAN024BSZ_at; Start 40; Stop 64
tctagcaacaaaaaattctataaat

SEQ ID NO: 93192 - DNA, 25 bp, Artificial
  probe
  misc_feature (1)..(25): SEQ ID NO: 7600; WAN024BSZ_at; Start 35; Stop 59
acaaatctagcaacaaaaaattcta

SEQ ID NO: 93193 - DNA, 25 bp, Artificial
  probe
  misc_feature (1)..(25): SEQ ID NO: 7600; WAN024BSZ_at; Start 28; Stop 52
caatttgacaaatctagcaacaaaa

SEQ ID NO: 93194 - DNA, 25 bp, Artificial
  probe
  misc_feature (1)..(25): SEQ ID NO: 7600; WAN024BSZ_at; Start 21; Stop 45
ttttaagcaatttgacaaatctagc

SEQ ID NO: 93195 - DNA, 25 bp, Artificial
  probe
  misc_feature (1)..(25): SEQ ID NO: 7600; WAN024BSZ_at; Start 37; Stop 61
aaatctagcaacaaaaaattctata

SEQ ID NO: 93196 - DNA, 25 bp, Artificial
  probe
  misc_feature (1)..(25): SEQ ID NO: 7600; WAN024BSZ_at; Start 30; Stop 54
atttgacaaatctagcaacaaaaaa

SEQ ID NO: 93197 - DNA, 25 bp, Artificial
  probe
  misc_feature (1)..(25): SEQ ID NO: 7387; WAN024BT2_at; Start 55; Stop 79
tctattaaacgcattgtatcacgtt

SEQ ID NO: 93198 - DNA, 25 bp, Artificial
  probe
  misc_feature (1)..(25): SEQ ID NO: 7387; WAN024BT2_at; Start 46; Stop 70
attttatggtctattaaacgcattg

SEQ ID NO: 93199 - DNA, 25 bp, Artificial
  probe
  misc_feature (1)..(25): SEQ ID NO: 7387; WAN024BT2_at; Start 50; Stop 74
tatggtctattaaacgcattgtatc

SEQ ID NO: 93200 - DNA, 25 bp, Artificial
  probe
  misc_feature (1)..(25): SEQ ID NO: 7387; WAN024BT2_at; Start 44; Stop 68
taattttatggtctattaaacgcat

SEQ ID NO: 93201 - DNA, 25 bp, Artificial
  probe
  misc_feature (1)..(25): SEQ ID NO: 7387; WAN024BT2_at; Start 52; Stop 76
tggtctattaaacgcattgtatcac

SEQ ID NO: 93202 - DNA, 25 bp, Artificial
  probe
  misc_feature (1)..(25): SEQ ID NO: 7387; WAN024BT2_at; Start 21; Stop 45
tcaatttgagaagaaaagacaacta

SEQ ID NO: 93203 - DNA, 25 bp, Artificial
  probe
  misc_feature (1)..(25): SEQ ID NO: 7387; WAN024BT2_at; Start 57; Stop 81
tattaaacgcattgtatcacgtttt

SEQ ID NO: 93204 - DNA, 25 bp, Artificial
  probe
  misc_feature (1)..(25): SEQ ID NO: 7387; WAN024BT2_at; Start 47; Stop 71
ttttatggtctattaaacgcattgt

SEQ ID NO: 93205 - DNA, 25 bp, Artificial
  probe
  misc_feature (1)..(25): SEQ ID NO: 7387; WAN024BT2_at; Start 4; Stop 28
aaaagtctaggcaaaattcaatttg

SEQ ID NO: 93206 - DNA, 25 bp, Artificial
  probe
  misc_feature (1)..(25): SEQ ID NO: 7387; WAN024BT2_at; Start 2; Stop 26
tgaaaagtctaggcaaaattcaatt

SEQ ID NO: 93207 - DNA, 25 bp, Artificial
  probe
  misc_feature (1)..(25): SEQ ID NO: 7387; WAN024BT2_at; Start 45; Stop 69
aattttatggtctattaaacgcatt

SEQ ID NO: 93208 - DNA, 25 bp, Artificial
  probe
  misc_feature (1)..(25): SEQ ID NO: 7387; WAN024BT2_at; Start 56; Stop 80
ctattaaacgcattgtatcacgttt

SEQ ID NO: 93209 - DNA, 25 bp, Artificial
  probe
  misc_feature (1)..(25): SEQ ID NO: 7387; WAN024BT2_at; Start 54; Stop 78
gtctattaaacgcattgtatcacgt

SEQ ID NO: 93210 - DNA, 25 bp, Artificial
  probe
  misc_feature (1)..(25): SEQ ID NO: 7387; WAN024BT2_at; Start 36; Stop 60
aagacaactaattttatggtctatt

SEQ ID NO: 93211 - DNA, 25 bp, Artificial
  probe
  misc_feature (1)..(25): SEQ ID NO: 7387; WAN024BT2_at; Start 43; Stop 67
ctaattttatggtctattaaacgca

SEQ ID NO: 93212 - DNA, 25 bp, Artificial
  probe
  misc_feature (1)..(25): SEQ ID NO: 7387; WAN024BT2_at; Start 20; Stop 44
ttcaatttgagaagaaaagacaact

SEQ ID NO: 93213 - DNA, 25 bp, Artificial
  probe
  misc_feature (1)..(25): SEQ ID NO: 7387; WAN024BT2_at; Start 48; Stop 72
tttatggtctattaaacgcattgta

SEQ ID NO: 93214 - DNA, 25 bp, Artificial
  probe
  misc_feature (1)..(25): SEQ ID NO: 7387; WAN024BT2_at; Start 7; Stop 31
agtctaggcaaaattcaatttgaga

SEQ ID NO: 93215 - DNA, 25 bp, Artificial
  probe
  misc_feature (1)..(25): SEQ ID NO: 7387; WAN024BT2_at; Start 19; Stop 43
attcaatttgagaagaaaagacaac

SEQ ID NO: 93216 - DNA, 25 bp, Artificial
  probe
  misc_feature (1)..(25): SEQ ID NO: 7387; WAN024BT2_at; Start 5; Stop 29
aaagtctaggcaaaattcaatttga

SEQ ID NO: 93217 - DNA, 25 bp, Artificial
  probe
  misc_feature (1)..(25): SEQ ID NO: 7387; WAN024BT2_at; Start 53; Stop 77
ggtctattaaacgcattgtatcacg

SEQ ID NO: 93218 - DNA, 25 bp, Artificial
  probe
  misc_feature (1)..(25): SEQ ID NO: 7387; WAN024BT2_at; Start 1; Stop 25
ttgaaaagtctaggcaaaattcaat

SEQ ID NO: 93219 - DNA, 25 bp, Artificial
  probe
  misc_feature (1)..(25): SEQ ID NO: 7387; WAN024BT2_at; Start 18; Stop 42
aattcaatttgagaagaaaagacaa

SEQ ID NO: 93220 - DNA, 25 bp, Artificial
  probe
  misc_feature (1)..(25): SEQ ID NO: 7387; WAN024BT2_at; Start 6; Stop 30
aagtctaggcaaaattcaatttgag

SEQ ID NO: 93221 - DNA, 25 bp, Artificial
  probe
  misc_feature (1)..(25): SEQ ID NO: 7387; WAN024BT2_at; Start 38; Stop 62
gacaactaattttatggtctattaa

SEQ ID NO: 93222 - DNA, 25 bp, Artificial
  probe
  misc_feature (1)..(25): SEQ ID NO: 7387; WAN024BT2_at; Start 37; Stop 61
agacaactaattttatggtctatta

SEQ ID NO: 93223 - DNA, 25 bp, Artificial
  probe
  misc_feature (1)..(25): SEQ ID NO: 7387; WAN024BT2_at; Start 51; Stop 75
atggtctattaaacgcattgtatca

SEQ ID NO: 93224 - DNA, 25 bp, Artificial
  probe
  misc_feature (1)..(25): SEQ ID NO: 7387; WAN024BT2_at; Start 49; Stop 73
ttatggtctattaaacgcattgtat

SEQ ID NO: 93225 - DNA, 25 bp, Artificial
  probe
  misc_feature (1)..(25): SEQ ID NO: 7387; WAN024BT2_at; Start 35; Stop 59
aaagacaactaattttatggtctat

SEQ ID NO: 93226 - DNA, 25 bp, Artificial
  probe
  misc_feature (1)..(25): SEQ ID NO: 7380; WAN024BT3_at; Start 27; Stop 51
tcttgtggagatatttccttcaatt

SEQ ID NO: 93227 - DNA, 25 bp, Artificial
  probe
  misc_feature (1)..(25): SEQ ID NO: 7380; WAN024BT3_at; Start 9; Stop 33
gcttaatagtatgcgttttcttgtg

SEQ ID NO: 93228 - DNA, 25 bp, Artificial
  probe
  misc_feature (1)..(25): SEQ ID NO: 7380; WAN024BT3_at; Start 55; Stop 79
gctactatattaaacaaaaatcaaa

SEQ ID NO: 93229 - DNA, 25 bp, Artificial
  probe
  misc_feature (1)..(25): SEQ ID NO: 7380; WAN024BT3_at; Start 47; Stop 71
caatttttgctactatattaaacaa

SEQ ID NO: 93230 - DNA, 25 bp, Artificial
  probe
  misc_feature (1)..(25): SEQ ID NO: 7380; WAN024BT3_at; Start 20; Stop 44
tgcgttttcttgtggagatatttcc

SEQ ID NO: 93231 - DNA, 25 bp, Artificial
  probe
  misc_feature (1)..(25): SEQ ID NO: 7380; WAN024BT3_at; Start 43; Stop 67
ccttcaatttttgctactatattaa

SEQ ID NO: 93232 - DNA, 25 bp, Artificial
  probe
  misc_feature (1)..(25): SEQ ID NO: 7380; WAN024BT3_at; Start 32; Stop 56
tggagatatttccttcaatttttgc

SEQ ID NO: 93233 - DNA, 25 bp, Artificial
  probe
  misc_feature (1)..(25): SEQ ID NO: 7380; WAN024BT3_at; Start 42; Stop 66
tccttcaatttttgctactatatta

SEQ ID NO: 93234 - DNA, 25 bp, Artificial
  probe
  misc_feature (1)..(25): SEQ ID NO: 7380; WAN024BT3_at; Start 39; Stop 63
atttccttcaatttttgctactata

SEQ ID NO: 93235 - DNA, 25 bp, Artificial
  probe
  misc_feature (1)..(25): SEQ ID NO: 7380; WAN024BT3_at; Start 35; Stop 59
agatatttccttcaatttttgctac

SEQ ID NO: 93236 - DNA, 25 bp, Artificial
  probe
  misc_feature (1)..(25): SEQ ID NO: 7380; WAN024BT3_at; Start 36; Stop 60
gatatttccttcaatttttgctact

SEQ ID NO: 93237 - DNA, 25 bp, Artificial
  probe
  misc_feature (1)..(25): SEQ ID NO: 7380; WAN024BT3_at; Start 29; Stop 53
ttgtggagatatttccttcaatttt

SEQ ID NO: 93238 - DNA, 25 bp, Artificial
  probe
  misc_feature (1)..(25): SEQ ID NO: 7380; WAN024BT3_at; Start 34; Stop 58
gagatatttccttcaatttttgcta

SEQ ID NO: 93239 - DNA, 25 bp, Artificial
  probe
  misc_feature (1)..(25): SEQ ID NO: 7380; WAN024BT3_at; Start 1; Stop 25
ttgaaaaagcttaatagtatgcgtt

SEQ ID NO: 93240 - DNA, 25 bp, Artificial
  probe
  misc_feature (1)..(25): SEQ ID NO: 7380; WAN024BT3_at; Start 7; Stop 31
aagcttaatagtatgcgttttcttg

SEQ ID NO: 93241 - DNA, 25 bp, Artificial
  probe
  misc_feature (1)..(25): SEQ ID NO: 7380; WAN024BT3_at; Start 28; Stop 52
cttgtggagatatttccttcaattt

SEQ ID NO: 93242 - DNA, 25 bp, Artificial
  probe
  misc_feature (1)..(25): SEQ ID NO: 7380; WAN024BT3_at; Start 60; Stop 84
tatattaaacaaaaatcaaaaagca

SEQ ID NO: 93243 - DNA, 25 bp, Artificial
  probe
  misc_feature (1)..(25): SEQ ID NO: 7380; WAN024BT3_at; Start 23; Stop 47
gttttcttgtggagatatttccttc

SEQ ID NO: 93244 - DNA, 25 bp, Artificial
  probe
  misc_feature (1)..(25): SEQ ID NO: 7380; WAN024BT3_at; Start 25; Stop 49
tttcttgtggagatatttccttcaa

SEQ ID NO: 93245 - DNA, 25 bp, Artificial
  probe
  misc_feature (1)..(25): SEQ ID NO: 7380; WAN024BT3_at; Start 8; Stop 32
agcttaatagtatgcgttttcttgt

SEQ ID NO: 93246 - DNA, 25 bp, Artificial
  probe
  misc_feature (1)..(25): SEQ ID NO: 7380; WAN024BT3_at; Start 26; Stop 50
ttcttgtggagatatttccttcaat

SEQ ID NO: 93247 - DNA, 25 bp, Artificial
  probe
  misc_feature (1)..(25): SEQ ID NO: 7380; WAN024BT3_at; Start 30; Stop 54
tgtggagatatttccttcaattttt

SEQ ID NO: 93248 - DNA, 25 bp, Artificial
  probe
  misc_feature (1)..(25): SEQ ID NO: 7380; WAN024BT3_at; Start 46; Stop 70
tcaatttttgctactatattaaaca

SEQ ID NO: 93249 - DNA, 25 bp, Artificial
  probe
  misc_feature (1)..(25): SEQ ID NO: 7380; WAN024BT3_at; Start 24; Stop 48
ttttcttgtggagatatttccttca

SEQ ID NO: 93250 - DNA, 25 bp, Artificial
  probe
  misc_feature (1)..(25): SEQ ID NO: 7380; WAN024BT3_at; Start 22; Stop 46
cgttttcttgtggagatatttcctt

SEQ ID NO: 93251 - DNA, 25 bp, Artificial
  probe
  misc_feature (1)..(25): SEQ ID NO: 7380; WAN024BT3_at; Start 21; Stop 45
gcgttttcttgtggagatatttcct

SEQ ID NO: 93252 - DNA, 25 bp, Artificial
  probe
  misc_feature (1)..(25): SEQ ID NO: 7380; WAN024BT3_at; Start 38; Stop 62
tatttccttcaatttttgctactat

SEQ ID NO: 93253 - DNA, 25 bp, Artificial
  probe
  misc_feature (1)..(25): SEQ ID NO: 7380; WAN024BT3_at; Start 54; Stop 78
tgctactatattaaacaaaaatcaa

SEQ ID NO: 93254 - DNA, 25 bp, Artificial
  probe
  misc_feature (1)..(25): SEQ ID NO: 7380; WAN024BT3_at; Start 2; Stop 26
tgaaaaagcttaatagtatgcgttt

SEQ ID NO: 93255 - DNA, 25 bp, Artificial
  probe
  misc_feature (1)..(25): SEQ ID NO: 7380; WAN024BT3_at; Start 33; Stop 57
ggagatatttccttcaatttttgct

SEQ ID NO: 93256 - DNA, 25 bp, Artificial
  probe
  misc_feature (1)..(25): SEQ ID NO: 7380; WAN024BT3_at; Start 5; Stop 29
aaaagcttaatagtatgcgttttct

SEQ ID NO: 93257 - DNA, 25 bp, Artificial
  probe
  misc_feature (1)..(25): SEQ ID NO: 7380; WAN024BT3_at; Start 6; Stop 30
aaagcttaatagtatgcgttttctt

SEQ ID NO: 93258 - DNA, 25 bp, Artificial
  probe
  misc_feature (1)..(25): SEQ ID NO: 7380; WAN024BT3_at; Start 53; Stop 77
ttgctactatattaaacaaaaatca

SEQ ID NO: 93259 - DNA, 25 bp, Artificial
  probe
  misc_feature (1)..(25): SEQ ID NO: 7380; WAN024BT3_at; Start 31; Stop 55
gtggagatatttccttcaatttttg

SEQ ID NO: 93260 - DNA, 25 bp, Artificial
  probe
  misc_feature (1)..(25): SEQ ID NO: 6389; WAN024BT4_at; Start 20; Stop 44
catctccattcttatatctatctgg

SEQ ID NO: 93261 - DNA, 25 bp, Artificial
  probe
  misc_feature (1)..(25): SEQ ID NO: 6389; WAN024BT4_at; Start 51; Stop 75
tacaagctctcatcagaataccttt

SEQ ID NO: 93262 - DNA, 25 bp, Artificial
  probe
  misc_feature (1)..(25): SEQ ID NO: 6389; WAN024BT4_at; Start 26; Stop 50
cattcttatatctatctggtattgt

SEQ ID NO: 93263 - DNA, 25 bp, Artificial
  probe
  misc_feature (1)..(25): SEQ ID NO: 6389; WAN024BT4_at; Start 41; Stop 65
ctggtattgttacaagctctcatca

SEQ ID NO: 93264 - DNA, 25 bp, Artificial
  probe
  misc_feature (1)..(25): SEQ ID NO: 6389; WAN024BT4_at; Start 15; Stop 39
tcaaacatctccattcttatatcta

SEQ ID NO: 93265 - DNA, 25 bp, Artificial
  probe
  misc_feature (1)..(25): SEQ ID NO: 6389; WAN024BT4_at; Start 8; Stop 32
cattttatcaaacatctccattctt

SEQ ID NO: 93266 - DNA, 25 bp, Artificial
  probe
  misc_feature (1)..(25): SEQ ID NO: 6389; WAN024BT4_at; Start 35; Stop 59
atctatctggtattgttacaagctc

SEQ ID NO: 93267 - DNA, 25 bp, Artificial
  probe
  misc_feature (1)..(25): SEQ ID NO: 6389; WAN024BT4_at; Start 29; Stop 53
tcttatatctatctggtattgttac

SEQ ID NO: 93268 - DNA, 25 bp, Artificial
  probe
  misc_feature (1)..(25): SEQ ID NO: 6389; WAN024BT4_at; Start 42; Stop 66
tggtattgttacaagctctcatcag

SEQ ID NO: 93269 - DNA, 25 bp, Artificial
  probe
  misc_feature (1)..(25): SEQ ID NO: 6389; WAN024BT4_at; Start 37; Stop 61
ctatctggtattgttacaagctctc

SEQ ID NO: 93270 - DNA, 25 bp, Artificial
  probe
  misc_feature (1)..(25): SEQ ID NO: 6389; WAN024BT4_at; Start 32; Stop 56
tatatctatctggtattgttacaag

SEQ ID NO: 93271 - DNA, 25 bp, Artificial
  probe
  misc_feature (1)..(25): SEQ ID NO: 6389; WAN024BT4_at; Start 43; Stop 67
ggtattgttacaagctctcatcaga

SEQ ID NO: 93272 - DNA, 25 bp, Artificial
  probe
  misc_feature (1)..(25): SEQ ID NO: 6389; WAN024BT4_at; Start 49; Stop 73
gttacaagctctcatcagaatacct

SEQ ID NO: 93273 - DNA, 25 bp, Artificial
  probe
  misc_feature (1)..(25): SEQ ID NO: 6389; WAN024BT4_at; Start 45; Stop 69
tattgttacaagctctcatcagaat

SEQ ID NO: 93274 - DNA, 25 bp, Artificial
  probe
  misc_feature (1)..(25): SEQ ID NO: 6389; WAN024BT4_at; Start 54; Stop 78
aagctctcatcagaatacctttctc

SEQ ID NO: 93275 - DNA, 25 bp, Artificial
  probe
  misc_feature (1)..(25): SEQ ID NO: 6389; WAN024BT4_at; Start 53; Stop 77
caagctctcatcagaatacctttct

SEQ ID NO: 93276 - DNA, 25 bp, Artificial
  probe
  misc_feature (1)..(25): SEQ ID NO: 6389; WAN024BT4_at; Start 48; Stop 72
tgttacaagctctcatcagaatacc

SEQ ID NO: 93277 - DNA, 25 bp, Artificial
  probe
  misc_feature (1)..(25): SEQ ID NO: 6389; WAN024BT4_at; Start 7; Stop 31
gcattttatcaaacatctccattct

SEQ ID NO: 93278 - DNA, 25 bp, Artificial
  probe
  misc_feature (1)..(25): SEQ ID NO: 6389; WAN024BT4_at; Start 46; Stop 70
attgttacaagctctcatcagaata

SEQ ID NO: 93279 - DNA, 25 bp, Artificial
  probe
  misc_feature (1)..(25): SEQ ID NO: 6389; WAN024BT4_at; Start 44; Stop 68
gtattgttacaagctctcatcagaa

SEQ ID NO: 93280 - DNA, 25 bp, Artificial
  probe
  misc_feature (1)..(25): SEQ ID NO: 6389; WAN024BT4_at; Start 25; Stop 49
ccattcttatatctatctggtattg

SEQ ID NO: 93281 - DNA, 25 bp, Artificial
  probe
  misc_feature (1)..(25): SEQ ID NO: 6389; WAN024BT4_at; Start 47; Stop 71
ttgttacaagctctcatcagaatac

SEQ ID NO: 93282 - DNA, 25 bp, Artificial
  probe
  misc_feature (1)..(25): SEQ ID NO: 6389; WAN024BT4_at; Start 6; Stop 30
agcattttatcaaacatctccattc

SEQ ID NO: 93283 - DNA, 25 bp, Artificial
  probe
  misc_feature (1)..(25): SEQ ID NO: 6389; WAN024BT4_at; Start 40; Stop 64
tctggtattgttacaagctctcatc

SEQ ID NO: 93284 - DNA, 25 bp, Artificial
  probe
  misc_feature (1)..(25): SEQ ID NO: 6389; WAN024BT4_at; Start 34; Stop 58
tatctatctggtattgttacaagct

SEQ ID NO: 93285 - DNA, 25 bp, Artificial
  probe
  misc_feature (1)..(25): SEQ ID NO: 6389; WAN024BT4_at; Start 22; Stop 46
tctccattcttatatctatctggta

SEQ ID NO: 93286 - DNA, 25 bp, Artificial
  probe
  misc_feature (1)..(25): SEQ ID NO: 6389; WAN024BT4_at; Start 16; Stop 40
caaacatctccattcttatatctat

SEQ ID NO: 93287 - DNA, 25 bp, Artificial
  probe
  misc_feature (1)..(25): SEQ ID NO: 6389; WAN024BT4_at; Start 33; Stop 57
atatctatctggtattgttacaagc

SEQ ID NO: 93288 - DNA, 25 bp, Artificial
  probe
  misc_feature (1)..(25): SEQ ID NO: 6389; WAN024BT4_at; Start 3; Stop 27
gaaagcattttatcaaacatctcca

SEQ ID NO: 93289 - DNA, 25 bp, Artificial
  probe
  misc_feature (1)..(25): SEQ ID NO: 6389; WAN024BT4_at; Start 38; Stop 62
tatctggtattgttacaagctctca

SEQ ID NO: 93290 - DNA, 25 bp, Artificial
  probe
  misc_feature (1)..(25): SEQ ID NO: 6389; WAN024BT4_at; Start 2; Stop 26
tgaaagcattttatcaaacatctcc

SEQ ID NO: 93291 - DNA, 25 bp, Artificial
  probe
  misc_feature (1)..(25): SEQ ID NO: 6389; WAN024BT4_at; Start 36; Stop 60
tctatctggtattgttacaagctct

SEQ ID NO: 93292 - DNA, 25 bp, Artificial
  probe
  misc_feature (1)..(25): SEQ ID NO: 6389; WAN024BT4_at; Start 4; Stop 28
aaagcattttatcaaacatctccat

SEQ ID NO: 93293 - DNA, 25 bp, Artificial
  probe
  misc_feature (1)..(25): SEQ ID NO: 6389; WAN024BT4_at; Start 50; Stop 74
ttacaagctctcatcagaatacctt

SEQ ID NO: 93294 - DNA, 25 bp, Artificial
  probe
  misc_feature (1)..(25): SEQ ID NO: 7000; WAN024BT5_at; Start 105; Stop 129
tggaggccatcatgatccatataat

SEQ ID NO: 93295 - DNA, 25 bp, Artificial
  probe
  misc_feature (1)..(25): SEQ ID NO: 7000; WAN024BT5_at; Start 166; Stop 190
tatcactgggcctatgttggaagta

SEQ ID NO: 93296 - DNA, 25 bp, Artificial
  probe
  misc_feature (1)..(25): SEQ ID NO: 7000; WAN024BT5_at; Start 79; Stop 103
tctcaccgtggtggcgagtggacct

SEQ ID NO: 93297 - DNA, 25 bp, Artificial
  probe
  misc_feature (1)..(25): SEQ ID NO: 7000; WAN024BT5_at; Start 176; Stop 200
cctatgttggaagtaatgaacgtga

SEQ ID NO: 93298 - DNA, 25 bp, Artificial
  probe
  misc_feature (1)..(25): SEQ ID NO: 7000; WAN024BT5_at; Start 74; Stop 98
cagtttctcaccgtggtggcgagtg

SEQ ID NO: 93299 - DNA, 25 bp, Artificial
  probe
  misc_feature (1)..(25): SEQ ID NO: 7000; WAN024BT5_at; Start 231; Stop 255
tagtgcggcctatgcgtttgttaat

SEQ ID NO: 93300 - DNA, 25 bp, Artificial
  probe
  misc_feature (1)..(25): SEQ ID NO: 7000; WAN024BT5_at; Start 16; Stop 40
aaagtagttgcatcatcccttgccg

SEQ ID NO: 93301 - DNA, 25 bp, Artificial
  probe
  misc_feature (1)..(25): SEQ ID NO: 7000; WAN024BT5_at; Start 143; Stop 167
cgaattattatcatggttcacagta

SEQ ID NO: 93302 - DNA, 25 bp, Artificial
  probe
  misc_feature (1)..(25): SEQ ID NO: 7000; WAN024BT5_at; Start 217; Stop 241
tatgcaggagcacatagtgcggcct

SEQ ID NO: 93303 - DNA, 25 bp, Artificial
  probe
  misc_feature (1)..(25): SEQ ID NO: 7000; WAN024BT5_at; Start 235; Stop 259
gcggcctatgcgtttgttaatacaa

SEQ ID NO: 93304 - DNA, 25 bp, Artificial
  probe
  misc_feature (1)..(25): SEQ ID NO: 7000; WAN024BT5_at; Start 161; Stop 185
cacagtatcactgggcctatgttgg

SEQ ID NO: 93305 - DNA, 25 bp, Artificial
  probe
  misc_feature (1)..(25): SEQ ID NO: 7000; WAN024BT5_at; Start 65; Stop 89
ctgttttggcagtttctcaccgtgg

SEQ ID NO: 93306 - DNA, 25 bp, Artificial
  probe
  misc_feature (1)..(25): SEQ ID NO: 7000; WAN024BT5_at; Start 97; Stop 121
tggacctatggaggccatcatgatc

SEQ ID NO: 93307 - DNA, 25 bp, Artificial
  probe
  misc_feature (1)..(25): SEQ ID NO: 7000; WAN024BT5_at; Start 92; Stop 116
gcgagtggacctatggaggccatca

SEQ ID NO: 93308 - DNA, 25 bp, Artificial
  probe
  misc_feature (1)..(25): SEQ ID NO: 7000; WAN024BT5_at; Start 183; Stop 207
tggaagtaatgaacgtgacaatcaa

SEQ ID NO: 93309 - DNA, 25 bp, Artificial
  probe
  misc_feature (1)..(25): SEQ ID NO: 7000; WAN024BT5_at; Start 150; Stop 174
ttatcatggttcacagtatcactgg

SEQ ID NO: 93310 - DNA, 25 bp, Artificial
  probe
  misc_feature (1)..(25): SEQ ID NO: 7000; WAN024BT5_at; Start 153; Stop 177
tcatggttcacagtatcactgggcc

SEQ ID NO: 93311 - DNA, 25 bp, Artificial
  probe
  misc_feature (1)..(25): SEQ ID NO: 7000; WAN024BT5_at; Start 267; Stop 291
ggagcgaattacatttgatgcggga

SEQ ID NO: 93312 - DNA, 25 bp, Artificial
  probe
  misc_feature (1)..(25): SEQ ID NO: 7000; WAN024BT5_at; Start 221; Stop 245
caggagcacatagtgcggcctatgc

SEQ ID NO: 93313 - DNA, 25 bp, Artificial
  probe
  misc_feature (1)..(25): SEQ ID NO: 7000; WAN024BT5_at; Start 109; Stop 133
ggccatcatgatccatataattggg

SEQ ID NO: 93314 - DNA, 25 bp, Artificial
  probe
  misc_feature (1)..(25): SEQ ID NO: 7000; WAN024BT5_at; Start 270; Stop 294
gcgaattacatttgatgcgggatgg

SEQ ID NO: 93315 - DNA, 25 bp, Artificial
  probe
  misc_feature (1)..(25): SEQ ID NO: 7000; WAN024BT5_at; Start 157; Stop 181
ggttcacagtatcactgggcctatg

SEQ ID NO: 93316 - DNA, 25 bp, Artificial
  probe
  misc_feature (1)..(25): SEQ ID NO: 7000; WAN024BT5_at; Start 51; Stop 75
tagtttggctcttcctgttttggca

SEQ ID NO: 93317 - DNA, 25 bp, Artificial
  probe
  misc_feature (1)..(25): SEQ ID NO: 7000; WAN024BT5_at; Start 171; Stop 195
ctgggcctatgttggaagtaatgaa

SEQ ID NO: 93318 - DNA, 25 bp, Artificial
  probe
  misc_feature (1)..(25): SEQ ID NO: 7000; WAN024BT5_at; Start 38; Stop 62
ccgttttggcatttagtttggctct

SEQ ID NO: 93319 - DNA, 25 bp, Artificial
  probe
  misc_feature (1)..(25): SEQ ID NO: 7000; WAN024BT5_at; Start 24; Stop 48
tgcatcatcccttgccgttttggca

SEQ ID NO: 93320 - DNA, 25 bp, Artificial
  probe
  misc_feature (1)..(25): SEQ ID NO: 7000; WAN024BT5_at; Start 29; Stop 53
catcccttgccgttttggcatttag

SEQ ID NO: 93321 - DNA, 25 bp, Artificial
  probe
  misc_feature (1)..(25): SEQ ID NO: 7000; WAN024BT5_at; Start 132; Stop 156
gggagcattttcgaattattatcat

SEQ ID NO: 93322 - DNA, 25 bp, Artificial
  probe
  misc_feature (1)..(25): SEQ ID NO: 7000; WAN024BT5_at; Start 205; Stop 229
caaaaaacagtttatgcaggagcac

SEQ ID NO: 93323 - DNA, 25 bp, Artificial
  probe
  misc_feature (1)..(25): SEQ ID NO: 7000; WAN024BT5_at; Start 10; Stop 34
tttagaaaagtagttgcatcatccc

SEQ ID NO: 93324 - DNA, 25 bp, Artificial
  probe
  misc_feature (1)..(25): SEQ ID NO: 7000; WAN024BT5_at; Start 212; Stop 236
cagtttatgcaggagcacatagtgc

SEQ ID NO: 93325 - DNA, 25 bp, Artificial
  probe
  misc_feature (1)..(25): SEQ ID NO: 7000; WAN024BT5_at; Start 69; Stop 93
tttggcagtttctcaccgtggtggc

SEQ ID NO: 93326 - DNA, 25 bp, Artificial
  probe
  misc_feature (1)..(25): SEQ ID NO: 7000; WAN024BT5_at; Start 192; Stop 216
tgaacgtgacaatcaaaaaacagtt

SEQ ID NO: 93327 - DNA, 25 bp, Artificial
  probe
  misc_feature (1)..(25): SEQ ID NO: 7000; WAN024BT5_at; Start 241; Stop 265
tatgcgtttgttaatacaaatttgg

SEQ ID NO: 93328 - DNA, 25 bp, Artificial
  probe
  misc_feature (1)..(25): SEQ ID NO: 7658; WAN024BT6_at; Start 26; Stop 50
gtaattcattttggcagcgtatact

SEQ ID NO: 93329 - DNA, 25 bp, Artificial
  probe
  misc_feature (1)..(25): SEQ ID NO: 7658; WAN024BT6_at; Start 38; Stop 62
ggcagcgtatactttttgtctccag

SEQ ID NO: 93330 - DNA, 25 bp, Artificial
  probe
  misc_feature (1)..(25): SEQ ID NO: 7658; WAN024BT6_at; Start 74; Stop 98
aataccgtagtttagatatacacat

SEQ ID NO: 93331 - DNA, 25 bp, Artificial
  probe
  misc_feature (1)..(25): SEQ ID NO: 7658; WAN024BT6_at; Start 40; Stop 64
cagcgtatactttttgtctccagtc

SEQ ID NO: 93332 - DNA, 25 bp, Artificial
  probe
  misc_feature (1)..(25): SEQ ID NO: 7658; WAN024BT6_at; Start 33; Stop 57
attttggcagcgtatactttttgtc

SEQ ID NO: 93333 - DNA, 25 bp, Artificial
  probe
  misc_feature (1)..(25): SEQ ID NO: 7658; WAN024BT6_at; Start 24; Stop 48
cagtaattcattttggcagcgtata

SEQ ID NO: 93334 - DNA, 25 bp, Artificial
  probe
  misc_feature (1)..(25): SEQ ID NO: 7658; WAN024BT6_at; Start 59; Stop 83
ccagtcttttcaataaataccgtag

SEQ ID NO: 93335 - DNA, 25 bp, Artificial
  probe
  misc_feature (1)..(25): SEQ ID NO: 7658; WAN024BT6_at; Start 39; Stop 63
gcagcgtatactttttgtctccagt

SEQ ID NO: 93336 - DNA, 25 bp, Artificial
  probe
  misc_feature (1)..(25): SEQ ID NO: 7658; WAN024BT6_at; Start 21; Stop 45
tttcagtaattcattttggcagcgt

SEQ ID NO: 93337 - DNA, 25 bp, Artificial
  probe
  misc_feature (1)..(25): SEQ ID NO: 7658; WAN024BT6_at; Start 36; Stop 60
ttggcagcgtatactttttgtctcc

SEQ ID NO: 93338 - DNA, 25 bp, Artificial
  probe
  misc_feature (1)..(25): SEQ ID NO: 7658; WAN024BT6_at; Start 78; Stop 102
ccgtagtttagatatacacattgaa

SEQ ID NO: 93339 - DNA, 25 bp, Artificial
  probe
  misc_feature (1)..(25): SEQ ID NO: 7658; WAN024BT6_at; Start 60; Stop 84
cagtcttttcaataaataccgtagt

SEQ ID NO: 93340 - DNA, 25 bp, Artificial
  probe
  misc_feature (1)..(25): SEQ ID NO: 7658; WAN024BT6_at; Start 43; Stop 67
cgtatactttttgtctccagtcttt

SEQ ID NO: 93341 - DNA, 25 bp, Artificial
  probe
  misc_feature (1)..(25): SEQ ID NO: 7658; WAN024BT6_at; Start 34; Stop 58
ttttggcagcgtatactttttgtct

SEQ ID NO: 93342 - DNA, 25 bp, Artificial
  probe
  misc_feature (1)..(25): SEQ ID NO: 7658; WAN024BT6_at; Start 28; Stop 52
aattcattttggcagcgtatacttt

SEQ ID NO: 93343 - DNA, 25 bp, Artificial
  probe
  misc_feature (1)..(25): SEQ ID NO: 7658; WAN024BT6_at; Start 76; Stop 100
taccgtagtttagatatacacattg

SEQ ID NO: 93344 - DNA, 25 bp, Artificial
  probe
  misc_feature (1)..(25): SEQ ID NO: 7658; WAN024BT6_at; Start 41; Stop 65
agcgtatactttttgtctccagtct

SEQ ID NO: 93345 - DNA, 25 bp, Artificial
  probe
  misc_feature (1)..(25): SEQ ID NO: 7658; WAN024BT6_at; Start 32; Stop 56
cattttggcagcgtatactttttgt

SEQ ID NO: 93346 - DNA, 25 bp, Artificial
  probe
  misc_feature (1)..(25): SEQ ID NO: 7658; WAN024BT6_at; Start 72; Stop 96
taaataccgtagtttagatatacac

SEQ ID NO: 93347 - DNA, 25 bp, Artificial
  probe
  misc_feature (1)..(25): SEQ ID NO: 7658; WAN024BT6_at; Start 79; Stop 103
cgtagtttagatatacacattgaaa

SEQ ID NO: 93348 - DNA, 25 bp, Artificial
  probe
  misc_feature (1)..(25): SEQ ID NO: 7658; WAN024BT6_at; Start 77; Stop 101
accgtagtttagatatacacattga

SEQ ID NO: 93349 - DNA, 25 bp, Artificial
  probe
  misc_feature (1)..(25): SEQ ID NO: 7658; WAN024BT6_at; Start 30; Stop 54
ttcattttggcagcgtatacttttt

SEQ ID NO: 93350 - DNA, 25 bp, Artificial
  probe
  misc_feature (1)..(25): SEQ ID NO: 7658; WAN024BT6_at; Start 25; Stop 49
agtaattcattttggcagcgtatac

SEQ ID NO: 93351 - DNA, 25 bp, Artificial
  probe
  misc_feature (1)..(25): SEQ ID NO: 7658; WAN024BT6_at; Start 37; Stop 61
tggcagcgtatactttttgtctcca

SEQ ID NO: 93352 - DNA, 25 bp, Artificial
  probe
  misc_feature (1)..(25): SEQ ID NO: 7658; WAN024BT6_at; Start 23; Stop 47
tcagtaattcattttggcagcgtat

SEQ ID NO: 93353 - DNA, 25 bp, Artificial
  probe
  misc_feature (1)..(25): SEQ ID NO: 7658; WAN024BT6_at; Start 42; Stop 66
gcgtatactttttgtctccagtctt

SEQ ID NO: 93354 - DNA, 25 bp, Artificial
  probe
  misc_feature (1)..(25): SEQ ID NO: 7658; WAN024BT6_at; Start 18; Stop 42
gattttcagtaattcattttggcag

SEQ ID NO: 93355 - DNA, 25 bp, Artificial
  probe
  misc_feature (1)..(25): SEQ ID NO: 7658; WAN024BT6_at; Start 2; Stop 26
tggttctctcttttttgattttcag

SEQ ID NO: 93356 - DNA, 25 bp, Artificial
  probe
  misc_feature (1)..(25): SEQ ID NO: 7658; WAN024BT6_at; Start 81; Stop 105
tagtttagatatacacattgaaatt

SEQ ID NO: 93357 - DNA, 25 bp, Artificial
  probe
  misc_feature (1)..(25): SEQ ID NO: 7658; WAN024BT6_at; Start 22; Stop 46
ttcagtaattcattttggcagcgta

SEQ ID NO: 93358 - DNA, 25 bp, Artificial
  probe
  misc_feature (1)..(25): SEQ ID NO: 7658; WAN024BT6_at; Start 35; Stop 59
tttggcagcgtatactttttgtctc

SEQ ID NO: 93359 - DNA, 25 bp, Artificial
  probe
  misc_feature (1)..(25): SEQ ID NO: 7658; WAN024BT6_at; Start 73; Stop 97
aaataccgtagtttagatatacaca

SEQ ID NO: 93360 - DNA, 25 bp, Artificial
  probe
  misc_feature (1)..(25): SEQ ID NO: 7658; WAN024BT6_at; Start 20; Stop 44
ttttcagtaattcattttggcagcg

SEQ ID NO: 93361 - DNA, 25 bp, Artificial
  probe
  misc_feature (1)..(25): SEQ ID NO: 7658; WAN024BT6_at; Start 47; Stop 71
tactttttgtctccagtcttttcaa

SEQ ID NO: 93362 - DNA, 25 bp, Artificial
  probe
  misc_feature (1)..(25): SEQ ID NO: 6741; WAN024BT7_at; Start 372; Stop 396
tgtagtccctatggccgtcggtgaa

SEQ ID NO: 93363 - DNA, 25 bp, Artificial
  probe
  misc_feature (1)..(25): SEQ ID NO: 6741; WAN024BT7_at; Start 215; Stop 239
gaaaacgacacccagagcttacaca

SEQ ID NO: 93364 - DNA, 25 bp, Artificial
  probe
  misc_feature (1)..(25): SEQ ID NO: 6741; WAN024BT7_at; Start 338; Stop 362
caggtacaacacagatttatgtcaa

SEQ ID NO: 93365 - DNA, 25 bp, Artificial
  probe
  misc_feature (1)..(25): SEQ ID NO: 6741; WAN024BT7_at; Start 13; Stop 37
gtggaaacatttcccattttctcta

SEQ ID NO: 93366 - DNA, 25 bp, Artificial
  probe
  misc_feature (1)..(25): SEQ ID NO: 6741; WAN024BT7_at; Start 168; Stop 192
taaacctttacattctgactatctc

SEQ ID NO: 93367 - DNA, 25 bp, Artificial
  probe
  misc_feature (1)..(25): SEQ ID NO: 6741; WAN024BT7_at; Start 178; Stop 202
cattctgactatctcaataataaga

SEQ ID NO: 93368 - DNA, 25 bp, Artificial
  probe
  misc_feature (1)..(25): SEQ ID NO: 6741; WAN024BT7_at; Start 203; Stop 227
tgaaaactatcagaaaacgacaccc

SEQ ID NO: 93369 - DNA, 25 bp, Artificial
  probe
  misc_feature (1)..(25): SEQ ID NO: 6741; WAN024BT7_at; Start 319; Stop 343
gctctaatacatagcgacacaggta

SEQ ID NO: 93370 - DNA, 25 bp, Artificial
  probe
  misc_feature (1)..(25): SEQ ID NO: 6741; WAN024BT7_at; Start 136; Stop 160
tttacttacatagataccaaaggca

SEQ ID NO: 93371 - DNA, 25 bp, Artificial
  probe
  misc_feature (1)..(25): SEQ ID NO: 6741; WAN024BT7_at; Start 269; Stop 293
gagcaacgctcgctaaacaagcagg

SEQ ID NO: 93372 - DNA, 25 bp, Artificial
  probe
  misc_feature (1)..(25): SEQ ID NO: 6741; WAN024BT7_at; Start 2; Stop 26
tgcgttttattgtggaaacatttcc

SEQ ID NO: 93373 - DNA, 25 bp, Artificial
  probe
  misc_feature (1)..(25): SEQ ID NO: 6741; WAN024BT7_at; Start 241; Stop 265
gctacgccacacaaactacgtcata

SEQ ID NO: 93374 - DNA, 25 bp, Artificial
  probe
  misc_feature (1)..(25): SEQ ID NO: 6741; WAN024BT7_at; Start 390; Stop 414
cggtgaatttgccttacagtctcta

SEQ ID NO: 93375 - DNA, 25 bp, Artificial
  probe
  misc_feature (1)..(25): SEQ ID NO: 6741; WAN024BT7_at; Start 378; Stop 402
ccctatggccgtcggtgaatttgcc

SEQ ID NO: 93376 - DNA, 25 bp, Artificial
  probe
  misc_feature (1)..(25): SEQ ID NO: 6741; WAN024BT7_at; Start 252; Stop 276
caaactacgtcataccggagcaacg

SEQ ID NO: 93377 - DNA, 25 bp, Artificial
  probe
  misc_feature (1)..(25): SEQ ID NO: 6741; WAN024BT7_at; Start 276; Stop 300
gctcgctaaacaagcaggaatgagc

SEQ ID NO: 93378 - DNA, 25 bp, Artificial
  probe
  misc_feature (1)..(25): SEQ ID NO: 6741; WAN024BT7_at; Start 385; Stop 409
gccgtcggtgaatttgccttacagt

SEQ ID NO: 93379 - DNA, 25 bp, Artificial
  probe
  misc_feature (1)..(25): SEQ ID NO: 6741; WAN024BT7_at; Start 347; Stop 371
cacagatttatgtcaatacttctaa

SEQ ID NO: 93380 - DNA, 25 bp, Artificial
  probe
  misc_feature (1)..(25): SEQ ID NO: 6741; WAN024BT7_at; Start 150; Stop 174
taccaaaggcaatatcaataaacct

SEQ ID NO: 93381 - DNA, 25 bp, Artificial
  probe
  misc_feature (1)..(25): SEQ ID NO: 6741; WAN024BT7_at; Start 79; Stop 103
caacaaaaatatgaactggcaaagt

SEQ ID NO: 93382 - DNA, 25 bp, Artificial
  probe
  misc_feature (1)..(25): SEQ ID NO: 6741; WAN024BT7_at; Start 210; Stop 234
tatcagaaaacgacacccagagctt

SEQ ID NO: 93383 - DNA, 25 bp, Artificial
  probe
  misc_feature (1)..(25): SEQ ID NO: 6741; WAN024BT7_at; Start 363; Stop 387
tacttctaatgtagtccctatggcc

SEQ ID NO: 93384 - DNA, 25 bp, Artificial
  probe
  misc_feature (1)..(25): SEQ ID NO: 6741; WAN024BT7_at; Start 60; Stop 84
tctgacttcatggaaaaaacaacaa

SEQ ID NO: 93385 - DNA, 25 bp, Artificial
  probe
  misc_feature (1)..(25): SEQ ID NO: 6741; WAN024BT7_at; Start 50; Stop 74
tacttcaacttctgacttcatggaa

SEQ ID NO: 93386 - DNA, 25 bp, Artificial
  probe
  misc_feature (1)..(25): SEQ ID NO: 6741; WAN024BT7_at; Start 97; Stop 121
gcaaagtttggtatcatcagtaatc

SEQ ID NO: 93387 - DNA, 25 bp, Artificial
  probe
  misc_feature (1)..(25): SEQ ID NO: 6741; WAN024BT7_at; Start 313; Stop 337
tctgaagctctaatacatagcgaca

SEQ ID NO: 93388 - DNA, 25 bp, Artificial
  probe
  misc_feature (1)..(25): SEQ ID NO: 6741; WAN024BT7_at; Start 369; Stop 393
taatgtagtccctatggccgtcggt

SEQ ID NO: 93389 - DNA, 25 bp, Artificial
  probe
  misc_feature (1)..(25): SEQ ID NO: 6741; WAN024BT7_at; Start 189; Stop 213
tctcaataataagatgaaaactatc

SEQ ID NO: 93390 - DNA, 25 bp, Artificial
  probe
  misc_feature (1)..(25): SEQ ID NO: 6741; WAN024BT7_at; Start 260; Stop 284
gtcataccggagcaacgctcgctaa

SEQ ID NO: 93391 - DNA, 25 bp, Artificial
  probe
  misc_feature (1)..(25): SEQ ID NO: 6741; WAN024BT7_at; Start 330; Stop 354
tagcgacacaggtacaacacagatt

SEQ ID NO: 93392 - DNA, 25 bp, Artificial
  probe
  misc_feature (1)..(25): SEQ ID NO: 6741; WAN024BT7_at; Start 42; Stop 66
taatgacttacttcaacttctgact

SEQ ID NO: 93393 - DNA, 25 bp, Artificial
  probe
  misc_feature (1)..(25): SEQ ID NO: 6741; WAN024BT7_at; Start 91; Stop 115
gaactggcaaagtttggtatcatca

SEQ ID NO: 93394 - DNA, 25 bp, Artificial
  probe
  misc_feature (1)..(25): SEQ ID NO: 6741; WAN024BT7_at; Start 394; Stop 418
gaatttgccttacagtctctaaaac

SEQ ID NO: 93395 - DNA, 25 bp, Artificial
  probe
  misc_feature (1)..(25): SEQ ID NO: 6741; WAN024BT7_at; Start 300; Stop 324
cttagaaaccatttctgaagctcta

SEQ ID NO: 93396 - DNA, 25 bp, Artificial
  probe
  misc_feature (1)..(25): SEQ ID NO: 6653; WAN024BT8_at; Start 280; Stop 304
gataatgtagaaaaatcatctaaag

SEQ ID NO: 93397 - DNA, 25 bp, Artificial
  probe
  misc_feature (1)..(25): SEQ ID NO: 6653; WAN024BT8_at; Start 256; Stop 280
gaaattttagaagaaagaatagatg

SEQ ID NO: 93398 - DNA, 25 bp, Artificial
  probe
  misc_feature (1)..(25): SEQ ID NO: 6653; WAN024BT8_at; Start 17; Stop 41
gattaagtattgaagaacagattga

SEQ ID NO: 93399 - DNA, 25 bp, Artificial
  probe
  misc_feature (1)..(25): SEQ ID NO: 6653; WAN024BT8_at; Start 151; Stop 175
gcagtgtttgaaagtatttttgaag

SEQ ID NO: 93400 - DNA, 25 bp, Artificial
  probe
  misc_feature (1)..(25): SEQ ID NO: 6653; WAN024BT8_at; Start 226; Stop 250
aatgatgaagaaataagattaaaca

SEQ ID NO: 93401 - DNA, 25 bp, Artificial
  probe
  misc_feature (1)..(25): SEQ ID NO: 6653; WAN024BT8_at; Start 272; Stop 296
gaatagatgataatgtagaaaaatc

SEQ ID NO: 93402 - DNA, 25 bp, Artificial
  probe
  misc_feature (1)..(25): SEQ ID NO: 6653; WAN024BT8_at; Start 138; Stop 162
tatagaaaaaggtgcagtgtttgaa

SEQ ID NO: 93403 - DNA, 25 bp, Artificial
  probe
  misc_feature (1)..(25): SEQ ID NO: 6653; WAN024BT8_at; Start 134; Stop 158
gacttatagaaaaaggtgcagtgtt

SEQ ID NO: 93404 - DNA, 25 bp, Artificial
  probe
  misc_feature (1)..(25): SEQ ID NO: 6653; WAN024BT8_at; Start 175; Stop 199
gaaagtattgatttaacaaaagatg

SEQ ID NO: 93405 - DNA, 25 bp, Artificial
  probe
  misc_feature (1)..(25): SEQ ID NO: 6653; WAN024BT8_at; Start 129; Stop 153
caaaagacttatagaaaaaggtgca

SEQ ID NO: 93406 - DNA, 25 bp, Artificial
  probe
  misc_feature (1)..(25): SEQ ID NO: 6653; WAN024BT8_at; Start 232; Stop 256
gaagaaataagattaaacataatgg

SEQ ID NO: 93407 - DNA, 25 bp, Artificial
  probe
  misc_feature (1)..(25): SEQ ID NO: 6653; WAN024BT8_at; Start 31; Stop 55
gaacagattgaaaagaaagaagaaa

SEQ ID NO: 93408 - DNA, 25 bp, Artificial
  probe
  misc_feature (1)..(25): SEQ ID NO: 6653; WAN024BT8_at; Start 136; Stop 160
cttatagaaaaaggtgcagtgtttg

SEQ ID NO: 93409 - DNA, 25 bp, Artificial
  probe
  misc_feature (1)..(25): SEQ ID NO: 6653; WAN024BT8_at; Start 132; Stop 156
aagacttatagaaaaaggtgcagtg

SEQ ID NO: 93410 - DNA, 25 bp, Artificial
  probe
  misc_feature (1)..(25): SEQ ID NO: 6653; WAN024BT8_at; Start 142; Stop 166
gaaaaaggtgcagtgtttgaaagta

SEQ ID NO: 93411 - DNA, 25 bp, Artificial
  probe
  misc_feature (1)..(25): SEQ ID NO: 6653; WAN024BT8_at; Start 265; Stop 289
gaagaaagaatagatgataatgtag

SEQ ID NO: 93412 - DNA, 25 bp, Artificial
  probe
  misc_feature (1)..(25): SEQ ID NO: 6653; WAN024BT8_at; Start 83; Stop 107
gacagttgaagaaaaaacttaatga

SEQ ID NO: 93413 - DNA, 25 bp, Artificial
  probe
  misc_feature (1)..(25): SEQ ID NO: 6653; WAN024BT8_at; Start 168; Stop 192
ttttgaagaaagtattgatttaaca

SEQ ID NO: 93414 - DNA, 25 bp, Artificial
  probe
  misc_feature (1)..(25): SEQ ID NO: 6653; WAN024BT8_at; Start 2; Stop 26
tgatggcaagtaaaagattaagtat

SEQ ID NO: 93415 - DNA, 25 bp, Artificial
  probe
  misc_feature (1)..(25): SEQ ID NO: 6653; WAN024BT8_at; Start 101; Stop 125
ttaatgaacaagaaagaaaagcaag

SEQ ID NO: 93416 - DNA, 25 bp, Artificial
  probe
  misc_feature (1)..(25): SEQ ID NO: 6653; WAN024BT8_at; Start 179; Stop 203
gtattgatttaacaaaagatgaatt

SEQ ID NO: 93417 - DNA, 25 bp, Artificial
  probe
  misc_feature (1)..(25): SEQ ID NO: 6653; WAN024BT8_at; Start 52; Stop 76
gaaagcattaagcaattacaaaatc

SEQ ID NO: 93418 - DNA, 25 bp, Artificial
  probe
  misc_feature (1)..(25): SEQ ID NO: 6653; WAN024BT8_at; Start 56; Stop 80
gcattaagcaattacaaaatcaaaa

SEQ ID NO: 93419 - DNA, 25 bp, Artificial
  probe
  misc_feature (1)..(25): SEQ ID NO: 6653; WAN024BT8_at; Start 144; Stop 168
aaaaggtgcagtgtttgaaagtatt

SEQ ID NO: 93420 - DNA, 25 bp, Artificial
  probe
  misc_feature (1)..(25): SEQ ID NO: 6653; WAN024BT8_at; Start 106; Stop 130
gaacaagaaagaaaagcaagaaaca

SEQ ID NO: 93421 - DNA, 25 bp, Artificial
  probe
  misc_feature (1)..(25): SEQ ID NO: 6653; WAN024BT8_at; Start 45; Stop 69
gaaagaagaaagcattaagcaatta

SEQ ID NO: 93422 - DNA, 25 bp, Artificial
  probe
  misc_feature (1)..(25): SEQ ID NO: 6653; WAN024BT8_at; Start 105; Stop 129
tgaacaagaaagaaaagcaagaaac

SEQ ID NO: 93423 - DNA, 25 bp, Artificial
  probe
  misc_feature (1)..(25): SEQ ID NO: 6653; WAN024BT8_at; Start 12; Stop 36
taaaagattaagtattgaagaacag

SEQ ID NO: 93424 - DNA, 25 bp, Artificial
  probe
  misc_feature (1)..(25): SEQ ID NO: 6653; WAN024BT8_at; Start 49; Stop 73
gaagaaagcattaagcaattacaaa

SEQ ID NO: 93425 - DNA, 25 bp, Artificial
  probe
  misc_feature (1)..(25): SEQ ID NO: 6653; WAN024BT8_at; Start 89; Stop 113
tgaagaaaaaacttaatgaacaaga

SEQ ID NO: 93426 - DNA, 25 bp, Artificial
  probe
  misc_feature (1)..(25): SEQ ID NO: 6653; WAN024BT8_at; Start 140; Stop 164
tagaaaaaggtgcagtgtttgaaag

SEQ ID NO: 93427 - DNA, 25 bp, Artificial
  probe
  misc_feature (1)..(25): SEQ ID NO: 6653; WAN024BT8_at; Start 285; Stop 309
tgtagaaaaatcatctaaagatgaa

SEQ ID NO: 93428 - DNA, 25 bp, Artificial
  probe
  misc_feature (1)..(25): SEQ ID NO: 6653; WAN024BT8_at; Start 242; Stop 266
gattaaacataatggaaattttaga

SEQ ID NO: 93429 - DNA, 25 bp, Artificial
  probe
  misc_feature (1)..(25): SEQ ID NO: 6653; WAN024BT8_at; Start 191; Stop 215
caaaagatgaattttataagttaat

SEQ ID NO: 93430 - DNA, 25 bp, Artificial
  probe
  misc_feature (1)..(25): SEQ ID NO: 7248; WAN024BT9_at; Start 424; Stop 448
catataatgaccataatgcgaccaa

SEQ ID NO: 93431 - DNA, 25 bp, Artificial
  probe
  misc_feature (1)..(25): SEQ ID NO: 7248; WAN024BT9_at; Start 624; Stop 648
caaatatttagaaagagcaggagca

SEQ ID NO: 93432 - DNA, 25 bp, Artificial
  probe
  misc_feature (1)..(25): SEQ ID NO: 7248; WAN024BT9_at; Start 74; Stop 98
caagtgcagcatatataagtggaga

SEQ ID NO: 93433 - DNA, 25 bp, Artificial
  probe
  misc_feature (1)..(25): SEQ ID NO: 7248; WAN024BT9_at; Start 1078; Stop 1102
gaaaccataggtcagttacaaacaa

SEQ ID NO: 93434 - DNA, 25 bp, Artificial
  probe
  misc_feature (1)..(25): SEQ ID NO: 7248; WAN024BT9_at; Start 563; Stop 587
caacctggaacgatacaggcaatgt

SEQ ID NO: 93435 - DNA, 25 bp, Artificial
  probe
  misc_feature (1)..(25): SEQ ID NO: 7248; WAN024BT9_at; Start 1297; Stop 1321
gaccgatataaagtagtaagtggga

SEQ ID NO: 93436 - DNA, 25 bp, Artificial
  probe
  misc_feature (1)..(25): SEQ ID NO: 7248; WAN024BT9_at; Start 1337; Stop 1361
tatcagataaggaaaaactaagtcc

SEQ ID NO: 93437 - DNA, 25 bp, Artificial
  probe
  misc_feature (1)..(25): SEQ ID NO: 7248; WAN024BT9_at; Start 722; Stop 746
cagcaagtgcaatggaaagaaaggg

SEQ ID NO: 93438 - DNA, 25 bp, Artificial
  probe
  misc_feature (1)..(25): SEQ ID NO: 7248; WAN024BT9_at; Start 1522; Stop 1546
gataagctaataaaacagggagaaa

SEQ ID NO: 93439 - DNA, 25 bp, Artificial
  probe
  misc_feature (1)..(25): SEQ ID NO: 7248; WAN024BT9_at; Start 746; Stop 770
gaatagaaactgacaagggaaacta

SEQ ID NO: 93440 - DNA, 25 bp, Artificial
  probe
  misc_feature (1)..(25): SEQ ID NO: 7248; WAN024BT9_at; Start 12; Stop 36
ggcagacagttttcatttttcagta

SEQ ID NO: 93441 - DNA, 25 bp, Artificial
  probe
  misc_feature (1)..(25): SEQ ID NO: 7248; WAN024BT9_at; Start 173; Stop 197
tattgcctgatcatataccaaaaga

SEQ ID NO: 93442 - DNA, 25 bp, Artificial
  probe
  misc_feature (1)..(25): SEQ ID NO: 7248; WAN024BT9_at; Start 691; Stop 715
gattatctaccgacaatccatttag

SEQ ID NO: 93443 - DNA, 25 bp, Artificial
  probe
  misc_feature (1)..(25): SEQ ID NO: 7248; WAN024BT9_at; Start 356; Stop 380
cacaaggaatgatagtagattatgc

SEQ ID NO: 93444 - DNA, 25 bp, Artificial
  probe
  misc_feature (1)..(25): SEQ ID NO: 7248; WAN024BT9_at; Start 205; Stop 229
gataggtctaccttatggaataaag

SEQ ID NO: 93445 - DNA, 25 bp, Artificial
  probe
  misc_feature (1)..(25): SEQ ID NO: 7248; WAN024BT9_at; Start 902; Stop 926
gagataaggtaatagacaaccctaa

SEQ ID NO: 93446 - DNA, 25 bp, Artificial
  probe
  misc_feature (1)..(25): SEQ ID NO: 7248; WAN024BT9_at; Start 1191; Stop 1215
tctatactatgaaatctacaaagcc

SEQ ID NO: 93447 - DNA, 25 bp, Artificial
  probe
  misc_feature (1)..(25): SEQ ID NO: 7248; WAN024BT9_at; Start 1540; Stop 1564
ggagaaaaaccaagtgtaatagcac

SEQ ID NO: 93448 - DNA, 25 bp, Artificial
  probe
  misc_feature (1)..(25): SEQ ID NO: 7248; WAN024BT9_at; Start 552; Stop 576
agtagaactaacaacctggaacgat

SEQ ID NO: 93449 - DNA, 25 bp, Artificial
  probe
  misc_feature (1)..(25): SEQ ID NO: 7248; WAN024BT9_at; Start 60; Stop 84
caaaagtgcagtagcaagtgcagca

SEQ ID NO: 93450 - DNA, 25 bp, Artificial
  probe
  misc_feature (1)..(25): SEQ ID NO: 7248; WAN024BT9_at; Start 266; Stop 290
caagacaattcataataggactacc

SEQ ID NO: 93451 - DNA, 25 bp, Artificial
  probe
  misc_feature (1)..(25): SEQ ID NO: 7248; WAN024BT9_at; Start 1488; Stop 1512
caaagaacttggtatagatttatcc

SEQ ID NO: 93452 - DNA, 25 bp, Artificial
  probe
  misc_feature (1)..(25): SEQ ID NO: 7248; WAN024BT9_at; Start 118; Stop 142
gacggagtaacccatgactacacaa

SEQ ID NO: 93453 - DNA, 25 bp, Artificial
  probe
  misc_feature (1)..(25): SEQ ID NO: 7248; WAN024BT9_at; Start 707; Stop 731
tccatttaggatcagcagcaagtgc

SEQ ID NO: 93454 - DNA, 25 bp, Artificial
  probe
  misc_feature (1)..(25): SEQ ID NO: 7248; WAN024BT9_at; Start 1426; Stop 1450
gacaagataaaagatgaataccagg

SEQ ID NO: 93455 - DNA, 25 bp, Artificial
  probe
  misc_feature (1)..(25): SEQ ID NO: 7248; WAN024BT9_at; Start 1027; Stop 1051
gacttcaaaaagctaacaagtgcat

SEQ ID NO: 93456 - DNA, 25 bp, Artificial
  probe
  misc_feature (1)..(25): SEQ ID NO: 7248; WAN024BT9_at; Start 640; Stop 664
gcaggagcagaaaaaagagtagacc

SEQ ID NO: 93457 - DNA, 25 bp, Artificial
  probe
  misc_feature (1)..(25): SEQ ID NO: 7248; WAN024BT9_at; Start 1561; Stop 1585
gcacagattaaaaagttccaagacc

SEQ ID NO: 93458 - DNA, 25 bp, Artificial
  probe
  misc_feature (1)..(25): SEQ ID NO: 7248; WAN024BT9_at; Start 380; Stop 404
caattcatgatgagagtcaagataa

SEQ ID NO: 93459 - DNA, 25 bp, Artificial
  probe
  misc_feature (1)..(25): SEQ ID NO: 7248; WAN024BT9_at; Start 578; Stop 602
caggcaatgtagaaaaatggagaga

SEQ ID NO: 93460 - DNA, 25 bp, Artificial
  probe
  misc_feature (1)..(25): SEQ ID NO: 7248; WAN024BT9_at; Start 659; Stop 683
tagaccataggagttttaaaagaca

SEQ ID NO: 93461 - DNA, 25 bp, Artificial
  probe
  misc_feature (1)..(25): SEQ ID NO: 7248; WAN024BT9_at; Start 440; Stop 464
tgcgaccaataaacgaaaaaggaga

SEQ ID NO: 93462 - DNA, 25 bp, Artificial
  probe
  misc_feature (1)..(25): SEQ ID NO: 7248; WAN024BT9_at; Start 44; Stop 68
tatcaagaggaaaaggcaaaagtgc

SEQ ID NO: 93463 - DNA, 25 bp, Artificial
  probe
  misc_feature (1)..(25): SEQ ID NO: 7248; WAN024BT9_at; Start 250; Stop 274
tctaatgcacaactagcaagacaat

SEQ ID NO: 93464 - DNA, 25 bp, Artificial
  probe
  misc_feature (1)..(25): SEQ ID NO: 7393; WAN024BTA_at; Start 24; Stop 48
tatagggtatggtataatgactcgg

SEQ ID NO: 93465 - DNA, 25 bp, Artificial
  probe
  misc_feature (1)..(25): SEQ ID NO: 7393; WAN024BTA_at; Start 89; Stop 113
tatacctatatagtaggcatctaaa

SEQ ID NO: 93466 - DNA, 25 bp, Artificial
  probe
  misc_feature (1)..(25): SEQ ID NO: 7393; WAN024BTA_at; Start 270; Stop 294
agtaattgattttacaacctccagg

SEQ ID NO: 93467 - DNA, 25 bp, Artificial
  probe
  misc_feature (1)..(25): SEQ ID NO: 7393; WAN024BTA_at; Start 604; Stop 628
tctctagaggtagcgaatacaatcg

SEQ ID NO: 93468 - DNA, 25 bp, Artificial
  probe
  misc_feature (1)..(25): SEQ ID NO: 7393; WAN024BTA_at; Start 379; Stop 403
ggaagtaatagtggtcaactatcaa

SEQ ID NO: 93469 - DNA, 25 bp, Artificial
  probe
  misc_feature (1)..(25): SEQ ID NO: 7393; WAN024BTA_at; Start 654; Stop 678
agtatgcaactccaaattagaacag

SEQ ID NO: 93470 - DNA, 25 bp, Artificial
  probe
  misc_feature (1)..(25): SEQ ID NO: 7393; WAN024BTA_at; Start 665; Stop 689
ccaaattagaacagatcaatgatca

SEQ ID NO: 93471 - DNA, 25 bp, Artificial
  probe
  misc_feature (1)..(25): SEQ ID NO: 7393; WAN024BTA_at; Start 789; Stop 813
tttattacagcaatatagggattgc

SEQ ID NO: 93472 - DNA, 25 bp, Artificial
  probe
  misc_feature (1)..(25): SEQ ID NO: 7393; WAN024BTA_at; Start 637; Stop 661
gatggttggatgagtttagtatgca

SEQ ID NO: 93473 - DNA, 25 bp, Artificial
  probe
  misc_feature (1)..(25): SEQ ID NO: 7393; WAN024BTA_at; Start 706; Stop 730
cactttagagtagaatatatggtaa

SEQ ID NO: 93474 - DNA, 25 bp, Artificial
  probe
  misc_feature (1)..(25): SEQ ID NO: 7393; WAN024BTA_at; Start 821; Stop 845
ctgatagtggaaaagattatacggt

SEQ ID NO: 93475 - DNA, 25 bp, Artificial
  probe
  misc_feature (1)..(25): SEQ ID NO: 7393; WAN024BTA_at; Start 196; Stop 220
tttagtaatcatattgaaacggata

SEQ ID NO: 93476 - DNA, 25 bp, Artificial
  probe
  misc_feature (1)..(25): SEQ ID NO: 7393; WAN024BTA_at; Start 287; Stop 311
cctccaggattgattgcgttgaaaa

SEQ ID NO: 93477 - DNA, 25 bp, Artificial
  probe
  misc_feature (1)..(25): SEQ ID NO: 7393; WAN024BTA_at; Start 211; Stop 235
gaaacggataatttcattaatgagt

SEQ ID NO: 93478 - DNA, 25 bp, Artificial
  probe
  misc_feature (1)..(25): SEQ ID NO: 7393; WAN024BTA_at; Start 840; Stop 864
tacggtaataggaaagtatgataac

SEQ ID NO: 93479 - DNA, 25 bp, Artificial
  probe
  misc_feature (1)..(25): SEQ ID NO: 7393; WAN024BTA_at; Start 104; Stop 128
ggcatctaaattcaacaataaatgg

SEQ ID NO: 93480 - DNA, 25 bp, Artificial
  probe
  misc_feature (1)..(25): SEQ ID NO: 7393; WAN024BTA_at; Start 763; Stop 787
catgatgaagtgaaagaaataaatt

SEQ ID NO: 93481 - DNA, 25 bp, Artificial
  probe
  misc_feature (1)..(25): SEQ ID NO: 7393; WAN024BTA_at; Start 540; Stop 564
gggagcgtatttgctttactctatt

SEQ ID NO: 93482 - DNA, 25 bp, Artificial
  probe
  misc_feature (1)..(25): SEQ ID NO: 7393; WAN024BTA_at; Start 51; Stop 75
tatattaaaaatcctgaaacagtcg

SEQ ID NO: 93483 - DNA, 25 bp, Artificial
  probe
  misc_feature (1)..(25): SEQ ID NO: 7393; WAN024BTA_at; Start 339; Stop 363
gggatactatatagaggctcctttc

SEQ ID NO: 93484 - DNA, 25 bp, Artificial
  probe
  misc_feature (1)..(25): SEQ ID NO: 7393; WAN024BTA_at; Start 561; Stop 585
tattaagctattcaaccctttacag

SEQ ID NO: 93485 - DNA, 25 bp, Artificial
  probe
  misc_feature (1)..(25): SEQ ID NO: 7393; WAN024BTA_at; Start 63; Stop 87
cctgaaacagtcgaaaaaatataat

SEQ ID NO: 93486 - DNA, 25 bp, Artificial
  probe
  misc_feature (1)..(25): SEQ ID NO: 7393; WAN024BTA_at; Start 589; Stop 613
gatttttcaccaaagtctctagagg

SEQ ID NO: 93487 - DNA, 25 bp, Artificial
  probe
  misc_feature (1)..(25): SEQ ID NO: 7393; WAN024BTA_at; Start 621; Stop 645
tacaatcgtatgtaatgatggttgg

SEQ ID NO: 93488 - DNA, 25 bp, Artificial
  probe
  misc_feature (1)..(25): SEQ ID NO: 7393; WAN024BTA_at; Start 363; Stop 387
cacaggaggtaagttaggaagtaat

SEQ ID NO: 93489 - DNA, 25 bp, Artificial
  probe
  misc_feature (1)..(25): SEQ ID NO: 7393; WAN024BTA_at; Start 573; Stop 597
caaccctttacagtatgatttttca

SEQ ID NO: 93490 - DNA, 25 bp, Artificial
  probe
  misc_feature (1)..(25): SEQ ID NO: 7393; WAN024BTA_at; Start 141; Stop 165
tagagaagatgaattacctgatgct

SEQ ID NO: 93491 - DNA, 25 bp, Artificial
  probe
  misc_feature (1)..(25): SEQ ID NO: 7393; WAN024BTA_at; Start 248; Stop 272
tacaatcacttcgtaaaaccatagt

SEQ ID NO: 93492 - DNA, 25 bp, Artificial
  probe
  misc_feature (1)..(25): SEQ ID NO: 7393; WAN024BTA_at; Start 804; Stop 828
tagggattgcttagtaactgatagt

SEQ ID NO: 93493 - DNA, 25 bp, Artificial
  probe
  misc_feature (1)..(25): SEQ ID NO: 7393; WAN024BTA_at; Start 157; Stop 181
cctgatgctataaatcaggttgatt

SEQ ID NO: 93494 - DNA, 25 bp, Artificial
  probe
  misc_feature (1)..(25): SEQ ID NO: 7393; WAN024BTA_at; Start 348; Stop 372
tatagaggctcctttcacaggaggt

SEQ ID NO: 93495 - DNA, 25 bp, Artificial
  probe
  misc_feature (1)..(25): SEQ ID NO: 7393; WAN024BTA_at; Start 745; Stop 769
gctaatttttcagtctttcatgatg

SEQ ID NO: 93496 - DNA, 25 bp, Artificial
  probe
  misc_feature (1)..(25): SEQ ID NO: 7393; WAN024BTA_at; Start 410; Stop 434
tacatattgatgaaggtgtaaacta

SEQ ID NO: 93497 - DNA, 25 bp, Artificial
  probe
  misc_feature (1)..(25): SEQ ID NO: 7393; WAN024BTA_at; Start 691; Stop 715
gattttgatgacatacactttagag

SEQ ID NO: 93498 - DNA, 25 bp, Artificial
  probe
  misc_feature (1)..(25): SEQ ID NO: 6623; WAN024BTB_at; Start 108; Stop 132
ggcaagaggtaatccaagaatcaag

SEQ ID NO: 93499 - DNA, 25 bp, Artificial
  probe
  misc_feature (1)..(25): SEQ ID NO: 6623; WAN024BTB_at; Start 175; Stop 199
gacagtattcagcaattaattagta

SEQ ID NO: 93500 - DNA, 25 bp, Artificial
  probe
  misc_feature (1)..(25): SEQ ID NO: 6623; WAN024BTB_at; Start 212; Stop 236
tagagggaaggtttcactttgtaca

SEQ ID NO: 93501 - DNA, 25 bp, Artificial
  probe
  misc_feature (1)..(25): SEQ ID NO: 6623; WAN024BTB_at; Start 537; Stop 561
cctagattttgaaagaatatttgct

SEQ ID NO: 93502 - DNA, 25 bp, Artificial
  probe
  misc_feature (1)..(25): SEQ ID NO: 6623; WAN024BTB_at; Start 381; Stop 405
taccaatattgtggagcagactcgc

SEQ ID NO: 93503 - DNA, 25 bp, Artificial
  probe
  misc_feature (1)..(25): SEQ ID NO: 6623; WAN024BTB_at; Start 129; Stop 153
caaggatgggaaattagaatcggat

SEQ ID NO: 93504 - DNA, 25 bp, Artificial
  probe
  misc_feature (1)..(25): SEQ ID NO: 6623; WAN024BTB_at; Start 676; Stop 700
caaggattagactttgaacattgta

SEQ ID NO: 93505 - DNA, 25 bp, Artificial
  probe
  misc_feature (1)..(25): SEQ ID NO: 6623; WAN024BTB_at; Start 518; Stop 542
tcgataaaaagataaaacacctaga

SEQ ID NO: 93506 - DNA, 25 bp, Artificial
  probe
  misc_feature (1)..(25): SEQ ID NO: 6623; WAN024BTB_at; Start 260; Stop 284
tgaaggaaagaataaatcgaagtcg

SEQ ID NO: 93507 - DNA, 25 bp, Artificial
  probe
  misc_feature (1)..(25): SEQ ID NO: 6623; WAN024BTB_at; Start 65; Stop 89
aatgcgaggtaggaaaaatttcact

SEQ ID NO: 93508 - DNA, 25 bp, Artificial
  probe
  misc_feature (1)..(25): SEQ ID NO: 6623; WAN024BTB_at; Start 3; Stop 27
gataacttataggaatgacttgctg

SEQ ID NO: 93509 - DNA, 25 bp, Artificial
  probe
  misc_feature (1)..(25): SEQ ID NO: 6623; WAN024BTB_at; Start 120; Stop 144
tccaagaatcaaggatgggaaatta

SEQ ID NO: 93510 - DNA, 25 bp, Artificial
  probe
  misc_feature (1)..(25): SEQ ID NO: 6623; WAN024BTB_at; Start 496; Stop 520
gagattgcaacattaaatcatatcg

SEQ ID NO: 93511 - DNA, 25 bp, Artificial
  probe
  misc_feature (1)..(25): SEQ ID NO: 6623; WAN024BTB_at; Start 579; Stop 603
aatacaaattttggattcaagtgaa

SEQ ID NO: 93512 - DNA, 25 bp, Artificial
  probe
  misc_feature (1)..(25): SEQ ID NO: 6623; WAN024BTB_at; Start 278; Stop 302
gaagtcgttatcgtggaattattaa

SEQ ID NO: 93513 - DNA, 25 bp, Artificial
  probe
  misc_feature (1)..(25): SEQ ID NO: 6623; WAN024BTB_at; Start 93; Stop 117
tattactggttccttggcaagaggt

SEQ ID NO: 93514 - DNA, 25 bp, Artificial
  probe
  misc_feature (1)..(25): SEQ ID NO: 6623; WAN024BTB_at; Start 272; Stop 296
taaatcgaagtcgttatcgtggaat

SEQ ID NO: 93515 - DNA, 25 bp, Artificial
  probe
  misc_feature (1)..(25): SEQ ID NO: 6623; WAN024BTB_at; Start 355; Stop 379
caaataatagaagctttagactcac

SEQ ID NO: 93516 - DNA, 25 bp, Artificial
  probe
  misc_feature (1)..(25): SEQ ID NO: 6623; WAN024BTB_at; Start 633; Stop 657
gaatatttatttagagatgagggat

SEQ ID NO: 93517 - DNA, 25 bp, Artificial
  probe
  misc_feature (1)..(25): SEQ ID NO: 6623; WAN024BTB_at; Start 226; Stop 250
cactttgtacataaaatttctttga

SEQ ID NO: 93518 - DNA, 25 bp, Artificial
  probe
  misc_feature (1)..(25): SEQ ID NO: 6623; WAN024BTB_at; Start 664; Stop 688
tctttggaaaatcaaggattagact

SEQ ID NO: 93519 - DNA, 25 bp, Artificial
  probe
  misc_feature (1)..(25): SEQ ID NO: 6623; WAN024BTB_at; Start 611; Stop 635
tccaaaatgtaaaaacttctgagaa

SEQ ID NO: 93520 - DNA, 25 bp, Artificial
  probe
  misc_feature (1)..(25): SEQ ID NO: 6623; WAN024BTB_at; Start 592; Stop 616
gattcaagtgaatattttttccaaa

SEQ ID NO: 93521 - DNA, 25 bp, Artificial
  probe
  misc_feature (1)..(25): SEQ ID NO: 6623; WAN024BTB_at; Start 554; Stop 578
tatttgctgttttaaaagaacacaa

SEQ ID NO: 93522 - DNA, 25 bp, Artificial
  probe
  misc_feature (1)..(25): SEQ ID NO: 6623; WAN024BTB_at; Start 163; Stop 187
ctagttatagtagacagtattcagc

SEQ ID NO: 93523 - DNA, 25 bp, Artificial
  probe
  misc_feature (1)..(25): SEQ ID NO: 6623; WAN024BTB_at; Start 648; Stop 672
gatgagggatttagtatctttggaa

SEQ ID NO: 93524 - DNA, 25 bp, Artificial
  probe
  misc_feature (1)..(25): SEQ ID NO: 6623; WAN024BTB_at; Start 311; Stop 335
gaagtgtagataatcttttagtaga

SEQ ID NO: 93525 - DNA, 25 bp, Artificial
  probe
  misc_feature (1)..(25): SEQ ID NO: 6623; WAN024BTB_at; Start 396; Stop 420
gcagactcgctctatgattcaggaa

SEQ ID NO: 93526 - DNA, 25 bp, Artificial
  probe
  misc_feature (1)..(25): SEQ ID NO: 6623; WAN024BTB_at; Start 86; Stop 110
cactcgttattactggttccttggc

SEQ ID NO: 93527 - DNA, 25 bp, Artificial
  probe
  misc_feature (1)..(25): SEQ ID NO: 6623; WAN024BTB_at; Start 370; Stop 394
ttagactcacctaccaatattgtgg

SEQ ID NO: 93528 - DNA, 25 bp, Artificial
  probe
  misc_feature (1)..(25): SEQ ID NO: 6623; WAN024BTB_at; Start 479; Stop 503
tagaaaagtattggaaggagattgc

SEQ ID NO: 93529 - DNA, 25 bp, Artificial
  probe
  misc_feature (1)..(25): SEQ ID NO: 6623; WAN024BTB_at; Start 689; Stop 713
ttgaacattgtattttgagcttggg

SEQ ID NO: 93530 - DNA, 25 bp, Artificial
  probe
  misc_feature (1)..(25): SEQ ID NO: 6623; WAN024BTB_at; Start 145; Stop 169
gaatcggatattgatattctagtta

SEQ ID NO: 93531 - DNA, 25 bp, Artificial
  probe
  misc_feature (1)..(25): SEQ ID NO: 6623; WAN024BTB_at; Start 19; Stop 43
gacttgctgtctaaagaattagata

SEQ ID NO: 93532 - DNA, 25 bp, Artificial
  probe
  misc_feature (1)..(25): SEQ ID NO: 7115; WAN024BTC_at; Start 159; Stop 183
tagttggaaagatttcaactttgaa

SEQ ID NO: 93533 - DNA, 25 bp, Artificial
  probe
  misc_feature (1)..(25): SEQ ID NO: 7115; WAN024BTC_at; Start 279; Stop 303
tatccaacctgcaactgagattttg

SEQ ID NO: 93534 - DNA, 25 bp, Artificial
  probe
  misc_feature (1)..(25): SEQ ID NO: 7115; WAN024BTC_at; Start 463; Stop 487
ttctctccagaaatgatttggtgct

SEQ ID NO: 93535 - DNA, 25 bp, Artificial
  probe
  misc_feature (1)..(25): SEQ ID NO: 7115; WAN024BTC_at; Start 283; Stop 307
caacctgcaactgagattttgatgt

SEQ ID NO: 93536 - DNA, 25 bp, Artificial
  probe
  misc_feature (1)..(25): SEQ ID NO: 7115; WAN024BTC_at; Start 290; Stop 314
caactgagattttgatgttaaacta

SEQ ID NO: 93537 - DNA, 25 bp, Artificial
  probe
  misc_feature (1)..(25): SEQ ID NO: 7115; WAN024BTC_at; Start 47; Stop 71
tagatgtgattgtactgtatgatag

SEQ ID NO: 93538 - DNA, 25 bp, Artificial
  probe
  misc_feature (1)..(25): SEQ ID NO: 7115; WAN024BTC_at; Start 332; Stop 356
tggatctgaggatagattttaccca

SEQ ID NO: 93539 - DNA, 25 bp, Artificial
  probe
  misc_feature (1)..(25): SEQ ID NO: 7115; WAN024BTC_at; Start 467; Stop 491
ctccagaaatgatttggtgcttata

SEQ ID NO: 93540 - DNA, 25 bp, Artificial
  probe
  misc_feature (1)..(25): SEQ ID NO: 7115; WAN024BTC_at; Start 69; Stop 93
tagttttgatagtatagttaattgc

SEQ ID NO: 93541 - DNA, 25 bp, Artificial
  probe
  misc_feature (1)..(25): SEQ ID NO: 7115; WAN024BTC_at; Start 273; Stop 297
ggcgattatccaacctgcaactgag

SEQ ID NO: 93542 - DNA, 25 bp, Artificial
  probe
  misc_feature (1)..(25): SEQ ID NO: 7115; WAN024BTC_at; Start 338; Stop 362
tgaggatagattttacccatagtaa

SEQ ID NO: 93543 - DNA, 25 bp, Artificial
  probe
  misc_feature (1)..(25): SEQ ID NO: 7115; WAN024BTC_at; Start 104; Stop 128
taaaagggcaatatatattattatc

SEQ ID NO: 93544 - DNA, 25 bp, Artificial
  probe
  misc_feature (1)..(25): SEQ ID NO: 7115; WAN024BTC_at; Start 351; Stop 375
tacccatagtaaagttatggcaaat

SEQ ID NO: 93545 - DNA, 25 bp, Artificial
  probe
  misc_feature (1)..(25): SEQ ID NO: 7115; WAN024BTC_at; Start 366; Stop 390
tatggcaaataaaaaatttctggaa

SEQ ID NO: 93546 - DNA, 25 bp, Artificial
  probe
  misc_feature (1)..(25): SEQ ID NO: 7115; WAN024BTC_at; Start 137; Stop 161
tcgagagtagtattaaaaattatag

SEQ ID NO: 93547 - DNA, 25 bp, Artificial
  probe
  misc_feature (1)..(25): SEQ ID NO: 7115; WAN024BTC_at; Start 323; Stop 347
aaaaaagtatggatctgaggataga

SEQ ID NO: 93548 - DNA, 25 bp, Artificial
  probe
  misc_feature (1)..(25): SEQ ID NO: 7115; WAN024BTC_at; Start 128; Stop 152
ctgtagctttcgagagtagtattaa

SEQ ID NO: 93549 - DNA, 25 bp, Artificial
  probe
  misc_feature (1)..(25): SEQ ID NO: 7115; WAN024BTC_at; Start 3; Stop 27
gcaacagattgttttttatgcaata

SEQ ID NO: 93550 - DNA, 25 bp, Artificial
  probe
  misc_feature (1)..(25): SEQ ID NO: 7115; WAN024BTC_at; Start 233; Stop 257
gaatggttctaatcgagaattgtaa

SEQ ID NO: 93551 - DNA, 25 bp, Artificial
  probe
  misc_feature (1)..(25): SEQ ID NO: 7115; WAN024BTC_at; Start 92; Stop 116
gctttgataaattaaaagggcaata

SEQ ID NO: 93552 - DNA, 25 bp, Artificial
  probe
  misc_feature (1)..(25): SEQ ID NO: 7115; WAN024BTC_at; Start 189; Stop 213
taagcggattgaaattgtggattct

SEQ ID NO: 93553 - DNA, 25 bp, Artificial
  probe
  misc_feature (1)..(25): SEQ ID NO: 7115; WAN024BTC_at; Start 406; Stop 430
tcaatagtaagtcaagaaacgataa

SEQ ID NO: 93554 - DNA, 25 bp, Artificial
  probe
  misc_feature (1)..(25): SEQ ID NO: 7115; WAN024BTC_at; Start 173; Stop 197
tcaactttgaatatcataagcggat

SEQ ID NO: 93555 - DNA, 25 bp, Artificial
  probe
  misc_feature (1)..(25): SEQ ID NO: 7115; WAN024BTC_at; Start 384; Stop 408
tctggaagaaggttatcgtttttca

SEQ ID NO: 93556 - DNA, 25 bp, Artificial
  probe
  misc_feature (1)..(25): SEQ ID NO: 7115; WAN024BTC_at; Start 267; Stop 291
taatagggcgattatccaacctgca

SEQ ID NO: 93557 - DNA, 25 bp, Artificial
  probe
  misc_feature (1)..(25): SEQ ID NO: 7115; WAN024BTC_at; Start 450; Stop 474
tatttgtgaaactttctctccagaa

SEQ ID NO: 93558 - DNA, 25 bp, Artificial
  probe
  misc_feature (1)..(25): SEQ ID NO: 7115; WAN024BTC_at; Start 397; Stop 421
tatcgtttttcaatagtaagtcaag

SEQ ID NO: 93559 - DNA, 25 bp, Artificial
  probe
  misc_feature (1)..(25): SEQ ID NO: 7115; WAN024BTC_at; Start 31; Stop 55
cgtataaaattaaaagtagatgtga

SEQ ID NO: 93560 - DNA, 25 bp, Artificial
  probe
  misc_feature (1)..(25): SEQ ID NO: 7115; WAN024BTC_at; Start 418; Stop 442
caagaaacgataattaataatgatg

SEQ ID NO: 93561 - DNA, 25 bp, Artificial
  probe
  misc_feature (1)..(25): SEQ ID NO: 7115; WAN024BTC_at; Start 184; Stop 208
tatcataagcggattgaaattgtgg

SEQ ID NO: 93562 - DNA, 25 bp, Artificial
  probe
  misc_feature (1)..(25): SEQ ID NO: 7115; WAN024BTC_at; Start 225; Stop 249
tactaagggaatggttctaatcgag

SEQ ID NO: 93563 - DNA, 25 bp, Artificial
  probe
  misc_feature (1)..(25): SEQ ID NO: 7115; WAN024BTC_at; Start 206; Stop 230
tggattcttttcactcttttactaa

SEQ ID NO: 93564 - DNA, 25 bp, Artificial
  probe
  misc_feature (1)..(25): SEQ ID NO: 7115; WAN024BTC_at; Start 259; Stop 283
tataaaattaatagggcgattatcc

SEQ ID NO: 93565 - DNA, 25 bp, Artificial
  probe
  misc_feature (1)..(25): SEQ ID NO: 7115; WAN024BTC_at; Start 119; Stop 143
tattattatctgtagctttcgagag

SEQ ID NO: 93566 - DNA, 25 bp, Artificial
  probe
  misc_feature (1)..(25): SEQ ID NO: 7049; WAN024BTD_at; Start 468; Stop 492
tgactgtacggaatttaagattcag

SEQ ID NO: 93567 - DNA, 25 bp, Artificial
  probe
  misc_feature (1)..(25): SEQ ID NO: 7049; WAN024BTD_at; Start 228; Stop 252
taataaacaagattcattagcaatg

SEQ ID NO: 93568 - DNA, 25 bp, Artificial
  probe
  misc_feature (1)..(25): SEQ ID NO: 7049; WAN024BTD_at; Start 170; Stop 194
tagaatatataaatccgtattggga

SEQ ID NO: 93569 - DNA, 25 bp, Artificial
  probe
  misc_feature (1)..(25): SEQ ID NO: 7049; WAN024BTD_at; Start 454; Stop 478
tttattcctataattgactgtacgg

SEQ ID NO: 93570 - DNA, 25 bp, Artificial
  probe
  misc_feature (1)..(25): SEQ ID NO: 7049; WAN024BTD_at; Start 1009; Stop 1033
gatattccatttattgatacttcac

SEQ ID NO: 93571 - DNA, 25 bp, Artificial
  probe
  misc_feature (1)..(25): SEQ ID NO: 7049; WAN024BTD_at; Start 131; Stop 155
tctatccccaggaaacaatttggac

SEQ ID NO: 93572 - DNA, 25 bp, Artificial
  probe
  misc_feature (1)..(25): SEQ ID NO: 7049; WAN024BTD_at; Start 624; Stop 648
tctagaatttattgatagccaagaa

SEQ ID NO: 93573 - DNA, 25 bp, Artificial
  probe
  misc_feature (1)..(25): SEQ ID NO: 7049; WAN024BTD_at; Start 315; Stop 339
tgttattacttcaaacgaacaccta

SEQ ID NO: 93574 - DNA, 25 bp, Artificial
  probe
  misc_feature (1)..(25): SEQ ID NO: 7049; WAN024BTD_at; Start 183; Stop 207
tccgtattgggaaatatataatcaa

SEQ ID NO: 93575 - DNA, 25 bp, Artificial
  probe
  misc_feature (1)..(25): SEQ ID NO: 7049; WAN024BTD_at; Start 777; Stop 801
taccaaacttgatataacgaaagta

SEQ ID NO: 93576 - DNA, 25 bp, Artificial
  probe
  misc_feature (1)..(25): SEQ ID NO: 7049; WAN024BTD_at; Start 594; Stop 618
tacctctaatttcaatatagaaagc

SEQ ID NO: 93577 - DNA, 25 bp, Artificial
  probe
  misc_feature (1)..(25): SEQ ID NO: 7049; WAN024BTD_at; Start 367; Stop 391
tatattattacaaaagagattccat

SEQ ID NO: 93578 - DNA, 25 bp, Artificial
  probe
  misc_feature (1)..(25): SEQ ID NO: 7049; WAN024BTD_at; Start 877; Stop 901
ttaattcaaaagtaccctagagata

SEQ ID NO: 93579 - DNA, 25 bp, Artificial
  probe
  misc_feature (1)..(25): SEQ ID NO: 7049; WAN024BTD_at; Start 829; Stop 853
tactttttaatgaaggaaattgaca

SEQ ID NO: 93580 - DNA, 25 bp, Artificial
  probe
  misc_feature (1)..(25): SEQ ID NO: 7049; WAN024BTD_at; Start 641; Stop 665
gccaagaaaatattcgagtagtttc

SEQ ID NO: 93581 - DNA, 25 bp, Artificial
  probe
  misc_feature (1)..(25): SEQ ID NO: 7049; WAN024BTD_at; Start 886; Stop 910
aagtaccctagagatatcttgagtg

SEQ ID NO: 93582 - DNA, 25 bp, Artificial
  probe
  misc_feature (1)..(25): SEQ ID NO: 7049; WAN024BTD_at; Start 437; Stop 461
tgaaaaatggaggacagtttattcc

SEQ ID NO: 93583 - DNA, 25 bp, Artificial
  probe
  misc_feature (1)..(25): SEQ ID NO: 7049; WAN024BTD_at; Start 260; Stop 284
taactagtcttctaagagaaataga

SEQ ID NO: 93584 - DNA, 25 bp, Artificial
  probe
  misc_feature (1)..(25): SEQ ID NO: 7049; WAN024BTD_at; Start 486; Stop 510
gattcagtctaagaaatattttgag

SEQ ID NO: 93585 - DNA, 25 bp, Artificial
  probe
  misc_feature (1)..(25): SEQ ID NO: 7049; WAN024BTD_at; Start 655; Stop 679
cgagtagtttccttgttggattgtc

SEQ ID NO: 93586 - DNA, 25 bp, Artificial
  probe
  misc_feature (1)..(25): SEQ ID NO: 7049; WAN024BTD_at; Start 941; Stop 965
gatacttaatcggagagaatttaca

SEQ ID NO: 93587 - DNA, 25 bp, Artificial
  probe
  misc_feature (1)..(25): SEQ ID NO: 7049; WAN024BTD_at; Start 142; Stop 166
gaaacaatttggacaagaatcttgg

SEQ ID NO: 93588 - DNA, 25 bp, Artificial
  probe
  misc_feature (1)..(25): SEQ ID NO: 7049; WAN024BTD_at; Start 902; Stop 926
tcttgagtgataggtatggaataac

SEQ ID NO: 93589 - DNA, 25 bp, Artificial
  probe
  misc_feature (1)..(25): SEQ ID NO: 7049; WAN024BTD_at; Start 118; Stop 142
gaagggatatatttctatccccagg

SEQ ID NO: 93590 - DNA, 25 bp, Artificial
  probe
  misc_feature (1)..(25): SEQ ID NO: 7049; WAN024BTD_at; Start 1031; Stop 1055
cactttctattgaagagtttgacaa

SEQ ID NO: 93591 - DNA, 25 bp, Artificial
  probe
  misc_feature (1)..(25): SEQ ID NO: 7049; WAN024BTD_at; Start 79; Stop 103
ggttcagcgttaatggctcatgact

SEQ ID NO: 93592 - DNA, 25 bp, Artificial
  probe
  misc_feature (1)..(25): SEQ ID NO: 7049; WAN024BTD_at; Start 44; Stop 68
aagatagtggttttttgagaggtga

SEQ ID NO: 93593 - DNA, 25 bp, Artificial
  probe
  misc_feature (1)..(25): SEQ ID NO: 7049; WAN024BTD_at; Start 67; Stop 91
gattggttcataggttcagcgttaa

SEQ ID NO: 93594 - DNA, 25 bp, Artificial
  probe
  misc_feature (1)..(25): SEQ ID NO: 7049; WAN024BTD_at; Start 555; Stop 579
tcatggagagattccagaaaaattt

SEQ ID NO: 93595 - DNA, 25 bp, Artificial
  probe
  misc_feature (1)..(25): SEQ ID NO: 7049; WAN024BTD_at; Start 764; Stop 788
tatactcagtaattaccaaacttga

SEQ ID NO: 93596 - DNA, 25 bp, Artificial
  probe
  misc_feature (1)..(25): SEQ ID NO: 7049; WAN024BTD_at; Start 712; Stop 736
tcaggaaattataaagggcacacag

SEQ ID NO: 93597 - DNA, 25 bp, Artificial
  probe
  misc_feature (1)..(25): SEQ ID NO: 7049; WAN024BTD_at; Start 30; Stop 54
tattgttacactgaaagatagtggt

SEQ ID NO: 93598 - DNA, 25 bp, Artificial
  probe
  misc_feature (1)..(25): SEQ ID NO: 7049; WAN024BTD_at; Start 103; Stop 127
tatgaaagccttaaggaagggatat

SEQ ID NO: 93599 - DNA, 25 bp, Artificial
  probe
  misc_feature (1)..(25): SEQ ID NO: 7049; WAN024BTD_at; Start 94; Stop 118
gctcatgactatgaaagccttaagg

SEQ ID NO: 93600 - DNA, 25 bp, Artificial
  probe
  misc_feature (1)..(25): SEQ ID NO: 6624; WAN024BTE_at; Start 103; Stop 127
ctagatcaagaattgtatcgacaac

SEQ ID NO: 93601 - DNA, 25 bp, Artificial
  probe
  misc_feature (1)..(25): SEQ ID NO: 6624; WAN024BTE_at; Start 623; Stop 647
gccaagataaatttcaaattaatgg

SEQ ID NO: 93602 - DNA, 25 bp, Artificial
  probe
  misc_feature (1)..(25): SEQ ID NO: 6624; WAN024BTE_at; Start 409; Stop 433
aatcaaaattcaatcattacagcag

SEQ ID NO: 93603 - DNA, 25 bp, Artificial
  probe
  misc_feature (1)..(25): SEQ ID NO: 6624; WAN024BTE_at; Start 344; Stop 368
tatttgatgatgcagagcttcattt

SEQ ID NO: 93604 - DNA, 25 bp, Artificial
  probe
  misc_feature (1)..(25): SEQ ID NO: 6624; WAN024BTE_at; Start 480; Stop 504
caatctggttaatcaatatggaaaa

SEQ ID NO: 93605 - DNA, 25 bp, Artificial
  probe
  misc_feature (1)..(25): SEQ ID NO: 6624; WAN024BTE_at; Start 464; Stop 488
tcttgtttaataattccaatctggt

SEQ ID NO: 93606 - DNA, 25 bp, Artificial
  probe
  misc_feature (1)..(25): SEQ ID NO: 6624; WAN024BTE_at; Start 205; Stop 229
acagaaataatctttaagatacctc

SEQ ID NO: 93607 - DNA, 25 bp, Artificial
  probe
  misc_feature (1)..(25): SEQ ID NO: 6624; WAN024BTE_at; Start 642; Stop 666
taatggtataaagaatatggaggta

SEQ ID NO: 93608 - DNA, 25 bp, Artificial
  probe
  misc_feature (1)..(25): SEQ ID NO: 6624; WAN024BTE_at; Start 499; Stop 523
ggaaaatatactttgttagacatag

SEQ ID NO: 93609 - DNA, 25 bp, Artificial
  probe
  misc_feature (1)..(25): SEQ ID NO: 6624; WAN024BTE_at; Start 523; Stop 547
gacaaatataaattagagtctagaa

SEQ ID NO: 93610 - DNA, 25 bp, Artificial
  probe
  misc_feature (1)..(25): SEQ ID NO: 6624; WAN024BTE_at; Start 278; Stop 302
caaatccctattcgttaataagagg

SEQ ID NO: 93611 - DNA, 25 bp, Artificial
  probe
  misc_feature (1)..(25): SEQ ID NO: 6624; WAN024BTE_at; Start 541; Stop 565
tctagaaagatttttgaatttccag

SEQ ID NO: 93612 - DNA, 25 bp, Artificial
  probe
  misc_feature (1)..(25): SEQ ID NO: 6624; WAN024BTE_at; Start 309; Stop 333
tctaggttttcataaggaattggac

SEQ ID NO: 93613 - DNA, 25 bp, Artificial
  probe
  misc_feature (1)..(25): SEQ ID NO: 6624; WAN024BTE_at; Start 50; Stop 74
ttaaactaaataaagcagttgatgc

SEQ ID NO: 93614 - DNA, 25 bp, Artificial
  probe
  misc_feature (1)..(25): SEQ ID NO: 6624; WAN024BTE_at; Start 321; Stop 345
taaggaattggactgtaactatgta

SEQ ID NO: 93615 - DNA, 25 bp, Artificial
  probe
  misc_feature (1)..(25): SEQ ID NO: 6624; WAN024BTE_at; Start 579; Stop 603
taactttcttggaagtgaagcaaaa

SEQ ID NO: 93616 - DNA, 25 bp, Artificial
  probe
  misc_feature (1)..(25): SEQ ID NO: 6624; WAN024BTE_at; Start 444; Stop 468
ggagtataactatcccttgatcttg

SEQ ID NO: 93617 - DNA, 25 bp, Artificial
  probe
  misc_feature (1)..(25): SEQ ID NO: 6624; WAN024BTE_at; Start 296; Stop 320
taagaggattttatctaggttttca

SEQ ID NO: 93618 - DNA, 25 bp, Artificial
  probe
  misc_feature (1)..(25): SEQ ID NO: 6624; WAN024BTE_at; Start 261; Stop 285
ggttgtatcatatgtttcaaatccc

SEQ ID NO: 93619 - DNA, 25 bp, Artificial
  probe
  misc_feature (1)..(25): SEQ ID NO: 6624; WAN024BTE_at; Start 250; Stop 274
tttaattttccggttgtatcatatg

SEQ ID NO: 93620 - DNA, 25 bp, Artificial
  probe
  misc_feature (1)..(25): SEQ ID NO: 6624; WAN024BTE_at; Start 65; Stop 89
cagttgatgctagtgtattataccc

SEQ ID NO: 93621 - DNA, 25 bp, Artificial
  probe
  misc_feature (1)..(25): SEQ ID NO: 6624; WAN024BTE_at; Start 139; Stop 163
gaatcattctatcttaccttttctg

SEQ ID NO: 93622 - DNA, 25 bp, Artificial
  probe
  misc_feature (1)..(25): SEQ ID NO: 6624; WAN024BTE_at; Start 220; Stop 244
aagatacctctttgtattggagaag

SEQ ID NO: 93623 - DNA, 25 bp, Artificial
  probe
  misc_feature (1)..(25): SEQ ID NO: 6624; WAN024BTE_at; Start 594; Stop 618
tgaagcaaaatcaaatagggtaatt

SEQ ID NO: 93624 - DNA, 25 bp, Artificial
  probe
  misc_feature (1)..(25): SEQ ID NO: 6624; WAN024BTE_at; Start 430; Stop 454
gcagaattaccaagggagtataact

SEQ ID NO: 93625 - DNA, 25 bp, Artificial
  probe
  misc_feature (1)..(25): SEQ ID NO: 6624; WAN024BTE_at; Start 25; Stop 49
aaaggtaataatataactctagaag

SEQ ID NO: 93626 - DNA, 25 bp, Artificial
  probe
  misc_feature (1)..(25): SEQ ID NO: 6624; WAN024BTE_at; Start 88; Stop 112
ccagatgttaagtctctagatcaag

SEQ ID NO: 93627 - DNA, 25 bp, Artificial
  probe
  misc_feature (1)..(25): SEQ ID NO: 6624; WAN024BTE_at; Start 124; Stop 148
caactacaatcagtagaatcattct

SEQ ID NO: 93628 - DNA, 25 bp, Artificial
  probe
  misc_feature (1)..(25): SEQ ID NO: 6624; WAN024BTE_at; Start 556; Stop 580
gaatttccagaaatttctatcggta

SEQ ID NO: 93629 - DNA, 25 bp, Artificial
  probe
  misc_feature (1)..(25): SEQ ID NO: 6624; WAN024BTE_at; Start 337; Stop 361
aactatgtatttgatgatgcagagc

SEQ ID NO: 93630 - DNA, 25 bp, Artificial
  probe
  misc_feature (1)..(25): SEQ ID NO: 6624; WAN024BTE_at; Start 571; Stop 595
tctatcggtaactttcttggaagtg

SEQ ID NO: 93631 - DNA, 25 bp, Artificial
  probe
  misc_feature (1)..(25): SEQ ID NO: 6624; WAN024BTE_at; Start 75; Stop 99
tagtgtattatacccagatgttaag

SEQ ID NO: 93632 - DNA, 25 bp, Artificial
  probe
  misc_feature (1)..(25): SEQ ID NO: 6624; WAN024BTE_at; Start 116; Stop 140
tgtatcgacaactacaatcagtaga

SEQ ID NO: 93633 - DNA, 25 bp, Artificial
  probe
  misc_feature (1)..(25): SEQ ID NO: 6624; WAN024BTE_at; Start 423; Stop 447
cattacagcagaattaccaagggag

SEQ ID NO: 93634 - DNA, 25 bp, Artificial
  probe
  misc_feature (1)..(25): SEQ ID NO: 6410; WAN024BTF_at; Start 260; Stop 284
aagctgttggagaatccgtggttga

SEQ ID NO: 93635 - DNA, 25 bp, Artificial
  probe
  misc_feature (1)..(25): SEQ ID NO: 6410; WAN024BTF_at; Start 920; Stop 944
tttcaaaagcagaagagctactggg

SEQ ID NO: 93636 - DNA, 25 bp, Artificial
  probe
  misc_feature (1)..(25): SEQ ID NO: 6410; WAN024BTF_at; Start 979; Stop 1003
caagatacgtggaaatggcaacaga

SEQ ID NO: 93637 - DNA, 25 bp, Artificial
  probe
  misc_feature (1)..(25): SEQ ID NO: 6410; WAN024BTF_at; Start 126; Stop 150
tgagtctattaagcagatatccaag

SEQ ID NO: 93638 - DNA, 25 bp, Artificial
  probe
  misc_feature (1)..(25): SEQ ID NO: 6410; WAN024BTF_at; Start 606; Stop 630
tgttccttacattacacaagttgca

SEQ ID NO: 93639 - DNA, 25 bp, Artificial
  probe
  misc_feature (1)..(25): SEQ ID NO: 6410; WAN024BTF_at; Start 965; Stop 989
ttatgaaaatgtgccaagatacgtg

SEQ ID NO: 93640 - DNA, 25 bp, Artificial
  probe
  misc_feature (1)..(25): SEQ ID NO: 6410; WAN024BTF_at; Start 236; Stop 260
gagtaattcattttgcagggtataa

SEQ ID NO: 93641 - DNA, 25 bp, Artificial
  probe
  misc_feature (1)..(25): SEQ ID NO: 6410; WAN024BTF_at; Start 832; Stop 856
cacagcttagagagtgtcataggct

SEQ ID NO: 93642 - DNA, 25 bp, Artificial
  probe
  misc_feature (1)..(25): SEQ ID NO: 6410; WAN024BTF_at; Start 885; Stop 909
gagagcaggagatatggacgtttca

SEQ ID NO: 93643 - DNA, 25 bp, Artificial
  probe
  misc_feature (1)..(25): SEQ ID NO: 6410; WAN024BTF_at; Start 666; Stop 690
tgattacagtactcctgatgggact

SEQ ID NO: 93644 - DNA, 25 bp, Artificial
  probe
  misc_feature (1)..(25): SEQ ID NO: 6410; WAN024BTF_at; Start 695; Stop 719
taagggactatgttcacgttaacga

SEQ ID NO: 93645 - DNA, 25 bp, Artificial
  probe
  misc_feature (1)..(25): SEQ ID NO: 6410; WAN024BTF_at; Start 900; Stop 924
ggacgtttcaattgcagatatttca

SEQ ID NO: 93646 - DNA, 25 bp, Artificial
  probe
  misc_feature (1)..(25): SEQ ID NO: 6410; WAN024BTF_at; Start 431; Stop 455
cattaaaagcttcaaacccgtatgg

SEQ ID NO: 93647 - DNA, 25 bp, Artificial
  probe
  misc_feature (1)..(25): SEQ ID NO: 6410; WAN024BTF_at; Start 8; Stop 32
cattattaataacaggtggagcagg

SEQ ID NO: 93648 - DNA, 25 bp, Artificial
  probe
  misc_feature (1)..(25): SEQ ID NO: 6410; WAN024BTF_at; Start 377; Stop 401
catcagctactgtatacgaaagtac

SEQ ID NO: 93649 - DNA, 25 bp, Artificial
  probe
  misc_feature (1)..(25): SEQ ID NO: 6410; WAN024BTF_at; Start 870; Stop 894
taagataacttcaaggagagcagga

SEQ ID NO: 93650 - DNA, 25 bp, Artificial
  probe
  misc_feature (1)..(25): SEQ ID NO: 6410; WAN024BTF_at; Start 36; Stop 60
cataggatcacatacagttttggac

SEQ ID NO: 93651 - DNA, 25 bp, Artificial
  probe
  misc_feature (1)..(25): SEQ ID NO: 6410; WAN024BTF_at; Start 391; Stop 415
tacgaaagtactcctatcatgccat

SEQ ID NO: 93652 - DNA, 25 bp, Artificial
  probe
  misc_feature (1)..(25): SEQ ID NO: 6410; WAN024BTF_at; Start 936; Stop 960
gctactgggatggaagccaaggtat

SEQ ID NO: 93653 - DNA, 25 bp, Artificial
  probe
  misc_feature (1)..(25): SEQ ID NO: 6410; WAN024BTF_at; Start 580; Stop 604
gatccaaatggaattccgaataatc

SEQ ID NO: 93654 - DNA, 25 bp, Artificial
  probe
  misc_feature (1)..(25): SEQ ID NO: 6410; WAN024BTF_at; Start 545; Stop 569
cattgggtgcacatgaaagtggtga

SEQ ID NO: 93655 - DNA, 25 bp, Artificial
  probe
  misc_feature (1)..(25): SEQ ID NO: 6410; WAN024BTF_at; Start 447; Stop 471
cccgtatgggagaacaaaacagtat

SEQ ID NO: 93656 - DNA, 25 bp, Artificial
  probe
  misc_feature (1)..(25): SEQ ID NO: 6410; WAN024BTF_at; Start 620; Stop 644
cacaagttgcaattggaaaattacc

SEQ ID NO: 93657 - DNA, 25 bp, Artificial
  probe
  misc_feature (1)..(25): SEQ ID NO: 6410; WAN024BTF_at; Start 531; Stop 555
gaggtattttaatccattgggtgca

SEQ ID NO: 93658 - DNA, 25 bp, Artificial
  probe
  misc_feature (1)..(25): SEQ ID NO: 6410; WAN024BTF_at; Start 20; Stop 44
caggtggagcaggatacataggatc

SEQ ID NO: 93659 - DNA, 25 bp, Artificial
  probe
  misc_feature (1)..(25): SEQ ID NO: 6410; WAN024BTF_at; Start 724; Stop 748
gcatacggacacagaaaagcattag

SEQ ID NO: 93660 - DNA, 25 bp, Artificial
  probe
  misc_feature (1)..(25): SEQ ID NO: 6410; WAN024BTF_at; Start 141; Stop 165
gatatccaagaagagtagaaatctt

SEQ ID NO: 93661 - DNA, 25 bp, Artificial
  probe
  misc_feature (1)..(25): SEQ ID NO: 6410; WAN024BTF_at; Start 408; Stop 432
catgccattctatgagactaatcca

SEQ ID NO: 93662 - DNA, 25 bp, Artificial
  probe
  misc_feature (1)..(25): SEQ ID NO: 6410; WAN024BTF_at; Start 995; Stop 1019
ggcaacagaaacatccaaatggata

SEQ ID NO: 93663 - DNA, 25 bp, Artificial
  probe
  misc_feature (1)..(25): SEQ ID NO: 6410; WAN024BTF_at; Start 709; Stop 733
cacgttaacgatttagcatacggac

SEQ ID NO: 93664 - DNA, 25 bp, Artificial
  probe
  misc_feature (1)..(25): SEQ ID NO: 6410; WAN024BTF_at; Start 275; Stop 299
ccgtggttgaaccattgaagtatta

SEQ ID NO: 93665 - DNA, 25 bp, Artificial
  probe
  misc_feature (1)..(25): SEQ ID NO: 6410; WAN024BTF_at; Start 679; Stop 703
cctgatgggacttgtataagggact

SEQ ID NO: 93666 - DNA, 25 bp, Artificial
  probe
  misc_feature (1)..(25): SEQ ID NO: 6410; WAN024BTF_at; Start 845; Stop 869
gtgtcataggctcgtatattccata

SEQ ID NO: 93667 - DNA, 25 bp, Artificial
  probe
  misc_feature (1)..(25): SEQ ID NO: 6410; WAN024BTF_at; Start 818; Stop 842
tatttgaaatcctacacagcttaga

SEQ ID NO: 93668 - DNA, 25 bp, Artificial
  probe
  misc_feature (1)..(25): SEQ ID NO: 6709; WAN024BTG_at; Start 661; Stop 685
tattatcttgtaaggactagttcgt

SEQ ID NO: 93669 - DNA, 25 bp, Artificial
  probe
  misc_feature (1)..(25): SEQ ID NO: 6709; WAN024BTG_at; Start 318; Stop 342
taaagacaaatacttcatgcgttca

SEQ ID NO: 93670 - DNA, 25 bp, Artificial
  probe
  misc_feature (1)..(25): SEQ ID NO: 6709; WAN024BTG_at; Start 347; Stop 371
tagttggagtagtaaatcaaccgta

SEQ ID NO: 93671 - DNA, 25 bp, Artificial
  probe
  misc_feature (1)..(25): SEQ ID NO: 6709; WAN024BTG_at; Start 1176; Stop 1200
gaaaaggttagatgaacttaagcac

SEQ ID NO: 93672 - DNA, 25 bp, Artificial
  probe
  misc_feature (1)..(25): SEQ ID NO: 6709; WAN024BTG_at; Start 114; Stop 138
tctagctgaaggaaataatctacct

SEQ ID NO: 93673 - DNA, 25 bp, Artificial
  probe
  misc_feature (1)..(25): SEQ ID NO: 6709; WAN024BTG_at; Start 428; Stop 452
cttctgctgcaattttaaaacctag

SEQ ID NO: 93674 - DNA, 25 bp, Artificial
  probe
  misc_feature (1)..(25): SEQ ID NO: 6709; WAN024BTG_at; Start 414; Stop 438
gaataattgtaaatcttctgctgca

SEQ ID NO: 93675 - DNA, 25 bp, Artificial
  probe
  misc_feature (1)..(25): SEQ ID NO: 6709; WAN024BTG_at; Start 191; Stop 215
gaaggataagtcaaaatacagaagt

SEQ ID NO: 93676 - DNA, 25 bp, Artificial
  probe
  misc_feature (1)..(25): SEQ ID NO: 6709; WAN024BTG_at; Start 1044; Stop 1068
tgaaaaagaattggcttgggcaaaa

SEQ ID NO: 93677 - DNA, 25 bp, Artificial
  probe
  misc_feature (1)..(25): SEQ ID NO: 6709; WAN024BTG_at; Start 333; Stop 357
catgcgttcatttttagttggagta

SEQ ID NO: 93678 - DNA, 25 bp, Artificial
  probe
  misc_feature (1)..(25): SEQ ID NO: 6709; WAN024BTG_at; Start 635; Stop 659
tgttcaataccttaagttctagtgg

SEQ ID NO: 93679 - DNA, 25 bp, Artificial
  probe
  misc_feature (1)..(25): SEQ ID NO: 6709; WAN024BTG_at; Start 616; Stop 640
cacgaatatgaggaactattgttca

SEQ ID NO: 93680 - DNA, 25 bp, Artificial
  probe
  misc_feature (1)..(25): SEQ ID NO: 6709; WAN024BTG_at; Start 487; Stop 511
taccctaacgagaaaattgattcag

SEQ ID NO: 93681 - DNA, 25 bp, Artificial
  probe
  misc_feature (1)..(25): SEQ ID NO: 6709; WAN024BTG_at; Start 62; Stop 86
gaaatgtagtaattattgcacctga

SEQ ID NO: 93682 - DNA, 25 bp, Artificial
  probe
  misc_feature (1)..(25): SEQ ID NO: 6709; WAN024BTG_at; Start 225; Stop 249
tacaaccttgagtgaggaagacatg

SEQ ID NO: 93683 - DNA, 25 bp, Artificial
  probe
  misc_feature (1)..(25): SEQ ID NO: 6709; WAN024BTG_at; Start 540; Stop 564
ggaatacattgatatcgataacatg

SEQ ID NO: 93684 - DNA, 25 bp, Artificial
  probe
  misc_feature (1)..(25): SEQ ID NO: 6709; WAN024BTG_at; Start 77; Stop 101
ttgcacctgaggttcaaagaaaaaa

SEQ ID NO: 93685 - DNA, 25 bp, Artificial
  probe
  misc_feature (1)..(25): SEQ ID NO: 6709; WAN024BTG_at; Start 1217; Stop 1241
aatatgtgattactgattcgggaga

SEQ ID NO: 93686 - DNA, 25 bp, Artificial
  probe
  misc_feature (1)..(25): SEQ ID NO: 6709; WAN024BTG_at; Start 961; Stop 985
tctaaagtgatttctagacctgcta

SEQ ID NO: 93687 - DNA, 25 bp, Artificial
  probe
  misc_feature (1)..(25): SEQ ID NO: 6709; WAN024BTG_at; Start 207; Stop 231
tacagaagttgagagtattacaacc

SEQ ID NO: 93688 - DNA, 25 bp, Artificial
  probe
  misc_feature (1)..(25): SEQ ID NO: 6709; WAN024BTG_at; Start 448; Stop 472
cctagaaatgaagcaggaagtaatg

SEQ ID NO: 93689 - DNA, 25 bp, Artificial
  probe
  misc_feature (1)..(25): SEQ ID NO: 6709; WAN024BTG_at; Start 1018; Stop 1042
caaggtaaggttatcgaggtacctg

SEQ ID NO: 93690 - DNA, 25 bp, Artificial
  probe
  misc_feature (1)..(25): SEQ ID NO: 6709; WAN024BTG_at; Start 793; Stop 817
gaatggttccttgaattatcaactg

SEQ ID NO: 93691 - DNA, 25 bp, Artificial
  probe
  misc_feature (1)..(25): SEQ ID NO: 6709; WAN024BTG_at; Start 367; Stop 391
ccgtattttaggcttttagaatcag

SEQ ID NO: 93692 - DNA, 25 bp, Artificial
  probe
  misc_feature (1)..(25): SEQ ID NO: 6709; WAN024BTG_at; Start 975; Stop 999
tagacctgctaatatctcagcaacg

SEQ ID NO: 93693 - DNA, 25 bp, Artificial
  probe
  misc_feature (1)..(25): SEQ ID NO: 6709; WAN024BTG_at; Start 917; Stop 941
gggatattttgactaattcacaagg

SEQ ID NO: 93694 - DNA, 25 bp, Artificial
  probe
  misc_feature (1)..(25): SEQ ID NO: 6709; WAN024BTG_at; Start 582; Stop 606
ttcaattggaagtgagattaagcga

SEQ ID NO: 93695 - DNA, 25 bp, Artificial
  probe
  misc_feature (1)..(25): SEQ ID NO: 6709; WAN024BTG_at; Start 597; Stop 621
gattaagcgattttatgttcacgaa

SEQ ID NO: 93696 - DNA, 25 bp, Artificial
  probe
  misc_feature (1)..(25): SEQ ID NO: 6709; WAN024BTG_at; Start 859; Stop 883
ggagatattccccagttaattgagg

SEQ ID NO: 93697 - DNA, 25 bp, Artificial
  probe
  misc_feature (1)..(25): SEQ ID NO: 6709; WAN024BTG_at; Start 1121; Stop 1145
tagtcgaaaattcaatgttggtcca

SEQ ID NO: 93698 - DNA, 25 bp, Artificial
  probe
  misc_feature (1)..(25): SEQ ID NO: 6709; WAN024BTG_at; Start 18; Stop 42
tagatattctgcacgggttgttaaa

SEQ ID NO: 93699 - DNA, 25 bp, Artificial
  probe
  misc_feature (1)..(25): SEQ ID NO: 6709; WAN024BTG_at; Start 1031; Stop 1055
tcgaggtacctgatgaaaaagaatt

SEQ ID NO: 93700 - DNA, 25 bp, Artificial
  probe
  misc_feature (1)..(25): SEQ ID NO: 6709; WAN024BTG_at; Start 718; Stop 742
gaaaaagcattggaagaatgtcgca

SEQ ID NO: 93701 - DNA, 25 bp, Artificial
  probe
  misc_feature (1)..(25): SEQ ID NO: 6709; WAN024BTG_at; Start 868; Stop 892
ccccagttaattgaggatagtcatg

SEQ ID NO: 93702 - DNA, 25 bp, Artificial
  probe
  misc_feature (1)..(25): SEQ ID NO: 6382; WAN024BTH_at; Start 1039; Stop 1063
gctaaatggtctaaactgatcgagt

SEQ ID NO: 93703 - DNA, 25 bp, Artificial
  probe
  misc_feature (1)..(25): SEQ ID NO: 6382; WAN024BTH_at; Start 247; Stop 271
gatatctacggagaaggagcacttc

SEQ ID NO: 93704 - DNA, 25 bp, Artificial
  probe
  misc_feature (1)..(25): SEQ ID NO: 6382; WAN024BTH_at; Start 566; Stop 590
taagacgataccagctctttggaca

SEQ ID NO: 93705 - DNA, 25 bp, Artificial
  probe
  misc_feature (1)..(25): SEQ ID NO: 6382; WAN024BTH_at; Start 1380; Stop 1404
tcagttgcctatgaaagcacgggtg

SEQ ID NO: 93706 - DNA, 25 bp, Artificial
  probe
  misc_feature (1)..(25): SEQ ID NO: 6382; WAN024BTH_at; Start 1264; Stop 1288
cacttgcaagctggagaatttggac

SEQ ID NO: 93707 - DNA, 25 bp, Artificial
  probe
  misc_feature (1)..(25): SEQ ID NO: 6382; WAN024BTH_at; Start 1982; Stop 2006
tgttagccactgtactgaaaggagc

SEQ ID NO: 93708 - DNA, 25 bp, Artificial
  probe
  misc_feature (1)..(25): SEQ ID NO: 6382; WAN024BTH_at; Start 262; Stop 286
ggagcacttcctaatggcatcaaaa

SEQ ID NO: 93709 - DNA, 25 bp, Artificial
  probe
  misc_feature (1)..(25): SEQ ID NO: 6382; WAN024BTH_at; Start 1348; Stop 1372
tatctgactcctagtgatgaacaag

SEQ ID NO: 93710 - DNA, 25 bp, Artificial
  probe
  misc_feature (1)..(25): SEQ ID NO: 6382; WAN024BTH_at; Start 1365; Stop 1389
tgaacaaggaaagagtcagttgcct

SEQ ID NO: 93711 - DNA, 25 bp, Artificial
  probe
  misc_feature (1)..(25): SEQ ID NO: 6382; WAN024BTH_at; Start 213; Stop 237
aacggattctaaagggcaagtcaag

SEQ ID NO: 93712 - DNA, 25 bp, Artificial
  probe
  misc_feature (1)..(25): SEQ ID NO: 6382; WAN024BTH_at; Start 1499; Stop 1523
tacctagaagctttggtggctacga

SEQ ID NO: 93713 - DNA, 25 bp, Artificial
  probe
  misc_feature (1)..(25): SEQ ID NO: 6382; WAN024BTH_at; Start 1886; Stop 1910
tcactcaagaatggtggattgctct

SEQ ID NO: 93714 - DNA, 25 bp, Artificial
  probe
  misc_feature (1)..(25): SEQ ID NO: 6382; WAN024BTH_at; Start 1459; Stop 1483
tatcagcaattcttgacagacccga

SEQ ID NO: 93715 - DNA, 25 bp, Artificial
  probe
  misc_feature (1)..(25): SEQ ID NO: 6382; WAN024BTH_at; Start 1086; Stop 1110
tttggtccatcatcagcttgccgca

SEQ ID NO: 93716 - DNA, 25 bp, Artificial
  probe
  misc_feature (1)..(25): SEQ ID NO: 6382; WAN024BTH_at; Start 1697; Stop 1721
caggaggaatctttgcaatagctac

SEQ ID NO: 93717 - DNA, 25 bp, Artificial
  probe
  misc_feature (1)..(25): SEQ ID NO: 6382; WAN024BTH_at; Start 587; Stop 611
gacattctctcatggaagacggtaa

SEQ ID NO: 93718 - DNA, 25 bp, Artificial
  probe
  misc_feature (1)..(25): SEQ ID NO: 6382; WAN024BTH_at; Start 880; Stop 904
ggtctctcaattcatcgtgtcagca

SEQ ID NO: 93719 - DNA, 25 bp, Artificial
  probe
  misc_feature (1)..(25): SEQ ID NO: 6382; WAN024BTH_at; Start 1143; Stop 1167
aacagggagagagctttcgatcaca

SEQ ID NO: 93720 - DNA, 25 bp, Artificial
  probe
  misc_feature (1)..(25): SEQ ID NO: 6382; WAN024BTH_at; Start 1127; Stop 1151
tcatgaacgatcctagaacagggag

SEQ ID NO: 93721 - DNA, 25 bp, Artificial
  probe
  misc_feature (1)..(25): SEQ ID NO: 6382; WAN024BTH_at; Start 454; Stop 478
tcgggttcccaatctctagccttgg

SEQ ID NO: 93722 - DNA, 25 bp, Artificial
  probe
  misc_feature (1)..(25): SEQ ID NO: 6382; WAN024BTH_at; Start 915; Stop 939
tatctggcagacttatcaagaggga

SEQ ID NO: 93723 - DNA, 25 bp, Artificial
  probe
  misc_feature (1)..(25): SEQ ID NO: 6382; WAN024BTH_at; Start 1396; Stop 1420
gcacgggtgacctatcttcctaaca

SEQ ID NO: 93724 - DNA, 25 bp, Artificial
  probe
  misc_feature (1)..(25): SEQ ID NO: 6382; WAN024BTH_at; Start 1286; Stop 1310
gactcttgcttcctgaaaagttgaa

SEQ ID NO: 93725 - DNA, 25 bp, Artificial
  probe
  misc_feature (1)..(25): SEQ ID NO: 6382; WAN024BTH_at; Start 405; Stop 429
tttcatgaataagcccaatcccctg

SEQ ID NO: 93726 - DNA, 25 bp, Artificial
  probe
  misc_feature (1)..(25): SEQ ID NO: 6382; WAN024BTH_at; Start 1952; Stop 1976
tcctgtaccggtctcataaagaaga

SEQ ID NO: 93727 - DNA, 25 bp, Artificial
  probe
  misc_feature (1)..(25): SEQ ID NO: 6382; WAN024BTH_at; Start 1968; Stop 1992
taaagaagaccacttgttagccact

SEQ ID NO: 93728 - DNA, 25 bp, Artificial
  probe
  misc_feature (1)..(25): SEQ ID NO: 6382; WAN024BTH_at; Start 1678; Stop 1702
gagaatctcattaccattgcaggag

SEQ ID NO: 93729 - DNA, 25 bp, Artificial
  probe
  misc_feature (1)..(25): SEQ ID NO: 6382; WAN024BTH_at; Start 1058; Stop 1082
tcgagtctggcattgaaaaaggtgg

SEQ ID NO: 93730 - DNA, 25 bp, Artificial
  probe
  misc_feature (1)..(25): SEQ ID NO: 6382; WAN024BTH_at; Start 1784; Stop 1808
tcttgaagaagattgcaggtctggg

SEQ ID NO: 93731 - DNA, 25 bp, Artificial
  probe
  misc_feature (1)..(25): SEQ ID NO: 6382; WAN024BTH_at; Start 901; Stop 925
agcatctatggctctatctggcaga

SEQ ID NO: 93732 - DNA, 25 bp, Artificial
  probe
  misc_feature (1)..(25): SEQ ID NO: 6382; WAN024BTH_at; Start 1222; Stop 1246
caaaggatcttagtttcccctgagg

SEQ ID NO: 93733 - DNA, 25 bp, Artificial
  probe
  misc_feature (1)..(25): SEQ ID NO: 6382; WAN024BTH_at; Start 75; Stop 99
taatacggtcatccatcgaagccta

SEQ ID NO: 93734 - DNA, 25 bp, Artificial
  probe
  misc_feature (1)..(25): SEQ ID NO: 6382; WAN024BTH_at; Start 1237; Stop 1261
tcccctgaggaaaaagagcgcttga

SEQ ID NO: 93735 - DNA, 25 bp, Artificial
  probe
  misc_feature (1)..(25): SEQ ID NO: 6382; WAN024BTH_at; Start 1630; Stop 1654
gactatgcggcgtctgtataccagc

SEQ ID NO: 93736 - DNA, 25 bp, Artificial
  probe
  misc_feature (1)..(25): SEQ ID NO: 6667; WAN024BTI_at; Start 242; Stop 266
tctttcaaaactttggcctacttga

SEQ ID NO: 93737 - DNA, 25 bp, Artificial
  probe
  misc_feature (1)..(25): SEQ ID NO: 6667; WAN024BTI_at; Start 321; Stop 345
gaaaaaagagaagaagcagcaagaa

SEQ ID NO: 93738 - DNA, 25 bp, Artificial
  probe
  misc_feature (1)..(25): SEQ ID NO: 6667; WAN024BTI_at; Start 79; Stop 103
ggtaaggtctatgctctgatcggaa

SEQ ID NO: 93739 - DNA, 25 bp, Artificial
  probe
  misc_feature (1)..(25): SEQ ID NO: 6667; WAN024BTI_at; Start 350; Stop 374
aagtgctcaaaaaagtaggattggc

SEQ ID NO: 93740 - DNA, 25 bp, Artificial
  probe
  misc_feature (1)..(25): SEQ ID NO: 6667; WAN024BTI_at; Start 206; Stop 230
aacagcatcacttctttaagcatga

SEQ ID NO: 93741 - DNA, 25 bp, Artificial
  probe
  misc_feature (1)..(25): SEQ ID NO: 6667; WAN024BTI_at; Start 522; Stop 546
gatggacttgctcttaatgttaaag

SEQ ID NO: 93742 - DNA, 25 bp, Artificial
  probe
  misc_feature (1)..(25): SEQ ID NO: 6667; WAN024BTI_at; Start 132; Stop 156
taatatcttggcaaagttagagcct

SEQ ID NO: 93743 - DNA, 25 bp, Artificial
  probe
  misc_feature (1)..(25): SEQ ID NO: 6667; WAN024BTI_at; Start 567; Stop 591
tattgcaacccataatcccgatatt

SEQ ID NO: 93744 - DNA, 25 bp, Artificial
  probe
  misc_feature (1)..(25): SEQ ID NO: 6667; WAN024BTI_at; Start 219; Stop 243
ctttaagcatgaattaggctatctc

SEQ ID NO: 93745 - DNA, 25 bp, Artificial
  probe
  misc_feature (1)..(25): SEQ ID NO: 6667; WAN024BTI_at; Start 119; Stop 143
aaacaaccttgcttaatatcttggc

SEQ ID NO: 93746 - DNA, 25 bp, Artificial
  probe
  misc_feature (1)..(25): SEQ ID NO: 6667; WAN024BTI_at; Start 553; Stop 577
gagcgtataatcattattgcaaccc

SEQ ID NO: 93747 - DNA, 25 bp, Artificial
  probe
  misc_feature (1)..(25): SEQ ID NO: 6667; WAN024BTI_at; Start 70; Stop 94
tttacagaaggtaaggtctatgctc

SEQ ID NO: 93748 - DNA, 25 bp, Artificial
  probe
  misc_feature (1)..(25): SEQ ID NO: 6667; WAN024BTI_at; Start 481; Stop 505
gaactaactgcagcactggatccag

SEQ ID NO: 93749 - DNA, 25 bp, Artificial
  probe
  misc_feature (1)..(25): SEQ ID NO: 6667; WAN024BTI_at; Start 455; Stop 479
aagatccacctttaattttggcaga

SEQ ID NO: 93750 - DNA, 25 bp, Artificial
  probe
  misc_feature (1)..(25): SEQ ID NO: 6667; WAN024BTI_at; Start 379; Stop 403
cttgctctggatcaaaagatttttg

SEQ ID NO: 93751 - DNA, 25 bp, Artificial
  probe
  misc_feature (1)..(25): SEQ ID NO: 6667; WAN024BTI_at; Start 471; Stop 495
tttggcagatgaactaactgcagca

SEQ ID NO: 93752 - DNA, 25 bp, Artificial
  probe
  misc_feature (1)..(25): SEQ ID NO: 6667; WAN024BTI_at; Start 536; Stop 560
taatgttaaagaatcaagagcgtat

SEQ ID NO: 93753 - DNA, 25 bp, Artificial
  probe
  misc_feature (1)..(25): SEQ ID NO: 6667; WAN024BTI_at; Start 167; Stop 191
gaagtatcagctatcaagggcaaga

SEQ ID NO: 93754 - DNA, 25 bp, Artificial
  probe
  misc_feature (1)..(25): SEQ ID NO: 6667; WAN024BTI_at; Start 257; Stop 281
gcctacttgaaaatgagactatcgc

SEQ ID NO: 93755 - DNA, 25 bp, Artificial
  probe
  misc_feature (1)..(25): SEQ ID NO: 6667; WAN024BTI_at; Start 299; Stop 323
gattgattgggcaaaaattaacgaa

SEQ ID NO: 93756 - DNA, 25 bp, Artificial
  probe
  misc_feature (1)..(25): SEQ ID NO: 6667; WAN024BTI_at; Start 55; Stop 79
gatttgagcttgcaatttacagaag

SEQ ID NO: 93757 - DNA, 25 bp, Artificial
  probe
  misc_feature (1)..(25): SEQ ID NO: 6667; WAN024BTI_at; Start 181; Stop 205
caagggcaagaattgaaacaaatca

SEQ ID NO: 93758 - DNA, 25 bp, Artificial
  probe
  misc_feature (1)..(25): SEQ ID NO: 6667; WAN024BTI_at; Start 90; Stop 114
tgctctgatcggaaatagcgggtgt

SEQ ID NO: 93759 - DNA, 25 bp, Artificial
  probe
  misc_feature (1)..(25): SEQ ID NO: 6667; WAN024BTI_at; Start 420; Stop 444
ggcgcaacgtgtcgcattagctaaa

SEQ ID NO: 93760 - DNA, 25 bp, Artificial
  probe
  misc_feature (1)..(25): SEQ ID NO: 6667; WAN024BTI_at; Start 270; Stop 294
tgagactatcgctacaaatttagat

SEQ ID NO: 93761 - DNA, 25 bp, Artificial
  probe
  misc_feature (1)..(25): SEQ ID NO: 6667; WAN024BTI_at; Start 40; Stop 64
cgaacggtctttcaagatttgagct

SEQ ID NO: 93762 - DNA, 25 bp, Artificial
  probe
  misc_feature (1)..(25): SEQ ID NO: 6667; WAN024BTI_at; Start 511; Stop 535
tcacaagaggtgatggacttgctct

SEQ ID NO: 93763 - DNA, 25 bp, Artificial
  probe
  misc_feature (1)..(25): SEQ ID NO: 6667; WAN024BTI_at; Start 365; Stop 389
taggattggcttaccttgctctgga

SEQ ID NO: 93764 - DNA, 25 bp, Artificial
  probe
  misc_feature (1)..(25): SEQ ID NO: 6667; WAN024BTI_at; Start 3; Stop 27
gattagcatagaacatttaaccaaa

SEQ ID NO: 93765 - DNA, 25 bp, Artificial
  probe
  misc_feature (1)..(25): SEQ ID NO: 6667; WAN024BTI_at; Start 496; Stop 520
ctggatccagaaacctcacaagagg

SEQ ID NO: 93766 - DNA, 25 bp, Artificial
  probe
  misc_feature (1)..(25): SEQ ID NO: 6667; WAN024BTI_at; Start 582; Stop 606
tcccgatatttggaatcaagcagat

SEQ ID NO: 93767 - DNA, 25 bp, Artificial
  probe
  misc_feature (1)..(25): SEQ ID NO: 6667; WAN024BTI_at; Start 153; Stop 177
gccttatgaaaagggaagtatcagc

SEQ ID NO: 93768 - DNA, 25 bp, Artificial
  probe
  misc_feature (1)..(25): SEQ ID NO: 6667; WAN024BTI_at; Start 336; Stop 360
gcagcaagaagaagaagtgctcaaa

SEQ ID NO: 93769 - DNA, 25 bp, Artificial
  probe
  misc_feature (1)..(25): SEQ ID NO: 6667; WAN024BTI_at; Start 25; Stop 49
aaatcatttggccaacgaacggtct

SEQ ID NO: 93770 - DNA, 25 bp, Artificial
  probe
  misc_feature (1)..(25): SEQ ID NO: 6742; WAN024BTJ_at; Start 30; Stop 54
attttcttcaggaattgagattttg

SEQ ID NO: 93771 - DNA, 25 bp, Artificial
  probe
  misc_feature (1)..(25): SEQ ID NO: 6742; WAN024BTJ_at; Start 29; Stop 53
cattttcttcaggaattgagatttt

SEQ ID NO: 93772 - DNA, 25 bp, Artificial
  probe
  misc_feature (1)..(25): SEQ ID NO: 6742; WAN024BTJ_at; Start 50; Stop 74
ttttgcccatctcttttcattatat

SEQ ID NO: 93773 - DNA, 25 bp, Artificial
  probe
  misc_feature (1)..(25): SEQ ID NO: 6742; WAN024BTJ_at; Start 18; Stop 42
aagatttactccattttcttcagga

SEQ ID NO: 93774 - DNA, 25 bp, Artificial
  probe
  misc_feature (1)..(25): SEQ ID NO: 6742; WAN024BTJ_at; Start 32; Stop 56
tttcttcaggaattgagattttgcc

SEQ ID NO: 93775 - DNA, 25 bp, Artificial
  probe
  misc_feature (1)..(25): SEQ ID NO: 6742; WAN024BTJ_at; Start 21; Stop 45
atttactccattttcttcaggaatt

SEQ ID NO: 93776 - DNA, 25 bp, Artificial
  probe
  misc_feature (1)..(25): SEQ ID NO: 6742; WAN024BTJ_at; Start 51; Stop 75
tttgcccatctcttttcattatatt

SEQ ID NO: 93777 - DNA, 25 bp, Artificial
  probe
  misc_feature (1)..(25): SEQ ID NO: 6742; WAN024BTJ_at; Start 20; Stop 44
gatttactccattttcttcaggaat

SEQ ID NO: 93778 - DNA, 25 bp, Artificial
  probe
  misc_feature (1)..(25): SEQ ID NO: 6742; WAN024BTJ_at; Start 46; Stop 70
gagattttgcccatctcttttcatt

SEQ ID NO: 93779 - DNA, 25 bp, Artificial
  probe
  misc_feature (1)..(25): SEQ ID NO: 6742; WAN024BTJ_at; Start 17; Stop 41
gaagatttactccattttcttcagg

SEQ ID NO: 93780 - DNA, 25 bp, Artificial
  probe
  misc_feature (1)..(25): SEQ ID NO: 6742; WAN024BTJ_at; Start 27; Stop 51
tccattttcttcaggaattgagatt

SEQ ID NO: 93781 - DNA, 25 bp, Artificial
  probe
  misc_feature (1)..(25): SEQ ID NO: 6742; WAN024BTJ_at; Start 48; Stop 72
gattttgcccatctcttttcattat

SEQ ID NO: 93782 - DNA, 25 bp, Artificial
  probe
  misc_feature (1)..(25): SEQ ID NO: 6742; WAN024BTJ_at; Start 45; Stop 69
tgagattttgcccatctcttttcat

SEQ ID NO: 93783 - DNA, 25 bp, Artificial
  probe
  misc_feature (1)..(25): SEQ ID NO: 6742; WAN024BTJ_at; Start 40; Stop 64
ggaattgagattttgcccatctctt

SEQ ID NO: 93784 - DNA, 25 bp, Artificial
  probe
  misc_feature (1)..(25): SEQ ID NO: 6742; WAN024BTJ_at; Start 36; Stop 60
ttcaggaattgagattttgcccatc

SEQ ID NO: 93785 - DNA, 25 bp, Artificial
  probe
  misc_feature (1)..(25): SEQ ID NO: 6742; WAN024BTJ_at; Start 37; Stop 61
tcaggaattgagattttgcccatct

SEQ ID NO: 93786 - DNA, 25 bp, Artificial
  probe
  misc_feature (1)..(25): SEQ ID NO: 6742; WAN024BTJ_at; Start 41; Stop 65
gaattgagattttgcccatctcttt

SEQ ID NO: 93787 - DNA, 25 bp, Artificial
  probe
  misc_feature (1)..(25): SEQ ID NO: 6742; WAN024BTJ_at; Start 23; Stop 47
ttactccattttcttcaggaattga

SEQ ID NO: 93788 - DNA, 25 bp, Artificial
  probe
  misc_feature (1)..(25): SEQ ID NO: 6742; WAN024BTJ_at; Start 38; Stop 62
caggaattgagattttgcccatctc

SEQ ID NO: 93789 - DNA, 25 bp, Artificial
  probe
  misc_feature (1)..(25): SEQ ID NO: 6742; WAN024BTJ_at; Start 26; Stop 50
ctccattttcttcaggaattgagat

SEQ ID NO: 93790 - DNA, 25 bp, Artificial
  probe
  misc_feature (1)..(25): SEQ ID NO: 6742; WAN024BTJ_at; Start 34; Stop 58
tcttcaggaattgagattttgccca

SEQ ID NO: 93791 - DNA, 25 bp, Artificial
  probe
  misc_feature (1)..(25): SEQ ID NO: 6742; WAN024BTJ_at; Start 25; Stop 49
actccattttcttcaggaattgaga

SEQ ID NO: 93792 - DNA, 25 bp, Artificial
  probe
  misc_feature (1)..(25): SEQ ID NO: 6742; WAN024BTJ_at; Start 39; Stop 63
aggaattgagattttgcccatctct

SEQ ID NO: 93793 - DNA, 25 bp, Artificial
  probe
  misc_feature (1)..(25): SEQ ID NO: 6742; WAN024BTJ_at; Start 35; Stop 59
cttcaggaattgagattttgcccat

SEQ ID NO: 93794 - DNA, 25 bp, Artificial
  probe
  misc_feature (1)..(25): SEQ ID NO: 6742; WAN024BTJ_at; Start 31; Stop 55
ttttcttcaggaattgagattttgc

SEQ ID NO: 93795 - DNA, 25 bp, Artificial
  probe
  misc_feature (1)..(25): SEQ ID NO: 6742; WAN024BTJ_at; Start 19; Stop 43
agatttactccattttcttcaggaa

SEQ ID NO: 93796 - DNA, 25 bp, Artificial
  probe
  misc_feature (1)..(25): SEQ ID NO: 6742; WAN024BTJ_at; Start 33; Stop 57
ttcttcaggaattgagattttgccc

SEQ ID NO: 93797 - DNA, 25 bp, Artificial
  probe
  misc_feature (1)..(25): SEQ ID NO: 6742; WAN024BTJ_at; Start 42; Stop 66
aattgagattttgcccatctctttt

SEQ ID NO: 93798 - DNA, 25 bp, Artificial
  probe
  misc_feature (1)..(25): SEQ ID NO: 6742; WAN024BTJ_at; Start 24; Stop 48
tactccattttcttcaggaattgag

SEQ ID NO: 93799 - DNA, 25 bp, Artificial
  probe
  misc_feature (1)..(25): SEQ ID NO: 6742; WAN024BTJ_at; Start 47; Stop 71
agattttgcccatctcttttcatta

SEQ ID NO: 93800 - DNA, 25 bp, Artificial
  probe
  misc_feature (1)..(25): SEQ ID NO: 6742; WAN024BTJ_at; Start 49; Stop 73
attttgcccatctcttttcattata

SEQ ID NO: 93801 - DNA, 25 bp, Artificial
  probe
  misc_feature (1)..(25): SEQ ID NO: 6742; WAN024BTJ_at; Start 43; Stop 67
attgagattttgcccatctcttttc

SEQ ID NO: 93802 - DNA, 25 bp, Artificial
  probe
  misc_feature (1)..(25): SEQ ID NO: 6742; WAN024BTJ_at; Start 28; Stop 52
ccattttcttcaggaattgagattt

SEQ ID NO: 93803 - DNA, 25 bp, Artificial
  probe
  misc_feature (1)..(25): SEQ ID NO: 6742; WAN024BTJ_at; Start 22; Stop 46
tttactccattttcttcaggaattg

SEQ ID NO: 93804 - DNA, 25 bp, Artificial
  probe
  misc_feature (1)..(25): SEQ ID NO: 6668; WAN024BTK_at; Start 40; Stop 64
tctattagttcagaatctgttttta

SEQ ID NO: 93805 - DNA, 25 bp, Artificial
  probe
  misc_feature (1)..(25): SEQ ID NO: 6668; WAN024BTK_at; Start 66; Stop 90
ttttaaatgttataatagtgttatc

SEQ ID NO: 93806 - DNA, 25 bp, Artificial
  probe
  misc_feature (1)..(25): SEQ ID NO: 6668; WAN024BTK_at; Start 32; Stop 56
ttatattttctattagttcagaatc

SEQ ID NO: 93807 - DNA, 25 bp, Artificial
  probe
  misc_feature (1)..(25): SEQ ID NO: 6668; WAN024BTK_at; Start 35; Stop 59
tattttctattagttcagaatctgt

SEQ ID NO: 93808 - DNA, 25 bp, Artificial
  probe
  misc_feature (1)..(25): SEQ ID NO: 6668; WAN024BTK_at; Start 67; Stop 91
tttaaatgttataatagtgttatca

SEQ ID NO: 93809 - DNA, 25 bp, Artificial
  probe
  misc_feature (1)..(25): SEQ ID NO: 6668; WAN024BTK_at; Start 34; Stop 58
atattttctattagttcagaatctg

SEQ ID NO: 93810 - DNA, 25 bp, Artificial
  probe
  misc_feature (1)..(25): SEQ ID NO: 6668; WAN024BTK_at; Start 29; Stop 53
gaattatattttctattagttcaga

SEQ ID NO: 93811 - DNA, 25 bp, Artificial
  probe
  misc_feature (1)..(25): SEQ ID NO: 6668; WAN024BTK_at; Start 41; Stop 65
ctattagttcagaatctgtttttat

SEQ ID NO: 93812 - DNA, 25 bp, Artificial
  probe
  misc_feature (1)..(25): SEQ ID NO: 6668; WAN024BTK_at; Start 37; Stop 61
ttttctattagttcagaatctgttt

SEQ ID NO: 93813 - DNA, 25 bp, Artificial
  probe
  misc_feature (1)..(25): SEQ ID NO: 6668; WAN024BTK_at; Start 28; Stop 52
agaattatattttctattagttcag

SEQ ID NO: 93814 - DNA, 25 bp, Artificial
  probe
  misc_feature (1)..(25): SEQ ID NO: 6668; WAN024BTK_at; Start 36; Stop 60
attttctattagttcagaatctgtt

SEQ ID NO: 93815 - DNA, 25 bp, Artificial
  probe
  misc_feature (1)..(25): SEQ ID NO: 6668; WAN024BTK_at; Start 33; Stop 57
tatattttctattagttcagaatct

SEQ ID NO: 93816 - DNA, 25 bp, Artificial
  probe
  misc_feature (1)..(25): SEQ ID NO: 6668; WAN024BTK_at; Start 38; Stop 62
tttctattagttcagaatctgtttt

SEQ ID NO: 93817 - DNA, 25 bp, Artificial
  probe
  misc_feature (1)..(25): SEQ ID NO: 6668; WAN024BTK_at; Start 69; Stop 93
taaatgttataatagtgttatcaag

SEQ ID NO: 93818 - DNA, 25 bp, Artificial
  probe
  misc_feature (1)..(25): SEQ ID NO: 6668; WAN024BTK_at; Start 30; Stop 54
aattatattttctattagttcagaa

SEQ ID NO: 93819 - DNA, 25 bp, Artificial
  probe
  misc_feature (1)..(25): SEQ ID NO: 6668; WAN024BTK_at; Start 68; Stop 92
ttaaatgttataatagtgttatcaa

SEQ ID NO: 93820 - DNA, 25 bp, Artificial
  probe
  misc_feature (1)..(25): SEQ ID NO: 6668; WAN024BTK_at; Start 42; Stop 66
tattagttcagaatctgtttttatt

SEQ ID NO: 93821 - DNA, 25 bp, Artificial
  probe
  misc_feature (1)..(25): SEQ ID NO: 6668; WAN024BTK_at; Start 39; Stop 63
ttctattagttcagaatctgttttt

SEQ ID NO: 93822 - DNA, 25 bp, Artificial
  probe
  misc_feature (1)..(25): SEQ ID NO: 7717; WAN024BTL_at; Start 142; Stop 166
caaagatttatgactaaatggatag

SEQ ID NO: 93823 - DNA, 25 bp, Artificial
  probe
  misc_feature (1)..(25): SEQ ID NO: 7717; WAN024BTL_at; Start 11; Stop 35
aattcaactgctcaatggttttatc

SEQ ID NO: 93824 - DNA, 25 bp, Artificial
  probe
  misc_feature (1)..(25): SEQ ID NO: 7717; WAN024BTL_at; Start 153; Stop 177
gactaaatggatagatgattacgaa

SEQ ID NO: 93825 - DNA, 25 bp, Artificial
  probe
  misc_feature (1)..(25): SEQ ID NO: 7717; WAN024BTL_at; Start 183; Stop 207
ggttaggagattagagaattttatc

SEQ ID NO: 93826 - DNA, 25 bp, Artificial
  probe
  misc_feature (1)..(25): SEQ ID NO: 7717; WAN024BTL_at; Start 120; Stop 144
ggagaaagaaatcgaagaaaatcaa

SEQ ID NO: 93827 - DNA, 25 bp, Artificial
  probe
  misc_feature (1)..(25): SEQ ID NO: 7717; WAN024BTL_at; Start 204; Stop 228
tatcaatatacttgataatacaaga

SEQ ID NO: 93828 - DNA, 25 bp, Artificial
  probe
  misc_feature (1)..(25): SEQ ID NO: 7717; WAN024BTL_at; Start 23; Stop 47
caatggttttatcttatcgtttact

SEQ ID NO: 93829 - DNA, 25 bp, Artificial
  probe
  misc_feature (1)..(25): SEQ ID NO: 7717; WAN024BTL_at; Start 34; Stop 58
tcttatcgtttactcttatttatca

SEQ ID NO: 93830 - DNA, 25 bp, Artificial
  probe
  misc_feature (1)..(25): SEQ ID NO: 7717; WAN024BTL_at; Start 93; Stop 117
gacttcaactatcaaactggagcag

SEQ ID NO: 93831 - DNA, 25 bp, Artificial
  probe
  misc_feature (1)..(25): SEQ ID NO: 7717; WAN024BTL_at; Start 63; Stop 87
tcttttcaatctctttgccaagatg

SEQ ID NO: 93832 - DNA, 25 bp, Artificial
  probe
  misc_feature (1)..(25): SEQ ID NO: 7717; WAN024BTL_at; Start 98; Stop 122
caactatcaaactggagcaggtgga

SEQ ID NO: 93833 - DNA, 25 bp, Artificial
  probe
  misc_feature (1)..(25): SEQ ID NO: 7717; WAN024BTL_at; Start 230; Stop 254
atcaaaatgttaccaaattagaacg

SEQ ID NO: 93834 - DNA, 25 bp, Artificial
  probe
  misc_feature (1)..(25): SEQ ID NO: 7717; WAN024BTL_at; Start 17; Stop 41
actgctcaatggttttatcttatcg

SEQ ID NO: 93835 - DNA, 25 bp, Artificial
  probe
  misc_feature (1)..(25): SEQ ID NO: 7717; WAN024BTL_at; Start 69; Stop 93
caatctctttgccaagatgaacctg

SEQ ID NO: 93836 - DNA, 25 bp, Artificial
  probe
  misc_feature (1)..(25): SEQ ID NO: 7717; WAN024BTL_at; Start 1; Stop 25
ttgttggataaattcaactgctcaa

SEQ ID NO: 93837 - DNA, 25 bp, Artificial
  probe
  misc_feature (1)..(25): SEQ ID NO: 7717; WAN024BTL_at; Start 166; Stop 190
gatgattacgaatataaggttagga

SEQ ID NO: 93838 - DNA, 25 bp, Artificial
  probe
  misc_feature (1)..(25): SEQ ID NO: 7717; WAN024BTL_at; Start 84; Stop 108
gatgaacctgacttcaactatcaaa

SEQ ID NO: 93839 - DNA, 25 bp, Artificial
  probe
  misc_feature (1)..(25): SEQ ID NO: 7717; WAN024BTL_at; Start 131; Stop 155
tcgaagaaaatcaaagatttatgac

SEQ ID NO: 93840 - DNA, 25 bp, Artificial
  probe
  misc_feature (1)..(25): SEQ ID NO: 7717; WAN024BTL_at; Start 79; Stop 103
gccaagatgaacctgacttcaacta

SEQ ID NO: 93841 - DNA, 25 bp, Artificial
  probe
  misc_feature (1)..(25): SEQ ID NO: 7717; WAN024BTL_at; Start 76; Stop 100
tttgccaagatgaacctgacttcaa

SEQ ID NO: 93842 - DNA, 25 bp, Artificial
  probe
  misc_feature (1)..(25): SEQ ID NO: 7717; WAN024BTL_at; Start 101; Stop 125
ctatcaaactggagcaggtggagaa

SEQ ID NO: 93843 - DNA, 25 bp, Artificial
  probe
  misc_feature (1)..(25): SEQ ID NO: 7717; WAN024BTL_at; Start 96; Stop 120
ttcaactatcaaactggagcaggtg

SEQ ID NO: 93844 - DNA, 25 bp, Artificial
  probe
  misc_feature (1)..(25): SEQ ID NO: 7717; WAN024BTL_at; Start 114; Stop 138
gcaggtggagaaagaaatcgaagaa

SEQ ID NO: 93845 - DNA, 25 bp, Artificial
  probe
  misc_feature (1)..(25): SEQ ID NO: 7717; WAN024BTL_at; Start 174; Stop 198
cgaatataaggttaggagattagag

SEQ ID NO: 93846 - DNA, 25 bp, Artificial
  probe
  misc_feature (1)..(25): SEQ ID NO: 7717; WAN024BTL_at; Start 74; Stop 98
tctttgccaagatgaacctgacttc

SEQ ID NO: 93847 - DNA, 25 bp, Artificial
  probe
  misc_feature (1)..(25): SEQ ID NO: 7717; WAN024BTL_at; Start 5; Stop 29
tggataaattcaactgctcaatggt

SEQ ID NO: 93848 - DNA, 25 bp, Artificial
  probe
  misc_feature (1)..(25): SEQ ID NO: 7717; WAN024BTL_at; Start 191; Stop 215
gattagagaattttatcaatatact

SEQ ID NO: 93849 - DNA, 25 bp, Artificial
  probe
  misc_feature (1)..(25): SEQ ID NO: 7717; WAN024BTL_at; Start 104; Stop 128
tcaaactggagcaggtggagaaaga

SEQ ID NO: 93850 - DNA, 25 bp, Artificial
  probe
  misc_feature (1)..(25): SEQ ID NO: 7717; WAN024BTL_at; Start 219; Stop 243
taatacaagaaatcaaaatgttacc

SEQ ID NO: 93851 - DNA, 25 bp, Artificial
  probe
  misc_feature (1)..(25): SEQ ID NO: 7717; WAN024BTL_at; Start 168; Stop 192
tgattacgaatataaggttaggaga

SEQ ID NO: 93852 - DNA, 25 bp, Artificial
  probe
  misc_feature (1)..(25): SEQ ID NO: 7717; WAN024BTL_at; Start 87; Stop 111
gaacctgacttcaactatcaaactg

SEQ ID NO: 93853 - DNA, 25 bp, Artificial
  probe
  misc_feature (1)..(25): SEQ ID NO: 7717; WAN024BTL_at; Start 72; Stop 96
tctctttgccaagatgaacctgact

SEQ ID NO: 93854 - DNA, 25 bp, Artificial
  probe
  misc_feature (1)..(25): SEQ ID NO: 7717; WAN024BTL_at; Start 90; Stop 114
cctgacttcaactatcaaactggag

SEQ ID NO: 93855 - DNA, 25 bp, Artificial
  probe
  misc_feature (1)..(25): SEQ ID NO: 7717; WAN024BTL_at; Start 108; Stop 132
actggagcaggtggagaaagaaatc

SEQ ID NO: 93856 - DNA, 25 bp, Artificial
  probe
  misc_feature (1)..(25): SEQ ID NO: 7584; WAN024BTM_at; Start 58; Stop 82
catttatatataattgttatctctc

SEQ ID NO: 93857 - DNA, 25 bp, Artificial
  probe
  misc_feature (1)..(25): SEQ ID NO: 7584; WAN024BTM_at; Start 38; Stop 62
atctaggaaatggagtagtacattt

SEQ ID NO: 93858 - DNA, 25 bp, Artificial
  probe
  misc_feature (1)..(25): SEQ ID NO: 7584; WAN024BTM_at; Start 27; Stop 51
tactaagtattatctaggaaatgga

SEQ ID NO: 93859 - DNA, 25 bp, Artificial
  probe
  misc_feature (1)..(25): SEQ ID NO: 7584; WAN024BTM_at; Start 47; Stop 71
atggagtagtacatttatatataat

SEQ ID NO: 93860 - DNA, 25 bp, Artificial
  probe
  misc_feature (1)..(25): SEQ ID NO: 7584; WAN024BTM_at; Start 50; Stop 74
gagtagtacatttatatataattgt

SEQ ID NO: 93861 - DNA, 25 bp, Artificial
  probe
  misc_feature (1)..(25): SEQ ID NO: 7584; WAN024BTM_at; Start 59; Stop 83
atttatatataattgttatctctcc

SEQ ID NO: 93862 - DNA, 25 bp, Artificial
  probe
  misc_feature (1)..(25): SEQ ID NO: 7584; WAN024BTM_at; Start 56; Stop 80
tacatttatatataattgttatctc

SEQ ID NO: 93863 - DNA, 25 bp, Artificial
  probe
  misc_feature (1)..(25): SEQ ID NO: 7584; WAN024BTM_at; Start 41; Stop 65
taggaaatggagtagtacatttata

SEQ ID NO: 93864 - DNA, 25 bp, Artificial
  probe
  misc_feature (1)..(25): SEQ ID NO: 7584; WAN024BTM_at; Start 31; Stop 55
aagtattatctaggaaatggagtag

SEQ ID NO: 93865 - DNA, 25 bp, Artificial
  probe
  misc_feature (1)..(25): SEQ ID NO: 7584; WAN024BTM_at; Start 32; Stop 56
agtattatctaggaaatggagtagt

SEQ ID NO: 93866 - DNA, 25 bp, Artificial
  probe
  misc_feature (1)..(25): SEQ ID NO: 7584; WAN024BTM_at; Start 44; Stop 68
gaaatggagtagtacatttatatat

SEQ ID NO: 93867 - DNA, 25 bp, Artificial
  probe
  misc_feature (1)..(25): SEQ ID NO: 7584; WAN024BTM_at; Start 35; Stop 59
attatctaggaaatggagtagtaca

SEQ ID NO: 93868 - DNA, 25 bp, Artificial
  probe
  misc_feature (1)..(25): SEQ ID NO: 7584; WAN024BTM_at; Start 46; Stop 70
aatggagtagtacatttatatataa

SEQ ID NO: 93869 - DNA, 25 bp, Artificial
  probe
  misc_feature (1)..(25): SEQ ID NO: 7584; WAN024BTM_at; Start 28; Stop 52
actaagtattatctaggaaatggag

SEQ ID NO: 93870 - DNA, 25 bp, Artificial
  probe
  misc_feature (1)..(25): SEQ ID NO: 7584; WAN024BTM_at; Start 60; Stop 84
tttatatataattgttatctctcca

SEQ ID NO: 93871 - DNA, 25 bp, Artificial
  probe
  misc_feature (1)..(25): SEQ ID NO: 7584; WAN024BTM_at; Start 48; Stop 72
tggagtagtacatttatatataatt

SEQ ID NO: 93872 - DNA, 25 bp, Artificial
  probe
  misc_feature (1)..(25): SEQ ID NO: 7584; WAN024BTM_at; Start 36; Stop 60
ttatctaggaaatggagtagtacat

SEQ ID NO: 93873 - DNA, 25 bp, Artificial
  probe
  misc_feature (1)..(25): SEQ ID NO: 7584; WAN024BTM_at; Start 37; Stop 61
tatctaggaaatggagtagtacatt

SEQ ID NO: 93874 - DNA, 25 bp, Artificial
  probe
  misc_feature (1)..(25): SEQ ID NO: 7584; WAN024BTM_at; Start 43; Stop 67
ggaaatggagtagtacatttatata

SEQ ID NO: 93875 - DNA, 25 bp, Artificial
  probe
  misc_feature (1)..(25): SEQ ID NO: 7584; WAN024BTM_at; Start 26; Stop 50
ttactaagtattatctaggaaatgg

SEQ ID NO: 93876 - DNA, 25 bp, Artificial
  probe
  misc_feature (1)..(25): SEQ ID NO: 7584; WAN024BTM_at; Start 42; Stop 66
aggaaatggagtagtacatttatat

SEQ ID NO: 93877 - DNA, 25 bp, Artificial
  probe
  misc_feature (1)..(25): SEQ ID NO: 7584; WAN024BTM_at; Start 29; Stop 53
ctaagtattatctaggaaatggagt

SEQ ID NO: 93878 - DNA, 25 bp, Artificial
  probe
  misc_feature (1)..(25): SEQ ID NO: 7584; WAN024BTM_at; Start 34; Stop 58
tattatctaggaaatggagtagtac

SEQ ID NO: 93879 - DNA, 25 bp, Artificial
  probe
  misc_feature (1)..(25): SEQ ID NO: 7584; WAN024BTM_at; Start 57; Stop 81
acatttatatataattgttatctct

SEQ ID NO: 93880 - DNA, 25 bp, Artificial
  probe
  misc_feature (1)..(25): SEQ ID NO: 7584; WAN024BTM_at; Start 49; Stop 73
ggagtagtacatttatatataattg

SEQ ID NO: 93881 - DNA, 25 bp, Artificial
  probe
  misc_feature (1)..(25): SEQ ID NO: 7584; WAN024BTM_at; Start 40; Stop 64
ctaggaaatggagtagtacatttat

SEQ ID NO: 93882 - DNA, 25 bp, Artificial
  probe
  misc_feature (1)..(25): SEQ ID NO: 7584; WAN024BTM_at; Start 30; Stop 54
taagtattatctaggaaatggagta

SEQ ID NO: 93883 - DNA, 25 bp, Artificial
  probe
  misc_feature (1)..(25): SEQ ID NO: 7584; WAN024BTM_at; Start 45; Stop 69
aaatggagtagtacatttatatata

SEQ ID NO: 93884 - DNA, 25 bp, Artificial
  probe
  misc_feature (1)..(25): SEQ ID NO: 7584; WAN024BTM_at; Start 39; Stop 63
tctaggaaatggagtagtacattta

SEQ ID NO: 93885 - DNA, 25 bp, Artificial
  probe
  misc_feature (1)..(25): SEQ ID NO: 7584; WAN024BTM_at; Start 33; Stop 57
gtattatctaggaaatggagtagta

SEQ ID NO: 93886 - DNA, 25 bp, Artificial
  probe
  misc_feature (1)..(25): SEQ ID NO: 7584; WAN024BTM_at; Start 25; Stop 49
tttactaagtattatctaggaaatg

SEQ ID NO: 93887 - DNA, 25 bp, Artificial
  probe
  misc_feature (1)..(25): SEQ ID NO: 7176; WAN024BTN_at; Start 2; Stop 26
tgttttctgaaaatcagaattctgt

SEQ ID NO: 93888 - DNA, 25 bp, Artificial
  probe
  misc_feature (1)..(25): SEQ ID NO: 7176; WAN024BTN_at; Start 29; Stop 53
tgttcgctttctttatatttggaat

SEQ ID NO: 93889 - DNA, 25 bp, Artificial
  probe
  misc_feature (1)..(25): SEQ ID NO: 7176; WAN024BTN_at; Start 15; Stop 39
tcagaattctgttttgttcgctttc

SEQ ID NO: 93890 - DNA, 25 bp, Artificial
  probe
  misc_feature (1)..(25): SEQ ID NO: 7176; WAN024BTN_at; Start 44; Stop 68
tatttggaattatactcctatctcc

SEQ ID NO: 93891 - DNA, 25 bp, Artificial
  probe
  misc_feature (1)..(25): SEQ ID NO: 7176; WAN024BTN_at; Start 39; Stop 63
ctttatatttggaattatactccta

SEQ ID NO: 93892 - DNA, 25 bp, Artificial
  probe
  misc_feature (1)..(25): SEQ ID NO: 7176; WAN024BTN_at; Start 42; Stop 66
tatatttggaattatactcctatct

SEQ ID NO: 93893 - DNA, 25 bp, Artificial
  probe
  misc_feature (1)..(25): SEQ ID NO: 7176; WAN024BTN_at; Start 45; Stop 69
atttggaattatactcctatctccc

SEQ ID NO: 93894 - DNA, 25 bp, Artificial
  probe
  misc_feature (1)..(25): SEQ ID NO: 7176; WAN024BTN_at; Start 21; Stop 45
ttctgttttgttcgctttctttata

SEQ ID NO: 93895 - DNA, 25 bp, Artificial
  probe
  misc_feature (1)..(25): SEQ ID NO: 7176; WAN024BTN_at; Start 34; Stop 58
gctttctttatatttggaattatac

SEQ ID NO: 93896 - DNA, 25 bp, Artificial
  probe
  misc_feature (1)..(25): SEQ ID NO: 7176; WAN024BTN_at; Start 28; Stop 52
ttgttcgctttctttatatttggaa

SEQ ID NO: 93897 - DNA, 25 bp, Artificial
  probe
  misc_feature (1)..(25): SEQ ID NO: 7176; WAN024BTN_at; Start 33; Stop 57
cgctttctttatatttggaattata

SEQ ID NO: 93898 - DNA, 25 bp, Artificial
  probe
  misc_feature (1)..(25): SEQ ID NO: 7176; WAN024BTN_at; Start 7; Stop 31
tctgaaaatcagaattctgttttgt

SEQ ID NO: 93899 - DNA, 25 bp, Artificial
  probe
  misc_feature (1)..(25): SEQ ID NO: 7176; WAN024BTN_at; Start 38; Stop 62
tctttatatttggaattatactcct

SEQ ID NO: 93900 - DNA, 25 bp, Artificial
  probe
  misc_feature (1)..(25): SEQ ID NO: 7176; WAN024BTN_at; Start 27; Stop 51
tttgttcgctttctttatatttgga

SEQ ID NO: 93901 - DNA, 25 bp, Artificial
  probe
  misc_feature (1)..(25): SEQ ID NO: 7176; WAN024BTN_at; Start 46; Stop 70
tttggaattatactcctatctcccc

SEQ ID NO: 93902 - DNA, 25 bp, Artificial
  probe
  misc_feature (1)..(25): SEQ ID NO: 7176; WAN024BTN_at; Start 31; Stop 55
ttcgctttctttatatttggaatta

SEQ ID NO: 93903 - DNA, 25 bp, Artificial
  probe
  misc_feature (1)..(25): SEQ ID NO: 7176; WAN024BTN_at; Start 13; Stop 37
aatcagaattctgttttgttcgctt

SEQ ID NO: 93904 - DNA, 25 bp, Artificial
  probe
  misc_feature (1)..(25): SEQ ID NO: 7176; WAN024BTN_at; Start 43; Stop 67
atatttggaattatactcctatctc

SEQ ID NO: 93905 - DNA, 25 bp, Artificial
  probe
  misc_feature (1)..(25): SEQ ID NO: 7176; WAN024BTN_at; Start 6; Stop 30
ttctgaaaatcagaattctgttttg

SEQ ID NO: 93906 - DNA, 25 bp, Artificial
  probe
  misc_feature (1)..(25): SEQ ID NO: 7176; WAN024BTN_at; Start 12; Stop 36
aaatcagaattctgttttgttcgct

SEQ ID NO: 93907 - DNA, 25 bp, Artificial
  probe
  misc_feature (1)..(25): SEQ ID NO: 7176; WAN024BTN_at; Start 16; Stop 40
cagaattctgttttgttcgctttct

SEQ ID NO: 93908 - DNA, 25 bp, Artificial
  probe
  misc_feature (1)..(25): SEQ ID NO: 7176; WAN024BTN_at; Start 11; Stop 35
aaaatcagaattctgttttgttcgc

SEQ ID NO: 93909 - DNA, 25 bp, Artificial
  probe
  misc_feature (1)..(25): SEQ ID NO: 7176; WAN024BTN_at; Start 10; Stop 34
gaaaatcagaattctgttttgttcg

SEQ ID NO: 93910 - DNA, 25 bp, Artificial
  probe
  misc_feature (1)..(25): SEQ ID NO: 7176; WAN024BTN_at; Start 9; Stop 33
tgaaaatcagaattctgttttgttc

SEQ ID NO: 93911 - DNA, 25 bp, Artificial
  probe
  misc_feature (1)..(25): SEQ ID NO: 7176; WAN024BTN_at; Start 48; Stop 72
tggaattatactcctatctcccctt

SEQ ID NO: 93912 - DNA, 25 bp, Artificial
  probe
  misc_feature (1)..(25): SEQ ID NO: 7176; WAN024BTN_at; Start 3; Stop 27
gttttctgaaaatcagaattctgtt

SEQ ID NO: 93913 - DNA, 25 bp, Artificial
  probe
  misc_feature (1)..(25): SEQ ID NO: 7176; WAN024BTN_at; Start 17; Stop 41
agaattctgttttgttcgctttctt

SEQ ID NO: 93914 - DNA, 25 bp, Artificial
  probe
  misc_feature (1)..(25): SEQ ID NO: 7176; WAN024BTN_at; Start 14; Stop 38
atcagaattctgttttgttcgcttt

SEQ ID NO: 93915 - DNA, 25 bp, Artificial
  probe
  misc_feature (1)..(25): SEQ ID NO: 7176; WAN024BTN_at; Start 47; Stop 71
ttggaattatactcctatctcccct

SEQ ID NO: 93916 - DNA, 25 bp, Artificial
  probe
  misc_feature (1)..(25): SEQ ID NO: 7176; WAN024BTN_at; Start 4; Stop 28
ttttctgaaaatcagaattctgttt

SEQ ID NO: 93917 - DNA, 25 bp, Artificial
  probe
  misc_feature (1)..(25): SEQ ID NO: 7176; WAN024BTN_at; Start 1; Stop 25
ctgttttctgaaaatcagaattctg

SEQ ID NO: 93918 - DNA, 25 bp, Artificial
  probe
  misc_feature (1)..(25): SEQ ID NO: 7176; WAN024BTN_at; Start 37; Stop 61
ttctttatatttggaattatactcc

SEQ ID NO: 93919 - DNA, 25 bp, Artificial
  probe
  misc_feature (1)..(25): SEQ ID NO: 7176; WAN024BTN_at; Start 41; Stop 65
ttatatttggaattatactcctatc

SEQ ID NO: 93920 - DNA, 25 bp, Artificial
  probe
  misc_feature (1)..(25): SEQ ID NO: 7176; WAN024BTN_at; Start 23; Stop 47
ctgttttgttcgctttctttatatt

SEQ ID NO: 93921 - DNA, 25 bp, Artificial
  probe
  misc_feature (1)..(25): SEQ ID NO: 6797; WAN024BTO_at; Start 383; Stop 407
tagtcgctgaggataaagacatccc

SEQ ID NO: 93922 - DNA, 25 bp, Artificial
  probe
  misc_feature (1)..(25): SEQ ID NO: 6797; WAN024BTO_at; Start 2143; Stop 2167
caggaaactgcaataatagtactcg

SEQ ID NO: 93923 - DNA, 25 bp, Artificial
  probe
  misc_feature (1)..(25): SEQ ID NO: 6797; WAN024BTO_at; Start 91; Stop 115
gctaattctaatctaccaacttggg

SEQ ID NO: 93924 - DNA, 25 bp, Artificial
  probe
  misc_feature (1)..(25): SEQ ID NO: 6797; WAN024BTO_at; Start 760; Stop 784
cagaacaaattgtattgcaggacaa

SEQ ID NO: 93925 - DNA, 25 bp, Artificial
  probe
  misc_feature (1)..(25): SEQ ID NO: 6797; WAN024BTO_at; Start 1314; Stop 1338
tcttaactcggttacaggagatgag

SEQ ID NO: 93926 - DNA, 25 bp, Artificial
  probe
  misc_feature (1)..(25): SEQ ID NO: 6797; WAN024BTO_at; Start 204; Stop 228
tacttttgggaaaaatcagtacaca

SEQ ID NO: 93927 - DNA, 25 bp, Artificial
  probe
  misc_feature (1)..(25): SEQ ID NO: 6797; WAN024BTO_at; Start 2128; Stop 2152
tactgctcaactgatcaggaaactg

SEQ ID NO: 93928 - DNA, 25 bp, Artificial
  probe
  misc_feature (1)..(25): SEQ ID NO: 6797; WAN024BTO_at; Start 152; Stop 176
taccagaagaaagaacagatagtcc

SEQ ID NO: 93929 - DNA, 25 bp, Artificial
  probe
  misc_feature (1)..(25): SEQ ID NO: 6797; WAN024BTO_at; Start 803; Stop 827
tatcagaaaaccgaagtcaagatgt

SEQ ID NO: 93930 - DNA, 25 bp, Artificial
  probe
  misc_feature (1)..(25): SEQ ID NO: 6797; WAN024BTO_at; Start 2461; Stop 2485
gacccaagagaaaagtctgtatcag

SEQ ID NO: 93931 - DNA, 25 bp, Artificial
  probe
  misc_feature (1)..(25): SEQ ID NO: 6797; WAN024BTO_at; Start 2585; Stop 2609
cctggttccatgatagaagtgatga

SEQ ID NO: 93932 - DNA, 25 bp, Artificial
  probe
  misc_feature (1)..(25): SEQ ID NO: 6797; WAN024BTO_at; Start 1441; Stop 1465
catgaaagctatagaagaggaggat

SEQ ID NO: 93933 - DNA, 25 bp, Artificial
  probe
  misc_feature (1)..(25): SEQ ID NO: 6797; WAN024BTO_at; Start 326; Stop 350
caaactatgattcacttctggagag

SEQ ID NO: 93934 - DNA, 25 bp, Artificial
  probe
  misc_feature (1)..(25): SEQ ID NO: 6797; WAN024BTO_at; Start 664; Stop 688
gaggaaccgtctatgatcattcgag

SEQ ID NO: 93935 - DNA, 25 bp, Artificial
  probe
  misc_feature (1)..(25): SEQ ID NO: 6797; WAN024BTO_at; Start 726; Stop 750
tgaagagaatctaggtcaggagaca

SEQ ID NO: 93936 - DNA, 25 bp, Artificial
  probe
  misc_feature (1)..(25): SEQ ID NO: 6797; WAN024BTO_at; Start 167; Stop 191
cagatagtccactgagaattgctca

SEQ ID NO: 93937 - DNA, 25 bp, Artificial
  probe
  misc_feature (1)..(25): SEQ ID NO: 6797; WAN024BTO_at; Start 1044; Stop 1068
tctagatatggagattggtgagcct

SEQ ID NO: 93938 - DNA, 25 bp, Artificial
  probe
  misc_feature (1)..(25): SEQ ID NO: 6797; WAN024BTO_at; Start 1770; Stop 1794
tactgaggaagcgaaagactacttg

SEQ ID NO: 93939 - DNA, 25 bp, Artificial
  probe
  misc_feature (1)..(25): SEQ ID NO: 6797; WAN024BTO_at; Start 2608; Stop 2632
gatgttatccatcgtctactagaac

SEQ ID NO: 93940 - DNA, 25 bp, Artificial
  probe
  misc_feature (1)..(25): SEQ ID NO: 6797; WAN024BTO_at; Start 643; Stop 667
aatgcttatttttatactcccgagg

SEQ ID NO: 93941 - DNA, 25 bp, Artificial
  probe
  misc_feature (1)..(25): SEQ ID NO: 6797; WAN024BTO_at; Start 1252; Stop 1276
aaaacacctagttatgcagagccac

SEQ ID NO: 93942 - DNA, 25 bp, Artificial
  probe
  misc_feature (1)..(25): SEQ ID NO: 6797; WAN024BTO_at; Start 2548; Stop 2572
gaagatattcgaggactttatcctg

SEQ ID NO: 93943 - DNA, 25 bp, Artificial
  probe
  misc_feature (1)..(25): SEQ ID NO: 6797; WAN024BTO_at; Start 400; Stop 424
gacatcccttatacgagttcggaaa

SEQ ID NO: 93944 - DNA, 25 bp, Artificial
  probe
  misc_feature (1)..(25): SEQ ID NO: 6797; WAN024BTO_at; Start 1426; Stop 1450
gaaattcgtgaagagcatgaaagct

SEQ ID NO: 93945 - DNA, 25 bp, Artificial
  probe
  misc_feature (1)..(25): SEQ ID NO: 6797; WAN024BTO_at; Start 2230; Stop 2254
gaatattctgacttgatatgccact

SEQ ID NO: 93946 - DNA, 25 bp, Artificial
  probe
  misc_feature (1)..(25): SEQ ID NO: 6797; WAN024BTO_at; Start 1267; Stop 1291
gcagagccactttatgatggagaat

SEQ ID NO: 93947 - DNA, 25 bp, Artificial
  probe
  misc_feature (1)..(25): SEQ ID NO: 6797; WAN024BTO_at; Start 742; Stop 766
caggagacatcagaaaaacagaaca

SEQ ID NO: 93948 - DNA, 25 bp, Artificial
  probe
  misc_feature (1)..(25): SEQ ID NO: 6797; WAN024BTO_at; Start 342; Stop 366
tctggagagtcaatttgaaagtggc

SEQ ID NO: 93949 - DNA, 25 bp, Artificial
  probe
  misc_feature (1)..(25): SEQ ID NO: 6797; WAN024BTO_at; Start 435; Stop 459
taaaatgcatggtgacttcagtaag

SEQ ID NO: 93950 - DNA, 25 bp, Artificial
  probe
  misc_feature (1)..(25): SEQ ID NO: 6797; WAN024BTO_at; Start 1162; Stop 1186
gctaatatagcatttcgtcagaaag

SEQ ID NO: 93951 - DNA, 25 bp, Artificial
  probe
  misc_feature (1)..(25): SEQ ID NO: 6797; WAN024BTO_at; Start 922; Stop 946
aaaagggctttaaactgggatgatg

SEQ ID NO: 93952 - DNA, 25 bp, Artificial
  probe
  misc_feature (1)..(25): SEQ ID NO: 6797; WAN024BTO_at; Start 72; Stop 96
tgttggtgcaggaatatcagctaat

SEQ ID NO: 93953 - DNA, 25 bp, Artificial
  probe
  misc_feature (1)..(25): SEQ ID NO: 6797; WAN024BTO_at; Start 2569; Stop 2593
cctgaagtagattggacctggttcc

SEQ ID NO: 93954 - DNA, 25 bp, Artificial
  probe
  misc_feature (1)..(25): SEQ ID NO: 6797; WAN024BTO_at; Start 1457; Stop 1481
gaggaggatggtctgctaataatca

SEQ ID NO: 93955 - DNA, 25 bp, Artificial
  probe
  misc_feature (1)..(25): SEQ ID NO: 6596; WAN024BTP_at; Start 19; Stop 43
attgtggatgaaaacctttctaata

SEQ ID NO: 93956 - DNA, 25 bp, Artificial
  probe
  misc_feature (1)..(25): SEQ ID NO: 6596; WAN024BTP_at; Start 8; Stop 32
gcttggctttaattgtggatgaaaa

SEQ ID NO: 93957 - DNA, 25 bp, Artificial
  probe
  misc_feature (1)..(25): SEQ ID NO: 6596; WAN024BTP_at; Start 66; Stop 90
atcttttatgacaaaaacaccttat

SEQ ID NO: 93958 - DNA, 25 bp, Artificial
  probe
  misc_feature (1)..(25): SEQ ID NO: 6596; WAN024BTP_at; Start 25; Stop 49
gatgaaaacctttctaatacctcaa

SEQ ID NO: 93959 - DNA, 25 bp, Artificial
  probe
  misc_feature (1)..(25): SEQ ID NO: 6596; WAN024BTP_at; Start 47; Stop 71
caaatagcataaaaatagtatcttt

SEQ ID NO: 93960 - DNA, 25 bp, Artificial
  probe
  misc_feature (1)..(25): SEQ ID NO: 6596; WAN024BTP_at; Start 16; Stop 40
ttaattgtggatgaaaacctttcta

SEQ ID NO: 93961 - DNA, 25 bp, Artificial
  probe
  misc_feature (1)..(25): SEQ ID NO: 6596; WAN024BTP_at; Start 9; Stop 33
cttggctttaattgtggatgaaaac

SEQ ID NO: 93962 - DNA, 25 bp, Artificial
  probe
  misc_feature (1)..(25): SEQ ID NO: 6596; WAN024BTP_at; Start 41; Stop 65
atacctcaaatagcataaaaatagt

SEQ ID NO: 93963 - DNA, 25 bp, Artificial
  probe
  misc_feature (1)..(25): SEQ ID NO: 6596; WAN024BTP_at; Start 63; Stop 87
agtatcttttatgacaaaaacacct

SEQ ID NO: 93964 - DNA, 25 bp, Artificial
  probe
  misc_feature (1)..(25): SEQ ID NO: 6596; WAN024BTP_at; Start 31; Stop 55
aacctttctaatacctcaaatagca

SEQ ID NO: 93965 - DNA, 25 bp, Artificial
  probe
  misc_feature (1)..(25): SEQ ID NO: 6596; WAN024BTP_at; Start 36; Stop 60
ttctaatacctcaaatagcataaaa

SEQ ID NO: 93966 - DNA, 25 bp, Artificial
  probe
  misc_feature (1)..(25): SEQ ID NO: 6596; WAN024BTP_at; Start 37; Stop 61
tctaatacctcaaatagcataaaaa

SEQ ID NO: 93967 - DNA, 25 bp, Artificial
  probe
  misc_feature (1)..(25): SEQ ID NO: 6596; WAN024BTP_at; Start 11; Stop 35
tggctttaattgtggatgaaaacct

SEQ ID NO: 93968 - DNA, 25 bp, Artificial
  probe
  misc_feature (1)..(25): SEQ ID NO: 6596; WAN024BTP_at; Start 6; Stop 30
gggcttggctttaattgtggatgaa

SEQ ID NO: 93969 - DNA, 25 bp, Artificial
  probe
  misc_feature (1)..(25): SEQ ID NO: 6596; WAN024BTP_at; Start 33; Stop 57
cctttctaatacctcaaatagcata

SEQ ID NO: 93970 - DNA, 25 bp, Artificial
  probe
  misc_feature (1)..(25): SEQ ID NO: 6596; WAN024BTP_at; Start 34; Stop 58
ctttctaatacctcaaatagcataa

SEQ ID NO: 93971 - DNA, 25 bp, Artificial
  probe
  misc_feature (1)..(25): SEQ ID NO: 6596; WAN024BTP_at; Start 46; Stop 70
tcaaatagcataaaaatagtatctt

SEQ ID NO: 93972 - DNA, 25 bp, Artificial
  probe
  misc_feature (1)..(25): SEQ ID NO: 6596; WAN024BTP_at; Start 38; Stop 62
ctaatacctcaaatagcataaaaat

SEQ ID NO: 93973 - DNA, 25 bp, Artificial
  probe
  misc_feature (1)..(25): SEQ ID NO: 6596; WAN024BTP_at; Start 18; Stop 42
aattgtggatgaaaacctttctaat

SEQ ID NO: 93974 - DNA, 25 bp, Artificial
  probe
  misc_feature (1)..(25): SEQ ID NO: 6596; WAN024BTP_at; Start 65; Stop 89
tatcttttatgacaaaaacacctta

SEQ ID NO: 93975 - DNA, 25 bp, Artificial
  probe
  misc_feature (1)..(25): SEQ ID NO: 6596; WAN024BTP_at; Start 42; Stop 66
tacctcaaatagcataaaaatagta

SEQ ID NO: 93976 - DNA, 25 bp, Artificial
  probe
  misc_feature (1)..(25): SEQ ID NO: 6596; WAN024BTP_at; Start 24; Stop 48
ggatgaaaacctttctaatacctca

SEQ ID NO: 93977 - DNA, 25 bp, Artificial
  probe
  misc_feature (1)..(25): SEQ ID NO: 6596; WAN024BTP_at; Start 62; Stop 86
tagtatcttttatgacaaaaacacc

SEQ ID NO: 93978 - DNA, 25 bp, Artificial
  probe
  misc_feature (1)..(25): SEQ ID NO: 6596; WAN024BTP_at; Start 32; Stop 56
acctttctaatacctcaaatagcat

SEQ ID NO: 93979 - DNA, 25 bp, Artificial
  probe
  misc_feature (1)..(25): SEQ ID NO: 6596; WAN024BTP_at; Start 7; Stop 31
ggcttggctttaattgtggatgaaa

SEQ ID NO: 93980 - DNA, 25 bp, Artificial
  probe
  misc_feature (1)..(25): SEQ ID NO: 6596; WAN024BTP_at; Start 21; Stop 45
tgtggatgaaaacctttctaatacc

SEQ ID NO: 93981 - DNA, 25 bp, Artificial
  probe
  misc_feature (1)..(25): SEQ ID NO: 6596; WAN024BTP_at; Start 20; Stop 44
ttgtggatgaaaacctttctaatac

SEQ ID NO: 93982 - DNA, 25 bp, Artificial
  probe
  misc_feature (1)..(25): SEQ ID NO: 6596; WAN024BTP_at; Start 23; Stop 47
tggatgaaaacctttctaatacctc

SEQ ID NO: 93983 - DNA, 25 bp, Artificial
  probe
  misc_feature (1)..(25): SEQ ID NO: 6596; WAN024BTP_at; Start 17; Stop 41
taattgtggatgaaaacctttctaa

SEQ ID NO: 93984 - DNA, 25 bp, Artificial
  probe
  misc_feature (1)..(25): SEQ ID NO: 6596; WAN024BTP_at; Start 10; Stop 34
ttggctttaattgtggatgaaaacc

SEQ ID NO: 93985 - DNA, 25 bp, Artificial
  probe
  misc_feature (1)..(25): SEQ ID NO: 6596; WAN024BTP_at; Start 43; Stop 67
acctcaaatagcataaaaatagtat

SEQ ID NO: 93986 - DNA, 25 bp, Artificial
  probe
  misc_feature (1)..(25): SEQ ID NO: 6596; WAN024BTP_at; Start 45; Stop 69
ctcaaatagcataaaaatagtatct

SEQ ID NO: 93987 - DNA, 25 bp, Artificial
  probe
  misc_feature (1)..(25): SEQ ID NO: 6596; WAN024BTP_at; Start 40; Stop 64
aatacctcaaatagcataaaaatag

SEQ ID NO: 93988 - DNA, 25 bp, Artificial
  probe
  misc_feature (1)..(25): SEQ ID NO: 6596; WAN024BTP_at; Start 35; Stop 59
tttctaatacctcaaatagcataaa

SEQ ID NO: 93989 - DNA, 25 bp, Artificial
  probe
  misc_feature (1)..(25): SEQ ID NO: 7685; WAN024BTQ_at; Start 48; Stop 72
caaaagaccacctgtttcctattgg

SEQ ID NO: 93990 - DNA, 25 bp, Artificial
  probe
  misc_feature (1)..(25): SEQ ID NO: 7685; WAN024BTQ_at; Start 52; Stop 76
agaccacctgtttcctattggtact

SEQ ID NO: 93991 - DNA, 25 bp, Artificial
  probe
  misc_feature (1)..(25): SEQ ID NO: 7685; WAN024BTQ_at; Start 153; Stop 177
caggcttgtgatttcctatggaagt

SEQ ID NO: 93992 - DNA, 25 bp, Artificial
  probe
  misc_feature (1)..(25): SEQ ID NO: 7685; WAN024BTQ_at; Start 149; Stop 173
tattcaggcttgtgatttcctatgg

SEQ ID NO: 93993 - DNA, 25 bp, Artificial
  probe
  misc_feature (1)..(25): SEQ ID NO: 7685; WAN024BTQ_at; Start 65; Stop 89
cctattggtacttgactattataca

SEQ ID NO: 93994 - DNA, 25 bp, Artificial
  probe
  misc_feature (1)..(25): SEQ ID NO: 7685; WAN024BTQ_at; Start 45; Stop 69
gctcaaaagaccacctgtttcctat

SEQ ID NO: 93995 - DNA, 25 bp, Artificial
  probe
  misc_feature (1)..(25): SEQ ID NO: 7685; WAN024BTQ_at; Start 40; Stop 64
ttggcgctcaaaagaccacctgttt

SEQ ID NO: 93996 - DNA, 25 bp, Artificial
  probe
  misc_feature (1)..(25): SEQ ID NO: 7685; WAN024BTQ_at; Start 71; Stop 95
ggtacttgactattatacacaaaaa

SEQ ID NO: 93997 - DNA, 25 bp, Artificial
  probe
  misc_feature (1)..(25): SEQ ID NO: 7685; WAN024BTQ_at; Start 27; Stop 51
taggttggcaattttggcgctcaaa

SEQ ID NO: 93998 - DNA, 25 bp, Artificial
  probe
  misc_feature (1)..(25): SEQ ID NO: 7685; WAN024BTQ_at; Start 38; Stop 62
ttttggcgctcaaaagaccacctgt

SEQ ID NO: 93999 - DNA, 25 bp, Artificial
  probe
  misc_feature (1)..(25): SEQ ID NO: 7685; WAN024BTQ_at; Start 25; Stop 49
aataggttggcaattttggcgctca

SEQ ID NO: 94000 - DNA, 25 bp, Artificial
  probe
  misc_feature (1)..(25): SEQ ID NO: 7685; WAN024BTQ_at; Start 14; Stop 38
tagaatatggaaataggttggcaat

SEQ ID NO: 94001 - DNA, 25 bp, Artificial
  probe
  misc_feature (1)..(25): SEQ ID NO: 7685; WAN024BTQ_at; Start 5; Stop 29
cctttcagttagaatatggaaatag

SEQ ID NO: 94002 - DNA, 25 bp, Artificial
  probe
  misc_feature (1)..(25): SEQ ID NO: 7685; WAN024BTQ_at; Start 117; Stop 141
tgtcttgacacttgttagaattaaa

SEQ ID NO: 94003 - DNA, 25 bp, Artificial
  probe
  misc_feature (1)..(25): SEQ ID NO: 7685; WAN024BTQ_at; Start 36; Stop 60
aattttggcgctcaaaagaccacct

SEQ ID NO: 94004 - DNA, 25 bp, Artificial
  probe
  misc_feature (1)..(25): SEQ ID NO: 7685; WAN024BTQ_at; Start 39; Stop 63
tttggcgctcaaaagaccacctgtt

SEQ ID NO: 94005 - DNA, 25 bp, Artificial
  probe
  misc_feature (1)..(25): SEQ ID NO: 7685; WAN024BTQ_at; Start 29; Stop 53
ggttggcaattttggcgctcaaaag

SEQ ID NO: 94006 - DNA, 25 bp, Artificial
  probe
  misc_feature (1)..(25): SEQ ID NO: 7685; WAN024BTQ_at; Start 152; Stop 176
tcaggcttgtgatttcctatggaag

SEQ ID NO: 94007 - DNA, 25 bp, Artificial
  probe
  misc_feature (1)..(25): SEQ ID NO: 7685; WAN024BTQ_at; Start 34; Stop 58
gcaattttggcgctcaaaagaccac

SEQ ID NO: 94008 - DNA, 25 bp, Artificial
  probe
  misc_feature (1)..(25): SEQ ID NO: 7685; WAN024BTQ_at; Start 145; Stop 169
gaggtattcaggcttgtgatttcct

SEQ ID NO: 94009 - DNA, 25 bp, Artificial
  probe
  misc_feature (1)..(25): SEQ ID NO: 7685; WAN024BTQ_at; Start 42; Stop 66
ggcgctcaaaagaccacctgtttcc

SEQ ID NO: 94010 - DNA, 25 bp, Artificial
  probe
  misc_feature (1)..(25): SEQ ID NO: 7685; WAN024BTQ_at; Start 138; Stop 162
taaaaatgaggtattcaggcttgtg

SEQ ID NO: 94011 - DNA, 25 bp, Artificial
  probe
  misc_feature (1)..(25): SEQ ID NO: 7685; WAN024BTQ_at; Start 2; Stop 26
tgtcctttcagttagaatatggaaa

SEQ ID NO: 94012 - DNA, 25 bp, Artificial
  probe
  misc_feature (1)..(25): SEQ ID NO: 7685; WAN024BTQ_at; Start 56; Stop 80
cacctgtttcctattggtacttgac

SEQ ID NO: 94013 - DNA, 25 bp, Artificial
  probe
  misc_feature (1)..(25): SEQ ID NO: 7685; WAN024BTQ_at; Start 90; Stop 114
caaaaaaaatacaattgtcttgaca

SEQ ID NO: 94014 - DNA, 25 bp, Artificial
  probe
  misc_feature (1)..(25): SEQ ID NO: 7685; WAN024BTQ_at; Start 111; Stop 135
gacaattgtcttgacacttgttaga

SEQ ID NO: 94015 - DNA, 25 bp, Artificial
  probe
  misc_feature (1)..(25): SEQ ID NO: 7685; WAN024BTQ_at; Start 61; Stop 85
gtttcctattggtacttgactatta

SEQ ID NO: 94016 - DNA, 25 bp, Artificial
  probe
  misc_feature (1)..(25): SEQ ID NO: 7685; WAN024BTQ_at; Start 10; Stop 34
cagttagaatatggaaataggttgg

SEQ ID NO: 94017 - DNA, 25 bp, Artificial
  probe
  misc_feature (1)..(25): SEQ ID NO: 7685; WAN024BTQ_at; Start 125; Stop 149
cacttgttagaattaaaaatgaggt

SEQ ID NO: 94018 - DNA, 25 bp, Artificial
  probe
  misc_feature (1)..(25): SEQ ID NO: 7685; WAN024BTQ_at; Start 58; Stop 82
cctgtttcctattggtacttgacta

SEQ ID NO: 94019 - DNA, 25 bp, Artificial
  probe
  misc_feature (1)..(25): SEQ ID NO: 7685; WAN024BTQ_at; Start 106; Stop 130
gtcttgacaattgtcttgacacttg

SEQ ID NO: 94020 - DNA, 25 bp, Artificial
  probe
  misc_feature (1)..(25): SEQ ID NO: 7685; WAN024BTQ_at; Start 24; Stop 48
aaataggttggcaattttggcgctc

SEQ ID NO: 94021 - DNA, 25 bp, Artificial
  probe
  misc_feature (1)..(25): SEQ ID NO: 7685; WAN024BTQ_at; Start 134; Stop 158
gaattaaaaatgaggtattcaggct

SEQ ID NO: 94022 - DNA, 25 bp, Artificial
  probe
  misc_feature (1)..(25): SEQ ID NO: 7685; WAN024BTQ_at; Start 140; Stop 164
aaaatgaggtattcaggcttgtgat

SEQ ID NO: 94023 - DNA, 25 bp, Artificial
  probe
  misc_feature (1)..(25): SEQ ID NO: 6933; WAN024BTR_at; Start 92; Stop 116
tgaacgacttagacggtctggtgga

SEQ ID NO: 94024 - DNA, 25 bp, Artificial
  probe
  misc_feature (1)..(25): SEQ ID NO: 6933; WAN024BTR_at; Start 60; Stop 84
tgggcaagggcgtccagactatatt

SEQ ID NO: 94025 - DNA, 25 bp, Artificial
  probe
  misc_feature (1)..(25): SEQ ID NO: 6933; WAN024BTR_at; Start 76; Stop 100
gactatattgaagccctgaacgact

SEQ ID NO: 94026 - DNA, 25 bp, Artificial
  probe
  misc_feature (1)..(25): SEQ ID NO: 6933; WAN024BTR_at; Start 49; Stop 73
aaaaagcagtatgggcaagggcgtc

SEQ ID NO: 94027 - DNA, 25 bp, Artificial
  probe
  misc_feature (1)..(25): SEQ ID NO: 6933; WAN024BTR_at; Start 79; Stop 103
tatattgaagccctgaacgacttag

SEQ ID NO: 94028 - DNA, 25 bp, Artificial
  probe
  misc_feature (1)..(25): SEQ ID NO: 6933; WAN024BTR_at; Start 28; Stop 52
catctctttgttgagtttttgaaaa

SEQ ID NO: 94029 - DNA, 25 bp, Artificial
  probe
  misc_feature (1)..(25): SEQ ID NO: 6933; WAN024BTR_at; Start 46; Stop 70
ttgaaaaagcagtatgggcaagggc

SEQ ID NO: 94030 - DNA, 25 bp, Artificial
  probe
  misc_feature (1)..(25): SEQ ID NO: 6933; WAN024BTR_at; Start 83; Stop 107
ttgaagccctgaacgacttagacgg

SEQ ID NO: 94031 - DNA, 25 bp, Artificial
  probe
  misc_feature (1)..(25): SEQ ID NO: 6933; WAN024BTR_at; Start 90; Stop 114
cctgaacgacttagacggtctggtg

SEQ ID NO: 94032 - DNA, 25 bp, Artificial
  probe
  misc_feature (1)..(25): SEQ ID NO: 6933; WAN024BTR_at; Start 141; Stop 165
aagatttttagaagatgaagtacga

SEQ ID NO: 94033 - DNA, 25 bp, Artificial
  probe
  misc_feature (1)..(25): SEQ ID NO: 6933; WAN024BTR_at; Start 14; Stop 38
cctatcaggaaattcatctctttgt

SEQ ID NO: 94034 - DNA, 25 bp, Artificial
  probe
  misc_feature (1)..(25): SEQ ID NO: 6933; WAN024BTR_at; Start 55; Stop 79
cagtatgggcaagggcgtccagact

SEQ ID NO: 94035 - DNA, 25 bp, Artificial
  probe
  misc_feature (1)..(25): SEQ ID NO: 6933; WAN024BTR_at; Start 111; Stop 135
ggtggaagtctcctacagagaagct

SEQ ID NO: 94036 - DNA, 25 bp, Artificial
  probe
  misc_feature (1)..(25): SEQ ID NO: 6933; WAN024BTR_at; Start 119; Stop 143
tctcctacagagaagctattgaaag

SEQ ID NO: 94037 - DNA, 25 bp, Artificial
  probe
  misc_feature (1)..(25): SEQ ID NO: 6933; WAN024BTR_at; Start 1; Stop 25
atggttggagtaacctatcaggaaa

SEQ ID NO: 94038 - DNA, 25 bp, Artificial
  probe
  misc_feature (1)..(25): SEQ ID NO: 6933; WAN024BTR_at; Start 81; Stop 105
tattgaagccctgaacgacttagac

SEQ ID NO: 94039 - DNA, 25 bp, Artificial
  probe
  misc_feature (1)..(25): SEQ ID NO: 6933; WAN024BTR_at; Start 126; Stop 150
cagagaagctattgaaagattttta

SEQ ID NO: 94040 - DNA, 25 bp, Artificial
  probe
  misc_feature (1)..(25): SEQ ID NO: 6933; WAN024BTR_at; Start 62; Stop 86
ggcaagggcgtccagactatattga

SEQ ID NO: 94041 - DNA, 25 bp, Artificial
  probe
  misc_feature (1)..(25): SEQ ID NO: 6933; WAN024BTR_at; Start 41; Stop 65
agtttttgaaaaagcagtatgggca

SEQ ID NO: 94042 - DNA, 25 bp, Artificial
  probe
  misc_feature (1)..(25): SEQ ID NO: 6933; WAN024BTR_at; Start 115; Stop 139
gaagtctcctacagagaagctattg

SEQ ID NO: 94043 - DNA, 25 bp, Artificial
  probe
  misc_feature (1)..(25): SEQ ID NO: 6933; WAN024BTR_at; Start 7; Stop 31
ggagtaacctatcaggaaattcatc

SEQ ID NO: 94044 - DNA, 25 bp, Artificial
  probe
  misc_feature (1)..(25): SEQ ID NO: 6933; WAN024BTR_at; Start 64; Stop 88
caagggcgtccagactatattgaag

SEQ ID NO: 94045 - DNA, 25 bp, Artificial
  probe
  misc_feature (1)..(25): SEQ ID NO: 6933; WAN024BTR_at; Start 19; Stop 43
caggaaattcatctctttgttgagt

SEQ ID NO: 94046 - DNA, 25 bp, Artificial
  probe
  misc_feature (1)..(25): SEQ ID NO: 6933; WAN024BTR_at; Start 10; Stop 34
gtaacctatcaggaaattcatctct

SEQ ID NO: 94047 - DNA, 25 bp, Artificial
  probe
  misc_feature (1)..(25): SEQ ID NO: 6933; WAN024BTR_at; Start 122; Stop 146
cctacagagaagctattgaaagatt

SEQ ID NO: 94048 - DNA, 25 bp, Artificial
  probe
  misc_feature (1)..(25): SEQ ID NO: 6933; WAN024BTR_at; Start 99; Stop 123
cttagacggtctggtggaagtctcc

SEQ ID NO: 94049 - DNA, 25 bp, Artificial
  probe
  misc_feature (1)..(25): SEQ ID NO: 6933; WAN024BTR_at; Start 108; Stop 132
tctggtggaagtctcctacagagaa

SEQ ID NO: 94050 - DNA, 25 bp, Artificial
  probe
  misc_feature (1)..(25): SEQ ID NO: 6933; WAN024BTR_at; Start 105; Stop 129
cggtctggtggaagtctcctacaga

SEQ ID NO: 94051 - DNA, 25 bp, Artificial
  probe
  misc_feature (1)..(25): SEQ ID NO: 6933; WAN024BTR_at; Start 101; Stop 125
tagacggtctggtggaagtctccta

SEQ ID NO: 94052 - DNA, 25 bp, Artificial
  probe
  misc_feature (1)..(25): SEQ ID NO: 6933; WAN024BTR_at; Start 103; Stop 127
gacggtctggtggaagtctcctaca

SEQ ID NO: 94053 - DNA, 25 bp, Artificial
  probe
  misc_feature (1)..(25): SEQ ID NO: 6933; WAN024BTR_at; Start 88; Stop 112
gccctgaacgacttagacggtctgg

SEQ ID NO: 94054 - DNA, 25 bp, Artificial
  probe
  misc_feature (1)..(25): SEQ ID NO: 6933; WAN024BTR_at; Start 85; Stop 109
gaagccctgaacgacttagacggtc

SEQ ID NO: 94055 - DNA, 25 bp, Artificial
  probe
  misc_feature (1)..(25): SEQ ID NO: 6933; WAN024BTR_at; Start 65; Stop 89
aagggcgtccagactatattgaagc

SEQ ID NO: 94056 - DNA, 25 bp, Artificial
  probe
  misc_feature (1)..(25): SEQ ID NO: 6933; WAN024BTR_at; Start 4; Stop 28
gttggagtaacctatcaggaaattc

SEQ ID NO: 94057 - DNA, 25 bp, Artificial
  probe
  misc_feature (1)..(25): SEQ ID NO: 6874; WAN024BTS_at; Start 273; Stop 297
tgcagaacaaatgaagggagaagaa

SEQ ID NO: 94058 - DNA, 25 bp, Artificial
  probe
  misc_feature (1)..(25): SEQ ID NO: 6874; WAN024BTS_at; Start 121; Stop 145
gagtcagatgaaagttaccattcag

SEQ ID NO: 94059 - DNA, 25 bp, Artificial
  probe
  misc_feature (1)..(25): SEQ ID NO: 6874; WAN024BTS_at; Start 149; Stop 173
gaaaatgtaattatcttggcaaacg

SEQ ID NO: 94060 - DNA, 25 bp, Artificial
  probe
  misc_feature (1)..(25): SEQ ID NO: 6874; WAN024BTS_at; Start 45; Stop 69
caaatgtatgggaatttctgattgg

SEQ ID NO: 94061 - DNA, 25 bp, Artificial
  probe
  misc_feature (1)..(25): SEQ ID NO: 6874; WAN024BTS_at; Start 115; Stop 139
caaattgagtcagatgaaagttacc

SEQ ID NO: 94062 - DNA, 25 bp, Artificial
  probe
  misc_feature (1)..(25): SEQ ID NO: 6874; WAN024BTS_at; Start 125; Stop 149
cagatgaaagttaccattcagccgg

SEQ ID NO: 94063 - DNA, 25 bp, Artificial
  probe
  misc_feature (1)..(25): SEQ ID NO: 6874; WAN024BTS_at; Start 21; Stop 45
ggatctagcatttgagaatcttcac

SEQ ID NO: 94064 - DNA, 25 bp, Artificial
  probe
  misc_feature (1)..(25): SEQ ID NO: 6874; WAN024BTS_at; Start 143; Stop 167
cagccggaaaatgtaattatcttgg

SEQ ID NO: 94065 - DNA, 25 bp, Artificial
  probe
  misc_feature (1)..(25): SEQ ID NO: 6874; WAN024BTS_at; Start 139; Stop 163
cattcagccggaaaatgtaattatc

SEQ ID NO: 94066 - DNA, 25 bp, Artificial
  probe
  misc_feature (1)..(25): SEQ ID NO: 6874; WAN024BTS_at; Start 201; Stop 225
gagaaataattacatcactctacat

SEQ ID NO: 94067 - DNA, 25 bp, Artificial
  probe
  misc_feature (1)..(25): SEQ ID NO: 6874; WAN024BTS_at; Start 183; Stop 207
cttctgtgaacaagtgaagagaaat

SEQ ID NO: 94068 - DNA, 25 bp, Artificial
  probe
  misc_feature (1)..(25): SEQ ID NO: 6874; WAN024BTS_at; Start 216; Stop 240
cactctacataaatctatgttagaa

SEQ ID NO: 94069 - DNA, 25 bp, Artificial
  probe
  misc_feature (1)..(25): SEQ ID NO: 6874; WAN024BTS_at; Start 133; Stop 157
agttaccattcagccggaaaatgta

SEQ ID NO: 94070 - DNA, 25 bp, Artificial
  probe
  misc_feature (1)..(25): SEQ ID NO: 6874; WAN024BTS_at; Start 82; Stop 106
gaagtaattcttgttagttcagcta

SEQ ID NO: 94071 - DNA, 25 bp, Artificial
  probe
  misc_feature (1)..(25): SEQ ID NO: 6874; WAN024BTS_at; Start 129; Stop 153
tgaaagttaccattcagccggaaaa

SEQ ID NO: 94072 - DNA, 25 bp, Artificial
  probe
  misc_feature (1)..(25): SEQ ID NO: 6874; WAN024BTS_at; Start 167; Stop 191
gcaaacgaatttgtatcttctgtga

SEQ ID NO: 94073 - DNA, 25 bp, Artificial
  probe
  misc_feature (1)..(25): SEQ ID NO: 6874; WAN024BTS_at; Start 34; Stop 58
gagaatcttcacaaatgtatgggaa

SEQ ID NO: 94074 - DNA, 25 bp, Artificial
  probe
  misc_feature (1)..(25): SEQ ID NO: 6874; WAN024BTS_at; Start 240; Stop 264
aaaaattattaagacaatggaatca

SEQ ID NO: 94075 - DNA, 25 bp, Artificial
  probe
  misc_feature (1)..(25): SEQ ID NO: 6874; WAN024BTS_at; Start 259; Stop 283
gaatcatttacagatgcagaacaaa

SEQ ID NO: 94076 - DNA, 25 bp, Artificial
  probe
  misc_feature (1)..(25): SEQ ID NO: 6874; WAN024BTS_at; Start 61; Stop 85
tctgattggaaagaatctgatgaag

SEQ ID NO: 94077 - DNA, 25 bp, Artificial
  probe
  misc_feature (1)..(25): SEQ ID NO: 6874; WAN024BTS_at; Start 91; Stop 115
cttgttagttcagctaataaagaac

SEQ ID NO: 94078 - DNA, 25 bp, Artificial
  probe
  misc_feature (1)..(25): SEQ ID NO: 6874; WAN024BTS_at; Start 6; Stop 30
taaaaatattttaatggatctagca

SEQ ID NO: 94079 - DNA, 25 bp, Artificial
  probe
  misc_feature (1)..(25): SEQ ID NO: 6874; WAN024BTS_at; Start 39; Stop 63
tcttcacaaatgtatgggaatttct

SEQ ID NO: 94080 - DNA, 25 bp, Artificial
  probe
  misc_feature (1)..(25): SEQ ID NO: 6874; WAN024BTS_at; Start 279; Stop 303
acaaatgaagggagaagaaaatgat

SEQ ID NO: 94081 - DNA, 25 bp, Artificial
  probe
  misc_feature (1)..(25): SEQ ID NO: 6874; WAN024BTS_at; Start 56; Stop 80
gaatttctgattggaaagaatctga

SEQ ID NO: 94082 - DNA, 25 bp, Artificial
  probe
  misc_feature (1)..(25): SEQ ID NO: 6874; WAN024BTS_at; Start 210; Stop 234
ttacatcactctacataaatctatg

SEQ ID NO: 94083 - DNA, 25 bp, Artificial
  probe
  misc_feature (1)..(25): SEQ ID NO: 6874; WAN024BTS_at; Start 160; Stop 184
tatcttggcaaacgaatttgtatct

SEQ ID NO: 94084 - DNA, 25 bp, Artificial
  probe
  misc_feature (1)..(25): SEQ ID NO: 6874; WAN024BTS_at; Start 254; Stop 278
caatggaatcatttacagatgcaga

SEQ ID NO: 94085 - DNA, 25 bp, Artificial
  probe
  misc_feature (1)..(25): SEQ ID NO: 6874; WAN024BTS_at; Start 170; Stop 194
aacgaatttgtatcttctgtgaaca

SEQ ID NO: 94086 - DNA, 25 bp, Artificial
  probe
  misc_feature (1)..(25): SEQ ID NO: 6874; WAN024BTS_at; Start 267; Stop 291
tacagatgcagaacaaatgaaggga

SEQ ID NO: 94087 - DNA, 25 bp, Artificial
  probe
  misc_feature (1)..(25): SEQ ID NO: 6874; WAN024BTS_at; Start 189; Stop 213
tgaacaagtgaagagaaataattac

SEQ ID NO: 94088 - DNA, 25 bp, Artificial
  probe
  misc_feature (1)..(25): SEQ ID NO: 6874; WAN024BTS_at; Start 101; Stop 125
cagctaataaagaacaaattgagtc

SEQ ID NO: 94089 - DNA, 25 bp, Artificial
  probe
  misc_feature (1)..(25): SEQ ID NO: 6874; WAN024BTS_at; Start 67; Stop 91
tggaaagaatctgatgaagtaattc

SEQ ID NO: 94090 - DNA, 25 bp, Artificial
  probe
  misc_feature (1)..(25): SEQ ID NO: 6874; WAN024BTS_at; Start 178; Stop 202
tgtatcttctgtgaacaagtgaaga

SEQ ID NO: 94091 - DNA, 25 bp, Artificial
  probe
  misc_feature (1)..(25): SEQ ID NO: 7508; WAN024BTT_at; Start 56; Stop 80
cgttttacaatgtcgatgatctcat

SEQ ID NO: 94092 - DNA, 25 bp, Artificial
  probe
  misc_feature (1)..(25): SEQ ID NO: 7508; WAN024BTT_at; Start 114; Stop 138
ggctatcactcatccaagatttcag

SEQ ID NO: 94093 - DNA, 25 bp, Artificial
  probe
  misc_feature (1)..(25): SEQ ID NO: 7508; WAN024BTT_at; Start 94; Stop 118
gaccatcagtggtctttctcggcta

SEQ ID NO: 94094 - DNA, 25 bp, Artificial
  probe
  misc_feature (1)..(25): SEQ ID NO: 7508; WAN024BTT_at; Start 120; Stop 144
cactcatccaagatttcagaagcac

SEQ ID NO: 94095 - DNA, 25 bp, Artificial
  probe
  misc_feature (1)..(25): SEQ ID NO: 7508; WAN024BTT_at; Start 124; Stop 148
catccaagatttcagaagcacattg

SEQ ID NO: 94096 - DNA, 25 bp, Artificial
  probe
  misc_feature (1)..(25): SEQ ID NO: 7508; WAN024BTT_at; Start 161; Stop 185
cacgatttgactacggttctaagga

SEQ ID NO: 94097 - DNA, 25 bp, Artificial
  probe
  misc_feature (1)..(25): SEQ ID NO: 7508; WAN024BTT_at; Start 131; Stop 155
gatttcagaagcacattggtcagcg

SEQ ID NO: 94098 - DNA, 25 bp, Artificial
  probe
  misc_feature (1)..(25): SEQ ID NO: 7508; WAN024BTT_at; Start 140; Stop 164
agcacattggtcagcggacgacacg

SEQ ID NO: 94099 - DNA, 25 bp, Artificial
  probe
  misc_feature (1)..(25): SEQ ID NO: 7508; WAN024BTT_at; Start 48; Stop 72
ccttgggacgttttacaatgtcgat

SEQ ID NO: 94100 - DNA, 25 bp, Artificial
  probe
  misc_feature (1)..(25): SEQ ID NO: 7508; WAN024BTT_at; Start 17; Stop 41
acttcgtctacaacgggcactgtaa

SEQ ID NO: 94101 - DNA, 25 bp, Artificial
  probe
  misc_feature (1)..(25): SEQ ID NO: 7508; WAN024BTT_at; Start 52; Stop 76
gggacgttttacaatgtcgatgatc

SEQ ID NO: 94102 - DNA, 25 bp, Artificial
  probe
  misc_feature (1)..(25): SEQ ID NO: 7508; WAN024BTT_at; Start 135; Stop 159
tcagaagcacattggtcagcggacg

SEQ ID NO: 94103 - DNA, 25 bp, Artificial
  probe
  misc_feature (1)..(25): SEQ ID NO: 7508; WAN024BTT_at; Start 104; Stop 128
ggtctttctcggctatcactcatcc

SEQ ID NO: 94104 - DNA, 25 bp, Artificial
  probe
  misc_feature (1)..(25): SEQ ID NO: 7508; WAN024BTT_at; Start 64; Stop 88
aatgtcgatgatctcattgagcaga

SEQ ID NO: 94105 - DNA, 25 bp, Artificial
  probe
  misc_feature (1)..(25): SEQ ID NO: 7508; WAN024BTT_at; Start 153; Stop 177
gcggacgacacgatttgactacggt

SEQ ID NO: 94106 - DNA, 25 bp, Artificial
  probe
  misc_feature (1)..(25): SEQ ID NO: 7508; WAN024BTT_at; Start 195; Stop 219
tttagcgactttttcaggaggagaa

SEQ ID NO: 94107 - DNA, 25 bp, Artificial
  probe
  misc_feature (1)..(25): SEQ ID NO: 7508; WAN024BTT_at; Start 97; Stop 121
catcagtggtctttctcggctatca

SEQ ID NO: 94108 - DNA, 25 bp, Artificial
  probe
  misc_feature (1)..(25): SEQ ID NO: 7508; WAN024BTT_at; Start 150; Stop 174
tcagcggacgacacgatttgactac

SEQ ID NO: 94109 - DNA, 25 bp, Artificial
  probe
  misc_feature (1)..(25): SEQ ID NO: 7508; WAN024BTT_at; Start 144; Stop 168
cattggtcagcggacgacacgattt

SEQ ID NO: 94110 - DNA, 25 bp, Artificial
  probe
  misc_feature (1)..(25): SEQ ID NO: 7508; WAN024BTT_at; Start 168; Stop 192
tgactacggttctaaggattgttac

SEQ ID NO: 94111 - DNA, 25 bp, Artificial
  probe
  misc_feature (1)..(25): SEQ ID NO: 7508; WAN024BTT_at; Start 147; Stop 171
tggtcagcggacgacacgatttgac

SEQ ID NO: 94112 - DNA, 25 bp, Artificial
  probe
  misc_feature (1)..(25): SEQ ID NO: 7508; WAN024BTT_at; Start 193; Stop 217
tatttagcgactttttcaggaggag

SEQ ID NO: 94113 - DNA, 25 bp, Artificial
  probe
  misc_feature (1)..(25): SEQ ID NO: 7508; WAN024BTT_at; Start 138; Stop 162
gaagcacattggtcagcggacgaca

SEQ ID NO: 94114 - DNA, 25 bp, Artificial
  probe
  misc_feature (1)..(25): SEQ ID NO: 7508; WAN024BTT_at; Start 180; Stop 204
taaggattgttactatttagcgact

SEQ ID NO: 94115 - DNA, 25 bp, Artificial
  probe
  misc_feature (1)..(25): SEQ ID NO: 7508; WAN024BTT_at; Start 23; Stop 47
tctacaacgggcactgtaagtttta

SEQ ID NO: 94116 - DNA, 25 bp, Artificial
  probe
  misc_feature (1)..(25): SEQ ID NO: 7508; WAN024BTT_at; Start 14; Stop 38
tttacttcgtctacaacgggcactg

SEQ ID NO: 94117 - DNA, 25 bp, Artificial
  probe
  misc_feature (1)..(25): SEQ ID NO: 7508; WAN024BTT_at; Start 190; Stop 214
tactatttagcgactttttcaggag

SEQ ID NO: 94118 - DNA, 25 bp, Artificial
  probe
  misc_feature (1)..(25): SEQ ID NO: 7508; WAN024BTT_at; Start 3; Stop 27
gatgttaaatctttacttcgtctac

SEQ ID NO: 94119 - DNA, 25 bp, Artificial
  probe
  misc_feature (1)..(25): SEQ ID NO: 7508; WAN024BTT_at; Start 108; Stop 132
tttctcggctatcactcatccaaga

SEQ ID NO: 94120 - DNA, 25 bp, Artificial
  probe
  misc_feature (1)..(25): SEQ ID NO: 7508; WAN024BTT_at; Start 156; Stop 180
gacgacacgatttgactacggttct

SEQ ID NO: 94121 - DNA, 25 bp, Artificial
  probe
  misc_feature (1)..(25): SEQ ID NO: 7508; WAN024BTT_at; Start 78; Stop 102
cattgagcagatggaagaccatcag

SEQ ID NO: 94122 - DNA, 25 bp, Artificial
  probe
  misc_feature (1)..(25): SEQ ID NO: 7508; WAN024BTT_at; Start 67; Stop 91
gtcgatgatctcattgagcagatgg

SEQ ID NO: 94123 - DNA, 25 bp, Artificial
  probe
  misc_feature (1)..(25): SEQ ID NO: 7508; WAN024BTT_at; Start 159; Stop 183
gacacgatttgactacggttctaag

SEQ ID NO: 94124 - DNA, 25 bp, Artificial
  probe
  misc_feature (1)..(25): SEQ ID NO: 7508; WAN024BTT_at; Start 84; Stop 108
gcagatggaagaccatcagtggtct

SEQ ID NO: 94125 - DNA, 25 bp, Artificial
  probe
  misc_feature (1)..(25): SEQ ID NO: 7256; WAN024BTU_at; Start 32; Stop 56
tggacatcatgaaacaatatcctga

SEQ ID NO: 94126 - DNA, 25 bp, Artificial
  probe
  misc_feature (1)..(25): SEQ ID NO: 7256; WAN024BTU_at; Start 407; Stop 431
tctctgaaggtcatatacaacaagg

SEQ ID NO: 94127 - DNA, 25 bp, Artificial
  probe
  misc_feature (1)..(25): SEQ ID NO: 7256; WAN024BTU_at; Start 588; Stop 612
tgactatgttggatgcgagattgat

SEQ ID NO: 94128 - DNA, 25 bp, Artificial
  probe
  misc_feature (1)..(25): SEQ ID NO: 7256; WAN024BTU_at; Start 357; Stop 381
tactcggctatttcgttacatgtgg

SEQ ID NO: 94129 - DNA, 25 bp, Artificial
  probe
  misc_feature (1)..(25): SEQ ID NO: 7256; WAN024BTU_at; Start 143; Stop 167
taggtgtaagcagactctatggcga

SEQ ID NO: 94130 - DNA, 25 bp, Artificial
  probe
  misc_feature (1)..(25): SEQ ID NO: 7256; WAN024BTU_at; Start 177; Stop 201
gtggaaaattccaaacagagattat

SEQ ID NO: 94131 - DNA, 25 bp, Artificial
  probe
  misc_feature (1)..(25): SEQ ID NO: 7256; WAN024BTU_at; Start 320; Stop 344
cagattgtgagatagcgtactgcag

SEQ ID NO: 94132 - DNA, 25 bp, Artificial
  probe
  misc_feature (1)..(25): SEQ ID NO: 7256; WAN024BTU_at; Start 121; Stop 145
tacgggcggaaaatcagtccaatag

SEQ ID NO: 94133 - DNA, 25 bp, Artificial
  probe
  misc_feature (1)..(25): SEQ ID NO: 7256; WAN024BTU_at; Start 82; Stop 106
gatccaccatatttttctggtccag

SEQ ID NO: 94134 - DNA, 25 bp, Artificial
  probe
  misc_feature (1)..(25): SEQ ID NO: 7256; WAN024BTU_at; Start 274; Stop 298
tctggccgtattgtgtgggacaaag

SEQ ID NO: 94135 - DNA, 25 bp, Artificial
  probe
  misc_feature (1)..(25): SEQ ID NO: 7256; WAN024BTU_at; Start 554; Stop 578
caagtagcttgattgcttgcggaga

SEQ ID NO: 94136 - DNA, 25 bp, Artificial
  probe
  misc_feature (1)..(25): SEQ ID NO: 7256; WAN024BTU_at; Start 634; Stop 658
caacagagacttgatgcttatgaga

SEQ ID NO: 94137 - DNA, 25 bp, Artificial
  probe
  misc_feature (1)..(25): SEQ ID NO: 7256; WAN024BTU_at; Start 290; Stop 314
gggacaaagttaatggtcaatcaag

SEQ ID NO: 94138 - DNA, 25 bp, Artificial
  probe
  misc_feature (1)..(25): SEQ ID NO: 7256; WAN024BTU_at; Start 373; Stop 397
tacatgtggaatggtatgatgcaag

SEQ ID NO: 94139 - DNA, 25 bp, Artificial
  probe
  misc_feature (1)..(25): SEQ ID NO: 7256; WAN024BTU_at; Start 158; Stop 182
tctatggcgaaatctcagagtggaa

SEQ ID NO: 94140 - DNA, 25 bp, Artificial
  probe
  misc_feature (1)..(25): SEQ ID NO: 7256; WAN024BTU_at; Start 489; Stop 513
cctttggttattgcaaacttacgca

SEQ ID NO: 94141 - DNA, 25 bp, Artificial
  probe
  misc_feature (1)..(25): SEQ ID NO: 7256; WAN024BTU_at; Start 615; Stop 639
aagtattttcaacctcgctcaacag

SEQ ID NO: 94142 - DNA, 25 bp, Artificial
  probe
  misc_feature (1)..(25): SEQ ID NO: 7256; WAN024BTU_at; Start 502; Stop 526
caaacttacgcaaaagaaggcgata

SEQ ID NO: 94143 - DNA, 25 bp, Artificial
  probe
  misc_feature (1)..(25): SEQ ID NO: 7256; WAN024BTU_at; Start 440; Stop 464
cattgaatgaggttagaatccatcc

SEQ ID NO: 94144 - DNA, 25 bp, Artificial
  probe
  misc_feature (1)..(25): SEQ ID NO: 7256; WAN024BTU_at; Start 569; Stop 593
cttgcggagagctaggatttgacta

SEQ ID NO: 94145 - DNA, 25 bp, Artificial
  probe
  misc_feature (1)..(25): SEQ ID NO: 7256; WAN024BTU_at; Start 394; Stop 418
caaggtaaatcaatctctgaaggtc

SEQ ID NO: 94146 - DNA, 25 bp, Artificial
  probe
  misc_feature (1)..(25): SEQ ID NO: 7256; WAN024BTU_at; Start 455; Stop 479
gaatccatccgacacaaaaaccagt

SEQ ID NO: 94147 - DNA, 25 bp, Artificial
  probe
  misc_feature (1)..(25): SEQ ID NO: 7256; WAN024BTU_at; Start 649; Stop 673
gcttatgagaagcagttgaagttat

SEQ ID NO: 94148 - DNA, 25 bp, Artificial
  probe
  misc_feature (1)..(25): SEQ ID NO: 7256; WAN024BTU_at; Start 525; Stop 549
taaaatacttgatactcacgtcggt

SEQ ID NO: 94149 - DNA, 25 bp, Artificial
  probe
  misc_feature (1)..(25): SEQ ID NO: 7256; WAN024BTU_at; Start 420; Stop 444
tatacaacaaggaaataaggcattg

SEQ ID NO: 94150 - DNA, 25 bp, Artificial
  probe
  misc_feature (1)..(25): SEQ ID NO: 7256; WAN024BTU_at; Start 205; Stop 229
gatgaacttttcagggtatctaaaa

SEQ ID NO: 94151 - DNA, 25 bp, Artificial
  probe
  misc_feature (1)..(25): SEQ ID NO: 7256; WAN024BTU_at; Start 259; Stop 283
gactattcttttggttctggccgta

SEQ ID NO: 94152 - DNA, 25 bp, Artificial
  probe
  misc_feature (1)..(25): SEQ ID NO: 7256; WAN024BTU_at; Start 342; Stop 366
cagttatcatgatagtactcggcta

SEQ ID NO: 94153 - DNA, 25 bp, Artificial
  probe
  misc_feature (1)..(25): SEQ ID NO: 7256; WAN024BTU_at; Start 243; Stop 267
gggtgtgaactacttcgactattct

SEQ ID NO: 94154 - DNA, 25 bp, Artificial
  probe
  misc_feature (1)..(25): SEQ ID NO: 7256; WAN024BTU_at; Start 17; Stop 41
taaatggtgactgcatggacatcat

SEQ ID NO: 94155 - DNA, 25 bp, Artificial
  probe
  misc_feature (1)..(25): SEQ ID NO: 7256; WAN024BTU_at; Start 67; Stop 91
gacctagctattgttgatccaccat

SEQ ID NO: 94156 - DNA, 25 bp, Artificial
  probe
  misc_feature (1)..(25): SEQ ID NO: 7256; WAN024BTU_at; Start 52; Stop 76
cctgataattactttgacctagcta

SEQ ID NO: 94157 - DNA, 25 bp, Artificial
  probe
  misc_feature (1)..(25): SEQ ID NO: 7256; WAN024BTU_at; Start 131; Stop 155
aaatcagtccaataggtgtaagcag

SEQ ID NO: 94158 - DNA, 25 bp, Artificial
  probe
  misc_feature (1)..(25): SEQ ID NO: 7256; WAN024BTU_at; Start 539; Stop 563
ctcacgtcggttcagcaagtagctt

SEQ ID NO: 94159 - DNA, 25 bp, Artificial
  probe
  misc_feature (1)..(25): SEQ ID NO: 7035; WAN024BTV_at; Start 4; Stop 28
tttattttaagacatgggacaagag

SEQ ID NO: 94160 - DNA, 25 bp, Artificial
  probe
  misc_feature (1)..(25): SEQ ID NO: 7035; WAN024BTV_at; Start 131; Stop 155
ccgtacaggttggtaaggctttgag

SEQ ID NO: 94161 - DNA, 25 bp, Artificial
  probe
  misc_feature (1)..(25): SEQ ID NO: 7035; WAN024BTV_at; Start 42; Stop 66
tctgaggtccgtagttattggtgtg

SEQ ID NO: 94162 - DNA, 25 bp, Artificial
  probe
  misc_feature (1)..(25): SEQ ID NO: 7035; WAN024BTV_at; Start 31; Stop 55
gataagccgtttctgaggtccgtag

SEQ ID NO: 94163 - DNA, 25 bp, Artificial
  probe
  misc_feature (1)..(25): SEQ ID NO: 7035; WAN024BTV_at; Start 102; Stop 126
agccatgcggtttgtttctcgtggg

SEQ ID NO: 94164 - DNA, 25 bp, Artificial
  probe
  misc_feature (1)..(25): SEQ ID NO: 7035; WAN024BTV_at; Start 100; Stop 124
aaagccatgcggtttgtttctcgtg

SEQ ID NO: 94165 - DNA, 25 bp, Artificial
  probe
  misc_feature (1)..(25): SEQ ID NO: 7035; WAN024BTV_at; Start 74; Stop 98
tggacatttcatgttcagaggagaa

SEQ ID NO: 94166 - DNA, 25 bp, Artificial
  probe
  misc_feature (1)..(25): SEQ ID NO: 7035; WAN024BTV_at; Start 2; Stop 26
tgtttattttaagacatgggacaag

SEQ ID NO: 94167 - DNA, 25 bp, Artificial
  probe
  misc_feature (1)..(25): SEQ ID NO: 7035; WAN024BTV_at; Start 127; Stop 151
gcagccgtacaggttggtaaggctt

SEQ ID NO: 94168 - DNA, 25 bp, Artificial
  probe
  misc_feature (1)..(25): SEQ ID NO: 7035; WAN024BTV_at; Start 9; Stop 33
tttaagacatgggacaagagaggat

SEQ ID NO: 94169 - DNA, 25 bp, Artificial
  probe
  misc_feature (1)..(25): SEQ ID NO: 7035; WAN024BTV_at; Start 71; Stop 95
gcttggacatttcatgttcagagga

SEQ ID NO: 94170 - DNA, 25 bp, Artificial
  probe
  misc_feature (1)..(25): SEQ ID NO: 7035; WAN024BTV_at; Start 32; Stop 56
ataagccgtttctgaggtccgtagt

SEQ ID NO: 94171 - DNA, 25 bp, Artificial
  probe
  misc_feature (1)..(25): SEQ ID NO: 7035; WAN024BTV_at; Start 28; Stop 52
gaggataagccgtttctgaggtccg

SEQ ID NO: 94172 - DNA, 25 bp, Artificial
  probe
  misc_feature (1)..(25): SEQ ID NO: 7035; WAN024BTV_at; Start 23; Stop 47
caagagaggataagccgtttctgag

SEQ ID NO: 94173 - DNA, 25 bp, Artificial
  probe
  misc_feature (1)..(25): SEQ ID NO: 7035; WAN024BTV_at; Start 88; Stop 112
tcagaggagaagaaagccatgcggt

SEQ ID NO: 94174 - DNA, 25 bp, Artificial
  probe
  misc_feature (1)..(25): SEQ ID NO: 7035; WAN024BTV_at; Start 38; Stop 62
cgtttctgaggtccgtagttattgg

SEQ ID NO: 94175 - DNA, 25 bp, Artificial
  probe
  misc_feature (1)..(25): SEQ ID NO: 7035; WAN024BTV_at; Start 76; Stop 100
gacatttcatgttcagaggagaaga

SEQ ID NO: 94176 - DNA, 25 bp, Artificial
  probe
  misc_feature (1)..(25): SEQ ID NO: 7035; WAN024BTV_at; Start 94; Stop 118
gagaagaaagccatgcggtttgttt

SEQ ID NO: 94177 - DNA, 25 bp, Artificial
  probe
  misc_feature (1)..(25): SEQ ID NO: 7035; WAN024BTV_at; Start 20; Stop 44
ggacaagagaggataagccgtttct

SEQ ID NO: 94178 - DNA, 25 bp, Artificial
  probe
  misc_feature (1)..(25): SEQ ID NO: 7035; WAN024BTV_at; Start 90; Stop 114
agaggagaagaaagccatgcggttt

SEQ ID NO: 94179 - DNA, 25 bp, Artificial
  probe
  misc_feature (1)..(25): SEQ ID NO: 7035; WAN024BTV_at; Start 44; Stop 68
tgaggtccgtagttattggtgtgac

SEQ ID NO: 94180 - DNA, 25 bp, Artificial
  probe
  misc_feature (1)..(25): SEQ ID NO: 7035; WAN024BTV_at; Start 49; Stop 73
tccgtagttattggtgtgactggct

SEQ ID NO: 94181 - DNA, 25 bp, Artificial
  probe
  misc_feature (1)..(25): SEQ ID NO: 7035; WAN024BTV_at; Start 57; Stop 81
tattggtgtgactggcttggacatt

SEQ ID NO: 94182 - DNA, 25 bp, Artificial
  probe
  misc_feature (1)..(25): SEQ ID NO: 7035; WAN024BTV_at; Start 63; Stop 87
tgtgactggcttggacatttcatgt

SEQ ID NO: 94183 - DNA, 25 bp, Artificial
  probe
  misc_feature (1)..(25): SEQ ID NO: 7035; WAN024BTV_at; Start 16; Stop 40
catgggacaagagaggataagccgt

SEQ ID NO: 94184 - DNA, 25 bp, Artificial
  probe
  misc_feature (1)..(25): SEQ ID NO: 7035; WAN024BTV_at; Start 11; Stop 35
taagacatgggacaagagaggataa

SEQ ID NO: 94185 - DNA, 25 bp, Artificial
  probe
  misc_feature (1)..(25): SEQ ID NO: 7035; WAN024BTV_at; Start 14; Stop 38
gacatgggacaagagaggataagcc

SEQ ID NO: 94186 - DNA, 25 bp, Artificial
  probe
  misc_feature (1)..(25): SEQ ID NO: 7035; WAN024BTV_at; Start 60; Stop 84
tggtgtgactggcttggacatttca

SEQ ID NO: 94187 - DNA, 25 bp, Artificial
  probe
  misc_feature (1)..(25): SEQ ID NO: 7035; WAN024BTV_at; Start 54; Stop 78
agttattggtgtgactggcttggac

SEQ ID NO: 94188 - DNA, 25 bp, Artificial
  probe
  misc_feature (1)..(25): SEQ ID NO: 7035; WAN024BTV_at; Start 66; Stop 90
gactggcttggacatttcatgttca

SEQ ID NO: 94189 - DNA, 25 bp, Artificial
  probe
  misc_feature (1)..(25): SEQ ID NO: 7035; WAN024BTV_at; Start 35; Stop 59
agccgtttctgaggtccgtagttat

SEQ ID NO: 94190 - DNA, 25 bp, Artificial
  probe
  misc_feature (1)..(25): SEQ ID NO: 7035; WAN024BTV_at; Start 112; Stop 136
tttgtttctcgtggggcagccgtac

SEQ ID NO: 94191 - DNA, 25 bp, Artificial
  probe
  misc_feature (1)..(25): SEQ ID NO: 7035; WAN024BTV_at; Start 6; Stop 30
tattttaagacatgggacaagagag

SEQ ID NO: 94192 - DNA, 25 bp, Artificial
  probe
  misc_feature (1)..(25): SEQ ID NO: 7035; WAN024BTV_at; Start 18; Stop 42
tgggacaagagaggataagccgttt

SEQ ID NO: 94193 - DNA, 25 bp, Artificial
  probe
  misc_feature (1)..(25): SEQ ID NO: 6915; WAN024BTW_at; Start 501; Stop 525
tcaggaggagtttctggtcaataaa

SEQ ID NO: 94194 - DNA, 25 bp, Artificial
  probe
  misc_feature (1)..(25): SEQ ID NO: 6915; WAN024BTW_at; Start 444; Stop 468
gattgctatcttcatcaacgtgacg

SEQ ID NO: 94195 - DNA, 25 bp, Artificial
  probe
  misc_feature (1)..(25): SEQ ID NO: 6915; WAN024BTW_at; Start 108; Stop 132
gaccgagagtgttgtatgtcgcatg

SEQ ID NO: 94196 - DNA, 25 bp, Artificial
  probe
  misc_feature (1)..(25): SEQ ID NO: 6915; WAN024BTW_at; Start 162; Stop 186
tcaagcaagagtgaatgaattggcc

SEQ ID NO: 94197 - DNA, 25 bp, Artificial
  probe
  misc_feature (1)..(25): SEQ ID NO: 6915; WAN024BTW_at; Start 566; Stop 590
tggaaaaggatagcgaatggtcgtt

SEQ ID NO: 94198 - DNA, 25 bp, Artificial
  probe
  misc_feature (1)..(25): SEQ ID NO: 6915; WAN024BTW_at; Start 58; Stop 82
caagaagagttctgcgaaaagcata

SEQ ID NO: 94199 - DNA, 25 bp, Artificial
  probe
  misc_feature (1)..(25): SEQ ID NO: 6915; WAN024BTW_at; Start 516; Stop 540
ggtcaataaaattgccagtgctaag

SEQ ID NO: 94200 - DNA, 25 bp, Artificial
  probe
  misc_feature (1)..(25): SEQ ID NO: 6915; WAN024BTW_at; Start 261; Stop 285
gactttggacaattttgaaacacca

SEQ ID NO: 94201 - DNA, 25 bp, Artificial
  probe
  misc_feature (1)..(25): SEQ ID NO: 6915; WAN024BTW_at; Start 301; Stop 325
gaaaagctagtttttgcaaagagga

SEQ ID NO: 94202 - DNA, 25 bp, Artificial
  probe
  misc_feature (1)..(25): SEQ ID NO: 6915; WAN024BTW_at; Start 122; Stop 146
tatgtcgcatgtgtgaatctgagcg

SEQ ID NO: 94203 - DNA, 25 bp, Artificial
  probe
  misc_feature (1)..(25): SEQ ID NO: 6915; WAN024BTW_at; Start 414; Stop 438
ggttaaggctctatctgagtacacg

SEQ ID NO: 94204 - DNA, 25 bp, Artificial
  probe
  misc_feature (1)..(25): SEQ ID NO: 6915; WAN024BTW_at; Start 360; Stop 384
catcgtgttacaaggagaagctgga

SEQ ID NO: 94205 - DNA, 25 bp, Artificial
  probe
  misc_feature (1)..(25): SEQ ID NO: 6915; WAN024BTW_at; Start 693; Stop 717
cagactgatgaagggtgtggataaa

SEQ ID NO: 94206 - DNA, 25 bp, Artificial
  probe
  misc_feature (1)..(25): SEQ ID NO: 6915; WAN024BTW_at; Start 92; Stop 116
tgataaagatattgaggaccgagag

SEQ ID NO: 94207 - DNA, 25 bp, Artificial
  probe
  misc_feature (1)..(25): SEQ ID NO: 6915; WAN024BTW_at; Start 175; Stop 199
aatgaattggccgacgctgagaatg

SEQ ID NO: 94208 - DNA, 25 bp, Artificial
  probe
  misc_feature (1)..(25): SEQ ID NO: 6915; WAN024BTW_at; Start 317; Stop 341
caaagaggatttgtcgtgagtggtc

SEQ ID NO: 94209 - DNA, 25 bp, Artificial
  probe
  misc_feature (1)..(25): SEQ ID NO: 6915; WAN024BTW_at; Start 21; Stop 45
ggaaatcgccttatcttatcgtagg

SEQ ID NO: 94210 - DNA, 25 bp, Artificial
  probe
  misc_feature (1)..(25): SEQ ID NO: 6915; WAN024BTW_at; Start 599; Stop 623
tctacaatatcctgaataagcgttc

SEQ ID NO: 94211 - DNA, 25 bp, Artificial
  probe
  misc_feature (1)..(25): SEQ ID NO: 6915; WAN024BTW_at; Start 275; Stop 299
ttgaaacaccaactgaaaaagaagc

SEQ ID NO: 94212 - DNA, 25 bp, Artificial
  probe
  misc_feature (1)..(25): SEQ ID NO: 6915; WAN024BTW_at; Start 139; Stop 163
tctgagcggattcatgaggaaaatc

SEQ ID NO: 94213 - DNA, 25 bp, Artificial
  probe
  misc_feature (1)..(25): SEQ ID NO: 6915; WAN024BTW_at; Start 247; Stop 271
gttttgaaaaatgcgactttggaca

SEQ ID NO: 94214 - DNA, 25 bp, Artificial
  probe
  misc_feature (1)..(25): SEQ ID NO: 6915; WAN024BTW_at; Start 340; Stop 364
tctgagggtgctaggaacaacatcg

SEQ ID NO: 94215 - DNA, 25 bp, Artificial
  probe
  misc_feature (1)..(25): SEQ ID NO: 6915; WAN024BTW_at; Start 732; Stop 756
tttcaacgacttgacaaacaagcgg

SEQ ID NO: 94216 - DNA, 25 bp, Artificial
  probe
  misc_feature (1)..(25): SEQ ID NO: 6915; WAN024BTW_at; Start 381; Stop 405
tggaacaggtaagagccatttggcc

SEQ ID NO: 94217 - DNA, 25 bp, Artificial
  probe
  misc_feature (1)..(25): SEQ ID NO: 6915; WAN024BTW_at; Start 486; Stop 510
taaagctgattttagtcaggaggag

SEQ ID NO: 94218 - DNA, 25 bp, Artificial
  probe
  misc_feature (1)..(25): SEQ ID NO: 6915; WAN024BTW_at; Start 7; Stop 31
gacaatgtgtttgaggaaatcgcct

SEQ ID NO: 94219 - DNA, 25 bp, Artificial
  probe
  misc_feature (1)..(25): SEQ ID NO: 6915; WAN024BTW_at; Start 429; Stop 453
tgagtacacgaaagagattgctatc

SEQ ID NO: 94220 - DNA, 25 bp, Artificial
  probe
  misc_feature (1)..(25): SEQ ID NO: 6915; WAN024BTW_at; Start 660; Stop 684
tattcagaaaagatatggcagaccc

SEQ ID NO: 94221 - DNA, 25 bp, Artificial
  probe
  misc_feature (1)..(25): SEQ ID NO: 6915; WAN024BTW_at; Start 196; Stop 220
aatgagcgagagaggaaatactatc

SEQ ID NO: 94222 - DNA, 25 bp, Artificial
  probe
  misc_feature (1)..(25): SEQ ID NO: 6915; WAN024BTW_at; Start 396; Stop 420
ccatttggcctttgcgatggttaag

SEQ ID NO: 94223 - DNA, 25 bp, Artificial
  probe
  misc_feature (1)..(25): SEQ ID NO: 6915; WAN024BTW_at; Start 460; Stop 484
aacgtgacggacttgttgatgaaga

SEQ ID NO: 94224 - DNA, 25 bp, Artificial
  probe
  misc_feature (1)..(25): SEQ ID NO: 6915; WAN024BTW_at; Start 676; Stop 700
ggcagaccctttatgtccagactga

SEQ ID NO: 94225 - DNA, 25 bp, Artificial
  probe
  misc_feature (1)..(25): SEQ ID NO: 6915; WAN024BTW_at; Start 638; Stop 662
ccaccaatttgacttctgctgatat

SEQ ID NO: 94226 - DNA, 25 bp, Artificial
  probe
  misc_feature (1)..(25): SEQ ID NO: 6915; WAN024BTW_at; Start 37; Stop 61
tatcgtaggaatacagaacaacaag

SEQ ID NO: 94227 - DNA, 25 bp, Artificial
  probe
  misc_feature (1)..(25): SEQ ID NO: 6905; WAN024BTX_at; Start 33; Stop 57
gattgactattatccgttaagctac

SEQ ID NO: 94228 - DNA, 25 bp, Artificial
  probe
  misc_feature (1)..(25): SEQ ID NO: 6905; WAN024BTX_at; Start 99; Stop 123
ggttgcctgcttgtctgaaatggct

SEQ ID NO: 94229 - DNA, 25 bp, Artificial
  probe
  misc_feature (1)..(25): SEQ ID NO: 6905; WAN024BTX_at; Start 10; Stop 34
ctagaactaattgaacaattcgaga

SEQ ID NO: 94230 - DNA, 25 bp, Artificial
  probe
  misc_feature (1)..(25): SEQ ID NO: 6905; WAN024BTX_at; Start 114; Stop 138
tgaaatggctagctggcatgaatgc

SEQ ID NO: 94231 - DNA, 25 bp, Artificial
  probe
  misc_feature (1)..(25): SEQ ID NO: 6905; WAN024BTX_at; Start 106; Stop 130
tgcttgtctgaaatggctagctggc

SEQ ID NO: 94232 - DNA, 25 bp, Artificial
  probe
  misc_feature (1)..(25): SEQ ID NO: 6905; WAN024BTX_at; Start 25; Stop 49
caattcgagattgactattatccgt

SEQ ID NO: 94233 - DNA, 25 bp, Artificial
  probe
  misc_feature (1)..(25): SEQ ID NO: 6905; WAN024BTX_at; Start 47; Stop 71
cgttaagctacgagaagaaaactct

SEQ ID NO: 94234 - DNA, 25 bp, Artificial
  probe
  misc_feature (1)..(25): SEQ ID NO: 6905; WAN024BTX_at; Start 102; Stop 126
tgcctgcttgtctgaaatggctagc

SEQ ID NO: 94235 - DNA, 25 bp, Artificial
  probe
  misc_feature (1)..(25): SEQ ID NO: 6905; WAN024BTX_at; Start 16; Stop 40
ctaattgaacaattcgagattgact

SEQ ID NO: 94236 - DNA, 25 bp, Artificial
  probe
  misc_feature (1)..(25): SEQ ID NO: 6905; WAN024BTX_at; Start 30; Stop 54
cgagattgactattatccgttaagc

SEQ ID NO: 94237 - DNA, 25 bp, Artificial
  probe
  misc_feature (1)..(25): SEQ ID NO: 6905; WAN024BTX_at; Start 85; Stop 109
ccaattcatcaagtggttgcctgct

SEQ ID NO: 94238 - DNA, 25 bp, Artificial
  probe
  misc_feature (1)..(25): SEQ ID NO: 6905; WAN024BTX_at; Start 90; Stop 114
tcatcaagtggttgcctgcttgtct

SEQ ID NO: 94239 - DNA, 25 bp, Artificial
  probe
  misc_feature (1)..(25): SEQ ID NO: 6905; WAN024BTX_at; Start 130; Stop 154
catgaatgcggaggtcggctagtat

SEQ ID NO: 94240 - DNA, 25 bp, Artificial
  probe
  misc_feature (1)..(25): SEQ ID NO: 6905; WAN024BTX_at; Start 87; Stop 111
aattcatcaagtggttgcctgcttg

SEQ ID NO: 94241 - DNA, 25 bp, Artificial
  probe
  misc_feature (1)..(25): SEQ ID NO: 6905; WAN024BTX_at; Start 65; Stop 89
aaactcttttagcagaccaaccaat

SEQ ID NO: 94242 - DNA, 25 bp, Artificial
  probe
  misc_feature (1)..(25): SEQ ID NO: 6905; WAN024BTX_at; Start 63; Stop 87
gaaaactcttttagcagaccaacca

SEQ ID NO: 94243 - DNA, 25 bp, Artificial
  probe
  misc_feature (1)..(25): SEQ ID NO: 6905; WAN024BTX_at; Start 94; Stop 118
caagtggttgcctgcttgtctgaaa

SEQ ID NO: 94244 - DNA, 25 bp, Artificial
  probe
  misc_feature (1)..(25): SEQ ID NO: 6905; WAN024BTX_at; Start 40; Stop 64
tattatccgttaagctacgagaaga

SEQ ID NO: 94245 - DNA, 25 bp, Artificial
  probe
  misc_feature (1)..(25): SEQ ID NO: 6905; WAN024BTX_at; Start 71; Stop 95
ttttagcagaccaaccaattcatca

SEQ ID NO: 94246 - DNA, 25 bp, Artificial
  probe
  misc_feature (1)..(25): SEQ ID NO: 6905; WAN024BTX_at; Start 58; Stop 82
gagaagaaaactcttttagcagacc

SEQ ID NO: 94247 - DNA, 25 bp, Artificial
  probe
  misc_feature (1)..(25): SEQ ID NO: 6905; WAN024BTX_at; Start 76; Stop 100
gcagaccaaccaattcatcaagtgg

SEQ ID NO: 94248 - DNA, 25 bp, Artificial
  probe
  misc_feature (1)..(25): SEQ ID NO: 6905; WAN024BTX_at; Start 69; Stop 93
tcttttagcagaccaaccaattcat

SEQ ID NO: 94249 - DNA, 25 bp, Artificial
  probe
  misc_feature (1)..(25): SEQ ID NO: 6905; WAN024BTX_at; Start 74; Stop 98
tagcagaccaaccaattcatcaagt

SEQ ID NO: 94250 - DNA, 25 bp, Artificial
  probe
  misc_feature (1)..(25): SEQ ID NO: 6905; WAN024BTX_at; Start 37; Stop 61
gactattatccgttaagctacgaga

SEQ ID NO: 94251 - DNA, 25 bp, Artificial
  probe
  misc_feature (1)..(25): SEQ ID NO: 6905; WAN024BTX_at; Start 83; Stop 107
aaccaattcatcaagtggttgcctg

SEQ ID NO: 94252 - DNA, 25 bp, Artificial
  probe
  misc_feature (1)..(25): SEQ ID NO: 6905; WAN024BTX_at; Start 111; Stop 135
gtctgaaatggctagctggcatgaa

SEQ ID NO: 94253 - DNA, 25 bp, Artificial
  probe
  misc_feature (1)..(25): SEQ ID NO: 6905; WAN024BTX_at; Start 108; Stop 132
cttgtctgaaatggctagctggcat

SEQ ID NO: 94254 - DNA, 25 bp, Artificial
  probe
  misc_feature (1)..(25): SEQ ID NO: 6905; WAN024BTX_at; Start 43; Stop 67
tatccgttaagctacgagaagaaaa

SEQ ID NO: 94255 - DNA, 25 bp, Artificial
  probe
  misc_feature (1)..(25): SEQ ID NO: 6905; WAN024BTX_at; Start 79; Stop 103
gaccaaccaattcatcaagtggttg

SEQ ID NO: 94256 - DNA, 25 bp, Artificial
  probe
  misc_feature (1)..(25): SEQ ID NO: 6905; WAN024BTX_at; Start 116; Stop 140
aaatggctagctggcatgaatgcgg

SEQ ID NO: 94257 - DNA, 25 bp, Artificial
  probe
  misc_feature (1)..(25): SEQ ID NO: 6905; WAN024BTX_at; Start 60; Stop 84
gaagaaaactcttttagcagaccaa

SEQ ID NO: 94258 - DNA, 25 bp, Artificial
  probe
  misc_feature (1)..(25): SEQ ID NO: 6905; WAN024BTX_at; Start 55; Stop 79
tacgagaagaaaactcttttagcag

SEQ ID NO: 94259 - DNA, 25 bp, Artificial
  probe
  misc_feature (1)..(25): SEQ ID NO: 6905; WAN024BTX_at; Start 97; Stop 121
gtggttgcctgcttgtctgaaatgg

SEQ ID NO: 94260 - DNA, 25 bp, Artificial
  probe
  misc_feature (1)..(25): SEQ ID NO: 6905; WAN024BTX_at; Start 6; Stop 30
ggtactagaactaattgaacaattc

SEQ ID NO: 94261 - DNA, 25 bp, Artificial
  probe
  misc_feature (1)..(25): SEQ ID NO: 7290; WAN024BTY_at; Start 774; Stop 798
taagaaagaagaacaggaggccaag

SEQ ID NO: 94262 - DNA, 25 bp, Artificial
  probe
  misc_feature (1)..(25): SEQ ID NO: 7290; WAN024BTY_at; Start 21; Stop 45
taagtggataaaaatcacaaccgat

SEQ ID NO: 94263 - DNA, 25 bp, Artificial
  probe
  misc_feature (1)..(25): SEQ ID NO: 7290; WAN024BTY_at; Start 738; Stop 762
tgaacaggttcgtcaatcggaaaag

SEQ ID NO: 94264 - DNA, 25 bp, Artificial
  probe
  misc_feature (1)..(25): SEQ ID NO: 7290; WAN024BTY_at; Start 165; Stop 189
gatgactgataaggttcactataca

SEQ ID NO: 94265 - DNA, 25 bp, Artificial
  probe
  misc_feature (1)..(25): SEQ ID NO: 7290; WAN024BTY_at; Start 356; Stop 380
cacgtaaccgtgtagccaaataccg

SEQ ID NO: 94266 - DNA, 25 bp, Artificial
  probe
  misc_feature (1)..(25): SEQ ID NO: 7290; WAN024BTY_at; Start 660; Stop 684
tattaactcaggaaagccgaacatc

SEQ ID NO: 94267 - DNA, 25 bp, Artificial
  probe
  misc_feature (1)..(25): SEQ ID NO: 7290; WAN024BTY_at; Start 709; Stop 733
aattggcagatgaacaatgttacca

SEQ ID NO: 94268 - DNA, 25 bp, Artificial
  probe
  misc_feature (1)..(25): SEQ ID NO: 7290; WAN024BTY_at; Start 63; Stop 87
gatttgcctgattgatgccttgcct

SEQ ID NO: 94269 - DNA, 25 bp, Artificial
  probe
  misc_feature (1)..(25): SEQ ID NO: 7290; WAN024BTY_at; Start 675; Stop 699
gccgaacatcaaatatattggtggg

SEQ ID NO: 94270 - DNA, 25 bp, Artificial
  probe
  misc_feature (1)..(25): SEQ ID NO: 7290; WAN024BTY_at; Start 394; Stop 418
aatcttgctcttggtaacgttacag

SEQ ID NO: 94271 - DNA, 25 bp, Artificial
  probe
  misc_feature (1)..(25): SEQ ID NO: 7290; WAN024BTY_at; Start 132; Stop 156
tgctggaaaacataacagtaatggt

SEQ ID NO: 94272 - DNA, 25 bp, Artificial
  probe
  misc_feature (1)..(25): SEQ ID NO: 7290; WAN024BTY_at; Start 97; Stop 121
gccatcttagtgatatggttcaaga

SEQ ID NO: 94273 - DNA, 25 bp, Artificial
  probe
  misc_feature (1)..(25): SEQ ID NO: 7290; WAN024BTY_at; Start 341; Stop 365
aaatcaaggaacagacacgtaaccg

SEQ ID NO: 94274 - DNA, 25 bp, Artificial
  probe
  misc_feature (1)..(25): SEQ ID NO: 7290; WAN024BTY_at; Start 76; Stop 100
gatgccttgcctgatcctgatgcca

SEQ ID NO: 94275 - DNA, 25 bp, Artificial
  probe
  misc_feature (1)..(25): SEQ ID NO: 7290; WAN024BTY_at; Start 316; Stop 340
catcaaaacgttgacggaatggaga

SEQ ID NO: 94276 - DNA, 25 bp, Artificial
  probe
  misc_feature (1)..(25): SEQ ID NO: 7290; WAN024BTY_at; Start 568; Stop 592
cgtagactcttatctggatttgaaa

SEQ ID NO: 94277 - DNA, 25 bp, Artificial
  probe
  misc_feature (1)..(25): SEQ ID NO: 7290; WAN024BTY_at; Start 438; Stop 462
cggtaacgcactagaagaagataaa

SEQ ID NO: 94278 - DNA, 25 bp, Artificial
  probe
  misc_feature (1)..(25): SEQ ID NO: 7290; WAN024BTY_at; Start 3; Stop 27
gctcggtatgtctgaaattaagtgg

SEQ ID NO: 94279 - DNA, 25 bp, Artificial
  probe
  misc_feature (1)..(25): SEQ ID NO: 7290; WAN024BTY_at; Start 635; Stop 659
tggtgaaagaagcattgaagactgc

SEQ ID NO: 94280 - DNA, 25 bp, Artificial
  probe
  misc_feature (1)..(25): SEQ ID NO: 7290; WAN024BTY_at; Start 647; Stop 671
cattgaagactgctattaactcagg

SEQ ID NO: 94281 - DNA, 25 bp, Artificial
  probe
  misc_feature (1)..(25): SEQ ID NO: 7290; WAN024BTY_at; Start 279; Stop 303
tatcgatggtattattagcttgcca

SEQ ID NO: 94282 - DNA, 25 bp, Artificial
  probe
  misc_feature (1)..(25): SEQ ID NO: 7290; WAN024BTY_at; Start 183; Stop 207
ctatacagatgaaatgttagctact

SEQ ID NO: 94283 - DNA, 25 bp, Artificial
  probe
  misc_feature (1)..(25): SEQ ID NO: 7290; WAN024BTY_at; Start 49; Stop 73
tttgacgatgaaaagatttgcctga

SEQ ID NO: 94284 - DNA, 25 bp, Artificial
  probe
  misc_feature (1)..(25): SEQ ID NO: 7290; WAN024BTY_at; Start 296; Stop 320
gcttgccaaattgggaaaaacatca

SEQ ID NO: 94285 - DNA, 25 bp, Artificial
  probe
  misc_feature (1)..(25): SEQ ID NO: 7290; WAN024BTY_at; Start 236; Stop 260
gaatggctattggagtttttgaaca

SEQ ID NO: 94286 - DNA, 25 bp, Artificial
  probe
  misc_feature (1)..(25): SEQ ID NO: 7290; WAN024BTY_at; Start 147; Stop 171
cagtaatggtttgttgatgatgact

SEQ ID NO: 94287 - DNA, 25 bp, Artificial
  probe
  misc_feature (1)..(25): SEQ ID NO: 7290; WAN024BTY_at; Start 328; Stop 352
gacggaatggagaaaatcaaggaac

SEQ ID NO: 94288 - DNA, 25 bp, Artificial
  probe
  misc_feature (1)..(25): SEQ ID NO: 7290; WAN024BTY_at; Start 117; Stop 141
caagattttgacacttgctggaaaa

SEQ ID NO: 94289 - DNA, 25 bp, Artificial
  probe
  misc_feature (1)..(25): SEQ ID NO: 7290; WAN024BTY_at; Start 597; Stop 621
agaaatcaaccatctactaaatgag

SEQ ID NO: 94290 - DNA, 25 bp, Artificial
  probe
  misc_feature (1)..(25): SEQ ID NO: 7290; WAN024BTY_at; Start 723; Stop 747
caatgttaccactgttgaacaggtt

SEQ ID NO: 94291 - DNA, 25 bp, Artificial
  probe
  misc_feature (1)..(25): SEQ ID NO: 7290; WAN024BTY_at; Start 750; Stop 774
tcaatcggaaaagaagaacaaggat

SEQ ID NO: 94292 - DNA, 25 bp, Artificial
  probe
  misc_feature (1)..(25): SEQ ID NO: 7290; WAN024BTY_at; Start 426; Stop 450
tacagtaacggacggtaacgcacta

SEQ ID NO: 94293 - DNA, 25 bp, Artificial
  probe
  misc_feature (1)..(25): SEQ ID NO: 7290; WAN024BTY_at; Start 36; Stop 60
cacaaccgatatttttgacgatgaa

SEQ ID NO: 94294 - DNA, 25 bp, Artificial
  probe
  misc_feature (1)..(25): SEQ ID NO: 7290; WAN024BTY_at; Start 213; Stop 237
tcgtagaccattgaatacagtaaga

SEQ ID NO: 94295 - DNA, 25 bp, Artificial
  probe
  misc_feature (1)..(25): SEQ ID NO: 7037; WAN024BTZ_at; Start 11; Stop 35
caccgattttagaccagctgatggg

SEQ ID NO: 94296 - DNA, 25 bp, Artificial
  probe
  misc_feature (1)..(25): SEQ ID NO: 7037; WAN024BTZ_at; Start 35; Stop 59
gggttggagccttactgcttggatt

SEQ ID NO: 94297 - DNA, 25 bp, Artificial
  probe
  misc_feature (1)..(25): SEQ ID NO: 7037; WAN024BTZ_at; Start 156; Stop 180
taaccatgcttacgaacgtggtaga

SEQ ID NO: 94298 - DNA, 25 bp, Artificial
  probe
  misc_feature (1)..(25): SEQ ID NO: 7037; WAN024BTZ_at; Start 75; Stop 99
tcatatcaaattgcaggaacaacgc

SEQ ID NO: 94299 - DNA, 25 bp, Artificial
  probe
  misc_feature (1)..(25): SEQ ID NO: 7037; WAN024BTZ_at; Start 223; Stop 247
ttcaagggctttacctacgacaatg

SEQ ID NO: 94300 - DNA, 25 bp, Artificial
  probe
  misc_feature (1)..(25): SEQ ID NO: 7037; WAN024BTZ_at; Start 243; Stop 267
caatgaaccgcctataggcttgcgt

SEQ ID NO: 94301 - DNA, 25 bp, Artificial
  probe
  misc_feature (1)..(25): SEQ ID NO: 7037; WAN024BTZ_at; Start 106; Stop 130
gaagaaagacgagaagagcaagaat

SEQ ID NO: 94302 - DNA, 25 bp, Artificial
  probe
  misc_feature (1)..(25): SEQ ID NO: 7037; WAN024BTZ_at; Start 229; Stop 253
ggctttacctacgacaatgaaccgc

SEQ ID NO: 94303 - DNA, 25 bp, Artificial
  probe
  misc_feature (1)..(25): SEQ ID NO: 7037; WAN024BTZ_at; Start 80; Stop 104
tcaaattgcaggaacaacgcaagga

SEQ ID NO: 94304 - DNA, 25 bp, Artificial
  probe
  misc_feature (1)..(25): SEQ ID NO: 7037; WAN024BTZ_at; Start 289; Stop 313
gaacctaaacagtctgcaatcagat

SEQ ID NO: 94305 - DNA, 25 bp, Artificial
  probe
  misc_feature (1)..(25): SEQ ID NO: 7037; WAN024BTZ_at; Start 91; Stop 115
gaacaacgcaaggaagaagaaagac

SEQ ID NO: 94306 - DNA, 25 bp, Artificial
  probe
  misc_feature (1)..(25): SEQ ID NO: 7037; WAN024BTZ_at; Start 6; Stop 30
tgaaccaccgattttagaccagctg

SEQ ID NO: 94307 - DNA, 25 bp, Artificial
  probe
  misc_feature (1)..(25): SEQ ID NO: 7037; WAN024BTZ_at; Start 100; Stop 124
aaggaagaagaaagacgagaagagc

SEQ ID NO: 94308 - DNA, 25 bp, Artificial
  probe
  misc_feature (1)..(25): SEQ ID NO: 7037; WAN024BTZ_at; Start 270; Stop 294
tgagccgttagctttgccagaacct

SEQ ID NO: 94309 - DNA, 25 bp, Artificial
  probe
  misc_feature (1)..(25): SEQ ID NO: 7037; WAN024BTZ_at; Start 166; Stop 190
tacgaacgtggtagagaggctgaac

SEQ ID NO: 94310 - DNA, 25 bp, Artificial
  probe
  misc_feature (1)..(25): SEQ ID NO: 7037; WAN024BTZ_at; Start 198; Stop 222
aatccgcaagaatattcgtcgtccg

SEQ ID NO: 94311 - DNA, 25 bp, Artificial
  probe
  misc_feature (1)..(25): SEQ ID NO: 7037; WAN024BTZ_at; Start 193; Stop 217
caagaaatccgcaagaatattcgtc

SEQ ID NO: 94312 - DNA, 25 bp, Artificial
  probe
  misc_feature (1)..(25): SEQ ID NO: 7037; WAN024BTZ_at; Start 151; Stop 175
ggctataaccatgcttacgaacgtg

SEQ ID NO: 94313 - DNA, 25 bp, Artificial
  probe
  misc_feature (1)..(25): SEQ ID NO: 7037; WAN024BTZ_at; Start 278; Stop 302
tagctttgccagaacctaaacagtc

SEQ ID NO: 94314 - DNA, 25 bp, Artificial
  probe
  misc_feature (1)..(25): SEQ ID NO: 7037; WAN024BTZ_at; Start 177; Stop 201
tagagaggctgaacgtcaagaaatc

SEQ ID NO: 94315 - DNA, 25 bp, Artificial
  probe
  misc_feature (1)..(25): SEQ ID NO: 7037; WAN024BTZ_at; Start 144; Stop 168
tattcgaggctataaccatgcttac

SEQ ID NO: 94316 - DNA, 25 bp, Artificial
  probe
  misc_feature (1)..(25): SEQ ID NO: 7037; WAN024BTZ_at; Start 294; Stop 318
taaacagtctgcaatcagatttttg

SEQ ID NO: 94317 - DNA, 25 bp, Artificial
  probe
  misc_feature (1)..(25): SEQ ID NO: 7037; WAN024BTZ_at; Start 186; Stop 210
tgaacgtcaagaaatccgcaagaat

SEQ ID NO: 94318 - DNA, 25 bp, Artificial
  probe
  misc_feature (1)..(25): SEQ ID NO: 7037; WAN024BTZ_at; Start 65; Stop 89
gggcttgccgtcatatcaaattgca

SEQ ID NO: 94319 - DNA, 25 bp, Artificial
  probe
  misc_feature (1)..(25): SEQ ID NO: 7037; WAN024BTZ_at; Start 208; Stop 232
aatattcgtcgtccgttcaagggct

SEQ ID NO: 94320 - DNA, 25 bp, Artificial
  probe
  misc_feature (1)..(25): SEQ ID NO: 7037; WAN024BTZ_at; Start 252; Stop 276
gcctataggcttgcgtcctgagccg

SEQ ID NO: 94321 - DNA, 25 bp, Artificial
  probe
  misc_feature (1)..(25): SEQ ID NO: 7037; WAN024BTZ_at; Start 257; Stop 281
taggcttgcgtcctgagccgttagc

SEQ ID NO: 94322 - DNA, 25 bp, Artificial
  probe
  misc_feature (1)..(25): SEQ ID NO: 7037; WAN024BTZ_at; Start 115; Stop 139
cgagaagagcaagaatttgcgtcta

SEQ ID NO: 94323 - DNA, 25 bp, Artificial
  probe
  misc_feature (1)..(25): SEQ ID NO: 7037; WAN024BTZ_at; Start 133; Stop 157
gcgtctatgattattcgaggctata

SEQ ID NO: 94324 - DNA, 25 bp, Artificial
  probe
  misc_feature (1)..(25): SEQ ID NO: 7037; WAN024BTZ_at; Start 238; Stop 262
tacgacaatgaaccgcctataggct

SEQ ID NO: 94325 - DNA, 25 bp, Artificial
  probe
  misc_feature (1)..(25): SEQ ID NO: 7037; WAN024BTZ_at; Start 41; Stop 65
gagccttactgcttggatttgcagg

SEQ ID NO: 94326 - DNA, 25 bp, Artificial
  probe
  misc_feature (1)..(25): SEQ ID NO: 7037; WAN024BTZ_at; Start 181; Stop 205
gaggctgaacgtcaagaaatccgca

SEQ ID NO: 94327 - DNA, 25 bp, Artificial
  probe
  misc_feature (1)..(25): SEQ ID NO: 7037; WAN024BTZ_at; Start 264; Stop 288
gcgtcctgagccgttagctttgcca

SEQ ID NO: 94328 - DNA, 25 bp, Artificial
  probe
  misc_feature (1)..(25): SEQ ID NO: 7037; WAN024BTZ_at; Start 128; Stop 152
aatttgcgtctatgattattcgagg

SEQ ID NO: 94329 - DNA, 25 bp, Artificial
  probe
  misc_feature (1)..(25): SEQ ID NO: 6813; WAN024BU2_at; Start 196; Stop 220
gaattacctggtaagaaatggtcaa

SEQ ID NO: 94330 - DNA, 25 bp, Artificial
  probe
  misc_feature (1)..(25): SEQ ID NO: 6813; WAN024BU2_at; Start 123; Stop 147
tacctgcgaatttctaggaattaag

SEQ ID NO: 94331 - DNA, 25 bp, Artificial
  probe
  misc_feature (1)..(25): SEQ ID NO: 6813; WAN024BU2_at; Start 146; Stop 170
agtatgccacattttcagataatta

SEQ ID NO: 94332 - DNA, 25 bp, Artificial
  probe
  misc_feature (1)..(25): SEQ ID NO: 6813; WAN024BU2_at; Start 191; Stop 215
caaaggaattacctggtaagaaatg

SEQ ID NO: 94333 - DNA, 25 bp, Artificial
  probe
  misc_feature (1)..(25): SEQ ID NO: 6813; WAN024BU2_at; Start 33; Stop 57
gattaaatctattatcaaggacaca

SEQ ID NO: 94334 - DNA, 25 bp, Artificial
  probe
  misc_feature (1)..(25): SEQ ID NO: 6813; WAN024BU2_at; Start 19; Stop 43
tcactatctgaatggattaaatcta

SEQ ID NO: 94335 - DNA, 25 bp, Artificial
  probe
  misc_feature (1)..(25): SEQ ID NO: 6813; WAN024BU2_at; Start 101; Stop 125
cagagttgatggatgtgaacactac

SEQ ID NO: 94336 - DNA, 25 bp, Artificial
  probe
  misc_feature (1)..(25): SEQ ID NO: 6813; WAN024BU2_at; Start 42; Stop 66
tattatcaaggacacaatcacaagg

SEQ ID NO: 94337 - DNA, 25 bp, Artificial
  probe
  misc_feature (1)..(25): SEQ ID NO: 6813; WAN024BU2_at; Start 111; Stop 135
ggatgtgaacactacctgcgaattt

SEQ ID NO: 94338 - DNA, 25 bp, Artificial
  probe
  misc_feature (1)..(25): SEQ ID NO: 6813; WAN024BU2_at; Start 56; Stop 80
caatcacaaggctagtcgaaataga

SEQ ID NO: 94339 - DNA, 25 bp, Artificial
  probe
  misc_feature (1)..(25): SEQ ID NO: 6813; WAN024BU2_at; Start 217; Stop 241
tcaaaaagagccatcaaagaatggc

SEQ ID NO: 94340 - DNA, 25 bp, Artificial
  probe
  misc_feature (1)..(25): SEQ ID NO: 6813; WAN024BU2_at; Start 139; Stop 163
ggaattaagtatgccacattttcag

SEQ ID NO: 94341 - DNA, 25 bp, Artificial
  probe
  misc_feature (1)..(25): SEQ ID NO: 6813; WAN024BU2_at; Start 72; Stop 96
cgaaatagaaaaagatagtgatcac

SEQ ID NO: 94342 - DNA, 25 bp, Artificial
  probe
  misc_feature (1)..(25): SEQ ID NO: 6813; WAN024BU2_at; Start 118; Stop 142
aacactacctgcgaatttctaggaa

SEQ ID NO: 94343 - DNA, 25 bp, Artificial
  probe
  misc_feature (1)..(25): SEQ ID NO: 6813; WAN024BU2_at; Start 59; Stop 83
tcacaaggctagtcgaaatagaaaa

SEQ ID NO: 94344 - DNA, 25 bp, Artificial
  probe
  misc_feature (1)..(25): SEQ ID NO: 6813; WAN024BU2_at; Start 108; Stop 132
gatggatgtgaacactacctgcgaa

SEQ ID NO: 94345 - DNA, 25 bp, Artificial
  probe
  misc_feature (1)..(25): SEQ ID NO: 6813; WAN024BU2_at; Start 207; Stop 231
taagaaatggtcaaaaagagccatc

SEQ ID NO: 94346 - DNA, 25 bp, Artificial
  probe
  misc_feature (1)..(25): SEQ ID NO: 6813; WAN024BU2_at; Start 135; Stop 159
tctaggaattaagtatgccacattt

SEQ ID NO: 94347 - DNA, 25 bp, Artificial
  probe
  misc_feature (1)..(25): SEQ ID NO: 6813; WAN024BU2_at; Start 231; Stop 255
caaagaatggctctctaatcaaata

SEQ ID NO: 94348 - DNA, 25 bp, Artificial
  probe
  misc_feature (1)..(25): SEQ ID NO: 6813; WAN024BU2_at; Start 227; Stop 251
ccatcaaagaatggctctctaatca

SEQ ID NO: 94349 - DNA, 25 bp, Artificial
  probe
  misc_feature (1)..(25): SEQ ID NO: 6813; WAN024BU2_at; Start 105; Stop 129
gttgatggatgtgaacactacctgc

SEQ ID NO: 94350 - DNA, 25 bp, Artificial
  probe
  misc_feature (1)..(25): SEQ ID NO: 6813; WAN024BU2_at; Start 2; Stop 26
tggacaatgttctactttcactatc

SEQ ID NO: 94351 - DNA, 25 bp, Artificial
  probe
  misc_feature (1)..(25): SEQ ID NO: 6813; WAN024BU2_at; Start 62; Stop 86
caaggctagtcgaaatagaaaaaga

SEQ ID NO: 94352 - DNA, 25 bp, Artificial
  probe
  misc_feature (1)..(25): SEQ ID NO: 6813; WAN024BU2_at; Start 47; Stop 71
tcaaggacacaatcacaaggctagt

SEQ ID NO: 94353 - DNA, 25 bp, Artificial
  probe
  misc_feature (1)..(25): SEQ ID NO: 6813; WAN024BU2_at; Start 161; Stop 185
cagataattatcgttacttaaaggg

SEQ ID NO: 94354 - DNA, 25 bp, Artificial
  probe
  misc_feature (1)..(25): SEQ ID NO: 6813; WAN024BU2_at; Start 87; Stop 111
tagtgatcactatccagagttgatg

SEQ ID NO: 94355 - DNA, 25 bp, Artificial
  probe
  misc_feature (1)..(25): SEQ ID NO: 6813; WAN024BU2_at; Start 204; Stop 228
tggtaagaaatggtcaaaaagagcc

SEQ ID NO: 94356 - DNA, 25 bp, Artificial
  probe
  misc_feature (1)..(25): SEQ ID NO: 6813; WAN024BU2_at; Start 214; Stop 238
tggtcaaaaagagccatcaaagaat

SEQ ID NO: 94357 - DNA, 25 bp, Artificial
  probe
  misc_feature (1)..(25): SEQ ID NO: 6813; WAN024BU2_at; Start 116; Stop 140
tgaacactacctgcgaatttctagg

SEQ ID NO: 94358 - DNA, 25 bp, Artificial
  probe
  misc_feature (1)..(25): SEQ ID NO: 6813; WAN024BU2_at; Start 94; Stop 118
cactatccagagttgatggatgtga

SEQ ID NO: 94359 - DNA, 25 bp, Artificial
  probe
  misc_feature (1)..(25): SEQ ID NO: 6813; WAN024BU2_at; Start 9; Stop 33
tgttctactttcactatctgaatgg

SEQ ID NO: 94360 - DNA, 25 bp, Artificial
  probe
  misc_feature (1)..(25): SEQ ID NO: 6813; WAN024BU2_at; Start 45; Stop 69
tatcaaggacacaatcacaaggcta

SEQ ID NO: 94361 - DNA, 25 bp, Artificial
  probe
  misc_feature (1)..(25): SEQ ID NO: 6813; WAN024BU2_at; Start 51; Stop 75
ggacacaatcacaaggctagtcgaa

SEQ ID NO: 94362 - DNA, 25 bp, Artificial
  probe
  misc_feature (1)..(25): SEQ ID NO: 6813; WAN024BU2_at; Start 129; Stop 153
cgaatttctaggaattaagtatgcc

SEQ ID NO: 94363 - DNA, 25 bp, Artificial
  probe
  misc_feature (1)..(25): SEQ ID NO: 7260; WAN024BU3_at; Start 272; Stop 296
ttatccgtgaggacttggacgagga

SEQ ID NO: 94364 - DNA, 25 bp, Artificial
  probe
  misc_feature (1)..(25): SEQ ID NO: 7260; WAN024BU3_at; Start 2; Stop 26
tgatgtttgatgacgaaccgtggtt

SEQ ID NO: 94365 - DNA, 25 bp, Artificial
  probe
  misc_feature (1)..(25): SEQ ID NO: 7260; WAN024BU3_at; Start 352; Stop 376
atgctggaagatatcgactacctca

SEQ ID NO: 94366 - DNA, 25 bp, Artificial
  probe
  misc_feature (1)..(25): SEQ ID NO: 7260; WAN024BU3_at; Start 58; Stop 82
tatgtaaattctagagatgctctgg

SEQ ID NO: 94367 - DNA, 25 bp, Artificial
  probe
  misc_feature (1)..(25): SEQ ID NO: 7260; WAN024BU3_at; Start 609; Stop 633
ggagccaagcactaataccaagatg

SEQ ID NO: 94368 - DNA, 25 bp, Artificial
  probe
  misc_feature (1)..(25): SEQ ID NO: 7260; WAN024BU3_at; Start 390; Stop 414
gattcatccaagctatgctcagtcg

SEQ ID NO: 94369 - DNA, 25 bp, Artificial
  probe
  misc_feature (1)..(25): SEQ ID NO: 7260; WAN024BU3_at; Start 73; Stop 97
gatgctctggcaaaacacgttgatg

SEQ ID NO: 94370 - DNA, 25 bp, Artificial
  probe
  misc_feature (1)..(25): SEQ ID NO: 7260; WAN024BU3_at; Start 446; Stop 470
cttgcttaggtggtattgatagtcc

SEQ ID NO: 94371 - DNA, 25 bp, Artificial
  probe
  misc_feature (1)..(25): SEQ ID NO: 7260; WAN024BU3_at; Start 147; Stop 171
tcagacagtcatcaacgaatcaggt

SEQ ID NO: 94372 - DNA, 25 bp, Artificial
  probe
  misc_feature (1)..(25): SEQ ID NO: 7260; WAN024BU3_at; Start 480; Stop 504
tgataagattttcgctcagtcggta

SEQ ID NO: 94373 - DNA, 25 bp, Artificial
  probe
  misc_feature (1)..(25): SEQ ID NO: 7260; WAN024BU3_at; Start 120; Stop 144
aatcgcgacggcaggtcagatgaga

SEQ ID NO: 94374 - DNA, 25 bp, Artificial
  probe
  misc_feature (1)..(25): SEQ ID NO: 7260; WAN024BU3_at; Start 258; Stop 282
caagcagggtggttttatccgtgag

SEQ ID NO: 94375 - DNA, 25 bp, Artificial
  probe
  misc_feature (1)..(25): SEQ ID NO: 7260; WAN024BU3_at; Start 370; Stop 394
tacctcaagagcgagcaaccgattc

SEQ ID NO: 94376 - DNA, 25 bp, Artificial
  probe
  misc_feature (1)..(25): SEQ ID NO: 7260; WAN024BU3_at; Start 429; Stop 453
caaagctcgtgtcgtggcttgctta

SEQ ID NO: 94377 - DNA, 25 bp, Artificial
  probe
  misc_feature (1)..(25): SEQ ID NO: 7260; WAN024BU3_at; Start 285; Stop 309
cttggacgaggatgcctttatcgct

SEQ ID NO: 94378 - DNA, 25 bp, Artificial
  probe
  misc_feature (1)..(25): SEQ ID NO: 7260; WAN024BU3_at; Start 563; Stop 587
tacccaagaagcatgcggatgccgc

SEQ ID NO: 94379 - DNA, 25 bp, Artificial
  probe
  misc_feature (1)..(25): SEQ ID NO: 7260; WAN024BU3_at; Start 580; Stop 604
gatgccgctcttgcttattggatga

SEQ ID NO: 94380 - DNA, 25 bp, Artificial
  probe
  misc_feature (1)..(25): SEQ ID NO: 7260; WAN024BU3_at; Start 496; Stop 520
cagtcggtatttagacaagctgaga

SEQ ID NO: 94381 - DNA, 25 bp, Artificial
  probe
  misc_feature (1)..(25): SEQ ID NO: 7260; WAN024BU3_at; Start 331; Stop 355
ttgcgggagcaacagactagcatgc

SEQ ID NO: 94382 - DNA, 25 bp, Artificial
  probe
  misc_feature (1)..(25): SEQ ID NO: 7260; WAN024BU3_at; Start 414; Stop 438
gctcctgaagaagcgcaaagctcgt

SEQ ID NO: 94383 - DNA, 25 bp, Artificial
  probe
  misc_feature (1)..(25): SEQ ID NO: 7260; WAN024BU3_at; Start 243; Stop 267
tttgccagctattcgcaagcagggt

SEQ ID NO: 94384 - DNA, 25 bp, Artificial
  probe
  misc_feature (1)..(25): SEQ ID NO: 7260; WAN024BU3_at; Start 210; Stop 234
taaggagttcaagcgttgggtgaca

SEQ ID NO: 94385 - DNA, 25 bp, Artificial
  probe
  misc_feature (1)..(25): SEQ ID NO: 7260; WAN024BU3_at; Start 315; Stop 339
tactggccagaagaaattgcgggag

SEQ ID NO: 94386 - DNA, 25 bp, Artificial
  probe
  misc_feature (1)..(25): SEQ ID NO: 7260; WAN024BU3_at; Start 595; Stop 619
tattggatgacgtgggagccaagca

SEQ ID NO: 94387 - DNA, 25 bp, Artificial
  probe
  misc_feature (1)..(25): SEQ ID NO: 7260; WAN024BU3_at; Start 548; Stop 572
gtcgctatgacttactacccaagaa

SEQ ID NO: 94388 - DNA, 25 bp, Artificial
  probe
  misc_feature (1)..(25): SEQ ID NO: 7260; WAN024BU3_at; Start 195; Stop 219
caagttgcctcaagctaaggagttc

SEQ ID NO: 94389 - DNA, 25 bp, Artificial
  probe
  misc_feature (1)..(25): SEQ ID NO: 7260; WAN024BU3_at; Start 642; Stop 666
gaaattgaactcatttgacgaaggg

SEQ ID NO: 94390 - DNA, 25 bp, Artificial
  probe
  misc_feature (1)..(25): SEQ ID NO: 7260; WAN024BU3_at; Start 29; Stop 53
tcgggaaagatatagcagagattct

SEQ ID NO: 94391 - DNA, 25 bp, Artificial
  probe
  misc_feature (1)..(25): SEQ ID NO: 7260; WAN024BU3_at; Start 463; Stop 487
gatagtcctgcttatgctgataaga

SEQ ID NO: 94392 - DNA, 25 bp, Artificial
  probe
  misc_feature (1)..(25): SEQ ID NO: 7260; WAN024BU3_at; Start 303; Stop 327
tatcgctctttttactggccagaag

SEQ ID NO: 94393 - DNA, 25 bp, Artificial
  probe
  misc_feature (1)..(25): SEQ ID NO: 7260; WAN024BU3_at; Start 180; Stop 204
tcttatcttatcaagcaagttgcct

SEQ ID NO: 94394 - DNA, 25 bp, Artificial
  probe
  misc_feature (1)..(25): SEQ ID NO: 7260; WAN024BU3_at; Start 511; Stop 535
caagctgagattgatttcaaggatc

SEQ ID NO: 94395 - DNA, 25 bp, Artificial
  probe
  misc_feature (1)..(25): SEQ ID NO: 7260; WAN024BU3_at; Start 102; Stop 126
tgataagctaacgtcgcaaatcgcg

SEQ ID NO: 94396 - DNA, 25 bp, Artificial
  probe
  misc_feature (1)..(25): SEQ ID NO: 7260; WAN024BU3_at; Start 228; Stop 252
ggtgacatcagaggttttgccagct

SEQ ID NO: 94397 - DNA, 25 bp, Artificial
  probe
  misc_feature (1)..(25): SEQ ID NO: 6911; WAN024BU4_at; Start 52; Stop 76
caagaggctttagcaaaagatattg

SEQ ID NO: 94398 - DNA, 25 bp, Artificial
  probe
  misc_feature (1)..(25): SEQ ID NO: 6911; WAN024BU4_at; Start 165; Stop 189
tctttcaaaagacgaagctttatct

SEQ ID NO: 94399 - DNA, 25 bp, Artificial
  probe
  misc_feature (1)..(25): SEQ ID NO: 6911; WAN024BU4_at; Start 72; Stop 96
tattgggattgataagagtacgttc

SEQ ID NO: 94400 - DNA, 25 bp, Artificial
  probe
  misc_feature (1)..(25): SEQ ID NO: 6911; WAN024BU4_at; Start 1; Stop 25
atggtaaatgtatcgaaattaaaag

SEQ ID NO: 94401 - DNA, 25 bp, Artificial
  probe
  misc_feature (1)..(25): SEQ ID NO: 6911; WAN024BU4_at; Start 112; Stop 136
caaaatggtagtttctctatacaag

SEQ ID NO: 94402 - DNA, 25 bp, Artificial
  probe
  misc_feature (1)..(25): SEQ ID NO: 6911; WAN024BU4_at; Start 45; Stop 69
tactactcaagaggctttagcaaaa

SEQ ID NO: 94403 - DNA, 25 bp, Artificial
  probe
  misc_feature (1)..(25): SEQ ID NO: 6911; WAN024BU4_at; Start 143; Stop 167
acttgattgtttcttccctcggtct

SEQ ID NO: 94404 - DNA, 25 bp, Artificial
  probe
  misc_feature (1)..(25): SEQ ID NO: 6911; WAN024BU4_at; Start 82; Stop 106
gataagagtacgttctatagaaaaa

SEQ ID NO: 94405 - DNA, 25 bp, Artificial
  probe
  misc_feature (1)..(25): SEQ ID NO: 6911; WAN024BU4_at; Start 131; Stop 155
tacaagaagtaaacttgattgtttc

SEQ ID NO: 94406 - DNA, 25 bp, Artificial
  probe
  misc_feature (1)..(25): SEQ ID NO: 6911; WAN024BU4_at; Start 170; Stop 194
caaaagacgaagctttatctatttt

SEQ ID NO: 94407 - DNA, 25 bp, Artificial
  probe
  misc_feature (1)..(25): SEQ ID NO: 6911; WAN024BU4_at; Start 48; Stop 72
tactcaagaggctttagcaaaagat

SEQ ID NO: 94408 - DNA, 25 bp, Artificial
  probe
  misc_feature (1)..(25): SEQ ID NO: 6911; WAN024BU4_at; Start 28; Stop 52
aaaattatcgaacgcaatactactc

SEQ ID NO: 94409 - DNA, 25 bp, Artificial
  probe
  misc_feature (1)..(25): SEQ ID NO: 6911; WAN024BU4_at; Start 97; Stop 121
tatagaaaaatgaaacaaaatggta

SEQ ID NO: 94410 - DNA, 25 bp, Artificial
  probe
  misc_feature (1)..(25): SEQ ID NO: 6911; WAN024BU4_at; Start 125; Stop 149
tctctatacaagaagtaaacttgat

SEQ ID NO: 94411 - DNA, 25 bp, Artificial
  probe
  misc_feature (1)..(25): SEQ ID NO: 6911; WAN024BU4_at; Start 115; Stop 139
aatggtagtttctctatacaagaag

SEQ ID NO: 94412 - DNA, 25 bp, Artificial
  probe
  misc_feature (1)..(25): SEQ ID NO: 6911; WAN024BU4_at; Start 159; Stop 183
cctcggtctttcaaaagacgaagct

SEQ ID NO: 94413 - DNA, 25 bp, Artificial
  probe
  misc_feature (1)..(25): SEQ ID NO: 6911; WAN024BU4_at; Start 42; Stop 66
caatactactcaagaggctttagca

SEQ ID NO: 94414 - DNA, 25 bp, Artificial
  probe
  misc_feature (1)..(25): SEQ ID NO: 6911; WAN024BU4_at; Start 146; Stop 170
tgattgtttcttccctcggtctttc

SEQ ID NO: 94415 - DNA, 25 bp, Artificial
  probe
  misc_feature (1)..(25): SEQ ID NO: 6911; WAN024BU4_at; Start 77; Stop 101
ggattgataagagtacgttctatag

SEQ ID NO: 94416 - DNA, 25 bp, Artificial
  probe
  misc_feature (1)..(25): SEQ ID NO: 6911; WAN024BU4_at; Start 58; Stop 82
gctttagcaaaagatattgggattg

SEQ ID NO: 94417 - DNA, 25 bp, Artificial
  probe
  misc_feature (1)..(25): SEQ ID NO: 6911; WAN024BU4_at; Start 50; Stop 74
ctcaagaggctttagcaaaagatat

SEQ ID NO: 94418 - DNA, 25 bp, Artificial
  probe
  misc_feature (1)..(25): SEQ ID NO: 6911; WAN024BU4_at; Start 37; Stop 61
gaacgcaatactactcaagaggctt

SEQ ID NO: 94419 - DNA, 25 bp, Artificial
  probe
  misc_feature (1)..(25): SEQ ID NO: 6911; WAN024BU4_at; Start 95; Stop 119
tctatagaaaaatgaaacaaaatgg

SEQ ID NO: 94420 - DNA, 25 bp, Artificial
  probe
  misc_feature (1)..(25): SEQ ID NO: 6911; WAN024BU4_at; Start 33; Stop 57
tatcgaacgcaatactactcaagag

SEQ ID NO: 94421 - DNA, 25 bp, Artificial
  probe
  misc_feature (1)..(25): SEQ ID NO: 6911; WAN024BU4_at; Start 87; Stop 111
gagtacgttctatagaaaaatgaaa

SEQ ID NO: 94422 - DNA, 25 bp, Artificial
  probe
  misc_feature (1)..(25): SEQ ID NO: 6911; WAN024BU4_at; Start 74; Stop 98
ttgggattgataagagtacgttcta

SEQ ID NO: 94423 - DNA, 25 bp, Artificial
  probe
  misc_feature (1)..(25): SEQ ID NO: 6911; WAN024BU4_at; Start 35; Stop 59
tcgaacgcaatactactcaagaggc

SEQ ID NO: 94424 - DNA, 25 bp, Artificial
  probe
  misc_feature (1)..(25): SEQ ID NO: 6911; WAN024BU4_at; Start 64; Stop 88
gcaaaagatattgggattgataaga

SEQ ID NO: 94425 - DNA, 25 bp, Artificial
  probe
  misc_feature (1)..(25): SEQ ID NO: 6911; WAN024BU4_at; Start 84; Stop 108
taagagtacgttctatagaaaaatg

SEQ ID NO: 94426 - DNA, 25 bp, Artificial
  probe
  misc_feature (1)..(25): SEQ ID NO: 6911; WAN024BU4_at; Start 25; Stop 49
ggaaaaattatcgaacgcaatacta

SEQ ID NO: 94427 - DNA, 25 bp, Artificial
  probe
  misc_feature (1)..(25): SEQ ID NO: 6911; WAN024BU4_at; Start 189; Stop 213
tattttttttagcgaaacagtcgca

SEQ ID NO: 94428 - DNA, 25 bp, Artificial
  probe
  misc_feature (1)..(25): SEQ ID NO: 6911; WAN024BU4_at; Start 55; Stop 79
gaggctttagcaaaagatattggga

SEQ ID NO: 94429 - DNA, 25 bp, Artificial
  probe
  misc_feature (1)..(25): SEQ ID NO: 6911; WAN024BU4_at; Start 40; Stop 64
cgcaatactactcaagaggctttag

SEQ ID NO: 94430 - DNA, 25 bp, Artificial
  probe
  misc_feature (1)..(25): SEQ ID NO: 6911; WAN024BU4_at; Start 118; Stop 142
ggtagtttctctatacaagaagtaa

SEQ ID NO: 94431 - DNA, 25 bp, Artificial
  probe
  misc_feature (1)..(25): SEQ ID NO: 6506; WAN024BU5_at; Start 98; Stop 122
ttaggtacgaaaaaggagatattga

SEQ ID NO: 94432 - DNA, 25 bp, Artificial
  probe
  misc_feature (1)..(25): SEQ ID NO: 6506; WAN024BU5_at; Start 301; Stop 325
tacgctaacgaacaattgaaagagc

SEQ ID NO: 94433 - DNA, 25 bp, Artificial
  probe
  misc_feature (1)..(25): SEQ ID NO: 6506; WAN024BU5_at; Start 28; Stop 52
cgtcgaaaagcgttgaaaatgtctg

SEQ ID NO: 94434 - DNA, 25 bp, Artificial
  probe
  misc_feature (1)..(25): SEQ ID NO: 6506; WAN024BU5_at; Start 159; Stop 183
caaattaaatgtatcacctggagac

SEQ ID NO: 94435 - DNA, 25 bp, Artificial
  probe
  misc_feature (1)..(25): SEQ ID NO: 6506; WAN024BU5_at; Start 648; Stop 672
caaatataaagataaattcgcacca

SEQ ID NO: 94436 - DNA, 25 bp, Artificial
  probe
  misc_feature (1)..(25): SEQ ID NO: 6506; WAN024BU5_at; Start 268; Stop 292
ctatcaactccgagaaaacaaaagg

SEQ ID NO: 94437 - DNA, 25 bp, Artificial
  probe
  misc_feature (1)..(25): SEQ ID NO: 6506; WAN024BU5_at; Start 413; Stop 437
tcaacgatgggaactatgacactgt

SEQ ID NO: 94438 - DNA, 25 bp, Artificial
  probe
  misc_feature (1)..(25): SEQ ID NO: 6506; WAN024BU5_at; Start 170; Stop 194
tatcacctggagacttgatgggatg

SEQ ID NO: 94439 - DNA, 25 bp, Artificial
  probe
  misc_feature (1)..(25): SEQ ID NO: 6506; WAN024BU5_at; Start 666; Stop 690
cgcaccatttgaagaagatccaagg

SEQ ID NO: 94440 - DNA, 25 bp, Artificial
  probe
  misc_feature (1)..(25): SEQ ID NO: 6506; WAN024BU5_at; Start 5; Stop 29
atgtcggagaaagaataaaacaacg

SEQ ID NO: 94441 - DNA, 25 bp, Artificial
  probe
  misc_feature (1)..(25): SEQ ID NO: 6506; WAN024BU5_at; Start 43; Stop 67
aaaatgtctgcggacgagcttgcag

SEQ ID NO: 94442 - DNA, 25 bp, Artificial
  probe
  misc_feature (1)..(25): SEQ ID NO: 6506; WAN024BU5_at; Start 57; Stop 81
cgagcttgcagaaagtgtaggtgtc

SEQ ID NO: 94443 - DNA, 25 bp, Artificial
  probe
  misc_feature (1)..(25): SEQ ID NO: 6506; WAN024BU5_at; Start 186; Stop 210
gatgggatgggaagacaatcaacaa

SEQ ID NO: 94444 - DNA, 25 bp, Artificial
  probe
  misc_feature (1)..(25): SEQ ID NO: 6506; WAN024BU5_at; Start 67; Stop 91
gaaagtgtaggtgtctctcgttcta

SEQ ID NO: 94445 - DNA, 25 bp, Artificial
  probe
  misc_feature (1)..(25): SEQ ID NO: 6506; WAN024BU5_at; Start 684; Stop 708
tccaaggattattgggaaaatagtc

SEQ ID NO: 94446 - DNA, 25 bp, Artificial
  probe
  misc_feature (1)..(25): SEQ ID NO: 6506; WAN024BU5_at; Start 619; Stop 643
gacggtcttagactcgtctctatca

SEQ ID NO: 94447 - DNA, 25 bp, Artificial
  probe
  misc_feature (1)..(25): SEQ ID NO: 6506; WAN024BU5_at; Start 565; Stop 589
tatgcagttgactgggatggtcaaa

SEQ ID NO: 94448 - DNA, 25 bp, Artificial
  probe
  misc_feature (1)..(25): SEQ ID NO: 6506; WAN024BU5_at; Start 552; Stop 576
cgatggtgccatttatgcagttgac

SEQ ID NO: 94449 - DNA, 25 bp, Artificial
  probe
  misc_feature (1)..(25): SEQ ID NO: 6506; WAN024BU5_at; Start 258; Stop 282
ggttgtcaaactatcaactccgaga

SEQ ID NO: 94450 - DNA, 25 bp, Artificial
  probe
  misc_feature (1)..(25): SEQ ID NO: 6506; WAN024BU5_at; Start 241; Stop 265
cacaaaattactgaaaaggttgtca

SEQ ID NO: 94451 - DNA, 25 bp, Artificial
  probe
  misc_feature (1)..(25): SEQ ID NO: 6506; WAN024BU5_at; Start 499; Stop 523
cctaagtacatgaatggagaggtcg

SEQ ID NO: 94452 - DNA, 25 bp, Artificial
  probe
  misc_feature (1)..(25): SEQ ID NO: 6506; WAN024BU5_at; Start 699; Stop 723
gaaaatagtcggaaacttcatgcca

SEQ ID NO: 94453 - DNA, 25 bp, Artificial
  probe
  misc_feature (1)..(25): SEQ ID NO: 6506; WAN024BU5_at; Start 455; Stop 479
tagaccacgattttgcttcttgggt

SEQ ID NO: 94454 - DNA, 25 bp, Artificial
  probe
  misc_feature (1)..(25): SEQ ID NO: 6506; WAN024BU5_at; Start 442; Stop 466
tacgacaaagacctagaccacgatt

SEQ ID NO: 94455 - DNA, 25 bp, Artificial
  probe
  misc_feature (1)..(25): SEQ ID NO: 6506; WAN024BU5_at; Start 469; Stop 493
gcttcttgggttttcggagattcca

SEQ ID NO: 94456 - DNA, 25 bp, Artificial
  probe
  misc_feature (1)..(25): SEQ ID NO: 6506; WAN024BU5_at; Start 115; Stop 139
gatattgaaaaagttggacctgaag

SEQ ID NO: 94457 - DNA, 25 bp, Artificial
  probe
  misc_feature (1)..(25): SEQ ID NO: 6506; WAN024BU5_at; Start 378; Stop 402
tgaaaaactttcagctggtactgga

SEQ ID NO: 94458 - DNA, 25 bp, Artificial
  probe
  misc_feature (1)..(25): SEQ ID NO: 6506; WAN024BU5_at; Start 484; Stop 508
ggagattccatggagcctaagtaca

SEQ ID NO: 94459 - DNA, 25 bp, Artificial
  probe
  misc_feature (1)..(25): SEQ ID NO: 6506; WAN024BU5_at; Start 427; Stop 451
tatgacactgttttttacgacaaag

SEQ ID NO: 94460 - DNA, 25 bp, Artificial
  probe
  misc_feature (1)..(25): SEQ ID NO: 6506; WAN024BU5_at; Start 399; Stop 423
tggattctcatacttcaacgatggg

SEQ ID NO: 94461 - DNA, 25 bp, Artificial
  probe
  misc_feature (1)..(25): SEQ ID NO: 6506; WAN024BU5_at; Start 537; Stop 561
aacaggttttgactacgatggtgcc

SEQ ID NO: 94462 - DNA, 25 bp, Artificial
  probe
  misc_feature (1)..(25): SEQ ID NO: 6506; WAN024BU5_at; Start 515; Stop 539
gagaggtcgttctcatcaaagaaac

SEQ ID NO: 94463 - DNA, 25 bp, Artificial
  probe
  misc_feature (1)..(25): SEQ ID NO: 6506; WAN024BU5_at; Start 204; Stop 228
tcaacaagaattgaaaatcccaacc

SEQ ID NO: 94464 - DNA, 25 bp, Artificial
  probe
  misc_feature (1)..(25): SEQ ID NO: 6506; WAN024BU5_at; Start 338; Stop 362
taatcacaattgaggaaaagctttt

SEQ ID NO: 94465 - DNA, 25 bp, Artificial
  probe
  misc_feature (1)..(25): SEQ ID NO: 6338; WAN024BU6_at; Start 442; Stop 466
tacagtccacagattgatacaattg

SEQ ID NO: 94466 - DNA, 25 bp, Artificial
  probe
  misc_feature (1)..(25): SEQ ID NO: 6338; WAN024BU6_at; Start 133; Stop 157
ccaaagaaagctatgtataacaagg

SEQ ID NO: 94467 - DNA, 25 bp, Artificial
  probe
  misc_feature (1)..(25): SEQ ID NO: 6338; WAN024BU6_at; Start 655; Stop 679
ttaccagaaccttcaaatccgcatg

SEQ ID NO: 94468 - DNA, 25 bp, Artificial
  probe
  misc_feature (1)..(25): SEQ ID NO: 6338; WAN024BU6_at; Start 286; Stop 310
gaatataaagaagctggacttgtct

SEQ ID NO: 94469 - DNA, 25 bp, Artificial
  probe
  misc_feature (1)..(25): SEQ ID NO: 6338; WAN024BU6_at; Start 427; Stop 451
cagaaagttgaaaattacagtccac

SEQ ID NO: 94470 - DNA, 25 bp, Artificial
  probe
  misc_feature (1)..(25): SEQ ID NO: 6338; WAN024BU6_at; Start 780; Stop 804
cagatatgatgcaatccttacaggt

SEQ ID NO: 94471 - DNA, 25 bp, Artificial
  probe
  misc_feature (1)..(25): SEQ ID NO: 6338; WAN024BU6_at; Start 219; Stop 243
gaaagtagtcaacaacaaacagcaa

SEQ ID NO: 94472 - DNA, 25 bp, Artificial
  probe
  misc_feature (1)..(25): SEQ ID NO: 6338; WAN024BU6_at; Start 825; Stop 849
cctaaatatcgaaactgagagagtc

SEQ ID NO: 94473 - DNA, 25 bp, Artificial
  probe
  misc_feature (1)..(25): SEQ ID NO: 6338; WAN024BU6_at; Start 410; Stop 434
caaagcgagagaaaaagcagaaagt

SEQ ID NO: 94474 - DNA, 25 bp, Artificial
  probe
  misc_feature (1)..(25): SEQ ID NO: 6338; WAN024BU6_at; Start 724; Stop 748
tacttaccagctgtgatcgcatcac

SEQ ID NO: 94475 - DNA, 25 bp, Artificial
  probe
  misc_feature (1)..(25): SEQ ID NO: 6338; WAN024BU6_at; Start 804; Stop 828
tagaggaggaccatataaaacccta

SEQ ID NO: 94476 - DNA, 25 bp, Artificial
  probe
  misc_feature (1)..(25): SEQ ID NO: 6338; WAN024BU6_at; Start 54; Stop 78
tactagtaaatggaagagacaggca

SEQ ID NO: 94477 - DNA, 25 bp, Artificial
  probe
  misc_feature (1)..(25): SEQ ID NO: 6338; WAN024BU6_at; Start 881; Stop 905
tagatttaacagtatggcgtcttgc

SEQ ID NO: 94478 - DNA, 25 bp, Artificial
  probe
  misc_feature (1)..(25): SEQ ID NO: 6338; WAN024BU6_at; Start 541; Stop 565
tccaagggtgtccattattttggga

SEQ ID NO: 94479 - DNA, 25 bp, Artificial
  probe
  misc_feature (1)..(25): SEQ ID NO: 6338; WAN024BU6_at; Start 80; Stop 104
aaaaagcccttatccctggctatgg

SEQ ID NO: 94480 - DNA, 25 bp, Artificial
  probe
  misc_feature (1)..(25): SEQ ID NO: 6338; WAN024BU6_at; Start 525; Stop 549
tgcagctgattttctttccaagggt

SEQ ID NO: 94481 - DNA, 25 bp, Artificial
  probe
  misc_feature (1)..(25): SEQ ID NO: 6338; WAN024BU6_at; Start 795; Stop 819
ccttacaggtagaggaggaccatat

SEQ ID NO: 94482 - DNA, 25 bp, Artificial
  probe
  misc_feature (1)..(25): SEQ ID NO: 6338; WAN024BU6_at; Start 491; Stop 515
tgggaacaaattatcatcaagaaga

SEQ ID NO: 94483 - DNA, 25 bp, Artificial
  probe
  misc_feature (1)..(25): SEQ ID NO: 6338; WAN024BU6_at; Start 302; Stop 326
gacttgtctttatggttttaggtgc

SEQ ID NO: 94484 - DNA, 25 bp, Artificial
  probe
  misc_feature (1)..(25): SEQ ID NO: 6338; WAN024BU6_at; Start 670; Stop 694
aatccgcatgataaaaatgctgtca

SEQ ID NO: 94485 - DNA, 25 bp, Artificial
  probe
  misc_feature (1)..(25): SEQ ID NO: 6338; WAN024BU6_at; Start 709; Stop 733
aatatctttgttggatacttaccag

SEQ ID NO: 94486 - DNA, 25 bp, Artificial
  probe
  misc_feature (1)..(25): SEQ ID NO: 6338; WAN024BU6_at; Start 256; Stop 280
tcgaacggcaaaaagcaacacactc

SEQ ID NO: 94487 - DNA, 25 bp, Artificial
  probe
  misc_feature (1)..(25): SEQ ID NO: 6338; WAN024BU6_at; Start 622; Stop 646
tacaataaattgaaaacagtagacg

SEQ ID NO: 94488 - DNA, 25 bp, Artificial
  probe
  misc_feature (1)..(25): SEQ ID NO: 6338; WAN024BU6_at; Start 163; Stop 187
cataagacaacctttggactttcgg

SEQ ID NO: 94489 - DNA, 25 bp, Artificial
  probe
  misc_feature (1)..(25): SEQ ID NO: 6338; WAN024BU6_at; Start 241; Stop 265
caatctattcttgcctcgaacggca

SEQ ID NO: 94490 - DNA, 25 bp, Artificial
  probe
  misc_feature (1)..(25): SEQ ID NO: 6338; WAN024BU6_at; Start 93; Stop 117
ccctggctatggtaagaaagggatg

SEQ ID NO: 94491 - DNA, 25 bp, Artificial
  probe
  misc_feature (1)..(25): SEQ ID NO: 6338; WAN024BU6_at; Start 591; Stop 615
tatgcttgaaacatataaacctgtt

SEQ ID NO: 94492 - DNA, 25 bp, Artificial
  probe
  misc_feature (1)..(25): SEQ ID NO: 6338; WAN024BU6_at; Start 11; Stop 35
gaatgagaaaaccaagtctgaccag

SEQ ID NO: 94493 - DNA, 25 bp, Artificial
  probe
  misc_feature (1)..(25): SEQ ID NO: 6338; WAN024BU6_at; Start 26; Stop 50
gtctgaccagaagtttaaaagctag

SEQ ID NO: 94494 - DNA, 25 bp, Artificial
  probe
  misc_feature (1)..(25): SEQ ID NO: 6338; WAN024BU6_at; Start 346; Stop 370
ccacctctcggcttcttcttgttta

SEQ ID NO: 94495 - DNA, 25 bp, Artificial
  probe
  misc_feature (1)..(25): SEQ ID NO: 6338; WAN024BU6_at; Start 393; Stop 417
tattggtcgtttaactgcaaagcga

SEQ ID NO: 94496 - DNA, 25 bp, Artificial
  probe
  misc_feature (1)..(25): SEQ ID NO: 6338; WAN024BU6_at; Start 843; Stop 867
gagagtcgtttctcgtaaaagtgac

SEQ ID NO: 94497 - DNA, 25 bp, Artificial
  probe
  misc_feature (1)..(25): SEQ ID NO: 6338; WAN024BU6_at; Start 638; Stop 662
cagtagacgttcaactattaccaga

SEQ ID NO: 94498 - DNA, 25 bp, Artificial
  probe
  misc_feature (1)..(25): SEQ ID NO: 6338; WAN024BU6_at; Start 505; Stop 529
catcaagaagaagctgagattgcag

SEQ ID NO: 94499 - DNA, 25 bp, Artificial
  probe
  misc_feature (1)..(25): SEQ ID NO: 7577; WAN024BU7_at; Start 38; Stop 62
caaagtttgattgtgaagctcaccc

SEQ ID NO: 94500 - DNA, 25 bp, Artificial
  probe
  misc_feature (1)..(25): SEQ ID NO: 7577; WAN024BU7_at; Start 36; Stop 60
gccaaagtttgattgtgaagctcac

SEQ ID NO: 94501 - DNA, 25 bp, Artificial
  probe
  misc_feature (1)..(25): SEQ ID NO: 7577; WAN024BU7_at; Start 58; Stop 82
cacccttataaaaaatcagccatta

SEQ ID NO: 94502 - DNA, 25 bp, Artificial
  probe
  misc_feature (1)..(25): SEQ ID NO: 7577; WAN024BU7_at; Start 99; Stop 123
ataccctattttacaccatgaaagg

SEQ ID NO: 94503 - DNA, 25 bp, Artificial
  probe
  misc_feature (1)..(25): SEQ ID NO: 7577; WAN024BU7_at; Start 28; Stop 52
tctccctcgccaaagtttgattgtg

SEQ ID NO: 94504 - DNA, 25 bp, Artificial
  probe
  misc_feature (1)..(25): SEQ ID NO: 7577; WAN024BU7_at; Start 57; Stop 81
tcacccttataaaaaatcagccatt

SEQ ID NO: 94505 - DNA, 25 bp, Artificial
  probe
  misc_feature (1)..(25): SEQ ID NO: 7577; WAN024BU7_at; Start 70; Stop 94
aaatcagccattaaaaaggcctctt

SEQ ID NO: 94506 - DNA, 25 bp, Artificial
  probe
  misc_feature (1)..(25): SEQ ID NO: 7577; WAN024BU7_at; Start 55; Stop 79
gctcacccttataaaaaatcagcca

SEQ ID NO: 94507 - DNA, 25 bp, Artificial
  probe
  misc_feature (1)..(25): SEQ ID NO: 7577; WAN024BU7_at; Start 43; Stop 67
tttgattgtgaagctcacccttata

SEQ ID NO: 94508 - DNA, 25 bp, Artificial
  probe
  misc_feature (1)..(25): SEQ ID NO: 7577; WAN024BU7_at; Start 73; Stop 97
tcagccattaaaaaggcctcttttc

SEQ ID NO: 94509 - DNA, 25 bp, Artificial
  probe
  misc_feature (1)..(25): SEQ ID NO: 7577; WAN024BU7_at; Start 29; Stop 53
ctccctcgccaaagtttgattgtga

SEQ ID NO: 94510 - DNA, 25 bp, Artificial
  probe
  misc_feature (1)..(25): SEQ ID NO: 7577; WAN024BU7_at; Start 45; Stop 69
tgattgtgaagctcacccttataaa

SEQ ID NO: 94511 - DNA, 25 bp, Artificial
  probe
  misc_feature (1)..(25): SEQ ID NO: 7577; WAN024BU7_at; Start 69; Stop 93
aaaatcagccattaaaaaggcctct

SEQ ID NO: 94512 - DNA, 25 bp, Artificial
  probe
  misc_feature (1)..(25): SEQ ID NO: 7577; WAN024BU7_at; Start 26; Stop 50
aatctccctcgccaaagtttgattg

SEQ ID NO: 94513 - DNA, 25 bp, Artificial
  probe
  misc_feature (1)..(25): SEQ ID NO: 7577; WAN024BU7_at; Start 32; Stop 56
cctcgccaaagtttgattgtgaagc

SEQ ID NO: 94514 - DNA, 25 bp, Artificial
  probe
  misc_feature (1)..(25): SEQ ID NO: 7577; WAN024BU7_at; Start 108; Stop 132
tttacaccatgaaaggggtgatgtc

SEQ ID NO: 94515 - DNA, 25 bp, Artificial
  probe
  misc_feature (1)..(25): SEQ ID NO: 7577; WAN024BU7_at; Start 98; Stop 122
tataccctattttacaccatgaaag

SEQ ID NO: 94516 - DNA, 25 bp, Artificial
  probe
  misc_feature (1)..(25): SEQ ID NO: 7577; WAN024BU7_at; Start 34; Stop 58
tcgccaaagtttgattgtgaagctc

SEQ ID NO: 94517 - DNA, 25 bp, Artificial
  probe
  misc_feature (1)..(25): SEQ ID NO: 7577; WAN024BU7_at; Start 35; Stop 59
cgccaaagtttgattgtgaagctca

SEQ ID NO: 94518 - DNA, 25 bp, Artificial
  probe
  misc_feature (1)..(25): SEQ ID NO: 7577; WAN024BU7_at; Start 74; Stop 98
cagccattaaaaaggcctcttttct

SEQ ID NO: 94519 - DNA, 25 bp, Artificial
  probe
  misc_feature (1)..(25): SEQ ID NO: 7577; WAN024BU7_at; Start 50; Stop 74
gtgaagctcacccttataaaaaatc

SEQ ID NO: 94520 - DNA, 25 bp, Artificial
  probe
  misc_feature (1)..(25): SEQ ID NO: 7577; WAN024BU7_at; Start 48; Stop 72
ttgtgaagctcacccttataaaaaa

SEQ ID NO: 94521 - DNA, 25 bp, Artificial
  probe
  misc_feature (1)..(25): SEQ ID NO: 7577; WAN024BU7_at; Start 31; Stop 55
ccctcgccaaagtttgattgtgaag

SEQ ID NO: 94522 - DNA, 25 bp, Artificial
  probe
  misc_feature (1)..(25): SEQ ID NO: 7577; WAN024BU7_at; Start 52; Stop 76
gaagctcacccttataaaaaatcag

SEQ ID NO: 94523 - DNA, 25 bp, Artificial
  probe
  misc_feature (1)..(25): SEQ ID NO: 7577; WAN024BU7_at; Start 123; Stop 147
gggtgatgtcaatattctcaatgtt

SEQ ID NO: 94524 - DNA, 25 bp, Artificial
  probe
  misc_feature (1)..(25): SEQ ID NO: 7577; WAN024BU7_at; Start 42; Stop 66
gtttgattgtgaagctcacccttat

SEQ ID NO: 94525 - DNA, 25 bp, Artificial
  probe
  misc_feature (1)..(25): SEQ ID NO: 7577; WAN024BU7_at; Start 30; Stop 54
tccctcgccaaagtttgattgtgaa

SEQ ID NO: 94526 - DNA, 25 bp, Artificial
  probe
  misc_feature (1)..(25): SEQ ID NO: 7577; WAN024BU7_at; Start 41; Stop 65
agtttgattgtgaagctcaccctta

SEQ ID NO: 94527 - DNA, 25 bp, Artificial
  probe
  misc_feature (1)..(25): SEQ ID NO: 7577; WAN024BU7_at; Start 39; Stop 63
aaagtttgattgtgaagctcaccct

SEQ ID NO: 94528 - DNA, 25 bp, Artificial
  probe
  misc_feature (1)..(25): SEQ ID NO: 7577; WAN024BU7_at; Start 37; Stop 61
ccaaagtttgattgtgaagctcacc

SEQ ID NO: 94529 - DNA, 25 bp, Artificial
  probe
  misc_feature (1)..(25): SEQ ID NO: 7577; WAN024BU7_at; Start 23; Stop 47
cacaatctccctcgccaaagtttga

SEQ ID NO: 94530 - DNA, 25 bp, Artificial
  probe
  misc_feature (1)..(25): SEQ ID NO: 7577; WAN024BU7_at; Start 46; Stop 70
gattgtgaagctcacccttataaaa

SEQ ID NO: 94531 - DNA, 25 bp, Artificial
  probe
  misc_feature (1)..(25): SEQ ID NO: 7577; WAN024BU7_at; Start 96; Stop 120
tctataccctattttacaccatgaa

SEQ ID NO: 94532 - DNA, 25 bp, Artificial
  probe
  misc_feature (1)..(25): SEQ ID NO: 7577; WAN024BU7_at; Start 71; Stop 95
aatcagccattaaaaaggcctcttt

SEQ ID NO: 94533 - DNA, 25 bp, Artificial
  probe
  misc_feature (1)..(25): SEQ ID NO: 7106; WAN024BU8_at; Start 1115; Stop 1139
tagaggacgaacttgctgaagcgac

SEQ ID NO: 94534 - DNA, 25 bp, Artificial
  probe
  misc_feature (1)..(25): SEQ ID NO: 7106; WAN024BU8_at; Start 695; Stop 719
ctcagaacgacagcggacgggctat

SEQ ID NO: 94535 - DNA, 25 bp, Artificial
  probe
  misc_feature (1)..(25): SEQ ID NO: 7106; WAN024BU8_at; Start 526; Stop 550
ggccagagtgatatccctgctgcaa

SEQ ID NO: 94536 - DNA, 25 bp, Artificial
  probe
  misc_feature (1)..(25): SEQ ID NO: 7106; WAN024BU8_at; Start 1080; Stop 1104
tacaaaggtttatatgacggatcgt

SEQ ID NO: 94537 - DNA, 25 bp, Artificial
  probe
  misc_feature (1)..(25): SEQ ID NO: 7106; WAN024BU8_at; Start 804; Stop 828
ccttgatgatatcggaacagacctg

SEQ ID NO: 94538 - DNA, 25 bp, Artificial
  probe
  misc_feature (1)..(25): SEQ ID NO: 7106; WAN024BU8_at; Start 960; Stop 984
caatctagtgaatgaagcaacagga

SEQ ID NO: 94539 - DNA, 25 bp, Artificial
  probe
  misc_feature (1)..(25): SEQ ID NO: 7106; WAN024BU8_at; Start 990; Stop 1014
tgtaacacctcacatgatgcgccac

SEQ ID NO: 94540 - DNA, 25 bp, Artificial
  probe
  misc_feature (1)..(25): SEQ ID NO: 7106; WAN024BU8_at; Start 874; Stop 898
ggaattatcaaggaacagcacaagg

SEQ ID NO: 94541 - DNA, 25 bp, Artificial
  probe
  misc_feature (1)..(25): SEQ ID NO: 7106; WAN024BU8_at; Start 55; Stop 79
tattactatgaaactgccaaaggca

SEQ ID NO: 94542 - DNA, 25 bp, Artificial
  probe
  misc_feature (1)..(25): SEQ ID NO: 7106; WAN024BU8_at; Start 1020; Stop 1044
cacgactcaaagcattattgcaggg

SEQ ID NO: 94543 - DNA, 25 bp, Artificial
  probe
  misc_feature (1)..(25): SEQ ID NO: 7106; WAN024BU8_at; Start 922; Stop 946
ggtggtctcatcaatccaaatcagc

SEQ ID NO: 94544 - DNA, 25 bp, Artificial
  probe
  misc_feature (1)..(25): SEQ ID NO: 7106; WAN024BU8_at; Start 1005; Stop 1029
gatgcgccacttcttcacgactcaa

SEQ ID NO: 94545 - DNA, 25 bp, Artificial
  probe
  misc_feature (1)..(25): SEQ ID NO: 7106; WAN024BU8_at; Start 382; Stop 406
gagtatgaactctttatcgctgaaa

SEQ ID NO: 94546 - DNA, 25 bp, Artificial
  probe
  misc_feature (1)..(25): SEQ ID NO: 7106; WAN024BU8_at; Start 784; Stop 808
gattcagagcgatatgtctgccttg

SEQ ID NO: 94547 - DNA, 25 bp, Artificial
  probe
  misc_feature (1)..(25): SEQ ID NO: 7106; WAN024BU8_at; Start 680; Stop 704
gtccaatggacatcactcagaacga

SEQ ID NO: 94548 - DNA, 25 bp, Artificial
  probe
  misc_feature (1)..(25): SEQ ID NO: 7106; WAN024BU8_at; Start 905; Stop 929
taactatcaacgagaaaggtggtct

SEQ ID NO: 94549 - DNA, 25 bp, Artificial
  probe
  misc_feature (1)..(25): SEQ ID NO: 7106; WAN024BU8_at; Start 1095; Stop 1119
gacggatcgttacaatcaagtagag

SEQ ID NO: 94550 - DNA, 25 bp, Artificial
  probe
  misc_feature (1)..(25): SEQ ID NO: 7106; WAN024BU8_at; Start 767; Stop 791
gagggcttaaaacgaaggattcaga

SEQ ID NO: 94551 - DNA, 25 bp, Artificial
  probe
  misc_feature (1)..(25): SEQ ID NO: 7106; WAN024BU8_at; Start 1051; Stop 1075
cttgaacaattaagccaggcgctgg

SEQ ID NO: 94552 - DNA, 25 bp, Artificial
  probe
  misc_feature (1)..(25): SEQ ID NO: 7106; WAN024BU8_at; Start 261; Stop 285
tgaaaagagattgtcaacagggcgc

SEQ ID NO: 94553 - DNA, 25 bp, Artificial
  probe
  misc_feature (1)..(25): SEQ ID NO: 7106; WAN024BU8_at; Start 170; Stop 194
cagccttagtagagcttgagcaaca

SEQ ID NO: 94554 - DNA, 25 bp, Artificial
  probe
  misc_feature (1)..(25): SEQ ID NO: 7106; WAN024BU8_at; Start 543; Stop 567
tgctgcaaacaagaaagtgactctc

SEQ ID NO: 94555 - DNA, 25 bp, Artificial
  probe
  misc_feature (1)..(25): SEQ ID NO: 7106; WAN024BU8_at; Start 336; Stop 360
caaggcaaagtttggttctaccctg

SEQ ID NO: 94556 - DNA, 25 bp, Artificial
  probe
  misc_feature (1)..(25): SEQ ID NO: 7106; WAN024BU8_at; Start 487; Stop 511
ggaaatctgctctcaaatcgcttga

SEQ ID NO: 94557 - DNA, 25 bp, Artificial
  probe
  misc_feature (1)..(25): SEQ ID NO: 7106; WAN024BU8_at; Start 574; Stop 598
ttcaagacttggatagcaaaggcag

SEQ ID NO: 94558 - DNA, 25 bp, Artificial
  probe
  misc_feature (1)..(25): SEQ ID NO: 7106; WAN024BU8_at; Start 710; Stop 734
gacgggctatactgcatcttagaga

SEQ ID NO: 94559 - DNA, 25 bp, Artificial
  probe
  misc_feature (1)..(25): SEQ ID NO: 7106; WAN024BU8_at; Start 606; Stop 630
tatgccaaaacaattctacgctctg

SEQ ID NO: 94560 - DNA, 25 bp, Artificial
  probe
  misc_feature (1)..(25): SEQ ID NO: 7106; WAN024BU8_at; Start 472; Stop 496
gatgccgtcaaaaatggaaatctgc

SEQ ID NO: 94561 - DNA, 25 bp, Artificial
  probe
  misc_feature (1)..(25): SEQ ID NO: 7106; WAN024BU8_at; Start 511; Stop 535
aaaggtgttttcatcggccagagtg

SEQ ID NO: 94562 - DNA, 25 bp, Artificial
  probe
  misc_feature (1)..(25): SEQ ID NO: 7106; WAN024BU8_at; Start 71; Stop 95
ccaaaggcaagcgatactatgtcag

SEQ ID NO: 94563 - DNA, 25 bp, Artificial
  probe
  misc_feature (1)..(25): SEQ ID NO: 7106; WAN024BU8_at; Start 976; Stop 1000
gcaacaggattgcatgtaacacctc

SEQ ID NO: 94564 - DNA, 25 bp, Artificial
  probe
  misc_feature (1)..(25): SEQ ID NO: 7106; WAN024BU8_at; Start 729; Stop 753
tagagacagtcgaagcaaccagacc

SEQ ID NO: 94565 - DNA, 25 bp, Artificial
  probe
  misc_feature (1)..(25): SEQ ID NO: 7106; WAN024BU8_at; Start 403; Stop 427
gaaaagttgcagaaccataccagat

SEQ ID NO: 94566 - DNA, 25 bp, Artificial
  probe
  misc_feature (1)..(25): SEQ ID NO: 7106; WAN024BU8_at; Start 275; Stop 299
caacagggcgctggaatgacacttc

SEQ ID NO: 94567 - DNA, 25 bp, Artificial
  probe
  misc_feature (1)..(25): SEQ ID NO: 6795; WAN024BU9_at; Start 174; Stop 198
ccccattgtagagcattttgttgac

SEQ ID NO: 94568 - DNA, 25 bp, Artificial
  probe
  misc_feature (1)..(25): SEQ ID NO: 6795; WAN024BU9_at; Start 263; Stop 287
gttacgcttgttaccttattgtcca

SEQ ID NO: 94569 - DNA, 25 bp, Artificial
  probe
  misc_feature (1)..(25): SEQ ID NO: 6795; WAN024BU9_at; Start 349; Stop 373
cgtcaacaagagctacaagaaaact

SEQ ID NO: 94570 - DNA, 25 bp, Artificial
  probe
  misc_feature (1)..(25): SEQ ID NO: 6795; WAN024BU9_at; Start 198; Stop 222
cgtcaacaagtcaattccaaacggt

SEQ ID NO: 94571 - DNA, 25 bp, Artificial
  probe
  misc_feature (1)..(25): SEQ ID NO: 6795; WAN024BU9_at; Start 541; Stop 565
cataacctcaaagaactaaacgaag

SEQ ID NO: 94572 - DNA, 25 bp, Artificial
  probe
  misc_feature (1)..(25): SEQ ID NO: 6795; WAN024BU9_at; Start 435; Stop 459
taaatcattatctgagtctgctggc

SEQ ID NO: 94573 - DNA, 25 bp, Artificial
  probe
  misc_feature (1)..(25): SEQ ID NO: 6795; WAN024BU9_at; Start 748; Stop 772
gagaatctccctgctcctcgtgaaa

SEQ ID NO: 94574 - DNA, 25 bp, Artificial
  probe
  misc_feature (1)..(25): SEQ ID NO: 6795; WAN024BU9_at; Start 41; Stop 65
tcaaacacatagacgaaaatggagt

SEQ ID NO: 94575 - DNA, 25 bp, Artificial
  probe
  misc_feature (1)..(25): SEQ ID NO: 6795; WAN024BU9_at; Start 642; Stop 666
tctacgacgtagaaacataaaaggc

SEQ ID NO: 94576 - DNA, 25 bp, Artificial
  probe
  misc_feature (1)..(25): SEQ ID NO: 6795; WAN024BU9_at; Start 665; Stop 689
gcgaagatctcgcaaatgataccca

SEQ ID NO: 94577 - DNA, 25 bp, Artificial
  probe
  misc_feature (1)..(25): SEQ ID NO: 6795; WAN024BU9_at; Start 396; Stop 420
gaaacgccttgctatccgtgacgaa

SEQ ID NO: 94578 - DNA, 25 bp, Artificial
  probe
  misc_feature (1)..(25): SEQ ID NO: 6795; WAN024BU9_at; Start 157; Stop 181
tgcgataccgctaaaaaccccattg

SEQ ID NO: 94579 - DNA, 25 bp, Artificial
  probe
  misc_feature (1)..(25): SEQ ID NO: 6795; WAN024BU9_at; Start 2; Stop 26
tggaactccaacagtacgatgaatt

SEQ ID NO: 94580 - DNA, 25 bp, Artificial
  probe
  misc_feature (1)..(25): SEQ ID NO: 6795; WAN024BU9_at; Start 610; Stop 634
aatttattccgtgccactcagaccg

SEQ ID NO: 94581 - DNA, 25 bp, Artificial
  probe
  misc_feature (1)..(25): SEQ ID NO: 6795; WAN024BU9_at; Start 817; Stop 841
gatgataataaccaactttcgctct

SEQ ID NO: 94582 - DNA, 25 bp, Artificial
  probe
  misc_feature (1)..(25): SEQ ID NO: 6795; WAN024BU9_at; Start 681; Stop 705
tgatacccatttcaacgtaggccga

SEQ ID NO: 94583 - DNA, 25 bp, Artificial
  probe
  misc_feature (1)..(25): SEQ ID NO: 6795; WAN024BU9_at; Start 278; Stop 302
ttattgtccaaaatggtgacccacg

SEQ ID NO: 94584 - DNA, 25 bp, Artificial
  probe
  misc_feature (1)..(25): SEQ ID NO: 6795; WAN024BU9_at; Start 214; Stop 238
ccaaacggttataacacaacaagag

SEQ ID NO: 94585 - DNA, 25 bp, Artificial
  probe
  misc_feature (1)..(25): SEQ ID NO: 6795; WAN024BU9_at; Start 73; Stop 97
tggtacgctcgggacttacaaaaga

SEQ ID NO: 94586 - DNA, 25 bp, Artificial
  probe
  misc_feature (1)..(25): SEQ ID NO: 6795; WAN024BU9_at; Start 763; Stop 787
cctcgtgaaagtatacaagagttga

SEQ ID NO: 94587 - DNA, 25 bp, Artificial
  probe
  misc_feature (1)..(25): SEQ ID NO: 6795; WAN024BU9_at; Start 485; Stop 509
gatttcacaactcaggatacaaggg

SEQ ID NO: 94588 - DNA, 25 bp, Artificial
  probe
  misc_feature (1)..(25): SEQ ID NO: 6795; WAN024BU9_at; Start 383; Stop 407
ttaccgaagaacagaaacgccttgc

SEQ ID NO: 94589 - DNA, 25 bp, Artificial
  probe
  misc_feature (1)..(25): SEQ ID NO: 6795; WAN024BU9_at; Start 96; Stop 120
gacccttgagtatacagaatggaga

SEQ ID NO: 94590 - DNA, 25 bp, Artificial
  probe
  misc_feature (1)..(25): SEQ ID NO: 6795; WAN024BU9_at; Start 627; Stop 651
tcagaccgacgaagttctacgacgt

SEQ ID NO: 94591 - DNA, 25 bp, Artificial
  probe
  misc_feature (1)..(25): SEQ ID NO: 6795; WAN024BU9_at; Start 58; Stop 82
aatggagtagaattttggtacgctc

SEQ ID NO: 94592 - DNA, 25 bp, Artificial
  probe
  misc_feature (1)..(25): SEQ ID NO: 6795; WAN024BU9_at; Start 329; Stop 353
cctatttcgcgttgaaaactcgtca

SEQ ID NO: 94593 - DNA, 25 bp, Artificial
  probe
  misc_feature (1)..(25): SEQ ID NO: 6795; WAN024BU9_at; Start 512; Stop 536
tatatggtgggctaactatgcagga

SEQ ID NO: 94594 - DNA, 25 bp, Artificial
  probe
  misc_feature (1)..(25): SEQ ID NO: 6795; WAN024BU9_at; Start 453; Stop 477
tgctggcaatgctggcgttaagaac

SEQ ID NO: 94595 - DNA, 25 bp, Artificial
  probe
  misc_feature (1)..(25): SEQ ID NO: 6795; WAN024BU9_at; Start 700; Stop 724
ggccgaaccattagaaataccatga

SEQ ID NO: 94596 - DNA, 25 bp, Artificial
  probe
  misc_feature (1)..(25): SEQ ID NO: 6795; WAN024BU9_at; Start 142; Stop 166
aaggcaaagatagcttgcgataccg

SEQ ID NO: 94597 - DNA, 25 bp, Artificial
  probe
  misc_feature (1)..(25): SEQ ID NO: 6795; WAN024BU9_at; Start 291; Stop 315
tggtgacccacgaaaagaagttata

SEQ ID NO: 94598 - DNA, 25 bp, Artificial
  probe
  misc_feature (1)..(25): SEQ ID NO: 6795; WAN024BU9_at; Start 314; Stop 338
tagcacttggccaaacctatttcgc

SEQ ID NO: 94599 - DNA, 25 bp, Artificial
  probe
  misc_feature (1)..(25): SEQ ID NO: 6795; WAN024BU9_at; Start 732; Stop 756
tggaacaaccatgccggagaatctc

SEQ ID NO: 94600 - DNA, 25 bp, Artificial
  probe
  misc_feature (1)..(25): SEQ ID NO: 6795; WAN024BU9_at; Start 717; Stop 741
taccatgaaagaacttggaacaacc

SEQ ID NO: 94601 - DNA, 25 bp, Artificial
  probe
  misc_feature (1)..(25): SEQ ID NO: 6334; WAN024BUA_at; Start 604; Stop 628
tacaaaaatttctacgatacggtgc

SEQ ID NO: 94602 - DNA, 25 bp, Artificial
  probe
  misc_feature (1)..(25): SEQ ID NO: 6334; WAN024BUA_at; Start 691; Stop 715
gatattgacctaaaaaacggcacac

SEQ ID NO: 94603 - DNA, 25 bp, Artificial
  probe
  misc_feature (1)..(25): SEQ ID NO: 6334; WAN024BUA_at; Start 1089; Stop 1113
tagccacctatccaaagacaatcag

SEQ ID NO: 94604 - DNA, 25 bp, Artificial
  probe
  misc_feature (1)..(25): SEQ ID NO: 6334; WAN024BUA_at; Start 959; Stop 983
gatgccctcgttttacgttccacgc

SEQ ID NO: 94605 - DNA, 25 bp, Artificial
  probe
  misc_feature (1)..(25): SEQ ID NO: 6334; WAN024BUA_at; Start 1015; Stop 1039
aatgctggactaccttacaaagaga

SEQ ID NO: 94606 - DNA, 25 bp, Artificial
  probe
  misc_feature (1)..(25): SEQ ID NO: 6334; WAN024BUA_at; Start 813; Stop 837
catgctacggctctataaagcaaga

SEQ ID NO: 94607 - DNA, 25 bp, Artificial
  probe
  misc_feature (1)..(25): SEQ ID NO: 6334; WAN024BUA_at; Start 1030; Stop 1054
tacaaagagatacaaacacggctcg

SEQ ID NO: 94608 - DNA, 25 bp, Artificial
  probe
  misc_feature (1)..(25): SEQ ID NO: 6334; WAN024BUA_at; Start 667; Stop 691
gagtgtttagccctcaaatggtctg

SEQ ID NO: 94609 - DNA, 25 bp, Artificial
  probe
  misc_feature (1)..(25): SEQ ID NO: 6334; WAN024BUA_at; Start 106; Stop 130
tcagggcgaaccaagagagaactca

SEQ ID NO: 94610 - DNA, 25 bp, Artificial
  probe
  misc_feature (1)..(25): SEQ ID NO: 6334; WAN024BUA_at; Start 354; Stop 378
tcaaaagcaagtcaatcaatgggca

SEQ ID NO: 94611 - DNA, 25 bp, Artificial
  probe
  misc_feature (1)..(25): SEQ ID NO: 6334; WAN024BUA_at; Start 798; Stop 822
taataagacggtgctcatgctacgg

SEQ ID NO: 94612 - DNA, 25 bp, Artificial
  probe
  misc_feature (1)..(25): SEQ ID NO: 6334; WAN024BUA_at; Start 77; Stop 101
taacaggtaagaaagtcaagacgac

SEQ ID NO: 94613 - DNA, 25 bp, Artificial
  probe
  misc_feature (1)..(25): SEQ ID NO: 6334; WAN024BUA_at; Start 124; Stop 148
gaactcaaagccaaagcgctacagg

SEQ ID NO: 94614 - DNA, 25 bp, Artificial
  probe
  misc_feature (1)..(25): SEQ ID NO: 6334; WAN024BUA_at; Start 893; Stop 917
gctttgataagcatatagacgctag

SEQ ID NO: 94615 - DNA, 25 bp, Artificial
  probe
  misc_feature (1)..(25): SEQ ID NO: 6334; WAN024BUA_at; Start 230; Stop 254
ggctagaaacgtactgccatacggt

SEQ ID NO: 94616 - DNA, 25 bp, Artificial
  probe
  misc_feature (1)..(25): SEQ ID NO: 6334; WAN024BUA_at; Start 484; Stop 508
aaccctgcccgtgatgttatcgtgc

SEQ ID NO: 94617 - DNA, 25 bp, Artificial
  probe
  misc_feature (1)..(25): SEQ ID NO: 6334; WAN024BUA_at; Start 941; Stop 965
aacatttggaacgtgctggatgccc

SEQ ID NO: 94618 - DNA, 25 bp, Artificial
  probe
  misc_feature (1)..(25): SEQ ID NO: 6334; WAN024BUA_at; Start 139; Stop 163
gcgctacaggctcaaatcgactttg

SEQ ID NO: 94619 - DNA, 25 bp, Artificial
  probe
  misc_feature (1)..(25): SEQ ID NO: 6334; WAN024BUA_at; Start 92; Stop 116
tcaagacgactatatcagggcgaac

SEQ ID NO: 94620 - DNA, 25 bp, Artificial
  probe
  misc_feature (1)..(25): SEQ ID NO: 6334; WAN024BUA_at; Start 616; Stop 640
tacgatacggtgctatataagacgc

SEQ ID NO: 94621 - DNA, 25 bp, Artificial
  probe
  misc_feature (1)..(25): SEQ ID NO: 6334; WAN024BUA_at; Start 585; Stop 609
ggagcagctgccaaacacttacaaa

SEQ ID NO: 94622 - DNA, 25 bp, Artificial
  probe
  misc_feature (1)..(25): SEQ ID NO: 6334; WAN024BUA_at; Start 1048; Stop 1072
cggctcggtcatgcaaaactttcta

SEQ ID NO: 94623 - DNA, 25 bp, Artificial
  probe
  misc_feature (1)..(25): SEQ ID NO: 6334; WAN024BUA_at; Start 322; Stop 346
tataggctggataaactgacgcccc

SEQ ID NO: 94624 - DNA, 25 bp, Artificial
  probe
  misc_feature (1)..(25): SEQ ID NO: 6334; WAN024BUA_at; Start 738; Stop 762
tattatcaaagaaatcactggccct

SEQ ID NO: 94625 - DNA, 25 bp, Artificial
  probe
  misc_feature (1)..(25): SEQ ID NO: 6334; WAN024BUA_at; Start 395; Stop 419
taggcaaagggtttcaagagtatcc

SEQ ID NO: 94626 - DNA, 25 bp, Artificial
  probe
  misc_feature (1)..(25): SEQ ID NO: 6334; WAN024BUA_at; Start 526; Stop 550
gaagggcaaaaactgaaatatctgg

SEQ ID NO: 94627 - DNA, 25 bp, Artificial
  probe
  misc_feature (1)..(25): SEQ ID NO: 6334; WAN024BUA_at; Start 568; Stop 592
aaattcttgacttacctggagcagc

SEQ ID NO: 94628 - DNA, 25 bp, Artificial
  probe
  misc_feature (1)..(25): SEQ ID NO: 6334; WAN024BUA_at; Start 47; Stop 71
gctctagcgtctaccttggtatcga

SEQ ID NO: 94629 - DNA, 25 bp, Artificial
  probe
  misc_feature (1)..(25): SEQ ID NO: 6334; WAN024BUA_at; Start 501; Stop 525
tatcgtgccacgtcgtaaggaaaaa

SEQ ID NO: 94630 - DNA, 25 bp, Artificial
  probe
  misc_feature (1)..(25): SEQ ID NO: 6334; WAN024BUA_at; Start 1000; Stop 1024
gctagtatcttgctcaatgctggac

SEQ ID NO: 94631 - DNA, 25 bp, Artificial
  probe
  misc_feature (1)..(25): SEQ ID NO: 6334; WAN024BUA_at; Start 198; Stop 222
gataaagacttacgccgaactggtg

SEQ ID NO: 94632 - DNA, 25 bp, Artificial
  probe
  misc_feature (1)..(25): SEQ ID NO: 6334; WAN024BUA_at; Start 752; Stop 776
tcactggccctaagactaaatcaag

SEQ ID NO: 94633 - DNA, 25 bp, Artificial
  probe
  misc_feature (1)..(25): SEQ ID NO: 6334; WAN024BUA_at; Start 31; Stop 55
gggtctacagtctatcgctctagcg

SEQ ID NO: 94634 - DNA, 25 bp, Artificial
  probe
  misc_feature (1)..(25): SEQ ID NO: 6334; WAN024BUA_at; Start 828; Stop 852
taaagcaagacaatcccaaataggg

SEQ ID NO: 94635 - DNA, 25 bp, Artificial
  probe
  misc_feature (1)..(25): SEQ ID NO: 7452; WAN024BUB_at; Start 85; Stop 109
ctttctattgatgttctgaatcgaa

SEQ ID NO: 94636 - DNA, 25 bp, Artificial
  probe
  misc_feature (1)..(25): SEQ ID NO: 7452; WAN024BUB_at; Start 29; Stop 53
aaactatctttttggcacagtccgt

SEQ ID NO: 94637 - DNA, 25 bp, Artificial
  probe
  misc_feature (1)..(25): SEQ ID NO: 7452; WAN024BUB_at; Start 2; Stop 26
tgacgacggacgcttacgtcctaga

SEQ ID NO: 94638 - DNA, 25 bp, Artificial
  probe
  misc_feature (1)..(25): SEQ ID NO: 7452; WAN024BUB_at; Start 1; Stop 25
ttgacgacggacgcttacgtcctag

SEQ ID NO: 94639 - DNA, 25 bp, Artificial
  probe
  misc_feature (1)..(25): SEQ ID NO: 7452; WAN024BUB_at; Start 89; Stop 113
ctattgatgttctgaatcgaaccac

SEQ ID NO: 94640 - DNA, 25 bp, Artificial
  probe
  misc_feature (1)..(25): SEQ ID NO: 7452; WAN024BUB_at; Start 87; Stop 111
ttctattgatgttctgaatcgaacc

SEQ ID NO: 94641 - DNA, 25 bp, Artificial
  probe
  misc_feature (1)..(25): SEQ ID NO: 7452; WAN024BUB_at; Start 46; Stop 70
cagtccgtagcccgtgttcagttac

SEQ ID NO: 94642 - DNA, 25 bp, Artificial
  probe
  misc_feature (1)..(25): SEQ ID NO: 7452; WAN024BUB_at; Start 90; Stop 114
tattgatgttctgaatcgaaccacc

SEQ ID NO: 94643 - DNA, 25 bp, Artificial
  probe
  misc_feature (1)..(25): SEQ ID NO: 7452; WAN024BUB_at; Start 23; Stop 47
tagaaaaaactatctttttggcaca

SEQ ID NO: 94644 - DNA, 25 bp, Artificial
  probe
  misc_feature (1)..(25): SEQ ID NO: 7452; WAN024BUB_at; Start 38; Stop 62
ttttggcacagtccgtagcccgtgt

SEQ ID NO: 94645 - DNA, 25 bp, Artificial
  probe
  misc_feature (1)..(25): SEQ ID NO: 7452; WAN024BUB_at; Start 37; Stop 61
tttttggcacagtccgtagcccgtg

SEQ ID NO: 94646 - DNA, 25 bp, Artificial
  probe
  misc_feature (1)..(25): SEQ ID NO: 7452; WAN024BUB_at; Start 86; Stop 110
tttctattgatgttctgaatcgaac

SEQ ID NO: 94647 - DNA, 25 bp, Artificial
  probe
  misc_feature (1)..(25): SEQ ID NO: 7452; WAN024BUB_at; Start 93; Stop 117
tgatgttctgaatcgaaccaccatt

SEQ ID NO: 94648 - DNA, 25 bp, Artificial
  probe
  misc_feature (1)..(25): SEQ ID NO: 7452; WAN024BUB_at; Start 83; Stop 107
tcctttctattgatgttctgaatcg

SEQ ID NO: 94649 - DNA, 25 bp, Artificial
  probe
  misc_feature (1)..(25): SEQ ID NO: 7452; WAN024BUB_at; Start 72; Stop 96
aacacccttattcctttctattgat

SEQ ID NO: 94650 - DNA, 25 bp, Artificial
  probe
  misc_feature (1)..(25): SEQ ID NO: 7452; WAN024BUB_at; Start 70; Stop 94
cgaacacccttattcctttctattg

SEQ ID NO: 94651 - DNA, 25 bp, Artificial
  probe
  misc_feature (1)..(25): SEQ ID NO: 7452; WAN024BUB_at; Start 92; Stop 116
ttgatgttctgaatcgaaccaccat

SEQ ID NO: 94652 - DNA, 25 bp, Artificial
  probe
  misc_feature (1)..(25): SEQ ID NO: 7452; WAN024BUB_at; Start 84; Stop 108
cctttctattgatgttctgaatcga

SEQ ID NO: 94653 - DNA, 25 bp, Artificial
  probe
  misc_feature (1)..(25): SEQ ID NO: 7452; WAN024BUB_at; Start 71; Stop 95
gaacacccttattcctttctattga

SEQ ID NO: 94654 - DNA, 25 bp, Artificial
  probe
  misc_feature (1)..(25): SEQ ID NO: 7452; WAN024BUB_at; Start 24; Stop 48
agaaaaaactatctttttggcacag

SEQ ID NO: 94655 - DNA, 25 bp, Artificial
  probe
  misc_feature (1)..(25): SEQ ID NO: 7452; WAN024BUB_at; Start 41; Stop 65
tggcacagtccgtagcccgtgttca

SEQ ID NO: 94656 - DNA, 25 bp, Artificial
  probe
  misc_feature (1)..(25): SEQ ID NO: 7452; WAN024BUB_at; Start 88; Stop 112
tctattgatgttctgaatcgaacca

SEQ ID NO: 94657 - DNA, 25 bp, Artificial
  probe
  misc_feature (1)..(25): SEQ ID NO: 7452; WAN024BUB_at; Start 39; Stop 63
tttggcacagtccgtagcccgtgtt

SEQ ID NO: 94658 - DNA, 25 bp, Artificial
  probe
  misc_feature (1)..(25): SEQ ID NO: 7452; WAN024BUB_at; Start 28; Stop 52
aaaactatctttttggcacagtccg

SEQ ID NO: 94659 - DNA, 25 bp, Artificial
  probe
  misc_feature (1)..(25): SEQ ID NO: 7452; WAN024BUB_at; Start 3; Stop 27
gacgacggacgcttacgtcctagaa

SEQ ID NO: 94660 - DNA, 25 bp, Artificial
  probe
  misc_feature (1)..(25): SEQ ID NO: 7452; WAN024BUB_at; Start 40; Stop 64
ttggcacagtccgtagcccgtgttc

SEQ ID NO: 94661 - DNA, 25 bp, Artificial
  probe
  misc_feature (1)..(25): SEQ ID NO: 7452; WAN024BUB_at; Start 45; Stop 69
acagtccgtagcccgtgttcagtta

SEQ ID NO: 94662 - DNA, 25 bp, Artificial
  probe
  misc_feature (1)..(25): SEQ ID NO: 7452; WAN024BUB_at; Start 42; Stop 66
ggcacagtccgtagcccgtgttcag

SEQ ID NO: 94663 - DNA, 25 bp, Artificial
  probe
  misc_feature (1)..(25): SEQ ID NO: 7452; WAN024BUB_at; Start 91; Stop 115
attgatgttctgaatcgaaccacca

SEQ ID NO: 94664 - DNA, 25 bp, Artificial
  probe
  misc_feature (1)..(25): SEQ ID NO: 6802; WAN024BUC_at; Start 67; Stop 91
tcacatagtctcctatatctaacta

SEQ ID NO: 94665 - DNA, 25 bp, Artificial
  probe
  misc_feature (1)..(25): SEQ ID NO: 6802; WAN024BUC_at; Start 63; Stop 87
atattcacatagtctcctatatcta

SEQ ID NO: 94666 - DNA, 25 bp, Artificial
  probe
  misc_feature (1)..(25): SEQ ID NO: 6802; WAN024BUC_at; Start 13; Stop 37
tttgagaaggttacggtaggtcaga

SEQ ID NO: 94667 - DNA, 25 bp, Artificial
  probe
  misc_feature (1)..(25): SEQ ID NO: 6802; WAN024BUC_at; Start 66; Stop 90
ttcacatagtctcctatatctaact

SEQ ID NO: 94668 - DNA, 25 bp, Artificial
  probe
  misc_feature (1)..(25): SEQ ID NO: 6802; WAN024BUC_at; Start 12; Stop 36
ctttgagaaggttacggtaggtcag

SEQ ID NO: 94669 - DNA, 25 bp, Artificial
  probe
  misc_feature (1)..(25): SEQ ID NO: 6802; WAN024BUC_at; Start 65; Stop 89
attcacatagtctcctatatctaac

SEQ ID NO: 94670 - DNA, 25 bp, Artificial
  probe
  misc_feature (1)..(25): SEQ ID NO: 6802; WAN024BUC_at; Start 15; Stop 39
tgagaaggttacggtaggtcagatt

SEQ ID NO: 94671 - DNA, 25 bp, Artificial
  probe
  misc_feature (1)..(25): SEQ ID NO: 6802; WAN024BUC_at; Start 68; Stop 92
cacatagtctcctatatctaactaa

SEQ ID NO: 94672 - DNA, 25 bp, Artificial
  probe
  misc_feature (1)..(25): SEQ ID NO: 6802; WAN024BUC_at; Start 14; Stop 38
ttgagaaggttacggtaggtcagat

SEQ ID NO: 94673 - DNA, 25 bp, Artificial
  probe
  misc_feature (1)..(25): SEQ ID NO: 6802; WAN024BUC_at; Start 64; Stop 88
tattcacatagtctcctatatctaa

SEQ ID NO: 94674 - DNA, 25 bp, Artificial
  probe
  misc_feature (1)..(25): SEQ ID NO: 6802; WAN024BUC_at; Start 69; Stop 93
acatagtctcctatatctaactaat

SEQ ID NO: 94675 - DNA, 25 bp, Artificial
  probe
  misc_feature (1)..(25): SEQ ID NO: 7610; WAN024BUD_at; Start 62; Stop 86
caacgacagggattactcatcgctg

SEQ ID NO: 94676 - DNA, 25 bp, Artificial
  probe
  misc_feature (1)..(25): SEQ ID NO: 7610; WAN024BUD_at; Start 49; Stop 73
aatagccaaaaagcaacgacaggga

SEQ ID NO: 94677 - DNA, 25 bp, Artificial
  probe
  misc_feature (1)..(25): SEQ ID NO: 7610; WAN024BUD_at; Start 13; Stop 37
tttcttttgctagtcaaggcggatc

SEQ ID NO: 94678 - DNA, 25 bp, Artificial
  probe
  misc_feature (1)..(25): SEQ ID NO: 7610; WAN024BUD_at; Start 55; Stop 79
caaaaagcaacgacagggattactc

SEQ ID NO: 94679 - DNA, 25 bp, Artificial
  probe
  misc_feature (1)..(25): SEQ ID NO: 7610; WAN024BUD_at; Start 15; Stop 39
tcttttgctagtcaaggcggatctt

SEQ ID NO: 94680 - DNA, 25 bp, Artificial
  probe
  misc_feature (1)..(25): SEQ ID NO: 7610; WAN024BUD_at; Start 16; Stop 40
cttttgctagtcaaggcggatctta

SEQ ID NO: 94681 - DNA, 25 bp, Artificial
  probe
  misc_feature (1)..(25): SEQ ID NO: 7610; WAN024BUD_at; Start 52; Stop 76
agccaaaaagcaacgacagggatta

SEQ ID NO: 94682 - DNA, 25 bp, Artificial
  probe
  misc_feature (1)..(25): SEQ ID NO: 7610; WAN024BUD_at; Start 63; Stop 87
aacgacagggattactcatcgctgc

SEQ ID NO: 94683 - DNA, 25 bp, Artificial
  probe
  misc_feature (1)..(25): SEQ ID NO: 7610; WAN024BUD_at; Start 58; Stop 82
aaagcaacgacagggattactcatc

SEQ ID NO: 94684 - DNA, 25 bp, Artificial
  probe
  misc_feature (1)..(25): SEQ ID NO: 7610; WAN024BUD_at; Start 3; Stop 27
ggaccaatcttttcttttgctagtc

SEQ ID NO: 94685 - DNA, 25 bp, Artificial
  probe
  misc_feature (1)..(25): SEQ ID NO: 7610; WAN024BUD_at; Start 69; Stop 93
agggattactcatcgctgccttttg

SEQ ID NO: 94686 - DNA, 25 bp, Artificial
  probe
  misc_feature (1)..(25): SEQ ID NO: 7610; WAN024BUD_at; Start 51; Stop 75
tagccaaaaagcaacgacagggatt

SEQ ID NO: 94687 - DNA, 25 bp, Artificial
  probe
  misc_feature (1)..(25): SEQ ID NO: 7610; WAN024BUD_at; Start 1; Stop 25
ttggaccaatcttttcttttgctag

SEQ ID NO: 94688 - DNA, 25 bp, Artificial
  probe
  misc_feature (1)..(25): SEQ ID NO: 7610; WAN024BUD_at; Start 45; Stop 69
ccaaaatagccaaaaagcaacgaca

SEQ ID NO: 94689 - DNA, 25 bp, Artificial
  probe
  misc_feature (1)..(25): SEQ ID NO: 7610; WAN024BUD_at; Start 7; Stop 31
caatcttttcttttgctagtcaagg

SEQ ID NO: 94690 - DNA, 25 bp, Artificial
  probe
  misc_feature (1)..(25): SEQ ID NO: 7610; WAN024BUD_at; Start 47; Stop 71
aaaatagccaaaaagcaacgacagg

SEQ ID NO: 94691 - DNA, 25 bp, Artificial
  probe
  misc_feature (1)..(25): SEQ ID NO: 7610; WAN024BUD_at; Start 65; Stop 89
cgacagggattactcatcgctgcct

SEQ ID NO: 94692 - DNA, 25 bp, Artificial
  probe
  misc_feature (1)..(25): SEQ ID NO: 7610; WAN024BUD_at; Start 66; Stop 90
gacagggattactcatcgctgcctt

SEQ ID NO: 94693 - DNA, 25 bp, Artificial
  probe
  misc_feature (1)..(25): SEQ ID NO: 7610; WAN024BUD_at; Start 14; Stop 38
ttcttttgctagtcaaggcggatct

SEQ ID NO: 94694 - DNA, 25 bp, Artificial
  probe
  misc_feature (1)..(25): SEQ ID NO: 7610; WAN024BUD_at; Start 48; Stop 72
aaatagccaaaaagcaacgacaggg

SEQ ID NO: 94695 - DNA, 25 bp, Artificial
  probe
  misc_feature (1)..(25): SEQ ID NO: 7610; WAN024BUD_at; Start 64; Stop 88
acgacagggattactcatcgctgcc

SEQ ID NO: 94696 - DNA, 25 bp, Artificial
  probe
  misc_feature (1)..(25): SEQ ID NO: 7610; WAN024BUD_at; Start 18; Stop 42
tttgctagtcaaggcggatcttatc

SEQ ID NO: 94697 - DNA, 25 bp, Artificial
  probe
  misc_feature (1)..(25): SEQ ID NO: 7610; WAN024BUD_at; Start 11; Stop 35
cttttcttttgctagtcaaggcgga

SEQ ID NO: 94698 - DNA, 25 bp, Artificial
  probe
  misc_feature (1)..(25): SEQ ID NO: 7610; WAN024BUD_at; Start 61; Stop 85
gcaacgacagggattactcatcgct

SEQ ID NO: 94699 - DNA, 25 bp, Artificial
  probe
  misc_feature (1)..(25): SEQ ID NO: 7610; WAN024BUD_at; Start 68; Stop 92
cagggattactcatcgctgcctttt

SEQ ID NO: 94700 - DNA, 25 bp, Artificial
  probe
  misc_feature (1)..(25): SEQ ID NO: 7610; WAN024BUD_at; Start 56; Stop 80
aaaaagcaacgacagggattactca

SEQ ID NO: 94701 - DNA, 25 bp, Artificial
  probe
  misc_feature (1)..(25): SEQ ID NO: 7610; WAN024BUD_at; Start 30; Stop 54
ggcggatcttatcccccaaaatagc

SEQ ID NO: 94702 - DNA, 25 bp, Artificial
  probe
  misc_feature (1)..(25): SEQ ID NO: 7610; WAN024BUD_at; Start 60; Stop 84
agcaacgacagggattactcatcgc

SEQ ID NO: 94703 - DNA, 25 bp, Artificial
  probe
  misc_feature (1)..(25): SEQ ID NO: 7610; WAN024BUD_at; Start 10; Stop 34
tcttttcttttgctagtcaaggcgg

SEQ ID NO: 94704 - DNA, 25 bp, Artificial
  probe
  misc_feature (1)..(25): SEQ ID NO: 7610; WAN024BUD_at; Start 57; Stop 81
aaaagcaacgacagggattactcat

SEQ ID NO: 94705 - DNA, 25 bp, Artificial
  probe
  misc_feature (1)..(25): SEQ ID NO: 7610; WAN024BUD_at; Start 25; Stop 49
gtcaaggcggatcttatcccccaaa

SEQ ID NO: 94706 - DNA, 25 bp, Artificial
  probe
  misc_feature (1)..(25): SEQ ID NO: 7610; WAN024BUD_at; Start 21; Stop 45
gctagtcaaggcggatcttatcccc

SEQ ID NO: 94707 - DNA, 25 bp, Artificial
  probe
  misc_feature (1)..(25): SEQ ID NO: 7610; WAN024BUD_at; Start 54; Stop 78
ccaaaaagcaacgacagggattact

SEQ ID NO: 94708 - DNA, 25 bp, Artificial
  probe
  misc_feature (1)..(25): SEQ ID NO: 7610; WAN024BUD_at; Start 53; Stop 77
gccaaaaagcaacgacagggattac

SEQ ID NO: 94709 - DNA, 25 bp, Artificial
  probe
  misc_feature (1)..(25): SEQ ID NO: 6761; WAN024BUE_at; Start 215; Stop 239
gacagctgaaagacttgactcttgc

SEQ ID NO: 94710 - DNA, 25 bp, Artificial
  probe
  misc_feature (1)..(25): SEQ ID NO: 6761; WAN024BUE_at; Start 538; Stop 562
gaaaaagactgtttcaaggctggtc

SEQ ID NO: 94711 - DNA, 25 bp, Artificial
  probe
  misc_feature (1)..(25): SEQ ID NO: 6761; WAN024BUE_at; Start 421; Stop 445
atcttggacggtggacaaatcctcc

SEQ ID NO: 94712 - DNA, 25 bp, Artificial
  probe
  misc_feature (1)..(25): SEQ ID NO: 6761; WAN024BUE_at; Start 328; Stop 352
agtcaggaacttttagcagcccaac

SEQ ID NO: 94713 - DNA, 25 bp, Artificial
  probe
  misc_feature (1)..(25): SEQ ID NO: 6761; WAN024BUE_at; Start 154; Stop 178
gccaagtcagctatttcagggttat

SEQ ID NO: 94714 - DNA, 25 bp, Artificial
  probe
  misc_feature (1)..(25): SEQ ID NO: 6761; WAN024BUE_at; Start 184; Stop 208
gagtatggcatgactgactcacctt

SEQ ID NO: 94715 - DNA, 25 bp, Artificial
  probe
  misc_feature (1)..(25): SEQ ID NO: 6761; WAN024BUE_at; Start 70; Stop 94
ggcgtgacgcttaaaaaagccacta

SEQ ID NO: 94716 - DNA, 25 bp, Artificial
  probe
  misc_feature (1)..(25): SEQ ID NO: 6761; WAN024BUE_at; Start 44; Stop 68
tcaaagctagcgattttatggcaga

SEQ ID NO: 94717 - DNA, 25 bp, Artificial
  probe
  misc_feature (1)..(25): SEQ ID NO: 6761; WAN024BUE_at; Start 475; Stop 499
gaaaatgacctaaaacgatatgccc

SEQ ID NO: 94718 - DNA, 25 bp, Artificial
  probe
  misc_feature (1)..(25): SEQ ID NO: 6761; WAN024BUE_at; Start 55; Stop 79
gattttatggcagatggcgtgacgc

SEQ ID NO: 94719 - DNA, 25 bp, Artificial
  probe
  misc_feature (1)..(25): SEQ ID NO: 6761; WAN024BUE_at; Start 618; Stop 642
tatcgatccattaactcaggctgag

SEQ ID NO: 94720 - DNA, 25 bp, Artificial
  probe
  misc_feature (1)..(25): SEQ ID NO: 6761; WAN024BUE_at; Start 552; Stop 576
caaggctggtctaagtaaactcgga

SEQ ID NO: 94721 - DNA, 25 bp, Artificial
  probe
  misc_feature (1)..(25): SEQ ID NO: 6761; WAN024BUE_at; Start 169; Stop 193
tcagggttatgtgctgagtatggca

SEQ ID NO: 94722 - DNA, 25 bp, Artificial
  probe
  misc_feature (1)..(25): SEQ ID NO: 6761; WAN024BUE_at; Start 296; Stop 320
tcagacaggctcaagaacgagcaga

SEQ ID NO: 94723 - DNA, 25 bp, Artificial
  probe
  misc_feature (1)..(25): SEQ ID NO: 6761; WAN024BUE_at; Start 406; Stop 430
ccagaaacgggcaaaatcttggacg

SEQ ID NO: 94724 - DNA, 25 bp, Artificial
  probe
  misc_feature (1)..(25): SEQ ID NO: 6761; WAN024BUE_at; Start 15; Stop 39
tctctttgatgaaaaggcccttgag

SEQ ID NO: 94725 - DNA, 25 bp, Artificial
  probe
  misc_feature (1)..(25): SEQ ID NO: 6761; WAN024BUE_at; Start 585; Stop 609
taaaaagaactatcaagtcagcggt

SEQ ID NO: 94726 - DNA, 25 bp, Artificial
  probe
  misc_feature (1)..(25): SEQ ID NO: 6761; WAN024BUE_at; Start 3; Stop 27
gctggatcctcgtctctttgatgaa

SEQ ID NO: 94727 - DNA, 25 bp, Artificial
  probe
  misc_feature (1)..(25): SEQ ID NO: 6761; WAN024BUE_at; Start 343; Stop 367
gcagcccaacaaaccaaacagcaag

SEQ ID NO: 94728 - DNA, 25 bp, Artificial
  probe
  misc_feature (1)..(25): SEQ ID NO: 6761; WAN024BUE_at; Start 433; Stop 457
ggacaaatcctccaaaatgagccta

SEQ ID NO: 94729 - DNA, 25 bp, Artificial
  probe
  misc_feature (1)..(25): SEQ ID NO: 6761; WAN024BUE_at; Start 30; Stop 54
ggcccttgagtatgtcaaagctagc

SEQ ID NO: 94730 - DNA, 25 bp, Artificial
  probe
  misc_feature (1)..(25): SEQ ID NO: 6761; WAN024BUE_at; Start 447; Stop 471
aaatgagcctaacgctcttagagga

SEQ ID NO: 94731 - DNA, 25 bp, Artificial
  probe
  misc_feature (1)..(25): SEQ ID NO: 6761; WAN024BUE_at; Start 603; Stop 627
cagcggttatcaacgtatcgatcca

SEQ ID NO: 94732 - DNA, 25 bp, Artificial
  probe
  misc_feature (1)..(25): SEQ ID NO: 6761; WAN024BUE_at; Start 139; Stop 163
caagaatttgaaaaagccaagtcag

SEQ ID NO: 94733 - DNA, 25 bp, Artificial
  probe
  misc_feature (1)..(25): SEQ ID NO: 6761; WAN024BUE_at; Start 364; Stop 388
caagaacaggctccaaaatcaacgg

SEQ ID NO: 94734 - DNA, 25 bp, Artificial
  probe
  misc_feature (1)..(25): SEQ ID NO: 6761; WAN024BUE_at; Start 490; Stop 514
cgatatgcccaaaaaatgactttag

SEQ ID NO: 94735 - DNA, 25 bp, Artificial
  probe
  misc_feature (1)..(25): SEQ ID NO: 6761; WAN024BUE_at; Start 198; Stop 222
tgactcaccttacattagacagctg

SEQ ID NO: 94736 - DNA, 25 bp, Artificial
  probe
  misc_feature (1)..(25): SEQ ID NO: 6761; WAN024BUE_at; Start 462; Stop 486
tcttagaggagctgaaaatgaccta

SEQ ID NO: 94737 - DNA, 25 bp, Artificial
  probe
  misc_feature (1)..(25): SEQ ID NO: 6761; WAN024BUE_at; Start 283; Stop 307
caaaaggaagaaatcagacaggctc

SEQ ID NO: 94738 - DNA, 25 bp, Artificial
  probe
  misc_feature (1)..(25): SEQ ID NO: 6761; WAN024BUE_at; Start 523; Stop 547
tttgtagacacagccgaaaaagact

SEQ ID NO: 94739 - DNA, 25 bp, Artificial
  probe
  misc_feature (1)..(25): SEQ ID NO: 6761; WAN024BUE_at; Start 313; Stop 337
cgagcagagcgagaaagtcaggaac

SEQ ID NO: 94740 - DNA, 25 bp, Artificial
  probe
  misc_feature (1)..(25): SEQ ID NO: 6761; WAN024BUE_at; Start 634; Stop 658
caggctgagctaaatgaacaatgtg

SEQ ID NO: 94741 - DNA, 25 bp, Artificial
  probe
  misc_feature (1)..(25): SEQ ID NO: 6761; WAN024BUE_at; Start 96; Stop 120
gaagtcacttgatgacatggtcaca

SEQ ID NO: 94742 - DNA, 25 bp, Artificial
  probe
  misc_feature (1)..(25): SEQ ID NO: 6761; WAN024BUE_at; Start 231; Stop 255
gactcttgctgaagtctttggacaa

SEQ ID NO: 94743 - DNA, 25 bp, Artificial
  probe
  misc_feature (1)..(25): SEQ ID NO: 6993; WAN024BUF_at; Start 312; Stop 336
tggccaagtcgtagaaattattgac

SEQ ID NO: 94744 - DNA, 25 bp, Artificial
  probe
  misc_feature (1)..(25): SEQ ID NO: 6993; WAN024BUF_at; Start 375; Stop 399
aaaatctggagagggtatgcaacgc

SEQ ID NO: 94745 - DNA, 25 bp, Artificial
  probe
  misc_feature (1)..(25): SEQ ID NO: 6993; WAN024BUF_at; Start 69; Stop 93
tgagttaataggaaaaatagaggac

SEQ ID NO: 94746 - DNA, 25 bp, Artificial
  probe
  misc_feature (1)..(25): SEQ ID NO: 6993; WAN024BUF_at; Start 136; Stop 160
gaaaaatcttgggatatttctccag

SEQ ID NO: 94747 - DNA, 25 bp, Artificial
  probe
  misc_feature (1)..(25): SEQ ID NO: 6993; WAN024BUF_at; Start 36; Stop 60
ttcagaagaattggctgaatatggg

SEQ ID NO: 94748 - DNA, 25 bp, Artificial
  probe
  misc_feature (1)..(25): SEQ ID NO: 6993; WAN024BUF_at; Start 84; Stop 108
aatagaggacctattagcgactctg

SEQ ID NO: 94749 - DNA, 25 bp, Artificial
  probe
  misc_feature (1)..(25): SEQ ID NO: 6993; WAN024BUF_at; Start 234; Stop 258
attgcaggttatccacaacctaggg

SEQ ID NO: 94750 - DNA, 25 bp, Artificial
  probe
  misc_feature (1)..(25): SEQ ID NO: 6993; WAN024BUF_at; Start 411; Stop 435
tatcgtccactttgaaaaatttgag

SEQ ID NO: 94751 - DNA, 25 bp, Artificial
  probe
  misc_feature (1)..(25): SEQ ID NO: 6993; WAN024BUF_at; Start 227; Stop 251
gcaagaaattgcaggttatccacaa

SEQ ID NO: 94752 - DNA, 25 bp, Artificial
  probe
  misc_feature (1)..(25): SEQ ID NO: 6993; WAN024BUF_at; Start 292; Stop 316
gatagcgtctggaacctcaatggcc

SEQ ID NO: 94753 - DNA, 25 bp, Artificial
  probe
  misc_feature (1)..(25): SEQ ID NO: 6993; WAN024BUF_at; Start 191; Stop 215
gaaaaatatctgacagcgtagccat

SEQ ID NO: 94754 - DNA, 25 bp, Artificial
  probe
  misc_feature (1)..(25): SEQ ID NO: 6993; WAN024BUF_at; Start 202; Stop 226
gacagcgtagccatctactcggacg

SEQ ID NO: 94755 - DNA, 25 bp, Artificial
  probe
  misc_feature (1)..(25): SEQ ID NO: 6993; WAN024BUF_at; Start 176; Stop 200
taaccatggacatcagaaaaatatc

SEQ ID NO: 94756 - DNA, 25 bp, Artificial
  probe
  misc_feature (1)..(25): SEQ ID NO: 6993; WAN024BUF_at; Start 398; Stop 422
gcttaaaacatgctatcgtccactt

SEQ ID NO: 94757 - DNA, 25 bp, Artificial
  probe
  misc_feature (1)..(25): SEQ ID NO: 6993; WAN024BUF_at; Start 262; Stop 286
gagtttatccttgatttcaatgtgg

SEQ ID NO: 94758 - DNA, 25 bp, Artificial
  probe
  misc_feature (1)..(25): SEQ ID NO: 6993; WAN024BUF_at; Start 385; Stop 409
gagggtatgcaacgcttaaaacatg

SEQ ID NO: 94759 - DNA, 25 bp, Artificial
  probe
  misc_feature (1)..(25): SEQ ID NO: 6993; WAN024BUF_at; Start 123; Stop 147
gaaattggagatagaaaaatcttgg

SEQ ID NO: 94760 - DNA, 25 bp, Artificial
  probe
  misc_feature (1)..(25): SEQ ID NO: 6993; WAN024BUF_at; Start 342; Stop 366
tgagcctgtctttaaagttttcagc

SEQ ID NO: 94761 - DNA, 25 bp, Artificial
  probe
  misc_feature (1)..(25): SEQ ID NO: 6993; WAN024BUF_at; Start 146; Stop 170
gggatatttctccagagtcaatggg

SEQ ID NO: 94762 - DNA, 25 bp, Artificial
  probe
  misc_feature (1)..(25): SEQ ID NO: 6993; WAN024BUF_at; Start 467; Stop 491
tgatctggtggcacaatccaggagg

SEQ ID NO: 94763 - DNA, 25 bp, Artificial
  probe
  misc_feature (1)..(25): SEQ ID NO: 6993; WAN024BUF_at; Start 454; Stop 478
caggaagacctgatgatctggtggc

SEQ ID NO: 94764 - DNA, 25 bp, Artificial
  probe
  misc_feature (1)..(25): SEQ ID NO: 6993; WAN024BUF_at; Start 276; Stop 300
tttcaatgtgggagaggatagcgtc

SEQ ID NO: 94765 - DNA, 25 bp, Artificial
  probe
  misc_feature (1)..(25): SEQ ID NO: 6993; WAN024BUF_at; Start 217; Stop 241
tactcggacggcaagaaattgcagg

SEQ ID NO: 94766 - DNA, 25 bp, Artificial
  probe
  misc_feature (1)..(25): SEQ ID NO: 6993; WAN024BUF_at; Start 107; Stop 131
tgtatggcgaaaaaaggaaattgga

SEQ ID NO: 94767 - DNA, 25 bp, Artificial
  probe
  misc_feature (1)..(25): SEQ ID NO: 6993; WAN024BUF_at; Start 424; Stop 448
gaaaaatttgagcagtacatcagag

SEQ ID NO: 94768 - DNA, 25 bp, Artificial
  probe
  misc_feature (1)..(25): SEQ ID NO: 6993; WAN024BUF_at; Start 439; Stop 463
tacatcagagataatcaggaagacc

SEQ ID NO: 94769 - DNA, 25 bp, Artificial
  probe
  misc_feature (1)..(25): SEQ ID NO: 6993; WAN024BUF_at; Start 4; Stop 28
tgggtggtaagtatgacagaaattg

SEQ ID NO: 94770 - DNA, 25 bp, Artificial
  probe
  misc_feature (1)..(25): SEQ ID NO: 6993; WAN024BUF_at; Start 169; Stop 193
gggagggtaaccatggacatcagaa

SEQ ID NO: 94771 - DNA, 25 bp, Artificial
  probe
  misc_feature (1)..(25): SEQ ID NO: 6993; WAN024BUF_at; Start 59; Stop 83
gggtgcctgatgagttaataggaaa

SEQ ID NO: 94772 - DNA, 25 bp, Artificial
  probe
  misc_feature (1)..(25): SEQ ID NO: 6993; WAN024BUF_at; Start 327; Stop 351
aattattgacatgattgagcctgtc

SEQ ID NO: 94773 - DNA, 25 bp, Artificial
  probe
  misc_feature (1)..(25): SEQ ID NO: 6993; WAN024BUF_at; Start 98; Stop 122
tagcgactctgtatggcgaaaaaag

SEQ ID NO: 94774 - DNA, 25 bp, Artificial
  probe
  misc_feature (1)..(25): SEQ ID NO: 6993; WAN024BUF_at; Start 301; Stop 325
tggaacctcaatggccaagtcgtag

SEQ ID NO: 94775 - DNA, 25 bp, Artificial
  probe
  misc_feature (1)..(25): SEQ ID NO: 6993; WAN024BUF_at; Start 209; Stop 233
tagccatctactcggacggcaagaa

SEQ ID NO: 94776 - DNA, 25 bp, Artificial
  probe
  misc_feature (1)..(25): SEQ ID NO: 6993; WAN024BUF_at; Start 365; Stop 389
gcttttgctcaaaatctggagaggg

SEQ ID NO: 94777 - DNA, 25 bp, Artificial
  probe
  misc_feature (1)..(25): SEQ ID NO: 7514; WAN024BUG_at; Start 68; Stop 92
tgcttatattgttctctgagggaac

SEQ ID NO: 94778 - DNA, 25 bp, Artificial
  probe
  misc_feature (1)..(25): SEQ ID NO: 7514; WAN024BUG_at; Start 6; Stop 30
tattgataagctaccacatttctca

SEQ ID NO: 94779 - DNA, 25 bp, Artificial
  probe
  misc_feature (1)..(25): SEQ ID NO: 7514; WAN024BUG_at; Start 20; Stop 44
cacatttctcacagctgattatgaa

SEQ ID NO: 94780 - DNA, 25 bp, Artificial
  probe
  misc_feature (1)..(25): SEQ ID NO: 7514; WAN024BUG_at; Start 26; Stop 50
tctcacagctgattatgaaacctaa

SEQ ID NO: 94781 - DNA, 25 bp, Artificial
  probe
  misc_feature (1)..(25): SEQ ID NO: 7514; WAN024BUG_at; Start 35; Stop 59
tgattatgaaacctaaaccatttga

SEQ ID NO: 94782 - DNA, 25 bp, Artificial
  probe
  misc_feature (1)..(25): SEQ ID NO: 7514; WAN024BUG_at; Start 66; Stop 90
actgcttatattgttctctgaggga

SEQ ID NO: 94783 - DNA, 25 bp, Artificial
  probe
  misc_feature (1)..(25): SEQ ID NO: 7514; WAN024BUG_at; Start 65; Stop 89
tactgcttatattgttctctgaggg

SEQ ID NO: 94784 - DNA, 25 bp, Artificial
  probe
  misc_feature (1)..(25): SEQ ID NO: 7514; WAN024BUG_at; Start 3; Stop 27
gattattgataagctaccacatttc

SEQ ID NO: 94785 - DNA, 25 bp, Artificial
  probe
  misc_feature (1)..(25): SEQ ID NO: 7514; WAN024BUG_at; Start 25; Stop 49
ttctcacagctgattatgaaaccta

SEQ ID NO: 94786 - DNA, 25 bp, Artificial
  probe
  misc_feature (1)..(25): SEQ ID NO: 7514; WAN024BUG_at; Start 17; Stop 41
taccacatttctcacagctgattat

SEQ ID NO: 94787 - DNA, 25 bp, Artificial
  probe
  misc_feature (1)..(25): SEQ ID NO: 7514; WAN024BUG_at; Start 67; Stop 91
ctgcttatattgttctctgagggaa

SEQ ID NO: 94788 - DNA, 25 bp, Artificial
  probe
  misc_feature (1)..(25): SEQ ID NO: 7514; WAN024BUG_at; Start 18; Stop 42
accacatttctcacagctgattatg

SEQ ID NO: 94789 - DNA, 25 bp, Artificial
  probe
  misc_feature (1)..(25): SEQ ID NO: 7514; WAN024BUG_at; Start 27; Stop 51
ctcacagctgattatgaaacctaaa

SEQ ID NO: 94790 - DNA, 25 bp, Artificial
  probe
  misc_feature (1)..(25): SEQ ID NO: 7514; WAN024BUG_at; Start 72; Stop 96
tatattgttctctgagggaactttg

SEQ ID NO: 94791 - DNA, 25 bp, Artificial
  probe
  misc_feature (1)..(25): SEQ ID NO: 7514; WAN024BUG_at; Start 5; Stop 29
ttattgataagctaccacatttctc

SEQ ID NO: 94792 - DNA, 25 bp, Artificial
  probe
  misc_feature (1)..(25): SEQ ID NO: 7514; WAN024BUG_at; Start 2; Stop 26
tgattattgataagctaccacattt

SEQ ID NO: 94793 - DNA, 25 bp, Artificial
  probe
  misc_feature (1)..(25): SEQ ID NO: 7514; WAN024BUG_at; Start 29; Stop 53
cacagctgattatgaaacctaaacc

SEQ ID NO: 94794 - DNA, 25 bp, Artificial
  probe
  misc_feature (1)..(25): SEQ ID NO: 7514; WAN024BUG_at; Start 48; Stop 72
taaaccatttgaattaatactgctt

SEQ ID NO: 94795 - DNA, 25 bp, Artificial
  probe
  misc_feature (1)..(25): SEQ ID NO: 7514; WAN024BUG_at; Start 51; Stop 75
accatttgaattaatactgcttata

SEQ ID NO: 94796 - DNA, 25 bp, Artificial
  probe
  misc_feature (1)..(25): SEQ ID NO: 7514; WAN024BUG_at; Start 28; Stop 52
tcacagctgattatgaaacctaaac

SEQ ID NO: 94797 - DNA, 25 bp, Artificial
  probe
  misc_feature (1)..(25): SEQ ID NO: 7514; WAN024BUG_at; Start 30; Stop 54
acagctgattatgaaacctaaacca

SEQ ID NO: 94798 - DNA, 25 bp, Artificial
  probe
  misc_feature (1)..(25): SEQ ID NO: 7514; WAN024BUG_at; Start 10; Stop 34
gataagctaccacatttctcacagc

SEQ ID NO: 94799 - DNA, 25 bp, Artificial
  probe
  misc_feature (1)..(25): SEQ ID NO: 7514; WAN024BUG_at; Start 36; Stop 60
gattatgaaacctaaaccatttgaa

SEQ ID NO: 94800 - DNA, 25 bp, Artificial
  probe
  misc_feature (1)..(25): SEQ ID NO: 7514; WAN024BUG_at; Start 31; Stop 55
cagctgattatgaaacctaaaccat

SEQ ID NO: 94801 - DNA, 25 bp, Artificial
  probe
  misc_feature (1)..(25): SEQ ID NO: 7514; WAN024BUG_at; Start 15; Stop 39
gctaccacatttctcacagctgatt

SEQ ID NO: 94802 - DNA, 25 bp, Artificial
  probe
  misc_feature (1)..(25): SEQ ID NO: 7514; WAN024BUG_at; Start 33; Stop 57
gctgattatgaaacctaaaccattt

SEQ ID NO: 94803 - DNA, 25 bp, Artificial
  probe
  misc_feature (1)..(25): SEQ ID NO: 7514; WAN024BUG_at; Start 22; Stop 46
catttctcacagctgattatgaaac

SEQ ID NO: 94804 - DNA, 25 bp, Artificial
  probe
  misc_feature (1)..(25): SEQ ID NO: 7514; WAN024BUG_at; Start 13; Stop 37
aagctaccacatttctcacagctga

SEQ ID NO: 94805 - DNA, 25 bp, Artificial
  probe
  misc_feature (1)..(25): SEQ ID NO: 7514; WAN024BUG_at; Start 12; Stop 36
taagctaccacatttctcacagctg

SEQ ID NO: 94806 - DNA, 25 bp, Artificial
  probe
  misc_feature (1)..(25): SEQ ID NO: 7514; WAN024BUG_at; Start 69; Stop 93
gcttatattgttctctgagggaact

SEQ ID NO: 94807 - DNA, 25 bp, Artificial
  probe
  misc_feature (1)..(25): SEQ ID NO: 7514; WAN024BUG_at; Start 19; Stop 43
ccacatttctcacagctgattatga

SEQ ID NO: 94808 - DNA, 25 bp, Artificial
  probe
  misc_feature (1)..(25): SEQ ID NO: 7514; WAN024BUG_at; Start 46; Stop 70
cctaaaccatttgaattaatactgc

SEQ ID NO: 94809 - DNA, 25 bp, Artificial
  probe
  misc_feature (1)..(25): SEQ ID NO: 7514; WAN024BUG_at; Start 9; Stop 33
tgataagctaccacatttctcacag

SEQ ID NO: 94810 - DNA, 25 bp, Artificial
  probe
  misc_feature (1)..(25): SEQ ID NO: 7514; WAN024BUG_at; Start 39; Stop 63
tatgaaacctaaaccatttgaatta

SEQ ID NO: 94811 - DNA, 25 bp, Artificial
  probe
  misc_feature (1)..(25): SEQ ID NO: 6696; WAN024BUH_at; Start 86; Stop 110
agcgtagcactagaggaggacaaat

SEQ ID NO: 94812 - DNA, 25 bp, Artificial
  probe
  misc_feature (1)..(25): SEQ ID NO: 6696; WAN024BUH_at; Start 39; Stop 63
gattgggatggctatcctatggatg

SEQ ID NO: 94813 - DNA, 25 bp, Artificial
  probe
  misc_feature (1)..(25): SEQ ID NO: 6696; WAN024BUH_at; Start 30; Stop 54
tatcaaagagattgggatggctatc

SEQ ID NO: 94814 - DNA, 25 bp, Artificial
  probe
  misc_feature (1)..(25): SEQ ID NO: 6696; WAN024BUH_at; Start 48; Stop 72
ggctatcctatggatgtttttaggg

SEQ ID NO: 94815 - DNA, 25 bp, Artificial
  probe
  misc_feature (1)..(25): SEQ ID NO: 6696; WAN024BUH_at; Start 67; Stop 91
ttagggtatctcttgggagagcgta

SEQ ID NO: 94816 - DNA, 25 bp, Artificial
  probe
  misc_feature (1)..(25): SEQ ID NO: 6696; WAN024BUH_at; Start 34; Stop 58
aaagagattgggatggctatcctat

SEQ ID NO: 94817 - DNA, 25 bp, Artificial
  probe
  misc_feature (1)..(25): SEQ ID NO: 6696; WAN024BUH_at; Start 89; Stop 113
gtagcactagaggaggacaaatcag

SEQ ID NO: 94818 - DNA, 25 bp, Artificial
  probe
  misc_feature (1)..(25): SEQ ID NO: 6696; WAN024BUH_at; Start 21; Stop 45
gaatgattttatcaaagagattggg

SEQ ID NO: 94819 - DNA, 25 bp, Artificial
  probe
  misc_feature (1)..(25): SEQ ID NO: 6696; WAN024BUH_at; Start 4; Stop 28
caaaggagagaaataatgaatgatt

SEQ ID NO: 94820 - DNA, 25 bp, Artificial
  probe
  misc_feature (1)..(25): SEQ ID NO: 6696; WAN024BUH_at; Start 27; Stop 51
ttttatcaaagagattgggatggct

SEQ ID NO: 94821 - DNA, 25 bp, Artificial
  probe
  misc_feature (1)..(25): SEQ ID NO: 6696; WAN024BUH_at; Start 28; Stop 52
tttatcaaagagattgggatggcta

SEQ ID NO: 94822 - DNA, 25 bp, Artificial
  probe
  misc_feature (1)..(25): SEQ ID NO: 6696; WAN024BUH_at; Start 43; Stop 67
gggatggctatcctatggatgtttt

SEQ ID NO: 94823 - DNA, 25 bp, Artificial
  probe
  misc_feature (1)..(25): SEQ ID NO: 6696; WAN024BUH_at; Start 45; Stop 69
gatggctatcctatggatgttttta

SEQ ID NO: 94824 - DNA, 25 bp, Artificial
  probe
  misc_feature (1)..(25): SEQ ID NO: 6696; WAN024BUH_at; Start 64; Stop 88
tttttagggtatctcttgggagagc

SEQ ID NO: 94825 - DNA, 25 bp, Artificial
  probe
  misc_feature (1)..(25): SEQ ID NO: 6696; WAN024BUH_at; Start 73; Stop 97
tatctcttgggagagcgtagcacta

SEQ ID NO: 94826 - DNA, 25 bp, Artificial
  probe
  misc_feature (1)..(25): SEQ ID NO: 6696; WAN024BUH_at; Start 41; Stop 65
ttgggatggctatcctatggatgtt

SEQ ID NO: 94827 - DNA, 25 bp, Artificial
  probe
  misc_feature (1)..(25): SEQ ID NO: 6696; WAN024BUH_at; Start 90; Stop 114
tagcactagaggaggacaaatcaga

SEQ ID NO: 94828 - DNA, 25 bp, Artificial
  probe
  misc_feature (1)..(25): SEQ ID NO: 6696; WAN024BUH_at; Start 33; Stop 57
caaagagattgggatggctatccta

SEQ ID NO: 94829 - DNA, 25 bp, Artificial
  probe
  misc_feature (1)..(25): SEQ ID NO: 6696; WAN024BUH_at; Start 31; Stop 55
atcaaagagattgggatggctatcc

SEQ ID NO: 94830 - DNA, 25 bp, Artificial
  probe
  misc_feature (1)..(25): SEQ ID NO: 6696; WAN024BUH_at; Start 62; Stop 86
tgtttttagggtatctcttgggaga

SEQ ID NO: 94831 - DNA, 25 bp, Artificial
  probe
  misc_feature (1)..(25): SEQ ID NO: 6696; WAN024BUH_at; Start 72; Stop 96
gtatctcttgggagagcgtagcact

SEQ ID NO: 94832 - DNA, 25 bp, Artificial
  probe
  misc_feature (1)..(25): SEQ ID NO: 6696; WAN024BUH_at; Start 71; Stop 95
ggtatctcttgggagagcgtagcac

SEQ ID NO: 94833 - DNA, 25 bp, Artificial
  probe
  misc_feature (1)..(25): SEQ ID NO: 6696; WAN024BUH_at; Start 85; Stop 109
gagcgtagcactagaggaggacaaa

SEQ ID NO: 94834 - DNA, 25 bp, Artificial
  probe
  misc_feature (1)..(25): SEQ ID NO: 6696; WAN024BUH_at; Start 2; Stop 26
tgcaaaggagagaaataatgaatga

SEQ ID NO: 94835 - DNA, 25 bp, Artificial
  probe
  misc_feature (1)..(25): SEQ ID NO: 6696; WAN024BUH_at; Start 87; Stop 111
gcgtagcactagaggaggacaaatc

SEQ ID NO: 94836 - DNA, 25 bp, Artificial
  probe
  misc_feature (1)..(25): SEQ ID NO: 6696; WAN024BUH_at; Start 74; Stop 98
atctcttgggagagcgtagcactag

SEQ ID NO: 94837 - DNA, 25 bp, Artificial
  probe
  misc_feature (1)..(25): SEQ ID NO: 6696; WAN024BUH_at; Start 60; Stop 84
gatgtttttagggtatctcttggga

SEQ ID NO: 94838 - DNA, 25 bp, Artificial
  probe
  misc_feature (1)..(25): SEQ ID NO: 6696; WAN024BUH_at; Start 54; Stop 78
cctatggatgtttttagggtatctc

SEQ ID NO: 94839 - DNA, 25 bp, Artificial
  probe
  misc_feature (1)..(25): SEQ ID NO: 6696; WAN024BUH_at; Start 88; Stop 112
cgtagcactagaggaggacaaatca

SEQ ID NO: 94840 - DNA, 25 bp, Artificial
  probe
  misc_feature (1)..(25): SEQ ID NO: 6696; WAN024BUH_at; Start 75; Stop 99
tctcttgggagagcgtagcactaga

SEQ ID NO: 94841 - DNA, 25 bp, Artificial
  probe
  misc_feature (1)..(25): SEQ ID NO: 6696; WAN024BUH_at; Start 65; Stop 89
ttttagggtatctcttgggagagcg

SEQ ID NO: 94842 - DNA, 25 bp, Artificial
  probe
  misc_feature (1)..(25): SEQ ID NO: 6696; WAN024BUH_at; Start 26; Stop 50
attttatcaaagagattgggatggc

SEQ ID NO: 94843 - DNA, 25 bp, Artificial
  probe
  misc_feature (1)..(25): SEQ ID NO: 6696; WAN024BUH_at; Start 84; Stop 108
agagcgtagcactagaggaggacaa

SEQ ID NO: 94844 - DNA, 25 bp, Artificial
  probe
  misc_feature (1)..(25): SEQ ID NO: 6696; WAN024BUH_at; Start 36; Stop 60
agagattgggatggctatcctatgg

SEQ ID NO: 94845 - DNA, 25 bp, Artificial
  probe
  misc_feature (1)..(25): SEQ ID NO: 6959; WAN024BUI_at; Start 249; Stop 273
tcagtatggacagctggacaaagtt

SEQ ID NO: 94846 - DNA, 25 bp, Artificial
  probe
  misc_feature (1)..(25): SEQ ID NO: 6959; WAN024BUI_at; Start 341; Stop 365
tagtctttaaatggtctgaccgtca

SEQ ID NO: 94847 - DNA, 25 bp, Artificial
  probe
  misc_feature (1)..(25): SEQ ID NO: 6959; WAN024BUI_at; Start 452; Stop 476
taaagtttgaggaggacaagaatgg

SEQ ID NO: 94848 - DNA, 25 bp, Artificial
  probe
  misc_feature (1)..(25): SEQ ID NO: 6959; WAN024BUI_at; Start 374; Stop 398
taaagaaattactagaggtgatacc

SEQ ID NO: 94849 - DNA, 25 bp, Artificial
  probe
  misc_feature (1)..(25): SEQ ID NO: 6959; WAN024BUI_at; Start 398; Stop 422
cattcaagcccttatttggtcagca

SEQ ID NO: 94850 - DNA, 25 bp, Artificial
  probe
  misc_feature (1)..(25): SEQ ID NO: 6959; WAN024BUI_at; Start 356; Stop 380
ctgaccgtcagataaatgtaaagaa

SEQ ID NO: 94851 - DNA, 25 bp, Artificial
  probe
  misc_feature (1)..(25): SEQ ID NO: 6959; WAN024BUI_at; Start 209; Stop 233
cacatctaaaatgggctggacctaa

SEQ ID NO: 94852 - DNA, 25 bp, Artificial
  probe
  misc_feature (1)..(25): SEQ ID NO: 6959; WAN024BUI_at; Start 315; Stop 339
gagagttctaaaagttggcggcaca

SEQ ID NO: 94853 - DNA, 25 bp, Artificial
  probe
  misc_feature (1)..(25): SEQ ID NO: 6959; WAN024BUI_at; Start 115; Stop 139
gacaaaaaggtcaatgtagaccctg

SEQ ID NO: 94854 - DNA, 25 bp, Artificial
  probe
  misc_feature (1)..(25): SEQ ID NO: 6959; WAN024BUI_at; Start 143; Stop 167
ttatcggtgattttcgtgacatgcc

SEQ ID NO: 94855 - DNA, 25 bp, Artificial
  probe
  misc_feature (1)..(25): SEQ ID NO: 6959; WAN024BUI_at; Start 388; Stop 412
gaggtgataccattcaagcccttat

SEQ ID NO: 94856 - DNA, 25 bp, Artificial
  probe
  misc_feature (1)..(25): SEQ ID NO: 6959; WAN024BUI_at; Start 63; Stop 87
cgaaagtcacacaatttttatggac

SEQ ID NO: 94857 - DNA, 25 bp, Artificial
  probe
  misc_feature (1)..(25): SEQ ID NO: 6959; WAN024BUI_at; Start 423; Stop 447
aagaggcaccacacactggctaacg

SEQ ID NO: 94858 - DNA, 25 bp, Artificial
  probe
  misc_feature (1)..(25): SEQ ID NO: 6959; WAN024BUI_at; Start 22; Stop 46
gacgcttgctgtggcagtcgtatgt

SEQ ID NO: 94859 - DNA, 25 bp, Artificial
  probe
  misc_feature (1)..(25): SEQ ID NO: 6959; WAN024BUI_at; Start 171; Stop 195
tgaagacaacacatttaatctagtt

SEQ ID NO: 94860 - DNA, 25 bp, Artificial
  probe
  misc_feature (1)..(25): SEQ ID NO: 6959; WAN024BUI_at; Start 221; Stop 245
gggctggacctaattcgataatgaa

SEQ ID NO: 94861 - DNA, 25 bp, Artificial
  probe
  misc_feature (1)..(25): SEQ ID NO: 6959; WAN024BUI_at; Start 74; Stop 98
caatttttatggacattaggcaaga

SEQ ID NO: 94862 - DNA, 25 bp, Artificial
  probe
  misc_feature (1)..(25): SEQ ID NO: 6959; WAN024BUI_at; Start 51; Stop 75
gtttgataaaaacgaaagtcacaca

SEQ ID NO: 94863 - DNA, 25 bp, Artificial
  probe
  misc_feature (1)..(25): SEQ ID NO: 6959; WAN024BUI_at; Start 127; Stop 151
aatgtagaccctgatattatcggtg

SEQ ID NO: 94864 - DNA, 25 bp, Artificial
  probe
  misc_feature (1)..(25): SEQ ID NO: 6959; WAN024BUI_at; Start 236; Stop 260
cgataatgaaagctcagtatggaca

SEQ ID NO: 94865 - DNA, 25 bp, Artificial
  probe
  misc_feature (1)..(25): SEQ ID NO: 6959; WAN024BUI_at; Start 85; Stop 109
gacattaggcaagaaacatttgaga

SEQ ID NO: 94866 - DNA, 25 bp, Artificial
  probe
  misc_feature (1)..(25): SEQ ID NO: 6959; WAN024BUI_at; Start 261; Stop 285
gctggacaaagttacctggtcggaa

SEQ ID NO: 94867 - DNA, 25 bp, Artificial
  probe
  misc_feature (1)..(25): SEQ ID NO: 6959; WAN024BUI_at; Start 434; Stop 458
cacactggctaacgtttgtaaagtt

SEQ ID NO: 94868 - DNA, 25 bp, Artificial
  probe
  misc_feature (1)..(25): SEQ ID NO: 6959; WAN024BUI_at; Start 290; Stop 314
tggccaagggttttgaagaatgtct

SEQ ID NO: 94869 - DNA, 25 bp, Artificial
  probe
  misc_feature (1)..(25): SEQ ID NO: 6959; WAN024BUI_at; Start 12; Stop 36
taaaattcttgacgcttgctgtggc

SEQ ID NO: 94870 - DNA, 25 bp, Artificial
  probe
  misc_feature (1)..(25): SEQ ID NO: 6959; WAN024BUI_at; Start 36; Stop 60
cagtcgtatgttttggtttgataaa

SEQ ID NO: 94871 - DNA, 25 bp, Artificial
  probe
  misc_feature (1)..(25): SEQ ID NO: 6959; WAN024BUI_at; Start 186; Stop 210
taatctagttgtgtttgatccacca

SEQ ID NO: 94872 - DNA, 25 bp, Artificial
  probe
  misc_feature (1)..(25): SEQ ID NO: 6959; WAN024BUI_at; Start 157; Stop 181
cgtgacatgccttttgaagacaaca

SEQ ID NO: 94873 - DNA, 25 bp, Artificial
  probe
  misc_feature (1)..(25): SEQ ID NO: 6959; WAN024BUI_at; Start 298; Stop 322
ggttttgaagaatgtctgagagttc

SEQ ID NO: 94874 - DNA, 25 bp, Artificial
  probe
  misc_feature (1)..(25): SEQ ID NO: 6959; WAN024BUI_at; Start 273; Stop 297
tacctggtcggaagatttggccaag

SEQ ID NO: 94875 - DNA, 25 bp, Artificial
  probe
  misc_feature (1)..(25): SEQ ID NO: 6959; WAN024BUI_at; Start 330; Stop 354
tggcggcacactagtctttaaatgg

SEQ ID NO: 94876 - DNA, 25 bp, Artificial
  probe
  misc_feature (1)..(25): SEQ ID NO: 6959; WAN024BUI_at; Start 410; Stop 434
tatttggtcagcaaagaggcaccac

SEQ ID NO: 94877 - DNA, 25 bp, Artificial
  probe
  misc_feature (1)..(25): SEQ ID NO: 6959; WAN024BUI_at; Start 101; Stop 125
catttgagatacatgacaaaaaggt

SEQ ID NO: 94878 - DNA, 25 bp, Artificial
  probe
  misc_feature (1)..(25): SEQ ID NO: 6959; WAN024BUI_at; Start 200; Stop 224
ttgatccaccacatctaaaatgggc

SEQ ID NO: 94879 - DNA, 25 bp, Artificial
  probe
  misc_feature (1)..(25): SEQ ID NO: 7255; WAN024BUJ_at; Start 89; Stop 113
tagtgaccgcaataaccggtcgcaa

SEQ ID NO: 94880 - DNA, 25 bp, Artificial
  probe
  misc_feature (1)..(25): SEQ ID NO: 7255; WAN024BUJ_at; Start 30; Stop 54
caggttacttgaaaaggcaatagac

SEQ ID NO: 94881 - DNA, 25 bp, Artificial
  probe
  misc_feature (1)..(25): SEQ ID NO: 7255; WAN024BUJ_at; Start 14; Stop 38
acaaagaagattggctcaggttact

SEQ ID NO: 94882 - DNA, 25 bp, Artificial
  probe
  misc_feature (1)..(25): SEQ ID NO: 7255; WAN024BUJ_at; Start 47; Stop 71
caatagacaatattcctgaaacggt

SEQ ID NO: 94883 - DNA, 25 bp, Artificial
  probe
  misc_feature (1)..(25): SEQ ID NO: 7255; WAN024BUJ_at; Start 22; Stop 46
gattggctcaggttacttgaaaagg

SEQ ID NO: 94884 - DNA, 25 bp, Artificial
  probe
  misc_feature (1)..(25): SEQ ID NO: 7255; WAN024BUJ_at; Start 54; Stop 78
caatattcctgaaacggtaactgct

SEQ ID NO: 94885 - DNA, 25 bp, Artificial
  probe
  misc_feature (1)..(25): SEQ ID NO: 7255; WAN024BUJ_at; Start 6; Stop 30
gaagttgaacaaagaagattggctc

SEQ ID NO: 94886 - DNA, 25 bp, Artificial
  probe
  misc_feature (1)..(25): SEQ ID NO: 7255; WAN024BUJ_at; Start 64; Stop 88
gaaacggtaactgctatcgcaagtc

SEQ ID NO: 94887 - DNA, 25 bp, Artificial
  probe
  misc_feature (1)..(25): SEQ ID NO: 7255; WAN024BUJ_at; Start 2; Stop 26
tgatgaagttgaacaaagaagattg

SEQ ID NO: 94888 - DNA, 25 bp, Artificial
  probe
  misc_feature (1)..(25): SEQ ID NO: 7255; WAN024BUJ_at; Start 25; Stop 49
tggctcaggttacttgaaaaggcaa

SEQ ID NO: 94889 - DNA, 25 bp, Artificial
  probe
  misc_feature (1)..(25): SEQ ID NO: 7255; WAN024BUJ_at; Start 80; Stop 104
tcgcaagtctagtgaccgcaataac

SEQ ID NO: 94890 - DNA, 25 bp, Artificial
  probe
  misc_feature (1)..(25): SEQ ID NO: 7255; WAN024BUJ_at; Start 52; Stop 76
gacaatattcctgaaacggtaactg

SEQ ID NO: 94891 - DNA, 25 bp, Artificial
  probe
  misc_feature (1)..(25): SEQ ID NO: 7255; WAN024BUJ_at; Start 105; Stop 129
cggtcgcaaggcaaaacaaaaagcg

SEQ ID NO: 94892 - DNA, 25 bp, Artificial
  probe
  misc_feature (1)..(25): SEQ ID NO: 7255; WAN024BUJ_at; Start 75; Stop 99
tgctatcgcaagtctagtgaccgca

SEQ ID NO: 94893 - DNA, 25 bp, Artificial
  probe
  misc_feature (1)..(25): SEQ ID NO: 7255; WAN024BUJ_at; Start 40; Stop 64
gaaaaggcaatagacaatattcctg

SEQ ID NO: 94894 - DNA, 25 bp, Artificial
  probe
  misc_feature (1)..(25): SEQ ID NO: 7255; WAN024BUJ_at; Start 27; Stop 51
gctcaggttacttgaaaaggcaata

SEQ ID NO: 94895 - DNA, 25 bp, Artificial
  probe
  misc_feature (1)..(25): SEQ ID NO: 7255; WAN024BUJ_at; Start 97; Stop 121
gcaataaccggtcgcaaggcaaaac

SEQ ID NO: 94896 - DNA, 25 bp, Artificial
  probe
  misc_feature (1)..(25): SEQ ID NO: 7255; WAN024BUJ_at; Start 69; Stop 93
ggtaactgctatcgcaagtctagtg

SEQ ID NO: 94897 - DNA, 25 bp, Artificial
  probe
  misc_feature (1)..(25): SEQ ID NO: 7255; WAN024BUJ_at; Start 32; Stop 56
ggttacttgaaaaggcaatagacaa

SEQ ID NO: 94898 - DNA, 25 bp, Artificial
  probe
  misc_feature (1)..(25): SEQ ID NO: 7255; WAN024BUJ_at; Start 11; Stop 35
tgaacaaagaagattggctcaggtt

SEQ ID NO: 94899 - DNA, 25 bp, Artificial
  probe
  misc_feature (1)..(25): SEQ ID NO: 7255; WAN024BUJ_at; Start 92; Stop 116
tgaccgcaataaccggtcgcaaggc

SEQ ID NO: 94900 - DNA, 25 bp, Artificial
  probe
  misc_feature (1)..(25): SEQ ID NO: 7255; WAN024BUJ_at; Start 45; Stop 69
ggcaatagacaatattcctgaaacg

SEQ ID NO: 94901 - DNA, 25 bp, Artificial
  probe
  misc_feature (1)..(25): SEQ ID NO: 7255; WAN024BUJ_at; Start 61; Stop 85
cctgaaacggtaactgctatcgcaa

SEQ ID NO: 94902 - DNA, 25 bp, Artificial
  probe
  misc_feature (1)..(25): SEQ ID NO: 7255; WAN024BUJ_at; Start 83; Stop 107
caagtctagtgaccgcaataaccgg

SEQ ID NO: 94903 - DNA, 25 bp, Artificial
  probe
  misc_feature (1)..(25): SEQ ID NO: 7255; WAN024BUJ_at; Start 78; Stop 102
tatcgcaagtctagtgaccgcaata

SEQ ID NO: 94904 - DNA, 25 bp, Artificial
  probe
  misc_feature (1)..(25): SEQ ID NO: 7255; WAN024BUJ_at; Start 9; Stop 33
gttgaacaaagaagattggctcagg

SEQ ID NO: 94905 - DNA, 25 bp, Artificial
  probe
  misc_feature (1)..(25): SEQ ID NO: 7255; WAN024BUJ_at; Start 66; Stop 90
aacggtaactgctatcgcaagtcta

SEQ ID NO: 94906 - DNA, 25 bp, Artificial
  probe
  misc_feature (1)..(25): SEQ ID NO: 7255; WAN024BUJ_at; Start 59; Stop 83
ttcctgaaacggtaactgctatcgc

SEQ ID NO: 94907 - DNA, 25 bp, Artificial
  probe
  misc_feature (1)..(25): SEQ ID NO: 7255; WAN024BUJ_at; Start 87; Stop 111
tctagtgaccgcaataaccggtcgc

SEQ ID NO: 94908 - DNA, 25 bp, Artificial
  probe
  misc_feature (1)..(25): SEQ ID NO: 7255; WAN024BUJ_at; Start 50; Stop 74
tagacaatattcctgaaacggtaac

SEQ ID NO: 94909 - DNA, 25 bp, Artificial
  probe
  misc_feature (1)..(25): SEQ ID NO: 7255; WAN024BUJ_at; Start 19; Stop 43
gaagattggctcaggttacttgaaa

SEQ ID NO: 94910 - DNA, 25 bp, Artificial
  probe
  misc_feature (1)..(25): SEQ ID NO: 7255; WAN024BUJ_at; Start 71; Stop 95
taactgctatcgcaagtctagtgac

SEQ ID NO: 94911 - DNA, 25 bp, Artificial
  probe
  misc_feature (1)..(25): SEQ ID NO: 7255; WAN024BUJ_at; Start 73; Stop 97
actgctatcgcaagtctagtgaccg

SEQ ID NO: 94912 - DNA, 25 bp, Artificial
  probe
  misc_feature (1)..(25): SEQ ID NO: 7255; WAN024BUJ_at; Start 96; Stop 120
cgcaataaccggtcgcaaggcaaaa

SEQ ID NO: 94913 - DNA, 25 bp, Artificial
  probe
  misc_feature (1)..(25): SEQ ID NO: 7048; WAN024BUK_at; Start 406; Stop 430
ggaaatatcaacaatccaggctctg

SEQ ID NO: 94914 - DNA, 25 bp, Artificial
  probe
  misc_feature (1)..(25): SEQ ID NO: 7048; WAN024BUK_at; Start 294; Stop 318
tggtgcaacctatagccctcatggg

SEQ ID NO: 94915 - DNA, 25 bp, Artificial
  probe
  misc_feature (1)..(25): SEQ ID NO: 7048; WAN024BUK_at; Start 417; Stop 441
caatccaggctctgtctatagcgag

SEQ ID NO: 94916 - DNA, 25 bp, Artificial
  probe
  misc_feature (1)..(25): SEQ ID NO: 7048; WAN024BUK_at; Start 321; Stop 345
gcatgcctggaaactagaaatcaag

SEQ ID NO: 94917 - DNA, 25 bp, Artificial
  probe
  misc_feature (1)..(25): SEQ ID NO: 7048; WAN024BUK_at; Start 245; Stop 269
tgctagagtttagctaccagttggg

SEQ ID NO: 94918 - DNA, 25 bp, Artificial
  probe
  misc_feature (1)..(25): SEQ ID NO: 7048; WAN024BUK_at; Start 228; Stop 252
tcagcctaaggacaatgtgctagag

SEQ ID NO: 94919 - DNA, 25 bp, Artificial
  probe
  misc_feature (1)..(25): SEQ ID NO: 7048; WAN024BUK_at; Start 524; Stop 548
tgaccattgattgtaggcataagaa

SEQ ID NO: 94920 - DNA, 25 bp, Artificial
  probe
  misc_feature (1)..(25): SEQ ID NO: 7048; WAN024BUK_at; Start 341; Stop 365
tcaagttgaacatgcaaccgttccg

SEQ ID NO: 94921 - DNA, 25 bp, Artificial
  probe
  misc_feature (1)..(25): SEQ ID NO: 7048; WAN024BUK_at; Start 198; Stop 222
actggatgtttctactatcgtggag

SEQ ID NO: 94922 - DNA, 25 bp, Artificial
  probe
  misc_feature (1)..(25): SEQ ID NO: 7048; WAN024BUK_at; Start 65; Stop 89
ttggtcaggtggaggcagctaaacc

SEQ ID NO: 94923 - DNA, 25 bp, Artificial
  probe
  misc_feature (1)..(25): SEQ ID NO: 7048; WAN024BUK_at; Start 658; Stop 682
cgcaaggtcacggttcggccgaatt

SEQ ID NO: 94924 - DNA, 25 bp, Artificial
  probe
  misc_feature (1)..(25): SEQ ID NO: 7048; WAN024BUK_at; Start 495; Stop 519
aactatgcacttgaccgttagacga

SEQ ID NO: 94925 - DNA, 25 bp, Artificial
  probe
  misc_feature (1)..(25): SEQ ID NO: 7048; WAN024BUK_at; Start 435; Stop 459
tagcgagcctgtgattgagattgag

SEQ ID NO: 94926 - DNA, 25 bp, Artificial
  probe
  misc_feature (1)..(25): SEQ ID NO: 7048; WAN024BUK_at; Start 590; Stop 614
tacgtaaacgtggaggcttctttga

SEQ ID NO: 94927 - DNA, 25 bp, Artificial
  probe
  misc_feature (1)..(25): SEQ ID NO: 7048; WAN024BUK_at; Start 46; Stop 70
cactgcgtggtgacggattttggtc

SEQ ID NO: 94928 - DNA, 25 bp, Artificial
  probe
  misc_feature (1)..(25): SEQ ID NO: 7048; WAN024BUK_at; Start 150; Stop 174
tggctatgagagttatgaacggact

SEQ ID NO: 94929 - DNA, 25 bp, Artificial
  probe
  misc_feature (1)..(25): SEQ ID NO: 7048; WAN024BUK_at; Start 480; Stop 504
gactatcggaaggacaactatgcac

SEQ ID NO: 94930 - DNA, 25 bp, Artificial
  probe
  misc_feature (1)..(25): SEQ ID NO: 7048; WAN024BUK_at; Start 630; Stop 654
taacagtctggtctttactggttcg

SEQ ID NO: 94931 - DNA, 25 bp, Artificial
  probe
  misc_feature (1)..(25): SEQ ID NO: 7048; WAN024BUK_at; Start 113; Stop 137
tctacggagccaacggaagttatcg

SEQ ID NO: 94932 - DNA, 25 bp, Artificial
  probe
  misc_feature (1)..(25): SEQ ID NO: 7048; WAN024BUK_at; Start 84; Stop 108
taaacctagggtggctgaagatgct

SEQ ID NO: 94933 - DNA, 25 bp, Artificial
  probe
  misc_feature (1)..(25): SEQ ID NO: 7048; WAN024BUK_at; Start 306; Stop 330
tagccctcatgggatgcatgcctgg

SEQ ID NO: 94934 - DNA, 25 bp, Artificial
  probe
  misc_feature (1)..(25): SEQ ID NO: 7048; WAN024BUK_at; Start 645; Stop 669
tactggttcggttcgcaaggtcacg

SEQ ID NO: 94935 - DNA, 25 bp, Artificial
  probe
  misc_feature (1)..(25): SEQ ID NO: 7048; WAN024BUK_at; Start 568; Stop 592
gatggcgcggttcaaaatactttac

SEQ ID NO: 94936 - DNA, 25 bp, Artificial
  probe
  misc_feature (1)..(25): SEQ ID NO: 7048; WAN024BUK_at; Start 362; Stop 386
tccgttatcagaaaaatgttgctcc

SEQ ID NO: 94937 - DNA, 25 bp, Artificial
  probe
  misc_feature (1)..(25): SEQ ID NO: 7048; WAN024BUK_at; Start 213; Stop 237
tatcgtggagaaatttcagcctaag

SEQ ID NO: 94938 - DNA, 25 bp, Artificial
  probe
  misc_feature (1)..(25): SEQ ID NO: 7048; WAN024BUK_at; Start 279; Stop 303
ttatgcggattttattggtgcaacc

SEQ ID NO: 94939 - DNA, 25 bp, Artificial
  probe
  misc_feature (1)..(25): SEQ ID NO: 7048; WAN024BUK_at; Start 553; Stop 577
aatatctataatgcagatggcgcgg

SEQ ID NO: 94940 - DNA, 25 bp, Artificial
  probe
  misc_feature (1)..(25): SEQ ID NO: 7048; WAN024BUK_at; Start 99; Stop 123
tgaagatgctaacctctacggagcc

SEQ ID NO: 94941 - DNA, 25 bp, Artificial
  probe
  misc_feature (1)..(25): SEQ ID NO: 7048; WAN024BUK_at; Start 509; Stop 533
ccgttagacgaaaagtgaccattga

SEQ ID NO: 94942 - DNA, 25 bp, Artificial
  probe
  misc_feature (1)..(25): SEQ ID NO: 7048; WAN024BUK_at; Start 385; Stop 409
cctcttatctttaccgcaagtggaa

SEQ ID NO: 94943 - DNA, 25 bp, Artificial
  probe
  misc_feature (1)..(25): SEQ ID NO: 7048; WAN024BUK_at; Start 30; Stop 54
tacatcaactatccctcactgcgtg

SEQ ID NO: 94944 - DNA, 25 bp, Artificial
  probe
  misc_feature (1)..(25): SEQ ID NO: 7048; WAN024BUK_at; Start 132; Stop 156
ttatcgagtgctggatggtggctat

SEQ ID NO: 94945 - DNA, 25 bp, Artificial
  probe
  misc_feature (1)..(25): SEQ ID NO: 7048; WAN024BUK_at; Start 605; Stop 629
gcttctttgagttggcagttggtaa

SEQ ID NO: 94946 - DNA, 25 bp, Artificial
  probe
  misc_feature (1)..(25): SEQ ID NO: 7048; WAN024BUK_at; Start 672; Stop 696
tcggccgaattggaggtatatctta

SEQ ID NO: 94947 - DNA, 25 bp, Artificial
  probe
  misc_feature (1)..(25): SEQ ID NO: 7304; WAN024BUL_at; Start 2073; Stop 2097
tccgattgagtatgaccgcaagctc

SEQ ID NO: 94948 - DNA, 25 bp, Artificial
  probe
  misc_feature (1)..(25): SEQ ID NO: 7304; WAN024BUL_at; Start 2292; Stop 2316
aatcgaggcgaaagacagtcaaacc

SEQ ID NO: 94949 - DNA, 25 bp, Artificial
  probe
  misc_feature (1)..(25): SEQ ID NO: 7304; WAN024BUL_at; Start 2043; Stop 2067
tattgctagctggattcgtgaccac

SEQ ID NO: 94950 - DNA, 25 bp, Artificial
  probe
  misc_feature (1)..(25): SEQ ID NO: 7304; WAN024BUL_at; Start 997; Stop 1021
ggattgctatctggaatacctgctg

SEQ ID NO: 94951 - DNA, 25 bp, Artificial
  probe
  misc_feature (1)..(25): SEQ ID NO: 7304; WAN024BUL_at; Start 1178; Stop 1202
tagcttggatcaaacaggcttggca

SEQ ID NO: 94952 - DNA, 25 bp, Artificial
  probe
  misc_feature (1)..(25): SEQ ID NO: 7304; WAN024BUL_at; Start 2307; Stop 2331
cagtcaaaccgtgtctgagatagcg

SEQ ID NO: 94953 - DNA, 25 bp, Artificial
  probe
  misc_feature (1)..(25): SEQ ID NO: 7304; WAN024BUL_at; Start 2170; Stop 2194
aaatctgtcagtggaatggctggcg

SEQ ID NO: 94954 - DNA, 25 bp, Artificial
  probe
  misc_feature (1)..(25): SEQ ID NO: 7304; WAN024BUL_at; Start 555; Stop 579
gcaacgacttttggcggatgctgaa

SEQ ID NO: 94955 - DNA, 25 bp, Artificial
  probe
  misc_feature (1)..(25): SEQ ID NO: 7304; WAN024BUL_at; Start 975; Stop 999
taaagcattttcgacagtctcggga

SEQ ID NO: 94956 - DNA, 25 bp, Artificial
  probe
  misc_feature (1)..(25): SEQ ID NO: 7304; WAN024BUL_at; Start 2418; Stop 2442
gagcgtctaccaacgtcaaggtgcg

SEQ ID NO: 94957 - DNA, 25 bp, Artificial
  probe
  misc_feature (1)..(25): SEQ ID NO: 7304; WAN024BUL_at; Start 2259; Stop 2283
tattgaagcaagtttggccatgcca

SEQ ID NO: 94958 - DNA, 25 bp, Artificial
  probe
  misc_feature (1)..(25): SEQ ID NO: 7304; WAN024BUL_at; Start 2277; Stop 2301
catgccaagcgctcaaatcgaggcg

SEQ ID NO: 94959 - DNA, 25 bp, Artificial
  probe
  misc_feature (1)..(25): SEQ ID NO: 7304; WAN024BUL_at; Start 2374; Stop 2398
gaaaagccgtcagatacttacctag

SEQ ID NO: 94960 - DNA, 25 bp, Artificial
  probe
  misc_feature (1)..(25): SEQ ID NO: 7304; WAN024BUL_at; Start 452; Stop 476
catctatggaaagcattcaactggc

SEQ ID NO: 94961 - DNA, 25 bp, Artificial
  probe
  misc_feature (1)..(25): SEQ ID NO: 7304; WAN024BUL_at; Start 1838; Stop 1862
taggtctgattgacggacttgtcca

SEQ ID NO: 94962 - DNA, 25 bp, Artificial
  probe
  misc_feature (1)..(25): SEQ ID NO: 7304; WAN024BUL_at; Start 1092; Stop 1116
catcgcagcgattgcaggactaact

SEQ ID NO: 94963 - DNA, 25 bp, Artificial
  probe
  misc_feature (1)..(25): SEQ ID NO: 7304; WAN024BUL_at; Start 112; Stop 136
gcaggcgaatccctcggttctaaaa

SEQ ID NO: 94964 - DNA, 25 bp, Artificial
  probe
  misc_feature (1)..(25): SEQ ID NO: 7304; WAN024BUL_at; Start 651; Stop 675
gaatttggacatcactggtacgaca

SEQ ID NO: 94965 - DNA, 25 bp, Artificial
  probe
  misc_feature (1)..(25): SEQ ID NO: 7304; WAN024BUL_at; Start 336; Stop 360
tgttacaggtttctcagcaagcttg

SEQ ID NO: 94966 - DNA, 25 bp, Artificial
  probe
  misc_feature (1)..(25): SEQ ID NO: 7304; WAN024BUL_at; Start 1956; Stop 1980
cctatggtcagcaggtaaggctatc

SEQ ID NO: 94967 - DNA, 25 bp, Artificial
  probe
  misc_feature (1)..(25): SEQ ID NO: 7304; WAN024BUL_at; Start 1031; Stop 1055
caattaaaacagcagtcacgggtct

SEQ ID NO: 94968 - DNA, 25 bp, Artificial
  probe
  misc_feature (1)..(25): SEQ ID NO: 7304; WAN024BUL_at; Start 779; Stop 803
cactacaagctttgatggaaacgac

SEQ ID NO: 94969 - DNA, 25 bp, Artificial
  probe
  misc_feature (1)..(25): SEQ ID NO: 7304; WAN024BUL_at; Start 532; Stop 556
tatggtggtacgaagcaagaaatgc

SEQ ID NO: 94970 - DNA, 25 bp, Artificial
  probe
  misc_feature (1)..(25): SEQ ID NO: 7304; WAN024BUL_at; Start 617; Stop 641
cagacgtttatagcgccattcacac

SEQ ID NO: 94971 - DNA, 25 bp, Artificial
  probe
  misc_feature (1)..(25): SEQ ID NO: 7304; WAN024BUL_at; Start 88; Stop 112
gaagttgcctcagctggcgttagcg

SEQ ID NO: 94972 - DNA, 25 bp, Artificial
  probe
  misc_feature (1)..(25): SEQ ID NO: 7304; WAN024BUL_at; Start 1472; Stop 1496
tccaaggcgtttgggaattcatcaa

SEQ ID NO: 94973 - DNA, 25 bp, Artificial
  probe
  misc_feature (1)..(25): SEQ ID NO: 7304; WAN024BUL_at; Start 209; Stop 233
gggcagcacttcaacaatctcttgg

SEQ ID NO: 94974 - DNA, 25 bp, Artificial
  probe
  misc_feature (1)..(25): SEQ ID NO: 7304; WAN024BUL_at; Start 1077; Stop 1101
tcctattggaattgccatcgcagcg

SEQ ID NO: 94975 - DNA, 25 bp, Artificial
  probe
  misc_feature (1)..(25): SEQ ID NO: 7304; WAN024BUL_at; Start 1224; Stop 1248
aaacctttggtctggcatctctgaa

SEQ ID NO: 94976 - DNA, 25 bp, Artificial
  probe
  misc_feature (1)..(25): SEQ ID NO: 7304; WAN024BUL_at; Start 712; Stop 736
gaatcgatgaaatcagctgctcaga

SEQ ID NO: 94977 - DNA, 25 bp, Artificial
  probe
  misc_feature (1)..(25): SEQ ID NO: 7304; WAN024BUL_at; Start 2221; Stop 2245
gattttggcttgagtggaacaccga

SEQ ID NO: 94978 - DNA, 25 bp, Artificial
  probe
  misc_feature (1)..(25): SEQ ID NO: 7304; WAN024BUL_at; Start 273; Stop 297
caaaggatttgcgaacgaggcttac

SEQ ID NO: 94979 - DNA, 25 bp, Artificial
  probe
  misc_feature (1)..(25): SEQ ID NO: 7304; WAN024BUL_at; Start 1330; Stop 1354
caagaagctgcatctgtggcatgga

SEQ ID NO: 94980 - DNA, 25 bp, Artificial
  probe
  misc_feature (1)..(25): SEQ ID NO: 7304; WAN024BUL_at; Start 669; Stop 693
tacgacagctagagaggcagcaact

SEQ ID NO: 94981 - DNA, 25 bp, Artificial
  probe
  misc_feature (1)..(25): SEQ ID NO: 6682; WAN024BUM_at; Start 38; Stop 62
tagcggaaacctaccaaatatacga

SEQ ID NO: 94982 - DNA, 25 bp, Artificial
  probe
  misc_feature (1)..(25): SEQ ID NO: 6682; WAN024BUM_at; Start 312; Stop 336
tctcgtctttgaatctggtgaggac

SEQ ID NO: 94983 - DNA, 25 bp, Artificial
  probe
  misc_feature (1)..(25): SEQ ID NO: 6682; WAN024BUM_at; Start 114; Stop 138
tgatgattcgcggataaagcagatg

SEQ ID NO: 94984 - DNA, 25 bp, Artificial
  probe
  misc_feature (1)..(25): SEQ ID NO: 6682; WAN024BUM_at; Start 144; Stop 168
tgaccaaatcgtccctcttgaaacg

SEQ ID NO: 94985 - DNA, 25 bp, Artificial
  probe
  misc_feature (1)..(25): SEQ ID NO: 6682; WAN024BUM_at; Start 238; Stop 262
ggtgttaatcgtcctgcatcaattg

SEQ ID NO: 94986 - DNA, 25 bp, Artificial
  probe
  misc_feature (1)..(25): SEQ ID NO: 6682; WAN024BUM_at; Start 232; Stop 256
caaaagggtgttaatcgtcctgcat

SEQ ID NO: 94987 - DNA, 25 bp, Artificial
  probe
  misc_feature (1)..(25): SEQ ID NO: 6682; WAN024BUM_at; Start 321; Stop 345
tgaatctggtgaggactttgaaaac

SEQ ID NO: 94988 - DNA, 25 bp, Artificial
  probe
  misc_feature (1)..(25): SEQ ID NO: 6682; WAN024BUM_at; Start 2; Stop 26
tgattgccttagacgaggatgctct

SEQ ID NO: 94989 - DNA, 25 bp, Artificial
  probe
  misc_feature (1)..(25): SEQ ID NO: 6682; WAN024BUM_at; Start 56; Stop 80
tatacgactataaacagctaccttt

SEQ ID NO: 94990 - DNA, 25 bp, Artificial
  probe
  misc_feature (1)..(25): SEQ ID NO: 6682; WAN024BUM_at; Start 360; Stop 384
gcttgcaaaaacaggaggtgaggat

SEQ ID NO: 94991 - DNA, 25 bp, Artificial
  probe
  misc_feature (1)..(25): SEQ ID NO: 6682; WAN024BUM_at; Start 135; Stop 159
gatgatgtctgaccaaatcgtccct

SEQ ID NO: 94992 - DNA, 25 bp, Artificial
  probe
  misc_feature (1)..(25): SEQ ID NO: 6682; WAN024BUM_at; Start 257; Stop 281
caattgctgaattacttacaaagaa

SEQ ID NO: 94993 - DNA, 25 bp, Artificial
  probe
  misc_feature (1)..(25): SEQ ID NO: 6682; WAN024BUM_at; Start 190; Stop 214
gacagactgtctctttctttgtggt

SEQ ID NO: 94994 - DNA, 25 bp, Artificial
  probe
  misc_feature (1)..(25): SEQ ID NO: 6682; WAN024BUM_at; Start 224; Stop 248
aagatgggcaaaagggtgttaatcg

SEQ ID NO: 94995 - DNA, 25 bp, Artificial
  probe
  misc_feature (1)..(25): SEQ ID NO: 6682; WAN024BUM_at; Start 11; Stop 35
tagacgaggatgctcttatctgtga

SEQ ID NO: 94996 - DNA, 25 bp, Artificial
  probe
  misc_feature (1)..(25): SEQ ID NO: 6682; WAN024BUM_at; Start 178; Stop 202
gcaagtatcgtagacagactgtctc

SEQ ID NO: 94997 - DNA, 25 bp, Artificial
  probe
  misc_feature (1)..(25): SEQ ID NO: 6682; WAN024BUM_at; Start 83; Stop 107
atcaggtggctgtttttgcgtatgg

SEQ ID NO: 94998 - DNA, 25 bp, Artificial
  probe
  misc_feature (1)..(25): SEQ ID NO: 6682; WAN024BUM_at; Start 331; Stop 355
gaggactttgaaaactatcgcaagg

SEQ ID NO: 94999 - DNA, 25 bp, Artificial
  probe
  misc_feature (1)..(25): SEQ ID NO: 6682; WAN024BUM_at; Start 197; Stop 221
tgtctctttctttgtggttgaaaac

SEQ ID NO: 95000 - DNA, 25 bp, Artificial
  probe
  misc_feature (1)..(25): SEQ ID NO: 6682; WAN024BUM_at; Start 340; Stop 364
gaaaactatcgcaaggctttgcttg

SEQ ID NO: 95001 - DNA, 25 bp, Artificial
  probe
  misc_feature (1)..(25): SEQ ID NO: 6682; WAN024BUM_at; Start 155; Stop 179
tccctcttgaaacgacgttacttgc

SEQ ID NO: 95002 - DNA, 25 bp, Artificial
  probe
  misc_feature (1)..(25): SEQ ID NO: 6682; WAN024BUM_at; Start 68; Stop 92
aacagctacctttaaatcaggtggc

SEQ ID NO: 95003 - DNA, 25 bp, Artificial
  probe
  misc_feature (1)..(25): SEQ ID NO: 6682; WAN024BUM_at; Start 273; Stop 297
tacaaagaataacaaagaagaggga

SEQ ID NO: 95004 - DNA, 25 bp, Artificial
  probe
  misc_feature (1)..(25): SEQ ID NO: 6682; WAN024BUM_at; Start 98; Stop 122
ttgcgtatgggttgcgtgatgattc

SEQ ID NO: 95005 - DNA, 25 bp, Artificial
  probe
  misc_feature (1)..(25): SEQ ID NO: 6682; WAN024BUM_at; Start 24; Stop 48
tcttatctgtgatttagcggaaacc

SEQ ID NO: 95006 - DNA, 25 bp, Artificial
  probe
  misc_feature (1)..(25): SEQ ID NO: 6682; WAN024BUM_at; Start 298; Stop 322
gatgaaagggattatctcgtctttg

SEQ ID NO: 95007 - DNA, 25 bp, Artificial
  probe
  misc_feature (1)..(25): SEQ ID NO: 6682; WAN024BUM_at; Start 243; Stop 267
taatcgtcctgcatcaattgctgaa

SEQ ID NO: 95008 - DNA, 25 bp, Artificial
  probe
  misc_feature (1)..(25): SEQ ID NO: 6682; WAN024BUM_at; Start 31; Stop 55
tgtgatttagcggaaacctaccaaa

SEQ ID NO: 95009 - DNA, 25 bp, Artificial
  probe
  misc_feature (1)..(25): SEQ ID NO: 6682; WAN024BUM_at; Start 43; Stop 67
gaaacctaccaaatatacgactata

SEQ ID NO: 95010 - DNA, 25 bp, Artificial
  probe
  misc_feature (1)..(25): SEQ ID NO: 6682; WAN024BUM_at; Start 120; Stop 144
ttcgcggataaagcagatgatgtct

SEQ ID NO: 95011 - DNA, 25 bp, Artificial
  probe
  misc_feature (1)..(25): SEQ ID NO: 6682; WAN024BUM_at; Start 282; Stop 306
taacaaagaagagggagatgaaagg

SEQ ID NO: 95012 - DNA, 25 bp, Artificial
  probe
  misc_feature (1)..(25): SEQ ID NO: 6682; WAN024BUM_at; Start 163; Stop 187
gaaacgacgttacttgcaagtatcg

SEQ ID NO: 95013 - DNA, 25 bp, Artificial
  probe
  misc_feature (1)..(25): SEQ ID NO: 6682; WAN024BUM_at; Start 173; Stop 197
tacttgcaagtatcgtagacagact

SEQ ID NO: 95014 - DNA, 25 bp, Artificial
  probe
  misc_feature (1)..(25): SEQ ID NO: 6682; WAN024BUM_at; Start 355; Stop 379
gctttgcttgcaaaaacaggaggtg

SEQ ID NO: 95015 - DNA, 25 bp, Artificial
  probe
  misc_feature (1)..(25): SEQ ID NO: 6800; WAN024BUN_at; Start 81; Stop 105
catgcgcgaagcttccaaaatggag

SEQ ID NO: 95016 - DNA, 25 bp, Artificial
  probe
  misc_feature (1)..(25): SEQ ID NO: 6800; WAN024BUN_at; Start 185; Stop 209
tagatgatggagacgacttcatcga

SEQ ID NO: 95017 - DNA, 25 bp, Artificial
  probe
  misc_feature (1)..(25): SEQ ID NO: 6800; WAN024BUN_at; Start 68; Stop 92
gaaacttttatctcatgcgcgaagc

SEQ ID NO: 95018 - DNA, 25 bp, Artificial
  probe
  misc_feature (1)..(25): SEQ ID NO: 6800; WAN024BUN_at; Start 206; Stop 230
tcgatactgaggtactgttcgcaga

SEQ ID NO: 95019 - DNA, 25 bp, Artificial
  probe
  misc_feature (1)..(25): SEQ ID NO: 6800; WAN024BUN_at; Start 31; Stop 55
tcagggtttgagtacaaaatcccta

SEQ ID NO: 95020 - DNA, 25 bp, Artificial
  probe
  misc_feature (1)..(25): SEQ ID NO: 6800; WAN024BUN_at; Start 199; Stop 223
gacttcatcgatactgaggtactgt

SEQ ID NO: 95021 - DNA, 25 bp, Artificial
  probe
  misc_feature (1)..(25): SEQ ID NO: 6800; WAN024BUN_at; Start 196; Stop 220
gacgacttcatcgatactgaggtac

SEQ ID NO: 95022 - DNA, 25 bp, Artificial
  probe
  misc_feature (1)..(25): SEQ ID NO: 6800; WAN024BUN_at; Start 83; Stop 107
tgcgcgaagcttccaaaatggagaa

SEQ ID NO: 95023 - DNA, 25 bp, Artificial
  probe
  misc_feature (1)..(25): SEQ ID NO: 6800; WAN024BUN_at; Start 229; Stop 253
gatatcaagagtatctttgagtcca

SEQ ID NO: 95024 - DNA, 25 bp, Artificial
  probe
  misc_feature (1)..(25): SEQ ID NO: 6800; WAN024BUN_at; Start 233; Stop 257
tcaagagtatctttgagtccaacaa

SEQ ID NO: 95025 - DNA, 25 bp, Artificial
  probe
  misc_feature (1)..(25): SEQ ID NO: 6800; WAN024BUN_at; Start 193; Stop 217
ggagacgacttcatcgatactgagg

SEQ ID NO: 95026 - DNA, 25 bp, Artificial
  probe
  misc_feature (1)..(25): SEQ ID NO: 6800; WAN024BUN_at; Start 137; Stop 161
tgaatcttctctttggtaaaaaaca

SEQ ID NO: 95027 - DNA, 25 bp, Artificial
  probe
  misc_feature (1)..(25): SEQ ID NO: 6800; WAN024BUN_at; Start 78; Stop 102
tctcatgcgcgaagcttccaaaatg

SEQ ID NO: 95028 - DNA, 25 bp, Artificial
  probe
  misc_feature (1)..(25): SEQ ID NO: 6800; WAN024BUN_at; Start 120; Stop 144
agctgctgaaaaattgctgaatctt

SEQ ID NO: 95029 - DNA, 25 bp, Artificial
  probe
  misc_feature (1)..(25): SEQ ID NO: 6800; WAN024BUN_at; Start 213; Stop 237
tgaggtactgttcgcagatatcaag

SEQ ID NO: 95030 - DNA, 25 bp, Artificial
  probe
  misc_feature (1)..(25): SEQ ID NO: 6800; WAN024BUN_at; Start 28; Stop 52
gagtcagggtttgagtacaaaatcc

SEQ ID NO: 95031 - DNA, 25 bp, Artificial
  probe
  misc_feature (1)..(25): SEQ ID NO: 6800; WAN024BUN_at; Start 76; Stop 100
tatctcatgcgcgaagcttccaaaa

SEQ ID NO: 95032 - DNA, 25 bp, Artificial
  probe
  misc_feature (1)..(25): SEQ ID NO: 6800; WAN024BUN_at; Start 216; Stop 240
ggtactgttcgcagatatcaagagt

SEQ ID NO: 95033 - DNA, 25 bp, Artificial
  probe
  misc_feature (1)..(25): SEQ ID NO: 6800; WAN024BUN_at; Start 24; Stop 48
aacagagtcagggtttgagtacaaa

SEQ ID NO: 95034 - DNA, 25 bp, Artificial
  probe
  misc_feature (1)..(25): SEQ ID NO: 6800; WAN024BUN_at; Start 242; Stop 266
tctttgagtccaacaaagacctaaa

SEQ ID NO: 95035 - DNA, 25 bp, Artificial
  probe
  misc_feature (1)..(25): SEQ ID NO: 6800; WAN024BUN_at; Start 158; Stop 182
aacaagcggaagagtttttatctca

SEQ ID NO: 95036 - DNA, 25 bp, Artificial
  probe
  misc_feature (1)..(25): SEQ ID NO: 6800; WAN024BUN_at; Start 190; Stop 214
gatggagacgacttcatcgatactg

SEQ ID NO: 95037 - DNA, 25 bp, Artificial
  probe
  misc_feature (1)..(25): SEQ ID NO: 6800; WAN024BUN_at; Start 237; Stop 261
gagtatctttgagtccaacaaagac

SEQ ID NO: 95038 - DNA, 25 bp, Artificial
  probe
  misc_feature (1)..(25): SEQ ID NO: 6800; WAN024BUN_at; Start 124; Stop 148
gctgaaaaattgctgaatcttctct

SEQ ID NO: 95039 - DNA, 25 bp, Artificial
  probe
  misc_feature (1)..(25): SEQ ID NO: 6800; WAN024BUN_at; Start 72; Stop 96
cttttatctcatgcgcgaagcttcc

SEQ ID NO: 95040 - DNA, 25 bp, Artificial
  probe
  misc_feature (1)..(25): SEQ ID NO: 6800; WAN024BUN_at; Start 10; Stop 34
atcttaaaaggaaaaacagagtcag

SEQ ID NO: 95041 - DNA, 25 bp, Artificial
  probe
  misc_feature (1)..(25): SEQ ID NO: 6800; WAN024BUN_at; Start 210; Stop 234
tactgaggtactgttcgcagatatc

SEQ ID NO: 95042 - DNA, 25 bp, Artificial
  probe
  misc_feature (1)..(25): SEQ ID NO: 6800; WAN024BUN_at; Start 176; Stop 200
tatctcatttagatgatggagacga

SEQ ID NO: 95043 - DNA, 25 bp, Artificial
  probe
  misc_feature (1)..(25): SEQ ID NO: 6800; WAN024BUN_at; Start 135; Stop 159
gctgaatcttctctttggtaaaaaa

SEQ ID NO: 95044 - DNA, 25 bp, Artificial
  probe
  misc_feature (1)..(25): SEQ ID NO: 6800; WAN024BUN_at; Start 181; Stop 205
catttagatgatggagacgacttca

SEQ ID NO: 95045 - DNA, 25 bp, Artificial
  probe
  misc_feature (1)..(25): SEQ ID NO: 6800; WAN024BUN_at; Start 86; Stop 110
gcgaagcttccaaaatggagaaggg

SEQ ID NO: 95046 - DNA, 25 bp, Artificial
  probe
  misc_feature (1)..(25): SEQ ID NO: 6800; WAN024BUN_at; Start 219; Stop 243
actgttcgcagatatcaagagtatc

SEQ ID NO: 95047 - DNA, 25 bp, Artificial
  probe
  misc_feature (1)..(25): SEQ ID NO: 6800; WAN024BUN_at; Start 204; Stop 228
catcgatactgaggtactgttcgca

SEQ ID NO: 95048 - DNA, 25 bp, Artificial
  probe
  misc_feature (1)..(25): SEQ ID NO: 6800; WAN024BUN_at; Start 66; Stop 90
gagaaacttttatctcatgcgcgaa

SEQ ID NO: 95049 - DNA, 25 bp, Artificial
  probe
  misc_feature (1)..(25): SEQ ID NO: 7451; WAN024BUO_at; Start 555; Stop 579
tgcattaccagacaacagtgaaaac

SEQ ID NO: 95050 - DNA, 25 bp, Artificial
  probe
  misc_feature (1)..(25): SEQ ID NO: 7451; WAN024BUO_at; Start 60; Stop 84
tgcatcagcatcaaatgtaacggct

SEQ ID NO: 95051 - DNA, 25 bp, Artificial
  probe
  misc_feature (1)..(25): SEQ ID NO: 7451; WAN024BUO_at; Start 526; Stop 550
gaacctatcggctatgaattgacga

SEQ ID NO: 95052 - DNA, 25 bp, Artificial
  probe
  misc_feature (1)..(25): SEQ ID NO: 7451; WAN024BUO_at; Start 3; Stop 27
gacgacagaagcaagaagacaaaat

SEQ ID NO: 95053 - DNA, 25 bp, Artificial
  probe
  misc_feature (1)..(25): SEQ ID NO: 7451; WAN024BUO_at; Start 348; Stop 372
tggaccagataacgtctcaggaacg

SEQ ID NO: 95054 - DNA, 25 bp, Artificial
  probe
  misc_feature (1)..(25): SEQ ID NO: 7451; WAN024BUO_at; Start 167; Stop 191
cagcatttgaaacgctagggtacat

SEQ ID NO: 95055 - DNA, 25 bp, Artificial
  probe
  misc_feature (1)..(25): SEQ ID NO: 7451; WAN024BUO_at; Start 380; Stop 404
caggtatcactgtaaaagccaacgg

SEQ ID NO: 95056 - DNA, 25 bp, Artificial
  probe
  misc_feature (1)..(25): SEQ ID NO: 7451; WAN024BUO_at; Start 446; Stop 470
tgaaaaatggctatgtgaaacgcgt

SEQ ID NO: 95057 - DNA, 25 bp, Artificial
  probe
  misc_feature (1)..(25): SEQ ID NO: 7451; WAN024BUO_at; Start 187; Stop 211
tacatttcagatgatggattgacca

SEQ ID NO: 95058 - DNA, 25 bp, Artificial
  probe
  misc_feature (1)..(25): SEQ ID NO: 7451; WAN024BUO_at; Start 256; Stop 280
caaacagtcttgtcttctcaaactg

SEQ ID NO: 95059 - DNA, 25 bp, Artificial
  probe
  misc_feature (1)..(25): SEQ ID NO: 7451; WAN024BUO_at; Start 106; Stop 130
gcagtttctactgctccagctggaa

SEQ ID NO: 95060 - DNA, 25 bp, Artificial
  probe
  misc_feature (1)..(25): SEQ ID NO: 7451; WAN024BUO_at; Start 213; Stop 237
tgcgaactcgccagaaagcaaagca

SEQ ID NO: 95061 - DNA, 25 bp, Artificial
  probe
  misc_feature (1)..(25): SEQ ID NO: 7451; WAN024BUO_at; Start 77; Stop 101
taacggctgctaagccgaaaattgg

SEQ ID NO: 95062 - DNA, 25 bp, Artificial
  probe
  misc_feature (1)..(25): SEQ ID NO: 7451; WAN024BUO_at; Start 332; Stop 356
tcttgaaagaagtctatggaccaga

SEQ ID NO: 95063 - DNA, 25 bp, Artificial
  probe
  misc_feature (1)..(25): SEQ ID NO: 7451; WAN024BUO_at; Start 394; Stop 418
aaagccaacggtaaagagttgccag

SEQ ID NO: 95064 - DNA, 25 bp, Artificial
  probe
  misc_feature (1)..(25): SEQ ID NO: 7451; WAN024BUO_at; Start 432; Stop 456
tattgatactttgctgaaaaatggc

SEQ ID NO: 95065 - DNA, 25 bp, Artificial
  probe
  misc_feature (1)..(25): SEQ ID NO: 7451; WAN024BUO_at; Start 199; Stop 223
gatggattgaccaatgcgaactcgc

SEQ ID NO: 95066 - DNA, 25 bp, Artificial
  probe
  misc_feature (1)..(25): SEQ ID NO: 7451; WAN024BUO_at; Start 271; Stop 295
tctcaaactgaaaagaaagatacct

SEQ ID NO: 95067 - DNA, 25 bp, Artificial
  probe
  misc_feature (1)..(25): SEQ ID NO: 7451; WAN024BUO_at; Start 150; Stop 174
caaaacagatttggatgcagcattt

SEQ ID NO: 95068 - DNA, 25 bp, Artificial
  probe
  misc_feature (1)..(25): SEQ ID NO: 7451; WAN024BUO_at; Start 362; Stop 386
tctcaggaacgcttgaaacaggtat

SEQ ID NO: 95069 - DNA, 25 bp, Artificial
  probe
  misc_feature (1)..(25): SEQ ID NO: 7451; WAN024BUO_at; Start 474; Stop 498
cattcctcgtggtaaggttagcgaa

SEQ ID NO: 95070 - DNA, 25 bp, Artificial
  probe
  misc_feature (1)..(25): SEQ ID NO: 7451; WAN024BUO_at; Start 117; Stop 141
tgctccagctggaacaactcttcca

SEQ ID NO: 95071 - DNA, 25 bp, Artificial
  probe
  misc_feature (1)..(25): SEQ ID NO: 7451; WAN024BUO_at; Start 489; Stop 513
ggttagcgaaattggcgaaatcagc

SEQ ID NO: 95072 - DNA, 25 bp, Artificial
  probe
  misc_feature (1)..(25): SEQ ID NO: 7451; WAN024BUO_at; Start 514; Stop 538
tataaagacggcgaacctatcggct

SEQ ID NO: 95073 - DNA, 25 bp, Artificial
  probe
  misc_feature (1)..(25): SEQ ID NO: 7451; WAN024BUO_at; Start 582; Stop 606
tcactacgaatacattcaaggagcg

SEQ ID NO: 95074 - DNA, 25 bp, Artificial
  probe
  misc_feature (1)..(25): SEQ ID NO: 7451; WAN024BUO_at; Start 461; Stop 485
tgaaacgcgttgtcattcctcgtgg

SEQ ID NO: 95075 - DNA, 25 bp, Artificial
  probe
  misc_feature (1)..(25): SEQ ID NO: 7451; WAN024BUO_at; Start 541; Stop 565
gaattgacgatcactgcattaccag

SEQ ID NO: 95076 - DNA, 25 bp, Artificial
  probe
  misc_feature (1)..(25): SEQ ID NO: 7451; WAN024BUO_at; Start 313; Stop 337
gaaggtctgaacattaaagtcttga

SEQ ID NO: 95077 - DNA, 25 bp, Artificial
  probe
  misc_feature (1)..(25): SEQ ID NO: 7451; WAN024BUO_at; Start 226; Stop 250
gaaagcaaagcaatcaaagcgtggg

SEQ ID NO: 95078 - DNA, 25 bp, Artificial
  probe
  misc_feature (1)..(25): SEQ ID NO: 7451; WAN024BUO_at; Start 501; Stop 525
tggcgaaatcagctataaagacggc

SEQ ID NO: 95079 - DNA, 25 bp, Artificial
  probe
  misc_feature (1)..(25): SEQ ID NO: 7451; WAN024BUO_at; Start 44; Stop 68
gaaagaatatgacgactgcatcagc

SEQ ID NO: 95080 - DNA, 25 bp, Artificial
  probe
  misc_feature (1)..(25): SEQ ID NO: 7451; WAN024BUO_at; Start 135; Stop 159
tcttccaacgaatgccaaaacagat

SEQ ID NO: 95081 - DNA, 25 bp, Artificial
  probe
  misc_feature (1)..(25): SEQ ID NO: 7451; WAN024BUO_at; Start 27; Stop 51
tacagaatcaacaggaggaaagaat

SEQ ID NO: 95082 - DNA, 25 bp, Artificial
  probe
  misc_feature (1)..(25): SEQ ID NO: 7451; WAN024BUO_at; Start 409; Stop 433
gagttgccagaacattgcttggtta

SEQ ID NO: 95083 - DNA, 25 bp, Artificial
  probe
  misc_feature (1)..(25): SEQ ID NO: 6641; WAN024BUP_at; Start 118; Stop 142
ggaagcgactacgttcattccgcta

SEQ ID NO: 95084 - DNA, 25 bp, Artificial
  probe
  misc_feature (1)..(25): SEQ ID NO: 6641; WAN024BUP_at; Start 237; Stop 261
cgaagtcagcggtgtgcatcacaat

SEQ ID NO: 95085 - DNA, 25 bp, Artificial
  probe
  misc_feature (1)..(25): SEQ ID NO: 6641; WAN024BUP_at; Start 212; Stop 236
tagttgaggatctcatcacggtcaa

SEQ ID NO: 95086 - DNA, 25 bp, Artificial
  probe
  misc_feature (1)..(25): SEQ ID NO: 6641; WAN024BUP_at; Start 147; Stop 171
cgcttttcaaagttatgcaccatca

SEQ ID NO: 95087 - DNA, 25 bp, Artificial
  probe
  misc_feature (1)..(25): SEQ ID NO: 6641; WAN024BUP_at; Start 243; Stop 267
cagcggtgtgcatcacaatagtgac

SEQ ID NO: 95088 - DNA, 25 bp, Artificial
  probe
  misc_feature (1)..(25): SEQ ID NO: 6641; WAN024BUP_at; Start 301; Stop 325
cgctatcaagcggtatatgacatta

SEQ ID NO: 95089 - DNA, 25 bp, Artificial
  probe
  misc_feature (1)..(25): SEQ ID NO: 6641; WAN024BUP_at; Start 175; Stop 199
caaaaggctgctgagctgaatgaga

SEQ ID NO: 95090 - DNA, 25 bp, Artificial
  probe
  misc_feature (1)..(25): SEQ ID NO: 6641; WAN024BUP_at; Start 227; Stop 251
tcacggtcaacgaagtcagcggtgt

SEQ ID NO: 95091 - DNA, 25 bp, Artificial
  probe
  misc_feature (1)..(25): SEQ ID NO: 6641; WAN024BUP_at; Start 233; Stop 257
tcaacgaagtcagcggtgtgcatca

SEQ ID NO: 95092 - DNA, 25 bp, Artificial
  probe
  misc_feature (1)..(25): SEQ ID NO: 6641; WAN024BUP_at; Start 264; Stop 288
tgactacaactttacagacacggaa

SEQ ID NO: 95093 - DNA, 25 bp, Artificial
  probe
  misc_feature (1)..(25): SEQ ID NO: 6641; WAN024BUP_at; Start 224; Stop 248
tcatcacggtcaacgaagtcagcgg

SEQ ID NO: 95094 - DNA, 25 bp, Artificial
  probe
  misc_feature (1)..(25): SEQ ID NO: 6641; WAN024BUP_at; Start 124; Stop 148
gactacgttcattccgctacattcg

SEQ ID NO: 95095 - DNA, 25 bp, Artificial
  probe
  misc_feature (1)..(25): SEQ ID NO: 6641; WAN024BUP_at; Start 167; Stop 191
catcacttcaaaaggctgctgagct

SEQ ID NO: 95096 - DNA, 25 bp, Artificial
  probe
  misc_feature (1)..(25): SEQ ID NO: 6641; WAN024BUP_at; Start 96; Stop 120
tttagaaaagactggaagtggtgga

SEQ ID NO: 95097 - DNA, 25 bp, Artificial
  probe
  misc_feature (1)..(25): SEQ ID NO: 6641; WAN024BUP_at; Start 110; Stop 134
gaagtggtggaagcgactacgttca

SEQ ID NO: 95098 - DNA, 25 bp, Artificial
  probe
  misc_feature (1)..(25): SEQ ID NO: 6641; WAN024BUP_at; Start 134; Stop 158
attccgctacattcgcttttcaaag

SEQ ID NO: 95099 - DNA, 25 bp, Artificial
  probe
  misc_feature (1)..(25): SEQ ID NO: 6641; WAN024BUP_at; Start 26; Stop 50
ttttggacggacagttagatgtacc

SEQ ID NO: 95100 - DNA, 25 bp, Artificial
  probe
  misc_feature (1)..(25): SEQ ID NO: 6641; WAN024BUP_at; Start 291; Stop 315
gaagcaatatcgctatcaagcggta

SEQ ID NO: 95101 - DNA, 25 bp, Artificial
  probe
  misc_feature (1)..(25): SEQ ID NO: 6641; WAN024BUP_at; Start 280; Stop 304
gacacggaaacgaagcaatatcgct

SEQ ID NO: 95102 - DNA, 25 bp, Artificial
  probe
  misc_feature (1)..(25): SEQ ID NO: 6641; WAN024BUP_at; Start 33; Stop 57
cggacagttagatgtaccgtctttt

SEQ ID NO: 95103 - DNA, 25 bp, Artificial
  probe
  misc_feature (1)..(25): SEQ ID NO: 6641; WAN024BUP_at; Start 270; Stop 294
caactttacagacacggaaacgaag

SEQ ID NO: 95104 - DNA, 25 bp, Artificial
  probe
  misc_feature (1)..(25): SEQ ID NO: 6641; WAN024BUP_at; Start 181; Stop 205
gctgctgagctgaatgagaaagtca

SEQ ID NO: 95105 - DNA, 25 bp, Artificial
  probe
  misc_feature (1)..(25): SEQ ID NO: 6641; WAN024BUP_at; Start 58; Stop 82
tttgaacataaaccgaatatgcctg

SEQ ID NO: 95106 - DNA, 25 bp, Artificial
  probe
  misc_feature (1)..(25): SEQ ID NO: 6641; WAN024BUP_at; Start 93; Stop 117
cattttagaaaagactggaagtggt

SEQ ID NO: 95107 - DNA, 25 bp, Artificial
  probe
  misc_feature (1)..(25): SEQ ID NO: 6641; WAN024BUP_at; Start 70; Stop 94
ccgaatatgcctgagagttatgtca

SEQ ID NO: 95108 - DNA, 25 bp, Artificial
  probe
  misc_feature (1)..(25): SEQ ID NO: 6641; WAN024BUP_at; Start 217; Stop 241
gaggatctcatcacggtcaacgaag

SEQ ID NO: 95109 - DNA, 25 bp, Artificial
  probe
  misc_feature (1)..(25): SEQ ID NO: 6641; WAN024BUP_at; Start 160; Stop 184
tatgcaccatcacttcaaaaggctg

SEQ ID NO: 95110 - DNA, 25 bp, Artificial
  probe
  misc_feature (1)..(25): SEQ ID NO: 6641; WAN024BUP_at; Start 274; Stop 298
tttacagacacggaaacgaagcaat

SEQ ID NO: 95111 - DNA, 25 bp, Artificial
  probe
  misc_feature (1)..(25): SEQ ID NO: 6641; WAN024BUP_at; Start 307; Stop 331
caagcggtatatgacattaattatt

SEQ ID NO: 95112 - DNA, 25 bp, Artificial
  probe
  misc_feature (1)..(25): SEQ ID NO: 6641; WAN024BUP_at; Start 64; Stop 88
cataaaccgaatatgcctgagagtt

SEQ ID NO: 95113 - DNA, 25 bp, Artificial
  probe
  misc_feature (1)..(25): SEQ ID NO: 6641; WAN024BUP_at; Start 249; Stop 273
tgtgcatcacaatagtgactacaac

SEQ ID NO: 95114 - DNA, 25 bp, Artificial
  probe
  misc_feature (1)..(25): SEQ ID NO: 6641; WAN024BUP_at; Start 204; Stop 228
caagaaagtagttgaggatctcatc

SEQ ID NO: 95115 - DNA, 25 bp, Artificial
  probe
  misc_feature (1)..(25): SEQ ID NO: 6641; WAN024BUP_at; Start 78; Stop 102
gcctgagagttatgtcattttagaa

SEQ ID NO: 95116 - DNA, 25 bp, Artificial
  probe
  misc_feature (1)..(25): SEQ ID NO: 6641; WAN024BUP_at; Start 189; Stop 213
gctgaatgagaaagtcaagaaagta

SEQ ID NO: 95117 - DNA, 25 bp, Artificial
  probe
  misc_feature (1)..(25): SEQ ID NO: 7427; WAN024BUQ_at; Start 72; Stop 96
aatgcagggtattttgagggagaaa

SEQ ID NO: 95118 - DNA, 25 bp, Artificial
  probe
  misc_feature (1)..(25): SEQ ID NO: 7427; WAN024BUQ_at; Start 130; Stop 154
tttgaattgactgtatcgccagggc

SEQ ID NO: 95119 - DNA, 25 bp, Artificial
  probe
  misc_feature (1)..(25): SEQ ID NO: 7427; WAN024BUQ_at; Start 68; Stop 92
ccgaaatgcagggtattttgaggga

SEQ ID NO: 95120 - DNA, 25 bp, Artificial
  probe
  misc_feature (1)..(25): SEQ ID NO: 7427; WAN024BUQ_at; Start 51; Stop 75
tgccttgctacgttcttccgaaatg

SEQ ID NO: 95121 - DNA, 25 bp, Artificial
  probe
  misc_feature (1)..(25): SEQ ID NO: 7427; WAN024BUQ_at; Start 159; Stop 183
gcgtgccaatgcaaagattagtacg

SEQ ID NO: 95122 - DNA, 25 bp, Artificial
  probe
  misc_feature (1)..(25): SEQ ID NO: 7427; WAN024BUQ_at; Start 145; Stop 169
tcgccagggcaaaagcgtgccaatg

SEQ ID NO: 95123 - DNA, 25 bp, Artificial
  probe
  misc_feature (1)..(25): SEQ ID NO: 7427; WAN024BUQ_at; Start 138; Stop 162
gactgtatcgccagggcaaaagcgt

SEQ ID NO: 95124 - DNA, 25 bp, Artificial
  probe
  misc_feature (1)..(25): SEQ ID NO: 7427; WAN024BUQ_at; Start 26; Stop 50
ttcaattgaactcggctggggtgtc

SEQ ID NO: 95125 - DNA, 25 bp, Artificial
  probe
  misc_feature (1)..(25): SEQ ID NO: 7427; WAN024BUQ_at; Start 214; Stop 238
aaacataatattttactgaaggcta

SEQ ID NO: 95126 - DNA, 25 bp, Artificial
  probe
  misc_feature (1)..(25): SEQ ID NO: 7427; WAN024BUQ_at; Start 187; Stop 211
gatatcaagagcatggctagaaata

SEQ ID NO: 95127 - DNA, 25 bp, Artificial
  probe
  misc_feature (1)..(25): SEQ ID NO: 7427; WAN024BUQ_at; Start 194; Stop 218
agagcatggctagaaataaaaaaca

SEQ ID NO: 95128 - DNA, 25 bp, Artificial
  probe
  misc_feature (1)..(25): SEQ ID NO: 7427; WAN024BUQ_at; Start 174; Stop 198
gattagtacgactgatatcaagagc

SEQ ID NO: 95129 - DNA, 25 bp, Artificial
  probe
  misc_feature (1)..(25): SEQ ID NO: 7427; WAN024BUQ_at; Start 180; Stop 204
tacgactgatatcaagagcatggct

SEQ ID NO: 95130 - DNA, 25 bp, Artificial
  probe
  misc_feature (1)..(25): SEQ ID NO: 7427; WAN024BUQ_at; Start 127; Stop 151
gggtttgaattgactgtatcgccag

SEQ ID NO: 95131 - DNA, 25 bp, Artificial
  probe
  misc_feature (1)..(25): SEQ ID NO: 7427; WAN024BUQ_at; Start 44; Stop 68
gggtgtctgccttgctacgttcttc

SEQ ID NO: 95132 - DNA, 25 bp, Artificial
  probe
  misc_feature (1)..(25): SEQ ID NO: 7427; WAN024BUQ_at; Start 219; Stop 243
taatattttactgaaggctatgaga

SEQ ID NO: 95133 - DNA, 25 bp, Artificial
  probe
  misc_feature (1)..(25): SEQ ID NO: 7427; WAN024BUQ_at; Start 177; Stop 201
tagtacgactgatatcaagagcatg

SEQ ID NO: 95134 - DNA, 25 bp, Artificial
  probe
  misc_feature (1)..(25): SEQ ID NO: 7427; WAN024BUQ_at; Start 183; Stop 207
gactgatatcaagagcatggctaga

SEQ ID NO: 95135 - DNA, 25 bp, Artificial
  probe
  misc_feature (1)..(25): SEQ ID NO: 7427; WAN024BUQ_at; Start 143; Stop 167
tatcgccagggcaaaagcgtgccaa

SEQ ID NO: 95136 - DNA, 25 bp, Artificial
  probe
  misc_feature (1)..(25): SEQ ID NO: 7427; WAN024BUQ_at; Start 163; Stop 187
gccaatgcaaagattagtacgactg

SEQ ID NO: 95137 - DNA, 25 bp, Artificial
  probe
  misc_feature (1)..(25): SEQ ID NO: 7427; WAN024BUQ_at; Start 168; Stop 192
tgcaaagattagtacgactgatatc

SEQ ID NO: 95138 - DNA, 25 bp, Artificial
  probe
  misc_feature (1)..(25): SEQ ID NO: 7427; WAN024BUQ_at; Start 197; Stop 221
gcatggctagaaataaaaaacataa

SEQ ID NO: 95139 - DNA, 25 bp, Artificial
  probe
  misc_feature (1)..(25): SEQ ID NO: 7427; WAN024BUQ_at; Start 153; Stop 177
gcaaaagcgtgccaatgcaaagatt

SEQ ID NO: 95140 - DNA, 25 bp, Artificial
  probe
  misc_feature (1)..(25): SEQ ID NO: 7427; WAN024BUQ_at; Start 85; Stop 109
ttgagggagaaagggcaagggattg

SEQ ID NO: 95141 - DNA, 25 bp, Artificial
  probe
  misc_feature (1)..(25): SEQ ID NO: 7427; WAN024BUQ_at; Start 56; Stop 80
tgctacgttcttccgaaatgcaggg

SEQ ID NO: 95142 - DNA, 25 bp, Artificial
  probe
  misc_feature (1)..(25): SEQ ID NO: 7427; WAN024BUQ_at; Start 6; Stop 30
gtttatgagtgatatgaaatttcaa

SEQ ID NO: 95143 - DNA, 25 bp, Artificial
  probe
  misc_feature (1)..(25): SEQ ID NO: 7427; WAN024BUQ_at; Start 100; Stop 124
caagggattgctgaaagagctggtg

SEQ ID NO: 95144 - DNA, 25 bp, Artificial
  probe
  misc_feature (1)..(25): SEQ ID NO: 7427; WAN024BUQ_at; Start 59; Stop 83
tacgttcttccgaaatgcagggtat

SEQ ID NO: 95145 - DNA, 25 bp, Artificial
  probe
  misc_feature (1)..(25): SEQ ID NO: 7427; WAN024BUQ_at; Start 149; Stop 173
cagggcaaaagcgtgccaatgcaaa

SEQ ID NO: 95146 - DNA, 25 bp, Artificial
  probe
  misc_feature (1)..(25): SEQ ID NO: 7427; WAN024BUQ_at; Start 21; Stop 45
gaaatttcaattgaactcggctggg

SEQ ID NO: 95147 - DNA, 25 bp, Artificial
  probe
  misc_feature (1)..(25): SEQ ID NO: 7427; WAN024BUQ_at; Start 132; Stop 156
tgaattgactgtatcgccagggcaa

SEQ ID NO: 95148 - DNA, 25 bp, Artificial
  probe
  misc_feature (1)..(25): SEQ ID NO: 7427; WAN024BUQ_at; Start 48; Stop 72
gtctgccttgctacgttcttccgaa

SEQ ID NO: 95149 - DNA, 25 bp, Artificial
  probe
  misc_feature (1)..(25): SEQ ID NO: 7427; WAN024BUQ_at; Start 134; Stop 158
aattgactgtatcgccagggcaaaa

SEQ ID NO: 95150 - DNA, 25 bp, Artificial
  probe
  misc_feature (1)..(25): SEQ ID NO: 7427; WAN024BUQ_at; Start 64; Stop 88
tcttccgaaatgcagggtattttga

SEQ ID NO: 95151 - DNA, 25 bp, Artificial
  probe
  misc_feature (1)..(25): SEQ ID NO: 6889; WAN024BUR_at; Start 175; Stop 199
tccgatttggtagccttgtacgagg

SEQ ID NO: 95152 - DNA, 25 bp, Artificial
  probe
  misc_feature (1)..(25): SEQ ID NO: 6889; WAN024BUR_at; Start 63; Stop 87
agattgggtgcctgttgaagatacg

SEQ ID NO: 95153 - DNA, 25 bp, Artificial
  probe
  misc_feature (1)..(25): SEQ ID NO: 6889; WAN024BUR_at; Start 39; Stop 63
ctctgctgagagtgttcttggcgga

SEQ ID NO: 95154 - DNA, 25 bp, Artificial
  probe
  misc_feature (1)..(25): SEQ ID NO: 6889; WAN024BUR_at; Start 10; Stop 34
taccgtgatacgaaaacgggcgtga

SEQ ID NO: 95155 - DNA, 25 bp, Artificial
  probe
  misc_feature (1)..(25): SEQ ID NO: 6889; WAN024BUR_at; Start 29; Stop 53
gcgtgattatctctgctgagagtgt

SEQ ID NO: 95156 - DNA, 25 bp, Artificial
  probe
  misc_feature (1)..(25): SEQ ID NO: 6889; WAN024BUR_at; Start 110; Stop 134
ccgtagcggaattgaagtctagttt

SEQ ID NO: 95157 - DNA, 25 bp, Artificial
  probe
  misc_feature (1)..(25): SEQ ID NO: 6889; WAN024BUR_at; Start 100; Stop 124
gcggatttgaccgtagcggaattga

SEQ ID NO: 95158 - DNA, 25 bp, Artificial
  probe
  misc_feature (1)..(25): SEQ ID NO: 6889; WAN024BUR_at; Start 103; Stop 127
gatttgaccgtagcggaattgaagt

SEQ ID NO: 95159 - DNA, 25 bp, Artificial
  probe
  misc_feature (1)..(25): SEQ ID NO: 6889; WAN024BUR_at; Start 91; Stop 115
ccaagcggagcggatttgaccgtag

SEQ ID NO: 95160 - DNA, 25 bp, Artificial
  probe
  misc_feature (1)..(25): SEQ ID NO: 6889; WAN024BUR_at; Start 92; Stop 116
caagcggagcggatttgaccgtagc

SEQ ID NO: 95161 - DNA, 25 bp, Artificial
  probe
  misc_feature (1)..(25): SEQ ID NO: 6889; WAN024BUR_at; Start 36; Stop 60
tatctctgctgagagtgttcttggc

SEQ ID NO: 95162 - DNA, 25 bp, Artificial
  probe
  misc_feature (1)..(25): SEQ ID NO: 6889; WAN024BUR_at; Start 21; Stop 45
gaaaacgggcgtgattatctctgct

SEQ ID NO: 95163 - DNA, 25 bp, Artificial
  probe
  misc_feature (1)..(25): SEQ ID NO: 6889; WAN024BUR_at; Start 73; Stop 97
cctgttgaagatacggcgccaagcg

SEQ ID NO: 95164 - DNA, 25 bp, Artificial
  probe
  misc_feature (1)..(25): SEQ ID NO: 6889; WAN024BUR_at; Start 172; Stop 196
aaatccgatttggtagccttgtacg

SEQ ID NO: 95165 - DNA, 25 bp, Artificial
  probe
  misc_feature (1)..(25): SEQ ID NO: 6889; WAN024BUR_at; Start 2; Stop 26
tggctttataccgtgatacgaaaac

SEQ ID NO: 95166 - DNA, 25 bp, Artificial
  probe
  misc_feature (1)..(25): SEQ ID NO: 6889; WAN024BUR_at; Start 23; Stop 47
aaacgggcgtgattatctctgctga

SEQ ID NO: 95167 - DNA, 25 bp, Artificial
  probe
  misc_feature (1)..(25): SEQ ID NO: 6889; WAN024BUR_at; Start 116; Stop 140
cggaattgaagtctagtttggatga

SEQ ID NO: 95168 - DNA, 25 bp, Artificial
  probe
  misc_feature (1)..(25): SEQ ID NO: 6889; WAN024BUR_at; Start 143; Stop 167
tgggcgttgattacgataagggttc

SEQ ID NO: 95169 - DNA, 25 bp, Artificial
  probe
  misc_feature (1)..(25): SEQ ID NO: 6889; WAN024BUR_at; Start 13; Stop 37
cgtgatacgaaaacgggcgtgatta

SEQ ID NO: 95170 - DNA, 25 bp, Artificial
  probe
  misc_feature (1)..(25): SEQ ID NO: 6889; WAN024BUR_at; Start 69; Stop 93
ggtgcctgttgaagatacggcgcca

SEQ ID NO: 95171 - DNA, 25 bp, Artificial
  probe
  misc_feature (1)..(25): SEQ ID NO: 6889; WAN024BUR_at; Start 107; Stop 131
tgaccgtagcggaattgaagtctag

SEQ ID NO: 95172 - DNA, 25 bp, Artificial
  probe
  misc_feature (1)..(25): SEQ ID NO: 6889; WAN024BUR_at; Start 51; Stop 75
tgttcttggcggagattgggtgcct

SEQ ID NO: 95173 - DNA, 25 bp, Artificial
  probe
  misc_feature (1)..(25): SEQ ID NO: 6889; WAN024BUR_at; Start 71; Stop 95
tgcctgttgaagatacggcgccaag

SEQ ID NO: 95174 - DNA, 25 bp, Artificial
  probe
  misc_feature (1)..(25): SEQ ID NO: 6889; WAN024BUR_at; Start 132; Stop 156
tttggatgaattgggcgttgattac

SEQ ID NO: 95175 - DNA, 25 bp, Artificial
  probe
  misc_feature (1)..(25): SEQ ID NO: 6889; WAN024BUR_at; Start 178; Stop 202
gatttggtagccttgtacgaggaaa

SEQ ID NO: 95176 - DNA, 25 bp, Artificial
  probe
  misc_feature (1)..(25): SEQ ID NO: 6889; WAN024BUR_at; Start 128; Stop 152
ctagtttggatgaattgggcgttga

SEQ ID NO: 95177 - DNA, 25 bp, Artificial
  probe
  misc_feature (1)..(25): SEQ ID NO: 6889; WAN024BUR_at; Start 182; Stop 206
tggtagccttgtacgaggaaaataa

SEQ ID NO: 95178 - DNA, 25 bp, Artificial
  probe
  misc_feature (1)..(25): SEQ ID NO: 6889; WAN024BUR_at; Start 146; Stop 170
gcgttgattacgataagggttcaaa

SEQ ID NO: 95179 - DNA, 25 bp, Artificial
  probe
  misc_feature (1)..(25): SEQ ID NO: 6889; WAN024BUR_at; Start 139; Stop 163
gaattgggcgttgattacgataagg

SEQ ID NO: 95180 - DNA, 25 bp, Artificial
  probe
  misc_feature (1)..(25): SEQ ID NO: 6889; WAN024BUR_at; Start 26; Stop 50
cgggcgtgattatctctgctgagag

SEQ ID NO: 95181 - DNA, 25 bp, Artificial
  probe
  misc_feature (1)..(25): SEQ ID NO: 6889; WAN024BUR_at; Start 185; Stop 209
tagccttgtacgaggaaaataagag

SEQ ID NO: 95182 - DNA, 25 bp, Artificial
  probe
  misc_feature (1)..(25): SEQ ID NO: 6889; WAN024BUR_at; Start 83; Stop 107
atacggcgccaagcggagcggattt

SEQ ID NO: 95183 - DNA, 25 bp, Artificial
  probe
  misc_feature (1)..(25): SEQ ID NO: 6889; WAN024BUR_at; Start 123; Stop 147
gaagtctagtttggatgaattgggc

SEQ ID NO: 95184 - DNA, 25 bp, Artificial
  probe
  misc_feature (1)..(25): SEQ ID NO: 6889; WAN024BUR_at; Start 65; Stop 89
attgggtgcctgttgaagatacggc

SEQ ID NO: 95185 - DNA, 25 bp, Artificial
  probe
  misc_feature (1)..(25): SEQ ID NO: 6862; WAN024BUS_at; Start 308; Stop 332
tgtcagcatatatggacggattcgc

SEQ ID NO: 95186 - DNA, 25 bp, Artificial
  probe
  misc_feature (1)..(25): SEQ ID NO: 6862; WAN024BUS_at; Start 771; Stop 795
tgaatacggtgatccagacggtgct

SEQ ID NO: 95187 - DNA, 25 bp, Artificial
  probe
  misc_feature (1)..(25): SEQ ID NO: 6862; WAN024BUS_at; Start 819; Stop 843
tgaaatctgtttgcgtgcggaagcc

SEQ ID NO: 95188 - DNA, 25 bp, Artificial
  probe
  misc_feature (1)..(25): SEQ ID NO: 6862; WAN024BUS_at; Start 690; Stop 714
tgaaacagaccacgctattgtaggg

SEQ ID NO: 95189 - DNA, 25 bp, Artificial
  probe
  misc_feature (1)..(25): SEQ ID NO: 6862; WAN024BUS_at; Start 856; Stop 880
ggtatccttgatgaagatgccttcg

SEQ ID NO: 95190 - DNA, 25 bp, Artificial
  probe
  misc_feature (1)..(25): SEQ ID NO: 6862; WAN024BUS_at; Start 604; Stop 628
gagttccgctttggtcaaaatcctg

SEQ ID NO: 95191 - DNA, 25 bp, Artificial
  probe
  misc_feature (1)..(25): SEQ ID NO: 6862; WAN024BUS_at; Start 265; Stop 289
gatgagttcaaatacgcttcagaag

SEQ ID NO: 95192 - DNA, 25 bp, Artificial
  probe
  misc_feature (1)..(25): SEQ ID NO: 6862; WAN024BUS_at; Start 411; Stop 435
tacgacaaactcattcgatggattg

SEQ ID NO: 95193 - DNA, 25 bp, Artificial
  probe
  misc_feature (1)..(25): SEQ ID NO: 6862; WAN024BUS_at; Start 740; Stop 764
gctatgctgaaaatattccgatgga

SEQ ID NO: 95194 - DNA, 25 bp, Artificial
  probe
  misc_feature (1)..(25): SEQ ID NO: 6862; WAN024BUS_at; Start 675; Stop 699
gactggtggcactgctgaaacagac

SEQ ID NO: 95195 - DNA, 25 bp, Artificial
  probe
  misc_feature (1)..(25): SEQ ID NO: 6862; WAN024BUS_at; Start 105; Stop 129
tcagaccccgattccatttaatgga

SEQ ID NO: 95196 - DNA, 25 bp, Artificial
  probe
  misc_feature (1)..(25): SEQ ID NO: 6862; WAN024BUS_at; Start 196; Stop 220
gctggtaaagctaaaatcacttcta

SEQ ID NO: 95197 - DNA, 25 bp, Artificial
  probe
  misc_feature (1)..(25): SEQ ID NO: 6862; WAN024BUS_at; Start 73; Stop 97
caaggacgttctgttcttgctaaac

SEQ ID NO: 95198 - DNA, 25 bp, Artificial
  probe
  misc_feature (1)..(25): SEQ ID NO: 6862; WAN024BUS_at; Start 127; Stop 151
ggagtggagcaatttatcttcaacc

SEQ ID NO: 95199 - DNA, 25 bp, Artificial
  probe
  misc_feature (1)..(25): SEQ ID NO: 6862; WAN024BUS_at; Start 178; Stop 202
gaaggtgaacaaaaacaagctggta

SEQ ID NO: 95200 - DNA, 25 bp, Artificial
  probe
  misc_feature (1)..(25): SEQ ID NO: 6862; WAN024BUS_at; Start 619; Stop 643
caaaatcctgattcattctacggta

SEQ ID NO: 95201 - DNA, 25 bp, Artificial
  probe
  misc_feature (1)..(25): SEQ ID NO: 6862; WAN024BUS_at; Start 163; Stop 187
gctcaaatcgttggagaaggtgaac

SEQ ID NO: 95202 - DNA, 25 bp, Artificial
  probe
  misc_feature (1)..(25): SEQ ID NO: 6862; WAN024BUS_at; Start 793; Stop 817
gctggtcgtgaccttaaagcctata

SEQ ID NO: 95203 - DNA, 25 bp, Artificial
  probe
  misc_feature (1)..(25): SEQ ID NO: 6862; WAN024BUS_at; Start 660; Stop 684
caagaaccttactgtgactggtggc

SEQ ID NO: 95204 - DNA, 25 bp, Artificial
  probe
  misc_feature (1)..(25): SEQ ID NO: 6862; WAN024BUS_at; Start 377; Stop 401
tagagccaaaaacaatgacggatgc

SEQ ID NO: 95205 - DNA, 25 bp, Artificial
  probe
  misc_feature (1)..(25): SEQ ID NO: 6862; WAN024BUS_at; Start 548; Stop 572
caacagctggtcaagcgttggcgaa

SEQ ID NO: 95206 - DNA, 25 bp, Artificial
  probe
  misc_feature (1)..(25): SEQ ID NO: 6862; WAN024BUS_at; Start 339; Stop 363
gattgcagaagcctttgaccttgct

SEQ ID NO: 95207 - DNA, 25 bp, Artificial
  probe
  misc_feature (1)..(25): SEQ ID NO: 6862; WAN024BUS_at; Start 322; Stop 346
gacggattcgctaagaagattgcag

SEQ ID NO: 95208 - DNA, 25 bp, Artificial
  probe
  misc_feature (1)..(25): SEQ ID NO: 6862; WAN024BUS_at; Start 499; Stop 523
caaacgattgtagcgaaaggtggcg

SEQ ID NO: 95209 - DNA, 25 bp, Artificial
  probe
  misc_feature (1)..(25): SEQ ID NO: 6862; WAN024BUS_at; Start 355; Stop 379
gaccttgctgctcttcatggtttag

SEQ ID NO: 95210 - DNA, 25 bp, Artificial
  probe
  misc_feature (1)..(25): SEQ ID NO: 6862; WAN024BUS_at; Start 533; Stop 557
gtattgccttatcaccaacagctgg

SEQ ID NO: 95211 - DNA, 25 bp, Artificial
  probe
  misc_feature (1)..(25): SEQ ID NO: 6862; WAN024BUS_at; Start 487; Stop 511
gatgctgcagttcaaacgattgtag

SEQ ID NO: 95212 - DNA, 25 bp, Artificial
  probe
  misc_feature (1)..(25): SEQ ID NO: 6862; WAN024BUS_at; Start 512; Stop 536
cgaaaggtggcgaagtaacaggtat

SEQ ID NO: 95213 - DNA, 25 bp, Artificial
  probe
  misc_feature (1)..(25): SEQ ID NO: 6862; WAN024BUS_at; Start 7; Stop 31
gataatgcaacgaaagctggaacac

SEQ ID NO: 95214 - DNA, 25 bp, Artificial
  probe
  misc_feature (1)..(25): SEQ ID NO: 6862; WAN024BUS_at; Start 587; Stop 611
gagttgttcaatatcctgagttccg

SEQ ID NO: 95215 - DNA, 25 bp, Artificial
  probe
  misc_feature (1)..(25): SEQ ID NO: 6862; WAN024BUS_at; Start 250; Stop 274
caagctcgtatcacagatgagttca

SEQ ID NO: 95216 - DNA, 25 bp, Artificial
  probe
  misc_feature (1)..(25): SEQ ID NO: 6862; WAN024BUS_at; Start 869; Stop 893
aagatgccttcgctcgtgtgaaagc

SEQ ID NO: 95217 - DNA, 25 bp, Artificial
  probe
  misc_feature (1)..(25): SEQ ID NO: 6862; WAN024BUS_at; Start 59; Stop 83
taatcagcaaagtacaaggacgttc

SEQ ID NO: 95218 - DNA, 25 bp, Artificial
  probe
  misc_feature (1)..(25): SEQ ID NO: 6862; WAN024BUS_at; Start 396; Stop 420
ggatgcttctttccgtacgacaaac

SEQ ID NO: 95219 - DNA, 25 bp, Artificial
  probe
  misc_feature (1)..(25): SEQ ID NO: 6447; WAN024BUT_at; Start 32; Stop 56
cacaagaagagctagataacatcgt

SEQ ID NO: 95220 - DNA, 25 bp, Artificial
  probe
  misc_feature (1)..(25): SEQ ID NO: 6447; WAN024BUT_at; Start 19; Stop 43
aaaacgattgaaacacaagaagagc

SEQ ID NO: 95221 - DNA, 25 bp, Artificial
  probe
  misc_feature (1)..(25): SEQ ID NO: 6447; WAN024BUT_at; Start 376; Stop 400
caagcaccactaagagatactgagc

SEQ ID NO: 95222 - DNA, 25 bp, Artificial
  probe
  misc_feature (1)..(25): SEQ ID NO: 6447; WAN024BUT_at; Start 69; Stop 93
cagacgtgagcgtgaaaaattcggt

SEQ ID NO: 95223 - DNA, 25 bp, Artificial
  probe
  misc_feature (1)..(25): SEQ ID NO: 6447; WAN024BUT_at; Start 235; Stop 259
gaaactgctagcttacgaactcgta

SEQ ID NO: 95224 - DNA, 25 bp, Artificial
  probe
  misc_feature (1)..(25): SEQ ID NO: 6447; WAN024BUT_at; Start 56; Stop 80
tgaaggaacgtctcagacgtgagcg

SEQ ID NO: 95225 - DNA, 25 bp, Artificial
  probe
  misc_feature (1)..(25): SEQ ID NO: 6447; WAN024BUT_at; Start 304; Stop 328
caaggtgctgacgaagaggcgttaa

SEQ ID NO: 95226 - DNA, 25 bp, Artificial
  probe
  misc_feature (1)..(25): SEQ ID NO: 6447; WAN024BUT_at; Start 435; Stop 459
gcaaatgcttcgagatttacaacca

SEQ ID NO: 95227 - DNA, 25 bp, Artificial
  probe
  misc_feature (1)..(25): SEQ ID NO: 6447; WAN024BUT_at; Start 193; Stop 217
gacgctcaaattactgaattgcagg

SEQ ID NO: 95228 - DNA, 25 bp, Artificial
  probe
  misc_feature (1)..(25): SEQ ID NO: 6447; WAN024BUT_at; Start 111; Stop 135
gaaacgtgtttcagaactagagtct

SEQ ID NO: 95229 - DNA, 25 bp, Artificial
  probe
  misc_feature (1)..(25): SEQ ID NO: 6447; WAN024BUT_at; Start 405; Stop 429
tatcggtgatgacaaaactatgcaa

SEQ ID NO: 95230 - DNA, 25 bp, Artificial
  probe
  misc_feature (1)..(25): SEQ ID NO: 6447; WAN024BUT_at; Start 261; Stop 285
cgctttacaaaatggcttgccttat

SEQ ID NO: 95231 - DNA, 25 bp, Artificial
  probe
  misc_feature (1)..(25): SEQ ID NO: 6447; WAN024BUT_at; Start 124; Stop 148
gaactagagtctgaaaatggcgctt

SEQ ID NO: 95232 - DNA, 25 bp, Artificial
  probe
  misc_feature (1)..(25): SEQ ID NO: 6447; WAN024BUT_at; Start 46; Stop 70
gataacatcgtgaaggaacgtctca

SEQ ID NO: 95233 - DNA, 25 bp, Artificial
  probe
  misc_feature (1)..(25): SEQ ID NO: 6447; WAN024BUT_at; Start 323; Stop 347
cgttaagggctgacgctgagcgtct

SEQ ID NO: 95234 - DNA, 25 bp, Artificial
  probe
  misc_feature (1)..(25): SEQ ID NO: 6447; WAN024BUT_at; Start 421; Stop 445
actatgcaaatgaagcaaatgcttc

SEQ ID NO: 95235 - DNA, 25 bp, Artificial
  probe
  misc_feature (1)..(25): SEQ ID NO: 6447; WAN024BUT_at; Start 163; Stop 187
gaggaaacaaaacagacaatcgcca

SEQ ID NO: 95236 - DNA, 25 bp, Artificial
  probe
  misc_feature (1)..(25): SEQ ID NO: 6447; WAN024BUT_at; Start 396; Stop 420
tgagcctgctatcggtgatgacaaa

SEQ ID NO: 95237 - DNA, 25 bp, Artificial
  probe
  misc_feature (1)..(25): SEQ ID NO: 6447; WAN024BUT_at; Start 342; Stop 366
gcgtctagctggttttatgagacca

SEQ ID NO: 95238 - DNA, 25 bp, Artificial
  probe
  misc_feature (1)..(25): SEQ ID NO: 6447; WAN024BUT_at; Start 150; Stop 174
gaaagctactgtcgaggaaacaaaa

SEQ ID NO: 95239 - DNA, 25 bp, Artificial
  probe
  misc_feature (1)..(25): SEQ ID NO: 6447; WAN024BUT_at; Start 334; Stop 358
gacgctgagcgtctagctggtttta

SEQ ID NO: 95240 - DNA, 25 bp, Artificial
  probe
  misc_feature (1)..(25): SEQ ID NO: 6447; WAN024BUT_at; Start 218; Stop 242
ggcaagtgagcaattatgaaactgc

SEQ ID NO: 95241 - DNA, 25 bp, Artificial
  probe
  misc_feature (1)..(25): SEQ ID NO: 6447; WAN024BUT_at; Start 275; Stop 299
gcttgccttatgacttggctgaccg

SEQ ID NO: 95242 - DNA, 25 bp, Artificial
  probe
  misc_feature (1)..(25): SEQ ID NO: 6447; WAN024BUT_at; Start 2; Stop 26
tgaagatgtctgaatttaaaacgat

SEQ ID NO: 95243 - DNA, 25 bp, Artificial
  probe
  misc_feature (1)..(25): SEQ ID NO: 6447; WAN024BUT_at; Start 355; Stop 379
tttatgagaccagcaacccctcaag

SEQ ID NO: 95244 - DNA, 25 bp, Artificial
  probe
  misc_feature (1)..(25): SEQ ID NO: 6447; WAN024BUT_at; Start 85; Stop 109
aaattcggtgattatgatgatctca

SEQ ID NO: 95245 - DNA, 25 bp, Artificial
  probe
  misc_feature (1)..(25): SEQ ID NO: 6447; WAN024BUT_at; Start 444; Stop 468
tcgagatttacaaccaaaaggagaa

SEQ ID NO: 95246 - DNA, 25 bp, Artificial
  probe
  misc_feature (1)..(25): SEQ ID NO: 6447; WAN024BUT_at; Start 386; Stop 410
taagagatactgagcctgctatcgg

SEQ ID NO: 95247 - DNA, 25 bp, Artificial
  probe
  misc_feature (1)..(25): SEQ ID NO: 6447; WAN024BUT_at; Start 251; Stop 275
gaactcgtatcgctttacaaaatgg

SEQ ID NO: 95248 - DNA, 25 bp, Artificial
  probe
  misc_feature (1)..(25): SEQ ID NO: 6447; WAN024BUT_at; Start 134; Stop 158
ctgaaaatggcgctttgaaagctac

SEQ ID NO: 95249 - DNA, 25 bp, Artificial
  probe
  misc_feature (1)..(25): SEQ ID NO: 6447; WAN024BUT_at; Start 177; Stop 201
gacaatcgccaaatcagacgctcaa

SEQ ID NO: 95250 - DNA, 25 bp, Artificial
  probe
  misc_feature (1)..(25): SEQ ID NO: 6447; WAN024BUT_at; Start 100; Stop 124
gatgatctcaagaaacgtgtttcag

SEQ ID NO: 95251 - DNA, 25 bp, Artificial
  probe
  misc_feature (1)..(25): SEQ ID NO: 6447; WAN024BUT_at; Start 144; Stop 168
cgctttgaaagctactgtcgaggaa

SEQ ID NO: 95252 - DNA, 25 bp, Artificial
  probe
  misc_feature (1)..(25): SEQ ID NO: 6447; WAN024BUT_at; Start 290; Stop 314
tggctgaccgtcttcaaggtgctga

SEQ ID NO: 95253 - DNA, 25 bp, Artificial
  probe
  misc_feature (1)..(25): SEQ ID NO: 6879; WAN024BUU_at; Start 1260; Stop 1284
caactgtgagaagcggaacatcggt

SEQ ID NO: 95254 - DNA, 25 bp, Artificial
  probe
  misc_feature (1)..(25): SEQ ID NO: 6879; WAN024BUU_at; Start 1137; Stop 1161
catgaagagcgtgatattgcctacg

SEQ ID NO: 95255 - DNA, 25 bp, Artificial
  probe
  misc_feature (1)..(25): SEQ ID NO: 6879; WAN024BUU_at; Start 380; Stop 404
ctatacgagccaagggacaagagcg

SEQ ID NO: 95256 - DNA, 25 bp, Artificial
  probe
  misc_feature (1)..(25): SEQ ID NO: 6879; WAN024BUU_at; Start 1176; Stop 1200
cgtggctaactctatgtgggaacaa

SEQ ID NO: 95257 - DNA, 25 bp, Artificial
  probe
  misc_feature (1)..(25): SEQ ID NO: 6879; WAN024BUU_at; Start 437; Stop 461
aattccgtaccagaacatccaatgg

SEQ ID NO: 95258 - DNA, 25 bp, Artificial
  probe
  misc_feature (1)..(25): SEQ ID NO: 6879; WAN024BUU_at; Start 1356; Stop 1380
tgcgcattgggcttgtatgacaact

SEQ ID NO: 95259 - DNA, 25 bp, Artificial
  probe
  misc_feature (1)..(25): SEQ ID NO: 6879; WAN024BUU_at; Start 705; Stop 729
tgatgatgtcgaagcctggtataac

SEQ ID NO: 95260 - DNA, 25 bp, Artificial
  probe
  misc_feature (1)..(25): SEQ ID NO: 6879; WAN024BUU_at; Start 1331; Stop 1355
tttctttgatggatagcgccttgct

SEQ ID NO: 95261 - DNA, 25 bp, Artificial
  probe
  misc_feature (1)..(25): SEQ ID NO: 6879; WAN024BUU_at; Start 513; Stop 537
tacgactgagcaggaatcggctttg

SEQ ID NO: 95262 - DNA, 25 bp, Artificial
  probe
  misc_feature (1)..(25): SEQ ID NO: 6879; WAN024BUU_at; Start 931; Stop 955
tatggtcaagatggcgcaaacgtgg

SEQ ID NO: 95263 - DNA, 25 bp, Artificial
  probe
  misc_feature (1)..(25): SEQ ID NO: 6879; WAN024BUU_at; Start 417; Stop 441
tgacggcggtgggattgtacaattc

SEQ ID NO: 95264 - DNA, 25 bp, Artificial
  probe
  misc_feature (1)..(25): SEQ ID NO: 6879; WAN024BUU_at; Start 1047; Stop 1071
ggattttgtcaagcgtgccgatgtg

SEQ ID NO: 95265 - DNA, 25 bp, Artificial
  probe
  misc_feature (1)..(25): SEQ ID NO: 6879; WAN024BUU_at; Start 659; Stop 683
aatactcaggttgggcagaatggtc

SEQ ID NO: 95266 - DNA, 25 bp, Artificial
  probe
  misc_feature (1)..(25): SEQ ID NO: 6879; WAN024BUU_at; Start 570; Stop 594
cacaatcatgtgtgggacgcctcct

SEQ ID NO: 95267 - DNA, 25 bp, Artificial
  probe
  misc_feature (1)..(25): SEQ ID NO: 6879; WAN024BUU_at; Start 495; Stop 519
cgatgaggctcaggaatatacgact

SEQ ID NO: 95268 - DNA, 25 bp, Artificial
  probe
  misc_feature (1)..(25): SEQ ID NO: 6879; WAN024BUU_at; Start 165; Stop 189
taaggacggtttgtgggtgcatcaa

SEQ ID NO: 95269 - DNA, 25 bp, Artificial
  probe
  misc_feature (1)..(25): SEQ ID NO: 6879; WAN024BUU_at; Start 1158; Stop 1182
tacggttaaagaaatcatcgtggct

SEQ ID NO: 95270 - DNA, 25 bp, Artificial
  probe
  misc_feature (1)..(25): SEQ ID NO: 6879; WAN024BUU_at; Start 355; Stop 379
tatgtggacggtgagcactttagct

SEQ ID NO: 95271 - DNA, 25 bp, Artificial
  probe
  misc_feature (1)..(25): SEQ ID NO: 6879; WAN024BUU_at; Start 269; Stop 293
gactaaatatcctacacacggccca

SEQ ID NO: 95272 - DNA, 25 bp, Artificial
  probe
  misc_feature (1)..(25): SEQ ID NO: 6879; WAN024BUU_at; Start 1023; Stop 1047
ccgtaacgggaatgactggatcttg

SEQ ID NO: 95273 - DNA, 25 bp, Artificial
  probe
  misc_feature (1)..(25): SEQ ID NO: 6879; WAN024BUU_at; Start 105; Stop 129
gactggtctttcttgctacgcttgg

SEQ ID NO: 95274 - DNA, 25 bp, Artificial
  probe
  misc_feature (1)..(25): SEQ ID NO: 6879; WAN024BUU_at; Start 1064; Stop 1088
ccgatgtggctactatcgtagtcga

SEQ ID NO: 95275 - DNA, 25 bp, Artificial
  probe
  misc_feature (1)..(25): SEQ ID NO: 6879; WAN024BUU_at; Start 810; Stop 834
tcaacgtttgggttattggcctgaa

SEQ ID NO: 95276 - DNA, 25 bp, Artificial
  probe
  misc_feature (1)..(25): SEQ ID NO: 6879; WAN024BUU_at; Start 149; Stop 173
ccattatggctgttgataaggacgg

SEQ ID NO: 95277 - DNA, 25 bp, Artificial
  probe
  misc_feature (1)..(25): SEQ ID NO: 6879; WAN024BUU_at; Start 826; Stop 850
tggcctgaatacaaccagaaatctg

SEQ ID NO: 95278 - DNA, 25 bp, Artificial
  probe
  misc_feature (1)..(25): SEQ ID NO: 6879; WAN024BUU_at; Start 604; Stop 628
tcaaatgggacggtattcacaaact

SEQ ID NO: 95279 - DNA, 25 bp, Artificial
  probe
  misc_feature (1)..(25): SEQ ID NO: 6879; WAN024BUU_at; Start 89; Stop 113
tagaaatctacgagcggactggtct

SEQ ID NO: 95280 - DNA, 25 bp, Artificial
  probe
  misc_feature (1)..(25): SEQ ID NO: 6879; WAN024BUU_at; Start 1009; Stop 1033
gactgtcagtcagtccgtaacggga

SEQ ID NO: 95281 - DNA, 25 bp, Artificial
  probe
  misc_feature (1)..(25): SEQ ID NO: 6879; WAN024BUU_at; Start 1287; Stop 1311
aaacggtgggtttggctatcgctcg

SEQ ID NO: 95282 - DNA, 25 bp, Artificial
  probe
  misc_feature (1)..(25): SEQ ID NO: 6879; WAN024BUU_at; Start 541; Stop 565
tatacggtaacggatagtagcaatc

SEQ ID NO: 95283 - DNA, 25 bp, Artificial
  probe
  misc_feature (1)..(25): SEQ ID NO: 6879; WAN024BUU_at; Start 1210; Stop 1234
caaaaaaccttgtgccatgctggtc

SEQ ID NO: 95284 - DNA, 25 bp, Artificial
  probe
  misc_feature (1)..(25): SEQ ID NO: 6879; WAN024BUU_at; Start 207; Stop 231
tcctcgtcgtaatgggaagtccgaa

SEQ ID NO: 95285 - DNA, 25 bp, Artificial
  probe
  misc_feature (1)..(25): SEQ ID NO: 6879; WAN024BUU_at; Start 722; Stop 746
ggtataactccaatccctcaatggg

SEQ ID NO: 95286 - DNA, 25 bp, Artificial
  probe
  misc_feature (1)..(25): SEQ ID NO: 6879; WAN024BUU_at; Start 19; Stop 43
ggcaatcagaatcctactcaatcgg

SEQ ID NO: 95287 - DNA, 25 bp, Artificial
  probe
  misc_feature (1)..(25): SEQ ID NO: 7112; WAN024BUV_at; Start 2; Stop 26
tgattgccaagtttctttctagcca

SEQ ID NO: 95288 - DNA, 25 bp, Artificial
  probe
  misc_feature (1)..(25): SEQ ID NO: 7112; WAN024BUV_at; Start 42; Stop 66
aatcgtaccgcatgataaccctatc

SEQ ID NO: 95289 - DNA, 25 bp, Artificial
  probe
  misc_feature (1)..(25): SEQ ID NO: 7112; WAN024BUV_at; Start 1; Stop 25
ctgattgccaagtttctttctagcc

SEQ ID NO: 95290 - DNA, 25 bp, Artificial
  probe
  misc_feature (1)..(25): SEQ ID NO: 7112; WAN024BUV_at; Start 33; Stop 57
gctcctttcaatcgtaccgcatgat

SEQ ID NO: 95291 - DNA, 25 bp, Artificial
  probe
  misc_feature (1)..(25): SEQ ID NO: 7112; WAN024BUV_at; Start 47; Stop 71
taccgcatgataaccctatcgctgg

SEQ ID NO: 95292 - DNA, 25 bp, Artificial
  probe
  misc_feature (1)..(25): SEQ ID NO: 7112; WAN024BUV_at; Start 6; Stop 30
tgccaagtttctttctagccatcca

SEQ ID NO: 95293 - DNA, 25 bp, Artificial
  probe
  misc_feature (1)..(25): SEQ ID NO: 7112; WAN024BUV_at; Start 32; Stop 56
tgctcctttcaatcgtaccgcatga

SEQ ID NO: 95294 - DNA, 25 bp, Artificial
  probe
  misc_feature (1)..(25): SEQ ID NO: 7112; WAN024BUV_at; Start 40; Stop 64
tcaatcgtaccgcatgataacccta

SEQ ID NO: 95295 - DNA, 25 bp, Artificial
  probe
  misc_feature (1)..(25): SEQ ID NO: 7112; WAN024BUV_at; Start 8; Stop 32
ccaagtttctttctagccatccact

SEQ ID NO: 95296 - DNA, 25 bp, Artificial
  probe
  misc_feature (1)..(25): SEQ ID NO: 7112; WAN024BUV_at; Start 7; Stop 31
gccaagtttctttctagccatccac

SEQ ID NO: 95297 - DNA, 25 bp, Artificial
  probe
  misc_feature (1)..(25): SEQ ID NO: 7112; WAN024BUV_at; Start 44; Stop 68
tcgtaccgcatgataaccctatcgc

SEQ ID NO: 95298 - DNA, 25 bp, Artificial
  probe
  misc_feature (1)..(25): SEQ ID NO: 7112; WAN024BUV_at; Start 4; Stop 28
attgccaagtttctttctagccatc

SEQ ID NO: 95299 - DNA, 25 bp, Artificial
  probe
  misc_feature (1)..(25): SEQ ID NO: 7112; WAN024BUV_at; Start 9; Stop 33
caagtttctttctagccatccactg

SEQ ID NO: 95300 - DNA, 25 bp, Artificial
  probe
  misc_feature (1)..(25): SEQ ID NO: 7112; WAN024BUV_at; Start 11; Stop 35
agtttctttctagccatccactgct

SEQ ID NO: 95301 - DNA, 25 bp, Artificial
  probe
  misc_feature (1)..(25): SEQ ID NO: 7112; WAN024BUV_at; Start 48; Stop 72
accgcatgataaccctatcgctggg

SEQ ID NO: 95302 - DNA, 25 bp, Artificial
  probe
  misc_feature (1)..(25): SEQ ID NO: 7112; WAN024BUV_at; Start 35; Stop 59
tcctttcaatcgtaccgcatgataa

SEQ ID NO: 95303 - DNA, 25 bp, Artificial
  probe
  misc_feature (1)..(25): SEQ ID NO: 7112; WAN024BUV_at; Start 34; Stop 58
ctcctttcaatcgtaccgcatgata

SEQ ID NO: 95304 - DNA, 25 bp, Artificial
  probe
  misc_feature (1)..(25): SEQ ID NO: 7112; WAN024BUV_at; Start 51; Stop 75
gcatgataaccctatcgctgggatg

SEQ ID NO: 95305 - DNA, 25 bp, Artificial
  probe
  misc_feature (1)..(25): SEQ ID NO: 7112; WAN024BUV_at; Start 5; Stop 29
ttgccaagtttctttctagccatcc

SEQ ID NO: 95306 - DNA, 25 bp, Artificial
  probe
  misc_feature (1)..(25): SEQ ID NO: 7112; WAN024BUV_at; Start 53; Stop 77
atgataaccctatcgctgggatgat

SEQ ID NO: 95307 - DNA, 25 bp, Artificial
  probe
  misc_feature (1)..(25): SEQ ID NO: 7112; WAN024BUV_at; Start 31; Stop 55
ctgctcctttcaatcgtaccgcatg

SEQ ID NO: 95308 - DNA, 25 bp, Artificial
  probe
  misc_feature (1)..(25): SEQ ID NO: 7112; WAN024BUV_at; Start 54; Stop 78
tgataaccctatcgctgggatgatt

SEQ ID NO: 95309 - DNA, 25 bp, Artificial
  probe
  misc_feature (1)..(25): SEQ ID NO: 7112; WAN024BUV_at; Start 3; Stop 27
gattgccaagtttctttctagccat

SEQ ID NO: 95310 - DNA, 25 bp, Artificial
  probe
  misc_feature (1)..(25): SEQ ID NO: 7112; WAN024BUV_at; Start 15; Stop 39
tctttctagccatccactgctcctt

SEQ ID NO: 95311 - DNA, 25 bp, Artificial
  probe
  misc_feature (1)..(25): SEQ ID NO: 7112; WAN024BUV_at; Start 52; Stop 76
catgataaccctatcgctgggatga

SEQ ID NO: 95312 - DNA, 25 bp, Artificial
  probe
  misc_feature (1)..(25): SEQ ID NO: 7112; WAN024BUV_at; Start 43; Stop 67
atcgtaccgcatgataaccctatcg

SEQ ID NO: 95313 - DNA, 25 bp, Artificial
  probe
  misc_feature (1)..(25): SEQ ID NO: 7112; WAN024BUV_at; Start 45; Stop 69
cgtaccgcatgataaccctatcgct

SEQ ID NO: 95314 - DNA, 25 bp, Artificial
  probe
  misc_feature (1)..(25): SEQ ID NO: 7112; WAN024BUV_at; Start 46; Stop 70
gtaccgcatgataaccctatcgctg

SEQ ID NO: 95315 - DNA, 25 bp, Artificial
  probe
  misc_feature (1)..(25): SEQ ID NO: 7112; WAN024BUV_at; Start 41; Stop 65
caatcgtaccgcatgataaccctat

SEQ ID NO: 95316 - DNA, 25 bp, Artificial
  probe
  misc_feature (1)..(25): SEQ ID NO: 7112; WAN024BUV_at; Start 30; Stop 54
actgctcctttcaatcgtaccgcat

SEQ ID NO: 95317 - DNA, 25 bp, Artificial
  probe
  misc_feature (1)..(25): SEQ ID NO: 7112; WAN024BUV_at; Start 37; Stop 61
ctttcaatcgtaccgcatgataacc

SEQ ID NO: 95318 - DNA, 25 bp, Artificial
  probe
  misc_feature (1)..(25): SEQ ID NO: 7112; WAN024BUV_at; Start 10; Stop 34
aagtttctttctagccatccactgc

SEQ ID NO: 95319 - DNA, 25 bp, Artificial
  probe
  misc_feature (1)..(25): SEQ ID NO: 7112; WAN024BUV_at; Start 36; Stop 60
cctttcaatcgtaccgcatgataac

SEQ ID NO: 95320 - DNA, 25 bp, Artificial
  probe
  misc_feature (1)..(25): SEQ ID NO: 7112; WAN024BUV_at; Start 50; Stop 74
cgcatgataaccctatcgctgggat

SEQ ID NO: 95321 - DNA, 25 bp, Artificial
  probe
  misc_feature (1)..(25): SEQ ID NO: 6891; WAN024BUW_at; Start 88; Stop 112
gctagtcatgactacacttcggtgt

SEQ ID NO: 95322 - DNA, 25 bp, Artificial
  probe
  misc_feature (1)..(25): SEQ ID NO: 6891; WAN024BUW_at; Start 33; Stop 57
gtctagtctggagcgcggtgcttcc

SEQ ID NO: 95323 - DNA, 25 bp, Artificial
  probe
  misc_feature (1)..(25): SEQ ID NO: 6891; WAN024BUW_at; Start 48; Stop 72
cggtgcttccgtgaaagaaattttg

SEQ ID NO: 95324 - DNA, 25 bp, Artificial
  probe
  misc_feature (1)..(25): SEQ ID NO: 6891; WAN024BUW_at; Start 27; Stop 51
gaaaaagtctagtctggagcgcggt

SEQ ID NO: 95325 - DNA, 25 bp, Artificial
  probe
  misc_feature (1)..(25): SEQ ID NO: 6891; WAN024BUW_at; Start 143; Stop 167
taaatcttggctatagctgggatag

SEQ ID NO: 95326 - DNA, 25 bp, Artificial
  probe
  misc_feature (1)..(25): SEQ ID NO: 6891; WAN024BUW_at; Start 46; Stop 70
cgcggtgcttccgtgaaagaaattt

SEQ ID NO: 95327 - DNA, 25 bp, Artificial
  probe
  misc_feature (1)..(25): SEQ ID NO: 6891; WAN024BUW_at; Start 25; Stop 49
gagaaaaagtctagtctggagcgcg

SEQ ID NO: 95328 - DNA, 25 bp, Artificial
  probe
  misc_feature (1)..(25): SEQ ID NO: 6891; WAN024BUW_at; Start 30; Stop 54
aaagtctagtctggagcgcggtgct

SEQ ID NO: 95329 - DNA, 25 bp, Artificial
  probe
  misc_feature (1)..(25): SEQ ID NO: 6891; WAN024BUW_at; Start 81; Stop 105
tcttgaggctagtcatgactacact

SEQ ID NO: 95330 - DNA, 25 bp, Artificial
  probe
  misc_feature (1)..(25): SEQ ID NO: 6891; WAN024BUW_at; Start 106; Stop 130
tcggtgttggtagtttctttggata

SEQ ID NO: 95331 - DNA, 25 bp, Artificial
  probe
  misc_feature (1)..(25): SEQ ID NO: 6891; WAN024BUW_at; Start 68; Stop 92
ttttggaggaaaatcttgaggctag

SEQ ID NO: 95332 - DNA, 25 bp, Artificial
  probe
  misc_feature (1)..(25): SEQ ID NO: 6891; WAN024BUW_at; Start 43; Stop 67
gagcgcggtgcttccgtgaaagaaa

SEQ ID NO: 95333 - DNA, 25 bp, Artificial
  probe
  misc_feature (1)..(25): SEQ ID NO: 6891; WAN024BUW_at; Start 156; Stop 180
tagctgggatagtagtttgcaggca

SEQ ID NO: 95334 - DNA, 25 bp, Artificial
  probe
  misc_feature (1)..(25): SEQ ID NO: 6891; WAN024BUW_at; Start 71; Stop 95
tggaggaaaatcttgaggctagtca

SEQ ID NO: 95335 - DNA, 25 bp, Artificial
  probe
  misc_feature (1)..(25): SEQ ID NO: 6891; WAN024BUW_at; Start 39; Stop 63
tctggagcgcggtgcttccgtgaaa

SEQ ID NO: 95336 - DNA, 25 bp, Artificial
  probe
  misc_feature (1)..(25): SEQ ID NO: 6891; WAN024BUW_at; Start 121; Stop 145
tctttggataaagatggtgagataa

SEQ ID NO: 95337 - DNA, 25 bp, Artificial
  probe
  misc_feature (1)..(25): SEQ ID NO: 6891; WAN024BUW_at; Start 102; Stop 126
cacttcggtgttggtagtttctttg

SEQ ID NO: 95338 - DNA, 25 bp, Artificial
  probe
  misc_feature (1)..(25): SEQ ID NO: 6891; WAN024BUW_at; Start 152; Stop 176
gctatagctgggatagtagtttgca

SEQ ID NO: 95339 - DNA, 25 bp, Artificial
  probe
  misc_feature (1)..(25): SEQ ID NO: 6891; WAN024BUW_at; Start 139; Stop 163
gagataaatcttggctatagctggg

SEQ ID NO: 95340 - DNA, 25 bp, Artificial
  probe
  misc_feature (1)..(25): SEQ ID NO: 6891; WAN024BUW_at; Start 185; Stop 209
gaatgctagatgttgctaaaaacta

SEQ ID NO: 95341 - DNA, 25 bp, Artificial
  probe
  misc_feature (1)..(25): SEQ ID NO: 6891; WAN024BUW_at; Start 159; Stop 183
ctgggatagtagtttgcaggcattg

SEQ ID NO: 95342 - DNA, 25 bp, Artificial
  probe
  misc_feature (1)..(25): SEQ ID NO: 6891; WAN024BUW_at; Start 147; Stop 171
tcttggctatagctgggatagtagt

SEQ ID NO: 95343 - DNA, 25 bp, Artificial
  probe
  misc_feature (1)..(25): SEQ ID NO: 6891; WAN024BUW_at; Start 29; Stop 53
aaaagtctagtctggagcgcggtgc

SEQ ID NO: 95344 - DNA, 25 bp, Artificial
  probe
  misc_feature (1)..(25): SEQ ID NO: 6891; WAN024BUW_at; Start 85; Stop 109
gaggctagtcatgactacacttcgg

SEQ ID NO: 95345 - DNA, 25 bp, Artificial
  probe
  misc_feature (1)..(25): SEQ ID NO: 6891; WAN024BUW_at; Start 129; Stop 153
taaagatggtgagataaatcttggc

SEQ ID NO: 95346 - DNA, 25 bp, Artificial
  probe
  misc_feature (1)..(25): SEQ ID NO: 6891; WAN024BUW_at; Start 90; Stop 114
tagtcatgactacacttcggtgttg

SEQ ID NO: 95347 - DNA, 25 bp, Artificial
  probe
  misc_feature (1)..(25): SEQ ID NO: 6891; WAN024BUW_at; Start 78; Stop 102
aaatcttgaggctagtcatgactac

SEQ ID NO: 95348 - DNA, 25 bp, Artificial
  probe
  misc_feature (1)..(25): SEQ ID NO: 6891; WAN024BUW_at; Start 169; Stop 193
agtttgcaggcattgggaatgctag

SEQ ID NO: 95349 - DNA, 25 bp, Artificial
  probe
  misc_feature (1)..(25): SEQ ID NO: 6891; WAN024BUW_at; Start 94; Stop 118
catgactacacttcggtgttggtag

SEQ ID NO: 95350 - DNA, 25 bp, Artificial
  probe
  misc_feature (1)..(25): SEQ ID NO: 6891; WAN024BUW_at; Start 189; Stop 213
gctagatgttgctaaaaactatatt

SEQ ID NO: 95351 - DNA, 25 bp, Artificial
  probe
  misc_feature (1)..(25): SEQ ID NO: 6891; WAN024BUW_at; Start 179; Stop 203
cattgggaatgctagatgttgctaa

SEQ ID NO: 95352 - DNA, 25 bp, Artificial
  probe
  misc_feature (1)..(25): SEQ ID NO: 6891; WAN024BUW_at; Start 22; Stop 46
ttagagaaaaagtctagtctggagc

SEQ ID NO: 95353 - DNA, 25 bp, Artificial
  probe
  misc_feature (1)..(25): SEQ ID NO: 6891; WAN024BUW_at; Start 75; Stop 99
ggaaaatcttgaggctagtcatgac

SEQ ID NO: 95354 - DNA, 25 bp, Artificial
  probe
  misc_feature (1)..(25): SEQ ID NO: 6891; WAN024BUW_at; Start 165; Stop 189
tagtagtttgcaggcattgggaatg

SEQ ID NO: 95355 - DNA, 25 bp, Artificial
  probe
  misc_feature (1)..(25): SEQ ID NO: 6333; WAN024BUX_at; Start 78; Stop 102
tgatacttcatggtatgccaaagga

SEQ ID NO: 95356 - DNA, 25 bp, Artificial
  probe
  misc_feature (1)..(25): SEQ ID NO: 6333; WAN024BUX_at; Start 52; Stop 76
aacgatgatgataaaacttggtggg

SEQ ID NO: 95357 - DNA, 25 bp, Artificial
  probe
  misc_feature (1)..(25): SEQ ID NO: 6333; WAN024BUX_at; Start 10; Stop 34
gattacgaagaagtgaattggtcag

SEQ ID NO: 95358 - DNA, 25 bp, Artificial
  probe
  misc_feature (1)..(25): SEQ ID NO: 6333; WAN024BUX_at; Start 100; Stop 124
ggattgatgcttatcacatttgata

SEQ ID NO: 95359 - DNA, 25 bp, Artificial
  probe
  misc_feature (1)..(25): SEQ ID NO: 6333; WAN024BUX_at; Start 154; Stop 178
tatcctcaaaacatgacttctgagg

SEQ ID NO: 95360 - DNA, 25 bp, Artificial
  probe
  misc_feature (1)..(25): SEQ ID NO: 6333; WAN024BUX_at; Start 73; Stop 97
tgggttgatacttcatggtatgcca

SEQ ID NO: 95361 - DNA, 25 bp, Artificial
  probe
  misc_feature (1)..(25): SEQ ID NO: 6333; WAN024BUX_at; Start 54; Stop 78
cgatgatgataaaacttggtgggtt

SEQ ID NO: 95362 - DNA, 25 bp, Artificial
  probe
  misc_feature (1)..(25): SEQ ID NO: 6333; WAN024BUX_at; Start 31; Stop 55
tcagagtattgttacaaggaaaacg

SEQ ID NO: 95363 - DNA, 25 bp, Artificial
  probe
  misc_feature (1)..(25): SEQ ID NO: 6333; WAN024BUX_at; Start 24; Stop 48
gaattggtcagagtattgttacaag

SEQ ID NO: 95364 - DNA, 25 bp, Artificial
  probe
  misc_feature (1)..(25): SEQ ID NO: 6333; WAN024BUX_at; Start 60; Stop 84
tgataaaacttggtgggttgatact

SEQ ID NO: 95365 - DNA, 25 bp, Artificial
  probe
  misc_feature (1)..(25): SEQ ID NO: 6333; WAN024BUX_at; Start 177; Stop 201
ggagattgaaatctttgataaagaa

SEQ ID NO: 95366 - DNA, 25 bp, Artificial
  probe
  misc_feature (1)..(25): SEQ ID NO: 6333; WAN024BUX_at; Start 40; Stop 64
tgttacaaggaaaacgatgatgata

SEQ ID NO: 95367 - DNA, 25 bp, Artificial
  probe
  misc_feature (1)..(25): SEQ ID NO: 6333; WAN024BUX_at; Start 81; Stop 105
tacttcatggtatgccaaaggattg

SEQ ID NO: 95368 - DNA, 25 bp, Artificial
  probe
  misc_feature (1)..(25): SEQ ID NO: 6333; WAN024BUX_at; Start 160; Stop 184
caaaacatgacttctgaggagattg

SEQ ID NO: 95369 - DNA, 25 bp, Artificial
  probe
  misc_feature (1)..(25): SEQ ID NO: 6333; WAN024BUX_at; Start 2; Stop 26
tgaaaagtgattacgaagaagtgaa

SEQ ID NO: 95370 - DNA, 25 bp, Artificial
  probe
  misc_feature (1)..(25): SEQ ID NO: 6333; WAN024BUX_at; Start 68; Stop 92
cttggtgggttgatacttcatggta

SEQ ID NO: 95371 - DNA, 25 bp, Artificial
  probe
  misc_feature (1)..(25): SEQ ID NO: 6333; WAN024BUX_at; Start 192; Stop 216
tgataaagaaaatccattttgggaa

SEQ ID NO: 95372 - DNA, 25 bp, Artificial
  probe
  misc_feature (1)..(25): SEQ ID NO: 6333; WAN024BUX_at; Start 88; Stop 112
tggtatgccaaaggattgatgctta

SEQ ID NO: 95373 - DNA, 25 bp, Artificial
  probe
  misc_feature (1)..(25): SEQ ID NO: 6333; WAN024BUX_at; Start 211; Stop 235
tgggaagatttcttttcagatagaa

SEQ ID NO: 95374 - DNA, 25 bp, Artificial
  probe
  misc_feature (1)..(25): SEQ ID NO: 6333; WAN024BUX_at; Start 151; Stop 175
gattatcctcaaaacatgacttctg

SEQ ID NO: 95375 - DNA, 25 bp, Artificial
  probe
  misc_feature (1)..(25): SEQ ID NO: 6333; WAN024BUX_at; Start 189; Stop 213
ctttgataaagaaaatccattttgg

SEQ ID NO: 95376 - DNA, 25 bp, Artificial
  probe
  misc_feature (1)..(25): SEQ ID NO: 6333; WAN024BUX_at; Start 168; Stop 192
gacttctgaggagattgaaatcttt

SEQ ID NO: 95377 - DNA, 25 bp, Artificial
  probe
  misc_feature (1)..(25): SEQ ID NO: 6333; WAN024BUX_at; Start 48; Stop 72
ggaaaacgatgatgataaaacttgg

SEQ ID NO: 95378 - DNA, 25 bp, Artificial
  probe
  misc_feature (1)..(25): SEQ ID NO: 6333; WAN024BUX_at; Start 205; Stop 229
ccattttgggaagatttcttttcag

SEQ ID NO: 95379 - DNA, 25 bp, Artificial
  probe
  misc_feature (1)..(25): SEQ ID NO: 6333; WAN024BUX_at; Start 37; Stop 61
tattgttacaaggaaaacgatgatg

SEQ ID NO: 95380 - DNA, 25 bp, Artificial
  probe
  misc_feature (1)..(25): SEQ ID NO: 6333; WAN024BUX_at; Start 15; Stop 39
cgaagaagtgaattggtcagagtat

SEQ ID NO: 95381 - DNA, 25 bp, Artificial
  probe
  misc_feature (1)..(25): SEQ ID NO: 6333; WAN024BUX_at; Start 86; Stop 110
catggtatgccaaaggattgatgct

SEQ ID NO: 95382 - DNA, 25 bp, Artificial
  probe
  misc_feature (1)..(25): SEQ ID NO: 6333; WAN024BUX_at; Start 165; Stop 189
catgacttctgaggagattgaaatc

SEQ ID NO: 95383 - DNA, 25 bp, Artificial
  probe
  misc_feature (1)..(25): SEQ ID NO: 6333; WAN024BUX_at; Start 134; Stop 158
tctataacctttttgaagattatcc

SEQ ID NO: 95384 - DNA, 25 bp, Artificial
  probe
  misc_feature (1)..(25): SEQ ID NO: 6333; WAN024BUX_at; Start 91; Stop 115
tatgccaaaggattgatgcttatca

SEQ ID NO: 95385 - DNA, 25 bp, Artificial
  probe
  misc_feature (1)..(25): SEQ ID NO: 6333; WAN024BUX_at; Start 114; Stop 138
cacatttgataaaaagaagttctat

SEQ ID NO: 95386 - DNA, 25 bp, Artificial
  probe
  misc_feature (1)..(25): SEQ ID NO: 6333; WAN024BUX_at; Start 147; Stop 171
tgaagattatcctcaaaacatgact

SEQ ID NO: 95387 - DNA, 25 bp, Artificial
  probe
  misc_feature (1)..(25): SEQ ID NO: 6333; WAN024BUX_at; Start 94; Stop 118
gccaaaggattgatgcttatcacat

SEQ ID NO: 95388 - DNA, 25 bp, Artificial
  probe
  misc_feature (1)..(25): SEQ ID NO: 6333; WAN024BUX_at; Start 65; Stop 89
aaacttggtgggttgatacttcatg

SEQ ID NO: 95389 - DNA, 25 bp, Artificial
  probe
  misc_feature (1)..(25): SEQ ID NO: 6932; WAN024BUY_at; Start 758; Stop 782
tcagtcaggttagaaaacttgctct

SEQ ID NO: 95390 - DNA, 25 bp, Artificial
  probe
  misc_feature (1)..(25): SEQ ID NO: 6932; WAN024BUY_at; Start 1328; Stop 1352
tattgagtttccttaacacagctga

SEQ ID NO: 95391 - DNA, 25 bp, Artificial
  probe
  misc_feature (1)..(25): SEQ ID NO: 6932; WAN024BUY_at; Start 918; Stop 942
taaagcgggatatacagttctagat

SEQ ID NO: 95392 - DNA, 25 bp, Artificial
  probe
  misc_feature (1)..(25): SEQ ID NO: 6932; WAN024BUY_at; Start 322; Stop 346
gctaaaattgggttaactgctcagg

SEQ ID NO: 95393 - DNA, 25 bp, Artificial
  probe
  misc_feature (1)..(25): SEQ ID NO: 6932; WAN024BUY_at; Start 1026; Stop 1050
tgtagccaaaaacacaaatgacttc

SEQ ID NO: 95394 - DNA, 25 bp, Artificial
  probe
  misc_feature (1)..(25): SEQ ID NO: 6932; WAN024BUY_at; Start 876; Stop 900
gaaagggtcttgttcatccttagca

SEQ ID NO: 95395 - DNA, 25 bp, Artificial
  probe
  misc_feature (1)..(25): SEQ ID NO: 6932; WAN024BUY_at; Start 159; Stop 183
gatactttctaaggctctgggagcc

SEQ ID NO: 95396 - DNA, 25 bp, Artificial
  probe
  misc_feature (1)..(25): SEQ ID NO: 6932; WAN024BUY_at; Start 106; Stop 130
cacagcaaggcaagttatttggacg

SEQ ID NO: 95397 - DNA, 25 bp, Artificial
  probe
  misc_feature (1)..(25): SEQ ID NO: 6932; WAN024BUY_at; Start 1115; Stop 1139
gacatgctgcaatcattaggaaaaa

SEQ ID NO: 95398 - DNA, 25 bp, Artificial
  probe
  misc_feature (1)..(25): SEQ ID NO: 6932; WAN024BUY_at; Start 1099; Stop 1123
tatttggcaacaggtagacatgctg

SEQ ID NO: 95399 - DNA, 25 bp, Artificial
  probe
  misc_feature (1)..(25): SEQ ID NO: 6932; WAN024BUY_at; Start 649; Stop 673
tatgatcctaaaagtggaaaggtcc

SEQ ID NO: 95400 - DNA, 25 bp, Artificial
  probe
  misc_feature (1)..(25): SEQ ID NO: 6932; WAN024BUY_at; Start 92; Stop 116
tgtctaaactacaacacagcaaggc

SEQ ID NO: 95401 - DNA, 25 bp, Artificial
  probe
  misc_feature (1)..(25): SEQ ID NO: 6932; WAN024BUY_at; Start 342; Stop 366
tcaggttcctgaattgaatcaagac

SEQ ID NO: 95402 - DNA, 25 bp, Artificial
  probe
  misc_feature (1)..(25): SEQ ID NO: 6932; WAN024BUY_at; Start 1231; Stop 1255
gctaagaaatctcatgctgtaaggg

SEQ ID NO: 95403 - DNA, 25 bp, Artificial
  probe
  misc_feature (1)..(25): SEQ ID NO: 6932; WAN024BUY_at; Start 225; Stop 249
caatatcgctcaacgtgtgctgacg

SEQ ID NO: 95404 - DNA, 25 bp, Artificial
  probe
  misc_feature (1)..(25): SEQ ID NO: 6932; WAN024BUY_at; Start 421; Stop 445
cgttggctattagaagaacctgttg

SEQ ID NO: 95405 - DNA, 25 bp, Artificial
  probe
  misc_feature (1)..(25): SEQ ID NO: 6932; WAN024BUY_at; Start 260; Stop 284
ggcgaaattacgagcttgtgagtga

SEQ ID NO: 95406 - DNA, 25 bp, Artificial
  probe
  misc_feature (1)..(25): SEQ ID NO: 6932; WAN024BUY_at; Start 673; Stop 697
caaaatgtttggagtaaggcgtgga

SEQ ID NO: 95407 - DNA, 25 bp, Artificial
  probe
  misc_feature (1)..(25): SEQ ID NO: 6932; WAN024BUY_at; Start 9; Stop 33
ggatatcgttccgagcctgctcaag

SEQ ID NO: 95408 - DNA, 25 bp, Artificial
  probe
  misc_feature (1)..(25): SEQ ID NO: 6932; WAN024BUY_at; Start 58; Stop 82
gctaggctagacagcgaggtcttga

SEQ ID NO: 95409 - DNA, 25 bp, Artificial
  probe
  misc_feature (1)..(25): SEQ ID NO: 6932; WAN024BUY_at; Start 609; Stop 633
tatttatcgaagacatcaacgttgt

SEQ ID NO: 95410 - DNA, 25 bp, Artificial
  probe
  misc_feature (1)..(25): SEQ ID NO: 6932; WAN024BUY_at; Start 1047; Stop 1071
cttcaaagcggtcaaagaattgttg

SEQ ID NO: 95411 - DNA, 25 bp, Artificial
  probe
  misc_feature (1)..(25): SEQ ID NO: 6932; WAN024BUY_at; Start 1187; Stop 1211
ggtttaagccatttgatgacactgt

SEQ ID NO: 95412 - DNA, 25 bp, Artificial
  probe
  misc_feature (1)..(25): SEQ ID NO: 6932; WAN024BUY_at; Start 471; Stop 495
tgatagcatccagaaaaatgcggag

SEQ ID NO: 95413 - DNA, 25 bp, Artificial
  probe
  misc_feature (1)..(25): SEQ ID NO: 6932; WAN024BUY_at; Start 381; Stop 405
ggttaatcgtttagccagtgaggaa

SEQ ID NO: 95414 - DNA, 25 bp, Artificial
  probe
  misc_feature (1)..(25): SEQ ID NO: 6932; WAN024BUY_at; Start 1008; Stop 1032
tccaggtgttaagatgcatgtagcc

SEQ ID NO: 95415 - DNA, 25 bp, Artificial
  probe
  misc_feature (1)..(25): SEQ ID NO: 6932; WAN024BUY_at; Start 557; Stop 581
aatggtgtcaggaggttcaaggtac

SEQ ID NO: 95416 - DNA, 25 bp, Artificial
  probe
  misc_feature (1)..(25): SEQ ID NO: 6932; WAN024BUY_at; Start 989; Stop 1013
tcaatatgattggaagccttccagg

SEQ ID NO: 95417 - DNA, 25 bp, Artificial
  probe
  misc_feature (1)..(25): SEQ ID NO: 6932; WAN024BUY_at; Start 722; Stop 746
tagaagcaagaaagaacatcggaat

SEQ ID NO: 95418 - DNA, 25 bp, Artificial
  probe
  misc_feature (1)..(25): SEQ ID NO: 6932; WAN024BUY_at; Start 585; Stop 609
caaatacccaagagttccaaaggat

SEQ ID NO: 95419 - DNA, 25 bp, Artificial
  probe
  misc_feature (1)..(25): SEQ ID NO: 6932; WAN024BUY_at; Start 502; Stop 526
cataaatctggattgcaacctgaga

SEQ ID NO: 95420 - DNA, 25 bp, Artificial
  probe
  misc_feature (1)..(25): SEQ ID NO: 6932; WAN024BUY_at; Start 176; Stop 200
tgggagcctctctaacgaacgaaac

SEQ ID NO: 95421 - DNA, 25 bp, Artificial
  probe
  misc_feature (1)..(25): SEQ ID NO: 6932; WAN024BUY_at; Start 43; Stop 67
tctgagtttgaaggtgctaggctag

SEQ ID NO: 95422 - DNA, 25 bp, Artificial
  probe
  misc_feature (1)..(25): SEQ ID NO: 6932; WAN024BUY_at; Start 738; Stop 762
catcggaatacaatctgaagtcagt

SEQ ID NO: 95423 - DNA, 25 bp, Artificial
  probe
  misc_feature (1)..(25): SEQ ID NO: 7605; WAN024BUZ_at; Start 66; Stop 90
gattttcttacaatctcaggttgca

SEQ ID NO: 95424 - DNA, 25 bp, Artificial
  probe
  misc_feature (1)..(25): SEQ ID NO: 7605; WAN024BUZ_at; Start 82; Stop 106
caggttgcaatccagatttatgttg

SEQ ID NO: 95425 - DNA, 25 bp, Artificial
  probe
  misc_feature (1)..(25): SEQ ID NO: 7605; WAN024BUZ_at; Start 79; Stop 103
tctcaggttgcaatccagatttatg

SEQ ID NO: 95426 - DNA, 25 bp, Artificial
  probe
  misc_feature (1)..(25): SEQ ID NO: 7605; WAN024BUZ_at; Start 100; Stop 124
tatgttgaaactccgcatttttctg

SEQ ID NO: 95427 - DNA, 25 bp, Artificial
  probe
  misc_feature (1)..(25): SEQ ID NO: 7605; WAN024BUZ_at; Start 72; Stop 96
cttacaatctcaggttgcaatccag

SEQ ID NO: 95428 - DNA, 25 bp, Artificial
  probe
  misc_feature (1)..(25): SEQ ID NO: 7605; WAN024BUZ_at; Start 19; Stop 43
tgtaagtaccttgaacctcctgaca

SEQ ID NO: 95429 - DNA, 25 bp, Artificial
  probe
  misc_feature (1)..(25): SEQ ID NO: 7605; WAN024BUZ_at; Start 110; Stop 134
ctccgcatttttctggatgctatca

SEQ ID NO: 95430 - DNA, 25 bp, Artificial
  probe
  misc_feature (1)..(25): SEQ ID NO: 7605; WAN024BUZ_at; Start 74; Stop 98
tacaatctcaggttgcaatccagat

SEQ ID NO: 95431 - DNA, 25 bp, Artificial
  probe
  misc_feature (1)..(25): SEQ ID NO: 7605; WAN024BUZ_at; Start 45; Stop 69
cattcacaacagtgataagctgatt

SEQ ID NO: 95432 - DNA, 25 bp, Artificial
  probe
  misc_feature (1)..(25): SEQ ID NO: 7605; WAN024BUZ_at; Start 29; Stop 53
ttgaacctcctgacaccattcacaa

SEQ ID NO: 95433 - DNA, 25 bp, Artificial
  probe
  misc_feature (1)..(25): SEQ ID NO: 7605; WAN024BUZ_at; Start 36; Stop 60
tcctgacaccattcacaacagtgat

SEQ ID NO: 95434 - DNA, 25 bp, Artificial
  probe
  misc_feature (1)..(25): SEQ ID NO: 7605; WAN024BUZ_at; Start 61; Stop 85
aagctgattttcttacaatctcagg

SEQ ID NO: 95435 - DNA, 25 bp, Artificial
  probe
  misc_feature (1)..(25): SEQ ID NO: 7605; WAN024BUZ_at; Start 54; Stop 78
cagtgataagctgattttcttacaa

SEQ ID NO: 95436 - DNA, 25 bp, Artificial
  probe
  misc_feature (1)..(25): SEQ ID NO: 7605; WAN024BUZ_at; Start 17; Stop 41
tttgtaagtaccttgaacctcctga

SEQ ID NO: 95437 - DNA, 25 bp, Artificial
  probe
  misc_feature (1)..(25): SEQ ID NO: 7605; WAN024BUZ_at; Start 70; Stop 94
ttcttacaatctcaggttgcaatcc

SEQ ID NO: 95438 - DNA, 25 bp, Artificial
  probe
  misc_feature (1)..(25): SEQ ID NO: 7605; WAN024BUZ_at; Start 22; Stop 46
aagtaccttgaacctcctgacacca

SEQ ID NO: 95439 - DNA, 25 bp, Artificial
  probe
  misc_feature (1)..(25): SEQ ID NO: 7605; WAN024BUZ_at; Start 24; Stop 48
gtaccttgaacctcctgacaccatt

SEQ ID NO: 95440 - DNA, 25 bp, Artificial
  probe
  misc_feature (1)..(25): SEQ ID NO: 7605; WAN024BUZ_at; Start 39; Stop 63
tgacaccattcacaacagtgataag

SEQ ID NO: 95441 - DNA, 25 bp, Artificial
  probe
  misc_feature (1)..(25): SEQ ID NO: 7605; WAN024BUZ_at; Start 89; Stop 113
caatccagatttatgttgaaactcc

SEQ ID NO: 95442 - DNA, 25 bp, Artificial
  probe
  misc_feature (1)..(25): SEQ ID NO: 7605; WAN024BUZ_at; Start 51; Stop 75
caacagtgataagctgattttctta

SEQ ID NO: 95443 - DNA, 25 bp, Artificial
  probe
  misc_feature (1)..(25): SEQ ID NO: 7605; WAN024BUZ_at; Start 2; Stop 26
tggaactcttgggtatttgtaagta

SEQ ID NO: 95444 - DNA, 25 bp, Artificial
  probe
  misc_feature (1)..(25): SEQ ID NO: 7605; WAN024BUZ_at; Start 42; Stop 66
caccattcacaacagtgataagctg

SEQ ID NO: 95445 - DNA, 25 bp, Artificial
  probe
  misc_feature (1)..(25): SEQ ID NO: 7605; WAN024BUZ_at; Start 114; Stop 138
gcatttttctggatgctatcatcaa

SEQ ID NO: 95446 - DNA, 25 bp, Artificial
  probe
  misc_feature (1)..(25): SEQ ID NO: 7605; WAN024BUZ_at; Start 76; Stop 100
caatctcaggttgcaatccagattt

SEQ ID NO: 95447 - DNA, 25 bp, Artificial
  probe
  misc_feature (1)..(25): SEQ ID NO: 7605; WAN024BUZ_at; Start 121; Stop 145
tctggatgctatcatcaattattga

SEQ ID NO: 95448 - DNA, 25 bp, Artificial
  probe
  misc_feature (1)..(25): SEQ ID NO: 7605; WAN024BUZ_at; Start 105; Stop 129
tgaaactccgcatttttctggatgc

SEQ ID NO: 95449 - DNA, 25 bp, Artificial
  probe
  misc_feature (1)..(25): SEQ ID NO: 7605; WAN024BUZ_at; Start 94; Stop 118
cagatttatgttgaaactccgcatt

SEQ ID NO: 95450 - DNA, 25 bp, Artificial
  probe
  misc_feature (1)..(25): SEQ ID NO: 7605; WAN024BUZ_at; Start 48; Stop 72
tcacaacagtgataagctgattttc

SEQ ID NO: 95451 - DNA, 25 bp, Artificial
  probe
  misc_feature (1)..(25): SEQ ID NO: 7605; WAN024BUZ_at; Start 92; Stop 116
tccagatttatgttgaaactccgca

SEQ ID NO: 95452 - DNA, 25 bp, Artificial
  probe
  misc_feature (1)..(25): SEQ ID NO: 7605; WAN024BUZ_at; Start 124; Stop 148
ggatgctatcatcaattattgattg

SEQ ID NO: 95453 - DNA, 25 bp, Artificial
  probe
  misc_feature (1)..(25): SEQ ID NO: 7605; WAN024BUZ_at; Start 21; Stop 45
taagtaccttgaacctcctgacacc

SEQ ID NO: 95454 - DNA, 25 bp, Artificial
  probe
  misc_feature (1)..(25): SEQ ID NO: 7605; WAN024BUZ_at; Start 96; Stop 120
gatttatgttgaaactccgcatttt

SEQ ID NO: 95455 - DNA, 25 bp, Artificial
  probe
  misc_feature (1)..(25): SEQ ID NO: 7605; WAN024BUZ_at; Start 107; Stop 131
aaactccgcatttttctggatgcta

SEQ ID NO: 95456 - DNA, 25 bp, Artificial
  probe
  misc_feature (1)..(25): SEQ ID NO: 7605; WAN024BUZ_at; Start 7; Stop 31
ctcttgggtatttgtaagtaccttg

SEQ ID NO: 95457 - DNA, 25 bp, Artificial
  probe
  misc_feature (1)..(25): SEQ ID NO: 6534; WAN024BV2_at; Start 414; Stop 438
gacagagggctatgccgttttgaaa

SEQ ID NO: 95458 - DNA, 25 bp, Artificial
  probe
  misc_feature (1)..(25): SEQ ID NO: 6534; WAN024BV2_at; Start 808; Stop 832
gggcaattcaccacatccagcatgt

SEQ ID NO: 95459 - DNA, 25 bp, Artificial
  probe
  misc_feature (1)..(25): SEQ ID NO: 6534; WAN024BV2_at; Start 399; Stop 423
tatcactggcttgctgacagagggc

SEQ ID NO: 95460 - DNA, 25 bp, Artificial
  probe
  misc_feature (1)..(25): SEQ ID NO: 6534; WAN024BV2_at; Start 1224; Stop 1248
tatgaacgctactccgaaaattgag

SEQ ID NO: 95461 - DNA, 25 bp, Artificial
  probe
  misc_feature (1)..(25): SEQ ID NO: 6534; WAN024BV2_at; Start 919; Stop 943
gacaatccgtcatccgttgaagcca

SEQ ID NO: 95462 - DNA, 25 bp, Artificial
  probe
  misc_feature (1)..(25): SEQ ID NO: 6534; WAN024BV2_at; Start 594; Stop 618
tggtcggtcacgaattactcgggct

SEQ ID NO: 95463 - DNA, 25 bp, Artificial
  probe
  misc_feature (1)..(25): SEQ ID NO: 6534; WAN024BV2_at; Start 520; Stop 544
tttgcaatcggaaatccaacgggtg

SEQ ID NO: 95464 - DNA, 25 bp, Artificial
  probe
  misc_feature (1)..(25): SEQ ID NO: 6534; WAN024BV2_at; Start 650; Stop 674
cgcttgagcgttcagatgtgactgc

SEQ ID NO: 95465 - DNA, 25 bp, Artificial
  probe
  misc_feature (1)..(25): SEQ ID NO: 6534; WAN024BV2_at; Start 259; Stop 283
ccagatgtattctttgatagcgcga

SEQ ID NO: 95466 - DNA, 25 bp, Artificial
  probe
  misc_feature (1)..(25): SEQ ID NO: 6534; WAN024BV2_at; Start 847; Stop 871
cagttacggactgcagctgctggct

SEQ ID NO: 95467 - DNA, 25 bp, Artificial
  probe
  misc_feature (1)..(25): SEQ ID NO: 6534; WAN024BV2_at; Start 1189; Stop 1213
gaaaccatccgtgacttgactggaa

SEQ ID NO: 95468 - DNA, 25 bp, Artificial
  probe
  misc_feature (1)..(25): SEQ ID NO: 6534; WAN024BV2_at; Start 362; Stop 386
ttatcgaggcaagtaatgcaactgg

SEQ ID NO: 95469 - DNA, 25 bp, Artificial
  probe
  misc_feature (1)..(25): SEQ ID NO: 6534; WAN024BV2_at; Start 336; Stop 360
cgatgatgacgctcctcggttgcag

SEQ ID NO: 95470 - DNA, 25 bp, Artificial
  probe
  misc_feature (1)..(25): SEQ ID NO: 6534; WAN024BV2_at; Start 567; Stop 591
tcatagacctgatgcggttcgtccg

SEQ ID NO: 95471 - DNA, 25 bp, Artificial
  probe
  misc_feature (1)..(25): SEQ ID NO: 6534; WAN024BV2_at; Start 721; Stop 745
gatgctgaggcgattgatacttgga

SEQ ID NO: 95472 - DNA, 25 bp, Artificial
  probe
  misc_feature (1)..(25): SEQ ID NO: 6534; WAN024BV2_at; Start 635; Stop 659
gatatgctaaacgaacgcttgagcg

SEQ ID NO: 95473 - DNA, 25 bp, Artificial
  probe
  misc_feature (1)..(25): SEQ ID NO: 6534; WAN024BV2_at; Start 274; Stop 298
gatagcgcgatcctttcagcattga

SEQ ID NO: 95474 - DNA, 25 bp, Artificial
  probe
  misc_feature (1)..(25): SEQ ID NO: 6534; WAN024BV2_at; Start 445; Stop 469
gacaatggttatgccgtgcttgagg

SEQ ID NO: 95475 - DNA, 25 bp, Artificial
  probe
  misc_feature (1)..(25): SEQ ID NO: 6534; WAN024BV2_at; Start 1170; Stop 1194
ccctggctatatggatgctgaaacc

SEQ ID NO: 95476 - DNA, 25 bp, Artificial
  probe
  misc_feature (1)..(25): SEQ ID NO: 6534; WAN024BV2_at; Start 958; Stop 982
gagaacttgcgtttagctggtcgga

SEQ ID NO: 95477 - DNA, 25 bp, Artificial
  probe
  misc_feature (1)..(25): SEQ ID NO: 6534; WAN024BV2_at; Start 738; Stop 762
tacttggaaagcgactgtatctagc

SEQ ID NO: 95478 - DNA, 25 bp, Artificial
  probe
  misc_feature (1)..(25): SEQ ID NO: 6534; WAN024BV2_at; Start 1432; Stop 1456
gaattaattgtgaaggaggctgcag

SEQ ID NO: 95479 - DNA, 25 bp, Artificial
  probe
  misc_feature (1)..(25): SEQ ID NO: 6534; WAN024BV2_at; Start 609; Stop 633
tactcgggctgggatgtactatcag

SEQ ID NO: 95480 - DNA, 25 bp, Artificial
  probe
  misc_feature (1)..(25): SEQ ID NO: 6534; WAN024BV2_at; Start 1367; Stop 1391
gaatactcttactaacctcaactgg

SEQ ID NO: 95481 - DNA, 25 bp, Artificial
  probe
  misc_feature (1)..(25): SEQ ID NO: 6534; WAN024BV2_at; Start 24; Stop 48
tctcaggaagaagctagccaattac

SEQ ID NO: 95482 - DNA, 25 bp, Artificial
  probe
  misc_feature (1)..(25): SEQ ID NO: 6534; WAN024BV2_at; Start 1111; Stop 1135
gcggacgctaacatgctgaccttga

SEQ ID NO: 95483 - DNA, 25 bp, Artificial
  probe
  misc_feature (1)..(25): SEQ ID NO: 6534; WAN024BV2_at; Start 379; Stop 403
gcaactggtgttctggatcctatca

SEQ ID NO: 95484 - DNA, 25 bp, Artificial
  probe
  misc_feature (1)..(25): SEQ ID NO: 6534; WAN024BV2_at; Start 992; Stop 1016
gctctctgggctctggtttgctgaa

SEQ ID NO: 95485 - DNA, 25 bp, Artificial
  probe
  misc_feature (1)..(25): SEQ ID NO: 6534; WAN024BV2_at; Start 1152; Stop 1176
caaactgaatcaagcggtccctggc

SEQ ID NO: 95486 - DNA, 25 bp, Artificial
  probe
  misc_feature (1)..(25): SEQ ID NO: 6534; WAN024BV2_at; Start 126; Stop 150
tcaaatcaggcaacaatatcgggcg

SEQ ID NO: 95487 - DNA, 25 bp, Artificial
  probe
  misc_feature (1)..(25): SEQ ID NO: 6534; WAN024BV2_at; Start 1096; Stop 1120
gagcctttgttcgaggcggacgcta

SEQ ID NO: 95488 - DNA, 25 bp, Artificial
  probe
  misc_feature (1)..(25): SEQ ID NO: 6534; WAN024BV2_at; Start 501; Stop 525
tcctaaagatggaaagccgtttgca

SEQ ID NO: 95489 - DNA, 25 bp, Artificial
  probe
  misc_feature (1)..(25): SEQ ID NO: 6534; WAN024BV2_at; Start 757; Stop 781
tctagcttgctgacctttacgaaag

SEQ ID NO: 95490 - DNA, 25 bp, Artificial
  probe
  misc_feature (1)..(25): SEQ ID NO: 6534; WAN024BV2_at; Start 10; Stop 34
aaaggtatgggctatctcaggaaga

SEQ ID NO: 95491 - DNA, 25 bp, Artificial
  probe
  misc_feature (1)..(25): SEQ ID NO: 6485; WAN024BV3_at; Start 234; Stop 258
caatagacagaagtctgacaagcta

SEQ ID NO: 95492 - DNA, 25 bp, Artificial
  probe
  misc_feature (1)..(25): SEQ ID NO: 6485; WAN024BV3_at; Start 104; Stop 128
gtggccagcctgtagacaaagacct

SEQ ID NO: 95493 - DNA, 25 bp, Artificial
  probe
  misc_feature (1)..(25): SEQ ID NO: 6485; WAN024BV3_at; Start 316; Stop 340
agtacagattggtttaagtataagg

SEQ ID NO: 95494 - DNA, 25 bp, Artificial
  probe
  misc_feature (1)..(25): SEQ ID NO: 6485; WAN024BV3_at; Start 310; Stop 334
ccacaaagtacagattggtttaagt

SEQ ID NO: 95495 - DNA, 25 bp, Artificial
  probe
  misc_feature (1)..(25): SEQ ID NO: 6485; WAN024BV3_at; Start 187; Stop 211
ggacatccatctgacattgctaact

SEQ ID NO: 95496 - DNA, 25 bp, Artificial
  probe
  misc_feature (1)..(25): SEQ ID NO: 6485; WAN024BV3_at; Start 111; Stop 135
gcctgtagacaaagacctgagatat

SEQ ID NO: 95497 - DNA, 25 bp, Artificial
  probe
  misc_feature (1)..(25): SEQ ID NO: 6485; WAN024BV3_at; Start 141; Stop 165
tccattaagtccagtcattgaccac

SEQ ID NO: 95498 - DNA, 25 bp, Artificial
  probe
  misc_feature (1)..(25): SEQ ID NO: 6485; WAN024BV3_at; Start 272; Stop 296
agacaaacggaacaaaggtcattgg

SEQ ID NO: 95499 - DNA, 25 bp, Artificial
  probe
  misc_feature (1)..(25): SEQ ID NO: 6485; WAN024BV3_at; Start 152; Stop 176
cagtcattgaccacatcgttccagt

SEQ ID NO: 95500 - DNA, 25 bp, Artificial
  probe
  misc_feature (1)..(25): SEQ ID NO: 6485; WAN024BV3_at; Start 284; Stop 308
caaaggtcattggtaataggaactt

SEQ ID NO: 95501 - DNA, 25 bp, Artificial
  probe
  misc_feature (1)..(25): SEQ ID NO: 6485; WAN024BV3_at; Start 199; Stop 223
gacattgctaacttgcagttggcgc

SEQ ID NO: 95502 - DNA, 25 bp, Artificial
  probe
  misc_feature (1)..(25): SEQ ID NO: 6485; WAN024BV3_at; Start 300; Stop 324
taggaacttaccacaaagtacagat

SEQ ID NO: 95503 - DNA, 25 bp, Artificial
  probe
  misc_feature (1)..(25): SEQ ID NO: 6485; WAN024BV3_at; Start 159; Stop 183
tgaccacatcgttccagtaaataag

SEQ ID NO: 95504 - DNA, 25 bp, Artificial
  probe
  misc_feature (1)..(25): SEQ ID NO: 6485; WAN024BV3_at; Start 99; Stop 123
gatatgtggccagcctgtagacaaa

SEQ ID NO: 95505 - DNA, 25 bp, Artificial
  probe
  misc_feature (1)..(25): SEQ ID NO: 6485; WAN024BV3_at; Start 131; Stop 155
gatatcctcatccattaagtccagt

SEQ ID NO: 95506 - DNA, 25 bp, Artificial
  probe
  misc_feature (1)..(25): SEQ ID NO: 6485; WAN024BV3_at; Start 91; Stop 115
acttgtgggatatgtggccagcctg

SEQ ID NO: 95507 - DNA, 25 bp, Artificial
  probe
  misc_feature (1)..(25): SEQ ID NO: 6485; WAN024BV3_at; Start 88; Stop 112
aacacttgtgggatatgtggccagc

SEQ ID NO: 95508 - DNA, 25 bp, Artificial
  probe
  misc_feature (1)..(25): SEQ ID NO: 6485; WAN024BV3_at; Start 261; Stop 285
tgctgatgagaagacaaacggaaca

SEQ ID NO: 95509 - DNA, 25 bp, Artificial
  probe
  misc_feature (1)..(25): SEQ ID NO: 6485; WAN024BV3_at; Start 243; Stop 267
gaagtctgacaagctatatgctgat

SEQ ID NO: 95510 - DNA, 25 bp, Artificial
  probe
  misc_feature (1)..(25): SEQ ID NO: 6485; WAN024BV3_at; Start 173; Stop 197
cagtaaataagaacggacatccatc

SEQ ID NO: 95511 - DNA, 25 bp, Artificial
  probe
  misc_feature (1)..(25): SEQ ID NO: 6485; WAN024BV3_at; Start 74; Stop 98
tcttaaagacaagaaacacttgtgg

SEQ ID NO: 95512 - DNA, 25 bp, Artificial
  probe
  misc_feature (1)..(25): SEQ ID NO: 6485; WAN024BV3_at; Start 183; Stop 207
gaacggacatccatctgacattgct

SEQ ID NO: 95513 - DNA, 25 bp, Artificial
  probe
  misc_feature (1)..(25): SEQ ID NO: 6485; WAN024BV3_at; Start 207; Stop 231
taacttgcagttggcgcattggcaa

SEQ ID NO: 95514 - DNA, 25 bp, Artificial
  probe
  misc_feature (1)..(25): SEQ ID NO: 6485; WAN024BV3_at; Start 33; Stop 57
tggaccccatagagtagcctttgag

SEQ ID NO: 95515 - DNA, 25 bp, Artificial
  probe
  misc_feature (1)..(25): SEQ ID NO: 6485; WAN024BV3_at; Start 28; Stop 52
cgtagtggaccccatagagtagcct

SEQ ID NO: 95516 - DNA, 25 bp, Artificial
  probe
  misc_feature (1)..(25): SEQ ID NO: 6485; WAN024BV3_at; Start 116; Stop 140
tagacaaagacctgagatatcctca

SEQ ID NO: 95517 - DNA, 25 bp, Artificial
  probe
  misc_feature (1)..(25): SEQ ID NO: 6485; WAN024BV3_at; Start 37; Stop 61
ccccatagagtagcctttgagaaga

SEQ ID NO: 95518 - DNA, 25 bp, Artificial
  probe
  misc_feature (1)..(25): SEQ ID NO: 6485; WAN024BV3_at; Start 225; Stop 249
ttggcaatgcaatagacagaagtct

SEQ ID NO: 95519 - DNA, 25 bp, Artificial
  probe
  misc_feature (1)..(25): SEQ ID NO: 6485; WAN024BV3_at; Start 66; Stop 90
gaagattatcttaaagacaagaaac

SEQ ID NO: 95520 - DNA, 25 bp, Artificial
  probe
  misc_feature (1)..(25): SEQ ID NO: 6485; WAN024BV3_at; Start 267; Stop 291
tgagaagacaaacggaacaaaggtc

SEQ ID NO: 95521 - DNA, 25 bp, Artificial
  probe
  misc_feature (1)..(25): SEQ ID NO: 6485; WAN024BV3_at; Start 252; Stop 276
caagctatatgctgatgagaagaca

SEQ ID NO: 95522 - DNA, 25 bp, Artificial
  probe
  misc_feature (1)..(25): SEQ ID NO: 6485; WAN024BV3_at; Start 212; Stop 236
tgcagttggcgcattggcaatgcaa

SEQ ID NO: 95523 - DNA, 25 bp, Artificial
  probe
  misc_feature (1)..(25): SEQ ID NO: 6485; WAN024BV3_at; Start 49; Stop 73
gcctttgagaagaataagaagatta

SEQ ID NO: 95524 - DNA, 25 bp, Artificial
  probe
  misc_feature (1)..(25): SEQ ID NO: 6485; WAN024BV3_at; Start 21; Stop 45
agcggaccgtagtggaccccataga

SEQ ID NO: 95525 - DNA, 25 bp, Artificial
  probe
  misc_feature (1)..(25): SEQ ID NO: 6439; WAN024BV4_at; Start 119; Stop 143
gagtgagcgacatagtacctcttca

SEQ ID NO: 95526 - DNA, 25 bp, Artificial
  probe
  misc_feature (1)..(25): SEQ ID NO: 6439; WAN024BV4_at; Start 316; Stop 340
ggtgttcgtatcacacacattggaa

SEQ ID NO: 95527 - DNA, 25 bp, Artificial
  probe
  misc_feature (1)..(25): SEQ ID NO: 6439; WAN024BV4_at; Start 261; Stop 285
tcagttagcagagtacgattatctc

SEQ ID NO: 95528 - DNA, 25 bp, Artificial
  probe
  misc_feature (1)..(25): SEQ ID NO: 6439; WAN024BV4_at; Start 457; Stop 481
gtagctatcctacaaaagatattca

SEQ ID NO: 95529 - DNA, 25 bp, Artificial
  probe
  misc_feature (1)..(25): SEQ ID NO: 6439; WAN024BV4_at; Start 151; Stop 175
caagtaattgctgataggattgaac

SEQ ID NO: 95530 - DNA, 25 bp, Artificial
  probe
  misc_feature (1)..(25): SEQ ID NO: 6439; WAN024BV4_at; Start 496; Stop 520
gacatcacactaggatatatcggtt

SEQ ID NO: 95531 - DNA, 25 bp, Artificial
  probe
  misc_feature (1)..(25): SEQ ID NO: 6439; WAN024BV4_at; Start 252; Stop 276
taaagataatcagttagcagagtac

SEQ ID NO: 95532 - DNA, 25 bp, Artificial
  probe
  misc_feature (1)..(25): SEQ ID NO: 6439; WAN024BV4_at; Start 343; Stop 367
gtagcagtctatcaaatacttcaag

SEQ ID NO: 95533 - DNA, 25 bp, Artificial
  probe
  misc_feature (1)..(25): SEQ ID NO: 6439; WAN024BV4_at; Start 526; Stop 550
caagacgaacttgaccagagtatac

SEQ ID NO: 95534 - DNA, 25 bp, Artificial
  probe
  misc_feature (1)..(25): SEQ ID NO: 6439; WAN024BV4_at; Start 13; Stop 37
gaaccaattcgtgatttagacgata

SEQ ID NO: 95535 - DNA, 25 bp, Artificial
  probe
  misc_feature (1)..(25): SEQ ID NO: 6439; WAN024BV4_at; Start 428; Stop 452
gatatcatcattacaaaaagaatag

SEQ ID NO: 95536 - DNA, 25 bp, Artificial
  probe
  misc_feature (1)..(25): SEQ ID NO: 6439; WAN024BV4_at; Start 445; Stop 469
aagaatagtaatgtagctatcctac

SEQ ID NO: 95537 - DNA, 25 bp, Artificial
  probe
  misc_feature (1)..(25): SEQ ID NO: 6439; WAN024BV4_at; Start 2; Stop 26
tgaagaaagtagaaccaattcgtga

SEQ ID NO: 95538 - DNA, 25 bp, Artificial
  probe
  misc_feature (1)..(25): SEQ ID NO: 6439; WAN024BV4_at; Start 271; Stop 295
gagtacgattatctctttccaagta

SEQ ID NO: 95539 - DNA, 25 bp, Artificial
  probe
  misc_feature (1)..(25): SEQ ID NO: 6439; WAN024BV4_at; Start 414; Stop 438
gaggaagacatttggatatcatcat

SEQ ID NO: 95540 - DNA, 25 bp, Artificial
  probe
  misc_feature (1)..(25): SEQ ID NO: 6439; WAN024BV4_at; Start 106; Stop 130
tactctggtttaagagtgagcgaca

SEQ ID NO: 95541 - DNA, 25 bp, Artificial
  probe
  misc_feature (1)..(25): SEQ ID NO: 6439; WAN024BV4_at; Start 472; Stop 496
aagatattcaatcattccacaccag

SEQ ID NO: 95542 - DNA, 25 bp, Artificial
  probe
  misc_feature (1)..(25): SEQ ID NO: 6439; WAN024BV4_at; Start 540; Stop 564
ccagagtatactatcatttgattac

SEQ ID NO: 95543 - DNA, 25 bp, Artificial
  probe
  misc_feature (1)..(25): SEQ ID NO: 6439; WAN024BV4_at; Start 138; Stop 162
tcttcaagtcaagcaagtaattgct

SEQ ID NO: 95544 - DNA, 25 bp, Artificial
  probe
  misc_feature (1)..(25): SEQ ID NO: 6439; WAN024BV4_at; Start 371; Stop 395
cagctaaatatgtaggtttgaatca

SEQ ID NO: 95545 - DNA, 25 bp, Artificial
  probe
  misc_feature (1)..(25): SEQ ID NO: 6439; WAN024BV4_at; Start 383; Stop 407
taggtttgaatcatataggaactca

SEQ ID NO: 95546 - DNA, 25 bp, Artificial
  probe
  misc_feature (1)..(25): SEQ ID NO: 6439; WAN024BV4_at; Start 359; Stop 383
tacttcaagatgcagctaaatatgt

SEQ ID NO: 95547 - DNA, 25 bp, Artificial
  probe
  misc_feature (1)..(25): SEQ ID NO: 6439; WAN024BV4_at; Start 89; Stop 113
tattcatgtttggaatctactctgg

SEQ ID NO: 95548 - DNA, 25 bp, Artificial
  probe
  misc_feature (1)..(25): SEQ ID NO: 6439; WAN024BV4_at; Start 198; Stop 222
gataaggtattttccaatcagcccc

SEQ ID NO: 95549 - DNA, 25 bp, Artificial
  probe
  misc_feature (1)..(25): SEQ ID NO: 6439; WAN024BV4_at; Start 221; Stop 245
cccctctcagaaaagaaatcaatcg

SEQ ID NO: 95550 - DNA, 25 bp, Artificial
  probe
  misc_feature (1)..(25): SEQ ID NO: 6439; WAN024BV4_at; Start 398; Stop 422
taggaactcattcgatgaggaagac

SEQ ID NO: 95551 - DNA, 25 bp, Artificial
  probe
  misc_feature (1)..(25): SEQ ID NO: 6439; WAN024BV4_at; Start 511; Stop 535
tatatcggttatagtcaagacgaac

SEQ ID NO: 95552 - DNA, 25 bp, Artificial
  probe
  misc_feature (1)..(25): SEQ ID NO: 6439; WAN024BV4_at; Start 184; Stop 208
aagaagactggtaagataaggtatt

SEQ ID NO: 95553 - DNA, 25 bp, Artificial
  probe
  misc_feature (1)..(25): SEQ ID NO: 6439; WAN024BV4_at; Start 163; Stop 187
gataggattgaactaaaagagaaga

SEQ ID NO: 95554 - DNA, 25 bp, Artificial
  probe
  misc_feature (1)..(25): SEQ ID NO: 6439; WAN024BV4_at; Start 308; Stop 332
gaacagatggtgttcgtatcacaca

SEQ ID NO: 95555 - DNA, 25 bp, Artificial
  probe
  misc_feature (1)..(25): SEQ ID NO: 6439; WAN024BV4_at; Start 131; Stop 155
tagtacctcttcaagtcaagcaagt

SEQ ID NO: 95556 - DNA, 25 bp, Artificial
  probe
  misc_feature (1)..(25): SEQ ID NO: 6439; WAN024BV4_at; Start 329; Stop 353
cacacattggaagagtagcagtcta

SEQ ID NO: 95557 - DNA, 25 bp, Artificial
  probe
  misc_feature (1)..(25): SEQ ID NO: 6439; WAN024BV4_at; Start 29; Stop 53
tagacgatatagaacgaatcaaaga

SEQ ID NO: 95558 - DNA, 25 bp, Artificial
  probe
  misc_feature (1)..(25): SEQ ID NO: 6439; WAN024BV4_at; Start 485; Stop 509
attccacaccagacatcacactagg

SEQ ID NO: 95559 - DNA, 25 bp, Artificial
  probe
  misc_feature (1)..(25): SEQ ID NO: 7266; WAN024BV5_at; Start 28; Stop 52
atctgggaaaatcttgggagaattg

SEQ ID NO: 95560 - DNA, 25 bp, Artificial
  probe
  misc_feature (1)..(25): SEQ ID NO: 7266; WAN024BV5_at; Start 80; Stop 104
tatccaatgattgggcaacgtacag

SEQ ID NO: 95561 - DNA, 25 bp, Artificial
  probe
  misc_feature (1)..(25): SEQ ID NO: 7266; WAN024BV5_at; Start 93; Stop 117
ggcaacgtacagtcatgaggactcc

SEQ ID NO: 95562 - DNA, 25 bp, Artificial
  probe
  misc_feature (1)..(25): SEQ ID NO: 7266; WAN024BV5_at; Start 39; Stop 63
tcttgggagaattggagcggaaaaa

SEQ ID NO: 95563 - DNA, 25 bp, Artificial
  probe
  misc_feature (1)..(25): SEQ ID NO: 7266; WAN024BV5_at; Start 76; Stop 100
gtattatccaatgattgggcaacgt

SEQ ID NO: 95564 - DNA, 25 bp, Artificial
  probe
  misc_feature (1)..(25): SEQ ID NO: 7266; WAN024BV5_at; Start 72; Stop 96
aatagtattatccaatgattgggca

SEQ ID NO: 95565 - DNA, 25 bp, Artificial
  probe
  misc_feature (1)..(25): SEQ ID NO: 7266; WAN024BV5_at; Start 51; Stop 75
tggagcggaaaaaggtgctaaaata

SEQ ID NO: 95566 - DNA, 25 bp, Artificial
  probe
  misc_feature (1)..(25): SEQ ID NO: 7266; WAN024BV5_at; Start 89; Stop 113
attgggcaacgtacagtcatgagga

SEQ ID NO: 95567 - DNA, 25 bp, Artificial
  probe
  misc_feature (1)..(25): SEQ ID NO: 7266; WAN024BV5_at; Start 1; Stop 25
gtgatttctgggaaaatcttgggaa

SEQ ID NO: 95568 - DNA, 25 bp, Artificial
  probe
  misc_feature (1)..(25): SEQ ID NO: 7266; WAN024BV5_at; Start 86; Stop 110
atgattgggcaacgtacagtcatga

SEQ ID NO: 95569 - DNA, 25 bp, Artificial
  probe
  misc_feature (1)..(25): SEQ ID NO: 7266; WAN024BV5_at; Start 88; Stop 112
gattgggcaacgtacagtcatgagg

SEQ ID NO: 95570 - DNA, 25 bp, Artificial
  probe
  misc_feature (1)..(25): SEQ ID NO: 7266; WAN024BV5_at; Start 78; Stop 102
attatccaatgattgggcaacgtac

SEQ ID NO: 95571 - DNA, 25 bp, Artificial
  probe
  misc_feature (1)..(25): SEQ ID NO: 7266; WAN024BV5_at; Start 62; Stop 86
aaggtgctaaaatagtattatccaa

SEQ ID NO: 95572 - DNA, 25 bp, Artificial
  probe
  misc_feature (1)..(25): SEQ ID NO: 7266; WAN024BV5_at; Start 27; Stop 51
aatctgggaaaatcttgggagaatt

SEQ ID NO: 95573 - DNA, 25 bp, Artificial
  probe
  misc_feature (1)..(25): SEQ ID NO: 7266; WAN024BV5_at; Start 61; Stop 85
aaaggtgctaaaatagtattatcca

SEQ ID NO: 95574 - DNA, 25 bp, Artificial
  probe
  misc_feature (1)..(25): SEQ ID NO: 7266; WAN024BV5_at; Start 2; Stop 26
tgatttctgggaaaatcttgggaaa

SEQ ID NO: 95575 - DNA, 25 bp, Artificial
  probe
  misc_feature (1)..(25): SEQ ID NO: 7266; WAN024BV5_at; Start 75; Stop 99
agtattatccaatgattgggcaacg

SEQ ID NO: 95576 - DNA, 25 bp, Artificial
  probe
  misc_feature (1)..(25): SEQ ID NO: 7266; WAN024BV5_at; Start 85; Stop 109
aatgattgggcaacgtacagtcatg

SEQ ID NO: 95577 - DNA, 25 bp, Artificial
  probe
  misc_feature (1)..(25): SEQ ID NO: 7266; WAN024BV5_at; Start 47; Stop 71
gaattggagcggaaaaaggtgctaa

SEQ ID NO: 95578 - DNA, 25 bp, Artificial
  probe
  misc_feature (1)..(25): SEQ ID NO: 7266; WAN024BV5_at; Start 92; Stop 116
gggcaacgtacagtcatgaggactc

SEQ ID NO: 95579 - DNA, 25 bp, Artificial
  probe
  misc_feature (1)..(25): SEQ ID NO: 7266; WAN024BV5_at; Start 36; Stop 60
aaatcttgggagaattggagcggaa

SEQ ID NO: 95580 - DNA, 25 bp, Artificial
  probe
  misc_feature (1)..(25): SEQ ID NO: 7266; WAN024BV5_at; Start 37; Stop 61
aatcttgggagaattggagcggaaa

SEQ ID NO: 95581 - DNA, 25 bp, Artificial
  probe
  misc_feature (1)..(25): SEQ ID NO: 7266; WAN024BV5_at; Start 35; Stop 59
aaaatcttgggagaattggagcgga

SEQ ID NO: 95582 - DNA, 25 bp, Artificial
  probe
  misc_feature (1)..(25): SEQ ID NO: 7266; WAN024BV5_at; Start 84; Stop 108
caatgattgggcaacgtacagtcat

SEQ ID NO: 95583 - DNA, 25 bp, Artificial
  probe
  misc_feature (1)..(25): SEQ ID NO: 7266; WAN024BV5_at; Start 74; Stop 98
tagtattatccaatgattgggcaac

SEQ ID NO: 95584 - DNA, 25 bp, Artificial
  probe
  misc_feature (1)..(25): SEQ ID NO: 7266; WAN024BV5_at; Start 90; Stop 114
ttgggcaacgtacagtcatgaggac

SEQ ID NO: 95585 - DNA, 25 bp, Artificial
  probe
  misc_feature (1)..(25): SEQ ID NO: 7266; WAN024BV5_at; Start 46; Stop 70
agaattggagcggaaaaaggtgcta

SEQ ID NO: 95586 - DNA, 25 bp, Artificial
  probe
  misc_feature (1)..(25): SEQ ID NO: 7266; WAN024BV5_at; Start 77; Stop 101
tattatccaatgattgggcaacgta

SEQ ID NO: 95587 - DNA, 25 bp, Artificial
  probe
  misc_feature (1)..(25): SEQ ID NO: 7266; WAN024BV5_at; Start 87; Stop 111
tgattgggcaacgtacagtcatgag

SEQ ID NO: 95588 - DNA, 25 bp, Artificial
  probe
  misc_feature (1)..(25): SEQ ID NO: 7266; WAN024BV5_at; Start 26; Stop 50
aaatctgggaaaatcttgggagaat

SEQ ID NO: 95589 - DNA, 25 bp, Artificial
  probe
  misc_feature (1)..(25): SEQ ID NO: 7266; WAN024BV5_at; Start 64; Stop 88
ggtgctaaaatagtattatccaatg

SEQ ID NO: 95590 - DNA, 25 bp, Artificial
  probe
  misc_feature (1)..(25): SEQ ID NO: 7266; WAN024BV5_at; Start 38; Stop 62
atcttgggagaattggagcggaaaa

SEQ ID NO: 95591 - DNA, 25 bp, Artificial
  probe
  misc_feature (1)..(25): SEQ ID NO: 7266; WAN024BV5_at; Start 71; Stop 95
aaatagtattatccaatgattgggc

SEQ ID NO: 95592 - DNA, 25 bp, Artificial
  probe
  misc_feature (1)..(25): SEQ ID NO: 7266; WAN024BV5_at; Start 91; Stop 115
tgggcaacgtacagtcatgaggact

SEQ ID NO: 95593 - DNA, 25 bp, Artificial
  probe
  misc_feature (1)..(25): SEQ ID NO: 7270; WAN024BV6_at; Start 400; Stop 424
caagcgagcaaccttttagtttata

SEQ ID NO: 95594 - DNA, 25 bp, Artificial
  probe
  misc_feature (1)..(25): SEQ ID NO: 7270; WAN024BV6_at; Start 89; Stop 113
ggatagctggagaagaatacgcccc

SEQ ID NO: 95595 - DNA, 25 bp, Artificial
  probe
  misc_feature (1)..(25): SEQ ID NO: 7270; WAN024BV6_at; Start 229; Stop 253
gctaaagcaatcaacaatctttctg

SEQ ID NO: 95596 - DNA, 25 bp, Artificial
  probe
  misc_feature (1)..(25): SEQ ID NO: 7270; WAN024BV6_at; Start 282; Stop 306
acgatattgcaggaagaaaaggagg

SEQ ID NO: 95597 - DNA, 25 bp, Artificial
  probe
  misc_feature (1)..(25): SEQ ID NO: 7270; WAN024BV6_at; Start 246; Stop 270
tctttctgatatgggatacacacgt

SEQ ID NO: 95598 - DNA, 25 bp, Artificial
  probe
  misc_feature (1)..(25): SEQ ID NO: 7270; WAN024BV6_at; Start 240; Stop 264
caacaatctttctgatatgggatac

SEQ ID NO: 95599 - DNA, 25 bp, Artificial
  probe
  misc_feature (1)..(25): SEQ ID NO: 7270; WAN024BV6_at; Start 305; Stop 329
gggaagactacagcatttattcaga

SEQ ID NO: 95600 - DNA, 25 bp, Artificial
  probe
  misc_feature (1)..(25): SEQ ID NO: 7270; WAN024BV6_at; Start 44; Stop 68
gaaaggaagctatcaaagtactaaa

SEQ ID NO: 95601 - DNA, 25 bp, Artificial
  probe
  misc_feature (1)..(25): SEQ ID NO: 7270; WAN024BV6_at; Start 352; Stop 376
tattatcggatattgaacaaagctc

SEQ ID NO: 95602 - DNA, 25 bp, Artificial
  probe
  misc_feature (1)..(25): SEQ ID NO: 7270; WAN024BV6_at; Start 339; Stop 363
ctcatctagtgagtattatcggata

SEQ ID NO: 95603 - DNA, 25 bp, Artificial
  probe
  misc_feature (1)..(25): SEQ ID NO: 7270; WAN024BV6_at; Start 78; Stop 102
tcgtctgagacggatagctggagaa

SEQ ID NO: 95604 - DNA, 25 bp, Artificial
  probe
  misc_feature (1)..(25): SEQ ID NO: 7270; WAN024BV6_at; Start 36; Stop 60
gaaaaccagaaaggaagctatcaaa

SEQ ID NO: 95605 - DNA, 25 bp, Artificial
  probe
  misc_feature (1)..(25): SEQ ID NO: 7270; WAN024BV6_at; Start 297; Stop 321
gaaaaggagggaagactacagcatt

SEQ ID NO: 95606 - DNA, 25 bp, Artificial
  probe
  misc_feature (1)..(25): SEQ ID NO: 7270; WAN024BV6_at; Start 369; Stop 393
caaagctctactagagttcgcggag

SEQ ID NO: 95607 - DNA, 25 bp, Artificial
  probe
  misc_feature (1)..(25): SEQ ID NO: 7270; WAN024BV6_at; Start 183; Stop 207
catggtcgtgcgtagagtgtcagct

SEQ ID NO: 95608 - DNA, 25 bp, Artificial
  probe
  misc_feature (1)..(25): SEQ ID NO: 7270; WAN024BV6_at; Start 67; Stop 91
aaaaaatacagtcgtctgagacgga

SEQ ID NO: 95609 - DNA, 25 bp, Artificial
  probe
  misc_feature (1)..(25): SEQ ID NO: 7270; WAN024BV6_at; Start 328; Stop 352
gaactaggctactcatctagtgagt

SEQ ID NO: 95610 - DNA, 25 bp, Artificial
  probe
  misc_feature (1)..(25): SEQ ID NO: 7270; WAN024BV6_at; Start 318; Stop 342
catttattcagaactaggctactca

SEQ ID NO: 95611 - DNA, 25 bp, Artificial
  probe
  misc_feature (1)..(25): SEQ ID NO: 7270; WAN024BV6_at; Start 360; Stop 384
gatattgaacaaagctctactagag

SEQ ID NO: 95612 - DNA, 25 bp, Artificial
  probe
  misc_feature (1)..(25): SEQ ID NO: 7270; WAN024BV6_at; Start 148; Stop 172
tcatcaagtggtcagacaagtaagc

SEQ ID NO: 95613 - DNA, 25 bp, Artificial
  probe
  misc_feature (1)..(25): SEQ ID NO: 7270; WAN024BV6_at; Start 123; Stop 147
aatatcctactcacttgaaccaagg

SEQ ID NO: 95614 - DNA, 25 bp, Artificial
  probe
  misc_feature (1)..(25): SEQ ID NO: 7270; WAN024BV6_at; Start 220; Stop 244
gaactaatcgctaaagcaatcaaca

SEQ ID NO: 95615 - DNA, 25 bp, Artificial
  probe
  misc_feature (1)..(25): SEQ ID NO: 7270; WAN024BV6_at; Start 260; Stop 284
gatacacacgtatcctaatcgaacg

SEQ ID NO: 95616 - DNA, 25 bp, Artificial
  probe
  misc_feature (1)..(25): SEQ ID NO: 7270; WAN024BV6_at; Start 380; Stop 404
tagagttcgcggagtcttatcaagc

SEQ ID NO: 95617 - DNA, 25 bp, Artificial
  probe
  misc_feature (1)..(25): SEQ ID NO: 7270; WAN024BV6_at; Start 8; Stop 32
tagagttattagatatcatcgacga

SEQ ID NO: 95618 - DNA, 25 bp, Artificial
  probe
  misc_feature (1)..(25): SEQ ID NO: 7270; WAN024BV6_at; Start 168; Stop 192
taagcaagtagaaagcatggtcgtg

SEQ ID NO: 95619 - DNA, 25 bp, Artificial
  probe
  misc_feature (1)..(25): SEQ ID NO: 7270; WAN024BV6_at; Start 139; Stop 163
gaaccaaggtcatcaagtggtcaga

SEQ ID NO: 95620 - DNA, 25 bp, Artificial
  probe
  misc_feature (1)..(25): SEQ ID NO: 7270; WAN024BV6_at; Start 275; Stop 299
taatcgaacgatattgcaggaagaa

SEQ ID NO: 95621 - DNA, 25 bp, Artificial
  probe
  misc_feature (1)..(25): SEQ ID NO: 7270; WAN024BV6_at; Start 205; Stop 229
gctcagcaggatttagaactaatcg

SEQ ID NO: 95622 - DNA, 25 bp, Artificial
  probe
  misc_feature (1)..(25): SEQ ID NO: 7270; WAN024BV6_at; Start 21; Stop 45
tatcatcgacgaaaagaaaaccaga

SEQ ID NO: 95623 - DNA, 25 bp, Artificial
  probe
  misc_feature (1)..(25): SEQ ID NO: 7270; WAN024BV6_at; Start 197; Stop 221
gagtgtcagctcagcaggatttaga

SEQ ID NO: 95624 - DNA, 25 bp, Artificial
  probe
  misc_feature (1)..(25): SEQ ID NO: 7270; WAN024BV6_at; Start 155; Stop 179
gtggtcagacaagtaagcaagtaga

SEQ ID NO: 95625 - DNA, 25 bp, Artificial
  probe
  misc_feature (1)..(25): SEQ ID NO: 7270; WAN024BV6_at; Start 172; Stop 196
caagtagaaagcatggtcgtgcgta

SEQ ID NO: 95626 - DNA, 25 bp, Artificial
  probe
  misc_feature (1)..(25): SEQ ID NO: 7270; WAN024BV6_at; Start 388; Stop 412
gcggagtcttatcaagcgagcaacc

SEQ ID NO: 95627 - DNA, 25 bp, Artificial
  probe
  misc_feature (1)..(25): SEQ ID NO: 6646; WAN024BV7_at; Start 187; Stop 211
acttactttgcttttcctgctgata

SEQ ID NO: 95628 - DNA, 25 bp, Artificial
  probe
  misc_feature (1)..(25): SEQ ID NO: 6646; WAN024BV7_at; Start 196; Stop 220
gcttttcctgctgatattattctcg

SEQ ID NO: 95629 - DNA, 25 bp, Artificial
  probe
  misc_feature (1)..(25): SEQ ID NO: 6646; WAN024BV7_at; Start 62; Stop 86
aacgtaaggaaaggaagctgtcaca

SEQ ID NO: 95630 - DNA, 25 bp, Artificial
  probe
  misc_feature (1)..(25): SEQ ID NO: 6646; WAN024BV7_at; Start 28; Stop 52
caagcaagtaggtttgctttcttgc

SEQ ID NO: 95631 - DNA, 25 bp, Artificial
  probe
  misc_feature (1)..(25): SEQ ID NO: 6646; WAN024BV7_at; Start 33; Stop 57
aagtaggtttgctttcttgctaaag

SEQ ID NO: 95632 - DNA, 25 bp, Artificial
  probe
  misc_feature (1)..(25): SEQ ID NO: 6646; WAN024BV7_at; Start 110; Stop 134
gctatagtcgctacctaattgctca

SEQ ID NO: 95633 - DNA, 25 bp, Artificial
  probe
  misc_feature (1)..(25): SEQ ID NO: 6646; WAN024BV7_at; Start 21; Stop 45
tccaagacaagcaagtaggtttgct

SEQ ID NO: 95634 - DNA, 25 bp, Artificial
  probe
  misc_feature (1)..(25): SEQ ID NO: 6646; WAN024BV7_at; Start 140; Stop 164
agaaggaggaaagtgtaccggatat

SEQ ID NO: 95635 - DNA, 25 bp, Artificial
  probe
  misc_feature (1)..(25): SEQ ID NO: 6646; WAN024BV7_at; Start 148; Stop 172
gaaagtgtaccggatatttataatg

SEQ ID NO: 95636 - DNA, 25 bp, Artificial
  probe
  misc_feature (1)..(25): SEQ ID NO: 6646; WAN024BV7_at; Start 47; Stop 71
tcttgctaaagcaaaaacgtaagga

SEQ ID NO: 95637 - DNA, 25 bp, Artificial
  probe
  misc_feature (1)..(25): SEQ ID NO: 6646; WAN024BV7_at; Start 173; Stop 197
tagaagatatctgtacttactttgc

SEQ ID NO: 95638 - DNA, 25 bp, Artificial
  probe
  misc_feature (1)..(25): SEQ ID NO: 6646; WAN024BV7_at; Start 82; Stop 106
tcacaagaaaagttagcagctaaac

SEQ ID NO: 95639 - DNA, 25 bp, Artificial
  probe
  misc_feature (1)..(25): SEQ ID NO: 6646; WAN024BV7_at; Start 12; Stop 36
taaattaaatccaagacaagcaagt

SEQ ID NO: 95640 - DNA, 25 bp, Artificial
  probe
  misc_feature (1)..(25): SEQ ID NO: 6646; WAN024BV7_at; Start 17; Stop 41
taaatccaagacaagcaagtaggtt

SEQ ID NO: 95641 - DNA, 25 bp, Artificial
  probe
  misc_feature (1)..(25): SEQ ID NO: 6646; WAN024BV7_at; Start 114; Stop 138
tagtcgctacctaattgctcaatgg

SEQ ID NO: 95642 - DNA, 25 bp, Artificial
  probe
  misc_feature (1)..(25): SEQ ID NO: 6646; WAN024BV7_at; Start 103; Stop 127
aaactaggctatagtcgctacctaa

SEQ ID NO: 95643 - DNA, 25 bp, Artificial
  probe
  misc_feature (1)..(25): SEQ ID NO: 6646; WAN024BV7_at; Start 127; Stop 151
attgctcaatgggagaaggaggaaa

SEQ ID NO: 95644 - DNA, 25 bp, Artificial
  probe
  misc_feature (1)..(25): SEQ ID NO: 6646; WAN024BV7_at; Start 66; Stop 90
taaggaaaggaagctgtcacaagaa

SEQ ID NO: 95645 - DNA, 25 bp, Artificial
  probe
  misc_feature (1)..(25): SEQ ID NO: 6646; WAN024BV7_at; Start 100; Stop 124
gctaaactaggctatagtcgctacc

SEQ ID NO: 95646 - DNA, 25 bp, Artificial
  probe
  misc_feature (1)..(25): SEQ ID NO: 6646; WAN024BV7_at; Start 64; Stop 88
cgtaaggaaaggaagctgtcacaag

SEQ ID NO: 95647 - DNA, 25 bp, Artificial
  probe
  misc_feature (1)..(25): SEQ ID NO: 6646; WAN024BV7_at; Start 97; Stop 121
gcagctaaactaggctatagtcgct

SEQ ID NO: 95648 - DNA, 25 bp, Artificial
  probe
  misc_feature (1)..(25): SEQ ID NO: 6646; WAN024BV7_at; Start 3; Stop 27
gatgaatgataaattaaatccaaga

SEQ ID NO: 95649 - DNA, 25 bp, Artificial
  probe
  misc_feature (1)..(25): SEQ ID NO: 6646; WAN024BV7_at; Start 95; Stop 119
tagcagctaaactaggctatagtcg

SEQ ID NO: 95650 - DNA, 25 bp, Artificial
  probe
  misc_feature (1)..(25): SEQ ID NO: 6646; WAN024BV7_at; Start 79; Stop 103
ctgtcacaagaaaagttagcagcta

SEQ ID NO: 95651 - DNA, 25 bp, Artificial
  probe
  misc_feature (1)..(25): SEQ ID NO: 6646; WAN024BV7_at; Start 184; Stop 208
tgtacttactttgcttttcctgctg

SEQ ID NO: 95652 - DNA, 25 bp, Artificial
  probe
  misc_feature (1)..(25): SEQ ID NO: 6646; WAN024BV7_at; Start 145; Stop 169
gaggaaagtgtaccggatatttata

SEQ ID NO: 95653 - DNA, 25 bp, Artificial
  probe
  misc_feature (1)..(25): SEQ ID NO: 6646; WAN024BV7_at; Start 125; Stop 149
taattgctcaatgggagaaggagga

SEQ ID NO: 95654 - DNA, 25 bp, Artificial
  probe
  misc_feature (1)..(25): SEQ ID NO: 6646; WAN024BV7_at; Start 88; Stop 112
gaaaagttagcagctaaactaggct

SEQ ID NO: 95655 - DNA, 25 bp, Artificial
  probe
  misc_feature (1)..(25): SEQ ID NO: 6646; WAN024BV7_at; Start 121; Stop 145
tacctaattgctcaatgggagaagg

SEQ ID NO: 95656 - DNA, 25 bp, Artificial
  probe
  misc_feature (1)..(25): SEQ ID NO: 6646; WAN024BV7_at; Start 155; Stop 179
taccggatatttataatgtagaaga

SEQ ID NO: 95657 - DNA, 25 bp, Artificial
  probe
  misc_feature (1)..(25): SEQ ID NO: 6646; WAN024BV7_at; Start 202; Stop 226
cctgctgatattattctcgggagta

SEQ ID NO: 95658 - DNA, 25 bp, Artificial
  probe
  misc_feature (1)..(25): SEQ ID NO: 6646; WAN024BV7_at; Start 164; Stop 188
tttataatgtagaagatatctgtac

SEQ ID NO: 95659 - DNA, 25 bp, Artificial
  probe
  misc_feature (1)..(25): SEQ ID NO: 6646; WAN024BV7_at; Start 206; Stop 230
ctgatattattctcgggagtagggc

SEQ ID NO: 95660 - DNA, 25 bp, Artificial
  probe
  misc_feature (1)..(25): SEQ ID NO: 6646; WAN024BV7_at; Start 117; Stop 141
tcgctacctaattgctcaatgggag

SEQ ID NO: 95661 - DNA, 25 bp, Artificial
  probe
  misc_feature (1)..(25): SEQ ID NO: 6423; WAN024BV8_at; Start 344; Stop 368
catgtgcatttttgatatggttagc

SEQ ID NO: 95662 - DNA, 25 bp, Artificial
  probe
  misc_feature (1)..(25): SEQ ID NO: 6423; WAN024BV8_at; Start 247; Stop 271
gcactactatctttcatctggcctg

SEQ ID NO: 95663 - DNA, 25 bp, Artificial
  probe
  misc_feature (1)..(25): SEQ ID NO: 6423; WAN024BV8_at; Start 8; Stop 32
caatagagaaagtcaaacaatggtt

SEQ ID NO: 95664 - DNA, 25 bp, Artificial
  probe
  misc_feature (1)..(25): SEQ ID NO: 6423; WAN024BV8_at; Start 300; Stop 324
ggattattcgtatgcggtaaagagc

SEQ ID NO: 95665 - DNA, 25 bp, Artificial
  probe
  misc_feature (1)..(25): SEQ ID NO: 6423; WAN024BV8_at; Start 260; Stop 284
tcatctggcctgtgttatctagcaa

SEQ ID NO: 95666 - DNA, 25 bp, Artificial
  probe
  misc_feature (1)..(25): SEQ ID NO: 6423; WAN024BV8_at; Start 21; Stop 45
caaacaatggtttattgaccgtgat

SEQ ID NO: 95667 - DNA, 25 bp, Artificial
  probe
  misc_feature (1)..(25): SEQ ID NO: 6423; WAN024BV8_at; Start 201; Stop 225
tgttccagttggtaaaattacagtc

SEQ ID NO: 95668 - DNA, 25 bp, Artificial
  probe
  misc_feature (1)..(25): SEQ ID NO: 6423; WAN024BV8_at; Start 175; Stop 199
ggatggaatgagattatcacaacaa

SEQ ID NO: 95669 - DNA, 25 bp, Artificial
  probe
  misc_feature (1)..(25): SEQ ID NO: 6423; WAN024BV8_at; Start 292; Stop 316
tctgaagaggattattcgtatgcgg

SEQ ID NO: 95670 - DNA, 25 bp, Artificial
  probe
  misc_feature (1)..(25): SEQ ID NO: 6423; WAN024BV8_at; Start 224; Stop 248
tctggcaagcattagggatggatgc

SEQ ID NO: 95671 - DNA, 25 bp, Artificial
  probe
  misc_feature (1)..(25): SEQ ID NO: 6423; WAN024BV8_at; Start 209; Stop 233
ttggtaaaattacagtctggcaagc

SEQ ID NO: 95672 - DNA, 25 bp, Artificial
  probe
  misc_feature (1)..(25): SEQ ID NO: 6423; WAN024BV8_at; Start 349; Stop 373
gcatttttgatatggttagctagtt

SEQ ID NO: 95673 - DNA, 25 bp, Artificial
  probe
  misc_feature (1)..(25): SEQ ID NO: 6423; WAN024BV8_at; Start 25; Stop 49
caatggtttattgaccgtgatttag

SEQ ID NO: 95674 - DNA, 25 bp, Artificial
  probe
  misc_feature (1)..(25): SEQ ID NO: 6423; WAN024BV8_at; Start 310; Stop 334
tatgcggtaaagagcagtatttcaa

SEQ ID NO: 95675 - DNA, 25 bp, Artificial
  probe
  misc_feature (1)..(25): SEQ ID NO: 6423; WAN024BV8_at; Start 233; Stop 257
cattagggatggatgcactactatc

SEQ ID NO: 95676 - DNA, 25 bp, Artificial
  probe
  misc_feature (1)..(25): SEQ ID NO: 6423; WAN024BV8_at; Start 134; Stop 158
cggtatttgtaatcgttgtatcgcc

SEQ ID NO: 95677 - DNA, 25 bp, Artificial
  probe
  misc_feature (1)..(25): SEQ ID NO: 6423; WAN024BV8_at; Start 99; Stop 123
ttataaaatgaaaagactaggaatc

SEQ ID NO: 95678 - DNA, 25 bp, Artificial
  probe
  misc_feature (1)..(25): SEQ ID NO: 6423; WAN024BV8_at; Start 147; Stop 171
cgttgtatcgccatttgtagttcag

SEQ ID NO: 95679 - DNA, 25 bp, Artificial
  probe
  misc_feature (1)..(25): SEQ ID NO: 6423; WAN024BV8_at; Start 265; Stop 289
tggcctgtgttatctagcaaaaaag

SEQ ID NO: 95680 - DNA, 25 bp, Artificial
  probe
  misc_feature (1)..(25): SEQ ID NO: 6423; WAN024BV8_at; Start 158; Stop 182
catttgtagttcagtatggatggaa

SEQ ID NO: 95681 - DNA, 25 bp, Artificial
  probe
  misc_feature (1)..(25): SEQ ID NO: 6423; WAN024BV8_at; Start 108; Stop 132
gaaaagactaggaatcattattggg

SEQ ID NO: 95682 - DNA, 25 bp, Artificial
  probe
  misc_feature (1)..(25): SEQ ID NO: 6423; WAN024BV8_at; Start 229; Stop 253
caagcattagggatggatgcactac

SEQ ID NO: 95683 - DNA, 25 bp, Artificial
  probe
  misc_feature (1)..(25): SEQ ID NO: 6423; WAN024BV8_at; Start 326; Stop 350
gtatttcaaaaatcattacatgtgc

SEQ ID NO: 95684 - DNA, 25 bp, Artificial
  probe
  misc_feature (1)..(25): SEQ ID NO: 6423; WAN024BV8_at; Start 192; Stop 216
cacaacaattgttccagttggtaaa

SEQ ID NO: 95685 - DNA, 25 bp, Artificial
  probe
  misc_feature (1)..(25): SEQ ID NO: 6423; WAN024BV8_at; Start 68; Stop 92
gattgatggtgctttcgtcaaagag

SEQ ID NO: 95686 - DNA, 25 bp, Artificial
  probe
  misc_feature (1)..(25): SEQ ID NO: 6423; WAN024BV8_at; Start 2; Stop 26
tgaacacaatagagaaagtcaaaca

SEQ ID NO: 95687 - DNA, 25 bp, Artificial
  probe
  misc_feature (1)..(25): SEQ ID NO: 6423; WAN024BV8_at; Start 277; Stop 301
tctagcaaaaaagaatctgaagagg

SEQ ID NO: 95688 - DNA, 25 bp, Artificial
  probe
  misc_feature (1)..(25): SEQ ID NO: 6423; WAN024BV8_at; Start 62; Stop 86
tcgttggattgatggtgctttcgtc

SEQ ID NO: 95689 - DNA, 25 bp, Artificial
  probe
  misc_feature (1)..(25): SEQ ID NO: 6423; WAN024BV8_at; Start 219; Stop 243
tacagtctggcaagcattagggatg

SEQ ID NO: 95690 - DNA, 25 bp, Artificial
  probe
  misc_feature (1)..(25): SEQ ID NO: 6423; WAN024BV8_at; Start 184; Stop 208
gagattatcacaacaattgttccag

SEQ ID NO: 95691 - DNA, 25 bp, Artificial
  probe
  misc_feature (1)..(25): SEQ ID NO: 6423; WAN024BV8_at; Start 304; Stop 328
tattcgtatgcggtaaagagcagta

SEQ ID NO: 95692 - DNA, 25 bp, Artificial
  probe
  misc_feature (1)..(25): SEQ ID NO: 6423; WAN024BV8_at; Start 83; Stop 107
cgtcaaagaggaggatttataaaat

SEQ ID NO: 95693 - DNA, 25 bp, Artificial
  probe
  misc_feature (1)..(25): SEQ ID NO: 6423; WAN024BV8_at; Start 168; Stop 192
tcagtatggatggaatgagattatc

SEQ ID NO: 95694 - DNA, 25 bp, Artificial
  probe
  misc_feature (1)..(25): SEQ ID NO: 6423; WAN024BV8_at; Start 238; Stop 262
gggatggatgcactactatctttca

SEQ ID NO: 95695 - DNA, 25 bp, Artificial
  probe
  misc_feature (1)..(25): SEQ ID NO: 6844; WAN024BV9_at; Start 166; Stop 190
gtaatatttagtatttctgcagtag

SEQ ID NO: 95696 - DNA, 25 bp, Artificial
  probe
  misc_feature (1)..(25): SEQ ID NO: 6844; WAN024BV9_at; Start 420; Stop 444
catcgtgaatgagattttaccaaaa

SEQ ID NO: 95697 - DNA, 25 bp, Artificial
  probe
  misc_feature (1)..(25): SEQ ID NO: 6844; WAN024BV9_at; Start 384; Stop 408
tgttttaaaagcaactcttgcacct

SEQ ID NO: 95698 - DNA, 25 bp, Artificial
  probe
  misc_feature (1)..(25): SEQ ID NO: 6844; WAN024BV9_at; Start 249; Stop 273
tgatatacgtacaggaaaaaccgag

SEQ ID NO: 95699 - DNA, 25 bp, Artificial
  probe
  misc_feature (1)..(25): SEQ ID NO: 6844; WAN024BV9_at; Start 11; Stop 35
ttttacaagctttagcaaaaatgct

SEQ ID NO: 95700 - DNA, 25 bp, Artificial
  probe
  misc_feature (1)..(25): SEQ ID NO: 6844; WAN024BV9_at; Start 350; Stop 374
caagcgcaagtttgataacattagt

SEQ ID NO: 95701 - DNA, 25 bp, Artificial
  probe
  misc_feature (1)..(25): SEQ ID NO: 6844; WAN024BV9_at; Start 25; Stop 49
gcaaaaatgctaaatatgactgttg

SEQ ID NO: 95702 - DNA, 25 bp, Artificial
  probe
  misc_feature (1)..(25): SEQ ID NO: 6844; WAN024BV9_at; Start 196; Stop 220
gcagttttaactctcatatatttta

SEQ ID NO: 95703 - DNA, 25 bp, Artificial
  probe
  misc_feature (1)..(25): SEQ ID NO: 6844; WAN024BV9_at; Start 292; Stop 316
cgcattgaacggaaaagaaaggact

SEQ ID NO: 95704 - DNA, 25 bp, Artificial
  probe
  misc_feature (1)..(25): SEQ ID NO: 6844; WAN024BV9_at; Start 403; Stop 427
gcacctaattatatattcatcgtga

SEQ ID NO: 95705 - DNA, 25 bp, Artificial
  probe
  misc_feature (1)..(25): SEQ ID NO: 6844; WAN024BV9_at; Start 221; Stop 245
catacgatggtggttttgtttattc

SEQ ID NO: 95706 - DNA, 25 bp, Artificial
  probe
  misc_feature (1)..(25): SEQ ID NO: 6844; WAN024BV9_at; Start 174; Stop 198
tagtatttctgcagtagttttagca

SEQ ID NO: 95707 - DNA, 25 bp, Artificial
  probe
  misc_feature (1)..(25): SEQ ID NO: 6844; WAN024BV9_at; Start 52; Stop 76
gaagtaagttctttgcttacaacat

SEQ ID NO: 95708 - DNA, 25 bp, Artificial
  probe
  misc_feature (1)..(25): SEQ ID NO: 6844; WAN024BV9_at; Start 130; Stop 154
tatgatctcttcagtctttttcaaa

SEQ ID NO: 95709 - DNA, 25 bp, Artificial
  probe
  misc_feature (1)..(25): SEQ ID NO: 6844; WAN024BV9_at; Start 82; Stop 106
gggaatgcaccacagatttatgaaa

SEQ ID NO: 95710 - DNA, 25 bp, Artificial
  probe
  misc_feature (1)..(25): SEQ ID NO: 6844; WAN024BV9_at; Start 371; Stop 395
tagttattgcaattgttttaaaagc

SEQ ID NO: 95711 - DNA, 25 bp, Artificial
  probe
  misc_feature (1)..(25): SEQ ID NO: 6844; WAN024BV9_at; Start 76; Stop 100
tttaaagggaatgcaccacagattt

SEQ ID NO: 95712 - DNA, 25 bp, Artificial
  probe
  misc_feature (1)..(25): SEQ ID NO: 6844; WAN024BV9_at; Start 33; Stop 57
gctaaatatgactgttgatgaagta

SEQ ID NO: 95713 - DNA, 25 bp, Artificial
  probe
  misc_feature (1)..(25): SEQ ID NO: 6844; WAN024BV9_at; Start 118; Stop 142
gaaaagatgttttatgatctcttca

SEQ ID NO: 95714 - DNA, 25 bp, Artificial
  probe
  misc_feature (1)..(25): SEQ ID NO: 6844; WAN024BV9_at; Start 332; Stop 356
aaattagttgcatttcatcaagcgc

SEQ ID NO: 95715 - DNA, 25 bp, Artificial
  probe
  misc_feature (1)..(25): SEQ ID NO: 6844; WAN024BV9_at; Start 88; Stop 112
gcaccacagatttatgaaatgttcg

SEQ ID NO: 95716 - DNA, 25 bp, Artificial
  probe
  misc_feature (1)..(25): SEQ ID NO: 6844; WAN024BV9_at; Start 209; Stop 233
tcatatattttacatacgatggtgg

SEQ ID NO: 95717 - DNA, 25 bp, Artificial
  probe
  misc_feature (1)..(25): SEQ ID NO: 6844; WAN024BV9_at; Start 61; Stop 85
tctttgcttacaacatttaaaggga

SEQ ID NO: 95718 - DNA, 25 bp, Artificial
  probe
  misc_feature (1)..(25): SEQ ID NO: 6844; WAN024BV9_at; Start 271; Stop 295
gaggaagaaattaaattagaacgca

SEQ ID NO: 95719 - DNA, 25 bp, Artificial
  probe
  misc_feature (1)..(25): SEQ ID NO: 6844; WAN024BV9_at; Start 238; Stop 262
gtttattcctatgatatacgtacag

SEQ ID NO: 95720 - DNA, 25 bp, Artificial
  probe
  misc_feature (1)..(25): SEQ ID NO: 6844; WAN024BV9_at; Start 102; Stop 126
tgaaatgttcgttaaagaaaagatg

SEQ ID NO: 95721 - DNA, 25 bp, Artificial
  probe
  misc_feature (1)..(25): SEQ ID NO: 6844; WAN024BV9_at; Start 69; Stop 93
tacaacatttaaagggaatgcacca

SEQ ID NO: 95722 - DNA, 25 bp, Artificial
  probe
  misc_feature (1)..(25): SEQ ID NO: 6844; WAN024BV9_at; Start 43; Stop 67
actgttgatgaagtaagttctttgc

SEQ ID NO: 95723 - DNA, 25 bp, Artificial
  probe
  misc_feature (1)..(25): SEQ ID NO: 6844; WAN024BV9_at; Start 140; Stop 164
tcagtctttttcaaatcatgtcaat

SEQ ID NO: 95724 - DNA, 25 bp, Artificial
  probe
  misc_feature (1)..(25): SEQ ID NO: 6844; WAN024BV9_at; Start 394; Stop 418
gcaactcttgcacctaattatatat

SEQ ID NO: 95725 - DNA, 25 bp, Artificial
  probe
  misc_feature (1)..(25): SEQ ID NO: 6844; WAN024BV9_at; Start 184; Stop 208
gcagtagttttagcagttttaactc

SEQ ID NO: 95726 - DNA, 25 bp, Artificial
  probe
  misc_feature (1)..(25): SEQ ID NO: 6844; WAN024BV9_at; Start 279; Stop 303
aattaaattagaacgcattgaacgg

SEQ ID NO: 95727 - DNA, 25 bp, Artificial
  probe
  misc_feature (1)..(25): SEQ ID NO: 6844; WAN024BV9_at; Start 3; Stop 27
ggatgatattttacaagctttagca

SEQ ID NO: 95728 - DNA, 25 bp, Artificial
  probe
  misc_feature (1)..(25): SEQ ID NO: 6844; WAN024BV9_at; Start 340; Stop 364
tgcatttcatcaagcgcaagtttga

SEQ ID NO: 95729 - DNA, 25 bp, Artificial
  probe
  misc_feature (1)..(25): SEQ ID NO: 6575; WAN024BVA_at; Start 203; Stop 227
tcgtagttacgaaagagcagtttga

SEQ ID NO: 95730 - DNA, 25 bp, Artificial
  probe
  misc_feature (1)..(25): SEQ ID NO: 6575; WAN024BVA_at; Start 153; Stop 177
aggacggcatgggaagttgtataca

SEQ ID NO: 95731 - DNA, 25 bp, Artificial
  probe
  misc_feature (1)..(25): SEQ ID NO: 6575; WAN024BVA_at; Start 39; Stop 63
cggattgaacatctggcatatggac

SEQ ID NO: 95732 - DNA, 25 bp, Artificial
  probe
  misc_feature (1)..(25): SEQ ID NO: 6575; WAN024BVA_at; Start 61; Stop 85
gacaggattcgagatttggaagaga

SEQ ID NO: 95733 - DNA, 25 bp, Artificial
  probe
  misc_feature (1)..(25): SEQ ID NO: 6575; WAN024BVA_at; Start 105; Stop 129
taaagctgataacgctggcgctgag

SEQ ID NO: 95734 - DNA, 25 bp, Artificial
  probe
  misc_feature (1)..(25): SEQ ID NO: 6575; WAN024BVA_at; Start 219; Stop 243
gcagtttgagaaaatcagagtaggg

SEQ ID NO: 95735 - DNA, 25 bp, Artificial
  probe
  misc_feature (1)..(25): SEQ ID NO: 6575; WAN024BVA_at; Start 2; Stop 26
tgagacgattcatagctatctggat

SEQ ID NO: 95736 - DNA, 25 bp, Artificial
  probe
  misc_feature (1)..(25): SEQ ID NO: 6575; WAN024BVA_at; Start 174; Stop 198
tacagtaactatcagagactatggg

SEQ ID NO: 95737 - DNA, 25 bp, Artificial
  probe
  misc_feature (1)..(25): SEQ ID NO: 6575; WAN024BVA_at; Start 90; Stop 114
gccgatggttgtctataaagctgat

SEQ ID NO: 95738 - DNA, 25 bp, Artificial
  probe
  misc_feature (1)..(25): SEQ ID NO: 6575; WAN024BVA_at; Start 160; Stop 184
catgggaagttgtatacagtaacta

SEQ ID NO: 95739 - DNA, 25 bp, Artificial
  probe
  misc_feature (1)..(25): SEQ ID NO: 6575; WAN024BVA_at; Start 22; Stop 46
tggattcttgtctctgccggattga

SEQ ID NO: 95740 - DNA, 25 bp, Artificial
  probe
  misc_feature (1)..(25): SEQ ID NO: 6575; WAN024BVA_at; Start 138; Stop 162
gcgtgtcgttgaaaaaggacggcat

SEQ ID NO: 95741 - DNA, 25 bp, Artificial
  probe
  misc_feature (1)..(25): SEQ ID NO: 6575; WAN024BVA_at; Start 55; Stop 79
catatggacaggattcgagatttgg

SEQ ID NO: 95742 - DNA, 25 bp, Artificial
  probe
  misc_feature (1)..(25): SEQ ID NO: 6575; WAN024BVA_at; Start 99; Stop 123
tgtctataaagctgataacgctggc

SEQ ID NO: 95743 - DNA, 25 bp, Artificial
  probe
  misc_feature (1)..(25): SEQ ID NO: 6575; WAN024BVA_at; Start 32; Stop 56
tctctgccggattgaacatctggca

SEQ ID NO: 95744 - DNA, 25 bp, Artificial
  probe
  misc_feature (1)..(25): SEQ ID NO: 6575; WAN024BVA_at; Start 18; Stop 42
tatctggattcttgtctctgccgga

SEQ ID NO: 95745 - DNA, 25 bp, Artificial
  probe
  misc_feature (1)..(25): SEQ ID NO: 6575; WAN024BVA_at; Start 86; Stop 110
aaaagccgatggttgtctataaagc

SEQ ID NO: 95746 - DNA, 25 bp, Artificial
  probe
  misc_feature (1)..(25): SEQ ID NO: 6575; WAN024BVA_at; Start 181; Stop 205
actatcagagactatgggattttcg

SEQ ID NO: 95747 - DNA, 25 bp, Artificial
  probe
  misc_feature (1)..(25): SEQ ID NO: 6575; WAN024BVA_at; Start 78; Stop 102
ggaagagaaaaagccgatggttgtc

SEQ ID NO: 95748 - DNA, 25 bp, Artificial
  probe
  misc_feature (1)..(25): SEQ ID NO: 6575; WAN024BVA_at; Start 115; Stop 139
aacgctggcgctgagatattcgggc

SEQ ID NO: 95749 - DNA, 25 bp, Artificial
  probe
  misc_feature (1)..(25): SEQ ID NO: 6575; WAN024BVA_at; Start 103; Stop 127
tataaagctgataacgctggcgctg

SEQ ID NO: 95750 - DNA, 25 bp, Artificial
  probe
  misc_feature (1)..(25): SEQ ID NO: 6575; WAN024BVA_at; Start 48; Stop 72
catctggcatatggacaggattcga

SEQ ID NO: 95751 - DNA, 25 bp, Artificial
  probe
  misc_feature (1)..(25): SEQ ID NO: 6575; WAN024BVA_at; Start 212; Stop 236
cgaaagagcagtttgagaaaatcag

SEQ ID NO: 95752 - DNA, 25 bp, Artificial
  probe
  misc_feature (1)..(25): SEQ ID NO: 6575; WAN024BVA_at; Start 109; Stop 133
gctgataacgctggcgctgagatat

SEQ ID NO: 95753 - DNA, 25 bp, Artificial
  probe
  misc_feature (1)..(25): SEQ ID NO: 6575; WAN024BVA_at; Start 157; Stop 181
cggcatgggaagttgtatacagtaa

SEQ ID NO: 95754 - DNA, 25 bp, Artificial
  probe
  misc_feature (1)..(25): SEQ ID NO: 6575; WAN024BVA_at; Start 30; Stop 54
tgtctctgccggattgaacatctgg

SEQ ID NO: 95755 - DNA, 25 bp, Artificial
  probe
  misc_feature (1)..(25): SEQ ID NO: 6575; WAN024BVA_at; Start 143; Stop 167
tcgttgaaaaaggacggcatgggaa

SEQ ID NO: 95756 - DNA, 25 bp, Artificial
  probe
  misc_feature (1)..(25): SEQ ID NO: 6575; WAN024BVA_at; Start 73; Stop 97
gatttggaagagaaaaagccgatgg

SEQ ID NO: 95757 - DNA, 25 bp, Artificial
  probe
  misc_feature (1)..(25): SEQ ID NO: 6575; WAN024BVA_at; Start 69; Stop 93
tcgagatttggaagagaaaaagccg

SEQ ID NO: 95758 - DNA, 25 bp, Artificial
  probe
  misc_feature (1)..(25): SEQ ID NO: 6575; WAN024BVA_at; Start 190; Stop 214
gactatgggattttcgtagttacga

SEQ ID NO: 95759 - DNA, 25 bp, Artificial
  probe
  misc_feature (1)..(25): SEQ ID NO: 6575; WAN024BVA_at; Start 114; Stop 138
taacgctggcgctgagatattcggg

SEQ ID NO: 95760 - DNA, 25 bp, Artificial
  probe
  misc_feature (1)..(25): SEQ ID NO: 6575; WAN024BVA_at; Start 44; Stop 68
tgaacatctggcatatggacaggat

SEQ ID NO: 95761 - DNA, 25 bp, Artificial
  probe
  misc_feature (1)..(25): SEQ ID NO: 6575; WAN024BVA_at; Start 129; Stop 153
gatattcgggcgtgtcgttgaaaaa

SEQ ID NO: 95762 - DNA, 25 bp, Artificial
  probe
  misc_feature (1)..(25): SEQ ID NO: 6575; WAN024BVA_at; Start 52; Stop 76
tggcatatggacaggattcgagatt

SEQ ID NO: 95763 - DNA, 25 bp, Artificial
  probe
  misc_feature (1)..(25): SEQ ID NO: 7030; WAN024BVB_at; Start 103; Stop 127
taccctgaaaagtatgtgcagtatg

SEQ ID NO: 95764 - DNA, 25 bp, Artificial
  probe
  misc_feature (1)..(25): SEQ ID NO: 7030; WAN024BVB_at; Start 22; Stop 46
tgggattttgatcaagacactacgt

SEQ ID NO: 95765 - DNA, 25 bp, Artificial
  probe
  misc_feature (1)..(25): SEQ ID NO: 7030; WAN024BVB_at; Start 97; Stop 121
gaacggtaccctgaaaagtatgtgc

SEQ ID NO: 95766 - DNA, 25 bp, Artificial
  probe
  misc_feature (1)..(25): SEQ ID NO: 7030; WAN024BVB_at; Start 61; Stop 85
gttttagataacattcaacgcggta

SEQ ID NO: 95767 - DNA, 25 bp, Artificial
  probe
  misc_feature (1)..(25): SEQ ID NO: 7030; WAN024BVB_at; Start 75; Stop 99
tcaacgcggtatctctgaactagaa

SEQ ID NO: 95768 - DNA, 25 bp, Artificial
  probe
  misc_feature (1)..(25): SEQ ID NO: 7030; WAN024BVB_at; Start 67; Stop 91
gataacattcaacgcggtatctctg

SEQ ID NO: 95769 - DNA, 25 bp, Artificial
  probe
  misc_feature (1)..(25): SEQ ID NO: 7030; WAN024BVB_at; Start 100; Stop 124
cggtaccctgaaaagtatgtgcagt

SEQ ID NO: 95770 - DNA, 25 bp, Artificial
  probe
  misc_feature (1)..(25): SEQ ID NO: 7030; WAN024BVB_at; Start 117; Stop 141
tgtgcagtatgaacctgaaaataga

SEQ ID NO: 95771 - DNA, 25 bp, Artificial
  probe
  misc_feature (1)..(25): SEQ ID NO: 7030; WAN024BVB_at; Start 179; Stop 203
cactgaaagagtgtattttagaaca

SEQ ID NO: 95772 - DNA, 25 bp, Artificial
  probe
  misc_feature (1)..(25): SEQ ID NO: 7030; WAN024BVB_at; Start 37; Stop 61
gacactacgtacaacatcgctgatg

SEQ ID NO: 95773 - DNA, 25 bp, Artificial
  probe
  misc_feature (1)..(25): SEQ ID NO: 7030; WAN024BVB_at; Start 80; Stop 104
gcggtatctctgaactagaacggta

SEQ ID NO: 95774 - DNA, 25 bp, Artificial
  probe
  misc_feature (1)..(25): SEQ ID NO: 7030; WAN024BVB_at; Start 161; Stop 185
cattggaggttttaaagtcactgaa

SEQ ID NO: 95775 - DNA, 25 bp, Artificial
  probe
  misc_feature (1)..(25): SEQ ID NO: 7030; WAN024BVB_at; Start 25; Stop 49
gattttgatcaagacactacgtaca

SEQ ID NO: 95776 - DNA, 25 bp, Artificial
  probe
  misc_feature (1)..(25): SEQ ID NO: 7030; WAN024BVB_at; Start 164; Stop 188
tggaggttttaaagtcactgaaaga

SEQ ID NO: 95777 - DNA, 25 bp, Artificial
  probe
  misc_feature (1)..(25): SEQ ID NO: 7030; WAN024BVB_at; Start 31; Stop 55
gatcaagacactacgtacaacatcg

SEQ ID NO: 95778 - DNA, 25 bp, Artificial
  probe
  misc_feature (1)..(25): SEQ ID NO: 7030; WAN024BVB_at; Start 15; Stop 39
tatgaactgggattttgatcaagac

SEQ ID NO: 95779 - DNA, 25 bp, Artificial
  probe
  misc_feature (1)..(25): SEQ ID NO: 7030; WAN024BVB_at; Start 8; Stop 32
gagttgctatgaactgggattttga

SEQ ID NO: 95780 - DNA, 25 bp, Artificial
  probe
  misc_feature (1)..(25): SEQ ID NO: 7030; WAN024BVB_at; Start 146; Stop 170
gaacagttagcgttgcattggaggt

SEQ ID NO: 95781 - DNA, 25 bp, Artificial
  probe
  misc_feature (1)..(25): SEQ ID NO: 7030; WAN024BVB_at; Start 77; Stop 101
aacgcggtatctctgaactagaacg

SEQ ID NO: 95782 - DNA, 25 bp, Artificial
  probe
  misc_feature (1)..(25): SEQ ID NO: 7030; WAN024BVB_at; Start 111; Stop 135
aaagtatgtgcagtatgaacctgaa

SEQ ID NO: 95783 - DNA, 25 bp, Artificial
  probe
  misc_feature (1)..(25): SEQ ID NO: 7030; WAN024BVB_at; Start 121; Stop 145
cagtatgaacctgaaaatagatggg

SEQ ID NO: 95784 - DNA, 25 bp, Artificial
  probe
  misc_feature (1)..(25): SEQ ID NO: 7030; WAN024BVB_at; Start 169; Stop 193
gttttaaagtcactgaaagagtgta

SEQ ID NO: 95785 - DNA, 25 bp, Artificial
  probe
  misc_feature (1)..(25): SEQ ID NO: 7030; WAN024BVB_at; Start 88; Stop 112
tctgaactagaacggtaccctgaaa

SEQ ID NO: 95786 - DNA, 25 bp, Artificial
  probe
  misc_feature (1)..(25): SEQ ID NO: 7030; WAN024BVB_at; Start 108; Stop 132
tgaaaagtatgtgcagtatgaacct

SEQ ID NO: 95787 - DNA, 25 bp, Artificial
  probe
  misc_feature (1)..(25): SEQ ID NO: 7030; WAN024BVB_at; Start 199; Stop 223
gaacaagatattgatacgaaatatt

SEQ ID NO: 95788 - DNA, 25 bp, Artificial
  probe
  misc_feature (1)..(25): SEQ ID NO: 7030; WAN024BVB_at; Start 18; Stop 42
gaactgggattttgatcaagacact

SEQ ID NO: 95789 - DNA, 25 bp, Artificial
  probe
  misc_feature (1)..(25): SEQ ID NO: 7030; WAN024BVB_at; Start 39; Stop 63
cactacgtacaacatcgctgatgtt

SEQ ID NO: 95790 - DNA, 25 bp, Artificial
  probe
  misc_feature (1)..(25): SEQ ID NO: 7030; WAN024BVB_at; Start 156; Stop 180
cgttgcattggaggttttaaagtca

SEQ ID NO: 95791 - DNA, 25 bp, Artificial
  probe
  misc_feature (1)..(25): SEQ ID NO: 7030; WAN024BVB_at; Start 83; Stop 107
gtatctctgaactagaacggtaccc

SEQ ID NO: 95792 - DNA, 25 bp, Artificial
  probe
  misc_feature (1)..(25): SEQ ID NO: 7030; WAN024BVB_at; Start 86; Stop 110
tctctgaactagaacggtaccctga

SEQ ID NO: 95793 - DNA, 25 bp, Artificial
  probe
  misc_feature (1)..(25): SEQ ID NO: 7030; WAN024BVB_at; Start 2; Stop 26
tgtttagagttgctatgaactggga

SEQ ID NO: 95794 - DNA, 25 bp, Artificial
  probe
  misc_feature (1)..(25): SEQ ID NO: 7030; WAN024BVB_at; Start 192; Stop 216
tattttagaacaagatattgatacg

SEQ ID NO: 95795 - DNA, 25 bp, Artificial
  probe
  misc_feature (1)..(25): SEQ ID NO: 7030; WAN024BVB_at; Start 49; Stop 73
aacatcgctgatgttttagataaca

SEQ ID NO: 95796 - DNA, 25 bp, Artificial
  probe
  misc_feature (1)..(25): SEQ ID NO: 7030; WAN024BVB_at; Start 149; Stop 173
cagttagcgttgcattggaggtttt

SEQ ID NO: 95797 - DNA, 25 bp, Artificial
  probe
  misc_feature (1)..(25): SEQ ID NO: 7259; WAN024BVC_at; Start 35; Stop 59
aagaattgactgctgctatttcaaa

SEQ ID NO: 95798 - DNA, 25 bp, Artificial
  probe
  misc_feature (1)..(25): SEQ ID NO: 7259; WAN024BVC_at; Start 90; Stop 114
taaattgagcagtctatcattaagc

SEQ ID NO: 95799 - DNA, 25 bp, Artificial
  probe
  misc_feature (1)..(25): SEQ ID NO: 7259; WAN024BVC_at; Start 56; Stop 80
caaatttcaagatagaagtcttaca

SEQ ID NO: 95800 - DNA, 25 bp, Artificial
  probe
  misc_feature (1)..(25): SEQ ID NO: 7259; WAN024BVC_at; Start 68; Stop 92
tagaagtcttacaaaatgatgataa

SEQ ID NO: 95801 - DNA, 25 bp, Artificial
  probe
  misc_feature (1)..(25): SEQ ID NO: 7259; WAN024BVC_at; Start 104; Stop 128
tatcattaagcaacatcaaaaggca

SEQ ID NO: 95802 - DNA, 25 bp, Artificial
  probe
  misc_feature (1)..(25): SEQ ID NO: 7259; WAN024BVC_at; Start 96; Stop 120
gagcagtctatcattaagcaacatc

SEQ ID NO: 95803 - DNA, 25 bp, Artificial
  probe
  misc_feature (1)..(25): SEQ ID NO: 7259; WAN024BVC_at; Start 98; Stop 122
gcagtctatcattaagcaacatcaa

SEQ ID NO: 95804 - DNA, 25 bp, Artificial
  probe
  misc_feature (1)..(25): SEQ ID NO: 7259; WAN024BVC_at; Start 127; Stop 151
caagcaagggatctatatgaatgct

SEQ ID NO: 95805 - DNA, 25 bp, Artificial
  probe
  misc_feature (1)..(25): SEQ ID NO: 7259; WAN024BVC_at; Start 122; Stop 146
aaaggcaagcaagggatctatatga

SEQ ID NO: 95806 - DNA, 25 bp, Artificial
  probe
  misc_feature (1)..(25): SEQ ID NO: 7259; WAN024BVC_at; Start 113; Stop 137
gcaacatcaaaaggcaagcaaggga

SEQ ID NO: 95807 - DNA, 25 bp, Artificial
  probe
  misc_feature (1)..(25): SEQ ID NO: 7259; WAN024BVC_at; Start 139; Stop 163
ctatatgaatgcttagtatggttgc

SEQ ID NO: 95808 - DNA, 25 bp, Artificial
  probe
  misc_feature (1)..(25): SEQ ID NO: 7259; WAN024BVC_at; Start 165; Stop 189
gtataatgcggaggaatcaggtaga

SEQ ID NO: 95809 - DNA, 25 bp, Artificial
  probe
  misc_feature (1)..(25): SEQ ID NO: 7259; WAN024BVC_at; Start 115; Stop 139
aacatcaaaaggcaagcaagggatc

SEQ ID NO: 95810 - DNA, 25 bp, Artificial
  probe
  misc_feature (1)..(25): SEQ ID NO: 7259; WAN024BVC_at; Start 3; Stop 27
gatgtcatgtagtgaaaatttaaaa

SEQ ID NO: 95811 - DNA, 25 bp, Artificial
  probe
  misc_feature (1)..(25): SEQ ID NO: 7259; WAN024BVC_at; Start 28; Stop 52
aaagaaaaagaattgactgctgcta

SEQ ID NO: 95812 - DNA, 25 bp, Artificial
  probe
  misc_feature (1)..(25): SEQ ID NO: 7259; WAN024BVC_at; Start 31; Stop 55
gaaaaagaattgactgctgctattt

SEQ ID NO: 95813 - DNA, 25 bp, Artificial
  probe
  misc_feature (1)..(25): SEQ ID NO: 7259; WAN024BVC_at; Start 102; Stop 126
tctatcattaagcaacatcaaaagg

SEQ ID NO: 95814 - DNA, 25 bp, Artificial
  probe
  misc_feature (1)..(25): SEQ ID NO: 7259; WAN024BVC_at; Start 149; Stop 173
gcttagtatggttgcagtataatgc

SEQ ID NO: 95815 - DNA, 25 bp, Artificial
  probe
  misc_feature (1)..(25): SEQ ID NO: 7259; WAN024BVC_at; Start 155; Stop 179
tatggttgcagtataatgcggagga

SEQ ID NO: 95816 - DNA, 25 bp, Artificial
  probe
  misc_feature (1)..(25): SEQ ID NO: 7259; WAN024BVC_at; Start 42; Stop 66
gactgctgctatttcaaatttcaag

SEQ ID NO: 95817 - DNA, 25 bp, Artificial
  probe
  misc_feature (1)..(25): SEQ ID NO: 7259; WAN024BVC_at; Start 145; Stop 169
gaatgcttagtatggttgcagtata

SEQ ID NO: 95818 - DNA, 25 bp, Artificial
  probe
  misc_feature (1)..(25): SEQ ID NO: 7259; WAN024BVC_at; Start 163; Stop 187
cagtataatgcggaggaatcaggta

SEQ ID NO: 95819 - DNA, 25 bp, Artificial
  probe
  misc_feature (1)..(25): SEQ ID NO: 7259; WAN024BVC_at; Start 117; Stop 141
catcaaaaggcaagcaagggatcta

SEQ ID NO: 95820 - DNA, 25 bp, Artificial
  probe
  misc_feature (1)..(25): SEQ ID NO: 7259; WAN024BVC_at; Start 94; Stop 118
ttgagcagtctatcattaagcaaca

SEQ ID NO: 95821 - DNA, 25 bp, Artificial
  probe
  misc_feature (1)..(25): SEQ ID NO: 7259; WAN024BVC_at; Start 49; Stop 73
gctatttcaaatttcaagatagaag

SEQ ID NO: 95822 - DNA, 25 bp, Artificial
  probe
  misc_feature (1)..(25): SEQ ID NO: 7259; WAN024BVC_at; Start 152; Stop 176
tagtatggttgcagtataatgcgga

SEQ ID NO: 95823 - DNA, 25 bp, Artificial
  probe
  misc_feature (1)..(25): SEQ ID NO: 7259; WAN024BVC_at; Start 159; Stop 183
gttgcagtataatgcggaggaatca

SEQ ID NO: 95824 - DNA, 25 bp, Artificial
  probe
  misc_feature (1)..(25): SEQ ID NO: 7259; WAN024BVC_at; Start 79; Stop 103
caaaatgatgataaattgagcagtc

SEQ ID NO: 95825 - DNA, 25 bp, Artificial
  probe
  misc_feature (1)..(25): SEQ ID NO: 7259; WAN024BVC_at; Start 131; Stop 155
caagggatctatatgaatgcttagt

SEQ ID NO: 95826 - DNA, 25 bp, Artificial
  probe
  misc_feature (1)..(25): SEQ ID NO: 7259; WAN024BVC_at; Start 107; Stop 131
cattaagcaacatcaaaaggcaagc

SEQ ID NO: 95827 - DNA, 25 bp, Artificial
  probe
  misc_feature (1)..(25): SEQ ID NO: 7259; WAN024BVC_at; Start 110; Stop 134
taagcaacatcaaaaggcaagcaag

SEQ ID NO: 95828 - DNA, 25 bp, Artificial
  probe
  misc_feature (1)..(25): SEQ ID NO: 7259; WAN024BVC_at; Start 119; Stop 143
tcaaaaggcaagcaagggatctata

SEQ ID NO: 95829 - DNA, 25 bp, Artificial
  probe
  misc_feature (1)..(25): SEQ ID NO: 7259; WAN024BVC_at; Start 125; Stop 149
ggcaagcaagggatctatatgaatg

SEQ ID NO: 95830 - DNA, 25 bp, Artificial
  probe
  misc_feature (1)..(25): SEQ ID NO: 7259; WAN024BVC_at; Start 26; Stop 50
aaaaagaaaaagaattgactgctgc

SEQ ID NO: 95831 - DNA, 25 bp, Artificial
  probe
  misc_feature (1)..(25): SEQ ID NO: 6489; WAN024BVD_at; Start 408; Stop 432
tatcatgtggctaccactgtttggt

SEQ ID NO: 95832 - DNA, 25 bp, Artificial
  probe
  misc_feature (1)..(25): SEQ ID NO: 6489; WAN024BVD_at; Start 717; Stop 741
taaagcagaccaaattgcggccctg

SEQ ID NO: 95833 - DNA, 25 bp, Artificial
  probe
  misc_feature (1)..(25): SEQ ID NO: 6489; WAN024BVD_at; Start 703; Stop 727
tttgaatctttggataaagcagacc

SEQ ID NO: 95834 - DNA, 25 bp, Artificial
  probe
  misc_feature (1)..(25): SEQ ID NO: 6489; WAN024BVD_at; Start 756; Stop 780
ctatgtagcacgagaaaatgtttta

SEQ ID NO: 95835 - DNA, 25 bp, Artificial
  probe
  misc_feature (1)..(25): SEQ ID NO: 6489; WAN024BVD_at; Start 215; Stop 239
caagcaatatttttggaatatctcc

SEQ ID NO: 95836 - DNA, 25 bp, Artificial
  probe
  misc_feature (1)..(25): SEQ ID NO: 6489; WAN024BVD_at; Start 675; Stop 699
tattgctagtaactcagtgagaatt

SEQ ID NO: 95837 - DNA, 25 bp, Artificial
  probe
  misc_feature (1)..(25): SEQ ID NO: 6489; WAN024BVD_at; Start 637; Stop 661
cttaactttcttcaaaattcggatg

SEQ ID NO: 95838 - DNA, 25 bp, Artificial
  probe
  misc_feature (1)..(25): SEQ ID NO: 6489; WAN024BVD_at; Start 744; Stop 768
tatttgtagaaactatgtagcacga

SEQ ID NO: 95839 - DNA, 25 bp, Artificial
  probe
  misc_feature (1)..(25): SEQ ID NO: 6489; WAN024BVD_at; Start 595; Stop 619
gatttgtacgaatcgtgtcgtcaga

SEQ ID NO: 95840 - DNA, 25 bp, Artificial
  probe
  misc_feature (1)..(25): SEQ ID NO: 6489; WAN024BVD_at; Start 251; Stop 275
taaggacacagtctgaagtgtatca

SEQ ID NO: 95841 - DNA, 25 bp, Artificial
  probe
  misc_feature (1)..(25): SEQ ID NO: 6489; WAN024BVD_at; Start 80; Stop 104
tattagtaatgtcaatagtgggtgc

SEQ ID NO: 95842 - DNA, 25 bp, Artificial
  probe
  misc_feature (1)..(25): SEQ ID NO: 6489; WAN024BVD_at; Start 143; Stop 167
taaatttgacactcactttagacac

SEQ ID NO: 95843 - DNA, 25 bp, Artificial
  probe
  misc_feature (1)..(25): SEQ ID NO: 6489; WAN024BVD_at; Start 580; Stop 604
tacggtgaatatattgatttgtacg

SEQ ID NO: 95844 - DNA, 25 bp, Artificial
  probe
  misc_feature (1)..(25): SEQ ID NO: 6489; WAN024BVD_at; Start 382; Stop 406
tatcctcgtattcaatccagtgttg

SEQ ID NO: 95845 - DNA, 25 bp, Artificial
  probe
  misc_feature (1)..(25): SEQ ID NO: 6489; WAN024BVD_at; Start 422; Stop 446
cactgtttggtattctgataatcta

SEQ ID NO: 95846 - DNA, 25 bp, Artificial
  probe
  misc_feature (1)..(25): SEQ ID NO: 6489; WAN024BVD_at; Start 514; Stop 538
gaaataatctatttttattcgcagg

SEQ ID NO: 95847 - DNA, 25 bp, Artificial
  probe
  misc_feature (1)..(25): SEQ ID NO: 6489; WAN024BVD_at; Start 550; Stop 574
gataaacttactgattctgaatcga

SEQ ID NO: 95848 - DNA, 25 bp, Artificial
  probe
  misc_feature (1)..(25): SEQ ID NO: 6489; WAN024BVD_at; Start 663; Stop 687
taaacgaggagttattgctagtaac

SEQ ID NO: 95849 - DNA, 25 bp, Artificial
  probe
  misc_feature (1)..(25): SEQ ID NO: 6489; WAN024BVD_at; Start 532; Stop 556
tcgcaggtaaaagttgtagataaac

SEQ ID NO: 95850 - DNA, 25 bp, Artificial
  probe
  misc_feature (1)..(25): SEQ ID NO: 6489; WAN024BVD_at; Start 239; Stop 263
caaatgaaattataaggacacagtc

SEQ ID NO: 95851 - DNA, 25 bp, Artificial
  probe
  misc_feature (1)..(25): SEQ ID NO: 6489; WAN024BVD_at; Start 565; Stop 589
tctgaatcgaaaaaatacggtgaat

SEQ ID NO: 95852 - DNA, 25 bp, Artificial
  probe
  misc_feature (1)..(25): SEQ ID NO: 6489; WAN024BVD_at; Start 330; Stop 354
cattattcattattttggagccaaa

SEQ ID NO: 95853 - DNA, 25 bp, Artificial
  probe
  misc_feature (1)..(25): SEQ ID NO: 6489; WAN024BVD_at; Start 49; Stop 73
aagatttctattattgtagtgtcag

SEQ ID NO: 95854 - DNA, 25 bp, Artificial
  probe
  misc_feature (1)..(25): SEQ ID NO: 6489; WAN024BVD_at; Start 732; Stop 756
tgcggccctgaatatttgtagaaac

SEQ ID NO: 95855 - DNA, 25 bp, Artificial
  probe
  misc_feature (1)..(25): SEQ ID NO: 6489; WAN024BVD_at; Start 649; Stop 673
caaaattcggatgataaacgaggag

SEQ ID NO: 95856 - DNA, 25 bp, Artificial
  probe
  misc_feature (1)..(25): SEQ ID NO: 6489; WAN024BVD_at; Start 3; Stop 27
gaatagattagtgaacgatagcagg

SEQ ID NO: 95857 - DNA, 25 bp, Artificial
  probe
  misc_feature (1)..(25): SEQ ID NO: 6489; WAN024BVD_at; Start 367; Stop 391
tcttttaatgaaacttatcctcgta

SEQ ID NO: 95858 - DNA, 25 bp, Artificial
  probe
  misc_feature (1)..(25): SEQ ID NO: 6489; WAN024BVD_at; Start 394; Stop 418
caatccagtgttggtatcatgtggc

SEQ ID NO: 95859 - DNA, 25 bp, Artificial
  probe
  misc_feature (1)..(25): SEQ ID NO: 6489; WAN024BVD_at; Start 18; Stop 42
cgatagcaggaagtgtgaaatttta

SEQ ID NO: 95860 - DNA, 25 bp, Artificial
  probe
  misc_feature (1)..(25): SEQ ID NO: 6489; WAN024BVD_at; Start 156; Stop 180
cactttagacactctctttgcagtt

SEQ ID NO: 95861 - DNA, 25 bp, Artificial
  probe
  misc_feature (1)..(25): SEQ ID NO: 6489; WAN024BVD_at; Start 195; Stop 219
tagtttttcaaatgataaatcaagc

SEQ ID NO: 95862 - DNA, 25 bp, Artificial
  probe
  misc_feature (1)..(25): SEQ ID NO: 6489; WAN024BVD_at; Start 450; Stop 474
tatttggctcttaatagagggatta

SEQ ID NO: 95863 - DNA, 25 bp, Artificial
  probe
  misc_feature (1)..(25): SEQ ID NO: 6489; WAN024BVD_at; Start 607; Stop 631
tcgtgtcgtcagaacaatttaagtg

SEQ ID NO: 95864 - DNA, 25 bp, Artificial
  probe
  misc_feature (1)..(25): SEQ ID NO: 6489; WAN024BVD_at; Start 293; Stop 317
cttttgcaactctattaatagtgac

SEQ ID NO: 95865 - DNA, 25 bp, Artificial
  probe
  misc_feature (1)..(25): SEQ ID NO: 7718; WAN024BVE_at; Start 72; Stop 96
tcttaaaaatcagaaaaacgctcaa

SEQ ID NO: 95866 - DNA, 25 bp, Artificial
  probe
  misc_feature (1)..(25): SEQ ID NO: 7718; WAN024BVE_at; Start 36; Stop 60
aattacatcttcaatcgaaaaagag

SEQ ID NO: 95867 - DNA, 25 bp, Artificial
  probe
  misc_feature (1)..(25): SEQ ID NO: 7718; WAN024BVE_at; Start 96; Stop 120
aatcctttggcgctctaagcttttc

SEQ ID NO: 95868 - DNA, 25 bp, Artificial
  probe
  misc_feature (1)..(25): SEQ ID NO: 7718; WAN024BVE_at; Start 41; Stop 65
catcttcaatcgaaaaagagactgg

SEQ ID NO: 95869 - DNA, 25 bp, Artificial
  probe
  misc_feature (1)..(25): SEQ ID NO: 7718; WAN024BVE_at; Start 92; Stop 116
ctcaaatcctttggcgctctaagct

SEQ ID NO: 95870 - DNA, 25 bp, Artificial
  probe
  misc_feature (1)..(25): SEQ ID NO: 7718; WAN024BVE_at; Start 39; Stop 63
tacatcttcaatcgaaaaagagact

SEQ ID NO: 95871 - DNA, 25 bp, Artificial
  probe
  misc_feature (1)..(25): SEQ ID NO: 7718; WAN024BVE_at; Start 30; Stop 54
tagaataattacatcttcaatcgaa

SEQ ID NO: 95872 - DNA, 25 bp, Artificial
  probe
  misc_feature (1)..(25): SEQ ID NO: 7718; WAN024BVE_at; Start 71; Stop 95
gtcttaaaaatcagaaaaacgctca

SEQ ID NO: 95873 - DNA, 25 bp, Artificial
  probe
  misc_feature (1)..(25): SEQ ID NO: 7718; WAN024BVE_at; Start 77; Stop 101
aaaatcagaaaaacgctcaaatcct

SEQ ID NO: 95874 - DNA, 25 bp, Artificial
  probe
  misc_feature (1)..(25): SEQ ID NO: 7718; WAN024BVE_at; Start 2; Stop 26
tgttggctagtactaagaagttagt

SEQ ID NO: 95875 - DNA, 25 bp, Artificial
  probe
  misc_feature (1)..(25): SEQ ID NO: 7718; WAN024BVE_at; Start 23; Stop 47
tagttagtagaataattacatcttc

SEQ ID NO: 95876 - DNA, 25 bp, Artificial
  probe
  misc_feature (1)..(25): SEQ ID NO: 7718; WAN024BVE_at; Start 82; Stop 106
cagaaaaacgctcaaatcctttggc

SEQ ID NO: 95877 - DNA, 25 bp, Artificial
  probe
  misc_feature (1)..(25): SEQ ID NO: 7718; WAN024BVE_at; Start 90; Stop 114
cgctcaaatcctttggcgctctaag

SEQ ID NO: 95878 - DNA, 25 bp, Artificial
  probe
  misc_feature (1)..(25): SEQ ID NO: 7718; WAN024BVE_at; Start 46; Stop 70
tcaatcgaaaaagagactggaaaaa

SEQ ID NO: 95879 - DNA, 25 bp, Artificial
  probe
  misc_feature (1)..(25): SEQ ID NO: 7718; WAN024BVE_at; Start 44; Stop 68
cttcaatcgaaaaagagactggaaa

SEQ ID NO: 95880 - DNA, 25 bp, Artificial
  probe
  misc_feature (1)..(25): SEQ ID NO: 7718; WAN024BVE_at; Start 32; Stop 56
gaataattacatcttcaatcgaaaa

SEQ ID NO: 95881 - DNA, 25 bp, Artificial
  probe
  misc_feature (1)..(25): SEQ ID NO: 7718; WAN024BVE_at; Start 1; Stop 25
ttgttggctagtactaagaagttag

SEQ ID NO: 95882 - DNA, 25 bp, Artificial
  probe
  misc_feature (1)..(25): SEQ ID NO: 7718; WAN024BVE_at; Start 28; Stop 52
agtagaataattacatcttcaatcg

SEQ ID NO: 95883 - DNA, 25 bp, Artificial
  probe
  misc_feature (1)..(25): SEQ ID NO: 7718; WAN024BVE_at; Start 43; Stop 67
tcttcaatcgaaaaagagactggaa

SEQ ID NO: 95884 - DNA, 25 bp, Artificial
  probe
  misc_feature (1)..(25): SEQ ID NO: 7718; WAN024BVE_at; Start 5; Stop 29
tggctagtactaagaagttagttag

SEQ ID NO: 95885 - DNA, 25 bp, Artificial
  probe
  misc_feature (1)..(25): SEQ ID NO: 7718; WAN024BVE_at; Start 38; Stop 62
ttacatcttcaatcgaaaaagagac

SEQ ID NO: 95886 - DNA, 25 bp, Artificial
  probe
  misc_feature (1)..(25): SEQ ID NO: 7718; WAN024BVE_at; Start 81; Stop 105
tcagaaaaacgctcaaatcctttgg

SEQ ID NO: 95887 - DNA, 25 bp, Artificial
  probe
  misc_feature (1)..(25): SEQ ID NO: 7718; WAN024BVE_at; Start 86; Stop 110
aaaacgctcaaatcctttggcgctc

SEQ ID NO: 95888 - DNA, 25 bp, Artificial
  probe
  misc_feature (1)..(25): SEQ ID NO: 7718; WAN024BVE_at; Start 7; Stop 31
gctagtactaagaagttagttagta

SEQ ID NO: 95889 - DNA, 25 bp, Artificial
  probe
  misc_feature (1)..(25): SEQ ID NO: 7718; WAN024BVE_at; Start 91; Stop 115
gctcaaatcctttggcgctctaagc

SEQ ID NO: 95890 - DNA, 25 bp, Artificial
  probe
  misc_feature (1)..(25): SEQ ID NO: 7718; WAN024BVE_at; Start 83; Stop 107
agaaaaacgctcaaatcctttggcg

SEQ ID NO: 95891 - DNA, 25 bp, Artificial
  probe
  misc_feature (1)..(25): SEQ ID NO: 7718; WAN024BVE_at; Start 88; Stop 112
aacgctcaaatcctttggcgctcta

SEQ ID NO: 95892 - DNA, 25 bp, Artificial
  probe
  misc_feature (1)..(25): SEQ ID NO: 7718; WAN024BVE_at; Start 75; Stop 99
taaaaatcagaaaaacgctcaaatc

SEQ ID NO: 95893 - DNA, 25 bp, Artificial
  probe
  misc_feature (1)..(25): SEQ ID NO: 7718; WAN024BVE_at; Start 42; Stop 66
atcttcaatcgaaaaagagactgga

SEQ ID NO: 95894 - DNA, 25 bp, Artificial
  probe
  misc_feature (1)..(25): SEQ ID NO: 7718; WAN024BVE_at; Start 84; Stop 108
gaaaaacgctcaaatcctttggcgc

SEQ ID NO: 95895 - DNA, 25 bp, Artificial
  probe
  misc_feature (1)..(25): SEQ ID NO: 7718; WAN024BVE_at; Start 47; Stop 71
caatcgaaaaagagactggaaaaag

SEQ ID NO: 95896 - DNA, 25 bp, Artificial
  probe
  misc_feature (1)..(25): SEQ ID NO: 7718; WAN024BVE_at; Start 78; Stop 102
aaatcagaaaaacgctcaaatcctt

SEQ ID NO: 95897 - DNA, 25 bp, Artificial
  probe
  misc_feature (1)..(25): SEQ ID NO: 7718; WAN024BVE_at; Start 87; Stop 111
aaacgctcaaatcctttggcgctct

SEQ ID NO: 95898 - DNA, 25 bp, Artificial
  probe
  misc_feature (1)..(25): SEQ ID NO: 7718; WAN024BVE_at; Start 85; Stop 109
aaaaacgctcaaatcctttggcgct

SEQ ID NO: 95899 - DNA, 25 bp, Artificial
  probe
  misc_feature (1)..(25): SEQ ID NO: 7167; WAN024BVF_at; Start 56; Stop 80
caggtccagcgaatgggcaagctct

SEQ ID NO: 95900 - DNA, 25 bp, Artificial
  probe
  misc_feature (1)..(25): SEQ ID NO: 7167; WAN024BVF_at; Start 52; Stop 76
gatccaggtccagcgaatgggcaag

SEQ ID NO: 95901 - DNA, 25 bp, Artificial
  probe
  misc_feature (1)..(25): SEQ ID NO: 7167; WAN024BVF_at; Start 55; Stop 79
ccaggtccagcgaatgggcaagctc

SEQ ID NO: 95902 - DNA, 25 bp, Artificial
  probe
  misc_feature (1)..(25): SEQ ID NO: 7167; WAN024BVF_at; Start 54; Stop 78
tccaggtccagcgaatgggcaagct

SEQ ID NO: 95903 - DNA, 25 bp, Artificial
  probe
  misc_feature (1)..(25): SEQ ID NO: 7167; WAN024BVF_at; Start 57; Stop 81
aggtccagcgaatgggcaagctctc

SEQ ID NO: 95904 - DNA, 25 bp, Artificial
  probe
  misc_feature (1)..(25): SEQ ID NO: 7167; WAN024BVF_at; Start 53; Stop 77
atccaggtccagcgaatgggcaagc

SEQ ID NO: 95905 - DNA, 25 bp, Artificial
  probe
  misc_feature (1)..(25): SEQ ID NO: 7135; WAN024BVG_at; Start 1172; Stop 1196
taggctactattttagaggtactgc

SEQ ID NO: 95906 - DNA, 25 bp, Artificial
  probe
  misc_feature (1)..(25): SEQ ID NO: 7135; WAN024BVG_at; Start 699; Stop 723
tatgcttgcaatgctctatgcacgc

SEQ ID NO: 95907 - DNA, 25 bp, Artificial
  probe
  misc_feature (1)..(25): SEQ ID NO: 7135; WAN024BVG_at; Start 1079; Stop 1103
gaaatcttttagagacagatgtcga

SEQ ID NO: 95908 - DNA, 25 bp, Artificial
  probe
  misc_feature (1)..(25): SEQ ID NO: 7135; WAN024BVG_at; Start 655; Stop 679
tacaaacatgatggaaaagttgacc

SEQ ID NO: 95909 - DNA, 25 bp, Artificial
  probe
  misc_feature (1)..(25): SEQ ID NO: 7135; WAN024BVG_at; Start 717; Stop 741
tgcacgccatcatcctaaatacctt

SEQ ID NO: 95910 - DNA, 25 bp, Artificial
  probe
  misc_feature (1)..(25): SEQ ID NO: 7135; WAN024BVG_at; Start 1260; Stop 1284
cgatataacttatgaactaacggag

SEQ ID NO: 95911 - DNA, 25 bp, Artificial
  probe
  misc_feature (1)..(25): SEQ ID NO: 7135; WAN024BVG_at; Start 1339; Stop 1363
tatgagctgaatgatgaagacttac

SEQ ID NO: 95912 - DNA, 25 bp, Artificial
  probe
  misc_feature (1)..(25): SEQ ID NO: 7135; WAN024BVG_at; Start 822; Stop 846
taatcgaaatgggtatgccctacta

SEQ ID NO: 95913 - DNA, 25 bp, Artificial
  probe
  misc_feature (1)..(25): SEQ ID NO: 7135; WAN024BVG_at; Start 515; Stop 539
cagcaggtgatttatgggcttctaa

SEQ ID NO: 95914 - DNA, 25 bp, Artificial
  probe
  misc_feature (1)..(25): SEQ ID NO: 7135; WAN024BVG_at; Start 184; Stop 208
atttttccagagttacctagaggag

SEQ ID NO: 95915 - DNA, 25 bp, Artificial
  probe
  misc_feature (1)..(25): SEQ ID NO: 7135; WAN024BVG_at; Start 241; Stop 265
gatagccagttaaggtattcgatgt

SEQ ID NO: 95916 - DNA, 25 bp, Artificial
  probe
  misc_feature (1)..(25): SEQ ID NO: 7135; WAN024BVG_at; Start 1114; Stop 1138
gaatttatagagagtatgccacatc

SEQ ID NO: 95917 - DNA, 25 bp, Artificial
  probe
  misc_feature (1)..(25): SEQ ID NO: 7135; WAN024BVG_at; Start 668; Stop 692
gaaaagttgaccatattgtggcagc

SEQ ID NO: 95918 - DNA, 25 bp, Artificial
  probe
  misc_feature (1)..(25): SEQ ID NO: 7135; WAN024BVG_at; Start 149; Stop 173
tctcaaaaatgggtagcgaagaagc

SEQ ID NO: 95919 - DNA, 25 bp, Artificial
  probe
  misc_feature (1)..(25): SEQ ID NO: 7135; WAN024BVG_at; Start 1403; Stop 1427
tagacaggttggatgaatttaaacg

SEQ ID NO: 95920 - DNA, 25 bp, Artificial
  probe
  misc_feature (1)..(25): SEQ ID NO: 7135; WAN024BVG_at; Start 457; Stop 481
gatatctttctcaatcaatcagcag

SEQ ID NO: 95921 - DNA, 25 bp, Artificial
  probe
  misc_feature (1)..(25): SEQ ID NO: 7135; WAN024BVG_at; Start 471; Stop 495
tcaatcagcagaggaattacatgaa

SEQ ID NO: 95922 - DNA, 25 bp, Artificial
  probe
  misc_feature (1)..(25): SEQ ID NO: 7135; WAN024BVG_at; Start 990; Stop 1014
tataggtgacaatactaattctcgg

SEQ ID NO: 95923 - DNA, 25 bp, Artificial
  probe
  misc_feature (1)..(25): SEQ ID NO: 7135; WAN024BVG_at; Start 619; Stop 643
ttggaaacagaaaaagcagaatact

SEQ ID NO: 95924 - DNA, 25 bp, Artificial
  probe
  misc_feature (1)..(25): SEQ ID NO: 7135; WAN024BVG_at; Start 973; Stop 997
tatcagtgctatgtcactataggtg

SEQ ID NO: 95925 - DNA, 25 bp, Artificial
  probe
  misc_feature (1)..(25): SEQ ID NO: 7135; WAN024BVG_at; Start 738; Stop 762
ccttcaagatgatcaaaaagctatt

SEQ ID NO: 95926 - DNA, 25 bp, Artificial
  probe
  misc_feature (1)..(25): SEQ ID NO: 7135; WAN024BVG_at; Start 226; Stop 250
gctcgtcaaagttatgatagccagt

SEQ ID NO: 95927 - DNA, 25 bp, Artificial
  probe
  misc_feature (1)..(25): SEQ ID NO: 7135; WAN024BVG_at; Start 1185; Stop 1209
tagaggtactgcgaaatcattagaa

SEQ ID NO: 95928 - DNA, 25 bp, Artificial
  probe
  misc_feature (1)..(25): SEQ ID NO: 7135; WAN024BVG_at; Start 1280; Stop 1304
cggagtttaatctttacaatgaagc

SEQ ID NO: 95929 - DNA, 25 bp, Artificial
  probe
  misc_feature (1)..(25): SEQ ID NO: 7135; WAN024BVG_at; Start 634; Stop 658
gcagaatactactacaacctataca

SEQ ID NO: 95930 - DNA, 25 bp, Artificial
  probe
  misc_feature (1)..(25): SEQ ID NO: 7135; WAN024BVG_at; Start 578; Stop 602
gacgagatgttttcaaattagctac

SEQ ID NO: 95931 - DNA, 25 bp, Artificial
  probe
  misc_feature (1)..(25): SEQ ID NO: 7135; WAN024BVG_at; Start 934; Stop 958
tcggttgttcttcatgaaagtgtac

SEQ ID NO: 95932 - DNA, 25 bp, Artificial
  probe
  misc_feature (1)..(25): SEQ ID NO: 7135; WAN024BVG_at; Start 199; Stop 223
cctagaggaggtgagctaagtttaa

SEQ ID NO: 95933 - DNA, 25 bp, Artificial
  probe
  misc_feature (1)..(25): SEQ ID NO: 7135; WAN024BVG_at; Start 259; Stop 283
tcgatgttacctagagttgaggaca

SEQ ID NO: 95934 - DNA, 25 bp, Artificial
  probe
  misc_feature (1)..(25): SEQ ID NO: 7135; WAN024BVG_at; Start 1156; Stop 1180
gaaaaatattcgctcctaggctact

SEQ ID NO: 95935 - DNA, 25 bp, Artificial
  probe
  misc_feature (1)..(25): SEQ ID NO: 7135; WAN024BVG_at; Start 857; Stop 881
tgggcaaagtagaggaaacaatcat

SEQ ID NO: 95936 - DNA, 25 bp, Artificial
  probe
  misc_feature (1)..(25): SEQ ID NO: 7135; WAN024BVG_at; Start 213; Stop 237
gctaagtttaactgctcgtcaaagt

SEQ ID NO: 95937 - DNA, 25 bp, Artificial
  probe
  misc_feature (1)..(25): SEQ ID NO: 7135; WAN024BVG_at; Start 684; Stop 708
tgtggcagcaaactatatgcttgca

SEQ ID NO: 95938 - DNA, 25 bp, Artificial
  probe
  misc_feature (1)..(25): SEQ ID NO: 7135; WAN024BVG_at; Start 1038; Stop 1062
tatggatccgctttttattgagtac

SEQ ID NO: 95939 - DNA, 25 bp, Artificial
  probe
  misc_feature (1)..(25): SEQ ID NO: 6331; WAN024BVH_at; Start 176; Stop 200
gaatgtttgctggaattctaggcag

SEQ ID NO: 95940 - DNA, 25 bp, Artificial
  probe
  misc_feature (1)..(25): SEQ ID NO: 6331; WAN024BVH_at; Start 1025; Stop 1049
cctattttataggtgatactctggg

SEQ ID NO: 95941 - DNA, 25 bp, Artificial
  probe
  misc_feature (1)..(25): SEQ ID NO: 6331; WAN024BVH_at; Start 331; Stop 355
ggagcggcaacaataattcttttat

SEQ ID NO: 95942 - DNA, 25 bp, Artificial
  probe
  misc_feature (1)..(25): SEQ ID NO: 6331; WAN024BVH_at; Start 302; Stop 326
cattaatctctggtcttatctcagg

SEQ ID NO: 95943 - DNA, 25 bp, Artificial
  probe
  misc_feature (1)..(25): SEQ ID NO: 6331; WAN024BVH_at; Start 419; Stop 443
gattttccagcagtttaggaacttc

SEQ ID NO: 95944 - DNA, 25 bp, Artificial
  probe
  misc_feature (1)..(25): SEQ ID NO: 6331; WAN024BVH_at; Start 728; Stop 752
cagaagtttttattgggcctgttct

SEQ ID NO: 95945 - DNA, 25 bp, Artificial
  probe
  misc_feature (1)..(25): SEQ ID NO: 6331; WAN024BVH_at; Start 679; Stop 703
agtatattttctccttatctacccg

SEQ ID NO: 95946 - DNA, 25 bp, Artificial
  probe
  misc_feature (1)..(25): SEQ ID NO: 6331; WAN024BVH_at; Start 442; Stop 466
tctattggagggatattgtcaggca

SEQ ID NO: 95947 - DNA, 25 bp, Artificial
  probe
  misc_feature (1)..(25): SEQ ID NO: 6331; WAN024BVH_at; Start 391; Stop 415
gacagagtagttacgatttccttaa

SEQ ID NO: 95948 - DNA, 25 bp, Artificial
  probe
  misc_feature (1)..(25): SEQ ID NO: 6331; WAN024BVH_at; Start 966; Stop 990
ggaattatcaatttatccaaaggaa

SEQ ID NO: 95949 - DNA, 25 bp, Artificial
  probe
  misc_feature (1)..(25): SEQ ID NO: 6331; WAN024BVH_at; Start 527; Stop 551
cggcaagtatgctatgtttagtaac

SEQ ID NO: 95950 - DNA, 25 bp, Artificial
  probe
  misc_feature (1)..(25): SEQ ID NO: 6331; WAN024BVH_at; Start 348; Stop 372
tcttttattgcgaacatgggctgtc

SEQ ID NO: 95951 - DNA, 25 bp, Artificial
  probe
  misc_feature (1)..(25): SEQ ID NO: 6331; WAN024BVH_at; Start 91; Stop 115
tctaggagtgttcattcaatttggt

SEQ ID NO: 95952 - DNA, 25 bp, Artificial
  probe
  misc_feature (1)..(25): SEQ ID NO: 6331; WAN024BVH_at; Start 511; Stop 535
cctattgttttagcttcggcaagta

SEQ ID NO: 95953 - DNA, 25 bp, Artificial
  probe
  misc_feature (1)..(25): SEQ ID NO: 6331; WAN024BVH_at; Start 157; Stop 181
tcagcaatggctttttcaggaatgt

SEQ ID NO: 95954 - DNA, 25 bp, Artificial
  probe
  misc_feature (1)..(25): SEQ ID NO: 6331; WAN024BVH_at; Start 24; Stop 48
tataaagtatcctgattctttccag

SEQ ID NO: 95955 - DNA, 25 bp, Artificial
  probe
  misc_feature (1)..(25): SEQ ID NO: 6331; WAN024BVH_at; Start 318; Stop 342
tatctcaggtattggagcggcaaca

SEQ ID NO: 95956 - DNA, 25 bp, Artificial
  probe
  misc_feature (1)..(25): SEQ ID NO: 6331; WAN024BVH_at; Start 495; Stop 519
tcatagtatggcgtatcctattgtt

SEQ ID NO: 95957 - DNA, 25 bp, Artificial
  probe
  misc_feature (1)..(25): SEQ ID NO: 6331; WAN024BVH_at; Start 1038; Stop 1062
tgatactctgggaggatttattgga

SEQ ID NO: 95958 - DNA, 25 bp, Artificial
  probe
  misc_feature (1)..(25): SEQ ID NO: 6331; WAN024BVH_at; Start 936; Stop 960
aaacctatcatcaattacacaagag

SEQ ID NO: 95959 - DNA, 25 bp, Artificial
  probe
  misc_feature (1)..(25): SEQ ID NO: 6331; WAN024BVH_at; Start 1060; Stop 1084
ggaggttggctatttaaccaagata

SEQ ID NO: 95960 - DNA, 25 bp, Artificial
  probe
  misc_feature (1)..(25): SEQ ID NO: 6331; WAN024BVH_at; Start 1121; Stop 1145
tattcaacgctgtgttatttaacag

SEQ ID NO: 95961 - DNA, 25 bp, Artificial
  probe
  misc_feature (1)..(25): SEQ ID NO: 6331; WAN024BVH_at; Start 842; Stop 866
ccgagttgttgatttcgatacttac

SEQ ID NO: 95962 - DNA, 25 bp, Artificial
  probe
  misc_feature (1)..(25): SEQ ID NO: 6331; WAN024BVH_at; Start 1004; Stop 1028
tctatggcatttctcaaacttccta

SEQ ID NO: 95963 - DNA, 25 bp, Artificial
  probe
  misc_feature (1)..(25): SEQ ID NO: 6331; WAN024BVH_at; Start 80; Stop 104
caatgtcactttctaggagtgttca

SEQ ID NO: 95964 - DNA, 25 bp, Artificial
  probe
  misc_feature (1)..(25): SEQ ID NO: 6331; WAN024BVH_at; Start 588; Stop 612
taagagtgaaagagcagaaagaatc

SEQ ID NO: 95965 - DNA, 25 bp, Artificial
  probe
  misc_feature (1)..(25): SEQ ID NO: 6331; WAN024BVH_at; Start 142; Stop 166
tatagtatttcatattcagcaatgg

SEQ ID NO: 95966 - DNA, 25 bp, Artificial
  probe
  misc_feature (1)..(25): SEQ ID NO: 6331; WAN024BVH_at; Start 429; Stop 453
cagtttaggaacttctattggaggg

SEQ ID NO: 95967 - DNA, 25 bp, Artificial
  probe
  misc_feature (1)..(25): SEQ ID NO: 6331; WAN024BVH_at; Start 362; Stop 386
catgggctgtcggaataggaaaaga

SEQ ID NO: 95968 - DNA, 25 bp, Artificial
  probe
  misc_feature (1)..(25): SEQ ID NO: 6331; WAN024BVH_at; Start 239; Stop 263
taggagtaatactatattctatcgg

SEQ ID NO: 95969 - DNA, 25 bp, Artificial
  probe
  misc_feature (1)..(25): SEQ ID NO: 6331; WAN024BVH_at; Start 710; Stop 734
taagacgtcaagaaatatcagaagt

SEQ ID NO: 95970 - DNA, 25 bp, Artificial
  probe
  misc_feature (1)..(25): SEQ ID NO: 6331; WAN024BVH_at; Start 461; Stop 485
caggcattttgctatattgcttaat

SEQ ID NO: 95971 - DNA, 25 bp, Artificial
  probe
  misc_feature (1)..(25): SEQ ID NO: 6331; WAN024BVH_at; Start 655; Stop 679
ggtatcttctcaggtttaattgcta

SEQ ID NO: 95972 - DNA, 25 bp, Artificial
  probe
  misc_feature (1)..(25): SEQ ID NO: 6331; WAN024BVH_at; Start 573; Stop 597
tgacagttttgttgataagagtgaa

SEQ ID NO: 95973 - DNA, 25 bp, Artificial
  probe
  misc_feature (1)..(25): SEQ ID NO: 6729; WAN024BVI_at; Start 216; Stop 240
tagtattactcctattcttatcaga

SEQ ID NO: 95974 - DNA, 25 bp, Artificial
  probe
  misc_feature (1)..(25): SEQ ID NO: 6729; WAN024BVI_at; Start 82; Stop 106
tcttttcctattccgacagcccatg

SEQ ID NO: 95975 - DNA, 25 bp, Artificial
  probe
  misc_feature (1)..(25): SEQ ID NO: 6729; WAN024BVI_at; Start 2; Stop 26
tgcctgacaatatccctccaataga

SEQ ID NO: 95976 - DNA, 25 bp, Artificial
  probe
  misc_feature (1)..(25): SEQ ID NO: 6729; WAN024BVI_at; Start 155; Stop 179
cagagattaatgatatcaaccaatc

SEQ ID NO: 95977 - DNA, 25 bp, Artificial
  probe
  misc_feature (1)..(25): SEQ ID NO: 6729; WAN024BVI_at; Start 20; Stop 44
caatagaagttcctaaactgctgga

SEQ ID NO: 95978 - DNA, 25 bp, Artificial
  probe
  misc_feature (1)..(25): SEQ ID NO: 6729; WAN024BVI_at; Start 133; Stop 157
gctccaatacctgagataagaccag

SEQ ID NO: 95979 - DNA, 25 bp, Artificial
  probe
  misc_feature (1)..(25): SEQ ID NO: 6729; WAN024BVI_at; Start 123; Stop 147
tattgttgccgctccaatacctgag

SEQ ID NO: 95980 - DNA, 25 bp, Artificial
  probe
  misc_feature (1)..(25): SEQ ID NO: 6729; WAN024BVI_at; Start 203; Stop 227
aaccgatagaatatagtattactcc

SEQ ID NO: 95981 - DNA, 25 bp, Artificial
  probe
  misc_feature (1)..(25): SEQ ID NO: 6729; WAN024BVI_at; Start 6; Stop 30
tgacaatatccctccaatagaagtt

SEQ ID NO: 95982 - DNA, 25 bp, Artificial
  probe
  misc_feature (1)..(25): SEQ ID NO: 6729; WAN024BVI_at; Start 12; Stop 36
tatccctccaatagaagttcctaaa

SEQ ID NO: 95983 - DNA, 25 bp, Artificial
  probe
  misc_feature (1)..(25): SEQ ID NO: 6729; WAN024BVI_at; Start 27; Stop 51
agttcctaaactgctggaaaatctt

SEQ ID NO: 95984 - DNA, 25 bp, Artificial
  probe
  misc_feature (1)..(25): SEQ ID NO: 6729; WAN024BVI_at; Start 60; Stop 84
aatcgtaactactctgtctttttct

SEQ ID NO: 95985 - DNA, 25 bp, Artificial
  probe
  misc_feature (1)..(25): SEQ ID NO: 6729; WAN024BVI_at; Start 23; Stop 47
tagaagttcctaaactgctggaaaa

SEQ ID NO: 95986 - DNA, 25 bp, Artificial
  probe
  misc_feature (1)..(25): SEQ ID NO: 6729; WAN024BVI_at; Start 225; Stop 249
tcctattcttatcagatttcttaaa

SEQ ID NO: 95987 - DNA, 25 bp, Artificial
  probe
  misc_feature (1)..(25): SEQ ID NO: 6729; WAN024BVI_at; Start 171; Stop 195
caaccaatcattaggaaataatctc

SEQ ID NO: 95988 - DNA, 25 bp, Artificial
  probe
  misc_feature (1)..(25): SEQ ID NO: 6729; WAN024BVI_at; Start 152; Stop 176
gaccagagattaatgatatcaacca

SEQ ID NO: 95989 - DNA, 25 bp, Artificial
  probe
  misc_feature (1)..(25): SEQ ID NO: 6729; WAN024BVI_at; Start 129; Stop 153
tgccgctccaatacctgagataaga

SEQ ID NO: 95990 - DNA, 25 bp, Artificial
  probe
  misc_feature (1)..(25): SEQ ID NO: 6729; WAN024BVI_at; Start 93; Stop 117
tccgacagcccatgttcgcaataaa

SEQ ID NO: 95991 - DNA, 25 bp, Artificial
  probe
  misc_feature (1)..(25): SEQ ID NO: 6729; WAN024BVI_at; Start 174; Stop 198
ccaatcattaggaaataatctcaat

SEQ ID NO: 95992 - DNA, 25 bp, Artificial
  probe
  misc_feature (1)..(25): SEQ ID NO: 6729; WAN024BVI_at; Start 142; Stop 166
cctgagataagaccagagattaatg

SEQ ID NO: 95993 - DNA, 25 bp, Artificial
  probe
  misc_feature (1)..(25): SEQ ID NO: 6729; WAN024BVI_at; Start 53; Stop 77
ttaaggaaatcgtaactactctgtc

SEQ ID NO: 95994 - DNA, 25 bp, Artificial
  probe
  misc_feature (1)..(25): SEQ ID NO: 6729; WAN024BVI_at; Start 189; Stop 213
taatctcaataataaaccgatagaa

SEQ ID NO: 95995 - DNA, 25 bp, Artificial
  probe
  misc_feature (1)..(25): SEQ ID NO: 6729; WAN024BVI_at; Start 137; Stop 161
caatacctgagataagaccagagat

SEQ ID NO: 95996 - DNA, 25 bp, Artificial
  probe
  misc_feature (1)..(25): SEQ ID NO: 6729; WAN024BVI_at; Start 56; Stop 80
aggaaatcgtaactactctgtcttt

SEQ ID NO: 95997 - DNA, 25 bp, Artificial
  probe
  misc_feature (1)..(25): SEQ ID NO: 6729; WAN024BVI_at; Start 100; Stop 124
gcccatgttcgcaataaaagaatta

SEQ ID NO: 95998 - DNA, 25 bp, Artificial
  probe
  misc_feature (1)..(25): SEQ ID NO: 6729; WAN024BVI_at; Start 135; Stop 159
tccaatacctgagataagaccagag

SEQ ID NO: 95999 - DNA, 25 bp, Artificial
  probe
  misc_feature (1)..(25): SEQ ID NO: 6729; WAN024BVI_at; Start 166; Stop 190
gatatcaaccaatcattaggaaata

SEQ ID NO: 96000 - DNA, 25 bp, Artificial
  probe
  misc_feature (1)..(25): SEQ ID NO: 6729; WAN024BVI_at; Start 116; Stop 140
aaagaattattgttgccgctccaat

SEQ ID NO: 96001 - DNA, 25 bp, Artificial
  probe
  misc_feature (1)..(25): SEQ ID NO: 6729; WAN024BVI_at; Start 96; Stop 120
gacagcccatgttcgcaataaaaga

SEQ ID NO: 96002 - DNA, 25 bp, Artificial
  probe
  misc_feature (1)..(25): SEQ ID NO: 6729; WAN024BVI_at; Start 9; Stop 33
caatatccctccaatagaagttcct

SEQ ID NO: 96003 - DNA, 25 bp, Artificial
  probe
  misc_feature (1)..(25): SEQ ID NO: 6729; WAN024BVI_at; Start 114; Stop 138
taaaagaattattgttgccgctcca

SEQ ID NO: 96004 - DNA, 25 bp, Artificial
  probe
  misc_feature (1)..(25): SEQ ID NO: 6729; WAN024BVI_at; Start 86; Stop 110
ttcctattccgacagcccatgttcg

SEQ ID NO: 96005 - DNA, 25 bp, Artificial
  probe
  misc_feature (1)..(25): SEQ ID NO: 6729; WAN024BVI_at; Start 126; Stop 150
tgttgccgctccaatacctgagata

SEQ ID NO: 96006 - DNA, 25 bp, Artificial
  probe
  misc_feature (1)..(25): SEQ ID NO: 6729; WAN024BVI_at; Start 25; Stop 49
gaagttcctaaactgctggaaaatc

SEQ ID NO: 96007 - DNA, 25 bp, Artificial
  probe
  misc_feature (1)..(25): SEQ ID NO: 7478; WAN024BVJ_at; Start 55; Stop 79
tctgctaatattcacgattctcgcg

SEQ ID NO: 96008 - DNA, 25 bp, Artificial
  probe
  misc_feature (1)..(25): SEQ ID NO: 7478; WAN024BVJ_at; Start 74; Stop 98
ctcgcgtcttggaagagttgtgtga

SEQ ID NO: 96009 - DNA, 25 bp, Artificial
  probe
  misc_feature (1)..(25): SEQ ID NO: 7478; WAN024BVJ_at; Start 144; Stop 168
cttgactgatttggataagcgtatc

SEQ ID NO: 96010 - DNA, 25 bp, Artificial
  probe
  misc_feature (1)..(25): SEQ ID NO: 7478; WAN024BVJ_at; Start 35; Stop 59
tcaagaaatttgaaattacttctgc

SEQ ID NO: 96011 - DNA, 25 bp, Artificial
  probe
  misc_feature (1)..(25): SEQ ID NO: 7478; WAN024BVJ_at; Start 16; Stop 40
gaccaaaaatcaaaactaatcaaga

SEQ ID NO: 96012 - DNA, 25 bp, Artificial
  probe
  misc_feature (1)..(25): SEQ ID NO: 7478; WAN024BVJ_at; Start 249; Stop 273
tagaggaattggattagcgcgtaca

SEQ ID NO: 96013 - DNA, 25 bp, Artificial
  probe
  misc_feature (1)..(25): SEQ ID NO: 7478; WAN024BVJ_at; Start 156; Stop 180
ggataagcgtatcaatcagtctatt

SEQ ID NO: 96014 - DNA, 25 bp, Artificial
  probe
  misc_feature (1)..(25): SEQ ID NO: 7478; WAN024BVJ_at; Start 63; Stop 87
tattcacgattctcgcgtcttggaa

SEQ ID NO: 96015 - DNA, 25 bp, Artificial
  probe
  misc_feature (1)..(25): SEQ ID NO: 7478; WAN024BVJ_at; Start 276; Stop 300
aacgaatgtgattttgacaaatttg

SEQ ID NO: 96016 - DNA, 25 bp, Artificial
  probe
  misc_feature (1)..(25): SEQ ID NO: 7478; WAN024BVJ_at; Start 168; Stop 192
caatcagtctatttctcgtatccgc

SEQ ID NO: 96017 - DNA, 25 bp, Artificial
  probe
  misc_feature (1)..(25): SEQ ID NO: 7478; WAN024BVJ_at; Start 133; Stop 157
cgaaataaaaccttgactgatttgg

SEQ ID NO: 96018 - DNA, 25 bp, Artificial
  probe
  misc_feature (1)..(25): SEQ ID NO: 7478; WAN024BVJ_at; Start 109; Stop 133
ccgatctttgatgatagtgcttttc

SEQ ID NO: 96019 - DNA, 25 bp, Artificial
  probe
  misc_feature (1)..(25): SEQ ID NO: 7478; WAN024BVJ_at; Start 91; Stop 115
ttgtgtgagagtaaggagccgatct

SEQ ID NO: 96020 - DNA, 25 bp, Artificial
  probe
  misc_feature (1)..(25): SEQ ID NO: 7478; WAN024BVJ_at; Start 188; Stop 212
tccgctgtcgtgtggaacatgtttt

SEQ ID NO: 96021 - DNA, 25 bp, Artificial
  probe
  misc_feature (1)..(25): SEQ ID NO: 7478; WAN024BVJ_at; Start 140; Stop 164
aaaccttgactgatttggataagcg

SEQ ID NO: 96022 - DNA, 25 bp, Artificial
  probe
  misc_feature (1)..(25): SEQ ID NO: 7478; WAN024BVJ_at; Start 322; Stop 346
gaacaaatccaacgattagggttga

SEQ ID NO: 96023 - DNA, 25 bp, Artificial
  probe
  misc_feature (1)..(25): SEQ ID NO: 7478; WAN024BVJ_at; Start 316; Stop 340
cgtttcgaacaaatccaacgattag

SEQ ID NO: 96024 - DNA, 25 bp, Artificial
  probe
  misc_feature (1)..(25): SEQ ID NO: 7478; WAN024BVJ_at; Start 183; Stop 207
tcgtatccgctgtcgtgtggaacat

SEQ ID NO: 96025 - DNA, 25 bp, Artificial
  probe
  misc_feature (1)..(25): SEQ ID NO: 7478; WAN024BVJ_at; Start 46; Stop 70
gaaattacttctgctaatattcacg

SEQ ID NO: 96026 - DNA, 25 bp, Artificial
  probe
  misc_feature (1)..(25): SEQ ID NO: 7478; WAN024BVJ_at; Start 120; Stop 144
tgatagtgcttttcgaaataaaacc

SEQ ID NO: 96027 - DNA, 25 bp, Artificial
  probe
  misc_feature (1)..(25): SEQ ID NO: 7478; WAN024BVJ_at; Start 230; Stop 254
cgatgaaaggaagtcattttagagg

SEQ ID NO: 96028 - DNA, 25 bp, Artificial
  probe
  misc_feature (1)..(25): SEQ ID NO: 7478; WAN024BVJ_at; Start 244; Stop 268
cattttagaggaattggattagcgc

SEQ ID NO: 96029 - DNA, 25 bp, Artificial
  probe
  misc_feature (1)..(25): SEQ ID NO: 7478; WAN024BVJ_at; Start 309; Stop 333
tatctgtcgtttcgaacaaatccaa

SEQ ID NO: 96030 - DNA, 25 bp, Artificial
  probe
  misc_feature (1)..(25): SEQ ID NO: 7478; WAN024BVJ_at; Start 67; Stop 91
cacgattctcgcgtcttggaagagt

SEQ ID NO: 96031 - DNA, 25 bp, Artificial
  probe
  misc_feature (1)..(25): SEQ ID NO: 7478; WAN024BVJ_at; Start 177; Stop 201
tatttctcgtatccgctgtcgtgtg

SEQ ID NO: 96032 - DNA, 25 bp, Artificial
  probe
  misc_feature (1)..(25): SEQ ID NO: 7478; WAN024BVJ_at; Start 259; Stop 283
ggattagcgcgtacaaaaacgaatg

SEQ ID NO: 96033 - DNA, 25 bp, Artificial
  probe
  misc_feature (1)..(25): SEQ ID NO: 7478; WAN024BVJ_at; Start 331; Stop 355
caacgattagggttgaaaacatggg

SEQ ID NO: 96034 - DNA, 25 bp, Artificial
  probe
  misc_feature (1)..(25): SEQ ID NO: 7478; WAN024BVJ_at; Start 102; Stop 126
taaggagccgatctttgatgatagt

SEQ ID NO: 96035 - DNA, 25 bp, Artificial
  probe
  misc_feature (1)..(25): SEQ ID NO: 7478; WAN024BVJ_at; Start 2; Stop 26
tgagtattagtatcgaccaaaaatc

SEQ ID NO: 96036 - DNA, 25 bp, Artificial
  probe
  misc_feature (1)..(25): SEQ ID NO: 7478; WAN024BVJ_at; Start 96; Stop 120
tgagagtaaggagccgatctttgat

SEQ ID NO: 96037 - DNA, 25 bp, Artificial
  probe
  misc_feature (1)..(25): SEQ ID NO: 7478; WAN024BVJ_at; Start 293; Stop 317
caaatttgttgtataatatctgtcg

SEQ ID NO: 96038 - DNA, 25 bp, Artificial
  probe
  misc_feature (1)..(25): SEQ ID NO: 7478; WAN024BVJ_at; Start 265; Stop 289
gcgcgtacaaaaacgaatgtgattt

SEQ ID NO: 96039 - DNA, 25 bp, Artificial
  probe
  misc_feature (1)..(25): SEQ ID NO: 7478; WAN024BVJ_at; Start 221; Stop 245
ttaaaaatacgatgaaaggaagtca

SEQ ID NO: 96040 - DNA, 25 bp, Artificial
  probe
  misc_feature (1)..(25): SEQ ID NO: 7478; WAN024BVJ_at; Start 196; Stop 220
cgtgtggaacatgtttttggtgtta

SEQ ID NO: 96041 - DNA, 25 bp, Artificial
  probe
  misc_feature (1)..(25): SEQ ID NO: 6635; WAN024BVK_at; Start 144; Stop 168
gtatagagaacgcttgaccaaatca

SEQ ID NO: 96042 - DNA, 25 bp, Artificial
  probe
  misc_feature (1)..(25): SEQ ID NO: 6635; WAN024BVK_at; Start 43; Stop 67
tcagatgatgcgatggaatatcaac

SEQ ID NO: 96043 - DNA, 25 bp, Artificial
  probe
  misc_feature (1)..(25): SEQ ID NO: 6635; WAN024BVK_at; Start 87; Stop 111
tcgtcattccacaggttgtgatgaa

SEQ ID NO: 96044 - DNA, 25 bp, Artificial
  probe
  misc_feature (1)..(25): SEQ ID NO: 6635; WAN024BVK_at; Start 30; Stop 54
tctccataatttatcagatgatgcg

SEQ ID NO: 96045 - DNA, 25 bp, Artificial
  probe
  misc_feature (1)..(25): SEQ ID NO: 6635; WAN024BVK_at; Start 57; Stop 81
ggaatatcaactctttcatcgtctg

SEQ ID NO: 96046 - DNA, 25 bp, Artificial
  probe
  misc_feature (1)..(25): SEQ ID NO: 6635; WAN024BVK_at; Start 15; Stop 39
gctcttgatccaacatctccataat

SEQ ID NO: 96047 - DNA, 25 bp, Artificial
  probe
  misc_feature (1)..(25): SEQ ID NO: 6635; WAN024BVK_at; Start 168; Stop 192
agagaaagaacaagaattatctgag

SEQ ID NO: 96048 - DNA, 25 bp, Artificial
  probe
  misc_feature (1)..(25): SEQ ID NO: 6635; WAN024BVK_at; Start 117; Stop 141
agtacatgatgcaaaaaccatctgg

SEQ ID NO: 96049 - DNA, 25 bp, Artificial
  probe
  misc_feature (1)..(25): SEQ ID NO: 6635; WAN024BVK_at; Start 73; Stop 97
catcgtctgtcatttcgtcattcca

SEQ ID NO: 96050 - DNA, 25 bp, Artificial
  probe
  misc_feature (1)..(25): SEQ ID NO: 6635; WAN024BVK_at; Start 46; Stop 70
gatgatgcgatggaatatcaactct

SEQ ID NO: 96051 - DNA, 25 bp, Artificial
  probe
  misc_feature (1)..(25): SEQ ID NO: 6635; WAN024BVK_at; Start 132; Stop 156
aaccatctggttgtatagagaacgc

SEQ ID NO: 96052 - DNA, 25 bp, Artificial
  probe
  misc_feature (1)..(25): SEQ ID NO: 6635; WAN024BVK_at; Start 149; Stop 173
gagaacgcttgaccaaatcagagaa

SEQ ID NO: 96053 - DNA, 25 bp, Artificial
  probe
  misc_feature (1)..(25): SEQ ID NO: 6635; WAN024BVK_at; Start 80; Stop 104
tgtcatttcgtcattccacaggttg

SEQ ID NO: 96054 - DNA, 25 bp, Artificial
  probe
  misc_feature (1)..(25): SEQ ID NO: 6635; WAN024BVK_at; Start 61; Stop 85
tatcaactctttcatcgtctgtcat

SEQ ID NO: 96055 - DNA, 25 bp, Artificial
  probe
  misc_feature (1)..(25): SEQ ID NO: 6635; WAN024BVK_at; Start 49; Stop 73
gatgcgatggaatatcaactctttc

SEQ ID NO: 96056 - DNA, 25 bp, Artificial
  probe
  misc_feature (1)..(25): SEQ ID NO: 6635; WAN024BVK_at; Start 154; Stop 178
cgcttgaccaaatcagagaaagaac

SEQ ID NO: 96057 - DNA, 25 bp, Artificial
  probe
  misc_feature (1)..(25): SEQ ID NO: 6635; WAN024BVK_at; Start 98; Stop 122
caggttgtgatgaatgtaaagtaca

SEQ ID NO: 96058 - DNA, 25 bp, Artificial
  probe
  misc_feature (1)..(25): SEQ ID NO: 6635; WAN024BVK_at; Start 34; Stop 58
cataatttatcagatgatgcgatgg

SEQ ID NO: 96059 - DNA, 25 bp, Artificial
  probe
  misc_feature (1)..(25): SEQ ID NO: 6635; WAN024BVK_at; Start 12; Stop 36
ggtgctcttgatccaacatctccat

SEQ ID NO: 96060 - DNA, 25 bp, Artificial
  probe
  misc_feature (1)..(25): SEQ ID NO: 6635; WAN024BVK_at; Start 161; Stop 185
ccaaatcagagaaagaacaagaatt

SEQ ID NO: 96061 - DNA, 25 bp, Artificial
  probe
  misc_feature (1)..(25): SEQ ID NO: 6635; WAN024BVK_at; Start 83; Stop 107
catttcgtcattccacaggttgtga

SEQ ID NO: 96062 - DNA, 25 bp, Artificial
  probe
  misc_feature (1)..(25): SEQ ID NO: 6635; WAN024BVK_at; Start 65; Stop 89
aactctttcatcgtctgtcatttcg

SEQ ID NO: 96063 - DNA, 25 bp, Artificial
  probe
  misc_feature (1)..(25): SEQ ID NO: 6635; WAN024BVK_at; Start 121; Stop 145
catgatgcaaaaaccatctggttgt

SEQ ID NO: 96064 - DNA, 25 bp, Artificial
  probe
  misc_feature (1)..(25): SEQ ID NO: 6635; WAN024BVK_at; Start 137; Stop 161
tctggttgtatagagaacgcttgac

SEQ ID NO: 96065 - DNA, 25 bp, Artificial
  probe
  misc_feature (1)..(25): SEQ ID NO: 6635; WAN024BVK_at; Start 151; Stop 175
gaacgcttgaccaaatcagagaaag

SEQ ID NO: 96066 - DNA, 25 bp, Artificial
  probe
  misc_feature (1)..(25): SEQ ID NO: 6635; WAN024BVK_at; Start 134; Stop 158
ccatctggttgtatagagaacgctt

SEQ ID NO: 96067 - DNA, 25 bp, Artificial
  probe
  misc_feature (1)..(25): SEQ ID NO: 6635; WAN024BVK_at; Start 9; Stop 33
taaggtgctcttgatccaacatctc

SEQ ID NO: 96068 - DNA, 25 bp, Artificial
  probe
  misc_feature (1)..(25): SEQ ID NO: 6635; WAN024BVK_at; Start 112; Stop 136
tgtaaagtacatgatgcaaaaacca

SEQ ID NO: 96069 - DNA, 25 bp, Artificial
  probe
  misc_feature (1)..(25): SEQ ID NO: 6635; WAN024BVK_at; Start 140; Stop 164
ggttgtatagagaacgcttgaccaa

SEQ ID NO: 96070 - DNA, 25 bp, Artificial
  probe
  misc_feature (1)..(25): SEQ ID NO: 6635; WAN024BVK_at; Start 94; Stop 118
tccacaggttgtgatgaatgtaaag

SEQ ID NO: 96071 - DNA, 25 bp, Artificial
  probe
  misc_feature (1)..(25): SEQ ID NO: 6635; WAN024BVK_at; Start 158; Stop 182
tgaccaaatcagagaaagaacaaga

SEQ ID NO: 96072 - DNA, 25 bp, Artificial
  probe
  misc_feature (1)..(25): SEQ ID NO: 6635; WAN024BVK_at; Start 3; Stop 27
gatatttaaggtgctcttgatccaa

SEQ ID NO: 96073 - DNA, 25 bp, Artificial
  probe
  misc_feature (1)..(25): SEQ ID NO: 6635; WAN024BVK_at; Start 5; Stop 29
tatttaaggtgctcttgatccaaca

SEQ ID NO: 96074 - DNA, 25 bp, Artificial
  probe
  misc_feature (1)..(25): SEQ ID NO: 6635; WAN024BVK_at; Start 147; Stop 171
tagagaacgcttgaccaaatcagag

SEQ ID NO: 96075 - DNA, 25 bp, Artificial
  probe
  misc_feature (1)..(25): SEQ ID NO: 6811; WAN024BVL_at; Start 80; Stop 104
caatggattgggagcaaattagacc

SEQ ID NO: 96076 - DNA, 25 bp, Artificial
  probe
  misc_feature (1)..(25): SEQ ID NO: 6811; WAN024BVL_at; Start 12; Stop 36
tatagatgatgaacaaacactatca

SEQ ID NO: 96077 - DNA, 25 bp, Artificial
  probe
  misc_feature (1)..(25): SEQ ID NO: 6811; WAN024BVL_at; Start 91; Stop 115
gagcaaattagacctattcttgagc

SEQ ID NO: 96078 - DNA, 25 bp, Artificial
  probe
  misc_feature (1)..(25): SEQ ID NO: 6811; WAN024BVL_at; Start 85; Stop 109
gattgggagcaaattagacctattc

SEQ ID NO: 96079 - DNA, 25 bp, Artificial
  probe
  misc_feature (1)..(25): SEQ ID NO: 6811; WAN024BVL_at; Start 134; Stop 158
aaaaggcggactccctccgcatgat

SEQ ID NO: 96080 - DNA, 25 bp, Artificial
  probe
  misc_feature (1)..(25): SEQ ID NO: 6811; WAN024BVL_at; Start 54; Stop 78
caatccattggaaggcttagataag

SEQ ID NO: 96081 - DNA, 25 bp, Artificial
  probe
  misc_feature (1)..(25): SEQ ID NO: 6811; WAN024BVL_at; Start 100; Stop 124
agacctattcttgagcagattttta

SEQ ID NO: 96082 - DNA, 25 bp, Artificial
  probe
  misc_feature (1)..(25): SEQ ID NO: 6811; WAN024BVL_at; Start 136; Stop 160
aaggcggactccctccgcatgattt

SEQ ID NO: 96083 - DNA, 25 bp, Artificial
  probe
  misc_feature (1)..(25): SEQ ID NO: 6811; WAN024BVL_at; Start 88; Stop 112
tgggagcaaattagacctattcttg

SEQ ID NO: 96084 - DNA, 25 bp, Artificial
  probe
  misc_feature (1)..(25): SEQ ID NO: 6811; WAN024BVL_at; Start 94; Stop 118
caaattagacctattcttgagcaga

SEQ ID NO: 96085 - DNA, 25 bp, Artificial
  probe
  misc_feature (1)..(25): SEQ ID NO: 6811; WAN024BVL_at; Start 138; Stop 162
ggcggactccctccgcatgattttt

SEQ ID NO: 96086 - DNA, 25 bp, Artificial
  probe
  misc_feature (1)..(25): SEQ ID NO: 6811; WAN024BVL_at; Start 18; Stop 42
tgatgaacaaacactatcaaaattg

SEQ ID NO: 96087 - DNA, 25 bp, Artificial
  probe
  misc_feature (1)..(25): SEQ ID NO: 6811; WAN024BVL_at; Start 114; Stop 138
gcagatttttagaaaccatcaaaag

SEQ ID NO: 96088 - DNA, 25 bp, Artificial
  probe
  misc_feature (1)..(25): SEQ ID NO: 6811; WAN024BVL_at; Start 66; Stop 90
aggcttagataaggcaatggattgg

SEQ ID NO: 96089 - DNA, 25 bp, Artificial
  probe
  misc_feature (1)..(25): SEQ ID NO: 6811; WAN024BVL_at; Start 31; Stop 55
ctatcaaaattgagttcaatgggca

SEQ ID NO: 96090 - DNA, 25 bp, Artificial
  probe
  misc_feature (1)..(25): SEQ ID NO: 6811; WAN024BVL_at; Start 50; Stop 74
tgggcaatccattggaaggcttaga

SEQ ID NO: 96091 - DNA, 25 bp, Artificial
  probe
  misc_feature (1)..(25): SEQ ID NO: 6811; WAN024BVL_at; Start 46; Stop 70
tcaatgggcaatccattggaaggct

SEQ ID NO: 96092 - DNA, 25 bp, Artificial
  probe
  misc_feature (1)..(25): SEQ ID NO: 6811; WAN024BVL_at; Start 35; Stop 59
caaaattgagttcaatgggcaatcc

SEQ ID NO: 96093 - DNA, 25 bp, Artificial
  probe
  misc_feature (1)..(25): SEQ ID NO: 6811; WAN024BVL_at; Start 52; Stop 76
ggcaatccattggaaggcttagata

SEQ ID NO: 96094 - DNA, 25 bp, Artificial
  probe
  misc_feature (1)..(25): SEQ ID NO: 6811; WAN024BVL_at; Start 8; Stop 32
tttttatagatgatgaacaaacact

SEQ ID NO: 96095 - DNA, 25 bp, Artificial
  probe
  misc_feature (1)..(25): SEQ ID NO: 6811; WAN024BVL_at; Start 123; Stop 147
tagaaaccatcaaaaggcggactcc

SEQ ID NO: 96096 - DNA, 25 bp, Artificial
  probe
  misc_feature (1)..(25): SEQ ID NO: 6811; WAN024BVL_at; Start 2; Stop 26
tggaattttttatagatgatgaaca

SEQ ID NO: 96097 - DNA, 25 bp, Artificial
  probe
  misc_feature (1)..(25): SEQ ID NO: 6811; WAN024BVL_at; Start 21; Stop 45
tgaacaaacactatcaaaattgagt

SEQ ID NO: 96098 - DNA, 25 bp, Artificial
  probe
  misc_feature (1)..(25): SEQ ID NO: 6811; WAN024BVL_at; Start 122; Stop 146
ttagaaaccatcaaaaggcggactc

SEQ ID NO: 96099 - DNA, 25 bp, Artificial
  probe
  misc_feature (1)..(25): SEQ ID NO: 6811; WAN024BVL_at; Start 70; Stop 94
ttagataaggcaatggattgggagc

SEQ ID NO: 96100 - DNA, 25 bp, Artificial
  probe
  misc_feature (1)..(25): SEQ ID NO: 6811; WAN024BVL_at; Start 57; Stop 81
tccattggaaggcttagataaggca

SEQ ID NO: 96101 - DNA, 25 bp, Artificial
  probe
  misc_feature (1)..(25): SEQ ID NO: 6811; WAN024BVL_at; Start 83; Stop 107
tggattgggagcaaattagacctat

SEQ ID NO: 96102 - DNA, 25 bp, Artificial
  probe
  misc_feature (1)..(25): SEQ ID NO: 6811; WAN024BVL_at; Start 37; Stop 61
aaattgagttcaatgggcaatccat

SEQ ID NO: 96103 - DNA, 25 bp, Artificial
  probe
  misc_feature (1)..(25): SEQ ID NO: 6811; WAN024BVL_at; Start 96; Stop 120
aattagacctattcttgagcagatt

SEQ ID NO: 96104 - DNA, 25 bp, Artificial
  probe
  misc_feature (1)..(25): SEQ ID NO: 6811; WAN024BVL_at; Start 132; Stop 156
tcaaaaggcggactccctccgcatg

SEQ ID NO: 96105 - DNA, 25 bp, Artificial
  probe
  misc_feature (1)..(25): SEQ ID NO: 6811; WAN024BVL_at; Start 73; Stop 97
gataaggcaatggattgggagcaaa

SEQ ID NO: 96106 - DNA, 25 bp, Artificial
  probe
  misc_feature (1)..(25): SEQ ID NO: 6811; WAN024BVL_at; Start 141; Stop 165
ggactccctccgcatgattttttca

SEQ ID NO: 96107 - DNA, 25 bp, Artificial
  probe
  misc_feature (1)..(25): SEQ ID NO: 6811; WAN024BVL_at; Start 59; Stop 83
cattggaaggcttagataaggcaat

SEQ ID NO: 96108 - DNA, 25 bp, Artificial
  probe
  misc_feature (1)..(25): SEQ ID NO: 6811; WAN024BVL_at; Start 62; Stop 86
tggaaggcttagataaggcaatgga

SEQ ID NO: 96109 - DNA, 25 bp, Artificial
  probe
  misc_feature (1)..(25): SEQ ID NO: 6859; WAN024BVM_at; Start 306; Stop 330
gcttaaaccttggtctggcgctaaa

SEQ ID NO: 96110 - DNA, 25 bp, Artificial
  probe
  misc_feature (1)..(25): SEQ ID NO: 6859; WAN024BVM_at; Start 91; Stop 115
aatgccaatggcgacatggtgcgtg

SEQ ID NO: 96111 - DNA, 25 bp, Artificial
  probe
  misc_feature (1)..(25): SEQ ID NO: 6859; WAN024BVM_at; Start 238; Stop 262
gatggccaagtcacaaagactttct

SEQ ID NO: 96112 - DNA, 25 bp, Artificial
  probe
  misc_feature (1)..(25): SEQ ID NO: 6859; WAN024BVM_at; Start 27; Stop 51
ggctgtgaagcctcccaaatctttt

SEQ ID NO: 96113 - DNA, 25 bp, Artificial
  probe
  misc_feature (1)..(25): SEQ ID NO: 6859; WAN024BVM_at; Start 130; Stop 154
aaacgcaaactagactgtgaatggg

SEQ ID NO: 96114 - DNA, 25 bp, Artificial
  probe
  misc_feature (1)..(25): SEQ ID NO: 6859; WAN024BVM_at; Start 271; Stop 295
gataggacagctcctagctatacct

SEQ ID NO: 96115 - DNA, 25 bp, Artificial
  probe
  misc_feature (1)..(25): SEQ ID NO: 6859; WAN024BVM_at; Start 162; Stop 186
gactcagggagaaataagtcagctt

SEQ ID NO: 96116 - DNA, 25 bp, Artificial
  probe
  misc_feature (1)..(25): SEQ ID NO: 6859; WAN024BVM_at; Start 119; Stop 143
gtatcacgaccaaacgcaaactaga

SEQ ID NO: 96117 - DNA, 25 bp, Artificial
  probe
  misc_feature (1)..(25): SEQ ID NO: 6859; WAN024BVM_at; Start 234; Stop 258
catggatggccaagtcacaaagact

SEQ ID NO: 96118 - DNA, 25 bp, Artificial
  probe
  misc_feature (1)..(25): SEQ ID NO: 6859; WAN024BVM_at; Start 296; Stop 320
ttactgagaagcttaaaccttggtc

SEQ ID NO: 96119 - DNA, 25 bp, Artificial
  probe
  misc_feature (1)..(25): SEQ ID NO: 6859; WAN024BVM_at; Start 153; Stop 177
gggtatgatgactcagggagaaata

SEQ ID NO: 96120 - DNA, 25 bp, Artificial
  probe
  misc_feature (1)..(25): SEQ ID NO: 6859; WAN024BVM_at; Start 49; Stop 73
tttcaagtcggtattcaagatatcg

SEQ ID NO: 96121 - DNA, 25 bp, Artificial
  probe
  misc_feature (1)..(25): SEQ ID NO: 6859; WAN024BVM_at; Start 260; Stop 284
tctatgtcggtgataggacagctcc

SEQ ID NO: 96122 - DNA, 25 bp, Artificial
  probe
  misc_feature (1)..(25): SEQ ID NO: 6859; WAN024BVM_at; Start 69; Stop 93
tatcgatggagagacagggcgtaat

SEQ ID NO: 96123 - DNA, 25 bp, Artificial
  probe
  misc_feature (1)..(25): SEQ ID NO: 6859; WAN024BVM_at; Start 23; Stop 47
gggtggctgtgaagcctcccaaatc

SEQ ID NO: 96124 - DNA, 25 bp, Artificial
  probe
  misc_feature (1)..(25): SEQ ID NO: 6859; WAN024BVM_at; Start 81; Stop 105
gacagggcgtaatgccaatggcgac

SEQ ID NO: 96125 - DNA, 25 bp, Artificial
  probe
  misc_feature (1)..(25): SEQ ID NO: 6859; WAN024BVM_at; Start 210; Stop 234
ttttgaggtatcttatccagacccc

SEQ ID NO: 96126 - DNA, 25 bp, Artificial
  probe
  misc_feature (1)..(25): SEQ ID NO: 6859; WAN024BVM_at; Start 324; Stop 348
cgctaaatttaatctggtagagagg

SEQ ID NO: 96127 - DNA, 25 bp, Artificial
  probe
  misc_feature (1)..(25): SEQ ID NO: 6859; WAN024BVM_at; Start 282; Stop 306
tcctagctatacctttactgagaag

SEQ ID NO: 96128 - DNA, 25 bp, Artificial
  probe
  misc_feature (1)..(25): SEQ ID NO: 6859; WAN024BVM_at; Start 177; Stop 201
aagtcagcttttacatgctgtatca

SEQ ID NO: 96129 - DNA, 25 bp, Artificial
  probe
  misc_feature (1)..(25): SEQ ID NO: 6859; WAN024BVM_at; Start 316; Stop 340
tggtctggcgctaaatttaatctgg

SEQ ID NO: 96130 - DNA, 25 bp, Artificial
  probe
  misc_feature (1)..(25): SEQ ID NO: 6859; WAN024BVM_at; Start 126; Stop 150
gaccaaacgcaaactagactgtgaa

SEQ ID NO: 96131 - DNA, 25 bp, Artificial
  probe
  misc_feature (1)..(25): SEQ ID NO: 6859; WAN024BVM_at; Start 35; Stop 59
agcctcccaaatcttttcaagtcgg

SEQ ID NO: 96132 - DNA, 25 bp, Artificial
  probe
  misc_feature (1)..(25): SEQ ID NO: 6859; WAN024BVM_at; Start 249; Stop 273
cacaaagactttctatgtcggtgat

SEQ ID NO: 96133 - DNA, 25 bp, Artificial
  probe
  misc_feature (1)..(25): SEQ ID NO: 6859; WAN024BVM_at; Start 110; Stop 134
tgcgtgaccgtatcacgaccaaacg

SEQ ID NO: 96134 - DNA, 25 bp, Artificial
  probe
  misc_feature (1)..(25): SEQ ID NO: 6859; WAN024BVM_at; Start 96; Stop 120
caatggcgacatggtgcgtgaccgt

SEQ ID NO: 96135 - DNA, 25 bp, Artificial
  probe
  misc_feature (1)..(25): SEQ ID NO: 6859; WAN024BVM_at; Start 193; Stop 217
gctgtatcatctaaattttttgagg

SEQ ID NO: 96136 - DNA, 25 bp, Artificial
  probe
  misc_feature (1)..(25): SEQ ID NO: 6859; WAN024BVM_at; Start 223; Stop 247
tatccagaccccatggatggccaag

SEQ ID NO: 96137 - DNA, 25 bp, Artificial
  probe
  misc_feature (1)..(25): SEQ ID NO: 6859; WAN024BVM_at; Start 303; Stop 327
gaagcttaaaccttggtctggcgct

SEQ ID NO: 96138 - DNA, 25 bp, Artificial
  probe
  misc_feature (1)..(25): SEQ ID NO: 6859; WAN024BVM_at; Start 103; Stop 127
gacatggtgcgtgaccgtatcacga

SEQ ID NO: 96139 - DNA, 25 bp, Artificial
  probe
  misc_feature (1)..(25): SEQ ID NO: 6859; WAN024BVM_at; Start 214; Stop 238
gaggtatcttatccagaccccatgg

SEQ ID NO: 96140 - DNA, 25 bp, Artificial
  probe
  misc_feature (1)..(25): SEQ ID NO: 6859; WAN024BVM_at; Start 166; Stop 190
cagggagaaataagtcagcttttac

SEQ ID NO: 96141 - DNA, 25 bp, Artificial
  probe
  misc_feature (1)..(25): SEQ ID NO: 6859; WAN024BVM_at; Start 264; Stop 288
tgtcggtgataggacagctcctagc

SEQ ID NO: 96142 - DNA, 25 bp, Artificial
  probe
  misc_feature (1)..(25): SEQ ID NO: 6859; WAN024BVM_at; Start 64; Stop 88
caagatatcgatggagagacagggc

SEQ ID NO: 96143 - DNA, 25 bp, Artificial
  probe
  misc_feature (1)..(25): SEQ ID NO: 6684; WAN024BVN_at; Start 63; Stop 87
acttggacgagtagtcagcagtgcg

SEQ ID NO: 96144 - DNA, 25 bp, Artificial
  probe
  misc_feature (1)..(25): SEQ ID NO: 6684; WAN024BVN_at; Start 58; Stop 82
caaacacttggacgagtagtcagca

SEQ ID NO: 96145 - DNA, 25 bp, Artificial
  probe
  misc_feature (1)..(25): SEQ ID NO: 6684; WAN024BVN_at; Start 142; Stop 166
gacatcgttattcaaatcgcaggcc

SEQ ID NO: 96146 - DNA, 25 bp, Artificial
  probe
  misc_feature (1)..(25): SEQ ID NO: 6684; WAN024BVN_at; Start 132; Stop 156
tagcgacggcgacatcgttattcaa

SEQ ID NO: 96147 - DNA, 25 bp, Artificial
  probe
  misc_feature (1)..(25): SEQ ID NO: 6684; WAN024BVN_at; Start 147; Stop 171
cgttattcaaatcgcaggccatgag

SEQ ID NO: 96148 - DNA, 25 bp, Artificial
  probe
  misc_feature (1)..(25): SEQ ID NO: 6684; WAN024BVN_at; Start 118; Stop 142
caaggtggtttttctagcgacggcg

SEQ ID NO: 96149 - DNA, 25 bp, Artificial
  probe
  misc_feature (1)..(25): SEQ ID NO: 6684; WAN024BVN_at; Start 121; Stop 145
ggtggtttttctagcgacggcgaca

SEQ ID NO: 96150 - DNA, 25 bp, Artificial
  probe
  misc_feature (1)..(25): SEQ ID NO: 6684; WAN024BVN_at; Start 94; Stop 118
aatgccatggctggtattagtccac

SEQ ID NO: 96151 - DNA, 25 bp, Artificial
  probe
  misc_feature (1)..(25): SEQ ID NO: 6684; WAN024BVN_at; Start 99; Stop 123
catggctggtattagtccacaaggt

SEQ ID NO: 96152 - DNA, 25 bp, Artificial
  probe
  misc_feature (1)..(25): SEQ ID NO: 6684; WAN024BVN_at; Start 115; Stop 139
ccacaaggtggtttttctagcgacg

SEQ ID NO: 96153 - DNA, 25 bp, Artificial
  probe
  misc_feature (1)..(25): SEQ ID NO: 6684; WAN024BVN_at; Start 156; Stop 180
aatcgcaggccatgagttcggacgg

SEQ ID NO: 96154 - DNA, 25 bp, Artificial
  probe
  misc_feature (1)..(25): SEQ ID NO: 6684; WAN024BVN_at; Start 126; Stop 150
tttttctagcgacggcgacatcgtt

SEQ ID NO: 96155 - DNA, 25 bp, Artificial
  probe
  misc_feature (1)..(25): SEQ ID NO: 6684; WAN024BVN_at; Start 136; Stop 160
gacggcgacatcgttattcaaatcg

SEQ ID NO: 96156 - DNA, 25 bp, Artificial
  probe
  misc_feature (1)..(25): SEQ ID NO: 6684; WAN024BVN_at; Start 18; Stop 42
taaagaggcggtcgtaccacttgaa

SEQ ID NO: 96157 - DNA, 25 bp, Artificial
  probe
  misc_feature (1)..(25): SEQ ID NO: 6684; WAN024BVN_at; Start 49; Stop 73
ggatttatccaaacacttggacgag

SEQ ID NO: 96158 - DNA, 25 bp, Artificial
  probe
  misc_feature (1)..(25): SEQ ID NO: 6684; WAN024BVN_at; Start 34; Stop 58
ccacttgaaaatacaggatttatcc

SEQ ID NO: 96159 - DNA, 25 bp, Artificial
  probe
  misc_feature (1)..(25): SEQ ID NO: 6684; WAN024BVN_at; Start 165; Stop 189
ccatgagttcggacgggtagctatc

SEQ ID NO: 96160 - DNA, 25 bp, Artificial
  probe
  misc_feature (1)..(25): SEQ ID NO: 6684; WAN024BVN_at; Start 22; Stop 46
gaggcggtcgtaccacttgaaaata

SEQ ID NO: 96161 - DNA, 25 bp, Artificial
  probe
  misc_feature (1)..(25): SEQ ID NO: 6684; WAN024BVN_at; Start 2; Stop 26
tgattggtgaagctggtaaagaggc

SEQ ID NO: 96162 - DNA, 25 bp, Artificial
  probe
  misc_feature (1)..(25): SEQ ID NO: 6684; WAN024BVN_at; Start 26; Stop 50
cggtcgtaccacttgaaaatacagg

SEQ ID NO: 96163 - DNA, 25 bp, Artificial
  probe
  misc_feature (1)..(25): SEQ ID NO: 6684; WAN024BVN_at; Start 173; Stop 197
tcggacgggtagctatccaaggaaa

SEQ ID NO: 96164 - DNA, 25 bp, Artificial
  probe
  misc_feature (1)..(25): SEQ ID NO: 6684; WAN024BVN_at; Start 150; Stop 174
tattcaaatcgcaggccatgagttc

SEQ ID NO: 96165 - DNA, 25 bp, Artificial
  probe
  misc_feature (1)..(25): SEQ ID NO: 6684; WAN024BVN_at; Start 103; Stop 127
gctggtattagtccacaaggtggtt

SEQ ID NO: 96166 - DNA, 25 bp, Artificial
  probe
  misc_feature (1)..(25): SEQ ID NO: 6684; WAN024BVN_at; Start 154; Stop 178
caaatcgcaggccatgagttcggac

SEQ ID NO: 96167 - DNA, 25 bp, Artificial
  probe
  misc_feature (1)..(25): SEQ ID NO: 6684; WAN024BVN_at; Start 30; Stop 54
cgtaccacttgaaaatacaggattt

SEQ ID NO: 96168 - DNA, 25 bp, Artificial
  probe
  misc_feature (1)..(25): SEQ ID NO: 6684; WAN024BVN_at; Start 176; Stop 200
gacgggtagctatccaaggaaatca

SEQ ID NO: 96169 - DNA, 25 bp, Artificial
  probe
  misc_feature (1)..(25): SEQ ID NO: 6684; WAN024BVN_at; Start 84; Stop 108
tgcggtagtaaatgccatggctggt

SEQ ID NO: 96170 - DNA, 25 bp, Artificial
  probe
  misc_feature (1)..(25): SEQ ID NO: 6684; WAN024BVN_at; Start 77; Stop 101
tcagcagtgcggtagtaaatgccat

SEQ ID NO: 96171 - DNA, 25 bp, Artificial
  probe
  misc_feature (1)..(25): SEQ ID NO: 6684; WAN024BVN_at; Start 186; Stop 210
tatccaaggaaatcaacaaggaaca

SEQ ID NO: 96172 - DNA, 25 bp, Artificial
  probe
  misc_feature (1)..(25): SEQ ID NO: 6684; WAN024BVN_at; Start 12; Stop 36
agctggtaaagaggcggtcgtacca

SEQ ID NO: 96173 - DNA, 25 bp, Artificial
  probe
  misc_feature (1)..(25): SEQ ID NO: 6684; WAN024BVN_at; Start 182; Stop 206
tagctatccaaggaaatcaacaagg

SEQ ID NO: 96174 - DNA, 25 bp, Artificial
  probe
  misc_feature (1)..(25): SEQ ID NO: 6684; WAN024BVN_at; Start 169; Stop 193
gagttcggacgggtagctatccaag

SEQ ID NO: 96175 - DNA, 25 bp, Artificial
  probe
  misc_feature (1)..(25): SEQ ID NO: 6684; WAN024BVN_at; Start 81; Stop 105
cagtgcggtagtaaatgccatggct

SEQ ID NO: 96176 - DNA, 25 bp, Artificial
  probe
  misc_feature (1)..(25): SEQ ID NO: 6684; WAN024BVN_at; Start 70; Stop 94
cgagtagtcagcagtgcggtagtaa

SEQ ID NO: 96177 - DNA, 25 bp, Artificial
  probe
  misc_feature (1)..(25): SEQ ID NO: 7311; WAN024BVO_at; Start 24; Stop 48
caatgcggttcttggaacgattgaa

SEQ ID NO: 96178 - DNA, 25 bp, Artificial
  probe
  misc_feature (1)..(25): SEQ ID NO: 7311; WAN024BVO_at; Start 33; Stop 57
tcttggaacgattgaaaatgtagtc

SEQ ID NO: 96179 - DNA, 25 bp, Artificial
  probe
  misc_feature (1)..(25): SEQ ID NO: 7311; WAN024BVO_at; Start 46; Stop 70
gaaaatgtagtcaatggcttcatcg

SEQ ID NO: 96180 - DNA, 25 bp, Artificial
  probe
  misc_feature (1)..(25): SEQ ID NO: 7311; WAN024BVO_at; Start 173; Stop 197
tcgtcgatagttccaacaatcgcca

SEQ ID NO: 96181 - DNA, 25 bp, Artificial
  probe
  misc_feature (1)..(25): SEQ ID NO: 7311; WAN024BVO_at; Start 53; Stop 77
tagtcaatggcttcatcggaatgat

SEQ ID NO: 96182 - DNA, 25 bp, Artificial
  probe
  misc_feature (1)..(25): SEQ ID NO: 7311; WAN024BVO_at; Start 79; Stop 103
aatggagttttaggcgttgtcagaa

SEQ ID NO: 96183 - DNA, 25 bp, Artificial
  probe
  misc_feature (1)..(25): SEQ ID NO: 7311; WAN024BVO_at; Start 62; Stop 86
gcttcatcggaatgattaatggagt

SEQ ID NO: 96184 - DNA, 25 bp, Artificial
  probe
  misc_feature (1)..(25): SEQ ID NO: 7311; WAN024BVO_at; Start 10; Stop 34
tttaagagtgcggtcaatgcggttc

SEQ ID NO: 96185 - DNA, 25 bp, Artificial
  probe
  misc_feature (1)..(25): SEQ ID NO: 7311; WAN024BVO_at; Start 129; Stop 153
tagtgtaagcacagttagcctccct

SEQ ID NO: 96186 - DNA, 25 bp, Artificial
  probe
  misc_feature (1)..(25): SEQ ID NO: 7311; WAN024BVO_at; Start 96; Stop 120
tgtcagaaacttacctggtctagga

SEQ ID NO: 96187 - DNA, 25 bp, Artificial
  probe
  misc_feature (1)..(25): SEQ ID NO: 7311; WAN024BVO_at; Start 152; Stop 176
ctcgtcttgcccgtggtggtatcgt

SEQ ID NO: 96188 - DNA, 25 bp, Artificial
  probe
  misc_feature (1)..(25): SEQ ID NO: 7311; WAN024BVO_at; Start 132; Stop 156
tgtaagcacagttagcctccctcgt

SEQ ID NO: 96189 - DNA, 25 bp, Artificial
  probe
  misc_feature (1)..(25): SEQ ID NO: 7311; WAN024BVO_at; Start 156; Stop 180
tcttgcccgtggtggtatcgtcgat

SEQ ID NO: 96190 - DNA, 25 bp, Artificial
  probe
  misc_feature (1)..(25): SEQ ID NO: 7311; WAN024BVO_at; Start 49; Stop 73
aatgtagtcaatggcttcatcggaa

SEQ ID NO: 96191 - DNA, 25 bp, Artificial
  probe
  misc_feature (1)..(25): SEQ ID NO: 7311; WAN024BVO_at; Start 103; Stop 127
aacttacctggtctaggatgggttg

SEQ ID NO: 96192 - DNA, 25 bp, Artificial
  probe
  misc_feature (1)..(25): SEQ ID NO: 7311; WAN024BVO_at; Start 159; Stop 183
tgcccgtggtggtatcgtcgatagt

SEQ ID NO: 96193 - DNA, 25 bp, Artificial
  probe
  misc_feature (1)..(25): SEQ ID NO: 7311; WAN024BVO_at; Start 69; Stop 93
cggaatgattaatggagttttaggc

SEQ ID NO: 96194 - DNA, 25 bp, Artificial
  probe
  misc_feature (1)..(25): SEQ ID NO: 7311; WAN024BVO_at; Start 19; Stop 43
gcggtcaatgcggttcttggaacga

SEQ ID NO: 96195 - DNA, 25 bp, Artificial
  probe
  misc_feature (1)..(25): SEQ ID NO: 7311; WAN024BVO_at; Start 5; Stop 29
gagcgtttaagagtgcggtcaatgc

SEQ ID NO: 96196 - DNA, 25 bp, Artificial
  probe
  misc_feature (1)..(25): SEQ ID NO: 7311; WAN024BVO_at; Start 178; Stop 202
gatagttccaacaatcgccatgatt

SEQ ID NO: 96197 - DNA, 25 bp, Artificial
  probe
  misc_feature (1)..(25): SEQ ID NO: 7311; WAN024BVO_at; Start 106; Stop 130
ttacctggtctaggatgggttggta

SEQ ID NO: 96198 - DNA, 25 bp, Artificial
  probe
  misc_feature (1)..(25): SEQ ID NO: 7311; WAN024BVO_at; Start 92; Stop 116
gcgttgtcagaaacttacctggtct

SEQ ID NO: 96199 - DNA, 25 bp, Artificial
  probe
  misc_feature (1)..(25): SEQ ID NO: 7311; WAN024BVO_at; Start 27; Stop 51
tgcggttcttggaacgattgaaaat

SEQ ID NO: 96200 - DNA, 25 bp, Artificial
  probe
  misc_feature (1)..(25): SEQ ID NO: 7311; WAN024BVO_at; Start 99; Stop 123
cagaaacttacctggtctaggatgg

SEQ ID NO: 96201 - DNA, 25 bp, Artificial
  probe
  misc_feature (1)..(25): SEQ ID NO: 7311; WAN024BVO_at; Start 136; Stop 160
agcacagttagcctccctcgtcttg

SEQ ID NO: 96202 - DNA, 25 bp, Artificial
  probe
  misc_feature (1)..(25): SEQ ID NO: 7311; WAN024BVO_at; Start 89; Stop 113
taggcgttgtcagaaacttacctgg

SEQ ID NO: 96203 - DNA, 25 bp, Artificial
  probe
  misc_feature (1)..(25): SEQ ID NO: 7311; WAN024BVO_at; Start 126; Stop 150
tggtagtgtaagcacagttagcctc

SEQ ID NO: 96204 - DNA, 25 bp, Artificial
  probe
  misc_feature (1)..(25): SEQ ID NO: 7311; WAN024BVO_at; Start 12; Stop 36
taagagtgcggtcaatgcggttctt

SEQ ID NO: 96205 - DNA, 25 bp, Artificial
  probe
  misc_feature (1)..(25): SEQ ID NO: 7311; WAN024BVO_at; Start 57; Stop 81
caatggcttcatcggaatgattaat

SEQ ID NO: 96206 - DNA, 25 bp, Artificial
  probe
  misc_feature (1)..(25): SEQ ID NO: 7311; WAN024BVO_at; Start 162; Stop 186
ccgtggtggtatcgtcgatagttcc

SEQ ID NO: 96207 - DNA, 25 bp, Artificial
  probe
  misc_feature (1)..(25): SEQ ID NO: 7311; WAN024BVO_at; Start 16; Stop 40
agtgcggtcaatgcggttcttggaa

SEQ ID NO: 96208 - DNA, 25 bp, Artificial
  probe
  misc_feature (1)..(25): SEQ ID NO: 7311; WAN024BVO_at; Start 121; Stop 145
tgggttggtagtgtaagcacagtta

SEQ ID NO: 96209 - DNA, 25 bp, Artificial
  probe
  misc_feature (1)..(25): SEQ ID NO: 7311; WAN024BVO_at; Start 180; Stop 204
tagttccaacaatcgccatgattgg

SEQ ID NO: 96210 - DNA, 25 bp, Artificial
  probe
  misc_feature (1)..(25): SEQ ID NO: 7311; WAN024BVO_at; Start 169; Stop 193
ggtatcgtcgatagttccaacaatc

SEQ ID NO: 96211 - DNA, 25 bp, Artificial
  probe
  misc_feature (1)..(25): SEQ ID NO: 6482; WAN024BVP_at; Start 12; Stop 36
agcaaaaagagctctaaaatcgagc

SEQ ID NO: 96212 - DNA, 25 bp, Artificial
  probe
  misc_feature (1)..(25): SEQ ID NO: 6482; WAN024BVP_at; Start 63; Stop 87
cattcgattttttcaattattagaa

SEQ ID NO: 96213 - DNA, 25 bp, Artificial
  probe
  misc_feature (1)..(25): SEQ ID NO: 6482; WAN024BVP_at; Start 29; Stop 53
aatcgagctctgtgaatgaaggtaa

SEQ ID NO: 96214 - DNA, 25 bp, Artificial
  probe
  misc_feature (1)..(25): SEQ ID NO: 6482; WAN024BVP_at; Start 22; Stop 46
gctctaaaatcgagctctgtgaatg

SEQ ID NO: 96215 - DNA, 25 bp, Artificial
  probe
  misc_feature (1)..(25): SEQ ID NO: 6482; WAN024BVP_at; Start 9; Stop 33
gctagcaaaaagagctctaaaatcg

SEQ ID NO: 96216 - DNA, 25 bp, Artificial
  probe
  misc_feature (1)..(25): SEQ ID NO: 6482; WAN024BVP_at; Start 5; Stop 29
ataagctagcaaaaagagctctaaa

SEQ ID NO: 96217 - DNA, 25 bp, Artificial
  probe
  misc_feature (1)..(25): SEQ ID NO: 6482; WAN024BVP_at; Start 13; Stop 37
gcaaaaagagctctaaaatcgagct

SEQ ID NO: 96218 - DNA, 25 bp, Artificial
  probe
  misc_feature (1)..(25): SEQ ID NO: 6482; WAN024BVP_at; Start 32; Stop 56
cgagctctgtgaatgaaggtaagaa

SEQ ID NO: 96219 - DNA, 25 bp, Artificial
  probe
  misc_feature (1)..(25): SEQ ID NO: 6482; WAN024BVP_at; Start 10; Stop 34
ctagcaaaaagagctctaaaatcga

SEQ ID NO: 96220 - DNA, 25 bp, Artificial
  probe
  misc_feature (1)..(25): SEQ ID NO: 6482; WAN024BVP_at; Start 17; Stop 41
aaagagctctaaaatcgagctctgt

SEQ ID NO: 96221 - DNA, 25 bp, Artificial
  probe
  misc_feature (1)..(25): SEQ ID NO: 6482; WAN024BVP_at; Start 19; Stop 43
agagctctaaaatcgagctctgtga

SEQ ID NO: 96222 - DNA, 25 bp, Artificial
  probe
  misc_feature (1)..(25): SEQ ID NO: 6482; WAN024BVP_at; Start 24; Stop 48
tctaaaatcgagctctgtgaatgaa

SEQ ID NO: 96223 - DNA, 25 bp, Artificial
  probe
  misc_feature (1)..(25): SEQ ID NO: 6482; WAN024BVP_at; Start 23; Stop 47
ctctaaaatcgagctctgtgaatga

SEQ ID NO: 96224 - DNA, 25 bp, Artificial
  probe
  misc_feature (1)..(25): SEQ ID NO: 6482; WAN024BVP_at; Start 27; Stop 51
aaaatcgagctctgtgaatgaaggt

SEQ ID NO: 96225 - DNA, 25 bp, Artificial
  probe
  misc_feature (1)..(25): SEQ ID NO: 6482; WAN024BVP_at; Start 28; Stop 52
aaatcgagctctgtgaatgaaggta

SEQ ID NO: 96226 - DNA, 25 bp, Artificial
  probe
  misc_feature (1)..(25): SEQ ID NO: 6482; WAN024BVP_at; Start 3; Stop 27
gaataagctagcaaaaagagctcta

SEQ ID NO: 96227 - DNA, 25 bp, Artificial
  probe
  misc_feature (1)..(25): SEQ ID NO: 6482; WAN024BVP_at; Start 16; Stop 40
aaaagagctctaaaatcgagctctg

SEQ ID NO: 96228 - DNA, 25 bp, Artificial
  probe
  misc_feature (1)..(25): SEQ ID NO: 6482; WAN024BVP_at; Start 11; Stop 35
tagcaaaaagagctctaaaatcgag

SEQ ID NO: 96229 - DNA, 25 bp, Artificial
  probe
  misc_feature (1)..(25): SEQ ID NO: 6482; WAN024BVP_at; Start 2; Stop 26
tgaataagctagcaaaaagagctct

SEQ ID NO: 96230 - DNA, 25 bp, Artificial
  probe
  misc_feature (1)..(25): SEQ ID NO: 6482; WAN024BVP_at; Start 33; Stop 57
gagctctgtgaatgaaggtaagaaa

SEQ ID NO: 96231 - DNA, 25 bp, Artificial
  probe
  misc_feature (1)..(25): SEQ ID NO: 6482; WAN024BVP_at; Start 21; Stop 45
agctctaaaatcgagctctgtgaat

SEQ ID NO: 96232 - DNA, 25 bp, Artificial
  probe
  misc_feature (1)..(25): SEQ ID NO: 6482; WAN024BVP_at; Start 35; Stop 59
gctctgtgaatgaaggtaagaaact

SEQ ID NO: 96233 - DNA, 25 bp, Artificial
  probe
  misc_feature (1)..(25): SEQ ID NO: 6482; WAN024BVP_at; Start 76; Stop 100
caattattagaaattaagctttcaa

SEQ ID NO: 96234 - DNA, 25 bp, Artificial
  probe
  misc_feature (1)..(25): SEQ ID NO: 6482; WAN024BVP_at; Start 20; Stop 44
gagctctaaaatcgagctctgtgaa

SEQ ID NO: 96235 - DNA, 25 bp, Artificial
  probe
  misc_feature (1)..(25): SEQ ID NO: 6482; WAN024BVP_at; Start 31; Stop 55
tcgagctctgtgaatgaaggtaaga

SEQ ID NO: 96236 - DNA, 25 bp, Artificial
  probe
  misc_feature (1)..(25): SEQ ID NO: 6482; WAN024BVP_at; Start 18; Stop 42
aagagctctaaaatcgagctctgtg

SEQ ID NO: 96237 - DNA, 25 bp, Artificial
  probe
  misc_feature (1)..(25): SEQ ID NO: 6482; WAN024BVP_at; Start 4; Stop 28
aataagctagcaaaaagagctctaa

SEQ ID NO: 96238 - DNA, 25 bp, Artificial
  probe
  misc_feature (1)..(25): SEQ ID NO: 6482; WAN024BVP_at; Start 26; Stop 50
taaaatcgagctctgtgaatgaagg

SEQ ID NO: 96239 - DNA, 25 bp, Artificial
  probe
  misc_feature (1)..(25): SEQ ID NO: 6482; WAN024BVP_at; Start 7; Stop 31
aagctagcaaaaagagctctaaaat

SEQ ID NO: 96240 - DNA, 25 bp, Artificial
  probe
  misc_feature (1)..(25): SEQ ID NO: 6482; WAN024BVP_at; Start 25; Stop 49
ctaaaatcgagctctgtgaatgaag

SEQ ID NO: 96241 - DNA, 25 bp, Artificial
  probe
  misc_feature (1)..(25): SEQ ID NO: 6482; WAN024BVP_at; Start 6; Stop 30
taagctagcaaaaagagctctaaaa

SEQ ID NO: 96242 - DNA, 25 bp, Artificial
  probe
  misc_feature (1)..(25): SEQ ID NO: 6482; WAN024BVP_at; Start 14; Stop 38
caaaaagagctctaaaatcgagctc

SEQ ID NO: 96243 - DNA, 25 bp, Artificial
  probe
  misc_feature (1)..(25): SEQ ID NO: 6482; WAN024BVP_at; Start 34; Stop 58
agctctgtgaatgaaggtaagaaac

SEQ ID NO: 96244 - DNA, 25 bp, Artificial
  probe
  misc_feature (1)..(25): SEQ ID NO: 6482; WAN024BVP_at; Start 30; Stop 54
atcgagctctgtgaatgaaggtaag

SEQ ID NO: 96245 - DNA, 25 bp, Artificial
  probe
  misc_feature (1)..(25): SEQ ID NO: 7237; WAN024BVQ_at; Start 56; Stop 80
gacatccaaggcaagaaatccaaac

SEQ ID NO: 96246 - DNA, 25 bp, Artificial
  probe
  misc_feature (1)..(25): SEQ ID NO: 7237; WAN024BVQ_at; Start 60; Stop 84
tccaaggcaagaaatccaaacctat

SEQ ID NO: 96247 - DNA, 25 bp, Artificial
  probe
  misc_feature (1)..(25): SEQ ID NO: 7237; WAN024BVQ_at; Start 39; Stop 63
tgatgaagtaatggctggacatcca

SEQ ID NO: 96248 - DNA, 25 bp, Artificial
  probe
  misc_feature (1)..(25): SEQ ID NO: 7237; WAN024BVQ_at; Start 77; Stop 101
aaacctattacagttcatcactgat

SEQ ID NO: 96249 - DNA, 25 bp, Artificial
  probe
  misc_feature (1)..(25): SEQ ID NO: 7237; WAN024BVQ_at; Start 64; Stop 88
aggcaagaaatccaaacctattaca

SEQ ID NO: 96250 - DNA, 25 bp, Artificial
  probe
  misc_feature (1)..(25): SEQ ID NO: 7237; WAN024BVQ_at; Start 53; Stop 77
ctggacatccaaggcaagaaatcca

SEQ ID NO: 96251 - DNA, 25 bp, Artificial
  probe
  misc_feature (1)..(25): SEQ ID NO: 7237; WAN024BVQ_at; Start 10; Stop 34
gacctaggcaaaatgacacaagcag

SEQ ID NO: 96252 - DNA, 25 bp, Artificial
  probe
  misc_feature (1)..(25): SEQ ID NO: 7237; WAN024BVQ_at; Start 3; Stop 27
gacactagacctaggcaaaatgaca

SEQ ID NO: 96253 - DNA, 25 bp, Artificial
  probe
  misc_feature (1)..(25): SEQ ID NO: 7237; WAN024BVQ_at; Start 80; Stop 104
cctattacagttcatcactgatttt

SEQ ID NO: 96254 - DNA, 25 bp, Artificial
  probe
  misc_feature (1)..(25): SEQ ID NO: 7237; WAN024BVQ_at; Start 38; Stop 62
ttgatgaagtaatggctggacatcc

SEQ ID NO: 96255 - DNA, 25 bp, Artificial
  probe
  misc_feature (1)..(25): SEQ ID NO: 7237; WAN024BVQ_at; Start 12; Stop 36
cctaggcaaaatgacacaagcagaa

SEQ ID NO: 96256 - DNA, 25 bp, Artificial
  probe
  misc_feature (1)..(25): SEQ ID NO: 7237; WAN024BVQ_at; Start 6; Stop 30
actagacctaggcaaaatgacacaa

SEQ ID NO: 96257 - DNA, 25 bp, Artificial
  probe
  misc_feature (1)..(25): SEQ ID NO: 7237; WAN024BVQ_at; Start 43; Stop 67
gaagtaatggctggacatccaaggc

SEQ ID NO: 96258 - DNA, 25 bp, Artificial
  probe
  misc_feature (1)..(25): SEQ ID NO: 7237; WAN024BVQ_at; Start 42; Stop 66
tgaagtaatggctggacatccaagg

SEQ ID NO: 96259 - DNA, 25 bp, Artificial
  probe
  misc_feature (1)..(25): SEQ ID NO: 7237; WAN024BVQ_at; Start 4; Stop 28
acactagacctaggcaaaatgacac

SEQ ID NO: 96260 - DNA, 25 bp, Artificial
  probe
  misc_feature (1)..(25): SEQ ID NO: 7237; WAN024BVQ_at; Start 2; Stop 26
tgacactagacctaggcaaaatgac

SEQ ID NO: 96261 - DNA, 25 bp, Artificial
  probe
  misc_feature (1)..(25): SEQ ID NO: 7237; WAN024BVQ_at; Start 75; Stop 99
ccaaacctattacagttcatcactg

SEQ ID NO: 96262 - DNA, 25 bp, Artificial
  probe
  misc_feature (1)..(25): SEQ ID NO: 7237; WAN024BVQ_at; Start 52; Stop 76
gctggacatccaaggcaagaaatcc

SEQ ID NO: 96263 - DNA, 25 bp, Artificial
  probe
  misc_feature (1)..(25): SEQ ID NO: 7237; WAN024BVQ_at; Start 70; Stop 94
gaaatccaaacctattacagttcat

SEQ ID NO: 96264 - DNA, 25 bp, Artificial
  probe
  misc_feature (1)..(25): SEQ ID NO: 7237; WAN024BVQ_at; Start 8; Stop 32
tagacctaggcaaaatgacacaagc

SEQ ID NO: 96265 - DNA, 25 bp, Artificial
  probe
  misc_feature (1)..(25): SEQ ID NO: 7237; WAN024BVQ_at; Start 45; Stop 69
agtaatggctggacatccaaggcaa

SEQ ID NO: 96266 - DNA, 25 bp, Artificial
  probe
  misc_feature (1)..(25): SEQ ID NO: 7237; WAN024BVQ_at; Start 7; Stop 31
ctagacctaggcaaaatgacacaag

SEQ ID NO: 96267 - DNA, 25 bp, Artificial
  probe
  misc_feature (1)..(25): SEQ ID NO: 7237; WAN024BVQ_at; Start 47; Stop 71
taatggctggacatccaaggcaaga

SEQ ID NO: 96268 - DNA, 25 bp, Artificial
  probe
  misc_feature (1)..(25): SEQ ID NO: 7237; WAN024BVQ_at; Start 58; Stop 82
catccaaggcaagaaatccaaacct

SEQ ID NO: 96269 - DNA, 25 bp, Artificial
  probe
  misc_feature (1)..(25): SEQ ID NO: 7237; WAN024BVQ_at; Start 34; Stop 58
gaatttgatgaagtaatggctggac

SEQ ID NO: 96270 - DNA, 25 bp, Artificial
  probe
  misc_feature (1)..(25): SEQ ID NO: 7237; WAN024BVQ_at; Start 62; Stop 86
caaggcaagaaatccaaacctatta

SEQ ID NO: 96271 - DNA, 25 bp, Artificial
  probe
  misc_feature (1)..(25): SEQ ID NO: 7237; WAN024BVQ_at; Start 50; Stop 74
tggctggacatccaaggcaagaaat

SEQ ID NO: 96272 - DNA, 25 bp, Artificial
  probe
  misc_feature (1)..(25): SEQ ID NO: 7237; WAN024BVQ_at; Start 46; Stop 70
gtaatggctggacatccaaggcaag

SEQ ID NO: 96273 - DNA, 25 bp, Artificial
  probe
  misc_feature (1)..(25): SEQ ID NO: 7237; WAN024BVQ_at; Start 35; Stop 59
aatttgatgaagtaatggctggaca

SEQ ID NO: 96274 - DNA, 25 bp, Artificial
  probe
  misc_feature (1)..(25): SEQ ID NO: 7237; WAN024BVQ_at; Start 41; Stop 65
atgaagtaatggctggacatccaag

SEQ ID NO: 96275 - DNA, 25 bp, Artificial
  probe
  misc_feature (1)..(25): SEQ ID NO: 7237; WAN024BVQ_at; Start 1; Stop 25
gtgacactagacctaggcaaaatga

SEQ ID NO: 96276 - DNA, 25 bp, Artificial
  probe
  misc_feature (1)..(25): SEQ ID NO: 7237; WAN024BVQ_at; Start 44; Stop 68
aagtaatggctggacatccaaggca

SEQ ID NO: 96277 - DNA, 25 bp, Artificial
  probe
  misc_feature (1)..(25): SEQ ID NO: 7237; WAN024BVQ_at; Start 48; Stop 72
aatggctggacatccaaggcaagaa

SEQ ID NO: 96278 - DNA, 25 bp, Artificial
  probe
  misc_feature (1)..(25): SEQ ID NO: 7237; WAN024BVQ_at; Start 51; Stop 75
ggctggacatccaaggcaagaaatc

SEQ ID NO: 96279 - DNA, 25 bp, Artificial
  probe
  misc_feature (1)..(25): SEQ ID NO: 7080; WAN024BVR_at; Start 107; Stop 131
tactgctttatttaaaccaccgaga

SEQ ID NO: 96280 - DNA, 25 bp, Artificial
  probe
  misc_feature (1)..(25): SEQ ID NO: 7080; WAN024BVR_at; Start 192; Stop 216
ggatttaaaccctgaatatgggcga

SEQ ID NO: 96281 - DNA, 25 bp, Artificial
  probe
  misc_feature (1)..(25): SEQ ID NO: 7080; WAN024BVR_at; Start 205; Stop 229
gaatatgggcgatatatccagcttg

SEQ ID NO: 96282 - DNA, 25 bp, Artificial
  probe
  misc_feature (1)..(25): SEQ ID NO: 7080; WAN024BVR_at; Start 20; Stop 44
taagaattatcaagcgagggcatga

SEQ ID NO: 96283 - DNA, 25 bp, Artificial
  probe
  misc_feature (1)..(25): SEQ ID NO: 7080; WAN024BVR_at; Start 152; Stop 176
ttgagcgagaaaaccaacagacgat

SEQ ID NO: 96284 - DNA, 25 bp, Artificial
  probe
  misc_feature (1)..(25): SEQ ID NO: 7080; WAN024BVR_at; Start 182; Stop 206
cacctagcgaggatttaaaccctga

SEQ ID NO: 96285 - DNA, 25 bp, Artificial
  probe
  misc_feature (1)..(25): SEQ ID NO: 7080; WAN024BVR_at; Start 137; Stop 161
aaaaaagcgcccaaattgagcgaga

SEQ ID NO: 96286 - DNA, 25 bp, Artificial
  probe
  misc_feature (1)..(25): SEQ ID NO: 7080; WAN024BVR_at; Start 188; Stop 212
gcgaggatttaaaccctgaatatgg

SEQ ID NO: 96287 - DNA, 25 bp, Artificial
  probe
  misc_feature (1)..(25): SEQ ID NO: 7080; WAN024BVR_at; Start 212; Stop 236
ggcgatatatccagcttgcaggcgt

SEQ ID NO: 96288 - DNA, 25 bp, Artificial
  probe
  misc_feature (1)..(25): SEQ ID NO: 7080; WAN024BVR_at; Start 214; Stop 238
cgatatatccagcttgcaggcgtca

SEQ ID NO: 96289 - DNA, 25 bp, Artificial
  probe
  misc_feature (1)..(25): SEQ ID NO: 7080; WAN024BVR_at; Start 160; Stop 184
gaaaaccaacagacgatagaaacac

SEQ ID NO: 96290 - DNA, 25 bp, Artificial
  probe
  misc_feature (1)..(25): SEQ ID NO: 7080; WAN024BVR_at; Start 89; Stop 113
tcgtgattttgattggcttactgct

SEQ ID NO: 96291 - DNA, 25 bp, Artificial
  probe
  misc_feature (1)..(25): SEQ ID NO: 7080; WAN024BVR_at; Start 143; Stop 167
gcgcccaaattgagcgagaaaacca

SEQ ID NO: 96292 - DNA, 25 bp, Artificial
  probe
  misc_feature (1)..(25): SEQ ID NO: 7080; WAN024BVR_at; Start 173; Stop 197
cgatagaaacacctagcgaggattt

SEQ ID NO: 96293 - DNA, 25 bp, Artificial
  probe
  misc_feature (1)..(25): SEQ ID NO: 7080; WAN024BVR_at; Start 199; Stop 223
aaccctgaatatgggcgatatatcc

SEQ ID NO: 96294 - DNA, 25 bp, Artificial
  probe
  misc_feature (1)..(25): SEQ ID NO: 7080; WAN024BVR_at; Start 58; Stop 82
gatataagtaacacacaggctgctg

SEQ ID NO: 96295 - DNA, 25 bp, Artificial
  probe
  misc_feature (1)..(25): SEQ ID NO: 7080; WAN024BVR_at; Start 217; Stop 241
tatatccagcttgcaggcgtcaacg

SEQ ID NO: 96296 - DNA, 25 bp, Artificial
  probe
  misc_feature (1)..(25): SEQ ID NO: 7080; WAN024BVR_at; Start 56; Stop 80
tagatataagtaacacacaggctgc

SEQ ID NO: 96297 - DNA, 25 bp, Artificial
  probe
  misc_feature (1)..(25): SEQ ID NO: 7080; WAN024BVR_at; Start 30; Stop 54
caagcgagggcatgacatgaatgag

SEQ ID NO: 96298 - DNA, 25 bp, Artificial
  probe
  misc_feature (1)..(25): SEQ ID NO: 7080; WAN024BVR_at; Start 169; Stop 193
cagacgatagaaacacctagcgagg

SEQ ID NO: 96299 - DNA, 25 bp, Artificial
  probe
  misc_feature (1)..(25): SEQ ID NO: 7080; WAN024BVR_at; Start 156; Stop 180
gcgagaaaaccaacagacgatagaa

SEQ ID NO: 96300 - DNA, 25 bp, Artificial
  probe
  misc_feature (1)..(25): SEQ ID NO: 7080; WAN024BVR_at; Start 1; Stop 25
ctgaacaagtggaatatattaagaa

SEQ ID NO: 96301 - DNA, 25 bp, Artificial
  probe
  misc_feature (1)..(25): SEQ ID NO: 7080; WAN024BVR_at; Start 60; Stop 84
tataagtaacacacaggctgctgtc

SEQ ID NO: 96302 - DNA, 25 bp, Artificial
  probe
  misc_feature (1)..(25): SEQ ID NO: 7080; WAN024BVR_at; Start 99; Stop 123
gattggcttactgctttatttaaac

SEQ ID NO: 96303 - DNA, 25 bp, Artificial
  probe
  misc_feature (1)..(25): SEQ ID NO: 7080; WAN024BVR_at; Start 71; Stop 95
cacaggctgctgtcttaatcgtgat

SEQ ID NO: 96304 - DNA, 25 bp, Artificial
  probe
  misc_feature (1)..(25): SEQ ID NO: 7080; WAN024BVR_at; Start 208; Stop 232
tatgggcgatatatccagcttgcag

SEQ ID NO: 96305 - DNA, 25 bp, Artificial
  probe
  misc_feature (1)..(25): SEQ ID NO: 7080; WAN024BVR_at; Start 219; Stop 243
tatccagcttgcaggcgtcaacgta

SEQ ID NO: 96306 - DNA, 25 bp, Artificial
  probe
  misc_feature (1)..(25): SEQ ID NO: 7080; WAN024BVR_at; Start 24; Stop 48
aattatcaagcgagggcatgacatg

SEQ ID NO: 96307 - DNA, 25 bp, Artificial
  probe
  misc_feature (1)..(25): SEQ ID NO: 7080; WAN024BVR_at; Start 147; Stop 171
ccaaattgagcgagaaaaccaacag

SEQ ID NO: 96308 - DNA, 25 bp, Artificial
  probe
  misc_feature (1)..(25): SEQ ID NO: 7080; WAN024BVR_at; Start 47; Stop 71
tgaatgagctagatataagtaacac

SEQ ID NO: 96309 - DNA, 25 bp, Artificial
  probe
  misc_feature (1)..(25): SEQ ID NO: 7080; WAN024BVR_at; Start 75; Stop 99
ggctgctgtcttaatcgtgattttg

SEQ ID NO: 96310 - DNA, 25 bp, Artificial
  probe
  misc_feature (1)..(25): SEQ ID NO: 7080; WAN024BVR_at; Start 17; Stop 41
tattaagaattatcaagcgagggca

SEQ ID NO: 96311 - DNA, 25 bp, Artificial
  probe
  misc_feature (1)..(25): SEQ ID NO: 7080; WAN024BVR_at; Start 35; Stop 59
gagggcatgacatgaatgagctaga

SEQ ID NO: 96312 - DNA, 25 bp, Artificial
  probe
  misc_feature (1)..(25): SEQ ID NO: 7080; WAN024BVR_at; Start 223; Stop 247
cagcttgcaggcgtcaacgtatggg

SEQ ID NO: 96313 - DNA, 25 bp, Artificial
  probe
  misc_feature (1)..(25): SEQ ID NO: 6903; WAN024BVS_at; Start 204; Stop 228
catagagactcaaaaagctattttg

SEQ ID NO: 96314 - DNA, 25 bp, Artificial
  probe
  misc_feature (1)..(25): SEQ ID NO: 6903; WAN024BVS_at; Start 264; Stop 288
taaaagcaaaggagaggaggaactg

SEQ ID NO: 96315 - DNA, 25 bp, Artificial
  probe
  misc_feature (1)..(25): SEQ ID NO: 6903; WAN024BVS_at; Start 5; Stop 29
ggagggatggaatgaattacatagt

SEQ ID NO: 96316 - DNA, 25 bp, Artificial
  probe
  misc_feature (1)..(25): SEQ ID NO: 6903; WAN024BVS_at; Start 280; Stop 304
gaggaactggatgagtctatcagag

SEQ ID NO: 96317 - DNA, 25 bp, Artificial
  probe
  misc_feature (1)..(25): SEQ ID NO: 6903; WAN024BVS_at; Start 235; Stop 259
gtagcgagcggacaaataacctttg

SEQ ID NO: 96318 - DNA, 25 bp, Artificial
  probe
  misc_feature (1)..(25): SEQ ID NO: 6903; WAN024BVS_at; Start 45; Stop 69
tagtgaaaaaataccagatgaacct

SEQ ID NO: 96319 - DNA, 25 bp, Artificial
  probe
  misc_feature (1)..(25): SEQ ID NO: 6903; WAN024BVS_at; Start 107; Stop 131
gcaatgcaacaaagttagctgtaac

SEQ ID NO: 96320 - DNA, 25 bp, Artificial
  probe
  misc_feature (1)..(25): SEQ ID NO: 6903; WAN024BVS_at; Start 137; Stop 161
gcttattgacaaaacaagcgttgga

SEQ ID NO: 96321 - DNA, 25 bp, Artificial
  probe
  misc_feature (1)..(25): SEQ ID NO: 6903; WAN024BVS_at; Start 132; Stop 156
tatgggcttattgacaaaacaagcg

SEQ ID NO: 96322 - DNA, 25 bp, Artificial
  probe
  misc_feature (1)..(25): SEQ ID NO: 6903; WAN024BVS_at; Start 174; Stop 198
gacagctatcttgaaaacccttgat

SEQ ID NO: 96323 - DNA, 25 bp, Artificial
  probe
  misc_feature (1)..(25): SEQ ID NO: 6903; WAN024BVS_at; Start 128; Stop 152
taactatgggcttattgacaaaaca

SEQ ID NO: 96324 - DNA, 25 bp, Artificial
  probe
  misc_feature (1)..(25): SEQ ID NO: 6903; WAN024BVS_at; Start 140; Stop 164
tattgacaaaacaagcgttggattt

SEQ ID NO: 96325 - DNA, 25 bp, Artificial
  probe
  misc_feature (1)..(25): SEQ ID NO: 6903; WAN024BVS_at; Start 92; Stop 116
tagctacgtgtatgggcaatgcaac

SEQ ID NO: 96326 - DNA, 25 bp, Artificial
  probe
  misc_feature (1)..(25): SEQ ID NO: 6903; WAN024BVS_at; Start 77; Stop 101
ctaaagagatttttctagctacgtg

SEQ ID NO: 96327 - DNA, 25 bp, Artificial
  probe
  misc_feature (1)..(25): SEQ ID NO: 6903; WAN024BVS_at; Start 219; Stop 243
agctattttgcaaggggtagcgagc

SEQ ID NO: 96328 - DNA, 25 bp, Artificial
  probe
  misc_feature (1)..(25): SEQ ID NO: 6903; WAN024BVS_at; Start 102; Stop 126
tatgggcaatgcaacaaagttagct

SEQ ID NO: 96329 - DNA, 25 bp, Artificial
  probe
  misc_feature (1)..(25): SEQ ID NO: 6903; WAN024BVS_at; Start 82; Stop 106
gagatttttctagctacgtgtatgg

SEQ ID NO: 96330 - DNA, 25 bp, Artificial
  probe
  misc_feature (1)..(25): SEQ ID NO: 6903; WAN024BVS_at; Start 186; Stop 210
gaaaacccttgatacaatcatagag

SEQ ID NO: 96331 - DNA, 25 bp, Artificial
  probe
  misc_feature (1)..(25): SEQ ID NO: 6903; WAN024BVS_at; Start 198; Stop 222
tacaatcatagagactcaaaaagct

SEQ ID NO: 96332 - DNA, 25 bp, Artificial
  probe
  misc_feature (1)..(25): SEQ ID NO: 6903; WAN024BVS_at; Start 61; Stop 85
gatgaaccttattttactaaagaga

SEQ ID NO: 96333 - DNA, 25 bp, Artificial
  probe
  misc_feature (1)..(25): SEQ ID NO: 6903; WAN024BVS_at; Start 122; Stop 146
tagctgtaactatgggcttattgac

SEQ ID NO: 96334 - DNA, 25 bp, Artificial
  probe
  misc_feature (1)..(25): SEQ ID NO: 6903; WAN024BVS_at; Start 26; Stop 50
tagtgaagatataccttgatagtga

SEQ ID NO: 96335 - DNA, 25 bp, Artificial
  probe
  misc_feature (1)..(25): SEQ ID NO: 6903; WAN024BVS_at; Start 155; Stop 179
cgttggatttagaaactgagacagc

SEQ ID NO: 96336 - DNA, 25 bp, Artificial
  probe
  misc_feature (1)..(25): SEQ ID NO: 6903; WAN024BVS_at; Start 191; Stop 215
cccttgatacaatcatagagactca

SEQ ID NO: 96337 - DNA, 25 bp, Artificial
  probe
  misc_feature (1)..(25): SEQ ID NO: 6903; WAN024BVS_at; Start 56; Stop 80
taccagatgaaccttattttactaa

SEQ ID NO: 96338 - DNA, 25 bp, Artificial
  probe
  misc_feature (1)..(25): SEQ ID NO: 6903; WAN024BVS_at; Start 151; Stop 175
caagcgttggatttagaaactgaga

SEQ ID NO: 96339 - DNA, 25 bp, Artificial
  probe
  misc_feature (1)..(25): SEQ ID NO: 6903; WAN024BVS_at; Start 162; Stop 186
tttagaaactgagacagctatcttg

SEQ ID NO: 96340 - DNA, 25 bp, Artificial
  probe
  misc_feature (1)..(25): SEQ ID NO: 6903; WAN024BVS_at; Start 37; Stop 61
taccttgatagtgaaaaaataccag

SEQ ID NO: 96341 - DNA, 25 bp, Artificial
  probe
  misc_feature (1)..(25): SEQ ID NO: 6903; WAN024BVS_at; Start 277; Stop 301
gaggaggaactggatgagtctatca

SEQ ID NO: 96342 - DNA, 25 bp, Artificial
  probe
  misc_feature (1)..(25): SEQ ID NO: 6903; WAN024BVS_at; Start 17; Stop 41
tgaattacatagtgaagatatacct

SEQ ID NO: 96343 - DNA, 25 bp, Artificial
  probe
  misc_feature (1)..(25): SEQ ID NO: 6903; WAN024BVS_at; Start 238; Stop 262
gcgagcggacaaataacctttgtaa

SEQ ID NO: 96344 - DNA, 25 bp, Artificial
  probe
  misc_feature (1)..(25): SEQ ID NO: 6903; WAN024BVS_at; Start 116; Stop 140
caaagttagctgtaactatgggctt

SEQ ID NO: 96345 - DNA, 25 bp, Artificial
  probe
  misc_feature (1)..(25): SEQ ID NO: 6903; WAN024BVS_at; Start 172; Stop 196
gagacagctatcttgaaaacccttg

SEQ ID NO: 96346 - DNA, 25 bp, Artificial
  probe
  misc_feature (1)..(25): SEQ ID NO: 6903; WAN024BVS_at; Start 89; Stop 113
ttctagctacgtgtatgggcaatgc

SEQ ID NO: 96347 - DNA, 25 bp, Artificial
  probe
  misc_feature (1)..(25): SEQ ID NO: 6611; WAN024BVT_at; Start 55; Stop 79
gagaactccataacagggtcagaaa

SEQ ID NO: 96348 - DNA, 25 bp, Artificial
  probe
  misc_feature (1)..(25): SEQ ID NO: 6611; WAN024BVT_at; Start 3; Stop 27
gagtctatcagagaatgacaagcga

SEQ ID NO: 96349 - DNA, 25 bp, Artificial
  probe
  misc_feature (1)..(25): SEQ ID NO: 6611; WAN024BVT_at; Start 6; Stop 30
tctatcagagaatgacaagcgagtt

SEQ ID NO: 96350 - DNA, 25 bp, Artificial
  probe
  misc_feature (1)..(25): SEQ ID NO: 6611; WAN024BVT_at; Start 213; Stop 237
cgagttactagatggcgctaaggct

SEQ ID NO: 96351 - DNA, 25 bp, Artificial
  probe
  misc_feature (1)..(25): SEQ ID NO: 6611; WAN024BVT_at; Start 265; Stop 289
aagcgcctagcggtgttgatgaata

SEQ ID NO: 96352 - DNA, 25 bp, Artificial
  probe
  misc_feature (1)..(25): SEQ ID NO: 6611; WAN024BVT_at; Start 24; Stop 48
gcgagttttaagactaatcaaggta

SEQ ID NO: 96353 - DNA, 25 bp, Artificial
  probe
  misc_feature (1)..(25): SEQ ID NO: 6611; WAN024BVT_at; Start 240; Stop 264
ttacaaccaagtacaggaggagagc

SEQ ID NO: 96354 - DNA, 25 bp, Artificial
  probe
  misc_feature (1)..(25): SEQ ID NO: 6611; WAN024BVT_at; Start 141; Stop 165
taagcacaacatccctattgtaggg

SEQ ID NO: 96355 - DNA, 25 bp, Artificial
  probe
  misc_feature (1)..(25): SEQ ID NO: 6611; WAN024BVT_at; Start 303; Stop 327
ctacaaagaaaccttgaaggaggtg

SEQ ID NO: 96356 - DNA, 25 bp, Artificial
  probe
  misc_feature (1)..(25): SEQ ID NO: 6611; WAN024BVT_at; Start 81; Stop 105
tagcctgacaaccaagctaacagaa

SEQ ID NO: 96357 - DNA, 25 bp, Artificial
  probe
  misc_feature (1)..(25): SEQ ID NO: 6611; WAN024BVT_at; Start 131; Stop 155
gtctagtagttaagcacaacatccc

SEQ ID NO: 96358 - DNA, 25 bp, Artificial
  probe
  misc_feature (1)..(25): SEQ ID NO: 6611; WAN024BVT_at; Start 199; Stop 223
ccggcgaataaaggcgagttactag

SEQ ID NO: 96359 - DNA, 25 bp, Artificial
  probe
  misc_feature (1)..(25): SEQ ID NO: 6611; WAN024BVT_at; Start 87; Stop 111
gacaaccaagctaacagaaagaact

SEQ ID NO: 96360 - DNA, 25 bp, Artificial
  probe
  misc_feature (1)..(25): SEQ ID NO: 6611; WAN024BVT_at; Start 61; Stop 85
tccataacagggtcagaaattagcc

SEQ ID NO: 96361 - DNA, 25 bp, Artificial
  probe
  misc_feature (1)..(25): SEQ ID NO: 6611; WAN024BVT_at; Start 195; Stop 219
tattccggcgaataaaggcgagtta

SEQ ID NO: 96362 - DNA, 25 bp, Artificial
  probe
  misc_feature (1)..(25): SEQ ID NO: 6611; WAN024BVT_at; Start 15; Stop 39
gaatgacaagcgagttttaagacta

SEQ ID NO: 96363 - DNA, 25 bp, Artificial
  probe
  misc_feature (1)..(25): SEQ ID NO: 6611; WAN024BVT_at; Start 73; Stop 97
tcagaaattagcctgacaaccaagc

SEQ ID NO: 96364 - DNA, 25 bp, Artificial
  probe
  misc_feature (1)..(25): SEQ ID NO: 6611; WAN024BVT_at; Start 314; Stop 338
ccttgaaggaggtgggcggatatgt

SEQ ID NO: 96365 - DNA, 25 bp, Artificial
  probe
  misc_feature (1)..(25): SEQ ID NO: 6611; WAN024BVT_at; Start 115; Stop 139
cgtgacattatcaagcgtctagtag

SEQ ID NO: 96366 - DNA, 25 bp, Artificial
  probe
  misc_feature (1)..(25): SEQ ID NO: 6611; WAN024BVT_at; Start 221; Stop 245
tagatggcgctaaggctttttacaa

SEQ ID NO: 96367 - DNA, 25 bp, Artificial
  probe
  misc_feature (1)..(25): SEQ ID NO: 6611; WAN024BVT_at; Start 107; Stop 131
gaactgtacgtgacattatcaagcg

SEQ ID NO: 96368 - DNA, 25 bp, Artificial
  probe
  misc_feature (1)..(25): SEQ ID NO: 6611; WAN024BVT_at; Start 249; Stop 273
agtacaggaggagagcaagcgccta

SEQ ID NO: 96369 - DNA, 25 bp, Artificial
  probe
  misc_feature (1)..(25): SEQ ID NO: 6611; WAN024BVT_at; Start 168; Stop 192
tagatgcggcgtttttagtgggtac

SEQ ID NO: 96370 - DNA, 25 bp, Artificial
  probe
  misc_feature (1)..(25): SEQ ID NO: 6611; WAN024BVT_at; Start 207; Stop 231
taaaggcgagttactagatggcgct

SEQ ID NO: 96371 - DNA, 25 bp, Artificial
  probe
  misc_feature (1)..(25): SEQ ID NO: 6611; WAN024BVT_at; Start 225; Stop 249
tggcgctaaggctttttacaaccaa

SEQ ID NO: 96372 - DNA, 25 bp, Artificial
  probe
  misc_feature (1)..(25): SEQ ID NO: 6611; WAN024BVT_at; Start 260; Stop 284
agagcaagcgcctagcggtgttgat

SEQ ID NO: 96373 - DNA, 25 bp, Artificial
  probe
  misc_feature (1)..(25): SEQ ID NO: 6611; WAN024BVT_at; Start 294; Stop 318
cctagaaagctacaaagaaaccttg

SEQ ID NO: 96374 - DNA, 25 bp, Artificial
  probe
  misc_feature (1)..(25): SEQ ID NO: 6611; WAN024BVT_at; Start 271; Stop 295
ctagcggtgttgatgaatagcgacc

SEQ ID NO: 96375 - DNA, 25 bp, Artificial
  probe
  misc_feature (1)..(25): SEQ ID NO: 6611; WAN024BVT_at; Start 96; Stop 120
gctaacagaaagaactgtacgtgac

SEQ ID NO: 96376 - DNA, 25 bp, Artificial
  probe
  misc_feature (1)..(25): SEQ ID NO: 6611; WAN024BVT_at; Start 51; Stop 75
ggctgagaactccataacagggtca

SEQ ID NO: 96377 - DNA, 25 bp, Artificial
  probe
  misc_feature (1)..(25): SEQ ID NO: 6611; WAN024BVT_at; Start 246; Stop 270
ccaagtacaggaggagagcaagcgc

SEQ ID NO: 96378 - DNA, 25 bp, Artificial
  probe
  misc_feature (1)..(25): SEQ ID NO: 6611; WAN024BVT_at; Start 282; Stop 306
gatgaatagcgacctagaaagctac

SEQ ID NO: 96379 - DNA, 25 bp, Artificial
  probe
  misc_feature (1)..(25): SEQ ID NO: 6611; WAN024BVT_at; Start 123; Stop 147
tatcaagcgtctagtagttaagcac

SEQ ID NO: 96380 - DNA, 25 bp, Artificial
  probe
  misc_feature (1)..(25): SEQ ID NO: 6611; WAN024BVT_at; Start 36; Stop 60
actaatcaaggtaggggctgagaac

SEQ ID NO: 96381 - DNA, 25 bp, Artificial
  probe
  misc_feature (1)..(25): SEQ ID NO: 7031; WAN024BVU_at; Start 40; Stop 64
catggcattctggaggtagtggaaa

SEQ ID NO: 96382 - DNA, 25 bp, Artificial
  probe
  misc_feature (1)..(25): SEQ ID NO: 7031; WAN024BVU_at; Start 73; Stop 97
gaagcgcgtgagaaagtaccgccaa

SEQ ID NO: 96383 - DNA, 25 bp, Artificial
  probe
  misc_feature (1)..(25): SEQ ID NO: 7031; WAN024BVU_at; Start 156; Stop 180
cacgctgaataagtgggaaagtcag

SEQ ID NO: 96384 - DNA, 25 bp, Artificial
  probe
  misc_feature (1)..(25): SEQ ID NO: 7031; WAN024BVU_at; Start 5; Stop 29
ttagcctaagccgagaaagcgagca

SEQ ID NO: 96385 - DNA, 25 bp, Artificial
  probe
  misc_feature (1)..(25): SEQ ID NO: 7031; WAN024BVU_at; Start 69; Stop 93
cctggaagcgcgtgagaaagtaccg

SEQ ID NO: 96386 - DNA, 25 bp, Artificial
  probe
  misc_feature (1)..(25): SEQ ID NO: 7031; WAN024BVU_at; Start 1; Stop 25
atgtttagcctaagccgagaaagcg

SEQ ID NO: 96387 - DNA, 25 bp, Artificial
  probe
  misc_feature (1)..(25): SEQ ID NO: 7031; WAN024BVU_at; Start 211; Stop 235
ggttcaagaatgatttactatttag

SEQ ID NO: 96388 - DNA, 25 bp, Artificial
  probe
  misc_feature (1)..(25): SEQ ID NO: 7031; WAN024BVU_at; Start 64; Stop 88
agatacctggaagcgcgtgagaaag

SEQ ID NO: 96389 - DNA, 25 bp, Artificial
  probe
  misc_feature (1)..(25): SEQ ID NO: 7031; WAN024BVU_at; Start 61; Stop 85
gaaagatacctggaagcgcgtgaga

SEQ ID NO: 96390 - DNA, 25 bp, Artificial
  probe
  misc_feature (1)..(25): SEQ ID NO: 7031; WAN024BVU_at; Start 226; Stop 250
tactatttagtaactgacatctgga

SEQ ID NO: 96391 - DNA, 25 bp, Artificial
  probe
  misc_feature (1)..(25): SEQ ID NO: 7031; WAN024BVU_at; Start 182; Stop 206
gtttaagacgctatcaaccgccgga

SEQ ID NO: 96392 - DNA, 25 bp, Artificial
  probe
  misc_feature (1)..(25): SEQ ID NO: 7031; WAN024BVU_at; Start 199; Stop 223
ccgccggacgatggttcaagaatga

SEQ ID NO: 96393 - DNA, 25 bp, Artificial
  probe
  misc_feature (1)..(25): SEQ ID NO: 7031; WAN024BVU_at; Start 187; Stop 211
agacgctatcaaccgccggacgatg

SEQ ID NO: 96394 - DNA, 25 bp, Artificial
  probe
  misc_feature (1)..(25): SEQ ID NO: 7031; WAN024BVU_at; Start 28; Stop 52
caagacctagcgcatggcattctgg

SEQ ID NO: 96395 - DNA, 25 bp, Artificial
  probe
  misc_feature (1)..(25): SEQ ID NO: 7031; WAN024BVU_at; Start 31; Stop 55
gacctagcgcatggcattctggagg

SEQ ID NO: 96396 - DNA, 25 bp, Artificial
  probe
  misc_feature (1)..(25): SEQ ID NO: 7031; WAN024BVU_at; Start 45; Stop 69
cattctggaggtagtggaaagatac

SEQ ID NO: 96397 - DNA, 25 bp, Artificial
  probe
  misc_feature (1)..(25): SEQ ID NO: 7031; WAN024BVU_at; Start 88; Stop 112
gtaccgccaagattgaccaagttaa

SEQ ID NO: 96398 - DNA, 25 bp, Artificial
  probe
  misc_feature (1)..(25): SEQ ID NO: 7031; WAN024BVU_at; Start 140; Stop 164
tgaaaattagtgacaacacgctgaa

SEQ ID NO: 96399 - DNA, 25 bp, Artificial
  probe
  misc_feature (1)..(25): SEQ ID NO: 7031; WAN024BVU_at; Start 102; Stop 126
gaccaagttaataaatagagttgaa

SEQ ID NO: 96400 - DNA, 25 bp, Artificial
  probe
  misc_feature (1)..(25): SEQ ID NO: 7031; WAN024BVU_at; Start 129; Stop 153
caaagaggaattgaaaattagtgac

SEQ ID NO: 96401 - DNA, 25 bp, Artificial
  probe
  misc_feature (1)..(25): SEQ ID NO: 7031; WAN024BVU_at; Start 84; Stop 108
gaaagtaccgccaagattgaccaag

SEQ ID NO: 96402 - DNA, 25 bp, Artificial
  probe
  misc_feature (1)..(25): SEQ ID NO: 7031; WAN024BVU_at; Start 79; Stop 103
cgtgagaaagtaccgccaagattga

SEQ ID NO: 96403 - DNA, 25 bp, Artificial
  probe
  misc_feature (1)..(25): SEQ ID NO: 7031; WAN024BVU_at; Start 91; Stop 115
ccgccaagattgaccaagttaataa

SEQ ID NO: 96404 - DNA, 25 bp, Artificial
  probe
  misc_feature (1)..(25): SEQ ID NO: 7031; WAN024BVU_at; Start 35; Stop 59
tagcgcatggcattctggaggtagt

SEQ ID NO: 96405 - DNA, 25 bp, Artificial
  probe
  misc_feature (1)..(25): SEQ ID NO: 7031; WAN024BVU_at; Start 236; Stop 260
taactgacatctggaagtttctggg

SEQ ID NO: 96406 - DNA, 25 bp, Artificial
  probe
  misc_feature (1)..(25): SEQ ID NO: 7031; WAN024BVU_at; Start 24; Stop 48
cgagcaagacctagcgcatggcatt

SEQ ID NO: 96407 - DNA, 25 bp, Artificial
  probe
  misc_feature (1)..(25): SEQ ID NO: 7031; WAN024BVU_at; Start 150; Stop 174
tgacaacacgctgaataagtgggaa

SEQ ID NO: 96408 - DNA, 25 bp, Artificial
  probe
  misc_feature (1)..(25): SEQ ID NO: 7031; WAN024BVU_at; Start 193; Stop 217
tatcaaccgccggacgatggttcaa

SEQ ID NO: 96409 - DNA, 25 bp, Artificial
  probe
  misc_feature (1)..(25): SEQ ID NO: 7031; WAN024BVU_at; Start 117; Stop 141
tagagttgaactcaaagaggaattg

SEQ ID NO: 96410 - DNA, 25 bp, Artificial
  probe
  misc_feature (1)..(25): SEQ ID NO: 7031; WAN024BVU_at; Start 205; Stop 229
gacgatggttcaagaatgatttact

SEQ ID NO: 96411 - DNA, 25 bp, Artificial
  probe
  misc_feature (1)..(25): SEQ ID NO: 7031; WAN024BVU_at; Start 172; Stop 196
gaaagtcagggtttaagacgctatc

SEQ ID NO: 96412 - DNA, 25 bp, Artificial
  probe
  misc_feature (1)..(25): SEQ ID NO: 7031; WAN024BVU_at; Start 11; Stop 35
taagccgagaaagcgagcaagacct

SEQ ID NO: 96413 - DNA, 25 bp, Artificial
  probe
  misc_feature (1)..(25): SEQ ID NO: 7031; WAN024BVU_at; Start 17; Stop 41
gagaaagcgagcaagacctagcgca

SEQ ID NO: 96414 - DNA, 25 bp, Artificial
  probe
  misc_feature (1)..(25): SEQ ID NO: 7031; WAN024BVU_at; Start 56; Stop 80
tagtggaaagatacctggaagcgcg

SEQ ID NO: 96415 - DNA, 25 bp, Artificial
  probe
  misc_feature (1)..(25): SEQ ID NO: 6525; WAN024BVV_at; Start 643; Stop 667
gacacgcttttcaacggatttggag

SEQ ID NO: 96416 - DNA, 25 bp, Artificial
  probe
  misc_feature (1)..(25): SEQ ID NO: 6525; WAN024BVV_at; Start 83; Stop 107
gctttaagcctttggtagtccctga

SEQ ID NO: 96417 - DNA, 25 bp, Artificial
  probe
  misc_feature (1)..(25): SEQ ID NO: 6525; WAN024BVV_at; Start 758; Stop 782
tgacaaagatagcaaatagcgtgac

SEQ ID NO: 96418 - DNA, 25 bp, Artificial
  probe
  misc_feature (1)..(25): SEQ ID NO: 6525; WAN024BVV_at; Start 98; Stop 122
tagtccctgaaagtgctgatccgga

SEQ ID NO: 96419 - DNA, 25 bp, Artificial
  probe
  misc_feature (1)..(25): SEQ ID NO: 6525; WAN024BVV_at; Start 554; Stop 578
ccaaggttgaaccaagagtgaagca

SEQ ID NO: 96420 - DNA, 25 bp, Artificial
  probe
  misc_feature (1)..(25): SEQ ID NO: 6525; WAN024BVV_at; Start 277; Stop 301
gaagccgtttctagcgccttgtttg

SEQ ID NO: 96421 - DNA, 25 bp, Artificial
  probe
  misc_feature (1)..(25): SEQ ID NO: 6525; WAN024BVV_at; Start 371; Stop 395
aatctaacaacgtgatgaacgaggc

SEQ ID NO: 96422 - DNA, 25 bp, Artificial
  probe
  misc_feature (1)..(25): SEQ ID NO: 6525; WAN024BVV_at; Start 5; Stop 29
caatttacgaggctagaggtttcca

SEQ ID NO: 96423 - DNA, 25 bp, Artificial
  probe
  misc_feature (1)..(25): SEQ ID NO: 6525; WAN024BVV_at; Start 828; Stop 852
tatagcacgggctgagtatagaaag

SEQ ID NO: 96424 - DNA, 25 bp, Artificial
  probe
  misc_feature (1)..(25): SEQ ID NO: 6525; WAN024BVV_at; Start 540; Stop 564
tgattatccagtccccaaggttgaa

SEQ ID NO: 96425 - DNA, 25 bp, Artificial
  probe
  misc_feature (1)..(25): SEQ ID NO: 6525; WAN024BVV_at; Start 249; Stop 273
tatacaagggacgtctgagagcttc

SEQ ID NO: 96426 - DNA, 25 bp, Artificial
  probe
  misc_feature (1)..(25): SEQ ID NO: 6525; WAN024BVV_at; Start 593; Stop 617
gttacaagccaaaaccaagcggtca

SEQ ID NO: 96427 - DNA, 25 bp, Artificial
  probe
  misc_feature (1)..(25): SEQ ID NO: 6525; WAN024BVV_at; Start 774; Stop 798
tagcgtgacagttgaaccattgcct

SEQ ID NO: 96428 - DNA, 25 bp, Artificial
  probe
  misc_feature (1)..(25): SEQ ID NO: 6525; WAN024BVV_at; Start 386; Stop 410
tgaacgaggcaacctataagcaggt

SEQ ID NO: 96429 - DNA, 25 bp, Artificial
  probe
  misc_feature (1)..(25): SEQ ID NO: 6525; WAN024BVV_at; Start 68; Stop 92
tccagtacattgaacgctttaagcc

SEQ ID NO: 96430 - DNA, 25 bp, Artificial
  probe
  misc_feature (1)..(25): SEQ ID NO: 6525; WAN024BVV_at; Start 742; Stop 766
gagaccgcctatgaactgacaaaga

SEQ ID NO: 96431 - DNA, 25 bp, Artificial
  probe
  misc_feature (1)..(25): SEQ ID NO: 6525; WAN024BVV_at; Start 329; Stop 353
tcaaacatagcatagaaaagccccg

SEQ ID NO: 96432 - DNA, 25 bp, Artificial
  probe
  misc_feature (1)..(25): SEQ ID NO: 6525; WAN024BVV_at; Start 795; Stop 819
gcctattgaagagctagaccgcagt

SEQ ID NO: 96433 - DNA, 25 bp, Artificial
  probe
  misc_feature (1)..(25): SEQ ID NO: 6525; WAN024BVV_at; Start 514; Stop 538
tatcaaaagattgtagagcatggac

SEQ ID NO: 96434 - DNA, 25 bp, Artificial
  probe
  misc_feature (1)..(25): SEQ ID NO: 6525; WAN024BVV_at; Start 155; Stop 179
taagtggtaaggttatgccggagaa

SEQ ID NO: 96435 - DNA, 25 bp, Artificial
  probe
  misc_feature (1)..(25): SEQ ID NO: 6525; WAN024BVV_at; Start 571; Stop 595
gtgaagcaagaaactccggagcgtt

SEQ ID NO: 96436 - DNA, 25 bp, Artificial
  probe
  misc_feature (1)..(25): SEQ ID NO: 6525; WAN024BVV_at; Start 121; Stop 145
gaggaatacaaaagaacccaggcgc

SEQ ID NO: 96437 - DNA, 25 bp, Artificial
  probe
  misc_feature (1)..(25): SEQ ID NO: 6525; WAN024BVV_at; Start 676; Stop 700
gggcgcaacgtagcgctgacacgct

SEQ ID NO: 96438 - DNA, 25 bp, Artificial
  probe
  misc_feature (1)..(25): SEQ ID NO: 6525; WAN024BVV_at; Start 136; Stop 160
acccaggcgccatattgtttaagtg

SEQ ID NO: 96439 - DNA, 25 bp, Artificial
  probe
  misc_feature (1)..(25): SEQ ID NO: 6525; WAN024BVV_at; Start 695; Stop 719
cacgctttgtgggattactcttcaa

SEQ ID NO: 96440 - DNA, 25 bp, Artificial
  probe
  misc_feature (1)..(25): SEQ ID NO: 6525; WAN024BVV_at; Start 626; Stop 650
tgaccatgagaatcattgacacgct

SEQ ID NO: 96441 - DNA, 25 bp, Artificial
  probe
  misc_feature (1)..(25): SEQ ID NO: 6525; WAN024BVV_at; Start 460; Stop 484
ttaacctggtcacaactccaagggc

SEQ ID NO: 96442 - DNA, 25 bp, Artificial
  probe
  misc_feature (1)..(25): SEQ ID NO: 6525; WAN024BVV_at; Start 46; Stop 70
ccatttgataagattgagccgttcc

SEQ ID NO: 96443 - DNA, 25 bp, Artificial
  probe
  misc_feature (1)..(25): SEQ ID NO: 6525; WAN024BVV_at; Start 727; Stop 751
gttgattgtgacctagagaccgcct

SEQ ID NO: 96444 - DNA, 25 bp, Artificial
  probe
  misc_feature (1)..(25): SEQ ID NO: 6525; WAN024BVV_at; Start 420; Stop 444
gattgctgacaagattgggctaccc

SEQ ID NO: 96445 - DNA, 25 bp, Artificial
  probe
  misc_feature (1)..(25): SEQ ID NO: 6525; WAN024BVV_at; Start 811; Stop 835
gaccgcagttttagtagtatagcac

SEQ ID NO: 96446 - DNA, 25 bp, Artificial
  probe
  misc_feature (1)..(25): SEQ ID NO: 6525; WAN024BVV_at; Start 497; Stop 521
caggcgacccagcaacttatcaaaa

SEQ ID NO: 96447 - DNA, 25 bp, Artificial
  probe
  misc_feature (1)..(25): SEQ ID NO: 6525; WAN024BVV_at; Start 478; Stop 502
caagggctaccagtaacaacaggcg

SEQ ID NO: 96448 - DNA, 25 bp, Artificial
  probe
  misc_feature (1)..(25): SEQ ID NO: 6525; WAN024BVV_at; Start 435; Stop 459
tgggctaccctttgacatggccagt

SEQ ID NO: 96449 - DNA, 25 bp, Artificial
  probe
  misc_feature (1)..(25): SEQ ID NO: 7105; WAN024BVW_at; Start 536; Stop 560
taattacaagcaagataagcacggc

SEQ ID NO: 96450 - DNA, 25 bp, Artificial
  probe
  misc_feature (1)..(25): SEQ ID NO: 7105; WAN024BVW_at; Start 921; Stop 945
cactagtggcgatacagtactggtc

SEQ ID NO: 96451 - DNA, 25 bp, Artificial
  probe
  misc_feature (1)..(25): SEQ ID NO: 7105; WAN024BVW_at; Start 165; Stop 189
aactaaggtaaatgagaccacaggg

SEQ ID NO: 96452 - DNA, 25 bp, Artificial
  probe
  misc_feature (1)..(25): SEQ ID NO: 7105; WAN024BVW_at; Start 142; Stop 166
gaatggcgggcagaacataccgaaa

SEQ ID NO: 96453 - DNA, 25 bp, Artificial
  probe
  misc_feature (1)..(25): SEQ ID NO: 7105; WAN024BVW_at; Start 383; Stop 407
gaattaaacccagagagtggccgca

SEQ ID NO: 96454 - DNA, 25 bp, Artificial
  probe
  misc_feature (1)..(25): SEQ ID NO: 7105; WAN024BVW_at; Start 204; Stop 228
ggttgccatacctcagacattcact

SEQ ID NO: 96455 - DNA, 25 bp, Artificial
  probe
  misc_feature (1)..(25): SEQ ID NO: 7105; WAN024BVW_at; Start 125; Stop 149
tctttaaagctggtgaagaatggcg

SEQ ID NO: 96456 - DNA, 25 bp, Artificial
  probe
  misc_feature (1)..(25): SEQ ID NO: 7105; WAN024BVW_at; Start 1465; Stop 1489
gattatgacaaactggacccgtatg

SEQ ID NO: 96457 - DNA, 25 bp, Artificial
  probe
  misc_feature (1)..(25): SEQ ID NO: 7105; WAN024BVW_at; Start 85; Stop 109
gaacaacctcctagaacgatgaagg

SEQ ID NO: 96458 - DNA, 25 bp, Artificial
  probe
  misc_feature (1)..(25): SEQ ID NO: 7105; WAN024BVW_at; Start 857; Stop 881
tttgtaatatcggagatgaagcccc

SEQ ID NO: 96459 - DNA, 25 bp, Artificial
  probe
  misc_feature (1)..(25): SEQ ID NO: 7105; WAN024BVW_at; Start 573; Stop 597
taaacgagtcccaacagatagagag

SEQ ID NO: 96460 - DNA, 25 bp, Artificial
  probe
  misc_feature (1)..(25): SEQ ID NO: 7105; WAN024BVW_at; Start 1429; Stop 1453
aagtatcagcttaaaaaggcccgtg

SEQ ID NO: 96461 - DNA, 25 bp, Artificial
  probe
  misc_feature (1)..(25): SEQ ID NO: 7105; WAN024BVW_at; Start 1317; Stop 1341
tatactgaccagaacactgaagcat

SEQ ID NO: 96462 - DNA, 25 bp, Artificial
  probe
  misc_feature (1)..(25): SEQ ID NO: 7105; WAN024BVW_at; Start 1228; Stop 1252
taccaggaagaaaatgactacttgc

SEQ ID NO: 96463 - DNA, 25 bp, Artificial
  probe
  misc_feature (1)..(25): SEQ ID NO: 7105; WAN024BVW_at; Start 1267; Stop 1291
catgaatacatggaaagaggttggc

SEQ ID NO: 96464 - DNA, 25 bp, Artificial
  probe
  misc_feature (1)..(25): SEQ ID NO: 7105; WAN024BVW_at; Start 1193; Stop 1217
tcgaacccaaagcagtcaaaggcct

SEQ ID NO: 96465 - DNA, 25 bp, Artificial
  probe
  misc_feature (1)..(25): SEQ ID NO: 7105; WAN024BVW_at; Start 827; Stop 851
agcataacttagaaaccctggtagg

SEQ ID NO: 96466 - DNA, 25 bp, Artificial
  probe
  misc_feature (1)..(25): SEQ ID NO: 7105; WAN024BVW_at; Start 806; Stop 830
aacctgcacagtttgctgaaaagca

SEQ ID NO: 96467 - DNA, 25 bp, Artificial
  probe
  misc_feature (1)..(25): SEQ ID NO: 7105; WAN024BVW_at; Start 1287; Stop 1311
ttggcatgagctggacgtggtacct

SEQ ID NO: 96468 - DNA, 25 bp, Artificial
  probe
  misc_feature (1)..(25): SEQ ID NO: 7105; WAN024BVW_at; Start 1005; Stop 1029
gaattatatccccaatggtggcaac

SEQ ID NO: 96469 - DNA, 25 bp, Artificial
  probe
  misc_feature (1)..(25): SEQ ID NO: 7105; WAN024BVW_at; Start 223; Stop 247
ttcactgtagctaaaatactgagcg

SEQ ID NO: 96470 - DNA, 25 bp, Artificial
  probe
  misc_feature (1)..(25): SEQ ID NO: 7105; WAN024BVW_at; Start 397; Stop 421
gagtggccgcagattaagttaatgg

SEQ ID NO: 96471 - DNA, 25 bp, Artificial
  probe
  misc_feature (1)..(25): SEQ ID NO: 7105; WAN024BVW_at; Start 1504; Stop 1528
aaactgggtcgagtaaatcatgctg

SEQ ID NO: 96472 - DNA, 25 bp, Artificial
  probe
  misc_feature (1)..(25): SEQ ID NO: 7105; WAN024BVW_at; Start 871; Stop 895
gatgaagccccaaatgaatacttga

SEQ ID NO: 96473 - DNA, 25 bp, Artificial
  probe
  misc_feature (1)..(25): SEQ ID NO: 7105; WAN024BVW_at; Start 935; Stop 959
cagtactggtcaaccccaaaggacg

SEQ ID NO: 96474 - DNA, 25 bp, Artificial
  probe
  misc_feature (1)..(25): SEQ ID NO: 7105; WAN024BVW_at; Start 65; Stop 89
tcatggaggtcagagagcaagaaca

SEQ ID NO: 96475 - DNA, 25 bp, Artificial
  probe
  misc_feature (1)..(25): SEQ ID NO: 7105; WAN024BVW_at; Start 239; Stop 263
tactgagcgagattgtcacgtttac

SEQ ID NO: 96476 - DNA, 25 bp, Artificial
  probe
  misc_feature (1)..(25): SEQ ID NO: 7105; WAN024BVW_at; Start 952; Stop 976
aaaggacgcccagcctttgaggcta

SEQ ID NO: 96477 - DNA, 25 bp, Artificial
  probe
  misc_feature (1)..(25): SEQ ID NO: 7105; WAN024BVW_at; Start 1243; Stop 1267
gactacttgctttcatgggttaaac

SEQ ID NO: 96478 - DNA, 25 bp, Artificial
  probe
  misc_feature (1)..(25): SEQ ID NO: 7105; WAN024BVW_at; Start 738; Stop 762
caacggtaagggaacatttcagcgc

SEQ ID NO: 96479 - DNA, 25 bp, Artificial
  probe
  misc_feature (1)..(25): SEQ ID NO: 7105; WAN024BVW_at; Start 1020; Stop 1044
tggtggcaacaagacaaaaggctgg

SEQ ID NO: 96480 - DNA, 25 bp, Artificial
  probe
  misc_feature (1)..(25): SEQ ID NO: 7105; WAN024BVW_at; Start 1480; Stop 1504
gacccgtatggttttgagagacaaa

SEQ ID NO: 96481 - DNA, 25 bp, Artificial
  probe
  misc_feature (1)..(25): SEQ ID NO: 7105; WAN024BVW_at; Start 1210; Stop 1234
aaaggccttctagaagaataccagg

SEQ ID NO: 96482 - DNA, 25 bp, Artificial
  probe
  misc_feature (1)..(25): SEQ ID NO: 7105; WAN024BVW_at; Start 317; Stop 341
tagacgagggtatctatacagctag

SEQ ID NO: 96483 - DNA, 25 bp, Artificial
  probe
  misc_feature (1)..(25): SEQ ID NO: 6531; WAN024BVX_at; Start 132; Stop 156
taaagggacgctagtagctgagtac

SEQ ID NO: 96484 - DNA, 25 bp, Artificial
  probe
  misc_feature (1)..(25): SEQ ID NO: 6531; WAN024BVX_at; Start 369; Stop 393
tgataagtctatccctatggactct

SEQ ID NO: 96485 - DNA, 25 bp, Artificial
  probe
  misc_feature (1)..(25): SEQ ID NO: 6531; WAN024BVX_at; Start 23; Stop 47
tcacttacgaatttaaagacctaga

SEQ ID NO: 96486 - DNA, 25 bp, Artificial
  probe
  misc_feature (1)..(25): SEQ ID NO: 6531; WAN024BVX_at; Start 393; Stop 417
tatgactgcttttggtacgttggaa

SEQ ID NO: 96487 - DNA, 25 bp, Artificial
  probe
  misc_feature (1)..(25): SEQ ID NO: 6531; WAN024BVX_at; Start 476; Stop 500
aaggccttgctgattattctggtca

SEQ ID NO: 96488 - DNA, 25 bp, Artificial
  probe
  misc_feature (1)..(25): SEQ ID NO: 6531; WAN024BVX_at; Start 401; Stop 425
cttttggtacgttggaaatgctggg

SEQ ID NO: 96489 - DNA, 25 bp, Artificial
  probe
  misc_feature (1)..(25): SEQ ID NO: 6531; WAN024BVX_at; Start 119; Stop 143
tgacctacaagaataaagggacgct

SEQ ID NO: 96490 - DNA, 25 bp, Artificial
  probe
  misc_feature (1)..(25): SEQ ID NO: 6531; WAN024BVX_at; Start 36; Stop 60
taaagacctagatactgctatggtg

SEQ ID NO: 96491 - DNA, 25 bp, Artificial
  probe
  misc_feature (1)..(25): SEQ ID NO: 6531; WAN024BVX_at; Start 378; Stop 402
tatccctatggactctatgactgct

SEQ ID NO: 96492 - DNA, 25 bp, Artificial
  probe
  misc_feature (1)..(25): SEQ ID NO: 6531; WAN024BVX_at; Start 259; Stop 283
aaacgggagcgcgtgcttcaactca

SEQ ID NO: 96493 - DNA, 25 bp, Artificial
  probe
  misc_feature (1)..(25): SEQ ID NO: 6531; WAN024BVX_at; Start 71; Stop 95
cgctactgggatatatgactggaac

SEQ ID NO: 96494 - DNA, 25 bp, Artificial
  probe
  misc_feature (1)..(25): SEQ ID NO: 6531; WAN024BVX_at; Start 87; Stop 111
gactggaacatattgccagcctgca

SEQ ID NO: 96495 - DNA, 25 bp, Artificial
  probe
  misc_feature (1)..(25): SEQ ID NO: 6531; WAN024BVX_at; Start 219; Stop 243
caagcaaccagtgaacgatgaagca

SEQ ID NO: 96496 - DNA, 25 bp, Artificial
  probe
  misc_feature (1)..(25): SEQ ID NO: 6531; WAN024BVX_at; Start 267; Stop 291
gcgcgtgcttcaactcaaagagtca

SEQ ID NO: 96497 - DNA, 25 bp, Artificial
  probe
  misc_feature (1)..(25): SEQ ID NO: 6531; WAN024BVX_at; Start 190; Stop 214
cgtatttgtgacagtttcaaagact

SEQ ID NO: 96498 - DNA, 25 bp, Artificial
  probe
  misc_feature (1)..(25): SEQ ID NO: 6531; WAN024BVX_at; Start 230; Stop 254
tgaacgatgaagcatttgaagaacg

SEQ ID NO: 96499 - DNA, 25 bp, Artificial
  probe
  misc_feature (1)..(25): SEQ ID NO: 6531; WAN024BVX_at; Start 246; Stop 270
tgaagaacgttataaacgggagcgc

SEQ ID NO: 96500 - DNA, 25 bp, Artificial
  probe
  misc_feature (1)..(25): SEQ ID NO: 6531; WAN024BVX_at; Start 425; Stop 449
gtaatgaaagtattaacctactcca

SEQ ID NO: 96501 - DNA, 25 bp, Artificial
  probe
  misc_feature (1)..(25): SEQ ID NO: 6531; WAN024BVX_at; Start 276; Stop 300
tcaactcaaagagtcagaggacttt

SEQ ID NO: 96502 - DNA, 25 bp, Artificial
  probe
  misc_feature (1)..(25): SEQ ID NO: 6531; WAN024BVX_at; Start 446; Stop 470
tccaaaaattggacgtagagggcga

SEQ ID NO: 96503 - DNA, 25 bp, Artificial
  probe
  misc_feature (1)..(25): SEQ ID NO: 6531; WAN024BVX_at; Start 148; Stop 172
gctgagtacgtggaggataagaaac

SEQ ID NO: 96504 - DNA, 25 bp, Artificial
  probe
  misc_feature (1)..(25): SEQ ID NO: 6531; WAN024BVX_at; Start 341; Stop 365
tattagactatgctgaacgcttgct

SEQ ID NO: 96505 - DNA, 25 bp, Artificial
  probe
  misc_feature (1)..(25): SEQ ID NO: 6531; WAN024BVX_at; Start 61; Stop 85
gcaggtcacgcgctactgggatata

SEQ ID NO: 96506 - DNA, 25 bp, Artificial
  probe
  misc_feature (1)..(25): SEQ ID NO: 6531; WAN024BVX_at; Start 410; Stop 434
cgttggaaatgctgggtaatgaaag

SEQ ID NO: 96507 - DNA, 25 bp, Artificial
  probe
  misc_feature (1)..(25): SEQ ID NO: 6531; WAN024BVX_at; Start 156; Stop 180
cgtggaggataagaaactaaactat

SEQ ID NO: 96508 - DNA, 25 bp, Artificial
  probe
  misc_feature (1)..(25): SEQ ID NO: 6531; WAN024BVX_at; Start 205; Stop 229
ttcaaagactattacaagcaaccag

SEQ ID NO: 96509 - DNA, 25 bp, Artificial
  probe
  misc_feature (1)..(25): SEQ ID NO: 6531; WAN024BVX_at; Start 105; Stop 129
gcctgcaatctcattgacctacaag

SEQ ID NO: 96510 - DNA, 25 bp, Artificial
  probe
  misc_feature (1)..(25): SEQ ID NO: 6531; WAN024BVX_at; Start 312; Stop 336
gaataaggtcacagactacgagctg

SEQ ID NO: 96511 - DNA, 25 bp, Artificial
  probe
  misc_feature (1)..(25): SEQ ID NO: 6531; WAN024BVX_at; Start 48; Stop 72
tactgctatggtggcaggtcacgcg

SEQ ID NO: 96512 - DNA, 25 bp, Artificial
  probe
  misc_feature (1)..(25): SEQ ID NO: 6531; WAN024BVX_at; Start 355; Stop 379
gaacgcttgctttctgataagtcta

SEQ ID NO: 96513 - DNA, 25 bp, Artificial
  probe
  misc_feature (1)..(25): SEQ ID NO: 6531; WAN024BVX_at; Start 177; Stop 201
ctatatctttaaacgtatttgtgac

SEQ ID NO: 96514 - DNA, 25 bp, Artificial
  probe
  misc_feature (1)..(25): SEQ ID NO: 6531; WAN024BVX_at; Start 461; Stop 485
tagagggcgaatataaaggccttgc

SEQ ID NO: 96515 - DNA, 25 bp, Artificial
  probe
  misc_feature (1)..(25): SEQ ID NO: 6531; WAN024BVX_at; Start 325; Stop 349
gactacgagctggaactattagact

SEQ ID NO: 96516 - DNA, 25 bp, Artificial
  probe
  misc_feature (1)..(25): SEQ ID NO: 6531; WAN024BVX_at; Start 297; Stop 321
ctttgagagcttgctgaataaggtc

SEQ ID NO: 96517 - DNA, 25 bp, Artificial
  probe
  misc_feature (1)..(25): SEQ ID NO: 6829; WAN024BVY_at; Start 224; Stop 248
gagccagaaaatactttattatcca

SEQ ID NO: 96518 - DNA, 25 bp, Artificial
  probe
  misc_feature (1)..(25): SEQ ID NO: 6829; WAN024BVY_at; Start 261; Stop 285
gagaaagaaaacaatgagcgaatgc

SEQ ID NO: 96519 - DNA, 25 bp, Artificial
  probe
  misc_feature (1)..(25): SEQ ID NO: 6829; WAN024BVY_at; Start 76; Stop 100
gcaggaagtgaaaaccaagttacga

SEQ ID NO: 96520 - DNA, 25 bp, Artificial
  probe
  misc_feature (1)..(25): SEQ ID NO: 6829; WAN024BVY_at; Start 319; Stop 343
caccgatataaacaaatagccgtct

SEQ ID NO: 96521 - DNA, 25 bp, Artificial
  probe
  misc_feature (1)..(25): SEQ ID NO: 6829; WAN024BVY_at; Start 45; Stop 69
gatgacctactttctacgtttccag

SEQ ID NO: 96522 - DNA, 25 bp, Artificial
  probe
  misc_feature (1)..(25): SEQ ID NO: 6829; WAN024BVY_at; Start 144; Stop 168
tttgagcggtgagcatgaaaaagca

SEQ ID NO: 96523 - DNA, 25 bp, Artificial
  probe
  misc_feature (1)..(25): SEQ ID NO: 6829; WAN024BVY_at; Start 332; Stop 356
aaatagccgtcttaaattttgcgag

SEQ ID NO: 96524 - DNA, 25 bp, Artificial
  probe
  misc_feature (1)..(25): SEQ ID NO: 6829; WAN024BVY_at; Start 128; Stop 152
taccttatcggtgggatttgagcgg

SEQ ID NO: 96525 - DNA, 25 bp, Artificial
  probe
  misc_feature (1)..(25): SEQ ID NO: 6829; WAN024BVY_at; Start 154; Stop 178
gagcatgaaaaagcaatccgtgagg

SEQ ID NO: 96526 - DNA, 25 bp, Artificial
  probe
  misc_feature (1)..(25): SEQ ID NO: 6829; WAN024BVY_at; Start 98; Stop 122
cgatagatgaagaggcttggaaact

SEQ ID NO: 96527 - DNA, 25 bp, Artificial
  probe
  misc_feature (1)..(25): SEQ ID NO: 6829; WAN024BVY_at; Start 243; Stop 267
tatccattattgttacatgagaaag

SEQ ID NO: 96528 - DNA, 25 bp, Artificial
  probe
  misc_feature (1)..(25): SEQ ID NO: 6829; WAN024BVY_at; Start 120; Stop 144
acttgtcttaccttatcggtgggat

SEQ ID NO: 96529 - DNA, 25 bp, Artificial
  probe
  misc_feature (1)..(25): SEQ ID NO: 6829; WAN024BVY_at; Start 178; Stop 202
gggttggagatattcgcccaagaca

SEQ ID NO: 96530 - DNA, 25 bp, Artificial
  probe
  misc_feature (1)..(25): SEQ ID NO: 6829; WAN024BVY_at; Start 363; Stop 387
ccagaacggagagctagaagtgtat

SEQ ID NO: 96531 - DNA, 25 bp, Artificial
  probe
  misc_feature (1)..(25): SEQ ID NO: 6829; WAN024BVY_at; Start 38; Stop 62
gagagcggatgacctactttctacg

SEQ ID NO: 96532 - DNA, 25 bp, Artificial
  probe
  misc_feature (1)..(25): SEQ ID NO: 6829; WAN024BVY_at; Start 214; Stop 238
gagaacaaacgagccagaaaatact

SEQ ID NO: 96533 - DNA, 25 bp, Artificial
  probe
  misc_feature (1)..(25): SEQ ID NO: 6829; WAN024BVY_at; Start 186; Stop 210
gatattcgcccaagacatcaacagt

SEQ ID NO: 96534 - DNA, 25 bp, Artificial
  probe
  misc_feature (1)..(25): SEQ ID NO: 6829; WAN024BVY_at; Start 349; Stop 373
tttgcgagaatccaccagaacggag

SEQ ID NO: 96535 - DNA, 25 bp, Artificial
  probe
  misc_feature (1)..(25): SEQ ID NO: 6829; WAN024BVY_at; Start 192; Stop 216
cgcccaagacatcaacagtatagag

SEQ ID NO: 96536 - DNA, 25 bp, Artificial
  probe
  misc_feature (1)..(25): SEQ ID NO: 6829; WAN024BVY_at; Start 30; Stop 54
gaacgtcagagagcggatgacctac

SEQ ID NO: 96537 - DNA, 25 bp, Artificial
  probe
  misc_feature (1)..(25): SEQ ID NO: 6829; WAN024BVY_at; Start 19; Stop 43
aaaacgatgatgaacgtcagagagc

SEQ ID NO: 96538 - DNA, 25 bp, Artificial
  probe
  misc_feature (1)..(25): SEQ ID NO: 6829; WAN024BVY_at; Start 66; Stop 90
ccagaggatggcaggaagtgaaaac

SEQ ID NO: 96539 - DNA, 25 bp, Artificial
  probe
  misc_feature (1)..(25): SEQ ID NO: 6829; WAN024BVY_at; Start 57; Stop 81
tctacgtttccagaggatggcagga

SEQ ID NO: 96540 - DNA, 25 bp, Artificial
  probe
  misc_feature (1)..(25): SEQ ID NO: 6829; WAN024BVY_at; Start 293; Stop 317
tggcagctactagctccactagcta

SEQ ID NO: 96541 - DNA, 25 bp, Artificial
  probe
  misc_feature (1)..(25): SEQ ID NO: 6829; WAN024BVY_at; Start 52; Stop 76
tactttctacgtttccagaggatgg

SEQ ID NO: 96542 - DNA, 25 bp, Artificial
  probe
  misc_feature (1)..(25): SEQ ID NO: 6829; WAN024BVY_at; Start 2; Stop 26
tggagctggataagtttaaaacgat

SEQ ID NO: 96543 - DNA, 25 bp, Artificial
  probe
  misc_feature (1)..(25): SEQ ID NO: 6829; WAN024BVY_at; Start 90; Stop 114
ccaagttacgatagatgaagaggct

SEQ ID NO: 96544 - DNA, 25 bp, Artificial
  probe
  misc_feature (1)..(25): SEQ ID NO: 6829; WAN024BVY_at; Start 207; Stop 231
cagtatagagaacaaacgagccaga

SEQ ID NO: 96545 - DNA, 25 bp, Artificial
  probe
  misc_feature (1)..(25): SEQ ID NO: 6829; WAN024BVY_at; Start 286; Stop 310
gtagaaatggcagctactagctcca

SEQ ID NO: 96546 - DNA, 25 bp, Artificial
  probe
  misc_feature (1)..(25): SEQ ID NO: 6829; WAN024BVY_at; Start 305; Stop 329
gctccactagctaccaccgatataa

SEQ ID NO: 96547 - DNA, 25 bp, Artificial
  probe
  misc_feature (1)..(25): SEQ ID NO: 6829; WAN024BVY_at; Start 343; Stop 367
ttaaattttgcgagaatccaccaga

SEQ ID NO: 96548 - DNA, 25 bp, Artificial
  probe
  misc_feature (1)..(25): SEQ ID NO: 6829; WAN024BVY_at; Start 356; Stop 380
gaatccaccagaacggagagctaga

SEQ ID NO: 96549 - DNA, 25 bp, Artificial
  probe
  misc_feature (1)..(25): SEQ ID NO: 6829; WAN024BVY_at; Start 106; Stop 130
gaagaggcttggaaacttgtcttac

SEQ ID NO: 96550 - DNA, 25 bp, Artificial
  probe
  misc_feature (1)..(25): SEQ ID NO: 6829; WAN024BVY_at; Start 275; Stop 299
tgagcgaatgcgtagaaatggcagc

SEQ ID NO: 96551 - DNA, 25 bp, Artificial
  probe
  misc_feature (1)..(25): SEQ ID NO: 7245; WAN024BVZ_at; Start 29; Stop 53
ttttgattgatttggagaatatcca

SEQ ID NO: 96552 - DNA, 25 bp, Artificial
  probe
  misc_feature (1)..(25): SEQ ID NO: 7245; WAN024BVZ_at; Start 73; Stop 97
gattttaacatggatatagacatcg

SEQ ID NO: 96553 - DNA, 25 bp, Artificial
  probe
  misc_feature (1)..(25): SEQ ID NO: 7245; WAN024BVZ_at; Start 61; Stop 85
gatatggagatagattttaacatgg

SEQ ID NO: 96554 - DNA, 25 bp, Artificial
  probe
  misc_feature (1)..(25): SEQ ID NO: 7245; WAN024BVZ_at; Start 81; Stop 105
catggatatagacatcgatttaaac

SEQ ID NO: 96555 - DNA, 25 bp, Artificial
  probe
  misc_feature (1)..(25): SEQ ID NO: 7245; WAN024BVZ_at; Start 69; Stop 93
gatagattttaacatggatatagac

SEQ ID NO: 96556 - DNA, 25 bp, Artificial
  probe
  misc_feature (1)..(25): SEQ ID NO: 7245; WAN024BVZ_at; Start 87; Stop 111
tatagacatcgatttaaacatagat

SEQ ID NO: 96557 - DNA, 25 bp, Artificial
  probe
  misc_feature (1)..(25): SEQ ID NO: 7245; WAN024BVZ_at; Start 114; Stop 138
tgaaatagatgttgaccttgatgat

SEQ ID NO: 96558 - DNA, 25 bp, Artificial
  probe
  misc_feature (1)..(25): SEQ ID NO: 7245; WAN024BVZ_at; Start 78; Stop 102
taacatggatatagacatcgattta

SEQ ID NO: 96559 - DNA, 25 bp, Artificial
  probe
  misc_feature (1)..(25): SEQ ID NO: 7245; WAN024BVZ_at; Start 37; Stop 61
gatttggagaatatccaattagagg

SEQ ID NO: 96560 - DNA, 25 bp, Artificial
  probe
  misc_feature (1)..(25): SEQ ID NO: 7245; WAN024BVZ_at; Start 146; Stop 170
taaccttactacaagaattagaagc

SEQ ID NO: 96561 - DNA, 25 bp, Artificial
  probe
  misc_feature (1)..(25): SEQ ID NO: 7245; WAN024BVZ_at; Start 129; Stop 153
ccttgatgatttagatttaacctta

SEQ ID NO: 96562 - DNA, 25 bp, Artificial
  probe
  misc_feature (1)..(25): SEQ ID NO: 7245; WAN024BVZ_at; Start 22; Stop 46
gaagattttttgattgatttggaga

SEQ ID NO: 96563 - DNA, 25 bp, Artificial
  probe
  misc_feature (1)..(25): SEQ ID NO: 7245; WAN024BVZ_at; Start 52; Stop 76
caattagaggatatggagatagatt

SEQ ID NO: 96564 - DNA, 25 bp, Artificial
  probe
  misc_feature (1)..(25): SEQ ID NO: 7245; WAN024BVZ_at; Start 119; Stop 143
tagatgttgaccttgatgatttaga

SEQ ID NO: 96565 - DNA, 25 bp, Artificial
  probe
  misc_feature (1)..(25): SEQ ID NO: 7245; WAN024BVZ_at; Start 58; Stop 82
gaggatatggagatagattttaaca

SEQ ID NO: 96566 - DNA, 25 bp, Artificial
  probe
  misc_feature (1)..(25): SEQ ID NO: 7245; WAN024BVZ_at; Start 107; Stop 131
tagattttgaaatagatgttgacct

SEQ ID NO: 96567 - DNA, 25 bp, Artificial
  probe
  misc_feature (1)..(25): SEQ ID NO: 7245; WAN024BVZ_at; Start 51; Stop 75
ccaattagaggatatggagatagat

SEQ ID NO: 96568 - DNA, 25 bp, Artificial
  probe
  misc_feature (1)..(25): SEQ ID NO: 7245; WAN024BVZ_at; Start 93; Stop 117
catcgatttaaacatagattttgaa

SEQ ID NO: 96569 - DNA, 25 bp, Artificial
  probe
  misc_feature (1)..(25): SEQ ID NO: 7245; WAN024BVZ_at; Start 9; Stop 33
ggatgacatgattgaagattttttg

SEQ ID NO: 96570 - DNA, 25 bp, Artificial
  probe
  misc_feature (1)..(25): SEQ ID NO: 7245; WAN024BVZ_at; Start 133; Stop 157
gatgatttagatttaaccttactac

SEQ ID NO: 96571 - DNA, 25 bp, Artificial
  probe
  misc_feature (1)..(25): SEQ ID NO: 7245; WAN024BVZ_at; Start 127; Stop 151
gaccttgatgatttagatttaacct

SEQ ID NO: 96572 - DNA, 25 bp, Artificial
  probe
  misc_feature (1)..(25): SEQ ID NO: 7245; WAN024BVZ_at; Start 45; Stop 69
gaatatccaattagaggatatggag

SEQ ID NO: 96573 - DNA, 25 bp, Artificial
  probe
  misc_feature (1)..(25): SEQ ID NO: 7245; WAN024BVZ_at; Start 147; Stop 171
aaccttactacaagaattagaagcg

SEQ ID NO: 96574 - DNA, 25 bp, Artificial
  probe
  misc_feature (1)..(25): SEQ ID NO: 7245; WAN024BVZ_at; Start 126; Stop 150
tgaccttgatgatttagatttaacc

SEQ ID NO: 96575 - DNA, 25 bp, Artificial
  probe
  misc_feature (1)..(25): SEQ ID NO: 7245; WAN024BVZ_at; Start 91; Stop 115
gacatcgatttaaacatagattttg

SEQ ID NO: 96576 - DNA, 25 bp, Artificial
  probe
  misc_feature (1)..(25): SEQ ID NO: 7245; WAN024BVZ_at; Start 43; Stop 67
gagaatatccaattagaggatatgg

SEQ ID NO: 96577 - DNA, 25 bp, Artificial
  probe
  misc_feature (1)..(25): SEQ ID NO: 7245; WAN024BVZ_at; Start 13; Stop 37
gacatgattgaagattttttgattg

SEQ ID NO: 96578 - DNA, 25 bp, Artificial
  probe
  misc_feature (1)..(25): SEQ ID NO: 7245; WAN024BVZ_at; Start 112; Stop 136
tttgaaatagatgttgaccttgatg

SEQ ID NO: 96579 - DNA, 25 bp, Artificial
  probe
  misc_feature (1)..(25): SEQ ID NO: 7245; WAN024BVZ_at; Start 75; Stop 99
ttttaacatggatatagacatcgat

SEQ ID NO: 96580 - DNA, 25 bp, Artificial
  probe
  misc_feature (1)..(25): SEQ ID NO: 7245; WAN024BVZ_at; Start 40; Stop 64
ttggagaatatccaattagaggata

SEQ ID NO: 96581 - DNA, 25 bp, Artificial
  probe
  misc_feature (1)..(25): SEQ ID NO: 7245; WAN024BVZ_at; Start 63; Stop 87
tatggagatagattttaacatggat

SEQ ID NO: 96582 - DNA, 25 bp, Artificial
  probe
  misc_feature (1)..(25): SEQ ID NO: 7245; WAN024BVZ_at; Start 109; Stop 133
gattttgaaatagatgttgaccttg

SEQ ID NO: 96583 - DNA, 25 bp, Artificial
  probe
  misc_feature (1)..(25): SEQ ID NO: 7245; WAN024BVZ_at; Start 121; Stop 145
gatgttgaccttgatgatttagatt

SEQ ID NO: 96584 - DNA, 25 bp, Artificial
  probe
  misc_feature (1)..(25): SEQ ID NO: 7245; WAN024BVZ_at; Start 85; Stop 109
gatatagacatcgatttaaacatag

SEQ ID NO: 96585 - DNA, 25 bp, Artificial
  probe
  misc_feature (1)..(25): SEQ ID NO: 7276; WAN024BW2_at; Start 35; Stop 59
tttctacctattgtatcacaaactt

SEQ ID NO: 96586 - DNA, 25 bp, Artificial
  probe
  misc_feature (1)..(25): SEQ ID NO: 7276; WAN024BW2_at; Start 3; Stop 27
gcatgtgtcttttctcctttttaaa

SEQ ID NO: 96587 - DNA, 25 bp, Artificial
  probe
  misc_feature (1)..(25): SEQ ID NO: 7276; WAN024BW2_at; Start 52; Stop 76
acaaacttgggcaatagcctagcag

SEQ ID NO: 96588 - DNA, 25 bp, Artificial
  probe
  misc_feature (1)..(25): SEQ ID NO: 7276; WAN024BW2_at; Start 29; Stop 53
ttattgtttctacctattgtatcac

SEQ ID NO: 96589 - DNA, 25 bp, Artificial
  probe
  misc_feature (1)..(25): SEQ ID NO: 7276; WAN024BW2_at; Start 40; Stop 64
acctattgtatcacaaacttgggca

SEQ ID NO: 96590 - DNA, 25 bp, Artificial
  probe
  misc_feature (1)..(25): SEQ ID NO: 7276; WAN024BW2_at; Start 41; Stop 65
cctattgtatcacaaacttgggcaa

SEQ ID NO: 96591 - DNA, 25 bp, Artificial
  probe
  misc_feature (1)..(25): SEQ ID NO: 7276; WAN024BW2_at; Start 47; Stop 71
gtatcacaaacttgggcaatagcct

SEQ ID NO: 96592 - DNA, 25 bp, Artificial
  probe
  misc_feature (1)..(25): SEQ ID NO: 7276; WAN024BW2_at; Start 39; Stop 63
tacctattgtatcacaaacttgggc

SEQ ID NO: 96593 - DNA, 25 bp, Artificial
  probe
  misc_feature (1)..(25): SEQ ID NO: 7276; WAN024BW2_at; Start 38; Stop 62
ctacctattgtatcacaaacttggg

SEQ ID NO: 96594 - DNA, 25 bp, Artificial
  probe
  misc_feature (1)..(25): SEQ ID NO: 7276; WAN024BW2_at; Start 42; Stop 66
ctattgtatcacaaacttgggcaat

SEQ ID NO: 96595 - DNA, 25 bp, Artificial
  probe
  misc_feature (1)..(25): SEQ ID NO: 7276; WAN024BW2_at; Start 32; Stop 56
ttgtttctacctattgtatcacaaa

SEQ ID NO: 96596 - DNA, 25 bp, Artificial
  probe
  misc_feature (1)..(25): SEQ ID NO: 7276; WAN024BW2_at; Start 36; Stop 60
ttctacctattgtatcacaaacttg

SEQ ID NO: 96597 - DNA, 25 bp, Artificial
  probe
  misc_feature (1)..(25): SEQ ID NO: 7276; WAN024BW2_at; Start 2; Stop 26
tgcatgtgtcttttctcctttttaa

SEQ ID NO: 96598 - DNA, 25 bp, Artificial
  probe
  misc_feature (1)..(25): SEQ ID NO: 7276; WAN024BW2_at; Start 34; Stop 58
gtttctacctattgtatcacaaact

SEQ ID NO: 96599 - DNA, 25 bp, Artificial
  probe
  misc_feature (1)..(25): SEQ ID NO: 7276; WAN024BW2_at; Start 51; Stop 75
cacaaacttgggcaatagcctagca

SEQ ID NO: 96600 - DNA, 25 bp, Artificial
  probe
  misc_feature (1)..(25): SEQ ID NO: 7276; WAN024BW2_at; Start 45; Stop 69
ttgtatcacaaacttgggcaatagc

SEQ ID NO: 96601 - DNA, 25 bp, Artificial
  probe
  misc_feature (1)..(25): SEQ ID NO: 7276; WAN024BW2_at; Start 37; Stop 61
tctacctattgtatcacaaacttgg

SEQ ID NO: 96602 - DNA, 25 bp, Artificial
  probe
  misc_feature (1)..(25): SEQ ID NO: 7276; WAN024BW2_at; Start 49; Stop 73
atcacaaacttgggcaatagcctag

SEQ ID NO: 96603 - DNA, 25 bp, Artificial
  probe
  misc_feature (1)..(25): SEQ ID NO: 7276; WAN024BW2_at; Start 33; Stop 57
tgtttctacctattgtatcacaaac

SEQ ID NO: 96604 - DNA, 25 bp, Artificial
  probe
  misc_feature (1)..(25): SEQ ID NO: 7276; WAN024BW2_at; Start 26; Stop 50
aaattattgtttctacctattgtat

SEQ ID NO: 96605 - DNA, 25 bp, Artificial
  probe
  misc_feature (1)..(25): SEQ ID NO: 7276; WAN024BW2_at; Start 28; Stop 52
attattgtttctacctattgtatca

SEQ ID NO: 96606 - DNA, 25 bp, Artificial
  probe
  misc_feature (1)..(25): SEQ ID NO: 7276; WAN024BW2_at; Start 43; Stop 67
tattgtatcacaaacttgggcaata

SEQ ID NO: 96607 - DNA, 25 bp, Artificial
  probe
  misc_feature (1)..(25): SEQ ID NO: 7276; WAN024BW2_at; Start 30; Stop 54
tattgtttctacctattgtatcaca

SEQ ID NO: 96608 - DNA, 25 bp, Artificial
  probe
  misc_feature (1)..(25): SEQ ID NO: 7276; WAN024BW2_at; Start 54; Stop 78
aaacttgggcaatagcctagcagaa

SEQ ID NO: 96609 - DNA, 25 bp, Artificial
  probe
  misc_feature (1)..(25): SEQ ID NO: 7276; WAN024BW2_at; Start 50; Stop 74
tcacaaacttgggcaatagcctagc

SEQ ID NO: 96610 - DNA, 25 bp, Artificial
  probe
  misc_feature (1)..(25): SEQ ID NO: 7276; WAN024BW2_at; Start 48; Stop 72
tatcacaaacttgggcaatagccta

SEQ ID NO: 96611 - DNA, 25 bp, Artificial
  probe
  misc_feature (1)..(25): SEQ ID NO: 7276; WAN024BW2_at; Start 27; Stop 51
aattattgtttctacctattgtatc

SEQ ID NO: 96612 - DNA, 25 bp, Artificial
  probe
  misc_feature (1)..(25): SEQ ID NO: 7276; WAN024BW2_at; Start 31; Stop 55
attgtttctacctattgtatcacaa

SEQ ID NO: 96613 - DNA, 25 bp, Artificial
  probe
  misc_feature (1)..(25): SEQ ID NO: 7276; WAN024BW2_at; Start 53; Stop 77
caaacttgggcaatagcctagcaga

SEQ ID NO: 96614 - DNA, 25 bp, Artificial
  probe
  misc_feature (1)..(25): SEQ ID NO: 7276; WAN024BW2_at; Start 1; Stop 25
gtgcatgtgtcttttctccttttta

SEQ ID NO: 96615 - DNA, 25 bp, Artificial
  probe
  misc_feature (1)..(25): SEQ ID NO: 7276; WAN024BW2_at; Start 46; Stop 70
tgtatcacaaacttgggcaatagcc

SEQ ID NO: 96616 - DNA, 25 bp, Artificial
  probe
  misc_feature (1)..(25): SEQ ID NO: 7276; WAN024BW2_at; Start 44; Stop 68
attgtatcacaaacttgggcaatag

SEQ ID NO: 96617 - DNA, 25 bp, Artificial
  probe
  misc_feature (1)..(25): SEQ ID NO: 7442; WAN024BW3_at; Start 60; Stop 84
caagttcaaggagcgaaaggtggat

SEQ ID NO: 96618 - DNA, 25 bp, Artificial
  probe
  misc_feature (1)..(25): SEQ ID NO: 7442; WAN024BW3_at; Start 31; Stop 55
cctgttgatgtagaggtcgagttta

SEQ ID NO: 96619 - DNA, 25 bp, Artificial
  probe
  misc_feature (1)..(25): SEQ ID NO: 7442; WAN024BW3_at; Start 18; Stop 42
agagcattggaagcctgttgatgta

SEQ ID NO: 96620 - DNA, 25 bp, Artificial
  probe
  misc_feature (1)..(25): SEQ ID NO: 7442; WAN024BW3_at; Start 49; Stop 73
gagtttagatgcaagttcaaggagc

SEQ ID NO: 96621 - DNA, 25 bp, Artificial
  probe
  misc_feature (1)..(25): SEQ ID NO: 7442; WAN024BW3_at; Start 41; Stop 65
tagaggtcgagtttagatgcaagtt

SEQ ID NO: 96622 - DNA, 25 bp, Artificial
  probe
  misc_feature (1)..(25): SEQ ID NO: 7442; WAN024BW3_at; Start 13; Stop 37
tttgaagagcattggaagcctgttg

SEQ ID NO: 96623 - DNA, 25 bp, Artificial
  probe
  misc_feature (1)..(25): SEQ ID NO: 7442; WAN024BW3_at; Start 39; Stop 63
tgtagaggtcgagtttagatgcaag

SEQ ID NO: 96624 - DNA, 25 bp, Artificial
  probe
  misc_feature (1)..(25): SEQ ID NO: 7442; WAN024BW3_at; Start 11; Stop 35
aatttgaagagcattggaagcctgt

SEQ ID NO: 96625 - DNA, 25 bp, Artificial
  probe
  misc_feature (1)..(25): SEQ ID NO: 7442; WAN024BW3_at; Start 63; Stop 87
gttcaaggagcgaaaggtggatggg

SEQ ID NO: 96626 - DNA, 25 bp, Artificial
  probe
  misc_feature (1)..(25): SEQ ID NO: 7442; WAN024BW3_at; Start 55; Stop 79
agatgcaagttcaaggagcgaaagg

SEQ ID NO: 96627 - DNA, 25 bp, Artificial
  probe
  misc_feature (1)..(25): SEQ ID NO: 7442; WAN024BW3_at; Start 50; Stop 74
agtttagatgcaagttcaaggagcg

SEQ ID NO: 96628 - DNA, 25 bp, Artificial
  probe
  misc_feature (1)..(25): SEQ ID NO: 7442; WAN024BW3_at; Start 14; Stop 38
ttgaagagcattggaagcctgttga

SEQ ID NO: 96629 - DNA, 25 bp, Artificial
  probe
  misc_feature (1)..(25): SEQ ID NO: 7442; WAN024BW3_at; Start 53; Stop 77
ttagatgcaagttcaaggagcgaaa

SEQ ID NO: 96630 - DNA, 25 bp, Artificial
  probe
  misc_feature (1)..(25): SEQ ID NO: 7442; WAN024BW3_at; Start 33; Stop 57
tgttgatgtagaggtcgagtttaga

SEQ ID NO: 96631 - DNA, 25 bp, Artificial
  probe
  misc_feature (1)..(25): SEQ ID NO: 7442; WAN024BW3_at; Start 28; Stop 52
aagcctgttgatgtagaggtcgagt

SEQ ID NO: 96632 - DNA, 25 bp, Artificial
  probe
  misc_feature (1)..(25): SEQ ID NO: 7442; WAN024BW3_at; Start 37; Stop 61
gatgtagaggtcgagtttagatgca

SEQ ID NO: 96633 - DNA, 25 bp, Artificial
  probe
  misc_feature (1)..(25): SEQ ID NO: 7442; WAN024BW3_at; Start 45; Stop 69
ggtcgagtttagatgcaagttcaag

SEQ ID NO: 96634 - DNA, 25 bp, Artificial
  probe
  misc_feature (1)..(25): SEQ ID NO: 7442; WAN024BW3_at; Start 56; Stop 80
gatgcaagttcaaggagcgaaaggt

SEQ ID NO: 96635 - DNA, 25 bp, Artificial
  probe
  misc_feature (1)..(25): SEQ ID NO: 7442; WAN024BW3_at; Start 44; Stop 68
aggtcgagtttagatgcaagttcaa

SEQ ID NO: 96636 - DNA, 25 bp, Artificial
  probe
  misc_feature (1)..(25): SEQ ID NO: 7442; WAN024BW3_at; Start 46; Stop 70
gtcgagtttagatgcaagttcaagg

SEQ ID NO: 96637 - DNA, 25 bp, Artificial
  probe
  misc_feature (1)..(25): SEQ ID NO: 7442; WAN024BW3_at; Start 48; Stop 72
cgagtttagatgcaagttcaaggag

SEQ ID NO: 96638 - DNA, 25 bp, Artificial
  probe
  misc_feature (1)..(25): SEQ ID NO: 7442; WAN024BW3_at; Start 24; Stop 48
ttggaagcctgttgatgtagaggtc

SEQ ID NO: 96639 - DNA, 25 bp, Artificial
  probe
  misc_feature (1)..(25): SEQ ID NO: 7442; WAN024BW3_at; Start 43; Stop 67
gaggtcgagtttagatgcaagttca

SEQ ID NO: 96640 - DNA, 25 bp, Artificial
  probe
  misc_feature (1)..(25): SEQ ID NO: 7442; WAN024BW3_at; Start 10; Stop 34
aaatttgaagagcattggaagcctg

SEQ ID NO: 96641 - DNA, 25 bp, Artificial
  probe
  misc_feature (1)..(25): SEQ ID NO: 7442; WAN024BW3_at; Start 52; Stop 76
tttagatgcaagttcaaggagcgaa

SEQ ID NO: 96642 - DNA, 25 bp, Artificial
  probe
  misc_feature (1)..(25): SEQ ID NO: 7442; WAN024BW3_at; Start 15; Stop 39
tgaagagcattggaagcctgttgat

SEQ ID NO: 96643 - DNA, 25 bp, Artificial
  probe
  misc_feature (1)..(25): SEQ ID NO: 7442; WAN024BW3_at; Start 20; Stop 44
agcattggaagcctgttgatgtaga

SEQ ID NO: 96644 - DNA, 25 bp, Artificial
  probe
  misc_feature (1)..(25): SEQ ID NO: 7442; WAN024BW3_at; Start 57; Stop 81
atgcaagttcaaggagcgaaaggtg

SEQ ID NO: 96645 - DNA, 25 bp, Artificial
  probe
  misc_feature (1)..(25): SEQ ID NO: 7442; WAN024BW3_at; Start 47; Stop 71
tcgagtttagatgcaagttcaagga

SEQ ID NO: 96646 - DNA, 25 bp, Artificial
  probe
  misc_feature (1)..(25): SEQ ID NO: 7442; WAN024BW3_at; Start 30; Stop 54
gcctgttgatgtagaggtcgagttt

SEQ ID NO: 96647 - DNA, 25 bp, Artificial
  probe
  misc_feature (1)..(25): SEQ ID NO: 7442; WAN024BW3_at; Start 22; Stop 46
cattggaagcctgttgatgtagagg

SEQ ID NO: 96648 - DNA, 25 bp, Artificial
  probe
  misc_feature (1)..(25): SEQ ID NO: 7442; WAN024BW3_at; Start 51; Stop 75
gtttagatgcaagttcaaggagcga

SEQ ID NO: 96649 - DNA, 25 bp, Artificial
  probe
  misc_feature (1)..(25): SEQ ID NO: 7442; WAN024BW3_at; Start 54; Stop 78
tagatgcaagttcaaggagcgaaag

SEQ ID NO: 96650 - DNA, 25 bp, Artificial
  probe
  misc_feature (1)..(25): SEQ ID NO: 7442; WAN024BW3_at; Start 16; Stop 40
gaagagcattggaagcctgttgatg

SEQ ID NO: 96651 - DNA, 25 bp, Artificial
  probe
  misc_feature (1)..(25): SEQ ID NO: 7481; WAN024BW4_at; Start 22; Stop 46
catatagttcctttctatttacagg

SEQ ID NO: 96652 - DNA, 25 bp, Artificial
  probe
  misc_feature (1)..(25): SEQ ID NO: 7481; WAN024BW4_at; Start 3; Stop 27
gataaaaaactttgtaaatcatata

SEQ ID NO: 96653 - DNA, 25 bp, Artificial
  probe
  misc_feature (1)..(25): SEQ ID NO: 7481; WAN024BW4_at; Start 24; Stop 48
tatagttcctttctatttacaggtc

SEQ ID NO: 96654 - DNA, 25 bp, Artificial
  probe
  misc_feature (1)..(25): SEQ ID NO: 7481; WAN024BW4_at; Start 55; Stop 79
ttccaaacttttagcagatatttgc

SEQ ID NO: 96655 - DNA, 25 bp, Artificial
  probe
  misc_feature (1)..(25): SEQ ID NO: 7481; WAN024BW4_at; Start 30; Stop 54
tcctttctatttacaggtcagctta

SEQ ID NO: 96656 - DNA, 25 bp, Artificial
  probe
  misc_feature (1)..(25): SEQ ID NO: 7481; WAN024BW4_at; Start 36; Stop 60
ctatttacaggtcagcttattccaa

SEQ ID NO: 96657 - DNA, 25 bp, Artificial
  probe
  misc_feature (1)..(25): SEQ ID NO: 7481; WAN024BW4_at; Start 71; Stop 95
gatatttgcttgatttcattccatt

SEQ ID NO: 96658 - DNA, 25 bp, Artificial
  probe
  misc_feature (1)..(25): SEQ ID NO: 7481; WAN024BW4_at; Start 41; Stop 65
tacaggtcagcttattccaaacttt

SEQ ID NO: 96659 - DNA, 25 bp, Artificial
  probe
  misc_feature (1)..(25): SEQ ID NO: 7481; WAN024BW4_at; Start 47; Stop 71
tcagcttattccaaacttttagcag

SEQ ID NO: 96660 - DNA, 25 bp, Artificial
  probe
  misc_feature (1)..(25): SEQ ID NO: 7481; WAN024BW4_at; Start 35; Stop 59
tctatttacaggtcagcttattcca

SEQ ID NO: 96661 - DNA, 25 bp, Artificial
  probe
  misc_feature (1)..(25): SEQ ID NO: 7481; WAN024BW4_at; Start 43; Stop 67
caggtcagcttattccaaactttta

SEQ ID NO: 96662 - DNA, 25 bp, Artificial
  probe
  misc_feature (1)..(25): SEQ ID NO: 7481; WAN024BW4_at; Start 58; Stop 82
caaacttttagcagatatttgcttg

SEQ ID NO: 96663 - DNA, 25 bp, Artificial
  probe
  misc_feature (1)..(25): SEQ ID NO: 7481; WAN024BW4_at; Start 39; Stop 63
tttacaggtcagcttattccaaact

SEQ ID NO: 96664 - DNA, 25 bp, Artificial
  probe
  misc_feature (1)..(25): SEQ ID NO: 7481; WAN024BW4_at; Start 27; Stop 51
agttcctttctatttacaggtcagc

SEQ ID NO: 96665 - DNA, 25 bp, Artificial
  probe
  misc_feature (1)..(25): SEQ ID NO: 7481; WAN024BW4_at; Start 40; Stop 64
ttacaggtcagcttattccaaactt

SEQ ID NO: 96666 - DNA, 25 bp, Artificial
  probe
  misc_feature (1)..(25): SEQ ID NO: 7481; WAN024BW4_at; Start 56; Stop 80
tccaaacttttagcagatatttgct

SEQ ID NO: 96667 - DNA, 25 bp, Artificial
  probe
  misc_feature (1)..(25): SEQ ID NO: 7481; WAN024BW4_at; Start 59; Stop 83
aaacttttagcagatatttgcttga

SEQ ID NO: 96668 - DNA, 25 bp, Artificial
  probe
  misc_feature (1)..(25): SEQ ID NO: 7481; WAN024BW4_at; Start 26; Stop 50
tagttcctttctatttacaggtcag

SEQ ID NO: 96669 - DNA, 25 bp, Artificial
  probe
  misc_feature (1)..(25): SEQ ID NO: 7481; WAN024BW4_at; Start 45; Stop 69
ggtcagcttattccaaacttttagc

SEQ ID NO: 96670 - DNA, 25 bp, Artificial
  probe
  misc_feature (1)..(25): SEQ ID NO: 7481; WAN024BW4_at; Start 32; Stop 56
ctttctatttacaggtcagcttatt

SEQ ID NO: 96671 - DNA, 25 bp, Artificial
  probe
  misc_feature (1)..(25): SEQ ID NO: 7481; WAN024BW4_at; Start 44; Stop 68
aggtcagcttattccaaacttttag

SEQ ID NO: 96672 - DNA, 25 bp, Artificial
  probe
  misc_feature (1)..(25): SEQ ID NO: 7481; WAN024BW4_at; Start 78; Stop 102
gcttgatttcattccattttgtgtc

SEQ ID NO: 96673 - DNA, 25 bp, Artificial
  probe
  misc_feature (1)..(25): SEQ ID NO: 7481; WAN024BW4_at; Start 34; Stop 58
ttctatttacaggtcagcttattcc

SEQ ID NO: 96674 - DNA, 25 bp, Artificial
  probe
  misc_feature (1)..(25): SEQ ID NO: 7481; WAN024BW4_at; Start 68; Stop 92
gcagatatttgcttgatttcattcc

SEQ ID NO: 96675 - DNA, 25 bp, Artificial
  probe
  misc_feature (1)..(25): SEQ ID NO: 7481; WAN024BW4_at; Start 12; Stop 36
ctttgtaaatcatatagttcctttc

SEQ ID NO: 96676 - DNA, 25 bp, Artificial
  probe
  misc_feature (1)..(25): SEQ ID NO: 7481; WAN024BW4_at; Start 28; Stop 52
gttcctttctatttacaggtcagct

SEQ ID NO: 96677 - DNA, 25 bp, Artificial
  probe
  misc_feature (1)..(25): SEQ ID NO: 7481; WAN024BW4_at; Start 48; Stop 72
cagcttattccaaacttttagcaga

SEQ ID NO: 96678 - DNA, 25 bp, Artificial
  probe
  misc_feature (1)..(25): SEQ ID NO: 7481; WAN024BW4_at; Start 50; Stop 74
gcttattccaaacttttagcagata

SEQ ID NO: 96679 - DNA, 25 bp, Artificial
  probe
  misc_feature (1)..(25): SEQ ID NO: 7481; WAN024BW4_at; Start 31; Stop 55
cctttctatttacaggtcagcttat

SEQ ID NO: 96680 - DNA, 25 bp, Artificial
  probe
  misc_feature (1)..(25): SEQ ID NO: 7481; WAN024BW4_at; Start 69; Stop 93
cagatatttgcttgatttcattcca

SEQ ID NO: 96681 - DNA, 25 bp, Artificial
  probe
  misc_feature (1)..(25): SEQ ID NO: 7481; WAN024BW4_at; Start 38; Stop 62
atttacaggtcagcttattccaaac

SEQ ID NO: 96682 - DNA, 25 bp, Artificial
  probe
  misc_feature (1)..(25): SEQ ID NO: 7481; WAN024BW4_at; Start 37; Stop 61
tatttacaggtcagcttattccaaa

SEQ ID NO: 96683 - DNA, 25 bp, Artificial
  probe
  misc_feature (1)..(25): SEQ ID NO: 7481; WAN024BW4_at; Start 46; Stop 70
gtcagcttattccaaacttttagca

SEQ ID NO: 96684 - DNA, 25 bp, Artificial
  probe
  misc_feature (1)..(25): SEQ ID NO: 7481; WAN024BW4_at; Start 42; Stop 66
acaggtcagcttattccaaactttt

SEQ ID NO: 96685 - DNA, 25 bp, Artificial
  probe
  misc_feature (1)..(25): SEQ ID NO: 6777; WAN024BW5_at; Start 166; Stop 190
aaaagttcgtggaatcctgcacctc

SEQ ID NO: 96686 - DNA, 25 bp, Artificial
  probe
  misc_feature (1)..(25): SEQ ID NO: 6777; WAN024BW5_at; Start 23; Stop 47
ctttgaatgaagtagaattagagac

SEQ ID NO: 96687 - DNA, 25 bp, Artificial
  probe
  misc_feature (1)..(25): SEQ ID NO: 6777; WAN024BW5_at; Start 169; Stop 193
agttcgtggaatcctgcacctccag

SEQ ID NO: 96688 - DNA, 25 bp, Artificial
  probe
  misc_feature (1)..(25): SEQ ID NO: 6777; WAN024BW5_at; Start 51; Stop 75
tagtggtggagatgactgttttatt

SEQ ID NO: 96689 - DNA, 25 bp, Artificial
  probe
  misc_feature (1)..(25): SEQ ID NO: 6777; WAN024BW5_at; Start 132; Stop 156
acctgctccatatgttcctccagta

SEQ ID NO: 96690 - DNA, 25 bp, Artificial
  probe
  misc_feature (1)..(25): SEQ ID NO: 6777; WAN024BW5_at; Start 142; Stop 166
tatgttcctccagtatgcattccaa

SEQ ID NO: 96691 - DNA, 25 bp, Artificial
  probe
  misc_feature (1)..(25): SEQ ID NO: 6777; WAN024BW5_at; Start 128; Stop 152
taaaacctgctccatatgttcctcc

SEQ ID NO: 96692 - DNA, 25 bp, Artificial
  probe
  misc_feature (1)..(25): SEQ ID NO: 6777; WAN024BW5_at; Start 116; Stop 140
tcggagggatgataaaacctgctcc

SEQ ID NO: 96693 - DNA, 25 bp, Artificial
  probe
  misc_feature (1)..(25): SEQ ID NO: 6777; WAN024BW5_at; Start 130; Stop 154
aaacctgctccatatgttcctccag

SEQ ID NO: 96694 - DNA, 25 bp, Artificial
  probe
  misc_feature (1)..(25): SEQ ID NO: 6777; WAN024BW5_at; Start 152; Stop 176
cagtatgcattccaaaaagttcgtg

SEQ ID NO: 96695 - DNA, 25 bp, Artificial
  probe
  misc_feature (1)..(25): SEQ ID NO: 6777; WAN024BW5_at; Start 31; Stop 55
gaagtagaattagagacgattagtg

SEQ ID NO: 96696 - DNA, 25 bp, Artificial
  probe
  misc_feature (1)..(25): SEQ ID NO: 6777; WAN024BW5_at; Start 123; Stop 147
gatgataaaacctgctccatatgtt

SEQ ID NO: 96697 - DNA, 25 bp, Artificial
  probe
  misc_feature (1)..(25): SEQ ID NO: 6777; WAN024BW5_at; Start 74; Stop 98
ttggagatatcggatgtatcggctg

SEQ ID NO: 96698 - DNA, 25 bp, Artificial
  probe
  misc_feature (1)..(25): SEQ ID NO: 6777; WAN024BW5_at; Start 126; Stop 150
gataaaacctgctccatatgttcct

SEQ ID NO: 96699 - DNA, 25 bp, Artificial
  probe
  misc_feature (1)..(25): SEQ ID NO: 6777; WAN024BW5_at; Start 36; Stop 60
agaattagagacgattagtggtgga

SEQ ID NO: 96700 - DNA, 25 bp, Artificial
  probe
  misc_feature (1)..(25): SEQ ID NO: 6777; WAN024BW5_at; Start 144; Stop 168
tgttcctccagtatgcattccaaaa

SEQ ID NO: 96701 - DNA, 25 bp, Artificial
  probe
  misc_feature (1)..(25): SEQ ID NO: 6777; WAN024BW5_at; Start 162; Stop 186
tccaaaaagttcgtggaatcctgca

SEQ ID NO: 96702 - DNA, 25 bp, Artificial
  probe
  misc_feature (1)..(25): SEQ ID NO: 6777; WAN024BW5_at; Start 114; Stop 138
tatcggagggatgataaaacctgct

SEQ ID NO: 96703 - DNA, 25 bp, Artificial
  probe
  misc_feature (1)..(25): SEQ ID NO: 6777; WAN024BW5_at; Start 13; Stop 37
gattatattactttgaatgaagtag

SEQ ID NO: 96704 - DNA, 25 bp, Artificial
  probe
  misc_feature (1)..(25): SEQ ID NO: 6777; WAN024BW5_at; Start 155; Stop 179
tatgcattccaaaaagttcgtggaa

SEQ ID NO: 96705 - DNA, 25 bp, Artificial
  probe
  misc_feature (1)..(25): SEQ ID NO: 6777; WAN024BW5_at; Start 136; Stop 160
gctccatatgttcctccagtatgca

SEQ ID NO: 96706 - DNA, 25 bp, Artificial
  probe
  misc_feature (1)..(25): SEQ ID NO: 6777; WAN024BW5_at; Start 103; Stop 127
cttttgaagagtatcggagggatga

SEQ ID NO: 96707 - DNA, 25 bp, Artificial
  probe
  misc_feature (1)..(25): SEQ ID NO: 6777; WAN024BW5_at; Start 154; Stop 178
gtatgcattccaaaaagttcgtgga

SEQ ID NO: 96708 - DNA, 25 bp, Artificial
  probe
  misc_feature (1)..(25): SEQ ID NO: 6777; WAN024BW5_at; Start 147; Stop 171
tcctccagtatgcattccaaaaagt

SEQ ID NO: 96709 - DNA, 25 bp, Artificial
  probe
  misc_feature (1)..(25): SEQ ID NO: 6777; WAN024BW5_at; Start 72; Stop 96
tattggagatatcggatgtatcggc

SEQ ID NO: 96710 - DNA, 25 bp, Artificial
  probe
  misc_feature (1)..(25): SEQ ID NO: 6777; WAN024BW5_at; Start 164; Stop 188
caaaaagttcgtggaatcctgcacc

SEQ ID NO: 96711 - DNA, 25 bp, Artificial
  probe
  misc_feature (1)..(25): SEQ ID NO: 6777; WAN024BW5_at; Start 119; Stop 143
gagggatgataaaacctgctccata

SEQ ID NO: 96712 - DNA, 25 bp, Artificial
  probe
  misc_feature (1)..(25): SEQ ID NO: 6777; WAN024BW5_at; Start 150; Stop 174
tccagtatgcattccaaaaagttcg

SEQ ID NO: 96713 - DNA, 25 bp, Artificial
  probe
  misc_feature (1)..(25): SEQ ID NO: 6777; WAN024BW5_at; Start 167; Stop 191
aaagttcgtggaatcctgcacctcc

SEQ ID NO: 96714 - DNA, 25 bp, Artificial
  probe
  misc_feature (1)..(25): SEQ ID NO: 6777; WAN024BW5_at; Start 26; Stop 50
tgaatgaagtagaattagagacgat

SEQ ID NO: 96715 - DNA, 25 bp, Artificial
  probe
  misc_feature (1)..(25): SEQ ID NO: 6777; WAN024BW5_at; Start 111; Stop 135
gagtatcggagggatgataaaacct

SEQ ID NO: 96716 - DNA, 25 bp, Artificial
  probe
  misc_feature (1)..(25): SEQ ID NO: 6777; WAN024BW5_at; Start 171; Stop 195
ttcgtggaatcctgcacctccagtt

SEQ ID NO: 96717 - DNA, 25 bp, Artificial
  probe
  misc_feature (1)..(25): SEQ ID NO: 6777; WAN024BW5_at; Start 121; Stop 145
gggatgataaaacctgctccatatg

SEQ ID NO: 96718 - DNA, 25 bp, Artificial
  probe
  misc_feature (1)..(25): SEQ ID NO: 6777; WAN024BW5_at; Start 177; Stop 201
gaatcctgcacctccagttccatgt

SEQ ID NO: 96719 - DNA, 25 bp, Artificial
  probe
  misc_feature (1)..(25): SEQ ID NO: 6789; WAN024BW6_at; Start 14; Stop 38
caaaaagagcaagcgccttgattat

SEQ ID NO: 96720 - DNA, 25 bp, Artificial
  probe
  misc_feature (1)..(25): SEQ ID NO: 6789; WAN024BW6_at; Start 23; Stop 47
caagcgccttgattataacttttaa

SEQ ID NO: 96721 - DNA, 25 bp, Artificial
  probe
  misc_feature (1)..(25): SEQ ID NO: 6789; WAN024BW6_at; Start 8; Stop 32
aatacacaaaaagagcaagcgcctt

SEQ ID NO: 96722 - DNA, 25 bp, Artificial
  probe
  misc_feature (1)..(25): SEQ ID NO: 6789; WAN024BW6_at; Start 5; Stop 29
aacaatacacaaaaagagcaagcgc

SEQ ID NO: 96723 - DNA, 25 bp, Artificial
  probe
  misc_feature (1)..(25): SEQ ID NO: 6789; WAN024BW6_at; Start 120; Stop 144
aagtgaggcaaagaatgacaaatta

SEQ ID NO: 96724 - DNA, 25 bp, Artificial
  probe
  misc_feature (1)..(25): SEQ ID NO: 6789; WAN024BW6_at; Start 2; Stop 26
tggaacaatacacaaaaagagcaag

SEQ ID NO: 96725 - DNA, 25 bp, Artificial
  probe
  misc_feature (1)..(25): SEQ ID NO: 6789; WAN024BW6_at; Start 105; Stop 129
ggtagtaaaagcagtaagtgaggca

SEQ ID NO: 96726 - DNA, 25 bp, Artificial
  probe
  misc_feature (1)..(25): SEQ ID NO: 6789; WAN024BW6_at; Start 20; Stop 44
gagcaagcgccttgattataacttt

SEQ ID NO: 96727 - DNA, 25 bp, Artificial
  probe
  misc_feature (1)..(25): SEQ ID NO: 6789; WAN024BW6_at; Start 53; Stop 77
gggttatatctcaagatgagtttat

SEQ ID NO: 96728 - DNA, 25 bp, Artificial
  probe
  misc_feature (1)..(25): SEQ ID NO: 6789; WAN024BW6_at; Start 12; Stop 36
cacaaaaagagcaagcgccttgatt

SEQ ID NO: 96729 - DNA, 25 bp, Artificial
  probe
  misc_feature (1)..(25): SEQ ID NO: 6789; WAN024BW6_at; Start 94; Stop 118
ctaagagaaaaggtagtaaaagcag

SEQ ID NO: 96730 - DNA, 25 bp, Artificial
  probe
  misc_feature (1)..(25): SEQ ID NO: 6789; WAN024BW6_at; Start 119; Stop 143
taagtgaggcaaagaatgacaaatt

SEQ ID NO: 96731 - DNA, 25 bp, Artificial
  probe
  misc_feature (1)..(25): SEQ ID NO: 6789; WAN024BW6_at; Start 62; Stop 86
ctcaagatgagtttattgaagaatt

SEQ ID NO: 96732 - DNA, 25 bp, Artificial
  probe
  misc_feature (1)..(25): SEQ ID NO: 6789; WAN024BW6_at; Start 10; Stop 34
tacacaaaaagagcaagcgccttga

SEQ ID NO: 96733 - DNA, 25 bp, Artificial
  probe
  misc_feature (1)..(25): SEQ ID NO: 6789; WAN024BW6_at; Start 112; Stop 136
aaagcagtaagtgaggcaaagaatg

SEQ ID NO: 96734 - DNA, 25 bp, Artificial
  probe
  misc_feature (1)..(25): SEQ ID NO: 6789; WAN024BW6_at; Start 3; Stop 27
ggaacaatacacaaaaagagcaagc

SEQ ID NO: 96735 - DNA, 25 bp, Artificial
  probe
  misc_feature (1)..(25): SEQ ID NO: 6789; WAN024BW6_at; Start 11; Stop 35
acacaaaaagagcaagcgccttgat

SEQ ID NO: 96736 - DNA, 25 bp, Artificial
  probe
  misc_feature (1)..(25): SEQ ID NO: 6789; WAN024BW6_at; Start 26; Stop 50
gcgccttgattataacttttaatcg

SEQ ID NO: 96737 - DNA, 25 bp, Artificial
  probe
  misc_feature (1)..(25): SEQ ID NO: 6789; WAN024BW6_at; Start 67; Stop 91
gatgagtttattgaagaatttacaa

SEQ ID NO: 96738 - DNA, 25 bp, Artificial
  probe
  misc_feature (1)..(25): SEQ ID NO: 6789; WAN024BW6_at; Start 18; Stop 42
aagagcaagcgccttgattataact

SEQ ID NO: 96739 - DNA, 25 bp, Artificial
  probe
  misc_feature (1)..(25): SEQ ID NO: 6789; WAN024BW6_at; Start 59; Stop 83
tatctcaagatgagtttattgaaga

SEQ ID NO: 96740 - DNA, 25 bp, Artificial
  probe
  misc_feature (1)..(25): SEQ ID NO: 6789; WAN024BW6_at; Start 30; Stop 54
cttgattataacttttaatcgtggg

SEQ ID NO: 96741 - DNA, 25 bp, Artificial
  probe
  misc_feature (1)..(25): SEQ ID NO: 6789; WAN024BW6_at; Start 116; Stop 140
cagtaagtgaggcaaagaatgacaa

SEQ ID NO: 96742 - DNA, 25 bp, Artificial
  probe
  misc_feature (1)..(25): SEQ ID NO: 6789; WAN024BW6_at; Start 118; Stop 142
gtaagtgaggcaaagaatgacaaat

SEQ ID NO: 96743 - DNA, 25 bp, Artificial
  probe
  misc_feature (1)..(25): SEQ ID NO: 6789; WAN024BW6_at; Start 4; Stop 28
gaacaatacacaaaaagagcaagcg

SEQ ID NO: 96744 - DNA, 25 bp, Artificial
  probe
  misc_feature (1)..(25): SEQ ID NO: 6789; WAN024BW6_at; Start 78; Stop 102
tgaagaatttacaaaactaagagaa

SEQ ID NO: 96745 - DNA, 25 bp, Artificial
  probe
  misc_feature (1)..(25): SEQ ID NO: 6789; WAN024BW6_at; Start 44; Stop 68
ttaatcgtggggttatatctcaaga

SEQ ID NO: 96746 - DNA, 25 bp, Artificial
  probe
  misc_feature (1)..(25): SEQ ID NO: 6789; WAN024BW6_at; Start 22; Stop 46
gcaagcgccttgattataactttta

SEQ ID NO: 96747 - DNA, 25 bp, Artificial
  probe
  misc_feature (1)..(25): SEQ ID NO: 6789; WAN024BW6_at; Start 7; Stop 31
caatacacaaaaagagcaagcgcct

SEQ ID NO: 96748 - DNA, 25 bp, Artificial
  probe
  misc_feature (1)..(25): SEQ ID NO: 6789; WAN024BW6_at; Start 110; Stop 134
taaaagcagtaagtgaggcaaagaa

SEQ ID NO: 96749 - DNA, 25 bp, Artificial
  probe
  misc_feature (1)..(25): SEQ ID NO: 6789; WAN024BW6_at; Start 114; Stop 138
agcagtaagtgaggcaaagaatgac

SEQ ID NO: 96750 - DNA, 25 bp, Artificial
  probe
  misc_feature (1)..(25): SEQ ID NO: 6789; WAN024BW6_at; Start 6; Stop 30
acaatacacaaaaagagcaagcgcc

SEQ ID NO: 96751 - DNA, 25 bp, Artificial
  probe
  misc_feature (1)..(25): SEQ ID NO: 6789; WAN024BW6_at; Start 102; Stop 126
aaaggtagtaaaagcagtaagtgag

SEQ ID NO: 96752 - DNA, 25 bp, Artificial
  probe
  misc_feature (1)..(25): SEQ ID NO: 6789; WAN024BW6_at; Start 107; Stop 131
tagtaaaagcagtaagtgaggcaaa

SEQ ID NO: 96753 - DNA, 25 bp, Artificial
  probe
  misc_feature (1)..(25): SEQ ID NO: 6892; WAN024BW7_at; Start 150; Stop 174
caatcgcctagattttacactagaa

SEQ ID NO: 96754 - DNA, 25 bp, Artificial
  probe
  misc_feature (1)..(25): SEQ ID NO: 6892; WAN024BW7_at; Start 30; Stop 54
taaagatatagctgaaaaattgcca

SEQ ID NO: 96755 - DNA, 25 bp, Artificial
  probe
  misc_feature (1)..(25): SEQ ID NO: 6892; WAN024BW7_at; Start 294; Stop 318
gaatgctttttctatcgcctttgat

SEQ ID NO: 96756 - DNA, 25 bp, Artificial
  probe
  misc_feature (1)..(25): SEQ ID NO: 6892; WAN024BW7_at; Start 397; Stop 421
tacgccctactttatgacatgatgg

SEQ ID NO: 96757 - DNA, 25 bp, Artificial
  probe
  misc_feature (1)..(25): SEQ ID NO: 6892; WAN024BW7_at; Start 194; Stop 218
tcgcactcttggacggtacggtaaa

SEQ ID NO: 96758 - DNA, 25 bp, Artificial
  probe
  misc_feature (1)..(25): SEQ ID NO: 6892; WAN024BW7_at; Start 131; Stop 155
tctgcaagctgaaacaaaacaatcg

SEQ ID NO: 96759 - DNA, 25 bp, Artificial
  probe
  misc_feature (1)..(25): SEQ ID NO: 6892; WAN024BW7_at; Start 175; Stop 199
aaaggagtttatagcaagttcgcac

SEQ ID NO: 96760 - DNA, 25 bp, Artificial
  probe
  misc_feature (1)..(25): SEQ ID NO: 6892; WAN024BW7_at; Start 59; Stop 83
tagagggtaagcgtctagaagaaat

SEQ ID NO: 96761 - DNA, 25 bp, Artificial
  probe
  misc_feature (1)..(25): SEQ ID NO: 6892; WAN024BW7_at; Start 49; Stop 73
ttgccagaattagagggtaagcgtc

SEQ ID NO: 96762 - DNA, 25 bp, Artificial
  probe
  misc_feature (1)..(25): SEQ ID NO: 6892; WAN024BW7_at; Start 110; Stop 134
tagagagttgcagaaccaacctctg

SEQ ID NO: 96763 - DNA, 25 bp, Artificial
  probe
  misc_feature (1)..(25): SEQ ID NO: 6892; WAN024BW7_at; Start 348; Stop 372
agcagaacacgacggcttgaaagcc

SEQ ID NO: 96764 - DNA, 25 bp, Artificial
  probe
  misc_feature (1)..(25): SEQ ID NO: 6892; WAN024BW7_at; Start 234; Stop 258
taaagaattgtcagaacgtgggcgc

SEQ ID NO: 96765 - DNA, 25 bp, Artificial
  probe
  misc_feature (1)..(25): SEQ ID NO: 6892; WAN024BW7_at; Start 259; Stop 283
tatttgaagagcgtagaccgctaca

SEQ ID NO: 96766 - DNA, 25 bp, Artificial
  probe
  misc_feature (1)..(25): SEQ ID NO: 6892; WAN024BW7_at; Start 380; Stop 404
gaatcccagataaacattacgccct

SEQ ID NO: 96767 - DNA, 25 bp, Artificial
  probe
  misc_feature (1)..(25): SEQ ID NO: 6892; WAN024BW7_at; Start 362; Stop 386
gcttgaaagccttggacagaatccc

SEQ ID NO: 96768 - DNA, 25 bp, Artificial
  probe
  misc_feature (1)..(25): SEQ ID NO: 6892; WAN024BW7_at; Start 366; Stop 390
gaaagccttggacagaatcccagat

SEQ ID NO: 96769 - DNA, 25 bp, Artificial
  probe
  misc_feature (1)..(25): SEQ ID NO: 6892; WAN024BW7_at; Start 326; Stop 350
tcaaggcggaaaccagacaaaaagc

SEQ ID NO: 96770 - DNA, 25 bp, Artificial
  probe
  misc_feature (1)..(25): SEQ ID NO: 6892; WAN024BW7_at; Start 190; Stop 214
aagttcgcactcttggacggtacgg

SEQ ID NO: 96771 - DNA, 25 bp, Artificial
  probe
  misc_feature (1)..(25): SEQ ID NO: 6892; WAN024BW7_at; Start 272; Stop 296
tagaccgctacaaggcaatgctgaa

SEQ ID NO: 96772 - DNA, 25 bp, Artificial
  probe
  misc_feature (1)..(25): SEQ ID NO: 6892; WAN024BW7_at; Start 138; Stop 162
gctgaaacaaaacaatcgcctagat

SEQ ID NO: 96773 - DNA, 25 bp, Artificial
  probe
  misc_feature (1)..(25): SEQ ID NO: 6892; WAN024BW7_at; Start 103; Stop 127
cgtaacctagagagttgcagaacca

SEQ ID NO: 96774 - DNA, 25 bp, Artificial
  probe
  misc_feature (1)..(25): SEQ ID NO: 6892; WAN024BW7_at; Start 306; Stop 330
tatcgcctttgatagtacggtcaag

SEQ ID NO: 96775 - DNA, 25 bp, Artificial
  probe
  misc_feature (1)..(25): SEQ ID NO: 6892; WAN024BW7_at; Start 157; Stop 181
ctagattttacactagaaaaaggag

SEQ ID NO: 96776 - DNA, 25 bp, Artificial
  probe
  misc_feature (1)..(25): SEQ ID NO: 6892; WAN024BW7_at; Start 238; Stop 262
gaattgtcagaacgtgggcgctatt

SEQ ID NO: 96777 - DNA, 25 bp, Artificial
  probe
  misc_feature (1)..(25): SEQ ID NO: 6892; WAN024BW7_at; Start 282; Stop 306
caaggcaatgctgaatgctttttct

SEQ ID NO: 96778 - DNA, 25 bp, Artificial
  probe
  misc_feature (1)..(25): SEQ ID NO: 6892; WAN024BW7_at; Start 122; Stop 146
gaaccaacctctgcaagctgaaaca

SEQ ID NO: 96779 - DNA, 25 bp, Artificial
  probe
  misc_feature (1)..(25): SEQ ID NO: 6892; WAN024BW7_at; Start 2; Stop 26
tgggaaagaaacatcaagtagtaaa

SEQ ID NO: 96780 - DNA, 25 bp, Artificial
  probe
  misc_feature (1)..(25): SEQ ID NO: 6892; WAN024BW7_at; Start 316; Stop 340
gatagtacggtcaaggcggaaacca

SEQ ID NO: 96781 - DNA, 25 bp, Artificial
  probe
  misc_feature (1)..(25): SEQ ID NO: 6892; WAN024BW7_at; Start 215; Stop 239
taaaagaggaattggaagataaaga

SEQ ID NO: 96782 - DNA, 25 bp, Artificial
  probe
  misc_feature (1)..(25): SEQ ID NO: 6892; WAN024BW7_at; Start 339; Stop 363
cagacaaaaagcagaacacgacggc

SEQ ID NO: 96783 - DNA, 25 bp, Artificial
  probe
  misc_feature (1)..(25): SEQ ID NO: 6892; WAN024BW7_at; Start 248; Stop 272
aacgtgggcgctatttgaagagcgt

SEQ ID NO: 96784 - DNA, 25 bp, Artificial
  probe
  misc_feature (1)..(25): SEQ ID NO: 6892; WAN024BW7_at; Start 401; Stop 425
ccctactttatgacatgatggaggg

SEQ ID NO: 96785 - DNA, 25 bp, Artificial
  probe
  misc_feature (1)..(25): SEQ ID NO: 6892; WAN024BW7_at; Start 97; Stop 121
ggttaccgtaacctagagagttgca

SEQ ID NO: 96786 - DNA, 25 bp, Artificial
  probe
  misc_feature (1)..(25): SEQ ID NO: 6892; WAN024BW7_at; Start 69; Stop 93
gcgtctagaagaaattactaaagta

SEQ ID NO: 96787 - DNA, 25 bp, Artificial
  probe
  misc_feature (1)..(25): SEQ ID NO: 6560; WAN024BW8_at; Start 90; Stop 114
aatagaaaattatgctagtcaaaac

SEQ ID NO: 96788 - DNA, 25 bp, Artificial
  probe
  misc_feature (1)..(25): SEQ ID NO: 6560; WAN024BW8_at; Start 134; Stop 158
ttattagaaaggcagttgagcaact

SEQ ID NO: 96789 - DNA, 25 bp, Artificial
  probe
  misc_feature (1)..(25): SEQ ID NO: 6560; WAN024BW8_at; Start 135; Stop 159
tattagaaaggcagttgagcaactt

SEQ ID NO: 96790 - DNA, 25 bp, Artificial
  probe
  misc_feature (1)..(25): SEQ ID NO: 6560; WAN024BW8_at; Start 102; Stop 126
tgctagtcaaaacaatcttactaag

SEQ ID NO: 96791 - DNA, 25 bp, Artificial
  probe
  misc_feature (1)..(25): SEQ ID NO: 6560; WAN024BW8_at; Start 131; Stop 155
aagttattagaaaggcagttgagca

SEQ ID NO: 96792 - DNA, 25 bp, Artificial
  probe
  misc_feature (1)..(25): SEQ ID NO: 6560; WAN024BW8_at; Start 19; Stop 43
atgggaagaccgacaactgacccta

SEQ ID NO: 96793 - DNA, 25 bp, Artificial
  probe
  misc_feature (1)..(25): SEQ ID NO: 6560; WAN024BW8_at; Start 132; Stop 156
agttattagaaaggcagttgagcaa

SEQ ID NO: 96794 - DNA, 25 bp, Artificial
  probe
  misc_feature (1)..(25): SEQ ID NO: 6560; WAN024BW8_at; Start 127; Stop 151
tctgaagttattagaaaggcagttg

SEQ ID NO: 96795 - DNA, 25 bp, Artificial
  probe
  misc_feature (1)..(25): SEQ ID NO: 6560; WAN024BW8_at; Start 57; Stop 81
gacaataaggtttaatgatgagcaa

SEQ ID NO: 96796 - DNA, 25 bp, Artificial
  probe
  misc_feature (1)..(25): SEQ ID NO: 6560; WAN024BW8_at; Start 114; Stop 138
caatcttactaagtctgaagttatt

SEQ ID NO: 96797 - DNA, 25 bp, Artificial
  probe
  misc_feature (1)..(25): SEQ ID NO: 6560; WAN024BW8_at; Start 98; Stop 122
attatgctagtcaaaacaatcttac

SEQ ID NO: 96798 - DNA, 25 bp, Artificial
  probe
  misc_feature (1)..(25): SEQ ID NO: 6560; WAN024BW8_at; Start 66; Stop 90
gtttaatgatgagcaaagcagaaaa

SEQ ID NO: 96799 - DNA, 25 bp, Artificial
  probe
  misc_feature (1)..(25): SEQ ID NO: 6560; WAN024BW8_at; Start 138; Stop 162
tagaaaggcagttgagcaacttcca

SEQ ID NO: 96800 - DNA, 25 bp, Artificial
  probe
  misc_feature (1)..(25): SEQ ID NO: 6560; WAN024BW8_at; Start 56; Stop 80
tgacaataaggtttaatgatgagca

SEQ ID NO: 96801 - DNA, 25 bp, Artificial
  probe
  misc_feature (1)..(25): SEQ ID NO: 6560; WAN024BW8_at; Start 75; Stop 99
tgagcaaagcagaaaaatagaaaat

SEQ ID NO: 96802 - DNA, 25 bp, Artificial
  probe
  misc_feature (1)..(25): SEQ ID NO: 6560; WAN024BW8_at; Start 122; Stop 146
ctaagtctgaagttattagaaaggc

SEQ ID NO: 96803 - DNA, 25 bp, Artificial
  probe
  misc_feature (1)..(25): SEQ ID NO: 6560; WAN024BW8_at; Start 2; Stop 26
tgactgacaagaaaaaaatgggaag

SEQ ID NO: 96804 - DNA, 25 bp, Artificial
  probe
  misc_feature (1)..(25): SEQ ID NO: 6560; WAN024BW8_at; Start 69; Stop 93
taatgatgagcaaagcagaaaaata

SEQ ID NO: 96805 - DNA, 25 bp, Artificial
  probe
  misc_feature (1)..(25): SEQ ID NO: 6560; WAN024BW8_at; Start 65; Stop 89
ggtttaatgatgagcaaagcagaaa

SEQ ID NO: 96806 - DNA, 25 bp, Artificial
  probe
  misc_feature (1)..(25): SEQ ID NO: 6560; WAN024BW8_at; Start 124; Stop 148
aagtctgaagttattagaaaggcag

SEQ ID NO: 96807 - DNA, 25 bp, Artificial
  probe
  misc_feature (1)..(25): SEQ ID NO: 6560; WAN024BW8_at; Start 63; Stop 87
aaggtttaatgatgagcaaagcaga

SEQ ID NO: 96808 - DNA, 25 bp, Artificial
  probe
  misc_feature (1)..(25): SEQ ID NO: 6560; WAN024BW8_at; Start 100; Stop 124
tatgctagtcaaaacaatcttacta

SEQ ID NO: 96809 - DNA, 25 bp, Artificial
  probe
  misc_feature (1)..(25): SEQ ID NO: 6560; WAN024BW8_at; Start 20; Stop 44
tgggaagaccgacaactgaccctaa

SEQ ID NO: 96810 - DNA, 25 bp, Artificial
  probe
  misc_feature (1)..(25): SEQ ID NO: 6560; WAN024BW8_at; Start 140; Stop 164
gaaaggcagttgagcaacttccaga

SEQ ID NO: 96811 - DNA, 25 bp, Artificial
  probe
  misc_feature (1)..(25): SEQ ID NO: 6560; WAN024BW8_at; Start 106; Stop 130
agtcaaaacaatcttactaagtctg

SEQ ID NO: 96812 - DNA, 25 bp, Artificial
  probe
  misc_feature (1)..(25): SEQ ID NO: 6560; WAN024BW8_at; Start 18; Stop 42
aatgggaagaccgacaactgaccct

SEQ ID NO: 96813 - DNA, 25 bp, Artificial
  probe
  misc_feature (1)..(25): SEQ ID NO: 6560; WAN024BW8_at; Start 60; Stop 84
aataaggtttaatgatgagcaaagc

SEQ ID NO: 96814 - DNA, 25 bp, Artificial
  probe
  misc_feature (1)..(25): SEQ ID NO: 6560; WAN024BW8_at; Start 94; Stop 118
gaaaattatgctagtcaaaacaatc

SEQ ID NO: 96815 - DNA, 25 bp, Artificial
  probe
  misc_feature (1)..(25): SEQ ID NO: 6560; WAN024BW8_at; Start 141; Stop 165
aaaggcagttgagcaacttccagaa

SEQ ID NO: 96816 - DNA, 25 bp, Artificial
  probe
  misc_feature (1)..(25): SEQ ID NO: 6560; WAN024BW8_at; Start 109; Stop 133
caaaacaatcttactaagtctgaag

SEQ ID NO: 96817 - DNA, 25 bp, Artificial
  probe
  misc_feature (1)..(25): SEQ ID NO: 6560; WAN024BW8_at; Start 62; Stop 86
taaggtttaatgatgagcaaagcag

SEQ ID NO: 96818 - DNA, 25 bp, Artificial
  probe
  misc_feature (1)..(25): SEQ ID NO: 6560; WAN024BW8_at; Start 130; Stop 154
gaagttattagaaaggcagttgagc

SEQ ID NO: 96819 - DNA, 25 bp, Artificial
  probe
  misc_feature (1)..(25): SEQ ID NO: 6560; WAN024BW8_at; Start 137; Stop 161
ttagaaaggcagttgagcaacttcc

SEQ ID NO: 96820 - DNA, 25 bp, Artificial
  probe
  misc_feature (1)..(25): SEQ ID NO: 6560; WAN024BW8_at; Start 72; Stop 96
tgatgagcaaagcagaaaaatagaa

SEQ ID NO: 96821 - DNA, 25 bp, Artificial
  probe
  misc_feature (1)..(25): SEQ ID NO: 7153; WAN024BW9_at; Start 370; Stop 394
caaaatccgttatttgtagcggtag

SEQ ID NO: 96822 - DNA, 25 bp, Artificial
  probe
  misc_feature (1)..(25): SEQ ID NO: 7153; WAN024BW9_at; Start 84; Stop 108
cactcacgggatgaacttggtaact

SEQ ID NO: 96823 - DNA, 25 bp, Artificial
  probe
  misc_feature (1)..(25): SEQ ID NO: 7153; WAN024BW9_at; Start 594; Stop 618
tctgaaagaaatccgactaaatggc

SEQ ID NO: 96824 - DNA, 25 bp, Artificial
  probe
  misc_feature (1)..(25): SEQ ID NO: 7153; WAN024BW9_at; Start 274; Stop 298
taccccaaaggagaaacacacaaca

SEQ ID NO: 96825 - DNA, 25 bp, Artificial
  probe
  misc_feature (1)..(25): SEQ ID NO: 7153; WAN024BW9_at; Start 504; Stop 528
gaatatgttgacagagttcggagtc

SEQ ID NO: 96826 - DNA, 25 bp, Artificial
  probe
  misc_feature (1)..(25): SEQ ID NO: 7153; WAN024BW9_at; Start 226; Stop 250
gacatgacaacacagcaaaaagatt

SEQ ID NO: 96827 - DNA, 25 bp, Artificial
  probe
  misc_feature (1)..(25): SEQ ID NO: 7153; WAN024BW9_at; Start 529; Stop 553
tatgaagttttatcgcagtcacgca

SEQ ID NO: 96828 - DNA, 25 bp, Artificial
  probe
  misc_feature (1)..(25): SEQ ID NO: 7153; WAN024BW9_at; Start 138; Stop 162
aacagttggcaaatgggcacagggc

SEQ ID NO: 96829 - DNA, 25 bp, Artificial
  probe
  misc_feature (1)..(25): SEQ ID NO: 7153; WAN024BW9_at; Start 70; Stop 94
gatgaaatgcaaaccactcacggga

SEQ ID NO: 96830 - DNA, 25 bp, Artificial
  probe
  misc_feature (1)..(25): SEQ ID NO: 7153; WAN024BW9_at; Start 634; Stop 658
gaattggtggaagaaccacagacca

SEQ ID NO: 96831 - DNA, 25 bp, Artificial
  probe
  misc_feature (1)..(25): SEQ ID NO: 7153; WAN024BW9_at; Start 469; Stop 493
tatgtaatatctagggcaggtcaaa

SEQ ID NO: 96832 - DNA, 25 bp, Artificial
  probe
  misc_feature (1)..(25): SEQ ID NO: 7153; WAN024BW9_at; Start 168; Stop 192
taagcccaacaagaaaagcagaaaa

SEQ ID NO: 96833 - DNA, 25 bp, Artificial
  probe
  misc_feature (1)..(25): SEQ ID NO: 7153; WAN024BW9_at; Start 19; Stop 43
ggattgacgaaaggcaggcaagcaa

SEQ ID NO: 96834 - DNA, 25 bp, Artificial
  probe
  misc_feature (1)..(25): SEQ ID NO: 7153; WAN024BW9_at; Start 609; Stop 633
actaaatggctactacatggctggg

SEQ ID NO: 96835 - DNA, 25 bp, Artificial
  probe
  misc_feature (1)..(25): SEQ ID NO: 7153; WAN024BW9_at; Start 660; Stop 684
tataaaagcccctggcacgttggca

SEQ ID NO: 96836 - DNA, 25 bp, Artificial
  probe
  misc_feature (1)..(25): SEQ ID NO: 7153; WAN024BW9_at; Start 407; Stop 431
tgattgaaatccaaaacaccacgga

SEQ ID NO: 96837 - DNA, 25 bp, Artificial
  probe
  misc_feature (1)..(25): SEQ ID NO: 7153; WAN024BW9_at; Start 153; Stop 177
ggcacagggcaaacataagcccaac

SEQ ID NO: 96838 - DNA, 25 bp, Artificial
  probe
  misc_feature (1)..(25): SEQ ID NO: 7153; WAN024BW9_at; Start 679; Stop 703
ttggcagaggcagagcggtattata

SEQ ID NO: 96839 - DNA, 25 bp, Artificial
  probe
  misc_feature (1)..(25): SEQ ID NO: 7153; WAN024BW9_at; Start 33; Stop 57
caggcaagcaatgaagaggaactat

SEQ ID NO: 96840 - DNA, 25 bp, Artificial
  probe
  misc_feature (1)..(25): SEQ ID NO: 7153; WAN024BW9_at; Start 104; Stop 128
taactattggccaacggataggcat

SEQ ID NO: 96841 - DNA, 25 bp, Artificial
  probe
  misc_feature (1)..(25): SEQ ID NO: 7153; WAN024BW9_at; Start 708; Stop 732
tacactagccaaagccattgcagag

SEQ ID NO: 96842 - DNA, 25 bp, Artificial
  probe
  misc_feature (1)..(25): SEQ ID NO: 7153; WAN024BW9_at; Start 50; Stop 74
ggaactatacaagggtcatcgatga

SEQ ID NO: 96843 - DNA, 25 bp, Artificial
  probe
  misc_feature (1)..(25): SEQ ID NO: 7153; WAN024BW9_at; Start 210; Stop 234
cagagaggttaagcaagacatgaca

SEQ ID NO: 96844 - DNA, 25 bp, Artificial
  probe
  misc_feature (1)..(25): SEQ ID NO: 7153; WAN024BW9_at; Start 328; Stop 352
caacgatttggatctaaacactttg

SEQ ID NO: 96845 - DNA, 25 bp, Artificial
  probe
  misc_feature (1)..(25): SEQ ID NO: 7153; WAN024BW9_at; Start 735; Stop 759
tcagaatatggacgagaagagccgt

SEQ ID NO: 96846 - DNA, 25 bp, Artificial
  probe
  misc_feature (1)..(25): SEQ ID NO: 7153; WAN024BW9_at; Start 693; Stop 717
gcggtattatatcgatacactagcc

SEQ ID NO: 96847 - DNA, 25 bp, Artificial
  probe
  misc_feature (1)..(25): SEQ ID NO: 7153; WAN024BW9_at; Start 354; Stop 378
tgtttatggagacattcaaaatccg

SEQ ID NO: 96848 - DNA, 25 bp, Artificial
  probe
  misc_feature (1)..(25): SEQ ID NO: 7153; WAN024BW9_at; Start 768; Stop 792
caagctaaccagattcatgcaggag

SEQ ID NO: 96849 - DNA, 25 bp, Artificial
  probe
  misc_feature (1)..(25): SEQ ID NO: 7153; WAN024BW9_at; Start 723; Stop 747
cattgcagaggctcagaatatggac

SEQ ID NO: 96850 - DNA, 25 bp, Artificial
  probe
  misc_feature (1)..(25): SEQ ID NO: 7153; WAN024BW9_at; Start 783; Stop 807
catgcaggaggtagaaccacaatgg

SEQ ID NO: 96851 - DNA, 25 bp, Artificial
  probe
  misc_feature (1)..(25): SEQ ID NO: 7153; WAN024BW9_at; Start 750; Stop 774
gaagagccgtctgacaagcaagcta

SEQ ID NO: 96852 - DNA, 25 bp, Artificial
  probe
  misc_feature (1)..(25): SEQ ID NO: 7153; WAN024BW9_at; Start 194; Stop 218
gactaaatcagttatacagagaggt

SEQ ID NO: 96853 - DNA, 25 bp, Artificial
  probe
  misc_feature (1)..(25): SEQ ID NO: 7153; WAN024BW9_at; Start 447; Stop 471
agatgatgatgaaaagctgacctat

SEQ ID NO: 96854 - DNA, 25 bp, Artificial
  probe
  misc_feature (1)..(25): SEQ ID NO: 7153; WAN024BW9_at; Start 546; Stop 570
gtcacgcaaaccactagcaaaagag

SEQ ID NO: 96855 - DNA, 25 bp, Artificial
  probe
  misc_feature (1)..(25): SEQ ID NO: 6530; WAN024BWA_at; Start 293; Stop 317
gaaaaagttttcctgatgttgccca

SEQ ID NO: 96856 - DNA, 25 bp, Artificial
  probe
  misc_feature (1)..(25): SEQ ID NO: 6530; WAN024BWA_at; Start 188; Stop 212
tgcgtcttacattgaaagcgttgcg

SEQ ID NO: 96857 - DNA, 25 bp, Artificial
  probe
  misc_feature (1)..(25): SEQ ID NO: 6530; WAN024BWA_at; Start 336; Stop 360
acttttcggtgttgcttatgacgac

SEQ ID NO: 96858 - DNA, 25 bp, Artificial
  probe
  misc_feature (1)..(25): SEQ ID NO: 6530; WAN024BWA_at; Start 195; Stop 219
tacattgaaagcgttgcgggctaat

SEQ ID NO: 96859 - DNA, 25 bp, Artificial
  probe
  misc_feature (1)..(25): SEQ ID NO: 6530; WAN024BWA_at; Start 160; Stop 184
tatctaaaagaaaggagtgagggct

SEQ ID NO: 96860 - DNA, 25 bp, Artificial
  probe
  misc_feature (1)..(25): SEQ ID NO: 6530; WAN024BWA_at; Start 254; Stop 278
taggaatttctacaactacttggag

SEQ ID NO: 96861 - DNA, 25 bp, Artificial
  probe
  misc_feature (1)..(25): SEQ ID NO: 6530; WAN024BWA_at; Start 11; Stop 35
gcaaccgcctttctataattcataa

SEQ ID NO: 96862 - DNA, 25 bp, Artificial
  probe
  misc_feature (1)..(25): SEQ ID NO: 6530; WAN024BWA_at; Start 118; Stop 142
tcggttttaccgtatactgtcattg

SEQ ID NO: 96863 - DNA, 25 bp, Artificial
  probe
  misc_feature (1)..(25): SEQ ID NO: 6530; WAN024BWA_at; Start 162; Stop 186
tctaaaagaaaggagtgagggctat

SEQ ID NO: 96864 - DNA, 25 bp, Artificial
  probe
  misc_feature (1)..(25): SEQ ID NO: 6530; WAN024BWA_at; Start 125; Stop 149
taccgtatactgtcattgtatccga

SEQ ID NO: 96865 - DNA, 25 bp, Artificial
  probe
  misc_feature (1)..(25): SEQ ID NO: 6530; WAN024BWA_at; Start 221; Stop 245
gcaacatgaaacaatcagaggtagc

SEQ ID NO: 96866 - DNA, 25 bp, Artificial
  probe
  misc_feature (1)..(25): SEQ ID NO: 6530; WAN024BWA_at; Start 297; Stop 321
aagttttcctgatgttgcccaagta

SEQ ID NO: 96867 - DNA, 25 bp, Artificial
  probe
  misc_feature (1)..(25): SEQ ID NO: 6530; WAN024BWA_at; Start 304; Stop 328
cctgatgttgcccaagtaaaagaga

SEQ ID NO: 96868 - DNA, 25 bp, Artificial
  probe
  misc_feature (1)..(25): SEQ ID NO: 6530; WAN024BWA_at; Start 312; Stop 336
tgcccaagtaaaagagattgaaaaa

SEQ ID NO: 96869 - DNA, 25 bp, Artificial
  probe
  misc_feature (1)..(25): SEQ ID NO: 6530; WAN024BWA_at; Start 192; Stop 216
tcttacattgaaagcgttgcgggct

SEQ ID NO: 96870 - DNA, 25 bp, Artificial
  probe
  misc_feature (1)..(25): SEQ ID NO: 6530; WAN024BWA_at; Start 307; Stop 331
gatgttgcccaagtaaaagagattg

SEQ ID NO: 96871 - DNA, 25 bp, Artificial
  probe
  misc_feature (1)..(25): SEQ ID NO: 6530; WAN024BWA_at; Start 232; Stop 256
caatcagaggtagcacaaaaattag

SEQ ID NO: 96872 - DNA, 25 bp, Artificial
  probe
  misc_feature (1)..(25): SEQ ID NO: 6530; WAN024BWA_at; Start 174; Stop 198
gagtgagggctatttgcgtcttaca

SEQ ID NO: 96873 - DNA, 25 bp, Artificial
  probe
  misc_feature (1)..(25): SEQ ID NO: 6530; WAN024BWA_at; Start 342; Stop 366
cggtgttgcttatgacgacattatt

SEQ ID NO: 96874 - DNA, 25 bp, Artificial
  probe
  misc_feature (1)..(25): SEQ ID NO: 6530; WAN024BWA_at; Start 205; Stop 229
gcgttgcgggctaatagcaacatga

SEQ ID NO: 96875 - DNA, 25 bp, Artificial
  probe
  misc_feature (1)..(25): SEQ ID NO: 6530; WAN024BWA_at; Start 143; Stop 167
tatccgatttaaacggatatctaaa

SEQ ID NO: 96876 - DNA, 25 bp, Artificial
  probe
  misc_feature (1)..(25): SEQ ID NO: 6530; WAN024BWA_at; Start 225; Stop 249
catgaaacaatcagaggtagcacaa

SEQ ID NO: 96877 - DNA, 25 bp, Artificial
  probe
  misc_feature (1)..(25): SEQ ID NO: 6530; WAN024BWA_at; Start 211; Stop 235
cgggctaatagcaacatgaaacaat

SEQ ID NO: 96878 - DNA, 25 bp, Artificial
  probe
  misc_feature (1)..(25): SEQ ID NO: 6530; WAN024BWA_at; Start 198; Stop 222
attgaaagcgttgcgggctaatagc

SEQ ID NO: 96879 - DNA, 25 bp, Artificial
  probe
  misc_feature (1)..(25): SEQ ID NO: 6530; WAN024BWA_at; Start 1; Stop 25
atgacatggtgcaaccgcctttcta

SEQ ID NO: 96880 - DNA, 25 bp, Artificial
  probe
  misc_feature (1)..(25): SEQ ID NO: 6530; WAN024BWA_at; Start 270; Stop 294
tacttggagtaagtgggaaaatgga

SEQ ID NO: 96881 - DNA, 25 bp, Artificial
  probe
  misc_feature (1)..(25): SEQ ID NO: 6530; WAN024BWA_at; Start 134; Stop 158
ctgtcattgtatccgatttaaacgg

SEQ ID NO: 96882 - DNA, 25 bp, Artificial
  probe
  misc_feature (1)..(25): SEQ ID NO: 6530; WAN024BWA_at; Start 3; Stop 27
gacatggtgcaaccgcctttctata

SEQ ID NO: 96883 - DNA, 25 bp, Artificial
  probe
  misc_feature (1)..(25): SEQ ID NO: 6530; WAN024BWA_at; Start 8; Stop 32
ggtgcaaccgcctttctataattca

SEQ ID NO: 96884 - DNA, 25 bp, Artificial
  probe
  misc_feature (1)..(25): SEQ ID NO: 6530; WAN024BWA_at; Start 236; Stop 260
cagaggtagcacaaaaattaggaat

SEQ ID NO: 96885 - DNA, 25 bp, Artificial
  probe
  misc_feature (1)..(25): SEQ ID NO: 6530; WAN024BWA_at; Start 262; Stop 286
tctacaactacttggagtaagtggg

SEQ ID NO: 96886 - DNA, 25 bp, Artificial
  probe
  misc_feature (1)..(25): SEQ ID NO: 6530; WAN024BWA_at; Start 183; Stop 207
ctatttgcgtcttacattgaaagcg

SEQ ID NO: 96887 - DNA, 25 bp, Artificial
  probe
  misc_feature (1)..(25): SEQ ID NO: 6530; WAN024BWA_at; Start 334; Stop 358
aaacttttcggtgttgcttatgacg

SEQ ID NO: 96888 - DNA, 25 bp, Artificial
  probe
  misc_feature (1)..(25): SEQ ID NO: 6530; WAN024BWA_at; Start 179; Stop 203
agggctatttgcgtcttacattgaa

SEQ ID NO: 96889 - DNA, 25 bp, Artificial
  probe
  misc_feature (1)..(25): SEQ ID NO: 7643; WAN024BWB_at; Start 129; Stop 153
tgctgctgacttgtctaatatcgcc

SEQ ID NO: 96890 - DNA, 25 bp, Artificial
  probe
  misc_feature (1)..(25): SEQ ID NO: 7643; WAN024BWB_at; Start 56; Stop 80
tcggcttatatatgttggtacactt

SEQ ID NO: 96891 - DNA, 25 bp, Artificial
  probe
  misc_feature (1)..(25): SEQ ID NO: 7643; WAN024BWB_at; Start 3; Stop 27
gggtaacctgctatcagttaagggc

SEQ ID NO: 96892 - DNA, 25 bp, Artificial
  probe
  misc_feature (1)..(25): SEQ ID NO: 7643; WAN024BWB_at; Start 118; Stop 142
gacaagctagctgctgctgacttgt

SEQ ID NO: 96893 - DNA, 25 bp, Artificial
  probe
  misc_feature (1)..(25): SEQ ID NO: 7643; WAN024BWB_at; Start 10; Stop 34
ctgctatcagttaagggcttttata

SEQ ID NO: 96894 - DNA, 25 bp, Artificial
  probe
  misc_feature (1)..(25): SEQ ID NO: 7643; WAN024BWB_at; Start 122; Stop 146
agctagctgctgctgacttgtctaa

SEQ ID NO: 96895 - DNA, 25 bp, Artificial
  probe
  misc_feature (1)..(25): SEQ ID NO: 7643; WAN024BWB_at; Start 6; Stop 30
taacctgctatcagttaagggcttt

SEQ ID NO: 96896 - DNA, 25 bp, Artificial
  probe
  misc_feature (1)..(25): SEQ ID NO: 7643; WAN024BWB_at; Start 114; Stop 138
aaaagacaagctagctgctgctgac

SEQ ID NO: 96897 - DNA, 25 bp, Artificial
  probe
  misc_feature (1)..(25): SEQ ID NO: 7643; WAN024BWB_at; Start 127; Stop 151
gctgctgctgacttgtctaatatcg

SEQ ID NO: 96898 - DNA, 25 bp, Artificial
  probe
  misc_feature (1)..(25): SEQ ID NO: 7643; WAN024BWB_at; Start 120; Stop 144
caagctagctgctgctgacttgtct

SEQ ID NO: 96899 - DNA, 25 bp, Artificial
  probe
  misc_feature (1)..(25): SEQ ID NO: 7643; WAN024BWB_at; Start 9; Stop 33
cctgctatcagttaagggcttttat

SEQ ID NO: 96900 - DNA, 25 bp, Artificial
  probe
  misc_feature (1)..(25): SEQ ID NO: 7643; WAN024BWB_at; Start 112; Stop 136
aaaaaagacaagctagctgctgctg

SEQ ID NO: 96901 - DNA, 25 bp, Artificial
  probe
  misc_feature (1)..(25): SEQ ID NO: 7643; WAN024BWB_at; Start 1; Stop 25
ttgggtaacctgctatcagttaagg

SEQ ID NO: 96902 - DNA, 25 bp, Artificial
  probe
  misc_feature (1)..(25): SEQ ID NO: 7643; WAN024BWB_at; Start 87; Stop 111
ttactacactagttttctacaacaa

SEQ ID NO: 96903 - DNA, 25 bp, Artificial
  probe
  misc_feature (1)..(25): SEQ ID NO: 7643; WAN024BWB_at; Start 62; Stop 86
tatatatgttggtacacttttcttt

SEQ ID NO: 96904 - DNA, 25 bp, Artificial
  probe
  misc_feature (1)..(25): SEQ ID NO: 7643; WAN024BWB_at; Start 59; Stop 83
gcttatatatgttggtacacttttc

SEQ ID NO: 96905 - DNA, 25 bp, Artificial
  probe
  misc_feature (1)..(25): SEQ ID NO: 7643; WAN024BWB_at; Start 88; Stop 112
tactacactagttttctacaacaaa

SEQ ID NO: 96906 - DNA, 25 bp, Artificial
  probe
  misc_feature (1)..(25): SEQ ID NO: 7643; WAN024BWB_at; Start 116; Stop 140
aagacaagctagctgctgctgactt

SEQ ID NO: 96907 - DNA, 25 bp, Artificial
  probe
  misc_feature (1)..(25): SEQ ID NO: 7643; WAN024BWB_at; Start 45; Stop 69
aaatcagtgtatcggcttatatatg

SEQ ID NO: 96908 - DNA, 25 bp, Artificial
  probe
  misc_feature (1)..(25): SEQ ID NO: 7643; WAN024BWB_at; Start 54; Stop 78
tatcggcttatatatgttggtacac

SEQ ID NO: 96909 - DNA, 25 bp, Artificial
  probe
  misc_feature (1)..(25): SEQ ID NO: 7643; WAN024BWB_at; Start 123; Stop 147
gctagctgctgctgacttgtctaat

SEQ ID NO: 96910 - DNA, 25 bp, Artificial
  probe
  misc_feature (1)..(25): SEQ ID NO: 7643; WAN024BWB_at; Start 115; Stop 139
aaagacaagctagctgctgctgact

SEQ ID NO: 96911 - DNA, 25 bp, Artificial
  probe
  misc_feature (1)..(25): SEQ ID NO: 7643; WAN024BWB_at; Start 12; Stop 36
gctatcagttaagggcttttatatt

SEQ ID NO: 96912 - DNA, 25 bp, Artificial
  probe
  misc_feature (1)..(25): SEQ ID NO: 7643; WAN024BWB_at; Start 125; Stop 149
tagctgctgctgacttgtctaatat

SEQ ID NO: 96913 - DNA, 25 bp, Artificial
  probe
  misc_feature (1)..(25): SEQ ID NO: 7643; WAN024BWB_at; Start 117; Stop 141
agacaagctagctgctgctgacttg

SEQ ID NO: 96914 - DNA, 25 bp, Artificial
  probe
  misc_feature (1)..(25): SEQ ID NO: 7643; WAN024BWB_at; Start 43; Stop 67
aaaaatcagtgtatcggcttatata

SEQ ID NO: 96915 - DNA, 25 bp, Artificial
  probe
  misc_feature (1)..(25): SEQ ID NO: 7643; WAN024BWB_at; Start 113; Stop 137
aaaaagacaagctagctgctgctga

SEQ ID NO: 96916 - DNA, 25 bp, Artificial
  probe
  misc_feature (1)..(25): SEQ ID NO: 7643; WAN024BWB_at; Start 2; Stop 26
tgggtaacctgctatcagttaaggg

SEQ ID NO: 96917 - DNA, 25 bp, Artificial
  probe
  misc_feature (1)..(25): SEQ ID NO: 7643; WAN024BWB_at; Start 5; Stop 29
gtaacctgctatcagttaagggctt

SEQ ID NO: 96918 - DNA, 25 bp, Artificial
  probe
  misc_feature (1)..(25): SEQ ID NO: 7643; WAN024BWB_at; Start 121; Stop 145
aagctagctgctgctgacttgtcta

SEQ ID NO: 96919 - DNA, 25 bp, Artificial
  probe
  misc_feature (1)..(25): SEQ ID NO: 7643; WAN024BWB_at; Start 4; Stop 28
ggtaacctgctatcagttaagggct

SEQ ID NO: 96920 - DNA, 25 bp, Artificial
  probe
  misc_feature (1)..(25): SEQ ID NO: 7643; WAN024BWB_at; Start 36; Stop 60
tttacaaaaaaatcagtgtatcggc

SEQ ID NO: 96921 - DNA, 25 bp, Artificial
  probe
  misc_feature (1)..(25): SEQ ID NO: 7643; WAN024BWB_at; Start 49; Stop 73
cagtgtatcggcttatatatgttgg

SEQ ID NO: 96922 - DNA, 25 bp, Artificial
  probe
  misc_feature (1)..(25): SEQ ID NO: 7643; WAN024BWB_at; Start 8; Stop 32
acctgctatcagttaagggctttta

SEQ ID NO: 96923 - DNA, 25 bp, Artificial
  probe
  misc_feature (1)..(25): SEQ ID NO: 7397; WAN024BWC_at; Start 58; Stop 82
gctactaattgcctgaatctttccc

SEQ ID NO: 96924 - DNA, 25 bp, Artificial
  probe
  misc_feature (1)..(25): SEQ ID NO: 7397; WAN024BWC_at; Start 34; Stop 58
tttctgcttccaatctctcaagatg

SEQ ID NO: 96925 - DNA, 25 bp, Artificial
  probe
  misc_feature (1)..(25): SEQ ID NO: 7397; WAN024BWC_at; Start 36; Stop 60
tctgcttccaatctctcaagatgct

SEQ ID NO: 96926 - DNA, 25 bp, Artificial
  probe
  misc_feature (1)..(25): SEQ ID NO: 7397; WAN024BWC_at; Start 49; Stop 73
tctcaagatgctactaattgcctga

SEQ ID NO: 96927 - DNA, 25 bp, Artificial
  probe
  misc_feature (1)..(25): SEQ ID NO: 7397; WAN024BWC_at; Start 30; Stop 54
gacctttctgcttccaatctctcaa

SEQ ID NO: 96928 - DNA, 25 bp, Artificial
  probe
  misc_feature (1)..(25): SEQ ID NO: 7397; WAN024BWC_at; Start 55; Stop 79
gatgctactaattgcctgaatcttt

SEQ ID NO: 96929 - DNA, 25 bp, Artificial
  probe
  misc_feature (1)..(25): SEQ ID NO: 7397; WAN024BWC_at; Start 23; Stop 47
gtaaccagacctttctgcttccaat

SEQ ID NO: 96930 - DNA, 25 bp, Artificial
  probe
  misc_feature (1)..(25): SEQ ID NO: 7397; WAN024BWC_at; Start 75; Stop 99
tctttcccgttatttcagttcaggc

SEQ ID NO: 96931 - DNA, 25 bp, Artificial
  probe
  misc_feature (1)..(25): SEQ ID NO: 7397; WAN024BWC_at; Start 99; Stop 123
cgatattagacaagtcagcagcagc

SEQ ID NO: 96932 - DNA, 25 bp, Artificial
  probe
  misc_feature (1)..(25): SEQ ID NO: 7397; WAN024BWC_at; Start 52; Stop 76
caagatgctactaattgcctgaatc

SEQ ID NO: 96933 - DNA, 25 bp, Artificial
  probe
  misc_feature (1)..(25): SEQ ID NO: 7397; WAN024BWC_at; Start 63; Stop 87
taattgcctgaatctttcccgttat

SEQ ID NO: 96934 - DNA, 25 bp, Artificial
  probe
  misc_feature (1)..(25): SEQ ID NO: 7397; WAN024BWC_at; Start 97; Stop 121
ggcgatattagacaagtcagcagca

SEQ ID NO: 96935 - DNA, 25 bp, Artificial
  probe
  misc_feature (1)..(25): SEQ ID NO: 7397; WAN024BWC_at; Start 3; Stop 27
gaaagagtcccaactcaacagtaac

SEQ ID NO: 96936 - DNA, 25 bp, Artificial
  probe
  misc_feature (1)..(25): SEQ ID NO: 7397; WAN024BWC_at; Start 82; Stop 106
cgttatttcagttcaggcgatatta

SEQ ID NO: 96937 - DNA, 25 bp, Artificial
  probe
  misc_feature (1)..(25): SEQ ID NO: 7397; WAN024BWC_at; Start 1; Stop 25
ttgaaagagtcccaactcaacagta

SEQ ID NO: 96938 - DNA, 25 bp, Artificial
  probe
  misc_feature (1)..(25): SEQ ID NO: 7397; WAN024BWC_at; Start 90; Stop 114
cagttcaggcgatattagacaagtc

SEQ ID NO: 96939 - DNA, 25 bp, Artificial
  probe
  misc_feature (1)..(25): SEQ ID NO: 7397; WAN024BWC_at; Start 21; Stop 45
cagtaaccagacctttctgcttcca

SEQ ID NO: 96940 - DNA, 25 bp, Artificial
  probe
  misc_feature (1)..(25): SEQ ID NO: 7397; WAN024BWC_at; Start 92; Stop 116
gttcaggcgatattagacaagtcag

SEQ ID NO: 96941 - DNA, 25 bp, Artificial
  probe
  misc_feature (1)..(25): SEQ ID NO: 7397; WAN024BWC_at; Start 17; Stop 41
tcaacagtaaccagacctttctgct

SEQ ID NO: 96942 - DNA, 25 bp, Artificial
  probe
  misc_feature (1)..(25): SEQ ID NO: 7397; WAN024BWC_at; Start 67; Stop 91
tgcctgaatctttcccgttatttca

SEQ ID NO: 96943 - DNA, 25 bp, Artificial
  probe
  misc_feature (1)..(25): SEQ ID NO: 7397; WAN024BWC_at; Start 15; Stop 39
actcaacagtaaccagacctttctg

SEQ ID NO: 96944 - DNA, 25 bp, Artificial
  probe
  misc_feature (1)..(25): SEQ ID NO: 7397; WAN024BWC_at; Start 47; Stop 71
tctctcaagatgctactaattgcct

SEQ ID NO: 96945 - DNA, 25 bp, Artificial
  probe
  misc_feature (1)..(25): SEQ ID NO: 7397; WAN024BWC_at; Start 94; Stop 118
tcaggcgatattagacaagtcagca

SEQ ID NO: 96946 - DNA, 25 bp, Artificial
  probe
  misc_feature (1)..(25): SEQ ID NO: 7397; WAN024BWC_at; Start 13; Stop 37
caactcaacagtaaccagacctttc

SEQ ID NO: 96947 - DNA, 25 bp, Artificial
  probe
  misc_feature (1)..(25): SEQ ID NO: 7397; WAN024BWC_at; Start 39; Stop 63
gcttccaatctctcaagatgctact

SEQ ID NO: 96948 - DNA, 25 bp, Artificial
  probe
  misc_feature (1)..(25): SEQ ID NO: 7397; WAN024BWC_at; Start 88; Stop 112
ttcagttcaggcgatattagacaag

SEQ ID NO: 96949 - DNA, 25 bp, Artificial
  probe
  misc_feature (1)..(25): SEQ ID NO: 7397; WAN024BWC_at; Start 77; Stop 101
tttcccgttatttcagttcaggcga

SEQ ID NO: 96950 - DNA, 25 bp, Artificial
  probe
  misc_feature (1)..(25): SEQ ID NO: 7397; WAN024BWC_at; Start 85; Stop 109
tatttcagttcaggcgatattagac

SEQ ID NO: 96951 - DNA, 25 bp, Artificial
  probe
  misc_feature (1)..(25): SEQ ID NO: 7397; WAN024BWC_at; Start 79; Stop 103
tcccgttatttcagttcaggcgata

SEQ ID NO: 96952 - DNA, 25 bp, Artificial
  probe
  misc_feature (1)..(25): SEQ ID NO: 7397; WAN024BWC_at; Start 80; Stop 104
cccgttatttcagttcaggcgatat

SEQ ID NO: 96953 - DNA, 25 bp, Artificial
  probe
  misc_feature (1)..(25): SEQ ID NO: 7397; WAN024BWC_at; Start 42; Stop 66
tccaatctctcaagatgctactaat

SEQ ID NO: 96954 - DNA, 25 bp, Artificial
  probe
  misc_feature (1)..(25): SEQ ID NO: 7397; WAN024BWC_at; Start 95; Stop 119
caggcgatattagacaagtcagcag

SEQ ID NO: 96955 - DNA, 25 bp, Artificial
  probe
  misc_feature (1)..(25): SEQ ID NO: 7397; WAN024BWC_at; Start 7; Stop 31
gagtcccaactcaacagtaaccaga

SEQ ID NO: 96956 - DNA, 25 bp, Artificial
  probe
  misc_feature (1)..(25): SEQ ID NO: 7397; WAN024BWC_at; Start 60; Stop 84
tactaattgcctgaatctttcccgt

SEQ ID NO: 96957 - DNA, 25 bp, Artificial
  probe
  misc_feature (1)..(25): SEQ ID NO: 6793; WAN024BWD_at; Start 117; Stop 141
caaaatcaagcaacatactgtcagc

SEQ ID NO: 96958 - DNA, 25 bp, Artificial
  probe
  misc_feature (1)..(25): SEQ ID NO: 6793; WAN024BWD_at; Start 322; Stop 346
gctcgcacctgctatgaccatattg

SEQ ID NO: 96959 - DNA, 25 bp, Artificial
  probe
  misc_feature (1)..(25): SEQ ID NO: 6793; WAN024BWD_at; Start 522; Stop 546
ttggagcgaacgtaaaaatcatgtc

SEQ ID NO: 96960 - DNA, 25 bp, Artificial
  probe
  misc_feature (1)..(25): SEQ ID NO: 6793; WAN024BWD_at; Start 132; Stop 156
tactgtcagctatcacctcaaatta

SEQ ID NO: 96961 - DNA, 25 bp, Artificial
  probe
  misc_feature (1)..(25): SEQ ID NO: 6793; WAN024BWD_at; Start 223; Stop 247
gctgccattgcagaaatgctggaat

SEQ ID NO: 96962 - DNA, 25 bp, Artificial
  probe
  misc_feature (1)..(25): SEQ ID NO: 6793; WAN024BWD_at; Start 635; Stop 659
cagagaagggcaaagaattcctcga

SEQ ID NO: 96963 - DNA, 25 bp, Artificial
  probe
  misc_feature (1)..(25): SEQ ID NO: 6793; WAN024BWD_at; Start 149; Stop 173
tcaaattacttaccgaagcgcaggt

SEQ ID NO: 96964 - DNA, 25 bp, Artificial
  probe
  misc_feature (1)..(25): SEQ ID NO: 6793; WAN024BWD_at; Start 286; Stop 310
tataaacaacacattcacaaaaagg

SEQ ID NO: 96965 - DNA, 25 bp, Artificial
  probe
  misc_feature (1)..(25): SEQ ID NO: 6793; WAN024BWD_at; Start 309; Stop 333
ggaattaaaggtcgctcgcacctgc

SEQ ID NO: 96966 - DNA, 25 bp, Artificial
  probe
  misc_feature (1)..(25): SEQ ID NO: 6793; WAN024BWD_at; Start 163; Stop 187
gaagcgcaggtaaccactctacaaa

SEQ ID NO: 96967 - DNA, 25 bp, Artificial
  probe
  misc_feature (1)..(25): SEQ ID NO: 6793; WAN024BWD_at; Start 615; Stop 639
gccacgttcacttaccattacagag

SEQ ID NO: 96968 - DNA, 25 bp, Artificial
  probe
  misc_feature (1)..(25): SEQ ID NO: 6793; WAN024BWD_at; Start 551; Stop 575
gagctctcggcaatgctcttttaga

SEQ ID NO: 96969 - DNA, 25 bp, Artificial
  probe
  misc_feature (1)..(25): SEQ ID NO: 6793; WAN024BWD_at; Start 395; Stop 419
tcctcagcgaatcagaaaaagactt

SEQ ID NO: 96970 - DNA, 25 bp, Artificial
  probe
  misc_feature (1)..(25): SEQ ID NO: 6793; WAN024BWD_at; Start 76; Stop 100
gatggaaaagctcacacggttaacg

SEQ ID NO: 96971 - DNA, 25 bp, Artificial
  probe
  misc_feature (1)..(25): SEQ ID NO: 6793; WAN024BWD_at; Start 380; Stop 404
tcttgcaagaaaatctcctcagcga

SEQ ID NO: 96972 - DNA, 25 bp, Artificial
  probe
  misc_feature (1)..(25): SEQ ID NO: 6793; WAN024BWD_at; Start 430; Stop 454
gaagctgggaagtcttatttccaaa

SEQ ID NO: 96973 - DNA, 25 bp, Artificial
  probe
  misc_feature (1)..(25): SEQ ID NO: 6793; WAN024BWD_at; Start 40; Stop 64
gacccttctcggatgcacattttag

SEQ ID NO: 96974 - DNA, 25 bp, Artificial
  probe
  misc_feature (1)..(25): SEQ ID NO: 6793; WAN024BWD_at; Start 69; Stop 93
tctaatggatggaaaagctcacacg

SEQ ID NO: 96975 - DNA, 25 bp, Artificial
  probe
  misc_feature (1)..(25): SEQ ID NO: 6793; WAN024BWD_at; Start 102; Stop 126
aattgccagctttaccaaaatcaag

SEQ ID NO: 96976 - DNA, 25 bp, Artificial
  probe
  misc_feature (1)..(25): SEQ ID NO: 6793; WAN024BWD_at; Start 3; Stop 27
ggaaccagatattttcatcatcaca

SEQ ID NO: 96977 - DNA, 25 bp, Artificial
  probe
  misc_feature (1)..(25): SEQ ID NO: 6793; WAN024BWD_at; Start 581; Stop 605
tcagtgaaaaacaattggtcatccc

SEQ ID NO: 96978 - DNA, 25 bp, Artificial
  probe
  misc_feature (1)..(25): SEQ ID NO: 6793; WAN024BWD_at; Start 534; Stop 558
taaaaatcatgtcggcggagctctc

SEQ ID NO: 96979 - DNA, 25 bp, Artificial
  probe
  misc_feature (1)..(25): SEQ ID NO: 6793; WAN024BWD_at; Start 455; Stop 479
gaaaattacacattgatacggatga

SEQ ID NO: 96980 - DNA, 25 bp, Artificial
  probe
  misc_feature (1)..(25): SEQ ID NO: 6793; WAN024BWD_at; Start 211; Stop 235
tctttaaaaagtgctgccattgcag

SEQ ID NO: 96981 - DNA, 25 bp, Artificial
  probe
  misc_feature (1)..(25): SEQ ID NO: 6793; WAN024BWD_at; Start 173; Stop 197
taaccactctacaaacctatggacg

SEQ ID NO: 96982 - DNA, 25 bp, Artificial
  probe
  misc_feature (1)..(25): SEQ ID NO: 6793; WAN024BWD_at; Start 365; Stop 389
ccattaccaattatctcttgcaaga

SEQ ID NO: 96983 - DNA, 25 bp, Artificial
  probe
  misc_feature (1)..(25): SEQ ID NO: 6793; WAN024BWD_at; Start 415; Stop 439
gacttccaactcactgaagctggga

SEQ ID NO: 96984 - DNA, 25 bp, Artificial
  probe
  misc_feature (1)..(25): SEQ ID NO: 6793; WAN024BWD_at; Start 337; Stop 361
gaccatattgctggtgagcttggca

SEQ ID NO: 96985 - DNA, 25 bp, Artificial
  probe
  misc_feature (1)..(25): SEQ ID NO: 6793; WAN024BWD_at; Start 349; Stop 373
ggtgagcttggcatttccattacca

SEQ ID NO: 96986 - DNA, 25 bp, Artificial
  probe
  misc_feature (1)..(25): SEQ ID NO: 6793; WAN024BWD_at; Start 27; Stop 51
aaaactcttatcagacccttctcgg

SEQ ID NO: 96987 - DNA, 25 bp, Artificial
  probe
  misc_feature (1)..(25): SEQ ID NO: 6793; WAN024BWD_at; Start 265; Stop 289
cctcagcgtgatgtcaaaagttata

SEQ ID NO: 96988 - DNA, 25 bp, Artificial
  probe
  misc_feature (1)..(25): SEQ ID NO: 6793; WAN024BWD_at; Start 593; Stop 617
aattggtcatccctgcacaaacgcc

SEQ ID NO: 96989 - DNA, 25 bp, Artificial
  probe
  misc_feature (1)..(25): SEQ ID NO: 6793; WAN024BWD_at; Start 88; Stop 112
cacacggttaacgaaattgccagct

SEQ ID NO: 96990 - DNA, 25 bp, Artificial
  probe
  misc_feature (1)..(25): SEQ ID NO: 6793; WAN024BWD_at; Start 251; Stop 275
tcagcttctactctcctcagcgtga

SEQ ID NO: 96991 - DNA, 25 bp, Artificial
  probe
  misc_feature (1)..(25): SEQ ID NO: 7107; WAN024BWE_at; Start 266; Stop 290
cgaagagtcttttgaatttcatcag

SEQ ID NO: 96992 - DNA, 25 bp, Artificial
  probe
  misc_feature (1)..(25): SEQ ID NO: 7107; WAN024BWE_at; Start 213; Stop 237
tatctatgacgatccttacgatggc

SEQ ID NO: 96993 - DNA, 25 bp, Artificial
  probe
  misc_feature (1)..(25): SEQ ID NO: 7107; WAN024BWE_at; Start 512; Stop 536
caaacgtgtctttttcagcgggtga

SEQ ID NO: 96994 - DNA, 25 bp, Artificial
  probe
  misc_feature (1)..(25): SEQ ID NO: 7107; WAN024BWE_at; Start 131; Stop 155
caggagaaggtcaaaccttctggac

SEQ ID NO: 96995 - DNA, 25 bp, Artificial
  probe
  misc_feature (1)..(25): SEQ ID NO: 7107; WAN024BWE_at; Start 78; Stop 102
tcctgtatatgacgagccggtgaga

SEQ ID NO: 96996 - DNA, 25 bp, Artificial
  probe
  misc_feature (1)..(25): SEQ ID NO: 7107; WAN024BWE_at; Start 5; Stop 29
tattcacactgaaaggatctcctgt

SEQ ID NO: 96997 - DNA, 25 bp, Artificial
  probe
  misc_feature (1)..(25): SEQ ID NO: 7107; WAN024BWE_at; Start 383; Stop 407
gagaatcctccaacgaaaagctgtt

SEQ ID NO: 96998 - DNA, 25 bp, Artificial
  probe
  misc_feature (1)..(25): SEQ ID NO: 7107; WAN024BWE_at; Start 422; Stop 446
cggatccagtctggcaaaacagctt

SEQ ID NO: 96999 - DNA, 25 bp, Artificial
  probe
  misc_feature (1)..(25): SEQ ID NO: 7107; WAN024BWE_at; Start 285; Stop 309
catcagattcattctcaacttcaga

SEQ ID NO: 97000 - DNA, 25 bp, Artificial
  probe
  misc_feature (1)..(25): SEQ ID NO: 7107; WAN024BWE_at; Start 366; Stop 390
cctcatagcgttctacagagaatcc

SEQ ID NO: 97001 - DNA, 25 bp, Artificial
  probe
  misc_feature (1)..(25): SEQ ID NO: 7107; WAN024BWE_at; Start 337; Stop 361
gatcaaacgatcttcagggactgga

SEQ ID NO: 97002 - DNA, 25 bp, Artificial
  probe
  misc_feature (1)..(25): SEQ ID NO: 7107; WAN024BWE_at; Start 118; Stop 142
tacgcaagcggtacaggagaaggtc

SEQ ID NO: 97003 - DNA, 25 bp, Artificial
  probe
  misc_feature (1)..(25): SEQ ID NO: 7107; WAN024BWE_at; Start 102; Stop 126
agagccgatgcagtggtacgcaagc

SEQ ID NO: 97004 - DNA, 25 bp, Artificial
  probe
  misc_feature (1)..(25): SEQ ID NO: 7107; WAN024BWE_at; Start 351; Stop 375
cagggactggaaaaacctcatagcg

SEQ ID NO: 97005 - DNA, 25 bp, Artificial
  probe
  misc_feature (1)..(25): SEQ ID NO: 7107; WAN024BWE_at; Start 34; Stop 58
tactacggcggtgaaattggaacga

SEQ ID NO: 97006 - DNA, 25 bp, Artificial
  probe
  misc_feature (1)..(25): SEQ ID NO: 7107; WAN024BWE_at; Start 527; Stop 551
cagcgggtgaatccttcactgtgga

SEQ ID NO: 97007 - DNA, 25 bp, Artificial
  probe
  misc_feature (1)..(25): SEQ ID NO: 7107; WAN024BWE_at; Start 243; Stop 267
tgtcgaagaacaggaaagcgatccg

SEQ ID NO: 97008 - DNA, 25 bp, Artificial
  probe
  misc_feature (1)..(25): SEQ ID NO: 7107; WAN024BWE_at; Start 192; Stop 216
aaacgctgatgttgacggatgtatc

SEQ ID NO: 97009 - DNA, 25 bp, Artificial
  probe
  misc_feature (1)..(25): SEQ ID NO: 7107; WAN024BWE_at; Start 253; Stop 277
caggaaagcgatccgaagagtcttt

SEQ ID NO: 97010 - DNA, 25 bp, Artificial
  probe
  misc_feature (1)..(25): SEQ ID NO: 7107; WAN024BWE_at; Start 20; Stop 44
gatctcctgttatctactacggcgg

SEQ ID NO: 97011 - DNA, 25 bp, Artificial
  probe
  misc_feature (1)..(25): SEQ ID NO: 7107; WAN024BWE_at; Start 146; Stop 170
ccttctggacaaaggaagtctacaa

SEQ ID NO: 97012 - DNA, 25 bp, Artificial
  probe
  misc_feature (1)..(25): SEQ ID NO: 7107; WAN024BWE_at; Start 178; Stop 202
gggataacctttggaaacgctgatg

SEQ ID NO: 97013 - DNA, 25 bp, Artificial
  probe
  misc_feature (1)..(25): SEQ ID NO: 7107; WAN024BWE_at; Start 543; Stop 567
cactgtggatcccatgaaagcgtac

SEQ ID NO: 97014 - DNA, 25 bp, Artificial
  probe
  misc_feature (1)..(25): SEQ ID NO: 7107; WAN024BWE_at; Start 300; Stop 324
caacttcagaaaagatcacgacgcc

SEQ ID NO: 97015 - DNA, 25 bp, Artificial
  probe
  misc_feature (1)..(25): SEQ ID NO: 7107; WAN024BWE_at; Start 398; Stop 422
aaaagctgttggtggtcttgaatcc

SEQ ID NO: 97016 - DNA, 25 bp, Artificial
  probe
  misc_feature (1)..(25): SEQ ID NO: 7107; WAN024BWE_at; Start 313; Stop 337
gatcacgacgccattttgaatggag

SEQ ID NO: 97017 - DNA, 25 bp, Artificial
  probe
  misc_feature (1)..(25): SEQ ID NO: 7107; WAN024BWE_at; Start 447; Stop 471
cacttttgaagaaaacatgacgatg

SEQ ID NO: 97018 - DNA, 25 bp, Artificial
  probe
  misc_feature (1)..(25): SEQ ID NO: 7107; WAN024BWE_at; Start 51; Stop 75
tggaacgagaggtttcaagtggcac

SEQ ID NO: 97019 - DNA, 25 bp, Artificial
  probe
  misc_feature (1)..(25): SEQ ID NO: 7107; WAN024BWE_at; Start 66; Stop 90
caagtggcacggtcctgtatatgac

SEQ ID NO: 97020 - DNA, 25 bp, Artificial
  probe
  misc_feature (1)..(25): SEQ ID NO: 7107; WAN024BWE_at; Start 497; Stop 521
tcatctggaacgagtcaaacgtgtc

SEQ ID NO: 97021 - DNA, 25 bp, Artificial
  probe
  misc_feature (1)..(25): SEQ ID NO: 7107; WAN024BWE_at; Start 462; Stop 486
catgacgatgattctcgaggtagat

SEQ ID NO: 97022 - DNA, 25 bp, Artificial
  probe
  misc_feature (1)..(25): SEQ ID NO: 7107; WAN024BWE_at; Start 413; Stop 437
tcttgaatccggatccagtctggca

SEQ ID NO: 97023 - DNA, 25 bp, Artificial
  probe
  misc_feature (1)..(25): SEQ ID NO: 7107; WAN024BWE_at; Start 484; Stop 508
gattttgaaaacttcatctggaacg

SEQ ID NO: 97024 - DNA, 25 bp, Artificial
  probe
  misc_feature (1)..(25): SEQ ID NO: 7107; WAN024BWE_at; Start 229; Stop 253
tacgatggcttttctgtcgaagaac

SEQ ID NO: 97025 - DNA, 25 bp, Artificial
  probe
  misc_feature (1)..(25): SEQ ID NO: 7147; WAN024BWF_at; Start 149; Stop 173
acttggtcggtgatatctgtgaggc

SEQ ID NO: 97026 - DNA, 25 bp, Artificial
  probe
  misc_feature (1)..(25): SEQ ID NO: 7147; WAN024BWF_at; Start 543; Stop 567
tcagacatccgtaaagaacaagaga

SEQ ID NO: 97027 - DNA, 25 bp, Artificial
  probe
  misc_feature (1)..(25): SEQ ID NO: 7147; WAN024BWF_at; Start 121; Stop 145
tgtagatccagttccaaactgggcg

SEQ ID NO: 97028 - DNA, 25 bp, Artificial
  probe
  misc_feature (1)..(25): SEQ ID NO: 7147; WAN024BWF_at; Start 166; Stop 190
tgtgaggcttccatcctgagacact

SEQ ID NO: 97029 - DNA, 25 bp, Artificial
  probe
  misc_feature (1)..(25): SEQ ID NO: 7147; WAN024BWF_at; Start 379; Stop 403
accggcgatgtagatgtttgcacca

SEQ ID NO: 97030 - DNA, 25 bp, Artificial
  probe
  misc_feature (1)..(25): SEQ ID NO: 7147; WAN024BWF_at; Start 1; Stop 25
ctggctgatttggatagaagtctcc

SEQ ID NO: 97031 - DNA, 25 bp, Artificial
  probe
  misc_feature (1)..(25): SEQ ID NO: 7147; WAN024BWF_at; Start 46; Stop 70
cgttccaccgctgatggcgaagaca

SEQ ID NO: 97032 - DNA, 25 bp, Artificial
  probe
  misc_feature (1)..(25): SEQ ID NO: 7147; WAN024BWF_at; Start 528; Stop 552
cgacaggtggtgttctcagacatcc

SEQ ID NO: 97033 - DNA, 25 bp, Artificial
  probe
  misc_feature (1)..(25): SEQ ID NO: 7147; WAN024BWF_at; Start 208; Stop 232
gttgctctgattcacttcaacgatg

SEQ ID NO: 97034 - DNA, 25 bp, Artificial
  probe
  misc_feature (1)..(25): SEQ ID NO: 7147; WAN024BWF_at; Start 259; Stop 283
gaagtttctgtttccatcgttcaaa

SEQ ID NO: 97035 - DNA, 25 bp, Artificial
  probe
  misc_feature (1)..(25): SEQ ID NO: 7147; WAN024BWF_at; Start 339; Stop 363
gaaagacattaacgtttccatcgcc

SEQ ID NO: 97036 - DNA, 25 bp, Artificial
  probe
  misc_feature (1)..(25): SEQ ID NO: 7147; WAN024BWF_at; Start 185; Stop 209
gacactctccagactttgtattcgt

SEQ ID NO: 97037 - DNA, 25 bp, Artificial
  probe
  misc_feature (1)..(25): SEQ ID NO: 7147; WAN024BWF_at; Start 95; Stop 119
gagattgggatcttgagttctgcta

SEQ ID NO: 97038 - DNA, 25 bp, Artificial
  probe
  misc_feature (1)..(25): SEQ ID NO: 7147; WAN024BWF_at; Start 473; Stop 497
ttgatcttgcttccccagtcgctga

SEQ ID NO: 97039 - DNA, 25 bp, Artificial
  probe
  misc_feature (1)..(25): SEQ ID NO: 7147; WAN024BWF_at; Start 292; Stop 316
ggagactgtctgagctccggtcaca

SEQ ID NO: 97040 - DNA, 25 bp, Artificial
  probe
  misc_feature (1)..(25): SEQ ID NO: 7147; WAN024BWF_at; Start 135; Stop 159
caaactgggcggtcacttggtcggt

SEQ ID NO: 97041 - DNA, 25 bp, Artificial
  probe
  misc_feature (1)..(25): SEQ ID NO: 7147; WAN024BWF_at; Start 61; Stop 85
ggcgaagacagctttcacctggtta

SEQ ID NO: 97042 - DNA, 25 bp, Artificial
  probe
  misc_feature (1)..(25): SEQ ID NO: 7147; WAN024BWF_at; Start 566; Stop 590
gattagaccgccaaaaccaggaaga

SEQ ID NO: 97043 - DNA, 25 bp, Artificial
  probe
  misc_feature (1)..(25): SEQ ID NO: 7147; WAN024BWF_at; Start 364; Stop 388
tcctatcacatattcaccggcgatg

SEQ ID NO: 97044 - DNA, 25 bp, Artificial
  probe
  misc_feature (1)..(25): SEQ ID NO: 7147; WAN024BWF_at; Start 642; Stop 666
gatccacagtgaaggattcacccgc

SEQ ID NO: 97045 - DNA, 25 bp, Artificial
  probe
  misc_feature (1)..(25): SEQ ID NO: 7147; WAN024BWF_at; Start 411; Stop 435
gcaaacctgccttcaaaagctcgtt

SEQ ID NO: 97046 - DNA, 25 bp, Artificial
  probe
  misc_feature (1)..(25): SEQ ID NO: 7147; WAN024BWF_at; Start 488; Stop 512
cagtcgctgagagaaccatcggtgg

SEQ ID NO: 97047 - DNA, 25 bp, Artificial
  probe
  misc_feature (1)..(25): SEQ ID NO: 7147; WAN024BWF_at; Start 224; Stop 248
tcaacgatgagatctatgtcgccgt

SEQ ID NO: 97048 - DNA, 25 bp, Artificial
  probe
  misc_feature (1)..(25): SEQ ID NO: 7147; WAN024BWF_at; Start 624; Stop 648
aaatgtacgctttcatgggatccac

SEQ ID NO: 97049 - DNA, 25 bp, Artificial
  probe
  misc_feature (1)..(25): SEQ ID NO: 7147; WAN024BWF_at; Start 277; Stop 301
gttcaaacccgtgtaggagactgtc

SEQ ID NO: 97050 - DNA, 25 bp, Artificial
  probe
  misc_feature (1)..(25): SEQ ID NO: 7147; WAN024BWF_at; Start 76; Stop 100
cacctggttaacttgttcggagatt

SEQ ID NO: 97051 - DNA, 25 bp, Artificial
  probe
  misc_feature (1)..(25): SEQ ID NO: 7147; WAN024BWF_at; Start 396; Stop 420
ttgcaccatcgaagagcaaacctgc

SEQ ID NO: 97052 - DNA, 25 bp, Artificial
  probe
  misc_feature (1)..(25): SEQ ID NO: 7147; WAN024BWF_at; Start 309; Stop 333
cggtcacaccgacaagatcgatcaa

SEQ ID NO: 97053 - DNA, 25 bp, Artificial
  probe
  misc_feature (1)..(25): SEQ ID NO: 7147; WAN024BWF_at; Start 17; Stop 41
gaagtctcctaccactgatttccgc

SEQ ID NO: 97054 - DNA, 25 bp, Artificial
  probe
  misc_feature (1)..(25): SEQ ID NO: 7147; WAN024BWF_at; Start 458; Stop 482
tctgctgcgtcttccttgatcttgc

SEQ ID NO: 97055 - DNA, 25 bp, Artificial
  probe
  misc_feature (1)..(25): SEQ ID NO: 7147; WAN024BWF_at; Start 429; Stop 453
gctcgttgtcagctccccatttgga

SEQ ID NO: 97056 - DNA, 25 bp, Artificial
  probe
  misc_feature (1)..(25): SEQ ID NO: 7147; WAN024BWF_at; Start 583; Stop 607
caggaagagttttttcattttcgca

SEQ ID NO: 97057 - DNA, 25 bp, Artificial
  probe
  misc_feature (1)..(25): SEQ ID NO: 7147; WAN024BWF_at; Start 510; Stop 534
tggtgaccatatctttgacgacagg

SEQ ID NO: 97058 - DNA, 25 bp, Artificial
  probe
  misc_feature (1)..(25): SEQ ID NO: 7147; WAN024BWF_at; Start 444; Stop 468
cccatttggaatcatctgctgcgtc

SEQ ID NO: 97059 - DNA, 25 bp, Artificial
  probe
  misc_feature (1)..(25): SEQ ID NO: 7104; WAN024BWG_at; Start 15; Stop 39
tgtcgtcaaagatatggtcaccacc

SEQ ID NO: 97060 - DNA, 25 bp, Artificial
  probe
  misc_feature (1)..(25): SEQ ID NO: 7104; WAN024BWG_at; Start 470; Stop 494
tgaaagctgtcttcgccatcagcgg

SEQ ID NO: 97061 - DNA, 25 bp, Artificial
  probe
  misc_feature (1)..(25): SEQ ID NO: 7104; WAN024BWG_at; Start 462; Stop 486
taaccaggtgaaagctgtcttcgcc

SEQ ID NO: 97062 - DNA, 25 bp, Artificial
  probe
  misc_feature (1)..(25): SEQ ID NO: 7104; WAN024BWG_at; Start 37; Stop 61
accgatggttctctcagcgactggg

SEQ ID NO: 97063 - DNA, 25 bp, Artificial
  probe
  misc_feature (1)..(25): SEQ ID NO: 7104; WAN024BWG_at; Start 381; Stop 405
agatatcaccgaccaagtgaccgcc

SEQ ID NO: 97064 - DNA, 25 bp, Artificial
  probe
  misc_feature (1)..(25): SEQ ID NO: 7104; WAN024BWG_at; Start 251; Stop 275
tctcctacacgggtttgaacgatgg

SEQ ID NO: 97065 - DNA, 25 bp, Artificial
  probe
  misc_feature (1)..(25): SEQ ID NO: 7104; WAN024BWG_at; Start 25; Stop 49
gatatggtcaccaccgatggttctc

SEQ ID NO: 97066 - DNA, 25 bp, Artificial
  probe
  misc_feature (1)..(25): SEQ ID NO: 7104; WAN024BWG_at; Start 182; Stop 206
gaggcgatggaaacgttaatgtctt

SEQ ID NO: 97067 - DNA, 25 bp, Artificial
  probe
  misc_feature (1)..(25): SEQ ID NO: 7104; WAN024BWG_at; Start 286; Stop 310
ttcacaaaccccaacggcgacatag

SEQ ID NO: 97068 - DNA, 25 bp, Artificial
  probe
  misc_feature (1)..(25): SEQ ID NO: 7104; WAN024BWG_at; Start 267; Stop 291
gaacgatggaaacagaaacttcaca

SEQ ID NO: 97069 - DNA, 25 bp, Artificial
  probe
  misc_feature (1)..(25): SEQ ID NO: 7104; WAN024BWG_at; Start 409; Stop 433
tttggaactggatctacaatagcag

SEQ ID NO: 97070 - DNA, 25 bp, Artificial
  probe
  misc_feature (1)..(25): SEQ ID NO: 7104; WAN024BWG_at; Start 159; Stop 183
catcgccggtgaatatgtgatagga

SEQ ID NO: 97071 - DNA, 25 bp, Artificial
  probe
  misc_feature (1)..(25): SEQ ID NO: 7104; WAN024BWG_at; Start 199; Stop 223
aatgtctttcttgttttgatcgatc

SEQ ID NO: 97072 - DNA, 25 bp, Artificial
  probe
  misc_feature (1)..(25): SEQ ID NO: 7104; WAN024BWG_at; Start 106; Stop 130
gctgacaacgagcttttgaaggcag

SEQ ID NO: 97073 - DNA, 25 bp, Artificial
  probe
  misc_feature (1)..(25): SEQ ID NO: 7104; WAN024BWG_at; Start 300; Stop 324
cggcgacatagatctcatcgttgaa

SEQ ID NO: 97074 - DNA, 25 bp, Artificial
  probe
  misc_feature (1)..(25): SEQ ID NO: 7104; WAN024BWG_at; Start 367; Stop 391
gatggaagcctcacagatatcaccg

SEQ ID NO: 97075 - DNA, 25 bp, Artificial
  probe
  misc_feature (1)..(25): SEQ ID NO: 7104; WAN024BWG_at; Start 2; Stop 26
tgagaacaccacctgtcgtcaaaga

SEQ ID NO: 97076 - DNA, 25 bp, Artificial
  probe
  misc_feature (1)..(25): SEQ ID NO: 7104; WAN024BWG_at; Start 312; Stop 336
tctcatcgttgaagtgaatcagagc

SEQ ID NO: 97077 - DNA, 25 bp, Artificial
  probe
  misc_feature (1)..(25): SEQ ID NO: 7104; WAN024BWG_at; Start 241; Stop 265
gctcagacagtctcctacacgggtt

SEQ ID NO: 97078 - DNA, 25 bp, Artificial
  probe
  misc_feature (1)..(25): SEQ ID NO: 7104; WAN024BWG_at; Start 437; Stop 461
tcaagatcccaatctccgaacaagt

SEQ ID NO: 97079 - DNA, 25 bp, Artificial
  probe
  misc_feature (1)..(25): SEQ ID NO: 7104; WAN024BWG_at; Start 447; Stop 471
aatctccgaacaagttaaccaggtg

SEQ ID NO: 97080 - DNA, 25 bp, Artificial
  probe
  misc_feature (1)..(25): SEQ ID NO: 7104; WAN024BWG_at; Start 171; Stop 195
atatgtgataggaggcgatggaaac

SEQ ID NO: 97081 - DNA, 25 bp, Artificial
  probe
  misc_feature (1)..(25): SEQ ID NO: 7104; WAN024BWG_at; Start 145; Stop 169
ggtgcaaacatctacatcgccggtg

SEQ ID NO: 97082 - DNA, 25 bp, Artificial
  probe
  misc_feature (1)..(25): SEQ ID NO: 7104; WAN024BWG_at; Start 230; Stop 254
gtgtgaccggagctcagacagtctc

SEQ ID NO: 97083 - DNA, 25 bp, Artificial
  probe
  misc_feature (1)..(25): SEQ ID NO: 7104; WAN024BWG_at; Start 65; Stop 89
gcaagatcaaggaagacgcagcaga

SEQ ID NO: 97084 - DNA, 25 bp, Artificial
  probe
  misc_feature (1)..(25): SEQ ID NO: 7104; WAN024BWG_at; Start 327; Stop 351
gaatcagagcaacgaatacaaagtc

SEQ ID NO: 97085 - DNA, 25 bp, Artificial
  probe
  misc_feature (1)..(25): SEQ ID NO: 7104; WAN024BWG_at; Start 79; Stop 103
gacgcagcagatgattccaaatggg

SEQ ID NO: 97086 - DNA, 25 bp, Artificial
  probe
  misc_feature (1)..(25): SEQ ID NO: 7104; WAN024BWG_at; Start 127; Stop 151
gcaggtttgctcttcgatggtgcaa

SEQ ID NO: 97087 - DNA, 25 bp, Artificial
  probe
  misc_feature (1)..(25): SEQ ID NO: 7104; WAN024BWG_at; Start 215; Stop 239
tgatcgatcttgtcggtgtgaccgg

SEQ ID NO: 97088 - DNA, 25 bp, Artificial
  probe
  misc_feature (1)..(25): SEQ ID NO: 7104; WAN024BWG_at; Start 479; Stop 503
tcttcgccatcagcggtggaacggg

SEQ ID NO: 97089 - DNA, 25 bp, Artificial
  probe
  misc_feature (1)..(25): SEQ ID NO: 7104; WAN024BWG_at; Start 341; Stop 365
aatacaaagtctggagagtgtctca

SEQ ID NO: 97090 - DNA, 25 bp, Artificial
  probe
  misc_feature (1)..(25): SEQ ID NO: 7104; WAN024BWG_at; Start 423; Stop 447
tacaatagcagaactcaagatccca

SEQ ID NO: 97091 - DNA, 25 bp, Artificial
  probe
  misc_feature (1)..(25): SEQ ID NO: 7104; WAN024BWG_at; Start 356; Stop 380
gagtgtctcaggatggaagcctcac

SEQ ID NO: 97092 - DNA, 25 bp, Artificial
  probe
  misc_feature (1)..(25): SEQ ID NO: 7104; WAN024BWG_at; Start 394; Stop 418
caagtgaccgcccagtttggaactg

SEQ ID NO: 97093 - DNA, 25 bp, Artificial
  probe
  misc_feature (1)..(25): SEQ ID NO: 6401; WAN024BWH_at; Start 152; Stop 176
tcacagataaacctcagatactggt

SEQ ID NO: 97094 - DNA, 25 bp, Artificial
  probe
  misc_feature (1)..(25): SEQ ID NO: 6401; WAN024BWH_at; Start 616; Stop 640
gatgtgatccatttcctattccgtg

SEQ ID NO: 97095 - DNA, 25 bp, Artificial
  probe
  misc_feature (1)..(25): SEQ ID NO: 6401; WAN024BWH_at; Start 323; Stop 347
gagagtacaaccttttcggtgacaa

SEQ ID NO: 97096 - DNA, 25 bp, Artificial
  probe
  misc_feature (1)..(25): SEQ ID NO: 6401; WAN024BWH_at; Start 564; Stop 588
tgaagctggagctgtggaaccacat

SEQ ID NO: 97097 - DNA, 25 bp, Artificial
  probe
  misc_feature (1)..(25): SEQ ID NO: 6401; WAN024BWH_at; Start 384; Stop 408
gaaccttataagatttttgacagcg

SEQ ID NO: 97098 - DNA, 25 bp, Artificial
  probe
  misc_feature (1)..(25): SEQ ID NO: 6401; WAN024BWH_at; Start 516; Stop 540
tattcctttcgaaagatacgtagag

SEQ ID NO: 97099 - DNA, 25 bp, Artificial
  probe
  misc_feature (1)..(25): SEQ ID NO: 6401; WAN024BWH_at; Start 43; Stop 67
gtagaactcctccagaatcttcggg

SEQ ID NO: 97100 - DNA, 25 bp, Artificial
  probe
  misc_feature (1)..(25): SEQ ID NO: 6401; WAN024BWH_at; Start 100; Stop 124
tttccaaggcacgacagattcgagg

SEQ ID NO: 97101 - DNA, 25 bp, Artificial
  probe
  misc_feature (1)..(25): SEQ ID NO: 6401; WAN024BWH_at; Start 282; Stop 306
attgaaatttctcccggaagaagag

SEQ ID NO: 97102 - DNA, 25 bp, Artificial
  probe
  misc_feature (1)..(25): SEQ ID NO: 6401; WAN024BWH_at; Start 477; Stop 501
tcattcagacatacagaaagggttc

SEQ ID NO: 97103 - DNA, 25 bp, Artificial
  probe
  misc_feature (1)..(25): SEQ ID NO: 6401; WAN024BWH_at; Start 446; Stop 470
gatccactgcctatgaagcggcggg

SEQ ID NO: 97104 - DNA, 25 bp, Artificial
  probe
  misc_feature (1)..(25): SEQ ID NO: 6401; WAN024BWH_at; Start 120; Stop 144
cgaggaagaggtgatcgaatcccta

SEQ ID NO: 97105 - DNA, 25 bp, Artificial
  probe
  misc_feature (1)..(25): SEQ ID NO: 6401; WAN024BWH_at; Start 250; Stop 274
tacattataataaacgtgaagctcg

SEQ ID NO: 97106 - DNA, 25 bp, Artificial
  probe
  misc_feature (1)..(25): SEQ ID NO: 6401; WAN024BWH_at; Start 461; Stop 485
aagcggcgggtctgattcattcaga

SEQ ID NO: 97107 - DNA, 25 bp, Artificial
  probe
  misc_feature (1)..(25): SEQ ID NO: 6401; WAN024BWH_at; Start 399; Stop 423
tttgacagcgacacagaacgaggcg

SEQ ID NO: 97108 - DNA, 25 bp, Artificial
  probe
  misc_feature (1)..(25): SEQ ID NO: 6401; WAN024BWH_at; Start 28; Stop 52
gaagcaaagagagaggtagaactcc

SEQ ID NO: 97109 - DNA, 25 bp, Artificial
  probe
  misc_feature (1)..(25): SEQ ID NO: 6401; WAN024BWH_at; Start 579; Stop 603
ggaaccacatggaaaagattacatt

SEQ ID NO: 97110 - DNA, 25 bp, Artificial
  probe
  misc_feature (1)..(25): SEQ ID NO: 6401; WAN024BWH_at; Start 414; Stop 438
gaacgaggcgagaagctggactata

SEQ ID NO: 97111 - DNA, 25 bp, Artificial
  probe
  misc_feature (1)..(25): SEQ ID NO: 6401; WAN024BWH_at; Start 2; Stop 26
tgaaagttgcaagaacgggagacaa

SEQ ID NO: 97112 - DNA, 25 bp, Artificial
  probe
  misc_feature (1)..(25): SEQ ID NO: 6401; WAN024BWH_at; Start 264; Stop 288
cgtgaagctcgaagaagaattgaaa

SEQ ID NO: 97113 - DNA, 25 bp, Artificial
  probe
  misc_feature (1)..(25): SEQ ID NO: 6401; WAN024BWH_at; Start 57; Stop 81
gaatcttcgggagtttctctctcag

SEQ ID NO: 97114 - DNA, 25 bp, Artificial
  probe
  misc_feature (1)..(25): SEQ ID NO: 6401; WAN024BWH_at; Start 166; Stop 190
cagatactggttttcaacgtcgatg

SEQ ID NO: 97115 - DNA, 25 bp, Artificial
  probe
  misc_feature (1)..(25): SEQ ID NO: 6401; WAN024BWH_at; Start 298; Stop 322
gaagaagaggcggaagttttcagaa

SEQ ID NO: 97116 - DNA, 25 bp, Artificial
  probe
  misc_feature (1)..(25): SEQ ID NO: 6401; WAN024BWH_at; Start 230; Stop 254
tcaaagaaaaggacgaggaatacat

SEQ ID NO: 97117 - DNA, 25 bp, Artificial
  probe
  misc_feature (1)..(25): SEQ ID NO: 6401; WAN024BWH_at; Start 547; Stop 571
tctctgaaaaaagcacgtgaagctg

SEQ ID NO: 97118 - DNA, 25 bp, Artificial
  probe
  misc_feature (1)..(25): SEQ ID NO: 6401; WAN024BWH_at; Start 88; Stop 112
aaggcctcgaaatttccaaggcacg

SEQ ID NO: 97119 - DNA, 25 bp, Artificial
  probe
  misc_feature (1)..(25): SEQ ID NO: 6401; WAN024BWH_at; Start 532; Stop 556
tacgtagagtttggttctctgaaaa

SEQ ID NO: 97120 - DNA, 25 bp, Artificial
  probe
  misc_feature (1)..(25): SEQ ID NO: 6401; WAN024BWH_at; Start 15; Stop 39
aacgggagacaaggaagcaaagaga

SEQ ID NO: 97121 - DNA, 25 bp, Artificial
  probe
  misc_feature (1)..(25): SEQ ID NO: 6401; WAN024BWH_at; Start 72; Stop 96
tctctctcagggtaaaaaggcctcg

SEQ ID NO: 97122 - DNA, 25 bp, Artificial
  probe
  misc_feature (1)..(25): SEQ ID NO: 6401; WAN024BWH_at; Start 432; Stop 456
gactataaagaaaggatccactgcc

SEQ ID NO: 97123 - DNA, 25 bp, Artificial
  probe
  misc_feature (1)..(25): SEQ ID NO: 6401; WAN024BWH_at; Start 209; Stop 233
gaaaactgatagaagaaatcgtcaa

SEQ ID NO: 97124 - DNA, 25 bp, Artificial
  probe
  misc_feature (1)..(25): SEQ ID NO: 6401; WAN024BWH_at; Start 136; Stop 160
gaatccctattcctcctcacagata

SEQ ID NO: 97125 - DNA, 25 bp, Artificial
  probe
  misc_feature (1)..(25): SEQ ID NO: 6401; WAN024BWH_at; Start 180; Stop 204
caacgtcgatgaattggacgaagaa

SEQ ID NO: 97126 - DNA, 25 bp, Artificial
  probe
  misc_feature (1)..(25): SEQ ID NO: 6401; WAN024BWH_at; Start 490; Stop 514
cagaaagggttcataaaggttgaag

SEQ ID NO: 97127 - DNA, 25 bp, Artificial
  probe
  misc_feature (1)..(25): SEQ ID NO: 6392; WAN024BWI_at; Start 701; Stop 725
gagtggtcgacgctgaatttcccga

SEQ ID NO: 97128 - DNA, 25 bp, Artificial
  probe
  misc_feature (1)..(25): SEQ ID NO: 6392; WAN024BWI_at; Start 327; Stop 351
catgcccgcggacgaatttccagag

SEQ ID NO: 97129 - DNA, 25 bp, Artificial
  probe
  misc_feature (1)..(25): SEQ ID NO: 6392; WAN024BWI_at; Start 936; Stop 960
agatctcgtgatcgctttcaacccg

SEQ ID NO: 97130 - DNA, 25 bp, Artificial
  probe
  misc_feature (1)..(25): SEQ ID NO: 6392; WAN024BWI_at; Start 767; Stop 791
tggtttccagaaaagaactcaggga

SEQ ID NO: 97131 - DNA, 25 bp, Artificial
  probe
  misc_feature (1)..(25): SEQ ID NO: 6392; WAN024BWI_at; Start 138; Stop 162
gaccgatctcgagaccggagtcaaa

SEQ ID NO: 97132 - DNA, 25 bp, Artificial
  probe
  misc_feature (1)..(25): SEQ ID NO: 6392; WAN024BWI_at; Start 357; Stop 381
gcctgccgagtctggaataaccttc

SEQ ID NO: 97133 - DNA, 25 bp, Artificial
  probe
  misc_feature (1)..(25): SEQ ID NO: 6392; WAN024BWI_at; Start 473; Stop 497
tctgggaactccacaagaatcttct

SEQ ID NO: 97134 - DNA, 25 bp, Artificial
  probe
  misc_feature (1)..(25): SEQ ID NO: 6392; WAN024BWI_at; Start 55; Stop 79
aaagcgctcgcaaagaaatccgtga

SEQ ID NO: 97135 - DNA, 25 bp, Artificial
  probe
  misc_feature (1)..(25): SEQ ID NO: 6392; WAN024BWI_at; Start 288; Stop 312
tgttataagttctggaagcaccgtt

SEQ ID NO: 97136 - DNA, 25 bp, Artificial
  probe
  misc_feature (1)..(25): SEQ ID NO: 6392; WAN024BWI_at; Start 231; Stop 255
gatggtcaaggttctcccagatgag

SEQ ID NO: 97137 - DNA, 25 bp, Artificial
  probe
  misc_feature (1)..(25): SEQ ID NO: 6392; WAN024BWI_at; Start 623; Stop 647
caacggagccgactataacggtgag

SEQ ID NO: 97138 - DNA, 25 bp, Artificial
  probe
  misc_feature (1)..(25): SEQ ID NO: 6392; WAN024BWI_at; Start 953; Stop 977
tcaacccgaagttcatcgaggacgt

SEQ ID NO: 97139 - DNA, 25 bp, Artificial
  probe
  misc_feature (1)..(25): SEQ ID NO: 6392; WAN024BWI_at; Start 192; Stop 216
tgaggcacgttttgtggtaccagga

SEQ ID NO: 97140 - DNA, 25 bp, Artificial
  probe
  misc_feature (1)..(25): SEQ ID NO: 6392; WAN024BWI_at; Start 433; Stop 457
gctgccaaagacgagttcatgcgaa

SEQ ID NO: 97141 - DNA, 25 bp, Artificial
  probe
  misc_feature (1)..(25): SEQ ID NO: 6392; WAN024BWI_at; Start 813; Stop 837
gattgccagcaagggaagcgagtcc

SEQ ID NO: 97142 - DNA, 25 bp, Artificial
  probe
  misc_feature (1)..(25): SEQ ID NO: 6392; WAN024BWI_at; Start 879; Stop 903
caagagcccggattatggagaagtg

SEQ ID NO: 97143 - DNA, 25 bp, Artificial
  probe
  misc_feature (1)..(25): SEQ ID NO: 6392; WAN024BWI_at; Start 522; Stop 546
cagacttgcacttgctgaagagcag

SEQ ID NO: 97144 - DNA, 25 bp, Artificial
  probe
  misc_feature (1)..(25): SEQ ID NO: 6392; WAN024BWI_at; Start 973; Stop 997
gacgttttgaagcacattgagactg

SEQ ID NO: 97145 - DNA, 25 bp, Artificial
  probe
  misc_feature (1)..(25): SEQ ID NO: 6392; WAN024BWI_at; Start 155; Stop 179
gagtcaaagcaaccgtgaatgccgc

SEQ ID NO: 97146 - DNA, 25 bp, Artificial
  probe
  misc_feature (1)..(25): SEQ ID NO: 6392; WAN024BWI_at; Start 119; Stop 143
gaaatttctacatctgcgcgaccga

SEQ ID NO: 97147 - DNA, 25 bp, Artificial
  probe
  misc_feature (1)..(25): SEQ ID NO: 6392; WAN024BWI_at; Start 340; Stop 364
gaatttccagagataacgcctgccg

SEQ ID NO: 97148 - DNA, 25 bp, Artificial
  probe
  misc_feature (1)..(25): SEQ ID NO: 6392; WAN024BWI_at; Start 205; Stop 229
gtggtaccaggagatgtcattcaga

SEQ ID NO: 97149 - DNA, 25 bp, Artificial
  probe
  misc_feature (1)..(25): SEQ ID NO: 6392; WAN024BWI_at; Start 598; Stop 622
gaagttcaaaacgtgctggacaaca

SEQ ID NO: 97150 - DNA, 25 bp, Artificial
  probe
  misc_feature (1)..(25): SEQ ID NO: 6392; WAN024BWI_at; Start 383; Stop 407
aagttgacacttcgctcctcgagga

SEQ ID NO: 97151 - DNA, 25 bp, Artificial
  probe
  misc_feature (1)..(25): SEQ ID NO: 6392; WAN024BWI_at; Start 827; Stop 851
gaagcgagtccgtgaagttcgaaat

SEQ ID NO: 97152 - DNA, 25 bp, Artificial
  probe
  misc_feature (1)..(25): SEQ ID NO: 6392; WAN024BWI_at; Start 70; Stop 94
aaatccgtgaaacccattcttgctg

SEQ ID NO: 97153 - DNA, 25 bp, Artificial
  probe
  misc_feature (1)..(25): SEQ ID NO: 6392; WAN024BWI_at; Start 3; Stop 27
gaaagtaaccgtcacgactcttgaa

SEQ ID NO: 97154 - DNA, 25 bp, Artificial
  probe
  misc_feature (1)..(25): SEQ ID NO: 6392; WAN024BWI_at; Start 656; Stop 680
gaagaagggtttctctgtcgacaaa

SEQ ID NO: 97155 - DNA, 25 bp, Artificial
  probe
  misc_feature (1)..(25): SEQ ID NO: 6392; WAN024BWI_at; Start 302; Stop 326
gaagcaccgttttcaggatcaccac

SEQ ID NO: 97156 - DNA, 25 bp, Artificial
  probe
  misc_feature (1)..(25): SEQ ID NO: 6392; WAN024BWI_at; Start 864; Stop 888
tatgagacttgtgagcaagagcccg

SEQ ID NO: 97157 - DNA, 25 bp, Artificial
  probe
  misc_feature (1)..(25): SEQ ID NO: 6392; WAN024BWI_at; Start 171; Stop 195
gaatgccgctgaaatctccggtgag

SEQ ID NO: 97158 - DNA, 25 bp, Artificial
  probe
  misc_feature (1)..(25): SEQ ID NO: 6392; WAN024BWI_at; Start 414; Stop 438
tgaaaaggtcatcttcgccgctgcc

SEQ ID NO: 97159 - DNA, 25 bp, Artificial
  probe
  misc_feature (1)..(25): SEQ ID NO: 6392; WAN024BWI_at; Start 498; Stop 522
caggctggttgcaagtgatggtttc

SEQ ID NO: 97160 - DNA, 25 bp, Artificial
  probe
  misc_feature (1)..(25): SEQ ID NO: 6392; WAN024BWI_at; Start 245; Stop 269
tcccagatgagataacggaactttc

SEQ ID NO: 97161 - DNA, 25 bp, Artificial
  probe
  misc_feature (1)..(25): SEQ ID NO: 6665; WAN024BWJ_at; Start 28; Stop 52
aaaaaatatcgatttatgtcgagtc

SEQ ID NO: 97162 - DNA, 25 bp, Artificial
  probe
  misc_feature (1)..(25): SEQ ID NO: 6665; WAN024BWJ_at; Start 67; Stop 91
atggattaccggattgcgagagagc

SEQ ID NO: 97163 - DNA, 25 bp, Artificial
  probe
  misc_feature (1)..(25): SEQ ID NO: 6665; WAN024BWJ_at; Start 5; Stop 29
ttacgccacatcataaaaagaataa

SEQ ID NO: 97164 - DNA, 25 bp, Artificial
  probe
  misc_feature (1)..(25): SEQ ID NO: 6665; WAN024BWJ_at; Start 48; Stop 72
gagtctatgcaaaaatgatatggat

SEQ ID NO: 97165 - DNA, 25 bp, Artificial
  probe
  misc_feature (1)..(25): SEQ ID NO: 6665; WAN024BWJ_at; Start 41; Stop 65
ttatgtcgagtctatgcaaaaatga

SEQ ID NO: 97166 - DNA, 25 bp, Artificial
  probe
  misc_feature (1)..(25): SEQ ID NO: 6665; WAN024BWJ_at; Start 43; Stop 67
atgtcgagtctatgcaaaaatgata

SEQ ID NO: 97167 - DNA, 25 bp, Artificial
  probe
  misc_feature (1)..(25): SEQ ID NO: 6665; WAN024BWJ_at; Start 45; Stop 69
gtcgagtctatgcaaaaatgatatg

SEQ ID NO: 97168 - DNA, 25 bp, Artificial
  probe
  misc_feature (1)..(25): SEQ ID NO: 6665; WAN024BWJ_at; Start 53; Stop 77
tatgcaaaaatgatatggattaccg

SEQ ID NO: 97169 - DNA, 25 bp, Artificial
  probe
  misc_feature (1)..(25): SEQ ID NO: 6665; WAN024BWJ_at; Start 37; Stop 61
cgatttatgtcgagtctatgcaaaa

SEQ ID NO: 97170 - DNA, 25 bp, Artificial
  probe
  misc_feature (1)..(25): SEQ ID NO: 6665; WAN024BWJ_at; Start 60; Stop 84
aaatgatatggattaccggattgcg

SEQ ID NO: 97171 - DNA, 25 bp, Artificial
  probe
  misc_feature (1)..(25): SEQ ID NO: 6665; WAN024BWJ_at; Start 42; Stop 66
tatgtcgagtctatgcaaaaatgat

SEQ ID NO: 97172 - DNA, 25 bp, Artificial
  probe
  misc_feature (1)..(25): SEQ ID NO: 6665; WAN024BWJ_at; Start 7; Stop 31
acgccacatcataaaaagaataaaa

SEQ ID NO: 97173 - DNA, 25 bp, Artificial
  probe
  misc_feature (1)..(25): SEQ ID NO: 6665; WAN024BWJ_at; Start 61; Stop 85
aatgatatggattaccggattgcga

SEQ ID NO: 97174 - DNA, 25 bp, Artificial
  probe
  misc_feature (1)..(25): SEQ ID NO: 6665; WAN024BWJ_at; Start 69; Stop 93
ggattaccggattgcgagagagcgc

SEQ ID NO: 97175 - DNA, 25 bp, Artificial
  probe
  misc_feature (1)..(25): SEQ ID NO: 6665; WAN024BWJ_at; Start 47; Stop 71
cgagtctatgcaaaaatgatatgga

SEQ ID NO: 97176 - DNA, 25 bp, Artificial
  probe
  misc_feature (1)..(25): SEQ ID NO: 6665; WAN024BWJ_at; Start 55; Stop 79
tgcaaaaatgatatggattaccgga

SEQ ID NO: 97177 - DNA, 25 bp, Artificial
  probe
  misc_feature (1)..(25): SEQ ID NO: 6665; WAN024BWJ_at; Start 44; Stop 68
tgtcgagtctatgcaaaaatgatat

SEQ ID NO: 97178 - DNA, 25 bp, Artificial
  probe
  misc_feature (1)..(25): SEQ ID NO: 6665; WAN024BWJ_at; Start 62; Stop 86
atgatatggattaccggattgcgag

SEQ ID NO: 97179 - DNA, 25 bp, Artificial
  probe
  misc_feature (1)..(25): SEQ ID NO: 6665; WAN024BWJ_at; Start 38; Stop 62
gatttatgtcgagtctatgcaaaaa

SEQ ID NO: 97180 - DNA, 25 bp, Artificial
  probe
  misc_feature (1)..(25): SEQ ID NO: 6665; WAN024BWJ_at; Start 57; Stop 81
caaaaatgatatggattaccggatt

SEQ ID NO: 97181 - DNA, 25 bp, Artificial
  probe
  misc_feature (1)..(25): SEQ ID NO: 6665; WAN024BWJ_at; Start 30; Stop 54
aaaatatcgatttatgtcgagtcta

SEQ ID NO: 97182 - DNA, 25 bp, Artificial
  probe
  misc_feature (1)..(25): SEQ ID NO: 6665; WAN024BWJ_at; Start 66; Stop 90
tatggattaccggattgcgagagag

SEQ ID NO: 97183 - DNA, 25 bp, Artificial
  probe
  misc_feature (1)..(25): SEQ ID NO: 6665; WAN024BWJ_at; Start 54; Stop 78
atgcaaaaatgatatggattaccgg

SEQ ID NO: 97184 - DNA, 25 bp, Artificial
  probe
  misc_feature (1)..(25): SEQ ID NO: 6665; WAN024BWJ_at; Start 56; Stop 80
gcaaaaatgatatggattaccggat

SEQ ID NO: 97185 - DNA, 25 bp, Artificial
  probe
  misc_feature (1)..(25): SEQ ID NO: 6665; WAN024BWJ_at; Start 2; Stop 26
tgattacgccacatcataaaaagaa

SEQ ID NO: 97186 - DNA, 25 bp, Artificial
  probe
  misc_feature (1)..(25): SEQ ID NO: 6665; WAN024BWJ_at; Start 63; Stop 87
tgatatggattaccggattgcgaga

SEQ ID NO: 97187 - DNA, 25 bp, Artificial
  probe
  misc_feature (1)..(25): SEQ ID NO: 6665; WAN024BWJ_at; Start 51; Stop 75
tctatgcaaaaatgatatggattac

SEQ ID NO: 97188 - DNA, 25 bp, Artificial
  probe
  misc_feature (1)..(25): SEQ ID NO: 6665; WAN024BWJ_at; Start 40; Stop 64
tttatgtcgagtctatgcaaaaatg

SEQ ID NO: 97189 - DNA, 25 bp, Artificial
  probe
  misc_feature (1)..(25): SEQ ID NO: 6665; WAN024BWJ_at; Start 34; Stop 58
tatcgatttatgtcgagtctatgca

SEQ ID NO: 97190 - DNA, 25 bp, Artificial
  probe
  misc_feature (1)..(25): SEQ ID NO: 6665; WAN024BWJ_at; Start 36; Stop 60
tcgatttatgtcgagtctatgcaaa

SEQ ID NO: 97191 - DNA, 25 bp, Artificial
  probe
  misc_feature (1)..(25): SEQ ID NO: 6665; WAN024BWJ_at; Start 3; Stop 27
gattacgccacatcataaaaagaat

SEQ ID NO: 97192 - DNA, 25 bp, Artificial
  probe
  misc_feature (1)..(25): SEQ ID NO: 6665; WAN024BWJ_at; Start 59; Stop 83
aaaatgatatggattaccggattgc

SEQ ID NO: 97193 - DNA, 25 bp, Artificial
  probe
  misc_feature (1)..(25): SEQ ID NO: 6665; WAN024BWJ_at; Start 46; Stop 70
tcgagtctatgcaaaaatgatatgg

SEQ ID NO: 97194 - DNA, 25 bp, Artificial
  probe
  misc_feature (1)..(25): SEQ ID NO: 6665; WAN024BWJ_at; Start 52; Stop 76
ctatgcaaaaatgatatggattacc

SEQ ID NO: 97195 - DNA, 25 bp, Artificial
  probe
  misc_feature (1)..(25): SEQ ID NO: 6868; WAN024BWK_at; Start 187; Stop 211
caaggactgcgtctgtttgaagaag

SEQ ID NO: 97196 - DNA, 25 bp, Artificial
  probe
  misc_feature (1)..(25): SEQ ID NO: 6868; WAN024BWK_at; Start 680; Stop 704
ccgcgtcagtctgcgcaatggtacg

SEQ ID NO: 97197 - DNA, 25 bp, Artificial
  probe
  misc_feature (1)..(25): SEQ ID NO: 6868; WAN024BWK_at; Start 143; Stop 167
tgaaattgtttgagcgcgtacgtgg

SEQ ID NO: 97198 - DNA, 25 bp, Artificial
  probe
  misc_feature (1)..(25): SEQ ID NO: 6868; WAN024BWK_at; Start 273; Stop 297
tcgccagggagaactgtctattgcc

SEQ ID NO: 97199 - DNA, 25 bp, Artificial
  probe
  misc_feature (1)..(25): SEQ ID NO: 6868; WAN024BWK_at; Start 462; Stop 486
gcctgcgggaacagaacgtaccgaa

SEQ ID NO: 97200 - DNA, 25 bp, Artificial
  probe
  misc_feature (1)..(25): SEQ ID NO: 6868; WAN024BWK_at; Start 158; Stop 182
gcgtacgtgggcgattacatcctac

SEQ ID NO: 97201 - DNA, 25 bp, Artificial
  probe
  misc_feature (1)..(25): SEQ ID NO: 6868; WAN024BWK_at; Start 445; Stop 469
actgaaacgctccatacgcctgcgg

SEQ ID NO: 97202 - DNA, 25 bp, Artificial
  probe
  misc_feature (1)..(25): SEQ ID NO: 6868; WAN024BWK_at; Start 416; Stop 440
tctcggcccagcgtcatgatttagg

SEQ ID NO: 97203 - DNA, 25 bp, Artificial
  probe
  misc_feature (1)..(25): SEQ ID NO: 6868; WAN024BWK_at; Start 291; Stop 315
tattgcctgcctgccggtcttttcg

SEQ ID NO: 97204 - DNA, 25 bp, Artificial
  probe
  misc_feature (1)..(25): SEQ ID NO: 6868; WAN024BWK_at; Start 633; Stop 657
tactgaacatcaggttaaacgacgc

SEQ ID NO: 97205 - DNA, 25 bp, Artificial
  probe
  misc_feature (1)..(25): SEQ ID NO: 6868; WAN024BWK_at; Start 430; Stop 454
catgatttaggactcactgaaacgc

SEQ ID NO: 97206 - DNA, 25 bp, Artificial
  probe
  misc_feature (1)..(25): SEQ ID NO: 6868; WAN024BWK_at; Start 338; Stop 362
tgcaaccctttctggcacgttatcc

SEQ ID NO: 97207 - DNA, 25 bp, Artificial
  probe
  misc_feature (1)..(25): SEQ ID NO: 6868; WAN024BWK_at; Start 235; Stop 259
gatcgcattgtcagcgccgcagaaa

SEQ ID NO: 97208 - DNA, 25 bp, Artificial
  probe
  misc_feature (1)..(25): SEQ ID NO: 6868; WAN024BWK_at; Start 656; Stop 680
gcatgatcgtagaaacccacagcgc

SEQ ID NO: 97209 - DNA, 25 bp, Artificial
  probe
  misc_feature (1)..(25): SEQ ID NO: 6868; WAN024BWK_at; Start 401; Stop 425
tacttgaagagtggctctcggccca

SEQ ID NO: 97210 - DNA, 25 bp, Artificial
  probe
  misc_feature (1)..(25): SEQ ID NO: 6868; WAN024BWK_at; Start 256; Stop 280
gaaagtctgcgcgagtttcgccagg

SEQ ID NO: 97211 - DNA, 25 bp, Artificial
  probe
  misc_feature (1)..(25): SEQ ID NO: 6868; WAN024BWK_at; Start 368; Stop 392
tcagcttaaatatcgtgccccagga

SEQ ID NO: 97212 - DNA, 25 bp, Artificial
  probe
  misc_feature (1)..(25): SEQ ID NO: 6868; WAN024BWK_at; Start 2; Stop 26
tggccgccgttaacttacgtcatat

SEQ ID NO: 97213 - DNA, 25 bp, Artificial
  probe
  misc_feature (1)..(25): SEQ ID NO: 6868; WAN024BWK_at; Start 316; Stop 340
caatcttttttaccgcagctcctgc

SEQ ID NO: 97214 - DNA, 25 bp, Artificial
  probe
  misc_feature (1)..(25): SEQ ID NO: 6868; WAN024BWK_at; Start 220; Stop 244
tcctggtacggactggatcgcattg

SEQ ID NO: 97215 - DNA, 25 bp, Artificial
  probe
  misc_feature (1)..(25): SEQ ID NO: 6868; WAN024BWK_at; Start 564; Stop 588
ttttcagggtgagaactacatcagc

SEQ ID NO: 97216 - DNA, 25 bp, Artificial
  probe
  misc_feature (1)..(25): SEQ ID NO: 6868; WAN024BWK_at; Start 112; Stop 136
gaacttgcgcgctttgagaaggtga

SEQ ID NO: 97217 - DNA, 25 bp, Artificial
  probe
  misc_feature (1)..(25): SEQ ID NO: 6868; WAN024BWK_at; Start 28; Stop 52
gaaatttttcatgcggtaatgaccg

SEQ ID NO: 97218 - DNA, 25 bp, Artificial
  probe
  misc_feature (1)..(25): SEQ ID NO: 6868; WAN024BWK_at; Start 526; Stop 550
catccgctggcggtaaaaaaggtat

SEQ ID NO: 97219 - DNA, 25 bp, Artificial
  probe
  misc_feature (1)..(25): SEQ ID NO: 6868; WAN024BWK_at; Start 173; Stop 197
tacatcctaccgtgcaaggactgcg

SEQ ID NO: 97220 - DNA, 25 bp, Artificial
  probe
  misc_feature (1)..(25): SEQ ID NO: 6868; WAN024BWK_at; Start 353; Stop 377
cacgttatcccgatgtcagcttaaa

SEQ ID NO: 97221 - DNA, 25 bp, Artificial
  probe
  misc_feature (1)..(25): SEQ ID NO: 6868; WAN024BWK_at; Start 548; Stop 572
tattaacgccggatgattttcaggg

SEQ ID NO: 97222 - DNA, 25 bp, Artificial
  probe
  misc_feature (1)..(25): SEQ ID NO: 6868; WAN024BWK_at; Start 388; Stop 412
caggaatcaccgctacttgaagagt

SEQ ID NO: 97223 - DNA, 25 bp, Artificial
  probe
  misc_feature (1)..(25): SEQ ID NO: 6868; WAN024BWK_at; Start 610; Stop 634
cgccagttgctggatcagctattta

SEQ ID NO: 97224 - DNA, 25 bp, Artificial
  probe
  misc_feature (1)..(25): SEQ ID NO: 6868; WAN024BWK_at; Start 595; Stop 619
cgtactgacagctatcgccagttgc

SEQ ID NO: 97225 - DNA, 25 bp, Artificial
  probe
  misc_feature (1)..(25): SEQ ID NO: 6868; WAN024BWK_at; Start 44; Stop 68
taatgaccgccggaagcctgactga

SEQ ID NO: 97226 - DNA, 25 bp, Artificial
  probe
  misc_feature (1)..(25): SEQ ID NO: 6868; WAN024BWK_at; Start 204; Stop 228
tgaagaagtgcaacgatcctggtac

SEQ ID NO: 97227 - DNA, 25 bp, Artificial
  probe
  misc_feature (1)..(25): SEQ ID NO: 6868; WAN024BWK_at; Start 580; Stop 604
tacatcagcctttcccgtactgaca

SEQ ID NO: 97228 - DNA, 25 bp, Artificial
  probe
  misc_feature (1)..(25): SEQ ID NO: 6868; WAN024BWK_at; Start 503; Stop 527
aagtgtgtgtgttacctccgggtca

SEQ ID NO: 97229 - DNA, 25 bp, Artificial
  probe
  misc_feature (1)..(25): SEQ ID NO: 7144; WAN024BWL_at; Start 26; Stop 50
tgaactccattgtaggagctgtgga

SEQ ID NO: 97230 - DNA, 25 bp, Artificial
  probe
  misc_feature (1)..(25): SEQ ID NO: 7144; WAN024BWL_at; Start 63; Stop 87
gatgcttcagaatatagcagcggcg

SEQ ID NO: 97231 - DNA, 25 bp, Artificial
  probe
  misc_feature (1)..(25): SEQ ID NO: 7144; WAN024BWL_at; Start 245; Stop 269
tcagggaaaatgtacagatgctcaa

SEQ ID NO: 97232 - DNA, 25 bp, Artificial
  probe
  misc_feature (1)..(25): SEQ ID NO: 7144; WAN024BWL_at; Start 1; Stop 25
ctggctgacgaagctgatgaaaaac

SEQ ID NO: 97233 - DNA, 25 bp, Artificial
  probe
  misc_feature (1)..(25): SEQ ID NO: 7144; WAN024BWL_at; Start 164; Stop 188
caaacagtgtcaaggaagtgaacgc

SEQ ID NO: 97234 - DNA, 25 bp, Artificial
  probe
  misc_feature (1)..(25): SEQ ID NO: 7144; WAN024BWL_at; Start 67; Stop 91
cttcagaatatagcagcggcgatag

SEQ ID NO: 97235 - DNA, 25 bp, Artificial
  probe
  misc_feature (1)..(25): SEQ ID NO: 7144; WAN024BWL_at; Start 33; Stop 57
cattgtaggagctgtggagagaata

SEQ ID NO: 97236 - DNA, 25 bp, Artificial
  probe
  misc_feature (1)..(25): SEQ ID NO: 7144; WAN024BWL_at; Start 141; Stop 165
cgcgaaaaacgcagaagaaattaca

SEQ ID NO: 97237 - DNA, 25 bp, Artificial
  probe
  misc_feature (1)..(25): SEQ ID NO: 7144; WAN024BWL_at; Start 203; Stop 227
tcagtgcctcgacagaagaagttac

SEQ ID NO: 97238 - DNA, 25 bp, Artificial
  probe
  misc_feature (1)..(25): SEQ ID NO: 7144; WAN024BWL_at; Start 18; Stop 42
tgaaaaactgaactccattgtagga

SEQ ID NO: 97239 - DNA, 25 bp, Artificial
  probe
  misc_feature (1)..(25): SEQ ID NO: 7144; WAN024BWL_at; Start 220; Stop 244
gaagttacgagcagagtacagacca

SEQ ID NO: 97240 - DNA, 25 bp, Artificial
  probe
  misc_feature (1)..(25): SEQ ID NO: 7144; WAN024BWL_at; Start 198; Stop 222
ggaaatcagtgcctcgacagaagaa

SEQ ID NO: 97241 - DNA, 25 bp, Artificial
  probe
  misc_feature (1)..(25): SEQ ID NO: 7144; WAN024BWL_at; Start 108; Stop 132
tgtggacgagatcacaaccgctatg

SEQ ID NO: 97242 - DNA, 25 bp, Artificial
  probe
  misc_feature (1)..(25): SEQ ID NO: 7144; WAN024BWL_at; Start 77; Stop 101
tagcagcggcgatagaagaacagac

SEQ ID NO: 97243 - DNA, 25 bp, Artificial
  probe
  misc_feature (1)..(25): SEQ ID NO: 7144; WAN024BWL_at; Start 233; Stop 257
gagtacagaccatcagggaaaatgt

SEQ ID NO: 97244 - DNA, 25 bp, Artificial
  probe
  misc_feature (1)..(25): SEQ ID NO: 7144; WAN024BWL_at; Start 99; Stop 123
gacagcagctgtggacgagatcaca

SEQ ID NO: 97245 - DNA, 25 bp, Artificial
  probe
  misc_feature (1)..(25): SEQ ID NO: 7144; WAN024BWL_at; Start 261; Stop 285
gatgctcaaagaaatcgtcgcaaga

SEQ ID NO: 97246 - DNA, 25 bp, Artificial
  probe
  misc_feature (1)..(25): SEQ ID NO: 7144; WAN024BWL_at; Start 51; Stop 75
gagaataaacgagatgcttcagaat

SEQ ID NO: 97247 - DNA, 25 bp, Artificial
  probe
  misc_feature (1)..(25): SEQ ID NO: 7144; WAN024BWL_at; Start 84; Stop 108
ggcgatagaagaacagacagcagct

SEQ ID NO: 97248 - DNA, 25 bp, Artificial
  probe
  misc_feature (1)..(25): SEQ ID NO: 7144; WAN024BWL_at; Start 129; Stop 153
tatgacagaaaacgcgaaaaacgca

SEQ ID NO: 97249 - DNA, 25 bp, Artificial
  probe
  misc_feature (1)..(25): SEQ ID NO: 7144; WAN024BWL_at; Start 112; Stop 136
gacgagatcacaaccgctatgacag

SEQ ID NO: 97250 - DNA, 25 bp, Artificial
  probe
  misc_feature (1)..(25): SEQ ID NO: 7144; WAN024BWL_at; Start 150; Stop 174
cgcagaagaaattacaaacagtgtc

SEQ ID NO: 97251 - DNA, 25 bp, Artificial
  probe
  misc_feature (1)..(25): SEQ ID NO: 7144; WAN024BWL_at; Start 178; Stop 202
gaagtgaacgcaaggcttcaggaaa

SEQ ID NO: 97252 - DNA, 25 bp, Artificial
  probe
  misc_feature (1)..(25): SEQ ID NO: 7144; WAN024BWL_at; Start 119; Stop 143
tcacaaccgctatgacagaaaacgc

SEQ ID NO: 97253 - DNA, 25 bp, Artificial
  probe
  misc_feature (1)..(25): SEQ ID NO: 7144; WAN024BWL_at; Start 212; Stop 236
cgacagaagaagttacgagcagagt

SEQ ID NO: 97254 - DNA, 25 bp, Artificial
  probe
  misc_feature (1)..(25): SEQ ID NO: 7144; WAN024BWL_at; Start 267; Stop 291
caaagaaatcgtcgcaagatacaaa

SEQ ID NO: 97255 - DNA, 25 bp, Artificial
  probe
  misc_feature (1)..(25): SEQ ID NO: 7144; WAN024BWL_at; Start 89; Stop 113
tagaagaacagacagcagctgtgga

SEQ ID NO: 97256 - DNA, 25 bp, Artificial
  probe
  misc_feature (1)..(25): SEQ ID NO: 7144; WAN024BWL_at; Start 183; Stop 207
gaacgcaaggcttcaggaaatcagt

SEQ ID NO: 97257 - DNA, 25 bp, Artificial
  probe
  misc_feature (1)..(25): SEQ ID NO: 7144; WAN024BWL_at; Start 44; Stop 68
ctgtggagagaataaacgagatgct

SEQ ID NO: 97258 - DNA, 25 bp, Artificial
  probe
  misc_feature (1)..(25): SEQ ID NO: 7144; WAN024BWL_at; Start 10; Stop 34
gaagctgatgaaaaactgaactcca

SEQ ID NO: 97259 - DNA, 25 bp, Artificial
  probe
  misc_feature (1)..(25): SEQ ID NO: 7144; WAN024BWL_at; Start 257; Stop 281
tacagatgctcaaagaaatcgtcgc

SEQ ID NO: 97260 - DNA, 25 bp, Artificial
  probe
  misc_feature (1)..(25): SEQ ID NO: 7144; WAN024BWL_at; Start 227; Stop 251
cgagcagagtacagaccatcaggga

SEQ ID NO: 97261 - DNA, 25 bp, Artificial
  probe
  misc_feature (1)..(25): SEQ ID NO: 7144; WAN024BWL_at; Start 171; Stop 195
tgtcaaggaagtgaacgcaaggctt

SEQ ID NO: 97262 - DNA, 25 bp, Artificial
  probe
  misc_feature (1)..(25): SEQ ID NO: 7144; WAN024BWL_at; Start 191; Stop 215
ggcttcaggaaatcagtgcctcgac

SEQ ID NO: 97263 - DNA, 25 bp, Artificial
  probe
  misc_feature (1)..(25): SEQ ID NO: 7694; WAN024BWM_at; Start 581; Stop 605
cagatgttgcaaagacccttcagga

SEQ ID NO: 97264 - DNA, 25 bp, Artificial
  probe
  misc_feature (1)..(25): SEQ ID NO: 7694; WAN024BWM_at; Start 84; Stop 108
gatcatgatgttctcgagtccaacc

SEQ ID NO: 97265 - DNA, 25 bp, Artificial
  probe
  misc_feature (1)..(25): SEQ ID NO: 7694; WAN024BWM_at; Start 536; Stop 560
taccgaacgaagtgagaagagacag

SEQ ID NO: 97266 - DNA, 25 bp, Artificial
  probe
  misc_feature (1)..(25): SEQ ID NO: 7694; WAN024BWM_at; Start 221; Stop 245
cactctttgcgaaggaagttctggg

SEQ ID NO: 97267 - DNA, 25 bp, Artificial
  probe
  misc_feature (1)..(25): SEQ ID NO: 7694; WAN024BWM_at; Start 420; Stop 444
gacctacctgaagaaagacgatccg

SEQ ID NO: 97268 - DNA, 25 bp, Artificial
  probe
  misc_feature (1)..(25): SEQ ID NO: 7694; WAN024BWM_at; Start 41; Stop 65
tagatgacgcctacagactcgcgaa

SEQ ID NO: 97269 - DNA, 25 bp, Artificial
  probe
  misc_feature (1)..(25): SEQ ID NO: 7694; WAN024BWM_at; Start 432; Stop 456
gaaagacgatccgttcgtgggcgaa

SEQ ID NO: 97270 - DNA, 25 bp, Artificial
  probe
  misc_feature (1)..(25): SEQ ID NO: 7694; WAN024BWM_at; Start 25; Stop 49
cattgggccctcactttagatgacg

SEQ ID NO: 97271 - DNA, 25 bp, Artificial
  probe
  misc_feature (1)..(25): SEQ ID NO: 7694; WAN024BWM_at; Start 176; Stop 200
caaacttcgtcttcgttgagctgta

SEQ ID NO: 97272 - DNA, 25 bp, Artificial
  probe
  misc_feature (1)..(25): SEQ ID NO: 7694; WAN024BWM_at; Start 350; Stop 374
gctatgtggacaaagacaacttcat

SEQ ID NO: 97273 - DNA, 25 bp, Artificial
  probe
  misc_feature (1)..(25): SEQ ID NO: 7694; WAN024BWM_at; Start 393; Stop 417
tgctcaggagttgaaagaagacttc

SEQ ID NO: 97274 - DNA, 25 bp, Artificial
  probe
  misc_feature (1)..(25): SEQ ID NO: 7694; WAN024BWM_at; Start 240; Stop 264
tctgggagaggaatcggttagctac

SEQ ID NO: 97275 - DNA, 25 bp, Artificial
  probe
  misc_feature (1)..(25): SEQ ID NO: 7694; WAN024BWM_at; Start 508; Stop 532
gacgaaaacgccgtgaaagtggata

SEQ ID NO: 97276 - DNA, 25 bp, Artificial
  probe
  misc_feature (1)..(25): SEQ ID NO: 7694; WAN024BWM_at; Start 253; Stop 277
tcggttagctacagagatctcttcg

SEQ ID NO: 97277 - DNA, 25 bp, Artificial
  probe
  misc_feature (1)..(25): SEQ ID NO: 7694; WAN024BWM_at; Start 335; Stop 359
tgggataccttcctggctatgtgga

SEQ ID NO: 97278 - DNA, 25 bp, Artificial
  probe
  misc_feature (1)..(25): SEQ ID NO: 7694; WAN024BWM_at; Start 551; Stop 575
gaagagacaggatatacgtgacgga

SEQ ID NO: 97279 - DNA, 25 bp, Artificial
  probe
  misc_feature (1)..(25): SEQ ID NO: 7694; WAN024BWM_at; Start 465; Stop 489
catcgaaattttcaaagaagacgca

SEQ ID NO: 97280 - DNA, 25 bp, Artificial
  probe
  misc_feature (1)..(25): SEQ ID NO: 7694; WAN024BWM_at; Start 481; Stop 505
gaagacgcagattttgttctggaaa

SEQ ID NO: 97281 - DNA, 25 bp, Artificial
  probe
  misc_feature (1)..(25): SEQ ID NO: 7694; WAN024BWM_at; Start 11; Stop 35
gaaagtgtgtttctcattgggccct

SEQ ID NO: 97282 - DNA, 25 bp, Artificial
  probe
  misc_feature (1)..(25): SEQ ID NO: 7694; WAN024BWM_at; Start 208; Stop 232
gatgaaaaaaccacactctttgcga

SEQ ID NO: 97283 - DNA, 25 bp, Artificial
  probe
  misc_feature (1)..(25): SEQ ID NO: 7694; WAN024BWM_at; Start 140; Stop 164
tattcccgaaagaagatttccagga

SEQ ID NO: 97284 - DNA, 25 bp, Artificial
  probe
  misc_feature (1)..(25): SEQ ID NO: 7694; WAN024BWM_at; Start 378; Stop 402
gattctgaaatacgttgctcaggag

SEQ ID NO: 97285 - DNA, 25 bp, Artificial
  probe
  misc_feature (1)..(25): SEQ ID NO: 7694; WAN024BWM_at; Start 281; Stop 305
gattcggtgtgagaggaacgcctac

SEQ ID NO: 97286 - DNA, 25 bp, Artificial
  probe
  misc_feature (1)..(25): SEQ ID NO: 7694; WAN024BWM_at; Start 565; Stop 589
tacgtgacggattcaccagatgttg

SEQ ID NO: 97287 - DNA, 25 bp, Artificial
  probe
  misc_feature (1)..(25): SEQ ID NO: 7694; WAN024BWM_at; Start 611; Stop 635
gcgctctccgggttctgctcgctaa

SEQ ID NO: 97288 - DNA, 25 bp, Artificial
  probe
  misc_feature (1)..(25): SEQ ID NO: 7694; WAN024BWM_at; Start 268; Stop 292
gatctcttcgctggattcggtgtga

SEQ ID NO: 97289 - DNA, 25 bp, Artificial
  probe
  misc_feature (1)..(25): SEQ ID NO: 7694; WAN024BWM_at; Start 69; Stop 93
cacccagagaaagctgatcatgatg

SEQ ID NO: 97290 - DNA, 25 bp, Artificial
  probe
  misc_feature (1)..(25): SEQ ID NO: 7694; WAN024BWM_at; Start 99; Stop 123
gagtccaacctgttactactgtaat

SEQ ID NO: 97291 - DNA, 25 bp, Artificial
  probe
  misc_feature (1)..(25): SEQ ID NO: 7694; WAN024BWM_at; Start 447; Stop 471
cgtgggcgaaccgttgatcatcgaa

SEQ ID NO: 97292 - DNA, 25 bp, Artificial
  probe
  misc_feature (1)..(25): SEQ ID NO: 7694; WAN024BWM_at; Start 192; Stop 216
tgagctgtacgccacagatgaaaaa

SEQ ID NO: 97293 - DNA, 25 bp, Artificial
  probe
  misc_feature (1)..(25): SEQ ID NO: 7694; WAN024BWM_at; Start 405; Stop 429
gaaagaagacttccagacctacctg

SEQ ID NO: 97294 - DNA, 25 bp, Artificial
  probe
  misc_feature (1)..(25): SEQ ID NO: 7694; WAN024BWM_at; Start 56; Stop 80
gactcgcgaacatcacccagagaaa

SEQ ID NO: 97295 - DNA, 25 bp, Artificial
  probe
  misc_feature (1)..(25): SEQ ID NO: 7694; WAN024BWM_at; Start 521; Stop 545
tgaaagtggataccgtaccgaacga

SEQ ID NO: 97296 - DNA, 25 bp, Artificial
  probe
  misc_feature (1)..(25): SEQ ID NO: 7694; WAN024BWM_at; Start 597; Stop 621
ccttcaggaaaaaggcgctctccgg

SEQ ID NO: 97297 - DNA, 25 bp, Artificial
  probe
  misc_feature (1)..(25): SEQ ID NO: 7254; WAN024BWN_at; Start 286; Stop 310
tacgtcgtggtgagaaacaacacgg

SEQ ID NO: 97298 - DNA, 25 bp, Artificial
  probe
  misc_feature (1)..(25): SEQ ID NO: 7254; WAN024BWN_at; Start 426; Stop 450
aactgttcaggtgggagttcacgcc

SEQ ID NO: 97299 - DNA, 25 bp, Artificial
  probe
  misc_feature (1)..(25): SEQ ID NO: 7254; WAN024BWN_at; Start 613; Stop 637
gtgaacggttcactctatcctgttg

SEQ ID NO: 97300 - DNA, 25 bp, Artificial
  probe
  misc_feature (1)..(25): SEQ ID NO: 7254; WAN024BWN_at; Start 50; Stop 74
gaaataattccagctcttcgagtaa

SEQ ID NO: 97301 - DNA, 25 bp, Artificial
  probe
  misc_feature (1)..(25): SEQ ID NO: 7254; WAN024BWN_at; Start 347; Stop 371
tcaacgtggatgaagatgcacatgt

SEQ ID NO: 97302 - DNA, 25 bp, Artificial
  probe
  misc_feature (1)..(25): SEQ ID NO: 7254; WAN024BWN_at; Start 512; Stop 536
gcgtttataaactcacatcgagcgg

SEQ ID NO: 97303 - DNA, 25 bp, Artificial
  probe
  misc_feature (1)..(25): SEQ ID NO: 7254; WAN024BWN_at; Start 645; Stop 669
cctggagatttctcaggagggtgat

SEQ ID NO: 97304 - DNA, 25 bp, Artificial
  probe
  misc_feature (1)..(25): SEQ ID NO: 7254; WAN024BWN_at; Start 162; Stop 186
gatctctcagctttctcagctcacg

SEQ ID NO: 97305 - DNA, 25 bp, Artificial
  probe
  misc_feature (1)..(25): SEQ ID NO: 7254; WAN024BWN_at; Start 82; Stop 106
gacaaggaagcttttctcagactcc

SEQ ID NO: 97306 - DNA, 25 bp, Artificial
  probe
  misc_feature (1)..(25): SEQ ID NO: 7254; WAN024BWN_at; Start 68; Stop 92
cgagtaattctctagacaaggaagc

SEQ ID NO: 97307 - DNA, 25 bp, Artificial
  probe
  misc_feature (1)..(25): SEQ ID NO: 7254; WAN024BWN_at; Start 525; Stop 549
cacatcgagcggactggaggaaata

SEQ ID NO: 97308 - DNA, 25 bp, Artificial
  probe
  misc_feature (1)..(25): SEQ ID NO: 7254; WAN024BWN_at; Start 367; Stop 391
catgttgtggttcaaatacttgacg

SEQ ID NO: 97309 - DNA, 25 bp, Artificial
  probe
  misc_feature (1)..(25): SEQ ID NO: 7254; WAN024BWN_at; Start 239; Stop 263
ctcaaacgagtgtgagcccagccca

SEQ ID NO: 97310 - DNA, 25 bp, Artificial
  probe
  misc_feature (1)..(25): SEQ ID NO: 7254; WAN024BWN_at; Start 301; Stop 325
aacaacacggtgaatcttgtaggcg

SEQ ID NO: 97311 - DNA, 25 bp, Artificial
  probe
  misc_feature (1)..(25): SEQ ID NO: 7254; WAN024BWN_at; Start 257; Stop 281
cagcccagctcgcttctctgatagg

SEQ ID NO: 97312 - DNA, 25 bp, Artificial
  probe
  misc_feature (1)..(25): SEQ ID NO: 7254; WAN024BWN_at; Start 212; Stop 236
ccagtgcggtgaaggatttcgtcga

SEQ ID NO: 97313 - DNA, 25 bp, Artificial
  probe
  misc_feature (1)..(25): SEQ ID NO: 7254; WAN024BWN_at; Start 582; Stop 606
tcagataaaggatggaaagggattc

SEQ ID NO: 97314 - DNA, 25 bp, Artificial
  probe
  misc_feature (1)..(25): SEQ ID NO: 7254; WAN024BWN_at; Start 628; Stop 652
tatcctgttgattctatcctggaga

SEQ ID NO: 97315 - DNA, 25 bp, Artificial
  probe
  misc_feature (1)..(25): SEQ ID NO: 7254; WAN024BWN_at; Start 226; Stop 250
gatttcgtcgaagctcaaacgagtg

SEQ ID NO: 97316 - DNA, 25 bp, Artificial
  probe
  misc_feature (1)..(25): SEQ ID NO: 7254; WAN024BWN_at; Start 148; Stop 172
gaaacgaaggacatgatctctcagc

SEQ ID NO: 97317 - DNA, 25 bp, Artificial
  probe
  misc_feature (1)..(25): SEQ ID NO: 7254; WAN024BWN_at; Start 315; Stop 339
tcttgtaggcggtcagtcggacagc

SEQ ID NO: 97318 - DNA, 25 bp, Artificial
  probe
  misc_feature (1)..(25): SEQ ID NO: 7254; WAN024BWN_at; Start 475; Stop 499
aacgggatcagtgttgaagatggca

SEQ ID NO: 97319 - DNA, 25 bp, Artificial
  probe
  misc_feature (1)..(25): SEQ ID NO: 7254; WAN024BWN_at; Start 198; Stop 222
gatcacgaacctcaccagtgcggtg

SEQ ID NO: 97320 - DNA, 25 bp, Artificial
  probe
  misc_feature (1)..(25): SEQ ID NO: 7254; WAN024BWN_at; Start 387; Stop 411
tgacgaaaacgggaaattggtgaga

SEQ ID NO: 97321 - DNA, 25 bp, Artificial
  probe
  misc_feature (1)..(25): SEQ ID NO: 7254; WAN024BWN_at; Start 404; Stop 428
tggtgagaacagaagatttaggaac

SEQ ID NO: 97322 - DNA, 25 bp, Artificial
  probe
  misc_feature (1)..(25): SEQ ID NO: 7254; WAN024BWN_at; Start 180; Stop 204
gctcacgagccttgaacagatcacg

SEQ ID NO: 97323 - DNA, 25 bp, Artificial
  probe
  misc_feature (1)..(25): SEQ ID NO: 7254; WAN024BWN_at; Start 105; Stop 129
ccttcttcaagaactggaaatgcag

SEQ ID NO: 97324 - DNA, 25 bp, Artificial
  probe
  misc_feature (1)..(25): SEQ ID NO: 7254; WAN024BWN_at; Start 271; Stop 295
tctctgataggaaagtacgtcgtgg

SEQ ID NO: 97325 - DNA, 25 bp, Artificial
  probe
  misc_feature (1)..(25): SEQ ID NO: 7254; WAN024BWN_at; Start 134; Stop 158
cactggagcccatggaaacgaagga

SEQ ID NO: 97326 - DNA, 25 bp, Artificial
  probe
  misc_feature (1)..(25): SEQ ID NO: 7254; WAN024BWN_at; Start 569; Stop 593
tggtggaagccgttcagataaagga

SEQ ID NO: 97327 - DNA, 25 bp, Artificial
  probe
  misc_feature (1)..(25): SEQ ID NO: 7254; WAN024BWN_at; Start 5; Stop 29
tctacgacatgagcggtatatacct

SEQ ID NO: 97328 - DNA, 25 bp, Artificial
  probe
  misc_feature (1)..(25): SEQ ID NO: 7254; WAN024BWN_at; Start 120; Stop 144
ggaaatgcaggatccactggagccc

SEQ ID NO: 97329 - DNA, 25 bp, Artificial
  probe
  misc_feature (1)..(25): SEQ ID NO: 7254; WAN024BWN_at; Start 490; Stop 514
gaagatggcagttacacttaccgcg

SEQ ID NO: 97330 - DNA, 25 bp, Artificial
  probe
  misc_feature (1)..(25): SEQ ID NO: 7254; WAN024BWN_at; Start 331; Stop 355
tcggacagcatcatattcaacgtgg

SEQ ID NO: 97331 - DNA, 25 bp, Artificial
  probe
  misc_feature (1)..(25): SEQ ID NO: 7497; WAN024BWO_at; Start 55; Stop 79
caggaggaagactacctgtatcagg

SEQ ID NO: 97332 - DNA, 25 bp, Artificial
  probe
  misc_feature (1)..(25): SEQ ID NO: 7497; WAN024BWO_at; Start 73; Stop 97
tatcaggagaatcagaacaaagagg

SEQ ID NO: 97333 - DNA, 25 bp, Artificial
  probe
  misc_feature (1)..(25): SEQ ID NO: 7497; WAN024BWO_at; Start 9; Stop 33
gagattcaacgaaaagggattcgat

SEQ ID NO: 97334 - DNA, 25 bp, Artificial
  probe
  misc_feature (1)..(25): SEQ ID NO: 7497; WAN024BWO_at; Start 130; Stop 154
cacaaacgtgaaacttcgggcagtc

SEQ ID NO: 97335 - DNA, 25 bp, Artificial
  probe
  misc_feature (1)..(25): SEQ ID NO: 7497; WAN024BWO_at; Start 132; Stop 156
caaacgtgaaacttcgggcagtcta

SEQ ID NO: 97336 - DNA, 25 bp, Artificial
  probe
  misc_feature (1)..(25): SEQ ID NO: 7497; WAN024BWO_at; Start 34; Stop 58
gtgcaggtctacgtcgaaaaacagg

SEQ ID NO: 97337 - DNA, 25 bp, Artificial
  probe
  misc_feature (1)..(25): SEQ ID NO: 7497; WAN024BWO_at; Start 15; Stop 39
caacgaaaagggattcgatgtgcag

SEQ ID NO: 97338 - DNA, 25 bp, Artificial
  probe
  misc_feature (1)..(25): SEQ ID NO: 7497; WAN024BWO_at; Start 102; Stop 126
tcaaagacagcaaagagaaagcaaa

SEQ ID NO: 97339 - DNA, 25 bp, Artificial
  probe
  misc_feature (1)..(25): SEQ ID NO: 7497; WAN024BWO_at; Start 61; Stop 85
gaagactacctgtatcaggagaatc

SEQ ID NO: 97340 - DNA, 25 bp, Artificial
  probe
  misc_feature (1)..(25): SEQ ID NO: 7497; WAN024BWO_at; Start 21; Stop 45
aaagggattcgatgtgcaggtctac

SEQ ID NO: 97341 - DNA, 25 bp, Artificial
  probe
  misc_feature (1)..(25): SEQ ID NO: 7497; WAN024BWO_at; Start 81; Stop 105
gaatcagaacaaagagggaaatcaa

SEQ ID NO: 97342 - DNA, 25 bp, Artificial
  probe
  misc_feature (1)..(25): SEQ ID NO: 7497; WAN024BWO_at; Start 41; Stop 65
tctacgtcgaaaaacaggaggaaga

SEQ ID NO: 97343 - DNA, 25 bp, Artificial
  probe
  misc_feature (1)..(25): SEQ ID NO: 7497; WAN024BWO_at; Start 19; Stop 43
gaaaagggattcgatgtgcaggtct

SEQ ID NO: 97344 - DNA, 25 bp, Artificial
  probe
  misc_feature (1)..(25): SEQ ID NO: 7497; WAN024BWO_at; Start 58; Stop 82
gaggaagactacctgtatcaggaga

SEQ ID NO: 97345 - DNA, 25 bp, Artificial
  probe
  misc_feature (1)..(25): SEQ ID NO: 7497; WAN024BWO_at; Start 67; Stop 91
tacctgtatcaggagaatcagaaca

SEQ ID NO: 97346 - DNA, 25 bp, Artificial
  probe
  misc_feature (1)..(25): SEQ ID NO: 7497; WAN024BWO_at; Start 139; Stop 163
gaaacttcgggcagtctatttgagg

SEQ ID NO: 97347 - DNA, 25 bp, Artificial
  probe
  misc_feature (1)..(25): SEQ ID NO: 7497; WAN024BWO_at; Start 107; Stop 131
gacagcaaagagaaagcaaaaacca

SEQ ID NO: 97348 - DNA, 25 bp, Artificial
  probe
  misc_feature (1)..(25): SEQ ID NO: 7497; WAN024BWO_at; Start 149; Stop 173
gcagtctatttgaggagttcatcca

SEQ ID NO: 97349 - DNA, 25 bp, Artificial
  probe
  misc_feature (1)..(25): SEQ ID NO: 7497; WAN024BWO_at; Start 6; Stop 30
cgagagattcaacgaaaagggattc

SEQ ID NO: 97350 - DNA, 25 bp, Artificial
  probe
  misc_feature (1)..(25): SEQ ID NO: 7497; WAN024BWO_at; Start 26; Stop 50
gattcgatgtgcaggtctacgtcga

SEQ ID NO: 97351 - DNA, 25 bp, Artificial
  probe
  misc_feature (1)..(25): SEQ ID NO: 7497; WAN024BWO_at; Start 145; Stop 169
tcgggcagtctatttgaggagttca

SEQ ID NO: 97352 - DNA, 25 bp, Artificial
  probe
  misc_feature (1)..(25): SEQ ID NO: 7497; WAN024BWO_at; Start 48; Stop 72
cgaaaaacaggaggaagactacctg

SEQ ID NO: 97353 - DNA, 25 bp, Artificial
  probe
  misc_feature (1)..(25): SEQ ID NO: 7497; WAN024BWO_at; Start 2; Stop 26
tgatcgagagattcaacgaaaaggg

SEQ ID NO: 97354 - DNA, 25 bp, Artificial
  probe
  misc_feature (1)..(25): SEQ ID NO: 7497; WAN024BWO_at; Start 157; Stop 181
tttgaggagttcatccaggaggtga

SEQ ID NO: 97355 - DNA, 25 bp, Artificial
  probe
  misc_feature (1)..(25): SEQ ID NO: 7497; WAN024BWO_at; Start 90; Stop 114
caaagagggaaatcaaagacagcaa

SEQ ID NO: 97356 - DNA, 25 bp, Artificial
  probe
  misc_feature (1)..(25): SEQ ID NO: 7497; WAN024BWO_at; Start 76; Stop 100
caggagaatcagaacaaagagggaa

SEQ ID NO: 97357 - DNA, 25 bp, Artificial
  probe
  misc_feature (1)..(25): SEQ ID NO: 7497; WAN024BWO_at; Start 37; Stop 61
caggtctacgtcgaaaaacaggagg

SEQ ID NO: 97358 - DNA, 25 bp, Artificial
  probe
  misc_feature (1)..(25): SEQ ID NO: 7497; WAN024BWO_at; Start 154; Stop 178
ctatttgaggagttcatccaggagg

SEQ ID NO: 97359 - DNA, 25 bp, Artificial
  probe
  misc_feature (1)..(25): SEQ ID NO: 7497; WAN024BWO_at; Start 141; Stop 165
aacttcgggcagtctatttgaggag

SEQ ID NO: 97360 - DNA, 25 bp, Artificial
  probe
  misc_feature (1)..(25): SEQ ID NO: 7497; WAN024BWO_at; Start 162; Stop 186
ggagttcatccaggaggtgaaaacg

SEQ ID NO: 97361 - DNA, 25 bp, Artificial
  probe
  misc_feature (1)..(25): SEQ ID NO: 7497; WAN024BWO_at; Start 94; Stop 118
gagggaaatcaaagacagcaaagag

SEQ ID NO: 97362 - DNA, 25 bp, Artificial
  probe
  misc_feature (1)..(25): SEQ ID NO: 7497; WAN024BWO_at; Start 24; Stop 48
gggattcgatgtgcaggtctacgtc

SEQ ID NO: 97363 - DNA, 25 bp, Artificial
  probe
  misc_feature (1)..(25): SEQ ID NO: 7497; WAN024BWO_at; Start 116; Stop 140
gagaaagcaaaaaccacaaacgtga

SEQ ID NO: 97364 - DNA, 25 bp, Artificial
  probe
  misc_feature (1)..(25): SEQ ID NO: 7497; WAN024BWO_at; Start 31; Stop 55
gatgtgcaggtctacgtcgaaaaac

SEQ ID NO: 97365 - DNA, 25 bp, Artificial
  probe
  misc_feature (1)..(25): SEQ ID NO: 6464; WAN024BWP_at; Start 31; Stop 55
ctaactgtcaactatttcgatttgg

SEQ ID NO: 97366 - DNA, 25 bp, Artificial
  probe
  misc_feature (1)..(25): SEQ ID NO: 6464; WAN024BWP_at; Start 32; Stop 56
taactgtcaactatttcgatttgga

SEQ ID NO: 97367 - DNA, 25 bp, Artificial
  probe
  misc_feature (1)..(25): SEQ ID NO: 6464; WAN024BWP_at; Start 84; Stop 108
ccatactccggctcaactaactttt

SEQ ID NO: 97368 - DNA, 25 bp, Artificial
  probe
  misc_feature (1)..(25): SEQ ID NO: 6464; WAN024BWP_at; Start 17; Stop 41
taacactcatcgttctaactgtcaa

SEQ ID NO: 97369 - DNA, 25 bp, Artificial
  probe
  misc_feature (1)..(25): SEQ ID NO: 6464; WAN024BWP_at; Start 27; Stop 51
cgttctaactgtcaactatttcgat

SEQ ID NO: 97370 - DNA, 25 bp, Artificial
  probe
  misc_feature (1)..(25): SEQ ID NO: 6464; WAN024BWP_at; Start 67; Stop 91
gataattattcacaccaccatactc

SEQ ID NO: 97371 - DNA, 25 bp, Artificial
  probe
  misc_feature (1)..(25): SEQ ID NO: 6464; WAN024BWP_at; Start 22; Stop 46
ctcatcgttctaactgtcaactatt

SEQ ID NO: 97372 - DNA, 25 bp, Artificial
  probe
  misc_feature (1)..(25): SEQ ID NO: 6464; WAN024BWP_at; Start 24; Stop 48
catcgttctaactgtcaactatttc

SEQ ID NO: 97373 - DNA, 25 bp, Artificial
  probe
  misc_feature (1)..(25): SEQ ID NO: 6464; WAN024BWP_at; Start 9; Stop 33
aataattgtaacactcatcgttcta

SEQ ID NO: 97374 - DNA, 25 bp, Artificial
  probe
  misc_feature (1)..(25): SEQ ID NO: 6464; WAN024BWP_at; Start 25; Stop 49
atcgttctaactgtcaactatttcg

SEQ ID NO: 97375 - DNA, 25 bp, Artificial
  probe
  misc_feature (1)..(25): SEQ ID NO: 6464; WAN024BWP_at; Start 72; Stop 96
ttattcacaccaccatactccggct

SEQ ID NO: 97376 - DNA, 25 bp, Artificial
  probe
  misc_feature (1)..(25): SEQ ID NO: 6464; WAN024BWP_at; Start 4; Stop 28
aataaaataattgtaacactcatcg

SEQ ID NO: 97377 - DNA, 25 bp, Artificial
  probe
  misc_feature (1)..(25): SEQ ID NO: 6464; WAN024BWP_at; Start 28; Stop 52
gttctaactgtcaactatttcgatt

SEQ ID NO: 97378 - DNA, 25 bp, Artificial
  probe
  misc_feature (1)..(25): SEQ ID NO: 6464; WAN024BWP_at; Start 66; Stop 90
tgataattattcacaccaccatact

SEQ ID NO: 97379 - DNA, 25 bp, Artificial
  probe
  misc_feature (1)..(25): SEQ ID NO: 6464; WAN024BWP_at; Start 85; Stop 109
catactccggctcaactaactttta

SEQ ID NO: 97380 - DNA, 25 bp, Artificial
  probe
  misc_feature (1)..(25): SEQ ID NO: 6464; WAN024BWP_at; Start 70; Stop 94
aattattcacaccaccatactccgg

SEQ ID NO: 97381 - DNA, 25 bp, Artificial
  probe
  misc_feature (1)..(25): SEQ ID NO: 6464; WAN024BWP_at; Start 7; Stop 31
aaaataattgtaacactcatcgttc

SEQ ID NO: 97382 - DNA, 25 bp, Artificial
  probe
  misc_feature (1)..(25): SEQ ID NO: 6464; WAN024BWP_at; Start 18; Stop 42
aacactcatcgttctaactgtcaac

SEQ ID NO: 97383 - DNA, 25 bp, Artificial
  probe
  misc_feature (1)..(25): SEQ ID NO: 6464; WAN024BWP_at; Start 15; Stop 39
tgtaacactcatcgttctaactgtc

SEQ ID NO: 97384 - DNA, 25 bp, Artificial
  probe
  misc_feature (1)..(25): SEQ ID NO: 6464; WAN024BWP_at; Start 65; Stop 89
ttgataattattcacaccaccatac

SEQ ID NO: 97385 - DNA, 25 bp, Artificial
  probe
  misc_feature (1)..(25): SEQ ID NO: 6464; WAN024BWP_at; Start 33; Stop 57
aactgtcaactatttcgatttggaa

SEQ ID NO: 97386 - DNA, 25 bp, Artificial
  probe
  misc_feature (1)..(25): SEQ ID NO: 6464; WAN024BWP_at; Start 69; Stop 93
taattattcacaccaccatactccg

SEQ ID NO: 97387 - DNA, 25 bp, Artificial
  probe
  misc_feature (1)..(25): SEQ ID NO: 6464; WAN024BWP_at; Start 37; Stop 61
gtcaactatttcgatttggaaataa

SEQ ID NO: 97388 - DNA, 25 bp, Artificial
  probe
  misc_feature (1)..(25): SEQ ID NO: 6464; WAN024BWP_at; Start 26; Stop 50
tcgttctaactgtcaactatttcga

SEQ ID NO: 97389 - DNA, 25 bp, Artificial
  probe
  misc_feature (1)..(25): SEQ ID NO: 6464; WAN024BWP_at; Start 47; Stop 71
tcgatttggaaataatttttgataa

SEQ ID NO: 97390 - DNA, 25 bp, Artificial
  probe
  misc_feature (1)..(25): SEQ ID NO: 6464; WAN024BWP_at; Start 16; Stop 40
gtaacactcatcgttctaactgtca

SEQ ID NO: 97391 - DNA, 25 bp, Artificial
  probe
  misc_feature (1)..(25): SEQ ID NO: 6464; WAN024BWP_at; Start 20; Stop 44
cactcatcgttctaactgtcaacta

SEQ ID NO: 97392 - DNA, 25 bp, Artificial
  probe
  misc_feature (1)..(25): SEQ ID NO: 6464; WAN024BWP_at; Start 11; Stop 35
taattgtaacactcatcgttctaac

SEQ ID NO: 97393 - DNA, 25 bp, Artificial
  probe
  misc_feature (1)..(25): SEQ ID NO: 6464; WAN024BWP_at; Start 13; Stop 37
attgtaacactcatcgttctaactg

SEQ ID NO: 97394 - DNA, 25 bp, Artificial
  probe
  misc_feature (1)..(25): SEQ ID NO: 6464; WAN024BWP_at; Start 30; Stop 54
tctaactgtcaactatttcgatttg

SEQ ID NO: 97395 - DNA, 25 bp, Artificial
  probe
  misc_feature (1)..(25): SEQ ID NO: 6464; WAN024BWP_at; Start 19; Stop 43
acactcatcgttctaactgtcaact

SEQ ID NO: 97396 - DNA, 25 bp, Artificial
  probe
  misc_feature (1)..(25): SEQ ID NO: 6464; WAN024BWP_at; Start 62; Stop 86
tttttgataattattcacaccacca

SEQ ID NO: 97397 - DNA, 25 bp, Artificial
  probe
  misc_feature (1)..(25): SEQ ID NO: 6464; WAN024BWP_at; Start 92; Stop 116
cggctcaactaacttttaacgagag

SEQ ID NO: 97398 - DNA, 25 bp, Artificial
  probe
  misc_feature (1)..(25): SEQ ID NO: 6464; WAN024BWP_at; Start 83; Stop 107
accatactccggctcaactaacttt

SEQ ID NO: 97399 - DNA, 25 bp, Artificial
  probe
  misc_feature (1)..(25): SEQ ID NO: 6652; WAN024BWQ_at; Start 14; Stop 38
tagcttctcttggagttccgatgtg

SEQ ID NO: 97400 - DNA, 25 bp, Artificial
  probe
  misc_feature (1)..(25): SEQ ID NO: 6652; WAN024BWQ_at; Start 199; Stop 223
cctgctacagaagtttgtgaagatt

SEQ ID NO: 97401 - DNA, 25 bp, Artificial
  probe
  misc_feature (1)..(25): SEQ ID NO: 6652; WAN024BWQ_at; Start 2; Stop 26
tgatggagaaagtagcttctcttgg

SEQ ID NO: 97402 - DNA, 25 bp, Artificial
  probe
  misc_feature (1)..(25): SEQ ID NO: 6652; WAN024BWQ_at; Start 79; Stop 103
tctttacacgaatggatagacggaa

SEQ ID NO: 97403 - DNA, 25 bp, Artificial
  probe
  misc_feature (1)..(25): SEQ ID NO: 6652; WAN024BWQ_at; Start 39; Stop 63
taaaccaattagcattgaactctgc

SEQ ID NO: 97404 - DNA, 25 bp, Artificial
  probe
  misc_feature (1)..(25): SEQ ID NO: 6652; WAN024BWQ_at; Start 104; Stop 128
gagatgcaatagatagcattttaac

SEQ ID NO: 97405 - DNA, 25 bp, Artificial
  probe
  misc_feature (1)..(25): SEQ ID NO: 6652; WAN024BWQ_at; Start 97; Stop 121
gacggaagagatgcaatagatagca

SEQ ID NO: 97406 - DNA, 25 bp, Artificial
  probe
  misc_feature (1)..(25): SEQ ID NO: 6652; WAN024BWQ_at; Start 182; Stop 206
gaaagattcatacaattcctgctac

SEQ ID NO: 97407 - DNA, 25 bp, Artificial
  probe
  misc_feature (1)..(25): SEQ ID NO: 6652; WAN024BWQ_at; Start 240; Stop 264
tctaaaaattgatgataaaatctcc

SEQ ID NO: 97408 - DNA, 25 bp, Artificial
  probe
  misc_feature (1)..(25): SEQ ID NO: 6652; WAN024BWQ_at; Start 255; Stop 279
taaaatctccaacgaaatgatatgg

SEQ ID NO: 97409 - DNA, 25 bp, Artificial
  probe
  misc_feature (1)..(25): SEQ ID NO: 6652; WAN024BWQ_at; Start 91; Stop 115
tggatagacggaagagatgcaatag

SEQ ID NO: 97410 - DNA, 25 bp, Artificial
  probe
  misc_feature (1)..(25): SEQ ID NO: 6652; WAN024BWQ_at; Start 167; Stop 191
caggaaagatacttagaaagattca

SEQ ID NO: 97411 - DNA, 25 bp, Artificial
  probe
  misc_feature (1)..(25): SEQ ID NO: 6652; WAN024BWQ_at; Start 186; Stop 210
gattcatacaattcctgctacagaa

SEQ ID NO: 97412 - DNA, 25 bp, Artificial
  probe
  misc_feature (1)..(25): SEQ ID NO: 6652; WAN024BWQ_at; Start 21; Stop 45
tcttggagttccgatgtgtaaacca

SEQ ID NO: 97413 - DNA, 25 bp, Artificial
  probe
  misc_feature (1)..(25): SEQ ID NO: 6652; WAN024BWQ_at; Start 156; Stop 180
tggtgtagaagcaggaaagatactt

SEQ ID NO: 97414 - DNA, 25 bp, Artificial
  probe
  misc_feature (1)..(25): SEQ ID NO: 6652; WAN024BWQ_at; Start 113; Stop 137
tagatagcattttaacttattcaga

SEQ ID NO: 97415 - DNA, 25 bp, Artificial
  probe
  misc_feature (1)..(25): SEQ ID NO: 6652; WAN024BWQ_at; Start 194; Stop 218
caattcctgctacagaagtttgtga

SEQ ID NO: 97416 - DNA, 25 bp, Artificial
  probe
  misc_feature (1)..(25): SEQ ID NO: 6652; WAN024BWQ_at; Start 83; Stop 107
tacacgaatggatagacggaagaga

SEQ ID NO: 97417 - DNA, 25 bp, Artificial
  probe
  misc_feature (1)..(25): SEQ ID NO: 6652; WAN024BWQ_at; Start 66; Stop 90
tgacgaagtacattctttacacgaa

SEQ ID NO: 97418 - DNA, 25 bp, Artificial
  probe
  misc_feature (1)..(25): SEQ ID NO: 6652; WAN024BWQ_at; Start 250; Stop 274
gatgataaaatctccaacgaaatga

SEQ ID NO: 97419 - DNA, 25 bp, Artificial
  probe
  misc_feature (1)..(25): SEQ ID NO: 6652; WAN024BWQ_at; Start 55; Stop 79
gaactctgcgatgacgaagtacatt

SEQ ID NO: 97420 - DNA, 25 bp, Artificial
  probe
  misc_feature (1)..(25): SEQ ID NO: 6652; WAN024BWQ_at; Start 136; Stop 160
gaaaaccaacaatacacatatggtg

SEQ ID NO: 97421 - DNA, 25 bp, Artificial
  probe
  misc_feature (1)..(25): SEQ ID NO: 6652; WAN024BWQ_at; Start 31; Stop 55
ccgatgtgtaaaccaattagcattg

SEQ ID NO: 97422 - DNA, 25 bp, Artificial
  probe
  misc_feature (1)..(25): SEQ ID NO: 6652; WAN024BWQ_at; Start 133; Stop 157
tcagaaaaccaacaatacacatatg

SEQ ID NO: 97423 - DNA, 25 bp, Artificial
  probe
  misc_feature (1)..(25): SEQ ID NO: 6652; WAN024BWQ_at; Start 9; Stop 33
gaaagtagcttctcttggagttccg

SEQ ID NO: 97424 - DNA, 25 bp, Artificial
  probe
  misc_feature (1)..(25): SEQ ID NO: 6652; WAN024BWQ_at; Start 163; Stop 187
gaagcaggaaagatacttagaaaga

SEQ ID NO: 97425 - DNA, 25 bp, Artificial
  probe
  misc_feature (1)..(25): SEQ ID NO: 6652; WAN024BWQ_at; Start 86; Stop 110
acgaatggatagacggaagagatgc

SEQ ID NO: 97426 - DNA, 25 bp, Artificial
  probe
  misc_feature (1)..(25): SEQ ID NO: 6652; WAN024BWQ_at; Start 150; Stop 174
cacatatggtgtagaagcaggaaag

SEQ ID NO: 97427 - DNA, 25 bp, Artificial
  probe
  misc_feature (1)..(25): SEQ ID NO: 6652; WAN024BWQ_at; Start 59; Stop 83
tctgcgatgacgaagtacattcttt

SEQ ID NO: 97428 - DNA, 25 bp, Artificial
  probe
  misc_feature (1)..(25): SEQ ID NO: 6652; WAN024BWQ_at; Start 45; Stop 69
aattagcattgaactctgcgatgac

SEQ ID NO: 97429 - DNA, 25 bp, Artificial
  probe
  misc_feature (1)..(25): SEQ ID NO: 6652; WAN024BWQ_at; Start 206; Stop 230
cagaagtttgtgaagattgggaaat

SEQ ID NO: 97430 - DNA, 25 bp, Artificial
  probe
  misc_feature (1)..(25): SEQ ID NO: 6652; WAN024BWQ_at; Start 26; Stop 50
gagttccgatgtgtaaaccaattag

SEQ ID NO: 97431 - DNA, 25 bp, Artificial
  probe
  misc_feature (1)..(25): SEQ ID NO: 6652; WAN024BWQ_at; Start 62; Stop 86
gcgatgacgaagtacattctttaca

SEQ ID NO: 97432 - DNA, 25 bp, Artificial
  probe
  misc_feature (1)..(25): SEQ ID NO: 6652; WAN024BWQ_at; Start 50; Stop 74
gcattgaactctgcgatgacgaagt

SEQ ID NO: 97433 - DNA, 25 bp, Artificial
  probe
  misc_feature (1)..(25): SEQ ID NO: 6847; WAN024BWR_at; Start 49; Stop 73
caattatggccccaattgaccgata

SEQ ID NO: 97434 - DNA, 25 bp, Artificial
  probe
  misc_feature (1)..(25): SEQ ID NO: 6847; WAN024BWR_at; Start 145; Stop 169
gacacaattgtaggtctagcactat

SEQ ID NO: 97435 - DNA, 25 bp, Artificial
  probe
  misc_feature (1)..(25): SEQ ID NO: 6847; WAN024BWR_at; Start 278; Stop 302
tctgtacaaaatgtgaggaatgggc

SEQ ID NO: 97436 - DNA, 25 bp, Artificial
  probe
  misc_feature (1)..(25): SEQ ID NO: 6847; WAN024BWR_at; Start 125; Stop 149
tctttactgaagttgaaggtgacac

SEQ ID NO: 97437 - DNA, 25 bp, Artificial
  probe
  misc_feature (1)..(25): SEQ ID NO: 6847; WAN024BWR_at; Start 378; Stop 402
tattggatttcaggaggcaaataga

SEQ ID NO: 97438 - DNA, 25 bp, Artificial
  probe
  misc_feature (1)..(25): SEQ ID NO: 6847; WAN024BWR_at; Start 387; Stop 411
tcaggaggcaaatagaattattcat

SEQ ID NO: 97439 - DNA, 25 bp, Artificial
  probe
  misc_feature (1)..(25): SEQ ID NO: 6847; WAN024BWR_at; Start 268; Stop 292
gctaaaaatctctgtacaaaatgtg

SEQ ID NO: 97440 - DNA, 25 bp, Artificial
  probe
  misc_feature (1)..(25): SEQ ID NO: 6847; WAN024BWR_at; Start 332; Stop 356
gtgactgtactttaacgaatacgga

SEQ ID NO: 97441 - DNA, 25 bp, Artificial
  probe
  misc_feature (1)..(25): SEQ ID NO: 6847; WAN024BWR_at; Start 155; Stop 179
taggtctagcactatgttcactcag

SEQ ID NO: 97442 - DNA, 25 bp, Artificial
  probe
  misc_feature (1)..(25): SEQ ID NO: 6847; WAN024BWR_at; Start 173; Stop 197
cactcagatttgattatgttgaagg

SEQ ID NO: 97443 - DNA, 25 bp, Artificial
  probe
  misc_feature (1)..(25): SEQ ID NO: 6847; WAN024BWR_at; Start 139; Stop 163
gaaggtgacacaattgtaggtctag

SEQ ID NO: 97444 - DNA, 25 bp, Artificial
  probe
  misc_feature (1)..(25): SEQ ID NO: 6847; WAN024BWR_at; Start 360; Stop 384
tataagatttcatctcaatattgga

SEQ ID NO: 97445 - DNA, 25 bp, Artificial
  probe
  misc_feature (1)..(25): SEQ ID NO: 6847; WAN024BWR_at; Start 374; Stop 398
tcaatattggatttcaggaggcaaa

SEQ ID NO: 97446 - DNA, 25 bp, Artificial
  probe
  misc_feature (1)..(25): SEQ ID NO: 6847; WAN024BWR_at; Start 207; Stop 231
tagtcctgttggattcttagaaggg

SEQ ID NO: 97447 - DNA, 25 bp, Artificial
  probe
  misc_feature (1)..(25): SEQ ID NO: 6847; WAN024BWR_at; Start 55; Stop 79
tggccccaattgaccgataaagaag

SEQ ID NO: 97448 - DNA, 25 bp, Artificial
  probe
  misc_feature (1)..(25): SEQ ID NO: 6847; WAN024BWR_at; Start 295; Stop 319
gaatgggcgaaaaataaaggatgta

SEQ ID NO: 97449 - DNA, 25 bp, Artificial
  probe
  misc_feature (1)..(25): SEQ ID NO: 6847; WAN024BWR_at; Start 309; Stop 333
taaaggatgtaaggaatttgcaagt

SEQ ID NO: 97450 - DNA, 25 bp, Artificial
  probe
  misc_feature (1)..(25): SEQ ID NO: 6847; WAN024BWR_at; Start 241; Stop 265
gacgaggaatatcgtttaaaggata

SEQ ID NO: 97451 - DNA, 25 bp, Artificial
  probe
  misc_feature (1)..(25): SEQ ID NO: 6847; WAN024BWR_at; Start 59; Stop 83
cccaattgaccgataaagaagctat

SEQ ID NO: 97452 - DNA, 25 bp, Artificial
  probe
  misc_feature (1)..(25): SEQ ID NO: 6847; WAN024BWR_at; Start 221; Stop 245
tcttagaagggattattgttgacga

SEQ ID NO: 97453 - DNA, 25 bp, Artificial
  probe
  misc_feature (1)..(25): SEQ ID NO: 6847; WAN024BWR_at; Start 196; Stop 220
ggttgtaaatatagtcctgttggat

SEQ ID NO: 97454 - DNA, 25 bp, Artificial
  probe
  misc_feature (1)..(25): SEQ ID NO: 6847; WAN024BWR_at; Start 189; Stop 213
tgttgaaggttgtaaatatagtcct

SEQ ID NO: 97455 - DNA, 25 bp, Artificial
  probe
  misc_feature (1)..(25): SEQ ID NO: 6847; WAN024BWR_at; Start 230; Stop 254
ggattattgttgacgaggaatatcg

SEQ ID NO: 97456 - DNA, 25 bp, Artificial
  probe
  misc_feature (1)..(25): SEQ ID NO: 6847; WAN024BWR_at; Start 109; Stop 133
ggcaaaaatactgcaatctttactg

SEQ ID NO: 97457 - DNA, 25 bp, Artificial
  probe
  misc_feature (1)..(25): SEQ ID NO: 6847; WAN024BWR_at; Start 100; Stop 124
tatacgaatggcaaaaatactgcaa

SEQ ID NO: 97458 - DNA, 25 bp, Artificial
  probe
  misc_feature (1)..(25): SEQ ID NO: 6847; WAN024BWR_at; Start 257; Stop 281
taaaggatattgctaaaaatctctg

SEQ ID NO: 97459 - DNA, 25 bp, Artificial
  probe
  misc_feature (1)..(25): SEQ ID NO: 6847; WAN024BWR_at; Start 68; Stop 92
ccgataaagaagctattgatgaagt

SEQ ID NO: 97460 - DNA, 25 bp, Artificial
  probe
  misc_feature (1)..(25): SEQ ID NO: 6847; WAN024BWR_at; Start 1; Stop 25
atggatggaataacaaaagatttta

SEQ ID NO: 97461 - DNA, 25 bp, Artificial
  probe
  misc_feature (1)..(25): SEQ ID NO: 6847; WAN024BWR_at; Start 161; Stop 185
tagcactatgttcactcagatttga

SEQ ID NO: 97462 - DNA, 25 bp, Artificial
  probe
  misc_feature (1)..(25): SEQ ID NO: 6847; WAN024BWR_at; Start 36; Stop 60
taaactaatgaaacaattatggccc

SEQ ID NO: 97463 - DNA, 25 bp, Artificial
  probe
  misc_feature (1)..(25): SEQ ID NO: 6847; WAN024BWR_at; Start 347; Stop 371
cgaatacggattctataagatttca

SEQ ID NO: 97464 - DNA, 25 bp, Artificial
  probe
  misc_feature (1)..(25): SEQ ID NO: 6847; WAN024BWR_at; Start 318; Stop 342
taaggaatttgcaagtgactgtact

SEQ ID NO: 97465 - DNA, 25 bp, Artificial
  probe
  misc_feature (1)..(25): SEQ ID NO: 6847; WAN024BWR_at; Start 284; Stop 308
caaaatgtgaggaatgggcgaaaaa

SEQ ID NO: 97466 - DNA, 25 bp, Artificial
  probe
  misc_feature (1)..(25): SEQ ID NO: 6847; WAN024BWR_at; Start 129; Stop 153
tactgaagttgaaggtgacacaatt

SEQ ID NO: 97467 - DNA, 25 bp, Artificial
  probe
  misc_feature (1)..(25): SEQ ID NO: 7301; WAN024BWS_at; Start 30; Stop 54
tttgaaaaatcaagcttgtgaaaat

SEQ ID NO: 97468 - DNA, 25 bp, Artificial
  probe
  misc_feature (1)..(25): SEQ ID NO: 7301; WAN024BWS_at; Start 27; Stop 51
tactttgaaaaatcaagcttgtgaa

SEQ ID NO: 97469 - DNA, 25 bp, Artificial
  probe
  misc_feature (1)..(25): SEQ ID NO: 7301; WAN024BWS_at; Start 32; Stop 56
tgaaaaatcaagcttgtgaaaataa

SEQ ID NO: 97470 - DNA, 25 bp, Artificial
  probe
  misc_feature (1)..(25): SEQ ID NO: 7301; WAN024BWS_at; Start 22; Stop 46
gagtatactttgaaaaatcaagctt

SEQ ID NO: 97471 - DNA, 25 bp, Artificial
  probe
  misc_feature (1)..(25): SEQ ID NO: 7301; WAN024BWS_at; Start 21; Stop 45
tgagtatactttgaaaaatcaagct

SEQ ID NO: 97472 - DNA, 25 bp, Artificial
  probe
  misc_feature (1)..(25): SEQ ID NO: 7301; WAN024BWS_at; Start 37; Stop 61
aatcaagcttgtgaaaataatctca

SEQ ID NO: 97473 - DNA, 25 bp, Artificial
  probe
  misc_feature (1)..(25): SEQ ID NO: 7301; WAN024BWS_at; Start 53; Stop 77
ataatctcaaaaattttgcaaaaag

SEQ ID NO: 97474 - DNA, 25 bp, Artificial
  probe
  misc_feature (1)..(25): SEQ ID NO: 7301; WAN024BWS_at; Start 28; Stop 52
actttgaaaaatcaagcttgtgaaa

SEQ ID NO: 97475 - DNA, 25 bp, Artificial
  probe
  misc_feature (1)..(25): SEQ ID NO: 7301; WAN024BWS_at; Start 29; Stop 53
ctttgaaaaatcaagcttgtgaaaa

SEQ ID NO: 97476 - DNA, 25 bp, Artificial
  probe
  misc_feature (1)..(25): SEQ ID NO: 7301; WAN024BWS_at; Start 49; Stop 73
gaaaataatctcaaaaattttgcaa

SEQ ID NO: 97477 - DNA, 25 bp, Artificial
  probe
  misc_feature (1)..(25): SEQ ID NO: 7301; WAN024BWS_at; Start 24; Stop 48
gtatactttgaaaaatcaagcttgt

SEQ ID NO: 97478 - DNA, 25 bp, Artificial
  probe
  misc_feature (1)..(25): SEQ ID NO: 7301; WAN024BWS_at; Start 34; Stop 58
aaaaatcaagcttgtgaaaataatc

SEQ ID NO: 97479 - DNA, 25 bp, Artificial
  probe
  misc_feature (1)..(25): SEQ ID NO: 7301; WAN024BWS_at; Start 40; Stop 64
caagcttgtgaaaataatctcaaaa

SEQ ID NO: 97480 - DNA, 25 bp, Artificial
  probe
  misc_feature (1)..(25): SEQ ID NO: 7301; WAN024BWS_at; Start 23; Stop 47
agtatactttgaaaaatcaagcttg

SEQ ID NO: 97481 - DNA, 25 bp, Artificial
  probe
  misc_feature (1)..(25): SEQ ID NO: 7301; WAN024BWS_at; Start 48; Stop 72
tgaaaataatctcaaaaattttgca

SEQ ID NO: 97482 - DNA, 25 bp, Artificial
  probe
  misc_feature (1)..(25): SEQ ID NO: 7301; WAN024BWS_at; Start 47; Stop 71
gtgaaaataatctcaaaaattttgc

SEQ ID NO: 97483 - DNA, 25 bp, Artificial
  probe
  misc_feature (1)..(25): SEQ ID NO: 7301; WAN024BWS_at; Start 26; Stop 50
atactttgaaaaatcaagcttgtga

SEQ ID NO: 97484 - DNA, 25 bp, Artificial
  probe
  misc_feature (1)..(25): SEQ ID NO: 7301; WAN024BWS_at; Start 41; Stop 65
aagcttgtgaaaataatctcaaaaa

SEQ ID NO: 97485 - DNA, 25 bp, Artificial
  probe
  misc_feature (1)..(25): SEQ ID NO: 7301; WAN024BWS_at; Start 36; Stop 60
aaatcaagcttgtgaaaataatctc

SEQ ID NO: 97486 - DNA, 25 bp, Artificial
  probe
  misc_feature (1)..(25): SEQ ID NO: 7301; WAN024BWS_at; Start 43; Stop 67
gcttgtgaaaataatctcaaaaatt

SEQ ID NO: 97487 - DNA, 25 bp, Artificial
  probe
  misc_feature (1)..(25): SEQ ID NO: 7301; WAN024BWS_at; Start 42; Stop 66
agcttgtgaaaataatctcaaaaat

SEQ ID NO: 97488 - DNA, 25 bp, Artificial
  probe
  misc_feature (1)..(25): SEQ ID NO: 7301; WAN024BWS_at; Start 35; Stop 59
aaaatcaagcttgtgaaaataatct

SEQ ID NO: 97489 - DNA, 25 bp, Artificial
  probe
  misc_feature (1)..(25): SEQ ID NO: 7301; WAN024BWS_at; Start 38; Stop 62
atcaagcttgtgaaaataatctcaa

SEQ ID NO: 97490 - DNA, 25 bp, Artificial
  probe
  misc_feature (1)..(25): SEQ ID NO: 7301; WAN024BWS_at; Start 25; Stop 49
tatactttgaaaaatcaagcttgtg

SEQ ID NO: 97491 - DNA, 25 bp, Artificial
  probe
  misc_feature (1)..(25): SEQ ID NO: 7301; WAN024BWS_at; Start 31; Stop 55
ttgaaaaatcaagcttgtgaaaata

SEQ ID NO: 97492 - DNA, 25 bp, Artificial
  probe
  misc_feature (1)..(25): SEQ ID NO: 7301; WAN024BWS_at; Start 46; Stop 70
tgtgaaaataatctcaaaaattttg

SEQ ID NO: 97493 - DNA, 25 bp, Artificial
  probe
  misc_feature (1)..(25): SEQ ID NO: 7301; WAN024BWS_at; Start 39; Stop 63
tcaagcttgtgaaaataatctcaaa

SEQ ID NO: 97494 - DNA, 25 bp, Artificial
  probe
  misc_feature (1)..(25): SEQ ID NO: 7301; WAN024BWS_at; Start 44; Stop 68
cttgtgaaaataatctcaaaaattt

SEQ ID NO: 97495 - DNA, 25 bp, Artificial
  probe
  misc_feature (1)..(25): SEQ ID NO: 7301; WAN024BWS_at; Start 33; Stop 57
gaaaaatcaagcttgtgaaaataat

SEQ ID NO: 97496 - DNA, 25 bp, Artificial
  probe
  misc_feature (1)..(25): SEQ ID NO: 7301; WAN024BWS_at; Start 16; Stop 40
tttattgagtatactttgaaaaatc

SEQ ID NO: 97497 - DNA, 25 bp, Artificial
  probe
  misc_feature (1)..(25): SEQ ID NO: 7026; WAN024BWT_at; Start 330; Stop 354
ggctatctgggcaggtattcgtgca

SEQ ID NO: 97498 - DNA, 25 bp, Artificial
  probe
  misc_feature (1)..(25): SEQ ID NO: 7026; WAN024BWT_at; Start 664; Stop 688
gaggtgacaggtttgtatcttcatc

SEQ ID NO: 97499 - DNA, 25 bp, Artificial
  probe
  misc_feature (1)..(25): SEQ ID NO: 7026; WAN024BWT_at; Start 409; Stop 433
catgtcttgatgttattgattcctc

SEQ ID NO: 97500 - DNA, 25 bp, Artificial
  probe
  misc_feature (1)..(25): SEQ ID NO: 7026; WAN024BWT_at; Start 185; Stop 209
tcattacaggtttaattgctgcgac

SEQ ID NO: 97501 - DNA, 25 bp, Artificial
  probe
  misc_feature (1)..(25): SEQ ID NO: 7026; WAN024BWT_at; Start 690; Stop 714
tatctggttgatagccttggcgctc

SEQ ID NO: 97502 - DNA, 25 bp, Artificial
  probe
  misc_feature (1)..(25): SEQ ID NO: 7026; WAN024BWT_at; Start 476; Stop 500
taatctttacctacttggcgccgtc

SEQ ID NO: 97503 - DNA, 25 bp, Artificial
  probe
  misc_feature (1)..(25): SEQ ID NO: 7026; WAN024BWT_at; Start 517; Stop 541
tactacaatgttttggcaatccgtc

SEQ ID NO: 97504 - DNA, 25 bp, Artificial
  probe
  misc_feature (1)..(25): SEQ ID NO: 7026; WAN024BWT_at; Start 531; Stop 555
ggcaatccgtcctctttatatgttt

SEQ ID NO: 97505 - DNA, 25 bp, Artificial
  probe
  misc_feature (1)..(25): SEQ ID NO: 7026; WAN024BWT_at; Start 36; Stop 60
tgtggtacgcaactacatgagtttt

SEQ ID NO: 97506 - DNA, 25 bp, Artificial
  probe
  misc_feature (1)..(25): SEQ ID NO: 7026; WAN024BWT_at; Start 345; Stop 369
tattcgtgcagtgattttcggtggg

SEQ ID NO: 97507 - DNA, 25 bp, Artificial
  probe
  misc_feature (1)..(25): SEQ ID NO: 7026; WAN024BWT_at; Start 218; Stop 242
ctgcggccaccgcagaaacaacggt

SEQ ID NO: 97508 - DNA, 25 bp, Artificial
  probe
  misc_feature (1)..(25): SEQ ID NO: 7026; WAN024BWT_at; Start 491; Stop 515
tggcgccgtctagggaatttctgaa

SEQ ID NO: 97509 - DNA, 25 bp, Artificial
  probe
  misc_feature (1)..(25): SEQ ID NO: 7026; WAN024BWT_at; Start 587; Stop 611
ccccaatacttggtgatttgacttg

SEQ ID NO: 97510 - DNA, 25 bp, Artificial
  probe
  misc_feature (1)..(25): SEQ ID NO: 7026; WAN024BWT_at; Start 247; Stop 271
gcctttatccagtataagattgaaa

SEQ ID NO: 97511 - DNA, 25 bp, Artificial
  probe
  misc_feature (1)..(25): SEQ ID NO: 7026; WAN024BWT_at; Start 717; Stop 741
gataacggtgcttcctatgtatatg

SEQ ID NO: 97512 - DNA, 25 bp, Artificial
  probe
  misc_feature (1)..(25): SEQ ID NO: 7026; WAN024BWT_at; Start 290; Stop 314
tgatgacgccaatcaatacgagtga

SEQ ID NO: 97513 - DNA, 25 bp, Artificial
  probe
  misc_feature (1)..(25): SEQ ID NO: 7026; WAN024BWT_at; Start 197; Stop 221
taattgctgcgactgccatgtctgc

SEQ ID NO: 97514 - DNA, 25 bp, Artificial
  probe
  misc_feature (1)..(25): SEQ ID NO: 7026; WAN024BWT_at; Start 378; Stop 402
gctgatttccatgcttatcacagcg

SEQ ID NO: 97515 - DNA, 25 bp, Artificial
  probe
  misc_feature (1)..(25): SEQ ID NO: 7026; WAN024BWT_at; Start 139; Stop 163
ggtgcctatttgacgcatgttaacg

SEQ ID NO: 97516 - DNA, 25 bp, Artificial
  probe
  misc_feature (1)..(25): SEQ ID NO: 7026; WAN024BWT_at; Start 105; Stop 129
cctcttttatcttttagcaatggga

SEQ ID NO: 97517 - DNA, 25 bp, Artificial
  probe
  misc_feature (1)..(25): SEQ ID NO: 7026; WAN024BWT_at; Start 22; Stop 46
tccatcggacacgttgtggtacgca

SEQ ID NO: 97518 - DNA, 25 bp, Artificial
  probe
  misc_feature (1)..(25): SEQ ID NO: 7026; WAN024BWT_at; Start 393; Stop 417
tatcacagcgcattttcatgtcttg

SEQ ID NO: 97519 - DNA, 25 bp, Artificial
  probe
  misc_feature (1)..(25): SEQ ID NO: 7026; WAN024BWT_at; Start 314; Stop 338
atattgtggtgggtcaggctatctg

SEQ ID NO: 97520 - DNA, 25 bp, Artificial
  probe
  misc_feature (1)..(25): SEQ ID NO: 7026; WAN024BWT_at; Start 704; Stop 728
ccttggcgctcttgataacggtgct

SEQ ID NO: 97521 - DNA, 25 bp, Artificial
  probe
  misc_feature (1)..(25): SEQ ID NO: 7026; WAN024BWT_at; Start 153; Stop 177
gcatgttaacggtatgctctaccgt

SEQ ID NO: 97522 - DNA, 25 bp, Artificial
  probe
  misc_feature (1)..(25): SEQ ID NO: 7026; WAN024BWT_at; Start 362; Stop 386
tcggtgggattttttggctgatttc

SEQ ID NO: 97523 - DNA, 25 bp, Artificial
  probe
  misc_feature (1)..(25): SEQ ID NO: 7026; WAN024BWT_at; Start 122; Stop 146
caatgggatttggagttggtgccta

SEQ ID NO: 97524 - DNA, 25 bp, Artificial
  probe
  misc_feature (1)..(25): SEQ ID NO: 7026; WAN024BWT_at; Start 170; Stop 194
tctaccgtgattttgtcattacagg

SEQ ID NO: 97525 - DNA, 25 bp, Artificial
  probe
  misc_feature (1)..(25): SEQ ID NO: 7026; WAN024BWT_at; Start 232; Stop 256
gaaacaacggtcaatgcctttatcc

SEQ ID NO: 97526 - DNA, 25 bp, Artificial
  probe
  misc_feature (1)..(25): SEQ ID NO: 7026; WAN024BWT_at; Start 6; Stop 30
taagttatcatttcagtccatcgga

SEQ ID NO: 97527 - DNA, 25 bp, Artificial
  probe
  misc_feature (1)..(25): SEQ ID NO: 7026; WAN024BWT_at; Start 606; Stop 630
gacttggttttctcccttgtatcac

SEQ ID NO: 97528 - DNA, 25 bp, Artificial
  probe
  misc_feature (1)..(25): SEQ ID NO: 7026; WAN024BWT_at; Start 623; Stop 647
tgtatcacgctacccgcatgattcg

SEQ ID NO: 97529 - DNA, 25 bp, Artificial
  probe
  misc_feature (1)..(25): SEQ ID NO: 7026; WAN024BWT_at; Start 633; Stop 657
tacccgcatgattcgtattatatgg

SEQ ID NO: 97530 - DNA, 25 bp, Artificial
  probe
  misc_feature (1)..(25): SEQ ID NO: 7026; WAN024BWT_at; Start 275; Stop 299
cttatgatgctatgttgatgacgcc

SEQ ID NO: 97531 - DNA, 25 bp, Artificial
  probe
  misc_feature (1)..(25): SEQ ID NO: 7621; WAN024BWU_at; Start 196; Stop 220
ggtgtttccatcattattacttccc

SEQ ID NO: 97532 - DNA, 25 bp, Artificial
  probe
  misc_feature (1)..(25): SEQ ID NO: 7621; WAN024BWU_at; Start 133; Stop 157
gttggtttagacattcaatcccgca

SEQ ID NO: 97533 - DNA, 25 bp, Artificial
  probe
  misc_feature (1)..(25): SEQ ID NO: 7621; WAN024BWU_at; Start 31; Stop 55
caaaagatggtgaatcagctgtcga

SEQ ID NO: 97534 - DNA, 25 bp, Artificial
  probe
  misc_feature (1)..(25): SEQ ID NO: 7621; WAN024BWU_at; Start 293; Stop 317
gaactgtagaagacttgctcatcaa

SEQ ID NO: 97535 - DNA, 25 bp, Artificial
  probe
  misc_feature (1)..(25): SEQ ID NO: 7621; WAN024BWU_at; Start 232; Stop 256
gagattgaatatttgacagataggg

SEQ ID NO: 97536 - DNA, 25 bp, Artificial
  probe
  misc_feature (1)..(25): SEQ ID NO: 7621; WAN024BWU_at; Start 86; Stop 110
gagctctcatcaatcgacctgatat

SEQ ID NO: 97537 - DNA, 25 bp, Artificial
  probe
  misc_feature (1)..(25): SEQ ID NO: 7621; WAN024BWU_at; Start 246; Stop 270
gacagatagggtgctgatgctccac

SEQ ID NO: 97538 - DNA, 25 bp, Artificial
  probe
  misc_feature (1)..(25): SEQ ID NO: 7621; WAN024BWU_at; Start 43; Stop 67
aatcagctgtcgagtgggatgcgac

SEQ ID NO: 97539 - DNA, 25 bp, Artificial
  probe
  misc_feature (1)..(25): SEQ ID NO: 7621; WAN024BWU_at; Start 25; Stop 49
catgcgcaaaagatggtgaatcagc

SEQ ID NO: 97540 - DNA, 25 bp, Artificial
  probe
  misc_feature (1)..(25): SEQ ID NO: 7621; WAN024BWU_at; Start 257; Stop 281
tgctgatgctccaccaagggactat

SEQ ID NO: 97541 - DNA, 25 bp, Artificial
  probe
  misc_feature (1)..(25): SEQ ID NO: 7621; WAN024BWU_at; Start 304; Stop 328
gacttgctcatcaagtatgatgctg

SEQ ID NO: 97542 - DNA, 25 bp, Artificial
  probe
  misc_feature (1)..(25): SEQ ID NO: 7621; WAN024BWU_at; Start 175; Stop 199
cttttggagttgaaggaattaggtg

SEQ ID NO: 97543 - DNA, 25 bp, Artificial
  probe
  misc_feature (1)..(25): SEQ ID NO: 7621; WAN024BWU_at; Start 325; Stop 349
gctgacaaccttgagacgctttttt

SEQ ID NO: 97544 - DNA, 25 bp, Artificial
  probe
  misc_feature (1)..(25): SEQ ID NO: 7621; WAN024BWU_at; Start 82; Stop 106
gcaagagctctcatcaatcgacctg

SEQ ID NO: 97545 - DNA, 25 bp, Artificial
  probe
  misc_feature (1)..(25): SEQ ID NO: 7621; WAN024BWU_at; Start 210; Stop 234
tattacttcccactatatgaatgag

SEQ ID NO: 97546 - DNA, 25 bp, Artificial
  probe
  misc_feature (1)..(25): SEQ ID NO: 7621; WAN024BWU_at; Start 319; Stop 343
tatgatgctgacaaccttgagacgc

SEQ ID NO: 97547 - DNA, 25 bp, Artificial
  probe
  misc_feature (1)..(25): SEQ ID NO: 7621; WAN024BWU_at; Start 289; Stop 313
gaaggaactgtagaagacttgctca

SEQ ID NO: 97548 - DNA, 25 bp, Artificial
  probe
  misc_feature (1)..(25): SEQ ID NO: 7621; WAN024BWU_at; Start 282; Stop 306
caaagaagaaggaactgtagaagac

SEQ ID NO: 97549 - DNA, 25 bp, Artificial
  probe
  misc_feature (1)..(25): SEQ ID NO: 7621; WAN024BWU_at; Start 218; Stop 242
cccactatatgaatgagattgaata

SEQ ID NO: 97550 - DNA, 25 bp, Artificial
  probe
  misc_feature (1)..(25): SEQ ID NO: 7621; WAN024BWU_at; Start 152; Stop 176
cccgcaatattatttgggataaact

SEQ ID NO: 97551 - DNA, 25 bp, Artificial
  probe
  misc_feature (1)..(25): SEQ ID NO: 7621; WAN024BWU_at; Start 275; Stop 299
ggactatcaaagaagaaggaactgt

SEQ ID NO: 97552 - DNA, 25 bp, Artificial
  probe
  misc_feature (1)..(25): SEQ ID NO: 7621; WAN024BWU_at; Start 121; Stop 145
gatgaaccgacagttggtttagaca

SEQ ID NO: 97553 - DNA, 25 bp, Artificial
  probe
  misc_feature (1)..(25): SEQ ID NO: 7621; WAN024BWU_at; Start 1; Stop 25
ttggattttgttcaactgagcaaac

SEQ ID NO: 97554 - DNA, 25 bp, Artificial
  probe
  misc_feature (1)..(25): SEQ ID NO: 7621; WAN024BWU_at; Start 65; Stop 89
gacgacgtcttgtcttggcaagagc

SEQ ID NO: 97555 - DNA, 25 bp, Artificial
  probe
  misc_feature (1)..(25): SEQ ID NO: 7621; WAN024BWU_at; Start 144; Stop 168
cattcaatcccgcaatattatttgg

SEQ ID NO: 97556 - DNA, 25 bp, Artificial
  probe
  misc_feature (1)..(25): SEQ ID NO: 7621; WAN024BWU_at; Start 363; Stop 387
gacagagaaggaggacttgcatgtt

SEQ ID NO: 97557 - DNA, 25 bp, Artificial
  probe
  misc_feature (1)..(25): SEQ ID NO: 7621; WAN024BWU_at; Start 57; Stop 81
tgggatgcgacgacgtcttgtcttg

SEQ ID NO: 97558 - DNA, 25 bp, Artificial
  probe
  misc_feature (1)..(25): SEQ ID NO: 7621; WAN024BWU_at; Start 266; Stop 290
tccaccaagggactatcaaagaaga

SEQ ID NO: 97559 - DNA, 25 bp, Artificial
  probe
  misc_feature (1)..(25): SEQ ID NO: 7621; WAN024BWU_at; Start 75; Stop 99
tgtcttggcaagagctctcatcaat

SEQ ID NO: 97560 - DNA, 25 bp, Artificial
  probe
  misc_feature (1)..(25): SEQ ID NO: 7621; WAN024BWU_at; Start 9; Stop 33
tgttcaactgagcaaacatgcgcaa

SEQ ID NO: 97561 - DNA, 25 bp, Artificial
  probe
  misc_feature (1)..(25): SEQ ID NO: 7621; WAN024BWU_at; Start 93; Stop 117
catcaatcgacctgatattatcatt

SEQ ID NO: 97562 - DNA, 25 bp, Artificial
  probe
  misc_feature (1)..(25): SEQ ID NO: 7621; WAN024BWU_at; Start 16; Stop 40
ctgagcaaacatgcgcaaaagatgg

SEQ ID NO: 97563 - DNA, 25 bp, Artificial
  probe
  misc_feature (1)..(25): SEQ ID NO: 7621; WAN024BWU_at; Start 250; Stop 274
gatagggtgctgatgctccaccaag

SEQ ID NO: 97564 - DNA, 25 bp, Artificial
  probe
  misc_feature (1)..(25): SEQ ID NO: 7621; WAN024BWU_at; Start 186; Stop 210
gaaggaattaggtgtttccatcatt

SEQ ID NO: 97565 - DNA, 25 bp, Artificial
  probe
  misc_feature (1)..(25): SEQ ID NO: 6738; WAN024BWV_at; Start 35; Stop 59
aagctgtggttagatcctttcggaa

SEQ ID NO: 97566 - DNA, 25 bp, Artificial
  probe
  misc_feature (1)..(25): SEQ ID NO: 6738; WAN024BWV_at; Start 36; Stop 60
agctgtggttagatcctttcggaaa

SEQ ID NO: 97567 - DNA, 25 bp, Artificial
  probe
  misc_feature (1)..(25): SEQ ID NO: 6738; WAN024BWV_at; Start 28; Stop 52
aaacaaaaagctgtggttagatcct

SEQ ID NO: 97568 - DNA, 25 bp, Artificial
  probe
  misc_feature (1)..(25): SEQ ID NO: 6738; WAN024BWV_at; Start 31; Stop 55
caaaaagctgtggttagatcctttc

SEQ ID NO: 97569 - DNA, 25 bp, Artificial
  probe
  misc_feature (1)..(25): SEQ ID NO: 6738; WAN024BWV_at; Start 24; Stop 48
attgaaacaaaaagctgtggttaga

SEQ ID NO: 97570 - DNA, 25 bp, Artificial
  probe
  misc_feature (1)..(25): SEQ ID NO: 6738; WAN024BWV_at; Start 14; Stop 38
ctcatgaccaattgaaacaaaaagc

SEQ ID NO: 97571 - DNA, 25 bp, Artificial
  probe
  misc_feature (1)..(25): SEQ ID NO: 6738; WAN024BWV_at; Start 29; Stop 53
aacaaaaagctgtggttagatcctt

SEQ ID NO: 97572 - DNA, 25 bp, Artificial
  probe
  misc_feature (1)..(25): SEQ ID NO: 6738; WAN024BWV_at; Start 27; Stop 51
gaaacaaaaagctgtggttagatcc

SEQ ID NO: 97573 - DNA, 25 bp, Artificial
  probe
  misc_feature (1)..(25): SEQ ID NO: 6738; WAN024BWV_at; Start 22; Stop 46
caattgaaacaaaaagctgtggtta

SEQ ID NO: 97574 - DNA, 25 bp, Artificial
  probe
  misc_feature (1)..(25): SEQ ID NO: 6738; WAN024BWV_at; Start 3; Stop 27
gcgttatcaaactcatgaccaattg

SEQ ID NO: 97575 - DNA, 25 bp, Artificial
  probe
  misc_feature (1)..(25): SEQ ID NO: 6738; WAN024BWV_at; Start 16; Stop 40
catgaccaattgaaacaaaaagctg

SEQ ID NO: 97576 - DNA, 25 bp, Artificial
  probe
  misc_feature (1)..(25): SEQ ID NO: 6738; WAN024BWV_at; Start 19; Stop 43
gaccaattgaaacaaaaagctgtgg

SEQ ID NO: 97577 - DNA, 25 bp, Artificial
  probe
  misc_feature (1)..(25): SEQ ID NO: 6738; WAN024BWV_at; Start 39; Stop 63
tgtggttagatcctttcggaaattg

SEQ ID NO: 97578 - DNA, 25 bp, Artificial
  probe
  misc_feature (1)..(25): SEQ ID NO: 6738; WAN024BWV_at; Start 38; Stop 62
ctgtggttagatcctttcggaaatt

SEQ ID NO: 97579 - DNA, 25 bp, Artificial
  probe
  misc_feature (1)..(25): SEQ ID NO: 6738; WAN024BWV_at; Start 13; Stop 37
actcatgaccaattgaaacaaaaag

SEQ ID NO: 97580 - DNA, 25 bp, Artificial
  probe
  misc_feature (1)..(25): SEQ ID NO: 6738; WAN024BWV_at; Start 2; Stop 26
tgcgttatcaaactcatgaccaatt

SEQ ID NO: 97581 - DNA, 25 bp, Artificial
  probe
  misc_feature (1)..(25): SEQ ID NO: 6738; WAN024BWV_at; Start 30; Stop 54
acaaaaagctgtggttagatccttt

SEQ ID NO: 97582 - DNA, 25 bp, Artificial
  probe
  misc_feature (1)..(25): SEQ ID NO: 6738; WAN024BWV_at; Start 15; Stop 39
tcatgaccaattgaaacaaaaagct

SEQ ID NO: 97583 - DNA, 25 bp, Artificial
  probe
  misc_feature (1)..(25): SEQ ID NO: 6738; WAN024BWV_at; Start 41; Stop 65
tggttagatcctttcggaaattgtc

SEQ ID NO: 97584 - DNA, 25 bp, Artificial
  probe
  misc_feature (1)..(25): SEQ ID NO: 6738; WAN024BWV_at; Start 33; Stop 57
aaaagctgtggttagatcctttcgg

SEQ ID NO: 97585 - DNA, 25 bp, Artificial
  probe
  misc_feature (1)..(25): SEQ ID NO: 6738; WAN024BWV_at; Start 9; Stop 33
tcaaactcatgaccaattgaaacaa

SEQ ID NO: 97586 - DNA, 25 bp, Artificial
  probe
  misc_feature (1)..(25): SEQ ID NO: 6738; WAN024BWV_at; Start 18; Stop 42
tgaccaattgaaacaaaaagctgtg

SEQ ID NO: 97587 - DNA, 25 bp, Artificial
  probe
  misc_feature (1)..(25): SEQ ID NO: 6738; WAN024BWV_at; Start 10; Stop 34
caaactcatgaccaattgaaacaaa

SEQ ID NO: 97588 - DNA, 25 bp, Artificial
  probe
  misc_feature (1)..(25): SEQ ID NO: 6738; WAN024BWV_at; Start 7; Stop 31
tatcaaactcatgaccaattgaaac

SEQ ID NO: 97589 - DNA, 25 bp, Artificial
  probe
  misc_feature (1)..(25): SEQ ID NO: 6738; WAN024BWV_at; Start 4; Stop 28
cgttatcaaactcatgaccaattga

SEQ ID NO: 97590 - DNA, 25 bp, Artificial
  probe
  misc_feature (1)..(25): SEQ ID NO: 6738; WAN024BWV_at; Start 23; Stop 47
aattgaaacaaaaagctgtggttag

SEQ ID NO: 97591 - DNA, 25 bp, Artificial
  probe
  misc_feature (1)..(25): SEQ ID NO: 6738; WAN024BWV_at; Start 5; Stop 29
gttatcaaactcatgaccaattgaa

SEQ ID NO: 97592 - DNA, 25 bp, Artificial
  probe
  misc_feature (1)..(25): SEQ ID NO: 6738; WAN024BWV_at; Start 34; Stop 58
aaagctgtggttagatcctttcgga

SEQ ID NO: 97593 - DNA, 25 bp, Artificial
  probe
  misc_feature (1)..(25): SEQ ID NO: 6738; WAN024BWV_at; Start 37; Stop 61
gctgtggttagatcctttcggaaat

SEQ ID NO: 97594 - DNA, 25 bp, Artificial
  probe
  misc_feature (1)..(25): SEQ ID NO: 6738; WAN024BWV_at; Start 32; Stop 56
aaaaagctgtggttagatcctttcg

SEQ ID NO: 97595 - DNA, 25 bp, Artificial
  probe
  misc_feature (1)..(25): SEQ ID NO: 6738; WAN024BWV_at; Start 42; Stop 66
ggttagatcctttcggaaattgtca

SEQ ID NO: 97596 - DNA, 25 bp, Artificial
  probe
  misc_feature (1)..(25): SEQ ID NO: 6738; WAN024BWV_at; Start 26; Stop 50
tgaaacaaaaagctgtggttagatc

SEQ ID NO: 97597 - DNA, 25 bp, Artificial
  probe
  misc_feature (1)..(25): SEQ ID NO: 6738; WAN024BWV_at; Start 11; Stop 35
aaactcatgaccaattgaaacaaaa

SEQ ID NO: 97598 - DNA, 25 bp, Artificial
  probe
  misc_feature (1)..(25): SEQ ID NO: 6738; WAN024BWV_at; Start 21; Stop 45
ccaattgaaacaaaaagctgtggtt

SEQ ID NO: 97599 - DNA, 25 bp, Artificial
  probe
  misc_feature (1)..(25): SEQ ID NO: 7076; WAN024BWW_at; Start 25; Stop 49
gatcgatgcaatgtttcaactgact

SEQ ID NO: 97600 - DNA, 25 bp, Artificial
  probe
  misc_feature (1)..(25): SEQ ID NO: 7076; WAN024BWW_at; Start 33; Stop 57
caatgtttcaactgactcaattcgc

SEQ ID NO: 97601 - DNA, 25 bp, Artificial
  probe
  misc_feature (1)..(25): SEQ ID NO: 7076; WAN024BWW_at; Start 17; Stop 41
accgctttgatcgatgcaatgtttc

SEQ ID NO: 97602 - DNA, 25 bp, Artificial
  probe
  misc_feature (1)..(25): SEQ ID NO: 7076; WAN024BWW_at; Start 28; Stop 52
cgatgcaatgtttcaactgactcaa

SEQ ID NO: 97603 - DNA, 25 bp, Artificial
  probe
  misc_feature (1)..(25): SEQ ID NO: 7076; WAN024BWW_at; Start 11; Stop 35
ttgacaaccgctttgatcgatgcaa

SEQ ID NO: 97604 - DNA, 25 bp, Artificial
  probe
  misc_feature (1)..(25): SEQ ID NO: 7076; WAN024BWW_at; Start 55; Stop 79
cgctatcagataggaaaactttctt

SEQ ID NO: 97605 - DNA, 25 bp, Artificial
  probe
  misc_feature (1)..(25): SEQ ID NO: 7076; WAN024BWW_at; Start 10; Stop 34
attgacaaccgctttgatcgatgca

SEQ ID NO: 97606 - DNA, 25 bp, Artificial
  probe
  misc_feature (1)..(25): SEQ ID NO: 7076; WAN024BWW_at; Start 37; Stop 61
gtttcaactgactcaattcgctatc

SEQ ID NO: 97607 - DNA, 25 bp, Artificial
  probe
  misc_feature (1)..(25): SEQ ID NO: 7076; WAN024BWW_at; Start 27; Stop 51
tcgatgcaatgtttcaactgactca

SEQ ID NO: 97608 - DNA, 25 bp, Artificial
  probe
  misc_feature (1)..(25): SEQ ID NO: 7076; WAN024BWW_at; Start 46; Stop 70
gactcaattcgctatcagataggaa

SEQ ID NO: 97609 - DNA, 25 bp, Artificial
  probe
  misc_feature (1)..(25): SEQ ID NO: 7076; WAN024BWW_at; Start 20; Stop 44
gctttgatcgatgcaatgtttcaac

SEQ ID NO: 97610 - DNA, 25 bp, Artificial
  probe
  misc_feature (1)..(25): SEQ ID NO: 7076; WAN024BWW_at; Start 45; Stop 69
tgactcaattcgctatcagatagga

SEQ ID NO: 97611 - DNA, 25 bp, Artificial
  probe
  misc_feature (1)..(25): SEQ ID NO: 7076; WAN024BWW_at; Start 9; Stop 33
gattgacaaccgctttgatcgatgc

SEQ ID NO: 97612 - DNA, 25 bp, Artificial
  probe
  misc_feature (1)..(25): SEQ ID NO: 7076; WAN024BWW_at; Start 13; Stop 37
gacaaccgctttgatcgatgcaatg

SEQ ID NO: 97613 - DNA, 25 bp, Artificial
  probe
  misc_feature (1)..(25): SEQ ID NO: 7076; WAN024BWW_at; Start 24; Stop 48
tgatcgatgcaatgtttcaactgac

SEQ ID NO: 97614 - DNA, 25 bp, Artificial
  probe
  misc_feature (1)..(25): SEQ ID NO: 7076; WAN024BWW_at; Start 15; Stop 39
caaccgctttgatcgatgcaatgtt

SEQ ID NO: 97615 - DNA, 25 bp, Artificial
  probe
  misc_feature (1)..(25): SEQ ID NO: 7076; WAN024BWW_at; Start 12; Stop 36
tgacaaccgctttgatcgatgcaat

SEQ ID NO: 97616 - DNA, 25 bp, Artificial
  probe
  misc_feature (1)..(25): SEQ ID NO: 7076; WAN024BWW_at; Start 34; Stop 58
aatgtttcaactgactcaattcgct

SEQ ID NO: 97617 - DNA, 25 bp, Artificial
  probe
  misc_feature (1)..(25): SEQ ID NO: 7076; WAN024BWW_at; Start 2; Stop 26
tgaaaaagattgacaaccgctttga

SEQ ID NO: 97618 - DNA, 25 bp, Artificial
  probe
  misc_feature (1)..(25): SEQ ID NO: 7076; WAN024BWW_at; Start 60; Stop 84
tcagataggaaaactttctttagct

SEQ ID NO: 97619 - DNA, 25 bp, Artificial
  probe
  misc_feature (1)..(25): SEQ ID NO: 7076; WAN024BWW_at; Start 14; Stop 38
acaaccgctttgatcgatgcaatgt

SEQ ID NO: 97620 - DNA, 25 bp, Artificial
  probe
  misc_feature (1)..(25): SEQ ID NO: 7076; WAN024BWW_at; Start 5; Stop 29
aaaagattgacaaccgctttgatcg

SEQ ID NO: 97621 - DNA, 25 bp, Artificial
  probe
  misc_feature (1)..(25): SEQ ID NO: 7076; WAN024BWW_at; Start 29; Stop 53
gatgcaatgtttcaactgactcaat

SEQ ID NO: 97622 - DNA, 25 bp, Artificial
  probe
  misc_feature (1)..(25): SEQ ID NO: 7076; WAN024BWW_at; Start 54; Stop 78
tcgctatcagataggaaaactttct

SEQ ID NO: 97623 - DNA, 25 bp, Artificial
  probe
  misc_feature (1)..(25): SEQ ID NO: 7076; WAN024BWW_at; Start 1; Stop 25
ctgaaaaagattgacaaccgctttg

SEQ ID NO: 97624 - DNA, 25 bp, Artificial
  probe
  misc_feature (1)..(25): SEQ ID NO: 7076; WAN024BWW_at; Start 36; Stop 60
tgtttcaactgactcaattcgctat

SEQ ID NO: 97625 - DNA, 25 bp, Artificial
  probe
  misc_feature (1)..(25): SEQ ID NO: 7076; WAN024BWW_at; Start 18; Stop 42
ccgctttgatcgatgcaatgtttca

SEQ ID NO: 97626 - DNA, 25 bp, Artificial
  probe
  misc_feature (1)..(25): SEQ ID NO: 7076; WAN024BWW_at; Start 3; Stop 27
gaaaaagattgacaaccgctttgat

SEQ ID NO: 97627 - DNA, 25 bp, Artificial
  probe
  misc_feature (1)..(25): SEQ ID NO: 7076; WAN024BWW_at; Start 32; Stop 56
gcaatgtttcaactgactcaattcg

SEQ ID NO: 97628 - DNA, 25 bp, Artificial
  probe
  misc_feature (1)..(25): SEQ ID NO: 7076; WAN024BWW_at; Start 41; Stop 65
caactgactcaattcgctatcagat

SEQ ID NO: 97629 - DNA, 25 bp, Artificial
  probe
  misc_feature (1)..(25): SEQ ID NO: 7076; WAN024BWW_at; Start 6; Stop 30
aaagattgacaaccgctttgatcga

SEQ ID NO: 97630 - DNA, 25 bp, Artificial
  probe
  misc_feature (1)..(25): SEQ ID NO: 7076; WAN024BWW_at; Start 56; Stop 80
gctatcagataggaaaactttcttt

SEQ ID NO: 97631 - DNA, 25 bp, Artificial
  probe
  misc_feature (1)..(25): SEQ ID NO: 7076; WAN024BWW_at; Start 49; Stop 73
tcaattcgctatcagataggaaaac

SEQ ID NO: 97632 - DNA, 25 bp, Artificial
  probe
  misc_feature (1)..(25): SEQ ID NO: 7076; WAN024BWW_at; Start 40; Stop 64
tcaactgactcaattcgctatcaga

SEQ ID NO: 97633 - DNA, 25 bp, Artificial
  probe
  misc_feature (1)..(25): SEQ ID NO: 7278; WAN024BWX_at; Start 114; Stop 138
cagaaacaagttactggagaatgag

SEQ ID NO: 97634 - DNA, 25 bp, Artificial
  probe
  misc_feature (1)..(25): SEQ ID NO: 7278; WAN024BWX_at; Start 150; Stop 174
tgctgaaaagtggttcaccttctgg

SEQ ID NO: 97635 - DNA, 25 bp, Artificial
  probe
  misc_feature (1)..(25): SEQ ID NO: 7278; WAN024BWX_at; Start 161; Stop 185
ggttcaccttctggcattctcaaaa

SEQ ID NO: 97636 - DNA, 25 bp, Artificial
  probe
  misc_feature (1)..(25): SEQ ID NO: 7278; WAN024BWX_at; Start 221; Stop 245
taatcttatcaagggcagaacatca

SEQ ID NO: 97637 - DNA, 25 bp, Artificial
  probe
  misc_feature (1)..(25): SEQ ID NO: 7278; WAN024BWX_at; Start 292; Stop 316
ttgattcaagaaatagggaactcca

SEQ ID NO: 97638 - DNA, 25 bp, Artificial
  probe
  misc_feature (1)..(25): SEQ ID NO: 7278; WAN024BWX_at; Start 234; Stop 258
ggcagaacatcaagtcacccaagaa

SEQ ID NO: 97639 - DNA, 25 bp, Artificial
  probe
  misc_feature (1)..(25): SEQ ID NO: 7278; WAN024BWX_at; Start 10; Stop 34
caatacagagacattcgcaaagagg

SEQ ID NO: 97640 - DNA, 25 bp, Artificial
  probe
  misc_feature (1)..(25): SEQ ID NO: 7278; WAN024BWX_at; Start 106; Stop 130
tcatttgccagaaacaagttactgg

SEQ ID NO: 97641 - DNA, 25 bp, Artificial
  probe
  misc_feature (1)..(25): SEQ ID NO: 7278; WAN024BWX_at; Start 13; Stop 37
tacagagacattcgcaaagaggtta

SEQ ID NO: 97642 - DNA, 25 bp, Artificial
  probe
  misc_feature (1)..(25): SEQ ID NO: 7278; WAN024BWX_at; Start 275; Stop 299
taacctgtgttcaggaattgattca

SEQ ID NO: 97643 - DNA, 25 bp, Artificial
  probe
  misc_feature (1)..(25): SEQ ID NO: 7278; WAN024BWX_at; Start 170; Stop 194
tctggcattctcaaaagctggaaca

SEQ ID NO: 97644 - DNA, 25 bp, Artificial
  probe
  misc_feature (1)..(25): SEQ ID NO: 7278; WAN024BWX_at; Start 41; Stop 65
tgactgcaaatgaattagaaatgat

SEQ ID NO: 97645 - DNA, 25 bp, Artificial
  probe
  misc_feature (1)..(25): SEQ ID NO: 7278; WAN024BWX_at; Start 265; Stop 289
tccattctcttaacctgtgttcagg

SEQ ID NO: 97646 - DNA, 25 bp, Artificial
  probe
  misc_feature (1)..(25): SEQ ID NO: 7278; WAN024BWX_at; Start 298; Stop 322
caagaaatagggaactccattcctc

SEQ ID NO: 97647 - DNA, 25 bp, Artificial
  probe
  misc_feature (1)..(25): SEQ ID NO: 7278; WAN024BWX_at; Start 67; Stop 91
gacataatgatgaaaaataaaggat

SEQ ID NO: 97648 - DNA, 25 bp, Artificial
  probe
  misc_feature (1)..(25): SEQ ID NO: 7278; WAN024BWX_at; Start 25; Stop 49
cgcaaagaggttaatttgactgcaa

SEQ ID NO: 97649 - DNA, 25 bp, Artificial
  probe
  misc_feature (1)..(25): SEQ ID NO: 7278; WAN024BWX_at; Start 318; Stop 342
tcctcttagtcaagacttccgtaaa

SEQ ID NO: 97650 - DNA, 25 bp, Artificial
  probe
  misc_feature (1)..(25): SEQ ID NO: 7278; WAN024BWX_at; Start 261; Stop 285
tgtatccattctcttaacctgtgtt

SEQ ID NO: 97651 - DNA, 25 bp, Artificial
  probe
  misc_feature (1)..(25): SEQ ID NO: 7278; WAN024BWX_at; Start 154; Stop 178
gaaaagtggttcaccttctggcatt

SEQ ID NO: 97652 - DNA, 25 bp, Artificial
  probe
  misc_feature (1)..(25): SEQ ID NO: 7278; WAN024BWX_at; Start 2; Stop 26
tgccagaacaatacagagacattcg

SEQ ID NO: 97653 - DNA, 25 bp, Artificial
  probe
  misc_feature (1)..(25): SEQ ID NO: 7278; WAN024BWX_at; Start 214; Stop 238
gagattttaatcttatcaagggcag

SEQ ID NO: 97654 - DNA, 25 bp, Artificial
  probe
  misc_feature (1)..(25): SEQ ID NO: 7278; WAN024BWX_at; Start 132; Stop 156
gaatgagttagaaatgactgctgaa

SEQ ID NO: 97655 - DNA, 25 bp, Artificial
  probe
  misc_feature (1)..(25): SEQ ID NO: 7278; WAN024BWX_at; Start 15; Stop 39
cagagacattcgcaaagaggttaat

SEQ ID NO: 97656 - DNA, 25 bp, Artificial
  probe
  misc_feature (1)..(25): SEQ ID NO: 7278; WAN024BWX_at; Start 84; Stop 108
taaaggatttgaacacttttcttca

SEQ ID NO: 97657 - DNA, 25 bp, Artificial
  probe
  misc_feature (1)..(25): SEQ ID NO: 7278; WAN024BWX_at; Start 173; Stop 197
ggcattctcaaaagctggaacaaat

SEQ ID NO: 97658 - DNA, 25 bp, Artificial
  probe
  misc_feature (1)..(25): SEQ ID NO: 7278; WAN024BWX_at; Start 94; Stop 118
gaacacttttcttcatttgccagaa

SEQ ID NO: 97659 - DNA, 25 bp, Artificial
  probe
  misc_feature (1)..(25): SEQ ID NO: 7278; WAN024BWX_at; Start 167; Stop 191
ccttctggcattctcaaaagctgga

SEQ ID NO: 97660 - DNA, 25 bp, Artificial
  probe
  misc_feature (1)..(25): SEQ ID NO: 7278; WAN024BWX_at; Start 143; Stop 167
aaatgactgctgaaaagtggttcac

SEQ ID NO: 97661 - DNA, 25 bp, Artificial
  probe
  misc_feature (1)..(25): SEQ ID NO: 7278; WAN024BWX_at; Start 180; Stop 204
tcaaaagctggaacaaatcagtcgt

SEQ ID NO: 97662 - DNA, 25 bp, Artificial
  probe
  misc_feature (1)..(25): SEQ ID NO: 7278; WAN024BWX_at; Start 118; Stop 142
aacaagttactggagaatgagttag

SEQ ID NO: 97663 - DNA, 25 bp, Artificial
  probe
  misc_feature (1)..(25): SEQ ID NO: 7278; WAN024BWX_at; Start 330; Stop 354
agacttccgtaaaaaatacatgagg

SEQ ID NO: 97664 - DNA, 25 bp, Artificial
  probe
  misc_feature (1)..(25): SEQ ID NO: 7278; WAN024BWX_at; Start 305; Stop 329
tagggaactccattcctcttagtca

SEQ ID NO: 97665 - DNA, 25 bp, Artificial
  probe
  misc_feature (1)..(25): SEQ ID NO: 7278; WAN024BWX_at; Start 227; Stop 251
tatcaagggcagaacatcaagtcac

SEQ ID NO: 97666 - DNA, 25 bp, Artificial
  probe
  misc_feature (1)..(25): SEQ ID NO: 7278; WAN024BWX_at; Start 56; Stop 80
tagaaatgattgacataatgatgaa

SEQ ID NO: 97667 - DNA, 25 bp, Artificial
  probe
  misc_feature (1)..(25): SEQ ID NO: 7077; WAN024BWY_at; Start 56; Stop 80
cctactctattacccaaaaaggcat

SEQ ID NO: 97668 - DNA, 25 bp, Artificial
  probe
  misc_feature (1)..(25): SEQ ID NO: 7077; WAN024BWY_at; Start 23; Stop 47
ttcctgtcccaccttctacatctct

SEQ ID NO: 97669 - DNA, 25 bp, Artificial
  probe
  misc_feature (1)..(25): SEQ ID NO: 7077; WAN024BWY_at; Start 61; Stop 85
tctattacccaaaaaggcattattg

SEQ ID NO: 97670 - DNA, 25 bp, Artificial
  probe
  misc_feature (1)..(25): SEQ ID NO: 7077; WAN024BWY_at; Start 13; Stop 37
cacacaaccattcctgtcccacctt

SEQ ID NO: 97671 - DNA, 25 bp, Artificial
  probe
  misc_feature (1)..(25): SEQ ID NO: 7077; WAN024BWY_at; Start 64; Stop 88
attacccaaaaaggcattattgaag

SEQ ID NO: 97672 - DNA, 25 bp, Artificial
  probe
  misc_feature (1)..(25): SEQ ID NO: 7077; WAN024BWY_at; Start 58; Stop 82
tactctattacccaaaaaggcatta

SEQ ID NO: 97673 - DNA, 25 bp, Artificial
  probe
  misc_feature (1)..(25): SEQ ID NO: 7077; WAN024BWY_at; Start 24; Stop 48
tcctgtcccaccttctacatctctt

SEQ ID NO: 97674 - DNA, 25 bp, Artificial
  probe
  misc_feature (1)..(25): SEQ ID NO: 7077; WAN024BWY_at; Start 3; Stop 27
gaaactaattcacacaaccattcct

SEQ ID NO: 97675 - DNA, 25 bp, Artificial
  probe
  misc_feature (1)..(25): SEQ ID NO: 7077; WAN024BWY_at; Start 66; Stop 90
tacccaaaaaggcattattgaagag

SEQ ID NO: 97676 - DNA, 25 bp, Artificial
  probe
  misc_feature (1)..(25): SEQ ID NO: 7077; WAN024BWY_at; Start 32; Stop 56
caccttctacatctcttcctcaacc

SEQ ID NO: 97677 - DNA, 25 bp, Artificial
  probe
  misc_feature (1)..(25): SEQ ID NO: 7077; WAN024BWY_at; Start 4; Stop 28
aaactaattcacacaaccattcctg

SEQ ID NO: 97678 - DNA, 25 bp, Artificial
  probe
  misc_feature (1)..(25): SEQ ID NO: 7077; WAN024BWY_at; Start 2; Stop 26
tgaaactaattcacacaaccattcc

SEQ ID NO: 97679 - DNA, 25 bp, Artificial
  probe
  misc_feature (1)..(25): SEQ ID NO: 7077; WAN024BWY_at; Start 12; Stop 36
tcacacaaccattcctgtcccacct

SEQ ID NO: 97680 - DNA, 25 bp, Artificial
  probe
  misc_feature (1)..(25): SEQ ID NO: 7077; WAN024BWY_at; Start 8; Stop 32
taattcacacaaccattcctgtccc

SEQ ID NO: 97681 - DNA, 25 bp, Artificial
  probe
  misc_feature (1)..(25): SEQ ID NO: 7077; WAN024BWY_at; Start 63; Stop 87
tattacccaaaaaggcattattgaa

SEQ ID NO: 97682 - DNA, 25 bp, Artificial
  probe
  misc_feature (1)..(25): SEQ ID NO: 7077; WAN024BWY_at; Start 21; Stop 45
cattcctgtcccaccttctacatct

SEQ ID NO: 97683 - DNA, 25 bp, Artificial
  probe
  misc_feature (1)..(25): SEQ ID NO: 7077; WAN024BWY_at; Start 9; Stop 33
aattcacacaaccattcctgtccca

SEQ ID NO: 97684 - DNA, 25 bp, Artificial
  probe
  misc_feature (1)..(25): SEQ ID NO: 7077; WAN024BWY_at; Start 41; Stop 65
catctcttcctcaaccctactctat

SEQ ID NO: 97685 - DNA, 25 bp, Artificial
  probe
  misc_feature (1)..(25): SEQ ID NO: 7077; WAN024BWY_at; Start 17; Stop 41
caaccattcctgtcccaccttctac

SEQ ID NO: 97686 - DNA, 25 bp, Artificial
  probe
  misc_feature (1)..(25): SEQ ID NO: 7077; WAN024BWY_at; Start 15; Stop 39
cacaaccattcctgtcccaccttct

SEQ ID NO: 97687 - DNA, 25 bp, Artificial
  probe
  misc_feature (1)..(25): SEQ ID NO: 7077; WAN024BWY_at; Start 38; Stop 62
ctacatctcttcctcaaccctactc

SEQ ID NO: 97688 - DNA, 25 bp, Artificial
  probe
  misc_feature (1)..(25): SEQ ID NO: 7077; WAN024BWY_at; Start 18; Stop 42
aaccattcctgtcccaccttctaca

SEQ ID NO: 97689 - DNA, 25 bp, Artificial
  probe
  misc_feature (1)..(25): SEQ ID NO: 7077; WAN024BWY_at; Start 16; Stop 40
acaaccattcctgtcccaccttcta

SEQ ID NO: 97690 - DNA, 25 bp, Artificial
  probe
  misc_feature (1)..(25): SEQ ID NO: 7077; WAN024BWY_at; Start 39; Stop 63
tacatctcttcctcaaccctactct

SEQ ID NO: 97691 - DNA, 25 bp, Artificial
  probe
  misc_feature (1)..(25): SEQ ID NO: 7077; WAN024BWY_at; Start 5; Stop 29
aactaattcacacaaccattcctgt

SEQ ID NO: 97692 - DNA, 25 bp, Artificial
  probe
  misc_feature (1)..(25): SEQ ID NO: 7077; WAN024BWY_at; Start 7; Stop 31
ctaattcacacaaccattcctgtcc

SEQ ID NO: 97693 - DNA, 25 bp, Artificial
  probe
  misc_feature (1)..(25): SEQ ID NO: 7077; WAN024BWY_at; Start 59; Stop 83
actctattacccaaaaaggcattat

SEQ ID NO: 97694 - DNA, 25 bp, Artificial
  probe
  misc_feature (1)..(25): SEQ ID NO: 7077; WAN024BWY_at; Start 62; Stop 86
ctattacccaaaaaggcattattga

SEQ ID NO: 97695 - DNA, 25 bp, Artificial
  probe
  misc_feature (1)..(25): SEQ ID NO: 7077; WAN024BWY_at; Start 60; Stop 84
ctctattacccaaaaaggcattatt

SEQ ID NO: 97696 - DNA, 25 bp, Artificial
  probe
  misc_feature (1)..(25): SEQ ID NO: 7077; WAN024BWY_at; Start 6; Stop 30
actaattcacacaaccattcctgtc

SEQ ID NO: 97697 - DNA, 25 bp, Artificial
  probe
  misc_feature (1)..(25): SEQ ID NO: 7077; WAN024BWY_at; Start 29; Stop 53
tcccaccttctacatctcttcctca

SEQ ID NO: 97698 - DNA, 25 bp, Artificial
  probe
  misc_feature (1)..(25): SEQ ID NO: 7077; WAN024BWY_at; Start 14; Stop 38
acacaaccattcctgtcccaccttc

SEQ ID NO: 97699 - DNA, 25 bp, Artificial
  probe
  misc_feature (1)..(25): SEQ ID NO: 7077; WAN024BWY_at; Start 27; Stop 51
tgtcccaccttctacatctcttcct

SEQ ID NO: 97700 - DNA, 25 bp, Artificial
  probe
  misc_feature (1)..(25): SEQ ID NO: 7077; WAN024BWY_at; Start 37; Stop 61
tctacatctcttcctcaaccctact

SEQ ID NO: 97701 - DNA, 25 bp, Artificial
  probe
  misc_feature (1)..(25): SEQ ID NO: 6452; WAN024BWZ_at; Start 336; Stop 360
taattttgtcggtttggctgcagac

SEQ ID NO: 97702 - DNA, 25 bp, Artificial
  probe
  misc_feature (1)..(25): SEQ ID NO: 6452; WAN024BWZ_at; Start 265; Stop 289
gatcgtgttgctgtggaaccaattc

SEQ ID NO: 97703 - DNA, 25 bp, Artificial
  probe
  misc_feature (1)..(25): SEQ ID NO: 6452; WAN024BWZ_at; Start 644; Stop 668
tccgtccggaagaaggtgaaacagc

SEQ ID NO: 97704 - DNA, 25 bp, Artificial
  probe
  misc_feature (1)..(25): SEQ ID NO: 6452; WAN024BWZ_at; Start 50; Stop 74
tagaagttcctgaagtacttccgca

SEQ ID NO: 97705 - DNA, 25 bp, Artificial
  probe
  misc_feature (1)..(25): SEQ ID NO: 6452; WAN024BWZ_at; Start 65; Stop 89
tacttccgcaccaagtaaaagttgc

SEQ ID NO: 97706 - DNA, 25 bp, Artificial
  probe
  misc_feature (1)..(25): SEQ ID NO: 6452; WAN024BWZ_at; Start 352; Stop 376
gctgcagacggtggatttgccaaat

SEQ ID NO: 97707 - DNA, 25 bp, Artificial
  probe
  misc_feature (1)..(25): SEQ ID NO: 6452; WAN024BWZ_at; Start 194; Stop 218
taacactgggacatgaattttctgg

SEQ ID NO: 97708 - DNA, 25 bp, Artificial
  probe
  misc_feature (1)..(25): SEQ ID NO: 6452; WAN024BWZ_at; Start 745; Stop 769
ggacaagccttagctgccgtacata

SEQ ID NO: 97709 - DNA, 25 bp, Artificial
  probe
  misc_feature (1)..(25): SEQ ID NO: 6452; WAN024BWZ_at; Start 712; Stop 736
tcttatgaagtaacgggtgtgccag

SEQ ID NO: 97710 - DNA, 25 bp, Artificial
  probe
  misc_feature (1)..(25): SEQ ID NO: 6452; WAN024BWZ_at; Start 629; Stop 653
taggagctatcgttgtccgtccgga

SEQ ID NO: 97711 - DNA, 25 bp, Artificial
  probe
  misc_feature (1)..(25): SEQ ID NO: 6452; WAN024BWZ_at; Start 760; Stop 784
gccgtacataaagcaggtgagtgca

SEQ ID NO: 97712 - DNA, 25 bp, Artificial
  probe
  misc_feature (1)..(25): SEQ ID NO: 6452; WAN024BWZ_at; Start 548; Stop 572
tagaagctcttcgtgcagctggtgc

SEQ ID NO: 97713 - DNA, 25 bp, Artificial
  probe
  misc_feature (1)..(25): SEQ ID NO: 6452; WAN024BWZ_at; Start 448; Stop 472
gaacccgctgctgttgcagtctatg

SEQ ID NO: 97714 - DNA, 25 bp, Artificial
  probe
  misc_feature (1)..(25): SEQ ID NO: 6452; WAN024BWZ_at; Start 829; Stop 853
gaatttgcaatccaagaaaagacac

SEQ ID NO: 97715 - DNA, 25 bp, Artificial
  probe
  misc_feature (1)..(25): SEQ ID NO: 6452; WAN024BWZ_at; Start 402; Stop 426
acatgtcattccagatagcttgagc

SEQ ID NO: 97716 - DNA, 25 bp, Artificial
  probe
  misc_feature (1)..(25): SEQ ID NO: 6452; WAN024BWZ_at; Start 481; Stop 505
caatcttctttgaaggctggcgata

SEQ ID NO: 97717 - DNA, 25 bp, Artificial
  probe
  misc_feature (1)..(25): SEQ ID NO: 6452; WAN024BWZ_at; Start 729; Stop 753
tgtgccagtagttttaggacaagcc

SEQ ID NO: 97718 - DNA, 25 bp, Artificial
  probe
  misc_feature (1)..(25): SEQ ID NO: 6452; WAN024BWZ_at; Start 906; Stop 930
ggaacaaggctacttctctgctgaa

SEQ ID NO: 97719 - DNA, 25 bp, Artificial
  probe
  misc_feature (1)..(25): SEQ ID NO: 6452; WAN024BWZ_at; Start 563; Stop 587
cagctggtgcttctaagatttatgc

SEQ ID NO: 97720 - DNA, 25 bp, Artificial
  probe
  misc_feature (1)..(25): SEQ ID NO: 6452; WAN024BWZ_at; Start 961; Stop 985
aatatcgtcgaagaaggctttatcg

SEQ ID NO: 97721 - DNA, 25 bp, Artificial
  probe
  misc_feature (1)..(25): SEQ ID NO: 6452; WAN024BWZ_at; Start 372; Stop 396
caaatattgtgttttagacggtgac

SEQ ID NO: 97722 - DNA, 25 bp, Artificial
  probe
  misc_feature (1)..(25): SEQ ID NO: 6452; WAN024BWZ_at; Start 601; Stop 625
cctgaacgtcaagcaaaagctgaag

SEQ ID NO: 97723 - DNA, 25 bp, Artificial
  probe
  misc_feature (1)..(25): SEQ ID NO: 6452; WAN024BWZ_at; Start 146; Stop 170
tctttatcccaacagatgagcacgt

SEQ ID NO: 97724 - DNA, 25 bp, Artificial
  probe
  misc_feature (1)..(25): SEQ ID NO: 6452; WAN024BWZ_at; Start 163; Stop 187
gagcacgtctattctggtcaaaaag

SEQ ID NO: 97725 - DNA, 25 bp, Artificial
  probe
  misc_feature (1)..(25): SEQ ID NO: 6452; WAN024BWZ_at; Start 783; Stop 807
catggtggtctctatctgggaacga

SEQ ID NO: 97726 - DNA, 25 bp, Artificial
  probe
  misc_feature (1)..(25): SEQ ID NO: 6452; WAN024BWZ_at; Start 15; Stop 39
ctggcatgcagcgaaagatgttcgt

SEQ ID NO: 97727 - DNA, 25 bp, Artificial
  probe
  misc_feature (1)..(25): SEQ ID NO: 6452; WAN024BWZ_at; Start 508; Stop 532
gctgttgtctttggtttaggcccga

SEQ ID NO: 97728 - DNA, 25 bp, Artificial
  probe
  misc_feature (1)..(25): SEQ ID NO: 6452; WAN024BWZ_at; Start 80; Stop 104
taaaagttgcagttaagttcacagg

SEQ ID NO: 97729 - DNA, 25 bp, Artificial
  probe
  misc_feature (1)..(25): SEQ ID NO: 6452; WAN024BWZ_at; Start 585; Stop 609
tgctgttgaactatcacctgaacgt

SEQ ID NO: 97730 - DNA, 25 bp, Artificial
  probe
  misc_feature (1)..(25): SEQ ID NO: 6452; WAN024BWZ_at; Start 177; Stop 201
tggtcaaaaagcaccggtaacactg

SEQ ID NO: 97731 - DNA, 25 bp, Artificial
  probe
  misc_feature (1)..(25): SEQ ID NO: 6452; WAN024BWZ_at; Start 229; Stop 253
gaagtcggaagcgatgttacccgtg

SEQ ID NO: 97732 - DNA, 25 bp, Artificial
  probe
  misc_feature (1)..(25): SEQ ID NO: 6452; WAN024BWZ_at; Start 430; Stop 454
gagcaagctgctcttactgaacccg

SEQ ID NO: 97733 - DNA, 25 bp, Artificial
  probe
  misc_feature (1)..(25): SEQ ID NO: 6452; WAN024BWZ_at; Start 214; Stop 238
tctggtgaaatcatagaagtcggaa

SEQ ID NO: 97734 - DNA, 25 bp, Artificial
  probe
  misc_feature (1)..(25): SEQ ID NO: 6452; WAN024BWZ_at; Start 101; Stop 125
caggaatttgtggtactgacctcca

SEQ ID NO: 97735 - DNA, 25 bp, Artificial
  probe
  misc_feature (1)..(25): SEQ ID NO: 7121; WAN024BX2_at; Start 36; Stop 60
tcgtggatttttcctagtgaagcgt

SEQ ID NO: 97736 - DNA, 25 bp, Artificial
  probe
  misc_feature (1)..(25): SEQ ID NO: 7121; WAN024BX2_at; Start 5; Stop 29
tacgacggaaaaatccacaaatcaa

SEQ ID NO: 97737 - DNA, 25 bp, Artificial
  probe
  misc_feature (1)..(25): SEQ ID NO: 7121; WAN024BX2_at; Start 26; Stop 50
tcaataccattcgtggatttttcct

SEQ ID NO: 97738 - DNA, 25 bp, Artificial
  probe
  misc_feature (1)..(25): SEQ ID NO: 7121; WAN024BX2_at; Start 7; Stop 31
cgacggaaaaatccacaaatcaata

SEQ ID NO: 97739 - DNA, 25 bp, Artificial
  probe
  misc_feature (1)..(25): SEQ ID NO: 7121; WAN024BX2_at; Start 1; Stop 25
ctgctacgacggaaaaatccacaaa

SEQ ID NO: 97740 - DNA, 25 bp, Artificial
  probe
  misc_feature (1)..(25): SEQ ID NO: 7121; WAN024BX2_at; Start 22; Stop 46
caaatcaataccattcgtggatttt

SEQ ID NO: 97741 - DNA, 25 bp, Artificial
  probe
  misc_feature (1)..(25): SEQ ID NO: 7121; WAN024BX2_at; Start 47; Stop 71
tcctagtgaagcgtttaggtaagcc

SEQ ID NO: 97742 - DNA, 25 bp, Artificial
  probe
  misc_feature (1)..(25): SEQ ID NO: 7121; WAN024BX2_at; Start 48; Stop 72
cctagtgaagcgtttaggtaagccg

SEQ ID NO: 97743 - DNA, 25 bp, Artificial
  probe
  misc_feature (1)..(25): SEQ ID NO: 7121; WAN024BX2_at; Start 28; Stop 52
aataccattcgtggatttttcctag

SEQ ID NO: 97744 - DNA, 25 bp, Artificial
  probe
  misc_feature (1)..(25): SEQ ID NO: 7121; WAN024BX2_at; Start 2; Stop 26
tgctacgacggaaaaatccacaaat

SEQ ID NO: 97745 - DNA, 25 bp, Artificial
  probe
  misc_feature (1)..(25): SEQ ID NO: 7121; WAN024BX2_at; Start 8; Stop 32
gacggaaaaatccacaaatcaatac

SEQ ID NO: 97746 - DNA, 25 bp, Artificial
  probe
  misc_feature (1)..(25): SEQ ID NO: 7121; WAN024BX2_at; Start 20; Stop 44
cacaaatcaataccattcgtggatt

SEQ ID NO: 97747 - DNA, 25 bp, Artificial
  probe
  misc_feature (1)..(25): SEQ ID NO: 7121; WAN024BX2_at; Start 11; Stop 35
ggaaaaatccacaaatcaataccat

SEQ ID NO: 97748 - DNA, 25 bp, Artificial
  probe
  misc_feature (1)..(25): SEQ ID NO: 7121; WAN024BX2_at; Start 39; Stop 63
tggatttttcctagtgaagcgttta

SEQ ID NO: 97749 - DNA, 25 bp, Artificial
  probe
  misc_feature (1)..(25): SEQ ID NO: 7121; WAN024BX2_at; Start 37; Stop 61
cgtggatttttcctagtgaagcgtt

SEQ ID NO: 97750 - DNA, 25 bp, Artificial
  probe
  misc_feature (1)..(25): SEQ ID NO: 7121; WAN024BX2_at; Start 49; Stop 73
ctagtgaagcgtttaggtaagccgc

SEQ ID NO: 97751 - DNA, 25 bp, Artificial
  probe
  misc_feature (1)..(25): SEQ ID NO: 7121; WAN024BX2_at; Start 51; Stop 75
agtgaagcgtttaggtaagccgcca

SEQ ID NO: 97752 - DNA, 25 bp, Artificial
  probe
  misc_feature (1)..(25): SEQ ID NO: 7121; WAN024BX2_at; Start 10; Stop 34
cggaaaaatccacaaatcaatacca

SEQ ID NO: 97753 - DNA, 25 bp, Artificial
  probe
  misc_feature (1)..(25): SEQ ID NO: 7121; WAN024BX2_at; Start 31; Stop 55
accattcgtggatttttcctagtga

SEQ ID NO: 97754 - DNA, 25 bp, Artificial
  probe
  misc_feature (1)..(25): SEQ ID NO: 7121; WAN024BX2_at; Start 12; Stop 36
gaaaaatccacaaatcaataccatt

SEQ ID NO: 97755 - DNA, 25 bp, Artificial
  probe
  misc_feature (1)..(25): SEQ ID NO: 7121; WAN024BX2_at; Start 14; Stop 38
aaaatccacaaatcaataccattcg

SEQ ID NO: 97756 - DNA, 25 bp, Artificial
  probe
  misc_feature (1)..(25): SEQ ID NO: 7121; WAN024BX2_at; Start 50; Stop 74
tagtgaagcgtttaggtaagccgcc

SEQ ID NO: 97757 - DNA, 25 bp, Artificial
  probe
  misc_feature (1)..(25): SEQ ID NO: 7121; WAN024BX2_at; Start 3; Stop 27
gctacgacggaaaaatccacaaatc

SEQ ID NO: 97758 - DNA, 25 bp, Artificial
  probe
  misc_feature (1)..(25): SEQ ID NO: 7121; WAN024BX2_at; Start 33; Stop 57
cattcgtggatttttcctagtgaag

SEQ ID NO: 97759 - DNA, 25 bp, Artificial
  probe
  misc_feature (1)..(25): SEQ ID NO: 7121; WAN024BX2_at; Start 15; Stop 39
aaatccacaaatcaataccattcgt

SEQ ID NO: 97760 - DNA, 25 bp, Artificial
  probe
  misc_feature (1)..(25): SEQ ID NO: 7121; WAN024BX2_at; Start 18; Stop 42
tccacaaatcaataccattcgtgga

SEQ ID NO: 97761 - DNA, 25 bp, Artificial
  probe
  misc_feature (1)..(25): SEQ ID NO: 7121; WAN024BX2_at; Start 24; Stop 48
aatcaataccattcgtggatttttc

SEQ ID NO: 97762 - DNA, 25 bp, Artificial
  probe
  misc_feature (1)..(25): SEQ ID NO: 7121; WAN024BX2_at; Start 32; Stop 56
ccattcgtggatttttcctagtgaa

SEQ ID NO: 97763 - DNA, 25 bp, Artificial
  probe
  misc_feature (1)..(25): SEQ ID NO: 7121; WAN024BX2_at; Start 16; Stop 40
aatccacaaatcaataccattcgtg

SEQ ID NO: 97764 - DNA, 25 bp, Artificial
  probe
  misc_feature (1)..(25): SEQ ID NO: 7121; WAN024BX2_at; Start 34; Stop 58
attcgtggatttttcctagtgaagc

SEQ ID NO: 97765 - DNA, 25 bp, Artificial
  probe
  misc_feature (1)..(25): SEQ ID NO: 7121; WAN024BX2_at; Start 4; Stop 28
ctacgacggaaaaatccacaaatca

SEQ ID NO: 97766 - DNA, 25 bp, Artificial
  probe
  misc_feature (1)..(25): SEQ ID NO: 7121; WAN024BX2_at; Start 35; Stop 59
ttcgtggatttttcctagtgaagcg

SEQ ID NO: 97767 - DNA, 25 bp, Artificial
  probe
  misc_feature (1)..(25): SEQ ID NO: 7121; WAN024BX2_at; Start 30; Stop 54
taccattcgtggatttttcctagtg

SEQ ID NO: 97768 - DNA, 25 bp, Artificial
  probe
  misc_feature (1)..(25): SEQ ID NO: 7121; WAN024BX2_at; Start 27; Stop 51
caataccattcgtggatttttccta

SEQ ID NO: 97769 - DNA, 25 bp, Artificial
  probe
  misc_feature (1)..(25): SEQ ID NO: 7458; WAN024BX3_at; Start 25; Stop 49
gtattaaatcgcttggttgccaatt

SEQ ID NO: 97770 - DNA, 25 bp, Artificial
  probe
  misc_feature (1)..(25): SEQ ID NO: 7458; WAN024BX3_at; Start 29; Stop 53
taaatcgcttggttgccaattttgt

SEQ ID NO: 97771 - DNA, 25 bp, Artificial
  probe
  misc_feature (1)..(25): SEQ ID NO: 7458; WAN024BX3_at; Start 11; Stop 35
ggcgtcaacaaatagtattaaatcg

SEQ ID NO: 97772 - DNA, 25 bp, Artificial
  probe
  misc_feature (1)..(25): SEQ ID NO: 7458; WAN024BX3_at; Start 7; Stop 31
tgttggcgtcaacaaatagtattaa

SEQ ID NO: 97773 - DNA, 25 bp, Artificial
  probe
  misc_feature (1)..(25): SEQ ID NO: 7458; WAN024BX3_at; Start 60; Stop 84
taacaaaattgctctgaaagtactg

SEQ ID NO: 97774 - DNA, 25 bp, Artificial
  probe
  misc_feature (1)..(25): SEQ ID NO: 7458; WAN024BX3_at; Start 69; Stop 93
tgctctgaaagtactgtctgaatta

SEQ ID NO: 97775 - DNA, 25 bp, Artificial
  probe
  misc_feature (1)..(25): SEQ ID NO: 7458; WAN024BX3_at; Start 22; Stop 46
atagtattaaatcgcttggttgcca

SEQ ID NO: 97776 - DNA, 25 bp, Artificial
  probe
  misc_feature (1)..(25): SEQ ID NO: 7458; WAN024BX3_at; Start 26; Stop 50
tattaaatcgcttggttgccaattt

SEQ ID NO: 97777 - DNA, 25 bp, Artificial
  probe
  misc_feature (1)..(25): SEQ ID NO: 7458; WAN024BX3_at; Start 34; Stop 58
cgcttggttgccaattttgttgaca

SEQ ID NO: 97778 - DNA, 25 bp, Artificial
  probe
  misc_feature (1)..(25): SEQ ID NO: 7458; WAN024BX3_at; Start 42; Stop 66
tgccaattttgttgacattaacaaa

SEQ ID NO: 97779 - DNA, 25 bp, Artificial
  probe
  misc_feature (1)..(25): SEQ ID NO: 7458; WAN024BX3_at; Start 2; Stop 26
tgacttgttggcgtcaacaaatagt

SEQ ID NO: 97780 - DNA, 25 bp, Artificial
  probe
  misc_feature (1)..(25): SEQ ID NO: 7458; WAN024BX3_at; Start 13; Stop 37
cgtcaacaaatagtattaaatcgct

SEQ ID NO: 97781 - DNA, 25 bp, Artificial
  probe
  misc_feature (1)..(25): SEQ ID NO: 7458; WAN024BX3_at; Start 21; Stop 45
aatagtattaaatcgcttggttgcc

SEQ ID NO: 97782 - DNA, 25 bp, Artificial
  probe
  misc_feature (1)..(25): SEQ ID NO: 7458; WAN024BX3_at; Start 31; Stop 55
aatcgcttggttgccaattttgttg

SEQ ID NO: 97783 - DNA, 25 bp, Artificial
  probe
  misc_feature (1)..(25): SEQ ID NO: 7458; WAN024BX3_at; Start 10; Stop 34
tggcgtcaacaaatagtattaaatc

SEQ ID NO: 97784 - DNA, 25 bp, Artificial
  probe
  misc_feature (1)..(25): SEQ ID NO: 7458; WAN024BX3_at; Start 57; Stop 81
cattaacaaaattgctctgaaagta

SEQ ID NO: 97785 - DNA, 25 bp, Artificial
  probe
  misc_feature (1)..(25): SEQ ID NO: 7458; WAN024BX3_at; Start 39; Stop 63
ggttgccaattttgttgacattaac

SEQ ID NO: 97786 - DNA, 25 bp, Artificial
  probe
  misc_feature (1)..(25): SEQ ID NO: 7458; WAN024BX3_at; Start 3; Stop 27
gacttgttggcgtcaacaaatagta

SEQ ID NO: 97787 - DNA, 25 bp, Artificial
  probe
  misc_feature (1)..(25): SEQ ID NO: 7458; WAN024BX3_at; Start 52; Stop 76
gttgacattaacaaaattgctctga

SEQ ID NO: 97788 - DNA, 25 bp, Artificial
  probe
  misc_feature (1)..(25): SEQ ID NO: 7458; WAN024BX3_at; Start 16; Stop 40
caacaaatagtattaaatcgcttgg

SEQ ID NO: 97789 - DNA, 25 bp, Artificial
  probe
  misc_feature (1)..(25): SEQ ID NO: 7458; WAN024BX3_at; Start 67; Stop 91
attgctctgaaagtactgtctgaat

SEQ ID NO: 97790 - DNA, 25 bp, Artificial
  probe
  misc_feature (1)..(25): SEQ ID NO: 7458; WAN024BX3_at; Start 66; Stop 90
aattgctctgaaagtactgtctgaa

SEQ ID NO: 97791 - DNA, 25 bp, Artificial
  probe
  misc_feature (1)..(25): SEQ ID NO: 7458; WAN024BX3_at; Start 64; Stop 88
aaaattgctctgaaagtactgtctg

SEQ ID NO: 97792 - DNA, 25 bp, Artificial
  probe
  misc_feature (1)..(25): SEQ ID NO: 7458; WAN024BX3_at; Start 70; Stop 94
gctctgaaagtactgtctgaattaa

SEQ ID NO: 97793 - DNA, 25 bp, Artificial
  probe
  misc_feature (1)..(25): SEQ ID NO: 7458; WAN024BX3_at; Start 51; Stop 75
tgttgacattaacaaaattgctctg

SEQ ID NO: 97794 - DNA, 25 bp, Artificial
  probe
  misc_feature (1)..(25): SEQ ID NO: 7458; WAN024BX3_at; Start 63; Stop 87
caaaattgctctgaaagtactgtct

SEQ ID NO: 97795 - DNA, 25 bp, Artificial
  probe
  misc_feature (1)..(25): SEQ ID NO: 7458; WAN024BX3_at; Start 62; Stop 86
acaaaattgctctgaaagtactgtc

SEQ ID NO: 97796 - DNA, 25 bp, Artificial
  probe
  misc_feature (1)..(25): SEQ ID NO: 7458; WAN024BX3_at; Start 8; Stop 32
gttggcgtcaacaaatagtattaaa

SEQ ID NO: 97797 - DNA, 25 bp, Artificial
  probe
  misc_feature (1)..(25): SEQ ID NO: 7458; WAN024BX3_at; Start 74; Stop 98
tgaaagtactgtctgaattaaaaaa

SEQ ID NO: 97798 - DNA, 25 bp, Artificial
  probe
  misc_feature (1)..(25): SEQ ID NO: 7458; WAN024BX3_at; Start 55; Stop 79
gacattaacaaaattgctctgaaag

SEQ ID NO: 97799 - DNA, 25 bp, Artificial
  probe
  misc_feature (1)..(25): SEQ ID NO: 7458; WAN024BX3_at; Start 65; Stop 89
aaattgctctgaaagtactgtctga

SEQ ID NO: 97800 - DNA, 25 bp, Artificial
  probe
  misc_feature (1)..(25): SEQ ID NO: 7458; WAN024BX3_at; Start 35; Stop 59
gcttggttgccaattttgttgacat

SEQ ID NO: 97801 - DNA, 25 bp, Artificial
  probe
  misc_feature (1)..(25): SEQ ID NO: 7458; WAN024BX3_at; Start 24; Stop 48
agtattaaatcgcttggttgccaat

SEQ ID NO: 97802 - DNA, 25 bp, Artificial
  probe
  misc_feature (1)..(25): SEQ ID NO: 7458; WAN024BX3_at; Start 72; Stop 96
tctgaaagtactgtctgaattaaaa

SEQ ID NO: 97803 - DNA, 25 bp, Artificial
  probe
  misc_feature (1)..(25): SEQ ID NO: 7431; WAN024BX4_at; Start 40; Stop 64
ccaataattttggacgataagcgtc

SEQ ID NO: 97804 - DNA, 25 bp, Artificial
  probe
  misc_feature (1)..(25): SEQ ID NO: 7431; WAN024BX4_at; Start 21; Stop 45
caatctgggaagaaaattgccaata

SEQ ID NO: 97805 - DNA, 25 bp, Artificial
  probe
  misc_feature (1)..(25): SEQ ID NO: 7431; WAN024BX4_at; Start 50; Stop 74
tggacgataagcgtcagctgagaaa

SEQ ID NO: 97806 - DNA, 25 bp, Artificial
  probe
  misc_feature (1)..(25): SEQ ID NO: 7431; WAN024BX4_at; Start 24; Stop 48
tctgggaagaaaattgccaataatt

SEQ ID NO: 97807 - DNA, 25 bp, Artificial
  probe
  misc_feature (1)..(25): SEQ ID NO: 7431; WAN024BX4_at; Start 38; Stop 62
tgccaataattttggacgataagcg

SEQ ID NO: 97808 - DNA, 25 bp, Artificial
  probe
  misc_feature (1)..(25): SEQ ID NO: 7431; WAN024BX4_at; Start 13; Stop 37
gaaattgccaatctgggaagaaaat

SEQ ID NO: 97809 - DNA, 25 bp, Artificial
  probe
  misc_feature (1)..(25): SEQ ID NO: 7431; WAN024BX4_at; Start 44; Stop 68
taattttggacgataagcgtcagct

SEQ ID NO: 97810 - DNA, 25 bp, Artificial
  probe
  misc_feature (1)..(25): SEQ ID NO: 7431; WAN024BX4_at; Start 9; Stop 33
agacgaaattgccaatctgggaaga

SEQ ID NO: 97811 - DNA, 25 bp, Artificial
  probe
  misc_feature (1)..(25): SEQ ID NO: 7431; WAN024BX4_at; Start 63; Stop 87
tcagctgagaaagaccaaatacgaa

SEQ ID NO: 97812 - DNA, 25 bp, Artificial
  probe
  misc_feature (1)..(25): SEQ ID NO: 7431; WAN024BX4_at; Start 47; Stop 71
ttttggacgataagcgtcagctgag

SEQ ID NO: 97813 - DNA, 25 bp, Artificial
  probe
  misc_feature (1)..(25): SEQ ID NO: 7431; WAN024BX4_at; Start 58; Stop 82
aagcgtcagctgagaaagaccaaat

SEQ ID NO: 97814 - DNA, 25 bp, Artificial
  probe
  misc_feature (1)..(25): SEQ ID NO: 7431; WAN024BX4_at; Start 1; Stop 25
ttgaatccagacgaaattgccaatc

SEQ ID NO: 97815 - DNA, 25 bp, Artificial
  probe
  misc_feature (1)..(25): SEQ ID NO: 7431; WAN024BX4_at; Start 45; Stop 69
aattttggacgataagcgtcagctg

SEQ ID NO: 97816 - DNA, 25 bp, Artificial
  probe
  misc_feature (1)..(25): SEQ ID NO: 7431; WAN024BX4_at; Start 61; Stop 85
cgtcagctgagaaagaccaaatacg

SEQ ID NO: 97817 - DNA, 25 bp, Artificial
  probe
  misc_feature (1)..(25): SEQ ID NO: 7431; WAN024BX4_at; Start 7; Stop 31
ccagacgaaattgccaatctgggaa

SEQ ID NO: 97818 - DNA, 25 bp, Artificial
  probe
  misc_feature (1)..(25): SEQ ID NO: 7431; WAN024BX4_at; Start 19; Stop 43
gccaatctgggaagaaaattgccaa

SEQ ID NO: 97819 - DNA, 25 bp, Artificial
  probe
  misc_feature (1)..(25): SEQ ID NO: 7431; WAN024BX4_at; Start 43; Stop 67
ataattttggacgataagcgtcagc

SEQ ID NO: 97820 - DNA, 25 bp, Artificial
  probe
  misc_feature (1)..(25): SEQ ID NO: 7431; WAN024BX4_at; Start 6; Stop 30
tccagacgaaattgccaatctggga

SEQ ID NO: 97821 - DNA, 25 bp, Artificial
  probe
  misc_feature (1)..(25): SEQ ID NO: 7431; WAN024BX4_at; Start 54; Stop 78
cgataagcgtcagctgagaaagacc

SEQ ID NO: 97822 - DNA, 25 bp, Artificial
  probe
  misc_feature (1)..(25): SEQ ID NO: 7431; WAN024BX4_at; Start 32; Stop 56
gaaaattgccaataattttggacga

SEQ ID NO: 97823 - DNA, 25 bp, Artificial
  probe
  misc_feature (1)..(25): SEQ ID NO: 7431; WAN024BX4_at; Start 2; Stop 26
tgaatccagacgaaattgccaatct

SEQ ID NO: 97824 - DNA, 25 bp, Artificial
  probe
  misc_feature (1)..(25): SEQ ID NO: 7431; WAN024BX4_at; Start 66; Stop 90
gctgagaaagaccaaatacgaaaaa

SEQ ID NO: 97825 - DNA, 25 bp, Artificial
  probe
  misc_feature (1)..(25): SEQ ID NO: 7431; WAN024BX4_at; Start 10; Stop 34
gacgaaattgccaatctgggaagaa

SEQ ID NO: 97826 - DNA, 25 bp, Artificial
  probe
  misc_feature (1)..(25): SEQ ID NO: 7431; WAN024BX4_at; Start 12; Stop 36
cgaaattgccaatctgggaagaaaa

SEQ ID NO: 97827 - DNA, 25 bp, Artificial
  probe
  misc_feature (1)..(25): SEQ ID NO: 7431; WAN024BX4_at; Start 55; Stop 79
gataagcgtcagctgagaaagacca

SEQ ID NO: 97828 - DNA, 25 bp, Artificial
  probe
  misc_feature (1)..(25): SEQ ID NO: 7431; WAN024BX4_at; Start 41; Stop 65
caataattttggacgataagcgtca

SEQ ID NO: 97829 - DNA, 25 bp, Artificial
  probe
  misc_feature (1)..(25): SEQ ID NO: 7431; WAN024BX4_at; Start 64; Stop 88
cagctgagaaagaccaaatacgaaa

SEQ ID NO: 97830 - DNA, 25 bp, Artificial
  probe
  misc_feature (1)..(25): SEQ ID NO: 7431; WAN024BX4_at; Start 52; Stop 76
gacgataagcgtcagctgagaaaga

SEQ ID NO: 97831 - DNA, 25 bp, Artificial
  probe
  misc_feature (1)..(25): SEQ ID NO: 7431; WAN024BX4_at; Start 18; Stop 42
tgccaatctgggaagaaaattgcca

SEQ ID NO: 97832 - DNA, 25 bp, Artificial
  probe
  misc_feature (1)..(25): SEQ ID NO: 7431; WAN024BX4_at; Start 57; Stop 81
taagcgtcagctgagaaagaccaaa

SEQ ID NO: 97833 - DNA, 25 bp, Artificial
  probe
  misc_feature (1)..(25): SEQ ID NO: 7431; WAN024BX4_at; Start 60; Stop 84
gcgtcagctgagaaagaccaaatac

SEQ ID NO: 97834 - DNA, 25 bp, Artificial
  probe
  misc_feature (1)..(25): SEQ ID NO: 7431; WAN024BX4_at; Start 17; Stop 41
ttgccaatctgggaagaaaattgcc

SEQ ID NO: 97835 - DNA, 25 bp, Artificial
  probe
  misc_feature (1)..(25): SEQ ID NO: 7431; WAN024BX4_at; Start 3; Stop 27
gaatccagacgaaattgccaatctg

SEQ ID NO: 97836 - DNA, 25 bp, Artificial
  probe
  misc_feature (1)..(25): SEQ ID NO: 7431; WAN024BX4_at; Start 48; Stop 72
tttggacgataagcgtcagctgaga

SEQ ID NO: 97837 - DNA, 25 bp, Artificial
  probe
  misc_feature (1)..(25): SEQ ID NO: 6850; WAN024BX5_at; Start 37; Stop 61
gctagaaaatcaaactgttcatttt

SEQ ID NO: 97838 - DNA, 25 bp, Artificial
  probe
  misc_feature (1)..(25): SEQ ID NO: 6850; WAN024BX5_at; Start 36; Stop 60
tgctagaaaatcaaactgttcattt

SEQ ID NO: 97839 - DNA, 25 bp, Artificial
  probe
  misc_feature (1)..(25): SEQ ID NO: 6850; WAN024BX5_at; Start 45; Stop 69
atcaaactgttcattttcaaaggaa

SEQ ID NO: 97840 - DNA, 25 bp, Artificial
  probe
  misc_feature (1)..(25): SEQ ID NO: 6850; WAN024BX5_at; Start 8; Stop 32
ctatcaacaattctaatagtaatga

SEQ ID NO: 97841 - DNA, 25 bp, Artificial
  probe
  misc_feature (1)..(25): SEQ ID NO: 6850; WAN024BX5_at; Start 51; Stop 75
ctgttcattttcaaaggaagattat

SEQ ID NO: 97842 - DNA, 25 bp, Artificial
  probe
  misc_feature (1)..(25): SEQ ID NO: 6850; WAN024BX5_at; Start 34; Stop 58
aatgctagaaaatcaaactgttcat

SEQ ID NO: 97843 - DNA, 25 bp, Artificial
  probe
  misc_feature (1)..(25): SEQ ID NO: 6850; WAN024BX5_at; Start 30; Stop 54
tgataatgctagaaaatcaaactgt

SEQ ID NO: 97844 - DNA, 25 bp, Artificial
  probe
  misc_feature (1)..(25): SEQ ID NO: 6850; WAN024BX5_at; Start 29; Stop 53
atgataatgctagaaaatcaaactg

SEQ ID NO: 97845 - DNA, 25 bp, Artificial
  probe
  misc_feature (1)..(25): SEQ ID NO: 6850; WAN024BX5_at; Start 7; Stop 31
tctatcaacaattctaatagtaatg

SEQ ID NO: 97846 - DNA, 25 bp, Artificial
  probe
  misc_feature (1)..(25): SEQ ID NO: 6850; WAN024BX5_at; Start 27; Stop 51
taatgataatgctagaaaatcaaac

SEQ ID NO: 97847 - DNA, 25 bp, Artificial
  probe
  misc_feature (1)..(25): SEQ ID NO: 6850; WAN024BX5_at; Start 15; Stop 39
caattctaatagtaatgataatgct

SEQ ID NO: 97848 - DNA, 25 bp, Artificial
  probe
  misc_feature (1)..(25): SEQ ID NO: 6850; WAN024BX5_at; Start 4; Stop 28
gattctatcaacaattctaatagta

SEQ ID NO: 97849 - DNA, 25 bp, Artificial
  probe
  misc_feature (1)..(25): SEQ ID NO: 6850; WAN024BX5_at; Start 44; Stop 68
aatcaaactgttcattttcaaagga

SEQ ID NO: 97850 - DNA, 25 bp, Artificial
  probe
  misc_feature (1)..(25): SEQ ID NO: 6850; WAN024BX5_at; Start 43; Stop 67
aaatcaaactgttcattttcaaagg

SEQ ID NO: 97851 - DNA, 25 bp, Artificial
  probe
  misc_feature (1)..(25): SEQ ID NO: 6850; WAN024BX5_at; Start 35; Stop 59
atgctagaaaatcaaactgttcatt

SEQ ID NO: 97852 - DNA, 25 bp, Artificial
  probe
  misc_feature (1)..(25): SEQ ID NO: 6850; WAN024BX5_at; Start 20; Stop 44
ctaatagtaatgataatgctagaaa

SEQ ID NO: 97853 - DNA, 25 bp, Artificial
  probe
  misc_feature (1)..(25): SEQ ID NO: 6850; WAN024BX5_at; Start 17; Stop 41
attctaatagtaatgataatgctag

SEQ ID NO: 97854 - DNA, 25 bp, Artificial
  probe
  misc_feature (1)..(25): SEQ ID NO: 6850; WAN024BX5_at; Start 47; Stop 71
caaactgttcattttcaaaggaaga

SEQ ID NO: 97855 - DNA, 25 bp, Artificial
  probe
  misc_feature (1)..(25): SEQ ID NO: 6850; WAN024BX5_at; Start 19; Stop 43
tctaatagtaatgataatgctagaa

SEQ ID NO: 97856 - DNA, 25 bp, Artificial
  probe
  misc_feature (1)..(25): SEQ ID NO: 6850; WAN024BX5_at; Start 32; Stop 56
ataatgctagaaaatcaaactgttc

SEQ ID NO: 97857 - DNA, 25 bp, Artificial
  probe
  misc_feature (1)..(25): SEQ ID NO: 6850; WAN024BX5_at; Start 3; Stop 27
ggattctatcaacaattctaatagt

SEQ ID NO: 97858 - DNA, 25 bp, Artificial
  probe
  misc_feature (1)..(25): SEQ ID NO: 6850; WAN024BX5_at; Start 48; Stop 72
aaactgttcattttcaaaggaagat

SEQ ID NO: 97859 - DNA, 25 bp, Artificial
  probe
  misc_feature (1)..(25): SEQ ID NO: 6850; WAN024BX5_at; Start 49; Stop 73
aactgttcattttcaaaggaagatt

SEQ ID NO: 97860 - DNA, 25 bp, Artificial
  probe
  misc_feature (1)..(25): SEQ ID NO: 6850; WAN024BX5_at; Start 11; Stop 35
tcaacaattctaatagtaatgataa

SEQ ID NO: 97861 - DNA, 25 bp, Artificial
  probe
  misc_feature (1)..(25): SEQ ID NO: 6850; WAN024BX5_at; Start 14; Stop 38
acaattctaatagtaatgataatgc

SEQ ID NO: 97862 - DNA, 25 bp, Artificial
  probe
  misc_feature (1)..(25): SEQ ID NO: 6850; WAN024BX5_at; Start 52; Stop 76
tgttcattttcaaaggaagattatt

SEQ ID NO: 97863 - DNA, 25 bp, Artificial
  probe
  misc_feature (1)..(25): SEQ ID NO: 6850; WAN024BX5_at; Start 31; Stop 55
gataatgctagaaaatcaaactgtt

SEQ ID NO: 97864 - DNA, 25 bp, Artificial
  probe
  misc_feature (1)..(25): SEQ ID NO: 6850; WAN024BX5_at; Start 50; Stop 74
actgttcattttcaaaggaagatta

SEQ ID NO: 97865 - DNA, 25 bp, Artificial
  probe
  misc_feature (1)..(25): SEQ ID NO: 6850; WAN024BX5_at; Start 21; Stop 45
taatagtaatgataatgctagaaaa

SEQ ID NO: 97866 - DNA, 25 bp, Artificial
  probe
  misc_feature (1)..(25): SEQ ID NO: 6850; WAN024BX5_at; Start 33; Stop 57
taatgctagaaaatcaaactgttca

SEQ ID NO: 97867 - DNA, 25 bp, Artificial
  probe
  misc_feature (1)..(25): SEQ ID NO: 6850; WAN024BX5_at; Start 46; Stop 70
tcaaactgttcattttcaaaggaag

SEQ ID NO: 97868 - DNA, 25 bp, Artificial
  probe
  misc_feature (1)..(25): SEQ ID NO: 6850; WAN024BX5_at; Start 2; Stop 26
tggattctatcaacaattctaatag

SEQ ID NO: 97869 - DNA, 25 bp, Artificial
  probe
  misc_feature (1)..(25): SEQ ID NO: 6850; WAN024BX5_at; Start 28; Stop 52
aatgataatgctagaaaatcaaact

SEQ ID NO: 97870 - DNA, 25 bp, Artificial
  probe
  misc_feature (1)..(25): SEQ ID NO: 6850; WAN024BX5_at; Start 24; Stop 48
tagtaatgataatgctagaaaatca

SEQ ID NO: 97871 - DNA, 25 bp, Artificial
  probe
  misc_feature (1)..(25): SEQ ID NO: 6538; WAN024BX6_at; Start 490; Stop 514
ccagtgatgaactcatacggtaagc

SEQ ID NO: 97872 - DNA, 25 bp, Artificial
  probe
  misc_feature (1)..(25): SEQ ID NO: 6538; WAN024BX6_at; Start 361; Stop 385
tgggctaaggtgtaccgcaaagacc

SEQ ID NO: 97873 - DNA, 25 bp, Artificial
  probe
  misc_feature (1)..(25): SEQ ID NO: 6538; WAN024BX6_at; Start 196; Stop 220
actcagccagcccagatagtcactg

SEQ ID NO: 97874 - DNA, 25 bp, Artificial
  probe
  misc_feature (1)..(25): SEQ ID NO: 6538; WAN024BX6_at; Start 654; Stop 678
taaagacgtcacacctcaagagagc

SEQ ID NO: 97875 - DNA, 25 bp, Artificial
  probe
  misc_feature (1)..(25): SEQ ID NO: 6538; WAN024BX6_at; Start 427; Stop 451
gacaattctaaaatacgtgcaagag

SEQ ID NO: 97876 - DNA, 25 bp, Artificial
  probe
  misc_feature (1)..(25): SEQ ID NO: 6538; WAN024BX6_at; Start 325; Stop 349
gcatttattcctaaaggtgctgaaa

SEQ ID NO: 97877 - DNA, 25 bp, Artificial
  probe
  misc_feature (1)..(25): SEQ ID NO: 6538; WAN024BX6_at; Start 274; Stop 298
gaggcaggcgtaatctatctgatgg

SEQ ID NO: 97878 - DNA, 25 bp, Artificial
  probe
  misc_feature (1)..(25): SEQ ID NO: 6538; WAN024BX6_at; Start 557; Stop 581
tacgaaaagtagctctagtgtcagc

SEQ ID NO: 97879 - DNA, 25 bp, Artificial
  probe
  misc_feature (1)..(25): SEQ ID NO: 6538; WAN024BX6_at; Start 619; Stop 643
tatgaggctgacgaaattcagctgg

SEQ ID NO: 97880 - DNA, 25 bp, Artificial
  probe
  misc_feature (1)..(25): SEQ ID NO: 6538; WAN024BX6_at; Start 503; Stop 527
catacggtaagccaataggtgagaa

SEQ ID NO: 97881 - DNA, 25 bp, Artificial
  probe
  misc_feature (1)..(25): SEQ ID NO: 6538; WAN024BX6_at; Start 183; Stop 207
tatcaagtatggaactcagccagcc

SEQ ID NO: 97882 - DNA, 25 bp, Artificial
  probe
  misc_feature (1)..(25): SEQ ID NO: 6538; WAN024BX6_at; Start 410; Stop 434
tatcttttgaggagtacgacaattc

SEQ ID NO: 97883 - DNA, 25 bp, Artificial
  probe
  misc_feature (1)..(25): SEQ ID NO: 6538; WAN024BX6_at; Start 539; Stop 563
ctatgccttgtgtcatgatacgaaa

SEQ ID NO: 97884 - DNA, 25 bp, Artificial
  probe
  misc_feature (1)..(25): SEQ ID NO: 6538; WAN024BX6_at; Start 607; Stop 631
cttggagcaagctatgaggctgacg

SEQ ID NO: 97885 - DNA, 25 bp, Artificial
  probe
  misc_feature (1)..(25): SEQ ID NO: 6538; WAN024BX6_at; Start 247; Stop 271
gatagtcacccgcaatttgatggca

SEQ ID NO: 97886 - DNA, 25 bp, Artificial
  probe
  misc_feature (1)..(25): SEQ ID NO: 6538; WAN024BX6_at; Start 592; Stop 616
gcgtttcctgccgagcttggagcaa

SEQ ID NO: 97887 - DNA, 25 bp, Artificial
  probe
  misc_feature (1)..(25): SEQ ID NO: 6538; WAN024BX6_at; Start 74; Stop 98
tcagaaagtatcttgacccacaagg

SEQ ID NO: 97888 - DNA, 25 bp, Artificial
  probe
  misc_feature (1)..(25): SEQ ID NO: 6538; WAN024BX6_at; Start 394; Stop 418
ccaacggaaacagaagtatcttttg

SEQ ID NO: 97889 - DNA, 25 bp, Artificial
  probe
  misc_feature (1)..(25): SEQ ID NO: 6538; WAN024BX6_at; Start 440; Stop 464
tacgtgcaagagttaaggaactgac

SEQ ID NO: 97890 - DNA, 25 bp, Artificial
  probe
  misc_feature (1)..(25): SEQ ID NO: 6538; WAN024BX6_at; Start 457; Stop 481
gaactgacacaacaaggtaaagatg

SEQ ID NO: 97891 - DNA, 25 bp, Artificial
  probe
  misc_feature (1)..(25): SEQ ID NO: 6538; WAN024BX6_at; Start 124; Stop 148
tattttatagctcaagccaaagccc

SEQ ID NO: 97892 - DNA, 25 bp, Artificial
  probe
  misc_feature (1)..(25): SEQ ID NO: 6538; WAN024BX6_at; Start 13; Stop 37
caaattgtagaagcaaaaggcgact

SEQ ID NO: 97893 - DNA, 25 bp, Artificial
  probe
  misc_feature (1)..(25): SEQ ID NO: 6538; WAN024BX6_at; Start 212; Stop 236
tagtcactgccaaatcagcttttga

SEQ ID NO: 97894 - DNA, 25 bp, Artificial
  probe
  misc_feature (1)..(25): SEQ ID NO: 6538; WAN024BX6_at; Start 342; Stop 366
tgctgaaattcttggcggttgggct

SEQ ID NO: 97895 - DNA, 25 bp, Artificial
  probe
  misc_feature (1)..(25): SEQ ID NO: 6538; WAN024BX6_at; Start 572; Stop 596
tagtgtcagcttaccgtgaggcgtt

SEQ ID NO: 97896 - DNA, 25 bp, Artificial
  probe
  misc_feature (1)..(25): SEQ ID NO: 6538; WAN024BX6_at; Start 88; Stop 112
gacccacaaggaaaagctagtgatg

SEQ ID NO: 97897 - DNA, 25 bp, Artificial
  probe
  misc_feature (1)..(25): SEQ ID NO: 6538; WAN024BX6_at; Start 103; Stop 127
gctagtgatgaggagcttgcctatt

SEQ ID NO: 97898 - DNA, 25 bp, Artificial
  probe
  misc_feature (1)..(25): SEQ ID NO: 6538; WAN024BX6_at; Start 235; Stop 259
gaaaagaaagcagatagtcacccgc

SEQ ID NO: 97899 - DNA, 25 bp, Artificial
  probe
  misc_feature (1)..(25): SEQ ID NO: 6538; WAN024BX6_at; Start 44; Stop 68
ccaacccacagctacttaatagcgg

SEQ ID NO: 97900 - DNA, 25 bp, Artificial
  probe
  misc_feature (1)..(25): SEQ ID NO: 6538; WAN024BX6_at; Start 291; Stop 315
tctgatggatggtgaaattaaatac

SEQ ID NO: 97901 - DNA, 25 bp, Artificial
  probe
  misc_feature (1)..(25): SEQ ID NO: 6538; WAN024BX6_at; Start 259; Stop 283
caatttgatggcaaagaggcaggcg

SEQ ID NO: 97902 - DNA, 25 bp, Artificial
  probe
  misc_feature (1)..(25): SEQ ID NO: 6538; WAN024BX6_at; Start 474; Stop 498
taaagatgttacttatccagtgatg

SEQ ID NO: 97903 - DNA, 25 bp, Artificial
  probe
  misc_feature (1)..(25): SEQ ID NO: 6538; WAN024BX6_at; Start 639; Stop 663
gctggataacacacctaaagacgtc

SEQ ID NO: 97904 - DNA, 25 bp, Artificial
  probe
  misc_feature (1)..(25): SEQ ID NO: 6538; WAN024BX6_at; Start 523; Stop 547
gagaataactgggatactatgcctt

SEQ ID NO: 97905 - DNA, 25 bp, Artificial
  probe
  misc_feature (1)..(25): SEQ ID NO: 7422; WAN024BX7_at; Start 103; Stop 127
tctggaactaggaaaggtgtatgct

SEQ ID NO: 97906 - DNA, 25 bp, Artificial
  probe
  misc_feature (1)..(25): SEQ ID NO: 7422; WAN024BX7_at; Start 105; Stop 129
tggaactaggaaaggtgtatgctca

SEQ ID NO: 97907 - DNA, 25 bp, Artificial
  probe
  misc_feature (1)..(25): SEQ ID NO: 7422; WAN024BX7_at; Start 2; Stop 26
tgaacttgaaaacccgtgtatggct

SEQ ID NO: 97908 - DNA, 25 bp, Artificial
  probe
  misc_feature (1)..(25): SEQ ID NO: 7422; WAN024BX7_at; Start 30; Stop 54
ggctaatcatgaagaaaaaaaacga

SEQ ID NO: 97909 - DNA, 25 bp, Artificial
  probe
  misc_feature (1)..(25): SEQ ID NO: 7422; WAN024BX7_at; Start 87; Stop 111
gatatgtgaagcgagttctggaact

SEQ ID NO: 97910 - DNA, 25 bp, Artificial
  probe
  misc_feature (1)..(25): SEQ ID NO: 7422; WAN024BX7_at; Start 8; Stop 32
tgaaaacccgtgtatggcttttggc

SEQ ID NO: 97911 - DNA, 25 bp, Artificial
  probe
  misc_feature (1)..(25): SEQ ID NO: 7422; WAN024BX7_at; Start 52; Stop 76
cgaattgctggatcttgggctaacg

SEQ ID NO: 97912 - DNA, 25 bp, Artificial
  probe
  misc_feature (1)..(25): SEQ ID NO: 7422; WAN024BX7_at; Start 126; Stop 150
ctcatgtttgattacgacagagaca

SEQ ID NO: 97913 - DNA, 25 bp, Artificial
  probe
  misc_feature (1)..(25): SEQ ID NO: 7422; WAN024BX7_at; Start 54; Stop 78
aattgctggatcttgggctaacgtc

SEQ ID NO: 97914 - DNA, 25 bp, Artificial
  probe
  misc_feature (1)..(25): SEQ ID NO: 7422; WAN024BX7_at; Start 56; Stop 80
ttgctggatcttgggctaacgtcaa

SEQ ID NO: 97915 - DNA, 25 bp, Artificial
  probe
  misc_feature (1)..(25): SEQ ID NO: 7422; WAN024BX7_at; Start 107; Stop 131
gaactaggaaaggtgtatgctcatg

SEQ ID NO: 97916 - DNA, 25 bp, Artificial
  probe
  misc_feature (1)..(25): SEQ ID NO: 7422; WAN024BX7_at; Start 75; Stop 99
cgtcaaagaccagatatgtgaagcg

SEQ ID NO: 97917 - DNA, 25 bp, Artificial
  probe
  misc_feature (1)..(25): SEQ ID NO: 7422; WAN024BX7_at; Start 91; Stop 115
tgtgaagcgagttctggaactagga

SEQ ID NO: 97918 - DNA, 25 bp, Artificial
  probe
  misc_feature (1)..(25): SEQ ID NO: 7422; WAN024BX7_at; Start 70; Stop 94
gctaacgtcaaagaccagatatgtg

SEQ ID NO: 97919 - DNA, 25 bp, Artificial
  probe
  misc_feature (1)..(25): SEQ ID NO: 7422; WAN024BX7_at; Start 14; Stop 38
cccgtgtatggcttttggctaatca

SEQ ID NO: 97920 - DNA, 25 bp, Artificial
  probe
  misc_feature (1)..(25): SEQ ID NO: 7422; WAN024BX7_at; Start 46; Stop 70
aaaaaacgaattgctggatcttggg

SEQ ID NO: 97921 - DNA, 25 bp, Artificial
  probe
  misc_feature (1)..(25): SEQ ID NO: 7422; WAN024BX7_at; Start 110; Stop 134
ctaggaaaggtgtatgctcatgttt

SEQ ID NO: 97922 - DNA, 25 bp, Artificial
  probe
  misc_feature (1)..(25): SEQ ID NO: 7422; WAN024BX7_at; Start 64; Stop 88
tcttgggctaacgtcaaagaccaga

SEQ ID NO: 97923 - DNA, 25 bp, Artificial
  probe
  misc_feature (1)..(25): SEQ ID NO: 7422; WAN024BX7_at; Start 120; Stop 144
tgtatgctcatgtttgattacgaca

SEQ ID NO: 97924 - DNA, 25 bp, Artificial
  probe
  misc_feature (1)..(25): SEQ ID NO: 7422; WAN024BX7_at; Start 99; Stop 123
gagttctggaactaggaaaggtgta

SEQ ID NO: 97925 - DNA, 25 bp, Artificial
  probe
  misc_feature (1)..(25): SEQ ID NO: 7422; WAN024BX7_at; Start 48; Stop 72
aaaacgaattgctggatcttgggct

SEQ ID NO: 97926 - DNA, 25 bp, Artificial
  probe
  misc_feature (1)..(25): SEQ ID NO: 7422; WAN024BX7_at; Start 78; Stop 102
caaagaccagatatgtgaagcgagt

SEQ ID NO: 97927 - DNA, 25 bp, Artificial
  probe
  misc_feature (1)..(25): SEQ ID NO: 7422; WAN024BX7_at; Start 67; Stop 91
tgggctaacgtcaaagaccagatat

SEQ ID NO: 97928 - DNA, 25 bp, Artificial
  probe
  misc_feature (1)..(25): SEQ ID NO: 7422; WAN024BX7_at; Start 94; Stop 118
gaagcgagttctggaactaggaaag

SEQ ID NO: 97929 - DNA, 25 bp, Artificial
  probe
  misc_feature (1)..(25): SEQ ID NO: 7422; WAN024BX7_at; Start 62; Stop 86
gatcttgggctaacgtcaaagacca

SEQ ID NO: 97930 - DNA, 25 bp, Artificial
  probe
  misc_feature (1)..(25): SEQ ID NO: 7422; WAN024BX7_at; Start 113; Stop 137
ggaaaggtgtatgctcatgtttgat

SEQ ID NO: 97931 - DNA, 25 bp, Artificial
  probe
  misc_feature (1)..(25): SEQ ID NO: 7422; WAN024BX7_at; Start 122; Stop 146
tatgctcatgtttgattacgacaga

SEQ ID NO: 97932 - DNA, 25 bp, Artificial
  probe
  misc_feature (1)..(25): SEQ ID NO: 7422; WAN024BX7_at; Start 60; Stop 84
tggatcttgggctaacgtcaaagac

SEQ ID NO: 97933 - DNA, 25 bp, Artificial
  probe
  misc_feature (1)..(25): SEQ ID NO: 7422; WAN024BX7_at; Start 80; Stop 104
aagaccagatatgtgaagcgagttc

SEQ ID NO: 97934 - DNA, 25 bp, Artificial
  probe
  misc_feature (1)..(25): SEQ ID NO: 7422; WAN024BX7_at; Start 20; Stop 44
tatggcttttggctaatcatgaaga

SEQ ID NO: 97935 - DNA, 25 bp, Artificial
  probe
  misc_feature (1)..(25): SEQ ID NO: 7422; WAN024BX7_at; Start 24; Stop 48
gcttttggctaatcatgaagaaaaa

SEQ ID NO: 97936 - DNA, 25 bp, Artificial
  probe
  misc_feature (1)..(25): SEQ ID NO: 7422; WAN024BX7_at; Start 82; Stop 106
gaccagatatgtgaagcgagttctg

SEQ ID NO: 97937 - DNA, 25 bp, Artificial
  probe
  misc_feature (1)..(25): SEQ ID NO: 7422; WAN024BX7_at; Start 1; Stop 25
ttgaacttgaaaacccgtgtatggc

SEQ ID NO: 97938 - DNA, 25 bp, Artificial
  probe
  misc_feature (1)..(25): SEQ ID NO: 7422; WAN024BX7_at; Start 50; Stop 74
aacgaattgctggatcttgggctaa

SEQ ID NO: 97939 - DNA, 25 bp, Artificial
  probe
  misc_feature (1)..(25): SEQ ID NO: 7024; WAN024BX8_at; Start 120; Stop 144
taaggcaaaggctcaaacaatgcac

SEQ ID NO: 97940 - DNA, 25 bp, Artificial
  probe
  misc_feature (1)..(25): SEQ ID NO: 7024; WAN024BX8_at; Start 161; Stop 185
tcaaggacgtcctgggcggcaagtc

SEQ ID NO: 97941 - DNA, 25 bp, Artificial
  probe
  misc_feature (1)..(25): SEQ ID NO: 7024; WAN024BX8_at; Start 63; Stop 87
cagccttgcctttctagctctacaa

SEQ ID NO: 97942 - DNA, 25 bp, Artificial
  probe
  misc_feature (1)..(25): SEQ ID NO: 7024; WAN024BX8_at; Start 193; Stop 217
gaagccatgaaacgtctaaatagcg

SEQ ID NO: 97943 - DNA, 25 bp, Artificial
  probe
  misc_feature (1)..(25): SEQ ID NO: 7024; WAN024BX8_at; Start 32; Stop 56
tcaaacaacttcagaaagaaatgca

SEQ ID NO: 97944 - DNA, 25 bp, Artificial
  probe
  misc_feature (1)..(25): SEQ ID NO: 7024; WAN024BX8_at; Start 145; Stop 169
gatgtaagccacatgctcaaggacg

SEQ ID NO: 97945 - DNA, 25 bp, Artificial
  probe
  misc_feature (1)..(25): SEQ ID NO: 7024; WAN024BX8_at; Start 205; Stop 229
cgtctaaatagcgaagtgaaaattg

SEQ ID NO: 97946 - DNA, 25 bp, Artificial
  probe
  misc_feature (1)..(25): SEQ ID NO: 7024; WAN024BX8_at; Start 154; Stop 178
cacatgctcaaggacgtcctgggcg

SEQ ID NO: 97947 - DNA, 25 bp, Artificial
  probe
  misc_feature (1)..(25): SEQ ID NO: 7024; WAN024BX8_at; Start 101; Stop 125
tgccagaaactgaaagaagtaaggc

SEQ ID NO: 97948 - DNA, 25 bp, Artificial
  probe
  misc_feature (1)..(25): SEQ ID NO: 7024; WAN024BX8_at; Start 157; Stop 181
atgctcaaggacgtcctgggcggca

SEQ ID NO: 97949 - DNA, 25 bp, Artificial
  probe
  misc_feature (1)..(25): SEQ ID NO: 7024; WAN024BX8_at; Start 179; Stop 203
gcaagtcggtagatgaagccatgaa

SEQ ID NO: 97950 - DNA, 25 bp, Artificial
  probe
  misc_feature (1)..(25): SEQ ID NO: 7024; WAN024BX8_at; Start 217; Stop 241
gaagtgaaaattgaagatgtggagc

SEQ ID NO: 97951 - DNA, 25 bp, Artificial
  probe
  misc_feature (1)..(25): SEQ ID NO: 7024; WAN024BX8_at; Start 133; Stop 157
caaacaatgcacgatgtaagccaca

SEQ ID NO: 97952 - DNA, 25 bp, Artificial
  probe
  misc_feature (1)..(25): SEQ ID NO: 7024; WAN024BX8_at; Start 198; Stop 222
catgaaacgtctaaatagcgaagtg

SEQ ID NO: 97953 - DNA, 25 bp, Artificial
  probe
  misc_feature (1)..(25): SEQ ID NO: 7024; WAN024BX8_at; Start 125; Stop 149
caaaggctcaaacaatgcacgatgt

SEQ ID NO: 97954 - DNA, 25 bp, Artificial
  probe
  misc_feature (1)..(25): SEQ ID NO: 7024; WAN024BX8_at; Start 2; Stop 26
tgtttaaagcactaaaaacaatcaa

SEQ ID NO: 97955 - DNA, 25 bp, Artificial
  probe
  misc_feature (1)..(25): SEQ ID NO: 7024; WAN024BX8_at; Start 147; Stop 171
tgtaagccacatgctcaaggacgtc

SEQ ID NO: 97956 - DNA, 25 bp, Artificial
  probe
  misc_feature (1)..(25): SEQ ID NO: 7024; WAN024BX8_at; Start 90; Stop 114
tatgggcttgatgccagaaactgaa

SEQ ID NO: 97957 - DNA, 25 bp, Artificial
  probe
  misc_feature (1)..(25): SEQ ID NO: 7024; WAN024BX8_at; Start 109; Stop 133
actgaaagaagtaaggcaaaggctc

SEQ ID NO: 97958 - DNA, 25 bp, Artificial
  probe
  misc_feature (1)..(25): SEQ ID NO: 7024; WAN024BX8_at; Start 72; Stop 96
ctttctagctctacaagatatgggc

SEQ ID NO: 97959 - DNA, 25 bp, Artificial
  probe
  misc_feature (1)..(25): SEQ ID NO: 7024; WAN024BX8_at; Start 55; Stop 79
cacgctttcagccttgcctttctag

SEQ ID NO: 97960 - DNA, 25 bp, Artificial
  probe
  misc_feature (1)..(25): SEQ ID NO: 7024; WAN024BX8_at; Start 137; Stop 161
caatgcacgatgtaagccacatgct

SEQ ID NO: 97961 - DNA, 25 bp, Artificial
  probe
  misc_feature (1)..(25): SEQ ID NO: 7024; WAN024BX8_at; Start 37; Stop 61
caacttcagaaagaaatgcacgctt

SEQ ID NO: 97962 - DNA, 25 bp, Artificial
  probe
  misc_feature (1)..(25): SEQ ID NO: 7024; WAN024BX8_at; Start 75; Stop 99
tctagctctacaagatatgggcttg

SEQ ID NO: 97963 - DNA, 25 bp, Artificial
  probe
  misc_feature (1)..(25): SEQ ID NO: 7024; WAN024BX8_at; Start 176; Stop 200
gcggcaagtcggtagatgaagccat

SEQ ID NO: 97964 - DNA, 25 bp, Artificial
  probe
  misc_feature (1)..(25): SEQ ID NO: 7024; WAN024BX8_at; Start 116; Stop 140
gaagtaaggcaaaggctcaaacaat

SEQ ID NO: 97965 - DNA, 25 bp, Artificial
  probe
  misc_feature (1)..(25): SEQ ID NO: 7024; WAN024BX8_at; Start 42; Stop 66
tcagaaagaaatgcacgctttcagc

SEQ ID NO: 97966 - DNA, 25 bp, Artificial
  probe
  misc_feature (1)..(25): SEQ ID NO: 7024; WAN024BX8_at; Start 150; Stop 174
aagccacatgctcaaggacgtcctg

SEQ ID NO: 97967 - DNA, 25 bp, Artificial
  probe
  misc_feature (1)..(25): SEQ ID NO: 7024; WAN024BX8_at; Start 224; Stop 248
aaattgaagatgtggagcaggaaga

SEQ ID NO: 97968 - DNA, 25 bp, Artificial
  probe
  misc_feature (1)..(25): SEQ ID NO: 7024; WAN024BX8_at; Start 81; Stop 105
tctacaagatatgggcttgatgcca

SEQ ID NO: 97969 - DNA, 25 bp, Artificial
  probe
  misc_feature (1)..(25): SEQ ID NO: 7024; WAN024BX8_at; Start 85; Stop 109
caagatatgggcttgatgccagaaa

SEQ ID NO: 97970 - DNA, 25 bp, Artificial
  probe
  misc_feature (1)..(25): SEQ ID NO: 7024; WAN024BX8_at; Start 49; Stop 73
gaaatgcacgctttcagccttgcct

SEQ ID NO: 97971 - DNA, 25 bp, Artificial
  probe
  misc_feature (1)..(25): SEQ ID NO: 7024; WAN024BX8_at; Start 95; Stop 119
gcttgatgccagaaactgaaagaag

SEQ ID NO: 97972 - DNA, 25 bp, Artificial
  probe
  misc_feature (1)..(25): SEQ ID NO: 7024; WAN024BX8_at; Start 184; Stop 208
tcggtagatgaagccatgaaacgtc

SEQ ID NO: 97973 - DNA, 25 bp, Artificial
  probe
  misc_feature (1)..(25): SEQ ID NO: 6415; WAN024BX9_at; Start 20; Stop 44
taaaactcagacttgaagtagttct

SEQ ID NO: 97974 - DNA, 25 bp, Artificial
  probe
  misc_feature (1)..(25): SEQ ID NO: 6415; WAN024BX9_at; Start 27; Stop 51
cagacttgaagtagttcttaaagca

SEQ ID NO: 97975 - DNA, 25 bp, Artificial
  probe
  misc_feature (1)..(25): SEQ ID NO: 6415; WAN024BX9_at; Start 133; Stop 157
caagaaaattatgacttgaagcaac

SEQ ID NO: 97976 - DNA, 25 bp, Artificial
  probe
  misc_feature (1)..(25): SEQ ID NO: 6415; WAN024BX9_at; Start 157; Stop 181
caattggcaatctacaaagaaaaag

SEQ ID NO: 97977 - DNA, 25 bp, Artificial
  probe
  misc_feature (1)..(25): SEQ ID NO: 6415; WAN024BX9_at; Start 118; Stop 142
cgctttgctttcgagcaagaaaatt

SEQ ID NO: 97978 - DNA, 25 bp, Artificial
  probe
  misc_feature (1)..(25): SEQ ID NO: 6415; WAN024BX9_at; Start 34; Stop 58
gaagtagttcttaaagcagtcaacc

SEQ ID NO: 97979 - DNA, 25 bp, Artificial
  probe
  misc_feature (1)..(25): SEQ ID NO: 6415; WAN024BX9_at; Start 70; Stop 94
gaggtagcggtcgaactcatgaccg

SEQ ID NO: 97980 - DNA, 25 bp, Artificial
  probe
  misc_feature (1)..(25): SEQ ID NO: 6415; WAN024BX9_at; Start 111; Stop 135
caagcgtcgctttgctttcgagcaa

SEQ ID NO: 97981 - DNA, 25 bp, Artificial
  probe
  misc_feature (1)..(25): SEQ ID NO: 6415; WAN024BX9_at; Start 94; Stop 118
gacctatttgaggagcgcaagcgtc

SEQ ID NO: 97982 - DNA, 25 bp, Artificial
  probe
  misc_feature (1)..(25): SEQ ID NO: 6415; WAN024BX9_at; Start 44; Stop 68
ttaaagcagtcaaccttgactggcg

SEQ ID NO: 97983 - DNA, 25 bp, Artificial
  probe
  misc_feature (1)..(25): SEQ ID NO: 6415; WAN024BX9_at; Start 124; Stop 148
gctttcgagcaagaaaattatgact

SEQ ID NO: 97984 - DNA, 25 bp, Artificial
  probe
  misc_feature (1)..(25): SEQ ID NO: 6415; WAN024BX9_at; Start 10; Stop 34
cttaccaagttaaaactcagacttg

SEQ ID NO: 97985 - DNA, 25 bp, Artificial
  probe
  misc_feature (1)..(25): SEQ ID NO: 6415; WAN024BX9_at; Start 53; Stop 77
tcaaccttgactggcgagaggtagc

SEQ ID NO: 97986 - DNA, 25 bp, Artificial
  probe
  misc_feature (1)..(25): SEQ ID NO: 6415; WAN024BX9_at; Start 147; Stop 171
cttgaagcaacaattggcaatctac

SEQ ID NO: 97987 - DNA, 25 bp, Artificial
  probe
  misc_feature (1)..(25): SEQ ID NO: 6415; WAN024BX9_at; Start 141; Stop 165
ttatgacttgaagcaacaattggca

SEQ ID NO: 97988 - DNA, 25 bp, Artificial
  probe
  misc_feature (1)..(25): SEQ ID NO: 6415; WAN024BX9_at; Start 92; Stop 116
ccgacctatttgaggagcgcaagcg

SEQ ID NO: 97989 - DNA, 25 bp, Artificial
  probe
  misc_feature (1)..(25): SEQ ID NO: 6415; WAN024BX9_at; Start 16; Stop 40
aagttaaaactcagacttgaagtag

SEQ ID NO: 97990 - DNA, 25 bp, Artificial
  probe
  misc_feature (1)..(25): SEQ ID NO: 6415; WAN024BX9_at; Start 82; Stop 106
gaactcatgaccgacctatttgagg

SEQ ID NO: 97991 - DNA, 25 bp, Artificial
  probe
  misc_feature (1)..(25): SEQ ID NO: 6415; WAN024BX9_at; Start 102; Stop 126
tgaggagcgcaagcgtcgctttgct

SEQ ID NO: 97992 - DNA, 25 bp, Artificial
  probe
  misc_feature (1)..(25): SEQ ID NO: 6415; WAN024BX9_at; Start 96; Stop 120
cctatttgaggagcgcaagcgtcgc

SEQ ID NO: 97993 - DNA, 25 bp, Artificial
  probe
  misc_feature (1)..(25): SEQ ID NO: 6415; WAN024BX9_at; Start 74; Stop 98
tagcggtcgaactcatgaccgacct

SEQ ID NO: 97994 - DNA, 25 bp, Artificial
  probe
  misc_feature (1)..(25): SEQ ID NO: 6415; WAN024BX9_at; Start 39; Stop 63
agttcttaaagcagtcaaccttgac

SEQ ID NO: 97995 - DNA, 25 bp, Artificial
  probe
  misc_feature (1)..(25): SEQ ID NO: 6415; WAN024BX9_at; Start 50; Stop 74
cagtcaaccttgactggcgagaggt

SEQ ID NO: 97996 - DNA, 25 bp, Artificial
  probe
  misc_feature (1)..(25): SEQ ID NO: 6415; WAN024BX9_at; Start 167; Stop 191
tctacaaagaaaaagaacaaggaga

SEQ ID NO: 97997 - DNA, 25 bp, Artificial
  probe
  misc_feature (1)..(25): SEQ ID NO: 6415; WAN024BX9_at; Start 114; Stop 138
gcgtcgctttgctttcgagcaagaa

SEQ ID NO: 97998 - DNA, 25 bp, Artificial
  probe
  misc_feature (1)..(25): SEQ ID NO: 6415; WAN024BX9_at; Start 86; Stop 110
tcatgaccgacctatttgaggagcg

SEQ ID NO: 97999 - DNA, 25 bp, Artificial
  probe
  misc_feature (1)..(25): SEQ ID NO: 6415; WAN024BX9_at; Start 100; Stop 124
tttgaggagcgcaagcgtcgctttg

SEQ ID NO: 98000 - DNA, 25 bp, Artificial
  probe
  misc_feature (1)..(25): SEQ ID NO: 6415; WAN024BX9_at; Start 144; Stop 168
tgacttgaagcaacaattggcaatc

SEQ ID NO: 98001 - DNA, 25 bp, Artificial
  probe
  misc_feature (1)..(25): SEQ ID NO: 6415; WAN024BX9_at; Start 90; Stop 114
gaccgacctatttgaggagcgcaag

SEQ ID NO: 98002 - DNA, 25 bp, Artificial
  probe
  misc_feature (1)..(25): SEQ ID NO: 6415; WAN024BX9_at; Start 67; Stop 91
cgagaggtagcggtcgaactcatga

SEQ ID NO: 98003 - DNA, 25 bp, Artificial
  probe
  misc_feature (1)..(25): SEQ ID NO: 6415; WAN024BX9_at; Start 37; Stop 61
gtagttcttaaagcagtcaaccttg

SEQ ID NO: 98004 - DNA, 25 bp, Artificial
  probe
  misc_feature (1)..(25): SEQ ID NO: 6415; WAN024BX9_at; Start 87; Stop 111
catgaccgacctatttgaggagcgc

SEQ ID NO: 98005 - DNA, 25 bp, Artificial
  probe
  misc_feature (1)..(25): SEQ ID NO: 6415; WAN024BX9_at; Start 160; Stop 184
ttggcaatctacaaagaaaaagaac

SEQ ID NO: 98006 - DNA, 25 bp, Artificial
  probe
  misc_feature (1)..(25): SEQ ID NO: 6415; WAN024BX9_at; Start 153; Stop 177
gcaacaattggcaatctacaaagaa

SEQ ID NO: 98007 - DNA, 25 bp, Artificial
  probe
  misc_feature (1)..(25): SEQ ID NO: 6327; WAN024BXA_at; Start 23; Stop 47
gggagccacggattgtaaacatcat

SEQ ID NO: 98008 - DNA, 25 bp, Artificial
  probe
  misc_feature (1)..(25): SEQ ID NO: 6327; WAN024BXA_at; Start 91; Stop 115
cctgctggtcattcgtactatgaca

SEQ ID NO: 98009 - DNA, 25 bp, Artificial
  probe
  misc_feature (1)..(25): SEQ ID NO: 6327; WAN024BXA_at; Start 87; Stop 111
catccctgctggtcattcgtactat

SEQ ID NO: 98010 - DNA, 25 bp, Artificial
  probe
  misc_feature (1)..(25): SEQ ID NO: 6327; WAN024BXA_at; Start 128; Stop 152
tgaacaagcaatctaacgaggaggg

SEQ ID NO: 98011 - DNA, 25 bp, Artificial
  probe
  misc_feature (1)..(25): SEQ ID NO: 6327; WAN024BXA_at; Start 82; Stop 106
tatgtcatccctgctggtcattcgt

SEQ ID NO: 98012 - DNA, 25 bp, Artificial
  probe
  misc_feature (1)..(25): SEQ ID NO: 6327; WAN024BXA_at; Start 67; Stop 91
gatgatttgacaggctatgtcatcc

SEQ ID NO: 98013 - DNA, 25 bp, Artificial
  probe
  misc_feature (1)..(25): SEQ ID NO: 6327; WAN024BXA_at; Start 112; Stop 136
gacattattttaggcatgaacaagc

SEQ ID NO: 98014 - DNA, 25 bp, Artificial
  probe
  misc_feature (1)..(25): SEQ ID NO: 6327; WAN024BXA_at; Start 58; Stop 82
tctcaagttgatgatttgacaggct

SEQ ID NO: 98015 - DNA, 25 bp, Artificial
  probe
  misc_feature (1)..(25): SEQ ID NO: 6327; WAN024BXA_at; Start 130; Stop 154
aacaagcaatctaacgaggagggcg

SEQ ID NO: 98016 - DNA, 25 bp, Artificial
  probe
  misc_feature (1)..(25): SEQ ID NO: 6327; WAN024BXA_at; Start 135; Stop 159
gcaatctaacgaggagggcgtagct

SEQ ID NO: 98017 - DNA, 25 bp, Artificial
  probe
  misc_feature (1)..(25): SEQ ID NO: 6327; WAN024BXA_at; Start 122; Stop 146
taggcatgaacaagcaatctaacga

SEQ ID NO: 98018 - DNA, 25 bp, Artificial
  probe
  misc_feature (1)..(25): SEQ ID NO: 6327; WAN024BXA_at; Start 63; Stop 87
agttgatgatttgacaggctatgtc

SEQ ID NO: 98019 - DNA, 25 bp, Artificial
  probe
  misc_feature (1)..(25): SEQ ID NO: 6327; WAN024BXA_at; Start 70; Stop 94
gatttgacaggctatgtcatccctg

SEQ ID NO: 98020 - DNA, 25 bp, Artificial
  probe
  misc_feature (1)..(25): SEQ ID NO: 6327; WAN024BXA_at; Start 132; Stop 156
caagcaatctaacgaggagggcgta

SEQ ID NO: 98021 - DNA, 25 bp, Artificial
  probe
  misc_feature (1)..(25): SEQ ID NO: 6327; WAN024BXA_at; Start 22; Stop 46
tgggagccacggattgtaaacatca

SEQ ID NO: 98022 - DNA, 25 bp, Artificial
  probe
  misc_feature (1)..(25): SEQ ID NO: 6327; WAN024BXA_at; Start 89; Stop 113
tccctgctggtcattcgtactatga

SEQ ID NO: 98023 - DNA, 25 bp, Artificial
  probe
  misc_feature (1)..(25): SEQ ID NO: 6327; WAN024BXA_at; Start 84; Stop 108
tgtcatccctgctggtcattcgtac

SEQ ID NO: 98024 - DNA, 25 bp, Artificial
  probe
  misc_feature (1)..(25): SEQ ID NO: 6327; WAN024BXA_at; Start 126; Stop 150
catgaacaagcaatctaacgaggag

SEQ ID NO: 98025 - DNA, 25 bp, Artificial
  probe
  misc_feature (1)..(25): SEQ ID NO: 6327; WAN024BXA_at; Start 42; Stop 66
catcatggcagatggttctcaagtt

SEQ ID NO: 98026 - DNA, 25 bp, Artificial
  probe
  misc_feature (1)..(25): SEQ ID NO: 6327; WAN024BXA_at; Start 33; Stop 57
gattgtaaacatcatggcagatggt

SEQ ID NO: 98027 - DNA, 25 bp, Artificial
  probe
  misc_feature (1)..(25): SEQ ID NO: 6327; WAN024BXA_at; Start 36; Stop 60
tgtaaacatcatggcagatggttct

SEQ ID NO: 98028 - DNA, 25 bp, Artificial
  probe
  misc_feature (1)..(25): SEQ ID NO: 6327; WAN024BXA_at; Start 124; Stop 148
ggcatgaacaagcaatctaacgagg

SEQ ID NO: 98029 - DNA, 25 bp, Artificial
  probe
  misc_feature (1)..(25): SEQ ID NO: 6327; WAN024BXA_at; Start 74; Stop 98
tgacaggctatgtcatccctgctgg

SEQ ID NO: 98030 - DNA, 25 bp, Artificial
  probe
  misc_feature (1)..(25): SEQ ID NO: 6327; WAN024BXA_at; Start 61; Stop 85
caagttgatgatttgacaggctatg

SEQ ID NO: 98031 - DNA, 25 bp, Artificial
  probe
  misc_feature (1)..(25): SEQ ID NO: 6327; WAN024BXA_at; Start 104; Stop 128
cgtactatgacattattttaggcat

SEQ ID NO: 98032 - DNA, 25 bp, Artificial
  probe
  misc_feature (1)..(25): SEQ ID NO: 6327; WAN024BXA_at; Start 77; Stop 101
caggctatgtcatccctgctggtca

SEQ ID NO: 98033 - DNA, 25 bp, Artificial
  probe
  misc_feature (1)..(25): SEQ ID NO: 6327; WAN024BXA_at; Start 78; Stop 102
aggctatgtcatccctgctggtcat

SEQ ID NO: 98034 - DNA, 25 bp, Artificial
  probe
  misc_feature (1)..(25): SEQ ID NO: 6327; WAN024BXA_at; Start 29; Stop 53
cacggattgtaaacatcatggcaga

SEQ ID NO: 98035 - DNA, 25 bp, Artificial
  probe
  misc_feature (1)..(25): SEQ ID NO: 6327; WAN024BXA_at; Start 25; Stop 49
gagccacggattgtaaacatcatgg

SEQ ID NO: 98036 - DNA, 25 bp, Artificial
  probe
  misc_feature (1)..(25): SEQ ID NO: 6327; WAN024BXA_at; Start 44; Stop 68
tcatggcagatggttctcaagttga

SEQ ID NO: 98037 - DNA, 25 bp, Artificial
  probe
  misc_feature (1)..(25): SEQ ID NO: 6327; WAN024BXA_at; Start 117; Stop 141
tattttaggcatgaacaagcaatct

SEQ ID NO: 98038 - DNA, 25 bp, Artificial
  probe
  misc_feature (1)..(25): SEQ ID NO: 6327; WAN024BXA_at; Start 94; Stop 118
gctggtcattcgtactatgacatta

SEQ ID NO: 98039 - DNA, 25 bp, Artificial
  probe
  misc_feature (1)..(25): SEQ ID NO: 6327; WAN024BXA_at; Start 48; Stop 72
ggcagatggttctcaagttgatgat

SEQ ID NO: 98040 - DNA, 25 bp, Artificial
  probe
  misc_feature (1)..(25): SEQ ID NO: 6327; WAN024BXA_at; Start 40; Stop 64
aacatcatggcagatggttctcaag

SEQ ID NO: 98041 - DNA, 25 bp, Artificial
  probe
  misc_feature (1)..(25): SEQ ID NO: 6429; WAN024BXB_at; Start 124; Stop 148
tacggatttacagaaggtcaggact

SEQ ID NO: 98042 - DNA, 25 bp, Artificial
  probe
  misc_feature (1)..(25): SEQ ID NO: 6429; WAN024BXB_at; Start 323; Stop 347
gagcattgctcatggctgatcagaa

SEQ ID NO: 98043 - DNA, 25 bp, Artificial
  probe
  misc_feature (1)..(25): SEQ ID NO: 6429; WAN024BXB_at; Start 565; Stop 589
cgtagcatggacttgaaactctttg

SEQ ID NO: 98044 - DNA, 25 bp, Artificial
  probe
  misc_feature (1)..(25): SEQ ID NO: 6429; WAN024BXB_at; Start 141; Stop 165
tcaggactttctcccaaatttggga

SEQ ID NO: 98045 - DNA, 25 bp, Artificial
  probe
  misc_feature (1)..(25): SEQ ID NO: 6429; WAN024BXB_at; Start 3; Stop 27
gaacgaactcatcaacgtaaccctg

SEQ ID NO: 98046 - DNA, 25 bp, Artificial
  probe
  misc_feature (1)..(25): SEQ ID NO: 6429; WAN024BXB_at; Start 98; Stop 122
caacatggtttgaccgtatgaagga

SEQ ID NO: 98047 - DNA, 25 bp, Artificial
  probe
  misc_feature (1)..(25): SEQ ID NO: 6429; WAN024BXB_at; Start 387; Stop 411
taaggtgctatttgcagacgcagta

SEQ ID NO: 98048 - DNA, 25 bp, Artificial
  probe
  misc_feature (1)..(25): SEQ ID NO: 6429; WAN024BXB_at; Start 534; Stop 558
caaaggctcagattggaacgtgcca

SEQ ID NO: 98049 - DNA, 25 bp, Artificial
  probe
  misc_feature (1)..(25): SEQ ID NO: 6429; WAN024BXB_at; Start 690; Stop 714
ccttaatcaggaatacttgacagga

SEQ ID NO: 98050 - DNA, 25 bp, Artificial
  probe
  misc_feature (1)..(25): SEQ ID NO: 6429; WAN024BXB_at; Start 179; Stop 203
ggcgacaagctactgaccacatcat

SEQ ID NO: 98051 - DNA, 25 bp, Artificial
  probe
  misc_feature (1)..(25): SEQ ID NO: 6429; WAN024BXB_at; Start 286; Stop 310
gaaaaagactttaatagccctgaga

SEQ ID NO: 98052 - DNA, 25 bp, Artificial
  probe
  misc_feature (1)..(25): SEQ ID NO: 6429; WAN024BXB_at; Start 303; Stop 327
ccctgagaaaatcatggcaagagca

SEQ ID NO: 98053 - DNA, 25 bp, Artificial
  probe
  misc_feature (1)..(25): SEQ ID NO: 6429; WAN024BXB_at; Start 446; Stop 470
ttgccaagctcattagccaaaacgg

SEQ ID NO: 98054 - DNA, 25 bp, Artificial
  probe
  misc_feature (1)..(25): SEQ ID NO: 6429; WAN024BXB_at; Start 223; Stop 247
gaaattgctatgatccagcggacgg

SEQ ID NO: 98055 - DNA, 25 bp, Artificial
  probe
  misc_feature (1)..(25): SEQ ID NO: 6429; WAN024BXB_at; Start 461; Stop 485
gccaaaacggctacaaaatcggtgc

SEQ ID NO: 98056 - DNA, 25 bp, Artificial
  probe
  misc_feature (1)..(25): SEQ ID NO: 6429; WAN024BXB_at; Start 359; Stop 383
tagaggctcagattgaggctgaccg

SEQ ID NO: 98057 - DNA, 25 bp, Artificial
  probe
  misc_feature (1)..(25): SEQ ID NO: 6429; WAN024BXB_at; Start 342; Stop 366
tcagaaagtccacaagctagaggct

SEQ ID NO: 98058 - DNA, 25 bp, Artificial
  probe
  misc_feature (1)..(25): SEQ ID NO: 6429; WAN024BXB_at; Start 550; Stop 574
aacgtgccaacccaacgtagcatgg

SEQ ID NO: 98059 - DNA, 25 bp, Artificial
  probe
  misc_feature (1)..(25): SEQ ID NO: 6429; WAN024BXB_at; Start 593; Stop 617
tcatggaaacaaacgtgcaacacgc

SEQ ID NO: 98060 - DNA, 25 bp, Artificial
  probe
  misc_feature (1)..(25): SEQ ID NO: 6429; WAN024BXB_at; Start 499; Stop 523
tcttggatgcgcgaaaatggctacc

SEQ ID NO: 98061 - DNA, 25 bp, Artificial
  probe
  misc_feature (1)..(25): SEQ ID NO: 6429; WAN024BXB_at; Start 373; Stop 397
gaggctgaccgtcctaaggtgctat

SEQ ID NO: 98062 - DNA, 25 bp, Artificial
  probe
  misc_feature (1)..(25): SEQ ID NO: 6429; WAN024BXB_at; Start 56; Stop 80
gaagacaactacatgaggcgctggg

SEQ ID NO: 98063 - DNA, 25 bp, Artificial
  probe
  misc_feature (1)..(25): SEQ ID NO: 6429; WAN024BXB_at; Start 164; Stop 188
gaaaaagtacaggagggcgacaagc

SEQ ID NO: 98064 - DNA, 25 bp, Artificial
  probe
  misc_feature (1)..(25): SEQ ID NO: 6429; WAN024BXB_at; Start 653; Stop 677
tcacaggcaaaggacaacagtattt

SEQ ID NO: 98065 - DNA, 25 bp, Artificial
  probe
  misc_feature (1)..(25): SEQ ID NO: 6429; WAN024BXB_at; Start 516; Stop 540
tggctacctgattaagcgcaaaggc

SEQ ID NO: 98066 - DNA, 25 bp, Artificial
  probe
  misc_feature (1)..(25): SEQ ID NO: 6429; WAN024BXB_at; Start 635; Stop 659
tgaacaagacaccaaaggtcacagg

SEQ ID NO: 98067 - DNA, 25 bp, Artificial
  probe
  misc_feature (1)..(25): SEQ ID NO: 6429; WAN024BXB_at; Start 74; Stop 98
cgctgggtgttaattcaagatatac

SEQ ID NO: 98068 - DNA, 25 bp, Artificial
  probe
  misc_feature (1)..(25): SEQ ID NO: 6429; WAN024BXB_at; Start 200; Stop 224
tcatcaagctagacatggccaagga

SEQ ID NO: 98069 - DNA, 25 bp, Artificial
  probe
  misc_feature (1)..(25): SEQ ID NO: 6429; WAN024BXB_at; Start 421; Stop 445
catacatctatcttggttggcgaac

SEQ ID NO: 98070 - DNA, 25 bp, Artificial
  probe
  misc_feature (1)..(25): SEQ ID NO: 6429; WAN024BXB_at; Start 609; Stop 633
gcaacacgcagatggacatatcact

SEQ ID NO: 98071 - DNA, 25 bp, Artificial
  probe
  misc_feature (1)..(25): SEQ ID NO: 6429; WAN024BXB_at; Start 33; Stop 57
caatcaggagccagtagtgtcagga

SEQ ID NO: 98072 - DNA, 25 bp, Artificial
  probe
  misc_feature (1)..(25): SEQ ID NO: 6429; WAN024BXB_at; Start 247; Stop 271
gagagaggcaagcaagtccgacaat

SEQ ID NO: 98073 - DNA, 25 bp, Artificial
  probe
  misc_feature (1)..(25): SEQ ID NO: 6429; WAN024BXB_at; Start 472; Stop 496
tacaaaatcggtgccaatcgcctct

SEQ ID NO: 98074 - DNA, 25 bp, Artificial
  probe
  misc_feature (1)..(25): SEQ ID NO: 6429; WAN024BXB_at; Start 403; Stop 427
gacgcagtaagtgcaagccatacat

SEQ ID NO: 98075 - DNA, 25 bp, Artificial
  probe
  misc_feature (1)..(25): SEQ ID NO: 6574; WAN024BXC_at; Start 126; Stop 150
caattttcagatagacttagaagaa

SEQ ID NO: 98076 - DNA, 25 bp, Artificial
  probe
  misc_feature (1)..(25): SEQ ID NO: 6574; WAN024BXC_at; Start 42; Stop 66
cacctttgtaaaggccgaccctgag

SEQ ID NO: 98077 - DNA, 25 bp, Artificial
  probe
  misc_feature (1)..(25): SEQ ID NO: 6574; WAN024BXC_at; Start 13; Stop 37
cgatatccgtatagtgggaaaaaag

SEQ ID NO: 98078 - DNA, 25 bp, Artificial
  probe
  misc_feature (1)..(25): SEQ ID NO: 6574; WAN024BXC_at; Start 117; Stop 141
aaagcctatcaattttcagatagac

SEQ ID NO: 98079 - DNA, 25 bp, Artificial
  probe
  misc_feature (1)..(25): SEQ ID NO: 6574; WAN024BXC_at; Start 133; Stop 157
cagatagacttagaagaatttaagc

SEQ ID NO: 98080 - DNA, 25 bp, Artificial
  probe
  misc_feature (1)..(25): SEQ ID NO: 6574; WAN024BXC_at; Start 164; Stop 188
gctatgaagccattcatgatacttc

SEQ ID NO: 98081 - DNA, 25 bp, Artificial
  probe
  misc_feature (1)..(25): SEQ ID NO: 6574; WAN024BXC_at; Start 156; Stop 180
gcgtcttagctatgaagccattcat

SEQ ID NO: 98082 - DNA, 25 bp, Artificial
  probe
  misc_feature (1)..(25): SEQ ID NO: 6574; WAN024BXC_at; Start 153; Stop 177
taagcgtcttagctatgaagccatt

SEQ ID NO: 98083 - DNA, 25 bp, Artificial
  probe
  misc_feature (1)..(25): SEQ ID NO: 6574; WAN024BXC_at; Start 169; Stop 193
gaagccattcatgatacttctcaag

SEQ ID NO: 98084 - DNA, 25 bp, Artificial
  probe
  misc_feature (1)..(25): SEQ ID NO: 6574; WAN024BXC_at; Start 152; Stop 176
ttaagcgtcttagctatgaagccat

SEQ ID NO: 98085 - DNA, 25 bp, Artificial
  probe
  misc_feature (1)..(25): SEQ ID NO: 6574; WAN024BXC_at; Start 121; Stop 145
cctatcaattttcagatagacttag

SEQ ID NO: 98086 - DNA, 25 bp, Artificial
  probe
  misc_feature (1)..(25): SEQ ID NO: 6574; WAN024BXC_at; Start 83; Stop 107
taagaaacactagttttcttgagtg

SEQ ID NO: 98087 - DNA, 25 bp, Artificial
  probe
  misc_feature (1)..(25): SEQ ID NO: 6574; WAN024BXC_at; Start 137; Stop 161
tagacttagaagaatttaagcgtct

SEQ ID NO: 98088 - DNA, 25 bp, Artificial
  probe
  misc_feature (1)..(25): SEQ ID NO: 6574; WAN024BXC_at; Start 157; Stop 181
cgtcttagctatgaagccattcatg

SEQ ID NO: 98089 - DNA, 25 bp, Artificial
  probe
  misc_feature (1)..(25): SEQ ID NO: 6574; WAN024BXC_at; Start 9; Stop 33
aagacgatatccgtatagtgggaaa

SEQ ID NO: 98090 - DNA, 25 bp, Artificial
  probe
  misc_feature (1)..(25): SEQ ID NO: 6574; WAN024BXC_at; Start 3; Stop 27
gagaccaagacgatatccgtatagt

SEQ ID NO: 98091 - DNA, 25 bp, Artificial
  probe
  misc_feature (1)..(25): SEQ ID NO: 6574; WAN024BXC_at; Start 143; Stop 167
tagaagaatttaagcgtcttagcta

SEQ ID NO: 98092 - DNA, 25 bp, Artificial
  probe
  misc_feature (1)..(25): SEQ ID NO: 6574; WAN024BXC_at; Start 162; Stop 186
tagctatgaagccattcatgatact

SEQ ID NO: 98093 - DNA, 25 bp, Artificial
  probe
  misc_feature (1)..(25): SEQ ID NO: 6574; WAN024BXC_at; Start 15; Stop 39
atatccgtatagtgggaaaaaagag

SEQ ID NO: 98094 - DNA, 25 bp, Artificial
  probe
  misc_feature (1)..(25): SEQ ID NO: 6574; WAN024BXC_at; Start 177; Stop 201
tcatgatacttctcaagtaactcaa

SEQ ID NO: 98095 - DNA, 25 bp, Artificial
  probe
  misc_feature (1)..(25): SEQ ID NO: 6574; WAN024BXC_at; Start 50; Stop 74
taaaggccgaccctgagttagttga

SEQ ID NO: 98096 - DNA, 25 bp, Artificial
  probe
  misc_feature (1)..(25): SEQ ID NO: 6574; WAN024BXC_at; Start 90; Stop 114
cactagttttcttgagtgtttacaa

SEQ ID NO: 98097 - DNA, 25 bp, Artificial
  probe
  misc_feature (1)..(25): SEQ ID NO: 6574; WAN024BXC_at; Start 7; Stop 31
ccaagacgatatccgtatagtggga

SEQ ID NO: 98098 - DNA, 25 bp, Artificial
  probe
  misc_feature (1)..(25): SEQ ID NO: 6574; WAN024BXC_at; Start 11; Stop 35
gacgatatccgtatagtgggaaaaa

SEQ ID NO: 98099 - DNA, 25 bp, Artificial
  probe
  misc_feature (1)..(25): SEQ ID NO: 6574; WAN024BXC_at; Start 155; Stop 179
agcgtcttagctatgaagccattca

SEQ ID NO: 98100 - DNA, 25 bp, Artificial
  probe
  misc_feature (1)..(25): SEQ ID NO: 6574; WAN024BXC_at; Start 151; Stop 175
tttaagcgtcttagctatgaagcca

SEQ ID NO: 98101 - DNA, 25 bp, Artificial
  probe
  misc_feature (1)..(25): SEQ ID NO: 6574; WAN024BXC_at; Start 5; Stop 29
gaccaagacgatatccgtatagtgg

SEQ ID NO: 98102 - DNA, 25 bp, Artificial
  probe
  misc_feature (1)..(25): SEQ ID NO: 6574; WAN024BXC_at; Start 172; Stop 196
gccattcatgatacttctcaagtaa

SEQ ID NO: 98103 - DNA, 25 bp, Artificial
  probe
  misc_feature (1)..(25): SEQ ID NO: 6574; WAN024BXC_at; Start 2; Stop 26
tgagaccaagacgatatccgtatag

SEQ ID NO: 98104 - DNA, 25 bp, Artificial
  probe
  misc_feature (1)..(25): SEQ ID NO: 6574; WAN024BXC_at; Start 166; Stop 190
tatgaagccattcatgatacttctc

SEQ ID NO: 98105 - DNA, 25 bp, Artificial
  probe
  misc_feature (1)..(25): SEQ ID NO: 6574; WAN024BXC_at; Start 148; Stop 172
gaatttaagcgtcttagctatgaag

SEQ ID NO: 98106 - DNA, 25 bp, Artificial
  probe
  misc_feature (1)..(25): SEQ ID NO: 6574; WAN024BXC_at; Start 141; Stop 165
cttagaagaatttaagcgtcttagc

SEQ ID NO: 98107 - DNA, 25 bp, Artificial
  probe
  misc_feature (1)..(25): SEQ ID NO: 6574; WAN024BXC_at; Start 159; Stop 183
tcttagctatgaagccattcatgat

SEQ ID NO: 98108 - DNA, 25 bp, Artificial
  probe
  misc_feature (1)..(25): SEQ ID NO: 6574; WAN024BXC_at; Start 102; Stop 126
tgagtgtttacaaaaaaagcctatc

SEQ ID NO: 98109 - DNA, 25 bp, Artificial
  probe
  misc_feature (1)..(25): SEQ ID NO: 7601; WAN024BXD_at; Start 3; Stop 27
ggaaaatattgccatgtgtaaaatt

SEQ ID NO: 98110 - DNA, 25 bp, Artificial
  probe
  misc_feature (1)..(25): SEQ ID NO: 7601; WAN024BXD_at; Start 4; Stop 28
gaaaatattgccatgtgtaaaattg

SEQ ID NO: 98111 - DNA, 25 bp, Artificial
  probe
  misc_feature (1)..(25): SEQ ID NO: 7601; WAN024BXD_at; Start 9; Stop 33
tattgccatgtgtaaaattgccatg

SEQ ID NO: 98112 - DNA, 25 bp, Artificial
  probe
  misc_feature (1)..(25): SEQ ID NO: 7601; WAN024BXD_at; Start 2; Stop 26
tggaaaatattgccatgtgtaaaat

SEQ ID NO: 98113 - DNA, 25 bp, Artificial
  probe
  misc_feature (1)..(25): SEQ ID NO: 7601; WAN024BXD_at; Start 1; Stop 25
ttggaaaatattgccatgtgtaaaa

SEQ ID NO: 98114 - DNA, 25 bp, Artificial
  probe
  misc_feature (1)..(25): SEQ ID NO: 7601; WAN024BXD_at; Start 5; Stop 29
aaaatattgccatgtgtaaaattgc

SEQ ID NO: 98115 - DNA, 25 bp, Artificial
  probe
  misc_feature (1)..(25): SEQ ID NO: 7283; WAN024BXE_at; Start 2; Stop 26
tgcgcctgcttattcctagacgtcg

SEQ ID NO: 98116 - DNA, 25 bp, Artificial
  probe
  misc_feature (1)..(25): SEQ ID NO: 7283; WAN024BXE_at; Start 12; Stop 36
tattcctagacgtcgtgcaatctcg

SEQ ID NO: 98117 - DNA, 25 bp, Artificial
  probe
  misc_feature (1)..(25): SEQ ID NO: 7283; WAN024BXE_at; Start 15; Stop 39
tcctagacgtcgtgcaatctcgtca

SEQ ID NO: 98118 - DNA, 25 bp, Artificial
  probe
  misc_feature (1)..(25): SEQ ID NO: 7283; WAN024BXE_at; Start 6; Stop 30
cctgcttattcctagacgtcgtgca

SEQ ID NO: 98119 - DNA, 25 bp, Artificial
  probe
  misc_feature (1)..(25): SEQ ID NO: 7283; WAN024BXE_at; Start 40; Stop 64
ggatacacaacccaatcagacttat

SEQ ID NO: 98120 - DNA, 25 bp, Artificial
  probe
  misc_feature (1)..(25): SEQ ID NO: 7283; WAN024BXE_at; Start 72; Stop 96
gattactgtaaggatacctatcgtt

SEQ ID NO: 98121 - DNA, 25 bp, Artificial
  probe
  misc_feature (1)..(25): SEQ ID NO: 7283; WAN024BXE_at; Start 35; Stop 59
cgtcaggatacacaacccaatcaga

SEQ ID NO: 98122 - DNA, 25 bp, Artificial
  probe
  misc_feature (1)..(25): SEQ ID NO: 7283; WAN024BXE_at; Start 48; Stop 72
aacccaatcagacttattcatcaag

SEQ ID NO: 98123 - DNA, 25 bp, Artificial
  probe
  misc_feature (1)..(25): SEQ ID NO: 7283; WAN024BXE_at; Start 55; Stop 79
tcagacttattcatcaagattactg

SEQ ID NO: 98124 - DNA, 25 bp, Artificial
  probe
  misc_feature (1)..(25): SEQ ID NO: 7283; WAN024BXE_at; Start 75; Stop 99
tactgtaaggatacctatcgttgtt

SEQ ID NO: 98125 - DNA, 25 bp, Artificial
  probe
  misc_feature (1)..(25): SEQ ID NO: 7283; WAN024BXE_at; Start 34; Stop 58
tcgtcaggatacacaacccaatcag

SEQ ID NO: 98126 - DNA, 25 bp, Artificial
  probe
  misc_feature (1)..(25): SEQ ID NO: 7283; WAN024BXE_at; Start 84; Stop 108
gatacctatcgttgttgcctttaaa

SEQ ID NO: 98127 - DNA, 25 bp, Artificial
  probe
  misc_feature (1)..(25): SEQ ID NO: 7283; WAN024BXE_at; Start 70; Stop 94
aagattactgtaaggatacctatcg

SEQ ID NO: 98128 - DNA, 25 bp, Artificial
  probe
  misc_feature (1)..(25): SEQ ID NO: 7283; WAN024BXE_at; Start 78; Stop 102
tgtaaggatacctatcgttgttgcc

SEQ ID NO: 98129 - DNA, 25 bp, Artificial
  probe
  misc_feature (1)..(25): SEQ ID NO: 7283; WAN024BXE_at; Start 79; Stop 103
gtaaggatacctatcgttgttgcct

SEQ ID NO: 98130 - DNA, 25 bp, Artificial
  probe
  misc_feature (1)..(25): SEQ ID NO: 7283; WAN024BXE_at; Start 4; Stop 28
cgcctgcttattcctagacgtcgtg

SEQ ID NO: 98131 - DNA, 25 bp, Artificial
  probe
  misc_feature (1)..(25): SEQ ID NO: 7283; WAN024BXE_at; Start 58; Stop 82
gacttattcatcaagattactgtaa

SEQ ID NO: 98132 - DNA, 25 bp, Artificial
  probe
  misc_feature (1)..(25): SEQ ID NO: 7283; WAN024BXE_at; Start 1; Stop 25
gtgcgcctgcttattcctagacgtc

SEQ ID NO: 98133 - DNA, 25 bp, Artificial
  probe
  misc_feature (1)..(25): SEQ ID NO: 7283; WAN024BXE_at; Start 62; Stop 86
tattcatcaagattactgtaaggat

SEQ ID NO: 98134 - DNA, 25 bp, Artificial
  probe
  misc_feature (1)..(25): SEQ ID NO: 7283; WAN024BXE_at; Start 38; Stop 62
caggatacacaacccaatcagactt

SEQ ID NO: 98135 - DNA, 25 bp, Artificial
  probe
  misc_feature (1)..(25): SEQ ID NO: 7283; WAN024BXE_at; Start 37; Stop 61
tcaggatacacaacccaatcagact

SEQ ID NO: 98136 - DNA, 25 bp, Artificial
  probe
  misc_feature (1)..(25): SEQ ID NO: 7283; WAN024BXE_at; Start 30; Stop 54
aatctcgtcaggatacacaacccaa

SEQ ID NO: 98137 - DNA, 25 bp, Artificial
  probe
  misc_feature (1)..(25): SEQ ID NO: 7283; WAN024BXE_at; Start 8; Stop 32
tgcttattcctagacgtcgtgcaat

SEQ ID NO: 98138 - DNA, 25 bp, Artificial
  probe
  misc_feature (1)..(25): SEQ ID NO: 7283; WAN024BXE_at; Start 32; Stop 56
tctcgtcaggatacacaacccaatc

SEQ ID NO: 98139 - DNA, 25 bp, Artificial
  probe
  misc_feature (1)..(25): SEQ ID NO: 7283; WAN024BXE_at; Start 83; Stop 107
ggatacctatcgttgttgcctttaa

SEQ ID NO: 98140 - DNA, 25 bp, Artificial
  probe
  misc_feature (1)..(25): SEQ ID NO: 7283; WAN024BXE_at; Start 50; Stop 74
cccaatcagacttattcatcaagat

SEQ ID NO: 98141 - DNA, 25 bp, Artificial
  probe
  misc_feature (1)..(25): SEQ ID NO: 7283; WAN024BXE_at; Start 43; Stop 67
tacacaacccaatcagacttattca

SEQ ID NO: 98142 - DNA, 25 bp, Artificial
  probe
  misc_feature (1)..(25): SEQ ID NO: 7283; WAN024BXE_at; Start 20; Stop 44
gacgtcgtgcaatctcgtcaggata

SEQ ID NO: 98143 - DNA, 25 bp, Artificial
  probe
  misc_feature (1)..(25): SEQ ID NO: 7283; WAN024BXE_at; Start 22; Stop 46
cgtcgtgcaatctcgtcaggataca

SEQ ID NO: 98144 - DNA, 25 bp, Artificial
  probe
  misc_feature (1)..(25): SEQ ID NO: 7283; WAN024BXE_at; Start 25; Stop 49
cgtgcaatctcgtcaggatacacaa

SEQ ID NO: 98145 - DNA, 25 bp, Artificial
  probe
  misc_feature (1)..(25): SEQ ID NO: 7283; WAN024BXE_at; Start 66; Stop 90
catcaagattactgtaaggatacct

SEQ ID NO: 98146 - DNA, 25 bp, Artificial
  probe
  misc_feature (1)..(25): SEQ ID NO: 7283; WAN024BXE_at; Start 27; Stop 51
tgcaatctcgtcaggatacacaacc

SEQ ID NO: 98147 - DNA, 25 bp, Artificial
  probe
  misc_feature (1)..(25): SEQ ID NO: 7283; WAN024BXE_at; Start 9; Stop 33
gcttattcctagacgtcgtgcaatc

SEQ ID NO: 98148 - DNA, 25 bp, Artificial
  probe
  misc_feature (1)..(25): SEQ ID NO: 7283; WAN024BXE_at; Start 18; Stop 42
tagacgtcgtgcaatctcgtcagga

SEQ ID NO: 98149 - DNA, 25 bp, Artificial
  probe
  misc_feature (1)..(25): SEQ ID NO: 6676; WAN024BXF_at; Start 34; Stop 58
aatatgaggtatgcagtatataatc

SEQ ID NO: 98150 - DNA, 25 bp, Artificial
  probe
  misc_feature (1)..(25): SEQ ID NO: 6676; WAN024BXF_at; Start 61; Stop 85
gaatactcatgggaattacacatct

SEQ ID NO: 98151 - DNA, 25 bp, Artificial
  probe
  misc_feature (1)..(25): SEQ ID NO: 6676; WAN024BXF_at; Start 52; Stop 76
tataatcaggaatactcatgggaat

SEQ ID NO: 98152 - DNA, 25 bp, Artificial
  probe
  misc_feature (1)..(25): SEQ ID NO: 6676; WAN024BXF_at; Start 55; Stop 79
aatcaggaatactcatgggaattac

SEQ ID NO: 98153 - DNA, 25 bp, Artificial
  probe
  misc_feature (1)..(25): SEQ ID NO: 6676; WAN024BXF_at; Start 37; Stop 61
atgaggtatgcagtatataatcagg

SEQ ID NO: 98154 - DNA, 25 bp, Artificial
  probe
  misc_feature (1)..(25): SEQ ID NO: 6676; WAN024BXF_at; Start 27; Stop 51
gggattaaatatgaggtatgcagta

SEQ ID NO: 98155 - DNA, 25 bp, Artificial
  probe
  misc_feature (1)..(25): SEQ ID NO: 6676; WAN024BXF_at; Start 46; Stop 70
gcagtatataatcaggaatactcat

SEQ ID NO: 98156 - DNA, 25 bp, Artificial
  probe
  misc_feature (1)..(25): SEQ ID NO: 6676; WAN024BXF_at; Start 64; Stop 88
tactcatgggaattacacatctttg

SEQ ID NO: 98157 - DNA, 25 bp, Artificial
  probe
  misc_feature (1)..(25): SEQ ID NO: 6676; WAN024BXF_at; Start 39; Stop 63
gaggtatgcagtatataatcaggaa

SEQ ID NO: 98158 - DNA, 25 bp, Artificial
  probe
  misc_feature (1)..(25): SEQ ID NO: 6676; WAN024BXF_at; Start 49; Stop 73
gtatataatcaggaatactcatggg

SEQ ID NO: 98159 - DNA, 25 bp, Artificial
  probe
  misc_feature (1)..(25): SEQ ID NO: 6676; WAN024BXF_at; Start 66; Stop 90
ctcatgggaattacacatctttgaa

SEQ ID NO: 98160 - DNA, 25 bp, Artificial
  probe
  misc_feature (1)..(25): SEQ ID NO: 6676; WAN024BXF_at; Start 36; Stop 60
tatgaggtatgcagtatataatcag

SEQ ID NO: 98161 - DNA, 25 bp, Artificial
  probe
  misc_feature (1)..(25): SEQ ID NO: 6676; WAN024BXF_at; Start 48; Stop 72
agtatataatcaggaatactcatgg

SEQ ID NO: 98162 - DNA, 25 bp, Artificial
  probe
  misc_feature (1)..(25): SEQ ID NO: 6676; WAN024BXF_at; Start 54; Stop 78
taatcaggaatactcatgggaatta

SEQ ID NO: 98163 - DNA, 25 bp, Artificial
  probe
  misc_feature (1)..(25): SEQ ID NO: 6676; WAN024BXF_at; Start 56; Stop 80
atcaggaatactcatgggaattaca

SEQ ID NO: 98164 - DNA, 25 bp, Artificial
  probe
  misc_feature (1)..(25): SEQ ID NO: 6676; WAN024BXF_at; Start 50; Stop 74
tatataatcaggaatactcatggga

SEQ ID NO: 98165 - DNA, 25 bp, Artificial
  probe
  misc_feature (1)..(25): SEQ ID NO: 6676; WAN024BXF_at; Start 40; Stop 64
aggtatgcagtatataatcaggaat

SEQ ID NO: 98166 - DNA, 25 bp, Artificial
  probe
  misc_feature (1)..(25): SEQ ID NO: 6676; WAN024BXF_at; Start 53; Stop 77
ataatcaggaatactcatgggaatt

SEQ ID NO: 98167 - DNA, 25 bp, Artificial
  probe
  misc_feature (1)..(25): SEQ ID NO: 6676; WAN024BXF_at; Start 45; Stop 69
tgcagtatataatcaggaatactca

SEQ ID NO: 98168 - DNA, 25 bp, Artificial
  probe
  misc_feature (1)..(25): SEQ ID NO: 6676; WAN024BXF_at; Start 65; Stop 89
actcatgggaattacacatctttga

SEQ ID NO: 98169 - DNA, 25 bp, Artificial
  probe
  misc_feature (1)..(25): SEQ ID NO: 6676; WAN024BXF_at; Start 32; Stop 56
taaatatgaggtatgcagtatataa

SEQ ID NO: 98170 - DNA, 25 bp, Artificial
  probe
  misc_feature (1)..(25): SEQ ID NO: 6676; WAN024BXF_at; Start 57; Stop 81
tcaggaatactcatgggaattacac

SEQ ID NO: 98171 - DNA, 25 bp, Artificial
  probe
  misc_feature (1)..(25): SEQ ID NO: 6676; WAN024BXF_at; Start 63; Stop 87
atactcatgggaattacacatcttt

SEQ ID NO: 98172 - DNA, 25 bp, Artificial
  probe
  misc_feature (1)..(25): SEQ ID NO: 6676; WAN024BXF_at; Start 38; Stop 62
tgaggtatgcagtatataatcagga

SEQ ID NO: 98173 - DNA, 25 bp, Artificial
  probe
  misc_feature (1)..(25): SEQ ID NO: 6676; WAN024BXF_at; Start 51; Stop 75
atataatcaggaatactcatgggaa

SEQ ID NO: 98174 - DNA, 25 bp, Artificial
  probe
  misc_feature (1)..(25): SEQ ID NO: 6676; WAN024BXF_at; Start 28; Stop 52
ggattaaatatgaggtatgcagtat

SEQ ID NO: 98175 - DNA, 25 bp, Artificial
  probe
  misc_feature (1)..(25): SEQ ID NO: 6676; WAN024BXF_at; Start 41; Stop 65
ggtatgcagtatataatcaggaata

SEQ ID NO: 98176 - DNA, 25 bp, Artificial
  probe
  misc_feature (1)..(25): SEQ ID NO: 6676; WAN024BXF_at; Start 42; Stop 66
gtatgcagtatataatcaggaatac

SEQ ID NO: 98177 - DNA, 25 bp, Artificial
  probe
  misc_feature (1)..(25): SEQ ID NO: 6676; WAN024BXF_at; Start 59; Stop 83
aggaatactcatgggaattacacat

SEQ ID NO: 98178 - DNA, 25 bp, Artificial
  probe
  misc_feature (1)..(25): SEQ ID NO: 6676; WAN024BXF_at; Start 29; Stop 53
gattaaatatgaggtatgcagtata

SEQ ID NO: 98179 - DNA, 25 bp, Artificial
  probe
  misc_feature (1)..(25): SEQ ID NO: 6676; WAN024BXF_at; Start 47; Stop 71
cagtatataatcaggaatactcatg

SEQ ID NO: 98180 - DNA, 25 bp, Artificial
  probe
  misc_feature (1)..(25): SEQ ID NO: 6676; WAN024BXF_at; Start 62; Stop 86
aatactcatgggaattacacatctt

SEQ ID NO: 98181 - DNA, 25 bp, Artificial
  probe
  misc_feature (1)..(25): SEQ ID NO: 6676; WAN024BXF_at; Start 58; Stop 82
caggaatactcatgggaattacaca

SEQ ID NO: 98182 - DNA, 25 bp, Artificial
  probe
  misc_feature (1)..(25): SEQ ID NO: 6676; WAN024BXF_at; Start 43; Stop 67
tatgcagtatataatcaggaatact

SEQ ID NO: 98183 - DNA, 25 bp, Artificial
  probe
  misc_feature (1)..(25): SEQ ID NO: 7329; WAN024BXG_at; Start 103; Stop 127
gaacgtgggataacagagcctagtg

SEQ ID NO: 98184 - DNA, 25 bp, Artificial
  probe
  misc_feature (1)..(25): SEQ ID NO: 7329; WAN024BXG_at; Start 126; Stop 150
tgtttcgaaagcatatcaaatcgct

SEQ ID NO: 98185 - DNA, 25 bp, Artificial
  probe
  misc_feature (1)..(25): SEQ ID NO: 7329; WAN024BXG_at; Start 2; Stop 26
tgtcgaaaatgacattaaaaacact

SEQ ID NO: 98186 - DNA, 25 bp, Artificial
  probe
  misc_feature (1)..(25): SEQ ID NO: 7329; WAN024BXG_at; Start 147; Stop 171
cgctagtgttttcgatgtatcagta

SEQ ID NO: 98187 - DNA, 25 bp, Artificial
  probe
  misc_feature (1)..(25): SEQ ID NO: 7329; WAN024BXG_at; Start 35; Stop 59
tcaaaaactggagacaaagtgatgc

SEQ ID NO: 98188 - DNA, 25 bp, Artificial
  probe
  misc_feature (1)..(25): SEQ ID NO: 7329; WAN024BXG_at; Start 137; Stop 161
catatcaaatcgctagtgttttcga

SEQ ID NO: 98189 - DNA, 25 bp, Artificial
  probe
  misc_feature (1)..(25): SEQ ID NO: 7329; WAN024BXG_at; Start 62; Stop 86
cagcagctgtgaatgtatcagttga

SEQ ID NO: 98190 - DNA, 25 bp, Artificial
  probe
  misc_feature (1)..(25): SEQ ID NO: 7329; WAN024BXG_at; Start 113; Stop 137
taacagagcctagtgtttcgaaagc

SEQ ID NO: 98191 - DNA, 25 bp, Artificial
  probe
  misc_feature (1)..(25): SEQ ID NO: 7329; WAN024BXG_at; Start 106; Stop 130
cgtgggataacagagcctagtgttt

SEQ ID NO: 98192 - DNA, 25 bp, Artificial
  probe
  misc_feature (1)..(25): SEQ ID NO: 7329; WAN024BXG_at; Start 116; Stop 140
cagagcctagtgtttcgaaagcata

SEQ ID NO: 98193 - DNA, 25 bp, Artificial
  probe
  misc_feature (1)..(25): SEQ ID NO: 7329; WAN024BXG_at; Start 12; Stop 36
gacattaaaaacactaagaacactc

SEQ ID NO: 98194 - DNA, 25 bp, Artificial
  probe
  misc_feature (1)..(25): SEQ ID NO: 7329; WAN024BXG_at; Start 99; Stop 123
ttgggaacgtgggataacagagcct

SEQ ID NO: 98195 - DNA, 25 bp, Artificial
  probe
  misc_feature (1)..(25): SEQ ID NO: 7329; WAN024BXG_at; Start 54; Stop 78
tgatgcggcagcagctgtgaatgta

SEQ ID NO: 98196 - DNA, 25 bp, Artificial
  probe
  misc_feature (1)..(25): SEQ ID NO: 7329; WAN024BXG_at; Start 132; Stop 156
gaaagcatatcaaatcgctagtgtt

SEQ ID NO: 98197 - DNA, 25 bp, Artificial
  probe
  misc_feature (1)..(25): SEQ ID NO: 7329; WAN024BXG_at; Start 42; Stop 66
ctggagacaaagtgatgcggcagca

SEQ ID NO: 98198 - DNA, 25 bp, Artificial
  probe
  misc_feature (1)..(25): SEQ ID NO: 7329; WAN024BXG_at; Start 29; Stop 53
gaacactcaaaaactggagacaaag

SEQ ID NO: 98199 - DNA, 25 bp, Artificial
  probe
  misc_feature (1)..(25): SEQ ID NO: 7329; WAN024BXG_at; Start 77; Stop 101
tatcagttgatacatgggggcattg

SEQ ID NO: 98200 - DNA, 25 bp, Artificial
  probe
  misc_feature (1)..(25): SEQ ID NO: 7329; WAN024BXG_at; Start 153; Stop 177
tgttttcgatgtatcagtagatgat

SEQ ID NO: 98201 - DNA, 25 bp, Artificial
  probe
  misc_feature (1)..(25): SEQ ID NO: 7329; WAN024BXG_at; Start 108; Stop 132
tgggataacagagcctagtgtttcg

SEQ ID NO: 98202 - DNA, 25 bp, Artificial
  probe
  misc_feature (1)..(25): SEQ ID NO: 7329; WAN024BXG_at; Start 158; Stop 182
tcgatgtatcagtagatgatattat

SEQ ID NO: 98203 - DNA, 25 bp, Artificial
  probe
  misc_feature (1)..(25): SEQ ID NO: 7329; WAN024BXG_at; Start 100; Stop 124
tgggaacgtgggataacagagccta

SEQ ID NO: 98204 - DNA, 25 bp, Artificial
  probe
  misc_feature (1)..(25): SEQ ID NO: 7329; WAN024BXG_at; Start 57; Stop 81
tgcggcagcagctgtgaatgtatca

SEQ ID NO: 98205 - DNA, 25 bp, Artificial
  probe
  misc_feature (1)..(25): SEQ ID NO: 7329; WAN024BXG_at; Start 120; Stop 144
gcctagtgtttcgaaagcatatcaa

SEQ ID NO: 98206 - DNA, 25 bp, Artificial
  probe
  misc_feature (1)..(25): SEQ ID NO: 7329; WAN024BXG_at; Start 123; Stop 147
tagtgtttcgaaagcatatcaaatc

SEQ ID NO: 98207 - DNA, 25 bp, Artificial
  probe
  misc_feature (1)..(25): SEQ ID NO: 7329; WAN024BXG_at; Start 23; Stop 47
cactaagaacactcaaaaactggag

SEQ ID NO: 98208 - DNA, 25 bp, Artificial
  probe
  misc_feature (1)..(25): SEQ ID NO: 7329; WAN024BXG_at; Start 65; Stop 89
cagctgtgaatgtatcagttgatac

SEQ ID NO: 98209 - DNA, 25 bp, Artificial
  probe
  misc_feature (1)..(25): SEQ ID NO: 7329; WAN024BXG_at; Start 59; Stop 83
cggcagcagctgtgaatgtatcagt

SEQ ID NO: 98210 - DNA, 25 bp, Artificial
  probe
  misc_feature (1)..(25): SEQ ID NO: 7329; WAN024BXG_at; Start 130; Stop 154
tcgaaagcatatcaaatcgctagtg

SEQ ID NO: 98211 - DNA, 25 bp, Artificial
  probe
  misc_feature (1)..(25): SEQ ID NO: 7329; WAN024BXG_at; Start 178; Stop 202
attatttttttacctgatattgcgg

SEQ ID NO: 98212 - DNA, 25 bp, Artificial
  probe
  misc_feature (1)..(25): SEQ ID NO: 7329; WAN024BXG_at; Start 45; Stop 69
gagacaaagtgatgcggcagcagct

SEQ ID NO: 98213 - DNA, 25 bp, Artificial
  probe
  misc_feature (1)..(25): SEQ ID NO: 7329; WAN024BXG_at; Start 38; Stop 62
aaaactggagacaaagtgatgcggc

SEQ ID NO: 98214 - DNA, 25 bp, Artificial
  probe
  misc_feature (1)..(25): SEQ ID NO: 7329; WAN024BXG_at; Start 97; Stop 121
cattgggaacgtgggataacagagc

SEQ ID NO: 98215 - DNA, 25 bp, Artificial
  probe
  misc_feature (1)..(25): SEQ ID NO: 7329; WAN024BXG_at; Start 26; Stop 50
taagaacactcaaaaactggagaca

SEQ ID NO: 98216 - DNA, 25 bp, Artificial
  probe
  misc_feature (1)..(25): SEQ ID NO: 7329; WAN024BXG_at; Start 51; Stop 75
aagtgatgcggcagcagctgtgaat

SEQ ID NO: 98217 - DNA, 25 bp, Artificial
  probe
  misc_feature (1)..(25): SEQ ID NO: 6558; WAN024BXH_at; Start 6; Stop 30
tgaaattcacgcatgtctttgcgga

SEQ ID NO: 98218 - DNA, 25 bp, Artificial
  probe
  misc_feature (1)..(25): SEQ ID NO: 6558; WAN024BXH_at; Start 54; Stop 78
cgacgattgtgtaatgggaccaaat

SEQ ID NO: 98219 - DNA, 25 bp, Artificial
  probe
  misc_feature (1)..(25): SEQ ID NO: 6558; WAN024BXH_at; Start 60; Stop 84
ttgtgtaatgggaccaaatatggct

SEQ ID NO: 98220 - DNA, 25 bp, Artificial
  probe
  misc_feature (1)..(25): SEQ ID NO: 6558; WAN024BXH_at; Start 169; Stop 193
tatatctacattcactatcgtggcg

SEQ ID NO: 98221 - DNA, 25 bp, Artificial
  probe
  misc_feature (1)..(25): SEQ ID NO: 6558; WAN024BXH_at; Start 201; Stop 225
tcgtatccatccaatgttcattcaa

SEQ ID NO: 98222 - DNA, 25 bp, Artificial
  probe
  misc_feature (1)..(25): SEQ ID NO: 6558; WAN024BXH_at; Start 96; Stop 120
ttggtgggaagaaaatgcagaactc

SEQ ID NO: 98223 - DNA, 25 bp, Artificial
  probe
  misc_feature (1)..(25): SEQ ID NO: 6558; WAN024BXH_at; Start 21; Stop 45
tctttgcggaaattgggtgaaccta

SEQ ID NO: 98224 - DNA, 25 bp, Artificial
  probe
  misc_feature (1)..(25): SEQ ID NO: 6558; WAN024BXH_at; Start 78; Stop 102
tatggctaatccttacatttggtgg

SEQ ID NO: 98225 - DNA, 25 bp, Artificial
  probe
  misc_feature (1)..(25): SEQ ID NO: 6558; WAN024BXH_at; Start 193; Stop 217
gctgactatcgtatccatccaatgt

SEQ ID NO: 98226 - DNA, 25 bp, Artificial
  probe
  misc_feature (1)..(25): SEQ ID NO: 6558; WAN024BXH_at; Start 65; Stop 89
taatgggaccaaatatggctaatcc

SEQ ID NO: 98227 - DNA, 25 bp, Artificial
  probe
  misc_feature (1)..(25): SEQ ID NO: 6558; WAN024BXH_at; Start 212; Stop 236
caatgttcattcaaatcgtttctag

SEQ ID NO: 98228 - DNA, 25 bp, Artificial
  probe
  misc_feature (1)..(25): SEQ ID NO: 6558; WAN024BXH_at; Start 184; Stop 208
tatcgtggcgctgactatcgtatcc

SEQ ID NO: 98229 - DNA, 25 bp, Artificial
  probe
  misc_feature (1)..(25): SEQ ID NO: 6558; WAN024BXH_at; Start 153; Stop 177
gatgtaccatcaggattatatctac

SEQ ID NO: 98230 - DNA, 25 bp, Artificial
  probe
  misc_feature (1)..(25): SEQ ID NO: 6558; WAN024BXH_at; Start 84; Stop 108
taatccttacatttggtgggaagaa

SEQ ID NO: 98231 - DNA, 25 bp, Artificial
  probe
  misc_feature (1)..(25): SEQ ID NO: 6558; WAN024BXH_at; Start 51; Stop 75
cgacgacgattgtgtaatgggacca

SEQ ID NO: 98232 - DNA, 25 bp, Artificial
  probe
  misc_feature (1)..(25): SEQ ID NO: 6558; WAN024BXH_at; Start 100; Stop 124
tgggaagaaaatgcagaactctact

SEQ ID NO: 98233 - DNA, 25 bp, Artificial
  probe
  misc_feature (1)..(25): SEQ ID NO: 6558; WAN024BXH_at; Start 36; Stop 60
ggtgaacctatcagccgacgacgat

SEQ ID NO: 98234 - DNA, 25 bp, Artificial
  probe
  misc_feature (1)..(25): SEQ ID NO: 6558; WAN024BXH_at; Start 27; Stop 51
cggaaattgggtgaacctatcagcc

SEQ ID NO: 98235 - DNA, 25 bp, Artificial
  probe
  misc_feature (1)..(25): SEQ ID NO: 6558; WAN024BXH_at; Start 145; Stop 169
gcaaactcgatgtaccatcaggatt

SEQ ID NO: 98236 - DNA, 25 bp, Artificial
  probe
  misc_feature (1)..(25): SEQ ID NO: 6558; WAN024BXH_at; Start 159; Stop 183
ccatcaggattatatctacattcac

SEQ ID NO: 98237 - DNA, 25 bp, Artificial
  probe
  misc_feature (1)..(25): SEQ ID NO: 6558; WAN024BXH_at; Start 46; Stop 70
tcagccgacgacgattgtgtaatgg

SEQ ID NO: 98238 - DNA, 25 bp, Artificial
  probe
  misc_feature (1)..(25): SEQ ID NO: 6558; WAN024BXH_at; Start 106; Stop 130
gaaaatgcagaactctactcaccaa

SEQ ID NO: 98239 - DNA, 25 bp, Artificial
  probe
  misc_feature (1)..(25): SEQ ID NO: 6558; WAN024BXH_at; Start 31; Stop 55
aattgggtgaacctatcagccgacg

SEQ ID NO: 98240 - DNA, 25 bp, Artificial
  probe
  misc_feature (1)..(25): SEQ ID NO: 6558; WAN024BXH_at; Start 137; Stop 161
aacctgaagcaaactcgatgtacca

SEQ ID NO: 98241 - DNA, 25 bp, Artificial
  probe
  misc_feature (1)..(25): SEQ ID NO: 6558; WAN024BXH_at; Start 42; Stop 66
cctatcagccgacgacgattgtgta

SEQ ID NO: 98242 - DNA, 25 bp, Artificial
  probe
  misc_feature (1)..(25): SEQ ID NO: 6558; WAN024BXH_at; Start 141; Stop 165
tgaagcaaactcgatgtaccatcag

SEQ ID NO: 98243 - DNA, 25 bp, Artificial
  probe
  misc_feature (1)..(25): SEQ ID NO: 6558; WAN024BXH_at; Start 190; Stop 214
ggcgctgactatcgtatccatccaa

SEQ ID NO: 98244 - DNA, 25 bp, Artificial
  probe
  misc_feature (1)..(25): SEQ ID NO: 6558; WAN024BXH_at; Start 2; Stop 26
tgactgaaattcacgcatgtctttg

SEQ ID NO: 98245 - DNA, 25 bp, Artificial
  probe
  misc_feature (1)..(25): SEQ ID NO: 6558; WAN024BXH_at; Start 121; Stop 145
tactcaccaatttctaaacctgaag

SEQ ID NO: 98246 - DNA, 25 bp, Artificial
  probe
  misc_feature (1)..(25): SEQ ID NO: 6558; WAN024BXH_at; Start 12; Stop 36
tcacgcatgtctttgcggaaattgg

SEQ ID NO: 98247 - DNA, 25 bp, Artificial
  probe
  misc_feature (1)..(25): SEQ ID NO: 6558; WAN024BXH_at; Start 133; Stop 157
tctaaacctgaagcaaactcgatgt

SEQ ID NO: 98248 - DNA, 25 bp, Artificial
  probe
  misc_feature (1)..(25): SEQ ID NO: 6558; WAN024BXH_at; Start 17; Stop 41
catgtctttgcggaaattgggtgaa

SEQ ID NO: 98249 - DNA, 25 bp, Artificial
  probe
  misc_feature (1)..(25): SEQ ID NO: 6558; WAN024BXH_at; Start 175; Stop 199
tacattcactatcgtggcgctgact

SEQ ID NO: 98250 - DNA, 25 bp, Artificial
  probe
  misc_feature (1)..(25): SEQ ID NO: 6558; WAN024BXH_at; Start 69; Stop 93
gggaccaaatatggctaatccttac

SEQ ID NO: 98251 - DNA, 25 bp, Artificial
  probe
  misc_feature (1)..(25): SEQ ID NO: 6385; WAN024BXI_at; Start 108; Stop 132
ccagttgaaactggacgacttagat

SEQ ID NO: 98252 - DNA, 25 bp, Artificial
  probe
  misc_feature (1)..(25): SEQ ID NO: 6385; WAN024BXI_at; Start 59; Stop 83
ggtttgaaattaaccaagctatcga

SEQ ID NO: 98253 - DNA, 25 bp, Artificial
  probe
  misc_feature (1)..(25): SEQ ID NO: 6385; WAN024BXI_at; Start 69; Stop 93
taaccaagctatcgaagctcgttta

SEQ ID NO: 98254 - DNA, 25 bp, Artificial
  probe
  misc_feature (1)..(25): SEQ ID NO: 6385; WAN024BXI_at; Start 18; Stop 42
ggaatttctaaaattcaggagccga

SEQ ID NO: 98255 - DNA, 25 bp, Artificial
  probe
  misc_feature (1)..(25): SEQ ID NO: 6385; WAN024BXI_at; Start 97; Stop 121
caaaaagccgaccagttgaaactgg

SEQ ID NO: 98256 - DNA, 25 bp, Artificial
  probe
  misc_feature (1)..(25): SEQ ID NO: 6385; WAN024BXI_at; Start 80; Stop 104
tcgaagctcgtttaaatcaaaaagc

SEQ ID NO: 98257 - DNA, 25 bp, Artificial
  probe
  misc_feature (1)..(25): SEQ ID NO: 6385; WAN024BXI_at; Start 144; Stop 168
ttctagcagactagaaaaagttatc

SEQ ID NO: 98258 - DNA, 25 bp, Artificial
  probe
  misc_feature (1)..(25): SEQ ID NO: 6385; WAN024BXI_at; Start 23; Stop 47
ttctaaaattcaggagccgatttac

SEQ ID NO: 98259 - DNA, 25 bp, Artificial
  probe
  misc_feature (1)..(25): SEQ ID NO: 6385; WAN024BXI_at; Start 53; Stop 77
tagaatggtttgaaattaaccaagc

SEQ ID NO: 98260 - DNA, 25 bp, Artificial
  probe
  misc_feature (1)..(25): SEQ ID NO: 6385; WAN024BXI_at; Start 32; Stop 56
tcaggagccgatttacaaaaataga

SEQ ID NO: 98261 - DNA, 25 bp, Artificial
  probe
  misc_feature (1)..(25): SEQ ID NO: 6385; WAN024BXI_at; Start 112; Stop 136
ttgaaactggacgacttagatttag

SEQ ID NO: 98262 - DNA, 25 bp, Artificial
  probe
  misc_feature (1)..(25): SEQ ID NO: 6385; WAN024BXI_at; Start 20; Stop 44
aatttctaaaattcaggagccgatt

SEQ ID NO: 98263 - DNA, 25 bp, Artificial
  probe
  misc_feature (1)..(25): SEQ ID NO: 6385; WAN024BXI_at; Start 96; Stop 120
tcaaaaagccgaccagttgaaactg

SEQ ID NO: 98264 - DNA, 25 bp, Artificial
  probe
  misc_feature (1)..(25): SEQ ID NO: 6385; WAN024BXI_at; Start 36; Stop 60
gagccgatttacaaaaatagaatgg

SEQ ID NO: 98265 - DNA, 25 bp, Artificial
  probe
  misc_feature (1)..(25): SEQ ID NO: 6385; WAN024BXI_at; Start 73; Stop 97
caagctatcgaagctcgtttaaatc

SEQ ID NO: 98266 - DNA, 25 bp, Artificial
  probe
  misc_feature (1)..(25): SEQ ID NO: 6385; WAN024BXI_at; Start 117; Stop 141
actggacgacttagatttagaaatc

SEQ ID NO: 98267 - DNA, 25 bp, Artificial
  probe
  misc_feature (1)..(25): SEQ ID NO: 6385; WAN024BXI_at; Start 91; Stop 115
ttaaatcaaaaagccgaccagttga

SEQ ID NO: 98268 - DNA, 25 bp, Artificial
  probe
  misc_feature (1)..(25): SEQ ID NO: 6385; WAN024BXI_at; Start 61; Stop 85
tttgaaattaaccaagctatcgaag

SEQ ID NO: 98269 - DNA, 25 bp, Artificial
  probe
  misc_feature (1)..(25): SEQ ID NO: 6385; WAN024BXI_at; Start 33; Stop 57
caggagccgatttacaaaaatagaa

SEQ ID NO: 98270 - DNA, 25 bp, Artificial
  probe
  misc_feature (1)..(25): SEQ ID NO: 6385; WAN024BXI_at; Start 100; Stop 124
aaagccgaccagttgaaactggacg

SEQ ID NO: 98271 - DNA, 25 bp, Artificial
  probe
  misc_feature (1)..(25): SEQ ID NO: 6385; WAN024BXI_at; Start 63; Stop 87
tgaaattaaccaagctatcgaagct

SEQ ID NO: 98272 - DNA, 25 bp, Artificial
  probe
  misc_feature (1)..(25): SEQ ID NO: 6385; WAN024BXI_at; Start 71; Stop 95
accaagctatcgaagctcgtttaaa

SEQ ID NO: 98273 - DNA, 25 bp, Artificial
  probe
  misc_feature (1)..(25): SEQ ID NO: 6385; WAN024BXI_at; Start 109; Stop 133
cagttgaaactggacgacttagatt

SEQ ID NO: 98274 - DNA, 25 bp, Artificial
  probe
  misc_feature (1)..(25): SEQ ID NO: 6385; WAN024BXI_at; Start 26; Stop 50
taaaattcaggagccgatttacaaa

SEQ ID NO: 98275 - DNA, 25 bp, Artificial
  probe
  misc_feature (1)..(25): SEQ ID NO: 6385; WAN024BXI_at; Start 66; Stop 90
aattaaccaagctatcgaagctcgt

SEQ ID NO: 98276 - DNA, 25 bp, Artificial
  probe
  misc_feature (1)..(25): SEQ ID NO: 6385; WAN024BXI_at; Start 3; Stop 27
gaaagaagcagtaaaggaatttcta

SEQ ID NO: 98277 - DNA, 25 bp, Artificial
  probe
  misc_feature (1)..(25): SEQ ID NO: 6385; WAN024BXI_at; Start 119; Stop 143
tggacgacttagatttagaaatcat

SEQ ID NO: 98278 - DNA, 25 bp, Artificial
  probe
  misc_feature (1)..(25): SEQ ID NO: 6385; WAN024BXI_at; Start 40; Stop 64
cgatttacaaaaatagaatggtttg

SEQ ID NO: 98279 - DNA, 25 bp, Artificial
  probe
  misc_feature (1)..(25): SEQ ID NO: 6385; WAN024BXI_at; Start 106; Stop 130
gaccagttgaaactggacgacttag

SEQ ID NO: 98280 - DNA, 25 bp, Artificial
  probe
  misc_feature (1)..(25): SEQ ID NO: 6385; WAN024BXI_at; Start 65; Stop 89
aaattaaccaagctatcgaagctcg

SEQ ID NO: 98281 - DNA, 25 bp, Artificial
  probe
  misc_feature (1)..(25): SEQ ID NO: 6385; WAN024BXI_at; Start 76; Stop 100
gctatcgaagctcgtttaaatcaaa

SEQ ID NO: 98282 - DNA, 25 bp, Artificial
  probe
  misc_feature (1)..(25): SEQ ID NO: 6385; WAN024BXI_at; Start 134; Stop 158
tagaaatcatttctagcagactaga

SEQ ID NO: 98283 - DNA, 25 bp, Artificial
  probe
  misc_feature (1)..(25): SEQ ID NO: 6385; WAN024BXI_at; Start 103; Stop 127
gccgaccagttgaaactggacgact

SEQ ID NO: 98284 - DNA, 25 bp, Artificial
  probe
  misc_feature (1)..(25): SEQ ID NO: 6385; WAN024BXI_at; Start 114; Stop 138
gaaactggacgacttagatttagaa

SEQ ID NO: 98285 - DNA, 25 bp, Artificial
  probe
  misc_feature (1)..(25): SEQ ID NO: 7473; WAN024BXJ_at; Start 1; Stop 25
ttgagggctgttctttctagttcgt

SEQ ID NO: 98286 - DNA, 25 bp, Artificial
  probe
  misc_feature (1)..(25): SEQ ID NO: 7473; WAN024BXJ_at; Start 6; Stop 30
ggctgttctttctagttcgttcatc

SEQ ID NO: 98287 - DNA, 25 bp, Artificial
  probe
  misc_feature (1)..(25): SEQ ID NO: 7473; WAN024BXJ_at; Start 59; Stop 83
ctcttggagcaacaacctgccaagg

SEQ ID NO: 98288 - DNA, 25 bp, Artificial
  probe
  misc_feature (1)..(25): SEQ ID NO: 7473; WAN024BXJ_at; Start 69; Stop 93
aacaacctgccaaggattcgaacct

SEQ ID NO: 98289 - DNA, 25 bp, Artificial
  probe
  misc_feature (1)..(25): SEQ ID NO: 7473; WAN024BXJ_at; Start 64; Stop 88
ggagcaacaacctgccaaggattcg

SEQ ID NO: 98290 - DNA, 25 bp, Artificial
  probe
  misc_feature (1)..(25): SEQ ID NO: 7473; WAN024BXJ_at; Start 10; Stop 34
gttctttctagttcgttcatcttcc

SEQ ID NO: 98291 - DNA, 25 bp, Artificial
  probe
  misc_feature (1)..(25): SEQ ID NO: 7473; WAN024BXJ_at; Start 68; Stop 92
caacaacctgccaaggattcgaacc

SEQ ID NO: 98292 - DNA, 25 bp, Artificial
  probe
  misc_feature (1)..(25): SEQ ID NO: 7473; WAN024BXJ_at; Start 62; Stop 86
ttggagcaacaacctgccaaggatt

SEQ ID NO: 98293 - DNA, 25 bp, Artificial
  probe
  misc_feature (1)..(25): SEQ ID NO: 7473; WAN024BXJ_at; Start 40; Stop 64
ccttgtcttttttattttgctcttg

SEQ ID NO: 98294 - DNA, 25 bp, Artificial
  probe
  misc_feature (1)..(25): SEQ ID NO: 7473; WAN024BXJ_at; Start 14; Stop 38
tttctagttcgttcatcttcccacc

SEQ ID NO: 98295 - DNA, 25 bp, Artificial
  probe
  misc_feature (1)..(25): SEQ ID NO: 7473; WAN024BXJ_at; Start 67; Stop 91
gcaacaacctgccaaggattcgaac

SEQ ID NO: 98296 - DNA, 25 bp, Artificial
  probe
  misc_feature (1)..(25): SEQ ID NO: 7473; WAN024BXJ_at; Start 70; Stop 94
acaacctgccaaggattcgaacctt

SEQ ID NO: 98297 - DNA, 25 bp, Artificial
  probe
  misc_feature (1)..(25): SEQ ID NO: 7473; WAN024BXJ_at; Start 58; Stop 82
gctcttggagcaacaacctgccaag

SEQ ID NO: 98298 - DNA, 25 bp, Artificial
  probe
  misc_feature (1)..(25): SEQ ID NO: 7473; WAN024BXJ_at; Start 54; Stop 78
ttttgctcttggagcaacaacctgc

SEQ ID NO: 98299 - DNA, 25 bp, Artificial
  probe
  misc_feature (1)..(25): SEQ ID NO: 7473; WAN024BXJ_at; Start 13; Stop 37
ctttctagttcgttcatcttcccac

SEQ ID NO: 98300 - DNA, 25 bp, Artificial
  probe
  misc_feature (1)..(25): SEQ ID NO: 7473; WAN024BXJ_at; Start 55; Stop 79
tttgctcttggagcaacaacctgcc

SEQ ID NO: 98301 - DNA, 25 bp, Artificial
  probe
  misc_feature (1)..(25): SEQ ID NO: 7473; WAN024BXJ_at; Start 24; Stop 48
gttcatcttcccacctccttgtctt

SEQ ID NO: 98302 - DNA, 25 bp, Artificial
  probe
  misc_feature (1)..(25): SEQ ID NO: 7473; WAN024BXJ_at; Start 2; Stop 26
tgagggctgttctttctagttcgtt

SEQ ID NO: 98303 - DNA, 25 bp, Artificial
  probe
  misc_feature (1)..(25): SEQ ID NO: 7473; WAN024BXJ_at; Start 57; Stop 81
tgctcttggagcaacaacctgccaa

SEQ ID NO: 98304 - DNA, 25 bp, Artificial
  probe
  misc_feature (1)..(25): SEQ ID NO: 7473; WAN024BXJ_at; Start 65; Stop 89
gagcaacaacctgccaaggattcga

SEQ ID NO: 98305 - DNA, 25 bp, Artificial
  probe
  misc_feature (1)..(25): SEQ ID NO: 7473; WAN024BXJ_at; Start 63; Stop 87
tggagcaacaacctgccaaggattc

SEQ ID NO: 98306 - DNA, 25 bp, Artificial
  probe
  misc_feature (1)..(25): SEQ ID NO: 7473; WAN024BXJ_at; Start 56; Stop 80
ttgctcttggagcaacaacctgcca

SEQ ID NO: 98307 - DNA, 25 bp, Artificial
  probe
  misc_feature (1)..(25): SEQ ID NO: 7473; WAN024BXJ_at; Start 72; Stop 96
aacctgccaaggattcgaaccttgg

SEQ ID NO: 98308 - DNA, 25 bp, Artificial
  probe
  misc_feature (1)..(25): SEQ ID NO: 7473; WAN024BXJ_at; Start 9; Stop 33
tgttctttctagttcgttcatcttc

SEQ ID NO: 98309 - DNA, 25 bp, Artificial
  probe
  misc_feature (1)..(25): SEQ ID NO: 7473; WAN024BXJ_at; Start 71; Stop 95
caacctgccaaggattcgaaccttg

SEQ ID NO: 98310 - DNA, 25 bp, Artificial
  probe
  misc_feature (1)..(25): SEQ ID NO: 7473; WAN024BXJ_at; Start 12; Stop 36
tctttctagttcgttcatcttccca

SEQ ID NO: 98311 - DNA, 25 bp, Artificial
  probe
  misc_feature (1)..(25): SEQ ID NO: 7473; WAN024BXJ_at; Start 61; Stop 85
cttggagcaacaacctgccaaggat

SEQ ID NO: 98312 - DNA, 25 bp, Artificial
  probe
  misc_feature (1)..(25): SEQ ID NO: 7473; WAN024BXJ_at; Start 5; Stop 29
gggctgttctttctagttcgttcat

SEQ ID NO: 98313 - DNA, 25 bp, Artificial
  probe
  misc_feature (1)..(25): SEQ ID NO: 7473; WAN024BXJ_at; Start 4; Stop 28
agggctgttctttctagttcgttca

SEQ ID NO: 98314 - DNA, 25 bp, Artificial
  probe
  misc_feature (1)..(25): SEQ ID NO: 7473; WAN024BXJ_at; Start 3; Stop 27
gagggctgttctttctagttcgttc

SEQ ID NO: 98315 - DNA, 25 bp, Artificial
  probe
  misc_feature (1)..(25): SEQ ID NO: 7473; WAN024BXJ_at; Start 60; Stop 84
tcttggagcaacaacctgccaagga

SEQ ID NO: 98316 - DNA, 25 bp, Artificial
  probe
  misc_feature (1)..(25): SEQ ID NO: 7473; WAN024BXJ_at; Start 7; Stop 31
gctgttctttctagttcgttcatct

SEQ ID NO: 98317 - DNA, 25 bp, Artificial
  probe
  misc_feature (1)..(25): SEQ ID NO: 7473; WAN024BXJ_at; Start 15; Stop 39
ttctagttcgttcatcttcccacct

SEQ ID NO: 98318 - DNA, 25 bp, Artificial
  probe
  misc_feature (1)..(25): SEQ ID NO: 7473; WAN024BXJ_at; Start 20; Stop 44
gttcgttcatcttcccacctccttg

SEQ ID NO: 98319 - DNA, 25 bp, Artificial
  probe
  misc_feature (1)..(25): SEQ ID NO: 6428; WAN024BXK_at; Start 29; Stop 53
atgagatattgaggaccgtgacata

SEQ ID NO: 98320 - DNA, 25 bp, Artificial
  probe
  misc_feature (1)..(25): SEQ ID NO: 6428; WAN024BXK_at; Start 2; Stop 26
tgaacgaactagaaagaacagccct

SEQ ID NO: 98321 - DNA, 25 bp, Artificial
  probe
  misc_feature (1)..(25): SEQ ID NO: 6428; WAN024BXK_at; Start 85; Stop 109
aagatttctttgaacgattcacaag

SEQ ID NO: 98322 - DNA, 25 bp, Artificial
  probe
  misc_feature (1)..(25): SEQ ID NO: 6428; WAN024BXK_at; Start 17; Stop 41
gaacagccctcaatgagatattgag

SEQ ID NO: 98323 - DNA, 25 bp, Artificial
  probe
  misc_feature (1)..(25): SEQ ID NO: 6428; WAN024BXK_at; Start 27; Stop 51
caatgagatattgaggaccgtgaca

SEQ ID NO: 98324 - DNA, 25 bp, Artificial
  probe
  misc_feature (1)..(25): SEQ ID NO: 6428; WAN024BXK_at; Start 15; Stop 39
aagaacagccctcaatgagatattg

SEQ ID NO: 98325 - DNA, 25 bp, Artificial
  probe
  misc_feature (1)..(25): SEQ ID NO: 6428; WAN024BXK_at; Start 50; Stop 74
catatattgctgagaaagtggacga

SEQ ID NO: 98326 - DNA, 25 bp, Artificial
  probe
  misc_feature (1)..(25): SEQ ID NO: 6428; WAN024BXK_at; Start 95; Stop 119
tgaacgattcacaagttcctgagca

SEQ ID NO: 98327 - DNA, 25 bp, Artificial
  probe
  misc_feature (1)..(25): SEQ ID NO: 6428; WAN024BXK_at; Start 9; Stop 33
actagaaagaacagccctcaatgag

SEQ ID NO: 98328 - DNA, 25 bp, Artificial
  probe
  misc_feature (1)..(25): SEQ ID NO: 6428; WAN024BXK_at; Start 7; Stop 31
gaactagaaagaacagccctcaatg

SEQ ID NO: 98329 - DNA, 25 bp, Artificial
  probe
  misc_feature (1)..(25): SEQ ID NO: 6428; WAN024BXK_at; Start 57; Stop 81
tgctgagaaagtggacgaactagat

SEQ ID NO: 98330 - DNA, 25 bp, Artificial
  probe
  misc_feature (1)..(25): SEQ ID NO: 6428; WAN024BXK_at; Start 73; Stop 97
gaactagattctaagatttctttga

SEQ ID NO: 98331 - DNA, 25 bp, Artificial
  probe
  misc_feature (1)..(25): SEQ ID NO: 6428; WAN024BXK_at; Start 41; Stop 65
ggaccgtgacatatattgctgagaa

SEQ ID NO: 98332 - DNA, 25 bp, Artificial
  probe
  misc_feature (1)..(25): SEQ ID NO: 6428; WAN024BXK_at; Start 39; Stop 63
gaggaccgtgacatatattgctgag

SEQ ID NO: 98333 - DNA, 25 bp, Artificial
  probe
  misc_feature (1)..(25): SEQ ID NO: 6428; WAN024BXK_at; Start 52; Stop 76
tatattgctgagaaagtggacgaac

SEQ ID NO: 98334 - DNA, 25 bp, Artificial
  probe
  misc_feature (1)..(25): SEQ ID NO: 6428; WAN024BXK_at; Start 4; Stop 28
aacgaactagaaagaacagccctca

SEQ ID NO: 98335 - DNA, 25 bp, Artificial
  probe
  misc_feature (1)..(25): SEQ ID NO: 6428; WAN024BXK_at; Start 44; Stop 68
ccgtgacatatattgctgagaaagt

SEQ ID NO: 98336 - DNA, 25 bp, Artificial
  probe
  misc_feature (1)..(25): SEQ ID NO: 6428; WAN024BXK_at; Start 35; Stop 59
tattgaggaccgtgacatatattgc

SEQ ID NO: 98337 - DNA, 25 bp, Artificial
  probe
  misc_feature (1)..(25): SEQ ID NO: 6428; WAN024BXK_at; Start 59; Stop 83
ctgagaaagtggacgaactagattc

SEQ ID NO: 98338 - DNA, 25 bp, Artificial
  probe
  misc_feature (1)..(25): SEQ ID NO: 6428; WAN024BXK_at; Start 48; Stop 72
gacatatattgctgagaaagtggac

SEQ ID NO: 98339 - DNA, 25 bp, Artificial
  probe
  misc_feature (1)..(25): SEQ ID NO: 6428; WAN024BXK_at; Start 37; Stop 61
ttgaggaccgtgacatatattgctg

SEQ ID NO: 98340 - DNA, 25 bp, Artificial
  probe
  misc_feature (1)..(25): SEQ ID NO: 6428; WAN024BXK_at; Start 31; Stop 55
gagatattgaggaccgtgacatata

SEQ ID NO: 98341 - DNA, 25 bp, Artificial
  probe
  misc_feature (1)..(25): SEQ ID NO: 6428; WAN024BXK_at; Start 93; Stop 117
tttgaacgattcacaagttcctgag

SEQ ID NO: 98342 - DNA, 25 bp, Artificial
  probe
  misc_feature (1)..(25): SEQ ID NO: 6428; WAN024BXK_at; Start 69; Stop 93
ggacgaactagattctaagatttct

SEQ ID NO: 98343 - DNA, 25 bp, Artificial
  probe
  misc_feature (1)..(25): SEQ ID NO: 6428; WAN024BXK_at; Start 3; Stop 27
gaacgaactagaaagaacagccctc

SEQ ID NO: 98344 - DNA, 25 bp, Artificial
  probe
  misc_feature (1)..(25): SEQ ID NO: 6428; WAN024BXK_at; Start 63; Stop 87
gaaagtggacgaactagattctaag

SEQ ID NO: 98345 - DNA, 25 bp, Artificial
  probe
  misc_feature (1)..(25): SEQ ID NO: 6428; WAN024BXK_at; Start 54; Stop 78
tattgctgagaaagtggacgaacta

SEQ ID NO: 98346 - DNA, 25 bp, Artificial
  probe
  misc_feature (1)..(25): SEQ ID NO: 6428; WAN024BXK_at; Start 10; Stop 34
ctagaaagaacagccctcaatgaga

SEQ ID NO: 98347 - DNA, 25 bp, Artificial
  probe
  misc_feature (1)..(25): SEQ ID NO: 6428; WAN024BXK_at; Start 82; Stop 106
tctaagatttctttgaacgattcac

SEQ ID NO: 98348 - DNA, 25 bp, Artificial
  probe
  misc_feature (1)..(25): SEQ ID NO: 6428; WAN024BXK_at; Start 13; Stop 37
gaaagaacagccctcaatgagatat

SEQ ID NO: 98349 - DNA, 25 bp, Artificial
  probe
  misc_feature (1)..(25): SEQ ID NO: 6428; WAN024BXK_at; Start 96; Stop 120
gaacgattcacaagttcctgagcaa

SEQ ID NO: 98350 - DNA, 25 bp, Artificial
  probe
  misc_feature (1)..(25): SEQ ID NO: 6428; WAN024BXK_at; Start 91; Stop 115
tctttgaacgattcacaagttcctg

SEQ ID NO: 98351 - DNA, 25 bp, Artificial
  probe
  misc_feature (1)..(25): SEQ ID NO: 6428; WAN024BXK_at; Start 42; Stop 66
gaccgtgacatatattgctgagaaa

SEQ ID NO: 98352 - DNA, 25 bp, Artificial
  probe
  misc_feature (1)..(25): SEQ ID NO: 6428; WAN024BXK_at; Start 65; Stop 89
aagtggacgaactagattctaagat

SEQ ID NO: 98353 - DNA, 25 bp, Artificial
  probe
  misc_feature (1)..(25): SEQ ID NO: 6424; WAN024BXL_at; Start 216; Stop 240
cgatgacattcgttttgatgtagca

SEQ ID NO: 98354 - DNA, 25 bp, Artificial
  probe
  misc_feature (1)..(25): SEQ ID NO: 6424; WAN024BXL_at; Start 148; Stop 172
gagttagcagaggagattgaacgcc

SEQ ID NO: 98355 - DNA, 25 bp, Artificial
  probe
  misc_feature (1)..(25): SEQ ID NO: 6424; WAN024BXL_at; Start 151; Stop 175
ttagcagaggagattgaacgccaag

SEQ ID NO: 98356 - DNA, 25 bp, Artificial
  probe
  misc_feature (1)..(25): SEQ ID NO: 6424; WAN024BXL_at; Start 222; Stop 246
cattcgttttgatgtagcatttgca

SEQ ID NO: 98357 - DNA, 25 bp, Artificial
  probe
  misc_feature (1)..(25): SEQ ID NO: 6424; WAN024BXL_at; Start 102; Stop 126
tgaagcattctgtactaactgccgt

SEQ ID NO: 98358 - DNA, 25 bp, Artificial
  probe
  misc_feature (1)..(25): SEQ ID NO: 6424; WAN024BXL_at; Start 232; Stop 256
gatgtagcatttgcaggaatgcttg

SEQ ID NO: 98359 - DNA, 25 bp, Artificial
  probe
  misc_feature (1)..(25): SEQ ID NO: 6424; WAN024BXL_at; Start 22; Stop 46
gcaatcaacatcttcaaagcagtag

SEQ ID NO: 98360 - DNA, 25 bp, Artificial
  probe
  misc_feature (1)..(25): SEQ ID NO: 6424; WAN024BXL_at; Start 175; Stop 199
gagcgttaccttctcgattctggtt

SEQ ID NO: 98361 - DNA, 25 bp, Artificial
  probe
  misc_feature (1)..(25): SEQ ID NO: 6424; WAN024BXL_at; Start 204; Stop 228
tcaagaggaaatcgatgacattcgt

SEQ ID NO: 98362 - DNA, 25 bp, Artificial
  probe
  misc_feature (1)..(25): SEQ ID NO: 6424; WAN024BXL_at; Start 6; Stop 30
cacattaaacgagaaagcaatcaac

SEQ ID NO: 98363 - DNA, 25 bp, Artificial
  probe
  misc_feature (1)..(25): SEQ ID NO: 6424; WAN024BXL_at; Start 117; Stop 141
taactgccgtcaattcgcttttgga

SEQ ID NO: 98364 - DNA, 25 bp, Artificial
  probe
  misc_feature (1)..(25): SEQ ID NO: 6424; WAN024BXL_at; Start 135; Stop 159
ttttggatggacagagttagcagag

SEQ ID NO: 98365 - DNA, 25 bp, Artificial
  probe
  misc_feature (1)..(25): SEQ ID NO: 6424; WAN024BXL_at; Start 162; Stop 186
gattgaacgccaagagcgttacctt

SEQ ID NO: 98366 - DNA, 25 bp, Artificial
  probe
  misc_feature (1)..(25): SEQ ID NO: 6424; WAN024BXL_at; Start 122; Stop 146
gccgtcaattcgcttttggatggac

SEQ ID NO: 98367 - DNA, 25 bp, Artificial
  probe
  misc_feature (1)..(25): SEQ ID NO: 6424; WAN024BXL_at; Start 87; Stop 111
cctttacagccagcttgaagcattc

SEQ ID NO: 98368 - DNA, 25 bp, Artificial
  probe
  misc_feature (1)..(25): SEQ ID NO: 6424; WAN024BXL_at; Start 132; Stop 156
cgcttttggatggacagagttagca

SEQ ID NO: 98369 - DNA, 25 bp, Artificial
  probe
  misc_feature (1)..(25): SEQ ID NO: 6424; WAN024BXL_at; Start 79; Stop 103
gaaaacttcctttacagccagcttg

SEQ ID NO: 98370 - DNA, 25 bp, Artificial
  probe
  misc_feature (1)..(25): SEQ ID NO: 6424; WAN024BXL_at; Start 110; Stop 134
tctgtactaactgccgtcaattcgc

SEQ ID NO: 98371 - DNA, 25 bp, Artificial
  probe
  misc_feature (1)..(25): SEQ ID NO: 6424; WAN024BXL_at; Start 106; Stop 130
gcattctgtactaactgccgtcaat

SEQ ID NO: 98372 - DNA, 25 bp, Artificial
  probe
  misc_feature (1)..(25): SEQ ID NO: 6424; WAN024BXL_at; Start 226; Stop 250
cgttttgatgtagcatttgcaggaa

SEQ ID NO: 98373 - DNA, 25 bp, Artificial
  probe
  misc_feature (1)..(25): SEQ ID NO: 6424; WAN024BXL_at; Start 249; Stop 273
aatgcttgataaattaaatgtagcc

SEQ ID NO: 98374 - DNA, 25 bp, Artificial
  probe
  misc_feature (1)..(25): SEQ ID NO: 6424; WAN024BXL_at; Start 127; Stop 151
caattcgcttttggatggacagagt

SEQ ID NO: 98375 - DNA, 25 bp, Artificial
  probe
  misc_feature (1)..(25): SEQ ID NO: 6424; WAN024BXL_at; Start 173; Stop 197
aagagcgttaccttctcgattctgg

SEQ ID NO: 98376 - DNA, 25 bp, Artificial
  probe
  misc_feature (1)..(25): SEQ ID NO: 6424; WAN024BXL_at; Start 41; Stop 65
cagtagctaaggaaactttaatcca

SEQ ID NO: 98377 - DNA, 25 bp, Artificial
  probe
  misc_feature (1)..(25): SEQ ID NO: 6424; WAN024BXL_at; Start 30; Stop 54
catcttcaaagcagtagctaaggaa

SEQ ID NO: 98378 - DNA, 25 bp, Artificial
  probe
  misc_feature (1)..(25): SEQ ID NO: 6424; WAN024BXL_at; Start 192; Stop 216
ttctggtttcactcaagaggaaatc

SEQ ID NO: 98379 - DNA, 25 bp, Artificial
  probe
  misc_feature (1)..(25): SEQ ID NO: 6424; WAN024BXL_at; Start 16; Stop 40
gagaaagcaatcaacatcttcaaag

SEQ ID NO: 98380 - DNA, 25 bp, Artificial
  probe
  misc_feature (1)..(25): SEQ ID NO: 6424; WAN024BXL_at; Start 95; Stop 119
gccagcttgaagcattctgtactaa

SEQ ID NO: 98381 - DNA, 25 bp, Artificial
  probe
  misc_feature (1)..(25): SEQ ID NO: 6424; WAN024BXL_at; Start 76; Stop 100
gaggaaaacttcctttacagccagc

SEQ ID NO: 98382 - DNA, 25 bp, Artificial
  probe
  misc_feature (1)..(25): SEQ ID NO: 6424; WAN024BXL_at; Start 239; Stop 263
catttgcaggaatgcttgataaatt

SEQ ID NO: 98383 - DNA, 25 bp, Artificial
  probe
  misc_feature (1)..(25): SEQ ID NO: 6424; WAN024BXL_at; Start 2; Stop 26
tgaacacattaaacgagaaagcaat

SEQ ID NO: 98384 - DNA, 25 bp, Artificial
  probe
  misc_feature (1)..(25): SEQ ID NO: 6424; WAN024BXL_at; Start 35; Stop 59
tcaaagcagtagctaaggaaacttt

SEQ ID NO: 98385 - DNA, 25 bp, Artificial
  probe
  misc_feature (1)..(25): SEQ ID NO: 6424; WAN024BXL_at; Start 155; Stop 179
cagaggagattgaacgccaagagcg

SEQ ID NO: 98386 - DNA, 25 bp, Artificial
  probe
  misc_feature (1)..(25): SEQ ID NO: 6424; WAN024BXL_at; Start 189; Stop 213
cgattctggtttcactcaagaggaa

SEQ ID NO: 98387 - DNA, 25 bp, Artificial
  probe
  misc_feature (1)..(25): SEQ ID NO: 6399; WAN024BXM_at; Start 31; Stop 55
aataatctaagtttttacatggagc

SEQ ID NO: 98388 - DNA, 25 bp, Artificial
  probe
  misc_feature (1)..(25): SEQ ID NO: 6399; WAN024BXM_at; Start 71; Stop 95
gaaatacattatgtgcagacttgga

SEQ ID NO: 98389 - DNA, 25 bp, Artificial
  probe
  misc_feature (1)..(25): SEQ ID NO: 6399; WAN024BXM_at; Start 108; Stop 132
tacagttcgcgactggctgaaagga

SEQ ID NO: 98390 - DNA, 25 bp, Artificial
  probe
  misc_feature (1)..(25): SEQ ID NO: 6399; WAN024BXM_at; Start 101; Stop 125
aatacactacagttcgcgactggct

SEQ ID NO: 98391 - DNA, 25 bp, Artificial
  probe
  misc_feature (1)..(25): SEQ ID NO: 6399; WAN024BXM_at; Start 106; Stop 130
actacagttcgcgactggctgaaag

SEQ ID NO: 98392 - DNA, 25 bp, Artificial
  probe
  misc_feature (1)..(25): SEQ ID NO: 6399; WAN024BXM_at; Start 103; Stop 127
tacactacagttcgcgactggctga

SEQ ID NO: 98393 - DNA, 25 bp, Artificial
  probe
  misc_feature (1)..(25): SEQ ID NO: 6399; WAN024BXM_at; Start 112; Stop 136
gttcgcgactggctgaaaggaataa

SEQ ID NO: 98394 - DNA, 25 bp, Artificial
  probe
  misc_feature (1)..(25): SEQ ID NO: 6399; WAN024BXM_at; Start 114; Stop 138
tcgcgactggctgaaaggaataact

SEQ ID NO: 98395 - DNA, 25 bp, Artificial
  probe
  misc_feature (1)..(25): SEQ ID NO: 6399; WAN024BXM_at; Start 94; Stop 118
gatttaaaatacactacagttcgcg

SEQ ID NO: 98396 - DNA, 25 bp, Artificial
  probe
  misc_feature (1)..(25): SEQ ID NO: 6399; WAN024BXM_at; Start 62; Stop 86
gggtagacagaaatacattatgtgc

SEQ ID NO: 98397 - DNA, 25 bp, Artificial
  probe
  misc_feature (1)..(25): SEQ ID NO: 6399; WAN024BXM_at; Start 119; Stop 143
actggctgaaaggaataacttatcc

SEQ ID NO: 98398 - DNA, 25 bp, Artificial
  probe
  misc_feature (1)..(25): SEQ ID NO: 6399; WAN024BXM_at; Start 117; Stop 141
cgactggctgaaaggaataacttat

SEQ ID NO: 98399 - DNA, 25 bp, Artificial
  probe
  misc_feature (1)..(25): SEQ ID NO: 6399; WAN024BXM_at; Start 75; Stop 99
tacattatgtgcagacttggattta

SEQ ID NO: 98400 - DNA, 25 bp, Artificial
  probe
  misc_feature (1)..(25): SEQ ID NO: 6399; WAN024BXM_at; Start 88; Stop 112
gacttggatttaaaatacactacag

SEQ ID NO: 98401 - DNA, 25 bp, Artificial
  probe
  misc_feature (1)..(25): SEQ ID NO: 6399; WAN024BXM_at; Start 122; Stop 146
ggctgaaaggaataacttatcctcg

SEQ ID NO: 98402 - DNA, 25 bp, Artificial
  probe
  misc_feature (1)..(25): SEQ ID NO: 6399; WAN024BXM_at; Start 115; Stop 139
cgcgactggctgaaaggaataactt

SEQ ID NO: 98403 - DNA, 25 bp, Artificial
  probe
  misc_feature (1)..(25): SEQ ID NO: 6399; WAN024BXM_at; Start 46; Stop 70
tacatggagcaaaaaggggtagaca

SEQ ID NO: 98404 - DNA, 25 bp, Artificial
  probe
  misc_feature (1)..(25): SEQ ID NO: 6399; WAN024BXM_at; Start 28; Stop 52
gccaataatctaagtttttacatgg

SEQ ID NO: 98405 - DNA, 25 bp, Artificial
  probe
  misc_feature (1)..(25): SEQ ID NO: 6399; WAN024BXM_at; Start 139; Stop 163
tatcctcgtattggtaaaattgaac

SEQ ID NO: 98406 - DNA, 25 bp, Artificial
  probe
  misc_feature (1)..(25): SEQ ID NO: 6399; WAN024BXM_at; Start 82; Stop 106
tgtgcagacttggatttaaaataca

SEQ ID NO: 98407 - DNA, 25 bp, Artificial
  probe
  misc_feature (1)..(25): SEQ ID NO: 6399; WAN024BXM_at; Start 85; Stop 109
gcagacttggatttaaaatacacta

SEQ ID NO: 98408 - DNA, 25 bp, Artificial
  probe
  misc_feature (1)..(25): SEQ ID NO: 6399; WAN024BXM_at; Start 34; Stop 58
aatctaagtttttacatggagcaaa

SEQ ID NO: 98409 - DNA, 25 bp, Artificial
  probe
  misc_feature (1)..(25): SEQ ID NO: 6399; WAN024BXM_at; Start 116; Stop 140
gcgactggctgaaaggaataactta

SEQ ID NO: 98410 - DNA, 25 bp, Artificial
  probe
  misc_feature (1)..(25): SEQ ID NO: 6399; WAN024BXM_at; Start 147; Stop 171
tattggtaaaattgaacttttggca

SEQ ID NO: 98411 - DNA, 25 bp, Artificial
  probe
  misc_feature (1)..(25): SEQ ID NO: 6399; WAN024BXM_at; Start 18; Stop 42
agaaatttttgccaataatctaagt

SEQ ID NO: 98412 - DNA, 25 bp, Artificial
  probe
  misc_feature (1)..(25): SEQ ID NO: 6399; WAN024BXM_at; Start 77; Stop 101
cattatgtgcagacttggatttaaa

SEQ ID NO: 98413 - DNA, 25 bp, Artificial
  probe
  misc_feature (1)..(25): SEQ ID NO: 6399; WAN024BXM_at; Start 92; Stop 116
tggatttaaaatacactacagttcg

SEQ ID NO: 98414 - DNA, 25 bp, Artificial
  probe
  misc_feature (1)..(25): SEQ ID NO: 6399; WAN024BXM_at; Start 125; Stop 149
tgaaaggaataacttatcctcgtat

SEQ ID NO: 98415 - DNA, 25 bp, Artificial
  probe
  misc_feature (1)..(25): SEQ ID NO: 6399; WAN024BXM_at; Start 96; Stop 120
tttaaaatacactacagttcgcgac

SEQ ID NO: 98416 - DNA, 25 bp, Artificial
  probe
  misc_feature (1)..(25): SEQ ID NO: 6399; WAN024BXM_at; Start 67; Stop 91
gacagaaatacattatgtgcagact

SEQ ID NO: 98417 - DNA, 25 bp, Artificial
  probe
  misc_feature (1)..(25): SEQ ID NO: 6399; WAN024BXM_at; Start 37; Stop 61
ctaagtttttacatggagcaaaaag

SEQ ID NO: 98418 - DNA, 25 bp, Artificial
  probe
  misc_feature (1)..(25): SEQ ID NO: 6399; WAN024BXM_at; Start 100; Stop 124
aaatacactacagttcgcgactggc

SEQ ID NO: 98419 - DNA, 25 bp, Artificial
  probe
  misc_feature (1)..(25): SEQ ID NO: 6399; WAN024BXM_at; Start 110; Stop 134
cagttcgcgactggctgaaaggaat

SEQ ID NO: 98420 - DNA, 25 bp, Artificial
  probe
  misc_feature (1)..(25): SEQ ID NO: 6399; WAN024BXM_at; Start 98; Stop 122
taaaatacactacagttcgcgactg

SEQ ID NO: 98421 - DNA, 25 bp, Artificial
  probe
  misc_feature (1)..(25): SEQ ID NO: 7670; WAN024BXN_at; Start 65; Stop 89
cagatagaagtgatcctgagtcacg

SEQ ID NO: 98422 - DNA, 25 bp, Artificial
  probe
  misc_feature (1)..(25): SEQ ID NO: 7670; WAN024BXN_at; Start 4; Stop 28
tatacacgaggaaagatgtacgact

SEQ ID NO: 98423 - DNA, 25 bp, Artificial
  probe
  misc_feature (1)..(25): SEQ ID NO: 7670; WAN024BXN_at; Start 71; Stop 95
gaagtgatcctgagtcacggttatc

SEQ ID NO: 98424 - DNA, 25 bp, Artificial
  probe
  misc_feature (1)..(25): SEQ ID NO: 7670; WAN024BXN_at; Start 42; Stop 66
ctatcactataaagagaaaacgaca

SEQ ID NO: 98425 - DNA, 25 bp, Artificial
  probe
  misc_feature (1)..(25): SEQ ID NO: 7670; WAN024BXN_at; Start 11; Stop 35
gaggaaagatgtacgacttatcccg

SEQ ID NO: 98426 - DNA, 25 bp, Artificial
  probe
  misc_feature (1)..(25): SEQ ID NO: 7670; WAN024BXN_at; Start 76; Stop 100
gatcctgagtcacggttatctttaa

SEQ ID NO: 98427 - DNA, 25 bp, Artificial
  probe
  misc_feature (1)..(25): SEQ ID NO: 7670; WAN024BXN_at; Start 29; Stop 53
tatcccgtgaggtctatcactataa

SEQ ID NO: 98428 - DNA, 25 bp, Artificial
  probe
  misc_feature (1)..(25): SEQ ID NO: 7670; WAN024BXN_at; Start 8; Stop 32
cacgaggaaagatgtacgacttatc

SEQ ID NO: 98429 - DNA, 25 bp, Artificial
  probe
  misc_feature (1)..(25): SEQ ID NO: 7670; WAN024BXN_at; Start 17; Stop 41
agatgtacgacttatcccgtgaggt

SEQ ID NO: 98430 - DNA, 25 bp, Artificial
  probe
  misc_feature (1)..(25): SEQ ID NO: 7670; WAN024BXN_at; Start 67; Stop 91
gatagaagtgatcctgagtcacggt

SEQ ID NO: 98431 - DNA, 25 bp, Artificial
  probe
  misc_feature (1)..(25): SEQ ID NO: 7670; WAN024BXN_at; Start 69; Stop 93
tagaagtgatcctgagtcacggtta

SEQ ID NO: 98432 - DNA, 25 bp, Artificial
  probe
  misc_feature (1)..(25): SEQ ID NO: 7670; WAN024BXN_at; Start 18; Stop 42
gatgtacgacttatcccgtgaggtc

SEQ ID NO: 98433 - DNA, 25 bp, Artificial
  probe
  misc_feature (1)..(25): SEQ ID NO: 7670; WAN024BXN_at; Start 62; Stop 86
cgacagatagaagtgatcctgagtc

SEQ ID NO: 98434 - DNA, 25 bp, Artificial
  probe
  misc_feature (1)..(25): SEQ ID NO: 7670; WAN024BXN_at; Start 31; Stop 55
tcccgtgaggtctatcactataaag

SEQ ID NO: 98435 - DNA, 25 bp, Artificial
  probe
  misc_feature (1)..(25): SEQ ID NO: 7670; WAN024BXN_at; Start 25; Stop 49
gacttatcccgtgaggtctatcact

SEQ ID NO: 98436 - DNA, 25 bp, Artificial
  probe
  misc_feature (1)..(25): SEQ ID NO: 7670; WAN024BXN_at; Start 10; Stop 34
cgaggaaagatgtacgacttatccc

SEQ ID NO: 98437 - DNA, 25 bp, Artificial
  probe
  misc_feature (1)..(25): SEQ ID NO: 7670; WAN024BXN_at; Start 72; Stop 96
aagtgatcctgagtcacggttatct

SEQ ID NO: 98438 - DNA, 25 bp, Artificial
  probe
  misc_feature (1)..(25): SEQ ID NO: 7670; WAN024BXN_at; Start 26; Stop 50
acttatcccgtgaggtctatcacta

SEQ ID NO: 98439 - DNA, 25 bp, Artificial
  probe
  misc_feature (1)..(25): SEQ ID NO: 7670; WAN024BXN_at; Start 78; Stop 102
tcctgagtcacggttatctttaaaa

SEQ ID NO: 98440 - DNA, 25 bp, Artificial
  probe
  misc_feature (1)..(25): SEQ ID NO: 7670; WAN024BXN_at; Start 34; Stop 58
cgtgaggtctatcactataaagaga

SEQ ID NO: 98441 - DNA, 25 bp, Artificial
  probe
  misc_feature (1)..(25): SEQ ID NO: 7670; WAN024BXN_at; Start 6; Stop 30
tacacgaggaaagatgtacgactta

SEQ ID NO: 98442 - DNA, 25 bp, Artificial
  probe
  misc_feature (1)..(25): SEQ ID NO: 7670; WAN024BXN_at; Start 32; Stop 56
cccgtgaggtctatcactataaaga

SEQ ID NO: 98443 - DNA, 25 bp, Artificial
  probe
  misc_feature (1)..(25): SEQ ID NO: 7670; WAN024BXN_at; Start 39; Stop 63
ggtctatcactataaagagaaaacg

SEQ ID NO: 98444 - DNA, 25 bp, Artificial
  probe
  misc_feature (1)..(25): SEQ ID NO: 7670; WAN024BXN_at; Start 1; Stop 25
ttgtatacacgaggaaagatgtacg

SEQ ID NO: 98445 - DNA, 25 bp, Artificial
  probe
  misc_feature (1)..(25): SEQ ID NO: 7670; WAN024BXN_at; Start 16; Stop 40
aagatgtacgacttatcccgtgagg

SEQ ID NO: 98446 - DNA, 25 bp, Artificial
  probe
  misc_feature (1)..(25): SEQ ID NO: 7670; WAN024BXN_at; Start 59; Stop 83
aaacgacagatagaagtgatcctga

SEQ ID NO: 98447 - DNA, 25 bp, Artificial
  probe
  misc_feature (1)..(25): SEQ ID NO: 7670; WAN024BXN_at; Start 36; Stop 60
tgaggtctatcactataaagagaaa

SEQ ID NO: 98448 - DNA, 25 bp, Artificial
  probe
  misc_feature (1)..(25): SEQ ID NO: 7670; WAN024BXN_at; Start 23; Stop 47
acgacttatcccgtgaggtctatca

SEQ ID NO: 98449 - DNA, 25 bp, Artificial
  probe
  misc_feature (1)..(25): SEQ ID NO: 7670; WAN024BXN_at; Start 24; Stop 48
cgacttatcccgtgaggtctatcac

SEQ ID NO: 98450 - DNA, 25 bp, Artificial
  probe
  misc_feature (1)..(25): SEQ ID NO: 7670; WAN024BXN_at; Start 2; Stop 26
tgtatacacgaggaaagatgtacga

SEQ ID NO: 98451 - DNA, 25 bp, Artificial
  probe
  misc_feature (1)..(25): SEQ ID NO: 7670; WAN024BXN_at; Start 58; Stop 82
aaaacgacagatagaagtgatcctg

SEQ ID NO: 98452 - DNA, 25 bp, Artificial
  probe
  misc_feature (1)..(25): SEQ ID NO: 7670; WAN024BXN_at; Start 20; Stop 44
tgtacgacttatcccgtgaggtcta

SEQ ID NO: 98453 - DNA, 25 bp, Artificial
  probe
  misc_feature (1)..(25): SEQ ID NO: 7670; WAN024BXN_at; Start 63; Stop 87
gacagatagaagtgatcctgagtca

SEQ ID NO: 98454 - DNA, 25 bp, Artificial
  probe
  misc_feature (1)..(25): SEQ ID NO: 7670; WAN024BXN_at; Start 60; Stop 84
aacgacagatagaagtgatcctgag

SEQ ID NO: 98455 - DNA, 25 bp, Artificial
  probe
  misc_feature (1)..(25): SEQ ID NO: 7313; WAN024BXO_at; Start 47; Stop 71
aaactcacatggataattgggcatc

SEQ ID NO: 98456 - DNA, 25 bp, Artificial
  probe
  misc_feature (1)..(25): SEQ ID NO: 7313; WAN024BXO_at; Start 53; Stop 77
acatggataattgggcatcaaaaat

SEQ ID NO: 98457 - DNA, 25 bp, Artificial
  probe
  misc_feature (1)..(25): SEQ ID NO: 7313; WAN024BXO_at; Start 66; Stop 90
ggcatcaaaaatatttgttcatcca

SEQ ID NO: 98458 - DNA, 25 bp, Artificial
  probe
  misc_feature (1)..(25): SEQ ID NO: 7313; WAN024BXO_at; Start 58; Stop 82
gataattgggcatcaaaaatatttg

SEQ ID NO: 98459 - DNA, 25 bp, Artificial
  probe
  misc_feature (1)..(25): SEQ ID NO: 7313; WAN024BXO_at; Start 10; Stop 34
tatgttttttatggtaataatctaa

SEQ ID NO: 98460 - DNA, 25 bp, Artificial
  probe
  misc_feature (1)..(25): SEQ ID NO: 7313; WAN024BXO_at; Start 69; Stop 93
atcaaaaatatttgttcatccagct

SEQ ID NO: 98461 - DNA, 25 bp, Artificial
  probe
  misc_feature (1)..(25): SEQ ID NO: 7313; WAN024BXO_at; Start 64; Stop 88
tgggcatcaaaaatatttgttcatc

SEQ ID NO: 98462 - DNA, 25 bp, Artificial
  probe
  misc_feature (1)..(25): SEQ ID NO: 7313; WAN024BXO_at; Start 51; Stop 75
tcacatggataattgggcatcaaaa

SEQ ID NO: 98463 - DNA, 25 bp, Artificial
  probe
  misc_feature (1)..(25): SEQ ID NO: 7313; WAN024BXO_at; Start 71; Stop 95
caaaaatatttgttcatccagctgt

SEQ ID NO: 98464 - DNA, 25 bp, Artificial
  probe
  misc_feature (1)..(25): SEQ ID NO: 7313; WAN024BXO_at; Start 59; Stop 83
ataattgggcatcaaaaatatttgt

SEQ ID NO: 98465 - DNA, 25 bp, Artificial
  probe
  misc_feature (1)..(25): SEQ ID NO: 7313; WAN024BXO_at; Start 72; Stop 96
aaaaatatttgttcatccagctgtc

SEQ ID NO: 98466 - DNA, 25 bp, Artificial
  probe
  misc_feature (1)..(25): SEQ ID NO: 7313; WAN024BXO_at; Start 65; Stop 89
gggcatcaaaaatatttgttcatcc

SEQ ID NO: 98467 - DNA, 25 bp, Artificial
  probe
  misc_feature (1)..(25): SEQ ID NO: 7313; WAN024BXO_at; Start 63; Stop 87
ttgggcatcaaaaatatttgttcat

SEQ ID NO: 98468 - DNA, 25 bp, Artificial
  probe
  misc_feature (1)..(25): SEQ ID NO: 7313; WAN024BXO_at; Start 49; Stop 73
actcacatggataattgggcatcaa

SEQ ID NO: 98469 - DNA, 25 bp, Artificial
  probe
  misc_feature (1)..(25): SEQ ID NO: 7313; WAN024BXO_at; Start 56; Stop 80
tggataattgggcatcaaaaatatt

SEQ ID NO: 98470 - DNA, 25 bp, Artificial
  probe
  misc_feature (1)..(25): SEQ ID NO: 7313; WAN024BXO_at; Start 45; Stop 69
tcaaactcacatggataattgggca

SEQ ID NO: 98471 - DNA, 25 bp, Artificial
  probe
  misc_feature (1)..(25): SEQ ID NO: 7313; WAN024BXO_at; Start 62; Stop 86
attgggcatcaaaaatatttgttca

SEQ ID NO: 98472 - DNA, 25 bp, Artificial
  probe
  misc_feature (1)..(25): SEQ ID NO: 7313; WAN024BXO_at; Start 55; Stop 79
atggataattgggcatcaaaaatat

SEQ ID NO: 98473 - DNA, 25 bp, Artificial
  probe
  misc_feature (1)..(25): SEQ ID NO: 7313; WAN024BXO_at; Start 61; Stop 85
aattgggcatcaaaaatatttgttc

SEQ ID NO: 98474 - DNA, 25 bp, Artificial
  probe
  misc_feature (1)..(25): SEQ ID NO: 7313; WAN024BXO_at; Start 54; Stop 78
catggataattgggcatcaaaaata

SEQ ID NO: 98475 - DNA, 25 bp, Artificial
  probe
  misc_feature (1)..(25): SEQ ID NO: 7313; WAN024BXO_at; Start 52; Stop 76
cacatggataattgggcatcaaaaa

SEQ ID NO: 98476 - DNA, 25 bp, Artificial
  probe
  misc_feature (1)..(25): SEQ ID NO: 7313; WAN024BXO_at; Start 57; Stop 81
ggataattgggcatcaaaaatattt

SEQ ID NO: 98477 - DNA, 25 bp, Artificial
  probe
  misc_feature (1)..(25): SEQ ID NO: 7313; WAN024BXO_at; Start 60; Stop 84
taattgggcatcaaaaatatttgtt

SEQ ID NO: 98478 - DNA, 25 bp, Artificial
  probe
  misc_feature (1)..(25): SEQ ID NO: 7313; WAN024BXO_at; Start 46; Stop 70
caaactcacatggataattgggcat

SEQ ID NO: 98479 - DNA, 25 bp, Artificial
  probe
  misc_feature (1)..(25): SEQ ID NO: 7313; WAN024BXO_at; Start 68; Stop 92
catcaaaaatatttgttcatccagc

SEQ ID NO: 98480 - DNA, 25 bp, Artificial
  probe
  misc_feature (1)..(25): SEQ ID NO: 7313; WAN024BXO_at; Start 48; Stop 72
aactcacatggataattgggcatca

SEQ ID NO: 98481 - DNA, 25 bp, Artificial
  probe
  misc_feature (1)..(25): SEQ ID NO: 7313; WAN024BXO_at; Start 70; Stop 94
tcaaaaatatttgttcatccagctg

SEQ ID NO: 98482 - DNA, 25 bp, Artificial
  probe
  misc_feature (1)..(25): SEQ ID NO: 7313; WAN024BXO_at; Start 50; Stop 74
ctcacatggataattgggcatcaaa

SEQ ID NO: 98483 - DNA, 25 bp, Artificial
  probe
  misc_feature (1)..(25): SEQ ID NO: 7313; WAN024BXO_at; Start 67; Stop 91
gcatcaaaaatatttgttcatccag

SEQ ID NO: 98484 - DNA, 25 bp, Artificial
  probe
  misc_feature (1)..(25): SEQ ID NO: 7310; WAN024BXP_at; Start 38; Stop 62
taggagaaaattcaaatgacttata

SEQ ID NO: 98485 - DNA, 25 bp, Artificial
  probe
  misc_feature (1)..(25): SEQ ID NO: 7310; WAN024BXP_at; Start 2; Stop 26
tgggagagaaggaagcaggagcttc

SEQ ID NO: 98486 - DNA, 25 bp, Artificial
  probe
  misc_feature (1)..(25): SEQ ID NO: 7310; WAN024BXP_at; Start 15; Stop 39
agcaggagcttccttctctttttta

SEQ ID NO: 98487 - DNA, 25 bp, Artificial
  probe
  misc_feature (1)..(25): SEQ ID NO: 7310; WAN024BXP_at; Start 16; Stop 40
gcaggagcttccttctcttttttag

SEQ ID NO: 98488 - DNA, 25 bp, Artificial
  probe
  misc_feature (1)..(25): SEQ ID NO: 7310; WAN024BXP_at; Start 40; Stop 64
ggagaaaattcaaatgacttatact

SEQ ID NO: 98489 - DNA, 25 bp, Artificial
  probe
  misc_feature (1)..(25): SEQ ID NO: 7310; WAN024BXP_at; Start 13; Stop 37
gaagcaggagcttccttctcttttt

SEQ ID NO: 98490 - DNA, 25 bp, Artificial
  probe
  misc_feature (1)..(25): SEQ ID NO: 7310; WAN024BXP_at; Start 37; Stop 61
ttaggagaaaattcaaatgacttat

SEQ ID NO: 98491 - DNA, 25 bp, Artificial
  probe
  misc_feature (1)..(25): SEQ ID NO: 7310; WAN024BXP_at; Start 9; Stop 33
gaaggaagcaggagcttccttctct

SEQ ID NO: 98492 - DNA, 25 bp, Artificial
  probe
  misc_feature (1)..(25): SEQ ID NO: 7310; WAN024BXP_at; Start 43; Stop 67
gaaaattcaaatgacttatactttg

SEQ ID NO: 98493 - DNA, 25 bp, Artificial
  probe
  misc_feature (1)..(25): SEQ ID NO: 7310; WAN024BXP_at; Start 11; Stop 35
aggaagcaggagcttccttctcttt

SEQ ID NO: 98494 - DNA, 25 bp, Artificial
  probe
  misc_feature (1)..(25): SEQ ID NO: 7310; WAN024BXP_at; Start 12; Stop 36
ggaagcaggagcttccttctctttt

SEQ ID NO: 98495 - DNA, 25 bp, Artificial
  probe
  misc_feature (1)..(25): SEQ ID NO: 7310; WAN024BXP_at; Start 1; Stop 25
gtgggagagaaggaagcaggagctt

SEQ ID NO: 98496 - DNA, 25 bp, Artificial
  probe
  misc_feature (1)..(25): SEQ ID NO: 7310; WAN024BXP_at; Start 8; Stop 32
agaaggaagcaggagcttccttctc

SEQ ID NO: 98497 - DNA, 25 bp, Artificial
  probe
  misc_feature (1)..(25): SEQ ID NO: 7310; WAN024BXP_at; Start 17; Stop 41
caggagcttccttctcttttttagg

SEQ ID NO: 98498 - DNA, 25 bp, Artificial
  probe
  misc_feature (1)..(25): SEQ ID NO: 7310; WAN024BXP_at; Start 4; Stop 28
ggagagaaggaagcaggagcttcct

SEQ ID NO: 98499 - DNA, 25 bp, Artificial
  probe
  misc_feature (1)..(25): SEQ ID NO: 7310; WAN024BXP_at; Start 41; Stop 65
gagaaaattcaaatgacttatactt

SEQ ID NO: 98500 - DNA, 25 bp, Artificial
  probe
  misc_feature (1)..(25): SEQ ID NO: 7310; WAN024BXP_at; Start 3; Stop 27
gggagagaaggaagcaggagcttcc

SEQ ID NO: 98501 - DNA, 25 bp, Artificial
  probe
  misc_feature (1)..(25): SEQ ID NO: 7310; WAN024BXP_at; Start 20; Stop 44
gagcttccttctcttttttaggaga

SEQ ID NO: 98502 - DNA, 25 bp, Artificial
  probe
  misc_feature (1)..(25): SEQ ID NO: 7310; WAN024BXP_at; Start 10; Stop 34
aaggaagcaggagcttccttctctt

SEQ ID NO: 98503 - DNA, 25 bp, Artificial
  probe
  misc_feature (1)..(25): SEQ ID NO: 7310; WAN024BXP_at; Start 36; Stop 60
tttaggagaaaattcaaatgactta

SEQ ID NO: 98504 - DNA, 25 bp, Artificial
  probe
  misc_feature (1)..(25): SEQ ID NO: 7310; WAN024BXP_at; Start 6; Stop 30
agagaaggaagcaggagcttccttc

SEQ ID NO: 98505 - DNA, 25 bp, Artificial
  probe
  misc_feature (1)..(25): SEQ ID NO: 7310; WAN024BXP_at; Start 5; Stop 29
gagagaaggaagcaggagcttcctt

SEQ ID NO: 98506 - DNA, 25 bp, Artificial
  probe
  misc_feature (1)..(25): SEQ ID NO: 7310; WAN024BXP_at; Start 39; Stop 63
aggagaaaattcaaatgacttatac

SEQ ID NO: 98507 - DNA, 25 bp, Artificial
  probe
  misc_feature (1)..(25): SEQ ID NO: 7310; WAN024BXP_at; Start 42; Stop 66
agaaaattcaaatgacttatacttt

SEQ ID NO: 98508 - DNA, 25 bp, Artificial
  probe
  misc_feature (1)..(25): SEQ ID NO: 7310; WAN024BXP_at; Start 7; Stop 31
gagaaggaagcaggagcttccttct

SEQ ID NO: 98509 - DNA, 25 bp, Artificial
  probe
  misc_feature (1)..(25): SEQ ID NO: 7310; WAN024BXP_at; Start 14; Stop 38
aagcaggagcttccttctctttttt

SEQ ID NO: 98510 - DNA, 25 bp, Artificial
  probe
  misc_feature (1)..(25): SEQ ID NO: 6523; WAN024BXQ_at; Start 436; Stop 460
gaatttcgagcaattgtaggaactc

SEQ ID NO: 98511 - DNA, 25 bp, Artificial
  probe
  misc_feature (1)..(25): SEQ ID NO: 6523; WAN024BXQ_at; Start 394; Stop 418
tcaggacaagagttatttgaaattg

SEQ ID NO: 98512 - DNA, 25 bp, Artificial
  probe
  misc_feature (1)..(25): SEQ ID NO: 6523; WAN024BXQ_at; Start 354; Stop 378
tatcggtcaattcggcaaaaacaca

SEQ ID NO: 98513 - DNA, 25 bp, Artificial
  probe
  misc_feature (1)..(25): SEQ ID NO: 6523; WAN024BXQ_at; Start 76; Stop 100
caagttcaggatctatttaaaacta

SEQ ID NO: 98514 - DNA, 25 bp, Artificial
  probe
  misc_feature (1)..(25): SEQ ID NO: 6523; WAN024BXQ_at; Start 136; Stop 160
gagatgttgacttatctatctgata

SEQ ID NO: 98515 - DNA, 25 bp, Artificial
  probe
  misc_feature (1)..(25): SEQ ID NO: 6523; WAN024BXQ_at; Start 571; Stop 595
cagcctatggcattaaatatgtcgc

SEQ ID NO: 98516 - DNA, 25 bp, Artificial
  probe
  misc_feature (1)..(25): SEQ ID NO: 6523; WAN024BXQ_at; Start 168; Stop 192
caattttgaaaaacaacatcgttct

SEQ ID NO: 98517 - DNA, 25 bp, Artificial
  probe
  misc_feature (1)..(25): SEQ ID NO: 6523; WAN024BXQ_at; Start 445; Stop 469
gcaattgtaggaactcagatggtat

SEQ ID NO: 98518 - DNA, 25 bp, Artificial
  probe
  misc_feature (1)..(25): SEQ ID NO: 6523; WAN024BXQ_at; Start 579; Stop 603
ggcattaaatatgtcgctctataaa

SEQ ID NO: 98519 - DNA, 25 bp, Artificial
  probe
  misc_feature (1)..(25): SEQ ID NO: 6523; WAN024BXQ_at; Start 235; Stop 259
ggattctttagtttatctctcaaag

SEQ ID NO: 98520 - DNA, 25 bp, Artificial
  probe
  misc_feature (1)..(25): SEQ ID NO: 6523; WAN024BXQ_at; Start 559; Stop 583
caagtaagttatcagcctatggcat

SEQ ID NO: 98521 - DNA, 25 bp, Artificial
  probe
  misc_feature (1)..(25): SEQ ID NO: 6523; WAN024BXQ_at; Start 529; Stop 553
gcttacagtcaattgattaaagatg

SEQ ID NO: 98522 - DNA, 25 bp, Artificial
  probe
  misc_feature (1)..(25): SEQ ID NO: 6523; WAN024BXQ_at; Start 152; Stop 176
tatctgataaagctcccaattttga

SEQ ID NO: 98523 - DNA, 25 bp, Artificial
  probe
  misc_feature (1)..(25): SEQ ID NO: 6523; WAN024BXQ_at; Start 217; Stop 241
gaaacaaataacatcataggattct

SEQ ID NO: 98524 - DNA, 25 bp, Artificial
  probe
  misc_feature (1)..(25): SEQ ID NO: 6523; WAN024BXQ_at; Start 514; Stop 538
cagttcggatttgttgcttacagtc

SEQ ID NO: 98525 - DNA, 25 bp, Artificial
  probe
  misc_feature (1)..(25): SEQ ID NO: 6523; WAN024BXQ_at; Start 324; Stop 348
caaaaatattgattatctccctgtg

SEQ ID NO: 98526 - DNA, 25 bp, Artificial
  probe
  misc_feature (1)..(25): SEQ ID NO: 6523; WAN024BXQ_at; Start 61; Stop 85
gataaaactgagaaacaagttcagg

SEQ ID NO: 98527 - DNA, 25 bp, Artificial
  probe
  misc_feature (1)..(25): SEQ ID NO: 6523; WAN024BXQ_at; Start 37; Stop 61
gaaaatattcaagtgctagctcctg

SEQ ID NO: 98528 - DNA, 25 bp, Artificial
  probe
  misc_feature (1)..(25): SEQ ID NO: 6523; WAN024BXQ_at; Start 3; Stop 27
gacaattcaagtaacaccacttaag

SEQ ID NO: 98529 - DNA, 25 bp, Artificial
  probe
  misc_feature (1)..(25): SEQ ID NO: 6523; WAN024BXQ_at; Start 423; Stop 447
tcaaaaaattgaagaatttcgagca

SEQ ID NO: 98530 - DNA, 25 bp, Artificial
  probe
  misc_feature (1)..(25): SEQ ID NO: 6523; WAN024BXQ_at; Start 123; Stop 147
caacggtaatgaagagatgttgact

SEQ ID NO: 98531 - DNA, 25 bp, Artificial
  probe
  misc_feature (1)..(25): SEQ ID NO: 6523; WAN024BXQ_at; Start 455; Stop 479
gaactcagatggtatttttagatag

SEQ ID NO: 98532 - DNA, 25 bp, Artificial
  probe
  misc_feature (1)..(25): SEQ ID NO: 6523; WAN024BXQ_at; Start 498; Stop 522
cattcaattttatgaacagttcgga

SEQ ID NO: 98533 - DNA, 25 bp, Artificial
  probe
  misc_feature (1)..(25): SEQ ID NO: 6523; WAN024BXQ_at; Start 251; Stop 275
ctctcaaagttgttgatatttctga

SEQ ID NO: 98534 - DNA, 25 bp, Artificial
  probe
  misc_feature (1)..(25): SEQ ID NO: 6523; WAN024BXQ_at; Start 339; Stop 363
tctccctgtgttacttatcggtcaa

SEQ ID NO: 98535 - DNA, 25 bp, Artificial
  probe
  misc_feature (1)..(25): SEQ ID NO: 6523; WAN024BXQ_at; Start 109; Stop 133
gaaaatgttgatttcaacggtaatg

SEQ ID NO: 98536 - DNA, 25 bp, Artificial
  probe
  misc_feature (1)..(25): SEQ ID NO: 6523; WAN024BXQ_at; Start 550; Stop 574
gatgatcatcaagtaagttatcagc

SEQ ID NO: 98537 - DNA, 25 bp, Artificial
  probe
  misc_feature (1)..(25): SEQ ID NO: 6523; WAN024BXQ_at; Start 13; Stop 37
gtaacaccacttaagcaatatcttg

SEQ ID NO: 98538 - DNA, 25 bp, Artificial
  probe
  misc_feature (1)..(25): SEQ ID NO: 6523; WAN024BXQ_at; Start 365; Stop 389
tcggcaaaaacacaaagctaaataa

SEQ ID NO: 98539 - DNA, 25 bp, Artificial
  probe
  misc_feature (1)..(25): SEQ ID NO: 6523; WAN024BXQ_at; Start 201; Stop 225
tatcgttgaagaaactgaaacaaat

SEQ ID NO: 98540 - DNA, 25 bp, Artificial
  probe
  misc_feature (1)..(25): SEQ ID NO: 6523; WAN024BXQ_at; Start 48; Stop 72
agtgctagctcctgataaaactgag

SEQ ID NO: 98541 - DNA, 25 bp, Artificial
  probe
  misc_feature (1)..(25): SEQ ID NO: 6523; WAN024BXQ_at; Start 181; Stop 205
caacatcgttctcgtaattttatcg

SEQ ID NO: 98542 - DNA, 25 bp, Artificial
  probe
  misc_feature (1)..(25): SEQ ID NO: 6523; WAN024BXQ_at; Start 381; Stop 405
gctaaataaactatcaggacaagag

SEQ ID NO: 98543 - DNA, 25 bp, Artificial
  probe
  misc_feature (1)..(25): SEQ ID NO: 6523; WAN024BXQ_at; Start 475; Stop 499
gatagtatcaatcatcctaaagtca

SEQ ID NO: 98544 - DNA, 25 bp, Artificial
  probe
  misc_feature (1)..(25): SEQ ID NO: 6878; WAN024BXR_at; Start 29; Stop 53
taaaactaacaaacgaagatgctct

SEQ ID NO: 98545 - DNA, 25 bp, Artificial
  probe
  misc_feature (1)..(25): SEQ ID NO: 6878; WAN024BXR_at; Start 63; Stop 87
taatcataaaccatctaaaaagcta

SEQ ID NO: 98546 - DNA, 25 bp, Artificial
  probe
  misc_feature (1)..(25): SEQ ID NO: 6878; WAN024BXR_at; Start 91; Stop 115
gccgtcttgaaatctattgaatcac

SEQ ID NO: 98547 - DNA, 25 bp, Artificial
  probe
  misc_feature (1)..(25): SEQ ID NO: 6878; WAN024BXR_at; Start 94; Stop 118
gtcttgaaatctattgaatcacagg

SEQ ID NO: 98548 - DNA, 25 bp, Artificial
  probe
  misc_feature (1)..(25): SEQ ID NO: 6878; WAN024BXR_at; Start 103; Stop 127
tctattgaatcacaggacgctaccg

SEQ ID NO: 98549 - DNA, 25 bp, Artificial
  probe
  misc_feature (1)..(25): SEQ ID NO: 6878; WAN024BXR_at; Start 101; Stop 125
aatctattgaatcacaggacgctac

SEQ ID NO: 98550 - DNA, 25 bp, Artificial
  probe
  misc_feature (1)..(25): SEQ ID NO: 6878; WAN024BXR_at; Start 84; Stop 108
gctacaagccgtcttgaaatctatt

SEQ ID NO: 98551 - DNA, 25 bp, Artificial
  probe
  misc_feature (1)..(25): SEQ ID NO: 6878; WAN024BXR_at; Start 82; Stop 106
aagctacaagccgtcttgaaatcta

SEQ ID NO: 98552 - DNA, 25 bp, Artificial
  probe
  misc_feature (1)..(25): SEQ ID NO: 6878; WAN024BXR_at; Start 51; Stop 75
tctaaaaattcttaatcataaacca

SEQ ID NO: 98553 - DNA, 25 bp, Artificial
  probe
  misc_feature (1)..(25): SEQ ID NO: 6878; WAN024BXR_at; Start 106; Stop 130
attgaatcacaggacgctaccgctc

SEQ ID NO: 98554 - DNA, 25 bp, Artificial
  probe
  misc_feature (1)..(25): SEQ ID NO: 6878; WAN024BXR_at; Start 71; Stop 95
aaccatctaaaaagctacaagccgt

SEQ ID NO: 98555 - DNA, 25 bp, Artificial
  probe
  misc_feature (1)..(25): SEQ ID NO: 6878; WAN024BXR_at; Start 27; Stop 51
tataaaactaacaaacgaagatgct

SEQ ID NO: 98556 - DNA, 25 bp, Artificial
  probe
  misc_feature (1)..(25): SEQ ID NO: 6878; WAN024BXR_at; Start 69; Stop 93
taaaccatctaaaaagctacaagcc

SEQ ID NO: 98557 - DNA, 25 bp, Artificial
  probe
  misc_feature (1)..(25): SEQ ID NO: 6878; WAN024BXR_at; Start 73; Stop 97
ccatctaaaaagctacaagccgtct

SEQ ID NO: 98558 - DNA, 25 bp, Artificial
  probe
  misc_feature (1)..(25): SEQ ID NO: 6878; WAN024BXR_at; Start 8; Stop 32
caatcagtttaacacgtgatataaa

SEQ ID NO: 98559 - DNA, 25 bp, Artificial
  probe
  misc_feature (1)..(25): SEQ ID NO: 6878; WAN024BXR_at; Start 126; Stop 150
cgctccaacgaaaaataaactcatt

SEQ ID NO: 98560 - DNA, 25 bp, Artificial
  probe
  misc_feature (1)..(25): SEQ ID NO: 6878; WAN024BXR_at; Start 43; Stop 67
gaagatgctctaaaaattcttaatc

SEQ ID NO: 98561 - DNA, 25 bp, Artificial
  probe
  misc_feature (1)..(25): SEQ ID NO: 6878; WAN024BXR_at; Start 32; Stop 56
aactaacaaacgaagatgctctaaa

SEQ ID NO: 98562 - DNA, 25 bp, Artificial
  probe
  misc_feature (1)..(25): SEQ ID NO: 6878; WAN024BXR_at; Start 76; Stop 100
tctaaaaagctacaagccgtcttga

SEQ ID NO: 98563 - DNA, 25 bp, Artificial
  probe
  misc_feature (1)..(25): SEQ ID NO: 6878; WAN024BXR_at; Start 98; Stop 122
tgaaatctattgaatcacaggacgc

SEQ ID NO: 98564 - DNA, 25 bp, Artificial
  probe
  misc_feature (1)..(25): SEQ ID NO: 6878; WAN024BXR_at; Start 3; Stop 27
ggctacaatcagtttaacacgtgat

SEQ ID NO: 98565 - DNA, 25 bp, Artificial
  probe
  misc_feature (1)..(25): SEQ ID NO: 6878; WAN024BXR_at; Start 20; Stop 44
cacgtgatataaaactaacaaacga

SEQ ID NO: 98566 - DNA, 25 bp, Artificial
  probe
  misc_feature (1)..(25): SEQ ID NO: 6878; WAN024BXR_at; Start 87; Stop 111
acaagccgtcttgaaatctattgaa

SEQ ID NO: 98567 - DNA, 25 bp, Artificial
  probe
  misc_feature (1)..(25): SEQ ID NO: 6878; WAN024BXR_at; Start 138; Stop 162
aaataaactcatttcaaagtatctg

SEQ ID NO: 98568 - DNA, 25 bp, Artificial
  probe
  misc_feature (1)..(25): SEQ ID NO: 6878; WAN024BXR_at; Start 89; Stop 113
aagccgtcttgaaatctattgaatc

SEQ ID NO: 98569 - DNA, 25 bp, Artificial
  probe
  misc_feature (1)..(25): SEQ ID NO: 6878; WAN024BXR_at; Start 125; Stop 149
ccgctccaacgaaaaataaactcat

SEQ ID NO: 98570 - DNA, 25 bp, Artificial
  probe
  misc_feature (1)..(25): SEQ ID NO: 6878; WAN024BXR_at; Start 17; Stop 41
taacacgtgatataaaactaacaaa

SEQ ID NO: 98571 - DNA, 25 bp, Artificial
  probe
  misc_feature (1)..(25): SEQ ID NO: 6878; WAN024BXR_at; Start 78; Stop 102
taaaaagctacaagccgtcttgaaa

SEQ ID NO: 98572 - DNA, 25 bp, Artificial
  probe
  misc_feature (1)..(25): SEQ ID NO: 6878; WAN024BXR_at; Start 1; Stop 25
atggctacaatcagtttaacacgtg

SEQ ID NO: 98573 - DNA, 25 bp, Artificial
  probe
  misc_feature (1)..(25): SEQ ID NO: 6878; WAN024BXR_at; Start 118; Stop 142
gacgctaccgctccaacgaaaaata

SEQ ID NO: 98574 - DNA, 25 bp, Artificial
  probe
  misc_feature (1)..(25): SEQ ID NO: 6878; WAN024BXR_at; Start 99; Stop 123
gaaatctattgaatcacaggacgct

SEQ ID NO: 98575 - DNA, 25 bp, Artificial
  probe
  misc_feature (1)..(25): SEQ ID NO: 6878; WAN024BXR_at; Start 105; Stop 129
tattgaatcacaggacgctaccgct

SEQ ID NO: 98576 - DNA, 25 bp, Artificial
  probe
  misc_feature (1)..(25): SEQ ID NO: 6878; WAN024BXR_at; Start 108; Stop 132
tgaatcacaggacgctaccgctcca

SEQ ID NO: 98577 - DNA, 25 bp, Artificial
  probe
  misc_feature (1)..(25): SEQ ID NO: 6878; WAN024BXR_at; Start 38; Stop 62
caaacgaagatgctctaaaaattct

SEQ ID NO: 98578 - DNA, 25 bp, Artificial
  probe
  misc_feature (1)..(25): SEQ ID NO: 6561; WAN024BXS_at; Start 91; Stop 115
ttttgttctggtgtccgccaccgct

SEQ ID NO: 98579 - DNA, 25 bp, Artificial
  probe
  misc_feature (1)..(25): SEQ ID NO: 6561; WAN024BXS_at; Start 23; Stop 47
cacctagtcagtcggtttattctgg

SEQ ID NO: 98580 - DNA, 25 bp, Artificial
  probe
  misc_feature (1)..(25): SEQ ID NO: 6561; WAN024BXS_at; Start 66; Stop 90
ccttacgtccaagattgctatcgga

SEQ ID NO: 98581 - DNA, 25 bp, Artificial
  probe
  misc_feature (1)..(25): SEQ ID NO: 6561; WAN024BXS_at; Start 99; Stop 123
tggtgtccgccaccgcttggccctt

SEQ ID NO: 98582 - DNA, 25 bp, Artificial
  probe
  misc_feature (1)..(25): SEQ ID NO: 6561; WAN024BXS_at; Start 11; Stop 35
gaacctgtaagccacctagtcagtc

SEQ ID NO: 98583 - DNA, 25 bp, Artificial
  probe
  misc_feature (1)..(25): SEQ ID NO: 6561; WAN024BXS_at; Start 194; Stop 218
gctacaaacgcaagagaaaaactta

SEQ ID NO: 98584 - DNA, 25 bp, Artificial
  probe
  misc_feature (1)..(25): SEQ ID NO: 6561; WAN024BXS_at; Start 32; Stop 56
agtcggtttattctggtgtctgcca

SEQ ID NO: 98585 - DNA, 25 bp, Artificial
  probe
  misc_feature (1)..(25): SEQ ID NO: 6561; WAN024BXS_at; Start 132; Stop 156
gattactatcagattgaccatgagc

SEQ ID NO: 98586 - DNA, 25 bp, Artificial
  probe
  misc_feature (1)..(25): SEQ ID NO: 6561; WAN024BXS_at; Start 45; Stop 69
tggtgtctgccaccgcttggccctt

SEQ ID NO: 98587 - DNA, 25 bp, Artificial
  probe
  misc_feature (1)..(25): SEQ ID NO: 6561; WAN024BXS_at; Start 27; Stop 51
tagtcagtcggtttattctggtgtc

SEQ ID NO: 98588 - DNA, 25 bp, Artificial
  probe
  misc_feature (1)..(25): SEQ ID NO: 6561; WAN024BXS_at; Start 36; Stop 60
ggtttattctggtgtctgccaccgc

SEQ ID NO: 98589 - DNA, 25 bp, Artificial
  probe
  misc_feature (1)..(25): SEQ ID NO: 6561; WAN024BXS_at; Start 164; Stop 188
tcatctactccattattctaacgaa

SEQ ID NO: 98590 - DNA, 25 bp, Artificial
  probe
  misc_feature (1)..(25): SEQ ID NO: 6561; WAN024BXS_at; Start 237; Stop 261
taaaaaacatacactatcttcagat

SEQ ID NO: 98591 - DNA, 25 bp, Artificial
  probe
  misc_feature (1)..(25): SEQ ID NO: 6561; WAN024BXS_at; Start 185; Stop 209
cgaatatgagctacaaacgcaagag

SEQ ID NO: 98592 - DNA, 25 bp, Artificial
  probe
  misc_feature (1)..(25): SEQ ID NO: 6561; WAN024BXS_at; Start 143; Stop 167
gattgaccatgagccaactactcat

SEQ ID NO: 98593 - DNA, 25 bp, Artificial
  probe
  misc_feature (1)..(25): SEQ ID NO: 6561; WAN024BXS_at; Start 230; Stop 254
tacactataaaaaacatacactatc

SEQ ID NO: 98594 - DNA, 25 bp, Artificial
  probe
  misc_feature (1)..(25): SEQ ID NO: 6561; WAN024BXS_at; Start 180; Stop 204
tctaacgaatatgagctacaaacgc

SEQ ID NO: 98595 - DNA, 25 bp, Artificial
  probe
  misc_feature (1)..(25): SEQ ID NO: 6561; WAN024BXS_at; Start 84; Stop 108
tatcggattttgttctggtgtccgc

SEQ ID NO: 98596 - DNA, 25 bp, Artificial
  probe
  misc_feature (1)..(25): SEQ ID NO: 6561; WAN024BXS_at; Start 14; Stop 38
cctgtaagccacctagtcagtcggt

SEQ ID NO: 98597 - DNA, 25 bp, Artificial
  probe
  misc_feature (1)..(25): SEQ ID NO: 6561; WAN024BXS_at; Start 71; Stop 95
cgtccaagattgctatcggattttg

SEQ ID NO: 98598 - DNA, 25 bp, Artificial
  probe
  misc_feature (1)..(25): SEQ ID NO: 6561; WAN024BXS_at; Start 118; Stop 142
gcccttatgtccaagattactatca

SEQ ID NO: 98599 - DNA, 25 bp, Artificial
  probe
  misc_feature (1)..(25): SEQ ID NO: 6561; WAN024BXS_at; Start 18; Stop 42
taagccacctagtcagtcggtttat

SEQ ID NO: 98600 - DNA, 25 bp, Artificial
  probe
  misc_feature (1)..(25): SEQ ID NO: 6561; WAN024BXS_at; Start 135; Stop 159
tactatcagattgaccatgagccaa

SEQ ID NO: 98601 - DNA, 25 bp, Artificial
  probe
  misc_feature (1)..(25): SEQ ID NO: 6561; WAN024BXS_at; Start 74; Stop 98
ccaagattgctatcggattttgttc

SEQ ID NO: 98602 - DNA, 25 bp, Artificial
  probe
  misc_feature (1)..(25): SEQ ID NO: 6561; WAN024BXS_at; Start 214; Stop 238
acttattttggatttatacactata

SEQ ID NO: 98603 - DNA, 25 bp, Artificial
  probe
  misc_feature (1)..(25): SEQ ID NO: 6561; WAN024BXS_at; Start 202; Stop 226
cgcaagagaaaaacttattttggat

SEQ ID NO: 98604 - DNA, 25 bp, Artificial
  probe
  misc_feature (1)..(25): SEQ ID NO: 6561; WAN024BXS_at; Start 189; Stop 213
tatgagctacaaacgcaagagaaaa

SEQ ID NO: 98605 - DNA, 25 bp, Artificial
  probe
  misc_feature (1)..(25): SEQ ID NO: 6561; WAN024BXS_at; Start 140; Stop 164
tcagattgaccatgagccaactact

SEQ ID NO: 98606 - DNA, 25 bp, Artificial
  probe
  misc_feature (1)..(25): SEQ ID NO: 6561; WAN024BXS_at; Start 89; Stop 113
gattttgttctggtgtccgccaccg

SEQ ID NO: 98607 - DNA, 25 bp, Artificial
  probe
  misc_feature (1)..(25): SEQ ID NO: 6561; WAN024BXS_at; Start 123; Stop 147
tatgtccaagattactatcagattg

SEQ ID NO: 98608 - DNA, 25 bp, Artificial
  probe
  misc_feature (1)..(25): SEQ ID NO: 6561; WAN024BXS_at; Start 153; Stop 177
gagccaactactcatctactccatt

SEQ ID NO: 98609 - DNA, 25 bp, Artificial
  probe
  misc_feature (1)..(25): SEQ ID NO: 6561; WAN024BXS_at; Start 64; Stop 88
gcccttacgtccaagattgctatcg

SEQ ID NO: 98610 - DNA, 25 bp, Artificial
  probe
  misc_feature (1)..(25): SEQ ID NO: 6561; WAN024BXS_at; Start 146; Stop 170
tgaccatgagccaactactcatcta

SEQ ID NO: 98611 - DNA, 25 bp, Artificial
  probe
  misc_feature (1)..(25): SEQ ID NO: 6561; WAN024BXS_at; Start 7; Stop 31
tacagaacctgtaagccacctagtc

SEQ ID NO: 98612 - DNA, 25 bp, Artificial
  probe
  misc_feature (1)..(25): SEQ ID NO: 7395; WAN024BXT_at; Start 54; Stop 78
taaaatgataaaacgttactatcaa

SEQ ID NO: 98613 - DNA, 25 bp, Artificial
  probe
  misc_feature (1)..(25): SEQ ID NO: 7395; WAN024BXT_at; Start 7; Stop 31
gaagtatcacaacaaaaaaagagaa

SEQ ID NO: 98614 - DNA, 25 bp, Artificial
  probe
  misc_feature (1)..(25): SEQ ID NO: 7395; WAN024BXT_at; Start 70; Stop 94
tactatcaaagtaaaaaagatgact

SEQ ID NO: 98615 - DNA, 25 bp, Artificial
  probe
  misc_feature (1)..(25): SEQ ID NO: 7395; WAN024BXT_at; Start 76; Stop 100
caaagtaaaaaagatgacttacaga

SEQ ID NO: 98616 - DNA, 25 bp, Artificial
  probe
  misc_feature (1)..(25): SEQ ID NO: 7395; WAN024BXT_at; Start 68; Stop 92
gttactatcaaagtaaaaaagatga

SEQ ID NO: 98617 - DNA, 25 bp, Artificial
  probe
  misc_feature (1)..(25): SEQ ID NO: 7395; WAN024BXT_at; Start 67; Stop 91
cgttactatcaaagtaaaaaagatg

SEQ ID NO: 98618 - DNA, 25 bp, Artificial
  probe
  misc_feature (1)..(25): SEQ ID NO: 7395; WAN024BXT_at; Start 26; Stop 50
agagaacgagccaaaacctcgttct

SEQ ID NO: 98619 - DNA, 25 bp, Artificial
  probe
  misc_feature (1)..(25): SEQ ID NO: 7395; WAN024BXT_at; Start 75; Stop 99
tcaaagtaaaaaagatgacttacag

SEQ ID NO: 98620 - DNA, 25 bp, Artificial
  probe
  misc_feature (1)..(25): SEQ ID NO: 7395; WAN024BXT_at; Start 14; Stop 38
cacaacaaaaaaagagaacgagcca

SEQ ID NO: 98621 - DNA, 25 bp, Artificial
  probe
  misc_feature (1)..(25): SEQ ID NO: 7395; WAN024BXT_at; Start 73; Stop 97
tatcaaagtaaaaaagatgacttac

SEQ ID NO: 98622 - DNA, 25 bp, Artificial
  probe
  misc_feature (1)..(25): SEQ ID NO: 7395; WAN024BXT_at; Start 71; Stop 95
actatcaaagtaaaaaagatgactt

SEQ ID NO: 98623 - DNA, 25 bp, Artificial
  probe
  misc_feature (1)..(25): SEQ ID NO: 7395; WAN024BXT_at; Start 53; Stop 77
ttaaaatgataaaacgttactatca

SEQ ID NO: 98624 - DNA, 25 bp, Artificial
  probe
  misc_feature (1)..(25): SEQ ID NO: 7395; WAN024BXT_at; Start 13; Stop 37
tcacaacaaaaaaagagaacgagcc

SEQ ID NO: 98625 - DNA, 25 bp, Artificial
  probe
  misc_feature (1)..(25): SEQ ID NO: 7395; WAN024BXT_at; Start 10; Stop 34
gtatcacaacaaaaaaagagaacga

SEQ ID NO: 98626 - DNA, 25 bp, Artificial
  probe
  misc_feature (1)..(25): SEQ ID NO: 7395; WAN024BXT_at; Start 9; Stop 33
agtatcacaacaaaaaaagagaacg

SEQ ID NO: 98627 - DNA, 25 bp, Artificial
  probe
  misc_feature (1)..(25): SEQ ID NO: 7395; WAN024BXT_at; Start 69; Stop 93
ttactatcaaagtaaaaaagatgac

SEQ ID NO: 98628 - DNA, 25 bp, Artificial
  probe
  misc_feature (1)..(25): SEQ ID NO: 7395; WAN024BXT_at; Start 11; Stop 35
tatcacaacaaaaaaagagaacgag

SEQ ID NO: 98629 - DNA, 25 bp, Artificial
  probe
  misc_feature (1)..(25): SEQ ID NO: 7395; WAN024BXT_at; Start 58; Stop 82
atgataaaacgttactatcaaagta

SEQ ID NO: 98630 - DNA, 25 bp, Artificial
  probe
  misc_feature (1)..(25): SEQ ID NO: 7395; WAN024BXT_at; Start 59; Stop 83
tgataaaacgttactatcaaagtaa

SEQ ID NO: 98631 - DNA, 25 bp, Artificial
  probe
  misc_feature (1)..(25): SEQ ID NO: 7395; WAN024BXT_at; Start 6; Stop 30
agaagtatcacaacaaaaaaagaga

SEQ ID NO: 98632 - DNA, 25 bp, Artificial
  probe
  misc_feature (1)..(25): SEQ ID NO: 7395; WAN024BXT_at; Start 2; Stop 26
tgaaagaagtatcacaacaaaaaaa

SEQ ID NO: 98633 - DNA, 25 bp, Artificial
  probe
  misc_feature (1)..(25): SEQ ID NO: 7395; WAN024BXT_at; Start 5; Stop 29
aagaagtatcacaacaaaaaaagag

SEQ ID NO: 98634 - DNA, 25 bp, Artificial
  probe
  misc_feature (1)..(25): SEQ ID NO: 7395; WAN024BXT_at; Start 27; Stop 51
gagaacgagccaaaacctcgttctc

SEQ ID NO: 98635 - DNA, 25 bp, Artificial
  probe
  misc_feature (1)..(25): SEQ ID NO: 7395; WAN024BXT_at; Start 56; Stop 80
aaatgataaaacgttactatcaaag

SEQ ID NO: 98636 - DNA, 25 bp, Artificial
  probe
  misc_feature (1)..(25): SEQ ID NO: 7395; WAN024BXT_at; Start 1; Stop 25
ttgaaagaagtatcacaacaaaaaa

SEQ ID NO: 98637 - DNA, 25 bp, Artificial
  probe
  misc_feature (1)..(25): SEQ ID NO: 7395; WAN024BXT_at; Start 12; Stop 36
atcacaacaaaaaaagagaacgagc

SEQ ID NO: 98638 - DNA, 25 bp, Artificial
  probe
  misc_feature (1)..(25): SEQ ID NO: 7395; WAN024BXT_at; Start 57; Stop 81
aatgataaaacgttactatcaaagt

SEQ ID NO: 98639 - DNA, 25 bp, Artificial
  probe
  misc_feature (1)..(25): SEQ ID NO: 7395; WAN024BXT_at; Start 74; Stop 98
atcaaagtaaaaaagatgacttaca

SEQ ID NO: 98640 - DNA, 25 bp, Artificial
  probe
  misc_feature (1)..(25): SEQ ID NO: 7395; WAN024BXT_at; Start 72; Stop 96
ctatcaaagtaaaaaagatgactta

SEQ ID NO: 98641 - DNA, 25 bp, Artificial
  probe
  misc_feature (1)..(25): SEQ ID NO: 7493; WAN024BXU_at; Start 29; Stop 53
aggaggtgatgatcatgattatgga

SEQ ID NO: 98642 - DNA, 25 bp, Artificial
  probe
  misc_feature (1)..(25): SEQ ID NO: 7493; WAN024BXU_at; Start 52; Stop 76
gaagatttcaacattttggagttag

SEQ ID NO: 98643 - DNA, 25 bp, Artificial
  probe
  misc_feature (1)..(25): SEQ ID NO: 7493; WAN024BXU_at; Start 39; Stop 63
gatcatgattatggaagatttcaac

SEQ ID NO: 98644 - DNA, 25 bp, Artificial
  probe
  misc_feature (1)..(25): SEQ ID NO: 7493; WAN024BXU_at; Start 89; Stop 113
ttcgtgaagaagatacaactaattg

SEQ ID NO: 98645 - DNA, 25 bp, Artificial
  probe
  misc_feature (1)..(25): SEQ ID NO: 7493; WAN024BXU_at; Start 33; Stop 57
ggtgatgatcatgattatggaagat

SEQ ID NO: 98646 - DNA, 25 bp, Artificial
  probe
  misc_feature (1)..(25): SEQ ID NO: 7493; WAN024BXU_at; Start 24; Stop 48
tagaaaggaggtgatgatcatgatt

SEQ ID NO: 98647 - DNA, 25 bp, Artificial
  probe
  misc_feature (1)..(25): SEQ ID NO: 7493; WAN024BXU_at; Start 50; Stop 74
tggaagatttcaacattttggagtt

SEQ ID NO: 98648 - DNA, 25 bp, Artificial
  probe
  misc_feature (1)..(25): SEQ ID NO: 7493; WAN024BXU_at; Start 83; Stop 107
aagaaattcgtgaagaagatacaac

SEQ ID NO: 98649 - DNA, 25 bp, Artificial
  probe
  misc_feature (1)..(25): SEQ ID NO: 7493; WAN024BXU_at; Start 70; Stop 94
gagttagaatttgaagaaattcgtg

SEQ ID NO: 98650 - DNA, 25 bp, Artificial
  probe
  misc_feature (1)..(25): SEQ ID NO: 7493; WAN024BXU_at; Start 90; Stop 114
tcgtgaagaagatacaactaattgg

SEQ ID NO: 98651 - DNA, 25 bp, Artificial
  probe
  misc_feature (1)..(25): SEQ ID NO: 7493; WAN024BXU_at; Start 55; Stop 79
gatttcaacattttggagttagaat

SEQ ID NO: 98652 - DNA, 25 bp, Artificial
  probe
  misc_feature (1)..(25): SEQ ID NO: 7493; WAN024BXU_at; Start 48; Stop 72
tatggaagatttcaacattttggag

SEQ ID NO: 98653 - DNA, 25 bp, Artificial
  probe
  misc_feature (1)..(25): SEQ ID NO: 7493; WAN024BXU_at; Start 3; Stop 27
gatcagattattgttttataataga

SEQ ID NO: 98654 - DNA, 25 bp, Artificial
  probe
  misc_feature (1)..(25): SEQ ID NO: 7493; WAN024BXU_at; Start 42; Stop 66
catgattatggaagatttcaacatt

SEQ ID NO: 98655 - DNA, 25 bp, Artificial
  probe
  misc_feature (1)..(25): SEQ ID NO: 7493; WAN024BXU_at; Start 21; Stop 45
taatagaaaggaggtgatgatcatg

SEQ ID NO: 98656 - DNA, 25 bp, Artificial
  probe
  misc_feature (1)..(25): SEQ ID NO: 7493; WAN024BXU_at; Start 45; Stop 69
gattatggaagatttcaacattttg

SEQ ID NO: 98657 - DNA, 25 bp, Artificial
  probe
  misc_feature (1)..(25): SEQ ID NO: 7493; WAN024BXU_at; Start 63; Stop 87
cattttggagttagaatttgaagaa

SEQ ID NO: 98658 - DNA, 25 bp, Artificial
  probe
  misc_feature (1)..(25): SEQ ID NO: 7493; WAN024BXU_at; Start 82; Stop 106
gaagaaattcgtgaagaagatacaa

SEQ ID NO: 98659 - DNA, 25 bp, Artificial
  probe
  misc_feature (1)..(25): SEQ ID NO: 7493; WAN024BXU_at; Start 99; Stop 123
agatacaactaattggtactttatc

SEQ ID NO: 98660 - DNA, 25 bp, Artificial
  probe
  misc_feature (1)..(25): SEQ ID NO: 7493; WAN024BXU_at; Start 97; Stop 121
gaagatacaactaattggtacttta

SEQ ID NO: 98661 - DNA, 25 bp, Artificial
  probe
  misc_feature (1)..(25): SEQ ID NO: 7493; WAN024BXU_at; Start 81; Stop 105
tgaagaaattcgtgaagaagataca

SEQ ID NO: 98662 - DNA, 25 bp, Artificial
  probe
  misc_feature (1)..(25): SEQ ID NO: 7493; WAN024BXU_at; Start 85; Stop 109
gaaattcgtgaagaagatacaacta

SEQ ID NO: 98663 - DNA, 25 bp, Artificial
  probe
  misc_feature (1)..(25): SEQ ID NO: 7493; WAN024BXU_at; Start 91; Stop 115
cgtgaagaagatacaactaattggt

SEQ ID NO: 98664 - DNA, 25 bp, Artificial
  probe
  misc_feature (1)..(25): SEQ ID NO: 7493; WAN024BXU_at; Start 53; Stop 77
aagatttcaacattttggagttaga

SEQ ID NO: 98665 - DNA, 25 bp, Artificial
  probe
  misc_feature (1)..(25): SEQ ID NO: 7493; WAN024BXU_at; Start 80; Stop 104
ttgaagaaattcgtgaagaagatac

SEQ ID NO: 98666 - DNA, 25 bp, Artificial
  probe
  misc_feature (1)..(25): SEQ ID NO: 7493; WAN024BXU_at; Start 26; Stop 50
gaaaggaggtgatgatcatgattat

SEQ ID NO: 98667 - DNA, 25 bp, Artificial
  probe
  misc_feature (1)..(25): SEQ ID NO: 7493; WAN024BXU_at; Start 41; Stop 65
tcatgattatggaagatttcaacat

SEQ ID NO: 98668 - DNA, 25 bp, Artificial
  probe
  misc_feature (1)..(25): SEQ ID NO: 7493; WAN024BXU_at; Start 93; Stop 117
tgaagaagatacaactaattggtac

SEQ ID NO: 98669 - DNA, 25 bp, Artificial
  probe
  misc_feature (1)..(25): SEQ ID NO: 7493; WAN024BXU_at; Start 36; Stop 60
gatgatcatgattatggaagatttc

SEQ ID NO: 98670 - DNA, 25 bp, Artificial
  probe
  misc_feature (1)..(25): SEQ ID NO: 7493; WAN024BXU_at; Start 60; Stop 84
caacattttggagttagaatttgaa

SEQ ID NO: 98671 - DNA, 25 bp, Artificial
  probe
  misc_feature (1)..(25): SEQ ID NO: 7493; WAN024BXU_at; Start 22; Stop 46
aatagaaaggaggtgatgatcatga

SEQ ID NO: 98672 - DNA, 25 bp, Artificial
  probe
  misc_feature (1)..(25): SEQ ID NO: 7493; WAN024BXU_at; Start 86; Stop 110
aaattcgtgaagaagatacaactaa

SEQ ID NO: 98673 - DNA, 25 bp, Artificial
  probe
  misc_feature (1)..(25): SEQ ID NO: 7493; WAN024BXU_at; Start 94; Stop 118
gaagaagatacaactaattggtact

SEQ ID NO: 98674 - DNA, 25 bp, Artificial
  probe
  misc_feature (1)..(25): SEQ ID NO: 7493; WAN024BXU_at; Start 31; Stop 55
gaggtgatgatcatgattatggaag

SEQ ID NO: 98675 - DNA, 25 bp, Artificial
  probe
  misc_feature (1)..(25): SEQ ID NO: 6837; WAN024BXV_at; Start 656; Stop 680
tattttgttgtatggatgaacctcc

SEQ ID NO: 98676 - DNA, 25 bp, Artificial
  probe
  misc_feature (1)..(25): SEQ ID NO: 6837; WAN024BXV_at; Start 737; Stop 761
tatactgttttagccaacgtagcgc

SEQ ID NO: 98677 - DNA, 25 bp, Artificial
  probe
  misc_feature (1)..(25): SEQ ID NO: 6837; WAN024BXV_at; Start 691; Stop 715
caaagattagtaaatagagcatgct

SEQ ID NO: 98678 - DNA, 25 bp, Artificial
  probe
  misc_feature (1)..(25): SEQ ID NO: 6837; WAN024BXV_at; Start 136; Stop 160
tcttgttgcaatggaattaatagct

SEQ ID NO: 98679 - DNA, 25 bp, Artificial
  probe
  misc_feature (1)..(25): SEQ ID NO: 6837; WAN024BXV_at; Start 497; Stop 521
ggcaatctatgtttacctttaacga

SEQ ID NO: 98680 - DNA, 25 bp, Artificial
  probe
  misc_feature (1)..(25): SEQ ID NO: 6837; WAN024BXV_at; Start 65; Stop 89
taagaattggagctgatgatgttga

SEQ ID NO: 98681 - DNA, 25 bp, Artificial
  probe
  misc_feature (1)..(25): SEQ ID NO: 6837; WAN024BXV_at; Start 873; Stop 897
ctatgatggaaaattaataactgca

SEQ ID NO: 98682 - DNA, 25 bp, Artificial
  probe
  misc_feature (1)..(25): SEQ ID NO: 6837; WAN024BXV_at; Start 925; Stop 949
tcatcatgggttgtgaagaaatggt

SEQ ID NO: 98683 - DNA, 25 bp, Artificial
  probe
  misc_feature (1)..(25): SEQ ID NO: 6837; WAN024BXV_at; Start 396; Stop 420
tggagccggtggttctcatatcgca

SEQ ID NO: 98684 - DNA, 25 bp, Artificial
  probe
  misc_feature (1)..(25): SEQ ID NO: 6837; WAN024BXV_at; Start 31; Stop 55
gatagaatcgtttaccaatggaaga

SEQ ID NO: 98685 - DNA, 25 bp, Artificial
  probe
  misc_feature (1)..(25): SEQ ID NO: 6837; WAN024BXV_at; Start 1014; Stop 1038
ttttagggaagatgaattcaagcac

SEQ ID NO: 98686 - DNA, 25 bp, Artificial
  probe
  misc_feature (1)..(25): SEQ ID NO: 6837; WAN024BXV_at; Start 104; Stop 128
caggatactcagatttttggtcaga

SEQ ID NO: 98687 - DNA, 25 bp, Artificial
  probe
  misc_feature (1)..(25): SEQ ID NO: 6837; WAN024BXV_at; Start 1079; Stop 1103
tcgataaaagtaaactctgggagat

SEQ ID NO: 98688 - DNA, 25 bp, Artificial
  probe
  misc_feature (1)..(25): SEQ ID NO: 6837; WAN024BXV_at; Start 41; Stop 65
tttaccaatggaagaacgacagatt

SEQ ID NO: 98689 - DNA, 25 bp, Artificial
  probe
  misc_feature (1)..(25): SEQ ID NO: 6837; WAN024BXV_at; Start 566; Stop 590
aacgtaattatcagtgtgtagtcac

SEQ ID NO: 98690 - DNA, 25 bp, Artificial
  probe
  misc_feature (1)..(25): SEQ ID NO: 6837; WAN024BXV_at; Start 380; Stop 404
ttaccatactaggatgtggagccgg

SEQ ID NO: 98691 - DNA, 25 bp, Artificial
  probe
  misc_feature (1)..(25): SEQ ID NO: 6837; WAN024BXV_at; Start 267; Stop 291
tagacctgtaaatcaaattgatcac

SEQ ID NO: 98692 - DNA, 25 bp, Artificial
  probe
  misc_feature (1)..(25): SEQ ID NO: 6837; WAN024BXV_at; Start 784; Stop 808
cctaatattcaaaatataggctgtg

SEQ ID NO: 98693 - DNA, 25 bp, Artificial
  probe
  misc_feature (1)..(25): SEQ ID NO: 6837; WAN024BXV_at; Start 1024; Stop 1048
gatgaattcaagcacttctctaagc

SEQ ID NO: 98694 - DNA, 25 bp, Artificial
  probe
  misc_feature (1)..(25): SEQ ID NO: 6837; WAN024BXV_at; Start 1064; Stop 1088
catgtggtcatgatttcgataaaag

SEQ ID NO: 98695 - DNA, 25 bp, Artificial
  probe
  misc_feature (1)..(25): SEQ ID NO: 6837; WAN024BXV_at; Start 54; Stop 78
gaacgacagattaagaattggagct

SEQ ID NO: 98696 - DNA, 25 bp, Artificial
  probe
  misc_feature (1)..(25): SEQ ID NO: 6837; WAN024BXV_at; Start 602; Stop 626
taaaaatgagcactgttgatgctgt

SEQ ID NO: 98697 - DNA, 25 bp, Artificial
  probe
  misc_feature (1)..(25): SEQ ID NO: 6837; WAN024BXV_at; Start 417; Stop 441
cgcattacaattagcccaattaggg

SEQ ID NO: 98698 - DNA, 25 bp, Artificial
  probe
  misc_feature (1)..(25): SEQ ID NO: 6837; WAN024BXV_at; Start 322; Stop 346
tattctagtgaaggtattggtggga

SEQ ID NO: 98699 - DNA, 25 bp, Artificial
  probe
  misc_feature (1)..(25): SEQ ID NO: 6837; WAN024BXV_at; Start 92; Stop 116
tattagaaattacaggatactcaga

SEQ ID NO: 98700 - DNA, 25 bp, Artificial
  probe
  misc_feature (1)..(25): SEQ ID NO: 6837; WAN024BXV_at; Start 251; Stop 275
tattagaaatattagatagacctgt

SEQ ID NO: 98701 - DNA, 25 bp, Artificial
  probe
  misc_feature (1)..(25): SEQ ID NO: 6837; WAN024BXV_at; Start 441; Stop 465
ggtagggcgacttcatttagtcgat

SEQ ID NO: 98702 - DNA, 25 bp, Artificial
  probe
  misc_feature (1)..(25): SEQ ID NO: 6837; WAN024BXV_at; Start 1047; Stop 1071
gcaatctcattgtcctacatgtggt

SEQ ID NO: 98703 - DNA, 25 bp, Artificial
  probe
  misc_feature (1)..(25): SEQ ID NO: 6837; WAN024BXV_at; Start 669; Stop 693
ggatgaacctccttatatagcacaa

SEQ ID NO: 98704 - DNA, 25 bp, Artificial
  probe
  misc_feature (1)..(25): SEQ ID NO: 6837; WAN024BXV_at; Start 751; Stop 775
caacgtagcgcaggtaaactcttat

SEQ ID NO: 98705 - DNA, 25 bp, Artificial
  probe
  misc_feature (1)..(25): SEQ ID NO: 6837; WAN024BXV_at; Start 634; Stop 658
gaaatttctgaaagtgactgggtat

SEQ ID NO: 98706 - DNA, 25 bp, Artificial
  probe
  misc_feature (1)..(25): SEQ ID NO: 6837; WAN024BXV_at; Start 16; Stop 40
ccaaaatggaaccaggatagaatcg

SEQ ID NO: 98707 - DNA, 25 bp, Artificial
  probe
  misc_feature (1)..(25): SEQ ID NO: 6837; WAN024BXV_at; Start 402; Stop 426
cggtggttctcatatcgcattacaa

SEQ ID NO: 98708 - DNA, 25 bp, Artificial
  probe
  misc_feature (1)..(25): SEQ ID NO: 6837; WAN024BXV_at; Start 1093; Stop 1117
ctctgggagattctaaaaattgatg

SEQ ID NO: 98709 - DNA, 25 bp, Artificial
  probe
  misc_feature (1)..(25): SEQ ID NO: 7501; WAN024BXW_at; Start 272; Stop 296
tactgataagtaggattttcaatct

SEQ ID NO: 98710 - DNA, 25 bp, Artificial
  probe
  misc_feature (1)..(25): SEQ ID NO: 7501; WAN024BXW_at; Start 76; Stop 100
ggtactagtattgagcaagtaaatg

SEQ ID NO: 98711 - DNA, 25 bp, Artificial
  probe
  misc_feature (1)..(25): SEQ ID NO: 7501; WAN024BXW_at; Start 232; Stop 256
ggttactgtctagctgaagatttca

SEQ ID NO: 98712 - DNA, 25 bp, Artificial
  probe
  misc_feature (1)..(25): SEQ ID NO: 7501; WAN024BXW_at; Start 59; Stop 83
cattgatgtttgttgcaggtactag

SEQ ID NO: 98713 - DNA, 25 bp, Artificial
  probe
  misc_feature (1)..(25): SEQ ID NO: 7501; WAN024BXW_at; Start 91; Stop 115
caagtaaatgaattaggattttcac

SEQ ID NO: 98714 - DNA, 25 bp, Artificial
  probe
  misc_feature (1)..(25): SEQ ID NO: 7501; WAN024BXW_at; Start 447; Stop 471
tattgagtatgttagtttagaaact

SEQ ID NO: 98715 - DNA, 25 bp, Artificial
  probe
  misc_feature (1)..(25): SEQ ID NO: 7501; WAN024BXW_at; Start 316; Stop 340
ctattgagggaaaagaaaatagtct

SEQ ID NO: 98716 - DNA, 25 bp, Artificial
  probe
  misc_feature (1)..(25): SEQ ID NO: 7501; WAN024BXW_at; Start 147; Stop 171
gaatgaacaatcactaaatgaattg

SEQ ID NO: 98717 - DNA, 25 bp, Artificial
  probe
  misc_feature (1)..(25): SEQ ID NO: 7501; WAN024BXW_at; Start 56; Stop 80
tttcattgatgtttgttgcaggtac

SEQ ID NO: 98718 - DNA, 25 bp, Artificial
  probe
  misc_feature (1)..(25): SEQ ID NO: 7501; WAN024BXW_at; Start 354; Stop 378
tcagtatgaaaatagtaaaaaatct

SEQ ID NO: 98719 - DNA, 25 bp, Artificial
  probe
  misc_feature (1)..(25): SEQ ID NO: 7501; WAN024BXW_at; Start 284; Stop 308
ggattttcaatctttctattactga

SEQ ID NO: 98720 - DNA, 25 bp, Artificial
  probe
  misc_feature (1)..(25): SEQ ID NO: 7501; WAN024BXW_at; Start 179; Stop 203
tgaatggtgcagctattaaaggaga

SEQ ID NO: 98721 - DNA, 25 bp, Artificial
  probe
  misc_feature (1)..(25): SEQ ID NO: 7501; WAN024BXW_at; Start 72; Stop 96
tgcaggtactagtattgagcaagta

SEQ ID NO: 98722 - DNA, 25 bp, Artificial
  probe
  misc_feature (1)..(25): SEQ ID NO: 7501; WAN024BXW_at; Start 186; Stop 210
tgcagctattaaaggagagacatct

SEQ ID NO: 98723 - DNA, 25 bp, Artificial
  probe
  misc_feature (1)..(25): SEQ ID NO: 7501; WAN024BXW_at; Start 227; Stop 251
taagtggttactgtctagctgaaga

SEQ ID NO: 98724 - DNA, 25 bp, Artificial
  probe
  misc_feature (1)..(25): SEQ ID NO: 7501; WAN024BXW_at; Start 137; Stop 161
tacgagcagggaatgaacaatcact

SEQ ID NO: 98725 - DNA, 25 bp, Artificial
  probe
  misc_feature (1)..(25): SEQ ID NO: 7501; WAN024BXW_at; Start 124; Stop 148
gaacatttactaatacgagcaggga

SEQ ID NO: 98726 - DNA, 25 bp, Artificial
  probe
  misc_feature (1)..(25): SEQ ID NO: 7501; WAN024BXW_at; Start 190; Stop 214
gctattaaaggagagacatctagag

SEQ ID NO: 98727 - DNA, 25 bp, Artificial
  probe
  misc_feature (1)..(25): SEQ ID NO: 7501; WAN024BXW_at; Start 291; Stop 315
caatctttctattactgaagatgaa

SEQ ID NO: 98728 - DNA, 25 bp, Artificial
  probe
  misc_feature (1)..(25): SEQ ID NO: 7501; WAN024BXW_at; Start 27; Stop 51
aaaaaatcaagcaagtaaatttgca

SEQ ID NO: 98729 - DNA, 25 bp, Artificial
  probe
  misc_feature (1)..(25): SEQ ID NO: 7501; WAN024BXW_at; Start 195; Stop 219
taaaggagagacatctagagattat

SEQ ID NO: 98730 - DNA, 25 bp, Artificial
  probe
  misc_feature (1)..(25): SEQ ID NO: 7501; WAN024BXW_at; Start 200; Stop 224
gagagacatctagagattatattaa

SEQ ID NO: 98731 - DNA, 25 bp, Artificial
  probe
  misc_feature (1)..(25): SEQ ID NO: 7501; WAN024BXW_at; Start 239; Stop 263
gtctagctgaagatttcaataaaat

SEQ ID NO: 98732 - DNA, 25 bp, Artificial
  probe
  misc_feature (1)..(25): SEQ ID NO: 7501; WAN024BXW_at; Start 370; Stop 394
aaaaaatctattaatgataatcgag

SEQ ID NO: 98733 - DNA, 25 bp, Artificial
  probe
  misc_feature (1)..(25): SEQ ID NO: 7501; WAN024BXW_at; Start 104; Stop 128
taggattttcacatcttattgaaca

SEQ ID NO: 98734 - DNA, 25 bp, Artificial
  probe
  misc_feature (1)..(25): SEQ ID NO: 7501; WAN024BXW_at; Start 429; Stop 453
tattggtactagaggtaatattgag

SEQ ID NO: 98735 - DNA, 25 bp, Artificial
  probe
  misc_feature (1)..(25): SEQ ID NO: 7501; WAN024BXW_at; Start 142; Stop 166
gcagggaatgaacaatcactaaatg

SEQ ID NO: 98736 - DNA, 25 bp, Artificial
  probe
  misc_feature (1)..(25): SEQ ID NO: 7501; WAN024BXW_at; Start 222; Stop 246
taatttaagtggttactgtctagct

SEQ ID NO: 98737 - DNA, 25 bp, Artificial
  probe
  misc_feature (1)..(25): SEQ ID NO: 7501; WAN024BXW_at; Start 305; Stop 329
ctgaagatgaactattgagggaaaa

SEQ ID NO: 98738 - DNA, 25 bp, Artificial
  probe
  misc_feature (1)..(25): SEQ ID NO: 7501; WAN024BXW_at; Start 67; Stop 91
tttgttgcaggtactagtattgagc

SEQ ID NO: 98739 - DNA, 25 bp, Artificial
  probe
  misc_feature (1)..(25): SEQ ID NO: 7501; WAN024BXW_at; Start 167; Stop 191
aattgtttgatatgaatggtgcagc

SEQ ID NO: 98740 - DNA, 25 bp, Artificial
  probe
  misc_feature (1)..(25): SEQ ID NO: 7501; WAN024BXW_at; Start 402; Stop 426
taaaaatagttcttggtcaatagat

SEQ ID NO: 98741 - DNA, 25 bp, Artificial
  probe
  misc_feature (1)..(25): SEQ ID NO: 7501; WAN024BXW_at; Start 131; Stop 155
tactaatacgagcagggaatgaaca

SEQ ID NO: 98742 - DNA, 25 bp, Artificial
  probe
  misc_feature (1)..(25): SEQ ID NO: 7501; WAN024BXW_at; Start 419; Stop 443
caatagatattattggtactagagg

SEQ ID NO: 98743 - DNA, 25 bp, Artificial
  probe
  misc_feature (1)..(25): SEQ ID NO: 7695; WAN024BXX_at; Start 4; Stop 28
tggtctgaaaagaagatggtttcat

SEQ ID NO: 98744 - DNA, 25 bp, Artificial
  probe
  misc_feature (1)..(25): SEQ ID NO: 7695; WAN024BXX_at; Start 140; Stop 164
tttgtaaaaaagttctgaatagcca

SEQ ID NO: 98745 - DNA, 25 bp, Artificial
  probe
  misc_feature (1)..(25): SEQ ID NO: 7695; WAN024BXX_at; Start 15; Stop 39
gaagatggtttcatgtttctcaccc

SEQ ID NO: 98746 - DNA, 25 bp, Artificial
  probe
  misc_feature (1)..(25): SEQ ID NO: 7695; WAN024BXX_at; Start 65; Stop 89
gccttgctcgtttatctcctttcac

SEQ ID NO: 98747 - DNA, 25 bp, Artificial
  probe
  misc_feature (1)..(25): SEQ ID NO: 7695; WAN024BXX_at; Start 46; Stop 70
tgtctaggaaaggaagtgagccttg

SEQ ID NO: 98748 - DNA, 25 bp, Artificial
  probe
  misc_feature (1)..(25): SEQ ID NO: 7695; WAN024BXX_at; Start 82; Stop 106
cctttcactcttagtcccaatgtga

SEQ ID NO: 98749 - DNA, 25 bp, Artificial
  probe
  misc_feature (1)..(25): SEQ ID NO: 7695; WAN024BXX_at; Start 111; Stop 135
gggatttgttgcattactgataaat

SEQ ID NO: 98750 - DNA, 25 bp, Artificial
  probe
  misc_feature (1)..(25): SEQ ID NO: 7695; WAN024BXX_at; Start 79; Stop 103
tctcctttcactcttagtcccaatg

SEQ ID NO: 98751 - DNA, 25 bp, Artificial
  probe
  misc_feature (1)..(25): SEQ ID NO: 7695; WAN024BXX_at; Start 2; Stop 26
tgtggtctgaaaagaagatggtttc

SEQ ID NO: 98752 - DNA, 25 bp, Artificial
  probe
  misc_feature (1)..(25): SEQ ID NO: 7695; WAN024BXX_at; Start 70; Stop 94
gctcgtttatctcctttcactctta

SEQ ID NO: 98753 - DNA, 25 bp, Artificial
  probe
  misc_feature (1)..(25): SEQ ID NO: 7695; WAN024BXX_at; Start 52; Stop 76
ggaaaggaagtgagccttgctcgtt

SEQ ID NO: 98754 - DNA, 25 bp, Artificial
  probe
  misc_feature (1)..(25): SEQ ID NO: 7695; WAN024BXX_at; Start 87; Stop 111
cactcttagtcccaatgtgaaaggg

SEQ ID NO: 98755 - DNA, 25 bp, Artificial
  probe
  misc_feature (1)..(25): SEQ ID NO: 7695; WAN024BXX_at; Start 48; Stop 72
tctaggaaaggaagtgagccttgct

SEQ ID NO: 98756 - DNA, 25 bp, Artificial
  probe
  misc_feature (1)..(25): SEQ ID NO: 7695; WAN024BXX_at; Start 50; Stop 74
taggaaaggaagtgagccttgctcg

SEQ ID NO: 98757 - DNA, 25 bp, Artificial
  probe
  misc_feature (1)..(25): SEQ ID NO: 7695; WAN024BXX_at; Start 62; Stop 86
tgagccttgctcgtttatctccttt

SEQ ID NO: 98758 - DNA, 25 bp, Artificial
  probe
  misc_feature (1)..(25): SEQ ID NO: 7695; WAN024BXX_at; Start 74; Stop 98
gtttatctcctttcactcttagtcc

SEQ ID NO: 98759 - DNA, 25 bp, Artificial
  probe
  misc_feature (1)..(25): SEQ ID NO: 7695; WAN024BXX_at; Start 148; Stop 172
aaagttctgaatagccaaaaaagca

SEQ ID NO: 98760 - DNA, 25 bp, Artificial
  probe
  misc_feature (1)..(25): SEQ ID NO: 7695; WAN024BXX_at; Start 43; Stop 67
ttctgtctaggaaaggaagtgagcc

SEQ ID NO: 98761 - DNA, 25 bp, Artificial
  probe
  misc_feature (1)..(25): SEQ ID NO: 7695; WAN024BXX_at; Start 117; Stop 141
tgttgcattactgataaataaactt

SEQ ID NO: 98762 - DNA, 25 bp, Artificial
  probe
  misc_feature (1)..(25): SEQ ID NO: 7695; WAN024BXX_at; Start 53; Stop 77
gaaaggaagtgagccttgctcgttt

SEQ ID NO: 98763 - DNA, 25 bp, Artificial
  probe
  misc_feature (1)..(25): SEQ ID NO: 7695; WAN024BXX_at; Start 59; Stop 83
aagtgagccttgctcgtttatctcc

SEQ ID NO: 98764 - DNA, 25 bp, Artificial
  probe
  misc_feature (1)..(25): SEQ ID NO: 7695; WAN024BXX_at; Start 44; Stop 68
tctgtctaggaaaggaagtgagcct

SEQ ID NO: 98765 - DNA, 25 bp, Artificial
  probe
  misc_feature (1)..(25): SEQ ID NO: 7695; WAN024BXX_at; Start 77; Stop 101
tatctcctttcactcttagtcccaa

SEQ ID NO: 98766 - DNA, 25 bp, Artificial
  probe
  misc_feature (1)..(25): SEQ ID NO: 7695; WAN024BXX_at; Start 56; Stop 80
aggaagtgagccttgctcgtttatc

SEQ ID NO: 98767 - DNA, 25 bp, Artificial
  probe
  misc_feature (1)..(25): SEQ ID NO: 7695; WAN024BXX_at; Start 45; Stop 69
ctgtctaggaaaggaagtgagcctt

SEQ ID NO: 98768 - DNA, 25 bp, Artificial
  probe
  misc_feature (1)..(25): SEQ ID NO: 7695; WAN024BXX_at; Start 39; Stop 63
ccctttctgtctaggaaaggaagtg

SEQ ID NO: 98769 - DNA, 25 bp, Artificial
  probe
  misc_feature (1)..(25): SEQ ID NO: 7695; WAN024BXX_at; Start 58; Stop 82
gaagtgagccttgctcgtttatctc

SEQ ID NO: 98770 - DNA, 25 bp, Artificial
  probe
  misc_feature (1)..(25): SEQ ID NO: 7695; WAN024BXX_at; Start 121; Stop 145
gcattactgataaataaactttgta

SEQ ID NO: 98771 - DNA, 25 bp, Artificial
  probe
  misc_feature (1)..(25): SEQ ID NO: 7695; WAN024BXX_at; Start 142; Stop 166
tgtaaaaaagttctgaatagccaaa

SEQ ID NO: 98772 - DNA, 25 bp, Artificial
  probe
  misc_feature (1)..(25): SEQ ID NO: 7695; WAN024BXX_at; Start 149; Stop 173
aagttctgaatagccaaaaaagcat

SEQ ID NO: 98773 - DNA, 25 bp, Artificial
  probe
  misc_feature (1)..(25): SEQ ID NO: 7695; WAN024BXX_at; Start 16; Stop 40
aagatggtttcatgtttctcacccc

SEQ ID NO: 98774 - DNA, 25 bp, Artificial
  probe
  misc_feature (1)..(25): SEQ ID NO: 7695; WAN024BXX_at; Start 49; Stop 73
ctaggaaaggaagtgagccttgctc

SEQ ID NO: 98775 - DNA, 25 bp, Artificial
  probe
  misc_feature (1)..(25): SEQ ID NO: 7695; WAN024BXX_at; Start 97; Stop 121
cccaatgtgaaagggggatttgttg

SEQ ID NO: 98776 - DNA, 25 bp, Artificial
  probe
  misc_feature (1)..(25): SEQ ID NO: 7695; WAN024BXX_at; Start 24; Stop 48
ttcatgtttctcaccccctttctgt

SEQ ID NO: 98777 - DNA, 25 bp, Artificial
  probe
  misc_feature (1)..(25): SEQ ID NO: 6326; WAN024BXY_at; Start 78; Stop 102
gattctacatcattacagagggtac

SEQ ID NO: 98778 - DNA, 25 bp, Artificial
  probe
  misc_feature (1)..(25): SEQ ID NO: 6326; WAN024BXY_at; Start 33; Stop 57
tctcattgtaaaggcaacagatggc

SEQ ID NO: 98779 - DNA, 25 bp, Artificial
  probe
  misc_feature (1)..(25): SEQ ID NO: 6326; WAN024BXY_at; Start 99; Stop 123
gtacataacgaagcgttccctacga

SEQ ID NO: 98780 - DNA, 25 bp, Artificial
  probe
  misc_feature (1)..(25): SEQ ID NO: 6326; WAN024BXY_at; Start 62; Stop 86
ccgaagcgattaaccagattctaca

SEQ ID NO: 98781 - DNA, 25 bp, Artificial
  probe
  misc_feature (1)..(25): SEQ ID NO: 6326; WAN024BXY_at; Start 121; Stop 145
cgacttatgaaagatgaatatggca

SEQ ID NO: 98782 - DNA, 25 bp, Artificial
  probe
  misc_feature (1)..(25): SEQ ID NO: 6326; WAN024BXY_at; Start 170; Stop 194
tcttacgtggaagaatggaaaccag

SEQ ID NO: 98783 - DNA, 25 bp, Artificial
  probe
  misc_feature (1)..(25): SEQ ID NO: 6326; WAN024BXY_at; Start 3; Stop 27
gaaaacacaatatcctatgattccc

SEQ ID NO: 98784 - DNA, 25 bp, Artificial
  probe
  misc_feature (1)..(25): SEQ ID NO: 6326; WAN024BXY_at; Start 75; Stop 99
ccagattctacatcattacagaggg

SEQ ID NO: 98785 - DNA, 25 bp, Artificial
  probe
  misc_feature (1)..(25): SEQ ID NO: 6326; WAN024BXY_at; Start 41; Stop 65
taaaggcaacagatggcgataccga

SEQ ID NO: 98786 - DNA, 25 bp, Artificial
  probe
  misc_feature (1)..(25): SEQ ID NO: 6326; WAN024BXY_at; Start 139; Stop 163
tatggcaatcaaagtatggtcgttg

SEQ ID NO: 98787 - DNA, 25 bp, Artificial
  probe
  misc_feature (1)..(25): SEQ ID NO: 6326; WAN024BXY_at; Start 186; Stop 210
ggaaaccagactgattacaaagatt

SEQ ID NO: 98788 - DNA, 25 bp, Artificial
  probe
  misc_feature (1)..(25): SEQ ID NO: 6326; WAN024BXY_at; Start 136; Stop 160
gaatatggcaatcaaagtatggtcg

SEQ ID NO: 98789 - DNA, 25 bp, Artificial
  probe
  misc_feature (1)..(25): SEQ ID NO: 6326; WAN024BXY_at; Start 36; Stop 60
cattgtaaaggcaacagatggcgat

SEQ ID NO: 98790 - DNA, 25 bp, Artificial
  probe
  misc_feature (1)..(25): SEQ ID NO: 6326; WAN024BXY_at; Start 112; Stop 136
cgttccctacgacttatgaaagatg

SEQ ID NO: 98791 - DNA, 25 bp, Artificial
  probe
  misc_feature (1)..(25): SEQ ID NO: 6326; WAN024BXY_at; Start 30; Stop 54
tcctctcattgtaaaggcaacagat

SEQ ID NO: 98792 - DNA, 25 bp, Artificial
  probe
  misc_feature (1)..(25): SEQ ID NO: 6326; WAN024BXY_at; Start 91; Stop 115
tacagagggtacataacgaagcgtt

SEQ ID NO: 98793 - DNA, 25 bp, Artificial
  probe
  misc_feature (1)..(25): SEQ ID NO: 6326; WAN024BXY_at; Start 52; Stop 76
gatggcgataccgaagcgattaacc

SEQ ID NO: 98794 - DNA, 25 bp, Artificial
  probe
  misc_feature (1)..(25): SEQ ID NO: 6326; WAN024BXY_at; Start 191; Stop 215
ccagactgattacaaagattttgtc

SEQ ID NO: 98795 - DNA, 25 bp, Artificial
  probe
  misc_feature (1)..(25): SEQ ID NO: 6326; WAN024BXY_at; Start 148; Stop 172
caaagtatggtcgttgatgaagtct

SEQ ID NO: 98796 - DNA, 25 bp, Artificial
  probe
  misc_feature (1)..(25): SEQ ID NO: 6326; WAN024BXY_at; Start 21; Stop 45
gattccctttcctctcattgtaaag

SEQ ID NO: 98797 - DNA, 25 bp, Artificial
  probe
  misc_feature (1)..(25): SEQ ID NO: 6326; WAN024BXY_at; Start 175; Stop 199
cgtggaagaatggaaaccagactga

SEQ ID NO: 98798 - DNA, 25 bp, Artificial
  probe
  misc_feature (1)..(25): SEQ ID NO: 6326; WAN024BXY_at; Start 108; Stop 132
gaagcgttccctacgacttatgaaa

SEQ ID NO: 98799 - DNA, 25 bp, Artificial
  probe
  misc_feature (1)..(25): SEQ ID NO: 6326; WAN024BXY_at; Start 158; Stop 182
tcgttgatgaagtcttacgtggaag

SEQ ID NO: 98800 - DNA, 25 bp, Artificial
  probe
  misc_feature (1)..(25): SEQ ID NO: 6326; WAN024BXY_at; Start 203; Stop 227
caaagattttgtcatttgaaattaa

SEQ ID NO: 98801 - DNA, 25 bp, Artificial
  probe
  misc_feature (1)..(25): SEQ ID NO: 6326; WAN024BXY_at; Start 85; Stop 109
catcattacagagggtacataacga

SEQ ID NO: 98802 - DNA, 25 bp, Artificial
  probe
  misc_feature (1)..(25): SEQ ID NO: 6326; WAN024BXY_at; Start 173; Stop 197
tacgtggaagaatggaaaccagact

SEQ ID NO: 98803 - DNA, 25 bp, Artificial
  probe
  misc_feature (1)..(25): SEQ ID NO: 6326; WAN024BXY_at; Start 153; Stop 177
tatggtcgttgatgaagtcttacgt

SEQ ID NO: 98804 - DNA, 25 bp, Artificial
  probe
  misc_feature (1)..(25): SEQ ID NO: 6326; WAN024BXY_at; Start 58; Stop 82
gataccgaagcgattaaccagattc

SEQ ID NO: 98805 - DNA, 25 bp, Artificial
  probe
  misc_feature (1)..(25): SEQ ID NO: 6326; WAN024BXY_at; Start 47; Stop 71
caacagatggcgataccgaagcgat

SEQ ID NO: 98806 - DNA, 25 bp, Artificial
  probe
  misc_feature (1)..(25): SEQ ID NO: 6326; WAN024BXY_at; Start 8; Stop 32
cacaatatcctatgattccctttcc

SEQ ID NO: 98807 - DNA, 25 bp, Artificial
  probe
  misc_feature (1)..(25): SEQ ID NO: 6326; WAN024BXY_at; Start 55; Stop 79
ggcgataccgaagcgattaaccaga

SEQ ID NO: 98808 - DNA, 25 bp, Artificial
  probe
  misc_feature (1)..(25): SEQ ID NO: 6326; WAN024BXY_at; Start 179; Stop 203
gaagaatggaaaccagactgattac

SEQ ID NO: 98809 - DNA, 25 bp, Artificial
  probe
  misc_feature (1)..(25): SEQ ID NO: 6326; WAN024BXY_at; Start 93; Stop 117
cagagggtacataacgaagcgttcc

SEQ ID NO: 98810 - DNA, 25 bp, Artificial
  probe
  misc_feature (1)..(25): SEQ ID NO: 6326; WAN024BXY_at; Start 64; Stop 88
gaagcgattaaccagattctacatc

SEQ ID NO: 98811 - DNA, 25 bp, Artificial
  probe
  misc_feature (1)..(25): SEQ ID NO: 6325; WAN024BXZ_at; Start 89; Stop 113
tacctttaagtggatcatctgtaga

SEQ ID NO: 98812 - DNA, 25 bp, Artificial
  probe
  misc_feature (1)..(25): SEQ ID NO: 6325; WAN024BXZ_at; Start 133; Stop 157
tcaactggtttaacggaattagata

SEQ ID NO: 98813 - DNA, 25 bp, Artificial
  probe
  misc_feature (1)..(25): SEQ ID NO: 6325; WAN024BXZ_at; Start 489; Stop 513
caatgaattgtacataaattgtgaa

SEQ ID NO: 98814 - DNA, 25 bp, Artificial
  probe
  misc_feature (1)..(25): SEQ ID NO: 6325; WAN024BXZ_at; Start 267; Stop 291
taaagattcattattaggccataag

SEQ ID NO: 98815 - DNA, 25 bp, Artificial
  probe
  misc_feature (1)..(25): SEQ ID NO: 6325; WAN024BXZ_at; Start 166; Stop 190
gaactttctgaaatttctatgtatc

SEQ ID NO: 98816 - DNA, 25 bp, Artificial
  probe
  misc_feature (1)..(25): SEQ ID NO: 6325; WAN024BXZ_at; Start 11; Stop 35
ttcaagcaggagaattgcagattgc

SEQ ID NO: 98817 - DNA, 25 bp, Artificial
  probe
  misc_feature (1)..(25): SEQ ID NO: 6325; WAN024BXZ_at; Start 312; Stop 336
gatatatagtattgtatcataccca

SEQ ID NO: 98818 - DNA, 25 bp, Artificial
  probe
  misc_feature (1)..(25): SEQ ID NO: 6325; WAN024BXZ_at; Start 207; Stop 231
ggtagcatcatctcatgaaatggca

SEQ ID NO: 98819 - DNA, 25 bp, Artificial
  probe
  misc_feature (1)..(25): SEQ ID NO: 6325; WAN024BXZ_at; Start 585; Stop 609
tgctgaagagctggaattgatttct

SEQ ID NO: 98820 - DNA, 25 bp, Artificial
  probe
  misc_feature (1)..(25): SEQ ID NO: 6325; WAN024BXZ_at; Start 189; Stop 213
tctagatatatctggtatggtagca

SEQ ID NO: 98821 - DNA, 25 bp, Artificial
  probe
  misc_feature (1)..(25): SEQ ID NO: 6325; WAN024BXZ_at; Start 220; Stop 244
catgaaatggcaatgttaagtatct

SEQ ID NO: 98822 - DNA, 25 bp, Artificial
  probe
  misc_feature (1)..(25): SEQ ID NO: 6325; WAN024BXZ_at; Start 151; Stop 175
ttagataaacaacaagaactttctg

SEQ ID NO: 98823 - DNA, 25 bp, Artificial
  probe
  misc_feature (1)..(25): SEQ ID NO: 6325; WAN024BXZ_at; Start 78; Stop 102
tgaaaatatgttacctttaagtgga

SEQ ID NO: 98824 - DNA, 25 bp, Artificial
  probe
  misc_feature (1)..(25): SEQ ID NO: 6325; WAN024BXZ_at; Start 40; Stop 64
gctggtccaagttttctacaaagtg

SEQ ID NO: 98825 - DNA, 25 bp, Artificial
  probe
  misc_feature (1)..(25): SEQ ID NO: 6325; WAN024BXZ_at; Start 594; Stop 618
gctggaattgatttctttagatgaa

SEQ ID NO: 98826 - DNA, 25 bp, Artificial
  probe
  misc_feature (1)..(25): SEQ ID NO: 6325; WAN024BXZ_at; Start 420; Stop 444
gaacaatcttgttaatgaatccgat

SEQ ID NO: 98827 - DNA, 25 bp, Artificial
  probe
  misc_feature (1)..(25): SEQ ID NO: 6325; WAN024BXZ_at; Start 26; Stop 50
tgcagattgctattgctggtccaag

SEQ ID NO: 98828 - DNA, 25 bp, Artificial
  probe
  misc_feature (1)..(25): SEQ ID NO: 6325; WAN024BXZ_at; Start 296; Stop 320
ggacacaaaagcaatggatatatag

SEQ ID NO: 98829 - DNA, 25 bp, Artificial
  probe
  misc_feature (1)..(25): SEQ ID NO: 6325; WAN024BXZ_at; Start 554; Stop 578
aattatttgatattccaagttggga

SEQ ID NO: 98830 - DNA, 25 bp, Artificial
  probe
  misc_feature (1)..(25): SEQ ID NO: 6325; WAN024BXZ_at; Start 451; Stop 475
gatgaactattattttataaggcta

SEQ ID NO: 98831 - DNA, 25 bp, Artificial
  probe
  misc_feature (1)..(25): SEQ ID NO: 6325; WAN024BXZ_at; Start 400; Stop 424
aaattgattaaaacactggagaaca

SEQ ID NO: 98832 - DNA, 25 bp, Artificial
  probe
  misc_feature (1)..(25): SEQ ID NO: 6325; WAN024BXZ_at; Start 278; Stop 302
tattaggccataagttaaggacaca

SEQ ID NO: 98833 - DNA, 25 bp, Artificial
  probe
  misc_feature (1)..(25): SEQ ID NO: 6325; WAN024BXZ_at; Start 324; Stop 348
tgtatcatacccaatattttatagt

SEQ ID NO: 98834 - DNA, 25 bp, Artificial
  probe
  misc_feature (1)..(25): SEQ ID NO: 6325; WAN024BXZ_at; Start 568; Stop 592
ccaagttgggatagtattgctgaag

SEQ ID NO: 98835 - DNA, 25 bp, Artificial
  probe
  misc_feature (1)..(25): SEQ ID NO: 6325; WAN024BXZ_at; Start 368; Stop 392
tagtaactataacacctacaatcta

SEQ ID NO: 98836 - DNA, 25 bp, Artificial
  probe
  misc_feature (1)..(25): SEQ ID NO: 6325; WAN024BXZ_at; Start 647; Stop 671
ttcaaaataggaattaccacattgt

SEQ ID NO: 98837 - DNA, 25 bp, Artificial
  probe
  misc_feature (1)..(25): SEQ ID NO: 6325; WAN024BXZ_at; Start 104; Stop 128
catctgtagaaattaactctccggc

SEQ ID NO: 98838 - DNA, 25 bp, Artificial
  probe
  misc_feature (1)..(25): SEQ ID NO: 6325; WAN024BXZ_at; Start 435; Stop 459
tgaatccgatttatctgatgaacta

SEQ ID NO: 98839 - DNA, 25 bp, Artificial
  probe
  misc_feature (1)..(25): SEQ ID NO: 6325; WAN024BXZ_at; Start 55; Stop 79
ctacaaagtgaaatcataagtattg

SEQ ID NO: 98840 - DNA, 25 bp, Artificial
  probe
  misc_feature (1)..(25): SEQ ID NO: 6325; WAN024BXZ_at; Start 288; Stop 312
taagttaaggacacaaaagcaatgg

SEQ ID NO: 98841 - DNA, 25 bp, Artificial
  probe
  misc_feature (1)..(25): SEQ ID NO: 6325; WAN024BXZ_at; Start 239; Stop 263
gtatcttaaactcgatgttaactgg

SEQ ID NO: 98842 - DNA, 25 bp, Artificial
  probe
  misc_feature (1)..(25): SEQ ID NO: 6325; WAN024BXZ_at; Start 197; Stop 221
tatctggtatggtagcatcatctca

SEQ ID NO: 98843 - DNA, 25 bp, Artificial
  probe
  misc_feature (1)..(25): SEQ ID NO: 6325; WAN024BXZ_at; Start 407; Stop 431
ttaaaacactggagaacaatcttgt

SEQ ID NO: 98844 - DNA, 25 bp, Artificial
  probe
  misc_feature (1)..(25): SEQ ID NO: 6325; WAN024BXZ_at; Start 251; Stop 275
cgatgttaactggtattaaagattc

SEQ ID NO: 98845 - DNA, 25 bp, Artificial
  probe
  misc_feature (1)..(25): SEQ ID NO: 6551; WAN024BY2_at; Start 583; Stop 607
gcggataaaagcaaaccacctgtaa

SEQ ID NO: 98846 - DNA, 25 bp, Artificial
  probe
  misc_feature (1)..(25): SEQ ID NO: 6551; WAN024BY2_at; Start 698; Stop 722
gaaatgccactataagagctaagca

SEQ ID NO: 98847 - DNA, 25 bp, Artificial
  probe
  misc_feature (1)..(25): SEQ ID NO: 6551; WAN024BY2_at; Start 526; Stop 550
gaaaaaggatatcttcctactcaac

SEQ ID NO: 98848 - DNA, 25 bp, Artificial
  probe
  misc_feature (1)..(25): SEQ ID NO: 6551; WAN024BY2_at; Start 310; Stop 334
gttttccacgccttcaaacttgatg

SEQ ID NO: 98849 - DNA, 25 bp, Artificial
  probe
  misc_feature (1)..(25): SEQ ID NO: 6551; WAN024BY2_at; Start 8; Stop 32
caactaaaaacccttggaatgatat

SEQ ID NO: 98850 - DNA, 25 bp, Artificial
  probe
  misc_feature (1)..(25): SEQ ID NO: 6551; WAN024BY2_at; Start 421; Stop 445
gattataaagaacatgtagactggt

SEQ ID NO: 98851 - DNA, 25 bp, Artificial
  probe
  misc_feature (1)..(25): SEQ ID NO: 6551; WAN024BY2_at; Start 631; Stop 655
gctgaatggactaacgctattcctg

SEQ ID NO: 98852 - DNA, 25 bp, Artificial
  probe
  misc_feature (1)..(25): SEQ ID NO: 6551; WAN024BY2_at; Start 670; Stop 694
gaaaaatgttatcgctctagtaacc

SEQ ID NO: 98853 - DNA, 25 bp, Artificial
  probe
  misc_feature (1)..(25): SEQ ID NO: 6551; WAN024BY2_at; Start 339; Stop 363
tgatgaacttggatacacagcagat

SEQ ID NO: 98854 - DNA, 25 bp, Artificial
  probe
  misc_feature (1)..(25): SEQ ID NO: 6551; WAN024BY2_at; Start 48; Stop 72
caaaggcaaagaggctattgttgcg

SEQ ID NO: 98855 - DNA, 25 bp, Artificial
  probe
  misc_feature (1)..(25): SEQ ID NO: 6551; WAN024BY2_at; Start 274; Stop 298
caaacctgtttggatagcttacaac

SEQ ID NO: 98856 - DNA, 25 bp, Artificial
  probe
  misc_feature (1)..(25): SEQ ID NO: 6551; WAN024BY2_at; Start 437; Stop 461
tagactggtttacaaagcatatagc

SEQ ID NO: 98857 - DNA, 25 bp, Artificial
  probe
  misc_feature (1)..(25): SEQ ID NO: 6551; WAN024BY2_at; Start 324; Stop 348
caaacttgatgaaggtgatgaactt

SEQ ID NO: 98858 - DNA, 25 bp, Artificial
  probe
  misc_feature (1)..(25): SEQ ID NO: 6551; WAN024BY2_at; Start 717; Stop 741
taagcacttattaaaaggagatggg

SEQ ID NO: 98859 - DNA, 25 bp, Artificial
  probe
  misc_feature (1)..(25): SEQ ID NO: 6551; WAN024BY2_at; Start 132; Stop 156
tgaaagcactgaactacacttgaat

SEQ ID NO: 98860 - DNA, 25 bp, Artificial
  probe
  misc_feature (1)..(25): SEQ ID NO: 6551; WAN024BY2_at; Start 756; Stop 780
tgctacagaagaattttcaaaaact

SEQ ID NO: 98861 - DNA, 25 bp, Artificial
  probe
  misc_feature (1)..(25): SEQ ID NO: 6551; WAN024BY2_at; Start 369; Stop 393
taagttctggtttgaagatgcaggt

SEQ ID NO: 98862 - DNA, 25 bp, Artificial
  probe
  misc_feature (1)..(25): SEQ ID NO: 6551; WAN024BY2_at; Start 30; Stop 54
tattttaacaacaactcacaaaggc

SEQ ID NO: 98863 - DNA, 25 bp, Artificial
  probe
  misc_feature (1)..(25): SEQ ID NO: 6551; WAN024BY2_at; Start 603; Stop 627
tgtaactattcttatcgcgcgtggt

SEQ ID NO: 98864 - DNA, 25 bp, Artificial
  probe
  misc_feature (1)..(25): SEQ ID NO: 6551; WAN024BY2_at; Start 734; Stop 758
gagatgggaaagctaaaatttatgc

SEQ ID NO: 98865 - DNA, 25 bp, Artificial
  probe
  misc_feature (1)..(25): SEQ ID NO: 6551; WAN024BY2_at; Start 63; Stop 87
tattgttgcgcgtgatgattgggaa

SEQ ID NO: 98866 - DNA, 25 bp, Artificial
  probe
  misc_feature (1)..(25): SEQ ID NO: 6551; WAN024BY2_at; Start 158; Stop 182
tctatcctcaacaatttgtagggaa

SEQ ID NO: 98867 - DNA, 25 bp, Artificial
  probe
  misc_feature (1)..(25): SEQ ID NO: 6551; WAN024BY2_at; Start 212; Stop 236
caaaaaatcctagatatactgaagg

SEQ ID NO: 98868 - DNA, 25 bp, Artificial
  probe
  misc_feature (1)..(25): SEQ ID NO: 6551; WAN024BY2_at; Start 118; Stop 142
aaaaataactccactgaaagcactg

SEQ ID NO: 98869 - DNA, 25 bp, Artificial
  probe
  misc_feature (1)..(25): SEQ ID NO: 6551; WAN024BY2_at; Start 174; Stop 198
tgtagggaatgttaaaaatgctgat

SEQ ID NO: 98870 - DNA, 25 bp, Artificial
  probe
  misc_feature (1)..(25): SEQ ID NO: 6551; WAN024BY2_at; Start 683; Stop 707
gctctagtaacccaagaaatgccac

SEQ ID NO: 98871 - DNA, 25 bp, Artificial
  probe
  misc_feature (1)..(25): SEQ ID NO: 6551; WAN024BY2_at; Start 617; Stop 641
tcgcgcgtggttatgctgaatggac

SEQ ID NO: 98872 - DNA, 25 bp, Artificial
  probe
  misc_feature (1)..(25): SEQ ID NO: 6551; WAN024BY2_at; Start 570; Stop 594
taaagaaagaattgcggataaaagc

SEQ ID NO: 98873 - DNA, 25 bp, Artificial
  probe
  misc_feature (1)..(25): SEQ ID NO: 6551; WAN024BY2_at; Start 469; Stop 493
gagtttttcccctatcattctgata

SEQ ID NO: 98874 - DNA, 25 bp, Artificial
  probe
  misc_feature (1)..(25): SEQ ID NO: 6551; WAN024BY2_at; Start 456; Stop 480
tatagctttagctgagtttttcccc

SEQ ID NO: 98875 - DNA, 25 bp, Artificial
  probe
  misc_feature (1)..(25): SEQ ID NO: 6551; WAN024BY2_at; Start 646; Stop 670
gctattcctgaattaaaaacttatg

SEQ ID NO: 98876 - DNA, 25 bp, Artificial
  probe
  misc_feature (1)..(25): SEQ ID NO: 6551; WAN024BY2_at; Start 388; Stop 412
gcaggtatgggcgaacaatttaaaa

SEQ ID NO: 98877 - DNA, 25 bp, Artificial
  probe
  misc_feature (1)..(25): SEQ ID NO: 6551; WAN024BY2_at; Start 258; Stop 282
caataaagattatcagcaaacctgt

SEQ ID NO: 98878 - DNA, 25 bp, Artificial
  probe
  misc_feature (1)..(25): SEQ ID NO: 6551; WAN024BY2_at; Start 83; Stop 107
gggaaattattcaaaccatactaga

SEQ ID NO: 98879 - DNA, 25 bp, Artificial
  probe
  misc_feature (1)..(25): SEQ ID NO: 7127; WAN024BY3_at; Start 23; Stop 47
aatacataaaagataaactcatttt

SEQ ID NO: 98880 - DNA, 25 bp, Artificial
  probe
  misc_feature (1)..(25): SEQ ID NO: 7127; WAN024BY3_at; Start 66; Stop 90
aaaatgcatatttttaaagaaagat

SEQ ID NO: 98881 - DNA, 25 bp, Artificial
  probe
  misc_feature (1)..(25): SEQ ID NO: 7127; WAN024BY3_at; Start 22; Stop 46
aaatacataaaagataaactcattt

SEQ ID NO: 98882 - DNA, 25 bp, Artificial
  probe
  misc_feature (1)..(25): SEQ ID NO: 7127; WAN024BY3_at; Start 17; Stop 41
aaatcaaatacataaaagataaact

SEQ ID NO: 98883 - DNA, 25 bp, Artificial
  probe
  misc_feature (1)..(25): SEQ ID NO: 7127; WAN024BY3_at; Start 8; Stop 32
gagatgaacaaatcaaatacataaa

SEQ ID NO: 98884 - DNA, 25 bp, Artificial
  probe
  misc_feature (1)..(25): SEQ ID NO: 7127; WAN024BY3_at; Start 16; Stop 40
caaatcaaatacataaaagataaac

SEQ ID NO: 98885 - DNA, 25 bp, Artificial
  probe
  misc_feature (1)..(25): SEQ ID NO: 7127; WAN024BY3_at; Start 64; Stop 88
ataaaatgcatatttttaaagaaag

SEQ ID NO: 98886 - DNA, 25 bp, Artificial
  probe
  misc_feature (1)..(25): SEQ ID NO: 7127; WAN024BY3_at; Start 33; Stop 57
agataaactcatttttattcgtttg

SEQ ID NO: 98887 - DNA, 25 bp, Artificial
  probe
  misc_feature (1)..(25): SEQ ID NO: 7127; WAN024BY3_at; Start 19; Stop 43
atcaaatacataaaagataaactca

SEQ ID NO: 98888 - DNA, 25 bp, Artificial
  probe
  misc_feature (1)..(25): SEQ ID NO: 7127; WAN024BY3_at; Start 21; Stop 45
caaatacataaaagataaactcatt

SEQ ID NO: 98889 - DNA, 25 bp, Artificial
  probe
  misc_feature (1)..(25): SEQ ID NO: 7127; WAN024BY3_at; Start 18; Stop 42
aatcaaatacataaaagataaactc

SEQ ID NO: 98890 - DNA, 25 bp, Artificial
  probe
  misc_feature (1)..(25): SEQ ID NO: 7127; WAN024BY3_at; Start 52; Stop 76
cgtttggtaaaaataaaatgcatat

SEQ ID NO: 98891 - DNA, 25 bp, Artificial
  probe
  misc_feature (1)..(25): SEQ ID NO: 7127; WAN024BY3_at; Start 5; Stop 29
aaagagatgaacaaatcaaatacat

SEQ ID NO: 98892 - DNA, 25 bp, Artificial
  probe
  misc_feature (1)..(25): SEQ ID NO: 7127; WAN024BY3_at; Start 1; Stop 25
ctggaaagagatgaacaaatcaaat

SEQ ID NO: 98893 - DNA, 25 bp, Artificial
  probe
  misc_feature (1)..(25): SEQ ID NO: 7127; WAN024BY3_at; Start 14; Stop 38
aacaaatcaaatacataaaagataa

SEQ ID NO: 98894 - DNA, 25 bp, Artificial
  probe
  misc_feature (1)..(25): SEQ ID NO: 7127; WAN024BY3_at; Start 13; Stop 37
gaacaaatcaaatacataaaagata

SEQ ID NO: 98895 - DNA, 25 bp, Artificial
  probe
  misc_feature (1)..(25): SEQ ID NO: 7127; WAN024BY3_at; Start 20; Stop 44
tcaaatacataaaagataaactcat

SEQ ID NO: 98896 - DNA, 25 bp, Artificial
  probe
  misc_feature (1)..(25): SEQ ID NO: 7127; WAN024BY3_at; Start 10; Stop 34
gatgaacaaatcaaatacataaaag

SEQ ID NO: 98897 - DNA, 25 bp, Artificial
  probe
  misc_feature (1)..(25): SEQ ID NO: 7127; WAN024BY3_at; Start 51; Stop 75
tcgtttggtaaaaataaaatgcata

SEQ ID NO: 98898 - DNA, 25 bp, Artificial
  probe
  misc_feature (1)..(25): SEQ ID NO: 7127; WAN024BY3_at; Start 9; Stop 33
agatgaacaaatcaaatacataaaa

SEQ ID NO: 98899 - DNA, 25 bp, Artificial
  probe
  misc_feature (1)..(25): SEQ ID NO: 7127; WAN024BY3_at; Start 15; Stop 39
acaaatcaaatacataaaagataaa

SEQ ID NO: 98900 - DNA, 25 bp, Artificial
  probe
  misc_feature (1)..(25): SEQ ID NO: 7127; WAN024BY3_at; Start 65; Stop 89
taaaatgcatatttttaaagaaaga

SEQ ID NO: 98901 - DNA, 25 bp, Artificial
  probe
  misc_feature (1)..(25): SEQ ID NO: 7127; WAN024BY3_at; Start 24; Stop 48
atacataaaagataaactcattttt

SEQ ID NO: 98902 - DNA, 25 bp, Artificial
  probe
  misc_feature (1)..(25): SEQ ID NO: 7127; WAN024BY3_at; Start 11; Stop 35
atgaacaaatcaaatacataaaaga

SEQ ID NO: 98903 - DNA, 25 bp, Artificial
  probe
  misc_feature (1)..(25): SEQ ID NO: 7127; WAN024BY3_at; Start 2; Stop 26
tggaaagagatgaacaaatcaaata

SEQ ID NO: 98904 - DNA, 25 bp, Artificial
  probe
  misc_feature (1)..(25): SEQ ID NO: 7127; WAN024BY3_at; Start 3; Stop 27
ggaaagagatgaacaaatcaaatac

SEQ ID NO: 98905 - DNA, 25 bp, Artificial
  probe
  misc_feature (1)..(25): SEQ ID NO: 7127; WAN024BY3_at; Start 25; Stop 49
tacataaaagataaactcattttta

SEQ ID NO: 98906 - DNA, 25 bp, Artificial
  probe
  misc_feature (1)..(25): SEQ ID NO: 7127; WAN024BY3_at; Start 4; Stop 28
gaaagagatgaacaaatcaaataca

SEQ ID NO: 98907 - DNA, 25 bp, Artificial
  probe
  misc_feature (1)..(25): SEQ ID NO: 7127; WAN024BY3_at; Start 12; Stop 36
tgaacaaatcaaatacataaaagat

SEQ ID NO: 98908 - DNA, 25 bp, Artificial
  probe
  misc_feature (1)..(25): SEQ ID NO: 7127; WAN024BY3_at; Start 7; Stop 31
agagatgaacaaatcaaatacataa

SEQ ID NO: 98909 - DNA, 25 bp, Artificial
  probe
  misc_feature (1)..(25): SEQ ID NO: 7127; WAN024BY3_at; Start 6; Stop 30
aagagatgaacaaatcaaatacata

SEQ ID NO: 98910 - DNA, 25 bp, Artificial
  probe
  misc_feature (1)..(25): SEQ ID NO: 7672; WAN024BY4_at; Start 45; Stop 69
taagctgactctaaaaggaccgagc

SEQ ID NO: 98911 - DNA, 25 bp, Artificial
  probe
  misc_feature (1)..(25): SEQ ID NO: 7672; WAN024BY4_at; Start 34; Stop 58
aaagccagccttaagctgactctaa

SEQ ID NO: 98912 - DNA, 25 bp, Artificial
  probe
  misc_feature (1)..(25): SEQ ID NO: 7672; WAN024BY4_at; Start 58; Stop 82
aaaggaccgagccttgtacaataca

SEQ ID NO: 98913 - DNA, 25 bp, Artificial
  probe
  misc_feature (1)..(25): SEQ ID NO: 7672; WAN024BY4_at; Start 13; Stop 37
tctgacactttggtgattgaaaaag

SEQ ID NO: 98914 - DNA, 25 bp, Artificial
  probe
  misc_feature (1)..(25): SEQ ID NO: 7672; WAN024BY4_at; Start 31; Stop 55
gaaaaagccagccttaagctgactc

SEQ ID NO: 98915 - DNA, 25 bp, Artificial
  probe
  misc_feature (1)..(25): SEQ ID NO: 7672; WAN024BY4_at; Start 72; Stop 96
tgtacaatacagaactcaatcctcg

SEQ ID NO: 98916 - DNA, 25 bp, Artificial
  probe
  misc_feature (1)..(25): SEQ ID NO: 7672; WAN024BY4_at; Start 27; Stop 51
gattgaaaaagccagccttaagctg

SEQ ID NO: 98917 - DNA, 25 bp, Artificial
  probe
  misc_feature (1)..(25): SEQ ID NO: 7672; WAN024BY4_at; Start 16; Stop 40
gacactttggtgattgaaaaagcca

SEQ ID NO: 98918 - DNA, 25 bp, Artificial
  probe
  misc_feature (1)..(25): SEQ ID NO: 7672; WAN024BY4_at; Start 1; Stop 25
ttgtcaaaacattctgacactttgg

SEQ ID NO: 98919 - DNA, 25 bp, Artificial
  probe
  misc_feature (1)..(25): SEQ ID NO: 7672; WAN024BY4_at; Start 37; Stop 61
gccagccttaagctgactctaaaag

SEQ ID NO: 98920 - DNA, 25 bp, Artificial
  probe
  misc_feature (1)..(25): SEQ ID NO: 7672; WAN024BY4_at; Start 5; Stop 29
caaaacattctgacactttggtgat

SEQ ID NO: 98921 - DNA, 25 bp, Artificial
  probe
  misc_feature (1)..(25): SEQ ID NO: 7672; WAN024BY4_at; Start 3; Stop 27
gtcaaaacattctgacactttggtg

SEQ ID NO: 98922 - DNA, 25 bp, Artificial
  probe
  misc_feature (1)..(25): SEQ ID NO: 7672; WAN024BY4_at; Start 39; Stop 63
cagccttaagctgactctaaaagga

SEQ ID NO: 98923 - DNA, 25 bp, Artificial
  probe
  misc_feature (1)..(25): SEQ ID NO: 7672; WAN024BY4_at; Start 56; Stop 80
taaaaggaccgagccttgtacaata

SEQ ID NO: 98924 - DNA, 25 bp, Artificial
  probe
  misc_feature (1)..(25): SEQ ID NO: 7672; WAN024BY4_at; Start 73; Stop 97
gtacaatacagaactcaatcctcgt

SEQ ID NO: 98925 - DNA, 25 bp, Artificial
  probe
  misc_feature (1)..(25): SEQ ID NO: 7672; WAN024BY4_at; Start 75; Stop 99
acaatacagaactcaatcctcgttc

SEQ ID NO: 98926 - DNA, 25 bp, Artificial
  probe
  misc_feature (1)..(25): SEQ ID NO: 7672; WAN024BY4_at; Start 10; Stop 34
cattctgacactttggtgattgaaa

SEQ ID NO: 98927 - DNA, 25 bp, Artificial
  probe
  misc_feature (1)..(25): SEQ ID NO: 7672; WAN024BY4_at; Start 62; Stop 86
gaccgagccttgtacaatacagaac

SEQ ID NO: 98928 - DNA, 25 bp, Artificial
  probe
  misc_feature (1)..(25): SEQ ID NO: 7672; WAN024BY4_at; Start 18; Stop 42
cactttggtgattgaaaaagccagc

SEQ ID NO: 98929 - DNA, 25 bp, Artificial
  probe
  misc_feature (1)..(25): SEQ ID NO: 7672; WAN024BY4_at; Start 22; Stop 46
ttggtgattgaaaaagccagcctta

SEQ ID NO: 98930 - DNA, 25 bp, Artificial
  probe
  misc_feature (1)..(25): SEQ ID NO: 7672; WAN024BY4_at; Start 43; Stop 67
cttaagctgactctaaaaggaccga

SEQ ID NO: 98931 - DNA, 25 bp, Artificial
  probe
  misc_feature (1)..(25): SEQ ID NO: 7672; WAN024BY4_at; Start 54; Stop 78
tctaaaaggaccgagccttgtacaa

SEQ ID NO: 98932 - DNA, 25 bp, Artificial
  probe
  misc_feature (1)..(25): SEQ ID NO: 7672; WAN024BY4_at; Start 51; Stop 75
gactctaaaaggaccgagccttgta

SEQ ID NO: 98933 - DNA, 25 bp, Artificial
  probe
  misc_feature (1)..(25): SEQ ID NO: 7672; WAN024BY4_at; Start 48; Stop 72
gctgactctaaaaggaccgagcctt

SEQ ID NO: 98934 - DNA, 25 bp, Artificial
  probe
  misc_feature (1)..(25): SEQ ID NO: 7672; WAN024BY4_at; Start 50; Stop 74
tgactctaaaaggaccgagccttgt

SEQ ID NO: 98935 - DNA, 25 bp, Artificial
  probe
  misc_feature (1)..(25): SEQ ID NO: 7672; WAN024BY4_at; Start 60; Stop 84
aggaccgagccttgtacaatacaga

SEQ ID NO: 98936 - DNA, 25 bp, Artificial
  probe
  misc_feature (1)..(25): SEQ ID NO: 7672; WAN024BY4_at; Start 8; Stop 32
aacattctgacactttggtgattga

SEQ ID NO: 98937 - DNA, 25 bp, Artificial
  probe
  misc_feature (1)..(25): SEQ ID NO: 7672; WAN024BY4_at; Start 29; Stop 53
ttgaaaaagccagccttaagctgac

SEQ ID NO: 98938 - DNA, 25 bp, Artificial
  probe
  misc_feature (1)..(25): SEQ ID NO: 7672; WAN024BY4_at; Start 46; Stop 70
aagctgactctaaaaggaccgagcc

SEQ ID NO: 98939 - DNA, 25 bp, Artificial
  probe
  misc_feature (1)..(25): SEQ ID NO: 7672; WAN024BY4_at; Start 20; Stop 44
ctttggtgattgaaaaagccagcct

SEQ ID NO: 98940 - DNA, 25 bp, Artificial
  probe
  misc_feature (1)..(25): SEQ ID NO: 7672; WAN024BY4_at; Start 24; Stop 48
ggtgattgaaaaagccagccttaag

SEQ ID NO: 98941 - DNA, 25 bp, Artificial
  probe
  misc_feature (1)..(25): SEQ ID NO: 7672; WAN024BY4_at; Start 68; Stop 92
gccttgtacaatacagaactcaatc

SEQ ID NO: 98942 - DNA, 25 bp, Artificial
  probe
  misc_feature (1)..(25): SEQ ID NO: 7672; WAN024BY4_at; Start 65; Stop 89
cgagccttgtacaatacagaactca

SEQ ID NO: 98943 - DNA, 25 bp, Artificial
  probe
  misc_feature (1)..(25): SEQ ID NO: 7672; WAN024BY4_at; Start 61; Stop 85
ggaccgagccttgtacaatacagaa

SEQ ID NO: 98944 - DNA, 25 bp, Artificial
  probe
  misc_feature (1)..(25): SEQ ID NO: 7162; WAN024BY5_at; Start 29; Stop 53
taaaaaattctgttcaaaacaagca

SEQ ID NO: 98945 - DNA, 25 bp, Artificial
  probe
  misc_feature (1)..(25): SEQ ID NO: 7162; WAN024BY5_at; Start 71; Stop 95
aaacacaatcagaaaaatctaaggc

SEQ ID NO: 98946 - DNA, 25 bp, Artificial
  probe
  misc_feature (1)..(25): SEQ ID NO: 7162; WAN024BY5_at; Start 103; Stop 127
tcaaaagagatatcaaactcaattc

SEQ ID NO: 98947 - DNA, 25 bp, Artificial
  probe
  misc_feature (1)..(25): SEQ ID NO: 7162; WAN024BY5_at; Start 88; Stop 112
tctaaggcaacttcctcaaaagaga

SEQ ID NO: 98948 - DNA, 25 bp, Artificial
  probe
  misc_feature (1)..(25): SEQ ID NO: 7162; WAN024BY5_at; Start 81; Stop 105
agaaaaatctaaggcaacttcctca

SEQ ID NO: 98949 - DNA, 25 bp, Artificial
  probe
  misc_feature (1)..(25): SEQ ID NO: 7162; WAN024BY5_at; Start 93; Stop 117
ggcaacttcctcaaaagagatatca

SEQ ID NO: 98950 - DNA, 25 bp, Artificial
  probe
  misc_feature (1)..(25): SEQ ID NO: 7162; WAN024BY5_at; Start 98; Stop 122
cttcctcaaaagagatatcaaactc

SEQ ID NO: 98951 - DNA, 25 bp, Artificial
  probe
  misc_feature (1)..(25): SEQ ID NO: 7162; WAN024BY5_at; Start 59; Stop 83
cactatacaataaaacacaatcaga

SEQ ID NO: 98952 - DNA, 25 bp, Artificial
  probe
  misc_feature (1)..(25): SEQ ID NO: 7162; WAN024BY5_at; Start 40; Stop 64
gttcaaaacaagcaagatacactat

SEQ ID NO: 98953 - DNA, 25 bp, Artificial
  probe
  misc_feature (1)..(25): SEQ ID NO: 7162; WAN024BY5_at; Start 76; Stop 100
caatcagaaaaatctaaggcaactt

SEQ ID NO: 98954 - DNA, 25 bp, Artificial
  probe
  misc_feature (1)..(25): SEQ ID NO: 7162; WAN024BY5_at; Start 85; Stop 109
aaatctaaggcaacttcctcaaaag

SEQ ID NO: 98955 - DNA, 25 bp, Artificial
  probe
  misc_feature (1)..(25): SEQ ID NO: 7162; WAN024BY5_at; Start 51; Stop 75
gcaagatacactatacaataaaaca

SEQ ID NO: 98956 - DNA, 25 bp, Artificial
  probe
  misc_feature (1)..(25): SEQ ID NO: 7162; WAN024BY5_at; Start 48; Stop 72
caagcaagatacactatacaataaa

SEQ ID NO: 98957 - DNA, 25 bp, Artificial
  probe
  misc_feature (1)..(25): SEQ ID NO: 7162; WAN024BY5_at; Start 4; Stop 28
tcactagaaaatatgacaaatgtca

SEQ ID NO: 98958 - DNA, 25 bp, Artificial
  probe
  misc_feature (1)..(25): SEQ ID NO: 7162; WAN024BY5_at; Start 32; Stop 56
aaaattctgttcaaaacaagcaaga

SEQ ID NO: 98959 - DNA, 25 bp, Artificial
  probe
  misc_feature (1)..(25): SEQ ID NO: 7162; WAN024BY5_at; Start 91; Stop 115
aaggcaacttcctcaaaagagatat

SEQ ID NO: 98960 - DNA, 25 bp, Artificial
  probe
  misc_feature (1)..(25): SEQ ID NO: 7162; WAN024BY5_at; Start 55; Stop 79
gatacactatacaataaaacacaat

SEQ ID NO: 98961 - DNA, 25 bp, Artificial
  probe
  misc_feature (1)..(25): SEQ ID NO: 7162; WAN024BY5_at; Start 109; Stop 133
gagatatcaaactcaattcacacca

SEQ ID NO: 98962 - DNA, 25 bp, Artificial
  probe
  misc_feature (1)..(25): SEQ ID NO: 7162; WAN024BY5_at; Start 39; Stop 63
tgttcaaaacaagcaagatacacta

SEQ ID NO: 98963 - DNA, 25 bp, Artificial
  probe
  misc_feature (1)..(25): SEQ ID NO: 7162; WAN024BY5_at; Start 74; Stop 98
cacaatcagaaaaatctaaggcaac

SEQ ID NO: 98964 - DNA, 25 bp, Artificial
  probe
  misc_feature (1)..(25): SEQ ID NO: 7162; WAN024BY5_at; Start 1; Stop 25
ctgtcactagaaaatatgacaaatg

SEQ ID NO: 98965 - DNA, 25 bp, Artificial
  probe
  misc_feature (1)..(25): SEQ ID NO: 7162; WAN024BY5_at; Start 20; Stop 44
caaatgtcataaaaaattctgttca

SEQ ID NO: 98966 - DNA, 25 bp, Artificial
  probe
  misc_feature (1)..(25): SEQ ID NO: 7162; WAN024BY5_at; Start 37; Stop 61
tctgttcaaaacaagcaagatacac

SEQ ID NO: 98967 - DNA, 25 bp, Artificial
  probe
  misc_feature (1)..(25): SEQ ID NO: 7162; WAN024BY5_at; Start 79; Stop 103
tcagaaaaatctaaggcaacttcct

SEQ ID NO: 98968 - DNA, 25 bp, Artificial
  probe
  misc_feature (1)..(25): SEQ ID NO: 7162; WAN024BY5_at; Start 114; Stop 138
atcaaactcaattcacaccataatg

SEQ ID NO: 98969 - DNA, 25 bp, Artificial
  probe
  misc_feature (1)..(25): SEQ ID NO: 7162; WAN024BY5_at; Start 80; Stop 104
cagaaaaatctaaggcaacttcctc

SEQ ID NO: 98970 - DNA, 25 bp, Artificial
  probe
  misc_feature (1)..(25): SEQ ID NO: 7162; WAN024BY5_at; Start 100; Stop 124
tcctcaaaagagatatcaaactcaa

SEQ ID NO: 98971 - DNA, 25 bp, Artificial
  probe
  misc_feature (1)..(25): SEQ ID NO: 7162; WAN024BY5_at; Start 95; Stop 119
caacttcctcaaaagagatatcaaa

SEQ ID NO: 98972 - DNA, 25 bp, Artificial
  probe
  misc_feature (1)..(25): SEQ ID NO: 7162; WAN024BY5_at; Start 5; Stop 29
cactagaaaatatgacaaatgtcat

SEQ ID NO: 98973 - DNA, 25 bp, Artificial
  probe
  misc_feature (1)..(25): SEQ ID NO: 7162; WAN024BY5_at; Start 42; Stop 66
tcaaaacaagcaagatacactatac

SEQ ID NO: 98974 - DNA, 25 bp, Artificial
  probe
  misc_feature (1)..(25): SEQ ID NO: 7162; WAN024BY5_at; Start 90; Stop 114
taaggcaacttcctcaaaagagata

SEQ ID NO: 98975 - DNA, 25 bp, Artificial
  probe
  misc_feature (1)..(25): SEQ ID NO: 7162; WAN024BY5_at; Start 94; Stop 118
gcaacttcctcaaaagagatatcaa

SEQ ID NO: 98976 - DNA, 25 bp, Artificial
  probe
  misc_feature (1)..(25): SEQ ID NO: 7162; WAN024BY5_at; Start 43; Stop 67
caaaacaagcaagatacactataca

SEQ ID NO: 98977 - DNA, 25 bp, Artificial
  probe
  misc_feature (1)..(25): SEQ ID NO: 7162; WAN024BY5_at; Start 111; Stop 135
gatatcaaactcaattcacaccata

SEQ ID NO: 98978 - DNA, 25 bp, Artificial
  probe
  misc_feature (1)..(25): SEQ ID NO: 6511; WAN024BY6_at; Start 82; Stop 106
gagctgttgctctataagcgtatcg

SEQ ID NO: 98979 - DNA, 25 bp, Artificial
  probe
  misc_feature (1)..(25): SEQ ID NO: 6511; WAN024BY6_at; Start 53; Stop 77
caagatacggaacattagaagaact

SEQ ID NO: 98980 - DNA, 25 bp, Artificial
  probe
  misc_feature (1)..(25): SEQ ID NO: 6511; WAN024BY6_at; Start 92; Stop 116
tctataagcgtatcgtggaatggga

SEQ ID NO: 98981 - DNA, 25 bp, Artificial
  probe
  misc_feature (1)..(25): SEQ ID NO: 6511; WAN024BY6_at; Start 336; Stop 360
taactgtgaggcagaacataatggc

SEQ ID NO: 98982 - DNA, 25 bp, Artificial
  probe
  misc_feature (1)..(25): SEQ ID NO: 6511; WAN024BY6_at; Start 231; Stop 255
cactaatgttgaaattggagaacag

SEQ ID NO: 98983 - DNA, 25 bp, Artificial
  probe
  misc_feature (1)..(25): SEQ ID NO: 6511; WAN024BY6_at; Start 391; Stop 415
ggtgatattcatttcccagtagtcc

SEQ ID NO: 98984 - DNA, 25 bp, Artificial
  probe
  misc_feature (1)..(25): SEQ ID NO: 6511; WAN024BY6_at; Start 312; Stop 336
caatcaaaatcctgtagctatcgct

SEQ ID NO: 98985 - DNA, 25 bp, Artificial
  probe
  misc_feature (1)..(25): SEQ ID NO: 6511; WAN024BY6_at; Start 197; Stop 221
gggagtttcaaaatgtttcacttga

SEQ ID NO: 98986 - DNA, 25 bp, Artificial
  probe
  misc_feature (1)..(25): SEQ ID NO: 6511; WAN024BY6_at; Start 361; Stop 385
tattattatagcgtgggctctctag

SEQ ID NO: 98987 - DNA, 25 bp, Artificial
  probe
  misc_feature (1)..(25): SEQ ID NO: 6511; WAN024BY6_at; Start 369; Stop 393
tagcgtgggctctctagtgattggt

SEQ ID NO: 98988 - DNA, 25 bp, Artificial
  probe
  misc_feature (1)..(25): SEQ ID NO: 6511; WAN024BY6_at; Start 305; Stop 329
tcttccacaatcaaaatcctgtagc

SEQ ID NO: 98989 - DNA, 25 bp, Artificial
  probe
  misc_feature (1)..(25): SEQ ID NO: 6511; WAN024BY6_at; Start 146; Stop 170
caaaagtcactattgaaatgtctga

SEQ ID NO: 98990 - DNA, 25 bp, Artificial
  probe
  misc_feature (1)..(25): SEQ ID NO: 6511; WAN024BY6_at; Start 132; Stop 156
acttgaagatgggacaaaagtcact

SEQ ID NO: 98991 - DNA, 25 bp, Artificial
  probe
  misc_feature (1)..(25): SEQ ID NO: 6511; WAN024BY6_at; Start 22; Stop 46
ccagactattatgaacccgattggg

SEQ ID NO: 98992 - DNA, 25 bp, Artificial
  probe
  misc_feature (1)..(25): SEQ ID NO: 6511; WAN024BY6_at; Start 339; Stop 363
ctgtgaggcagaacataatggctat

SEQ ID NO: 98993 - DNA, 25 bp, Artificial
  probe
  misc_feature (1)..(25): SEQ ID NO: 6511; WAN024BY6_at; Start 121; Stop 145
gattttttactacttgaagatggga

SEQ ID NO: 98994 - DNA, 25 bp, Artificial
  probe
  misc_feature (1)..(25): SEQ ID NO: 6511; WAN024BY6_at; Start 220; Stop 244
gacgctgtaatcactaatgttgaaa

SEQ ID NO: 98995 - DNA, 25 bp, Artificial
  probe
  misc_feature (1)..(25): SEQ ID NO: 6511; WAN024BY6_at; Start 169; Stop 193
gaaagtgattgctgtgcctcagcag

SEQ ID NO: 98996 - DNA, 25 bp, Artificial
  probe
  misc_feature (1)..(25): SEQ ID NO: 6511; WAN024BY6_at; Start 45; Stop 69
gggaaatgcaagatacggaacatta

SEQ ID NO: 98997 - DNA, 25 bp, Artificial
  probe
  misc_feature (1)..(25): SEQ ID NO: 6511; WAN024BY6_at; Start 243; Stop 267
aattggagaacaggaagaaatccct

SEQ ID NO: 98998 - DNA, 25 bp, Artificial
  probe
  misc_feature (1)..(25): SEQ ID NO: 6511; WAN024BY6_at; Start 100; Stop 124
cgtatcgtggaatgggataaagatt

SEQ ID NO: 98999 - DNA, 25 bp, Artificial
  probe
  misc_feature (1)..(25): SEQ ID NO: 6511; WAN024BY6_at; Start 326; Stop 350
tagctatcgctaactgtgaggcaga

SEQ ID NO: 99000 - DNA, 25 bp, Artificial
  probe
  misc_feature (1)..(25): SEQ ID NO: 6511; WAN024BY6_at; Start 252; Stop 276
acaggaagaaatccctgaccattgg

SEQ ID NO: 99001 - DNA, 25 bp, Artificial
  probe
  misc_feature (1)..(25): SEQ ID NO: 6511; WAN024BY6_at; Start 16; Stop 40
gaactaccagactattatgaacccg

SEQ ID NO: 99002 - DNA, 25 bp, Artificial
  probe
  misc_feature (1)..(25): SEQ ID NO: 6511; WAN024BY6_at; Start 354; Stop 378
taatggctattattatagcgtgggc

SEQ ID NO: 99003 - DNA, 25 bp, Artificial
  probe
  misc_feature (1)..(25): SEQ ID NO: 6511; WAN024BY6_at; Start 205; Stop 229
caaaatgtttcacttgacgctgtaa

SEQ ID NO: 99004 - DNA, 25 bp, Artificial
  probe
  misc_feature (1)..(25): SEQ ID NO: 6511; WAN024BY6_at; Start 162; Stop 186
aatgtctgaaagtgattgctgtgcc

SEQ ID NO: 99005 - DNA, 25 bp, Artificial
  probe
  misc_feature (1)..(25): SEQ ID NO: 6511; WAN024BY6_at; Start 294; Stop 318
caaagtaaccatcttccacaatcaa

SEQ ID NO: 99006 - DNA, 25 bp, Artificial
  probe
  misc_feature (1)..(25): SEQ ID NO: 6511; WAN024BY6_at; Start 3; Stop 27
gacaaaaactatcgaactaccagac

SEQ ID NO: 99007 - DNA, 25 bp, Artificial
  probe
  misc_feature (1)..(25): SEQ ID NO: 6511; WAN024BY6_at; Start 396; Stop 420
tattcatttcccagtagtccatgct

SEQ ID NO: 99008 - DNA, 25 bp, Artificial
  probe
  misc_feature (1)..(25): SEQ ID NO: 6511; WAN024BY6_at; Start 267; Stop 291
tgaccattggggagcgggttataaa

SEQ ID NO: 99009 - DNA, 25 bp, Artificial
  probe
  misc_feature (1)..(25): SEQ ID NO: 6511; WAN024BY6_at; Start 376; Stop 400
ggctctctagtgattggtgatattc

SEQ ID NO: 99010 - DNA, 25 bp, Artificial
  probe
  misc_feature (1)..(25): SEQ ID NO: 6511; WAN024BY6_at; Start 67; Stop 91
ttagaagaactaaaagagctgttgc

SEQ ID NO: 99011 - DNA, 25 bp, Artificial
  probe
  misc_feature (1)..(25): SEQ ID NO: 6511; WAN024BY6_at; Start 172; Stop 196
agtgattgctgtgcctcagcaggtg

SEQ ID NO: 99012 - DNA, 25 bp, Artificial
  probe
  misc_feature (1)..(25): SEQ ID NO: 6416; WAN024BY7_at; Start 279; Stop 303
cattgacaactacgaaaaagcccta

SEQ ID NO: 99013 - DNA, 25 bp, Artificial
  probe
  misc_feature (1)..(25): SEQ ID NO: 6416; WAN024BY7_at; Start 365; Stop 389
gcaagttctacagcttaaaccctcg

SEQ ID NO: 99014 - DNA, 25 bp, Artificial
  probe
  misc_feature (1)..(25): SEQ ID NO: 6416; WAN024BY7_at; Start 104; Stop 128
ggcgcaatcattgccagctgctcat

SEQ ID NO: 99015 - DNA, 25 bp, Artificial
  probe
  misc_feature (1)..(25): SEQ ID NO: 6416; WAN024BY7_at; Start 9; Stop 33
gaccctgaacattgagcctaaacct

SEQ ID NO: 99016 - DNA, 25 bp, Artificial
  probe
  misc_feature (1)..(25): SEQ ID NO: 6416; WAN024BY7_at; Start 24; Stop 48
gcctaaacctcaatcacggccaagg

SEQ ID NO: 99017 - DNA, 25 bp, Artificial
  probe
  misc_feature (1)..(25): SEQ ID NO: 6416; WAN024BY7_at; Start 351; Stop 375
tctgcatgatgtaggcaagttctac

SEQ ID NO: 99018 - DNA, 25 bp, Artificial
  probe
  misc_feature (1)..(25): SEQ ID NO: 6416; WAN024BY7_at; Start 218; Stop 242
aggtcaagaagaaccagcaggccct

SEQ ID NO: 99019 - DNA, 25 bp, Artificial
  probe
  misc_feature (1)..(25): SEQ ID NO: 6416; WAN024BY7_at; Start 53; Stop 77
caagacgtgggagttttaccacagc

SEQ ID NO: 99020 - DNA, 25 bp, Artificial
  probe
  misc_feature (1)..(25): SEQ ID NO: 6416; WAN024BY7_at; Start 234; Stop 258
gcaggccctcctagatgaaatcatc

SEQ ID NO: 99021 - DNA, 25 bp, Artificial
  probe
  misc_feature (1)..(25): SEQ ID NO: 6416; WAN024BY7_at; Start 321; Stop 345
gatcgtattccaagacgacggtcag

SEQ ID NO: 99022 - DNA, 25 bp, Artificial
  probe
  misc_feature (1)..(25): SEQ ID NO: 6416; WAN024BY7_at; Start 249; Stop 273
tgaaatcatcccagtaggcaaaaag

SEQ ID NO: 99023 - DNA, 25 bp, Artificial
  probe
  misc_feature (1)..(25): SEQ ID NO: 6416; WAN024BY7_at; Start 201; Stop 225
tcctcagtacatttccaaggtcaag

SEQ ID NO: 99024 - DNA, 25 bp, Artificial
  probe
  misc_feature (1)..(25): SEQ ID NO: 6416; WAN024BY7_at; Start 380; Stop 404
taaaccctcgcatagaggtagaggt

SEQ ID NO: 99025 - DNA, 25 bp, Artificial
  probe
  misc_feature (1)..(25): SEQ ID NO: 6416; WAN024BY7_at; Start 171; Stop 195
gagggcacggcttagattttatatc

SEQ ID NO: 99026 - DNA, 25 bp, Artificial
  probe
  misc_feature (1)..(25): SEQ ID NO: 6416; WAN024BY7_at; Start 62; Stop 86
ggagttttaccacagcttacgaaga

SEQ ID NO: 99027 - DNA, 25 bp, Artificial
  probe
  misc_feature (1)..(25): SEQ ID NO: 6416; WAN024BY7_at; Start 342; Stop 366
tcagatagctctgcatgatgtaggc

SEQ ID NO: 99028 - DNA, 25 bp, Artificial
  probe
  misc_feature (1)..(25): SEQ ID NO: 6416; WAN024BY7_at; Start 141; Stop 165
catgggtcagcctatccttgaggga

SEQ ID NO: 99029 - DNA, 25 bp, Artificial
  probe
  misc_feature (1)..(25): SEQ ID NO: 6416; WAN024BY7_at; Start 153; Stop 177
tatccttgagggagctttgagggca

SEQ ID NO: 99030 - DNA, 25 bp, Artificial
  probe
  misc_feature (1)..(25): SEQ ID NO: 6416; WAN024BY7_at; Start 332; Stop 356
aagacgacggtcagatagctctgca

SEQ ID NO: 99031 - DNA, 25 bp, Artificial
  probe
  misc_feature (1)..(25): SEQ ID NO: 6416; WAN024BY7_at; Start 2; Stop 26
tgaaattgaccctgaacattgagcc

SEQ ID NO: 99032 - DNA, 25 bp, Artificial
  probe
  misc_feature (1)..(25): SEQ ID NO: 6416; WAN024BY7_at; Start 44; Stop 68
caaggtttgcaagacgtgggagttt

SEQ ID NO: 99033 - DNA, 25 bp, Artificial
  probe
  misc_feature (1)..(25): SEQ ID NO: 6416; WAN024BY7_at; Start 116; Stop 140
gccagctgctcattgctaatcagta

SEQ ID NO: 99034 - DNA, 25 bp, Artificial
  probe
  misc_feature (1)..(25): SEQ ID NO: 6416; WAN024BY7_at; Start 72; Stop 96
cacagcttacgaagacaaggatatg

SEQ ID NO: 99035 - DNA, 25 bp, Artificial
  probe
  misc_feature (1)..(25): SEQ ID NO: 6416; WAN024BY7_at; Start 212; Stop 236
tttccaaggtcaagaagaaccagca

SEQ ID NO: 99036 - DNA, 25 bp, Artificial
  probe
  misc_feature (1)..(25): SEQ ID NO: 6416; WAN024BY7_at; Start 307; Stop 331
gacagtatgtcagggatcgtattcc

SEQ ID NO: 99037 - DNA, 25 bp, Artificial
  probe
  misc_feature (1)..(25): SEQ ID NO: 6416; WAN024BY7_at; Start 255; Stop 279
catcccagtaggcaaaaagcctgac

SEQ ID NO: 99038 - DNA, 25 bp, Artificial
  probe
  misc_feature (1)..(25): SEQ ID NO: 6416; WAN024BY7_at; Start 34; Stop 58
caatcacggccaaggtttgcaagac

SEQ ID NO: 99039 - DNA, 25 bp, Artificial
  probe
  misc_feature (1)..(25): SEQ ID NO: 6416; WAN024BY7_at; Start 166; Stop 190
gctttgagggcacggcttagatttt

SEQ ID NO: 99040 - DNA, 25 bp, Artificial
  probe
  misc_feature (1)..(25): SEQ ID NO: 6416; WAN024BY7_at; Start 185; Stop 209
gattttatatcaaacctcctcagta

SEQ ID NO: 99041 - DNA, 25 bp, Artificial
  probe
  misc_feature (1)..(25): SEQ ID NO: 6416; WAN024BY7_at; Start 268; Stop 292
aaaaagcctgacattgacaactacg

SEQ ID NO: 99042 - DNA, 25 bp, Artificial
  probe
  misc_feature (1)..(25): SEQ ID NO: 6416; WAN024BY7_at; Start 292; Stop 316
gaaaaagccctatatgacagtatgt

SEQ ID NO: 99043 - DNA, 25 bp, Artificial
  probe
  misc_feature (1)..(25): SEQ ID NO: 6416; WAN024BY7_at; Start 96; Stop 120
gaaaacatggcgcaatcattgccag

SEQ ID NO: 99044 - DNA, 25 bp, Artificial
  probe
  misc_feature (1)..(25): SEQ ID NO: 6416; WAN024BY7_at; Start 129; Stop 153
tgctaatcagtacatgggtcagcct

SEQ ID NO: 99045 - DNA, 25 bp, Artificial
  probe
  misc_feature (1)..(25): SEQ ID NO: 6416; WAN024BY7_at; Start 85; Stop 109
gacaaggatatgaaaacatggcgca

SEQ ID NO: 99046 - DNA, 25 bp, Artificial
  probe
  misc_feature (1)..(25): SEQ ID NO: 6584; WAN024BY8_at; Start 128; Stop 152
cacgggtcaagagcaacatcaagac

SEQ ID NO: 99047 - DNA, 25 bp, Artificial
  probe
  misc_feature (1)..(25): SEQ ID NO: 6584; WAN024BY8_at; Start 198; Stop 222
agaaaatctctttgagatggcagga

SEQ ID NO: 99048 - DNA, 25 bp, Artificial
  probe
  misc_feature (1)..(25): SEQ ID NO: 6584; WAN024BY8_at; Start 140; Stop 164
gcaacatcaagacgctacaagaggt

SEQ ID NO: 99049 - DNA, 25 bp, Artificial
  probe
  misc_feature (1)..(25): SEQ ID NO: 6584; WAN024BY8_at; Start 3; Stop 27
gagcattagctttgataacaaagac

SEQ ID NO: 99050 - DNA, 25 bp, Artificial
  probe
  misc_feature (1)..(25): SEQ ID NO: 6584; WAN024BY8_at; Start 38; Stop 62
cactagatgacaatggtgacctttt

SEQ ID NO: 99051 - DNA, 25 bp, Artificial
  probe
  misc_feature (1)..(25): SEQ ID NO: 6584; WAN024BY8_at; Start 124; Stop 148
ttaacacgggtcaagagcaacatca

SEQ ID NO: 99052 - DNA, 25 bp, Artificial
  probe
  misc_feature (1)..(25): SEQ ID NO: 6584; WAN024BY8_at; Start 75; Stop 99
caagtgcaaagttaaggcaattccc

SEQ ID NO: 99053 - DNA, 25 bp, Artificial
  probe
  misc_feature (1)..(25): SEQ ID NO: 6584; WAN024BY8_at; Start 121; Stop 145
tcattaacacgggtcaagagcaaca

SEQ ID NO: 99054 - DNA, 25 bp, Artificial
  probe
  misc_feature (1)..(25): SEQ ID NO: 6584; WAN024BY8_at; Start 58; Stop 82
ctttttgaaccggtctacaagtgca

SEQ ID NO: 99055 - DNA, 25 bp, Artificial
  probe
  misc_feature (1)..(25): SEQ ID NO: 6584; WAN024BY8_at; Start 21; Stop 45
caaagacacggctcctacactagat

SEQ ID NO: 99056 - DNA, 25 bp, Artificial
  probe
  misc_feature (1)..(25): SEQ ID NO: 6584; WAN024BY8_at; Start 45; Stop 69
tgacaatggtgacctttttgaaccg

SEQ ID NO: 99057 - DNA, 25 bp, Artificial
  probe
  misc_feature (1)..(25): SEQ ID NO: 6584; WAN024BY8_at; Start 126; Stop 150
aacacgggtcaagagcaacatcaag

SEQ ID NO: 99058 - DNA, 25 bp, Artificial
  probe
  misc_feature (1)..(25): SEQ ID NO: 6584; WAN024BY8_at; Start 13; Stop 37
tttgataacaaagacacggctccta

SEQ ID NO: 99059 - DNA, 25 bp, Artificial
  probe
  misc_feature (1)..(25): SEQ ID NO: 6584; WAN024BY8_at; Start 146; Stop 170
tcaagacgctacaagaggttaaaaa

SEQ ID NO: 99060 - DNA, 25 bp, Artificial
  probe
  misc_feature (1)..(25): SEQ ID NO: 6584; WAN024BY8_at; Start 34; Stop 58
cctacactagatgacaatggtgacc

SEQ ID NO: 99061 - DNA, 25 bp, Artificial
  probe
  misc_feature (1)..(25): SEQ ID NO: 6584; WAN024BY8_at; Start 90; Stop 114
ggcaattcccaaaaatgatgtattt

SEQ ID NO: 99062 - DNA, 25 bp, Artificial
  probe
  misc_feature (1)..(25): SEQ ID NO: 6584; WAN024BY8_at; Start 116; Stop 140
tcacctcattaacacgggtcaagag

SEQ ID NO: 99063 - DNA, 25 bp, Artificial
  probe
  misc_feature (1)..(25): SEQ ID NO: 6584; WAN024BY8_at; Start 78; Stop 102
gtgcaaagttaaggcaattcccaaa

SEQ ID NO: 99064 - DNA, 25 bp, Artificial
  probe
  misc_feature (1)..(25): SEQ ID NO: 6584; WAN024BY8_at; Start 64; Stop 88
gaaccggtctacaagtgcaaagtta

SEQ ID NO: 99065 - DNA, 25 bp, Artificial
  probe
  misc_feature (1)..(25): SEQ ID NO: 6584; WAN024BY8_at; Start 71; Stop 95
tctacaagtgcaaagttaaggcaat

SEQ ID NO: 99066 - DNA, 25 bp, Artificial
  probe
  misc_feature (1)..(25): SEQ ID NO: 6584; WAN024BY8_at; Start 16; Stop 40
gataacaaagacacggctcctacac

SEQ ID NO: 99067 - DNA, 25 bp, Artificial
  probe
  misc_feature (1)..(25): SEQ ID NO: 6584; WAN024BY8_at; Start 204; Stop 228
tctctttgagatggcaggatttaag

SEQ ID NO: 99068 - DNA, 25 bp, Artificial
  probe
  misc_feature (1)..(25): SEQ ID NO: 6584; WAN024BY8_at; Start 30; Stop 54
ggctcctacactagatgacaatggt

SEQ ID NO: 99069 - DNA, 25 bp, Artificial
  probe
  misc_feature (1)..(25): SEQ ID NO: 6584; WAN024BY8_at; Start 108; Stop 132
tgtatttttcacctcattaacacgg

SEQ ID NO: 99070 - DNA, 25 bp, Artificial
  probe
  misc_feature (1)..(25): SEQ ID NO: 6584; WAN024BY8_at; Start 144; Stop 168
catcaagacgctacaagaggttaaa

SEQ ID NO: 99071 - DNA, 25 bp, Artificial
  probe
  misc_feature (1)..(25): SEQ ID NO: 6584; WAN024BY8_at; Start 134; Stop 158
tcaagagcaacatcaagacgctaca

SEQ ID NO: 99072 - DNA, 25 bp, Artificial
  probe
  misc_feature (1)..(25): SEQ ID NO: 6584; WAN024BY8_at; Start 112; Stop 136
tttttcacctcattaacacgggtca

SEQ ID NO: 99073 - DNA, 25 bp, Artificial
  probe
  misc_feature (1)..(25): SEQ ID NO: 6584; WAN024BY8_at; Start 25; Stop 49
gacacggctcctacactagatgaca

SEQ ID NO: 99074 - DNA, 25 bp, Artificial
  probe
  misc_feature (1)..(25): SEQ ID NO: 6584; WAN024BY8_at; Start 85; Stop 109
gttaaggcaattcccaaaaatgatg

SEQ ID NO: 99075 - DNA, 25 bp, Artificial
  probe
  misc_feature (1)..(25): SEQ ID NO: 6584; WAN024BY8_at; Start 23; Stop 47
aagacacggctcctacactagatga

SEQ ID NO: 99076 - DNA, 25 bp, Artificial
  probe
  misc_feature (1)..(25): SEQ ID NO: 6584; WAN024BY8_at; Start 177; Stop 201
tgagttcgtaaacgaaaacagagaa

SEQ ID NO: 99077 - DNA, 25 bp, Artificial
  probe
  misc_feature (1)..(25): SEQ ID NO: 6584; WAN024BY8_at; Start 68; Stop 92
cggtctacaagtgcaaagttaaggc

SEQ ID NO: 99078 - DNA, 25 bp, Artificial
  probe
  misc_feature (1)..(25): SEQ ID NO: 6584; WAN024BY8_at; Start 131; Stop 155
gggtcaagagcaacatcaagacgct

SEQ ID NO: 99079 - DNA, 25 bp, Artificial
  probe
  misc_feature (1)..(25): SEQ ID NO: 6584; WAN024BY8_at; Start 62; Stop 86
ttgaaccggtctacaagtgcaaagt

SEQ ID NO: 99080 - DNA, 25 bp, Artificial
  probe
  misc_feature (1)..(25): SEQ ID NO: 7010; WAN024BY9_at; Start 121; Stop 145
cttgaagatacagtgaagaagtacg

SEQ ID NO: 99081 - DNA, 25 bp, Artificial
  probe
  misc_feature (1)..(25): SEQ ID NO: 7010; WAN024BY9_at; Start 353; Stop 377
ggttcacacttaagattgccttgca

SEQ ID NO: 99082 - DNA, 25 bp, Artificial
  probe
  misc_feature (1)..(25): SEQ ID NO: 7010; WAN024BY9_at; Start 46; Stop 70
acttatactaaacttgttggattga

SEQ ID NO: 99083 - DNA, 25 bp, Artificial
  probe
  misc_feature (1)..(25): SEQ ID NO: 7010; WAN024BY9_at; Start 379; Stop 403
tcagagttggaatttacagacggtg

SEQ ID NO: 99084 - DNA, 25 bp, Artificial
  probe
  misc_feature (1)..(25): SEQ ID NO: 7010; WAN024BY9_at; Start 249; Stop 273
gaagaaactctacttcgagcaagca

SEQ ID NO: 99085 - DNA, 25 bp, Artificial
  probe
  misc_feature (1)..(25): SEQ ID NO: 7010; WAN024BY9_at; Start 371; Stop 395
ccttgcagtcagagttggaatttac

SEQ ID NO: 99086 - DNA, 25 bp, Artificial
  probe
  misc_feature (1)..(25): SEQ ID NO: 7010; WAN024BY9_at; Start 291; Stop 315
ggtcaattttgaaggtcaagtatct

SEQ ID NO: 99087 - DNA, 25 bp, Artificial
  probe
  misc_feature (1)..(25): SEQ ID NO: 7010; WAN024BY9_at; Start 306; Stop 330
tcaagtatctgttaagttaggcggt

SEQ ID NO: 99088 - DNA, 25 bp, Artificial
  probe
  misc_feature (1)..(25): SEQ ID NO: 7010; WAN024BY9_at; Start 385; Stop 409
ttggaatttacagacggtgttggag

SEQ ID NO: 99089 - DNA, 25 bp, Artificial
  probe
  misc_feature (1)..(25): SEQ ID NO: 7010; WAN024BY9_at; Start 131; Stop 155
cagtgaagaagtacgagtttggtat

SEQ ID NO: 99090 - DNA, 25 bp, Artificial
  probe
  misc_feature (1)..(25): SEQ ID NO: 7010; WAN024BY9_at; Start 23; Stop 47
tatcttatggcgaagctaaaggaac

SEQ ID NO: 99091 - DNA, 25 bp, Artificial
  probe
  misc_feature (1)..(25): SEQ ID NO: 7010; WAN024BY9_at; Start 343; Stop 367
gccgttatcgggttcacacttaaga

SEQ ID NO: 99092 - DNA, 25 bp, Artificial
  probe
  misc_feature (1)..(25): SEQ ID NO: 7010; WAN024BY9_at; Start 231; Stop 255
taaggcagcagacgacaagaagaaa

SEQ ID NO: 99093 - DNA, 25 bp, Artificial
  probe
  misc_feature (1)..(25): SEQ ID NO: 7010; WAN024BY9_at; Start 65; Stop 89
gattgaaagaagtgccagagtttgg

SEQ ID NO: 99094 - DNA, 25 bp, Artificial
  probe
  misc_feature (1)..(25): SEQ ID NO: 7010; WAN024BY9_at; Start 202; Stop 226
agcgcaactgctccttatcgtgtat

SEQ ID NO: 99095 - DNA, 25 bp, Artificial
  probe
  misc_feature (1)..(25): SEQ ID NO: 7010; WAN024BY9_at; Start 78; Stop 102
gccagagtttggtattgaactcgaa

SEQ ID NO: 99096 - DNA, 25 bp, Artificial
  probe
  misc_feature (1)..(25): SEQ ID NO: 7010; WAN024BY9_at; Start 262; Stop 286
ttcgagcaagcatacccagacggta

SEQ ID NO: 99097 - DNA, 25 bp, Artificial
  probe
  misc_feature (1)..(25): SEQ ID NO: 7010; WAN024BY9_at; Start 2; Stop 26
tgttagcaaatggaattacgctatc

SEQ ID NO: 99098 - DNA, 25 bp, Artificial
  probe
  misc_feature (1)..(25): SEQ ID NO: 7010; WAN024BY9_at; Start 87; Stop 111
tggtattgaactcgaaaaagtagaa

SEQ ID NO: 99099 - DNA, 25 bp, Artificial
  probe
  misc_feature (1)..(25): SEQ ID NO: 7010; WAN024BY9_at; Start 334; Stop 358
ggtgtcaatgccgttatcgggttca

SEQ ID NO: 99100 - DNA, 25 bp, Artificial
  probe
  misc_feature (1)..(25): SEQ ID NO: 7010; WAN024BY9_at; Start 31; Stop 55
ggcgaagctaaaggaacttatacta

SEQ ID NO: 99101 - DNA, 25 bp, Artificial
  probe
  misc_feature (1)..(25): SEQ ID NO: 7010; WAN024BY9_at; Start 238; Stop 262
gcagacgacaagaagaaactctact

SEQ ID NO: 99102 - DNA, 25 bp, Artificial
  probe
  misc_feature (1)..(25): SEQ ID NO: 7010; WAN024BY9_at; Start 109; Stop 133
gaaaatactactcttgaagatacag

SEQ ID NO: 99103 - DNA, 25 bp, Artificial
  probe
  misc_feature (1)..(25): SEQ ID NO: 7010; WAN024BY9_at; Start 366; Stop 390
gattgccttgcagtcagagttggaa

SEQ ID NO: 99104 - DNA, 25 bp, Artificial
  probe
  misc_feature (1)..(25): SEQ ID NO: 7010; WAN024BY9_at; Start 278; Stop 302
cagacggtactaaggtcaattttga

SEQ ID NO: 99105 - DNA, 25 bp, Artificial
  probe
  misc_feature (1)..(25): SEQ ID NO: 7010; WAN024BY9_at; Start 318; Stop 342
taagttaggcggtggcggtgtcaat

SEQ ID NO: 99106 - DNA, 25 bp, Artificial
  probe
  misc_feature (1)..(25): SEQ ID NO: 7010; WAN024BY9_at; Start 224; Stop 248
tattgcgtaaggcagcagacgacaa

SEQ ID NO: 99107 - DNA, 25 bp, Artificial
  probe
  misc_feature (1)..(25): SEQ ID NO: 7010; WAN024BY9_at; Start 216; Stop 240
ttatcgtgtattgcgtaaggcagca

SEQ ID NO: 99108 - DNA, 25 bp, Artificial
  probe
  misc_feature (1)..(25): SEQ ID NO: 7010; WAN024BY9_at; Start 190; Stop 214
tataataattcaagcgcaactgctc

SEQ ID NO: 99109 - DNA, 25 bp, Artificial
  probe
  misc_feature (1)..(25): SEQ ID NO: 7010; WAN024BY9_at; Start 58; Stop 82
cttgttggattgaaagaagtgccag

SEQ ID NO: 99110 - DNA, 25 bp, Artificial
  probe
  misc_feature (1)..(25): SEQ ID NO: 7010; WAN024BY9_at; Start 175; Stop 199
gagtacaagttctcttataataatt

SEQ ID NO: 99111 - DNA, 25 bp, Artificial
  probe
  misc_feature (1)..(25): SEQ ID NO: 7010; WAN024BY9_at; Start 14; Stop 38
gaattacgctatcttatggcgaagc

SEQ ID NO: 99112 - DNA, 25 bp, Artificial
  probe
  misc_feature (1)..(25): SEQ ID NO: 7010; WAN024BY9_at; Start 158; Stop 182
gggacataggagaacttgagtacaa

SEQ ID NO: 99113 - DNA, 25 bp, Artificial
  probe
  misc_feature (1)..(25): SEQ ID NO: 7010; WAN024BY9_at; Start 272; Stop 296
catacccagacggtactaaggtcaa

SEQ ID NO: 99114 - DNA, 25 bp, Artificial
  probe
  misc_feature (1)..(25): SEQ ID NO: 6660; WAN024BYA_at; Start 107; Stop 131
tagaagaacaaaacaagccgggtga

SEQ ID NO: 99115 - DNA, 25 bp, Artificial
  probe
  misc_feature (1)..(25): SEQ ID NO: 6660; WAN024BYA_at; Start 329; Stop 353
tagactcagagcttgtttttcaatt

SEQ ID NO: 99116 - DNA, 25 bp, Artificial
  probe
  misc_feature (1)..(25): SEQ ID NO: 6660; WAN024BYA_at; Start 339; Stop 363
gcttgtttttcaatttagaatggag

SEQ ID NO: 99117 - DNA, 25 bp, Artificial
  probe
  misc_feature (1)..(25): SEQ ID NO: 6660; WAN024BYA_at; Start 42; Stop 66
ggtcgcagataatgtgactgatact

SEQ ID NO: 99118 - DNA, 25 bp, Artificial
  probe
  misc_feature (1)..(25): SEQ ID NO: 6660; WAN024BYA_at; Start 189; Stop 213
tgataccagcactagtgagttagct

SEQ ID NO: 99119 - DNA, 25 bp, Artificial
  probe
  misc_feature (1)..(25): SEQ ID NO: 6660; WAN024BYA_at; Start 72; Stop 96
tagcgattgggagactttcccagtc

SEQ ID NO: 99120 - DNA, 25 bp, Artificial
  probe
  misc_feature (1)..(25): SEQ ID NO: 6660; WAN024BYA_at; Start 205; Stop 229
gagttagctgttaaaatcaatcaga

SEQ ID NO: 99121 - DNA, 25 bp, Artificial
  probe
  misc_feature (1)..(25): SEQ ID NO: 6660; WAN024BYA_at; Start 60; Stop 84
tgatacttatcctagcgattgggag

SEQ ID NO: 99122 - DNA, 25 bp, Artificial
  probe
  misc_feature (1)..(25): SEQ ID NO: 6660; WAN024BYA_at; Start 320; Stop 344
tcgttgatttagactcagagcttgt

SEQ ID NO: 99123 - DNA, 25 bp, Artificial
  probe
  misc_feature (1)..(25): SEQ ID NO: 6660; WAN024BYA_at; Start 247; Stop 271
ttgcgaagaaccgactgccaagacg

SEQ ID NO: 99124 - DNA, 25 bp, Artificial
  probe
  misc_feature (1)..(25): SEQ ID NO: 6660; WAN024BYA_at; Start 291; Stop 315
gagacataaggtcatgcgctttgaa

SEQ ID NO: 99125 - DNA, 25 bp, Artificial
  probe
  misc_feature (1)..(25): SEQ ID NO: 6660; WAN024BYA_at; Start 183; Stop 207
ctttgatgataccagcactagtgag

SEQ ID NO: 99126 - DNA, 25 bp, Artificial
  probe
  misc_feature (1)..(25): SEQ ID NO: 6660; WAN024BYA_at; Start 67; Stop 91
tatcctagcgattgggagactttcc

SEQ ID NO: 99127 - DNA, 25 bp, Artificial
  probe
  misc_feature (1)..(25): SEQ ID NO: 6660; WAN024BYA_at; Start 255; Stop 279
aaccgactgccaagacgtgccagac

SEQ ID NO: 99128 - DNA, 25 bp, Artificial
  probe
  misc_feature (1)..(25): SEQ ID NO: 6660; WAN024BYA_at; Start 76; Stop 100
gattgggagactttcccagtcgtta

SEQ ID NO: 99129 - DNA, 25 bp, Artificial
  probe
  misc_feature (1)..(25): SEQ ID NO: 6660; WAN024BYA_at; Start 270; Stop 294
cgtgccagacccgtctcatttgaga

SEQ ID NO: 99130 - DNA, 25 bp, Artificial
  probe
  misc_feature (1)..(25): SEQ ID NO: 6660; WAN024BYA_at; Start 9; Stop 33
tatcaagcctgttatttataaagaa

SEQ ID NO: 99131 - DNA, 25 bp, Artificial
  probe
  misc_feature (1)..(25): SEQ ID NO: 6660; WAN024BYA_at; Start 35; Stop 59
tgcaaaaggtcgcagataatgtgac

SEQ ID NO: 99132 - DNA, 25 bp, Artificial
  probe
  misc_feature (1)..(25): SEQ ID NO: 6660; WAN024BYA_at; Start 313; Stop 337
gaaggtgtcgttgatttagactcag

SEQ ID NO: 99133 - DNA, 25 bp, Artificial
  probe
  misc_feature (1)..(25): SEQ ID NO: 6660; WAN024BYA_at; Start 177; Stop 201
ggatatctttgatgataccagcact

SEQ ID NO: 99134 - DNA, 25 bp, Artificial
  probe
  misc_feature (1)..(25): SEQ ID NO: 6660; WAN024BYA_at; Start 141; Stop 165
tgaccaggaacaaaaatcatctatc

SEQ ID NO: 99135 - DNA, 25 bp, Artificial
  probe
  misc_feature (1)..(25): SEQ ID NO: 6660; WAN024BYA_at; Start 234; Stop 258
tgagtctttaggtttgcgaagaacc

SEQ ID NO: 99136 - DNA, 25 bp, Artificial
  probe
  misc_feature (1)..(25): SEQ ID NO: 6660; WAN024BYA_at; Start 120; Stop 144
caagccgggtgattggtttgatgac

SEQ ID NO: 99137 - DNA, 25 bp, Artificial
  probe
  misc_feature (1)..(25): SEQ ID NO: 6660; WAN024BYA_at; Start 130; Stop 154
gattggtttgatgaccaggaacaaa

SEQ ID NO: 99138 - DNA, 25 bp, Artificial
  probe
  misc_feature (1)..(25): SEQ ID NO: 6660; WAN024BYA_at; Start 164; Stop 188
tccgctataaggtggatatctttga

SEQ ID NO: 99139 - DNA, 25 bp, Artificial
  probe
  misc_feature (1)..(25): SEQ ID NO: 6660; WAN024BYA_at; Start 198; Stop 222
cactagtgagttagctgttaaaatc

SEQ ID NO: 99140 - DNA, 25 bp, Artificial
  probe
  misc_feature (1)..(25): SEQ ID NO: 6660; WAN024BYA_at; Start 297; Stop 321
taaggtcatgcgctttgaaggtgtc

SEQ ID NO: 99141 - DNA, 25 bp, Artificial
  probe
  misc_feature (1)..(25): SEQ ID NO: 6660; WAN024BYA_at; Start 153; Stop 177
aaaatcatctatccgctataaggtg

SEQ ID NO: 99142 - DNA, 25 bp, Artificial
  probe
  misc_feature (1)..(25): SEQ ID NO: 6660; WAN024BYA_at; Start 303; Stop 327
catgcgctttgaaggtgtcgttgat

SEQ ID NO: 99143 - DNA, 25 bp, Artificial
  probe
  misc_feature (1)..(25): SEQ ID NO: 6660; WAN024BYA_at; Start 27; Stop 51
taaagaattgcaaaaggtcgcagat

SEQ ID NO: 99144 - DNA, 25 bp, Artificial
  probe
  misc_feature (1)..(25): SEQ ID NO: 6660; WAN024BYA_at; Start 241; Stop 265
ttaggtttgcgaagaaccgactgcc

SEQ ID NO: 99145 - DNA, 25 bp, Artificial
  probe
  misc_feature (1)..(25): SEQ ID NO: 6660; WAN024BYA_at; Start 222; Stop 246
caatcagatttttgagtctttaggt

SEQ ID NO: 99146 - DNA, 25 bp, Artificial
  probe
  misc_feature (1)..(25): SEQ ID NO: 6660; WAN024BYA_at; Start 52; Stop 76
aatgtgactgatacttatcctagcg

SEQ ID NO: 99147 - DNA, 25 bp, Artificial
  probe
  misc_feature (1)..(25): SEQ ID NO: 6660; WAN024BYA_at; Start 285; Stop 309
tcatttgagacataaggtcatgcgc

SEQ ID NO: 99148 - DNA, 25 bp, Artificial
  probe
  misc_feature (1)..(25): SEQ ID NO: 7327; WAN024BYB_at; Start 269; Stop 293
taggacaagctagccattcgggtat

SEQ ID NO: 99149 - DNA, 25 bp, Artificial
  probe
  misc_feature (1)..(25): SEQ ID NO: 7327; WAN024BYB_at; Start 255; Stop 279
tgggacagggccaataggacaagct

SEQ ID NO: 99150 - DNA, 25 bp, Artificial
  probe
  misc_feature (1)..(25): SEQ ID NO: 7327; WAN024BYB_at; Start 209; Stop 233
taggcgaggtttacaccaatcttaa

SEQ ID NO: 99151 - DNA, 25 bp, Artificial
  probe
  misc_feature (1)..(25): SEQ ID NO: 7327; WAN024BYB_at; Start 88; Stop 112
gcggtacacaatgctactataaagg

SEQ ID NO: 99152 - DNA, 25 bp, Artificial
  probe
  misc_feature (1)..(25): SEQ ID NO: 7327; WAN024BYB_at; Start 468; Stop 492
gaatatttcgaattatgtccgtaga

SEQ ID NO: 99153 - DNA, 25 bp, Artificial
  probe
  misc_feature (1)..(25): SEQ ID NO: 7327; WAN024BYB_at; Start 126; Stop 150
tgcaagaagactcgcaccagcgaga

SEQ ID NO: 99154 - DNA, 25 bp, Artificial
  probe
  misc_feature (1)..(25): SEQ ID NO: 7327; WAN024BYB_at; Start 440; Stop 464
tgagagacaatcaagagcgtgtgtc

SEQ ID NO: 99155 - DNA, 25 bp, Artificial
  probe
  misc_feature (1)..(25): SEQ ID NO: 7327; WAN024BYB_at; Start 481; Stop 505
tatgtccgtagaaagataagagaac

SEQ ID NO: 99156 - DNA, 25 bp, Artificial
  probe
  misc_feature (1)..(25): SEQ ID NO: 7327; WAN024BYB_at; Start 61; Stop 85
aaaactggcgaggatatcgtcttac

SEQ ID NO: 99157 - DNA, 25 bp, Artificial
  probe
  misc_feature (1)..(25): SEQ ID NO: 7327; WAN024BYB_at; Start 170; Stop 194
gtatcaaaactagggcaaaaatgga

SEQ ID NO: 99158 - DNA, 25 bp, Artificial
  probe
  misc_feature (1)..(25): SEQ ID NO: 7327; WAN024BYB_at; Start 386; Stop 410
gggagttctacaagatgtatggtca

SEQ ID NO: 99159 - DNA, 25 bp, Artificial
  probe
  misc_feature (1)..(25): SEQ ID NO: 7327; WAN024BYB_at; Start 73; Stop 97
gatatcgtcttacgtgcggtacaca

SEQ ID NO: 99160 - DNA, 25 bp, Artificial
  probe
  misc_feature (1)..(25): SEQ ID NO: 7327; WAN024BYB_at; Start 342; Stop 366
tgaagaccaaatcaatgtaggacct

SEQ ID NO: 99161 - DNA, 25 bp, Artificial
  probe
  misc_feature (1)..(25): SEQ ID NO: 7327; WAN024BYB_at; Start 38; Stop 62
aatgtagacgattggctagtaaaaa

SEQ ID NO: 99162 - DNA, 25 bp, Artificial
  probe
  misc_feature (1)..(25): SEQ ID NO: 7327; WAN024BYB_at; Start 29; Stop 53
tcatagctaaatgtagacgattggc

SEQ ID NO: 99163 - DNA, 25 bp, Artificial
  probe
  misc_feature (1)..(25): SEQ ID NO: 7327; WAN024BYB_at; Start 17; Stop 41
gggcagataggctcatagctaaatg

SEQ ID NO: 99164 - DNA, 25 bp, Artificial
  probe
  misc_feature (1)..(25): SEQ ID NO: 7327; WAN024BYB_at; Start 316; Stop 340
tataagtctagtccgtggtatgtgc

SEQ ID NO: 99165 - DNA, 25 bp, Artificial
  probe
  misc_feature (1)..(25): SEQ ID NO: 7327; WAN024BYB_at; Start 414; Stop 438
tgcccagccttatctttatccagct

SEQ ID NO: 99166 - DNA, 25 bp, Artificial
  probe
  misc_feature (1)..(25): SEQ ID NO: 7327; WAN024BYB_at; Start 301; Stop 325
gaggtcagcgtcacttataagtcta

SEQ ID NO: 99167 - DNA, 25 bp, Artificial
  probe
  misc_feature (1)..(25): SEQ ID NO: 7327; WAN024BYB_at; Start 354; Stop 378
caatgtaggaccttaccattttcaa

SEQ ID NO: 99168 - DNA, 25 bp, Artificial
  probe
  misc_feature (1)..(25): SEQ ID NO: 7327; WAN024BYB_at; Start 293; Stop 317
tctctccagaggtcagcgtcactta

SEQ ID NO: 99169 - DNA, 25 bp, Artificial
  probe
  misc_feature (1)..(25): SEQ ID NO: 7327; WAN024BYB_at; Start 155; Stop 179
gagagcttataactagtatcaaaac

SEQ ID NO: 99170 - DNA, 25 bp, Artificial
  probe
  misc_feature (1)..(25): SEQ ID NO: 7327; WAN024BYB_at; Start 243; Stop 267
ttacgttgagtttgggacagggcca

SEQ ID NO: 99171 - DNA, 25 bp, Artificial
  probe
  misc_feature (1)..(25): SEQ ID NO: 7327; WAN024BYB_at; Start 185; Stop 209
caaaaatggacggagataaggctat

SEQ ID NO: 99172 - DNA, 25 bp, Artificial
  probe
  misc_feature (1)..(25): SEQ ID NO: 7327; WAN024BYB_at; Start 279; Stop 303
tagccattcgggtatctctccagag

SEQ ID NO: 99173 - DNA, 25 bp, Artificial
  probe
  misc_feature (1)..(25): SEQ ID NO: 7327; WAN024BYB_at; Start 430; Stop 454
tatccagctttgagagacaatcaag

SEQ ID NO: 99174 - DNA, 25 bp, Artificial
  probe
  misc_feature (1)..(25): SEQ ID NO: 7327; WAN024BYB_at; Start 116; Stop 140
tccaagcagatgcaagaagactcgc

SEQ ID NO: 99175 - DNA, 25 bp, Artificial
  probe
  misc_feature (1)..(25): SEQ ID NO: 7327; WAN024BYB_at; Start 202; Stop 226
aaggctataggcgaggtttacacca

SEQ ID NO: 99176 - DNA, 25 bp, Artificial
  probe
  misc_feature (1)..(25): SEQ ID NO: 7327; WAN024BYB_at; Start 454; Stop 478
gagcgtgtgtctaagaatatttcga

SEQ ID NO: 99177 - DNA, 25 bp, Artificial
  probe
  misc_feature (1)..(25): SEQ ID NO: 7327; WAN024BYB_at; Start 105; Stop 129
tataaaggttgtccaagcagatgca

SEQ ID NO: 99178 - DNA, 25 bp, Artificial
  probe
  misc_feature (1)..(25): SEQ ID NO: 7327; WAN024BYB_at; Start 228; Stop 252
tcttaaatacgctccttacgttgag

SEQ ID NO: 99179 - DNA, 25 bp, Artificial
  probe
  misc_feature (1)..(25): SEQ ID NO: 7327; WAN024BYB_at; Start 401; Stop 425
tgtatggtcaacctgcccagcctta

SEQ ID NO: 99180 - DNA, 25 bp, Artificial
  probe
  misc_feature (1)..(25): SEQ ID NO: 7327; WAN024BYB_at; Start 327; Stop 351
tccgtggtatgtgcatgaagaccaa

SEQ ID NO: 99181 - DNA, 25 bp, Artificial
  probe
  misc_feature (1)..(25): SEQ ID NO: 7327; WAN024BYB_at; Start 140; Stop 164
caccagcgagagatggagagcttat

SEQ ID NO: 99182 - DNA, 25 bp, Artificial
  probe
  misc_feature (1)..(25): SEQ ID NO: 7052; WAN024BYC_at; Start 77; Stop 101
caaaagaaggatatgtcaaggaagc

SEQ ID NO: 99183 - DNA, 25 bp, Artificial
  probe
  misc_feature (1)..(25): SEQ ID NO: 7052; WAN024BYC_at; Start 220; Stop 244
aaagatggtgtgtgtatcgatagcc

SEQ ID NO: 99184 - DNA, 25 bp, Artificial
  probe
  misc_feature (1)..(25): SEQ ID NO: 7052; WAN024BYC_at; Start 253; Stop 277
gtgactcacagggttatttctaaaa

SEQ ID NO: 99185 - DNA, 25 bp, Artificial
  probe
  misc_feature (1)..(25): SEQ ID NO: 7052; WAN024BYC_at; Start 88; Stop 112
tatgtcaaggaagctgagacaatcc

SEQ ID NO: 99186 - DNA, 25 bp, Artificial
  probe
  misc_feature (1)..(25): SEQ ID NO: 7052; WAN024BYC_at; Start 5; Stop 29
ttttgaagcagagtagactgaaacc

SEQ ID NO: 99187 - DNA, 25 bp, Artificial
  probe
  misc_feature (1)..(25): SEQ ID NO: 7052; WAN024BYC_at; Start 60; Stop 84
cactgaggaaggtgtcgcaaaagaa

SEQ ID NO: 99188 - DNA, 25 bp, Artificial
  probe
  misc_feature (1)..(25): SEQ ID NO: 7052; WAN024BYC_at; Start 193; Stop 217
gccaacaagtcagctacaatcaaag

SEQ ID NO: 99189 - DNA, 25 bp, Artificial
  probe
  misc_feature (1)..(25): SEQ ID NO: 7052; WAN024BYC_at; Start 122; Stop 146
tgtggccagctagtagtaaactaca

SEQ ID NO: 99190 - DNA, 25 bp, Artificial
  probe
  misc_feature (1)..(25): SEQ ID NO: 7052; WAN024BYC_at; Start 280; Stop 304
gtctacacacatcatcaagttttgg

SEQ ID NO: 99191 - DNA, 25 bp, Artificial
  probe
  misc_feature (1)..(25): SEQ ID NO: 7052; WAN024BYC_at; Start 118; Stop 142
gagttgtggccagctagtagtaaac

SEQ ID NO: 99192 - DNA, 25 bp, Artificial
  probe
  misc_feature (1)..(25): SEQ ID NO: 7052; WAN024BYC_at; Start 240; Stop 264
tagccagacagaagtgactcacagg

SEQ ID NO: 99193 - DNA, 25 bp, Artificial
  probe
  misc_feature (1)..(25): SEQ ID NO: 7052; WAN024BYC_at; Start 205; Stop 229
gctacaatcaaagtgaaagatggtg

SEQ ID NO: 99194 - DNA, 25 bp, Artificial
  probe
  misc_feature (1)..(25): SEQ ID NO: 7052; WAN024BYC_at; Start 70; Stop 94
ggtgtcgcaaaagaaggatatgtca

SEQ ID NO: 99195 - DNA, 25 bp, Artificial
  probe
  misc_feature (1)..(25): SEQ ID NO: 7052; WAN024BYC_at; Start 171; Stop 195
caatgatattttgaacgcaaatgcc

SEQ ID NO: 99196 - DNA, 25 bp, Artificial
  probe
  misc_feature (1)..(25): SEQ ID NO: 7052; WAN024BYC_at; Start 271; Stop 295
tctaaaaaggtctacacacatcatc

SEQ ID NO: 99197 - DNA, 25 bp, Artificial
  probe
  misc_feature (1)..(25): SEQ ID NO: 7052; WAN024BYC_at; Start 304; Stop 328
gagttagagcgtgtcagggctacta

SEQ ID NO: 99198 - DNA, 25 bp, Artificial
  probe
  misc_feature (1)..(25): SEQ ID NO: 7052; WAN024BYC_at; Start 244; Stop 268
cagacagaagtgactcacagggtta

SEQ ID NO: 99199 - DNA, 25 bp, Artificial
  probe
  misc_feature (1)..(25): SEQ ID NO: 7052; WAN024BYC_at; Start 13; Stop 37
cagagtagactgaaaccttatccaa

SEQ ID NO: 99200 - DNA, 25 bp, Artificial
  probe
  misc_feature (1)..(25): SEQ ID NO: 7052; WAN024BYC_at; Start 128; Stop 152
cagctagtagtaaactacagtctga

SEQ ID NO: 99201 - DNA, 25 bp, Artificial
  probe
  misc_feature (1)..(25): SEQ ID NO: 7052; WAN024BYC_at; Start 295; Stop 319
caagttttggagttagagcgtgtca

SEQ ID NO: 99202 - DNA, 25 bp, Artificial
  probe
  misc_feature (1)..(25): SEQ ID NO: 7052; WAN024BYC_at; Start 107; Stop 131
caatccgtcttgagttgtggccagc

SEQ ID NO: 99203 - DNA, 25 bp, Artificial
  probe
  misc_feature (1)..(25): SEQ ID NO: 7052; WAN024BYC_at; Start 54; Stop 78
gactgtcactgaggaaggtgtcgca

SEQ ID NO: 99204 - DNA, 25 bp, Artificial
  probe
  misc_feature (1)..(25): SEQ ID NO: 7052; WAN024BYC_at; Start 27; Stop 51
accttatccaatgcgacggtttgaa

SEQ ID NO: 99205 - DNA, 25 bp, Artificial
  probe
  misc_feature (1)..(25): SEQ ID NO: 7052; WAN024BYC_at; Start 148; Stop 172
tctgaattgtatggcgagcgtgtca

SEQ ID NO: 99206 - DNA, 25 bp, Artificial
  probe
  misc_feature (1)..(25): SEQ ID NO: 7052; WAN024BYC_at; Start 110; Stop 134
tccgtcttgagttgtggccagctag

SEQ ID NO: 99207 - DNA, 25 bp, Artificial
  probe
  misc_feature (1)..(25): SEQ ID NO: 7052; WAN024BYC_at; Start 157; Stop 181
tatggcgagcgtgtcaatgatattt

SEQ ID NO: 99208 - DNA, 25 bp, Artificial
  probe
  misc_feature (1)..(25): SEQ ID NO: 7052; WAN024BYC_at; Start 92; Stop 116
tcaaggaagctgagacaatccgtct

SEQ ID NO: 99209 - DNA, 25 bp, Artificial
  probe
  misc_feature (1)..(25): SEQ ID NO: 7052; WAN024BYC_at; Start 183; Stop 207
gaacgcaaatgccaacaagtcagct

SEQ ID NO: 99210 - DNA, 25 bp, Artificial
  probe
  misc_feature (1)..(25): SEQ ID NO: 7052; WAN024BYC_at; Start 34; Stop 58
ccaatgcgacggtttgaaaagactg

SEQ ID NO: 99211 - DNA, 25 bp, Artificial
  probe
  misc_feature (1)..(25): SEQ ID NO: 7052; WAN024BYC_at; Start 234; Stop 258
tatcgatagccagacagaagtgact

SEQ ID NO: 99212 - DNA, 25 bp, Artificial
  probe
  misc_feature (1)..(25): SEQ ID NO: 7052; WAN024BYC_at; Start 20; Stop 44
gactgaaaccttatccaatgcgacg

SEQ ID NO: 99213 - DNA, 25 bp, Artificial
  probe
  misc_feature (1)..(25): SEQ ID NO: 7052; WAN024BYC_at; Start 143; Stop 167
tacagtctgaattgtatggcgagcg

SEQ ID NO: 99214 - DNA, 25 bp, Artificial
  probe
  misc_feature (1)..(25): SEQ ID NO: 7052; WAN024BYC_at; Start 228; Stop 252
tgtgtgtatcgatagccagacagaa

SEQ ID NO: 99215 - DNA, 25 bp, Artificial
  probe
  misc_feature (1)..(25): SEQ ID NO: 7052; WAN024BYC_at; Start 41; Stop 65
gacggtttgaaaagactgtcactga

SEQ ID NO: 99216 - DNA, 25 bp, Artificial
  probe
  misc_feature (1)..(25): SEQ ID NO: 6981; WAN024BYD_at; Start 219; Stop 243
ctacggagaaaacggcctgtctacg

SEQ ID NO: 99217 - DNA, 25 bp, Artificial
  probe
  misc_feature (1)..(25): SEQ ID NO: 6981; WAN024BYD_at; Start 125; Stop 149
taagtctcttaatacctgaggttgc

SEQ ID NO: 99218 - DNA, 25 bp, Artificial
  probe
  misc_feature (1)..(25): SEQ ID NO: 6981; WAN024BYD_at; Start 169; Stop 193
tcaggagcggaaggagagcattcaa

SEQ ID NO: 99219 - DNA, 25 bp, Artificial
  probe
  misc_feature (1)..(25): SEQ ID NO: 6981; WAN024BYD_at; Start 14; Stop 38
tgctgaagaaattaacaggcgaaga

SEQ ID NO: 99220 - DNA, 25 bp, Artificial
  probe
  misc_feature (1)..(25): SEQ ID NO: 6981; WAN024BYD_at; Start 191; Stop 215
caaggaccgaaggtggtatagcagt

SEQ ID NO: 99221 - DNA, 25 bp, Artificial
  probe
  misc_feature (1)..(25): SEQ ID NO: 6981; WAN024BYD_at; Start 178; Stop 202
gaaggagagcattcaaggaccgaag

SEQ ID NO: 99222 - DNA, 25 bp, Artificial
  probe
  misc_feature (1)..(25): SEQ ID NO: 6981; WAN024BYD_at; Start 197; Stop 221
ccgaaggtggtatagcagtagtcta

SEQ ID NO: 99223 - DNA, 25 bp, Artificial
  probe
  misc_feature (1)..(25): SEQ ID NO: 6981; WAN024BYD_at; Start 158; Stop 182
tccacaaccgctcaggagcggaagg

SEQ ID NO: 99224 - DNA, 25 bp, Artificial
  probe
  misc_feature (1)..(25): SEQ ID NO: 6981; WAN024BYD_at; Start 258; Stop 282
tatacgtatgcatagactagcaagg

SEQ ID NO: 99225 - DNA, 25 bp, Artificial
  probe
  misc_feature (1)..(25): SEQ ID NO: 6981; WAN024BYD_at; Start 92; Stop 116
cagagactaatcgaacatctttgac

SEQ ID NO: 99226 - DNA, 25 bp, Artificial
  probe
  misc_feature (1)..(25): SEQ ID NO: 6981; WAN024BYD_at; Start 187; Stop 211
cattcaaggaccgaaggtggtatag

SEQ ID NO: 99227 - DNA, 25 bp, Artificial
  probe
  misc_feature (1)..(25): SEQ ID NO: 6981; WAN024BYD_at; Start 26; Stop 50
taacaggcgaagaagatactcagct

SEQ ID NO: 99228 - DNA, 25 bp, Artificial
  probe
  misc_feature (1)..(25): SEQ ID NO: 6981; WAN024BYD_at; Start 53; Stop 77
tcatgttgctccaaacaagagctac

SEQ ID NO: 99229 - DNA, 25 bp, Artificial
  probe
  misc_feature (1)..(25): SEQ ID NO: 6981; WAN024BYD_at; Start 40; Stop 64
gatactcagcttctcatgttgctcc

SEQ ID NO: 99230 - DNA, 25 bp, Artificial
  probe
  misc_feature (1)..(25): SEQ ID NO: 6981; WAN024BYD_at; Start 283; Stop 307
gtggcaggccatgtttttgaagcag

SEQ ID NO: 99231 - DNA, 25 bp, Artificial
  probe
  misc_feature (1)..(25): SEQ ID NO: 6981; WAN024BYD_at; Start 215; Stop 239
tagtctacggagaaaacggcctgtc

SEQ ID NO: 99232 - DNA, 25 bp, Artificial
  probe
  misc_feature (1)..(25): SEQ ID NO: 6981; WAN024BYD_at; Start 151; Stop 175
atcgaactccacaaccgctcaggag

SEQ ID NO: 99233 - DNA, 25 bp, Artificial
  probe
  misc_feature (1)..(25): SEQ ID NO: 6981; WAN024BYD_at; Start 134; Stop 158
taatacctgaggttgctatcgaact

SEQ ID NO: 99234 - DNA, 25 bp, Artificial
  probe
  misc_feature (1)..(25): SEQ ID NO: 6981; WAN024BYD_at; Start 2; Stop 26
tgtctatagagttgctgaagaaatt

SEQ ID NO: 99235 - DNA, 25 bp, Artificial
  probe
  misc_feature (1)..(25): SEQ ID NO: 6981; WAN024BYD_at; Start 235; Stop 259
ctgtctacgggccttttacagcgta

SEQ ID NO: 99236 - DNA, 25 bp, Artificial
  probe
  misc_feature (1)..(25): SEQ ID NO: 6981; WAN024BYD_at; Start 253; Stop 277
cagcgtatacgtatgcatagactag

SEQ ID NO: 99237 - DNA, 25 bp, Artificial
  probe
  misc_feature (1)..(25): SEQ ID NO: 6981; WAN024BYD_at; Start 31; Stop 55
ggcgaagaagatactcagcttctca

SEQ ID NO: 99238 - DNA, 25 bp, Artificial
  probe
  misc_feature (1)..(25): SEQ ID NO: 6981; WAN024BYD_at; Start 10; Stop 34
gagttgctgaagaaattaacaggcg

SEQ ID NO: 99239 - DNA, 25 bp, Artificial
  probe
  misc_feature (1)..(25): SEQ ID NO: 6981; WAN024BYD_at; Start 86; Stop 110
tcttgtcagagactaatcgaacatc

SEQ ID NO: 99240 - DNA, 25 bp, Artificial
  probe
  misc_feature (1)..(25): SEQ ID NO: 6981; WAN024BYD_at; Start 113; Stop 137
tgacacctgctttaagtctcttaat

SEQ ID NO: 99241 - DNA, 25 bp, Artificial
  probe
  misc_feature (1)..(25): SEQ ID NO: 6981; WAN024BYD_at; Start 243; Stop 267
gggccttttacagcgtatacgtatg

SEQ ID NO: 99242 - DNA, 25 bp, Artificial
  probe
  misc_feature (1)..(25): SEQ ID NO: 6981; WAN024BYD_at; Start 99; Stop 123
taatcgaacatctttgacacctgct

SEQ ID NO: 99243 - DNA, 25 bp, Artificial
  probe
  misc_feature (1)..(25): SEQ ID NO: 6981; WAN024BYD_at; Start 59; Stop 83
tgctccaaacaagagctacaaatct

SEQ ID NO: 99244 - DNA, 25 bp, Artificial
  probe
  misc_feature (1)..(25): SEQ ID NO: 6981; WAN024BYD_at; Start 71; Stop 95
gagctacaaatcttatcttgtcaga

SEQ ID NO: 99245 - DNA, 25 bp, Artificial
  probe
  misc_feature (1)..(25): SEQ ID NO: 6981; WAN024BYD_at; Start 273; Stop 297
actagcaagggtggcaggccatgtt

SEQ ID NO: 99246 - DNA, 25 bp, Artificial
  probe
  misc_feature (1)..(25): SEQ ID NO: 6981; WAN024BYD_at; Start 212; Stop 236
cagtagtctacggagaaaacggcct

SEQ ID NO: 99247 - DNA, 25 bp, Artificial
  probe
  misc_feature (1)..(25): SEQ ID NO: 6981; WAN024BYD_at; Start 268; Stop 292
catagactagcaagggtggcaggcc

SEQ ID NO: 99248 - DNA, 25 bp, Artificial
  probe
  misc_feature (1)..(25): SEQ ID NO: 6981; WAN024BYD_at; Start 141; Stop 165
tgaggttgctatcgaactccacaac

SEQ ID NO: 99249 - DNA, 25 bp, Artificial
  probe
  misc_feature (1)..(25): SEQ ID NO: 6981; WAN024BYD_at; Start 104; Stop 128
gaacatctttgacacctgctttaag

SEQ ID NO: 99250 - DNA, 25 bp, Artificial
  probe
  misc_feature (1)..(25): SEQ ID NO: 7222; WAN024BYE_at; Start 147; Stop 171
tgagaaaatcctccctgaacctgag

SEQ ID NO: 99251 - DNA, 25 bp, Artificial
  probe
  misc_feature (1)..(25): SEQ ID NO: 7222; WAN024BYE_at; Start 119; Stop 143
gcaacggcgttgctatctcagatgt

SEQ ID NO: 99252 - DNA, 25 bp, Artificial
  probe
  misc_feature (1)..(25): SEQ ID NO: 7222; WAN024BYE_at; Start 66; Stop 90
ggaacttgagattactgaggagcgc

SEQ ID NO: 99253 - DNA, 25 bp, Artificial
  probe
  misc_feature (1)..(25): SEQ ID NO: 7222; WAN024BYE_at; Start 40; Stop 64
tcaaatgtgaaacgactggcaggag

SEQ ID NO: 99254 - DNA, 25 bp, Artificial
  probe
  misc_feature (1)..(25): SEQ ID NO: 7222; WAN024BYE_at; Start 70; Stop 94
cttgagattactgaggagcgctatg

SEQ ID NO: 99255 - DNA, 25 bp, Artificial
  probe
  misc_feature (1)..(25): SEQ ID NO: 7222; WAN024BYE_at; Start 41; Stop 65
caaatgtgaaacgactggcaggagg

SEQ ID NO: 99256 - DNA, 25 bp, Artificial
  probe
  misc_feature (1)..(25): SEQ ID NO: 7222; WAN024BYE_at; Start 108; Stop 132
caatattgccagcaacggcgttgct

SEQ ID NO: 99257 - DNA, 25 bp, Artificial
  probe
  misc_feature (1)..(25): SEQ ID NO: 7222; WAN024BYE_at; Start 160; Stop 184
cctgaacctgagttcttagaagagg

SEQ ID NO: 99258 - DNA, 25 bp, Artificial
  probe
  misc_feature (1)..(25): SEQ ID NO: 7222; WAN024BYE_at; Start 111; Stop 135
tattgccagcaacggcgttgctatc

SEQ ID NO: 99259 - DNA, 25 bp, Artificial
  probe
  misc_feature (1)..(25): SEQ ID NO: 7222; WAN024BYE_at; Start 136; Stop 160
tcagatgttcttgagaaaatcctcc

SEQ ID NO: 99260 - DNA, 25 bp, Artificial
  probe
  misc_feature (1)..(25): SEQ ID NO: 7222; WAN024BYE_at; Start 38; Stop 62
aatcaaatgtgaaacgactggcagg

SEQ ID NO: 99261 - DNA, 25 bp, Artificial
  probe
  misc_feature (1)..(25): SEQ ID NO: 7222; WAN024BYE_at; Start 15; Stop 39
caaacaagatttctatgattgggaa

SEQ ID NO: 99262 - DNA, 25 bp, Artificial
  probe
  misc_feature (1)..(25): SEQ ID NO: 7222; WAN024BYE_at; Start 162; Stop 186
tgaacctgagttcttagaagaggat

SEQ ID NO: 99263 - DNA, 25 bp, Artificial
  probe
  misc_feature (1)..(25): SEQ ID NO: 7222; WAN024BYE_at; Start 155; Stop 179
tcctccctgaacctgagttcttaga

SEQ ID NO: 99264 - DNA, 25 bp, Artificial
  probe
  misc_feature (1)..(25): SEQ ID NO: 7222; WAN024BYE_at; Start 101; Stop 125
tggctgacaatattgccagcaacgg

SEQ ID NO: 99265 - DNA, 25 bp, Artificial
  probe
  misc_feature (1)..(25): SEQ ID NO: 7222; WAN024BYE_at; Start 125; Stop 149
gcgttgctatctcagatgttcttga

SEQ ID NO: 99266 - DNA, 25 bp, Artificial
  probe
  misc_feature (1)..(25): SEQ ID NO: 7222; WAN024BYE_at; Start 34; Stop 58
tgggaatcaaatgtgaaacgactgg

SEQ ID NO: 99267 - DNA, 25 bp, Artificial
  probe
  misc_feature (1)..(25): SEQ ID NO: 7222; WAN024BYE_at; Start 153; Stop 177
aatcctccctgaacctgagttctta

SEQ ID NO: 99268 - DNA, 25 bp, Artificial
  probe
  misc_feature (1)..(25): SEQ ID NO: 7222; WAN024BYE_at; Start 144; Stop 168
tcttgagaaaatcctccctgaacct

SEQ ID NO: 99269 - DNA, 25 bp, Artificial
  probe
  misc_feature (1)..(25): SEQ ID NO: 7222; WAN024BYE_at; Start 106; Stop 130
gacaatattgccagcaacggcgttg

SEQ ID NO: 99270 - DNA, 25 bp, Artificial
  probe
  misc_feature (1)..(25): SEQ ID NO: 7222; WAN024BYE_at; Start 72; Stop 96
tgagattactgaggagcgctatgtt

SEQ ID NO: 99271 - DNA, 25 bp, Artificial
  probe
  misc_feature (1)..(25): SEQ ID NO: 7222; WAN024BYE_at; Start 105; Stop 129
tgacaatattgccagcaacggcgtt

SEQ ID NO: 99272 - DNA, 25 bp, Artificial
  probe
  misc_feature (1)..(25): SEQ ID NO: 7222; WAN024BYE_at; Start 36; Stop 60
ggaatcaaatgtgaaacgactggca

SEQ ID NO: 99273 - DNA, 25 bp, Artificial
  probe
  misc_feature (1)..(25): SEQ ID NO: 7222; WAN024BYE_at; Start 139; Stop 163
gatgttcttgagaaaatcctccctg

SEQ ID NO: 99274 - DNA, 25 bp, Artificial
  probe
  misc_feature (1)..(25): SEQ ID NO: 7222; WAN024BYE_at; Start 121; Stop 145
aacggcgttgctatctcagatgttc

SEQ ID NO: 99275 - DNA, 25 bp, Artificial
  probe
  misc_feature (1)..(25): SEQ ID NO: 7222; WAN024BYE_at; Start 19; Stop 43
caagatttctatgattgggaatcaa

SEQ ID NO: 99276 - DNA, 25 bp, Artificial
  probe
  misc_feature (1)..(25): SEQ ID NO: 7222; WAN024BYE_at; Start 150; Stop 174
gaaaatcctccctgaacctgagttc

SEQ ID NO: 99277 - DNA, 25 bp, Artificial
  probe
  misc_feature (1)..(25): SEQ ID NO: 7222; WAN024BYE_at; Start 103; Stop 127
gctgacaatattgccagcaacggcg

SEQ ID NO: 99278 - DNA, 25 bp, Artificial
  probe
  misc_feature (1)..(25): SEQ ID NO: 7222; WAN024BYE_at; Start 31; Stop 55
gattgggaatcaaatgtgaaacgac

SEQ ID NO: 99279 - DNA, 25 bp, Artificial
  probe
  misc_feature (1)..(25): SEQ ID NO: 7222; WAN024BYE_at; Start 141; Stop 165
tgttcttgagaaaatcctccctgaa

SEQ ID NO: 99280 - DNA, 25 bp, Artificial
  probe
  misc_feature (1)..(25): SEQ ID NO: 7222; WAN024BYE_at; Start 68; Stop 92
aacttgagattactgaggagcgcta

SEQ ID NO: 99281 - DNA, 25 bp, Artificial
  probe
  misc_feature (1)..(25): SEQ ID NO: 7222; WAN024BYE_at; Start 75; Stop 99
gattactgaggagcgctatgttgag

SEQ ID NO: 99282 - DNA, 25 bp, Artificial
  probe
  misc_feature (1)..(25): SEQ ID NO: 7222; WAN024BYE_at; Start 85; Stop 109
gagcgctatgttgagctggctgaca

SEQ ID NO: 99283 - DNA, 25 bp, Artificial
  probe
  misc_feature (1)..(25): SEQ ID NO: 7222; WAN024BYE_at; Start 96; Stop 120
tgagctggctgacaatattgccagc

SEQ ID NO: 99284 - DNA, 25 bp, Artificial
  probe
  misc_feature (1)..(25): SEQ ID NO: 6589; WAN024BYF_at; Start 144; Stop 168
aattgtagaggtgctggaggattta

SEQ ID NO: 99285 - DNA, 25 bp, Artificial
  probe
  misc_feature (1)..(25): SEQ ID NO: 6589; WAN024BYF_at; Start 2; Stop 26
tgagcttattgctacgacgtcatta

SEQ ID NO: 99286 - DNA, 25 bp, Artificial
  probe
  misc_feature (1)..(25): SEQ ID NO: 6589; WAN024BYF_at; Start 25; Stop 49
tatatccaagaggagcaggttagcc

SEQ ID NO: 99287 - DNA, 25 bp, Artificial
  probe
  misc_feature (1)..(25): SEQ ID NO: 6589; WAN024BYF_at; Start 75; Stop 99
tctagaagagttgaagaatctagcc

SEQ ID NO: 99288 - DNA, 25 bp, Artificial
  probe
  misc_feature (1)..(25): SEQ ID NO: 6589; WAN024BYF_at; Start 22; Stop 46
cattatatccaagaggagcaggtta

SEQ ID NO: 99289 - DNA, 25 bp, Artificial
  probe
  misc_feature (1)..(25): SEQ ID NO: 6589; WAN024BYF_at; Start 133; Stop 157
tcaaaagccgaaattgtagaggtgc

SEQ ID NO: 99290 - DNA, 25 bp, Artificial
  probe
  misc_feature (1)..(25): SEQ ID NO: 6589; WAN024BYF_at; Start 155; Stop 179
tgctggaggatttaaaaagtgaaat

SEQ ID NO: 99291 - DNA, 25 bp, Artificial
  probe
  misc_feature (1)..(25): SEQ ID NO: 6589; WAN024BYF_at; Start 31; Stop 55
caagaggagcaggttagccagtatt

SEQ ID NO: 99292 - DNA, 25 bp, Artificial
  probe
  misc_feature (1)..(25): SEQ ID NO: 6589; WAN024BYF_at; Start 19; Stop 43
cgtcattatatccaagaggagcagg

SEQ ID NO: 99293 - DNA, 25 bp, Artificial
  probe
  misc_feature (1)..(25): SEQ ID NO: 6589; WAN024BYF_at; Start 99; Stop 123
caaagaagctggcatagctggcgcc

SEQ ID NO: 99294 - DNA, 25 bp, Artificial
  probe
  misc_feature (1)..(25): SEQ ID NO: 6589; WAN024BYF_at; Start 16; Stop 40
cgacgtcattatatccaagaggagc

SEQ ID NO: 99295 - DNA, 25 bp, Artificial
  probe
  misc_feature (1)..(25): SEQ ID NO: 6589; WAN024BYF_at; Start 124; Stop 148
tataagttatcaaaagccgaaattg

SEQ ID NO: 99296 - DNA, 25 bp, Artificial
  probe
  misc_feature (1)..(25): SEQ ID NO: 6589; WAN024BYF_at; Start 137; Stop 161
aagccgaaattgtagaggtgctgga

SEQ ID NO: 99297 - DNA, 25 bp, Artificial
  probe
  misc_feature (1)..(25): SEQ ID NO: 6589; WAN024BYF_at; Start 115; Stop 139
gctggcgcctataagttatcaaaag

SEQ ID NO: 99298 - DNA, 25 bp, Artificial
  probe
  misc_feature (1)..(25): SEQ ID NO: 6589; WAN024BYF_at; Start 149; Stop 173
tagaggtgctggaggatttaaaaag

SEQ ID NO: 99299 - DNA, 25 bp, Artificial
  probe
  misc_feature (1)..(25): SEQ ID NO: 6589; WAN024BYF_at; Start 118; Stop 142
ggcgcctataagttatcaaaagccg

SEQ ID NO: 99300 - DNA, 25 bp, Artificial
  probe
  misc_feature (1)..(25): SEQ ID NO: 6589; WAN024BYF_at; Start 113; Stop 137
tagctggcgcctataagttatcaaa

SEQ ID NO: 99301 - DNA, 25 bp, Artificial
  probe
  misc_feature (1)..(25): SEQ ID NO: 6589; WAN024BYF_at; Start 111; Stop 135
catagctggcgcctataagttatca

SEQ ID NO: 99302 - DNA, 25 bp, Artificial
  probe
  misc_feature (1)..(25): SEQ ID NO: 6589; WAN024BYF_at; Start 121; Stop 145
gcctataagttatcaaaagccgaaa

SEQ ID NO: 99303 - DNA, 25 bp, Artificial
  probe
  misc_feature (1)..(25): SEQ ID NO: 6589; WAN024BYF_at; Start 101; Stop 125
aagaagctggcatagctggcgccta

SEQ ID NO: 99304 - DNA, 25 bp, Artificial
  probe
  misc_feature (1)..(25): SEQ ID NO: 6589; WAN024BYF_at; Start 106; Stop 130
gctggcatagctggcgcctataagt

SEQ ID NO: 99305 - DNA, 25 bp, Artificial
  probe
  misc_feature (1)..(25): SEQ ID NO: 6589; WAN024BYF_at; Start 93; Stop 117
tctagccaaagaagctggcatagct

SEQ ID NO: 99306 - DNA, 25 bp, Artificial
  probe
  misc_feature (1)..(25): SEQ ID NO: 6589; WAN024BYF_at; Start 78; Stop 102
agaagagttgaagaatctagccaaa

SEQ ID NO: 99307 - DNA, 25 bp, Artificial
  probe
  misc_feature (1)..(25): SEQ ID NO: 6589; WAN024BYF_at; Start 27; Stop 51
tatccaagaggagcaggttagccag

SEQ ID NO: 99308 - DNA, 25 bp, Artificial
  probe
  misc_feature (1)..(25): SEQ ID NO: 6589; WAN024BYF_at; Start 95; Stop 119
tagccaaagaagctggcatagctgg

SEQ ID NO: 99309 - DNA, 25 bp, Artificial
  probe
  misc_feature (1)..(25): SEQ ID NO: 6589; WAN024BYF_at; Start 34; Stop 58
gaggagcaggttagccagtattctg

SEQ ID NO: 99310 - DNA, 25 bp, Artificial
  probe
  misc_feature (1)..(25): SEQ ID NO: 6589; WAN024BYF_at; Start 12; Stop 36
gctacgacgtcattatatccaagag

SEQ ID NO: 99311 - DNA, 25 bp, Artificial
  probe
  misc_feature (1)..(25): SEQ ID NO: 6589; WAN024BYF_at; Start 29; Stop 53
tccaagaggagcaggttagccagta

SEQ ID NO: 99312 - DNA, 25 bp, Artificial
  probe
  misc_feature (1)..(25): SEQ ID NO: 6589; WAN024BYF_at; Start 103; Stop 127
gaagctggcatagctggcgcctata

SEQ ID NO: 99313 - DNA, 25 bp, Artificial
  probe
  misc_feature (1)..(25): SEQ ID NO: 6589; WAN024BYF_at; Start 72; Stop 96
gactctagaagagttgaagaatcta

SEQ ID NO: 99314 - DNA, 25 bp, Artificial
  probe
  misc_feature (1)..(25): SEQ ID NO: 6589; WAN024BYF_at; Start 39; Stop 63
gcaggttagccagtattctgattta

SEQ ID NO: 99315 - DNA, 25 bp, Artificial
  probe
  misc_feature (1)..(25): SEQ ID NO: 6589; WAN024BYF_at; Start 43; Stop 67
gttagccagtattctgatttagaga

SEQ ID NO: 99316 - DNA, 25 bp, Artificial
  probe
  misc_feature (1)..(25): SEQ ID NO: 6589; WAN024BYF_at; Start 55; Stop 79
tctgatttagagaataagactctag

SEQ ID NO: 99317 - DNA, 25 bp, Artificial
  probe
  misc_feature (1)..(25): SEQ ID NO: 6589; WAN024BYF_at; Start 62; Stop 86
tagagaataagactctagaagagtt

SEQ ID NO: 99318 - DNA, 25 bp, Artificial
  probe
  misc_feature (1)..(25): SEQ ID NO: 6937; WAN024BYG_at; Start 209; Stop 233
gttatgaaattaccgatgaagctct

SEQ ID NO: 99319 - DNA, 25 bp, Artificial
  probe
  misc_feature (1)..(25): SEQ ID NO: 6937; WAN024BYG_at; Start 168; Stop 192
tactaaaaagaccactatgaccatc

SEQ ID NO: 99320 - DNA, 25 bp, Artificial
  probe
  misc_feature (1)..(25): SEQ ID NO: 6937; WAN024BYG_at; Start 623; Stop 647
cagacgatgccaacaaatatggtgc

SEQ ID NO: 99321 - DNA, 25 bp, Artificial
  probe
  misc_feature (1)..(25): SEQ ID NO: 6937; WAN024BYG_at; Start 248; Stop 272
gcgacccactaggtcaagctactta

SEQ ID NO: 99322 - DNA, 25 bp, Artificial
  probe
  misc_feature (1)..(25): SEQ ID NO: 6937; WAN024BYG_at; Start 518; Stop 542
tatccggaacgttcggtgaagttgc

SEQ ID NO: 99323 - DNA, 25 bp, Artificial
  probe
  misc_feature (1)..(25): SEQ ID NO: 6937; WAN024BYG_at; Start 607; Stop 631
cctagccaaactcagacagacgatg

SEQ ID NO: 99324 - DNA, 25 bp, Artificial
  probe
  misc_feature (1)..(25): SEQ ID NO: 6937; WAN024BYG_at; Start 717; Stop 741
tatcactggcgatgaacactatggt

SEQ ID NO: 99325 - DNA, 25 bp, Artificial
  probe
  misc_feature (1)..(25): SEQ ID NO: 6937; WAN024BYG_at; Start 395; Stop 419
tttttgaggacgaagaagatgcgca

SEQ ID NO: 99326 - DNA, 25 bp, Artificial
  probe
  misc_feature (1)..(25): SEQ ID NO: 6937; WAN024BYG_at; Start 747; Stop 771
cctatacgaccctacacgagttgta

SEQ ID NO: 99327 - DNA, 25 bp, Artificial
  probe
  misc_feature (1)..(25): SEQ ID NO: 6937; WAN024BYG_at; Start 686; Stop 710
cagaccgtgacatccttaaaaagac

SEQ ID NO: 99328 - DNA, 25 bp, Artificial
  probe
  misc_feature (1)..(25): SEQ ID NO: 6937; WAN024BYG_at; Start 304; Stop 328
gatgatgatttggtcgcagtagcta

SEQ ID NO: 99329 - DNA, 25 bp, Artificial
  probe
  misc_feature (1)..(25): SEQ ID NO: 6937; WAN024BYG_at; Start 153; Stop 177
tccagaccaattgactactaaaaag

SEQ ID NO: 99330 - DNA, 25 bp, Artificial
  probe
  misc_feature (1)..(25): SEQ ID NO: 6937; WAN024BYG_at; Start 654; Stop 678
tatcatgctaaaacgtgatgtggct

SEQ ID NO: 99331 - DNA, 25 bp, Artificial
  probe
  misc_feature (1)..(25): SEQ ID NO: 6937; WAN024BYG_at; Start 352; Stop 376
gaaactcctacaactcttgcagcaa

SEQ ID NO: 99332 - DNA, 25 bp, Artificial
  probe
  misc_feature (1)..(25): SEQ ID NO: 6937; WAN024BYG_at; Start 135; Stop 159
agaaggtcaagctatttctccagac

SEQ ID NO: 99333 - DNA, 25 bp, Artificial
  probe
  misc_feature (1)..(25): SEQ ID NO: 6937; WAN024BYG_at; Start 55; Stop 79
gaaacagcactccaaggacaaccag

SEQ ID NO: 99334 - DNA, 25 bp, Artificial
  probe
  misc_feature (1)..(25): SEQ ID NO: 6937; WAN024BYG_at; Start 369; Stop 393
tgcagcaattgataaagctcttgag

SEQ ID NO: 99335 - DNA, 25 bp, Artificial
  probe
  misc_feature (1)..(25): SEQ ID NO: 6937; WAN024BYG_at; Start 733; Stop 757
cactatggtgtttacctatacgacc

SEQ ID NO: 99336 - DNA, 25 bp, Artificial
  probe
  misc_feature (1)..(25): SEQ ID NO: 6937; WAN024BYG_at; Start 231; Stop 255
tcttttgtcaggtcttggcgaccca

SEQ ID NO: 99337 - DNA, 25 bp, Artificial
  probe
  misc_feature (1)..(25): SEQ ID NO: 6937; WAN024BYG_at; Start 424; Stop 448
gttgctatcatcaaccctaaagatg

SEQ ID NO: 99338 - DNA, 25 bp, Artificial
  probe
  misc_feature (1)..(25): SEQ ID NO: 6937; WAN024BYG_at; Start 461; Stop 485
aaactgacgtagcaaaagaatggac

SEQ ID NO: 99339 - DNA, 25 bp, Artificial
  probe
  misc_feature (1)..(25): SEQ ID NO: 6937; WAN024BYG_at; Start 670; Stop 694
gatgtggctatcgaaacagaccgtg

SEQ ID NO: 99340 - DNA, 25 bp, Artificial
  probe
  misc_feature (1)..(25): SEQ ID NO: 6937; WAN024BYG_at; Start 536; Stop 560
aagttgccggtgtgcaaatcgtccg

SEQ ID NO: 99341 - DNA, 25 bp, Artificial
  probe
  misc_feature (1)..(25): SEQ ID NO: 6937; WAN024BYG_at; Start 40; Stop 64
ccacttgcttatgtggaaacagcac

SEQ ID NO: 99342 - DNA, 25 bp, Artificial
  probe
  misc_feature (1)..(25): SEQ ID NO: 6937; WAN024BYG_at; Start 185; Stop 209
tgaccatcaaaaaggctgctaaagg

SEQ ID NO: 99343 - DNA, 25 bp, Artificial
  probe
  misc_feature (1)..(25): SEQ ID NO: 6937; WAN024BYG_at; Start 504; Stop 528
tgcagatatggttgtatccggaacg

SEQ ID NO: 99344 - DNA, 25 bp, Artificial
  probe
  misc_feature (1)..(25): SEQ ID NO: 6937; WAN024BYG_at; Start 89; Stop 113
taacagttccagcatgggagtatgc

SEQ ID NO: 99345 - DNA, 25 bp, Artificial
  probe
  misc_feature (1)..(25): SEQ ID NO: 6937; WAN024BYG_at; Start 71; Stop 95
gacaaccagggaatactctaacagt

SEQ ID NO: 99346 - DNA, 25 bp, Artificial
  probe
  misc_feature (1)..(25): SEQ ID NO: 6937; WAN024BYG_at; Start 483; Stop 507
gactaaaggttcagagcttggtgca

SEQ ID NO: 99347 - DNA, 25 bp, Artificial
  probe
  misc_feature (1)..(25): SEQ ID NO: 6937; WAN024BYG_at; Start 445; Stop 469
gatgctatcaagctaaaaactgacg

SEQ ID NO: 99348 - DNA, 25 bp, Artificial
  probe
  misc_feature (1)..(25): SEQ ID NO: 6937; WAN024BYG_at; Start 591; Stop 615
tatcgtcaaagtctctcctagccaa

SEQ ID NO: 99349 - DNA, 25 bp, Artificial
  probe
  misc_feature (1)..(25): SEQ ID NO: 6937; WAN024BYG_at; Start 273; Stop 297
tcagcttggtttggctattgctaac

SEQ ID NO: 99350 - DNA, 25 bp, Artificial
  probe
  misc_feature (1)..(25): SEQ ID NO: 6937; WAN024BYG_at; Start 554; Stop 578
tcgtccgttctaaaaaagttgatga

SEQ ID NO: 99351 - DNA, 25 bp, Artificial
  probe
  misc_feature (1)..(25): SEQ ID NO: 6937; WAN024BYG_at; Start 703; Stop 727
aaaaagacaacggttatcactggcg

SEQ ID NO: 99352 - DNA, 25 bp, Artificial
  probe
  misc_feature (1)..(25): SEQ ID NO: 6964; WAN024BYH_at; Start 43; Stop 67
gagaccgtcgacactcaaggaaatg

SEQ ID NO: 99353 - DNA, 25 bp, Artificial
  probe
  misc_feature (1)..(25): SEQ ID NO: 6964; WAN024BYH_at; Start 273; Stop 297
tattgctcgtaaagaattgaccgca

SEQ ID NO: 99354 - DNA, 25 bp, Artificial
  probe
  misc_feature (1)..(25): SEQ ID NO: 6964; WAN024BYH_at; Start 455; Stop 479
gagccccaatgaaacaagcgccagt

SEQ ID NO: 99355 - DNA, 25 bp, Artificial
  probe
  misc_feature (1)..(25): SEQ ID NO: 6964; WAN024BYH_at; Start 325; Stop 349
gacttacctgttgagttagtgaacg

SEQ ID NO: 99356 - DNA, 25 bp, Artificial
  probe
  misc_feature (1)..(25): SEQ ID NO: 6964; WAN024BYH_at; Start 289; Stop 313
ttgaccgcagaagctaaagcaatgc

SEQ ID NO: 99357 - DNA, 25 bp, Artificial
  probe
  misc_feature (1)..(25): SEQ ID NO: 6964; WAN024BYH_at; Start 58; Stop 82
caaggaaatgttgatacagtgcaag

SEQ ID NO: 99358 - DNA, 25 bp, Artificial
  probe
  misc_feature (1)..(25): SEQ ID NO: 6964; WAN024BYH_at; Start 552; Stop 576
gaacccagaactctataagaaattg

SEQ ID NO: 99359 - DNA, 25 bp, Artificial
  probe
  misc_feature (1)..(25): SEQ ID NO: 6964; WAN024BYH_at; Start 239; Stop 263
agcgtgagcaagaactagctgaccg

SEQ ID NO: 99360 - DNA, 25 bp, Artificial
  probe
  misc_feature (1)..(25): SEQ ID NO: 6964; WAN024BYH_at; Start 175; Stop 199
gaaaatgaagctaagaaacttgcca

SEQ ID NO: 99361 - DNA, 25 bp, Artificial
  probe
  misc_feature (1)..(25): SEQ ID NO: 6964; WAN024BYH_at; Start 511; Stop 535
gctcgtatgggttatcagagtcgaa

SEQ ID NO: 99362 - DNA, 25 bp, Artificial
  probe
  misc_feature (1)..(25): SEQ ID NO: 6964; WAN024BYH_at; Start 121; Stop 145
ggtaagatgctatctgccgagcgct

SEQ ID NO: 99363 - DNA, 25 bp, Artificial
  probe
  misc_feature (1)..(25): SEQ ID NO: 6964; WAN024BYH_at; Start 78; Stop 102
gcaagaagaaaagcacgaacgaact

SEQ ID NO: 99364 - DNA, 25 bp, Artificial
  probe
  misc_feature (1)..(25): SEQ ID NO: 6964; WAN024BYH_at; Start 387; Stop 411
tgtcgctgtattgcagaaatcatgg

SEQ ID NO: 99365 - DNA, 25 bp, Artificial
  probe
  misc_feature (1)..(25): SEQ ID NO: 6964; WAN024BYH_at; Start 434; Stop 458
tacaagaaaagctaaaaggcggagc

SEQ ID NO: 99366 - DNA, 25 bp, Artificial
  probe
  misc_feature (1)..(25): SEQ ID NO: 6964; WAN024BYH_at; Start 357; Stop 381
tttgacaagcgcagagacggtatcg

SEQ ID NO: 99367 - DNA, 25 bp, Artificial
  probe
  misc_feature (1)..(25): SEQ ID NO: 6964; WAN024BYH_at; Start 106; Stop 130
actcgtgctgaaatcggtaagatgc

SEQ ID NO: 99368 - DNA, 25 bp, Artificial
  probe
  misc_feature (1)..(25): SEQ ID NO: 6964; WAN024BYH_at; Start 206; Stop 230
acgctgacgagaaacagaaatatca

SEQ ID NO: 99369 - DNA, 25 bp, Artificial
  probe
  misc_feature (1)..(25): SEQ ID NO: 6964; WAN024BYH_at; Start 372; Stop 396
gacggtatcgcagtctgtcgctgta

SEQ ID NO: 99370 - DNA, 25 bp, Artificial
  probe
  misc_feature (1)..(25): SEQ ID NO: 6964; WAN024BYH_at; Start 133; Stop 157
tctgccgagcgctctaaatgggaag

SEQ ID NO: 99371 - DNA, 25 bp, Artificial
  probe
  misc_feature (1)..(25): SEQ ID NO: 6964; WAN024BYH_at; Start 256; Stop 280
gctgaccgtgaaaaggctattgctc

SEQ ID NO: 99372 - DNA, 25 bp, Artificial
  probe
  misc_feature (1)..(25): SEQ ID NO: 6964; WAN024BYH_at; Start 303; Stop 327
taaagcaatgctaagtgaacgtgac

SEQ ID NO: 99373 - DNA, 25 bp, Artificial
  probe
  misc_feature (1)..(25): SEQ ID NO: 6964; WAN024BYH_at; Start 489; Stop 513
cggtatcacaaaagaagaatttgct

SEQ ID NO: 99374 - DNA, 25 bp, Artificial
  probe
  misc_feature (1)..(25): SEQ ID NO: 6964; WAN024BYH_at; Start 191; Stop 215
aacttgccaagatgaacgctgacga

SEQ ID NO: 99375 - DNA, 25 bp, Artificial
  probe
  misc_feature (1)..(25): SEQ ID NO: 6964; WAN024BYH_at; Start 10; Stop 34
gaaatcaatgcaactgtatctactg

SEQ ID NO: 99376 - DNA, 25 bp, Artificial
  probe
  misc_feature (1)..(25): SEQ ID NO: 6964; WAN024BYH_at; Start 400; Stop 424
cagaaatcatgggagcaagccgtgc

SEQ ID NO: 99377 - DNA, 25 bp, Artificial
  probe
  misc_feature (1)..(25): SEQ ID NO: 6964; WAN024BYH_at; Start 94; Stop 118
gaacgaactttcactcgtgctgaaa

SEQ ID NO: 99378 - DNA, 25 bp, Artificial
  probe
  misc_feature (1)..(25): SEQ ID NO: 6964; WAN024BYH_at; Start 28; Stop 52
tctactgaatcaactgagaccgtcg

SEQ ID NO: 99379 - DNA, 25 bp, Artificial
  probe
  misc_feature (1)..(25): SEQ ID NO: 6964; WAN024BYH_at; Start 344; Stop 368
tgaacgtggttgatttgacaagcgc

SEQ ID NO: 99380 - DNA, 25 bp, Artificial
  probe
  misc_feature (1)..(25): SEQ ID NO: 6964; WAN024BYH_at; Start 537; Stop 561
tgaactctatcaaaagaacccagaa

SEQ ID NO: 99381 - DNA, 25 bp, Artificial
  probe
  misc_feature (1)..(25): SEQ ID NO: 6964; WAN024BYH_at; Start 469; Stop 493
caagcgccagtcgatagtgacggta

SEQ ID NO: 99382 - DNA, 25 bp, Artificial
  probe
  misc_feature (1)..(25): SEQ ID NO: 6964; WAN024BYH_at; Start 223; Stop 247
aaatatcagttggatcagcgtgagc

SEQ ID NO: 99383 - DNA, 25 bp, Artificial
  probe
  misc_feature (1)..(25): SEQ ID NO: 6964; WAN024BYH_at; Start 162; Stop 186
gcaagaagccaaggaaaatgaagct

SEQ ID NO: 99384 - DNA, 25 bp, Artificial
  probe
  misc_feature (1)..(25): SEQ ID NO: 6964; WAN024BYH_at; Start 415; Stop 439
caagccgtgcaaaaaggcgtacaag

SEQ ID NO: 99385 - DNA, 25 bp, Artificial
  probe
  misc_feature (1)..(25): SEQ ID NO: 6964; WAN024BYH_at; Start 147; Stop 171
taaatgggaagctgagcaagaagcc

SEQ ID NO: 99386 - DNA, 25 bp, Artificial
  probe
  misc_feature (1)..(25): SEQ ID NO: 7007; WAN024BYI_at; Start 157; Stop 181
tgtggagattatgcagaaattacgc

SEQ ID NO: 99387 - DNA, 25 bp, Artificial
  probe
  misc_feature (1)..(25): SEQ ID NO: 7007; WAN024BYI_at; Start 102; Stop 126
cctgcaaaactggaaagctcttgtt

SEQ ID NO: 99388 - DNA, 25 bp, Artificial
  probe
  misc_feature (1)..(25): SEQ ID NO: 7007; WAN024BYI_at; Start 30; Stop 54
gcaagaattttcacgcttatcaggt

SEQ ID NO: 99389 - DNA, 25 bp, Artificial
  probe
  misc_feature (1)..(25): SEQ ID NO: 7007; WAN024BYI_at; Start 220; Stop 244
gccaaggtttcaaatcgtgccatta

SEQ ID NO: 99390 - DNA, 25 bp, Artificial
  probe
  misc_feature (1)..(25): SEQ ID NO: 7007; WAN024BYI_at; Start 207; Stop 231
tgtggatgtttacgccaaggtttca

SEQ ID NO: 99391 - DNA, 25 bp, Artificial
  probe
  misc_feature (1)..(25): SEQ ID NO: 7007; WAN024BYI_at; Start 84; Stop 108
agtttggtttagcaagaccctgcaa

SEQ ID NO: 99392 - DNA, 25 bp, Artificial
  probe
  misc_feature (1)..(25): SEQ ID NO: 7007; WAN024BYI_at; Start 81; Stop 105
tgtagtttggtttagcaagaccctg

SEQ ID NO: 99393 - DNA, 25 bp, Artificial
  probe
  misc_feature (1)..(25): SEQ ID NO: 7007; WAN024BYI_at; Start 201; Stop 225
gacttatgtggatgtttacgccaag

SEQ ID NO: 99394 - DNA, 25 bp, Artificial
  probe
  misc_feature (1)..(25): SEQ ID NO: 7007; WAN024BYI_at; Start 54; Stop 78
tcgtgaaatcaaagcagaagactgc

SEQ ID NO: 99395 - DNA, 25 bp, Artificial
  probe
  misc_feature (1)..(25): SEQ ID NO: 7007; WAN024BYI_at; Start 177; Stop 201
tacgcataacggagataagaatgag

SEQ ID NO: 99396 - DNA, 25 bp, Artificial
  probe
  misc_feature (1)..(25): SEQ ID NO: 7007; WAN024BYI_at; Start 67; Stop 91
gcagaagactgctttgtagtttggt

SEQ ID NO: 99397 - DNA, 25 bp, Artificial
  probe
  misc_feature (1)..(25): SEQ ID NO: 7007; WAN024BYI_at; Start 150; Stop 174
cgaaccttgtggagattatgcagaa

SEQ ID NO: 99398 - DNA, 25 bp, Artificial
  probe
  misc_feature (1)..(25): SEQ ID NO: 7007; WAN024BYI_at; Start 126; Stop 150
tagtacgaacgcaattacatcaagc

SEQ ID NO: 99399 - DNA, 25 bp, Artificial
  probe
  misc_feature (1)..(25): SEQ ID NO: 7007; WAN024BYI_at; Start 120; Stop 144
tcttgttagtacgaacgcaattaca

SEQ ID NO: 99400 - DNA, 25 bp, Artificial
  probe
  misc_feature (1)..(25): SEQ ID NO: 7007; WAN024BYI_at; Start 24; Stop 48
ggcatcgcaagaattttcacgctta

SEQ ID NO: 99401 - DNA, 25 bp, Artificial
  probe
  misc_feature (1)..(25): SEQ ID NO: 7007; WAN024BYI_at; Start 137; Stop 161
caattacatcaagcgaaccttgtgg

SEQ ID NO: 99402 - DNA, 25 bp, Artificial
  probe
  misc_feature (1)..(25): SEQ ID NO: 7007; WAN024BYI_at; Start 225; Stop 249
ggtttcaaatcgtgccattaaagat

SEQ ID NO: 99403 - DNA, 25 bp, Artificial
  probe
  misc_feature (1)..(25): SEQ ID NO: 7007; WAN024BYI_at; Start 99; Stop 123
gaccctgcaaaactggaaagctctt

SEQ ID NO: 99404 - DNA, 25 bp, Artificial
  probe
  misc_feature (1)..(25): SEQ ID NO: 7007; WAN024BYI_at; Start 211; Stop 235
gatgtttacgccaaggtttcaaatc

SEQ ID NO: 99405 - DNA, 25 bp, Artificial
  probe
  misc_feature (1)..(25): SEQ ID NO: 7007; WAN024BYI_at; Start 12; Stop 36
agcaaaacaattggcatcgcaagaa

SEQ ID NO: 99406 - DNA, 25 bp, Artificial
  probe
  misc_feature (1)..(25): SEQ ID NO: 7007; WAN024BYI_at; Start 146; Stop 170
caagcgaaccttgtggagattatgc

SEQ ID NO: 99407 - DNA, 25 bp, Artificial
  probe
  misc_feature (1)..(25): SEQ ID NO: 7007; WAN024BYI_at; Start 91; Stop 115
tttagcaagaccctgcaaaactgga

SEQ ID NO: 99408 - DNA, 25 bp, Artificial
  probe
  misc_feature (1)..(25): SEQ ID NO: 7007; WAN024BYI_at; Start 95; Stop 119
gcaagaccctgcaaaactggaaagc

SEQ ID NO: 99409 - DNA, 25 bp, Artificial
  probe
  misc_feature (1)..(25): SEQ ID NO: 7007; WAN024BYI_at; Start 132; Stop 156
gaacgcaattacatcaagcgaacct

SEQ ID NO: 99410 - DNA, 25 bp, Artificial
  probe
  misc_feature (1)..(25): SEQ ID NO: 7007; WAN024BYI_at; Start 198; Stop 222
tgagacttatgtggatgtttacgcc

SEQ ID NO: 99411 - DNA, 25 bp, Artificial
  probe
  misc_feature (1)..(25): SEQ ID NO: 7007; WAN024BYI_at; Start 41; Stop 65
cacgcttatcaggtcgtgaaatcaa

SEQ ID NO: 99412 - DNA, 25 bp, Artificial
  probe
  misc_feature (1)..(25): SEQ ID NO: 7007; WAN024BYI_at; Start 34; Stop 58
gaattttcacgcttatcaggtcgtg

SEQ ID NO: 99413 - DNA, 25 bp, Artificial
  probe
  misc_feature (1)..(25): SEQ ID NO: 7007; WAN024BYI_at; Start 217; Stop 241
tacgccaaggtttcaaatcgtgcca

SEQ ID NO: 99414 - DNA, 25 bp, Artificial
  probe
  misc_feature (1)..(25): SEQ ID NO: 7007; WAN024BYI_at; Start 114; Stop 138
gaaagctcttgttagtacgaacgca

SEQ ID NO: 99415 - DNA, 25 bp, Artificial
  probe
  misc_feature (1)..(25): SEQ ID NO: 7007; WAN024BYI_at; Start 7; Stop 31
gaaaaagcaaaacaattggcatcgc

SEQ ID NO: 99416 - DNA, 25 bp, Artificial
  probe
  misc_feature (1)..(25): SEQ ID NO: 7007; WAN024BYI_at; Start 181; Stop 205
cataacggagataagaatgagactt

SEQ ID NO: 99417 - DNA, 25 bp, Artificial
  probe
  misc_feature (1)..(25): SEQ ID NO: 7007; WAN024BYI_at; Start 169; Stop 193
gcagaaattacgcataacggagata

SEQ ID NO: 99418 - DNA, 25 bp, Artificial
  probe
  misc_feature (1)..(25): SEQ ID NO: 7007; WAN024BYI_at; Start 47; Stop 71
tatcaggtcgtgaaatcaaagcaga

SEQ ID NO: 99419 - DNA, 25 bp, Artificial
  probe
  misc_feature (1)..(25): SEQ ID NO: 7007; WAN024BYI_at; Start 19; Stop 43
caattggcatcgcaagaattttcac

SEQ ID NO: 99420 - DNA, 25 bp, Artificial
  probe
  misc_feature (1)..(25): SEQ ID NO: 6403; WAN024BYJ_at; Start 144; Stop 168
aacgcttgaaggattgatggttgca

SEQ ID NO: 99421 - DNA, 25 bp, Artificial
  probe
  misc_feature (1)..(25): SEQ ID NO: 6403; WAN024BYJ_at; Start 55; Stop 79
gaagaatctatagatgagctatgcg

SEQ ID NO: 99422 - DNA, 25 bp, Artificial
  probe
  misc_feature (1)..(25): SEQ ID NO: 6403; WAN024BYJ_at; Start 150; Stop 174
tgaaggattgatggttgcaacagaa

SEQ ID NO: 99423 - DNA, 25 bp, Artificial
  probe
  misc_feature (1)..(25): SEQ ID NO: 6403; WAN024BYJ_at; Start 178; Stop 202
gactacattatcaaaggcgtgcaag

SEQ ID NO: 99424 - DNA, 25 bp, Artificial
  probe
  misc_feature (1)..(25): SEQ ID NO: 6403; WAN024BYJ_at; Start 159; Stop 183
gatggttgcaacagaaggtgactac

SEQ ID NO: 99425 - DNA, 25 bp, Artificial
  probe
  misc_feature (1)..(25): SEQ ID NO: 6403; WAN024BYJ_at; Start 49; Stop 73
gatacagaagaatctatagatgagc

SEQ ID NO: 99426 - DNA, 25 bp, Artificial
  probe
  misc_feature (1)..(25): SEQ ID NO: 6403; WAN024BYJ_at; Start 234; Stop 258
tgcagaaacatacgaaaaaacggag

SEQ ID NO: 99427 - DNA, 25 bp, Artificial
  probe
  misc_feature (1)..(25): SEQ ID NO: 6403; WAN024BYJ_at; Start 203; Stop 227
gagaatattatccatgcaagccgga

SEQ ID NO: 99428 - DNA, 25 bp, Artificial
  probe
  misc_feature (1)..(25): SEQ ID NO: 6403; WAN024BYJ_at; Start 19; Stop 43
ccagtagtagttgaagccgtgcagt

SEQ ID NO: 99429 - DNA, 25 bp, Artificial
  probe
  misc_feature (1)..(25): SEQ ID NO: 6403; WAN024BYJ_at; Start 186; Stop 210
tatcaaaggcgtgcaaggagaatat

SEQ ID NO: 99430 - DNA, 25 bp, Artificial
  probe
  misc_feature (1)..(25): SEQ ID NO: 6403; WAN024BYJ_at; Start 219; Stop 243
caagccggatatttttgcagaaaca

SEQ ID NO: 99431 - DNA, 25 bp, Artificial
  probe
  misc_feature (1)..(25): SEQ ID NO: 6403; WAN024BYJ_at; Start 79; Stop 103
gattttggattagatccagtacgga

SEQ ID NO: 99432 - DNA, 25 bp, Artificial
  probe
  misc_feature (1)..(25): SEQ ID NO: 6403; WAN024BYJ_at; Start 162; Stop 186
ggttgcaacagaaggtgactacatt

SEQ ID NO: 99433 - DNA, 25 bp, Artificial
  probe
  misc_feature (1)..(25): SEQ ID NO: 6403; WAN024BYJ_at; Start 189; Stop 213
caaaggcgtgcaaggagaatattat

SEQ ID NO: 99434 - DNA, 25 bp, Artificial
  probe
  misc_feature (1)..(25): SEQ ID NO: 6403; WAN024BYJ_at; Start 2; Stop 26
tgaaatatcgtaaaaagccagtagt

SEQ ID NO: 99435 - DNA, 25 bp, Artificial
  probe
  misc_feature (1)..(25): SEQ ID NO: 6403; WAN024BYJ_at; Start 214; Stop 238
ccatgcaagccggatatttttgcag

SEQ ID NO: 99436 - DNA, 25 bp, Artificial
  probe
  misc_feature (1)..(25): SEQ ID NO: 6403; WAN024BYJ_at; Start 16; Stop 40
aagccagtagtagttgaagccgtgc

SEQ ID NO: 99437 - DNA, 25 bp, Artificial
  probe
  misc_feature (1)..(25): SEQ ID NO: 6403; WAN024BYJ_at; Start 223; Stop 247
ccggatatttttgcagaaacatacg

SEQ ID NO: 99438 - DNA, 25 bp, Artificial
  probe
  misc_feature (1)..(25): SEQ ID NO: 6403; WAN024BYJ_at; Start 91; Stop 115
gatccagtacggattgattacgcag

SEQ ID NO: 99439 - DNA, 25 bp, Artificial
  probe
  misc_feature (1)..(25): SEQ ID NO: 6403; WAN024BYJ_at; Start 98; Stop 122
tacggattgattacgcagacttaaa

SEQ ID NO: 99440 - DNA, 25 bp, Artificial
  probe
  misc_feature (1)..(25): SEQ ID NO: 6403; WAN024BYJ_at; Start 31; Stop 55
gaagccgtgcagtttttagatacag

SEQ ID NO: 99441 - DNA, 25 bp, Artificial
  probe
  misc_feature (1)..(25): SEQ ID NO: 6403; WAN024BYJ_at; Start 181; Stop 205
tacattatcaaaggcgtgcaaggag

SEQ ID NO: 99442 - DNA, 25 bp, Artificial
  probe
  misc_feature (1)..(25): SEQ ID NO: 6403; WAN024BYJ_at; Start 172; Stop 196
gaaggtgactacattatcaaaggcg

SEQ ID NO: 99443 - DNA, 25 bp, Artificial
  probe
  misc_feature (1)..(25): SEQ ID NO: 6403; WAN024BYJ_at; Start 165; Stop 189
tgcaacagaaggtgactacattatc

SEQ ID NO: 99444 - DNA, 25 bp, Artificial
  probe
  misc_feature (1)..(25): SEQ ID NO: 6403; WAN024BYJ_at; Start 193; Stop 217
ggcgtgcaaggagaatattatccat

SEQ ID NO: 99445 - DNA, 25 bp, Artificial
  probe
  misc_feature (1)..(25): SEQ ID NO: 6403; WAN024BYJ_at; Start 175; Stop 199
ggtgactacattatcaaaggcgtgc

SEQ ID NO: 99446 - DNA, 25 bp, Artificial
  probe
  misc_feature (1)..(25): SEQ ID NO: 6403; WAN024BYJ_at; Start 136; Stop 160
aaaatcgaaacgcttgaaggattga

SEQ ID NO: 99447 - DNA, 25 bp, Artificial
  probe
  misc_feature (1)..(25): SEQ ID NO: 6403; WAN024BYJ_at; Start 94; Stop 118
ccagtacggattgattacgcagact

SEQ ID NO: 99448 - DNA, 25 bp, Artificial
  probe
  misc_feature (1)..(25): SEQ ID NO: 6403; WAN024BYJ_at; Start 72; Stop 96
gctatgcgattttggattagatcca

SEQ ID NO: 99449 - DNA, 25 bp, Artificial
  probe
  misc_feature (1)..(25): SEQ ID NO: 6403; WAN024BYJ_at; Start 12; Stop 36
taaaaagccagtagtagttgaagcc

SEQ ID NO: 99450 - DNA, 25 bp, Artificial
  probe
  misc_feature (1)..(25): SEQ ID NO: 6403; WAN024BYJ_at; Start 106; Stop 130
gattacgcagacttaaaaaatcctc

SEQ ID NO: 99451 - DNA, 25 bp, Artificial
  probe
  misc_feature (1)..(25): SEQ ID NO: 6403; WAN024BYJ_at; Start 36; Stop 60
cgtgcagtttttagatacagaagaa

SEQ ID NO: 99452 - DNA, 25 bp, Artificial
  probe
  misc_feature (1)..(25): SEQ ID NO: 6403; WAN024BYJ_at; Start 26; Stop 50
tagttgaagccgtgcagtttttaga

SEQ ID NO: 99453 - DNA, 25 bp, Artificial
  probe
  misc_feature (1)..(25): SEQ ID NO: 6403; WAN024BYJ_at; Start 63; Stop 87
tatagatgagctatgcgattttgga

SEQ ID NO: 99454 - DNA, 25 bp, Artificial
  probe
  misc_feature (1)..(25): SEQ ID NO: 6678; WAN024BYK_at; Start 241; Stop 265
ggtcaaagttatcaagaatatcttg

SEQ ID NO: 99455 - DNA, 25 bp, Artificial
  probe
  misc_feature (1)..(25): SEQ ID NO: 6678; WAN024BYK_at; Start 361; Stop 385
gactacgagcgtgttaaaaaatata

SEQ ID NO: 99456 - DNA, 25 bp, Artificial
  probe
  misc_feature (1)..(25): SEQ ID NO: 6678; WAN024BYK_at; Start 61; Stop 85
ggtgttgattacatacagcatcctc

SEQ ID NO: 99457 - DNA, 25 bp, Artificial
  probe
  misc_feature (1)..(25): SEQ ID NO: 6678; WAN024BYK_at; Start 3; Stop 27
gattgatattgccttggctatcgct

SEQ ID NO: 99458 - DNA, 25 bp, Artificial
  probe
  misc_feature (1)..(25): SEQ ID NO: 6678; WAN024BYK_at; Start 103; Stop 127
gtcaacactgaacaagaaaaagctg

SEQ ID NO: 99459 - DNA, 25 bp, Artificial
  probe
  misc_feature (1)..(25): SEQ ID NO: 6678; WAN024BYK_at; Start 199; Stop 223
aatgaagttgttacagcggtacaaa

SEQ ID NO: 99460 - DNA, 25 bp, Artificial
  probe
  misc_feature (1)..(25): SEQ ID NO: 6678; WAN024BYK_at; Start 335; Stop 359
cacgtttgaaatctgttaccaatac

SEQ ID NO: 99461 - DNA, 25 bp, Artificial
  probe
  misc_feature (1)..(25): SEQ ID NO: 6678; WAN024BYK_at; Start 21; Stop 45
tatcgctaaaaaagcacatgcaggg

SEQ ID NO: 99462 - DNA, 25 bp, Artificial
  probe
  misc_feature (1)..(25): SEQ ID NO: 6678; WAN024BYK_at; Start 307; Stop 331
gcagatttgaaacataactcagatt

SEQ ID NO: 99463 - DNA, 25 bp, Artificial
  probe
  misc_feature (1)..(25): SEQ ID NO: 6678; WAN024BYK_at; Start 88; Stop 112
tatgtggccagtcaagtcaacactg

SEQ ID NO: 99464 - DNA, 25 bp, Artificial
  probe
  misc_feature (1)..(25): SEQ ID NO: 6678; WAN024BYK_at; Start 137; Stop 161
tacatgatgtgattgaggatagcga

SEQ ID NO: 99465 - DNA, 25 bp, Artificial
  probe
  misc_feature (1)..(25): SEQ ID NO: 6678; WAN024BYK_at; Start 182; Stop 206
tcgcgtctggcttgtcaaatgaagt

SEQ ID NO: 99466 - DNA, 25 bp, Artificial
  probe
  misc_feature (1)..(25): SEQ ID NO: 6678; WAN024BYK_at; Start 207; Stop 231
tgttacagcggtacaaattttgaca

SEQ ID NO: 99467 - DNA, 25 bp, Artificial
  probe
  misc_feature (1)..(25): SEQ ID NO: 6678; WAN024BYK_at; Start 212; Stop 236
cagcggtacaaattttgacaaagaa

SEQ ID NO: 99468 - DNA, 25 bp, Artificial
  probe
  misc_feature (1)..(25): SEQ ID NO: 6678; WAN024BYK_at; Start 293; Stop 317
gagttgtaaaacttgcagatttgaa

SEQ ID NO: 99469 - DNA, 25 bp, Artificial
  probe
  misc_feature (1)..(25): SEQ ID NO: 6678; WAN024BYK_at; Start 349; Stop 373
gttaccaatacagactacgagcgtg

SEQ ID NO: 99470 - DNA, 25 bp, Artificial
  probe
  misc_feature (1)..(25): SEQ ID NO: 6678; WAN024BYK_at; Start 174; Stop 198
cgatttattcgcgtctggcttgtca

SEQ ID NO: 99471 - DNA, 25 bp, Artificial
  probe
  misc_feature (1)..(25): SEQ ID NO: 6678; WAN024BYK_at; Start 54; Stop 78
taaagcgggtgttgattacatacag

SEQ ID NO: 99472 - DNA, 25 bp, Artificial
  probe
  misc_feature (1)..(25): SEQ ID NO: 6678; WAN024BYK_at; Start 151; Stop 175
gaggatagcgatataactgctgccg

SEQ ID NO: 99473 - DNA, 25 bp, Artificial
  probe
  misc_feature (1)..(25): SEQ ID NO: 6678; WAN024BYK_at; Start 81; Stop 105
tcctctctatgtggccagtcaagtc

SEQ ID NO: 99474 - DNA, 25 bp, Artificial
  probe
  misc_feature (1)..(25): SEQ ID NO: 6678; WAN024BYK_at; Start 111; Stop 135
tgaacaagaaaaagctgtcgctctt

SEQ ID NO: 99475 - DNA, 25 bp, Artificial
  probe
  misc_feature (1)..(25): SEQ ID NO: 6678; WAN024BYK_at; Start 36; Stop 60
acatgcagggcaggtagataaagcg

SEQ ID NO: 99476 - DNA, 25 bp, Artificial
  probe
  misc_feature (1)..(25): SEQ ID NO: 6678; WAN024BYK_at; Start 12; Stop 36
tgccttggctatcgctaaaaaagca

SEQ ID NO: 99477 - DNA, 25 bp, Artificial
  probe
  misc_feature (1)..(25): SEQ ID NO: 6678; WAN024BYK_at; Start 74; Stop 98
tacagcatcctctctatgtggccag

SEQ ID NO: 99478 - DNA, 25 bp, Artificial
  probe
  misc_feature (1)..(25): SEQ ID NO: 6678; WAN024BYK_at; Start 277; Stop 301
tcaaataatttagcaagagttgtaa

SEQ ID NO: 99479 - DNA, 25 bp, Artificial
  probe
  misc_feature (1)..(25): SEQ ID NO: 6678; WAN024BYK_at; Start 164; Stop 188
taactgctgccgatttattcgcgtc

SEQ ID NO: 99480 - DNA, 25 bp, Artificial
  probe
  misc_feature (1)..(25): SEQ ID NO: 6678; WAN024BYK_at; Start 188; Stop 212
ctggcttgtcaaatgaagttgttac

SEQ ID NO: 99481 - DNA, 25 bp, Artificial
  probe
  misc_feature (1)..(25): SEQ ID NO: 6678; WAN024BYK_at; Start 46; Stop 70
caggtagataaagcgggtgttgatt

SEQ ID NO: 99482 - DNA, 25 bp, Artificial
  probe
  misc_feature (1)..(25): SEQ ID NO: 6678; WAN024BYK_at; Start 321; Stop 345
taactcagatttatcacgtttgaaa

SEQ ID NO: 99483 - DNA, 25 bp, Artificial
  probe
  misc_feature (1)..(25): SEQ ID NO: 6678; WAN024BYK_at; Start 259; Stop 283
tatcttgggaaagtaaaatcaaata

SEQ ID NO: 99484 - DNA, 25 bp, Artificial
  probe
  misc_feature (1)..(25): SEQ ID NO: 6678; WAN024BYK_at; Start 387; Stop 411
aaatgcaatttattacttaagcacc

SEQ ID NO: 99485 - DNA, 25 bp, Artificial
  probe
  misc_feature (1)..(25): SEQ ID NO: 6678; WAN024BYK_at; Start 353; Stop 377
ccaatacagactacgagcgtgttaa

SEQ ID NO: 99486 - DNA, 25 bp, Artificial
  probe
  misc_feature (1)..(25): SEQ ID NO: 6678; WAN024BYK_at; Start 26; Stop 50
ctaaaaaagcacatgcagggcaggt

SEQ ID NO: 99487 - DNA, 25 bp, Artificial
  probe
  misc_feature (1)..(25): SEQ ID NO: 6678; WAN024BYK_at; Start 124; Stop 148
gctgtcgctcttttacatgatgtga

SEQ ID NO: 99488 - DNA, 25 bp, Artificial
  probe
  misc_feature (1)..(25): SEQ ID NO: 6387; WAN024BYL_at; Start 45; Stop 69
agtacttcgtttgattgatggtgtc

SEQ ID NO: 99489 - DNA, 25 bp, Artificial
  probe
  misc_feature (1)..(25): SEQ ID NO: 6387; WAN024BYL_at; Start 36; Stop 60
caatgctcaagtacttcgtttgatt

SEQ ID NO: 99490 - DNA, 25 bp, Artificial
  probe
  misc_feature (1)..(25): SEQ ID NO: 6387; WAN024BYL_at; Start 182; Stop 206
cttatattgacaggatggtagcggc

SEQ ID NO: 99491 - DNA, 25 bp, Artificial
  probe
  misc_feature (1)..(25): SEQ ID NO: 6387; WAN024BYL_at; Start 9; Stop 33
tattaaatactaccgcacaacgacg

SEQ ID NO: 99492 - DNA, 25 bp, Artificial
  probe
  misc_feature (1)..(25): SEQ ID NO: 6387; WAN024BYL_at; Start 22; Stop 46
cgcacaacgacgaacaatgctcaag

SEQ ID NO: 99493 - DNA, 25 bp, Artificial
  probe
  misc_feature (1)..(25): SEQ ID NO: 6387; WAN024BYL_at; Start 43; Stop 67
caagtacttcgtttgattgatggtg

SEQ ID NO: 99494 - DNA, 25 bp, Artificial
  probe
  misc_feature (1)..(25): SEQ ID NO: 6387; WAN024BYL_at; Start 26; Stop 50
caacgacgaacaatgctcaagtact

SEQ ID NO: 99495 - DNA, 25 bp, Artificial
  probe
  misc_feature (1)..(25): SEQ ID NO: 6387; WAN024BYL_at; Start 2; Stop 26
tgaaagatattaaatactaccgcac

SEQ ID NO: 99496 - DNA, 25 bp, Artificial
  probe
  misc_feature (1)..(25): SEQ ID NO: 6387; WAN024BYL_at; Start 52; Stop 76
cgtttgattgatggtgtcatgcaag

SEQ ID NO: 99497 - DNA, 25 bp, Artificial
  probe
  misc_feature (1)..(25): SEQ ID NO: 6387; WAN024BYL_at; Start 144; Stop 168
tacggattttgaagaaatttcagaa

SEQ ID NO: 99498 - DNA, 25 bp, Artificial
  probe
  misc_feature (1)..(25): SEQ ID NO: 6387; WAN024BYL_at; Start 19; Stop 43
taccgcacaacgacgaacaatgctc

SEQ ID NO: 99499 - DNA, 25 bp, Artificial
  probe
  misc_feature (1)..(25): SEQ ID NO: 6387; WAN024BYL_at; Start 60; Stop 84
tgatggtgtcatgcaagtttttgac

SEQ ID NO: 99500 - DNA, 25 bp, Artificial
  probe
  misc_feature (1)..(25): SEQ ID NO: 6387; WAN024BYL_at; Start 12; Stop 36
taaatactaccgcacaacgacgaac

SEQ ID NO: 99501 - DNA, 25 bp, Artificial
  probe
  misc_feature (1)..(25): SEQ ID NO: 6387; WAN024BYL_at; Start 95; Stop 119
agtgggttaatagcatggattggtt

SEQ ID NO: 99502 - DNA, 25 bp, Artificial
  probe
  misc_feature (1)..(25): SEQ ID NO: 6387; WAN024BYL_at; Start 56; Stop 80
tgattgatggtgtcatgcaagtttt

SEQ ID NO: 99503 - DNA, 25 bp, Artificial
  probe
  misc_feature (1)..(25): SEQ ID NO: 6387; WAN024BYL_at; Start 24; Stop 48
cacaacgacgaacaatgctcaagta

SEQ ID NO: 99504 - DNA, 25 bp, Artificial
  probe
  misc_feature (1)..(25): SEQ ID NO: 6387; WAN024BYL_at; Start 40; Stop 64
gctcaagtacttcgtttgattgatg

SEQ ID NO: 99505 - DNA, 25 bp, Artificial
  probe
  misc_feature (1)..(25): SEQ ID NO: 6387; WAN024BYL_at; Start 180; Stop 204
tacttatattgacaggatggtagcg

SEQ ID NO: 99506 - DNA, 25 bp, Artificial
  probe
  misc_feature (1)..(25): SEQ ID NO: 6387; WAN024BYL_at; Start 7; Stop 31
gatattaaatactaccgcacaacga

SEQ ID NO: 99507 - DNA, 25 bp, Artificial
  probe
  misc_feature (1)..(25): SEQ ID NO: 6387; WAN024BYL_at; Start 90; Stop 114
aaaaaagtgggttaatagcatggat

SEQ ID NO: 99508 - DNA, 25 bp, Artificial
  probe
  misc_feature (1)..(25): SEQ ID NO: 6387; WAN024BYL_at; Start 33; Stop 57
gaacaatgctcaagtacttcgtttg

SEQ ID NO: 99509 - DNA, 25 bp, Artificial
  probe
  misc_feature (1)..(25): SEQ ID NO: 6387; WAN024BYL_at; Start 29; Stop 53
cgacgaacaatgctcaagtacttcg

SEQ ID NO: 99510 - DNA, 25 bp, Artificial
  probe
  misc_feature (1)..(25): SEQ ID NO: 6387; WAN024BYL_at; Start 183; Stop 207
ttatattgacaggatggtagcggca

SEQ ID NO: 99511 - DNA, 25 bp, Artificial
  probe
  misc_feature (1)..(25): SEQ ID NO: 6387; WAN024BYL_at; Start 14; Stop 38
aatactaccgcacaacgacgaacaa

SEQ ID NO: 99512 - DNA, 25 bp, Artificial
  probe
  misc_feature (1)..(25): SEQ ID NO: 6387; WAN024BYL_at; Start 64; Stop 88
ggtgtcatgcaagtttttgacattg

SEQ ID NO: 99513 - DNA, 25 bp, Artificial
  probe
  misc_feature (1)..(25): SEQ ID NO: 6387; WAN024BYL_at; Start 172; Stop 196
gatgcatttacttatattgacagga

SEQ ID NO: 99514 - DNA, 25 bp, Artificial
  probe
  misc_feature (1)..(25): SEQ ID NO: 6387; WAN024BYL_at; Start 157; Stop 181
gaaatttcagaaaatgatgcattta

SEQ ID NO: 99515 - DNA, 25 bp, Artificial
  probe
  misc_feature (1)..(25): SEQ ID NO: 6387; WAN024BYL_at; Start 152; Stop 176
ttgaagaaatttcagaaaatgatgc

SEQ ID NO: 99516 - DNA, 25 bp, Artificial
  probe
  misc_feature (1)..(25): SEQ ID NO: 6387; WAN024BYL_at; Start 49; Stop 73
cttcgtttgattgatggtgtcatgc

SEQ ID NO: 99517 - DNA, 25 bp, Artificial
  probe
  misc_feature (1)..(25): SEQ ID NO: 6387; WAN024BYL_at; Start 16; Stop 40
tactaccgcacaacgacgaacaatg

SEQ ID NO: 99518 - DNA, 25 bp, Artificial
  probe
  misc_feature (1)..(25): SEQ ID NO: 6387; WAN024BYL_at; Start 134; Stop 158
ttaatgactttacggattttgaaga

SEQ ID NO: 99519 - DNA, 25 bp, Artificial
  probe
  misc_feature (1)..(25): SEQ ID NO: 6387; WAN024BYL_at; Start 69; Stop 93
catgcaagtttttgacattgaaaaa

SEQ ID NO: 99520 - DNA, 25 bp, Artificial
  probe
  misc_feature (1)..(25): SEQ ID NO: 6387; WAN024BYL_at; Start 175; Stop 199
gcatttacttatattgacaggatgg

SEQ ID NO: 99521 - DNA, 25 bp, Artificial
  probe
  misc_feature (1)..(25): SEQ ID NO: 6387; WAN024BYL_at; Start 105; Stop 129
tagcatggattggtttaataaaatc

SEQ ID NO: 99522 - DNA, 25 bp, Artificial
  probe
  misc_feature (1)..(25): SEQ ID NO: 7185; WAN024BYM_at; Start 62; Stop 86
tacttgaagcgagaccgaatgatcc

SEQ ID NO: 99523 - DNA, 25 bp, Artificial
  probe
  misc_feature (1)..(25): SEQ ID NO: 7185; WAN024BYM_at; Start 992; Stop 1016
aactcgctggtcttgaatttcggaa

SEQ ID NO: 99524 - DNA, 25 bp, Artificial
  probe
  misc_feature (1)..(25): SEQ ID NO: 7185; WAN024BYM_at; Start 1415; Stop 1439
gcaatgggcttgagattcctaaaaa

SEQ ID NO: 99525 - DNA, 25 bp, Artificial
  probe
  misc_feature (1)..(25): SEQ ID NO: 7185; WAN024BYM_at; Start 510; Stop 534
tgcaaggcgtttggttcggacagaa

SEQ ID NO: 99526 - DNA, 25 bp, Artificial
  probe
  misc_feature (1)..(25): SEQ ID NO: 7185; WAN024BYM_at; Start 691; Stop 715
aattgtccgcctatgcacccttggt

SEQ ID NO: 99527 - DNA, 25 bp, Artificial
  probe
  misc_feature (1)..(25): SEQ ID NO: 7185; WAN024BYM_at; Start 441; Stop 465
tatgacaggccgagatacacgagaa

SEQ ID NO: 99528 - DNA, 25 bp, Artificial
  probe
  misc_feature (1)..(25): SEQ ID NO: 7185; WAN024BYM_at; Start 383; Stop 407
tctggaagaatacagggaagcttac

SEQ ID NO: 99529 - DNA, 25 bp, Artificial
  probe
  misc_feature (1)..(25): SEQ ID NO: 7185; WAN024BYM_at; Start 1362; Stop 1386
gaatacatctgatctagaacgcatg

SEQ ID NO: 99530 - DNA, 25 bp, Artificial
  probe
  misc_feature (1)..(25): SEQ ID NO: 7185; WAN024BYM_at; Start 795; Stop 819
taaagttgagtacgtgcctgccgat

SEQ ID NO: 99531 - DNA, 25 bp, Artificial
  probe
  misc_feature (1)..(25): SEQ ID NO: 7185; WAN024BYM_at; Start 764; Stop 788
tgaagcgcagagcaaggaatccaga

SEQ ID NO: 99532 - DNA, 25 bp, Artificial
  probe
  misc_feature (1)..(25): SEQ ID NO: 7185; WAN024BYM_at; Start 621; Stop 645
gcgtacatcacgcatttgtcaggag

SEQ ID NO: 99533 - DNA, 25 bp, Artificial
  probe
  misc_feature (1)..(25): SEQ ID NO: 7185; WAN024BYM_at; Start 470; Stop 494
cacaagcaattgctgagcggttcaa

SEQ ID NO: 99534 - DNA, 25 bp, Artificial
  probe
  misc_feature (1)..(25): SEQ ID NO: 7185; WAN024BYM_at; Start 734; Stop 758
gatacgatgaggacgcagactacag

SEQ ID NO: 99535 - DNA, 25 bp, Artificial
  probe
  misc_feature (1)..(25): SEQ ID NO: 7185; WAN024BYM_at; Start 1211; Stop 1235
aaaacacttggctagtagatggacc

SEQ ID NO: 99536 - DNA, 25 bp, Artificial
  probe
  misc_feature (1)..(25): SEQ ID NO: 7185; WAN024BYM_at; Start 310; Stop 334
cttcctgagagcgagattaaacatc

SEQ ID NO: 99537 - DNA, 25 bp, Artificial
  probe
  misc_feature (1)..(25): SEQ ID NO: 7185; WAN024BYM_at; Start 295; Stop 319
tacggcttttctgggcttcctgaga

SEQ ID NO: 99538 - DNA, 25 bp, Artificial
  probe
  misc_feature (1)..(25): SEQ ID NO: 7185; WAN024BYM_at; Start 553; Stop 577
caaatggagctactcaactatgagg

SEQ ID NO: 99539 - DNA, 25 bp, Artificial
  probe
  misc_feature (1)..(25): SEQ ID NO: 7185; WAN024BYM_at; Start 1009; Stop 1033
tttcggaagaaaacagctgagtcat

SEQ ID NO: 99540 - DNA, 25 bp, Artificial
  probe
  misc_feature (1)..(25): SEQ ID NO: 7185; WAN024BYM_at; Start 926; Stop 950
tgtccaagatttcgaaagccgagcc

SEQ ID NO: 99541 - DNA, 25 bp, Artificial
  probe
  misc_feature (1)..(25): SEQ ID NO: 7185; WAN024BYM_at; Start 659; Stop 683
tctatgatagggataaggctgtccc

SEQ ID NO: 99542 - DNA, 25 bp, Artificial
  probe
  misc_feature (1)..(25): SEQ ID NO: 7185; WAN024BYM_at; Start 676; Stop 700
gctgtccctggtgtcaattgtccgc

SEQ ID NO: 99543 - DNA, 25 bp, Artificial
  probe
  misc_feature (1)..(25): SEQ ID NO: 7185; WAN024BYM_at; Start 217; Stop 241
gacgccttttatagcgacctgatga

SEQ ID NO: 99544 - DNA, 25 bp, Artificial
  probe
  misc_feature (1)..(25): SEQ ID NO: 7185; WAN024BYM_at; Start 943; Stop 967
gccgagccaaaaatcacaagcgata

SEQ ID NO: 99545 - DNA, 25 bp, Artificial
  probe
  misc_feature (1)..(25): SEQ ID NO: 7185; WAN024BYM_at; Start 130; Stop 154
tctttccgtatgaagcgtctagaac

SEQ ID NO: 99546 - DNA, 25 bp, Artificial
  probe
  misc_feature (1)..(25): SEQ ID NO: 7185; WAN024BYM_at; Start 454; Stop 478
gatacacgagaaactgcacaagcaa

SEQ ID NO: 99547 - DNA, 25 bp, Artificial
  probe
  misc_feature (1)..(25): SEQ ID NO: 7185; WAN024BYM_at; Start 279; Stop 303
gcagacaggactagcatacggcttt

SEQ ID NO: 99548 - DNA, 25 bp, Artificial
  probe
  misc_feature (1)..(25): SEQ ID NO: 7185; WAN024BYM_at; Start 599; Stop 623
tctttgtggccgtcttagacaagcg

SEQ ID NO: 99549 - DNA, 25 bp, Artificial
  probe
  misc_feature (1)..(25): SEQ ID NO: 7185; WAN024BYM_at; Start 198; Stop 222
ttcagaaaagacaggctcagacgcc

SEQ ID NO: 99550 - DNA, 25 bp, Artificial
  probe
  misc_feature (1)..(25): SEQ ID NO: 7185; WAN024BYM_at; Start 1167; Stop 1191
gaaacaggagcttattgcagagggt

SEQ ID NO: 99551 - DNA, 25 bp, Artificial
  probe
  misc_feature (1)..(25): SEQ ID NO: 7185; WAN024BYM_at; Start 101; Stop 125
tactggctgacttagatagtccggc

SEQ ID NO: 99552 - DNA, 25 bp, Artificial
  probe
  misc_feature (1)..(25): SEQ ID NO: 7185; WAN024BYM_at; Start 255; Stop 279
caaggctacctttgacctgcagcag

SEQ ID NO: 99553 - DNA, 25 bp, Artificial
  probe
  misc_feature (1)..(25): SEQ ID NO: 7185; WAN024BYM_at; Start 977; Stop 1001
ttgctggtgaaaataaactcgctgg

SEQ ID NO: 99554 - DNA, 25 bp, Artificial
  probe
  misc_feature (1)..(25): SEQ ID NO: 7185; WAN024BYM_at; Start 749; Stop 773
cagactacagcaagttgaagcgcag

SEQ ID NO: 99555 - DNA, 25 bp, Artificial
  probe
  misc_feature (1)..(25): SEQ ID NO: 7185; WAN024BYM_at; Start 717; Stop 741
taggtctactactgtcggatacgat

SEQ ID NO: 99556 - DNA, 25 bp, Artificial
  probe
  misc_feature (1)..(25): SEQ ID NO: 6942; WAN024BYN_at; Start 186; Stop 210
caagacggtagccaatcatgccaag

SEQ ID NO: 99557 - DNA, 25 bp, Artificial
  probe
  misc_feature (1)..(25): SEQ ID NO: 6942; WAN024BYN_at; Start 612; Stop 636
ggaggcaacacctcacaaccttggt

SEQ ID NO: 99558 - DNA, 25 bp, Artificial
  probe
  misc_feature (1)..(25): SEQ ID NO: 6942; WAN024BYN_at; Start 589; Stop 613
gattcaggaacaactcagagcgagg

SEQ ID NO: 99559 - DNA, 25 bp, Artificial
  probe
  misc_feature (1)..(25): SEQ ID NO: 6942; WAN024BYN_at; Start 707; Stop 731
tagacgcttataattccttgatggg

SEQ ID NO: 99560 - DNA, 25 bp, Artificial
  probe
  misc_feature (1)..(25): SEQ ID NO: 6942; WAN024BYN_at; Start 453; Stop 477
cgatgatagtattgagcggaagcct

SEQ ID NO: 99561 - DNA, 25 bp, Artificial
  probe
  misc_feature (1)..(25): SEQ ID NO: 6942; WAN024BYN_at; Start 208; Stop 232
aaggatatcgcagacacggctacgg

SEQ ID NO: 99562 - DNA, 25 bp, Artificial
  probe
  misc_feature (1)..(25): SEQ ID NO: 6942; WAN024BYN_at; Start 799; Stop 823
gacactccagaagacgctaaggtag

SEQ ID NO: 99563 - DNA, 25 bp, Artificial
  probe
  misc_feature (1)..(25): SEQ ID NO: 6942; WAN024BYN_at; Start 8; Stop 32
aatatttaacctatccacgggatgg

SEQ ID NO: 99564 - DNA, 25 bp, Artificial
  probe
  misc_feature (1)..(25): SEQ ID NO: 6942; WAN024BYN_at; Start 943; Stop 967
gaggacatctacacatttagccatg

SEQ ID NO: 99565 - DNA, 25 bp, Artificial
  probe
  misc_feature (1)..(25): SEQ ID NO: 6942; WAN024BYN_at; Start 170; Stop 194
tgaacgcacctaattacaagacggt

SEQ ID NO: 99566 - DNA, 25 bp, Artificial
  probe
  misc_feature (1)..(25): SEQ ID NO: 6942; WAN024BYN_at; Start 919; Stop 943
gaaatcttgcgtacagctcttaaag

SEQ ID NO: 99567 - DNA, 25 bp, Artificial
  probe
  misc_feature (1)..(25): SEQ ID NO: 6942; WAN024BYN_at; Start 375; Stop 399
cgagtacatctatgctaaagagggt

SEQ ID NO: 99568 - DNA, 25 bp, Artificial
  probe
  misc_feature (1)..(25): SEQ ID NO: 6942; WAN024BYN_at; Start 1069; Stop 1093
aactataagcgaggattgcgtcagc

SEQ ID NO: 99569 - DNA, 25 bp, Artificial
  probe
  misc_feature (1)..(25): SEQ ID NO: 6942; WAN024BYN_at; Start 224; Stop 248
cggctacgggctattttatgggcaa

SEQ ID NO: 99570 - DNA, 25 bp, Artificial
  probe
  misc_feature (1)..(25): SEQ ID NO: 6942; WAN024BYN_at; Start 517; Stop 541
aaagacactaccaagcaccaggctg

SEQ ID NO: 99571 - DNA, 25 bp, Artificial
  probe
  misc_feature (1)..(25): SEQ ID NO: 6942; WAN024BYN_at; Start 75; Stop 99
gataacgatacatagcactgaaggc

SEQ ID NO: 99572 - DNA, 25 bp, Artificial
  probe
  misc_feature (1)..(25): SEQ ID NO: 6942; WAN024BYN_at; Start 1006; Stop 1030
tcaggcgtagccatggaatttaagc

SEQ ID NO: 99573 - DNA, 25 bp, Artificial
  probe
  misc_feature (1)..(25): SEQ ID NO: 6942; WAN024BYN_at; Start 987; Stop 1011
gaatttcgcagggaatacatcaggc

SEQ ID NO: 99574 - DNA, 25 bp, Artificial
  probe
  misc_feature (1)..(25): SEQ ID NO: 6942; WAN024BYN_at; Start 532; Stop 556
caccaggctgaggtctttaccgaaa

SEQ ID NO: 99575 - DNA, 25 bp, Artificial
  probe
  misc_feature (1)..(25): SEQ ID NO: 6942; WAN024BYN_at; Start 321; Stop 345
tgaccaagtagatgctcagaatgct

SEQ ID NO: 99576 - DNA, 25 bp, Artificial
  probe
  misc_feature (1)..(25): SEQ ID NO: 6942; WAN024BYN_at; Start 1254; Stop 1278
tctcttgccgtttgtggaagaccct

SEQ ID NO: 99577 - DNA, 25 bp, Artificial
  probe
  misc_feature (1)..(25): SEQ ID NO: 6942; WAN024BYN_at; Start 1162; Stop 1186
caattcagtcgtggtttgcctaaga

SEQ ID NO: 99578 - DNA, 25 bp, Artificial
  probe
  misc_feature (1)..(25): SEQ ID NO: 6942; WAN024BYN_at; Start 735; Stop 759
tcgtgtcaatgataaggaacaggct

SEQ ID NO: 99579 - DNA, 25 bp, Artificial
  probe
  misc_feature (1)..(25): SEQ ID NO: 6942; WAN024BYN_at; Start 1204; Stop 1228
cagatcgtgaacaaccttgaaggta

SEQ ID NO: 99580 - DNA, 25 bp, Artificial
  probe
  misc_feature (1)..(25): SEQ ID NO: 6942; WAN024BYN_at; Start 267; Stop 291
tactgctgacggtgatatcgatgaa

SEQ ID NO: 99581 - DNA, 25 bp, Artificial
  probe
  misc_feature (1)..(25): SEQ ID NO: 6942; WAN024BYN_at; Start 857; Stop 881
aattaccgggcgatagtgcaagagc

SEQ ID NO: 99582 - DNA, 25 bp, Artificial
  probe
  misc_feature (1)..(25): SEQ ID NO: 6942; WAN024BYN_at; Start 89; Stop 113
gcactgaaggctcgcatttgaagaa

SEQ ID NO: 99583 - DNA, 25 bp, Artificial
  probe
  misc_feature (1)..(25): SEQ ID NO: 6942; WAN024BYN_at; Start 347; Stop 371
tgaacatggctatctatggtcgtgc

SEQ ID NO: 99584 - DNA, 25 bp, Artificial
  probe
  misc_feature (1)..(25): SEQ ID NO: 6942; WAN024BYN_at; Start 781; Stop 805
tatggcacgcagttagcagacactc

SEQ ID NO: 99585 - DNA, 25 bp, Artificial
  probe
  misc_feature (1)..(25): SEQ ID NO: 6942; WAN024BYN_at; Start 1044; Stop 1068
gatgattactaagaccaaggaagcg

SEQ ID NO: 99586 - DNA, 25 bp, Artificial
  probe
  misc_feature (1)..(25): SEQ ID NO: 6942; WAN024BYN_at; Start 897; Stop 921
cacgttggacgaaagtgctactgaa

SEQ ID NO: 99587 - DNA, 25 bp, Artificial
  probe
  misc_feature (1)..(25): SEQ ID NO: 6942; WAN024BYN_at; Start 768; Stop 792
tatccttgtcttgtatggcacgcag

SEQ ID NO: 99588 - DNA, 25 bp, Artificial
  probe
  misc_feature (1)..(25): SEQ ID NO: 6942; WAN024BYN_at; Start 1268; Stop 1292
tggaagaccctgatgctgagctaga

SEQ ID NO: 99589 - DNA, 25 bp, Artificial
  probe
  misc_feature (1)..(25): SEQ ID NO: 6942; WAN024BYN_at; Start 146; Stop 170
tcttagaacacacgagacgcaacgt

SEQ ID NO: 99590 - DNA, 25 bp, Artificial
  probe
  misc_feature (1)..(25): SEQ ID NO: 6608; WAN024BYO_at; Start 412; Stop 436
gcatggttcgaggaagcgtaccaaa

SEQ ID NO: 99591 - DNA, 25 bp, Artificial
  probe
  misc_feature (1)..(25): SEQ ID NO: 6608; WAN024BYO_at; Start 35; Stop 59
ttgtaatcgacctacctaagacagt

SEQ ID NO: 99592 - DNA, 25 bp, Artificial
  probe
  misc_feature (1)..(25): SEQ ID NO: 6608; WAN024BYO_at; Start 305; Stop 329
tgcctgaaataaccataaaagcgac

SEQ ID NO: 99593 - DNA, 25 bp, Artificial
  probe
  misc_feature (1)..(25): SEQ ID NO: 6608; WAN024BYO_at; Start 127; Stop 151
tcgaagaagtccaagacaaccgctt

SEQ ID NO: 99594 - DNA, 25 bp, Artificial
  probe
  misc_feature (1)..(25): SEQ ID NO: 6608; WAN024BYO_at; Start 1097; Stop 1121
gatacgctatttatgtgcatccaga

SEQ ID NO: 99595 - DNA, 25 bp, Artificial
  probe
  misc_feature (1)..(25): SEQ ID NO: 6608; WAN024BYO_at; Start 734; Stop 758
taatctatgagaacgtgaccgtcaa

SEQ ID NO: 99596 - DNA, 25 bp, Artificial
  probe
  misc_feature (1)..(25): SEQ ID NO: 6608; WAN024BYO_at; Start 974; Stop 998
tcattgctgatagcgcagagtcacg

SEQ ID NO: 99597 - DNA, 25 bp, Artificial
  probe
  misc_feature (1)..(25): SEQ ID NO: 6608; WAN024BYO_at; Start 390; Stop 414
cgatatcggtagtctttgttgggca

SEQ ID NO: 99598 - DNA, 25 bp, Artificial
  probe
  misc_feature (1)..(25): SEQ ID NO: 6608; WAN024BYO_at; Start 166; Stop 190
cgtcttttgaaatattcctgggcca

SEQ ID NO: 99599 - DNA, 25 bp, Artificial
  probe
  misc_feature (1)..(25): SEQ ID NO: 6608; WAN024BYO_at; Start 624; Stop 648
caatgagtggcttgatggagtcgat

SEQ ID NO: 99600 - DNA, 25 bp, Artificial
  probe
  misc_feature (1)..(25): SEQ ID NO: 6608; WAN024BYO_at; Start 70; Stop 94
tacggacagttctggcgctcaagaa

SEQ ID NO: 99601 - DNA, 25 bp, Artificial
  probe
  misc_feature (1)..(25): SEQ ID NO: 6608; WAN024BYO_at; Start 1264; Stop 1288
gcaaccgtccgcagacgttctgatt

SEQ ID NO: 99602 - DNA, 25 bp, Artificial
  probe
  misc_feature (1)..(25): SEQ ID NO: 6608; WAN024BYO_at; Start 582; Stop 606
gagacgggctgacacattcgctact

SEQ ID NO: 99603 - DNA, 25 bp, Artificial
  probe
  misc_feature (1)..(25): SEQ ID NO: 6608; WAN024BYO_at; Start 1221; Stop 1245
ggacgctttgcgttacagccttcaa

SEQ ID NO: 99604 - DNA, 25 bp, Artificial
  probe
  misc_feature (1)..(25): SEQ ID NO: 6608; WAN024BYO_at; Start 427; Stop 451
gcgtaccaaatcgagactgaagaca

SEQ ID NO: 99605 - DNA, 25 bp, Artificial
  probe
  misc_feature (1)..(25): SEQ ID NO: 6608; WAN024BYO_at; Start 1203; Stop 1227
taaaaacaaccacttgatggacgct

SEQ ID NO: 99606 - DNA, 25 bp, Artificial
  probe
  misc_feature (1)..(25): SEQ ID NO: 6608; WAN024BYO_at; Start 749; Stop 773
tgaccgtcaaggatttcgataagga

SEQ ID NO: 99607 - DNA, 25 bp, Artificial
  probe
  misc_feature (1)..(25): SEQ ID NO: 6608; WAN024BYO_at; Start 473; Stop 497
ctatccgtggtagcttagatgtacc

SEQ ID NO: 99608 - DNA, 25 bp, Artificial
  probe
  misc_feature (1)..(25): SEQ ID NO: 6608; WAN024BYO_at; Start 1159; Stop 1183
taccagcgagataaagaaggcaact

SEQ ID NO: 99609 - DNA, 25 bp, Artificial
  probe
  misc_feature (1)..(25): SEQ ID NO: 6608; WAN024BYO_at; Start 991; Stop 1015
gagtcacggctgattgaagagctca

SEQ ID NO: 99610 - DNA, 25 bp, Artificial
  probe
  misc_feature (1)..(25): SEQ ID NO: 6608; WAN024BYO_at; Start 641; Stop 665
gagtcgatatcaaacgctatgagga

SEQ ID NO: 99611 - DNA, 25 bp, Artificial
  probe
  misc_feature (1)..(25): SEQ ID NO: 6608; WAN024BYO_at; Start 566; Stop 590
tcttcgatgaagagacgagacgggc

SEQ ID NO: 99612 - DNA, 25 bp, Artificial
  probe
  misc_feature (1)..(25): SEQ ID NO: 6608; WAN024BYO_at; Start 49; Stop 73
cctaagacagtaggagctgggtacg

SEQ ID NO: 99613 - DNA, 25 bp, Artificial
  probe
  misc_feature (1)..(25): SEQ ID NO: 6608; WAN024BYO_at; Start 1073; Stop 1097
tggcaggcgtatccaaattgcaagg

SEQ ID NO: 99614 - DNA, 25 bp, Artificial
  probe
  misc_feature (1)..(25): SEQ ID NO: 6608; WAN024BYO_at; Start 1248; Stop 1272
tatcgaaggtgggaaagcaaccgtc

SEQ ID NO: 99615 - DNA, 25 bp, Artificial
  probe
  misc_feature (1)..(25): SEQ ID NO: 6608; WAN024BYO_at; Start 455; Stop 479
tcagcacggttgttgagtctatccg

SEQ ID NO: 99616 - DNA, 25 bp, Artificial
  probe
  misc_feature (1)..(25): SEQ ID NO: 6608; WAN024BYO_at; Start 825; Stop 849
ttttactcacgatccaaccgctttg

SEQ ID NO: 99617 - DNA, 25 bp, Artificial
  probe
  misc_feature (1)..(25): SEQ ID NO: 6608; WAN024BYO_at; Start 543; Stop 567
gaggcattggctcaagcgtgtattc

SEQ ID NO: 99618 - DNA, 25 bp, Artificial
  probe
  misc_feature (1)..(25): SEQ ID NO: 6608; WAN024BYO_at; Start 911; Stop 935
tcggattgataaccaaagaagttgc

SEQ ID NO: 99619 - DNA, 25 bp, Artificial
  probe
  misc_feature (1)..(25): SEQ ID NO: 6608; WAN024BYO_at; Start 668; Stop 692
tgtatcatacgaaccccagacgtgc

SEQ ID NO: 99620 - DNA, 25 bp, Artificial
  probe
  misc_feature (1)..(25): SEQ ID NO: 6608; WAN024BYO_at; Start 1145; Stop 1169
tttatagttactgctaccagcgaga

SEQ ID NO: 99621 - DNA, 25 bp, Artificial
  probe
  misc_feature (1)..(25): SEQ ID NO: 6608; WAN024BYO_at; Start 524; Stop 548
catttaacccgtggaatgagaggca

SEQ ID NO: 99622 - DNA, 25 bp, Artificial
  probe
  misc_feature (1)..(25): SEQ ID NO: 6608; WAN024BYO_at; Start 949; Stop 973
gacaaaggttatcatcgctcacaaa

SEQ ID NO: 99623 - DNA, 25 bp, Artificial
  probe
  misc_feature (1)..(25): SEQ ID NO: 6608; WAN024BYO_at; Start 1006; Stop 1030
gaagagctcaggtcagaacatggca

SEQ ID NO: 99624 - DNA, 25 bp, Artificial
  probe
  misc_feature (1)..(25): SEQ ID NO: 7309; WAN024BYP_at; Start 226; Stop 250
gattctgaaaaaatcgcagaccagc

SEQ ID NO: 99625 - DNA, 25 bp, Artificial
  probe
  misc_feature (1)..(25): SEQ ID NO: 7309; WAN024BYP_at; Start 409; Stop 433
tggacagacaaagtagaggcagacg

SEQ ID NO: 99626 - DNA, 25 bp, Artificial
  probe
  misc_feature (1)..(25): SEQ ID NO: 7309; WAN024BYP_at; Start 8; Stop 32
tttttgattattcgaagggtggtga

SEQ ID NO: 99627 - DNA, 25 bp, Artificial
  probe
  misc_feature (1)..(25): SEQ ID NO: 7309; WAN024BYP_at; Start 151; Stop 175
gcaggcgttgaaggacataagttac

SEQ ID NO: 99628 - DNA, 25 bp, Artificial
  probe
  misc_feature (1)..(25): SEQ ID NO: 7309; WAN024BYP_at; Start 261; Stop 285
tagttatctaacctcggtaatgcga

SEQ ID NO: 99629 - DNA, 25 bp, Artificial
  probe
  misc_feature (1)..(25): SEQ ID NO: 7309; WAN024BYP_at; Start 386; Stop 410
tattaggaaaacgtcataggctttg

SEQ ID NO: 99630 - DNA, 25 bp, Artificial
  probe
  misc_feature (1)..(25): SEQ ID NO: 7309; WAN024BYP_at; Start 359; Stop 383
caaaagacagaatcaaggcagccga

SEQ ID NO: 99631 - DNA, 25 bp, Artificial
  probe
  misc_feature (1)..(25): SEQ ID NO: 7309; WAN024BYP_at; Start 434; Stop 458
tttctgggacggtggtgtttgcaaa

SEQ ID NO: 99632 - DNA, 25 bp, Artificial
  probe
  misc_feature (1)..(25): SEQ ID NO: 7309; WAN024BYP_at; Start 283; Stop 307
cgaggagagacacaagaacagactt

SEQ ID NO: 99633 - DNA, 25 bp, Artificial
  probe
  misc_feature (1)..(25): SEQ ID NO: 7309; WAN024BYP_at; Start 211; Stop 235
cggttgaaacagcttgattctgaaa

SEQ ID NO: 99634 - DNA, 25 bp, Artificial
  probe
  misc_feature (1)..(25): SEQ ID NO: 7309; WAN024BYP_at; Start 87; Stop 111
catctcaggtaatgcgacggaagcc

SEQ ID NO: 99635 - DNA, 25 bp, Artificial
  probe
  misc_feature (1)..(25): SEQ ID NO: 7309; WAN024BYP_at; Start 31; Stop 55
gatggaaaattgagtggattgagaa

SEQ ID NO: 99636 - DNA, 25 bp, Artificial
  probe
  misc_feature (1)..(25): SEQ ID NO: 7309; WAN024BYP_at; Start 311; Stop 335
taagcatcggagaattgggtcaaac

SEQ ID NO: 99637 - DNA, 25 bp, Artificial
  probe
  misc_feature (1)..(25): SEQ ID NO: 7309; WAN024BYP_at; Start 394; Stop 418
aaacgtcataggctttggacagaca

SEQ ID NO: 99638 - DNA, 25 bp, Artificial
  probe
  misc_feature (1)..(25): SEQ ID NO: 7309; WAN024BYP_at; Start 322; Stop 346
gaattgggtcaaacgattacggata

SEQ ID NO: 99639 - DNA, 25 bp, Artificial
  probe
  misc_feature (1)..(25): SEQ ID NO: 7309; WAN024BYP_at; Start 348; Stop 372
taatgttggagcaaaagacagaatc

SEQ ID NO: 99640 - DNA, 25 bp, Artificial
  probe
  misc_feature (1)..(25): SEQ ID NO: 7309; WAN024BYP_at; Start 61; Stop 85
caaaagagatttgcagatgagtaca

SEQ ID NO: 99641 - DNA, 25 bp, Artificial
  probe
  misc_feature (1)..(25): SEQ ID NO: 7309; WAN024BYP_at; Start 298; Stop 322
gaacagactttgataagcatcggag

SEQ ID NO: 99642 - DNA, 25 bp, Artificial
  probe
  misc_feature (1)..(25): SEQ ID NO: 7309; WAN024BYP_at; Start 109; Stop 133
gcctataagaaagcaggttatcgtg

SEQ ID NO: 99643 - DNA, 25 bp, Artificial
  probe
  misc_feature (1)..(25): SEQ ID NO: 7309; WAN024BYP_at; Start 335; Stop 359
cgattacggatattaatgttggagc

SEQ ID NO: 99644 - DNA, 25 bp, Artificial
  probe
  misc_feature (1)..(25): SEQ ID NO: 7309; WAN024BYP_at; Start 447; Stop 471
ggtgtttgcaaatgagtcagacata

SEQ ID NO: 99645 - DNA, 25 bp, Artificial
  probe
  misc_feature (1)..(25): SEQ ID NO: 7309; WAN024BYP_at; Start 166; Stop 190
cataagttactaaagaatcctaaga

SEQ ID NO: 99646 - DNA, 25 bp, Artificial
  probe
  misc_feature (1)..(25): SEQ ID NO: 7309; WAN024BYP_at; Start 79; Stop 103
gagtacatcatctcaggtaatgcga

SEQ ID NO: 99647 - DNA, 25 bp, Artificial
  probe
  misc_feature (1)..(25): SEQ ID NO: 7309; WAN024BYP_at; Start 16; Stop 40
tattcgaagggtggtgatggaaaat

SEQ ID NO: 99648 - DNA, 25 bp, Artificial
  probe
  misc_feature (1)..(25): SEQ ID NO: 7309; WAN024BYP_at; Start 371; Stop 395
tcaaggcagccgaactattaggaaa

SEQ ID NO: 99649 - DNA, 25 bp, Artificial
  probe
  misc_feature (1)..(25): SEQ ID NO: 7309; WAN024BYP_at; Start 239; Stop 263
tcgcagaccagcaagaagtccttag

SEQ ID NO: 99650 - DNA, 25 bp, Artificial
  probe
  misc_feature (1)..(25): SEQ ID NO: 7309; WAN024BYP_at; Start 45; Stop 69
tggattgagaataaaacaaaagaga

SEQ ID NO: 99651 - DNA, 25 bp, Artificial
  probe
  misc_feature (1)..(25): SEQ ID NO: 7309; WAN024BYP_at; Start 274; Stop 298
tcggtaatgcgaggagagacacaag

SEQ ID NO: 99652 - DNA, 25 bp, Artificial
  probe
  misc_feature (1)..(25): SEQ ID NO: 7309; WAN024BYP_at; Start 246; Stop 270
ccagcaagaagtccttagttatcta

SEQ ID NO: 99653 - DNA, 25 bp, Artificial
  probe
  misc_feature (1)..(25): SEQ ID NO: 7309; WAN024BYP_at; Start 119; Stop 143
aagcaggttatcgtgtttctagtga

SEQ ID NO: 99654 - DNA, 25 bp, Artificial
  probe
  misc_feature (1)..(25): SEQ ID NO: 7309; WAN024BYP_at; Start 199; Stop 223
tatatagatgaacggttgaaacagc

SEQ ID NO: 99655 - DNA, 25 bp, Artificial
  probe
  misc_feature (1)..(25): SEQ ID NO: 7309; WAN024BYP_at; Start 135; Stop 159
ttctagtgatagagtggcaggcgtt

SEQ ID NO: 99656 - DNA, 25 bp, Artificial
  probe
  misc_feature (1)..(25): SEQ ID NO: 7309; WAN024BYP_at; Start 96; Stop 120
taatgcgacggaagcctataagaaa

SEQ ID NO: 99657 - DNA, 25 bp, Artificial
  probe
  misc_feature (1)..(25): SEQ ID NO: 7309; WAN024BYP_at; Start 419; Stop 443
aagtagaggcagacgtttctgggac

SEQ ID NO: 99658 - DNA, 25 bp, Artificial
  probe
  misc_feature (1)..(25): SEQ ID NO: 7242; WAN024BYQ_at; Start 177; Stop 201
cattctggtcgtttcaggatttaca

SEQ ID NO: 99659 - DNA, 25 bp, Artificial
  probe
  misc_feature (1)..(25): SEQ ID NO: 7242; WAN024BYQ_at; Start 244; Stop 268
gaatacaagcactatgaaattggca

SEQ ID NO: 99660 - DNA, 25 bp, Artificial
  probe
  misc_feature (1)..(25): SEQ ID NO: 7242; WAN024BYQ_at; Start 164; Stop 188
ccaaaagaaaatacattctggtcgt

SEQ ID NO: 99661 - DNA, 25 bp, Artificial
  probe
  misc_feature (1)..(25): SEQ ID NO: 7242; WAN024BYQ_at; Start 100; Stop 124
gaacctcacacaacgttcatacctg

SEQ ID NO: 99662 - DNA, 25 bp, Artificial
  probe
  misc_feature (1)..(25): SEQ ID NO: 7242; WAN024BYQ_at; Start 52; Stop 76
gcatgtcaccagatttcgagtggga

SEQ ID NO: 99663 - DNA, 25 bp, Artificial
  probe
  misc_feature (1)..(25): SEQ ID NO: 7242; WAN024BYQ_at; Start 249; Stop 273
caagcactatgaaattggcaatact

SEQ ID NO: 99664 - DNA, 25 bp, Artificial
  probe
  misc_feature (1)..(25): SEQ ID NO: 7242; WAN024BYQ_at; Start 117; Stop 141
catacctgttataaatggtaaaagt

SEQ ID NO: 99665 - DNA, 25 bp, Artificial
  probe
  misc_feature (1)..(25): SEQ ID NO: 7242; WAN024BYQ_at; Start 32; Stop 56
tattcgcatccttactcgtagcatg

SEQ ID NO: 99666 - DNA, 25 bp, Artificial
  probe
  misc_feature (1)..(25): SEQ ID NO: 7242; WAN024BYQ_at; Start 72; Stop 96
tgggacagtggtagataagtacatt

SEQ ID NO: 99667 - DNA, 25 bp, Artificial
  probe
  misc_feature (1)..(25): SEQ ID NO: 7242; WAN024BYQ_at; Start 182; Stop 206
tggtcgtttcaggatttacaggtaa

SEQ ID NO: 99668 - DNA, 25 bp, Artificial
  probe
  misc_feature (1)..(25): SEQ ID NO: 7242; WAN024BYQ_at; Start 18; Stop 42
cctatgtattgttttattcgcatcc

SEQ ID NO: 99669 - DNA, 25 bp, Artificial
  probe
  misc_feature (1)..(25): SEQ ID NO: 7242; WAN024BYQ_at; Start 194; Stop 218
gatttacaggtaataagcaagttga

SEQ ID NO: 99670 - DNA, 25 bp, Artificial
  probe
  misc_feature (1)..(25): SEQ ID NO: 7242; WAN024BYQ_at; Start 216; Stop 240
tgaagaaaggtttgaagtgacagca

SEQ ID NO: 99671 - DNA, 25 bp, Artificial
  probe
  misc_feature (1)..(25): SEQ ID NO: 7242; WAN024BYQ_at; Start 44; Stop 68
tactcgtagcatgtcaccagatttc

SEQ ID NO: 99672 - DNA, 25 bp, Artificial
  probe
  misc_feature (1)..(25): SEQ ID NO: 7242; WAN024BYQ_at; Start 1; Stop 25
gtgagatattttaaaatcctatgta

SEQ ID NO: 99673 - DNA, 25 bp, Artificial
  probe
  misc_feature (1)..(25): SEQ ID NO: 7242; WAN024BYQ_at; Start 60; Stop 84
ccagatttcgagtgggacagtggta

SEQ ID NO: 99674 - DNA, 25 bp, Artificial
  probe
  misc_feature (1)..(25): SEQ ID NO: 7242; WAN024BYQ_at; Start 236; Stop 260
cagcaaatgaatacaagcactatga

SEQ ID NO: 99675 - DNA, 25 bp, Artificial
  probe
  misc_feature (1)..(25): SEQ ID NO: 7242; WAN024BYQ_at; Start 280; Stop 304
caggatgccgttttagaaaataagg

SEQ ID NO: 99676 - DNA, 25 bp, Artificial
  probe
  misc_feature (1)..(25): SEQ ID NO: 7242; WAN024BYQ_at; Start 146; Stop 170
tacttgtgccaaccagaaccaaaag

SEQ ID NO: 99677 - DNA, 25 bp, Artificial
  probe
  misc_feature (1)..(25): SEQ ID NO: 7242; WAN024BYQ_at; Start 141; Stop 165
ttcggtacttgtgccaaccagaacc

SEQ ID NO: 99678 - DNA, 25 bp, Artificial
  probe
  misc_feature (1)..(25): SEQ ID NO: 7242; WAN024BYQ_at; Start 293; Stop 317
tagaaaataaggaggaggataagga

SEQ ID NO: 99679 - DNA, 25 bp, Artificial
  probe
  misc_feature (1)..(25): SEQ ID NO: 7242; WAN024BYQ_at; Start 137; Stop 161
aaagttcggtacttgtgccaaccag

SEQ ID NO: 99680 - DNA, 25 bp, Artificial
  probe
  misc_feature (1)..(25): SEQ ID NO: 7242; WAN024BYQ_at; Start 57; Stop 81
tcaccagatttcgagtgggacagtg

SEQ ID NO: 99681 - DNA, 25 bp, Artificial
  probe
  misc_feature (1)..(25): SEQ ID NO: 7242; WAN024BYQ_at; Start 207; Stop 231
taagcaagttgaagaaaggtttgaa

SEQ ID NO: 99682 - DNA, 25 bp, Artificial
  probe
  misc_feature (1)..(25): SEQ ID NO: 7242; WAN024BYQ_at; Start 259; Stop 283
gaaattggcaatacttttatacagg

SEQ ID NO: 99683 - DNA, 25 bp, Artificial
  probe
  misc_feature (1)..(25): SEQ ID NO: 7242; WAN024BYQ_at; Start 110; Stop 134
caacgttcatacctgttataaatgg

SEQ ID NO: 99684 - DNA, 25 bp, Artificial
  probe
  misc_feature (1)..(25): SEQ ID NO: 7242; WAN024BYQ_at; Start 170; Stop 194
gaaaatacattctggtcgtttcagg

SEQ ID NO: 99685 - DNA, 25 bp, Artificial
  probe
  misc_feature (1)..(25): SEQ ID NO: 7242; WAN024BYQ_at; Start 85; Stop 109
gataagtacattgatgaacctcaca

SEQ ID NO: 99686 - DNA, 25 bp, Artificial
  probe
  misc_feature (1)..(25): SEQ ID NO: 7242; WAN024BYQ_at; Start 267; Stop 291
caatacttttatacaggatgccgtt

SEQ ID NO: 99687 - DNA, 25 bp, Artificial
  probe
  misc_feature (1)..(25): SEQ ID NO: 7242; WAN024BYQ_at; Start 229; Stop 253
gaagtgacagcaaatgaatacaagc

SEQ ID NO: 99688 - DNA, 25 bp, Artificial
  probe
  misc_feature (1)..(25): SEQ ID NO: 7242; WAN024BYQ_at; Start 40; Stop 64
tccttactcgtagcatgtcaccaga

SEQ ID NO: 99689 - DNA, 25 bp, Artificial
  probe
  misc_feature (1)..(25): SEQ ID NO: 7242; WAN024BYQ_at; Start 48; Stop 72
cgtagcatgtcaccagatttcgagt

SEQ ID NO: 99690 - DNA, 25 bp, Artificial
  probe
  misc_feature (1)..(25): SEQ ID NO: 7242; WAN024BYQ_at; Start 150; Stop 174
tgtgccaaccagaaccaaaagaaaa

SEQ ID NO: 99691 - DNA, 25 bp, Artificial
  probe
  misc_feature (1)..(25): SEQ ID NO: 7242; WAN024BYQ_at; Start 91; Stop 115
tacattgatgaacctcacacaacgt

SEQ ID NO: 99692 - DNA, 25 bp, Artificial
  probe
  misc_feature (1)..(25): SEQ ID NO: 6533; WAN024BYR_at; Start 157; Stop 181
gaatacctcaggaatcgattaggag

SEQ ID NO: 99693 - DNA, 25 bp, Artificial
  probe
  misc_feature (1)..(25): SEQ ID NO: 6533; WAN024BYR_at; Start 99; Stop 123
aacttctgctcaaaaaggttataca

SEQ ID NO: 99694 - DNA, 25 bp, Artificial
  probe
  misc_feature (1)..(25): SEQ ID NO: 6533; WAN024BYR_at; Start 41; Stop 65
gccacgcaaaatggttcgagcgata

SEQ ID NO: 99695 - DNA, 25 bp, Artificial
  probe
  misc_feature (1)..(25): SEQ ID NO: 6533; WAN024BYR_at; Start 35; Stop 59
cagaaagccacgcaaaatggttcga

SEQ ID NO: 99696 - DNA, 25 bp, Artificial
  probe
  misc_feature (1)..(25): SEQ ID NO: 6533; WAN024BYR_at; Start 50; Stop 74
aatggttcgagcgatattttgagaa

SEQ ID NO: 99697 - DNA, 25 bp, Artificial
  probe
  misc_feature (1)..(25): SEQ ID NO: 6533; WAN024BYR_at; Start 37; Stop 61
gaaagccacgcaaaatggttcgagc

SEQ ID NO: 99698 - DNA, 25 bp, Artificial
  probe
  misc_feature (1)..(25): SEQ ID NO: 6533; WAN024BYR_at; Start 3; Stop 27
gacattatttgatgaaatgcagcaa

SEQ ID NO: 99699 - DNA, 25 bp, Artificial
  probe
  misc_feature (1)..(25): SEQ ID NO: 6533; WAN024BYR_at; Start 32; Stop 56
gctcagaaagccacgcaaaatggtt

SEQ ID NO: 99700 - DNA, 25 bp, Artificial
  probe
  misc_feature (1)..(25): SEQ ID NO: 6533; WAN024BYR_at; Start 29; Stop 53
taagctcagaaagccacgcaaaatg

SEQ ID NO: 99701 - DNA, 25 bp, Artificial
  probe
  misc_feature (1)..(25): SEQ ID NO: 6533; WAN024BYR_at; Start 173; Stop 197
gattaggagatgaaagaacgtcggc

SEQ ID NO: 99702 - DNA, 25 bp, Artificial
  probe
  misc_feature (1)..(25): SEQ ID NO: 6533; WAN024BYR_at; Start 139; Stop 163
gtttggtcagttagagacgaatacc

SEQ ID NO: 99703 - DNA, 25 bp, Artificial
  probe
  misc_feature (1)..(25): SEQ ID NO: 6533; WAN024BYR_at; Start 154; Stop 178
gacgaatacctcaggaatcgattag

SEQ ID NO: 99704 - DNA, 25 bp, Artificial
  probe
  misc_feature (1)..(25): SEQ ID NO: 6533; WAN024BYR_at; Start 64; Stop 88
tattttgagaaatataacctagaac

SEQ ID NO: 99705 - DNA, 25 bp, Artificial
  probe
  misc_feature (1)..(25): SEQ ID NO: 6533; WAN024BYR_at; Start 53; Stop 77
ggttcgagcgatattttgagaaata

SEQ ID NO: 99706 - DNA, 25 bp, Artificial
  probe
  misc_feature (1)..(25): SEQ ID NO: 6533; WAN024BYR_at; Start 122; Stop 146
caggttatttaatcaatgtttggtc

SEQ ID NO: 99707 - DNA, 25 bp, Artificial
  probe
  misc_feature (1)..(25): SEQ ID NO: 6533; WAN024BYR_at; Start 135; Stop 159
caatgtttggtcagttagagacgaa

SEQ ID NO: 99708 - DNA, 25 bp, Artificial
  probe
  misc_feature (1)..(25): SEQ ID NO: 6533; WAN024BYR_at; Start 25; Stop 49
caattaagctcagaaagccacgcaa

SEQ ID NO: 99709 - DNA, 25 bp, Artificial
  probe
  misc_feature (1)..(25): SEQ ID NO: 6533; WAN024BYR_at; Start 150; Stop 174
tagagacgaatacctcaggaatcga

SEQ ID NO: 99710 - DNA, 25 bp, Artificial
  probe
  misc_feature (1)..(25): SEQ ID NO: 6533; WAN024BYR_at; Start 160; Stop 184
tacctcaggaatcgattaggagatg

SEQ ID NO: 99711 - DNA, 25 bp, Artificial
  probe
  misc_feature (1)..(25): SEQ ID NO: 6533; WAN024BYR_at; Start 22; Stop 46
cagcaattaagctcagaaagccacg

SEQ ID NO: 99712 - DNA, 25 bp, Artificial
  probe
  misc_feature (1)..(25): SEQ ID NO: 6533; WAN024BYR_at; Start 146; Stop 170
cagttagagacgaatacctcaggaa

SEQ ID NO: 99713 - DNA, 25 bp, Artificial
  probe
  misc_feature (1)..(25): SEQ ID NO: 6533; WAN024BYR_at; Start 13; Stop 37
gatgaaatgcagcaattaagctcag

SEQ ID NO: 99714 - DNA, 25 bp, Artificial
  probe
  misc_feature (1)..(25): SEQ ID NO: 6533; WAN024BYR_at; Start 115; Stop 139
ggttatacaggttatttaatcaatg

SEQ ID NO: 99715 - DNA, 25 bp, Artificial
  probe
  misc_feature (1)..(25): SEQ ID NO: 6533; WAN024BYR_at; Start 179; Stop 203
gagatgaaagaacgtcggcaacgtc

SEQ ID NO: 99716 - DNA, 25 bp, Artificial
  probe
  misc_feature (1)..(25): SEQ ID NO: 6533; WAN024BYR_at; Start 176; Stop 200
taggagatgaaagaacgtcggcaac

SEQ ID NO: 99717 - DNA, 25 bp, Artificial
  probe
  misc_feature (1)..(25): SEQ ID NO: 6533; WAN024BYR_at; Start 105; Stop 129
tgctcaaaaaggttatacaggttat

SEQ ID NO: 99718 - DNA, 25 bp, Artificial
  probe
  misc_feature (1)..(25): SEQ ID NO: 6533; WAN024BYR_at; Start 143; Stop 167
ggtcagttagagacgaatacctcag

SEQ ID NO: 99719 - DNA, 25 bp, Artificial
  probe
  misc_feature (1)..(25): SEQ ID NO: 6533; WAN024BYR_at; Start 210; Stop 234
aatccggagcttttggaggtcaacg

SEQ ID NO: 99720 - DNA, 25 bp, Artificial
  probe
  misc_feature (1)..(25): SEQ ID NO: 6533; WAN024BYR_at; Start 69; Stop 93
tgagaaatataacctagaacaaaaa

SEQ ID NO: 99721 - DNA, 25 bp, Artificial
  probe
  misc_feature (1)..(25): SEQ ID NO: 6533; WAN024BYR_at; Start 18; Stop 42
aatgcagcaattaagctcagaaagc

SEQ ID NO: 99722 - DNA, 25 bp, Artificial
  probe
  misc_feature (1)..(25): SEQ ID NO: 6533; WAN024BYR_at; Start 182; Stop 206
atgaaagaacgtcggcaacgtctac

SEQ ID NO: 99723 - DNA, 25 bp, Artificial
  probe
  misc_feature (1)..(25): SEQ ID NO: 6533; WAN024BYR_at; Start 222; Stop 246
ttggaggtcaacgagtgagatattt

SEQ ID NO: 99724 - DNA, 25 bp, Artificial
  probe
  misc_feature (1)..(25): SEQ ID NO: 6533; WAN024BYR_at; Start 162; Stop 186
cctcaggaatcgattaggagatgaa

SEQ ID NO: 99725 - DNA, 25 bp, Artificial
  probe
  misc_feature (1)..(25): SEQ ID NO: 6533; WAN024BYR_at; Start 43; Stop 67
cacgcaaaatggttcgagcgatatt

SEQ ID NO: 99726 - DNA, 25 bp, Artificial
  probe
  misc_feature (1)..(25): SEQ ID NO: 7166; WAN024BYS_at; Start 40; Stop 64
ttaatacgtacggtttctgctctga

SEQ ID NO: 99727 - DNA, 25 bp, Artificial
  probe
  misc_feature (1)..(25): SEQ ID NO: 7166; WAN024BYS_at; Start 78; Stop 102
gaatactatggaatttcaagattat

SEQ ID NO: 99728 - DNA, 25 bp, Artificial
  probe
  misc_feature (1)..(25): SEQ ID NO: 7166; WAN024BYS_at; Start 55; Stop 79
tctgctctgaatattgtggttatga

SEQ ID NO: 99729 - DNA, 25 bp, Artificial
  probe
  misc_feature (1)..(25): SEQ ID NO: 7166; WAN024BYS_at; Start 56; Stop 80
ctgctctgaatattgtggttatgaa

SEQ ID NO: 99730 - DNA, 25 bp, Artificial
  probe
  misc_feature (1)..(25): SEQ ID NO: 7166; WAN024BYS_at; Start 5; Stop 29
ctgcgatagcgaagctggtttattc

SEQ ID NO: 99731 - DNA, 25 bp, Artificial
  probe
  misc_feature (1)..(25): SEQ ID NO: 7166; WAN024BYS_at; Start 66; Stop 90
tattgtggttatgaatactatggaa

SEQ ID NO: 99732 - DNA, 25 bp, Artificial
  probe
  misc_feature (1)..(25): SEQ ID NO: 7166; WAN024BYS_at; Start 48; Stop 72
tacggtttctgctctgaatattgtg

SEQ ID NO: 99733 - DNA, 25 bp, Artificial
  probe
  misc_feature (1)..(25): SEQ ID NO: 7166; WAN024BYS_at; Start 59; Stop 83
ctctgaatattgtggttatgaatac

SEQ ID NO: 99734 - DNA, 25 bp, Artificial
  probe
  misc_feature (1)..(25): SEQ ID NO: 7166; WAN024BYS_at; Start 72; Stop 96
ggttatgaatactatggaatttcaa

SEQ ID NO: 99735 - DNA, 25 bp, Artificial
  probe
  misc_feature (1)..(25): SEQ ID NO: 7166; WAN024BYS_at; Start 75; Stop 99
tatgaatactatggaatttcaagat

SEQ ID NO: 99736 - DNA, 25 bp, Artificial
  probe
  misc_feature (1)..(25): SEQ ID NO: 7166; WAN024BYS_at; Start 49; Stop 73
acggtttctgctctgaatattgtgg

SEQ ID NO: 99737 - DNA, 25 bp, Artificial
  probe
  misc_feature (1)..(25): SEQ ID NO: 7166; WAN024BYS_at; Start 28; Stop 52
tcgacagatattttaatacgtacgg

SEQ ID NO: 99738 - DNA, 25 bp, Artificial
  probe
  misc_feature (1)..(25): SEQ ID NO: 7166; WAN024BYS_at; Start 70; Stop 94
gtggttatgaatactatggaatttc

SEQ ID NO: 99739 - DNA, 25 bp, Artificial
  probe
  misc_feature (1)..(25): SEQ ID NO: 7166; WAN024BYS_at; Start 43; Stop 67
atacgtacggtttctgctctgaata

SEQ ID NO: 99740 - DNA, 25 bp, Artificial
  probe
  misc_feature (1)..(25): SEQ ID NO: 7166; WAN024BYS_at; Start 44; Stop 68
tacgtacggtttctgctctgaatat

SEQ ID NO: 99741 - DNA, 25 bp, Artificial
  probe
  misc_feature (1)..(25): SEQ ID NO: 7166; WAN024BYS_at; Start 18; Stop 42
gctggtttattcgacagatatttta

SEQ ID NO: 99742 - DNA, 25 bp, Artificial
  probe
  misc_feature (1)..(25): SEQ ID NO: 7166; WAN024BYS_at; Start 81; Stop 105
tactatggaatttcaagattataaa

SEQ ID NO: 99743 - DNA, 25 bp, Artificial
  probe
  misc_feature (1)..(25): SEQ ID NO: 7166; WAN024BYS_at; Start 14; Stop 38
cgaagctggtttattcgacagatat

SEQ ID NO: 99744 - DNA, 25 bp, Artificial
  probe
  misc_feature (1)..(25): SEQ ID NO: 7166; WAN024BYS_at; Start 41; Stop 65
taatacgtacggtttctgctctgaa

SEQ ID NO: 99745 - DNA, 25 bp, Artificial
  probe
  misc_feature (1)..(25): SEQ ID NO: 7166; WAN024BYS_at; Start 6; Stop 30
tgcgatagcgaagctggtttattcg

SEQ ID NO: 99746 - DNA, 25 bp, Artificial
  probe
  misc_feature (1)..(25): SEQ ID NO: 7166; WAN024BYS_at; Start 29; Stop 53
cgacagatattttaatacgtacggt

SEQ ID NO: 99747 - DNA, 25 bp, Artificial
  probe
  misc_feature (1)..(25): SEQ ID NO: 7166; WAN024BYS_at; Start 50; Stop 74
cggtttctgctctgaatattgtggt

SEQ ID NO: 99748 - DNA, 25 bp, Artificial
  probe
  misc_feature (1)..(25): SEQ ID NO: 7166; WAN024BYS_at; Start 15; Stop 39
gaagctggtttattcgacagatatt

SEQ ID NO: 99749 - DNA, 25 bp, Artificial
  probe
  misc_feature (1)..(25): SEQ ID NO: 7166; WAN024BYS_at; Start 1; Stop 25
ctgtctgcgatagcgaagctggttt

SEQ ID NO: 99750 - DNA, 25 bp, Artificial
  probe
  misc_feature (1)..(25): SEQ ID NO: 7166; WAN024BYS_at; Start 42; Stop 66
aatacgtacggtttctgctctgaat

SEQ ID NO: 99751 - DNA, 25 bp, Artificial
  probe
  misc_feature (1)..(25): SEQ ID NO: 7166; WAN024BYS_at; Start 52; Stop 76
gtttctgctctgaatattgtggtta

SEQ ID NO: 99752 - DNA, 25 bp, Artificial
  probe
  misc_feature (1)..(25): SEQ ID NO: 7166; WAN024BYS_at; Start 3; Stop 27
gtctgcgatagcgaagctggtttat

SEQ ID NO: 99753 - DNA, 25 bp, Artificial
  probe
  misc_feature (1)..(25): SEQ ID NO: 7166; WAN024BYS_at; Start 13; Stop 37
gcgaagctggtttattcgacagata

SEQ ID NO: 99754 - DNA, 25 bp, Artificial
  probe
  misc_feature (1)..(25): SEQ ID NO: 7166; WAN024BYS_at; Start 11; Stop 35
tagcgaagctggtttattcgacaga

SEQ ID NO: 99755 - DNA, 25 bp, Artificial
  probe
  misc_feature (1)..(25): SEQ ID NO: 7166; WAN024BYS_at; Start 4; Stop 28
tctgcgatagcgaagctggtttatt

SEQ ID NO: 99756 - DNA, 25 bp, Artificial
  probe
  misc_feature (1)..(25): SEQ ID NO: 7166; WAN024BYS_at; Start 9; Stop 33
gatagcgaagctggtttattcgaca

SEQ ID NO: 99757 - DNA, 25 bp, Artificial
  probe
  misc_feature (1)..(25): SEQ ID NO: 7166; WAN024BYS_at; Start 46; Stop 70
cgtacggtttctgctctgaatattg

SEQ ID NO: 99758 - DNA, 25 bp, Artificial
  probe
  misc_feature (1)..(25): SEQ ID NO: 7166; WAN024BYS_at; Start 61; Stop 85
ctgaatattgtggttatgaatacta

SEQ ID NO: 99759 - DNA, 25 bp, Artificial
  probe
  misc_feature (1)..(25): SEQ ID NO: 7166; WAN024BYS_at; Start 8; Stop 32
cgatagcgaagctggtttattcgac

SEQ ID NO: 99760 - DNA, 25 bp, Artificial
  probe
  misc_feature (1)..(25): SEQ ID NO: 6512; WAN024BYT_at; Start 77; Stop 101
gtcgcatctgtctaggccctaatat

SEQ ID NO: 99761 - DNA, 25 bp, Artificial
  probe
  misc_feature (1)..(25): SEQ ID NO: 6512; WAN024BYT_at; Start 25; Stop 49
tcttgttatagaggaaatactgaag

SEQ ID NO: 99762 - DNA, 25 bp, Artificial
  probe
  misc_feature (1)..(25): SEQ ID NO: 6512; WAN024BYT_at; Start 49; Stop 73
gatgagcttatcaacatagatgata

SEQ ID NO: 99763 - DNA, 25 bp, Artificial
  probe
  misc_feature (1)..(25): SEQ ID NO: 6512; WAN024BYT_at; Start 31; Stop 55
tatagaggaaatactgaagatgagc

SEQ ID NO: 99764 - DNA, 25 bp, Artificial
  probe
  misc_feature (1)..(25): SEQ ID NO: 6512; WAN024BYT_at; Start 85; Stop 109
tgtctaggccctaatatcttgtttt

SEQ ID NO: 99765 - DNA, 25 bp, Artificial
  probe
  misc_feature (1)..(25): SEQ ID NO: 6512; WAN024BYT_at; Start 113; Stop 137
gaacaccttacaatttaggagaaca

SEQ ID NO: 99766 - DNA, 25 bp, Artificial
  probe
  misc_feature (1)..(25): SEQ ID NO: 6512; WAN024BYT_at; Start 22; Stop 46
caatcttgttatagaggaaatactg

SEQ ID NO: 99767 - DNA, 25 bp, Artificial
  probe
  misc_feature (1)..(25): SEQ ID NO: 6512; WAN024BYT_at; Start 2; Stop 26
tgacaaaatttgttaaaatacaatc

SEQ ID NO: 99768 - DNA, 25 bp, Artificial
  probe
  misc_feature (1)..(25): SEQ ID NO: 6512; WAN024BYT_at; Start 110; Stop 134
taagaacaccttacaatttaggaga

SEQ ID NO: 99769 - DNA, 25 bp, Artificial
  probe
  misc_feature (1)..(25): SEQ ID NO: 6512; WAN024BYT_at; Start 70; Stop 94
gatattagtcgcatctgtctaggcc

SEQ ID NO: 99770 - DNA, 25 bp, Artificial
  probe
  misc_feature (1)..(25): SEQ ID NO: 6512; WAN024BYT_at; Start 130; Stop 154
ggagaacaccatatttctatcactc

SEQ ID NO: 99771 - DNA, 25 bp, Artificial
  probe
  misc_feature (1)..(25): SEQ ID NO: 6512; WAN024BYT_at; Start 79; Stop 103
cgcatctgtctaggccctaatatct

SEQ ID NO: 99772 - DNA, 25 bp, Artificial
  probe
  misc_feature (1)..(25): SEQ ID NO: 6512; WAN024BYT_at; Start 67; Stop 91
gatgatattagtcgcatctgtctag

SEQ ID NO: 99773 - DNA, 25 bp, Artificial
  probe
  misc_feature (1)..(25): SEQ ID NO: 6512; WAN024BYT_at; Start 116; Stop 140
caccttacaatttaggagaacacca

SEQ ID NO: 99774 - DNA, 25 bp, Artificial
  probe
  misc_feature (1)..(25): SEQ ID NO: 6512; WAN024BYT_at; Start 87; Stop 111
tctaggccctaatatcttgttttta

SEQ ID NO: 99775 - DNA, 25 bp, Artificial
  probe
  misc_feature (1)..(25): SEQ ID NO: 6512; WAN024BYT_at; Start 160; Stop 184
tcagtagataaacttttgaaagtat

SEQ ID NO: 99776 - DNA, 25 bp, Artificial
  probe
  misc_feature (1)..(25): SEQ ID NO: 6512; WAN024BYT_at; Start 57; Stop 81
tatcaacatagatgatattagtcgc

SEQ ID NO: 99777 - DNA, 25 bp, Artificial
  probe
  misc_feature (1)..(25): SEQ ID NO: 6512; WAN024BYT_at; Start 15; Stop 39
taaaatacaatcttgttatagagga

SEQ ID NO: 99778 - DNA, 25 bp, Artificial
  probe
  misc_feature (1)..(25): SEQ ID NO: 6512; WAN024BYT_at; Start 72; Stop 96
tattagtcgcatctgtctaggccct

SEQ ID NO: 99779 - DNA, 25 bp, Artificial
  probe
  misc_feature (1)..(25): SEQ ID NO: 6512; WAN024BYT_at; Start 142; Stop 166
atttctatcactcaaaattcagtag

SEQ ID NO: 99780 - DNA, 25 bp, Artificial
  probe
  misc_feature (1)..(25): SEQ ID NO: 6512; WAN024BYT_at; Start 123; Stop 147
caatttaggagaacaccatatttct

SEQ ID NO: 99781 - DNA, 25 bp, Artificial
  probe
  misc_feature (1)..(25): SEQ ID NO: 6512; WAN024BYT_at; Start 33; Stop 57
tagaggaaatactgaagatgagctt

SEQ ID NO: 99782 - DNA, 25 bp, Artificial
  probe
  misc_feature (1)..(25): SEQ ID NO: 6512; WAN024BYT_at; Start 46; Stop 70
gaagatgagcttatcaacatagatg

SEQ ID NO: 99783 - DNA, 25 bp, Artificial
  probe
  misc_feature (1)..(25): SEQ ID NO: 6512; WAN024BYT_at; Start 69; Stop 93
tgatattagtcgcatctgtctaggc

SEQ ID NO: 99784 - DNA, 25 bp, Artificial
  probe
  misc_feature (1)..(25): SEQ ID NO: 6512; WAN024BYT_at; Start 128; Stop 152
taggagaacaccatatttctatcac

SEQ ID NO: 99785 - DNA, 25 bp, Artificial
  probe
  misc_feature (1)..(25): SEQ ID NO: 6512; WAN024BYT_at; Start 20; Stop 44
tacaatcttgttatagaggaaatac

SEQ ID NO: 99786 - DNA, 25 bp, Artificial
  probe
  misc_feature (1)..(25): SEQ ID NO: 6512; WAN024BYT_at; Start 60; Stop 84
caacatagatgatattagtcgcatc

SEQ ID NO: 99787 - DNA, 25 bp, Artificial
  probe
  misc_feature (1)..(25): SEQ ID NO: 6512; WAN024BYT_at; Start 174; Stop 198
tttgaaagtattggatattattggg

SEQ ID NO: 99788 - DNA, 25 bp, Artificial
  probe
  misc_feature (1)..(25): SEQ ID NO: 6512; WAN024BYT_at; Start 133; Stop 157
gaacaccatatttctatcactcaaa

SEQ ID NO: 99789 - DNA, 25 bp, Artificial
  probe
  misc_feature (1)..(25): SEQ ID NO: 6512; WAN024BYT_at; Start 42; Stop 66
tactgaagatgagcttatcaacata

SEQ ID NO: 99790 - DNA, 25 bp, Artificial
  probe
  misc_feature (1)..(25): SEQ ID NO: 6512; WAN024BYT_at; Start 150; Stop 174
cactcaaaattcagtagataaactt

SEQ ID NO: 99791 - DNA, 25 bp, Artificial
  probe
  misc_feature (1)..(25): SEQ ID NO: 6512; WAN024BYT_at; Start 118; Stop 142
ccttacaatttaggagaacaccata

SEQ ID NO: 99792 - DNA, 25 bp, Artificial
  probe
  misc_feature (1)..(25): SEQ ID NO: 6512; WAN024BYT_at; Start 75; Stop 99
tagtcgcatctgtctaggccctaat

SEQ ID NO: 99793 - DNA, 25 bp, Artificial
  probe
  misc_feature (1)..(25): SEQ ID NO: 6512; WAN024BYT_at; Start 37; Stop 61
ggaaatactgaagatgagcttatca

SEQ ID NO: 99794 - DNA, 25 bp, Artificial
  probe
  misc_feature (1)..(25): SEQ ID NO: 6798; WAN024BYU_at; Start 88; Stop 112
ctagaatatgggttttatcaggaca

SEQ ID NO: 99795 - DNA, 25 bp, Artificial
  probe
  misc_feature (1)..(25): SEQ ID NO: 6798; WAN024BYU_at; Start 26; Stop 50
tcgctaaaagcttggatagaattag

SEQ ID NO: 99796 - DNA, 25 bp, Artificial
  probe
  misc_feature (1)..(25): SEQ ID NO: 6798; WAN024BYU_at; Start 6; Stop 30
agaaacaacatacgatattatcgct

SEQ ID NO: 99797 - DNA, 25 bp, Artificial
  probe
  misc_feature (1)..(25): SEQ ID NO: 6798; WAN024BYU_at; Start 89; Stop 113
tagaatatgggttttatcaggacaa

SEQ ID NO: 99798 - DNA, 25 bp, Artificial
  probe
  misc_feature (1)..(25): SEQ ID NO: 6798; WAN024BYU_at; Start 44; Stop 68
gaattagtatggaattacaccaagc

SEQ ID NO: 99799 - DNA, 25 bp, Artificial
  probe
  misc_feature (1)..(25): SEQ ID NO: 6798; WAN024BYU_at; Start 67; Stop 91
gctgacgaaaataacgattttctag

SEQ ID NO: 99800 - DNA, 25 bp, Artificial
  probe
  misc_feature (1)..(25): SEQ ID NO: 6798; WAN024BYU_at; Start 42; Stop 66
tagaattagtatggaattacaccaa

SEQ ID NO: 99801 - DNA, 25 bp, Artificial
  probe
  misc_feature (1)..(25): SEQ ID NO: 6798; WAN024BYU_at; Start 27; Stop 51
cgctaaaagcttggatagaattagt

SEQ ID NO: 99802 - DNA, 25 bp, Artificial
  probe
  misc_feature (1)..(25): SEQ ID NO: 6798; WAN024BYU_at; Start 19; Stop 43
gatattatcgctaaaagcttggata

SEQ ID NO: 99803 - DNA, 25 bp, Artificial
  probe
  misc_feature (1)..(25): SEQ ID NO: 6798; WAN024BYU_at; Start 63; Stop 87
ccaagctgacgaaaataacgatttt

SEQ ID NO: 99804 - DNA, 25 bp, Artificial
  probe
  misc_feature (1)..(25): SEQ ID NO: 6798; WAN024BYU_at; Start 59; Stop 83
tacaccaagctgacgaaaataacga

SEQ ID NO: 99805 - DNA, 25 bp, Artificial
  probe
  misc_feature (1)..(25): SEQ ID NO: 6798; WAN024BYU_at; Start 46; Stop 70
attagtatggaattacaccaagctg

SEQ ID NO: 99806 - DNA, 25 bp, Artificial
  probe
  misc_feature (1)..(25): SEQ ID NO: 6798; WAN024BYU_at; Start 21; Stop 45
tattatcgctaaaagcttggataga

SEQ ID NO: 99807 - DNA, 25 bp, Artificial
  probe
  misc_feature (1)..(25): SEQ ID NO: 6798; WAN024BYU_at; Start 2; Stop 26
tggaagaaacaacatacgatattat

SEQ ID NO: 99808 - DNA, 25 bp, Artificial
  probe
  misc_feature (1)..(25): SEQ ID NO: 6798; WAN024BYU_at; Start 51; Stop 75
tatggaattacaccaagctgacgaa

SEQ ID NO: 99809 - DNA, 25 bp, Artificial
  probe
  misc_feature (1)..(25): SEQ ID NO: 6798; WAN024BYU_at; Start 53; Stop 77
tggaattacaccaagctgacgaaaa

SEQ ID NO: 99810 - DNA, 25 bp, Artificial
  probe
  misc_feature (1)..(25): SEQ ID NO: 6798; WAN024BYU_at; Start 55; Stop 79
gaattacaccaagctgacgaaaata

SEQ ID NO: 99811 - DNA, 25 bp, Artificial
  probe
  misc_feature (1)..(25): SEQ ID NO: 6798; WAN024BYU_at; Start 49; Stop 73
agtatggaattacaccaagctgacg

SEQ ID NO: 99812 - DNA, 25 bp, Artificial
  probe
  misc_feature (1)..(25): SEQ ID NO: 6798; WAN024BYU_at; Start 58; Stop 82
ttacaccaagctgacgaaaataacg

SEQ ID NO: 99813 - DNA, 25 bp, Artificial
  probe
  misc_feature (1)..(25): SEQ ID NO: 6798; WAN024BYU_at; Start 90; Stop 114
agaatatgggttttatcaggacaat

SEQ ID NO: 99814 - DNA, 25 bp, Artificial
  probe
  misc_feature (1)..(25): SEQ ID NO: 6798; WAN024BYU_at; Start 40; Stop 64
gatagaattagtatggaattacacc

SEQ ID NO: 99815 - DNA, 25 bp, Artificial
  probe
  misc_feature (1)..(25): SEQ ID NO: 6798; WAN024BYU_at; Start 64; Stop 88
caagctgacgaaaataacgattttc

SEQ ID NO: 99816 - DNA, 25 bp, Artificial
  probe
  misc_feature (1)..(25): SEQ ID NO: 6798; WAN024BYU_at; Start 24; Stop 48
tatcgctaaaagcttggatagaatt

SEQ ID NO: 99817 - DNA, 25 bp, Artificial
  probe
  misc_feature (1)..(25): SEQ ID NO: 6798; WAN024BYU_at; Start 50; Stop 74
gtatggaattacaccaagctgacga

SEQ ID NO: 99818 - DNA, 25 bp, Artificial
  probe
  misc_feature (1)..(25): SEQ ID NO: 6798; WAN024BYU_at; Start 18; Stop 42
cgatattatcgctaaaagcttggat

SEQ ID NO: 99819 - DNA, 25 bp, Artificial
  probe
  misc_feature (1)..(25): SEQ ID NO: 6798; WAN024BYU_at; Start 30; Stop 54
taaaagcttggatagaattagtatg

SEQ ID NO: 99820 - DNA, 25 bp, Artificial
  probe
  misc_feature (1)..(25): SEQ ID NO: 6798; WAN024BYU_at; Start 61; Stop 85
caccaagctgacgaaaataacgatt

SEQ ID NO: 99821 - DNA, 25 bp, Artificial
  probe
  misc_feature (1)..(25): SEQ ID NO: 6798; WAN024BYU_at; Start 48; Stop 72
tagtatggaattacaccaagctgac

SEQ ID NO: 99822 - DNA, 25 bp, Artificial
  probe
  misc_feature (1)..(25): SEQ ID NO: 6798; WAN024BYU_at; Start 32; Stop 56
aaagcttggatagaattagtatgga

SEQ ID NO: 99823 - DNA, 25 bp, Artificial
  probe
  misc_feature (1)..(25): SEQ ID NO: 6798; WAN024BYU_at; Start 4; Stop 28
gaagaaacaacatacgatattatcg

SEQ ID NO: 99824 - DNA, 25 bp, Artificial
  probe
  misc_feature (1)..(25): SEQ ID NO: 6798; WAN024BYU_at; Start 35; Stop 59
gcttggatagaattagtatggaatt

SEQ ID NO: 99825 - DNA, 25 bp, Artificial
  probe
  misc_feature (1)..(25): SEQ ID NO: 6798; WAN024BYU_at; Start 75; Stop 99
aaataacgattttctagaatatggg

SEQ ID NO: 99826 - DNA, 25 bp, Artificial
  probe
  misc_feature (1)..(25): SEQ ID NO: 6798; WAN024BYU_at; Start 87; Stop 111
tctagaatatgggttttatcaggac

SEQ ID NO: 99827 - DNA, 25 bp, Artificial
  probe
  misc_feature (1)..(25): SEQ ID NO: 6798; WAN024BYU_at; Start 54; Stop 78
ggaattacaccaagctgacgaaaat

SEQ ID NO: 99828 - DNA, 25 bp, Artificial
  probe
  misc_feature (1)..(25): SEQ ID NO: 7172; WAN024BYV_at; Start 30; Stop 54
agcgattggaggaaatgaactaatc

SEQ ID NO: 99829 - DNA, 25 bp, Artificial
  probe
  misc_feature (1)..(25): SEQ ID NO: 7172; WAN024BYV_at; Start 5; Stop 29
tgttagaccctttcggaaatcgtca

SEQ ID NO: 99830 - DNA, 25 bp, Artificial
  probe
  misc_feature (1)..(25): SEQ ID NO: 7172; WAN024BYV_at; Start 32; Stop 56
cgattggaggaaatgaactaatcca

SEQ ID NO: 99831 - DNA, 25 bp, Artificial
  probe
  misc_feature (1)..(25): SEQ ID NO: 7172; WAN024BYV_at; Start 31; Stop 55
gcgattggaggaaatgaactaatcc

SEQ ID NO: 99832 - DNA, 25 bp, Artificial
  probe
  misc_feature (1)..(25): SEQ ID NO: 6809; WAN024BYW_at; Start 29; Stop 53
atcttctttcttgttatgtaaaaat

SEQ ID NO: 99833 - DNA, 25 bp, Artificial
  probe
  misc_feature (1)..(25): SEQ ID NO: 6809; WAN024BYW_at; Start 37; Stop 61
tcttgttatgtaaaaattttggcta

SEQ ID NO: 99834 - DNA, 25 bp, Artificial
  probe
  misc_feature (1)..(25): SEQ ID NO: 6809; WAN024BYW_at; Start 15; Stop 39
tgcgaaaaacaaatatcttctttct

SEQ ID NO: 99835 - DNA, 25 bp, Artificial
  probe
  misc_feature (1)..(25): SEQ ID NO: 6809; WAN024BYW_at; Start 24; Stop 48
caaatatcttctttcttgttatgta

SEQ ID NO: 99836 - DNA, 25 bp, Artificial
  probe
  misc_feature (1)..(25): SEQ ID NO: 6809; WAN024BYW_at; Start 11; Stop 35
ctgctgcgaaaaacaaatatcttct

SEQ ID NO: 99837 - DNA, 25 bp, Artificial
  probe
  misc_feature (1)..(25): SEQ ID NO: 6809; WAN024BYW_at; Start 27; Stop 51
atatcttctttcttgttatgtaaaa

SEQ ID NO: 99838 - DNA, 25 bp, Artificial
  probe
  misc_feature (1)..(25): SEQ ID NO: 6809; WAN024BYW_at; Start 21; Stop 45
aaacaaatatcttctttcttgttat

SEQ ID NO: 99839 - DNA, 25 bp, Artificial
  probe
  misc_feature (1)..(25): SEQ ID NO: 6809; WAN024BYW_at; Start 25; Stop 49
aaatatcttctttcttgttatgtaa

SEQ ID NO: 99840 - DNA, 25 bp, Artificial
  probe
  misc_feature (1)..(25): SEQ ID NO: 6809; WAN024BYW_at; Start 26; Stop 50
aatatcttctttcttgttatgtaaa

SEQ ID NO: 99841 - DNA, 25 bp, Artificial
  probe
  misc_feature (1)..(25): SEQ ID NO: 6809; WAN024BYW_at; Start 10; Stop 34
tctgctgcgaaaaacaaatatcttc

SEQ ID NO: 99842 - DNA, 25 bp, Artificial
  probe
  misc_feature (1)..(25): SEQ ID NO: 6809; WAN024BYW_at; Start 8; Stop 32
tttctgctgcgaaaaacaaatatct

SEQ ID NO: 99843 - DNA, 25 bp, Artificial
  probe
  misc_feature (1)..(25): SEQ ID NO: 6809; WAN024BYW_at; Start 12; Stop 36
tgctgcgaaaaacaaatatcttctt

SEQ ID NO: 99844 - DNA, 25 bp, Artificial
  probe
  misc_feature (1)..(25): SEQ ID NO: 6809; WAN024BYW_at; Start 17; Stop 41
cgaaaaacaaatatcttctttcttg

SEQ ID NO: 99845 - DNA, 25 bp, Artificial
  probe
  misc_feature (1)..(25): SEQ ID NO: 6809; WAN024BYW_at; Start 23; Stop 47
acaaatatcttctttcttgttatgt

SEQ ID NO: 99846 - DNA, 25 bp, Artificial
  probe
  misc_feature (1)..(25): SEQ ID NO: 6809; WAN024BYW_at; Start 28; Stop 52
tatcttctttcttgttatgtaaaaa

SEQ ID NO: 99847 - DNA, 25 bp, Artificial
  probe
  misc_feature (1)..(25): SEQ ID NO: 6809; WAN024BYW_at; Start 2; Stop 26
tggaattttctgctgcgaaaaacaa

SEQ ID NO: 99848 - DNA, 25 bp, Artificial
  probe
  misc_feature (1)..(25): SEQ ID NO: 6809; WAN024BYW_at; Start 22; Stop 46
aacaaatatcttctttcttgttatg

SEQ ID NO: 99849 - DNA, 25 bp, Artificial
  probe
  misc_feature (1)..(25): SEQ ID NO: 6809; WAN024BYW_at; Start 9; Stop 33
ttctgctgcgaaaaacaaatatctt

SEQ ID NO: 99850 - DNA, 25 bp, Artificial
  probe
  misc_feature (1)..(25): SEQ ID NO: 6809; WAN024BYW_at; Start 4; Stop 28
gaattttctgctgcgaaaaacaaat

SEQ ID NO: 99851 - DNA, 25 bp, Artificial
  probe
  misc_feature (1)..(25): SEQ ID NO: 6809; WAN024BYW_at; Start 14; Stop 38
ctgcgaaaaacaaatatcttctttc

SEQ ID NO: 99852 - DNA, 25 bp, Artificial
  probe
  misc_feature (1)..(25): SEQ ID NO: 6809; WAN024BYW_at; Start 7; Stop 31
ttttctgctgcgaaaaacaaatatc

SEQ ID NO: 99853 - DNA, 25 bp, Artificial
  probe
  misc_feature (1)..(25): SEQ ID NO: 6809; WAN024BYW_at; Start 5; Stop 29
aattttctgctgcgaaaaacaaata

SEQ ID NO: 99854 - DNA, 25 bp, Artificial
  probe
  misc_feature (1)..(25): SEQ ID NO: 6809; WAN024BYW_at; Start 3; Stop 27
ggaattttctgctgcgaaaaacaaa

SEQ ID NO: 99855 - DNA, 25 bp, Artificial
  probe
  misc_feature (1)..(25): SEQ ID NO: 6809; WAN024BYW_at; Start 6; Stop 30
attttctgctgcgaaaaacaaatat

SEQ ID NO: 99856 - DNA, 25 bp, Artificial
  probe
  misc_feature (1)..(25): SEQ ID NO: 6809; WAN024BYW_at; Start 1; Stop 25
atggaattttctgctgcgaaaaaca

SEQ ID NO: 99857 - DNA, 25 bp, Artificial
  probe
  misc_feature (1)..(25): SEQ ID NO: 6809; WAN024BYW_at; Start 13; Stop 37
gctgcgaaaaacaaatatcttcttt

SEQ ID NO: 99858 - DNA, 25 bp, Artificial
  probe
  misc_feature (1)..(25): SEQ ID NO: 7298; WAN024BYX_at; Start 225; Stop 249
taagagctacgacaataccagcgcc

SEQ ID NO: 99859 - DNA, 25 bp, Artificial
  probe
  misc_feature (1)..(25): SEQ ID NO: 7298; WAN024BYX_at; Start 153; Stop 177
tgctgcgtggaatggtcataatgct

SEQ ID NO: 99860 - DNA, 25 bp, Artificial
  probe
  misc_feature (1)..(25): SEQ ID NO: 7298; WAN024BYX_at; Start 490; Stop 514
ccaactttggctgttaagtggaact

SEQ ID NO: 99861 - DNA, 25 bp, Artificial
  probe
  misc_feature (1)..(25): SEQ ID NO: 7298; WAN024BYX_at; Start 240; Stop 264
taccagcgcctataattcggtacag

SEQ ID NO: 99862 - DNA, 25 bp, Artificial
  probe
  misc_feature (1)..(25): SEQ ID NO: 7298; WAN024BYX_at; Start 338; Stop 362
gcgaaaaggccgacggtcacggtca

SEQ ID NO: 99863 - DNA, 25 bp, Artificial
  probe
  misc_feature (1)..(25): SEQ ID NO: 7298; WAN024BYX_at; Start 10; Stop 34
gacttcagtcgtaagttcaccgagg

SEQ ID NO: 99864 - DNA, 25 bp, Artificial
  probe
  misc_feature (1)..(25): SEQ ID NO: 7298; WAN024BYX_at; Start 100; Stop 124
tatgatggtggtctgaaccgtttcg

SEQ ID NO: 99865 - DNA, 25 bp, Artificial
  probe
  misc_feature (1)..(25): SEQ ID NO: 7298; WAN024BYX_at; Start 290; Stop 314
tcgctaacaagaagggtaccttctc

SEQ ID NO: 99866 - DNA, 25 bp, Artificial
  probe
  misc_feature (1)..(25): SEQ ID NO: 7298; WAN024BYX_at; Start 84; Stop 108
tgctgcccacgtagagtatgatggt

SEQ ID NO: 99867 - DNA, 25 bp, Artificial
  probe
  misc_feature (1)..(25): SEQ ID NO: 7298; WAN024BYX_at; Start 392; Stop 416
ggtacaatgccaccgagcatttcag

SEQ ID NO: 99868 - DNA, 25 bp, Artificial
  probe
  misc_feature (1)..(25): SEQ ID NO: 7298; WAN024BYX_at; Start 118; Stop 142
cgtttcggttcgttccagcaggccg

SEQ ID NO: 99869 - DNA, 25 bp, Artificial
  probe
  misc_feature (1)..(25): SEQ ID NO: 7298; WAN024BYX_at; Start 75; Stop 99
gaaaggttttgctgcccacgtagag

SEQ ID NO: 99870 - DNA, 25 bp, Artificial
  probe
  misc_feature (1)..(25): SEQ ID NO: 7298; WAN024BYX_at; Start 423; Stop 447
taccgaggttgaggttagcaacaac

SEQ ID NO: 99871 - DNA, 25 bp, Artificial
  probe
  misc_feature (1)..(25): SEQ ID NO: 7298; WAN024BYX_at; Start 35; Stop 59
gagcttatggtgaaatctctcgtga

SEQ ID NO: 99872 - DNA, 25 bp, Artificial
  probe
  misc_feature (1)..(25): SEQ ID NO: 7298; WAN024BYX_at; Start 349; Stop 373
gacggtcacggtcagctggttctct

SEQ ID NO: 99873 - DNA, 25 bp, Artificial
  probe
  misc_feature (1)..(25): SEQ ID NO: 7298; WAN024BYX_at; Start 21; Stop 45
taagttcaccgagggagcttatggt

SEQ ID NO: 99874 - DNA, 25 bp, Artificial
  probe
  misc_feature (1)..(25): SEQ ID NO: 7298; WAN024BYX_at; Start 479; Stop 503
tcttcattaacccaactttggctgt

SEQ ID NO: 99875 - DNA, 25 bp, Artificial
  probe
  misc_feature (1)..(25): SEQ ID NO: 7298; WAN024BYX_at; Start 379; Stop 403
gagccgcagctctggtacaatgcca

SEQ ID NO: 99876 - DNA, 25 bp, Artificial
  probe
  misc_feature (1)..(25): SEQ ID NO: 7298; WAN024BYX_at; Start 183; Stop 207
ctcaaagacctattctgtacagttg

SEQ ID NO: 99877 - DNA, 25 bp, Artificial
  probe
  misc_feature (1)..(25): SEQ ID NO: 7298; WAN024BYX_at; Start 324; Stop 348
tgatttctggcgtggcgaaaaggcc

SEQ ID NO: 99878 - DNA, 25 bp, Artificial
  probe
  misc_feature (1)..(25): SEQ ID NO: 7298; WAN024BYX_at; Start 196; Stop 220
tctgtacagttgatgtataagcgct

SEQ ID NO: 99879 - DNA, 25 bp, Artificial
  probe
  misc_feature (1)..(25): SEQ ID NO: 7298; WAN024BYX_at; Start 461; Stop 485
cctataacgataaaaagttcttcat

SEQ ID NO: 99880 - DNA, 25 bp, Artificial
  probe
  misc_feature (1)..(25): SEQ ID NO: 7298; WAN024BYX_at; Start 132; Stop 156
ccagcaggccgcattggttggtgct

SEQ ID NO: 99881 - DNA, 25 bp, Artificial
  probe
  misc_feature (1)..(25): SEQ ID NO: 7298; WAN024BYX_at; Start 317; Stop 341
gtttcattgatttctggcgtggcga

SEQ ID NO: 99882 - DNA, 25 bp, Artificial
  probe
  misc_feature (1)..(25): SEQ ID NO: 7298; WAN024BYX_at; Start 440; Stop 464
gcaacaacttcatttataacaccta

SEQ ID NO: 99883 - DNA, 25 bp, Artificial
  probe
  misc_feature (1)..(25): SEQ ID NO: 7298; WAN024BYX_at; Start 405; Stop 429
cgagcatttcagtgtaggtaccgag

SEQ ID NO: 99884 - DNA, 25 bp, Artificial
  probe
  misc_feature (1)..(25): SEQ ID NO: 7298; WAN024BYX_at; Start 48; Stop 72
aatctctcgtgagtttaatattggt

SEQ ID NO: 99885 - DNA, 25 bp, Artificial
  probe
  misc_feature (1)..(25): SEQ ID NO: 7298; WAN024BYX_at; Start 211; Stop 235
tataagcgcttctttaagagctacg

SEQ ID NO: 99886 - DNA, 25 bp, Artificial
  probe
  misc_feature (1)..(25): SEQ ID NO: 7298; WAN024BYX_at; Start 362; Stop 386
agctggttctcttgaccgagccgca

SEQ ID NO: 99887 - DNA, 25 bp, Artificial
  probe
  misc_feature (1)..(25): SEQ ID NO: 7298; WAN024BYX_at; Start 302; Stop 326
agggtaccttctctggtttcattga

SEQ ID NO: 99888 - DNA, 25 bp, Artificial
  probe
  misc_feature (1)..(25): SEQ ID NO: 7298; WAN024BYX_at; Start 279; Stop 303
gggcctgaacttcgctaacaagaag

SEQ ID NO: 99889 - DNA, 25 bp, Artificial
  probe
  misc_feature (1)..(25): SEQ ID NO: 7298; WAN024BYX_at; Start 256; Stop 280
tcggtacagctcactggtgtatggg

SEQ ID NO: 99890 - DNA, 25 bp, Artificial
  probe
  misc_feature (1)..(25): SEQ ID NO: 7298; WAN024BYX_at; Start 66; Stop 90
tattggtaagaaaggttttgctgcc

SEQ ID NO: 99891 - DNA, 25 bp, Artificial
  probe
  misc_feature (1)..(25): SEQ ID NO: 7298; WAN024BYX_at; Start 169; Stop 193
cataatgctgacttctcaaagacct

SEQ ID NO: 99892 - DNA, 25 bp, Artificial
  probe
  misc_feature (1)..(25): SEQ ID NO: 6557; WAN024BYY_at; Start 54; Stop 78
catcttcgcgatgatcagctttgta

SEQ ID NO: 99893 - DNA, 25 bp, Artificial
  probe
  misc_feature (1)..(25): SEQ ID NO: 6557; WAN024BYY_at; Start 208; Stop 232
tacggatacaaaaagacagccctga

SEQ ID NO: 99894 - DNA, 25 bp, Artificial
  probe
  misc_feature (1)..(25): SEQ ID NO: 6557; WAN024BYY_at; Start 88; Stop 112
ggcgctccctttggcaacatctggg

SEQ ID NO: 99895 - DNA, 25 bp, Artificial
  probe
  misc_feature (1)..(25): SEQ ID NO: 6557; WAN024BYY_at; Start 222; Stop 246
gacagccctgattgctctgatcgtg

SEQ ID NO: 99896 - DNA, 25 bp, Artificial
  probe
  misc_feature (1)..(25): SEQ ID NO: 6557; WAN024BYY_at; Start 68; Stop 92
tcagctttgtaactaacatgggcgc

SEQ ID NO: 99897 - DNA, 25 bp, Artificial
  probe
  misc_feature (1)..(25): SEQ ID NO: 6557; WAN024BYY_at; Start 327; Stop 351
tgtagccctcaacctgctaactaat

SEQ ID NO: 99898 - DNA, 25 bp, Artificial
  probe
  misc_feature (1)..(25): SEQ ID NO: 6557; WAN024BYY_at; Start 81; Stop 105
taacatgggcgctccctttggcaac

SEQ ID NO: 99899 - DNA, 25 bp, Artificial
  probe
  misc_feature (1)..(25): SEQ ID NO: 6557; WAN024BYY_at; Start 313; Stop 337
tacgatagcattcctgtagccctca

SEQ ID NO: 99900 - DNA, 25 bp, Artificial
  probe
  misc_feature (1)..(25): SEQ ID NO: 6557; WAN024BYY_at; Start 147; Stop 171
cctgatgaactttgcggcttacctg

SEQ ID NO: 99901 - DNA, 25 bp, Artificial
  probe
  misc_feature (1)..(25): SEQ ID NO: 6557; WAN024BYY_at; Start 292; Stop 316
gcaggtacttacgtattcacatacg

SEQ ID NO: 99902 - DNA, 25 bp, Artificial
  probe
  misc_feature (1)..(25): SEQ ID NO: 6557; WAN024BYY_at; Start 141; Stop 165
gggtaacctgatgaactttgcggct

SEQ ID NO: 99903 - DNA, 25 bp, Artificial
  probe
  misc_feature (1)..(25): SEQ ID NO: 6557; WAN024BYY_at; Start 228; Stop 252
cctgattgctctgatcgtgggtatc

SEQ ID NO: 99904 - DNA, 25 bp, Artificial
  probe
  misc_feature (1)..(25): SEQ ID NO: 6557; WAN024BYY_at; Start 113; Stop 137
gtttcgagtatccttttgccaaagc

SEQ ID NO: 99905 - DNA, 25 bp, Artificial
  probe
  misc_feature (1)..(25): SEQ ID NO: 6557; WAN024BYY_at; Start 2; Stop 26
tgactgaaacaaacaagaatggcaa

SEQ ID NO: 99906 - DNA, 25 bp, Artificial
  probe
  misc_feature (1)..(25): SEQ ID NO: 6557; WAN024BYY_at; Start 318; Stop 342
tagcattcctgtagccctcaacctg

SEQ ID NO: 99907 - DNA, 25 bp, Artificial
  probe
  misc_feature (1)..(25): SEQ ID NO: 6557; WAN024BYY_at; Start 203; Stop 227
cgaaatacggatacaaaaagacagc

SEQ ID NO: 99908 - DNA, 25 bp, Artificial
  probe
  misc_feature (1)..(25): SEQ ID NO: 6557; WAN024BYY_at; Start 214; Stop 238
tacaaaaagacagccctgattgctc

SEQ ID NO: 99909 - DNA, 25 bp, Artificial
  probe
  misc_feature (1)..(25): SEQ ID NO: 6557; WAN024BYY_at; Start 73; Stop 97
tttgtaactaacatgggcgctccct

SEQ ID NO: 99910 - DNA, 25 bp, Artificial
  probe
  misc_feature (1)..(25): SEQ ID NO: 6557; WAN024BYY_at; Start 304; Stop 328
gtattcacatacgatagcattcctg

SEQ ID NO: 99911 - DNA, 25 bp, Artificial
  probe
  misc_feature (1)..(25): SEQ ID NO: 6557; WAN024BYY_at; Start 260; Stop 284
tgtgtttccagtatctctcaagcct

SEQ ID NO: 99912 - DNA, 25 bp, Artificial
  probe
  misc_feature (1)..(25): SEQ ID NO: 6557; WAN024BYY_at; Start 12; Stop 36
aaacaagaatggcaaggtgattgcc

SEQ ID NO: 99913 - DNA, 25 bp, Artificial
  probe
  misc_feature (1)..(25): SEQ ID NO: 6557; WAN024BYY_at; Start 42; Stop 66
cactatgtgcttcatcttcgcgatg

SEQ ID NO: 99914 - DNA, 25 bp, Artificial
  probe
  misc_feature (1)..(25): SEQ ID NO: 6557; WAN024BYY_at; Start 234; Stop 258
tgctctgatcgtgggtatcgttggt

SEQ ID NO: 99915 - DNA, 25 bp, Artificial
  probe
  misc_feature (1)..(25): SEQ ID NO: 6557; WAN024BYY_at; Start 287; Stop 311
taggcgcaggtacttacgtattcac

SEQ ID NO: 99916 - DNA, 25 bp, Artificial
  probe
  misc_feature (1)..(25): SEQ ID NO: 6557; WAN024BYY_at; Start 118; Stop 142
gagtatccttttgccaaagcttggg

SEQ ID NO: 99917 - DNA, 25 bp, Artificial
  probe
  misc_feature (1)..(25): SEQ ID NO: 6557; WAN024BYY_at; Start 27; Stop 51
ggtgattgccattgtcactatgtgc

SEQ ID NO: 99918 - DNA, 25 bp, Artificial
  probe
  misc_feature (1)..(25): SEQ ID NO: 6557; WAN024BYY_at; Start 165; Stop 189
ttacctgtttatgggaatacctgca

SEQ ID NO: 99919 - DNA, 25 bp, Artificial
  probe
  misc_feature (1)..(25): SEQ ID NO: 6557; WAN024BYY_at; Start 180; Stop 204
aatacctgcaggtaaaatgcttacg

SEQ ID NO: 99920 - DNA, 25 bp, Artificial
  probe
  misc_feature (1)..(25): SEQ ID NO: 6557; WAN024BYY_at; Start 245; Stop 269
tgggtatcgttggtttgtgtttcca

SEQ ID NO: 99921 - DNA, 25 bp, Artificial
  probe
  misc_feature (1)..(25): SEQ ID NO: 6557; WAN024BYY_at; Start 271; Stop 295
tatctctcaagcctggtaggcgcag

SEQ ID NO: 99922 - DNA, 25 bp, Artificial
  probe
  misc_feature (1)..(25): SEQ ID NO: 6557; WAN024BYY_at; Start 160; Stop 184
gcggcttacctgtttatgggaatac

SEQ ID NO: 99923 - DNA, 25 bp, Artificial
  probe
  misc_feature (1)..(25): SEQ ID NO: 6557; WAN024BYY_at; Start 59; Stop 83
tcgcgatgatcagctttgtaactaa

SEQ ID NO: 99924 - DNA, 25 bp, Artificial
  probe
  misc_feature (1)..(25): SEQ ID NO: 6557; WAN024BYY_at; Start 192; Stop 216
taaaatgcttacgaaatacggatac

SEQ ID NO: 99925 - DNA, 25 bp, Artificial
  probe
  misc_feature (1)..(25): SEQ ID NO: 6557; WAN024BYY_at; Start 277; Stop 301
tcaagcctggtaggcgcaggtactt

SEQ ID NO: 99926 - DNA, 25 bp, Artificial
  probe
  misc_feature (1)..(25): SEQ ID NO: 6907; WAN024BYZ_at; Start 235; Stop 259
aatgccgacttctatctgcctaccg

SEQ ID NO: 99927 - DNA, 25 bp, Artificial
  probe
  misc_feature (1)..(25): SEQ ID NO: 6907; WAN024BYZ_at; Start 270; Stop 294
tatcccaacaggtgagatcctgaag

SEQ ID NO: 99928 - DNA, 25 bp, Artificial
  probe
  misc_feature (1)..(25): SEQ ID NO: 6907; WAN024BYZ_at; Start 543; Stop 567
taatggttgcaccttcccacatcgt

SEQ ID NO: 99929 - DNA, 25 bp, Artificial
  probe
  misc_feature (1)..(25): SEQ ID NO: 6907; WAN024BYZ_at; Start 455; Stop 479
caaagagcggccgtactatggaggt

SEQ ID NO: 99930 - DNA, 25 bp, Artificial
  probe
  misc_feature (1)..(25): SEQ ID NO: 6907; WAN024BYZ_at; Start 180; Stop 204
actggctggtactgccgatccaaca

SEQ ID NO: 99931 - DNA, 25 bp, Artificial
  probe
  misc_feature (1)..(25): SEQ ID NO: 6907; WAN024BYZ_at; Start 471; Stop 495
tatggaggtttacaccaccgagcca

SEQ ID NO: 99932 - DNA, 25 bp, Artificial
  probe
  misc_feature (1)..(25): SEQ ID NO: 6907; WAN024BYZ_at; Start 2; Stop 26
tgggtcctcgctctttggctctgca

SEQ ID NO: 99933 - DNA, 25 bp, Artificial
  probe
  misc_feature (1)..(25): SEQ ID NO: 6907; WAN024BYZ_at; Start 626; Stop 650
caagtgtggttctgaatccaggaca

SEQ ID NO: 99934 - DNA, 25 bp, Artificial
  probe
  misc_feature (1)..(25): SEQ ID NO: 6907; WAN024BYZ_at; Start 151; Stop 175
gttaatctgacacaccacgccttct

SEQ ID NO: 99935 - DNA, 25 bp, Artificial
  probe
  misc_feature (1)..(25): SEQ ID NO: 6907; WAN024BYZ_at; Start 436; Stop 460
gctgccaaggttaccgacccaaaga

SEQ ID NO: 99936 - DNA, 25 bp, Artificial
  probe
  misc_feature (1)..(25): SEQ ID NO: 6907; WAN024BYZ_at; Start 418; Stop 442
gagggcgagctctcattcgctgcca

SEQ ID NO: 99937 - DNA, 25 bp, Artificial
  probe
  misc_feature (1)..(25): SEQ ID NO: 6907; WAN024BYZ_at; Start 361; Stop 385
gagcagattaagttcggacacggtt

SEQ ID NO: 99938 - DNA, 25 bp, Artificial
  probe
  misc_feature (1)..(25): SEQ ID NO: 6907; WAN024BYZ_at; Start 198; Stop 222
tccaacaccaagtatcgacgatcag

SEQ ID NO: 99939 - DNA, 25 bp, Artificial
  probe
  misc_feature (1)..(25): SEQ ID NO: 6907; WAN024BYZ_at; Start 326; Stop 350
caaaggcattcggacaggacatcaa

SEQ ID NO: 99940 - DNA, 25 bp, Artificial
  probe
  misc_feature (1)..(25): SEQ ID NO: 6907; WAN024BYZ_at; Start 166; Stop 190
cacgccttcttctcactggctggta

SEQ ID NO: 99941 - DNA, 25 bp, Artificial
  probe
  misc_feature (1)..(25): SEQ ID NO: 6907; WAN024BYZ_at; Start 531; Stop 555
ctataagggcgctaatggttgcacc

SEQ ID NO: 99942 - DNA, 25 bp, Artificial
  probe
  misc_feature (1)..(25): SEQ ID NO: 6907; WAN024BYZ_at; Start 259; Stop 283
gacgctactgctatcccaacaggtg

SEQ ID NO: 99943 - DNA, 25 bp, Artificial
  probe
  misc_feature (1)..(25): SEQ ID NO: 6907; WAN024BYZ_at; Start 514; Stop 538
ggtaacttcctgagcggctataagg

SEQ ID NO: 99944 - DNA, 25 bp, Artificial
  probe
  misc_feature (1)..(25): SEQ ID NO: 6907; WAN024BYZ_at; Start 567; Stop 591
ttcagctgtctgcttcgaggcccag

SEQ ID NO: 99945 - DNA, 25 bp, Artificial
  probe
  misc_feature (1)..(25): SEQ ID NO: 6907; WAN024BYZ_at; Start 490; Stop 514
gagccaggcctgcagctttacacag

SEQ ID NO: 99946 - DNA, 25 bp, Artificial
  probe
  misc_feature (1)..(25): SEQ ID NO: 6907; WAN024BYZ_at; Start 27; Stop 51
ccgtatctcttcttatggtgaggaa

SEQ ID NO: 99947 - DNA, 25 bp, Artificial
  probe
  misc_feature (1)..(25): SEQ ID NO: 6907; WAN024BYZ_at; Start 609; Stop 633
taaccgtccatacttcccaagtgtg

SEQ ID NO: 99948 - DNA, 25 bp, Artificial
  probe
  misc_feature (1)..(25): SEQ ID NO: 6907; WAN024BYZ_at; Start 285; Stop 309
gatcctgaaggttgagggcactcca

SEQ ID NO: 99949 - DNA, 25 bp, Artificial
  probe
  misc_feature (1)..(25): SEQ ID NO: 6907; WAN024BYZ_at; Start 296; Stop 320
ttgagggcactccattcgacttccg

SEQ ID NO: 99950 - DNA, 25 bp, Artificial
  probe
  misc_feature (1)..(25): SEQ ID NO: 6907; WAN024BYZ_at; Start 345; Stop 369
catcaacgccgatcacgagcagatt

SEQ ID NO: 99951 - DNA, 25 bp, Artificial
  probe
  misc_feature (1)..(25): SEQ ID NO: 6907; WAN024BYZ_at; Start 382; Stop 406
ggtttcgaccacaactacgtactga

SEQ ID NO: 99952 - DNA, 25 bp, Artificial
  probe
  misc_feature (1)..(25): SEQ ID NO: 6907; WAN024BYZ_at; Start 642; Stop 666
tccaggacagcgctacaagcagaag

SEQ ID NO: 99953 - DNA, 25 bp, Artificial
  probe
  misc_feature (1)..(25): SEQ ID NO: 6907; WAN024BYZ_at; Start 663; Stop 687
gaagaccgtataccgctttggagtg

SEQ ID NO: 99954 - DNA, 25 bp, Artificial
  probe
  misc_feature (1)..(25): SEQ ID NO: 6907; WAN024BYZ_at; Start 311; Stop 335
tcgacttccgcaagccaaaggcatt

SEQ ID NO: 99955 - DNA, 25 bp, Artificial
  probe
  misc_feature (1)..(25): SEQ ID NO: 6907; WAN024BYZ_at; Start 106; Stop 130
gaactggtaatcgagtacctggcta

SEQ ID NO: 99956 - DNA, 25 bp, Artificial
  probe
  misc_feature (1)..(25): SEQ ID NO: 6907; WAN024BYZ_at; Start 219; Stop 243
tcagatttgcgagatcaatgccgac

SEQ ID NO: 99957 - DNA, 25 bp, Artificial
  probe
  misc_feature (1)..(25): SEQ ID NO: 6907; WAN024BYZ_at; Start 57; Stop 81
cacaggcgagctggatgtaacagta

SEQ ID NO: 99958 - DNA, 25 bp, Artificial
  probe
  misc_feature (1)..(25): SEQ ID NO: 6907; WAN024BYZ_at; Start 401; Stop 425
tactgaacaagcaggaagagggcga

SEQ ID NO: 99959 - DNA, 25 bp, Artificial
  probe
  misc_feature (1)..(25): SEQ ID NO: 6907; WAN024BYZ_at; Start 127; Stop 151
gctactaccaacaagaagacaatcg

SEQ ID NO: 99960 - DNA, 25 bp, Artificial
  probe
  misc_feature (1)..(25): SEQ ID NO: 6573; WAN024BZ2_at; Start 390; Stop 414
gacagtacatgatatgattcctgaa

SEQ ID NO: 99961 - DNA, 25 bp, Artificial
  probe
  misc_feature (1)..(25): SEQ ID NO: 6573; WAN024BZ2_at; Start 832; Stop 856
agattcgccctttgtttcatactaa

SEQ ID NO: 99962 - DNA, 25 bp, Artificial
  probe
  misc_feature (1)..(25): SEQ ID NO: 6573; WAN024BZ2_at; Start 679; Stop 703
ttggttcctattttacatcgccgac

SEQ ID NO: 99963 - DNA, 25 bp, Artificial
  probe
  misc_feature (1)..(25): SEQ ID NO: 6573; WAN024BZ2_at; Start 30; Stop 54
ccagtatcagaaatatggaggtgtt

SEQ ID NO: 99964 - DNA, 25 bp, Artificial
  probe
  misc_feature (1)..(25): SEQ ID NO: 6573; WAN024BZ2_at; Start 529; Stop 553
aatgtaccacaacagaagatttctg

SEQ ID NO: 99965 - DNA, 25 bp, Artificial
  probe
  misc_feature (1)..(25): SEQ ID NO: 6573; WAN024BZ2_at; Start 298; Stop 322
gagttgctaaacaaacaggatttcg

SEQ ID NO: 99966 - DNA, 25 bp, Artificial
  probe
  misc_feature (1)..(25): SEQ ID NO: 6573; WAN024BZ2_at; Start 159; Stop 183
tgatgtaccaaaagagaggctttcc

SEQ ID NO: 99967 - DNA, 25 bp, Artificial
  probe
  misc_feature (1)..(25): SEQ ID NO: 6573; WAN024BZ2_at; Start 113; Stop 137
caatttgtgagactgataatgaaca

SEQ ID NO: 99968 - DNA, 25 bp, Artificial
  probe
  misc_feature (1)..(25): SEQ ID NO: 6573; WAN024BZ2_at; Start 280; Stop 304
aatttgaagaaaagcattgagttgc

SEQ ID NO: 99969 - DNA, 25 bp, Artificial
  probe
  misc_feature (1)..(25): SEQ ID NO: 6573; WAN024BZ2_at; Start 2; Stop 26
tgagaattctgtatgaccatcaggc

SEQ ID NO: 99970 - DNA, 25 bp, Artificial
  probe
  misc_feature (1)..(25): SEQ ID NO: 6573; WAN024BZ2_at; Start 409; Stop 433
cctgaactcatgttcaagaaagtgg

SEQ ID NO: 99971 - DNA, 25 bp, Artificial
  probe
  misc_feature (1)..(25): SEQ ID NO: 6573; WAN024BZ2_at; Start 313; Stop 337
caggatttcgatgtatttcatccaa

SEQ ID NO: 99972 - DNA, 25 bp, Artificial
  probe
  misc_feature (1)..(25): SEQ ID NO: 6573; WAN024BZ2_at; Start 375; Stop 399
taagccgtttgttttgacagtacat

SEQ ID NO: 99973 - DNA, 25 bp, Artificial
  probe
  misc_feature (1)..(25): SEQ ID NO: 6573; WAN024BZ2_at; Start 454; Stop 478
cctatattatgtgataaagcggctc

SEQ ID NO: 99974 - DNA, 25 bp, Artificial
  probe
  misc_feature (1)..(25): SEQ ID NO: 6573; WAN024BZ2_at; Start 472; Stop 496
gcggctcatattattgctgtttcag

SEQ ID NO: 99975 - DNA, 25 bp, Artificial
  probe
  misc_feature (1)..(25): SEQ ID NO: 6573; WAN024BZ2_at; Start 694; Stop 718
catcgccgaccagatattagtatag

SEQ ID NO: 99976 - DNA, 25 bp, Artificial
  probe
  misc_feature (1)..(25): SEQ ID NO: 6573; WAN024BZ2_at; Start 797; Stop 821
tgagagcatctgacgaagaacttgt

SEQ ID NO: 99977 - DNA, 25 bp, Artificial
  probe
  misc_feature (1)..(25): SEQ ID NO: 6573; WAN024BZ2_at; Start 16; Stop 40
gaccatcaggctttccagtatcaga

SEQ ID NO: 99978 - DNA, 25 bp, Artificial
  probe
  misc_feature (1)..(25): SEQ ID NO: 6573; WAN024BZ2_at; Start 782; Stop 806
gaaatatgatacacatgagagcatc

SEQ ID NO: 99979 - DNA, 25 bp, Artificial
  probe
  misc_feature (1)..(25): SEQ ID NO: 6573; WAN024BZ2_at; Start 723; Stop 747
tacagggccagattttacagatgag

SEQ ID NO: 99980 - DNA, 25 bp, Artificial
  probe
  misc_feature (1)..(25): SEQ ID NO: 6573; WAN024BZ2_at; Start 708; Stop 732
tattagtatagtctgtacagggcca

SEQ ID NO: 99981 - DNA, 25 bp, Artificial
  probe
  misc_feature (1)..(25): SEQ ID NO: 6573; WAN024BZ2_at; Start 91; Stop 115
ccagatatagattacgagatagcaa

SEQ ID NO: 99982 - DNA, 25 bp, Artificial
  probe
  misc_feature (1)..(25): SEQ ID NO: 6573; WAN024BZ2_at; Start 77; Stop 101
tagaaaaccttccaccagatataga

SEQ ID NO: 99983 - DNA, 25 bp, Artificial
  probe
  misc_feature (1)..(25): SEQ ID NO: 6573; WAN024BZ2_at; Start 620; Stop 644
acattttatatgtaggcatgaggca

SEQ ID NO: 99984 - DNA, 25 bp, Artificial
  probe
  misc_feature (1)..(25): SEQ ID NO: 6573; WAN024BZ2_at; Start 580; Stop 604
gaaaacagtcttctttccacgccta

SEQ ID NO: 99985 - DNA, 25 bp, Artificial
  probe
  misc_feature (1)..(25): SEQ ID NO: 6573; WAN024BZ2_at; Start 234; Stop 258
taatacgattacatctattctcccg

SEQ ID NO: 99986 - DNA, 25 bp, Artificial
  probe
  misc_feature (1)..(25): SEQ ID NO: 6573; WAN024BZ2_at; Start 562; Stop 586
catggcgctcctgataaggaaaaca

SEQ ID NO: 99987 - DNA, 25 bp, Artificial
  probe
  misc_feature (1)..(25): SEQ ID NO: 6573; WAN024BZ2_at; Start 493; Stop 517
tcagagaaaaccaagaaggacctag

SEQ ID NO: 99988 - DNA, 25 bp, Artificial
  probe
  misc_feature (1)..(25): SEQ ID NO: 6573; WAN024BZ2_at; Start 217; Stop 241
gggaagtctcgtttgtataatacga

SEQ ID NO: 99989 - DNA, 25 bp, Artificial
  probe
  misc_feature (1)..(25): SEQ ID NO: 6573; WAN024BZ2_at; Start 431; Stop 455
tggatttacaagctagaatgaaacc

SEQ ID NO: 99990 - DNA, 25 bp, Artificial
  probe
  misc_feature (1)..(25): SEQ ID NO: 6573; WAN024BZ2_at; Start 597; Stop 621
cacgcctattatggaaggaaaatac

SEQ ID NO: 99991 - DNA, 25 bp, Artificial
  probe
  misc_feature (1)..(25): SEQ ID NO: 6573; WAN024BZ2_at; Start 550; Stop 574
tctgttatatatcatggcgctcctg

SEQ ID NO: 99992 - DNA, 25 bp, Artificial
  probe
  misc_feature (1)..(25): SEQ ID NO: 6573; WAN024BZ2_at; Start 194; Stop 218
ttatctctcataatagctttaaggg

SEQ ID NO: 99993 - DNA, 25 bp, Artificial
  probe
  misc_feature (1)..(25): SEQ ID NO: 6573; WAN024BZ2_at; Start 507; Stop 531
gaaggacctagtcgacattctaaat

SEQ ID NO: 99994 - DNA, 25 bp, Artificial
  probe
  misc_feature (1)..(25): SEQ ID NO: 6926; WAN024BZ3_at; Start 251; Stop 275
cacttgtattatgtcagtggacact

SEQ ID NO: 99995 - DNA, 25 bp, Artificial
  probe
  misc_feature (1)..(25): SEQ ID NO: 6926; WAN024BZ3_at; Start 382; Stop 406
ggattaccaatatctttctgcctct

SEQ ID NO: 99996 - DNA, 25 bp, Artificial
  probe
  misc_feature (1)..(25): SEQ ID NO: 6926; WAN024BZ3_at; Start 19; Stop 43
gctattgccaatcaaatagagaatt

SEQ ID NO: 99997 - DNA, 25 bp, Artificial
  probe
  misc_feature (1)..(25): SEQ ID NO: 6926; WAN024BZ3_at; Start 527; Stop 551
taaaaaatgtctacaacccatcact

SEQ ID NO: 99998 - DNA, 25 bp, Artificial
  probe
  misc_feature (1)..(25): SEQ ID NO: 6926; WAN024BZ3_at; Start 328; Stop 352
gcgacaggtcaaatcaagtggtatc

SEQ ID NO: 99999 - DNA, 25 bp, Artificial
  probe
  misc_feature (1)..(25): SEQ ID NO: 6926; WAN024BZ3_at; Start 284; Stop 308
tatttataagatcgattgcagcagg

SEQ ID NO: 100000 - DNA, 25 bp, Artificial
  probe
  misc_feature (1)..(25): SEQ ID NO: 6926; WAN024BZ3_at; Start 589; Stop 613
tataatatgttgcttactaaagctg

SEQ ID NO: 100001 - DNA, 25 bp, Artificial
  probe
  misc_feature (1)..(25): SEQ ID NO: 6926; WAN024BZ3_at; Start 78; Stop 102
tgcaacacctcagattacccaatat

SEQ ID NO: 100002 - DNA, 25 bp, Artificial
  probe
  misc_feature (1)..(25): SEQ ID NO: 6926; WAN024BZ3_at; Start 223; Stop 247
ttatggttgggaactataccagacc

SEQ ID NO: 100003 - DNA, 25 bp, Artificial
  probe
  misc_feature (1)..(25): SEQ ID NO: 6926; WAN024BZ3_at; Start 233; Stop 257
gaactataccagaccaaacacttgt

SEQ ID NO: 100004 - DNA, 25 bp, Artificial
  probe
  misc_feature (1)..(25): SEQ ID NO: 6926; WAN024BZ3_at; Start 696; Stop 720
tgagcagtttgcattatgttcgaga

SEQ ID NO: 100005 - DNA, 25 bp, Artificial
  probe
  misc_feature (1)..(25): SEQ ID NO: 6926; WAN024BZ3_at; Start 265; Stop 289
cagtggacactattgagtatattta

SEQ ID NO: 100006 - DNA, 25 bp, Artificial
  probe
  misc_feature (1)..(25): SEQ ID NO: 6926; WAN024BZ3_at; Start 455; Stop 479
cagatgttgtttataaagcagttca

SEQ ID NO: 100007 - DNA, 25 bp, Artificial
  probe
  misc_feature (1)..(25): SEQ ID NO: 6926; WAN024BZ3_at; Start 295; Stop 319
tcgattgcagcaggtatagatccaa

SEQ ID NO: 100008 - DNA, 25 bp, Artificial
  probe
  misc_feature (1)..(25): SEQ ID NO: 6926; WAN024BZ3_at; Start 313; Stop 337
gatccaataattcaagcgacaggtc

SEQ ID NO: 100009 - DNA, 25 bp, Artificial
  probe
  misc_feature (1)..(25): SEQ ID NO: 6926; WAN024BZ3_at; Start 342; Stop 366
caagtggtatcaattatctgctagc

SEQ ID NO: 100010 - DNA, 25 bp, Artificial
  probe
  misc_feature (1)..(25): SEQ ID NO: 6926; WAN024BZ3_at; Start 434; Stop 458
taattcttgcatttattctgacaga

SEQ ID NO: 100011 - DNA, 25 bp, Artificial
  probe
  misc_feature (1)..(25): SEQ ID NO: 6926; WAN024BZ3_at; Start 57; Stop 81
tgttaacaaccttaatactgctgca

SEQ ID NO: 100012 - DNA, 25 bp, Artificial
  probe
  misc_feature (1)..(25): SEQ ID NO: 6926; WAN024BZ3_at; Start 415; Stop 439
ggcttcagaccctatgctataattc

SEQ ID NO: 100013 - DNA, 25 bp, Artificial
  probe
  misc_feature (1)..(25): SEQ ID NO: 6926; WAN024BZ3_at; Start 400; Stop 424
tgcctctttgcaataggcttcagac

SEQ ID NO: 100014 - DNA, 25 bp, Artificial
  probe
  misc_feature (1)..(25): SEQ ID NO: 6926; WAN024BZ3_at; Start 106; Stop 130
tcttcaaatgataaaaatcgtgctt

SEQ ID NO: 100015 - DNA, 25 bp, Artificial
  probe
  misc_feature (1)..(25): SEQ ID NO: 6926; WAN024BZ3_at; Start 629; Stop 653
tcgtcgggcttattttgacagttct

SEQ ID NO: 100016 - DNA, 25 bp, Artificial
  probe
  misc_feature (1)..(25): SEQ ID NO: 6926; WAN024BZ3_at; Start 190; Stop 214
cctgtctggatagaattggaatttt

SEQ ID NO: 100017 - DNA, 25 bp, Artificial
  probe
  misc_feature (1)..(25): SEQ ID NO: 6926; WAN024BZ3_at; Start 68; Stop 92
ttaatactgctgcaacacctcagat

SEQ ID NO: 100018 - DNA, 25 bp, Artificial
  probe
  misc_feature (1)..(25): SEQ ID NO: 6926; WAN024BZ3_at; Start 470; Stop 494
aagcagttcaattctatttcctggc

SEQ ID NO: 100019 - DNA, 25 bp, Artificial
  probe
  misc_feature (1)..(25): SEQ ID NO: 6926; WAN024BZ3_at; Start 541; Stop 565
aacccatcactaagaatcgttttag

SEQ ID NO: 100020 - DNA, 25 bp, Artificial
  probe
  misc_feature (1)..(25): SEQ ID NO: 6926; WAN024BZ3_at; Start 6; Stop 30
taatggagcttttgctattgccaat

SEQ ID NO: 100021 - DNA, 25 bp, Artificial
  probe
  misc_feature (1)..(25): SEQ ID NO: 6926; WAN024BZ3_at; Start 121; Stop 145
aatcgtgcttttgcccttgttgaaa

SEQ ID NO: 100022 - DNA, 25 bp, Artificial
  probe
  misc_feature (1)..(25): SEQ ID NO: 6926; WAN024BZ3_at; Start 488; Stop 512
tcctggctaaacttacaacatatag

SEQ ID NO: 100023 - DNA, 25 bp, Artificial
  probe
  misc_feature (1)..(25): SEQ ID NO: 6926; WAN024BZ3_at; Start 683; Stop 707
ggttgacgagaaatgagcagtttgc

SEQ ID NO: 100024 - DNA, 25 bp, Artificial
  probe
  misc_feature (1)..(25): SEQ ID NO: 6926; WAN024BZ3_at; Start 613; Stop 637
gatttcgttattcatgtcgtcgggc

SEQ ID NO: 100025 - DNA, 25 bp, Artificial
  probe
  misc_feature (1)..(25): SEQ ID NO: 6926; WAN024BZ3_at; Start 365; Stop 389
gctcattgttactgataggattacc

SEQ ID NO: 100026 - DNA, 25 bp, Artificial
  probe
  misc_feature (1)..(25): SEQ ID NO: 6926; WAN024BZ3_at; Start 644; Stop 668
tgacagttctgtttactattgctac

SEQ ID NO: 100027 - DNA, 25 bp, Artificial
  probe
  misc_feature (1)..(25): SEQ ID NO: 6926; WAN024BZ3_at; Start 176; Stop 200
tacttattgtctttcctgtctggat

SEQ ID NO: 100028 - DNA, 25 bp, Artificial
  probe
  misc_feature (1)..(25): SEQ ID NO: 7703; WAN024BZ4_at; Start 82; Stop 106
tacgatgaacatcctatagtgaagt

SEQ ID NO: 100029 - DNA, 25 bp, Artificial
  probe
  misc_feature (1)..(25): SEQ ID NO: 7703; WAN024BZ4_at; Start 262; Stop 286
tcacccagggctatcgttgactggc

SEQ ID NO: 100030 - DNA, 25 bp, Artificial
  probe
  misc_feature (1)..(25): SEQ ID NO: 7703; WAN024BZ4_at; Start 24; Stop 48
gcatattgccatcgaatgcaatcct

SEQ ID NO: 100031 - DNA, 25 bp, Artificial
  probe
  misc_feature (1)..(25): SEQ ID NO: 7703; WAN024BZ4_at; Start 280; Stop 304
gactggcttgatcgtgtacgtcaaa

SEQ ID NO: 100032 - DNA, 25 bp, Artificial
  probe
  misc_feature (1)..(25): SEQ ID NO: 7703; WAN024BZ4_at; Start 91; Stop 115
catcctatagtgaagttttttaact

SEQ ID NO: 100033 - DNA, 25 bp, Artificial
  probe
  misc_feature (1)..(25): SEQ ID NO: 7703; WAN024BZ4_at; Start 16; Stop 40
gaaaataggcatattgccatcgaat

SEQ ID NO: 100034 - DNA, 25 bp, Artificial
  probe
  misc_feature (1)..(25): SEQ ID NO: 7703; WAN024BZ4_at; Start 218; Stop 242
tagcattggctttagaatggaatca

SEQ ID NO: 100035 - DNA, 25 bp, Artificial
  probe
  misc_feature (1)..(25): SEQ ID NO: 7703; WAN024BZ4_at; Start 269; Stop 293
gggctatcgttgactggcttgatcg

SEQ ID NO: 100036 - DNA, 25 bp, Artificial
  probe
  misc_feature (1)..(25): SEQ ID NO: 7703; WAN024BZ4_at; Start 229; Stop 253
ttagaatggaatcagacagagaatc

SEQ ID NO: 100037 - DNA, 25 bp, Artificial
  probe
  misc_feature (1)..(25): SEQ ID NO: 7703; WAN024BZ4_at; Start 157; Stop 181
tccattaatactgatgatcagggcg

SEQ ID NO: 100038 - DNA, 25 bp, Artificial
  probe
  misc_feature (1)..(25): SEQ ID NO: 7703; WAN024BZ4_at; Start 60; Stop 84
caagattggcgagatagaacgttac

SEQ ID NO: 100039 - DNA, 25 bp, Artificial
  probe
  misc_feature (1)..(25): SEQ ID NO: 7703; WAN024BZ4_at; Start 2; Stop 26
tgttagaaaagattgaaaataggca

SEQ ID NO: 100040 - DNA, 25 bp, Artificial
  probe
  misc_feature (1)..(25): SEQ ID NO: 7703; WAN024BZ4_at; Start 142; Stop 166
cacgatattgcagtgtccattaata

SEQ ID NO: 100041 - DNA, 25 bp, Artificial
  probe
  misc_feature (1)..(25): SEQ ID NO: 7703; WAN024BZ4_at; Start 275; Stop 299
tcgttgactggcttgatcgtgtacg

SEQ ID NO: 100042 - DNA, 25 bp, Artificial
  probe
  misc_feature (1)..(25): SEQ ID NO: 7703; WAN024BZ4_at; Start 171; Stop 195
tgatcagggcgtgttttcaacatct

SEQ ID NO: 100043 - DNA, 25 bp, Artificial
  probe
  misc_feature (1)..(25): SEQ ID NO: 7703; WAN024BZ4_at; Start 52; Stop 76
tccaactacaagattggcgagatag

SEQ ID NO: 100044 - DNA, 25 bp, Artificial
  probe
  misc_feature (1)..(25): SEQ ID NO: 7703; WAN024BZ4_at; Start 299; Stop 323
gtcaaatgtcattagagcaaaggtt

SEQ ID NO: 100045 - DNA, 25 bp, Artificial
  probe
  misc_feature (1)..(25): SEQ ID NO: 7703; WAN024BZ4_at; Start 110; Stop 134
ttaactatgggctttctacacctta

SEQ ID NO: 100046 - DNA, 25 bp, Artificial
  probe
  misc_feature (1)..(25): SEQ ID NO: 7703; WAN024BZ4_at; Start 180; Stop 204
cgtgttttcaacatctttggaaaga

SEQ ID NO: 100047 - DNA, 25 bp, Artificial
  probe
  misc_feature (1)..(25): SEQ ID NO: 7703; WAN024BZ4_at; Start 175; Stop 199
cagggcgtgttttcaacatctttgg

SEQ ID NO: 100048 - DNA, 25 bp, Artificial
  probe
  misc_feature (1)..(25): SEQ ID NO: 7703; WAN024BZ4_at; Start 225; Stop 249
ggctttagaatggaatcagacagag

SEQ ID NO: 100049 - DNA, 25 bp, Artificial
  probe
  misc_feature (1)..(25): SEQ ID NO: 7703; WAN024BZ4_at; Start 249; Stop 273
gaatcataagaattcacccagggct

SEQ ID NO: 100050 - DNA, 25 bp, Artificial
  probe
  misc_feature (1)..(25): SEQ ID NO: 7703; WAN024BZ4_at; Start 72; Stop 96
gatagaacgttacgatgaacatcct

SEQ ID NO: 100051 - DNA, 25 bp, Artificial
  probe
  misc_feature (1)..(25): SEQ ID NO: 7703; WAN024BZ4_at; Start 203; Stop 227
gagaatattctttattagcattggc

SEQ ID NO: 100052 - DNA, 25 bp, Artificial
  probe
  misc_feature (1)..(25): SEQ ID NO: 7703; WAN024BZ4_at; Start 252; Stop 276
tcataagaattcacccagggctatc

SEQ ID NO: 100053 - DNA, 25 bp, Artificial
  probe
  misc_feature (1)..(25): SEQ ID NO: 7703; WAN024BZ4_at; Start 132; Stop 156
ttatcctcgtcacgatattgcagtg

SEQ ID NO: 100054 - DNA, 25 bp, Artificial
  probe
  misc_feature (1)..(25): SEQ ID NO: 7703; WAN024BZ4_at; Start 119; Stop 143
ggctttctacaccttatcctcgtca

SEQ ID NO: 100055 - DNA, 25 bp, Artificial
  probe
  misc_feature (1)..(25): SEQ ID NO: 7703; WAN024BZ4_at; Start 235; Stop 259
tggaatcagacagagaatcataaga

SEQ ID NO: 100056 - DNA, 25 bp, Artificial
  probe
  misc_feature (1)..(25): SEQ ID NO: 7703; WAN024BZ4_at; Start 63; Stop 87
gattggcgagatagaacgttacgat

SEQ ID NO: 100057 - DNA, 25 bp, Artificial
  probe
  misc_feature (1)..(25): SEQ ID NO: 7703; WAN024BZ4_at; Start 37; Stop 61
gaatgcaatccttcatccaactaca

SEQ ID NO: 100058 - DNA, 25 bp, Artificial
  probe
  misc_feature (1)..(25): SEQ ID NO: 7703; WAN024BZ4_at; Start 306; Stop 330
gtcattagagcaaaggtttaaacat

SEQ ID NO: 100059 - DNA, 25 bp, Artificial
  probe
  misc_feature (1)..(25): SEQ ID NO: 7703; WAN024BZ4_at; Start 165; Stop 189
tactgatgatcagggcgtgttttca

SEQ ID NO: 100060 - DNA, 25 bp, Artificial
  probe
  misc_feature (1)..(25): SEQ ID NO: 7703; WAN024BZ4_at; Start 136; Stop 160
cctcgtcacgatattgcagtgtcca

SEQ ID NO: 100061 - DNA, 25 bp, Artificial
  probe
  misc_feature (1)..(25): SEQ ID NO: 7703; WAN024BZ4_at; Start 289; Stop 313
gatcgtgtacgtcaaatgtcattag

SEQ ID NO: 100062 - DNA, 25 bp, Artificial
  probe
  misc_feature (1)..(25): SEQ ID NO: 6841; WAN024BZ5_at; Start 8; Stop 32
tatatttgaaagaatgttatttgga

SEQ ID NO: 100063 - DNA, 25 bp, Artificial
  probe
  misc_feature (1)..(25): SEQ ID NO: 6841; WAN024BZ5_at; Start 292; Stop 316
gaaaataaacgaatcagtgtggcaa

SEQ ID NO: 100064 - DNA, 25 bp, Artificial
  probe
  misc_feature (1)..(25): SEQ ID NO: 6841; WAN024BZ5_at; Start 305; Stop 329
tcagtgtggcaatctatgtgaagga

SEQ ID NO: 100065 - DNA, 25 bp, Artificial
  probe
  misc_feature (1)..(25): SEQ ID NO: 6841; WAN024BZ5_at; Start 279; Stop 303
tgaaaaagctgatgaaaataaacga

SEQ ID NO: 100066 - DNA, 25 bp, Artificial
  probe
  misc_feature (1)..(25): SEQ ID NO: 6841; WAN024BZ5_at; Start 181; Stop 205
ggcgttctgaataaaaatgatgcga

SEQ ID NO: 100067 - DNA, 25 bp, Artificial
  probe
  misc_feature (1)..(25): SEQ ID NO: 6841; WAN024BZ5_at; Start 187; Stop 211
ctgaataaaaatgatgcgatagaca

SEQ ID NO: 100068 - DNA, 25 bp, Artificial
  probe
  misc_feature (1)..(25): SEQ ID NO: 6841; WAN024BZ5_at; Start 175; Stop 199
aaaattggcgttctgaataaaaatg

SEQ ID NO: 100069 - DNA, 25 bp, Artificial
  probe
  misc_feature (1)..(25): SEQ ID NO: 6841; WAN024BZ5_at; Start 88; Stop 112
acaaattttcttttcaaattggatg

SEQ ID NO: 100070 - DNA, 25 bp, Artificial
  probe
  misc_feature (1)..(25): SEQ ID NO: 6841; WAN024BZ5_at; Start 151; Stop 175
gctcaaaatccggaggatgcaaaaa

SEQ ID NO: 100071 - DNA, 25 bp, Artificial
  probe
  misc_feature (1)..(25): SEQ ID NO: 6841; WAN024BZ5_at; Start 129; Stop 153
ggaagtgtcactttacactcaagct

SEQ ID NO: 100072 - DNA, 25 bp, Artificial
  probe
  misc_feature (1)..(25): SEQ ID NO: 6841; WAN024BZ5_at; Start 297; Stop 321
taaacgaatcagtgtggcaatctat

SEQ ID NO: 100073 - DNA, 25 bp, Artificial
  probe
  misc_feature (1)..(25): SEQ ID NO: 6841; WAN024BZ5_at; Start 160; Stop 184
ccggaggatgcaaaaaaaattggcg

SEQ ID NO: 100074 - DNA, 25 bp, Artificial
  probe
  misc_feature (1)..(25): SEQ ID NO: 6841; WAN024BZ5_at; Start 248; Stop 272
agttgttcctatgtaaagtctgtcg

SEQ ID NO: 100075 - DNA, 25 bp, Artificial
  probe
  misc_feature (1)..(25): SEQ ID NO: 6841; WAN024BZ5_at; Start 148; Stop 172
caagctcaaaatccggaggatgcaa

SEQ ID NO: 100076 - DNA, 25 bp, Artificial
  probe
  misc_feature (1)..(25): SEQ ID NO: 6841; WAN024BZ5_at; Start 312; Stop 336
ggcaatctatgtgaaggagaatttg

SEQ ID NO: 100077 - DNA, 25 bp, Artificial
  probe
  misc_feature (1)..(25): SEQ ID NO: 6841; WAN024BZ5_at; Start 198; Stop 222
tgatgcgatagacattaagaagttt

SEQ ID NO: 100078 - DNA, 25 bp, Artificial
  probe
  misc_feature (1)..(25): SEQ ID NO: 6841; WAN024BZ5_at; Start 123; Stop 147
cgggaaggaagtgtcactttacact

SEQ ID NO: 100079 - DNA, 25 bp, Artificial
  probe
  misc_feature (1)..(25): SEQ ID NO: 6841; WAN024BZ5_at; Start 216; Stop 240
gaagtttttagaggcaggatggaat

SEQ ID NO: 100080 - DNA, 25 bp, Artificial
  probe
  misc_feature (1)..(25): SEQ ID NO: 6841; WAN024BZ5_at; Start 210; Stop 234
cattaagaagtttttagaggcagga

SEQ ID NO: 100081 - DNA, 25 bp, Artificial
  probe
  misc_feature (1)..(25): SEQ ID NO: 6841; WAN024BZ5_at; Start 117; Stop 141
tgaagacgggaaggaagtgtcactt

SEQ ID NO: 100082 - DNA, 25 bp, Artificial
  probe
  misc_feature (1)..(25): SEQ ID NO: 6841; WAN024BZ5_at; Start 266; Stop 290
tctgtcgttttgatgaaaaagctga

SEQ ID NO: 100083 - DNA, 25 bp, Artificial
  probe
  misc_feature (1)..(25): SEQ ID NO: 6841; WAN024BZ5_at; Start 114; Stop 138
taatgaagacgggaaggaagtgtca

SEQ ID NO: 100084 - DNA, 25 bp, Artificial
  probe
  misc_feature (1)..(25): SEQ ID NO: 6841; WAN024BZ5_at; Start 144; Stop 168
cactcaagctcaaaatccggaggat

SEQ ID NO: 100085 - DNA, 25 bp, Artificial
  probe
  misc_feature (1)..(25): SEQ ID NO: 6841; WAN024BZ5_at; Start 142; Stop 166
tacactcaagctcaaaatccggagg

SEQ ID NO: 100086 - DNA, 25 bp, Artificial
  probe
  misc_feature (1)..(25): SEQ ID NO: 6841; WAN024BZ5_at; Start 47; Stop 71
tccaggcactagaggttttaaagga

SEQ ID NO: 100087 - DNA, 25 bp, Artificial
  probe
  misc_feature (1)..(25): SEQ ID NO: 6841; WAN024BZ5_at; Start 102; Stop 126
caaattggatgttaatgaagacggg

SEQ ID NO: 100088 - DNA, 25 bp, Artificial
  probe
  misc_feature (1)..(25): SEQ ID NO: 6841; WAN024BZ5_at; Start 34; Stop 58
aaaactaaccagttccaggcactag

SEQ ID NO: 100089 - DNA, 25 bp, Artificial
  probe
  misc_feature (1)..(25): SEQ ID NO: 6841; WAN024BZ5_at; Start 233; Stop 257
gatggaatgataataagttgttcct

SEQ ID NO: 100090 - DNA, 25 bp, Artificial
  probe
  misc_feature (1)..(25): SEQ ID NO: 6841; WAN024BZ5_at; Start 42; Stop 66
ccagttccaggcactagaggtttta

SEQ ID NO: 100091 - DNA, 25 bp, Artificial
  probe
  misc_feature (1)..(25): SEQ ID NO: 6841; WAN024BZ5_at; Start 302; Stop 326
gaatcagtgtggcaatctatgtgaa

SEQ ID NO: 100092 - DNA, 25 bp, Artificial
  probe
  misc_feature (1)..(25): SEQ ID NO: 6841; WAN024BZ5_at; Start 251; Stop 275
tgttcctatgtaaagtctgtcgttt

SEQ ID NO: 100093 - DNA, 25 bp, Artificial
  probe
  misc_feature (1)..(25): SEQ ID NO: 6841; WAN024BZ5_at; Start 224; Stop 248
tagaggcaggatggaatgataataa

SEQ ID NO: 100094 - DNA, 25 bp, Artificial
  probe
  misc_feature (1)..(25): SEQ ID NO: 6841; WAN024BZ5_at; Start 38; Stop 62
ctaaccagttccaggcactagaggt

SEQ ID NO: 100095 - DNA, 25 bp, Artificial
  probe
  misc_feature (1)..(25): SEQ ID NO: 6841; WAN024BZ5_at; Start 261; Stop 285
taaagtctgtcgttttgatgaaaaa

SEQ ID NO: 100096 - DNA, 25 bp, Artificial
  probe
  misc_feature (1)..(25): SEQ ID NO: 6914; WAN024BZ6_at; Start 488; Stop 512
aagaccaagccatggcacgtgctca

SEQ ID NO: 100097 - DNA, 25 bp, Artificial
  probe
  misc_feature (1)..(25): SEQ ID NO: 6914; WAN024BZ6_at; Start 548; Stop 572
gattagtctgcaaagacactgtcga

SEQ ID NO: 100098 - DNA, 25 bp, Artificial
  probe
  misc_feature (1)..(25): SEQ ID NO: 6914; WAN024BZ6_at; Start 513; Stop 537
tcgcatcggccagaagaacaatgtt

SEQ ID NO: 100099 - DNA, 25 bp, Artificial
  probe
  misc_feature (1)..(25): SEQ ID NO: 6914; WAN024BZ6_at; Start 284; Stop 308
tagaggcacgtttgtcatcagcaga

SEQ ID NO: 100100 - DNA, 25 bp, Artificial
  probe
  misc_feature (1)..(25): SEQ ID NO: 6914; WAN024BZ6_at; Start 408; Stop 432
taaggctggtggtttcggcctcaat

SEQ ID NO: 100101 - DNA, 25 bp, Artificial
  probe
  misc_feature (1)..(25): SEQ ID NO: 6914; WAN024BZ6_at; Start 179; Stop 203
gcatcgctcctaagtaccaaacagt

SEQ ID NO: 100102 - DNA, 25 bp, Artificial
  probe
  misc_feature (1)..(25): SEQ ID NO: 6914; WAN024BZ6_at; Start 341; Stop 365
gtaatcgcgacatccctgtacgcca

SEQ ID NO: 100103 - DNA, 25 bp, Artificial
  probe
  misc_feature (1)..(25): SEQ ID NO: 6914; WAN024BZ6_at; Start 326; Stop 350
tatatggagacacccgtaatcgcga

SEQ ID NO: 100104 - DNA, 25 bp, Artificial
  probe
  misc_feature (1)..(25): SEQ ID NO: 6914; WAN024BZ6_at; Start 458; Stop 482
ttttagacgactggtggaatcctgc

SEQ ID NO: 100105 - DNA, 25 bp, Artificial
  probe
  misc_feature (1)..(25): SEQ ID NO: 6914; WAN024BZ6_at; Start 271; Stop 295
gcacttcacgagttagaggcacgtt

SEQ ID NO: 100106 - DNA, 25 bp, Artificial
  probe
  misc_feature (1)..(25): SEQ ID NO: 6914; WAN024BZ6_at; Start 149; Stop 173
tagagggccttcttcgtttacgcca

SEQ ID NO: 100107 - DNA, 25 bp, Artificial
  probe
  misc_feature (1)..(25): SEQ ID NO: 6914; WAN024BZ6_at; Start 299; Stop 323
catcagcagacattcactttgtaac

SEQ ID NO: 100108 - DNA, 25 bp, Artificial
  probe
  misc_feature (1)..(25): SEQ ID NO: 6914; WAN024BZ6_at; Start 165; Stop 189
tttacgccaggcttgcatcgctcct

SEQ ID NO: 100109 - DNA, 25 bp, Artificial
  probe
  misc_feature (1)..(25): SEQ ID NO: 6914; WAN024BZ6_at; Start 531; Stop 555
caatgttcttgttctccgattagtc

SEQ ID NO: 100110 - DNA, 25 bp, Artificial
  probe
  misc_feature (1)..(25): SEQ ID NO: 6914; WAN024BZ6_at; Start 357; Stop 381
tgtacgccagttccaaagcgattct

SEQ ID NO: 100111 - DNA, 25 bp, Artificial
  probe
  misc_feature (1)..(25): SEQ ID NO: 6914; WAN024BZ6_at; Start 582; Stop 606
tcttcaacttcaagctcaaaagcgc

SEQ ID NO: 100112 - DNA, 25 bp, Artificial
  probe
  misc_feature (1)..(25): SEQ ID NO: 6914; WAN024BZ6_at; Start 598; Stop 622
caaaagcgccaaaccgtcgatctct

SEQ ID NO: 100113 - DNA, 25 bp, Artificial
  probe
  misc_feature (1)..(25): SEQ ID NO: 6914; WAN024BZ6_at; Start 198; Stop 222
aacagttatcgactatattgagacg

SEQ ID NO: 100114 - DNA, 25 bp, Artificial
  probe
  misc_feature (1)..(25): SEQ ID NO: 6914; WAN024BZ6_at; Start 2; Stop 26
tggtactacaagatttgccagaccg

SEQ ID NO: 100115 - DNA, 25 bp, Artificial
  probe
  misc_feature (1)..(25): SEQ ID NO: 6914; WAN024BZ6_at; Start 236; Stop 260
ggcgcaaggttttacttttctctca

SEQ ID NO: 100116 - DNA, 25 bp, Artificial
  probe
  misc_feature (1)..(25): SEQ ID NO: 6914; WAN024BZ6_at; Start 442; Stop 466
gccgatcgagttattcttttagacg

SEQ ID NO: 100117 - DNA, 25 bp, Artificial
  probe
  misc_feature (1)..(25): SEQ ID NO: 6914; WAN024BZ6_at; Start 628; Stop 652
aacacctcagagaagctaactttag

SEQ ID NO: 100118 - DNA, 25 bp, Artificial
  probe
  misc_feature (1)..(25): SEQ ID NO: 6914; WAN024BZ6_at; Start 17; Stop 41
tgccagaccgtattgagaagactgt

SEQ ID NO: 100119 - DNA, 25 bp, Artificial
  probe
  misc_feature (1)..(25): SEQ ID NO: 6914; WAN024BZ6_at; Start 84; Stop 108
ggtgcatgccactatactccaagca

SEQ ID NO: 100120 - DNA, 25 bp, Artificial
  probe
  misc_feature (1)..(25): SEQ ID NO: 6914; WAN024BZ6_at; Start 107; Stop 131
cattcgcttcaggaataagtggccg

SEQ ID NO: 100121 - DNA, 25 bp, Artificial
  probe
  misc_feature (1)..(25): SEQ ID NO: 6914; WAN024BZ6_at; Start 473; Stop 497
ggaatcctgcagtcgaagaccaagc

SEQ ID NO: 100122 - DNA, 25 bp, Artificial
  probe
  misc_feature (1)..(25): SEQ ID NO: 6914; WAN024BZ6_at; Start 256; Stop 280
tctcaatttgtcagcgcacttcacg

SEQ ID NO: 100123 - DNA, 25 bp, Artificial
  probe
  misc_feature (1)..(25): SEQ ID NO: 6914; WAN024BZ6_at; Start 392; Stop 416
tattccttatcagccttaaggctgg

SEQ ID NO: 100124 - DNA, 25 bp, Artificial
  probe
  misc_feature (1)..(25): SEQ ID NO: 6914; WAN024BZ6_at; Start 132; Stop 156
tattagtagtttggccttagagggc

SEQ ID NO: 100125 - DNA, 25 bp, Artificial
  probe
  misc_feature (1)..(25): SEQ ID NO: 6914; WAN024BZ6_at; Start 45; Stop 69
tattgaacttaacgaatccgaacga

SEQ ID NO: 100126 - DNA, 25 bp, Artificial
  probe
  misc_feature (1)..(25): SEQ ID NO: 6914; WAN024BZ6_at; Start 646; Stop 670
actttagaagagattcaagccctga

SEQ ID NO: 100127 - DNA, 25 bp, Artificial
  probe
  misc_feature (1)..(25): SEQ ID NO: 6914; WAN024BZ6_at; Start 71; Stop 95
tcaaatataaacaggtgcatgccac

SEQ ID NO: 100128 - DNA, 25 bp, Artificial
  probe
  misc_feature (1)..(25): SEQ ID NO: 6914; WAN024BZ6_at; Start 613; Stop 637
gtcgatctcttcaacaacacctcag

SEQ ID NO: 100129 - DNA, 25 bp, Artificial
  probe
  misc_feature (1)..(25): SEQ ID NO: 6914; WAN024BZ6_at; Start 428; Stop 452
tcaatctcacctctgccgatcgagt

SEQ ID NO: 100130 - DNA, 25 bp, Artificial
  probe
  misc_feature (1)..(25): SEQ ID NO: 7573; WAN024BZ7_at; Start 6; Stop 30
gagcagggataccattgtatataac

SEQ ID NO: 100131 - DNA, 25 bp, Artificial
  probe
  misc_feature (1)..(25): SEQ ID NO: 7573; WAN024BZ7_at; Start 61; Stop 85
gtcaagagccatttgcttctcgcca

SEQ ID NO: 100132 - DNA, 25 bp, Artificial
  probe
  misc_feature (1)..(25): SEQ ID NO: 7573; WAN024BZ7_at; Start 56; Stop 80
cttctgtcaagagccatttgcttct

SEQ ID NO: 100133 - DNA, 25 bp, Artificial
  probe
  misc_feature (1)..(25): SEQ ID NO: 7573; WAN024BZ7_at; Start 25; Stop 49
tataacaacggtattattacttctg

SEQ ID NO: 100134 - DNA, 25 bp, Artificial
  probe
  misc_feature (1)..(25): SEQ ID NO: 7573; WAN024BZ7_at; Start 5; Stop 29
ggagcagggataccattgtatataa

SEQ ID NO: 100135 - DNA, 25 bp, Artificial
  probe
  misc_feature (1)..(25): SEQ ID NO: 7573; WAN024BZ7_at; Start 39; Stop 63
tattacttctggaaaaccttctgtc

SEQ ID NO: 100136 - DNA, 25 bp, Artificial
  probe
  misc_feature (1)..(25): SEQ ID NO: 7573; WAN024BZ7_at; Start 27; Stop 51
taacaacggtattattacttctgga

SEQ ID NO: 100137 - DNA, 25 bp, Artificial
  probe
  misc_feature (1)..(25): SEQ ID NO: 7573; WAN024BZ7_at; Start 60; Stop 84
tgtcaagagccatttgcttctcgcc

SEQ ID NO: 100138 - DNA, 25 bp, Artificial
  probe
  misc_feature (1)..(25): SEQ ID NO: 7573; WAN024BZ7_at; Start 49; Stop 73
ggaaaaccttctgtcaagagccatt

SEQ ID NO: 100139 - DNA, 25 bp, Artificial
  probe
  misc_feature (1)..(25): SEQ ID NO: 7573; WAN024BZ7_at; Start 12; Stop 36
ggataccattgtatataacaacggt

SEQ ID NO: 100140 - DNA, 25 bp, Artificial
  probe
  misc_feature (1)..(25): SEQ ID NO: 7573; WAN024BZ7_at; Start 53; Stop 77
aaccttctgtcaagagccatttgct

SEQ ID NO: 100141 - DNA, 25 bp, Artificial
  probe
  misc_feature (1)..(25): SEQ ID NO: 7573; WAN024BZ7_at; Start 58; Stop 82
tctgtcaagagccatttgcttctcg

SEQ ID NO: 100142 - DNA, 25 bp, Artificial
  probe
  misc_feature (1)..(25): SEQ ID NO: 7573; WAN024BZ7_at; Start 51; Stop 75
aaaaccttctgtcaagagccatttg

SEQ ID NO: 100143 - DNA, 25 bp, Artificial
  probe
  misc_feature (1)..(25): SEQ ID NO: 7573; WAN024BZ7_at; Start 63; Stop 87
caagagccatttgcttctcgccatt

SEQ ID NO: 100144 - DNA, 25 bp, Artificial
  probe
  misc_feature (1)..(25): SEQ ID NO: 7573; WAN024BZ7_at; Start 62; Stop 86
tcaagagccatttgcttctcgccat

SEQ ID NO: 100145 - DNA, 25 bp, Artificial
  probe
  misc_feature (1)..(25): SEQ ID NO: 7573; WAN024BZ7_at; Start 40; Stop 64
attacttctggaaaaccttctgtca

SEQ ID NO: 100146 - DNA, 25 bp, Artificial
  probe
  misc_feature (1)..(25): SEQ ID NO: 7573; WAN024BZ7_at; Start 42; Stop 66
tacttctggaaaaccttctgtcaag

SEQ ID NO: 100147 - DNA, 25 bp, Artificial
  probe
  misc_feature (1)..(25): SEQ ID NO: 7573; WAN024BZ7_at; Start 13; Stop 37
gataccattgtatataacaacggta

SEQ ID NO: 100148 - DNA, 25 bp, Artificial
  probe
  misc_feature (1)..(25): SEQ ID NO: 7573; WAN024BZ7_at; Start 2; Stop 26
tgcggagcagggataccattgtata

SEQ ID NO: 100149 - DNA, 25 bp, Artificial
  probe
  misc_feature (1)..(25): SEQ ID NO: 7573; WAN024BZ7_at; Start 47; Stop 71
ctggaaaaccttctgtcaagagcca

SEQ ID NO: 100150 - DNA, 25 bp, Artificial
  probe
  misc_feature (1)..(25): SEQ ID NO: 7573; WAN024BZ7_at; Start 9; Stop 33
cagggataccattgtatataacaac

SEQ ID NO: 100151 - DNA, 25 bp, Artificial
  probe
  misc_feature (1)..(25): SEQ ID NO: 7573; WAN024BZ7_at; Start 3; Stop 27
gcggagcagggataccattgtatat

SEQ ID NO: 100152 - DNA, 25 bp, Artificial
  probe
  misc_feature (1)..(25): SEQ ID NO: 7573; WAN024BZ7_at; Start 17; Stop 41
ccattgtatataacaacggtattat

SEQ ID NO: 100153 - DNA, 25 bp, Artificial
  probe
  misc_feature (1)..(25): SEQ ID NO: 7573; WAN024BZ7_at; Start 4; Stop 28
cggagcagggataccattgtatata

SEQ ID NO: 100154 - DNA, 25 bp, Artificial
  probe
  misc_feature (1)..(25): SEQ ID NO: 7573; WAN024BZ7_at; Start 45; Stop 69
ttctggaaaaccttctgtcaagagc

SEQ ID NO: 100155 - DNA, 25 bp, Artificial
  probe
  misc_feature (1)..(25): SEQ ID NO: 7573; WAN024BZ7_at; Start 43; Stop 67
acttctggaaaaccttctgtcaaga

SEQ ID NO: 100156 - DNA, 25 bp, Artificial
  probe
  misc_feature (1)..(25): SEQ ID NO: 7573; WAN024BZ7_at; Start 1; Stop 25
ttgcggagcagggataccattgtat

SEQ ID NO: 100157 - DNA, 25 bp, Artificial
  probe
  misc_feature (1)..(25): SEQ ID NO: 7573; WAN024BZ7_at; Start 50; Stop 74
gaaaaccttctgtcaagagccattt

SEQ ID NO: 100158 - DNA, 25 bp, Artificial
  probe
  misc_feature (1)..(25): SEQ ID NO: 7573; WAN024BZ7_at; Start 46; Stop 70
tctggaaaaccttctgtcaagagcc

SEQ ID NO: 100159 - DNA, 25 bp, Artificial
  probe
  misc_feature (1)..(25): SEQ ID NO: 7573; WAN024BZ7_at; Start 8; Stop 32
gcagggataccattgtatataacaa

SEQ ID NO: 100160 - DNA, 25 bp, Artificial
  probe
  misc_feature (1)..(25): SEQ ID NO: 7573; WAN024BZ7_at; Start 55; Stop 79
ccttctgtcaagagccatttgcttc

SEQ ID NO: 100161 - DNA, 25 bp, Artificial
  probe
  misc_feature (1)..(25): SEQ ID NO: 7573; WAN024BZ7_at; Start 48; Stop 72
tggaaaaccttctgtcaagagccat

SEQ ID NO: 100162 - DNA, 25 bp, Artificial
  probe
  misc_feature (1)..(25): SEQ ID NO: 7573; WAN024BZ7_at; Start 52; Stop 76
aaaccttctgtcaagagccatttgc

SEQ ID NO: 100163 - DNA, 25 bp, Artificial
  probe
  misc_feature (1)..(25): SEQ ID NO: 7573; WAN024BZ7_at; Start 11; Stop 35
gggataccattgtatataacaacgg

SEQ ID NO: 100164 - DNA, 25 bp, Artificial
  probe
  misc_feature (1)..(25): SEQ ID NO: 7108; WAN024BZ8_at; Start 221; Stop 245
gccgtgcacaggactgcttggaccg

SEQ ID NO: 100165 - DNA, 25 bp, Artificial
  probe
  misc_feature (1)..(25): SEQ ID NO: 7108; WAN024BZ8_at; Start 508; Stop 532
tacgaaggaaataaggaatggcaag

SEQ ID NO: 100166 - DNA, 25 bp, Artificial
  probe
  misc_feature (1)..(25): SEQ ID NO: 7108; WAN024BZ8_at; Start 301; Stop 325
caaaaacgtgttgccatcgcccgtg

SEQ ID NO: 100167 - DNA, 25 bp, Artificial
  probe
  misc_feature (1)..(25): SEQ ID NO: 7108; WAN024BZ8_at; Start 88; Stop 112
gaaaaggtaatgatgcgtcgcgaga

SEQ ID NO: 100168 - DNA, 25 bp, Artificial
  probe
  misc_feature (1)..(25): SEQ ID NO: 7108; WAN024BZ8_at; Start 342; Stop 366
caaatatctgttttgcgacgagcca

SEQ ID NO: 100169 - DNA, 25 bp, Artificial
  probe
  misc_feature (1)..(25): SEQ ID NO: 7108; WAN024BZ8_at; Start 549; Stop 573
tatgggtgccgaaaatccccgatta

SEQ ID NO: 100170 - DNA, 25 bp, Artificial
  probe
  misc_feature (1)..(25): SEQ ID NO: 7108; WAN024BZ8_at; Start 117; Stop 141
tatgatattccaaagcgctgccctc

SEQ ID NO: 100171 - DNA, 25 bp, Artificial
  probe
  misc_feature (1)..(25): SEQ ID NO: 7108; WAN024BZ8_at; Start 9; Stop 33
aaatcttgtcggacttctcgaaccg

SEQ ID NO: 100172 - DNA, 25 bp, Artificial
  probe
  misc_feature (1)..(25): SEQ ID NO: 7108; WAN024BZ8_at; Start 191; Stop 215
tctcgtcaatgaccttacgtgaacg

SEQ ID NO: 100173 - DNA, 25 bp, Artificial
  probe
  misc_feature (1)..(25): SEQ ID NO: 7108; WAN024BZ8_at; Start 178; Stop 202
ccgctcgacatgttctcgtcaatga

SEQ ID NO: 100174 - DNA, 25 bp, Artificial
  probe
  misc_feature (1)..(25): SEQ ID NO: 7108; WAN024BZ8_at; Start 40; Stop 64
ggcgagattctgtacgacggtcgta

SEQ ID NO: 100175 - DNA, 25 bp, Artificial
  probe
  misc_feature (1)..(25): SEQ ID NO: 7108; WAN024BZ8_at; Start 467; Stop 491
tgaactcggtcatgggcatcggcga

SEQ ID NO: 100176 - DNA, 25 bp, Artificial
  probe
  misc_feature (1)..(25): SEQ ID NO: 7108; WAN024BZ8_at; Start 536; Stop 560
taagcagtcaggttatgggtgccga

SEQ ID NO: 100177 - DNA, 25 bp, Artificial
  probe
  misc_feature (1)..(25): SEQ ID NO: 7108; WAN024BZ8_at; Start 569; Stop 593
gattaaccgactttatcttcgccag

SEQ ID NO: 100178 - DNA, 25 bp, Artificial
  probe
  misc_feature (1)..(25): SEQ ID NO: 7108; WAN024BZ8_at; Start 145; Stop 169
gactccatgacggttctcgagaacg

SEQ ID NO: 100179 - DNA, 25 bp, Artificial
  probe
  misc_feature (1)..(25): SEQ ID NO: 7108; WAN024BZ8_at; Start 236; Stop 260
gcttggaccgtgtaaacctgactgg

SEQ ID NO: 100180 - DNA, 25 bp, Artificial
  probe
  misc_feature (1)..(25): SEQ ID NO: 7108; WAN024BZ8_at; Start 452; Stop 476
taaacacccacgacatgaactcggt

SEQ ID NO: 100181 - DNA, 25 bp, Artificial
  probe
  misc_feature (1)..(25): SEQ ID NO: 7108; WAN024BZ8_at; Start 55; Stop 79
gacggtcgtaattttgtaagcatga

SEQ ID NO: 100182 - DNA, 25 bp, Artificial
  probe
  misc_feature (1)..(25): SEQ ID NO: 7108; WAN024BZ8_at; Start 373; Stop 397
ggtctcgaccccaaaacatcgcttg

SEQ ID NO: 100183 - DNA, 25 bp, Artificial
  probe
  misc_feature (1)..(25): SEQ ID NO: 7108; WAN024BZ8_at; Start 271; Stop 295
aaattccctggcgagatatccggag

SEQ ID NO: 100184 - DNA, 25 bp, Artificial
  probe
  misc_feature (1)..(25): SEQ ID NO: 7108; WAN024BZ8_at; Start 205; Stop 229
ttacgtgaacgtatccgccgtgcac

SEQ ID NO: 100185 - DNA, 25 bp, Artificial
  probe
  misc_feature (1)..(25): SEQ ID NO: 7108; WAN024BZ8_at; Start 353; Stop 377
tttgcgacgagccaaactctggtct

SEQ ID NO: 100186 - DNA, 25 bp, Artificial
  probe
  misc_feature (1)..(25): SEQ ID NO: 7108; WAN024BZ8_at; Start 480; Stop 504
gggcatcggcgaaaatatcattttt

SEQ ID NO: 100187 - DNA, 25 bp, Artificial
  probe
  misc_feature (1)..(25): SEQ ID NO: 7108; WAN024BZ8_at; Start 599; Stop 623
tgctcaaaaatatgcgacgaatcgt

SEQ ID NO: 100188 - DNA, 25 bp, Artificial
  probe
  misc_feature (1)..(25): SEQ ID NO: 7108; WAN024BZ8_at; Start 392; Stop 416
cgcttgttatcgatgagctgttaca

SEQ ID NO: 100189 - DNA, 25 bp, Artificial
  probe
  misc_feature (1)..(25): SEQ ID NO: 7108; WAN024BZ8_at; Start 426; Stop 450
tcaggaatacaacatgaccaccatc

SEQ ID NO: 100190 - DNA, 25 bp, Artificial
  probe
  misc_feature (1)..(25): SEQ ID NO: 7108; WAN024BZ8_at; Start 287; Stop 311
tatccggaggtatgcaaaaacgtgt

SEQ ID NO: 100191 - DNA, 25 bp, Artificial
  probe
  misc_feature (1)..(25): SEQ ID NO: 7108; WAN024BZ8_at; Start 614; Stop 638
gacgaatcgttatcgacaacggact

SEQ ID NO: 100192 - DNA, 25 bp, Artificial
  probe
  misc_feature (1)..(25): SEQ ID NO: 7108; WAN024BZ8_at; Start 71; Stop 95
taagcatgagcaaacacgaaaaggt

SEQ ID NO: 100193 - DNA, 25 bp, Artificial
  probe
  misc_feature (1)..(25): SEQ ID NO: 7108; WAN024BZ8_at; Start 163; Stop 187
gagaacgtgatgttcccgctcgaca

SEQ ID NO: 100194 - DNA, 25 bp, Artificial
  probe
  misc_feature (1)..(25): SEQ ID NO: 7108; WAN024BZ8_at; Start 254; Stop 278
tgactggtgccgacgaaaaattccc

SEQ ID NO: 100195 - DNA, 25 bp, Artificial
  probe
  misc_feature (1)..(25): SEQ ID NO: 7108; WAN024BZ8_at; Start 102; Stop 126
gcgtcgcgagatgggtatgatattc

SEQ ID NO: 100196 - DNA, 25 bp, Artificial
  probe
  misc_feature (1)..(25): SEQ ID NO: 7108; WAN024BZ8_at; Start 584; Stop 608
tcttcgccagcgatctgctcaaaaa

SEQ ID NO: 100197 - DNA, 25 bp, Artificial
  probe
  misc_feature (1)..(25): SEQ ID NO: 7108; WAN024BZ8_at; Start 406; Stop 430
gagctgttacactccatcactcagg

SEQ ID NO: 100198 - DNA, 25 bp, Artificial
  probe
  misc_feature (1)..(25): SEQ ID NO: 7110; WAN024BZ9_at; Start 65; Stop 89
ttattgctgcaaaagtaagtaaaaa

SEQ ID NO: 100199 - DNA, 25 bp, Artificial
  probe
  misc_feature (1)..(25): SEQ ID NO: 7110; WAN024BZ9_at; Start 39; Stop 63
gctaaaattggatgttataattcga

SEQ ID NO: 100200 - DNA, 25 bp, Artificial
  probe
  misc_feature (1)..(25): SEQ ID NO: 7110; WAN024BZ9_at; Start 16; Stop 40
aatttctttcttcatataaaaatgc

SEQ ID NO: 100201 - DNA, 25 bp, Artificial
  probe
  misc_feature (1)..(25): SEQ ID NO: 7110; WAN024BZ9_at; Start 1; Stop 25
ctgattcttaatcttaatttctttc

SEQ ID NO: 100202 - DNA, 25 bp, Artificial
  probe
  misc_feature (1)..(25): SEQ ID NO: 7110; WAN024BZ9_at; Start 47; Stop 71
tggatgttataattcgaattattgc

SEQ ID NO: 100203 - DNA, 25 bp, Artificial
  probe
  misc_feature (1)..(25): SEQ ID NO: 7110; WAN024BZ9_at; Start 25; Stop 49
cttcatataaaaatgctaaaattgg

SEQ ID NO: 100204 - DNA, 25 bp, Artificial
  probe
  misc_feature (1)..(25): SEQ ID NO: 7110; WAN024BZ9_at; Start 62; Stop 86
gaattattgctgcaaaagtaagtaa

SEQ ID NO: 100205 - DNA, 25 bp, Artificial
  probe
  misc_feature (1)..(25): SEQ ID NO: 7110; WAN024BZ9_at; Start 89; Stop 113
aatctgaatcgaacaaacttttaag

SEQ ID NO: 100206 - DNA, 25 bp, Artificial
  probe
  misc_feature (1)..(25): SEQ ID NO: 7110; WAN024BZ9_at; Start 38; Stop 62
tgctaaaattggatgttataattcg

SEQ ID NO: 100207 - DNA, 25 bp, Artificial
  probe
  misc_feature (1)..(25): SEQ ID NO: 7110; WAN024BZ9_at; Start 68; Stop 92
ttgctgcaaaagtaagtaaaaaatc

SEQ ID NO: 100208 - DNA, 25 bp, Artificial
  probe
  misc_feature (1)..(25): SEQ ID NO: 7110; WAN024BZ9_at; Start 40; Stop 64
ctaaaattggatgttataattcgaa

SEQ ID NO: 100209 - DNA, 25 bp, Artificial
  probe
  misc_feature (1)..(25): SEQ ID NO: 7110; WAN024BZ9_at; Start 59; Stop 83
ttcgaattattgctgcaaaagtaag

SEQ ID NO: 100210 - DNA, 25 bp, Artificial
  probe
  misc_feature (1)..(25): SEQ ID NO: 7110; WAN024BZ9_at; Start 49; Stop 73
gatgttataattcgaattattgctg

SEQ ID NO: 100211 - DNA, 25 bp, Artificial
  probe
  misc_feature (1)..(25): SEQ ID NO: 7110; WAN024BZ9_at; Start 66; Stop 90
tattgctgcaaaagtaagtaaaaaa

SEQ ID NO: 100212 - DNA, 25 bp, Artificial
  probe
  misc_feature (1)..(25): SEQ ID NO: 7110; WAN024BZ9_at; Start 70; Stop 94
gctgcaaaagtaagtaaaaaatctg

SEQ ID NO: 100213 - DNA, 25 bp, Artificial
  probe
  misc_feature (1)..(25): SEQ ID NO: 7110; WAN024BZ9_at; Start 52; Stop 76
gttataattcgaattattgctgcaa

SEQ ID NO: 100214 - DNA, 25 bp, Artificial
  probe
  misc_feature (1)..(25): SEQ ID NO: 7110; WAN024BZ9_at; Start 21; Stop 45
ctttcttcatataaaaatgctaaaa

SEQ ID NO: 100215 - DNA, 25 bp, Artificial
  probe
  misc_feature (1)..(25): SEQ ID NO: 7110; WAN024BZ9_at; Start 91; Stop 115
tctgaatcgaacaaacttttaagaa

SEQ ID NO: 100216 - DNA, 25 bp, Artificial
  probe
  misc_feature (1)..(25): SEQ ID NO: 7110; WAN024BZ9_at; Start 26; Stop 50
ttcatataaaaatgctaaaattgga

SEQ ID NO: 100217 - DNA, 25 bp, Artificial
  probe
  misc_feature (1)..(25): SEQ ID NO: 7110; WAN024BZ9_at; Start 69; Stop 93
tgctgcaaaagtaagtaaaaaatct

SEQ ID NO: 100218 - DNA, 25 bp, Artificial
  probe
  misc_feature (1)..(25): SEQ ID NO: 7110; WAN024BZ9_at; Start 32; Stop 56
taaaaatgctaaaattggatgttat

SEQ ID NO: 100219 - DNA, 25 bp, Artificial
  probe
  misc_feature (1)..(25): SEQ ID NO: 7110; WAN024BZ9_at; Start 63; Stop 87
aattattgctgcaaaagtaagtaaa

SEQ ID NO: 100220 - DNA, 25 bp, Artificial
  probe
  misc_feature (1)..(25): SEQ ID NO: 7110; WAN024BZ9_at; Start 51; Stop 75
tgttataattcgaattattgctgca

SEQ ID NO: 100221 - DNA, 25 bp, Artificial
  probe
  misc_feature (1)..(25): SEQ ID NO: 7110; WAN024BZ9_at; Start 18; Stop 42
tttctttcttcatataaaaatgcta

SEQ ID NO: 100222 - DNA, 25 bp, Artificial
  probe
  misc_feature (1)..(25): SEQ ID NO: 7110; WAN024BZ9_at; Start 90; Stop 114
atctgaatcgaacaaacttttaaga

SEQ ID NO: 100223 - DNA, 25 bp, Artificial
  probe
  misc_feature (1)..(25): SEQ ID NO: 7110; WAN024BZ9_at; Start 28; Stop 52
catataaaaatgctaaaattggatg

SEQ ID NO: 100224 - DNA, 25 bp, Artificial
  probe
  misc_feature (1)..(25): SEQ ID NO: 7110; WAN024BZ9_at; Start 64; Stop 88
attattgctgcaaaagtaagtaaaa

SEQ ID NO: 100225 - DNA, 25 bp, Artificial
  probe
  misc_feature (1)..(25): SEQ ID NO: 7110; WAN024BZ9_at; Start 61; Stop 85
cgaattattgctgcaaaagtaagta

SEQ ID NO: 100226 - DNA, 25 bp, Artificial
  probe
  misc_feature (1)..(25): SEQ ID NO: 7110; WAN024BZ9_at; Start 71; Stop 95
ctgcaaaagtaagtaaaaaatctga

SEQ ID NO: 100227 - DNA, 25 bp, Artificial
  probe
  misc_feature (1)..(25): SEQ ID NO: 7110; WAN024BZ9_at; Start 80; Stop 104
taagtaaaaaatctgaatcgaacaa

SEQ ID NO: 100228 - DNA, 25 bp, Artificial
  probe
  misc_feature (1)..(25): SEQ ID NO: 7110; WAN024BZ9_at; Start 30; Stop 54
tataaaaatgctaaaattggatgtt

SEQ ID NO: 100229 - DNA, 25 bp, Artificial
  probe
  misc_feature (1)..(25): SEQ ID NO: 7110; WAN024BZ9_at; Start 60; Stop 84
tcgaattattgctgcaaaagtaagt

SEQ ID NO: 100230 - DNA, 25 bp, Artificial
  probe
  misc_feature (1)..(25): SEQ ID NO: 7110; WAN024BZ9_at; Start 41; Stop 65
taaaattggatgttataattcgaat

SEQ ID NO: 100231 - DNA, 25 bp, Artificial
  probe
  misc_feature (1)..(25): SEQ ID NO: 7110; WAN024BZ9_at; Start 27; Stop 51
tcatataaaaatgctaaaattggat

SEQ ID NO: 100232 - DNA, 25 bp, Artificial
  probe
  misc_feature (1)..(25): SEQ ID NO: 6601; WAN024BZA_at; Start 273; Stop 297
gcgaccaaaccaacgtacacggcta

SEQ ID NO: 100233 - DNA, 25 bp, Artificial
  probe
  misc_feature (1)..(25): SEQ ID NO: 6601; WAN024BZA_at; Start 99; Stop 123
caacaaagaaagtgggaagacacaa

SEQ ID NO: 100234 - DNA, 25 bp, Artificial
  probe
  misc_feature (1)..(25): SEQ ID NO: 6601; WAN024BZA_at; Start 260; Stop 284
aagccgtgtacaggcgaccaaacca

SEQ ID NO: 100235 - DNA, 25 bp, Artificial
  probe
  misc_feature (1)..(25): SEQ ID NO: 6601; WAN024BZA_at; Start 97; Stop 121
tacaacaaagaaagtgggaagacac

SEQ ID NO: 100236 - DNA, 25 bp, Artificial
  probe
  misc_feature (1)..(25): SEQ ID NO: 6601; WAN024BZA_at; Start 218; Stop 242
caaaagtaaagagtgcaaaaaatgg

SEQ ID NO: 100237 - DNA, 25 bp, Artificial
  probe
  misc_feature (1)..(25): SEQ ID NO: 6601; WAN024BZA_at; Start 268; Stop 292
tacaggcgaccaaaccaacgtacac

SEQ ID NO: 100238 - DNA, 25 bp, Artificial
  probe
  misc_feature (1)..(25): SEQ ID NO: 6601; WAN024BZA_at; Start 127; Stop 151
tcagataaagaaaaacttaagatta

SEQ ID NO: 100239 - DNA, 25 bp, Artificial
  probe
  misc_feature (1)..(25): SEQ ID NO: 6601; WAN024BZA_at; Start 309; Stop 333
caaaactcaagcaaaggcaaggcgc

SEQ ID NO: 100240 - DNA, 25 bp, Artificial
  probe
  misc_feature (1)..(25): SEQ ID NO: 6601; WAN024BZA_at; Start 257; Stop 281
taaaagccgtgtacaggcgaccaaa

SEQ ID NO: 100241 - DNA, 25 bp, Artificial
  probe
  misc_feature (1)..(25): SEQ ID NO: 6601; WAN024BZA_at; Start 9; Stop 33
agaaaacaagatgcgtggatatagg

SEQ ID NO: 100242 - DNA, 25 bp, Artificial
  probe
  misc_feature (1)..(25): SEQ ID NO: 6601; WAN024BZA_at; Start 248; Stop 272
aagcgaaaataaaagccgtgtacag

SEQ ID NO: 100243 - DNA, 25 bp, Artificial
  probe
  misc_feature (1)..(25): SEQ ID NO: 6601; WAN024BZA_at; Start 28; Stop 52
tataggaatatgctaggtttaacac

SEQ ID NO: 100244 - DNA, 25 bp, Artificial
  probe
  misc_feature (1)..(25): SEQ ID NO: 6601; WAN024BZA_at; Start 306; Stop 330
taacaaaactcaagcaaaggcaagg

SEQ ID NO: 100245 - DNA, 25 bp, Artificial
  probe
  misc_feature (1)..(25): SEQ ID NO: 6601; WAN024BZA_at; Start 33; Stop 57
gaatatgctaggtttaacacaagag

SEQ ID NO: 100246 - DNA, 25 bp, Artificial
  probe
  misc_feature (1)..(25): SEQ ID NO: 6601; WAN024BZA_at; Start 197; Stop 221
tattttttaaacagaagtatgcaaa

SEQ ID NO: 100247 - DNA, 25 bp, Artificial
  probe
  misc_feature (1)..(25): SEQ ID NO: 6601; WAN024BZA_at; Start 312; Stop 336
aactcaagcaaaggcaaggcgcgtg

SEQ ID NO: 100248 - DNA, 25 bp, Artificial
  probe
  misc_feature (1)..(25): SEQ ID NO: 6601; WAN024BZA_at; Start 231; Stop 255
tgcaaaaaatggaattaaagcgaaa

SEQ ID NO: 100249 - DNA, 25 bp, Artificial
  probe
  misc_feature (1)..(25): SEQ ID NO: 6601; WAN024BZA_at; Start 316; Stop 340
caagcaaaggcaaggcgcgtggttt

SEQ ID NO: 100250 - DNA, 25 bp, Artificial
  probe
  misc_feature (1)..(25): SEQ ID NO: 6601; WAN024BZA_at; Start 68; Stop 92
aaaaacttggtatatctaagcagag

SEQ ID NO: 100251 - DNA, 25 bp, Artificial
  probe
  misc_feature (1)..(25): SEQ ID NO: 6601; WAN024BZA_at; Start 202; Stop 226
tttaaacagaagtatgcaaaagtaa

SEQ ID NO: 100252 - DNA, 25 bp, Artificial
  probe
  misc_feature (1)..(25): SEQ ID NO: 6601; WAN024BZA_at; Start 2; Stop 26
tgagtaaagaaaacaagatgcgtgg

SEQ ID NO: 100253 - DNA, 25 bp, Artificial
  probe
  misc_feature (1)..(25): SEQ ID NO: 6601; WAN024BZA_at; Start 326; Stop 350
caaggcgcgtggttttgttaggtat

SEQ ID NO: 100254 - DNA, 25 bp, Artificial
  probe
  misc_feature (1)..(25): SEQ ID NO: 6601; WAN024BZA_at; Start 82; Stop 106
tctaagcagagttattacaacaaag

SEQ ID NO: 100255 - DNA, 25 bp, Artificial
  probe
  misc_feature (1)..(25): SEQ ID NO: 6601; WAN024BZA_at; Start 106; Stop 130
gaaagtgggaagacacaattttcag

SEQ ID NO: 100256 - DNA, 25 bp, Artificial
  probe
  misc_feature (1)..(25): SEQ ID NO: 6601; WAN024BZA_at; Start 38; Stop 62
tgctaggtttaacacaagagaaact

SEQ ID NO: 100257 - DNA, 25 bp, Artificial
  probe
  misc_feature (1)..(25): SEQ ID NO: 6601; WAN024BZA_at; Start 113; Stop 137
ggaagacacaattttcagataaaga

SEQ ID NO: 100258 - DNA, 25 bp, Artificial
  probe
  misc_feature (1)..(25): SEQ ID NO: 6601; WAN024BZA_at; Start 255; Stop 279
aataaaagccgtgtacaggcgacca

SEQ ID NO: 100259 - DNA, 25 bp, Artificial
  probe
  misc_feature (1)..(25): SEQ ID NO: 6601; WAN024BZA_at; Start 87; Stop 111
gcagagttattacaacaaagaaagt

SEQ ID NO: 100260 - DNA, 25 bp, Artificial
  probe
  misc_feature (1)..(25): SEQ ID NO: 6601; WAN024BZA_at; Start 18; Stop 42
gatgcgtggatataggaatatgcta

SEQ ID NO: 100261 - DNA, 25 bp, Artificial
  probe
  misc_feature (1)..(25): SEQ ID NO: 6601; WAN024BZA_at; Start 162; Stop 186
aatccctttatttccagatattaca

SEQ ID NO: 100262 - DNA, 25 bp, Artificial
  probe
  misc_feature (1)..(25): SEQ ID NO: 6601; WAN024BZA_at; Start 265; Stop 289
gtgtacaggcgaccaaaccaacgta

SEQ ID NO: 100263 - DNA, 25 bp, Artificial
  probe
  misc_feature (1)..(25): SEQ ID NO: 6601; WAN024BZA_at; Start 170; Stop 194
tatttccagatattacaatagaaga

SEQ ID NO: 100264 - DNA, 25 bp, Artificial
  probe
  misc_feature (1)..(25): SEQ ID NO: 6601; WAN024BZA_at; Start 40; Stop 64
ctaggtttaacacaagagaaacttg

SEQ ID NO: 100265 - DNA, 25 bp, Artificial
  probe
  misc_feature (1)..(25): SEQ ID NO: 6601; WAN024BZA_at; Start 13; Stop 37
aacaagatgcgtggatataggaata

SEQ ID NO: 100266 - DNA, 25 bp, Artificial
  probe
  misc_feature (1)..(25): SEQ ID NO: 7479; WAN024BZB_at; Start 75; Stop 99
gaatagtcttattgctatattttga

SEQ ID NO: 100267 - DNA, 25 bp, Artificial
  probe
  misc_feature (1)..(25): SEQ ID NO: 7479; WAN024BZB_at; Start 57; Stop 81
tttgacagcaattctacagaatagt

SEQ ID NO: 100268 - DNA, 25 bp, Artificial
  probe
  misc_feature (1)..(25): SEQ ID NO: 7479; WAN024BZB_at; Start 12; Stop 36
taatgattataaacacaagtgggaa

SEQ ID NO: 100269 - DNA, 25 bp, Artificial
  probe
  misc_feature (1)..(25): SEQ ID NO: 7479; WAN024BZB_at; Start 45; Stop 69
tgaactgatctttttgacagcaatt

SEQ ID NO: 100270 - DNA, 25 bp, Artificial
  probe
  misc_feature (1)..(25): SEQ ID NO: 7479; WAN024BZB_at; Start 47; Stop 71
aactgatctttttgacagcaattct

SEQ ID NO: 100271 - DNA, 25 bp, Artificial
  probe
  misc_feature (1)..(25): SEQ ID NO: 7479; WAN024BZB_at; Start 15; Stop 39
tgattataaacacaagtgggaagga

SEQ ID NO: 100272 - DNA, 25 bp, Artificial
  probe
  misc_feature (1)..(25): SEQ ID NO: 7479; WAN024BZB_at; Start 30; Stop 54
gtgggaaggaaaaaatgaactgatc

SEQ ID NO: 100273 - DNA, 25 bp, Artificial
  probe
  misc_feature (1)..(25): SEQ ID NO: 7479; WAN024BZB_at; Start 54; Stop 78
ctttttgacagcaattctacagaat

SEQ ID NO: 100274 - DNA, 25 bp, Artificial
  probe
  misc_feature (1)..(25): SEQ ID NO: 7479; WAN024BZB_at; Start 43; Stop 67
aatgaactgatctttttgacagcaa

SEQ ID NO: 100275 - DNA, 25 bp, Artificial
  probe
  misc_feature (1)..(25): SEQ ID NO: 7479; WAN024BZB_at; Start 31; Stop 55
tgggaaggaaaaaatgaactgatct

SEQ ID NO: 100276 - DNA, 25 bp, Artificial
  probe
  misc_feature (1)..(25): SEQ ID NO: 7479; WAN024BZB_at; Start 62; Stop 86
cagcaattctacagaatagtcttat

SEQ ID NO: 100277 - DNA, 25 bp, Artificial
  probe
  misc_feature (1)..(25): SEQ ID NO: 7479; WAN024BZB_at; Start 46; Stop 70
gaactgatctttttgacagcaattc

SEQ ID NO: 100278 - DNA, 25 bp, Artificial
  probe
  misc_feature (1)..(25): SEQ ID NO: 7479; WAN024BZB_at; Start 64; Stop 88
gcaattctacagaatagtcttattg

SEQ ID NO: 100279 - DNA, 25 bp, Artificial
  probe
  misc_feature (1)..(25): SEQ ID NO: 7479; WAN024BZB_at; Start 56; Stop 80
ttttgacagcaattctacagaatag

SEQ ID NO: 100280 - DNA, 25 bp, Artificial
  probe
  misc_feature (1)..(25): SEQ ID NO: 7479; WAN024BZB_at; Start 69; Stop 93
tctacagaatagtcttattgctata

SEQ ID NO: 100281 - DNA, 25 bp, Artificial
  probe
  misc_feature (1)..(25): SEQ ID NO: 7479; WAN024BZB_at; Start 66; Stop 90
aattctacagaatagtcttattgct

SEQ ID NO: 100282 - DNA, 25 bp, Artificial
  probe
  misc_feature (1)..(25): SEQ ID NO: 7479; WAN024BZB_at; Start 16; Stop 40
gattataaacacaagtgggaaggaa

SEQ ID NO: 100283 - DNA, 25 bp, Artificial
  probe
  misc_feature (1)..(25): SEQ ID NO: 7479; WAN024BZB_at; Start 52; Stop 76
atctttttgacagcaattctacaga

SEQ ID NO: 100284 - DNA, 25 bp, Artificial
  probe
  misc_feature (1)..(25): SEQ ID NO: 7479; WAN024BZB_at; Start 53; Stop 77
tctttttgacagcaattctacagaa

SEQ ID NO: 100285 - DNA, 25 bp, Artificial
  probe
  misc_feature (1)..(25): SEQ ID NO: 7479; WAN024BZB_at; Start 27; Stop 51
caagtgggaaggaaaaaatgaactg

SEQ ID NO: 100286 - DNA, 25 bp, Artificial
  probe
  misc_feature (1)..(25): SEQ ID NO: 7479; WAN024BZB_at; Start 51; Stop 75
gatctttttgacagcaattctacag

SEQ ID NO: 100287 - DNA, 25 bp, Artificial
  probe
  misc_feature (1)..(25): SEQ ID NO: 7479; WAN024BZB_at; Start 10; Stop 34
tttaatgattataaacacaagtggg

SEQ ID NO: 100288 - DNA, 25 bp, Artificial
  probe
  misc_feature (1)..(25): SEQ ID NO: 7479; WAN024BZB_at; Start 65; Stop 89
caattctacagaatagtcttattgc

SEQ ID NO: 100289 - DNA, 25 bp, Artificial
  probe
  misc_feature (1)..(25): SEQ ID NO: 7479; WAN024BZB_at; Start 14; Stop 38
atgattataaacacaagtgggaagg

SEQ ID NO: 100290 - DNA, 25 bp, Artificial
  probe
  misc_feature (1)..(25): SEQ ID NO: 7479; WAN024BZB_at; Start 42; Stop 66
aaatgaactgatctttttgacagca

SEQ ID NO: 100291 - DNA, 25 bp, Artificial
  probe
  misc_feature (1)..(25): SEQ ID NO: 7479; WAN024BZB_at; Start 41; Stop 65
aaaatgaactgatctttttgacagc

SEQ ID NO: 100292 - DNA, 25 bp, Artificial
  probe
  misc_feature (1)..(25): SEQ ID NO: 7479; WAN024BZB_at; Start 11; Stop 35
ttaatgattataaacacaagtggga

SEQ ID NO: 100293 - DNA, 25 bp, Artificial
  probe
  misc_feature (1)..(25): SEQ ID NO: 7479; WAN024BZB_at; Start 58; Stop 82
ttgacagcaattctacagaatagtc

SEQ ID NO: 100294 - DNA, 25 bp, Artificial
  probe
  misc_feature (1)..(25): SEQ ID NO: 7479; WAN024BZB_at; Start 50; Stop 74
tgatctttttgacagcaattctaca

SEQ ID NO: 100295 - DNA, 25 bp, Artificial
  probe
  misc_feature (1)..(25): SEQ ID NO: 7479; WAN024BZB_at; Start 13; Stop 37
aatgattataaacacaagtgggaag

SEQ ID NO: 100296 - DNA, 25 bp, Artificial
  probe
  misc_feature (1)..(25): SEQ ID NO: 7479; WAN024BZB_at; Start 60; Stop 84
gacagcaattctacagaatagtctt

SEQ ID NO: 100297 - DNA, 25 bp, Artificial
  probe
  misc_feature (1)..(25): SEQ ID NO: 7479; WAN024BZB_at; Start 48; Stop 72
actgatctttttgacagcaattcta

SEQ ID NO: 100298 - DNA, 25 bp, Artificial
  probe
  misc_feature (1)..(25): SEQ ID NO: 7479; WAN024BZB_at; Start 49; Stop 73
ctgatctttttgacagcaattctac

SEQ ID NO: 100299 - DNA, 25 bp, Artificial
  probe
  misc_feature (1)..(25): SEQ ID NO: 7479; WAN024BZB_at; Start 59; Stop 83
tgacagcaattctacagaatagtct

SEQ ID NO: 100300 - DNA, 25 bp, Artificial
  probe
  misc_feature (1)..(25): SEQ ID NO: 7562; WAN024BZC_at; Start 9; Stop 33
tttcccaggtatgggagtcagtgtt

SEQ ID NO: 100301 - DNA, 25 bp, Artificial
  probe
  misc_feature (1)..(25): SEQ ID NO: 7562; WAN024BZC_at; Start 25; Stop 49
gtcagtgttagctcattatcaccca

SEQ ID NO: 100302 - DNA, 25 bp, Artificial
  probe
  misc_feature (1)..(25): SEQ ID NO: 7562; WAN024BZC_at; Start 82; Stop 106
tactattctactagtttttggccta

SEQ ID NO: 100303 - DNA, 25 bp, Artificial
  probe
  misc_feature (1)..(25): SEQ ID NO: 7562; WAN024BZC_at; Start 6; Stop 30
acttttcccaggtatgggagtcagt

SEQ ID NO: 100304 - DNA, 25 bp, Artificial
  probe
  misc_feature (1)..(25): SEQ ID NO: 7562; WAN024BZC_at; Start 23; Stop 47
gagtcagtgttagctcattatcacc

SEQ ID NO: 100305 - DNA, 25 bp, Artificial
  probe
  misc_feature (1)..(25): SEQ ID NO: 7562; WAN024BZC_at; Start 86; Stop 110
attctactagtttttggcctattcg

SEQ ID NO: 100306 - DNA, 25 bp, Artificial
  probe
  misc_feature (1)..(25): SEQ ID NO: 7562; WAN024BZC_at; Start 96; Stop 120
tttttggcctattcgtcaaccactc

SEQ ID NO: 100307 - DNA, 25 bp, Artificial
  probe
  misc_feature (1)..(25): SEQ ID NO: 7562; WAN024BZC_at; Start 14; Stop 38
caggtatgggagtcagtgttagctc

SEQ ID NO: 100308 - DNA, 25 bp, Artificial
  probe
  misc_feature (1)..(25): SEQ ID NO: 7562; WAN024BZC_at; Start 93; Stop 117
tagtttttggcctattcgtcaacca

SEQ ID NO: 100309 - DNA, 25 bp, Artificial
  probe
  misc_feature (1)..(25): SEQ ID NO: 7562; WAN024BZC_at; Start 4; Stop 28
ccacttttcccaggtatgggagtca

SEQ ID NO: 100310 - DNA, 25 bp, Artificial
  probe
  misc_feature (1)..(25): SEQ ID NO: 7562; WAN024BZC_at; Start 18; Stop 42
tatgggagtcagtgttagctcatta

SEQ ID NO: 100311 - DNA, 25 bp, Artificial
  probe
  misc_feature (1)..(25): SEQ ID NO: 7562; WAN024BZC_at; Start 97; Stop 121
ttttggcctattcgtcaaccactct

SEQ ID NO: 100312 - DNA, 25 bp, Artificial
  probe
  misc_feature (1)..(25): SEQ ID NO: 7562; WAN024BZC_at; Start 11; Stop 35
tcccaggtatgggagtcagtgttag

SEQ ID NO: 100313 - DNA, 25 bp, Artificial
  probe
  misc_feature (1)..(25): SEQ ID NO: 7562; WAN024BZC_at; Start 37; Stop 61
tcattatcacccaaatccatttctt

SEQ ID NO: 100314 - DNA, 25 bp, Artificial
  probe
  misc_feature (1)..(25): SEQ ID NO: 7562; WAN024BZC_at; Start 2; Stop 26
tgccacttttcccaggtatgggagt

SEQ ID NO: 100315 - DNA, 25 bp, Artificial
  probe
  misc_feature (1)..(25): SEQ ID NO: 7562; WAN024BZC_at; Start 99; Stop 123
ttggcctattcgtcaaccactctaa

SEQ ID NO: 100316 - DNA, 25 bp, Artificial
  probe
  misc_feature (1)..(25): SEQ ID NO: 7562; WAN024BZC_at; Start 20; Stop 44
tgggagtcagtgttagctcattatc

SEQ ID NO: 100317 - DNA, 25 bp, Artificial
  probe
  misc_feature (1)..(25): SEQ ID NO: 7562; WAN024BZC_at; Start 51; Stop 75
atccatttctttcctccgtataaag

SEQ ID NO: 100318 - DNA, 25 bp, Artificial
  probe
  misc_feature (1)..(25): SEQ ID NO: 7562; WAN024BZC_at; Start 22; Stop 46
ggagtcagtgttagctcattatcac

SEQ ID NO: 100319 - DNA, 25 bp, Artificial
  probe
  misc_feature (1)..(25): SEQ ID NO: 7562; WAN024BZC_at; Start 16; Stop 40
ggtatgggagtcagtgttagctcat

SEQ ID NO: 100320 - DNA, 25 bp, Artificial
  probe
  misc_feature (1)..(25): SEQ ID NO: 7562; WAN024BZC_at; Start 3; Stop 27
gccacttttcccaggtatgggagtc

SEQ ID NO: 100321 - DNA, 25 bp, Artificial
  probe
  misc_feature (1)..(25): SEQ ID NO: 7562; WAN024BZC_at; Start 24; Stop 48
agtcagtgttagctcattatcaccc

SEQ ID NO: 100322 - DNA, 25 bp, Artificial
  probe
  misc_feature (1)..(25): SEQ ID NO: 7562; WAN024BZC_at; Start 12; Stop 36
cccaggtatgggagtcagtgttagc

SEQ ID NO: 100323 - DNA, 25 bp, Artificial
  probe
  misc_feature (1)..(25): SEQ ID NO: 7562; WAN024BZC_at; Start 8; Stop 32
ttttcccaggtatgggagtcagtgt

SEQ ID NO: 100324 - DNA, 25 bp, Artificial
  probe
  misc_feature (1)..(25): SEQ ID NO: 7562; WAN024BZC_at; Start 26; Stop 50
tcagtgttagctcattatcacccaa

SEQ ID NO: 100325 - DNA, 25 bp, Artificial
  probe
  misc_feature (1)..(25): SEQ ID NO: 7562; WAN024BZC_at; Start 21; Stop 45
gggagtcagtgttagctcattatca

SEQ ID NO: 100326 - DNA, 25 bp, Artificial
  probe
  misc_feature (1)..(25): SEQ ID NO: 7562; WAN024BZC_at; Start 48; Stop 72
caaatccatttctttcctccgtata

SEQ ID NO: 100327 - DNA, 25 bp, Artificial
  probe
  misc_feature (1)..(25): SEQ ID NO: 7562; WAN024BZC_at; Start 13; Stop 37
ccaggtatgggagtcagtgttagct

SEQ ID NO: 100328 - DNA, 25 bp, Artificial
  probe
  misc_feature (1)..(25): SEQ ID NO: 7562; WAN024BZC_at; Start 88; Stop 112
tctactagtttttggcctattcgtc

SEQ ID NO: 100329 - DNA, 25 bp, Artificial
  probe
  misc_feature (1)..(25): SEQ ID NO: 7562; WAN024BZC_at; Start 89; Stop 113
ctactagtttttggcctattcgtca

SEQ ID NO: 100330 - DNA, 25 bp, Artificial
  probe
  misc_feature (1)..(25): SEQ ID NO: 7562; WAN024BZC_at; Start 85; Stop 109
tattctactagtttttggcctattc

SEQ ID NO: 100331 - DNA, 25 bp, Artificial
  probe
  misc_feature (1)..(25): SEQ ID NO: 7562; WAN024BZC_at; Start 7; Stop 31
cttttcccaggtatgggagtcagtg

SEQ ID NO: 100332 - DNA, 25 bp, Artificial
  probe
  misc_feature (1)..(25): SEQ ID NO: 7562; WAN024BZC_at; Start 5; Stop 29
cacttttcccaggtatgggagtcag

SEQ ID NO: 100333 - DNA, 25 bp, Artificial
  probe
  misc_feature (1)..(25): SEQ ID NO: 7562; WAN024BZC_at; Start 98; Stop 122
tttggcctattcgtcaaccactcta

SEQ ID NO: 100334 - DNA, 25 bp, Artificial
  probe
  misc_feature (1)..(25): SEQ ID NO: 6983; WAN024BZD_at; Start 63; Stop 87
tagtaacgtttatacagctttgaca

SEQ ID NO: 100335 - DNA, 25 bp, Artificial
  probe
  misc_feature (1)..(25): SEQ ID NO: 6983; WAN024BZD_at; Start 30; Stop 54
caaagcaggaattttctgttacttt

SEQ ID NO: 100336 - DNA, 25 bp, Artificial
  probe
  misc_feature (1)..(25): SEQ ID NO: 6983; WAN024BZD_at; Start 75; Stop 99
tacagctttgacacttcgtatcaaa

SEQ ID NO: 100337 - DNA, 25 bp, Artificial
  probe
  misc_feature (1)..(25): SEQ ID NO: 6983; WAN024BZD_at; Start 24; Stop 48
gtcctacaaagcaggaattttctgt

SEQ ID NO: 100338 - DNA, 25 bp, Artificial
  probe
  misc_feature (1)..(25): SEQ ID NO: 6983; WAN024BZD_at; Start 15; Stop 39
cccaaagcagtcctacaaagcagga

SEQ ID NO: 100339 - DNA, 25 bp, Artificial
  probe
  misc_feature (1)..(25): SEQ ID NO: 6983; WAN024BZD_at; Start 124; Stop 148
tacagaaagcagaaaaggaatgatc

SEQ ID NO: 100340 - DNA, 25 bp, Artificial
  probe
  misc_feature (1)..(25): SEQ ID NO: 6983; WAN024BZD_at; Start 56; Stop 80
ttggaaatagtaacgtttatacagc

SEQ ID NO: 100341 - DNA, 25 bp, Artificial
  probe
  misc_feature (1)..(25): SEQ ID NO: 6983; WAN024BZD_at; Start 18; Stop 42
aaagcagtcctacaaagcaggaatt

SEQ ID NO: 100342 - DNA, 25 bp, Artificial
  probe
  misc_feature (1)..(25): SEQ ID NO: 6983; WAN024BZD_at; Start 6; Stop 30
tattactcacccaaagcagtcctac

SEQ ID NO: 100343 - DNA, 25 bp, Artificial
  probe
  misc_feature (1)..(25): SEQ ID NO: 6983; WAN024BZD_at; Start 87; Stop 111
acttcgtatcaaagcgccaaacaca

SEQ ID NO: 100344 - DNA, 25 bp, Artificial
  probe
  misc_feature (1)..(25): SEQ ID NO: 6983; WAN024BZD_at; Start 110; Stop 134
cactccgaggggtttacagaaagca

SEQ ID NO: 100345 - DNA, 25 bp, Artificial
  probe
  misc_feature (1)..(25): SEQ ID NO: 6983; WAN024BZD_at; Start 81; Stop 105
tttgacacttcgtatcaaagcgcca

SEQ ID NO: 100346 - DNA, 25 bp, Artificial
  probe
  misc_feature (1)..(25): SEQ ID NO: 6983; WAN024BZD_at; Start 26; Stop 50
cctacaaagcaggaattttctgtta

SEQ ID NO: 100347 - DNA, 25 bp, Artificial
  probe
  misc_feature (1)..(25): SEQ ID NO: 6983; WAN024BZD_at; Start 17; Stop 41
caaagcagtcctacaaagcaggaat

SEQ ID NO: 100348 - DNA, 25 bp, Artificial
  probe
  misc_feature (1)..(25): SEQ ID NO: 6983; WAN024BZD_at; Start 10; Stop 34
actcacccaaagcagtcctacaaag

SEQ ID NO: 100349 - DNA, 25 bp, Artificial
  probe
  misc_feature (1)..(25): SEQ ID NO: 6983; WAN024BZD_at; Start 70; Stop 94
gtttatacagctttgacacttcgta

SEQ ID NO: 100350 - DNA, 25 bp, Artificial
  probe
  misc_feature (1)..(25): SEQ ID NO: 6983; WAN024BZD_at; Start 86; Stop 110
cacttcgtatcaaagcgccaaacac

SEQ ID NO: 100351 - DNA, 25 bp, Artificial
  probe
  misc_feature (1)..(25): SEQ ID NO: 6983; WAN024BZD_at; Start 92; Stop 116
gtatcaaagcgccaaacacactccg

SEQ ID NO: 100352 - DNA, 25 bp, Artificial
  probe
  misc_feature (1)..(25): SEQ ID NO: 6983; WAN024BZD_at; Start 84; Stop 108
gacacttcgtatcaaagcgccaaac

SEQ ID NO: 100353 - DNA, 25 bp, Artificial
  probe
  misc_feature (1)..(25): SEQ ID NO: 6983; WAN024BZD_at; Start 65; Stop 89
gtaacgtttatacagctttgacact

SEQ ID NO: 100354 - DNA, 25 bp, Artificial
  probe
  misc_feature (1)..(25): SEQ ID NO: 6983; WAN024BZD_at; Start 68; Stop 92
acgtttatacagctttgacacttcg

SEQ ID NO: 100355 - DNA, 25 bp, Artificial
  probe
  misc_feature (1)..(25): SEQ ID NO: 6983; WAN024BZD_at; Start 21; Stop 45
gcagtcctacaaagcaggaattttc

SEQ ID NO: 100356 - DNA, 25 bp, Artificial
  probe
  misc_feature (1)..(25): SEQ ID NO: 6983; WAN024BZD_at; Start 8; Stop 32
ttactcacccaaagcagtcctacaa

SEQ ID NO: 100357 - DNA, 25 bp, Artificial
  probe
  misc_feature (1)..(25): SEQ ID NO: 6983; WAN024BZD_at; Start 13; Stop 37
cacccaaagcagtcctacaaagcag

SEQ ID NO: 100358 - DNA, 25 bp, Artificial
  probe
  misc_feature (1)..(25): SEQ ID NO: 6983; WAN024BZD_at; Start 73; Stop 97
tatacagctttgacacttcgtatca

SEQ ID NO: 100359 - DNA, 25 bp, Artificial
  probe
  misc_feature (1)..(25): SEQ ID NO: 6983; WAN024BZD_at; Start 121; Stop 145
gtttacagaaagcagaaaaggaatg

SEQ ID NO: 100360 - DNA, 25 bp, Artificial
  probe
  misc_feature (1)..(25): SEQ ID NO: 6983; WAN024BZD_at; Start 2; Stop 26
tgtctattactcacccaaagcagtc

SEQ ID NO: 100361 - DNA, 25 bp, Artificial
  probe
  misc_feature (1)..(25): SEQ ID NO: 6983; WAN024BZD_at; Start 96; Stop 120
caaagcgccaaacacactccgaggg

SEQ ID NO: 100362 - DNA, 25 bp, Artificial
  probe
  misc_feature (1)..(25): SEQ ID NO: 6983; WAN024BZD_at; Start 28; Stop 52
tacaaagcaggaattttctgttact

SEQ ID NO: 100363 - DNA, 25 bp, Artificial
  probe
  misc_feature (1)..(25): SEQ ID NO: 6983; WAN024BZD_at; Start 83; Stop 107
tgacacttcgtatcaaagcgccaaa

SEQ ID NO: 100364 - DNA, 25 bp, Artificial
  probe
  misc_feature (1)..(25): SEQ ID NO: 6983; WAN024BZD_at; Start 94; Stop 118
atcaaagcgccaaacacactccgag

SEQ ID NO: 100365 - DNA, 25 bp, Artificial
  probe
  misc_feature (1)..(25): SEQ ID NO: 6983; WAN024BZD_at; Start 22; Stop 46
cagtcctacaaagcaggaattttct

SEQ ID NO: 100366 - DNA, 25 bp, Artificial
  probe
  misc_feature (1)..(25): SEQ ID NO: 6983; WAN024BZD_at; Start 16; Stop 40
ccaaagcagtcctacaaagcaggaa

SEQ ID NO: 100367 - DNA, 25 bp, Artificial
  probe
  misc_feature (1)..(25): SEQ ID NO: 6983; WAN024BZD_at; Start 3; Stop 27
gtctattactcacccaaagcagtcc

SEQ ID NO: 100368 - DNA, 25 bp, Artificial
  probe
  misc_feature (1)..(25): SEQ ID NO: 7246; WAN024BZE_at; Start 11; Stop 35
gaaatccatttttcaaagatgaaat

SEQ ID NO: 100369 - DNA, 25 bp, Artificial
  probe
  misc_feature (1)..(25): SEQ ID NO: 7246; WAN024BZE_at; Start 12; Stop 36
aaatccatttttcaaagatgaaatc

SEQ ID NO: 100370 - DNA, 25 bp, Artificial
  probe
  misc_feature (1)..(25): SEQ ID NO: 7246; WAN024BZE_at; Start 23; Stop 47
tcaaagatgaaatctttggaaaatt

SEQ ID NO: 100371 - DNA, 25 bp, Artificial
  probe
  misc_feature (1)..(25): SEQ ID NO: 7246; WAN024BZE_at; Start 24; Stop 48
caaagatgaaatctttggaaaatta

SEQ ID NO: 100372 - DNA, 25 bp, Artificial
  probe
  misc_feature (1)..(25): SEQ ID NO: 7246; WAN024BZE_at; Start 6; Stop 30
gtcaggaaatccatttttcaaagat

SEQ ID NO: 100373 - DNA, 25 bp, Artificial
  probe
  misc_feature (1)..(25): SEQ ID NO: 7246; WAN024BZE_at; Start 10; Stop 34
ggaaatccatttttcaaagatgaaa

SEQ ID NO: 100374 - DNA, 25 bp, Artificial
  probe
  misc_feature (1)..(25): SEQ ID NO: 7246; WAN024BZE_at; Start 3; Stop 27
gaggtcaggaaatccatttttcaaa

SEQ ID NO: 100375 - DNA, 25 bp, Artificial
  probe
  misc_feature (1)..(25): SEQ ID NO: 7246; WAN024BZE_at; Start 19; Stop 43
tttttcaaagatgaaatctttggaa

SEQ ID NO: 100376 - DNA, 25 bp, Artificial
  probe
  misc_feature (1)..(25): SEQ ID NO: 7246; WAN024BZE_at; Start 21; Stop 45
tttcaaagatgaaatctttggaaaa

SEQ ID NO: 100377 - DNA, 25 bp, Artificial
  probe
  misc_feature (1)..(25): SEQ ID NO: 7246; WAN024BZE_at; Start 16; Stop 40
ccatttttcaaagatgaaatctttg

SEQ ID NO: 100378 - DNA, 25 bp, Artificial
  probe
  misc_feature (1)..(25): SEQ ID NO: 7246; WAN024BZE_at; Start 17; Stop 41
catttttcaaagatgaaatctttgg

SEQ ID NO: 100379 - DNA, 25 bp, Artificial
  probe
  misc_feature (1)..(25): SEQ ID NO: 7246; WAN024BZE_at; Start 28; Stop 52
gatgaaatctttggaaaattagttc

SEQ ID NO: 100380 - DNA, 25 bp, Artificial
  probe
  misc_feature (1)..(25): SEQ ID NO: 7246; WAN024BZE_at; Start 1; Stop 25
gtgaggtcaggaaatccatttttca

SEQ ID NO: 100381 - DNA, 25 bp, Artificial
  probe
  misc_feature (1)..(25): SEQ ID NO: 7246; WAN024BZE_at; Start 27; Stop 51
agatgaaatctttggaaaattagtt

SEQ ID NO: 100382 - DNA, 25 bp, Artificial
  probe
  misc_feature (1)..(25): SEQ ID NO: 7246; WAN024BZE_at; Start 20; Stop 44
ttttcaaagatgaaatctttggaaa

SEQ ID NO: 100383 - DNA, 25 bp, Artificial
  probe
  misc_feature (1)..(25): SEQ ID NO: 7246; WAN024BZE_at; Start 8; Stop 32
caggaaatccatttttcaaagatga

SEQ ID NO: 100384 - DNA, 25 bp, Artificial
  probe
  misc_feature (1)..(25): SEQ ID NO: 7246; WAN024BZE_at; Start 5; Stop 29
ggtcaggaaatccatttttcaaaga

SEQ ID NO: 100385 - DNA, 25 bp, Artificial
  probe
  misc_feature (1)..(25): SEQ ID NO: 7246; WAN024BZE_at; Start 22; Stop 46
ttcaaagatgaaatctttggaaaat

SEQ ID NO: 100386 - DNA, 25 bp, Artificial
  probe
  misc_feature (1)..(25): SEQ ID NO: 7246; WAN024BZE_at; Start 26; Stop 50
aagatgaaatctttggaaaattagt

SEQ ID NO: 100387 - DNA, 25 bp, Artificial
  probe
  misc_feature (1)..(25): SEQ ID NO: 7246; WAN024BZE_at; Start 15; Stop 39
tccatttttcaaagatgaaatcttt

SEQ ID NO: 100388 - DNA, 25 bp, Artificial
  probe
  misc_feature (1)..(25): SEQ ID NO: 7246; WAN024BZE_at; Start 9; Stop 33
aggaaatccatttttcaaagatgaa

SEQ ID NO: 100389 - DNA, 25 bp, Artificial
  probe
  misc_feature (1)..(25): SEQ ID NO: 7246; WAN024BZE_at; Start 13; Stop 37
aatccatttttcaaagatgaaatct

SEQ ID NO: 100390 - DNA, 25 bp, Artificial
  probe
  misc_feature (1)..(25): SEQ ID NO: 7246; WAN024BZE_at; Start 18; Stop 42
atttttcaaagatgaaatctttgga

SEQ ID NO: 100391 - DNA, 25 bp, Artificial
  probe
  misc_feature (1)..(25): SEQ ID NO: 7246; WAN024BZE_at; Start 7; Stop 31
tcaggaaatccatttttcaaagatg

SEQ ID NO: 100392 - DNA, 25 bp, Artificial
  probe
  misc_feature (1)..(25): SEQ ID NO: 7246; WAN024BZE_at; Start 4; Stop 28
aggtcaggaaatccatttttcaaag

SEQ ID NO: 100393 - DNA, 25 bp, Artificial
  probe
  misc_feature (1)..(25): SEQ ID NO: 7246; WAN024BZE_at; Start 2; Stop 26
tgaggtcaggaaatccatttttcaa

SEQ ID NO: 100394 - DNA, 25 bp, Artificial
  probe
  misc_feature (1)..(25): SEQ ID NO: 7246; WAN024BZE_at; Start 14; Stop 38
atccatttttcaaagatgaaatctt

SEQ ID NO: 100395 - DNA, 25 bp, Artificial
  probe
  misc_feature (1)..(25): SEQ ID NO: 7246; WAN024BZE_at; Start 25; Stop 49
aaagatgaaatctttggaaaattag

SEQ ID NO: 100396 - DNA, 25 bp, Artificial
  probe
  misc_feature (1)..(25): SEQ ID NO: 7383; WAN024BZF_at; Start 38; Stop 62
aaaagctccatacactggatgtgta

SEQ ID NO: 100397 - DNA, 25 bp, Artificial
  probe
  misc_feature (1)..(25): SEQ ID NO: 7383; WAN024BZF_at; Start 28; Stop 52
ttgcttataaaaaagctccatacac

SEQ ID NO: 100398 - DNA, 25 bp, Artificial
  probe
  misc_feature (1)..(25): SEQ ID NO: 7383; WAN024BZF_at; Start 1; Stop 25
ttgaaaacagatgagtataaaattg

SEQ ID NO: 100399 - DNA, 25 bp, Artificial
  probe
  misc_feature (1)..(25): SEQ ID NO: 7383; WAN024BZF_at; Start 31; Stop 55
cttataaaaaagctccatacactgg

SEQ ID NO: 100400 - DNA, 25 bp, Artificial
  probe
  misc_feature (1)..(25): SEQ ID NO: 7383; WAN024BZF_at; Start 30; Stop 54
gcttataaaaaagctccatacactg

SEQ ID NO: 100401 - DNA, 25 bp, Artificial
  probe
  misc_feature (1)..(25): SEQ ID NO: 7383; WAN024BZF_at; Start 49; Stop 73
acactggatgtgtatagagcaatgg

SEQ ID NO: 100402 - DNA, 25 bp, Artificial
  probe
  misc_feature (1)..(25): SEQ ID NO: 7383; WAN024BZF_at; Start 7; Stop 31
acagatgagtataaaattgaattgc

SEQ ID NO: 100403 - DNA, 25 bp, Artificial
  probe
  misc_feature (1)..(25): SEQ ID NO: 7383; WAN024BZF_at; Start 40; Stop 64
aagctccatacactggatgtgtata

SEQ ID NO: 100404 - DNA, 25 bp, Artificial
  probe
  misc_feature (1)..(25): SEQ ID NO: 7383; WAN024BZF_at; Start 35; Stop 59
taaaaaagctccatacactggatgt

SEQ ID NO: 100405 - DNA, 25 bp, Artificial
  probe
  misc_feature (1)..(25): SEQ ID NO: 7383; WAN024BZF_at; Start 29; Stop 53
tgcttataaaaaagctccatacact

SEQ ID NO: 100406 - DNA, 25 bp, Artificial
  probe
  misc_feature (1)..(25): SEQ ID NO: 7383; WAN024BZF_at; Start 3; Stop 27
gaaaacagatgagtataaaattgaa

SEQ ID NO: 100407 - DNA, 25 bp, Artificial
  probe
  misc_feature (1)..(25): SEQ ID NO: 7383; WAN024BZF_at; Start 2; Stop 26
tgaaaacagatgagtataaaattga

SEQ ID NO: 100408 - DNA, 25 bp, Artificial
  probe
  misc_feature (1)..(25): SEQ ID NO: 7383; WAN024BZF_at; Start 33; Stop 57
tataaaaaagctccatacactggat

SEQ ID NO: 100409 - DNA, 25 bp, Artificial
  probe
  misc_feature (1)..(25): SEQ ID NO: 7383; WAN024BZF_at; Start 24; Stop 48
tgaattgcttataaaaaagctccat

SEQ ID NO: 100410 - DNA, 25 bp, Artificial
  probe
  misc_feature (1)..(25): SEQ ID NO: 7383; WAN024BZF_at; Start 42; Stop 66
gctccatacactggatgtgtataga

SEQ ID NO: 100411 - DNA, 25 bp, Artificial
  probe
  misc_feature (1)..(25): SEQ ID NO: 7383; WAN024BZF_at; Start 60; Stop 84
gtatagagcaatggggctttatttg

SEQ ID NO: 100412 - DNA, 25 bp, Artificial
  probe
  misc_feature (1)..(25): SEQ ID NO: 7383; WAN024BZF_at; Start 43; Stop 67
ctccatacactggatgtgtatagag

SEQ ID NO: 100413 - DNA, 25 bp, Artificial
  probe
  misc_feature (1)..(25): SEQ ID NO: 7383; WAN024BZF_at; Start 36; Stop 60
aaaaaagctccatacactggatgtg

SEQ ID NO: 100414 - DNA, 25 bp, Artificial
  probe
  misc_feature (1)..(25): SEQ ID NO: 7383; WAN024BZF_at; Start 8; Stop 32
cagatgagtataaaattgaattgct

SEQ ID NO: 100415 - DNA, 25 bp, Artificial
  probe
  misc_feature (1)..(25): SEQ ID NO: 7383; WAN024BZF_at; Start 39; Stop 63
aaagctccatacactggatgtgtat

SEQ ID NO: 100416 - DNA, 25 bp, Artificial
  probe
  misc_feature (1)..(25): SEQ ID NO: 7383; WAN024BZF_at; Start 32; Stop 56
ttataaaaaagctccatacactgga

SEQ ID NO: 100417 - DNA, 25 bp, Artificial
  probe
  misc_feature (1)..(25): SEQ ID NO: 7383; WAN024BZF_at; Start 44; Stop 68
tccatacactggatgtgtatagagc

SEQ ID NO: 100418 - DNA, 25 bp, Artificial
  probe
  misc_feature (1)..(25): SEQ ID NO: 7383; WAN024BZF_at; Start 50; Stop 74
cactggatgtgtatagagcaatggg

SEQ ID NO: 100419 - DNA, 25 bp, Artificial
  probe
  misc_feature (1)..(25): SEQ ID NO: 7383; WAN024BZF_at; Start 48; Stop 72
tacactggatgtgtatagagcaatg

SEQ ID NO: 100420 - DNA, 25 bp, Artificial
  probe
  misc_feature (1)..(25): SEQ ID NO: 7383; WAN024BZF_at; Start 55; Stop 79
gatgtgtatagagcaatggggcttt

SEQ ID NO: 100421 - DNA, 25 bp, Artificial
  probe
  misc_feature (1)..(25): SEQ ID NO: 7383; WAN024BZF_at; Start 41; Stop 65
agctccatacactggatgtgtatag

SEQ ID NO: 100422 - DNA, 25 bp, Artificial
  probe
  misc_feature (1)..(25): SEQ ID NO: 7383; WAN024BZF_at; Start 26; Stop 50
aattgcttataaaaaagctccatac

SEQ ID NO: 100423 - DNA, 25 bp, Artificial
  probe
  misc_feature (1)..(25): SEQ ID NO: 7383; WAN024BZF_at; Start 25; Stop 49
gaattgcttataaaaaagctccata

SEQ ID NO: 100424 - DNA, 25 bp, Artificial
  probe
  misc_feature (1)..(25): SEQ ID NO: 7383; WAN024BZF_at; Start 34; Stop 58
ataaaaaagctccatacactggatg

SEQ ID NO: 100425 - DNA, 25 bp, Artificial
  probe
  misc_feature (1)..(25): SEQ ID NO: 7383; WAN024BZF_at; Start 45; Stop 69
ccatacactggatgtgtatagagca

SEQ ID NO: 100426 - DNA, 25 bp, Artificial
  probe
  misc_feature (1)..(25): SEQ ID NO: 7383; WAN024BZF_at; Start 37; Stop 61
aaaaagctccatacactggatgtgt

SEQ ID NO: 100427 - DNA, 25 bp, Artificial
  probe
  misc_feature (1)..(25): SEQ ID NO: 7383; WAN024BZF_at; Start 46; Stop 70
catacactggatgtgtatagagcaa

SEQ ID NO: 100428 - DNA, 25 bp, Artificial
  probe
  misc_feature (1)..(25): SEQ ID NO: 7383; WAN024BZF_at; Start 10; Stop 34
gatgagtataaaattgaattgctta

SEQ ID NO: 100429 - DNA, 25 bp, Artificial
  probe
  misc_feature (1)..(25): SEQ ID NO: 7383; WAN024BZF_at; Start 22; Stop 46
attgaattgcttataaaaaagctcc

SEQ ID NO: 100430 - DNA, 25 bp, Artificial
  probe
  misc_feature (1)..(25): SEQ ID NO: 7726; WAN024BZG_at; Start 40; Stop 64
tataatctgaatacccctagtctat

SEQ ID NO: 100431 - DNA, 25 bp, Artificial
  probe
  misc_feature (1)..(25): SEQ ID NO: 7726; WAN024BZG_at; Start 51; Stop 75
tacccctagtctatttatttcacta

SEQ ID NO: 100432 - DNA, 25 bp, Artificial
  probe
  misc_feature (1)..(25): SEQ ID NO: 7726; WAN024BZG_at; Start 50; Stop 74
atacccctagtctatttatttcact

SEQ ID NO: 100433 - DNA, 25 bp, Artificial
  probe
  misc_feature (1)..(25): SEQ ID NO: 7726; WAN024BZG_at; Start 8; Stop 32
cagtcatgcttttctcctttatttc

SEQ ID NO: 100434 - DNA, 25 bp, Artificial
  probe
  misc_feature (1)..(25): SEQ ID NO: 7726; WAN024BZG_at; Start 2; Stop 26
tgttttcagtcatgcttttctcctt

SEQ ID NO: 100435 - DNA, 25 bp, Artificial
  probe
  misc_feature (1)..(25): SEQ ID NO: 7726; WAN024BZG_at; Start 48; Stop 72
gaatacccctagtctatttatttca

SEQ ID NO: 100436 - DNA, 25 bp, Artificial
  probe
  misc_feature (1)..(25): SEQ ID NO: 7726; WAN024BZG_at; Start 36; Stop 60
ttattataatctgaatacccctagt

SEQ ID NO: 100437 - DNA, 25 bp, Artificial
  probe
  misc_feature (1)..(25): SEQ ID NO: 7726; WAN024BZG_at; Start 12; Stop 36
catgcttttctcctttatttcattt

SEQ ID NO: 100438 - DNA, 25 bp, Artificial
  probe
  misc_feature (1)..(25): SEQ ID NO: 7726; WAN024BZG_at; Start 1; Stop 25
ttgttttcagtcatgcttttctcct

SEQ ID NO: 100439 - DNA, 25 bp, Artificial
  probe
  misc_feature (1)..(25): SEQ ID NO: 7726; WAN024BZG_at; Start 32; Stop 56
cattttattataatctgaatacccc

SEQ ID NO: 100440 - DNA, 25 bp, Artificial
  probe
  misc_feature (1)..(25): SEQ ID NO: 7726; WAN024BZG_at; Start 44; Stop 68
atctgaatacccctagtctatttat

SEQ ID NO: 100441 - DNA, 25 bp, Artificial
  probe
  misc_feature (1)..(25): SEQ ID NO: 7726; WAN024BZG_at; Start 54; Stop 78
ccctagtctatttatttcactaggt

SEQ ID NO: 100442 - DNA, 25 bp, Artificial
  probe
  misc_feature (1)..(25): SEQ ID NO: 7726; WAN024BZG_at; Start 34; Stop 58
ttttattataatctgaataccccta

SEQ ID NO: 100443 - DNA, 25 bp, Artificial
  probe
  misc_feature (1)..(25): SEQ ID NO: 7726; WAN024BZG_at; Start 11; Stop 35
tcatgcttttctcctttatttcatt

SEQ ID NO: 100444 - DNA, 25 bp, Artificial
  probe
  misc_feature (1)..(25): SEQ ID NO: 7726; WAN024BZG_at; Start 37; Stop 61
tattataatctgaatacccctagtc

SEQ ID NO: 100445 - DNA, 25 bp, Artificial
  probe
  misc_feature (1)..(25): SEQ ID NO: 7726; WAN024BZG_at; Start 53; Stop 77
cccctagtctatttatttcactagg

SEQ ID NO: 100446 - DNA, 25 bp, Artificial
  probe
  misc_feature (1)..(25): SEQ ID NO: 7726; WAN024BZG_at; Start 30; Stop 54
ttcattttattataatctgaatacc

SEQ ID NO: 100447 - DNA, 25 bp, Artificial
  probe
  misc_feature (1)..(25): SEQ ID NO: 7726; WAN024BZG_at; Start 56; Stop 80
ctagtctatttatttcactaggttt

SEQ ID NO: 100448 - DNA, 25 bp, Artificial
  probe
  misc_feature (1)..(25): SEQ ID NO: 7726; WAN024BZG_at; Start 45; Stop 69
tctgaatacccctagtctatttatt

SEQ ID NO: 100449 - DNA, 25 bp, Artificial
  probe
  misc_feature (1)..(25): SEQ ID NO: 7726; WAN024BZG_at; Start 52; Stop 76
acccctagtctatttatttcactag

SEQ ID NO: 100450 - DNA, 25 bp, Artificial
  probe
  misc_feature (1)..(25): SEQ ID NO: 7726; WAN024BZG_at; Start 47; Stop 71
tgaatacccctagtctatttatttc

SEQ ID NO: 100451 - DNA, 25 bp, Artificial
  probe
  misc_feature (1)..(25): SEQ ID NO: 7726; WAN024BZG_at; Start 14; Stop 38
tgcttttctcctttatttcatttta

SEQ ID NO: 100452 - DNA, 25 bp, Artificial
  probe
  misc_feature (1)..(25): SEQ ID NO: 7726; WAN024BZG_at; Start 33; Stop 57
attttattataatctgaatacccct

SEQ ID NO: 100453 - DNA, 25 bp, Artificial
  probe
  misc_feature (1)..(25): SEQ ID NO: 7726; WAN024BZG_at; Start 42; Stop 66
taatctgaatacccctagtctattt

SEQ ID NO: 100454 - DNA, 25 bp, Artificial
  probe
  misc_feature (1)..(25): SEQ ID NO: 7726; WAN024BZG_at; Start 35; Stop 59
tttattataatctgaatacccctag

SEQ ID NO: 100455 - DNA, 25 bp, Artificial
  probe
  misc_feature (1)..(25): SEQ ID NO: 7726; WAN024BZG_at; Start 41; Stop 65
ataatctgaatacccctagtctatt

SEQ ID NO: 100456 - DNA, 25 bp, Artificial
  probe
  misc_feature (1)..(25): SEQ ID NO: 7726; WAN024BZG_at; Start 31; Stop 55
tcattttattataatctgaataccc

SEQ ID NO: 100457 - DNA, 25 bp, Artificial
  probe
  misc_feature (1)..(25): SEQ ID NO: 7726; WAN024BZG_at; Start 39; Stop 63
ttataatctgaatacccctagtcta

SEQ ID NO: 100458 - DNA, 25 bp, Artificial
  probe
  misc_feature (1)..(25): SEQ ID NO: 7726; WAN024BZG_at; Start 38; Stop 62
attataatctgaatacccctagtct

SEQ ID NO: 100459 - DNA, 25 bp, Artificial
  probe
  misc_feature (1)..(25): SEQ ID NO: 7726; WAN024BZG_at; Start 55; Stop 79
cctagtctatttatttcactaggtt

SEQ ID NO: 100460 - DNA, 25 bp, Artificial
  probe
  misc_feature (1)..(25): SEQ ID NO: 7726; WAN024BZG_at; Start 43; Stop 67
aatctgaatacccctagtctattta

SEQ ID NO: 100461 - DNA, 25 bp, Artificial
  probe
  misc_feature (1)..(25): SEQ ID NO: 7726; WAN024BZG_at; Start 10; Stop 34
gtcatgcttttctcctttatttcat

SEQ ID NO: 100462 - DNA, 25 bp, Artificial
  probe
  misc_feature (1)..(25): SEQ ID NO: 7726; WAN024BZG_at; Start 46; Stop 70
ctgaatacccctagtctatttattt

SEQ ID NO: 100463 - DNA, 25 bp, Artificial
  probe
  misc_feature (1)..(25): SEQ ID NO: 7726; WAN024BZG_at; Start 9; Stop 33
agtcatgcttttctcctttatttca

SEQ ID NO: 100464 - DNA, 25 bp, Artificial
  probe
  misc_feature (1)..(25): SEQ ID NO: 6707; WAN024BZH_at; Start 50; Stop 74
tatcacttttcaacttttctaagct

SEQ ID NO: 100465 - DNA, 25 bp, Artificial
  probe
  misc_feature (1)..(25): SEQ ID NO: 6707; WAN024BZH_at; Start 37; Stop 61
tttattaaagagttatcacttttca

SEQ ID NO: 100466 - DNA, 25 bp, Artificial
  probe
  misc_feature (1)..(25): SEQ ID NO: 6707; WAN024BZH_at; Start 32; Stop 56
aagagtttattaaagagttatcact

SEQ ID NO: 100467 - DNA, 25 bp, Artificial
  probe
  misc_feature (1)..(25): SEQ ID NO: 6707; WAN024BZH_at; Start 31; Stop 55
caagagtttattaaagagttatcac

SEQ ID NO: 100468 - DNA, 25 bp, Artificial
  probe
  misc_feature (1)..(25): SEQ ID NO: 6707; WAN024BZH_at; Start 33; Stop 57
agagtttattaaagagttatcactt

SEQ ID NO: 100469 - DNA, 25 bp, Artificial
  probe
  misc_feature (1)..(25): SEQ ID NO: 6707; WAN024BZH_at; Start 59; Stop 83
tcaacttttctaagcttatgcagtt

SEQ ID NO: 100470 - DNA, 25 bp, Artificial
  probe
  misc_feature (1)..(25): SEQ ID NO: 6707; WAN024BZH_at; Start 39; Stop 63
tattaaagagttatcacttttcaac

SEQ ID NO: 100471 - DNA, 25 bp, Artificial
  probe
  misc_feature (1)..(25): SEQ ID NO: 6707; WAN024BZH_at; Start 54; Stop 78
acttttcaacttttctaagcttatg

SEQ ID NO: 100472 - DNA, 25 bp, Artificial
  probe
  misc_feature (1)..(25): SEQ ID NO: 6707; WAN024BZH_at; Start 38; Stop 62
ttattaaagagttatcacttttcaa

SEQ ID NO: 100473 - DNA, 25 bp, Artificial
  probe
  misc_feature (1)..(25): SEQ ID NO: 6707; WAN024BZH_at; Start 49; Stop 73
ttatcacttttcaacttttctaagc

SEQ ID NO: 100474 - DNA, 25 bp, Artificial
  probe
  misc_feature (1)..(25): SEQ ID NO: 6707; WAN024BZH_at; Start 51; Stop 75
atcacttttcaacttttctaagctt

SEQ ID NO: 100475 - DNA, 25 bp, Artificial
  probe
  misc_feature (1)..(25): SEQ ID NO: 6707; WAN024BZH_at; Start 56; Stop 80
ttttcaacttttctaagcttatgca

SEQ ID NO: 100476 - DNA, 25 bp, Artificial
  probe
  misc_feature (1)..(25): SEQ ID NO: 6707; WAN024BZH_at; Start 40; Stop 64
attaaagagttatcacttttcaact

SEQ ID NO: 100477 - DNA, 25 bp, Artificial
  probe
  misc_feature (1)..(25): SEQ ID NO: 6707; WAN024BZH_at; Start 58; Stop 82
ttcaacttttctaagcttatgcagt

SEQ ID NO: 100478 - DNA, 25 bp, Artificial
  probe
  misc_feature (1)..(25): SEQ ID NO: 6707; WAN024BZH_at; Start 2; Stop 26
tgcagtggacaaaatatcttttaac

SEQ ID NO: 100479 - DNA, 25 bp, Artificial
  probe
  misc_feature (1)..(25): SEQ ID NO: 6707; WAN024BZH_at; Start 3; Stop 27
gcagtggacaaaatatcttttaaca

SEQ ID NO: 100480 - DNA, 25 bp, Artificial
  probe
  misc_feature (1)..(25): SEQ ID NO: 6707; WAN024BZH_at; Start 52; Stop 76
tcacttttcaacttttctaagctta

SEQ ID NO: 100481 - DNA, 25 bp, Artificial
  probe
  misc_feature (1)..(25): SEQ ID NO: 6707; WAN024BZH_at; Start 60; Stop 84
caacttttctaagcttatgcagttg

SEQ ID NO: 100482 - DNA, 25 bp, Artificial
  probe
  misc_feature (1)..(25): SEQ ID NO: 6707; WAN024BZH_at; Start 46; Stop 70
gagttatcacttttcaacttttcta

SEQ ID NO: 100483 - DNA, 25 bp, Artificial
  probe
  misc_feature (1)..(25): SEQ ID NO: 6707; WAN024BZH_at; Start 53; Stop 77
cacttttcaacttttctaagcttat

SEQ ID NO: 100484 - DNA, 25 bp, Artificial
  probe
  misc_feature (1)..(25): SEQ ID NO: 6707; WAN024BZH_at; Start 4; Stop 28
cagtggacaaaatatcttttaacaa

SEQ ID NO: 100485 - DNA, 25 bp, Artificial
  probe
  misc_feature (1)..(25): SEQ ID NO: 6707; WAN024BZH_at; Start 55; Stop 79
cttttcaacttttctaagcttatgc

SEQ ID NO: 100486 - DNA, 25 bp, Artificial
  probe
  misc_feature (1)..(25): SEQ ID NO: 6707; WAN024BZH_at; Start 30; Stop 54
ccaagagtttattaaagagttatca

SEQ ID NO: 100487 - DNA, 25 bp, Artificial
  probe
  misc_feature (1)..(25): SEQ ID NO: 6707; WAN024BZH_at; Start 1; Stop 25
atgcagtggacaaaatatcttttaa

SEQ ID NO: 100488 - DNA, 25 bp, Artificial
  probe
  misc_feature (1)..(25): SEQ ID NO: 6707; WAN024BZH_at; Start 45; Stop 69
agagttatcacttttcaacttttct

SEQ ID NO: 100489 - DNA, 25 bp, Artificial
  probe
  misc_feature (1)..(25): SEQ ID NO: 6707; WAN024BZH_at; Start 57; Stop 81
tttcaacttttctaagcttatgcag

SEQ ID NO: 100490 - DNA, 25 bp, Artificial
  probe
  misc_feature (1)..(25): SEQ ID NO: 7173; WAN024BZI_at; Start 16; Stop 40
tatgtaggaaccgacctctttctac

SEQ ID NO: 100491 - DNA, 25 bp, Artificial
  probe
  misc_feature (1)..(25): SEQ ID NO: 7173; WAN024BZI_at; Start 57; Stop 81
caatcgtgtccatctttttcttttt

SEQ ID NO: 100492 - DNA, 25 bp, Artificial
  probe
  misc_feature (1)..(25): SEQ ID NO: 7173; WAN024BZI_at; Start 40; Stop 64
ccagggaaagatgaatgcaatcgtg

SEQ ID NO: 100493 - DNA, 25 bp, Artificial
  probe
  misc_feature (1)..(25): SEQ ID NO: 7173; WAN024BZI_at; Start 44; Stop 68
ggaaagatgaatgcaatcgtgtcca

SEQ ID NO: 100494 - DNA, 25 bp, Artificial
  probe
  misc_feature (1)..(25): SEQ ID NO: 7173; WAN024BZI_at; Start 56; Stop 80
gcaatcgtgtccatctttttctttt

SEQ ID NO: 100495 - DNA, 25 bp, Artificial
  probe
  misc_feature (1)..(25): SEQ ID NO: 7173; WAN024BZI_at; Start 45; Stop 69
gaaagatgaatgcaatcgtgtccat

SEQ ID NO: 100496 - DNA, 25 bp, Artificial
  probe
  misc_feature (1)..(25): SEQ ID NO: 7173; WAN024BZI_at; Start 50; Stop 74
atgaatgcaatcgtgtccatctttt

SEQ ID NO: 100497 - DNA, 25 bp, Artificial
  probe
  misc_feature (1)..(25): SEQ ID NO: 7173; WAN024BZI_at; Start 18; Stop 42
tgtaggaaccgacctctttctacca

SEQ ID NO: 100498 - DNA, 25 bp, Artificial
  probe
  misc_feature (1)..(25): SEQ ID NO: 7173; WAN024BZI_at; Start 54; Stop 78
atgcaatcgtgtccatctttttctt

SEQ ID NO: 100499 - DNA, 25 bp, Artificial
  probe
  misc_feature (1)..(25): SEQ ID NO: 7173; WAN024BZI_at; Start 34; Stop 58
tttctaccagggaaagatgaatgca

SEQ ID NO: 100500 - DNA, 25 bp, Artificial
  probe
  misc_feature (1)..(25): SEQ ID NO: 7173; WAN024BZI_at; Start 48; Stop 72
agatgaatgcaatcgtgtccatctt

SEQ ID NO: 100501 - DNA, 25 bp, Artificial
  probe
  misc_feature (1)..(25): SEQ ID NO: 7173; WAN024BZI_at; Start 38; Stop 62
taccagggaaagatgaatgcaatcg

SEQ ID NO: 100502 - DNA, 25 bp, Artificial
  probe
  misc_feature (1)..(25): SEQ ID NO: 7173; WAN024BZI_at; Start 52; Stop 76
gaatgcaatcgtgtccatctttttc

SEQ ID NO: 100503 - DNA, 25 bp, Artificial
  probe
  misc_feature (1)..(25): SEQ ID NO: 7173; WAN024BZI_at; Start 28; Stop 52
gacctctttctaccagggaaagatg

SEQ ID NO: 100504 - DNA, 25 bp, Artificial
  probe
  misc_feature (1)..(25): SEQ ID NO: 7173; WAN024BZI_at; Start 41; Stop 65
cagggaaagatgaatgcaatcgtgt

SEQ ID NO: 100505 - DNA, 25 bp, Artificial
  probe
  misc_feature (1)..(25): SEQ ID NO: 7173; WAN024BZI_at; Start 55; Stop 79
tgcaatcgtgtccatctttttcttt

SEQ ID NO: 100506 - DNA, 25 bp, Artificial
  probe
  misc_feature (1)..(25): SEQ ID NO: 7173; WAN024BZI_at; Start 53; Stop 77
aatgcaatcgtgtccatctttttct

SEQ ID NO: 100507 - DNA, 25 bp, Artificial
  probe
  misc_feature (1)..(25): SEQ ID NO: 7173; WAN024BZI_at; Start 43; Stop 67
gggaaagatgaatgcaatcgtgtcc

SEQ ID NO: 100508 - DNA, 25 bp, Artificial
  probe
  misc_feature (1)..(25): SEQ ID NO: 7173; WAN024BZI_at; Start 63; Stop 87
tgtccatctttttctttttatggta

SEQ ID NO: 100509 - DNA, 25 bp, Artificial
  probe
  misc_feature (1)..(25): SEQ ID NO: 7173; WAN024BZI_at; Start 42; Stop 66
agggaaagatgaatgcaatcgtgtc

SEQ ID NO: 100510 - DNA, 25 bp, Artificial
  probe
  misc_feature (1)..(25): SEQ ID NO: 7173; WAN024BZI_at; Start 27; Stop 51
cgacctctttctaccagggaaagat

SEQ ID NO: 100511 - DNA, 25 bp, Artificial
  probe
  misc_feature (1)..(25): SEQ ID NO: 7173; WAN024BZI_at; Start 46; Stop 70
aaagatgaatgcaatcgtgtccatc

SEQ ID NO: 100512 - DNA, 25 bp, Artificial
  probe
  misc_feature (1)..(25): SEQ ID NO: 7173; WAN024BZI_at; Start 33; Stop 57
ctttctaccagggaaagatgaatgc

SEQ ID NO: 100513 - DNA, 25 bp, Artificial
  probe
  misc_feature (1)..(25): SEQ ID NO: 7173; WAN024BZI_at; Start 39; Stop 63
accagggaaagatgaatgcaatcgt

SEQ ID NO: 100514 - DNA, 25 bp, Artificial
  probe
  misc_feature (1)..(25): SEQ ID NO: 7173; WAN024BZI_at; Start 31; Stop 55
ctctttctaccagggaaagatgaat

SEQ ID NO: 100515 - DNA, 25 bp, Artificial
  probe
  misc_feature (1)..(25): SEQ ID NO: 7173; WAN024BZI_at; Start 61; Stop 85
cgtgtccatctttttctttttatgg

SEQ ID NO: 100516 - DNA, 25 bp, Artificial
  probe
  misc_feature (1)..(25): SEQ ID NO: 7173; WAN024BZI_at; Start 30; Stop 54
cctctttctaccagggaaagatgaa

SEQ ID NO: 100517 - DNA, 25 bp, Artificial
  probe
  misc_feature (1)..(25): SEQ ID NO: 7173; WAN024BZI_at; Start 37; Stop 61
ctaccagggaaagatgaatgcaatc

SEQ ID NO: 100518 - DNA, 25 bp, Artificial
  probe
  misc_feature (1)..(25): SEQ ID NO: 7173; WAN024BZI_at; Start 49; Stop 73
gatgaatgcaatcgtgtccatcttt

SEQ ID NO: 100519 - DNA, 25 bp, Artificial
  probe
  misc_feature (1)..(25): SEQ ID NO: 7173; WAN024BZI_at; Start 35; Stop 59
ttctaccagggaaagatgaatgcaa

SEQ ID NO: 100520 - DNA, 25 bp, Artificial
  probe
  misc_feature (1)..(25): SEQ ID NO: 7173; WAN024BZI_at; Start 29; Stop 53
acctctttctaccagggaaagatga

SEQ ID NO: 100521 - DNA, 25 bp, Artificial
  probe
  misc_feature (1)..(25): SEQ ID NO: 7173; WAN024BZI_at; Start 36; Stop 60
tctaccagggaaagatgaatgcaat

SEQ ID NO: 100522 - DNA, 25 bp, Artificial
  probe
  misc_feature (1)..(25): SEQ ID NO: 7173; WAN024BZI_at; Start 51; Stop 75
tgaatgcaatcgtgtccatcttttt

SEQ ID NO: 100523 - DNA, 25 bp, Artificial
  probe
  misc_feature (1)..(25): SEQ ID NO: 7173; WAN024BZI_at; Start 47; Stop 71
aagatgaatgcaatcgtgtccatct

SEQ ID NO: 100524 - DNA, 25 bp, Artificial
  probe
  misc_feature (1)..(25): SEQ ID NO: 6627; WAN024BZJ_at; Start 35; Stop 59
cattcaagagtaaggctacacctga

SEQ ID NO: 100525 - DNA, 25 bp, Artificial
  probe
  misc_feature (1)..(25): SEQ ID NO: 6627; WAN024BZJ_at; Start 83; Stop 107
cattaagagttgtagcagctgtgtt

SEQ ID NO: 100526 - DNA, 25 bp, Artificial
  probe
  misc_feature (1)..(25): SEQ ID NO: 6627; WAN024BZJ_at; Start 161; Stop 185
caagaccgacgataccactaattaa

SEQ ID NO: 100527 - DNA, 25 bp, Artificial
  probe
  misc_feature (1)..(25): SEQ ID NO: 6627; WAN024BZJ_at; Start 105; Stop 129
gtttaccgctattcccaacaagaca

SEQ ID NO: 100528 - DNA, 25 bp, Artificial
  probe
  misc_feature (1)..(25): SEQ ID NO: 6627; WAN024BZJ_at; Start 110; Stop 134
ccgctattcccaacaagacaaaagg

SEQ ID NO: 100529 - DNA, 25 bp, Artificial
  probe
  misc_feature (1)..(25): SEQ ID NO: 6627; WAN024BZJ_at; Start 66; Stop 90
ccctgcagtagctcctccattaaga

SEQ ID NO: 100530 - DNA, 25 bp, Artificial
  probe
  misc_feature (1)..(25): SEQ ID NO: 6627; WAN024BZJ_at; Start 164; Stop 188
gaccgacgataccactaattaaagc

SEQ ID NO: 100531 - DNA, 25 bp, Artificial
  probe
  misc_feature (1)..(25): SEQ ID NO: 6627; WAN024BZJ_at; Start 57; Stop 81
tgaaaaagcccctgcagtagctcct

SEQ ID NO: 100532 - DNA, 25 bp, Artificial
  probe
  misc_feature (1)..(25): SEQ ID NO: 6627; WAN024BZJ_at; Start 11; Stop 35
gaacaagatttgcaatcttcaaggc

SEQ ID NO: 100533 - DNA, 25 bp, Artificial
  probe
  misc_feature (1)..(25): SEQ ID NO: 6627; WAN024BZJ_at; Start 42; Stop 66
gagtaaggctacacctgaaaaagcc

SEQ ID NO: 100534 - DNA, 25 bp, Artificial
  probe
  misc_feature (1)..(25): SEQ ID NO: 6627; WAN024BZJ_at; Start 80; Stop 104
ctccattaagagttgtagcagctgt

SEQ ID NO: 100535 - DNA, 25 bp, Artificial
  probe
  misc_feature (1)..(25): SEQ ID NO: 6627; WAN024BZJ_at; Start 38; Stop 62
tcaagagtaaggctacacctgaaaa

SEQ ID NO: 100536 - DNA, 25 bp, Artificial
  probe
  misc_feature (1)..(25): SEQ ID NO: 6627; WAN024BZJ_at; Start 17; Stop 41
gatttgcaatcttcaaggcattcaa

SEQ ID NO: 100537 - DNA, 25 bp, Artificial
  probe
  misc_feature (1)..(25): SEQ ID NO: 6627; WAN024BZJ_at; Start 76; Stop 100
gctcctccattaagagttgtagcag

SEQ ID NO: 100538 - DNA, 25 bp, Artificial
  probe
  misc_feature (1)..(25): SEQ ID NO: 6627; WAN024BZJ_at; Start 26; Stop 50
tcttcaaggcattcaagagtaaggc

SEQ ID NO: 100539 - DNA, 25 bp, Artificial
  probe
  misc_feature (1)..(25): SEQ ID NO: 6627; WAN024BZJ_at; Start 123; Stop 147
caagacaaaaggaccaataagaagt

SEQ ID NO: 100540 - DNA, 25 bp, Artificial
  probe
  misc_feature (1)..(25): SEQ ID NO: 6627; WAN024BZJ_at; Start 119; Stop 143
ccaacaagacaaaaggaccaataag

SEQ ID NO: 100541 - DNA, 25 bp, Artificial
  probe
  misc_feature (1)..(25): SEQ ID NO: 6627; WAN024BZJ_at; Start 2; Stop 26
tgataccaagaacaagatttgcaat

SEQ ID NO: 100542 - DNA, 25 bp, Artificial
  probe
  misc_feature (1)..(25): SEQ ID NO: 6627; WAN024BZJ_at; Start 114; Stop 138
tattcccaacaagacaaaaggacca

SEQ ID NO: 100543 - DNA, 25 bp, Artificial
  probe
  misc_feature (1)..(25): SEQ ID NO: 6627; WAN024BZJ_at; Start 98; Stop 122
cagctgtgtttaccgctattcccaa

SEQ ID NO: 100544 - DNA, 25 bp, Artificial
  probe
  misc_feature (1)..(25): SEQ ID NO: 6627; WAN024BZJ_at; Start 73; Stop 97
gtagctcctccattaagagttgtag

SEQ ID NO: 100545 - DNA, 25 bp, Artificial
  probe
  misc_feature (1)..(25): SEQ ID NO: 6627; WAN024BZJ_at; Start 33; Stop 57
ggcattcaagagtaaggctacacct

SEQ ID NO: 100546 - DNA, 25 bp, Artificial
  probe
  misc_feature (1)..(25): SEQ ID NO: 6627; WAN024BZJ_at; Start 30; Stop 54
caaggcattcaagagtaaggctaca

SEQ ID NO: 100547 - DNA, 25 bp, Artificial
  probe
  misc_feature (1)..(25): SEQ ID NO: 6627; WAN024BZJ_at; Start 89; Stop 113
gagttgtagcagctgtgtttaccgc

SEQ ID NO: 100548 - DNA, 25 bp, Artificial
  probe
  misc_feature (1)..(25): SEQ ID NO: 6627; WAN024BZJ_at; Start 49; Stop 73
gctacacctgaaaaagcccctgcag

SEQ ID NO: 100549 - DNA, 25 bp, Artificial
  probe
  misc_feature (1)..(25): SEQ ID NO: 6627; WAN024BZJ_at; Start 103; Stop 127
gtgtttaccgctattcccaacaaga

SEQ ID NO: 100550 - DNA, 25 bp, Artificial
  probe
  misc_feature (1)..(25): SEQ ID NO: 6627; WAN024BZJ_at; Start 46; Stop 70
aaggctacacctgaaaaagcccctg

SEQ ID NO: 100551 - DNA, 25 bp, Artificial
  probe
  misc_feature (1)..(25): SEQ ID NO: 6627; WAN024BZJ_at; Start 21; Stop 45
tgcaatcttcaaggcattcaagagt

SEQ ID NO: 100552 - DNA, 25 bp, Artificial
  probe
  misc_feature (1)..(25): SEQ ID NO: 6627; WAN024BZJ_at; Start 171; Stop 195
gataccactaattaaagcaagtctt

SEQ ID NO: 100553 - DNA, 25 bp, Artificial
  probe
  misc_feature (1)..(25): SEQ ID NO: 6627; WAN024BZJ_at; Start 95; Stop 119
tagcagctgtgtttaccgctattcc

SEQ ID NO: 100554 - DNA, 25 bp, Artificial
  probe
  misc_feature (1)..(25): SEQ ID NO: 6627; WAN024BZJ_at; Start 69; Stop 93
tgcagtagctcctccattaagagtt

SEQ ID NO: 100555 - DNA, 25 bp, Artificial
  probe
  misc_feature (1)..(25): SEQ ID NO: 6627; WAN024BZJ_at; Start 167; Stop 191
cgacgataccactaattaaagcaag

SEQ ID NO: 100556 - DNA, 25 bp, Artificial
  probe
  misc_feature (1)..(25): SEQ ID NO: 6627; WAN024BZJ_at; Start 51; Stop 75
tacacctgaaaaagcccctgcagta

SEQ ID NO: 100557 - DNA, 25 bp, Artificial
  probe
  misc_feature (1)..(25): SEQ ID NO: 6627; WAN024BZJ_at; Start 149; Stop 173
aaattcctcccacaagaccgacgat

SEQ ID NO: 100558 - DNA, 25 bp, Artificial
  probe
  misc_feature (1)..(25): SEQ ID NO: 7549; WAN024BZK_at; Start 164; Stop 188
tatatatgcaaatgctcattatacc

SEQ ID NO: 100559 - DNA, 25 bp, Artificial
  probe
  misc_feature (1)..(25): SEQ ID NO: 7549; WAN024BZK_at; Start 128; Stop 152
taatacgatacattctcaagcagta

SEQ ID NO: 100560 - DNA, 25 bp, Artificial
  probe
  misc_feature (1)..(25): SEQ ID NO: 7549; WAN024BZK_at; Start 138; Stop 162
cattctcaagcagtataaaataatt

SEQ ID NO: 100561 - DNA, 25 bp, Artificial
  probe
  misc_feature (1)..(25): SEQ ID NO: 7549; WAN024BZK_at; Start 103; Stop 127
agcaagattgtttcaatattattga

SEQ ID NO: 100562 - DNA, 25 bp, Artificial
  probe
  misc_feature (1)..(25): SEQ ID NO: 7549; WAN024BZK_at; Start 194; Stop 218
ttttaaacatactaagcctccttgc

SEQ ID NO: 100563 - DNA, 25 bp, Artificial
  probe
  misc_feature (1)..(25): SEQ ID NO: 7549; WAN024BZK_at; Start 78; Stop 102
caataacattaagcatataaccgtt

SEQ ID NO: 100564 - DNA, 25 bp, Artificial
  probe
  misc_feature (1)..(25): SEQ ID NO: 7549; WAN024BZK_at; Start 168; Stop 192
tatgcaaatgctcattatacctatt

SEQ ID NO: 100565 - DNA, 25 bp, Artificial
  probe
  misc_feature (1)..(25): SEQ ID NO: 7549; WAN024BZK_at; Start 3; Stop 27
gcacctcctttatattctacatttt

SEQ ID NO: 100566 - DNA, 25 bp, Artificial
  probe
  misc_feature (1)..(25): SEQ ID NO: 7549; WAN024BZK_at; Start 201; Stop 225
catactaagcctccttgctaaataa

SEQ ID NO: 100567 - DNA, 25 bp, Artificial
  probe
  misc_feature (1)..(25): SEQ ID NO: 7549; WAN024BZK_at; Start 199; Stop 223
aacatactaagcctccttgctaaat

SEQ ID NO: 100568 - DNA, 25 bp, Artificial
  probe
  misc_feature (1)..(25): SEQ ID NO: 7549; WAN024BZK_at; Start 93; Stop 117
tataaccgttagcaagattgtttca

SEQ ID NO: 100569 - DNA, 25 bp, Artificial
  probe
  misc_feature (1)..(25): SEQ ID NO: 7549; WAN024BZK_at; Start 90; Stop 114
gcatataaccgttagcaagattgtt

SEQ ID NO: 100570 - DNA, 25 bp, Artificial
  probe
  misc_feature (1)..(25): SEQ ID NO: 7549; WAN024BZK_at; Start 86; Stop 110
ttaagcatataaccgttagcaagat

SEQ ID NO: 100571 - DNA, 25 bp, Artificial
  probe
  misc_feature (1)..(25): SEQ ID NO: 7549; WAN024BZK_at; Start 47; Stop 71
tatctttatcaaataaacgtcttaa

SEQ ID NO: 100572 - DNA, 25 bp, Artificial
  probe
  misc_feature (1)..(25): SEQ ID NO: 7549; WAN024BZK_at; Start 2; Stop 26
tgcacctcctttatattctacattt

SEQ ID NO: 100573 - DNA, 25 bp, Artificial
  probe
  misc_feature (1)..(25): SEQ ID NO: 7549; WAN024BZK_at; Start 43; Stop 67
tacttatctttatcaaataaacgtc

SEQ ID NO: 100574 - DNA, 25 bp, Artificial
  probe
  misc_feature (1)..(25): SEQ ID NO: 7549; WAN024BZK_at; Start 158; Stop 182
taattatatatatgcaaatgctcat

SEQ ID NO: 100575 - DNA, 25 bp, Artificial
  probe
  misc_feature (1)..(25): SEQ ID NO: 7549; WAN024BZK_at; Start 121; Stop 145
ttattgataatacgatacattctca

SEQ ID NO: 100576 - DNA, 25 bp, Artificial
  probe
  misc_feature (1)..(25): SEQ ID NO: 7549; WAN024BZK_at; Start 140; Stop 164
ttctcaagcagtataaaataattat

SEQ ID NO: 100577 - DNA, 25 bp, Artificial
  probe
  misc_feature (1)..(25): SEQ ID NO: 7549; WAN024BZK_at; Start 82; Stop 106
aacattaagcatataaccgttagca

SEQ ID NO: 100578 - DNA, 25 bp, Artificial
  probe
  misc_feature (1)..(25): SEQ ID NO: 7549; WAN024BZK_at; Start 88; Stop 112
aagcatataaccgttagcaagattg

SEQ ID NO: 100579 - DNA, 25 bp, Artificial
  probe
  misc_feature (1)..(25): SEQ ID NO: 7549; WAN024BZK_at; Start 195; Stop 219
tttaaacatactaagcctccttgct

SEQ ID NO: 100580 - DNA, 25 bp, Artificial
  probe
  misc_feature (1)..(25): SEQ ID NO: 7549; WAN024BZK_at; Start 133; Stop 157
cgatacattctcaagcagtataaaa

SEQ ID NO: 100581 - DNA, 25 bp, Artificial
  probe
  misc_feature (1)..(25): SEQ ID NO: 7549; WAN024BZK_at; Start 197; Stop 221
taaacatactaagcctccttgctaa

SEQ ID NO: 100582 - DNA, 25 bp, Artificial
  probe
  misc_feature (1)..(25): SEQ ID NO: 7549; WAN024BZK_at; Start 131; Stop 155
tacgatacattctcaagcagtataa

SEQ ID NO: 100583 - DNA, 25 bp, Artificial
  probe
  misc_feature (1)..(25): SEQ ID NO: 7549; WAN024BZK_at; Start 171; Stop 195
gcaaatgctcattatacctattttt

SEQ ID NO: 100584 - DNA, 25 bp, Artificial
  probe
  misc_feature (1)..(25): SEQ ID NO: 7549; WAN024BZK_at; Start 98; Stop 122
ccgttagcaagattgtttcaatatt

SEQ ID NO: 100585 - DNA, 25 bp, Artificial
  probe
  misc_feature (1)..(25): SEQ ID NO: 7549; WAN024BZK_at; Start 76; Stop 100
aacaataacattaagcatataaccg

SEQ ID NO: 100586 - DNA, 25 bp, Artificial
  probe
  misc_feature (1)..(25): SEQ ID NO: 7549; WAN024BZK_at; Start 126; Stop 150
gataatacgatacattctcaagcag

SEQ ID NO: 100587 - DNA, 25 bp, Artificial
  probe
  misc_feature (1)..(25): SEQ ID NO: 7549; WAN024BZK_at; Start 96; Stop 120
aaccgttagcaagattgtttcaata

SEQ ID NO: 100588 - DNA, 25 bp, Artificial
  probe
  misc_feature (1)..(25): SEQ ID NO: 7549; WAN024BZK_at; Start 95; Stop 119
taaccgttagcaagattgtttcaat

SEQ ID NO: 100589 - DNA, 25 bp, Artificial
  probe
  misc_feature (1)..(25): SEQ ID NO: 7549; WAN024BZK_at; Start 91; Stop 115
catataaccgttagcaagattgttt

SEQ ID NO: 100590 - DNA, 25 bp, Artificial
  probe
  misc_feature (1)..(25): SEQ ID NO: 7549; WAN024BZK_at; Start 84; Stop 108
cattaagcatataaccgttagcaag

SEQ ID NO: 100591 - DNA, 25 bp, Artificial
  probe
  misc_feature (1)..(25): SEQ ID NO: 7549; WAN024BZK_at; Start 33; Stop 57
aacatctatttacttatctttatca

SEQ ID NO: 100592 - DNA, 25 bp, Artificial
  probe
  misc_feature (1)..(25): SEQ ID NO: 7293; WAN024BZL_at; Start 157; Stop 181
tctattgtgatggaagttgttttaa

SEQ ID NO: 100593 - DNA, 25 bp, Artificial
  probe
  misc_feature (1)..(25): SEQ ID NO: 7293; WAN024BZL_at; Start 232; Stop 256
aagtgtgtcattgccaggttgagaa

SEQ ID NO: 100594 - DNA, 25 bp, Artificial
  probe
  misc_feature (1)..(25): SEQ ID NO: 7293; WAN024BZL_at; Start 227; Stop 251
tatacaagtgtgtcattgccaggtt

SEQ ID NO: 100595 - DNA, 25 bp, Artificial
  probe
  misc_feature (1)..(25): SEQ ID NO: 7293; WAN024BZL_at; Start 2; Stop 26
tggaatttccgactttattgataaa

SEQ ID NO: 100596 - DNA, 25 bp, Artificial
  probe
  misc_feature (1)..(25): SEQ ID NO: 7293; WAN024BZL_at; Start 50; Stop 74
taaagatagtaatgagtattggtgg

SEQ ID NO: 100597 - DNA, 25 bp, Artificial
  probe
  misc_feature (1)..(25): SEQ ID NO: 7293; WAN024BZL_at; Start 230; Stop 254
acaagtgtgtcattgccaggttgag

SEQ ID NO: 100598 - DNA, 25 bp, Artificial
  probe
  misc_feature (1)..(25): SEQ ID NO: 7293; WAN024BZL_at; Start 14; Stop 38
ctttattgataaaacagcatgtaat

SEQ ID NO: 100599 - DNA, 25 bp, Artificial
  probe
  misc_feature (1)..(25): SEQ ID NO: 7293; WAN024BZL_at; Start 222; Stop 246
tattgtatacaagtgtgtcattgcc

SEQ ID NO: 100600 - DNA, 25 bp, Artificial
  probe
  misc_feature (1)..(25): SEQ ID NO: 7293; WAN024BZL_at; Start 25; Stop 49
aaacagcatgtaataaaaggcattt

SEQ ID NO: 100601 - DNA, 25 bp, Artificial
  probe
  misc_feature (1)..(25): SEQ ID NO: 7293; WAN024BZL_at; Start 23; Stop 47
taaaacagcatgtaataaaaggcat

SEQ ID NO: 100602 - DNA, 25 bp, Artificial
  probe
  misc_feature (1)..(25): SEQ ID NO: 7293; WAN024BZL_at; Start 237; Stop 261
tgtcattgccaggttgagaagatag

SEQ ID NO: 100603 - DNA, 25 bp, Artificial
  probe
  misc_feature (1)..(25): SEQ ID NO: 7293; WAN024BZL_at; Start 186; Stop 210
tactaggatagttaatagtaatact

SEQ ID NO: 100604 - DNA, 25 bp, Artificial
  probe
  misc_feature (1)..(25): SEQ ID NO: 7293; WAN024BZL_at; Start 217; Stop 241
tactatattgtatacaagtgtgtca

SEQ ID NO: 100605 - DNA, 25 bp, Artificial
  probe
  misc_feature (1)..(25): SEQ ID NO: 7293; WAN024BZL_at; Start 21; Stop 45
gataaaacagcatgtaataaaaggc

SEQ ID NO: 100606 - DNA, 25 bp, Artificial
  probe
  misc_feature (1)..(25): SEQ ID NO: 7293; WAN024BZL_at; Start 235; Stop 259
tgtgtcattgccaggttgagaagat

SEQ ID NO: 100607 - DNA, 25 bp, Artificial
  probe
  misc_feature (1)..(25): SEQ ID NO: 7293; WAN024BZL_at; Start 116; Stop 140
tcaaatattgtcgttctataaaaaa

SEQ ID NO: 100608 - DNA, 25 bp, Artificial
  probe
  misc_feature (1)..(25): SEQ ID NO: 7293; WAN024BZL_at; Start 147; Stop 171
gataaaaatatctattgtgatggaa

SEQ ID NO: 100609 - DNA, 25 bp, Artificial
  probe
  misc_feature (1)..(25): SEQ ID NO: 7293; WAN024BZL_at; Start 203; Stop 227
gtaatactatactatactatattgt

SEQ ID NO: 100610 - DNA, 25 bp, Artificial
  probe
  misc_feature (1)..(25): SEQ ID NO: 7293; WAN024BZL_at; Start 10; Stop 34
ccgactttattgataaaacagcatg

SEQ ID NO: 100611 - DNA, 25 bp, Artificial
  probe
  misc_feature (1)..(25): SEQ ID NO: 7293; WAN024BZL_at; Start 12; Stop 36
gactttattgataaaacagcatgta

SEQ ID NO: 100612 - DNA, 25 bp, Artificial
  probe
  misc_feature (1)..(25): SEQ ID NO: 7293; WAN024BZL_at; Start 151; Stop 175
aaaatatctattgtgatggaagttg

SEQ ID NO: 100613 - DNA, 25 bp, Artificial
  probe
  misc_feature (1)..(25): SEQ ID NO: 7293; WAN024BZL_at; Start 114; Stop 138
tatcaaatattgtcgttctataaaa

SEQ ID NO: 100614 - DNA, 25 bp, Artificial
  probe
  misc_feature (1)..(25): SEQ ID NO: 7293; WAN024BZL_at; Start 64; Stop 88
agtattggtggagttttatggctta

SEQ ID NO: 100615 - DNA, 25 bp, Artificial
  probe
  misc_feature (1)..(25): SEQ ID NO: 7293; WAN024BZL_at; Start 7; Stop 31
tttccgactttattgataaaacagc

SEQ ID NO: 100616 - DNA, 25 bp, Artificial
  probe
  misc_feature (1)..(25): SEQ ID NO: 7293; WAN024BZL_at; Start 164; Stop 188
tgatggaagttgttttaatttatac

SEQ ID NO: 100617 - DNA, 25 bp, Artificial
  probe
  misc_feature (1)..(25): SEQ ID NO: 7293; WAN024BZL_at; Start 66; Stop 90
tattggtggagttttatggcttatt

SEQ ID NO: 100618 - DNA, 25 bp, Artificial
  probe
  misc_feature (1)..(25): SEQ ID NO: 7293; WAN024BZL_at; Start 62; Stop 86
tgagtattggtggagttttatggct

SEQ ID NO: 100619 - DNA, 25 bp, Artificial
  probe
  misc_feature (1)..(25): SEQ ID NO: 7293; WAN024BZL_at; Start 229; Stop 253
tacaagtgtgtcattgccaggttga

SEQ ID NO: 100620 - DNA, 25 bp, Artificial
  probe
  misc_feature (1)..(25): SEQ ID NO: 7293; WAN024BZL_at; Start 28; Stop 52
cagcatgtaataaaaggcattttaa

SEQ ID NO: 100621 - DNA, 25 bp, Artificial
  probe
  misc_feature (1)..(25): SEQ ID NO: 7293; WAN024BZL_at; Start 226; Stop 250
gtatacaagtgtgtcattgccaggt

SEQ ID NO: 100622 - DNA, 25 bp, Artificial
  probe
  misc_feature (1)..(25): SEQ ID NO: 7293; WAN024BZL_at; Start 225; Stop 249
tgtatacaagtgtgtcattgccagg

SEQ ID NO: 100623 - DNA, 25 bp, Artificial
  probe
  misc_feature (1)..(25): SEQ ID NO: 7293; WAN024BZL_at; Start 231; Stop 255
caagtgtgtcattgccaggttgaga

SEQ ID NO: 100624 - DNA, 25 bp, Artificial
  probe
  misc_feature (1)..(25): SEQ ID NO: 7293; WAN024BZL_at; Start 1; Stop 25
gtggaatttccgactttattgataa

SEQ ID NO: 100625 - DNA, 25 bp, Artificial
  probe
  misc_feature (1)..(25): SEQ ID NO: 7293; WAN024BZL_at; Start 43; Stop 67
ggcattttaaagatagtaatgagta

SEQ ID NO: 100626 - DNA, 25 bp, Artificial
  probe
  misc_feature (1)..(25): SEQ ID NO: 7471; WAN024BZM_at; Start 168; Stop 192
taagctcctcaaagacatagcaagc

SEQ ID NO: 100627 - DNA, 25 bp, Artificial
  probe
  misc_feature (1)..(25): SEQ ID NO: 7471; WAN024BZM_at; Start 227; Stop 251
cccctgagctctggagaaaaagtga

SEQ ID NO: 100628 - DNA, 25 bp, Artificial
  probe
  misc_feature (1)..(25): SEQ ID NO: 7471; WAN024BZM_at; Start 15; Stop 39
tatcaatcatagacaaccaatccgt

SEQ ID NO: 100629 - DNA, 25 bp, Artificial
  probe
  misc_feature (1)..(25): SEQ ID NO: 7471; WAN024BZM_at; Start 153; Stop 177
catagcgacgatagttaagctcctc

SEQ ID NO: 100630 - DNA, 25 bp, Artificial
  probe
  misc_feature (1)..(25): SEQ ID NO: 7471; WAN024BZM_at; Start 352; Stop 376
acggtccttacgagccaacatctga

SEQ ID NO: 100631 - DNA, 25 bp, Artificial
  probe
  misc_feature (1)..(25): SEQ ID NO: 7471; WAN024BZM_at; Start 135; Stop 159
gagcatcgcatttccactcatagcg

SEQ ID NO: 100632 - DNA, 25 bp, Artificial
  probe
  misc_feature (1)..(25): SEQ ID NO: 7471; WAN024BZM_at; Start 318; Stop 342
taccagttgccttgtctatgattgc

SEQ ID NO: 100633 - DNA, 25 bp, Artificial
  probe
  misc_feature (1)..(25): SEQ ID NO: 7471; WAN024BZM_at; Start 291; Stop 315
gcatgagggaaaaagttcccaaagc

SEQ ID NO: 100634 - DNA, 25 bp, Artificial
  probe
  misc_feature (1)..(25): SEQ ID NO: 7471; WAN024BZM_at; Start 91; Stop 115
aataaatcccaaacgttccgctgct

SEQ ID NO: 100635 - DNA, 25 bp, Artificial
  probe
  misc_feature (1)..(25): SEQ ID NO: 7471; WAN024BZM_at; Start 100; Stop 124
caaacgttccgctgctcgtctggat

SEQ ID NO: 100636 - DNA, 25 bp, Artificial
  probe
  misc_feature (1)..(25): SEQ ID NO: 7471; WAN024BZM_at; Start 71; Stop 95
tgacggaaggttccttcataaataa

SEQ ID NO: 100637 - DNA, 25 bp, Artificial
  probe
  misc_feature (1)..(25): SEQ ID NO: 7471; WAN024BZM_at; Start 29; Stop 53
aaccaatccgtatctcttgtacgcc

SEQ ID NO: 100638 - DNA, 25 bp, Artificial
  probe
  misc_feature (1)..(25): SEQ ID NO: 7471; WAN024BZM_at; Start 340; Stop 364
tgcataataaaaacggtccttacga

SEQ ID NO: 100639 - DNA, 25 bp, Artificial
  probe
  misc_feature (1)..(25): SEQ ID NO: 7471; WAN024BZM_at; Start 64; Stop 88
cactgcctgacggaaggttccttca

SEQ ID NO: 100640 - DNA, 25 bp, Artificial
  probe
  misc_feature (1)..(25): SEQ ID NO: 7471; WAN024BZM_at; Start 142; Stop 166
gcatttccactcatagcgacgatag

SEQ ID NO: 100641 - DNA, 25 bp, Artificial
  probe
  misc_feature (1)..(25): SEQ ID NO: 7471; WAN024BZM_at; Start 268; Stop 292
tactcggttattctgatcaattcgc

SEQ ID NO: 100642 - DNA, 25 bp, Artificial
  probe
  misc_feature (1)..(25): SEQ ID NO: 7471; WAN024BZM_at; Start 112; Stop 136
tgctcgtctggatggcaggttaaga

SEQ ID NO: 100643 - DNA, 25 bp, Artificial
  probe
  misc_feature (1)..(25): SEQ ID NO: 7471; WAN024BZM_at; Start 239; Stop 263
ggagaaaaagtgacagctcccactt

SEQ ID NO: 100644 - DNA, 25 bp, Artificial
  probe
  misc_feature (1)..(25): SEQ ID NO: 7471; WAN024BZM_at; Start 192; Stop 216
ccaagagatactgggcttctgttcc

SEQ ID NO: 100645 - DNA, 25 bp, Artificial
  probe
  misc_feature (1)..(25): SEQ ID NO: 7471; WAN024BZM_at; Start 234; Stop 258
gctctggagaaaaagtgacagctcc

SEQ ID NO: 100646 - DNA, 25 bp, Artificial
  probe
  misc_feature (1)..(25): SEQ ID NO: 7471; WAN024BZM_at; Start 250; Stop 274
gacagctcccacttctattactcgg

SEQ ID NO: 100647 - DNA, 25 bp, Artificial
  probe
  misc_feature (1)..(25): SEQ ID NO: 7471; WAN024BZM_at; Start 357; Stop 381
ccttacgagccaacatctgatttaa

SEQ ID NO: 100648 - DNA, 25 bp, Artificial
  probe
  misc_feature (1)..(25): SEQ ID NO: 7471; WAN024BZM_at; Start 159; Stop 183
gacgatagttaagctcctcaaagac

SEQ ID NO: 100649 - DNA, 25 bp, Artificial
  probe
  misc_feature (1)..(25): SEQ ID NO: 7471; WAN024BZM_at; Start 56; Stop 80
ttataaaccactgcctgacggaagg

SEQ ID NO: 100650 - DNA, 25 bp, Artificial
  probe
  misc_feature (1)..(25): SEQ ID NO: 7471; WAN024BZM_at; Start 259; Stop 283
cacttctattactcggttattctga

SEQ ID NO: 100651 - DNA, 25 bp, Artificial
  probe
  misc_feature (1)..(25): SEQ ID NO: 7471; WAN024BZM_at; Start 276; Stop 300
tattctgatcaattcgcatgaggga

SEQ ID NO: 100652 - DNA, 25 bp, Artificial
  probe
  misc_feature (1)..(25): SEQ ID NO: 7471; WAN024BZM_at; Start 307; Stop 331
tcccaaagccttaccagttgccttg

SEQ ID NO: 100653 - DNA, 25 bp, Artificial
  probe
  misc_feature (1)..(25): SEQ ID NO: 7471; WAN024BZM_at; Start 285; Stop 309
caattcgcatgagggaaaaagttcc

SEQ ID NO: 100654 - DNA, 25 bp, Artificial
  probe
  misc_feature (1)..(25): SEQ ID NO: 7471; WAN024BZM_at; Start 203; Stop 227
tgggcttctgttcctatccgtgtcc

SEQ ID NO: 100655 - DNA, 25 bp, Artificial
  probe
  misc_feature (1)..(25): SEQ ID NO: 7471; WAN024BZM_at; Start 3; Stop 27
gaggccagtccttatcaatcataga

SEQ ID NO: 100656 - DNA, 25 bp, Artificial
  probe
  misc_feature (1)..(25): SEQ ID NO: 7471; WAN024BZM_at; Start 183; Stop 207
catagcaagccaagagatactgggc

SEQ ID NO: 100657 - DNA, 25 bp, Artificial
  probe
  misc_feature (1)..(25): SEQ ID NO: 7471; WAN024BZM_at; Start 44; Stop 68
cttgtacgccccttataaaccactg

SEQ ID NO: 100658 - DNA, 25 bp, Artificial
  probe
  misc_feature (1)..(25): SEQ ID NO: 7471; WAN024BZM_at; Start 126; Stop 150
gcaggttaagagcatcgcatttcca

SEQ ID NO: 100659 - DNA, 25 bp, Artificial
  probe
  misc_feature (1)..(25): SEQ ID NO: 7471; WAN024BZM_at; Start 334; Stop 358
tatgattgcataataaaaacggtcc

SEQ ID NO: 100660 - DNA, 25 bp, Artificial
  probe
  misc_feature (1)..(25): SEQ ID NO: 6688; WAN024BZN_at; Start 135; Stop 159
cgggagaatggtgcgcttctgtatc

SEQ ID NO: 100661 - DNA, 25 bp, Artificial
  probe
  misc_feature (1)..(25): SEQ ID NO: 6688; WAN024BZN_at; Start 140; Stop 164
gaatggtgcgcttctgtatcaggtc

SEQ ID NO: 100662 - DNA, 25 bp, Artificial
  probe
  misc_feature (1)..(25): SEQ ID NO: 6688; WAN024BZN_at; Start 144; Stop 168
ggtgcgcttctgtatcaggtccttg

SEQ ID NO: 100663 - DNA, 25 bp, Artificial
  probe
  misc_feature (1)..(25): SEQ ID NO: 6688; WAN024BZN_at; Start 125; Stop 149
tactcttaaccgggagaatggtgcg

SEQ ID NO: 100664 - DNA, 25 bp, Artificial
  probe
  misc_feature (1)..(25): SEQ ID NO: 6688; WAN024BZN_at; Start 126; Stop 150
actcttaaccgggagaatggtgcgc

SEQ ID NO: 100665 - DNA, 25 bp, Artificial
  probe
  misc_feature (1)..(25): SEQ ID NO: 6688; WAN024BZN_at; Start 128; Stop 152
tcttaaccgggagaatggtgcgctt

SEQ ID NO: 100666 - DNA, 25 bp, Artificial
  probe
  misc_feature (1)..(25): SEQ ID NO: 6688; WAN024BZN_at; Start 124; Stop 148
ttactcttaaccgggagaatggtgc

SEQ ID NO: 100667 - DNA, 25 bp, Artificial
  probe
  misc_feature (1)..(25): SEQ ID NO: 6688; WAN024BZN_at; Start 136; Stop 160
gggagaatggtgcgcttctgtatca

SEQ ID NO: 100668 - DNA, 25 bp, Artificial
  probe
  misc_feature (1)..(25): SEQ ID NO: 6688; WAN024BZN_at; Start 142; Stop 166
atggtgcgcttctgtatcaggtcct

SEQ ID NO: 100669 - DNA, 25 bp, Artificial
  probe
  misc_feature (1)..(25): SEQ ID NO: 6688; WAN024BZN_at; Start 137; Stop 161
ggagaatggtgcgcttctgtatcag

SEQ ID NO: 100670 - DNA, 25 bp, Artificial
  probe
  misc_feature (1)..(25): SEQ ID NO: 6688; WAN024BZN_at; Start 133; Stop 157
accgggagaatggtgcgcttctgta

SEQ ID NO: 100671 - DNA, 25 bp, Artificial
  probe
  misc_feature (1)..(25): SEQ ID NO: 6688; WAN024BZN_at; Start 143; Stop 167
tggtgcgcttctgtatcaggtcctt

SEQ ID NO: 100672 - DNA, 25 bp, Artificial
  probe
  misc_feature (1)..(25): SEQ ID NO: 6688; WAN024BZN_at; Start 146; Stop 170
tgcgcttctgtatcaggtccttgaa

SEQ ID NO: 100673 - DNA, 25 bp, Artificial
  probe
  misc_feature (1)..(25): SEQ ID NO: 6688; WAN024BZN_at; Start 139; Stop 163
agaatggtgcgcttctgtatcaggt

SEQ ID NO: 100674 - DNA, 25 bp, Artificial
  probe
  misc_feature (1)..(25): SEQ ID NO: 6688; WAN024BZN_at; Start 141; Stop 165
aatggtgcgcttctgtatcaggtcc

SEQ ID NO: 100675 - DNA, 25 bp, Artificial
  probe
  misc_feature (1)..(25): SEQ ID NO: 6688; WAN024BZN_at; Start 147; Stop 171
gcgcttctgtatcaggtccttgaac

SEQ ID NO: 100676 - DNA, 25 bp, Artificial
  probe
  misc_feature (1)..(25): SEQ ID NO: 6688; WAN024BZN_at; Start 123; Stop 147
cttactcttaaccgggagaatggtg

SEQ ID NO: 100677 - DNA, 25 bp, Artificial
  probe
  misc_feature (1)..(25): SEQ ID NO: 6688; WAN024BZN_at; Start 134; Stop 158
ccgggagaatggtgcgcttctgtat

SEQ ID NO: 100678 - DNA, 25 bp, Artificial
  probe
  misc_feature (1)..(25): SEQ ID NO: 6688; WAN024BZN_at; Start 145; Stop 169
gtgcgcttctgtatcaggtccttga

SEQ ID NO: 100679 - DNA, 25 bp, Artificial
  probe
  misc_feature (1)..(25): SEQ ID NO: 6688; WAN024BZN_at; Start 129; Stop 153
cttaaccgggagaatggtgcgcttc

SEQ ID NO: 100680 - DNA, 25 bp, Artificial
  probe
  misc_feature (1)..(25): SEQ ID NO: 6688; WAN024BZN_at; Start 132; Stop 156
aaccgggagaatggtgcgcttctgt

SEQ ID NO: 100681 - DNA, 25 bp, Artificial
  probe
  misc_feature (1)..(25): SEQ ID NO: 6688; WAN024BZN_at; Start 127; Stop 151
ctcttaaccgggagaatggtgcgct

SEQ ID NO: 100682 - DNA, 25 bp, Artificial
  probe
  misc_feature (1)..(25): SEQ ID NO: 6688; WAN024BZN_at; Start 138; Stop 162
gagaatggtgcgcttctgtatcagg

SEQ ID NO: 100683 - DNA, 25 bp, Artificial
  probe
  misc_feature (1)..(25): SEQ ID NO: 6688; WAN024BZN_at; Start 130; Stop 154
ttaaccgggagaatggtgcgcttct

SEQ ID NO: 100684 - DNA, 25 bp, Artificial
  probe
  misc_feature (1)..(25): SEQ ID NO: 6688; WAN024BZN_at; Start 131; Stop 155
taaccgggagaatggtgcgcttctg

SEQ ID NO: 100685 - DNA, 25 bp, Artificial
  probe
  misc_feature (1)..(25): SEQ ID NO: 7286; WAN024BZO_at; Start 18; Stop 42
atctacaagcctaatcgtgactaag

SEQ ID NO: 100686 - DNA, 25 bp, Artificial
  probe
  misc_feature (1)..(25): SEQ ID NO: 7286; WAN024BZO_at; Start 19; Stop 43
tctacaagcctaatcgtgactaaga

SEQ ID NO: 100687 - DNA, 25 bp, Artificial
  probe
  misc_feature (1)..(25): SEQ ID NO: 7286; WAN024BZO_at; Start 3; Stop 27
gcgttttgaagttctatctacaagc

SEQ ID NO: 100688 - DNA, 25 bp, Artificial
  probe
  misc_feature (1)..(25): SEQ ID NO: 7286; WAN024BZO_at; Start 38; Stop 62
ctaagattgtcttctttgtaaggta

SEQ ID NO: 100689 - DNA, 25 bp, Artificial
  probe
  misc_feature (1)..(25): SEQ ID NO: 7286; WAN024BZO_at; Start 21; Stop 45
tacaagcctaatcgtgactaagatt

SEQ ID NO: 100690 - DNA, 25 bp, Artificial
  probe
  misc_feature (1)..(25): SEQ ID NO: 7286; WAN024BZO_at; Start 17; Stop 41
tatctacaagcctaatcgtgactaa

SEQ ID NO: 100691 - DNA, 25 bp, Artificial
  probe
  misc_feature (1)..(25): SEQ ID NO: 7286; WAN024BZO_at; Start 6; Stop 30
ttttgaagttctatctacaagccta

SEQ ID NO: 100692 - DNA, 25 bp, Artificial
  probe
  misc_feature (1)..(25): SEQ ID NO: 7286; WAN024BZO_at; Start 22; Stop 46
acaagcctaatcgtgactaagattg

SEQ ID NO: 100693 - DNA, 25 bp, Artificial
  probe
  misc_feature (1)..(25): SEQ ID NO: 7286; WAN024BZO_at; Start 14; Stop 38
ttctatctacaagcctaatcgtgac

SEQ ID NO: 100694 - DNA, 25 bp, Artificial
  probe
  misc_feature (1)..(25): SEQ ID NO: 7286; WAN024BZO_at; Start 24; Stop 48
aagcctaatcgtgactaagattgtc

SEQ ID NO: 100695 - DNA, 25 bp, Artificial
  probe
  misc_feature (1)..(25): SEQ ID NO: 7286; WAN024BZO_at; Start 1; Stop 25
gtgcgttttgaagttctatctacaa

SEQ ID NO: 100696 - DNA, 25 bp, Artificial
  probe
  misc_feature (1)..(25): SEQ ID NO: 7286; WAN024BZO_at; Start 33; Stop 57
cgtgactaagattgtcttctttgta

SEQ ID NO: 100697 - DNA, 25 bp, Artificial
  probe
  misc_feature (1)..(25): SEQ ID NO: 7286; WAN024BZO_at; Start 13; Stop 37
gttctatctacaagcctaatcgtga

SEQ ID NO: 100698 - DNA, 25 bp, Artificial
  probe
  misc_feature (1)..(25): SEQ ID NO: 7286; WAN024BZO_at; Start 28; Stop 52
ctaatcgtgactaagattgtcttct

SEQ ID NO: 100699 - DNA, 25 bp, Artificial
  probe
  misc_feature (1)..(25): SEQ ID NO: 7286; WAN024BZO_at; Start 5; Stop 29
gttttgaagttctatctacaagcct

SEQ ID NO: 100700 - DNA, 25 bp, Artificial
  probe
  misc_feature (1)..(25): SEQ ID NO: 7286; WAN024BZO_at; Start 11; Stop 35
aagttctatctacaagcctaatcgt

SEQ ID NO: 100701 - DNA, 25 bp, Artificial
  probe
  misc_feature (1)..(25): SEQ ID NO: 7286; WAN024BZO_at; Start 32; Stop 56
tcgtgactaagattgtcttctttgt

SEQ ID NO: 100702 - DNA, 25 bp, Artificial
  probe
  misc_feature (1)..(25): SEQ ID NO: 7286; WAN024BZO_at; Start 12; Stop 36
agttctatctacaagcctaatcgtg

SEQ ID NO: 100703 - DNA, 25 bp, Artificial
  probe
  misc_feature (1)..(25): SEQ ID NO: 7286; WAN024BZO_at; Start 27; Stop 51
cctaatcgtgactaagattgtcttc

SEQ ID NO: 100704 - DNA, 25 bp, Artificial
  probe
  misc_feature (1)..(25): SEQ ID NO: 7286; WAN024BZO_at; Start 23; Stop 47
caagcctaatcgtgactaagattgt

SEQ ID NO: 100705 - DNA, 25 bp, Artificial
  probe
  misc_feature (1)..(25): SEQ ID NO: 7286; WAN024BZO_at; Start 16; Stop 40
ctatctacaagcctaatcgtgacta

SEQ ID NO: 100706 - DNA, 25 bp, Artificial
  probe
  misc_feature (1)..(25): SEQ ID NO: 7286; WAN024BZO_at; Start 36; Stop 60
gactaagattgtcttctttgtaagg

SEQ ID NO: 100707 - DNA, 25 bp, Artificial
  probe
  misc_feature (1)..(25): SEQ ID NO: 7286; WAN024BZO_at; Start 4; Stop 28
cgttttgaagttctatctacaagcc

SEQ ID NO: 100708 - DNA, 25 bp, Artificial
  probe
  misc_feature (1)..(25): SEQ ID NO: 7286; WAN024BZO_at; Start 39; Stop 63
taagattgtcttctttgtaaggtag

SEQ ID NO: 100709 - DNA, 25 bp, Artificial
  probe
  misc_feature (1)..(25): SEQ ID NO: 7286; WAN024BZO_at; Start 29; Stop 53
taatcgtgactaagattgtcttctt

SEQ ID NO: 100710 - DNA, 25 bp, Artificial
  probe
  misc_feature (1)..(25): SEQ ID NO: 7286; WAN024BZO_at; Start 10; Stop 34
gaagttctatctacaagcctaatcg

SEQ ID NO: 100711 - DNA, 25 bp, Artificial
  probe
  misc_feature (1)..(25): SEQ ID NO: 7286; WAN024BZO_at; Start 8; Stop 32
ttgaagttctatctacaagcctaat

SEQ ID NO: 100712 - DNA, 25 bp, Artificial
  probe
  misc_feature (1)..(25): SEQ ID NO: 7286; WAN024BZO_at; Start 25; Stop 49
agcctaatcgtgactaagattgtct

SEQ ID NO: 100713 - DNA, 25 bp, Artificial
  probe
  misc_feature (1)..(25): SEQ ID NO: 7286; WAN024BZO_at; Start 2; Stop 26
tgcgttttgaagttctatctacaag

SEQ ID NO: 100714 - DNA, 25 bp, Artificial
  probe
  misc_feature (1)..(25): SEQ ID NO: 7286; WAN024BZO_at; Start 20; Stop 44
ctacaagcctaatcgtgactaagat

SEQ ID NO: 100715 - DNA, 25 bp, Artificial
  probe
  misc_feature (1)..(25): SEQ ID NO: 7286; WAN024BZO_at; Start 7; Stop 31
tttgaagttctatctacaagcctaa

SEQ ID NO: 100716 - DNA, 25 bp, Artificial
  probe
  misc_feature (1)..(25): SEQ ID NO: 7286; WAN024BZO_at; Start 26; Stop 50
gcctaatcgtgactaagattgtctt

SEQ ID NO: 100717 - DNA, 25 bp, Artificial
  probe
  misc_feature (1)..(25): SEQ ID NO: 7286; WAN024BZO_at; Start 31; Stop 55
atcgtgactaagattgtcttctttg

SEQ ID NO: 100718 - DNA, 25 bp, Artificial
  probe
  misc_feature (1)..(25): SEQ ID NO: 7286; WAN024BZO_at; Start 9; Stop 33
tgaagttctatctacaagcctaatc

SEQ ID NO: 100719 - DNA, 25 bp, Artificial
  probe
  misc_feature (1)..(25): SEQ ID NO: 6491; WAN024BZP_at; Start 213; Stop 237
tacaagaaatcattatttaacaggg

SEQ ID NO: 100720 - DNA, 25 bp, Artificial
  probe
  misc_feature (1)..(25): SEQ ID NO: 6491; WAN024BZP_at; Start 154; Stop 178
tctaatctcggattaaaagttgcga

SEQ ID NO: 100721 - DNA, 25 bp, Artificial
  probe
  misc_feature (1)..(25): SEQ ID NO: 6491; WAN024BZP_at; Start 77; Stop 101
gattggagggcgatgtaactctact

SEQ ID NO: 100722 - DNA, 25 bp, Artificial
  probe
  misc_feature (1)..(25): SEQ ID NO: 6491; WAN024BZP_at; Start 167; Stop 191
taaaagttgcgagactggatgtgat

SEQ ID NO: 100723 - DNA, 25 bp, Artificial
  probe
  misc_feature (1)..(25): SEQ ID NO: 6491; WAN024BZP_at; Start 29; Stop 53
gaacagagaccgctgaaaaaattag

SEQ ID NO: 100724 - DNA, 25 bp, Artificial
  probe
  misc_feature (1)..(25): SEQ ID NO: 6491; WAN024BZP_at; Start 223; Stop 247
cattatttaacaggggctacgattt

SEQ ID NO: 100725 - DNA, 25 bp, Artificial
  probe
  misc_feature (1)..(25): SEQ ID NO: 6491; WAN024BZP_at; Start 200; Stop 224
tagcatatgcttctacaagaaatca

SEQ ID NO: 100726 - DNA, 25 bp, Artificial
  probe
  misc_feature (1)..(25): SEQ ID NO: 6491; WAN024BZP_at; Start 3; Stop 27
gaatagtgatgtattagagtttctg

SEQ ID NO: 100727 - DNA, 25 bp, Artificial
  probe
  misc_feature (1)..(25): SEQ ID NO: 6491; WAN024BZP_at; Start 276; Stop 300
ttgtgatcctaaaagttatgtctaa

SEQ ID NO: 100728 - DNA, 25 bp, Artificial
  probe
  misc_feature (1)..(25): SEQ ID NO: 6491; WAN024BZP_at; Start 103; Stop 127
gcacctaattctcaagatttggaag

SEQ ID NO: 100729 - DNA, 25 bp, Artificial
  probe
  misc_feature (1)..(25): SEQ ID NO: 6491; WAN024BZP_at; Start 98; Stop 122
tactcgcacctaattctcaagattt

SEQ ID NO: 100730 - DNA, 25 bp, Artificial
  probe
  misc_feature (1)..(25): SEQ ID NO: 6491; WAN024BZP_at; Start 17; Stop 41
tagagtttctgagaacagagaccgc

SEQ ID NO: 100731 - DNA, 25 bp, Artificial
  probe
  misc_feature (1)..(25): SEQ ID NO: 6491; WAN024BZP_at; Start 174; Stop 198
tgcgagactggatgtgatgaagaaa

SEQ ID NO: 100732 - DNA, 25 bp, Artificial
  probe
  misc_feature (1)..(25): SEQ ID NO: 6491; WAN024BZP_at; Start 127; Stop 151
gatattaaaaatgctatgctttcca

SEQ ID NO: 100733 - DNA, 25 bp, Artificial
  probe
  misc_feature (1)..(25): SEQ ID NO: 6491; WAN024BZP_at; Start 88; Stop 112
gatgtaactctactcgcacctaatt

SEQ ID NO: 100734 - DNA, 25 bp, Artificial
  probe
  misc_feature (1)..(25): SEQ ID NO: 6491; WAN024BZP_at; Start 260; Stop 284
cgaaaggaacatacaattgtgatcc

SEQ ID NO: 100735 - DNA, 25 bp, Artificial
  probe
  misc_feature (1)..(25): SEQ ID NO: 6491; WAN024BZP_at; Start 195; Stop 219
gaaaatagcatatgcttctacaaga

SEQ ID NO: 100736 - DNA, 25 bp, Artificial
  probe
  misc_feature (1)..(25): SEQ ID NO: 6491; WAN024BZP_at; Start 106; Stop 130
cctaattctcaagatttggaagata

SEQ ID NO: 100737 - DNA, 25 bp, Artificial
  probe
  misc_feature (1)..(25): SEQ ID NO: 6491; WAN024BZP_at; Start 81; Stop 105
ggagggcgatgtaactctactcgca

SEQ ID NO: 100738 - DNA, 25 bp, Artificial
  probe
  misc_feature (1)..(25): SEQ ID NO: 6491; WAN024BZP_at; Start 51; Stop 75
tagtctttatataagcgaggctaat

SEQ ID NO: 100739 - DNA, 25 bp, Artificial
  probe
  misc_feature (1)..(25): SEQ ID NO: 6491; WAN024BZP_at; Start 179; Stop 203
gactggatgtgatgaagaaaatagc

SEQ ID NO: 100740 - DNA, 25 bp, Artificial
  probe
  misc_feature (1)..(25): SEQ ID NO: 6491; WAN024BZP_at; Start 21; Stop 45
gtttctgagaacagagaccgctgaa

SEQ ID NO: 100741 - DNA, 25 bp, Artificial
  probe
  misc_feature (1)..(25): SEQ ID NO: 6491; WAN024BZP_at; Start 60; Stop 84
tataagcgaggctaatagattggag

SEQ ID NO: 100742 - DNA, 25 bp, Artificial
  probe
  misc_feature (1)..(25): SEQ ID NO: 6491; WAN024BZP_at; Start 71; Stop 95
ctaatagattggagggcgatgtaac

SEQ ID NO: 100743 - DNA, 25 bp, Artificial
  probe
  misc_feature (1)..(25): SEQ ID NO: 6491; WAN024BZP_at; Start 32; Stop 56
cagagaccgctgaaaaaattagtct

SEQ ID NO: 100744 - DNA, 25 bp, Artificial
  probe
  misc_feature (1)..(25): SEQ ID NO: 6491; WAN024BZP_at; Start 186; Stop 210
tgtgatgaagaaaatagcatatgct

SEQ ID NO: 100745 - DNA, 25 bp, Artificial
  probe
  misc_feature (1)..(25): SEQ ID NO: 6491; WAN024BZP_at; Start 121; Stop 145
ttggaagatattaaaaatgctatgc

SEQ ID NO: 100746 - DNA, 25 bp, Artificial
  probe
  misc_feature (1)..(25): SEQ ID NO: 6491; WAN024BZP_at; Start 251; Stop 275
gggatatttcgaaaggaacatacaa

SEQ ID NO: 100747 - DNA, 25 bp, Artificial
  probe
  misc_feature (1)..(25): SEQ ID NO: 6491; WAN024BZP_at; Start 266; Stop 290
gaacatacaattgtgatcctaaaag

SEQ ID NO: 100748 - DNA, 25 bp, Artificial
  probe
  misc_feature (1)..(25): SEQ ID NO: 6491; WAN024BZP_at; Start 24; Stop 48
tctgagaacagagaccgctgaaaaa

SEQ ID NO: 100749 - DNA, 25 bp, Artificial
  probe
  misc_feature (1)..(25): SEQ ID NO: 6491; WAN024BZP_at; Start 47; Stop 71
aaattagtctttatataagcgaggc

SEQ ID NO: 100750 - DNA, 25 bp, Artificial
  probe
  misc_feature (1)..(25): SEQ ID NO: 6491; WAN024BZP_at; Start 162; Stop 186
cggattaaaagttgcgagactggat

SEQ ID NO: 100751 - DNA, 25 bp, Artificial
  probe
  misc_feature (1)..(25): SEQ ID NO: 6491; WAN024BZP_at; Start 273; Stop 297
caattgtgatcctaaaagttatgtc

SEQ ID NO: 100752 - DNA, 25 bp, Artificial
  probe
  misc_feature (1)..(25): SEQ ID NO: 6491; WAN024BZP_at; Start 141; Stop 165
tatgctttccaattctaatctcgga

SEQ ID NO: 100753 - DNA, 25 bp, Artificial
  probe
  misc_feature (1)..(25): SEQ ID NO: 6361; WAN024BZQ_at; Start 691; Stop 715
cctggctatagggaagaatattttt

SEQ ID NO: 100754 - DNA, 25 bp, Artificial
  probe
  misc_feature (1)..(25): SEQ ID NO: 6361; WAN024BZQ_at; Start 359; Stop 383
gccacttattctttggatttcagga

SEQ ID NO: 100755 - DNA, 25 bp, Artificial
  probe
  misc_feature (1)..(25): SEQ ID NO: 6361; WAN024BZQ_at; Start 85; Stop 109
tatggaggtagttatttcccaaata

SEQ ID NO: 100756 - DNA, 25 bp, Artificial
  probe
  misc_feature (1)..(25): SEQ ID NO: 6361; WAN024BZQ_at; Start 682; Stop 706
ttagcaacccctggctatagggaag

SEQ ID NO: 100757 - DNA, 25 bp, Artificial
  probe
  misc_feature (1)..(25): SEQ ID NO: 6361; WAN024BZQ_at; Start 343; Stop 367
ggttgttattttgatggccacttat

SEQ ID NO: 100758 - DNA, 25 bp, Artificial
  probe
  misc_feature (1)..(25): SEQ ID NO: 6361; WAN024BZQ_at; Start 745; Stop 769
cgtagcatgcgaatactagatttag

SEQ ID NO: 100759 - DNA, 25 bp, Artificial
  probe
  misc_feature (1)..(25): SEQ ID NO: 6361; WAN024BZQ_at; Start 782; Stop 806
tcaagattattgcaaacgatgagcg

SEQ ID NO: 100760 - DNA, 25 bp, Artificial
  probe
  misc_feature (1)..(25): SEQ ID NO: 6361; WAN024BZQ_at; Start 271; Stop 295
cgtattacgattggtgaaagtgtag

SEQ ID NO: 100761 - DNA, 25 bp, Artificial
  probe
  misc_feature (1)..(25): SEQ ID NO: 6361; WAN024BZQ_at; Start 507; Stop 531
caatgaagcttatttagatggatac

SEQ ID NO: 100762 - DNA, 25 bp, Artificial
  probe
  misc_feature (1)..(25): SEQ ID NO: 6361; WAN024BZQ_at; Start 568; Stop 592
gagttcgaattaccaagctcagttc

SEQ ID NO: 100763 - DNA, 25 bp, Artificial
  probe
  misc_feature (1)..(25): SEQ ID NO: 6361; WAN024BZQ_at; Start 28; Stop 52
gactcaccaggattagctgggatga

SEQ ID NO: 100764 - DNA, 25 bp, Artificial
  probe
  misc_feature (1)..(25): SEQ ID NO: 6361; WAN024BZQ_at; Start 302; Stop 326
cctgtatcgggaattttgatttcca

SEQ ID NO: 100765 - DNA, 25 bp, Artificial
  probe
  misc_feature (1)..(25): SEQ ID NO: 6361; WAN024BZQ_at; Start 760; Stop 784
ctagatttagagacaggtaaggtca

SEQ ID NO: 100766 - DNA, 25 bp, Artificial
  probe
  misc_feature (1)..(25): SEQ ID NO: 6361; WAN024BZQ_at; Start 447; Stop 471
tagaggccaaggtttgtcagtcaaa

SEQ ID NO: 100767 - DNA, 25 bp, Artificial
  probe
  misc_feature (1)..(25): SEQ ID NO: 6361; WAN024BZQ_at; Start 586; Stop 610
tcagttctaggagcatcaagtatac

SEQ ID NO: 100768 - DNA, 25 bp, Artificial
  probe
  misc_feature (1)..(25): SEQ ID NO: 6361; WAN024BZQ_at; Start 434; Stop 458
tcccagtttctggtagaggccaagg

SEQ ID NO: 100769 - DNA, 25 bp, Artificial
  probe
  misc_feature (1)..(25): SEQ ID NO: 6361; WAN024BZQ_at; Start 867; Stop 891
ggaatgtagcccaggaagacgtact

SEQ ID NO: 100770 - DNA, 25 bp, Artificial
  probe
  misc_feature (1)..(25): SEQ ID NO: 6361; WAN024BZQ_at; Start 43; Stop 67
gctgggatgatttgtagacggatta

SEQ ID NO: 100771 - DNA, 25 bp, Artificial
  probe
  misc_feature (1)..(25): SEQ ID NO: 6361; WAN024BZQ_at; Start 843; Stop 867
taatggatattacgttgttagtggg

SEQ ID NO: 100772 - DNA, 25 bp, Artificial
  probe
  misc_feature (1)..(25): SEQ ID NO: 6361; WAN024BZQ_at; Start 492; Stop 516
tttaggtggagcgaacaatgaagct

SEQ ID NO: 100773 - DNA, 25 bp, Artificial
  probe
  misc_feature (1)..(25): SEQ ID NO: 6361; WAN024BZQ_at; Start 392; Stop 416
tgttcaatattgagactcaagagct

SEQ ID NO: 100774 - DNA, 25 bp, Artificial
  probe
  misc_feature (1)..(25): SEQ ID NO: 6361; WAN024BZQ_at; Start 878; Stop 902
caggaagacgtacttctgacatact

SEQ ID NO: 100775 - DNA, 25 bp, Artificial
  probe
  misc_feature (1)..(25): SEQ ID NO: 6361; WAN024BZQ_at; Start 731; Stop 755
tctttaattggaatcgtagcatgcg

SEQ ID NO: 100776 - DNA, 25 bp, Artificial
  probe
  misc_feature (1)..(25): SEQ ID NO: 6361; WAN024BZQ_at; Start 240; Stop 264
aatctattacattctaggctcgagc

SEQ ID NO: 100777 - DNA, 25 bp, Artificial
  probe
  misc_feature (1)..(25): SEQ ID NO: 6361; WAN024BZQ_at; Start 15; Stop 39
tataaatcatttagactcaccagga

SEQ ID NO: 100778 - DNA, 25 bp, Artificial
  probe
  misc_feature (1)..(25): SEQ ID NO: 6361; WAN024BZQ_at; Start 893; Stop 917
ctgacatacttttgttagaggagga

SEQ ID NO: 100779 - DNA, 25 bp, Artificial
  probe
  misc_feature (1)..(25): SEQ ID NO: 6361; WAN024BZQ_at; Start 319; Stop 343
gatttccaactagagagtggttatg

SEQ ID NO: 100780 - DNA, 25 bp, Artificial
  probe
  misc_feature (1)..(25): SEQ ID NO: 6361; WAN024BZQ_at; Start 798; Stop 822
cgatgagcgttttgctctttgtggg

SEQ ID NO: 100781 - DNA, 25 bp, Artificial
  probe
  misc_feature (1)..(25): SEQ ID NO: 6361; WAN024BZQ_at; Start 256; Stop 280
ggctcgagcatttatcgtattacga

SEQ ID NO: 100782 - DNA, 25 bp, Artificial
  probe
  misc_feature (1)..(25): SEQ ID NO: 6361; WAN024BZQ_at; Start 668; Stop 692
aagcagttattgatttagcaacccc

SEQ ID NO: 100783 - DNA, 25 bp, Artificial
  probe
  misc_feature (1)..(25): SEQ ID NO: 6361; WAN024BZQ_at; Start 202; Stop 226
tctccagataaaggaataacgattg

SEQ ID NO: 100784 - DNA, 25 bp, Artificial
  probe
  misc_feature (1)..(25): SEQ ID NO: 6361; WAN024BZQ_at; Start 288; Stop 312
aagtgtagaagaaacctgtatcggg

SEQ ID NO: 100785 - DNA, 25 bp, Artificial
  probe
  misc_feature (1)..(25): SEQ ID NO: 6361; WAN024BZQ_at; Start 181; Stop 205
tatgaacaagatggaaaaatttctc

SEQ ID NO: 100786 - DNA, 25 bp, Artificial
  probe
  misc_feature (1)..(25): SEQ ID NO: 6361; WAN024BZQ_at; Start 422; Stop 446
aaaaatctgacttcccagtttctgg

SEQ ID NO: 100787 - DNA, 25 bp, Artificial
  probe
  misc_feature (1)..(25): SEQ ID NO: 6306; WAN024BZR_at; Start 1162; Stop 1186
tactataaagatcaagcctctcaag

SEQ ID NO: 100788 - DNA, 25 bp, Artificial
  probe
  misc_feature (1)..(25): SEQ ID NO: 6306; WAN024BZR_at; Start 15; Stop 39
taaattagctttaacagctgcagca

SEQ ID NO: 100789 - DNA, 25 bp, Artificial
  probe
  misc_feature (1)..(25): SEQ ID NO: 6306; WAN024BZR_at; Start 177; Stop 201
gcaaaatggtgatggtttagttcca

SEQ ID NO: 100790 - DNA, 25 bp, Artificial
  probe
  misc_feature (1)..(25): SEQ ID NO: 6306; WAN024BZR_at; Start 311; Stop 335
cacttaaagatggattgaaatggtc

SEQ ID NO: 100791 - DNA, 25 bp, Artificial
  probe
  misc_feature (1)..(25): SEQ ID NO: 6306; WAN024BZR_at; Start 529; Stop 553
ccagttggtgactttgagcaaatga

SEQ ID NO: 100792 - DNA, 25 bp, Artificial
  probe
  misc_feature (1)..(25): SEQ ID NO: 6306; WAN024BZR_at; Start 1049; Stop 1073
gcttagaagctcatctgaaatcagc

SEQ ID NO: 100793 - DNA, 25 bp, Artificial
  probe
  misc_feature (1)..(25): SEQ ID NO: 6306; WAN024BZR_at; Start 131; Stop 155
tatcaggttttcttcaaggaactgg

SEQ ID NO: 100794 - DNA, 25 bp, Artificial
  probe
  misc_feature (1)..(25): SEQ ID NO: 6306; WAN024BZR_at; Start 516; Stop 540
taaacttactgctccagttggtgac

SEQ ID NO: 100795 - DNA, 25 bp, Artificial
  probe
  misc_feature (1)..(25): SEQ ID NO: 6306; WAN024BZR_at; Start 925; Stop 949
ggagattccttgattgctaatccta

SEQ ID NO: 100796 - DNA, 25 bp, Artificial
  probe
  misc_feature (1)..(25): SEQ ID NO: 6306; WAN024BZR_at; Start 1032; Stop 1056
tactggtgttccttcaagcttagaa

SEQ ID NO: 100797 - DNA, 25 bp, Artificial
  probe
  misc_feature (1)..(25): SEQ ID NO: 6306; WAN024BZR_at; Start 345; Stop 369
agctttgacagcttccgatgtggaa

SEQ ID NO: 100798 - DNA, 25 bp, Artificial
  probe
  misc_feature (1)..(25): SEQ ID NO: 6306; WAN024BZR_at; Start 160; Stop 184
cgtatcccttacgtttggcaaaatg

SEQ ID NO: 100799 - DNA, 25 bp, Artificial
  probe
  misc_feature (1)..(25): SEQ ID NO: 6306; WAN024BZR_at; Start 630; Stop 654
gacagctcctgttacaagcggtatg

SEQ ID NO: 100800 - DNA, 25 bp, Artificial
  probe
  misc_feature (1)..(25): SEQ ID NO: 6306; WAN024BZR_at; Start 896; Stop 920
tcgctaacttagcaggtgtcgaagg

SEQ ID NO: 100801 - DNA, 25 bp, Artificial
  probe
  misc_feature (1)..(25): SEQ ID NO: 6306; WAN024BZR_at; Start 209; Stop 233
tataccgtacactgttaatggcaga

SEQ ID NO: 100802 - DNA, 25 bp, Artificial
  probe
  misc_feature (1)..(25): SEQ ID NO: 6306; WAN024BZR_at; Start 329; Stop 353
aatggtctgatggagaagctttgac

SEQ ID NO: 100803 - DNA, 25 bp, Artificial
  probe
  misc_feature (1)..(25): SEQ ID NO: 6306; WAN024BZR_at; Start 1389; Stop 1413
cgaaacaagttttgatgagttgagc

SEQ ID NO: 100804 - DNA, 25 bp, Artificial
  probe
  misc_feature (1)..(25): SEQ ID NO: 6306; WAN024BZR_at; Start 1277; Stop 1301
tcaaaacacgtaaatatgacctagc

SEQ ID NO: 100805 - DNA, 25 bp, Artificial
  probe
  misc_feature (1)..(25): SEQ ID NO: 6306; WAN024BZR_at; Start 1553; Stop 1577
taattcctgacgatgttcaatttgg

SEQ ID NO: 100806 - DNA, 25 bp, Artificial
  probe
  misc_feature (1)..(25): SEQ ID NO: 6306; WAN024BZR_at; Start 775; Stop 799
gcattgcaagatggtaaatcatact

SEQ ID NO: 100807 - DNA, 25 bp, Artificial
  probe
  misc_feature (1)..(25): SEQ ID NO: 6306; WAN024BZR_at; Start 72; Stop 96
tagttcgggaagcaaaaaatctgat

SEQ ID NO: 100808 - DNA, 25 bp, Artificial
  probe
  misc_feature (1)..(25): SEQ ID NO: 6306; WAN024BZR_at; Start 908; Stop 932
caggtgtcgaaggtaatggagattc

SEQ ID NO: 100809 - DNA, 25 bp, Artificial
  probe
  misc_feature (1)..(25): SEQ ID NO: 6306; WAN024BZR_at; Start 1177; Stop 1201
gcctctcaagatttcatgcaagcag

SEQ ID NO: 100810 - DNA, 25 bp, Artificial
  probe
  misc_feature (1)..(25): SEQ ID NO: 6306; WAN024BZR_at; Start 615; Stop 639
taatagctcattttggacagctcct

SEQ ID NO: 100811 - DNA, 25 bp, Artificial
  probe
  misc_feature (1)..(25): SEQ ID NO: 6306; WAN024BZR_at; Start 439; Stop 463
gaaggagctaaagatttcaaagacg

SEQ ID NO: 100812 - DNA, 25 bp, Artificial
  probe
  misc_feature (1)..(25): SEQ ID NO: 6306; WAN024BZR_at; Start 144; Stop 168
tcaaggaactggagatcgtatccct

SEQ ID NO: 100813 - DNA, 25 bp, Artificial
  probe
  misc_feature (1)..(25): SEQ ID NO: 6306; WAN024BZR_at; Start 44; Stop 68
taatagctgtagtaggattggttgc

SEQ ID NO: 100814 - DNA, 25 bp, Artificial
  probe
  misc_feature (1)..(25): SEQ ID NO: 6306; WAN024BZR_at; Start 1221; Stop 1245
ggttggaatcaagaacgaagttgtc

SEQ ID NO: 100815 - DNA, 25 bp, Artificial
  probe
  misc_feature (1)..(25): SEQ ID NO: 6306; WAN024BZR_at; Start 477; Stop 501
aatttctggtcttacagttgatgga

SEQ ID NO: 100816 - DNA, 25 bp, Artificial
  probe
  misc_feature (1)..(25): SEQ ID NO: 6306; WAN024BZR_at; Start 644; Stop 668
caagcggtatgtacaaagtaaaaga

SEQ ID NO: 100817 - DNA, 25 bp, Artificial
  probe
  misc_feature (1)..(25): SEQ ID NO: 6306; WAN024BZR_at; Start 1251; Stop 1275
tacttctgatgcaacaacaggattg

SEQ ID NO: 100818 - DNA, 25 bp, Artificial
  probe
  misc_feature (1)..(25): SEQ ID NO: 6306; WAN024BZR_at; Start 1602; Stop 1626
caaattcgaaaaatgggatgctaaa

SEQ ID NO: 100819 - DNA, 25 bp, Artificial
  probe
  misc_feature (1)..(25): SEQ ID NO: 6306; WAN024BZR_at; Start 819; Stop 843
tcaagaaattagtcagttggatgct

SEQ ID NO: 100820 - DNA, 25 bp, Artificial
  probe
  misc_feature (1)..(25): SEQ ID NO: 6306; WAN024BZR_at; Start 761; Stop 785
cagatccagttttagcattgcaaga

SEQ ID NO: 100821 - DNA, 25 bp, Artificial
  probe
  misc_feature (1)..(25): SEQ ID NO: 6499; WAN024BZS_at; Start 1528; Stop 1552
caacgtttatgtattgctcgtgccc

SEQ ID NO: 100822 - DNA, 25 bp, Artificial
  probe
  misc_feature (1)..(25): SEQ ID NO: 6499; WAN024BZS_at; Start 1601; Stop 1625
tagatctatctgtacaagcgcaagt

SEQ ID NO: 100823 - DNA, 25 bp, Artificial
  probe
  misc_feature (1)..(25): SEQ ID NO: 6499; WAN024BZS_at; Start 1933; Stop 1957
gatcttaagcaggtttcaccaacac

SEQ ID NO: 100824 - DNA, 25 bp, Artificial
  probe
  misc_feature (1)..(25): SEQ ID NO: 6499; WAN024BZS_at; Start 1387; Stop 1411
tcatttgatgaaccgatgattgtcc

SEQ ID NO: 100825 - DNA, 25 bp, Artificial
  probe
  misc_feature (1)..(25): SEQ ID NO: 6499; WAN024BZS_at; Start 1453; Stop 1477
gaagccttgaagatggtaaacgtgc

SEQ ID NO: 100826 - DNA, 25 bp, Artificial
  probe
  misc_feature (1)..(25): SEQ ID NO: 6499; WAN024BZS_at; Start 1184; Stop 1208
ctggaagcggtaagagtacgattgc

SEQ ID NO: 100827 - DNA, 25 bp, Artificial
  probe
  misc_feature (1)..(25): SEQ ID NO: 6499; WAN024BZS_at; Start 218; Stop 242
tcgatgaagataagccgatagagct

SEQ ID NO: 100828 - DNA, 25 bp, Artificial
  probe
  misc_feature (1)..(25): SEQ ID NO: 6499; WAN024BZS_at; Start 1498; Stop 1522
tatcctcatgaattttcaggcggac

SEQ ID NO: 100829 - DNA, 25 bp, Artificial
  probe
  misc_feature (1)..(25): SEQ ID NO: 6499; WAN024BZS_at; Start 392; Stop 416
ctaaagaggaggcaaataaacgtgc

SEQ ID NO: 100830 - DNA, 25 bp, Artificial
  probe
  misc_feature (1)..(25): SEQ ID NO: 6499; WAN024BZS_at; Start 881; Stop 905
gattcgcaaatcgtattccatggtt

SEQ ID NO: 100831 - DNA, 25 bp, Artificial
  probe
  misc_feature (1)..(25): SEQ ID NO: 6499; WAN024BZS_at; Start 1413; Stop 1437
taatattggaaacaaagaggaacgc

SEQ ID NO: 100832 - DNA, 25 bp, Artificial
  probe
  misc_feature (1)..(25): SEQ ID NO: 6499; WAN024BZS_at; Start 1478; Stop 1502
cagttgagtacttggagcgttatcc

SEQ ID NO: 100833 - DNA, 25 bp, Artificial
  probe
  misc_feature (1)..(25): SEQ ID NO: 6499; WAN024BZS_at; Start 1684; Stop 1708
catgacctaggtgttgtgaaataca

SEQ ID NO: 100834 - DNA, 25 bp, Artificial
  probe
  misc_feature (1)..(25): SEQ ID NO: 6499; WAN024BZS_at; Start 1120; Stop 1144
aaagcacttgatgacgtatctctag

SEQ ID NO: 100835 - DNA, 25 bp, Artificial
  probe
  misc_feature (1)..(25): SEQ ID NO: 6499; WAN024BZS_at; Start 1543; Stop 1567
gctcgtgccctttgtatgaaaccag

SEQ ID NO: 100836 - DNA, 25 bp, Artificial
  probe
  misc_feature (1)..(25): SEQ ID NO: 6499; WAN024BZS_at; Start 556; Stop 580
gatgaaccaacaactgcccttgatg

SEQ ID NO: 100837 - DNA, 25 bp, Artificial
  probe
  misc_feature (1)..(25): SEQ ID NO: 6499; WAN024BZS_at; Start 1161; Stop 1185
tactattggtatcgtaggagagtct

SEQ ID NO: 100838 - DNA, 25 bp, Artificial
  probe
  misc_feature (1)..(25): SEQ ID NO: 6499; WAN024BZS_at; Start 1101; Stop 1125
gccactaggttctccgttgaaagca

SEQ ID NO: 100839 - DNA, 25 bp, Artificial
  probe
  misc_feature (1)..(25): SEQ ID NO: 6499; WAN024BZS_at; Start 495; Stop 519
gcagcgtcaaagaatagtcatagcg

SEQ ID NO: 100840 - DNA, 25 bp, Artificial
  probe
  misc_feature (1)..(25): SEQ ID NO: 6499; WAN024BZS_at; Start 838; Stop 862
gggagcgtaccttcaatttctgaaa

SEQ ID NO: 100841 - DNA, 25 bp, Artificial
  probe
  misc_feature (1)..(25): SEQ ID NO: 6499; WAN024BZS_at; Start 439; Stop 463
ggaattcataatgctgcagaacgca

SEQ ID NO: 100842 - DNA, 25 bp, Artificial
  probe
  misc_feature (1)..(25): SEQ ID NO: 6499; WAN024BZS_at; Start 173; Stop 197
tattacctaaaaatggacgcattgc

SEQ ID NO: 100843 - DNA, 25 bp, Artificial
  probe
  misc_feature (1)..(25): SEQ ID NO: 6499; WAN024BZS_at; Start 1831; Stop 1855
gattatcacttcaaagaggcattgg

SEQ ID NO: 100844 - DNA, 25 bp, Artificial
  probe
  misc_feature (1)..(25): SEQ ID NO: 6499; WAN024BZS_at; Start 188; Stop 212
gacgcattgctgaaggtgaaatcac

SEQ ID NO: 100845 - DNA, 25 bp, Artificial
  probe
  misc_feature (1)..(25): SEQ ID NO: 6499; WAN024BZS_at; Start 1739; Stop 1763
gacgtattgtagaagctggttctcg

SEQ ID NO: 100846 - DNA, 25 bp, Artificial
  probe
  misc_feature (1)..(25): SEQ ID NO: 6499; WAN024BZS_at; Start 744; Stop 768
gatctttgatcaacctaaacacccg

SEQ ID NO: 100847 - DNA, 25 bp, Artificial
  probe
  misc_feature (1)..(25): SEQ ID NO: 6499; WAN024BZS_at; Start 1846; Stop 1870
gaggcattggcaacaaaacgtaaag

SEQ ID NO: 100848 - DNA, 25 bp, Artificial
  probe
  misc_feature (1)..(25): SEQ ID NO: 6499; WAN024BZS_at; Start 1086; Stop 1110
gaagcaactattcaagccactaggt

SEQ ID NO: 100849 - DNA, 25 bp, Artificial
  probe
  misc_feature (1)..(25): SEQ ID NO: 6499; WAN024BZS_at; Start 303; Stop 327
gattttccaagatccaatgtctgca

SEQ ID NO: 100850 - DNA, 25 bp, Artificial
  probe
  misc_feature (1)..(25): SEQ ID NO: 6499; WAN024BZS_at; Start 615; Stop 639
tgatttacgtaaagagcatggaact

SEQ ID NO: 100851 - DNA, 25 bp, Artificial
  probe
  misc_feature (1)..(25): SEQ ID NO: 6499; WAN024BZS_at; Start 1438; Stop 1462
tttgaacgtatgaaagaagccttga

SEQ ID NO: 100852 - DNA, 25 bp, Artificial
  probe
  misc_feature (1)..(25): SEQ ID NO: 6499; WAN024BZS_at; Start 457; Stop 481
gaacgcatgaatgactatccacacc

SEQ ID NO: 100853 - DNA, 25 bp, Artificial
  probe
  misc_feature (1)..(25): SEQ ID NO: 6499; WAN024BZS_at; Start 665; Stop 689
taggcgttattgctcaaattgcgga

SEQ ID NO: 100854 - DNA, 25 bp, Artificial
  probe
  misc_feature (1)..(25): SEQ ID NO: 6499; WAN024BZS_at; Start 480; Stop 504
ccaatttagtggagggcagcgtcaa

SEQ ID NO: 100855 - DNA, 25 bp, Artificial
  probe
  misc_feature (1)..(25): SEQ ID NO: 6404; WAN024BZT_at; Start 133; Stop 157
tatgcaattcaacgtgtactaaaaa

SEQ ID NO: 100856 - DNA, 25 bp, Artificial
  probe
  misc_feature (1)..(25): SEQ ID NO: 6404; WAN024BZT_at; Start 442; Stop 466
gcagcatgtagtaaaattgcacaca

SEQ ID NO: 100857 - DNA, 25 bp, Artificial
  probe
  misc_feature (1)..(25): SEQ ID NO: 6404; WAN024BZT_at; Start 193; Stop 217
gagttagataagttagctgaagcac

SEQ ID NO: 100858 - DNA, 25 bp, Artificial
  probe
  misc_feature (1)..(25): SEQ ID NO: 6404; WAN024BZT_at; Start 249; Stop 273
ggagaaagataatccattgtatggg

SEQ ID NO: 100859 - DNA, 25 bp, Artificial
  probe
  misc_feature (1)..(25): SEQ ID NO: 6404; WAN024BZT_at; Start 308; Stop 332
tatatggttctattgcctttacaaa

SEQ ID NO: 100860 - DNA, 25 bp, Artificial
  probe
  misc_feature (1)..(25): SEQ ID NO: 6404; WAN024BZT_at; Start 69; Stop 93
ggcagcgttagtaatattttcacaa

SEQ ID NO: 100861 - DNA, 25 bp, Artificial
  probe
  misc_feature (1)..(25): SEQ ID NO: 6404; WAN024BZT_at; Start 163; Stop 187
gaagttcagaatgtaattatgacag

SEQ ID NO: 100862 - DNA, 25 bp, Artificial
  probe
  misc_feature (1)..(25): SEQ ID NO: 6404; WAN024BZT_at; Start 322; Stop 346
gcctttacaaattatggctatttag

SEQ ID NO: 100863 - DNA, 25 bp, Artificial
  probe
  misc_feature (1)..(25): SEQ ID NO: 6404; WAN024BZT_at; Start 423; Stop 447
tgttggtgcaatagccgcagcagca

SEQ ID NO: 100864 - DNA, 25 bp, Artificial
  probe
  misc_feature (1)..(25): SEQ ID NO: 6404; WAN024BZT_at; Start 436; Stop 460
gccgcagcagcatgtagtaaaattg

SEQ ID NO: 100865 - DNA, 25 bp, Artificial
  probe
  misc_feature (1)..(25): SEQ ID NO: 6404; WAN024BZT_at; Start 37; Stop 61
ctaaaagaacgcgaagttacaattg

SEQ ID NO: 100866 - DNA, 25 bp, Artificial
  probe
  misc_feature (1)..(25): SEQ ID NO: 6404; WAN024BZT_at; Start 206; Stop 230
tagctgaagcacaaaaactatctcc

SEQ ID NO: 100867 - DNA, 25 bp, Artificial
  probe
  misc_feature (1)..(25): SEQ ID NO: 6404; WAN024BZT_at; Start 388; Stop 412
cacgaaggtgtttgtaatgtatttc

SEQ ID NO: 100868 - DNA, 25 bp, Artificial
  probe
  misc_feature (1)..(25): SEQ ID NO: 6404; WAN024BZT_at; Start 280; Stop 304
gaagtaatcgtcttatcgatattga

SEQ ID NO: 100869 - DNA, 25 bp, Artificial
  probe
  misc_feature (1)..(25): SEQ ID NO: 6404; WAN024BZT_at; Start 180; Stop 204
tatgacaggaattgagttagataag

SEQ ID NO: 100870 - DNA, 25 bp, Artificial
  probe
  misc_feature (1)..(25): SEQ ID NO: 6404; WAN024BZT_at; Start 211; Stop 235
gaagcacaaaaactatctccagaat

SEQ ID NO: 100871 - DNA, 25 bp, Artificial
  probe
  misc_feature (1)..(25): SEQ ID NO: 6404; WAN024BZT_at; Start 56; Stop 80
caattgaagatatggcagcgttagt

SEQ ID NO: 100872 - DNA, 25 bp, Artificial
  probe
  misc_feature (1)..(25): SEQ ID NO: 6404; WAN024BZT_at; Start 126; Stop 150
cgcttcatatgcaattcaacgtgta

SEQ ID NO: 100873 - DNA, 25 bp, Artificial
  probe
  misc_feature (1)..(25): SEQ ID NO: 6404; WAN024BZT_at; Start 25; Stop 49
tgtattgaacttctaaaagaacgcg

SEQ ID NO: 100874 - DNA, 25 bp, Artificial
  probe
  misc_feature (1)..(25): SEQ ID NO: 6404; WAN024BZT_at; Start 418; Stop 442
gatattgttggtgcaatagccgcag

SEQ ID NO: 100875 - DNA, 25 bp, Artificial
  probe
  misc_feature (1)..(25): SEQ ID NO: 6404; WAN024BZT_at; Start 452; Stop 476
gtaaaattgcacacaatcatgctag

SEQ ID NO: 100876 - DNA, 25 bp, Artificial
  probe
  misc_feature (1)..(25): SEQ ID NO: 6404; WAN024BZT_at; Start 113; Stop 137
taactcttgacgacgcttcatatgc

SEQ ID NO: 100877 - DNA, 25 bp, Artificial
  probe
  misc_feature (1)..(25): SEQ ID NO: 6404; WAN024BZT_at; Start 86; Stop 110
tttcacaacaaaaatattaccctga

SEQ ID NO: 100878 - DNA, 25 bp, Artificial
  probe
  misc_feature (1)..(25): SEQ ID NO: 6404; WAN024BZT_at; Start 377; Stop 401
tgaatgagaatcacgaaggtgtttg

SEQ ID NO: 100879 - DNA, 25 bp, Artificial
  probe
  misc_feature (1)..(25): SEQ ID NO: 6404; WAN024BZT_at; Start 430; Stop 454
gcaatagccgcagcagcatgtagta

SEQ ID NO: 100880 - DNA, 25 bp, Artificial
  probe
  misc_feature (1)..(25): SEQ ID NO: 6404; WAN024BZT_at; Start 355; Stop 379
aaaccactgattttagaaagattga

SEQ ID NO: 100881 - DNA, 25 bp, Artificial
  probe
  misc_feature (1)..(25): SEQ ID NO: 6404; WAN024BZT_at; Start 262; Stop 286
ccattgtatgggattgatgaagtaa

SEQ ID NO: 100882 - DNA, 25 bp, Artificial
  probe
  misc_feature (1)..(25): SEQ ID NO: 6404; WAN024BZT_at; Start 121; Stop 145
gacgacgcttcatatgcaattcaac

SEQ ID NO: 100883 - DNA, 25 bp, Artificial
  probe
  misc_feature (1)..(25): SEQ ID NO: 6404; WAN024BZT_at; Start 48; Stop 72
cgaagttacaattgaagatatggca

SEQ ID NO: 100884 - DNA, 25 bp, Artificial
  probe
  misc_feature (1)..(25): SEQ ID NO: 6404; WAN024BZT_at; Start 340; Stop 364
tatttagataaattaaaaccactga

SEQ ID NO: 100885 - DNA, 25 bp, Artificial
  probe
  misc_feature (1)..(25): SEQ ID NO: 6404; WAN024BZT_at; Start 367; Stop 391
ttagaaagattgaatgagaatcacg

SEQ ID NO: 100886 - DNA, 25 bp, Artificial
  probe
  misc_feature (1)..(25): SEQ ID NO: 6404; WAN024BZT_at; Start 103; Stop 127
taccctgaattaactcttgacgacg

SEQ ID NO: 100887 - DNA, 25 bp, Artificial
  probe
  misc_feature (1)..(25): SEQ ID NO: 6404; WAN024BZT_at; Start 461; Stop 485
cacacaatcatgctagtgatgaaat

SEQ ID NO: 100888 - DNA, 25 bp, Artificial
  probe
  misc_feature (1)..(25): SEQ ID NO: 6404; WAN024BZT_at; Start 226; Stop 250
tctccagaatttcaaaagattatgg

SEQ ID NO: 100889 - DNA, 25 bp, Artificial
  probe
  misc_feature (1)..(25): SEQ ID NO: 6529; WAN024BZU_at; Start 50; Stop 74
taaaaaatgcttactgtccgtattc

SEQ ID NO: 100890 - DNA, 25 bp, Artificial
  probe
  misc_feature (1)..(25): SEQ ID NO: 6529; WAN024BZU_at; Start 327; Stop 351
tctattaaatggtaagggaaacata

SEQ ID NO: 100891 - DNA, 25 bp, Artificial
  probe
  misc_feature (1)..(25): SEQ ID NO: 6529; WAN024BZU_at; Start 212; Stop 236
gaaaaggagatattcttgcgattgc

SEQ ID NO: 100892 - DNA, 25 bp, Artificial
  probe
  misc_feature (1)..(25): SEQ ID NO: 6529; WAN024BZU_at; Start 158; Stop 182
taactaactgtgcagaacgtagtgc

SEQ ID NO: 100893 - DNA, 25 bp, Artificial
  probe
  misc_feature (1)..(25): SEQ ID NO: 6529; WAN024BZU_at; Start 369; Stop 393
ggaattagtcccatattcgttctca

SEQ ID NO: 100894 - DNA, 25 bp, Artificial
  probe
  misc_feature (1)..(25): SEQ ID NO: 6529; WAN024BZU_at; Start 304; Stop 328
tgtgagcctgataccttagtctttc

SEQ ID NO: 100895 - DNA, 25 bp, Artificial
  probe
  misc_feature (1)..(25): SEQ ID NO: 6529; WAN024BZU_at; Start 230; Stop 254
cgattgctgttgcaggtgaaactga

SEQ ID NO: 100896 - DNA, 25 bp, Artificial
  probe
  misc_feature (1)..(25): SEQ ID NO: 6529; WAN024BZU_at; Start 286; Stop 310
caagttatggtagaattttgtgagc

SEQ ID NO: 100897 - DNA, 25 bp, Artificial
  probe
  misc_feature (1)..(25): SEQ ID NO: 6529; WAN024BZU_at; Start 296; Stop 320
tagaattttgtgagcctgatacctt

SEQ ID NO: 100898 - DNA, 25 bp, Artificial
  probe
  misc_feature (1)..(25): SEQ ID NO: 6529; WAN024BZU_at; Start 356; Stop 380
aattgcgattagaggaattagtccc

SEQ ID NO: 100899 - DNA, 25 bp, Artificial
  probe
  misc_feature (1)..(25): SEQ ID NO: 6529; WAN024BZU_at; Start 265; Stop 289
ccaccatgcaacatttgtcgtcaag

SEQ ID NO: 100900 - DNA, 25 bp, Artificial
  probe
  misc_feature (1)..(25): SEQ ID NO: 6529; WAN024BZU_at; Start 196; Stop 220
gcttctcaaggatatagaaaaggag

SEQ ID NO: 100901 - DNA, 25 bp, Artificial
  probe
  misc_feature (1)..(25): SEQ ID NO: 6529; WAN024BZU_at; Start 15; Stop 39
taaatttgttttaatggagcaagca

SEQ ID NO: 100902 - DNA, 25 bp, Artificial
  probe
  misc_feature (1)..(25): SEQ ID NO: 6529; WAN024BZU_at; Start 73; Stop 97
tccaaatttcctgtaggtgcagcaa

SEQ ID NO: 100903 - DNA, 25 bp, Artificial
  probe
  misc_feature (1)..(25): SEQ ID NO: 6529; WAN024BZU_at; Start 376; Stop 400
gtcccatattcgttctcaagtctag

SEQ ID NO: 100904 - DNA, 25 bp, Artificial
  probe
  misc_feature (1)..(25): SEQ ID NO: 6529; WAN024BZU_at; Start 162; Stop 186
taactgtgcagaacgtagtgctatt

SEQ ID NO: 100905 - DNA, 25 bp, Artificial
  probe
  misc_feature (1)..(25): SEQ ID NO: 6529; WAN024BZU_at; Start 152; Stop 176
ttggtgtaactaactgtgcagaacg

SEQ ID NO: 100906 - DNA, 25 bp, Artificial
  probe
  misc_feature (1)..(25): SEQ ID NO: 6529; WAN024BZU_at; Start 109; Stop 133
gatggtaaagtaattacaggagcaa

SEQ ID NO: 100907 - DNA, 25 bp, Artificial
  probe
  misc_feature (1)..(25): SEQ ID NO: 6529; WAN024BZU_at; Start 313; Stop 337
gataccttagtctttctattaaatg

SEQ ID NO: 100908 - DNA, 25 bp, Artificial
  probe
  misc_feature (1)..(25): SEQ ID NO: 6529; WAN024BZU_at; Start 384; Stop 408
ttcgttctcaagtctagaaatgtaa

SEQ ID NO: 100909 - DNA, 25 bp, Artificial
  probe
  misc_feature (1)..(25): SEQ ID NO: 6529; WAN024BZU_at; Start 276; Stop 300
catttgtcgtcaagttatggtagaa

SEQ ID NO: 100910 - DNA, 25 bp, Artificial
  probe
  misc_feature (1)..(25): SEQ ID NO: 6529; WAN024BZU_at; Start 61; Stop 85
tactgtccgtattccaaatttcctg

SEQ ID NO: 100911 - DNA, 25 bp, Artificial
  probe
  misc_feature (1)..(25): SEQ ID NO: 6529; WAN024BZU_at; Start 339; Stop 363
taagggaaacatacttgaattgcga

SEQ ID NO: 100912 - DNA, 25 bp, Artificial
  probe
  misc_feature (1)..(25): SEQ ID NO: 6529; WAN024BZU_at; Start 137; Stop 161
tagaaaatgtatcgtttggtgtaac

SEQ ID NO: 100913 - DNA, 25 bp, Artificial
  probe
  misc_feature (1)..(25): SEQ ID NO: 6529; WAN024BZU_at; Start 252; Stop 276
tgaagactacttaccaccatgcaac

SEQ ID NO: 100914 - DNA, 25 bp, Artificial
  probe
  misc_feature (1)..(25): SEQ ID NO: 6529; WAN024BZU_at; Start 125; Stop 149
caggagcaaatatagaaaatgtatc

SEQ ID NO: 100915 - DNA, 25 bp, Artificial
  probe
  misc_feature (1)..(25): SEQ ID NO: 6529; WAN024BZU_at; Start 81; Stop 105
tcctgtaggtgcagcaattttattt

SEQ ID NO: 100916 - DNA, 25 bp, Artificial
  probe
  misc_feature (1)..(25): SEQ ID NO: 6529; WAN024BZU_at; Start 68; Stop 92
cgtattccaaatttcctgtaggtgc

SEQ ID NO: 100917 - DNA, 25 bp, Artificial
  probe
  misc_feature (1)..(25): SEQ ID NO: 6529; WAN024BZU_at; Start 244; Stop 268
ggtgaaactgaagactacttaccac

SEQ ID NO: 100918 - DNA, 25 bp, Artificial
  probe
  misc_feature (1)..(25): SEQ ID NO: 6529; WAN024BZU_at; Start 170; Stop 194
cagaacgtagtgctattttttatgg

SEQ ID NO: 100919 - DNA, 25 bp, Artificial
  probe
  misc_feature (1)..(25): SEQ ID NO: 6529; WAN024BZU_at; Start 225; Stop 249
tcttgcgattgctgttgcaggtgaa

SEQ ID NO: 100920 - DNA, 25 bp, Artificial
  probe
  misc_feature (1)..(25): SEQ ID NO: 6529; WAN024BZU_at; Start 348; Stop 372
catacttgaattgcgattagaggaa

SEQ ID NO: 100921 - DNA, 25 bp, Artificial
  probe
  misc_feature (1)..(25): SEQ ID NO: 6529; WAN024BZU_at; Start 146; Stop 170
tatcgtttggtgtaactaactgtgc

SEQ ID NO: 100922 - DNA, 25 bp, Artificial
  probe
  misc_feature (1)..(25): SEQ ID NO: 6529; WAN024BZU_at; Start 91; Stop 115
gcagcaattttatttaaagatggta

SEQ ID NO: 100923 - DNA, 25 bp, Artificial
  probe
  misc_feature (1)..(25): SEQ ID NO: 6540; WAN024BZV_at; Start 79; Stop 103
aagattcgtgcagccttgaaagaag

SEQ ID NO: 100924 - DNA, 25 bp, Artificial
  probe
  misc_feature (1)..(25): SEQ ID NO: 6540; WAN024BZV_at; Start 72; Stop 96
caaaccaaagattcgtgcagccttg

SEQ ID NO: 100925 - DNA, 25 bp, Artificial
  probe
  misc_feature (1)..(25): SEQ ID NO: 6540; WAN024BZV_at; Start 126; Stop 150
gaacacaagattagaatttgctcat

SEQ ID NO: 100926 - DNA, 25 bp, Artificial
  probe
  misc_feature (1)..(25): SEQ ID NO: 6540; WAN024BZV_at; Start 163; Stop 187
gctggtatgcttggagcctactatc

SEQ ID NO: 100927 - DNA, 25 bp, Artificial
  probe
  misc_feature (1)..(25): SEQ ID NO: 6540; WAN024BZV_at; Start 56; Stop 80
gacaagaagctatcctcaaaccaaa

SEQ ID NO: 100928 - DNA, 25 bp, Artificial
  probe
  misc_feature (1)..(25): SEQ ID NO: 6540; WAN024BZV_at; Start 76; Stop 100
ccaaagattcgtgcagccttgaaag

SEQ ID NO: 100929 - DNA, 25 bp, Artificial
  probe
  misc_feature (1)..(25): SEQ ID NO: 6540; WAN024BZV_at; Start 156; Stop 180
aaacactgctggtatgcttggagcc

SEQ ID NO: 100930 - DNA, 25 bp, Artificial
  probe
  misc_feature (1)..(25): SEQ ID NO: 6540; WAN024BZV_at; Start 64; Stop 88
gctatcctcaaaccaaagattcgtg

SEQ ID NO: 100931 - DNA, 25 bp, Artificial
  probe
  misc_feature (1)..(25): SEQ ID NO: 6540; WAN024BZV_at; Start 116; Stop 140
gtttggctgagaacacaagattaga

SEQ ID NO: 100932 - DNA, 25 bp, Artificial
  probe
  misc_feature (1)..(25): SEQ ID NO: 6540; WAN024BZV_at; Start 148; Stop 172
catcatcaaaacactgctggtatgc

SEQ ID NO: 100933 - DNA, 25 bp, Artificial
  probe
  misc_feature (1)..(25): SEQ ID NO: 6540; WAN024BZV_at; Start 175; Stop 199
ggagcctactatcattttaaaataa

SEQ ID NO: 100934 - DNA, 25 bp, Artificial
  probe
  misc_feature (1)..(25): SEQ ID NO: 6540; WAN024BZV_at; Start 154; Stop 178
caaaacactgctggtatgcttggag

SEQ ID NO: 100935 - DNA, 25 bp, Artificial
  probe
  misc_feature (1)..(25): SEQ ID NO: 6540; WAN024BZV_at; Start 6; Stop 30
gcactacgttgccaatccagaggtg

SEQ ID NO: 100936 - DNA, 25 bp, Artificial
  probe
  misc_feature (1)..(25): SEQ ID NO: 6540; WAN024BZV_at; Start 16; Stop 40
gccaatccagaggtggtcattctcg

SEQ ID NO: 100937 - DNA, 25 bp, Artificial
  probe
  misc_feature (1)..(25): SEQ ID NO: 6540; WAN024BZV_at; Start 48; Stop 72
catcatgggacaagaagctatcctc

SEQ ID NO: 100938 - DNA, 25 bp, Artificial
  probe
  misc_feature (1)..(25): SEQ ID NO: 6540; WAN024BZV_at; Start 131; Stop 155
caagattagaatttgctcatcatca

SEQ ID NO: 100939 - DNA, 25 bp, Artificial
  probe
  misc_feature (1)..(25): SEQ ID NO: 6540; WAN024BZV_at; Start 68; Stop 92
tcctcaaaccaaagattcgtgcagc

SEQ ID NO: 100940 - DNA, 25 bp, Artificial
  probe
  misc_feature (1)..(25): SEQ ID NO: 6540; WAN024BZV_at; Start 91; Stop 115
gccttgaaagaagtcttggttccaa

SEQ ID NO: 100941 - DNA, 25 bp, Artificial
  probe
  misc_feature (1)..(25): SEQ ID NO: 6540; WAN024BZV_at; Start 51; Stop 75
catgggacaagaagctatcctcaaa

SEQ ID NO: 100942 - DNA, 25 bp, Artificial
  probe
  misc_feature (1)..(25): SEQ ID NO: 6540; WAN024BZV_at; Start 45; Stop 69
tggcatcatgggacaagaagctatc

SEQ ID NO: 100943 - DNA, 25 bp, Artificial
  probe
  misc_feature (1)..(25): SEQ ID NO: 6540; WAN024BZV_at; Start 144; Stop 168
tgctcatcatcaaaacactgctggt

SEQ ID NO: 100944 - DNA, 25 bp, Artificial
  probe
  misc_feature (1)..(25): SEQ ID NO: 6540; WAN024BZV_at; Start 19; Stop 43
aatccagaggtggtcattctcgagg

SEQ ID NO: 100945 - DNA, 25 bp, Artificial
  probe
  misc_feature (1)..(25): SEQ ID NO: 6540; WAN024BZV_at; Start 34; Stop 58
attctcgagggtggcatcatgggac

SEQ ID NO: 100946 - DNA, 25 bp, Artificial
  probe
  misc_feature (1)..(25): SEQ ID NO: 6540; WAN024BZV_at; Start 105; Stop 129
cttggttccaagtttggctgagaac

SEQ ID NO: 100947 - DNA, 25 bp, Artificial
  probe
  misc_feature (1)..(25): SEQ ID NO: 6540; WAN024BZV_at; Start 159; Stop 183
cactgctggtatgcttggagcctac

SEQ ID NO: 100948 - DNA, 25 bp, Artificial
  probe
  misc_feature (1)..(25): SEQ ID NO: 6540; WAN024BZV_at; Start 12; Stop 36
cgttgccaatccagaggtggtcatt

SEQ ID NO: 100949 - DNA, 25 bp, Artificial
  probe
  misc_feature (1)..(25): SEQ ID NO: 6540; WAN024BZV_at; Start 32; Stop 56
tcattctcgagggtggcatcatggg

SEQ ID NO: 100950 - DNA, 25 bp, Artificial
  probe
  misc_feature (1)..(25): SEQ ID NO: 6540; WAN024BZV_at; Start 2; Stop 26
tgacgcactacgttgccaatccaga

SEQ ID NO: 100951 - DNA, 25 bp, Artificial
  probe
  misc_feature (1)..(25): SEQ ID NO: 6540; WAN024BZV_at; Start 10; Stop 34
tacgttgccaatccagaggtggtca

SEQ ID NO: 100952 - DNA, 25 bp, Artificial
  probe
  misc_feature (1)..(25): SEQ ID NO: 6540; WAN024BZV_at; Start 166; Stop 190
ggtatgcttggagcctactatcatt

SEQ ID NO: 100953 - DNA, 25 bp, Artificial
  probe
  misc_feature (1)..(25): SEQ ID NO: 6540; WAN024BZV_at; Start 28; Stop 52
gtggtcattctcgagggtggcatca

SEQ ID NO: 100954 - DNA, 25 bp, Artificial
  probe
  misc_feature (1)..(25): SEQ ID NO: 6540; WAN024BZV_at; Start 120; Stop 144
ggctgagaacacaagattagaattt

SEQ ID NO: 100955 - DNA, 25 bp, Artificial
  probe
  misc_feature (1)..(25): SEQ ID NO: 6540; WAN024BZV_at; Start 171; Stop 195
gcttggagcctactatcattttaaa

SEQ ID NO: 100956 - DNA, 25 bp, Artificial
  probe
  misc_feature (1)..(25): SEQ ID NO: 6540; WAN024BZV_at; Start 111; Stop 135
tccaagtttggctgagaacacaaga

SEQ ID NO: 100957 - DNA, 25 bp, Artificial
  probe
  misc_feature (1)..(25): SEQ ID NO: 6992; WAN024BZW_at; Start 179; Stop 203
taacacttgataggaagcctagagc

SEQ ID NO: 100958 - DNA, 25 bp, Artificial
  probe
  misc_feature (1)..(25): SEQ ID NO: 6992; WAN024BZW_at; Start 547; Stop 571
gctataattggtgcaggtgctaccg

SEQ ID NO: 100959 - DNA, 25 bp, Artificial
  probe
  misc_feature (1)..(25): SEQ ID NO: 6992; WAN024BZW_at; Start 276; Stop 300
taatgttatatgtaattccgcgaga

SEQ ID NO: 100960 - DNA, 25 bp, Artificial
  probe
  misc_feature (1)..(25): SEQ ID NO: 6992; WAN024BZW_at; Start 504; Stop 528
tgcaggagcaacaattagagatgcg

SEQ ID NO: 100961 - DNA, 25 bp, Artificial
  probe
  misc_feature (1)..(25): SEQ ID NO: 6992; WAN024BZW_at; Start 189; Stop 213
taggaagcctagagcaattgttgca

SEQ ID NO: 100962 - DNA, 25 bp, Artificial
  probe
  misc_feature (1)..(25): SEQ ID NO: 6992; WAN024BZW_at; Start 26; Stop 50
taggttcaggagatcaaggattggc

SEQ ID NO: 100963 - DNA, 25 bp, Artificial
  probe
  misc_feature (1)..(25): SEQ ID NO: 6992; WAN024BZW_at; Start 103; Stop 127
gaaggtcgctttattggttgcaaaa

SEQ ID NO: 100964 - DNA, 25 bp, Artificial
  probe
  misc_feature (1)..(25): SEQ ID NO: 6992; WAN024BZW_at; Start 489; Stop 513
taacgtttttattggtgcaggagca

SEQ ID NO: 100965 - DNA, 25 bp, Artificial
  probe
  misc_feature (1)..(25): SEQ ID NO: 6992; WAN024BZW_at; Start 357; Stop 381
tcaagcacttgtagaaatcggtgac

SEQ ID NO: 100966 - DNA, 25 bp, Artificial
  probe
  misc_feature (1)..(25): SEQ ID NO: 6992; WAN024BZW_at; Start 13; Stop 37
gatatgtttatactaggttcaggag

SEQ ID NO: 100967 - DNA, 25 bp, Artificial
  probe
  misc_feature (1)..(25): SEQ ID NO: 6992; WAN024BZW_at; Start 526; Stop 550
gcggtaagcattggctttggtgcta

SEQ ID NO: 100968 - DNA, 25 bp, Artificial
  probe
  misc_feature (1)..(25): SEQ ID NO: 6992; WAN024BZW_at; Start 597; Stop 621
tgtggtagtaggaacaccagggaaa

SEQ ID NO: 100969 - DNA, 25 bp, Artificial
  probe
  misc_feature (1)..(25): SEQ ID NO: 6992; WAN024BZW_at; Start 564; Stop 588
tgctaccgtaatacataacgtaccg

SEQ ID NO: 100970 - DNA, 25 bp, Artificial
  probe
  misc_feature (1)..(25): SEQ ID NO: 6992; WAN024BZW_at; Start 60; Stop 84
aatttatgaaggtgaagttgaggga

SEQ ID NO: 100971 - DNA, 25 bp, Artificial
  probe
  misc_feature (1)..(25): SEQ ID NO: 6992; WAN024BZW_at; Start 340; Stop 364
ggtaccaatgtgactattcaagcac

SEQ ID NO: 100972 - DNA, 25 bp, Artificial
  probe
  misc_feature (1)..(25): SEQ ID NO: 6992; WAN024BZW_at; Start 87; Stop 111
ggtagatatttttgaggaaggtcgc

SEQ ID NO: 100973 - DNA, 25 bp, Artificial
  probe
  misc_feature (1)..(25): SEQ ID NO: 6992; WAN024BZW_at; Start 216; Stop 240
tggtgataattttaagcgcgaagaa

SEQ ID NO: 100974 - DNA, 25 bp, Artificial
  probe
  misc_feature (1)..(25): SEQ ID NO: 6992; WAN024BZW_at; Start 449; Stop 473
ccccaggtgttatattatctggaaa

SEQ ID NO: 100975 - DNA, 25 bp, Artificial
  probe
  misc_feature (1)..(25): SEQ ID NO: 6992; WAN024BZW_at; Start 72; Stop 96
tgaagttgagggattggtagatatt

SEQ ID NO: 100976 - DNA, 25 bp, Artificial
  probe
  misc_feature (1)..(25): SEQ ID NO: 6992; WAN024BZW_at; Start 329; Stop 353
gaaattttattggtaccaatgtgac

SEQ ID NO: 100977 - DNA, 25 bp, Artificial
  probe
  misc_feature (1)..(25): SEQ ID NO: 6992; WAN024BZW_at; Start 50; Stop 74
cggtattgtcaatttatgaaggtga

SEQ ID NO: 100978 - DNA, 25 bp, Artificial
  probe
  misc_feature (1)..(25): SEQ ID NO: 6992; WAN024BZW_at; Start 36; Stop 60
agatcaaggattggcggtattgtca

SEQ ID NO: 100979 - DNA, 25 bp, Artificial
  probe
  misc_feature (1)..(25): SEQ ID NO: 6992; WAN024BZW_at; Start 433; Stop 457
aataatgtaaatatttccccaggtg

SEQ ID NO: 100980 - DNA, 25 bp, Artificial
  probe
  misc_feature (1)..(25): SEQ ID NO: 6992; WAN024BZW_at; Start 173; Stop 197
tactcttaacacttgataggaagcc

SEQ ID NO: 100981 - DNA, 25 bp, Artificial
  probe
  misc_feature (1)..(25): SEQ ID NO: 6992; WAN024BZW_at; Start 533; Stop 557
gcattggctttggtgctataattgg

SEQ ID NO: 100982 - DNA, 25 bp, Artificial
  probe
  misc_feature (1)..(25): SEQ ID NO: 6992; WAN024BZW_at; Start 556; Stop 580
ggtgcaggtgctaccgtaatacata

SEQ ID NO: 100983 - DNA, 25 bp, Artificial
  probe
  misc_feature (1)..(25): SEQ ID NO: 6992; WAN024BZW_at; Start 374; Stop 398
tcggtgacaacaatattataaattc

SEQ ID NO: 100984 - DNA, 25 bp, Artificial
  probe
  misc_feature (1)..(25): SEQ ID NO: 6992; WAN024BZW_at; Start 590; Stop 614
aaaatgctgtggtagtaggaacacc

SEQ ID NO: 100985 - DNA, 25 bp, Artificial
  probe
  misc_feature (1)..(25): SEQ ID NO: 6992; WAN024BZW_at; Start 577; Stop 601
cataacgtaccggaaaatgctgtgg

SEQ ID NO: 100986 - DNA, 25 bp, Artificial
  probe
  misc_feature (1)..(25): SEQ ID NO: 6992; WAN024BZW_at; Start 392; Stop 416
taaattctggtagtattgtttcatg

SEQ ID NO: 100987 - DNA, 25 bp, Artificial
  probe
  misc_feature (1)..(25): SEQ ID NO: 6992; WAN024BZW_at; Start 251; Stop 275
catataaaaataaggtggagtacat

SEQ ID NO: 100988 - DNA, 25 bp, Artificial
  probe
  misc_feature (1)..(25): SEQ ID NO: 6992; WAN024BZW_at; Start 118; Stop 142
ggttgcaaaatcttagataaaactg

SEQ ID NO: 100989 - DNA, 25 bp, Artificial
  probe
  misc_feature (1)..(25): SEQ ID NO: 6992; WAN024BZW_at; Start 512; Stop 536
caacaattagagatgcggtaagcat

SEQ ID NO: 100990 - DNA, 25 bp, Artificial
  probe
  misc_feature (1)..(25): SEQ ID NO: 6992; WAN024BZW_at; Start 228; Stop 252
taagcgcgaagaaatattttgttca

SEQ ID NO: 100991 - DNA, 25 bp, Artificial
  probe
  misc_feature (1)..(25): SEQ ID NO: 6830; WAN024BZX_at; Start 509; Stop 533
caatttattggtcactttatgctgg

SEQ ID NO: 100992 - DNA, 25 bp, Artificial
  probe
  misc_feature (1)..(25): SEQ ID NO: 6830; WAN024BZX_at; Start 184; Stop 208
ttatcaagactaaaggaaattatgg

SEQ ID NO: 100993 - DNA, 25 bp, Artificial
  probe
  misc_feature (1)..(25): SEQ ID NO: 6830; WAN024BZX_at; Start 552; Stop 576
cccgtttgttgatatgcaaggatgg

SEQ ID NO: 100994 - DNA, 25 bp, Artificial
  probe
  misc_feature (1)..(25): SEQ ID NO: 6830; WAN024BZX_at; Start 539; Stop 563
tattactctttagcccgtttgttga

SEQ ID NO: 100995 - DNA, 25 bp, Artificial
  probe
  misc_feature (1)..(25): SEQ ID NO: 6830; WAN024BZX_at; Start 124; Stop 148
gcagtgtgggcttttttcaattctt

SEQ ID NO: 100996 - DNA, 25 bp, Artificial
  probe
  misc_feature (1)..(25): SEQ ID NO: 6830; WAN024BZX_at; Start 357; Stop 381
cataataagtgtcatcaagaatggc

SEQ ID NO: 100997 - DNA, 25 bp, Artificial
  probe
  misc_feature (1)..(25): SEQ ID NO: 6830; WAN024BZX_at; Start 461; Stop 485
tctcaggtaataaagaagtttctct

SEQ ID NO: 100998 - DNA, 25 bp, Artificial
  probe
  misc_feature (1)..(25): SEQ ID NO: 6830; WAN024BZX_at; Start 665; Stop 689
tagtgttatcccaattcgaattatc

SEQ ID NO: 100999 - DNA, 25 bp, Artificial
  probe
  misc_feature (1)..(25): SEQ ID NO: 6830; WAN024BZX_at; Start 820; Stop 844
tggcctctattaagtagatttggaa

SEQ ID NO: 101000 - DNA, 25 bp, Artificial
  probe
  misc_feature (1)..(25): SEQ ID NO: 6830; WAN024BZX_at; Start 911; Stop 935
tgggatacgagaagataagagaatt

SEQ ID NO: 101001 - DNA, 25 bp, Artificial
  probe
  misc_feature (1)..(25): SEQ ID NO: 6830; WAN024BZX_at; Start 780; Stop 804
taaatacggttggattggagcatta

SEQ ID NO: 101002 - DNA, 25 bp, Artificial
  probe
  misc_feature (1)..(25): SEQ ID NO: 6830; WAN024BZX_at; Start 372; Stop 396
caagaatggctataaaactgtacta

SEQ ID NO: 101003 - DNA, 25 bp, Artificial
  probe
  misc_feature (1)..(25): SEQ ID NO: 6830; WAN024BZX_at; Start 29; Stop 53
tatattacggaatcagttcagcggc

SEQ ID NO: 101004 - DNA, 25 bp, Artificial
  probe
  misc_feature (1)..(25): SEQ ID NO: 6830; WAN024BZX_at; Start 568; Stop 592
caaggatgggttagagctattgaaa

SEQ ID NO: 101005 - DNA, 25 bp, Artificial
  probe
  misc_feature (1)..(25): SEQ ID NO: 6830; WAN024BZX_at; Start 836; Stop 860
gatttggaatacttacgttatggac

SEQ ID NO: 101006 - DNA, 25 bp, Artificial
  probe
  misc_feature (1)..(25): SEQ ID NO: 6830; WAN024BZX_at; Start 803; Stop 827
taatagcttgtcttctttggcctct

SEQ ID NO: 101007 - DNA, 25 bp, Artificial
  probe
  misc_feature (1)..(25): SEQ ID NO: 6830; WAN024BZX_at; Start 612; Stop 636
tgaagcctttggattgtcagggata

SEQ ID NO: 101008 - DNA, 25 bp, Artificial
  probe
  misc_feature (1)..(25): SEQ ID NO: 6830; WAN024BZX_at; Start 870; Stop 894
tagttttagagcaattgtagtggca

SEQ ID NO: 101009 - DNA, 25 bp, Artificial
  probe
  misc_feature (1)..(25): SEQ ID NO: 6830; WAN024BZX_at; Start 681; Stop 705
cgaattatcagttcatatgggaata

SEQ ID NO: 101010 - DNA, 25 bp, Artificial
  probe
  misc_feature (1)..(25): SEQ ID NO: 6830; WAN024BZX_at; Start 270; Stop 294
tttacaggcaatgttccaaatggga

SEQ ID NO: 101011 - DNA, 25 bp, Artificial
  probe
  misc_feature (1)..(25): SEQ ID NO: 6830; WAN024BZX_at; Start 13; Stop 37
caagtgcgaaggaaattatattacg

SEQ ID NO: 101012 - DNA, 25 bp, Artificial
  probe
  misc_feature (1)..(25): SEQ ID NO: 6830; WAN024BZX_at; Start 234; Stop 258
tatggctatagttcaatgcttttcg

SEQ ID NO: 101013 - DNA, 25 bp, Artificial
  probe
  misc_feature (1)..(25): SEQ ID NO: 6830; WAN024BZX_at; Start 475; Stop 499
gaagtttctctacgtgcatacacgg

SEQ ID NO: 101014 - DNA, 25 bp, Artificial
  probe
  misc_feature (1)..(25): SEQ ID NO: 6830; WAN024BZX_at; Start 323; Stop 347
caacgttaatttctttatttgctgg

SEQ ID NO: 101015 - DNA, 25 bp, Artificial
  probe
  misc_feature (1)..(25): SEQ ID NO: 6830; WAN024BZX_at; Start 741; Stop 765
tacaattcaaccgaatgctcatgca

SEQ ID NO: 101016 - DNA, 25 bp, Artificial
  probe
  misc_feature (1)..(25): SEQ ID NO: 6830; WAN024BZX_at; Start 2; Stop 26
tggaggataatcaagtgcgaaggaa

SEQ ID NO: 101017 - DNA, 25 bp, Artificial
  probe
  misc_feature (1)..(25): SEQ ID NO: 6830; WAN024BZX_at; Start 110; Stop 134
gggtaatcccttttgcagtgtgggc

SEQ ID NO: 101018 - DNA, 25 bp, Artificial
  probe
  misc_feature (1)..(25): SEQ ID NO: 6830; WAN024BZX_at; Start 410; Stop 434
tacagtggttgataagtatattagc

SEQ ID NO: 101019 - DNA, 25 bp, Artificial
  probe
  misc_feature (1)..(25): SEQ ID NO: 6830; WAN024BZX_at; Start 729; Stop 753
gatctctacatctacaattcaaccg

SEQ ID NO: 101020 - DNA, 25 bp, Artificial
  probe
  misc_feature (1)..(25): SEQ ID NO: 6830; WAN024BZX_at; Start 857; Stop 881
ggacatatcttgctagttttagagc

SEQ ID NO: 101021 - DNA, 25 bp, Artificial
  probe
  misc_feature (1)..(25): SEQ ID NO: 6830; WAN024BZX_at; Start 303; Stop 327
tggtctctcttcaagtatgtcaacg

SEQ ID NO: 101022 - DNA, 25 bp, Artificial
  probe
  misc_feature (1)..(25): SEQ ID NO: 6830; WAN024BZX_at; Start 286; Stop 310
caaatgggaactttaattggtctct

SEQ ID NO: 101023 - DNA, 25 bp, Artificial
  probe
  misc_feature (1)..(25): SEQ ID NO: 6830; WAN024BZX_at; Start 487; Stop 511
cgtgcatacacggacgtaaattcaa

SEQ ID NO: 101024 - DNA, 25 bp, Artificial
  probe
  misc_feature (1)..(25): SEQ ID NO: 6830; WAN024BZX_at; Start 217; Stop 241
ctctggttagtatactttatggcta

SEQ ID NO: 101025 - DNA, 25 bp, Artificial
  probe
  misc_feature (1)..(25): SEQ ID NO: 6927; WAN024BZY_at; Start 181; Stop 205
gcatccataggaagatattatcaag

SEQ ID NO: 101026 - DNA, 25 bp, Artificial
  probe
  misc_feature (1)..(25): SEQ ID NO: 6927; WAN024BZY_at; Start 882; Stop 906
cattctcagtggtggtttggcggtc

SEQ ID NO: 101027 - DNA, 25 bp, Artificial
  probe
  misc_feature (1)..(25): SEQ ID NO: 6927; WAN024BZY_at; Start 34; Stop 58
ccgaaaggcttttttgatcttgatg

SEQ ID NO: 101028 - DNA, 25 bp, Artificial
  probe
  misc_feature (1)..(25): SEQ ID NO: 6927; WAN024BZY_at; Start 1080; Stop 1104
tatagctaaagctaagaggagggcc

SEQ ID NO: 101029 - DNA, 25 bp, Artificial
  probe
  misc_feature (1)..(25): SEQ ID NO: 6927; WAN024BZY_at; Start 389; Stop 413
cctcaatcgatgagttacagtttaa

SEQ ID NO: 101030 - DNA, 25 bp, Artificial
  probe
  misc_feature (1)..(25): SEQ ID NO: 6927; WAN024BZY_at; Start 18; Stop 42
tattaagttagattatccgaaaggc

SEQ ID NO: 101031 - DNA, 25 bp, Artificial
  probe
  misc_feature (1)..(25): SEQ ID NO: 6927; WAN024BZY_at; Start 1128; Stop 1152
tatagctattggtgaaagggaaaaa

SEQ ID NO: 101032 - DNA, 25 bp, Artificial
  probe
  misc_feature (1)..(25): SEQ ID NO: 6927; WAN024BZY_at; Start 700; Stop 724
tgtcaaatgcagaaatatatagagt

SEQ ID NO: 101033 - DNA, 25 bp, Artificial
  probe
  misc_feature (1)..(25): SEQ ID NO: 6927; WAN024BZY_at; Start 433; Stop 457
gagattcttgattcacttgagctag

SEQ ID NO: 101034 - DNA, 25 bp, Artificial
  probe
  misc_feature (1)..(25): SEQ ID NO: 6927; WAN024BZY_at; Start 168; Stop 192
tgaatacacccatgcatccatagga

SEQ ID NO: 101035 - DNA, 25 bp, Artificial
  probe
  misc_feature (1)..(25): SEQ ID NO: 6927; WAN024BZY_at; Start 127; Stop 151
gaattgatcaaagtgtcatctgctg

SEQ ID NO: 101036 - DNA, 25 bp, Artificial
  probe
  misc_feature (1)..(25): SEQ ID NO: 6927; WAN024BZY_at; Start 827; Stop 851
catttttagatgctggaacttactc

SEQ ID NO: 101037 - DNA, 25 bp, Artificial
  probe
  misc_feature (1)..(25): SEQ ID NO: 6927; WAN024BZY_at; Start 154; Stop 178
tatagtcgtttaaatgaatacaccc

SEQ ID NO: 101038 - DNA, 25 bp, Artificial
  probe
  misc_feature (1)..(25): SEQ ID NO: 6927; WAN024BZY_at; Start 661; Stop 685
tgtagggttcataaactattcgaac

SEQ ID NO: 101039 - DNA, 25 bp, Artificial
  probe
  misc_feature (1)..(25): SEQ ID NO: 6927; WAN024BZY_at; Start 680; Stop 704
tcgaactaattgatgaactttgtca

SEQ ID NO: 101040 - DNA, 25 bp, Artificial
  probe
  misc_feature (1)..(25): SEQ ID NO: 6927; WAN024BZY_at; Start 869; Stop 893
taactaaaaagaacattctcagtgg

SEQ ID NO: 101041 - DNA, 25 bp, Artificial
  probe
  misc_feature (1)..(25): SEQ ID NO: 6927; WAN024BZY_at; Start 88; Stop 112
gaaaatcatttaaggagcatagcct

SEQ ID NO: 101042 - DNA, 25 bp, Artificial
  probe
  misc_feature (1)..(25): SEQ ID NO: 6927; WAN024BZY_at; Start 803; Stop 827
aatgtgtagataaatatgagagacc

SEQ ID NO: 101043 - DNA, 25 bp, Artificial
  probe
  misc_feature (1)..(25): SEQ ID NO: 6927; WAN024BZY_at; Start 1009; Stop 1033
aatattttgactctcatccgaaagg

SEQ ID NO: 101044 - DNA, 25 bp, Artificial
  probe
  misc_feature (1)..(25): SEQ ID NO: 6927; WAN024BZY_at; Start 346; Stop 370
ctacgggagttttcacaattttgct

SEQ ID NO: 101045 - DNA, 25 bp, Artificial
  probe
  misc_feature (1)..(25): SEQ ID NO: 6927; WAN024BZY_at; Start 1095; Stop 1119
gaggagggcctacattcagaaatac

SEQ ID NO: 101046 - DNA, 25 bp, Artificial
  probe
  misc_feature (1)..(25): SEQ ID NO: 6927; WAN024BZY_at; Start 754; Stop 778
aatttgttcgactttagaggatctg

SEQ ID NO: 101047 - DNA, 25 bp, Artificial
  probe
  misc_feature (1)..(25): SEQ ID NO: 6927; WAN024BZY_at; Start 445; Stop 469
tcacttgagctagaaagtgtagtta

SEQ ID NO: 101048 - DNA, 25 bp, Artificial
  probe
  misc_feature (1)..(25): SEQ ID NO: 6927; WAN024BZY_at; Start 976; Stop 1000
ggtggagagaatttcaaaatcgatg

SEQ ID NO: 101049 - DNA, 25 bp, Artificial
  probe
  misc_feature (1)..(25): SEQ ID NO: 6927; WAN024BZY_at; Start 137; Stop 161
aagtgtcatctgctgtttatagtcg

SEQ ID NO: 101050 - DNA, 25 bp, Artificial
  probe
  misc_feature (1)..(25): SEQ ID NO: 6927; WAN024BZY_at; Start 719; Stop 743
tagagtatatacaacatcgcattac

SEQ ID NO: 101051 - DNA, 25 bp, Artificial
  probe
  misc_feature (1)..(25): SEQ ID NO: 6927; WAN024BZY_at; Start 239; Stop 263
gctcggatggttctatgtctatact

SEQ ID NO: 101052 - DNA, 25 bp, Artificial
  probe
  misc_feature (1)..(25): SEQ ID NO: 6927; WAN024BZY_at; Start 224; Stop 248
gaaatatcggactaagctcggatgg

SEQ ID NO: 101053 - DNA, 25 bp, Artificial
  probe
  misc_feature (1)..(25): SEQ ID NO: 6927; WAN024BZY_at; Start 1063; Stop 1087
gaagttagttcgttggctatagcta

SEQ ID NO: 101054 - DNA, 25 bp, Artificial
  probe
  misc_feature (1)..(25): SEQ ID NO: 6927; WAN024BZY_at; Start 378; Stop 402
ttttaatgcttcctcaatcgatgag

SEQ ID NO: 101055 - DNA, 25 bp, Artificial
  probe
  misc_feature (1)..(25): SEQ ID NO: 6927; WAN024BZY_at; Start 299; Stop 323
gttataaggtttgttccaatgcaac

SEQ ID NO: 101056 - DNA, 25 bp, Artificial
  probe
  misc_feature (1)..(25): SEQ ID NO: 6927; WAN024BZY_at; Start 104; Stop 128
gcatagcctctataaatggttttga

SEQ ID NO: 101057 - DNA, 25 bp, Artificial
  probe
  misc_feature (1)..(25): SEQ ID NO: 6927; WAN024BZY_at; Start 895; Stop 919
ggtttggcggtctgtatagaagcta

SEQ ID NO: 101058 - DNA, 25 bp, Artificial
  probe
  misc_feature (1)..(25): SEQ ID NO: 6927; WAN024BZY_at; Start 535; Stop 559
tatgagttgagaaagagtaaagaca

SEQ ID NO: 101059 - DNA, 25 bp, Artificial
  probe
  misc_feature (1)..(25): SEQ ID NO: 6807; WAN024BZZ_at; Start 87; Stop 111
gaataggatagcaattataggagga

SEQ ID NO: 101060 - DNA, 25 bp, Artificial
  probe
  misc_feature (1)..(25): SEQ ID NO: 6807; WAN024BZZ_at; Start 457; Stop 481
gatgatgtgttgtatctcccctccc

SEQ ID NO: 101061 - DNA, 25 bp, Artificial
  probe
  misc_feature (1)..(25): SEQ ID NO: 6807; WAN024BZZ_at; Start 775; Stop 799
tatggtatggtagagacaaccgcag

SEQ ID NO: 101062 - DNA, 25 bp, Artificial
  probe
  misc_feature (1)..(25): SEQ ID NO: 6807; WAN024BZZ_at; Start 609; Stop 633
aacggttatggtacctactacgatg

SEQ ID NO: 101063 - DNA, 25 bp, Artificial
  probe
  misc_feature (1)..(25): SEQ ID NO: 6807; WAN024BZZ_at; Start 1087; Stop 1111
cagattattcttcaattgccagata

SEQ ID NO: 101064 - DNA, 25 bp, Artificial
  probe
  misc_feature (1)..(25): SEQ ID NO: 6807; WAN024BZZ_at; Start 371; Stop 395
caggagtgcctaagccggtaatgat

SEQ ID NO: 101065 - DNA, 25 bp, Artificial
  probe
  misc_feature (1)..(25): SEQ ID NO: 6807; WAN024BZZ_at; Start 1267; Stop 1291
gagtctatcgaaacaacttctagtg

SEQ ID NO: 101066 - DNA, 25 bp, Artificial
  probe
  misc_feature (1)..(25): SEQ ID NO: 6807; WAN024BZZ_at; Start 839; Stop 863
actctgttggtacaactctaccggg

SEQ ID NO: 101067 - DNA, 25 bp, Artificial
  probe
  misc_feature (1)..(25): SEQ ID NO: 6807; WAN024BZZ_at; Start 326; Stop 350
gagagatttcggacactcctttagt

SEQ ID NO: 101068 - DNA, 25 bp, Artificial
  probe
  misc_feature (1)..(25): SEQ ID NO: 6807; WAN024BZZ_at; Start 650; Stop 674
tatatacaaatactctccaagagtg

SEQ ID NO: 101069 - DNA, 25 bp, Artificial
  probe
  misc_feature (1)..(25): SEQ ID NO: 6807; WAN024BZZ_at; Start 315; Stop 339
taatcatgaaagagagatttcggac

SEQ ID NO: 101070 - DNA, 25 bp, Artificial
  probe
  misc_feature (1)..(25): SEQ ID NO: 6807; WAN024BZZ_at; Start 1010; Stop 1034
gacttttatttgtaacaggccgtga

SEQ ID NO: 101071 - DNA, 25 bp, Artificial
  probe
  misc_feature (1)..(25): SEQ ID NO: 6807; WAN024BZZ_at; Start 1280; Stop 1304
caacttctagtggaaaattgaagag

SEQ ID NO: 101072 - DNA, 25 bp, Artificial
  probe
  misc_feature (1)..(25): SEQ ID NO: 6807; WAN024BZZ_at; Start 149; Stop 173
tgctacaaggtaaggttgttatccc

SEQ ID NO: 101073 - DNA, 25 bp, Artificial
  probe
  misc_feature (1)..(25): SEQ ID NO: 6807; WAN024BZZ_at; Start 165; Stop 189
tgttatccctattaatccgatccaa

SEQ ID NO: 101074 - DNA, 25 bp, Artificial
  probe
  misc_feature (1)..(25): SEQ ID NO: 6807; WAN024BZZ_at; Start 749; Stop 773
tgaaaaacacaaacatagcaaatgc

SEQ ID NO: 101075 - DNA, 25 bp, Artificial
  probe
  misc_feature (1)..(25): SEQ ID NO: 6807; WAN024BZZ_at; Start 489; Stop 513
tttcattcaatctctctgggctgcg

SEQ ID NO: 101076 - DNA, 25 bp, Artificial
  probe
  misc_feature (1)..(25): SEQ ID NO: 6807; WAN024BZZ_at; Start 791; Stop 815
caaccgcagtttgttgtctacaata

SEQ ID NO: 101077 - DNA, 25 bp, Artificial
  probe
  misc_feature (1)..(25): SEQ ID NO: 6807; WAN024BZZ_at; Start 423; Stop 447
taatctgatgatagcacagttagaa

SEQ ID NO: 101078 - DNA, 25 bp, Artificial
  probe
  misc_feature (1)..(25): SEQ ID NO: 6807; WAN024BZZ_at; Start 223; Stop 247
tctgatgttgaagcagtattaacag

SEQ ID NO: 101079 - DNA, 25 bp, Artificial
  probe
  misc_feature (1)..(25): SEQ ID NO: 6807; WAN024BZZ_at; Start 30; Stop 54
gtttgaaagttgtatacatcctgaa

SEQ ID NO: 101080 - DNA, 25 bp, Artificial
  probe
  misc_feature (1)..(25): SEQ ID NO: 6807; WAN024BZZ_at; Start 943; Stop 967
tattacccgagtaaatacactggtg

SEQ ID NO: 101081 - DNA, 25 bp, Artificial
  probe
  misc_feature (1)..(25): SEQ ID NO: 6807; WAN024BZZ_at; Start 907; Stop 931
gatatctggataaagacaaatcgct

SEQ ID NO: 101082 - DNA, 25 bp, Artificial
  probe
  misc_feature (1)..(25): SEQ ID NO: 6807; WAN024BZZ_at; Start 205; Stop 229
gaaacacttttgaatttgtctgatg

SEQ ID NO: 101083 - DNA, 25 bp, Artificial
  probe
  misc_feature (1)..(25): SEQ ID NO: 6807; WAN024BZZ_at; Start 356; Stop 380
tttcatcaggtacaacaggagtgcc

SEQ ID NO: 101084 - DNA, 25 bp, Artificial
  probe
  misc_feature (1)..(25): SEQ ID NO: 6807; WAN024BZZ_at; Start 929; Stop 953
gctttatgagcggatattacccgag

SEQ ID NO: 101085 - DNA, 25 bp, Artificial
  probe
  misc_feature (1)..(25): SEQ ID NO: 6807; WAN024BZZ_at; Start 134; Stop 158
taatcttaaatcttatgctacaagg

SEQ ID NO: 101086 - DNA, 25 bp, Artificial
  probe
  misc_feature (1)..(25): SEQ ID NO: 6807; WAN024BZZ_at; Start 595; Stop 619
aacgatgcaacaataacggttatgg

SEQ ID NO: 101087 - DNA, 25 bp, Artificial
  probe
  misc_feature (1)..(25): SEQ ID NO: 6807; WAN024BZZ_at; Start 502; Stop 526
ctctgggctgcgatgatagtaattt

SEQ ID NO: 101088 - DNA, 25 bp, Artificial
  probe
  misc_feature (1)..(25): SEQ ID NO: 6807; WAN024BZZ_at; Start 1022; Stop 1046
taacaggccgtgaaagtttgtcaat

SEQ ID NO: 101089 - DNA, 25 bp, Artificial
  probe
  misc_feature (1)..(25): SEQ ID NO: 6807; WAN024BZZ_at; Start 579; Stop 603
taaggaacttcaactaaacgatgca

SEQ ID NO: 101090 - DNA, 25 bp, Artificial
  probe
  misc_feature (1)..(25): SEQ ID NO: 6807; WAN024BZZ_at; Start 619; Stop 643
gtacctactacgatgaataaacttg

SEQ ID NO: 101091 - DNA, 25 bp, Artificial
  probe
  misc_feature (1)..(25): SEQ ID NO: 6807; WAN024BZZ_at; Start 958; Stop 982
tacactggtgaatggttatatacag

SEQ ID NO: 101092 - DNA, 25 bp, Artificial
  probe
  misc_feature (1)..(25): SEQ ID NO: 6807; WAN024BZZ_at; Start 891; Stop 915
taatgatggtaatggcgatatctgg

SEQ ID NO: 101093 - DNA, 25 bp, Artificial
  probe
  misc_feature (1)..(25): SEQ ID NO: 6804; WAN024C22_at; Start 465; Stop 489
tggtctaggaatcgagacgatgatc

SEQ ID NO: 101094 - DNA, 25 bp, Artificial
  probe
  misc_feature (1)..(25): SEQ ID NO: 6804; WAN024C22_at; Start 664; Stop 688
ccaaagcactcgttaataggaggag

SEQ ID NO: 101095 - DNA, 25 bp, Artificial
  probe
  misc_feature (1)..(25): SEQ ID NO: 6804; WAN024C22_at; Start 178; Stop 202
gaagcaaataggataacaattggga

SEQ ID NO: 101096 - DNA, 25 bp, Artificial
  probe
  misc_feature (1)..(25): SEQ ID NO: 6804; WAN024C22_at; Start 769; Stop 793
gaaggattaggaacagaaccagtga

SEQ ID NO: 101097 - DNA, 25 bp, Artificial
  probe
  misc_feature (1)..(25): SEQ ID NO: 6804; WAN024C22_at; Start 333; Stop 357
caatgaggcagtaagaattggagaa

SEQ ID NO: 101098 - DNA, 25 bp, Artificial
  probe
  misc_feature (1)..(25): SEQ ID NO: 6804; WAN024C22_at; Start 982; Stop 1006
gcaagtaaggcttcagaatttttaa

SEQ ID NO: 101099 - DNA, 25 bp, Artificial
  probe
  misc_feature (1)..(25): SEQ ID NO: 6804; WAN024C22_at; Start 490; Stop 514
tttacgcatggtgcgggacatggcc

SEQ ID NO: 101100 - DNA, 25 bp, Artificial
  probe
  misc_feature (1)..(25): SEQ ID NO: 6804; WAN024C22_at; Start 634; Stop 658
gcggcaaatgctatcgtaaccaaga

SEQ ID NO: 101101 - DNA, 25 bp, Artificial
  probe
  misc_feature (1)..(25): SEQ ID NO: 6804; WAN024C22_at; Start 152; Stop 176
cggtcatcggtagatttgtactaat

SEQ ID NO: 101102 - DNA, 25 bp, Artificial
  probe
  misc_feature (1)..(25): SEQ ID NO: 6804; WAN024C22_at; Start 784; Stop 808
gaaccagtgataaaaaacaatagct

SEQ ID NO: 101103 - DNA, 25 bp, Artificial
  probe
  misc_feature (1)..(25): SEQ ID NO: 6804; WAN024C22_at; Start 410; Stop 434
taggaccacgagctcaaattaatgt

SEQ ID NO: 101104 - DNA, 25 bp, Artificial
  probe
  misc_feature (1)..(25): SEQ ID NO: 6804; WAN024C22_at; Start 397; Stop 421
gattatcaattcataggaccacgag

SEQ ID NO: 101105 - DNA, 25 bp, Artificial
  probe
  misc_feature (1)..(25): SEQ ID NO: 6804; WAN024C22_at; Start 521; Stop 545
caactgatggattttatgctgaaca

SEQ ID NO: 101106 - DNA, 25 bp, Artificial
  probe
  misc_feature (1)..(25): SEQ ID NO: 6804; WAN024C22_at; Start 647; Stop 671
tcgtaaccaagagttttccaaagca

SEQ ID NO: 101107 - DNA, 25 bp, Artificial
  probe
  misc_feature (1)..(25): SEQ ID NO: 6804; WAN024C22_at; Start 691; Stop 715
ccggctaggtatattggtcagagta

SEQ ID NO: 101108 - DNA, 25 bp, Artificial
  probe
  misc_feature (1)..(25): SEQ ID NO: 6804; WAN024C22_at; Start 618; Stop 642
tcaaggcaccactgtagcggcaaat

SEQ ID NO: 101109 - DNA, 25 bp, Artificial
  probe
  misc_feature (1)..(25): SEQ ID NO: 6804; WAN024C22_at; Start 581; Stop 605
taacaagagctattattctaccagg

SEQ ID NO: 101110 - DNA, 25 bp, Artificial
  probe
  misc_feature (1)..(25): SEQ ID NO: 6804; WAN024C22_at; Start 358; Stop 382
ggcggttggaatcaaaaaagtgcaa

SEQ ID NO: 101111 - DNA, 25 bp, Artificial
  probe
  misc_feature (1)..(25): SEQ ID NO: 6804; WAN024C22_at; Start 677; Stop 701
taataggaggagtaccggctaggta

SEQ ID NO: 101112 - DNA, 25 bp, Artificial
  probe
  misc_feature (1)..(25): SEQ ID NO: 6804; WAN024C22_at; Start 263; Stop 287
cacgaggaaaaattagtaaagattg

SEQ ID NO: 101113 - DNA, 25 bp, Artificial
  probe
  misc_feature (1)..(25): SEQ ID NO: 6804; WAN024C22_at; Start 434; Stop 458
taagtgattctgtggaactcatggg

SEQ ID NO: 101114 - DNA, 25 bp, Artificial
  probe
  misc_feature (1)..(25): SEQ ID NO: 6804; WAN024C22_at; Start 65; Stop 89
aactaggtgcaattatagaagagaa

SEQ ID NO: 101115 - DNA, 25 bp, Artificial
  probe
  misc_feature (1)..(25): SEQ ID NO: 6804; WAN024C22_at; Start 868; Stop 892
tcaacagacaatattagtcaaagag

SEQ ID NO: 101116 - DNA, 25 bp, Artificial
  probe
  misc_feature (1)..(25): SEQ ID NO: 6804; WAN024C22_at; Start 717; Stop 741
taaagaaatttctgtgaaagagcaa

SEQ ID NO: 101117 - DNA, 25 bp, Artificial
  probe
  misc_feature (1)..(25): SEQ ID NO: 6804; WAN024C22_at; Start 601; Stop 625
ccaggtgttatagtcagtcaaggca

SEQ ID NO: 101118 - DNA, 25 bp, Artificial
  probe
  misc_feature (1)..(25): SEQ ID NO: 6804; WAN024C22_at; Start 928; Stop 952
cataaaaattatagcacctgtattg

SEQ ID NO: 101119 - DNA, 25 bp, Artificial
  probe
  misc_feature (1)..(25): SEQ ID NO: 6804; WAN024C22_at; Start 480; Stop 504
gacgatgatctttacgcatggtgcg

SEQ ID NO: 101120 - DNA, 25 bp, Artificial
  probe
  misc_feature (1)..(25): SEQ ID NO: 6804; WAN024C22_at; Start 87; Stop 111
gaatgttgtgatttgctttggtgca

SEQ ID NO: 101121 - DNA, 25 bp, Artificial
  probe
  misc_feature (1)..(25): SEQ ID NO: 6804; WAN024C22_at; Start 449; Stop 473
aactcatgggatatggtggtctagg

SEQ ID NO: 101122 - DNA, 25 bp, Artificial
  probe
  misc_feature (1)..(25): SEQ ID NO: 6804; WAN024C22_at; Start 504; Stop 528
gggacatggccaatcagcaactgat

SEQ ID NO: 101123 - DNA, 25 bp, Artificial
  probe
  misc_feature (1)..(25): SEQ ID NO: 6804; WAN024C22_at; Start 318; Stop 342
aagagaattttggtgcaatgaggca

SEQ ID NO: 101124 - DNA, 25 bp, Artificial
  probe
  misc_feature (1)..(25): SEQ ID NO: 6804; WAN024C22_at; Start 137; Stop 161
taattcagaaggatacggtcatcgg

SEQ ID NO: 101125 - DNA, 25 bp, Artificial
  probe
  misc_feature (1)..(25): SEQ ID NO: 6804; WAN024C22_at; Start 941; Stop 965
gcacctgtattgatttgaagtctaa

SEQ ID NO: 101126 - DNA, 25 bp, Artificial
  probe
  misc_feature (1)..(25): SEQ ID NO: 6804; WAN024C22_at; Start 968; Stop 992
caatttcaggtagagcaagtaaggc

SEQ ID NO: 101127 - DNA, 25 bp, Artificial
  probe
  misc_feature (1)..(25): SEQ ID NO: 6315; WAN024C23_at; Start 579; Stop 603
gggaaaattcccatatactgatgag

SEQ ID NO: 101128 - DNA, 25 bp, Artificial
  probe
  misc_feature (1)..(25): SEQ ID NO: 6315; WAN024C23_at; Start 626; Stop 650
gacacagtcgagaagataaactctt

SEQ ID NO: 101129 - DNA, 25 bp, Artificial
  probe
  misc_feature (1)..(25): SEQ ID NO: 6315; WAN024C23_at; Start 871; Stop 895
gaaggctttcgtgttagctatccag

SEQ ID NO: 101130 - DNA, 25 bp, Artificial
  probe
  misc_feature (1)..(25): SEQ ID NO: 6315; WAN024C23_at; Start 1071; Stop 1095
taggctgacaactccaaatagtagg

SEQ ID NO: 101131 - DNA, 25 bp, Artificial
  probe
  misc_feature (1)..(25): SEQ ID NO: 6315; WAN024C23_at; Start 962; Stop 986
taataaaagctggatatagtgtggg

SEQ ID NO: 101132 - DNA, 25 bp, Artificial
  probe
  misc_feature (1)..(25): SEQ ID NO: 6315; WAN024C23_at; Start 155; Stop 179
tatcaataacagacaaaggaaagac

SEQ ID NO: 101133 - DNA, 25 bp, Artificial
  probe
  misc_feature (1)..(25): SEQ ID NO: 6315; WAN024C23_at; Start 613; Stop 637
ttttcattccatggacacagtcgag

SEQ ID NO: 101134 - DNA, 25 bp, Artificial
  probe
  misc_feature (1)..(25): SEQ ID NO: 6315; WAN024C23_at; Start 566; Stop 590
ttgattctgagaagggaaaattccc

SEQ ID NO: 101135 - DNA, 25 bp, Artificial
  probe
  misc_feature (1)..(25): SEQ ID NO: 6315; WAN024C23_at; Start 1468; Stop 1492
cgagaaaactcttgtcccaattgta

SEQ ID NO: 101136 - DNA, 25 bp, Artificial
  probe
  misc_feature (1)..(25): SEQ ID NO: 6315; WAN024C23_at; Start 1851; Stop 1875
cgatggtcagttactacataggagt

SEQ ID NO: 101137 - DNA, 25 bp, Artificial
  probe
  misc_feature (1)..(25): SEQ ID NO: 6315; WAN024C23_at; Start 37; Stop 61
tatctaaaagcattaagtacaaacg

SEQ ID NO: 101138 - DNA, 25 bp, Artificial
  probe
  misc_feature (1)..(25): SEQ ID NO: 6315; WAN024C23_at; Start 11; Stop 35
gttggcttacaacaaactttgaaga

SEQ ID NO: 101139 - DNA, 25 bp, Artificial
  probe
  misc_feature (1)..(25): SEQ ID NO: 6315; WAN024C23_at; Start 168; Stop 192
caaaggaaagactgtagatagcgag

SEQ ID NO: 101140 - DNA, 25 bp, Artificial
  probe
  misc_feature (1)..(25): SEQ ID NO: 6315; WAN024C23_at; Start 1795; Stop 1819
tataatcgccaaaagacaccgatgc

SEQ ID NO: 101141 - DNA, 25 bp, Artificial
  probe
  misc_feature (1)..(25): SEQ ID NO: 6315; WAN024C23_at; Start 1099; Stop 1123
gagaatacattgcatgaaatccaac

SEQ ID NO: 101142 - DNA, 25 bp, Artificial
  probe
  misc_feature (1)..(25): SEQ ID NO: 6315; WAN024C23_at; Start 505; Stop 529
gataattctttattgatcacacacg

SEQ ID NO: 101143 - DNA, 25 bp, Artificial
  probe
  misc_feature (1)..(25): SEQ ID NO: 6315; WAN024C23_at; Start 1753; Stop 1777
gctaataatcaagataatgtgcagg

SEQ ID NO: 101144 - DNA, 25 bp, Artificial
  probe
  misc_feature (1)..(25): SEQ ID NO: 6315; WAN024C23_at; Start 742; Stop 766
ccagaatactatgagggaaaaaagg

SEQ ID NO: 101145 - DNA, 25 bp, Artificial
  probe
  misc_feature (1)..(25): SEQ ID NO: 6315; WAN024C23_at; Start 690; Stop 714
taatgtgatggaaacgagaaatatc

SEQ ID NO: 101146 - DNA, 25 bp, Artificial
  probe
  misc_feature (1)..(25): SEQ ID NO: 6315; WAN024C23_at; Start 1837; Stop 1861
gcatatgtaatgatcgatggtcagt

SEQ ID NO: 101147 - DNA, 25 bp, Artificial
  probe
  misc_feature (1)..(25): SEQ ID NO: 6315; WAN024C23_at; Start 1345; Stop 1369
gaaagtcaattaacggatttacaga

SEQ ID NO: 101148 - DNA, 25 bp, Artificial
  probe
  misc_feature (1)..(25): SEQ ID NO: 6315; WAN024C23_at; Start 1016; Stop 1040
caaaagccttaaagtatgatactgg

SEQ ID NO: 101149 - DNA, 25 bp, Artificial
  probe
  misc_feature (1)..(25): SEQ ID NO: 6315; WAN024C23_at; Start 1327; Stop 1351
catgaaatggatagtctagaaagtc

SEQ ID NO: 101150 - DNA, 25 bp, Artificial
  probe
  misc_feature (1)..(25): SEQ ID NO: 6315; WAN024C23_at; Start 207; Stop 231
tattggaagtaacaccaagtgtcag

SEQ ID NO: 101151 - DNA, 25 bp, Artificial
  probe
  misc_feature (1)..(25): SEQ ID NO: 6315; WAN024C23_at; Start 1249; Stop 1273
gtaggcaatcagctacaatcgcttg

SEQ ID NO: 101152 - DNA, 25 bp, Artificial
  probe
  misc_feature (1)..(25): SEQ ID NO: 6315; WAN024C23_at; Start 885; Stop 909
tagctatccagctgtagtaattggg

SEQ ID NO: 101153 - DNA, 25 bp, Artificial
  probe
  misc_feature (1)..(25): SEQ ID NO: 6315; WAN024C23_at; Start 1055; Stop 1079
taggtgctcctgaatttaggctgac

SEQ ID NO: 101154 - DNA, 25 bp, Artificial
  probe
  misc_feature (1)..(25): SEQ ID NO: 6315; WAN024C23_at; Start 1703; Stop 1727
tagattgtgaaatattagaggccga

SEQ ID NO: 101155 - DNA, 25 bp, Artificial
  probe
  misc_feature (1)..(25): SEQ ID NO: 6315; WAN024C23_at; Start 1264; Stop 1288
caatcgcttgtgagaaaaatcaata

SEQ ID NO: 101156 - DNA, 25 bp, Artificial
  probe
  misc_feature (1)..(25): SEQ ID NO: 6315; WAN024C23_at; Start 219; Stop 243
caccaagtgtcagaagattgtagag

SEQ ID NO: 101157 - DNA, 25 bp, Artificial
  probe
  misc_feature (1)..(25): SEQ ID NO: 6315; WAN024C23_at; Start 1720; Stop 1744
gaggccgatagatattcaattgaaa

SEQ ID NO: 101158 - DNA, 25 bp, Artificial
  probe
  misc_feature (1)..(25): SEQ ID NO: 6315; WAN024C23_at; Start 1386; Stop 1410
tttgagtacgaaaactagaacagga

SEQ ID NO: 101159 - DNA, 25 bp, Artificial
  probe
  misc_feature (1)..(25): SEQ ID NO: 6315; WAN024C23_at; Start 723; Stop 747
tcctcattgggctaaaaatccagaa

SEQ ID NO: 101160 - DNA, 25 bp, Artificial
  probe
  misc_feature (1)..(25): SEQ ID NO: 6315; WAN024C23_at; Start 1508; Stop 1532
tacagaaattcacagtagtcccaga

SEQ ID NO: 101161 - DNA, 25 bp, Artificial
  probe
  misc_feature (1)..(25): SEQ ID NO: 6368; WAN024C24_at; Start 259; Stop 283
gaagccaaagatatattctaccgtt

SEQ ID NO: 101162 - DNA, 25 bp, Artificial
  probe
  misc_feature (1)..(25): SEQ ID NO: 6368; WAN024C24_at; Start 200; Stop 224
cttttatggagggatatgaggttcc

SEQ ID NO: 101163 - DNA, 25 bp, Artificial
  probe
  misc_feature (1)..(25): SEQ ID NO: 6368; WAN024C24_at; Start 676; Stop 700
tacatgaaggaaaaatacaagactc

SEQ ID NO: 101164 - DNA, 25 bp, Artificial
  probe
  misc_feature (1)..(25): SEQ ID NO: 6368; WAN024C24_at; Start 691; Stop 715
tacaagactcctagatatgttattg

SEQ ID NO: 101165 - DNA, 25 bp, Artificial
  probe
  misc_feature (1)..(25): SEQ ID NO: 6368; WAN024C24_at; Start 714; Stop 738
tgaagttgatttagtagagagtgaa

SEQ ID NO: 101166 - DNA, 25 bp, Artificial
  probe
  misc_feature (1)..(25): SEQ ID NO: 6368; WAN024C24_at; Start 523; Stop 547
tcagcttggaaagcgaatatatctt

SEQ ID NO: 101167 - DNA, 25 bp, Artificial
  probe
  misc_feature (1)..(25): SEQ ID NO: 6368; WAN024C24_at; Start 17; Stop 41
tatccactggaagcactagttctct

SEQ ID NO: 101168 - DNA, 25 bp, Artificial
  probe
  misc_feature (1)..(25): SEQ ID NO: 6368; WAN024C24_at; Start 454; Stop 478
cctaagcgaattattctcttgaaag

SEQ ID NO: 101169 - DNA, 25 bp, Artificial
  probe
  misc_feature (1)..(25): SEQ ID NO: 6368; WAN024C24_at; Start 311; Stop 335
caaaatatttaattatgcacggccc

SEQ ID NO: 101170 - DNA, 25 bp, Artificial
  probe
  misc_feature (1)..(25): SEQ ID NO: 6368; WAN024C24_at; Start 111; Stop 135
ccaatctagattggaattgactgct

SEQ ID NO: 101171 - DNA, 25 bp, Artificial
  probe
  misc_feature (1)..(25): SEQ ID NO: 6368; WAN024C24_at; Start 3; Stop 27
gaaacaaataatattatccactgga

SEQ ID NO: 101172 - DNA, 25 bp, Artificial
  probe
  misc_feature (1)..(25): SEQ ID NO: 6368; WAN024C24_at; Start 747; Stop 771
tattcggacaatttctcatgtagag

SEQ ID NO: 101173 - DNA, 25 bp, Artificial
  probe
  misc_feature (1)..(25): SEQ ID NO: 6368; WAN024C24_at; Start 189; Stop 213
ttctatacatccttttatggaggga

SEQ ID NO: 101174 - DNA, 25 bp, Artificial
  probe
  misc_feature (1)..(25): SEQ ID NO: 6368; WAN024C24_at; Start 274; Stop 298
ttctaccgttttttagagatatgcg

SEQ ID NO: 101175 - DNA, 25 bp, Artificial
  probe
  misc_feature (1)..(25): SEQ ID NO: 6368; WAN024C24_at; Start 418; Stop 442
gctattgaaaataaagactatacac

SEQ ID NO: 101176 - DNA, 25 bp, Artificial
  probe
  misc_feature (1)..(25): SEQ ID NO: 6368; WAN024C24_at; Start 122; Stop 146
tggaattgactgcttctgaaataaa

SEQ ID NO: 101177 - DNA, 25 bp, Artificial
  probe
  misc_feature (1)..(25): SEQ ID NO: 6368; WAN024C24_at; Start 732; Stop 756
gagtgaaattgatattattcggaca

SEQ ID NO: 101178 - DNA, 25 bp, Artificial
  probe
  misc_feature (1)..(25): SEQ ID NO: 6368; WAN024C24_at; Start 548; Stop 572
taatagatatggtagaggccatggg

SEQ ID NO: 101179 - DNA, 25 bp, Artificial
  probe
  misc_feature (1)..(25): SEQ ID NO: 6368; WAN024C24_at; Start 160; Stop 184
tattgtagccaaaagggagtaagtg

SEQ ID NO: 101180 - DNA, 25 bp, Artificial
  probe
  misc_feature (1)..(25): SEQ ID NO: 6368; WAN024C24_at; Start 507; Stop 531
tgttctagattttaagtcagcttgg

SEQ ID NO: 101181 - DNA, 25 bp, Artificial
  probe
  misc_feature (1)..(25): SEQ ID NO: 6368; WAN024C24_at; Start 758; Stop 782
tttctcatgtagaggagctgttatg

SEQ ID NO: 101182 - DNA, 25 bp, Artificial
  probe
  misc_feature (1)..(25): SEQ ID NO: 6368; WAN024C24_at; Start 338; Stop 362
tacaaaattgtgactgggataatag

SEQ ID NO: 101183 - DNA, 25 bp, Artificial
  probe
  misc_feature (1)..(25): SEQ ID NO: 6368; WAN024C24_at; Start 584; Stop 608
tattttctcatgtttcgtttaggga

SEQ ID NO: 101184 - DNA, 25 bp, Artificial
  probe
  misc_feature (1)..(25): SEQ ID NO: 6368; WAN024C24_at; Start 176; Stop 200
gagtaagtgttaattctatacatcc

SEQ ID NO: 101185 - DNA, 25 bp, Artificial
  probe
  misc_feature (1)..(25): SEQ ID NO: 6368; WAN024C24_at; Start 438; Stop 462
tacacttttctattgtcctaagcga

SEQ ID NO: 101186 - DNA, 25 bp, Artificial
  probe
  misc_feature (1)..(25): SEQ ID NO: 6368; WAN024C24_at; Start 469; Stop 493
ctcttgaaagaacagctagaaagtg

SEQ ID NO: 101187 - DNA, 25 bp, Artificial
  probe
  misc_feature (1)..(25): SEQ ID NO: 6368; WAN024C24_at; Start 245; Stop 269
taaaaaagtatgcagaagccaaaga

SEQ ID NO: 101188 - DNA, 25 bp, Artificial
  probe
  misc_feature (1)..(25): SEQ ID NO: 6368; WAN024C24_at; Start 324; Stop 348
tatgcacggccctttacaaaattgt

SEQ ID NO: 101189 - DNA, 25 bp, Artificial
  probe
  misc_feature (1)..(25): SEQ ID NO: 6368; WAN024C24_at; Start 562; Stop 586
gaggccatgggtgataggttattat

SEQ ID NO: 101190 - DNA, 25 bp, Artificial
  probe
  misc_feature (1)..(25): SEQ ID NO: 6368; WAN024C24_at; Start 388; Stop 412
tctgaggctaaaaagtataatgttg

SEQ ID NO: 101191 - DNA, 25 bp, Artificial
  probe
  misc_feature (1)..(25): SEQ ID NO: 6368; WAN024C24_at; Start 26; Stop 50
gaagcactagttctctagggttaga

SEQ ID NO: 101192 - DNA, 25 bp, Artificial
  probe
  misc_feature (1)..(25): SEQ ID NO: 6368; WAN024C24_at; Start 38; Stop 62
ctctagggttagataatttagcaac

SEQ ID NO: 101193 - DNA, 25 bp, Artificial
  probe
  misc_feature (1)..(25): SEQ ID NO: 6368; WAN024C24_at; Start 217; Stop 241
gaggttccaaatctattctctataa

SEQ ID NO: 101194 - DNA, 25 bp, Artificial
  probe
  misc_feature (1)..(25): SEQ ID NO: 6368; WAN024C24_at; Start 625; Stop 649
tatggaattccatttcagaaatttg

SEQ ID NO: 101195 - DNA, 25 bp, Artificial
  probe
  misc_feature (1)..(25): SEQ ID NO: 7021; WAN024C25_at; Start 45; Stop 69
taaaattacagagtatgtcaacaac

SEQ ID NO: 101196 - DNA, 25 bp, Artificial
  probe
  misc_feature (1)..(25): SEQ ID NO: 7021; WAN024C25_at; Start 81; Stop 105
tattgttatttttctatcattgctg

SEQ ID NO: 101197 - DNA, 25 bp, Artificial
  probe
  misc_feature (1)..(25): SEQ ID NO: 7021; WAN024C25_at; Start 53; Stop 77
cagagtatgtcaacaacaggaaaat

SEQ ID NO: 101198 - DNA, 25 bp, Artificial
  probe
  misc_feature (1)..(25): SEQ ID NO: 7021; WAN024C25_at; Start 152; Stop 176
tgatagcaatcagtggagcaaattt

SEQ ID NO: 101199 - DNA, 25 bp, Artificial
  probe
  misc_feature (1)..(25): SEQ ID NO: 7021; WAN024C25_at; Start 162; Stop 186
cagtggagcaaatttactattaagt

SEQ ID NO: 101200 - DNA, 25 bp, Artificial
  probe
  misc_feature (1)..(25): SEQ ID NO: 7021; WAN024C25_at; Start 145; Stop 169
gaaatattgatagcaatcagtggag

SEQ ID NO: 101201 - DNA, 25 bp, Artificial
  probe
  misc_feature (1)..(25): SEQ ID NO: 7021; WAN024C25_at; Start 24; Stop 48
tattgttgcattcctgtatcataaa

SEQ ID NO: 101202 - DNA, 25 bp, Artificial
  probe
  misc_feature (1)..(25): SEQ ID NO: 7021; WAN024C25_at; Start 155; Stop 179
tagcaatcagtggagcaaatttact

SEQ ID NO: 101203 - DNA, 25 bp, Artificial
  probe
  misc_feature (1)..(25): SEQ ID NO: 7021; WAN024C25_at; Start 60; Stop 84
tgtcaacaacaggaaaattgatatt

SEQ ID NO: 101204 - DNA, 25 bp, Artificial
  probe
  misc_feature (1)..(25): SEQ ID NO: 7021; WAN024C25_at; Start 105; Stop 129
gatttctcattttatttggaattac

SEQ ID NO: 101205 - DNA, 25 bp, Artificial
  probe
  misc_feature (1)..(25): SEQ ID NO: 7021; WAN024C25_at; Start 153; Stop 177
gatagcaatcagtggagcaaattta

SEQ ID NO: 101206 - DNA, 25 bp, Artificial
  probe
  misc_feature (1)..(25): SEQ ID NO: 7021; WAN024C25_at; Start 42; Stop 66
tcataaaattacagagtatgtcaac

SEQ ID NO: 101207 - DNA, 25 bp, Artificial
  probe
  misc_feature (1)..(25): SEQ ID NO: 7021; WAN024C25_at; Start 62; Stop 86
tcaacaacaggaaaattgatattgt

SEQ ID NO: 101208 - DNA, 25 bp, Artificial
  probe
  misc_feature (1)..(25): SEQ ID NO: 7021; WAN024C25_at; Start 101; Stop 125
tgctgatttctcattttatttggaa

SEQ ID NO: 101209 - DNA, 25 bp, Artificial
  probe
  misc_feature (1)..(25): SEQ ID NO: 7021; WAN024C25_at; Start 55; Stop 79
gagtatgtcaacaacaggaaaattg

SEQ ID NO: 101210 - DNA, 25 bp, Artificial
  probe
  misc_feature (1)..(25): SEQ ID NO: 7021; WAN024C25_at; Start 14; Stop 38
taatttcagttattgttgcattcct

SEQ ID NO: 101211 - DNA, 25 bp, Artificial
  probe
  misc_feature (1)..(25): SEQ ID NO: 7021; WAN024C25_at; Start 51; Stop 75
tacagagtatgtcaacaacaggaaa

SEQ ID NO: 101212 - DNA, 25 bp, Artificial
  probe
  misc_feature (1)..(25): SEQ ID NO: 7021; WAN024C25_at; Start 22; Stop 46
gttattgttgcattcctgtatcata

SEQ ID NO: 101213 - DNA, 25 bp, Artificial
  probe
  misc_feature (1)..(25): SEQ ID NO: 7021; WAN024C25_at; Start 89; Stop 113
tttttctatcattgctgatttctca

SEQ ID NO: 101214 - DNA, 25 bp, Artificial
  probe
  misc_feature (1)..(25): SEQ ID NO: 7021; WAN024C25_at; Start 149; Stop 173
tattgatagcaatcagtggagcaaa

SEQ ID NO: 101215 - DNA, 25 bp, Artificial
  probe
  misc_feature (1)..(25): SEQ ID NO: 7021; WAN024C25_at; Start 66; Stop 90
caacaggaaaattgatattgttatt

SEQ ID NO: 101216 - DNA, 25 bp, Artificial
  probe
  misc_feature (1)..(25): SEQ ID NO: 7021; WAN024C25_at; Start 48; Stop 72
aattacagagtatgtcaacaacagg

SEQ ID NO: 101217 - DNA, 25 bp, Artificial
  probe
  misc_feature (1)..(25): SEQ ID NO: 7021; WAN024C25_at; Start 27; Stop 51
tgttgcattcctgtatcataaaatt

SEQ ID NO: 101218 - DNA, 25 bp, Artificial
  probe
  misc_feature (1)..(25): SEQ ID NO: 7021; WAN024C25_at; Start 134; Stop 158
ttttaccaattgaaatattgatagc

SEQ ID NO: 101219 - DNA, 25 bp, Artificial
  probe
  misc_feature (1)..(25): SEQ ID NO: 7021; WAN024C25_at; Start 143; Stop 167
ttgaaatattgatagcaatcagtgg

SEQ ID NO: 101220 - DNA, 25 bp, Artificial
  probe
  misc_feature (1)..(25): SEQ ID NO: 7021; WAN024C25_at; Start 57; Stop 81
gtatgtcaacaacaggaaaattgat

SEQ ID NO: 101221 - DNA, 25 bp, Artificial
  probe
  misc_feature (1)..(25): SEQ ID NO: 7021; WAN024C25_at; Start 31; Stop 55
gcattcctgtatcataaaattacag

SEQ ID NO: 101222 - DNA, 25 bp, Artificial
  probe
  misc_feature (1)..(25): SEQ ID NO: 7021; WAN024C25_at; Start 161; Stop 185
tcagtggagcaaatttactattaag

SEQ ID NO: 101223 - DNA, 25 bp, Artificial
  probe
  misc_feature (1)..(25): SEQ ID NO: 7021; WAN024C25_at; Start 157; Stop 181
gcaatcagtggagcaaatttactat

SEQ ID NO: 101224 - DNA, 25 bp, Artificial
  probe
  misc_feature (1)..(25): SEQ ID NO: 7021; WAN024C25_at; Start 146; Stop 170
aaatattgatagcaatcagtggagc

SEQ ID NO: 101225 - DNA, 25 bp, Artificial
  probe
  misc_feature (1)..(25): SEQ ID NO: 7021; WAN024C25_at; Start 147; Stop 171
aatattgatagcaatcagtggagca

SEQ ID NO: 101226 - DNA, 25 bp, Artificial
  probe
  misc_feature (1)..(25): SEQ ID NO: 7021; WAN024C25_at; Start 20; Stop 44
cagttattgttgcattcctgtatca

SEQ ID NO: 101227 - DNA, 25 bp, Artificial
  probe
  misc_feature (1)..(25): SEQ ID NO: 7021; WAN024C25_at; Start 49; Stop 73
attacagagtatgtcaacaacagga

SEQ ID NO: 101228 - DNA, 25 bp, Artificial
  probe
  misc_feature (1)..(25): SEQ ID NO: 7021; WAN024C25_at; Start 139; Stop 163
ccaattgaaatattgatagcaatca

SEQ ID NO: 101229 - DNA, 25 bp, Artificial
  probe
  misc_feature (1)..(25): SEQ ID NO: 7315; WAN024C26_at; Start 73; Stop 97
tcaagtgacgaactgggagaaattt

SEQ ID NO: 101230 - DNA, 25 bp, Artificial
  probe
  misc_feature (1)..(25): SEQ ID NO: 7315; WAN024C26_at; Start 566; Stop 590
tagtcatggatatcaccttgtcagt

SEQ ID NO: 101231 - DNA, 25 bp, Artificial
  probe
  misc_feature (1)..(25): SEQ ID NO: 7315; WAN024C26_at; Start 1049; Stop 1073
cctttcaagaggtacaggttgcggt

SEQ ID NO: 101232 - DNA, 25 bp, Artificial
  probe
  misc_feature (1)..(25): SEQ ID NO: 7315; WAN024C26_at; Start 1571; Stop 1595
tctcgggtggagagaaacaacgatt

SEQ ID NO: 101233 - DNA, 25 bp, Artificial
  probe
  misc_feature (1)..(25): SEQ ID NO: 7315; WAN024C26_at; Start 1404; Stop 1428
gaccatagaactctttacagggaca

SEQ ID NO: 101234 - DNA, 25 bp, Artificial
  probe
  misc_feature (1)..(25): SEQ ID NO: 7315; WAN024C26_at; Start 1063; Stop 1087
caggttgcggttagtcgacttcaag

SEQ ID NO: 101235 - DNA, 25 bp, Artificial
  probe
  misc_feature (1)..(25): SEQ ID NO: 7315; WAN024C26_at; Start 1502; Stop 1526
gtattcatgatacgattcaacgcct

SEQ ID NO: 101236 - DNA, 25 bp, Artificial
  probe
  misc_feature (1)..(25): SEQ ID NO: 7315; WAN024C26_at; Start 346; Stop 370
ggaatagtgtcgttcttacagactc

SEQ ID NO: 101237 - DNA, 25 bp, Artificial
  probe
  misc_feature (1)..(25): SEQ ID NO: 7315; WAN024C26_at; Start 44; Stop 68
cagaccctgctagtggcatacgcaa

SEQ ID NO: 101238 - DNA, 25 bp, Artificial
  probe
  misc_feature (1)..(25): SEQ ID NO: 7315; WAN024C26_at; Start 273; Stop 297
ttcaaaagttatcatggacgaggtg

SEQ ID NO: 101239 - DNA, 25 bp, Artificial
  probe
  misc_feature (1)..(25): SEQ ID NO: 7315; WAN024C26_at; Start 1806; Stop 1830
tgggactcatgaagaactaatggcg

SEQ ID NO: 101240 - DNA, 25 bp, Artificial
  probe
  misc_feature (1)..(25): SEQ ID NO: 7315; WAN024C26_at; Start 1189; Stop 1213
ggttcgcgcccacctgttatcaaga

SEQ ID NO: 101241 - DNA, 25 bp, Artificial
  probe
  misc_feature (1)..(25): SEQ ID NO: 7315; WAN024C26_at; Start 932; Stop 956
gagtgggcgccttatttatcattga

SEQ ID NO: 101242 - DNA, 25 bp, Artificial
  probe
  misc_feature (1)..(25): SEQ ID NO: 7315; WAN024C26_at; Start 894; Stop 918
ttcaatgacctcaaccatgggtggg

SEQ ID NO: 101243 - DNA, 25 bp, Artificial
  probe
  misc_feature (1)..(25): SEQ ID NO: 7315; WAN024C26_at; Start 1862; Stop 1886
tgcagagcgttcaagtgaatcaaca

SEQ ID NO: 101244 - DNA, 25 bp, Artificial
  probe
  misc_feature (1)..(25): SEQ ID NO: 7315; WAN024C26_at; Start 1261; Stop 1285
gaaagtggagcaggaaaaagtacgc

SEQ ID NO: 101245 - DNA, 25 bp, Artificial
  probe
  misc_feature (1)..(25): SEQ ID NO: 7315; WAN024C26_at; Start 29; Stop 53
gtaagttctacgtagcagaccctgc

SEQ ID NO: 101246 - DNA, 25 bp, Artificial
  probe
  misc_feature (1)..(25): SEQ ID NO: 7315; WAN024C26_at; Start 1738; Stop 1762
cacaggctgtctacaattcttcgat

SEQ ID NO: 101247 - DNA, 25 bp, Artificial
  probe
  misc_feature (1)..(25): SEQ ID NO: 7315; WAN024C26_at; Start 918; Stop 942
gttattatttatgggagtgggcgcc

SEQ ID NO: 101248 - DNA, 25 bp, Artificial
  probe
  misc_feature (1)..(25): SEQ ID NO: 7315; WAN024C26_at; Start 509; Stop 533
caagatttcaagatgcgatgacgat

SEQ ID NO: 101249 - DNA, 25 bp, Artificial
  probe
  misc_feature (1)..(25): SEQ ID NO: 7315; WAN024C26_at; Start 1175; Stop 1199
taacatttgcctatggttcgcgccc

SEQ ID NO: 101250 - DNA, 25 bp, Artificial
  probe
  misc_feature (1)..(25): SEQ ID NO: 7315; WAN024C26_at; Start 1588; Stop 1612
caacgattggctattgcaagagcac

SEQ ID NO: 101251 - DNA, 25 bp, Artificial
  probe
  misc_feature (1)..(25): SEQ ID NO: 7315; WAN024C26_at; Start 786; Stop 810
tcagcatgatgaggaacaacgttta

SEQ ID NO: 101252 - DNA, 25 bp, Artificial
  probe
  misc_feature (1)..(25): SEQ ID NO: 7315; WAN024C26_at; Start 289; Stop 313
gacgaggtgattccatatgctttaa

SEQ ID NO: 101253 - DNA, 25 bp, Artificial
  probe
  misc_feature (1)..(25): SEQ ID NO: 7315; WAN024C26_at; Start 1604; Stop 1628
caagagcactactgagtaaagctga

SEQ ID NO: 101254 - DNA, 25 bp, Artificial
  probe
  misc_feature (1)..(25): SEQ ID NO: 7315; WAN024C26_at; Start 1631; Stop 1655
tgtatatatttgatgaggcaacctc

SEQ ID NO: 101255 - DNA, 25 bp, Artificial
  probe
  misc_feature (1)..(25): SEQ ID NO: 7315; WAN024C26_at; Start 1721; Stop 1745
caacaattgtagtagcccacaggct

SEQ ID NO: 101256 - DNA, 25 bp, Artificial
  probe
  misc_feature (1)..(25): SEQ ID NO: 7315; WAN024C26_at; Start 1881; Stop 1905
tcaacaaattcagtcacaggctgtg

SEQ ID NO: 101257 - DNA, 25 bp, Artificial
  probe
  misc_feature (1)..(25): SEQ ID NO: 7315; WAN024C26_at; Start 1537; Stop 1561
tatggctcctttgtagaagaaggcg

SEQ ID NO: 101258 - DNA, 25 bp, Artificial
  probe
  misc_feature (1)..(25): SEQ ID NO: 7315; WAN024C26_at; Start 1847; Stop 1871
ctagaatggttggtttgcagagcgt

SEQ ID NO: 101259 - DNA, 25 bp, Artificial
  probe
  misc_feature (1)..(25): SEQ ID NO: 7315; WAN024C26_at; Start 1895; Stop 1919
cacaggctgtgttagatacagagga

SEQ ID NO: 101260 - DNA, 25 bp, Artificial
  probe
  misc_feature (1)..(25): SEQ ID NO: 7315; WAN024C26_at; Start 59; Stop 83
gcatacgcaagatgtcaagtgacga

SEQ ID NO: 101261 - DNA, 25 bp, Artificial
  probe
  misc_feature (1)..(25): SEQ ID NO: 7315; WAN024C26_at; Start 1355; Stop 1379
cagatcttgactatggtaaactacg

SEQ ID NO: 101262 - DNA, 25 bp, Artificial
  probe
  misc_feature (1)..(25): SEQ ID NO: 7315; WAN024C26_at; Start 1096; Stop 1120
gaagtagatcgtgaagacattgcct

SEQ ID NO: 101263 - DNA, 25 bp, Artificial
  probe
  misc_feature (1)..(25): SEQ ID NO: 7464; WAN024C27_at; Start 1; Stop 25
ttgagagaattttatctaaaacgaa

SEQ ID NO: 101264 - DNA, 25 bp, Artificial
  probe
  misc_feature (1)..(25): SEQ ID NO: 7464; WAN024C27_at; Start 21; Stop 45
acgaaattccattttgtataatggt

SEQ ID NO: 101265 - DNA, 25 bp, Artificial
  probe
  misc_feature (1)..(25): SEQ ID NO: 7464; WAN024C27_at; Start 22; Stop 46
cgaaattccattttgtataatggtt

SEQ ID NO: 101266 - DNA, 25 bp, Artificial
  probe
  misc_feature (1)..(25): SEQ ID NO: 7464; WAN024C27_at; Start 81; Stop 105
gagattttattatgaaaaacacagt

SEQ ID NO: 101267 - DNA, 25 bp, Artificial
  probe
  misc_feature (1)..(25): SEQ ID NO: 7464; WAN024C27_at; Start 79; Stop 103
aggagattttattatgaaaaacaca

SEQ ID NO: 101268 - DNA, 25 bp, Artificial
  probe
  misc_feature (1)..(25): SEQ ID NO: 7464; WAN024C27_at; Start 26; Stop 50
attccattttgtataatggtttttg

SEQ ID NO: 101269 - DNA, 25 bp, Artificial
  probe
  misc_feature (1)..(25): SEQ ID NO: 7464; WAN024C27_at; Start 72; Stop 96
acattttaggagattttattatgaa

SEQ ID NO: 101270 - DNA, 25 bp, Artificial
  probe
  misc_feature (1)..(25): SEQ ID NO: 7464; WAN024C27_at; Start 30; Stop 54
cattttgtataatggtttttgtaag

SEQ ID NO: 101271 - DNA, 25 bp, Artificial
  probe
  misc_feature (1)..(25): SEQ ID NO: 7464; WAN024C27_at; Start 2; Stop 26
tgagagaattttatctaaaacgaaa

SEQ ID NO: 101272 - DNA, 25 bp, Artificial
  probe
  misc_feature (1)..(25): SEQ ID NO: 7464; WAN024C27_at; Start 35; Stop 59
tgtataatggtttttgtaagttagc

SEQ ID NO: 101273 - DNA, 25 bp, Artificial
  probe
  misc_feature (1)..(25): SEQ ID NO: 7464; WAN024C27_at; Start 73; Stop 97
cattttaggagattttattatgaaa

SEQ ID NO: 101274 - DNA, 25 bp, Artificial
  probe
  misc_feature (1)..(25): SEQ ID NO: 7464; WAN024C27_at; Start 20; Stop 44
aacgaaattccattttgtataatgg

SEQ ID NO: 101275 - DNA, 25 bp, Artificial
  probe
  misc_feature (1)..(25): SEQ ID NO: 7464; WAN024C27_at; Start 80; Stop 104
ggagattttattatgaaaaacacag

SEQ ID NO: 101276 - DNA, 25 bp, Artificial
  probe
  misc_feature (1)..(25): SEQ ID NO: 7464; WAN024C27_at; Start 78; Stop 102
taggagattttattatgaaaaacac

SEQ ID NO: 101277 - DNA, 25 bp, Artificial
  probe
  misc_feature (1)..(25): SEQ ID NO: 7464; WAN024C27_at; Start 28; Stop 52
tccattttgtataatggtttttgta

SEQ ID NO: 101278 - DNA, 25 bp, Artificial
  probe
  misc_feature (1)..(25): SEQ ID NO: 7464; WAN024C27_at; Start 77; Stop 101
ttaggagattttattatgaaaaaca

SEQ ID NO: 101279 - DNA, 25 bp, Artificial
  probe
  misc_feature (1)..(25): SEQ ID NO: 7464; WAN024C27_at; Start 71; Stop 95
aacattttaggagattttattatga

SEQ ID NO: 101280 - DNA, 25 bp, Artificial
  probe
  misc_feature (1)..(25): SEQ ID NO: 7464; WAN024C27_at; Start 19; Stop 43
aaacgaaattccattttgtataatg

SEQ ID NO: 101281 - DNA, 25 bp, Artificial
  probe
  misc_feature (1)..(25): SEQ ID NO: 7464; WAN024C27_at; Start 70; Stop 94
aaacattttaggagattttattatg

SEQ ID NO: 101282 - DNA, 25 bp, Artificial
  probe
  misc_feature (1)..(25): SEQ ID NO: 6765; WAN024C28_at; Start 32; Stop 56
gacggctagctactccctcgaagat

SEQ ID NO: 101283 - DNA, 25 bp, Artificial
  probe
  misc_feature (1)..(25): SEQ ID NO: 6765; WAN024C28_at; Start 27; Stop 51
gattggacggctagctactccctcg

SEQ ID NO: 101284 - DNA, 25 bp, Artificial
  probe
  misc_feature (1)..(25): SEQ ID NO: 6765; WAN024C28_at; Start 33; Stop 57
acggctagctactccctcgaagata

SEQ ID NO: 101285 - DNA, 25 bp, Artificial
  probe
  misc_feature (1)..(25): SEQ ID NO: 6765; WAN024C28_at; Start 40; Stop 64
gctactccctcgaagatattatttt

SEQ ID NO: 101286 - DNA, 25 bp, Artificial
  probe
  misc_feature (1)..(25): SEQ ID NO: 6765; WAN024C28_at; Start 12; Stop 36
gctaaacaatatcttgattggacgg

SEQ ID NO: 101287 - DNA, 25 bp, Artificial
  probe
  misc_feature (1)..(25): SEQ ID NO: 6765; WAN024C28_at; Start 42; Stop 66
tactccctcgaagatattattttat

SEQ ID NO: 101288 - DNA, 25 bp, Artificial
  probe
  misc_feature (1)..(25): SEQ ID NO: 6765; WAN024C28_at; Start 3; Stop 27
gcttcaaaagctaaacaatatcttg

SEQ ID NO: 101289 - DNA, 25 bp, Artificial
  probe
  misc_feature (1)..(25): SEQ ID NO: 6765; WAN024C28_at; Start 14; Stop 38
taaacaatatcttgattggacggct

SEQ ID NO: 101290 - DNA, 25 bp, Artificial
  probe
  misc_feature (1)..(25): SEQ ID NO: 6765; WAN024C28_at; Start 2; Stop 26
tgcttcaaaagctaaacaatatctt

SEQ ID NO: 101291 - DNA, 25 bp, Artificial
  probe
  misc_feature (1)..(25): SEQ ID NO: 6765; WAN024C28_at; Start 26; Stop 50
tgattggacggctagctactccctc

SEQ ID NO: 101292 - DNA, 25 bp, Artificial
  probe
  misc_feature (1)..(25): SEQ ID NO: 6765; WAN024C28_at; Start 46; Stop 70
ccctcgaagatattattttatcaga

SEQ ID NO: 101293 - DNA, 25 bp, Artificial
  probe
  misc_feature (1)..(25): SEQ ID NO: 6765; WAN024C28_at; Start 37; Stop 61
ctagctactccctcgaagatattat

SEQ ID NO: 101294 - DNA, 25 bp, Artificial
  probe
  misc_feature (1)..(25): SEQ ID NO: 6765; WAN024C28_at; Start 17; Stop 41
acaatatcttgattggacggctagc

SEQ ID NO: 101295 - DNA, 25 bp, Artificial
  probe
  misc_feature (1)..(25): SEQ ID NO: 6765; WAN024C28_at; Start 7; Stop 31
caaaagctaaacaatatcttgattg

SEQ ID NO: 101296 - DNA, 25 bp, Artificial
  probe
  misc_feature (1)..(25): SEQ ID NO: 6765; WAN024C28_at; Start 34; Stop 58
cggctagctactccctcgaagatat

SEQ ID NO: 101297 - DNA, 25 bp, Artificial
  probe
  misc_feature (1)..(25): SEQ ID NO: 6765; WAN024C28_at; Start 25; Stop 49
ttgattggacggctagctactccct

SEQ ID NO: 101298 - DNA, 25 bp, Artificial
  probe
  misc_feature (1)..(25): SEQ ID NO: 6765; WAN024C28_at; Start 15; Stop 39
aaacaatatcttgattggacggcta

SEQ ID NO: 101299 - DNA, 25 bp, Artificial
  probe
  misc_feature (1)..(25): SEQ ID NO: 6765; WAN024C28_at; Start 22; Stop 46
atcttgattggacggctagctactc

SEQ ID NO: 101300 - DNA, 25 bp, Artificial
  probe
  misc_feature (1)..(25): SEQ ID NO: 6765; WAN024C28_at; Start 21; Stop 45
tatcttgattggacggctagctact

SEQ ID NO: 101301 - DNA, 25 bp, Artificial
  probe
  misc_feature (1)..(25): SEQ ID NO: 6765; WAN024C28_at; Start 18; Stop 42
caatatcttgattggacggctagct

SEQ ID NO: 101302 - DNA, 25 bp, Artificial
  probe
  misc_feature (1)..(25): SEQ ID NO: 6765; WAN024C28_at; Start 10; Stop 34
aagctaaacaatatcttgattggac

SEQ ID NO: 101303 - DNA, 25 bp, Artificial
  probe
  misc_feature (1)..(25): SEQ ID NO: 6765; WAN024C28_at; Start 13; Stop 37
ctaaacaatatcttgattggacggc

SEQ ID NO: 101304 - DNA, 25 bp, Artificial
  probe
  misc_feature (1)..(25): SEQ ID NO: 6765; WAN024C28_at; Start 30; Stop 54
tggacggctagctactccctcgaag

SEQ ID NO: 101305 - DNA, 25 bp, Artificial
  probe
  misc_feature (1)..(25): SEQ ID NO: 6765; WAN024C28_at; Start 38; Stop 62
tagctactccctcgaagatattatt

SEQ ID NO: 101306 - DNA, 25 bp, Artificial
  probe
  misc_feature (1)..(25): SEQ ID NO: 6765; WAN024C28_at; Start 31; Stop 55
ggacggctagctactccctcgaaga

SEQ ID NO: 101307 - DNA, 25 bp, Artificial
  probe
  misc_feature (1)..(25): SEQ ID NO: 6765; WAN024C28_at; Start 29; Stop 53
ttggacggctagctactccctcgaa

SEQ ID NO: 101308 - DNA, 25 bp, Artificial
  probe
  misc_feature (1)..(25): SEQ ID NO: 6765; WAN024C28_at; Start 16; Stop 40
aacaatatcttgattggacggctag

SEQ ID NO: 101309 - DNA, 25 bp, Artificial
  probe
  misc_feature (1)..(25): SEQ ID NO: 6765; WAN024C28_at; Start 39; Stop 63
agctactccctcgaagatattattt

SEQ ID NO: 101310 - DNA, 25 bp, Artificial
  probe
  misc_feature (1)..(25): SEQ ID NO: 6765; WAN024C28_at; Start 47; Stop 71
cctcgaagatattattttatcagat

SEQ ID NO: 101311 - DNA, 25 bp, Artificial
  probe
  misc_feature (1)..(25): SEQ ID NO: 6765; WAN024C28_at; Start 20; Stop 44
atatcttgattggacggctagctac

SEQ ID NO: 101312 - DNA, 25 bp, Artificial
  probe
  misc_feature (1)..(25): SEQ ID NO: 6765; WAN024C28_at; Start 28; Stop 52
attggacggctagctactccctcga

SEQ ID NO: 101313 - DNA, 25 bp, Artificial
  probe
  misc_feature (1)..(25): SEQ ID NO: 6765; WAN024C28_at; Start 41; Stop 65
ctactccctcgaagatattatttta

SEQ ID NO: 101314 - DNA, 25 bp, Artificial
  probe
  misc_feature (1)..(25): SEQ ID NO: 6765; WAN024C28_at; Start 19; Stop 43
aatatcttgattggacggctagcta

SEQ ID NO: 101315 - DNA, 25 bp, Artificial
  probe
  misc_feature (1)..(25): SEQ ID NO: 6765; WAN024C28_at; Start 36; Stop 60
gctagctactccctcgaagatatta

SEQ ID NO: 101316 - DNA, 25 bp, Artificial
  probe
  misc_feature (1)..(25): SEQ ID NO: 7119; WAN024C29_at; Start 1; Stop 25
ctgctaaaaaccttgagtggtaacg

SEQ ID NO: 101317 - DNA, 25 bp, Artificial
  probe
  misc_feature (1)..(25): SEQ ID NO: 7119; WAN024C29_at; Start 7; Stop 31
aaaaccttgagtggtaacgctcaag

SEQ ID NO: 101318 - DNA, 25 bp, Artificial
  probe
  misc_feature (1)..(25): SEQ ID NO: 7119; WAN024C29_at; Start 10; Stop 34
accttgagtggtaacgctcaaggtt

SEQ ID NO: 101319 - DNA, 25 bp, Artificial
  probe
  misc_feature (1)..(25): SEQ ID NO: 7119; WAN024C29_at; Start 51; Stop 75
tgtttgtctgaaaatcttgattgag

SEQ ID NO: 101320 - DNA, 25 bp, Artificial
  probe
  misc_feature (1)..(25): SEQ ID NO: 7119; WAN024C29_at; Start 36; Stop 60
tttttggatggctgatgtttgtctg

SEQ ID NO: 101321 - DNA, 25 bp, Artificial
  probe
  misc_feature (1)..(25): SEQ ID NO: 7119; WAN024C29_at; Start 34; Stop 58
tttttttggatggctgatgtttgtc

SEQ ID NO: 101322 - DNA, 25 bp, Artificial
  probe
  misc_feature (1)..(25): SEQ ID NO: 7119; WAN024C29_at; Start 52; Stop 76
gtttgtctgaaaatcttgattgaga

SEQ ID NO: 101323 - DNA, 25 bp, Artificial
  probe
  misc_feature (1)..(25): SEQ ID NO: 7119; WAN024C29_at; Start 39; Stop 63
ttggatggctgatgtttgtctgaaa

SEQ ID NO: 101324 - DNA, 25 bp, Artificial
  probe
  misc_feature (1)..(25): SEQ ID NO: 7119; WAN024C29_at; Start 37; Stop 61
ttttggatggctgatgtttgtctga

SEQ ID NO: 101325 - DNA, 25 bp, Artificial
  probe
  misc_feature (1)..(25): SEQ ID NO: 7119; WAN024C29_at; Start 2; Stop 26
tgctaaaaaccttgagtggtaacgc

SEQ ID NO: 101326 - DNA, 25 bp, Artificial
  probe
  misc_feature (1)..(25): SEQ ID NO: 7119; WAN024C29_at; Start 5; Stop 29
taaaaaccttgagtggtaacgctca

SEQ ID NO: 101327 - DNA, 25 bp, Artificial
  probe
  misc_feature (1)..(25): SEQ ID NO: 7119; WAN024C29_at; Start 28; Stop 52
caaggttttttttggatggctgatg

SEQ ID NO: 101328 - DNA, 25 bp, Artificial
  probe
  misc_feature (1)..(25): SEQ ID NO: 7119; WAN024C29_at; Start 27; Stop 51
tcaaggttttttttggatggctgat

SEQ ID NO: 101329 - DNA, 25 bp, Artificial
  probe
  misc_feature (1)..(25): SEQ ID NO: 7119; WAN024C29_at; Start 11; Stop 35
ccttgagtggtaacgctcaaggttt

SEQ ID NO: 101330 - DNA, 25 bp, Artificial
  probe
  misc_feature (1)..(25): SEQ ID NO: 7119; WAN024C29_at; Start 9; Stop 33
aaccttgagtggtaacgctcaaggt

SEQ ID NO: 101331 - DNA, 25 bp, Artificial
  probe
  misc_feature (1)..(25): SEQ ID NO: 7119; WAN024C29_at; Start 8; Stop 32
aaaccttgagtggtaacgctcaagg

SEQ ID NO: 101332 - DNA, 25 bp, Artificial
  probe
  misc_feature (1)..(25): SEQ ID NO: 7119; WAN024C29_at; Start 35; Stop 59
ttttttggatggctgatgtttgtct

SEQ ID NO: 101333 - DNA, 25 bp, Artificial
  probe
  misc_feature (1)..(25): SEQ ID NO: 7119; WAN024C29_at; Start 25; Stop 49
gctcaaggttttttttggatggctg

SEQ ID NO: 101334 - DNA, 25 bp, Artificial
  probe
  misc_feature (1)..(25): SEQ ID NO: 7119; WAN024C29_at; Start 54; Stop 78
ttgtctgaaaatcttgattgagaaa

SEQ ID NO: 101335 - DNA, 25 bp, Artificial
  probe
  misc_feature (1)..(25): SEQ ID NO: 7119; WAN024C29_at; Start 24; Stop 48
cgctcaaggttttttttggatggct

SEQ ID NO: 101336 - DNA, 25 bp, Artificial
  probe
  misc_feature (1)..(25): SEQ ID NO: 7119; WAN024C29_at; Start 30; Stop 54
aggttttttttggatggctgatgtt

SEQ ID NO: 101337 - DNA, 25 bp, Artificial
  probe
  misc_feature (1)..(25): SEQ ID NO: 7119; WAN024C29_at; Start 12; Stop 36
cttgagtggtaacgctcaaggtttt

SEQ ID NO: 101338 - DNA, 25 bp, Artificial
  probe
  misc_feature (1)..(25): SEQ ID NO: 7119; WAN024C29_at; Start 32; Stop 56
gttttttttggatggctgatgtttg

SEQ ID NO: 101339 - DNA, 25 bp, Artificial
  probe
  misc_feature (1)..(25): SEQ ID NO: 7119; WAN024C29_at; Start 53; Stop 77
tttgtctgaaaatcttgattgagaa

SEQ ID NO: 101340 - DNA, 25 bp, Artificial
  probe
  misc_feature (1)..(25): SEQ ID NO: 7119; WAN024C29_at; Start 26; Stop 50
ctcaaggttttttttggatggctga

SEQ ID NO: 101341 - DNA, 25 bp, Artificial
  probe
  misc_feature (1)..(25): SEQ ID NO: 7119; WAN024C29_at; Start 29; Stop 53
aaggttttttttggatggctgatgt

SEQ ID NO: 101342 - DNA, 25 bp, Artificial
  probe
  misc_feature (1)..(25): SEQ ID NO: 7119; WAN024C29_at; Start 38; Stop 62
tttggatggctgatgtttgtctgaa

SEQ ID NO: 101343 - DNA, 25 bp, Artificial
  probe
  misc_feature (1)..(25): SEQ ID NO: 7119; WAN024C29_at; Start 33; Stop 57
ttttttttggatggctgatgtttgt

SEQ ID NO: 101344 - DNA, 25 bp, Artificial
  probe
  misc_feature (1)..(25): SEQ ID NO: 7124; WAN024C2A_at; Start 4; Stop 28
ctggagaggagtttgtttagagttt

SEQ ID NO: 101345 - DNA, 25 bp, Artificial
  probe
  misc_feature (1)..(25): SEQ ID NO: 7124; WAN024C2A_at; Start 54; Stop 78
agagagaaccagtctgatcctctct

SEQ ID NO: 101346 - DNA, 25 bp, Artificial
  probe
  misc_feature (1)..(25): SEQ ID NO: 7124; WAN024C2A_at; Start 56; Stop 80
agagaaccagtctgatcctctctta

SEQ ID NO: 101347 - DNA, 25 bp, Artificial
  probe
  misc_feature (1)..(25): SEQ ID NO: 7124; WAN024C2A_at; Start 1; Stop 25
ctgctggagaggagtttgtttagag

SEQ ID NO: 101348 - DNA, 25 bp, Artificial
  probe
  misc_feature (1)..(25): SEQ ID NO: 7124; WAN024C2A_at; Start 50; Stop 74
aaaaagagagaaccagtctgatcct

SEQ ID NO: 101349 - DNA, 25 bp, Artificial
  probe
  misc_feature (1)..(25): SEQ ID NO: 7124; WAN024C2A_at; Start 51; Stop 75
aaaagagagaaccagtctgatcctc

SEQ ID NO: 101350 - DNA, 25 bp, Artificial
  probe
  misc_feature (1)..(25): SEQ ID NO: 7124; WAN024C2A_at; Start 47; Stop 71
atcaaaaagagagaaccagtctgat

SEQ ID NO: 101351 - DNA, 25 bp, Artificial
  probe
  misc_feature (1)..(25): SEQ ID NO: 7124; WAN024C2A_at; Start 49; Stop 73
caaaaagagagaaccagtctgatcc

SEQ ID NO: 101352 - DNA, 25 bp, Artificial
  probe
  misc_feature (1)..(25): SEQ ID NO: 7124; WAN024C2A_at; Start 58; Stop 82
agaaccagtctgatcctctcttact

SEQ ID NO: 101353 - DNA, 25 bp, Artificial
  probe
  misc_feature (1)..(25): SEQ ID NO: 7124; WAN024C2A_at; Start 48; Stop 72
tcaaaaagagagaaccagtctgatc

SEQ ID NO: 101354 - DNA, 25 bp, Artificial
  probe
  misc_feature (1)..(25): SEQ ID NO: 7124; WAN024C2A_at; Start 59; Stop 83
gaaccagtctgatcctctcttactt

SEQ ID NO: 101355 - DNA, 25 bp, Artificial
  probe
  misc_feature (1)..(25): SEQ ID NO: 7124; WAN024C2A_at; Start 3; Stop 27
gctggagaggagtttgtttagagtt

SEQ ID NO: 101356 - DNA, 25 bp, Artificial
  probe
  misc_feature (1)..(25): SEQ ID NO: 7124; WAN024C2A_at; Start 53; Stop 77
aagagagaaccagtctgatcctctc

SEQ ID NO: 101357 - DNA, 25 bp, Artificial
  probe
  misc_feature (1)..(25): SEQ ID NO: 7124; WAN024C2A_at; Start 55; Stop 79
gagagaaccagtctgatcctctctt

SEQ ID NO: 101358 - DNA, 25 bp, Artificial
  probe
  misc_feature (1)..(25): SEQ ID NO: 7124; WAN024C2A_at; Start 2; Stop 26
tgctggagaggagtttgtttagagt

SEQ ID NO: 101359 - DNA, 25 bp, Artificial
  probe
  misc_feature (1)..(25): SEQ ID NO: 7124; WAN024C2A_at; Start 57; Stop 81
gagaaccagtctgatcctctcttac

SEQ ID NO: 101360 - DNA, 25 bp, Artificial
  probe
  misc_feature (1)..(25): SEQ ID NO: 7124; WAN024C2A_at; Start 5; Stop 29
tggagaggagtttgtttagagtttc

SEQ ID NO: 101361 - DNA, 25 bp, Artificial
  probe
  misc_feature (1)..(25): SEQ ID NO: 7124; WAN024C2A_at; Start 52; Stop 76
aaagagagaaccagtctgatcctct

SEQ ID NO: 101362 - DNA, 25 bp, Artificial
  probe
  misc_feature (1)..(25): SEQ ID NO: 7124; WAN024C2A_at; Start 60; Stop 84
aaccagtctgatcctctcttactta

SEQ ID NO: 101363 - DNA, 25 bp, Artificial
  probe
  misc_feature (1)..(25): SEQ ID NO: 7432; WAN024C2B_at; Start 49; Stop 73
aaattcaatagttatatttcatcac

SEQ ID NO: 101364 - DNA, 25 bp, Artificial
  probe
  misc_feature (1)..(25): SEQ ID NO: 7432; WAN024C2B_at; Start 47; Stop 71
ctaaattcaatagttatatttcatc

SEQ ID NO: 101365 - DNA, 25 bp, Artificial
  probe
  misc_feature (1)..(25): SEQ ID NO: 7432; WAN024C2B_at; Start 51; Stop 75
attcaatagttatatttcatcacta

SEQ ID NO: 101366 - DNA, 25 bp, Artificial
  probe
  misc_feature (1)..(25): SEQ ID NO: 7432; WAN024C2B_at; Start 48; Stop 72
taaattcaatagttatatttcatca

SEQ ID NO: 101367 - DNA, 25 bp, Artificial
  probe
  misc_feature (1)..(25): SEQ ID NO: 7432; WAN024C2B_at; Start 50; Stop 74
aattcaatagttatatttcatcact

SEQ ID NO: 101368 - DNA, 25 bp, Artificial
  probe
  misc_feature (1)..(25): SEQ ID NO: 7432; WAN024C2B_at; Start 45; Stop 69
tactaaattcaatagttatatttca

SEQ ID NO: 101369 - DNA, 25 bp, Artificial
  probe
  misc_feature (1)..(25): SEQ ID NO: 7432; WAN024C2B_at; Start 52; Stop 76
ttcaatagttatatttcatcactag

SEQ ID NO: 101370 - DNA, 25 bp, Artificial
  probe
  misc_feature (1)..(25): SEQ ID NO: 7432; WAN024C2B_at; Start 54; Stop 78
caatagttatatttcatcactagca

SEQ ID NO: 101371 - DNA, 25 bp, Artificial
  probe
  misc_feature (1)..(25): SEQ ID NO: 7432; WAN024C2B_at; Start 46; Stop 70
actaaattcaatagttatatttcat

SEQ ID NO: 101372 - DNA, 25 bp, Artificial
  probe
  misc_feature (1)..(25): SEQ ID NO: 7432; WAN024C2B_at; Start 53; Stop 77
tcaatagttatatttcatcactagc

SEQ ID NO: 101373 - DNA, 25 bp, Artificial
  probe
  misc_feature (1)..(25): SEQ ID NO: 7613; WAN024C2C_at; Start 1; Stop 25
ttggaggatacgatgaaagatagtt

SEQ ID NO: 101374 - DNA, 25 bp, Artificial
  probe
  misc_feature (1)..(25): SEQ ID NO: 7613; WAN024C2C_at; Start 4; Stop 28
gaggatacgatgaaagatagttatt

SEQ ID NO: 101375 - DNA, 25 bp, Artificial
  probe
  misc_feature (1)..(25): SEQ ID NO: 7613; WAN024C2C_at; Start 5; Stop 29
aggatacgatgaaagatagttattg

SEQ ID NO: 101376 - DNA, 25 bp, Artificial
  probe
  misc_feature (1)..(25): SEQ ID NO: 7613; WAN024C2C_at; Start 13; Stop 37
atgaaagatagttattggttaaatt

SEQ ID NO: 101377 - DNA, 25 bp, Artificial
  probe
  misc_feature (1)..(25): SEQ ID NO: 7613; WAN024C2C_at; Start 11; Stop 35
cgatgaaagatagttattggttaaa

SEQ ID NO: 101378 - DNA, 25 bp, Artificial
  probe
  misc_feature (1)..(25): SEQ ID NO: 7613; WAN024C2C_at; Start 10; Stop 34
acgatgaaagatagttattggttaa

SEQ ID NO: 101379 - DNA, 25 bp, Artificial
  probe
  misc_feature (1)..(25): SEQ ID NO: 7613; WAN024C2C_at; Start 14; Stop 38
tgaaagatagttattggttaaatta

SEQ ID NO: 101380 - DNA, 25 bp, Artificial
  probe
  misc_feature (1)..(25): SEQ ID NO: 7613; WAN024C2C_at; Start 6; Stop 30
ggatacgatgaaagatagttattgg

SEQ ID NO: 101381 - DNA, 25 bp, Artificial
  probe
  misc_feature (1)..(25): SEQ ID NO: 7613; WAN024C2C_at; Start 9; Stop 33
tacgatgaaagatagttattggtta

SEQ ID NO: 101382 - DNA, 25 bp, Artificial
  probe
  misc_feature (1)..(25): SEQ ID NO: 7613; WAN024C2C_at; Start 7; Stop 31
gatacgatgaaagatagttattggt

SEQ ID NO: 101383 - DNA, 25 bp, Artificial
  probe
  misc_feature (1)..(25): SEQ ID NO: 7613; WAN024C2C_at; Start 12; Stop 36
gatgaaagatagttattggttaaat

SEQ ID NO: 101384 - DNA, 25 bp, Artificial
  probe
  misc_feature (1)..(25): SEQ ID NO: 7613; WAN024C2C_at; Start 8; Stop 32
atacgatgaaagatagttattggtt

SEQ ID NO: 101385 - DNA, 25 bp, Artificial
  probe
  misc_feature (1)..(25): SEQ ID NO: 7613; WAN024C2C_at; Start 3; Stop 27
ggaggatacgatgaaagatagttat

SEQ ID NO: 101386 - DNA, 25 bp, Artificial
  probe
  misc_feature (1)..(25): SEQ ID NO: 7613; WAN024C2C_at; Start 2; Stop 26
tggaggatacgatgaaagatagtta

SEQ ID NO: 101387 - DNA, 25 bp, Artificial
  probe
  misc_feature (1)..(25): SEQ ID NO: 6685; WAN024C2D_at; Start 49; Stop 73
aatgatttacaaaatcagcctcgct

SEQ ID NO: 101388 - DNA, 25 bp, Artificial
  probe
  misc_feature (1)..(25): SEQ ID NO: 6685; WAN024C2D_at; Start 46; Stop 70
aaaaatgatttacaaaatcagcctc

SEQ ID NO: 101389 - DNA, 25 bp, Artificial
  probe
  misc_feature (1)..(25): SEQ ID NO: 6685; WAN024C2D_at; Start 45; Stop 69
aaaaaatgatttacaaaatcagcct

SEQ ID NO: 101390 - DNA, 25 bp, Artificial
  probe
  misc_feature (1)..(25): SEQ ID NO: 6685; WAN024C2D_at; Start 43; Stop 67
ggaaaaaatgatttacaaaatcagc

SEQ ID NO: 101391 - DNA, 25 bp, Artificial
  probe
  misc_feature (1)..(25): SEQ ID NO: 6685; WAN024C2D_at; Start 44; Stop 68
gaaaaaatgatttacaaaatcagcc

SEQ ID NO: 101392 - DNA, 25 bp, Artificial
  probe
  misc_feature (1)..(25): SEQ ID NO: 6685; WAN024C2D_at; Start 47; Stop 71
aaaatgatttacaaaatcagcctcg

SEQ ID NO: 101393 - DNA, 25 bp, Artificial
  probe
  misc_feature (1)..(25): SEQ ID NO: 6685; WAN024C2D_at; Start 48; Stop 72
aaatgatttacaaaatcagcctcgc

SEQ ID NO: 101394 - DNA, 25 bp, Artificial
  probe
  misc_feature (1)..(25): SEQ ID NO: 6721; WAN024C2E_at; Start 157; Stop 181
gaaaactggaaattctatgctctaa

SEQ ID NO: 101395 - DNA, 25 bp, Artificial
  probe
  misc_feature (1)..(25): SEQ ID NO: 6721; WAN024C2E_at; Start 28; Stop 52
cacaaaaagagacaaaaacaagatc

SEQ ID NO: 101396 - DNA, 25 bp, Artificial
  probe
  misc_feature (1)..(25): SEQ ID NO: 6721; WAN024C2E_at; Start 78; Stop 102
tagacttagctgttcatgtctccct

SEQ ID NO: 101397 - DNA, 25 bp, Artificial
  probe
  misc_feature (1)..(25): SEQ ID NO: 6721; WAN024C2E_at; Start 80; Stop 104
gacttagctgttcatgtctccctta

SEQ ID NO: 101398 - DNA, 25 bp, Artificial
  probe
  misc_feature (1)..(25): SEQ ID NO: 6721; WAN024C2E_at; Start 101; Stop 125
cttacctccgagtattagtatcttt

SEQ ID NO: 101399 - DNA, 25 bp, Artificial
  probe
  misc_feature (1)..(25): SEQ ID NO: 6721; WAN024C2E_at; Start 63; Stop 87
aggttctttatttgatagacttagc

SEQ ID NO: 101400 - DNA, 25 bp, Artificial
  probe
  misc_feature (1)..(25): SEQ ID NO: 6721; WAN024C2E_at; Start 142; Stop 166
gaaattttgtcaacagaaaactgga

SEQ ID NO: 101401 - DNA, 25 bp, Artificial
  probe
  misc_feature (1)..(25): SEQ ID NO: 6721; WAN024C2E_at; Start 45; Stop 69
acaagatctactaaataaaggttct

SEQ ID NO: 101402 - DNA, 25 bp, Artificial
  probe
  misc_feature (1)..(25): SEQ ID NO: 6721; WAN024C2E_at; Start 68; Stop 92
ctttatttgatagacttagctgttc

SEQ ID NO: 101403 - DNA, 25 bp, Artificial
  probe
  misc_feature (1)..(25): SEQ ID NO: 6721; WAN024C2E_at; Start 76; Stop 100
gatagacttagctgttcatgtctcc

SEQ ID NO: 101404 - DNA, 25 bp, Artificial
  probe
  misc_feature (1)..(25): SEQ ID NO: 6721; WAN024C2E_at; Start 152; Stop 176
caacagaaaactggaaattctatgc

SEQ ID NO: 101405 - DNA, 25 bp, Artificial
  probe
  misc_feature (1)..(25): SEQ ID NO: 6721; WAN024C2E_at; Start 165; Stop 189
gaaattctatgctctaaaatccaaa

SEQ ID NO: 101406 - DNA, 25 bp, Artificial
  probe
  misc_feature (1)..(25): SEQ ID NO: 6721; WAN024C2E_at; Start 169; Stop 193
ttctatgctctaaaatccaaaaaca

SEQ ID NO: 101407 - DNA, 25 bp, Artificial
  probe
  misc_feature (1)..(25): SEQ ID NO: 6721; WAN024C2E_at; Start 7; Stop 31
gaaaaagagcataaaagagcacaca

SEQ ID NO: 101408 - DNA, 25 bp, Artificial
  probe
  misc_feature (1)..(25): SEQ ID NO: 6721; WAN024C2E_at; Start 4; Stop 28
ccagaaaaagagcataaaagagcac

SEQ ID NO: 101409 - DNA, 25 bp, Artificial
  probe
  misc_feature (1)..(25): SEQ ID NO: 6721; WAN024C2E_at; Start 2; Stop 26
tgccagaaaaagagcataaaagagc

SEQ ID NO: 101410 - DNA, 25 bp, Artificial
  probe
  misc_feature (1)..(25): SEQ ID NO: 6721; WAN024C2E_at; Start 25; Stop 49
gcacacaaaaagagacaaaaacaag

SEQ ID NO: 101411 - DNA, 25 bp, Artificial
  probe
  misc_feature (1)..(25): SEQ ID NO: 6721; WAN024C2E_at; Start 23; Stop 47
gagcacacaaaaagagacaaaaaca

SEQ ID NO: 101412 - DNA, 25 bp, Artificial
  probe
  misc_feature (1)..(25): SEQ ID NO: 6721; WAN024C2E_at; Start 71; Stop 95
tatttgatagacttagctgttcatg

SEQ ID NO: 101413 - DNA, 25 bp, Artificial
  probe
  misc_feature (1)..(25): SEQ ID NO: 6721; WAN024C2E_at; Start 162; Stop 186
ctggaaattctatgctctaaaatcc

SEQ ID NO: 101414 - DNA, 25 bp, Artificial
  probe
  misc_feature (1)..(25): SEQ ID NO: 6721; WAN024C2E_at; Start 84; Stop 108
tagctgttcatgtctcccttacctc

SEQ ID NO: 101415 - DNA, 25 bp, Artificial
  probe
  misc_feature (1)..(25): SEQ ID NO: 6721; WAN024C2E_at; Start 119; Stop 143
tatctttatactatacctttaagga

SEQ ID NO: 101416 - DNA, 25 bp, Artificial
  probe
  misc_feature (1)..(25): SEQ ID NO: 6721; WAN024C2E_at; Start 91; Stop 115
tcatgtctcccttacctccgagtat

SEQ ID NO: 101417 - DNA, 25 bp, Artificial
  probe
  misc_feature (1)..(25): SEQ ID NO: 6721; WAN024C2E_at; Start 105; Stop 129
cctccgagtattagtatctttatac

SEQ ID NO: 101418 - DNA, 25 bp, Artificial
  probe
  misc_feature (1)..(25): SEQ ID NO: 6721; WAN024C2E_at; Start 36; Stop 60
gagacaaaaacaagatctactaaat

SEQ ID NO: 101419 - DNA, 25 bp, Artificial
  probe
  misc_feature (1)..(25): SEQ ID NO: 6721; WAN024C2E_at; Start 96; Stop 120
tctcccttacctccgagtattagta

SEQ ID NO: 101420 - DNA, 25 bp, Artificial
  probe
  misc_feature (1)..(25): SEQ ID NO: 6721; WAN024C2E_at; Start 147; Stop 171
tttgtcaacagaaaactggaaattc

SEQ ID NO: 101421 - DNA, 25 bp, Artificial
  probe
  misc_feature (1)..(25): SEQ ID NO: 6721; WAN024C2E_at; Start 89; Stop 113
gttcatgtctcccttacctccgagt

SEQ ID NO: 101422 - DNA, 25 bp, Artificial
  probe
  misc_feature (1)..(25): SEQ ID NO: 6721; WAN024C2E_at; Start 155; Stop 179
cagaaaactggaaattctatgctct

SEQ ID NO: 101423 - DNA, 25 bp, Artificial
  probe
  misc_feature (1)..(25): SEQ ID NO: 6721; WAN024C2E_at; Start 16; Stop 40
cataaaagagcacacaaaaagagac

SEQ ID NO: 101424 - DNA, 25 bp, Artificial
  probe
  misc_feature (1)..(25): SEQ ID NO: 6721; WAN024C2E_at; Start 94; Stop 118
tgtctcccttacctccgagtattag

SEQ ID NO: 101425 - DNA, 25 bp, Artificial
  probe
  misc_feature (1)..(25): SEQ ID NO: 6721; WAN024C2E_at; Start 99; Stop 123
cccttacctccgagtattagtatct

SEQ ID NO: 101426 - DNA, 25 bp, Artificial
  probe
  misc_feature (1)..(25): SEQ ID NO: 6721; WAN024C2E_at; Start 13; Stop 37
gagcataaaagagcacacaaaaaga

SEQ ID NO: 101427 - DNA, 25 bp, Artificial
  probe
  misc_feature (1)..(25): SEQ ID NO: 6721; WAN024C2E_at; Start 18; Stop 42
taaaagagcacacaaaaagagacaa

SEQ ID NO: 101428 - DNA, 25 bp, Artificial
  probe
  misc_feature (1)..(25): SEQ ID NO: 6391; WAN024C2F_at; Start 4; Stop 28
aaaggaagtcagagtatgaagaaaa

SEQ ID NO: 101429 - DNA, 25 bp, Artificial
  probe
  misc_feature (1)..(25): SEQ ID NO: 6391; WAN024C2F_at; Start 57; Stop 81
ggtaatggatattatcattattgtt

SEQ ID NO: 101430 - DNA, 25 bp, Artificial
  probe
  misc_feature (1)..(25): SEQ ID NO: 6391; WAN024C2F_at; Start 61; Stop 85
atggatattatcattattgttggtg

SEQ ID NO: 101431 - DNA, 25 bp, Artificial
  probe
  misc_feature (1)..(25): SEQ ID NO: 6391; WAN024C2F_at; Start 13; Stop 37
cagagtatgaagaaaatttcaaaat

SEQ ID NO: 101432 - DNA, 25 bp, Artificial
  probe
  misc_feature (1)..(25): SEQ ID NO: 6391; WAN024C2F_at; Start 60; Stop 84
aatggatattatcattattgttggt

SEQ ID NO: 101433 - DNA, 25 bp, Artificial
  probe
  misc_feature (1)..(25): SEQ ID NO: 6391; WAN024C2F_at; Start 51; Stop 75
gtttttggtaatggatattatcatt

SEQ ID NO: 101434 - DNA, 25 bp, Artificial
  probe
  misc_feature (1)..(25): SEQ ID NO: 6391; WAN024C2F_at; Start 2; Stop 26
tgaaaggaagtcagagtatgaagaa

SEQ ID NO: 101435 - DNA, 25 bp, Artificial
  probe
  misc_feature (1)..(25): SEQ ID NO: 6391; WAN024C2F_at; Start 1; Stop 25
atgaaaggaagtcagagtatgaaga

SEQ ID NO: 101436 - DNA, 25 bp, Artificial
  probe
  misc_feature (1)..(25): SEQ ID NO: 6391; WAN024C2F_at; Start 44; Stop 68
cgattttgtttttggtaatggatat

SEQ ID NO: 101437 - DNA, 25 bp, Artificial
  probe
  misc_feature (1)..(25): SEQ ID NO: 6391; WAN024C2F_at; Start 52; Stop 76
tttttggtaatggatattatcatta

SEQ ID NO: 101438 - DNA, 25 bp, Artificial
  probe
  misc_feature (1)..(25): SEQ ID NO: 6391; WAN024C2F_at; Start 49; Stop 73
ttgtttttggtaatggatattatca

SEQ ID NO: 101439 - DNA, 25 bp, Artificial
  probe
  misc_feature (1)..(25): SEQ ID NO: 6391; WAN024C2F_at; Start 63; Stop 87
ggatattatcattattgttggtgga

SEQ ID NO: 101440 - DNA, 25 bp, Artificial
  probe
  misc_feature (1)..(25): SEQ ID NO: 6391; WAN024C2F_at; Start 55; Stop 79
ttggtaatggatattatcattattg

SEQ ID NO: 101441 - DNA, 25 bp, Artificial
  probe
  misc_feature (1)..(25): SEQ ID NO: 6391; WAN024C2F_at; Start 12; Stop 36
tcagagtatgaagaaaatttcaaaa

SEQ ID NO: 101442 - DNA, 25 bp, Artificial
  probe
  misc_feature (1)..(25): SEQ ID NO: 6391; WAN024C2F_at; Start 3; Stop 27
gaaaggaagtcagagtatgaagaaa

SEQ ID NO: 101443 - DNA, 25 bp, Artificial
  probe
  misc_feature (1)..(25): SEQ ID NO: 6391; WAN024C2F_at; Start 7; Stop 31
ggaagtcagagtatgaagaaaattt

SEQ ID NO: 101444 - DNA, 25 bp, Artificial
  probe
  misc_feature (1)..(25): SEQ ID NO: 6391; WAN024C2F_at; Start 53; Stop 77
ttttggtaatggatattatcattat

SEQ ID NO: 101445 - DNA, 25 bp, Artificial
  probe
  misc_feature (1)..(25): SEQ ID NO: 6391; WAN024C2F_at; Start 59; Stop 83
taatggatattatcattattgttgg

SEQ ID NO: 101446 - DNA, 25 bp, Artificial
  probe
  misc_feature (1)..(25): SEQ ID NO: 6391; WAN024C2F_at; Start 62; Stop 86
tggatattatcattattgttggtgg

SEQ ID NO: 101447 - DNA, 25 bp, Artificial
  probe
  misc_feature (1)..(25): SEQ ID NO: 6391; WAN024C2F_at; Start 48; Stop 72
tttgtttttggtaatggatattatc

SEQ ID NO: 101448 - DNA, 25 bp, Artificial
  probe
  misc_feature (1)..(25): SEQ ID NO: 6391; WAN024C2F_at; Start 50; Stop 74
tgtttttggtaatggatattatcat

SEQ ID NO: 101449 - DNA, 25 bp, Artificial
  probe
  misc_feature (1)..(25): SEQ ID NO: 6391; WAN024C2F_at; Start 8; Stop 32
gaagtcagagtatgaagaaaatttc

SEQ ID NO: 101450 - DNA, 25 bp, Artificial
  probe
  misc_feature (1)..(25): SEQ ID NO: 6391; WAN024C2F_at; Start 6; Stop 30
aggaagtcagagtatgaagaaaatt

SEQ ID NO: 101451 - DNA, 25 bp, Artificial
  probe
  misc_feature (1)..(25): SEQ ID NO: 6391; WAN024C2F_at; Start 56; Stop 80
tggtaatggatattatcattattgt

SEQ ID NO: 101452 - DNA, 25 bp, Artificial
  probe
  misc_feature (1)..(25): SEQ ID NO: 6391; WAN024C2F_at; Start 9; Stop 33
aagtcagagtatgaagaaaatttca

SEQ ID NO: 101453 - DNA, 25 bp, Artificial
  probe
  misc_feature (1)..(25): SEQ ID NO: 6391; WAN024C2F_at; Start 14; Stop 38
agagtatgaagaaaatttcaaaatt

SEQ ID NO: 101454 - DNA, 25 bp, Artificial
  probe
  misc_feature (1)..(25): SEQ ID NO: 6391; WAN024C2F_at; Start 11; Stop 35
gtcagagtatgaagaaaatttcaaa

SEQ ID NO: 101455 - DNA, 25 bp, Artificial
  probe
  misc_feature (1)..(25): SEQ ID NO: 6391; WAN024C2F_at; Start 58; Stop 82
gtaatggatattatcattattgttg

SEQ ID NO: 101456 - DNA, 25 bp, Artificial
  probe
  misc_feature (1)..(25): SEQ ID NO: 6391; WAN024C2F_at; Start 5; Stop 29
aaggaagtcagagtatgaagaaaat

SEQ ID NO: 101457 - DNA, 25 bp, Artificial
  probe
  misc_feature (1)..(25): SEQ ID NO: 6391; WAN024C2F_at; Start 10; Stop 34
agtcagagtatgaagaaaatttcaa

SEQ ID NO: 101458 - DNA, 25 bp, Artificial
  probe
  misc_feature (1)..(25): SEQ ID NO: 7305; WAN024C2G_at; Start 75; Stop 99
aatttggggaagttatcacaaatca

SEQ ID NO: 101459 - DNA, 25 bp, Artificial
  probe
  misc_feature (1)..(25): SEQ ID NO: 7305; WAN024C2G_at; Start 57; Stop 81
gaaaagtatagcagaagaaatttgg

SEQ ID NO: 101460 - DNA, 25 bp, Artificial
  probe
  misc_feature (1)..(25): SEQ ID NO: 7305; WAN024C2G_at; Start 81; Stop 105
gggaagttatcacaaatcaagtaag

SEQ ID NO: 101461 - DNA, 25 bp, Artificial
  probe
  misc_feature (1)..(25): SEQ ID NO: 7305; WAN024C2G_at; Start 82; Stop 106
ggaagttatcacaaatcaagtaagg

SEQ ID NO: 101462 - DNA, 25 bp, Artificial
  probe
  misc_feature (1)..(25): SEQ ID NO: 7305; WAN024C2G_at; Start 64; Stop 88
atagcagaagaaatttggggaagtt

SEQ ID NO: 101463 - DNA, 25 bp, Artificial
  probe
  misc_feature (1)..(25): SEQ ID NO: 7305; WAN024C2G_at; Start 67; Stop 91
gcagaagaaatttggggaagttatc

SEQ ID NO: 101464 - DNA, 25 bp, Artificial
  probe
  misc_feature (1)..(25): SEQ ID NO: 7305; WAN024C2G_at; Start 77; Stop 101
tttggggaagttatcacaaatcaag

SEQ ID NO: 101465 - DNA, 25 bp, Artificial
  probe
  misc_feature (1)..(25): SEQ ID NO: 7305; WAN024C2G_at; Start 59; Stop 83
aaagtatagcagaagaaatttgggg

SEQ ID NO: 101466 - DNA, 25 bp, Artificial
  probe
  misc_feature (1)..(25): SEQ ID NO: 7305; WAN024C2G_at; Start 83; Stop 107
gaagttatcacaaatcaagtaagga

SEQ ID NO: 101467 - DNA, 25 bp, Artificial
  probe
  misc_feature (1)..(25): SEQ ID NO: 7305; WAN024C2G_at; Start 62; Stop 86
gtatagcagaagaaatttggggaag

SEQ ID NO: 101468 - DNA, 25 bp, Artificial
  probe
  misc_feature (1)..(25): SEQ ID NO: 7305; WAN024C2G_at; Start 54; Stop 78
tgagaaaagtatagcagaagaaatt

SEQ ID NO: 101469 - DNA, 25 bp, Artificial
  probe
  misc_feature (1)..(25): SEQ ID NO: 7305; WAN024C2G_at; Start 84; Stop 108
aagttatcacaaatcaagtaaggac

SEQ ID NO: 101470 - DNA, 25 bp, Artificial
  probe
  misc_feature (1)..(25): SEQ ID NO: 7305; WAN024C2G_at; Start 56; Stop 80
agaaaagtatagcagaagaaatttg

SEQ ID NO: 101471 - DNA, 25 bp, Artificial
  probe
  misc_feature (1)..(25): SEQ ID NO: 7305; WAN024C2G_at; Start 76; Stop 100
atttggggaagttatcacaaatcaa

SEQ ID NO: 101472 - DNA, 25 bp, Artificial
  probe
  misc_feature (1)..(25): SEQ ID NO: 7305; WAN024C2G_at; Start 63; Stop 87
tatagcagaagaaatttggggaagt

SEQ ID NO: 101473 - DNA, 25 bp, Artificial
  probe
  misc_feature (1)..(25): SEQ ID NO: 7305; WAN024C2G_at; Start 60; Stop 84
aagtatagcagaagaaatttgggga

SEQ ID NO: 101474 - DNA, 25 bp, Artificial
  probe
  misc_feature (1)..(25): SEQ ID NO: 7305; WAN024C2G_at; Start 66; Stop 90
agcagaagaaatttggggaagttat

SEQ ID NO: 101475 - DNA, 25 bp, Artificial
  probe
  misc_feature (1)..(25): SEQ ID NO: 7305; WAN024C2G_at; Start 68; Stop 92
cagaagaaatttggggaagttatca

SEQ ID NO: 101476 - DNA, 25 bp, Artificial
  probe
  misc_feature (1)..(25): SEQ ID NO: 7305; WAN024C2G_at; Start 55; Stop 79
gagaaaagtatagcagaagaaattt

SEQ ID NO: 101477 - DNA, 25 bp, Artificial
  probe
  misc_feature (1)..(25): SEQ ID NO: 7305; WAN024C2G_at; Start 53; Stop 77
ttgagaaaagtatagcagaagaaat

SEQ ID NO: 101478 - DNA, 25 bp, Artificial
  probe
  misc_feature (1)..(25): SEQ ID NO: 7305; WAN024C2G_at; Start 70; Stop 94
gaagaaatttggggaagttatcaca

SEQ ID NO: 101479 - DNA, 25 bp, Artificial
  probe
  misc_feature (1)..(25): SEQ ID NO: 7305; WAN024C2G_at; Start 80; Stop 104
ggggaagttatcacaaatcaagtaa

SEQ ID NO: 101480 - DNA, 25 bp, Artificial
  probe
  misc_feature (1)..(25): SEQ ID NO: 7305; WAN024C2G_at; Start 52; Stop 76
gttgagaaaagtatagcagaagaaa

SEQ ID NO: 101481 - DNA, 25 bp, Artificial
  probe
  misc_feature (1)..(25): SEQ ID NO: 7305; WAN024C2G_at; Start 48; Stop 72
aaaagttgagaaaagtatagcagaa

SEQ ID NO: 101482 - DNA, 25 bp, Artificial
  probe
  misc_feature (1)..(25): SEQ ID NO: 7305; WAN024C2G_at; Start 58; Stop 82
aaaagtatagcagaagaaatttggg

SEQ ID NO: 101483 - DNA, 25 bp, Artificial
  probe
  misc_feature (1)..(25): SEQ ID NO: 7305; WAN024C2G_at; Start 78; Stop 102
ttggggaagttatcacaaatcaagt

SEQ ID NO: 101484 - DNA, 25 bp, Artificial
  probe
  misc_feature (1)..(25): SEQ ID NO: 7305; WAN024C2G_at; Start 79; Stop 103
tggggaagttatcacaaatcaagta

SEQ ID NO: 101485 - DNA, 25 bp, Artificial
  probe
  misc_feature (1)..(25): SEQ ID NO: 7305; WAN024C2G_at; Start 61; Stop 85
agtatagcagaagaaatttggggaa

SEQ ID NO: 101486 - DNA, 25 bp, Artificial
  probe
  misc_feature (1)..(25): SEQ ID NO: 7305; WAN024C2G_at; Start 65; Stop 89
tagcagaagaaatttggggaagtta

SEQ ID NO: 101487 - DNA, 25 bp, Artificial
  probe
  misc_feature (1)..(25): SEQ ID NO: 7268; WAN024C2H_at; Start 50; Stop 74
ctatggactgtttcttatttagcaa

SEQ ID NO: 101488 - DNA, 25 bp, Artificial
  probe
  misc_feature (1)..(25): SEQ ID NO: 7268; WAN024C2H_at; Start 33; Stop 57
agacaaaaaaacagcctctatggac

SEQ ID NO: 101489 - DNA, 25 bp, Artificial
  probe
  misc_feature (1)..(25): SEQ ID NO: 7268; WAN024C2H_at; Start 34; Stop 58
gacaaaaaaacagcctctatggact

SEQ ID NO: 101490 - DNA, 25 bp, Artificial
  probe
  misc_feature (1)..(25): SEQ ID NO: 7268; WAN024C2H_at; Start 28; Stop 52
tttggagacaaaaaaacagcctcta

SEQ ID NO: 101491 - DNA, 25 bp, Artificial
  probe
  misc_feature (1)..(25): SEQ ID NO: 7268; WAN024C2H_at; Start 45; Stop 69
agcctctatggactgtttcttattt

SEQ ID NO: 101492 - DNA, 25 bp, Artificial
  probe
  misc_feature (1)..(25): SEQ ID NO: 7268; WAN024C2H_at; Start 43; Stop 67
acagcctctatggactgtttcttat

SEQ ID NO: 101493 - DNA, 25 bp, Artificial
  probe
  misc_feature (1)..(25): SEQ ID NO: 7268; WAN024C2H_at; Start 57; Stop 81
ctgtttcttatttagcaagtttagc

SEQ ID NO: 101494 - DNA, 25 bp, Artificial
  probe
  misc_feature (1)..(25): SEQ ID NO: 7268; WAN024C2H_at; Start 42; Stop 66
aacagcctctatggactgtttctta

SEQ ID NO: 101495 - DNA, 25 bp, Artificial
  probe
  misc_feature (1)..(25): SEQ ID NO: 7268; WAN024C2H_at; Start 30; Stop 54
tggagacaaaaaaacagcctctatg

SEQ ID NO: 101496 - DNA, 25 bp, Artificial
  probe
  misc_feature (1)..(25): SEQ ID NO: 7268; WAN024C2H_at; Start 31; Stop 55
ggagacaaaaaaacagcctctatgg

SEQ ID NO: 101497 - DNA, 25 bp, Artificial
  probe
  misc_feature (1)..(25): SEQ ID NO: 7268; WAN024C2H_at; Start 55; Stop 79
gactgtttcttatttagcaagttta

SEQ ID NO: 101498 - DNA, 25 bp, Artificial
  probe
  misc_feature (1)..(25): SEQ ID NO: 7268; WAN024C2H_at; Start 25; Stop 49
ctatttggagacaaaaaaacagcct

SEQ ID NO: 101499 - DNA, 25 bp, Artificial
  probe
  misc_feature (1)..(25): SEQ ID NO: 7268; WAN024C2H_at; Start 52; Stop 76
atggactgtttcttatttagcaagt

SEQ ID NO: 101500 - DNA, 25 bp, Artificial
  probe
  misc_feature (1)..(25): SEQ ID NO: 7268; WAN024C2H_at; Start 46; Stop 70
gcctctatggactgtttcttattta

SEQ ID NO: 101501 - DNA, 25 bp, Artificial
  probe
  misc_feature (1)..(25): SEQ ID NO: 7268; WAN024C2H_at; Start 40; Stop 64
aaaacagcctctatggactgtttct

SEQ ID NO: 101502 - DNA, 25 bp, Artificial
  probe
  misc_feature (1)..(25): SEQ ID NO: 7268; WAN024C2H_at; Start 39; Stop 63
aaaaacagcctctatggactgtttc

SEQ ID NO: 101503 - DNA, 25 bp, Artificial
  probe
  misc_feature (1)..(25): SEQ ID NO: 7268; WAN024C2H_at; Start 48; Stop 72
ctctatggactgtttcttatttagc

SEQ ID NO: 101504 - DNA, 25 bp, Artificial
  probe
  misc_feature (1)..(25): SEQ ID NO: 7268; WAN024C2H_at; Start 53; Stop 77
tggactgtttcttatttagcaagtt

SEQ ID NO: 101505 - DNA, 25 bp, Artificial
  probe
  misc_feature (1)..(25): SEQ ID NO: 7268; WAN024C2H_at; Start 38; Stop 62
aaaaaacagcctctatggactgttt

SEQ ID NO: 101506 - DNA, 25 bp, Artificial
  probe
  misc_feature (1)..(25): SEQ ID NO: 7268; WAN024C2H_at; Start 14; Stop 38
tctaccttttcctatttggagacaa

SEQ ID NO: 101507 - DNA, 25 bp, Artificial
  probe
  misc_feature (1)..(25): SEQ ID NO: 7268; WAN024C2H_at; Start 23; Stop 47
tcctatttggagacaaaaaaacagc

SEQ ID NO: 101508 - DNA, 25 bp, Artificial
  probe
  misc_feature (1)..(25): SEQ ID NO: 7268; WAN024C2H_at; Start 41; Stop 65
aaacagcctctatggactgtttctt

SEQ ID NO: 101509 - DNA, 25 bp, Artificial
  probe
  misc_feature (1)..(25): SEQ ID NO: 7268; WAN024C2H_at; Start 29; Stop 53
ttggagacaaaaaaacagcctctat

SEQ ID NO: 101510 - DNA, 25 bp, Artificial
  probe
  misc_feature (1)..(25): SEQ ID NO: 7268; WAN024C2H_at; Start 49; Stop 73
tctatggactgtttcttatttagca

SEQ ID NO: 101511 - DNA, 25 bp, Artificial
  probe
  misc_feature (1)..(25): SEQ ID NO: 7268; WAN024C2H_at; Start 51; Stop 75
tatggactgtttcttatttagcaag

SEQ ID NO: 101512 - DNA, 25 bp, Artificial
  probe
  misc_feature (1)..(25): SEQ ID NO: 7268; WAN024C2H_at; Start 26; Stop 50
tatttggagacaaaaaaacagcctc

SEQ ID NO: 101513 - DNA, 25 bp, Artificial
  probe
  misc_feature (1)..(25): SEQ ID NO: 7268; WAN024C2H_at; Start 13; Stop 37
ttctaccttttcctatttggagaca

SEQ ID NO: 101514 - DNA, 25 bp, Artificial
  probe
  misc_feature (1)..(25): SEQ ID NO: 7268; WAN024C2H_at; Start 47; Stop 71
cctctatggactgtttcttatttag

SEQ ID NO: 101515 - DNA, 25 bp, Artificial
  probe
  misc_feature (1)..(25): SEQ ID NO: 7268; WAN024C2H_at; Start 36; Stop 60
caaaaaaacagcctctatggactgt

SEQ ID NO: 101516 - DNA, 25 bp, Artificial
  probe
  misc_feature (1)..(25): SEQ ID NO: 7268; WAN024C2H_at; Start 37; Stop 61
aaaaaaacagcctctatggactgtt

SEQ ID NO: 101517 - DNA, 25 bp, Artificial
  probe
  misc_feature (1)..(25): SEQ ID NO: 7268; WAN024C2H_at; Start 44; Stop 68
cagcctctatggactgtttcttatt

SEQ ID NO: 101518 - DNA, 25 bp, Artificial
  probe
  misc_feature (1)..(25): SEQ ID NO: 7268; WAN024C2H_at; Start 27; Stop 51
atttggagacaaaaaaacagcctct

SEQ ID NO: 101519 - DNA, 25 bp, Artificial
  probe
  misc_feature (1)..(25): SEQ ID NO: 7268; WAN024C2H_at; Start 56; Stop 80
actgtttcttatttagcaagtttag

SEQ ID NO: 101520 - DNA, 25 bp, Artificial
  probe
  misc_feature (1)..(25): SEQ ID NO: 7268; WAN024C2H_at; Start 32; Stop 56
gagacaaaaaaacagcctctatgga

SEQ ID NO: 101521 - DNA, 25 bp, Artificial
  probe
  misc_feature (1)..(25): SEQ ID NO: 7433; WAN024C2I_at; Start 40; Stop 64
tttgccaaagctgtagctcgtgttc

SEQ ID NO: 101522 - DNA, 25 bp, Artificial
  probe
  misc_feature (1)..(25): SEQ ID NO: 7433; WAN024C2I_at; Start 8; Stop 32
cagaagcaatgctccaaagcaaatt

SEQ ID NO: 101523 - DNA, 25 bp, Artificial
  probe
  misc_feature (1)..(25): SEQ ID NO: 7433; WAN024C2I_at; Start 49; Stop 73
gctgtagctcgtgttcaaattggca

SEQ ID NO: 101524 - DNA, 25 bp, Artificial
  probe
  misc_feature (1)..(25): SEQ ID NO: 7433; WAN024C2I_at; Start 51; Stop 75
tgtagctcgtgttcaaattggcaag

SEQ ID NO: 101525 - DNA, 25 bp, Artificial
  probe
  misc_feature (1)..(25): SEQ ID NO: 7433; WAN024C2I_at; Start 46; Stop 70
aaagctgtagctcgtgttcaaattg

SEQ ID NO: 101526 - DNA, 25 bp, Artificial
  probe
  misc_feature (1)..(25): SEQ ID NO: 7433; WAN024C2I_at; Start 35; Stop 59
tcttttttgccaaagctgtagctcg

SEQ ID NO: 101527 - DNA, 25 bp, Artificial
  probe
  misc_feature (1)..(25): SEQ ID NO: 7433; WAN024C2I_at; Start 43; Stop 67
gccaaagctgtagctcgtgttcaaa

SEQ ID NO: 101528 - DNA, 25 bp, Artificial
  probe
  misc_feature (1)..(25): SEQ ID NO: 7433; WAN024C2I_at; Start 22; Stop 46
caaagcaaattggtcttttttgcca

SEQ ID NO: 101529 - DNA, 25 bp, Artificial
  probe
  misc_feature (1)..(25): SEQ ID NO: 7433; WAN024C2I_at; Start 15; Stop 39
aatgctccaaagcaaattggtcttt

SEQ ID NO: 101530 - DNA, 25 bp, Artificial
  probe
  misc_feature (1)..(25): SEQ ID NO: 7433; WAN024C2I_at; Start 6; Stop 30
tgcagaagcaatgctccaaagcaaa

SEQ ID NO: 101531 - DNA, 25 bp, Artificial
  probe
  misc_feature (1)..(25): SEQ ID NO: 7433; WAN024C2I_at; Start 56; Stop 80
ctcgtgttcaaattggcaagcccaa

SEQ ID NO: 101532 - DNA, 25 bp, Artificial
  probe
  misc_feature (1)..(25): SEQ ID NO: 7433; WAN024C2I_at; Start 54; Stop 78
agctcgtgttcaaattggcaagccc

SEQ ID NO: 101533 - DNA, 25 bp, Artificial
  probe
  misc_feature (1)..(25): SEQ ID NO: 7433; WAN024C2I_at; Start 38; Stop 62
tttttgccaaagctgtagctcgtgt

SEQ ID NO: 101534 - DNA, 25 bp, Artificial
  probe
  misc_feature (1)..(25): SEQ ID NO: 7433; WAN024C2I_at; Start 37; Stop 61
ttttttgccaaagctgtagctcgtg

SEQ ID NO: 101535 - DNA, 25 bp, Artificial
  probe
  misc_feature (1)..(25): SEQ ID NO: 7433; WAN024C2I_at; Start 3; Stop 27
gaatgcagaagcaatgctccaaagc

SEQ ID NO: 101536 - DNA, 25 bp, Artificial
  probe
  misc_feature (1)..(25): SEQ ID NO: 7433; WAN024C2I_at; Start 10; Stop 34
gaagcaatgctccaaagcaaattgg

SEQ ID NO: 101537 - DNA, 25 bp, Artificial
  probe
  misc_feature (1)..(25): SEQ ID NO: 7433; WAN024C2I_at; Start 45; Stop 69
caaagctgtagctcgtgttcaaatt

SEQ ID NO: 101538 - DNA, 25 bp, Artificial
  probe
  misc_feature (1)..(25): SEQ ID NO: 7433; WAN024C2I_at; Start 42; Stop 66
tgccaaagctgtagctcgtgttcaa

SEQ ID NO: 101539 - DNA, 25 bp, Artificial
  probe
  misc_feature (1)..(25): SEQ ID NO: 7433; WAN024C2I_at; Start 55; Stop 79
gctcgtgttcaaattggcaagccca

SEQ ID NO: 101540 - DNA, 25 bp, Artificial
  probe
  misc_feature (1)..(25): SEQ ID NO: 7433; WAN024C2I_at; Start 17; Stop 41
tgctccaaagcaaattggtcttttt

SEQ ID NO: 101541 - DNA, 25 bp, Artificial
  probe
  misc_feature (1)..(25): SEQ ID NO: 7433; WAN024C2I_at; Start 57; Stop 81
tcgtgttcaaattggcaagcccaat

SEQ ID NO: 101542 - DNA, 25 bp, Artificial
  probe
  misc_feature (1)..(25): SEQ ID NO: 7433; WAN024C2I_at; Start 33; Stop 57
ggtcttttttgccaaagctgtagct

SEQ ID NO: 101543 - DNA, 25 bp, Artificial
  probe
  misc_feature (1)..(25): SEQ ID NO: 7433; WAN024C2I_at; Start 44; Stop 68
ccaaagctgtagctcgtgttcaaat

SEQ ID NO: 101544 - DNA, 25 bp, Artificial
  probe
  misc_feature (1)..(25): SEQ ID NO: 7433; WAN024C2I_at; Start 26; Stop 50
gcaaattggtcttttttgccaaagc

SEQ ID NO: 101545 - DNA, 25 bp, Artificial
  probe
  misc_feature (1)..(25): SEQ ID NO: 7433; WAN024C2I_at; Start 13; Stop 37
gcaatgctccaaagcaaattggtct

SEQ ID NO: 101546 - DNA, 25 bp, Artificial
  probe
  misc_feature (1)..(25): SEQ ID NO: 7433; WAN024C2I_at; Start 4; Stop 28
aatgcagaagcaatgctccaaagca

SEQ ID NO: 101547 - DNA, 25 bp, Artificial
  probe
  misc_feature (1)..(25): SEQ ID NO: 7433; WAN024C2I_at; Start 14; Stop 38
caatgctccaaagcaaattggtctt

SEQ ID NO: 101548 - DNA, 25 bp, Artificial
  probe
  misc_feature (1)..(25): SEQ ID NO: 7433; WAN024C2I_at; Start 2; Stop 26
tgaatgcagaagcaatgctccaaag

SEQ ID NO: 101549 - DNA, 25 bp, Artificial
  probe
  misc_feature (1)..(25): SEQ ID NO: 7433; WAN024C2I_at; Start 28; Stop 52
aaattggtcttttttgccaaagctg

SEQ ID NO: 101550 - DNA, 25 bp, Artificial
  probe
  misc_feature (1)..(25): SEQ ID NO: 7433; WAN024C2I_at; Start 31; Stop 55
ttggtcttttttgccaaagctgtag

SEQ ID NO: 101551 - DNA, 25 bp, Artificial
  probe
  misc_feature (1)..(25): SEQ ID NO: 7433; WAN024C2I_at; Start 48; Stop 72
agctgtagctcgtgttcaaattggc

SEQ ID NO: 101552 - DNA, 25 bp, Artificial
  probe
  misc_feature (1)..(25): SEQ ID NO: 7433; WAN024C2I_at; Start 36; Stop 60
cttttttgccaaagctgtagctcgt

SEQ ID NO: 101553 - DNA, 25 bp, Artificial
  probe
  misc_feature (1)..(25): SEQ ID NO: 7433; WAN024C2I_at; Start 47; Stop 71
aagctgtagctcgtgttcaaattgg

SEQ ID NO: 101554 - DNA, 25 bp, Artificial
  probe
  misc_feature (1)..(25): SEQ ID NO: 7433; WAN024C2I_at; Start 53; Stop 77
tagctcgtgttcaaattggcaagcc

SEQ ID NO: 101555 - DNA, 25 bp, Artificial
  probe
  misc_feature (1)..(25): SEQ ID NO: 7699; WAN024C2J_at; Start 7; Stop 31
aaaatattgtatcatagcaatgtaa

SEQ ID NO: 101556 - DNA, 25 bp, Artificial
  probe
  misc_feature (1)..(25): SEQ ID NO: 7699; WAN024C2J_at; Start 16; Stop 40
tatcatagcaatgtaaaaagtaaaa

SEQ ID NO: 101557 - DNA, 25 bp, Artificial
  probe
  misc_feature (1)..(25): SEQ ID NO: 7699; WAN024C2J_at; Start 1; Stop 25
ttgttaaaaatattgtatcatagca

SEQ ID NO: 101558 - DNA, 25 bp, Artificial
  probe
  misc_feature (1)..(25): SEQ ID NO: 7699; WAN024C2J_at; Start 8; Stop 32
aaatattgtatcatagcaatgtaaa

SEQ ID NO: 101559 - DNA, 25 bp, Artificial
  probe
  misc_feature (1)..(25): SEQ ID NO: 7699; WAN024C2J_at; Start 5; Stop 29
taaaaatattgtatcatagcaatgt

SEQ ID NO: 101560 - DNA, 25 bp, Artificial
  probe
  misc_feature (1)..(25): SEQ ID NO: 7699; WAN024C2J_at; Start 13; Stop 37
ttgtatcatagcaatgtaaaaagta

SEQ ID NO: 101561 - DNA, 25 bp, Artificial
  probe
  misc_feature (1)..(25): SEQ ID NO: 7699; WAN024C2J_at; Start 9; Stop 33
aatattgtatcatagcaatgtaaaa

SEQ ID NO: 101562 - DNA, 25 bp, Artificial
  probe
  misc_feature (1)..(25): SEQ ID NO: 7699; WAN024C2J_at; Start 14; Stop 38
tgtatcatagcaatgtaaaaagtaa

SEQ ID NO: 101563 - DNA, 25 bp, Artificial
  probe
  misc_feature (1)..(25): SEQ ID NO: 7699; WAN024C2J_at; Start 4; Stop 28
ttaaaaatattgtatcatagcaatg

SEQ ID NO: 101564 - DNA, 25 bp, Artificial
  probe
  misc_feature (1)..(25): SEQ ID NO: 7699; WAN024C2J_at; Start 10; Stop 34
atattgtatcatagcaatgtaaaaa

SEQ ID NO: 101565 - DNA, 25 bp, Artificial
  probe
  misc_feature (1)..(25): SEQ ID NO: 7699; WAN024C2J_at; Start 19; Stop 43
catagcaatgtaaaaagtaaaaaag

SEQ ID NO: 101566 - DNA, 25 bp, Artificial
  probe
  misc_feature (1)..(25): SEQ ID NO: 7699; WAN024C2J_at; Start 18; Stop 42
tcatagcaatgtaaaaagtaaaaaa

SEQ ID NO: 101567 - DNA, 25 bp, Artificial
  probe
  misc_feature (1)..(25): SEQ ID NO: 7699; WAN024C2J_at; Start 15; Stop 39
gtatcatagcaatgtaaaaagtaaa

SEQ ID NO: 101568 - DNA, 25 bp, Artificial
  probe
  misc_feature (1)..(25): SEQ ID NO: 7699; WAN024C2J_at; Start 2; Stop 26
tgttaaaaatattgtatcatagcaa

SEQ ID NO: 101569 - DNA, 25 bp, Artificial
  probe
  misc_feature (1)..(25): SEQ ID NO: 7699; WAN024C2J_at; Start 17; Stop 41
atcatagcaatgtaaaaagtaaaaa

SEQ ID NO: 101570 - DNA, 25 bp, Artificial
  probe
  misc_feature (1)..(25): SEQ ID NO: 7699; WAN024C2J_at; Start 12; Stop 36
attgtatcatagcaatgtaaaaagt

SEQ ID NO: 101571 - DNA, 25 bp, Artificial
  probe
  misc_feature (1)..(25): SEQ ID NO: 7699; WAN024C2J_at; Start 6; Stop 30
aaaaatattgtatcatagcaatgta

SEQ ID NO: 101572 - DNA, 25 bp, Artificial
  probe
  misc_feature (1)..(25): SEQ ID NO: 7699; WAN024C2J_at; Start 11; Stop 35
tattgtatcatagcaatgtaaaaag

SEQ ID NO: 101573 - DNA, 25 bp, Artificial
  probe
  misc_feature (1)..(25): SEQ ID NO: 7699; WAN024C2J_at; Start 3; Stop 27
gttaaaaatattgtatcatagcaat

SEQ ID NO: 101574 - DNA, 25 bp, Artificial
  probe
  misc_feature (1)..(25): SEQ ID NO: 6739; WAN024C2K_at; Start 103; Stop 127
gctgttagagaatacgttcctaaaa

SEQ ID NO: 101575 - DNA, 25 bp, Artificial
  probe
  misc_feature (1)..(25): SEQ ID NO: 6739; WAN024C2K_at; Start 178; Stop 202
tcgttaaaacagagcaataattggg

SEQ ID NO: 101576 - DNA, 25 bp, Artificial
  probe
  misc_feature (1)..(25): SEQ ID NO: 6739; WAN024C2K_at; Start 232; Stop 256
gatgtattaatcttactgtctgaac

SEQ ID NO: 101577 - DNA, 25 bp, Artificial
  probe
  misc_feature (1)..(25): SEQ ID NO: 6739; WAN024C2K_at; Start 296; Stop 320
tacatagggcattttgtgtacgcct

SEQ ID NO: 101578 - DNA, 25 bp, Artificial
  probe
  misc_feature (1)..(25): SEQ ID NO: 6739; WAN024C2K_at; Start 247; Stop 271
ctgtctgaactacaaaattttttct

SEQ ID NO: 101579 - DNA, 25 bp, Artificial
  probe
  misc_feature (1)..(25): SEQ ID NO: 6739; WAN024C2K_at; Start 65; Stop 89
taggctatgaagtaagctattccag

SEQ ID NO: 101580 - DNA, 25 bp, Artificial
  probe
  misc_feature (1)..(25): SEQ ID NO: 6739; WAN024C2K_at; Start 86; Stop 110
ccagtattgttagtcaagctgttag

SEQ ID NO: 101581 - DNA, 25 bp, Artificial
  probe
  misc_feature (1)..(25): SEQ ID NO: 6739; WAN024C2K_at; Start 1; Stop 25
atgcgtttagcgtctgaatccagac

SEQ ID NO: 101582 - DNA, 25 bp, Artificial
  probe
  misc_feature (1)..(25): SEQ ID NO: 6739; WAN024C2K_at; Start 188; Stop 212
agagcaataattgggagtaccagac

SEQ ID NO: 101583 - DNA, 25 bp, Artificial
  probe
  misc_feature (1)..(25): SEQ ID NO: 6739; WAN024C2K_at; Start 199; Stop 223
tgggagtaccagacatcacttatgt

SEQ ID NO: 101584 - DNA, 25 bp, Artificial
  probe
  misc_feature (1)..(25): SEQ ID NO: 6739; WAN024C2K_at; Start 314; Stop 338
tacgcctatgcttgaaagcacaatt

SEQ ID NO: 101585 - DNA, 25 bp, Artificial
  probe
  misc_feature (1)..(25): SEQ ID NO: 6739; WAN024C2K_at; Start 208; Stop 232
cagacatcacttatgttagaggaag

SEQ ID NO: 101586 - DNA, 25 bp, Artificial
  probe
  misc_feature (1)..(25): SEQ ID NO: 6739; WAN024C2K_at; Start 34; Stop 58
gataagcttaaagatgatgtttaca

SEQ ID NO: 101587 - DNA, 25 bp, Artificial
  probe
  misc_feature (1)..(25): SEQ ID NO: 6739; WAN024C2K_at; Start 300; Stop 324
tagggcattttgtgtacgcctatgc

SEQ ID NO: 101588 - DNA, 25 bp, Artificial
  probe
  misc_feature (1)..(25): SEQ ID NO: 6739; WAN024C2K_at; Start 192; Stop 216
caataattgggagtaccagacatca

SEQ ID NO: 101589 - DNA, 25 bp, Artificial
  probe
  misc_feature (1)..(25): SEQ ID NO: 6739; WAN024C2K_at; Start 274; Stop 298
gatgtcttccaagcgaaacgtatac

SEQ ID NO: 101590 - DNA, 25 bp, Artificial
  probe
  misc_feature (1)..(25): SEQ ID NO: 6739; WAN024C2K_at; Start 286; Stop 310
gcgaaacgtatacatagggcatttt

SEQ ID NO: 101591 - DNA, 25 bp, Artificial
  probe
  misc_feature (1)..(25): SEQ ID NO: 6739; WAN024C2K_at; Start 239; Stop 263
taatcttactgtctgaactacaaaa

SEQ ID NO: 101592 - DNA, 25 bp, Artificial
  probe
  misc_feature (1)..(25): SEQ ID NO: 6739; WAN024C2K_at; Start 122; Stop 146
ctaaaaaagaacgtatagattggat

SEQ ID NO: 101593 - DNA, 25 bp, Artificial
  probe
  misc_feature (1)..(25): SEQ ID NO: 6739; WAN024C2K_at; Start 98; Stop 122
gtcaagctgttagagaatacgttcc

SEQ ID NO: 101594 - DNA, 25 bp, Artificial
  probe
  misc_feature (1)..(25): SEQ ID NO: 6739; WAN024C2K_at; Start 169; Stop 193
cccttttcatcgttaaaacagagca

SEQ ID NO: 101595 - DNA, 25 bp, Artificial
  probe
  misc_feature (1)..(25): SEQ ID NO: 6739; WAN024C2K_at; Start 57; Stop 81
caataaattaggctatgaagtaagc

SEQ ID NO: 101596 - DNA, 25 bp, Artificial
  probe
  misc_feature (1)..(25): SEQ ID NO: 6739; WAN024C2K_at; Start 323; Stop 347
gcttgaaagcacaatttttattaag

SEQ ID NO: 101597 - DNA, 25 bp, Artificial
  probe
  misc_feature (1)..(25): SEQ ID NO: 6739; WAN024C2K_at; Start 281; Stop 305
tccaagcgaaacgtatacatagggc

SEQ ID NO: 101598 - DNA, 25 bp, Artificial
  probe
  misc_feature (1)..(25): SEQ ID NO: 6739; WAN024C2K_at; Start 130; Stop 154
gaacgtatagattggataaaattaa

SEQ ID NO: 101599 - DNA, 25 bp, Artificial
  probe
  misc_feature (1)..(25): SEQ ID NO: 6739; WAN024C2K_at; Start 146; Stop 170
taaaattaaaagagacagctatacc

SEQ ID NO: 101600 - DNA, 25 bp, Artificial
  probe
  misc_feature (1)..(25): SEQ ID NO: 6739; WAN024C2K_at; Start 215; Stop 239
cacttatgttagaggaagatgtatt

SEQ ID NO: 101601 - DNA, 25 bp, Artificial
  probe
  misc_feature (1)..(25): SEQ ID NO: 6739; WAN024C2K_at; Start 310; Stop 334
tgtgtacgcctatgcttgaaagcac

SEQ ID NO: 101602 - DNA, 25 bp, Artificial
  probe
  misc_feature (1)..(25): SEQ ID NO: 6739; WAN024C2K_at; Start 157; Stop 181
gagacagctatacccttttcatcgt

SEQ ID NO: 101603 - DNA, 25 bp, Artificial
  probe
  misc_feature (1)..(25): SEQ ID NO: 6739; WAN024C2K_at; Start 46; Stop 70
gatgatgtttacaataaattaggct

SEQ ID NO: 101604 - DNA, 25 bp, Artificial
  probe
  misc_feature (1)..(25): SEQ ID NO: 6739; WAN024C2K_at; Start 269; Stop 293
tcttagatgtcttccaagcgaaacg

SEQ ID NO: 101605 - DNA, 25 bp, Artificial
  probe
  misc_feature (1)..(25): SEQ ID NO: 6739; WAN024C2K_at; Start 20; Stop 44
ccagacagatattagataagcttaa

SEQ ID NO: 101606 - DNA, 25 bp, Artificial
  probe
  misc_feature (1)..(25): SEQ ID NO: 6739; WAN024C2K_at; Start 80; Stop 104
gctattccagtattgttagtcaagc

SEQ ID NO: 101607 - DNA, 25 bp, Artificial
  probe
  misc_feature (1)..(25): SEQ ID NO: 6739; WAN024C2K_at; Start 10; Stop 34
gcgtctgaatccagacagatattag

SEQ ID NO: 101608 - DNA, 25 bp, Artificial
  probe
  misc_feature (1)..(25): SEQ ID NO: 6605; WAN024C2L_at; Start 18; Stop 42
ggcttgcaccatcaaatccatctct

SEQ ID NO: 101609 - DNA, 25 bp, Artificial
  probe
  misc_feature (1)..(25): SEQ ID NO: 6605; WAN024C2L_at; Start 92; Stop 116
tgcgttccatcttgaccatcagtta

SEQ ID NO: 101610 - DNA, 25 bp, Artificial
  probe
  misc_feature (1)..(25): SEQ ID NO: 6605; WAN024C2L_at; Start 2; Stop 26
tgagtagaaacaagagggcttgcac

SEQ ID NO: 101611 - DNA, 25 bp, Artificial
  probe
  misc_feature (1)..(25): SEQ ID NO: 6605; WAN024C2L_at; Start 59; Stop 83
ataccacctttaccatcgttaattg

SEQ ID NO: 101612 - DNA, 25 bp, Artificial
  probe
  misc_feature (1)..(25): SEQ ID NO: 6605; WAN024C2L_at; Start 32; Stop 56
aatccatctcttactactgtagtag

SEQ ID NO: 101613 - DNA, 25 bp, Artificial
  probe
  misc_feature (1)..(25): SEQ ID NO: 6605; WAN024C2L_at; Start 167; Stop 191
tcacgcccttgaagaccttgttcac

SEQ ID NO: 101614 - DNA, 25 bp, Artificial
  probe
  misc_feature (1)..(25): SEQ ID NO: 6605; WAN024C2L_at; Start 99; Stop 123
catcttgaccatcagttactttaac

SEQ ID NO: 101615 - DNA, 25 bp, Artificial
  probe
  misc_feature (1)..(25): SEQ ID NO: 6605; WAN024C2L_at; Start 212; Stop 236
ttagcaccatctgcaattacaactt

SEQ ID NO: 101616 - DNA, 25 bp, Artificial
  probe
  misc_feature (1)..(25): SEQ ID NO: 6605; WAN024C2L_at; Start 9; Stop 33
aaacaagagggcttgcaccatcaaa

SEQ ID NO: 101617 - DNA, 25 bp, Artificial
  probe
  misc_feature (1)..(25): SEQ ID NO: 6605; WAN024C2L_at; Start 176; Stop 200
tgaagaccttgttcacctttgtccc

SEQ ID NO: 101618 - DNA, 25 bp, Artificial
  probe
  misc_feature (1)..(25): SEQ ID NO: 6605; WAN024C2L_at; Start 85; Stop 109
aattgtatgcgttccatcttgacca

SEQ ID NO: 101619 - DNA, 25 bp, Artificial
  probe
  misc_feature (1)..(25): SEQ ID NO: 6605; WAN024C2L_at; Start 156; Stop 180
cttgttcaccatcacgcccttgaag

SEQ ID NO: 101620 - DNA, 25 bp, Artificial
  probe
  misc_feature (1)..(25): SEQ ID NO: 6605; WAN024C2L_at; Start 89; Stop 113
gtatgcgttccatcttgaccatcag

SEQ ID NO: 101621 - DNA, 25 bp, Artificial
  probe
  misc_feature (1)..(25): SEQ ID NO: 6605; WAN024C2L_at; Start 71; Stop 95
ccatcgttaattgtaattgtatgcg

SEQ ID NO: 101622 - DNA, 25 bp, Artificial
  probe
  misc_feature (1)..(25): SEQ ID NO: 6605; WAN024C2L_at; Start 148; Stop 172
ttttggtccttgttcaccatcacgc

SEQ ID NO: 101623 - DNA, 25 bp, Artificial
  probe
  misc_feature (1)..(25): SEQ ID NO: 6605; WAN024C2L_at; Start 75; Stop 99
cgttaattgtaattgtatgcgttcc

SEQ ID NO: 101624 - DNA, 25 bp, Artificial
  probe
  misc_feature (1)..(25): SEQ ID NO: 6605; WAN024C2L_at; Start 12; Stop 36
caagagggcttgcaccatcaaatcc

SEQ ID NO: 101625 - DNA, 25 bp, Artificial
  probe
  misc_feature (1)..(25): SEQ ID NO: 6605; WAN024C2L_at; Start 49; Stop 73
tgtagtagttataccacctttacca

SEQ ID NO: 101626 - DNA, 25 bp, Artificial
  probe
  misc_feature (1)..(25): SEQ ID NO: 6605; WAN024C2L_at; Start 52; Stop 76
agtagttataccacctttaccatcg

SEQ ID NO: 101627 - DNA, 25 bp, Artificial
  probe
  misc_feature (1)..(25): SEQ ID NO: 6605; WAN024C2L_at; Start 78; Stop 102
taattgtaattgtatgcgttccatc

SEQ ID NO: 101628 - DNA, 25 bp, Artificial
  probe
  misc_feature (1)..(25): SEQ ID NO: 6605; WAN024C2L_at; Start 172; Stop 196
cccttgaagaccttgttcacctttg

SEQ ID NO: 101629 - DNA, 25 bp, Artificial
  probe
  misc_feature (1)..(25): SEQ ID NO: 6605; WAN024C2L_at; Start 170; Stop 194
cgcccttgaagaccttgttcacctt

SEQ ID NO: 101630 - DNA, 25 bp, Artificial
  probe
  misc_feature (1)..(25): SEQ ID NO: 6605; WAN024C2L_at; Start 164; Stop 188
ccatcacgcccttgaagaccttgtt

SEQ ID NO: 101631 - DNA, 25 bp, Artificial
  probe
  misc_feature (1)..(25): SEQ ID NO: 6605; WAN024C2L_at; Start 219; Stop 243
catctgcaattacaacttcttttaa

SEQ ID NO: 101632 - DNA, 25 bp, Artificial
  probe
  misc_feature (1)..(25): SEQ ID NO: 6605; WAN024C2L_at; Start 215; Stop 239
gcaccatctgcaattacaacttctt

SEQ ID NO: 101633 - DNA, 25 bp, Artificial
  probe
  misc_feature (1)..(25): SEQ ID NO: 6605; WAN024C2L_at; Start 105; Stop 129
gaccatcagttactttaactgttgg

SEQ ID NO: 101634 - DNA, 25 bp, Artificial
  probe
  misc_feature (1)..(25): SEQ ID NO: 6605; WAN024C2L_at; Start 13; Stop 37
aagagggcttgcaccatcaaatcca

SEQ ID NO: 101635 - DNA, 25 bp, Artificial
  probe
  misc_feature (1)..(25): SEQ ID NO: 6605; WAN024C2L_at; Start 94; Stop 118
cgttccatcttgaccatcagttact

SEQ ID NO: 101636 - DNA, 25 bp, Artificial
  probe
  misc_feature (1)..(25): SEQ ID NO: 6605; WAN024C2L_at; Start 15; Stop 39
gagggcttgcaccatcaaatccatc

SEQ ID NO: 101637 - DNA, 25 bp, Artificial
  probe
  misc_feature (1)..(25): SEQ ID NO: 6605; WAN024C2L_at; Start 43; Stop 67
tactactgtagtagttataccacct

SEQ ID NO: 101638 - DNA, 25 bp, Artificial
  probe
  misc_feature (1)..(25): SEQ ID NO: 6605; WAN024C2L_at; Start 22; Stop 46
tgcaccatcaaatccatctcttact

SEQ ID NO: 101639 - DNA, 25 bp, Artificial
  probe
  misc_feature (1)..(25): SEQ ID NO: 6605; WAN024C2L_at; Start 158; Stop 182
tgttcaccatcacgcccttgaagac

SEQ ID NO: 101640 - DNA, 25 bp, Artificial
  probe
  misc_feature (1)..(25): SEQ ID NO: 6605; WAN024C2L_at; Start 29; Stop 53
tcaaatccatctcttactactgtag

SEQ ID NO: 101641 - DNA, 25 bp, Artificial
  probe
  misc_feature (1)..(25): SEQ ID NO: 6605; WAN024C2L_at; Start 5; Stop 29
gtagaaacaagagggcttgcaccat

SEQ ID NO: 101642 - DNA, 25 bp, Artificial
  probe
  misc_feature (1)..(25): SEQ ID NO: 7459; WAN024C2M_at; Start 36; Stop 60
aacgattgttgttaatgatggtctg

SEQ ID NO: 101643 - DNA, 25 bp, Artificial
  probe
  misc_feature (1)..(25): SEQ ID NO: 7459; WAN024C2M_at; Start 111; Stop 135
aactgttacttctggtgtgaatcca

SEQ ID NO: 101644 - DNA, 25 bp, Artificial
  probe
  misc_feature (1)..(25): SEQ ID NO: 7459; WAN024C2M_at; Start 166; Stop 190
ggtccttgttttccatctgcgataa

SEQ ID NO: 101645 - DNA, 25 bp, Artificial
  probe
  misc_feature (1)..(25): SEQ ID NO: 7459; WAN024C2M_at; Start 106; Stop 130
tctgtaactgttacttctggtgtga

SEQ ID NO: 101646 - DNA, 25 bp, Artificial
  probe
  misc_feature (1)..(25): SEQ ID NO: 7459; WAN024C2M_at; Start 49; Stop 73
aatgatggtctgttgtctggttgtg

SEQ ID NO: 101647 - DNA, 25 bp, Artificial
  probe
  misc_feature (1)..(25): SEQ ID NO: 7459; WAN024C2M_at; Start 172; Stop 196
tgttttccatctgcgataacaactt

SEQ ID NO: 101648 - DNA, 25 bp, Artificial
  probe
  misc_feature (1)..(25): SEQ ID NO: 7459; WAN024C2M_at; Start 45; Stop 69
tgttaatgatggtctgttgtctggt

SEQ ID NO: 101649 - DNA, 25 bp, Artificial
  probe
  misc_feature (1)..(25): SEQ ID NO: 7459; WAN024C2M_at; Start 110; Stop 134
taactgttacttctggtgtgaatcc

SEQ ID NO: 101650 - DNA, 25 bp, Artificial
  probe
  misc_feature (1)..(25): SEQ ID NO: 7459; WAN024C2M_at; Start 177; Stop 201
tccatctgcgataacaacttcttta

SEQ ID NO: 101651 - DNA, 25 bp, Artificial
  probe
  misc_feature (1)..(25): SEQ ID NO: 7459; WAN024C2M_at; Start 81; Stop 105
gatggtgtgtgttccgttattgtta

SEQ ID NO: 101652 - DNA, 25 bp, Artificial
  probe
  misc_feature (1)..(25): SEQ ID NO: 7459; WAN024C2M_at; Start 120; Stop 144
ttctggtgtgaatccatcttttccg

SEQ ID NO: 101653 - DNA, 25 bp, Artificial
  probe
  misc_feature (1)..(25): SEQ ID NO: 7459; WAN024C2M_at; Start 181; Stop 205
tctgcgataacaacttctttaagtt

SEQ ID NO: 101654 - DNA, 25 bp, Artificial
  probe
  misc_feature (1)..(25): SEQ ID NO: 7459; WAN024C2M_at; Start 203; Stop 227
gttttgtatctccttcatcaaattg

SEQ ID NO: 101655 - DNA, 25 bp, Artificial
  probe
  misc_feature (1)..(25): SEQ ID NO: 7459; WAN024C2M_at; Start 162; Stop 186
ttttggtccttgttttccatctgcg

SEQ ID NO: 101656 - DNA, 25 bp, Artificial
  probe
  misc_feature (1)..(25): SEQ ID NO: 7459; WAN024C2M_at; Start 78; Stop 102
tgtgatggtgtgtgttccgttattg

SEQ ID NO: 101657 - DNA, 25 bp, Artificial
  probe
  misc_feature (1)..(25): SEQ ID NO: 7459; WAN024C2M_at; Start 117; Stop 141
tacttctggtgtgaatccatctttt

SEQ ID NO: 101658 - DNA, 25 bp, Artificial
  probe
  misc_feature (1)..(25): SEQ ID NO: 7459; WAN024C2M_at; Start 54; Stop 78
tggtctgttgtctggttgtgtgatt

SEQ ID NO: 101659 - DNA, 25 bp, Artificial
  probe
  misc_feature (1)..(25): SEQ ID NO: 7459; WAN024C2M_at; Start 175; Stop 199
tttccatctgcgataacaacttctt

SEQ ID NO: 101660 - DNA, 25 bp, Artificial
  probe
  misc_feature (1)..(25): SEQ ID NO: 7459; WAN024C2M_at; Start 3; Stop 27
gacttttggtgtttttccatcttca

SEQ ID NO: 101661 - DNA, 25 bp, Artificial
  probe
  misc_feature (1)..(25): SEQ ID NO: 7459; WAN024C2M_at; Start 132; Stop 156
tccatcttttccgttatcacctttg

SEQ ID NO: 101662 - DNA, 25 bp, Artificial
  probe
  misc_feature (1)..(25): SEQ ID NO: 7459; WAN024C2M_at; Start 19; Stop 43
ccatcttcaccgtttttaacgattg

SEQ ID NO: 101663 - DNA, 25 bp, Artificial
  probe
  misc_feature (1)..(25): SEQ ID NO: 7459; WAN024C2M_at; Start 179; Stop 203
catctgcgataacaacttctttaag

SEQ ID NO: 101664 - DNA, 25 bp, Artificial
  probe
  misc_feature (1)..(25): SEQ ID NO: 7459; WAN024C2M_at; Start 88; Stop 112
tgtgttccgttattgttatctgtaa

SEQ ID NO: 101665 - DNA, 25 bp, Artificial
  probe
  misc_feature (1)..(25): SEQ ID NO: 7459; WAN024C2M_at; Start 129; Stop 153
gaatccatcttttccgttatcacct

SEQ ID NO: 101666 - DNA, 25 bp, Artificial
  probe
  misc_feature (1)..(25): SEQ ID NO: 7459; WAN024C2M_at; Start 200; Stop 224
taagttttgtatctccttcatcaaa

SEQ ID NO: 101667 - DNA, 25 bp, Artificial
  probe
  misc_feature (1)..(25): SEQ ID NO: 7459; WAN024C2M_at; Start 58; Stop 82
ctgttgtctggttgtgtgattgtga

SEQ ID NO: 101668 - DNA, 25 bp, Artificial
  probe
  misc_feature (1)..(25): SEQ ID NO: 7459; WAN024C2M_at; Start 85; Stop 109
gtgtgtgttccgttattgttatctg

SEQ ID NO: 101669 - DNA, 25 bp, Artificial
  probe
  misc_feature (1)..(25): SEQ ID NO: 7459; WAN024C2M_at; Start 126; Stop 150
tgtgaatccatcttttccgttatca

SEQ ID NO: 101670 - DNA, 25 bp, Artificial
  probe
  misc_feature (1)..(25): SEQ ID NO: 7459; WAN024C2M_at; Start 123; Stop 147
tggtgtgaatccatcttttccgtta

SEQ ID NO: 101671 - DNA, 25 bp, Artificial
  probe
  misc_feature (1)..(25): SEQ ID NO: 7459; WAN024C2M_at; Start 136; Stop 160
tcttttccgttatcacctttgtcac

SEQ ID NO: 101672 - DNA, 25 bp, Artificial
  probe
  misc_feature (1)..(25): SEQ ID NO: 7459; WAN024C2M_at; Start 75; Stop 99
gattgtgatggtgtgtgttccgtta

SEQ ID NO: 101673 - DNA, 25 bp, Artificial
  probe
  misc_feature (1)..(25): SEQ ID NO: 7459; WAN024C2M_at; Start 94; Stop 118
ccgttattgttatctgtaactgtta

SEQ ID NO: 101674 - DNA, 25 bp, Artificial
  probe
  misc_feature (1)..(25): SEQ ID NO: 7459; WAN024C2M_at; Start 114; Stop 138
tgttacttctggtgtgaatccatct

SEQ ID NO: 101675 - DNA, 25 bp, Artificial
  probe
  misc_feature (1)..(25): SEQ ID NO: 7459; WAN024C2M_at; Start 168; Stop 192
tccttgttttccatctgcgataaca

SEQ ID NO: 101676 - DNA, 25 bp, Artificial
  probe
  misc_feature (1)..(25): SEQ ID NO: 7280; WAN024C2N_at; Start 55; Stop 79
ttttgtccatcctctacaaatgttg

SEQ ID NO: 101677 - DNA, 25 bp, Artificial
  probe
  misc_feature (1)..(25): SEQ ID NO: 7280; WAN024C2N_at; Start 71; Stop 95
caaatgttgtttgtggacgaccttc

SEQ ID NO: 101678 - DNA, 25 bp, Artificial
  probe
  misc_feature (1)..(25): SEQ ID NO: 7280; WAN024C2N_at; Start 96; Stop 120
tactggtgtaattgttactaataca

SEQ ID NO: 101679 - DNA, 25 bp, Artificial
  probe
  misc_feature (1)..(25): SEQ ID NO: 7280; WAN024C2N_at; Start 35; Stop 59
gagttttcccatcagcacccttttg

SEQ ID NO: 101680 - DNA, 25 bp, Artificial
  probe
  misc_feature (1)..(25): SEQ ID NO: 7280; WAN024C2N_at; Start 196; Stop 220
tgtggtcccgctggtcctctttgtc

SEQ ID NO: 101681 - DNA, 25 bp, Artificial
  probe
  misc_feature (1)..(25): SEQ ID NO: 7280; WAN024C2N_at; Start 208; Stop 232
ggtcctctttgtccatctgctcctt

SEQ ID NO: 101682 - DNA, 25 bp, Artificial
  probe
  misc_feature (1)..(25): SEQ ID NO: 7280; WAN024C2N_at; Start 11; Stop 35
gcccctcagttattgttactgttgg

SEQ ID NO: 101683 - DNA, 25 bp, Artificial
  probe
  misc_feature (1)..(25): SEQ ID NO: 7280; WAN024C2N_at; Start 85; Stop 109
ggacgaccttctactggtgtaattg

SEQ ID NO: 101684 - DNA, 25 bp, Artificial
  probe
  misc_feature (1)..(25): SEQ ID NO: 7280; WAN024C2N_at; Start 205; Stop 229
gctggtcctctttgtccatctgctc

SEQ ID NO: 101685 - DNA, 25 bp, Artificial
  probe
  misc_feature (1)..(25): SEQ ID NO: 7280; WAN024C2N_at; Start 30; Stop 54
tgttggagttttcccatcagcaccc

SEQ ID NO: 101686 - DNA, 25 bp, Artificial
  probe
  misc_feature (1)..(25): SEQ ID NO: 7280; WAN024C2N_at; Start 1; Stop 25
gtgccgttttgcccctcagttattg

SEQ ID NO: 101687 - DNA, 25 bp, Artificial
  probe
  misc_feature (1)..(25): SEQ ID NO: 7280; WAN024C2N_at; Start 77; Stop 101
ttgtttgtggacgaccttctactgg

SEQ ID NO: 101688 - DNA, 25 bp, Artificial
  probe
  misc_feature (1)..(25): SEQ ID NO: 7280; WAN024C2N_at; Start 68; Stop 92
ctacaaatgttgtttgtggacgacc

SEQ ID NO: 101689 - DNA, 25 bp, Artificial
  probe
  misc_feature (1)..(25): SEQ ID NO: 7280; WAN024C2N_at; Start 79; Stop 103
gtttgtggacgaccttctactggtg

SEQ ID NO: 101690 - DNA, 25 bp, Artificial
  probe
  misc_feature (1)..(25): SEQ ID NO: 7280; WAN024C2N_at; Start 133; Stop 157
gcaattagagattttccatctttac

SEQ ID NO: 101691 - DNA, 25 bp, Artificial
  probe
  misc_feature (1)..(25): SEQ ID NO: 7280; WAN024C2N_at; Start 189; Stop 213
tggtccttgtggtcccgctggtcct

SEQ ID NO: 101692 - DNA, 25 bp, Artificial
  probe
  misc_feature (1)..(25): SEQ ID NO: 7280; WAN024C2N_at; Start 82; Stop 106
tgtggacgaccttctactggtgtaa

SEQ ID NO: 101693 - DNA, 25 bp, Artificial
  probe
  misc_feature (1)..(25): SEQ ID NO: 7280; WAN024C2N_at; Start 161; Stop 185
gagttcctggattaccttgttctcc

SEQ ID NO: 101694 - DNA, 25 bp, Artificial
  probe
  misc_feature (1)..(25): SEQ ID NO: 7280; WAN024C2N_at; Start 151; Stop 175
tctttacctggagttcctggattac

SEQ ID NO: 101695 - DNA, 25 bp, Artificial
  probe
  misc_feature (1)..(25): SEQ ID NO: 7280; WAN024C2N_at; Start 111; Stop 135
tactaatacaccatttttaacagca

SEQ ID NO: 101696 - DNA, 25 bp, Artificial
  probe
  misc_feature (1)..(25): SEQ ID NO: 7280; WAN024C2N_at; Start 148; Stop 172
ccatctttacctggagttcctggat

SEQ ID NO: 101697 - DNA, 25 bp, Artificial
  probe
  misc_feature (1)..(25): SEQ ID NO: 7280; WAN024C2N_at; Start 217; Stop 241
tgtccatctgctccttttggtcctt

SEQ ID NO: 101698 - DNA, 25 bp, Artificial
  probe
  misc_feature (1)..(25): SEQ ID NO: 7280; WAN024C2N_at; Start 155; Stop 179
tacctggagttcctggattaccttg

SEQ ID NO: 101699 - DNA, 25 bp, Artificial
  probe
  misc_feature (1)..(25): SEQ ID NO: 7280; WAN024C2N_at; Start 187; Stop 211
tttggtccttgtggtcccgctggtc

SEQ ID NO: 101700 - DNA, 25 bp, Artificial
  probe
  misc_feature (1)..(25): SEQ ID NO: 7280; WAN024C2N_at; Start 199; Stop 223
ggtcccgctggtcctctttgtccat

SEQ ID NO: 101701 - DNA, 25 bp, Artificial
  probe
  misc_feature (1)..(25): SEQ ID NO: 7280; WAN024C2N_at; Start 119; Stop 143
caccatttttaacagcaattagaga

SEQ ID NO: 101702 - DNA, 25 bp, Artificial
  probe
  misc_feature (1)..(25): SEQ ID NO: 7280; WAN024C2N_at; Start 167; Stop 191
ctggattaccttgttctccttttgg

SEQ ID NO: 101703 - DNA, 25 bp, Artificial
  probe
  misc_feature (1)..(25): SEQ ID NO: 7280; WAN024C2N_at; Start 91; Stop 115
ccttctactggtgtaattgttacta

SEQ ID NO: 101704 - DNA, 25 bp, Artificial
  probe
  misc_feature (1)..(25): SEQ ID NO: 7280; WAN024C2N_at; Start 213; Stop 237
tctttgtccatctgctccttttggt

SEQ ID NO: 101705 - DNA, 25 bp, Artificial
  probe
  misc_feature (1)..(25): SEQ ID NO: 7280; WAN024C2N_at; Start 128; Stop 152
taacagcaattagagattttccatc

SEQ ID NO: 101706 - DNA, 25 bp, Artificial
  probe
  misc_feature (1)..(25): SEQ ID NO: 7280; WAN024C2N_at; Start 21; Stop 45
tattgttactgttggagttttccca

SEQ ID NO: 101707 - DNA, 25 bp, Artificial
  probe
  misc_feature (1)..(25): SEQ ID NO: 7280; WAN024C2N_at; Start 59; Stop 83
gtccatcctctacaaatgttgtttg

SEQ ID NO: 101708 - DNA, 25 bp, Artificial
  probe
  misc_feature (1)..(25): SEQ ID NO: 7280; WAN024C2N_at; Start 27; Stop 51
tactgttggagttttcccatcagca

SEQ ID NO: 101709 - DNA, 25 bp, Artificial
  probe
  misc_feature (1)..(25): SEQ ID NO: 7280; WAN024C2N_at; Start 184; Stop 208
ccttttggtccttgtggtcccgctg

SEQ ID NO: 101710 - DNA, 25 bp, Artificial
  probe
  misc_feature (1)..(25): SEQ ID NO: 6564; WAN024C2O_at; Start 11; Stop 35
tctccattatcacgaacagatgcgg

SEQ ID NO: 101711 - DNA, 25 bp, Artificial
  probe
  misc_feature (1)..(25): SEQ ID NO: 6564; WAN024C2O_at; Start 31; Stop 55
tgcggttggagtacgtccgtcaaca

SEQ ID NO: 101712 - DNA, 25 bp, Artificial
  probe
  misc_feature (1)..(25): SEQ ID NO: 6564; WAN024C2O_at; Start 87; Stop 111
tcttagttccgtctgggttagtgat

SEQ ID NO: 101713 - DNA, 25 bp, Artificial
  probe
  misc_feature (1)..(25): SEQ ID NO: 6564; WAN024C2O_at; Start 52; Stop 76
aacaccgtcacgtccattcttaaca

SEQ ID NO: 101714 - DNA, 25 bp, Artificial
  probe
  misc_feature (1)..(25): SEQ ID NO: 6564; WAN024C2O_at; Start 122; Stop 146
tggcttccatctggattttcagtag

SEQ ID NO: 101715 - DNA, 25 bp, Artificial
  probe
  misc_feature (1)..(25): SEQ ID NO: 6564; WAN024C2O_at; Start 234; Stop 258
gagttccatcgttgttatccgttac

SEQ ID NO: 101716 - DNA, 25 bp, Artificial
  probe
  misc_feature (1)..(25): SEQ ID NO: 6564; WAN024C2O_at; Start 161; Stop 185
gctttaccgtctttaccatctttga

SEQ ID NO: 101717 - DNA, 25 bp, Artificial
  probe
  misc_feature (1)..(25): SEQ ID NO: 6564; WAN024C2O_at; Start 165; Stop 189
taccgtctttaccatctttgatgat

SEQ ID NO: 101718 - DNA, 25 bp, Artificial
  probe
  misc_feature (1)..(25): SEQ ID NO: 6564; WAN024C2O_at; Start 105; Stop 129
tagtgattgttactgtgtggcttcc

SEQ ID NO: 101719 - DNA, 25 bp, Artificial
  probe
  misc_feature (1)..(25): SEQ ID NO: 6564; WAN024C2O_at; Start 129; Stop 153
catctggattttcagtagttgttgc

SEQ ID NO: 101720 - DNA, 25 bp, Artificial
  probe
  misc_feature (1)..(25): SEQ ID NO: 6564; WAN024C2O_at; Start 189; Stop 213
tagcgttggtaacattgccgtctcc

SEQ ID NO: 101721 - DNA, 25 bp, Artificial
  probe
  misc_feature (1)..(25): SEQ ID NO: 6564; WAN024C2O_at; Start 79; Stop 103
aaactcattcttagttccgtctggg

SEQ ID NO: 101722 - DNA, 25 bp, Artificial
  probe
  misc_feature (1)..(25): SEQ ID NO: 6564; WAN024C2O_at; Start 40; Stop 64
agtacgtccgtcaacaccgtcacgt

SEQ ID NO: 101723 - DNA, 25 bp, Artificial
  probe
  misc_feature (1)..(25): SEQ ID NO: 6564; WAN024C2O_at; Start 57; Stop 81
cgtcacgtccattcttaacaacaaa

SEQ ID NO: 101724 - DNA, 25 bp, Artificial
  probe
  misc_feature (1)..(25): SEQ ID NO: 6564; WAN024C2O_at; Start 230; Stop 254
gtatgagttccatcgttgttatccg

SEQ ID NO: 101725 - DNA, 25 bp, Artificial
  probe
  misc_feature (1)..(25): SEQ ID NO: 6564; WAN024C2O_at; Start 20; Stop 44
tcacgaacagatgcggttggagtac

SEQ ID NO: 101726 - DNA, 25 bp, Artificial
  probe
  misc_feature (1)..(25): SEQ ID NO: 6564; WAN024C2O_at; Start 155; Stop 179
gttgcagctttaccgtctttaccat

SEQ ID NO: 101727 - DNA, 25 bp, Artificial
  probe
  misc_feature (1)..(25): SEQ ID NO: 6564; WAN024C2O_at; Start 63; Stop 87
gtccattcttaacaacaaactcatt

SEQ ID NO: 101728 - DNA, 25 bp, Artificial
  probe
  misc_feature (1)..(25): SEQ ID NO: 6564; WAN024C2O_at; Start 138; Stop 162
tttcagtagttgttgctgttgcagc

SEQ ID NO: 101729 - DNA, 25 bp, Artificial
  probe
  misc_feature (1)..(25): SEQ ID NO: 6564; WAN024C2O_at; Start 15; Stop 39
cattatcacgaacagatgcggttgg

SEQ ID NO: 101730 - DNA, 25 bp, Artificial
  probe
  misc_feature (1)..(25): SEQ ID NO: 6564; WAN024C2O_at; Start 27; Stop 51
cagatgcggttggagtacgtccgtc

SEQ ID NO: 101731 - DNA, 25 bp, Artificial
  probe
  misc_feature (1)..(25): SEQ ID NO: 6564; WAN024C2O_at; Start 205; Stop 229
gccgtctccatctgtaactttaaca

SEQ ID NO: 101732 - DNA, 25 bp, Artificial
  probe
  misc_feature (1)..(25): SEQ ID NO: 6564; WAN024C2O_at; Start 184; Stop 208
gatgatagcgttggtaacattgccg

SEQ ID NO: 101733 - DNA, 25 bp, Artificial
  probe
  misc_feature (1)..(25): SEQ ID NO: 6564; WAN024C2O_at; Start 177; Stop 201
catctttgatgatagcgttggtaac

SEQ ID NO: 101734 - DNA, 25 bp, Artificial
  probe
  misc_feature (1)..(25): SEQ ID NO: 6564; WAN024C2O_at; Start 113; Stop 137
gttactgtgtggcttccatctggat

SEQ ID NO: 101735 - DNA, 25 bp, Artificial
  probe
  misc_feature (1)..(25): SEQ ID NO: 6564; WAN024C2O_at; Start 152; Stop 176
gctgttgcagctttaccgtctttac

SEQ ID NO: 101736 - DNA, 25 bp, Artificial
  probe
  misc_feature (1)..(25): SEQ ID NO: 6564; WAN024C2O_at; Start 2; Stop 26
tgacttccgtctccattatcacgaa

SEQ ID NO: 101737 - DNA, 25 bp, Artificial
  probe
  misc_feature (1)..(25): SEQ ID NO: 6564; WAN024C2O_at; Start 24; Stop 48
gaacagatgcggttggagtacgtcc

SEQ ID NO: 101738 - DNA, 25 bp, Artificial
  probe
  misc_feature (1)..(25): SEQ ID NO: 6564; WAN024C2O_at; Start 196; Stop 220
ggtaacattgccgtctccatctgta

SEQ ID NO: 101739 - DNA, 25 bp, Artificial
  probe
  misc_feature (1)..(25): SEQ ID NO: 6564; WAN024C2O_at; Start 239; Stop 263
ccatcgttgttatccgttacttcaa

SEQ ID NO: 101740 - DNA, 25 bp, Artificial
  probe
  misc_feature (1)..(25): SEQ ID NO: 6564; WAN024C2O_at; Start 83; Stop 107
tcattcttagttccgtctgggttag

SEQ ID NO: 101741 - DNA, 25 bp, Artificial
  probe
  misc_feature (1)..(25): SEQ ID NO: 6564; WAN024C2O_at; Start 37; Stop 61
tggagtacgtccgtcaacaccgtca

SEQ ID NO: 101742 - DNA, 25 bp, Artificial
  probe
  misc_feature (1)..(25): SEQ ID NO: 6564; WAN024C2O_at; Start 94; Stop 118
tccgtctgggttagtgattgttact

SEQ ID NO: 101743 - DNA, 25 bp, Artificial
  probe
  misc_feature (1)..(25): SEQ ID NO: 6564; WAN024C2O_at; Start 220; Stop 244
aactttaacagtatgagttccatcg

SEQ ID NO: 101744 - DNA, 25 bp, Artificial
  probe
  misc_feature (1)..(25): SEQ ID NO: 7533; WAN024C2P_at; Start 32; Stop 56
cagtgtacggtataacaaatatgga

SEQ ID NO: 101745 - DNA, 25 bp, Artificial
  probe
  misc_feature (1)..(25): SEQ ID NO: 7533; WAN024C2P_at; Start 104; Stop 128
tccttgaagaaaacctgataaatag

SEQ ID NO: 101746 - DNA, 25 bp, Artificial
  probe
  misc_feature (1)..(25): SEQ ID NO: 7533; WAN024C2P_at; Start 157; Stop 181
aatcagattttttgcttcccgaact

SEQ ID NO: 101747 - DNA, 25 bp, Artificial
  probe
  misc_feature (1)..(25): SEQ ID NO: 7533; WAN024C2P_at; Start 204; Stop 228
gctattaaaactgctgcagctgtta

SEQ ID NO: 101748 - DNA, 25 bp, Artificial
  probe
  misc_feature (1)..(25): SEQ ID NO: 7533; WAN024C2P_at; Start 96; Stop 120
tctccagttccttgaagaaaacctg

SEQ ID NO: 101749 - DNA, 25 bp, Artificial
  probe
  misc_feature (1)..(25): SEQ ID NO: 7533; WAN024C2P_at; Start 24; Stop 48
gccattaacagtgtacggtataaca

SEQ ID NO: 101750 - DNA, 25 bp, Artificial
  probe
  misc_feature (1)..(25): SEQ ID NO: 7533; WAN024C2P_at; Start 109; Stop 133
gaagaaaacctgataaatagaatac

SEQ ID NO: 101751 - DNA, 25 bp, Artificial
  probe
  misc_feature (1)..(25): SEQ ID NO: 7533; WAN024C2P_at; Start 186; Stop 210
gcaaccaatcctactacagctatta

SEQ ID NO: 101752 - DNA, 25 bp, Artificial
  probe
  misc_feature (1)..(25): SEQ ID NO: 7533; WAN024C2P_at; Start 99; Stop 123
ccagttccttgaagaaaacctgata

SEQ ID NO: 101753 - DNA, 25 bp, Artificial
  probe
  misc_feature (1)..(25): SEQ ID NO: 7533; WAN024C2P_at; Start 19; Stop 43
aatctgccattaacagtgtacggta

SEQ ID NO: 101754 - DNA, 25 bp, Artificial
  probe
  misc_feature (1)..(25): SEQ ID NO: 7533; WAN024C2P_at; Start 74; Stop 98
ttgccaaacgtaagggatacgatct

SEQ ID NO: 101755 - DNA, 25 bp, Artificial
  probe
  misc_feature (1)..(25): SEQ ID NO: 7533; WAN024C2P_at; Start 211; Stop 235
aaactgctgcagctgttaaagctaa

SEQ ID NO: 101756 - DNA, 25 bp, Artificial
  probe
  misc_feature (1)..(25): SEQ ID NO: 7533; WAN024C2P_at; Start 177; Stop 201
gaactacaagcaaccaatcctacta

SEQ ID NO: 101757 - DNA, 25 bp, Artificial
  probe
  misc_feature (1)..(25): SEQ ID NO: 7533; WAN024C2P_at; Start 160; Stop 184
cagattttttgcttcccgaactaca

SEQ ID NO: 101758 - DNA, 25 bp, Artificial
  probe
  misc_feature (1)..(25): SEQ ID NO: 7533; WAN024C2P_at; Start 200; Stop 224
tacagctattaaaactgctgcagct

SEQ ID NO: 101759 - DNA, 25 bp, Artificial
  probe
  misc_feature (1)..(25): SEQ ID NO: 7533; WAN024C2P_at; Start 35; Stop 59
tgtacggtataacaaatatggaact

SEQ ID NO: 101760 - DNA, 25 bp, Artificial
  probe
  misc_feature (1)..(25): SEQ ID NO: 7533; WAN024C2P_at; Start 54; Stop 78
ggaactaaaccatcaccattttgcc

SEQ ID NO: 101761 - DNA, 25 bp, Artificial
  probe
  misc_feature (1)..(25): SEQ ID NO: 7533; WAN024C2P_at; Start 138; Stop 162
tcttttccagactctgaaaaatcag

SEQ ID NO: 101762 - DNA, 25 bp, Artificial
  probe
  misc_feature (1)..(25): SEQ ID NO: 7533; WAN024C2P_at; Start 17; Stop 41
tgaatctgccattaacagtgtacgg

SEQ ID NO: 101763 - DNA, 25 bp, Artificial
  probe
  misc_feature (1)..(25): SEQ ID NO: 7533; WAN024C2P_at; Start 70; Stop 94
cattttgccaaacgtaagggatacg

SEQ ID NO: 101764 - DNA, 25 bp, Artificial
  probe
  misc_feature (1)..(25): SEQ ID NO: 7533; WAN024C2P_at; Start 82; Stop 106
cgtaagggatacgatctccagttcc

SEQ ID NO: 101765 - DNA, 25 bp, Artificial
  probe
  misc_feature (1)..(25): SEQ ID NO: 7533; WAN024C2P_at; Start 47; Stop 71
caaatatggaactaaaccatcacca

SEQ ID NO: 101766 - DNA, 25 bp, Artificial
  probe
  misc_feature (1)..(25): SEQ ID NO: 7533; WAN024C2P_at; Start 181; Stop 205
tacaagcaaccaatcctactacagc

SEQ ID NO: 101767 - DNA, 25 bp, Artificial
  probe
  misc_feature (1)..(25): SEQ ID NO: 7533; WAN024C2P_at; Start 143; Stop 167
tccagactctgaaaaatcagatttt

SEQ ID NO: 101768 - DNA, 25 bp, Artificial
  probe
  misc_feature (1)..(25): SEQ ID NO: 7533; WAN024C2P_at; Start 131; Stop 155
tactttttcttttccagactctgaa

SEQ ID NO: 101769 - DNA, 25 bp, Artificial
  probe
  misc_feature (1)..(25): SEQ ID NO: 7533; WAN024C2P_at; Start 78; Stop 102
caaacgtaagggatacgatctccag

SEQ ID NO: 101770 - DNA, 25 bp, Artificial
  probe
  misc_feature (1)..(25): SEQ ID NO: 7533; WAN024C2P_at; Start 59; Stop 83
taaaccatcaccattttgccaaacg

SEQ ID NO: 101771 - DNA, 25 bp, Artificial
  probe
  misc_feature (1)..(25): SEQ ID NO: 7533; WAN024C2P_at; Start 194; Stop 218
tcctactacagctattaaaactgct

SEQ ID NO: 101772 - DNA, 25 bp, Artificial
  probe
  misc_feature (1)..(25): SEQ ID NO: 7533; WAN024C2P_at; Start 170; Stop 194
gcttcccgaactacaagcaaccaat

SEQ ID NO: 101773 - DNA, 25 bp, Artificial
  probe
  misc_feature (1)..(25): SEQ ID NO: 7533; WAN024C2P_at; Start 64; Stop 88
catcaccattttgccaaacgtaagg

SEQ ID NO: 101774 - DNA, 25 bp, Artificial
  probe
  misc_feature (1)..(25): SEQ ID NO: 7533; WAN024C2P_at; Start 3; Stop 27
gatttttcatattttgaatctgcca

SEQ ID NO: 101775 - DNA, 25 bp, Artificial
  probe
  misc_feature (1)..(25): SEQ ID NO: 7533; WAN024C2P_at; Start 91; Stop 115
tacgatctccagttccttgaagaaa

SEQ ID NO: 101776 - DNA, 25 bp, Artificial
  probe
  misc_feature (1)..(25): SEQ ID NO: 7533; WAN024C2P_at; Start 87; Stop 111
gggatacgatctccagttccttgaa

SEQ ID NO: 101777 - DNA, 25 bp, Artificial
  probe
  misc_feature (1)..(25): SEQ ID NO: 7533; WAN024C2P_at; Start 216; Stop 240
gctgcagctgttaaagctaatttaa

SEQ ID NO: 101778 - DNA, 25 bp, Artificial
  probe
  misc_feature (1)..(25): SEQ ID NO: 6758; WAN024C2Q_at; Start 152; Stop 176
catacgttcaaagcgttcctctttg

SEQ ID NO: 101779 - DNA, 25 bp, Artificial
  probe
  misc_feature (1)..(25): SEQ ID NO: 6758; WAN024C2Q_at; Start 110; Stop 134
caagtactcaactggcacgtttacc

SEQ ID NO: 101780 - DNA, 25 bp, Artificial
  probe
  misc_feature (1)..(25): SEQ ID NO: 6758; WAN024C2Q_at; Start 65; Stop 89
taaacgttgacgttgtccgcctgaa

SEQ ID NO: 101781 - DNA, 25 bp, Artificial
  probe
  misc_feature (1)..(25): SEQ ID NO: 6758; WAN024C2Q_at; Start 52; Stop 76
cacgagcaatacataaacgttgacg

SEQ ID NO: 101782 - DNA, 25 bp, Artificial
  probe
  misc_feature (1)..(25): SEQ ID NO: 6758; WAN024C2Q_at; Start 37; Stop 61
gtttcatacaaagggcacgagcaat

SEQ ID NO: 101783 - DNA, 25 bp, Artificial
  probe
  misc_feature (1)..(25): SEQ ID NO: 6758; WAN024C2Q_at; Start 106; Stop 130
gctccaagtactcaactggcacgtt

SEQ ID NO: 101784 - DNA, 25 bp, Artificial
  probe
  misc_feature (1)..(25): SEQ ID NO: 6758; WAN024C2Q_at; Start 162; Stop 186
aagcgttcctctttgtttccaatat

SEQ ID NO: 101785 - DNA, 25 bp, Artificial
  probe
  misc_feature (1)..(25): SEQ ID NO: 6758; WAN024C2Q_at; Start 33; Stop 57
tctggtttcatacaaagggcacgag

SEQ ID NO: 101786 - DNA, 25 bp, Artificial
  probe
  misc_feature (1)..(25): SEQ ID NO: 6758; WAN024C2Q_at; Start 99; Stop 123
ggataacgctccaagtactcaactg

SEQ ID NO: 101787 - DNA, 25 bp, Artificial
  probe
  misc_feature (1)..(25): SEQ ID NO: 6758; WAN024C2Q_at; Start 102; Stop 126
taacgctccaagtactcaactggca

SEQ ID NO: 101788 - DNA, 25 bp, Artificial
  probe
  misc_feature (1)..(25): SEQ ID NO: 6758; WAN024C2Q_at; Start 45; Stop 69
caaagggcacgagcaatacataaac

SEQ ID NO: 101789 - DNA, 25 bp, Artificial
  probe
  misc_feature (1)..(25): SEQ ID NO: 6758; WAN024C2Q_at; Start 61; Stop 85
tacataaacgttgacgttgtccgcc

SEQ ID NO: 101790 - DNA, 25 bp, Artificial
  probe
  misc_feature (1)..(25): SEQ ID NO: 6758; WAN024C2Q_at; Start 69; Stop 93
cgttgacgttgtccgcctgaaaatt

SEQ ID NO: 101791 - DNA, 25 bp, Artificial
  probe
  misc_feature (1)..(25): SEQ ID NO: 6758; WAN024C2Q_at; Start 139; Stop 163
tcaaggcttctttcatacgttcaaa

SEQ ID NO: 101792 - DNA, 25 bp, Artificial
  probe
  misc_feature (1)..(25): SEQ ID NO: 6758; WAN024C2Q_at; Start 120; Stop 144
actggcacgtttaccatcttcaagg

SEQ ID NO: 101793 - DNA, 25 bp, Artificial
  probe
  misc_feature (1)..(25): SEQ ID NO: 6758; WAN024C2Q_at; Start 184; Stop 208
tattatggacaatcatcggttcatc

SEQ ID NO: 101794 - DNA, 25 bp, Artificial
  probe
  misc_feature (1)..(25): SEQ ID NO: 6758; WAN024C2Q_at; Start 133; Stop 157
ccatcttcaaggcttctttcatacg

SEQ ID NO: 101795 - DNA, 25 bp, Artificial
  probe
  misc_feature (1)..(25): SEQ ID NO: 6758; WAN024C2Q_at; Start 41; Stop 65
catacaaagggcacgagcaatacat

SEQ ID NO: 101796 - DNA, 25 bp, Artificial
  probe
  misc_feature (1)..(25): SEQ ID NO: 6758; WAN024C2Q_at; Start 93; Stop 117
tcatgaggataacgctccaagtact

SEQ ID NO: 101797 - DNA, 25 bp, Artificial
  probe
  misc_feature (1)..(25): SEQ ID NO: 6758; WAN024C2Q_at; Start 76; Stop 100
gttgtccgcctgaaaattcatgagg

SEQ ID NO: 101798 - DNA, 25 bp, Artificial
  probe
  misc_feature (1)..(25): SEQ ID NO: 6758; WAN024C2Q_at; Start 181; Stop 205
caatattatggacaatcatcggttc

SEQ ID NO: 101799 - DNA, 25 bp, Artificial
  probe
  misc_feature (1)..(25): SEQ ID NO: 6758; WAN024C2Q_at; Start 190; Stop 214
ggacaatcatcggttcatcaaatga

SEQ ID NO: 101800 - DNA, 25 bp, Artificial
  probe
  misc_feature (1)..(25): SEQ ID NO: 6758; WAN024C2Q_at; Start 143; Stop 167
ggcttctttcatacgttcaaagcgt

SEQ ID NO: 101801 - DNA, 25 bp, Artificial
  probe
  misc_feature (1)..(25): SEQ ID NO: 6758; WAN024C2Q_at; Start 73; Stop 97
gacgttgtccgcctgaaaattcatg

SEQ ID NO: 101802 - DNA, 25 bp, Artificial
  probe
  misc_feature (1)..(25): SEQ ID NO: 6758; WAN024C2Q_at; Start 87; Stop 111
gaaaattcatgaggataacgctcca

SEQ ID NO: 101803 - DNA, 25 bp, Artificial
  probe
  misc_feature (1)..(25): SEQ ID NO: 6758; WAN024C2Q_at; Start 147; Stop 171
tctttcatacgttcaaagcgttcct

SEQ ID NO: 101804 - DNA, 25 bp, Artificial
  probe
  misc_feature (1)..(25): SEQ ID NO: 6758; WAN024C2Q_at; Start 29; Stop 53
aatttctggtttcatacaaagggca

SEQ ID NO: 101805 - DNA, 25 bp, Artificial
  probe
  misc_feature (1)..(25): SEQ ID NO: 6758; WAN024C2Q_at; Start 55; Stop 79
gagcaatacataaacgttgacgttg

SEQ ID NO: 101806 - DNA, 25 bp, Artificial
  probe
  misc_feature (1)..(25): SEQ ID NO: 6758; WAN024C2Q_at; Start 197; Stop 221
catcggttcatcaaatgaattataa

SEQ ID NO: 101807 - DNA, 25 bp, Artificial
  probe
  misc_feature (1)..(25): SEQ ID NO: 6758; WAN024C2Q_at; Start 83; Stop 107
gcctgaaaattcatgaggataacgc

SEQ ID NO: 101808 - DNA, 25 bp, Artificial
  probe
  misc_feature (1)..(25): SEQ ID NO: 6758; WAN024C2Q_at; Start 114; Stop 138
tactcaactggcacgtttaccatct

SEQ ID NO: 101809 - DNA, 25 bp, Artificial
  probe
  misc_feature (1)..(25): SEQ ID NO: 6758; WAN024C2Q_at; Start 3; Stop 27
gctgaaacaggttcatctaaaatta

SEQ ID NO: 101810 - DNA, 25 bp, Artificial
  probe
  misc_feature (1)..(25): SEQ ID NO: 6758; WAN024C2Q_at; Start 169; Stop 193
cctctttgtttccaatattatggac

SEQ ID NO: 101811 - DNA, 25 bp, Artificial
  probe
  misc_feature (1)..(25): SEQ ID NO: 6758; WAN024C2Q_at; Start 124; Stop 148
gcacgtttaccatcttcaaggcttc

SEQ ID NO: 101812 - DNA, 25 bp, Artificial
  probe
  misc_feature (1)..(25): SEQ ID NO: 7238; WAN024C2R_at; Start 79; Stop 103
aaaacaccatgtatcccaagtagct

SEQ ID NO: 101813 - DNA, 25 bp, Artificial
  probe
  misc_feature (1)..(25): SEQ ID NO: 7238; WAN024C2R_at; Start 169; Stop 193
gaattaagttgtgatatactatcct

SEQ ID NO: 101814 - DNA, 25 bp, Artificial
  probe
  misc_feature (1)..(25): SEQ ID NO: 7238; WAN024C2R_at; Start 81; Stop 105
aacaccatgtatcccaagtagctta

SEQ ID NO: 101815 - DNA, 25 bp, Artificial
  probe
  misc_feature (1)..(25): SEQ ID NO: 7238; WAN024C2R_at; Start 39; Stop 63
cagtgatgcagcaattagaaatgag

SEQ ID NO: 101816 - DNA, 25 bp, Artificial
  probe
  misc_feature (1)..(25): SEQ ID NO: 7238; WAN024C2R_at; Start 49; Stop 73
gcaattagaaatgagaatccatcca

SEQ ID NO: 101817 - DNA, 25 bp, Artificial
  probe
  misc_feature (1)..(25): SEQ ID NO: 7238; WAN024C2R_at; Start 26; Stop 50
caataaaggaaatcagtgatgcagc

SEQ ID NO: 101818 - DNA, 25 bp, Artificial
  probe
  misc_feature (1)..(25): SEQ ID NO: 7238; WAN024C2R_at; Start 29; Stop 53
taaaggaaatcagtgatgcagcaat

SEQ ID NO: 101819 - DNA, 25 bp, Artificial
  probe
  misc_feature (1)..(25): SEQ ID NO: 7238; WAN024C2R_at; Start 47; Stop 71
cagcaattagaaatgagaatccatc

SEQ ID NO: 101820 - DNA, 25 bp, Artificial
  probe
  misc_feature (1)..(25): SEQ ID NO: 7238; WAN024C2R_at; Start 56; Stop 80
gaaatgagaatccatccaatagtaa

SEQ ID NO: 101821 - DNA, 25 bp, Artificial
  probe
  misc_feature (1)..(25): SEQ ID NO: 7238; WAN024C2R_at; Start 200; Stop 224
caatttcttttgtaaatgctttata

SEQ ID NO: 101822 - DNA, 25 bp, Artificial
  probe
  misc_feature (1)..(25): SEQ ID NO: 7238; WAN024C2R_at; Start 1; Stop 25
gtgaccacttcgtcattaacgggta

SEQ ID NO: 101823 - DNA, 25 bp, Artificial
  probe
  misc_feature (1)..(25): SEQ ID NO: 7238; WAN024C2R_at; Start 75; Stop 99
tagtaaaacaccatgtatcccaagt

SEQ ID NO: 101824 - DNA, 25 bp, Artificial
  probe
  misc_feature (1)..(25): SEQ ID NO: 7238; WAN024C2R_at; Start 179; Stop 203
gtgatatactatccttttttacaat

SEQ ID NO: 101825 - DNA, 25 bp, Artificial
  probe
  misc_feature (1)..(25): SEQ ID NO: 7238; WAN024C2R_at; Start 6; Stop 30
cacttcgtcattaacgggtacaata

SEQ ID NO: 101826 - DNA, 25 bp, Artificial
  probe
  misc_feature (1)..(25): SEQ ID NO: 7238; WAN024C2R_at; Start 71; Stop 95
ccaatagtaaaacaccatgtatccc

SEQ ID NO: 101827 - DNA, 25 bp, Artificial
  probe
  misc_feature (1)..(25): SEQ ID NO: 7238; WAN024C2R_at; Start 118; Stop 142
gctaccattggtattgttactttaa

SEQ ID NO: 101828 - DNA, 25 bp, Artificial
  probe
  misc_feature (1)..(25): SEQ ID NO: 7238; WAN024C2R_at; Start 3; Stop 27
gaccacttcgtcattaacgggtaca

SEQ ID NO: 101829 - DNA, 25 bp, Artificial
  probe
  misc_feature (1)..(25): SEQ ID NO: 7238; WAN024C2R_at; Start 53; Stop 77
ttagaaatgagaatccatccaatag

SEQ ID NO: 101830 - DNA, 25 bp, Artificial
  probe
  misc_feature (1)..(25): SEQ ID NO: 7238; WAN024C2R_at; Start 45; Stop 69
tgcagcaattagaaatgagaatcca

SEQ ID NO: 101831 - DNA, 25 bp, Artificial
  probe
  misc_feature (1)..(25): SEQ ID NO: 7238; WAN024C2R_at; Start 33; Stop 57
ggaaatcagtgatgcagcaattaga

SEQ ID NO: 101832 - DNA, 25 bp, Artificial
  probe
  misc_feature (1)..(25): SEQ ID NO: 7238; WAN024C2R_at; Start 158; Stop 182
tctctagcaatgaattaagttgtga

SEQ ID NO: 101833 - DNA, 25 bp, Artificial
  probe
  misc_feature (1)..(25): SEQ ID NO: 7238; WAN024C2R_at; Start 83; Stop 107
caccatgtatcccaagtagcttata

SEQ ID NO: 101834 - DNA, 25 bp, Artificial
  probe
  misc_feature (1)..(25): SEQ ID NO: 7238; WAN024C2R_at; Start 63; Stop 87
gaatccatccaatagtaaaacacca

SEQ ID NO: 101835 - DNA, 25 bp, Artificial
  probe
  misc_feature (1)..(25): SEQ ID NO: 7238; WAN024C2R_at; Start 104; Stop 128
tatataataaaattgctaccattgg

SEQ ID NO: 101836 - DNA, 25 bp, Artificial
  probe
  misc_feature (1)..(25): SEQ ID NO: 7238; WAN024C2R_at; Start 77; Stop 101
gtaaaacaccatgtatcccaagtag

SEQ ID NO: 101837 - DNA, 25 bp, Artificial
  probe
  misc_feature (1)..(25): SEQ ID NO: 7238; WAN024C2R_at; Start 24; Stop 48
tacaataaaggaaatcagtgatgca

SEQ ID NO: 101838 - DNA, 25 bp, Artificial
  probe
  misc_feature (1)..(25): SEQ ID NO: 7238; WAN024C2R_at; Start 141; Stop 165
aattatagtacttgttatctctagc

SEQ ID NO: 101839 - DNA, 25 bp, Artificial
  probe
  misc_feature (1)..(25): SEQ ID NO: 7238; WAN024C2R_at; Start 20; Stop 44
cgggtacaataaaggaaatcagtga

SEQ ID NO: 101840 - DNA, 25 bp, Artificial
  probe
  misc_feature (1)..(25): SEQ ID NO: 7238; WAN024C2R_at; Start 60; Stop 84
tgagaatccatccaatagtaaaaca

SEQ ID NO: 101841 - DNA, 25 bp, Artificial
  probe
  misc_feature (1)..(25): SEQ ID NO: 7238; WAN024C2R_at; Start 86; Stop 110
catgtatcccaagtagcttatataa

SEQ ID NO: 101842 - DNA, 25 bp, Artificial
  probe
  misc_feature (1)..(25): SEQ ID NO: 7238; WAN024C2R_at; Start 153; Stop 177
tgttatctctagcaatgaattaagt

SEQ ID NO: 101843 - DNA, 25 bp, Artificial
  probe
  misc_feature (1)..(25): SEQ ID NO: 7238; WAN024C2R_at; Start 146; Stop 170
tagtacttgttatctctagcaatga

SEQ ID NO: 101844 - DNA, 25 bp, Artificial
  probe
  misc_feature (1)..(25): SEQ ID NO: 7238; WAN024C2R_at; Start 66; Stop 90
tccatccaatagtaaaacaccatgt

SEQ ID NO: 101845 - DNA, 25 bp, Artificial
  probe
  misc_feature (1)..(25): SEQ ID NO: 7238; WAN024C2R_at; Start 89; Stop 113
gtatcccaagtagcttatataataa

SEQ ID NO: 101846 - DNA, 25 bp, Artificial
  probe
  misc_feature (1)..(25): SEQ ID NO: 7650; WAN024C2S_at; Start 61; Stop 85
catataacattaatgtactccacct

SEQ ID NO: 101847 - DNA, 25 bp, Artificial
  probe
  misc_feature (1)..(25): SEQ ID NO: 7650; WAN024C2S_at; Start 65; Stop 89
taacattaatgtactccaccttatt

SEQ ID NO: 101848 - DNA, 25 bp, Artificial
  probe
  misc_feature (1)..(25): SEQ ID NO: 7650; WAN024C2S_at; Start 116; Stop 140
gcttaaaattatcaccaaatgcaac

SEQ ID NO: 101849 - DNA, 25 bp, Artificial
  probe
  misc_feature (1)..(25): SEQ ID NO: 7650; WAN024C2S_at; Start 252; Stop 276
aatatctaccaatccctcaacttca

SEQ ID NO: 101850 - DNA, 25 bp, Artificial
  probe
  misc_feature (1)..(25): SEQ ID NO: 7650; WAN024C2S_at; Start 261; Stop 285
caatccctcaacttcaccttcataa

SEQ ID NO: 101851 - DNA, 25 bp, Artificial
  probe
  misc_feature (1)..(25): SEQ ID NO: 7650; WAN024C2S_at; Start 233; Stop 257
taaagcgaccttcctcaaaaatatc

SEQ ID NO: 101852 - DNA, 25 bp, Artificial
  probe
  misc_feature (1)..(25): SEQ ID NO: 7650; WAN024C2S_at; Start 151; Stop 175
ggcttcctatcaagtgttaagagta

SEQ ID NO: 101853 - DNA, 25 bp, Artificial
  probe
  misc_feature (1)..(25): SEQ ID NO: 7650; WAN024C2S_at; Start 222; Stop 246
tttgcaaccaataaagcgaccttcc

SEQ ID NO: 101854 - DNA, 25 bp, Artificial
  probe
  misc_feature (1)..(25): SEQ ID NO: 7650; WAN024C2S_at; Start 94; Stop 118
tatgaacaaaatatttcttcgcgct

SEQ ID NO: 101855 - DNA, 25 bp, Artificial
  probe
  misc_feature (1)..(25): SEQ ID NO: 7650; WAN024C2S_at; Start 149; Stop 173
taggcttcctatcaagtgttaagag

SEQ ID NO: 101856 - DNA, 25 bp, Artificial
  probe
  misc_feature (1)..(25): SEQ ID NO: 7650; WAN024C2S_at; Start 160; Stop 184
tcaagtgttaagagtaaactttcaa

SEQ ID NO: 101857 - DNA, 25 bp, Artificial
  probe
  misc_feature (1)..(25): SEQ ID NO: 7650; WAN024C2S_at; Start 124; Stop 148
ttatcaccaaatgcaacaattgctc

SEQ ID NO: 101858 - DNA, 25 bp, Artificial
  probe
  misc_feature (1)..(25): SEQ ID NO: 7650; WAN024C2S_at; Start 45; Stop 69
aattctcgcggaattacatataaca

SEQ ID NO: 101859 - DNA, 25 bp, Artificial
  probe
  misc_feature (1)..(25): SEQ ID NO: 7650; WAN024C2S_at; Start 239; Stop 263
gaccttcctcaaaaatatctaccaa

SEQ ID NO: 101860 - DNA, 25 bp, Artificial
  probe
  misc_feature (1)..(25): SEQ ID NO: 7650; WAN024C2S_at; Start 107; Stop 131
tttcttcgcgcttaaaattatcacc

SEQ ID NO: 101861 - DNA, 25 bp, Artificial
  probe
  misc_feature (1)..(25): SEQ ID NO: 7650; WAN024C2S_at; Start 97; Stop 121
gaacaaaatatttcttcgcgcttaa

SEQ ID NO: 101862 - DNA, 25 bp, Artificial
  probe
  misc_feature (1)..(25): SEQ ID NO: 7650; WAN024C2S_at; Start 224; Stop 248
tgcaaccaataaagcgaccttcctc

SEQ ID NO: 101863 - DNA, 25 bp, Artificial
  probe
  misc_feature (1)..(25): SEQ ID NO: 7650; WAN024C2S_at; Start 215; Stop 239
ctaagattttgcaaccaataaagcg

SEQ ID NO: 101864 - DNA, 25 bp, Artificial
  probe
  misc_feature (1)..(25): SEQ ID NO: 7650; WAN024C2S_at; Start 48; Stop 72
tctcgcggaattacatataacatta

SEQ ID NO: 101865 - DNA, 25 bp, Artificial
  probe
  misc_feature (1)..(25): SEQ ID NO: 7650; WAN024C2S_at; Start 236; Stop 260
agcgaccttcctcaaaaatatctac

SEQ ID NO: 101866 - DNA, 25 bp, Artificial
  probe
  misc_feature (1)..(25): SEQ ID NO: 7650; WAN024C2S_at; Start 131; Stop 155
caaatgcaacaattgctctaggctt

SEQ ID NO: 101867 - DNA, 25 bp, Artificial
  probe
  misc_feature (1)..(25): SEQ ID NO: 7650; WAN024C2S_at; Start 137; Stop 161
caacaattgctctaggcttcctatc

SEQ ID NO: 101868 - DNA, 25 bp, Artificial
  probe
  misc_feature (1)..(25): SEQ ID NO: 7650; WAN024C2S_at; Start 206; Stop 230
cagttttatctaagattttgcaacc

SEQ ID NO: 101869 - DNA, 25 bp, Artificial
  probe
  misc_feature (1)..(25): SEQ ID NO: 7650; WAN024C2S_at; Start 147; Stop 171
tctaggcttcctatcaagtgttaag

SEQ ID NO: 101870 - DNA, 25 bp, Artificial
  probe
  misc_feature (1)..(25): SEQ ID NO: 7650; WAN024C2S_at; Start 79; Stop 103
tccaccttatttttatatgaacaaa

SEQ ID NO: 101871 - DNA, 25 bp, Artificial
  probe
  misc_feature (1)..(25): SEQ ID NO: 7650; WAN024C2S_at; Start 74; Stop 98
tgtactccaccttatttttatatga

SEQ ID NO: 101872 - DNA, 25 bp, Artificial
  probe
  misc_feature (1)..(25): SEQ ID NO: 7650; WAN024C2S_at; Start 128; Stop 152
caccaaatgcaacaattgctctagg

SEQ ID NO: 101873 - DNA, 25 bp, Artificial
  probe
  misc_feature (1)..(25): SEQ ID NO: 7650; WAN024C2S_at; Start 247; Stop 271
tcaaaaatatctaccaatccctcaa

SEQ ID NO: 101874 - DNA, 25 bp, Artificial
  probe
  misc_feature (1)..(25): SEQ ID NO: 7650; WAN024C2S_at; Start 144; Stop 168
tgctctaggcttcctatcaagtgtt

SEQ ID NO: 101875 - DNA, 25 bp, Artificial
  probe
  misc_feature (1)..(25): SEQ ID NO: 7650; WAN024C2S_at; Start 219; Stop 243
gattttgcaaccaataaagcgacct

SEQ ID NO: 101876 - DNA, 25 bp, Artificial
  probe
  misc_feature (1)..(25): SEQ ID NO: 7650; WAN024C2S_at; Start 155; Stop 179
tcctatcaagtgttaagagtaaact

SEQ ID NO: 101877 - DNA, 25 bp, Artificial
  probe
  misc_feature (1)..(25): SEQ ID NO: 7650; WAN024C2S_at; Start 112; Stop 136
tcgcgcttaaaattatcaccaaatg

SEQ ID NO: 101878 - DNA, 25 bp, Artificial
  probe
  misc_feature (1)..(25): SEQ ID NO: 7650; WAN024C2S_at; Start 51; Stop 75
cgcggaattacatataacattaatg

SEQ ID NO: 101879 - DNA, 25 bp, Artificial
  probe
  misc_feature (1)..(25): SEQ ID NO: 7650; WAN024C2S_at; Start 135; Stop 159
tgcaacaattgctctaggcttccta

SEQ ID NO: 101880 - DNA, 25 bp, Artificial
  probe
  misc_feature (1)..(25): SEQ ID NO: 7235; WAN024C2T_at; Start 8; Stop 32
gttggatttcatgcaatgtattctc

SEQ ID NO: 101881 - DNA, 25 bp, Artificial
  probe
  misc_feature (1)..(25): SEQ ID NO: 7235; WAN024C2T_at; Start 87; Stop 111
cgaaccagtatcatactttaaggct

SEQ ID NO: 101882 - DNA, 25 bp, Artificial
  probe
  misc_feature (1)..(25): SEQ ID NO: 7235; WAN024C2T_at; Start 217; Stop 241
gtactcccaattactacagctggat

SEQ ID NO: 101883 - DNA, 25 bp, Artificial
  probe
  misc_feature (1)..(25): SEQ ID NO: 7235; WAN024C2T_at; Start 157; Stop 181
ccagcttttattaattctataaaga

SEQ ID NO: 101884 - DNA, 25 bp, Artificial
  probe
  misc_feature (1)..(25): SEQ ID NO: 7235; WAN024C2T_at; Start 54; Stop 78
cagcctaaattcaggagcacctaaa

SEQ ID NO: 101885 - DNA, 25 bp, Artificial
  probe
  misc_feature (1)..(25): SEQ ID NO: 7235; WAN024C2T_at; Start 34; Stop 58
aacctactatttggagttgtcagcc

SEQ ID NO: 101886 - DNA, 25 bp, Artificial
  probe
  misc_feature (1)..(25): SEQ ID NO: 7235; WAN024C2T_at; Start 44; Stop 68
ttggagttgtcagcctaaattcagg

SEQ ID NO: 101887 - DNA, 25 bp, Artificial
  probe
  misc_feature (1)..(25): SEQ ID NO: 7235; WAN024C2T_at; Start 145; Stop 169
cccacactatatccagcttttatta

SEQ ID NO: 101888 - DNA, 25 bp, Artificial
  probe
  misc_feature (1)..(25): SEQ ID NO: 7235; WAN024C2T_at; Start 11; Stop 35
ggatttcatgcaatgtattctcaaa

SEQ ID NO: 101889 - DNA, 25 bp, Artificial
  probe
  misc_feature (1)..(25): SEQ ID NO: 7235; WAN024C2T_at; Start 215; Stop 239
tagtactcccaattactacagctgg

SEQ ID NO: 101890 - DNA, 25 bp, Artificial
  probe
  misc_feature (1)..(25): SEQ ID NO: 7235; WAN024C2T_at; Start 49; Stop 73
gttgtcagcctaaattcaggagcac

SEQ ID NO: 101891 - DNA, 25 bp, Artificial
  probe
  misc_feature (1)..(25): SEQ ID NO: 7235; WAN024C2T_at; Start 47; Stop 71
gagttgtcagcctaaattcaggagc

SEQ ID NO: 101892 - DNA, 25 bp, Artificial
  probe
  misc_feature (1)..(25): SEQ ID NO: 7235; WAN024C2T_at; Start 64; Stop 88
tcaggagcacctaaaatacaaaacg

SEQ ID NO: 101893 - DNA, 25 bp, Artificial
  probe
  misc_feature (1)..(25): SEQ ID NO: 7235; WAN024C2T_at; Start 94; Stop 118
gtatcatactttaaggcttttgaca

SEQ ID NO: 101894 - DNA, 25 bp, Artificial
  probe
  misc_feature (1)..(25): SEQ ID NO: 7235; WAN024C2T_at; Start 180; Stop 204
gaatatattttcaatactactacca

SEQ ID NO: 101895 - DNA, 25 bp, Artificial
  probe
  misc_feature (1)..(25): SEQ ID NO: 7235; WAN024C2T_at; Start 149; Stop 173
cactatatccagcttttattaattc

SEQ ID NO: 101896 - DNA, 25 bp, Artificial
  probe
  misc_feature (1)..(25): SEQ ID NO: 7235; WAN024C2T_at; Start 59; Stop 83
taaattcaggagcacctaaaataca

SEQ ID NO: 101897 - DNA, 25 bp, Artificial
  probe
  misc_feature (1)..(25): SEQ ID NO: 7235; WAN024C2T_at; Start 91; Stop 115
ccagtatcatactttaaggcttttg

SEQ ID NO: 101898 - DNA, 25 bp, Artificial
  probe
  misc_feature (1)..(25): SEQ ID NO: 7235; WAN024C2T_at; Start 219; Stop 243
actcccaattactacagctggatag

SEQ ID NO: 101899 - DNA, 25 bp, Artificial
  probe
  misc_feature (1)..(25): SEQ ID NO: 7235; WAN024C2T_at; Start 1; Stop 25
gtgaattgttggatttcatgcaatg

SEQ ID NO: 101900 - DNA, 25 bp, Artificial
  probe
  misc_feature (1)..(25): SEQ ID NO: 7235; WAN024C2T_at; Start 75; Stop 99
taaaatacaaaacgaaccagtatca

SEQ ID NO: 101901 - DNA, 25 bp, Artificial
  probe
  misc_feature (1)..(25): SEQ ID NO: 7235; WAN024C2T_at; Start 65; Stop 89
caggagcacctaaaatacaaaacga

SEQ ID NO: 101902 - DNA, 25 bp, Artificial
  probe
  misc_feature (1)..(25): SEQ ID NO: 7235; WAN024C2T_at; Start 185; Stop 209
tattttcaatactactaccatcttt

SEQ ID NO: 101903 - DNA, 25 bp, Artificial
  probe
  misc_feature (1)..(25): SEQ ID NO: 7235; WAN024C2T_at; Start 80; Stop 104
tacaaaacgaaccagtatcatactt

SEQ ID NO: 101904 - DNA, 25 bp, Artificial
  probe
  misc_feature (1)..(25): SEQ ID NO: 7235; WAN024C2T_at; Start 51; Stop 75
tgtcagcctaaattcaggagcacct

SEQ ID NO: 101905 - DNA, 25 bp, Artificial
  probe
  misc_feature (1)..(25): SEQ ID NO: 7235; WAN024C2T_at; Start 24; Stop 48
tgtattctcaaacctactatttgga

SEQ ID NO: 101906 - DNA, 25 bp, Artificial
  probe
  misc_feature (1)..(25): SEQ ID NO: 7235; WAN024C2T_at; Start 36; Stop 60
cctactatttggagttgtcagccta

SEQ ID NO: 101907 - DNA, 25 bp, Artificial
  probe
  misc_feature (1)..(25): SEQ ID NO: 7235; WAN024C2T_at; Start 17; Stop 41
catgcaatgtattctcaaacctact

SEQ ID NO: 101908 - DNA, 25 bp, Artificial
  probe
  misc_feature (1)..(25): SEQ ID NO: 7235; WAN024C2T_at; Start 56; Stop 80
gcctaaattcaggagcacctaaaat

SEQ ID NO: 101909 - DNA, 25 bp, Artificial
  probe
  misc_feature (1)..(25): SEQ ID NO: 7235; WAN024C2T_at; Start 105; Stop 129
taaggcttttgacattttgttcaaa

SEQ ID NO: 101910 - DNA, 25 bp, Artificial
  probe
  misc_feature (1)..(25): SEQ ID NO: 7235; WAN024C2T_at; Start 131; Stop 155
cattaactgattcccccacactata

SEQ ID NO: 101911 - DNA, 25 bp, Artificial
  probe
  misc_feature (1)..(25): SEQ ID NO: 7235; WAN024C2T_at; Start 122; Stop 146
tgttcaaaacattaactgattcccc

SEQ ID NO: 101912 - DNA, 25 bp, Artificial
  probe
  misc_feature (1)..(25): SEQ ID NO: 7235; WAN024C2T_at; Start 200; Stop 224
taccatctttaataatagtactccc

SEQ ID NO: 101913 - DNA, 25 bp, Artificial
  probe
  misc_feature (1)..(25): SEQ ID NO: 7235; WAN024C2T_at; Start 38; Stop 62
tactatttggagttgtcagcctaaa

SEQ ID NO: 101914 - DNA, 25 bp, Artificial
  probe
  misc_feature (1)..(25): SEQ ID NO: 7630; WAN024C2U_at; Start 135; Stop 159
tatcgagcatactggctccttctgc

SEQ ID NO: 101915 - DNA, 25 bp, Artificial
  probe
  misc_feature (1)..(25): SEQ ID NO: 7630; WAN024C2U_at; Start 48; Stop 72
gaatcgctttgatcactggaacaac

SEQ ID NO: 101916 - DNA, 25 bp, Artificial
  probe
  misc_feature (1)..(25): SEQ ID NO: 7630; WAN024C2U_at; Start 113; Stop 137
ggccgagtcgattctccgccgatat

SEQ ID NO: 101917 - DNA, 25 bp, Artificial
  probe
  misc_feature (1)..(25): SEQ ID NO: 7630; WAN024C2U_at; Start 125; Stop 149
tctccgccgatatcgagcatactgg

SEQ ID NO: 101918 - DNA, 25 bp, Artificial
  probe
  misc_feature (1)..(25): SEQ ID NO: 7630; WAN024C2U_at; Start 141; Stop 165
gcatactggctccttctgctatcaa

SEQ ID NO: 101919 - DNA, 25 bp, Artificial
  probe
  misc_feature (1)..(25): SEQ ID NO: 7630; WAN024C2U_at; Start 163; Stop 187
caatttacgagcctgctggagtgcc

SEQ ID NO: 101920 - DNA, 25 bp, Artificial
  probe
  misc_feature (1)..(25): SEQ ID NO: 7630; WAN024C2U_at; Start 130; Stop 154
gccgatatcgagcatactggctcct

SEQ ID NO: 101921 - DNA, 25 bp, Artificial
  probe
  misc_feature (1)..(25): SEQ ID NO: 7630; WAN024C2U_at; Start 55; Stop 79
tttgatcactggaacaacacgctgg

SEQ ID NO: 101922 - DNA, 25 bp, Artificial
  probe
  misc_feature (1)..(25): SEQ ID NO: 7630; WAN024C2U_at; Start 166; Stop 190
tttacgagcctgctggagtgcctgc

SEQ ID NO: 101923 - DNA, 25 bp, Artificial
  probe
  misc_feature (1)..(25): SEQ ID NO: 7630; WAN024C2U_at; Start 45; Stop 69
tgcgaatcgctttgatcactggaac

SEQ ID NO: 101924 - DNA, 25 bp, Artificial
  probe
  misc_feature (1)..(25): SEQ ID NO: 7630; WAN024C2U_at; Start 25; Stop 49
gatgaggacatcactttccttgcga

SEQ ID NO: 101925 - DNA, 25 bp, Artificial
  probe
  misc_feature (1)..(25): SEQ ID NO: 7630; WAN024C2U_at; Start 96; Stop 120
caacatagctactgcccggccgagt

SEQ ID NO: 101926 - DNA, 25 bp, Artificial
  probe
  misc_feature (1)..(25): SEQ ID NO: 7630; WAN024C2U_at; Start 206; Stop 230
tgaccaccgtccgaaaaggagtctg

SEQ ID NO: 101927 - DNA, 25 bp, Artificial
  probe
  misc_feature (1)..(25): SEQ ID NO: 7630; WAN024C2U_at; Start 15; Stop 39
tatcaatagagatgaggacatcact

SEQ ID NO: 101928 - DNA, 25 bp, Artificial
  probe
  misc_feature (1)..(25): SEQ ID NO: 7630; WAN024C2U_at; Start 195; Stop 219
gagcaaaaaattgaccaccgtccga

SEQ ID NO: 101929 - DNA, 25 bp, Artificial
  probe
  misc_feature (1)..(25): SEQ ID NO: 7630; WAN024C2U_at; Start 31; Stop 55
gacatcactttccttgcgaatcgct

SEQ ID NO: 101930 - DNA, 25 bp, Artificial
  probe
  misc_feature (1)..(25): SEQ ID NO: 7630; WAN024C2U_at; Start 158; Stop 182
gctatcaatttacgagcctgctgga

SEQ ID NO: 101931 - DNA, 25 bp, Artificial
  probe
  misc_feature (1)..(25): SEQ ID NO: 7630; WAN024C2U_at; Start 240; Stop 264
tgataattccgcaaataactgtctt

SEQ ID NO: 101932 - DNA, 25 bp, Artificial
  probe
  misc_feature (1)..(25): SEQ ID NO: 7630; WAN024C2U_at; Start 78; Stop 102
ggatttcctcttctatctcaacata

SEQ ID NO: 101933 - DNA, 25 bp, Artificial
  probe
  misc_feature (1)..(25): SEQ ID NO: 7630; WAN024C2U_at; Start 186; Stop 210
cctgctcaagagcaaaaaattgacc

SEQ ID NO: 101934 - DNA, 25 bp, Artificial
  probe
  misc_feature (1)..(25): SEQ ID NO: 7630; WAN024C2U_at; Start 60; Stop 84
tcactggaacaacacgctggatttc

SEQ ID NO: 101935 - DNA, 25 bp, Artificial
  probe
  misc_feature (1)..(25): SEQ ID NO: 7630; WAN024C2U_at; Start 122; Stop 146
gattctccgccgatatcgagcatac

SEQ ID NO: 101936 - DNA, 25 bp, Artificial
  probe
  misc_feature (1)..(25): SEQ ID NO: 7630; WAN024C2U_at; Start 177; Stop 201
gctggagtgcctgctcaagagcaaa

SEQ ID NO: 101937 - DNA, 25 bp, Artificial
  probe
  misc_feature (1)..(25): SEQ ID NO: 7630; WAN024C2U_at; Start 74; Stop 98
cgctggatttcctcttctatctcaa

SEQ ID NO: 101938 - DNA, 25 bp, Artificial
  probe
  misc_feature (1)..(25): SEQ ID NO: 7630; WAN024C2U_at; Start 257; Stop 281
actgtctttgcatgattggctttac

SEQ ID NO: 101939 - DNA, 25 bp, Artificial
  probe
  misc_feature (1)..(25): SEQ ID NO: 7630; WAN024C2U_at; Start 90; Stop 114
ctatctcaacatagctactgcccgg

SEQ ID NO: 101940 - DNA, 25 bp, Artificial
  probe
  misc_feature (1)..(25): SEQ ID NO: 7630; WAN024C2U_at; Start 261; Stop 285
tctttgcatgattggctttacttga

SEQ ID NO: 101941 - DNA, 25 bp, Artificial
  probe
  misc_feature (1)..(25): SEQ ID NO: 7630; WAN024C2U_at; Start 252; Stop 276
aaataactgtctttgcatgattggc

SEQ ID NO: 101942 - DNA, 25 bp, Artificial
  probe
  misc_feature (1)..(25): SEQ ID NO: 7630; WAN024C2U_at; Start 172; Stop 196
agcctgctggagtgcctgctcaaga

SEQ ID NO: 101943 - DNA, 25 bp, Artificial
  probe
  misc_feature (1)..(25): SEQ ID NO: 7630; WAN024C2U_at; Start 9; Stop 33
tccaagtatcaatagagatgaggac

SEQ ID NO: 101944 - DNA, 25 bp, Artificial
  probe
  misc_feature (1)..(25): SEQ ID NO: 7630; WAN024C2U_at; Start 148; Stop 172
ggctccttctgctatcaatttacga

SEQ ID NO: 101945 - DNA, 25 bp, Artificial
  probe
  misc_feature (1)..(25): SEQ ID NO: 7630; WAN024C2U_at; Start 231; Stop 255
gggttacattgataattccgcaaat

SEQ ID NO: 101946 - DNA, 25 bp, Artificial
  probe
  misc_feature (1)..(25): SEQ ID NO: 7630; WAN024C2U_at; Start 65; Stop 89
ggaacaacacgctggatttcctctt

SEQ ID NO: 101947 - DNA, 25 bp, Artificial
  probe
  misc_feature (1)..(25): SEQ ID NO: 7630; WAN024C2U_at; Start 1; Stop 25
ttggctcttccaagtatcaatagag

SEQ ID NO: 101948 - DNA, 25 bp, Artificial
  probe
  misc_feature (1)..(25): SEQ ID NO: 6979; WAN024C2V_at; Start 141; Stop 165
gaatactgggtaccattattataat

SEQ ID NO: 101949 - DNA, 25 bp, Artificial
  probe
  misc_feature (1)..(25): SEQ ID NO: 6979; WAN024C2V_at; Start 187; Stop 211
ggtagtattcaactttcccataata

SEQ ID NO: 101950 - DNA, 25 bp, Artificial
  probe
  misc_feature (1)..(25): SEQ ID NO: 6979; WAN024C2V_at; Start 160; Stop 184
tataattttccgaatttaactgaga

SEQ ID NO: 101951 - DNA, 25 bp, Artificial
  probe
  misc_feature (1)..(25): SEQ ID NO: 6979; WAN024C2V_at; Start 169; Stop 193
ccgaatttaactgagataggtagta

SEQ ID NO: 101952 - DNA, 25 bp, Artificial
  probe
  misc_feature (1)..(25): SEQ ID NO: 6979; WAN024C2V_at; Start 29; Stop 53
tccttgctgttgaagttgaatcaat

SEQ ID NO: 101953 - DNA, 25 bp, Artificial
  probe
  misc_feature (1)..(25): SEQ ID NO: 6979; WAN024C2V_at; Start 55; Stop 79
cattttgtagagtttgcaagtcggc

SEQ ID NO: 101954 - DNA, 25 bp, Artificial
  probe
  misc_feature (1)..(25): SEQ ID NO: 6979; WAN024C2V_at; Start 126; Stop 150
tcatcctgaatctttgaatactggg

SEQ ID NO: 101955 - DNA, 25 bp, Artificial
  probe
  misc_feature (1)..(25): SEQ ID NO: 6979; WAN024C2V_at; Start 112; Stop 136
tcaacttcgtatattcatcctgaat

SEQ ID NO: 101956 - DNA, 25 bp, Artificial
  probe
  misc_feature (1)..(25): SEQ ID NO: 6979; WAN024C2V_at; Start 210; Stop 234
tattcctgttcttcaccagaattag

SEQ ID NO: 101957 - DNA, 25 bp, Artificial
  probe
  misc_feature (1)..(25): SEQ ID NO: 6979; WAN024C2V_at; Start 133; Stop 157
gaatctttgaatactgggtaccatt

SEQ ID NO: 101958 - DNA, 25 bp, Artificial
  probe
  misc_feature (1)..(25): SEQ ID NO: 6979; WAN024C2V_at; Start 22; Stop 46
gggagtctccttgctgttgaagttg

SEQ ID NO: 101959 - DNA, 25 bp, Artificial
  probe
  misc_feature (1)..(25): SEQ ID NO: 6979; WAN024C2V_at; Start 109; Stop 133
tattcaacttcgtatattcatcctg

SEQ ID NO: 101960 - DNA, 25 bp, Artificial
  probe
  misc_feature (1)..(25): SEQ ID NO: 6979; WAN024C2V_at; Start 24; Stop 48
gagtctccttgctgttgaagttgaa

SEQ ID NO: 101961 - DNA, 25 bp, Artificial
  probe
  misc_feature (1)..(25): SEQ ID NO: 6979; WAN024C2V_at; Start 130; Stop 154
cctgaatctttgaatactgggtacc

SEQ ID NO: 101962 - DNA, 25 bp, Artificial
  probe
  misc_feature (1)..(25): SEQ ID NO: 6979; WAN024C2V_at; Start 183; Stop 207
gataggtagtattcaactttcccat

SEQ ID NO: 101963 - DNA, 25 bp, Artificial
  probe
  misc_feature (1)..(25): SEQ ID NO: 6979; WAN024C2V_at; Start 81; Stop 105
tctaactgatttctttcagctgtta

SEQ ID NO: 101964 - DNA, 25 bp, Artificial
  probe
  misc_feature (1)..(25): SEQ ID NO: 6979; WAN024C2V_at; Start 73; Stop 97
agtcggcatctaactgatttctttc

SEQ ID NO: 101965 - DNA, 25 bp, Artificial
  probe
  misc_feature (1)..(25): SEQ ID NO: 6979; WAN024C2V_at; Start 167; Stop 191
ttccgaatttaactgagataggtag

SEQ ID NO: 101966 - DNA, 25 bp, Artificial
  probe
  misc_feature (1)..(25): SEQ ID NO: 6979; WAN024C2V_at; Start 205; Stop 229
cataatattcctgttcttcaccaga

SEQ ID NO: 101967 - DNA, 25 bp, Artificial
  probe
  misc_feature (1)..(25): SEQ ID NO: 6979; WAN024C2V_at; Start 62; Stop 86
tagagtttgcaagtcggcatctaac

SEQ ID NO: 101968 - DNA, 25 bp, Artificial
  probe
  misc_feature (1)..(25): SEQ ID NO: 6979; WAN024C2V_at; Start 50; Stop 74
caattcattttgtagagtttgcaag

SEQ ID NO: 101969 - DNA, 25 bp, Artificial
  probe
  misc_feature (1)..(25): SEQ ID NO: 6979; WAN024C2V_at; Start 7; Stop 31
tatctgataaggaaggggagtctcc

SEQ ID NO: 101970 - DNA, 25 bp, Artificial
  probe
  misc_feature (1)..(25): SEQ ID NO: 6979; WAN024C2V_at; Start 70; Stop 94
gcaagtcggcatctaactgatttct

SEQ ID NO: 101971 - DNA, 25 bp, Artificial
  probe
  misc_feature (1)..(25): SEQ ID NO: 6979; WAN024C2V_at; Start 34; Stop 58
gctgttgaagttgaatcaattcatt

SEQ ID NO: 101972 - DNA, 25 bp, Artificial
  probe
  misc_feature (1)..(25): SEQ ID NO: 6979; WAN024C2V_at; Start 194; Stop 218
ttcaactttcccataatattcctgt

SEQ ID NO: 101973 - DNA, 25 bp, Artificial
  probe
  misc_feature (1)..(25): SEQ ID NO: 6979; WAN024C2V_at; Start 77; Stop 101
ggcatctaactgatttctttcagct

SEQ ID NO: 101974 - DNA, 25 bp, Artificial
  probe
  misc_feature (1)..(25): SEQ ID NO: 6979; WAN024C2V_at; Start 64; Stop 88
gagtttgcaagtcggcatctaactg

SEQ ID NO: 101975 - DNA, 25 bp, Artificial
  probe
  misc_feature (1)..(25): SEQ ID NO: 6979; WAN024C2V_at; Start 27; Stop 51
tctccttgctgttgaagttgaatca

SEQ ID NO: 101976 - DNA, 25 bp, Artificial
  probe
  misc_feature (1)..(25): SEQ ID NO: 6979; WAN024C2V_at; Start 176; Stop 200
taactgagataggtagtattcaact

SEQ ID NO: 101977 - DNA, 25 bp, Artificial
  probe
  misc_feature (1)..(25): SEQ ID NO: 6979; WAN024C2V_at; Start 67; Stop 91
tttgcaagtcggcatctaactgatt

SEQ ID NO: 101978 - DNA, 25 bp, Artificial
  probe
  misc_feature (1)..(25): SEQ ID NO: 6979; WAN024C2V_at; Start 58; Stop 82
tttgtagagtttgcaagtcggcatc

SEQ ID NO: 101979 - DNA, 25 bp, Artificial
  probe
  misc_feature (1)..(25): SEQ ID NO: 6979; WAN024C2V_at; Start 96; Stop 120
tcagctgttattttattcaacttcg

SEQ ID NO: 101980 - DNA, 25 bp, Artificial
  probe
  misc_feature (1)..(25): SEQ ID NO: 6979; WAN024C2V_at; Start 181; Stop 205
gagataggtagtattcaactttccc

SEQ ID NO: 101981 - DNA, 25 bp, Artificial
  probe
  misc_feature (1)..(25): SEQ ID NO: 6979; WAN024C2V_at; Start 136; Stop 160
tctttgaatactgggtaccattatt

SEQ ID NO: 101982 - DNA, 25 bp, Artificial
  probe
  misc_feature (1)..(25): SEQ ID NO: 6883; WAN024C2W_at; Start 49; Stop 73
tggtaccaggtctctggtaagtggt

SEQ ID NO: 101983 - DNA, 25 bp, Artificial
  probe
  misc_feature (1)..(25): SEQ ID NO: 6883; WAN024C2W_at; Start 53; Stop 77
accaggtctctggtaagtggtatta

SEQ ID NO: 101984 - DNA, 25 bp, Artificial
  probe
  misc_feature (1)..(25): SEQ ID NO: 6883; WAN024C2W_at; Start 33; Stop 57
ggcaatgaaaacaggctggtaccag

SEQ ID NO: 101985 - DNA, 25 bp, Artificial
  probe
  misc_feature (1)..(25): SEQ ID NO: 6883; WAN024C2W_at; Start 44; Stop 68
caggctggtaccaggtctctggtaa

SEQ ID NO: 101986 - DNA, 25 bp, Artificial
  probe
  misc_feature (1)..(25): SEQ ID NO: 6883; WAN024C2W_at; Start 1; Stop 25
atggctcgtggtattatctgggtct

SEQ ID NO: 101987 - DNA, 25 bp, Artificial
  probe
  misc_feature (1)..(25): SEQ ID NO: 6883; WAN024C2W_at; Start 37; Stop 61
atgaaaacaggctggtaccaggtct

SEQ ID NO: 101988 - DNA, 25 bp, Artificial
  probe
  misc_feature (1)..(25): SEQ ID NO: 6883; WAN024C2W_at; Start 4; Stop 28
gctcgtggtattatctgggtctgtt

SEQ ID NO: 101989 - DNA, 25 bp, Artificial
  probe
  misc_feature (1)..(25): SEQ ID NO: 6883; WAN024C2W_at; Start 55; Stop 79
caggtctctggtaagtggtattatt

SEQ ID NO: 101990 - DNA, 25 bp, Artificial
  probe
  misc_feature (1)..(25): SEQ ID NO: 6883; WAN024C2W_at; Start 6; Stop 30
tcgtggtattatctgggtctgttca

SEQ ID NO: 101991 - DNA, 25 bp, Artificial
  probe
  misc_feature (1)..(25): SEQ ID NO: 6883; WAN024C2W_at; Start 5; Stop 29
ctcgtggtattatctgggtctgttc

SEQ ID NO: 101992 - DNA, 25 bp, Artificial
  probe
  misc_feature (1)..(25): SEQ ID NO: 6883; WAN024C2W_at; Start 39; Stop 63
gaaaacaggctggtaccaggtctct

SEQ ID NO: 101993 - DNA, 25 bp, Artificial
  probe
  misc_feature (1)..(25): SEQ ID NO: 6883; WAN024C2W_at; Start 45; Stop 69
aggctggtaccaggtctctggtaag

SEQ ID NO: 101994 - DNA, 25 bp, Artificial
  probe
  misc_feature (1)..(25): SEQ ID NO: 6883; WAN024C2W_at; Start 38; Stop 62
tgaaaacaggctggtaccaggtctc

SEQ ID NO: 101995 - DNA, 25 bp, Artificial
  probe
  misc_feature (1)..(25): SEQ ID NO: 6883; WAN024C2W_at; Start 2; Stop 26
tggctcgtggtattatctgggtctg

SEQ ID NO: 101996 - DNA, 25 bp, Artificial
  probe
  misc_feature (1)..(25): SEQ ID NO: 6883; WAN024C2W_at; Start 12; Stop 36
tattatctgggtctgttcaggggca

SEQ ID NO: 101997 - DNA, 25 bp, Artificial
  probe
  misc_feature (1)..(25): SEQ ID NO: 6883; WAN024C2W_at; Start 52; Stop 76
taccaggtctctggtaagtggtatt

SEQ ID NO: 101998 - DNA, 25 bp, Artificial
  probe
  misc_feature (1)..(25): SEQ ID NO: 6883; WAN024C2W_at; Start 3; Stop 27
ggctcgtggtattatctgggtctgt

SEQ ID NO: 101999 - DNA, 25 bp, Artificial
  probe
  misc_feature (1)..(25): SEQ ID NO: 6883; WAN024C2W_at; Start 34; Stop 58
gcaatgaaaacaggctggtaccagg

SEQ ID NO: 102000 - DNA, 25 bp, Artificial
  probe
  misc_feature (1)..(25): SEQ ID NO: 6883; WAN024C2W_at; Start 7; Stop 31
cgtggtattatctgggtctgttcag

SEQ ID NO: 102001 - DNA, 25 bp, Artificial
  probe
  misc_feature (1)..(25): SEQ ID NO: 6883; WAN024C2W_at; Start 54; Stop 78
ccaggtctctggtaagtggtattat

SEQ ID NO: 102002 - DNA, 25 bp, Artificial
  probe
  misc_feature (1)..(25): SEQ ID NO: 6883; WAN024C2W_at; Start 41; Stop 65
aaacaggctggtaccaggtctctgg

SEQ ID NO: 102003 - DNA, 25 bp, Artificial
  probe
  misc_feature (1)..(25): SEQ ID NO: 6883; WAN024C2W_at; Start 15; Stop 39
tatctgggtctgttcaggggcaatg

SEQ ID NO: 102004 - DNA, 25 bp, Artificial
  probe
  misc_feature (1)..(25): SEQ ID NO: 6883; WAN024C2W_at; Start 36; Stop 60
aatgaaaacaggctggtaccaggtc

SEQ ID NO: 102005 - DNA, 25 bp, Artificial
  probe
  misc_feature (1)..(25): SEQ ID NO: 6883; WAN024C2W_at; Start 8; Stop 32
gtggtattatctgggtctgttcagg

SEQ ID NO: 102006 - DNA, 25 bp, Artificial
  probe
  misc_feature (1)..(25): SEQ ID NO: 6883; WAN024C2W_at; Start 43; Stop 67
acaggctggtaccaggtctctggta

SEQ ID NO: 102007 - DNA, 25 bp, Artificial
  probe
  misc_feature (1)..(25): SEQ ID NO: 6883; WAN024C2W_at; Start 18; Stop 42
ctgggtctgttcaggggcaatgaaa

SEQ ID NO: 102008 - DNA, 25 bp, Artificial
  probe
  misc_feature (1)..(25): SEQ ID NO: 6883; WAN024C2W_at; Start 42; Stop 66
aacaggctggtaccaggtctctggt

SEQ ID NO: 102009 - DNA, 25 bp, Artificial
  probe
  misc_feature (1)..(25): SEQ ID NO: 6883; WAN024C2W_at; Start 32; Stop 56
gggcaatgaaaacaggctggtacca

SEQ ID NO: 102010 - DNA, 25 bp, Artificial
  probe
  misc_feature (1)..(25): SEQ ID NO: 6883; WAN024C2W_at; Start 40; Stop 64
aaaacaggctggtaccaggtctctg

SEQ ID NO: 102011 - DNA, 25 bp, Artificial
  probe
  misc_feature (1)..(25): SEQ ID NO: 6883; WAN024C2W_at; Start 46; Stop 70
ggctggtaccaggtctctggtaagt

SEQ ID NO: 102012 - DNA, 25 bp, Artificial
  probe
  misc_feature (1)..(25): SEQ ID NO: 6883; WAN024C2W_at; Start 47; Stop 71
gctggtaccaggtctctggtaagtg

SEQ ID NO: 102013 - DNA, 25 bp, Artificial
  probe
  misc_feature (1)..(25): SEQ ID NO: 6883; WAN024C2W_at; Start 51; Stop 75
gtaccaggtctctggtaagtggtat

SEQ ID NO: 102014 - DNA, 25 bp, Artificial
  probe
  misc_feature (1)..(25): SEQ ID NO: 6883; WAN024C2W_at; Start 57; Stop 81
ggtctctggtaagtggtattattct

SEQ ID NO: 102015 - DNA, 25 bp, Artificial
  probe
  misc_feature (1)..(25): SEQ ID NO: 6883; WAN024C2W_at; Start 56; Stop 80
aggtctctggtaagtggtattattc

SEQ ID NO: 102016 - DNA, 25 bp, Artificial
  probe
  misc_feature (1)..(25): SEQ ID NO: 6059; WAN024C2X_at; Start 49; Stop 73
tggtgcttgctgaggccgaggcact

SEQ ID NO: 102017 - DNA, 25 bp, Artificial
  probe
  misc_feature (1)..(25): SEQ ID NO: 6059; WAN024C2X_at; Start 29; Stop 53
tgatgctgaagctgaagcactggtg

SEQ ID NO: 102018 - DNA, 25 bp, Artificial
  probe
  misc_feature (1)..(25): SEQ ID NO: 6059; WAN024C2X_at; Start 6; Stop 30
cttgctgaagctgacgcacttgttg

SEQ ID NO: 102019 - DNA, 25 bp, Artificial
  probe
  misc_feature (1)..(25): SEQ ID NO: 6059; WAN024C2X_at; Start 15; Stop 39
gctgacgcacttgttgatgctgaag

SEQ ID NO: 102020 - DNA, 25 bp, Artificial
  probe
  misc_feature (1)..(25): SEQ ID NO: 6059; WAN024C2X_at; Start 7; Stop 31
ttgctgaagctgacgcacttgttga

SEQ ID NO: 102021 - DNA, 25 bp, Artificial
  probe
  misc_feature (1)..(25): SEQ ID NO: 6059; WAN024C2X_at; Start 26; Stop 50
tgttgatgctgaagctgaagcactg

SEQ ID NO: 102022 - DNA, 25 bp, Artificial
  probe
  misc_feature (1)..(25): SEQ ID NO: 6059; WAN024C2X_at; Start 27; Stop 51
gttgatgctgaagctgaagcactgg

SEQ ID NO: 102023 - DNA, 25 bp, Artificial
  probe
  misc_feature (1)..(25): SEQ ID NO: 6059; WAN024C2X_at; Start 50; Stop 74
ggtgcttgctgaggccgaggcactg

SEQ ID NO: 102024 - DNA, 25 bp, Artificial
  probe
  misc_feature (1)..(25): SEQ ID NO: 6059; WAN024C2X_at; Start 22; Stop 46
cacttgttgatgctgaagctgaagc

SEQ ID NO: 102025 - DNA, 25 bp, Artificial
  probe
  misc_feature (1)..(25): SEQ ID NO: 6059; WAN024C2X_at; Start 58; Stop 82
ctgaggccgaggcactggtgcttgc

SEQ ID NO: 102026 - DNA, 25 bp, Artificial
  probe
  misc_feature (1)..(25): SEQ ID NO: 6059; WAN024C2X_at; Start 17; Stop 41
tgacgcacttgttgatgctgaagct

SEQ ID NO: 102027 - DNA, 25 bp, Artificial
  probe
  misc_feature (1)..(25): SEQ ID NO: 6059; WAN024C2X_at; Start 64; Stop 88
ccgaggcactggtgcttgctgaagc

SEQ ID NO: 102028 - DNA, 25 bp, Artificial
  probe
  misc_feature (1)..(25): SEQ ID NO: 6059; WAN024C2X_at; Start 65; Stop 89
cgaggcactggtgcttgctgaagcc

SEQ ID NO: 102029 - DNA, 25 bp, Artificial
  probe
  misc_feature (1)..(25): SEQ ID NO: 6059; WAN024C2X_at; Start 19; Stop 43
acgcacttgttgatgctgaagctga

SEQ ID NO: 102030 - DNA, 25 bp, Artificial
  probe
  misc_feature (1)..(25): SEQ ID NO: 6059; WAN024C2X_at; Start 20; Stop 44
cgcacttgttgatgctgaagctgaa

SEQ ID NO: 102031 - DNA, 25 bp, Artificial
  probe
  misc_feature (1)..(25): SEQ ID NO: 6059; WAN024C2X_at; Start 25; Stop 49
ttgttgatgctgaagctgaagcact

SEQ ID NO: 102032 - DNA, 25 bp, Artificial
  probe
  misc_feature (1)..(25): SEQ ID NO: 6059; WAN024C2X_at; Start 24; Stop 48
cttgttgatgctgaagctgaagcac

SEQ ID NO: 102033 - DNA, 25 bp, Artificial
  probe
  misc_feature (1)..(25): SEQ ID NO: 6059; WAN024C2X_at; Start 47; Stop 71
actggtgcttgctgaggccgaggca

SEQ ID NO: 102034 - DNA, 25 bp, Artificial
  probe
  misc_feature (1)..(25): SEQ ID NO: 6059; WAN024C2X_at; Start 5; Stop 29
acttgctgaagctgacgcacttgtt

SEQ ID NO: 102035 - DNA, 25 bp, Artificial
  probe
  misc_feature (1)..(25): SEQ ID NO: 6059; WAN024C2X_at; Start 18; Stop 42
gacgcacttgttgatgctgaagctg

SEQ ID NO: 102036 - DNA, 25 bp, Artificial
  probe
  misc_feature (1)..(25): SEQ ID NO: 6059; WAN024C2X_at; Start 14; Stop 38
agctgacgcacttgttgatgctgaa

SEQ ID NO: 102037 - DNA, 25 bp, Artificial
  probe
  misc_feature (1)..(25): SEQ ID NO: 6059; WAN024C2X_at; Start 31; Stop 55
atgctgaagctgaagcactggtgct

SEQ ID NO: 102038 - DNA, 25 bp, Artificial
  probe
  misc_feature (1)..(25): SEQ ID NO: 6059; WAN024C2X_at; Start 23; Stop 47
acttgttgatgctgaagctgaagca

SEQ ID NO: 102039 - DNA, 25 bp, Artificial
  probe
  misc_feature (1)..(25): SEQ ID NO: 6059; WAN024C2X_at; Start 11; Stop 35
tgaagctgacgcacttgttgatgct

SEQ ID NO: 102040 - DNA, 25 bp, Artificial
  probe
  misc_feature (1)..(25): SEQ ID NO: 6059; WAN024C2X_at; Start 28; Stop 52
ttgatgctgaagctgaagcactggt

SEQ ID NO: 102041 - DNA, 25 bp, Artificial
  probe
  misc_feature (1)..(25): SEQ ID NO: 6059; WAN024C2X_at; Start 54; Stop 78
cttgctgaggccgaggcactggtgc

SEQ ID NO: 102042 - DNA, 25 bp, Artificial
  probe
  misc_feature (1)..(25): SEQ ID NO: 6059; WAN024C2X_at; Start 13; Stop 37
aagctgacgcacttgttgatgctga

SEQ ID NO: 102043 - DNA, 25 bp, Artificial
  probe
  misc_feature (1)..(25): SEQ ID NO: 6059; WAN024C2X_at; Start 12; Stop 36
gaagctgacgcacttgttgatgctg

SEQ ID NO: 102044 - DNA, 25 bp, Artificial
  probe
  misc_feature (1)..(25): SEQ ID NO: 6059; WAN024C2X_at; Start 44; Stop 68
agcactggtgcttgctgaggccgag

SEQ ID NO: 102045 - DNA, 25 bp, Artificial
  probe
  misc_feature (1)..(25): SEQ ID NO: 6059; WAN024C2X_at; Start 32; Stop 56
tgctgaagctgaagcactggtgctt

SEQ ID NO: 102046 - DNA, 25 bp, Artificial
  probe
  misc_feature (1)..(25): SEQ ID NO: 6059; WAN024C2X_at; Start 21; Stop 45
gcacttgttgatgctgaagctgaag

SEQ ID NO: 102047 - DNA, 25 bp, Artificial
  probe
  misc_feature (1)..(25): SEQ ID NO: 6059; WAN024C2X_at; Start 30; Stop 54
gatgctgaagctgaagcactggtgc

SEQ ID NO: 102048 - DNA, 25 bp, Artificial
  probe
  misc_feature (1)..(25): SEQ ID NO: 6059; WAN024C2X_at; Start 16; Stop 40
ctgacgcacttgttgatgctgaagc

SEQ ID NO: 102049 - DNA, 25 bp, Artificial
  probe
  misc_feature (1)..(25): SEQ ID NO: 6059; WAN024C2X_at; Start 56; Stop 80
tgctgaggccgaggcactggtgctt

SEQ ID NO: 102050 - DNA, 25 bp, Artificial
  probe
  misc_feature (1)..(25): SEQ ID NO: 6687; WAN024C2Y_at; Start 801; Stop 825
tgaaatctcggttgtcggtcagagt

SEQ ID NO: 102051 - DNA, 25 bp, Artificial
  probe
  misc_feature (1)..(25): SEQ ID NO: 6687; WAN024C2Y_at; Start 264; Stop 288
tagctctatcgaggttgaccgtgtc

SEQ ID NO: 102052 - DNA, 25 bp, Artificial
  probe
  misc_feature (1)..(25): SEQ ID NO: 6687; WAN024C2Y_at; Start 612; Stop 636
cgagggagaaaatgcggttgaccat

SEQ ID NO: 102053 - DNA, 25 bp, Artificial
  probe
  misc_feature (1)..(25): SEQ ID NO: 6687; WAN024C2Y_at; Start 319; Stop 343
ggtagtattaccagagccaatcctt

SEQ ID NO: 102054 - DNA, 25 bp, Artificial
  probe
  misc_feature (1)..(25): SEQ ID NO: 6687; WAN024C2Y_at; Start 640; Stop 664
tatatggtggtgattgacagcccct

SEQ ID NO: 102055 - DNA, 25 bp, Artificial
  probe
  misc_feature (1)..(25): SEQ ID NO: 6687; WAN024C2Y_at; Start 903; Stop 927
caaatatacctattcgccaatggca

SEQ ID NO: 102056 - DNA, 25 bp, Artificial
  probe
  misc_feature (1)..(25): SEQ ID NO: 6687; WAN024C2Y_at; Start 492; Stop 516
gaatggcggttctgaaaatgaatcg

SEQ ID NO: 102057 - DNA, 25 bp, Artificial
  probe
  misc_feature (1)..(25): SEQ ID NO: 6687; WAN024C2Y_at; Start 86; Stop 110
tgacctttcgttttcctacatcgga

SEQ ID NO: 102058 - DNA, 25 bp, Artificial
  probe
  misc_feature (1)..(25): SEQ ID NO: 6687; WAN024C2Y_at; Start 701; Stop 725
tggaagtcaatgaccaagacgtgac

SEQ ID NO: 102059 - DNA, 25 bp, Artificial
  probe
  misc_feature (1)..(25): SEQ ID NO: 6687; WAN024C2Y_at; Start 531; Stop 555
gaaaaacttgtccagctaccagcat

SEQ ID NO: 102060 - DNA, 25 bp, Artificial
  probe
  misc_feature (1)..(25): SEQ ID NO: 6687; WAN024C2Y_at; Start 547; Stop 571
taccagcataagacctcaacgaagt

SEQ ID NO: 102061 - DNA, 25 bp, Artificial
  probe
  misc_feature (1)..(25): SEQ ID NO: 6687; WAN024C2Y_at; Start 953; Stop 977
gaaccttccagtccagtcttgcaaa

SEQ ID NO: 102062 - DNA, 25 bp, Artificial
  probe
  misc_feature (1)..(25): SEQ ID NO: 6687; WAN024C2Y_at; Start 670; Stop 694
gggaactacagccaaatctacgaag

SEQ ID NO: 102063 - DNA, 25 bp, Artificial
  probe
  misc_feature (1)..(25): SEQ ID NO: 6687; WAN024C2Y_at; Start 655; Stop 679
gacagccccttacttgggaactaca

SEQ ID NO: 102064 - DNA, 25 bp, Artificial
  probe
  misc_feature (1)..(25): SEQ ID NO: 6687; WAN024C2Y_at; Start 67; Stop 91
gggaacaatacctatcaactgacct

SEQ ID NO: 102065 - DNA, 25 bp, Artificial
  probe
  misc_feature (1)..(25): SEQ ID NO: 6687; WAN024C2Y_at; Start 369; Stop 393
taggcatacgctcaatatcaaggat

SEQ ID NO: 102066 - DNA, 25 bp, Artificial
  probe
  misc_feature (1)..(25): SEQ ID NO: 6687; WAN024C2Y_at; Start 217; Stop 241
caagtctatgccaatcaggttatca

SEQ ID NO: 102067 - DNA, 25 bp, Artificial
  probe
  misc_feature (1)..(25): SEQ ID NO: 6687; WAN024C2Y_at; Start 424; Stop 448
aagcattctatccttggtcagtggg

SEQ ID NO: 102068 - DNA, 25 bp, Artificial
  probe
  misc_feature (1)..(25): SEQ ID NO: 6687; WAN024C2Y_at; Start 778; Stop 802
tgcgacatgctagaagataaccttg

SEQ ID NO: 102069 - DNA, 25 bp, Artificial
  probe
  misc_feature (1)..(25): SEQ ID NO: 6687; WAN024C2Y_at; Start 763; Stop 787
tttcggacaagtatgtgcgacatgc

SEQ ID NO: 102070 - DNA, 25 bp, Artificial
  probe
  misc_feature (1)..(25): SEQ ID NO: 6687; WAN024C2Y_at; Start 715; Stop 739
caagacgtgacagatgaggctagct

SEQ ID NO: 102071 - DNA, 25 bp, Artificial
  probe
  misc_feature (1)..(25): SEQ ID NO: 6687; WAN024C2Y_at; Start 387; Stop 411
caaggataagaatgccatggaggtc

SEQ ID NO: 102072 - DNA, 25 bp, Artificial
  probe
  misc_feature (1)..(25): SEQ ID NO: 6687; WAN024C2Y_at; Start 969; Stop 993
tcttgcaaatgcgatcggtgggatt

SEQ ID NO: 102073 - DNA, 25 bp, Artificial
  probe
  misc_feature (1)..(25): SEQ ID NO: 6687; WAN024C2Y_at; Start 730; Stop 754
gaggctagcttgattgaatacggta

SEQ ID NO: 102074 - DNA, 25 bp, Artificial
  probe
  misc_feature (1)..(25): SEQ ID NO: 6687; WAN024C2Y_at; Start 401; Stop 425
ccatggaggtcttggccaaaggcaa

SEQ ID NO: 102075 - DNA, 25 bp, Artificial
  probe
  misc_feature (1)..(25): SEQ ID NO: 6687; WAN024C2Y_at; Start 748; Stop 772
tacggtaagcagtattttcggacaa

SEQ ID NO: 102076 - DNA, 25 bp, Artificial
  probe
  misc_feature (1)..(25): SEQ ID NO: 6687; WAN024C2Y_at; Start 474; Stop 498
caatttacgcttgttgaagaatggc

SEQ ID NO: 102077 - DNA, 25 bp, Artificial
  probe
  misc_feature (1)..(25): SEQ ID NO: 6687; WAN024C2Y_at; Start 20; Stop 44
gcaatacacctttaaatgaggccta

SEQ ID NO: 102078 - DNA, 25 bp, Artificial
  probe
  misc_feature (1)..(25): SEQ ID NO: 6687; WAN024C2Y_at; Start 450; Stop 474
cggagatatggtgcgaaacggctac

SEQ ID NO: 102079 - DNA, 25 bp, Artificial
  probe
  misc_feature (1)..(25): SEQ ID NO: 6687; WAN024C2Y_at; Start 136; Stop 160
gaaacttttctgactgcagatgacc

SEQ ID NO: 102080 - DNA, 25 bp, Artificial
  probe
  misc_feature (1)..(25): SEQ ID NO: 6687; WAN024C2Y_at; Start 152; Stop 176
cagatgacctgcatggtgagcagga

SEQ ID NO: 102081 - DNA, 25 bp, Artificial
  probe
  misc_feature (1)..(25): SEQ ID NO: 6687; WAN024C2Y_at; Start 686; Stop 710
tctacgaagatgtggtggaagtcaa

SEQ ID NO: 102082 - DNA, 25 bp, Artificial
  probe
  misc_feature (1)..(25): SEQ ID NO: 6687; WAN024C2Y_at; Start 100; Stop 124
cctacatcggataccaagtgggaat

SEQ ID NO: 102083 - DNA, 25 bp, Artificial
  probe
  misc_feature (1)..(25): SEQ ID NO: 6687; WAN024C2Y_at; Start 851; Stop 875
tggtcagtttctaccatgagtggta

SEQ ID NO: 102084 - DNA, 25 bp, Artificial
  probe
  misc_feature (1)..(25): SEQ ID NO: 6544; WAN024C2Z_at; Start 823; Stop 847
gataaacgtgttgcaggatatgcac

SEQ ID NO: 102085 - DNA, 25 bp, Artificial
  probe
  misc_feature (1)..(25): SEQ ID NO: 6544; WAN024C2Z_at; Start 366; Stop 390
taatatggaaatgcgtacagacgtg

SEQ ID NO: 102086 - DNA, 25 bp, Artificial
  probe
  misc_feature (1)..(25): SEQ ID NO: 6544; WAN024C2Z_at; Start 785; Stop 809
tagtggtcattgatgcagaacaagg

SEQ ID NO: 102087 - DNA, 25 bp, Artificial
  probe
  misc_feature (1)..(25): SEQ ID NO: 6544; WAN024C2Z_at; Start 290; Stop 314
cacaaagcgatgaaatggtcgctca

SEQ ID NO: 102088 - DNA, 25 bp, Artificial
  probe
  misc_feature (1)..(25): SEQ ID NO: 6544; WAN024C2Z_at; Start 600; Stop 624
cgttatcgtttctaatgttgcaggg

SEQ ID NO: 102089 - DNA, 25 bp, Artificial
  probe
  misc_feature (1)..(25): SEQ ID NO: 6544; WAN024C2Z_at; Start 845; Stop 869
cacatgaacaaggtaaagcagtcgt

SEQ ID NO: 102090 - DNA, 25 bp, Artificial
  probe
  misc_feature (1)..(25): SEQ ID NO: 6544; WAN024C2Z_at; Start 687; Stop 711
tactgctggtatgcgtaaaaaagga

SEQ ID NO: 102091 - DNA, 25 bp, Artificial
  probe
  misc_feature (1)..(25): SEQ ID NO: 6544; WAN024C2Z_at; Start 1236; Stop 1260
tttagagaatcaaatccgtgccgct

SEQ ID NO: 102092 - DNA, 25 bp, Artificial
  probe
  misc_feature (1)..(25): SEQ ID NO: 6544; WAN024C2Z_at; Start 537; Stop 561
cattattggacgaccaaacgtaggt

SEQ ID NO: 102093 - DNA, 25 bp, Artificial
  probe
  misc_feature (1)..(25): SEQ ID NO: 6544; WAN024C2Z_at; Start 799; Stop 823
gcagaacaaggcatcattgaacaag

SEQ ID NO: 102094 - DNA, 25 bp, Artificial
  probe
  misc_feature (1)..(25): SEQ ID NO: 6544; WAN024C2Z_at; Start 422; Stop 446
cgtatccgatatcagggtcacatgg

SEQ ID NO: 102095 - DNA, 25 bp, Artificial
  probe
  misc_feature (1)..(25): SEQ ID NO: 6544; WAN024C2Z_at; Start 1106; Stop 1130
tgaaccctacaccaacagacaaagg

SEQ ID NO: 102096 - DNA, 25 bp, Artificial
  probe
  misc_feature (1)..(25): SEQ ID NO: 6544; WAN024C2Z_at; Start 484; Stop 508
cattttggtgaagaggaagaagatc

SEQ ID NO: 102097 - DNA, 25 bp, Artificial
  probe
  misc_feature (1)..(25): SEQ ID NO: 6544; WAN024C2Z_at; Start 82; Stop 106
gtttcgattgtggaagacacgccag

SEQ ID NO: 102098 - DNA, 25 bp, Artificial
  probe
  misc_feature (1)..(25): SEQ ID NO: 6544; WAN024C2Z_at; Start 615; Stop 639
tgttgcagggacaacgagagacgct

SEQ ID NO: 102099 - DNA, 25 bp, Artificial
  probe
  misc_feature (1)..(25): SEQ ID NO: 6544; WAN024C2Z_at; Start 1157; Stop 1181
cacaagttgctatagaaccaccgac

SEQ ID NO: 102100 - DNA, 25 bp, Artificial
  probe
  misc_feature (1)..(25): SEQ ID NO: 6544; WAN024C2Z_at; Start 14; Stop 38
tagtagctattgtaggtaggcctaa

SEQ ID NO: 102101 - DNA, 25 bp, Artificial
  probe
  misc_feature (1)..(25): SEQ ID NO: 6544; WAN024C2Z_at; Start 629; Stop 653
cgagagacgctattgatacagagta

SEQ ID NO: 102102 - DNA, 25 bp, Artificial
  probe
  misc_feature (1)..(25): SEQ ID NO: 6544; WAN024C2Z_at; Start 270; Stop 294
taacgtgcgtgaaggattgacacaa

SEQ ID NO: 102103 - DNA, 25 bp, Artificial
  probe
  misc_feature (1)..(25): SEQ ID NO: 6544; WAN024C2Z_at; Start 750; Stop 774
agctttaaaagcgattgaacgttca

SEQ ID NO: 102104 - DNA, 25 bp, Artificial
  probe
  misc_feature (1)..(25): SEQ ID NO: 6544; WAN024C2Z_at; Start 218; Stop 242
gagcgcaggcagaaatcgccataga

SEQ ID NO: 102105 - DNA, 25 bp, Artificial
  probe
  misc_feature (1)..(25): SEQ ID NO: 6544; WAN024C2Z_at; Start 404; Stop 428
cattaggatttggtgaaccgtatcc

SEQ ID NO: 102106 - DNA, 25 bp, Artificial
  probe
  misc_feature (1)..(25): SEQ ID NO: 6544; WAN024C2Z_at; Start 434; Stop 458
cagggtcacatggtttaggtcttgg

SEQ ID NO: 102107 - DNA, 25 bp, Artificial
  probe
  misc_feature (1)..(25): SEQ ID NO: 6544; WAN024C2Z_at; Start 205; Stop 229
caaacacaaattagagcgcaggcag

SEQ ID NO: 102108 - DNA, 25 bp, Artificial
  probe
  misc_feature (1)..(25): SEQ ID NO: 6544; WAN024C2Z_at; Start 1089; Stop 1113
tactgatgcaatttccatgaaccct

SEQ ID NO: 102109 - DNA, 25 bp, Artificial
  probe
  misc_feature (1)..(25): SEQ ID NO: 6544; WAN024C2Z_at; Start 1024; Stop 1048
tacattaatgaagcaagtgaaaacc

SEQ ID NO: 102110 - DNA, 25 bp, Artificial
  probe
  misc_feature (1)..(25): SEQ ID NO: 6544; WAN024C2Z_at; Start 985; Stop 1009
tctgctaaagaacgcacaagattac

SEQ ID NO: 102111 - DNA, 25 bp, Artificial
  probe
  misc_feature (1)..(25): SEQ ID NO: 6544; WAN024C2Z_at; Start 582; Stop 606
tattttaggtgaagatcgcgttatc

SEQ ID NO: 102112 - DNA, 25 bp, Artificial
  probe
  misc_feature (1)..(25): SEQ ID NO: 6544; WAN024C2Z_at; Start 97; Stop 121
gacacgccaggtgtaacacgagatc

SEQ ID NO: 102113 - DNA, 25 bp, Artificial
  probe
  misc_feature (1)..(25): SEQ ID NO: 6544; WAN024C2Z_at; Start 508; Stop 532
ccttatgatgaagatacaattcgac

SEQ ID NO: 102114 - DNA, 25 bp, Artificial
  probe
  misc_feature (1)..(25): SEQ ID NO: 6544; WAN024C2Z_at; Start 1254; Stop 1278
tgccgcttttggttttgaaggtaca

SEQ ID NO: 102115 - DNA, 25 bp, Artificial
  probe
  misc_feature (1)..(25): SEQ ID NO: 6544; WAN024C2Z_at; Start 233; Stop 257
tcgccatagatgaagcggatgttat

SEQ ID NO: 102116 - DNA, 25 bp, Artificial
  probe
  misc_feature (1)..(25): SEQ ID NO: 6544; WAN024C2Z_at; Start 342; Stop 366
cgtattagcggttaacaaagtagat

SEQ ID NO: 102117 - DNA, 25 bp, Artificial
  probe
  misc_feature (1)..(25): SEQ ID NO: 6544; WAN024C2Z_at; Start 130; Stop 154
tcttcaggtgaatggttaacacatg

SEQ ID NO: 102118 - DNA, 25 bp, Artificial
  probe
  misc_feature (1)..(25): SEQ ID NO: 6247; WAN024C32_at; Start 2; Stop 26
tgaaatcatggacgctatgccaggg

SEQ ID NO: 102119 - DNA, 25 bp, Artificial
  probe
  misc_feature (1)..(25): SEQ ID NO: 6247; WAN024C32_at; Start 29; Stop 53
acttgacctggctgccgtatctgga

SEQ ID NO: 102120 - DNA, 25 bp, Artificial
  probe
  misc_feature (1)..(25): SEQ ID NO: 6247; WAN024C32_at; Start 25; Stop 49
gggtacttgacctggctgccgtatc

SEQ ID NO: 102121 - DNA, 25 bp, Artificial
  probe
  misc_feature (1)..(25): SEQ ID NO: 6247; WAN024C32_at; Start 83; Stop 107
ggctagttcacttcgagcctttgga

SEQ ID NO: 102122 - DNA, 25 bp, Artificial
  probe
  misc_feature (1)..(25): SEQ ID NO: 6247; WAN024C32_at; Start 73; Stop 97
ccgaggccatggctagttcacttcg

SEQ ID NO: 102123 - DNA, 25 bp, Artificial
  probe
  misc_feature (1)..(25): SEQ ID NO: 6247; WAN024C32_at; Start 75; Stop 99
gaggccatggctagttcacttcgag

SEQ ID NO: 102124 - DNA, 25 bp, Artificial
  probe
  misc_feature (1)..(25): SEQ ID NO: 6247; WAN024C32_at; Start 68; Stop 92
gagctccgaggccatggctagttca

SEQ ID NO: 102125 - DNA, 25 bp, Artificial
  probe
  misc_feature (1)..(25): SEQ ID NO: 6247; WAN024C32_at; Start 35; Stop 59
cctggctgccgtatctggaggagat

SEQ ID NO: 102126 - DNA, 25 bp, Artificial
  probe
  misc_feature (1)..(25): SEQ ID NO: 6247; WAN024C32_at; Start 26; Stop 50
ggtacttgacctggctgccgtatct

SEQ ID NO: 102127 - DNA, 25 bp, Artificial
  probe
  misc_feature (1)..(25): SEQ ID NO: 6247; WAN024C32_at; Start 86; Stop 110
tagttcacttcgagcctttggatta

SEQ ID NO: 102128 - DNA, 25 bp, Artificial
  probe
  misc_feature (1)..(25): SEQ ID NO: 6247; WAN024C32_at; Start 49; Stop 73
ctggaggagatgtggccgcgagctc

SEQ ID NO: 102129 - DNA, 25 bp, Artificial
  probe
  misc_feature (1)..(25): SEQ ID NO: 6247; WAN024C32_at; Start 46; Stop 70
tatctggaggagatgtggccgcgag

SEQ ID NO: 102130 - DNA, 25 bp, Artificial
  probe
  misc_feature (1)..(25): SEQ ID NO: 6247; WAN024C32_at; Start 69; Stop 93
agctccgaggccatggctagttcac

SEQ ID NO: 102131 - DNA, 25 bp, Artificial
  probe
  misc_feature (1)..(25): SEQ ID NO: 6247; WAN024C32_at; Start 58; Stop 82
atgtggccgcgagctccgaggccat

SEQ ID NO: 102132 - DNA, 25 bp, Artificial
  probe
  misc_feature (1)..(25): SEQ ID NO: 6247; WAN024C32_at; Start 65; Stop 89
cgcgagctccgaggccatggctagt

SEQ ID NO: 102133 - DNA, 25 bp, Artificial
  probe
  misc_feature (1)..(25): SEQ ID NO: 6247; WAN024C32_at; Start 80; Stop 104
catggctagttcacttcgagccttt

SEQ ID NO: 102134 - DNA, 25 bp, Artificial
  probe
  misc_feature (1)..(25): SEQ ID NO: 6247; WAN024C32_at; Start 77; Stop 101
ggccatggctagttcacttcgagcc

SEQ ID NO: 102135 - DNA, 25 bp, Artificial
  probe
  misc_feature (1)..(25): SEQ ID NO: 6247; WAN024C32_at; Start 78; Stop 102
gccatggctagttcacttcgagcct

SEQ ID NO: 102136 - DNA, 25 bp, Artificial
  probe
  misc_feature (1)..(25): SEQ ID NO: 6247; WAN024C32_at; Start 79; Stop 103
ccatggctagttcacttcgagcctt

SEQ ID NO: 102137 - DNA, 25 bp, Artificial
  probe
  misc_feature (1)..(25): SEQ ID NO: 6247; WAN024C32_at; Start 76; Stop 100
aggccatggctagttcacttcgagc

SEQ ID NO: 102138 - DNA, 25 bp, Artificial
  probe
  misc_feature (1)..(25): SEQ ID NO: 6247; WAN024C32_at; Start 70; Stop 94
gctccgaggccatggctagttcact

SEQ ID NO: 102139 - DNA, 25 bp, Artificial
  probe
  misc_feature (1)..(25): SEQ ID NO: 6247; WAN024C32_at; Start 87; Stop 111
agttcacttcgagcctttggattag

SEQ ID NO: 102140 - DNA, 25 bp, Artificial
  probe
  misc_feature (1)..(25): SEQ ID NO: 6247; WAN024C32_at; Start 84; Stop 108
gctagttcacttcgagcctttggat

SEQ ID NO: 102141 - DNA, 25 bp, Artificial
  probe
  misc_feature (1)..(25): SEQ ID NO: 6247; WAN024C32_at; Start 41; Stop 65
tgccgtatctggaggagatgtggcc

SEQ ID NO: 102142 - DNA, 25 bp, Artificial
  probe
  misc_feature (1)..(25): SEQ ID NO: 6247; WAN024C32_at; Start 85; Stop 109
ctagttcacttcgagcctttggatt

SEQ ID NO: 102143 - DNA, 25 bp, Artificial
  probe
  misc_feature (1)..(25): SEQ ID NO: 6247; WAN024C32_at; Start 71; Stop 95
ctccgaggccatggctagttcactt

SEQ ID NO: 102144 - DNA, 25 bp, Artificial
  probe
  misc_feature (1)..(25): SEQ ID NO: 6247; WAN024C32_at; Start 7; Stop 31
tcatggacgctatgccaggggtact

SEQ ID NO: 102145 - DNA, 25 bp, Artificial
  probe
  misc_feature (1)..(25): SEQ ID NO: 6247; WAN024C32_at; Start 43; Stop 67
ccgtatctggaggagatgtggccgc

SEQ ID NO: 102146 - DNA, 25 bp, Artificial
  probe
  misc_feature (1)..(25): SEQ ID NO: 6247; WAN024C32_at; Start 28; Stop 52
tacttgacctggctgccgtatctgg

SEQ ID NO: 102147 - DNA, 25 bp, Artificial
  probe
  misc_feature (1)..(25): SEQ ID NO: 6247; WAN024C32_at; Start 34; Stop 58
acctggctgccgtatctggaggaga

SEQ ID NO: 102148 - DNA, 25 bp, Artificial
  probe
  misc_feature (1)..(25): SEQ ID NO: 6247; WAN024C32_at; Start 74; Stop 98
cgaggccatggctagttcacttcga

SEQ ID NO: 102149 - DNA, 25 bp, Artificial
  probe
  misc_feature (1)..(25): SEQ ID NO: 6247; WAN024C32_at; Start 12; Stop 36
gacgctatgccaggggtacttgacc

SEQ ID NO: 102150 - DNA, 25 bp, Artificial
  probe
  misc_feature (1)..(25): SEQ ID NO: 6247; WAN024C32_at; Start 30; Stop 54
cttgacctggctgccgtatctggag

SEQ ID NO: 102151 - DNA, 25 bp, Artificial
  probe
  misc_feature (1)..(25): SEQ ID NO: 6247; WAN024C32_at; Start 82; Stop 106
tggctagttcacttcgagcctttgg

SEQ ID NO: 102152 - DNA, 25 bp, Artificial
  probe
  misc_feature (1)..(25): SEQ ID NO: 6764; WAN024C33_at; Start 66; Stop 90
gatagcttacctaacccaggaagac

SEQ ID NO: 102153 - DNA, 25 bp, Artificial
  probe
  misc_feature (1)..(25): SEQ ID NO: 6764; WAN024C33_at; Start 51; Stop 75
cccgctttgggaggcgatagcttac

SEQ ID NO: 102154 - DNA, 25 bp, Artificial
  probe
  misc_feature (1)..(25): SEQ ID NO: 6764; WAN024C33_at; Start 78; Stop 102
aacccaggaagacctactcgacaat

SEQ ID NO: 102155 - DNA, 25 bp, Artificial
  probe
  misc_feature (1)..(25): SEQ ID NO: 6764; WAN024C33_at; Start 87; Stop 111
agacctactcgacaatttagagtag

SEQ ID NO: 102156 - DNA, 25 bp, Artificial
  probe
  misc_feature (1)..(25): SEQ ID NO: 6764; WAN024C33_at; Start 77; Stop 101
taacccaggaagacctactcgacaa

SEQ ID NO: 102157 - DNA, 25 bp, Artificial
  probe
  misc_feature (1)..(25): SEQ ID NO: 6764; WAN024C33_at; Start 60; Stop 84
ggaggcgatagcttacctaacccag

SEQ ID NO: 102158 - DNA, 25 bp, Artificial
  probe
  misc_feature (1)..(25): SEQ ID NO: 6764; WAN024C33_at; Start 1; Stop 25
atgcttacgagtacagcgactcaac

SEQ ID NO: 102159 - DNA, 25 bp, Artificial
  probe
  misc_feature (1)..(25): SEQ ID NO: 6764; WAN024C33_at; Start 3; Stop 27
gcttacgagtacagcgactcaactg

SEQ ID NO: 102160 - DNA, 25 bp, Artificial
  probe
  misc_feature (1)..(25): SEQ ID NO: 6764; WAN024C33_at; Start 63; Stop 87
ggcgatagcttacctaacccaggaa

SEQ ID NO: 102161 - DNA, 25 bp, Artificial
  probe
  misc_feature (1)..(25): SEQ ID NO: 6764; WAN024C33_at; Start 46; Stop 70
ttcaacccgctttgggaggcgatag

SEQ ID NO: 102162 - DNA, 25 bp, Artificial
  probe
  misc_feature (1)..(25): SEQ ID NO: 6764; WAN024C33_at; Start 14; Stop 38
cagcgactcaactgttcgaaaggtt

SEQ ID NO: 102163 - DNA, 25 bp, Artificial
  probe
  misc_feature (1)..(25): SEQ ID NO: 6764; WAN024C33_at; Start 64; Stop 88
gcgatagcttacctaacccaggaag

SEQ ID NO: 102164 - DNA, 25 bp, Artificial
  probe
  misc_feature (1)..(25): SEQ ID NO: 6764; WAN024C33_at; Start 58; Stop 82
tgggaggcgatagcttacctaaccc

SEQ ID NO: 102165 - DNA, 25 bp, Artificial
  probe
  misc_feature (1)..(25): SEQ ID NO: 6764; WAN024C33_at; Start 65; Stop 89
cgatagcttacctaacccaggaaga

SEQ ID NO: 102166 - DNA, 25 bp, Artificial
  probe
  misc_feature (1)..(25): SEQ ID NO: 6764; WAN024C33_at; Start 8; Stop 32
cgagtacagcgactcaactgttcga

SEQ ID NO: 102167 - DNA, 25 bp, Artificial
  probe
  misc_feature (1)..(25): SEQ ID NO: 6764; WAN024C33_at; Start 84; Stop 108
ggaagacctactcgacaatttagag

SEQ ID NO: 102168 - DNA, 25 bp, Artificial
  probe
  misc_feature (1)..(25): SEQ ID NO: 6764; WAN024C33_at; Start 56; Stop 80
tttgggaggcgatagcttacctaac

SEQ ID NO: 102169 - DNA, 25 bp, Artificial
  probe
  misc_feature (1)..(25): SEQ ID NO: 6764; WAN024C33_at; Start 11; Stop 35
gtacagcgactcaactgttcgaaag

SEQ ID NO: 102170 - DNA, 25 bp, Artificial
  probe
  misc_feature (1)..(25): SEQ ID NO: 6764; WAN024C33_at; Start 49; Stop 73
aacccgctttgggaggcgatagctt

SEQ ID NO: 102171 - DNA, 25 bp, Artificial
  probe
  misc_feature (1)..(25): SEQ ID NO: 6764; WAN024C33_at; Start 57; Stop 81
ttgggaggcgatagcttacctaacc

SEQ ID NO: 102172 - DNA, 25 bp, Artificial
  probe
  misc_feature (1)..(25): SEQ ID NO: 6764; WAN024C33_at; Start 81; Stop 105
ccaggaagacctactcgacaattta

SEQ ID NO: 102173 - DNA, 25 bp, Artificial
  probe
  misc_feature (1)..(25): SEQ ID NO: 6764; WAN024C33_at; Start 61; Stop 85
gaggcgatagcttacctaacccagg

SEQ ID NO: 102174 - DNA, 25 bp, Artificial
  probe
  misc_feature (1)..(25): SEQ ID NO: 6764; WAN024C33_at; Start 12; Stop 36
tacagcgactcaactgttcgaaagg

SEQ ID NO: 102175 - DNA, 25 bp, Artificial
  probe
  misc_feature (1)..(25): SEQ ID NO: 6764; WAN024C33_at; Start 9; Stop 33
gagtacagcgactcaactgttcgaa

SEQ ID NO: 102176 - DNA, 25 bp, Artificial
  probe
  misc_feature (1)..(25): SEQ ID NO: 6764; WAN024C33_at; Start 82; Stop 106
caggaagacctactcgacaatttag

SEQ ID NO: 102177 - DNA, 25 bp, Artificial
  probe
  misc_feature (1)..(25): SEQ ID NO: 6764; WAN024C33_at; Start 47; Stop 71
tcaacccgctttgggaggcgatagc

SEQ ID NO: 102178 - DNA, 25 bp, Artificial
  probe
  misc_feature (1)..(25): SEQ ID NO: 6764; WAN024C33_at; Start 18; Stop 42
gactcaactgttcgaaaggtttata

SEQ ID NO: 102179 - DNA, 25 bp, Artificial
  probe
  misc_feature (1)..(25): SEQ ID NO: 6764; WAN024C33_at; Start 16; Stop 40
gcgactcaactgttcgaaaggttta

SEQ ID NO: 102180 - DNA, 25 bp, Artificial
  probe
  misc_feature (1)..(25): SEQ ID NO: 6764; WAN024C33_at; Start 45; Stop 69
tttcaacccgctttgggaggcgata

SEQ ID NO: 102181 - DNA, 25 bp, Artificial
  probe
  misc_feature (1)..(25): SEQ ID NO: 6764; WAN024C33_at; Start 20; Stop 44
ctcaactgttcgaaaggtttataag

SEQ ID NO: 102182 - DNA, 25 bp, Artificial
  probe
  misc_feature (1)..(25): SEQ ID NO: 6764; WAN024C33_at; Start 85; Stop 109
gaagacctactcgacaatttagagt

SEQ ID NO: 102183 - DNA, 25 bp, Artificial
  probe
  misc_feature (1)..(25): SEQ ID NO: 6764; WAN024C33_at; Start 54; Stop 78
gctttgggaggcgatagcttaccta

SEQ ID NO: 102184 - DNA, 25 bp, Artificial
  probe
  misc_feature (1)..(25): SEQ ID NO: 6764; WAN024C33_at; Start 6; Stop 30
tacgagtacagcgactcaactgttc

SEQ ID NO: 102185 - DNA, 25 bp, Artificial
  probe
  misc_feature (1)..(25): SEQ ID NO: 6764; WAN024C33_at; Start 62; Stop 86
aggcgatagcttacctaacccagga

SEQ ID NO: 102186 - DNA, 25 bp, Artificial
  probe
  misc_feature (1)..(25): SEQ ID NO: 7071; WAN024C34_at; Start 466; Stop 490
gcagcgaactaccattcaggtcgag

SEQ ID NO: 102187 - DNA, 25 bp, Artificial
  probe
  misc_feature (1)..(25): SEQ ID NO: 7071; WAN024C34_at; Start 344; Stop 368
tggcatcacatggtgtcaaacctgg

SEQ ID NO: 102188 - DNA, 25 bp, Artificial
  probe
  misc_feature (1)..(25): SEQ ID NO: 7071; WAN024C34_at; Start 158; Stop 182
aaatcgttggactgcgtgtcgggcc

SEQ ID NO: 102189 - DNA, 25 bp, Artificial
  probe
  misc_feature (1)..(25): SEQ ID NO: 7071; WAN024C34_at; Start 271; Stop 295
aacggcattgtgaggcacgctgtca

SEQ ID NO: 102190 - DNA, 25 bp, Artificial
  probe
  misc_feature (1)..(25): SEQ ID NO: 7071; WAN024C34_at; Start 145; Stop 169
cacttcagagaaaaaatcgttggac

SEQ ID NO: 102191 - DNA, 25 bp, Artificial
  probe
  misc_feature (1)..(25): SEQ ID NO: 7071; WAN024C34_at; Start 406; Stop 430
tcacaggaaggagttaccggagtac

SEQ ID NO: 102192 - DNA, 25 bp, Artificial
  probe
  misc_feature (1)..(25): SEQ ID NO: 7071; WAN024C34_at; Start 208; Stop 232
ccgaagaacggctccgggtttgatg

SEQ ID NO: 102193 - DNA, 25 bp, Artificial
  probe
  misc_feature (1)..(25): SEQ ID NO: 7071; WAN024C34_at; Start 328; Stop 352
tccggtttgaccaaagtggcatcac

SEQ ID NO: 102194 - DNA, 25 bp, Artificial
  probe
  misc_feature (1)..(25): SEQ ID NO: 7071; WAN024C34_at; Start 603; Stop 627
tttagacggtcaaacggaacgagca

SEQ ID NO: 102195 - DNA, 25 bp, Artificial
  probe
  misc_feature (1)..(25): SEQ ID NO: 7071; WAN024C34_at; Start 99; Stop 123
ggcctcgtccgttgtcatccacgaa

SEQ ID NO: 102196 - DNA, 25 bp, Artificial
  probe
  misc_feature (1)..(25): SEQ ID NO: 7071; WAN024C34_at; Start 529; Stop 553
gaagaactcttatatcccttaatgc

SEQ ID NO: 102197 - DNA, 25 bp, Artificial
  probe
  misc_feature (1)..(25): SEQ ID NO: 7071; WAN024C34_at; Start 253; Stop 277
gagattgtacttgtggagaacggca

SEQ ID NO: 102198 - DNA, 25 bp, Artificial
  probe
  misc_feature (1)..(25): SEQ ID NO: 7071; WAN024C34_at; Start 482; Stop 506
caggtcgagcctttttcaggtctgg

SEQ ID NO: 102199 - DNA, 25 bp, Artificial
  probe
  misc_feature (1)..(25): SEQ ID NO: 7071; WAN024C34_at; Start 114; Stop 138
catccacgaactgatcggacatggg

SEQ ID NO: 102200 - DNA, 25 bp, Artificial
  probe
  misc_feature (1)..(25): SEQ ID NO: 7071; WAN024C34_at; Start 566; Stop 590
caattgatatctacgaactggccag

SEQ ID NO: 102201 - DNA, 25 bp, Artificial
  probe
  misc_feature (1)..(25): SEQ ID NO: 7071; WAN024C34_at; Start 45; Stop 69
tgaacctagaacgatagacacggtg

SEQ ID NO: 102202 - DNA, 25 bp, Artificial
  probe
  misc_feature (1)..(25): SEQ ID NO: 7071; WAN024C34_at; Start 56; Stop 80
cgatagacacggtgcggtacgacct

SEQ ID NO: 102203 - DNA, 25 bp, Artificial
  probe
  misc_feature (1)..(25): SEQ ID NO: 7071; WAN024C34_at; Start 435; Stop 459
cgaacgcaccgtttggatagagcat

SEQ ID NO: 102204 - DNA, 25 bp, Artificial
  probe
  misc_feature (1)..(25): SEQ ID NO: 7071; WAN024C34_at; Start 131; Stop 155
gacatgggtgcgaacacttcagaga

SEQ ID NO: 102205 - DNA, 25 bp, Artificial
  probe
  misc_feature (1)..(25): SEQ ID NO: 7071; WAN024C34_at; Start 35; Stop 59
tcacctggagtgaacctagaacgat

SEQ ID NO: 102206 - DNA, 25 bp, Artificial
  probe
  misc_feature (1)..(25): SEQ ID NO: 7071; WAN024C34_at; Start 516; Stop 540
ggtaggcagccgagaagaactctta

SEQ ID NO: 102207 - DNA, 25 bp, Artificial
  probe
  misc_feature (1)..(25): SEQ ID NO: 7071; WAN024C34_at; Start 548; Stop 572
taatgcctttcaccatgtcaattga

SEQ ID NO: 102208 - DNA, 25 bp, Artificial
  probe
  misc_feature (1)..(25): SEQ ID NO: 7071; WAN024C34_at; Start 73; Stop 97
tacgacctcgtactactttcgccga

SEQ ID NO: 102209 - DNA, 25 bp, Artificial
  probe
  misc_feature (1)..(25): SEQ ID NO: 7071; WAN024C34_at; Start 590; Stop 614
gcttattgtggcatttagacggtca

SEQ ID NO: 102210 - DNA, 25 bp, Artificial
  probe
  misc_feature (1)..(25): SEQ ID NO: 7071; WAN024C34_at; Start 374; Stop 398
gatgtacgcatctcaaggcggaagg

SEQ ID NO: 102211 - DNA, 25 bp, Artificial
  probe
  misc_feature (1)..(25): SEQ ID NO: 7071; WAN024C34_at; Start 615; Stop 639
aacggaacgagcacgtagggtactg

SEQ ID NO: 102212 - DNA, 25 bp, Artificial
  probe
  misc_feature (1)..(25): SEQ ID NO: 7071; WAN024C34_at; Start 450; Stop 474
gatagagcatttttctgcagcgaac

SEQ ID NO: 102213 - DNA, 25 bp, Artificial
  probe
  misc_feature (1)..(25): SEQ ID NO: 7071; WAN024C34_at; Start 19; Stop 43
tatcctcgggagagggtcacctgga

SEQ ID NO: 102214 - DNA, 25 bp, Artificial
  probe
  misc_feature (1)..(25): SEQ ID NO: 7071; WAN024C34_at; Start 577; Stop 601
tacgaactggccagcttattgtggc

SEQ ID NO: 102215 - DNA, 25 bp, Artificial
  probe
  misc_feature (1)..(25): SEQ ID NO: 7071; WAN024C34_at; Start 220; Stop 244
tccgggtttgatgacgagggtacac

SEQ ID NO: 102216 - DNA, 25 bp, Artificial
  probe
  misc_feature (1)..(25): SEQ ID NO: 7071; WAN024C34_at; Start 502; Stop 526
tctggccttgcctgggtaggcagcc

SEQ ID NO: 102217 - DNA, 25 bp, Artificial
  probe
  misc_feature (1)..(25): SEQ ID NO: 7071; WAN024C34_at; Start 304; Stop 328
gcgactggaggaatggcgccttttt

SEQ ID NO: 102218 - DNA, 25 bp, Artificial
  probe
  misc_feature (1)..(25): SEQ ID NO: 7071; WAN024C34_at; Start 235; Stop 259
gagggtacaccctccgaagagattg

SEQ ID NO: 102219 - DNA, 25 bp, Artificial
  probe
  misc_feature (1)..(25): SEQ ID NO: 7071; WAN024C34_at; Start 359; Stop 383
tcaaacctggctcaagatgtacgca

SEQ ID NO: 102220 - DNA, 25 bp, Artificial
  probe
  misc_feature (1)..(25): SEQ ID NO: 7016; WAN024C35_at; Start 397; Stop 421
aacaagcgcgtgttcgacaacgcca

SEQ ID NO: 102221 - DNA, 25 bp, Artificial
  probe
  misc_feature (1)..(25): SEQ ID NO: 7016; WAN024C35_at; Start 277; Stop 301
gactacctgggcgtggtcaagcaga

SEQ ID NO: 102222 - DNA, 25 bp, Artificial
  probe
  misc_feature (1)..(25): SEQ ID NO: 7016; WAN024C35_at; Start 293; Stop 317
tcaagcagaccgtcggcgtgctggc

SEQ ID NO: 102223 - DNA, 25 bp, Artificial
  probe
  misc_feature (1)..(25): SEQ ID NO: 7016; WAN024C35_at; Start 352; Stop 376
tcggctcacgccgaaaaggcgctga

SEQ ID NO: 102224 - DNA, 25 bp, Artificial
  probe
  misc_feature (1)..(25): SEQ ID NO: 7016; WAN024C35_at; Start 80; Stop 104
agaccggcaccgtcaccgaagaagc

SEQ ID NO: 102225 - DNA, 25 bp, Artificial
  probe
  misc_feature (1)..(25): SEQ ID NO: 7016; WAN024C35_at; Start 328; Stop 352
ctgcccggcccgctgaaggctttgt

SEQ ID NO: 102226 - DNA, 25 bp, Artificial
  probe
  misc_feature (1)..(25): SEQ ID NO: 7016; WAN024C35_at; Start 415; Stop 439
aacgccaaggtgtcggaccacttcg

SEQ ID NO: 102227 - DNA, 25 bp, Artificial
  probe
  misc_feature (1)..(25): SEQ ID NO: 7016; WAN024C35_at; Start 178; Stop 202
ggcttcagcgccaagaccacgctgt

SEQ ID NO: 102228 - DNA, 25 bp, Artificial
  probe
  misc_feature (1)..(25): SEQ ID NO: 7016; WAN024C35_at; Start 364; Stop 388
gaaaaggcgctgaaagagggttaca

SEQ ID NO: 102229 - DNA, 25 bp, Artificial
  probe
  misc_feature (1)..(25): SEQ ID NO: 7016; WAN024C35_at; Start 169; Stop 193
tcgcgcttcggcttcagcgccaaga

SEQ ID NO: 102230 - DNA, 25 bp, Artificial
  probe
  misc_feature (1)..(25): SEQ ID NO: 7016; WAN024C35_at; Start 4; Stop 28
ttcgttgaagccgaactgaagccga

SEQ ID NO: 102231 - DNA, 25 bp, Artificial
  probe
  misc_feature (1)..(25): SEQ ID NO: 7016; WAN024C35_at; Start 112; Stop 136
agcacgcaggccagcccgttgctgt

SEQ ID NO: 102232 - DNA, 25 bp, Artificial
  probe
  misc_feature (1)..(25): SEQ ID NO: 7016; WAN024C35_at; Start 256; Stop 280
gattcacgcgccctgcctgaagact

SEQ ID NO: 102233 - DNA, 25 bp, Artificial
  probe
  misc_feature (1)..(25): SEQ ID NO: 7016; WAN024C35_at; Start 280; Stop 304
tacctgggcgtggtcaagcagaccg

SEQ ID NO: 102234 - DNA, 25 bp, Artificial
  probe
  misc_feature (1)..(25): SEQ ID NO: 7016; WAN024C35_at; Start 53; Stop 77
aggccatcgccgacgcggtgcgcaa

SEQ ID NO: 102235 - DNA, 25 bp, Artificial
  probe
  misc_feature (1)..(25): SEQ ID NO: 7016; WAN024C35_at; Start 369; Stop 393
ggcgctgaaagagggttacatcaaa

SEQ ID NO: 102236 - DNA, 25 bp, Artificial
  probe
  misc_feature (1)..(25): SEQ ID NO: 7016; WAN024C35_at; Start 269; Stop 293
tgcctgaagactacctgggcgtggt

SEQ ID NO: 102237 - DNA, 25 bp, Artificial
  probe
  misc_feature (1)..(25): SEQ ID NO: 7016; WAN024C35_at; Start 222; Stop 246
cgaaaaacacaaggcgctgacctac

SEQ ID NO: 102238 - DNA, 25 bp, Artificial
  probe
  misc_feature (1)..(25): SEQ ID NO: 7016; WAN024C35_at; Start 404; Stop 428
gcgtgttcgacaacgccaaggtgtc

SEQ ID NO: 102239 - DNA, 25 bp, Artificial
  probe
  misc_feature (1)..(25): SEQ ID NO: 7016; WAN024C35_at; Start 206; Stop 230
tggcacaggcgctatacgaaaaaca

SEQ ID NO: 102240 - DNA, 25 bp, Artificial
  probe
  misc_feature (1)..(25): SEQ ID NO: 7016; WAN024C35_at; Start 155; Stop 179
aacgcgaagccaactcgcgcttcgg

SEQ ID NO: 102241 - DNA, 25 bp, Artificial
  probe
  misc_feature (1)..(25): SEQ ID NO: 7016; WAN024C35_at; Start 200; Stop 224
tgtcgctggcacaggcgctatacga

SEQ ID NO: 102242 - DNA, 25 bp, Artificial
  probe
  misc_feature (1)..(25): SEQ ID NO: 7016; WAN024C35_at; Start 8; Stop 32
ttgaagccgaactgaagccgaccgg

SEQ ID NO: 102243 - DNA, 25 bp, Artificial
  probe
  misc_feature (1)..(25): SEQ ID NO: 7016; WAN024C35_at; Start 143; Stop 167
tgaccacgctgcaacgcgaagccaa

SEQ ID NO: 102244 - DNA, 25 bp, Artificial
  probe
  misc_feature (1)..(25): SEQ ID NO: 7016; WAN024C35_at; Start 129; Stop 153
gttgctgtacgacctgaccacgctg

SEQ ID NO: 102245 - DNA, 25 bp, Artificial
  probe
  misc_feature (1)..(25): SEQ ID NO: 7016; WAN024C35_at; Start 384; Stop 408
ttacatcaaacccaacaagcgcgtg

SEQ ID NO: 102246 - DNA, 25 bp, Artificial
  probe
  misc_feature (1)..(25): SEQ ID NO: 7016; WAN024C35_at; Start 35; Stop 59
tggagcgagccgaagcccaggccat

SEQ ID NO: 102247 - DNA, 25 bp, Artificial
  probe
  misc_feature (1)..(25): SEQ ID NO: 7016; WAN024C35_at; Start 124; Stop 148
agcccgttgctgtacgacctgacca

SEQ ID NO: 102248 - DNA, 25 bp, Artificial
  probe
  misc_feature (1)..(25): SEQ ID NO: 7016; WAN024C35_at; Start 64; Stop 88
gacgcggtgcgcaaccagaccggca

SEQ ID NO: 102249 - DNA, 25 bp, Artificial
  probe
  misc_feature (1)..(25): SEQ ID NO: 7016; WAN024C35_at; Start 16; Stop 40
gaactgaagccgaccggtctggagc

SEQ ID NO: 102250 - DNA, 25 bp, Artificial
  probe
  misc_feature (1)..(25): SEQ ID NO: 7016; WAN024C35_at; Start 389; Stop 413
tcaaacccaacaagcgcgtgttcga

SEQ ID NO: 102251 - DNA, 25 bp, Artificial
  probe
  misc_feature (1)..(25): SEQ ID NO: 7016; WAN024C35_at; Start 216; Stop 240
gctatacgaaaaacacaaggcgctg

SEQ ID NO: 102252 - DNA, 25 bp, Artificial
  probe
  misc_feature (1)..(25): SEQ ID NO: 7016; WAN024C35_at; Start 341; Stop 365
tgaaggctttgtcggctcacgccga

SEQ ID NO: 102253 - DNA, 25 bp, Artificial
  probe
  misc_feature (1)..(25): SEQ ID NO: 7016; WAN024C35_at; Start 190; Stop 214
aagaccacgctgtcgctggcacagg

SEQ ID NO: 102254 - DNA, 25 bp, Artificial
  probe
  misc_feature (1)..(25): SEQ ID NO: 6897; WAN024C36_at; Start 71; Stop 95
cgctggtatttgtgctcgggctctt

SEQ ID NO: 102255 - DNA, 25 bp, Artificial
  probe
  misc_feature (1)..(25): SEQ ID NO: 6897; WAN024C36_at; Start 330; Stop 354
gcgcgtcctaggcaagatgtccgac

SEQ ID NO: 102256 - DNA, 25 bp, Artificial
  probe
  misc_feature (1)..(25): SEQ ID NO: 6897; WAN024C36_at; Start 197; Stop 221
tggtcctcatcctcggtattgccgg

SEQ ID NO: 102257 - DNA, 25 bp, Artificial
  probe
  misc_feature (1)..(25): SEQ ID NO: 6897; WAN024C36_at; Start 128; Stop 152
tgggattggagcatcattcgcacct

SEQ ID NO: 102258 - DNA, 25 bp, Artificial
  probe
  misc_feature (1)..(25): SEQ ID NO: 6897; WAN024C36_at; Start 238; Stop 262
aagatgtgggcaagctttgaagccc

SEQ ID NO: 102259 - DNA, 25 bp, Artificial
  probe
  misc_feature (1)..(25): SEQ ID NO: 6897; WAN024C36_at; Start 254; Stop 278
ttgaagcccacgagttcatgccgcg

SEQ ID NO: 102260 - DNA, 25 bp, Artificial
  probe
  misc_feature (1)..(25): SEQ ID NO: 6897; WAN024C36_at; Start 103; Stop 127
ccgatcgatgatgcagtggctgccg

SEQ ID NO: 102261 - DNA, 25 bp, Artificial
  probe
  misc_feature (1)..(25): SEQ ID NO: 6897; WAN024C36_at; Start 64; Stop 88
tctctgccgctggtatttgtgctcg

SEQ ID NO: 102262 - DNA, 25 bp, Artificial
  probe
  misc_feature (1)..(25): SEQ ID NO: 6897; WAN024C36_at; Start 172; Stop 196
aacgttcctttccttatctcgctag

SEQ ID NO: 102263 - DNA, 25 bp, Artificial
  probe
  misc_feature (1)..(25): SEQ ID NO: 6897; WAN024C36_at; Start 21; Stop 45
accagtgtcgctgtggctacctgca

SEQ ID NO: 102264 - DNA, 25 bp, Artificial
  probe
  misc_feature (1)..(25): SEQ ID NO: 6897; WAN024C36_at; Start 46; Stop 70
gctttgccgggctttatgtctctgc

SEQ ID NO: 102265 - DNA, 25 bp, Artificial
  probe
  misc_feature (1)..(25): SEQ ID NO: 6897; WAN024C36_at; Start 298; Stop 322
tactccttgatgaagggctgctccc

SEQ ID NO: 102266 - DNA, 25 bp, Artificial
  probe
  misc_feature (1)..(25): SEQ ID NO: 6897; WAN024C36_at; Start 7; Stop 31
gatgtccatgaagcaccagtgtcgc

SEQ ID NO: 102267 - DNA, 25 bp, Artificial
  probe
  misc_feature (1)..(25): SEQ ID NO: 6897; WAN024C36_at; Start 211; Stop 235
ggtattgccggtatctttgcccgca

SEQ ID NO: 102268 - DNA, 25 bp, Artificial
  probe
  misc_feature (1)..(25): SEQ ID NO: 6897; WAN024C36_at; Start 230; Stop 254
cccgcaagaagatgtgggcaagctt

SEQ ID NO: 102269 - DNA, 25 bp, Artificial
  probe
  misc_feature (1)..(25): SEQ ID NO: 6897; WAN024C36_at; Start 183; Stop 207
ccttatctcgctagtggtcctcatc

SEQ ID NO: 102270 - DNA, 25 bp, Artificial
  probe
  misc_feature (1)..(25): SEQ ID NO: 6897; WAN024C36_at; Start 96; Stop 120
tgatgccccgatcgatgatgcagtg

SEQ ID NO: 102271 - DNA, 25 bp, Artificial
  probe
  misc_feature (1)..(25): SEQ ID NO: 6897; WAN024C36_at; Start 289; Stop 313
gatttgctgtactccttgatgaagg

SEQ ID NO: 102272 - DNA, 25 bp, Artificial
  probe
  misc_feature (1)..(25): SEQ ID NO: 6897; WAN024C36_at; Start 275; Stop 299
cgcgcagcggcaatgatttgctgta

SEQ ID NO: 102273 - DNA, 25 bp, Artificial
  probe
  misc_feature (1)..(25): SEQ ID NO: 6897; WAN024C36_at; Start 304; Stop 328
ttgatgaagggctgctcccagttgg

SEQ ID NO: 102274 - DNA, 25 bp, Artificial
  probe
  misc_feature (1)..(25): SEQ ID NO: 6897; WAN024C36_at; Start 152; Stop 176
ttgccctctggcacgggctcaacgt

SEQ ID NO: 102275 - DNA, 25 bp, Artificial
  probe
  misc_feature (1)..(25): SEQ ID NO: 6897; WAN024C36_at; Start 2; Stop 26
tgggagatgtccatgaagcaccagt

SEQ ID NO: 102276 - DNA, 25 bp, Artificial
  probe
  misc_feature (1)..(25): SEQ ID NO: 6897; WAN024C36_at; Start 121; Stop 145
gctgccgtgggattggagcatcatt

SEQ ID NO: 102277 - DNA, 25 bp, Artificial
  probe
  misc_feature (1)..(25): SEQ ID NO: 6897; WAN024C36_at; Start 158; Stop 182
tctggcacgggctcaacgttccttt

SEQ ID NO: 102278 - DNA, 25 bp, Artificial
  probe
  misc_feature (1)..(25): SEQ ID NO: 6897; WAN024C36_at; Start 81; Stop 105
tgtgctcgggctctttgatgccccg

SEQ ID NO: 102279 - DNA, 25 bp, Artificial
  probe
  misc_feature (1)..(25): SEQ ID NO: 6897; WAN024C36_at; Start 13; Stop 37
catgaagcaccagtgtcgctgtggc

SEQ ID NO: 102280 - DNA, 25 bp, Artificial
  probe
  misc_feature (1)..(25): SEQ ID NO: 6897; WAN024C36_at; Start 134; Stop 158
tggagcatcattcgcaccttgccct

SEQ ID NO: 102281 - DNA, 25 bp, Artificial
  probe
  misc_feature (1)..(25): SEQ ID NO: 6897; WAN024C36_at; Start 267; Stop 291
gttcatgccgcgcagcggcaatgat

SEQ ID NO: 102282 - DNA, 25 bp, Artificial
  probe
  misc_feature (1)..(25): SEQ ID NO: 6897; WAN024C36_at; Start 34; Stop 58
tggctacctgcagctttgccgggct

SEQ ID NO: 102283 - DNA, 25 bp, Artificial
  probe
  misc_feature (1)..(25): SEQ ID NO: 6897; WAN024C36_at; Start 224; Stop 248
tctttgcccgcaagaagatgtgggc

SEQ ID NO: 102284 - DNA, 25 bp, Artificial
  probe
  misc_feature (1)..(25): SEQ ID NO: 6897; WAN024C36_at; Start 342; Stop 366
caagatgtccgactcgcataatcca

SEQ ID NO: 102285 - DNA, 25 bp, Artificial
  probe
  misc_feature (1)..(25): SEQ ID NO: 6897; WAN024C36_at; Start 247; Stop 271
gcaagctttgaagcccacgagttca

SEQ ID NO: 102286 - DNA, 25 bp, Artificial
  probe
  misc_feature (1)..(25): SEQ ID NO: 6897; WAN024C36_at; Start 54; Stop 78
gggctttatgtctctgccgctggta

SEQ ID NO: 102287 - DNA, 25 bp, Artificial
  probe
  misc_feature (1)..(25): SEQ ID NO: 6897; WAN024C36_at; Start 367; Stop 391
tcccgcacatgctgccgattgtcat

SEQ ID NO: 102288 - DNA, 25 bp, Artificial
  probe
  misc_feature (1)..(25): SEQ ID NO: 6871; WAN024C37_at; Start 73; Stop 97
gatgcagtgaaagttaccctcggcc

SEQ ID NO: 102289 - DNA, 25 bp, Artificial
  probe
  misc_feature (1)..(25): SEQ ID NO: 6871; WAN024C37_at; Start 731; Stop 755
gcaaaccgctgctgatcatcgctga

SEQ ID NO: 102290 - DNA, 25 bp, Artificial
  probe
  misc_feature (1)..(25): SEQ ID NO: 6871; WAN024C37_at; Start 576; Stop 600
tatgcagttcgaccgtggctacctg

SEQ ID NO: 102291 - DNA, 25 bp, Artificial
  probe
  misc_feature (1)..(25): SEQ ID NO: 6871; WAN024C37_at; Start 163; Stop 187
tccgtagcacgtgaaatcgaactgg

SEQ ID NO: 102292 - DNA, 25 bp, Artificial
  probe
  misc_feature (1)..(25): SEQ ID NO: 6871; WAN024C37_at; Start 948; Stop 972
tctgggccaggcgaaacgcgttgtt

SEQ ID NO: 102293 - DNA, 25 bp, Artificial
  probe
  misc_feature (1)..(25): SEQ ID NO: 6871; WAN024C37_at; Start 828; Stop 852
taaagcacctggcttcggcgatcgt

SEQ ID NO: 102294 - DNA, 25 bp, Artificial
  probe
  misc_feature (1)..(25): SEQ ID NO: 6871; WAN024C37_at; Start 1063; Stop 1087
gaagcaacttccgactatgaccgtg

SEQ ID NO: 102295 - DNA, 25 bp, Artificial
  probe
  misc_feature (1)..(25): SEQ ID NO: 6871; WAN024C37_at; Start 39; Stop 63
tgtgaaaatgctgcgcggcgtaaac

SEQ ID NO: 102296 - DNA, 25 bp, Artificial
  probe
  misc_feature (1)..(25): SEQ ID NO: 6871; WAN024C37_at; Start 844; Stop 868
ggcgatcgtcgtaaagcaatgctgc

SEQ ID NO: 102297 - DNA, 25 bp, Artificial
  probe
  misc_feature (1)..(25): SEQ ID NO: 6871; WAN024C37_at; Start 1571; Stop 1595
tgccgaaaggcgatgcacctgactt

SEQ ID NO: 102298 - DNA, 25 bp, Artificial
  probe
  misc_feature (1)..(25): SEQ ID NO: 6871; WAN024C37_at; Start 1432; Stop 1456
tacaacgctgcaactgaagaatacg

SEQ ID NO: 102299 - DNA, 25 bp, Artificial
  probe
  misc_feature (1)..(25): SEQ ID NO: 6871; WAN024C37_at; Start 633; Stop 657
cgcagtagaattggaaagcccgttc

SEQ ID NO: 102300 - DNA, 25 bp, Artificial
  probe
  misc_feature (1)..(25): SEQ ID NO: 6871; WAN024C37_at; Start 614; Stop 638
tcaacaagccggaaactggcgcagt

SEQ ID NO: 102301 - DNA, 25 bp, Artificial
  probe
  misc_feature (1)..(25): SEQ ID NO: 6871; WAN024C37_at; Start 226; Stop 250
gaagttgcctctaaagcgaacgacg

SEQ ID NO: 102302 - DNA, 25 bp, Artificial
  probe
  misc_feature (1)..(25): SEQ ID NO: 6871; WAN024C37_at; Start 708; Stop 732
tctggaagctgtagcgaaagcaggc

SEQ ID NO: 102303 - DNA, 25 bp, Artificial
  probe
  misc_feature (1)..(25): SEQ ID NO: 6871; WAN024C37_at; Start 1556; Stop 1580
gcatggttaccgacctgccgaaagg

SEQ ID NO: 102304 - DNA, 25 bp, Artificial
  probe
  misc_feature (1)..(25): SEQ ID NO: 6871; WAN024C37_at; Start 869; Stop 893
aggatatcgctaccctgaccggtgg

SEQ ID NO: 102305 - DNA, 25 bp, Artificial
  probe
  misc_feature (1)..(25): SEQ ID NO: 6871; WAN024C37_at; Start 466; Stop 490
gaaaccgtaggtaaactgatcgctg

SEQ ID NO: 102306 - DNA, 25 bp, Artificial
  probe
  misc_feature (1)..(25): SEQ ID NO: 6871; WAN024C37_at; Start 345; Stop 369
tctgaaacgtggtatcgacaaagct

SEQ ID NO: 102307 - DNA, 25 bp, Artificial
  probe
  misc_feature (1)..(25): SEQ ID NO: 6871; WAN024C37_at; Start 1265; Stop 1289
tagcgtctaaaattgccggcctgaa

SEQ ID NO: 102308 - DNA, 25 bp, Artificial
  probe
  misc_feature (1)..(25): SEQ ID NO: 6871; WAN024C37_at; Start 54; Stop 78
cggcgtaaacgtactggcagatgca

SEQ ID NO: 102309 - DNA, 25 bp, Artificial
  probe
  misc_feature (1)..(25): SEQ ID NO: 6871; WAN024C37_at; Start 330; Stop 354
catgaacccgatggatctgaaacgt

SEQ ID NO: 102310 - DNA, 25 bp, Artificial
  probe
  misc_feature (1)..(25): SEQ ID NO: 6871; WAN024C37_at; Start 540; Stop 564
taccggtctgcaggacgaactggac

SEQ ID NO: 102311 - DNA, 25 bp, Artificial
  probe
  misc_feature (1)..(25): SEQ ID NO: 6871; WAN024C37_at; Start 659; Stop 683
tcctgctggctgacaagaaaatctc

SEQ ID NO: 102312 - DNA, 25 bp, Artificial
  probe
  misc_feature (1)..(25): SEQ ID NO: 6871; WAN024C37_at; Start 192; Stop 216
caagttcgaaaacatgggtgcgcag

SEQ ID NO: 102313 - DNA, 25 bp, Artificial
  probe
  misc_feature (1)..(25): SEQ ID NO: 6871; WAN024C37_at; Start 1174; Stop 1198
aagaaagcccgcgttgaagatgccc

SEQ ID NO: 102314 - DNA, 25 bp, Artificial
  probe
  misc_feature (1)..(25): SEQ ID NO: 6871; WAN024C37_at; Start 1313; Stop 1337
taggtatcaaagttgcgctgcgcgc

SEQ ID NO: 102315 - DNA, 25 bp, Artificial
  probe
  misc_feature (1)..(25): SEQ ID NO: 6871; WAN024C37_at; Start 1340; Stop 1364
tggaatccccactgcgtcaaatcgt

SEQ ID NO: 102316 - DNA, 25 bp, Artificial
  probe
  misc_feature (1)..(25): SEQ ID NO: 6871; WAN024C37_at; Start 424; Stop 448
aaagctattgctcaggttggtacca

SEQ ID NO: 102317 - DNA, 25 bp, Artificial
  probe
  misc_feature (1)..(25): SEQ ID NO: 6871; WAN024C37_at; Start 1355; Stop 1379
gtcaaatcgtactgaactgcggcga

SEQ ID NO: 102318 - DNA, 25 bp, Artificial
  probe
  misc_feature (1)..(25): SEQ ID NO: 6871; WAN024C37_at; Start 1080; Stop 1104
tgaccgtgaaaaactgcaggagcgc

SEQ ID NO: 102319 - DNA, 25 bp, Artificial
  probe
  misc_feature (1)..(25): SEQ ID NO: 6871; WAN024C37_at; Start 931; Stop 955
aaagcaactctggaagatctgggcc

SEQ ID NO: 102320 - DNA, 25 bp, Artificial
  probe
  misc_feature (1)..(25): SEQ ID NO: 6871; WAN024C37_at; Start 1534; Stop 1558
ggtctgatgatcaccaccgagtgca

SEQ ID NO: 102321 - DNA, 25 bp, Artificial
  probe
  misc_feature (1)..(25): SEQ ID NO: 6871; WAN024C37_at; Start 388; Stop 412
gaactgaaagcactgtccgtaccgt

SEQ ID NO: 102322 - DNA, 25 bp, Artificial
  probe
  misc_feature (1)..(25): SEQ ID NO: 7086; WAN024C38_at; Start 17; Stop 41
gaaggattttacaaatagctgtgaa

SEQ ID NO: 102323 - DNA, 25 bp, Artificial
  probe
  misc_feature (1)..(25): SEQ ID NO: 7086; WAN024C38_at; Start 14; Stop 38
ctggaaggattttacaaatagctgt

SEQ ID NO: 102324 - DNA, 25 bp, Artificial
  probe
  misc_feature (1)..(25): SEQ ID NO: 7086; WAN024C38_at; Start 12; Stop 36
ttctggaaggattttacaaatagct

SEQ ID NO: 102325 - DNA, 25 bp, Artificial
  probe
  misc_feature (1)..(25): SEQ ID NO: 7086; WAN024C38_at; Start 11; Stop 35
tttctggaaggattttacaaatagc

SEQ ID NO: 102326 - DNA, 25 bp, Artificial
  probe
  misc_feature (1)..(25): SEQ ID NO: 7086; WAN024C38_at; Start 16; Stop 40
ggaaggattttacaaatagctgtga

SEQ ID NO: 102327 - DNA, 25 bp, Artificial
  probe
  misc_feature (1)..(25): SEQ ID NO: 7086; WAN024C38_at; Start 9; Stop 33
gatttctggaaggattttacaaata

SEQ ID NO: 102328 - DNA, 25 bp, Artificial
  probe
  misc_feature (1)..(25): SEQ ID NO: 7086; WAN024C38_at; Start 10; Stop 34
atttctggaaggattttacaaatag

SEQ ID NO: 102329 - DNA, 25 bp, Artificial
  probe
  misc_feature (1)..(25): SEQ ID NO: 7086; WAN024C38_at; Start 13; Stop 37
tctggaaggattttacaaatagctg

SEQ ID NO: 102330 - DNA, 25 bp, Artificial
  probe
  misc_feature (1)..(25): SEQ ID NO: 7086; WAN024C38_at; Start 8; Stop 32
agatttctggaaggattttacaaat

SEQ ID NO: 102331 - DNA, 25 bp, Artificial
  probe
  misc_feature (1)..(25): SEQ ID NO: 7151; WAN024C39_at; Start 11; Stop 35
caaagtctcaatcttggtcaaaaag

SEQ ID NO: 102332 - DNA, 25 bp, Artificial
  probe
  misc_feature (1)..(25): SEQ ID NO: 7151; WAN024C39_at; Start 16; Stop 40
tctcaatcttggtcaaaaagctttt

SEQ ID NO: 102333 - DNA, 25 bp, Artificial
  probe
  misc_feature (1)..(25): SEQ ID NO: 7151; WAN024C39_at; Start 3; Stop 27
ggtaattccaaagtctcaatcttgg

SEQ ID NO: 102334 - DNA, 25 bp, Artificial
  probe
  misc_feature (1)..(25): SEQ ID NO: 7151; WAN024C39_at; Start 40; Stop 64
ttgacggaaatcagccaaccaagct

SEQ ID NO: 102335 - DNA, 25 bp, Artificial
  probe
  misc_feature (1)..(25): SEQ ID NO: 7151; WAN024C39_at; Start 38; Stop 62
ttttgacggaaatcagccaaccaag

SEQ ID NO: 102336 - DNA, 25 bp, Artificial
  probe
  misc_feature (1)..(25): SEQ ID NO: 7151; WAN024C39_at; Start 39; Stop 63
tttgacggaaatcagccaaccaagc

SEQ ID NO: 102337 - DNA, 25 bp, Artificial
  probe
  misc_feature (1)..(25): SEQ ID NO: 7151; WAN024C39_at; Start 6; Stop 30
aattccaaagtctcaatcttggtca

SEQ ID NO: 102338 - DNA, 25 bp, Artificial
  probe
  misc_feature (1)..(25): SEQ ID NO: 7151; WAN024C39_at; Start 37; Stop 61
tttttgacggaaatcagccaaccaa

SEQ ID NO: 102339 - DNA, 25 bp, Artificial
  probe
  misc_feature (1)..(25): SEQ ID NO: 7151; WAN024C39_at; Start 15; Stop 39
gtctcaatcttggtcaaaaagcttt

SEQ ID NO: 102340 - DNA, 25 bp, Artificial
  probe
  misc_feature (1)..(25): SEQ ID NO: 7151; WAN024C39_at; Start 34; Stop 58
agctttttgacggaaatcagccaac

SEQ ID NO: 102341 - DNA, 25 bp, Artificial
  probe
  misc_feature (1)..(25): SEQ ID NO: 7151; WAN024C39_at; Start 55; Stop 79
caaccaagcttggttccagcggtgc

SEQ ID NO: 102342 - DNA, 25 bp, Artificial
  probe
  misc_feature (1)..(25): SEQ ID NO: 7151; WAN024C39_at; Start 58; Stop 82
ccaagcttggttccagcggtgcatt

SEQ ID NO: 102343 - DNA, 25 bp, Artificial
  probe
  misc_feature (1)..(25): SEQ ID NO: 7151; WAN024C39_at; Start 41; Stop 65
tgacggaaatcagccaaccaagctt

SEQ ID NO: 102344 - DNA, 25 bp, Artificial
  probe
  misc_feature (1)..(25): SEQ ID NO: 7151; WAN024C39_at; Start 60; Stop 84
aagcttggttccagcggtgcattct

SEQ ID NO: 102345 - DNA, 25 bp, Artificial
  probe
  misc_feature (1)..(25): SEQ ID NO: 7151; WAN024C39_at; Start 61; Stop 85
agcttggttccagcggtgcattcta

SEQ ID NO: 102346 - DNA, 25 bp, Artificial
  probe
  misc_feature (1)..(25): SEQ ID NO: 7151; WAN024C39_at; Start 59; Stop 83
caagcttggttccagcggtgcattc

SEQ ID NO: 102347 - DNA, 25 bp, Artificial
  probe
  misc_feature (1)..(25): SEQ ID NO: 7151; WAN024C39_at; Start 53; Stop 77
gccaaccaagcttggttccagcggt

SEQ ID NO: 102348 - DNA, 25 bp, Artificial
  probe
  misc_feature (1)..(25): SEQ ID NO: 7151; WAN024C39_at; Start 43; Stop 67
acggaaatcagccaaccaagcttgg

SEQ ID NO: 102349 - DNA, 25 bp, Artificial
  probe
  misc_feature (1)..(25): SEQ ID NO: 7151; WAN024C39_at; Start 47; Stop 71
aaatcagccaaccaagcttggttcc

SEQ ID NO: 102350 - DNA, 25 bp, Artificial
  probe
  misc_feature (1)..(25): SEQ ID NO: 7151; WAN024C39_at; Start 46; Stop 70
gaaatcagccaaccaagcttggttc

SEQ ID NO: 102351 - DNA, 25 bp, Artificial
  probe
  misc_feature (1)..(25): SEQ ID NO: 7151; WAN024C39_at; Start 56; Stop 80
aaccaagcttggttccagcggtgca

SEQ ID NO: 102352 - DNA, 25 bp, Artificial
  probe
  misc_feature (1)..(25): SEQ ID NO: 7151; WAN024C39_at; Start 45; Stop 69
ggaaatcagccaaccaagcttggtt

SEQ ID NO: 102353 - DNA, 25 bp, Artificial
  probe
  misc_feature (1)..(25): SEQ ID NO: 7151; WAN024C39_at; Start 13; Stop 37
aagtctcaatcttggtcaaaaagct

SEQ ID NO: 102354 - DNA, 25 bp, Artificial
  probe
  misc_feature (1)..(25): SEQ ID NO: 7151; WAN024C39_at; Start 29; Stop 53
caaaaagctttttgacggaaatcag

SEQ ID NO: 102355 - DNA, 25 bp, Artificial
  probe
  misc_feature (1)..(25): SEQ ID NO: 7151; WAN024C39_at; Start 32; Stop 56
aaagctttttgacggaaatcagcca

SEQ ID NO: 102356 - DNA, 25 bp, Artificial
  probe
  misc_feature (1)..(25): SEQ ID NO: 7151; WAN024C39_at; Start 57; Stop 81
accaagcttggttccagcggtgcat

SEQ ID NO: 102357 - DNA, 25 bp, Artificial
  probe
  misc_feature (1)..(25): SEQ ID NO: 7151; WAN024C39_at; Start 51; Stop 75
cagccaaccaagcttggttccagcg

SEQ ID NO: 102358 - DNA, 25 bp, Artificial
  probe
  misc_feature (1)..(25): SEQ ID NO: 7151; WAN024C39_at; Start 2; Stop 26
tggtaattccaaagtctcaatcttg

SEQ ID NO: 102359 - DNA, 25 bp, Artificial
  probe
  misc_feature (1)..(25): SEQ ID NO: 7151; WAN024C39_at; Start 63; Stop 87
cttggttccagcggtgcattctaac

SEQ ID NO: 102360 - DNA, 25 bp, Artificial
  probe
  misc_feature (1)..(25): SEQ ID NO: 7151; WAN024C39_at; Start 49; Stop 73
atcagccaaccaagcttggttccag

SEQ ID NO: 102361 - DNA, 25 bp, Artificial
  probe
  misc_feature (1)..(25): SEQ ID NO: 7151; WAN024C39_at; Start 35; Stop 59
gctttttgacggaaatcagccaacc

SEQ ID NO: 102362 - DNA, 25 bp, Artificial
  probe
  misc_feature (1)..(25): SEQ ID NO: 7151; WAN024C39_at; Start 18; Stop 42
tcaatcttggtcaaaaagctttttg

SEQ ID NO: 102363 - DNA, 25 bp, Artificial
  probe
  misc_feature (1)..(25): SEQ ID NO: 7151; WAN024C39_at; Start 36; Stop 60
ctttttgacggaaatcagccaacca

SEQ ID NO: 102364 - DNA, 25 bp, Artificial
  probe
  misc_feature (1)..(25): SEQ ID NO: 7151; WAN024C39_at; Start 44; Stop 68
cggaaatcagccaaccaagcttggt

SEQ ID NO: 102365 - DNA, 25 bp, Artificial
  probe
  misc_feature (1)..(25): SEQ ID NO: 6630; WAN024C3A_at; Start 28; Stop 52
ttttcccaacttcaaacatgcttag

SEQ ID NO: 102366 - DNA, 25 bp, Artificial
  probe
  misc_feature (1)..(25): SEQ ID NO: 6630; WAN024C3A_at; Start 33; Stop 57
ccaacttcaaacatgcttaggacaa

SEQ ID NO: 102367 - DNA, 25 bp, Artificial
  probe
  misc_feature (1)..(25): SEQ ID NO: 6630; WAN024C3A_at; Start 38; Stop 62
ttcaaacatgcttaggacaagagga

SEQ ID NO: 102368 - DNA, 25 bp, Artificial
  probe
  misc_feature (1)..(25): SEQ ID NO: 6630; WAN024C3A_at; Start 27; Stop 51
tttttcccaacttcaaacatgctta

SEQ ID NO: 102369 - DNA, 25 bp, Artificial
  probe
  misc_feature (1)..(25): SEQ ID NO: 6630; WAN024C3A_at; Start 39; Stop 63
tcaaacatgcttaggacaagaggaa

SEQ ID NO: 102370 - DNA, 25 bp, Artificial
  probe
  misc_feature (1)..(25): SEQ ID NO: 6630; WAN024C3A_at; Start 36; Stop 60
acttcaaacatgcttaggacaagag

SEQ ID NO: 102371 - DNA, 25 bp, Artificial
  probe
  misc_feature (1)..(25): SEQ ID NO: 6630; WAN024C3A_at; Start 24; Stop 48
agatttttcccaacttcaaacatgc

SEQ ID NO: 102372 - DNA, 25 bp, Artificial
  probe
  misc_feature (1)..(25): SEQ ID NO: 6630; WAN024C3A_at; Start 32; Stop 56
cccaacttcaaacatgcttaggaca

SEQ ID NO: 102373 - DNA, 25 bp, Artificial
  probe
  misc_feature (1)..(25): SEQ ID NO: 6630; WAN024C3A_at; Start 37; Stop 61
cttcaaacatgcttaggacaagagg

SEQ ID NO: 102374 - DNA, 25 bp, Artificial
  probe
  misc_feature (1)..(25): SEQ ID NO: 6630; WAN024C3A_at; Start 26; Stop 50
atttttcccaacttcaaacatgctt

SEQ ID NO: 102375 - DNA, 25 bp, Artificial
  probe
  misc_feature (1)..(25): SEQ ID NO: 6630; WAN024C3A_at; Start 25; Stop 49
gatttttcccaacttcaaacatgct

SEQ ID NO: 102376 - DNA, 25 bp, Artificial
  probe
  misc_feature (1)..(25): SEQ ID NO: 6630; WAN024C3A_at; Start 40; Stop 64
caaacatgcttaggacaagaggaag

SEQ ID NO: 102377 - DNA, 25 bp, Artificial
  probe
  misc_feature (1)..(25): SEQ ID NO: 6630; WAN024C3A_at; Start 31; Stop 55
tcccaacttcaaacatgcttaggac

SEQ ID NO: 102378 - DNA, 25 bp, Artificial
  probe
  misc_feature (1)..(25): SEQ ID NO: 6630; WAN024C3A_at; Start 34; Stop 58
caacttcaaacatgcttaggacaag

SEQ ID NO: 102379 - DNA, 25 bp, Artificial
  probe
  misc_feature (1)..(25): SEQ ID NO: 6630; WAN024C3A_at; Start 30; Stop 54
ttcccaacttcaaacatgcttagga

SEQ ID NO: 102380 - DNA, 25 bp, Artificial
  probe
  misc_feature (1)..(25): SEQ ID NO: 6630; WAN024C3A_at; Start 35; Stop 59
aacttcaaacatgcttaggacaaga

SEQ ID NO: 102381 - DNA, 25 bp, Artificial
  probe
  misc_feature (1)..(25): SEQ ID NO: 6630; WAN024C3A_at; Start 23; Stop 47
aagatttttcccaacttcaaacatg

SEQ ID NO: 102382 - DNA, 25 bp, Artificial
  probe
  misc_feature (1)..(25): SEQ ID NO: 6630; WAN024C3A_at; Start 29; Stop 53
tttcccaacttcaaacatgcttagg

SEQ ID NO: 102383 - DNA, 25 bp, Artificial
  probe
  misc_feature (1)..(25): SEQ ID NO: 7250; WAN024C3B_at; Start 40; Stop 64
gaagaggtgactgaggaaggtccac

SEQ ID NO: 102384 - DNA, 25 bp, Artificial
  probe
  misc_feature (1)..(25): SEQ ID NO: 7250; WAN024C3B_at; Start 31; Stop 55
gaaaaaattgaagaggtgactgagg

SEQ ID NO: 102385 - DNA, 25 bp, Artificial
  probe
  misc_feature (1)..(25): SEQ ID NO: 7250; WAN024C3B_at; Start 41; Stop 65
aagaggtgactgaggaaggtccacc

SEQ ID NO: 102386 - DNA, 25 bp, Artificial
  probe
  misc_feature (1)..(25): SEQ ID NO: 7250; WAN024C3B_at; Start 39; Stop 63
tgaagaggtgactgaggaaggtcca

SEQ ID NO: 102387 - DNA, 25 bp, Artificial
  probe
  misc_feature (1)..(25): SEQ ID NO: 7250; WAN024C3B_at; Start 48; Stop 72
gactgaggaaggtccaccactttac

SEQ ID NO: 102388 - DNA, 25 bp, Artificial
  probe
  misc_feature (1)..(25): SEQ ID NO: 7250; WAN024C3B_at; Start 45; Stop 69
ggtgactgaggaaggtccaccactt

SEQ ID NO: 102389 - DNA, 25 bp, Artificial
  probe
  misc_feature (1)..(25): SEQ ID NO: 7250; WAN024C3B_at; Start 30; Stop 54
tgaaaaaattgaagaggtgactgag

SEQ ID NO: 102390 - DNA, 25 bp, Artificial
  probe
  misc_feature (1)..(25): SEQ ID NO: 7250; WAN024C3B_at; Start 62; Stop 86
caccactttacaaagtccctgctaa

SEQ ID NO: 102391 - DNA, 25 bp, Artificial
  probe
  misc_feature (1)..(25): SEQ ID NO: 7250; WAN024C3B_at; Start 38; Stop 62
ttgaagaggtgactgaggaaggtcc

SEQ ID NO: 102392 - DNA, 25 bp, Artificial
  probe
  misc_feature (1)..(25): SEQ ID NO: 7250; WAN024C3B_at; Start 60; Stop 84
tccaccactttacaaagtccctgct

SEQ ID NO: 102393 - DNA, 25 bp, Artificial
  probe
  misc_feature (1)..(25): SEQ ID NO: 7250; WAN024C3B_at; Start 22; Stop 46
ctcccagttgaaaaaattgaagagg

SEQ ID NO: 102394 - DNA, 25 bp, Artificial
  probe
  misc_feature (1)..(25): SEQ ID NO: 7250; WAN024C3B_at; Start 46; Stop 70
gtgactgaggaaggtccaccacttt

SEQ ID NO: 102395 - DNA, 25 bp, Artificial
  probe
  misc_feature (1)..(25): SEQ ID NO: 7250; WAN024C3B_at; Start 32; Stop 56
aaaaaattgaagaggtgactgagga

SEQ ID NO: 102396 - DNA, 25 bp, Artificial
  probe
  misc_feature (1)..(25): SEQ ID NO: 7250; WAN024C3B_at; Start 63; Stop 87
accactttacaaagtccctgctaag

SEQ ID NO: 102397 - DNA, 25 bp, Artificial
  probe
  misc_feature (1)..(25): SEQ ID NO: 7250; WAN024C3B_at; Start 51; Stop 75
tgaggaaggtccaccactttacaaa

SEQ ID NO: 102398 - DNA, 25 bp, Artificial
  probe
  misc_feature (1)..(25): SEQ ID NO: 7250; WAN024C3B_at; Start 25; Stop 49
ccagttgaaaaaattgaagaggtga

SEQ ID NO: 102399 - DNA, 25 bp, Artificial
  probe
  misc_feature (1)..(25): SEQ ID NO: 7250; WAN024C3B_at; Start 47; Stop 71
tgactgaggaaggtccaccacttta

SEQ ID NO: 102400 - DNA, 25 bp, Artificial
  probe
  misc_feature (1)..(25): SEQ ID NO: 7250; WAN024C3B_at; Start 50; Stop 74
ctgaggaaggtccaccactttacaa

SEQ ID NO: 102401 - DNA, 25 bp, Artificial
  probe
  misc_feature (1)..(25): SEQ ID NO: 7250; WAN024C3B_at; Start 33; Stop 57
aaaaattgaagaggtgactgaggaa

SEQ ID NO: 102402 - DNA, 25 bp, Artificial
  probe
  misc_feature (1)..(25): SEQ ID NO: 7250; WAN024C3B_at; Start 70; Stop 94
tacaaagtccctgctaaggccctaa

SEQ ID NO: 102403 - DNA, 25 bp, Artificial
  probe
  misc_feature (1)..(25): SEQ ID NO: 7250; WAN024C3B_at; Start 44; Stop 68
aggtgactgaggaaggtccaccact

SEQ ID NO: 102404 - DNA, 25 bp, Artificial
  probe
  misc_feature (1)..(25): SEQ ID NO: 7250; WAN024C3B_at; Start 43; Stop 67
gaggtgactgaggaaggtccaccac

SEQ ID NO: 102405 - DNA, 25 bp, Artificial
  probe
  misc_feature (1)..(25): SEQ ID NO: 7250; WAN024C3B_at; Start 21; Stop 45
cctcccagttgaaaaaattgaagag

SEQ ID NO: 102406 - DNA, 25 bp, Artificial
  probe
  misc_feature (1)..(25): SEQ ID NO: 7250; WAN024C3B_at; Start 49; Stop 73
actgaggaaggtccaccactttaca

SEQ ID NO: 102407 - DNA, 25 bp, Artificial
  probe
  misc_feature (1)..(25): SEQ ID NO: 7250; WAN024C3B_at; Start 61; Stop 85
ccaccactttacaaagtccctgcta

SEQ ID NO: 102408 - DNA, 25 bp, Artificial
  probe
  misc_feature (1)..(25): SEQ ID NO: 7250; WAN024C3B_at; Start 72; Stop 96
caaagtccctgctaaggccctaatt

SEQ ID NO: 102409 - DNA, 25 bp, Artificial
  probe
  misc_feature (1)..(25): SEQ ID NO: 7250; WAN024C3B_at; Start 59; Stop 83
gtccaccactttacaaagtccctgc

SEQ ID NO: 102410 - DNA, 25 bp, Artificial
  probe
  misc_feature (1)..(25): SEQ ID NO: 7250; WAN024C3B_at; Start 64; Stop 88
ccactttacaaagtccctgctaagg

SEQ ID NO: 102411 - DNA, 25 bp, Artificial
  probe
  misc_feature (1)..(25): SEQ ID NO: 7250; WAN024C3B_at; Start 42; Stop 66
agaggtgactgaggaaggtccacca

SEQ ID NO: 102412 - DNA, 25 bp, Artificial
  probe
  misc_feature (1)..(25): SEQ ID NO: 7250; WAN024C3B_at; Start 65; Stop 89
cactttacaaagtccctgctaaggc

SEQ ID NO: 102413 - DNA, 25 bp, Artificial
  probe
  misc_feature (1)..(25): SEQ ID NO: 7250; WAN024C3B_at; Start 69; Stop 93
ttacaaagtccctgctaaggcccta

SEQ ID NO: 102414 - DNA, 25 bp, Artificial
  probe
  misc_feature (1)..(25): SEQ ID NO: 7250; WAN024C3B_at; Start 71; Stop 95
acaaagtccctgctaaggccctaat

SEQ ID NO: 102415 - DNA, 25 bp, Artificial
  probe
  misc_feature (1)..(25): SEQ ID NO: 7250; WAN024C3B_at; Start 24; Stop 48
cccagttgaaaaaattgaagaggtg

SEQ ID NO: 102416 - DNA, 25 bp, Artificial
  probe
  misc_feature (1)..(25): SEQ ID NO: 7271; WAN024C3C_at; Start 123; Stop 147
ccaagaaatcaaggttgaagaacca

SEQ ID NO: 102417 - DNA, 25 bp, Artificial
  probe
  misc_feature (1)..(25): SEQ ID NO: 7271; WAN024C3C_at; Start 52; Stop 76
caagaaaatcctaaagaagataggg

SEQ ID NO: 102418 - DNA, 25 bp, Artificial
  probe
  misc_feature (1)..(25): SEQ ID NO: 7271; WAN024C3C_at; Start 162; Stop 186
ggagactgtcattcaacctgttgaa

SEQ ID NO: 102419 - DNA, 25 bp, Artificial
  probe
  misc_feature (1)..(25): SEQ ID NO: 7271; WAN024C3C_at; Start 32; Stop 56
caccaaaagaatcatcacaacaaga

SEQ ID NO: 102420 - DNA, 25 bp, Artificial
  probe
  misc_feature (1)..(25): SEQ ID NO: 7271; WAN024C3C_at; Start 93; Stop 117
gaaacaagaagatgaacagccagca

SEQ ID NO: 102421 - DNA, 25 bp, Artificial
  probe
  misc_feature (1)..(25): SEQ ID NO: 7271; WAN024C3C_at; Start 16; Stop 40
gctgagcaaccaagtacaccaaaag

SEQ ID NO: 102422 - DNA, 25 bp, Artificial
  probe
  misc_feature (1)..(25): SEQ ID NO: 7271; WAN024C3C_at; Start 13; Stop 37
caagctgagcaaccaagtacaccaa

SEQ ID NO: 102423 - DNA, 25 bp, Artificial
  probe
  misc_feature (1)..(25): SEQ ID NO: 7271; WAN024C3C_at; Start 149; Stop 173
tagaatctatagaggagactgtcat

SEQ ID NO: 102424 - DNA, 25 bp, Artificial
  probe
  misc_feature (1)..(25): SEQ ID NO: 7271; WAN024C3C_at; Start 145; Stop 169
ccagtagaatctatagaggagactg

SEQ ID NO: 102425 - DNA, 25 bp, Artificial
  probe
  misc_feature (1)..(25): SEQ ID NO: 7271; WAN024C3C_at; Start 118; Stop 142
gaagcccaagaaatcaaggttgaag

SEQ ID NO: 102426 - DNA, 25 bp, Artificial
  probe
  misc_feature (1)..(25): SEQ ID NO: 7271; WAN024C3C_at; Start 82; Stop 106
gaagagactccgaaacaagaagatg

SEQ ID NO: 102427 - DNA, 25 bp, Artificial
  probe
  misc_feature (1)..(25): SEQ ID NO: 7271; WAN024C3C_at; Start 189; Stop 213
accaaaagtggaaacgcctgctgtt

SEQ ID NO: 102428 - DNA, 25 bp, Artificial
  probe
  misc_feature (1)..(25): SEQ ID NO: 7271; WAN024C3C_at; Start 1; Stop 25
gtgcaacctacacaagctgagcaac

SEQ ID NO: 102429 - DNA, 25 bp, Artificial
  probe
  misc_feature (1)..(25): SEQ ID NO: 7271; WAN024C3C_at; Start 26; Stop 50
caagtacaccaaaagaatcatcaca

SEQ ID NO: 102430 - DNA, 25 bp, Artificial
  probe
  misc_feature (1)..(25): SEQ ID NO: 7271; WAN024C3C_at; Start 9; Stop 33
tacacaagctgagcaaccaagtaca

SEQ ID NO: 102431 - DNA, 25 bp, Artificial
  probe
  misc_feature (1)..(25): SEQ ID NO: 7271; WAN024C3C_at; Start 187; Stop 211
caaccaaaagtggaaacgcctgctg

SEQ ID NO: 102432 - DNA, 25 bp, Artificial
  probe
  misc_feature (1)..(25): SEQ ID NO: 7271; WAN024C3C_at; Start 101; Stop 125
aagatgaacagccagcagaagccca

SEQ ID NO: 102433 - DNA, 25 bp, Artificial
  probe
  misc_feature (1)..(25): SEQ ID NO: 7271; WAN024C3C_at; Start 158; Stop 182
tagaggagactgtcattcaacctgt

SEQ ID NO: 102434 - DNA, 25 bp, Artificial
  probe
  misc_feature (1)..(25): SEQ ID NO: 7271; WAN024C3C_at; Start 127; Stop 151
gaaatcaaggttgaagaaccagtag

SEQ ID NO: 102435 - DNA, 25 bp, Artificial
  probe
  misc_feature (1)..(25): SEQ ID NO: 7271; WAN024C3C_at; Start 90; Stop 114
tccgaaacaagaagatgaacagcca

SEQ ID NO: 102436 - DNA, 25 bp, Artificial
  probe
  misc_feature (1)..(25): SEQ ID NO: 7271; WAN024C3C_at; Start 175; Stop 199
caacctgttgaacaaccaaaagtgg

SEQ ID NO: 102437 - DNA, 25 bp, Artificial
  probe
  misc_feature (1)..(25): SEQ ID NO: 7271; WAN024C3C_at; Start 85; Stop 109
gagactccgaaacaagaagatgaac

SEQ ID NO: 102438 - DNA, 25 bp, Artificial
  probe
  misc_feature (1)..(25): SEQ ID NO: 7271; WAN024C3C_at; Start 104; Stop 128
atgaacagccagcagaagcccaaga

SEQ ID NO: 102439 - DNA, 25 bp, Artificial
  probe
  misc_feature (1)..(25): SEQ ID NO: 7271; WAN024C3C_at; Start 46; Stop 70
tcacaacaagaaaatcctaaagaag

SEQ ID NO: 102440 - DNA, 25 bp, Artificial
  probe
  misc_feature (1)..(25): SEQ ID NO: 7271; WAN024C3C_at; Start 40; Stop 64
gaatcatcacaacaagaaaatccta

SEQ ID NO: 102441 - DNA, 25 bp, Artificial
  probe
  misc_feature (1)..(25): SEQ ID NO: 7271; WAN024C3C_at; Start 5; Stop 29
aacctacacaagctgagcaaccaag

SEQ ID NO: 102442 - DNA, 25 bp, Artificial
  probe
  misc_feature (1)..(25): SEQ ID NO: 7271; WAN024C3C_at; Start 75; Stop 99
gggagcggaagagactccgaaacaa

SEQ ID NO: 102443 - DNA, 25 bp, Artificial
  probe
  misc_feature (1)..(25): SEQ ID NO: 7271; WAN024C3C_at; Start 132; Stop 156
caaggttgaagaaccagtagaatct

SEQ ID NO: 102444 - DNA, 25 bp, Artificial
  probe
  misc_feature (1)..(25): SEQ ID NO: 7271; WAN024C3C_at; Start 154; Stop 178
tctatagaggagactgtcattcaac

SEQ ID NO: 102445 - DNA, 25 bp, Artificial
  probe
  misc_feature (1)..(25): SEQ ID NO: 7271; WAN024C3C_at; Start 109; Stop 133
cagccagcagaagcccaagaaatca

SEQ ID NO: 102446 - DNA, 25 bp, Artificial
  probe
  misc_feature (1)..(25): SEQ ID NO: 7271; WAN024C3C_at; Start 113; Stop 137
cagcagaagcccaagaaatcaaggt

SEQ ID NO: 102447 - DNA, 25 bp, Artificial
  probe
  misc_feature (1)..(25): SEQ ID NO: 7271; WAN024C3C_at; Start 139; Stop 163
gaagaaccagtagaatctatagagg

SEQ ID NO: 102448 - DNA, 25 bp, Artificial
  probe
  misc_feature (1)..(25): SEQ ID NO: 7271; WAN024C3C_at; Start 97; Stop 121
caagaagatgaacagccagcagaag

SEQ ID NO: 102449 - DNA, 25 bp, Artificial
  probe
  misc_feature (1)..(25): SEQ ID NO: 7271; WAN024C3C_at; Start 19; Stop 43
gagcaaccaagtacaccaaaagaat

SEQ ID NO: 102450 - DNA, 25 bp, Artificial
  probe
  misc_feature (1)..(25): SEQ ID NO: 7575; WAN024C3D_at; Start 14; Stop 38
atcaagcaccagcgcgtttgaatcc

SEQ ID NO: 102451 - DNA, 25 bp, Artificial
  probe
  misc_feature (1)..(25): SEQ ID NO: 7575; WAN024C3D_at; Start 10; Stop 34
cttcatcaagcaccagcgcgtttga

SEQ ID NO: 102452 - DNA, 25 bp, Artificial
  probe
  misc_feature (1)..(25): SEQ ID NO: 7575; WAN024C3D_at; Start 7; Stop 31
cggcttcatcaagcaccagcgcgtt

SEQ ID NO: 102453 - DNA, 25 bp, Artificial
  probe
  misc_feature (1)..(25): SEQ ID NO: 7575; WAN024C3D_at; Start 52; Stop 76
cttcagcttcagccaagttacctca

SEQ ID NO: 102454 - DNA, 25 bp, Artificial
  probe
  misc_feature (1)..(25): SEQ ID NO: 7575; WAN024C3D_at; Start 24; Stop 48
agcgcgtttgaatccgcatcaacca

SEQ ID NO: 102455 - DNA, 25 bp, Artificial
  probe
  misc_feature (1)..(25): SEQ ID NO: 7575; WAN024C3D_at; Start 21; Stop 45
accagcgcgtttgaatccgcatcaa

SEQ ID NO: 102456 - DNA, 25 bp, Artificial
  probe
  misc_feature (1)..(25): SEQ ID NO: 7575; WAN024C3D_at; Start 51; Stop 75
gcttcagcttcagccaagttacctc

SEQ ID NO: 102457 - DNA, 25 bp, Artificial
  probe
  misc_feature (1)..(25): SEQ ID NO: 7575; WAN024C3D_at; Start 9; Stop 33
gcttcatcaagcaccagcgcgtttg

SEQ ID NO: 102458 - DNA, 25 bp, Artificial
  probe
  misc_feature (1)..(25): SEQ ID NO: 7575; WAN024C3D_at; Start 4; Stop 28
cgtcggcttcatcaagcaccagcgc

SEQ ID NO: 102459 - DNA, 25 bp, Artificial
  probe
  misc_feature (1)..(25): SEQ ID NO: 7575; WAN024C3D_at; Start 27; Stop 51
gcgtttgaatccgcatcaaccagtg

SEQ ID NO: 102460 - DNA, 25 bp, Artificial
  probe
  misc_feature (1)..(25): SEQ ID NO: 7575; WAN024C3D_at; Start 25; Stop 49
gcgcgtttgaatccgcatcaaccag

SEQ ID NO: 102461 - DNA, 25 bp, Artificial
  probe
  misc_feature (1)..(25): SEQ ID NO: 7575; WAN024C3D_at; Start 8; Stop 32
ggcttcatcaagcaccagcgcgttt

SEQ ID NO: 102462 - DNA, 25 bp, Artificial
  probe
  misc_feature (1)..(25): SEQ ID NO: 7575; WAN024C3D_at; Start 17; Stop 41
aagcaccagcgcgtttgaatccgca

SEQ ID NO: 102463 - DNA, 25 bp, Artificial
  probe
  misc_feature (1)..(25): SEQ ID NO: 7575; WAN024C3D_at; Start 12; Stop 36
tcatcaagcaccagcgcgtttgaat

SEQ ID NO: 102464 - DNA, 25 bp, Artificial
  probe
  misc_feature (1)..(25): SEQ ID NO: 7575; WAN024C3D_at; Start 5; Stop 29
gtcggcttcatcaagcaccagcgcg

SEQ ID NO: 102465 - DNA, 25 bp, Artificial
  probe
  misc_feature (1)..(25): SEQ ID NO: 7575; WAN024C3D_at; Start 20; Stop 44
caccagcgcgtttgaatccgcatca

SEQ ID NO: 102466 - DNA, 25 bp, Artificial
  probe
  misc_feature (1)..(25): SEQ ID NO: 7575; WAN024C3D_at; Start 55; Stop 79
cagcttcagccaagttacctcagca

SEQ ID NO: 102467 - DNA, 25 bp, Artificial
  probe
  misc_feature (1)..(25): SEQ ID NO: 7575; WAN024C3D_at; Start 57; Stop 81
gcttcagccaagttacctcagcatc

SEQ ID NO: 102468 - DNA, 25 bp, Artificial
  probe
  misc_feature (1)..(25): SEQ ID NO: 7575; WAN024C3D_at; Start 13; Stop 37
catcaagcaccagcgcgtttgaatc

SEQ ID NO: 102469 - DNA, 25 bp, Artificial
  probe
  misc_feature (1)..(25): SEQ ID NO: 7575; WAN024C3D_at; Start 19; Stop 43
gcaccagcgcgtttgaatccgcatc

SEQ ID NO: 102470 - DNA, 25 bp, Artificial
  probe
  misc_feature (1)..(25): SEQ ID NO: 7575; WAN024C3D_at; Start 56; Stop 80
agcttcagccaagttacctcagcat

SEQ ID NO: 102471 - DNA, 25 bp, Artificial
  probe
  misc_feature (1)..(25): SEQ ID NO: 7575; WAN024C3D_at; Start 16; Stop 40
caagcaccagcgcgtttgaatccgc

SEQ ID NO: 102472 - DNA, 25 bp, Artificial
  probe
  misc_feature (1)..(25): SEQ ID NO: 7575; WAN024C3D_at; Start 18; Stop 42
agcaccagcgcgtttgaatccgcat

SEQ ID NO: 102473 - DNA, 25 bp, Artificial
  probe
  misc_feature (1)..(25): SEQ ID NO: 7575; WAN024C3D_at; Start 23; Stop 47
cagcgcgtttgaatccgcatcaacc

SEQ ID NO: 102474 - DNA, 25 bp, Artificial
  probe
  misc_feature (1)..(25): SEQ ID NO: 7575; WAN024C3D_at; Start 15; Stop 39
tcaagcaccagcgcgtttgaatccg

SEQ ID NO: 102475 - DNA, 25 bp, Artificial
  probe
  misc_feature (1)..(25): SEQ ID NO: 7575; WAN024C3D_at; Start 26; Stop 50
cgcgtttgaatccgcatcaaccagt

SEQ ID NO: 102476 - DNA, 25 bp, Artificial
  probe
  misc_feature (1)..(25): SEQ ID NO: 7575; WAN024C3D_at; Start 54; Stop 78
tcagcttcagccaagttacctcagc

SEQ ID NO: 102477 - DNA, 25 bp, Artificial
  probe
  misc_feature (1)..(25): SEQ ID NO: 7575; WAN024C3D_at; Start 6; Stop 30
tcggcttcatcaagcaccagcgcgt

SEQ ID NO: 102478 - DNA, 25 bp, Artificial
  probe
  misc_feature (1)..(25): SEQ ID NO: 7575; WAN024C3D_at; Start 11; Stop 35
ttcatcaagcaccagcgcgtttgaa

SEQ ID NO: 102479 - DNA, 25 bp, Artificial
  probe
  misc_feature (1)..(25): SEQ ID NO: 7575; WAN024C3D_at; Start 29; Stop 53
gtttgaatccgcatcaaccagtgct

SEQ ID NO: 102480 - DNA, 25 bp, Artificial
  probe
  misc_feature (1)..(25): SEQ ID NO: 7575; WAN024C3D_at; Start 22; Stop 46
ccagcgcgtttgaatccgcatcaac

SEQ ID NO: 102481 - DNA, 25 bp, Artificial
  probe
  misc_feature (1)..(25): SEQ ID NO: 7575; WAN024C3D_at; Start 28; Stop 52
cgtttgaatccgcatcaaccagtgc

SEQ ID NO: 102482 - DNA, 25 bp, Artificial
  probe
  misc_feature (1)..(25): SEQ ID NO: 7575; WAN024C3D_at; Start 50; Stop 74
tgcttcagcttcagccaagttacct

SEQ ID NO: 102483 - DNA, 25 bp, Artificial
  probe
  misc_feature (1)..(25): SEQ ID NO: 7212; WAN024C3E_at; Start 11; Stop 35
gattaaaaatgaagatggaacgtgg

SEQ ID NO: 102484 - DNA, 25 bp, Artificial
  probe
  misc_feature (1)..(25): SEQ ID NO: 7212; WAN024C3E_at; Start 75; Stop 99
tgatgtagaaaccaagcagatttca

SEQ ID NO: 102485 - DNA, 25 bp, Artificial
  probe
  misc_feature (1)..(25): SEQ ID NO: 7212; WAN024C3E_at; Start 127; Stop 151
cgttacatttttgaaaggtatctag

SEQ ID NO: 102486 - DNA, 25 bp, Artificial
  probe
  misc_feature (1)..(25): SEQ ID NO: 7212; WAN024C3E_at; Start 160; Stop 184
ggaggaaaagtaattgcaagagaac

SEQ ID NO: 102487 - DNA, 25 bp, Artificial
  probe
  misc_feature (1)..(25): SEQ ID NO: 7212; WAN024C3E_at; Start 174; Stop 198
tgcaagagaacttgatgaacttggt

SEQ ID NO: 102488 - DNA, 25 bp, Artificial
  probe
  misc_feature (1)..(25): SEQ ID NO: 7212; WAN024C3E_at; Start 223; Stop 247
cattggaatgatacaacagttctag

SEQ ID NO: 102489 - DNA, 25 bp, Artificial
  probe
  misc_feature (1)..(25): SEQ ID NO: 7212; WAN024C3E_at; Start 306; Stop 330
tgacccaataagcaagagaaggttg

SEQ ID NO: 102490 - DNA, 25 bp, Artificial
  probe
  misc_feature (1)..(25): SEQ ID NO: 7212; WAN024C3E_at; Start 201; Stop 225
taaatcgccaagaggattagaacat

SEQ ID NO: 102491 - DNA, 25 bp, Artificial
  probe
  misc_feature (1)..(25): SEQ ID NO: 7212; WAN024C3E_at; Start 340; Stop 364
ggagaagaagataagtactatatca

SEQ ID NO: 102492 - DNA, 25 bp, Artificial
  probe
  misc_feature (1)..(25): SEQ ID NO: 7212; WAN024C3E_at; Start 356; Stop 380
actatatcaaagataatcatgaacc

SEQ ID NO: 102493 - DNA, 25 bp, Artificial
  probe
  misc_feature (1)..(25): SEQ ID NO: 7212; WAN024C3E_at; Start 52; Stop 76
caagggtgcctagggtatgattatg

SEQ ID NO: 102494 - DNA, 25 bp, Artificial
  probe
  misc_feature (1)..(25): SEQ ID NO: 7212; WAN024C3E_at; Start 309; Stop 333
cccaataagcaagagaaggttgagt

SEQ ID NO: 102495 - DNA, 25 bp, Artificial
  probe
  misc_feature (1)..(25): SEQ ID NO: 7212; WAN024C3E_at; Start 47; Stop 71
gctttcaagggtgcctagggtatga

SEQ ID NO: 102496 - DNA, 25 bp, Artificial
  probe
  misc_feature (1)..(25): SEQ ID NO: 7212; WAN024C3E_at; Start 14; Stop 38
taaaaatgaagatggaacgtggtga

SEQ ID NO: 102497 - DNA, 25 bp, Artificial
  probe
  misc_feature (1)..(25): SEQ ID NO: 7212; WAN024C3E_at; Start 333; Stop 357
taattttggagaagaagataagtac

SEQ ID NO: 102498 - DNA, 25 bp, Artificial
  probe
  misc_feature (1)..(25): SEQ ID NO: 7212; WAN024C3E_at; Start 139; Stop 163
gaaaggtatctagaaggtattggag

SEQ ID NO: 102499 - DNA, 25 bp, Artificial
  probe
  misc_feature (1)..(25): SEQ ID NO: 7212; WAN024C3E_at; Start 37; Stop 61
gaattggttggctttcaagggtgcc

SEQ ID NO: 102500 - DNA, 25 bp, Artificial
  probe
  misc_feature (1)..(25): SEQ ID NO: 7212; WAN024C3E_at; Start 300; Stop 324
tacagttgacccaataagcaagaga

SEQ ID NO: 102501 - DNA, 25 bp, Artificial
  probe
  misc_feature (1)..(25): SEQ ID NO: 7212; WAN024C3E_at; Start 208; Stop 232
ccaagaggattagaacattggaatg

SEQ ID NO: 102502 - DNA, 25 bp, Artificial
  probe
  misc_feature (1)..(25): SEQ ID NO: 7212; WAN024C3E_at; Start 239; Stop 263
cagttctaggaatcataaagaatga

SEQ ID NO: 102503 - DNA, 25 bp, Artificial
  probe
  misc_feature (1)..(25): SEQ ID NO: 7212; WAN024C3E_at; Start 187; Stop 211
gatgaacttggttataaatcgccaa

SEQ ID NO: 102504 - DNA, 25 bp, Artificial
  probe
  misc_feature (1)..(25): SEQ ID NO: 7212; WAN024C3E_at; Start 323; Stop 347
gaaggttgagtaattttggagaaga

SEQ ID NO: 102505 - DNA, 25 bp, Artificial
  probe
  misc_feature (1)..(25): SEQ ID NO: 7212; WAN024C3E_at; Start 70; Stop 94
gattatgatgtagaaaccaagcaga

SEQ ID NO: 102506 - DNA, 25 bp, Artificial
  probe
  misc_feature (1)..(25): SEQ ID NO: 7212; WAN024C3E_at; Start 367; Stop 391
gataatcatgaacctataatatcta

SEQ ID NO: 102507 - DNA, 25 bp, Artificial
  probe
  misc_feature (1)..(25): SEQ ID NO: 7212; WAN024C3E_at; Start 82; Stop 106
gaaaccaagcagatttcaattaata

SEQ ID NO: 102508 - DNA, 25 bp, Artificial
  probe
  misc_feature (1)..(25): SEQ ID NO: 7212; WAN024C3E_at; Start 228; Stop 252
gaatgatacaacagttctaggaatc

SEQ ID NO: 102509 - DNA, 25 bp, Artificial
  probe
  misc_feature (1)..(25): SEQ ID NO: 7212; WAN024C3E_at; Start 110; Stop 134
aagaatccaaaattgttcgttacat

SEQ ID NO: 102510 - DNA, 25 bp, Artificial
  probe
  misc_feature (1)..(25): SEQ ID NO: 7212; WAN024C3E_at; Start 194; Stop 218
ttggttataaatcgccaagaggatt

SEQ ID NO: 102511 - DNA, 25 bp, Artificial
  probe
  misc_feature (1)..(25): SEQ ID NO: 7212; WAN024C3E_at; Start 147; Stop 171
tctagaaggtattggaggaaaagta

SEQ ID NO: 102512 - DNA, 25 bp, Artificial
  probe
  misc_feature (1)..(25): SEQ ID NO: 7212; WAN024C3E_at; Start 254; Stop 278
taaagaatgaaaaatataaaggtga

SEQ ID NO: 102513 - DNA, 25 bp, Artificial
  probe
  misc_feature (1)..(25): SEQ ID NO: 7212; WAN024C3E_at; Start 234; Stop 258
tacaacagttctaggaatcataaag

SEQ ID NO: 102514 - DNA, 25 bp, Artificial
  probe
  misc_feature (1)..(25): SEQ ID NO: 7212; WAN024C3E_at; Start 28; Stop 52
gaacgtggtgaattggttggctttc

SEQ ID NO: 102515 - DNA, 25 bp, Artificial
  probe
  misc_feature (1)..(25): SEQ ID NO: 7212; WAN024C3E_at; Start 295; Stop 319
acttttacagttgacccaataagca

SEQ ID NO: 102516 - DNA, 25 bp, Artificial
  probe
  misc_feature (1)..(25): SEQ ID NO: 7212; WAN024C3E_at; Start 56; Stop 80
ggtgcctagggtatgattatgatgt

SEQ ID NO: 102517 - DNA, 25 bp, Artificial
  probe
  misc_feature (1)..(25): SEQ ID NO: 7324; WAN024C3F_at; Start 42; Stop 66
tgccgttcagattatcgcaaggttg

SEQ ID NO: 102518 - DNA, 25 bp, Artificial
  probe
  misc_feature (1)..(25): SEQ ID NO: 7324; WAN024C3F_at; Start 61; Stop 85
aggttgtgtggcactgtgttacatc

SEQ ID NO: 102519 - DNA, 25 bp, Artificial
  probe
  misc_feature (1)..(25): SEQ ID NO: 7324; WAN024C3F_at; Start 19; Stop 43
tattatctagaagaagttgtcactg

SEQ ID NO: 102520 - DNA, 25 bp, Artificial
  probe
  misc_feature (1)..(25): SEQ ID NO: 7324; WAN024C3F_at; Start 1; Stop 25
gtggtttttgtggttcaatattatc

SEQ ID NO: 102521 - DNA, 25 bp, Artificial
  probe
  misc_feature (1)..(25): SEQ ID NO: 7324; WAN024C3F_at; Start 44; Stop 68
ccgttcagattatcgcaaggttgtg

SEQ ID NO: 102522 - DNA, 25 bp, Artificial
  probe
  misc_feature (1)..(25): SEQ ID NO: 7324; WAN024C3F_at; Start 27; Stop 51
agaagaagttgtcactgccgttcag

SEQ ID NO: 102523 - DNA, 25 bp, Artificial
  probe
  misc_feature (1)..(25): SEQ ID NO: 7324; WAN024C3F_at; Start 29; Stop 53
aagaagttgtcactgccgttcagat

SEQ ID NO: 102524 - DNA, 25 bp, Artificial
  probe
  misc_feature (1)..(25): SEQ ID NO: 7324; WAN024C3F_at; Start 28; Stop 52
gaagaagttgtcactgccgttcaga

SEQ ID NO: 102525 - DNA, 25 bp, Artificial
  probe
  misc_feature (1)..(25): SEQ ID NO: 7324; WAN024C3F_at; Start 63; Stop 87
gttgtgtggcactgtgttacatcga

SEQ ID NO: 102526 - DNA, 25 bp, Artificial
  probe
  misc_feature (1)..(25): SEQ ID NO: 7324; WAN024C3F_at; Start 56; Stop 80
tcgcaaggttgtgtggcactgtgtt

SEQ ID NO: 102527 - DNA, 25 bp, Artificial
  probe
  misc_feature (1)..(25): SEQ ID NO: 7324; WAN024C3F_at; Start 43; Stop 67
gccgttcagattatcgcaaggttgt

SEQ ID NO: 102528 - DNA, 25 bp, Artificial
  probe
  misc_feature (1)..(25): SEQ ID NO: 7324; WAN024C3F_at; Start 16; Stop 40
caatattatctagaagaagttgtca

SEQ ID NO: 102529 - DNA, 25 bp, Artificial
  probe
  misc_feature (1)..(25): SEQ ID NO: 7324; WAN024C3F_at; Start 39; Stop 63
cactgccgttcagattatcgcaagg

SEQ ID NO: 102530 - DNA, 25 bp, Artificial
  probe
  misc_feature (1)..(25): SEQ ID NO: 7324; WAN024C3F_at; Start 36; Stop 60
tgtcactgccgttcagattatcgca

SEQ ID NO: 102531 - DNA, 25 bp, Artificial
  probe
  misc_feature (1)..(25): SEQ ID NO: 7324; WAN024C3F_at; Start 51; Stop 75
gattatcgcaaggttgtgtggcact

SEQ ID NO: 102532 - DNA, 25 bp, Artificial
  probe
  misc_feature (1)..(25): SEQ ID NO: 7324; WAN024C3F_at; Start 7; Stop 31
tttgtggttcaatattatctagaag

SEQ ID NO: 102533 - DNA, 25 bp, Artificial
  probe
  misc_feature (1)..(25): SEQ ID NO: 7324; WAN024C3F_at; Start 31; Stop 55
gaagttgtcactgccgttcagatta

SEQ ID NO: 102534 - DNA, 25 bp, Artificial
  probe
  misc_feature (1)..(25): SEQ ID NO: 7324; WAN024C3F_at; Start 57; Stop 81
cgcaaggttgtgtggcactgtgtta

SEQ ID NO: 102535 - DNA, 25 bp, Artificial
  probe
  misc_feature (1)..(25): SEQ ID NO: 7324; WAN024C3F_at; Start 58; Stop 82
gcaaggttgtgtggcactgtgttac

SEQ ID NO: 102536 - DNA, 25 bp, Artificial
  probe
  misc_feature (1)..(25): SEQ ID NO: 7324; WAN024C3F_at; Start 12; Stop 36
ggttcaatattatctagaagaagtt

SEQ ID NO: 102537 - DNA, 25 bp, Artificial
  probe
  misc_feature (1)..(25): SEQ ID NO: 7324; WAN024C3F_at; Start 50; Stop 74
agattatcgcaaggttgtgtggcac

SEQ ID NO: 102538 - DNA, 25 bp, Artificial
  probe
  misc_feature (1)..(25): SEQ ID NO: 7324; WAN024C3F_at; Start 34; Stop 58
gttgtcactgccgttcagattatcg

SEQ ID NO: 102539 - DNA, 25 bp, Artificial
  probe
  misc_feature (1)..(25): SEQ ID NO: 7324; WAN024C3F_at; Start 24; Stop 48
tctagaagaagttgtcactgccgtt

SEQ ID NO: 102540 - DNA, 25 bp, Artificial
  probe
  misc_feature (1)..(25): SEQ ID NO: 7324; WAN024C3F_at; Start 25; Stop 49
ctagaagaagttgtcactgccgttc

SEQ ID NO: 102541 - DNA, 25 bp, Artificial
  probe
  misc_feature (1)..(25): SEQ ID NO: 7324; WAN024C3F_at; Start 49; Stop 73
cagattatcgcaaggttgtgtggca

SEQ ID NO: 102542 - DNA, 25 bp, Artificial
  probe
  misc_feature (1)..(25): SEQ ID NO: 7324; WAN024C3F_at; Start 21; Stop 45
ttatctagaagaagttgtcactgcc

SEQ ID NO: 102543 - DNA, 25 bp, Artificial
  probe
  misc_feature (1)..(25): SEQ ID NO: 7324; WAN024C3F_at; Start 40; Stop 64
actgccgttcagattatcgcaaggt

SEQ ID NO: 102544 - DNA, 25 bp, Artificial
  probe
  misc_feature (1)..(25): SEQ ID NO: 7324; WAN024C3F_at; Start 38; Stop 62
tcactgccgttcagattatcgcaag

SEQ ID NO: 102545 - DNA, 25 bp, Artificial
  probe
  misc_feature (1)..(25): SEQ ID NO: 7324; WAN024C3F_at; Start 45; Stop 69
cgttcagattatcgcaaggttgtgt

SEQ ID NO: 102546 - DNA, 25 bp, Artificial
  probe
  misc_feature (1)..(25): SEQ ID NO: 7324; WAN024C3F_at; Start 22; Stop 46
tatctagaagaagttgtcactgccg

SEQ ID NO: 102547 - DNA, 25 bp, Artificial
  probe
  misc_feature (1)..(25): SEQ ID NO: 7324; WAN024C3F_at; Start 54; Stop 78
tatcgcaaggttgtgtggcactgtg

SEQ ID NO: 102548 - DNA, 25 bp, Artificial
  probe
  misc_feature (1)..(25): SEQ ID NO: 7324; WAN024C3F_at; Start 26; Stop 50
tagaagaagttgtcactgccgttca

SEQ ID NO: 102549 - DNA, 25 bp, Artificial
  probe
  misc_feature (1)..(25): SEQ ID NO: 7324; WAN024C3F_at; Start 53; Stop 77
ttatcgcaaggttgtgtggcactgt

SEQ ID NO: 102550 - DNA, 25 bp, Artificial
  probe
  misc_feature (1)..(25): SEQ ID NO: 7324; WAN024C3F_at; Start 48; Stop 72
tcagattatcgcaaggttgtgtggc

SEQ ID NO: 102551 - DNA, 25 bp, Artificial
  probe
  misc_feature (1)..(25): SEQ ID NO: 7587; WAN024C3G_at; Start 238; Stop 262
aaattgtattctcaagggaacagac

SEQ ID NO: 102552 - DNA, 25 bp, Artificial
  probe
  misc_feature (1)..(25): SEQ ID NO: 7587; WAN024C3G_at; Start 41; Stop 65
cagtttttgaaagtattgttgagaa

SEQ ID NO: 102553 - DNA, 25 bp, Artificial
  probe
  misc_feature (1)..(25): SEQ ID NO: 7587; WAN024C3G_at; Start 202; Stop 226
gataaattgtgtcctcaaaacagtg

SEQ ID NO: 102554 - DNA, 25 bp, Artificial
  probe
  misc_feature (1)..(25): SEQ ID NO: 7587; WAN024C3G_at; Start 26; Stop 50
cggagtttgatcgtgcagtttttga

SEQ ID NO: 102555 - DNA, 25 bp, Artificial
  probe
  misc_feature (1)..(25): SEQ ID NO: 7587; WAN024C3G_at; Start 136; Stop 160
ggtgaaactcaaaacaaggatggta

SEQ ID NO: 102556 - DNA, 25 bp, Artificial
  probe
  misc_feature (1)..(25): SEQ ID NO: 7587; WAN024C3G_at; Start 103; Stop 127
gatcctgcaatgttaaccataatat

SEQ ID NO: 102557 - DNA, 25 bp, Artificial
  probe
  misc_feature (1)..(25): SEQ ID NO: 7587; WAN024C3G_at; Start 7; Stop 31
tcttcgcaaaaaatgcttacggagt

SEQ ID NO: 102558 - DNA, 25 bp, Artificial
  probe
  misc_feature (1)..(25): SEQ ID NO: 7587; WAN024C3G_at; Start 72; Stop 96
tgtaggtggagttaatagcaacgga

SEQ ID NO: 102559 - DNA, 25 bp, Artificial
  probe
  misc_feature (1)..(25): SEQ ID NO: 7587; WAN024C3G_at; Start 211; Stop 235
tgtcctcaaaacagtgacgaggata

SEQ ID NO: 102560 - DNA, 25 bp, Artificial
  probe
  misc_feature (1)..(25): SEQ ID NO: 7587; WAN024C3G_at; Start 128; Stop 152
tcaaaacaggtgaaactcaaaacaa

SEQ ID NO: 102561 - DNA, 25 bp, Artificial
  probe
  misc_feature (1)..(25): SEQ ID NO: 7587; WAN024C3G_at; Start 216; Stop 240
tcaaaacagtgacgaggataaaaaa

SEQ ID NO: 102562 - DNA, 25 bp, Artificial
  probe
  misc_feature (1)..(25): SEQ ID NO: 7587; WAN024C3G_at; Start 17; Stop 41
aaatgcttacggagtttgatcgtgc

SEQ ID NO: 102563 - DNA, 25 bp, Artificial
  probe
  misc_feature (1)..(25): SEQ ID NO: 7587; WAN024C3G_at; Start 3; Stop 27
gctatcttcgcaaaaaatgcttacg

SEQ ID NO: 102564 - DNA, 25 bp, Artificial
  probe
  misc_feature (1)..(25): SEQ ID NO: 7587; WAN024C3G_at; Start 244; Stop 268
tattctcaagggaacagacaacaca

SEQ ID NO: 102565 - DNA, 25 bp, Artificial
  probe
  misc_feature (1)..(25): SEQ ID NO: 7587; WAN024C3G_at; Start 97; Stop 121
gaaattgatcctgcaatgttaacca

SEQ ID NO: 102566 - DNA, 25 bp, Artificial
  probe
  misc_feature (1)..(25): SEQ ID NO: 7587; WAN024C3G_at; Start 134; Stop 158
caggtgaaactcaaaacaaggatgg

SEQ ID NO: 102567 - DNA, 25 bp, Artificial
  probe
  misc_feature (1)..(25): SEQ ID NO: 7587; WAN024C3G_at; Start 143; Stop 167
ctcaaaacaaggatggtaaacaatt

SEQ ID NO: 102568 - DNA, 25 bp, Artificial
  probe
  misc_feature (1)..(25): SEQ ID NO: 7587; WAN024C3G_at; Start 11; Stop 35
cgcaaaaaatgcttacggagtttga

SEQ ID NO: 102569 - DNA, 25 bp, Artificial
  probe
  misc_feature (1)..(25): SEQ ID NO: 7587; WAN024C3G_at; Start 115; Stop 139
ttaaccataatattcaaaacaggtg

SEQ ID NO: 102570 - DNA, 25 bp, Artificial
  probe
  misc_feature (1)..(25): SEQ ID NO: 7587; WAN024C3G_at; Start 90; Stop 114
caacggagaaattgatcctgcaatg

SEQ ID NO: 102571 - DNA, 25 bp, Artificial
  probe
  misc_feature (1)..(25): SEQ ID NO: 7587; WAN024C3G_at; Start 255; Stop 279
gaacagacaacacacgtggagtgtg

SEQ ID NO: 102572 - DNA, 25 bp, Artificial
  probe
  misc_feature (1)..(25): SEQ ID NO: 7587; WAN024C3G_at; Start 87; Stop 111
tagcaacggagaaattgatcctgca

SEQ ID NO: 102573 - DNA, 25 bp, Artificial
  probe
  misc_feature (1)..(25): SEQ ID NO: 7587; WAN024C3G_at; Start 178; Stop 202
cgtaaaaatgctaaactagaaacag

SEQ ID NO: 102574 - DNA, 25 bp, Artificial
  probe
  misc_feature (1)..(25): SEQ ID NO: 7587; WAN024C3G_at; Start 83; Stop 107
ttaatagcaacggagaaattgatcc

SEQ ID NO: 102575 - DNA, 25 bp, Artificial
  probe
  misc_feature (1)..(25): SEQ ID NO: 7587; WAN024C3G_at; Start 249; Stop 273
tcaagggaacagacaacacacgtgg

SEQ ID NO: 102576 - DNA, 25 bp, Artificial
  probe
  misc_feature (1)..(25): SEQ ID NO: 7587; WAN024C3G_at; Start 57; Stop 81
tgttgagaaaattattgtaggtgga

SEQ ID NO: 102577 - DNA, 25 bp, Artificial
  probe
  misc_feature (1)..(25): SEQ ID NO: 7587; WAN024C3G_at; Start 191; Stop 215
aactagaaacagataaattgtgtcc

SEQ ID NO: 102578 - DNA, 25 bp, Artificial
  probe
  misc_feature (1)..(25): SEQ ID NO: 7587; WAN024C3G_at; Start 208; Stop 232
ttgtgtcctcaaaacagtgacgagg

SEQ ID NO: 102579 - DNA, 25 bp, Artificial
  probe
  misc_feature (1)..(25): SEQ ID NO: 7587; WAN024C3G_at; Start 34; Stop 58
gatcgtgcagtttttgaaagtattg

SEQ ID NO: 102580 - DNA, 25 bp, Artificial
  probe
  misc_feature (1)..(25): SEQ ID NO: 7587; WAN024C3G_at; Start 76; Stop 100
ggtggagttaatagcaacggagaaa

SEQ ID NO: 102581 - DNA, 25 bp, Artificial
  probe
  misc_feature (1)..(25): SEQ ID NO: 7587; WAN024C3G_at; Start 252; Stop 276
agggaacagacaacacacgtggagt

SEQ ID NO: 102582 - DNA, 25 bp, Artificial
  probe
  misc_feature (1)..(25): SEQ ID NO: 7587; WAN024C3G_at; Start 224; Stop 248
gtgacgaggataaaaaattgtattc

SEQ ID NO: 102583 - DNA, 25 bp, Artificial
  probe
  misc_feature (1)..(25): SEQ ID NO: 7587; WAN024C3G_at; Start 21; Stop 45
gcttacggagtttgatcgtgcagtt

SEQ ID NO: 102584 - DNA, 25 bp, Artificial
  probe
  misc_feature (1)..(25): SEQ ID NO: 7587; WAN024C3G_at; Start 205; Stop 229
aaattgtgtcctcaaaacagtgacg

SEQ ID NO: 102585 - DNA, 25 bp, Artificial
  probe
  misc_feature (1)..(25): SEQ ID NO: 6693; WAN024C3H_at; Start 537; Stop 561
tacggatcttgaagcatttgctcag

SEQ ID NO: 102586 - DNA, 25 bp, Artificial
  probe
  misc_feature (1)..(25): SEQ ID NO: 6693; WAN024C3H_at; Start 595; Stop 619
aacggagaatatggcgcattaggtc

SEQ ID NO: 102587 - DNA, 25 bp, Artificial
  probe
  misc_feature (1)..(25): SEQ ID NO: 6693; WAN024C3H_at; Start 520; Stop 544
cattggcatcgtgaaggtacggatc

SEQ ID NO: 102588 - DNA, 25 bp, Artificial
  probe
  misc_feature (1)..(25): SEQ ID NO: 6693; WAN024C3H_at; Start 216; Stop 240
taagagtcaaaatgtagttccaact

SEQ ID NO: 102589 - DNA, 25 bp, Artificial
  probe
  misc_feature (1)..(25): SEQ ID NO: 6693; WAN024C3H_at; Start 578; Stop 602
catcggtatcaaatccaaacggaga

SEQ ID NO: 102590 - DNA, 25 bp, Artificial
  probe
  misc_feature (1)..(25): SEQ ID NO: 6693; WAN024C3H_at; Start 358; Stop 382
ggttacaaatatggatatggcgcat

SEQ ID NO: 102591 - DNA, 25 bp, Artificial
  probe
  misc_feature (1)..(25): SEQ ID NO: 6693; WAN024C3H_at; Start 487; Stop 511
cacattaatgatcgtatggcttact

SEQ ID NO: 102592 - DNA, 25 bp, Artificial
  probe
  misc_feature (1)..(25): SEQ ID NO: 6693; WAN024C3H_at; Start 415; Stop 439
gatgcagtttatttcgttatgacag

SEQ ID NO: 102593 - DNA, 25 bp, Artificial
  probe
  misc_feature (1)..(25): SEQ ID NO: 6693; WAN024C3H_at; Start 255; Stop 279
tcataatagcccgaacggatgggct

SEQ ID NO: 102594 - DNA, 25 bp, Artificial
  probe
  misc_feature (1)..(25): SEQ ID NO: 6693; WAN024C3H_at; Start 270; Stop 294
cggatgggctagtagacatggtcat

SEQ ID NO: 102595 - DNA, 25 bp, Artificial
  probe
  misc_feature (1)..(25): SEQ ID NO: 6693; WAN024C3H_at; Start 562; Stop 586
gggatgttacaaacgccatcggtat

SEQ ID NO: 102596 - DNA, 25 bp, Artificial
  probe
  misc_feature (1)..(25): SEQ ID NO: 6693; WAN024C3H_at; Start 443; Stop 467
taattagtgactttggaacatctgc

SEQ ID NO: 102597 - DNA, 25 bp, Artificial
  probe
  misc_feature (1)..(25): SEQ ID NO: 6693; WAN024C3H_at; Start 90; Stop 114
tggcaaagacacagatgaaaaacgt

SEQ ID NO: 102598 - DNA, 25 bp, Artificial
  probe
  misc_feature (1)..(25): SEQ ID NO: 6693; WAN024C3H_at; Start 319; Stop 343
ccaattcgtgagttctttgggcgaa

SEQ ID NO: 102599 - DNA, 25 bp, Artificial
  probe
  misc_feature (1)..(25): SEQ ID NO: 6693; WAN024C3H_at; Start 243; Stop 267
tgtatgggataatcataatagcccg

SEQ ID NO: 102600 - DNA, 25 bp, Artificial
  probe
  misc_feature (1)..(25): SEQ ID NO: 6693; WAN024C3H_at; Start 505; Stop 529
gcttactatggtggtcattggcatc

SEQ ID NO: 102601 - DNA, 25 bp, Artificial
  probe
  misc_feature (1)..(25): SEQ ID NO: 6693; WAN024C3H_at; Start 302; Stop 326
ggaaaccggattatgctccaattcg

SEQ ID NO: 102602 - DNA, 25 bp, Artificial
  probe
  misc_feature (1)..(25): SEQ ID NO: 6693; WAN024C3H_at; Start 401; Stop 425
cacctcaaccgatggatgcagttta

SEQ ID NO: 102603 - DNA, 25 bp, Artificial
  probe
  misc_feature (1)..(25): SEQ ID NO: 6693; WAN024C3H_at; Start 228; Stop 252
tgtagttccaactcctgtatgggat

SEQ ID NO: 102604 - DNA, 25 bp, Artificial
  probe
  misc_feature (1)..(25): SEQ ID NO: 6693; WAN024C3H_at; Start 658; Stop 682
tggtataatccaaatcctaacaaac

SEQ ID NO: 102605 - DNA, 25 bp, Artificial
  probe
  misc_feature (1)..(25): SEQ ID NO: 6693; WAN024C3H_at; Start 60; Stop 84
cactatctcgtttagttcgtttgaa

SEQ ID NO: 102606 - DNA, 25 bp, Artificial
  probe
  misc_feature (1)..(25): SEQ ID NO: 6693; WAN024C3H_at; Start 336; Stop 360
tgggcgaatcaataagtatcatggt

SEQ ID NO: 102607 - DNA, 25 bp, Artificial
  probe
  misc_feature (1)..(25): SEQ ID NO: 6693; WAN024C3H_at; Start 286; Stop 310
catggtcatatagatgggaaaccgg

SEQ ID NO: 102608 - DNA, 25 bp, Artificial
  probe
  misc_feature (1)..(25): SEQ ID NO: 6693; WAN024C3H_at; Start 112; Stop 136
cgtgaaaagtttaagagtgagatca

SEQ ID NO: 102609 - DNA, 25 bp, Artificial
  probe
  misc_feature (1)..(25): SEQ ID NO: 6693; WAN024C3H_at; Start 614; Stop 638
taggtctaaatatggcgtatgaacg

SEQ ID NO: 102610 - DNA, 25 bp, Artificial
  probe
  misc_feature (1)..(25): SEQ ID NO: 6693; WAN024C3H_at; Start 388; Stop 412
tatatttttgcagcacctcaaccga

SEQ ID NO: 102611 - DNA, 25 bp, Artificial
  probe
  misc_feature (1)..(25): SEQ ID NO: 6693; WAN024C3H_at; Start 169; Stop 193
gatttttggtcacgtcttgctactg

SEQ ID NO: 102612 - DNA, 25 bp, Artificial
  probe
  misc_feature (1)..(25): SEQ ID NO: 6693; WAN024C3H_at; Start 690; Stop 714
tcgcgctgaaattgatcactacatg

SEQ ID NO: 102613 - DNA, 25 bp, Artificial
  probe
  misc_feature (1)..(25): SEQ ID NO: 6693; WAN024C3H_at; Start 457; Stop 481
ggaacatctgcatttacacatgaaa

SEQ ID NO: 102614 - DNA, 25 bp, Artificial
  probe
  misc_feature (1)..(25): SEQ ID NO: 6693; WAN024C3H_at; Start 130; Stop 154
gagatcaataaacgtgctaaagagc

SEQ ID NO: 102615 - DNA, 25 bp, Artificial
  probe
  misc_feature (1)..(25): SEQ ID NO: 6693; WAN024C3H_at; Start 187; Stop 211
gctactgataatgtccgtgataaac

SEQ ID NO: 102616 - DNA, 25 bp, Artificial
  probe
  misc_feature (1)..(25): SEQ ID NO: 6693; WAN024C3H_at; Start 675; Stop 699
taacaaacttaaatctcgcgctgaa

SEQ ID NO: 102617 - DNA, 25 bp, Artificial
  probe
  misc_feature (1)..(25): SEQ ID NO: 6693; WAN024C3H_at; Start 45; Stop 69
gatttcaacatacaacactatctcg

SEQ ID NO: 102618 - DNA, 25 bp, Artificial
  probe
  misc_feature (1)..(25): SEQ ID NO: 6693; WAN024C3H_at; Start 628; Stop 652
gcgtatgaacgtcaaaatgatggaa

SEQ ID NO: 102619 - DNA, 25 bp, Artificial
  probe
  misc_feature (1)..(25): SEQ ID NO: 6390; WAN024C3I_at; Start 388; Stop 412
ggattcatcggatatgcctctaata

SEQ ID NO: 102620 - DNA, 25 bp, Artificial
  probe
  misc_feature (1)..(25): SEQ ID NO: 6390; WAN024C3I_at; Start 326; Stop 350
ctggcgctgcttcatttaaacataa

SEQ ID NO: 102621 - DNA, 25 bp, Artificial
  probe
  misc_feature (1)..(25): SEQ ID NO: 6390; WAN024C3I_at; Start 66; Stop 90
caatgatagatggttcaagaaaatg

SEQ ID NO: 102622 - DNA, 25 bp, Artificial
  probe
  misc_feature (1)..(25): SEQ ID NO: 6390; WAN024C3I_at; Start 279; Stop 303
gaatatgatgactggtgtatacgga

SEQ ID NO: 102623 - DNA, 25 bp, Artificial
  probe
  misc_feature (1)..(25): SEQ ID NO: 6390; WAN024C3I_at; Start 109; Stop 133
gacggacaacctcaccagtttgaca

SEQ ID NO: 102624 - DNA, 25 bp, Artificial
  probe
  misc_feature (1)..(25): SEQ ID NO: 6390; WAN024C3I_at; Start 99; Stop 123
aatgcgtaaggacggacaacctcac

SEQ ID NO: 102625 - DNA, 25 bp, Artificial
  probe
  misc_feature (1)..(25): SEQ ID NO: 6390; WAN024C3I_at; Start 501; Stop 525
tgaagcgtggaaagaaagaatggtt

SEQ ID NO: 102626 - DNA, 25 bp, Artificial
  probe
  misc_feature (1)..(25): SEQ ID NO: 6390; WAN024C3I_at; Start 296; Stop 320
tatacggaggtaactcaagtgatgg

SEQ ID NO: 102627 - DNA, 25 bp, Artificial
  probe
  misc_feature (1)..(25): SEQ ID NO: 6390; WAN024C3I_at; Start 207; Stop 231
tatgactaaacacggtgctcctgga

SEQ ID NO: 102628 - DNA, 25 bp, Artificial
  probe
  misc_feature (1)..(25): SEQ ID NO: 6390; WAN024C3I_at; Start 123; Stop 147
ccagtttgacaaaattcgcgattta

SEQ ID NO: 102629 - DNA, 25 bp, Artificial
  probe
  misc_feature (1)..(25): SEQ ID NO: 6390; WAN024C3I_at; Start 366; Stop 390
gggatacttcggatacgaaaatgga

SEQ ID NO: 102630 - DNA, 25 bp, Artificial
  probe
  misc_feature (1)..(25): SEQ ID NO: 6390; WAN024C3I_at; Start 153; Stop 177
tgaagagaagaaaattcaattagct

SEQ ID NO: 102631 - DNA, 25 bp, Artificial
  probe
  misc_feature (1)..(25): SEQ ID NO: 6390; WAN024C3I_at; Start 465; Stop 489
catcaataaagtttctggtggtaca

SEQ ID NO: 102632 - DNA, 25 bp, Artificial
  probe
  misc_feature (1)..(25): SEQ ID NO: 6390; WAN024C3I_at; Start 17; Stop 41
tgttagattatctggaagcagaatc

SEQ ID NO: 102633 - DNA, 25 bp, Artificial
  probe
  misc_feature (1)..(25): SEQ ID NO: 6390; WAN024C3I_at; Start 475; Stop 499
gtttctggtggtacatttaatacac

SEQ ID NO: 102634 - DNA, 25 bp, Artificial
  probe
  misc_feature (1)..(25): SEQ ID NO: 6390; WAN024C3I_at; Start 243; Stop 267
taacccatcagattttagttcagca

SEQ ID NO: 102635 - DNA, 25 bp, Artificial
  probe
  misc_feature (1)..(25): SEQ ID NO: 6390; WAN024C3I_at; Start 251; Stop 275
cagattttagttcagcatatgttaa

SEQ ID NO: 102636 - DNA, 25 bp, Artificial
  probe
  misc_feature (1)..(25): SEQ ID NO: 6390; WAN024C3I_at; Start 415; Stop 439
tataaagccgaagccaataaagcag

SEQ ID NO: 102637 - DNA, 25 bp, Artificial
  probe
  misc_feature (1)..(25): SEQ ID NO: 6390; WAN024C3I_at; Start 55; Stop 79
ttaaaaggtaacaatgatagatggt

SEQ ID NO: 102638 - DNA, 25 bp, Artificial
  probe
  misc_feature (1)..(25): SEQ ID NO: 6390; WAN024C3I_at; Start 217; Stop 241
cacggtgctcctggaaatggtacat

SEQ ID NO: 102639 - DNA, 25 bp, Artificial
  probe
  misc_feature (1)..(25): SEQ ID NO: 6390; WAN024C3I_at; Start 381; Stop 405
cgaaaatggattcatcggatatgcc

SEQ ID NO: 102640 - DNA, 25 bp, Artificial
  probe
  misc_feature (1)..(25): SEQ ID NO: 6390; WAN024C3I_at; Start 196; Stop 220
gataataactttatgactaaacacg

SEQ ID NO: 102641 - DNA, 25 bp, Artificial
  probe
  misc_feature (1)..(25): SEQ ID NO: 6390; WAN024C3I_at; Start 169; Stop 193
caattagcttctattgaggatttag

SEQ ID NO: 102642 - DNA, 25 bp, Artificial
  probe
  misc_feature (1)..(25): SEQ ID NO: 6390; WAN024C3I_at; Start 89; Stop 113
tggataaacaaatgcgtaaggacgg

SEQ ID NO: 102643 - DNA, 25 bp, Artificial
  probe
  misc_feature (1)..(25): SEQ ID NO: 6390; WAN024C3I_at; Start 31; Stop 55
gaagcagaatctgttttacctaaat

SEQ ID NO: 102644 - DNA, 25 bp, Artificial
  probe
  misc_feature (1)..(25): SEQ ID NO: 6390; WAN024C3I_at; Start 288; Stop 312
gactggtgtatacggaggtaactca

SEQ ID NO: 102645 - DNA, 25 bp, Artificial
  probe
  misc_feature (1)..(25): SEQ ID NO: 6390; WAN024C3I_at; Start 320; Stop 344
gggctcctggcgctgcttcatttaa

SEQ ID NO: 102646 - DNA, 25 bp, Artificial
  probe
  misc_feature (1)..(25): SEQ ID NO: 6390; WAN024C3I_at; Start 423; Stop 447
cgaagccaataaagcaggtcaaact

SEQ ID NO: 102647 - DNA, 25 bp, Artificial
  probe
  misc_feature (1)..(25): SEQ ID NO: 6390; WAN024C3I_at; Start 229; Stop 253
ggaaatggtacatataacccatcag

SEQ ID NO: 102648 - DNA, 25 bp, Artificial
  probe
  misc_feature (1)..(25): SEQ ID NO: 6390; WAN024C3I_at; Start 138; Stop 162
tcgcgatttaaataatgaagagaag

SEQ ID NO: 102649 - DNA, 25 bp, Artificial
  probe
  misc_feature (1)..(25): SEQ ID NO: 6390; WAN024C3I_at; Start 80; Stop 104
tcaagaaaatggataaacaaatgcg

SEQ ID NO: 102650 - DNA, 25 bp, Artificial
  probe
  misc_feature (1)..(25): SEQ ID NO: 6390; WAN024C3I_at; Start 400; Stop 424
tatgcctctaataaatataaagccg

SEQ ID NO: 102651 - DNA, 25 bp, Artificial
  probe
  misc_feature (1)..(25): SEQ ID NO: 6390; WAN024C3I_at; Start 488; Stop 512
catttaatacacttgaagcgtggaa

SEQ ID NO: 102652 - DNA, 25 bp, Artificial
  probe
  misc_feature (1)..(25): SEQ ID NO: 6390; WAN024C3I_at; Start 436; Stop 460
gcaggtcaaactctaagtgataaat

SEQ ID NO: 102653 - DNA, 25 bp, Artificial
  probe
  misc_feature (1)..(25): SEQ ID NO: 6950; WAN024C3J_at; Start 387; Stop 411
tatctctgaagttaatttgaatgtc

SEQ ID NO: 102654 - DNA, 25 bp, Artificial
  probe
  misc_feature (1)..(25): SEQ ID NO: 6950; WAN024C3J_at; Start 359; Stop 383
tagctaagtataaaaaacttgccga

SEQ ID NO: 102655 - DNA, 25 bp, Artificial
  probe
  misc_feature (1)..(25): SEQ ID NO: 6950; WAN024C3J_at; Start 61; Stop 85
ggtaattatcatctaactgcttata

SEQ ID NO: 102656 - DNA, 25 bp, Artificial
  probe
  misc_feature (1)..(25): SEQ ID NO: 6950; WAN024C3J_at; Start 378; Stop 402
tgccgaaagtatctctgaagttaat

SEQ ID NO: 102657 - DNA, 25 bp, Artificial
  probe
  misc_feature (1)..(25): SEQ ID NO: 6950; WAN024C3J_at; Start 29; Stop 53
aacttgagactatggattttggtgc

SEQ ID NO: 102658 - DNA, 25 bp, Artificial
  probe
  misc_feature (1)..(25): SEQ ID NO: 6950; WAN024C3J_at; Start 180; Stop 204
caatgaaggcaacataaaaatagaa

SEQ ID NO: 102659 - DNA, 25 bp, Artificial
  probe
  misc_feature (1)..(25): SEQ ID NO: 6950; WAN024C3J_at; Start 373; Stop 397
aaacttgccgaaagtatctctgaag

SEQ ID NO: 102660 - DNA, 25 bp, Artificial
  probe
  misc_feature (1)..(25): SEQ ID NO: 6950; WAN024C3J_at; Start 229; Stop 253
gctaaaattccagtgtatattgaaa

SEQ ID NO: 102661 - DNA, 25 bp, Artificial
  probe
  misc_feature (1)..(25): SEQ ID NO: 6950; WAN024C3J_at; Start 91; Stop 115
cttaaagaacgtatggatagtggag

SEQ ID NO: 102662 - DNA, 25 bp, Artificial
  probe
  misc_feature (1)..(25): SEQ ID NO: 6950; WAN024C3J_at; Start 139; Stop 163
cagcaatatgataatctatggagga

SEQ ID NO: 102663 - DNA, 25 bp, Artificial
  probe
  misc_feature (1)..(25): SEQ ID NO: 6950; WAN024C3J_at; Start 490; Stop 514
tctatgttacaaggcgatattccaa

SEQ ID NO: 102664 - DNA, 25 bp, Artificial
  probe
  misc_feature (1)..(25): SEQ ID NO: 6950; WAN024C3J_at; Start 308; Stop 332
tcgctcttcgtaataaacctgaatt

SEQ ID NO: 102665 - DNA, 25 bp, Artificial
  probe
  misc_feature (1)..(25): SEQ ID NO: 6950; WAN024C3J_at; Start 246; Stop 270
tattgaaaatttcaaaggcttagaa

SEQ ID NO: 102666 - DNA, 25 bp, Artificial
  probe
  misc_feature (1)..(25): SEQ ID NO: 6950; WAN024C3J_at; Start 166; Stop 190
gagtataaattctacaatgaaggca

SEQ ID NO: 102667 - DNA, 25 bp, Artificial
  probe
  misc_feature (1)..(25): SEQ ID NO: 6950; WAN024C3J_at; Start 111; Stop 135
tggagatatggcagaaatagacatt

SEQ ID NO: 102668 - DNA, 25 bp, Artificial
  probe
  misc_feature (1)..(25): SEQ ID NO: 6950; WAN024C3J_at; Start 323; Stop 347
aacctgaattatttgcagaatctga

SEQ ID NO: 102669 - DNA, 25 bp, Artificial
  probe
  misc_feature (1)..(25): SEQ ID NO: 6950; WAN024C3J_at; Start 221; Stop 245
cattcttagctaaaattccagtgta

SEQ ID NO: 102670 - DNA, 25 bp, Artificial
  probe
  misc_feature (1)..(25): SEQ ID NO: 6950; WAN024C3J_at; Start 499; Stop 523
caaggcgatattccaaagttaacaa

SEQ ID NO: 102671 - DNA, 25 bp, Artificial
  probe
  misc_feature (1)..(25): SEQ ID NO: 6950; WAN024C3J_at; Start 435; Stop 459
tgttgaaatctttaatcaagagcct

SEQ ID NO: 102672 - DNA, 25 bp, Artificial
  probe
  misc_feature (1)..(25): SEQ ID NO: 6950; WAN024C3J_at; Start 39; Stop 63
tatggattttggtgctcctaaaggt

SEQ ID NO: 102673 - DNA, 25 bp, Artificial
  probe
  misc_feature (1)..(25): SEQ ID NO: 6950; WAN024C3J_at; Start 22; Stop 46
gggatgaaacttgagactatggatt

SEQ ID NO: 102674 - DNA, 25 bp, Artificial
  probe
  misc_feature (1)..(25): SEQ ID NO: 6950; WAN024C3J_at; Start 98; Stop 122
aacgtatggatagtggagatatggc

SEQ ID NO: 102675 - DNA, 25 bp, Artificial
  probe
  misc_feature (1)..(25): SEQ ID NO: 6950; WAN024C3J_at; Start 338; Stop 362
cagaatctgataaacgaacggtagc

SEQ ID NO: 102676 - DNA, 25 bp, Artificial
  probe
  misc_feature (1)..(25): SEQ ID NO: 6950; WAN024C3J_at; Start 296; Stop 320
agatttatcttttcgctcttcgtaa

SEQ ID NO: 102677 - DNA, 25 bp, Artificial
  probe
  misc_feature (1)..(25): SEQ ID NO: 6950; WAN024C3J_at; Start 206; Stop 230
taaaaaatggattaccattcttagc

SEQ ID NO: 102678 - DNA, 25 bp, Artificial
  probe
  misc_feature (1)..(25): SEQ ID NO: 6950; WAN024C3J_at; Start 49; Stop 73
ggtgctcctaaaggtaattatcatc

SEQ ID NO: 102679 - DNA, 25 bp, Artificial
  probe
  misc_feature (1)..(25): SEQ ID NO: 6950; WAN024C3J_at; Start 124; Stop 148
gaaatagacatttatcagcaatatg

SEQ ID NO: 102680 - DNA, 25 bp, Artificial
  probe
  misc_feature (1)..(25): SEQ ID NO: 6950; WAN024C3J_at; Start 280; Stop 304
ttaggagttaatgagaagatttatc

SEQ ID NO: 102681 - DNA, 25 bp, Artificial
  probe
  misc_feature (1)..(25): SEQ ID NO: 6950; WAN024C3J_at; Start 450; Stop 474
tcaagagccttgtctgataaatttt

SEQ ID NO: 102682 - DNA, 25 bp, Artificial
  probe
  misc_feature (1)..(25): SEQ ID NO: 6950; WAN024C3J_at; Start 405; Stop 429
gaatgtcttttttcaaaatgcttta

SEQ ID NO: 102683 - DNA, 25 bp, Artificial
  probe
  misc_feature (1)..(25): SEQ ID NO: 6950; WAN024C3J_at; Start 481; Stop 505
tttatgaattctatgttacaaggcg

SEQ ID NO: 102684 - DNA, 25 bp, Artificial
  probe
  misc_feature (1)..(25): SEQ ID NO: 6950; WAN024C3J_at; Start 77; Stop 101
ctgcttataataaacttaaagaacg

SEQ ID NO: 102685 - DNA, 25 bp, Artificial
  probe
  misc_feature (1)..(25): SEQ ID NO: 6950; WAN024C3J_at; Start 153; Stop 177
tctatggaggattgagtataaattc

SEQ ID NO: 102686 - DNA, 25 bp, Artificial
  probe
  misc_feature (1)..(25): SEQ ID NO: 6950; WAN024C3J_at; Start 346; Stop 370
gataaacgaacggtagctaagtata

SEQ ID NO: 102687 - DNA, 25 bp, Artificial
  probe
  misc_feature (1)..(25): SEQ ID NO: 6386; WAN024C3K_at; Start 75; Stop 99
tcaggtgagagaattacttgtatca

SEQ ID NO: 102688 - DNA, 25 bp, Artificial
  probe
  misc_feature (1)..(25): SEQ ID NO: 6386; WAN024C3K_at; Start 22; Stop 46
aaggatttgatttccatgggctata

SEQ ID NO: 102689 - DNA, 25 bp, Artificial
  probe
  misc_feature (1)..(25): SEQ ID NO: 6386; WAN024C3K_at; Start 138; Stop 162
tgttccaaaaagtgttgtgaaagag

SEQ ID NO: 102690 - DNA, 25 bp, Artificial
  probe
  misc_feature (1)..(25): SEQ ID NO: 6386; WAN024C3K_at; Start 81; Stop 105
gagagaattacttgtatcacgaggc

SEQ ID NO: 102691 - DNA, 25 bp, Artificial
  probe
  misc_feature (1)..(25): SEQ ID NO: 6386; WAN024C3K_at; Start 142; Stop 166
ccaaaaagtgttgtgaaagagttgt

SEQ ID NO: 102692 - DNA, 25 bp, Artificial
  probe
  misc_feature (1)..(25): SEQ ID NO: 6386; WAN024C3K_at; Start 7; Stop 31
gatacgatttctaataaggatttga

SEQ ID NO: 102693 - DNA, 25 bp, Artificial
  probe
  misc_feature (1)..(25): SEQ ID NO: 6386; WAN024C3K_at; Start 85; Stop 109
gaattacttgtatcacgaggctata

SEQ ID NO: 102694 - DNA, 25 bp, Artificial
  probe
  misc_feature (1)..(25): SEQ ID NO: 6386; WAN024C3K_at; Start 69; Stop 93
tatccatcaggtgagagaattactt

SEQ ID NO: 102695 - DNA, 25 bp, Artificial
  probe
  misc_feature (1)..(25): SEQ ID NO: 6386; WAN024C3K_at; Start 98; Stop 122
cacgaggctatacattttataatcg

SEQ ID NO: 102696 - DNA, 25 bp, Artificial
  probe
  misc_feature (1)..(25): SEQ ID NO: 6386; WAN024C3K_at; Start 27; Stop 51
tttgatttccatgggctatagacca

SEQ ID NO: 102697 - DNA, 25 bp, Artificial
  probe
  misc_feature (1)..(25): SEQ ID NO: 6386; WAN024C3K_at; Start 40; Stop 64
ggctatagaccatcaacagcaaatg

SEQ ID NO: 102698 - DNA, 25 bp, Artificial
  probe
  misc_feature (1)..(25): SEQ ID NO: 6386; WAN024C3K_at; Start 112; Stop 136
ttttataatcgcaaacgtttgatgg

SEQ ID NO: 102699 - DNA, 25 bp, Artificial
  probe
  misc_feature (1)..(25): SEQ ID NO: 6386; WAN024C3K_at; Start 155; Stop 179
tgaaagagttgttgggaatggaatt

SEQ ID NO: 102700 - DNA, 25 bp, Artificial
  probe
  misc_feature (1)..(25): SEQ ID NO: 6386; WAN024C3K_at; Start 122; Stop 146
gcaaacgtttgatggttgttccaaa

SEQ ID NO: 102701 - DNA, 25 bp, Artificial
  probe
  misc_feature (1)..(25): SEQ ID NO: 6386; WAN024C3K_at; Start 72; Stop 96
ccatcaggtgagagaattacttgta

SEQ ID NO: 102702 - DNA, 25 bp, Artificial
  probe
  misc_feature (1)..(25): SEQ ID NO: 6386; WAN024C3K_at; Start 34; Stop 58
tccatgggctatagaccatcaacag

SEQ ID NO: 102703 - DNA, 25 bp, Artificial
  probe
  misc_feature (1)..(25): SEQ ID NO: 6386; WAN024C3K_at; Start 61; Stop 85
aatgctattatccatcaggtgagag

SEQ ID NO: 102704 - DNA, 25 bp, Artificial
  probe
  misc_feature (1)..(25): SEQ ID NO: 6386; WAN024C3K_at; Start 59; Stop 83
caaatgctattatccatcaggtgag

SEQ ID NO: 102705 - DNA, 25 bp, Artificial
  probe
  misc_feature (1)..(25): SEQ ID NO: 6386; WAN024C3K_at; Start 38; Stop 62
tgggctatagaccatcaacagcaaa

SEQ ID NO: 102706 - DNA, 25 bp, Artificial
  probe
  misc_feature (1)..(25): SEQ ID NO: 6386; WAN024C3K_at; Start 120; Stop 144
tcgcaaacgtttgatggttgttcca

SEQ ID NO: 102707 - DNA, 25 bp, Artificial
  probe
  misc_feature (1)..(25): SEQ ID NO: 6386; WAN024C3K_at; Start 36; Stop 60
catgggctatagaccatcaacagca

SEQ ID NO: 102708 - DNA, 25 bp, Artificial
  probe
  misc_feature (1)..(25): SEQ ID NO: 6386; WAN024C3K_at; Start 56; Stop 80
cagcaaatgctattatccatcaggt

SEQ ID NO: 102709 - DNA, 25 bp, Artificial
  probe
  misc_feature (1)..(25): SEQ ID NO: 6386; WAN024C3K_at; Start 43; Stop 67
tatagaccatcaacagcaaatgcta

SEQ ID NO: 102710 - DNA, 25 bp, Artificial
  probe
  misc_feature (1)..(25): SEQ ID NO: 6386; WAN024C3K_at; Start 25; Stop 49
gatttgatttccatgggctatagac

SEQ ID NO: 102711 - DNA, 25 bp, Artificial
  probe
  misc_feature (1)..(25): SEQ ID NO: 6386; WAN024C3K_at; Start 115; Stop 139
tataatcgcaaacgtttgatggttg

SEQ ID NO: 102712 - DNA, 25 bp, Artificial
  probe
  misc_feature (1)..(25): SEQ ID NO: 6386; WAN024C3K_at; Start 132; Stop 156
gatggttgttccaaaaagtgttgtg

SEQ ID NO: 102713 - DNA, 25 bp, Artificial
  probe
  misc_feature (1)..(25): SEQ ID NO: 6386; WAN024C3K_at; Start 45; Stop 69
tagaccatcaacagcaaatgctatt

SEQ ID NO: 102714 - DNA, 25 bp, Artificial
  probe
  misc_feature (1)..(25): SEQ ID NO: 6386; WAN024C3K_at; Start 64; Stop 88
gctattatccatcaggtgagagaat

SEQ ID NO: 102715 - DNA, 25 bp, Artificial
  probe
  misc_feature (1)..(25): SEQ ID NO: 6386; WAN024C3K_at; Start 89; Stop 113
tacttgtatcacgaggctatacatt

SEQ ID NO: 102716 - DNA, 25 bp, Artificial
  probe
  misc_feature (1)..(25): SEQ ID NO: 6386; WAN024C3K_at; Start 108; Stop 132
tacattttataatcgcaaacgtttg

SEQ ID NO: 102717 - DNA, 25 bp, Artificial
  probe
  misc_feature (1)..(25): SEQ ID NO: 6386; WAN024C3K_at; Start 101; Stop 125
gaggctatacattttataatcgcaa

SEQ ID NO: 102718 - DNA, 25 bp, Artificial
  probe
  misc_feature (1)..(25): SEQ ID NO: 6386; WAN024C3K_at; Start 83; Stop 107
gagaattacttgtatcacgaggcta

SEQ ID NO: 102719 - DNA, 25 bp, Artificial
  probe
  misc_feature (1)..(25): SEQ ID NO: 6386; WAN024C3K_at; Start 2; Stop 26
tgaaagatacgatttctaataagga

SEQ ID NO: 102720 - DNA, 25 bp, Artificial
  probe
  misc_feature (1)..(25): SEQ ID NO: 6386; WAN024C3K_at; Start 127; Stop 151
cgtttgatggttgttccaaaaagtg

SEQ ID NO: 102721 - DNA, 25 bp, Artificial
  probe
  misc_feature (1)..(25): SEQ ID NO: 6887; WAN024C3L_at; Start 214; Stop 238
aaaattttacctagcaatagaagtg

SEQ ID NO: 102722 - DNA, 25 bp, Artificial
  probe
  misc_feature (1)..(25): SEQ ID NO: 6887; WAN024C3L_at; Start 463; Stop 487
gagttgttctcttctaagagtggac

SEQ ID NO: 102723 - DNA, 25 bp, Artificial
  probe
  misc_feature (1)..(25): SEQ ID NO: 6887; WAN024C3L_at; Start 410; Stop 434
tacagatggctattgctgataaggt

SEQ ID NO: 102724 - DNA, 25 bp, Artificial
  probe
  misc_feature (1)..(25): SEQ ID NO: 6887; WAN024C3L_at; Start 303; Stop 327
tgtatcacaaattaagcctagcgag

SEQ ID NO: 102725 - DNA, 25 bp, Artificial
  probe
  misc_feature (1)..(25): SEQ ID NO: 6887; WAN024C3L_at; Start 146; Stop 170
taaatactgggagtgtcttaagctc

SEQ ID NO: 102726 - DNA, 25 bp, Artificial
  probe
  misc_feature (1)..(25): SEQ ID NO: 6887; WAN024C3L_at; Start 7; Stop 31
tatatcgagtataaacagcgtggga

SEQ ID NO: 102727 - DNA, 25 bp, Artificial
  probe
  misc_feature (1)..(25): SEQ ID NO: 6887; WAN024C3L_at; Start 396; Stop 420
tattcaggcaagtatacagatggct

SEQ ID NO: 102728 - DNA, 25 bp, Artificial
  probe
  misc_feature (1)..(25): SEQ ID NO: 6887; WAN024C3L_at; Start 155; Stop 179
ggagtgtcttaagctctagtatgac

SEQ ID NO: 102729 - DNA, 25 bp, Artificial
  probe
  misc_feature (1)..(25): SEQ ID NO: 6887; WAN024C3L_at; Start 424; Stop 448
gctgataaggtgataatagaggatt

SEQ ID NO: 102730 - DNA, 25 bp, Artificial
  probe
  misc_feature (1)..(25): SEQ ID NO: 6887; WAN024C3L_at; Start 169; Stop 193
tctagtatgactttatcggagcttt

SEQ ID NO: 102731 - DNA, 25 bp, Artificial
  probe
  misc_feature (1)..(25): SEQ ID NO: 6887; WAN024C3L_at; Start 20; Stop 44
aacagcgtgggaagaaaaggctttg

SEQ ID NO: 102732 - DNA, 25 bp, Artificial
  probe
  misc_feature (1)..(25): SEQ ID NO: 6887; WAN024C3L_at; Start 287; Stop 311
tatttggaaataagcctgtatcaca

SEQ ID NO: 102733 - DNA, 25 bp, Artificial
  probe
  misc_feature (1)..(25): SEQ ID NO: 6887; WAN024C3L_at; Start 365; Stop 389
cgagaaatttcttaggaagattgaa

SEQ ID NO: 102734 - DNA, 25 bp, Artificial
  probe
  misc_feature (1)..(25): SEQ ID NO: 6887; WAN024C3L_at; Start 52; Stop 76
tctatacgtgagaggagcaagagcc

SEQ ID NO: 102735 - DNA, 25 bp, Artificial
  probe
  misc_feature (1)..(25): SEQ ID NO: 6887; WAN024C3L_at; Start 74; Stop 98
gcctactccataaaagcggatttaa

SEQ ID NO: 102736 - DNA, 25 bp, Artificial
  probe
  misc_feature (1)..(25): SEQ ID NO: 6887; WAN024C3L_at; Start 318; Stop 342
gcctagcgagtatcaaaaaattatg

SEQ ID NO: 102737 - DNA, 25 bp, Artificial
  probe
  misc_feature (1)..(25): SEQ ID NO: 6887; WAN024C3L_at; Start 38; Stop 62
ggctttggtcgttttctatacgtga

SEQ ID NO: 102738 - DNA, 25 bp, Artificial
  probe
  misc_feature (1)..(25): SEQ ID NO: 6887; WAN024C3L_at; Start 101; Stop 125
caaaacgagaagctaaaatagaagc

SEQ ID NO: 102739 - DNA, 25 bp, Artificial
  probe
  misc_feature (1)..(25): SEQ ID NO: 6887; WAN024C3L_at; Start 112; Stop 136
gctaaaatagaagcggagaaagttc

SEQ ID NO: 102740 - DNA, 25 bp, Artificial
  probe
  misc_feature (1)..(25): SEQ ID NO: 6887; WAN024C3L_at; Start 182; Stop 206
tatcggagctttataatgaatggct

SEQ ID NO: 102741 - DNA, 25 bp, Artificial
  probe
  misc_feature (1)..(25): SEQ ID NO: 6887; WAN024C3L_at; Start 380; Stop 404
gaagattgaattctagtattcaggc

SEQ ID NO: 102742 - DNA, 25 bp, Artificial
  probe
  misc_feature (1)..(25): SEQ ID NO: 6887; WAN024C3L_at; Start 256; Stop 280
tatcttatgagaaagaaggtcatcg

SEQ ID NO: 102743 - DNA, 25 bp, Artificial
  probe
  misc_feature (1)..(25): SEQ ID NO: 6887; WAN024C3L_at; Start 16; Stop 40
tataaacagcgtgggaagaaaaggc

SEQ ID NO: 102744 - DNA, 25 bp, Artificial
  probe
  misc_feature (1)..(25): SEQ ID NO: 6887; WAN024C3L_at; Start 138; Stop 162
tcataagttaaatactgggagtgtc

SEQ ID NO: 102745 - DNA, 25 bp, Artificial
  probe
  misc_feature (1)..(25): SEQ ID NO: 6887; WAN024C3L_at; Start 335; Stop 359
aaattatgaatgagtatggagagac

SEQ ID NO: 102746 - DNA, 25 bp, Artificial
  probe
  misc_feature (1)..(25): SEQ ID NO: 6887; WAN024C3L_at; Start 124; Stop 148
gcggagaaagttcttcataagttaa

SEQ ID NO: 102747 - DNA, 25 bp, Artificial
  probe
  misc_feature (1)..(25): SEQ ID NO: 6887; WAN024C3L_at; Start 223; Stop 247
cctagcaatagaagtgtagttacta

SEQ ID NO: 102748 - DNA, 25 bp, Artificial
  probe
  misc_feature (1)..(25): SEQ ID NO: 6887; WAN024C3L_at; Start 68; Stop 92
gcaagagcctactccataaaagcgg

SEQ ID NO: 102749 - DNA, 25 bp, Artificial
  probe
  misc_feature (1)..(25): SEQ ID NO: 6887; WAN024C3L_at; Start 349; Stop 373
tatggagagactgtatcgagaaatt

SEQ ID NO: 102750 - DNA, 25 bp, Artificial
  probe
  misc_feature (1)..(25): SEQ ID NO: 6887; WAN024C3L_at; Start 56; Stop 80
tacgtgagaggagcaagagcctact

SEQ ID NO: 102751 - DNA, 25 bp, Artificial
  probe
  misc_feature (1)..(25): SEQ ID NO: 6887; WAN024C3L_at; Start 470; Stop 494
tctcttctaagagtggacacaaagg

SEQ ID NO: 102752 - DNA, 25 bp, Artificial
  probe
  misc_feature (1)..(25): SEQ ID NO: 6887; WAN024C3L_at; Start 441; Stop 465
agaggattttactgcttatgttgag

SEQ ID NO: 102753 - DNA, 25 bp, Artificial
  probe
  misc_feature (1)..(25): SEQ ID NO: 6887; WAN024C3L_at; Start 270; Stop 294
gaaggtcatcgaaaggttatttgga

SEQ ID NO: 102754 - DNA, 25 bp, Artificial
  probe
  misc_feature (1)..(25): SEQ ID NO: 6887; WAN024C3L_at; Start 450; Stop 474
tactgcttatgttgagttgttctct

SEQ ID NO: 102755 - DNA, 25 bp, Artificial
  probe
  misc_feature (1)..(25): SEQ ID NO: 7118; WAN024C3M_at; Start 31; Stop 55
cagatagggattagccaaaatcctt

SEQ ID NO: 102756 - DNA, 25 bp, Artificial
  probe
  misc_feature (1)..(25): SEQ ID NO: 7118; WAN024C3M_at; Start 12; Stop 36
gagaaaactcttgttagaccagata

SEQ ID NO: 102757 - DNA, 25 bp, Artificial
  probe
  misc_feature (1)..(25): SEQ ID NO: 7118; WAN024C3M_at; Start 20; Stop 44
tcttgttagaccagatagggattag

SEQ ID NO: 102758 - DNA, 25 bp, Artificial
  probe
  misc_feature (1)..(25): SEQ ID NO: 7118; WAN024C3M_at; Start 29; Stop 53
accagatagggattagccaaaatcc

SEQ ID NO: 102759 - DNA, 25 bp, Artificial
  probe
  misc_feature (1)..(25): SEQ ID NO: 7118; WAN024C3M_at; Start 67; Stop 91
tatccaaatggagatgcaaacttct

SEQ ID NO: 102760 - DNA, 25 bp, Artificial
  probe
  misc_feature (1)..(25): SEQ ID NO: 7118; WAN024C3M_at; Start 10; Stop 34
gcgagaaaactcttgttagaccaga

SEQ ID NO: 102761 - DNA, 25 bp, Artificial
  probe
  misc_feature (1)..(25): SEQ ID NO: 7118; WAN024C3M_at; Start 19; Stop 43
ctcttgttagaccagatagggatta

SEQ ID NO: 102762 - DNA, 25 bp, Artificial
  probe
  misc_feature (1)..(25): SEQ ID NO: 7118; WAN024C3M_at; Start 68; Stop 92
atccaaatggagatgcaaacttctg

SEQ ID NO: 102763 - DNA, 25 bp, Artificial
  probe
  misc_feature (1)..(25): SEQ ID NO: 7118; WAN024C3M_at; Start 27; Stop 51
agaccagatagggattagccaaaat

SEQ ID NO: 102764 - DNA, 25 bp, Artificial
  probe
  misc_feature (1)..(25): SEQ ID NO: 7118; WAN024C3M_at; Start 28; Stop 52
gaccagatagggattagccaaaatc

SEQ ID NO: 102765 - DNA, 25 bp, Artificial
  probe
  misc_feature (1)..(25): SEQ ID NO: 7118; WAN024C3M_at; Start 65; Stop 89
tatatccaaatggagatgcaaactt

SEQ ID NO: 102766 - DNA, 25 bp, Artificial
  probe
  misc_feature (1)..(25): SEQ ID NO: 7118; WAN024C3M_at; Start 32; Stop 56
agatagggattagccaaaatccttc

SEQ ID NO: 102767 - DNA, 25 bp, Artificial
  probe
  misc_feature (1)..(25): SEQ ID NO: 7118; WAN024C3M_at; Start 36; Stop 60
agggattagccaaaatccttctatg

SEQ ID NO: 102768 - DNA, 25 bp, Artificial
  probe
  misc_feature (1)..(25): SEQ ID NO: 7118; WAN024C3M_at; Start 35; Stop 59
tagggattagccaaaatccttctat

SEQ ID NO: 102769 - DNA, 25 bp, Artificial
  probe
  misc_feature (1)..(25): SEQ ID NO: 7118; WAN024C3M_at; Start 64; Stop 88
ttatatccaaatggagatgcaaact

SEQ ID NO: 102770 - DNA, 25 bp, Artificial
  probe
  misc_feature (1)..(25): SEQ ID NO: 7118; WAN024C3M_at; Start 22; Stop 46
ttgttagaccagatagggattagcc

SEQ ID NO: 102771 - DNA, 25 bp, Artificial
  probe
  misc_feature (1)..(25): SEQ ID NO: 7118; WAN024C3M_at; Start 8; Stop 32
tcgcgagaaaactcttgttagacca

SEQ ID NO: 102772 - DNA, 25 bp, Artificial
  probe
  misc_feature (1)..(25): SEQ ID NO: 7118; WAN024C3M_at; Start 66; Stop 90
atatccaaatggagatgcaaacttc

SEQ ID NO: 102773 - DNA, 25 bp, Artificial
  probe
  misc_feature (1)..(25): SEQ ID NO: 7118; WAN024C3M_at; Start 21; Stop 45
cttgttagaccagatagggattagc

SEQ ID NO: 102774 - DNA, 25 bp, Artificial
  probe
  misc_feature (1)..(25): SEQ ID NO: 7118; WAN024C3M_at; Start 11; Stop 35
cgagaaaactcttgttagaccagat

SEQ ID NO: 102775 - DNA, 25 bp, Artificial
  probe
  misc_feature (1)..(25): SEQ ID NO: 7118; WAN024C3M_at; Start 9; Stop 33
cgcgagaaaactcttgttagaccag

SEQ ID NO: 102776 - DNA, 25 bp, Artificial
  probe
  misc_feature (1)..(25): SEQ ID NO: 7118; WAN024C3M_at; Start 18; Stop 42
actcttgttagaccagatagggatt

SEQ ID NO: 102777 - DNA, 25 bp, Artificial
  probe
  misc_feature (1)..(25): SEQ ID NO: 7118; WAN024C3M_at; Start 74; Stop 98
atggagatgcaaacttctgcccaac

SEQ ID NO: 102778 - DNA, 25 bp, Artificial
  probe
  misc_feature (1)..(25): SEQ ID NO: 7118; WAN024C3M_at; Start 30; Stop 54
ccagatagggattagccaaaatcct

SEQ ID NO: 102779 - DNA, 25 bp, Artificial
  probe
  misc_feature (1)..(25): SEQ ID NO: 7118; WAN024C3M_at; Start 14; Stop 38
gaaaactcttgttagaccagatagg

SEQ ID NO: 102780 - DNA, 25 bp, Artificial
  probe
  misc_feature (1)..(25): SEQ ID NO: 7118; WAN024C3M_at; Start 13; Stop 37
agaaaactcttgttagaccagatag

SEQ ID NO: 102781 - DNA, 25 bp, Artificial
  probe
  misc_feature (1)..(25): SEQ ID NO: 7118; WAN024C3M_at; Start 17; Stop 41
aactcttgttagaccagatagggat

SEQ ID NO: 102782 - DNA, 25 bp, Artificial
  probe
  misc_feature (1)..(25): SEQ ID NO: 7118; WAN024C3M_at; Start 15; Stop 39
aaaactcttgttagaccagataggg

SEQ ID NO: 102783 - DNA, 25 bp, Artificial
  probe
  misc_feature (1)..(25): SEQ ID NO: 7118; WAN024C3M_at; Start 16; Stop 40
aaactcttgttagaccagataggga

SEQ ID NO: 102784 - DNA, 25 bp, Artificial
  probe
  misc_feature (1)..(25): SEQ ID NO: 7118; WAN024C3M_at; Start 69; Stop 93
tccaaatggagatgcaaacttctgc

SEQ ID NO: 102785 - DNA, 25 bp, Artificial
  probe
  misc_feature (1)..(25): SEQ ID NO: 7118; WAN024C3M_at; Start 23; Stop 47
tgttagaccagatagggattagcca

SEQ ID NO: 102786 - DNA, 25 bp, Artificial
  probe
  misc_feature (1)..(25): SEQ ID NO: 7118; WAN024C3M_at; Start 25; Stop 49
ttagaccagatagggattagccaaa

SEQ ID NO: 102787 - DNA, 25 bp, Artificial
  probe
  misc_feature (1)..(25): SEQ ID NO: 7118; WAN024C3M_at; Start 24; Stop 48
gttagaccagatagggattagccaa

SEQ ID NO: 102788 - DNA, 25 bp, Artificial
  probe
  misc_feature (1)..(25): SEQ ID NO: 7118; WAN024C3M_at; Start 70; Stop 94
ccaaatggagatgcaaacttctgcc

SEQ ID NO: 102789 - DNA, 25 bp, Artificial
  probe
  misc_feature (1)..(25): SEQ ID NO: 2349; WAN024C3N_at; Start 206; Stop 230
tttacttcgtggatagttgtcacga

SEQ ID NO: 102790 - DNA, 25 bp, Artificial
  probe
  misc_feature (1)..(25): SEQ ID NO: 2349; WAN024C3N_at; Start 236; Stop 260
gcttctttacctgcaaggtcttctg

SEQ ID NO: 102791 - DNA, 25 bp, Artificial
  probe
  misc_feature (1)..(25): SEQ ID NO: 2349; WAN024C3N_at; Start 125; Stop 149
tctttcaagtcagcaagtgtttcaa

SEQ ID NO: 102792 - DNA, 25 bp, Artificial
  probe
  misc_feature (1)..(25): SEQ ID NO: 2349; WAN024C3N_at; Start 39; Stop 63
tttctacagctgtatcaattgctgc

SEQ ID NO: 102793 - DNA, 25 bp, Artificial
  probe
  misc_feature (1)..(25): SEQ ID NO: 2349; WAN024C3N_at; Start 197; Stop 221
tctttagcttttacttcgtggatag

SEQ ID NO: 102794 - DNA, 25 bp, Artificial
  probe
  misc_feature (1)..(25): SEQ ID NO: 2349; WAN024C3N_at; Start 162; Stop 186
tgtcttttgcaagttcatcgtcaag

SEQ ID NO: 102795 - DNA, 25 bp, Artificial
  probe
  misc_feature (1)..(25): SEQ ID NO: 2349; WAN024C3N_at; Start 119; Stop 143
tatttttctttcaagtcagcaagtg

SEQ ID NO: 102796 - DNA, 25 bp, Artificial
  probe
  misc_feature (1)..(25): SEQ ID NO: 2349; WAN024C3N_at; Start 229; Stop 253
gaatttagcttctttacctgcaagg

SEQ ID NO: 102797 - DNA, 25 bp, Artificial
  probe
  misc_feature (1)..(25): SEQ ID NO: 2349; WAN024C3N_at; Start 62; Stop 86
gcaccttcaactgcatctttgtaag

SEQ ID NO: 102798 - DNA, 25 bp, Artificial
  probe
  misc_feature (1)..(25): SEQ ID NO: 2349; WAN024C3N_at; Start 165; Stop 189
cttttgcaagttcatcgtcaagagc

SEQ ID NO: 102799 - DNA, 25 bp, Artificial
  probe
  misc_feature (1)..(25): SEQ ID NO: 2349; WAN024C3N_at; Start 257; Stop 281
tctgcttggtagtcttctgggaatg

SEQ ID NO: 102800 - DNA, 25 bp, Artificial
  probe
  misc_feature (1)..(25): SEQ ID NO: 2349; WAN024C3N_at; Start 12; Stop 36
cttctggaagttctacgatttcagc

SEQ ID NO: 102801 - DNA, 25 bp, Artificial
  probe
  misc_feature (1)..(25): SEQ ID NO: 2349; WAN024C3N_at; Start 156; Stop 180
catcaatgtcttttgcaagttcatc

SEQ ID NO: 102802 - DNA, 25 bp, Artificial
  probe
  misc_feature (1)..(25): SEQ ID NO: 2349; WAN024C3N_at; Start 92; Stop 116
tctttagcagcagccaattctttgc

SEQ ID NO: 102803 - DNA, 25 bp, Artificial
  probe
  misc_feature (1)..(25): SEQ ID NO: 2349; WAN024C3N_at; Start 263; Stop 287
tggtagtcttctgggaatgttacga

SEQ ID NO: 102804 - DNA, 25 bp, Artificial
  probe
  misc_feature (1)..(25): SEQ ID NO: 2349; WAN024C3N_at; Start 241; Stop 265
tttacctgcaaggtcttctgcttgg

SEQ ID NO: 102805 - DNA, 25 bp, Artificial
  probe
  misc_feature (1)..(25): SEQ ID NO: 2349; WAN024C3N_at; Start 268; Stop 292
gtcttctgggaatgttacgataaca

SEQ ID NO: 102806 - DNA, 25 bp, Artificial
  probe
  misc_feature (1)..(25): SEQ ID NO: 2349; WAN024C3N_at; Start 51; Stop 75
tatcaattgctgcaccttcaactgc

SEQ ID NO: 102807 - DNA, 25 bp, Artificial
  probe
  misc_feature (1)..(25): SEQ ID NO: 2349; WAN024C3N_at; Start 216; Stop 240
ggatagttgtcacgaatttagcttc

SEQ ID NO: 102808 - DNA, 25 bp, Artificial
  probe
  misc_feature (1)..(25): SEQ ID NO: 2349; WAN024C3N_at; Start 285; Stop 309
cgataacatcaacggtttcgccagc

SEQ ID NO: 102809 - DNA, 25 bp, Artificial
  probe
  misc_feature (1)..(25): SEQ ID NO: 2349; WAN024C3N_at; Start 280; Stop 304
tgttacgataacatcaacggtttcg

SEQ ID NO: 102810 - DNA, 25 bp, Artificial
  probe
  misc_feature (1)..(25): SEQ ID NO: 2349; WAN024C3N_at; Start 4; Stop 28
gatcatttcttctggaagttctacg

SEQ ID NO: 102811 - DNA, 25 bp, Artificial
  probe
  misc_feature (1)..(25): SEQ ID NO: 2349; WAN024C3N_at; Start 47; Stop 71
gctgtatcaattgctgcaccttcaa

SEQ ID NO: 102812 - DNA, 25 bp, Artificial
  probe
  misc_feature (1)..(25): SEQ ID NO: 2349; WAN024C3N_at; Start 254; Stop 278
tcttctgcttggtagtcttctggga

SEQ ID NO: 102813 - DNA, 25 bp, Artificial
  probe
  misc_feature (1)..(25): SEQ ID NO: 2349; WAN024C3N_at; Start 88; Stop 112
ttcttctttagcagcagccaattct

SEQ ID NO: 102814 - DNA, 25 bp, Artificial
  probe
  misc_feature (1)..(25): SEQ ID NO: 2349; WAN024C3N_at; Start 54; Stop 78
caattgctgcaccttcaactgcatc

SEQ ID NO: 102815 - DNA, 25 bp, Artificial
  probe
  misc_feature (1)..(25): SEQ ID NO: 2349; WAN024C3N_at; Start 137; Stop 161
gcaagtgtttcaacttcttcatcaa

SEQ ID NO: 102816 - DNA, 25 bp, Artificial
  probe
  misc_feature (1)..(25): SEQ ID NO: 2349; WAN024C3N_at; Start 249; Stop 273
caaggtcttctgcttggtagtcttc

SEQ ID NO: 102817 - DNA, 25 bp, Artificial
  probe
  misc_feature (1)..(25): SEQ ID NO: 2349; WAN024C3N_at; Start 283; Stop 307
tacgataacatcaacggtttcgcca

SEQ ID NO: 102818 - DNA, 25 bp, Artificial
  probe
  misc_feature (1)..(25): SEQ ID NO: 2349; WAN024C3N_at; Start 203; Stop 227
gcttttacttcgtggatagttgtca

SEQ ID NO: 102819 - DNA, 25 bp, Artificial
  probe
  misc_feature (1)..(25): SEQ ID NO: 2349; WAN024C3N_at; Start 43; Stop 67
tacagctgtatcaattgctgcacct

SEQ ID NO: 102820 - DNA, 25 bp, Artificial
  probe
  misc_feature (1)..(25): SEQ ID NO: 2349; WAN024C3N_at; Start 245; Stop 269
cctgcaaggtcttctgcttggtagt

SEQ ID NO: 102821 - DNA, 25 bp, Artificial
  probe
  misc_feature (1)..(25): SEQ ID NO: 2349; WAN024C3N_at; Start 130; Stop 154
caagtcagcaagtgtttcaacttct

SEQ ID NO: 102822 - DNA, 25 bp, Artificial
  probe
  misc_feature (1)..(25): SEQ ID NO: 2349; WAN024C3N_at; Start 288; Stop 312
taacatcaacggtttcgccagctga

SEQ ID NO: 102823 - DNA, 25 bp, Artificial
  probe
  misc_feature (1)..(25): SEQ ID NO: 2938; WAN024C3O_at; Start 505; Stop 529
gacttcgttggttctatcgacggtg

SEQ ID NO: 102824 - DNA, 25 bp, Artificial
  probe
  misc_feature (1)..(25): SEQ ID NO: 2938; WAN024C3O_at; Start 622; Stop 646
tcagctggcgaaaccgttgatgtta

SEQ ID NO: 102825 - DNA, 25 bp, Artificial
  probe
  misc_feature (1)..(25): SEQ ID NO: 2938; WAN024C3O_at; Start 864; Stop 888
tgaaggtgcagcaattgatacagct

SEQ ID NO: 102826 - DNA, 25 bp, Artificial
  probe
  misc_feature (1)..(25): SEQ ID NO: 2938; WAN024C3O_at; Start 1080; Stop 1104
taaccttgttatcgaagcagttgcc

SEQ ID NO: 102827 - DNA, 25 bp, Artificial
  probe
  misc_feature (1)..(25): SEQ ID NO: 2938; WAN024C3O_at; Start 1030; Stop 1054
gaagaccttcacaaccaataccaag

SEQ ID NO: 102828 - DNA, 25 bp, Artificial
  probe
  misc_feature (1)..(25): SEQ ID NO: 2938; WAN024C3O_at; Start 973; Stop 997
ttgcaacgtcaagggatcaaccctg

SEQ ID NO: 102829 - DNA, 25 bp, Artificial
  probe
  misc_feature (1)..(25): SEQ ID NO: 2938; WAN024C3O_at; Start 289; Stop 313
tcaatggaaaaaggtcaagactggg

SEQ ID NO: 102830 - DNA, 25 bp, Artificial
  probe
  misc_feature (1)..(25): SEQ ID NO: 2938; WAN024C3O_at; Start 674; Stop 698
cagaagaccttgcaggtaaagaagc

SEQ ID NO: 102831 - DNA, 25 bp, Artificial
  probe
  misc_feature (1)..(25): SEQ ID NO: 2938; WAN024C3O_at; Start 653; Stop 677
cattcccagaagactaccaagcaga

SEQ ID NO: 102832 - DNA, 25 bp, Artificial
  probe
  misc_feature (1)..(25): SEQ ID NO: 2938; WAN024C3O_at; Start 987; Stop 1011
gatcaaccctgacatgtacttccaa

SEQ ID NO: 102833 - DNA, 25 bp, Artificial
  probe
  misc_feature (1)..(25): SEQ ID NO: 2938; WAN024C3O_at; Start 1160; Stop 1184
tggcagcagactacaacatggaagt

SEQ ID NO: 102834 - DNA, 25 bp, Artificial
  probe
  misc_feature (1)..(25): SEQ ID NO: 2938; WAN024C3O_at; Start 1144; Stop 1168
aaagaagttgagcaattggcagcag

SEQ ID NO: 102835 - DNA, 25 bp, Artificial
  probe
  misc_feature (1)..(25): SEQ ID NO: 2938; WAN024C3O_at; Start 1096; Stop 1120
gcagttgccaaagctgaaggatttg

SEQ ID NO: 102836 - DNA, 25 bp, Artificial
  probe
  misc_feature (1)..(25): SEQ ID NO: 2938; WAN024C3O_at; Start 848; Stop 872
cttacaaagatgcagttgaaggtgc

SEQ ID NO: 102837 - DNA, 25 bp, Artificial
  probe
  misc_feature (1)..(25): SEQ ID NO: 2938; WAN024C3O_at; Start 557; Stop 581
acttctcacttggacttggttcagg

SEQ ID NO: 102838 - DNA, 25 bp, Artificial
  probe
  misc_feature (1)..(25): SEQ ID NO: 2938; WAN024C3O_at; Start 490; Stop 514
gacactgttgtgatcgacttcgttg

SEQ ID NO: 102839 - DNA, 25 bp, Artificial
  probe
  misc_feature (1)..(25): SEQ ID NO: 2938; WAN024C3O_at; Start 583; Stop 607
caattcatccctggtttcgaagacc

SEQ ID NO: 102840 - DNA, 25 bp, Artificial
  probe
  misc_feature (1)..(25): SEQ ID NO: 2938; WAN024C3O_at; Start 29; Stop 53
caaaccgtggtgtcttgactttcac

SEQ ID NO: 102841 - DNA, 25 bp, Artificial
  probe
  misc_feature (1)..(25): SEQ ID NO: 2938; WAN024C3O_at; Start 1051; Stop 1075
caagcagaagctgagtcacgtacta

SEQ ID NO: 102842 - DNA, 25 bp, Artificial
  probe
  misc_feature (1)..(25): SEQ ID NO: 2938; WAN024C3O_at; Start 607; Stop 631
caattggtaggtcactcagctggcg

SEQ ID NO: 102843 - DNA, 25 bp, Artificial
  probe
  misc_feature (1)..(25): SEQ ID NO: 2938; WAN024C3O_at; Start 433; Stop 457
cgcgaacgcaacaacctggctgaat

SEQ ID NO: 102844 - DNA, 25 bp, Artificial
  probe
  misc_feature (1)..(25): SEQ ID NO: 2938; WAN024C3O_at; Start 244; Stop 268
gaagctggtcttgaagtggttgccc

SEQ ID NO: 102845 - DNA, 25 bp, Artificial
  probe
  misc_feature (1)..(25): SEQ ID NO: 2938; WAN024C3O_at; Start 322; Stop 346
gctgaagtcgttacaaaacctgaag

SEQ ID NO: 102846 - DNA, 25 bp, Artificial
  probe
  misc_feature (1)..(25): SEQ ID NO: 2938; WAN024C3O_at; Start 898; Stop 922
gctgaaatcgtagaacttccagaag

SEQ ID NO: 102847 - DNA, 25 bp, Artificial
  probe
  misc_feature (1)..(25): SEQ ID NO: 2938; WAN024C3O_at; Start 79; Stop 103
gaattggaccgtgtcttcaagtcag

SEQ ID NO: 102848 - DNA, 25 bp, Artificial
  probe
  misc_feature (1)..(25): SEQ ID NO: 2938; WAN024C3O_at; Start 418; Stop 442
gaagagcgtatcgaacgcgaacgca

SEQ ID NO: 102849 - DNA, 25 bp, Artificial
  probe
  misc_feature (1)..(25): SEQ ID NO: 2938; WAN024C3O_at; Start 457; Stop 481
ttggttatcaaggaagctgctgctg

SEQ ID NO: 102850 - DNA, 25 bp, Artificial
  probe
  misc_feature (1)..(25): SEQ ID NO: 2938; WAN024C3O_at; Start 694; Stop 718
gaagctaaattcgtgacaactatcc

SEQ ID NO: 102851 - DNA, 25 bp, Artificial
  probe
  misc_feature (1)..(25): SEQ ID NO: 2938; WAN024C3O_at; Start 787; Stop 811
gaaacacttgctgacttgaaagaaa

SEQ ID NO: 102852 - DNA, 25 bp, Artificial
  probe
  misc_feature (1)..(25): SEQ ID NO: 2938; WAN024C3O_at; Start 1013; Stop 1037
tcactggaactactcaagaagacct

SEQ ID NO: 102853 - DNA, 25 bp, Artificial
  probe
  misc_feature (1)..(25): SEQ ID NO: 2938; WAN024C3O_at; Start 472; Stop 496
gctgctgctgaaaacggcgacactg

SEQ ID NO: 102854 - DNA, 25 bp, Artificial
  probe
  misc_feature (1)..(25): SEQ ID NO: 2938; WAN024C3O_at; Start 215; Stop 239
tgccaaacgcttatgaagcagctgt

SEQ ID NO: 102855 - DNA, 25 bp, Artificial
  probe
  misc_feature (1)..(25): SEQ ID NO: 2938; WAN024C3O_at; Start 391; Stop 415
gaaaaagaagtaactgacgctgatg

SEQ ID NO: 102856 - DNA, 25 bp, Artificial
  probe
  misc_feature (1)..(25): SEQ ID NO: 2938; WAN024C3O_at; Start 745; Stop 769
gctcttgacgatgaacttgcaaaag

SEQ ID NO: 102857 - DNA, 25 bp, Artificial
  probe
  misc_feature (1)..(25): SEQ ID NO: 2676; WAN024C3P_at; Start 168; Stop 192
gcgcagtcaattcttcatgaagttc

SEQ ID NO: 102858 - DNA, 25 bp, Artificial
  probe
  misc_feature (1)..(25): SEQ ID NO: 2676; WAN024C3P_at; Start 36; Stop 60
gatcgctgacttcaagtttggcaag

SEQ ID NO: 102859 - DNA, 25 bp, Artificial
  probe
  misc_feature (1)..(25): SEQ ID NO: 2676; WAN024C3P_at; Start 76; Stop 100
ggtcttgaccgtcttgagagagata

SEQ ID NO: 102860 - DNA, 25 bp, Artificial
  probe
  misc_feature (1)..(25): SEQ ID NO: 2676; WAN024C3P_at; Start 162; Stop 186
gctcacgcgcagtcaattcttcatg

SEQ ID NO: 102861 - DNA, 25 bp, Artificial
  probe
  misc_feature (1)..(25): SEQ ID NO: 2676; WAN024C3P_at; Start 148; Stop 172
ttggagaacatctcgctcacgcgca

SEQ ID NO: 102862 - DNA, 25 bp, Artificial
  probe
  misc_feature (1)..(25): SEQ ID NO: 2676; WAN024C3P_at; Start 87; Stop 111
tcttgagagagataaagaggtcatc

SEQ ID NO: 102863 - DNA, 25 bp, Artificial
  probe
  misc_feature (1)..(25): SEQ ID NO: 2676; WAN024C3P_at; Start 183; Stop 207
catgaagttccatatgattgcggtg

SEQ ID NO: 102864 - DNA, 25 bp, Artificial
  probe
  misc_feature (1)..(25): SEQ ID NO: 2676; WAN024C3P_at; Start 26; Stop 50
gcctgggtacgatcgctgacttcaa

SEQ ID NO: 102865 - DNA, 25 bp, Artificial
  probe
  misc_feature (1)..(25): SEQ ID NO: 2676; WAN024C3P_at; Start 222; Stop 246
tgctaacctcttgctcaatggccag

SEQ ID NO: 102866 - DNA, 25 bp, Artificial
  probe
  misc_feature (1)..(25): SEQ ID NO: 2676; WAN024C3P_at; Start 131; Stop 155
tagcccttggcgatgagttggagaa

SEQ ID NO: 102867 - DNA, 25 bp, Artificial
  probe
  misc_feature (1)..(25): SEQ ID NO: 2676; WAN024C3P_at; Start 142; Stop 166
gatgagttggagaacatctcgctca

SEQ ID NO: 102868 - DNA, 25 bp, Artificial
  probe
  misc_feature (1)..(25): SEQ ID NO: 2676; WAN024C3P_at; Start 207; Stop 231
ggtattcaaccttcttgctaacctc

SEQ ID NO: 102869 - DNA, 25 bp, Artificial
  probe
  misc_feature (1)..(25): SEQ ID NO: 2676; WAN024C3P_at; Start 248; Stop 272
tcgccagcagctaccttactgacgg

SEQ ID NO: 102870 - DNA, 25 bp, Artificial
  probe
  misc_feature (1)..(25): SEQ ID NO: 2676; WAN024C3P_at; Start 203; Stop 227
cggtggtattcaaccttcttgctaa

SEQ ID NO: 102871 - DNA, 25 bp, Artificial
  probe
  misc_feature (1)..(25): SEQ ID NO: 2676; WAN024C3P_at; Start 298; Stop 322
agtcttgagcatatagcctttggca

SEQ ID NO: 102872 - DNA, 25 bp, Artificial
  probe
  misc_feature (1)..(25): SEQ ID NO: 2676; WAN024C3P_at; Start 68; Stop 92
gacacgtgggtcttgaccgtcttga

SEQ ID NO: 102873 - DNA, 25 bp, Artificial
  probe
  misc_feature (1)..(25): SEQ ID NO: 2676; WAN024C3P_at; Start 112; Stop 136
tgcgatgcgctgattttcgtagccc

SEQ ID NO: 102874 - DNA, 25 bp, Artificial
  probe
  misc_feature (1)..(25): SEQ ID NO: 2676; WAN024C3P_at; Start 291; Stop 315
cactagaagtcttgagcatatagcc

SEQ ID NO: 102875 - DNA, 25 bp, Artificial
  probe
  misc_feature (1)..(25): SEQ ID NO: 2676; WAN024C3P_at; Start 119; Stop 143
cgctgattttcgtagcccttggcga

SEQ ID NO: 102876 - DNA, 25 bp, Artificial
  probe
  misc_feature (1)..(25): SEQ ID NO: 2676; WAN024C3P_at; Start 257; Stop 281
gctaccttactgacggcatgaagca

SEQ ID NO: 102877 - DNA, 25 bp, Artificial
  probe
  misc_feature (1)..(25): SEQ ID NO: 2676; WAN024C3P_at; Start 264; Stop 288
tactgacggcatgaagcaattcatc

SEQ ID NO: 102878 - DNA, 25 bp, Artificial
  probe
  misc_feature (1)..(25): SEQ ID NO: 2676; WAN024C3P_at; Start 1; Stop 25
atggtgctgaaaggcatagacagcc

SEQ ID NO: 102879 - DNA, 25 bp, Artificial
  probe
  misc_feature (1)..(25): SEQ ID NO: 2676; WAN024C3P_at; Start 8; Stop 32
tgaaaggcatagacagccgcctggg

SEQ ID NO: 102880 - DNA, 25 bp, Artificial
  probe
  misc_feature (1)..(25): SEQ ID NO: 2676; WAN024C3P_at; Start 63; Stop 87
tattggacacgtgggtcttgaccgt

SEQ ID NO: 102881 - DNA, 25 bp, Artificial
  probe
  misc_feature (1)..(25): SEQ ID NO: 2676; WAN024C3P_at; Start 275; Stop 299
tgaagcaattcatctgcactagaag

SEQ ID NO: 102882 - DNA, 25 bp, Artificial
  probe
  misc_feature (1)..(25): SEQ ID NO: 2676; WAN024C3P_at; Start 309; Stop 333
tatagcctttggcaccagcatctaa

SEQ ID NO: 102883 - DNA, 25 bp, Artificial
  probe
  misc_feature (1)..(25): SEQ ID NO: 2676; WAN024C3P_at; Start 193; Stop 217
catatgattgcggtggtattcaacc

SEQ ID NO: 102884 - DNA, 25 bp, Artificial
  probe
  misc_feature (1)..(25): SEQ ID NO: 2676; WAN024C3P_at; Start 99; Stop 123
taaagaggtcatctgcgatgcgctg

SEQ ID NO: 102885 - DNA, 25 bp, Artificial
  probe
  misc_feature (1)..(25): SEQ ID NO: 2676; WAN024C3P_at; Start 48; Stop 72
caagtttggcaagaatattggacac

SEQ ID NO: 102886 - DNA, 25 bp, Artificial
  probe
  misc_feature (1)..(25): SEQ ID NO: 2676; WAN024C3P_at; Start 304; Stop 328
gagcatatagcctttggcaccagca

SEQ ID NO: 102887 - DNA, 25 bp, Artificial
  probe
  misc_feature (1)..(25): SEQ ID NO: 2676; WAN024C3P_at; Start 16; Stop 40
atagacagccgcctgggtacgatcg

SEQ ID NO: 102888 - DNA, 25 bp, Artificial
  probe
  misc_feature (1)..(25): SEQ ID NO: 2676; WAN024C3P_at; Start 232; Stop 256
ttgctcaatggccagctcgccagca

SEQ ID NO: 102889 - DNA, 25 bp, Artificial
  probe
  misc_feature (1)..(25): SEQ ID NO: 2676; WAN024C3P_at; Start 283; Stop 307
ttcatctgcactagaagtcttgagc

SEQ ID NO: 102890 - DNA, 25 bp, Artificial
  probe
  misc_feature (1)..(25): SEQ ID NO: 2676; WAN024C3P_at; Start 134; Stop 158
cccttggcgatgagttggagaacat

SEQ ID NO: 102891 - DNA, 25 bp, Artificial
  probe
  misc_feature (1)..(25): SEQ ID NO: 796; WAN024C3Q_at; Start 467; Stop 491
tcgccaagggctacgaaaatcagcg

SEQ ID NO: 102892 - DNA, 25 bp, Artificial
  probe
  misc_feature (1)..(25): SEQ ID NO: 796; WAN024C3Q_at; Start 63; Stop 87
cctccaagacgatgtagaagttgtg

SEQ ID NO: 102893 - DNA, 25 bp, Artificial
  probe
  misc_feature (1)..(25): SEQ ID NO: 796; WAN024C3Q_at; Start 14; Stop 38
tagtagatgaccatgaaatggtccg

SEQ ID NO: 102894 - DNA, 25 bp, Artificial
  probe
  misc_feature (1)..(25): SEQ ID NO: 796; WAN024C3Q_at; Start 453; Stop 477
tgttctccaactcatcgccaagggc

SEQ ID NO: 102895 - DNA, 25 bp, Artificial
  probe
  misc_feature (1)..(25): SEQ ID NO: 796; WAN024C3Q_at; Start 510; Stop 534
tatctctctcaagacggtcaagacc

SEQ ID NO: 102896 - DNA, 25 bp, Artificial
  probe
  misc_feature (1)..(25): SEQ ID NO: 796; WAN024C3Q_at; Start 365; Stop 389
tggccattgagcaagaggttagcaa

SEQ ID NO: 102897 - DNA, 25 bp, Artificial
  probe
  misc_feature (1)..(25): SEQ ID NO: 796; WAN024C3Q_at; Start 220; Stop 244
gaagccaagattttgattgtgacct

SEQ ID NO: 102898 - DNA, 25 bp, Artificial
  probe
  misc_feature (1)..(25): SEQ ID NO: 796; WAN024C3Q_at; Start 2; Stop 26
tgaaaattttactagtagatgacca

SEQ ID NO: 102899 - DNA, 25 bp, Artificial
  probe
  misc_feature (1)..(25): SEQ ID NO: 796; WAN024C3Q_at; Start 424; Stop 448
catgaagaattgactgcgcgtgagc

SEQ ID NO: 102900 - DNA, 25 bp, Artificial
  probe
  misc_feature (1)..(25): SEQ ID NO: 796; WAN024C3Q_at; Start 406; Stop 430
cgcaatcatatggaacttcatgaag

SEQ ID NO: 102901 - DNA, 25 bp, Artificial
  probe
  misc_feature (1)..(25): SEQ ID NO: 796; WAN024C3Q_at; Start 262; Stop 286
aaaatcatgccagtcttagatgctg

SEQ ID NO: 102902 - DNA, 25 bp, Artificial
  probe
  misc_feature (1)..(25): SEQ ID NO: 796; WAN024C3Q_at; Start 499; Stop 523
gatgacctctttatctctctcaaga

SEQ ID NO: 102903 - DNA, 25 bp, Artificial
  probe
  misc_feature (1)..(25): SEQ ID NO: 796; WAN024C3Q_at; Start 570; Stop 594
cgatcgtacccaggcggctgtctat

SEQ ID NO: 102904 - DNA, 25 bp, Artificial
  probe
  misc_feature (1)..(25): SEQ ID NO: 796; WAN024C3Q_at; Start 438; Stop 462
tgcgcgtgagcgagatgttctccaa

SEQ ID NO: 102905 - DNA, 25 bp, Artificial
  probe
  misc_feature (1)..(25): SEQ ID NO: 796; WAN024C3Q_at; Start 481; Stop 505
gaaaatcagcgcatcgcagatgacc

SEQ ID NO: 102906 - DNA, 25 bp, Artificial
  probe
  misc_feature (1)..(25): SEQ ID NO: 796; WAN024C3Q_at; Start 252; Stop 276
ggacaatgaaaaaatcatgccagtc

SEQ ID NO: 102907 - DNA, 25 bp, Artificial
  probe
  misc_feature (1)..(25): SEQ ID NO: 796; WAN024C3Q_at; Start 95; Stop 119
cgtccaacgggtctcaagggattga

SEQ ID NO: 102908 - DNA, 25 bp, Artificial
  probe
  misc_feature (1)..(25): SEQ ID NO: 796; WAN024C3Q_at; Start 333; Stop 357
tcatgccgtcagtaaggtagctgct

SEQ ID NO: 102909 - DNA, 25 bp, Artificial
  probe
  misc_feature (1)..(25): SEQ ID NO: 796; WAN024C3Q_at; Start 187; Stop 211
gacgcgaccttagcaatccttaaag

SEQ ID NO: 102910 - DNA, 25 bp, Artificial
  probe
  misc_feature (1)..(25): SEQ ID NO: 796; WAN024C3Q_at; Start 318; Stop 342
tgcagatgaattgcttcatgccgtc

SEQ ID NO: 102911 - DNA, 25 bp, Artificial
  probe
  misc_feature (1)..(25): SEQ ID NO: 796; WAN024C3Q_at; Start 237; Stop 261
tgtgacctcttatttggacaatgaa

SEQ ID NO: 102912 - DNA, 25 bp, Artificial
  probe
  misc_feature (1)..(25): SEQ ID NO: 796; WAN024C3Q_at; Start 153; Stop 177
catggatattgtcatgcctgagatg

SEQ ID NO: 102913 - DNA, 25 bp, Artificial
  probe
  misc_feature (1)..(25): SEQ ID NO: 796; WAN024C3Q_at; Start 350; Stop 374
tagctgctggcgagctggccattga

SEQ ID NO: 102914 - DNA, 25 bp, Artificial
  probe
  misc_feature (1)..(25): SEQ ID NO: 796; WAN024C3Q_at; Start 303; Stop 327
gctcaagacttctagtgcagatgaa

SEQ ID NO: 102915 - DNA, 25 bp, Artificial
  probe
  misc_feature (1)..(25): SEQ ID NO: 796; WAN024C3Q_at; Start 201; Stop 225
aatccttaaagaatggcctgaagcc

SEQ ID NO: 102916 - DNA, 25 bp, Artificial
  probe
  misc_feature (1)..(25): SEQ ID NO: 796; WAN024C3Q_at; Start 589; Stop 613
gtctatgcctttcagcaccatttgg

SEQ ID NO: 102917 - DNA, 25 bp, Artificial
  probe
  misc_feature (1)..(25): SEQ ID NO: 796; WAN024C3Q_at; Start 288; Stop 312
tgccaaaggctatatgctcaagact

SEQ ID NO: 102918 - DNA, 25 bp, Artificial
  probe
  misc_feature (1)..(25): SEQ ID NO: 796; WAN024C3Q_at; Start 383; Stop 407
ttagcaagaaggttgaataccaccg

SEQ ID NO: 102919 - DNA, 25 bp, Artificial
  probe
  misc_feature (1)..(25): SEQ ID NO: 796; WAN024C3Q_at; Start 48; Stop 72
gaaaagctactttgacctccaagac

SEQ ID NO: 102920 - DNA, 25 bp, Artificial
  probe
  misc_feature (1)..(25): SEQ ID NO: 796; WAN024C3Q_at; Start 393; Stop 417
ggttgaataccaccgcaatcatatg

SEQ ID NO: 102921 - DNA, 25 bp, Artificial
  probe
  misc_feature (1)..(25): SEQ ID NO: 796; WAN024C3Q_at; Start 275; Stop 299
tcttagatgctggtgccaaaggcta

SEQ ID NO: 102922 - DNA, 25 bp, Artificial
  probe
  misc_feature (1)..(25): SEQ ID NO: 796; WAN024C3Q_at; Start 114; Stop 138
gattgacttggccttggaactgcgt

SEQ ID NO: 102923 - DNA, 25 bp, Artificial
  probe
  misc_feature (1)..(25): SEQ ID NO: 796; WAN024C3Q_at; Start 130; Stop 154
gaactgcgtccagatgtcattgtca

SEQ ID NO: 102924 - DNA, 25 bp, Artificial
  probe
  misc_feature (1)..(25): SEQ ID NO: 796; WAN024C3Q_at; Start 520; Stop 544
aagacggtcaagacccacgtgtcca

SEQ ID NO: 102925 - DNA, 25 bp, Artificial
  probe
  misc_feature (1)..(25): SEQ ID NO: 1228; WAN024C3R_at; Start 60; Stop 84
ggatatgctcgtccttacgatttgt

SEQ ID NO: 102926 - DNA, 25 bp, Artificial
  probe
  misc_feature (1)..(25): SEQ ID NO: 1228; WAN024C3R_at; Start 227; Stop 251
ctgcaaatcttgactggcttctttc

SEQ ID NO: 102927 - DNA, 25 bp, Artificial
  probe
  misc_feature (1)..(25): SEQ ID NO: 1228; WAN024C3R_at; Start 159; Stop 183
gattgcgcatcaaaactcagggcga

SEQ ID NO: 102928 - DNA, 25 bp, Artificial
  probe
  misc_feature (1)..(25): SEQ ID NO: 1228; WAN024C3R_at; Start 105; Stop 129
tgatataagagctcaatccccagat

SEQ ID NO: 102929 - DNA, 25 bp, Artificial
  probe
  misc_feature (1)..(25): SEQ ID NO: 1228; WAN024C3R_at; Start 232; Stop 256
aatcttgactggcttctttcaactg

SEQ ID NO: 102930 - DNA, 25 bp, Artificial
  probe
  misc_feature (1)..(25): SEQ ID NO: 1228; WAN024C3R_at; Start 108; Stop 132
tataagagctcaatccccagatcgg

SEQ ID NO: 102931 - DNA, 25 bp, Artificial
  probe
  misc_feature (1)..(25): SEQ ID NO: 1228; WAN024C3R_at; Start 48; Stop 72
caagggcatagaggatatgctcgtc

SEQ ID NO: 102932 - DNA, 25 bp, Artificial
  probe
  misc_feature (1)..(25): SEQ ID NO: 1228; WAN024C3R_at; Start 38; Stop 62
cttttctgctcaagggcatagagga

SEQ ID NO: 102933 - DNA, 25 bp, Artificial
  probe
  misc_feature (1)..(25): SEQ ID NO: 1228; WAN024C3R_at; Start 201; Stop 225
ccagcaccactactcttggcaacgg

SEQ ID NO: 102934 - DNA, 25 bp, Artificial
  probe
  misc_feature (1)..(25): SEQ ID NO: 1228; WAN024C3R_at; Start 162; Stop 186
tgcgcatcaaaactcagggcgatgc

SEQ ID NO: 102935 - DNA, 25 bp, Artificial
  probe
  misc_feature (1)..(25): SEQ ID NO: 1228; WAN024C3R_at; Start 143; Stop 167
ttttaaggttttggttgattgcgca

SEQ ID NO: 102936 - DNA, 25 bp, Artificial
  probe
  misc_feature (1)..(25): SEQ ID NO: 1228; WAN024C3R_at; Start 101; Stop 125
ttcttgatataagagctcaatcccc

SEQ ID NO: 102937 - DNA, 25 bp, Artificial
  probe
  misc_feature (1)..(25): SEQ ID NO: 1228; WAN024C3R_at; Start 182; Stop 206
gatgccacagtcaccaccaccagca

SEQ ID NO: 102938 - DNA, 25 bp, Artificial
  probe
  misc_feature (1)..(25): SEQ ID NO: 1228; WAN024C3R_at; Start 32; Stop 56
taggaacttttctgctcaagggcat

SEQ ID NO: 102939 - DNA, 25 bp, Artificial
  probe
  misc_feature (1)..(25): SEQ ID NO: 1228; WAN024C3R_at; Start 15; Stop 39
cctcatcaaagctattataggaact

SEQ ID NO: 102940 - DNA, 25 bp, Artificial
  probe
  misc_feature (1)..(25): SEQ ID NO: 1228; WAN024C3R_at; Start 75; Stop 99
tacgatttgtcgtcatgtcctatcc

SEQ ID NO: 102941 - DNA, 25 bp, Artificial
  probe
  misc_feature (1)..(25): SEQ ID NO: 1228; WAN024C3R_at; Start 172; Stop 196
aactcagggcgatgccacagtcacc

SEQ ID NO: 102942 - DNA, 25 bp, Artificial
  probe
  misc_feature (1)..(25): SEQ ID NO: 1228; WAN024C3R_at; Start 35; Stop 59
gaacttttctgctcaagggcataga

SEQ ID NO: 102943 - DNA, 25 bp, Artificial
  probe
  misc_feature (1)..(25): SEQ ID NO: 1228; WAN024C3R_at; Start 44; Stop 68
tgctcaagggcatagaggatatgct

SEQ ID NO: 102944 - DNA, 25 bp, Artificial
  probe
  misc_feature (1)..(25): SEQ ID NO: 1228; WAN024C3R_at; Start 30; Stop 54
tataggaacttttctgctcaagggc

SEQ ID NO: 102945 - DNA, 25 bp, Artificial
  probe
  misc_feature (1)..(25): SEQ ID NO: 1228; WAN024C3R_at; Start 110; Stop 134
taagagctcaatccccagatcggcc

SEQ ID NO: 102946 - DNA, 25 bp, Artificial
  probe
  misc_feature (1)..(25): SEQ ID NO: 1228; WAN024C3R_at; Start 125; Stop 149
cagatcggcccaacgattttttaag

SEQ ID NO: 102947 - DNA, 25 bp, Artificial
  probe
  misc_feature (1)..(25): SEQ ID NO: 1228; WAN024C3R_at; Start 11; Stop 35
tccacctcatcaaagctattatagg

SEQ ID NO: 102948 - DNA, 25 bp, Artificial
  probe
  misc_feature (1)..(25): SEQ ID NO: 1228; WAN024C3R_at; Start 2; Stop 26
tgaatcagctccacctcatcaaagc

SEQ ID NO: 102949 - DNA, 25 bp, Artificial
  probe
  misc_feature (1)..(25): SEQ ID NO: 1228; WAN024C3R_at; Start 146; Stop 170
taaggttttggttgattgcgcatca

SEQ ID NO: 102950 - DNA, 25 bp, Artificial
  probe
  misc_feature (1)..(25): SEQ ID NO: 1228; WAN024C3R_at; Start 56; Stop 80
tagaggatatgctcgtccttacgat

SEQ ID NO: 102951 - DNA, 25 bp, Artificial
  probe
  misc_feature (1)..(25): SEQ ID NO: 1228; WAN024C3R_at; Start 65; Stop 89
tgctcgtccttacgatttgtcgtca

SEQ ID NO: 102952 - DNA, 25 bp, Artificial
  probe
  misc_feature (1)..(25): SEQ ID NO: 1228; WAN024C3R_at; Start 92; Stop 116
tcctatcctttcttgatataagagc

SEQ ID NO: 102953 - DNA, 25 bp, Artificial
  probe
  misc_feature (1)..(25): SEQ ID NO: 1228; WAN024C3R_at; Start 166; Stop 190
catcaaaactcagggcgatgccaca

SEQ ID NO: 102954 - DNA, 25 bp, Artificial
  probe
  misc_feature (1)..(25): SEQ ID NO: 1228; WAN024C3R_at; Start 170; Stop 194
aaaactcagggcgatgccacagtca

SEQ ID NO: 102955 - DNA, 25 bp, Artificial
  probe
  misc_feature (1)..(25): SEQ ID NO: 1228; WAN024C3R_at; Start 158; Stop 182
tgattgcgcatcaaaactcagggcg

SEQ ID NO: 102956 - DNA, 25 bp, Artificial
  probe
  misc_feature (1)..(25): SEQ ID NO: 1228; WAN024C3R_at; Start 82; Stop 106
tgtcgtcatgtcctatcctttcttg

SEQ ID NO: 102957 - DNA, 25 bp, Artificial
  probe
  misc_feature (1)..(25): SEQ ID NO: 1228; WAN024C3R_at; Start 52; Stop 76
ggcatagaggatatgctcgtcctta

SEQ ID NO: 102958 - DNA, 25 bp, Artificial
  probe
  misc_feature (1)..(25): SEQ ID NO: 1228; WAN024C3R_at; Start 237; Stop 261
tgactggcttctttcaactgtctaa

SEQ ID NO: 102959 - DNA, 25 bp, Artificial
  probe
  misc_feature (1)..(25): SEQ ID NO: 1850; WAN024C3S_at; Start 795; Stop 819
gagtacagatatttacacgcctttg

SEQ ID NO: 102960 - DNA, 25 bp, Artificial
  probe
  misc_feature (1)..(25): SEQ ID NO: 1850; WAN024C3S_at; Start 85; Stop 109
gatattcccatctatatgagggctg

SEQ ID NO: 102961 - DNA, 25 bp, Artificial
  probe
  misc_feature (1)..(25): SEQ ID NO: 1850; WAN024C3S_at; Start 820; Stop 844
cttagacagttgaaagaagccagtc

SEQ ID NO: 102962 - DNA, 25 bp, Artificial
  probe
  misc_feature (1)..(25): SEQ ID NO: 1850; WAN024C3S_at; Start 780; Stop 804
gcttttagaaggcttgagtacagat

SEQ ID NO: 102963 - DNA, 25 bp, Artificial
  probe
  misc_feature (1)..(25): SEQ ID NO: 1850; WAN024C3S_at; Start 276; Stop 300
tggcaaaatggaacgagaagggaaa

SEQ ID NO: 102964 - DNA, 25 bp, Artificial
  probe
  misc_feature (1)..(25): SEQ ID NO: 1850; WAN024C3S_at; Start 324; Stop 348
cagcgtcgttgtcttggttgtcaag

SEQ ID NO: 102965 - DNA, 25 bp, Artificial
  probe
  misc_feature (1)..(25): SEQ ID NO: 1850; WAN024C3S_at; Start 886; Stop 910
ggtgactgtggcatcgccctgagtt

SEQ ID NO: 102966 - DNA, 25 bp, Artificial
  probe
  misc_feature (1)..(25): SEQ ID NO: 1850; WAN024C3S_at; Start 899; Stop 923
tcgccctgagttttgatgcgcaatc

SEQ ID NO: 102967 - DNA, 25 bp, Artificial
  probe
  misc_feature (1)..(25): SEQ ID NO: 1850; WAN024C3S_at; Start 205; Stop 229
acgattgctttgatgggagacttcc

SEQ ID NO: 102968 - DNA, 25 bp, Artificial
  probe
  misc_feature (1)..(25): SEQ ID NO: 1850; WAN024C3S_at; Start 43; Stop 67
gaatatgctattttagagccagggc

SEQ ID NO: 102969 - DNA, 25 bp, Artificial
  probe
  misc_feature (1)..(25): SEQ ID NO: 1850; WAN024C3S_at; Start 439; Stop 463
tccatgggcgaccttgcctgtattg

SEQ ID NO: 102970 - DNA, 25 bp, Artificial
  probe
  misc_feature (1)..(25): SEQ ID NO: 1850; WAN024C3S_at; Start 960; Stop 984
gattgagctcttatatcaagaaagg

SEQ ID NO: 102971 - DNA, 25 bp, Artificial
  probe
  misc_feature (1)..(25): SEQ ID NO: 1850; WAN024C3S_at; Start 808; Stop 832
tacacgcctttgcttagacagttga

SEQ ID NO: 102972 - DNA, 25 bp, Artificial
  probe
  misc_feature (1)..(25): SEQ ID NO: 1850; WAN024C3S_at; Start 73; Stop 97
gctttgataaaggatattcccatct

SEQ ID NO: 102973 - DNA, 25 bp, Artificial
  probe
  misc_feature (1)..(25): SEQ ID NO: 1850; WAN024C3S_at; Start 634; Stop 658
gtatcgagtcacatggtccagcaaa

SEQ ID NO: 102974 - DNA, 25 bp, Artificial
  probe
  misc_feature (1)..(25): SEQ ID NO: 1850; WAN024C3S_at; Start 620; Stop 644
ccaaggaagtggctgtatcgagtca

SEQ ID NO: 102975 - DNA, 25 bp, Artificial
  probe
  misc_feature (1)..(25): SEQ ID NO: 1850; WAN024C3S_at; Start 124; Stop 148
gacagctaccgtatctattcagata

SEQ ID NO: 102976 - DNA, 25 bp, Artificial
  probe
  misc_feature (1)..(25): SEQ ID NO: 1850; WAN024C3S_at; Start 831; Stop 855
gaaagaagccagtcaagatttgcag

SEQ ID NO: 102977 - DNA, 25 bp, Artificial
  probe
  misc_feature (1)..(25): SEQ ID NO: 1850; WAN024C3S_at; Start 58; Stop 82
gagccagggcagttagctttgataa

SEQ ID NO: 102978 - DNA, 25 bp, Artificial
  probe
  misc_feature (1)..(25): SEQ ID NO: 1850; WAN024C3S_at; Start 191; Stop 215
gcttgattcaagaaacgattgcttt

SEQ ID NO: 102979 - DNA, 25 bp, Artificial
  probe
  misc_feature (1)..(25): SEQ ID NO: 1850; WAN024C3S_at; Start 21; Stop 45
cggaaaactctattgggcaggtgaa

SEQ ID NO: 102980 - DNA, 25 bp, Artificial
  probe
  misc_feature (1)..(25): SEQ ID NO: 1850; WAN024C3S_at; Start 6; Stop 30
tgctgttaaaacttgcggaaaactc

SEQ ID NO: 102981 - DNA, 25 bp, Artificial
  probe
  misc_feature (1)..(25): SEQ ID NO: 1850; WAN024C3S_at; Start 647; Stop 671
tggtccagcaaatcaagcaaaatat

SEQ ID NO: 102982 - DNA, 25 bp, Artificial
  probe
  misc_feature (1)..(25): SEQ ID NO: 1850; WAN024C3S_at; Start 309; Stop 333
tctaggttctagtggcagcgtcgtt

SEQ ID NO: 102983 - DNA, 25 bp, Artificial
  probe
  misc_feature (1)..(25): SEQ ID NO: 1850; WAN024C3S_at; Start 428; Stop 452
gagacaatggttccatgggcgacct

SEQ ID NO: 102984 - DNA, 25 bp, Artificial
  probe
  misc_feature (1)..(25): SEQ ID NO: 1850; WAN024C3S_at; Start 976; Stop 1000
caagaaaggataggacatgacgaca

SEQ ID NO: 102985 - DNA, 25 bp, Artificial
  probe
  misc_feature (1)..(25): SEQ ID NO: 1850; WAN024C3S_at; Start 215; Stop 239
tgatgggagacttcctcgctgttcg

SEQ ID NO: 102986 - DNA, 25 bp, Artificial
  probe
  misc_feature (1)..(25): SEQ ID NO: 1850; WAN024C3S_at; Start 152; Stop 176
ttgatttcgcagtggacttaaggcc

SEQ ID NO: 102987 - DNA, 25 bp, Artificial
  probe
  misc_feature (1)..(25): SEQ ID NO: 1850; WAN024C3S_at; Start 338; Stop 362
tggttgtcaaggctttactggctct

SEQ ID NO: 102988 - DNA, 25 bp, Artificial
  probe
  misc_feature (1)..(25): SEQ ID NO: 1850; WAN024C3S_at; Start 143; Stop 167
cagatatgtttgatttcgcagtgga

SEQ ID NO: 102989 - DNA, 25 bp, Artificial
  probe
  misc_feature (1)..(25): SEQ ID NO: 1850; WAN024C3S_at; Start 760; Stop 784
caagtagaagtagccagcaagcttt

SEQ ID NO: 102990 - DNA, 25 bp, Artificial
  probe
  misc_feature (1)..(25): SEQ ID NO: 1850; WAN024C3S_at; Start 114; Stop 138
tgctttttctgacagctaccgtatc

SEQ ID NO: 102991 - DNA, 25 bp, Artificial
  probe
  misc_feature (1)..(25): SEQ ID NO: 1850; WAN024C3S_at; Start 605; Stop 629
tcttagtgggatggaccaaggaagt

SEQ ID NO: 102992 - DNA, 25 bp, Artificial
  probe
  misc_feature (1)..(25): SEQ ID NO: 1850; WAN024C3S_at; Start 598; Stop 622
tgtgatttcttagtgggatggacca

SEQ ID NO: 102993 - DNA, 25 bp, Artificial
  probe
  misc_feature (1)..(25): SEQ ID NO: 1420; WAN024C3T_at; Start 867; Stop 891
gattggcattgtccaaggctggaaa

SEQ ID NO: 102994 - DNA, 25 bp, Artificial
  probe
  misc_feature (1)..(25): SEQ ID NO: 1420; WAN024C3T_at; Start 450; Stop 474
catgcccgagggagaaaggaagttt

SEQ ID NO: 102995 - DNA, 25 bp, Artificial
  probe
  misc_feature (1)..(25): SEQ ID NO: 1420; WAN024C3T_at; Start 3; Stop 27
gacgacaaatcgtaaggacgagcat

SEQ ID NO: 102996 - DNA, 25 bp, Artificial
  probe
  misc_feature (1)..(25): SEQ ID NO: 1420; WAN024C3T_at; Start 401; Stop 425
tgaatcctgttctattgcaagtgca

SEQ ID NO: 102997 - DNA, 25 bp, Artificial
  probe
  misc_feature (1)..(25): SEQ ID NO: 1420; WAN024C3T_at; Start 384; Stop 408
tcagactgtagaagagatgaatcct

SEQ ID NO: 102998 - DNA, 25 bp, Artificial
  probe
  misc_feature (1)..(25): SEQ ID NO: 1420; WAN024C3T_at; Start 821; Stop 845
cacgaaccgttctggaattggttga

SEQ ID NO: 102999 - DNA, 25 bp, Artificial
  probe
  misc_feature (1)..(25): SEQ ID NO: 1420; WAN024C3T_at; Start 699; Stop 723
gcaggcccttctcaatgcccaagaa

SEQ ID NO: 103000 - DNA, 25 bp, Artificial
  probe
  misc_feature (1)..(25): SEQ ID NO: 1420; WAN024C3T_at; Start 639; Stop 663
tatcgaaaaccgtcgtagtggccag

SEQ ID NO: 103001 - DNA, 25 bp, Artificial
  probe
  misc_feature (1)..(25): SEQ ID NO: 1420; WAN024C3T_at; Start 114; Stop 138
ggatgaaatcgatctttcgacagag

SEQ ID NO: 103002 - DNA, 25 bp, Artificial
  probe
  misc_feature (1)..(25): SEQ ID NO: 1420; WAN024C3T_at; Start 575; Stop 599
gagcctatgaattcggtgttcgtac

SEQ ID NO: 103003 - DNA, 25 bp, Artificial
  probe
  misc_feature (1)..(25): SEQ ID NO: 1420; WAN024C3T_at; Start 928; Stop 952
gccaccatagcagatctacaaaaag

SEQ ID NO: 103004 - DNA, 25 bp, Artificial
  probe
  misc_feature (1)..(25): SEQ ID NO: 1420; WAN024C3T_at; Start 277; Stop 301
gcagccctcaaaaatccaacggatg

SEQ ID NO: 103005 - DNA, 25 bp, Artificial
  probe
  misc_feature (1)..(25): SEQ ID NO: 1420; WAN024C3T_at; Start 513; Stop 537
aattcccgttcctattgtcctcaag

SEQ ID NO: 103006 - DNA, 25 bp, Artificial
  probe
  misc_feature (1)..(25): SEQ ID NO: 1420; WAN024C3T_at; Start 838; Stop 862
ttggttgaaacctacacagttgaag

SEQ ID NO: 103007 - DNA, 25 bp, Artificial
  probe
  misc_feature (1)..(25): SEQ ID NO: 1420; WAN024C3T_at; Start 804; Stop 828
taaggctgtgggattgtcacgaacc

SEQ ID NO: 103008 - DNA, 25 bp, Artificial
  probe
  misc_feature (1)..(25): SEQ ID NO: 1420; WAN024C3T_at; Start 991; Stop 1015
gatcagatgaaaaaggcgtaactaa

SEQ ID NO: 103009 - DNA, 25 bp, Artificial
  probe
  misc_feature (1)..(25): SEQ ID NO: 1420; WAN024C3T_at; Start 715; Stop 739
gcccaagaatggaaagataaggtcg

SEQ ID NO: 103010 - DNA, 25 bp, Artificial
  probe
  misc_feature (1)..(25): SEQ ID NO: 1420; WAN024C3T_at; Start 437; Stop 461
tgcaggaattactcatgcccgaggg

SEQ ID NO: 103011 - DNA, 25 bp, Artificial
  probe
  misc_feature (1)..(25): SEQ ID NO: 1420; WAN024C3T_at; Start 556; Stop 580
gatgccaagacaatcgaaagagcct

SEQ ID NO: 103012 - DNA, 25 bp, Artificial
  probe
  misc_feature (1)..(25): SEQ ID NO: 1420; WAN024C3T_at; Start 913; Stop 937
tgttcccttaactgtgccaccatag

SEQ ID NO: 103013 - DNA, 25 bp, Artificial
  probe
  misc_feature (1)..(25): SEQ ID NO: 1420; WAN024C3T_at; Start 528; Stop 552
tgtcctcaaggaagtgggctttgga

SEQ ID NO: 103014 - DNA, 25 bp, Artificial
  probe
  misc_feature (1)..(25): SEQ ID NO: 1420; WAN024C3T_at; Start 591; Stop 615
tgttcgtacagtggacctatcgggt

SEQ ID NO: 103015 - DNA, 25 bp, Artificial
  probe
  misc_feature (1)..(25): SEQ ID NO: 1420; WAN024C3T_at; Start 72; Stop 96
tgaggtggagctgattcattcttcc

SEQ ID NO: 103016 - DNA, 25 bp, Artificial
  probe
  misc_feature (1)..(25): SEQ ID NO: 1420; WAN024C3T_at; Start 34; Stop 58
tatgcccttgagcagaaaagttcct

SEQ ID NO: 103017 - DNA, 25 bp, Artificial
  probe
  misc_feature (1)..(25): SEQ ID NO: 1420; WAN024C3T_at; Start 348; Stop 372
caatattggattggacaagcctgtc

SEQ ID NO: 103018 - DNA, 25 bp, Artificial
  probe
  misc_feature (1)..(25): SEQ ID NO: 1420; WAN024C3T_at; Start 95; Stop 119
ccttgcctctttacaatctggatga

SEQ ID NO: 103019 - DNA, 25 bp, Artificial
  probe
  misc_feature (1)..(25): SEQ ID NO: 1420; WAN024C3T_at; Start 258; Stop 282
tgtaacgggttcttatagcgcagcc

SEQ ID NO: 103020 - DNA, 25 bp, Artificial
  probe
  misc_feature (1)..(25): SEQ ID NO: 1420; WAN024C3T_at; Start 651; Stop 675
tcgtagtggccagcgtgattacctc

SEQ ID NO: 103021 - DNA, 25 bp, Artificial
  probe
  misc_feature (1)..(25): SEQ ID NO: 1420; WAN024C3T_at; Start 213; Stop 237
caatcaaaagctggctcaggtggcg

SEQ ID NO: 103022 - DNA, 25 bp, Artificial
  probe
  misc_feature (1)..(25): SEQ ID NO: 1420; WAN024C3T_at; Start 307; Stop 331
ttttctgtcaagtctagtcatccca

SEQ ID NO: 103023 - DNA, 25 bp, Artificial
  probe
  misc_feature (1)..(25): SEQ ID NO: 1420; WAN024C3T_at; Start 768; Stop 792
tccgctggatatgattaagtgcttg

SEQ ID NO: 103024 - DNA, 25 bp, Artificial
  probe
  misc_feature (1)..(25): SEQ ID NO: 1420; WAN024C3T_at; Start 622; Stop 646
ggcaccagctttgcctatatcgaaa

SEQ ID NO: 103025 - DNA, 25 bp, Artificial
  probe
  misc_feature (1)..(25): SEQ ID NO: 1420; WAN024C3T_at; Start 468; Stop 492
gaagtttagaagctggcaatcgcat

SEQ ID NO: 103026 - DNA, 25 bp, Artificial
  probe
  misc_feature (1)..(25): SEQ ID NO: 1420; WAN024C3T_at; Start 19; Stop 43
gacgagcatatcctctatgcccttg

SEQ ID NO: 103027 - DNA, 25 bp, Artificial
  probe
  misc_feature (1)..(25): SEQ ID NO: 4283; WAN024C3U_at; Start 54; Stop 78
gacctgtttcttttttgcatgtcaa

SEQ ID NO: 103028 - DNA, 25 bp, Artificial
  probe
  misc_feature (1)..(25): SEQ ID NO: 4283; WAN024C3U_at; Start 39; Stop 63
tattctttcaaaagagacctgtttc

SEQ ID NO: 103029 - DNA, 25 bp, Artificial
  probe
  misc_feature (1)..(25): SEQ ID NO: 4283; WAN024C3U_at; Start 62; Stop 86
tcttttttgcatgtcaaatccgttc

SEQ ID NO: 103030 - DNA, 25 bp, Artificial
  probe
  misc_feature (1)..(25): SEQ ID NO: 4283; WAN024C3U_at; Start 11; Stop 35
gaaaaagagcagtcttatctgaaat

SEQ ID NO: 103031 - DNA, 25 bp, Artificial
  probe
  misc_feature (1)..(25): SEQ ID NO: 4283; WAN024C3U_at; Start 80; Stop 104
tccgttctagctggtatttgaaaaa

SEQ ID NO: 103032 - DNA, 25 bp, Artificial
  probe
  misc_feature (1)..(25): SEQ ID NO: 4283; WAN024C3U_at; Start 2; Stop 26
tgtgtagtagaaaaagagcagtctt

SEQ ID NO: 103033 - DNA, 25 bp, Artificial
  probe
  misc_feature (1)..(25): SEQ ID NO: 4283; WAN024C3U_at; Start 76; Stop 100
caaatccgttctagctggtatttga

SEQ ID NO: 103034 - DNA, 25 bp, Artificial
  probe
  misc_feature (1)..(25): SEQ ID NO: 4283; WAN024C3U_at; Start 67; Stop 91
tttgcatgtcaaatccgttctagct

SEQ ID NO: 103035 - DNA, 25 bp, Artificial
  probe
  misc_feature (1)..(25): SEQ ID NO: 4283; WAN024C3U_at; Start 55; Stop 79
acctgtttcttttttgcatgtcaaa

SEQ ID NO: 103036 - DNA, 25 bp, Artificial
  probe
  misc_feature (1)..(25): SEQ ID NO: 4283; WAN024C3U_at; Start 7; Stop 31
agtagaaaaagagcagtcttatctg

SEQ ID NO: 103037 - DNA, 25 bp, Artificial
  probe
  misc_feature (1)..(25): SEQ ID NO: 4283; WAN024C3U_at; Start 40; Stop 64
attctttcaaaagagacctgtttct

SEQ ID NO: 103038 - DNA, 25 bp, Artificial
  probe
  misc_feature (1)..(25): SEQ ID NO: 4283; WAN024C3U_at; Start 9; Stop 33
tagaaaaagagcagtcttatctgaa

SEQ ID NO: 103039 - DNA, 25 bp, Artificial
  probe
  misc_feature (1)..(25): SEQ ID NO: 4283; WAN024C3U_at; Start 59; Stop 83
gtttcttttttgcatgtcaaatccg

SEQ ID NO: 103040 - DNA, 25 bp, Artificial
  probe
  misc_feature (1)..(25): SEQ ID NO: 4283; WAN024C3U_at; Start 69; Stop 93
tgcatgtcaaatccgttctagctgg

SEQ ID NO: 103041 - DNA, 25 bp, Artificial
  probe
  misc_feature (1)..(25): SEQ ID NO: 4283; WAN024C3U_at; Start 50; Stop 74
aagagacctgtttcttttttgcatg

SEQ ID NO: 103042 - DNA, 25 bp, Artificial
  probe
  misc_feature (1)..(25): SEQ ID NO: 4283; WAN024C3U_at; Start 4; Stop 28
tgtagtagaaaaagagcagtcttat

SEQ ID NO: 103043 - DNA, 25 bp, Artificial
  probe
  misc_feature (1)..(25): SEQ ID NO: 4283; WAN024C3U_at; Start 94; Stop 118
tatttgaaaaatcaaactaatattc

SEQ ID NO: 103044 - DNA, 25 bp, Artificial
  probe
  misc_feature (1)..(25): SEQ ID NO: 4283; WAN024C3U_at; Start 3; Stop 27
gtgtagtagaaaaagagcagtctta

SEQ ID NO: 103045 - DNA, 25 bp, Artificial
  probe
  misc_feature (1)..(25): SEQ ID NO: 4283; WAN024C3U_at; Start 71; Stop 95
catgtcaaatccgttctagctggta

SEQ ID NO: 103046 - DNA, 25 bp, Artificial
  probe
  misc_feature (1)..(25): SEQ ID NO: 4283; WAN024C3U_at; Start 14; Stop 38
aaagagcagtcttatctgaaatttt

SEQ ID NO: 103047 - DNA, 25 bp, Artificial
  probe
  misc_feature (1)..(25): SEQ ID NO: 4283; WAN024C3U_at; Start 19; Stop 43
gcagtcttatctgaaatttttattc

SEQ ID NO: 103048 - DNA, 25 bp, Artificial
  probe
  misc_feature (1)..(25): SEQ ID NO: 4283; WAN024C3U_at; Start 78; Stop 102
aatccgttctagctggtatttgaaa

SEQ ID NO: 103049 - DNA, 25 bp, Artificial
  probe
  misc_feature (1)..(25): SEQ ID NO: 4283; WAN024C3U_at; Start 1; Stop 25
gtgtgtagtagaaaaagagcagtct

SEQ ID NO: 103050 - DNA, 25 bp, Artificial
  probe
  misc_feature (1)..(25): SEQ ID NO: 4283; WAN024C3U_at; Start 72; Stop 96
atgtcaaatccgttctagctggtat

SEQ ID NO: 103051 - DNA, 25 bp, Artificial
  probe
  misc_feature (1)..(25): SEQ ID NO: 4283; WAN024C3U_at; Start 74; Stop 98
gtcaaatccgttctagctggtattt

SEQ ID NO: 103052 - DNA, 25 bp, Artificial
  probe
  misc_feature (1)..(25): SEQ ID NO: 4283; WAN024C3U_at; Start 73; Stop 97
tgtcaaatccgttctagctggtatt

SEQ ID NO: 103053 - DNA, 25 bp, Artificial
  probe
  misc_feature (1)..(25): SEQ ID NO: 4283; WAN024C3U_at; Start 5; Stop 29
gtagtagaaaaagagcagtcttatc

SEQ ID NO: 103054 - DNA, 25 bp, Artificial
  probe
  misc_feature (1)..(25): SEQ ID NO: 4283; WAN024C3U_at; Start 81; Stop 105
ccgttctagctggtatttgaaaaat

SEQ ID NO: 103055 - DNA, 25 bp, Artificial
  probe
  misc_feature (1)..(25): SEQ ID NO: 4283; WAN024C3U_at; Start 52; Stop 76
gagacctgtttcttttttgcatgtc

SEQ ID NO: 103056 - DNA, 25 bp, Artificial
  probe
  misc_feature (1)..(25): SEQ ID NO: 4283; WAN024C3U_at; Start 17; Stop 41
gagcagtcttatctgaaatttttat

SEQ ID NO: 103057 - DNA, 25 bp, Artificial
  probe
  misc_feature (1)..(25): SEQ ID NO: 4283; WAN024C3U_at; Start 66; Stop 90
ttttgcatgtcaaatccgttctagc

SEQ ID NO: 103058 - DNA, 25 bp, Artificial
  probe
  misc_feature (1)..(25): SEQ ID NO: 4283; WAN024C3U_at; Start 77; Stop 101
aaatccgttctagctggtatttgaa

SEQ ID NO: 103059 - DNA, 25 bp, Artificial
  probe
  misc_feature (1)..(25): SEQ ID NO: 4283; WAN024C3U_at; Start 68; Stop 92
ttgcatgtcaaatccgttctagctg

SEQ ID NO: 103060 - DNA, 25 bp, Artificial
  probe
  misc_feature (1)..(25): SEQ ID NO: 4283; WAN024C3U_at; Start 65; Stop 89
tttttgcatgtcaaatccgttctag

SEQ ID NO: 103061 - DNA, 25 bp, Artificial
  probe
  misc_feature (1)..(25): SEQ ID NO: 3645; WAN024C3V_at; Start 97; Stop 121
gcgaaaccataagcctagggacgag

SEQ ID NO: 103062 - DNA, 25 bp, Artificial
  probe
  misc_feature (1)..(25): SEQ ID NO: 3645; WAN024C3V_at; Start 163; Stop 187
ccagagtaggcttgaaagtgccaca

SEQ ID NO: 103063 - DNA, 25 bp, Artificial
  probe
  misc_feature (1)..(25): SEQ ID NO: 3645; WAN024C3V_at; Start 56; Stop 80
catgctagcacaggctgtgatgcct

SEQ ID NO: 103064 - DNA, 25 bp, Artificial
  probe
  misc_feature (1)..(25): SEQ ID NO: 3645; WAN024C3V_at; Start 365; Stop 389
ctggaacaaaacatggcttatagaa

SEQ ID NO: 103065 - DNA, 25 bp, Artificial
  probe
  misc_feature (1)..(25): SEQ ID NO: 3645; WAN024C3V_at; Start 224; Stop 248
gcggtaaacccctcaagctagcaac

SEQ ID NO: 103066 - DNA, 25 bp, Artificial
  probe
  misc_feature (1)..(25): SEQ ID NO: 3645; WAN024C3V_at; Start 267; Stop 291
atggagtacgcggaaacgaacgtag

SEQ ID NO: 103067 - DNA, 25 bp, Artificial
  probe
  misc_feature (1)..(25): SEQ ID NO: 3645; WAN024C3V_at; Start 116; Stop 140
gacgagaaatcgttacggcagttga

SEQ ID NO: 103068 - DNA, 25 bp, Artificial
  probe
  misc_feature (1)..(25): SEQ ID NO: 3645; WAN024C3V_at; Start 129; Stop 153
tacggcagttgaaatggctaagtcc

SEQ ID NO: 103069 - DNA, 25 bp, Artificial
  probe
  misc_feature (1)..(25): SEQ ID NO: 3645; WAN024C3V_at; Start 169; Stop 193
taggcttgaaagtgccacagtgacg

SEQ ID NO: 103070 - DNA, 25 bp, Artificial
  probe
  misc_feature (1)..(25): SEQ ID NO: 3645; WAN024C3V_at; Start 279; Stop 303
gaaacgaacgtagtattctgactgc

SEQ ID NO: 103071 - DNA, 25 bp, Artificial
  probe
  misc_feature (1)..(25): SEQ ID NO: 3645; WAN024C3V_at; Start 149; Stop 173
agtccttggataggccagagtaggc

SEQ ID NO: 103072 - DNA, 25 bp, Artificial
  probe
  misc_feature (1)..(25): SEQ ID NO: 3645; WAN024C3V_at; Start 14; Stop 38
tggataatcgcgtgaggagaattgc

SEQ ID NO: 103073 - DNA, 25 bp, Artificial
  probe
  misc_feature (1)..(25): SEQ ID NO: 3645; WAN024C3V_at; Start 330; Stop 354
cagatgattatcgaaggaagtggtc

SEQ ID NO: 103074 - DNA, 25 bp, Artificial
  probe
  misc_feature (1)..(25): SEQ ID NO: 3645; WAN024C3V_at; Start 78; Stop 102
cctgtagtgtttgtgctaggcgaaa

SEQ ID NO: 103075 - DNA, 25 bp, Artificial
  probe
  misc_feature (1)..(25): SEQ ID NO: 3645; WAN024C3V_at; Start 69; Stop 93
gctgtgatgcctgtagtgtttgtgc

SEQ ID NO: 103076 - DNA, 25 bp, Artificial
  probe
  misc_feature (1)..(25): SEQ ID NO: 3645; WAN024C3V_at; Start 87; Stop 111
tttgtgctaggcgaaaccataagcc

SEQ ID NO: 103077 - DNA, 25 bp, Artificial
  probe
  misc_feature (1)..(25): SEQ ID NO: 3645; WAN024C3V_at; Start 319; Stop 343
ttagtggtagacagatgattatcga

SEQ ID NO: 103078 - DNA, 25 bp, Artificial
  probe
  misc_feature (1)..(25): SEQ ID NO: 3645; WAN024C3V_at; Start 51; Stop 75
aagtccatgctagcacaggctgtga

SEQ ID NO: 103079 - DNA, 25 bp, Artificial
  probe
  misc_feature (1)..(25): SEQ ID NO: 3645; WAN024C3V_at; Start 186; Stop 210
cagtgacggagtctttctggaaaca

SEQ ID NO: 103080 - DNA, 25 bp, Artificial
  probe
  misc_feature (1)..(25): SEQ ID NO: 3645; WAN024C3V_at; Start 32; Stop 56
gaattgcttctcatgaggaaagtcc

SEQ ID NO: 103081 - DNA, 25 bp, Artificial
  probe
  misc_feature (1)..(25): SEQ ID NO: 3645; WAN024C3V_at; Start 351; Stop 375
ggtcctagtcacttctggaacaaaa

SEQ ID NO: 103082 - DNA, 25 bp, Artificial
  probe
  misc_feature (1)..(25): SEQ ID NO: 3645; WAN024C3V_at; Start 359; Stop 383
tcacttctggaacaaaacatggctt

SEQ ID NO: 103083 - DNA, 25 bp, Artificial
  probe
  misc_feature (1)..(25): SEQ ID NO: 3645; WAN024C3V_at; Start 104; Stop 128
cataagcctagggacgagaaatcgt

SEQ ID NO: 103084 - DNA, 25 bp, Artificial
  probe
  misc_feature (1)..(25): SEQ ID NO: 3645; WAN024C3V_at; Start 145; Stop 169
gctaagtccttggataggccagagt

SEQ ID NO: 103085 - DNA, 25 bp, Artificial
  probe
  misc_feature (1)..(25): SEQ ID NO: 3645; WAN024C3V_at; Start 292; Stop 316
tattctgactgctatcagctagagc

SEQ ID NO: 103086 - DNA, 25 bp, Artificial
  probe
  misc_feature (1)..(25): SEQ ID NO: 3645; WAN024C3V_at; Start 201; Stop 225
tctggaaacagagagagtggaacgc

SEQ ID NO: 103087 - DNA, 25 bp, Artificial
  probe
  misc_feature (1)..(25): SEQ ID NO: 3645; WAN024C3V_at; Start 338; Stop 362
tatcgaaggaagtggtcctagtcac

SEQ ID NO: 103088 - DNA, 25 bp, Artificial
  probe
  misc_feature (1)..(25): SEQ ID NO: 3645; WAN024C3V_at; Start 307; Stop 331
cagctagagctgttagtggtagaca

SEQ ID NO: 103089 - DNA, 25 bp, Artificial
  probe
  misc_feature (1)..(25): SEQ ID NO: 3645; WAN024C3V_at; Start 134; Stop 158
cagttgaaatggctaagtccttgga

SEQ ID NO: 103090 - DNA, 25 bp, Artificial
  probe
  misc_feature (1)..(25): SEQ ID NO: 3645; WAN024C3V_at; Start 45; Stop 69
tgaggaaagtccatgctagcacagg

SEQ ID NO: 103091 - DNA, 25 bp, Artificial
  probe
  misc_feature (1)..(25): SEQ ID NO: 3645; WAN024C3V_at; Start 175; Stop 199
tgaaagtgccacagtgacggagtct

SEQ ID NO: 103092 - DNA, 25 bp, Artificial
  probe
  misc_feature (1)..(25): SEQ ID NO: 3645; WAN024C3V_at; Start 236; Stop 260
tcaagctagcaacccaaattttggt

SEQ ID NO: 103093 - DNA, 25 bp, Artificial
  probe
  misc_feature (1)..(25): SEQ ID NO: 3645; WAN024C3V_at; Start 209; Stop 233
cagagagagtggaacgcggtaaacc

SEQ ID NO: 103094 - DNA, 25 bp, Artificial
  probe
  misc_feature (1)..(25): SEQ ID NO: 3645; WAN024C3V_at; Start 18; Stop 42
taatcgcgtgaggagaattgcttct

SEQ ID NO: 103095 - DNA, 25 bp, Artificial
  probe
  misc_feature (1)..(25): SEQ ID NO: 3976; WAN024C3W_at; Start 112; Stop 136
caggataaccgtaaacgaccgcatg

SEQ ID NO: 103096 - DNA, 25 bp, Artificial
  probe
  misc_feature (1)..(25): SEQ ID NO: 3976; WAN024C3W_at; Start 115; Stop 139
gataaccgtaaacgaccgcatgttc

SEQ ID NO: 103097 - DNA, 25 bp, Artificial
  probe
  misc_feature (1)..(25): SEQ ID NO: 3976; WAN024C3W_at; Start 28; Stop 52
tatcctcctcataaaggcgccaagg

SEQ ID NO: 103098 - DNA, 25 bp, Artificial
  probe
  misc_feature (1)..(25): SEQ ID NO: 3976; WAN024C3W_at; Start 46; Stop 70
gccaaggactctctgcaggaactac

SEQ ID NO: 103099 - DNA, 25 bp, Artificial
  probe
  misc_feature (1)..(25): SEQ ID NO: 3976; WAN024C3W_at; Start 55; Stop 79
tctctgcaggaactaccttacaggt

SEQ ID NO: 103100 - DNA, 25 bp, Artificial
  probe
  misc_feature (1)..(25): SEQ ID NO: 3976; WAN024C3W_at; Start 48; Stop 72
caaggactctctgcaggaactacct

SEQ ID NO: 103101 - DNA, 25 bp, Artificial
  probe
  misc_feature (1)..(25): SEQ ID NO: 3976; WAN024C3W_at; Start 9; Stop 33
taaaccgccatggacaaggtatcct

SEQ ID NO: 103102 - DNA, 25 bp, Artificial
  probe
  misc_feature (1)..(25): SEQ ID NO: 3976; WAN024C3W_at; Start 108; Stop 132
atggcaggataaccgtaaacgaccg

SEQ ID NO: 103103 - DNA, 25 bp, Artificial
  probe
  misc_feature (1)..(25): SEQ ID NO: 3976; WAN024C3W_at; Start 59; Stop 83
tgcaggaactaccttacaggtcacc

SEQ ID NO: 103104 - DNA, 25 bp, Artificial
  probe
  misc_feature (1)..(25): SEQ ID NO: 3976; WAN024C3W_at; Start 23; Stop 47
caaggtatcctcctcataaaggcgc

SEQ ID NO: 103105 - DNA, 25 bp, Artificial
  probe
  misc_feature (1)..(25): SEQ ID NO: 3976; WAN024C3W_at; Start 19; Stop 43
tggacaaggtatcctcctcataaag

SEQ ID NO: 103106 - DNA, 25 bp, Artificial
  probe
  misc_feature (1)..(25): SEQ ID NO: 3976; WAN024C3W_at; Start 156; Stop 180
ttactatgtgcctgaccgacaccaa

SEQ ID NO: 103107 - DNA, 25 bp, Artificial
  probe
  misc_feature (1)..(25): SEQ ID NO: 3976; WAN024C3W_at; Start 271; Stop 295
ttcacaaaaaaagcgattgtttcca

SEQ ID NO: 103108 - DNA, 25 bp, Artificial
  probe
  misc_feature (1)..(25): SEQ ID NO: 3976; WAN024C3W_at; Start 121; Stop 145
cgtaaacgaccgcatgttcccctat

SEQ ID NO: 103109 - DNA, 25 bp, Artificial
  probe
  misc_feature (1)..(25): SEQ ID NO: 3976; WAN024C3W_at; Start 63; Stop 87
ggaactaccttacaggtcacctcca

SEQ ID NO: 103110 - DNA, 25 bp, Artificial
  probe
  misc_feature (1)..(25): SEQ ID NO: 3976; WAN024C3W_at; Start 217; Stop 241
aacgtcttatttttcatacaagtat

SEQ ID NO: 103111 - DNA, 25 bp, Artificial
  probe
  misc_feature (1)..(25): SEQ ID NO: 3976; WAN024C3W_at; Start 5; Stop 29
ggcataaaccgccatggacaaggta

SEQ ID NO: 103112 - DNA, 25 bp, Artificial
  probe
  misc_feature (1)..(25): SEQ ID NO: 3976; WAN024C3W_at; Start 90; Stop 114
tccaaaagaggcagggaaatggcag

SEQ ID NO: 103113 - DNA, 25 bp, Artificial
  probe
  misc_feature (1)..(25): SEQ ID NO: 3976; WAN024C3W_at; Start 101; Stop 125
cagggaaatggcaggataaccgtaa

SEQ ID NO: 103114 - DNA, 25 bp, Artificial
  probe
  misc_feature (1)..(25): SEQ ID NO: 3976; WAN024C3W_at; Start 36; Stop 60
tcataaaggcgccaaggactctctg

SEQ ID NO: 103115 - DNA, 25 bp, Artificial
  probe
  misc_feature (1)..(25): SEQ ID NO: 3976; WAN024C3W_at; Start 1; Stop 25
gtgaggcataaaccgccatggacaa

SEQ ID NO: 103116 - DNA, 25 bp, Artificial
  probe
  misc_feature (1)..(25): SEQ ID NO: 3976; WAN024C3W_at; Start 11; Stop 35
aaccgccatggacaaggtatcctcc

SEQ ID NO: 103117 - DNA, 25 bp, Artificial
  probe
  misc_feature (1)..(25): SEQ ID NO: 3976; WAN024C3W_at; Start 52; Stop 76
gactctctgcaggaactaccttaca

SEQ ID NO: 103118 - DNA, 25 bp, Artificial
  probe
  misc_feature (1)..(25): SEQ ID NO: 3976; WAN024C3W_at; Start 44; Stop 68
gcgccaaggactctctgcaggaact

SEQ ID NO: 103119 - DNA, 25 bp, Artificial
  probe
  misc_feature (1)..(25): SEQ ID NO: 3976; WAN024C3W_at; Start 38; Stop 62
ataaaggcgccaaggactctctgca

SEQ ID NO: 103120 - DNA, 25 bp, Artificial
  probe
  misc_feature (1)..(25): SEQ ID NO: 3976; WAN024C3W_at; Start 15; Stop 39
gccatggacaaggtatcctcctcat

SEQ ID NO: 103121 - DNA, 25 bp, Artificial
  probe
  misc_feature (1)..(25): SEQ ID NO: 3976; WAN024C3W_at; Start 162; Stop 186
tgtgcctgaccgacaccaacttttt

SEQ ID NO: 103122 - DNA, 25 bp, Artificial
  probe
  misc_feature (1)..(25): SEQ ID NO: 3976; WAN024C3W_at; Start 105; Stop 129
gaaatggcaggataaccgtaaacga

SEQ ID NO: 103123 - DNA, 25 bp, Artificial
  probe
  misc_feature (1)..(25): SEQ ID NO: 3976; WAN024C3W_at; Start 149; Stop 173
aattatcttactatgtgcctgaccg

SEQ ID NO: 103124 - DNA, 25 bp, Artificial
  probe
  misc_feature (1)..(25): SEQ ID NO: 3976; WAN024C3W_at; Start 127; Stop 151
cgaccgcatgttcccctattaaaat

SEQ ID NO: 103125 - DNA, 25 bp, Artificial
  probe
  misc_feature (1)..(25): SEQ ID NO: 3976; WAN024C3W_at; Start 233; Stop 257
tacaagtattaattctttcctatct

SEQ ID NO: 103126 - DNA, 25 bp, Artificial
  probe
  misc_feature (1)..(25): SEQ ID NO: 3976; WAN024C3W_at; Start 152; Stop 176
tatcttactatgtgcctgaccgaca

SEQ ID NO: 103127 - DNA, 25 bp, Artificial
  probe
  misc_feature (1)..(25): SEQ ID NO: 3976; WAN024C3W_at; Start 26; Stop 50
ggtatcctcctcataaaggcgccaa

SEQ ID NO: 103128 - DNA, 25 bp, Artificial
  probe
  misc_feature (1)..(25): SEQ ID NO: 3976; WAN024C3W_at; Start 132; Stop 156
gcatgttcccctattaaaattatct

SEQ ID NO: 103129 - DNA, 25 bp, Artificial
  probe
  misc_feature (1)..(25): SEQ ID NO: 1293; WAN024C3X_at; Start 776; Stop 800
gaggttgtatcatagccttggtaac

SEQ ID NO: 103130 - DNA, 25 bp, Artificial
  probe
  misc_feature (1)..(25): SEQ ID NO: 1293; WAN024C3X_at; Start 280; Stop 304
gctatcagcatagcggccattcgtg

SEQ ID NO: 103131 - DNA, 25 bp, Artificial
  probe
  misc_feature (1)..(25): SEQ ID NO: 1293; WAN024C3X_at; Start 500; Stop 524
ccgatacgggtgtttatggtcatac

SEQ ID NO: 103132 - DNA, 25 bp, Artificial
  probe
  misc_feature (1)..(25): SEQ ID NO: 1293; WAN024C3X_at; Start 827; Stop 851
cagaaagattagaagagaaaggagc

SEQ ID NO: 103133 - DNA, 25 bp, Artificial
  probe
  misc_feature (1)..(25): SEQ ID NO: 1293; WAN024C3X_at; Start 374; Stop 398
tgattgcccatatgaatcctagtgg

SEQ ID NO: 103134 - DNA, 25 bp, Artificial
  probe
  misc_feature (1)..(25): SEQ ID NO: 1293; WAN024C3X_at; Start 432; Stop 456
tattcgctttatcaagaacgtagga

SEQ ID NO: 103135 - DNA, 25 bp, Artificial
  probe
  misc_feature (1)..(25): SEQ ID NO: 1293; WAN024C3X_at; Start 229; Stop 253
tgtgagattgactcggctatccctg

SEQ ID NO: 103136 - DNA, 25 bp, Artificial
  probe
  misc_feature (1)..(25): SEQ ID NO: 1293; WAN024C3X_at; Start 580; Stop 604
catgccttgggagaattaacccagc

SEQ ID NO: 103137 - DNA, 25 bp, Artificial
  probe
  misc_feature (1)..(25): SEQ ID NO: 1293; WAN024C3X_at; Start 69; Stop 93
ttacggttatcctgccatttccctg

SEQ ID NO: 103138 - DNA, 25 bp, Artificial
  probe
  misc_feature (1)..(25): SEQ ID NO: 1293; WAN024C3X_at; Start 569; Stop 593
taccgtttttgcatgccttgggaga

SEQ ID NO: 103139 - DNA, 25 bp, Artificial
  probe
  misc_feature (1)..(25): SEQ ID NO: 1293; WAN024C3X_at; Start 347; Stop 371
tagaaatcttggtcaatcgagctga

SEQ ID NO: 103140 - DNA, 25 bp, Artificial
  probe
  misc_feature (1)..(25): SEQ ID NO: 1293; WAN024C3X_at; Start 517; Stop 541
ggtcatactcgtgaagccatccaag

SEQ ID NO: 103141 - DNA, 25 bp, Artificial
  probe
  misc_feature (1)..(25): SEQ ID NO: 1293; WAN024C3X_at; Start 321; Stop 345
tcaggctgatctgcctcatgatgta

SEQ ID NO: 103142 - DNA, 25 bp, Artificial
  probe
  misc_feature (1)..(25): SEQ ID NO: 1293; WAN024C3X_at; Start 174; Stop 198
catggcggtttatgcctcactggag

SEQ ID NO: 103143 - DNA, 25 bp, Artificial
  probe
  misc_feature (1)..(25): SEQ ID NO: 1293; WAN024C3X_at; Start 851; Stop 875
ctgttcagacatggatagagagcct

SEQ ID NO: 103144 - DNA, 25 bp, Artificial
  probe
  misc_feature (1)..(25): SEQ ID NO: 1293; WAN024C3X_at; Start 55; Stop 79
gaacatgcggtcgtttacggttatc

SEQ ID NO: 103145 - DNA, 25 bp, Artificial
  probe
  misc_feature (1)..(25): SEQ ID NO: 1293; WAN024C3X_at; Start 264; Stop 288
gatgggttcgtcagcggctatcagc

SEQ ID NO: 103146 - DNA, 25 bp, Artificial
  probe
  misc_feature (1)..(25): SEQ ID NO: 1293; WAN024C3X_at; Start 308; Stop 332
tatttgactactatcaggctgatct

SEQ ID NO: 103147 - DNA, 25 bp, Artificial
  probe
  misc_feature (1)..(25): SEQ ID NO: 1293; WAN024C3X_at; Start 543; Stop 567
ggttcaaaataagggcaaggatgcc

SEQ ID NO: 103148 - DNA, 25 bp, Artificial
  probe
  misc_feature (1)..(25): SEQ ID NO: 1293; WAN024C3X_at; Start 447; Stop 471
gaacgtaggatttacagaacttgag

SEQ ID NO: 103149 - DNA, 25 bp, Artificial
  probe
  misc_feature (1)..(25): SEQ ID NO: 1293; WAN024C3X_at; Start 21; Stop 45
cggtcaggcacatagtaagataatt

SEQ ID NO: 103150 - DNA, 25 bp, Artificial
  probe
  misc_feature (1)..(25): SEQ ID NO: 1293; WAN024C3X_at; Start 159; Stop 183
ggaggataccttgtccatggcggtt

SEQ ID NO: 103151 - DNA, 25 bp, Artificial
  probe
  misc_feature (1)..(25): SEQ ID NO: 1293; WAN024C3X_at; Start 811; Stop 835
cacgcacaagaactagcagaaagat

SEQ ID NO: 103152 - DNA, 25 bp, Artificial
  probe
  misc_feature (1)..(25): SEQ ID NO: 1293; WAN024C3X_at; Start 424; Stop 448
gaccaacctattcgctttatcaaga

SEQ ID NO: 103153 - DNA, 25 bp, Artificial
  probe
  misc_feature (1)..(25): SEQ ID NO: 1293; WAN024C3X_at; Start 557; Stop 581
gcaaggatgccctaccgtttttgca

SEQ ID NO: 103154 - DNA, 25 bp, Artificial
  probe
  misc_feature (1)..(25): SEQ ID NO: 1293; WAN024C3X_at; Start 8; Stop 32
aaaaagttggtgtcggtcaggcaca

SEQ ID NO: 103155 - DNA, 25 bp, Artificial
  probe
  misc_feature (1)..(25): SEQ ID NO: 1293; WAN024C3X_at; Start 836; Stop 860
tagaagagaaaggagctgttcagac

SEQ ID NO: 103156 - DNA, 25 bp, Artificial
  probe
  misc_feature (1)..(25): SEQ ID NO: 1293; WAN024C3X_at; Start 487; Stop 511
tatttggtgattgccgatacgggtg

SEQ ID NO: 103157 - DNA, 25 bp, Artificial
  probe
  misc_feature (1)..(25): SEQ ID NO: 1293; WAN024C3X_at; Start 144; Stop 168
ttggcgcctttatgaggaggatacc

SEQ ID NO: 103158 - DNA, 25 bp, Artificial
  probe
  misc_feature (1)..(25): SEQ ID NO: 1293; WAN024C3X_at; Start 461; Stop 485
cagaacttgagatggatttatccgc

SEQ ID NO: 103159 - DNA, 25 bp, Artificial
  probe
  misc_feature (1)..(25): SEQ ID NO: 1293; WAN024C3X_at; Start 534; Stop 558
catccaagtggttcaaaataagggc

SEQ ID NO: 103160 - DNA, 25 bp, Artificial
  probe
  misc_feature (1)..(25): SEQ ID NO: 1293; WAN024C3X_at; Start 390; Stop 414
tcctagtggtttggatgctaagacc

SEQ ID NO: 103161 - DNA, 25 bp, Artificial
  probe
  misc_feature (1)..(25): SEQ ID NO: 1293; WAN024C3X_at; Start 479; Stop 503
tatccgcctatttggtgattgccga

SEQ ID NO: 103162 - DNA, 25 bp, Artificial
  probe
  misc_feature (1)..(25): SEQ ID NO: 1293; WAN024C3X_at; Start 131; Stop 155
ctgcagagagtccttggcgccttta

SEQ ID NO: 103163 - DNA, 25 bp, Artificial
  probe
  misc_feature (1)..(25): SEQ ID NO: 5390; WAN024C3Y_at; Start 222; Stop 246
taaggactggcttatagatgtatga

SEQ ID NO: 103164 - DNA, 25 bp, Artificial
  probe
  misc_feature (1)..(25): SEQ ID NO: 5390; WAN024C3Y_at; Start 113; Stop 137
tctatcctaagattgcggtaggtcc

SEQ ID NO: 103165 - DNA, 25 bp, Artificial
  probe
  misc_feature (1)..(25): SEQ ID NO: 5390; WAN024C3Y_at; Start 156; Stop 180
tgcagtgttgatcaatgaagtcccg

SEQ ID NO: 103166 - DNA, 25 bp, Artificial
  probe
  misc_feature (1)..(25): SEQ ID NO: 5390; WAN024C3Y_at; Start 173; Stop 197
aagtcccgacctcggaagatcgccg

SEQ ID NO: 103167 - DNA, 25 bp, Artificial
  probe
  misc_feature (1)..(25): SEQ ID NO: 5390; WAN024C3Y_at; Start 162; Stop 186
gttgatcaatgaagtcccgacctcg

SEQ ID NO: 103168 - DNA, 25 bp, Artificial
  probe
  misc_feature (1)..(25): SEQ ID NO: 5390; WAN024C3Y_at; Start 107; Stop 131
tcaacatctatcctaagattgcggt

SEQ ID NO: 103169 - DNA, 25 bp, Artificial
  probe
  misc_feature (1)..(25): SEQ ID NO: 5390; WAN024C3Y_at; Start 197; Stop 221
gaaatacgcgctaccagattttcga

SEQ ID NO: 103170 - DNA, 25 bp, Artificial
  probe
  misc_feature (1)..(25): SEQ ID NO: 5390; WAN024C3Y_at; Start 168; Stop 192
caatgaagtcccgacctcggaagat

SEQ ID NO: 103171 - DNA, 25 bp, Artificial
  probe
  misc_feature (1)..(25): SEQ ID NO: 5390; WAN024C3Y_at; Start 136; Stop 160
ccttggaactttcatcagactgcag

SEQ ID NO: 103172 - DNA, 25 bp, Artificial
  probe
  misc_feature (1)..(25): SEQ ID NO: 5390; WAN024C3Y_at; Start 205; Stop 229
cgctaccagattttcgataaggact

SEQ ID NO: 103173 - DNA, 25 bp, Artificial
  probe
  misc_feature (1)..(25): SEQ ID NO: 5390; WAN024C3Y_at; Start 60; Stop 84
ggcgtgtcagagcaatcatctcttc

SEQ ID NO: 103174 - DNA, 25 bp, Artificial
  probe
  misc_feature (1)..(25): SEQ ID NO: 5390; WAN024C3Y_at; Start 151; Stop 175
cagactgcagtgttgatcaatgaag

SEQ ID NO: 103175 - DNA, 25 bp, Artificial
  probe
  misc_feature (1)..(25): SEQ ID NO: 5390; WAN024C3Y_at; Start 56; Stop 80
tcacggcgtgtcagagcaatcatct

SEQ ID NO: 103176 - DNA, 25 bp, Artificial
  probe
  misc_feature (1)..(25): SEQ ID NO: 5390; WAN024C3Y_at; Start 20; Stop 44
ttcttgcttcccataagtgtcgcca

SEQ ID NO: 103177 - DNA, 25 bp, Artificial
  probe
  misc_feature (1)..(25): SEQ ID NO: 5390; WAN024C3Y_at; Start 129; Stop 153
ggtaggtccttggaactttcatcag

SEQ ID NO: 103178 - DNA, 25 bp, Artificial
  probe
  misc_feature (1)..(25): SEQ ID NO: 5390; WAN024C3Y_at; Start 2; Stop 26
tgctcacgagtcaatactttcttgc

SEQ ID NO: 103179 - DNA, 25 bp, Artificial
  probe
  misc_feature (1)..(25): SEQ ID NO: 5390; WAN024C3Y_at; Start 92; Stop 116
taaaccgtgtgatgttcaacatcta

SEQ ID NO: 103180 - DNA, 25 bp, Artificial
  probe
  misc_feature (1)..(25): SEQ ID NO: 5390; WAN024C3Y_at; Start 78; Stop 102
tctcttcaccacgataaaccgtgtg

SEQ ID NO: 103181 - DNA, 25 bp, Artificial
  probe
  misc_feature (1)..(25): SEQ ID NO: 5390; WAN024C3Y_at; Start 180; Stop 204
gacctcggaagatcgccgaaatacg

SEQ ID NO: 103182 - DNA, 25 bp, Artificial
  probe
  misc_feature (1)..(25): SEQ ID NO: 5390; WAN024C3Y_at; Start 120; Stop 144
taagattgcggtaggtccttggaac

SEQ ID NO: 103183 - DNA, 25 bp, Artificial
  probe
  misc_feature (1)..(25): SEQ ID NO: 5390; WAN024C3Y_at; Start 69; Stop 93
gagcaatcatctcttcaccacgata

SEQ ID NO: 103184 - DNA, 25 bp, Artificial
  probe
  misc_feature (1)..(25): SEQ ID NO: 5390; WAN024C3Y_at; Start 27; Stop 51
ttcccataagtgtcgccaaaaggtc

SEQ ID NO: 103185 - DNA, 25 bp, Artificial
  probe
  misc_feature (1)..(25): SEQ ID NO: 5390; WAN024C3Y_at; Start 9; Stop 33
gagtcaatactttcttgcttcccat

SEQ ID NO: 103186 - DNA, 25 bp, Artificial
  probe
  misc_feature (1)..(25): SEQ ID NO: 5390; WAN024C3Y_at; Start 42; Stop 66
ccaaaaggtcatactcacggcgtgt

SEQ ID NO: 103187 - DNA, 25 bp, Artificial
  probe
  misc_feature (1)..(25): SEQ ID NO: 5390; WAN024C3Y_at; Start 165; Stop 189
gatcaatgaagtcccgacctcggaa

SEQ ID NO: 103188 - DNA, 25 bp, Artificial
  probe
  misc_feature (1)..(25): SEQ ID NO: 5390; WAN024C3Y_at; Start 185; Stop 209
cggaagatcgccgaaatacgcgcta

SEQ ID NO: 103189 - DNA, 25 bp, Artificial
  probe
  misc_feature (1)..(25): SEQ ID NO: 5390; WAN024C3Y_at; Start 89; Stop 113
cgataaaccgtgtgatgttcaacat

SEQ ID NO: 103190 - DNA, 25 bp, Artificial
  probe
  misc_feature (1)..(25): SEQ ID NO: 5390; WAN024C3Y_at; Start 45; Stop 69
aaaggtcatactcacggcgtgtcag

SEQ ID NO: 103191 - DNA, 25 bp, Artificial
  probe
  misc_feature (1)..(25): SEQ ID NO: 5390; WAN024C3Y_at; Start 201; Stop 225
tacgcgctaccagattttcgataag

SEQ ID NO: 103192 - DNA, 25 bp, Artificial
  probe
  misc_feature (1)..(25): SEQ ID NO: 5390; WAN024C3Y_at; Start 24; Stop 48
tgcttcccataagtgtcgccaaaag

SEQ ID NO: 103193 - DNA, 25 bp, Artificial
  probe
  misc_feature (1)..(25): SEQ ID NO: 5390; WAN024C3Y_at; Start 141; Stop 165
gaactttcatcagactgcagtgttg

SEQ ID NO: 103194 - DNA, 25 bp, Artificial
  probe
  misc_feature (1)..(25): SEQ ID NO: 5390; WAN024C3Y_at; Start 211; Stop 235
cagattttcgataaggactggctta

SEQ ID NO: 103195 - DNA, 25 bp, Artificial
  probe
  misc_feature (1)..(25): SEQ ID NO: 5390; WAN024C3Y_at; Start 190; Stop 214
gatcgccgaaatacgcgctaccaga

SEQ ID NO: 103196 - DNA, 25 bp, Artificial
  probe
  misc_feature (1)..(25): SEQ ID NO: 5390; WAN024C3Y_at; Start 53; Stop 77
tactcacggcgtgtcagagcaatca

SEQ ID NO: 103197 - DNA, 25 bp, Artificial
  probe
  misc_feature (1)..(25): SEQ ID NO: 2583; WAN024C3Z_at; Start 118; Stop 142
tccatggctcttcagacagactatg

SEQ ID NO: 103198 - DNA, 25 bp, Artificial
  probe
  misc_feature (1)..(25): SEQ ID NO: 2583; WAN024C3Z_at; Start 417; Stop 441
tcttaggatagatgttgaacatcac

SEQ ID NO: 103199 - DNA, 25 bp, Artificial
  probe
  misc_feature (1)..(25): SEQ ID NO: 2583; WAN024C3Z_at; Start 362; Stop 386
gggacttcattgatcaacactgcag

SEQ ID NO: 103200 - DNA, 25 bp, Artificial
  probe
  misc_feature (1)..(25): SEQ ID NO: 2583; WAN024C3Z_at; Start 124; Stop 148
gctcttcagacagactatgatttga

SEQ ID NO: 103201 - DNA, 25 bp, Artificial
  probe
  misc_feature (1)..(25): SEQ ID NO: 2583; WAN024C3Z_at; Start 478; Stop 502
cgccgtgagtatgaccttttggcga

SEQ ID NO: 103202 - DNA, 25 bp, Artificial
  probe
  misc_feature (1)..(25): SEQ ID NO: 2583; WAN024C3Z_at; Start 259; Stop 283
caagaagagctggaagttgttcagc

SEQ ID NO: 103203 - DNA, 25 bp, Artificial
  probe
  misc_feature (1)..(25): SEQ ID NO: 2583; WAN024C3Z_at; Start 568; Stop 592
agtgcgaccgagacaaatatcgtag

SEQ ID NO: 103204 - DNA, 25 bp, Artificial
  probe
  misc_feature (1)..(25): SEQ ID NO: 2583; WAN024C3Z_at; Start 53; Stop 77
taagtttggaactccagaaagagca

SEQ ID NO: 103205 - DNA, 25 bp, Artificial
  probe
  misc_feature (1)..(25): SEQ ID NO: 2583; WAN024C3Z_at; Start 558; Stop 582
gaagtatgaaagtgcgaccgagaca

SEQ ID NO: 103206 - DNA, 25 bp, Artificial
  probe
  misc_feature (1)..(25): SEQ ID NO: 2583; WAN024C3Z_at; Start 65; Stop 89
tccagaaagagcagtatcgggttga

SEQ ID NO: 103207 - DNA, 25 bp, Artificial
  probe
  misc_feature (1)..(25): SEQ ID NO: 2583; WAN024C3Z_at; Start 379; Stop 403
cactgcagtctgatgaaagttccaa

SEQ ID NO: 103208 - DNA, 25 bp, Artificial
  probe
  misc_feature (1)..(25): SEQ ID NO: 2583; WAN024C3Z_at; Start 244; Stop 268
cattgggaagacttgcaagaagagc

SEQ ID NO: 103209 - DNA, 25 bp, Artificial
  probe
  misc_feature (1)..(25): SEQ ID NO: 2583; WAN024C3Z_at; Start 289; Stop 313
gcagtttcatacatctataagccag

SEQ ID NO: 103210 - DNA, 25 bp, Artificial
  probe
  misc_feature (1)..(25): SEQ ID NO: 2583; WAN024C3Z_at; Start 404; Stop 428
ggacctaccgcaatcttaggataga

SEQ ID NO: 103211 - DNA, 25 bp, Artificial
  probe
  misc_feature (1)..(25): SEQ ID NO: 2583; WAN024C3Z_at; Start 552; Stop 576
tgtttggaagtatgaaagtgcgacc

SEQ ID NO: 103212 - DNA, 25 bp, Artificial
  probe
  misc_feature (1)..(25): SEQ ID NO: 2583; WAN024C3Z_at; Start 582; Stop 606
aaatatcgtagatgtctatatccgc

SEQ ID NO: 103213 - DNA, 25 bp, Artificial
  probe
  misc_feature (1)..(25): SEQ ID NO: 2583; WAN024C3Z_at; Start 448; Stop 472
tatcgtggtgaagagatgattgctc

SEQ ID NO: 103214 - DNA, 25 bp, Artificial
  probe
  misc_feature (1)..(25): SEQ ID NO: 2583; WAN024C3Z_at; Start 611; Stop 635
tacggagcaagcttgatgttaaagg

SEQ ID NO: 103215 - DNA, 25 bp, Artificial
  probe
  misc_feature (1)..(25): SEQ ID NO: 2583; WAN024C3Z_at; Start 151; Stop 175
ttattgaacgttaatctgggagata

SEQ ID NO: 103216 - DNA, 25 bp, Artificial
  probe
  misc_feature (1)..(25): SEQ ID NO: 2583; WAN024C3Z_at; Start 231; Stop 255
catgattttagatcattgggaagac

SEQ ID NO: 103217 - DNA, 25 bp, Artificial
  probe
  misc_feature (1)..(25): SEQ ID NO: 2583; WAN024C3Z_at; Start 162; Stop 186
taatctgggagatatgatggctcag

SEQ ID NO: 103218 - DNA, 25 bp, Artificial
  probe
  misc_feature (1)..(25): SEQ ID NO: 2583; WAN024C3Z_at; Start 318; Stop 342
tatcgaaaatctggtagcgcgtatt

SEQ ID NO: 103219 - DNA, 25 bp, Artificial
  probe
  misc_feature (1)..(25): SEQ ID NO: 2583; WAN024C3Z_at; Start 433; Stop 457
gaacatcacacggtttatcgtggtg

SEQ ID NO: 103220 - DNA, 25 bp, Artificial
  probe
  misc_feature (1)..(25): SEQ ID NO: 2583; WAN024C3Z_at; Start 177; Stop 201
gatggctcaggattttgcagaaaaa

SEQ ID NO: 103221 - DNA, 25 bp, Artificial
  probe
  misc_feature (1)..(25): SEQ ID NO: 2583; WAN024C3Z_at; Start 390; Stop 414
gatgaaagttccaaggacctaccgc

SEQ ID NO: 103222 - DNA, 25 bp, Artificial
  probe
  misc_feature (1)..(25): SEQ ID NO: 2583; WAN024C3Z_at; Start 490; Stop 514
gaccttttggcgacacttatgggaa

SEQ ID NO: 103223 - DNA, 25 bp, Artificial
  probe
  misc_feature (1)..(25): SEQ ID NO: 2583; WAN024C3Z_at; Start 273; Stop 297
agttgttcagcgttttgcagtttca

SEQ ID NO: 103224 - DNA, 25 bp, Artificial
  probe
  misc_feature (1)..(25): SEQ ID NO: 2583; WAN024C3Z_at; Start 355; Stop 379
cgaggtcgggacttcattgatcaac

SEQ ID NO: 103225 - DNA, 25 bp, Artificial
  probe
  misc_feature (1)..(25): SEQ ID NO: 2583; WAN024C3Z_at; Start 516; Stop 540
caagaaagtattgactcgtgagcaa

SEQ ID NO: 103226 - DNA, 25 bp, Artificial
  probe
  misc_feature (1)..(25): SEQ ID NO: 2583; WAN024C3Z_at; Start 213; Stop 237
taaacctgcctcagtcatcatgatt

SEQ ID NO: 103227 - DNA, 25 bp, Artificial
  probe
  misc_feature (1)..(25): SEQ ID NO: 2583; WAN024C3Z_at; Start 31; Stop 55
gaacgaaatctagctcattttttaa

SEQ ID NO: 103228 - DNA, 25 bp, Artificial
  probe
  misc_feature (1)..(25): SEQ ID NO: 2583; WAN024C3Z_at; Start 500; Stop 524
cgacacttatgggaagcaagaaagt

SEQ ID NO: 103229 - DNA, 25 bp, Artificial
  probe
  misc_feature (1)..(25): SEQ ID NO: 2583; WAN024C3Z_at; Start 74; Stop 98
agcagtatcgggttgatctggtaga

SEQ ID NO: 103230 - DNA, 25 bp, Artificial
  probe
  misc_feature (1)..(25): SEQ ID NO: 2583; WAN024C3Z_at; Start 598; Stop 622
tatatccgctatctacggagcaagc

SEQ ID NO: 103231 - DNA, 25 bp, Artificial
  probe
  misc_feature (1)..(25): SEQ ID NO: 5874; WAN024C42_at; Start 56; Stop 80
tcctaacattgctaaatcagattaa

SEQ ID NO: 103232 - DNA, 25 bp, Artificial
  probe
  misc_feature (1)..(25): SEQ ID NO: 5874; WAN024C42_at; Start 17; Stop 41
tatctcctattggtaacattataac

SEQ ID NO: 103233 - DNA, 25 bp, Artificial
  probe
  misc_feature (1)..(25): SEQ ID NO: 5874; WAN024C42_at; Start 28; Stop 52
ggtaacattataacacaattatcag

SEQ ID NO: 103234 - DNA, 25 bp, Artificial
  probe
  misc_feature (1)..(25): SEQ ID NO: 5874; WAN024C42_at; Start 39; Stop 63
aacacaattatcagaaatcctaaca

SEQ ID NO: 103235 - DNA, 25 bp, Artificial
  probe
  misc_feature (1)..(25): SEQ ID NO: 5874; WAN024C42_at; Start 41; Stop 65
cacaattatcagaaatcctaacatt

SEQ ID NO: 103236 - DNA, 25 bp, Artificial
  probe
  misc_feature (1)..(25): SEQ ID NO: 5874; WAN024C42_at; Start 53; Stop 77
aaatcctaacattgctaaatcagat

SEQ ID NO: 103237 - DNA, 25 bp, Artificial
  probe
  misc_feature (1)..(25): SEQ ID NO: 5874; WAN024C42_at; Start 62; Stop 86
cattgctaaatcagattaaatttgc

SEQ ID NO: 103238 - DNA, 25 bp, Artificial
  probe
  misc_feature (1)..(25): SEQ ID NO: 5874; WAN024C42_at; Start 29; Stop 53
gtaacattataacacaattatcaga

SEQ ID NO: 103239 - DNA, 25 bp, Artificial
  probe
  misc_feature (1)..(25): SEQ ID NO: 5874; WAN024C42_at; Start 22; Stop 46
cctattggtaacattataacacaat

SEQ ID NO: 103240 - DNA, 25 bp, Artificial
  probe
  misc_feature (1)..(25): SEQ ID NO: 5874; WAN024C42_at; Start 35; Stop 59
ttataacacaattatcagaaatcct

SEQ ID NO: 103241 - DNA, 25 bp, Artificial
  probe
  misc_feature (1)..(25): SEQ ID NO: 5874; WAN024C42_at; Start 6; Stop 30
ttgtcatctattatctcctattggt

SEQ ID NO: 103242 - DNA, 25 bp, Artificial
  probe
  misc_feature (1)..(25): SEQ ID NO: 5874; WAN024C42_at; Start 10; Stop 34
catctattatctcctattggtaaca

SEQ ID NO: 103243 - DNA, 25 bp, Artificial
  probe
  misc_feature (1)..(25): SEQ ID NO: 5874; WAN024C42_at; Start 50; Stop 74
cagaaatcctaacattgctaaatca

SEQ ID NO: 103244 - DNA, 25 bp, Artificial
  probe
  misc_feature (1)..(25): SEQ ID NO: 5874; WAN024C42_at; Start 52; Stop 76
gaaatcctaacattgctaaatcaga

SEQ ID NO: 103245 - DNA, 25 bp, Artificial
  probe
  misc_feature (1)..(25): SEQ ID NO: 5874; WAN024C42_at; Start 57; Stop 81
cctaacattgctaaatcagattaaa

SEQ ID NO: 103246 - DNA, 25 bp, Artificial
  probe
  misc_feature (1)..(25): SEQ ID NO: 5874; WAN024C42_at; Start 45; Stop 69
attatcagaaatcctaacattgcta

SEQ ID NO: 103247 - DNA, 25 bp, Artificial
  probe
  misc_feature (1)..(25): SEQ ID NO: 5874; WAN024C42_at; Start 1; Stop 25
ttgttttgtcatctattatctccta

SEQ ID NO: 103248 - DNA, 25 bp, Artificial
  probe
  misc_feature (1)..(25): SEQ ID NO: 5874; WAN024C42_at; Start 21; Stop 45
tcctattggtaacattataacacaa

SEQ ID NO: 103249 - DNA, 25 bp, Artificial
  probe
  misc_feature (1)..(25): SEQ ID NO: 5874; WAN024C42_at; Start 9; Stop 33
tcatctattatctcctattggtaac

SEQ ID NO: 103250 - DNA, 25 bp, Artificial
  probe
  misc_feature (1)..(25): SEQ ID NO: 5874; WAN024C42_at; Start 47; Stop 71
tatcagaaatcctaacattgctaaa

SEQ ID NO: 103251 - DNA, 25 bp, Artificial
  probe
  misc_feature (1)..(25): SEQ ID NO: 5874; WAN024C42_at; Start 20; Stop 44
ctcctattggtaacattataacaca

SEQ ID NO: 103252 - DNA, 25 bp, Artificial
  probe
  misc_feature (1)..(25): SEQ ID NO: 5874; WAN024C42_at; Start 51; Stop 75
agaaatcctaacattgctaaatcag

SEQ ID NO: 103253 - DNA, 25 bp, Artificial
  probe
  misc_feature (1)..(25): SEQ ID NO: 5874; WAN024C42_at; Start 36; Stop 60
tataacacaattatcagaaatccta

SEQ ID NO: 103254 - DNA, 25 bp, Artificial
  probe
  misc_feature (1)..(25): SEQ ID NO: 5874; WAN024C42_at; Start 49; Stop 73
tcagaaatcctaacattgctaaatc

SEQ ID NO: 103255 - DNA, 25 bp, Artificial
  probe
  misc_feature (1)..(25): SEQ ID NO: 5874; WAN024C42_at; Start 58; Stop 82
ctaacattgctaaatcagattaaat

SEQ ID NO: 103256 - DNA, 25 bp, Artificial
  probe
  misc_feature (1)..(25): SEQ ID NO: 5874; WAN024C42_at; Start 44; Stop 68
aattatcagaaatcctaacattgct

SEQ ID NO: 103257 - DNA, 25 bp, Artificial
  probe
  misc_feature (1)..(25): SEQ ID NO: 5874; WAN024C42_at; Start 46; Stop 70
ttatcagaaatcctaacattgctaa

SEQ ID NO: 103258 - DNA, 25 bp, Artificial
  probe
  misc_feature (1)..(25): SEQ ID NO: 5874; WAN024C42_at; Start 38; Stop 62
taacacaattatcagaaatcctaac

SEQ ID NO: 103259 - DNA, 25 bp, Artificial
  probe
  misc_feature (1)..(25): SEQ ID NO: 5874; WAN024C42_at; Start 8; Stop 32
gtcatctattatctcctattggtaa

SEQ ID NO: 103260 - DNA, 25 bp, Artificial
  probe
  misc_feature (1)..(25): SEQ ID NO: 5874; WAN024C42_at; Start 5; Stop 29
tttgtcatctattatctcctattgg

SEQ ID NO: 103261 - DNA, 25 bp, Artificial
  probe
  misc_feature (1)..(25): SEQ ID NO: 5874; WAN024C42_at; Start 7; Stop 31
tgtcatctattatctcctattggta

SEQ ID NO: 103262 - DNA, 25 bp, Artificial
  probe
  misc_feature (1)..(25): SEQ ID NO: 5874; WAN024C42_at; Start 43; Stop 67
caattatcagaaatcctaacattgc

SEQ ID NO: 103263 - DNA, 25 bp, Artificial
  probe
  misc_feature (1)..(25): SEQ ID NO: 5874; WAN024C42_at; Start 19; Stop 43
tctcctattggtaacattataacac

SEQ ID NO: 103264 - DNA, 25 bp, Artificial
  probe
  misc_feature (1)..(25): SEQ ID NO: 5874; WAN024C42_at; Start 12; Stop 36
tctattatctcctattggtaacatt

SEQ ID NO: 103265 - DNA, 25 bp, Artificial
  probe
  misc_feature (1)..(25): SEQ ID NO: 1321; WAN024C43_at; Start 259; Stop 283
aatccagacttctttgcatccaaag

SEQ ID NO: 103266 - DNA, 25 bp, Artificial
  probe
  misc_feature (1)..(25): SEQ ID NO: 1321; WAN024C43_at; Start 515; Stop 539
ggaaaaaccttcttgatgataagta

SEQ ID NO: 103267 - DNA, 25 bp, Artificial
  probe
  misc_feature (1)..(25): SEQ ID NO: 1321; WAN024C43_at; Start 183; Stop 207
gagttacggaattataattgttgca

SEQ ID NO: 103268 - DNA, 25 bp, Artificial
  probe
  misc_feature (1)..(25): SEQ ID NO: 1321; WAN024C43_at; Start 343; Stop 367
gcgttaacttataatcttccaatgc

SEQ ID NO: 103269 - DNA, 25 bp, Artificial
  probe
  misc_feature (1)..(25): SEQ ID NO: 1321; WAN024C43_at; Start 89; Stop 113
ttttaagacgacacaatattgaatg

SEQ ID NO: 103270 - DNA, 25 bp, Artificial
  probe
  misc_feature (1)..(25): SEQ ID NO: 1321; WAN024C43_at; Start 467; Stop 491
tattaatgtacttgcaatcagaagg

SEQ ID NO: 103271 - DNA, 25 bp, Artificial
  probe
  misc_feature (1)..(25): SEQ ID NO: 1321; WAN024C43_at; Start 533; Stop 557
ataagtataactttatcaaaggagg

SEQ ID NO: 103272 - DNA, 25 bp, Artificial
  probe
  misc_feature (1)..(25): SEQ ID NO: 1321; WAN024C43_at; Start 214; Stop 238
cagacatttatttctagtggaacca

SEQ ID NO: 103273 - DNA, 25 bp, Artificial
  probe
  misc_feature (1)..(25): SEQ ID NO: 1321; WAN024C43_at; Start 377; Stop 401
ctcaagaaagtttaactgaagaagg

SEQ ID NO: 103274 - DNA, 25 bp, Artificial
  probe
  misc_feature (1)..(25): SEQ ID NO: 1321; WAN024C43_at; Start 169; Stop 193
gagatgatacaaaggagttacggaa

SEQ ID NO: 103275 - DNA, 25 bp, Artificial
  probe
  misc_feature (1)..(25): SEQ ID NO: 1321; WAN024C43_at; Start 273; Stop 297
tgcatccaaagagacccacttaaag

SEQ ID NO: 103276 - DNA, 25 bp, Artificial
  probe
  misc_feature (1)..(25): SEQ ID NO: 1321; WAN024C43_at; Start 436; Stop 460
cctgaattctcattagaaacaaaag

SEQ ID NO: 103277 - DNA, 25 bp, Artificial
  probe
  misc_feature (1)..(25): SEQ ID NO: 1321; WAN024C43_at; Start 199; Stop 223
attgttgcatttggtcagacattta

SEQ ID NO: 103278 - DNA, 25 bp, Artificial
  probe
  misc_feature (1)..(25): SEQ ID NO: 1321; WAN024C43_at; Start 228; Stop 252
tagtggaaccagaaaaatgggagct

SEQ ID NO: 103279 - DNA, 25 bp, Artificial
  probe
  misc_feature (1)..(25): SEQ ID NO: 1321; WAN024C43_at; Start 20; Stop 44
gagtatttttaagcagacctaatcc

SEQ ID NO: 103280 - DNA, 25 bp, Artificial
  probe
  misc_feature (1)..(25): SEQ ID NO: 1321; WAN024C43_at; Start 279; Stop 303
caaagagacccacttaaagaataag

SEQ ID NO: 103281 - DNA, 25 bp, Artificial
  probe
  misc_feature (1)..(25): SEQ ID NO: 1321; WAN024C43_at; Start 362; Stop 386
caatgctatctattcctcaagaaag

SEQ ID NO: 103282 - DNA, 25 bp, Artificial
  probe
  misc_feature (1)..(25): SEQ ID NO: 1321; WAN024C43_at; Start 243; Stop 267
aatgggagctgaggataatccagac

SEQ ID NO: 103283 - DNA, 25 bp, Artificial
  probe
  misc_feature (1)..(25): SEQ ID NO: 1321; WAN024C43_at; Start 32; Stop 56
gcagacctaatccatttacagagaa

SEQ ID NO: 103284 - DNA, 25 bp, Artificial
  probe
  misc_feature (1)..(25): SEQ ID NO: 1321; WAN024C43_at; Start 508; Stop 532
catgtatggaaaaaccttcttgatg

SEQ ID NO: 103285 - DNA, 25 bp, Artificial
  probe
  misc_feature (1)..(25): SEQ ID NO: 1321; WAN024C43_at; Start 148; Stop 172
gaagtcatgaattcgttgagtgaga

SEQ ID NO: 103286 - DNA, 25 bp, Artificial
  probe
  misc_feature (1)..(25): SEQ ID NO: 1321; WAN024C43_at; Start 477; Stop 501
cttgcaatcagaagggtttcaaaaa

SEQ ID NO: 103287 - DNA, 25 bp, Artificial
  probe
  misc_feature (1)..(25): SEQ ID NO: 1321; WAN024C43_at; Start 156; Stop 180
gaattcgttgagtgagatgatacaa

SEQ ID NO: 103288 - DNA, 25 bp, Artificial
  probe
  misc_feature (1)..(25): SEQ ID NO: 1321; WAN024C43_at; Start 109; Stop 133
gaatgtgtaacattacaagctgctg

SEQ ID NO: 103289 - DNA, 25 bp, Artificial
  probe
  misc_feature (1)..(25): SEQ ID NO: 1321; WAN024C43_at; Start 428; Stop 452
taacatcacctgaattctcattaga

SEQ ID NO: 103290 - DNA, 25 bp, Artificial
  probe
  misc_feature (1)..(25): SEQ ID NO: 1321; WAN024C43_at; Start 415; Stop 439
ggagaatattctataacatcacctg

SEQ ID NO: 103291 - DNA, 25 bp, Artificial
  probe
  misc_feature (1)..(25): SEQ ID NO: 1321; WAN024C43_at; Start 119; Stop 143
cattacaagctgctgagtatactcc

SEQ ID NO: 103292 - DNA, 25 bp, Artificial
  probe
  misc_feature (1)..(25): SEQ ID NO: 1321; WAN024C43_at; Start 37; Stop 61
cctaatccatttacagagaatcaaa

SEQ ID NO: 103293 - DNA, 25 bp, Artificial
  probe
  misc_feature (1)..(25): SEQ ID NO: 1321; WAN024C43_at; Start 325; Stop 349
catattgaagggattttagcgttaa

SEQ ID NO: 103294 - DNA, 25 bp, Artificial
  probe
  misc_feature (1)..(25): SEQ ID NO: 1321; WAN024C43_at; Start 493; Stop 517
tttcaaaaaagttttcatgtatgga

SEQ ID NO: 103295 - DNA, 25 bp, Artificial
  probe
  misc_feature (1)..(25): SEQ ID NO: 1321; WAN024C43_at; Start 130; Stop 154
gctgagtatactccttacgaagtca

SEQ ID NO: 103296 - DNA, 25 bp, Artificial
  probe
  misc_feature (1)..(25): SEQ ID NO: 1321; WAN024C43_at; Start 252; Stop 276
tgaggataatccagacttctttgca

SEQ ID NO: 103297 - DNA, 25 bp, Artificial
  probe
  misc_feature (1)..(25): SEQ ID NO: 1321; WAN024C43_at; Start 138; Stop 162
tactccttacgaagtcatgaattcg

SEQ ID NO: 103298 - DNA, 25 bp, Artificial
  probe
  misc_feature (1)..(25): SEQ ID NO: 1321; WAN024C43_at; Start 311; Stop 335
caagtgtttattgtcatattgaagg

SEQ ID NO: 103299 - DNA, 25 bp, Artificial
  probe
  misc_feature (1)..(25): SEQ ID NO: 1399; WAN024C44_at; Start 489; Stop 513
tgaatctgctctataccgtgtaata

SEQ ID NO: 103300 - DNA, 25 bp, Artificial
  probe
  misc_feature (1)..(25): SEQ ID NO: 1399; WAN024C44_at; Start 458; Stop 482
cagatgagacatttactgatagtcc

SEQ ID NO: 103301 - DNA, 25 bp, Artificial
  probe
  misc_feature (1)..(25): SEQ ID NO: 1399; WAN024C44_at; Start 849; Stop 873
gaataggagtgacttaatgtctgca

SEQ ID NO: 103302 - DNA, 25 bp, Artificial
  probe
  misc_feature (1)..(25): SEQ ID NO: 1399; WAN024C44_at; Start 922; Stop 946
tgtgcaaggaattactgtgctaacc

SEQ ID NO: 103303 - DNA, 25 bp, Artificial
  probe
  misc_feature (1)..(25): SEQ ID NO: 1399; WAN024C44_at; Start 136; Stop 160
ggtaaaaaccactttagagctgatg

SEQ ID NO: 103304 - DNA, 25 bp, Artificial
  probe
  misc_feature (1)..(25): SEQ ID NO: 1399; WAN024C44_at; Start 589; Stop 613
caagccacggaactcaagaattcag

SEQ ID NO: 103305 - DNA, 25 bp, Artificial
  probe
  misc_feature (1)..(25): SEQ ID NO: 1399; WAN024C44_at; Start 728; Stop 752
tagcaaatttaaaaatggcacagca

SEQ ID NO: 103306 - DNA, 25 bp, Artificial
  probe
  misc_feature (1)..(25): SEQ ID NO: 1399; WAN024C44_at; Start 1060; Stop 1084
tctagtgaatatgacgacatttggt

SEQ ID NO: 103307 - DNA, 25 bp, Artificial
  probe
  misc_feature (1)..(25): SEQ ID NO: 1399; WAN024C44_at; Start 1209; Stop 1233
ggatctccagaggattaaaactgca

SEQ ID NO: 103308 - DNA, 25 bp, Artificial
  probe
  misc_feature (1)..(25): SEQ ID NO: 1399; WAN024C44_at; Start 1112; Stop 1136
tgatttcaggccttctttcaaaacc

SEQ ID NO: 103309 - DNA, 25 bp, Artificial
  probe
  misc_feature (1)..(25): SEQ ID NO: 1399; WAN024C44_at; Start 1096; Stop 1120
caagaggatctaatgctgatttcag

SEQ ID NO: 103310 - DNA, 25 bp, Artificial
  probe
  misc_feature (1)..(25): SEQ ID NO: 1399; WAN024C44_at; Start 315; Stop 339
tgatcatcacacagctaagattagc

SEQ ID NO: 103311 - DNA, 25 bp, Artificial
  probe
  misc_feature (1)..(25): SEQ ID NO: 1399; WAN024C44_at; Start 352; Stop 376
gcacacttacctcaaatcagatatg

SEQ ID NO: 103312 - DNA, 25 bp, Artificial
  probe
  misc_feature (1)..(25): SEQ ID NO: 1399; WAN024C44_at; Start 474; Stop 498
tgatagtccagcctttgaatctgct

SEQ ID NO: 103313 - DNA, 25 bp, Artificial
  probe
  misc_feature (1)..(25): SEQ ID NO: 1399; WAN024C44_at; Start 265; Stop 289
gagttaggtctacgtcatgctatga

SEQ ID NO: 103314 - DNA, 25 bp, Artificial
  probe
  misc_feature (1)..(25): SEQ ID NO: 1399; WAN024C44_at; Start 945; Stop 969
cctgttaaaaatagccttagttgag

SEQ ID NO: 103315 - DNA, 25 bp, Artificial
  probe
  misc_feature (1)..(25): SEQ ID NO: 1399; WAN024C44_at; Start 157; Stop 181
gatgaagttttcagtacacagagta

SEQ ID NO: 103316 - DNA, 25 bp, Artificial
  probe
  misc_feature (1)..(25): SEQ ID NO: 1399; WAN024C44_at; Start 283; Stop 307
gctatgaaacccaaatcaaccatta

SEQ ID NO: 103317 - DNA, 25 bp, Artificial
  probe
  misc_feature (1)..(25): SEQ ID NO: 1399; WAN024C44_at; Start 393; Stop 417
cgaagtggatgaagttaacaaggtg

SEQ ID NO: 103318 - DNA, 25 bp, Artificial
  probe
  misc_feature (1)..(25): SEQ ID NO: 1399; WAN024C44_at; Start 711; Stop 735
gaaaaatgaatcttcgctagcaaat

SEQ ID NO: 103319 - DNA, 25 bp, Artificial
  probe
  misc_feature (1)..(25): SEQ ID NO: 1399; WAN024C44_at; Start 543; Stop 567
tcaaagtgaagaagcattagacaag

SEQ ID NO: 103320 - DNA, 25 bp, Artificial
  probe
  misc_feature (1)..(25): SEQ ID NO: 1399; WAN024C44_at; Start 250; Stop 274
caaaatgctatctatgagttaggtc

SEQ ID NO: 103321 - DNA, 25 bp, Artificial
  probe
  misc_feature (1)..(25): SEQ ID NO: 1399; WAN024C44_at; Start 442; Stop 466
gattccgctataaagtcagatgaga

SEQ ID NO: 103322 - DNA, 25 bp, Artificial
  probe
  misc_feature (1)..(25): SEQ ID NO: 1399; WAN024C44_at; Start 1194; Stop 1218
tattatgttaagtgaggatctccag

SEQ ID NO: 103323 - DNA, 25 bp, Artificial
  probe
  misc_feature (1)..(25): SEQ ID NO: 1399; WAN024C44_at; Start 299; Stop 323
caaccattatactgtgtgatcatca

SEQ ID NO: 103324 - DNA, 25 bp, Artificial
  probe
  misc_feature (1)..(25): SEQ ID NO: 1399; WAN024C44_at; Start 666; Stop 690
tattgatgaagaaattttggcaggc

SEQ ID NO: 103325 - DNA, 25 bp, Artificial
  probe
  misc_feature (1)..(25): SEQ ID NO: 1399; WAN024C44_at; Start 986; Stop 1010
taaaggagttctactatacatctgt

SEQ ID NO: 103326 - DNA, 25 bp, Artificial
  probe
  misc_feature (1)..(25): SEQ ID NO: 1399; WAN024C44_at; Start 574; Stop 598
gctgaactttatgatcaagccacgg

SEQ ID NO: 103327 - DNA, 25 bp, Artificial
  probe
  misc_feature (1)..(25): SEQ ID NO: 1399; WAN024C44_at; Start 411; Stop 435
caaggtgaaaaaactgctttctgaa

SEQ ID NO: 103328 - DNA, 25 bp, Artificial
  probe
  misc_feature (1)..(25): SEQ ID NO: 1399; WAN024C44_at; Start 606; Stop 630
gaattcagaaaagtatcctgaggca

SEQ ID NO: 103329 - DNA, 25 bp, Artificial
  probe
  misc_feature (1)..(25): SEQ ID NO: 1399; WAN024C44_at; Start 1081; Stop 1105
tggtttctttccaatcaagaggatc

SEQ ID NO: 103330 - DNA, 25 bp, Artificial
  probe
  misc_feature (1)..(25): SEQ ID NO: 1399; WAN024C44_at; Start 556; Stop 580
gcattagacaagtcaatagctgaac

SEQ ID NO: 103331 - DNA, 25 bp, Artificial
  probe
  misc_feature (1)..(25): SEQ ID NO: 1399; WAN024C44_at; Start 622; Stop 646
cctgaggcagaagaaatatttcagc

SEQ ID NO: 103332 - DNA, 25 bp, Artificial
  probe
  misc_feature (1)..(25): SEQ ID NO: 1399; WAN024C44_at; Start 1146; Stop 1170
tattgagggtttaactgaacgacag

SEQ ID NO: 103333 - DNA, 25 bp, Artificial
  probe
  misc_feature (1)..(25): SEQ ID NO: 7454; WAN024C45_at; Start 67; Stop 91
accttgctagcatgtaccacgttct

SEQ ID NO: 103334 - DNA, 25 bp, Artificial
  probe
  misc_feature (1)..(25): SEQ ID NO: 7454; WAN024C45_at; Start 63; Stop 87
aagcaccttgctagcatgtaccacg

SEQ ID NO: 103335 - DNA, 25 bp, Artificial
  probe
  misc_feature (1)..(25): SEQ ID NO: 7454; WAN024C45_at; Start 54; Stop 78
tggttttggaagcaccttgctagca

SEQ ID NO: 103336 - DNA, 25 bp, Artificial
  probe
  misc_feature (1)..(25): SEQ ID NO: 7454; WAN024C45_at; Start 69; Stop 93
cttgctagcatgtaccacgttcttc

SEQ ID NO: 103337 - DNA, 25 bp, Artificial
  probe
  misc_feature (1)..(25): SEQ ID NO: 7454; WAN024C45_at; Start 65; Stop 89
gcaccttgctagcatgtaccacgtt

SEQ ID NO: 103338 - DNA, 25 bp, Artificial
  probe
  misc_feature (1)..(25): SEQ ID NO: 7454; WAN024C45_at; Start 52; Stop 76
gctggttttggaagcaccttgctag

SEQ ID NO: 103339 - DNA, 25 bp, Artificial
  probe
  misc_feature (1)..(25): SEQ ID NO: 7454; WAN024C45_at; Start 76; Stop 100
gcatgtaccacgttcttctttgtaa

SEQ ID NO: 103340 - DNA, 25 bp, Artificial
  probe
  misc_feature (1)..(25): SEQ ID NO: 7454; WAN024C45_at; Start 74; Stop 98
tagcatgtaccacgttcttctttgt

SEQ ID NO: 103341 - DNA, 25 bp, Artificial
  probe
  misc_feature (1)..(25): SEQ ID NO: 7454; WAN024C45_at; Start 72; Stop 96
gctagcatgtaccacgttcttcttt

SEQ ID NO: 103342 - DNA, 25 bp, Artificial
  probe
  misc_feature (1)..(25): SEQ ID NO: 7454; WAN024C45_at; Start 44; Stop 68
ttgaggcagctggttttggaagcac

SEQ ID NO: 103343 - DNA, 25 bp, Artificial
  probe
  misc_feature (1)..(25): SEQ ID NO: 7454; WAN024C45_at; Start 45; Stop 69
tgaggcagctggttttggaagcacc

SEQ ID NO: 103344 - DNA, 25 bp, Artificial
  probe
  misc_feature (1)..(25): SEQ ID NO: 7454; WAN024C45_at; Start 30; Stop 54
tgtcttcttcaaagttgaggcagct

SEQ ID NO: 103345 - DNA, 25 bp, Artificial
  probe
  misc_feature (1)..(25): SEQ ID NO: 7454; WAN024C45_at; Start 60; Stop 84
tggaagcaccttgctagcatgtacc

SEQ ID NO: 103346 - DNA, 25 bp, Artificial
  probe
  misc_feature (1)..(25): SEQ ID NO: 7454; WAN024C45_at; Start 32; Stop 56
tcttcttcaaagttgaggcagctgg

SEQ ID NO: 103347 - DNA, 25 bp, Artificial
  probe
  misc_feature (1)..(25): SEQ ID NO: 7454; WAN024C45_at; Start 27; Stop 51
ccttgtcttcttcaaagttgaggca

SEQ ID NO: 103348 - DNA, 25 bp, Artificial
  probe
  misc_feature (1)..(25): SEQ ID NO: 7454; WAN024C45_at; Start 3; Stop 27
gacggattttttcaatcaattcagc

SEQ ID NO: 103349 - DNA, 25 bp, Artificial
  probe
  misc_feature (1)..(25): SEQ ID NO: 7454; WAN024C45_at; Start 24; Stop 48
cagccttgtcttcttcaaagttgag

SEQ ID NO: 103350 - DNA, 25 bp, Artificial
  probe
  misc_feature (1)..(25): SEQ ID NO: 7454; WAN024C45_at; Start 48; Stop 72
ggcagctggttttggaagcaccttg

SEQ ID NO: 103351 - DNA, 25 bp, Artificial
  probe
  misc_feature (1)..(25): SEQ ID NO: 7454; WAN024C45_at; Start 56; Stop 80
gttttggaagcaccttgctagcatg

SEQ ID NO: 103352 - DNA, 25 bp, Artificial
  probe
  misc_feature (1)..(25): SEQ ID NO: 7454; WAN024C45_at; Start 71; Stop 95
tgctagcatgtaccacgttcttctt

SEQ ID NO: 103353 - DNA, 25 bp, Artificial
  probe
  misc_feature (1)..(25): SEQ ID NO: 7454; WAN024C45_at; Start 50; Stop 74
cagctggttttggaagcaccttgct

SEQ ID NO: 103354 - DNA, 25 bp, Artificial
  probe
  misc_feature (1)..(25): SEQ ID NO: 7454; WAN024C45_at; Start 33; Stop 57
cttcttcaaagttgaggcagctggt

SEQ ID NO: 103355 - DNA, 25 bp, Artificial
  probe
  misc_feature (1)..(25): SEQ ID NO: 7454; WAN024C45_at; Start 36; Stop 60
cttcaaagttgaggcagctggtttt

SEQ ID NO: 103356 - DNA, 25 bp, Artificial
  probe
  misc_feature (1)..(25): SEQ ID NO: 7454; WAN024C45_at; Start 19; Stop 43
caattcagccttgtcttcttcaaag

SEQ ID NO: 103357 - DNA, 25 bp, Artificial
  probe
  misc_feature (1)..(25): SEQ ID NO: 7454; WAN024C45_at; Start 35; Stop 59
tcttcaaagttgaggcagctggttt

SEQ ID NO: 103358 - DNA, 25 bp, Artificial
  probe
  misc_feature (1)..(25): SEQ ID NO: 7454; WAN024C45_at; Start 46; Stop 70
gaggcagctggttttggaagcacct

SEQ ID NO: 103359 - DNA, 25 bp, Artificial
  probe
  misc_feature (1)..(25): SEQ ID NO: 7454; WAN024C45_at; Start 7; Stop 31
gattttttcaatcaattcagccttg

SEQ ID NO: 103360 - DNA, 25 bp, Artificial
  probe
  misc_feature (1)..(25): SEQ ID NO: 7454; WAN024C45_at; Start 12; Stop 36
tttcaatcaattcagccttgtcttc

SEQ ID NO: 103361 - DNA, 25 bp, Artificial
  probe
  misc_feature (1)..(25): SEQ ID NO: 7454; WAN024C45_at; Start 25; Stop 49
agccttgtcttcttcaaagttgagg

SEQ ID NO: 103362 - DNA, 25 bp, Artificial
  probe
  misc_feature (1)..(25): SEQ ID NO: 7454; WAN024C45_at; Start 40; Stop 64
aaagttgaggcagctggttttggaa

SEQ ID NO: 103363 - DNA, 25 bp, Artificial
  probe
  misc_feature (1)..(25): SEQ ID NO: 7454; WAN024C45_at; Start 39; Stop 63
caaagttgaggcagctggttttgga

SEQ ID NO: 103364 - DNA, 25 bp, Artificial
  probe
  misc_feature (1)..(25): SEQ ID NO: 7454; WAN024C45_at; Start 58; Stop 82
tttggaagcaccttgctagcatgta

SEQ ID NO: 103365 - DNA, 25 bp, Artificial
  probe
  misc_feature (1)..(25): SEQ ID NO: 7454; WAN024C45_at; Start 62; Stop 86
gaagcaccttgctagcatgtaccac

SEQ ID NO: 103366 - DNA, 25 bp, Artificial
  probe
  misc_feature (1)..(25): SEQ ID NO: 7454; WAN024C45_at; Start 78; Stop 102
atgtaccacgttcttctttgtaaag

SEQ ID NO: 103367 - DNA, 25 bp, Artificial
  probe
  misc_feature (1)..(25): SEQ ID NO: 5713; WAN024C46_at; Start 8; Stop 32
ccaggcatgatagaaggaccttcaa

SEQ ID NO: 103368 - DNA, 25 bp, Artificial
  probe
  misc_feature (1)..(25): SEQ ID NO: 5713; WAN024C46_at; Start 44; Stop 68
tcaccaccagaaaccccagtaccga

SEQ ID NO: 103369 - DNA, 25 bp, Artificial
  probe
  misc_feature (1)..(25): SEQ ID NO: 5713; WAN024C46_at; Start 63; Stop 87
taccgataaagttgataccagagtt

SEQ ID NO: 103370 - DNA, 25 bp, Artificial
  probe
  misc_feature (1)..(25): SEQ ID NO: 5713; WAN024C46_at; Start 13; Stop 37
catgatagaaggaccttcaagggca

SEQ ID NO: 103371 - DNA, 25 bp, Artificial
  probe
  misc_feature (1)..(25): SEQ ID NO: 5713; WAN024C46_at; Start 186; Stop 210
tagtagcatctgtaccaggtccagc

SEQ ID NO: 103372 - DNA, 25 bp, Artificial
  probe
  misc_feature (1)..(25): SEQ ID NO: 5713; WAN024C46_at; Start 222; Stop 246
gcatgatacgacgaggtttttcgat

SEQ ID NO: 103373 - DNA, 25 bp, Artificial
  probe
  misc_feature (1)..(25): SEQ ID NO: 5713; WAN024C46_at; Start 142; Stop 166
aatcaagatatcacccttgtcaagg

SEQ ID NO: 103374 - DNA, 25 bp, Artificial
  probe
  misc_feature (1)..(25): SEQ ID NO: 5713; WAN024C46_at; Start 99; Stop 123
cattacgacggatggtatctttgta

SEQ ID NO: 103375 - DNA, 25 bp, Artificial
  probe
  misc_feature (1)..(25): SEQ ID NO: 5713; WAN024C46_at; Start 16; Stop 40
gatagaaggaccttcaagggcacct

SEQ ID NO: 103376 - DNA, 25 bp, Artificial
  probe
  misc_feature (1)..(25): SEQ ID NO: 5713; WAN024C46_at; Start 137; Stop 161
ccgtcaatcaagatatcacccttgt

SEQ ID NO: 103377 - DNA, 25 bp, Artificial
  probe
  misc_feature (1)..(25): SEQ ID NO: 5713; WAN024C46_at; Start 211; Stop 235
ttgaaccatcagcatgatacgacga

SEQ ID NO: 103378 - DNA, 25 bp, Artificial
  probe
  misc_feature (1)..(25): SEQ ID NO: 5713; WAN024C46_at; Start 91; Stop 115
caattcttcattacgacggatggta

SEQ ID NO: 103379 - DNA, 25 bp, Artificial
  probe
  misc_feature (1)..(25): SEQ ID NO: 5713; WAN024C46_at; Start 189; Stop 213
tagcatctgtaccaggtccagcttg

SEQ ID NO: 103380 - DNA, 25 bp, Artificial
  probe
  misc_feature (1)..(25): SEQ ID NO: 5713; WAN024C46_at; Start 30; Stop 54
caagggcacctttttcaccaccaga

SEQ ID NO: 103381 - DNA, 25 bp, Artificial
  probe
  misc_feature (1)..(25): SEQ ID NO: 5713; WAN024C46_at; Start 58; Stop 82
cccagtaccgataaagttgatacca

SEQ ID NO: 103382 - DNA, 25 bp, Artificial
  probe
  misc_feature (1)..(25): SEQ ID NO: 5713; WAN024C46_at; Start 219; Stop 243
tcagcatgatacgacgaggtttttc

SEQ ID NO: 103383 - DNA, 25 bp, Artificial
  probe
  misc_feature (1)..(25): SEQ ID NO: 5713; WAN024C46_at; Start 216; Stop 240
ccatcagcatgatacgacgaggttt

SEQ ID NO: 103384 - DNA, 25 bp, Artificial
  probe
  misc_feature (1)..(25): SEQ ID NO: 5713; WAN024C46_at; Start 191; Stop 215
gcatctgtaccaggtccagcttgaa

SEQ ID NO: 103385 - DNA, 25 bp, Artificial
  probe
  misc_feature (1)..(25): SEQ ID NO: 5713; WAN024C46_at; Start 194; Stop 218
tctgtaccaggtccagcttgaacca

SEQ ID NO: 103386 - DNA, 25 bp, Artificial
  probe
  misc_feature (1)..(25): SEQ ID NO: 5713; WAN024C46_at; Start 83; Stop 107
gagtttgccaattcttcattacgac

SEQ ID NO: 103387 - DNA, 25 bp, Artificial
  probe
  misc_feature (1)..(25): SEQ ID NO: 5713; WAN024C46_at; Start 203; Stop 227
ggtccagcttgaaccatcagcatga

SEQ ID NO: 103388 - DNA, 25 bp, Artificial
  probe
  misc_feature (1)..(25): SEQ ID NO: 5713; WAN024C46_at; Start 198; Stop 222
taccaggtccagcttgaaccatcag

SEQ ID NO: 103389 - DNA, 25 bp, Artificial
  probe
  misc_feature (1)..(25): SEQ ID NO: 5713; WAN024C46_at; Start 207; Stop 231
cagcttgaaccatcagcatgatacg

SEQ ID NO: 103390 - DNA, 25 bp, Artificial
  probe
  misc_feature (1)..(25): SEQ ID NO: 5713; WAN024C46_at; Start 88; Stop 112
tgccaattcttcattacgacggatg

SEQ ID NO: 103391 - DNA, 25 bp, Artificial
  probe
  misc_feature (1)..(25): SEQ ID NO: 5713; WAN024C46_at; Start 67; Stop 91
gataaagttgataccagagtttgcc

SEQ ID NO: 103392 - DNA, 25 bp, Artificial
  probe
  misc_feature (1)..(25): SEQ ID NO: 5713; WAN024C46_at; Start 1; Stop 25
ttgtccaccaggcatgatagaagga

SEQ ID NO: 103393 - DNA, 25 bp, Artificial
  probe
  misc_feature (1)..(25): SEQ ID NO: 5713; WAN024C46_at; Start 76; Stop 100
gataccagagtttgccaattcttca

SEQ ID NO: 103394 - DNA, 25 bp, Artificial
  probe
  misc_feature (1)..(25): SEQ ID NO: 5713; WAN024C46_at; Start 69; Stop 93
taaagttgataccagagtttgccaa

SEQ ID NO: 103395 - DNA, 25 bp, Artificial
  probe
  misc_feature (1)..(25): SEQ ID NO: 5713; WAN024C46_at; Start 104; Stop 128
cgacggatggtatctttgtagaaag

SEQ ID NO: 103396 - DNA, 25 bp, Artificial
  probe
  misc_feature (1)..(25): SEQ ID NO: 5713; WAN024C46_at; Start 95; Stop 119
tcttcattacgacggatggtatctt

SEQ ID NO: 103397 - DNA, 25 bp, Artificial
  probe
  misc_feature (1)..(25): SEQ ID NO: 5713; WAN024C46_at; Start 4; Stop 28
tccaccaggcatgatagaaggacct

SEQ ID NO: 103398 - DNA, 25 bp, Artificial
  probe
  misc_feature (1)..(25): SEQ ID NO: 5713; WAN024C46_at; Start 201; Stop 225
caggtccagcttgaaccatcagcat

SEQ ID NO: 103399 - DNA, 25 bp, Artificial
  probe
  misc_feature (1)..(25): SEQ ID NO: 5713; WAN024C46_at; Start 111; Stop 135
tggtatctttgtagaaagtatttcc

SEQ ID NO: 103400 - DNA, 25 bp, Artificial
  probe
  misc_feature (1)..(25): SEQ ID NO: 5713; WAN024C46_at; Start 225; Stop 249
tgatacgacgaggtttttcgattga

SEQ ID NO: 103401 - DNA, 25 bp, Artificial
  probe
  misc_feature (1)..(25): SEQ ID NO: 4926; WAN024C47_at; Start 64; Stop 88
gtactcgtccaaaagaaggttggca

SEQ ID NO: 103402 - DNA, 25 bp, Artificial
  probe
  misc_feature (1)..(25): SEQ ID NO: 4926; WAN024C47_at; Start 193; Stop 217
ccagttgttttctttagaggctaca

SEQ ID NO: 103403 - DNA, 25 bp, Artificial
  probe
  misc_feature (1)..(25): SEQ ID NO: 4926; WAN024C47_at; Start 135; Stop 159
gagaacggatgatacagccatcacg

SEQ ID NO: 103404 - DNA, 25 bp, Artificial
  probe
  misc_feature (1)..(25): SEQ ID NO: 4926; WAN024C47_at; Start 130; Stop 154
gaaacgagaacggatgatacagcca

SEQ ID NO: 103405 - DNA, 25 bp, Artificial
  probe
  misc_feature (1)..(25): SEQ ID NO: 4926; WAN024C47_at; Start 51; Stop 75
taacatccaagaagtactcgtccaa

SEQ ID NO: 103406 - DNA, 25 bp, Artificial
  probe
  misc_feature (1)..(25): SEQ ID NO: 4926; WAN024C47_at; Start 120; Stop 144
tcttttgcaagaaacgagaacggat

SEQ ID NO: 103407 - DNA, 25 bp, Artificial
  probe
  misc_feature (1)..(25): SEQ ID NO: 4926; WAN024C47_at; Start 24; Stop 48
cacgtactgcttgttggtacttagc

SEQ ID NO: 103408 - DNA, 25 bp, Artificial
  probe
  misc_feature (1)..(25): SEQ ID NO: 4926; WAN024C47_at; Start 3; Stop 27
gaaccgcaagagctacgatatcacg

SEQ ID NO: 103409 - DNA, 25 bp, Artificial
  probe
  misc_feature (1)..(25): SEQ ID NO: 4926; WAN024C47_at; Start 222; Stop 246
attgagcaaatccttgtgcgtatga

SEQ ID NO: 103410 - DNA, 25 bp, Artificial
  probe
  misc_feature (1)..(25): SEQ ID NO: 4926; WAN024C47_at; Start 141; Stop 165
ggatgatacagccatcacgccagat

SEQ ID NO: 103411 - DNA, 25 bp, Artificial
  probe
  misc_feature (1)..(25): SEQ ID NO: 4926; WAN024C47_at; Start 18; Stop 42
cgatatcacgtactgcttgttggta

SEQ ID NO: 103412 - DNA, 25 bp, Artificial
  probe
  misc_feature (1)..(25): SEQ ID NO: 4926; WAN024C47_at; Start 205; Stop 229
tttagaggctacacgcaattgagca

SEQ ID NO: 103413 - DNA, 25 bp, Artificial
  probe
  misc_feature (1)..(25): SEQ ID NO: 4926; WAN024C47_at; Start 73; Stop 97
caaaagaaggttggcaagatctgca

SEQ ID NO: 103414 - DNA, 25 bp, Artificial
  probe
  misc_feature (1)..(25): SEQ ID NO: 4926; WAN024C47_at; Start 125; Stop 149
tgcaagaaacgagaacggatgatac

SEQ ID NO: 103415 - DNA, 25 bp, Artificial
  probe
  misc_feature (1)..(25): SEQ ID NO: 4926; WAN024C47_at; Start 87; Stop 111
caagatctgcatcgcggttgtaagc

SEQ ID NO: 103416 - DNA, 25 bp, Artificial
  probe
  misc_feature (1)..(25): SEQ ID NO: 4926; WAN024C47_at; Start 58; Stop 82
caagaagtactcgtccaaaagaagg

SEQ ID NO: 103417 - DNA, 25 bp, Artificial
  probe
  misc_feature (1)..(25): SEQ ID NO: 4926; WAN024C47_at; Start 155; Stop 179
tcacgccagatagatgcgatatctg

SEQ ID NO: 103418 - DNA, 25 bp, Artificial
  probe
  misc_feature (1)..(25): SEQ ID NO: 4926; WAN024C47_at; Start 180; Stop 204
caaatggcaagttccagttgttttc

SEQ ID NO: 103419 - DNA, 25 bp, Artificial
  probe
  misc_feature (1)..(25): SEQ ID NO: 4926; WAN024C47_at; Start 95; Stop 119
gcatcgcggttgtaagcatctgtaa

SEQ ID NO: 103420 - DNA, 25 bp, Artificial
  probe
  misc_feature (1)..(25): SEQ ID NO: 4926; WAN024C47_at; Start 9; Stop 33
caagagctacgatatcacgtactgc

SEQ ID NO: 103421 - DNA, 25 bp, Artificial
  probe
  misc_feature (1)..(25): SEQ ID NO: 4926; WAN024C47_at; Start 198; Stop 222
tgttttctttagaggctacacgcaa

SEQ ID NO: 103422 - DNA, 25 bp, Artificial
  probe
  misc_feature (1)..(25): SEQ ID NO: 4926; WAN024C47_at; Start 78; Stop 102
gaaggttggcaagatctgcatcgcg

SEQ ID NO: 103423 - DNA, 25 bp, Artificial
  probe
  misc_feature (1)..(25): SEQ ID NO: 4926; WAN024C47_at; Start 172; Stop 196
gatatctgcaaatggcaagttccag

SEQ ID NO: 103424 - DNA, 25 bp, Artificial
  probe
  misc_feature (1)..(25): SEQ ID NO: 4926; WAN024C47_at; Start 211; Stop 235
ggctacacgcaattgagcaaatcct

SEQ ID NO: 103425 - DNA, 25 bp, Artificial
  probe
  misc_feature (1)..(25): SEQ ID NO: 4926; WAN024C47_at; Start 43; Stop 67
cttagcagtaacatccaagaagtac

SEQ ID NO: 103426 - DNA, 25 bp, Artificial
  probe
  misc_feature (1)..(25): SEQ ID NO: 4926; WAN024C47_at; Start 176; Stop 200
tctgcaaatggcaagttccagttgt

SEQ ID NO: 103427 - DNA, 25 bp, Artificial
  probe
  misc_feature (1)..(25): SEQ ID NO: 4926; WAN024C47_at; Start 107; Stop 131
taagcatctgtaatcttttgcaaga

SEQ ID NO: 103428 - DNA, 25 bp, Artificial
  probe
  misc_feature (1)..(25): SEQ ID NO: 4926; WAN024C47_at; Start 219; Stop 243
gcaattgagcaaatccttgtgcgta

SEQ ID NO: 103429 - DNA, 25 bp, Artificial
  probe
  misc_feature (1)..(25): SEQ ID NO: 4926; WAN024C47_at; Start 145; Stop 169
gatacagccatcacgccagatagat

SEQ ID NO: 103430 - DNA, 25 bp, Artificial
  probe
  misc_feature (1)..(25): SEQ ID NO: 4926; WAN024C47_at; Start 163; Stop 187
gatagatgcgatatctgcaaatggc

SEQ ID NO: 103431 - DNA, 25 bp, Artificial
  probe
  misc_feature (1)..(25): SEQ ID NO: 4926; WAN024C47_at; Start 151; Stop 175
gccatcacgccagatagatgcgata

SEQ ID NO: 103432 - DNA, 25 bp, Artificial
  probe
  misc_feature (1)..(25): SEQ ID NO: 4926; WAN024C47_at; Start 35; Stop 59
tgttggtacttagcagtaacatcca

SEQ ID NO: 103433 - DNA, 25 bp, Artificial
  probe
  misc_feature (1)..(25): SEQ ID NO: 4926; WAN024C47_at; Start 98; Stop 122
tcgcggttgtaagcatctgtaatct

SEQ ID NO: 103434 - DNA, 25 bp, Artificial
  probe
  misc_feature (1)..(25): SEQ ID NO: 4926; WAN024C47_at; Start 82; Stop 106
gttggcaagatctgcatcgcggttg

SEQ ID NO: 103435 - DNA, 25 bp, Artificial
  probe
  misc_feature (1)..(25): SEQ ID NO: 2402; WAN024C48_at; Start 195; Stop 219
agaattttgtaacgactgcttagta

SEQ ID NO: 103436 - DNA, 25 bp, Artificial
  probe
  misc_feature (1)..(25): SEQ ID NO: 2402; WAN024C48_at; Start 190; Stop 214
aagaaagaattttgtaacgactgct

SEQ ID NO: 103437 - DNA, 25 bp, Artificial
  probe
  misc_feature (1)..(25): SEQ ID NO: 2402; WAN024C48_at; Start 310; Stop 334
gaggttgtaataaccattgccgtta

SEQ ID NO: 103438 - DNA, 25 bp, Artificial
  probe
  misc_feature (1)..(25): SEQ ID NO: 2402; WAN024C48_at; Start 359; Stop 383
tattggtctccagtgatatagccac

SEQ ID NO: 103439 - DNA, 25 bp, Artificial
  probe
  misc_feature (1)..(25): SEQ ID NO: 2402; WAN024C48_at; Start 140; Stop 164
tgacactcctcttgtttcatttgtt

SEQ ID NO: 103440 - DNA, 25 bp, Artificial
  probe
  misc_feature (1)..(25): SEQ ID NO: 2402; WAN024C48_at; Start 351; Stop 375
caaggatatattggtctccagtgat

SEQ ID NO: 103441 - DNA, 25 bp, Artificial
  probe
  misc_feature (1)..(25): SEQ ID NO: 2402; WAN024C48_at; Start 46; Stop 70
gatagcaactgtgtaaccacgagat

SEQ ID NO: 103442 - DNA, 25 bp, Artificial
  probe
  misc_feature (1)..(25): SEQ ID NO: 2402; WAN024C48_at; Start 280; Stop 304
ggtaaagagataggttccatctggc

SEQ ID NO: 103443 - DNA, 25 bp, Artificial
  probe
  misc_feature (1)..(25): SEQ ID NO: 2402; WAN024C48_at; Start 295; Stop 319
tccatctggcttatagaggttgtaa

SEQ ID NO: 103444 - DNA, 25 bp, Artificial
  probe
  misc_feature (1)..(25): SEQ ID NO: 2402; WAN024C48_at; Start 345; Stop 369
cacgttcaaggatatattggtctcc

SEQ ID NO: 103445 - DNA, 25 bp, Artificial
  probe
  misc_feature (1)..(25): SEQ ID NO: 2402; WAN024C48_at; Start 50; Stop 74
gcaactgtgtaaccacgagattcaa

SEQ ID NO: 103446 - DNA, 25 bp, Artificial
  probe
  misc_feature (1)..(25): SEQ ID NO: 2402; WAN024C48_at; Start 68; Stop 92
gattcaatattaagggcaaggttac

SEQ ID NO: 103447 - DNA, 25 bp, Artificial
  probe
  misc_feature (1)..(25): SEQ ID NO: 2402; WAN024C48_at; Start 333; Stop 357
taacgatattgacacgttcaaggat

SEQ ID NO: 103448 - DNA, 25 bp, Artificial
  probe
  misc_feature (1)..(25): SEQ ID NO: 2402; WAN024C48_at; Start 288; Stop 312
gataggttccatctggcttatagag

SEQ ID NO: 103449 - DNA, 25 bp, Artificial
  probe
  misc_feature (1)..(25): SEQ ID NO: 2402; WAN024C48_at; Start 42; Stop 66
tgtagatagcaactgtgtaaccacg

SEQ ID NO: 103450 - DNA, 25 bp, Artificial
  probe
  misc_feature (1)..(25): SEQ ID NO: 2402; WAN024C48_at; Start 89; Stop 113
ttacgacccattacggccataccta

SEQ ID NO: 103451 - DNA, 25 bp, Artificial
  probe
  misc_feature (1)..(25): SEQ ID NO: 2402; WAN024C48_at; Start 250; Stop 274
tccgacaaagtagcctgtcttacag

SEQ ID NO: 103452 - DNA, 25 bp, Artificial
  probe
  misc_feature (1)..(25): SEQ ID NO: 2402; WAN024C48_at; Start 324; Stop 348
cattgccgttaacgatattgacacg

SEQ ID NO: 103453 - DNA, 25 bp, Artificial
  probe
  misc_feature (1)..(25): SEQ ID NO: 2402; WAN024C48_at; Start 276; Stop 300
taagggtaaagagataggttccatc

SEQ ID NO: 103454 - DNA, 25 bp, Artificial
  probe
  misc_feature (1)..(25): SEQ ID NO: 2402; WAN024C48_at; Start 264; Stop 288
ctgtcttacagttaagggtaaagag

SEQ ID NO: 103455 - DNA, 25 bp, Artificial
  probe
  misc_feature (1)..(25): SEQ ID NO: 2402; WAN024C48_at; Start 30; Stop 54
ctttactacggttgtagatagcaac

SEQ ID NO: 103456 - DNA, 25 bp, Artificial
  probe
  misc_feature (1)..(25): SEQ ID NO: 2402; WAN024C48_at; Start 8; Stop 32
gcaatcacatcttccgttttttctt

SEQ ID NO: 103457 - DNA, 25 bp, Artificial
  probe
  misc_feature (1)..(25): SEQ ID NO: 2402; WAN024C48_at; Start 103; Stop 127
ggccatacctacgacaccaaagtta

SEQ ID NO: 103458 - DNA, 25 bp, Artificial
  probe
  misc_feature (1)..(25): SEQ ID NO: 2402; WAN024C48_at; Start 110; Stop 134
cctacgacaccaaagttagcttttg

SEQ ID NO: 103459 - DNA, 25 bp, Artificial
  probe
  misc_feature (1)..(25): SEQ ID NO: 2402; WAN024C48_at; Start 257; Stop 281
aagtagcctgtcttacagttaaggg

SEQ ID NO: 103460 - DNA, 25 bp, Artificial
  probe
  misc_feature (1)..(25): SEQ ID NO: 2402; WAN024C48_at; Start 306; Stop 330
tatagaggttgtaataaccattgcc

SEQ ID NO: 103461 - DNA, 25 bp, Artificial
  probe
  misc_feature (1)..(25): SEQ ID NO: 2402; WAN024C48_at; Start 63; Stop 87
cacgagattcaatattaagggcaag

SEQ ID NO: 103462 - DNA, 25 bp, Artificial
  probe
  misc_feature (1)..(25): SEQ ID NO: 2402; WAN024C48_at; Start 83; Stop 107
gcaaggttacgacccattacggcca

SEQ ID NO: 103463 - DNA, 25 bp, Artificial
  probe
  misc_feature (1)..(25): SEQ ID NO: 2402; WAN024C48_at; Start 236; Stop 260
tgaccagcgccatttccgacaaagt

SEQ ID NO: 103464 - DNA, 25 bp, Artificial
  probe
  misc_feature (1)..(25): SEQ ID NO: 2402; WAN024C48_at; Start 363; Stop 387
ggtctccagtgatatagccacgtga

SEQ ID NO: 103465 - DNA, 25 bp, Artificial
  probe
  misc_feature (1)..(25): SEQ ID NO: 2402; WAN024C48_at; Start 2; Stop 26
tggcaagcaatcacatcttccgttt

SEQ ID NO: 103466 - DNA, 25 bp, Artificial
  probe
  misc_feature (1)..(25): SEQ ID NO: 2402; WAN024C48_at; Start 224; Stop 248
aagtcatccgcatgaccagcgccat

SEQ ID NO: 103467 - DNA, 25 bp, Artificial
  probe
  misc_feature (1)..(25): SEQ ID NO: 2402; WAN024C48_at; Start 242; Stop 266
gcgccatttccgacaaagtagcctg

SEQ ID NO: 103468 - DNA, 25 bp, Artificial
  probe
  misc_feature (1)..(25): SEQ ID NO: 2402; WAN024C48_at; Start 121; Stop 145
aaagttagcttttgtcatttgacac

SEQ ID NO: 103469 - DNA, 25 bp, Artificial
  probe
  misc_feature (1)..(25): SEQ ID NO: 5502; WAN024C49_at; Start 193; Stop 217
gagtcgcaaacttatccgcctcaat

SEQ ID NO: 103470 - DNA, 25 bp, Artificial
  probe
  misc_feature (1)..(25): SEQ ID NO: 5502; WAN024C49_at; Start 130; Stop 154
gcatctcttgaattaaatcatccag

SEQ ID NO: 103471 - DNA, 25 bp, Artificial
  probe
  misc_feature (1)..(25): SEQ ID NO: 5502; WAN024C49_at; Start 3; Stop 27
ggattttcatcatctagcaatagag

SEQ ID NO: 103472 - DNA, 25 bp, Artificial
  probe
  misc_feature (1)..(25): SEQ ID NO: 5502; WAN024C49_at; Start 170; Stop 194
gaactcctcttttttgtattgacga

SEQ ID NO: 103473 - DNA, 25 bp, Artificial
  probe
  misc_feature (1)..(25): SEQ ID NO: 5502; WAN024C49_at; Start 117; Stop 141
tctacagcctcacgcatctcttgaa

SEQ ID NO: 103474 - DNA, 25 bp, Artificial
  probe
  misc_feature (1)..(25): SEQ ID NO: 5502; WAN024C49_at; Start 188; Stop 212
ttgacgagtcgcaaacttatccgcc

SEQ ID NO: 103475 - DNA, 25 bp, Artificial
  probe
  misc_feature (1)..(25): SEQ ID NO: 5502; WAN024C49_at; Start 121; Stop 145
cagcctcacgcatctcttgaattaa

SEQ ID NO: 103476 - DNA, 25 bp, Artificial
  probe
  misc_feature (1)..(25): SEQ ID NO: 5502; WAN024C49_at; Start 148; Stop 172
catccagactctgagtttcaacgaa

SEQ ID NO: 103477 - DNA, 25 bp, Artificial
  probe
  misc_feature (1)..(25): SEQ ID NO: 5502; WAN024C49_at; Start 157; Stop 181
tctgagtttcaacgaactcctcttt

SEQ ID NO: 103478 - DNA, 25 bp, Artificial
  probe
  misc_feature (1)..(25): SEQ ID NO: 5502; WAN024C49_at; Start 8; Stop 32
ttcatcatctagcaatagaggatcc

SEQ ID NO: 103479 - DNA, 25 bp, Artificial
  probe
  misc_feature (1)..(25): SEQ ID NO: 5502; WAN024C49_at; Start 81; Stop 105
gaagatggaacttcctccgaagaag

SEQ ID NO: 103480 - DNA, 25 bp, Artificial
  probe
  misc_feature (1)..(25): SEQ ID NO: 5502; WAN024C49_at; Start 75; Stop 99
tcttcagaagatggaacttcctccg

SEQ ID NO: 103481 - DNA, 25 bp, Artificial
  probe
  misc_feature (1)..(25): SEQ ID NO: 5502; WAN024C49_at; Start 12; Stop 36
tcatctagcaatagaggatccaagc

SEQ ID NO: 103482 - DNA, 25 bp, Artificial
  probe
  misc_feature (1)..(25): SEQ ID NO: 5502; WAN024C49_at; Start 63; Stop 87
ggtagtaagatgtcttcagaagatg

SEQ ID NO: 103483 - DNA, 25 bp, Artificial
  probe
  misc_feature (1)..(25): SEQ ID NO: 5502; WAN024C49_at; Start 84; Stop 108
gatggaacttcctccgaagaagctt

SEQ ID NO: 103484 - DNA, 25 bp, Artificial
  probe
  misc_feature (1)..(25): SEQ ID NO: 5502; WAN024C49_at; Start 205; Stop 229
tatccgcctcaatttcatctctgtg

SEQ ID NO: 103485 - DNA, 25 bp, Artificial
  probe
  misc_feature (1)..(25): SEQ ID NO: 5502; WAN024C49_at; Start 42; Stop 66
tcctcatcgtccagaggcaagggta

SEQ ID NO: 103486 - DNA, 25 bp, Artificial
  probe
  misc_feature (1)..(25): SEQ ID NO: 5502; WAN024C49_at; Start 71; Stop 95
gatgtcttcagaagatggaacttcc

SEQ ID NO: 103487 - DNA, 25 bp, Artificial
  probe
  misc_feature (1)..(25): SEQ ID NO: 5502; WAN024C49_at; Start 45; Stop 69
tcatcgtccagaggcaagggtagta

SEQ ID NO: 103488 - DNA, 25 bp, Artificial
  probe
  misc_feature (1)..(25): SEQ ID NO: 5502; WAN024C49_at; Start 20; Stop 44
caatagaggatccaagccttgctcc

SEQ ID NO: 103489 - DNA, 25 bp, Artificial
  probe
  misc_feature (1)..(25): SEQ ID NO: 5502; WAN024C49_at; Start 177; Stop 201
tcttttttgtattgacgagtcgcaa

SEQ ID NO: 103490 - DNA, 25 bp, Artificial
  probe
  misc_feature (1)..(25): SEQ ID NO: 5502; WAN024C49_at; Start 15; Stop 39
tctagcaatagaggatccaagcctt

SEQ ID NO: 103491 - DNA, 25 bp, Artificial
  probe
  misc_feature (1)..(25): SEQ ID NO: 5502; WAN024C49_at; Start 213; Stop 237
tcaatttcatctctgtgttgcttaa

SEQ ID NO: 103492 - DNA, 25 bp, Artificial
  probe
  misc_feature (1)..(25): SEQ ID NO: 5502; WAN024C49_at; Start 93; Stop 117
tcctccgaagaagcttctgacttct

SEQ ID NO: 103493 - DNA, 25 bp, Artificial
  probe
  misc_feature (1)..(25): SEQ ID NO: 5502; WAN024C49_at; Start 52; Stop 76
ccagaggcaagggtagtaagatgtc

SEQ ID NO: 103494 - DNA, 25 bp, Artificial
  probe
  misc_feature (1)..(25): SEQ ID NO: 5502; WAN024C49_at; Start 88; Stop 112
gaacttcctccgaagaagcttctga

SEQ ID NO: 103495 - DNA, 25 bp, Artificial
  probe
  misc_feature (1)..(25): SEQ ID NO: 5502; WAN024C49_at; Start 152; Stop 176
cagactctgagtttcaacgaactcc

SEQ ID NO: 103496 - DNA, 25 bp, Artificial
  probe
  misc_feature (1)..(25): SEQ ID NO: 5502; WAN024C49_at; Start 57; Stop 81
ggcaagggtagtaagatgtcttcag

SEQ ID NO: 103497 - DNA, 25 bp, Artificial
  probe
  misc_feature (1)..(25): SEQ ID NO: 5502; WAN024C49_at; Start 48; Stop 72
tcgtccagaggcaagggtagtaaga

SEQ ID NO: 103498 - DNA, 25 bp, Artificial
  probe
  misc_feature (1)..(25): SEQ ID NO: 5502; WAN024C49_at; Start 39; Stop 63
tgctcctcatcgtccagaggcaagg

SEQ ID NO: 103499 - DNA, 25 bp, Artificial
  probe
  misc_feature (1)..(25): SEQ ID NO: 5502; WAN024C49_at; Start 139; Stop 163
gaattaaatcatccagactctgagt

SEQ ID NO: 103500 - DNA, 25 bp, Artificial
  probe
  misc_feature (1)..(25): SEQ ID NO: 5502; WAN024C49_at; Start 102; Stop 126
gaagcttctgacttctctacagcct

SEQ ID NO: 103501 - DNA, 25 bp, Artificial
  probe
  misc_feature (1)..(25): SEQ ID NO: 5502; WAN024C49_at; Start 33; Stop 57
aagccttgctcctcatcgtccagag

SEQ ID NO: 103502 - DNA, 25 bp, Artificial
  probe
  misc_feature (1)..(25): SEQ ID NO: 5502; WAN024C49_at; Start 27; Stop 51
ggatccaagccttgctcctcatcgt

SEQ ID NO: 103503 - DNA, 25 bp, Artificial
  probe
  misc_feature (1)..(25): SEQ ID NO: 1593; WAN024C4A_at; Start 1165; Stop 1189
aactctgcctgggattttgcggatg

SEQ ID NO: 103504 - DNA, 25 bp, Artificial
  probe
  misc_feature (1)..(25): SEQ ID NO: 1593; WAN024C4A_at; Start 251; Stop 275
taattcaagagatgcgtgaggctgt

SEQ ID NO: 103505 - DNA, 25 bp, Artificial
  probe
  misc_feature (1)..(25): SEQ ID NO: 1593; WAN024C4A_at; Start 1056; Stop 1080
tagaagtagtcgcagtgaagtcaat

SEQ ID NO: 103506 - DNA, 25 bp, Artificial
  probe
  misc_feature (1)..(25): SEQ ID NO: 1593; WAN024C4A_at; Start 64; Stop 88
gaagcaaaagagctaacagttggtc

SEQ ID NO: 103507 - DNA, 25 bp, Artificial
  probe
  misc_feature (1)..(25): SEQ ID NO: 1593; WAN024C4A_at; Start 1125; Stop 1149
tcgtgttgcctataatcagtctgct

SEQ ID NO: 103508 - DNA, 25 bp, Artificial
  probe
  misc_feature (1)..(25): SEQ ID NO: 1593; WAN024C4A_at; Start 1258; Stop 1282
gaacgtgtcaatatcgttaacggca

SEQ ID NO: 103509 - DNA, 25 bp, Artificial
  probe
  misc_feature (1)..(25): SEQ ID NO: 1593; WAN024C4A_at; Start 279; Stop 303
gaagtcagaagcttcttcggaggaa

SEQ ID NO: 103510 - DNA, 25 bp, Artificial
  probe
  misc_feature (1)..(25): SEQ ID NO: 1593; WAN024C4A_at; Start 1017; Stop 1041
tacgactagtgagccaaaaccaagt

SEQ ID NO: 103511 - DNA, 25 bp, Artificial
  probe
  misc_feature (1)..(25): SEQ ID NO: 1593; WAN024C4A_at; Start 1223; Stop 1247
cacgtggctatatcactggagacca

SEQ ID NO: 103512 - DNA, 25 bp, Artificial
  probe
  misc_feature (1)..(25): SEQ ID NO: 1593; WAN024C4A_at; Start 323; Stop 347
tcttactacccttgcctctggacga

SEQ ID NO: 103513 - DNA, 25 bp, Artificial
  probe
  misc_feature (1)..(25): SEQ ID NO: 1593; WAN024C4A_at; Start 183; Stop 207
ggcggataagtttgcgactcgtcaa

SEQ ID NO: 103514 - DNA, 25 bp, Artificial
  probe
  misc_feature (1)..(25): SEQ ID NO: 1593; WAN024C4A_at; Start 953; Stop 977
caagtacttctagctcaagttcaag

SEQ ID NO: 103515 - DNA, 25 bp, Artificial
  probe
  misc_feature (1)..(25): SEQ ID NO: 1593; WAN024C4A_at; Start 148; Stop 172
gacaagtatgttaagcaacacagag

SEQ ID NO: 103516 - DNA, 25 bp, Artificial
  probe
  misc_feature (1)..(25): SEQ ID NO: 1593; WAN024C4A_at; Start 971; Stop 995
gttcaagtcaaactagcagctcaag

SEQ ID NO: 103517 - DNA, 25 bp, Artificial
  probe
  misc_feature (1)..(25): SEQ ID NO: 1593; WAN024C4A_at; Start 119; Stop 143
caggagtcttgcctgaggattccat

SEQ ID NO: 103518 - DNA, 25 bp, Artificial
  probe
  misc_feature (1)..(25): SEQ ID NO: 1593; WAN024C4A_at; Start 433; Stop 457
tctcgtctggatcaagaggactcag

SEQ ID NO: 103519 - DNA, 25 bp, Artificial
  probe
  misc_feature (1)..(25): SEQ ID NO: 1593; WAN024C4A_at; Start 413; Stop 437
tggaagaggagcaaaacctttctcg

SEQ ID NO: 103520 - DNA, 25 bp, Artificial
  probe
  misc_feature (1)..(25): SEQ ID NO: 1593; WAN024C4A_at; Start 80; Stop 104
cagttggtcaagctattcgtaaaaa

SEQ ID NO: 103521 - DNA, 25 bp, Artificial
  probe
  misc_feature (1)..(25): SEQ ID NO: 1593; WAN024C4A_at; Start 163; Stop 187
caacacagagatgaaattgaggcgg

SEQ ID NO: 103522 - DNA, 25 bp, Artificial
  probe
  misc_feature (1)..(25): SEQ ID NO: 1593; WAN024C4A_at; Start 885; Stop 909
taaaactggaaatacggagcttgat

SEQ ID NO: 103523 - DNA, 25 bp, Artificial
  probe
  misc_feature (1)..(25): SEQ ID NO: 1593; WAN024C4A_at; Start 298; Stop 322
gaggaagttccatcttctgaagaca

SEQ ID NO: 103524 - DNA, 25 bp, Artificial
  probe
  misc_feature (1)..(25): SEQ ID NO: 1593; WAN024C4A_at; Start 1076; Stop 1100
tcaatatgggtctctcgagtgcagg

SEQ ID NO: 103525 - DNA, 25 bp, Artificial
  probe
  misc_feature (1)..(25): SEQ ID NO: 1593; WAN024C4A_at; Start 201; Stop 225
tcgtcaatacaaaaaagaggagttc

SEQ ID NO: 103526 - DNA, 25 bp, Artificial
  probe
  misc_feature (1)..(25): SEQ ID NO: 1593; WAN024C4A_at; Start 382; Stop 406
gatgaaaatccaacagaaatgactg

SEQ ID NO: 103527 - DNA, 25 bp, Artificial
  probe
  misc_feature (1)..(25): SEQ ID NO: 1593; WAN024C4A_at; Start 714; Stop 738
taagctggaaggtagtcgtgaacat

SEQ ID NO: 103528 - DNA, 25 bp, Artificial
  probe
  misc_feature (1)..(25): SEQ ID NO: 1593; WAN024C4A_at; Start 1110; Stop 1134
tcaaagaagtgccagtcgtgttgcc

SEQ ID NO: 103529 - DNA, 25 bp, Artificial
  probe
  misc_feature (1)..(25): SEQ ID NO: 1593; WAN024C4A_at; Start 1240; Stop 1264
ggagaccaatatatccttgaacgtg

SEQ ID NO: 103530 - DNA, 25 bp, Artificial
  probe
  misc_feature (1)..(25): SEQ ID NO: 1593; WAN024C4A_at; Start 921; Stop 945
taaggctatcagtcttggtaagagc

SEQ ID NO: 103531 - DNA, 25 bp, Artificial
  probe
  misc_feature (1)..(25): SEQ ID NO: 1593; WAN024C4A_at; Start 355; Stop 379
caaggcttggatcctctattgctag

SEQ ID NO: 103532 - DNA, 25 bp, Artificial
  probe
  misc_feature (1)..(25): SEQ ID NO: 1593; WAN024C4A_at; Start 571; Stop 595
gaaacttctcaatcaactacagcca

SEQ ID NO: 103533 - DNA, 25 bp, Artificial
  probe
  misc_feature (1)..(25): SEQ ID NO: 1593; WAN024C4A_at; Start 936; Stop 960
tggtaagagccagcaaacaagtact

SEQ ID NO: 103534 - DNA, 25 bp, Artificial
  probe
  misc_feature (1)..(25): SEQ ID NO: 1593; WAN024C4A_at; Start 730; Stop 754
cgtgaacatacgcttgccaaatcta

SEQ ID NO: 103535 - DNA, 25 bp, Artificial
  probe
  misc_feature (1)..(25): SEQ ID NO: 1593; WAN024C4A_at; Start 841; Stop 865
gataccaatgccaaagccaaatcgg

SEQ ID NO: 103536 - DNA, 25 bp, Artificial
  probe
  misc_feature (1)..(25): SEQ ID NO: 1593; WAN024C4A_at; Start 338; Stop 362
ctctggacgatgaggagcaaggctt

SEQ ID NO: 103537 - DNA, 25 bp, Artificial
  probe
  misc_feature (1)..(25): SEQ ID NO: 1311; WAN024C4B_at; Start 226; Stop 250
gctggacctggtacagatgctacta

SEQ ID NO: 103538 - DNA, 25 bp, Artificial
  probe
  misc_feature (1)..(25): SEQ ID NO: 1311; WAN024C4B_at; Start 758; Stop 782
tagactacatccttgatgctgcagg

SEQ ID NO: 103539 - DNA, 25 bp, Artificial
  probe
  misc_feature (1)..(25): SEQ ID NO: 1311; WAN024C4B_at; Start 1077; Stop 1101
tatcgcatctatctggcgtgatggc

SEQ ID NO: 103540 - DNA, 25 bp, Artificial
  probe
  misc_feature (1)..(25): SEQ ID NO: 1311; WAN024C4B_at; Start 73; Stop 97
cgtggttacacagttgctatctaca

SEQ ID NO: 103541 - DNA, 25 bp, Artificial
  probe
  misc_feature (1)..(25): SEQ ID NO: 1311; WAN024C4B_at; Start 574; Stop 598
tacggtgatatgcaattgatcgcag

SEQ ID NO: 103542 - DNA, 25 bp, Artificial
  probe
  misc_feature (1)..(25): SEQ ID NO: 1311; WAN024C4B_at; Start 382; Stop 406
tctggtggtgaaaaaggtgcccttg

SEQ ID NO: 103543 - DNA, 25 bp, Artificial
  probe
  misc_feature (1)..(25): SEQ ID NO: 1311; WAN024C4B_at; Start 701; Stop 725
aaatcacagctgatatcttgagccg

SEQ ID NO: 103544 - DNA, 25 bp, Artificial
  probe
  misc_feature (1)..(25): SEQ ID NO: 1311; WAN024C4B_at; Start 210; Stop 234
catgctgatggttcaagctggacct

SEQ ID NO: 103545 - DNA, 25 bp, Artificial
  probe
  misc_feature (1)..(25): SEQ ID NO: 1311; WAN024C4B_at; Start 908; Stop 932
gcaaggtgcttccaaaaccagctgc

SEQ ID NO: 103546 - DNA, 25 bp, Artificial
  probe
  misc_feature (1)..(25): SEQ ID NO: 1311; WAN024C4B_at; Start 193; Stop 217
gaaaaacctcgtcgtatcatgctga

SEQ ID NO: 103547 - DNA, 25 bp, Artificial
  probe
  misc_feature (1)..(25): SEQ ID NO: 1311; WAN024C4B_at; Start 1228; Stop 1252
gatatcgtagctcttgcggttcaag

SEQ ID NO: 103548 - DNA, 25 bp, Artificial
  probe
  misc_feature (1)..(25): SEQ ID NO: 1311; WAN024C4B_at; Start 477; Stop 501
ctcagctaaagcaccagaagatggc

SEQ ID NO: 103549 - DNA, 25 bp, Artificial
  probe
  misc_feature (1)..(25): SEQ ID NO: 1311; WAN024C4B_at; Start 1002; Stop 1026
catttcatacgcacaaggatttgct

SEQ ID NO: 103550 - DNA, 25 bp, Artificial
  probe
  misc_feature (1)..(25): SEQ ID NO: 1311; WAN024C4B_at; Start 32; Stop 56
tggccgtaatgggtcgtaaccttgc

SEQ ID NO: 103551 - DNA, 25 bp, Artificial
  probe
  misc_feature (1)..(25): SEQ ID NO: 1311; WAN024C4B_at; Start 656; Stop 680
tctttactgagtggaacaagggtga

SEQ ID NO: 103552 - DNA, 25 bp, Artificial
  probe
  misc_feature (1)..(25): SEQ ID NO: 1311; WAN024C4B_at; Start 1291; Stop 1315
tactttgatagctaccgttcagctg

SEQ ID NO: 103553 - DNA, 25 bp, Artificial
  probe
  misc_feature (1)..(25): SEQ ID NO: 1311; WAN024C4B_at; Start 1035; Stop 1059
tgtagcctctaaagaaaacaactgg

SEQ ID NO: 103554 - DNA, 25 bp, Artificial
  probe
  misc_feature (1)..(25): SEQ ID NO: 1311; WAN024C4B_at; Start 1390; Stop 1414
ggaaccttccactactcttggtatg

SEQ ID NO: 103555 - DNA, 25 bp, Artificial
  probe
  misc_feature (1)..(25): SEQ ID NO: 1311; WAN024C4B_at; Start 313; Stop 337
tacaaagataccatccgtcgtaatg

SEQ ID NO: 103556 - DNA, 25 bp, Artificial
  probe
  misc_feature (1)..(25): SEQ ID NO: 1311; WAN024C4B_at; Start 415; Stop 439
tctatcatgcctggtggacaaaaag

SEQ ID NO: 103557 - DNA, 25 bp, Artificial
  probe
  misc_feature (1)..(25): SEQ ID NO: 1311; WAN024C4B_at; Start 811; Stop 835
caatcatctcttgaccttggtgtac

SEQ ID NO: 103558 - DNA, 25 bp, Artificial
  probe
  misc_feature (1)..(25): SEQ ID NO: 1311; WAN024C4B_at; Start 1059; Stop 1083
gaacttgccatttgcagatatcgca

SEQ ID NO: 103559 - DNA, 25 bp, Artificial
  probe
  misc_feature (1)..(25): SEQ ID NO: 1311; WAN024C4B_at; Start 1019; Stop 1043
gatttgctcaattgcgtgtagcctc

SEQ ID NO: 103560 - DNA, 25 bp, Artificial
  probe
  misc_feature (1)..(25): SEQ ID NO: 1311; WAN024C4B_at; Start 889; Stop 913
gaagaacgtgtacatgctagcaagg

SEQ ID NO: 103561 - DNA, 25 bp, Artificial
  probe
  misc_feature (1)..(25): SEQ ID NO: 1311; WAN024C4B_at; Start 1336; Stop 1360
caagcacaacgtgactactttggtg

SEQ ID NO: 103562 - DNA, 25 bp, Artificial
  probe
  misc_feature (1)..(25): SEQ ID NO: 1311; WAN024C4B_at; Start 1107; Stop 1131
catccgttctcgtttcttgcaaaag

SEQ ID NO: 103563 - DNA, 25 bp, Artificial
  probe
  misc_feature (1)..(25): SEQ ID NO: 1311; WAN024C4B_at; Start 616; Stop 640
caacacttgctaggcctttctgcag

SEQ ID NO: 103564 - DNA, 25 bp, Artificial
  probe
  misc_feature (1)..(25): SEQ ID NO: 1311; WAN024C4B_at; Start 125; Stop 149
tgattgcttgccatcctgaaaagaa

SEQ ID NO: 103565 - DNA, 25 bp, Artificial
  probe
  misc_feature (1)..(25): SEQ ID NO: 1311; WAN024C4B_at; Start 153; Stop 177
tgtaccaagctatgacgttgaaagt

SEQ ID NO: 103566 - DNA, 25 bp, Artificial
  probe
  misc_feature (1)..(25): SEQ ID NO: 1311; WAN024C4B_at; Start 596; Stop 620
cagaaagctatgacttgatgcaaca

SEQ ID NO: 103567 - DNA, 25 bp, Artificial
  probe
  misc_feature (1)..(25): SEQ ID NO: 1311; WAN024C4B_at; Start 771; Stop 795
tgatgctgcaggtaacaagggaact

SEQ ID NO: 103568 - DNA, 25 bp, Artificial
  probe
  misc_feature (1)..(25): SEQ ID NO: 1311; WAN024C4B_at; Start 742; Stop 766
caagatggaccaatcgtagactaca

SEQ ID NO: 103569 - DNA, 25 bp, Artificial
  probe
  misc_feature (1)..(25): SEQ ID NO: 1311; WAN024C4B_at; Start 1258; Stop 1282
gtgccagtgccaactttctcagcag

SEQ ID NO: 103570 - DNA, 25 bp, Artificial
  probe
  misc_feature (1)..(25): SEQ ID NO: 1311; WAN024C4B_at; Start 936; Stop 960
caactttgaaggagacaaggctgaa

SEQ ID NO: 103571 - DNA, 25 bp, Artificial
  probe
  misc_feature (1)..(25): SEQ ID NO: 2924; WAN024C4C_at; Start 322; Stop 346
gctcttgcacacattcctttagata

SEQ ID NO: 103572 - DNA, 25 bp, Artificial
  probe
  misc_feature (1)..(25): SEQ ID NO: 2924; WAN024C4C_at; Start 353; Stop 377
cactaattgagagcgcgattgtggt

SEQ ID NO: 103573 - DNA, 25 bp, Artificial
  probe
  misc_feature (1)..(25): SEQ ID NO: 2924; WAN024C4C_at; Start 495; Stop 519
tgtcggaagcgatgtcattacagca

SEQ ID NO: 103574 - DNA, 25 bp, Artificial
  probe
  misc_feature (1)..(25): SEQ ID NO: 2924; WAN024C4C_at; Start 2; Stop 26
tgtctcaagatgaaaaattaattcg

SEQ ID NO: 103575 - DNA, 25 bp, Artificial
  probe
  misc_feature (1)..(25): SEQ ID NO: 2924; WAN024C4C_at; Start 76; Stop 100
gctgctaacgatgggaatgtatctg

SEQ ID NO: 103576 - DNA, 25 bp, Artificial
  probe
  misc_feature (1)..(25): SEQ ID NO: 2924; WAN024C4C_at; Start 410; Stop 434
cgtctacaatggaagtgccagaagc

SEQ ID NO: 103577 - DNA, 25 bp, Artificial
  probe
  misc_feature (1)..(25): SEQ ID NO: 2924; WAN024C4C_at; Start 468; Stop 492
gctattagaaaatcatggagctctg

SEQ ID NO: 103578 - DNA, 25 bp, Artificial
  probe
  misc_feature (1)..(25): SEQ ID NO: 2924; WAN024C4C_at; Start 641; Stop 665
caatgcgagaaaattataaggttac

SEQ ID NO: 103579 - DNA, 25 bp, Artificial
  probe
  misc_feature (1)..(25): SEQ ID NO: 2924; WAN024C4C_at; Start 61; Stop 85
caacttggttgggttgctgctaacg

SEQ ID NO: 103580 - DNA, 25 bp, Artificial
  probe
  misc_feature (1)..(25): SEQ ID NO: 2924; WAN024C4C_at; Start 40; Stop 64
gatgtttgtcataagatgtggcaac

SEQ ID NO: 103581 - DNA, 25 bp, Artificial
  probe
  misc_feature (1)..(25): SEQ ID NO: 2924; WAN024C4C_at; Start 480; Stop 504
tcatggagctctgactgtcggaagc

SEQ ID NO: 103582 - DNA, 25 bp, Artificial
  probe
  misc_feature (1)..(25): SEQ ID NO: 2924; WAN024C4C_at; Start 583; Stop 607
tctacaaagggcattgaggagcaag

SEQ ID NO: 103583 - DNA, 25 bp, Artificial
  probe
  misc_feature (1)..(25): SEQ ID NO: 2924; WAN024C4C_at; Start 128; Stop 152
caacacctactggtatcagcaaaag

SEQ ID NO: 103584 - DNA, 25 bp, Artificial
  probe
  misc_feature (1)..(25): SEQ ID NO: 2924; WAN024C4C_at; Start 191; Stop 215
aaggagagattttagaagcagaagg

SEQ ID NO: 103585 - DNA, 25 bp, Artificial
  probe
  misc_feature (1)..(25): SEQ ID NO: 2924; WAN024C4C_at; Start 657; Stop 681
taaggttacaggtcgtcacccaggc

SEQ ID NO: 103586 - DNA, 25 bp, Artificial
  probe
  misc_feature (1)..(25): SEQ ID NO: 2924; WAN024C4C_at; Start 671; Stop 695
gtcacccaggctaccgtaaatataa

SEQ ID NO: 103587 - DNA, 25 bp, Artificial
  probe
  misc_feature (1)..(25): SEQ ID NO: 2924; WAN024C4C_at; Start 25; Stop 49
cgtgaacagatttgtgatgtttgtc

SEQ ID NO: 103588 - DNA, 25 bp, Artificial
  probe
  misc_feature (1)..(25): SEQ ID NO: 2924; WAN024C4C_at; Start 626; Stop 650
tagaacgtctattctcaatgcgaga

SEQ ID NO: 103589 - DNA, 25 bp, Artificial
  probe
  misc_feature (1)..(25): SEQ ID NO: 2924; WAN024C4C_at; Start 112; Stop 136
gaggataccattcttgcaacaccta

SEQ ID NO: 103590 - DNA, 25 bp, Artificial
  probe
  misc_feature (1)..(25): SEQ ID NO: 2924; WAN024C4C_at; Start 97; Stop 121
tctgttcgattagatgaggatacca

SEQ ID NO: 103591 - DNA, 25 bp, Artificial
  probe
  misc_feature (1)..(25): SEQ ID NO: 2924; WAN024C4C_at; Start 310; Stop 334
gcaacaggatttgctcttgcacaca

SEQ ID NO: 103592 - DNA, 25 bp, Artificial
  probe
  misc_feature (1)..(25): SEQ ID NO: 2924; WAN024C4C_at; Start 280; Stop 304
cgttcagttgttcacgcgcatccac

SEQ ID NO: 103593 - DNA, 25 bp, Artificial
  probe
  misc_feature (1)..(25): SEQ ID NO: 2924; WAN024C4C_at; Start 163; Stop 187
ccagaaaagctggtgaagttaaatc

SEQ ID NO: 103594 - DNA, 25 bp, Artificial
  probe
  misc_feature (1)..(25): SEQ ID NO: 2924; WAN024C4C_at; Start 295; Stop 319
gcgcatccaccgattgcaacaggat

SEQ ID NO: 103595 - DNA, 25 bp, Artificial
  probe
  misc_feature (1)..(25): SEQ ID NO: 2924; WAN024C4C_at; Start 505; Stop 529
gatgtcattacagcatactaccgta

SEQ ID NO: 103596 - DNA, 25 bp, Artificial
  probe
  misc_feature (1)..(25): SEQ ID NO: 2924; WAN024C4C_at; Start 597; Stop 621
tgaggagcaagaaattgctcgtccg

SEQ ID NO: 103597 - DNA, 25 bp, Artificial
  probe
  misc_feature (1)..(25): SEQ ID NO: 2924; WAN024C4C_at; Start 230; Stop 254
ctagtgaaattaaaatgcacattcg

SEQ ID NO: 103598 - DNA, 25 bp, Artificial
  probe
  misc_feature (1)..(25): SEQ ID NO: 2924; WAN024C4C_at; Start 518; Stop 542
catactaccgtatggaaactttaga

SEQ ID NO: 103599 - DNA, 25 bp, Artificial
  probe
  misc_feature (1)..(25): SEQ ID NO: 2924; WAN024C4C_at; Start 445; Stop 469
tatctgcccgatcatgatgtcatgc

SEQ ID NO: 103600 - DNA, 25 bp, Artificial
  probe
  misc_feature (1)..(25): SEQ ID NO: 2924; WAN024C4C_at; Start 345; Stop 369
tacttattcactaattgagagcgcg

SEQ ID NO: 103601 - DNA, 25 bp, Artificial
  probe
  misc_feature (1)..(25): SEQ ID NO: 2924; WAN024C4C_at; Start 430; Stop 454
gaagcaattacaccttatctgcccg

SEQ ID NO: 103602 - DNA, 25 bp, Artificial
  probe
  misc_feature (1)..(25): SEQ ID NO: 2924; WAN024C4C_at; Start 564; Stop 588
ccacggaagaatgttactttctaca

SEQ ID NO: 103603 - DNA, 25 bp, Artificial
  probe
  misc_feature (1)..(25): SEQ ID NO: 2924; WAN024C4C_at; Start 612; Stop 636
tgctcgtccgactttagaacgtcta

SEQ ID NO: 103604 - DNA, 25 bp, Artificial
  probe
  misc_feature (1)..(25): SEQ ID NO: 2924; WAN024C4C_at; Start 536; Stop 560
ctttagaattagtcgcaaagacaac

SEQ ID NO: 103605 - DNA, 25 bp, Artificial
  probe
  misc_feature (1)..(25): SEQ ID NO: 4302; WAN024C4D_at; Start 2527; Stop 2551
tctccagaatttagctctactcagg

SEQ ID NO: 103606 - DNA, 25 bp, Artificial
  probe
  misc_feature (1)..(25): SEQ ID NO: 4302; WAN024C4D_at; Start 2437; Stop 2461
aatgttattccagctattccaggtg

SEQ ID NO: 103607 - DNA, 25 bp, Artificial
  probe
  misc_feature (1)..(25): SEQ ID NO: 4302; WAN024C4D_at; Start 350; Stop 374
caacaggaaataaaggagagcatac

SEQ ID NO: 103608 - DNA, 25 bp, Artificial
  probe
  misc_feature (1)..(25): SEQ ID NO: 4302; WAN024C4D_at; Start 1943; Stop 1967
tcaaaaatacacctgctgctgaggg

SEQ ID NO: 103609 - DNA, 25 bp, Artificial
  probe
  misc_feature (1)..(25): SEQ ID NO: 4302; WAN024C4D_at; Start 2794; Stop 2818
gattcactatggtctaatgctcaag

SEQ ID NO: 103610 - DNA, 25 bp, Artificial
  probe
  misc_feature (1)..(25): SEQ ID NO: 4302; WAN024C4D_at; Start 332; Stop 356
aaaaagatgctccatttacaacagg

SEQ ID NO: 103611 - DNA, 25 bp, Artificial
  probe
  misc_feature (1)..(25): SEQ ID NO: 4302; WAN024C4D_at; Start 1012; Stop 1036
gatgtttcgggtgctaatgttacaa

SEQ ID NO: 103612 - DNA, 25 bp, Artificial
  probe
  misc_feature (1)..(25): SEQ ID NO: 4302; WAN024C4D_at; Start 1521; Stop 1545
tcttcctaaaagagatggagctgct

SEQ ID NO: 103613 - DNA, 25 bp, Artificial
  probe
  misc_feature (1)..(25): SEQ ID NO: 4302; WAN024C4D_at; Start 1573; Stop 1597
gaagcagcgaaatatgtaaatccta

SEQ ID NO: 103614 - DNA, 25 bp, Artificial
  probe
  misc_feature (1)..(25): SEQ ID NO: 4302; WAN024C4D_at; Start 830; Stop 854
tagaatgggttgatgctactcatgg

SEQ ID NO: 103615 - DNA, 25 bp, Artificial
  probe
  misc_feature (1)..(25): SEQ ID NO: 4302; WAN024C4D_at; Start 2281; Stop 2305
tatgtaatagcgcatccagcaccat

SEQ ID NO: 103616 - DNA, 25 bp, Artificial
  probe
  misc_feature (1)..(25): SEQ ID NO: 4302; WAN024C4D_at; Start 458; Stop 482
tcagctatgatatcagcggtcaagg

SEQ ID NO: 103617 - DNA, 25 bp, Artificial
  probe
  misc_feature (1)..(25): SEQ ID NO: 4302; WAN024C4D_at; Start 1669; Stop 1693
tcggcacattggttaagtaccagct

SEQ ID NO: 103618 - DNA, 25 bp, Artificial
  probe
  misc_feature (1)..(25): SEQ ID NO: 4302; WAN024C4D_at; Start 1383; Stop 1407
gatgcctttatatgctaacggagaa

SEQ ID NO: 103619 - DNA, 25 bp, Artificial
  probe
  misc_feature (1)..(25): SEQ ID NO: 4302; WAN024C4D_at; Start 283; Stop 307
gattggtcttctgcaactcatggtg

SEQ ID NO: 103620 - DNA, 25 bp, Artificial
  probe
  misc_feature (1)..(25): SEQ ID NO: 4302; WAN024C4D_at; Start 2134; Stop 2158
gaaccagagtctatgctaggagaag

SEQ ID NO: 103621 - DNA, 25 bp, Artificial
  probe
  misc_feature (1)..(25): SEQ ID NO: 4302; WAN024C4D_at; Start 2808; Stop 2832
taatgctcaagatgcaaatcaggca

SEQ ID NO: 103622 - DNA, 25 bp, Artificial
  probe
  misc_feature (1)..(25): SEQ ID NO: 4302; WAN024C4D_at; Start 694; Stop 718
tcattcgcaggagaacatacatggg

SEQ ID NO: 103623 - DNA, 25 bp, Artificial
  probe
  misc_feature (1)..(25): SEQ ID NO: 4302; WAN024C4D_at; Start 1626; Stop 1650
tattctaacggtttacactgctggt

SEQ ID NO: 103624 - DNA, 25 bp, Artificial
  probe
  misc_feature (1)..(25): SEQ ID NO: 4302; WAN024C4D_at; Start 1203; Stop 1227
tgaaattcccaaagatacacagaca

SEQ ID NO: 103625 - DNA, 25 bp, Artificial
  probe
  misc_feature (1)..(25): SEQ ID NO: 4302; WAN024C4D_at; Start 619; Stop 643
ggattcagatataatacccaggcac

SEQ ID NO: 103626 - DNA, 25 bp, Artificial
  probe
  misc_feature (1)..(25): SEQ ID NO: 4302; WAN024C4D_at; Start 2843; Stop 2867
cacaattgaccaagaaaggtgcgat

SEQ ID NO: 103627 - DNA, 25 bp, Artificial
  probe
  misc_feature (1)..(25): SEQ ID NO: 4302; WAN024C4D_at; Start 1266; Stop 1290
tgacgaattggttttaggtggagcc

SEQ ID NO: 103628 - DNA, 25 bp, Artificial
  probe
  misc_feature (1)..(25): SEQ ID NO: 4302; WAN024C4D_at; Start 430; Stop 454
ggaacagtcgcagattctccatcag

SEQ ID NO: 103629 - DNA, 25 bp, Artificial
  probe
  misc_feature (1)..(25): SEQ ID NO: 4302; WAN024C4D_at; Start 2299; Stop 2323
gcaccatccaaagaaaaggtacttg

SEQ ID NO: 103630 - DNA, 25 bp, Artificial
  probe
  misc_feature (1)..(25): SEQ ID NO: 4302; WAN024C4D_at; Start 2202; Stop 2226
tgaacacccagcttatacctatggt

SEQ ID NO: 103631 - DNA, 25 bp, Artificial
  probe
  misc_feature (1)..(25): SEQ ID NO: 4302; WAN024C4D_at; Start 89; Stop 113
caaaacagattttaatagctacggc

SEQ ID NO: 103632 - DNA, 25 bp, Artificial
  probe
  misc_feature (1)..(25): SEQ ID NO: 4302; WAN024C4D_at; Start 2901; Stop 2925
tcagtttggagagaaaagggttaca

SEQ ID NO: 103633 - DNA, 25 bp, Artificial
  probe
  misc_feature (1)..(25): SEQ ID NO: 4302; WAN024C4D_at; Start 1906; Stop 1930
tctgttgataagtactggaagaacc

SEQ ID NO: 103634 - DNA, 25 bp, Artificial
  probe
  misc_feature (1)..(25): SEQ ID NO: 4302; WAN024C4D_at; Start 416; Stop 440
ttgataaaggaataggaacagtcgc

SEQ ID NO: 103635 - DNA, 25 bp, Artificial
  probe
  misc_feature (1)..(25): SEQ ID NO: 4302; WAN024C4D_at; Start 532; Stop 556
tctagatcagaccatgcagtagtgg

SEQ ID NO: 103636 - DNA, 25 bp, Artificial
  probe
  misc_feature (1)..(25): SEQ ID NO: 4302; WAN024C4D_at; Start 977; Stop 1001
gaactgtagcaagtaacccgtctag

SEQ ID NO: 103637 - DNA, 25 bp, Artificial
  probe
  misc_feature (1)..(25): SEQ ID NO: 4302; WAN024C4D_at; Start 2482; Stop 2506
aaagagtctgtttctggtagccgta

SEQ ID NO: 103638 - DNA, 25 bp, Artificial
  probe
  misc_feature (1)..(25): SEQ ID NO: 4302; WAN024C4D_at; Start 189; Stop 213
tactgaaactgctagagtaacaggg

SEQ ID NO: 103639 - DNA, 25 bp, Artificial
  probe
  misc_feature (1)..(25): SEQ ID NO: 1423; WAN024C4E_at; Start 382; Stop 406
ggtcagtgtgcggaaacattaacga

SEQ ID NO: 103640 - DNA, 25 bp, Artificial
  probe
  misc_feature (1)..(25): SEQ ID NO: 1423; WAN024C4E_at; Start 1480; Stop 1504
tctgaacagcagatggaatttggtc

SEQ ID NO: 103641 - DNA, 25 bp, Artificial
  probe
  misc_feature (1)..(25): SEQ ID NO: 1423; WAN024C4E_at; Start 663; Stop 687
gagatactcatcaagtcctcagcaa

SEQ ID NO: 103642 - DNA, 25 bp, Artificial
  probe
  misc_feature (1)..(25): SEQ ID NO: 1423; WAN024C4E_at; Start 904; Stop 928
gatcaagggatgaatcagatgagcc

SEQ ID NO: 103643 - DNA, 25 bp, Artificial
  probe
  misc_feature (1)..(25): SEQ ID NO: 1423; WAN024C4E_at; Start 87; Stop 111
ggaacttcaacatctacattttggg

SEQ ID NO: 103644 - DNA, 25 bp, Artificial
  probe
  misc_feature (1)..(25): SEQ ID NO: 1423; WAN024C4E_at; Start 1336; Stop 1360
caatatgtgttggatttgacgagac

SEQ ID NO: 103645 - DNA, 25 bp, Artificial
  probe
  misc_feature (1)..(25): SEQ ID NO: 1423; WAN024C4E_at; Start 103; Stop 127
cattttgggaaaaggattcatgtca

SEQ ID NO: 103646 - DNA, 25 bp, Artificial
  probe
  misc_feature (1)..(25): SEQ ID NO: 1423; WAN024C4E_at; Start 1704; Stop 1728
tccatcaatgatgacagcccatgtt

SEQ ID NO: 103647 - DNA, 25 bp, Artificial
  probe
  misc_feature (1)..(25): SEQ ID NO: 1423; WAN024C4E_at; Start 969; Stop 993
taatttttctcaagctagtcgtcct

SEQ ID NO: 103648 - DNA, 25 bp, Artificial
  probe
  misc_feature (1)..(25): SEQ ID NO: 1423; WAN024C4E_at; Start 699; Stop 723
tatgctatcaaggagggaaactaca

SEQ ID NO: 103649 - DNA, 25 bp, Artificial
  probe
  misc_feature (1)..(25): SEQ ID NO: 1423; WAN024C4E_at; Start 142; Stop 166
caattgatggcctatgaaaaaagag

SEQ ID NO: 103650 - DNA, 25 bp, Artificial
  probe
  misc_feature (1)..(25): SEQ ID NO: 1423; WAN024C4E_at; Start 787; Stop 811
gaagttgaccattttgacaccgcta

SEQ ID NO: 103651 - DNA, 25 bp, Artificial
  probe
  misc_feature (1)..(25): SEQ ID NO: 1423; WAN024C4E_at; Start 1650; Stop 1674
tacggacccgatagaaagattgaaa

SEQ ID NO: 103652 - DNA, 25 bp, Artificial
  probe
  misc_feature (1)..(25): SEQ ID NO: 1423; WAN024C4E_at; Start 22; Stop 46
gacgagaccgtttttcatttggcaa

SEQ ID NO: 103653 - DNA, 25 bp, Artificial
  probe
  misc_feature (1)..(25): SEQ ID NO: 1423; WAN024C4E_at; Start 583; Stop 607
caattttctggagcatggctgaggg

SEQ ID NO: 103654 - DNA, 25 bp, Artificial
  probe
  misc_feature (1)..(25): SEQ ID NO: 1423; WAN024C4E_at; Start 1759; Stop 1783
caaacgagtttggacactaggacaa

SEQ ID NO: 103655 - DNA, 25 bp, Artificial
  probe
  misc_feature (1)..(25): SEQ ID NO: 1423; WAN024C4E_at; Start 284; Stop 308
tgaatggtagtaggataacgacact

SEQ ID NO: 103656 - DNA, 25 bp, Artificial
  probe
  misc_feature (1)..(25): SEQ ID NO: 1423; WAN024C4E_at; Start 854; Stop 878
taaatcctgccgaaagttttgtgac

SEQ ID NO: 103657 - DNA, 25 bp, Artificial
  probe
  misc_feature (1)..(25): SEQ ID NO: 1423; WAN024C4E_at; Start 919; Stop 943
cagatgagccaacaactatcagatt

SEQ ID NO: 103658 - DNA, 25 bp, Artificial
  probe
  misc_feature (1)..(25): SEQ ID NO: 1423; WAN024C4E_at; Start 1574; Stop 1598
aatcttgttcttcaggtggtggacg

SEQ ID NO: 103659 - DNA, 25 bp, Artificial
  probe
  misc_feature (1)..(25): SEQ ID NO: 1423; WAN024C4E_at; Start 1121; Stop 1145
ggaaagatgacaaaagttctctggg

SEQ ID NO: 103660 - DNA, 25 bp, Artificial
  probe
  misc_feature (1)..(25): SEQ ID NO: 1423; WAN024C4E_at; Start 1147; Stop 1171
gattgggtaacagatagaagtcgcc

SEQ ID NO: 103661 - DNA, 25 bp, Artificial
  probe
  misc_feature (1)..(25): SEQ ID NO: 1423; WAN024C4E_at; Start 619; Stop 643
tatagaacttcgcttagaccaggta

SEQ ID NO: 103662 - DNA, 25 bp, Artificial
  probe
  misc_feature (1)..(25): SEQ ID NO: 1423; WAN024C4E_at; Start 1621; Stop 1645
tatgcaccgcaagcgtggacgagtg

SEQ ID NO: 103663 - DNA, 25 bp, Artificial
  probe
  misc_feature (1)..(25): SEQ ID NO: 1423; WAN024C4E_at; Start 1292; Stop 1316
ggactatccatttgttagacagaga

SEQ ID NO: 103664 - DNA, 25 bp, Artificial
  probe
  misc_feature (1)..(25): SEQ ID NO: 1423; WAN024C4E_at; Start 802; Stop 826
gacaccgctagagtaacggtaggaa

SEQ ID NO: 103665 - DNA, 25 bp, Artificial
  probe
  misc_feature (1)..(25): SEQ ID NO: 1423; WAN024C4E_at; Start 257; Stop 281
ggcatccagcctttcaagttcaagg

SEQ ID NO: 103666 - DNA, 25 bp, Artificial
  probe
  misc_feature (1)..(25): SEQ ID NO: 1423; WAN024C4E_at; Start 539; Stop 563
tgagcttacagctagatctacctga

SEQ ID NO: 103667 - DNA, 25 bp, Artificial
  probe
  misc_feature (1)..(25): SEQ ID NO: 1423; WAN024C4E_at; Start 871; Stop 895
tttgtgacaccagaagcaattgtga

SEQ ID NO: 103668 - DNA, 25 bp, Artificial
  probe
  misc_feature (1)..(25): SEQ ID NO: 1423; WAN024C4E_at; Start 1159; Stop 1183
gatagaagtcgccttcctgaaggta

SEQ ID NO: 103669 - DNA, 25 bp, Artificial
  probe
  misc_feature (1)..(25): SEQ ID NO: 1423; WAN024C4E_at; Start 243; Stop 267
gaaaggagattttcggcatccagcc

SEQ ID NO: 103670 - DNA, 25 bp, Artificial
  probe
  misc_feature (1)..(25): SEQ ID NO: 1423; WAN024C4E_at; Start 1607; Stop 1631
taggacttatgtattatgcaccgca

SEQ ID NO: 103671 - DNA, 25 bp, Artificial
  probe
  misc_feature (1)..(25): SEQ ID NO: 1423; WAN024C4E_at; Start 637; Stop 661
ccaggtattcaagcaatagatagct

SEQ ID NO: 103672 - DNA, 25 bp, Artificial
  probe
  misc_feature (1)..(25): SEQ ID NO: 1423; WAN024C4E_at; Start 1636; Stop 1660
tggacgagtgatgatacggacccga

SEQ ID NO: 103673 - DNA, 25 bp, Artificial
  probe
  misc_feature (1)..(25): SEQ ID NO: 822; WAN024C4F_at; Start 614; Stop 638
tagacatggttcgtcattatcagcc

SEQ ID NO: 103674 - DNA, 25 bp, Artificial
  probe
  misc_feature (1)..(25): SEQ ID NO: 822; WAN024C4F_at; Start 154; Stop 178
tattttcgagcttttgatcctaagg

SEQ ID NO: 103675 - DNA, 25 bp, Artificial
  probe
  misc_feature (1)..(25): SEQ ID NO: 822; WAN024C4F_at; Start 662; Stop 686
tagaaacatcaggtgaaggattcgg

SEQ ID NO: 103676 - DNA, 25 bp, Artificial
  probe
  misc_feature (1)..(25): SEQ ID NO: 822; WAN024C4F_at; Start 744; Stop 768
aattgttcctcacgaaggtattcga

SEQ ID NO: 103677 - DNA, 25 bp, Artificial
  probe
  misc_feature (1)..(25): SEQ ID NO: 822; WAN024C4F_at; Start 351; Stop 375
tcgagctgaaggtttaaaagtaggc

SEQ ID NO: 103678 - DNA, 25 bp, Artificial
  probe
  misc_feature (1)..(25): SEQ ID NO: 822; WAN024C4F_at; Start 628; Stop 652
cattatcagccaaacgttatcgtag

SEQ ID NO: 103679 - DNA, 25 bp, Artificial
  probe
  misc_feature (1)..(25): SEQ ID NO: 822; WAN024C4F_at; Start 332; Stop 356
aagaatttgtagatgctgttcgagc

SEQ ID NO: 103680 - DNA, 25 bp, Artificial
  probe
  misc_feature (1)..(25): SEQ ID NO: 822; WAN024C4F_at; Start 907; Stop 931
aatatgattcttaatgtaggcccag

SEQ ID NO: 103681 - DNA, 25 bp, Artificial
  probe
  misc_feature (1)..(25): SEQ ID NO: 822; WAN024C4F_at; Start 1157; Stop 1181
gaatgagctttcttcatgatggaag

SEQ ID NO: 103682 - DNA, 25 bp, Artificial
  probe
  misc_feature (1)..(25): SEQ ID NO: 822; WAN024C4F_at; Start 1060; Stop 1084
tactatactcgtaatggaaatacgg

SEQ ID NO: 103683 - DNA, 25 bp, Artificial
  probe
  misc_feature (1)..(25): SEQ ID NO: 822; WAN024C4F_at; Start 169; Stop 193
gatcctaaggaatataaccctagag

SEQ ID NO: 103684 - DNA, 25 bp, Artificial
  probe
  misc_feature (1)..(25): SEQ ID NO: 822; WAN024C4F_at; Start 436; Stop 460
catccaatgagaggaaatgaagcct

SEQ ID NO: 103685 - DNA, 25 bp, Artificial
  probe
  misc_feature (1)..(25): SEQ ID NO: 822; WAN024C4F_at; Start 1188; Stop 1212
gaaaatttcagaaagctggacgacc

SEQ ID NO: 103686 - DNA, 25 bp, Artificial
  probe
  misc_feature (1)..(25): SEQ ID NO: 822; WAN024C4F_at; Start 982; Stop 1006
catcgatggatgtctcgaaatggtg

SEQ ID NO: 103687 - DNA, 25 bp, Artificial
  probe
  misc_feature (1)..(25): SEQ ID NO: 822; WAN024C4F_at; Start 201; Stop 225
taaacaagcaaaagctgcagggatg

SEQ ID NO: 103688 - DNA, 25 bp, Artificial
  probe
  misc_feature (1)..(25): SEQ ID NO: 822; WAN024C4F_at; Start 1204; Stop 1228
tggacgaccaatgcctacaaaggaa

SEQ ID NO: 103689 - DNA, 25 bp, Artificial
  probe
  misc_feature (1)..(25): SEQ ID NO: 822; WAN024C4F_at; Start 700; Stop 724
gatgaaattacctcttacgctggag

SEQ ID NO: 103690 - DNA, 25 bp, Artificial
  probe
  misc_feature (1)..(25): SEQ ID NO: 822; WAN024C4F_at; Start 790; Stop 814
ccttgggaactttgtctaactatga

SEQ ID NO: 103691 - DNA, 25 bp, Artificial
  probe
  misc_feature (1)..(25): SEQ ID NO: 822; WAN024C4F_at; Start 185; Stop 209
accctagagaatgggctaaacaagc

SEQ ID NO: 103692 - DNA, 25 bp, Artificial
  probe
  misc_feature (1)..(25): SEQ ID NO: 822; WAN024C4F_at; Start 104; Stop 128
gggaatggattcgtagtcatcagaa

SEQ ID NO: 103693 - DNA, 25 bp, Artificial
  probe
  misc_feature (1)..(25): SEQ ID NO: 822; WAN024C4F_at; Start 457; Stop 481
gcctatcgagatgagaaaattaact

SEQ ID NO: 103694 - DNA, 25 bp, Artificial
  probe
  misc_feature (1)..(25): SEQ ID NO: 822; WAN024C4F_at; Start 729; Stop 753
tgttagtccagagcaaattgttcct

SEQ ID NO: 103695 - DNA, 25 bp, Artificial
  probe
  misc_feature (1)..(25): SEQ ID NO: 822; WAN024C4F_at; Start 1232; Stop 1256
gttttgcacagtttggagaagttcc

SEQ ID NO: 103696 - DNA, 25 bp, Artificial
  probe
  misc_feature (1)..(25): SEQ ID NO: 822; WAN024C4F_at; Start 1095; Stop 1119
tgtatttgaacaacctataggtcct

SEQ ID NO: 103697 - DNA, 25 bp, Artificial
  probe
  misc_feature (1)..(25): SEQ ID NO: 822; WAN024C4F_at; Start 677; Stop 701
aaggattcggaagtatcgttacaga

SEQ ID NO: 103698 - DNA, 25 bp, Artificial
  probe
  misc_feature (1)..(25): SEQ ID NO: 822; WAN024C4F_at; Start 294; Stop 318
taaagcaacaaatacacctgcaggt

SEQ ID NO: 103699 - DNA, 25 bp, Artificial
  probe
  misc_feature (1)..(25): SEQ ID NO: 822; WAN024C4F_at; Start 308; Stop 332
cacctgcaggtagagatttagttaa

SEQ ID NO: 103700 - DNA, 25 bp, Artificial
  probe
  misc_feature (1)..(25): SEQ ID NO: 822; WAN024C4F_at; Start 1246; Stop 1270
ggagaagttccacattttacctatc

SEQ ID NO: 103701 - DNA, 25 bp, Artificial
  probe
  misc_feature (1)..(25): SEQ ID NO: 822; WAN024C4F_at; Start 386; Stop 410
gtttgattgactggcaccatcctga

SEQ ID NO: 103702 - DNA, 25 bp, Artificial
  probe
  misc_feature (1)..(25): SEQ ID NO: 822; WAN024C4F_at; Start 237; Stop 261
tttaacggctaaacatcatgatggg

SEQ ID NO: 103703 - DNA, 25 bp, Artificial
  probe
  misc_feature (1)..(25): SEQ ID NO: 822; WAN024C4F_at; Start 1271; Stop 1295
cattaccagacttgattgatagcgt

SEQ ID NO: 103704 - DNA, 25 bp, Artificial
  probe
  misc_feature (1)..(25): SEQ ID NO: 822; WAN024C4F_at; Start 816; Stop 840
taacaattgggcttataatcctaca

SEQ ID NO: 103705 - DNA, 25 bp, Artificial
  probe
  misc_feature (1)..(25): SEQ ID NO: 822; WAN024C4F_at; Start 30; Stop 54
tagaactcagtggtttagagaagca

SEQ ID NO: 103706 - DNA, 25 bp, Artificial
  probe
  misc_feature (1)..(25): SEQ ID NO: 822; WAN024C4F_at; Start 923; Stop 947
taggcccagatgctttgggaagaat

SEQ ID NO: 103707 - DNA, 25 bp, Artificial
  probe
  misc_feature (1)..(25): SEQ ID NO: 1804; WAN024C4G_at; Start 127; Stop 151
gcagatcctatgaaaaatccaggta

SEQ ID NO: 103708 - DNA, 25 bp, Artificial
  probe
  misc_feature (1)..(25): SEQ ID NO: 1804; WAN024C4G_at; Start 215; Stop 239
tcacttacttttggaatagctttaa

SEQ ID NO: 103709 - DNA, 25 bp, Artificial
  probe
  misc_feature (1)..(25): SEQ ID NO: 1804; WAN024C4G_at; Start 351; Stop 375
tactctatttattccagcaacagct

SEQ ID NO: 103710 - DNA, 25 bp, Artificial
  probe
  misc_feature (1)..(25): SEQ ID NO: 1804; WAN024C4G_at; Start 115; Stop 139
tcatcattaaaagcagatcctatga

SEQ ID NO: 103711 - DNA, 25 bp, Artificial
  probe
  misc_feature (1)..(25): SEQ ID NO: 1804; WAN024C4G_at; Start 282; Stop 306
catgtcttcatatgttattgctagg

SEQ ID NO: 103712 - DNA, 25 bp, Artificial
  probe
  misc_feature (1)..(25): SEQ ID NO: 1804; WAN024C4G_at; Start 413; Stop 437
ggatttataataccccagttgctct

SEQ ID NO: 103713 - DNA, 25 bp, Artificial
  probe
  misc_feature (1)..(25): SEQ ID NO: 1804; WAN024C4G_at; Start 448; Stop 472
tactcttgtagtggaattgctatga

SEQ ID NO: 103714 - DNA, 25 bp, Artificial
  probe
  misc_feature (1)..(25): SEQ ID NO: 1804; WAN024C4G_at; Start 158; Stop 182
taccgactgactttactcttgaagg

SEQ ID NO: 103715 - DNA, 25 bp, Artificial
  probe
  misc_feature (1)..(25): SEQ ID NO: 1804; WAN024C4G_at; Start 329; Stop 353
tggtgacttctatgctgtattctac

SEQ ID NO: 103716 - DNA, 25 bp, Artificial
  probe
  misc_feature (1)..(25): SEQ ID NO: 1804; WAN024C4G_at; Start 81; Stop 105
aatttctattttccctattgcgtgg

SEQ ID NO: 103717 - DNA, 25 bp, Artificial
  probe
  misc_feature (1)..(25): SEQ ID NO: 1804; WAN024C4G_at; Start 580; Stop 604
ccaattgctagaccaggaattttaa

SEQ ID NO: 103718 - DNA, 25 bp, Artificial
  probe
  misc_feature (1)..(25): SEQ ID NO: 1804; WAN024C4G_at; Start 756; Stop 780
tgttgtaatcgtattaccaccaatc

SEQ ID NO: 103719 - DNA, 25 bp, Artificial
  probe
  misc_feature (1)..(25): SEQ ID NO: 1804; WAN024C4G_at; Start 632; Stop 656
actggaatgaatattattgggcatc

SEQ ID NO: 103720 - DNA, 25 bp, Artificial
  probe
  misc_feature (1)..(25): SEQ ID NO: 1804; WAN024C4G_at; Start 233; Stop 257
gctttaaagtagtgtctatatcagt

SEQ ID NO: 103721 - DNA, 25 bp, Artificial
  probe
  misc_feature (1)..(25): SEQ ID NO: 1804; WAN024C4G_at; Start 365; Stop 389
cagcaacagctatgacttttccagt

SEQ ID NO: 103722 - DNA, 25 bp, Artificial
  probe
  misc_feature (1)..(25): SEQ ID NO: 1804; WAN024C4G_at; Start 552; Stop 576
tgctcaaactttttggaaagtgatg

SEQ ID NO: 103723 - DNA, 25 bp, Artificial
  probe
  misc_feature (1)..(25): SEQ ID NO: 1804; WAN024C4G_at; Start 607; Stop 631
gcagcagtacttgcctttattaata

SEQ ID NO: 103724 - DNA, 25 bp, Artificial
  probe
  misc_feature (1)..(25): SEQ ID NO: 1804; WAN024C4G_at; Start 509; Stop 533
caaaagaattggaggaggcagcaga

SEQ ID NO: 103725 - DNA, 25 bp, Artificial
  probe
  misc_feature (1)..(25): SEQ ID NO: 1804; WAN024C4G_at; Start 36; Stop 60
aaaaggcaaagttcttatatatggt

SEQ ID NO: 103726 - DNA, 25 bp, Artificial
  probe
  misc_feature (1)..(25): SEQ ID NO: 1804; WAN024C4G_at; Start 810; Stop 834
cattgaagctttaggaggaggagca

SEQ ID NO: 103727 - DNA, 25 bp, Artificial
  probe
  misc_feature (1)..(25): SEQ ID NO: 1804; WAN024C4G_at; Start 51; Stop 75
tatatatggttatatgctccttacc

SEQ ID NO: 103728 - DNA, 25 bp, Artificial
  probe
  misc_feature (1)..(25): SEQ ID NO: 1804; WAN024C4G_at; Start 312; Stop 336
atttagagggaagaagttggtgact

SEQ ID NO: 103729 - DNA, 25 bp, Artificial
  probe
  misc_feature (1)..(25): SEQ ID NO: 1804; WAN024C4G_at; Start 537; Stop 561
tgatggtgcgacatatgctcaaact

SEQ ID NO: 103730 - DNA, 25 bp, Artificial
  probe
  misc_feature (1)..(25): SEQ ID NO: 1804; WAN024C4G_at; Start 651; Stop 675
ggcatctatgttggtgattgataaa

SEQ ID NO: 103731 - DNA, 25 bp, Artificial
  probe
  misc_feature (1)..(25): SEQ ID NO: 1804; WAN024C4G_at; Start 672; Stop 696
taaaaatgaattaacagtaccagca

SEQ ID NO: 103732 - DNA, 25 bp, Artificial
  probe
  misc_feature (1)..(25): SEQ ID NO: 1804; WAN024C4G_at; Start 739; Stop 763
ggtctattttcagctattgttgtaa

SEQ ID NO: 103733 - DNA, 25 bp, Artificial
  probe
  misc_feature (1)..(25): SEQ ID NO: 1804; WAN024C4G_at; Start 297; Stop 321
tattgctaggatggaatttagaggg

SEQ ID NO: 103734 - DNA, 25 bp, Artificial
  probe
  misc_feature (1)..(25): SEQ ID NO: 1804; WAN024C4G_at; Start 261; Stop 285
tattagcattgttatgatctccatg

SEQ ID NO: 103735 - DNA, 25 bp, Artificial
  probe
  misc_feature (1)..(25): SEQ ID NO: 1804; WAN024C4G_at; Start 144; Stop 168
tccaggtattagtttaccgactgac

SEQ ID NO: 103736 - DNA, 25 bp, Artificial
  probe
  misc_feature (1)..(25): SEQ ID NO: 1804; WAN024C4G_at; Start 776; Stop 800
caatcattctattcgcatttacaag

SEQ ID NO: 103737 - DNA, 25 bp, Artificial
  probe
  misc_feature (1)..(25): SEQ ID NO: 1804; WAN024C4G_at; Start 795; Stop 819
tacaagtaaatacttcattgaagct

SEQ ID NO: 103738 - DNA, 25 bp, Artificial
  probe
  misc_feature (1)..(25): SEQ ID NO: 1804; WAN024C4G_at; Start 592; Stop 616
ccaggaattttaacagcagcagtac

SEQ ID NO: 103739 - DNA, 25 bp, Artificial
  probe
  misc_feature (1)..(25): SEQ ID NO: 1804; WAN024C4G_at; Start 526; Stop 550
gcagcagagattgatggtgcgacat

SEQ ID NO: 103740 - DNA, 25 bp, Artificial
  probe
  misc_feature (1)..(25): SEQ ID NO: 1804; WAN024C4G_at; Start 433; Stop 457
gctctaattctggtctactcttgta

SEQ ID NO: 103741 - DNA, 25 bp, Artificial
  probe
  misc_feature (1)..(25): SEQ ID NO: 7623; WAN024C4H_at; Start 2; Stop 26
tggcactgccaactgagcttgattt

SEQ ID NO: 103742 - DNA, 25 bp, Artificial
  probe
  misc_feature (1)..(25): SEQ ID NO: 7623; WAN024C4H_at; Start 1; Stop 25
ttggcactgccaactgagcttgatt

SEQ ID NO: 103743 - DNA, 25 bp, Artificial
  probe
  misc_feature (1)..(25): SEQ ID NO: 7623; WAN024C4H_at; Start 10; Stop 34
ccaactgagcttgattttacttata

SEQ ID NO: 103744 - DNA, 25 bp, Artificial
  probe
  misc_feature (1)..(25): SEQ ID NO: 7623; WAN024C4H_at; Start 8; Stop 32
tgccaactgagcttgattttactta

SEQ ID NO: 103745 - DNA, 25 bp, Artificial
  probe
  misc_feature (1)..(25): SEQ ID NO: 7623; WAN024C4H_at; Start 7; Stop 31
ctgccaactgagcttgattttactt

SEQ ID NO: 103746 - DNA, 25 bp, Artificial
  probe
  misc_feature (1)..(25): SEQ ID NO: 7623; WAN024C4H_at; Start 5; Stop 29
cactgccaactgagcttgattttac

SEQ ID NO: 103747 - DNA, 25 bp, Artificial
  probe
  misc_feature (1)..(25): SEQ ID NO: 7623; WAN024C4H_at; Start 6; Stop 30
actgccaactgagcttgattttact

SEQ ID NO: 103748 - DNA, 25 bp, Artificial
  probe
  misc_feature (1)..(25): SEQ ID NO: 7623; WAN024C4H_at; Start 12; Stop 36
aactgagcttgattttacttatata

SEQ ID NO: 103749 - DNA, 25 bp, Artificial
  probe
  misc_feature (1)..(25): SEQ ID NO: 7623; WAN024C4H_at; Start 4; Stop 28
gcactgccaactgagcttgatttta

SEQ ID NO: 103750 - DNA, 25 bp, Artificial
  probe
  misc_feature (1)..(25): SEQ ID NO: 7623; WAN024C4H_at; Start 9; Stop 33
gccaactgagcttgattttacttat

SEQ ID NO: 103751 - DNA, 25 bp, Artificial
  probe
  misc_feature (1)..(25): SEQ ID NO: 7623; WAN024C4H_at; Start 11; Stop 35
caactgagcttgattttacttatat

SEQ ID NO: 103752 - DNA, 25 bp, Artificial
  probe
  misc_feature (1)..(25): SEQ ID NO: 7623; WAN024C4H_at; Start 3; Stop 27
ggcactgccaactgagcttgatttt

SEQ ID NO: 103753 - DNA, 25 bp, Artificial
  probe
  misc_feature (1)..(25): SEQ ID NO: 2413; WAN024C4I_at; Start 692; Stop 716
caattatggcagcaacttcagggtt

SEQ ID NO: 103754 - DNA, 25 bp, Artificial
  probe
  misc_feature (1)..(25): SEQ ID NO: 2413; WAN024C4I_at; Start 601; Stop 625
caagaagctgctattttagacaata

SEQ ID NO: 103755 - DNA, 25 bp, Artificial
  probe
  misc_feature (1)..(25): SEQ ID NO: 2413; WAN024C4I_at; Start 526; Stop 550
ggcgcttatatcttctttgcaggag

SEQ ID NO: 103756 - DNA, 25 bp, Artificial
  probe
  misc_feature (1)..(25): SEQ ID NO: 2413; WAN024C4I_at; Start 247; Stop 271
ctaattaattctgttcgttgggctg

SEQ ID NO: 103757 - DNA, 25 bp, Artificial
  probe
  misc_feature (1)..(25): SEQ ID NO: 2413; WAN024C4I_at; Start 796; Stop 820
gcagtggctagctcacgaactcagt

SEQ ID NO: 103758 - DNA, 25 bp, Artificial
  probe
  misc_feature (1)..(25): SEQ ID NO: 2413; WAN024C4I_at; Start 681; Stop 705
taaaactgtttcaattatggcagca

SEQ ID NO: 103759 - DNA, 25 bp, Artificial
  probe
  misc_feature (1)..(25): SEQ ID NO: 2413; WAN024C4I_at; Start 621; Stop 645
caatattactggttggaggaaagag

SEQ ID NO: 103760 - DNA, 25 bp, Artificial
  probe
  misc_feature (1)..(25): SEQ ID NO: 2413; WAN024C4I_at; Start 823; Stop 847
gctcgtgcaaatacaattggagtta

SEQ ID NO: 103761 - DNA, 25 bp, Artificial
  probe
  misc_feature (1)..(25): SEQ ID NO: 2413; WAN024C4I_at; Start 353; Stop 377
ctaggaatctttatattgtaccaag

SEQ ID NO: 103762 - DNA, 25 bp, Artificial
  probe
  misc_feature (1)..(25): SEQ ID NO: 2413; WAN024C4I_at; Start 72; Stop 96
gccaacgttgatttgtttctttcta

SEQ ID NO: 103763 - DNA, 25 bp, Artificial
  probe
  misc_feature (1)..(25): SEQ ID NO: 2413; WAN024C4I_at; Start 649; Stop 673
tatattacgattccgatgattaagg

SEQ ID NO: 103764 - DNA, 25 bp, Artificial
  probe
  misc_feature (1)..(25): SEQ ID NO: 2413; WAN024C4I_at; Start 337; Stop 361
aaaggctggaagatatctaggaatc

SEQ ID NO: 103765 - DNA, 25 bp, Artificial
  probe
  misc_feature (1)..(25): SEQ ID NO: 2413; WAN024C4I_at; Start 639; Stop 663
gaaagagtggtatattacgattccg

SEQ ID NO: 103766 - DNA, 25 bp, Artificial
  probe
  misc_feature (1)..(25): SEQ ID NO: 2413; WAN024C4I_at; Start 811; Stop 835
cgaactcagtatgctcgtgcaaata

SEQ ID NO: 103767 - DNA, 25 bp, Artificial
  probe
  misc_feature (1)..(25): SEQ ID NO: 2413; WAN024C4I_at; Start 468; Stop 492
tccatcgtttaaagattcagtactg

SEQ ID NO: 103768 - DNA, 25 bp, Artificial
  probe
  misc_feature (1)..(25): SEQ ID NO: 2413; WAN024C4I_at; Start 737; Stop 761
tctttttgacaaatggtgctgcagg

SEQ ID NO: 103769 - DNA, 25 bp, Artificial
  probe
  misc_feature (1)..(25): SEQ ID NO: 2413; WAN024C4I_at; Start 897; Stop 921
cagagaaagaaaaagactgaaaggt

SEQ ID NO: 103770 - DNA, 25 bp, Artificial
  probe
  misc_feature (1)..(25): SEQ ID NO: 2413; WAN024C4I_at; Start 506; Stop 530
taaatatagtagctatgactggcgc

SEQ ID NO: 103771 - DNA, 25 bp, Artificial
  probe
  misc_feature (1)..(25): SEQ ID NO: 2413; WAN024C4I_at; Start 709; Stop 733
tcagggtttttgctctataacgaag

SEQ ID NO: 103772 - DNA, 25 bp, Artificial
  probe
  misc_feature (1)..(25): SEQ ID NO: 2413; WAN024C4I_at; Start 768; Stop 792
aagtatcagttttgttattcgagaa

SEQ ID NO: 103773 - DNA, 25 bp, Artificial
  probe
  misc_feature (1)..(25): SEQ ID NO: 2413; WAN024C4I_at; Start 223; Stop 247
gaatacccattttttacagaagctc

SEQ ID NO: 103774 - DNA, 25 bp, Artificial
  probe
  misc_feature (1)..(25): SEQ ID NO: 2413; WAN024C4I_at; Start 554; Stop 578
caaccattatgattcttgggcaaat

SEQ ID NO: 103775 - DNA, 25 bp, Artificial
  probe
  misc_feature (1)..(25): SEQ ID NO: 2413; WAN024C4I_at; Start 15; Stop 39
tatgagcctacaaaataggaagaat

SEQ ID NO: 103776 - DNA, 25 bp, Artificial
  probe
  misc_feature (1)..(25): SEQ ID NO: 2413; WAN024C4I_at; Start 570; Stop 594
tgggcaaatttttgctattccagaa

SEQ ID NO: 103777 - DNA, 25 bp, Artificial
  probe
  misc_feature (1)..(25): SEQ ID NO: 2413; WAN024C4I_at; Start 291; Stop 315
agttcctttagctgtatctgttgca

SEQ ID NO: 103778 - DNA, 25 bp, Artificial
  probe
  misc_feature (1)..(25): SEQ ID NO: 2413; WAN024C4I_at; Start 322; Stop 346
ttatctaagaaattaaaaggctgga

SEQ ID NO: 103779 - DNA, 25 bp, Artificial
  probe
  misc_feature (1)..(25): SEQ ID NO: 2413; WAN024C4I_at; Start 751; Stop 775
ggtgctgcaggaacaaaaagtatca

SEQ ID NO: 103780 - DNA, 25 bp, Artificial
  probe
  misc_feature (1)..(25): SEQ ID NO: 2413; WAN024C4I_at; Start 783; Stop 807
tattcgagaattagcagtggctagc

SEQ ID NO: 103781 - DNA, 25 bp, Artificial
  probe
  misc_feature (1)..(25): SEQ ID NO: 2413; WAN024C4I_at; Start 485; Stop 509
cagtactgttgactccaggattaaa

SEQ ID NO: 103782 - DNA, 25 bp, Artificial
  probe
  misc_feature (1)..(25): SEQ ID NO: 2413; WAN024C4I_at; Start 378; Stop 402
tatcatttctagtgctgctatgggc

SEQ ID NO: 103783 - DNA, 25 bp, Artificial
  probe
  misc_feature (1)..(25): SEQ ID NO: 2413; WAN024C4I_at; Start 541; Stop 565
tttgcaggagcatcaaccattatga

SEQ ID NO: 103784 - DNA, 25 bp, Artificial
  probe
  misc_feature (1)..(25): SEQ ID NO: 2413; WAN024C4I_at; Start 426; Stop 450
tccaaactatggtgttgttaaccaa

SEQ ID NO: 103785 - DNA, 25 bp, Artificial
  probe
  misc_feature (1)..(25): SEQ ID NO: 2413; WAN024C4I_at; Start 164; Stop 188
acacccctgagtttcttggatttga

SEQ ID NO: 103786 - DNA, 25 bp, Artificial
  probe
  misc_feature (1)..(25): SEQ ID NO: 2413; WAN024C4I_at; Start 391; Stop 415
gctgctatgggcttgatttttcttc

SEQ ID NO: 103787 - DNA, 25 bp, Artificial
  probe
  misc_feature (1)..(25): SEQ ID NO: 997; WAN024C4J_at; Start 907; Stop 931
gcaattagttcttctggaggtggta

SEQ ID NO: 103788 - DNA, 25 bp, Artificial
  probe
  misc_feature (1)..(25): SEQ ID NO: 997; WAN024C4J_at; Start 802; Stop 826
gatttccaagaaggtaaatctgcag

SEQ ID NO: 103789 - DNA, 25 bp, Artificial
  probe
  misc_feature (1)..(25): SEQ ID NO: 997; WAN024C4J_at; Start 86; Stop 110
caagcggtggaagttcttctggtaa

SEQ ID NO: 103790 - DNA, 25 bp, Artificial
  probe
  misc_feature (1)..(25): SEQ ID NO: 997; WAN024C4J_at; Start 456; Stop 480
tcacgaacagttatttacaatgggt

SEQ ID NO: 103791 - DNA, 25 bp, Artificial
  probe
  misc_feature (1)..(25): SEQ ID NO: 997; WAN024C4J_at; Start 1026; Stop 1050
tgaaaaagtaggagcaaatccttct

SEQ ID NO: 103792 - DNA, 25 bp, Artificial
  probe
  misc_feature (1)..(25): SEQ ID NO: 997; WAN024C4J_at; Start 1222; Stop 1246
gctgctgaaaatgtagatgttgatc

SEQ ID NO: 103793 - DNA, 25 bp, Artificial
  probe
  misc_feature (1)..(25): SEQ ID NO: 997; WAN024C4J_at; Start 830; Stop 854
tctttaatggtgtgtgggcttctgg

SEQ ID NO: 103794 - DNA, 25 bp, Artificial
  probe
  misc_feature (1)..(25): SEQ ID NO: 997; WAN024C4J_at; Start 295; Stop 319
tttcctgatgtgattgacctagcag

SEQ ID NO: 103795 - DNA, 25 bp, Artificial
  probe
  misc_feature (1)..(25): SEQ ID NO: 997; WAN024C4J_at; Start 1109; Stop 1133
ttttaggacaagcaatcactcaagt

SEQ ID NO: 103796 - DNA, 25 bp, Artificial
  probe
  misc_feature (1)..(25): SEQ ID NO: 997; WAN024C4J_at; Start 139; Stop 163
catcatagtgaagatgaatggcctg

SEQ ID NO: 103797 - DNA, 25 bp, Artificial
  probe
  misc_feature (1)..(25): SEQ ID NO: 997; WAN024C4J_at; Start 335; Stop 359
tagctgcgattgaacaaaaacttgt

SEQ ID NO: 103798 - DNA, 25 bp, Artificial
  probe
  misc_feature (1)..(25): SEQ ID NO: 997; WAN024C4J_at; Start 555; Stop 579
cactcaggcaatggcaagcattaga

SEQ ID NO: 103799 - DNA, 25 bp, Artificial
  probe
  misc_feature (1)..(25): SEQ ID NO: 997; WAN024C4J_at; Start 778; Stop 802
ggcgatgccaatgcttattccaaag

SEQ ID NO: 103800 - DNA, 25 bp, Artificial
  probe
  misc_feature (1)..(25): SEQ ID NO: 997; WAN024C4J_at; Start 886; Stop 910
ggaatctatcctgcaggtgtagcaa

SEQ ID NO: 103801 - DNA, 25 bp, Artificial
  probe
  misc_feature (1)..(25): SEQ ID NO: 997; WAN024C4J_at; Start 607; Stop 631
gctggagaaccatctattcgcttgt

SEQ ID NO: 103802 - DNA, 25 bp, Artificial
  probe
  misc_feature (1)..(25): SEQ ID NO: 997; WAN024C4J_at; Start 641; Stop 665
tattaggaaccacagaaaatggacg

SEQ ID NO: 103803 - DNA, 25 bp, Artificial
  probe
  misc_feature (1)..(25): SEQ ID NO: 997; WAN024C4J_at; Start 864; Stop 888
taagaacccaagtcttgcacctgga

SEQ ID NO: 103804 - DNA, 25 bp, Artificial
  probe
  misc_feature (1)..(25): SEQ ID NO: 997; WAN024C4J_at; Start 593; Stop 617
tgtatgcatttggtgctggagaacc

SEQ ID NO: 103805 - DNA, 25 bp, Artificial
  probe
  misc_feature (1)..(25): SEQ ID NO: 997; WAN024C4J_at; Start 1202; Stop 1226
tcaatgcattgacagaaagtgctgc

SEQ ID NO: 103806 - DNA, 25 bp, Artificial
  probe
  misc_feature (1)..(25): SEQ ID NO: 997; WAN024C4J_at; Start 473; Stop 497
caatgggtttgtggtacaacaagga

SEQ ID NO: 103807 - DNA, 25 bp, Artificial
  probe
  misc_feature (1)..(25): SEQ ID NO: 997; WAN024C4J_at; Start 71; Stop 95
gaacatctaaggatgcaagcggtgg

SEQ ID NO: 103808 - DNA, 25 bp, Artificial
  probe
  misc_feature (1)..(25): SEQ ID NO: 997; WAN024C4J_at; Start 522; Stop 546
gacacctgatcagtggaatacttgg

SEQ ID NO: 103809 - DNA, 25 bp, Artificial
  probe
  misc_feature (1)..(25): SEQ ID NO: 997; WAN024C4J_at; Start 762; Stop 786
ttctaagaatgctggtggcgatgcc

SEQ ID NO: 103810 - DNA, 25 bp, Artificial
  probe
  misc_feature (1)..(25): SEQ ID NO: 997; WAN024C4J_at; Start 27; Stop 51
cgctgttatcgggttagtagctacc

SEQ ID NO: 103811 - DNA, 25 bp, Artificial
  probe
  misc_feature (1)..(25): SEQ ID NO: 997; WAN024C4J_at; Start 540; Stop 564
tacttgggatgatttcactcaggca

SEQ ID NO: 103812 - DNA, 25 bp, Artificial
  probe
  misc_feature (1)..(25): SEQ ID NO: 997; WAN024C4J_at; Start 154; Stop 178
gaatggcctgtagcgaagactatgc

SEQ ID NO: 103813 - DNA, 25 bp, Artificial
  probe
  misc_feature (1)..(25): SEQ ID NO: 997; WAN024C4J_at; Start 925; Stop 949
ggtggtatcactatctcaagtaaga

SEQ ID NO: 103814 - DNA, 25 bp, Artificial
  probe
  misc_feature (1)..(25): SEQ ID NO: 997; WAN024C4J_at; Start 504; Stop 528
tgcaaaagcgggtgctaagacacct

SEQ ID NO: 103815 - DNA, 25 bp, Artificial
  probe
  misc_feature (1)..(25): SEQ ID NO: 997; WAN024C4J_at; Start 50; Stop 74
cctttggtttagcagcttgtggaac

SEQ ID NO: 103816 - DNA, 25 bp, Artificial
  probe
  misc_feature (1)..(25): SEQ ID NO: 997; WAN024C4J_at; Start 489; Stop 513
caacaaggacatatttgcaaaagcg

SEQ ID NO: 103817 - DNA, 25 bp, Artificial
  probe
  misc_feature (1)..(25): SEQ ID NO: 997; WAN024C4J_at; Start 1124; Stop 1148
tcactcaagttaagaatgcaaaagc

SEQ ID NO: 103818 - DNA, 25 bp, Artificial
  probe
  misc_feature (1)..(25): SEQ ID NO: 997; WAN024C4J_at; Start 310; Stop 334
gacctagcaggtaatgcagtatcat

SEQ ID NO: 103819 - DNA, 25 bp, Artificial
  probe
  misc_feature (1)..(25): SEQ ID NO: 997; WAN024C4J_at; Start 940; Stop 964
tcaagtaagatgtctgaagctaaac

SEQ ID NO: 103820 - DNA, 25 bp, Artificial
  probe
  misc_feature (1)..(25): SEQ ID NO: 997; WAN024C4J_at; Start 849; Stop 873
ttctggtgagatgtctaagaaccca

SEQ ID NO: 103821 - DNA, 25 bp, Artificial
  probe
  misc_feature (1)..(25): SEQ ID NO: 829; WAN024C4K_at; Start 546; Stop 570
tcaagctggtaaaacaggtacctct

SEQ ID NO: 103822 - DNA, 25 bp, Artificial
  probe
  misc_feature (1)..(25): SEQ ID NO: 829; WAN024C4K_at; Start 57; Stop 81
tgctactatcgttcacgatgagccc

SEQ ID NO: 103823 - DNA, 25 bp, Artificial
  probe
  misc_feature (1)..(25): SEQ ID NO: 829; WAN024C4K_at; Start 322; Stop 346
agtagtgaaaaaatagctaccgcct

SEQ ID NO: 103824 - DNA, 25 bp, Artificial
  probe
  misc_feature (1)..(25): SEQ ID NO: 829; WAN024C4K_at; Start 37; Stop 61
tacggtgtctacgattcaactgcta

SEQ ID NO: 103825 - DNA, 25 bp, Artificial
  probe
  misc_feature (1)..(25): SEQ ID NO: 829; WAN024C4K_at; Start 53; Stop 77
caactgctactatcgttcacgatga

SEQ ID NO: 103826 - DNA, 25 bp, Artificial
  probe
  misc_feature (1)..(25): SEQ ID NO: 829; WAN024C4K_at; Start 40; Stop 64
ggtgtctacgattcaactgctacta

SEQ ID NO: 103827 - DNA, 25 bp, Artificial
  probe
  misc_feature (1)..(25): SEQ ID NO: 829; WAN024C4K_at; Start 529; Stop 553
tacctgccttggcttcctcaagctg

SEQ ID NO: 103828 - DNA, 25 bp, Artificial
  probe
  misc_feature (1)..(25): SEQ ID NO: 829; WAN024C4K_at; Start 325; Stop 349
agtgaaaaaatagctaccgcctatg

SEQ ID NO: 103829 - DNA, 25 bp, Artificial
  probe
  misc_feature (1)..(25): SEQ ID NO: 829; WAN024C4K_at; Start 91; Stop 115
cctgggacagatatccctctctata

SEQ ID NO: 103830 - DNA, 25 bp, Artificial
  probe
  misc_feature (1)..(25): SEQ ID NO: 829; WAN024C4K_at; Start 102; Stop 126
tatccctctctataactgggatcga

SEQ ID NO: 103831 - DNA, 25 bp, Artificial
  probe
  misc_feature (1)..(25): SEQ ID NO: 829; WAN024C4K_at; Start 65; Stop 89
tcgttcacgatgagccctataacta

SEQ ID NO: 103832 - DNA, 25 bp, Artificial
  probe
  misc_feature (1)..(25): SEQ ID NO: 829; WAN024C4K_at; Start 76; Stop 100
gagccctataactaccctgggacag

SEQ ID NO: 103833 - DNA, 25 bp, Artificial
  probe
  misc_feature (1)..(25): SEQ ID NO: 829; WAN024C4K_at; Start 27; Stop 51
tgccttggagtacggtgtctacgat

SEQ ID NO: 103834 - DNA, 25 bp, Artificial
  probe
  misc_feature (1)..(25): SEQ ID NO: 829; WAN024C4K_at; Start 32; Stop 56
tggagtacggtgtctacgattcaac

SEQ ID NO: 103835 - DNA, 25 bp, Artificial
  probe
  misc_feature (1)..(25): SEQ ID NO: 829; WAN024C4K_at; Start 71; Stop 95
acgatgagccctataactaccctgg

SEQ ID NO: 103836 - DNA, 25 bp, Artificial
  probe
  misc_feature (1)..(25): SEQ ID NO: 829; WAN024C4K_at; Start 86; Stop 110
actaccctgggacagatatccctct

SEQ ID NO: 103837 - DNA, 25 bp, Artificial
  probe
  misc_feature (1)..(25): SEQ ID NO: 829; WAN024C4K_at; Start 73; Stop 97
gatgagccctataactaccctggga

SEQ ID NO: 103838 - DNA, 25 bp, Artificial
  probe
  misc_feature (1)..(25): SEQ ID NO: 829; WAN024C4K_at; Start 84; Stop 108
taactaccctgggacagatatccct

SEQ ID NO: 103839 - DNA, 25 bp, Artificial
  probe
  misc_feature (1)..(25): SEQ ID NO: 829; WAN024C4K_at; Start 333; Stop 357
aatagctaccgcctatgccgcattc

SEQ ID NO: 103840 - DNA, 25 bp, Artificial
  probe
  misc_feature (1)..(25): SEQ ID NO: 829; WAN024C4K_at; Start 78; Stop 102
gccctataactaccctgggacagat

SEQ ID NO: 103841 - DNA, 25 bp, Artificial
  probe
  misc_feature (1)..(25): SEQ ID NO: 829; WAN024C4K_at; Start 43; Stop 67
gtctacgattcaactgctactatcg

SEQ ID NO: 103842 - DNA, 25 bp, Artificial
  probe
  misc_feature (1)..(25): SEQ ID NO: 829; WAN024C4K_at; Start 60; Stop 84
tactatcgttcacgatgagccctat

SEQ ID NO: 103843 - DNA, 25 bp, Artificial
  probe
  misc_feature (1)..(25): SEQ ID NO: 829; WAN024C4K_at; Start 105; Stop 129
ccctctctataactgggatcgagca

SEQ ID NO: 103844 - DNA, 25 bp, Artificial
  probe
  misc_feature (1)..(25): SEQ ID NO: 829; WAN024C4K_at; Start 543; Stop 567
tcctcaagctggtaaaacaggtacc

SEQ ID NO: 103845 - DNA, 25 bp, Artificial
  probe
  misc_feature (1)..(25): SEQ ID NO: 829; WAN024C4K_at; Start 96; Stop 120
gacagatatccctctctataactgg

SEQ ID NO: 103846 - DNA, 25 bp, Artificial
  probe
  misc_feature (1)..(25): SEQ ID NO: 829; WAN024C4K_at; Start 82; Stop 106
tataactaccctgggacagatatcc

SEQ ID NO: 103847 - DNA, 25 bp, Artificial
  probe
  misc_feature (1)..(25): SEQ ID NO: 829; WAN024C4K_at; Start 69; Stop 93
tcacgatgagccctataactaccct

SEQ ID NO: 103848 - DNA, 25 bp, Artificial
  probe
  misc_feature (1)..(25): SEQ ID NO: 829; WAN024C4K_at; Start 192; Stop 216
aacactaaacaaggtcggtctagat

SEQ ID NO: 103849 - DNA, 25 bp, Artificial
  probe
  misc_feature (1)..(25): SEQ ID NO: 829; WAN024C4K_at; Start 189; Stop 213
tgaaacactaaacaaggtcggtcta

SEQ ID NO: 103850 - DNA, 25 bp, Artificial
  probe
  misc_feature (1)..(25): SEQ ID NO: 829; WAN024C4K_at; Start 98; Stop 122
cagatatccctctctataactggga

SEQ ID NO: 103851 - DNA, 25 bp, Artificial
  probe
  misc_feature (1)..(25): SEQ ID NO: 829; WAN024C4K_at; Start 328; Stop 352
gaaaaaatagctaccgcctatgccg

SEQ ID NO: 103852 - DNA, 25 bp, Artificial
  probe
  misc_feature (1)..(25): SEQ ID NO: 829; WAN024C4K_at; Start 329; Stop 353
aaaaaatagctaccgcctatgccgc

SEQ ID NO: 103853 - DNA, 25 bp, Artificial
  probe
  misc_feature (1)..(25): SEQ ID NO: 829; WAN024C4K_at; Start 34; Stop 58
gagtacggtgtctacgattcaactg

SEQ ID NO: 103854 - DNA, 25 bp, Artificial
  probe
  misc_feature (1)..(25): SEQ ID NO: 829; WAN024C4K_at; Start 29; Stop 53
ccttggagtacggtgtctacgattc

SEQ ID NO: 103855 - DNA, 25 bp, Artificial
  probe
  misc_feature (1)..(25): SEQ ID NO: 1006; WAN024C4L_at; Start 1997; Stop 2021
cagctgaaagttcaactacacaggc

SEQ ID NO: 103856 - DNA, 25 bp, Artificial
  probe
  misc_feature (1)..(25): SEQ ID NO: 1006; WAN024C4L_at; Start 1983; Stop 2007
tcaacaatcctcaacagctgaaagt

SEQ ID NO: 103857 - DNA, 25 bp, Artificial
  probe
  misc_feature (1)..(25): SEQ ID NO: 1006; WAN024C4L_at; Start 2020; Stop 2044
gcaagtactacggttggtcaacaac

SEQ ID NO: 103858 - DNA, 25 bp, Artificial
  probe
  misc_feature (1)..(25): SEQ ID NO: 1006; WAN024C4L_at; Start 2077; Stop 2101
ggacaagctgttcaaccgacacaac

SEQ ID NO: 103859 - DNA, 25 bp, Artificial
  probe
  misc_feature (1)..(25): SEQ ID NO: 1006; WAN024C4L_at; Start 2013; Stop 2037
tacacaggcaagtactacggttggt

SEQ ID NO: 103860 - DNA, 25 bp, Artificial
  probe
  misc_feature (1)..(25): SEQ ID NO: 1006; WAN024C4L_at; Start 2085; Stop 2109
tgttcaaccgacacaaccagtacaa

SEQ ID NO: 103861 - DNA, 25 bp, Artificial
  probe
  misc_feature (1)..(25): SEQ ID NO: 1006; WAN024C4L_at; Start 2070; Stop 2094
taatcaaggacaagctgttcaaccg

SEQ ID NO: 103862 - DNA, 25 bp, Artificial
  probe
  misc_feature (1)..(25): SEQ ID NO: 1006; WAN024C4L_at; Start 2065; Stop 2089
gatcctaatcaaggacaagctgttc

SEQ ID NO: 103863 - DNA, 25 bp, Artificial
  probe
  misc_feature (1)..(25): SEQ ID NO: 1006; WAN024C4L_at; Start 2100; Stop 2124
accagtacaaccaacgccacaaaat

SEQ ID NO: 103864 - DNA, 25 bp, Artificial
  probe
  misc_feature (1)..(25): SEQ ID NO: 1006; WAN024C4L_at; Start 2017; Stop 2041
caggcaagtactacggttggtcaac

SEQ ID NO: 103865 - DNA, 25 bp, Artificial
  probe
  misc_feature (1)..(25): SEQ ID NO: 1006; WAN024C4L_at; Start 2073; Stop 2097
tcaaggacaagctgttcaaccgaca

SEQ ID NO: 103866 - DNA, 25 bp, Artificial
  probe
  misc_feature (1)..(25): SEQ ID NO: 1006; WAN024C4L_at; Start 2115; Stop 2139
gccacaaaatccacaagttcaacag

SEQ ID NO: 103867 - DNA, 25 bp, Artificial
  probe
  misc_feature (1)..(25): SEQ ID NO: 1006; WAN024C4L_at; Start 2009; Stop 2033
caactacacaggcaagtactacggt

SEQ ID NO: 103868 - DNA, 25 bp, Artificial
  probe
  misc_feature (1)..(25): SEQ ID NO: 1006; WAN024C4L_at; Start 2121; Stop 2145
aaatccacaagttcaacagcaacca

SEQ ID NO: 103869 - DNA, 25 bp, Artificial
  probe
  misc_feature (1)..(25): SEQ ID NO: 1006; WAN024C4L_at; Start 1987; Stop 2011
caatcctcaacagctgaaagttcaa

SEQ ID NO: 103870 - DNA, 25 bp, Artificial
  probe
  misc_feature (1)..(25): SEQ ID NO: 1006; WAN024C4L_at; Start 1961; Stop 1985
caatatggactgaaccctctactca

SEQ ID NO: 103871 - DNA, 25 bp, Artificial
  probe
  misc_feature (1)..(25): SEQ ID NO: 1006; WAN024C4L_at; Start 2126; Stop 2150
cacaagttcaacagcaaccacaaca

SEQ ID NO: 103872 - DNA, 25 bp, Artificial
  probe
  misc_feature (1)..(25): SEQ ID NO: 1006; WAN024C4L_at; Start 2049; Stop 2073
taatgctccagcaactgatcctaat

SEQ ID NO: 103873 - DNA, 25 bp, Artificial
  probe
  misc_feature (1)..(25): SEQ ID NO: 1006; WAN024C4L_at; Start 2001; Stop 2025
tgaaagttcaactacacaggcaagt

SEQ ID NO: 103874 - DNA, 25 bp, Artificial
  probe
  misc_feature (1)..(25): SEQ ID NO: 1006; WAN024C4L_at; Start 1786; Stop 1810
tggacaggttattcgaatcgtttaa

SEQ ID NO: 103875 - DNA, 25 bp, Artificial
  probe
  misc_feature (1)..(25): SEQ ID NO: 1006; WAN024C4L_at; Start 2055; Stop 2079
tccagcaactgatcctaatcaagga

SEQ ID NO: 103876 - DNA, 25 bp, Artificial
  probe
  misc_feature (1)..(25): SEQ ID NO: 1006; WAN024C4L_at; Start 1945; Stop 1969
aaaaatggagctcgcccaatatgga

SEQ ID NO: 103877 - DNA, 25 bp, Artificial
  probe
  misc_feature (1)..(25): SEQ ID NO: 1006; WAN024C4L_at; Start 1104; Stop 1128
gggttctgctatgaaaccaatcacc

SEQ ID NO: 103878 - DNA, 25 bp, Artificial
  probe
  misc_feature (1)..(25): SEQ ID NO: 1006; WAN024C4L_at; Start 1416; Stop 1440
taataaacaatacggagcaagtagt

SEQ ID NO: 103879 - DNA, 25 bp, Artificial
  probe
  misc_feature (1)..(25): SEQ ID NO: 1006; WAN024C4L_at; Start 1966; Stop 1990
tggactgaaccctctactcaacaat

SEQ ID NO: 103880 - DNA, 25 bp, Artificial
  probe
  misc_feature (1)..(25): SEQ ID NO: 1006; WAN024C4L_at; Start 1409; Stop 1433
cagaatctaataaacaatacggagc

SEQ ID NO: 103881 - DNA, 25 bp, Artificial
  probe
  misc_feature (1)..(25): SEQ ID NO: 1006; WAN024C4L_at; Start 1950; Stop 1974
tggagctcgcccaatatggactgaa

SEQ ID NO: 103882 - DNA, 25 bp, Artificial
  probe
  misc_feature (1)..(25): SEQ ID NO: 1006; WAN024C4L_at; Start 1780; Stop 1804
gctgtatggacaggttattcgaatc

SEQ ID NO: 103883 - DNA, 25 bp, Artificial
  probe
  misc_feature (1)..(25): SEQ ID NO: 1006; WAN024C4L_at; Start 2035; Stop 2059
ggtcaacaacccaataatgctccag

SEQ ID NO: 103884 - DNA, 25 bp, Artificial
  probe
  misc_feature (1)..(25): SEQ ID NO: 1006; WAN024C4L_at; Start 1800; Stop 1824
gaatcgtttaactcctatcgttgga

SEQ ID NO: 103885 - DNA, 25 bp, Artificial
  probe
  misc_feature (1)..(25): SEQ ID NO: 1006; WAN024C4L_at; Start 2038; Stop 2062
caacaacccaataatgctccagcaa

SEQ ID NO: 103886 - DNA, 25 bp, Artificial
  probe
  misc_feature (1)..(25): SEQ ID NO: 1006; WAN024C4L_at; Start 1978; Stop 2002
tctactcaacaatcctcaacagctg

SEQ ID NO: 103887 - DNA, 25 bp, Artificial
  probe
  misc_feature (1)..(25): SEQ ID NO: 1006; WAN024C4L_at; Start 2059; Stop 2083
gcaactgatcctaatcaaggacaag

SEQ ID NO: 103888 - DNA, 25 bp, Artificial
  probe
  misc_feature (1)..(25): SEQ ID NO: 1006; WAN024C4L_at; Start 1957; Stop 1981
cgcccaatatggactgaaccctcta

SEQ ID NO: 103889 - DNA, 25 bp, Artificial
  probe
  misc_feature (1)..(25): SEQ ID NO: 3457; WAN024C4M_at; Start 436; Stop 460
gactatcctgtaatgcactattcaa

SEQ ID NO: 103890 - DNA, 25 bp, Artificial
  probe
  misc_feature (1)..(25): SEQ ID NO: 3457; WAN024C4M_at; Start 857; Stop 881
tatggacgggctacacaaatcgtct

SEQ ID NO: 103891 - DNA, 25 bp, Artificial
  probe
  misc_feature (1)..(25): SEQ ID NO: 3457; WAN024C4M_at; Start 861; Stop 885
gacgggctacacaaatcgtctcaca

SEQ ID NO: 103892 - DNA, 25 bp, Artificial
  probe
  misc_feature (1)..(25): SEQ ID NO: 3457; WAN024C4M_at; Start 516; Stop 540
aaaaatggccactgcctatgccgca

SEQ ID NO: 103893 - DNA, 25 bp, Artificial
  probe
  misc_feature (1)..(25): SEQ ID NO: 3457; WAN024C4M_at; Start 519; Stop 543
aatggccactgcctatgccgcattc

SEQ ID NO: 103894 - DNA, 25 bp, Artificial
  probe
  misc_feature (1)..(25): SEQ ID NO: 3457; WAN024C4M_at; Start 460; Stop 484
aatgctatttcaagtaatactaccg

SEQ ID NO: 103895 - DNA, 25 bp, Artificial
  probe
  misc_feature (1)..(25): SEQ ID NO: 3457; WAN024C4M_at; Start 902; Stop 926
gtctcacagttgctgccaaagtcta

SEQ ID NO: 103896 - DNA, 25 bp, Artificial
  probe
  misc_feature (1)..(25): SEQ ID NO: 3457; WAN024C4M_at; Start 850; Stop 874
atggctgtatggacgggctacacaa

SEQ ID NO: 103897 - DNA, 25 bp, Artificial
  probe
  misc_feature (1)..(25): SEQ ID NO: 3457; WAN024C4M_at; Start 468; Stop 492
ttcaagtaatactaccgaatctagt

SEQ ID NO: 103898 - DNA, 25 bp, Artificial
  probe
  misc_feature (1)..(25): SEQ ID NO: 3457; WAN024C4M_at; Start 859; Stop 883
tggacgggctacacaaatcgtctca

SEQ ID NO: 103899 - DNA, 25 bp, Artificial
  probe
  misc_feature (1)..(25): SEQ ID NO: 3457; WAN024C4M_at; Start 428; Stop 452
taggaatcgactatcctgtaatgca

SEQ ID NO: 103900 - DNA, 25 bp, Artificial
  probe
  misc_feature (1)..(25): SEQ ID NO: 3457; WAN024C4M_at; Start 479; Stop 503
ctaccgaatctagtaaacagtacgg

SEQ ID NO: 103901 - DNA, 25 bp, Artificial
  probe
  misc_feature (1)..(25): SEQ ID NO: 3457; WAN024C4M_at; Start 462; Stop 486
tgctatttcaagtaatactaccgaa

SEQ ID NO: 103902 - DNA, 25 bp, Artificial
  probe
  misc_feature (1)..(25): SEQ ID NO: 3457; WAN024C4M_at; Start 868; Stop 892
tacacaaatcgtctcacaccaattg

SEQ ID NO: 103903 - DNA, 25 bp, Artificial
  probe
  misc_feature (1)..(25): SEQ ID NO: 3457; WAN024C4M_at; Start 906; Stop 930
cacagttgctgccaaagtctatcgt

SEQ ID NO: 103904 - DNA, 25 bp, Artificial
  probe
  misc_feature (1)..(25): SEQ ID NO: 3457; WAN024C4M_at; Start 898; Stop 922
gatggtctcacagttgctgccaaag

SEQ ID NO: 103905 - DNA, 25 bp, Artificial
  probe
  misc_feature (1)..(25): SEQ ID NO: 3457; WAN024C4M_at; Start 864; Stop 888
gggctacacaaatcgtctcacacca

SEQ ID NO: 103906 - DNA, 25 bp, Artificial
  probe
  misc_feature (1)..(25): SEQ ID NO: 3457; WAN024C4M_at; Start 881; Stop 905
tcacaccaattgtaggggatggtct

SEQ ID NO: 103907 - DNA, 25 bp, Artificial
  probe
  misc_feature (1)..(25): SEQ ID NO: 3457; WAN024C4M_at; Start 487; Stop 511
tctagtaaacagtacggggcaagta

SEQ ID NO: 103908 - DNA, 25 bp, Artificial
  probe
  misc_feature (1)..(25): SEQ ID NO: 3457; WAN024C4M_at; Start 873; Stop 897
aaatcgtctcacaccaattgtaggg

SEQ ID NO: 103909 - DNA, 25 bp, Artificial
  probe
  misc_feature (1)..(25): SEQ ID NO: 3457; WAN024C4M_at; Start 900; Stop 924
tggtctcacagttgctgccaaagtc

SEQ ID NO: 103910 - DNA, 25 bp, Artificial
  probe
  misc_feature (1)..(25): SEQ ID NO: 3457; WAN024C4M_at; Start 449; Stop 473
tgcactattcaaatgctatttcaag

SEQ ID NO: 103911 - DNA, 25 bp, Artificial
  probe
  misc_feature (1)..(25): SEQ ID NO: 3457; WAN024C4M_at; Start 424; Stop 448
ggtttaggaatcgactatcctgtaa

SEQ ID NO: 103912 - DNA, 25 bp, Artificial
  probe
  misc_feature (1)..(25): SEQ ID NO: 3457; WAN024C4M_at; Start 896; Stop 920
gggatggtctcacagttgctgccaa

SEQ ID NO: 103913 - DNA, 25 bp, Artificial
  probe
  misc_feature (1)..(25): SEQ ID NO: 3457; WAN024C4M_at; Start 434; Stop 458
tcgactatcctgtaatgcactattc

SEQ ID NO: 103914 - DNA, 25 bp, Artificial
  probe
  misc_feature (1)..(25): SEQ ID NO: 3457; WAN024C4M_at; Start 846; Stop 870
ttcaatggctgtatggacgggctac

SEQ ID NO: 103915 - DNA, 25 bp, Artificial
  probe
  misc_feature (1)..(25): SEQ ID NO: 3457; WAN024C4M_at; Start 431; Stop 455
gaatcgactatcctgtaatgcacta

SEQ ID NO: 103916 - DNA, 25 bp, Artificial
  probe
  misc_feature (1)..(25): SEQ ID NO: 3457; WAN024C4M_at; Start 510; Stop 534
tagtgaaaaaatggccactgcctat

SEQ ID NO: 103917 - DNA, 25 bp, Artificial
  probe
  misc_feature (1)..(25): SEQ ID NO: 3457; WAN024C4M_at; Start 393; Stop 417
tggtttagatagagctaaaagtttc

SEQ ID NO: 103918 - DNA, 25 bp, Artificial
  probe
  misc_feature (1)..(25): SEQ ID NO: 3457; WAN024C4M_at; Start 514; Stop 538
gaaaaaatggccactgcctatgccg

SEQ ID NO: 103919 - DNA, 25 bp, Artificial
  probe
  misc_feature (1)..(25): SEQ ID NO: 3457; WAN024C4M_at; Start 442; Stop 466
cctgtaatgcactattcaaatgcta

SEQ ID NO: 103920 - DNA, 25 bp, Artificial
  probe
  misc_feature (1)..(25): SEQ ID NO: 3457; WAN024C4M_at; Start 400; Stop 424
gatagagctaaaagtttcctaaatg

SEQ ID NO: 103921 - DNA, 25 bp, Artificial
  probe
  misc_feature (1)..(25): SEQ ID NO: 3457; WAN024C4M_at; Start 848; Stop 872
caatggctgtatggacgggctacac

SEQ ID NO: 103922 - DNA, 25 bp, Artificial
  probe
  misc_feature (1)..(25): SEQ ID NO: 3457; WAN024C4M_at; Start 844; Stop 868
tattcaatggctgtatggacgggct

SEQ ID NO: 103923 - DNA, 25 bp, Artificial
  probe
  misc_feature (1)..(25): SEQ ID NO: 5094; WAN024C4N_at; Start 129; Stop 153
tgtcggtcatcatataggctgtcgt

SEQ ID NO: 103924 - DNA, 25 bp, Artificial
  probe
  misc_feature (1)..(25): SEQ ID NO: 5094; WAN024C4N_at; Start 81; Stop 105
caagataggcatttcgtccagttcc

SEQ ID NO: 103925 - DNA, 25 bp, Artificial
  probe
  misc_feature (1)..(25): SEQ ID NO: 5094; WAN024C4N_at; Start 182; Stop 206
gagaactctttttcactcccatcac

SEQ ID NO: 103926 - DNA, 25 bp, Artificial
  probe
  misc_feature (1)..(25): SEQ ID NO: 5094; WAN024C4N_at; Start 263; Stop 287
gcagcgtaagcagcagccatctttt

SEQ ID NO: 103927 - DNA, 25 bp, Artificial
  probe
  misc_feature (1)..(25): SEQ ID NO: 5094; WAN024C4N_at; Start 112; Stop 136
caagactgttttcatcatgtcggtc

SEQ ID NO: 103928 - DNA, 25 bp, Artificial
  probe
  misc_feature (1)..(25): SEQ ID NO: 5094; WAN024C4N_at; Start 52; Stop 76
tcctgttttaccagcctgagggagc

SEQ ID NO: 103929 - DNA, 25 bp, Artificial
  probe
  misc_feature (1)..(25): SEQ ID NO: 5094; WAN024C4N_at; Start 256; Stop 280
tgcaaaggcagcgtaagcagcagcc

SEQ ID NO: 103930 - DNA, 25 bp, Artificial
  probe
  misc_feature (1)..(25): SEQ ID NO: 5094; WAN024C4N_at; Start 239; Stop 263
tagtaagttccaccatttgcaaagg

SEQ ID NO: 103931 - DNA, 25 bp, Artificial
  probe
  misc_feature (1)..(25): SEQ ID NO: 5094; WAN024C4N_at; Start 252; Stop 276
catttgcaaaggcagcgtaagcagc

SEQ ID NO: 103932 - DNA, 25 bp, Artificial
  probe
  misc_feature (1)..(25): SEQ ID NO: 5094; WAN024C4N_at; Start 68; Stop 92
tgagggagccaagcaagataggcat

SEQ ID NO: 103933 - DNA, 25 bp, Artificial
  probe
  misc_feature (1)..(25): SEQ ID NO: 5094; WAN024C4N_at; Start 2; Stop 26
tgagaggtcttgatgtggttttcaa

SEQ ID NO: 103934 - DNA, 25 bp, Artificial
  probe
  misc_feature (1)..(25): SEQ ID NO: 5094; WAN024C4N_at; Start 84; Stop 108
gataggcatttcgtccagttccata

SEQ ID NO: 103935 - DNA, 25 bp, Artificial
  probe
  misc_feature (1)..(25): SEQ ID NO: 5094; WAN024C4N_at; Start 200; Stop 224
ccatcactaaagacgactttatgga

SEQ ID NO: 103936 - DNA, 25 bp, Artificial
  probe
  misc_feature (1)..(25): SEQ ID NO: 5094; WAN024C4N_at; Start 242; Stop 266
taagttccaccatttgcaaaggcag

SEQ ID NO: 103937 - DNA, 25 bp, Artificial
  probe
  misc_feature (1)..(25): SEQ ID NO: 5094; WAN024C4N_at; Start 32; Stop 56
tcgtctgtatagttagaggttcctg

SEQ ID NO: 103938 - DNA, 25 bp, Artificial
  probe
  misc_feature (1)..(25): SEQ ID NO: 5094; WAN024C4N_at; Start 193; Stop 217
ttcactcccatcactaaagacgact

SEQ ID NO: 103939 - DNA, 25 bp, Artificial
  probe
  misc_feature (1)..(25): SEQ ID NO: 5094; WAN024C4N_at; Start 13; Stop 37
gatgtggttttcaatttcctcgtct

SEQ ID NO: 103940 - DNA, 25 bp, Artificial
  probe
  misc_feature (1)..(25): SEQ ID NO: 5094; WAN024C4N_at; Start 123; Stop 147
tcatcatgtcggtcatcatataggc

SEQ ID NO: 103941 - DNA, 25 bp, Artificial
  probe
  misc_feature (1)..(25): SEQ ID NO: 5094; WAN024C4N_at; Start 45; Stop 69
tagaggttcctgttttaccagcctg

SEQ ID NO: 103942 - DNA, 25 bp, Artificial
  probe
  misc_feature (1)..(25): SEQ ID NO: 5094; WAN024C4N_at; Start 55; Stop 79
tgttttaccagcctgagggagccaa

SEQ ID NO: 103943 - DNA, 25 bp, Artificial
  probe
  misc_feature (1)..(25): SEQ ID NO: 5094; WAN024C4N_at; Start 24; Stop 48
caatttcctcgtctgtatagttaga

SEQ ID NO: 103944 - DNA, 25 bp, Artificial
  probe
  misc_feature (1)..(25): SEQ ID NO: 5094; WAN024C4N_at; Start 245; Stop 269
gttccaccatttgcaaaggcagcgt

SEQ ID NO: 103945 - DNA, 25 bp, Artificial
  probe
  misc_feature (1)..(25): SEQ ID NO: 5094; WAN024C4N_at; Start 211; Stop 235
gacgactttatggatatacattggt

SEQ ID NO: 103946 - DNA, 25 bp, Artificial
  probe
  misc_feature (1)..(25): SEQ ID NO: 5094; WAN024C4N_at; Start 167; Stop 191
cgagttccgacattagagaactctt

SEQ ID NO: 103947 - DNA, 25 bp, Artificial
  probe
  misc_feature (1)..(25): SEQ ID NO: 5094; WAN024C4N_at; Start 163; Stop 187
ggcacgagttccgacattagagaac

SEQ ID NO: 103948 - DNA, 25 bp, Artificial
  probe
  misc_feature (1)..(25): SEQ ID NO: 5094; WAN024C4N_at; Start 288; Stop 312
cactacttgctccatattttttgtc

SEQ ID NO: 103949 - DNA, 25 bp, Artificial
  probe
  misc_feature (1)..(25): SEQ ID NO: 5094; WAN024C4N_at; Start 76; Stop 100
ccaagcaagataggcatttcgtcca

SEQ ID NO: 103950 - DNA, 25 bp, Artificial
  probe
  misc_feature (1)..(25): SEQ ID NO: 5094; WAN024C4N_at; Start 63; Stop 87
cagcctgagggagccaagcaagata

SEQ ID NO: 103951 - DNA, 25 bp, Artificial
  probe
  misc_feature (1)..(25): SEQ ID NO: 5094; WAN024C4N_at; Start 278; Stop 302
gccatcttttcactacttgctccat

SEQ ID NO: 103952 - DNA, 25 bp, Artificial
  probe
  misc_feature (1)..(25): SEQ ID NO: 5094; WAN024C4N_at; Start 158; Stop 182
ttcatggcacgagttccgacattag

SEQ ID NO: 103953 - DNA, 25 bp, Artificial
  probe
  misc_feature (1)..(25): SEQ ID NO: 5094; WAN024C4N_at; Start 132; Stop 156
cggtcatcatataggctgtcgtttc

SEQ ID NO: 103954 - DNA, 25 bp, Artificial
  probe
  misc_feature (1)..(25): SEQ ID NO: 5094; WAN024C4N_at; Start 227; Stop 251
tacattggtttatagtaagttccac

SEQ ID NO: 103955 - DNA, 25 bp, Artificial
  probe
  misc_feature (1)..(25): SEQ ID NO: 5094; WAN024C4N_at; Start 272; Stop 296
gcagcagccatcttttcactacttg

SEQ ID NO: 103956 - DNA, 25 bp, Artificial
  probe
  misc_feature (1)..(25): SEQ ID NO: 5094; WAN024C4N_at; Start 58; Stop 82
tttaccagcctgagggagccaagca

SEQ ID NO: 103957 - DNA, 25 bp, Artificial
  probe
  misc_feature (1)..(25): SEQ ID NO: 1174; WAN024C4O_at; Start 363; Stop 387
agggtcaaccttaacccagcagttg

SEQ ID NO: 103958 - DNA, 25 bp, Artificial
  probe
  misc_feature (1)..(25): SEQ ID NO: 1174; WAN024C4O_at; Start 552; Stop 576
gacagcagcccaaaattactatgga

SEQ ID NO: 103959 - DNA, 25 bp, Artificial
  probe
  misc_feature (1)..(25): SEQ ID NO: 1174; WAN024C4O_at; Start 1283; Stop 1307
cacgtaatgttacagcagttgaaac

SEQ ID NO: 103960 - DNA, 25 bp, Artificial
  probe
  misc_feature (1)..(25): SEQ ID NO: 1174; WAN024C4O_at; Start 177; Stop 201
taacgaactcattgccgatctgggc

SEQ ID NO: 103961 - DNA, 25 bp, Artificial
  probe
  misc_feature (1)..(25): SEQ ID NO: 1174; WAN024C4O_at; Start 100; Stop 124
tattttgtaagcaaagctccagccc

SEQ ID NO: 103962 - DNA, 25 bp, Artificial
  probe
  misc_feature (1)..(25): SEQ ID NO: 1174; WAN024C4O_at; Start 243; Stop 267
tgatttagtcaaagccatcgtgtct

SEQ ID NO: 103963 - DNA, 25 bp, Artificial
  probe
  misc_feature (1)..(25): SEQ ID NO: 1174; WAN024C4O_at; Start 1895; Stop 1919
gagattggacgatgccagacggcct

SEQ ID NO: 103964 - DNA, 25 bp, Artificial
  probe
  misc_feature (1)..(25): SEQ ID NO: 1174; WAN024C4O_at; Start 347; Stop 371
gcaactctttacaaggagggtcaac

SEQ ID NO: 103965 - DNA, 25 bp, Artificial
  probe
  misc_feature (1)..(25): SEQ ID NO: 1174; WAN024C4O_at; Start 451; Stop 475
gcatggttggctgttcaattggaac

SEQ ID NO: 103966 - DNA, 25 bp, Artificial
  probe
  misc_feature (1)..(25): SEQ ID NO: 1174; WAN024C4O_at; Start 112; Stop 136
aaagctccagccctatcagatagta

SEQ ID NO: 103967 - DNA, 25 bp, Artificial
  probe
  misc_feature (1)..(25): SEQ ID NO: 1174; WAN024C4O_at; Start 713; Stop 737
ggcaagattacattagtgctgagca

SEQ ID NO: 103968 - DNA, 25 bp, Artificial
  probe
  misc_feature (1)..(25): SEQ ID NO: 1174; WAN024C4O_at; Start 760; Stop 784
cctatcactgatggtttacaaagtc

SEQ ID NO: 103969 - DNA, 25 bp, Artificial
  probe
  misc_feature (1)..(25): SEQ ID NO: 1174; WAN024C4O_at; Start 665; Stop 689
cagaatcagcattggagcgtcgtaa

SEQ ID NO: 103970 - DNA, 25 bp, Artificial
  probe
  misc_feature (1)..(25): SEQ ID NO: 1174; WAN024C4O_at; Start 128; Stop 152
cagatagtaagttagttgcgacaac

SEQ ID NO: 103971 - DNA, 25 bp, Artificial
  probe
  misc_feature (1)..(25): SEQ ID NO: 1174; WAN024C4O_at; Start 1411; Stop 1435
gaatctaacaaacattacggtgcaa

SEQ ID NO: 103972 - DNA, 25 bp, Artificial
  probe
  misc_feature (1)..(25): SEQ ID NO: 1174; WAN024C4O_at; Start 433; Stop 457
tcccgaaaagcacaagaagcatggt

SEQ ID NO: 103973 - DNA, 25 bp, Artificial
  probe
  misc_feature (1)..(25): SEQ ID NO: 1174; WAN024C4O_at; Start 649; Stop 673
gatccttactctcatccagaatcag

SEQ ID NO: 103974 - DNA, 25 bp, Artificial
  probe
  misc_feature (1)..(25): SEQ ID NO: 1174; WAN024C4O_at; Start 147; Stop 171
gacaacttctagcaagatttacgac

SEQ ID NO: 103975 - DNA, 25 bp, Artificial
  probe
  misc_feature (1)..(25): SEQ ID NO: 1174; WAN024C4O_at; Start 1327; Stop 1351
gatcgagccaaaactttcctaaatg

SEQ ID NO: 103976 - DNA, 25 bp, Artificial
  probe
  misc_feature (1)..(25): SEQ ID NO: 1174; WAN024C4O_at; Start 318; Stop 342
catgggtgccttcttacgtaactta

SEQ ID NO: 103977 - DNA, 25 bp, Artificial
  probe
  misc_feature (1)..(25): SEQ ID NO: 1174; WAN024C4O_at; Start 586; Stop 610
aaagacctctctctgcctcaattag

SEQ ID NO: 103978 - DNA, 25 bp, Artificial
  probe
  misc_feature (1)..(25): SEQ ID NO: 1174; WAN024C4O_at; Start 1346; Stop 1370
taaatggcttaggtatcgattaccc

SEQ ID NO: 103979 - DNA, 25 bp, Artificial
  probe
  misc_feature (1)..(25): SEQ ID NO: 1174; WAN024C4O_at; Start 304; Stop 328
gatacgattcggatcatgggtgcct

SEQ ID NO: 103980 - DNA, 25 bp, Artificial
  probe
  misc_feature (1)..(25): SEQ ID NO: 1174; WAN024C4O_at; Start 1681; Stop 1705
tctaactatactgatgacgaaatcg

SEQ ID NO: 103981 - DNA, 25 bp, Artificial
  probe
  misc_feature (1)..(25): SEQ ID NO: 1174; WAN024C4O_at; Start 1554; Stop 1578
tggtacacgagctatgaaagaaact

SEQ ID NO: 103982 - DNA, 25 bp, Artificial
  probe
  misc_feature (1)..(25): SEQ ID NO: 1174; WAN024C4O_at; Start 273; Stop 297
ggaccatcgcttctttgatcacaga

SEQ ID NO: 103983 - DNA, 25 bp, Artificial
  probe
  misc_feature (1)..(25): SEQ ID NO: 1174; WAN024C4O_at; Start 1627; Stop 1651
accggacgtggtgcttacctaccat

SEQ ID NO: 103984 - DNA, 25 bp, Artificial
  probe
  misc_feature (1)..(25): SEQ ID NO: 1174; WAN024C4O_at; Start 1361; Stop 1385
tcgattacccaagcatacactatgc

SEQ ID NO: 103985 - DNA, 25 bp, Artificial
  probe
  misc_feature (1)..(25): SEQ ID NO: 1174; WAN024C4O_at; Start 1456; Stop 1480
gcttatgccgcctttgctaatggtg

SEQ ID NO: 103986 - DNA, 25 bp, Artificial
  probe
  misc_feature (1)..(25): SEQ ID NO: 1174; WAN024C4O_at; Start 258; Stop 282
catcgtgtctatcgaggaccatcgc

SEQ ID NO: 103987 - DNA, 25 bp, Artificial
  probe
  misc_feature (1)..(25): SEQ ID NO: 1174; WAN024C4O_at; Start 1910; Stop 1934
cagacggcctgttccgaaatggaga

SEQ ID NO: 103988 - DNA, 25 bp, Artificial
  probe
  misc_feature (1)..(25): SEQ ID NO: 1174; WAN024C4O_at; Start 420; Stop 444
ggatcaaaacctctcccgaaaagca

SEQ ID NO: 103989 - DNA, 25 bp, Artificial
  probe
  misc_feature (1)..(25): SEQ ID NO: 1174; WAN024C4O_at; Start 786; Stop 810
taagtcgactgctacttatccagca

SEQ ID NO: 103990 - DNA, 25 bp, Artificial
  probe
  misc_feature (1)..(25): SEQ ID NO: 1174; WAN024C4O_at; Start 614; Stop 638
tgctagcaggtatgcctcaggcacc

SEQ ID NO: 103991 - DNA, 25 bp, Artificial
  probe
  misc_feature (1)..(25): SEQ ID NO: 1151; WAN024C4P_at; Start 1894; Stop 1918
tggagattggacaatgcctgaagga

SEQ ID NO: 103992 - DNA, 25 bp, Artificial
  probe
  misc_feature (1)..(25): SEQ ID NO: 1151; WAN024C4P_at; Start 2036; Stop 2060
caagcaccagcaacaagtcctgatg

SEQ ID NO: 103993 - DNA, 25 bp, Artificial
  probe
  misc_feature (1)..(25): SEQ ID NO: 1151; WAN024C4P_at; Start 2076; Stop 2100
aaaaccaagcaccaaatgcacccgg

SEQ ID NO: 103994 - DNA, 25 bp, Artificial
  probe
  misc_feature (1)..(25): SEQ ID NO: 1151; WAN024C4P_at; Start 1030; Stop 1054
acaacttggtgctcgtcatcaagca

SEQ ID NO: 103995 - DNA, 25 bp, Artificial
  probe
  misc_feature (1)..(25): SEQ ID NO: 1151; WAN024C4P_at; Start 1027; Stop 1051
cgcacaacttggtgctcgtcatcaa

SEQ ID NO: 103996 - DNA, 25 bp, Artificial
  probe
  misc_feature (1)..(25): SEQ ID NO: 1151; WAN024C4P_at; Start 2041; Stop 2065
accagcaacaagtcctgatgctagt

SEQ ID NO: 103997 - DNA, 25 bp, Artificial
  probe
  misc_feature (1)..(25): SEQ ID NO: 1151; WAN024C4P_at; Start 1063; Stop 1087
ttcattcggtaccaaccaggccgta

SEQ ID NO: 103998 - DNA, 25 bp, Artificial
  probe
  misc_feature (1)..(25): SEQ ID NO: 1151; WAN024C4P_at; Start 1924; Stop 1948
tagaaacgggcagttcgtattccaa

SEQ ID NO: 103999 - DNA, 25 bp, Artificial
  probe
  misc_feature (1)..(25): SEQ ID NO: 1151; WAN024C4P_at; Start 1057; Stop 1081
taatgtttcattcggtaccaaccag

SEQ ID NO: 104000 - DNA, 25 bp, Artificial
  probe
  misc_feature (1)..(25): SEQ ID NO: 1151; WAN024C4P_at; Start 1929; Stop 1953
acgggcagttcgtattccaaaatgg

SEQ ID NO: 104001 - DNA, 25 bp, Artificial
  probe
  misc_feature (1)..(25): SEQ ID NO: 1151; WAN024C4P_at; Start 1037; Stop 1061
ggtgctcgtcatcaagcaagtaatg

SEQ ID NO: 104002 - DNA, 25 bp, Artificial
  probe
  misc_feature (1)..(25): SEQ ID NO: 1151; WAN024C4P_at; Start 1065; Stop 1089
cattcggtaccaaccaggccgtaga

SEQ ID NO: 104003 - DNA, 25 bp, Artificial
  probe
  misc_feature (1)..(25): SEQ ID NO: 1151; WAN024C4P_at; Start 2032; Stop 2056
tagccaagcaccagcaacaagtcct

SEQ ID NO: 104004 - DNA, 25 bp, Artificial
  probe
  misc_feature (1)..(25): SEQ ID NO: 1151; WAN024C4P_at; Start 1903; Stop 1927
gacaatgcctgaaggattatataga

SEQ ID NO: 104005 - DNA, 25 bp, Artificial
  probe
  misc_feature (1)..(25): SEQ ID NO: 1151; WAN024C4P_at; Start 1046; Stop 1070
catcaagcaagtaatgtttcattcg

SEQ ID NO: 104006 - DNA, 25 bp, Artificial
  probe
  misc_feature (1)..(25): SEQ ID NO: 1151; WAN024C4P_at; Start 1891; Stop 1915
tcctggagattggacaatgcctgaa

SEQ ID NO: 104007 - DNA, 25 bp, Artificial
  probe
  misc_feature (1)..(25): SEQ ID NO: 1151; WAN024C4P_at; Start 1897; Stop 1921
agattggacaatgcctgaaggatta

SEQ ID NO: 104008 - DNA, 25 bp, Artificial
  probe
  misc_feature (1)..(25): SEQ ID NO: 1151; WAN024C4P_at; Start 2078; Stop 2102
aaccaagcaccaaatgcacccggag

SEQ ID NO: 104009 - DNA, 25 bp, Artificial
  probe
  misc_feature (1)..(25): SEQ ID NO: 1151; WAN024C4P_at; Start 1916; Stop 1940
ggattatatagaaacgggcagttcg

SEQ ID NO: 104010 - DNA, 25 bp, Artificial
  probe
  misc_feature (1)..(25): SEQ ID NO: 1151; WAN024C4P_at; Start 2039; Stop 2063
gcaccagcaacaagtcctgatgcta

SEQ ID NO: 104011 - DNA, 25 bp, Artificial
  probe
  misc_feature (1)..(25): SEQ ID NO: 1151; WAN024C4P_at; Start 1628; Stop 1652
acaggacgtggagcctacctaccat

SEQ ID NO: 104012 - DNA, 25 bp, Artificial
  probe
  misc_feature (1)..(25): SEQ ID NO: 1151; WAN024C4P_at; Start 1888; Stop 1912
ccatcctggagattggacaatgcct

SEQ ID NO: 104013 - DNA, 25 bp, Artificial
  probe
  misc_feature (1)..(25): SEQ ID NO: 1151; WAN024C4P_at; Start 2034; Stop 2058
gccaagcaccagcaacaagtcctga

SEQ ID NO: 104014 - DNA, 25 bp, Artificial
  probe
  misc_feature (1)..(25): SEQ ID NO: 1151; WAN024C4P_at; Start 2068; Stop 2092
taatggtcaaaaccaagcaccaaat

SEQ ID NO: 104015 - DNA, 25 bp, Artificial
  probe
  misc_feature (1)..(25): SEQ ID NO: 1151; WAN024C4P_at; Start 1928; Stop 1952
aacgggcagttcgtattccaaaatg

SEQ ID NO: 104016 - DNA, 25 bp, Artificial
  probe
  misc_feature (1)..(25): SEQ ID NO: 1151; WAN024C4P_at; Start 1625; Stop 1649
ggaacaggacgtggagcctacctac

SEQ ID NO: 104017 - DNA, 25 bp, Artificial
  probe
  misc_feature (1)..(25): SEQ ID NO: 1151; WAN024C4P_at; Start 1039; Stop 1063
tgctcgtcatcaagcaagtaatgtt

SEQ ID NO: 104018 - DNA, 25 bp, Artificial
  probe
  misc_feature (1)..(25): SEQ ID NO: 1151; WAN024C4P_at; Start 1060; Stop 1084
tgtttcattcggtaccaaccaggcc

SEQ ID NO: 104019 - DNA, 25 bp, Artificial
  probe
  misc_feature (1)..(25): SEQ ID NO: 1151; WAN024C4P_at; Start 1048; Stop 1072
tcaagcaagtaatgtttcattcggt

SEQ ID NO: 104020 - DNA, 25 bp, Artificial
  probe
  misc_feature (1)..(25): SEQ ID NO: 1151; WAN024C4P_at; Start 2088; Stop 2112
caaatgcacccggagccaatcaaaa

SEQ ID NO: 104021 - DNA, 25 bp, Artificial
  probe
  misc_feature (1)..(25): SEQ ID NO: 1151; WAN024C4P_at; Start 2082; Stop 2106
aagcaccaaatgcacccggagccaa

SEQ ID NO: 104022 - DNA, 25 bp, Artificial
  probe
  misc_feature (1)..(25): SEQ ID NO: 1151; WAN024C4P_at; Start 1979; Stop 2003
acatcccaatcatcttcaaccgaaa

SEQ ID NO: 104023 - DNA, 25 bp, Artificial
  probe
  misc_feature (1)..(25): SEQ ID NO: 1151; WAN024C4P_at; Start 2071; Stop 2095
tggtcaaaaccaagcaccaaatgca

SEQ ID NO: 104024 - DNA, 25 bp, Artificial
  probe
  misc_feature (1)..(25): SEQ ID NO: 1151; WAN024C4P_at; Start 1024; Stop 1048
catcgcacaacttggtgctcgtcat

SEQ ID NO: 104025 - DNA, 25 bp, Artificial
  probe
  misc_feature (1)..(25): SEQ ID NO: 1003; WAN024C4Q_at; Start 1864; Stop 1888
tgatgacctacctgtctgaaggaag

SEQ ID NO: 104026 - DNA, 25 bp, Artificial
  probe
  misc_feature (1)..(25): SEQ ID NO: 1003; WAN024C4Q_at; Start 1882; Stop 1906
aaggaagcaatccagaggattggaa

SEQ ID NO: 104027 - DNA, 25 bp, Artificial
  probe
  misc_feature (1)..(25): SEQ ID NO: 1003; WAN024C4Q_at; Start 1890; Stop 1914
aatccagaggattggaatataccag

SEQ ID NO: 104028 - DNA, 25 bp, Artificial
  probe
  misc_feature (1)..(25): SEQ ID NO: 1003; WAN024C4Q_at; Start 1889; Stop 1913
caatccagaggattggaatatacca

SEQ ID NO: 104029 - DNA, 25 bp, Artificial
  probe
  misc_feature (1)..(25): SEQ ID NO: 1003; WAN024C4Q_at; Start 1329; Stop 1353
atagagccaaaaacttcctaaatgg

SEQ ID NO: 104030 - DNA, 25 bp, Artificial
  probe
  misc_feature (1)..(25): SEQ ID NO: 1003; WAN024C4Q_at; Start 1871; Stop 1895
ctacctgtctgaaggaagcaatcca

SEQ ID NO: 104031 - DNA, 25 bp, Artificial
  probe
  misc_feature (1)..(25): SEQ ID NO: 1003; WAN024C4Q_at; Start 1873; Stop 1897
acctgtctgaaggaagcaatccaga

SEQ ID NO: 104032 - DNA, 25 bp, Artificial
  probe
  misc_feature (1)..(25): SEQ ID NO: 1003; WAN024C4Q_at; Start 1904; Stop 1928
gaatataccagaggggctctacaga

SEQ ID NO: 104033 - DNA, 25 bp, Artificial
  probe
  misc_feature (1)..(25): SEQ ID NO: 1003; WAN024C4Q_at; Start 1326; Stop 1350
tagatagagccaaaaacttcctaaa

SEQ ID NO: 104034 - DNA, 25 bp, Artificial
  probe
  misc_feature (1)..(25): SEQ ID NO: 1003; WAN024C4Q_at; Start 1863; Stop 1887
atgatgacctacctgtctgaaggaa

SEQ ID NO: 104035 - DNA, 25 bp, Artificial
  probe
  misc_feature (1)..(25): SEQ ID NO: 1003; WAN024C4Q_at; Start 1878; Stop 1902
tctgaaggaagcaatccagaggatt

SEQ ID NO: 104036 - DNA, 25 bp, Artificial
  probe
  misc_feature (1)..(25): SEQ ID NO: 1003; WAN024C4Q_at; Start 1875; Stop 1899
ctgtctgaaggaagcaatccagagg

SEQ ID NO: 104037 - DNA, 25 bp, Artificial
  probe
  misc_feature (1)..(25): SEQ ID NO: 1003; WAN024C4Q_at; Start 1877; Stop 1901
gtctgaaggaagcaatccagaggat

SEQ ID NO: 104038 - DNA, 25 bp, Artificial
  probe
  misc_feature (1)..(25): SEQ ID NO: 1003; WAN024C4Q_at; Start 1867; Stop 1891
tgacctacctgtctgaaggaagcaa

SEQ ID NO: 104039 - DNA, 25 bp, Artificial
  probe
  misc_feature (1)..(25): SEQ ID NO: 1003; WAN024C4Q_at; Start 1872; Stop 1896
tacctgtctgaaggaagcaatccag

SEQ ID NO: 104040 - DNA, 25 bp, Artificial
  probe
  misc_feature (1)..(25): SEQ ID NO: 1003; WAN024C4Q_at; Start 1894; Stop 1918
cagaggattggaatataccagaggg

SEQ ID NO: 104041 - DNA, 25 bp, Artificial
  probe
  misc_feature (1)..(25): SEQ ID NO: 1003; WAN024C4Q_at; Start 1869; Stop 1893
acctacctgtctgaaggaagcaatc

SEQ ID NO: 104042 - DNA, 25 bp, Artificial
  probe
  misc_feature (1)..(25): SEQ ID NO: 1003; WAN024C4Q_at; Start 1916; Stop 1940
ggggctctacagaaatggagaattc

SEQ ID NO: 104043 - DNA, 25 bp, Artificial
  probe
  misc_feature (1)..(25): SEQ ID NO: 1003; WAN024C4Q_at; Start 1892; Stop 1916
tccagaggattggaatataccagag

SEQ ID NO: 104044 - DNA, 25 bp, Artificial
  probe
  misc_feature (1)..(25): SEQ ID NO: 1003; WAN024C4Q_at; Start 1880; Stop 1904
tgaaggaagcaatccagaggattgg

SEQ ID NO: 104045 - DNA, 25 bp, Artificial
  probe
  misc_feature (1)..(25): SEQ ID NO: 1003; WAN024C4Q_at; Start 1893; Stop 1917
ccagaggattggaatataccagagg

SEQ ID NO: 104046 - DNA, 25 bp, Artificial
  probe
  misc_feature (1)..(25): SEQ ID NO: 1003; WAN024C4Q_at; Start 1868; Stop 1892
gacctacctgtctgaaggaagcaat

SEQ ID NO: 104047 - DNA, 25 bp, Artificial
  probe
  misc_feature (1)..(25): SEQ ID NO: 1003; WAN024C4Q_at; Start 1865; Stop 1889
gatgacctacctgtctgaaggaagc

SEQ ID NO: 104048 - DNA, 25 bp, Artificial
  probe
  misc_feature (1)..(25): SEQ ID NO: 1003; WAN024C4Q_at; Start 1866; Stop 1890
atgacctacctgtctgaaggaagca

SEQ ID NO: 104049 - DNA, 25 bp, Artificial
  probe
  misc_feature (1)..(25): SEQ ID NO: 1003; WAN024C4Q_at; Start 1324; Stop 1348
tttagatagagccaaaaacttccta

SEQ ID NO: 104050 - DNA, 25 bp, Artificial
  probe
  misc_feature (1)..(25): SEQ ID NO: 1003; WAN024C4Q_at; Start 1879; Stop 1903
ctgaaggaagcaatccagaggattg

SEQ ID NO: 104051 - DNA, 25 bp, Artificial
  probe
  misc_feature (1)..(25): SEQ ID NO: 1003; WAN024C4Q_at; Start 1321; Stop 1345
tggtttagatagagccaaaaacttc

SEQ ID NO: 104052 - DNA, 25 bp, Artificial
  probe
  misc_feature (1)..(25): SEQ ID NO: 1003; WAN024C4Q_at; Start 1901; Stop 1925
ttggaatataccagaggggctctac

SEQ ID NO: 104053 - DNA, 25 bp, Artificial
  probe
  misc_feature (1)..(25): SEQ ID NO: 1003; WAN024C4Q_at; Start 1328; Stop 1352
gatagagccaaaaacttcctaaatg

SEQ ID NO: 104054 - DNA, 25 bp, Artificial
  probe
  misc_feature (1)..(25): SEQ ID NO: 1003; WAN024C4Q_at; Start 1911; Stop 1935
ccagaggggctctacagaaatggag

SEQ ID NO: 104055 - DNA, 25 bp, Artificial
  probe
  misc_feature (1)..(25): SEQ ID NO: 1003; WAN024C4Q_at; Start 1874; Stop 1898
cctgtctgaaggaagcaatccagag

SEQ ID NO: 104056 - DNA, 25 bp, Artificial
  probe
  misc_feature (1)..(25): SEQ ID NO: 1003; WAN024C4Q_at; Start 1884; Stop 1908
ggaagcaatccagaggattggaata

SEQ ID NO: 104057 - DNA, 25 bp, Artificial
  probe
  misc_feature (1)..(25): SEQ ID NO: 1003; WAN024C4Q_at; Start 1870; Stop 1894
cctacctgtctgaaggaagcaatcc

SEQ ID NO: 104058 - DNA, 25 bp, Artificial
  probe
  misc_feature (1)..(25): SEQ ID NO: 1003; WAN024C4Q_at; Start 1876; Stop 1900
tgtctgaaggaagcaatccagagga

SEQ ID NO: 104059 - DNA, 25 bp, Artificial
  probe
  misc_feature (1)..(25): SEQ ID NO: 1004; WAN024C4R_at; Start 1524; Stop 1548
cgatggtagctcaaaagaatacgct

SEQ ID NO: 104060 - DNA, 25 bp, Artificial
  probe
  misc_feature (1)..(25): SEQ ID NO: 1004; WAN024C4R_at; Start 1153; Stop 1177
gacatctacgactcaactgcttcga

SEQ ID NO: 104061 - DNA, 25 bp, Artificial
  probe
  misc_feature (1)..(25): SEQ ID NO: 1004; WAN024C4R_at; Start 1946; Stop 1970
aaaaaggtgctcgttctgcatggac

SEQ ID NO: 104062 - DNA, 25 bp, Artificial
  probe
  misc_feature (1)..(25): SEQ ID NO: 1004; WAN024C4R_at; Start 1264; Stop 1288
cagtatgcacttcaacagtcacgta

SEQ ID NO: 104063 - DNA, 25 bp, Artificial
  probe
  misc_feature (1)..(25): SEQ ID NO: 1004; WAN024C4R_at; Start 1825; Stop 1849
gatggcttctatgttgcagctaagg

SEQ ID NO: 104064 - DNA, 25 bp, Artificial
  probe
  misc_feature (1)..(25): SEQ ID NO: 1004; WAN024C4R_at; Start 1595; Stop 1619
cagaaatgatgaagactgtcttggc

SEQ ID NO: 104065 - DNA, 25 bp, Artificial
  probe
  misc_feature (1)..(25): SEQ ID NO: 1004; WAN024C4R_at; Start 1132; Stop 1156
tatgctcctgccttagagtatgaca

SEQ ID NO: 104066 - DNA, 25 bp, Artificial
  probe
  misc_feature (1)..(25): SEQ ID NO: 1004; WAN024C4R_at; Start 1540; Stop 1564
gaatacgctgatcctggtactcgtg

SEQ ID NO: 104067 - DNA, 25 bp, Artificial
  probe
  misc_feature (1)..(25): SEQ ID NO: 1004; WAN024C4R_at; Start 1657; Stop 1681
cctcaagctggtaagactggtacat

SEQ ID NO: 104068 - DNA, 25 bp, Artificial
  probe
  misc_feature (1)..(25): SEQ ID NO: 1004; WAN024C4R_at; Start 2009; Stop 2033
cgagctcgacatcagaaagttcaac

SEQ ID NO: 104069 - DNA, 25 bp, Artificial
  probe
  misc_feature (1)..(25): SEQ ID NO: 1004; WAN024C4R_at; Start 961; Stop 985
gcctatccagacgatgaattgcaag

SEQ ID NO: 104070 - DNA, 25 bp, Artificial
  probe
  misc_feature (1)..(25): SEQ ID NO: 1004; WAN024C4R_at; Start 1716; Stop 1740
caaaaatactggttatgtagctcca

SEQ ID NO: 104071 - DNA, 25 bp, Artificial
  probe
  misc_feature (1)..(25): SEQ ID NO: 1004; WAN024C4R_at; Start 1625; Stop 1649
gaacgggtcgtggtgcttatctccc

SEQ ID NO: 104072 - DNA, 25 bp, Artificial
  probe
  misc_feature (1)..(25): SEQ ID NO: 1004; WAN024C4R_at; Start 1775; Stop 1799
caatggcggtatggacaggttactc

SEQ ID NO: 104073 - DNA, 25 bp, Artificial
  probe
  misc_feature (1)..(25): SEQ ID NO: 1004; WAN024C4R_at; Start 995; Stop 1019
ccattgttgatgtttctaacgggaa

SEQ ID NO: 104074 - DNA, 25 bp, Artificial
  probe
  misc_feature (1)..(25): SEQ ID NO: 1004; WAN024C4R_at; Start 1759; Stop 1783
tatactcgcaaatattcaatggcgg

SEQ ID NO: 104075 - DNA, 25 bp, Artificial
  probe
  misc_feature (1)..(25): SEQ ID NO: 1004; WAN024C4R_at; Start 876; Stop 900
cacaactgggatggatgtctacaca

SEQ ID NO: 104076 - DNA, 25 bp, Artificial
  probe
  misc_feature (1)..(25): SEQ ID NO: 1004; WAN024C4R_at; Start 1557; Stop 1581
tactcgtgccatgaaagagacgacc

SEQ ID NO: 104077 - DNA, 25 bp, Artificial
  probe
  misc_feature (1)..(25): SEQ ID NO: 1004; WAN024C4R_at; Start 1104; Stop 1128
gggttctgccatgaagccaatcaca

SEQ ID NO: 104078 - DNA, 25 bp, Artificial
  probe
  misc_feature (1)..(25): SEQ ID NO: 1004; WAN024C4R_at; Start 1459; Stop 1483
tacgctgcttttgctaacggtggta

SEQ ID NO: 104079 - DNA, 25 bp, Artificial
  probe
  misc_feature (1)..(25): SEQ ID NO: 1004; WAN024C4R_at; Start 1872; Stop 1896
tctgtctgaggataacaaccctggc

SEQ ID NO: 104080 - DNA, 25 bp, Artificial
  probe
  misc_feature (1)..(25): SEQ ID NO: 1004; WAN024C4R_at; Start 1994; Stop 2018
caacaccagaaagttcgagctcgac

SEQ ID NO: 104081 - DNA, 25 bp, Artificial
  probe
  misc_feature (1)..(25): SEQ ID NO: 1004; WAN024C4R_at; Start 862; Stop 886
ggctataacctgctcacaactggga

SEQ ID NO: 104082 - DNA, 25 bp, Artificial
  probe
  misc_feature (1)..(25): SEQ ID NO: 1004; WAN024C4R_at; Start 1573; Stop 1597
gagacgaccgcctatatgatgacag

SEQ ID NO: 104083 - DNA, 25 bp, Artificial
  probe
  misc_feature (1)..(25): SEQ ID NO: 1004; WAN024C4R_at; Start 1392; Stop 1416
catttcaagtaatacgactgagtca

SEQ ID NO: 104084 - DNA, 25 bp, Artificial
  probe
  misc_feature (1)..(25): SEQ ID NO: 1004; WAN024C4R_at; Start 949; Stop 973
gacgaatacgttgcctatccagacg

SEQ ID NO: 104085 - DNA, 25 bp, Artificial
  probe
  misc_feature (1)..(25): SEQ ID NO: 1004; WAN024C4R_at; Start 1910; Stop 1934
cagaaggtctctatcgaagtggtga

SEQ ID NO: 104086 - DNA, 25 bp, Artificial
  probe
  misc_feature (1)..(25): SEQ ID NO: 1004; WAN024C4R_at; Start 1642; Stop 1666
tatctcccttggctacctcaagctg

SEQ ID NO: 104087 - DNA, 25 bp, Artificial
  probe
  misc_feature (1)..(25): SEQ ID NO: 1004; WAN024C4R_at; Start 1409; Stop 1433
ctgagtcaaacaaaaagtacggagc

SEQ ID NO: 104088 - DNA, 25 bp, Artificial
  probe
  misc_feature (1)..(25): SEQ ID NO: 1004; WAN024C4R_at; Start 1845; Stop 1869
taaggtttaccgttcaatgatgact

SEQ ID NO: 104089 - DNA, 25 bp, Artificial
  probe
  misc_feature (1)..(25): SEQ ID NO: 1004; WAN024C4R_at; Start 1885; Stop 1909
aacaaccctggcgactggactatgc

SEQ ID NO: 104090 - DNA, 25 bp, Artificial
  probe
  misc_feature (1)..(25): SEQ ID NO: 1004; WAN024C4R_at; Start 1048; Stop 1072
caatcaagcaatgtttccttcggaa

SEQ ID NO: 104091 - DNA, 25 bp, Artificial
  probe
  misc_feature (1)..(25): SEQ ID NO: 1004; WAN024C4R_at; Start 1804; Stop 1828
cgcctgactcctatcgttggtgatg

SEQ ID NO: 104092 - DNA, 25 bp, Artificial
  probe
  misc_feature (1)..(25): SEQ ID NO: 1004; WAN024C4R_at; Start 1610; Stop 1634
ctgtcttggcatacggaacgggtcg

SEQ ID NO: 104093 - DNA, 25 bp, Artificial
  probe
  misc_feature (1)..(25): SEQ ID NO: 1002; WAN024C4S_at; Start 1995; Stop 2019
aaacagtagaaactccaagcacaaa

SEQ ID NO: 104094 - DNA, 25 bp, Artificial
  probe
  misc_feature (1)..(25): SEQ ID NO: 1002; WAN024C4S_at; Start 1961; Stop 1985
aacacatggaataattcagtaacac

SEQ ID NO: 104095 - DNA, 25 bp, Artificial
  probe
  misc_feature (1)..(25): SEQ ID NO: 1002; WAN024C4S_at; Start 1983; Stop 2007
cacaacaaacacaaacagtagaaac

SEQ ID NO: 104096 - DNA, 25 bp, Artificial
  probe
  misc_feature (1)..(25): SEQ ID NO: 1002; WAN024C4S_at; Start 1985; Stop 2009
caacaaacacaaacagtagaaactc

SEQ ID NO: 104097 - DNA, 25 bp, Artificial
  probe
  misc_feature (1)..(25): SEQ ID NO: 1002; WAN024C4S_at; Start 1966; Stop 1990
atggaataattcagtaacacaacaa

SEQ ID NO: 104098 - DNA, 25 bp, Artificial
  probe
  misc_feature (1)..(25): SEQ ID NO: 1002; WAN024C4S_at; Start 1962; Stop 1986
acacatggaataattcagtaacaca

SEQ ID NO: 104099 - DNA, 25 bp, Artificial
  probe
  misc_feature (1)..(25): SEQ ID NO: 1002; WAN024C4S_at; Start 1993; Stop 2017
acaaacagtagaaactccaagcaca

SEQ ID NO: 104100 - DNA, 25 bp, Artificial
  probe
  misc_feature (1)..(25): SEQ ID NO: 1002; WAN024C4S_at; Start 1952; Stop 1976
aacgcaaagaacacatggaataatt

SEQ ID NO: 104101 - DNA, 25 bp, Artificial
  probe
  misc_feature (1)..(25): SEQ ID NO: 1002; WAN024C4S_at; Start 1960; Stop 1984
gaacacatggaataattcagtaaca

SEQ ID NO: 104102 - DNA, 25 bp, Artificial
  probe
  misc_feature (1)..(25): SEQ ID NO: 1002; WAN024C4S_at; Start 1965; Stop 1989
catggaataattcagtaacacaaca

SEQ ID NO: 104103 - DNA, 25 bp, Artificial
  probe
  misc_feature (1)..(25): SEQ ID NO: 1002; WAN024C4S_at; Start 1987; Stop 2011
acaaacacaaacagtagaaactcca

SEQ ID NO: 104104 - DNA, 25 bp, Artificial
  probe
  misc_feature (1)..(25): SEQ ID NO: 1002; WAN024C4S_at; Start 1959; Stop 1983
agaacacatggaataattcagtaac

SEQ ID NO: 104105 - DNA, 25 bp, Artificial
  probe
  misc_feature (1)..(25): SEQ ID NO: 1002; WAN024C4S_at; Start 1969; Stop 1993
gaataattcagtaacacaacaaaca

SEQ ID NO: 104106 - DNA, 25 bp, Artificial
  probe
  misc_feature (1)..(25): SEQ ID NO: 1002; WAN024C4S_at; Start 1956; Stop 1980
caaagaacacatggaataattcagt

SEQ ID NO: 104107 - DNA, 25 bp, Artificial
  probe
  misc_feature (1)..(25): SEQ ID NO: 1002; WAN024C4S_at; Start 1996; Stop 2020
aacagtagaaactccaagcacaaat

SEQ ID NO: 104108 - DNA, 25 bp, Artificial
  probe
  misc_feature (1)..(25): SEQ ID NO: 1002; WAN024C4S_at; Start 1980; Stop 2004
taacacaacaaacacaaacagtaga

SEQ ID NO: 104109 - DNA, 25 bp, Artificial
  probe
  misc_feature (1)..(25): SEQ ID NO: 1002; WAN024C4S_at; Start 1977; Stop 2001
cagtaacacaacaaacacaaacagt

SEQ ID NO: 104110 - DNA, 25 bp, Artificial
  probe
  misc_feature (1)..(25): SEQ ID NO: 1002; WAN024C4S_at; Start 1981; Stop 2005
aacacaacaaacacaaacagtagaa

SEQ ID NO: 104111 - DNA, 25 bp, Artificial
  probe
  misc_feature (1)..(25): SEQ ID NO: 1002; WAN024C4S_at; Start 1954; Stop 1978
cgcaaagaacacatggaataattca

SEQ ID NO: 104112 - DNA, 25 bp, Artificial
  probe
  misc_feature (1)..(25): SEQ ID NO: 1002; WAN024C4S_at; Start 1978; Stop 2002
agtaacacaacaaacacaaacagta

SEQ ID NO: 104113 - DNA, 25 bp, Artificial
  probe
  misc_feature (1)..(25): SEQ ID NO: 1002; WAN024C4S_at; Start 1967; Stop 1991
tggaataattcagtaacacaacaaa

SEQ ID NO: 104114 - DNA, 25 bp, Artificial
  probe
  misc_feature (1)..(25): SEQ ID NO: 1002; WAN024C4S_at; Start 1992; Stop 2016
cacaaacagtagaaactccaagcac

SEQ ID NO: 104115 - DNA, 25 bp, Artificial
  probe
  misc_feature (1)..(25): SEQ ID NO: 1002; WAN024C4S_at; Start 1989; Stop 2013
aaacacaaacagtagaaactccaag

SEQ ID NO: 104116 - DNA, 25 bp, Artificial
  probe
  misc_feature (1)..(25): SEQ ID NO: 1002; WAN024C4S_at; Start 1964; Stop 1988
acatggaataattcagtaacacaac

SEQ ID NO: 104117 - DNA, 25 bp, Artificial
  probe
  misc_feature (1)..(25): SEQ ID NO: 1002; WAN024C4S_at; Start 1994; Stop 2018
caaacagtagaaactccaagcacaa

SEQ ID NO: 104118 - DNA, 25 bp, Artificial
  probe
  misc_feature (1)..(25): SEQ ID NO: 1002; WAN024C4S_at; Start 1988; Stop 2012
caaacacaaacagtagaaactccaa

SEQ ID NO: 104119 - DNA, 25 bp, Artificial
  probe
  misc_feature (1)..(25): SEQ ID NO: 1002; WAN024C4S_at; Start 1953; Stop 1977
acgcaaagaacacatggaataattc

SEQ ID NO: 104120 - DNA, 25 bp, Artificial
  probe
  misc_feature (1)..(25): SEQ ID NO: 1002; WAN024C4S_at; Start 1968; Stop 1992
ggaataattcagtaacacaacaaac

SEQ ID NO: 104121 - DNA, 25 bp, Artificial
  probe
  misc_feature (1)..(25): SEQ ID NO: 1002; WAN024C4S_at; Start 1957; Stop 1981
aaagaacacatggaataattcagta

SEQ ID NO: 104122 - DNA, 25 bp, Artificial
  probe
  misc_feature (1)..(25): SEQ ID NO: 1002; WAN024C4S_at; Start 1990; Stop 2014
aacacaaacagtagaaactccaagc

SEQ ID NO: 104123 - DNA, 25 bp, Artificial
  probe
  misc_feature (1)..(25): SEQ ID NO: 1002; WAN024C4S_at; Start 1963; Stop 1987
cacatggaataattcagtaacacaa

SEQ ID NO: 104124 - DNA, 25 bp, Artificial
  probe
  misc_feature (1)..(25): SEQ ID NO: 1002; WAN024C4S_at; Start 1979; Stop 2003
gtaacacaacaaacacaaacagtag

SEQ ID NO: 104125 - DNA, 25 bp, Artificial
  probe
  misc_feature (1)..(25): SEQ ID NO: 1002; WAN024C4S_at; Start 1955; Stop 1979
gcaaagaacacatggaataattcag

SEQ ID NO: 104126 - DNA, 25 bp, Artificial
  probe
  misc_feature (1)..(25): SEQ ID NO: 1002; WAN024C4S_at; Start 1991; Stop 2015
acacaaacagtagaaactccaagca

SEQ ID NO: 104127 - DNA, 25 bp, Artificial
  probe
  misc_feature (1)..(25): SEQ ID NO: 1000; WAN024C4T_at; Start 59; Stop 83
tatttatcacagcagttatgctggg

SEQ ID NO: 104128 - DNA, 25 bp, Artificial
  probe
  misc_feature (1)..(25): SEQ ID NO: 1000; WAN024C4T_at; Start 609; Stop 633
tgccctactagcaggaatgccacag

SEQ ID NO: 104129 - DNA, 25 bp, Artificial
  probe
  misc_feature (1)..(25): SEQ ID NO: 1000; WAN024C4T_at; Start 438; Stop 462
taaagcccaggaagcttggttggct

SEQ ID NO: 104130 - DNA, 25 bp, Artificial
  probe
  misc_feature (1)..(25): SEQ ID NO: 1000; WAN024C4T_at; Start 152; Stop 176
cgtctagtaagattttcgatagtaa

SEQ ID NO: 104131 - DNA, 25 bp, Artificial
  probe
  misc_feature (1)..(25): SEQ ID NO: 1000; WAN024C4T_at; Start 118; Stop 142
ccagccctatctgagagcaaattag

SEQ ID NO: 104132 - DNA, 25 bp, Artificial
  probe
  misc_feature (1)..(25): SEQ ID NO: 1000; WAN024C4T_at; Start 2; Stop 26
tgaacaaacaaactatcctgcgaat

SEQ ID NO: 104133 - DNA, 25 bp, Artificial
  probe
  misc_feature (1)..(25): SEQ ID NO: 1000; WAN024C4T_at; Start 134; Stop 158
gcaaattagtcgcaaccacgtctag

SEQ ID NO: 104134 - DNA, 25 bp, Artificial
  probe
  misc_feature (1)..(25): SEQ ID NO: 1000; WAN024C4T_at; Start 601; Stop 625
cctcaacttgccctactagcaggaa

SEQ ID NO: 104135 - DNA, 25 bp, Artificial
  probe
  misc_feature (1)..(25): SEQ ID NO: 1000; WAN024C4T_at; Start 24; Stop 48
aatagctaagtatgtgagtatctgc

SEQ ID NO: 104136 - DNA, 25 bp, Artificial
  probe
  misc_feature (1)..(25): SEQ ID NO: 1000; WAN024C4T_at; Start 123; Stop 147
cctatctgagagcaaattagtcgca

SEQ ID NO: 104137 - DNA, 25 bp, Artificial
  probe
  misc_feature (1)..(25): SEQ ID NO: 1000; WAN024C4T_at; Start 299; Stop 323
gtgtcgataccatccgaattatagg

SEQ ID NO: 104138 - DNA, 25 bp, Artificial
  probe
  misc_feature (1)..(25): SEQ ID NO: 1000; WAN024C4T_at; Start 129; Stop 153
tgagagcaaattagtcgcaaccacg

SEQ ID NO: 104139 - DNA, 25 bp, Artificial
  probe
  misc_feature (1)..(25): SEQ ID NO: 1000; WAN024C4T_at; Start 32; Stop 56
agtatgtgagtatctgcttcttaac

SEQ ID NO: 104140 - DNA, 25 bp, Artificial
  probe
  misc_feature (1)..(25): SEQ ID NO: 1000; WAN024C4T_at; Start 392; Stop 416
agttgacctatttctcaacttccac

SEQ ID NO: 104141 - DNA, 25 bp, Artificial
  probe
  misc_feature (1)..(25): SEQ ID NO: 1000; WAN024C4T_at; Start 112; Stop 136
aaagccccagccctatctgagagca

SEQ ID NO: 104142 - DNA, 25 bp, Artificial
  probe
  misc_feature (1)..(25): SEQ ID NO: 1000; WAN024C4T_at; Start 378; Stop 402
ccaacaattaattaagttgacctat

SEQ ID NO: 104143 - DNA, 25 bp, Artificial
  probe
  misc_feature (1)..(25): SEQ ID NO: 1000; WAN024C4T_at; Start 140; Stop 164
tagtcgcaaccacgtctagtaagat

SEQ ID NO: 104144 - DNA, 25 bp, Artificial
  probe
  misc_feature (1)..(25): SEQ ID NO: 1000; WAN024C4T_at; Start 75; Stop 99
tatgctgggaggaggcatatttctc

SEQ ID NO: 104145 - DNA, 25 bp, Artificial
  probe
  misc_feature (1)..(25): SEQ ID NO: 1000; WAN024C4T_at; Start 238; Stop 262
cctactgatttggtcaaggctatcg

SEQ ID NO: 104146 - DNA, 25 bp, Artificial
  probe
  misc_feature (1)..(25): SEQ ID NO: 1000; WAN024C4T_at; Start 245; Stop 269
atttggtcaaggctatcgtatcgat

SEQ ID NO: 104147 - DNA, 25 bp, Artificial
  probe
  misc_feature (1)..(25): SEQ ID NO: 1000; WAN024C4T_at; Start 96; Stop 120
tctctattacgtcagcaaagcccca

SEQ ID NO: 104148 - DNA, 25 bp, Artificial
  probe
  misc_feature (1)..(25): SEQ ID NO: 1000; WAN024C4T_at; Start 49; Stop 73
ttcttaactttatttatcacagcag

SEQ ID NO: 104149 - DNA, 25 bp, Artificial
  probe
  misc_feature (1)..(25): SEQ ID NO: 1000; WAN024C4T_at; Start 309; Stop 333
catccgaattataggagctttttta

SEQ ID NO: 104150 - DNA, 25 bp, Artificial
  probe
  misc_feature (1)..(25): SEQ ID NO: 1000; WAN024C4T_at; Start 145; Stop 169
gcaaccacgtctagtaagattttcg

SEQ ID NO: 104151 - DNA, 25 bp, Artificial
  probe
  misc_feature (1)..(25): SEQ ID NO: 1000; WAN024C4T_at; Start 63; Stop 87
tatcacagcagttatgctgggagga

SEQ ID NO: 104152 - DNA, 25 bp, Artificial
  probe
  misc_feature (1)..(25): SEQ ID NO: 1000; WAN024C4T_at; Start 232; Stop 256
gaaattcctactgatttggtcaagg

SEQ ID NO: 104153 - DNA, 25 bp, Artificial
  probe
  misc_feature (1)..(25): SEQ ID NO: 1000; WAN024C4T_at; Start 343; Stop 367
caaaacaactccctccagggaggat

SEQ ID NO: 104154 - DNA, 25 bp, Artificial
  probe
  misc_feature (1)..(25): SEQ ID NO: 1000; WAN024C4T_at; Start 15; Stop 39
tatcctgcgaatagctaagtatgtg

SEQ ID NO: 104155 - DNA, 25 bp, Artificial
  probe
  misc_feature (1)..(25): SEQ ID NO: 1000; WAN024C4T_at; Start 404; Stop 428
tctcaacttccacttctgatcagac

SEQ ID NO: 104156 - DNA, 25 bp, Artificial
  probe
  misc_feature (1)..(25): SEQ ID NO: 1000; WAN024C4T_at; Start 303; Stop 327
cgataccatccgaattataggagct

SEQ ID NO: 104157 - DNA, 25 bp, Artificial
  probe
  misc_feature (1)..(25): SEQ ID NO: 1000; WAN024C4T_at; Start 86; Stop 110
gaggcatatttctctattacgtcag

SEQ ID NO: 104158 - DNA, 25 bp, Artificial
  probe
  misc_feature (1)..(25): SEQ ID NO: 1000; WAN024C4T_at; Start 430; Stop 454
atttcacgtaaagcccaggaagctt

SEQ ID NO: 104159 - DNA, 25 bp, Artificial
  probe
  misc_feature (1)..(25): SEQ ID NO: 1000; WAN024C4T_at; Start 639; Stop 663
gaatcaatacgatccctattctcat

SEQ ID NO: 104160 - DNA, 25 bp, Artificial
  probe
  misc_feature (1)..(25): SEQ ID NO: 1000; WAN024C4T_at; Start 272; Stop 296
aagaccatcgttttttcgatcatcg

SEQ ID NO: 104161 - DNA, 25 bp, Artificial
  probe
  misc_feature (1)..(25): SEQ ID NO: 1005; WAN024C4U_s_at; Start 601; Stop 625
cctcagttagccttgctggctggaa

SEQ ID NO: 104162 - DNA, 25 bp, Artificial
  probe
  misc_feature (1)..(25): SEQ ID NO: 1005; WAN024C4U_s_at; Start 606; Stop 630
gttagccttgctggctggaatgcct

SEQ ID NO: 104163 - DNA, 25 bp, Artificial
  probe
  misc_feature (1)..(25): SEQ ID NO: 1005; WAN024C4U_s_at; Start 655; Stop 679
tattcacatccagaagcagcccaag

SEQ ID NO: 104164 - DNA, 25 bp, Artificial
  probe
  misc_feature (1)..(25): SEQ ID NO: 1005; WAN024C4U_s_at; Start 657; Stop 681
ttcacatccagaagcagcccaagac

SEQ ID NO: 104165 - DNA, 25 bp, Artificial
  probe
  misc_feature (1)..(25): SEQ ID NO: 1005; WAN024C4U_s_at; Start 593; Stop 617
taagtttacctcagttagccttgct

SEQ ID NO: 104166 - DNA, 25 bp, Artificial
  probe
  misc_feature (1)..(25): SEQ ID NO: 1005; WAN024C4U_s_at; Start 638; Stop 662
caaaccaatatgacccctattcaca

SEQ ID NO: 104167 - DNA, 25 bp, Artificial
  probe
  misc_feature (1)..(25): SEQ ID NO: 1005; WAN024C4U_s_at; Start 566; Stop 590
actactatggtaaagacctcaataa

SEQ ID NO: 104168 - DNA, 25 bp, Artificial
  probe
  misc_feature (1)..(25): SEQ ID NO: 1005; WAN024C4U_s_at; Start 571; Stop 595
tatggtaaagacctcaataatttaa

SEQ ID NO: 104169 - DNA, 25 bp, Artificial
  probe
  misc_feature (1)..(25): SEQ ID NO: 1005; WAN024C4U_s_at; Start 564; Stop 588
aaactactatggtaaagacctcaat

SEQ ID NO: 104170 - DNA, 25 bp, Artificial
  probe
  misc_feature (1)..(25): SEQ ID NO: 1005; WAN024C4U_s_at; Start 554; Stop 578
cagcagctcaaaactactatggtaa

SEQ ID NO: 104171 - DNA, 25 bp, Artificial
  probe
  misc_feature (1)..(25): SEQ ID NO: 1005; WAN024C4U_s_at; Start 552; Stop 576
gacagcagctcaaaactactatggt

SEQ ID NO: 104172 - DNA, 25 bp, Artificial
  probe
  misc_feature (1)..(25): SEQ ID NO: 1005; WAN024C4U_s_at; Start 634; Stop 658
gcaccaaaccaatatgacccctatt

SEQ ID NO: 104173 - DNA, 25 bp, Artificial
  probe
  misc_feature (1)..(25): SEQ ID NO: 1005; WAN024C4U_s_at; Start 556; Stop 580
gcagctcaaaactactatggtaaag

SEQ ID NO: 104174 - DNA, 25 bp, Artificial
  probe
  misc_feature (1)..(25): SEQ ID NO: 1005; WAN024C4U_s_at; Start 582; Stop 606
cctcaataatttaagtttacctcag

SEQ ID NO: 104175 - DNA, 25 bp, Artificial
  probe
  misc_feature (1)..(25): SEQ ID NO: 1005; WAN024C4U_s_at; Start 559; Stop 583
gctcaaaactactatggtaaagacc

SEQ ID NO: 104176 - DNA, 25 bp, Artificial
  probe
  misc_feature (1)..(25): SEQ ID NO: 1005; WAN024C4U_s_at; Start 562; Stop 586
caaaactactatggtaaagacctca

SEQ ID NO: 104177 - DNA, 25 bp, Artificial
  probe
  misc_feature (1)..(25): SEQ ID NO: 1005; WAN024C4U_s_at; Start 561; Stop 585
tcaaaactactatggtaaagacctc

SEQ ID NO: 104178 - DNA, 25 bp, Artificial
  probe
  misc_feature (1)..(25): SEQ ID NO: 1005; WAN024C4U_s_at; Start 644; Stop 668
aatatgacccctattcacatccaga

SEQ ID NO: 104179 - DNA, 25 bp, Artificial
  probe
  misc_feature (1)..(25): SEQ ID NO: 1005; WAN024C4U_s_at; Start 669; Stop 693
agcagcccaagaccgccgaaacttg

SEQ ID NO: 104180 - DNA, 25 bp, Artificial
  probe
  misc_feature (1)..(25): SEQ ID NO: 1005; WAN024C4U_s_at; Start 656; Stop 680
attcacatccagaagcagcccaaga

SEQ ID NO: 104181 - DNA, 25 bp, Artificial
  probe
  misc_feature (1)..(25): SEQ ID NO: 1005; WAN024C4U_s_at; Start 598; Stop 622
ttacctcagttagccttgctggctg

SEQ ID NO: 104182 - DNA, 25 bp, Artificial
  probe
  misc_feature (1)..(25): SEQ ID NO: 1005; WAN024C4U_s_at; Start 568; Stop 592
tactatggtaaagacctcaataatt

SEQ ID NO: 104183 - DNA, 25 bp, Artificial
  probe
  misc_feature (1)..(25): SEQ ID NO: 1005; WAN024C4U_s_at; Start 604; Stop 628
cagttagccttgctggctggaatgc

SEQ ID NO: 104184 - DNA, 25 bp, Artificial
  probe
  misc_feature (1)..(25): SEQ ID NO: 1005; WAN024C4U_s_at; Start 596; Stop 620
gtttacctcagttagccttgctggc

SEQ ID NO: 104185 - DNA, 25 bp, Artificial
  probe
  misc_feature (1)..(25): SEQ ID NO: 1005; WAN024C4U_s_at; Start 602; Stop 626
ctcagttagccttgctggctggaat

SEQ ID NO: 104186 - DNA, 25 bp, Artificial
  probe
  misc_feature (1)..(25): SEQ ID NO: 1005; WAN024C4U_s_at; Start 605; Stop 629
agttagccttgctggctggaatgcc

SEQ ID NO: 104187 - DNA, 25 bp, Artificial
  probe
  misc_feature (1)..(25): SEQ ID NO: 1005; WAN024C4U_s_at; Start 600; Stop 624
acctcagttagccttgctggctgga

SEQ ID NO: 104188 - DNA, 25 bp, Artificial
  probe
  misc_feature (1)..(25): SEQ ID NO: 1005; WAN024C4U_s_at; Start 695; Stop 719
tcttatctgaaatgaaaaatcaagg

SEQ ID NO: 104189 - DNA, 25 bp, Artificial
  probe
  misc_feature (1)..(25): SEQ ID NO: 1005; WAN024C4U_s_at; Start 649; Stop 673
gacccctattcacatccagaagcag

SEQ ID NO: 104190 - DNA, 25 bp, Artificial
  probe
  misc_feature (1)..(25): SEQ ID NO: 1005; WAN024C4U_s_at; Start 646; Stop 670
tatgacccctattcacatccagaag

SEQ ID NO: 104191 - DNA, 25 bp, Artificial
  probe
  misc_feature (1)..(25): SEQ ID NO: 1005; WAN024C4U_s_at; Start 665; Stop 689
cagaagcagcccaagaccgccgaaa

SEQ ID NO: 104192 - DNA, 25 bp, Artificial
  probe
  misc_feature (1)..(25): SEQ ID NO: 1005; WAN024C4U_s_at; Start 608; Stop 632
tagccttgctggctggaatgcctca

SEQ ID NO: 104193 - DNA, 25 bp, Artificial
  probe
  misc_feature (1)..(25): SEQ ID NO: 1005; WAN024C4U_s_at; Start 592; Stop 616
ttaagtttacctcagttagccttgc

SEQ ID NO: 104194 - DNA, 25 bp, Artificial
  probe
  misc_feature (1)..(25): SEQ ID NO: 1005; WAN024C4U_s_at; Start 595; Stop 619
agtttacctcagttagccttgctgg

SEQ ID NO: 104195 - DNA, 25 bp, Artificial
  probe
  misc_feature (1)..(25): SEQ ID NO: 1008; WAN024C4V_at; Start 1454; Stop 1478
ctgcttacgctgcctttgcaaatgg

SEQ ID NO: 104196 - DNA, 25 bp, Artificial
  probe
  misc_feature (1)..(25): SEQ ID NO: 1008; WAN024C4V_at; Start 1455; Stop 1479
tgcttacgctgcctttgcaaatggt

SEQ ID NO: 104197 - DNA, 25 bp, Artificial
  probe
  misc_feature (1)..(25): SEQ ID NO: 1008; WAN024C4V_at; Start 1452; Stop 1476
tgctgcttacgctgcctttgcaaat

SEQ ID NO: 104198 - DNA, 25 bp, Artificial
  probe
  misc_feature (1)..(25): SEQ ID NO: 1008; WAN024C4V_at; Start 1456; Stop 1480
gcttacgctgcctttgcaaatggtg

SEQ ID NO: 104199 - DNA, 25 bp, Artificial
  probe
  misc_feature (1)..(25): SEQ ID NO: 1008; WAN024C4V_at; Start 1457; Stop 1481
cttacgctgcctttgcaaatggtgg

SEQ ID NO: 104200 - DNA, 25 bp, Artificial
  probe
  misc_feature (1)..(25): SEQ ID NO: 1008; WAN024C4V_at; Start 1453; Stop 1477
gctgcttacgctgcctttgcaaatg

SEQ ID NO: 104201 - DNA, 25 bp, Artificial
  probe
  misc_feature (1)..(25): SEQ ID NO: 2207; WAN024C4W_at; Start 87; Stop 111
tacgatatgggaaaacgattataaa

SEQ ID NO: 104202 - DNA, 25 bp, Artificial
  probe
  misc_feature (1)..(25): SEQ ID NO: 2207; WAN024C4W_at; Start 252; Stop 276
gaagtatcgtgccaatcgcaggaag

SEQ ID NO: 104203 - DNA, 25 bp, Artificial
  probe
  misc_feature (1)..(25): SEQ ID NO: 2207; WAN024C4W_at; Start 225; Stop 249
caggtacatctatgaagatatgcgg

SEQ ID NO: 104204 - DNA, 25 bp, Artificial
  probe
  misc_feature (1)..(25): SEQ ID NO: 2207; WAN024C4W_at; Start 241; Stop 265
gatatgcggatgaagtatcgtgcca

SEQ ID NO: 104205 - DNA, 25 bp, Artificial
  probe
  misc_feature (1)..(25): SEQ ID NO: 2207; WAN024C4W_at; Start 141; Stop 165
cgactatgaaaaactagcaaaggac

SEQ ID NO: 104206 - DNA, 25 bp, Artificial
  probe
  misc_feature (1)..(25): SEQ ID NO: 2207; WAN024C4W_at; Start 162; Stop 186
ggactatcgttatgtgacccttaaa

SEQ ID NO: 104207 - DNA, 25 bp, Artificial
  probe
  misc_feature (1)..(25): SEQ ID NO: 2207; WAN024C4W_at; Start 179; Stop 203
cccttaaaaataagctgctaaagat

SEQ ID NO: 104208 - DNA, 25 bp, Artificial
  probe
  misc_feature (1)..(25): SEQ ID NO: 2207; WAN024C4W_at; Start 79; Stop 103
cattttattacgatatgggaaaacg

SEQ ID NO: 104209 - DNA, 25 bp, Artificial
  probe
  misc_feature (1)..(25): SEQ ID NO: 2207; WAN024C4W_at; Start 147; Stop 171
tgaaaaactagcaaaggactatcgt

SEQ ID NO: 104210 - DNA, 25 bp, Artificial
  probe
  misc_feature (1)..(25): SEQ ID NO: 2207; WAN024C4W_at; Start 48; Stop 72
agaactggaaggaagggaatcaact

SEQ ID NO: 104211 - DNA, 25 bp, Artificial
  probe
  misc_feature (1)..(25): SEQ ID NO: 2207; WAN024C4W_at; Start 126; Stop 150
caaagaatacctaaccgactatgaa

SEQ ID NO: 104212 - DNA, 25 bp, Artificial
  probe
  misc_feature (1)..(25): SEQ ID NO: 2207; WAN024C4W_at; Start 245; Stop 269
tgcggatgaagtatcgtgccaatcg

SEQ ID NO: 104213 - DNA, 25 bp, Artificial
  probe
  misc_feature (1)..(25): SEQ ID NO: 2207; WAN024C4W_at; Start 2; Stop 26
tggaagaattgattgaatggctgga

SEQ ID NO: 104214 - DNA, 25 bp, Artificial
  probe
  misc_feature (1)..(25): SEQ ID NO: 2207; WAN024C4W_at; Start 119; Stop 143
tactagtcaaagaatacctaaccga

SEQ ID NO: 104215 - DNA, 25 bp, Artificial
  probe
  misc_feature (1)..(25): SEQ ID NO: 2207; WAN024C4W_at; Start 255; Stop 279
gtatcgtgccaatcgcaggaagtgg

SEQ ID NO: 104216 - DNA, 25 bp, Artificial
  probe
  misc_feature (1)..(25): SEQ ID NO: 2207; WAN024C4W_at; Start 216; Stop 240
gctggaaggcaggtacatctatgaa

SEQ ID NO: 104217 - DNA, 25 bp, Artificial
  probe
  misc_feature (1)..(25): SEQ ID NO: 2207; WAN024C4W_at; Start 233; Stop 257
tctatgaagatatgcggatgaagta

SEQ ID NO: 104218 - DNA, 25 bp, Artificial
  probe
  misc_feature (1)..(25): SEQ ID NO: 2207; WAN024C4W_at; Start 172; Stop 196
tatgtgacccttaaaaataagctgc

SEQ ID NO: 104219 - DNA, 25 bp, Artificial
  probe
  misc_feature (1)..(25): SEQ ID NO: 2207; WAN024C4W_at; Start 7; Stop 31
gaattgattgaatggctggataacc

SEQ ID NO: 104220 - DNA, 25 bp, Artificial
  probe
  misc_feature (1)..(25): SEQ ID NO: 2207; WAN024C4W_at; Start 249; Stop 273
gatgaagtatcgtgccaatcgcagg

SEQ ID NO: 104221 - DNA, 25 bp, Artificial
  probe
  misc_feature (1)..(25): SEQ ID NO: 2207; WAN024C4W_at; Start 45; Stop 69
taaagaactggaaggaagggaatca

SEQ ID NO: 104222 - DNA, 25 bp, Artificial
  probe
  misc_feature (1)..(25): SEQ ID NO: 2207; WAN024C4W_at; Start 74; Stop 98
caagacattttattacgatatggga

SEQ ID NO: 104223 - DNA, 25 bp, Artificial
  probe
  misc_feature (1)..(25): SEQ ID NO: 2207; WAN024C4W_at; Start 59; Stop 83
gaagggaatcaacttcaagacattt

SEQ ID NO: 104224 - DNA, 25 bp, Artificial
  probe
  misc_feature (1)..(25): SEQ ID NO: 2207; WAN024C4W_at; Start 192; Stop 216
gctgctaaagattgaaaaaatggag

SEQ ID NO: 104225 - DNA, 25 bp, Artificial
  probe
  misc_feature (1)..(25): SEQ ID NO: 2207; WAN024C4W_at; Start 55; Stop 79
gaaggaagggaatcaacttcaagac

SEQ ID NO: 104226 - DNA, 25 bp, Artificial
  probe
  misc_feature (1)..(25): SEQ ID NO: 2207; WAN024C4W_at; Start 207; Stop 231
aaaaatggagctggaaggcaggtac

SEQ ID NO: 104227 - DNA, 25 bp, Artificial
  probe
  misc_feature (1)..(25): SEQ ID NO: 2207; WAN024C4W_at; Start 157; Stop 181
gcaaaggactatcgttatgtgaccc

SEQ ID NO: 104228 - DNA, 25 bp, Artificial
  probe
  misc_feature (1)..(25): SEQ ID NO: 2207; WAN024C4W_at; Start 135; Stop 159
cctaaccgactatgaaaaactagca

SEQ ID NO: 104229 - DNA, 25 bp, Artificial
  probe
  misc_feature (1)..(25): SEQ ID NO: 2207; WAN024C4W_at; Start 112; Stop 136
aatctattactagtcaaagaatacc

SEQ ID NO: 104230 - DNA, 25 bp, Artificial
  probe
  misc_feature (1)..(25): SEQ ID NO: 2207; WAN024C4W_at; Start 201; Stop 225
gattgaaaaaatggagctggaaggc

SEQ ID NO: 104231 - DNA, 25 bp, Artificial
  probe
  misc_feature (1)..(25): SEQ ID NO: 2207; WAN024C4W_at; Start 220; Stop 244
gaaggcaggtacatctatgaagata

SEQ ID NO: 104232 - DNA, 25 bp, Artificial
  probe
  misc_feature (1)..(25): SEQ ID NO: 2207; WAN024C4W_at; Start 12; Stop 36
gattgaatggctggataacctgatt

SEQ ID NO: 104233 - DNA, 25 bp, Artificial
  probe
  misc_feature (1)..(25): SEQ ID NO: 2207; WAN024C4W_at; Start 30; Stop 54
cctgattatgattgttaaagaactg

SEQ ID NO: 104234 - DNA, 25 bp, Artificial
  probe
  misc_feature (1)..(25): SEQ ID NO: 2207; WAN024C4W_at; Start 16; Stop 40
gaatggctggataacctgattatga

SEQ ID NO: 104235 - DNA, 25 bp, Artificial
  probe
  misc_feature (1)..(25): SEQ ID NO: 4107; WAN024C4X_at; Start 26; Stop 50
aggccaaatatcttcggatttttct

SEQ ID NO: 104236 - DNA, 25 bp, Artificial
  probe
  misc_feature (1)..(25): SEQ ID NO: 4107; WAN024C4X_at; Start 17; Stop 41
atccgaagaaggccaaatatcttcg

SEQ ID NO: 104237 - DNA, 25 bp, Artificial
  probe
  misc_feature (1)..(25): SEQ ID NO: 4107; WAN024C4X_at; Start 19; Stop 43
ccgaagaaggccaaatatcttcgga

SEQ ID NO: 104238 - DNA, 25 bp, Artificial
  probe
  misc_feature (1)..(25): SEQ ID NO: 4107; WAN024C4X_at; Start 14; Stop 38
aaaatccgaagaaggccaaatatct

SEQ ID NO: 104239 - DNA, 25 bp, Artificial
  probe
  misc_feature (1)..(25): SEQ ID NO: 4107; WAN024C4X_at; Start 18; Stop 42
tccgaagaaggccaaatatcttcgg

SEQ ID NO: 104240 - DNA, 25 bp, Artificial
  probe
  misc_feature (1)..(25): SEQ ID NO: 4107; WAN024C4X_at; Start 20; Stop 44
cgaagaaggccaaatatcttcggat

SEQ ID NO: 104241 - DNA, 25 bp, Artificial
  probe
  misc_feature (1)..(25): SEQ ID NO: 4107; WAN024C4X_at; Start 23; Stop 47
agaaggccaaatatcttcggatttt

SEQ ID NO: 104242 - DNA, 25 bp, Artificial
  probe
  misc_feature (1)..(25): SEQ ID NO: 4107; WAN024C4X_at; Start 22; Stop 46
aagaaggccaaatatcttcggattt

SEQ ID NO: 104243 - DNA, 25 bp, Artificial
  probe
  misc_feature (1)..(25): SEQ ID NO: 4107; WAN024C4X_at; Start 21; Stop 45
gaagaaggccaaatatcttcggatt

SEQ ID NO: 104244 - DNA, 25 bp, Artificial
  probe
  misc_feature (1)..(25): SEQ ID NO: 4107; WAN024C4X_at; Start 15; Stop 39
aaatccgaagaaggccaaatatctt

SEQ ID NO: 104245 - DNA, 25 bp, Artificial
  probe
  misc_feature (1)..(25): SEQ ID NO: 4107; WAN024C4X_at; Start 16; Stop 40
aatccgaagaaggccaaatatcttc

SEQ ID NO: 104246 - DNA, 25 bp, Artificial
  probe
  misc_feature (1)..(25): SEQ ID NO: 912; WAN024C4Y_at; Start 655; Stop 679
tttgcttggcttgatacaggaaccc

SEQ ID NO: 104247 - DNA, 25 bp, Artificial
  probe
  misc_feature (1)..(25): SEQ ID NO: 912; WAN024C4Y_at; Start 279; Stop 303
tgaggattttattggtgacgatagc

SEQ ID NO: 104248 - DNA, 25 bp, Artificial
  probe
  misc_feature (1)..(25): SEQ ID NO: 912; WAN024C4Y_at; Start 791; Stop 815
aagatgtgctggagttggcgcaacc

SEQ ID NO: 104249 - DNA, 25 bp, Artificial
  probe
  misc_feature (1)..(25): SEQ ID NO: 912; WAN024C4Y_at; Start 51; Stop 75
tactcgagctacatcgaaacagctg

SEQ ID NO: 104250 - DNA, 25 bp, Artificial
  probe
  misc_feature (1)..(25): SEQ ID NO: 912; WAN024C4Y_at; Start 57; Stop 81
agctacatcgaaacagctgatgccg

SEQ ID NO: 104251 - DNA, 25 bp, Artificial
  probe
  misc_feature (1)..(25): SEQ ID NO: 912; WAN024C4Y_at; Start 108; Stop 132
tcctctgtcaactttgatgttggcg

SEQ ID NO: 104252 - DNA, 25 bp, Artificial
  probe
  misc_feature (1)..(25): SEQ ID NO: 912; WAN024C4Y_at; Start 331; Stop 355
tatcacggtccaggtttgagcaaga

SEQ ID NO: 104253 - DNA, 25 bp, Artificial
  probe
  misc_feature (1)..(25): SEQ ID NO: 912; WAN024C4Y_at; Start 351; Stop 375
caagatgctccaaaaaactgtttcg

SEQ ID NO: 104254 - DNA, 25 bp, Artificial
  probe
  misc_feature (1)..(25): SEQ ID NO: 912; WAN024C4Y_at; Start 37; Stop 61
cgtctgtatccacttactcgagcta

SEQ ID NO: 104255 - DNA, 25 bp, Artificial
  probe
  misc_feature (1)..(25): SEQ ID NO: 912; WAN024C4Y_at; Start 693; Stop 717
ggaagcctctcaatatattgaaacg

SEQ ID NO: 104256 - DNA, 25 bp, Artificial
  probe
  misc_feature (1)..(25): SEQ ID NO: 912; WAN024C4Y_at; Start 90; Stop 114
taaacccatgatttactatcctctg

SEQ ID NO: 104257 - DNA, 25 bp, Artificial
  probe
  misc_feature (1)..(25): SEQ ID NO: 912; WAN024C4Y_at; Start 708; Stop 732
tattgaaacggttcaacgcatgcaa

SEQ ID NO: 104258 - DNA, 25 bp, Artificial
  probe
  misc_feature (1)..(25): SEQ ID NO: 912; WAN024C4Y_at; Start 778; Stop 802
tatattagtcgtgaagatgtgctgg

SEQ ID NO: 104259 - DNA, 25 bp, Artificial
  probe
  misc_feature (1)..(25): SEQ ID NO: 912; WAN024C4Y_at; Start 122; Stop 146
tgatgttggcgggtattaaggatat

SEQ ID NO: 104260 - DNA, 25 bp, Artificial
  probe
  misc_feature (1)..(25): SEQ ID NO: 912; WAN024C4Y_at; Start 718; Stop 742
gttcaacgcatgcaaaatgttcaag

SEQ ID NO: 104261 - DNA, 25 bp, Artificial
  probe
  misc_feature (1)..(25): SEQ ID NO: 912; WAN024C4Y_at; Start 22; Stop 46
ggtggctcaggtacccgtctgtatc

SEQ ID NO: 104262 - DNA, 25 bp, Artificial
  probe
  misc_feature (1)..(25): SEQ ID NO: 912; WAN024C4Y_at; Start 162; Stop 186
gccacaggatttgccgcgctttaag

SEQ ID NO: 104263 - DNA, 25 bp, Artificial
  probe
  misc_feature (1)..(25): SEQ ID NO: 912; WAN024C4Y_at; Start 301; Stop 325
agcgttgctttaatcttgggtgaca

SEQ ID NO: 104264 - DNA, 25 bp, Artificial
  probe
  misc_feature (1)..(25): SEQ ID NO: 912; WAN024C4Y_at; Start 669; Stop 693
tacaggaacccatgaaagcttgttg

SEQ ID NO: 104265 - DNA, 25 bp, Artificial
  probe
  misc_feature (1)..(25): SEQ ID NO: 912; WAN024C4Y_at; Start 802; Stop 826
gagttggcgcaacctcttaagaaga

SEQ ID NO: 104266 - DNA, 25 bp, Artificial
  probe
  misc_feature (1)..(25): SEQ ID NO: 912; WAN024C4Y_at; Start 808; Stop 832
gcgcaacctcttaagaagaatgaat

SEQ ID NO: 104267 - DNA, 25 bp, Artificial
  probe
  misc_feature (1)..(25): SEQ ID NO: 912; WAN024C4Y_at; Start 679; Stop 703
catgaaagcttgttggaagcctctc

SEQ ID NO: 104268 - DNA, 25 bp, Artificial
  probe
  misc_feature (1)..(25): SEQ ID NO: 912; WAN024C4Y_at; Start 631; Stop 655
tctgtcgaagtcatgggacgtggct

SEQ ID NO: 104269 - DNA, 25 bp, Artificial
  probe
  misc_feature (1)..(25): SEQ ID NO: 912; WAN024C4Y_at; Start 231; Stop 255
tgcggaacagcctagtccagatggc

SEQ ID NO: 104270 - DNA, 25 bp, Artificial
  probe
  misc_feature (1)..(25): SEQ ID NO: 912; WAN024C4Y_at; Start 153; Stop 177
tatttcaacgccacaggatttgccg

SEQ ID NO: 104271 - DNA, 25 bp, Artificial
  probe
  misc_feature (1)..(25): SEQ ID NO: 912; WAN024C4Y_at; Start 616; Stop 640
gatcgtggtaatttatctgtcgaag

SEQ ID NO: 104272 - DNA, 25 bp, Artificial
  probe
  misc_feature (1)..(25): SEQ ID NO: 912; WAN024C4Y_at; Start 339; Stop 363
tccaggtttgagcaagatgctccaa

SEQ ID NO: 104273 - DNA, 25 bp, Artificial
  probe
  misc_feature (1)..(25): SEQ ID NO: 912; WAN024C4Y_at; Start 261; Stop 285
tcaggcctttcttatcggtgaggat

SEQ ID NO: 104274 - DNA, 25 bp, Artificial
  probe
  misc_feature (1)..(25): SEQ ID NO: 912; WAN024C4Y_at; Start 733; Stop 757
aatgttcaagttgccaatttggaag

SEQ ID NO: 104275 - DNA, 25 bp, Artificial
  probe
  misc_feature (1)..(25): SEQ ID NO: 912; WAN024C4Y_at; Start 558; Stop 582
tatcaaaccaagtgctcgtggtgag

SEQ ID NO: 104276 - DNA, 25 bp, Artificial
  probe
  misc_feature (1)..(25): SEQ ID NO: 912; WAN024C4Y_at; Start 317; Stop 341
tgggtgacaatatttatcacggtcc

SEQ ID NO: 104277 - DNA, 25 bp, Artificial
  probe
  misc_feature (1)..(25): SEQ ID NO: 912; WAN024C4Y_at; Start 747; Stop 771
caatttggaagaaatcgcctatcgc

SEQ ID NO: 104278 - DNA, 25 bp, Artificial
  probe
  misc_feature (1)..(25): SEQ ID NO: 912; WAN024C4Y_at; Start 570; Stop 594
tgctcgtggtgagttagaaatcaca

SEQ ID NO: 104279 - DNA, 25 bp, Artificial
  probe
  misc_feature (1)..(25): SEQ ID NO: 912; WAN024C4Y_at; Start 246; Stop 270
tccagatggccttgctcaggccttt

SEQ ID NO: 104280 - DNA, 25 bp, Artificial
  probe
  misc_feature (1)..(25): SEQ ID NO: 910; WAN024C4Z_at; Start 17; Stop 41
ttgcaggcggctcaggtacccgcct

SEQ ID NO: 104281 - DNA, 25 bp, Artificial
  probe
  misc_feature (1)..(25): SEQ ID NO: 910; WAN024C4Z_at; Start 627; Stop 651
cctttctgttgagctgatggggcgt

SEQ ID NO: 104282 - DNA, 25 bp, Artificial
  probe
  misc_feature (1)..(25): SEQ ID NO: 910; WAN024C4Z_at; Start 618; Stop 642
tcgtggtgacctttctgttgagctg

SEQ ID NO: 104283 - DNA, 25 bp, Artificial
  probe
  misc_feature (1)..(25): SEQ ID NO: 910; WAN024C4Z_at; Start 21; Stop 45
aggcggctcaggtacccgcctgtac

SEQ ID NO: 104284 - DNA, 25 bp, Artificial
  probe
  misc_feature (1)..(25): SEQ ID NO: 910; WAN024C4Z_at; Start 51; Stop 75
tactcgggctgcgtcaaaacagctg

SEQ ID NO: 104285 - DNA, 25 bp, Artificial
  probe
  misc_feature (1)..(25): SEQ ID NO: 910; WAN024C4Z_at; Start 48; Stop 72
acttactcgggctgcgtcaaaacag

SEQ ID NO: 104286 - DNA, 25 bp, Artificial
  probe
  misc_feature (1)..(25): SEQ ID NO: 910; WAN024C4Z_at; Start 57; Stop 81
ggctgcgtcaaaacagctgatgccg

SEQ ID NO: 104287 - DNA, 25 bp, Artificial
  probe
  misc_feature (1)..(25): SEQ ID NO: 910; WAN024C4Z_at; Start 49; Stop 73
cttactcgggctgcgtcaaaacagc

SEQ ID NO: 104288 - DNA, 25 bp, Artificial
  probe
  misc_feature (1)..(25): SEQ ID NO: 910; WAN024C4Z_at; Start 605; Stop 629
aggcttacctaaatcgtggtgacct

SEQ ID NO: 104289 - DNA, 25 bp, Artificial
  probe
  misc_feature (1)..(25): SEQ ID NO: 910; WAN024C4Z_at; Start 612; Stop 636
cctaaatcgtggtgacctttctgtt

SEQ ID NO: 104290 - DNA, 25 bp, Artificial
  probe
  misc_feature (1)..(25): SEQ ID NO: 910; WAN024C4Z_at; Start 663; Stop 687
gttggatacgggaacccatgaaagc

SEQ ID NO: 104291 - DNA, 25 bp, Artificial
  probe
  misc_feature (1)..(25): SEQ ID NO: 910; WAN024C4Z_at; Start 615; Stop 639
aaatcgtggtgacctttctgttgag

SEQ ID NO: 104292 - DNA, 25 bp, Artificial
  probe
  misc_feature (1)..(25): SEQ ID NO: 910; WAN024C4Z_at; Start 106; Stop 130
tatccgttgtcgacattaatgttgg

SEQ ID NO: 104293 - DNA, 25 bp, Artificial
  probe
  misc_feature (1)..(25): SEQ ID NO: 910; WAN024C4Z_at; Start 610; Stop 634
tacctaaatcgtggtgacctttctg

SEQ ID NO: 104294 - DNA, 25 bp, Artificial
  probe
  misc_feature (1)..(25): SEQ ID NO: 910; WAN024C4Z_at; Start 96; Stop 120
tatgatttattatccgttgtcgaca

SEQ ID NO: 104295 - DNA, 25 bp, Artificial
  probe
  misc_feature (1)..(25): SEQ ID NO: 910; WAN024C4Z_at; Start 94; Stop 118
cctatgatttattatccgttgtcga

SEQ ID NO: 104296 - DNA, 25 bp, Artificial
  probe
  misc_feature (1)..(25): SEQ ID NO: 910; WAN024C4Z_at; Start 90; Stop 114
taaacctatgatttattatccgttg

SEQ ID NO: 104297 - DNA, 25 bp, Artificial
  probe
  misc_feature (1)..(25): SEQ ID NO: 910; WAN024C4Z_at; Start 623; Stop 647
gtgacctttctgttgagctgatggg

SEQ ID NO: 104298 - DNA, 25 bp, Artificial
  probe
  misc_feature (1)..(25): SEQ ID NO: 910; WAN024C4Z_at; Start 108; Stop 132
tccgttgtcgacattaatgttggct

SEQ ID NO: 104299 - DNA, 25 bp, Artificial
  probe
  misc_feature (1)..(25): SEQ ID NO: 910; WAN024C4Z_at; Start 55; Stop 79
cgggctgcgtcaaaacagctgatgc

SEQ ID NO: 104300 - DNA, 25 bp, Artificial
  probe
  misc_feature (1)..(25): SEQ ID NO: 910; WAN024C4Z_at; Start 99; Stop 123
gatttattatccgttgtcgacatta

SEQ ID NO: 104301 - DNA, 25 bp, Artificial
  probe
  misc_feature (1)..(25): SEQ ID NO: 910; WAN024C4Z_at; Start 52; Stop 76
actcgggctgcgtcaaaacagctga

SEQ ID NO: 104302 - DNA, 25 bp, Artificial
  probe
  misc_feature (1)..(25): SEQ ID NO: 910; WAN024C4Z_at; Start 656; Stop 680
ttgcctggttggatacgggaaccca

SEQ ID NO: 104303 - DNA, 25 bp, Artificial
  probe
  misc_feature (1)..(25): SEQ ID NO: 910; WAN024C4Z_at; Start 126; Stop 150
gttggctggaattaaagatattttg

SEQ ID NO: 104304 - DNA, 25 bp, Artificial
  probe
  misc_feature (1)..(25): SEQ ID NO: 910; WAN024C4Z_at; Start 41; Stop 65
tgtacccacttactcgggctgcgtc

SEQ ID NO: 104305 - DNA, 25 bp, Artificial
  probe
  misc_feature (1)..(25): SEQ ID NO: 910; WAN024C4Z_at; Start 621; Stop 645
tggtgacctttctgttgagctgatg

SEQ ID NO: 104306 - DNA, 25 bp, Artificial
  probe
  misc_feature (1)..(25): SEQ ID NO: 910; WAN024C4Z_at; Start 657; Stop 681
tgcctggttggatacgggaacccat

SEQ ID NO: 104307 - DNA, 25 bp, Artificial
  probe
  misc_feature (1)..(25): SEQ ID NO: 910; WAN024C4Z_at; Start 122; Stop 146
taatgttggctggaattaaagatat

SEQ ID NO: 104308 - DNA, 25 bp, Artificial
  probe
  misc_feature (1)..(25): SEQ ID NO: 910; WAN024C4Z_at; Start 42; Stop 66
gtacccacttactcgggctgcgtca

SEQ ID NO: 104309 - DNA, 25 bp, Artificial
  probe
  misc_feature (1)..(25): SEQ ID NO: 910; WAN024C4Z_at; Start 619; Stop 643
cgtggtgacctttctgttgagctga

SEQ ID NO: 104310 - DNA, 25 bp, Artificial
  probe
  misc_feature (1)..(25): SEQ ID NO: 910; WAN024C4Z_at; Start 129; Stop 153
ggctggaattaaagatattttgatt

SEQ ID NO: 104311 - DNA, 25 bp, Artificial
  probe
  misc_feature (1)..(25): SEQ ID NO: 910; WAN024C4Z_at; Start 658; Stop 682
gcctggttggatacgggaacccatg

SEQ ID NO: 104312 - DNA, 25 bp, Artificial
  probe
  misc_feature (1)..(25): SEQ ID NO: 910; WAN024C4Z_at; Start 54; Stop 78
tcgggctgcgtcaaaacagctgatg

SEQ ID NO: 104313 - DNA, 25 bp, Artificial
  probe
  misc_feature (1)..(25): SEQ ID NO: 910; WAN024C4Z_at; Start 15; Stop 39
tcttgcaggcggctcaggtacccgc

SEQ ID NO: 104314 - DNA, 25 bp, Artificial
  probe
  misc_feature (1)..(25): SEQ ID NO: 911; WAN024C52_at; Start 153; Stop 177
tatctcaacaccacaggatttgccc

SEQ ID NO: 104315 - DNA, 25 bp, Artificial
  probe
  misc_feature (1)..(25): SEQ ID NO: 911; WAN024C52_at; Start 154; Stop 178
atctcaacaccacaggatttgcccc

SEQ ID NO: 104316 - DNA, 25 bp, Artificial
  probe
  misc_feature (1)..(25): SEQ ID NO: 911; WAN024C52_at; Start 158; Stop 182
caacaccacaggatttgccccgttt

SEQ ID NO: 104317 - DNA, 25 bp, Artificial
  probe
  misc_feature (1)..(25): SEQ ID NO: 911; WAN024C52_at; Start 156; Stop 180
ctcaacaccacaggatttgccccgt

SEQ ID NO: 104318 - DNA, 25 bp, Artificial
  probe
  misc_feature (1)..(25): SEQ ID NO: 911; WAN024C52_at; Start 155; Stop 179
tctcaacaccacaggatttgccccg

SEQ ID NO: 104319 - DNA, 25 bp, Artificial
  probe
  misc_feature (1)..(25): SEQ ID NO: 911; WAN024C52_at; Start 157; Stop 181
tcaacaccacaggatttgccccgtt

SEQ ID NO: 104320 - DNA, 25 bp, Artificial
  probe
  misc_feature (1)..(25): SEQ ID NO: 6810; WAN024C53_at; Start 96; Stop 120
gccaattgaatatactatactactg

SEQ ID NO: 104321 - DNA, 25 bp, Artificial
  probe
  misc_feature (1)..(25): SEQ ID NO: 6810; WAN024C53_at; Start 81; Stop 105
tattataatattccagccaattgaa

SEQ ID NO: 104322 - DNA, 25 bp, Artificial
  probe
  misc_feature (1)..(25): SEQ ID NO: 6810; WAN024C53_at; Start 138; Stop 162
tgcaaatcgaagaaccccttcagaa

SEQ ID NO: 104323 - DNA, 25 bp, Artificial
  probe
  misc_feature (1)..(25): SEQ ID NO: 6810; WAN024C53_at; Start 125; Stop 149
ttttttcatctaatgcaaatcgaag

SEQ ID NO: 104324 - DNA, 25 bp, Artificial
  probe
  misc_feature (1)..(25): SEQ ID NO: 6810; WAN024C53_at; Start 136; Stop 160
aatgcaaatcgaagaaccccttcag

SEQ ID NO: 104325 - DNA, 25 bp, Artificial
  probe
  misc_feature (1)..(25): SEQ ID NO: 6810; WAN024C53_at; Start 181; Stop 205
ggaattagcaatgagattgtcgtat

SEQ ID NO: 104326 - DNA, 25 bp, Artificial
  probe
  misc_feature (1)..(25): SEQ ID NO: 6810; WAN024C53_at; Start 130; Stop 154
tcatctaatgcaaatcgaagaaccc

SEQ ID NO: 104327 - DNA, 25 bp, Artificial
  probe
  misc_feature (1)..(25): SEQ ID NO: 6810; WAN024C53_at; Start 201; Stop 225
cgtattaaataaatcatatgttcca

SEQ ID NO: 104328 - DNA, 25 bp, Artificial
  probe
  misc_feature (1)..(25): SEQ ID NO: 6810; WAN024C53_at; Start 76; Stop 100
ccttttattataatattccagccaa

SEQ ID NO: 104329 - DNA, 25 bp, Artificial
  probe
  misc_feature (1)..(25): SEQ ID NO: 6810; WAN024C53_at; Start 98; Stop 122
caattgaatatactatactactgtc

SEQ ID NO: 104330 - DNA, 25 bp, Artificial
  probe
  misc_feature (1)..(25): SEQ ID NO: 6810; WAN024C53_at; Start 131; Stop 155
catctaatgcaaatcgaagaacccc

SEQ ID NO: 104331 - DNA, 25 bp, Artificial
  probe
  misc_feature (1)..(25): SEQ ID NO: 6810; WAN024C53_at; Start 129; Stop 153
ttcatctaatgcaaatcgaagaacc

SEQ ID NO: 104332 - DNA, 25 bp, Artificial
  probe
  misc_feature (1)..(25): SEQ ID NO: 6810; WAN024C53_at; Start 189; Stop 213
caatgagattgtcgtattaaataaa

SEQ ID NO: 104333 - DNA, 25 bp, Artificial
  probe
  misc_feature (1)..(25): SEQ ID NO: 6810; WAN024C53_at; Start 94; Stop 118
cagccaattgaatatactatactac

SEQ ID NO: 104334 - DNA, 25 bp, Artificial
  probe
  misc_feature (1)..(25): SEQ ID NO: 6810; WAN024C53_at; Start 158; Stop 182
cagaaatattaattgaaataattgg

SEQ ID NO: 104335 - DNA, 25 bp, Artificial
  probe
  misc_feature (1)..(25): SEQ ID NO: 6810; WAN024C53_at; Start 139; Stop 163
gcaaatcgaagaaccccttcagaaa

SEQ ID NO: 104336 - DNA, 25 bp, Artificial
  probe
  misc_feature (1)..(25): SEQ ID NO: 6810; WAN024C53_at; Start 152; Stop 176
ccccttcagaaatattaattgaaat

SEQ ID NO: 104337 - DNA, 25 bp, Artificial
  probe
  misc_feature (1)..(25): SEQ ID NO: 6810; WAN024C53_at; Start 133; Stop 157
tctaatgcaaatcgaagaacccctt

SEQ ID NO: 104338 - DNA, 25 bp, Artificial
  probe
  misc_feature (1)..(25): SEQ ID NO: 6810; WAN024C53_at; Start 179; Stop 203
ttggaattagcaatgagattgtcgt

SEQ ID NO: 104339 - DNA, 25 bp, Artificial
  probe
  misc_feature (1)..(25): SEQ ID NO: 6810; WAN024C53_at; Start 103; Stop 127
gaatatactatactactgtcatttt

SEQ ID NO: 104340 - DNA, 25 bp, Artificial
  probe
  misc_feature (1)..(25): SEQ ID NO: 6810; WAN024C53_at; Start 135; Stop 159
taatgcaaatcgaagaaccccttca

SEQ ID NO: 104341 - DNA, 25 bp, Artificial
  probe
  misc_feature (1)..(25): SEQ ID NO: 6810; WAN024C53_at; Start 48; Stop 72
aataattcctaatactacaactaag

SEQ ID NO: 104342 - DNA, 25 bp, Artificial
  probe
  misc_feature (1)..(25): SEQ ID NO: 6810; WAN024C53_at; Start 14; Stop 38
taagtaatgggaatatattaaagat

SEQ ID NO: 104343 - DNA, 25 bp, Artificial
  probe
  misc_feature (1)..(25): SEQ ID NO: 6810; WAN024C53_at; Start 172; Stop 196
gaaataattggaattagcaatgaga

SEQ ID NO: 104344 - DNA, 25 bp, Artificial
  probe
  misc_feature (1)..(25): SEQ ID NO: 6810; WAN024C53_at; Start 149; Stop 173
gaaccccttcagaaatattaattga

SEQ ID NO: 104345 - DNA, 25 bp, Artificial
  probe
  misc_feature (1)..(25): SEQ ID NO: 6810; WAN024C53_at; Start 177; Stop 201
aattggaattagcaatgagattgtc

SEQ ID NO: 104346 - DNA, 25 bp, Artificial
  probe
  misc_feature (1)..(25): SEQ ID NO: 6810; WAN024C53_at; Start 10; Stop 34
tctttaagtaatgggaatatattaa

SEQ ID NO: 104347 - DNA, 25 bp, Artificial
  probe
  misc_feature (1)..(25): SEQ ID NO: 6810; WAN024C53_at; Start 140; Stop 164
caaatcgaagaaccccttcagaaat

SEQ ID NO: 104348 - DNA, 25 bp, Artificial
  probe
  misc_feature (1)..(25): SEQ ID NO: 6810; WAN024C53_at; Start 134; Stop 158
ctaatgcaaatcgaagaaccccttc

SEQ ID NO: 104349 - DNA, 25 bp, Artificial
  probe
  misc_feature (1)..(25): SEQ ID NO: 6810; WAN024C53_at; Start 92; Stop 116
tccagccaattgaatatactatact

SEQ ID NO: 104350 - DNA, 25 bp, Artificial
  probe
  misc_feature (1)..(25): SEQ ID NO: 6810; WAN024C53_at; Start 50; Stop 74
taattcctaatactacaactaagaa

SEQ ID NO: 104351 - DNA, 25 bp, Artificial
  probe
  misc_feature (1)..(25): SEQ ID NO: 6810; WAN024C53_at; Start 188; Stop 212
gcaatgagattgtcgtattaaataa

SEQ ID NO: 104352 - DNA, 25 bp, Artificial
  probe
  misc_feature (1)..(25): SEQ ID NO: 6810; WAN024C53_at; Start 44; Stop 68
tgaaaataattcctaatactacaac

SEQ ID NO: 104353 - DNA, 25 bp, Artificial
  probe
  misc_feature (1)..(25): SEQ ID NO: 6810; WAN024C53_at; Start 144; Stop 168
tcgaagaaccccttcagaaatatta

SEQ ID NO: 104354 - DNA, 25 bp, Artificial
  probe
  misc_feature (1)..(25): SEQ ID NO: 5143; WAN024C54_at; Start 820; Stop 844
tctgtaaagtcttatcgtgatgaag

SEQ ID NO: 104355 - DNA, 25 bp, Artificial
  probe
  misc_feature (1)..(25): SEQ ID NO: 5143; WAN024C54_at; Start 1015; Stop 1039
gctatttcaggatttgctggtggaa

SEQ ID NO: 104356 - DNA, 25 bp, Artificial
  probe
  misc_feature (1)..(25): SEQ ID NO: 5143; WAN024C54_at; Start 436; Stop 460
tcaattgctgctattctcaatacaa

SEQ ID NO: 104357 - DNA, 25 bp, Artificial
  probe
  misc_feature (1)..(25): SEQ ID NO: 5143; WAN024C54_at; Start 1001; Stop 1025
caaatgtttttggagctatttcagg

SEQ ID NO: 104358 - DNA, 25 bp, Artificial
  probe
  misc_feature (1)..(25): SEQ ID NO: 5143; WAN024C54_at; Start 1081; Stop 1105
accttagtaggagcgatagtgaata

SEQ ID NO: 104359 - DNA, 25 bp, Artificial
  probe
  misc_feature (1)..(25): SEQ ID NO: 5143; WAN024C54_at; Start 33; Stop 57
tattggattactaactttaagcaac

SEQ ID NO: 104360 - DNA, 25 bp, Artificial
  probe
  misc_feature (1)..(25): SEQ ID NO: 5143; WAN024C54_at; Start 588; Stop 612
taacattaagtacactagccttcag

SEQ ID NO: 104361 - DNA, 25 bp, Artificial
  probe
  misc_feature (1)..(25): SEQ ID NO: 5143; WAN024C54_at; Start 605; Stop 629
gccttcagaataaaaagttacagca

SEQ ID NO: 104362 - DNA, 25 bp, Artificial
  probe
  misc_feature (1)..(25): SEQ ID NO: 5143; WAN024C54_at; Start 1188; Stop 1212
gataatacgtgttcatacaatgaga

SEQ ID NO: 104363 - DNA, 25 bp, Artificial
  probe
  misc_feature (1)..(25): SEQ ID NO: 5143; WAN024C54_at; Start 1276; Stop 1300
cagtcaatagtcttatggttggaaa

SEQ ID NO: 104364 - DNA, 25 bp, Artificial
  probe
  misc_feature (1)..(25): SEQ ID NO: 5143; WAN024C54_at; Start 1159; Stop 1183
gccactatgatatcttactttgttg

SEQ ID NO: 104365 - DNA, 25 bp, Artificial
  probe
  misc_feature (1)..(25): SEQ ID NO: 5143; WAN024C54_at; Start 727; Stop 751
gtagcggtgaatggcatctattcag

SEQ ID NO: 104366 - DNA, 25 bp, Artificial
  probe
  misc_feature (1)..(25): SEQ ID NO: 5143; WAN024C54_at; Start 1132; Stop 1156
tattatggagctataggtgctgcta

SEQ ID NO: 104367 - DNA, 25 bp, Artificial
  probe
  misc_feature (1)..(25): SEQ ID NO: 5143; WAN024C54_at; Start 1244; Stop 1268
gagatgtattttcctatgtattgct

SEQ ID NO: 104368 - DNA, 25 bp, Artificial
  probe
  misc_feature (1)..(25): SEQ ID NO: 5143; WAN024C54_at; Start 798; Stop 822
taaccaagcgtggatattatcatct

SEQ ID NO: 104369 - DNA, 25 bp, Artificial
  probe
  misc_feature (1)..(25): SEQ ID NO: 5143; WAN024C54_at; Start 198; Stop 222
ggttcttcgatttgcattagatgaa

SEQ ID NO: 104370 - DNA, 25 bp, Artificial
  probe
  misc_feature (1)..(25): SEQ ID NO: 5143; WAN024C54_at; Start 530; Stop 554
ctaatatattgggtttggtgctacc

SEQ ID NO: 104371 - DNA, 25 bp, Artificial
  probe
  misc_feature (1)..(25): SEQ ID NO: 5143; WAN024C54_at; Start 498; Stop 522
tatacctctaggtttggttggatat

SEQ ID NO: 104372 - DNA, 25 bp, Artificial
  probe
  misc_feature (1)..(25): SEQ ID NO: 5143; WAN024C54_at; Start 687; Stop 711
taatgcaatagatagatacgtagtt

SEQ ID NO: 104373 - DNA, 25 bp, Artificial
  probe
  misc_feature (1)..(25): SEQ ID NO: 5143; WAN024C54_at; Start 888; Stop 912
gattatggtattaatttccgggcta

SEQ ID NO: 104374 - DNA, 25 bp, Artificial
  probe
  misc_feature (1)..(25): SEQ ID NO: 5143; WAN024C54_at; Start 786; Stop 810
tgcaaatatatttaaccaagcgtgg

SEQ ID NO: 104375 - DNA, 25 bp, Artificial
  probe
  misc_feature (1)..(25): SEQ ID NO: 5143; WAN024C54_at; Start 963; Stop 987
ttatgatgcttggaagtttgttccg

SEQ ID NO: 104376 - DNA, 25 bp, Artificial
  probe
  misc_feature (1)..(25): SEQ ID NO: 5143; WAN024C54_at; Start 1145; Stop 1169
taggtgctgctattgccactatgat

SEQ ID NO: 104377 - DNA, 25 bp, Artificial
  probe
  misc_feature (1)..(25): SEQ ID NO: 5143; WAN024C54_at; Start 97; Stop 121
tatacaagcgtactatctacatctg

SEQ ID NO: 104378 - DNA, 25 bp, Artificial
  probe
  misc_feature (1)..(25): SEQ ID NO: 5143; WAN024C54_at; Start 139; Stop 163
ttatttaatacgacaatctcattgc

SEQ ID NO: 104379 - DNA, 25 bp, Artificial
  probe
  misc_feature (1)..(25): SEQ ID NO: 5143; WAN024C54_at; Start 711; Stop 735
tattgcattttgtggtgtagcggtg

SEQ ID NO: 104380 - DNA, 25 bp, Artificial
  probe
  misc_feature (1)..(25): SEQ ID NO: 5143; WAN024C54_at; Start 1069; Stop 1093
tatagtcagtcaaccttagtaggag

SEQ ID NO: 104381 - DNA, 25 bp, Artificial
  probe
  misc_feature (1)..(25): SEQ ID NO: 5143; WAN024C54_at; Start 234; Stop 258
tagtatagtatattcaattggctgg

SEQ ID NO: 104382 - DNA, 25 bp, Artificial
  probe
  misc_feature (1)..(25): SEQ ID NO: 5143; WAN024C54_at; Start 546; Stop 570
ggtgctacctagtttatacttgata

SEQ ID NO: 104383 - DNA, 25 bp, Artificial
  probe
  misc_feature (1)..(25): SEQ ID NO: 5143; WAN024C54_at; Start 904; Stop 928
tccgggctactaatttcttgtagta

SEQ ID NO: 104384 - DNA, 25 bp, Artificial
  probe
  misc_feature (1)..(25): SEQ ID NO: 5143; WAN024C54_at; Start 82; Stop 106
ttaatggttccgttatatacaagcg

SEQ ID NO: 104385 - DNA, 25 bp, Artificial
  probe
  misc_feature (1)..(25): SEQ ID NO: 5143; WAN024C54_at; Start 112; Stop 136
tctacatctgattatggaacatatg

SEQ ID NO: 104386 - DNA, 25 bp, Artificial
  probe
  misc_feature (1)..(25): SEQ ID NO: 5143; WAN024C54_at; Start 743; Stop 767
tctattcagttggttataaaatccc

SEQ ID NO: 104387 - DNA, 25 bp, Artificial
  probe
  misc_feature (1)..(25): SEQ ID NO: 5143; WAN024C54_at; Start 625; Stop 649
cagcaaagacttgttagttacagta

SEQ ID NO: 104388 - DNA, 25 bp, Artificial
  probe
  misc_feature (1)..(25): SEQ ID NO: 7590; WAN024C55_at; Start 86; Stop 110
cagccctagcctttgaattgccaaa

SEQ ID NO: 104389 - DNA, 25 bp, Artificial
  probe
  misc_feature (1)..(25): SEQ ID NO: 7590; WAN024C55_at; Start 90; Stop 114
cctagcctttgaattgccaaatggg

SEQ ID NO: 104390 - DNA, 25 bp, Artificial
  probe
  misc_feature (1)..(25): SEQ ID NO: 7590; WAN024C55_at; Start 116; Stop 140
aaatcgtcactggtaagaactcaga

SEQ ID NO: 104391 - DNA, 25 bp, Artificial
  probe
  misc_feature (1)..(25): SEQ ID NO: 7590; WAN024C55_at; Start 85; Stop 109
ccagccctagcctttgaattgccaa

SEQ ID NO: 104392 - DNA, 25 bp, Artificial
  probe
  misc_feature (1)..(25): SEQ ID NO: 7590; WAN024C55_at; Start 391; Stop 415
cactcaagactgcaccatgggtctt

SEQ ID NO: 104393 - DNA, 25 bp, Artificial
  probe
  misc_feature (1)..(25): SEQ ID NO: 7590; WAN024C55_at; Start 114; Stop 138
ggaaatcgtcactggtaagaactca

SEQ ID NO: 104394 - DNA, 25 bp, Artificial
  probe
  misc_feature (1)..(25): SEQ ID NO: 7590; WAN024C55_at; Start 100; Stop 124
gaattgccaaatggggaaatcgtca

SEQ ID NO: 104395 - DNA, 25 bp, Artificial
  probe
  misc_feature (1)..(25): SEQ ID NO: 7590; WAN024C55_at; Start 82; Stop 106
ggaccagccctagcctttgaattgc

SEQ ID NO: 104396 - DNA, 25 bp, Artificial
  probe
  misc_feature (1)..(25): SEQ ID NO: 7590; WAN024C55_at; Start 119; Stop 143
tcgtcactggtaagaactcagaact

SEQ ID NO: 104397 - DNA, 25 bp, Artificial
  probe
  misc_feature (1)..(25): SEQ ID NO: 7590; WAN024C55_at; Start 84; Stop 108
accagccctagcctttgaattgcca

SEQ ID NO: 104398 - DNA, 25 bp, Artificial
  probe
  misc_feature (1)..(25): SEQ ID NO: 7590; WAN024C55_at; Start 117; Stop 141
aatcgtcactggtaagaactcagaa

SEQ ID NO: 104399 - DNA, 25 bp, Artificial
  probe
  misc_feature (1)..(25): SEQ ID NO: 7590; WAN024C55_at; Start 385; Stop 409
gaagcccactcaagactgcaccatg

SEQ ID NO: 104400 - DNA, 25 bp, Artificial
  probe
  misc_feature (1)..(25): SEQ ID NO: 7590; WAN024C55_at; Start 89; Stop 113
ccctagcctttgaattgccaaatgg

SEQ ID NO: 104401 - DNA, 25 bp, Artificial
  probe
  misc_feature (1)..(25): SEQ ID NO: 7590; WAN024C55_at; Start 75; Stop 99
aactggtggaccagccctagccttt

SEQ ID NO: 104402 - DNA, 25 bp, Artificial
  probe
  misc_feature (1)..(25): SEQ ID NO: 7590; WAN024C55_at; Start 103; Stop 127
ttgccaaatggggaaatcgtcactg

SEQ ID NO: 104403 - DNA, 25 bp, Artificial
  probe
  misc_feature (1)..(25): SEQ ID NO: 7590; WAN024C55_at; Start 388; Stop 412
gcccactcaagactgcaccatgggt

SEQ ID NO: 104404 - DNA, 25 bp, Artificial
  probe
  misc_feature (1)..(25): SEQ ID NO: 7590; WAN024C55_at; Start 107; Stop 131
caaatggggaaatcgtcactggtaa

SEQ ID NO: 104405 - DNA, 25 bp, Artificial
  probe
  misc_feature (1)..(25): SEQ ID NO: 7590; WAN024C55_at; Start 74; Stop 98
aaactggtggaccagccctagcctt

SEQ ID NO: 104406 - DNA, 25 bp, Artificial
  probe
  misc_feature (1)..(25): SEQ ID NO: 7590; WAN024C55_at; Start 118; Stop 142
atcgtcactggtaagaactcagaac

SEQ ID NO: 104407 - DNA, 25 bp, Artificial
  probe
  misc_feature (1)..(25): SEQ ID NO: 7590; WAN024C55_at; Start 95; Stop 119
cctttgaattgccaaatggggaaat

SEQ ID NO: 104408 - DNA, 25 bp, Artificial
  probe
  misc_feature (1)..(25): SEQ ID NO: 7590; WAN024C55_at; Start 392; Stop 416
actcaagactgcaccatgggtcttg

SEQ ID NO: 104409 - DNA, 25 bp, Artificial
  probe
  misc_feature (1)..(25): SEQ ID NO: 7590; WAN024C55_at; Start 87; Stop 111
agccctagcctttgaattgccaaat

SEQ ID NO: 104410 - DNA, 25 bp, Artificial
  probe
  misc_feature (1)..(25): SEQ ID NO: 7590; WAN024C55_at; Start 387; Stop 411
agcccactcaagactgcaccatggg

SEQ ID NO: 104411 - DNA, 25 bp, Artificial
  probe
  misc_feature (1)..(25): SEQ ID NO: 7590; WAN024C55_at; Start 113; Stop 137
gggaaatcgtcactggtaagaactc

SEQ ID NO: 104412 - DNA, 25 bp, Artificial
  probe
  misc_feature (1)..(25): SEQ ID NO: 7590; WAN024C55_at; Start 115; Stop 139
gaaatcgtcactggtaagaactcag

SEQ ID NO: 104413 - DNA, 25 bp, Artificial
  probe
  misc_feature (1)..(25): SEQ ID NO: 7590; WAN024C55_at; Start 80; Stop 104
gtggaccagccctagcctttgaatt

SEQ ID NO: 104414 - DNA, 25 bp, Artificial
  probe
  misc_feature (1)..(25): SEQ ID NO: 7590; WAN024C55_at; Start 92; Stop 116
tagcctttgaattgccaaatgggga

SEQ ID NO: 104415 - DNA, 25 bp, Artificial
  probe
  misc_feature (1)..(25): SEQ ID NO: 7590; WAN024C55_at; Start 106; Stop 130
ccaaatggggaaatcgtcactggta

SEQ ID NO: 104416 - DNA, 25 bp, Artificial
  probe
  misc_feature (1)..(25): SEQ ID NO: 7590; WAN024C55_at; Start 76; Stop 100
actggtggaccagccctagcctttg

SEQ ID NO: 104417 - DNA, 25 bp, Artificial
  probe
  misc_feature (1)..(25): SEQ ID NO: 7590; WAN024C55_at; Start 88; Stop 112
gccctagcctttgaattgccaaatg

SEQ ID NO: 104418 - DNA, 25 bp, Artificial
  probe
  misc_feature (1)..(25): SEQ ID NO: 7590; WAN024C55_at; Start 81; Stop 105
tggaccagccctagcctttgaattg

SEQ ID NO: 104419 - DNA, 25 bp, Artificial
  probe
  misc_feature (1)..(25): SEQ ID NO: 7590; WAN024C55_at; Start 79; Stop 103
ggtggaccagccctagcctttgaat

SEQ ID NO: 104420 - DNA, 25 bp, Artificial
  probe
  misc_feature (1)..(25): SEQ ID NO: 7590; WAN024C55_at; Start 104; Stop 128
tgccaaatggggaaatcgtcactgg

SEQ ID NO: 104421 - DNA, 25 bp, Artificial
  probe
  misc_feature (1)..(25): SEQ ID NO: 7590; WAN024C55_at; Start 99; Stop 123
tgaattgccaaatggggaaatcgtc

SEQ ID NO: 104422 - DNA, 25 bp, Artificial
  probe
  misc_feature (1)..(25): SEQ ID NO: 837; WAN024C56_at; Start 40; Stop 64
ttaatgaatttcaatagggaaatcc

SEQ ID NO: 104423 - DNA, 25 bp, Artificial
  probe
  misc_feature (1)..(25): SEQ ID NO: 837; WAN024C56_at; Start 45; Stop 69
gaatttcaatagggaaatccataca

SEQ ID NO: 104424 - DNA, 25 bp, Artificial
  probe
  misc_feature (1)..(25): SEQ ID NO: 837; WAN024C56_at; Start 16; Stop 40
ctaacacttcattatatcacatttt

SEQ ID NO: 104425 - DNA, 25 bp, Artificial
  probe
  misc_feature (1)..(25): SEQ ID NO: 837; WAN024C56_at; Start 46; Stop 70
aatttcaatagggaaatccatacaa

SEQ ID NO: 104426 - DNA, 25 bp, Artificial
  probe
  misc_feature (1)..(25): SEQ ID NO: 837; WAN024C56_at; Start 42; Stop 66
aatgaatttcaatagggaaatccat

SEQ ID NO: 104427 - DNA, 25 bp, Artificial
  probe
  misc_feature (1)..(25): SEQ ID NO: 837; WAN024C56_at; Start 15; Stop 39
tctaacacttcattatatcacattt

SEQ ID NO: 104428 - DNA, 25 bp, Artificial
  probe
  misc_feature (1)..(25): SEQ ID NO: 837; WAN024C56_at; Start 17; Stop 41
taacacttcattatatcacattttt

SEQ ID NO: 104429 - DNA, 25 bp, Artificial
  probe
  misc_feature (1)..(25): SEQ ID NO: 837; WAN024C56_at; Start 14; Stop 38
ttctaacacttcattatatcacatt

SEQ ID NO: 104430 - DNA, 25 bp, Artificial
  probe
  misc_feature (1)..(25): SEQ ID NO: 837; WAN024C56_at; Start 19; Stop 43
acacttcattatatcacatttttaa

SEQ ID NO: 104431 - DNA, 25 bp, Artificial
  probe
  misc_feature (1)..(25): SEQ ID NO: 837; WAN024C56_at; Start 50; Stop 74
tcaatagggaaatccatacaaaaac

SEQ ID NO: 104432 - DNA, 25 bp, Artificial
  probe
  misc_feature (1)..(25): SEQ ID NO: 837; WAN024C56_at; Start 54; Stop 78
tagggaaatccatacaaaaacaaga

SEQ ID NO: 104433 - DNA, 25 bp, Artificial
  probe
  misc_feature (1)..(25): SEQ ID NO: 837; WAN024C56_at; Start 6; Stop 30
acctgtttttctaacacttcattat

SEQ ID NO: 104434 - DNA, 25 bp, Artificial
  probe
  misc_feature (1)..(25): SEQ ID NO: 837; WAN024C56_at; Start 35; Stop 59
catttttaatgaatttcaataggga

SEQ ID NO: 104435 - DNA, 25 bp, Artificial
  probe
  misc_feature (1)..(25): SEQ ID NO: 837; WAN024C56_at; Start 41; Stop 65
taatgaatttcaatagggaaatcca

SEQ ID NO: 104436 - DNA, 25 bp, Artificial
  probe
  misc_feature (1)..(25): SEQ ID NO: 837; WAN024C56_at; Start 47; Stop 71
atttcaatagggaaatccatacaaa

SEQ ID NO: 104437 - DNA, 25 bp, Artificial
  probe
  misc_feature (1)..(25): SEQ ID NO: 837; WAN024C56_at; Start 13; Stop 37
tttctaacacttcattatatcacat

SEQ ID NO: 104438 - DNA, 25 bp, Artificial
  probe
  misc_feature (1)..(25): SEQ ID NO: 837; WAN024C56_at; Start 8; Stop 32
ctgtttttctaacacttcattatat

SEQ ID NO: 104439 - DNA, 25 bp, Artificial
  probe
  misc_feature (1)..(25): SEQ ID NO: 837; WAN024C56_at; Start 2; Stop 26
tgaaacctgtttttctaacacttca

SEQ ID NO: 104440 - DNA, 25 bp, Artificial
  probe
  misc_feature (1)..(25): SEQ ID NO: 837; WAN024C56_at; Start 18; Stop 42
aacacttcattatatcacattttta

SEQ ID NO: 104441 - DNA, 25 bp, Artificial
  probe
  misc_feature (1)..(25): SEQ ID NO: 837; WAN024C56_at; Start 20; Stop 44
cacttcattatatcacatttttaat

SEQ ID NO: 104442 - DNA, 25 bp, Artificial
  probe
  misc_feature (1)..(25): SEQ ID NO: 837; WAN024C56_at; Start 44; Stop 68
tgaatttcaatagggaaatccatac

SEQ ID NO: 104443 - DNA, 25 bp, Artificial
  probe
  misc_feature (1)..(25): SEQ ID NO: 837; WAN024C56_at; Start 43; Stop 67
atgaatttcaatagggaaatccata

SEQ ID NO: 104444 - DNA, 25 bp, Artificial
  probe
  misc_feature (1)..(25): SEQ ID NO: 837; WAN024C56_at; Start 33; Stop 57
cacatttttaatgaatttcaatagg

SEQ ID NO: 104445 - DNA, 25 bp, Artificial
  probe
  misc_feature (1)..(25): SEQ ID NO: 837; WAN024C56_at; Start 48; Stop 72
tttcaatagggaaatccatacaaaa

SEQ ID NO: 104446 - DNA, 25 bp, Artificial
  probe
  misc_feature (1)..(25): SEQ ID NO: 837; WAN024C56_at; Start 11; Stop 35
tttttctaacacttcattatatcac

SEQ ID NO: 104447 - DNA, 25 bp, Artificial
  probe
  misc_feature (1)..(25): SEQ ID NO: 837; WAN024C56_at; Start 51; Stop 75
caatagggaaatccatacaaaaaca

SEQ ID NO: 104448 - DNA, 25 bp, Artificial
  probe
  misc_feature (1)..(25): SEQ ID NO: 837; WAN024C56_at; Start 7; Stop 31
cctgtttttctaacacttcattata

SEQ ID NO: 104449 - DNA, 25 bp, Artificial
  probe
  misc_feature (1)..(25): SEQ ID NO: 837; WAN024C56_at; Start 53; Stop 77
atagggaaatccatacaaaaacaag

SEQ ID NO: 104450 - DNA, 25 bp, Artificial
  probe
  misc_feature (1)..(25): SEQ ID NO: 837; WAN024C56_at; Start 10; Stop 34
gtttttctaacacttcattatatca

SEQ ID NO: 104451 - DNA, 25 bp, Artificial
  probe
  misc_feature (1)..(25): SEQ ID NO: 837; WAN024C56_at; Start 12; Stop 36
ttttctaacacttcattatatcaca

SEQ ID NO: 104452 - DNA, 25 bp, Artificial
  probe
  misc_feature (1)..(25): SEQ ID NO: 837; WAN024C56_at; Start 49; Stop 73
ttcaatagggaaatccatacaaaaa

SEQ ID NO: 104453 - DNA, 25 bp, Artificial
  probe
  misc_feature (1)..(25): SEQ ID NO: 837; WAN024C56_at; Start 34; Stop 58
acatttttaatgaatttcaataggg

SEQ ID NO: 104454 - DNA, 25 bp, Artificial
  probe
  misc_feature (1)..(25): SEQ ID NO: 837; WAN024C56_at; Start 39; Stop 63
tttaatgaatttcaatagggaaatc

SEQ ID NO: 104455 - DNA, 25 bp, Artificial
  probe
  misc_feature (1)..(25): SEQ ID NO: 837; WAN024C56_at; Start 9; Stop 33
tgtttttctaacacttcattatatc

SEQ ID NO: 104456 - DNA, 25 bp, Artificial
  probe
  misc_feature (1)..(25): SEQ ID NO: 2871; WAN024C57_at; Start 163; Stop 187
tctgcaggtgtgataccgaggtcgt

SEQ ID NO: 104457 - DNA, 25 bp, Artificial
  probe
  misc_feature (1)..(25): SEQ ID NO: 2871; WAN024C57_at; Start 49; Stop 73
ccaaagagttctgagttcttaccag

SEQ ID NO: 104458 - DNA, 25 bp, Artificial
  probe
  misc_feature (1)..(25): SEQ ID NO: 2871; WAN024C57_at; Start 102; Stop 126
ggctagggctggtccaccagtttct

SEQ ID NO: 104459 - DNA, 25 bp, Artificial
  probe
  misc_feature (1)..(25): SEQ ID NO: 2871; WAN024C57_at; Start 84; Stop 108
cccatttggcaattcaaaggctagg

SEQ ID NO: 104460 - DNA, 25 bp, Artificial
  probe
  misc_feature (1)..(25): SEQ ID NO: 2871; WAN024C57_at; Start 89; Stop 113
ttggcaattcaaaggctagggctgg

SEQ ID NO: 104461 - DNA, 25 bp, Artificial
  probe
  misc_feature (1)..(25): SEQ ID NO: 2871; WAN024C57_at; Start 23; Stop 47
cgttgatcaaggcagcggctgtagg

SEQ ID NO: 104462 - DNA, 25 bp, Artificial
  probe
  misc_feature (1)..(25): SEQ ID NO: 2871; WAN024C57_at; Start 95; Stop 119
attcaaaggctagggctggtccacc

SEQ ID NO: 104463 - DNA, 25 bp, Artificial
  probe
  misc_feature (1)..(25): SEQ ID NO: 2871; WAN024C57_at; Start 194; Stop 218
gcaactcaattttcttgacggcagc

SEQ ID NO: 104464 - DNA, 25 bp, Artificial
  probe
  misc_feature (1)..(25): SEQ ID NO: 2871; WAN024C57_at; Start 182; Stop 206
ggtcgttcatgagcaactcaatttt

SEQ ID NO: 104465 - DNA, 25 bp, Artificial
  probe
  misc_feature (1)..(25): SEQ ID NO: 2871; WAN024C57_at; Start 109; Stop 133
gctggtccaccagtttcttctgctt

SEQ ID NO: 104466 - DNA, 25 bp, Artificial
  probe
  misc_feature (1)..(25): SEQ ID NO: 2871; WAN024C57_at; Start 176; Stop 200
taccgaggtcgttcatgagcaactc

SEQ ID NO: 104467 - DNA, 25 bp, Artificial
  probe
  misc_feature (1)..(25): SEQ ID NO: 2871; WAN024C57_at; Start 86; Stop 110
catttggcaattcaaaggctagggc

SEQ ID NO: 104468 - DNA, 25 bp, Artificial
  probe
  misc_feature (1)..(25): SEQ ID NO: 2871; WAN024C57_at; Start 99; Stop 123
aaaggctagggctggtccaccagtt

SEQ ID NO: 104469 - DNA, 25 bp, Artificial
  probe
  misc_feature (1)..(25): SEQ ID NO: 2871; WAN024C57_at; Start 174; Stop 198
gataccgaggtcgttcatgagcaac

SEQ ID NO: 104470 - DNA, 25 bp, Artificial
  probe
  misc_feature (1)..(25): SEQ ID NO: 2871; WAN024C57_at; Start 134; Stop 158
tttggcgcgcaacgacagcaacctt

SEQ ID NO: 104471 - DNA, 25 bp, Artificial
  probe
  misc_feature (1)..(25): SEQ ID NO: 2871; WAN024C57_at; Start 52; Stop 76
aagagttctgagttcttaccagtga

SEQ ID NO: 104472 - DNA, 25 bp, Artificial
  probe
  misc_feature (1)..(25): SEQ ID NO: 2871; WAN024C57_at; Start 137; Stop 161
ggcgcgcaacgacagcaaccttacg

SEQ ID NO: 104473 - DNA, 25 bp, Artificial
  probe
  misc_feature (1)..(25): SEQ ID NO: 2871; WAN024C57_at; Start 191; Stop 215
tgagcaactcaattttcttgacggc

SEQ ID NO: 104474 - DNA, 25 bp, Artificial
  probe
  misc_feature (1)..(25): SEQ ID NO: 2871; WAN024C57_at; Start 230; Stop 254
tttcagctttgaagtcaagaactgt

SEQ ID NO: 104475 - DNA, 25 bp, Artificial
  probe
  misc_feature (1)..(25): SEQ ID NO: 2871; WAN024C57_at; Start 223; Stop 247
ccaactttttcagctttgaagtcaa

SEQ ID NO: 104476 - DNA, 25 bp, Artificial
  probe
  misc_feature (1)..(25): SEQ ID NO: 2871; WAN024C57_at; Start 131; Stop 155
ctttttggcgcgcaacgacagcaac

SEQ ID NO: 104477 - DNA, 25 bp, Artificial
  probe
  misc_feature (1)..(25): SEQ ID NO: 2871; WAN024C57_at; Start 5; Stop 29
cagctgattttttgatggcgttgat

SEQ ID NO: 104478 - DNA, 25 bp, Artificial
  probe
  misc_feature (1)..(25): SEQ ID NO: 2871; WAN024C57_at; Start 93; Stop 117
caattcaaaggctagggctggtcca

SEQ ID NO: 104479 - DNA, 25 bp, Artificial
  probe
  misc_feature (1)..(25): SEQ ID NO: 2871; WAN024C57_at; Start 171; Stop 195
tgtgataccgaggtcgttcatgagc

SEQ ID NO: 104480 - DNA, 25 bp, Artificial
  probe
  misc_feature (1)..(25): SEQ ID NO: 2871; WAN024C57_at; Start 15; Stop 39
tttgatggcgttgatcaaggcagcg

SEQ ID NO: 104481 - DNA, 25 bp, Artificial
  probe
  misc_feature (1)..(25): SEQ ID NO: 2871; WAN024C57_at; Start 105; Stop 129
tagggctggtccaccagtttcttct

SEQ ID NO: 104482 - DNA, 25 bp, Artificial
  probe
  misc_feature (1)..(25): SEQ ID NO: 2871; WAN024C57_at; Start 92; Stop 116
gcaattcaaaggctagggctggtcc

SEQ ID NO: 104483 - DNA, 25 bp, Artificial
  probe
  misc_feature (1)..(25): SEQ ID NO: 2871; WAN024C57_at; Start 124; Stop 148
tcttctgctttttggcgcgcaacga

SEQ ID NO: 104484 - DNA, 25 bp, Artificial
  probe
  misc_feature (1)..(25): SEQ ID NO: 2871; WAN024C57_at; Start 78; Stop 102
gatttccccatttggcaattcaaag

SEQ ID NO: 104485 - DNA, 25 bp, Artificial
  probe
  misc_feature (1)..(25): SEQ ID NO: 2871; WAN024C57_at; Start 197; Stop 221
actcaattttcttgacggcagcttc

SEQ ID NO: 104486 - DNA, 25 bp, Artificial
  probe
  misc_feature (1)..(25): SEQ ID NO: 2871; WAN024C57_at; Start 119; Stop 143
cagtttcttctgctttttggcgcgc

SEQ ID NO: 104487 - DNA, 25 bp, Artificial
  probe
  misc_feature (1)..(25): SEQ ID NO: 2871; WAN024C57_at; Start 179; Stop 203
cgaggtcgttcatgagcaactcaat

SEQ ID NO: 104488 - DNA, 25 bp, Artificial
  probe
  misc_feature (1)..(25): SEQ ID NO: 2871; WAN024C57_at; Start 2; Stop 26
tgtcagctgattttttgatggcgtt

SEQ ID NO: 104489 - DNA, 25 bp, Artificial
  probe
  misc_feature (1)..(25): SEQ ID NO: 2871; WAN024C57_at; Start 165; Stop 189
tgcaggtgtgataccgaggtcgttc

SEQ ID NO: 104490 - DNA, 25 bp, Artificial
  probe
  misc_feature (1)..(25): SEQ ID NO: 5464; WAN024C58_at; Start 235; Stop 259
gatgtagtcgtttttgcccatgcct

SEQ ID NO: 104491 - DNA, 25 bp, Artificial
  probe
  misc_feature (1)..(25): SEQ ID NO: 5464; WAN024C58_at; Start 201; Stop 225
gagcggttacgacaatcaagttgcg

SEQ ID NO: 104492 - DNA, 25 bp, Artificial
  probe
  misc_feature (1)..(25): SEQ ID NO: 5464; WAN024C58_at; Start 384; Stop 408
gtgtaatgacaacggaaccaacaaa

SEQ ID NO: 104493 - DNA, 25 bp, Artificial
  probe
  misc_feature (1)..(25): SEQ ID NO: 5464; WAN024C58_at; Start 53; Stop 77
gcttcataagccaagttaactggat

SEQ ID NO: 104494 - DNA, 25 bp, Artificial
  probe
  misc_feature (1)..(25): SEQ ID NO: 5464; WAN024C58_at; Start 378; Stop 402
cgtattgtgtaatgacaacggaacc

SEQ ID NO: 104495 - DNA, 25 bp, Artificial
  probe
  misc_feature (1)..(25): SEQ ID NO: 5464; WAN024C58_at; Start 42; Stop 66
cagctgtggcagcttcataagccaa

SEQ ID NO: 104496 - DNA, 25 bp, Artificial
  probe
  misc_feature (1)..(25): SEQ ID NO: 5464; WAN024C58_at; Start 155; Stop 179
tacatattggacatacacgttgcca

SEQ ID NO: 104497 - DNA, 25 bp, Artificial
  probe
  misc_feature (1)..(25): SEQ ID NO: 5464; WAN024C58_at; Start 62; Stop 86
gccaagttaactggatgatgaaggg

SEQ ID NO: 104498 - DNA, 25 bp, Artificial
  probe
  misc_feature (1)..(25): SEQ ID NO: 5464; WAN024C58_at; Start 164; Stop 188
gacatacacgttgccaattttccag

SEQ ID NO: 104499 - DNA, 25 bp, Artificial
  probe
  misc_feature (1)..(25): SEQ ID NO: 5464; WAN024C58_at; Start 211; Stop 235
gacaatcaagttgcgactggttttg

SEQ ID NO: 104500 - DNA, 25 bp, Artificial
  probe
  misc_feature (1)..(25): SEQ ID NO: 5464; WAN024C58_at; Start 133; Stop 157
gatgccattgatttggtcgtggtac

SEQ ID NO: 104501 - DNA, 25 bp, Artificial
  probe
  misc_feature (1)..(25): SEQ ID NO: 5464; WAN024C58_at; Start 30; Stop 54
catcatcaaggtcagctgtggcagc

SEQ ID NO: 104502 - DNA, 25 bp, Artificial
  probe
  misc_feature (1)..(25): SEQ ID NO: 5464; WAN024C58_at; Start 295; Stop 319
tcctttgattggataatgaagataa

SEQ ID NO: 104503 - DNA, 25 bp, Artificial
  probe
  misc_feature (1)..(25): SEQ ID NO: 5464; WAN024C58_at; Start 206; Stop 230
gttacgacaatcaagttgcgactgg

SEQ ID NO: 104504 - DNA, 25 bp, Artificial
  probe
  misc_feature (1)..(25): SEQ ID NO: 5464; WAN024C58_at; Start 230; Stop 254
gttttgatgtagtcgtttttgccca

SEQ ID NO: 104505 - DNA, 25 bp, Artificial
  probe
  misc_feature (1)..(25): SEQ ID NO: 5464; WAN024C58_at; Start 105; Stop 129
aggtttcaaatttagcgtagccaga

SEQ ID NO: 104506 - DNA, 25 bp, Artificial
  probe
  misc_feature (1)..(25): SEQ ID NO: 5464; WAN024C58_at; Start 321; Stop 345
aatcaattccgtttttctcaagttg

SEQ ID NO: 104507 - DNA, 25 bp, Artificial
  probe
  misc_feature (1)..(25): SEQ ID NO: 5464; WAN024C58_at; Start 36; Stop 60
caaggtcagctgtggcagcttcata

SEQ ID NO: 104508 - DNA, 25 bp, Artificial
  probe
  misc_feature (1)..(25): SEQ ID NO: 5464; WAN024C58_at; Start 194; Stop 218
ggtccaggagcggttacgacaatca

SEQ ID NO: 104509 - DNA, 25 bp, Artificial
  probe
  misc_feature (1)..(25): SEQ ID NO: 5464; WAN024C58_at; Start 217; Stop 241
caagttgcgactggttttgatgtag

SEQ ID NO: 104510 - DNA, 25 bp, Artificial
  probe
  misc_feature (1)..(25): SEQ ID NO: 5464; WAN024C58_at; Start 373; Stop 397
gccagcgtattgtgtaatgacaacg

SEQ ID NO: 104511 - DNA, 25 bp, Artificial
  probe
  misc_feature (1)..(25): SEQ ID NO: 5464; WAN024C58_at; Start 368; Stop 392
ggttggccagcgtattgtgtaatga

SEQ ID NO: 104512 - DNA, 25 bp, Artificial
  probe
  misc_feature (1)..(25): SEQ ID NO: 5464; WAN024C58_at; Start 146; Stop 170
tggtcgtggtacatattggacatac

SEQ ID NO: 104513 - DNA, 25 bp, Artificial
  probe
  misc_feature (1)..(25): SEQ ID NO: 5464; WAN024C58_at; Start 241; Stop 265
gtcgtttttgcccatgccttctggg

SEQ ID NO: 104514 - DNA, 25 bp, Artificial
  probe
  misc_feature (1)..(25): SEQ ID NO: 5464; WAN024C58_at; Start 15; Stop 39
ggtcaatcatgttgacatcatcaag

SEQ ID NO: 104515 - DNA, 25 bp, Artificial
  probe
  misc_feature (1)..(25): SEQ ID NO: 5464; WAN024C58_at; Start 347; Stop 371
ttgcggaaggcatctgcagcgggtt

SEQ ID NO: 104516 - DNA, 25 bp, Artificial
  probe
  misc_feature (1)..(25): SEQ ID NO: 5464; WAN024C58_at; Start 21; Stop 45
tcatgttgacatcatcaaggtcagc

SEQ ID NO: 104517 - DNA, 25 bp, Artificial
  probe
  misc_feature (1)..(25): SEQ ID NO: 5464; WAN024C58_at; Start 308; Stop 332
taatgaagataagaatcaattccgt

SEQ ID NO: 104518 - DNA, 25 bp, Artificial
  probe
  misc_feature (1)..(25): SEQ ID NO: 5464; WAN024C58_at; Start 168; Stop 192
tacacgttgccaattttccagaacc

SEQ ID NO: 104519 - DNA, 25 bp, Artificial
  probe
  misc_feature (1)..(25): SEQ ID NO: 5464; WAN024C58_at; Start 359; Stop 383
tctgcagcgggttggccagcgtatt

SEQ ID NO: 104520 - DNA, 25 bp, Artificial
  probe
  misc_feature (1)..(25): SEQ ID NO: 5464; WAN024C58_at; Start 103; Stop 127
gaaggtttcaaatttagcgtagcca

SEQ ID NO: 104521 - DNA, 25 bp, Artificial
  probe
  misc_feature (1)..(25): SEQ ID NO: 5464; WAN024C58_at; Start 264; Stop 288
gggaaatgatgtgatccatatccgt

SEQ ID NO: 104522 - DNA, 25 bp, Artificial
  probe
  misc_feature (1)..(25): SEQ ID NO: 5464; WAN024C58_at; Start 197; Stop 221
ccaggagcggttacgacaatcaagt

SEQ ID NO: 104523 - DNA, 25 bp, Artificial
  probe
  misc_feature (1)..(25): SEQ ID NO: 5464; WAN024C58_at; Start 46; Stop 70
tgtggcagcttcataagccaagtta

SEQ ID NO: 104524 - DNA, 25 bp, Artificial
  probe
  misc_feature (1)..(25): SEQ ID NO: 5153; WAN024C59_at; Start 165; Stop 189
tacgagagatcagagtccagactgc

SEQ ID NO: 104525 - DNA, 25 bp, Artificial
  probe
  misc_feature (1)..(25): SEQ ID NO: 5153; WAN024C59_at; Start 62; Stop 86
cgaatgctggctgccaagtggctca

SEQ ID NO: 104526 - DNA, 25 bp, Artificial
  probe
  misc_feature (1)..(25): SEQ ID NO: 5153; WAN024C59_at; Start 108; Stop 132
gaagagcttcatccttggccaagac

SEQ ID NO: 104527 - DNA, 25 bp, Artificial
  probe
  misc_feature (1)..(25): SEQ ID NO: 5153; WAN024C59_at; Start 69; Stop 93
tggctgccaagtggctcatgacact

SEQ ID NO: 104528 - DNA, 25 bp, Artificial
  probe
  misc_feature (1)..(25): SEQ ID NO: 5153; WAN024C59_at; Start 196; Stop 220
cgcacgtggatagtcaactgcttcc

SEQ ID NO: 104529 - DNA, 25 bp, Artificial
  probe
  misc_feature (1)..(25): SEQ ID NO: 5153; WAN024C59_at; Start 282; Stop 306
cagtcacaccttctacataggcagg

SEQ ID NO: 104530 - DNA, 25 bp, Artificial
  probe
  misc_feature (1)..(25): SEQ ID NO: 5153; WAN024C59_at; Start 191; Stop 215
tcaagcgcacgtggatagtcaactg

SEQ ID NO: 104531 - DNA, 25 bp, Artificial
  probe
  misc_feature (1)..(25): SEQ ID NO: 5153; WAN024C59_at; Start 251; Stop 275
tctgcaacctcagcaagaacatgat

SEQ ID NO: 104532 - DNA, 25 bp, Artificial
  probe
  misc_feature (1)..(25): SEQ ID NO: 5153; WAN024C59_at; Start 1; Stop 25
ttgagtcaaaactgcacgactagtt

SEQ ID NO: 104533 - DNA, 25 bp, Artificial
  probe
  misc_feature (1)..(25): SEQ ID NO: 5153; WAN024C59_at; Start 175; Stop 199
cagagtccagactgcttcaagcgca

SEQ ID NO: 104534 - DNA, 25 bp, Artificial
  probe
  misc_feature (1)..(25): SEQ ID NO: 5153; WAN024C59_at; Start 182; Stop 206
cagactgcttcaagcgcacgtggat

SEQ ID NO: 104535 - DNA, 25 bp, Artificial
  probe
  misc_feature (1)..(25): SEQ ID NO: 5153; WAN024C59_at; Start 88; Stop 112
gacacttgccaattggtcacgaaga

SEQ ID NO: 104536 - DNA, 25 bp, Artificial
  probe
  misc_feature (1)..(25): SEQ ID NO: 5153; WAN024C59_at; Start 232; Stop 256
gaagtctgcgattgattgttctgca

SEQ ID NO: 104537 - DNA, 25 bp, Artificial
  probe
  misc_feature (1)..(25): SEQ ID NO: 5153; WAN024C59_at; Start 301; Stop 325
ggcagggatttgtccatcaaagtac

SEQ ID NO: 104538 - DNA, 25 bp, Artificial
  probe
  misc_feature (1)..(25): SEQ ID NO: 5153; WAN024C59_at; Start 95; Stop 119
gccaattggtcacgaagagcttcat

SEQ ID NO: 104539 - DNA, 25 bp, Artificial
  probe
  misc_feature (1)..(25): SEQ ID NO: 5153; WAN024C59_at; Start 14; Stop 38
gcacgactagtttccatcataaatg

SEQ ID NO: 104540 - DNA, 25 bp, Artificial
  probe
  misc_feature (1)..(25): SEQ ID NO: 5153; WAN024C59_at; Start 158; Stop 182
ttattggtacgagagatcagagtcc

SEQ ID NO: 104541 - DNA, 25 bp, Artificial
  probe
  misc_feature (1)..(25): SEQ ID NO: 5153; WAN024C59_at; Start 39; Stop 63
gttcaatcaagtgagcaactacacg

SEQ ID NO: 104542 - DNA, 25 bp, Artificial
  probe
  misc_feature (1)..(25): SEQ ID NO: 5153; WAN024C59_at; Start 307; Stop 331
gatttgtccatcaaagtacttatta

SEQ ID NO: 104543 - DNA, 25 bp, Artificial
  probe
  misc_feature (1)..(25): SEQ ID NO: 5153; WAN024C59_at; Start 132; Stop 156
cccatggtgcggtctcatcgatgta

SEQ ID NO: 104544 - DNA, 25 bp, Artificial
  probe
  misc_feature (1)..(25): SEQ ID NO: 5153; WAN024C59_at; Start 241; Stop 265
gattgattgttctgcaacctcagca

SEQ ID NO: 104545 - DNA, 25 bp, Artificial
  probe
  misc_feature (1)..(25): SEQ ID NO: 5153; WAN024C59_at; Start 120; Stop 144
ccttggccaagacccatggtgcggt

SEQ ID NO: 104546 - DNA, 25 bp, Artificial
  probe
  misc_feature (1)..(25): SEQ ID NO: 5153; WAN024C59_at; Start 55; Stop 79
aactacacgaatgctggctgccaag

SEQ ID NO: 104547 - DNA, 25 bp, Artificial
  probe
  misc_feature (1)..(25): SEQ ID NO: 5153; WAN024C59_at; Start 260; Stop 284
tcagcaagaacatgatcaaattcag

SEQ ID NO: 104548 - DNA, 25 bp, Artificial
  probe
  misc_feature (1)..(25): SEQ ID NO: 5153; WAN024C59_at; Start 137; Stop 161
ggtgcggtctcatcgatgtatttat

SEQ ID NO: 104549 - DNA, 25 bp, Artificial
  probe
  misc_feature (1)..(25): SEQ ID NO: 5153; WAN024C59_at; Start 147; Stop 171
catcgatgtatttattggtacgaga

SEQ ID NO: 104550 - DNA, 25 bp, Artificial
  probe
  misc_feature (1)..(25): SEQ ID NO: 5153; WAN024C59_at; Start 31; Stop 55
cataaatggttcaatcaagtgagca

SEQ ID NO: 104551 - DNA, 25 bp, Artificial
  probe
  misc_feature (1)..(25): SEQ ID NO: 5153; WAN024C59_at; Start 204; Stop 228
gatagtcaactgcttccatgtgtgt

SEQ ID NO: 104552 - DNA, 25 bp, Artificial
  probe
  misc_feature (1)..(25): SEQ ID NO: 5153; WAN024C59_at; Start 293; Stop 317
tctacataggcagggatttgtccat

SEQ ID NO: 104553 - DNA, 25 bp, Artificial
  probe
  misc_feature (1)..(25): SEQ ID NO: 5153; WAN024C59_at; Start 50; Stop 74
tgagcaactacacgaatgctggctg

SEQ ID NO: 104554 - DNA, 25 bp, Artificial
  probe
  misc_feature (1)..(25): SEQ ID NO: 5153; WAN024C59_at; Start 79; Stop 103
gtggctcatgacacttgccaattgg

SEQ ID NO: 104555 - DNA, 25 bp, Artificial
  probe
  misc_feature (1)..(25): SEQ ID NO: 5153; WAN024C59_at; Start 267; Stop 291
gaacatgatcaaattcagtcacacc

SEQ ID NO: 104556 - DNA, 25 bp, Artificial
  probe
  misc_feature (1)..(25): SEQ ID NO: 5153; WAN024C59_at; Start 210; Stop 234
caactgcttccatgtgtgtatggaa

SEQ ID NO: 104557 - DNA, 25 bp, Artificial
  probe
  misc_feature (1)..(25): SEQ ID NO: 5153; WAN024C59_at; Start 220; Stop 244
catgtgtgtatggaagtctgcgatt

SEQ ID NO: 104558 - DNA, 25 bp, Artificial
  probe
  misc_feature (1)..(25): SEQ ID NO: 631; WAN024C5A_at; Start 512; Stop 536
tgattgtcgtaaccgctcctggacc

SEQ ID NO: 104559 - DNA, 25 bp, Artificial
  probe
  misc_feature (1)..(25): SEQ ID NO: 631; WAN024C5A_at; Start 1445; Stop 1469
ttgacccatactaccaatacgaccg

SEQ ID NO: 104560 - DNA, 25 bp, Artificial
  probe
  misc_feature (1)..(25): SEQ ID NO: 631; WAN024C5A_at; Start 635; Stop 659
ggaatcttccccttcatcatccagt

SEQ ID NO: 104561 - DNA, 25 bp, Artificial
  probe
  misc_feature (1)..(25): SEQ ID NO: 631; WAN024C5A_at; Start 151; Stop 175
tatgaacctgacaacaaaatcaagc

SEQ ID NO: 104562 - DNA, 25 bp, Artificial
  probe
  misc_feature (1)..(25): SEQ ID NO: 631; WAN024C5A_at; Start 73; Stop 97
caatttgacggcaagctctacttag

SEQ ID NO: 104563 - DNA, 25 bp, Artificial
  probe
  misc_feature (1)..(25): SEQ ID NO: 631; WAN024C5A_at; Start 727; Stop 751
caaacctatggagaaaccactgtca

SEQ ID NO: 104564 - DNA, 25 bp, Artificial
  probe
  misc_feature (1)..(25): SEQ ID NO: 631; WAN024C5A_at; Start 1393; Stop 1417
ttgactgatgaagacaagaatgtcc

SEQ ID NO: 104565 - DNA, 25 bp, Artificial
  probe
  misc_feature (1)..(25): SEQ ID NO: 631; WAN024C5A_at; Start 61; Stop 85
gagcgcattaaccaatttgacggca

SEQ ID NO: 104566 - DNA, 25 bp, Artificial
  probe
  misc_feature (1)..(25): SEQ ID NO: 631; WAN024C5A_at; Start 790; Stop 814
cgcatgttggaacgtattctcggaa

SEQ ID NO: 104567 - DNA, 25 bp, Artificial
  probe
  misc_feature (1)..(25): SEQ ID NO: 631; WAN024C5A_at; Start 496; Stop 520
aaaaccagtcgcaacttgattgtcg

SEQ ID NO: 104568 - DNA, 25 bp, Artificial
  probe
  misc_feature (1)..(25): SEQ ID NO: 631; WAN024C5A_at; Start 1462; Stop 1486
tacgaccgcttatatcgtaagtaac

SEQ ID NO: 104569 - DNA, 25 bp, Artificial
  probe
  misc_feature (1)..(25): SEQ ID NO: 631; WAN024C5A_at; Start 886; Stop 910
gctgtcgaagcttctaaacaagaaa

SEQ ID NO: 104570 - DNA, 25 bp, Artificial
  probe
  misc_feature (1)..(25): SEQ ID NO: 631; WAN024C5A_at; Start 1372; Stop 1396
gaagcccactcaaccatcatcttga

SEQ ID NO: 104571 - DNA, 25 bp, Artificial
  probe
  misc_feature (1)..(25): SEQ ID NO: 631; WAN024C5A_at; Start 682; Stop 706
acagctgaccttgatgatgtcaaca

SEQ ID NO: 104572 - DNA, 25 bp, Artificial
  probe
  misc_feature (1)..(25): SEQ ID NO: 631; WAN024C5A_at; Start 570; Stop 594
tatgtaccacgaccaaatcaatggc

SEQ ID NO: 104573 - DNA, 25 bp, Artificial
  probe
  misc_feature (1)..(25): SEQ ID NO: 631; WAN024C5A_at; Start 472; Stop 496
ggcatgggcaaaaacgactacatca

SEQ ID NO: 104574 - DNA, 25 bp, Artificial
  probe
  misc_feature (1)..(25): SEQ ID NO: 631; WAN024C5A_at; Start 554; Stop 578
caacgtgtatgtccaatatgtacca

SEQ ID NO: 104575 - DNA, 25 bp, Artificial
  probe
  misc_feature (1)..(25): SEQ ID NO: 631; WAN024C5A_at; Start 248; Stop 272
cacgtggcgacttaggcatttctta

SEQ ID NO: 104576 - DNA, 25 bp, Artificial
  probe
  misc_feature (1)..(25): SEQ ID NO: 631; WAN024C5A_at; Start 978; Stop 1002
gaaaattgagttgctcatgaacgac

SEQ ID NO: 104577 - DNA, 25 bp, Artificial
  probe
  misc_feature (1)..(25): SEQ ID NO: 631; WAN024C5A_at; Start 113; Stop 137
tgttagaagatttccacgctgctcg

SEQ ID NO: 104578 - DNA, 25 bp, Artificial
  probe
  misc_feature (1)..(25): SEQ ID NO: 631; WAN024C5A_at; Start 763; Stop 787
gatatcgaaatcttcccagtgctca

SEQ ID NO: 104579 - DNA, 25 bp, Artificial
  probe
  misc_feature (1)..(25): SEQ ID NO: 631; WAN024C5A_at; Start 538; Stop 562
ggttctggaaaattggcaacgtgta

SEQ ID NO: 104580 - DNA, 25 bp, Artificial
  probe
  misc_feature (1)..(25): SEQ ID NO: 631; WAN024C5A_at; Start 739; Stop 763
gaaaccactgtcaactacaaccgtg

SEQ ID NO: 104581 - DNA, 25 bp, Artificial
  probe
  misc_feature (1)..(25): SEQ ID NO: 631; WAN024C5A_at; Start 601; Stop 625
tctggctacgctaaatttgaaacct

SEQ ID NO: 104582 - DNA, 25 bp, Artificial
  probe
  misc_feature (1)..(25): SEQ ID NO: 631; WAN024C5A_at; Start 823; Stop 847
tacgcttcaccgacagatatgggtg

SEQ ID NO: 104583 - DNA, 25 bp, Artificial
  probe
  misc_feature (1)..(25): SEQ ID NO: 631; WAN024C5A_at; Start 176; Stop 200
tcttgcaagaattgaaagagcaggt

SEQ ID NO: 104584 - DNA, 25 bp, Artificial
  probe
  misc_feature (1)..(25): SEQ ID NO: 631; WAN024C5A_at; Start 196; Stop 220
caggttgaggttgtgattgccatta

SEQ ID NO: 104585 - DNA, 25 bp, Artificial
  probe
  misc_feature (1)..(25): SEQ ID NO: 631; WAN024C5A_at; Start 132; Stop 156
tgctcgtgtccttcctggttatgaa

SEQ ID NO: 104586 - DNA, 25 bp, Artificial
  probe
  misc_feature (1)..(25): SEQ ID NO: 631; WAN024C5A_at; Start 964; Stop 988
gaagctgccgtcaagaaaattgagt

SEQ ID NO: 104587 - DNA, 25 bp, Artificial
  probe
  misc_feature (1)..(25): SEQ ID NO: 631; WAN024C5A_at; Start 849; Stop 873
caacatggttggtttcgctattaca

SEQ ID NO: 104588 - DNA, 25 bp, Artificial
  probe
  misc_feature (1)..(25): SEQ ID NO: 631; WAN024C5A_at; Start 1407; Stop 1431
caagaatgtccttcgtaaactgggt

SEQ ID NO: 104589 - DNA, 25 bp, Artificial
  probe
  misc_feature (1)..(25): SEQ ID NO: 631; WAN024C5A_at; Start 87; Stop 111
gctctacttagagtttggcggtaaa

SEQ ID NO: 104590 - DNA, 25 bp, Artificial
  probe
  misc_feature (1)..(25): SEQ ID NO: 631; WAN024C5A_at; Start 654; Stop 678
tccagttaacttggcttatgaagct

SEQ ID NO: 104591 - DNA, 25 bp, Artificial
  probe
  misc_feature (1)..(25): SEQ ID NO: 631; WAN024C5A_at; Start 234; Stop 258
tgaacattccaaagcacgtggcgac

SEQ ID NO: 104592 - DNA, 25 bp, Artificial
  probe
  misc_feature (1)..(25): SEQ ID NO: 4292; WAN024C5B_at; Start 1270; Stop 1294
catacacacatggaagcagttgact

SEQ ID NO: 104593 - DNA, 25 bp, Artificial
  probe
  misc_feature (1)..(25): SEQ ID NO: 4292; WAN024C5B_at; Start 1546; Stop 1570
gacttcccagcagatgtgactgtag

SEQ ID NO: 104594 - DNA, 25 bp, Artificial
  probe
  misc_feature (1)..(25): SEQ ID NO: 4292; WAN024C5B_at; Start 644; Stop 668
tgctacgcaacttcatcgagccagg

SEQ ID NO: 104595 - DNA, 25 bp, Artificial
  probe
  misc_feature (1)..(25): SEQ ID NO: 4292; WAN024C5B_at; Start 1789; Stop 1813
gataagttgcttcaattccgcttgg

SEQ ID NO: 104596 - DNA, 25 bp, Artificial
  probe
  misc_feature (1)..(25): SEQ ID NO: 4292; WAN024C5B_at; Start 757; Stop 781
gatgcccttcttaactatgcgacag

SEQ ID NO: 104597 - DNA, 25 bp, Artificial
  probe
  misc_feature (1)..(25): SEQ ID NO: 4292; WAN024C5B_at; Start 1084; Stop 1108
tttactcctgaagactatgtcggcc

SEQ ID NO: 104598 - DNA, 25 bp, Artificial
  probe
  misc_feature (1)..(25): SEQ ID NO: 4292; WAN024C5B_at; Start 1302; Stop 1326
tgcgcttgaagcagtctggactctg

SEQ ID NO: 104599 - DNA, 25 bp, Artificial
  probe
  misc_feature (1)..(25): SEQ ID NO: 4292; WAN024C5B_at; Start 132; Stop 156
tgatgtcctagcacgttacaaacgc

SEQ ID NO: 104600 - DNA, 25 bp, Artificial
  probe
  misc_feature (1)..(25): SEQ ID NO: 4292; WAN024C5B_at; Start 1657; Stop 1681
gcagtcgaaaaagaatggaatccgg

SEQ ID NO: 104601 - DNA, 25 bp, Artificial
  probe
  misc_feature (1)..(25): SEQ ID NO: 4292; WAN024C5B_at; Start 202; Stop 226
ggtcagaaaatccagcagaaagcgg

SEQ ID NO: 104602 - DNA, 25 bp, Artificial
  probe
  misc_feature (1)..(25): SEQ ID NO: 4292; WAN024C5B_at; Start 1099; Stop 1123
tatgtcggccgtatcaactatgaat

SEQ ID NO: 104603 - DNA, 25 bp, Artificial
  probe
  misc_feature (1)..(25): SEQ ID NO: 4292; WAN024C5B_at; Start 1420; Stop 1444
cacttggcagccagcattcgtgtag

SEQ ID NO: 104604 - DNA, 25 bp, Artificial
  probe
  misc_feature (1)..(25): SEQ ID NO: 4292; WAN024C5B_at; Start 611; Stop 635
aatttatcacgccagatggtcgcct

SEQ ID NO: 104605 - DNA, 25 bp, Artificial
  probe
  misc_feature (1)..(25): SEQ ID NO: 4292; WAN024C5B_at; Start 1530; Stop 1554
aaacttgagtttggctgacttccca

SEQ ID NO: 104606 - DNA, 25 bp, Artificial
  probe
  misc_feature (1)..(25): SEQ ID NO: 4292; WAN024C5B_at; Start 786; Stop 810
tggctacgctcaagacgaacatggt

SEQ ID NO: 104607 - DNA, 25 bp, Artificial
  probe
  misc_feature (1)..(25): SEQ ID NO: 4292; WAN024C5B_at; Start 502; Stop 526
ggtattgctccatcaggtcatgagg

SEQ ID NO: 104608 - DNA, 25 bp, Artificial
  probe
  misc_feature (1)..(25): SEQ ID NO: 4292; WAN024C5B_at; Start 1674; Stop 1698
gaatccggacgaagttgagctcaaa

SEQ ID NO: 104609 - DNA, 25 bp, Artificial
  probe
  misc_feature (1)..(25): SEQ ID NO: 4292; WAN024C5B_at; Start 1463; Stop 1487
catttatgatggaaactagtcgtgc

SEQ ID NO: 104610 - DNA, 25 bp, Artificial
  probe
  misc_feature (1)..(25): SEQ ID NO: 4292; WAN024C5B_at; Start 1286; Stop 1310
cagttgactatccacgtgcgcttga

SEQ ID NO: 104611 - DNA, 25 bp, Artificial
  probe
  misc_feature (1)..(25): SEQ ID NO: 4292; WAN024C5B_at; Start 971; Stop 995
tgtctaagtcaaaagggaatgtcgt

SEQ ID NO: 104612 - DNA, 25 bp, Artificial
  probe
  misc_feature (1)..(25): SEQ ID NO: 4292; WAN024C5B_at; Start 920; Stop 944
tacctgatcgtttgattgcccatgg

SEQ ID NO: 104613 - DNA, 25 bp, Artificial
  probe
  misc_feature (1)..(25): SEQ ID NO: 4292; WAN024C5B_at; Start 710; Stop 734
gagtgcctgtcccatcaaatccaaa

SEQ ID NO: 104614 - DNA, 25 bp, Artificial
  probe
  misc_feature (1)..(25): SEQ ID NO: 4292; WAN024C5B_at; Start 442; Stop 466
ttctttacagaaagccagctggcag

SEQ ID NO: 104615 - DNA, 25 bp, Artificial
  probe
  misc_feature (1)..(25): SEQ ID NO: 4292; WAN024C5B_at; Start 1946; Stop 1970
tcagccagggtatgattctctcagc

SEQ ID NO: 104616 - DNA, 25 bp, Artificial
  probe
  misc_feature (1)..(25): SEQ ID NO: 4292; WAN024C5B_at; Start 148; Stop 172
tacaaacgcctgatgggctacgatg

SEQ ID NO: 104617 - DNA, 25 bp, Artificial
  probe
  misc_feature (1)..(25): SEQ ID NO: 4292; WAN024C5B_at; Start 1056; Stop 1080
taaccttccagttggttcagacgga

SEQ ID NO: 104618 - DNA, 25 bp, Artificial
  probe
  misc_feature (1)..(25): SEQ ID NO: 4292; WAN024C5B_at; Start 628; Stop 652
ggtcgccttaatgaaatgctacgca

SEQ ID NO: 104619 - DNA, 25 bp, Artificial
  probe
  misc_feature (1)..(25): SEQ ID NO: 4292; WAN024C5B_at; Start 1641; Stop 1665
ggaaggcaataaaccagcagtcgaa

SEQ ID NO: 104620 - DNA, 25 bp, Artificial
  probe
  misc_feature (1)..(25): SEQ ID NO: 4292; WAN024C5B_at; Start 676; Stop 700
gatttggcggtatctcgtacaacct

SEQ ID NO: 104621 - DNA, 25 bp, Artificial
  probe
  misc_feature (1)..(25): SEQ ID NO: 4292; WAN024C5B_at; Start 1563; Stop 1587
gactgtagttgccaaaggaacacct

SEQ ID NO: 104622 - DNA, 25 bp, Artificial
  probe
  misc_feature (1)..(25): SEQ ID NO: 4292; WAN024C5B_at; Start 1124; Stop 1148
tggctaatgaccttgggaacctcct

SEQ ID NO: 104623 - DNA, 25 bp, Artificial
  probe
  misc_feature (1)..(25): SEQ ID NO: 4292; WAN024C5B_at; Start 1748; Stop 1772
gtgtcgcagaagtcaaagaagtgtc

SEQ ID NO: 104624 - DNA, 25 bp, Artificial
  probe
  misc_feature (1)..(25): SEQ ID NO: 4292; WAN024C5B_at; Start 1978; Stop 2002
gatggcaaattaacccttctcacag

SEQ ID NO: 104625 - DNA, 25 bp, Artificial
  probe
  misc_feature (1)..(25): SEQ ID NO: 4292; WAN024C5B_at; Start 474; Stop 498
ccgtgatgaagctggaaatgtgact

SEQ ID NO: 104626 - DNA, 25 bp, Artificial
  probe
  misc_feature (1)..(25): SEQ ID NO: 1937; WAN024C5C_at; Start 212; Stop 236
ggagcattgaccttcacttcgttga

SEQ ID NO: 104627 - DNA, 25 bp, Artificial
  probe
  misc_feature (1)..(25): SEQ ID NO: 1937; WAN024C5C_at; Start 200; Stop 224
ttctctgccgaaggagcattgacct

SEQ ID NO: 104628 - DNA, 25 bp, Artificial
  probe
  misc_feature (1)..(25): SEQ ID NO: 1937; WAN024C5C_at; Start 131; Stop 155
tcgtctggcaagatgacattgtggt

SEQ ID NO: 104629 - DNA, 25 bp, Artificial
  probe
  misc_feature (1)..(25): SEQ ID NO: 1937; WAN024C5C_at; Start 288; Stop 312
gagttgttgccccaatcactgtcaa

SEQ ID NO: 104630 - DNA, 25 bp, Artificial
  probe
  misc_feature (1)..(25): SEQ ID NO: 1937; WAN024C5C_at; Start 261; Stop 285
tcaagatggtgttacggtattcgtc

SEQ ID NO: 104631 - DNA, 25 bp, Artificial
  probe
  misc_feature (1)..(25): SEQ ID NO: 1937; WAN024C5C_at; Start 344; Stop 368
tccgcaagtcctttagaaccactgt

SEQ ID NO: 104632 - DNA, 25 bp, Artificial
  probe
  misc_feature (1)..(25): SEQ ID NO: 1937; WAN024C5C_at; Start 277; Stop 301
gtattcgtcttgagttgttgcccca

SEQ ID NO: 104633 - DNA, 25 bp, Artificial
  probe
  misc_feature (1)..(25): SEQ ID NO: 1937; WAN024C5C_at; Start 432; Stop 456
ctgcttctttcacttcattgactaa

SEQ ID NO: 104634 - DNA, 25 bp, Artificial
  probe
  misc_feature (1)..(25): SEQ ID NO: 1937; WAN024C5C_at; Start 325; Stop 349
gagagctggcttgagaatatccgca

SEQ ID NO: 104635 - DNA, 25 bp, Artificial
  probe
  misc_feature (1)..(25): SEQ ID NO: 1937; WAN024C5C_at; Start 124; Stop 148
caagacttcgtctggcaagatgaca

SEQ ID NO: 104636 - DNA, 25 bp, Artificial
  probe
  misc_feature (1)..(25): SEQ ID NO: 1937; WAN024C5C_at; Start 313; Stop 337
ttctccacgagagagagctggcttg

SEQ ID NO: 104637 - DNA, 25 bp, Artificial
  probe
  misc_feature (1)..(25): SEQ ID NO: 1937; WAN024C5C_at; Start 52; Stop 76
gacaaggtcaatagccttatctggc

SEQ ID NO: 104638 - DNA, 25 bp, Artificial
  probe
  misc_feature (1)..(25): SEQ ID NO: 1937; WAN024C5C_at; Start 4; Stop 28
cacatctgttactggatgttgagcc

SEQ ID NO: 104639 - DNA, 25 bp, Artificial
  probe
  misc_feature (1)..(25): SEQ ID NO: 1937; WAN024C5C_at; Start 79; Stop 103
gctacgttgaggaatgtattgaaca

SEQ ID NO: 104640 - DNA, 25 bp, Artificial
  probe
  misc_feature (1)..(25): SEQ ID NO: 1937; WAN024C5C_at; Start 95; Stop 119
tattgaacagaataatccaccgctg

SEQ ID NO: 104641 - DNA, 25 bp, Artificial
  probe
  misc_feature (1)..(25): SEQ ID NO: 1937; WAN024C5C_at; Start 398; Stop 422
tggtgaatttcatcaaagaagagga

SEQ ID NO: 104642 - DNA, 25 bp, Artificial
  probe
  misc_feature (1)..(25): SEQ ID NO: 1937; WAN024C5C_at; Start 219; Stop 243
tgaccttcacttcgttgaaacgacg

SEQ ID NO: 104643 - DNA, 25 bp, Artificial
  probe
  misc_feature (1)..(25): SEQ ID NO: 1937; WAN024C5C_at; Start 65; Stop 89
gccttatctggcaagctacgttgag

SEQ ID NO: 104644 - DNA, 25 bp, Artificial
  probe
  misc_feature (1)..(25): SEQ ID NO: 1937; WAN024C5C_at; Start 357; Stop 381
tagaaccactgtctccaccagtgct

SEQ ID NO: 104645 - DNA, 25 bp, Artificial
  probe
  misc_feature (1)..(25): SEQ ID NO: 1937; WAN024C5C_at; Start 19; Stop 43
atgttgagccgccaagtgagcagcc

SEQ ID NO: 104646 - DNA, 25 bp, Artificial
  probe
  misc_feature (1)..(25): SEQ ID NO: 1937; WAN024C5C_at; Start 389; Stop 413
ccaagaatttggtgaatttcatcaa

SEQ ID NO: 104647 - DNA, 25 bp, Artificial
  probe
  misc_feature (1)..(25): SEQ ID NO: 1937; WAN024C5C_at; Start 246; Stop 270
caagagcagcattcttcaagatggt

SEQ ID NO: 104648 - DNA, 25 bp, Artificial
  probe
  misc_feature (1)..(25): SEQ ID NO: 1937; WAN024C5C_at; Start 376; Stop 400
agtgctaccagcaccaagaatttgg

SEQ ID NO: 104649 - DNA, 25 bp, Artificial
  probe
  misc_feature (1)..(25): SEQ ID NO: 1937; WAN024C5C_at; Start 147; Stop 171
cattgtggtgttgttgatagaggtc

SEQ ID NO: 104650 - DNA, 25 bp, Artificial
  probe
  misc_feature (1)..(25): SEQ ID NO: 1937; WAN024C5C_at; Start 420; Stop 444
ggataatattccctgcttctttcac

SEQ ID NO: 104651 - DNA, 25 bp, Artificial
  probe
  misc_feature (1)..(25): SEQ ID NO: 1937; WAN024C5C_at; Start 192; Stop 216
taaaagtattctctgccgaaggagc

SEQ ID NO: 104652 - DNA, 25 bp, Artificial
  probe
  misc_feature (1)..(25): SEQ ID NO: 1937; WAN024C5C_at; Start 234; Stop 258
tgaaacgacgagcaagagcagcatt

SEQ ID NO: 104653 - DNA, 25 bp, Artificial
  probe
  misc_feature (1)..(25): SEQ ID NO: 1937; WAN024C5C_at; Start 162; Stop 186
gatagaggtcacgaattccttgaag

SEQ ID NO: 104654 - DNA, 25 bp, Artificial
  probe
  misc_feature (1)..(25): SEQ ID NO: 1937; WAN024C5C_at; Start 110; Stop 134
tccaccgctgctttcaagacttcgt

SEQ ID NO: 104655 - DNA, 25 bp, Artificial
  probe
  misc_feature (1)..(25): SEQ ID NO: 1937; WAN024C5C_at; Start 408; Stop 432
catcaaagaagaggataatattccc

SEQ ID NO: 104656 - DNA, 25 bp, Artificial
  probe
  misc_feature (1)..(25): SEQ ID NO: 1937; WAN024C5C_at; Start 37; Stop 61
agcagccgttacatcgacaaggtca

SEQ ID NO: 104657 - DNA, 25 bp, Artificial
  probe
  misc_feature (1)..(25): SEQ ID NO: 1937; WAN024C5C_at; Start 336; Stop 360
tgagaatatccgcaagtcctttaga

SEQ ID NO: 104658 - DNA, 25 bp, Artificial
  probe
  misc_feature (1)..(25): SEQ ID NO: 1937; WAN024C5C_at; Start 301; Stop 325
aatcactgtcaattctccacgagag

SEQ ID NO: 104659 - DNA, 25 bp, Artificial
  probe
  misc_feature (1)..(25): SEQ ID NO: 1937; WAN024C5C_at; Start 29; Stop 53
gccaagtgagcagccgttacatcga

SEQ ID NO: 104660 - DNA, 25 bp, Artificial
  probe
  misc_feature (1)..(25): SEQ ID NO: 1290; WAN024C5D_at; Start 1250; Stop 1274
tgattggtcaagataaggccgtaga

SEQ ID NO: 104661 - DNA, 25 bp, Artificial
  probe
  misc_feature (1)..(25): SEQ ID NO: 1290; WAN024C5D_at; Start 1868; Stop 1892
tggctgaagttaaccaaaccttggc

SEQ ID NO: 104662 - DNA, 25 bp, Artificial
  probe
  misc_feature (1)..(25): SEQ ID NO: 1290; WAN024C5D_at; Start 1698; Stop 1722
aaatgctggatttggctatgaagcc

SEQ ID NO: 104663 - DNA, 25 bp, Artificial
  probe
  misc_feature (1)..(25): SEQ ID NO: 1290; WAN024C5D_at; Start 1493; Stop 1517
caggctatgtgggttatgatgacaa

SEQ ID NO: 104664 - DNA, 25 bp, Artificial
  probe
  misc_feature (1)..(25): SEQ ID NO: 1290; WAN024C5D_at; Start 2011; Stop 2035
gataaggtgacagacttccacttgg

SEQ ID NO: 104665 - DNA, 25 bp, Artificial
  probe
  misc_feature (1)..(25): SEQ ID NO: 1290; WAN024C5D_at; Start 974; Stop 998
cagatgtgcatgctgttgaacgaga

SEQ ID NO: 104666 - DNA, 25 bp, Artificial
  probe
  misc_feature (1)..(25): SEQ ID NO: 1290; WAN024C5D_at; Start 636; Stop 660
tgcggatattctcaagccagctctc

SEQ ID NO: 104667 - DNA, 25 bp, Artificial
  probe
  misc_feature (1)..(25): SEQ ID NO: 1290; WAN024C5D_at; Start 1148; Stop 1172
tggctgaatctgtggaacgaatgac

SEQ ID NO: 104668 - DNA, 25 bp, Artificial
  probe
  misc_feature (1)..(25): SEQ ID NO: 1290; WAN024C5D_at; Start 924; Stop 948
tgaccttgtcgatgtaacggctgct

SEQ ID NO: 104669 - DNA, 25 bp, Artificial
  probe
  misc_feature (1)..(25): SEQ ID NO: 1290; WAN024C5D_at; Start 493; Stop 517
caataccgtggtagctttgaagaaa

SEQ ID NO: 104670 - DNA, 25 bp, Artificial
  probe
  misc_feature (1)..(25): SEQ ID NO: 1290; WAN024C5D_at; Start 749; Stop 773
tcaacgaagtgaaggtcaatgctcc

SEQ ID NO: 104671 - DNA, 25 bp, Artificial
  probe
  misc_feature (1)..(25): SEQ ID NO: 1290; WAN024C5D_at; Start 952; Stop 976
ttggcggctcaacatccagtaacag

SEQ ID NO: 104672 - DNA, 25 bp, Artificial
  probe
  misc_feature (1)..(25): SEQ ID NO: 1290; WAN024C5D_at; Start 1725; Stop 1749
cttgacagaagatgcggataaacca

SEQ ID NO: 104673 - DNA, 25 bp, Artificial
  probe
  misc_feature (1)..(25): SEQ ID NO: 1290; WAN024C5D_at; Start 585; Stop 609
ccaaattcttggtgctggtagcact

SEQ ID NO: 104674 - DNA, 25 bp, Artificial
  probe
  misc_feature (1)..(25): SEQ ID NO: 1290; WAN024C5D_at; Start 1532; Stop 1556
cagaacgtgttcgtcgcaatccata

SEQ ID NO: 104675 - DNA, 25 bp, Artificial
  probe
  misc_feature (1)..(25): SEQ ID NO: 1290; WAN024C5D_at; Start 1444; Stop 1468
tctgaatacagtgaccgcacagctg

SEQ ID NO: 104676 - DNA, 25 bp, Artificial
  probe
  misc_feature (1)..(25): SEQ ID NO: 1290; WAN024C5D_at; Start 687; Stop 711
ggcaacaactcaagacgaataccgt

SEQ ID NO: 104677 - DNA, 25 bp, Artificial
  probe
  misc_feature (1)..(25): SEQ ID NO: 1290; WAN024C5D_at; Start 1395; Stop 1419
ggcactcgatatgtttggaacccag

SEQ ID NO: 104678 - DNA, 25 bp, Artificial
  probe
  misc_feature (1)..(25): SEQ ID NO: 1290; WAN024C5D_at; Start 722; Stop 746
tgaagaatgctgctcttgctcgtcg

SEQ ID NO: 104679 - DNA, 25 bp, Artificial
  probe
  misc_feature (1)..(25): SEQ ID NO: 1290; WAN024C5D_at; Start 470; Stop 494
tctcaggtcttgaggctggtactca

SEQ ID NO: 104680 - DNA, 25 bp, Artificial
  probe
  misc_feature (1)..(25): SEQ ID NO: 1290; WAN024C5D_at; Start 1380; Stop 1404
gcttgctaagcaattggcactcgat

SEQ ID NO: 104681 - DNA, 25 bp, Artificial
  probe
  misc_feature (1)..(25): SEQ ID NO: 1290; WAN024C5D_at; Start 936; Stop 960
tgtaacggctgctcacttggcggct

SEQ ID NO: 104682 - DNA, 25 bp, Artificial
  probe
  misc_feature (1)..(25): SEQ ID NO: 1290; WAN024C5D_at; Start 1218; Stop 1242
gaaagatatggctcatcgcttgcaa

SEQ ID NO: 104683 - DNA, 25 bp, Artificial
  probe
  misc_feature (1)..(25): SEQ ID NO: 1290; WAN024C5D_at; Start 1613; Stop 1637
tcctccaagttctagatgatggtcg

SEQ ID NO: 104684 - DNA, 25 bp, Artificial
  probe
  misc_feature (1)..(25): SEQ ID NO: 1290; WAN024C5D_at; Start 889; Stop 913
tacattcctcaacgtagcttgccag

SEQ ID NO: 104685 - DNA, 25 bp, Artificial
  probe
  misc_feature (1)..(25): SEQ ID NO: 1290; WAN024C5D_at; Start 1478; Stop 1502
taattggtacaacagcaggctatgt

SEQ ID NO: 104686 - DNA, 25 bp, Artificial
  probe
  misc_feature (1)..(25): SEQ ID NO: 1290; WAN024C5D_at; Start 1410; Stop 1434
tggaacccaggatgcgattatccgt

SEQ ID NO: 104687 - DNA, 25 bp, Artificial
  probe
  misc_feature (1)..(25): SEQ ID NO: 1290; WAN024C5D_at; Start 648; Stop 672
caagccagctctctctcgtggagaa

SEQ ID NO: 104688 - DNA, 25 bp, Artificial
  probe
  misc_feature (1)..(25): SEQ ID NO: 1290; WAN024C5D_at; Start 1683; Stop 1707
cattattgcgacctcaaatgctgga

SEQ ID NO: 104689 - DNA, 25 bp, Artificial
  probe
  misc_feature (1)..(25): SEQ ID NO: 1290; WAN024C5D_at; Start 1133; Stop 1157
caagtgtcaacgatgtggctgaatc

SEQ ID NO: 104690 - DNA, 25 bp, Artificial
  probe
  misc_feature (1)..(25): SEQ ID NO: 1290; WAN024C5D_at; Start 1166; Stop 1190
gaatgacaggtatcccagtatcgca

SEQ ID NO: 104691 - DNA, 25 bp, Artificial
  probe
  misc_feature (1)..(25): SEQ ID NO: 1290; WAN024C5D_at; Start 1794; Stop 1818
caaccgctttaatgcagtcatcgag

SEQ ID NO: 104692 - DNA, 25 bp, Artificial
  probe
  misc_feature (1)..(25): SEQ ID NO: 1290; WAN024C5D_at; Start 1314; Stop 1338
tgatgaaggaaatcgcccaatcggc

SEQ ID NO: 104693 - DNA, 25 bp, Artificial
  probe
  misc_feature (1)..(25): SEQ ID NO: 1290; WAN024C5D_at; Start 703; Stop 727
gaataccgtaacaccatcttgaaga

SEQ ID NO: 104694 - DNA, 25 bp, Artificial
  probe
  misc_feature (1)..(25): SEQ ID NO: 1536; WAN024C5E_at; Start 96; Stop 120
cagaaaaggaaaaacaagcatggac

SEQ ID NO: 104695 - DNA, 25 bp, Artificial
  probe
  misc_feature (1)..(25): SEQ ID NO: 1536; WAN024C5E_at; Start 16; Stop 40
caagaattgttagacagttcgatgt

SEQ ID NO: 104696 - DNA, 25 bp, Artificial
  probe
  misc_feature (1)..(25): SEQ ID NO: 1536; WAN024C5E_at; Start 59; Stop 83
aaggtgctggagttccatggactac

SEQ ID NO: 104697 - DNA, 25 bp, Artificial
  probe
  misc_feature (1)..(25): SEQ ID NO: 1536; WAN024C5E_at; Start 38; Stop 62
tgtctacatctgctatttcccaagg

SEQ ID NO: 104698 - DNA, 25 bp, Artificial
  probe
  misc_feature (1)..(25): SEQ ID NO: 1536; WAN024C5E_at; Start 120; Stop 144
caaaatggcacttctcacagcagaa

SEQ ID NO: 104699 - DNA, 25 bp, Artificial
  probe
  misc_feature (1)..(25): SEQ ID NO: 1536; WAN024C5E_at; Start 1; Stop 25
atgagagaagttattcaagaattgt

SEQ ID NO: 104700 - DNA, 25 bp, Artificial
  probe
  misc_feature (1)..(25): SEQ ID NO: 1536; WAN024C5E_at; Start 36; Stop 60
gatgtctacatctgctatttcccaa

SEQ ID NO: 104701 - DNA, 25 bp, Artificial
  probe
  misc_feature (1)..(25): SEQ ID NO: 1536; WAN024C5E_at; Start 126; Stop 150
ggcacttctcacagcagaaaaactt

SEQ ID NO: 104702 - DNA, 25 bp, Artificial
  probe
  misc_feature (1)..(25): SEQ ID NO: 1536; WAN024C5E_at; Start 56; Stop 80
cccaaggtgctggagttccatggac

SEQ ID NO: 104703 - DNA, 25 bp, Artificial
  probe
  misc_feature (1)..(25): SEQ ID NO: 1536; WAN024C5E_at; Start 93; Stop 117
cctcagaaaaggaaaaacaagcatg

SEQ ID NO: 104704 - DNA, 25 bp, Artificial
  probe
  misc_feature (1)..(25): SEQ ID NO: 1536; WAN024C5E_at; Start 106; Stop 130
aaaacaagcatggacaaaatggcac

SEQ ID NO: 104705 - DNA, 25 bp, Artificial
  probe
  misc_feature (1)..(25): SEQ ID NO: 1536; WAN024C5E_at; Start 12; Stop 36
tattcaagaattgttagacagttcg

SEQ ID NO: 104706 - DNA, 25 bp, Artificial
  probe
  misc_feature (1)..(25): SEQ ID NO: 1536; WAN024C5E_at; Start 122; Stop 146
aaatggcacttctcacagcagaaaa

SEQ ID NO: 104707 - DNA, 25 bp, Artificial
  probe
  misc_feature (1)..(25): SEQ ID NO: 1536; WAN024C5E_at; Start 73; Stop 97
ccatggactactgtttctgacctca

SEQ ID NO: 104708 - DNA, 25 bp, Artificial
  probe
  misc_feature (1)..(25): SEQ ID NO: 1536; WAN024C5E_at; Start 151; Stop 175
tatgaatttgctacaactgataagc

SEQ ID NO: 104709 - DNA, 25 bp, Artificial
  probe
  misc_feature (1)..(25): SEQ ID NO: 1536; WAN024C5E_at; Start 44; Stop 68
catctgctatttcccaaggtgctgg

SEQ ID NO: 104710 - DNA, 25 bp, Artificial
  probe
  misc_feature (1)..(25): SEQ ID NO: 1536; WAN024C5E_at; Start 116; Stop 140
tggacaaaatggcacttctcacagc

SEQ ID NO: 104711 - DNA, 25 bp, Artificial
  probe
  misc_feature (1)..(25): SEQ ID NO: 1536; WAN024C5E_at; Start 48; Stop 72
tgctatttcccaaggtgctggagtt

SEQ ID NO: 104712 - DNA, 25 bp, Artificial
  probe
  misc_feature (1)..(25): SEQ ID NO: 1536; WAN024C5E_at; Start 140; Stop 164
cagaaaaactttatgaatttgctac

SEQ ID NO: 104713 - DNA, 25 bp, Artificial
  probe
  misc_feature (1)..(25): SEQ ID NO: 1536; WAN024C5E_at; Start 28; Stop 52
gacagttcgatgtctacatctgcta

SEQ ID NO: 104714 - DNA, 25 bp, Artificial
  probe
  misc_feature (1)..(25): SEQ ID NO: 1536; WAN024C5E_at; Start 110; Stop 134
caagcatggacaaaatggcacttct

SEQ ID NO: 104715 - DNA, 25 bp, Artificial
  probe
  misc_feature (1)..(25): SEQ ID NO: 1536; WAN024C5E_at; Start 68; Stop 92
gagttccatggactactgtttctga

SEQ ID NO: 104716 - DNA, 25 bp, Artificial
  probe
  misc_feature (1)..(25): SEQ ID NO: 1536; WAN024C5E_at; Start 132; Stop 156
tctcacagcagaaaaactttatgaa

SEQ ID NO: 104717 - DNA, 25 bp, Artificial
  probe
  misc_feature (1)..(25): SEQ ID NO: 1536; WAN024C5E_at; Start 81; Stop 105
tactgtttctgacctcagaaaagga

SEQ ID NO: 104718 - DNA, 25 bp, Artificial
  probe
  misc_feature (1)..(25): SEQ ID NO: 1536; WAN024C5E_at; Start 53; Stop 77
tttcccaaggtgctggagttccatg

SEQ ID NO: 104719 - DNA, 25 bp, Artificial
  probe
  misc_feature (1)..(25): SEQ ID NO: 1536; WAN024C5E_at; Start 51; Stop 75
tatttcccaaggtgctggagttcca

SEQ ID NO: 104720 - DNA, 25 bp, Artificial
  probe
  misc_feature (1)..(25): SEQ ID NO: 1536; WAN024C5E_at; Start 76; Stop 100
tggactactgtttctgacctcagaa

SEQ ID NO: 104721 - DNA, 25 bp, Artificial
  probe
  misc_feature (1)..(25): SEQ ID NO: 1536; WAN024C5E_at; Start 113; Stop 137
gcatggacaaaatggcacttctcac

SEQ ID NO: 104722 - DNA, 25 bp, Artificial
  probe
  misc_feature (1)..(25): SEQ ID NO: 1536; WAN024C5E_at; Start 46; Stop 70
tctgctatttcccaaggtgctggag

SEQ ID NO: 104723 - DNA, 25 bp, Artificial
  probe
  misc_feature (1)..(25): SEQ ID NO: 1536; WAN024C5E_at; Start 90; Stop 114
tgacctcagaaaaggaaaaacaagc

SEQ ID NO: 104724 - DNA, 25 bp, Artificial
  probe
  misc_feature (1)..(25): SEQ ID NO: 1536; WAN024C5E_at; Start 40; Stop 64
tctacatctgctatttcccaaggtg

SEQ ID NO: 104725 - DNA, 25 bp, Artificial
  probe
  misc_feature (1)..(25): SEQ ID NO: 1536; WAN024C5E_at; Start 153; Stop 177
tgaatttgctacaactgataagcag

SEQ ID NO: 104726 - DNA, 25 bp, Artificial
  probe
  misc_feature (1)..(25): SEQ ID NO: 1536; WAN024C5E_at; Start 63; Stop 87
tgctggagttccatggactactgtt

SEQ ID NO: 104727 - DNA, 25 bp, Artificial
  probe
  misc_feature (1)..(25): SEQ ID NO: 1536; WAN024C5E_at; Start 118; Stop 142
gacaaaatggcacttctcacagcag

SEQ ID NO: 104728 - DNA, 25 bp, Artificial
  probe
  misc_feature (1)..(25): SEQ ID NO: 2738; WAN024C5F_at; Start 158; Stop 182
aaatcggcattaacgggctccttcg

SEQ ID NO: 104729 - DNA, 25 bp, Artificial
  probe
  misc_feature (1)..(25): SEQ ID NO: 2738; WAN024C5F_at; Start 354; Stop 378
gccgattgtaaaagtatttcagcga

SEQ ID NO: 104730 - DNA, 25 bp, Artificial
  probe
  misc_feature (1)..(25): SEQ ID NO: 2738; WAN024C5F_at; Start 281; Stop 305
ggtacatcgcatttacttttcaatc

SEQ ID NO: 104731 - DNA, 25 bp, Artificial
  probe
  misc_feature (1)..(25): SEQ ID NO: 2738; WAN024C5F_at; Start 46; Stop 70
gaagatggtttggtcttgtacgctc

SEQ ID NO: 104732 - DNA, 25 bp, Artificial
  probe
  misc_feature (1)..(25): SEQ ID NO: 2738; WAN024C5F_at; Start 219; Stop 243
tccggcgtccgttttgttgcctgaa

SEQ ID NO: 104733 - DNA, 25 bp, Artificial
  probe
  misc_feature (1)..(25): SEQ ID NO: 2738; WAN024C5F_at; Start 373; Stop 397
cagcgattacttgaaaaagatgatg

SEQ ID NO: 104734 - DNA, 25 bp, Artificial
  probe
  misc_feature (1)..(25): SEQ ID NO: 2738; WAN024C5F_at; Start 306; Stop 330
tctcattgaaaattaccgcaaatta

SEQ ID NO: 104735 - DNA, 25 bp, Artificial
  probe
  misc_feature (1)..(25): SEQ ID NO: 2738; WAN024C5F_at; Start 169; Stop 193
aacgggctccttcgtaagatttcag

SEQ ID NO: 104736 - DNA, 25 bp, Artificial
  probe
  misc_feature (1)..(25): SEQ ID NO: 2738; WAN024C5F_at; Start 351; Stop 375
tcagccgattgtaaaagtatttcag

SEQ ID NO: 104737 - DNA, 25 bp, Artificial
  probe
  misc_feature (1)..(25): SEQ ID NO: 2738; WAN024C5F_at; Start 203; Stop 227
tactgatgatcctcattccggcgtc

SEQ ID NO: 104738 - DNA, 25 bp, Artificial
  probe
  misc_feature (1)..(25): SEQ ID NO: 2738; WAN024C5F_at; Start 223; Stop 247
gcgtccgttttgttgcctgaaaaga

SEQ ID NO: 104739 - DNA, 25 bp, Artificial
  probe
  misc_feature (1)..(25): SEQ ID NO: 2738; WAN024C5F_at; Start 289; Stop 313
gcatttacttttcaatctctcattg

SEQ ID NO: 104740 - DNA, 25 bp, Artificial
  probe
  misc_feature (1)..(25): SEQ ID NO: 2738; WAN024C5F_at; Start 232; Stop 256
ttgttgcctgaaaagacaggttttg

SEQ ID NO: 104741 - DNA, 25 bp, Artificial
  probe
  misc_feature (1)..(25): SEQ ID NO: 2738; WAN024C5F_at; Start 67; Stop 91
gctctagcactgattgtctcaatgg

SEQ ID NO: 104742 - DNA, 25 bp, Artificial
  probe
  misc_feature (1)..(25): SEQ ID NO: 2738; WAN024C5F_at; Start 155; Stop 179
gcaaaatcggcattaacgggctcct

SEQ ID NO: 104743 - DNA, 25 bp, Artificial
  probe
  misc_feature (1)..(25): SEQ ID NO: 2738; WAN024C5F_at; Start 52; Stop 76
ggtttggtcttgtacgctctagcac

SEQ ID NO: 104744 - DNA, 25 bp, Artificial
  probe
  misc_feature (1)..(25): SEQ ID NO: 2738; WAN024C5F_at; Start 164; Stop 188
gcattaacgggctccttcgtaagat

SEQ ID NO: 104745 - DNA, 25 bp, Artificial
  probe
  misc_feature (1)..(25): SEQ ID NO: 2738; WAN024C5F_at; Start 194; Stop 218
gggttctcttactgatgatcctcat

SEQ ID NO: 104746 - DNA, 25 bp, Artificial
  probe
  misc_feature (1)..(25): SEQ ID NO: 2738; WAN024C5F_at; Start 64; Stop 88
tacgctctagcactgattgtctcaa

SEQ ID NO: 104747 - DNA, 25 bp, Artificial
  probe
  misc_feature (1)..(25): SEQ ID NO: 2738; WAN024C5F_at; Start 38; Stop 62
tacagactgaagatggtttggtctt

SEQ ID NO: 104748 - DNA, 25 bp, Artificial
  probe
  misc_feature (1)..(25): SEQ ID NO: 2738; WAN024C5F_at; Start 301; Stop 325
caatctctcattgaaaattaccgca

SEQ ID NO: 104749 - DNA, 25 bp, Artificial
  probe
  misc_feature (1)..(25): SEQ ID NO: 2738; WAN024C5F_at; Start 207; Stop 231
gatgatcctcattccggcgtccgtt

SEQ ID NO: 104750 - DNA, 25 bp, Artificial
  probe
  misc_feature (1)..(25): SEQ ID NO: 2738; WAN024C5F_at; Start 339; Stop 363
tgttactctttttcagccgattgta

SEQ ID NO: 104751 - DNA, 25 bp, Artificial
  probe
  misc_feature (1)..(25): SEQ ID NO: 2738; WAN024C5F_at; Start 389; Stop 413
aagatgatgatacgaaaaaaggaga

SEQ ID NO: 104752 - DNA, 25 bp, Artificial
  probe
  misc_feature (1)..(25): SEQ ID NO: 2738; WAN024C5F_at; Start 361; Stop 385
gtaaaagtatttcagcgattacttg

SEQ ID NO: 104753 - DNA, 25 bp, Artificial
  probe
  misc_feature (1)..(25): SEQ ID NO: 2738; WAN024C5F_at; Start 56; Stop 80
tggtcttgtacgctctagcactgat

SEQ ID NO: 104754 - DNA, 25 bp, Artificial
  probe
  misc_feature (1)..(25): SEQ ID NO: 2738; WAN024C5F_at; Start 276; Stop 300
tctcgggtacatcgcatttactttt

SEQ ID NO: 104755 - DNA, 25 bp, Artificial
  probe
  misc_feature (1)..(25): SEQ ID NO: 2738; WAN024C5F_at; Start 380; Stop 404
tacttgaaaaagatgatgatacgaa

SEQ ID NO: 104756 - DNA, 25 bp, Artificial
  probe
  misc_feature (1)..(25): SEQ ID NO: 2738; WAN024C5F_at; Start 334; Stop 358
ggaaatgttactctttttcagccga

SEQ ID NO: 104757 - DNA, 25 bp, Artificial
  probe
  misc_feature (1)..(25): SEQ ID NO: 2738; WAN024C5F_at; Start 171; Stop 195
cgggctccttcgtaagatttcaggg

SEQ ID NO: 104758 - DNA, 25 bp, Artificial
  probe
  misc_feature (1)..(25): SEQ ID NO: 2738; WAN024C5F_at; Start 78; Stop 102
gattgtctcaatggaaatcattgat

SEQ ID NO: 104759 - DNA, 25 bp, Artificial
  probe
  misc_feature (1)..(25): SEQ ID NO: 2738; WAN024C5F_at; Start 72; Stop 96
agcactgattgtctcaatggaaatc

SEQ ID NO: 104760 - DNA, 25 bp, Artificial
  probe
  misc_feature (1)..(25): SEQ ID NO: 2738; WAN024C5F_at; Start 128; Stop 152
ttatcaatcctgacatcgagtacaa

SEQ ID NO: 104761 - DNA, 25 bp, Artificial
  probe
  misc_feature (1)..(25): SEQ ID NO: 2738; WAN024C5F_at; Start 228; Stop 252
cgttttgttgcctgaaaagacaggt

SEQ ID NO: 104762 - DNA, 25 bp, Artificial
  probe
  misc_feature (1)..(25): SEQ ID NO: 7207; WAN024C5G_at; Start 437; Stop 461
ccttgctcgagcagaaaatgggaga

SEQ ID NO: 104763 - DNA, 25 bp, Artificial
  probe
  misc_feature (1)..(25): SEQ ID NO: 7207; WAN024C5G_at; Start 697; Stop 721
gatcaatctgttcgtaagtctcaaa

SEQ ID NO: 104764 - DNA, 25 bp, Artificial
  probe
  misc_feature (1)..(25): SEQ ID NO: 7207; WAN024C5G_at; Start 344; Stop 368
ccattcgagactgggacgttaacga

SEQ ID NO: 104765 - DNA, 25 bp, Artificial
  probe
  misc_feature (1)..(25): SEQ ID NO: 7207; WAN024C5G_at; Start 318; Stop 342
tagcgagttgaaactggcagatgcc

SEQ ID NO: 104766 - DNA, 25 bp, Artificial
  probe
  misc_feature (1)..(25): SEQ ID NO: 7207; WAN024C5G_at; Start 947; Stop 971
cagttgtctctatgcacccagcgga

SEQ ID NO: 104767 - DNA, 25 bp, Artificial
  probe
  misc_feature (1)..(25): SEQ ID NO: 7207; WAN024C5G_at; Start 448; Stop 472
cagaaaatgggagatgcaacttggc

SEQ ID NO: 104768 - DNA, 25 bp, Artificial
  probe
  misc_feature (1)..(25): SEQ ID NO: 7207; WAN024C5G_at; Start 724; Stop 748
gaggttgttggaaatcctgtatcga

SEQ ID NO: 104769 - DNA, 25 bp, Artificial
  probe
  misc_feature (1)..(25): SEQ ID NO: 7207; WAN024C5G_at; Start 788; Stop 812
ttggaacagatcctacatatggaac

SEQ ID NO: 104770 - DNA, 25 bp, Artificial
  probe
  misc_feature (1)..(25): SEQ ID NO: 7207; WAN024C5G_at; Start 381; Stop 405
tggtggaaccatgaccttttctcaa

SEQ ID NO: 104771 - DNA, 25 bp, Artificial
  probe
  misc_feature (1)..(25): SEQ ID NO: 7207; WAN024C5G_at; Start 751; Stop 775
gaagcggcatcagttacgcgtgacc

SEQ ID NO: 104772 - DNA, 25 bp, Artificial
  probe
  misc_feature (1)..(25): SEQ ID NO: 7207; WAN024C5G_at; Start 1024; Stop 1048
ggtattcaacttggagagtttgcca

SEQ ID NO: 104773 - DNA, 25 bp, Artificial
  probe
  misc_feature (1)..(25): SEQ ID NO: 7207; WAN024C5G_at; Start 959; Stop 983
tgcacccagcggaaaatcctgactt

SEQ ID NO: 104774 - DNA, 25 bp, Artificial
  probe
  misc_feature (1)..(25): SEQ ID NO: 7207; WAN024C5G_at; Start 925; Stop 949
ggttcaacaaactatattttctcag

SEQ ID NO: 104775 - DNA, 25 bp, Artificial
  probe
  misc_feature (1)..(25): SEQ ID NO: 7207; WAN024C5G_at; Start 460; Stop 484
gatgcaacttggctcgattatctca

SEQ ID NO: 104776 - DNA, 25 bp, Artificial
  probe
  misc_feature (1)..(25): SEQ ID NO: 7207; WAN024C5G_at; Start 21; Stop 45
taccactctttcaagtcctttgcag

SEQ ID NO: 104777 - DNA, 25 bp, Artificial
  probe
  misc_feature (1)..(25): SEQ ID NO: 7207; WAN024C5G_at; Start 674; Stop 698
tcagtgcactttatgatcctaatga

SEQ ID NO: 104778 - DNA, 25 bp, Artificial
  probe
  misc_feature (1)..(25): SEQ ID NO: 7207; WAN024C5G_at; Start 129; Stop 153
aggtgaaatcctcgccacaactcaa

SEQ ID NO: 104779 - DNA, 25 bp, Artificial
  probe
  misc_feature (1)..(25): SEQ ID NO: 7207; WAN024C5G_at; Start 709; Stop 733
cgtaagtctcaaaaagaggttgttg

SEQ ID NO: 104780 - DNA, 25 bp, Artificial
  probe
  misc_feature (1)..(25): SEQ ID NO: 7207; WAN024C5G_at; Start 774; Stop 798
ccacatggttatggttggaacagat

SEQ ID NO: 104781 - DNA, 25 bp, Artificial
  probe
  misc_feature (1)..(25): SEQ ID NO: 7207; WAN024C5G_at; Start 738; Stop 762
tcctgtatcgaaagaagcggcatca

SEQ ID NO: 104782 - DNA, 25 bp, Artificial
  probe
  misc_feature (1)..(25): SEQ ID NO: 7207; WAN024C5G_at; Start 423; Stop 447
taatatcgggatgaccttgctcgag

SEQ ID NO: 104783 - DNA, 25 bp, Artificial
  probe
  misc_feature (1)..(25): SEQ ID NO: 7207; WAN024C5G_at; Start 300; Stop 324
tggagaatactttaacagtagcgag

SEQ ID NO: 104784 - DNA, 25 bp, Artificial
  probe
  misc_feature (1)..(25): SEQ ID NO: 7207; WAN024C5G_at; Start 882; Stop 906
gactgcacagattgcggatgagaaa

SEQ ID NO: 104785 - DNA, 25 bp, Artificial
  probe
  misc_feature (1)..(25): SEQ ID NO: 7207; WAN024C5G_at; Start 849; Stop 873
tgttccaggtcagaatgtggccctt

SEQ ID NO: 104786 - DNA, 25 bp, Artificial
  probe
  misc_feature (1)..(25): SEQ ID NO: 7207; WAN024C5G_at; Start 6; Stop 30
cggaaaggatgtttataccactctt

SEQ ID NO: 104787 - DNA, 25 bp, Artificial
  probe
  misc_feature (1)..(25): SEQ ID NO: 7207; WAN024C5G_at; Start 332; Stop 356
tggcagatgccaccattcgagactg

SEQ ID NO: 104788 - DNA, 25 bp, Artificial
  probe
  misc_feature (1)..(25): SEQ ID NO: 7207; WAN024C5G_at; Start 170; Stop 194
ccgatactaaggatggcattacaaa

SEQ ID NO: 104789 - DNA, 25 bp, Artificial
  probe
  misc_feature (1)..(25): SEQ ID NO: 7207; WAN024C5G_at; Start 266; Stop 290
tggcagcagctattgataataagac

SEQ ID NO: 104790 - DNA, 25 bp, Artificial
  probe
  misc_feature (1)..(25): SEQ ID NO: 7207; WAN024C5G_at; Start 910; Stop 934
ggtggttatcttacaggttcaacaa

SEQ ID NO: 104791 - DNA, 25 bp, Artificial
  probe
  misc_feature (1)..(25): SEQ ID NO: 7207; WAN024C5G_at; Start 372; Stop 396
tttgacgagtggtggaaccatgacc

SEQ ID NO: 104792 - DNA, 25 bp, Artificial
  probe
  misc_feature (1)..(25): SEQ ID NO: 7207; WAN024C5G_at; Start 760; Stop 784
tcagttacgcgtgaccacatggtta

SEQ ID NO: 104793 - DNA, 25 bp, Artificial
  probe
  misc_feature (1)..(25): SEQ ID NO: 7207; WAN024C5G_at; Start 864; Stop 888
tgtggcccttaaatcagggactgca

SEQ ID NO: 104794 - DNA, 25 bp, Artificial
  probe
  misc_feature (1)..(25): SEQ ID NO: 7207; WAN024C5G_at; Start 248; Stop 272
ccatgaaggtgatgatgttggcagc

SEQ ID NO: 104795 - DNA, 25 bp, Artificial
  probe
  misc_feature (1)..(25): SEQ ID NO: 7207; WAN024C5G_at; Start 408; Stop 432
ttttgctcactctagtaatatcggg

SEQ ID NO: 104796 - DNA, 25 bp, Artificial
  probe
  misc_feature (1)..(25): SEQ ID NO: 5722; WAN024C5H_at; Start 136; Stop 160
cttgagattaggttgcgagagttgc

SEQ ID NO: 104797 - DNA, 25 bp, Artificial
  probe
  misc_feature (1)..(25): SEQ ID NO: 5722; WAN024C5H_at; Start 151; Stop 175
cgagagttgctctcttacataggat

SEQ ID NO: 104798 - DNA, 25 bp, Artificial
  probe
  misc_feature (1)..(25): SEQ ID NO: 5722; WAN024C5H_at; Start 38; Stop 62
aaatcaatccccttgacctctgcag

SEQ ID NO: 104799 - DNA, 25 bp, Artificial
  probe
  misc_feature (1)..(25): SEQ ID NO: 5722; WAN024C5H_at; Start 154; Stop 178
gagttgctctcttacataggattct

SEQ ID NO: 104800 - DNA, 25 bp, Artificial
  probe
  misc_feature (1)..(25): SEQ ID NO: 5722; WAN024C5H_at; Start 172; Stop 196
ggattcttccatgtccagatactta

SEQ ID NO: 104801 - DNA, 25 bp, Artificial
  probe
  misc_feature (1)..(25): SEQ ID NO: 5722; WAN024C5H_at; Start 18; Stop 42
tacgattgggactggttgtaaaatc

SEQ ID NO: 104802 - DNA, 25 bp, Artificial
  probe
  misc_feature (1)..(25): SEQ ID NO: 5722; WAN024C5H_at; Start 59; Stop 83
gcagcttccaattcttttttgatag

SEQ ID NO: 104803 - DNA, 25 bp, Artificial
  probe
  misc_feature (1)..(25): SEQ ID NO: 5722; WAN024C5H_at; Start 90; Stop 114
tattggcataggtaatcccatttcc

SEQ ID NO: 104804 - DNA, 25 bp, Artificial
  probe
  misc_feature (1)..(25): SEQ ID NO: 5722; WAN024C5H_at; Start 131; Stop 155
acttgcttgagattaggttgcgaga

SEQ ID NO: 104805 - DNA, 25 bp, Artificial
  probe
  misc_feature (1)..(25): SEQ ID NO: 5722; WAN024C5H_at; Start 189; Stop 213
gatacttatgaaagacctctgcaac

SEQ ID NO: 104806 - DNA, 25 bp, Artificial
  probe
  misc_feature (1)..(25): SEQ ID NO: 5722; WAN024C5H_at; Start 166; Stop 190
tacataggattcttccatgtccaga

SEQ ID NO: 104807 - DNA, 25 bp, Artificial
  probe
  misc_feature (1)..(25): SEQ ID NO: 5722; WAN024C5H_at; Start 206; Stop 230
tctgcaaccttgttaaattgtgttt

SEQ ID NO: 104808 - DNA, 25 bp, Artificial
  probe
  misc_feature (1)..(25): SEQ ID NO: 5722; WAN024C5H_at; Start 119; Stop 143
gctccaaaggaaacttgcttgagat

SEQ ID NO: 104809 - DNA, 25 bp, Artificial
  probe
  misc_feature (1)..(25): SEQ ID NO: 5722; WAN024C5H_at; Start 23; Stop 47
ttgggactggttgtaaaatcaatcc

SEQ ID NO: 104810 - DNA, 25 bp, Artificial
  probe
  misc_feature (1)..(25): SEQ ID NO: 5722; WAN024C5H_at; Start 181; Stop 205
catgtccagatacttatgaaagacc

SEQ ID NO: 104811 - DNA, 25 bp, Artificial
  probe
  misc_feature (1)..(25): SEQ ID NO: 5722; WAN024C5H_at; Start 145; Stop 169
aggttgcgagagttgctctcttaca

SEQ ID NO: 104812 - DNA, 25 bp, Artificial
  probe
  misc_feature (1)..(25): SEQ ID NO: 5722; WAN024C5H_at; Start 100; Stop 124
ggtaatcccatttccctttgctcca

SEQ ID NO: 104813 - DNA, 25 bp, Artificial
  probe
  misc_feature (1)..(25): SEQ ID NO: 5722; WAN024C5H_at; Start 30; Stop 54
tggttgtaaaatcaatccccttgac

SEQ ID NO: 104814 - DNA, 25 bp, Artificial
  probe
  misc_feature (1)..(25): SEQ ID NO: 5722; WAN024C5H_at; Start 202; Stop 226
gacctctgcaaccttgttaaattgt

SEQ ID NO: 104815 - DNA, 25 bp, Artificial
  probe
  misc_feature (1)..(25): SEQ ID NO: 5722; WAN024C5H_at; Start 103; Stop 127
aatcccatttccctttgctccaaag

SEQ ID NO: 104816 - DNA, 25 bp, Artificial
  probe
  misc_feature (1)..(25): SEQ ID NO: 5722; WAN024C5H_at; Start 140; Stop 164
agattaggttgcgagagttgctctc

SEQ ID NO: 104817 - DNA, 25 bp, Artificial
  probe
  misc_feature (1)..(25): SEQ ID NO: 5722; WAN024C5H_at; Start 13; Stop 37
gtaactacgattgggactggttgta

SEQ ID NO: 104818 - DNA, 25 bp, Artificial
  probe
  misc_feature (1)..(25): SEQ ID NO: 5722; WAN024C5H_at; Start 237; Stop 261
cgtaaagaatcttacccgttgctga

SEQ ID NO: 104819 - DNA, 25 bp, Artificial
  probe
  misc_feature (1)..(25): SEQ ID NO: 5722; WAN024C5H_at; Start 128; Stop 152
gaaacttgcttgagattaggttgcg

SEQ ID NO: 104820 - DNA, 25 bp, Artificial
  probe
  misc_feature (1)..(25): SEQ ID NO: 5722; WAN024C5H_at; Start 115; Stop 139
ctttgctccaaaggaaacttgcttg

SEQ ID NO: 104821 - DNA, 25 bp, Artificial
  probe
  misc_feature (1)..(25): SEQ ID NO: 5722; WAN024C5H_at; Start 79; Stop 103
gatagacatcatattggcataggta

SEQ ID NO: 104822 - DNA, 25 bp, Artificial
  probe
  misc_feature (1)..(25): SEQ ID NO: 5722; WAN024C5H_at; Start 194; Stop 218
ttatgaaagacctctgcaaccttgt

SEQ ID NO: 104823 - DNA, 25 bp, Artificial
  probe
  misc_feature (1)..(25): SEQ ID NO: 5722; WAN024C5H_at; Start 158; Stop 182
tgctctcttacataggattcttcca

SEQ ID NO: 104824 - DNA, 25 bp, Artificial
  probe
  misc_feature (1)..(25): SEQ ID NO: 5722; WAN024C5H_at; Start 123; Stop 147
caaaggaaacttgcttgagattagg

SEQ ID NO: 104825 - DNA, 25 bp, Artificial
  probe
  misc_feature (1)..(25): SEQ ID NO: 5722; WAN024C5H_at; Start 85; Stop 109
catcatattggcataggtaatccca

SEQ ID NO: 104826 - DNA, 25 bp, Artificial
  probe
  misc_feature (1)..(25): SEQ ID NO: 5722; WAN024C5H_at; Start 51; Stop 75
tgacctctgcagcttccaattcttt

SEQ ID NO: 104827 - DNA, 25 bp, Artificial
  probe
  misc_feature (1)..(25): SEQ ID NO: 5722; WAN024C5H_at; Start 65; Stop 89
tccaattcttttttgatagacatca

SEQ ID NO: 104828 - DNA, 25 bp, Artificial
  probe
  misc_feature (1)..(25): SEQ ID NO: 5722; WAN024C5H_at; Start 198; Stop 222
gaaagacctctgcaaccttgttaaa

SEQ ID NO: 104829 - DNA, 25 bp, Artificial
  probe
  misc_feature (1)..(25): SEQ ID NO: 5722; WAN024C5H_at; Start 93; Stop 117
tggcataggtaatcccatttccctt

SEQ ID NO: 104830 - DNA, 25 bp, Artificial
  probe
  misc_feature (1)..(25): SEQ ID NO: 1141; WAN024C5I_at; Start 938; Stop 962
atactaaagaaggaatcactgagga

SEQ ID NO: 104831 - DNA, 25 bp, Artificial
  probe
  misc_feature (1)..(25): SEQ ID NO: 1141; WAN024C5I_at; Start 946; Stop 970
gaaggaatcactgaggactttgttt

SEQ ID NO: 104832 - DNA, 25 bp, Artificial
  probe
  misc_feature (1)..(25): SEQ ID NO: 1141; WAN024C5I_at; Start 948; Stop 972
aggaatcactgaggactttgtttgg

SEQ ID NO: 104833 - DNA, 25 bp, Artificial
  probe
  misc_feature (1)..(25): SEQ ID NO: 1141; WAN024C5I_at; Start 945; Stop 969
agaaggaatcactgaggactttgtt

SEQ ID NO: 104834 - DNA, 25 bp, Artificial
  probe
  misc_feature (1)..(25): SEQ ID NO: 1141; WAN024C5I_at; Start 941; Stop 965
ctaaagaaggaatcactgaggactt

SEQ ID NO: 104835 - DNA, 25 bp, Artificial
  probe
  misc_feature (1)..(25): SEQ ID NO: 1141; WAN024C5I_at; Start 940; Stop 964
actaaagaaggaatcactgaggact

SEQ ID NO: 104836 - DNA, 25 bp, Artificial
  probe
  misc_feature (1)..(25): SEQ ID NO: 1141; WAN024C5I_at; Start 939; Stop 963
tactaaagaaggaatcactgaggac

SEQ ID NO: 104837 - DNA, 25 bp, Artificial
  probe
  misc_feature (1)..(25): SEQ ID NO: 1141; WAN024C5I_at; Start 943; Stop 967
aaagaaggaatcactgaggactttg

SEQ ID NO: 104838 - DNA, 25 bp, Artificial
  probe
  misc_feature (1)..(25): SEQ ID NO: 1141; WAN024C5I_at; Start 947; Stop 971
aaggaatcactgaggactttgtttg

SEQ ID NO: 104839 - DNA, 25 bp, Artificial
  probe
  misc_feature (1)..(25): SEQ ID NO: 1141; WAN024C5I_at; Start 944; Stop 968
aagaaggaatcactgaggactttgt

SEQ ID NO: 104840 - DNA, 25 bp, Artificial
  probe
  misc_feature (1)..(25): SEQ ID NO: 1141; WAN024C5I_at; Start 942; Stop 966
taaagaaggaatcactgaggacttt

SEQ ID NO: 104841 - DNA, 25 bp, Artificial
  probe
  misc_feature (1)..(25): SEQ ID NO: 3819; WAN024C5J_at; Start 1334; Stop 1358
taatcatggtacaggaaagccaatc

SEQ ID NO: 104842 - DNA, 25 bp, Artificial
  probe
  misc_feature (1)..(25): SEQ ID NO: 3819; WAN024C5J_at; Start 1925; Stop 1949
tatcgttcagcaacaagatgttcgc

SEQ ID NO: 104843 - DNA, 25 bp, Artificial
  probe
  misc_feature (1)..(25): SEQ ID NO: 3819; WAN024C5J_at; Start 1948; Stop 1972
gcgctaataccactataaagaacat

SEQ ID NO: 104844 - DNA, 25 bp, Artificial
  probe
  misc_feature (1)..(25): SEQ ID NO: 3819; WAN024C5J_at; Start 1941; Stop 1965
gatgttcgcgctaataccactataa

SEQ ID NO: 104845 - DNA, 25 bp, Artificial
  probe
  misc_feature (1)..(25): SEQ ID NO: 3819; WAN024C5J_at; Start 1501; Stop 1525
ttttatatgtgactattcaacagcc

SEQ ID NO: 104846 - DNA, 25 bp, Artificial
  probe
  misc_feature (1)..(25): SEQ ID NO: 3819; WAN024C5J_at; Start 1625; Stop 1649
gaatttagagcaagtaacggcagaa

SEQ ID NO: 104847 - DNA, 25 bp, Artificial
  probe
  misc_feature (1)..(25): SEQ ID NO: 3819; WAN024C5J_at; Start 1383; Stop 1407
gcagttaaatctggtactgctgaaa

SEQ ID NO: 104848 - DNA, 25 bp, Artificial
  probe
  misc_feature (1)..(25): SEQ ID NO: 3819; WAN024C5J_at; Start 1530; Stop 1554
cattattcagttgtccatttgggag

SEQ ID NO: 104849 - DNA, 25 bp, Artificial
  probe
  misc_feature (1)..(25): SEQ ID NO: 3819; WAN024C5J_at; Start 1567; Stop 1591
ctatcttggaacgagcttcagctat

SEQ ID NO: 104850 - DNA, 25 bp, Artificial
  probe
  misc_feature (1)..(25): SEQ ID NO: 3819; WAN024C5J_at; Start 1724; Stop 1748
gcaaccaattgttattggtacggga

SEQ ID NO: 104851 - DNA, 25 bp, Artificial
  probe
  misc_feature (1)..(25): SEQ ID NO: 3819; WAN024C5J_at; Start 1928; Stop 1952
cgttcagcaacaagatgttcgcgct

SEQ ID NO: 104852 - DNA, 25 bp, Artificial
  probe
  misc_feature (1)..(25): SEQ ID NO: 3819; WAN024C5J_at; Start 1427; Stop 1451
gggatacttagttggtgcaacgaat

SEQ ID NO: 104853 - DNA, 25 bp, Artificial
  probe
  misc_feature (1)..(25): SEQ ID NO: 3819; WAN024C5J_at; Start 1340; Stop 1364
tggtacaggaaagccaatcataaca

SEQ ID NO: 104854 - DNA, 25 bp, Artificial
  probe
  misc_feature (1)..(25): SEQ ID NO: 3819; WAN024C5J_at; Start 1917; Stop 1941
tcaggttctatcgttcagcaacaag

SEQ ID NO: 104855 - DNA, 25 bp, Artificial
  probe
  misc_feature (1)..(25): SEQ ID NO: 3819; WAN024C5J_at; Start 1640; Stop 1664
aacggcagaatcttcgtatgcaatg

SEQ ID NO: 104856 - DNA, 25 bp, Artificial
  probe
  misc_feature (1)..(25): SEQ ID NO: 3819; WAN024C5J_at; Start 1621; Stop 1645
ctaagaatttagagcaagtaacggc

SEQ ID NO: 104857 - DNA, 25 bp, Artificial
  probe
  misc_feature (1)..(25): SEQ ID NO: 3819; WAN024C5J_at; Start 1783; Stop 1807
aaaatcttgtacctaaccagcaagt

SEQ ID NO: 104858 - DNA, 25 bp, Artificial
  probe
  misc_feature (1)..(25): SEQ ID NO: 3819; WAN024C5J_at; Start 1541; Stop 1565
tgtccatttgggagagtttgccaat

SEQ ID NO: 104859 - DNA, 25 bp, Artificial
  probe
  misc_feature (1)..(25): SEQ ID NO: 3819; WAN024C5J_at; Start 1431; Stop 1455
tacttagttggtgcaacgaattaca

SEQ ID NO: 104860 - DNA, 25 bp, Artificial
  probe
  misc_feature (1)..(25): SEQ ID NO: 3819; WAN024C5J_at; Start 1630; Stop 1654
tagagcaagtaacggcagaatcttc

SEQ ID NO: 104861 - DNA, 25 bp, Artificial
  probe
  misc_feature (1)..(25): SEQ ID NO: 3819; WAN024C5J_at; Start 1935; Stop 1959
caacaagatgttcgcgctaatacca

SEQ ID NO: 104862 - DNA, 25 bp, Artificial
  probe
  misc_feature (1)..(25): SEQ ID NO: 3819; WAN024C5J_at; Start 1914; Stop 1938
ggttcaggttctatcgttcagcaac

SEQ ID NO: 104863 - DNA, 25 bp, Artificial
  probe
  misc_feature (1)..(25): SEQ ID NO: 3819; WAN024C5J_at; Start 1634; Stop 1658
gcaagtaacggcagaatcttcgtat

SEQ ID NO: 104864 - DNA, 25 bp, Artificial
  probe
  misc_feature (1)..(25): SEQ ID NO: 3819; WAN024C5J_at; Start 1330; Stop 1354
tgtataatcatggtacaggaaagcc

SEQ ID NO: 104865 - DNA, 25 bp, Artificial
  probe
  misc_feature (1)..(25): SEQ ID NO: 3819; WAN024C5J_at; Start 1440; Stop 1464
ggtgcaacgaattacatattttcag

SEQ ID NO: 104866 - DNA, 25 bp, Artificial
  probe
  misc_feature (1)..(25): SEQ ID NO: 3819; WAN024C5J_at; Start 1403; Stop 1427
tgaaattgcagatgaaaaaaatggg

SEQ ID NO: 104867 - DNA, 25 bp, Artificial
  probe
  misc_feature (1)..(25): SEQ ID NO: 3819; WAN024C5J_at; Start 1390; Stop 1414
aatctggtactgctgaaattgcaga

SEQ ID NO: 104868 - DNA, 25 bp, Artificial
  probe
  misc_feature (1)..(25): SEQ ID NO: 3819; WAN024C5J_at; Start 1527; Stop 1551
gagcattattcagttgtccatttgg

SEQ ID NO: 104869 - DNA, 25 bp, Artificial
  probe
  misc_feature (1)..(25): SEQ ID NO: 3819; WAN024C5J_at; Start 1482; Stop 1506
gcggaaaatcctgatttcattttat

SEQ ID NO: 104870 - DNA, 25 bp, Artificial
  probe
  misc_feature (1)..(25): SEQ ID NO: 3819; WAN024C5J_at; Start 1538; Stop 1562
agttgtccatttgggagagtttgcc

SEQ ID NO: 104871 - DNA, 25 bp, Artificial
  probe
  misc_feature (1)..(25): SEQ ID NO: 3819; WAN024C5J_at; Start 1780; Stop 1804
ggaaaaatcttgtacctaaccagca

SEQ ID NO: 104872 - DNA, 25 bp, Artificial
  probe
  misc_feature (1)..(25): SEQ ID NO: 3819; WAN024C5J_at; Start 1451; Stop 1475
ttacatattttcagttgtatcaatg

SEQ ID NO: 104873 - DNA, 25 bp, Artificial
  probe
  misc_feature (1)..(25): SEQ ID NO: 3819; WAN024C5J_at; Start 1563; Stop 1587
aatcctatcttggaacgagcttcag

SEQ ID NO: 104874 - DNA, 25 bp, Artificial
  probe
  misc_feature (1)..(25): SEQ ID NO: 3819; WAN024C5J_at; Start 1944; Stop 1968
gttcgcgctaataccactataaaga

SEQ ID NO: 104875 - DNA, 25 bp, Artificial
  probe
  misc_feature (1)..(25): SEQ ID NO: 4070; WAN024C5K_at; Start 951; Stop 975
actgcttgaggagaaaatgggtgat

SEQ ID NO: 104876 - DNA, 25 bp, Artificial
  probe
  misc_feature (1)..(25): SEQ ID NO: 4070; WAN024C5K_at; Start 888; Stop 912
gaccggcggtggtatgatgacattt

SEQ ID NO: 104877 - DNA, 25 bp, Artificial
  probe
  misc_feature (1)..(25): SEQ ID NO: 4070; WAN024C5K_at; Start 886; Stop 910
ttgaccggcggtggtatgatgacat

SEQ ID NO: 104878 - DNA, 25 bp, Artificial
  probe
  misc_feature (1)..(25): SEQ ID NO: 4070; WAN024C5K_at; Start 954; Stop 978
gcttgaggagaaaatgggtgatact

SEQ ID NO: 104879 - DNA, 25 bp, Artificial
  probe
  misc_feature (1)..(25): SEQ ID NO: 4070; WAN024C5K_at; Start 960; Stop 984
ggagaaaatgggtgatactacgtgg

SEQ ID NO: 104880 - DNA, 25 bp, Artificial
  probe
  misc_feature (1)..(25): SEQ ID NO: 4070; WAN024C5K_at; Start 952; Stop 976
ctgcttgaggagaaaatgggtgata

SEQ ID NO: 104881 - DNA, 25 bp, Artificial
  probe
  misc_feature (1)..(25): SEQ ID NO: 4070; WAN024C5K_at; Start 950; Stop 974
tactgcttgaggagaaaatgggtga

SEQ ID NO: 104882 - DNA, 25 bp, Artificial
  probe
  misc_feature (1)..(25): SEQ ID NO: 4070; WAN024C5K_at; Start 885; Stop 909
tttgaccggcggtggtatgatgaca

SEQ ID NO: 104883 - DNA, 25 bp, Artificial
  probe
  misc_feature (1)..(25): SEQ ID NO: 4070; WAN024C5K_at; Start 948; Stop 972
gatactgcttgaggagaaaatgggt

SEQ ID NO: 104884 - DNA, 25 bp, Artificial
  probe
  misc_feature (1)..(25): SEQ ID NO: 4070; WAN024C5K_at; Start 887; Stop 911
tgaccggcggtggtatgatgacatt

SEQ ID NO: 104885 - DNA, 25 bp, Artificial
  probe
  misc_feature (1)..(25): SEQ ID NO: 4070; WAN024C5K_at; Start 895; Stop 919
ggtggtatgatgacattttctcaag

SEQ ID NO: 104886 - DNA, 25 bp, Artificial
  probe
  misc_feature (1)..(25): SEQ ID NO: 4070; WAN024C5K_at; Start 955; Stop 979
cttgaggagaaaatgggtgatacta

SEQ ID NO: 104887 - DNA, 25 bp, Artificial
  probe
  misc_feature (1)..(25): SEQ ID NO: 4070; WAN024C5K_at; Start 959; Stop 983
aggagaaaatgggtgatactacgtg

SEQ ID NO: 104888 - DNA, 25 bp, Artificial
  probe
  misc_feature (1)..(25): SEQ ID NO: 4070; WAN024C5K_at; Start 896; Stop 920
gtggtatgatgacattttctcaagg

SEQ ID NO: 104889 - DNA, 25 bp, Artificial
  probe
  misc_feature (1)..(25): SEQ ID NO: 4070; WAN024C5K_at; Start 890; Stop 914
ccggcggtggtatgatgacattttc

SEQ ID NO: 104890 - DNA, 25 bp, Artificial
  probe
  misc_feature (1)..(25): SEQ ID NO: 4070; WAN024C5K_at; Start 958; Stop 982
gaggagaaaatgggtgatactacgt

SEQ ID NO: 104891 - DNA, 25 bp, Artificial
  probe
  misc_feature (1)..(25): SEQ ID NO: 4070; WAN024C5K_at; Start 878; Stop 902
atgaaggtttgaccggcggtggtat

SEQ ID NO: 104892 - DNA, 25 bp, Artificial
  probe
  misc_feature (1)..(25): SEQ ID NO: 4070; WAN024C5K_at; Start 963; Stop 987
gaaaatgggtgatactacgtggttg

SEQ ID NO: 104893 - DNA, 25 bp, Artificial
  probe
  misc_feature (1)..(25): SEQ ID NO: 4070; WAN024C5K_at; Start 949; Stop 973
atactgcttgaggagaaaatgggtg

SEQ ID NO: 104894 - DNA, 25 bp, Artificial
  probe
  misc_feature (1)..(25): SEQ ID NO: 4070; WAN024C5K_at; Start 956; Stop 980
ttgaggagaaaatgggtgatactac

SEQ ID NO: 104895 - DNA, 25 bp, Artificial
  probe
  misc_feature (1)..(25): SEQ ID NO: 4070; WAN024C5K_at; Start 962; Stop 986
agaaaatgggtgatactacgtggtt

SEQ ID NO: 104896 - DNA, 25 bp, Artificial
  probe
  misc_feature (1)..(25): SEQ ID NO: 4070; WAN024C5K_at; Start 957; Stop 981
tgaggagaaaatgggtgatactacg

SEQ ID NO: 104897 - DNA, 25 bp, Artificial
  probe
  misc_feature (1)..(25): SEQ ID NO: 4070; WAN024C5K_at; Start 961; Stop 985
gagaaaatgggtgatactacgtggt

SEQ ID NO: 104898 - DNA, 25 bp, Artificial
  probe
  misc_feature (1)..(25): SEQ ID NO: 4070; WAN024C5K_at; Start 889; Stop 913
accggcggtggtatgatgacatttt

SEQ ID NO: 104899 - DNA, 25 bp, Artificial
  probe
  misc_feature (1)..(25): SEQ ID NO: 4070; WAN024C5K_at; Start 642; Stop 666
aggtgaaatcctcgctactacccaa

SEQ ID NO: 104900 - DNA, 25 bp, Artificial
  probe
  misc_feature (1)..(25): SEQ ID NO: 4070; WAN024C5K_at; Start 879; Stop 903
tgaaggtttgaccggcggtggtatg

SEQ ID NO: 104901 - DNA, 25 bp, Artificial
  probe
  misc_feature (1)..(25): SEQ ID NO: 4070; WAN024C5K_at; Start 893; Stop 917
gcggtggtatgatgacattttctca

SEQ ID NO: 104902 - DNA, 25 bp, Artificial
  probe
  misc_feature (1)..(25): SEQ ID NO: 4070; WAN024C5K_at; Start 894; Stop 918
cggtggtatgatgacattttctcaa

SEQ ID NO: 104903 - DNA, 25 bp, Artificial
  probe
  misc_feature (1)..(25): SEQ ID NO: 4070; WAN024C5K_at; Start 953; Stop 977
tgcttgaggagaaaatgggtgatac

SEQ ID NO: 104904 - DNA, 25 bp, Artificial
  probe
  misc_feature (1)..(25): SEQ ID NO: 4070; WAN024C5K_at; Start 891; Stop 915
cggcggtggtatgatgacattttct

SEQ ID NO: 104905 - DNA, 25 bp, Artificial
  probe
  misc_feature (1)..(25): SEQ ID NO: 4070; WAN024C5K_at; Start 892; Stop 916
ggcggtggtatgatgacattttctc

SEQ ID NO: 104906 - DNA, 25 bp, Artificial
  probe
  misc_feature (1)..(25): SEQ ID NO: 961; WAN024C5L_at; Start 630; Stop 654
caagcgtttgattgggtcatctggt

SEQ ID NO: 104907 - DNA, 25 bp, Artificial
  probe
  misc_feature (1)..(25): SEQ ID NO: 961; WAN024C5L_at; Start 214; Stop 238
gtacctgccaaacgcgggactatct

SEQ ID NO: 104908 - DNA, 25 bp, Artificial
  probe
  misc_feature (1)..(25): SEQ ID NO: 961; WAN024C5L_at; Start 1494; Stop 1518
tgtcggaaatcctgtgtcaaaagca

SEQ ID NO: 104909 - DNA, 25 bp, Artificial
  probe
  misc_feature (1)..(25): SEQ ID NO: 961; WAN024C5L_at; Start 1062; Stop 1086
tggtggcgaatactttaacagcagt

SEQ ID NO: 104910 - DNA, 25 bp, Artificial
  probe
  misc_feature (1)..(25): SEQ ID NO: 961; WAN024C5L_at; Start 1047; Stop 1071
caacaataccttccctggtggcgaa

SEQ ID NO: 104911 - DNA, 25 bp, Artificial
  probe
  misc_feature (1)..(25): SEQ ID NO: 961; WAN024C5L_at; Start 1528; Stop 1552
tctactcgggagcacatggtcatgg

SEQ ID NO: 104912 - DNA, 25 bp, Artificial
  probe
  misc_feature (1)..(25): SEQ ID NO: 961; WAN024C5L_at; Start 1025; Stop 1049
tgacgttagcttcggctattgacaa

SEQ ID NO: 104913 - DNA, 25 bp, Artificial
  probe
  misc_feature (1)..(25): SEQ ID NO: 961; WAN024C5L_at; Start 1709; Stop 1733
tctctgttgtgtcgatgcatcctgc

SEQ ID NO: 104914 - DNA, 25 bp, Artificial
  probe
  misc_feature (1)..(25): SEQ ID NO: 961; WAN024C5L_at; Start 930; Stop 954
taacgcagataccaaggatggcatc

SEQ ID NO: 104915 - DNA, 25 bp, Artificial
  probe
  misc_feature (1)..(25): SEQ ID NO: 961; WAN024C5L_at; Start 1774; Stop 1798
ccagagcattattcaggtgttcagc

SEQ ID NO: 104916 - DNA, 25 bp, Artificial
  probe
  misc_feature (1)..(25): SEQ ID NO: 961; WAN024C5L_at; Start 587; Stop 611
cctttatcggtttagcgcaactcca

SEQ ID NO: 104917 - DNA, 25 bp, Artificial
  probe
  misc_feature (1)..(25): SEQ ID NO: 961; WAN024C5L_at; Start 804; Stop 828
tttgcaatcctttatggaaacgcag

SEQ ID NO: 104918 - DNA, 25 bp, Artificial
  probe
  misc_feature (1)..(25): SEQ ID NO: 961; WAN024C5L_at; Start 672; Stop 696
tagcattcttgcaggtacagatggg

SEQ ID NO: 104919 - DNA, 25 bp, Artificial
  probe
  misc_feature (1)..(25): SEQ ID NO: 961; WAN024C5L_at; Start 1444; Stop 1468
gccctctatgatccaaatgaccagt

SEQ ID NO: 104920 - DNA, 25 bp, Artificial
  probe
  misc_feature (1)..(25): SEQ ID NO: 961; WAN024C5L_at; Start 552; Stop 576
taaccgcagttatcccaatggacag

SEQ ID NO: 104921 - DNA, 25 bp, Artificial
  probe
  misc_feature (1)..(25): SEQ ID NO: 961; WAN024C5L_at; Start 1556; Stop 1580
gaacagatcctgtctacggtaccat

SEQ ID NO: 104922 - DNA, 25 bp, Artificial
  probe
  misc_feature (1)..(25): SEQ ID NO: 961; WAN024C5L_at; Start 749; Stop 773
aggcttcccaacacacggtagacgg

SEQ ID NO: 104923 - DNA, 25 bp, Artificial
  probe
  misc_feature (1)..(25): SEQ ID NO: 961; WAN024C5L_at; Start 192; Stop 216
ggttcaccaaacaactcgaacagta

SEQ ID NO: 104924 - DNA, 25 bp, Artificial
  probe
  misc_feature (1)..(25): SEQ ID NO: 961; WAN024C5L_at; Start 820; Stop 844
gaaacgcagatggatgccttccagg

SEQ ID NO: 104925 - DNA, 25 bp, Artificial
  probe
  misc_feature (1)..(25): SEQ ID NO: 961; WAN024C5L_at; Start 1629; Stop 1653
tgttgccctcaaatcagggactgct

SEQ ID NO: 104926 - DNA, 25 bp, Artificial
  probe
  misc_feature (1)..(25): SEQ ID NO: 961; WAN024C5L_at; Start 729; Stop 753
tattgttccgggtacggagcaggct

SEQ ID NO: 104927 - DNA, 25 bp, Artificial
  probe
  misc_feature (1)..(25): SEQ ID NO: 961; WAN024C5L_at; Start 612; Stop 636
tgaaaatgaggatggaaccaagcgt

SEQ ID NO: 104928 - DNA, 25 bp, Artificial
  probe
  misc_feature (1)..(25): SEQ ID NO: 961; WAN024C5L_at; Start 696; Stop 720
gattatcacctatgagaaggatcgt

SEQ ID NO: 104929 - DNA, 25 bp, Artificial
  probe
  misc_feature (1)..(25): SEQ ID NO: 961; WAN024C5L_at; Start 572; Stop 596
gacagtttgcttcttcctttatcgg

SEQ ID NO: 104930 - DNA, 25 bp, Artificial
  probe
  misc_feature (1)..(25): SEQ ID NO: 961; WAN024C5L_at; Start 1465; Stop 1489
cagtctgtccgtaagtctcaaaagg

SEQ ID NO: 104931 - DNA, 25 bp, Artificial
  probe
  misc_feature (1)..(25): SEQ ID NO: 961; WAN024C5L_at; Start 916; Stop 940
caacggccaacctttaacgcagata

SEQ ID NO: 104932 - DNA, 25 bp, Artificial
  probe
  misc_feature (1)..(25): SEQ ID NO: 961; WAN024C5L_at; Start 1506; Stop 1530
tgtgtcaaaagcagcagcgtcctct

SEQ ID NO: 104933 - DNA, 25 bp, Artificial
  probe
  misc_feature (1)..(25): SEQ ID NO: 961; WAN024C5L_at; Start 1612; Stop 1636
aatgttccgggacagaatgttgccc

SEQ ID NO: 104934 - DNA, 25 bp, Artificial
  probe
  misc_feature (1)..(25): SEQ ID NO: 961; WAN024C5L_at; Start 1091; Stop 1115
tgaaaatagcagatgcgaccattcg

SEQ ID NO: 104935 - DNA, 25 bp, Artificial
  probe
  misc_feature (1)..(25): SEQ ID NO: 961; WAN024C5L_at; Start 66; Stop 90
taggatagttggcaagtacctcagc

SEQ ID NO: 104936 - DNA, 25 bp, Artificial
  probe
  misc_feature (1)..(25): SEQ ID NO: 961; WAN024C5L_at; Start 161; Stop 185
ttggtactgacttggtaaaagaggc

SEQ ID NO: 104937 - DNA, 25 bp, Artificial
  probe
  misc_feature (1)..(25): SEQ ID NO: 961; WAN024C5L_at; Start 240; Stop 264
tgaccgaaatggagtgcctatcgct

SEQ ID NO: 104938 - DNA, 25 bp, Artificial
  probe
  misc_feature (1)..(25): SEQ ID NO: 961; WAN024C5L_at; Start 49; Stop 73
tctccagcaaaaaaccgtaggatag

SEQ ID NO: 104939 - DNA, 25 bp, Artificial
  probe
  misc_feature (1)..(25): SEQ ID NO: 961; WAN024C5L_at; Start 499; Stop 523
aaaaatgacctaaaaactgctggcg

SEQ ID NO: 104940 - DNA, 25 bp, Artificial
  probe
  misc_feature (1)..(25): SEQ ID NO: 3821; WAN024C5M_s_at; Start 175; Stop 199
caacctaatctcaagcaagtttcct

SEQ ID NO: 104941 - DNA, 25 bp, Artificial
  probe
  misc_feature (1)..(25): SEQ ID NO: 3821; WAN024C5M_s_at; Start 163; Stop 187
gagcaactctcgcaacctaatctca

SEQ ID NO: 104942 - DNA, 25 bp, Artificial
  probe
  misc_feature (1)..(25): SEQ ID NO: 3821; WAN024C5M_s_at; Start 174; Stop 198
gcaacctaatctcaagcaagtttcc

SEQ ID NO: 104943 - DNA, 25 bp, Artificial
  probe
  misc_feature (1)..(25): SEQ ID NO: 3821; WAN024C5M_s_at; Start 169; Stop 193
ctctcgcaacctaatctcaagcaag

SEQ ID NO: 104944 - DNA, 25 bp, Artificial
  probe
  misc_feature (1)..(25): SEQ ID NO: 3821; WAN024C5M_s_at; Start 171; Stop 195
ctcgcaacctaatctcaagcaagtt

SEQ ID NO: 104945 - DNA, 25 bp, Artificial
  probe
  misc_feature (1)..(25): SEQ ID NO: 3821; WAN024C5M_s_at; Start 178; Stop 202
cctaatctcaagcaagtttcctttg

SEQ ID NO: 104946 - DNA, 25 bp, Artificial
  probe
  misc_feature (1)..(25): SEQ ID NO: 3821; WAN024C5M_s_at; Start 164; Stop 188
agcaactctcgcaacctaatctcaa

SEQ ID NO: 104947 - DNA, 25 bp, Artificial
  probe
  misc_feature (1)..(25): SEQ ID NO: 3821; WAN024C5M_s_at; Start 168; Stop 192
actctcgcaacctaatctcaagcaa

SEQ ID NO: 104948 - DNA, 25 bp, Artificial
  probe
  misc_feature (1)..(25): SEQ ID NO: 3821; WAN024C5M_s_at; Start 172; Stop 196
tcgcaacctaatctcaagcaagttt

SEQ ID NO: 104949 - DNA, 25 bp, Artificial
  probe
  misc_feature (1)..(25): SEQ ID NO: 3821; WAN024C5M_s_at; Start 176; Stop 200
aacctaatctcaagcaagtttcctt

SEQ ID NO: 104950 - DNA, 25 bp, Artificial
  probe
  misc_feature (1)..(25): SEQ ID NO: 3821; WAN024C5M_s_at; Start 167; Stop 191
aactctcgcaacctaatctcaagca

SEQ ID NO: 104951 - DNA, 25 bp, Artificial
  probe
  misc_feature (1)..(25): SEQ ID NO: 3821; WAN024C5M_s_at; Start 173; Stop 197
cgcaacctaatctcaagcaagtttc

SEQ ID NO: 104952 - DNA, 25 bp, Artificial
  probe
  misc_feature (1)..(25): SEQ ID NO: 3821; WAN024C5M_s_at; Start 179; Stop 203
ctaatctcaagcaagtttcctttgg

SEQ ID NO: 104953 - DNA, 25 bp, Artificial
  probe
  misc_feature (1)..(25): SEQ ID NO: 3821; WAN024C5M_s_at; Start 177; Stop 201
acctaatctcaagcaagtttccttt

SEQ ID NO: 104954 - DNA, 25 bp, Artificial
  probe
  misc_feature (1)..(25): SEQ ID NO: 3821; WAN024C5M_s_at; Start 170; Stop 194
tctcgcaacctaatctcaagcaagt

SEQ ID NO: 104955 - DNA, 25 bp, Artificial
  probe
  misc_feature (1)..(25): SEQ ID NO: 3821; WAN024C5M_s_at; Start 165; Stop 189
gcaactctcgcaacctaatctcaag

SEQ ID NO: 104956 - DNA, 25 bp, Artificial
  probe
  misc_feature (1)..(25): SEQ ID NO: 3821; WAN024C5M_s_at; Start 166; Stop 190
caactctcgcaacctaatctcaagc

SEQ ID NO: 104957 - DNA, 25 bp, Artificial
  probe
  misc_feature (1)..(25): SEQ ID NO: 1142; WAN024C5N_s_at; Start 69; Stop 93
cagagttggaaaaagtctgagttta

SEQ ID NO: 104958 - DNA, 25 bp, Artificial
  probe
  misc_feature (1)..(25): SEQ ID NO: 1142; WAN024C5N_s_at; Start 63; Stop 87
cagacgcagagttggaaaaagtctg

SEQ ID NO: 104959 - DNA, 25 bp, Artificial
  probe
  misc_feature (1)..(25): SEQ ID NO: 1142; WAN024C5N_s_at; Start 62; Stop 86
acagacgcagagttggaaaaagtct

SEQ ID NO: 104960 - DNA, 25 bp, Artificial
  probe
  misc_feature (1)..(25): SEQ ID NO: 1142; WAN024C5N_s_at; Start 78; Stop 102
aaaaagtctgagtttattatctgtc

SEQ ID NO: 104961 - DNA, 25 bp, Artificial
  probe
  misc_feature (1)..(25): SEQ ID NO: 1142; WAN024C5N_s_at; Start 68; Stop 92
gcagagttggaaaaagtctgagttt

SEQ ID NO: 104962 - DNA, 25 bp, Artificial
  probe
  misc_feature (1)..(25): SEQ ID NO: 1142; WAN024C5N_s_at; Start 56; Stop 80
ctgaaaacagacgcagagttggaaa

SEQ ID NO: 104963 - DNA, 25 bp, Artificial
  probe
  misc_feature (1)..(25): SEQ ID NO: 1142; WAN024C5N_s_at; Start 74; Stop 98
ttggaaaaagtctgagtttattatc

SEQ ID NO: 104964 - DNA, 25 bp, Artificial
  probe
  misc_feature (1)..(25): SEQ ID NO: 1142; WAN024C5N_s_at; Start 57; Stop 81
tgaaaacagacgcagagttggaaaa

SEQ ID NO: 104965 - DNA, 25 bp, Artificial
  probe
  misc_feature (1)..(25): SEQ ID NO: 1142; WAN024C5N_s_at; Start 61; Stop 85
aacagacgcagagttggaaaaagtc

SEQ ID NO: 104966 - DNA, 25 bp, Artificial
  probe
  misc_feature (1)..(25): SEQ ID NO: 1142; WAN024C5N_s_at; Start 77; Stop 101
gaaaaagtctgagtttattatctgt

SEQ ID NO: 104967 - DNA, 25 bp, Artificial
  probe
  misc_feature (1)..(25): SEQ ID NO: 1142; WAN024C5N_s_at; Start 75; Stop 99
tggaaaaagtctgagtttattatct

SEQ ID NO: 104968 - DNA, 25 bp, Artificial
  probe
  misc_feature (1)..(25): SEQ ID NO: 1142; WAN024C5N_s_at; Start 52; Stop 76
ccggctgaaaacagacgcagagttg

SEQ ID NO: 104969 - DNA, 25 bp, Artificial
  probe
  misc_feature (1)..(25): SEQ ID NO: 1142; WAN024C5N_s_at; Start 82; Stop 106
agtctgagtttattatctgtctttg

SEQ ID NO: 104970 - DNA, 25 bp, Artificial
  probe
  misc_feature (1)..(25): SEQ ID NO: 1142; WAN024C5N_s_at; Start 70; Stop 94
agagttggaaaaagtctgagtttat

SEQ ID NO: 104971 - DNA, 25 bp, Artificial
  probe
  misc_feature (1)..(25): SEQ ID NO: 1142; WAN024C5N_s_at; Start 83; Stop 107
gtctgagtttattatctgtctttgt

SEQ ID NO: 104972 - DNA, 25 bp, Artificial
  probe
  misc_feature (1)..(25): SEQ ID NO: 1142; WAN024C5N_s_at; Start 90; Stop 114
tttattatctgtctttgtttttgcc

SEQ ID NO: 104973 - DNA, 25 bp, Artificial
  probe
  misc_feature (1)..(25): SEQ ID NO: 1142; WAN024C5N_s_at; Start 66; Stop 90
acgcagagttggaaaaagtctgagt

SEQ ID NO: 104974 - DNA, 25 bp, Artificial
  probe
  misc_feature (1)..(25): SEQ ID NO: 1142; WAN024C5N_s_at; Start 67; Stop 91
cgcagagttggaaaaagtctgagtt

SEQ ID NO: 104975 - DNA, 25 bp, Artificial
  probe
  misc_feature (1)..(25): SEQ ID NO: 1142; WAN024C5N_s_at; Start 86; Stop 110
tgagtttattatctgtctttgtttt

SEQ ID NO: 104976 - DNA, 25 bp, Artificial
  probe
  misc_feature (1)..(25): SEQ ID NO: 1142; WAN024C5N_s_at; Start 64; Stop 88
agacgcagagttggaaaaagtctga

SEQ ID NO: 104977 - DNA, 25 bp, Artificial
  probe
  misc_feature (1)..(25): SEQ ID NO: 1142; WAN024C5N_s_at; Start 81; Stop 105
aagtctgagtttattatctgtcttt

SEQ ID NO: 104978 - DNA, 25 bp, Artificial
  probe
  misc_feature (1)..(25): SEQ ID NO: 1142; WAN024C5N_s_at; Start 79; Stop 103
aaaagtctgagtttattatctgtct

SEQ ID NO: 104979 - DNA, 25 bp, Artificial
  probe
  misc_feature (1)..(25): SEQ ID NO: 1142; WAN024C5N_s_at; Start 60; Stop 84
aaacagacgcagagttggaaaaagt

SEQ ID NO: 104980 - DNA, 25 bp, Artificial
  probe
  misc_feature (1)..(25): SEQ ID NO: 1142; WAN024C5N_s_at; Start 53; Stop 77
cggctgaaaacagacgcagagttgg

SEQ ID NO: 104981 - DNA, 25 bp, Artificial
  probe
  misc_feature (1)..(25): SEQ ID NO: 1142; WAN024C5N_s_at; Start 80; Stop 104
aaagtctgagtttattatctgtctt

SEQ ID NO: 104982 - DNA, 25 bp, Artificial
  probe
  misc_feature (1)..(25): SEQ ID NO: 1142; WAN024C5N_s_at; Start 85; Stop 109
ctgagtttattatctgtctttgttt

SEQ ID NO: 104983 - DNA, 25 bp, Artificial
  probe
  misc_feature (1)..(25): SEQ ID NO: 1142; WAN024C5N_s_at; Start 55; Stop 79
gctgaaaacagacgcagagttggaa

SEQ ID NO: 104984 - DNA, 25 bp, Artificial
  probe
  misc_feature (1)..(25): SEQ ID NO: 1142; WAN024C5N_s_at; Start 58; Stop 82
gaaaacagacgcagagttggaaaaa

SEQ ID NO: 104985 - DNA, 25 bp, Artificial
  probe
  misc_feature (1)..(25): SEQ ID NO: 1142; WAN024C5N_s_at; Start 89; Stop 113
gtttattatctgtctttgtttttgc

SEQ ID NO: 104986 - DNA, 25 bp, Artificial
  probe
  misc_feature (1)..(25): SEQ ID NO: 1142; WAN024C5N_s_at; Start 76; Stop 100
ggaaaaagtctgagtttattatctg

SEQ ID NO: 104987 - DNA, 25 bp, Artificial
  probe
  misc_feature (1)..(25): SEQ ID NO: 1142; WAN024C5N_s_at; Start 65; Stop 89
gacgcagagttggaaaaagtctgag

SEQ ID NO: 104988 - DNA, 25 bp, Artificial
  probe
  misc_feature (1)..(25): SEQ ID NO: 1142; WAN024C5N_s_at; Start 54; Stop 78
ggctgaaaacagacgcagagttgga

SEQ ID NO: 104989 - DNA, 25 bp, Artificial
  probe
  misc_feature (1)..(25): SEQ ID NO: 1142; WAN024C5N_s_at; Start 84; Stop 108
tctgagtttattatctgtctttgtt

SEQ ID NO: 104990 - DNA, 25 bp, Artificial
  probe
  misc_feature (1)..(25): SEQ ID NO: 1142; WAN024C5N_s_at; Start 59; Stop 83
aaaacagacgcagagttggaaaaag

SEQ ID NO: 104991 - DNA, 25 bp, Artificial
  probe
  misc_feature (1)..(25): SEQ ID NO: 954; WAN024C5P_at; Start 27; Stop 51
cattcatgtttttatcagtattttc

SEQ ID NO: 104992 - DNA, 25 bp, Artificial
  probe
  misc_feature (1)..(25): SEQ ID NO: 954; WAN024C5P_at; Start 238; Stop 262
ttttcaatattcctagtcgtaacca

SEQ ID NO: 104993 - DNA, 25 bp, Artificial
  probe
  misc_feature (1)..(25): SEQ ID NO: 954; WAN024C5P_at; Start 121; Stop 145
gcgctcaataaaggacttgagaaaa

SEQ ID NO: 104994 - DNA, 25 bp, Artificial
  probe
  misc_feature (1)..(25): SEQ ID NO: 954; WAN024C5P_at; Start 89; Stop 113
cagttttactactcctactcctctt

SEQ ID NO: 104995 - DNA, 25 bp, Artificial
  probe
  misc_feature (1)..(25): SEQ ID NO: 954; WAN024C5P_at; Start 113; Stop 137
ttcttcctgcgctcaataaaggact

SEQ ID NO: 104996 - DNA, 25 bp, Artificial
  probe
  misc_feature (1)..(25): SEQ ID NO: 954; WAN024C5P_at; Start 165; Stop 189
tgtcctcaacgcagccctcttcttt

SEQ ID NO: 104997 - DNA, 25 bp, Artificial
  probe
  misc_feature (1)..(25): SEQ ID NO: 954; WAN024C5P_at; Start 154; Stop 178
aaacggatacctgtcctcaacgcag

SEQ ID NO: 104998 - DNA, 25 bp, Artificial
  probe
  misc_feature (1)..(25): SEQ ID NO: 954; WAN024C5P_at; Start 268; Stop 292
tcaagtttggcctacttctataact

SEQ ID NO: 104999 - DNA, 25 bp, Artificial
  probe
  misc_feature (1)..(25): SEQ ID NO: 954; WAN024C5P_at; Start 255; Stop 279
cgtaaccatcatttcaagtttggcc

SEQ ID NO: 105000 - DNA, 25 bp, Artificial
  probe
  misc_feature (1)..(25): SEQ ID NO: 954; WAN024C5P_at; Start 175; Stop 199
gcagccctcttctttctcctcatat

SEQ ID NO: 105001 - DNA, 25 bp, Artificial
  probe
  misc_feature (1)..(25): SEQ ID NO: 954; WAN024C5P_at; Start 107; Stop 131
tcctctttcttcctgcgctcaataa

SEQ ID NO: 105002 - DNA, 25 bp, Artificial
  probe
  misc_feature (1)..(25): SEQ ID NO: 954; WAN024C5P_at; Start 248; Stop 272
tcctagtcgtaaccatcatttcaag

SEQ ID NO: 105003 - DNA, 25 bp, Artificial
  probe
  misc_feature (1)..(25): SEQ ID NO: 954; WAN024C5P_at; Start 297; Stop 321
tcaagtagttaaagaagtagatcaa

SEQ ID NO: 105004 - DNA, 25 bp, Artificial
  probe
  misc_feature (1)..(25): SEQ ID NO: 954; WAN024C5P_at; Start 148; Stop 172
caatcaaaacggatacctgtcctca

SEQ ID NO: 105005 - DNA, 25 bp, Artificial
  probe
  misc_feature (1)..(25): SEQ ID NO: 954; WAN024C5P_at; Start 116; Stop 140
ttcctgcgctcaataaaggacttga

SEQ ID NO: 105006 - DNA, 25 bp, Artificial
  probe
  misc_feature (1)..(25): SEQ ID NO: 954; WAN024C5P_at; Start 155; Stop 179
aacggatacctgtcctcaacgcagc

SEQ ID NO: 105007 - DNA, 25 bp, Artificial
  probe
  misc_feature (1)..(25): SEQ ID NO: 954; WAN024C5P_at; Start 151; Stop 175
tcaaaacggatacctgtcctcaacg

SEQ ID NO: 105008 - DNA, 25 bp, Artificial
  probe
  misc_feature (1)..(25): SEQ ID NO: 954; WAN024C5P_at; Start 241; Stop 265
tcaatattcctagtcgtaaccatca

SEQ ID NO: 105009 - DNA, 25 bp, Artificial
  probe
  misc_feature (1)..(25): SEQ ID NO: 954; WAN024C5P_at; Start 118; Stop 142
cctgcgctcaataaaggacttgaga

SEQ ID NO: 105010 - DNA, 25 bp, Artificial
  probe
  misc_feature (1)..(25): SEQ ID NO: 954; WAN024C5P_at; Start 82; Stop 106
tctcatacagttttactactcctac

SEQ ID NO: 105011 - DNA, 25 bp, Artificial
  probe
  misc_feature (1)..(25): SEQ ID NO: 954; WAN024C5P_at; Start 1; Stop 25
atgaaatcactagctagactactga

SEQ ID NO: 105012 - DNA, 25 bp, Artificial
  probe
  misc_feature (1)..(25): SEQ ID NO: 954; WAN024C5P_at; Start 277; Stop 301
gcctacttctataacttttatcaag

SEQ ID NO: 105013 - DNA, 25 bp, Artificial
  probe
  misc_feature (1)..(25): SEQ ID NO: 954; WAN024C5P_at; Start 139; Stop 163
gagaaaatacaatcaaaacggatac

SEQ ID NO: 105014 - DNA, 25 bp, Artificial
  probe
  misc_feature (1)..(25): SEQ ID NO: 954; WAN024C5P_at; Start 295; Stop 319
tatcaagtagttaaagaagtagatc

SEQ ID NO: 105015 - DNA, 25 bp, Artificial
  probe
  misc_feature (1)..(25): SEQ ID NO: 954; WAN024C5P_at; Start 274; Stop 298
ttggcctacttctataacttttatc

SEQ ID NO: 105016 - DNA, 25 bp, Artificial
  probe
  misc_feature (1)..(25): SEQ ID NO: 954; WAN024C5P_at; Start 258; Stop 282
aaccatcatttcaagtttggcctac

SEQ ID NO: 105017 - DNA, 25 bp, Artificial
  probe
  misc_feature (1)..(25): SEQ ID NO: 954; WAN024C5P_at; Start 129; Stop 153
taaaggacttgagaaaatacaatca

SEQ ID NO: 105018 - DNA, 25 bp, Artificial
  probe
  misc_feature (1)..(25): SEQ ID NO: 954; WAN024C5P_at; Start 194; Stop 218
tcatatcctttccacaacttttaac

SEQ ID NO: 105019 - DNA, 25 bp, Artificial
  probe
  misc_feature (1)..(25): SEQ ID NO: 954; WAN024C5P_at; Start 261; Stop 285
catcatttcaagtttggcctacttc

SEQ ID NO: 105020 - DNA, 25 bp, Artificial
  probe
  misc_feature (1)..(25): SEQ ID NO: 954; WAN024C5P_at; Start 306; Stop 330
taaagaagtagatcaaaaacagttg

SEQ ID NO: 105021 - DNA, 25 bp, Artificial
  probe
  misc_feature (1)..(25): SEQ ID NO: 954; WAN024C5P_at; Start 144; Stop 168
aatacaatcaaaacggatacctgtc

SEQ ID NO: 105022 - DNA, 25 bp, Artificial
  probe
  misc_feature (1)..(25): SEQ ID NO: 954; WAN024C5P_at; Start 219; Stop 243
caaccctgtccaatggaaattttca

SEQ ID NO: 105023 - DNA, 25 bp, Artificial
  probe
  misc_feature (1)..(25): SEQ ID NO: 954; WAN024C5P_at; Start 310; Stop 334
gaagtagatcaaaaacagttgattt

SEQ ID NO: 105024 - DNA, 25 bp, Artificial
  probe
  misc_feature (1)..(25): SEQ ID NO: 954; WAN024C5P_at; Start 222; Stop 246
ccctgtccaatggaaattttcaata

SEQ ID NO: 105025 - DNA, 25 bp, Artificial
  probe
  misc_feature (1)..(25): SEQ ID NO: 5086; WAN024C5Q_at; Start 25; Stop 49
tgccaatggtcccatcaaggccatc

SEQ ID NO: 105026 - DNA, 25 bp, Artificial
  probe
  misc_feature (1)..(25): SEQ ID NO: 5086; WAN024C5Q_at; Start 107; Stop 131
ctggtaataaaaggcaggaagtgtg

SEQ ID NO: 105027 - DNA, 25 bp, Artificial
  probe
  misc_feature (1)..(25): SEQ ID NO: 5086; WAN024C5Q_at; Start 186; Stop 210
gatcctctccatagtgttttttcaa

SEQ ID NO: 105028 - DNA, 25 bp, Artificial
  probe
  misc_feature (1)..(25): SEQ ID NO: 5086; WAN024C5Q_at; Start 216; Stop 240
gatacatcacattggcatatcccaa

SEQ ID NO: 105029 - DNA, 25 bp, Artificial
  probe
  misc_feature (1)..(25): SEQ ID NO: 5086; WAN024C5Q_at; Start 194; Stop 218
ccatagtgttttttcaaagcaggat

SEQ ID NO: 105030 - DNA, 25 bp, Artificial
  probe
  misc_feature (1)..(25): SEQ ID NO: 5086; WAN024C5Q_at; Start 207; Stop 231
tcaaagcaggatacatcacattggc

SEQ ID NO: 105031 - DNA, 25 bp, Artificial
  probe
  misc_feature (1)..(25): SEQ ID NO: 5086; WAN024C5Q_at; Start 88; Stop 112
caacattacaagatgcaagctggta

SEQ ID NO: 105032 - DNA, 25 bp, Artificial
  probe
  misc_feature (1)..(25): SEQ ID NO: 5086; WAN024C5Q_at; Start 175; Stop 199
gaaaccttcctgatcctctccatag

SEQ ID NO: 105033 - DNA, 25 bp, Artificial
  probe
  misc_feature (1)..(25): SEQ ID NO: 5086; WAN024C5Q_at; Start 29; Stop 53
aatggtcccatcaaggccatcttga

SEQ ID NO: 105034 - DNA, 25 bp, Artificial
  probe
  misc_feature (1)..(25): SEQ ID NO: 5086; WAN024C5Q_at; Start 9; Stop 33
gagaatccccaatacctgccaatgg

SEQ ID NO: 105035 - DNA, 25 bp, Artificial
  probe
  misc_feature (1)..(25): SEQ ID NO: 5086; WAN024C5Q_at; Start 101; Stop 125
tgcaagctggtaataaaaggcagga

SEQ ID NO: 105036 - DNA, 25 bp, Artificial
  probe
  misc_feature (1)..(25): SEQ ID NO: 5086; WAN024C5Q_at; Start 170; Stop 194
tggtagaaaccttcctgatcctctc

SEQ ID NO: 105037 - DNA, 25 bp, Artificial
  probe
  misc_feature (1)..(25): SEQ ID NO: 5086; WAN024C5Q_at; Start 39; Stop 63
tcaaggccatcttgatgctacgtgt

SEQ ID NO: 105038 - DNA, 25 bp, Artificial
  probe
  misc_feature (1)..(25): SEQ ID NO: 5086; WAN024C5Q_at; Start 150; Stop 174
cacagttttcttccaaggcttggta

SEQ ID NO: 105039 - DNA, 25 bp, Artificial
  probe
  misc_feature (1)..(25): SEQ ID NO: 5086; WAN024C5Q_at; Start 267; Stop 291
cattttgacaaaagaatgcccgcaa

SEQ ID NO: 105040 - DNA, 25 bp, Artificial
  probe
  misc_feature (1)..(25): SEQ ID NO: 5086; WAN024C5Q_at; Start 19; Stop 43
aatacctgccaatggtcccatcaag

SEQ ID NO: 105041 - DNA, 25 bp, Artificial
  probe
  misc_feature (1)..(25): SEQ ID NO: 5086; WAN024C5Q_at; Start 43; Stop 67
ggccatcttgatgctacgtgtttct

SEQ ID NO: 105042 - DNA, 25 bp, Artificial
  probe
  misc_feature (1)..(25): SEQ ID NO: 5086; WAN024C5Q_at; Start 77; Stop 101
cggccattttccaacattacaagat

SEQ ID NO: 105043 - DNA, 25 bp, Artificial
  probe
  misc_feature (1)..(25): SEQ ID NO: 5086; WAN024C5Q_at; Start 2; Stop 26
tgagaaagagaatccccaatacctg

SEQ ID NO: 105044 - DNA, 25 bp, Artificial
  probe
  misc_feature (1)..(25): SEQ ID NO: 5086; WAN024C5Q_at; Start 288; Stop 312
gcaaagacgttttaagataatcacg

SEQ ID NO: 105045 - DNA, 25 bp, Artificial
  probe
  misc_feature (1)..(25): SEQ ID NO: 5086; WAN024C5Q_at; Start 162; Stop 186
ccaaggcttggtagaaaccttcctg

SEQ ID NO: 105046 - DNA, 25 bp, Artificial
  probe
  misc_feature (1)..(25): SEQ ID NO: 5086; WAN024C5Q_at; Start 235; Stop 259
tcccaacccttgatagttactatag

SEQ ID NO: 105047 - DNA, 25 bp, Artificial
  probe
  misc_feature (1)..(25): SEQ ID NO: 5086; WAN024C5Q_at; Start 201; Stop 225
gttttttcaaagcaggatacatcac

SEQ ID NO: 105048 - DNA, 25 bp, Artificial
  probe
  misc_feature (1)..(25): SEQ ID NO: 5086; WAN024C5Q_at; Start 283; Stop 307
tgcccgcaaagacgttttaagataa

SEQ ID NO: 105049 - DNA, 25 bp, Artificial
  probe
  misc_feature (1)..(25): SEQ ID NO: 5086; WAN024C5Q_at; Start 119; Stop 143
ggcaggaagtgtgggttggtattat

SEQ ID NO: 105050 - DNA, 25 bp, Artificial
  probe
  misc_feature (1)..(25): SEQ ID NO: 5086; WAN024C5Q_at; Start 212; Stop 236
gcaggatacatcacattggcatatc

SEQ ID NO: 105051 - DNA, 25 bp, Artificial
  probe
  misc_feature (1)..(25): SEQ ID NO: 5086; WAN024C5Q_at; Start 272; Stop 296
tgacaaaagaatgcccgcaaagacg

SEQ ID NO: 105052 - DNA, 25 bp, Artificial
  probe
  misc_feature (1)..(25): SEQ ID NO: 5086; WAN024C5Q_at; Start 228; Stop 252
tggcatatcccaacccttgatagtt

SEQ ID NO: 105053 - DNA, 25 bp, Artificial
  probe
  misc_feature (1)..(25): SEQ ID NO: 5086; WAN024C5Q_at; Start 252; Stop 276
tactatagttaaatccattttgaca

SEQ ID NO: 105054 - DNA, 25 bp, Artificial
  probe
  misc_feature (1)..(25): SEQ ID NO: 5086; WAN024C5Q_at; Start 280; Stop 304
gaatgcccgcaaagacgttttaaga

SEQ ID NO: 105055 - DNA, 25 bp, Artificial
  probe
  misc_feature (1)..(25): SEQ ID NO: 5086; WAN024C5Q_at; Start 47; Stop 71
atcttgatgctacgtgtttcttttg

SEQ ID NO: 105056 - DNA, 25 bp, Artificial
  probe
  misc_feature (1)..(25): SEQ ID NO: 5086; WAN024C5Q_at; Start 96; Stop 120
caagatgcaagctggtaataaaagg

SEQ ID NO: 105057 - DNA, 25 bp, Artificial
  probe
  misc_feature (1)..(25): SEQ ID NO: 5086; WAN024C5Q_at; Start 166; Stop 190
ggcttggtagaaaccttcctgatcc

SEQ ID NO: 105058 - DNA, 25 bp, Artificial
  probe
  misc_feature (1)..(25): SEQ ID NO: 5086; WAN024C5Q_at; Start 146; Stop 170
aattcacagttttcttccaaggctt

SEQ ID NO: 105059 - DNA, 25 bp, Artificial
  probe
  misc_feature (1)..(25): SEQ ID NO: 1470; WAN024C5R_at; Start 628; Stop 652
aaagcagacgctaaacaaagtatcg

SEQ ID NO: 105060 - DNA, 25 bp, Artificial
  probe
  misc_feature (1)..(25): SEQ ID NO: 1470; WAN024C5R_at; Start 596; Stop 620
tggtgccgattacctttgctgcagg

SEQ ID NO: 105061 - DNA, 25 bp, Artificial
  probe
  misc_feature (1)..(25): SEQ ID NO: 1470; WAN024C5R_at; Start 124; Stop 148
cctgctttgaaaaaacactatggag

SEQ ID NO: 105062 - DNA, 25 bp, Artificial
  probe
  misc_feature (1)..(25): SEQ ID NO: 1470; WAN024C5R_at; Start 388; Stop 412
gaaggcttggttgtcggtccaatct

SEQ ID NO: 105063 - DNA, 25 bp, Artificial
  probe
  misc_feature (1)..(25): SEQ ID NO: 1470; WAN024C5R_at; Start 726; Stop 750
cttgatcaaagaaaagaaatggaca

SEQ ID NO: 105064 - DNA, 25 bp, Artificial
  probe
  misc_feature (1)..(25): SEQ ID NO: 1470; WAN024C5R_at; Start 440; Stop 464
taacagcgattaaattgtcaactgg

SEQ ID NO: 105065 - DNA, 25 bp, Artificial
  probe
  misc_feature (1)..(25): SEQ ID NO: 1470; WAN024C5R_at; Start 104; Stop 128
gatatgccaatgtgatgtatcctgc

SEQ ID NO: 105066 - DNA, 25 bp, Artificial
  probe
  misc_feature (1)..(25): SEQ ID NO: 1470; WAN024C5R_at; Start 50; Stop 74
tgcgggcattcttttgtcaaaatgg

SEQ ID NO: 105067 - DNA, 25 bp, Artificial
  probe
  misc_feature (1)..(25): SEQ ID NO: 1470; WAN024C5R_at; Start 791; Stop 815
tcggaagctggcttaagattatagc

SEQ ID NO: 105068 - DNA, 25 bp, Artificial
  probe
  misc_feature (1)..(25): SEQ ID NO: 1470; WAN024C5R_at; Start 741; Stop 765
gaaatggacaacatataaactcgtt

SEQ ID NO: 105069 - DNA, 25 bp, Artificial
  probe
  misc_feature (1)..(25): SEQ ID NO: 1470; WAN024C5R_at; Start 291; Stop 315
gatggccttgatgggaccattggca

SEQ ID NO: 105070 - DNA, 25 bp, Artificial
  probe
  misc_feature (1)..(25): SEQ ID NO: 1470; WAN024C5R_at; Start 455; Stop 479
tgtcaactggtctgtatggatacaa

SEQ ID NO: 105071 - DNA, 25 bp, Artificial
  probe
  misc_feature (1)..(25): SEQ ID NO: 1470; WAN024C5R_at; Start 215; Stop 239
tcctgccttttattaccagcttgca

SEQ ID NO: 105072 - DNA, 25 bp, Artificial
  probe
  misc_feature (1)..(25): SEQ ID NO: 1470; WAN024C5R_at; Start 87; Stop 111
taactatcaagggttgggatatgcc

SEQ ID NO: 105073 - DNA, 25 bp, Artificial
  probe
  misc_feature (1)..(25): SEQ ID NO: 1470; WAN024C5R_at; Start 488; Stop 512
caactgtgattgataaactaagcga

SEQ ID NO: 105074 - DNA, 25 bp, Artificial
  probe
  misc_feature (1)..(25): SEQ ID NO: 1470; WAN024C5R_at; Start 779; Stop 803
tcatcggaattatcggaagctggct

SEQ ID NO: 105075 - DNA, 25 bp, Artificial
  probe
  misc_feature (1)..(25): SEQ ID NO: 1470; WAN024C5R_at; Start 355; Stop 379
ttgttctcaaccatcgcagcttcgt

SEQ ID NO: 105076 - DNA, 25 bp, Artificial
  probe
  misc_feature (1)..(25): SEQ ID NO: 1470; WAN024C5R_at; Start 567; Stop 591
tggtttggcagcgacatctgttaag

SEQ ID NO: 105077 - DNA, 25 bp, Artificial
  probe
  misc_feature (1)..(25): SEQ ID NO: 1470; WAN024C5R_at; Start 554; Stop 578
taaccgtaattgctggtttggcagc

SEQ ID NO: 105078 - DNA, 25 bp, Artificial
  probe
  misc_feature (1)..(25): SEQ ID NO: 1470; WAN024C5R_at; Start 501; Stop 525
taaactaagcgaacagatggcaacg

SEQ ID NO: 105079 - DNA, 25 bp, Artificial
  probe
  misc_feature (1)..(25): SEQ ID NO: 1470; WAN024C5R_at; Start 33; Stop 57
ttatcttaaaacgtctttgcgggca

SEQ ID NO: 105080 - DNA, 25 bp, Artificial
  probe
  misc_feature (1)..(25): SEQ ID NO: 1470; WAN024C5R_at; Start 139; Stop 163
cactatggagaggatcaggaaggtt

SEQ ID NO: 105081 - DNA, 25 bp, Artificial
  probe
  misc_feature (1)..(25): SEQ ID NO: 1470; WAN024C5R_at; Start 166; Stop 190
taccaagccttggaagaaaactgtg

SEQ ID NO: 105082 - DNA, 25 bp, Artificial
  probe
  misc_feature (1)..(25): SEQ ID NO: 1470; WAN024C5R_at; Start 370; Stop 394
gcagcttcgtttgctcaagaaggct

SEQ ID NO: 105083 - DNA, 25 bp, Artificial
  probe
  misc_feature (1)..(25): SEQ ID NO: 1470; WAN024C5R_at; Start 407; Stop 431
caatcttgttcttccttgcgatgaa

SEQ ID NO: 105084 - DNA, 25 bp, Artificial
  probe
  misc_feature (1)..(25): SEQ ID NO: 1470; WAN024C5R_at; Start 537; Stop 561
tgccaatattatcggtgtaaccgta

SEQ ID NO: 105085 - DNA, 25 bp, Artificial
  probe
  misc_feature (1)..(25): SEQ ID NO: 1470; WAN024C5R_at; Start 471; Stop 495
tggatacaaactaggaacaactgtg

SEQ ID NO: 105086 - DNA, 25 bp, Artificial
  probe
  misc_feature (1)..(25): SEQ ID NO: 1470; WAN024C5R_at; Start 661; Stop 685
cagggaatgcttgataaggttgctc

SEQ ID NO: 105087 - DNA, 25 bp, Artificial
  probe
  misc_feature (1)..(25): SEQ ID NO: 1470; WAN024C5R_at; Start 581; Stop 605
catctgttaagattatggtgccgat

SEQ ID NO: 105088 - DNA, 25 bp, Artificial
  probe
  misc_feature (1)..(25): SEQ ID NO: 1470; WAN024C5R_at; Start 423; Stop 447
tgcgatgaatacgattttaacagcg

SEQ ID NO: 105089 - DNA, 25 bp, Artificial
  probe
  misc_feature (1)..(25): SEQ ID NO: 1470; WAN024C5R_at; Start 643; Stop 667
caaagtatcgtaagtattcagggaa

SEQ ID NO: 105090 - DNA, 25 bp, Artificial
  probe
  misc_feature (1)..(25): SEQ ID NO: 1470; WAN024C5R_at; Start 676; Stop 700
aaggttgctccagctcttctaccag

SEQ ID NO: 105091 - DNA, 25 bp, Artificial
  probe
  misc_feature (1)..(25): SEQ ID NO: 1470; WAN024C5R_at; Start 511; Stop 535
gaacagatggcaacgatttctcgta

SEQ ID NO: 105092 - DNA, 25 bp, Artificial
  probe
  misc_feature (1)..(25): SEQ ID NO: 1470; WAN024C5R_at; Start 151; Stop 175
gatcaggaaggtttctaccaagcct

SEQ ID NO: 105093 - DNA, 25 bp, Artificial
  probe
  misc_feature (1)..(25): SEQ ID NO: 2532; WAN024C5S_at; Start 668; Stop 692
gagtcaatgattccattatcgtgga

SEQ ID NO: 105094 - DNA, 25 bp, Artificial
  probe
  misc_feature (1)..(25): SEQ ID NO: 2532; WAN024C5S_at; Start 222; Stop 246
gacctcaacagaccatgaaccaatg

SEQ ID NO: 105095 - DNA, 25 bp, Artificial
  probe
  misc_feature (1)..(25): SEQ ID NO: 2532; WAN024C5S_at; Start 591; Stop 615
ctaacaagtgggagaaccgtgaggt

SEQ ID NO: 105096 - DNA, 25 bp, Artificial
  probe
  misc_feature (1)..(25): SEQ ID NO: 2532; WAN024C5S_at; Start 543; Stop 567
tgactgggaaaaaggcggaatatac

SEQ ID NO: 105097 - DNA, 25 bp, Artificial
  probe
  misc_feature (1)..(25): SEQ ID NO: 2532; WAN024C5S_at; Start 498; Stop 522
tggttgtcccaacttcatcagagga

SEQ ID NO: 105098 - DNA, 25 bp, Artificial
  probe
  misc_feature (1)..(25): SEQ ID NO: 2532; WAN024C5S_at; Start 132; Stop 156
taaagaccttgacgatatggtagct

SEQ ID NO: 105099 - DNA, 25 bp, Artificial
  probe
  misc_feature (1)..(25): SEQ ID NO: 2532; WAN024C5S_at; Start 371; Stop 395
gagcgattgaaatttatgacctacc

SEQ ID NO: 105100 - DNA, 25 bp, Artificial
  probe
  misc_feature (1)..(25): SEQ ID NO: 2532; WAN024C5S_at; Start 205; Stop 229
gtggcacgaaccctcatgacctcaa

SEQ ID NO: 105101 - DNA, 25 bp, Artificial
  probe
  misc_feature (1)..(25): SEQ ID NO: 2532; WAN024C5S_at; Start 177; Stop 201
tgttgccaagtctgtcacggtcgat

SEQ ID NO: 105102 - DNA, 25 bp, Artificial
  probe
  misc_feature (1)..(25): SEQ ID NO: 2532; WAN024C5S_at; Start 565; Stop 589
tacacttggtattcctaaaggagac

SEQ ID NO: 105103 - DNA, 25 bp, Artificial
  probe
  misc_feature (1)..(25): SEQ ID NO: 2532; WAN024C5S_at; Start 431; Stop 455
gaaactggtaatgacgatttcggtc

SEQ ID NO: 105104 - DNA, 25 bp, Artificial
  probe
  misc_feature (1)..(25): SEQ ID NO: 2532; WAN024C5S_at; Start 53; Stop 77
aatttgatgagcgtgcaagggctga

SEQ ID NO: 105105 - DNA, 25 bp, Artificial
  probe
  misc_feature (1)..(25): SEQ ID NO: 2532; WAN024C5S_at; Start 147; Stop 171
tatggtagctgagagcgtgtcattc

SEQ ID NO: 105106 - DNA, 25 bp, Artificial
  probe
  misc_feature (1)..(25): SEQ ID NO: 2532; WAN024C5S_at; Start 191; Stop 215
tcacggtcgatatcgtggcacgaac

SEQ ID NO: 105107 - DNA, 25 bp, Artificial
  probe
  misc_feature (1)..(25): SEQ ID NO: 2532; WAN024C5S_at; Start 110; Stop 134
gagtggaagctgaaaaagtcggtaa

SEQ ID NO: 105108 - DNA, 25 bp, Artificial
  probe
  misc_feature (1)..(25): SEQ ID NO: 2532; WAN024C5S_at; Start 629; Stop 653
cgtaaatggcggacgattggcatcc

SEQ ID NO: 105109 - DNA, 25 bp, Artificial
  probe
  misc_feature (1)..(25): SEQ ID NO: 2532; WAN024C5S_at; Start 285; Stop 309
tggttcgtaccttgtccctggaggc

SEQ ID NO: 105110 - DNA, 25 bp, Artificial
  probe
  misc_feature (1)..(25): SEQ ID NO: 2532; WAN024C5S_at; Start 639; Stop 663
ggacgattggcatccctcaagaggg

SEQ ID NO: 105111 - DNA, 25 bp, Artificial
  probe
  misc_feature (1)..(25): SEQ ID NO: 2532; WAN024C5S_at; Start 484; Stop 508
ggttcaaaatgtattggttgtccca

SEQ ID NO: 105112 - DNA, 25 bp, Artificial
  probe
  misc_feature (1)..(25): SEQ ID NO: 2532; WAN024C5S_at; Start 512; Stop 536
tcatcagaggacgtcatcaatcaaa

SEQ ID NO: 105113 - DNA, 25 bp, Artificial
  probe
  misc_feature (1)..(25): SEQ ID NO: 2532; WAN024C5S_at; Start 577; Stop 601
tcctaaaggagacactaacaagtgg

SEQ ID NO: 105114 - DNA, 25 bp, Artificial
  probe
  misc_feature (1)..(25): SEQ ID NO: 2532; WAN024C5S_at; Start 242; Stop 266
caatgactcaggtatctgaaagtgc

SEQ ID NO: 105115 - DNA, 25 bp, Artificial
  probe
  misc_feature (1)..(25): SEQ ID NO: 2532; WAN024C5S_at; Start 38; Stop 62
tatggcgctcgttgaaatttgatga

SEQ ID NO: 105116 - DNA, 25 bp, Artificial
  probe
  misc_feature (1)..(25): SEQ ID NO: 2532; WAN024C5S_at; Start 354; Stop 378
gaaaaaacaacgatatggagcgatt

SEQ ID NO: 105117 - DNA, 25 bp, Artificial
  probe
  misc_feature (1)..(25): SEQ ID NO: 2532; WAN024C5S_at; Start 447; Stop 471
atttcggtcatccaatccatcgtga

SEQ ID NO: 105118 - DNA, 25 bp, Artificial
  probe
  misc_feature (1)..(25): SEQ ID NO: 2532; WAN024C5S_at; Start 300; Stop 324
ccctggaggcggtctctttatcaaa

SEQ ID NO: 105119 - DNA, 25 bp, Artificial
  probe
  misc_feature (1)..(25): SEQ ID NO: 2532; WAN024C5S_at; Start 386; Stop 410
atgacctacctaaaaggaatccctg

SEQ ID NO: 105120 - DNA, 25 bp, Artificial
  probe
  misc_feature (1)..(25): SEQ ID NO: 2532; WAN024C5S_at; Start 95; Stop 119
tatctaattctttgcgagtggaagc

SEQ ID NO: 105121 - DNA, 25 bp, Artificial
  probe
  misc_feature (1)..(25): SEQ ID NO: 2532; WAN024C5S_at; Start 416; Stop 440
ttaatagacaaggtggaaactggta

SEQ ID NO: 105122 - DNA, 25 bp, Artificial
  probe
  misc_feature (1)..(25): SEQ ID NO: 2532; WAN024C5S_at; Start 256; Stop 280
tctgaaagtgccttgggttattcgt

SEQ ID NO: 105123 - DNA, 25 bp, Artificial
  probe
  misc_feature (1)..(25): SEQ ID NO: 2532; WAN024C5S_at; Start 162; Stop 186
cgtgtcattcgctagtgttgccaag

SEQ ID NO: 105124 - DNA, 25 bp, Artificial
  probe
  misc_feature (1)..(25): SEQ ID NO: 2532; WAN024C5S_at; Start 23; Stop 47
aagacttggaattgttatggcgctc

SEQ ID NO: 105125 - DNA, 25 bp, Artificial
  probe
  misc_feature (1)..(25): SEQ ID NO: 2532; WAN024C5S_at; Start 464; Stop 488
catcgtgatgttgagattgaggttc

SEQ ID NO: 105126 - DNA, 25 bp, Artificial
  probe
  misc_feature (1)..(25): SEQ ID NO: 2532; WAN024C5S_at; Start 314; Stop 338
tctttatcaaagacaccgaacttaa

SEQ ID NO: 105127 - DNA, 25 bp, Artificial
  probe
  misc_feature (1)..(25): SEQ ID NO: 2088; WAN024C5T_at; Start 77; Stop 101
gcagctttcaaggttgcttctctag

SEQ ID NO: 105128 - DNA, 25 bp, Artificial
  probe
  misc_feature (1)..(25): SEQ ID NO: 2088; WAN024C5T_at; Start 154; Stop 178
gaagccgagatcatggtgatccaat

SEQ ID NO: 105129 - DNA, 25 bp, Artificial
  probe
  misc_feature (1)..(25): SEQ ID NO: 2088; WAN024C5T_at; Start 122; Stop 146
ttatattcagccatacaagacggtg

SEQ ID NO: 105130 - DNA, 25 bp, Artificial
  probe
  misc_feature (1)..(25): SEQ ID NO: 2088; WAN024C5T_at; Start 314; Stop 338
tccatgattggatagacattatcaa

SEQ ID NO: 105131 - DNA, 25 bp, Artificial
  probe
  misc_feature (1)..(25): SEQ ID NO: 2088; WAN024C5T_at; Start 66; Stop 90
tcaacttatctgcagctttcaaggt

SEQ ID NO: 105132 - DNA, 25 bp, Artificial
  probe
  misc_feature (1)..(25): SEQ ID NO: 2088; WAN024C5T_at; Start 366; Stop 390
tgaaatagtcaaggttgagttctaa

SEQ ID NO: 105133 - DNA, 25 bp, Artificial
  probe
  misc_feature (1)..(25): SEQ ID NO: 2088; WAN024C5T_at; Start 289; Stop 313
gaaaccattggtccattccgtgtta

SEQ ID NO: 105134 - DNA, 25 bp, Artificial
  probe
  misc_feature (1)..(25): SEQ ID NO: 2088; WAN024C5T_at; Start 85; Stop 109
caaggttgcttctctagcctctcca

SEQ ID NO: 105135 - DNA, 25 bp, Artificial
  probe
  misc_feature (1)..(25): SEQ ID NO: 2088; WAN024C5T_at; Start 344; Stop 368
gctggcgtcgggaaatcttccttga

SEQ ID NO: 105136 - DNA, 25 bp, Artificial
  probe
  misc_feature (1)..(25): SEQ ID NO: 2088; WAN024C5T_at; Start 326; Stop 350
tagacattatcaaaggtagctggcg

SEQ ID NO: 105137 - DNA, 25 bp, Artificial
  probe
  misc_feature (1)..(25): SEQ ID NO: 2088; WAN024C5T_at; Start 181; Stop 205
tactctcttattgacacgatccagg

SEQ ID NO: 105138 - DNA, 25 bp, Artificial
  probe
  misc_feature (1)..(25): SEQ ID NO: 2088; WAN024C5T_at; Start 195; Stop 219
cacgatccaggaaagaaagaacatt

SEQ ID NO: 105139 - DNA, 25 bp, Artificial
  probe
  misc_feature (1)..(25): SEQ ID NO: 2088; WAN024C5T_at; Start 352; Stop 376
cgggaaatcttccttgaaatagtca

SEQ ID NO: 105140 - DNA, 25 bp, Artificial
  probe
  misc_feature (1)..(25): SEQ ID NO: 2088; WAN024C5T_at; Start 56; Stop 80
tagcgttcaatcaacttatctgcag

SEQ ID NO: 105141 - DNA, 25 bp, Artificial
  probe
  misc_feature (1)..(25): SEQ ID NO: 2088; WAN024C5T_at; Start 225; Stop 249
gagcgatgtttttaaatgcatcctg

SEQ ID NO: 105142 - DNA, 25 bp, Artificial
  probe
  misc_feature (1)..(25): SEQ ID NO: 2088; WAN024C5T_at; Start 268; Stop 292
caaccacagttctcctgtccagaaa

SEQ ID NO: 105143 - DNA, 25 bp, Artificial
  probe
  misc_feature (1)..(25): SEQ ID NO: 2088; WAN024C5T_at; Start 20; Stop 44
tctccccaagcttgaataaaaccac

SEQ ID NO: 105144 - DNA, 25 bp, Artificial
  probe
  misc_feature (1)..(25): SEQ ID NO: 2088; WAN024C5T_at; Start 11; Stop 35
ttgcccaagtctccccaagcttgaa

SEQ ID NO: 105145 - DNA, 25 bp, Artificial
  probe
  misc_feature (1)..(25): SEQ ID NO: 2088; WAN024C5T_at; Start 301; Stop 325
ccattccgtgttatccatgattgga

SEQ ID NO: 105146 - DNA, 25 bp, Artificial
  probe
  misc_feature (1)..(25): SEQ ID NO: 2088; WAN024C5T_at; Start 125; Stop 149
tattcagccatacaagacggtgtgt

SEQ ID NO: 105147 - DNA, 25 bp, Artificial
  probe
  misc_feature (1)..(25): SEQ ID NO: 2088; WAN024C5T_at; Start 40; Stop 64
accacctttttcttgatagcgttca

SEQ ID NO: 105148 - DNA, 25 bp, Artificial
  probe
  misc_feature (1)..(25): SEQ ID NO: 2088; WAN024C5T_at; Start 143; Stop 167
ggtgtgtacaagaagccgagatcat

SEQ ID NO: 105149 - DNA, 25 bp, Artificial
  probe
  misc_feature (1)..(25): SEQ ID NO: 2088; WAN024C5T_at; Start 256; Stop 280
gtattcataagccaaccacagttct

SEQ ID NO: 105150 - DNA, 25 bp, Artificial
  probe
  misc_feature (1)..(25): SEQ ID NO: 2088; WAN024C5T_at; Start 330; Stop 354
cattatcaaaggtagctggcgtcgg

SEQ ID NO: 105151 - DNA, 25 bp, Artificial
  probe
  misc_feature (1)..(25): SEQ ID NO: 2088; WAN024C5T_at; Start 165; Stop 189
catggtgatccaattctactctctt

SEQ ID NO: 105152 - DNA, 25 bp, Artificial
  probe
  misc_feature (1)..(25): SEQ ID NO: 2088; WAN024C5T_at; Start 246; Stop 270
cctgttgactgtattcataagccaa

SEQ ID NO: 105153 - DNA, 25 bp, Artificial
  probe
  misc_feature (1)..(25): SEQ ID NO: 2088; WAN024C5T_at; Start 189; Stop 213
tattgacacgatccaggaaagaaag

SEQ ID NO: 105154 - DNA, 25 bp, Artificial
  probe
  misc_feature (1)..(25): SEQ ID NO: 2088; WAN024C5T_at; Start 209; Stop 233
gaaagaacatttttatgagcgatgt

SEQ ID NO: 105155 - DNA, 25 bp, Artificial
  probe
  misc_feature (1)..(25): SEQ ID NO: 2088; WAN024C5T_at; Start 149; Stop 173
tacaagaagccgagatcatggtgat

SEQ ID NO: 105156 - DNA, 25 bp, Artificial
  probe
  misc_feature (1)..(25): SEQ ID NO: 2088; WAN024C5T_at; Start 335; Stop 359
tcaaaggtagctggcgtcgggaaat

SEQ ID NO: 105157 - DNA, 25 bp, Artificial
  probe
  misc_feature (1)..(25): SEQ ID NO: 2088; WAN024C5T_at; Start 280; Stop 304
tcctgtccagaaaccattggtccat

SEQ ID NO: 105158 - DNA, 25 bp, Artificial
  probe
  misc_feature (1)..(25): SEQ ID NO: 2088; WAN024C5T_at; Start 237; Stop 261
taaatgcatcctgttgactgtattc

SEQ ID NO: 105159 - DNA, 25 bp, Artificial
  probe
  misc_feature (1)..(25): SEQ ID NO: 2088; WAN024C5T_at; Start 101; Stop 125
gcctctccatctccatttatcttat

SEQ ID NO: 105160 - DNA, 25 bp, Artificial
  probe
  misc_feature (1)..(25): SEQ ID NO: 2088; WAN024C5T_at; Start 135; Stop 159
tacaagacggtgtgtacaagaagcc

SEQ ID NO: 105161 - DNA, 25 bp, Artificial
  probe
  misc_feature (1)..(25): SEQ ID NO: 5160; WAN024C5U_at; Start 34; Stop 58
gcctggccgacttcttctttcgtca

SEQ ID NO: 105162 - DNA, 25 bp, Artificial
  probe
  misc_feature (1)..(25): SEQ ID NO: 5160; WAN024C5U_at; Start 158; Stop 182
ttcctcttcctctgcatccgttgaa

SEQ ID NO: 105163 - DNA, 25 bp, Artificial
  probe
  misc_feature (1)..(25): SEQ ID NO: 5160; WAN024C5U_at; Start 17; Stop 41
gaataaccttatcgattgcctggcc

SEQ ID NO: 105164 - DNA, 25 bp, Artificial
  probe
  misc_feature (1)..(25): SEQ ID NO: 5160; WAN024C5U_at; Start 139; Stop 163
tacccgattcgaaatcttcttcctc

SEQ ID NO: 105165 - DNA, 25 bp, Artificial
  probe
  misc_feature (1)..(25): SEQ ID NO: 5160; WAN024C5U_at; Start 185; Stop 209
caattctttaccatttacgactccg

SEQ ID NO: 105166 - DNA, 25 bp, Artificial
  probe
  misc_feature (1)..(25): SEQ ID NO: 5160; WAN024C5U_at; Start 165; Stop 189
tcctctgcatccgttgaaaacaatt

SEQ ID NO: 105167 - DNA, 25 bp, Artificial
  probe
  misc_feature (1)..(25): SEQ ID NO: 5160; WAN024C5U_at; Start 171; Stop 195
gcatccgttgaaaacaattctttac

SEQ ID NO: 105168 - DNA, 25 bp, Artificial
  probe
  misc_feature (1)..(25): SEQ ID NO: 5160; WAN024C5U_at; Start 21; Stop 45
aaccttatcgattgcctggccgact

SEQ ID NO: 105169 - DNA, 25 bp, Artificial
  probe
  misc_feature (1)..(25): SEQ ID NO: 5160; WAN024C5U_at; Start 70; Stop 94
tctaagaagcgctcaggcgatttta

SEQ ID NO: 105170 - DNA, 25 bp, Artificial
  probe
  misc_feature (1)..(25): SEQ ID NO: 5160; WAN024C5U_at; Start 5; Stop 29
gttctaactgccgaataaccttatc

SEQ ID NO: 105171 - DNA, 25 bp, Artificial
  probe
  misc_feature (1)..(25): SEQ ID NO: 5160; WAN024C5U_at; Start 63; Stop 87
tggtacttctaagaagcgctcaggc

SEQ ID NO: 105172 - DNA, 25 bp, Artificial
  probe
  misc_feature (1)..(25): SEQ ID NO: 5160; WAN024C5U_at; Start 1; Stop 25
ttgagttctaactgccgaataacct

SEQ ID NO: 105173 - DNA, 25 bp, Artificial
  probe
  misc_feature (1)..(25): SEQ ID NO: 5160; WAN024C5U_at; Start 47; Stop 71
cttctttcgtcagaagtggtacttc

SEQ ID NO: 105174 - DNA, 25 bp, Artificial
  probe
  misc_feature (1)..(25): SEQ ID NO: 5160; WAN024C5U_at; Start 80; Stop 104
gctcaggcgattttattttttcaat

SEQ ID NO: 105175 - DNA, 25 bp, Artificial
  probe
  misc_feature (1)..(25): SEQ ID NO: 5160; WAN024C5U_at; Start 209; Stop 233
gccctgggccgccactactgattta

SEQ ID NO: 105176 - DNA, 25 bp, Artificial
  probe
  misc_feature (1)..(25): SEQ ID NO: 5160; WAN024C5U_at; Start 26; Stop 50
tatcgattgcctggccgacttcttc

SEQ ID NO: 105177 - DNA, 25 bp, Artificial
  probe
  misc_feature (1)..(25): SEQ ID NO: 5160; WAN024C5U_at; Start 101; Stop 125
caatcgtaaccttttttatcattct

SEQ ID NO: 105178 - DNA, 25 bp, Artificial
  probe
  misc_feature (1)..(25): SEQ ID NO: 5160; WAN024C5U_at; Start 168; Stop 192
tctgcatccgttgaaaacaattctt

SEQ ID NO: 105179 - DNA, 25 bp, Artificial
  probe
  misc_feature (1)..(25): SEQ ID NO: 5160; WAN024C5U_at; Start 60; Stop 84
aagtggtacttctaagaagcgctca

SEQ ID NO: 105180 - DNA, 25 bp, Artificial
  probe
  misc_feature (1)..(25): SEQ ID NO: 5160; WAN024C5U_at; Start 66; Stop 90
tacttctaagaagcgctcaggcgat

SEQ ID NO: 105181 - DNA, 25 bp, Artificial
  probe
  misc_feature (1)..(25): SEQ ID NO: 5160; WAN024C5U_at; Start 213; Stop 237
tgggccgccactactgatttattaa

SEQ ID NO: 105182 - DNA, 25 bp, Artificial
  probe
  misc_feature (1)..(25): SEQ ID NO: 5160; WAN024C5U_at; Start 18; Stop 42
aataaccttatcgattgcctggccg

SEQ ID NO: 105183 - DNA, 25 bp, Artificial
  probe
  misc_feature (1)..(25): SEQ ID NO: 5160; WAN024C5U_at; Start 37; Stop 61
tggccgacttcttctttcgtcagaa

SEQ ID NO: 105184 - DNA, 25 bp, Artificial
  probe
  misc_feature (1)..(25): SEQ ID NO: 5160; WAN024C5U_at; Start 41; Stop 65
cgacttcttctttcgtcagaagtgg

SEQ ID NO: 105185 - DNA, 25 bp, Artificial
  probe
  misc_feature (1)..(25): SEQ ID NO: 5160; WAN024C5U_at; Start 193; Stop 217
taccatttacgactccgccctgggc

SEQ ID NO: 105186 - DNA, 25 bp, Artificial
  probe
  misc_feature (1)..(25): SEQ ID NO: 5160; WAN024C5U_at; Start 211; Stop 235
cctgggccgccactactgatttatt

SEQ ID NO: 105187 - DNA, 25 bp, Artificial
  probe
  misc_feature (1)..(25): SEQ ID NO: 5160; WAN024C5U_at; Start 72; Stop 96
taagaagcgctcaggcgattttatt

SEQ ID NO: 105188 - DNA, 25 bp, Artificial
  probe
  misc_feature (1)..(25): SEQ ID NO: 5160; WAN024C5U_at; Start 20; Stop 44
taaccttatcgattgcctggccgac

SEQ ID NO: 105189 - DNA, 25 bp, Artificial
  probe
  misc_feature (1)..(25): SEQ ID NO: 5160; WAN024C5U_at; Start 57; Stop 81
cagaagtggtacttctaagaagcgc

SEQ ID NO: 105190 - DNA, 25 bp, Artificial
  probe
  misc_feature (1)..(25): SEQ ID NO: 5160; WAN024C5U_at; Start 30; Stop 54
gattgcctggccgacttcttctttc

SEQ ID NO: 105191 - DNA, 25 bp, Artificial
  probe
  misc_feature (1)..(25): SEQ ID NO: 5160; WAN024C5U_at; Start 7; Stop 31
tctaactgccgaataaccttatcga

SEQ ID NO: 105192 - DNA, 25 bp, Artificial
  probe
  misc_feature (1)..(25): SEQ ID NO: 5160; WAN024C5U_at; Start 78; Stop 102
gcgctcaggcgattttattttttca

SEQ ID NO: 105193 - DNA, 25 bp, Artificial
  probe
  misc_feature (1)..(25): SEQ ID NO: 5160; WAN024C5U_at; Start 149; Stop 173
gaaatcttcttcctcttcctctgca

SEQ ID NO: 105194 - DNA, 25 bp, Artificial
  probe
  misc_feature (1)..(25): SEQ ID NO: 5160; WAN024C5U_at; Start 162; Stop 186
tcttcctctgcatccgttgaaaaca

SEQ ID NO: 105195 - DNA, 25 bp, Artificial
  probe
  misc_feature (1)..(25): SEQ ID NO: 789; WAN024C5V_at; Start 360; Stop 384
cggagtcgtaaatggtaaagaattg

SEQ ID NO: 105196 - DNA, 25 bp, Artificial
  probe
  misc_feature (1)..(25): SEQ ID NO: 789; WAN024C5V_at; Start 350; Stop 374
cggcccagggcggagtcgtaaatgg

SEQ ID NO: 105197 - DNA, 25 bp, Artificial
  probe
  misc_feature (1)..(25): SEQ ID NO: 789; WAN024C5V_at; Start 333; Stop 357
taataaatcagtagtggcggcccag

SEQ ID NO: 105198 - DNA, 25 bp, Artificial
  probe
  misc_feature (1)..(25): SEQ ID NO: 789; WAN024C5V_at; Start 289; Stop 313
gaagcagtctttgctagaatggctc

SEQ ID NO: 105199 - DNA, 25 bp, Artificial
  probe
  misc_feature (1)..(25): SEQ ID NO: 789; WAN024C5V_at; Start 47; Stop 71
atagttctttacaattgattgcagg

SEQ ID NO: 105200 - DNA, 25 bp, Artificial
  probe
  misc_feature (1)..(25): SEQ ID NO: 789; WAN024C5V_at; Start 11; Stop 35
tacttgtagggcatggacattttgc

SEQ ID NO: 105201 - DNA, 25 bp, Artificial
  probe
  misc_feature (1)..(25): SEQ ID NO: 789; WAN024C5V_at; Start 336; Stop 360
taaatcagtagtggcggcccagggc

SEQ ID NO: 105202 - DNA, 25 bp, Artificial
  probe
  misc_feature (1)..(25): SEQ ID NO: 789; WAN024C5V_at; Start 387; Stop 411
ttcaacggatgcagaggaagaggaa

SEQ ID NO: 105203 - DNA, 25 bp, Artificial
  probe
  misc_feature (1)..(25): SEQ ID NO: 789; WAN024C5V_at; Start 163; Stop 187
gaagaagttttaatcctaagtgatc

SEQ ID NO: 105204 - DNA, 25 bp, Artificial
  probe
  misc_feature (1)..(25): SEQ ID NO: 789; WAN024C5V_at; Start 293; Stop 317
cagtctttgctagaatggctcatag

SEQ ID NO: 105205 - DNA, 25 bp, Artificial
  probe
  misc_feature (1)..(25): SEQ ID NO: 789; WAN024C5V_at; Start 36; Stop 60
tacagggatttatagttctttacaa

SEQ ID NO: 105206 - DNA, 25 bp, Artificial
  probe
  misc_feature (1)..(25): SEQ ID NO: 789; WAN024C5V_at; Start 262; Stop 286
tcgggtttgaacttagccatgttaa

SEQ ID NO: 105207 - DNA, 25 bp, Artificial
  probe
  misc_feature (1)..(25): SEQ ID NO: 789; WAN024C5V_at; Start 207; Stop 231
caaggtttcttctaccataatggga

SEQ ID NO: 105208 - DNA, 25 bp, Artificial
  probe
  misc_feature (1)..(25): SEQ ID NO: 789; WAN024C5V_at; Start 406; Stop 430
gaggaagaagatttcgaatcgggta

SEQ ID NO: 105209 - DNA, 25 bp, Artificial
  probe
  misc_feature (1)..(25): SEQ ID NO: 789; WAN024C5V_at; Start 4; Stop 28
aaaattgtacttgtagggcatggac

SEQ ID NO: 105210 - DNA, 25 bp, Artificial
  probe
  misc_feature (1)..(25): SEQ ID NO: 789; WAN024C5V_at; Start 173; Stop 197
taatcctaagtgatctcttgggagg

SEQ ID NO: 105211 - DNA, 25 bp, Artificial
  probe
  misc_feature (1)..(25): SEQ ID NO: 789; WAN024C5V_at; Start 25; Stop 49
ggacattttgctacagggatttata

SEQ ID NO: 105212 - DNA, 25 bp, Artificial
  probe
  misc_feature (1)..(25): SEQ ID NO: 789; WAN024C5V_at; Start 201; Stop 225
gccattcaaggtttcttctaccata

SEQ ID NO: 105213 - DNA, 25 bp, Artificial
  probe
  misc_feature (1)..(25): SEQ ID NO: 789; WAN024C5V_at; Start 104; Stop 128
tggaaggaatgtcagcagatgaact

SEQ ID NO: 105214 - DNA, 25 bp, Artificial
  probe
  misc_feature (1)..(25): SEQ ID NO: 789; WAN024C5V_at; Start 132; Stop 156
gcaaaaaatcttacttgcaatttca

SEQ ID NO: 105215 - DNA, 25 bp, Artificial
  probe
  misc_feature (1)..(25): SEQ ID NO: 789; WAN024C5V_at; Start 375; Stop 399
taaagaattgttttcaacggatgca

SEQ ID NO: 105216 - DNA, 25 bp, Artificial
  probe
  misc_feature (1)..(25): SEQ ID NO: 789; WAN024C5V_at; Start 221; Stop 245
ccataatgggagaaaatccagccaa

SEQ ID NO: 105217 - DNA, 25 bp, Artificial
  probe
  misc_feature (1)..(25): SEQ ID NO: 789; WAN024C5V_at; Start 121; Stop 145
gatgaactcaagcaaaaaatcttac

SEQ ID NO: 105218 - DNA, 25 bp, Artificial
  probe
  misc_feature (1)..(25): SEQ ID NO: 789; WAN024C5V_at; Start 97; Stop 121
gactttgtggaaggaatgtcagcag

SEQ ID NO: 105219 - DNA, 25 bp, Artificial
  probe
  misc_feature (1)..(25): SEQ ID NO: 789; WAN024C5V_at; Start 110; Stop 134
gaatgtcagcagatgaactcaagca

SEQ ID NO: 105220 - DNA, 25 bp, Artificial
  probe
  misc_feature (1)..(25): SEQ ID NO: 789; WAN024C5V_at; Start 143; Stop 167
tacttgcaatttcaaatgaagaaga

SEQ ID NO: 105221 - DNA, 25 bp, Artificial
  probe
  misc_feature (1)..(25): SEQ ID NO: 789; WAN024C5V_at; Start 219; Stop 243
taccataatgggagaaaatccagcc

SEQ ID NO: 105222 - DNA, 25 bp, Artificial
  probe
  misc_feature (1)..(25): SEQ ID NO: 789; WAN024C5V_at; Start 396; Stop 420
tgcagaggaagaggaagaagatttc

SEQ ID NO: 105223 - DNA, 25 bp, Artificial
  probe
  misc_feature (1)..(25): SEQ ID NO: 789; WAN024C5V_at; Start 278; Stop 302
ccatgttaatggaagcagtctttgc

SEQ ID NO: 105224 - DNA, 25 bp, Artificial
  probe
  misc_feature (1)..(25): SEQ ID NO: 789; WAN024C5V_at; Start 330; Stop 354
tgttaataaatcagtagtggcggcc

SEQ ID NO: 105225 - DNA, 25 bp, Artificial
  probe
  misc_feature (1)..(25): SEQ ID NO: 789; WAN024C5V_at; Start 379; Stop 403
gaattgttttcaacggatgcagagg

SEQ ID NO: 105226 - DNA, 25 bp, Artificial
  probe
  misc_feature (1)..(25): SEQ ID NO: 789; WAN024C5V_at; Start 302; Stop 326
ctagaatggctcatagctttgatga

SEQ ID NO: 105227 - DNA, 25 bp, Artificial
  probe
  misc_feature (1)..(25): SEQ ID NO: 789; WAN024C5V_at; Start 19; Stop 43
gggcatggacattttgctacaggga

SEQ ID NO: 105228 - DNA, 25 bp, Artificial
  probe
  misc_feature (1)..(25): SEQ ID NO: 789; WAN024C5V_at; Start 154; Stop 178
tcaaatgaagaagaagttttaatcc

SEQ ID NO: 105229 - DNA, 25 bp, Artificial
  probe
  misc_feature (1)..(25): SEQ ID NO: 1666; WAN024C5W_at; Start 1058; Stop 1082
gtgggacaagtctcctccacggtgt

SEQ ID NO: 105230 - DNA, 25 bp, Artificial
  probe
  misc_feature (1)..(25): SEQ ID NO: 1666; WAN024C5W_at; Start 904; Stop 928
gattcttcagcaacagctatcgccg

SEQ ID NO: 105231 - DNA, 25 bp, Artificial
  probe
  misc_feature (1)..(25): SEQ ID NO: 1666; WAN024C5W_at; Start 334; Stop 358
catgatctcggcttcttgtacacac

SEQ ID NO: 105232 - DNA, 25 bp, Artificial
  probe
  misc_feature (1)..(25): SEQ ID NO: 1666; WAN024C5W_at; Start 201; Stop 225
gaccaatggtttctggacaggagaa

SEQ ID NO: 105233 - DNA, 25 bp, Artificial
  probe
  misc_feature (1)..(25): SEQ ID NO: 1666; WAN024C5W_at; Start 776; Stop 800
gtcacttaaaagacgagtcctgctt

SEQ ID NO: 105234 - DNA, 25 bp, Artificial
  probe
  misc_feature (1)..(25): SEQ ID NO: 1666; WAN024C5W_at; Start 34; Stop 58
tcgcctgagcgcttcttagaagtac

SEQ ID NO: 105235 - DNA, 25 bp, Artificial
  probe
  misc_feature (1)..(25): SEQ ID NO: 1666; WAN024C5W_at; Start 352; Stop 376
tacacaccgtcttgtatggctgaat

SEQ ID NO: 105236 - DNA, 25 bp, Artificial
  probe
  misc_feature (1)..(25): SEQ ID NO: 1666; WAN024C5W_at; Start 607; Stop 631
gcttcagctaataatgtaatccgtg

SEQ ID NO: 105237 - DNA, 25 bp, Artificial
  probe
  misc_feature (1)..(25): SEQ ID NO: 1666; WAN024C5W_at; Start 1084; Stop 1108
tactcatggcattcaggtaaaggag

SEQ ID NO: 105238 - DNA, 25 bp, Artificial
  probe
  misc_feature (1)..(25): SEQ ID NO: 1666; WAN024C5W_at; Start 1155; Stop 1179
tatccgtttctacaaagactggaac

SEQ ID NO: 105239 - DNA, 25 bp, Artificial
  probe
  misc_feature (1)..(25): SEQ ID NO: 1666; WAN024C5W_at; Start 649; Stop 673
cacaccttctattttgatcctgaga

SEQ ID NO: 105240 - DNA, 25 bp, Artificial
  probe
  misc_feature (1)..(25): SEQ ID NO: 1666; WAN024C5W_at; Start 186; Stop 210
ggataacacggaatggaccaatggt

SEQ ID NO: 105241 - DNA, 25 bp, Artificial
  probe
  misc_feature (1)..(25): SEQ ID NO: 1666; WAN024C5W_at; Start 1003; Stop 1027
catgccatgcttcgttccttgatcg

SEQ ID NO: 105242 - DNA, 25 bp, Artificial
  probe
  misc_feature (1)..(25): SEQ ID NO: 1666; WAN024C5W_at; Start 297; Stop 321
cctggatcgtgtcaataagagagta

SEQ ID NO: 105243 - DNA, 25 bp, Artificial
  probe
  misc_feature (1)..(25): SEQ ID NO: 1666; WAN024C5W_at; Start 62; Stop 86
ttctgacgaaagaagaagtcggcca

SEQ ID NO: 105244 - DNA, 25 bp, Artificial
  probe
  misc_feature (1)..(25): SEQ ID NO: 1666; WAN024C5W_at; Start 799; Stop 823
tttgacttgtttaagggtgtgacca

SEQ ID NO: 105245 - DNA, 25 bp, Artificial
  probe
  misc_feature (1)..(25): SEQ ID NO: 1666; WAN024C5W_at; Start 438; Stop 462
tgaacgctatcaagaaaaaggtggt

SEQ ID NO: 105246 - DNA, 25 bp, Artificial
  probe
  misc_feature (1)..(25): SEQ ID NO: 1666; WAN024C5W_at; Start 715; Stop 739
gatgattcatgctgggcacgtggtc

SEQ ID NO: 105247 - DNA, 25 bp, Artificial
  probe
  misc_feature (1)..(25): SEQ ID NO: 1666; WAN024C5W_at; Start 222; Stop 246
agaactgtggttggcttatgaatac

SEQ ID NO: 105248 - DNA, 25 bp, Artificial
  probe
  misc_feature (1)..(25): SEQ ID NO: 1666; WAN024C5W_at; Start 1128; Stop 1152
gggtgactactattacctagaagcc

SEQ ID NO: 105249 - DNA, 25 bp, Artificial
  probe
  misc_feature (1)..(25): SEQ ID NO: 1666; WAN024C5W_at; Start 698; Stop 722
cgagacaagggtatagtgatgattc

SEQ ID NO: 105250 - DNA, 25 bp, Artificial
  probe
  misc_feature (1)..(25): SEQ ID NO: 1666; WAN024C5W_at; Start 81; Stop 105
cggccaggcaatcgataaggttatt

SEQ ID NO: 105251 - DNA, 25 bp, Artificial
  probe
  misc_feature (1)..(25): SEQ ID NO: 1666; WAN024C5W_at; Start 1043; Stop 1067
atcaatttacccctggtgggacaag

SEQ ID NO: 105252 - DNA, 25 bp, Artificial
  probe
  misc_feature (1)..(25): SEQ ID NO: 1666; WAN024C5W_at; Start 621; Stop 645
tgtaatccgtgatgacgcttcgtcc

SEQ ID NO: 105253 - DNA, 25 bp, Artificial
  probe
  misc_feature (1)..(25): SEQ ID NO: 1666; WAN024C5W_at; Start 921; Stop 945
tatcgccgtctgtgggattcatgaa

SEQ ID NO: 105254 - DNA, 25 bp, Artificial
  probe
  misc_feature (1)..(25): SEQ ID NO: 1666; WAN024C5W_at; Start 105; Stop 129
tcggcagttagaactcaaccttgac

SEQ ID NO: 105255 - DNA, 25 bp, Artificial
  probe
  misc_feature (1)..(25): SEQ ID NO: 1666; WAN024C5W_at; Start 664; Stop 688
gatcctgagacaggtcaacccttta

SEQ ID NO: 105256 - DNA, 25 bp, Artificial
  probe
  misc_feature (1)..(25): SEQ ID NO: 1666; WAN024C5W_at; Start 1101; Stop 1125
taaaggagtggatgaaggcaatatc

SEQ ID NO: 105257 - DNA, 25 bp, Artificial
  probe
  misc_feature (1)..(25): SEQ ID NO: 1666; WAN024C5W_at; Start 281; Stop 305
aaaatgttctttctttcctggatcg

SEQ ID NO: 105258 - DNA, 25 bp, Artificial
  probe
  misc_feature (1)..(25): SEQ ID NO: 1666; WAN024C5W_at; Start 988; Stop 1012
tataaacatgctatgcatgccatgc

SEQ ID NO: 105259 - DNA, 25 bp, Artificial
  probe
  misc_feature (1)..(25): SEQ ID NO: 1666; WAN024C5W_at; Start 237; Stop 261
ttatgaatacagtcaacaggatgca

SEQ ID NO: 105260 - DNA, 25 bp, Artificial
  probe
  misc_feature (1)..(25): SEQ ID NO: 1666; WAN024C5W_at; Start 943; Stop 967
gaaatgctaaaacatctcccagagg

SEQ ID NO: 105261 - DNA, 25 bp, Artificial
  probe
  misc_feature (1)..(25): SEQ ID NO: 1666; WAN024C5W_at; Start 957; Stop 981
tctcccagaggtggatgctgacaaa

SEQ ID NO: 105262 - DNA, 25 bp, Artificial
  probe
  misc_feature (1)..(25): SEQ ID NO: 1666; WAN024C5W_at; Start 889; Stop 913
agtgatcaatcacgagattcttcag

SEQ ID NO: 105263 - DNA, 25 bp, Artificial
  probe
  misc_feature (1)..(25): SEQ ID NO: 7550; WAN024C5X_at; Start 36; Stop 60
tcaattatttctgggttcattattt

SEQ ID NO: 105264 - DNA, 25 bp, Artificial
  probe
  misc_feature (1)..(25): SEQ ID NO: 7550; WAN024C5X_at; Start 11; Stop 35
gtagtggcttggtttgtttatattg

SEQ ID NO: 105265 - DNA, 25 bp, Artificial
  probe
  misc_feature (1)..(25): SEQ ID NO: 7550; WAN024C5X_at; Start 35; Stop 59
gtcaattatttctgggttcattatt

SEQ ID NO: 105266 - DNA, 25 bp, Artificial
  probe
  misc_feature (1)..(25): SEQ ID NO: 7550; WAN024C5X_at; Start 14; Stop 38
gtggcttggtttgtttatattgtca

SEQ ID NO: 105267 - DNA, 25 bp, Artificial
  probe
  misc_feature (1)..(25): SEQ ID NO: 7550; WAN024C5X_at; Start 44; Stop 68
ttctgggttcattatttatcctcct

SEQ ID NO: 105268 - DNA, 25 bp, Artificial
  probe
  misc_feature (1)..(25): SEQ ID NO: 7550; WAN024C5X_at; Start 29; Stop 53
tatattgtcaattatttctgggttc

SEQ ID NO: 105269 - DNA, 25 bp, Artificial
  probe
  misc_feature (1)..(25): SEQ ID NO: 7550; WAN024C5X_at; Start 41; Stop 65
tatttctgggttcattatttatcct

SEQ ID NO: 105270 - DNA, 25 bp, Artificial
  probe
  misc_feature (1)..(25): SEQ ID NO: 7550; WAN024C5X_at; Start 34; Stop 58
tgtcaattatttctgggttcattat

SEQ ID NO: 105271 - DNA, 25 bp, Artificial
  probe
  misc_feature (1)..(25): SEQ ID NO: 7550; WAN024C5X_at; Start 30; Stop 54
atattgtcaattatttctgggttca

SEQ ID NO: 105272 - DNA, 25 bp, Artificial
  probe
  misc_feature (1)..(25): SEQ ID NO: 7550; WAN024C5X_at; Start 12; Stop 36
tagtggcttggtttgtttatattgt

SEQ ID NO: 105273 - DNA, 25 bp, Artificial
  probe
  misc_feature (1)..(25): SEQ ID NO: 7550; WAN024C5X_at; Start 49; Stop 73
ggttcattatttatcctcctcctta

SEQ ID NO: 105274 - DNA, 25 bp, Artificial
  probe
  misc_feature (1)..(25): SEQ ID NO: 7550; WAN024C5X_at; Start 9; Stop 33
tggtagtggcttggtttgtttatat

SEQ ID NO: 105275 - DNA, 25 bp, Artificial
  probe
  misc_feature (1)..(25): SEQ ID NO: 7550; WAN024C5X_at; Start 50; Stop 74
gttcattatttatcctcctccttat

SEQ ID NO: 105276 - DNA, 25 bp, Artificial
  probe
  misc_feature (1)..(25): SEQ ID NO: 7550; WAN024C5X_at; Start 8; Stop 32
ttggtagtggcttggtttgtttata

SEQ ID NO: 105277 - DNA, 25 bp, Artificial
  probe
  misc_feature (1)..(25): SEQ ID NO: 7550; WAN024C5X_at; Start 16; Stop 40
ggcttggtttgtttatattgtcaat

SEQ ID NO: 105278 - DNA, 25 bp, Artificial
  probe
  misc_feature (1)..(25): SEQ ID NO: 7550; WAN024C5X_at; Start 7; Stop 31
cttggtagtggcttggtttgtttat

SEQ ID NO: 105279 - DNA, 25 bp, Artificial
  probe
  misc_feature (1)..(25): SEQ ID NO: 7550; WAN024C5X_at; Start 15; Stop 39
tggcttggtttgtttatattgtcaa

SEQ ID NO: 105280 - DNA, 25 bp, Artificial
  probe
  misc_feature (1)..(25): SEQ ID NO: 7550; WAN024C5X_at; Start 42; Stop 66
atttctgggttcattatttatcctc

SEQ ID NO: 105281 - DNA, 25 bp, Artificial
  probe
  misc_feature (1)..(25): SEQ ID NO: 7550; WAN024C5X_at; Start 40; Stop 64
ttatttctgggttcattatttatcc

SEQ ID NO: 105282 - DNA, 25 bp, Artificial
  probe
  misc_feature (1)..(25): SEQ ID NO: 7550; WAN024C5X_at; Start 53; Stop 77
cattatttatcctcctccttatttt

SEQ ID NO: 105283 - DNA, 25 bp, Artificial
  probe
  misc_feature (1)..(25): SEQ ID NO: 7550; WAN024C5X_at; Start 43; Stop 67
tttctgggttcattatttatcctcc

SEQ ID NO: 105284 - DNA, 25 bp, Artificial
  probe
  misc_feature (1)..(25): SEQ ID NO: 7550; WAN024C5X_at; Start 33; Stop 57
ttgtcaattatttctgggttcatta

SEQ ID NO: 105285 - DNA, 25 bp, Artificial
  probe
  misc_feature (1)..(25): SEQ ID NO: 7550; WAN024C5X_at; Start 3; Stop 27
gcaccttggtagtggcttggtttgt

SEQ ID NO: 105286 - DNA, 25 bp, Artificial
  probe
  misc_feature (1)..(25): SEQ ID NO: 7550; WAN024C5X_at; Start 52; Stop 76
tcattatttatcctcctccttattt

SEQ ID NO: 105287 - DNA, 25 bp, Artificial
  probe
  misc_feature (1)..(25): SEQ ID NO: 7550; WAN024C5X_at; Start 46; Stop 70
ctgggttcattatttatcctcctcc

SEQ ID NO: 105288 - DNA, 25 bp, Artificial
  probe
  misc_feature (1)..(25): SEQ ID NO: 7550; WAN024C5X_at; Start 17; Stop 41
gcttggtttgtttatattgtcaatt

SEQ ID NO: 105289 - DNA, 25 bp, Artificial
  probe
  misc_feature (1)..(25): SEQ ID NO: 7550; WAN024C5X_at; Start 13; Stop 37
agtggcttggtttgtttatattgtc

SEQ ID NO: 105290 - DNA, 25 bp, Artificial
  probe
  misc_feature (1)..(25): SEQ ID NO: 7550; WAN024C5X_at; Start 47; Stop 71
tgggttcattatttatcctcctcct

SEQ ID NO: 105291 - DNA, 25 bp, Artificial
  probe
  misc_feature (1)..(25): SEQ ID NO: 7550; WAN024C5X_at; Start 45; Stop 69
tctgggttcattatttatcctcctc

SEQ ID NO: 105292 - DNA, 25 bp, Artificial
  probe
  misc_feature (1)..(25): SEQ ID NO: 7550; WAN024C5X_at; Start 31; Stop 55
tattgtcaattatttctgggttcat

SEQ ID NO: 105293 - DNA, 25 bp, Artificial
  probe
  misc_feature (1)..(25): SEQ ID NO: 7550; WAN024C5X_at; Start 1; Stop 25
ttgcaccttggtagtggcttggttt

SEQ ID NO: 105294 - DNA, 25 bp, Artificial
  probe
  misc_feature (1)..(25): SEQ ID NO: 7550; WAN024C5X_at; Start 32; Stop 56
attgtcaattatttctgggttcatt

SEQ ID NO: 105295 - DNA, 25 bp, Artificial
  probe
  misc_feature (1)..(25): SEQ ID NO: 7550; WAN024C5X_at; Start 4; Stop 28
caccttggtagtggcttggtttgtt

SEQ ID NO: 105296 - DNA, 25 bp, Artificial
  probe
  misc_feature (1)..(25): SEQ ID NO: 7550; WAN024C5X_at; Start 2; Stop 26
tgcaccttggtagtggcttggtttg

SEQ ID NO: 105297 - DNA, 25 bp, Artificial
  probe
  misc_feature (1)..(25): SEQ ID NO: 1031; WAN024C5Y_at; Start 112; Stop 136
tctgctttcttttggggcaacgcaa

SEQ ID NO: 105298 - DNA, 25 bp, Artificial
  probe
  misc_feature (1)..(25): SEQ ID NO: 1031; WAN024C5Y_at; Start 61; Stop 85
cttgaggctatcgatgttgtgcata

SEQ ID NO: 105299 - DNA, 25 bp, Artificial
  probe
  misc_feature (1)..(25): SEQ ID NO: 1031; WAN024C5Y_at; Start 67; Stop 91
gctatcgatgttgtgcataacttcg

SEQ ID NO: 105300 - DNA, 25 bp, Artificial
  probe
  misc_feature (1)..(25): SEQ ID NO: 1031; WAN024C5Y_at; Start 132; Stop 156
cgcaatcaagtatatgttacggttt

SEQ ID NO: 105301 - DNA, 25 bp, Artificial
  probe
  misc_feature (1)..(25): SEQ ID NO: 1031; WAN024C5Y_at; Start 57; Stop 81
cggtcttgaggctatcgatgttgtg

SEQ ID NO: 105302 - DNA, 25 bp, Artificial
  probe
  misc_feature (1)..(25): SEQ ID NO: 1031; WAN024C5Y_at; Start 28; Stop 52
aataaaccaagccactaccagggtg

SEQ ID NO: 105303 - DNA, 25 bp, Artificial
  probe
  misc_feature (1)..(25): SEQ ID NO: 1031; WAN024C5Y_at; Start 134; Stop 158
caatcaagtatatgttacggtttca

SEQ ID NO: 105304 - DNA, 25 bp, Artificial
  probe
  misc_feature (1)..(25): SEQ ID NO: 1031; WAN024C5Y_at; Start 59; Stop 83
gtcttgaggctatcgatgttgtgca

SEQ ID NO: 105305 - DNA, 25 bp, Artificial
  probe
  misc_feature (1)..(25): SEQ ID NO: 1031; WAN024C5Y_at; Start 3; Stop 27
gaacccagaaataattgacaatata

SEQ ID NO: 105306 - DNA, 25 bp, Artificial
  probe
  misc_feature (1)..(25): SEQ ID NO: 1031; WAN024C5Y_at; Start 107; Stop 131
gagcgtctgctttcttttggggcaa

SEQ ID NO: 105307 - DNA, 25 bp, Artificial
  probe
  misc_feature (1)..(25): SEQ ID NO: 1031; WAN024C5Y_at; Start 33; Stop 57
accaagccactaccagggtgcaaac

SEQ ID NO: 105308 - DNA, 25 bp, Artificial
  probe
  misc_feature (1)..(25): SEQ ID NO: 1031; WAN024C5Y_at; Start 126; Stop 150
gggcaacgcaatcaagtatatgtta

SEQ ID NO: 105309 - DNA, 25 bp, Artificial
  probe
  misc_feature (1)..(25): SEQ ID NO: 1031; WAN024C5Y_at; Start 42; Stop 66
ctaccagggtgcaaacggtcttgag

SEQ ID NO: 105310 - DNA, 25 bp, Artificial
  probe
  misc_feature (1)..(25): SEQ ID NO: 1031; WAN024C5Y_at; Start 40; Stop 64
cactaccagggtgcaaacggtcttg

SEQ ID NO: 105311 - DNA, 25 bp, Artificial
  probe
  misc_feature (1)..(25): SEQ ID NO: 1031; WAN024C5Y_at; Start 41; Stop 65
actaccagggtgcaaacggtcttga

SEQ ID NO: 105312 - DNA, 25 bp, Artificial
  probe
  misc_feature (1)..(25): SEQ ID NO: 1031; WAN024C5Y_at; Start 53; Stop 77
caaacggtcttgaggctatcgatgt

SEQ ID NO: 105313 - DNA, 25 bp, Artificial
  probe
  misc_feature (1)..(25): SEQ ID NO: 1031; WAN024C5Y_at; Start 36; Stop 60
aagccactaccagggtgcaaacggt

SEQ ID NO: 105314 - DNA, 25 bp, Artificial
  probe
  misc_feature (1)..(25): SEQ ID NO: 1031; WAN024C5Y_at; Start 30; Stop 54
taaaccaagccactaccagggtgca

SEQ ID NO: 105315 - DNA, 25 bp, Artificial
  probe
  misc_feature (1)..(25): SEQ ID NO: 1031; WAN024C5Y_at; Start 48; Stop 72
gggtgcaaacggtcttgaggctatc

SEQ ID NO: 105316 - DNA, 25 bp, Artificial
  probe
  misc_feature (1)..(25): SEQ ID NO: 1031; WAN024C5Y_at; Start 71; Stop 95
tcgatgttgtgcataacttcgttgg

SEQ ID NO: 105317 - DNA, 25 bp, Artificial
  probe
  misc_feature (1)..(25): SEQ ID NO: 1031; WAN024C5Y_at; Start 138; Stop 162
caagtatatgttacggtttcaaaag

SEQ ID NO: 105318 - DNA, 25 bp, Artificial
  probe
  misc_feature (1)..(25): SEQ ID NO: 1031; WAN024C5Y_at; Start 19; Stop 43
gacaatataaataaaccaagccact

SEQ ID NO: 105319 - DNA, 25 bp, Artificial
  probe
  misc_feature (1)..(25): SEQ ID NO: 1031; WAN024C5Y_at; Start 51; Stop 75
tgcaaacggtcttgaggctatcgat

SEQ ID NO: 105320 - DNA, 25 bp, Artificial
  probe
  misc_feature (1)..(25): SEQ ID NO: 1031; WAN024C5Y_at; Start 2; Stop 26
tgaacccagaaataattgacaatat

SEQ ID NO: 105321 - DNA, 25 bp, Artificial
  probe
  misc_feature (1)..(25): SEQ ID NO: 1031; WAN024C5Y_at; Start 63; Stop 87
tgaggctatcgatgttgtgcataac

SEQ ID NO: 105322 - DNA, 25 bp, Artificial
  probe
  misc_feature (1)..(25): SEQ ID NO: 1031; WAN024C5Y_at; Start 64; Stop 88
gaggctatcgatgttgtgcataact

SEQ ID NO: 105323 - DNA, 25 bp, Artificial
  probe
  misc_feature (1)..(25): SEQ ID NO: 1031; WAN024C5Y_at; Start 44; Stop 68
accagggtgcaaacggtcttgaggc

SEQ ID NO: 105324 - DNA, 25 bp, Artificial
  probe
  misc_feature (1)..(25): SEQ ID NO: 1031; WAN024C5Y_at; Start 129; Stop 153
caacgcaatcaagtatatgttacgg

SEQ ID NO: 105325 - DNA, 25 bp, Artificial
  probe
  misc_feature (1)..(25): SEQ ID NO: 1031; WAN024C5Y_at; Start 31; Stop 55
aaaccaagccactaccagggtgcaa

SEQ ID NO: 105326 - DNA, 25 bp, Artificial
  probe
  misc_feature (1)..(25): SEQ ID NO: 1031; WAN024C5Y_at; Start 73; Stop 97
gatgttgtgcataacttcgttggga

SEQ ID NO: 105327 - DNA, 25 bp, Artificial
  probe
  misc_feature (1)..(25): SEQ ID NO: 1031; WAN024C5Y_at; Start 24; Stop 48
tataaataaaccaagccactaccag

SEQ ID NO: 105328 - DNA, 25 bp, Artificial
  probe
  misc_feature (1)..(25): SEQ ID NO: 1031; WAN024C5Y_at; Start 38; Stop 62
gccactaccagggtgcaaacggtct

SEQ ID NO: 105329 - DNA, 25 bp, Artificial
  probe
  misc_feature (1)..(25): SEQ ID NO: 1031; WAN024C5Y_at; Start 50; Stop 74
gtgcaaacggtcttgaggctatcga

SEQ ID NO: 105330 - DNA, 25 bp, Artificial
  probe
  misc_feature (1)..(25): SEQ ID NO: 1031; WAN024C5Y_at; Start 43; Stop 67
taccagggtgcaaacggtcttgagg

SEQ ID NO: 105331 - DNA, 25 bp, Artificial
  probe
  misc_feature (1)..(25): SEQ ID NO: 4012; WAN024C5Z_at; Start 237; Stop 261
ggtcgctattgtcaatttaagtaaa

SEQ ID NO: 105332 - DNA, 25 bp, Artificial
  probe
  misc_feature (1)..(25): SEQ ID NO: 4012; WAN024C5Z_at; Start 125; Stop 149
taaaaaacggagcaagtatattcgc

SEQ ID NO: 105333 - DNA, 25 bp, Artificial
  probe
  misc_feature (1)..(25): SEQ ID NO: 4012; WAN024C5Z_at; Start 160; Stop 184
ctggccgaaaaagcgataaagaaag

SEQ ID NO: 105334 - DNA, 25 bp, Artificial
  probe
  misc_feature (1)..(25): SEQ ID NO: 4012; WAN024C5Z_at; Start 120; Stop 144
tgccttaaaaaacggagcaagtata

SEQ ID NO: 105335 - DNA, 25 bp, Artificial
  probe
  misc_feature (1)..(25): SEQ ID NO: 4012; WAN024C5Z_at; Start 98; Stop 122
taaataaacacggtcaagcgcttgc

SEQ ID NO: 105336 - DNA, 25 bp, Artificial
  probe
  misc_feature (1)..(25): SEQ ID NO: 4012; WAN024C5Z_at; Start 74; Stop 98
cgtttgatgtgggttatcgaatagt

SEQ ID NO: 105337 - DNA, 25 bp, Artificial
  probe
  misc_feature (1)..(25): SEQ ID NO: 4012; WAN024C5Z_at; Start 2; Stop 26
tgatgacacaaacacttgaagaagg

SEQ ID NO: 105338 - DNA, 25 bp, Artificial
  probe
  misc_feature (1)..(25): SEQ ID NO: 4012; WAN024C5Z_at; Start 100; Stop 124
aataaacacggtcaagcgcttgcct

SEQ ID NO: 105339 - DNA, 25 bp, Artificial
  probe
  misc_feature (1)..(25): SEQ ID NO: 4012; WAN024C5Z_at; Start 205; Stop 229
gactttgacattgaaaaacattttg

SEQ ID NO: 105340 - DNA, 25 bp, Artificial
  probe
  misc_feature (1)..(25): SEQ ID NO: 4012; WAN024C5Z_at; Start 112; Stop 136
caagcgcttgccttaaaaaacggag

SEQ ID NO: 105341 - DNA, 25 bp, Artificial
  probe
  misc_feature (1)..(25): SEQ ID NO: 4012; WAN024C5Z_at; Start 6; Stop 30
gacacaaacacttgaagaaggaatg

SEQ ID NO: 105342 - DNA, 25 bp, Artificial
  probe
  misc_feature (1)..(25): SEQ ID NO: 4012; WAN024C5Z_at; Start 232; Stop 256
gaagaggtcgctattgtcaatttaa

SEQ ID NO: 105343 - DNA, 25 bp, Artificial
  probe
  misc_feature (1)..(25): SEQ ID NO: 4012; WAN024C5Z_at; Start 95; Stop 119
tagtaaataaacacggtcaagcgct

SEQ ID NO: 105344 - DNA, 25 bp, Artificial
  probe
  misc_feature (1)..(25): SEQ ID NO: 4012; WAN024C5Z_at; Start 143; Stop 167
tattcgctttaccttcgctggccga

SEQ ID NO: 105345 - DNA, 25 bp, Artificial
  probe
  misc_feature (1)..(25): SEQ ID NO: 4012; WAN024C5Z_at; Start 36; Stop 60
tcaaagtaaatgcataaaaatccca

SEQ ID NO: 105346 - DNA, 25 bp, Artificial
  probe
  misc_feature (1)..(25): SEQ ID NO: 4012; WAN024C5Z_at; Start 154; Stop 178
ccttcgctggccgaaaaagcgataa

SEQ ID NO: 105347 - DNA, 25 bp, Artificial
  probe
  misc_feature (1)..(25): SEQ ID NO: 4012; WAN024C5Z_at; Start 180; Stop 204
gaaagagtttggaaaaaatgatcca

SEQ ID NO: 105348 - DNA, 25 bp, Artificial
  probe
  misc_feature (1)..(25): SEQ ID NO: 4012; WAN024C5Z_at; Start 56; Stop 80
tcccaatggaaatcagaccgtttga

SEQ ID NO: 105349 - DNA, 25 bp, Artificial
  probe
  misc_feature (1)..(25): SEQ ID NO: 4012; WAN024C5Z_at; Start 223; Stop 247
cattttgttgaagaggtcgctattg

SEQ ID NO: 105350 - DNA, 25 bp, Artificial
  probe
  misc_feature (1)..(25): SEQ ID NO: 4012; WAN024C5Z_at; Start 220; Stop 244
aaacattttgttgaagaggtcgcta

SEQ ID NO: 105351 - DNA, 25 bp, Artificial
  probe
  misc_feature (1)..(25): SEQ ID NO: 4012; WAN024C5Z_at; Start 141; Stop 165
tatattcgctttaccttcgctggcc

SEQ ID NO: 105352 - DNA, 25 bp, Artificial
  probe
  misc_feature (1)..(25): SEQ ID NO: 4012; WAN024C5Z_at; Start 157; Stop 181
tcgctggccgaaaaagcgataaaga

SEQ ID NO: 105353 - DNA, 25 bp, Artificial
  probe
  misc_feature (1)..(25): SEQ ID NO: 4012; WAN024C5Z_at; Start 88; Stop 112
tatcgaatagtaaataaacacggtc

SEQ ID NO: 105354 - DNA, 25 bp, Artificial
  probe
  misc_feature (1)..(25): SEQ ID NO: 4012; WAN024C5Z_at; Start 69; Stop 93
cagaccgtttgatgtgggttatcga

SEQ ID NO: 105355 - DNA, 25 bp, Artificial
  probe
  misc_feature (1)..(25): SEQ ID NO: 4012; WAN024C5Z_at; Start 41; Stop 65
gtaaatgcataaaaatcccaatgga

SEQ ID NO: 105356 - DNA, 25 bp, Artificial
  probe
  misc_feature (1)..(25): SEQ ID NO: 4012; WAN024C5Z_at; Start 199; Stop 223
gatccagactttgacattgaaaaac

SEQ ID NO: 105357 - DNA, 25 bp, Artificial
  probe
  misc_feature (1)..(25): SEQ ID NO: 4012; WAN024C5Z_at; Start 25; Stop 49
ggaatgaagaatcaaagtaaatgca

SEQ ID NO: 105358 - DNA, 25 bp, Artificial
  probe
  misc_feature (1)..(25): SEQ ID NO: 4012; WAN024C5Z_at; Start 9; Stop 33
acaaacacttgaagaaggaatgaag

SEQ ID NO: 105359 - DNA, 25 bp, Artificial
  probe
  misc_feature (1)..(25): SEQ ID NO: 4012; WAN024C5Z_at; Start 106; Stop 130
cacggtcaagcgcttgccttaaaaa

SEQ ID NO: 105360 - DNA, 25 bp, Artificial
  probe
  misc_feature (1)..(25): SEQ ID NO: 4012; WAN024C5Z_at; Start 146; Stop 170
tcgctttaccttcgctggccgaaaa

SEQ ID NO: 105361 - DNA, 25 bp, Artificial
  probe
  misc_feature (1)..(25): SEQ ID NO: 4012; WAN024C5Z_at; Start 190; Stop 214
ggaaaaaatgatccagactttgaca

SEQ ID NO: 105362 - DNA, 25 bp, Artificial
  probe
  misc_feature (1)..(25): SEQ ID NO: 4012; WAN024C5Z_at; Start 51; Stop 75
aaaaatcccaatggaaatcagaccg

SEQ ID NO: 105363 - DNA, 25 bp, Artificial
  probe
  misc_feature (1)..(25): SEQ ID NO: 4012; WAN024C5Z_at; Start 115; Stop 139
gcgcttgccttaaaaaacggagcaa

SEQ ID NO: 105364 - DNA, 25 bp, Artificial
  probe
  misc_feature (1)..(25): SEQ ID NO: 4012; WAN024C5Z_at; Start 132; Stop 156
cggagcaagtatattcgctttacct

SEQ ID NO: 105365 - DNA, 25 bp, Artificial
  probe
  misc_feature (1)..(25): SEQ ID NO: 4159; WAN024C62_at; Start 182; Stop 206
ggtccaattccgttacattggatat

SEQ ID NO: 105366 - DNA, 25 bp, Artificial
  probe
  misc_feature (1)..(25): SEQ ID NO: 4159; WAN024C62_at; Start 23; Stop 47
gcatcactagcgagaaagacagcag

SEQ ID NO: 105367 - DNA, 25 bp, Artificial
  probe
  misc_feature (1)..(25): SEQ ID NO: 4159; WAN024C62_at; Start 59; Stop 83
tcttcaggatttccccaacgtgcag

SEQ ID NO: 105368 - DNA, 25 bp, Artificial
  probe
  misc_feature (1)..(25): SEQ ID NO: 4159; WAN024C62_at; Start 74; Stop 98
caacgtgcagcaggtgtttttgcaa

SEQ ID NO: 105369 - DNA, 25 bp, Artificial
  probe
  misc_feature (1)..(25): SEQ ID NO: 4159; WAN024C62_at; Start 299; Stop 323
tcgctcatcatcgaacaaatattga

SEQ ID NO: 105370 - DNA, 25 bp, Artificial
  probe
  misc_feature (1)..(25): SEQ ID NO: 4159; WAN024C62_at; Start 94; Stop 118
tgcaatgatgaactggtcaaatggg

SEQ ID NO: 105371 - DNA, 25 bp, Artificial
  probe
  misc_feature (1)..(25): SEQ ID NO: 4159; WAN024C62_at; Start 310; Stop 334
cgaacaaatattgataatctttcca

SEQ ID NO: 105372 - DNA, 25 bp, Artificial
  probe
  misc_feature (1)..(25): SEQ ID NO: 4159; WAN024C62_at; Start 45; Stop 69
cagggcccatcaaatcttcaggatt

SEQ ID NO: 105373 - DNA, 25 bp, Artificial
  probe
  misc_feature (1)..(25): SEQ ID NO: 4159; WAN024C62_at; Start 144; Stop 168
cacgaagaggtgctgtttgaggagt

SEQ ID NO: 105374 - DNA, 25 bp, Artificial
  probe
  misc_feature (1)..(25): SEQ ID NO: 4159; WAN024C62_at; Start 156; Stop 180
ctgtttgaggagtggcaatataacc

SEQ ID NO: 105375 - DNA, 25 bp, Artificial
  probe
  misc_feature (1)..(25): SEQ ID NO: 4159; WAN024C62_at; Start 42; Stop 66
cagcagggcccatcaaatcttcagg

SEQ ID NO: 105376 - DNA, 25 bp, Artificial
  probe
  misc_feature (1)..(25): SEQ ID NO: 4159; WAN024C62_at; Start 111; Stop 135
caaatgggtggcgagaaccatcttc

SEQ ID NO: 105377 - DNA, 25 bp, Artificial
  probe
  misc_feature (1)..(25): SEQ ID NO: 4159; WAN024C62_at; Start 232; Stop 256
gttgcgggtcaacattttcaagccc

SEQ ID NO: 105378 - DNA, 25 bp, Artificial
  probe
  misc_feature (1)..(25): SEQ ID NO: 4159; WAN024C62_at; Start 1; Stop 25
gtggccattgacaaaattgctggca

SEQ ID NO: 105379 - DNA, 25 bp, Artificial
  probe
  misc_feature (1)..(25): SEQ ID NO: 4159; WAN024C62_at; Start 104; Stop 128
aactggtcaaatgggtggcgagaac

SEQ ID NO: 105380 - DNA, 25 bp, Artificial
  probe
  misc_feature (1)..(25): SEQ ID NO: 4159; WAN024C62_at; Start 30; Stop 54
tagcgagaaagacagcagggcccat

SEQ ID NO: 105381 - DNA, 25 bp, Artificial
  probe
  misc_feature (1)..(25): SEQ ID NO: 4159; WAN024C62_at; Start 279; Stop 303
taactgtttcacgtcccagttcgct

SEQ ID NO: 105382 - DNA, 25 bp, Artificial
  probe
  misc_feature (1)..(25): SEQ ID NO: 4159; WAN024C62_at; Start 117; Stop 141
ggtggcgagaaccatcttcttgcaa

SEQ ID NO: 105383 - DNA, 25 bp, Artificial
  probe
  misc_feature (1)..(25): SEQ ID NO: 4159; WAN024C62_at; Start 213; Stop 237
caccgtattcagacgcaatgttgcg

SEQ ID NO: 105384 - DNA, 25 bp, Artificial
  probe
  misc_feature (1)..(25): SEQ ID NO: 4159; WAN024C62_at; Start 263; Stop 287
gcagcagcataagcgctaactgttt

SEQ ID NO: 105385 - DNA, 25 bp, Artificial
  probe
  misc_feature (1)..(25): SEQ ID NO: 4159; WAN024C62_at; Start 12; Stop 36
caaaattgctggcatcactagcgag

SEQ ID NO: 105386 - DNA, 25 bp, Artificial
  probe
  misc_feature (1)..(25): SEQ ID NO: 4159; WAN024C62_at; Start 221; Stop 245
tcagacgcaatgttgcgggtcaaca

SEQ ID NO: 105387 - DNA, 25 bp, Artificial
  probe
  misc_feature (1)..(25): SEQ ID NO: 4159; WAN024C62_at; Start 18; Stop 42
tgctggcatcactagcgagaaagac

SEQ ID NO: 105388 - DNA, 25 bp, Artificial
  probe
  misc_feature (1)..(25): SEQ ID NO: 4159; WAN024C62_at; Start 66; Stop 90
gatttccccaacgtgcagcaggtgt

SEQ ID NO: 105389 - DNA, 25 bp, Artificial
  probe
  misc_feature (1)..(25): SEQ ID NO: 4159; WAN024C62_at; Start 255; Stop 279
cccctttagcagcagcataagcgct

SEQ ID NO: 105390 - DNA, 25 bp, Artificial
  probe
  misc_feature (1)..(25): SEQ ID NO: 4159; WAN024C62_at; Start 284; Stop 308
gtttcacgtcccagttcgctcatca

SEQ ID NO: 105391 - DNA, 25 bp, Artificial
  probe
  misc_feature (1)..(25): SEQ ID NO: 4159; WAN024C62_at; Start 208; Stop 232
ggctccaccgtattcagacgcaatg

SEQ ID NO: 105392 - DNA, 25 bp, Artificial
  probe
  misc_feature (1)..(25): SEQ ID NO: 4159; WAN024C62_at; Start 193; Stop 217
gttacattggatattggctccaccg

SEQ ID NO: 105393 - DNA, 25 bp, Artificial
  probe
  misc_feature (1)..(25): SEQ ID NO: 4159; WAN024C62_at; Start 26; Stop 50
tcactagcgagaaagacagcagggc

SEQ ID NO: 105394 - DNA, 25 bp, Artificial
  probe
  misc_feature (1)..(25): SEQ ID NO: 4159; WAN024C62_at; Start 272; Stop 296
taagcgctaactgtttcacgtccca

SEQ ID NO: 105395 - DNA, 25 bp, Artificial
  probe
  misc_feature (1)..(25): SEQ ID NO: 4159; WAN024C62_at; Start 35; Stop 59
agaaagacagcagggcccatcaaat

SEQ ID NO: 105396 - DNA, 25 bp, Artificial
  probe
  misc_feature (1)..(25): SEQ ID NO: 4159; WAN024C62_at; Start 81; Stop 105
cagcaggtgtttttgcaatgatgaa

SEQ ID NO: 105397 - DNA, 25 bp, Artificial
  probe
  misc_feature (1)..(25): SEQ ID NO: 4159; WAN024C62_at; Start 70; Stop 94
tccccaacgtgcagcaggtgttttt

SEQ ID NO: 105398 - DNA, 25 bp, Artificial
  probe
  misc_feature (1)..(25): SEQ ID NO: 4159; WAN024C62_at; Start 201; Stop 225
ggatattggctccaccgtattcaga

SEQ ID NO: 105399 - DNA, 25 bp, Artificial
  probe
  misc_feature (1)..(25): SEQ ID NO: 5182; WAN024C63_at; Start 309; Stop 333
gttaaagacaatagtagcgccggct

SEQ ID NO: 105400 - DNA, 25 bp, Artificial
  probe
  misc_feature (1)..(25): SEQ ID NO: 5182; WAN024C63_at; Start 378; Stop 402
gccggtgatgagagcaatttttcct

SEQ ID NO: 105401 - DNA, 25 bp, Artificial
  probe
  misc_feature (1)..(25): SEQ ID NO: 5182; WAN024C63_at; Start 280; Stop 304
cctttattgaccagatcttgattga

SEQ ID NO: 105402 - DNA, 25 bp, Artificial
  probe
  misc_feature (1)..(25): SEQ ID NO: 5182; WAN024C63_at; Start 135; Stop 159
gataataccagcgttattaacgagg

SEQ ID NO: 105403 - DNA, 25 bp, Artificial
  probe
  misc_feature (1)..(25): SEQ ID NO: 5182; WAN024C63_at; Start 184; Stop 208
tcgatttgcttgaccatggcttgga

SEQ ID NO: 105404 - DNA, 25 bp, Artificial
  probe
  misc_feature (1)..(25): SEQ ID NO: 5182; WAN024C63_at; Start 110; Stop 134
tcatttcgcacattggaactcggcg

SEQ ID NO: 105405 - DNA, 25 bp, Artificial
  probe
  misc_feature (1)..(25): SEQ ID NO: 5182; WAN024C63_at; Start 174; Stop 198
aacctcttgttcgatttgcttgacc

SEQ ID NO: 105406 - DNA, 25 bp, Artificial
  probe
  misc_feature (1)..(25): SEQ ID NO: 5182; WAN024C63_at; Start 86; Stop 110
tgaccttacggaaatcagcggcgct

SEQ ID NO: 105407 - DNA, 25 bp, Artificial
  probe
  misc_feature (1)..(25): SEQ ID NO: 5182; WAN024C63_at; Start 195; Stop 219
gaccatggcttggataccgtcctcg

SEQ ID NO: 105408 - DNA, 25 bp, Artificial
  probe
  misc_feature (1)..(25): SEQ ID NO: 5182; WAN024C63_at; Start 159; Stop 183
gatgtcaatgacaccaacctcttgt

SEQ ID NO: 105409 - DNA, 25 bp, Artificial
  probe
  misc_feature (1)..(25): SEQ ID NO: 5182; WAN024C63_at; Start 353; Stop 377
tagcaaatccaattccataagaagc

SEQ ID NO: 105410 - DNA, 25 bp, Artificial
  probe
  misc_feature (1)..(25): SEQ ID NO: 5182; WAN024C63_at; Start 328; Stop 352
ccggcttcagcgtaggatttggcaa

SEQ ID NO: 105411 - DNA, 25 bp, Artificial
  probe
  misc_feature (1)..(25): SEQ ID NO: 5182; WAN024C63_at; Start 370; Stop 394
taagaagcgccggtgatgagagcaa

SEQ ID NO: 105412 - DNA, 25 bp, Artificial
  probe
  misc_feature (1)..(25): SEQ ID NO: 5182; WAN024C63_at; Start 305; Stop 329
tatcgttaaagacaatagtagcgcc

SEQ ID NO: 105413 - DNA, 25 bp, Artificial
  probe
  misc_feature (1)..(25): SEQ ID NO: 5182; WAN024C63_at; Start 149; Stop 173
tattaacgaggatgtcaatgacacc

SEQ ID NO: 105414 - DNA, 25 bp, Artificial
  probe
  misc_feature (1)..(25): SEQ ID NO: 5182; WAN024C63_at; Start 116; Stop 140
cgcacattggaactcggcggataat

SEQ ID NO: 105415 - DNA, 25 bp, Artificial
  probe
  misc_feature (1)..(25): SEQ ID NO: 5182; WAN024C63_at; Start 205; Stop 229
tggataccgtcctcgtctgtcacgt

SEQ ID NO: 105416 - DNA, 25 bp, Artificial
  probe
  misc_feature (1)..(25): SEQ ID NO: 5182; WAN024C63_at; Start 41; Stop 65
taactgcctttgaaacgataaatgg

SEQ ID NO: 105417 - DNA, 25 bp, Artificial
  probe
  misc_feature (1)..(25): SEQ ID NO: 5182; WAN024C63_at; Start 335; Stop 359
cagcgtaggatttggcaatagcaaa

SEQ ID NO: 105418 - DNA, 25 bp, Artificial
  probe
  misc_feature (1)..(25): SEQ ID NO: 5182; WAN024C63_at; Start 288; Stop 312
gaccagatcttgattgatatcgtta

SEQ ID NO: 105419 - DNA, 25 bp, Artificial
  probe
  misc_feature (1)..(25): SEQ ID NO: 5182; WAN024C63_at; Start 90; Stop 114
cttacggaaatcagcggcgctcatt

SEQ ID NO: 105420 - DNA, 25 bp, Artificial
  probe
  misc_feature (1)..(25): SEQ ID NO: 5182; WAN024C63_at; Start 66; Stop 90
tgcgtttaagtcaatatcgatgacc

SEQ ID NO: 105421 - DNA, 25 bp, Artificial
  probe
  misc_feature (1)..(25): SEQ ID NO: 5182; WAN024C63_at; Start 257; Stop 281
caacttcacgataagcttcaatccc

SEQ ID NO: 105422 - DNA, 25 bp, Artificial
  probe
  misc_feature (1)..(25): SEQ ID NO: 5182; WAN024C63_at; Start 223; Stop 247
gtcacgtcacagacatatccatggg

SEQ ID NO: 105423 - DNA, 25 bp, Artificial
  probe
  misc_feature (1)..(25): SEQ ID NO: 5182; WAN024C63_at; Start 313; Stop 337
aagacaatagtagcgccggcttcag

SEQ ID NO: 105424 - DNA, 25 bp, Artificial
  probe
  misc_feature (1)..(25): SEQ ID NO: 5182; WAN024C63_at; Start 269; Stop 293
aagcttcaatccctttattgaccag

SEQ ID NO: 105425 - DNA, 25 bp, Artificial
  probe
  misc_feature (1)..(25): SEQ ID NO: 5182; WAN024C63_at; Start 80; Stop 104
tatcgatgaccttacggaaatcagc

SEQ ID NO: 105426 - DNA, 25 bp, Artificial
  probe
  misc_feature (1)..(25): SEQ ID NO: 5182; WAN024C63_at; Start 226; Stop 250
acgtcacagacatatccatgggctt

SEQ ID NO: 105427 - DNA, 25 bp, Artificial
  probe
  misc_feature (1)..(25): SEQ ID NO: 5182; WAN024C63_at; Start 360; Stop 384
tccaattccataagaagcgccggtg

SEQ ID NO: 105428 - DNA, 25 bp, Artificial
  probe
  misc_feature (1)..(25): SEQ ID NO: 5182; WAN024C63_at; Start 124; Stop 148
ggaactcggcggataataccagcgt

SEQ ID NO: 105429 - DNA, 25 bp, Artificial
  probe
  misc_feature (1)..(25): SEQ ID NO: 5182; WAN024C63_at; Start 252; Stop 276
gatgccaacttcacgataagcttca

SEQ ID NO: 105430 - DNA, 25 bp, Artificial
  probe
  misc_feature (1)..(25): SEQ ID NO: 5182; WAN024C63_at; Start 54; Stop 78
aacgataaatggtgcgtttaagtca

SEQ ID NO: 105431 - DNA, 25 bp, Artificial
  probe
  misc_feature (1)..(25): SEQ ID NO: 5182; WAN024C63_at; Start 103; Stop 127
gcggcgctcatttcgcacattggaa

SEQ ID NO: 105432 - DNA, 25 bp, Artificial
  probe
  misc_feature (1)..(25): SEQ ID NO: 5182; WAN024C63_at; Start 45; Stop 69
tgcctttgaaacgataaatggtgcg

SEQ ID NO: 105433 - DNA, 25 bp, Artificial
  probe
  misc_feature (1)..(25): SEQ ID NO: 1322; WAN024C64_at; Start 159; Stop 183
taaagggattgaagcttatcgtgaa

SEQ ID NO: 105434 - DNA, 25 bp, Artificial
  probe
  misc_feature (1)..(25): SEQ ID NO: 1322; WAN024C64_at; Start 332; Stop 356
tgagcgccgctgatttccgtaaggt

SEQ ID NO: 105435 - DNA, 25 bp, Artificial
  probe
  misc_feature (1)..(25): SEQ ID NO: 1322; WAN024C64_at; Start 44; Stop 68
gaaaaattgctctcatcaccggcgc

SEQ ID NO: 105436 - DNA, 25 bp, Artificial
  probe
  misc_feature (1)..(25): SEQ ID NO: 1322; WAN024C64_at; Start 699; Stop 723
tgaagatttgatgggccctgctgtc

SEQ ID NO: 105437 - DNA, 25 bp, Artificial
  probe
  misc_feature (1)..(25): SEQ ID NO: 1322; WAN024C64_at; Start 646; Stop 670
ccatttgaccagttcatcattgcaa

SEQ ID NO: 105438 - DNA, 25 bp, Artificial
  probe
  misc_feature (1)..(25): SEQ ID NO: 1322; WAN024C64_at; Start 141; Stop 165
caatcaagatctggtcaataaaggg

SEQ ID NO: 105439 - DNA, 25 bp, Artificial
  probe
  misc_feature (1)..(25): SEQ ID NO: 1322; WAN024C64_at; Start 507; Stop 531
gggcttgaaaatgttgacccgcaac

SEQ ID NO: 105440 - DNA, 25 bp, Artificial
  probe
  misc_feature (1)..(25): SEQ ID NO: 1322; WAN024C64_at; Start 550; Stop 574
ggagccaatatccaatgtaacggaa

SEQ ID NO: 105441 - DNA, 25 bp, Artificial
  probe
  misc_feature (1)..(25): SEQ ID NO: 1322; WAN024C64_at; Start 455; Stop 479
tgatgagcgaactgggacgtgaaac

SEQ ID NO: 105442 - DNA, 25 bp, Artificial
  probe
  misc_feature (1)..(25): SEQ ID NO: 1322; WAN024C64_at; Start 729; Stop 753
cgctagtgatgccagcaattttgtc

SEQ ID NO: 105443 - DNA, 25 bp, Artificial
  probe
  misc_feature (1)..(25): SEQ ID NO: 1322; WAN024C64_at; Start 623; Stop 647
tgcaagaagatggttctcgccaccc

SEQ ID NO: 105444 - DNA, 25 bp, Artificial
  probe
  misc_feature (1)..(25): SEQ ID NO: 1322; WAN024C64_at; Start 483; Stop 507
tagcgcttatgctgctgctaaaggg

SEQ ID NO: 105445 - DNA, 25 bp, Artificial
  probe
  misc_feature (1)..(25): SEQ ID NO: 1322; WAN024C64_at; Start 109; Stop 133
gaagccggcgctactattgtcttta

SEQ ID NO: 105446 - DNA, 25 bp, Artificial
  probe
  misc_feature (1)..(25): SEQ ID NO: 1322; WAN024C64_at; Start 229; Stop 253
gacggtatccaagccatggtcaagc

SEQ ID NO: 105447 - DNA, 25 bp, Artificial
  probe
  misc_feature (1)..(25): SEQ ID NO: 1322; WAN024C64_at; Start 262; Stop 286
caagaggttggtgtcattgacatcc

SEQ ID NO: 105448 - DNA, 25 bp, Artificial
  probe
  misc_feature (1)..(25): SEQ ID NO: 1322; WAN024C64_at; Start 758; Stop 782
gccacatcctatatgtagatggcgg

SEQ ID NO: 105449 - DNA, 25 bp, Artificial
  probe
  misc_feature (1)..(25): SEQ ID NO: 1322; WAN024C64_at; Start 440; Stop 464
tcaatatttgttcgatgatgagcga

SEQ ID NO: 105450 - DNA, 25 bp, Artificial
  probe
  misc_feature (1)..(25): SEQ ID NO: 1322; WAN024C64_at; Start 292; Stop 316
aataacgctggtattatccgccgag

SEQ ID NO: 105451 - DNA, 25 bp, Artificial
  probe
  misc_feature (1)..(25): SEQ ID NO: 1322; WAN024C64_at; Start 357; Stop 381
catcgatattgacttaaacgcacca

SEQ ID NO: 105452 - DNA, 25 bp, Artificial
  probe
  misc_feature (1)..(25): SEQ ID NO: 1322; WAN024C64_at; Start 376; Stop 400
gcaccatttatcgtttcaaaggcag

SEQ ID NO: 105453 - DNA, 25 bp, Artificial
  probe
  misc_feature (1)..(25): SEQ ID NO: 1322; WAN024C64_at; Start 713; Stop 737
gccctgctgtctttctcgctagtga

SEQ ID NO: 105454 - DNA, 25 bp, Artificial
  probe
  misc_feature (1)..(25): SEQ ID NO: 1322; WAN024C64_at; Start 92; Stop 116
ttgccaaatcctacgctgaagccgg

SEQ ID NO: 105455 - DNA, 25 bp, Artificial
  probe
  misc_feature (1)..(25): SEQ ID NO: 1322; WAN024C64_at; Start 318; Stop 342
tccaatgtgcgaaatgagcgccgct

SEQ ID NO: 105456 - DNA, 25 bp, Artificial
  probe
  misc_feature (1)..(25): SEQ ID NO: 1322; WAN024C64_at; Start 60; Stop 84
caccggcgcttcttatggaattgga

SEQ ID NO: 105457 - DNA, 25 bp, Artificial
  probe
  misc_feature (1)..(25): SEQ ID NO: 1322; WAN024C64_at; Start 531; Stop 555
cattgcgtctgaatacggtggagcc

SEQ ID NO: 105458 - DNA, 25 bp, Artificial
  probe
  misc_feature (1)..(25): SEQ ID NO: 1322; WAN024C64_at; Start 278; Stop 302
ttgacatcctcgttaataacgctgg

SEQ ID NO: 105459 - DNA, 25 bp, Artificial
  probe
  misc_feature (1)..(25): SEQ ID NO: 1322; WAN024C64_at; Start 197; Stop 221
cccatggatatgtctgtgacgtgac

SEQ ID NO: 105460 - DNA, 25 bp, Artificial
  probe
  misc_feature (1)..(25): SEQ ID NO: 1322; WAN024C64_at; Start 583; Stop 607
ggttatattgccactcctcaaacag

SEQ ID NO: 105461 - DNA, 25 bp, Artificial
  probe
  misc_feature (1)..(25): SEQ ID NO: 1322; WAN024C64_at; Start 773; Stop 797
tagatggcggtatcttagcctacat

SEQ ID NO: 105462 - DNA, 25 bp, Artificial
  probe
  misc_feature (1)..(25): SEQ ID NO: 1322; WAN024C64_at; Start 303; Stop 327
tattatccgccgagttccaatgtgc

SEQ ID NO: 105463 - DNA, 25 bp, Artificial
  probe
  misc_feature (1)..(25): SEQ ID NO: 1322; WAN024C64_at; Start 743; Stop 767
gcaattttgtcaatggccacatcct

SEQ ID NO: 105464 - DNA, 25 bp, Artificial
  probe
  misc_feature (1)..(25): SEQ ID NO: 1322; WAN024C64_at; Start 214; Stop 238
gacgtgacagacgaggacggtatcc

SEQ ID NO: 105465 - DNA, 25 bp, Artificial
  probe
  misc_feature (1)..(25): SEQ ID NO: 1322; WAN024C64_at; Start 470; Stop 494
gacgtgaaacagttagcgcttatgc

SEQ ID NO: 105466 - DNA, 25 bp, Artificial
  probe
  misc_feature (1)..(25): SEQ ID NO: 1322; WAN024C64_at; Start 667; Stop 691
gcaaaaacacctgctgcacgttggg

SEQ ID NO: 105467 - DNA, 25 bp, Artificial
  probe
  misc_feature (1)..(25): SEQ ID NO: 7558; WAN024C65_at; Start 90; Stop 114
gaattctgtacttgtggctgagctg

SEQ ID NO: 105468 - DNA, 25 bp, Artificial
  probe
  misc_feature (1)..(25): SEQ ID NO: 7558; WAN024C65_at; Start 84; Stop 108
tcttttgaattctgtacttgtggct

SEQ ID NO: 105469 - DNA, 25 bp, Artificial
  probe
  misc_feature (1)..(25): SEQ ID NO: 7558; WAN024C65_at; Start 46; Stop 70
gatccgaatggttcttttcctcttc

SEQ ID NO: 105470 - DNA, 25 bp, Artificial
  probe
  misc_feature (1)..(25): SEQ ID NO: 7558; WAN024C65_at; Start 16; Stop 40
gaccttctcctgtctgagggagatt

SEQ ID NO: 105471 - DNA, 25 bp, Artificial
  probe
  misc_feature (1)..(25): SEQ ID NO: 7558; WAN024C65_at; Start 49; Stop 73
ccgaatggttcttttcctcttcaga

SEQ ID NO: 105472 - DNA, 25 bp, Artificial
  probe
  misc_feature (1)..(25): SEQ ID NO: 7558; WAN024C65_at; Start 105; Stop 129
ggctgagctgcttgctctagctttt

SEQ ID NO: 105473 - DNA, 25 bp, Artificial
  probe
  misc_feature (1)..(25): SEQ ID NO: 7558; WAN024C65_at; Start 5; Stop 29
caagattgactgaccttctcctgtc

SEQ ID NO: 105474 - DNA, 25 bp, Artificial
  probe
  misc_feature (1)..(25): SEQ ID NO: 7558; WAN024C65_at; Start 51; Stop 75
gaatggttcttttcctcttcagatt

SEQ ID NO: 105475 - DNA, 25 bp, Artificial
  probe
  misc_feature (1)..(25): SEQ ID NO: 7558; WAN024C65_at; Start 40; Stop 64
tcttttgatccgaatggttcttttc

SEQ ID NO: 105476 - DNA, 25 bp, Artificial
  probe
  misc_feature (1)..(25): SEQ ID NO: 7558; WAN024C65_at; Start 3; Stop 27
gccaagattgactgaccttctcctg

SEQ ID NO: 105477 - DNA, 25 bp, Artificial
  probe
  misc_feature (1)..(25): SEQ ID NO: 7558; WAN024C65_at; Start 28; Stop 52
tctgagggagattcttttgatccga

SEQ ID NO: 105478 - DNA, 25 bp, Artificial
  probe
  misc_feature (1)..(25): SEQ ID NO: 7558; WAN024C65_at; Start 12; Stop 36
gactgaccttctcctgtctgaggga

SEQ ID NO: 105479 - DNA, 25 bp, Artificial
  probe
  misc_feature (1)..(25): SEQ ID NO: 7558; WAN024C65_at; Start 14; Stop 38
ctgaccttctcctgtctgagggaga

SEQ ID NO: 105480 - DNA, 25 bp, Artificial
  probe
  misc_feature (1)..(25): SEQ ID NO: 7558; WAN024C65_at; Start 37; Stop 61
gattcttttgatccgaatggttctt

SEQ ID NO: 105481 - DNA, 25 bp, Artificial
  probe
  misc_feature (1)..(25): SEQ ID NO: 7558; WAN024C65_at; Start 91; Stop 115
aattctgtacttgtggctgagctgc

SEQ ID NO: 105482 - DNA, 25 bp, Artificial
  probe
  misc_feature (1)..(25): SEQ ID NO: 7558; WAN024C65_at; Start 8; Stop 32
gattgactgaccttctcctgtctga

SEQ ID NO: 105483 - DNA, 25 bp, Artificial
  probe
  misc_feature (1)..(25): SEQ ID NO: 7558; WAN024C65_at; Start 95; Stop 119
ctgtacttgtggctgagctgcttgc

SEQ ID NO: 105484 - DNA, 25 bp, Artificial
  probe
  misc_feature (1)..(25): SEQ ID NO: 7558; WAN024C65_at; Start 96; Stop 120
tgtacttgtggctgagctgcttgct

SEQ ID NO: 105485 - DNA, 25 bp, Artificial
  probe
  misc_feature (1)..(25): SEQ ID NO: 7558; WAN024C65_at; Start 33; Stop 57
gggagattcttttgatccgaatggt

SEQ ID NO: 105486 - DNA, 25 bp, Artificial
  probe
  misc_feature (1)..(25): SEQ ID NO: 7558; WAN024C65_at; Start 29; Stop 53
ctgagggagattcttttgatccgaa

SEQ ID NO: 105487 - DNA, 25 bp, Artificial
  probe
  misc_feature (1)..(25): SEQ ID NO: 7558; WAN024C65_at; Start 99; Stop 123
acttgtggctgagctgcttgctcta

SEQ ID NO: 105488 - DNA, 25 bp, Artificial
  probe
  misc_feature (1)..(25): SEQ ID NO: 7558; WAN024C65_at; Start 11; Stop 35
tgactgaccttctcctgtctgaggg

SEQ ID NO: 105489 - DNA, 25 bp, Artificial
  probe
  misc_feature (1)..(25): SEQ ID NO: 7558; WAN024C65_at; Start 26; Stop 50
tgtctgagggagattcttttgatcc

SEQ ID NO: 105490 - DNA, 25 bp, Artificial
  probe
  misc_feature (1)..(25): SEQ ID NO: 7558; WAN024C65_at; Start 35; Stop 59
gagattcttttgatccgaatggttc

SEQ ID NO: 105491 - DNA, 25 bp, Artificial
  probe
  misc_feature (1)..(25): SEQ ID NO: 7558; WAN024C65_at; Start 43; Stop 67
tttgatccgaatggttcttttcctc

SEQ ID NO: 105492 - DNA, 25 bp, Artificial
  probe
  misc_feature (1)..(25): SEQ ID NO: 7558; WAN024C65_at; Start 88; Stop 112
ttgaattctgtacttgtggctgagc

SEQ ID NO: 105493 - DNA, 25 bp, Artificial
  probe
  misc_feature (1)..(25): SEQ ID NO: 7558; WAN024C65_at; Start 1; Stop 25
ttgccaagattgactgaccttctcc

SEQ ID NO: 105494 - DNA, 25 bp, Artificial
  probe
  misc_feature (1)..(25): SEQ ID NO: 7558; WAN024C65_at; Start 102; Stop 126
tgtggctgagctgcttgctctagct

SEQ ID NO: 105495 - DNA, 25 bp, Artificial
  probe
  misc_feature (1)..(25): SEQ ID NO: 7558; WAN024C65_at; Start 97; Stop 121
gtacttgtggctgagctgcttgctc

SEQ ID NO: 105496 - DNA, 25 bp, Artificial
  probe
  misc_feature (1)..(25): SEQ ID NO: 7558; WAN024C65_at; Start 93; Stop 117
ttctgtacttgtggctgagctgctt

SEQ ID NO: 105497 - DNA, 25 bp, Artificial
  probe
  misc_feature (1)..(25): SEQ ID NO: 7558; WAN024C65_at; Start 18; Stop 42
ccttctcctgtctgagggagattct

SEQ ID NO: 105498 - DNA, 25 bp, Artificial
  probe
  misc_feature (1)..(25): SEQ ID NO: 7558; WAN024C65_at; Start 31; Stop 55
gagggagattcttttgatccgaatg

SEQ ID NO: 105499 - DNA, 25 bp, Artificial
  probe
  misc_feature (1)..(25): SEQ ID NO: 7558; WAN024C65_at; Start 23; Stop 47
tcctgtctgagggagattcttttga

SEQ ID NO: 105500 - DNA, 25 bp, Artificial
  probe
  misc_feature (1)..(25): SEQ ID NO: 7558; WAN024C65_at; Start 10; Stop 34
ttgactgaccttctcctgtctgagg

SEQ ID NO: 105501 - DNA, 25 bp, Artificial
  probe
  misc_feature (1)..(25): SEQ ID NO: 5324; WAN024C66_at; Start 201; Stop 225
tttcttgatcatccttacgcagtaa

SEQ ID NO: 105502 - DNA, 25 bp, Artificial
  probe
  misc_feature (1)..(25): SEQ ID NO: 5324; WAN024C66_at; Start 35; Stop 59
ttttgaatgactggcaacagttgag

SEQ ID NO: 105503 - DNA, 25 bp, Artificial
  probe
  misc_feature (1)..(25): SEQ ID NO: 5324; WAN024C66_at; Start 83; Stop 107
ccataagcacccgtataggcaacat

SEQ ID NO: 105504 - DNA, 25 bp, Artificial
  probe
  misc_feature (1)..(25): SEQ ID NO: 5324; WAN024C66_at; Start 113; Stop 137
tggtcgatataggatccatcttgat

SEQ ID NO: 105505 - DNA, 25 bp, Artificial
  probe
  misc_feature (1)..(25): SEQ ID NO: 5324; WAN024C66_at; Start 130; Stop 154
atcttgataaaaaccttcaccttgg

SEQ ID NO: 105506 - DNA, 25 bp, Artificial
  probe
  misc_feature (1)..(25): SEQ ID NO: 5324; WAN024C66_at; Start 57; Stop 81
gagacaggccatcaatcaaaacatt

SEQ ID NO: 105507 - DNA, 25 bp, Artificial
  probe
  misc_feature (1)..(25): SEQ ID NO: 5324; WAN024C66_at; Start 78; Stop 102
cattcccataagcacccgtataggc

SEQ ID NO: 105508 - DNA, 25 bp, Artificial
  probe
  misc_feature (1)..(25): SEQ ID NO: 5324; WAN024C66_at; Start 30; Stop 54
tggtcttttgaatgactggcaacag

SEQ ID NO: 105509 - DNA, 25 bp, Artificial
  probe
  misc_feature (1)..(25): SEQ ID NO: 5324; WAN024C66_at; Start 47; Stop 71
ggcaacagttgagacaggccatcaa

SEQ ID NO: 105510 - DNA, 25 bp, Artificial
  probe
  misc_feature (1)..(25): SEQ ID NO: 5324; WAN024C66_at; Start 120; Stop 144
tataggatccatcttgataaaaacc

SEQ ID NO: 105511 - DNA, 25 bp, Artificial
  probe
  misc_feature (1)..(25): SEQ ID NO: 5324; WAN024C66_at; Start 124; Stop 148
ggatccatcttgataaaaaccttca

SEQ ID NO: 105512 - DNA, 25 bp, Artificial
  probe
  misc_feature (1)..(25): SEQ ID NO: 5324; WAN024C66_at; Start 92; Stop 116
cccgtataggcaacattggtgtggt

SEQ ID NO: 105513 - DNA, 25 bp, Artificial
  probe
  misc_feature (1)..(25): SEQ ID NO: 5324; WAN024C66_at; Start 11; Stop 35
tctttatcgattggattcttggtct

SEQ ID NO: 105514 - DNA, 25 bp, Artificial
  probe
  misc_feature (1)..(25): SEQ ID NO: 5324; WAN024C66_at; Start 42; Stop 66
tgactggcaacagttgagacaggcc

SEQ ID NO: 105515 - DNA, 25 bp, Artificial
  probe
  misc_feature (1)..(25): SEQ ID NO: 5324; WAN024C66_at; Start 169; Stop 193
cacttgctcaatcgagcgaatggta

SEQ ID NO: 105516 - DNA, 25 bp, Artificial
  probe
  misc_feature (1)..(25): SEQ ID NO: 5324; WAN024C66_at; Start 102; Stop 126
caacattggtgtggtcgatatagga

SEQ ID NO: 105517 - DNA, 25 bp, Artificial
  probe
  misc_feature (1)..(25): SEQ ID NO: 5324; WAN024C66_at; Start 63; Stop 87
ggccatcaatcaaaacattcccata

SEQ ID NO: 105518 - DNA, 25 bp, Artificial
  probe
  misc_feature (1)..(25): SEQ ID NO: 5324; WAN024C66_at; Start 197; Stop 221
gaaatttcttgatcatccttacgca

SEQ ID NO: 105519 - DNA, 25 bp, Artificial
  probe
  misc_feature (1)..(25): SEQ ID NO: 5324; WAN024C66_at; Start 146; Stop 170
tcaccttggtctaccaacttgaaca

SEQ ID NO: 105520 - DNA, 25 bp, Artificial
  probe
  misc_feature (1)..(25): SEQ ID NO: 5324; WAN024C66_at; Start 109; Stop 133
ggtgtggtcgatataggatccatct

SEQ ID NO: 105521 - DNA, 25 bp, Artificial
  probe
  misc_feature (1)..(25): SEQ ID NO: 5324; WAN024C66_at; Start 181; Stop 205
cgagcgaatggtagaagaaatttct

SEQ ID NO: 105522 - DNA, 25 bp, Artificial
  probe
  misc_feature (1)..(25): SEQ ID NO: 5324; WAN024C66_at; Start 152; Stop 176
tggtctaccaacttgaacacttgct

SEQ ID NO: 105523 - DNA, 25 bp, Artificial
  probe
  misc_feature (1)..(25): SEQ ID NO: 5324; WAN024C66_at; Start 165; Stop 189
tgaacacttgctcaatcgagcgaat

SEQ ID NO: 105524 - DNA, 25 bp, Artificial
  probe
  misc_feature (1)..(25): SEQ ID NO: 5324; WAN024C66_at; Start 72; Stop 96
tcaaaacattcccataagcacccgt

SEQ ID NO: 105525 - DNA, 25 bp, Artificial
  probe
  misc_feature (1)..(25): SEQ ID NO: 5324; WAN024C66_at; Start 174; Stop 198
gctcaatcgagcgaatggtagaaga

SEQ ID NO: 105526 - DNA, 25 bp, Artificial
  probe
  misc_feature (1)..(25): SEQ ID NO: 5324; WAN024C66_at; Start 105; Stop 129
cattggtgtggtcgatataggatcc

SEQ ID NO: 105527 - DNA, 25 bp, Artificial
  probe
  misc_feature (1)..(25): SEQ ID NO: 5324; WAN024C66_at; Start 177; Stop 201
caatcgagcgaatggtagaagaaat

SEQ ID NO: 105528 - DNA, 25 bp, Artificial
  probe
  misc_feature (1)..(25): SEQ ID NO: 5324; WAN024C66_at; Start 86; Stop 110
taagcacccgtataggcaacattgg

SEQ ID NO: 105529 - DNA, 25 bp, Artificial
  probe
  misc_feature (1)..(25): SEQ ID NO: 5324; WAN024C66_at; Start 96; Stop 120
tataggcaacattggtgtggtcgat

SEQ ID NO: 105530 - DNA, 25 bp, Artificial
  probe
  misc_feature (1)..(25): SEQ ID NO: 5324; WAN024C66_at; Start 1; Stop 25
ttgcattttatctttatcgattgga

SEQ ID NO: 105531 - DNA, 25 bp, Artificial
  probe
  misc_feature (1)..(25): SEQ ID NO: 5324; WAN024C66_at; Start 134; Stop 158
tgataaaaaccttcaccttggtcta

SEQ ID NO: 105532 - DNA, 25 bp, Artificial
  probe
  misc_feature (1)..(25): SEQ ID NO: 5324; WAN024C66_at; Start 162; Stop 186
acttgaacacttgctcaatcgagcg

SEQ ID NO: 105533 - DNA, 25 bp, Artificial
  probe
  misc_feature (1)..(25): SEQ ID NO: 5324; WAN024C66_at; Start 50; Stop 74
aacagttgagacaggccatcaatca

SEQ ID NO: 105534 - DNA, 25 bp, Artificial
  probe
  misc_feature (1)..(25): SEQ ID NO: 5324; WAN024C66_at; Start 15; Stop 39
tatcgattggattcttggtcttttg

SEQ ID NO: 105535 - DNA, 25 bp, Artificial
  probe
  misc_feature (1)..(25): SEQ ID NO: 3039; WAN024C67_at; Start 210; Stop 234
cagtttcatcttgataataacgaga

SEQ ID NO: 105536 - DNA, 25 bp, Artificial
  probe
  misc_feature (1)..(25): SEQ ID NO: 3039; WAN024C67_at; Start 243; Stop 267
tggtcacttgcttggccatctcctc

SEQ ID NO: 105537 - DNA, 25 bp, Artificial
  probe
  misc_feature (1)..(25): SEQ ID NO: 3039; WAN024C67_at; Start 182; Stop 206
tccatggaatccctgactgttcgaa

SEQ ID NO: 105538 - DNA, 25 bp, Artificial
  probe
  misc_feature (1)..(25): SEQ ID NO: 3039; WAN024C67_at; Start 278; Stop 302
taagtggcagtcagatttgcagacg

SEQ ID NO: 105539 - DNA, 25 bp, Artificial
  probe
  misc_feature (1)..(25): SEQ ID NO: 3039; WAN024C67_at; Start 53; Stop 77
tcctcatcagagaagtattctttca

SEQ ID NO: 105540 - DNA, 25 bp, Artificial
  probe
  misc_feature (1)..(25): SEQ ID NO: 3039; WAN024C67_at; Start 165; Stop 189
catgtttatgcatccattccatgga

SEQ ID NO: 105541 - DNA, 25 bp, Artificial
  probe
  misc_feature (1)..(25): SEQ ID NO: 3039; WAN024C67_at; Start 173; Stop 197
tgcatccattccatggaatccctga

SEQ ID NO: 105542 - DNA, 25 bp, Artificial
  probe
  misc_feature (1)..(25): SEQ ID NO: 3039; WAN024C67_at; Start 14; Stop 38
ggtacaaatttttcaatcacatctg

SEQ ID NO: 105543 - DNA, 25 bp, Artificial
  probe
  misc_feature (1)..(25): SEQ ID NO: 3039; WAN024C67_at; Start 90; Stop 114
tattgttgatggcacgaggtgtacc

SEQ ID NO: 105544 - DNA, 25 bp, Artificial
  probe
  misc_feature (1)..(25): SEQ ID NO: 3039; WAN024C67_at; Start 130; Stop 154
ccagttcccaacaatgctcttttca

SEQ ID NO: 105545 - DNA, 25 bp, Artificial
  probe
  misc_feature (1)..(25): SEQ ID NO: 3039; WAN024C67_at; Start 291; Stop 315
gatttgcagacgttttataatttga

SEQ ID NO: 105546 - DNA, 25 bp, Artificial
  probe
  misc_feature (1)..(25): SEQ ID NO: 3039; WAN024C67_at; Start 199; Stop 223
tgttcgaacgacagtttcatcttga

SEQ ID NO: 105547 - DNA, 25 bp, Artificial
  probe
  misc_feature (1)..(25): SEQ ID NO: 3039; WAN024C67_at; Start 187; Stop 211
ggaatccctgactgttcgaacgaca

SEQ ID NO: 105548 - DNA, 25 bp, Artificial
  probe
  misc_feature (1)..(25): SEQ ID NO: 3039; WAN024C67_at; Start 83; Stop 107
gacaaggtattgttgatggcacgag

SEQ ID NO: 105549 - DNA, 25 bp, Artificial
  probe
  misc_feature (1)..(25): SEQ ID NO: 3039; WAN024C67_at; Start 283; Stop 307
ggcagtcagatttgcagacgtttta

SEQ ID NO: 105550 - DNA, 25 bp, Artificial
  probe
  misc_feature (1)..(25): SEQ ID NO: 3039; WAN024C67_at; Start 230; Stop 254
cgagaagaaggattggtcacttgct

SEQ ID NO: 105551 - DNA, 25 bp, Artificial
  probe
  misc_feature (1)..(25): SEQ ID NO: 3039; WAN024C67_at; Start 236; Stop 260
gaaggattggtcacttgcttggcca

SEQ ID NO: 105552 - DNA, 25 bp, Artificial
  probe
  misc_feature (1)..(25): SEQ ID NO: 3039; WAN024C67_at; Start 5; Stop 29
tcgggatctggtacaaatttttcaa

SEQ ID NO: 105553 - DNA, 25 bp, Artificial
  probe
  misc_feature (1)..(25): SEQ ID NO: 3039; WAN024C67_at; Start 273; Stop 297
tccgataagtggcagtcagatttgc

SEQ ID NO: 105554 - DNA, 25 bp, Artificial
  probe
  misc_feature (1)..(25): SEQ ID NO: 3039; WAN024C67_at; Start 105; Stop 129
gaggtgtaccgatttcataatccca

SEQ ID NO: 105555 - DNA, 25 bp, Artificial
  probe
  misc_feature (1)..(25): SEQ ID NO: 3039; WAN024C67_at; Start 141; Stop 165
caatgctcttttcactattgtagac

SEQ ID NO: 105556 - DNA, 25 bp, Artificial
  probe
  misc_feature (1)..(25): SEQ ID NO: 3039; WAN024C67_at; Start 224; Stop 248
taataacgagaagaaggattggtca

SEQ ID NO: 105557 - DNA, 25 bp, Artificial
  probe
  misc_feature (1)..(25): SEQ ID NO: 3039; WAN024C67_at; Start 72; Stop 96
ctttcatcagagacaaggtattgtt

SEQ ID NO: 105558 - DNA, 25 bp, Artificial
  probe
  misc_feature (1)..(25): SEQ ID NO: 3039; WAN024C67_at; Start 255; Stop 279
tggccatctcctccaatttccgata

SEQ ID NO: 105559 - DNA, 25 bp, Artificial
  probe
  misc_feature (1)..(25): SEQ ID NO: 3039; WAN024C67_at; Start 41; Stop 65
tattttttaatttcctcatcagaga

SEQ ID NO: 105560 - DNA, 25 bp, Artificial
  probe
  misc_feature (1)..(25): SEQ ID NO: 3039; WAN024C67_at; Start 156; Stop 180
tattgtagacatgtttatgcatcca

SEQ ID NO: 105561 - DNA, 25 bp, Artificial
  probe
  misc_feature (1)..(25): SEQ ID NO: 3039; WAN024C67_at; Start 191; Stop 215
tccctgactgttcgaacgacagttt

SEQ ID NO: 105562 - DNA, 25 bp, Artificial
  probe
  misc_feature (1)..(25): SEQ ID NO: 3039; WAN024C67_at; Start 268; Stop 292
caatttccgataagtggcagtcaga

SEQ ID NO: 105563 - DNA, 25 bp, Artificial
  probe
  misc_feature (1)..(25): SEQ ID NO: 3039; WAN024C67_at; Start 109; Stop 133
tgtaccgatttcataatcccaccag

SEQ ID NO: 105564 - DNA, 25 bp, Artificial
  probe
  misc_feature (1)..(25): SEQ ID NO: 3039; WAN024C67_at; Start 100; Stop 124
ggcacgaggtgtaccgatttcataa

SEQ ID NO: 105565 - DNA, 25 bp, Artificial
  probe
  misc_feature (1)..(25): SEQ ID NO: 3039; WAN024C67_at; Start 62; Stop 86
gagaagtattctttcatcagagaca

SEQ ID NO: 105566 - DNA, 25 bp, Artificial
  probe
  misc_feature (1)..(25): SEQ ID NO: 3039; WAN024C67_at; Start 97; Stop 121
gatggcacgaggtgtaccgatttca

SEQ ID NO: 105567 - DNA, 25 bp, Artificial
  probe
  misc_feature (1)..(25): SEQ ID NO: 3039; WAN024C67_at; Start 116; Stop 140
atttcataatcccaccagttcccaa

SEQ ID NO: 105568 - DNA, 25 bp, Artificial
  probe
  misc_feature (1)..(25): SEQ ID NO: 3039; WAN024C67_at; Start 261; Stop 285
tctcctccaatttccgataagtggc

SEQ ID NO: 105569 - DNA, 25 bp, Artificial
  probe
  misc_feature (1)..(25): SEQ ID NO: 4697; WAN024C68-3_at; Start 362; Stop 386
tgcaggagtcgcaagtgttccaaga

SEQ ID NO: 105570 - DNA, 25 bp, Artificial
  probe
  misc_feature (1)..(25): SEQ ID NO: 4697; WAN024C68-3_at; Start 459; Stop 483
ggcttgtcactcttttccagtcgta

SEQ ID NO: 105571 - DNA, 25 bp, Artificial
  probe
  misc_feature (1)..(25): SEQ ID NO: 4697; WAN024C68-3_at; Start 1106; Stop 1130
tacgattagtcaggctcataagcaa

SEQ ID NO: 105572 - DNA, 25 bp, Artificial
  probe
  misc_feature (1)..(25): SEQ ID NO: 4697; WAN024C68-3_at; Start 689; Stop 713
tggaacgagcaaactagatgatgcc

SEQ ID NO: 105573 - DNA, 25 bp, Artificial
  probe
  misc_feature (1)..(25): SEQ ID NO: 4697; WAN024C68-3_at; Start 1443; Stop 1467
gcagctcagccacaagtacagaatt

SEQ ID NO: 105574 - DNA, 25 bp, Artificial
  probe
  misc_feature (1)..(25): SEQ ID NO: 4697; WAN024C68-3_at; Start 6; Stop 30
gatggcctgtctcaactgttgccag

SEQ ID NO: 105575 - DNA, 25 bp, Artificial
  probe
  misc_feature (1)..(25): SEQ ID NO: 4697; WAN024C68-3_at; Start 180; Stop 204
cacgtggccgcagtagaagtactaa

SEQ ID NO: 105576 - DNA, 25 bp, Artificial
  probe
  misc_feature (1)..(25): SEQ ID NO: 4697; WAN024C68-3_at; Start 611; Stop 635
taagatgcctggtacaacagagacg

SEQ ID NO: 105577 - DNA, 25 bp, Artificial
  probe
  misc_feature (1)..(25): SEQ ID NO: 4697; WAN024C68-3_at; Start 1523; Stop 1547
ccctcagacaggagaaggtcagtca

SEQ ID NO: 105578 - DNA, 25 bp, Artificial
  probe
  misc_feature (1)..(25): SEQ ID NO: 4697; WAN024C68-3_at; Start 1041; Stop 1065
caaaagggagcctggaaggatatca

SEQ ID NO: 105579 - DNA, 25 bp, Artificial
  probe
  misc_feature (1)..(25): SEQ ID NO: 4697; WAN024C68-3_at; Start 96; Stop 120
aaatcgtttgctcctttgctggtga

SEQ ID NO: 105580 - DNA, 25 bp, Artificial
  probe
  misc_feature (1)..(25): SEQ ID NO: 4697; WAN024C68-3_at; Start 625; Stop 649
caacagagacggatgctaagagagc

SEQ ID NO: 105581 - DNA, 25 bp, Artificial
  probe
  misc_feature (1)..(25): SEQ ID NO: 4697; WAN024C68-3_at; Start 195; Stop 219
gaagtactaagagggattcaccgaa

SEQ ID NO: 105582 - DNA, 25 bp, Artificial
  probe
  misc_feature (1)..(25): SEQ ID NO: 4697; WAN024C68-3_at; Start 1169; Stop 1193
ggatcgtgccaccttcaatcaaatg

SEQ ID NO: 105583 - DNA, 25 bp, Artificial
  probe
  misc_feature (1)..(25): SEQ ID NO: 4697; WAN024C68-3_at; Start 487; Stop 511
tgaattacgaacacatgaacaagga

SEQ ID NO: 105584 - DNA, 25 bp, Artificial
  probe
  misc_feature (1)..(25): SEQ ID NO: 4697; WAN024C68-3_at; Start 1398; Stop 1422
caggaatcagctccagatcaggaag

SEQ ID NO: 105585 - DNA, 25 bp, Artificial
  probe
  misc_feature (1)..(25): SEQ ID NO: 4697; WAN024C68-3_at; Start 933; Stop 957
aaggattatcctgaaacccaaagtg

SEQ ID NO: 105586 - DNA, 25 bp, Artificial
  probe
  misc_feature (1)..(25): SEQ ID NO: 4697; WAN024C68-3_at; Start 641; Stop 665
taagagagcggatagcgatacaggt

SEQ ID NO: 105587 - DNA, 25 bp, Artificial
  probe
  misc_feature (1)..(25): SEQ ID NO: 4697; WAN024C68-3_at; Start 673; Stop 697
taccgtctgctttcgttggaacgag

SEQ ID NO: 105588 - DNA, 25 bp, Artificial
  probe
  misc_feature (1)..(25): SEQ ID NO: 4697; WAN024C68-3_at; Start 894; Stop 918
tatgtcaatgataaagaagcctccc

SEQ ID NO: 105589 - DNA, 25 bp, Artificial
  probe
  misc_feature (1)..(25): SEQ ID NO: 4697; WAN024C68-3_at; Start 1505; Stop 1529
ttcggatcaaaagaatctccctcag

SEQ ID NO: 105590 - DNA, 25 bp, Artificial
  probe
  misc_feature (1)..(25): SEQ ID NO: 4697; WAN024C68-3_at; Start 153; Stop 177
tcgatcagtcgtgcaaatagcgagg

SEQ ID NO: 105591 - DNA, 25 bp, Artificial
  probe
  misc_feature (1)..(25): SEQ ID NO: 4697; WAN024C68-3_at; Start 1485; Stop 1509
tctgaagaggaaaagaaccattcgg

SEQ ID NO: 105592 - DNA, 25 bp, Artificial
  probe
  misc_feature (1)..(25): SEQ ID NO: 4697; WAN024C68-3_at; Start 1546; Stop 1570
caatcttggcaagtctagggttctt

SEQ ID NO: 105593 - DNA, 25 bp, Artificial
  probe
  misc_feature (1)..(25): SEQ ID NO: 4697; WAN024C68-3_at; Start 1376; Stop 1400
tgcctactataatcctgaaacccag

SEQ ID NO: 105594 - DNA, 25 bp, Artificial
  probe
  misc_feature (1)..(25): SEQ ID NO: 4697; WAN024C68-3_at; Start 428; Stop 452
catgtacaatgcagagaaagggttt

SEQ ID NO: 105595 - DNA, 25 bp, Artificial
  probe
  misc_feature (1)..(25): SEQ ID NO: 4697; WAN024C68-3_at; Start 909; Stop 933
gaagcctcccttacagaacaagaaa

SEQ ID NO: 105596 - DNA, 25 bp, Artificial
  probe
  misc_feature (1)..(25): SEQ ID NO: 4697; WAN024C68-3_at; Start 65; Stop 89
taaaatgcaaaccatgtaccactgg

SEQ ID NO: 105597 - DNA, 25 bp, Artificial
  probe
  misc_feature (1)..(25): SEQ ID NO: 4697; WAN024C68-3_at; Start 135; Stop 159
gatatgagtcgtggacgctcgatca

SEQ ID NO: 105598 - DNA, 25 bp, Artificial
  probe
  misc_feature (1)..(25): SEQ ID NO: 4697; WAN024C68-3_at; Start 723; Stop 747
gcaaccatggatttcaccaactgga

SEQ ID NO: 105599 - DNA, 25 bp, Artificial
  probe
  misc_feature (1)..(25): SEQ ID NO: 4697; WAN024C68-3_at; Start 213; Stop 237
caccgaatagcggatatgtctgaag

SEQ ID NO: 105600 - DNA, 25 bp, Artificial
  probe
  misc_feature (1)..(25): SEQ ID NO: 4697; WAN024C68-3_at; Start 557; Stop 581
caatggcgatttgagtcactatagc

SEQ ID NO: 105601 - DNA, 25 bp, Artificial
  probe
  misc_feature (1)..(25): SEQ ID NO: 4697; WAN024C68-3_at; Start 1425; Stop 1449
tttaaaaagctagagcaagcagctc

SEQ ID NO: 105602 - DNA, 25 bp, Artificial
  probe
  misc_feature (1)..(25): SEQ ID NO: 4697; WAN024C68-3_at; Start 576; Stop 600
tatagcgatggctactggccaacag

SEQ ID NO: 105603 - DNA, 25 bp, Artificial
  probe
  misc_feature (1)..(25): SEQ ID NO: 5267; WAN024C68-5_at; Start 599; Stop 623
tattctatgaaacaggaactgggac

SEQ ID NO: 105604 - DNA, 25 bp, Artificial
  probe
  misc_feature (1)..(25): SEQ ID NO: 5267; WAN024C68-5_at; Start 762; Stop 786
taaggtagaaaatcctgacgttgct

SEQ ID NO: 105605 - DNA, 25 bp, Artificial
  probe
  misc_feature (1)..(25): SEQ ID NO: 5267; WAN024C68-5_at; Start 1093; Stop 1117
gcaaatctgactgccacttatcgga

SEQ ID NO: 105606 - DNA, 25 bp, Artificial
  probe
  misc_feature (1)..(25): SEQ ID NO: 5267; WAN024C68-5_at; Start 382; Stop 406
caccgtatggttcctattgaagcta

SEQ ID NO: 105607 - DNA, 25 bp, Artificial
  probe
  misc_feature (1)..(25): SEQ ID NO: 5267; WAN024C68-5_at; Start 518; Stop 542
cgacgtcaggaacaaaggactggca

SEQ ID NO: 105608 - DNA, 25 bp, Artificial
  probe
  misc_feature (1)..(25): SEQ ID NO: 5267; WAN024C68-5_at; Start 1579; Stop 1603
gaccacaccaatgttgcctatacgg

SEQ ID NO: 105609 - DNA, 25 bp, Artificial
  probe
  misc_feature (1)..(25): SEQ ID NO: 5267; WAN024C68-5_at; Start 535; Stop 559
gactggcagaccattgaagcagact

SEQ ID NO: 105610 - DNA, 25 bp, Artificial
  probe
  misc_feature (1)..(25): SEQ ID NO: 5267; WAN024C68-5_at; Start 1179; Stop 1203
tgtcgttcgaacagtcagggattcc

SEQ ID NO: 105611 - DNA, 25 bp, Artificial
  probe
  misc_feature (1)..(25): SEQ ID NO: 5267; WAN024C68-5_at; Start 1519; Stop 1543
gagcaagtgttcaagttggtagacc

SEQ ID NO: 105612 - DNA, 25 bp, Artificial
  probe
  misc_feature (1)..(25): SEQ ID NO: 5267; WAN024C68-5_at; Start 117; Stop 141
tggagcggaagaaacgactacgaat

SEQ ID NO: 105613 - DNA, 25 bp, Artificial
  probe
  misc_feature (1)..(25): SEQ ID NO: 5267; WAN024C68-5_at; Start 471; Stop 495
tatcattgaggaaagtggtaaggac

SEQ ID NO: 105614 - DNA, 25 bp, Artificial
  probe
  misc_feature (1)..(25): SEQ ID NO: 5267; WAN024C68-5_at; Start 1564; Stop 1588
gatggatcctatatcgaccacacca

SEQ ID NO: 105615 - DNA, 25 bp, Artificial
  probe
  misc_feature (1)..(25): SEQ ID NO: 5267; WAN024C68-5_at; Start 288; Stop 312
gaagaatagttctgcagatgcctca

SEQ ID NO: 105616 - DNA, 25 bp, Artificial
  probe
  misc_feature (1)..(25): SEQ ID NO: 5267; WAN024C68-5_at; Start 1391; Stop 1415
tccgaaagacgactgataacccatt

SEQ ID NO: 105617 - DNA, 25 bp, Artificial
  probe
  misc_feature (1)..(25): SEQ ID NO: 5267; WAN024C68-5_at; Start 915; Stop 939
ccgtttggatgactggaatggcatc

SEQ ID NO: 105618 - DNA, 25 bp, Artificial
  probe
  misc_feature (1)..(25): SEQ ID NO: 5267; WAN024C68-5_at; Start 778; Stop 802
gacgttgcttcagtcaaaaatggaa

SEQ ID NO: 105619 - DNA, 25 bp, Artificial
  probe
  misc_feature (1)..(25): SEQ ID NO: 5267; WAN024C68-5_at; Start 1236; Stop 1260
tgaaaagagcattgttgggaactgg

SEQ ID NO: 105620 - DNA, 25 bp, Artificial
  probe
  misc_feature (1)..(25): SEQ ID NO: 5267; WAN024C68-5_at; Start 1276; Stop 1300
ggtacacctcgtgccatcaacaata

SEQ ID NO: 105621 - DNA, 25 bp, Artificial
  probe
  misc_feature (1)..(25): SEQ ID NO: 5267; WAN024C68-5_at; Start 503; Stop 527
tgtggaattctgcaacgacgtcagg

SEQ ID NO: 105622 - DNA, 25 bp, Artificial
  probe
  misc_feature (1)..(25): SEQ ID NO: 5267; WAN024C68-5_at; Start 240; Stop 264
tccgtggacaggaagcaaagctcag

SEQ ID NO: 105623 - DNA, 25 bp, Artificial
  probe
  misc_feature (1)..(25): SEQ ID NO: 5267; WAN024C68-5_at; Start 147; Stop 171
tcagcaaagccagaaggaagttcag

SEQ ID NO: 105624 - DNA, 25 bp, Artificial
  probe
  misc_feature (1)..(25): SEQ ID NO: 5267; WAN024C68-5_at; Start 162; Stop 186
ggaagttcagtatcagcaaagggat

SEQ ID NO: 105625 - DNA, 25 bp, Artificial
  probe
  misc_feature (1)..(25): SEQ ID NO: 5267; WAN024C68-5_at; Start 837; Stop 861
cattgtcagtaaagatggcaaggaa

SEQ ID NO: 105626 - DNA, 25 bp, Artificial
  probe
  misc_feature (1)..(25): SEQ ID NO: 5267; WAN024C68-5_at; Start 1030; Stop 1054
agtatttcaagtcaggcggaccgca

SEQ ID NO: 105627 - DNA, 25 bp, Artificial
  probe
  misc_feature (1)..(25): SEQ ID NO: 5267; WAN024C68-5_at; Start 930; Stop 954
gaatggcatcatcgctgggaatcaa

SEQ ID NO: 105628 - DNA, 25 bp, Artificial
  probe
  misc_feature (1)..(25): SEQ ID NO: 5267; WAN024C68-5_at; Start 1492; Stop 1516
gaaatttcttctaccattcgctcga

SEQ ID NO: 105629 - DNA, 25 bp, Artificial
  probe
  misc_feature (1)..(25): SEQ ID NO: 5267; WAN024C68-5_at; Start 1128; Stop 1152
gatggccaagcaagtgaccaatcct

SEQ ID NO: 105630 - DNA, 25 bp, Artificial
  probe
  misc_feature (1)..(25): SEQ ID NO: 5267; WAN024C68-5_at; Start 1111; Stop 1135
tatcggaaattggaggagatggcca

SEQ ID NO: 105631 - DNA, 25 bp, Artificial
  probe
  misc_feature (1)..(25): SEQ ID NO: 5267; WAN024C68-5_at; Start 993; Stop 1017
ccaggaattggaaggaaaggtagct

SEQ ID NO: 105632 - DNA, 25 bp, Artificial
  probe
  misc_feature (1)..(25): SEQ ID NO: 5267; WAN024C68-5_at; Start 550; Stop 574
gaagcagactatagcccgactttag

SEQ ID NO: 105633 - DNA, 25 bp, Artificial
  probe
  misc_feature (1)..(25): SEQ ID NO: 5267; WAN024C68-5_at; Start 1595; Stop 1619
cctatacgggtgcttatgggaatgt

SEQ ID NO: 105634 - DNA, 25 bp, Artificial
  probe
  misc_feature (1)..(25): SEQ ID NO: 5267; WAN024C68-5_at; Start 978; Stop 1002
gatggccaaattaaaccaggaattg

SEQ ID NO: 105635 - DNA, 25 bp, Artificial
  probe
  misc_feature (1)..(25): SEQ ID NO: 5267; WAN024C68-5_at; Start 813; Stop 837
tcttaaggaagggacaaccaatgtc

SEQ ID NO: 105636 - DNA, 25 bp, Artificial
  probe
  misc_feature (1)..(25): SEQ ID NO: 5267; WAN024C68-5_at; Start 310; Stop 334
tcaactcgagtcattgaggctaagg

SEQ ID NO: 105637 - DNA, 25 bp, Artificial
  probe
  misc_feature (1)..(25): SEQ ID NO: 6683; WAN024C69_at; Start 38; Stop 62
ctatcttagaaaagttgacaagtga

SEQ ID NO: 105638 - DNA, 25 bp, Artificial
  probe
  misc_feature (1)..(25): SEQ ID NO: 6683; WAN024C69_at; Start 56; Stop 80
caagtgataactctttaataaactc

SEQ ID NO: 105639 - DNA, 25 bp, Artificial
  probe
  misc_feature (1)..(25): SEQ ID NO: 6683; WAN024C69_at; Start 41; Stop 65
tcttagaaaagttgacaagtgataa

SEQ ID NO: 105640 - DNA, 25 bp, Artificial
  probe
  misc_feature (1)..(25): SEQ ID NO: 6683; WAN024C69_at; Start 37; Stop 61
cctatcttagaaaagttgacaagtg

SEQ ID NO: 105641 - DNA, 25 bp, Artificial
  probe
  misc_feature (1)..(25): SEQ ID NO: 6683; WAN024C69_at; Start 2; Stop 26
tgattgctagtaagagtttgaaatt

SEQ ID NO: 105642 - DNA, 25 bp, Artificial
  probe
  misc_feature (1)..(25): SEQ ID NO: 6683; WAN024C69_at; Start 49; Stop 73
aagttgacaagtgataactctttaa

SEQ ID NO: 105643 - DNA, 25 bp, Artificial
  probe
  misc_feature (1)..(25): SEQ ID NO: 6683; WAN024C69_at; Start 45; Stop 69
agaaaagttgacaagtgataactct

SEQ ID NO: 105644 - DNA, 25 bp, Artificial
  probe
  misc_feature (1)..(25): SEQ ID NO: 6683; WAN024C69_at; Start 34; Stop 58
aatcctatcttagaaaagttgacaa

SEQ ID NO: 105645 - DNA, 25 bp, Artificial
  probe
  misc_feature (1)..(25): SEQ ID NO: 6683; WAN024C69_at; Start 59; Stop 83
gtgataactctttaataaactcttg

SEQ ID NO: 105646 - DNA, 25 bp, Artificial
  probe
  misc_feature (1)..(25): SEQ ID NO: 6683; WAN024C69_at; Start 51; Stop 75
gttgacaagtgataactctttaata

SEQ ID NO: 105647 - DNA, 25 bp, Artificial
  probe
  misc_feature (1)..(25): SEQ ID NO: 6683; WAN024C69_at; Start 39; Stop 63
tatcttagaaaagttgacaagtgat

SEQ ID NO: 105648 - DNA, 25 bp, Artificial
  probe
  misc_feature (1)..(25): SEQ ID NO: 6683; WAN024C69_at; Start 60; Stop 84
tgataactctttaataaactcttgg

SEQ ID NO: 105649 - DNA, 25 bp, Artificial
  probe
  misc_feature (1)..(25): SEQ ID NO: 6683; WAN024C69_at; Start 92; Stop 116
aaagatattttgtccactacatttt

SEQ ID NO: 105650 - DNA, 25 bp, Artificial
  probe
  misc_feature (1)..(25): SEQ ID NO: 6683; WAN024C69_at; Start 32; Stop 56
tcaatcctatcttagaaaagttgac

SEQ ID NO: 105651 - DNA, 25 bp, Artificial
  probe
  misc_feature (1)..(25): SEQ ID NO: 6683; WAN024C69_at; Start 43; Stop 67
ttagaaaagttgacaagtgataact

SEQ ID NO: 105652 - DNA, 25 bp, Artificial
  probe
  misc_feature (1)..(25): SEQ ID NO: 6683; WAN024C69_at; Start 88; Stop 112
gttaaaagatattttgtccactaca

SEQ ID NO: 105653 - DNA, 25 bp, Artificial
  probe
  misc_feature (1)..(25): SEQ ID NO: 6683; WAN024C69_at; Start 54; Stop 78
gacaagtgataactctttaataaac

SEQ ID NO: 105654 - DNA, 25 bp, Artificial
  probe
  misc_feature (1)..(25): SEQ ID NO: 6683; WAN024C69_at; Start 42; Stop 66
cttagaaaagttgacaagtgataac

SEQ ID NO: 105655 - DNA, 25 bp, Artificial
  probe
  misc_feature (1)..(25): SEQ ID NO: 6683; WAN024C69_at; Start 36; Stop 60
tcctatcttagaaaagttgacaagt

SEQ ID NO: 105656 - DNA, 25 bp, Artificial
  probe
  misc_feature (1)..(25): SEQ ID NO: 6683; WAN024C69_at; Start 90; Stop 114
taaaagatattttgtccactacatt

SEQ ID NO: 105657 - DNA, 25 bp, Artificial
  probe
  misc_feature (1)..(25): SEQ ID NO: 6683; WAN024C69_at; Start 94; Stop 118
agatattttgtccactacatttttt

SEQ ID NO: 105658 - DNA, 25 bp, Artificial
  probe
  misc_feature (1)..(25): SEQ ID NO: 6683; WAN024C69_at; Start 3; Stop 27
gattgctagtaagagtttgaaatta

SEQ ID NO: 105659 - DNA, 25 bp, Artificial
  probe
  misc_feature (1)..(25): SEQ ID NO: 6683; WAN024C69_at; Start 15; Stop 39
gagtttgaaattatttatcaatcct

SEQ ID NO: 105660 - DNA, 25 bp, Artificial
  probe
  misc_feature (1)..(25): SEQ ID NO: 6683; WAN024C69_at; Start 6; Stop 30
tgctagtaagagtttgaaattattt

SEQ ID NO: 105661 - DNA, 25 bp, Artificial
  probe
  misc_feature (1)..(25): SEQ ID NO: 6683; WAN024C69_at; Start 23; Stop 47
aattatttatcaatcctatcttaga

SEQ ID NO: 105662 - DNA, 25 bp, Artificial
  probe
  misc_feature (1)..(25): SEQ ID NO: 6683; WAN024C69_at; Start 48; Stop 72
aaagttgacaagtgataactcttta

SEQ ID NO: 105663 - DNA, 25 bp, Artificial
  probe
  misc_feature (1)..(25): SEQ ID NO: 6683; WAN024C69_at; Start 35; Stop 59
atcctatcttagaaaagttgacaag

SEQ ID NO: 105664 - DNA, 25 bp, Artificial
  probe
  misc_feature (1)..(25): SEQ ID NO: 6683; WAN024C69_at; Start 87; Stop 111
tgttaaaagatattttgtccactac

SEQ ID NO: 105665 - DNA, 25 bp, Artificial
  probe
  misc_feature (1)..(25): SEQ ID NO: 6683; WAN024C69_at; Start 44; Stop 68
tagaaaagttgacaagtgataactc

SEQ ID NO: 105666 - DNA, 25 bp, Artificial
  probe
  misc_feature (1)..(25): SEQ ID NO: 6683; WAN024C69_at; Start 9; Stop 33
tagtaagagtttgaaattatttatc

SEQ ID NO: 105667 - DNA, 25 bp, Artificial
  probe
  misc_feature (1)..(25): SEQ ID NO: 6683; WAN024C69_at; Start 46; Stop 70
gaaaagttgacaagtgataactctt

SEQ ID NO: 105668 - DNA, 25 bp, Artificial
  probe
  misc_feature (1)..(25): SEQ ID NO: 6683; WAN024C69_at; Start 53; Stop 77
tgacaagtgataactctttaataaa

SEQ ID NO: 105669 - DNA, 25 bp, Artificial
  probe
  misc_feature (1)..(25): SEQ ID NO: 6683; WAN024C69_at; Start 33; Stop 57
caatcctatcttagaaaagttgaca

SEQ ID NO: 105670 - DNA, 25 bp, Artificial
  probe
  misc_feature (1)..(25): SEQ ID NO: 6683; WAN024C69_at; Start 30; Stop 54
tatcaatcctatcttagaaaagttg

SEQ ID NO: 105671 - DNA, 25 bp, Artificial
  probe
  misc_feature (1)..(25): SEQ ID NO: 6449; WAN024C6A_at; Start 3; Stop 27
gaagcgcaactgttatgaatcttat

SEQ ID NO: 105672 - DNA, 25 bp, Artificial
  probe
  misc_feature (1)..(25): SEQ ID NO: 6449; WAN024C6A_at; Start 92; Stop 116
aaggaaaaaagcacgtgagcttgaa

SEQ ID NO: 105673 - DNA, 25 bp, Artificial
  probe
  misc_feature (1)..(25): SEQ ID NO: 6449; WAN024C6A_at; Start 84; Stop 108
taagcaggaaggaaaaaagcacgtg

SEQ ID NO: 105674 - DNA, 25 bp, Artificial
  probe
  misc_feature (1)..(25): SEQ ID NO: 6449; WAN024C6A_at; Start 20; Stop 44
aatcttatgactatgttgatccgga

SEQ ID NO: 105675 - DNA, 25 bp, Artificial
  probe
  misc_feature (1)..(25): SEQ ID NO: 6449; WAN024C6A_at; Start 5; Stop 29
agcgcaactgttatgaatcttatga

SEQ ID NO: 105676 - DNA, 25 bp, Artificial
  probe
  misc_feature (1)..(25): SEQ ID NO: 6449; WAN024C6A_at; Start 82; Stop 106
aataagcaggaaggaaaaaagcacg

SEQ ID NO: 105677 - DNA, 25 bp, Artificial
  probe
  misc_feature (1)..(25): SEQ ID NO: 6449; WAN024C6A_at; Start 75; Stop 99
tctaagaaataagcaggaaggaaaa

SEQ ID NO: 105678 - DNA, 25 bp, Artificial
  probe
  misc_feature (1)..(25): SEQ ID NO: 6449; WAN024C6A_at; Start 99; Stop 123
aaagcacgtgagcttgaatatcgta

SEQ ID NO: 105679 - DNA, 25 bp, Artificial
  probe
  misc_feature (1)..(25): SEQ ID NO: 6449; WAN024C6A_at; Start 57; Stop 81
cgatccgggttcttcagttctaaga

SEQ ID NO: 105680 - DNA, 25 bp, Artificial
  probe
  misc_feature (1)..(25): SEQ ID NO: 6449; WAN024C6A_at; Start 41; Stop 65
cggataatttatataccgatccggg

SEQ ID NO: 105681 - DNA, 25 bp, Artificial
  probe
  misc_feature (1)..(25): SEQ ID NO: 6449; WAN024C6A_at; Start 85; Stop 109
aagcaggaaggaaaaaagcacgtga

SEQ ID NO: 105682 - DNA, 25 bp, Artificial
  probe
  misc_feature (1)..(25): SEQ ID NO: 6449; WAN024C6A_at; Start 34; Stop 58
gttgatccggataatttatataccg

SEQ ID NO: 105683 - DNA, 25 bp, Artificial
  probe
  misc_feature (1)..(25): SEQ ID NO: 6449; WAN024C6A_at; Start 19; Stop 43
gaatcttatgactatgttgatccgg

SEQ ID NO: 105684 - DNA, 25 bp, Artificial
  probe
  misc_feature (1)..(25): SEQ ID NO: 6449; WAN024C6A_at; Start 56; Stop 80
ccgatccgggttcttcagttctaag

SEQ ID NO: 105685 - DNA, 25 bp, Artificial
  probe
  misc_feature (1)..(25): SEQ ID NO: 6449; WAN024C6A_at; Start 39; Stop 63
tccggataatttatataccgatccg

SEQ ID NO: 105686 - DNA, 25 bp, Artificial
  probe
  misc_feature (1)..(25): SEQ ID NO: 6449; WAN024C6A_at; Start 67; Stop 91
tcttcagttctaagaaataagcagg

SEQ ID NO: 105687 - DNA, 25 bp, Artificial
  probe
  misc_feature (1)..(25): SEQ ID NO: 6449; WAN024C6A_at; Start 88; Stop 112
caggaaggaaaaaagcacgtgagct

SEQ ID NO: 105688 - DNA, 25 bp, Artificial
  probe
  misc_feature (1)..(25): SEQ ID NO: 6449; WAN024C6A_at; Start 1; Stop 25
atgaagcgcaactgttatgaatctt

SEQ ID NO: 105689 - DNA, 25 bp, Artificial
  probe
  misc_feature (1)..(25): SEQ ID NO: 6449; WAN024C6A_at; Start 22; Stop 46
tcttatgactatgttgatccggata

SEQ ID NO: 105690 - DNA, 25 bp, Artificial
  probe
  misc_feature (1)..(25): SEQ ID NO: 6449; WAN024C6A_at; Start 87; Stop 111
gcaggaaggaaaaaagcacgtgagc

SEQ ID NO: 105691 - DNA, 25 bp, Artificial
  probe
  misc_feature (1)..(25): SEQ ID NO: 6449; WAN024C6A_at; Start 68; Stop 92
cttcagttctaagaaataagcagga

SEQ ID NO: 105692 - DNA, 25 bp, Artificial
  probe
  misc_feature (1)..(25): SEQ ID NO: 6449; WAN024C6A_at; Start 58; Stop 82
gatccgggttcttcagttctaagaa

SEQ ID NO: 105693 - DNA, 25 bp, Artificial
  probe
  misc_feature (1)..(25): SEQ ID NO: 6449; WAN024C6A_at; Start 91; Stop 115
gaaggaaaaaagcacgtgagcttga

SEQ ID NO: 105694 - DNA, 25 bp, Artificial
  probe
  misc_feature (1)..(25): SEQ ID NO: 6449; WAN024C6A_at; Start 94; Stop 118
ggaaaaaagcacgtgagcttgaata

SEQ ID NO: 105695 - DNA, 25 bp, Artificial
  probe
  misc_feature (1)..(25): SEQ ID NO: 6449; WAN024C6A_at; Start 36; Stop 60
tgatccggataatttatataccgat

SEQ ID NO: 105696 - DNA, 25 bp, Artificial
  probe
  misc_feature (1)..(25): SEQ ID NO: 6449; WAN024C6A_at; Start 6; Stop 30
gcgcaactgttatgaatcttatgac

SEQ ID NO: 105697 - DNA, 25 bp, Artificial
  probe
  misc_feature (1)..(25): SEQ ID NO: 6449; WAN024C6A_at; Start 28; Stop 52
gactatgttgatccggataatttat

SEQ ID NO: 105698 - DNA, 25 bp, Artificial
  probe
  misc_feature (1)..(25): SEQ ID NO: 6449; WAN024C6A_at; Start 8; Stop 32
gcaactgttatgaatcttatgacta

SEQ ID NO: 105699 - DNA, 25 bp, Artificial
  probe
  misc_feature (1)..(25): SEQ ID NO: 6449; WAN024C6A_at; Start 54; Stop 78
taccgatccgggttcttcagttcta

SEQ ID NO: 105700 - DNA, 25 bp, Artificial
  probe
  misc_feature (1)..(25): SEQ ID NO: 6449; WAN024C6A_at; Start 49; Stop 73
ttatataccgatccgggttcttcag

SEQ ID NO: 105701 - DNA, 25 bp, Artificial
  probe
  misc_feature (1)..(25): SEQ ID NO: 6449; WAN024C6A_at; Start 90; Stop 114
ggaaggaaaaaagcacgtgagcttg

SEQ ID NO: 105702 - DNA, 25 bp, Artificial
  probe
  misc_feature (1)..(25): SEQ ID NO: 6449; WAN024C6A_at; Start 64; Stop 88
ggttcttcagttctaagaaataagc

SEQ ID NO: 105703 - DNA, 25 bp, Artificial
  probe
  misc_feature (1)..(25): SEQ ID NO: 6449; WAN024C6A_at; Start 97; Stop 121
aaaaagcacgtgagcttgaatatcg

SEQ ID NO: 105704 - DNA, 25 bp, Artificial
  probe
  misc_feature (1)..(25): SEQ ID NO: 6449; WAN024C6A_at; Start 25; Stop 49
tatgactatgttgatccggataatt

SEQ ID NO: 105705 - DNA, 25 bp, Artificial
  probe
  misc_feature (1)..(25): SEQ ID NO: 5706; WAN024C6B_at; Start 24; Stop 48
tctaaggacatatgctacctccttt

SEQ ID NO: 105706 - DNA, 25 bp, Artificial
  probe
  misc_feature (1)..(25): SEQ ID NO: 5706; WAN024C6B_at; Start 29; Stop 53
ggacatatgctacctcctttagata

SEQ ID NO: 105707 - DNA, 25 bp, Artificial
  probe
  misc_feature (1)..(25): SEQ ID NO: 5706; WAN024C6B_at; Start 104; Stop 128
tatctaagttttcagcacgcttatc

SEQ ID NO: 105708 - DNA, 25 bp, Artificial
  probe
  misc_feature (1)..(25): SEQ ID NO: 5706; WAN024C6B_at; Start 26; Stop 50
taaggacatatgctacctcctttag

SEQ ID NO: 105709 - DNA, 25 bp, Artificial
  probe
  misc_feature (1)..(25): SEQ ID NO: 5706; WAN024C6B_at; Start 50; Stop 74
gatacattataccatgtttctctgt

SEQ ID NO: 105710 - DNA, 25 bp, Artificial
  probe
  misc_feature (1)..(25): SEQ ID NO: 5706; WAN024C6B_at; Start 62; Stop 86
catgtttctctgtagcttttaaaaa

SEQ ID NO: 105711 - DNA, 25 bp, Artificial
  probe
  misc_feature (1)..(25): SEQ ID NO: 5706; WAN024C6B_at; Start 99; Stop 123
tgtcatatctaagttttcagcacgc

SEQ ID NO: 105712 - DNA, 25 bp, Artificial
  probe
  misc_feature (1)..(25): SEQ ID NO: 5706; WAN024C6B_at; Start 111; Stop 135
gttttcagcacgcttatcctatttt

SEQ ID NO: 105713 - DNA, 25 bp, Artificial
  probe
  misc_feature (1)..(25): SEQ ID NO: 5706; WAN024C6B_at; Start 20; Stop 44
tatatctaaggacatatgctacctc

SEQ ID NO: 105714 - DNA, 25 bp, Artificial
  probe
  misc_feature (1)..(25): SEQ ID NO: 5706; WAN024C6B_at; Start 41; Stop 65
cctcctttagatacattataccatg

SEQ ID NO: 105715 - DNA, 25 bp, Artificial
  probe
  misc_feature (1)..(25): SEQ ID NO: 5706; WAN024C6B_at; Start 39; Stop 63
tacctcctttagatacattatacca

SEQ ID NO: 105716 - DNA, 25 bp, Artificial
  probe
  misc_feature (1)..(25): SEQ ID NO: 5706; WAN024C6B_at; Start 95; Stop 119
tgtttgtcatatctaagttttcagc

SEQ ID NO: 105717 - DNA, 25 bp, Artificial
  probe
  misc_feature (1)..(25): SEQ ID NO: 5706; WAN024C6B_at; Start 54; Stop 78
cattataccatgtttctctgtagct

SEQ ID NO: 105718 - DNA, 25 bp, Artificial
  probe
  misc_feature (1)..(25): SEQ ID NO: 5706; WAN024C6B_at; Start 18; Stop 42
tctatatctaaggacatatgctacc

SEQ ID NO: 105719 - DNA, 25 bp, Artificial
  probe
  misc_feature (1)..(25): SEQ ID NO: 5706; WAN024C6B_at; Start 60; Stop 84
accatgtttctctgtagcttttaaa

SEQ ID NO: 105720 - DNA, 25 bp, Artificial
  probe
  misc_feature (1)..(25): SEQ ID NO: 5706; WAN024C6B_at; Start 34; Stop 58
tatgctacctcctttagatacatta

SEQ ID NO: 105721 - DNA, 25 bp, Artificial
  probe
  misc_feature (1)..(25): SEQ ID NO: 5706; WAN024C6B_at; Start 30; Stop 54
gacatatgctacctcctttagatac

SEQ ID NO: 105722 - DNA, 25 bp, Artificial
  probe
  misc_feature (1)..(25): SEQ ID NO: 5706; WAN024C6B_at; Start 144; Stop 168
caaacccaaatataaaacgcattct

SEQ ID NO: 105723 - DNA, 25 bp, Artificial
  probe
  misc_feature (1)..(25): SEQ ID NO: 5706; WAN024C6B_at; Start 8; Stop 32
cttttctttatctatatctaaggac

SEQ ID NO: 105724 - DNA, 25 bp, Artificial
  probe
  misc_feature (1)..(25): SEQ ID NO: 5706; WAN024C6B_at; Start 108; Stop 132
taagttttcagcacgcttatcctat

SEQ ID NO: 105725 - DNA, 25 bp, Artificial
  probe
  misc_feature (1)..(25): SEQ ID NO: 5706; WAN024C6B_at; Start 178; Stop 202
tttactattgtatcgtattctacga

SEQ ID NO: 105726 - DNA, 25 bp, Artificial
  probe
  misc_feature (1)..(25): SEQ ID NO: 5706; WAN024C6B_at; Start 193; Stop 217
tattctacgataacatactttactt

SEQ ID NO: 105727 - DNA, 25 bp, Artificial
  probe
  misc_feature (1)..(25): SEQ ID NO: 5706; WAN024C6B_at; Start 115; Stop 139
tcagcacgcttatcctattttataa

SEQ ID NO: 105728 - DNA, 25 bp, Artificial
  probe
  misc_feature (1)..(25): SEQ ID NO: 5706; WAN024C6B_at; Start 37; Stop 61
gctacctcctttagatacattatac

SEQ ID NO: 105729 - DNA, 25 bp, Artificial
  probe
  misc_feature (1)..(25): SEQ ID NO: 5706; WAN024C6B_at; Start 106; Stop 130
tctaagttttcagcacgcttatcct

SEQ ID NO: 105730 - DNA, 25 bp, Artificial
  probe
  misc_feature (1)..(25): SEQ ID NO: 5706; WAN024C6B_at; Start 161; Stop 185
cgcattctttttgcttttttactat

SEQ ID NO: 105731 - DNA, 25 bp, Artificial
  probe
  misc_feature (1)..(25): SEQ ID NO: 5706; WAN024C6B_at; Start 102; Stop 126
catatctaagttttcagcacgctta

SEQ ID NO: 105732 - DNA, 25 bp, Artificial
  probe
  misc_feature (1)..(25): SEQ ID NO: 5706; WAN024C6B_at; Start 141; Stop 165
cctcaaacccaaatataaaacgcat

SEQ ID NO: 105733 - DNA, 25 bp, Artificial
  probe
  misc_feature (1)..(25): SEQ ID NO: 5706; WAN024C6B_at; Start 22; Stop 46
tatctaaggacatatgctacctcct

SEQ ID NO: 105734 - DNA, 25 bp, Artificial
  probe
  misc_feature (1)..(25): SEQ ID NO: 5706; WAN024C6B_at; Start 32; Stop 56
catatgctacctcctttagatacat

SEQ ID NO: 105735 - DNA, 25 bp, Artificial
  probe
  misc_feature (1)..(25): SEQ ID NO: 5706; WAN024C6B_at; Start 198; Stop 222
tacgataacatactttactttattg

SEQ ID NO: 105736 - DNA, 25 bp, Artificial
  probe
  misc_feature (1)..(25): SEQ ID NO: 5706; WAN024C6B_at; Start 14; Stop 38
tttatctatatctaaggacatatgc

SEQ ID NO: 105737 - DNA, 25 bp, Artificial
  probe
  misc_feature (1)..(25): SEQ ID NO: 5706; WAN024C6B_at; Start 100; Stop 124
gtcatatctaagttttcagcacgct

SEQ ID NO: 105738 - DNA, 25 bp, Artificial
  probe
  misc_feature (1)..(25): SEQ ID NO: 5706; WAN024C6B_at; Start 191; Stop 215
cgtattctacgataacatactttac

SEQ ID NO: 105739 - DNA, 25 bp, Artificial
  probe
  misc_feature (1)..(25): SEQ ID NO: 3849; WAN024C6C_at; Start 151; Stop 175
tatccggatcaacatagtcataaga

SEQ ID NO: 105740 - DNA, 25 bp, Artificial
  probe
  misc_feature (1)..(25): SEQ ID NO: 3849; WAN024C6C_at; Start 44; Stop 68
taaataatttcaaactcttactagc

SEQ ID NO: 105741 - DNA, 25 bp, Artificial
  probe
  misc_feature (1)..(25): SEQ ID NO: 3849; WAN024C6C_at; Start 200; Stop 224
gtcatccccagagcaagagcttcat

SEQ ID NO: 105742 - DNA, 25 bp, Artificial
  probe
  misc_feature (1)..(25): SEQ ID NO: 3849; WAN024C6C_at; Start 132; Stop 156
cccggatcggtatataaattatccg

SEQ ID NO: 105743 - DNA, 25 bp, Artificial
  probe
  misc_feature (1)..(25): SEQ ID NO: 3849; WAN024C6C_at; Start 26; Stop 50
taactaagataggattgataaataa

SEQ ID NO: 105744 - DNA, 25 bp, Artificial
  probe
  misc_feature (1)..(25): SEQ ID NO: 3849; WAN024C6C_at; Start 192; Stop 216
ttcattaagtcatccccagagcaag

SEQ ID NO: 105745 - DNA, 25 bp, Artificial
  probe
  misc_feature (1)..(25): SEQ ID NO: 3849; WAN024C6C_at; Start 18; Stop 42
taaactattaactaagataggattg

SEQ ID NO: 105746 - DNA, 25 bp, Artificial
  probe
  misc_feature (1)..(25): SEQ ID NO: 3849; WAN024C6C_at; Start 125; Stop 149
tgaagaacccggatcggtatataaa

SEQ ID NO: 105747 - DNA, 25 bp, Artificial
  probe
  misc_feature (1)..(25): SEQ ID NO: 3849; WAN024C6C_at; Start 102; Stop 126
ccttcctgcttatttcttagaactg

SEQ ID NO: 105748 - DNA, 25 bp, Artificial
  probe
  misc_feature (1)..(25): SEQ ID NO: 3849; WAN024C6C_at; Start 56; Stop 80
aactcttactagcaatcatacgata

SEQ ID NO: 105749 - DNA, 25 bp, Artificial
  probe
  misc_feature (1)..(25): SEQ ID NO: 3849; WAN024C6C_at; Start 134; Stop 158
cggatcggtatataaattatccgga

SEQ ID NO: 105750 - DNA, 25 bp, Artificial
  probe
  misc_feature (1)..(25): SEQ ID NO: 3849; WAN024C6C_at; Start 190; Stop 214
gcttcattaagtcatccccagagca

SEQ ID NO: 105751 - DNA, 25 bp, Artificial
  probe
  misc_feature (1)..(25): SEQ ID NO: 3849; WAN024C6C_at; Start 205; Stop 229
ccccagagcaagagcttcatctcgt

SEQ ID NO: 105752 - DNA, 25 bp, Artificial
  probe
  misc_feature (1)..(25): SEQ ID NO: 3849; WAN024C6C_at; Start 91; Stop 115
cgtgcttttttccttcctgcttatt

SEQ ID NO: 105753 - DNA, 25 bp, Artificial
  probe
  misc_feature (1)..(25): SEQ ID NO: 3849; WAN024C6C_at; Start 105; Stop 129
tcctgcttatttcttagaactgaag

SEQ ID NO: 105754 - DNA, 25 bp, Artificial
  probe
  misc_feature (1)..(25): SEQ ID NO: 3849; WAN024C6C_at; Start 197; Stop 221
taagtcatccccagagcaagagctt

SEQ ID NO: 105755 - DNA, 25 bp, Artificial
  probe
  misc_feature (1)..(25): SEQ ID NO: 3849; WAN024C6C_at; Start 183; Stop 207
cagttgcgcttcattaagtcatccc

SEQ ID NO: 105756 - DNA, 25 bp, Artificial
  probe
  misc_feature (1)..(25): SEQ ID NO: 3849; WAN024C6C_at; Start 120; Stop 144
agaactgaagaacccggatcggtat

SEQ ID NO: 105757 - DNA, 25 bp, Artificial
  probe
  misc_feature (1)..(25): SEQ ID NO: 3849; WAN024C6C_at; Start 193; Stop 217
tcattaagtcatccccagagcaaga

SEQ ID NO: 105758 - DNA, 25 bp, Artificial
  probe
  misc_feature (1)..(25): SEQ ID NO: 3849; WAN024C6C_at; Start 188; Stop 212
gcgcttcattaagtcatccccagag

SEQ ID NO: 105759 - DNA, 25 bp, Artificial
  probe
  misc_feature (1)..(25): SEQ ID NO: 3849; WAN024C6C_at; Start 146; Stop 170
taaattatccggatcaacatagtca

SEQ ID NO: 105760 - DNA, 25 bp, Artificial
  probe
  misc_feature (1)..(25): SEQ ID NO: 3849; WAN024C6C_at; Start 116; Stop 140
tcttagaactgaagaacccggatcg

SEQ ID NO: 105761 - DNA, 25 bp, Artificial
  probe
  misc_feature (1)..(25): SEQ ID NO: 3849; WAN024C6C_at; Start 196; Stop 220
ttaagtcatccccagagcaagagct

SEQ ID NO: 105762 - DNA, 25 bp, Artificial
  probe
  misc_feature (1)..(25): SEQ ID NO: 3849; WAN024C6C_at; Start 185; Stop 209
gttgcgcttcattaagtcatcccca

SEQ ID NO: 105763 - DNA, 25 bp, Artificial
  probe
  misc_feature (1)..(25): SEQ ID NO: 3849; WAN024C6C_at; Start 65; Stop 89
tagcaatcatacgatattcaagctc

SEQ ID NO: 105764 - DNA, 25 bp, Artificial
  probe
  misc_feature (1)..(25): SEQ ID NO: 3849; WAN024C6C_at; Start 119; Stop 143
tagaactgaagaacccggatcggta

SEQ ID NO: 105765 - DNA, 25 bp, Artificial
  probe
  misc_feature (1)..(25): SEQ ID NO: 3849; WAN024C6C_at; Start 207; Stop 231
ccagagcaagagcttcatctcgtaa

SEQ ID NO: 105766 - DNA, 25 bp, Artificial
  probe
  misc_feature (1)..(25): SEQ ID NO: 3849; WAN024C6C_at; Start 139; Stop 163
cggtatataaattatccggatcaac

SEQ ID NO: 105767 - DNA, 25 bp, Artificial
  probe
  misc_feature (1)..(25): SEQ ID NO: 3849; WAN024C6C_at; Start 54; Stop 78
caaactcttactagcaatcatacga

SEQ ID NO: 105768 - DNA, 25 bp, Artificial
  probe
  misc_feature (1)..(25): SEQ ID NO: 3849; WAN024C6C_at; Start 148; Stop 172
aattatccggatcaacatagtcata

SEQ ID NO: 105769 - DNA, 25 bp, Artificial
  probe
  misc_feature (1)..(25): SEQ ID NO: 3849; WAN024C6C_at; Start 117; Stop 141
cttagaactgaagaacccggatcgg

SEQ ID NO: 105770 - DNA, 25 bp, Artificial
  probe
  misc_feature (1)..(25): SEQ ID NO: 3849; WAN024C6C_at; Start 62; Stop 86
tactagcaatcatacgatattcaag

SEQ ID NO: 105771 - DNA, 25 bp, Artificial
  probe
  misc_feature (1)..(25): SEQ ID NO: 3849; WAN024C6C_at; Start 180; Stop 204
taacagttgcgcttcattaagtcat

SEQ ID NO: 105772 - DNA, 25 bp, Artificial
  probe
  misc_feature (1)..(25): SEQ ID NO: 3849; WAN024C6C_at; Start 202; Stop 226
catccccagagcaagagcttcatct

SEQ ID NO: 105773 - DNA, 25 bp, Artificial
  probe
  misc_feature (1)..(25): SEQ ID NO: 2894; WAN024C6D_at; Start 142; Stop 166
ttacgagatgaagctcttgctctgg

SEQ ID NO: 105774 - DNA, 25 bp, Artificial
  probe
  misc_feature (1)..(25): SEQ ID NO: 2894; WAN024C6D_at; Start 32; Stop 56
caatcatgggaatagcttttgaaaa

SEQ ID NO: 105775 - DNA, 25 bp, Artificial
  probe
  misc_feature (1)..(25): SEQ ID NO: 2894; WAN024C6D_at; Start 139; Stop 163
aaattacgagatgaagctcttgctc

SEQ ID NO: 105776 - DNA, 25 bp, Artificial
  probe
  misc_feature (1)..(25): SEQ ID NO: 2894; WAN024C6D_at; Start 105; Stop 129
tgaaggatggcgacctacggttagt

SEQ ID NO: 105777 - DNA, 25 bp, Artificial
  probe
  misc_feature (1)..(25): SEQ ID NO: 2894; WAN024C6D_at; Start 12; Stop 36
tatagataaagaaaagatgacaatc

SEQ ID NO: 105778 - DNA, 25 bp, Artificial
  probe
  misc_feature (1)..(25): SEQ ID NO: 2894; WAN024C6D_at; Start 112; Stop 136
tggcgacctacggttagtgatgttg

SEQ ID NO: 105779 - DNA, 25 bp, Artificial
  probe
  misc_feature (1)..(25): SEQ ID NO: 2894; WAN024C6D_at; Start 143; Stop 167
tacgagatgaagctcttgctctggg

SEQ ID NO: 105780 - DNA, 25 bp, Artificial
  probe
  misc_feature (1)..(25): SEQ ID NO: 2894; WAN024C6D_at; Start 137; Stop 161
aaaaattacgagatgaagctcttgc

SEQ ID NO: 105781 - DNA, 25 bp, Artificial
  probe
  misc_feature (1)..(25): SEQ ID NO: 2894; WAN024C6D_at; Start 104; Stop 128
ttgaaggatggcgacctacggttag

SEQ ID NO: 105782 - DNA, 25 bp, Artificial
  probe
  misc_feature (1)..(25): SEQ ID NO: 2894; WAN024C6D_at; Start 36; Stop 60
catgggaatagcttttgaaaaccga

SEQ ID NO: 105783 - DNA, 25 bp, Artificial
  probe
  misc_feature (1)..(25): SEQ ID NO: 2894; WAN024C6D_at; Start 35; Stop 59
tcatgggaatagcttttgaaaaccg

SEQ ID NO: 105784 - DNA, 25 bp, Artificial
  probe
  misc_feature (1)..(25): SEQ ID NO: 2894; WAN024C6D_at; Start 91; Stop 115
agtacaaatatgattgaaggatggc

SEQ ID NO: 105785 - DNA, 25 bp, Artificial
  probe
  misc_feature (1)..(25): SEQ ID NO: 2894; WAN024C6D_at; Start 2; Stop 26
tgtccttagatatagataaagaaaa

SEQ ID NO: 105786 - DNA, 25 bp, Artificial
  probe
  misc_feature (1)..(25): SEQ ID NO: 2894; WAN024C6D_at; Start 108; Stop 132
aggatggcgacctacggttagtgat

SEQ ID NO: 105787 - DNA, 25 bp, Artificial
  probe
  misc_feature (1)..(25): SEQ ID NO: 2894; WAN024C6D_at; Start 30; Stop 54
gacaatcatgggaatagcttttgaa

SEQ ID NO: 105788 - DNA, 25 bp, Artificial
  probe
  misc_feature (1)..(25): SEQ ID NO: 2894; WAN024C6D_at; Start 136; Stop 160
gaaaaattacgagatgaagctcttg

SEQ ID NO: 105789 - DNA, 25 bp, Artificial
  probe
  misc_feature (1)..(25): SEQ ID NO: 2894; WAN024C6D_at; Start 16; Stop 40
gataaagaaaagatgacaatcatgg

SEQ ID NO: 105790 - DNA, 25 bp, Artificial
  probe
  misc_feature (1)..(25): SEQ ID NO: 2894; WAN024C6D_at; Start 101; Stop 125
tgattgaaggatggcgacctacggt

SEQ ID NO: 105791 - DNA, 25 bp, Artificial
  probe
  misc_feature (1)..(25): SEQ ID NO: 2894; WAN024C6D_at; Start 114; Stop 138
gcgacctacggttagtgatgttgaa

SEQ ID NO: 105792 - DNA, 25 bp, Artificial
  probe
  misc_feature (1)..(25): SEQ ID NO: 2894; WAN024C6D_at; Start 8; Stop 32
tagatatagataaagaaaagatgac

SEQ ID NO: 105793 - DNA, 25 bp, Artificial
  probe
  misc_feature (1)..(25): SEQ ID NO: 2894; WAN024C6D_at; Start 132; Stop 156
tgttgaaaaattacgagatgaagct

SEQ ID NO: 105794 - DNA, 25 bp, Artificial
  probe
  misc_feature (1)..(25): SEQ ID NO: 2894; WAN024C6D_at; Start 147; Stop 171
agatgaagctcttgctctggggatg

SEQ ID NO: 105795 - DNA, 25 bp, Artificial
  probe
  misc_feature (1)..(25): SEQ ID NO: 2894; WAN024C6D_at; Start 133; Stop 157
gttgaaaaattacgagatgaagctc

SEQ ID NO: 105796 - DNA, 25 bp, Artificial
  probe
  misc_feature (1)..(25): SEQ ID NO: 2894; WAN024C6D_at; Start 38; Stop 62
tgggaatagcttttgaaaaccgatc

SEQ ID NO: 105797 - DNA, 25 bp, Artificial
  probe
  misc_feature (1)..(25): SEQ ID NO: 2894; WAN024C6D_at; Start 18; Stop 42
taaagaaaagatgacaatcatggga

SEQ ID NO: 105798 - DNA, 25 bp, Artificial
  probe
  misc_feature (1)..(25): SEQ ID NO: 2894; WAN024C6D_at; Start 27; Stop 51
gatgacaatcatgggaatagctttt

SEQ ID NO: 105799 - DNA, 25 bp, Artificial
  probe
  misc_feature (1)..(25): SEQ ID NO: 2894; WAN024C6D_at; Start 119; Stop 143
ctacggttagtgatgttgaaaaatt

SEQ ID NO: 105800 - DNA, 25 bp, Artificial
  probe
  misc_feature (1)..(25): SEQ ID NO: 2894; WAN024C6D_at; Start 95; Stop 119
caaatatgattgaaggatggcgacc

SEQ ID NO: 105801 - DNA, 25 bp, Artificial
  probe
  misc_feature (1)..(25): SEQ ID NO: 2894; WAN024C6D_at; Start 118; Stop 142
cctacggttagtgatgttgaaaaat

SEQ ID NO: 105802 - DNA, 25 bp, Artificial
  probe
  misc_feature (1)..(25): SEQ ID NO: 2894; WAN024C6D_at; Start 140; Stop 164
aattacgagatgaagctcttgctct

SEQ ID NO: 105803 - DNA, 25 bp, Artificial
  probe
  misc_feature (1)..(25): SEQ ID NO: 2894; WAN024C6D_at; Start 99; Stop 123
tatgattgaaggatggcgacctacg

SEQ ID NO: 105804 - DNA, 25 bp, Artificial
  probe
  misc_feature (1)..(25): SEQ ID NO: 2894; WAN024C6D_at; Start 96; Stop 120
aaatatgattgaaggatggcgacct

SEQ ID NO: 105805 - DNA, 25 bp, Artificial
  probe
  misc_feature (1)..(25): SEQ ID NO: 2894; WAN024C6D_at; Start 116; Stop 140
gacctacggttagtgatgttgaaaa

SEQ ID NO: 105806 - DNA, 25 bp, Artificial
  probe
  misc_feature (1)..(25): SEQ ID NO: 2894; WAN024C6D_at; Start 23; Stop 47
aaaagatgacaatcatgggaatagc

SEQ ID NO: 105807 - DNA, 25 bp, Artificial
  probe
  misc_feature (1)..(25): SEQ ID NO: 3987; WAN024C6E_at; Start 111; Stop 135
tgttttttccgcgaagtacgctagc

SEQ ID NO: 105808 - DNA, 25 bp, Artificial
  probe
  misc_feature (1)..(25): SEQ ID NO: 3987; WAN024C6E_at; Start 60; Stop 84
tgataacaatcacgaagtcacctgt

SEQ ID NO: 105809 - DNA, 25 bp, Artificial
  probe
  misc_feature (1)..(25): SEQ ID NO: 3987; WAN024C6E_at; Start 341; Stop 365
taccgcctactatcataccaaattt

SEQ ID NO: 105810 - DNA, 25 bp, Artificial
  probe
  misc_feature (1)..(25): SEQ ID NO: 3987; WAN024C6E_at; Start 165; Stop 189
catcagttgcgtcaactacgtacca

SEQ ID NO: 105811 - DNA, 25 bp, Artificial
  probe
  misc_feature (1)..(25): SEQ ID NO: 3987; WAN024C6E_at; Start 235; Stop 259
catgatttctcctatatatagttcg

SEQ ID NO: 105812 - DNA, 25 bp, Artificial
  probe
  misc_feature (1)..(25): SEQ ID NO: 3987; WAN024C6E_at; Start 3; Stop 27
gagtgtagtagattttatcagttgc

SEQ ID NO: 105813 - DNA, 25 bp, Artificial
  probe
  misc_feature (1)..(25): SEQ ID NO: 3987; WAN024C6E_at; Start 87; Stop 111
cagtgtgtggtgtaaatgttggttt

SEQ ID NO: 105814 - DNA, 25 bp, Artificial
  probe
  misc_feature (1)..(25): SEQ ID NO: 3987; WAN024C6E_at; Start 49; Stop 73
tttttcagcattgataacaatcacg

SEQ ID NO: 105815 - DNA, 25 bp, Artificial
  probe
  misc_feature (1)..(25): SEQ ID NO: 3987; WAN024C6E_at; Start 135; Stop 159
caactactgcagaaagacgtccaag

SEQ ID NO: 105816 - DNA, 25 bp, Artificial
  probe
  misc_feature (1)..(25): SEQ ID NO: 3987; WAN024C6E_at; Start 368; Stop 392
cccctaaaagtcaatagatatgaaa

SEQ ID NO: 105817 - DNA, 25 bp, Artificial
  probe
  misc_feature (1)..(25): SEQ ID NO: 3987; WAN024C6E_at; Start 192; Stop 216
tacgttcaacttggcctggtttagc

SEQ ID NO: 105818 - DNA, 25 bp, Artificial
  probe
  misc_feature (1)..(25): SEQ ID NO: 3987; WAN024C6E_at; Start 146; Stop 170
gaaagacgtccaagtggtacatcag

SEQ ID NO: 105819 - DNA, 25 bp, Artificial
  probe
  misc_feature (1)..(25): SEQ ID NO: 3987; WAN024C6E_at; Start 224; Stop 248
gttgttttgttcatgatttctccta

SEQ ID NO: 105820 - DNA, 25 bp, Artificial
  probe
  misc_feature (1)..(25): SEQ ID NO: 3987; WAN024C6E_at; Start 80; Stop 104
cctgtatcagtgtgtggtgtaaatg

SEQ ID NO: 105821 - DNA, 25 bp, Artificial
  probe
  misc_feature (1)..(25): SEQ ID NO: 3987; WAN024C6E_at; Start 18; Stop 42
tatcagttgcttttttaccagtcaa

SEQ ID NO: 105822 - DNA, 25 bp, Artificial
  probe
  misc_feature (1)..(25): SEQ ID NO: 3987; WAN024C6E_at; Start 198; Stop 222
caacttggcctggtttagccataaa

SEQ ID NO: 105823 - DNA, 25 bp, Artificial
  probe
  misc_feature (1)..(25): SEQ ID NO: 3987; WAN024C6E_at; Start 268; Stop 292
ttacggtgatgggtgttccttccca

SEQ ID NO: 105824 - DNA, 25 bp, Artificial
  probe
  misc_feature (1)..(25): SEQ ID NO: 3987; WAN024C6E_at; Start 331; Stop 355
gggtaaacaataccgcctactatca

SEQ ID NO: 105825 - DNA, 25 bp, Artificial
  probe
  misc_feature (1)..(25): SEQ ID NO: 3987; WAN024C6E_at; Start 156; Stop 180
caagtggtacatcagttgcgtcaac

SEQ ID NO: 105826 - DNA, 25 bp, Artificial
  probe
  misc_feature (1)..(25): SEQ ID NO: 3987; WAN024C6E_at; Start 115; Stop 139
ttttccgcgaagtacgctagcaact

SEQ ID NO: 105827 - DNA, 25 bp, Artificial
  probe
  misc_feature (1)..(25): SEQ ID NO: 3987; WAN024C6E_at; Start 258; Stop 282
cgatttttgtttacggtgatgggtg

SEQ ID NO: 105828 - DNA, 25 bp, Artificial
  probe
  misc_feature (1)..(25): SEQ ID NO: 3987; WAN024C6E_at; Start 141; Stop 165
ctgcagaaagacgtccaagtggtac

SEQ ID NO: 105829 - DNA, 25 bp, Artificial
  probe
  misc_feature (1)..(25): SEQ ID NO: 3987; WAN024C6E_at; Start 185; Stop 209
taccatttacgttcaacttggcctg

SEQ ID NO: 105830 - DNA, 25 bp, Artificial
  probe
  misc_feature (1)..(25): SEQ ID NO: 3987; WAN024C6E_at; Start 66; Stop 90
caatcacgaagtcacctgtatcagt

SEQ ID NO: 105831 - DNA, 25 bp, Artificial
  probe
  misc_feature (1)..(25): SEQ ID NO: 3987; WAN024C6E_at; Start 275; Stop 299
gatgggtgttccttcccatcgaaaa

SEQ ID NO: 105832 - DNA, 25 bp, Artificial
  probe
  misc_feature (1)..(25): SEQ ID NO: 3987; WAN024C6E_at; Start 34; Stop 58
accagtcaatttaactttttcagca

SEQ ID NO: 105833 - DNA, 25 bp, Artificial
  probe
  misc_feature (1)..(25): SEQ ID NO: 3987; WAN024C6E_at; Start 130; Stop 154
gctagcaactactgcagaaagacgt

SEQ ID NO: 105834 - DNA, 25 bp, Artificial
  probe
  misc_feature (1)..(25): SEQ ID NO: 3987; WAN024C6E_at; Start 215; Stop 239
gccataaatgttgttttgttcatga

SEQ ID NO: 105835 - DNA, 25 bp, Artificial
  probe
  misc_feature (1)..(25): SEQ ID NO: 3987; WAN024C6E_at; Start 123; Stop 147
gaagtacgctagcaactactgcaga

SEQ ID NO: 105836 - DNA, 25 bp, Artificial
  probe
  misc_feature (1)..(25): SEQ ID NO: 3987; WAN024C6E_at; Start 171; Stop 195
ttgcgtcaactacgtaccatttacg

SEQ ID NO: 105837 - DNA, 25 bp, Artificial
  probe
  misc_feature (1)..(25): SEQ ID NO: 3987; WAN024C6E_at; Start 72; Stop 96
cgaagtcacctgtatcagtgtgtgg

SEQ ID NO: 105838 - DNA, 25 bp, Artificial
  probe
  misc_feature (1)..(25): SEQ ID NO: 3987; WAN024C6E_at; Start 205; Stop 229
gcctggtttagccataaatgttgtt

SEQ ID NO: 105839 - DNA, 25 bp, Artificial
  probe
  misc_feature (1)..(25): SEQ ID NO: 3987; WAN024C6E_at; Start 150; Stop 174
gacgtccaagtggtacatcagttgc

SEQ ID NO: 105840 - DNA, 25 bp, Artificial
  probe
  misc_feature (1)..(25): SEQ ID NO: 3987; WAN024C6E_at; Start 284; Stop 308
tccttcccatcgaaaagtatttgga

SEQ ID NO: 105841 - DNA, 25 bp, Artificial
  probe
  misc_feature (1)..(25): SEQ ID NO: 999; WAN024C6F_at; Start 145; Stop 169
cacactgatacaggtgacttcgtga

SEQ ID NO: 105842 - DNA, 25 bp, Artificial
  probe
  misc_feature (1)..(25): SEQ ID NO: 999; WAN024C6F_at; Start 103; Stop 127
gctagcgtacttcgcggaaaaaaca

SEQ ID NO: 105843 - DNA, 25 bp, Artificial
  probe
  misc_feature (1)..(25): SEQ ID NO: 999; WAN024C6F_at; Start 354; Stop 378
cgctcaaggtatgaagttgaaagta

SEQ ID NO: 105844 - DNA, 25 bp, Artificial
  probe
  misc_feature (1)..(25): SEQ ID NO: 999; WAN024C6F_at; Start 14; Stop 38
catttatggctaaaccaggccaagt

SEQ ID NO: 105845 - DNA, 25 bp, Artificial
  probe
  misc_feature (1)..(25): SEQ ID NO: 999; WAN024C6F_at; Start 29; Stop 53
caggccaagttgaacgtaaatggta

SEQ ID NO: 105846 - DNA, 25 bp, Artificial
  probe
  misc_feature (1)..(25): SEQ ID NO: 999; WAN024C6F_at; Start 155; Stop 179
caggtgacttcgtgattgttatcaa

SEQ ID NO: 105847 - DNA, 25 bp, Artificial
  probe
  misc_feature (1)..(25): SEQ ID NO: 999; WAN024C6F_at; Start 317; Stop 341
cagttaaaggtatgcttccacacaa

SEQ ID NO: 105848 - DNA, 25 bp, Artificial
  probe
  misc_feature (1)..(25): SEQ ID NO: 999; WAN024C6F_at; Start 257; Stop 281
tgaaacaaatctctgcaggtgaact

SEQ ID NO: 105849 - DNA, 25 bp, Artificial
  probe
  misc_feature (1)..(25): SEQ ID NO: 999; WAN024C6F_at; Start 134; Stop 158
catttacaccacacactgatacagg

SEQ ID NO: 105850 - DNA, 25 bp, Artificial
  probe
  misc_feature (1)..(25): SEQ ID NO: 999; WAN024C6F_at; Start 180; Stop 204
tgctgaaaaagttaaattgactggt

SEQ ID NO: 105851 - DNA, 25 bp, Artificial
  probe
  misc_feature (1)..(25): SEQ ID NO: 999; WAN024C6F_at; Start 232; Stop 256
actcactcaaaccacccaggtggat

SEQ ID NO: 105852 - DNA, 25 bp, Artificial
  probe
  misc_feature (1)..(25): SEQ ID NO: 999; WAN024C6F_at; Start 73; Stop 97
gtaccacttggacgtctttctgcag

SEQ ID NO: 105853 - DNA, 25 bp, Artificial
  probe
  misc_feature (1)..(25): SEQ ID NO: 999; WAN024C6F_at; Start 337; Stop 361
cacaatacacttggacgcgctcaag

SEQ ID NO: 105854 - DNA, 25 bp, Artificial
  probe
  misc_feature (1)..(25): SEQ ID NO: 999; WAN024C6F_at; Start 165; Stop 189
cgtgattgttatcaatgctgaaaaa

SEQ ID NO: 105855 - DNA, 25 bp, Artificial
  probe
  misc_feature (1)..(25): SEQ ID NO: 999; WAN024C6F_at; Start 45; Stop 69
taaatggtacgtagttgacgcaact

SEQ ID NO: 105856 - DNA, 25 bp, Artificial
  probe
  misc_feature (1)..(25): SEQ ID NO: 999; WAN024C6F_at; Start 348; Stop 372
tggacgcgctcaaggtatgaagttg

SEQ ID NO: 105857 - DNA, 25 bp, Artificial
  probe
  misc_feature (1)..(25): SEQ ID NO: 999; WAN024C6F_at; Start 327; Stop 351
tatgcttccacacaatacacttgga

SEQ ID NO: 105858 - DNA, 25 bp, Artificial
  probe
  misc_feature (1)..(25): SEQ ID NO: 999; WAN024C6F_at; Start 294; Stop 318
tgcagtacgtttgattgagaaatca

SEQ ID NO: 105859 - DNA, 25 bp, Artificial
  probe
  misc_feature (1)..(25): SEQ ID NO: 999; WAN024C6F_at; Start 243; Stop 267
ccacccaggtggattgaaacaaatc

SEQ ID NO: 105860 - DNA, 25 bp, Artificial
  probe
  misc_feature (1)..(25): SEQ ID NO: 999; WAN024C6F_at; Start 274; Stop 298
ggtgaacttcgttctaaaaatgcag

SEQ ID NO: 105861 - DNA, 25 bp, Artificial
  probe
  misc_feature (1)..(25): SEQ ID NO: 999; WAN024C6F_at; Start 263; Stop 287
aaatctctgcaggtgaacttcgttc

SEQ ID NO: 105862 - DNA, 25 bp, Artificial
  probe
  misc_feature (1)..(25): SEQ ID NO: 999; WAN024C6F_at; Start 22; Stop 46
gctaaaccaggccaagttgaacgta

SEQ ID NO: 105863 - DNA, 25 bp, Artificial
  probe
  misc_feature (1)..(25): SEQ ID NO: 999; WAN024C6F_at; Start 217; Stop 241
gataaaatctactacactcactcaa

SEQ ID NO: 105864 - DNA, 25 bp, Artificial
  probe
  misc_feature (1)..(25): SEQ ID NO: 999; WAN024C6F_at; Start 60; Stop 84
tgacgcaactgatgtaccacttgga

SEQ ID NO: 105865 - DNA, 25 bp, Artificial
  probe
  misc_feature (1)..(25): SEQ ID NO: 999; WAN024C6F_at; Start 372; Stop 396
gaaagtatttgttggagctgagcac

SEQ ID NO: 105866 - DNA, 25 bp, Artificial
  probe
  misc_feature (1)..(25): SEQ ID NO: 999; WAN024C6F_at; Start 427; Stop 451
gacatttcaggacttatctaactaa

SEQ ID NO: 105867 - DNA, 25 bp, Artificial
  probe
  misc_feature (1)..(25): SEQ ID NO: 999; WAN024C6F_at; Start 307; Stop 331
attgagaaatcagttaaaggtatgc

SEQ ID NO: 105868 - DNA, 25 bp, Artificial
  probe
  misc_feature (1)..(25): SEQ ID NO: 999; WAN024C6F_at; Start 415; Stop 439
ccagaagttcttgacatttcaggac

SEQ ID NO: 105869 - DNA, 25 bp, Artificial
  probe
  misc_feature (1)..(25): SEQ ID NO: 999; WAN024C6F_at; Start 2; Stop 26
tgaacaaaacaacatttatggctaa

SEQ ID NO: 105870 - DNA, 25 bp, Artificial
  probe
  misc_feature (1)..(25): SEQ ID NO: 999; WAN024C6F_at; Start 83; Stop 107
gacgtctttctgcagtagttgctag

SEQ ID NO: 105871 - DNA, 25 bp, Artificial
  probe
  misc_feature (1)..(25): SEQ ID NO: 999; WAN024C6F_at; Start 201; Stop 225
tggtaaaaaagcaactgataaaatc

SEQ ID NO: 105872 - DNA, 25 bp, Artificial
  probe
  misc_feature (1)..(25): SEQ ID NO: 999; WAN024C6F_at; Start 403; Stop 427
gctgcacaacaaccagaagttcttg

SEQ ID NO: 105873 - DNA, 25 bp, Artificial
  probe
  misc_feature (1)..(25): SEQ ID NO: 999; WAN024C6F_at; Start 95; Stop 119
cagtagttgctagcgtacttcgcgg

SEQ ID NO: 105874 - DNA, 25 bp, Artificial
  probe
  misc_feature (1)..(25): SEQ ID NO: 999; WAN024C6F_at; Start 283; Stop 307
cgttctaaaaatgcagtacgtttga

SEQ ID NO: 105875 - DNA, 25 bp, Artificial
  probe
  misc_feature (1)..(25): SEQ ID NO: 5273; WAN024C6G_at; Start 155; Stop 179
tcttaaaaaatgtctttgaattgga

SEQ ID NO: 105876 - DNA, 25 bp, Artificial
  probe
  misc_feature (1)..(25): SEQ ID NO: 5273; WAN024C6G_at; Start 305; Stop 329
gagtactggttttagacatggacgg

SEQ ID NO: 105877 - DNA, 25 bp, Artificial
  probe
  misc_feature (1)..(25): SEQ ID NO: 5273; WAN024C6G_at; Start 178; Stop 202
gaagaagaactcgagtttcaattgc

SEQ ID NO: 105878 - DNA, 25 bp, Artificial
  probe
  misc_feature (1)..(25): SEQ ID NO: 5273; WAN024C6G_at; Start 254; Stop 278
cagccattgattttgactttaacca

SEQ ID NO: 105879 - DNA, 25 bp, Artificial
  probe
  misc_feature (1)..(25): SEQ ID NO: 5273; WAN024C6G_at; Start 309; Stop 333
actggttttagacatggacggtaga

SEQ ID NO: 105880 - DNA, 25 bp, Artificial
  probe
  misc_feature (1)..(25): SEQ ID NO: 5273; WAN024C6G_at; Start 261; Stop 285
tgattttgactttaaccatcctttc

SEQ ID NO: 105881 - DNA, 25 bp, Artificial
  probe
  misc_feature (1)..(25): SEQ ID NO: 5273; WAN024C6G_at; Start 350; Stop 374
cagaagaaaatgacctattttaact

SEQ ID NO: 105882 - DNA, 25 bp, Artificial
  probe
  misc_feature (1)..(25): SEQ ID NO: 5273; WAN024C6G_at; Start 323; Stop 347
tggacggtagagaaactatcctcct

SEQ ID NO: 105883 - DNA, 25 bp, Artificial
  probe
  misc_feature (1)..(25): SEQ ID NO: 5273; WAN024C6G_at; Start 290; Stop 314
ctcgttatcccccaagagtactggt

SEQ ID NO: 105884 - DNA, 25 bp, Artificial
  probe
  misc_feature (1)..(25): SEQ ID NO: 5273; WAN024C6G_at; Start 315; Stop 339
tttagacatggacggtagagaaact

SEQ ID NO: 105885 - DNA, 25 bp, Artificial
  probe
  misc_feature (1)..(25): SEQ ID NO: 5273; WAN024C6G_at; Start 56; Stop 80
tggcttttaccaatacccacatgcg

SEQ ID NO: 105886 - DNA, 25 bp, Artificial
  probe
  misc_feature (1)..(25): SEQ ID NO: 5273; WAN024C6G_at; Start 52; Stop 76
gatatggcttttaccaatacccaca

SEQ ID NO: 105887 - DNA, 25 bp, Artificial
  probe
  misc_feature (1)..(25): SEQ ID NO: 5273; WAN024C6G_at; Start 339; Stop 363
tatcctcctcccagaagaaaatgac

SEQ ID NO: 105888 - DNA, 25 bp, Artificial
  probe
  misc_feature (1)..(25): SEQ ID NO: 5273; WAN024C6G_at; Start 332; Stop 356
gagaaactatcctcctcccagaaga

SEQ ID NO: 105889 - DNA, 25 bp, Artificial
  probe
  misc_feature (1)..(25): SEQ ID NO: 5273; WAN024C6G_at; Start 196; Stop 220
caattgcttaataaccaaggaaaga

SEQ ID NO: 105890 - DNA, 25 bp, Artificial
  probe
  misc_feature (1)..(25): SEQ ID NO: 5273; WAN024C6G_at; Start 218; Stop 242
agattaccttccacttttcaagtca

SEQ ID NO: 105891 - DNA, 25 bp, Artificial
  probe
  misc_feature (1)..(25): SEQ ID NO: 5273; WAN024C6G_at; Start 246; Stop 270
cctccctacagccattgattttgac

SEQ ID NO: 105892 - DNA, 25 bp, Artificial
  probe
  misc_feature (1)..(25): SEQ ID NO: 5273; WAN024C6G_at; Start 302; Stop 326
caagagtactggttttagacatgga

SEQ ID NO: 105893 - DNA, 25 bp, Artificial
  probe
  misc_feature (1)..(25): SEQ ID NO: 5273; WAN024C6G_at; Start 9; Stop 33
taatcctatttgctgtatgataagg

SEQ ID NO: 105894 - DNA, 25 bp, Artificial
  probe
  misc_feature (1)..(25): SEQ ID NO: 5273; WAN024C6G_at; Start 200; Stop 224
tgcttaataaccaaggaaagattac

SEQ ID NO: 105895 - DNA, 25 bp, Artificial
  probe
  misc_feature (1)..(25): SEQ ID NO: 5273; WAN024C6G_at; Start 115; Stop 139
gatgacatcattgactctttttggt

SEQ ID NO: 105896 - DNA, 25 bp, Artificial
  probe
  misc_feature (1)..(25): SEQ ID NO: 5273; WAN024C6G_at; Start 184; Stop 208
gaactcgagtttcaattgcttaata

SEQ ID NO: 105897 - DNA, 25 bp, Artificial
  probe
  misc_feature (1)..(25): SEQ ID NO: 5273; WAN024C6G_at; Start 321; Stop 345
catggacggtagagaaactatcctc

SEQ ID NO: 105898 - DNA, 25 bp, Artificial
  probe
  misc_feature (1)..(25): SEQ ID NO: 5273; WAN024C6G_at; Start 299; Stop 323
ccccaagagtactggttttagacat

SEQ ID NO: 105899 - DNA, 25 bp, Artificial
  probe
  misc_feature (1)..(25): SEQ ID NO: 5273; WAN024C6G_at; Start 232; Stop 256
ttttcaagtcaacacctccctacag

SEQ ID NO: 105900 - DNA, 25 bp, Artificial
  probe
  misc_feature (1)..(25): SEQ ID NO: 5273; WAN024C6G_at; Start 48; Stop 72
cagagatatggcttttaccaatacc

SEQ ID NO: 105901 - DNA, 25 bp, Artificial
  probe
  misc_feature (1)..(25): SEQ ID NO: 5273; WAN024C6G_at; Start 190; Stop 214
gagtttcaattgcttaataaccaag

SEQ ID NO: 105902 - DNA, 25 bp, Artificial
  probe
  misc_feature (1)..(25): SEQ ID NO: 5273; WAN024C6G_at; Start 172; Stop 196
gaattggaagaagaactcgagtttc

SEQ ID NO: 105903 - DNA, 25 bp, Artificial
  probe
  misc_feature (1)..(25): SEQ ID NO: 5273; WAN024C6G_at; Start 319; Stop 343
gacatggacggtagagaaactatcc

SEQ ID NO: 105904 - DNA, 25 bp, Artificial
  probe
  misc_feature (1)..(25): SEQ ID NO: 5273; WAN024C6G_at; Start 118; Stop 142
gacatcattgactctttttggtata

SEQ ID NO: 105905 - DNA, 25 bp, Artificial
  probe
  misc_feature (1)..(25): SEQ ID NO: 5273; WAN024C6G_at; Start 328; Stop 352
ggtagagaaactatcctcctcccag

SEQ ID NO: 105906 - DNA, 25 bp, Artificial
  probe
  misc_feature (1)..(25): SEQ ID NO: 5273; WAN024C6G_at; Start 334; Stop 358
gaaactatcctcctcccagaagaaa

SEQ ID NO: 105907 - DNA, 25 bp, Artificial
  probe
  misc_feature (1)..(25): SEQ ID NO: 5273; WAN024C6G_at; Start 344; Stop 368
tcctcccagaagaaaatgacctatt

SEQ ID NO: 105908 - DNA, 25 bp, Artificial
  probe
  misc_feature (1)..(25): SEQ ID NO: 5273; WAN024C6G_at; Start 168; Stop 192
ctttgaattggaagaagaactcgag

SEQ ID NO: 105909 - DNA, 25 bp, Artificial
  probe
  misc_feature (1)..(25): SEQ ID NO: 5299; WAN024C6H_at; Start 401; Stop 425
caaatttagttgactacgttacagg

SEQ ID NO: 105910 - DNA, 25 bp, Artificial
  probe
  misc_feature (1)..(25): SEQ ID NO: 5299; WAN024C6H_at; Start 815; Stop 839
tacgagaaacatttgatattttacc

SEQ ID NO: 105911 - DNA, 25 bp, Artificial
  probe
  misc_feature (1)..(25): SEQ ID NO: 5299; WAN024C6H_at; Start 785; Stop 809
gacaaggttggtataaggctaagaa

SEQ ID NO: 105912 - DNA, 25 bp, Artificial
  probe
  misc_feature (1)..(25): SEQ ID NO: 5299; WAN024C6H_at; Start 268; Stop 292
gatacgattattgttaaggatccga

SEQ ID NO: 105913 - DNA, 25 bp, Artificial
  probe
  misc_feature (1)..(25): SEQ ID NO: 5299; WAN024C6H_at; Start 463; Stop 487
cggactggagatgcgatggaaaata

SEQ ID NO: 105914 - DNA, 25 bp, Artificial
  probe
  misc_feature (1)..(25): SEQ ID NO: 5299; WAN024C6H_at; Start 768; Stop 792
tatgtggattactgatggacaaggt

SEQ ID NO: 105915 - DNA, 25 bp, Artificial
  probe
  misc_feature (1)..(25): SEQ ID NO: 5299; WAN024C6H_at; Start 38; Stop 62
ctagaaattttgatgagtggttgtc

SEQ ID NO: 105916 - DNA, 25 bp, Artificial
  probe
  misc_feature (1)..(25): SEQ ID NO: 5299; WAN024C6H_at; Start 187; Stop 211
caagaggattttttagacttatatc

SEQ ID NO: 105917 - DNA, 25 bp, Artificial
  probe
  misc_feature (1)..(25): SEQ ID NO: 5299; WAN024C6H_at; Start 646; Stop 670
gaacaagtgctttatctgattgagg

SEQ ID NO: 105918 - DNA, 25 bp, Artificial
  probe
  misc_feature (1)..(25): SEQ ID NO: 5299; WAN024C6H_at; Start 476; Stop 500
cgatggaaaatattgttcaaagcta

SEQ ID NO: 105919 - DNA, 25 bp, Artificial
  probe
  misc_feature (1)..(25): SEQ ID NO: 5299; WAN024C6H_at; Start 447; Stop 471
taatgggcgcaaaaatcggactgga

SEQ ID NO: 105920 - DNA, 25 bp, Artificial
  probe
  misc_feature (1)..(25): SEQ ID NO: 5299; WAN024C6H_at; Start 252; Stop 276
tgctaaacgtttgagagatacgatt

SEQ ID NO: 105921 - DNA, 25 bp, Artificial
  probe
  misc_feature (1)..(25): SEQ ID NO: 5299; WAN024C6H_at; Start 493; Stop 517
caaagctatcttgaagctgaagggt

SEQ ID NO: 105922 - DNA, 25 bp, Artificial
  probe
  misc_feature (1)..(25): SEQ ID NO: 5299; WAN024C6H_at; Start 613; Stop 637
actgtgaaacgttttgattttgtca

SEQ ID NO: 105923 - DNA, 25 bp, Artificial
  probe
  misc_feature (1)..(25): SEQ ID NO: 5299; WAN024C6H_at; Start 52; Stop 76
gagtggttgtcaacgatgaccgaca

SEQ ID NO: 105924 - DNA, 25 bp, Artificial
  probe
  misc_feature (1)..(25): SEQ ID NO: 5299; WAN024C6H_at; Start 66; Stop 90
gatgaccgacacagtagctgactgg

SEQ ID NO: 105925 - DNA, 25 bp, Artificial
  probe
  misc_feature (1)..(25): SEQ ID NO: 5299; WAN024C6H_at; Start 508; Stop 532
gctgaagggtatattttaggagaga

SEQ ID NO: 105926 - DNA, 25 bp, Artificial
  probe
  misc_feature (1)..(25): SEQ ID NO: 5299; WAN024C6H_at; Start 282; Stop 306
taaggatccgataaaagatttctat

SEQ ID NO: 105927 - DNA, 25 bp, Artificial
  probe
  misc_feature (1)..(25): SEQ ID NO: 5299; WAN024C6H_at; Start 695; Stop 719
caaaattaaatgagacggctagatc

SEQ ID NO: 105928 - DNA, 25 bp, Artificial
  probe
  misc_feature (1)..(25): SEQ ID NO: 5299; WAN024C6H_at; Start 587; Stop 611
tatctgctattacgaatgatgggaa

SEQ ID NO: 105929 - DNA, 25 bp, Artificial
  probe
  misc_feature (1)..(25): SEQ ID NO: 5299; WAN024C6H_at; Start 801; Stop 825
ggctaagaataatttacgagaaaca

SEQ ID NO: 105930 - DNA, 25 bp, Artificial
  probe
  misc_feature (1)..(25): SEQ ID NO: 5299; WAN024C6H_at; Start 80; Stop 104
tagctgactggacttattatacaga

SEQ ID NO: 105931 - DNA, 25 bp, Artificial
  probe
  misc_feature (1)..(25): SEQ ID NO: 5299; WAN024C6H_at; Start 600; Stop 624
gaatgatgggaatactgtgaaacgt

SEQ ID NO: 105932 - DNA, 25 bp, Artificial
  probe
  misc_feature (1)..(25): SEQ ID NO: 5299; WAN024C6H_at; Start 544; Stop 568
gagattgaacaaaatgaaatagagg

SEQ ID NO: 105933 - DNA, 25 bp, Artificial
  probe
  misc_feature (1)..(25): SEQ ID NO: 5299; WAN024C6H_at; Start 124; Stop 148
aatgtatctagtataaaagttgctc

SEQ ID NO: 105934 - DNA, 25 bp, Artificial
  probe
  misc_feature (1)..(25): SEQ ID NO: 5299; WAN024C6H_at; Start 237; Stop 261
tgtgcctctacttattgctaaacgt

SEQ ID NO: 105935 - DNA, 25 bp, Artificial
  probe
  misc_feature (1)..(25): SEQ ID NO: 5299; WAN024C6H_at; Start 706; Stop 730
gagacggctagatcttacaaaatga

SEQ ID NO: 105936 - DNA, 25 bp, Artificial
  probe
  misc_feature (1)..(25): SEQ ID NO: 5299; WAN024C6H_at; Start 415; Stop 439
tacgttacaggtgttgaggttggta

SEQ ID NO: 105937 - DNA, 25 bp, Artificial
  probe
  misc_feature (1)..(25): SEQ ID NO: 5299; WAN024C6H_at; Start 750; Stop 774
tattcctaatgttgagtttatgtgg

SEQ ID NO: 105938 - DNA, 25 bp, Artificial
  probe
  misc_feature (1)..(25): SEQ ID NO: 5299; WAN024C6H_at; Start 223; Stop 247
gaaattttgaaagttgtgcctctac

SEQ ID NO: 105939 - DNA, 25 bp, Artificial
  probe
  misc_feature (1)..(25): SEQ ID NO: 5299; WAN024C6H_at; Start 200; Stop 224
tagacttatatcaaaattatccaga

SEQ ID NO: 105940 - DNA, 25 bp, Artificial
  probe
  misc_feature (1)..(25): SEQ ID NO: 5299; WAN024C6H_at; Start 631; Stop 655
tttgtcataaaaaatgaacaagtgc

SEQ ID NO: 105941 - DNA, 25 bp, Artificial
  probe
  misc_feature (1)..(25): SEQ ID NO: 5299; WAN024C6H_at; Start 433; Stop 457
gttggtatggatactaatgggcgca

SEQ ID NO: 105942 - DNA, 25 bp, Artificial
  probe
  misc_feature (1)..(25): SEQ ID NO: 5299; WAN024C6H_at; Start 679; Stop 703
tattcaggaagtggttcaaaattaa

SEQ ID NO: 105943 - DNA, 25 bp, Artificial
  probe
  misc_feature (1)..(25): SEQ ID NO: 685; WAN024C6I_at; Start 389; Stop 413
ttacttggcagaaaacaaaccctgc

SEQ ID NO: 105944 - DNA, 25 bp, Artificial
  probe
  misc_feature (1)..(25): SEQ ID NO: 685; WAN024C6I_at; Start 442; Stop 466
cattctactgaaaccattttatggg

SEQ ID NO: 105945 - DNA, 25 bp, Artificial
  probe
  misc_feature (1)..(25): SEQ ID NO: 685; WAN024C6I_at; Start 127; Stop 151
gatatgatttttgctgatccacctt

SEQ ID NO: 105946 - DNA, 25 bp, Artificial
  probe
  misc_feature (1)..(25): SEQ ID NO: 685; WAN024C6I_at; Start 282; Stop 306
agaagttctgaagcctaatgggacg

SEQ ID NO: 105947 - DNA, 25 bp, Artificial
  probe
  misc_feature (1)..(25): SEQ ID NO: 685; WAN024C6I_at; Start 75; Stop 99
tgttcattcagatacgttcaagttc

SEQ ID NO: 105948 - DNA, 25 bp, Artificial
  probe
  misc_feature (1)..(25): SEQ ID NO: 685; WAN024C6I_at; Start 673; Stop 697
gacccatttgttggtagtggcacta

SEQ ID NO: 105949 - DNA, 25 bp, Artificial
  probe
  misc_feature (1)..(25): SEQ ID NO: 685; WAN024C6I_at; Start 162; Stop 186
taatggtggaatatctaattctggg

SEQ ID NO: 105950 - DNA, 25 bp, Artificial
  probe
  misc_feature (1)..(25): SEQ ID NO: 685; WAN024C6I_at; Start 732; Stop 756
tataggtatcgatgctgaaaaagaa

SEQ ID NO: 105951 - DNA, 25 bp, Artificial
  probe
  misc_feature (1)..(25): SEQ ID NO: 685; WAN024C6I_at; Start 693; Stop 717
cactacgggtgttgttgcgaagcgg

SEQ ID NO: 105952 - DNA, 25 bp, Artificial
  probe
  misc_feature (1)..(25): SEQ ID NO: 685; WAN024C6I_at; Start 335; Stop 359
tatactcagttggaatggcattaga

SEQ ID NO: 105953 - DNA, 25 bp, Artificial
  probe
  misc_feature (1)..(25): SEQ ID NO: 685; WAN024C6I_at; Start 310; Stop 334
tggatttcaggtagtttgcacaaca

SEQ ID NO: 105954 - DNA, 25 bp, Artificial
  probe
  misc_feature (1)..(25): SEQ ID NO: 685; WAN024C6I_at; Start 639; Stop 663
tttagcctctactaaagagggtgac

SEQ ID NO: 105955 - DNA, 25 bp, Artificial
  probe
  misc_feature (1)..(25): SEQ ID NO: 685; WAN024C6I_at; Start 756; Stop 780
atatttaaaaattgcaaggaagagg

SEQ ID NO: 105956 - DNA, 25 bp, Artificial
  probe
  misc_feature (1)..(25): SEQ ID NO: 685; WAN024C6I_at; Start 350; Stop 374
tggcattagaacaagaaggttttaa

SEQ ID NO: 105957 - DNA, 25 bp, Artificial
  probe
  misc_feature (1)..(25): SEQ ID NO: 685; WAN024C6I_at; Start 543; Stop 567
gaaagatgtctggaccggttcttta

SEQ ID NO: 105958 - DNA, 25 bp, Artificial
  probe
  misc_feature (1)..(25): SEQ ID NO: 685; WAN024C6I_at; Start 579; Stop 603
tgaaaaatgggctgggaaacatcca

SEQ ID NO: 105959 - DNA, 25 bp, Artificial
  probe
  misc_feature (1)..(25): SEQ ID NO: 685; WAN024C6I_at; Start 458; Stop 482
ttttatgggccagaaaaaatgataa

SEQ ID NO: 105960 - DNA, 25 bp, Artificial
  probe
  misc_feature (1)..(25): SEQ ID NO: 685; WAN024C6I_at; Start 536; Stop 560
aacaaatgaaagatgtctggaccgg

SEQ ID NO: 105961 - DNA, 25 bp, Artificial
  probe
  misc_feature (1)..(25): SEQ ID NO: 685; WAN024C6I_at; Start 103; Stop 127
tcaaaaatgaaaccagaaagtatgg

SEQ ID NO: 105962 - DNA, 25 bp, Artificial
  probe
  misc_feature (1)..(25): SEQ ID NO: 685; WAN024C6I_at; Start 229; Stop 253
tcttcattcgaagaaaaacatgagt

SEQ ID NO: 105963 - DNA, 25 bp, Artificial
  probe
  misc_feature (1)..(25): SEQ ID NO: 685; WAN024C6I_at; Start 319; Stop 343
ggtagtttgcacaacatatactcag

SEQ ID NO: 105964 - DNA, 25 bp, Artificial
  probe
  misc_feature (1)..(25): SEQ ID NO: 685; WAN024C6I_at; Start 25; Stop 49
ggaggtgttcttatgacaaaaccat

SEQ ID NO: 105965 - DNA, 25 bp, Artificial
  probe
  misc_feature (1)..(25): SEQ ID NO: 685; WAN024C6I_at; Start 478; Stop 502
gataaaaaagctcgtcattactaca

SEQ ID NO: 105966 - DNA, 25 bp, Artificial
  probe
  misc_feature (1)..(25): SEQ ID NO: 685; WAN024C6I_at; Start 214; Stop 238
gattgggataaaatttcttcattcg

SEQ ID NO: 105967 - DNA, 25 bp, Artificial
  probe
  misc_feature (1)..(25): SEQ ID NO: 685; WAN024C6I_at; Start 250; Stop 274
gagtttaatcgtaaatggattcgcc

SEQ ID NO: 105968 - DNA, 25 bp, Artificial
  probe
  misc_feature (1)..(25): SEQ ID NO: 685; WAN024C6I_at; Start 267; Stop 291
gattcgcctagcaaaagaagttctg

SEQ ID NO: 105969 - DNA, 25 bp, Artificial
  probe
  misc_feature (1)..(25): SEQ ID NO: 685; WAN024C6I_at; Start 295; Stop 319
cctaatgggacggtatggatttcag

SEQ ID NO: 105970 - DNA, 25 bp, Artificial
  probe
  misc_feature (1)..(25): SEQ ID NO: 685; WAN024C6I_at; Start 708; Stop 732
tgcgaagcggttaggtagaagattt

SEQ ID NO: 105971 - DNA, 25 bp, Artificial
  probe
  misc_feature (1)..(25): SEQ ID NO: 685; WAN024C6I_at; Start 594; Stop 618
gaaacatccaactcaaaaaccagag

SEQ ID NO: 105972 - DNA, 25 bp, Artificial
  probe
  misc_feature (1)..(25): SEQ ID NO: 685; WAN024C6I_at; Start 10; Stop 34
aacgaatataagtatggaggtgttc

SEQ ID NO: 105973 - DNA, 25 bp, Artificial
  probe
  misc_feature (1)..(25): SEQ ID NO: 685; WAN024C6I_at; Start 87; Stop 111
tacgttcaagttcttatcaaaaatg

SEQ ID NO: 105974 - DNA, 25 bp, Artificial
  probe
  misc_feature (1)..(25): SEQ ID NO: 685; WAN024C6I_at; Start 199; Stop 223
tctgttgataaaggagattgggata

SEQ ID NO: 105975 - DNA, 25 bp, Artificial
  probe
  misc_feature (1)..(25): SEQ ID NO: 685; WAN024C6I_at; Start 652; Stop 676
aaagagggtgactatattctagacc

SEQ ID NO: 105976 - DNA, 25 bp, Artificial
  probe
  misc_feature (1)..(25): SEQ ID NO: 685; WAN024C6I_at; Start 427; Stop 451
tgtcgttattttacccattctactg

SEQ ID NO: 105977 - DNA, 25 bp, Artificial
  probe
  misc_feature (1)..(25): SEQ ID NO: 2542; WAN024C6J_at; Start 50; Stop 74
aagaggctcgcacctctttttctta

SEQ ID NO: 105978 - DNA, 25 bp, Artificial
  probe
  misc_feature (1)..(25): SEQ ID NO: 2542; WAN024C6J_at; Start 54; Stop 78
ggctcgcacctctttttcttatttc

SEQ ID NO: 105979 - DNA, 25 bp, Artificial
  probe
  misc_feature (1)..(25): SEQ ID NO: 2542; WAN024C6J_at; Start 35; Stop 59
ttgtgataaacaaaaaagaggctcg

SEQ ID NO: 105980 - DNA, 25 bp, Artificial
  probe
  misc_feature (1)..(25): SEQ ID NO: 2542; WAN024C6J_at; Start 38; Stop 62
tgataaacaaaaaagaggctcgcac

SEQ ID NO: 105981 - DNA, 25 bp, Artificial
  probe
  misc_feature (1)..(25): SEQ ID NO: 2542; WAN024C6J_at; Start 43; Stop 67
aacaaaaaagaggctcgcacctctt

SEQ ID NO: 105982 - DNA, 25 bp, Artificial
  probe
  misc_feature (1)..(25): SEQ ID NO: 2542; WAN024C6J_at; Start 40; Stop 64
ataaacaaaaaagaggctcgcacct

SEQ ID NO: 105983 - DNA, 25 bp, Artificial
  probe
  misc_feature (1)..(25): SEQ ID NO: 2542; WAN024C6J_at; Start 3; Stop 27
gggaattgggattgattgtatttat

SEQ ID NO: 105984 - DNA, 25 bp, Artificial
  probe
  misc_feature (1)..(25): SEQ ID NO: 2542; WAN024C6J_at; Start 4; Stop 28
ggaattgggattgattgtatttata

SEQ ID NO: 105985 - DNA, 25 bp, Artificial
  probe
  misc_feature (1)..(25): SEQ ID NO: 2542; WAN024C6J_at; Start 7; Stop 31
attgggattgattgtatttataatc

SEQ ID NO: 105986 - DNA, 25 bp, Artificial
  probe
  misc_feature (1)..(25): SEQ ID NO: 2542; WAN024C6J_at; Start 9; Stop 33
tgggattgattgtatttataatcaa

SEQ ID NO: 105987 - DNA, 25 bp, Artificial
  probe
  misc_feature (1)..(25): SEQ ID NO: 2542; WAN024C6J_at; Start 45; Stop 69
caaaaaagaggctcgcacctctttt

SEQ ID NO: 105988 - DNA, 25 bp, Artificial
  probe
  misc_feature (1)..(25): SEQ ID NO: 2542; WAN024C6J_at; Start 30; Stop 54
tcaatttgtgataaacaaaaaagag

SEQ ID NO: 105989 - DNA, 25 bp, Artificial
  probe
  misc_feature (1)..(25): SEQ ID NO: 2542; WAN024C6J_at; Start 2; Stop 26
tgggaattgggattgattgtattta

SEQ ID NO: 105990 - DNA, 25 bp, Artificial
  probe
  misc_feature (1)..(25): SEQ ID NO: 2542; WAN024C6J_at; Start 48; Stop 72
aaaagaggctcgcacctctttttct

SEQ ID NO: 105991 - DNA, 25 bp, Artificial
  probe
  misc_feature (1)..(25): SEQ ID NO: 2542; WAN024C6J_at; Start 42; Stop 66
aaacaaaaaagaggctcgcacctct

SEQ ID NO: 105992 - DNA, 25 bp, Artificial
  probe
  misc_feature (1)..(25): SEQ ID NO: 2542; WAN024C6J_at; Start 49; Stop 73
aaagaggctcgcacctctttttctt

SEQ ID NO: 105993 - DNA, 25 bp, Artificial
  probe
  misc_feature (1)..(25): SEQ ID NO: 2542; WAN024C6J_at; Start 31; Stop 55
caatttgtgataaacaaaaaagagg

SEQ ID NO: 105994 - DNA, 25 bp, Artificial
  probe
  misc_feature (1)..(25): SEQ ID NO: 2542; WAN024C6J_at; Start 5; Stop 29
gaattgggattgattgtatttataa

SEQ ID NO: 105995 - DNA, 25 bp, Artificial
  probe
  misc_feature (1)..(25): SEQ ID NO: 2542; WAN024C6J_at; Start 25; Stop 49
tataatcaatttgtgataaacaaaa

SEQ ID NO: 105996 - DNA, 25 bp, Artificial
  probe
  misc_feature (1)..(25): SEQ ID NO: 2542; WAN024C6J_at; Start 56; Stop 80
ctcgcacctctttttcttatttctt

SEQ ID NO: 105997 - DNA, 25 bp, Artificial
  probe
  misc_feature (1)..(25): SEQ ID NO: 2542; WAN024C6J_at; Start 16; Stop 40
gattgtatttataatcaatttgtga

SEQ ID NO: 105998 - DNA, 25 bp, Artificial
  probe
  misc_feature (1)..(25): SEQ ID NO: 2542; WAN024C6J_at; Start 53; Stop 77
aggctcgcacctctttttcttattt

SEQ ID NO: 105999 - DNA, 25 bp, Artificial
  probe
  misc_feature (1)..(25): SEQ ID NO: 2542; WAN024C6J_at; Start 39; Stop 63
gataaacaaaaaagaggctcgcacc

SEQ ID NO: 106000 - DNA, 25 bp, Artificial
  probe
  misc_feature (1)..(25): SEQ ID NO: 2542; WAN024C6J_at; Start 36; Stop 60
tgtgataaacaaaaaagaggctcgc

SEQ ID NO: 106001 - DNA, 25 bp, Artificial
  probe
  misc_feature (1)..(25): SEQ ID NO: 2542; WAN024C6J_at; Start 44; Stop 68
acaaaaaagaggctcgcacctcttt

SEQ ID NO: 106002 - DNA, 25 bp, Artificial
  probe
  misc_feature (1)..(25): SEQ ID NO: 2542; WAN024C6J_at; Start 28; Stop 52
aatcaatttgtgataaacaaaaaag

SEQ ID NO: 106003 - DNA, 25 bp, Artificial
  probe
  misc_feature (1)..(25): SEQ ID NO: 2542; WAN024C6J_at; Start 51; Stop 75
agaggctcgcacctctttttcttat

SEQ ID NO: 106004 - DNA, 25 bp, Artificial
  probe
  misc_feature (1)..(25): SEQ ID NO: 2542; WAN024C6J_at; Start 34; Stop 58
tttgtgataaacaaaaaagaggctc

SEQ ID NO: 106005 - DNA, 25 bp, Artificial
  probe
  misc_feature (1)..(25): SEQ ID NO: 2542; WAN024C6J_at; Start 37; Stop 61
gtgataaacaaaaaagaggctcgca

SEQ ID NO: 106006 - DNA, 25 bp, Artificial
  probe
  misc_feature (1)..(25): SEQ ID NO: 2542; WAN024C6J_at; Start 41; Stop 65
taaacaaaaaagaggctcgcacctc

SEQ ID NO: 106007 - DNA, 25 bp, Artificial
  probe
  misc_feature (1)..(25): SEQ ID NO: 2542; WAN024C6J_at; Start 33; Stop 57
atttgtgataaacaaaaaagaggct

SEQ ID NO: 106008 - DNA, 25 bp, Artificial
  probe
  misc_feature (1)..(25): SEQ ID NO: 2542; WAN024C6J_at; Start 8; Stop 32
ttgggattgattgtatttataatca

SEQ ID NO: 106009 - DNA, 25 bp, Artificial
  probe
  misc_feature (1)..(25): SEQ ID NO: 2542; WAN024C6J_at; Start 55; Stop 79
gctcgcacctctttttcttatttct

SEQ ID NO: 106010 - DNA, 25 bp, Artificial
  probe
  misc_feature (1)..(25): SEQ ID NO: 2542; WAN024C6J_at; Start 52; Stop 76
gaggctcgcacctctttttcttatt

SEQ ID NO: 106011 - DNA, 25 bp, Artificial
  probe
  misc_feature (1)..(25): SEQ ID NO: 4006; WAN024C6K_at; Start 405; Stop 429
gttggccttgcttgctccaatttgt

SEQ ID NO: 106012 - DNA, 25 bp, Artificial
  probe
  misc_feature (1)..(25): SEQ ID NO: 4006; WAN024C6K_at; Start 400; Stop 424
ttcttgttggccttgcttgctccaa

SEQ ID NO: 106013 - DNA, 25 bp, Artificial
  probe
  misc_feature (1)..(25): SEQ ID NO: 4006; WAN024C6K_at; Start 28; Stop 52
gaattattgaatcgtgcaggttggc

SEQ ID NO: 106014 - DNA, 25 bp, Artificial
  probe
  misc_feature (1)..(25): SEQ ID NO: 4006; WAN024C6K_at; Start 392; Stop 416
ccagtttcttcttgttggccttgct

SEQ ID NO: 106015 - DNA, 25 bp, Artificial
  probe
  misc_feature (1)..(25): SEQ ID NO: 4006; WAN024C6K_at; Start 39; Stop 63
tcgtgcaggttggctgttaatcttt

SEQ ID NO: 106016 - DNA, 25 bp, Artificial
  probe
  misc_feature (1)..(25): SEQ ID NO: 4006; WAN024C6K_at; Start 404; Stop 428
tgttggccttgcttgctccaatttg

SEQ ID NO: 106017 - DNA, 25 bp, Artificial
  probe
  misc_feature (1)..(25): SEQ ID NO: 4006; WAN024C6K_at; Start 194; Stop 218
ttggagctcgtaaaacgcaattagc

SEQ ID NO: 106018 - DNA, 25 bp, Artificial
  probe
  misc_feature (1)..(25): SEQ ID NO: 4006; WAN024C6K_at; Start 40; Stop 64
cgtgcaggttggctgttaatctttt

SEQ ID NO: 106019 - DNA, 25 bp, Artificial
  probe
  misc_feature (1)..(25): SEQ ID NO: 4006; WAN024C6K_at; Start 387; Stop 411
gatttccagtttcttcttgttggcc

SEQ ID NO: 106020 - DNA, 25 bp, Artificial
  probe
  misc_feature (1)..(25): SEQ ID NO: 4006; WAN024C6K_at; Start 386; Stop 410
tgatttccagtttcttcttgttggc

SEQ ID NO: 106021 - DNA, 25 bp, Artificial
  probe
  misc_feature (1)..(25): SEQ ID NO: 4006; WAN024C6K_at; Start 35; Stop 59
tgaatcgtgcaggttggctgttaat

SEQ ID NO: 106022 - DNA, 25 bp, Artificial
  probe
  misc_feature (1)..(25): SEQ ID NO: 4006; WAN024C6K_at; Start 30; Stop 54
attattgaatcgtgcaggttggctg

SEQ ID NO: 106023 - DNA, 25 bp, Artificial
  probe
  misc_feature (1)..(25): SEQ ID NO: 4006; WAN024C6K_at; Start 36; Stop 60
gaatcgtgcaggttggctgttaatc

SEQ ID NO: 106024 - DNA, 25 bp, Artificial
  probe
  misc_feature (1)..(25): SEQ ID NO: 4006; WAN024C6K_at; Start 29; Stop 53
aattattgaatcgtgcaggttggct

SEQ ID NO: 106025 - DNA, 25 bp, Artificial
  probe
  misc_feature (1)..(25): SEQ ID NO: 4006; WAN024C6K_at; Start 32; Stop 56
tattgaatcgtgcaggttggctgtt

SEQ ID NO: 106026 - DNA, 25 bp, Artificial
  probe
  misc_feature (1)..(25): SEQ ID NO: 4006; WAN024C6K_at; Start 406; Stop 430
ttggccttgcttgctccaatttgtg

SEQ ID NO: 106027 - DNA, 25 bp, Artificial
  probe
  misc_feature (1)..(25): SEQ ID NO: 4006; WAN024C6K_at; Start 390; Stop 414
ttccagtttcttcttgttggccttg

SEQ ID NO: 106028 - DNA, 25 bp, Artificial
  probe
  misc_feature (1)..(25): SEQ ID NO: 4006; WAN024C6K_at; Start 38; Stop 62
atcgtgcaggttggctgttaatctt

SEQ ID NO: 106029 - DNA, 25 bp, Artificial
  probe
  misc_feature (1)..(25): SEQ ID NO: 4006; WAN024C6K_at; Start 399; Stop 423
cttcttgttggccttgcttgctcca

SEQ ID NO: 106030 - DNA, 25 bp, Artificial
  probe
  misc_feature (1)..(25): SEQ ID NO: 4006; WAN024C6K_at; Start 33; Stop 57
attgaatcgtgcaggttggctgtta

SEQ ID NO: 106031 - DNA, 25 bp, Artificial
  probe
  misc_feature (1)..(25): SEQ ID NO: 4006; WAN024C6K_at; Start 395; Stop 419
gtttcttcttgttggccttgcttgc

SEQ ID NO: 106032 - DNA, 25 bp, Artificial
  probe
  misc_feature (1)..(25): SEQ ID NO: 4006; WAN024C6K_at; Start 37; Stop 61
aatcgtgcaggttggctgttaatct

SEQ ID NO: 106033 - DNA, 25 bp, Artificial
  probe
  misc_feature (1)..(25): SEQ ID NO: 4006; WAN024C6K_at; Start 388; Stop 412
atttccagtttcttcttgttggcct

SEQ ID NO: 106034 - DNA, 25 bp, Artificial
  probe
  misc_feature (1)..(25): SEQ ID NO: 4006; WAN024C6K_at; Start 393; Stop 417
cagtttcttcttgttggccttgctt

SEQ ID NO: 106035 - DNA, 25 bp, Artificial
  probe
  misc_feature (1)..(25): SEQ ID NO: 4006; WAN024C6K_at; Start 31; Stop 55
ttattgaatcgtgcaggttggctgt

SEQ ID NO: 106036 - DNA, 25 bp, Artificial
  probe
  misc_feature (1)..(25): SEQ ID NO: 4006; WAN024C6K_at; Start 403; Stop 427
ttgttggccttgcttgctccaattt

SEQ ID NO: 106037 - DNA, 25 bp, Artificial
  probe
  misc_feature (1)..(25): SEQ ID NO: 4006; WAN024C6K_at; Start 41; Stop 65
gtgcaggttggctgttaatcttttt

SEQ ID NO: 106038 - DNA, 25 bp, Artificial
  probe
  misc_feature (1)..(25): SEQ ID NO: 4006; WAN024C6K_at; Start 402; Stop 426
cttgttggccttgcttgctccaatt

SEQ ID NO: 106039 - DNA, 25 bp, Artificial
  probe
  misc_feature (1)..(25): SEQ ID NO: 4006; WAN024C6K_at; Start 401; Stop 425
tcttgttggccttgcttgctccaat

SEQ ID NO: 106040 - DNA, 25 bp, Artificial
  probe
  misc_feature (1)..(25): SEQ ID NO: 4006; WAN024C6K_at; Start 34; Stop 58
ttgaatcgtgcaggttggctgttaa

SEQ ID NO: 106041 - DNA, 25 bp, Artificial
  probe
  misc_feature (1)..(25): SEQ ID NO: 4006; WAN024C6K_at; Start 391; Stop 415
tccagtttcttcttgttggccttgc

SEQ ID NO: 106042 - DNA, 25 bp, Artificial
  probe
  misc_feature (1)..(25): SEQ ID NO: 4006; WAN024C6K_at; Start 394; Stop 418
agtttcttcttgttggccttgcttg

SEQ ID NO: 106043 - DNA, 25 bp, Artificial
  probe
  misc_feature (1)..(25): SEQ ID NO: 4970; WAN024C6L_at; Start 155; Stop 179
tgtcaatgagaaggcaagaatggcc

SEQ ID NO: 106044 - DNA, 25 bp, Artificial
  probe
  misc_feature (1)..(25): SEQ ID NO: 4970; WAN024C6L_at; Start 339; Stop 363
gcaagaacagttgttgtcaagatag

SEQ ID NO: 106045 - DNA, 25 bp, Artificial
  probe
  misc_feature (1)..(25): SEQ ID NO: 4970; WAN024C6L_at; Start 48; Stop 72
taaagagccttatccaatttggctg

SEQ ID NO: 106046 - DNA, 25 bp, Artificial
  probe
  misc_feature (1)..(25): SEQ ID NO: 4970; WAN024C6L_at; Start 140; Stop 164
tgtgtcaaaaatatctgtcaatgag

SEQ ID NO: 106047 - DNA, 25 bp, Artificial
  probe
  misc_feature (1)..(25): SEQ ID NO: 4970; WAN024C6L_at; Start 1; Stop 25
ttgaagtacctgcaatggcaccgac

SEQ ID NO: 106048 - DNA, 25 bp, Artificial
  probe
  misc_feature (1)..(25): SEQ ID NO: 4970; WAN024C6L_at; Start 169; Stop 193
caagaatggccatcagagtttcagg

SEQ ID NO: 106049 - DNA, 25 bp, Artificial
  probe
  misc_feature (1)..(25): SEQ ID NO: 4970; WAN024C6L_at; Start 38; Stop 62
caaatcagagtaaagagccttatcc

SEQ ID NO: 106050 - DNA, 25 bp, Artificial
  probe
  misc_feature (1)..(25): SEQ ID NO: 4970; WAN024C6L_at; Start 230; Stop 254
ttctgaaccaagagctgcaccaaag

SEQ ID NO: 106051 - DNA, 25 bp, Artificial
  probe
  misc_feature (1)..(25): SEQ ID NO: 4970; WAN024C6L_at; Start 63; Stop 87
aatttggctgattggtgattttcac

SEQ ID NO: 106052 - DNA, 25 bp, Artificial
  probe
  misc_feature (1)..(25): SEQ ID NO: 4970; WAN024C6L_at; Start 451; Stop 475
taaagctgaccaatcctggaactgc

SEQ ID NO: 106053 - DNA, 25 bp, Artificial
  probe
  misc_feature (1)..(25): SEQ ID NO: 4970; WAN024C6L_at; Start 397; Stop 421
caaagaagatagtaatggcaagtcc

SEQ ID NO: 106054 - DNA, 25 bp, Artificial
  probe
  misc_feature (1)..(25): SEQ ID NO: 4970; WAN024C6L_at; Start 409; Stop 433
taatggcaagtcctgcaagagccac

SEQ ID NO: 106055 - DNA, 25 bp, Artificial
  probe
  misc_feature (1)..(25): SEQ ID NO: 4970; WAN024C6L_at; Start 437; Stop 461
aacagctggattattaaagctgacc

SEQ ID NO: 106056 - DNA, 25 bp, Artificial
  probe
  misc_feature (1)..(25): SEQ ID NO: 4970; WAN024C6L_at; Start 193; Stop 217
gcaagcgagctgtatctgaaaccaa

SEQ ID NO: 106057 - DNA, 25 bp, Artificial
  probe
  misc_feature (1)..(25): SEQ ID NO: 4970; WAN024C6L_at; Start 179; Stop 203
catcagagtttcaggcaagcgagct

SEQ ID NO: 106058 - DNA, 25 bp, Artificial
  probe
  misc_feature (1)..(25): SEQ ID NO: 4970; WAN024C6L_at; Start 202; Stop 226
ctgtatctgaaaccaaagctcccaa

SEQ ID NO: 106059 - DNA, 25 bp, Artificial
  probe
  misc_feature (1)..(25): SEQ ID NO: 4970; WAN024C6L_at; Start 324; Stop 348
aaaccaactgcaatagcaagaacag

SEQ ID NO: 106060 - DNA, 25 bp, Artificial
  probe
  misc_feature (1)..(25): SEQ ID NO: 4970; WAN024C6L_at; Start 464; Stop 488
tcctggaactgctgaagagtttgct

SEQ ID NO: 106061 - DNA, 25 bp, Artificial
  probe
  misc_feature (1)..(25): SEQ ID NO: 4970; WAN024C6L_at; Start 78; Stop 102
tgattttcaccatttgtcgctacga

SEQ ID NO: 106062 - DNA, 25 bp, Artificial
  probe
  misc_feature (1)..(25): SEQ ID NO: 4970; WAN024C6L_at; Start 479; Stop 503
agagtttgctgcaatcgttgcttga

SEQ ID NO: 106063 - DNA, 25 bp, Artificial
  probe
  misc_feature (1)..(25): SEQ ID NO: 4970; WAN024C6L_at; Start 23; Stop 47
gactgtcgttccaatcaaatcagag

SEQ ID NO: 106064 - DNA, 25 bp, Artificial
  probe
  misc_feature (1)..(25): SEQ ID NO: 4970; WAN024C6L_at; Start 377; Stop 401
ccctttaatccctttgatgacaaag

SEQ ID NO: 106065 - DNA, 25 bp, Artificial
  probe
  misc_feature (1)..(25): SEQ ID NO: 4970; WAN024C6L_at; Start 354; Stop 378
gtcaagatagagagaataattcccc

SEQ ID NO: 106066 - DNA, 25 bp, Artificial
  probe
  misc_feature (1)..(25): SEQ ID NO: 4970; WAN024C6L_at; Start 282; Stop 306
ccaacatggttattagcaaaatcga

SEQ ID NO: 106067 - DNA, 25 bp, Artificial
  probe
  misc_feature (1)..(25): SEQ ID NO: 4970; WAN024C6L_at; Start 123; Stop 147
ccgatcaaggtaccaattgtgtcaa

SEQ ID NO: 106068 - DNA, 25 bp, Artificial
  probe
  misc_feature (1)..(25): SEQ ID NO: 4970; WAN024C6L_at; Start 241; Stop 265
gagctgcaccaaagattgtcttcaa

SEQ ID NO: 106069 - DNA, 25 bp, Artificial
  probe
  misc_feature (1)..(25): SEQ ID NO: 4970; WAN024C6L_at; Start 9; Stop 33
cctgcaatggcaccgactgtcgttc

SEQ ID NO: 106070 - DNA, 25 bp, Artificial
  probe
  misc_feature (1)..(25): SEQ ID NO: 4970; WAN024C6L_at; Start 92; Stop 116
tgtcgctacgataccaactttttca

SEQ ID NO: 106071 - DNA, 25 bp, Artificial
  probe
  misc_feature (1)..(25): SEQ ID NO: 4970; WAN024C6L_at; Start 310; Stop 334
tagacaaatcaaccaaaccaactgc

SEQ ID NO: 106072 - DNA, 25 bp, Artificial
  probe
  misc_feature (1)..(25): SEQ ID NO: 4970; WAN024C6L_at; Start 257; Stop 281
tgtcttcaaatcttcaaaagctgca

SEQ ID NO: 106073 - DNA, 25 bp, Artificial
  probe
  misc_feature (1)..(25): SEQ ID NO: 4970; WAN024C6L_at; Start 267; Stop 291
tcttcaaaagctgcaccaacatggt

SEQ ID NO: 106074 - DNA, 25 bp, Artificial
  probe
  misc_feature (1)..(25): SEQ ID NO: 4970; WAN024C6L_at; Start 295; Stop 319
tagcaaaatcgatactagacaaatc

SEQ ID NO: 106075 - DNA, 25 bp, Artificial
  probe
  misc_feature (1)..(25): SEQ ID NO: 4970; WAN024C6L_at; Start 108; Stop 132
actttttcacctgtaccgatcaagg

SEQ ID NO: 106076 - DNA, 25 bp, Artificial
  probe
  misc_feature (1)..(25): SEQ ID NO: 4970; WAN024C6L_at; Start 422; Stop 446
tgcaagagccactaaaacagctgga

SEQ ID NO: 106077 - DNA, 25 bp, Artificial
  probe
  misc_feature (1)..(25): SEQ ID NO: 1023; WAN024C6M_at; Start 52; Stop 76
gaaaccaactgcaatcccttgagtg

SEQ ID NO: 106078 - DNA, 25 bp, Artificial
  probe
  misc_feature (1)..(25): SEQ ID NO: 1023; WAN024C6M_at; Start 301; Stop 325
tgcaccgataccagcagcagactca

SEQ ID NO: 106079 - DNA, 25 bp, Artificial
  probe
  misc_feature (1)..(25): SEQ ID NO: 1023; WAN024C6M_at; Start 115; Stop 139
ggcaggaactgcttcagacatatca

SEQ ID NO: 106080 - DNA, 25 bp, Artificial
  probe
  misc_feature (1)..(25): SEQ ID NO: 1023; WAN024C6M_at; Start 125; Stop 149
gcttcagacatatcatcccaatgga

SEQ ID NO: 106081 - DNA, 25 bp, Artificial
  probe
  misc_feature (1)..(25): SEQ ID NO: 1023; WAN024C6M_at; Start 274; Stop 298
caaggctgtcaaaccagtacgtcca

SEQ ID NO: 106082 - DNA, 25 bp, Artificial
  probe
  misc_feature (1)..(25): SEQ ID NO: 1023; WAN024C6M_at; Start 260; Stop 284
cagatagctacaaccaaggctgtca

SEQ ID NO: 106083 - DNA, 25 bp, Artificial
  probe
  misc_feature (1)..(25): SEQ ID NO: 1023; WAN024C6M_at; Start 140; Stop 164
tcccaatggatatttttcaagctac

SEQ ID NO: 106084 - DNA, 25 bp, Artificial
  probe
  misc_feature (1)..(25): SEQ ID NO: 1023; WAN024C6M_at; Start 120; Stop 144
gaactgcttcagacatatcatccca

SEQ ID NO: 106085 - DNA, 25 bp, Artificial
  probe
  misc_feature (1)..(25): SEQ ID NO: 1023; WAN024C6M_at; Start 268; Stop 292
tacaaccaaggctgtcaaaccagta

SEQ ID NO: 106086 - DNA, 25 bp, Artificial
  probe
  misc_feature (1)..(25): SEQ ID NO: 1023; WAN024C6M_at; Start 244; Stop 268
gcttgaaatcgcaaaacagatagct

SEQ ID NO: 106087 - DNA, 25 bp, Artificial
  probe
  misc_feature (1)..(25): SEQ ID NO: 1023; WAN024C6M_at; Start 152; Stop 176
tttttcaagctaccaagcatcataa

SEQ ID NO: 106088 - DNA, 25 bp, Artificial
  probe
  misc_feature (1)..(25): SEQ ID NO: 1023; WAN024C6M_at; Start 189; Stop 213
tcaagattggagctgtagccgctgt

SEQ ID NO: 106089 - DNA, 25 bp, Artificial
  probe
  misc_feature (1)..(25): SEQ ID NO: 1023; WAN024C6M_at; Start 307; Stop 331
gataccagcagcagactcaacataa

SEQ ID NO: 106090 - DNA, 25 bp, Artificial
  probe
  misc_feature (1)..(25): SEQ ID NO: 1023; WAN024C6M_at; Start 202; Stop 226
tgtagccgctgttggtacgatcgct

SEQ ID NO: 106091 - DNA, 25 bp, Artificial
  probe
  misc_feature (1)..(25): SEQ ID NO: 1023; WAN024C6M_at; Start 160; Stop 184
gctaccaagcatcataatcccaacg

SEQ ID NO: 106092 - DNA, 25 bp, Artificial
  probe
  misc_feature (1)..(25): SEQ ID NO: 1023; WAN024C6M_at; Start 280; Stop 304
tgtcaaaccagtacgtccacctgca

SEQ ID NO: 106093 - DNA, 25 bp, Artificial
  probe
  misc_feature (1)..(25): SEQ ID NO: 1023; WAN024C6M_at; Start 233; Stop 257
gggctaaagaagcttgaaatcgcaa

SEQ ID NO: 106094 - DNA, 25 bp, Artificial
  probe
  misc_feature (1)..(25): SEQ ID NO: 1023; WAN024C6M_at; Start 206; Stop 230
gccgctgttggtacgatcgctagaa

SEQ ID NO: 106095 - DNA, 25 bp, Artificial
  probe
  misc_feature (1)..(25): SEQ ID NO: 1023; WAN024C6M_at; Start 186; Stop 210
taatcaagattggagctgtagccgc

SEQ ID NO: 106096 - DNA, 25 bp, Artificial
  probe
  misc_feature (1)..(25): SEQ ID NO: 1023; WAN024C6M_at; Start 174; Stop 198
taatcccaacgataatcaagattgg

SEQ ID NO: 106097 - DNA, 25 bp, Artificial
  probe
  misc_feature (1)..(25): SEQ ID NO: 1023; WAN024C6M_at; Start 254; Stop 278
gcaaaacagatagctacaaccaagg

SEQ ID NO: 106098 - DNA, 25 bp, Artificial
  probe
  misc_feature (1)..(25): SEQ ID NO: 1023; WAN024C6M_at; Start 80; Stop 104
gagtagctgaatcccataaagatag

SEQ ID NO: 106099 - DNA, 25 bp, Artificial
  probe
  misc_feature (1)..(25): SEQ ID NO: 1023; WAN024C6M_at; Start 27; Stop 51
caagcttagtcaaagtgtaagtcaa

SEQ ID NO: 106100 - DNA, 25 bp, Artificial
  probe
  misc_feature (1)..(25): SEQ ID NO: 1023; WAN024C6M_at; Start 63; Stop 87
caatcccttgagtgatagagtagct

SEQ ID NO: 106101 - DNA, 25 bp, Artificial
  probe
  misc_feature (1)..(25): SEQ ID NO: 1023; WAN024C6M_at; Start 2; Stop 26
tgaacatctttaacttgacctttaa

SEQ ID NO: 106102 - DNA, 25 bp, Artificial
  probe
  misc_feature (1)..(25): SEQ ID NO: 1023; WAN024C6M_at; Start 214; Stop 238
tggtacgatcgctagaagtgggcta

SEQ ID NO: 106103 - DNA, 25 bp, Artificial
  probe
  misc_feature (1)..(25): SEQ ID NO: 1023; WAN024C6M_at; Start 102; Stop 126
tagatgtgaagaaggcaggaactgc

SEQ ID NO: 106104 - DNA, 25 bp, Artificial
  probe
  misc_feature (1)..(25): SEQ ID NO: 1023; WAN024C6M_at; Start 88; Stop 112
gaatcccataaagatagatgtgaag

SEQ ID NO: 106105 - DNA, 25 bp, Artificial
  probe
  misc_feature (1)..(25): SEQ ID NO: 1023; WAN024C6M_at; Start 44; Stop 68
taagtcaagaaaccaactgcaatcc

SEQ ID NO: 106106 - DNA, 25 bp, Artificial
  probe
  misc_feature (1)..(25): SEQ ID NO: 1023; WAN024C6M_at; Start 33; Stop 57
tagtcaaagtgtaagtcaagaaacc

SEQ ID NO: 106107 - DNA, 25 bp, Artificial
  probe
  misc_feature (1)..(25): SEQ ID NO: 1023; WAN024C6M_at; Start 219; Stop 243
cgatcgctagaagtgggctaaagaa

SEQ ID NO: 106108 - DNA, 25 bp, Artificial
  probe
  misc_feature (1)..(25): SEQ ID NO: 1023; WAN024C6M_at; Start 76; Stop 100
gatagagtagctgaatcccataaag

SEQ ID NO: 106109 - DNA, 25 bp, Artificial
  probe
  misc_feature (1)..(25): SEQ ID NO: 1023; WAN024C6M_at; Start 17; Stop 41
tgacctttaacaagcttagtcaaag

SEQ ID NO: 106110 - DNA, 25 bp, Artificial
  probe
  misc_feature (1)..(25): SEQ ID NO: 1023; WAN024C6M_at; Start 67; Stop 91
cccttgagtgatagagtagctgaat

SEQ ID NO: 106111 - DNA, 25 bp, Artificial
  probe
  misc_feature (1)..(25): SEQ ID NO: 1676; WAN024C6N_at; Start 589; Stop 613
aactcttcagcagttccaggattgg

SEQ ID NO: 106112 - DNA, 25 bp, Artificial
  probe
  misc_feature (1)..(25): SEQ ID NO: 1676; WAN024C6N_at; Start 351; Stop 375
cctagctatggtcttcatctgtggg

SEQ ID NO: 106113 - DNA, 25 bp, Artificial
  probe
  misc_feature (1)..(25): SEQ ID NO: 1676; WAN024C6N_at; Start 167; Stop 191
tactttcacaaacaggaatgcctgc

SEQ ID NO: 106114 - DNA, 25 bp, Artificial
  probe
  misc_feature (1)..(25): SEQ ID NO: 1676; WAN024C6N_at; Start 818; Stop 842
tctttggtgcagctcttggttcaga

SEQ ID NO: 106115 - DNA, 25 bp, Artificial
  probe
  misc_feature (1)..(25): SEQ ID NO: 1676; WAN024C6N_at; Start 387; Stop 411
gattattaccttgacaaatgttcgt

SEQ ID NO: 106116 - DNA, 25 bp, Artificial
  probe
  misc_feature (1)..(25): SEQ ID NO: 1676; WAN024C6N_at; Start 119; Stop 143
taacaactttctttgcaatgagcta

SEQ ID NO: 106117 - DNA, 25 bp, Artificial
  probe
  misc_feature (1)..(25): SEQ ID NO: 1676; WAN024C6N_at; Start 308; Stop 332
cctttacagttgtattcgggcttgg

SEQ ID NO: 106118 - DNA, 25 bp, Artificial
  probe
  misc_feature (1)..(25): SEQ ID NO: 1676; WAN024C6N_at; Start 337; Stop 361
tcttggcaagaagccctagctatgg

SEQ ID NO: 106119 - DNA, 25 bp, Artificial
  probe
  misc_feature (1)..(25): SEQ ID NO: 1676; WAN024C6N_at; Start 574; Stop 598
gcaacgattgcagcaaactcttcag

SEQ ID NO: 106120 - DNA, 25 bp, Artificial
  probe
  misc_feature (1)..(25): SEQ ID NO: 1676; WAN024C6N_at; Start 258; Stop 282
taacttaccttatgcccaagcgcca

SEQ ID NO: 106121 - DNA, 25 bp, Artificial
  probe
  misc_feature (1)..(25): SEQ ID NO: 1676; WAN024C6N_at; Start 1322; Stop 1346
gattcagctactctatcactcaagg

SEQ ID NO: 106122 - DNA, 25 bp, Artificial
  probe
  misc_feature (1)..(25): SEQ ID NO: 1676; WAN024C6N_at; Start 895; Stop 919
gccattcttgccttctcattgacag

SEQ ID NO: 106123 - DNA, 25 bp, Artificial
  probe
  misc_feature (1)..(25): SEQ ID NO: 1676; WAN024C6N_at; Start 1338; Stop 1362
cactcaagggattgcagttggtttc

SEQ ID NO: 106124 - DNA, 25 bp, Artificial
  probe
  misc_feature (1)..(25): SEQ ID NO: 1676; WAN024C6N_at; Start 213; Stop 237
gattattggtgcagtagcgggtacc

SEQ ID NO: 106125 - DNA, 25 bp, Artificial
  probe
  misc_feature (1)..(25): SEQ ID NO: 1676; WAN024C6N_at; Start 273; Stop 297
ccaagcgccaggtatgggactcaat

SEQ ID NO: 106126 - DNA, 25 bp, Artificial
  probe
  misc_feature (1)..(25): SEQ ID NO: 1676; WAN024C6N_at; Start 1118; Stop 1142
gacgtactggtttgacagccttggt

SEQ ID NO: 106127 - DNA, 25 bp, Artificial
  probe
  misc_feature (1)..(25): SEQ ID NO: 1676; WAN024C6N_at; Start 1249; Stop 1273
ggtagcttgaaaaatatccattggg

SEQ ID NO: 106128 - DNA, 25 bp, Artificial
  probe
  misc_feature (1)..(25): SEQ ID NO: 1676; WAN024C6N_at; Start 1230; Stop 1254
cgttgggattatgatgcttggtagc

SEQ ID NO: 106129 - DNA, 25 bp, Artificial
  probe
  misc_feature (1)..(25): SEQ ID NO: 1676; WAN024C6N_at; Start 707; Stop 731
tctctatcttgacaacaactgttct

SEQ ID NO: 106130 - DNA, 25 bp, Artificial
  probe
  misc_feature (1)..(25): SEQ ID NO: 1676; WAN024C6N_at; Start 879; Stop 903
gcctgaaactctgatggccattctt

SEQ ID NO: 106131 - DNA, 25 bp, Artificial
  probe
  misc_feature (1)..(25): SEQ ID NO: 1676; WAN024C6N_at; Start 243; Stop 267
gatggctttttatgctaacttacct

SEQ ID NO: 106132 - DNA, 25 bp, Artificial
  probe
  misc_feature (1)..(25): SEQ ID NO: 1676; WAN024C6N_at; Start 227; Stop 251
tagcgggtaccttgatgatggcttt

SEQ ID NO: 106133 - DNA, 25 bp, Artificial
  probe
  misc_feature (1)..(25): SEQ ID NO: 1676; WAN024C6N_at; Start 1207; Stop 1231
gctacagctccaatcttgattatcg

SEQ ID NO: 106134 - DNA, 25 bp, Artificial
  probe
  misc_feature (1)..(25): SEQ ID NO: 1676; WAN024C6N_at; Start 87; Stop 111
tacagacgttcgtacagaggttctc

SEQ ID NO: 106135 - DNA, 25 bp, Artificial
  probe
  misc_feature (1)..(25): SEQ ID NO: 1676; WAN024C6N_at; Start 767; Stop 791
tcgattttgctaataaccatgttgg

SEQ ID NO: 106136 - DNA, 25 bp, Artificial
  probe
  misc_feature (1)..(25): SEQ ID NO: 1676; WAN024C6N_at; Start 1357; Stop 1381
ggtttcttgacttacactttgacta

SEQ ID NO: 106137 - DNA, 25 bp, Artificial
  probe
  misc_feature (1)..(25): SEQ ID NO: 1676; WAN024C6N_at; Start 39; Stop 63
taaaaggagattgatgatggacaaa

SEQ ID NO: 106138 - DNA, 25 bp, Artificial
  probe
  misc_feature (1)..(25): SEQ ID NO: 1676; WAN024C6N_at; Start 140; Stop 164
gctatattctctttgtaaacccaca

SEQ ID NO: 106139 - DNA, 25 bp, Artificial
  probe
  misc_feature (1)..(25): SEQ ID NO: 1676; WAN024C6N_at; Start 1416; Stop 1440
catgatttggattttggatgccttg

SEQ ID NO: 106140 - DNA, 25 bp, Artificial
  probe
  misc_feature (1)..(25): SEQ ID NO: 1676; WAN024C6N_at; Start 973; Stop 997
gtagcgacaaatggtgaaaatcacc

SEQ ID NO: 106141 - DNA, 25 bp, Artificial
  probe
  misc_feature (1)..(25): SEQ ID NO: 1676; WAN024C6N_at; Start 320; Stop 344
tattcgggcttggttattcttggca

SEQ ID NO: 106142 - DNA, 25 bp, Artificial
  probe
  misc_feature (1)..(25): SEQ ID NO: 1676; WAN024C6N_at; Start 101; Stop 125
cagaggttctcgctggtttaacaac

SEQ ID NO: 106143 - DNA, 25 bp, Artificial
  probe
  misc_feature (1)..(25): SEQ ID NO: 1676; WAN024C6N_at; Start 285; Stop 309
tatgggactcaatgccttctttacc

SEQ ID NO: 106144 - DNA, 25 bp, Artificial
  probe
  misc_feature (1)..(25): SEQ ID NO: 1676; WAN024C6N_at; Start 1305; Stop 1329
cacatctatctttatgggattcagc

SEQ ID NO: 106145 - DNA, 25 bp, Artificial
  probe
  misc_feature (1)..(25): SEQ ID NO: 2024; WAN024C6O_at; Start 23; Stop 47
catcagcatggccttataatagaat

SEQ ID NO: 106146 - DNA, 25 bp, Artificial
  probe
  misc_feature (1)..(25): SEQ ID NO: 2024; WAN024C6O_at; Start 772; Stop 796
tatgagtcggacattaggaatttct

SEQ ID NO: 106147 - DNA, 25 bp, Artificial
  probe
  misc_feature (1)..(25): SEQ ID NO: 2024; WAN024C6O_at; Start 656; Stop 680
ggtatgtcgacagttctatcttgga

SEQ ID NO: 106148 - DNA, 25 bp, Artificial
  probe
  misc_feature (1)..(25): SEQ ID NO: 2024; WAN024C6O_at; Start 727; Stop 751
gattgttaatgggattgctttctgt

SEQ ID NO: 106149 - DNA, 25 bp, Artificial
  probe
  misc_feature (1)..(25): SEQ ID NO: 2024; WAN024C6O_at; Start 79; Stop 103
caaaaggagataggtgatgaaagag

SEQ ID NO: 106150 - DNA, 25 bp, Artificial
  probe
  misc_feature (1)..(25): SEQ ID NO: 2024; WAN024C6O_at; Start 130; Stop 154
tcgtgcaggctggattttggtcttt

SEQ ID NO: 106151 - DNA, 25 bp, Artificial
  probe
  misc_feature (1)..(25): SEQ ID NO: 2024; WAN024C6O_at; Start 556; Stop 580
gattttccgaggcaaggagaacttg

SEQ ID NO: 106152 - DNA, 25 bp, Artificial
  probe
  misc_feature (1)..(25): SEQ ID NO: 2024; WAN024C6O_at; Start 223; Stop 247
cctgctacagtcagggctgatagtt

SEQ ID NO: 106153 - DNA, 25 bp, Artificial
  probe
  misc_feature (1)..(25): SEQ ID NO: 2024; WAN024C6O_at; Start 582; Stop 606
gatttgtagtcggtacgattgtgtt

SEQ ID NO: 106154 - DNA, 25 bp, Artificial
  probe
  misc_feature (1)..(25): SEQ ID NO: 2024; WAN024C6O_at; Start 236; Stop 260
gggctgatagttgctggcctttcaa

SEQ ID NO: 106155 - DNA, 25 bp, Artificial
  probe
  misc_feature (1)..(25): SEQ ID NO: 2024; WAN024C6O_at; Start 759; Stop 783
ctcttgtggtgattatgagtcggac

SEQ ID NO: 106156 - DNA, 25 bp, Artificial
  probe
  misc_feature (1)..(25): SEQ ID NO: 2024; WAN024C6O_at; Start 170; Stop 194
ttatatcaggttcccctagtggtta

SEQ ID NO: 106157 - DNA, 25 bp, Artificial
  probe
  misc_feature (1)..(25): SEQ ID NO: 2024; WAN024C6O_at; Start 248; Stop 272
gctggcctttcaattgtggttctgg

SEQ ID NO: 106158 - DNA, 25 bp, Artificial
  probe
  misc_feature (1)..(25): SEQ ID NO: 2024; WAN024C6O_at; Start 562; Stop 586
ccgaggcaaggagaacttgggattt

SEQ ID NO: 106159 - DNA, 25 bp, Artificial
  probe
  misc_feature (1)..(25): SEQ ID NO: 2024; WAN024C6O_at; Start 429; Stop 453
caacagctaaccagtctcagattaa

SEQ ID NO: 106160 - DNA, 25 bp, Artificial
  probe
  misc_feature (1)..(25): SEQ ID NO: 2024; WAN024C6O_at; Start 747; Stop 771
tctgtttgttggctcttgtggtgat

SEQ ID NO: 106161 - DNA, 25 bp, Artificial
  probe
  misc_feature (1)..(25): SEQ ID NO: 2024; WAN024C6O_at; Start 184; Stop 208
cctagtggttacctctattttgact

SEQ ID NO: 106162 - DNA, 25 bp, Artificial
  probe
  misc_feature (1)..(25): SEQ ID NO: 2024; WAN024C6O_at; Start 120; Stop 144
aattgttgaatcgtgcaggctggat

SEQ ID NO: 106163 - DNA, 25 bp, Artificial
  probe
  misc_feature (1)..(25): SEQ ID NO: 2024; WAN024C6O_at; Start 341; Stop 365
gatttggcacgtttgggcttgagtt

SEQ ID NO: 106164 - DNA, 25 bp, Artificial
  probe
  misc_feature (1)..(25): SEQ ID NO: 2024; WAN024C6O_at; Start 203; Stop 227
ttgactttaaaagaagtagccctgc

SEQ ID NO: 106165 - DNA, 25 bp, Artificial
  probe
  misc_feature (1)..(25): SEQ ID NO: 2024; WAN024C6O_at; Start 243; Stop 267
tagttgctggcctttcaattgtggt

SEQ ID NO: 106166 - DNA, 25 bp, Artificial
  probe
  misc_feature (1)..(25): SEQ ID NO: 2024; WAN024C6O_at; Start 156; Stop 180
tacttgccgtccttttatatcaggt

SEQ ID NO: 106167 - DNA, 25 bp, Artificial
  probe
  misc_feature (1)..(25): SEQ ID NO: 2024; WAN024C6O_at; Start 138; Stop 162
gctggattttggtctttttacttgc

SEQ ID NO: 106168 - DNA, 25 bp, Artificial
  probe
  misc_feature (1)..(25): SEQ ID NO: 2024; WAN024C6O_at; Start 230; Stop 254
cagtcagggctgatagttgctggcc

SEQ ID NO: 106169 - DNA, 25 bp, Artificial
  probe
  misc_feature (1)..(25): SEQ ID NO: 2024; WAN024C6O_at; Start 167; Stop 191
cttttatatcaggttcccctagtgg

SEQ ID NO: 106170 - DNA, 25 bp, Artificial
  probe
  misc_feature (1)..(25): SEQ ID NO: 2024; WAN024C6O_at; Start 589; Stop 613
agtcggtacgattgtgtttgcttta

SEQ ID NO: 106171 - DNA, 25 bp, Artificial
  probe
  misc_feature (1)..(25): SEQ ID NO: 2024; WAN024C6O_at; Start 71; Stop 95
ttttaatacaaaaggagataggtga

SEQ ID NO: 106172 - DNA, 25 bp, Artificial
  probe
  misc_feature (1)..(25): SEQ ID NO: 2024; WAN024C6O_at; Start 343; Stop 367
tttggcacgtttgggcttgagttat

SEQ ID NO: 106173 - DNA, 25 bp, Artificial
  probe
  misc_feature (1)..(25): SEQ ID NO: 2024; WAN024C6O_at; Start 213; Stop 237
aagaagtagccctgctacagtcagg

SEQ ID NO: 106174 - DNA, 25 bp, Artificial
  probe
  misc_feature (1)..(25): SEQ ID NO: 2024; WAN024C6O_at; Start 737; Stop 761
gggattgctttctgtttgttggctc

SEQ ID NO: 106175 - DNA, 25 bp, Artificial
  probe
  misc_feature (1)..(25): SEQ ID NO: 2024; WAN024C6O_at; Start 421; Stop 445
tgagacgacaacagctaaccagtct

SEQ ID NO: 106176 - DNA, 25 bp, Artificial
  probe
  misc_feature (1)..(25): SEQ ID NO: 2024; WAN024C6O_at; Start 32; Stop 56
ggccttataatagaatgacccaggg

SEQ ID NO: 106177 - DNA, 25 bp, Artificial
  probe
  misc_feature (1)..(25): SEQ ID NO: 2024; WAN024C6O_at; Start 424; Stop 448
gacgacaacagctaaccagtctcag

SEQ ID NO: 106178 - DNA, 25 bp, Artificial
  probe
  misc_feature (1)..(25): SEQ ID NO: 2024; WAN024C6O_at; Start 649; Stop 673
ttatggaggtatgtcgacagttcta

SEQ ID NO: 106179 - DNA, 25 bp, Artificial
  probe
  misc_feature (1)..(25): SEQ ID NO: 4392; WAN024C6P_at; Start 252; Stop 276
gatcttcaggctggaaagcttctac

SEQ ID NO: 106180 - DNA, 25 bp, Artificial
  probe
  misc_feature (1)..(25): SEQ ID NO: 4392; WAN024C6P_at; Start 96; Stop 120
tacattcaaggatattgagcggacc

SEQ ID NO: 106181 - DNA, 25 bp, Artificial
  probe
  misc_feature (1)..(25): SEQ ID NO: 4392; WAN024C6P_at; Start 98; Stop 122
cattcaaggatattgagcggacctc

SEQ ID NO: 106182 - DNA, 25 bp, Artificial
  probe
  misc_feature (1)..(25): SEQ ID NO: 4392; WAN024C6P_at; Start 139; Stop 163
aagttgatgctggtagaaggcgttc

SEQ ID NO: 106183 - DNA, 25 bp, Artificial
  probe
  misc_feature (1)..(25): SEQ ID NO: 4392; WAN024C6P_at; Start 257; Stop 281
tcaggctggaaagcttctacaccaa

SEQ ID NO: 106184 - DNA, 25 bp, Artificial
  probe
  misc_feature (1)..(25): SEQ ID NO: 4392; WAN024C6P_at; Start 2; Stop 26
tgttcatctccaaaggcaatcaaat

SEQ ID NO: 106185 - DNA, 25 bp, Artificial
  probe
  misc_feature (1)..(25): SEQ ID NO: 4392; WAN024C6P_at; Start 36; Stop 60
cacgattcattatcttgagcaagta

SEQ ID NO: 106186 - DNA, 25 bp, Artificial
  probe
  misc_feature (1)..(25): SEQ ID NO: 4392; WAN024C6P_at; Start 261; Stop 285
gctggaaagcttctacaccaaatag

SEQ ID NO: 106187 - DNA, 25 bp, Artificial
  probe
  misc_feature (1)..(25): SEQ ID NO: 4392; WAN024C6P_at; Start 79; Stop 103
gttgacaccttttggggtacattca

SEQ ID NO: 106188 - DNA, 25 bp, Artificial
  probe
  misc_feature (1)..(25): SEQ ID NO: 4392; WAN024C6P_at; Start 46; Stop 70
tatcttgagcaagtagtccaaagca

SEQ ID NO: 106189 - DNA, 25 bp, Artificial
  probe
  misc_feature (1)..(25): SEQ ID NO: 4392; WAN024C6P_at; Start 31; Stop 55
tttgtcacgattcattatcttgagc

SEQ ID NO: 106190 - DNA, 25 bp, Artificial
  probe
  misc_feature (1)..(25): SEQ ID NO: 4392; WAN024C6P_at; Start 243; Stop 267
gctggaattgatcttcaggctggaa

SEQ ID NO: 106191 - DNA, 25 bp, Artificial
  probe
  misc_feature (1)..(25): SEQ ID NO: 4392; WAN024C6P_at; Start 64; Stop 88
caaagcaaaggccttgttgacacct

SEQ ID NO: 106192 - DNA, 25 bp, Artificial
  probe
  misc_feature (1)..(25): SEQ ID NO: 4392; WAN024C6P_at; Start 254; Stop 278
tcttcaggctggaaagcttctacac

SEQ ID NO: 106193 - DNA, 25 bp, Artificial
  probe
  misc_feature (1)..(25): SEQ ID NO: 4392; WAN024C6P_at; Start 101; Stop 125
tcaaggatattgagcggacctcccc

SEQ ID NO: 106194 - DNA, 25 bp, Artificial
  probe
  misc_feature (1)..(25): SEQ ID NO: 4392; WAN024C6P_at; Start 200; Stop 224
gtctgcaagaggatacagttagggt

SEQ ID NO: 106195 - DNA, 25 bp, Artificial
  probe
  misc_feature (1)..(25): SEQ ID NO: 4392; WAN024C6P_at; Start 141; Stop 165
gttgatgctggtagaaggcgttcat

SEQ ID NO: 106196 - DNA, 25 bp, Artificial
  probe
  misc_feature (1)..(25): SEQ ID NO: 4392; WAN024C6P_at; Start 69; Stop 93
caaaggccttgttgacaccttttgg

SEQ ID NO: 106197 - DNA, 25 bp, Artificial
  probe
  misc_feature (1)..(25): SEQ ID NO: 4392; WAN024C6P_at; Start 114; Stop 138
gcggacctccccaggtattgataga

SEQ ID NO: 106198 - DNA, 25 bp, Artificial
  probe
  misc_feature (1)..(25): SEQ ID NO: 4392; WAN024C6P_at; Start 54; Stop 78
gcaagtagtccaaagcaaaggcctt

SEQ ID NO: 106199 - DNA, 25 bp, Artificial
  probe
  misc_feature (1)..(25): SEQ ID NO: 4392; WAN024C6P_at; Start 51; Stop 75
tgagcaagtagtccaaagcaaaggc

SEQ ID NO: 106200 - DNA, 25 bp, Artificial
  probe
  misc_feature (1)..(25): SEQ ID NO: 4392; WAN024C6P_at; Start 247; Stop 271
gaattgatcttcaggctggaaagct

SEQ ID NO: 106201 - DNA, 25 bp, Artificial
  probe
  misc_feature (1)..(25): SEQ ID NO: 4392; WAN024C6P_at; Start 226; Stop 250
cttggtcaccaattcaggctggaat

SEQ ID NO: 106202 - DNA, 25 bp, Artificial
  probe
  misc_feature (1)..(25): SEQ ID NO: 4392; WAN024C6P_at; Start 117; Stop 141
gacctccccaggtattgatagaaag

SEQ ID NO: 106203 - DNA, 25 bp, Artificial
  probe
  misc_feature (1)..(25): SEQ ID NO: 4392; WAN024C6P_at; Start 6; Stop 30
catctccaaaggcaatcaaatcttt

SEQ ID NO: 106204 - DNA, 25 bp, Artificial
  probe
  misc_feature (1)..(25): SEQ ID NO: 4392; WAN024C6P_at; Start 58; Stop 82
gtagtccaaagcaaaggccttgttg

SEQ ID NO: 106205 - DNA, 25 bp, Artificial
  probe
  misc_feature (1)..(25): SEQ ID NO: 4392; WAN024C6P_at; Start 105; Stop 129
ggatattgagcggacctccccaggt

SEQ ID NO: 106206 - DNA, 25 bp, Artificial
  probe
  misc_feature (1)..(25): SEQ ID NO: 4392; WAN024C6P_at; Start 238; Stop 262
ttcaggctggaattgatcttcaggc

SEQ ID NO: 106207 - DNA, 25 bp, Artificial
  probe
  misc_feature (1)..(25): SEQ ID NO: 4392; WAN024C6P_at; Start 108; Stop 132
tattgagcggacctccccaggtatt

SEQ ID NO: 106208 - DNA, 25 bp, Artificial
  probe
  misc_feature (1)..(25): SEQ ID NO: 4392; WAN024C6P_at; Start 120; Stop 144
ctccccaggtattgatagaaagttg

SEQ ID NO: 106209 - DNA, 25 bp, Artificial
  probe
  misc_feature (1)..(25): SEQ ID NO: 4392; WAN024C6P_at; Start 110; Stop 134
ttgagcggacctccccaggtattga

SEQ ID NO: 106210 - DNA, 25 bp, Artificial
  probe
  misc_feature (1)..(25): SEQ ID NO: 4392; WAN024C6P_at; Start 16; Stop 40
ggcaatcaaatcttttttgtcacga

SEQ ID NO: 106211 - DNA, 25 bp, Artificial
  probe
  misc_feature (1)..(25): SEQ ID NO: 4392; WAN024C6P_at; Start 135; Stop 159
tagaaagttgatgctggtagaaggc

SEQ ID NO: 106212 - DNA, 25 bp, Artificial
  probe
  misc_feature (1)..(25): SEQ ID NO: 4392; WAN024C6P_at; Start 124; Stop 148
ccaggtattgatagaaagttgatgc

SEQ ID NO: 106213 - DNA, 25 bp, Artificial
  probe
  misc_feature (1)..(25): SEQ ID NO: 1418; WAN024C6Q_at; Start 31; Stop 55
gatggaaccctgctcaactcagaca

SEQ ID NO: 106214 - DNA, 25 bp, Artificial
  probe
  misc_feature (1)..(25): SEQ ID NO: 1418; WAN024C6Q_at; Start 520; Stop 544
catcaactttctatcaatacctggg

SEQ ID NO: 106215 - DNA, 25 bp, Artificial
  probe
  misc_feature (1)..(25): SEQ ID NO: 1418; WAN024C6Q_at; Start 592; Stop 616
gcctttgctttggactacttgctca

SEQ ID NO: 106216 - DNA, 25 bp, Artificial
  probe
  misc_feature (1)..(25): SEQ ID NO: 1418; WAN024C6Q_at; Start 725; Stop 749
cagagctactcccttatgcagatga

SEQ ID NO: 106217 - DNA, 25 bp, Artificial
  probe
  misc_feature (1)..(25): SEQ ID NO: 1418; WAN024C6Q_at; Start 298; Stop 322
gacattcaagccgattttatcgctg

SEQ ID NO: 106218 - DNA, 25 bp, Artificial
  probe
  misc_feature (1)..(25): SEQ ID NO: 1418; WAN024C6Q_at; Start 741; Stop 765
tgcagatgagcaaatttcccttacc

SEQ ID NO: 106219 - DNA, 25 bp, Artificial
  probe
  misc_feature (1)..(25): SEQ ID NO: 1418; WAN024C6Q_at; Start 399; Stop 423
tttccagcctgaagatcaattccag

SEQ ID NO: 106220 - DNA, 25 bp, Artificial
  probe
  misc_feature (1)..(25): SEQ ID NO: 1418; WAN024C6Q_at; Start 157; Stop 181
ttttaccgtgaactgggcttagaca

SEQ ID NO: 106221 - DNA, 25 bp, Artificial
  probe
  misc_feature (1)..(25): SEQ ID NO: 1418; WAN024C6Q_at; Start 285; Stop 309
tcaacgttcagaggacattcaagcc

SEQ ID NO: 106222 - DNA, 25 bp, Artificial
  probe
  misc_feature (1)..(25): SEQ ID NO: 1418; WAN024C6Q_at; Start 710; Stop 734
tgaaaaatgccaatccagagctact

SEQ ID NO: 106223 - DNA, 25 bp, Artificial
  probe
  misc_feature (1)..(25): SEQ ID NO: 1418; WAN024C6Q_at; Start 270; Stop 294
tctgctagatatggttcaacgttca

SEQ ID NO: 106224 - DNA, 25 bp, Artificial
  probe
  misc_feature (1)..(25): SEQ ID NO: 1418; WAN024C6Q_at; Start 579; Stop 603
aggtgtcaacaaggcctttgctttg

SEQ ID NO: 106225 - DNA, 25 bp, Artificial
  probe
  misc_feature (1)..(25): SEQ ID NO: 1418; WAN024C6Q_at; Start 199; Stop 223
aacggatcccttactcatttaccag

SEQ ID NO: 106226 - DNA, 25 bp, Artificial
  probe
  misc_feature (1)..(25): SEQ ID NO: 1418; WAN024C6Q_at; Start 443; Stop 467
accctaactgtatcctcttgcagac

SEQ ID NO: 106227 - DNA, 25 bp, Artificial
  probe
  misc_feature (1)..(25): SEQ ID NO: 1418; WAN024C6Q_at; Start 417; Stop 441
attccagcctgaattggtgaccaag

SEQ ID NO: 106228 - DNA, 25 bp, Artificial
  probe
  misc_feature (1)..(25): SEQ ID NO: 1418; WAN024C6Q_at; Start 251; Stop 275
tgactgtagacaaaaaatatctgct

SEQ ID NO: 106229 - DNA, 25 bp, Artificial
  probe
  misc_feature (1)..(25): SEQ ID NO: 1418; WAN024C6Q_at; Start 142; Stop 166
cgtatgtcaaaagatttttaccgtg

SEQ ID NO: 106230 - DNA, 25 bp, Artificial
  probe
  misc_feature (1)..(25): SEQ ID NO: 1418; WAN024C6Q_at; Start 543; Stop 567
gggaggtccgctcaatatccttgaa

SEQ ID NO: 106231 - DNA, 25 bp, Artificial
  probe
  misc_feature (1)..(25): SEQ ID NO: 1418; WAN024C6Q_at; Start 564; Stop 588
tgaatgtaccccaaaaggtgtcaac

SEQ ID NO: 106232 - DNA, 25 bp, Artificial
  probe
  misc_feature (1)..(25): SEQ ID NO: 1418; WAN024C6Q_at; Start 783; Stop 807
tgccaaaaccctacaagacttattc

SEQ ID NO: 106233 - DNA, 25 bp, Artificial
  probe
  misc_feature (1)..(25): SEQ ID NO: 1418; WAN024C6Q_at; Start 366; Stop 390
aattgccaatcccaaactatttggt

SEQ ID NO: 106234 - DNA, 25 bp, Artificial
  probe
  misc_feature (1)..(25): SEQ ID NO: 1418; WAN024C6Q_at; Start 128; Stop 152
caggtcgcccttaccgtatgtcaaa

SEQ ID NO: 106235 - DNA, 25 bp, Artificial
  probe
  misc_feature (1)..(25): SEQ ID NO: 1418; WAN024C6Q_at; Start 640; Stop 664
gatttgattgcctttggagatgaac

SEQ ID NO: 106236 - DNA, 25 bp, Artificial
  probe
  misc_feature (1)..(25): SEQ ID NO: 1418; WAN024C6Q_at; Start 627; Stop 651
tcgtgacaaaaaagatttgattgcc

SEQ ID NO: 106237 - DNA, 25 bp, Artificial
  probe
  misc_feature (1)..(25): SEQ ID NO: 1418; WAN024C6Q_at; Start 700; Stop 724
ggttatgccatgaaaaatgccaatc

SEQ ID NO: 106238 - DNA, 25 bp, Artificial
  probe
  misc_feature (1)..(25): SEQ ID NO: 1418; WAN024C6Q_at; Start 184; Stop 208
cctatgattaacttcaacggatccc

SEQ ID NO: 106239 - DNA, 25 bp, Artificial
  probe
  misc_feature (1)..(25): SEQ ID NO: 1418; WAN024C6Q_at; Start 754; Stop 778
atttcccttaccaacgaccaagatg

SEQ ID NO: 106240 - DNA, 25 bp, Artificial
  probe
  misc_feature (1)..(25): SEQ ID NO: 1418; WAN024C6Q_at; Start 607; Stop 631
tacttgctcaagataatgaatcgtg

SEQ ID NO: 106241 - DNA, 25 bp, Artificial
  probe
  misc_feature (1)..(25): SEQ ID NO: 1418; WAN024C6Q_at; Start 166; Stop 190
gaactgggcttagacactcctatga

SEQ ID NO: 106242 - DNA, 25 bp, Artificial
  probe
  misc_feature (1)..(25): SEQ ID NO: 1418; WAN024C6Q_at; Start 112; Stop 136
caggttattattacgacaggtcgcc

SEQ ID NO: 106243 - DNA, 25 bp, Artificial
  probe
  misc_feature (1)..(25): SEQ ID NO: 1418; WAN024C6Q_at; Start 213; Stop 237
tcatttaccagaccaagtttgggat

SEQ ID NO: 106244 - DNA, 25 bp, Artificial
  probe
  misc_feature (1)..(25): SEQ ID NO: 1418; WAN024C6Q_at; Start 504; Stop 528
gaacgccttctaccagcatcaactt

SEQ ID NO: 106245 - DNA, 25 bp, Artificial
  probe
  misc_feature (1)..(25): SEQ ID NO: 1418; WAN024C6Q_at; Start 672; Stop 696
taccgaaatgctcgcttttgctggg

SEQ ID NO: 106246 - DNA, 25 bp, Artificial
  probe
  misc_feature (1)..(25): SEQ ID NO: 1418; WAN024C6Q_at; Start 15; Stop 39
tattgcagttgacctggatggaacc

SEQ ID NO: 106247 - DNA, 25 bp, Artificial
  probe
  misc_feature (1)..(25): SEQ ID NO: 1330; WAN024C6R_at; Start 790; Stop 814
ggcggcgtgccaatcaagactctta

SEQ ID NO: 106248 - DNA, 25 bp, Artificial
  probe
  misc_feature (1)..(25): SEQ ID NO: 1330; WAN024C6R_at; Start 722; Stop 746
cacgttttggagaaacacatgccct

SEQ ID NO: 106249 - DNA, 25 bp, Artificial
  probe
  misc_feature (1)..(25): SEQ ID NO: 1330; WAN024C6R_at; Start 173; Stop 197
catttgacgcagaagatgaggttct

SEQ ID NO: 106250 - DNA, 25 bp, Artificial
  probe
  misc_feature (1)..(25): SEQ ID NO: 1330; WAN024C6R_at; Start 342; Stop 366
tgctgcaggtgtagaaaaagtcgct

SEQ ID NO: 106251 - DNA, 25 bp, Artificial
  probe
  misc_feature (1)..(25): SEQ ID NO: 1330; WAN024C6R_at; Start 35; Stop 59
gccacggcgaatttgctgcgggtat

SEQ ID NO: 106252 - DNA, 25 bp, Artificial
  probe
  misc_feature (1)..(25): SEQ ID NO: 1330; WAN024C6R_at; Start 240; Stop 264
tagtcgcgtgatgggagaaaatcct

SEQ ID NO: 106253 - DNA, 25 bp, Artificial
  probe
  misc_feature (1)..(25): SEQ ID NO: 1330; WAN024C6R_at; Start 701; Stop 725
tgattgagatttcaaaagacccacg

SEQ ID NO: 106254 - DNA, 25 bp, Artificial
  probe
  misc_feature (1)..(25): SEQ ID NO: 1330; WAN024C6R_at; Start 157; Stop 181
aataacgctgttgctgcatttgacg

SEQ ID NO: 106255 - DNA, 25 bp, Artificial
  probe
  misc_feature (1)..(25): SEQ ID NO: 1330; WAN024C6R_at; Start 641; Stop 665
aattgattaaacaagcagctccagg

SEQ ID NO: 106256 - DNA, 25 bp, Artificial
  probe
  misc_feature (1)..(25): SEQ ID NO: 1330; WAN024C6R_at; Start 51; Stop 75
tgcgggtattcatcagtcaggatct

SEQ ID NO: 106257 - DNA, 25 bp, Artificial
  probe
  misc_feature (1)..(25): SEQ ID NO: 1330; WAN024C6R_at; Start 391; Stop 415
gatggcatcaaagctcttccagaag

SEQ ID NO: 106258 - DNA, 25 bp, Artificial
  probe
  misc_feature (1)..(25): SEQ ID NO: 1330; WAN024C6R_at; Start 115; Stop 139
tttatgccaaatgaaggtcctgatg

SEQ ID NO: 106259 - DNA, 25 bp, Artificial
  probe
  misc_feature (1)..(25): SEQ ID NO: 1330; WAN024C6R_at; Start 658; Stop 682
gctccaggtaatgtcaaggctaacg

SEQ ID NO: 106260 - DNA, 25 bp, Artificial
  probe
  misc_feature (1)..(25): SEQ ID NO: 1330; WAN024C6R_at; Start 225; Stop 249
tccatttaaccaagctagtcgcgtg

SEQ ID NO: 106261 - DNA, 25 bp, Artificial
  probe
  misc_feature (1)..(25): SEQ ID NO: 1330; WAN024C6R_at; Start 99; Stop 123
ggttcaagttgtgacctttatgcca

SEQ ID NO: 106262 - DNA, 25 bp, Artificial
  probe
  misc_feature (1)..(25): SEQ ID NO: 1330; WAN024C6R_at; Start 610; Stop 634
gataacgtggctaaagacgaccttc

SEQ ID NO: 106263 - DNA, 25 bp, Artificial
  probe
  misc_feature (1)..(25): SEQ ID NO: 1330; WAN024C6R_at; Start 308; Stop 332
tgattcaagcctacacagagcgcct

SEQ ID NO: 106264 - DNA, 25 bp, Artificial
  probe
  misc_feature (1)..(25): SEQ ID NO: 1330; WAN024C6R_at; Start 265; Stop 289
gagcgtaagtttgccatcatcacag

SEQ ID NO: 106265 - DNA, 25 bp, Artificial
  probe
  misc_feature (1)..(25): SEQ ID NO: 1330; WAN024C6R_at; Start 19; Stop 43
ggaatcattattgcgagccacggcg

SEQ ID NO: 106266 - DNA, 25 bp, Artificial
  probe
  misc_feature (1)..(25): SEQ ID NO: 1330; WAN024C6R_at; Start 820; Stop 844
ggttctatggctcactcaacaggta

SEQ ID NO: 106267 - DNA, 25 bp, Artificial
  probe
  misc_feature (1)..(25): SEQ ID NO: 1330; WAN024C6R_at; Start 928; Stop 952
gatgtccgtaaagtaccaaatgatt

SEQ ID NO: 106268 - DNA, 25 bp, Artificial
  probe
  misc_feature (1)..(25): SEQ ID NO: 1330; WAN024C6R_at; Start 492; Stop 516
tatcggagacggtaaattgaaaatc

SEQ ID NO: 106269 - DNA, 25 bp, Artificial
  probe
  misc_feature (1)..(25): SEQ ID NO: 1330; WAN024C6R_at; Start 472; Stop 496
gctatcccagaaggaactgttatcg

SEQ ID NO: 106270 - DNA, 25 bp, Artificial
  probe
  misc_feature (1)..(25): SEQ ID NO: 1330; WAN024C6R_at; Start 672; Stop 696
caaggctaacgtggttccaattcaa

SEQ ID NO: 106271 - DNA, 25 bp, Artificial
  probe
  misc_feature (1)..(25): SEQ ID NO: 1330; WAN024C6R_at; Start 757; Stop 781
gaaacacctcaagatgcccttcgtg

SEQ ID NO: 106272 - DNA, 25 bp, Artificial
  probe
  misc_feature (1)..(25): SEQ ID NO: 1330; WAN024C6R_at; Start 326; Stop 350
agcgcctcatggacgctgctgcagg

SEQ ID NO: 106273 - DNA, 25 bp, Artificial
  probe
  misc_feature (1)..(25): SEQ ID NO: 1330; WAN024C6R_at; Start 294; Stop 318
taacttaccgatgttgattcaagcc

SEQ ID NO: 106274 - DNA, 25 bp, Artificial
  probe
  misc_feature (1)..(25): SEQ ID NO: 1330; WAN024C6R_at; Start 775; Stop 799
cttcgtgccatcgaaggcggcgtgc

SEQ ID NO: 106275 - DNA, 25 bp, Artificial
  probe
  misc_feature (1)..(25): SEQ ID NO: 1330; WAN024C6R_at; Start 532; Stop 556
gacacacgtctacttcacggtcagg

SEQ ID NO: 106276 - DNA, 25 bp, Artificial
  probe
  misc_feature (1)..(25): SEQ ID NO: 1330; WAN024C6R_at; Start 510; Stop 534
gaaaatcaatcttgcccgtcttgac

SEQ ID NO: 106277 - DNA, 25 bp, Artificial
  probe
  misc_feature (1)..(25): SEQ ID NO: 1330; WAN024C6R_at; Start 852; Stop 876
ggtcaataccgttttgtctatggac

SEQ ID NO: 106278 - DNA, 25 bp, Artificial
  probe
  misc_feature (1)..(25): SEQ ID NO: 1330; WAN024C6R_at; Start 130; Stop 154
ggtcctgatgatctatacgctaagt

SEQ ID NO: 106279 - DNA, 25 bp, Artificial
  probe
  misc_feature (1)..(25): SEQ ID NO: 1330; WAN024C6R_at; Start 430; Stop 454
gaagaagttgcaagcgctgcagctg

SEQ ID NO: 106280 - DNA, 25 bp, Artificial
  probe
  misc_feature (1)..(25): SEQ ID NO: 1330; WAN024C6R_at; Start 547; Stop 571
cacggtcaggttgcaactgcttgga

SEQ ID NO: 106281 - DNA, 25 bp, Artificial
  probe
  misc_feature (1)..(25): SEQ ID NO: 2920; WAN024C6S_at; Start 90; Stop 114
acttgtagcctgtacccttattggg

SEQ ID NO: 106282 - DNA, 25 bp, Artificial
  probe
  misc_feature (1)..(25): SEQ ID NO: 2920; WAN024C6S_at; Start 469; Stop 493
gcagctcttctccttatggtaccaa

SEQ ID NO: 106283 - DNA, 25 bp, Artificial
  probe
  misc_feature (1)..(25): SEQ ID NO: 2920; WAN024C6S_at; Start 727; Stop 751
tctaaaactggtggaaatggtggcg

SEQ ID NO: 106284 - DNA, 25 bp, Artificial
  probe
  misc_feature (1)..(25): SEQ ID NO: 2920; WAN024C6S_at; Start 185; Stop 209
caaatatcggtgctgctatcgctcc

SEQ ID NO: 106285 - DNA, 25 bp, Artificial
  probe
  misc_feature (1)..(25): SEQ ID NO: 2920; WAN024C6S_at; Start 583; Stop 607
tacgccatggttatcaacatgatgg

SEQ ID NO: 106286 - DNA, 25 bp, Artificial
  probe
  misc_feature (1)..(25): SEQ ID NO: 2920; WAN024C6S_at; Start 281; Stop 305
tcggtgttgcccaagcggttgctat

SEQ ID NO: 106287 - DNA, 25 bp, Artificial
  probe
  misc_feature (1)..(25): SEQ ID NO: 2920; WAN024C6S_at; Start 226; Stop 250
tctgtcgctgctgccattatcatgg

SEQ ID NO: 106288 - DNA, 25 bp, Artificial
  probe
  misc_feature (1)..(25): SEQ ID NO: 2920; WAN024C6S_at; Start 634; Stop 658
gctcttggtttcgttctcgctgctg

SEQ ID NO: 106289 - DNA, 25 bp, Artificial
  probe
  misc_feature (1)..(25): SEQ ID NO: 2920; WAN024C6S_at; Start 597; Stop 621
caacatgatggcaactcgtgaagta

SEQ ID NO: 106290 - DNA, 25 bp, Artificial
  probe
  misc_feature (1)..(25): SEQ ID NO: 2920; WAN024C6S_at; Start 568; Stop 592
gtcgttgccgttggttacgccatgg

SEQ ID NO: 106291 - DNA, 25 bp, Artificial
  probe
  misc_feature (1)..(25): SEQ ID NO: 2920; WAN024C6S_at; Start 379; Stop 403
gatgctgccgctaaaaaaggtgact

SEQ ID NO: 106292 - DNA, 25 bp, Artificial
  probe
  misc_feature (1)..(25): SEQ ID NO: 2920; WAN024C6S_at; Start 761; Stop 785
caacttctaacgacccaatcggcga

SEQ ID NO: 106293 - DNA, 25 bp, Artificial
  probe
  misc_feature (1)..(25): SEQ ID NO: 2920; WAN024C6S_at; Start 211; Stop 235
gatgctgcacttgcttctgtcgctg

SEQ ID NO: 106294 - DNA, 25 bp, Artificial
  probe
  misc_feature (1)..(25): SEQ ID NO: 2920; WAN024C6S_at; Start 527; Stop 551
cagactggctcaaagatggtatggc

SEQ ID NO: 106295 - DNA, 25 bp, Artificial
  probe
  misc_feature (1)..(25): SEQ ID NO: 2920; WAN024C6S_at; Start 41; Stop 65
tctttgcaggtcttgaaggcatcct

SEQ ID NO: 106296 - DNA, 25 bp, Artificial
  probe
  misc_feature (1)..(25): SEQ ID NO: 2920; WAN024C6S_at; Start 170; Stop 194
ttgcccttggttggtcaaatatcgg

SEQ ID NO: 106297 - DNA, 25 bp, Artificial
  probe
  misc_feature (1)..(25): SEQ ID NO: 2920; WAN024C6S_at; Start 105; Stop 129
ccttattgggcttgtaacaggtcac

SEQ ID NO: 106298 - DNA, 25 bp, Artificial
  probe
  misc_feature (1)..(25): SEQ ID NO: 2920; WAN024C6S_at; Start 23; Stop 47
tagtagtcgttgtagccttctttgc

SEQ ID NO: 106299 - DNA, 25 bp, Artificial
  probe
  misc_feature (1)..(25): SEQ ID NO: 2920; WAN024C6S_at; Start 77; Stop 101
aatttcaccaaccacttgtagcctg

SEQ ID NO: 106300 - DNA, 25 bp, Artificial
  probe
  misc_feature (1)..(25): SEQ ID NO: 2920; WAN024C6S_at; Start 506; Stop 530
aaagtatccttagtgccatgccaga

SEQ ID NO: 106301 - DNA, 25 bp, Artificial
  probe
  misc_feature (1)..(25): SEQ ID NO: 2920; WAN024C6S_at; Start 270; Stop 294
caagactggtatcggtgttgcccaa

SEQ ID NO: 106302 - DNA, 25 bp, Artificial
  probe
  misc_feature (1)..(25): SEQ ID NO: 2920; WAN024C6S_at; Start 651; Stop 675
cgctgctgtgtcagatattactcta

SEQ ID NO: 106303 - DNA, 25 bp, Artificial
  probe
  misc_feature (1)..(25): SEQ ID NO: 2920; WAN024C6S_at; Start 750; Stop 774
cggaggagccgcaacttctaacgac

SEQ ID NO: 106304 - DNA, 25 bp, Artificial
  probe
  misc_feature (1)..(25): SEQ ID NO: 2920; WAN024C6S_at; Start 392; Stop 416
aaaaaggtgacttcggcgctgtgga

SEQ ID NO: 106305 - DNA, 25 bp, Artificial
  probe
  misc_feature (1)..(25): SEQ ID NO: 2920; WAN024C6S_at; Start 671; Stop 695
ctctaatcggattcggtgctatcgg

SEQ ID NO: 106306 - DNA, 25 bp, Artificial
  probe
  misc_feature (1)..(25): SEQ ID NO: 2920; WAN024C6S_at; Start 442; Stop 466
ttccaaggacttcgtatcgcgcttc

SEQ ID NO: 106307 - DNA, 25 bp, Artificial
  probe
  misc_feature (1)..(25): SEQ ID NO: 2920; WAN024C6S_at; Start 240; Stop 264
cattatcatggttcttggtggtgac

SEQ ID NO: 106308 - DNA, 25 bp, Artificial
  probe
  misc_feature (1)..(25): SEQ ID NO: 2920; WAN024C6S_at; Start 616; Stop 640
gaagtatggccattcttcgctcttg

SEQ ID NO: 106309 - DNA, 25 bp, Artificial
  probe
  misc_feature (1)..(25): SEQ ID NO: 2920; WAN024C6S_at; Start 140; Stop 164
ggattatcctcggtggatcgcttca

SEQ ID NO: 106310 - DNA, 25 bp, Artificial
  probe
  misc_feature (1)..(25): SEQ ID NO: 2920; WAN024C6S_at; Start 776; Stop 800
caatcggcgatatcctagaagacta

SEQ ID NO: 106311 - DNA, 25 bp, Artificial
  probe
  misc_feature (1)..(25): SEQ ID NO: 2920; WAN024C6S_at; Start 255; Stop 279
tggtggtgactttaccaagactggt

SEQ ID NO: 106312 - DNA, 25 bp, Artificial
  probe
  misc_feature (1)..(25): SEQ ID NO: 2920; WAN024C6S_at; Start 119; Stop 143
taacaggtcacttggaagcagggat

SEQ ID NO: 106313 - DNA, 25 bp, Artificial
  probe
  misc_feature (1)..(25): SEQ ID NO: 2920; WAN024C6S_at; Start 155; Stop 179
gatcgcttcaaatgattgcccttgg

SEQ ID NO: 106314 - DNA, 25 bp, Artificial
  probe
  misc_feature (1)..(25): SEQ ID NO: 2920; WAN024C6S_at; Start 55; Stop 79
gaaggcatcctcgaccagttccaat

SEQ ID NO: 106315 - DNA, 25 bp, Artificial
  probe
  misc_feature (1)..(25): SEQ ID NO: 5486; WAN024C6T_at; Start 107; Stop 131
tcaaggtgacgctcaagagcagcga

SEQ ID NO: 106316 - DNA, 25 bp, Artificial
  probe
  misc_feature (1)..(25): SEQ ID NO: 5486; WAN024C6T_at; Start 201; Stop 225
gcatccgttcaaagttccaagaccc

SEQ ID NO: 106317 - DNA, 25 bp, Artificial
  probe
  misc_feature (1)..(25): SEQ ID NO: 5486; WAN024C6T_at; Start 197; Stop 221
ttttgcatccgttcaaagttccaag

SEQ ID NO: 106318 - DNA, 25 bp, Artificial
  probe
  misc_feature (1)..(25): SEQ ID NO: 5486; WAN024C6T_at; Start 182; Stop 206
taagcccagcccaagttttgcatcc

SEQ ID NO: 106319 - DNA, 25 bp, Artificial
  probe
  misc_feature (1)..(25): SEQ ID NO: 5486; WAN024C6T_at; Start 165; Stop 189
tagctggaatgagtgtataagccca

SEQ ID NO: 106320 - DNA, 25 bp, Artificial
  probe
  misc_feature (1)..(25): SEQ ID NO: 5486; WAN024C6T_at; Start 77; Stop 101
gcagctacgtatggatgagtgttga

SEQ ID NO: 106321 - DNA, 25 bp, Artificial
  probe
  misc_feature (1)..(25): SEQ ID NO: 5486; WAN024C6T_at; Start 100; Stop 124
gaagaactcaaggtgacgctcaaga

SEQ ID NO: 106322 - DNA, 25 bp, Artificial
  probe
  misc_feature (1)..(25): SEQ ID NO: 5486; WAN024C6T_at; Start 122; Stop 146
agagcagcgatttgatcttcttttt

SEQ ID NO: 106323 - DNA, 25 bp, Artificial
  probe
  misc_feature (1)..(25): SEQ ID NO: 5486; WAN024C6T_at; Start 50; Stop 74
agcgcaagagtaacccccatgactg

SEQ ID NO: 106324 - DNA, 25 bp, Artificial
  probe
  misc_feature (1)..(25): SEQ ID NO: 5486; WAN024C6T_at; Start 111; Stop 135
ggtgacgctcaagagcagcgatttg

SEQ ID NO: 106325 - DNA, 25 bp, Artificial
  probe
  misc_feature (1)..(25): SEQ ID NO: 5486; WAN024C6T_at; Start 185; Stop 209
gcccagcccaagttttgcatccgtt

SEQ ID NO: 106326 - DNA, 25 bp, Artificial
  probe
  misc_feature (1)..(25): SEQ ID NO: 5486; WAN024C6T_at; Start 64; Stop 88
ccccatgactggagcagctacgtat

SEQ ID NO: 106327 - DNA, 25 bp, Artificial
  probe
  misc_feature (1)..(25): SEQ ID NO: 5486; WAN024C6T_at; Start 67; Stop 91
catgactggagcagctacgtatgga

SEQ ID NO: 106328 - DNA, 25 bp, Artificial
  probe
  misc_feature (1)..(25): SEQ ID NO: 5486; WAN024C6T_at; Start 172; Stop 196
aatgagtgtataagcccagcccaag

SEQ ID NO: 106329 - DNA, 25 bp, Artificial
  probe
  misc_feature (1)..(25): SEQ ID NO: 5486; WAN024C6T_at; Start 33; Stop 57
tagcacgttcttcttcaagcgcaag

SEQ ID NO: 106330 - DNA, 25 bp, Artificial
  probe
  misc_feature (1)..(25): SEQ ID NO: 5486; WAN024C6T_at; Start 152; Stop 176
tagagttttttgatagctggaatga

SEQ ID NO: 106331 - DNA, 25 bp, Artificial
  probe
  misc_feature (1)..(25): SEQ ID NO: 5486; WAN024C6T_at; Start 6; Stop 30
tagcagcgtcatcgatttccacacc

SEQ ID NO: 106332 - DNA, 25 bp, Artificial
  probe
  misc_feature (1)..(25): SEQ ID NO: 5486; WAN024C6T_at; Start 15; Stop 39
catcgatttccacaccgttagcacg

SEQ ID NO: 106333 - DNA, 25 bp, Artificial
  probe
  misc_feature (1)..(25): SEQ ID NO: 5486; WAN024C6T_at; Start 118; Stop 142
ctcaagagcagcgatttgatcttct

SEQ ID NO: 106334 - DNA, 25 bp, Artificial
  probe
  misc_feature (1)..(25): SEQ ID NO: 5486; WAN024C6T_at; Start 71; Stop 95
actggagcagctacgtatggatgag

SEQ ID NO: 106335 - DNA, 25 bp, Artificial
  probe
  misc_feature (1)..(25): SEQ ID NO: 5486; WAN024C6T_at; Start 104; Stop 128
aactcaaggtgacgctcaagagcag

SEQ ID NO: 106336 - DNA, 25 bp, Artificial
  probe
  misc_feature (1)..(25): SEQ ID NO: 5486; WAN024C6T_at; Start 4; Stop 28
gatagcagcgtcatcgatttccaca

SEQ ID NO: 106337 - DNA, 25 bp, Artificial
  probe
  misc_feature (1)..(25): SEQ ID NO: 5486; WAN024C6T_at; Start 11; Stop 35
gcgtcatcgatttccacaccgttag

SEQ ID NO: 106338 - DNA, 25 bp, Artificial
  probe
  misc_feature (1)..(25): SEQ ID NO: 5486; WAN024C6T_at; Start 96; Stop 120
tgttgaagaactcaaggtgacgctc

SEQ ID NO: 106339 - DNA, 25 bp, Artificial
  probe
  misc_feature (1)..(25): SEQ ID NO: 5486; WAN024C6T_at; Start 38; Stop 62
cgttcttcttcaagcgcaagagtaa

SEQ ID NO: 106340 - DNA, 25 bp, Artificial
  probe
  misc_feature (1)..(25): SEQ ID NO: 5486; WAN024C6T_at; Start 170; Stop 194
ggaatgagtgtataagcccagccca

SEQ ID NO: 106341 - DNA, 25 bp, Artificial
  probe
  misc_feature (1)..(25): SEQ ID NO: 5486; WAN024C6T_at; Start 1; Stop 25
ttggatagcagcgtcatcgatttcc

SEQ ID NO: 106342 - DNA, 25 bp, Artificial
  probe
  misc_feature (1)..(25): SEQ ID NO: 5486; WAN024C6T_at; Start 27; Stop 51
caccgttagcacgttcttcttcaag

SEQ ID NO: 106343 - DNA, 25 bp, Artificial
  probe
  misc_feature (1)..(25): SEQ ID NO: 5486; WAN024C6T_at; Start 19; Stop 43
gatttccacaccgttagcacgttct

SEQ ID NO: 106344 - DNA, 25 bp, Artificial
  probe
  misc_feature (1)..(25): SEQ ID NO: 5486; WAN024C6T_at; Start 190; Stop 214
gcccaagttttgcatccgttcaaag

SEQ ID NO: 106345 - DNA, 25 bp, Artificial
  probe
  misc_feature (1)..(25): SEQ ID NO: 5486; WAN024C6T_at; Start 42; Stop 66
cttcttcaagcgcaagagtaacccc

SEQ ID NO: 106346 - DNA, 25 bp, Artificial
  probe
  misc_feature (1)..(25): SEQ ID NO: 5486; WAN024C6T_at; Start 178; Stop 202
tgtataagcccagcccaagttttgc

SEQ ID NO: 106347 - DNA, 25 bp, Artificial
  probe
  misc_feature (1)..(25): SEQ ID NO: 5486; WAN024C6T_at; Start 114; Stop 138
gacgctcaagagcagcgatttgatc

SEQ ID NO: 106348 - DNA, 25 bp, Artificial
  probe
  misc_feature (1)..(25): SEQ ID NO: 5486; WAN024C6T_at; Start 82; Stop 106
tacgtatggatgagtgttgaagaac

SEQ ID NO: 106349 - DNA, 25 bp, Artificial
  probe
  misc_feature (1)..(25): SEQ ID NO: 1455; WAN024C6U_at; Start 327; Stop 351
tggtatcggtgacccagtattctgg

SEQ ID NO: 106350 - DNA, 25 bp, Artificial
  probe
  misc_feature (1)..(25): SEQ ID NO: 1455; WAN024C6U_at; Start 428; Stop 452
tctttgttgcatggaacttgattcg

SEQ ID NO: 106351 - DNA, 25 bp, Artificial
  probe
  misc_feature (1)..(25): SEQ ID NO: 1455; WAN024C6U_at; Start 159; Stop 183
tcaaatcgctgctcttgagcgtcac

SEQ ID NO: 106352 - DNA, 25 bp, Artificial
  probe
  misc_feature (1)..(25): SEQ ID NO: 1455; WAN024C6U_at; Start 869; Stop 893
tcttcgcagtgggtattgtggcaca

SEQ ID NO: 106353 - DNA, 25 bp, Artificial
  probe
  misc_feature (1)..(25): SEQ ID NO: 1455; WAN024C6U_at; Start 704; Stop 728
cattcgcacaagtaggacaaggatt

SEQ ID NO: 106354 - DNA, 25 bp, Artificial
  probe
  misc_feature (1)..(25): SEQ ID NO: 1455; WAN024C6U_at; Start 28; Stop 52
tcagatcgtaaaaaagtttggtggc

SEQ ID NO: 106355 - DNA, 25 bp, Artificial
  probe
  misc_feature (1)..(25): SEQ ID NO: 1455; WAN024C6U_at; Start 258; Stop 282
tgctaacggtgtggaaatcgatgac

SEQ ID NO: 106356 - DNA, 25 bp, Artificial
  probe
  misc_feature (1)..(25): SEQ ID NO: 1455; WAN024C6U_at; Start 856; Stop 880
attatccttgccctcttcgcagtgg

SEQ ID NO: 106357 - DNA, 25 bp, Artificial
  probe
  misc_feature (1)..(25): SEQ ID NO: 1455; WAN024C6U_at; Start 546; Stop 570
taaaggagcttctatccttgggatg

SEQ ID NO: 106358 - DNA, 25 bp, Artificial
  probe
  misc_feature (1)..(25): SEQ ID NO: 1455; WAN024C6U_at; Start 676; Stop 700
ccagaagggtctaaaggtatccaag

SEQ ID NO: 106359 - DNA, 25 bp, Artificial
  probe
  misc_feature (1)..(25): SEQ ID NO: 1455; WAN024C6U_at; Start 691; Stop 715
ggtatccaagaagcattcgcacaag

SEQ ID NO: 106360 - DNA, 25 bp, Artificial
  probe
  misc_feature (1)..(25): SEQ ID NO: 1455; WAN024C6U_at; Start 485; Stop 509
gatacaaggctggatcagaaatcac

SEQ ID NO: 106361 - DNA, 25 bp, Artificial
  probe
  misc_feature (1)..(25): SEQ ID NO: 1455; WAN024C6U_at; Start 366; Stop 390
aatccttggatctctcggtgcttca

SEQ ID NO: 106362 - DNA, 25 bp, Artificial
  probe
  misc_feature (1)..(25): SEQ ID NO: 1455; WAN024C6U_at; Start 191; Stop 215
tcttcaacactcatccatacgtagc

SEQ ID NO: 106363 - DNA, 25 bp, Artificial
  probe
  misc_feature (1)..(25): SEQ ID NO: 1455; WAN024C6U_at; Start 175; Stop 199
gagcgtcaccttgagttcttcaaca

SEQ ID NO: 106364 - DNA, 25 bp, Artificial
  probe
  misc_feature (1)..(25): SEQ ID NO: 1455; WAN024C6U_at; Start 514; Stop 538
gatatgtctggtggtatccttcaag

SEQ ID NO: 106365 - DNA, 25 bp, Artificial
  probe
  misc_feature (1)..(25): SEQ ID NO: 1455; WAN024C6U_at; Start 645; Stop 669
tgaaaaggcttatatccattgggat

SEQ ID NO: 106366 - DNA, 25 bp, Artificial
  probe
  misc_feature (1)..(25): SEQ ID NO: 1455; WAN024C6U_at; Start 101; Stop 125
tgggctgggcttatacactcattcc

SEQ ID NO: 106367 - DNA, 25 bp, Artificial
  probe
  misc_feature (1)..(25): SEQ ID NO: 1455; WAN024C6U_at; Start 380; Stop 404
tcggtgcttcacttgcccttactgg

SEQ ID NO: 106368 - DNA, 25 bp, Artificial
  probe
  misc_feature (1)..(25): SEQ ID NO: 1455; WAN024C6U_at; Start 531; Stop 555
ccttcaagatatcactaaaggagct

SEQ ID NO: 106369 - DNA, 25 bp, Artificial
  probe
  misc_feature (1)..(25): SEQ ID NO: 1455; WAN024C6U_at; Start 349; Stop 373
tggtttacagtacgcccaatccttg

SEQ ID NO: 106370 - DNA, 25 bp, Artificial
  probe
  misc_feature (1)..(25): SEQ ID NO: 1455; WAN024C6U_at; Start 580; Stop 604
gctgtccttgttcaacgctgggtaa

SEQ ID NO: 106371 - DNA, 25 bp, Artificial
  probe
  misc_feature (1)..(25): SEQ ID NO: 1455; WAN024C6U_at; Start 796; Stop 820
ggactactccttactttactttgca

SEQ ID NO: 106372 - DNA, 25 bp, Artificial
  probe
  misc_feature (1)..(25): SEQ ID NO: 1455; WAN024C6U_at; Start 471; Stop 495
tgttcaagagattggatacaaggct

SEQ ID NO: 106373 - DNA, 25 bp, Artificial
  probe
  misc_feature (1)..(25): SEQ ID NO: 1455; WAN024C6U_at; Start 764; Stop 788
aaaacttggatatgttgattcctgg

SEQ ID NO: 106374 - DNA, 25 bp, Artificial
  probe
  misc_feature (1)..(25): SEQ ID NO: 1455; WAN024C6U_at; Start 46; Stop 70
tggtggcgttcaaccttcttacaag

SEQ ID NO: 106375 - DNA, 25 bp, Artificial
  probe
  misc_feature (1)..(25): SEQ ID NO: 1455; WAN024C6U_at; Start 660; Stop 684
ccattgggataaattgccagaaggg

SEQ ID NO: 106376 - DNA, 25 bp, Artificial
  probe
  misc_feature (1)..(25): SEQ ID NO: 1455; WAN024C6U_at; Start 273; Stop 297
aatcgatgacgctgctatccaaggg

SEQ ID NO: 106377 - DNA, 25 bp, Artificial
  probe
  misc_feature (1)..(25): SEQ ID NO: 1455; WAN024C6U_at; Start 86; Stop 110
aacggatgcaaaacttgggctgggc

SEQ ID NO: 106378 - DNA, 25 bp, Artificial
  probe
  misc_feature (1)..(25): SEQ ID NO: 1455; WAN024C6U_at; Start 206; Stop 230
catacgtagctgctccagtcatggg

SEQ ID NO: 106379 - DNA, 25 bp, Artificial
  probe
  misc_feature (1)..(25): SEQ ID NO: 1455; WAN024C6U_at; Start 561; Stop 585
ccttgggatgttcattcttgctgtc

SEQ ID NO: 106380 - DNA, 25 bp, Artificial
  probe
  misc_feature (1)..(25): SEQ ID NO: 1455; WAN024C6U_at; Start 71; Stop 95
ggtcttggaactttgaacggatgca

SEQ ID NO: 106381 - DNA, 25 bp, Artificial
  probe
  misc_feature (1)..(25): SEQ ID NO: 1455; WAN024C6U_at; Start 885; Stop 909
tgtggcacatgttcttcacatcatg

SEQ ID NO: 106382 - DNA, 25 bp, Artificial
  probe
  misc_feature (1)..(25): SEQ ID NO: 1455; WAN024C6U_at; Start 719; Stop 743
gacaaggattgtctcaaactcctga

SEQ ID NO: 106383 - DNA, 25 bp, Artificial
  probe
  misc_feature (1)..(25): SEQ ID NO: 7486; WAN024C6V_at; Start 22; Stop 46
tccgaggcagtaggaaacatagctc

SEQ ID NO: 106384 - DNA, 25 bp, Artificial
  probe
  misc_feature (1)..(25): SEQ ID NO: 7486; WAN024C6V_at; Start 38; Stop 62
acatagctcaggacttttctagtgc

SEQ ID NO: 106385 - DNA, 25 bp, Artificial
  probe
  misc_feature (1)..(25): SEQ ID NO: 7486; WAN024C6V_at; Start 194; Stop 218
aaaaagtcgttgtgacaagcgctcc

SEQ ID NO: 106386 - DNA, 25 bp, Artificial
  probe
  misc_feature (1)..(25): SEQ ID NO: 7486; WAN024C6V_at; Start 665; Stop 689
tcagcttgttaggtagtaaggtctc

SEQ ID NO: 106387 - DNA, 25 bp, Artificial
  probe
  misc_feature (1)..(25): SEQ ID NO: 7486; WAN024C6V_at; Start 817; Stop 841
ggtaaaacaattgcacagctaggaa

SEQ ID NO: 106388 - DNA, 25 bp, Artificial
  probe
  misc_feature (1)..(25): SEQ ID NO: 7486; WAN024C6V_at; Start 322; Stop 346
tatgatgaacatgtagtccctgcta

SEQ ID NO: 106389 - DNA, 25 bp, Artificial
  probe
  misc_feature (1)..(25): SEQ ID NO: 7486; WAN024C6V_at; Start 829; Stop 853
gcacagctaggaaaaactgctttag

SEQ ID NO: 106390 - DNA, 25 bp, Artificial
  probe
  misc_feature (1)..(25): SEQ ID NO: 7486; WAN024C6V_at; Start 624; Stop 648
cttatcatgggctgaacaagccggg

SEQ ID NO: 106391 - DNA, 25 bp, Artificial
  probe
  misc_feature (1)..(25): SEQ ID NO: 7486; WAN024C6V_at; Start 861; Stop 885
taaatcagctctagcatggactgct

SEQ ID NO: 106392 - DNA, 25 bp, Artificial
  probe
  misc_feature (1)..(25): SEQ ID NO: 7486; WAN024C6V_at; Start 794; Stop 818
caaaagattttgtggtcaattcagg

SEQ ID NO: 106393 - DNA, 25 bp, Artificial
  probe
  misc_feature (1)..(25): SEQ ID NO: 7486; WAN024C6V_at; Start 908; Stop 932
caaccgcggcggaatttgcacattc

SEQ ID NO: 106394 - DNA, 25 bp, Artificial
  probe
  misc_feature (1)..(25): SEQ ID NO: 7486; WAN024C6V_at; Start 207; Stop 231
gacaagcgctcctaaaatttcatca

SEQ ID NO: 106395 - DNA, 25 bp, Artificial
  probe
  misc_feature (1)..(25): SEQ ID NO: 7486; WAN024C6V_at; Start 587; Stop 611
tcttggctttgataacaacttggca

SEQ ID NO: 106396 - DNA, 25 bp, Artificial
  probe
  misc_feature (1)..(25): SEQ ID NO: 7486; WAN024C6V_at; Start 129; Stop 153
gagtttgacatctaccattgttgaa

SEQ ID NO: 106397 - DNA, 25 bp, Artificial
  probe
  misc_feature (1)..(25): SEQ ID NO: 7486; WAN024C6V_at; Start 382; Stop 406
gacattattcagattctctgggaga

SEQ ID NO: 106398 - DNA, 25 bp, Artificial
  probe
  misc_feature (1)..(25): SEQ ID NO: 7486; WAN024C6V_at; Start 928; Stop 952
cattctgttgcagcaggagtcgcta

SEQ ID NO: 106399 - DNA, 25 bp, Artificial
  probe
  misc_feature (1)..(25): SEQ ID NO: 7486; WAN024C6V_at; Start 1026; Stop 1050
caatcgcagctttgattgctatcgg

SEQ ID NO: 106400 - DNA, 25 bp, Artificial
  probe
  misc_feature (1)..(25): SEQ ID NO: 7486; WAN024C6V_at; Start 556; Stop 580
tctgactggtgtaaagaaaacaaag

SEQ ID NO: 106401 - DNA, 25 bp, Artificial
  probe
  misc_feature (1)..(25): SEQ ID NO: 7486; WAN024C6V_at; Start 99; Stop 123
tatcggtagcgctattgtgtcaact

SEQ ID NO: 106402 - DNA, 25 bp, Artificial
  probe
  misc_feature (1)..(25): SEQ ID NO: 7486; WAN024C6V_at; Start 648; Stop 672
gggacttgcaggagcattcagcttg

SEQ ID NO: 106403 - DNA, 25 bp, Artificial
  probe
  misc_feature (1)..(25): SEQ ID NO: 7486; WAN024C6V_at; Start 879; Stop 903
gactgctcatgcagcgaaaatggga

SEQ ID NO: 106404 - DNA, 25 bp, Artificial
  probe
  misc_feature (1)..(25): SEQ ID NO: 7486; WAN024C6V_at; Start 84; Stop 108
aactggtgcggttcgtatcggtagc

SEQ ID NO: 106405 - DNA, 25 bp, Artificial
  probe
  misc_feature (1)..(25): SEQ ID NO: 7486; WAN024C6V_at; Start 1011; Stop 1035
aatggattattgcagcaatcgcagc

SEQ ID NO: 106406 - DNA, 25 bp, Artificial
  probe
  misc_feature (1)..(25): SEQ ID NO: 7486; WAN024C6V_at; Start 7; Stop 31
atgttgggtaacctttccgaggcag

SEQ ID NO: 106407 - DNA, 25 bp, Artificial
  probe
  misc_feature (1)..(25): SEQ ID NO: 7486; WAN024C6V_at; Start 980; Stop 1004
cgttagcagtttgtagagcaagtcc

SEQ ID NO: 106408 - DNA, 25 bp, Artificial
  probe
  misc_feature (1)..(25): SEQ ID NO: 7486; WAN024C6V_at; Start 894; Stop 918
gaaaatgggattagcaaccgcggcg

SEQ ID NO: 106409 - DNA, 25 bp, Artificial
  probe
  misc_feature (1)..(25): SEQ ID NO: 7486; WAN024C6V_at; Start 65; Stop 89
tctacgacgtcattacctcaactgg

SEQ ID NO: 106410 - DNA, 25 bp, Artificial
  probe
  misc_feature (1)..(25): SEQ ID NO: 7486; WAN024C6V_at; Start 498; Stop 522
cactttgggactattggcggatgct

SEQ ID NO: 106411 - DNA, 25 bp, Artificial
  probe
  misc_feature (1)..(25): SEQ ID NO: 7486; WAN024C6V_at; Start 294; Stop 318
caaatttggcgatggcttaagtcgt

SEQ ID NO: 106412 - DNA, 25 bp, Artificial
  probe
  misc_feature (1)..(25): SEQ ID NO: 7486; WAN024C6V_at; Start 405; Stop 429
gaattcctggcaaccttttgctgag

SEQ ID NO: 106413 - DNA, 25 bp, Artificial
  probe
  misc_feature (1)..(25): SEQ ID NO: 7486; WAN024C6V_at; Start 467; Stop 491
tttcagatttattaggaggtggcct

SEQ ID NO: 106414 - DNA, 25 bp, Artificial
  probe
  misc_feature (1)..(25): SEQ ID NO: 7486; WAN024C6V_at; Start 962; Stop 986
catgggcttttaatgcagcgttagc

SEQ ID NO: 106415 - DNA, 25 bp, Artificial
  probe
  misc_feature (1)..(25): SEQ ID NO: 7486; WAN024C6V_at; Start 947; Stop 971
tcgctacagctgcaacatgggcttt

SEQ ID NO: 106416 - DNA, 25 bp, Artificial
  probe
  misc_feature (1)..(25): SEQ ID NO: 7486; WAN024C6V_at; Start 252; Stop 276
tactgttgcgcctgtatttgagagc

SEQ ID NO: 106417 - DNA, 25 bp, Artificial
  probe
  misc_feature (1)..(25): SEQ ID NO: 7523; WAN024C6W_at; Start 563; Stop 587
caacggttcaaagcatatttgtcaa

SEQ ID NO: 106418 - DNA, 25 bp, Artificial
  probe
  misc_feature (1)..(25): SEQ ID NO: 7523; WAN024C6W_at; Start 450; Stop 474
tacaagtgttcttgcgaatgtatct

SEQ ID NO: 106419 - DNA, 25 bp, Artificial
  probe
  misc_feature (1)..(25): SEQ ID NO: 7523; WAN024C6W_at; Start 330; Stop 354
gactagtgctttggctaatatcggg

SEQ ID NO: 106420 - DNA, 25 bp, Artificial
  probe
  misc_feature (1)..(25): SEQ ID NO: 7523; WAN024C6W_at; Start 242; Stop 266
tctctggtgtattccaaggtgcatg

SEQ ID NO: 106421 - DNA, 25 bp, Artificial
  probe
  misc_feature (1)..(25): SEQ ID NO: 7523; WAN024C6W_at; Start 594; Stop 618
acaaaaggttggtagcgctgtaggt

SEQ ID NO: 106422 - DNA, 25 bp, Artificial
  probe
  misc_feature (1)..(25): SEQ ID NO: 7523; WAN024C6W_at; Start 479; Stop 503
ggtttgggaatatgtttactagtgc

SEQ ID NO: 106423 - DNA, 25 bp, Artificial
  probe
  misc_feature (1)..(25): SEQ ID NO: 7523; WAN024C6W_at; Start 64; Stop 88
gcatggcaaggactatgtgatttta

SEQ ID NO: 106424 - DNA, 25 bp, Artificial
  probe
  misc_feature (1)..(25): SEQ ID NO: 7523; WAN024C6W_at; Start 582; Stop 606
tgtcaatgctggacaaaaggttggt

SEQ ID NO: 106425 - DNA, 25 bp, Artificial
  probe
  misc_feature (1)..(25): SEQ ID NO: 7523; WAN024C6W_at; Start 176; Stop 200
ttggcgagaagttccagcaagcatg

SEQ ID NO: 106426 - DNA, 25 bp, Artificial
  probe
  misc_feature (1)..(25): SEQ ID NO: 7523; WAN024C6W_at; Start 190; Stop 214
cagcaagcatgggatgccattgtca

SEQ ID NO: 106427 - DNA, 25 bp, Artificial
  probe
  misc_feature (1)..(25): SEQ ID NO: 7523; WAN024C6W_at; Start 93; Stop 117
tggtatttgtcgagctattggcgaa

SEQ ID NO: 106428 - DNA, 25 bp, Artificial
  probe
  misc_feature (1)..(25): SEQ ID NO: 7523; WAN024C6W_at; Start 382; Stop 406
gcatggactggtctaacaaacatct

SEQ ID NO: 106429 - DNA, 25 bp, Artificial
  probe
  misc_feature (1)..(25): SEQ ID NO: 7523; WAN024C6W_at; Start 313; Stop 337
caacgttgggcagatgtgactagtg

SEQ ID NO: 106430 - DNA, 25 bp, Artificial
  probe
  misc_feature (1)..(25): SEQ ID NO: 7523; WAN024C6W_at; Start 130; Stop 154
ctatggacaaaactacaagaaatct

SEQ ID NO: 106431 - DNA, 25 bp, Artificial
  probe
  misc_feature (1)..(25): SEQ ID NO: 7523; WAN024C6W_at; Start 495; Stop 519
tactagtgcttataatgcagtcaag

SEQ ID NO: 106432 - DNA, 25 bp, Artificial
  probe
  misc_feature (1)..(25): SEQ ID NO: 7523; WAN024C6W_at; Start 277; Stop 301
gttaatatcttcactccaatcggct

SEQ ID NO: 106433 - DNA, 25 bp, Artificial
  probe
  misc_feature (1)..(25): SEQ ID NO: 7523; WAN024C6W_at; Start 548; Stop 572
tcagcggtgtatggtcaacggttca

SEQ ID NO: 106434 - DNA, 25 bp, Artificial
  probe
  misc_feature (1)..(25): SEQ ID NO: 7523; WAN024C6W_at; Start 49; Stop 73
gagtttgctaaaactgcatggcaag

SEQ ID NO: 106435 - DNA, 25 bp, Artificial
  probe
  misc_feature (1)..(25): SEQ ID NO: 7523; WAN024C6W_at; Start 395; Stop 419
taacaaacatctttagcaaactagg

SEQ ID NO: 106436 - DNA, 25 bp, Artificial
  probe
  misc_feature (1)..(25): SEQ ID NO: 7523; WAN024C6W_at; Start 507; Stop 531
taatgcagtcaagaacgcgtttagt

SEQ ID NO: 106437 - DNA, 25 bp, Artificial
  probe
  misc_feature (1)..(25): SEQ ID NO: 7523; WAN024C6W_at; Start 367; Stop 391
gacatattccaaaaagcatggactg

SEQ ID NO: 106438 - DNA, 25 bp, Artificial
  probe
  misc_feature (1)..(25): SEQ ID NO: 7523; WAN024C6W_at; Start 293; Stop 317
caatcggctcatggtttggacaacg

SEQ ID NO: 106439 - DNA, 25 bp, Artificial
  probe
  misc_feature (1)..(25): SEQ ID NO: 7523; WAN024C6W_at; Start 221; Stop 245
tctctggtatcggagagtggttctc

SEQ ID NO: 106440 - DNA, 25 bp, Artificial
  probe
  misc_feature (1)..(25): SEQ ID NO: 7523; WAN024C6W_at; Start 464; Stop 488
cgaatgtatcttcttggtttgggaa

SEQ ID NO: 106441 - DNA, 25 bp, Artificial
  probe
  misc_feature (1)..(25): SEQ ID NO: 7523; WAN024C6W_at; Start 114; Stop 138
cgaatttttcagtggtctatggaca

SEQ ID NO: 106442 - DNA, 25 bp, Artificial
  probe
  misc_feature (1)..(25): SEQ ID NO: 7523; WAN024C6W_at; Start 160; Stop 184
ccgataggtcaatggtttggcgaga

SEQ ID NO: 106443 - DNA, 25 bp, Artificial
  probe
  misc_feature (1)..(25): SEQ ID NO: 7523; WAN024C6W_at; Start 210; Stop 234
tgtcaacatcttctctggtatcgga

SEQ ID NO: 106444 - DNA, 25 bp, Artificial
  probe
  misc_feature (1)..(25): SEQ ID NO: 7523; WAN024C6W_at; Start 302; Stop 326
catggtttggacaacgttgggcaga

SEQ ID NO: 106445 - DNA, 25 bp, Artificial
  probe
  misc_feature (1)..(25): SEQ ID NO: 7523; WAN024C6W_at; Start 533; Stop 557
caattggtggcttcttcagcggtgt

SEQ ID NO: 106446 - DNA, 25 bp, Artificial
  probe
  misc_feature (1)..(25): SEQ ID NO: 7523; WAN024C6W_at; Start 353; Stop 377
gggcatggtttactgacatattcca

SEQ ID NO: 106447 - DNA, 25 bp, Artificial
  probe
  misc_feature (1)..(25): SEQ ID NO: 7523; WAN024C6W_at; Start 522; Stop 546
cgcgtttagttcaattggtggcttc

SEQ ID NO: 106448 - DNA, 25 bp, Artificial
  probe
  misc_feature (1)..(25): SEQ ID NO: 7523; WAN024C6W_at; Start 145; Stop 169
caagaaatctttgagccgataggtc

SEQ ID NO: 106449 - DNA, 25 bp, Artificial
  probe
  misc_feature (1)..(25): SEQ ID NO: 7523; WAN024C6W_at; Start 35; Stop 59
gggacactgttgttgagtttgctaa

SEQ ID NO: 106450 - DNA, 25 bp, Artificial
  probe
  misc_feature (1)..(25): SEQ ID NO: 7523; WAN024C6W_at; Start 437; Stop 461
gatgggcagatgttacaagtgttct

SEQ ID NO: 106451 - DNA, 25 bp, Artificial
  probe
  misc_feature (1)..(25): SEQ ID NO: 869; WAN024C6X_at; Start 316; Stop 340
cagaacggttctgtgcttgggatcc

SEQ ID NO: 106452 - DNA, 25 bp, Artificial
  probe
  misc_feature (1)..(25): SEQ ID NO: 869; WAN024C6X_at; Start 174; Stop 198
tcttgtccacatgacgcttgggcga

SEQ ID NO: 106453 - DNA, 25 bp, Artificial
  probe
  misc_feature (1)..(25): SEQ ID NO: 869; WAN024C6X_at; Start 103; Stop 127
gagaggaataccctcagcaaatgtc

SEQ ID NO: 106454 - DNA, 25 bp, Artificial
  probe
  misc_feature (1)..(25): SEQ ID NO: 869; WAN024C6X_at; Start 294; Stop 318
gcgccaagtcatccaacaagtccag

SEQ ID NO: 106455 - DNA, 25 bp, Artificial
  probe
  misc_feature (1)..(25): SEQ ID NO: 869; WAN024C6X_at; Start 305; Stop 329
tccaacaagtccagaacggttctgt

SEQ ID NO: 106456 - DNA, 25 bp, Artificial
  probe
  misc_feature (1)..(25): SEQ ID NO: 869; WAN024C6X_at; Start 125; Stop 149
gtctccacatcttcttgggtcatga

SEQ ID NO: 106457 - DNA, 25 bp, Artificial
  probe
  misc_feature (1)..(25): SEQ ID NO: 869; WAN024C6X_at; Start 230; Stop 254
gtcaagagcaaaagaccatgcgtgt

SEQ ID NO: 106458 - DNA, 25 bp, Artificial
  probe
  misc_feature (1)..(25): SEQ ID NO: 869; WAN024C6X_at; Start 93; Stop 117
taaagtctttgagaggaataccctc

SEQ ID NO: 106459 - DNA, 25 bp, Artificial
  probe
  misc_feature (1)..(25): SEQ ID NO: 869; WAN024C6X_at; Start 207; Stop 231
catgagccagctgaccatcattggt

SEQ ID NO: 106460 - DNA, 25 bp, Artificial
  probe
  misc_feature (1)..(25): SEQ ID NO: 869; WAN024C6X_at; Start 256; Stop 280
aatatccaagcgtcctactgggaaa

SEQ ID NO: 106461 - DNA, 25 bp, Artificial
  probe
  misc_feature (1)..(25): SEQ ID NO: 869; WAN024C6X_at; Start 170; Stop 194
taagtcttgtccacatgacgcttgg

SEQ ID NO: 106462 - DNA, 25 bp, Artificial
  probe
  misc_feature (1)..(25): SEQ ID NO: 869; WAN024C6X_at; Start 280; Stop 304
aacttccttactccgcgccaagtca

SEQ ID NO: 106463 - DNA, 25 bp, Artificial
  probe
  misc_feature (1)..(25): SEQ ID NO: 869; WAN024C6X_at; Start 327; Stop 351
tgtgcttgggatcctcagtcgctga

SEQ ID NO: 106464 - DNA, 25 bp, Artificial
  probe
  misc_feature (1)..(25): SEQ ID NO: 869; WAN024C6X_at; Start 197; Stop 221
gaaagaagaacatgagccagctgac

SEQ ID NO: 106465 - DNA, 25 bp, Artificial
  probe
  misc_feature (1)..(25): SEQ ID NO: 869; WAN024C6X_at; Start 221; Stop 245
ccatcattggtcaagagcaaaagac

SEQ ID NO: 106466 - DNA, 25 bp, Artificial
  probe
  misc_feature (1)..(25): SEQ ID NO: 869; WAN024C6X_at; Start 145; Stop 169
catgattcccttgacttgtgccaga

SEQ ID NO: 106467 - DNA, 25 bp, Artificial
  probe
  misc_feature (1)..(25): SEQ ID NO: 869; WAN024C6X_at; Start 202; Stop 226
aagaacatgagccagctgaccatca

SEQ ID NO: 106468 - DNA, 25 bp, Artificial
  probe
  misc_feature (1)..(25): SEQ ID NO: 869; WAN024C6X_at; Start 190; Stop 214
cttgggcgaaagaagaacatgagcc

SEQ ID NO: 106469 - DNA, 25 bp, Artificial
  probe
  misc_feature (1)..(25): SEQ ID NO: 869; WAN024C6X_at; Start 15; Stop 39
ctgcaatggtcacacggatttggct

SEQ ID NO: 106470 - DNA, 25 bp, Artificial
  probe
  misc_feature (1)..(25): SEQ ID NO: 869; WAN024C6X_at; Start 132; Stop 156
catcttcttgggtcatgattccctt

SEQ ID NO: 106471 - DNA, 25 bp, Artificial
  probe
  misc_feature (1)..(25): SEQ ID NO: 869; WAN024C6X_at; Start 148; Stop 172
gattcccttgacttgtgccagataa

SEQ ID NO: 106472 - DNA, 25 bp, Artificial
  probe
  misc_feature (1)..(25): SEQ ID NO: 869; WAN024C6X_at; Start 259; Stop 283
atccaagcgtcctactgggaaaact

SEQ ID NO: 106473 - DNA, 25 bp, Artificial
  probe
  misc_feature (1)..(25): SEQ ID NO: 869; WAN024C6X_at; Start 299; Stop 323
aagtcatccaacaagtccagaacgg

SEQ ID NO: 106474 - DNA, 25 bp, Artificial
  probe
  misc_feature (1)..(25): SEQ ID NO: 869; WAN024C6X_at; Start 3; Stop 27
gaaacttcccttctgcaatggtcac

SEQ ID NO: 106475 - DNA, 25 bp, Artificial
  probe
  misc_feature (1)..(25): SEQ ID NO: 869; WAN024C6X_at; Start 179; Stop 203
tccacatgacgcttgggcgaaagaa

SEQ ID NO: 106476 - DNA, 25 bp, Artificial
  probe
  misc_feature (1)..(25): SEQ ID NO: 869; WAN024C6X_at; Start 166; Stop 190
cagataagtcttgtccacatgacgc

SEQ ID NO: 106477 - DNA, 25 bp, Artificial
  probe
  misc_feature (1)..(25): SEQ ID NO: 869; WAN024C6X_at; Start 119; Stop 143
gcaaatgtctccacatcttcttggg

SEQ ID NO: 106478 - DNA, 25 bp, Artificial
  probe
  misc_feature (1)..(25): SEQ ID NO: 869; WAN024C6X_at; Start 186; Stop 210
gacgcttgggcgaaagaagaacatg

SEQ ID NO: 106479 - DNA, 25 bp, Artificial
  probe
  misc_feature (1)..(25): SEQ ID NO: 869; WAN024C6X_at; Start 10; Stop 34
cccttctgcaatggtcacacggatt

SEQ ID NO: 106480 - DNA, 25 bp, Artificial
  probe
  misc_feature (1)..(25): SEQ ID NO: 869; WAN024C6X_at; Start 319; Stop 343
aacggttctgtgcttgggatcctca

SEQ ID NO: 106481 - DNA, 25 bp, Artificial
  probe
  misc_feature (1)..(25): SEQ ID NO: 869; WAN024C6X_at; Start 157; Stop 181
gacttgtgccagataagtcttgtcc

SEQ ID NO: 106482 - DNA, 25 bp, Artificial
  probe
  misc_feature (1)..(25): SEQ ID NO: 869; WAN024C6X_at; Start 108; Stop 132
gaataccctcagcaaatgtctccac

SEQ ID NO: 106483 - DNA, 25 bp, Artificial
  probe
  misc_feature (1)..(25): SEQ ID NO: 869; WAN024C6X_at; Start 212; Stop 236
gccagctgaccatcattggtcaaga

SEQ ID NO: 106484 - DNA, 25 bp, Artificial
  probe
  misc_feature (1)..(25): SEQ ID NO: 869; WAN024C6X_at; Start 86; Stop 110
tgacaggtaaagtctttgagaggaa

SEQ ID NO: 106485 - DNA, 25 bp, Artificial
  probe
  misc_feature (1)..(25): SEQ ID NO: 1551; WAN024C6Y_at; Start 553; Stop 577
gaagggaagtttcatcagatcaagc

SEQ ID NO: 106486 - DNA, 25 bp, Artificial
  probe
  misc_feature (1)..(25): SEQ ID NO: 1551; WAN024C6Y_at; Start 375; Stop 399
caagcgtcatgtggacaagacttat

SEQ ID NO: 106487 - DNA, 25 bp, Artificial
  probe
  misc_feature (1)..(25): SEQ ID NO: 1551; WAN024C6Y_at; Start 608; Stop 632
tggacttgcaacgattgactatggg

SEQ ID NO: 106488 - DNA, 25 bp, Artificial
  probe
  misc_feature (1)..(25): SEQ ID NO: 1551; WAN024C6Y_at; Start 366; Stop 390
tctttcgcccaagcgtcatgtggac

SEQ ID NO: 106489 - DNA, 25 bp, Artificial
  probe
  misc_feature (1)..(25): SEQ ID NO: 1551; WAN024C6Y_at; Start 172; Stop 196
gaagagtttgtctactacatgatga

SEQ ID NO: 106490 - DNA, 25 bp, Artificial
  probe
  misc_feature (1)..(25): SEQ ID NO: 1551; WAN024C6Y_at; Start 242; Stop 266
gaaccgttctggacttgttggatga

SEQ ID NO: 106491 - DNA, 25 bp, Artificial
  probe
  misc_feature (1)..(25): SEQ ID NO: 1551; WAN024C6Y_at; Start 60; Stop 84
cttgctcaaggctgggcgcgtgact

SEQ ID NO: 106492 - DNA, 25 bp, Artificial
  probe
  misc_feature (1)..(25): SEQ ID NO: 1551; WAN024C6Y_at; Start 184; Stop 208
tactacatgatgaacaagcccaaag

SEQ ID NO: 106493 - DNA, 25 bp, Artificial
  probe
  misc_feature (1)..(25): SEQ ID NO: 1551; WAN024C6Y_at; Start 615; Stop 639
gcaacgattgactatgggaacttta

SEQ ID NO: 106494 - DNA, 25 bp, Artificial
  probe
  misc_feature (1)..(25): SEQ ID NO: 1551; WAN024C6Y_at; Start 219; Stop 243
agcgactgaggatcccaagcacaga

SEQ ID NO: 106495 - DNA, 25 bp, Artificial
  probe
  misc_feature (1)..(25): SEQ ID NO: 1551; WAN024C6Y_at; Start 597; Stop 621
caaggaagtggtggacttgcaacga

SEQ ID NO: 106496 - DNA, 25 bp, Artificial
  probe
  misc_feature (1)..(25): SEQ ID NO: 1551; WAN024C6Y_at; Start 675; Stop 699
tcgcttgaccaaggaagaattagaa

SEQ ID NO: 106497 - DNA, 25 bp, Artificial
  probe
  misc_feature (1)..(25): SEQ ID NO: 1551; WAN024C6Y_at; Start 354; Stop 378
ggctcatgttcttctttcgcccaag

SEQ ID NO: 106498 - DNA, 25 bp, Artificial
  probe
  misc_feature (1)..(25): SEQ ID NO: 1551; WAN024C6Y_at; Start 570; Stop 594
gatcaagcgtatggtgggctactgt

SEQ ID NO: 106499 - DNA, 25 bp, Artificial
  probe
  misc_feature (1)..(25): SEQ ID NO: 1551; WAN024C6Y_at; Start 345; Stop 369
tggtcagctggctcatgttcttctt

SEQ ID NO: 106500 - DNA, 25 bp, Artificial
  probe
  misc_feature (1)..(25): SEQ ID NO: 1551; WAN024C6Y_at; Start 189; Stop 213
catgatgaacaagcccaaaggagtt

SEQ ID NO: 106501 - DNA, 25 bp, Artificial
  probe
  misc_feature (1)..(25): SEQ ID NO: 1551; WAN024C6Y_at; Start 564; Stop 588
tcatcagatcaagcgtatggtgggc

SEQ ID NO: 106502 - DNA, 25 bp, Artificial
  probe
  misc_feature (1)..(25): SEQ ID NO: 1551; WAN024C6Y_at; Start 667; Stop 691
gaatggcgtcgcttgaccaaggaag

SEQ ID NO: 106503 - DNA, 25 bp, Artificial
  probe
  misc_feature (1)..(25): SEQ ID NO: 1551; WAN024C6Y_at; Start 530; Stop 554
gccaaatccgtgtgaccattgcaga

SEQ ID NO: 106504 - DNA, 25 bp, Artificial
  probe
  misc_feature (1)..(25): SEQ ID NO: 1551; WAN024C6Y_at; Start 250; Stop 274
ctggacttgttggatgacttggcgc

SEQ ID NO: 106505 - DNA, 25 bp, Artificial
  probe
  misc_feature (1)..(25): SEQ ID NO: 1551; WAN024C6Y_at; Start 26; Stop 50
cctgtgcggtgggaagtcggactga

SEQ ID NO: 106506 - DNA, 25 bp, Artificial
  probe
  misc_feature (1)..(25): SEQ ID NO: 1551; WAN024C6Y_at; Start 41; Stop 65
gtcggactgaggtcaaaaacttgct

SEQ ID NO: 106507 - DNA, 25 bp, Artificial
  probe
  misc_feature (1)..(25): SEQ ID NO: 1551; WAN024C6Y_at; Start 700; Stop 724
attctccgcgctaatattatttaac

SEQ ID NO: 106508 - DNA, 25 bp, Artificial
  probe
  misc_feature (1)..(25): SEQ ID NO: 1551; WAN024C6Y_at; Start 74; Stop 98
ggcgcgtgactgtaaatggtaaaaa

SEQ ID NO: 106509 - DNA, 25 bp, Artificial
  probe
  misc_feature (1)..(25): SEQ ID NO: 1551; WAN024C6Y_at; Start 53; Stop 77
tcaaaaacttgctcaaggctgggcg

SEQ ID NO: 106510 - DNA, 25 bp, Artificial
  probe
  misc_feature (1)..(25): SEQ ID NO: 1551; WAN024C6Y_at; Start 228; Stop 252
ggatcccaagcacagaaccgttctg

SEQ ID NO: 106511 - DNA, 25 bp, Artificial
  probe
  misc_feature (1)..(25): SEQ ID NO: 1551; WAN024C6Y_at; Start 156; Stop 180
gcaagtgttggagtatgaagagttt

SEQ ID NO: 106512 - DNA, 25 bp, Artificial
  probe
  misc_feature (1)..(25): SEQ ID NO: 1551; WAN024C6Y_at; Start 632; Stop 656
gaactttagtattagatgagaacct

SEQ ID NO: 106513 - DNA, 25 bp, Artificial
  probe
  misc_feature (1)..(25): SEQ ID NO: 1551; WAN024C6Y_at; Start 16; Stop 40
tttttagttgcctgtgcggtgggaa

SEQ ID NO: 106514 - DNA, 25 bp, Artificial
  probe
  misc_feature (1)..(25): SEQ ID NO: 1551; WAN024C6Y_at; Start 536; Stop 560
tccgtgtgaccattgcagaagggaa

SEQ ID NO: 106515 - DNA, 25 bp, Artificial
  probe
  misc_feature (1)..(25): SEQ ID NO: 1551; WAN024C6Y_at; Start 544; Stop 568
accattgcagaagggaagtttcatc

SEQ ID NO: 106516 - DNA, 25 bp, Artificial
  probe
  misc_feature (1)..(25): SEQ ID NO: 1551; WAN024C6Y_at; Start 314; Stop 338
acacgcatggtcttttgctcttgac

SEQ ID NO: 106517 - DNA, 25 bp, Artificial
  probe
  misc_feature (1)..(25): SEQ ID NO: 1551; WAN024C6Y_at; Start 10; Stop 34
gataaatttttagttgcctgtgcgg

SEQ ID NO: 106518 - DNA, 25 bp, Artificial
  probe
  misc_feature (1)..(25): SEQ ID NO: 1551; WAN024C6Y_at; Start 688; Stop 712
gaagaattagaaattctccgcgcta

SEQ ID NO: 106519 - DNA, 25 bp, Artificial
  probe
  misc_feature (1)..(25): SEQ ID NO: 2889; WAN024C6Z_at; Start 32; Stop 56
tcatcgatatcgtggaagttaaagt

SEQ ID NO: 106520 - DNA, 25 bp, Artificial
  probe
  misc_feature (1)..(25): SEQ ID NO: 2889; WAN024C6Z_at; Start 413; Stop 437
ccaaggaaggtctcaaacggaatat

SEQ ID NO: 106521 - DNA, 25 bp, Artificial
  probe
  misc_feature (1)..(25): SEQ ID NO: 2889; WAN024C6Z_at; Start 431; Stop 455
ggaatatcctgtccgtttttactga

SEQ ID NO: 106522 - DNA, 25 bp, Artificial
  probe
  misc_feature (1)..(25): SEQ ID NO: 2889; WAN024C6Z_at; Start 382; Stop 406
gtcaatatcaggaaccttatcccca

SEQ ID NO: 106523 - DNA, 25 bp, Artificial
  probe
  misc_feature (1)..(25): SEQ ID NO: 2889; WAN024C6Z_at; Start 368; Stop 392
cccgagaagttcaagtcaatatcag

SEQ ID NO: 106524 - DNA, 25 bp, Artificial
  probe
  misc_feature (1)..(25): SEQ ID NO: 2889; WAN024C6Z_at; Start 464; Stop 488
ccacagtttggacagtccttatggg

SEQ ID NO: 106525 - DNA, 25 bp, Artificial
  probe
  misc_feature (1)..(25): SEQ ID NO: 2889; WAN024C6Z_at; Start 212; Stop 236
tctgcatcacgataaaacttgccat

SEQ ID NO: 106526 - DNA, 25 bp, Artificial
  probe
  misc_feature (1)..(25): SEQ ID NO: 2889; WAN024C6Z_at; Start 444; Stop 468
cgtttttactgagtttgtgaccaca

SEQ ID NO: 106527 - DNA, 25 bp, Artificial
  probe
  misc_feature (1)..(25): SEQ ID NO: 2889; WAN024C6Z_at; Start 104; Stop 128
ggcgtaaaatcgtagacatccatgt

SEQ ID NO: 106528 - DNA, 25 bp, Artificial
  probe
  misc_feature (1)..(25): SEQ ID NO: 2889; WAN024C6Z_at; Start 126; Stop 150
tgtagttcggaataacaacgattcc

SEQ ID NO: 106529 - DNA, 25 bp, Artificial
  probe
  misc_feature (1)..(25): SEQ ID NO: 2889; WAN024C6Z_at; Start 10; Stop 34
tacatcgagtttgaggacgttctca

SEQ ID NO: 106530 - DNA, 25 bp, Artificial
  probe
  misc_feature (1)..(25): SEQ ID NO: 2889; WAN024C6Z_at; Start 314; Stop 338
tattcttcaccaaagatatcacgca

SEQ ID NO: 106531 - DNA, 25 bp, Artificial
  probe
  misc_feature (1)..(25): SEQ ID NO: 2889; WAN024C6Z_at; Start 22; Stop 46
gaggacgttctcatcgatatcgtgg

SEQ ID NO: 106532 - DNA, 25 bp, Artificial
  probe
  misc_feature (1)..(25): SEQ ID NO: 2889; WAN024C6Z_at; Start 227; Stop 251
aacttgccataatctcgctcgtaac

SEQ ID NO: 106533 - DNA, 25 bp, Artificial
  probe
  misc_feature (1)..(25): SEQ ID NO: 2889; WAN024C6Z_at; Start 296; Stop 320
gttcccgcacggaaggcatattctt

SEQ ID NO: 106534 - DNA, 25 bp, Artificial
  probe
  misc_feature (1)..(25): SEQ ID NO: 2889; WAN024C6Z_at; Start 57; Stop 81
gagtggtctgccattcagccgtgac

SEQ ID NO: 106535 - DNA, 25 bp, Artificial
  probe
  misc_feature (1)..(25): SEQ ID NO: 2889; WAN024C6Z_at; Start 68; Stop 92
cattcagccgtgacatcatctgctg

SEQ ID NO: 106536 - DNA, 25 bp, Artificial
  probe
  misc_feature (1)..(25): SEQ ID NO: 2889; WAN024C6Z_at; Start 187; Stop 211
cgctccttgagcgaggcgttctact

SEQ ID NO: 106537 - DNA, 25 bp, Artificial
  probe
  misc_feature (1)..(25): SEQ ID NO: 2889; WAN024C6Z_at; Start 46; Stop 70
gaagttaaagtgagtggtctgccat

SEQ ID NO: 106538 - DNA, 25 bp, Artificial
  probe
  misc_feature (1)..(25): SEQ ID NO: 2889; WAN024C6Z_at; Start 457; Stop 481
tttgtgaccacagtttggacagtcc

SEQ ID NO: 106539 - DNA, 25 bp, Artificial
  probe
  misc_feature (1)..(25): SEQ ID NO: 2889; WAN024C6Z_at; Start 397; Stop 421
cttatccccatcaaaaccaaggaag

SEQ ID NO: 106540 - DNA, 25 bp, Artificial
  probe
  misc_feature (1)..(25): SEQ ID NO: 2889; WAN024C6Z_at; Start 2; Stop 26
tgtcccagtacatcgagtttgagga

SEQ ID NO: 106541 - DNA, 25 bp, Artificial
  probe
  misc_feature (1)..(25): SEQ ID NO: 2889; WAN024C6Z_at; Start 303; Stop 327
cacggaaggcatattcttcaccaaa

SEQ ID NO: 106542 - DNA, 25 bp, Artificial
  probe
  misc_feature (1)..(25): SEQ ID NO: 2889; WAN024C6Z_at; Start 83; Stop 107
tcatctgctggatactggacaggcg

SEQ ID NO: 106543 - DNA, 25 bp, Artificial
  probe
  misc_feature (1)..(25): SEQ ID NO: 2889; WAN024C6Z_at; Start 352; Stop 376
gctaggctgatcttctcccgagaag

SEQ ID NO: 106544 - DNA, 25 bp, Artificial
  probe
  misc_feature (1)..(25): SEQ ID NO: 2889; WAN024C6Z_at; Start 421; Stop 445
ggtctcaaacggaatatcctgtccg

SEQ ID NO: 106545 - DNA, 25 bp, Artificial
  probe
  misc_feature (1)..(25): SEQ ID NO: 2889; WAN024C6Z_at; Start 156; Stop 180
ggtgttggcctgttgtccgcttgac

SEQ ID NO: 106546 - DNA, 25 bp, Artificial
  probe
  misc_feature (1)..(25): SEQ ID NO: 2889; WAN024C6Z_at; Start 114; Stop 138
cgtagacatccatgtagttcggaat

SEQ ID NO: 106547 - DNA, 25 bp, Artificial
  probe
  misc_feature (1)..(25): SEQ ID NO: 2889; WAN024C6Z_at; Start 199; Stop 223
gaggcgttctacttctgcatcacga

SEQ ID NO: 106548 - DNA, 25 bp, Artificial
  probe
  misc_feature (1)..(25): SEQ ID NO: 2889; WAN024C6Z_at; Start 269; Stop 293
gcagtcttggcagctaccgtaccaa

SEQ ID NO: 106549 - DNA, 25 bp, Artificial
  probe
  misc_feature (1)..(25): SEQ ID NO: 2889; WAN024C6Z_at; Start 328; Stop 352
gatatcacgcacatccaagtgggcg

SEQ ID NO: 106550 - DNA, 25 bp, Artificial
  probe
  misc_feature (1)..(25): SEQ ID NO: 2889; WAN024C6Z_at; Start 255; Stop 279
tgacaaatccataggcagtcttggc

SEQ ID NO: 106551 - DNA, 25 bp, Artificial
  probe
  misc_feature (1)..(25): SEQ ID NO: 2889; WAN024C6Z_at; Start 96; Stop 120
actggacaggcgtaaaatcgtagac

SEQ ID NO: 106552 - DNA, 25 bp, Artificial
  probe
  misc_feature (1)..(25): SEQ ID NO: 2889; WAN024C6Z_at; Start 341; Stop 365
tccaagtgggcgctaggctgatctt

SEQ ID NO: 106553 - DNA, 25 bp, Artificial
  probe
  misc_feature (1)..(25): SEQ ID NO: 1570; WAN024C72_at; Start 107; Stop 131
tcttcttccggttcgatatagtgaa

SEQ ID NO: 106554 - DNA, 25 bp, Artificial
  probe
  misc_feature (1)..(25): SEQ ID NO: 1570; WAN024C72_at; Start 159; Stop 183
caaggcggtctccaacctctatcaa

SEQ ID NO: 106555 - DNA, 25 bp, Artificial
  probe
  misc_feature (1)..(25): SEQ ID NO: 1570; WAN024C72_at; Start 56; Stop 80
ttaatcatcgcaccctgtcccaaac

SEQ ID NO: 106556 - DNA, 25 bp, Artificial
  probe
  misc_feature (1)..(25): SEQ ID NO: 1570; WAN024C72_at; Start 148; Stop 172
aacaggcttgccaaggcggtctcca

SEQ ID NO: 106557 - DNA, 25 bp, Artificial
  probe
  misc_feature (1)..(25): SEQ ID NO: 1570; WAN024C72_at; Start 165; Stop 189
ggtctccaacctctatcaaactctt

SEQ ID NO: 106558 - DNA, 25 bp, Artificial
  probe
  misc_feature (1)..(25): SEQ ID NO: 1570; WAN024C72_at; Start 121; Stop 145
gatatagtgaacatttcccgtagcc

SEQ ID NO: 106559 - DNA, 25 bp, Artificial
  probe
  misc_feature (1)..(25): SEQ ID NO: 1570; WAN024C72_at; Start 327; Stop 351
ccacgtcaaaaacttcaccctctga

SEQ ID NO: 106560 - DNA, 25 bp, Artificial
  probe
  misc_feature (1)..(25): SEQ ID NO: 1570; WAN024C72_at; Start 248; Stop 272
tagatagccggtggcatgacctcga

SEQ ID NO: 106561 - DNA, 25 bp, Artificial
  probe
  misc_feature (1)..(25): SEQ ID NO: 1570; WAN024C72_at; Start 190; Stop 214
gataatggtctggagttcctccata

SEQ ID NO: 106562 - DNA, 25 bp, Artificial
  probe
  misc_feature (1)..(25): SEQ ID NO: 1570; WAN024C72_at; Start 298; Stop 322
aaccgccgcatccacaccttgagaa

SEQ ID NO: 106563 - DNA, 25 bp, Artificial
  probe
  misc_feature (1)..(25): SEQ ID NO: 1570; WAN024C72_at; Start 252; Stop 276
tagccggtggcatgacctcgataaa

SEQ ID NO: 106564 - DNA, 25 bp, Artificial
  probe
  misc_feature (1)..(25): SEQ ID NO: 1570; WAN024C72_at; Start 83; Stop 107
cggacgataatttcacgataaatct

SEQ ID NO: 106565 - DNA, 25 bp, Artificial
  probe
  misc_feature (1)..(25): SEQ ID NO: 1570; WAN024C72_at; Start 122; Stop 146
atatagtgaacatttcccgtagcca

SEQ ID NO: 106566 - DNA, 25 bp, Artificial
  probe
  misc_feature (1)..(25): SEQ ID NO: 1570; WAN024C72_at; Start 23; Stop 47
ggttgggcatgttcaccatgaccga

SEQ ID NO: 106567 - DNA, 25 bp, Artificial
  probe
  misc_feature (1)..(25): SEQ ID NO: 1570; WAN024C72_at; Start 250; Stop 274
gatagccggtggcatgacctcgata

SEQ ID NO: 106568 - DNA, 25 bp, Artificial
  probe
  misc_feature (1)..(25): SEQ ID NO: 1570; WAN024C72_at; Start 116; Stop 140
ggttcgatatagtgaacatttcccg

SEQ ID NO: 106569 - DNA, 25 bp, Artificial
  probe
  misc_feature (1)..(25): SEQ ID NO: 1570; WAN024C72_at; Start 312; Stop 336
caccttgagaaacgaccacgtcaaa

SEQ ID NO: 106570 - DNA, 25 bp, Artificial
  probe
  misc_feature (1)..(25): SEQ ID NO: 1570; WAN024C72_at; Start 19; Stop 43
tgctggttgggcatgttcaccatga

SEQ ID NO: 106571 - DNA, 25 bp, Artificial
  probe
  misc_feature (1)..(25): SEQ ID NO: 1570; WAN024C72_at; Start 184; Stop 208
actcttgataatggtctggagttcc

SEQ ID NO: 106572 - DNA, 25 bp, Artificial
  probe
  misc_feature (1)..(25): SEQ ID NO: 1570; WAN024C72_at; Start 246; Stop 270
catagatagccggtggcatgacctc

SEQ ID NO: 106573 - DNA, 25 bp, Artificial
  probe
  misc_feature (1)..(25): SEQ ID NO: 1570; WAN024C72_at; Start 203; Stop 227
agttcctccatatccttgacctgct

SEQ ID NO: 106574 - DNA, 25 bp, Artificial
  probe
  misc_feature (1)..(25): SEQ ID NO: 1570; WAN024C72_at; Start 26; Stop 50
tgggcatgttcaccatgaccgatag

SEQ ID NO: 106575 - DNA, 25 bp, Artificial
  probe
  misc_feature (1)..(25): SEQ ID NO: 1570; WAN024C72_at; Start 95; Stop 119
tcacgataaatctcttcttccggtt

SEQ ID NO: 106576 - DNA, 25 bp, Artificial
  probe
  misc_feature (1)..(25): SEQ ID NO: 1570; WAN024C72_at; Start 162; Stop 186
ggcggtctccaacctctatcaaact

SEQ ID NO: 106577 - DNA, 25 bp, Artificial
  probe
  misc_feature (1)..(25): SEQ ID NO: 1570; WAN024C72_at; Start 76; Stop 100
caaactacggacgataatttcacga

SEQ ID NO: 106578 - DNA, 25 bp, Artificial
  probe
  misc_feature (1)..(25): SEQ ID NO: 1570; WAN024C72_at; Start 201; Stop 225
ggagttcctccatatccttgacctg

SEQ ID NO: 106579 - DNA, 25 bp, Artificial
  probe
  misc_feature (1)..(25): SEQ ID NO: 1570; WAN024C72_at; Start 69; Stop 93
cctgtcccaaactacggacgataat

SEQ ID NO: 106580 - DNA, 25 bp, Artificial
  probe
  misc_feature (1)..(25): SEQ ID NO: 1570; WAN024C72_at; Start 110; Stop 134
tcttccggttcgatatagtgaacat

SEQ ID NO: 106581 - DNA, 25 bp, Artificial
  probe
  misc_feature (1)..(25): SEQ ID NO: 1570; WAN024C72_at; Start 99; Stop 123
gataaatctcttcttccggttcgat

SEQ ID NO: 106582 - DNA, 25 bp, Artificial
  probe
  misc_feature (1)..(25): SEQ ID NO: 1570; WAN024C72_at; Start 280; Stop 304
ataatacttggccacctcaaccgcc

SEQ ID NO: 106583 - DNA, 25 bp, Artificial
  probe
  misc_feature (1)..(25): SEQ ID NO: 1570; WAN024C72_at; Start 180; Stop 204
tcaaactcttgataatggtctggag

SEQ ID NO: 106584 - DNA, 25 bp, Artificial
  probe
  misc_feature (1)..(25): SEQ ID NO: 1570; WAN024C72_at; Start 6; Stop 30
cctttggaagtggtgctggttgggc

SEQ ID NO: 106585 - DNA, 25 bp, Artificial
  probe
  misc_feature (1)..(25): SEQ ID NO: 1570; WAN024C72_at; Start 155; Stop 179
ttgccaaggcggtctccaacctcta

SEQ ID NO: 106586 - DNA, 25 bp, Artificial
  probe
  misc_feature (1)..(25): SEQ ID NO: 1570; WAN024C72_at; Start 30; Stop 54
catgttcaccatgaccgatagttcg

SEQ ID NO: 106587 - DNA, 25 bp, Artificial
  probe
  misc_feature (1)..(25): SEQ ID NO: 5395; WAN024C73_at; Start 153; Stop 177
gaggtgccatctgctccagttgttc

SEQ ID NO: 106588 - DNA, 25 bp, Artificial
  probe
  misc_feature (1)..(25): SEQ ID NO: 5395; WAN024C73_at; Start 164; Stop 188
tgctccagttgttccatagcacgga

SEQ ID NO: 106589 - DNA, 25 bp, Artificial
  probe
  misc_feature (1)..(25): SEQ ID NO: 5395; WAN024C73_at; Start 248; Stop 272
tgctcttgggtcaggacatcattct

SEQ ID NO: 106590 - DNA, 25 bp, Artificial
  probe
  misc_feature (1)..(25): SEQ ID NO: 5395; WAN024C73_at; Start 216; Stop 240
tctgctcattttcagcatgaaaggc

SEQ ID NO: 106591 - DNA, 25 bp, Artificial
  probe
  misc_feature (1)..(25): SEQ ID NO: 5395; WAN024C73_at; Start 180; Stop 204
tagcacggagcgcttcctcattggc

SEQ ID NO: 106592 - DNA, 25 bp, Artificial
  probe
  misc_feature (1)..(25): SEQ ID NO: 5395; WAN024C73_at; Start 267; Stop 291
cattcttctcgacttgacagttaaa

SEQ ID NO: 106593 - DNA, 25 bp, Artificial
  probe
  misc_feature (1)..(25): SEQ ID NO: 5395; WAN024C73_at; Start 158; Stop 182
gccatctgctccagttgttccatag

SEQ ID NO: 106594 - DNA, 25 bp, Artificial
  probe
  misc_feature (1)..(25): SEQ ID NO: 5395; WAN024C73_at; Start 169; Stop 193
cagttgttccatagcacggagcgct

SEQ ID NO: 106595 - DNA, 25 bp, Artificial
  probe
  misc_feature (1)..(25): SEQ ID NO: 5395; WAN024C73_at; Start 17; Stop 41
acaaccccttcaaataccagacgat

SEQ ID NO: 106596 - DNA, 25 bp, Artificial
  probe
  misc_feature (1)..(25): SEQ ID NO: 5395; WAN024C73_at; Start 198; Stop 222
cattggcagcttgaacaatctgctc

SEQ ID NO: 106597 - DNA, 25 bp, Artificial
  probe
  misc_feature (1)..(25): SEQ ID NO: 5395; WAN024C73_at; Start 136; Stop 160
tttctcttccgctggaggaggtgcc

SEQ ID NO: 106598 - DNA, 25 bp, Artificial
  probe
  misc_feature (1)..(25): SEQ ID NO: 5395; WAN024C73_at; Start 173; Stop 197
tgttccatagcacggagcgcttcct

SEQ ID NO: 106599 - DNA, 25 bp, Artificial
  probe
  misc_feature (1)..(25): SEQ ID NO: 5395; WAN024C73_at; Start 55; Stop 79
cacttcgatcataggagtaatctcc

SEQ ID NO: 106600 - DNA, 25 bp, Artificial
  probe
  misc_feature (1)..(25): SEQ ID NO: 5395; WAN024C73_at; Start 143; Stop 167
tccgctggaggaggtgccatctgct

SEQ ID NO: 106601 - DNA, 25 bp, Artificial
  probe
  misc_feature (1)..(25): SEQ ID NO: 5395; WAN024C73_at; Start 222; Stop 246
cattttcagcatgaaaggcctcttc

SEQ ID NO: 106602 - DNA, 25 bp, Artificial
  probe
  misc_feature (1)..(25): SEQ ID NO: 5395; WAN024C73_at; Start 38; Stop 62
cgattttcctctgtcgtcacttcga

SEQ ID NO: 106603 - DNA, 25 bp, Artificial
  probe
  misc_feature (1)..(25): SEQ ID NO: 5395; WAN024C73_at; Start 262; Stop 286
gacatcattcttctcgacttgacag

SEQ ID NO: 106604 - DNA, 25 bp, Artificial
  probe
  misc_feature (1)..(25): SEQ ID NO: 5395; WAN024C73_at; Start 77; Stop 101
tccgccttatccagcttgggtttag

SEQ ID NO: 106605 - DNA, 25 bp, Artificial
  probe
  misc_feature (1)..(25): SEQ ID NO: 5395; WAN024C73_at; Start 59; Stop 83
tcgatcataggagtaatctccgcct

SEQ ID NO: 106606 - DNA, 25 bp, Artificial
  probe
  misc_feature (1)..(25): SEQ ID NO: 5395; WAN024C73_at; Start 187; Stop 211
gagcgcttcctcattggcagcttga

SEQ ID NO: 106607 - DNA, 25 bp, Artificial
  probe
  misc_feature (1)..(25): SEQ ID NO: 5395; WAN024C73_at; Start 105; Stop 129
cagcttttttcgcttgaaaatcaaa

SEQ ID NO: 106608 - DNA, 25 bp, Artificial
  probe
  misc_feature (1)..(25): SEQ ID NO: 5395; WAN024C73_at; Start 140; Stop 164
tcttccgctggaggaggtgccatct

SEQ ID NO: 106609 - DNA, 25 bp, Artificial
  probe
  misc_feature (1)..(25): SEQ ID NO: 5395; WAN024C73_at; Start 210; Stop 234
gaacaatctgctcattttcagcatg

SEQ ID NO: 106610 - DNA, 25 bp, Artificial
  probe
  misc_feature (1)..(25): SEQ ID NO: 5395; WAN024C73_at; Start 7; Stop 31
cacatcaaaaacaaccccttcaaat

SEQ ID NO: 106611 - DNA, 25 bp, Artificial
  probe
  misc_feature (1)..(25): SEQ ID NO: 5395; WAN024C73_at; Start 233; Stop 257
tgaaaggcctcttcctgctcttggg

SEQ ID NO: 106612 - DNA, 25 bp, Artificial
  probe
  misc_feature (1)..(25): SEQ ID NO: 5395; WAN024C73_at; Start 275; Stop 299
tcgacttgacagttaaaagttggaa

SEQ ID NO: 106613 - DNA, 25 bp, Artificial
  probe
  misc_feature (1)..(25): SEQ ID NO: 5395; WAN024C73_at; Start 47; Stop 71
tctgtcgtcacttcgatcataggag

SEQ ID NO: 106614 - DNA, 25 bp, Artificial
  probe
  misc_feature (1)..(25): SEQ ID NO: 5395; WAN024C73_at; Start 84; Stop 108
tatccagcttgggtttagctgcagc

SEQ ID NO: 106615 - DNA, 25 bp, Artificial
  probe
  misc_feature (1)..(25): SEQ ID NO: 5395; WAN024C73_at; Start 29; Stop 53
aataccagacgattttcctctgtcg

SEQ ID NO: 106616 - DNA, 25 bp, Artificial
  probe
  misc_feature (1)..(25): SEQ ID NO: 5395; WAN024C73_at; Start 236; Stop 260
aaggcctcttcctgctcttgggtca

SEQ ID NO: 106617 - DNA, 25 bp, Artificial
  probe
  misc_feature (1)..(25): SEQ ID NO: 5395; WAN024C73_at; Start 194; Stop 218
tcctcattggcagcttgaacaatct

SEQ ID NO: 106618 - DNA, 25 bp, Artificial
  probe
  misc_feature (1)..(25): SEQ ID NO: 5395; WAN024C73_at; Start 72; Stop 96
taatctccgccttatccagcttggg

SEQ ID NO: 106619 - DNA, 25 bp, Artificial
  probe
  misc_feature (1)..(25): SEQ ID NO: 5395; WAN024C73_at; Start 254; Stop 278
tgggtcaggacatcattcttctcga

SEQ ID NO: 106620 - DNA, 25 bp, Artificial
  probe
  misc_feature (1)..(25): SEQ ID NO: 5395; WAN024C73_at; Start 99; Stop 123
tagctgcagcttttttcgcttgaaa

SEQ ID NO: 106621 - DNA, 25 bp, Artificial
  probe
  misc_feature (1)..(25): SEQ ID NO: 2954; WAN024C74_at; Start 124; Stop 148
agcatgaaactcaacccgacgctca

SEQ ID NO: 106622 - DNA, 25 bp, Artificial
  probe
  misc_feature (1)..(25): SEQ ID NO: 2954; WAN024C74_at; Start 176; Stop 200
tagtgaacaacttcctgcagatcct

SEQ ID NO: 106623 - DNA, 25 bp, Artificial
  probe
  misc_feature (1)..(25): SEQ ID NO: 2954; WAN024C74_at; Start 220; Stop 244
gcgtgtgaagttattcatctccaca

SEQ ID NO: 106624 - DNA, 25 bp, Artificial
  probe
  misc_feature (1)..(25): SEQ ID NO: 2954; WAN024C74_at; Start 62; Stop 86
gcagctgttgcaacaatctcttcga

SEQ ID NO: 106625 - DNA, 25 bp, Artificial
  probe
  misc_feature (1)..(25): SEQ ID NO: 2954; WAN024C74_at; Start 274; Stop 298
cttgatgaggtcaaacttctgggcc

SEQ ID NO: 106626 - DNA, 25 bp, Artificial
  probe
  misc_feature (1)..(25): SEQ ID NO: 2954; WAN024C74_at; Start 160; Stop 184
caaatccttccgctcatagtgaaca

SEQ ID NO: 106627 - DNA, 25 bp, Artificial
  probe
  misc_feature (1)..(25): SEQ ID NO: 2954; WAN024C74_at; Start 192; Stop 216
gcagatcctgtacgttcatagtcaa

SEQ ID NO: 106628 - DNA, 25 bp, Artificial
  probe
  misc_feature (1)..(25): SEQ ID NO: 2954; WAN024C74_at; Start 92; Stop 116
ggcaaagcatccatagtcgacatgt

SEQ ID NO: 106629 - DNA, 25 bp, Artificial
  probe
  misc_feature (1)..(25): SEQ ID NO: 2954; WAN024C74_at; Start 281; Stop 305
aggtcaaacttctgggcctcttcct

SEQ ID NO: 106630 - DNA, 25 bp, Artificial
  probe
  misc_feature (1)..(25): SEQ ID NO: 2954; WAN024C74_at; Start 202; Stop 226
tacgttcatagtcaaatcgcgtgtg

SEQ ID NO: 106631 - DNA, 25 bp, Artificial
  probe
  misc_feature (1)..(25): SEQ ID NO: 2954; WAN024C74_at; Start 120; Stop 144
tatgagcatgaaactcaacccgacg

SEQ ID NO: 106632 - DNA, 25 bp, Artificial
  probe
  misc_feature (1)..(25): SEQ ID NO: 2954; WAN024C74_at; Start 75; Stop 99
caatctcttcgacctctggcaaagc

SEQ ID NO: 106633 - DNA, 25 bp, Artificial
  probe
  misc_feature (1)..(25): SEQ ID NO: 2954; WAN024C74_at; Start 168; Stop 192
tccgctcatagtgaacaacttcctg

SEQ ID NO: 106634 - DNA, 25 bp, Artificial
  probe
  misc_feature (1)..(25): SEQ ID NO: 2954; WAN024C74_at; Start 47; Stop 71
ttgtgtccccacttagcagctgttg

SEQ ID NO: 106635 - DNA, 25 bp, Artificial
  probe
  misc_feature (1)..(25): SEQ ID NO: 2954; WAN024C74_at; Start 315; Stop 339
cccacttttgcatagaaaaacttga

SEQ ID NO: 106636 - DNA, 25 bp, Artificial
  probe
  misc_feature (1)..(25): SEQ ID NO: 2954; WAN024C74_at; Start 251; Stop 275
cgaactcggagccaagaattcttct

SEQ ID NO: 106637 - DNA, 25 bp, Artificial
  probe
  misc_feature (1)..(25): SEQ ID NO: 2954; WAN024C74_at; Start 117; Stop 141
tagtatgagcatgaaactcaacccg

SEQ ID NO: 106638 - DNA, 25 bp, Artificial
  probe
  misc_feature (1)..(25): SEQ ID NO: 2954; WAN024C74_at; Start 103; Stop 127
catagtcgacatgttagtatgagca

SEQ ID NO: 106639 - DNA, 25 bp, Artificial
  probe
  misc_feature (1)..(25): SEQ ID NO: 2954; WAN024C74_at; Start 207; Stop 231
tcatagtcaaatcgcgtgtgaagtt

SEQ ID NO: 106640 - DNA, 25 bp, Artificial
  probe
  misc_feature (1)..(25): SEQ ID NO: 2954; WAN024C74_at; Start 181; Stop 205
aacaacttcctgcagatcctgtacg

SEQ ID NO: 106641 - DNA, 25 bp, Artificial
  probe
  misc_feature (1)..(25): SEQ ID NO: 2954; WAN024C74_at; Start 6; Stop 30
gaaaggactggacattcccatggtc

SEQ ID NO: 106642 - DNA, 25 bp, Artificial
  probe
  misc_feature (1)..(25): SEQ ID NO: 2954; WAN024C74_at; Start 212; Stop 236
gtcaaatcgcgtgtgaagttattca

SEQ ID NO: 106643 - DNA, 25 bp, Artificial
  probe
  misc_feature (1)..(25): SEQ ID NO: 2954; WAN024C74_at; Start 242; Stop 266
acattccctcgaactcggagccaag

SEQ ID NO: 106644 - DNA, 25 bp, Artificial
  probe
  misc_feature (1)..(25): SEQ ID NO: 2954; WAN024C74_at; Start 2; Stop 26
tgtggaaaggactggacattcccat

SEQ ID NO: 106645 - DNA, 25 bp, Artificial
  probe
  misc_feature (1)..(25): SEQ ID NO: 2954; WAN024C74_at; Start 263; Stop 287
caagaattcttcttgatgaggtcaa

SEQ ID NO: 106646 - DNA, 25 bp, Artificial
  probe
  misc_feature (1)..(25): SEQ ID NO: 2954; WAN024C74_at; Start 140; Stop 164
cgacgctcaccttctggcatcaaat

SEQ ID NO: 106647 - DNA, 25 bp, Artificial
  probe
  misc_feature (1)..(25): SEQ ID NO: 2954; WAN024C74_at; Start 198; Stop 222
cctgtacgttcatagtcaaatcgcg

SEQ ID NO: 106648 - DNA, 25 bp, Artificial
  probe
  misc_feature (1)..(25): SEQ ID NO: 2954; WAN024C74_at; Start 69; Stop 93
ttgcaacaatctcttcgacctctgg

SEQ ID NO: 106649 - DNA, 25 bp, Artificial
  probe
  misc_feature (1)..(25): SEQ ID NO: 2954; WAN024C74_at; Start 83; Stop 107
tcgacctctggcaaagcatccatag

SEQ ID NO: 106650 - DNA, 25 bp, Artificial
  probe
  misc_feature (1)..(25): SEQ ID NO: 2954; WAN024C74_at; Start 33; Stop 57
tgatagcaaccgccttgtgtcccca

SEQ ID NO: 106651 - DNA, 25 bp, Artificial
  probe
  misc_feature (1)..(25): SEQ ID NO: 2954; WAN024C74_at; Start 229; Stop 253
gttattcatctccacattccctcga

SEQ ID NO: 106652 - DNA, 25 bp, Artificial
  probe
  misc_feature (1)..(25): SEQ ID NO: 2954; WAN024C74_at; Start 154; Stop 178
tggcatcaaatccttccgctcatag

SEQ ID NO: 106653 - DNA, 25 bp, Artificial
  probe
  misc_feature (1)..(25): SEQ ID NO: 2954; WAN024C74_at; Start 89; Stop 113
tctggcaaagcatccatagtcgaca

SEQ ID NO: 106654 - DNA, 25 bp, Artificial
  probe
  misc_feature (1)..(25): SEQ ID NO: 2954; WAN024C74_at; Start 56; Stop 80
cacttagcagctgttgcaacaatct

SEQ ID NO: 106655 - DNA, 25 bp, Artificial
  probe
  misc_feature (1)..(25): SEQ ID NO: 3110; WAN024C75_at; Start 24; Stop 48
taaagatgaaaagcagacgaccagt

SEQ ID NO: 106656 - DNA, 25 bp, Artificial
  probe
  misc_feature (1)..(25): SEQ ID NO: 3110; WAN024C75_at; Start 180; Stop 204
gctgactaatctttggaagatcatg

SEQ ID NO: 106657 - DNA, 25 bp, Artificial
  probe
  misc_feature (1)..(25): SEQ ID NO: 3110; WAN024C75_at; Start 42; Stop 66
gaccagtcgcttccgcatcgtagtt

SEQ ID NO: 106658 - DNA, 25 bp, Artificial
  probe
  misc_feature (1)..(25): SEQ ID NO: 3110; WAN024C75_at; Start 207; Stop 231
gctcataattagcattcataaagcc

SEQ ID NO: 106659 - DNA, 25 bp, Artificial
  probe
  misc_feature (1)..(25): SEQ ID NO: 3110; WAN024C75_at; Start 104; Stop 128
ttggtcaaaggccccaaaccatggc

SEQ ID NO: 106660 - DNA, 25 bp, Artificial
  probe
  misc_feature (1)..(25): SEQ ID NO: 3110; WAN024C75_at; Start 118; Stop 142
caaaccatggcgtttatactcagga

SEQ ID NO: 106661 - DNA, 25 bp, Artificial
  probe
  misc_feature (1)..(25): SEQ ID NO: 3110; WAN024C75_at; Start 82; Stop 106
ttccaaggccacaccaaaacgcttg

SEQ ID NO: 106662 - DNA, 25 bp, Artificial
  probe
  misc_feature (1)..(25): SEQ ID NO: 3110; WAN024C75_at; Start 231; Stop 255
caacgtcaaaggtagcattgtgggc

SEQ ID NO: 106663 - DNA, 25 bp, Artificial
  probe
  misc_feature (1)..(25): SEQ ID NO: 3110; WAN024C75_at; Start 222; Stop 246
tcataaagccaacgtcaaaggtagc

SEQ ID NO: 106664 - DNA, 25 bp, Artificial
  probe
  misc_feature (1)..(25): SEQ ID NO: 3110; WAN024C75_at; Start 47; Stop 71
gtcgcttccgcatcgtagttggcca

SEQ ID NO: 106665 - DNA, 25 bp, Artificial
  probe
  misc_feature (1)..(25): SEQ ID NO: 3110; WAN024C75_at; Start 164; Stop 188
agcgtatcaataactggctgactaa

SEQ ID NO: 106666 - DNA, 25 bp, Artificial
  probe
  misc_feature (1)..(25): SEQ ID NO: 3110; WAN024C75_at; Start 148; Stop 172
gtttctagcaaactccagcgtatca

SEQ ID NO: 106667 - DNA, 25 bp, Artificial
  probe
  misc_feature (1)..(25): SEQ ID NO: 3110; WAN024C75_at; Start 132; Stop 156
tatactcaggatagaggtttctagc

SEQ ID NO: 106668 - DNA, 25 bp, Artificial
  probe
  misc_feature (1)..(25): SEQ ID NO: 3110; WAN024C75_at; Start 122; Stop 146
ccatggcgtttatactcaggataga

SEQ ID NO: 106669 - DNA, 25 bp, Artificial
  probe
  misc_feature (1)..(25): SEQ ID NO: 3110; WAN024C75_at; Start 225; Stop 249
taaagccaacgtcaaaggtagcatt

SEQ ID NO: 106670 - DNA, 25 bp, Artificial
  probe
  misc_feature (1)..(25): SEQ ID NO: 3110; WAN024C75_at; Start 91; Stop 115
cacaccaaaacgcttggtcaaaggc

SEQ ID NO: 106671 - DNA, 25 bp, Artificial
  probe
  misc_feature (1)..(25): SEQ ID NO: 3110; WAN024C75_at; Start 68; Stop 92
gccatgtggtgatgttccaaggcca

SEQ ID NO: 106672 - DNA, 25 bp, Artificial
  probe
  misc_feature (1)..(25): SEQ ID NO: 3110; WAN024C75_at; Start 143; Stop 167
tagaggtttctagcaaactccagcg

SEQ ID NO: 106673 - DNA, 25 bp, Artificial
  probe
  misc_feature (1)..(25): SEQ ID NO: 3110; WAN024C75_at; Start 138; Stop 162
caggatagaggtttctagcaaactc

SEQ ID NO: 106674 - DNA, 25 bp, Artificial
  probe
  misc_feature (1)..(25): SEQ ID NO: 3110; WAN024C75_at; Start 32; Stop 56
aaaagcagacgaccagtcgcttccg

SEQ ID NO: 106675 - DNA, 25 bp, Artificial
  probe
  misc_feature (1)..(25): SEQ ID NO: 3110; WAN024C75_at; Start 174; Stop 198
taactggctgactaatctttggaag

SEQ ID NO: 106676 - DNA, 25 bp, Artificial
  probe
  misc_feature (1)..(25): SEQ ID NO: 3110; WAN024C75_at; Start 8; Stop 32
tctgctacctctttgataaagatga

SEQ ID NO: 106677 - DNA, 25 bp, Artificial
  probe
  misc_feature (1)..(25): SEQ ID NO: 3110; WAN024C75_at; Start 2; Stop 26
tgtttttctgctacctctttgataa

SEQ ID NO: 106678 - DNA, 25 bp, Artificial
  probe
  misc_feature (1)..(25): SEQ ID NO: 3110; WAN024C75_at; Start 62; Stop 86
tagttggccatgtggtgatgttcca

SEQ ID NO: 106679 - DNA, 25 bp, Artificial
  probe
  misc_feature (1)..(25): SEQ ID NO: 3110; WAN024C75_at; Start 28; Stop 52
gatgaaaagcagacgaccagtcgct

SEQ ID NO: 106680 - DNA, 25 bp, Artificial
  probe
  misc_feature (1)..(25): SEQ ID NO: 3110; WAN024C75_at; Start 21; Stop 45
tgataaagatgaaaagcagacgacc

SEQ ID NO: 106681 - DNA, 25 bp, Artificial
  probe
  misc_feature (1)..(25): SEQ ID NO: 3110; WAN024C75_at; Start 50; Stop 74
gcttccgcatcgtagttggccatgt

SEQ ID NO: 106682 - DNA, 25 bp, Artificial
  probe
  misc_feature (1)..(25): SEQ ID NO: 3110; WAN024C75_at; Start 76; Stop 100
gtgatgttccaaggccacaccaaaa

SEQ ID NO: 106683 - DNA, 25 bp, Artificial
  probe
  misc_feature (1)..(25): SEQ ID NO: 3110; WAN024C75_at; Start 216; Stop 240
tagcattcataaagccaacgtcaaa

SEQ ID NO: 106684 - DNA, 25 bp, Artificial
  probe
  misc_feature (1)..(25): SEQ ID NO: 3110; WAN024C75_at; Start 155; Stop 179
gcaaactccagcgtatcaataactg

SEQ ID NO: 106685 - DNA, 25 bp, Artificial
  probe
  misc_feature (1)..(25): SEQ ID NO: 3110; WAN024C75_at; Start 237; Stop 261
caaaggtagcattgtgggcaactag

SEQ ID NO: 106686 - DNA, 25 bp, Artificial
  probe
  misc_feature (1)..(25): SEQ ID NO: 3110; WAN024C75_at; Start 55; Stop 79
cgcatcgtagttggccatgtggtga

SEQ ID NO: 106687 - DNA, 25 bp, Artificial
  probe
  misc_feature (1)..(25): SEQ ID NO: 3110; WAN024C75_at; Start 72; Stop 96
tgtggtgatgttccaaggccacacc

SEQ ID NO: 106688 - DNA, 25 bp, Artificial
  probe
  misc_feature (1)..(25): SEQ ID NO: 3110; WAN024C75_at; Start 86; Stop 110
aaggccacaccaaaacgcttggtca

SEQ ID NO: 106689 - DNA, 25 bp, Artificial
  probe
  misc_feature (1)..(25): SEQ ID NO: 5355; WAN024C76_at; Start 8; Stop 32
tcttagaaaattcttcgctcaaacc

SEQ ID NO: 106690 - DNA, 25 bp, Artificial
  probe
  misc_feature (1)..(25): SEQ ID NO: 5355; WAN024C76_at; Start 5; Stop 29
ctgtcttagaaaattcttcgctcaa

SEQ ID NO: 106691 - DNA, 25 bp, Artificial
  probe
  misc_feature (1)..(25): SEQ ID NO: 5355; WAN024C76_at; Start 6; Stop 30
tgtcttagaaaattcttcgctcaaa

SEQ ID NO: 106692 - DNA, 25 bp, Artificial
  probe
  misc_feature (1)..(25): SEQ ID NO: 5355; WAN024C76_at; Start 4; Stop 28
cctgtcttagaaaattcttcgctca

SEQ ID NO: 106693 - DNA, 25 bp, Artificial
  probe
  misc_feature (1)..(25): SEQ ID NO: 5355; WAN024C76_at; Start 3; Stop 27
gcctgtcttagaaaattcttcgctc

SEQ ID NO: 106694 - DNA, 25 bp, Artificial
  probe
  misc_feature (1)..(25): SEQ ID NO: 5355; WAN024C76_at; Start 49; Stop 73
aagatttcaatcggtaaaatattag

SEQ ID NO: 106695 - DNA, 25 bp, Artificial
  probe
  misc_feature (1)..(25): SEQ ID NO: 5355; WAN024C76_at; Start 51; Stop 75
gatttcaatcggtaaaatattagaa

SEQ ID NO: 106696 - DNA, 25 bp, Artificial
  probe
  misc_feature (1)..(25): SEQ ID NO: 5355; WAN024C76_at; Start 1; Stop 25
ttgcctgtcttagaaaattcttcgc

SEQ ID NO: 106697 - DNA, 25 bp, Artificial
  probe
  misc_feature (1)..(25): SEQ ID NO: 5355; WAN024C76_at; Start 22; Stop 46
tcgctcaaacctttctttaattcta

SEQ ID NO: 106698 - DNA, 25 bp, Artificial
  probe
  misc_feature (1)..(25): SEQ ID NO: 5355; WAN024C76_at; Start 55; Stop 79
tcaatcggtaaaatattagaaaata

SEQ ID NO: 106699 - DNA, 25 bp, Artificial
  probe
  misc_feature (1)..(25): SEQ ID NO: 5355; WAN024C76_at; Start 7; Stop 31
gtcttagaaaattcttcgctcaaac

SEQ ID NO: 106700 - DNA, 25 bp, Artificial
  probe
  misc_feature (1)..(25): SEQ ID NO: 5355; WAN024C76_at; Start 2; Stop 26
tgcctgtcttagaaaattcttcgct

SEQ ID NO: 106701 - DNA, 25 bp, Artificial
  probe
  misc_feature (1)..(25): SEQ ID NO: 5355; WAN024C76_at; Start 50; Stop 74
agatttcaatcggtaaaatattaga

SEQ ID NO: 106702 - DNA, 25 bp, Artificial
  probe
  misc_feature (1)..(25): SEQ ID NO: 5355; WAN024C76_at; Start 9; Stop 33
cttagaaaattcttcgctcaaacct

SEQ ID NO: 106703 - DNA, 25 bp, Artificial
  probe
  misc_feature (1)..(25): SEQ ID NO: 251; WAN024C77-3_at; Start 1056; Stop 1080
ggctgaatggcagaccactcacttt

SEQ ID NO: 106704 - DNA, 25 bp, Artificial
  probe
  misc_feature (1)..(25): SEQ ID NO: 251; WAN024C77-3_at; Start 523; Stop 547
ttcgttgcgaccatgattgggatta

SEQ ID NO: 106705 - DNA, 25 bp, Artificial
  probe
  misc_feature (1)..(25): SEQ ID NO: 251; WAN024C77-3_at; Start 1815; Stop 1839
aatggaagaaatctctgaaaaacgg

SEQ ID NO: 106706 - DNA, 25 bp, Artificial
  probe
  misc_feature (1)..(25): SEQ ID NO: 251; WAN024C77-3_at; Start 790; Stop 814
gatgtgcgtgatatctttggtgaag

SEQ ID NO: 106707 - DNA, 25 bp, Artificial
  probe
  misc_feature (1)..(25): SEQ ID NO: 251; WAN024C77-3_at; Start 2013; Stop 2037
tctgggagagaacgttgccaagcaa

SEQ ID NO: 106708 - DNA, 25 bp, Artificial
  probe
  misc_feature (1)..(25): SEQ ID NO: 251; WAN024C77-3_at; Start 1459; Stop 1483
tgtcgggacgacatcatggtttacc

SEQ ID NO: 106709 - DNA, 25 bp, Artificial
  probe
  misc_feature (1)..(25): SEQ ID NO: 251; WAN024C77-3_at; Start 806; Stop 830
ttggtgaagaatatgccttccgtgc

SEQ ID NO: 106710 - DNA, 25 bp, Artificial
  probe
  misc_feature (1)..(25): SEQ ID NO: 251; WAN024C77-3_at; Start 1676; Stop 1700
cctacgttatgatggccttgcgtgt

SEQ ID NO: 106711 - DNA, 25 bp, Artificial
  probe
  misc_feature (1)..(25): SEQ ID NO: 251; WAN024C77-3_at; Start 1663; Stop 1687
gcccatgcggcagcctacgttatga

SEQ ID NO: 106712 - DNA, 25 bp, Artificial
  probe
  misc_feature (1)..(25): SEQ ID NO: 251; WAN024C77-3_at; Start 895; Stop 919
tatggcaagttttatcgtgatgcag

SEQ ID NO: 106713 - DNA, 25 bp, Artificial
  probe
  misc_feature (1)..(25): SEQ ID NO: 251; WAN024C77-3_at; Start 287; Stop 311
tgtatacgcctttcatcgacaaggc

SEQ ID NO: 106714 - DNA, 25 bp, Artificial
  probe
  misc_feature (1)..(25): SEQ ID NO: 251; WAN024C77-3_at; Start 774; Stop 798
gcctagcgcccacttggatgtgcgt

SEQ ID NO: 106715 - DNA, 25 bp, Artificial
  probe
  misc_feature (1)..(25): SEQ ID NO: 251; WAN024C77-3_at; Start 1018; Stop 1042
gattttacgcctgtccagtatccag

SEQ ID NO: 106716 - DNA, 25 bp, Artificial
  probe
  misc_feature (1)..(25): SEQ ID NO: 251; WAN024C77-3_at; Start 1842; Stop 1866
gaacaatgaagcctctaatgtggaa

SEQ ID NO: 106717 - DNA, 25 bp, Artificial
  probe
  misc_feature (1)..(25): SEQ ID NO: 251; WAN024C77-3_at; Start 1830; Stop 1854
tgaaaaacggaagaacaatgaagcc

SEQ ID NO: 106718 - DNA, 25 bp, Artificial
  probe
  misc_feature (1)..(25): SEQ ID NO: 251; WAN024C77-3_at; Start 1608; Stop 1632
ggtgccagagtggtatatcgaatcc

SEQ ID NO: 106719 - DNA, 25 bp, Artificial
  probe
  misc_feature (1)..(25): SEQ ID NO: 251; WAN024C77-3_at; Start 1763; Stop 1787
aggcttttgatatcaagaccatggg

SEQ ID NO: 106720 - DNA, 25 bp, Artificial
  probe
  misc_feature (1)..(25): SEQ ID NO: 251; WAN024C77-3_at; Start 2071; Stop 2095
tctaaaacagaactacgcaagcgtg

SEQ ID NO: 106721 - DNA, 25 bp, Artificial
  probe
  misc_feature (1)..(25): SEQ ID NO: 251; WAN024C77-3_at; Start 2085; Stop 2109
acgcaagcgtggtggactctcatca

SEQ ID NO: 106722 - DNA, 25 bp, Artificial
  probe
  misc_feature (1)..(25): SEQ ID NO: 251; WAN024C77-3_at; Start 758; Stop 782
tctcgggagaagatcagcctagcgc

SEQ ID NO: 106723 - DNA, 25 bp, Artificial
  probe
  misc_feature (1)..(25): SEQ ID NO: 251; WAN024C77-3_at; Start 63; Stop 87
aattatcgtccgtagtttgggacag

SEQ ID NO: 106724 - DNA, 25 bp, Artificial
  probe
  misc_feature (1)..(25): SEQ ID NO: 251; WAN024C77-3_at; Start 1994; Stop 2018
catttgtagcaatggatggtctggg

SEQ ID NO: 106725 - DNA, 25 bp, Artificial
  probe
  misc_feature (1)..(25): SEQ ID NO: 251; WAN024C77-3_at; Start 647; Stop 671
ataaggactgtccaaactgtggtca

SEQ ID NO: 106726 - DNA, 25 bp, Artificial
  probe
  misc_feature (1)..(25): SEQ ID NO: 251; WAN024C77-3_at; Start 31; Stop 55
tatatcgaaccggaagaagagattt

SEQ ID NO: 106727 - DNA, 25 bp, Artificial
  probe
  misc_feature (1)..(25): SEQ ID NO: 251; WAN024C77-3_at; Start 2108; Stop 2132
caaccttggttgaaaagatggatga

SEQ ID NO: 106728 - DNA, 25 bp, Artificial
  probe
  misc_feature (1)..(25): SEQ ID NO: 251; WAN024C77-3_at; Start 19; Stop 43
ggaaatgttcactatatcgaaccgg

SEQ ID NO: 106729 - DNA, 25 bp, Artificial
  probe
  misc_feature (1)..(25): SEQ ID NO: 251; WAN024C77-3_at; Start 730; Stop 754
gataaggttcctgatattgacttga

SEQ ID NO: 106730 - DNA, 25 bp, Artificial
  probe
  misc_feature (1)..(25): SEQ ID NO: 251; WAN024C77-3_at; Start 574; Stop 598
tatgtctgtggtcagtgtcagtaca

SEQ ID NO: 106731 - DNA, 25 bp, Artificial
  probe
  misc_feature (1)..(25): SEQ ID NO: 251; WAN024C77-3_at; Start 496; Stop 520
ggttctcgtgggtctgtcggatcta

SEQ ID NO: 106732 - DNA, 25 bp, Artificial
  probe
  misc_feature (1)..(25): SEQ ID NO: 251; WAN024C77-3_at; Start 2095; Stop 2119
ggtggactctcatcaaccttggttg

SEQ ID NO: 106733 - DNA, 25 bp, Artificial
  probe
  misc_feature (1)..(25): SEQ ID NO: 251; WAN024C77-3_at; Start 742; Stop 766
gatattgacttgaacttctcgggag

SEQ ID NO: 106734 - DNA, 25 bp, Artificial
  probe
  misc_feature (1)..(25): SEQ ID NO: 251; WAN024C77-3_at; Start 1619; Stop 1643
ggtatatcgaatcctgtgggaaaat

SEQ ID NO: 106735 - DNA, 25 bp, Artificial
  probe
  misc_feature (1)..(25): SEQ ID NO: 251; WAN024C77-3_at; Start 512; Stop 536
tcggatctagtttcgttgcgaccat

SEQ ID NO: 106736 - DNA, 25 bp, Artificial
  probe
  misc_feature (1)..(25): SEQ ID NO: 251; WAN024C77-3_at; Start 1025; Stop 1049
cgcctgtccagtatccagcagatga

SEQ ID NO: 106737 - DNA, 25 bp, Artificial
  probe
  misc_feature (1)..(25): SEQ ID NO: 2827; WAN024C77-5_at; Start 1380; Stop 1404
tgaatttatcaatcctgggcatccc

SEQ ID NO: 106738 - DNA, 25 bp, Artificial
  probe
  misc_feature (1)..(25): SEQ ID NO: 2827; WAN024C77-5_at; Start 1158; Stop 1182
taaggcggctaagaaagcgggaatc

SEQ ID NO: 106739 - DNA, 25 bp, Artificial
  probe
  misc_feature (1)..(25): SEQ ID NO: 2827; WAN024C77-5_at; Start 1665; Stop 1689
tttgaccaagcgttttggtgtggcc

SEQ ID NO: 106740 - DNA, 25 bp, Artificial
  probe
  misc_feature (1)..(25): SEQ ID NO: 2827; WAN024C77-5_at; Start 1887; Stop 1911
aaatatctttaagctggtttccttg

SEQ ID NO: 106741 - DNA, 25 bp, Artificial
  probe
  misc_feature (1)..(25): SEQ ID NO: 2827; WAN024C77-5_at; Start 909; Stop 933
tgtggagatgaataacttcacacgc

SEQ ID NO: 106742 - DNA, 25 bp, Artificial
  probe
  misc_feature (1)..(25): SEQ ID NO: 2827; WAN024C77-5_at; Start 598; Stop 622
atggcacctcctccagcggaagaga

SEQ ID NO: 106743 - DNA, 25 bp, Artificial
  probe
  misc_feature (1)..(25): SEQ ID NO: 2827; WAN024C77-5_at; Start 976; Stop 1000
tatgagcggaaggatttgatgccag

SEQ ID NO: 106744 - DNA, 25 bp, Artificial
  probe
  misc_feature (1)..(25): SEQ ID NO: 2827; WAN024C77-5_at; Start 922; Stop 946
aacttcacacgcgatttgactatga

SEQ ID NO: 106745 - DNA, 25 bp, Artificial
  probe
  misc_feature (1)..(25): SEQ ID NO: 2827; WAN024C77-5_at; Start 1172; Stop 1196
aagcgggaatccagctgatctatgg

SEQ ID NO: 106746 - DNA, 25 bp, Artificial
  probe
  misc_feature (1)..(25): SEQ ID NO: 2827; WAN024C77-5_at; Start 1899; Stop 1923
gctggtttccttgtctaataccaag

SEQ ID NO: 106747 - DNA, 25 bp, Artificial
  probe
  misc_feature (1)..(25): SEQ ID NO: 2827; WAN024C77-5_at; Start 961; Stop 985
caggaagttgttcactatgagcgga

SEQ ID NO: 106748 - DNA, 25 bp, Artificial
  probe
  misc_feature (1)..(25): SEQ ID NO: 2827; WAN024C77-5_at; Start 2128; Stop 2152
caggtcaaggatatggaggaactcc

SEQ ID NO: 106749 - DNA, 25 bp, Artificial
  probe
  misc_feature (1)..(25): SEQ ID NO: 2827; WAN024C77-5_at; Start 500; Stop 524
tgacccaagagcaggaagaggcctt

SEQ ID NO: 106750 - DNA, 25 bp, Artificial
  probe
  misc_feature (1)..(25): SEQ ID NO: 2827; WAN024C77-5_at; Start 56; Stop 80
gacaggctcctgctttagcacaggc

SEQ ID NO: 106751 - DNA, 25 bp, Artificial
  probe
  misc_feature (1)..(25): SEQ ID NO: 2827; WAN024C77-5_at; Start 114; Stop 138
taaggtatgggagtttcatttcgta

SEQ ID NO: 106752 - DNA, 25 bp, Artificial
  probe
  misc_feature (1)..(25): SEQ ID NO: 2827; WAN024C77-5_at; Start 1207; Stop 1231
aatatcgtggaggaccgtgtcccta

SEQ ID NO: 106753 - DNA, 25 bp, Artificial
  probe
  misc_feature (1)..(25): SEQ ID NO: 2827; WAN024C77-5_at; Start 1534; Stop 1558
acctttgacgttggctttatgaatg

SEQ ID NO: 106754 - DNA, 25 bp, Artificial
  probe
  misc_feature (1)..(25): SEQ ID NO: 2827; WAN024C77-5_at; Start 1388; Stop 1412
tcaatcctgggcatcccttgtcagc

SEQ ID NO: 106755 - DNA, 25 bp, Artificial
  probe
  misc_feature (1)..(25): SEQ ID NO: 2827; WAN024C77-5_at; Start 1462; Stop 1486
aaaccactagaacaagttttgcaag

SEQ ID NO: 106756 - DNA, 25 bp, Artificial
  probe
  misc_feature (1)..(25): SEQ ID NO: 2827; WAN024C77-5_at; Start 84; Stop 108
tattgagcgagttgtggttcataaa

SEQ ID NO: 106757 - DNA, 25 bp, Artificial
  probe
  misc_feature (1)..(25): SEQ ID NO: 2827; WAN024C77-5_at; Start 1219; Stop 1243
gaccgtgtccctatcgtctataacg

SEQ ID NO: 106758 - DNA, 25 bp, Artificial
  probe
  misc_feature (1)..(25): SEQ ID NO: 2827; WAN024C77-5_at; Start 743; Stop 767
tttttgatgtggagcaaaaagtgac

SEQ ID NO: 106759 - DNA, 25 bp, Artificial
  probe
  misc_feature (1)..(25): SEQ ID NO: 2827; WAN024C77-5_at; Start 45; Stop 69
tgctgaaatgagacaggctcctgct

SEQ ID NO: 106760 - DNA, 25 bp, Artificial
  probe
  misc_feature (1)..(25): SEQ ID NO: 2827; WAN024C77-5_at; Start 534; Stop 558
aaatgagcagattgttcaagctgcc

SEQ ID NO: 106761 - DNA, 25 bp, Artificial
  probe
  misc_feature (1)..(25): SEQ ID NO: 2827; WAN024C77-5_at; Start 686; Stop 710
ttactcctatgatcgaagtgacgac

SEQ ID NO: 106762 - DNA, 25 bp, Artificial
  probe
  misc_feature (1)..(25): SEQ ID NO: 2827; WAN024C77-5_at; Start 1147; Stop 1171
ccacatggctataaggcggctaaga

SEQ ID NO: 106763 - DNA, 25 bp, Artificial
  probe
  misc_feature (1)..(25): SEQ ID NO: 2827; WAN024C77-5_at; Start 1471; Stop 1495
gaacaagttttgcaagaattccaag

SEQ ID NO: 106764 - DNA, 25 bp, Artificial
  probe
  misc_feature (1)..(25): SEQ ID NO: 2827; WAN024C77-5_at; Start 1702; Stop 1726
cacatggccaactacgatgcggaag

SEQ ID NO: 106765 - DNA, 25 bp, Artificial
  probe
  misc_feature (1)..(25): SEQ ID NO: 2827; WAN024C77-5_at; Start 1273; Stop 1297
tacgtggtctttgacgtggaaacga

SEQ ID NO: 106766 - DNA, 25 bp, Artificial
  probe
  misc_feature (1)..(25): SEQ ID NO: 2827; WAN024C77-5_at; Start 1739; Stop 1763
tgcttttcatctttatcaaagaggt

SEQ ID NO: 106767 - DNA, 25 bp, Artificial
  probe
  misc_feature (1)..(25): SEQ ID NO: 2827; WAN024C77-5_at; Start 2145; Stop 2169
ggaactccagaccattatcaagagt

SEQ ID NO: 106768 - DNA, 25 bp, Artificial
  probe
  misc_feature (1)..(25): SEQ ID NO: 2827; WAN024C77-5_at; Start 1315; Stop 1339
tataatgacttgattcaggttgcgg

SEQ ID NO: 106769 - DNA, 25 bp, Artificial
  probe
  misc_feature (1)..(25): SEQ ID NO: 2827; WAN024C77-5_at; Start 676; Stop 700
aaggcggagattactcctatgatcg

SEQ ID NO: 106770 - DNA, 25 bp, Artificial
  probe
  misc_feature (1)..(25): SEQ ID NO: 2827; WAN024C77-5_at; Start 1012; Stop 1036
cgggttgagtttcatgctcatacta

SEQ ID NO: 106771 - DNA, 25 bp, Artificial
  probe
  misc_feature (1)..(25): SEQ ID NO: 5178; WAN024C78_at; Start 177; Stop 201
caccacggacgatatggtaacgtac

SEQ ID NO: 106772 - DNA, 25 bp, Artificial
  probe
  misc_feature (1)..(25): SEQ ID NO: 5178; WAN024C78_at; Start 295; Stop 319
gataaggttgctcaaacgtacacga

SEQ ID NO: 106773 - DNA, 25 bp, Artificial
  probe
  misc_feature (1)..(25): SEQ ID NO: 5178; WAN024C78_at; Start 251; Stop 275
tcttgcaagttgtgtccgatacctg

SEQ ID NO: 106774 - DNA, 25 bp, Artificial
  probe
  misc_feature (1)..(25): SEQ ID NO: 5178; WAN024C78_at; Start 315; Stop 339
cacgagcgaatttacgaagggctga

SEQ ID NO: 106775 - DNA, 25 bp, Artificial
  probe
  misc_feature (1)..(25): SEQ ID NO: 5178; WAN024C78_at; Start 91; Stop 115
tatcccctttccttatgcttttgga

SEQ ID NO: 106776 - DNA, 25 bp, Artificial
  probe
  misc_feature (1)..(25): SEQ ID NO: 5178; WAN024C78_at; Start 214; Stop 238
ttttacacgtccaccgcgaagaagc

SEQ ID NO: 106777 - DNA, 25 bp, Artificial
  probe
  misc_feature (1)..(25): SEQ ID NO: 5178; WAN024C78_at; Start 22; Stop 46
tgtgaattgtatagcggatctggca

SEQ ID NO: 106778 - DNA, 25 bp, Artificial
  probe
  misc_feature (1)..(25): SEQ ID NO: 5178; WAN024C78_at; Start 211; Stop 235
gtcttttacacgtccaccgcgaaga

SEQ ID NO: 106779 - DNA, 25 bp, Artificial
  probe
  misc_feature (1)..(25): SEQ ID NO: 5178; WAN024C78_at; Start 313; Stop 337
tacacgagcgaatttacgaagggct

SEQ ID NO: 106780 - DNA, 25 bp, Artificial
  probe
  misc_feature (1)..(25): SEQ ID NO: 5178; WAN024C78_at; Start 226; Stop 250
accgcgaagaagcaccacgctgtgc

SEQ ID NO: 106781 - DNA, 25 bp, Artificial
  probe
  misc_feature (1)..(25): SEQ ID NO: 5178; WAN024C78_at; Start 270; Stop 294
tacctgggatgtaggcagtaacttc

SEQ ID NO: 106782 - DNA, 25 bp, Artificial
  probe
  misc_feature (1)..(25): SEQ ID NO: 5178; WAN024C78_at; Start 234; Stop 258
gaagcaccacgctgtgctcttgcaa

SEQ ID NO: 106783 - DNA, 25 bp, Artificial
  probe
  misc_feature (1)..(25): SEQ ID NO: 5178; WAN024C78_at; Start 281; Stop 305
taggcagtaacttcgataaggttgc

SEQ ID NO: 106784 - DNA, 25 bp, Artificial
  probe
  misc_feature (1)..(25): SEQ ID NO: 5178; WAN024C78_at; Start 74; Stop 98
tacgactcatttctctttatcccct

SEQ ID NO: 106785 - DNA, 25 bp, Artificial
  probe
  misc_feature (1)..(25): SEQ ID NO: 5178; WAN024C78_at; Start 53; Stop 77
cacgttttggagctctatttttacg

SEQ ID NO: 106786 - DNA, 25 bp, Artificial
  probe
  misc_feature (1)..(25): SEQ ID NO: 5178; WAN024C78_at; Start 150; Stop 174
gatcgttaacacctgcagtatcaag

SEQ ID NO: 106787 - DNA, 25 bp, Artificial
  probe
  misc_feature (1)..(25): SEQ ID NO: 5178; WAN024C78_at; Start 156; Stop 180
taacacctgcagtatcaagtgcacc

SEQ ID NO: 106788 - DNA, 25 bp, Artificial
  probe
  misc_feature (1)..(25): SEQ ID NO: 5178; WAN024C78_at; Start 164; Stop 188
gcagtatcaagtgcaccacggacga

SEQ ID NO: 106789 - DNA, 25 bp, Artificial
  probe
  misc_feature (1)..(25): SEQ ID NO: 5178; WAN024C78_at; Start 288; Stop 312
taacttcgataaggttgctcaaacg

SEQ ID NO: 106790 - DNA, 25 bp, Artificial
  probe
  misc_feature (1)..(25): SEQ ID NO: 5178; WAN024C78_at; Start 31; Stop 55
tatagcggatctggcaatacgtcac

SEQ ID NO: 106791 - DNA, 25 bp, Artificial
  probe
  misc_feature (1)..(25): SEQ ID NO: 5178; WAN024C78_at; Start 300; Stop 324
ggttgctcaaacgtacacgagcgaa

SEQ ID NO: 106792 - DNA, 25 bp, Artificial
  probe
  misc_feature (1)..(25): SEQ ID NO: 5178; WAN024C78_at; Start 100; Stop 124
tccttatgcttttggacgtttagta

SEQ ID NO: 106793 - DNA, 25 bp, Artificial
  probe
  misc_feature (1)..(25): SEQ ID NO: 5178; WAN024C78_at; Start 1; Stop 25
ttgataagacgagtaactagttgtg

SEQ ID NO: 106794 - DNA, 25 bp, Artificial
  probe
  misc_feature (1)..(25): SEQ ID NO: 5178; WAN024C78_at; Start 143; Stop 167
tgtttacgatcgttaacacctgcag

SEQ ID NO: 106795 - DNA, 25 bp, Artificial
  probe
  misc_feature (1)..(25): SEQ ID NO: 5178; WAN024C78_at; Start 256; Stop 280
caagttgtgtccgatacctgggatg

SEQ ID NO: 106796 - DNA, 25 bp, Artificial
  probe
  misc_feature (1)..(25): SEQ ID NO: 5178; WAN024C78_at; Start 35; Stop 59
gcggatctggcaatacgtcacgttt

SEQ ID NO: 106797 - DNA, 25 bp, Artificial
  probe
  misc_feature (1)..(25): SEQ ID NO: 5178; WAN024C78_at; Start 243; Stop 267
cgctgtgctcttgcaagttgtgtcc

SEQ ID NO: 106798 - DNA, 25 bp, Artificial
  probe
  misc_feature (1)..(25): SEQ ID NO: 5178; WAN024C78_at; Start 186; Stop 210
cgatatggtaacgtacccctggaag

SEQ ID NO: 106799 - DNA, 25 bp, Artificial
  probe
  misc_feature (1)..(25): SEQ ID NO: 5178; WAN024C78_at; Start 45; Stop 69
caatacgtcacgttttggagctcta

SEQ ID NO: 106800 - DNA, 25 bp, Artificial
  probe
  misc_feature (1)..(25): SEQ ID NO: 5178; WAN024C78_at; Start 170; Stop 194
tcaagtgcaccacggacgatatggt

SEQ ID NO: 106801 - DNA, 25 bp, Artificial
  probe
  misc_feature (1)..(25): SEQ ID NO: 5178; WAN024C78_at; Start 15; Stop 39
aactagttgtgaattgtatagcgga

SEQ ID NO: 106802 - DNA, 25 bp, Artificial
  probe
  misc_feature (1)..(25): SEQ ID NO: 5178; WAN024C78_at; Start 61; Stop 85
ggagctctatttttacgactcattt

SEQ ID NO: 106803 - DNA, 25 bp, Artificial
  probe
  misc_feature (1)..(25): SEQ ID NO: 5178; WAN024C78_at; Start 184; Stop 208
gacgatatggtaacgtacccctgga

SEQ ID NO: 106804 - DNA, 25 bp, Artificial
  probe
  misc_feature (1)..(25): SEQ ID NO: 5178; WAN024C78_at; Start 265; Stop 289
tccgatacctgggatgtaggcagta

SEQ ID NO: 106805 - DNA, 25 bp, Artificial
  probe
  misc_feature (1)..(25): SEQ ID NO: 1238; WAN024C79_at; Start 380; Stop 404
gcatcgttgccagtagcttctttga

SEQ ID NO: 106806 - DNA, 25 bp, Artificial
  probe
  misc_feature (1)..(25): SEQ ID NO: 1238; WAN024C79_at; Start 246; Stop 270
aacgaagtccaagtgttgtacgacg

SEQ ID NO: 106807 - DNA, 25 bp, Artificial
  probe
  misc_feature (1)..(25): SEQ ID NO: 1238; WAN024C79_at; Start 100; Stop 124
gaatgcacggttagcttcagccata

SEQ ID NO: 106808 - DNA, 25 bp, Artificial
  probe
  misc_feature (1)..(25): SEQ ID NO: 1238; WAN024C79_at; Start 30; Stop 54
gcttcgattccctattttctctggg

SEQ ID NO: 106809 - DNA, 25 bp, Artificial
  probe
  misc_feature (1)..(25): SEQ ID NO: 1238; WAN024C79_at; Start 357; Stop 381
tagctgtttcaaatacttcaagtgc

SEQ ID NO: 106810 - DNA, 25 bp, Artificial
  probe
  misc_feature (1)..(25): SEQ ID NO: 1238; WAN024C79_at; Start 343; Stop 367
catgatgttttccatagctgtttca

SEQ ID NO: 106811 - DNA, 25 bp, Artificial
  probe
  misc_feature (1)..(25): SEQ ID NO: 1238; WAN024C79_at; Start 232; Stop 256
gattgttaccaaccaacgaagtcca

SEQ ID NO: 106812 - DNA, 25 bp, Artificial
  probe
  misc_feature (1)..(25): SEQ ID NO: 1238; WAN024C79_at; Start 2; Stop 26
tgaatctcattggttgcaaccgcaa

SEQ ID NO: 106813 - DNA, 25 bp, Artificial
  probe
  misc_feature (1)..(25): SEQ ID NO: 1238; WAN024C79_at; Start 95; Stop 119
tgtgcgaatgcacggttagcttcag

SEQ ID NO: 106814 - DNA, 25 bp, Artificial
  probe
  misc_feature (1)..(25): SEQ ID NO: 1238; WAN024C79_at; Start 117; Stop 141
cagccatacggtgagtatcttcacg

SEQ ID NO: 106815 - DNA, 25 bp, Artificial
  probe
  misc_feature (1)..(25): SEQ ID NO: 1238; WAN024C79_at; Start 299; Stop 323
tagttagaaccaccaacacgacgtg

SEQ ID NO: 106816 - DNA, 25 bp, Artificial
  probe
  misc_feature (1)..(25): SEQ ID NO: 1238; WAN024C79_at; Start 305; Stop 329
gaaccaccaacacgacgtgcacgta

SEQ ID NO: 106817 - DNA, 25 bp, Artificial
  probe
  misc_feature (1)..(25): SEQ ID NO: 1238; WAN024C79_at; Start 162; Stop 186
tgttgttagcagcatccaagatttc

SEQ ID NO: 106818 - DNA, 25 bp, Artificial
  probe
  misc_feature (1)..(25): SEQ ID NO: 1238; WAN024C79_at; Start 107; Stop 131
cggttagcttcagccatacggtgag

SEQ ID NO: 106819 - DNA, 25 bp, Artificial
  probe
  misc_feature (1)..(25): SEQ ID NO: 1238; WAN024C79_at; Start 222; Stop 246
gaagacgagcgattgttaccaacca

SEQ ID NO: 106820 - DNA, 25 bp, Artificial
  probe
  misc_feature (1)..(25): SEQ ID NO: 1238; WAN024C79_at; Start 388; Stop 412
gccagtagcttctttgatttgctca

SEQ ID NO: 106821 - DNA, 25 bp, Artificial
  probe
  misc_feature (1)..(25): SEQ ID NO: 1238; WAN024C79_at; Start 402; Stop 426
tgatttgctcaaaagcaccgtaaac

SEQ ID NO: 106822 - DNA, 25 bp, Artificial
  probe
  misc_feature (1)..(25): SEQ ID NO: 1238; WAN024C79_at; Start 14; Stop 38
gttgcaaccgcaacctgcttcgatt

SEQ ID NO: 106823 - DNA, 25 bp, Artificial
  probe
  misc_feature (1)..(25): SEQ ID NO: 1238; WAN024C79_at; Start 255; Stop 279
caagtgttgtacgacgttctggacg

SEQ ID NO: 106824 - DNA, 25 bp, Artificial
  probe
  misc_feature (1)..(25): SEQ ID NO: 1238; WAN024C79_at; Start 333; Stop 357
caagtacaggcatgatgttttccat

SEQ ID NO: 106825 - DNA, 25 bp, Artificial
  probe
  misc_feature (1)..(25): SEQ ID NO: 1238; WAN024C79_at; Start 49; Stop 73
tctgggactttcttaacgctttcgc

SEQ ID NO: 106826 - DNA, 25 bp, Artificial
  probe
  misc_feature (1)..(25): SEQ ID NO: 1238; WAN024C79_at; Start 259; Stop 283
tgttgtacgacgttctggacgaact

SEQ ID NO: 106827 - DNA, 25 bp, Artificial
  probe
  misc_feature (1)..(25): SEQ ID NO: 1238; WAN024C79_at; Start 126; Stop 150
ggtgagtatcttcacgtttcttaac

SEQ ID NO: 106828 - DNA, 25 bp, Artificial
  probe
  misc_feature (1)..(25): SEQ ID NO: 1238; WAN024C79_at; Start 192; Stop 216
caagacggtcttgcattgtgtgttc

SEQ ID NO: 106829 - DNA, 25 bp, Artificial
  probe
  misc_feature (1)..(25): SEQ ID NO: 1238; WAN024C79_at; Start 289; Stop 313
tgggacttggtagttagaaccacca

SEQ ID NO: 106830 - DNA, 25 bp, Artificial
  probe
  misc_feature (1)..(25): SEQ ID NO: 1238; WAN024C79_at; Start 155; Stop 179
gcaccagtgttgttagcagcatcca

SEQ ID NO: 106831 - DNA, 25 bp, Artificial
  probe
  misc_feature (1)..(25): SEQ ID NO: 1238; WAN024C79_at; Start 368; Stop 392
aatacttcaagtgcatcgttgccag

SEQ ID NO: 106832 - DNA, 25 bp, Artificial
  probe
  misc_feature (1)..(25): SEQ ID NO: 1238; WAN024C79_at; Start 177; Stop 201
ccaagatttcttttgcaagacggtc

SEQ ID NO: 106833 - DNA, 25 bp, Artificial
  probe
  misc_feature (1)..(25): SEQ ID NO: 1238; WAN024C79_at; Start 72; Stop 96
gcatcctatcttaccaacggaagtg

SEQ ID NO: 106834 - DNA, 25 bp, Artificial
  probe
  misc_feature (1)..(25): SEQ ID NO: 1238; WAN024C79_at; Start 318; Stop 342
gacgtgcacgtacttcaagtacagg

SEQ ID NO: 106835 - DNA, 25 bp, Artificial
  probe
  misc_feature (1)..(25): SEQ ID NO: 1238; WAN024C79_at; Start 83; Stop 107
taccaacggaagtgtgcgaatgcac

SEQ ID NO: 106836 - DNA, 25 bp, Artificial
  probe
  misc_feature (1)..(25): SEQ ID NO: 1238; WAN024C79_at; Start 212; Stop 236
tgttcaccacgaagacgagcgattg

SEQ ID NO: 106837 - DNA, 25 bp, Artificial
  probe
  misc_feature (1)..(25): SEQ ID NO: 1238; WAN024C79_at; Start 59; Stop 83
tcttaacgctttcgcatcctatctt

SEQ ID NO: 106838 - DNA, 25 bp, Artificial
  probe
  misc_feature (1)..(25): SEQ ID NO: 1238; WAN024C79_at; Start 208; Stop 232
tgtgtgttcaccacgaagacgagcg

SEQ ID NO: 106839 - DNA, 25 bp, Artificial
  probe
  misc_feature (1)..(25): SEQ ID NO: 2012; WAN024C7A_at; Start 250; Stop 274
ggacacaacttgcaagagcacagcg

SEQ ID NO: 106840 - DNA, 25 bp, Artificial
  probe
  misc_feature (1)..(25): SEQ ID NO: 2012; WAN024C7A_at; Start 341; Stop 365
cacttgatactgcaggtgttaacga

SEQ ID NO: 106841 - DNA, 25 bp, Artificial
  probe
  misc_feature (1)..(25): SEQ ID NO: 2012; WAN024C7A_at; Start 2; Stop 26
tgcctacaattaaccaattggttcg

SEQ ID NO: 106842 - DNA, 25 bp, Artificial
  probe
  misc_feature (1)..(25): SEQ ID NO: 2012; WAN024C7A_at; Start 124; Stop 148
caaaaacgtggtgttgcaactcgtg

SEQ ID NO: 106843 - DNA, 25 bp, Artificial
  probe
  misc_feature (1)..(25): SEQ ID NO: 2012; WAN024C7A_at; Start 263; Stop 287
aagagcacagcgtggtgcttcttcg

SEQ ID NO: 106844 - DNA, 25 bp, Artificial
  probe
  misc_feature (1)..(25): SEQ ID NO: 2012; WAN024C7A_at; Start 172; Stop 196
cctaactcagcccttcgtaaattcg

SEQ ID NO: 106845 - DNA, 25 bp, Artificial
  probe
  misc_feature (1)..(25): SEQ ID NO: 2012; WAN024C7A_at; Start 334; Stop 358
cgtggtgcacttgatactgcaggtg

SEQ ID NO: 106846 - DNA, 25 bp, Artificial
  probe
  misc_feature (1)..(25): SEQ ID NO: 2012; WAN024C7A_at; Start 353; Stop 377
caggtgttaacgatcgtaaacaagg

SEQ ID NO: 106847 - DNA, 25 bp, Artificial
  probe
  misc_feature (1)..(25): SEQ ID NO: 2012; WAN024C7A_at; Start 255; Stop 279
caacttgcaagagcacagcgtggtg

SEQ ID NO: 106848 - DNA, 25 bp, Artificial
  probe
  misc_feature (1)..(25): SEQ ID NO: 2012; WAN024C7A_at; Start 316; Stop 340
gtacgttaccatatcgtccgtggtg

SEQ ID NO: 106849 - DNA, 25 bp, Artificial
  probe
  misc_feature (1)..(25): SEQ ID NO: 2012; WAN024C7A_at; Start 56; Stop 80
ctaaatcaccagctttgaacgttgg

SEQ ID NO: 106850 - DNA, 25 bp, Artificial
  probe
  misc_feature (1)..(25): SEQ ID NO: 2012; WAN024C7A_at; Start 223; Stop 247
gaagttactgcctacatcccaggta

SEQ ID NO: 106851 - DNA, 25 bp, Artificial
  probe
  misc_feature (1)..(25): SEQ ID NO: 2012; WAN024C7A_at; Start 196; Stop 220
gctcgtgtacgtttgagcaacctta

SEQ ID NO: 106852 - DNA, 25 bp, Artificial
  probe
  misc_feature (1)..(25): SEQ ID NO: 2012; WAN024C7A_at; Start 210; Stop 234
gagcaaccttatcgaagttactgcc

SEQ ID NO: 106853 - DNA, 25 bp, Artificial
  probe
  misc_feature (1)..(25): SEQ ID NO: 2012; WAN024C7A_at; Start 329; Stop 353
tcgtccgtggtgcacttgatactgc

SEQ ID NO: 106854 - DNA, 25 bp, Artificial
  probe
  misc_feature (1)..(25): SEQ ID NO: 2012; WAN024C7A_at; Start 178; Stop 202
tcagcccttcgtaaattcgctcgtg

SEQ ID NO: 106855 - DNA, 25 bp, Artificial
  probe
  misc_feature (1)..(25): SEQ ID NO: 2012; WAN024C7A_at; Start 242; Stop 266
caggtatcggacacaacttgcaaga

SEQ ID NO: 106856 - DNA, 25 bp, Artificial
  probe
  misc_feature (1)..(25): SEQ ID NO: 2012; WAN024C7A_at; Start 140; Stop 164
caactcgtgttggaacaatgacacc

SEQ ID NO: 106857 - DNA, 25 bp, Artificial
  probe
  misc_feature (1)..(25): SEQ ID NO: 2012; WAN024C7A_at; Start 393; Stop 417
tactaaacgtccaaaagcataacta

SEQ ID NO: 106858 - DNA, 25 bp, Artificial
  probe
  misc_feature (1)..(25): SEQ ID NO: 2012; WAN024C7A_at; Start 142; Stop 166
actcgtgttggaacaatgacaccta

SEQ ID NO: 106859 - DNA, 25 bp, Artificial
  probe
  misc_feature (1)..(25): SEQ ID NO: 2012; WAN024C7A_at; Start 246; Stop 270
tatcggacacaacttgcaagagcac

SEQ ID NO: 106860 - DNA, 25 bp, Artificial
  probe
  misc_feature (1)..(25): SEQ ID NO: 2012; WAN024C7A_at; Start 46; Stop 70
gtagaaaaatctaaatcaccagctt

SEQ ID NO: 106861 - DNA, 25 bp, Artificial
  probe
  misc_feature (1)..(25): SEQ ID NO: 2012; WAN024C7A_at; Start 190; Stop 214
aaattcgctcgtgtacgtttgagca

SEQ ID NO: 106862 - DNA, 25 bp, Artificial
  probe
  misc_feature (1)..(25): SEQ ID NO: 2012; WAN024C7A_at; Start 324; Stop 348
ccatatcgtccgtggtgcacttgat

SEQ ID NO: 106863 - DNA, 25 bp, Artificial
  probe
  misc_feature (1)..(25): SEQ ID NO: 2012; WAN024C7A_at; Start 84; Stop 108
caatagtcataaaaaagttcaaaca

SEQ ID NO: 106864 - DNA, 25 bp, Artificial
  probe
  misc_feature (1)..(25): SEQ ID NO: 2012; WAN024C7A_at; Start 346; Stop 370
gatactgcaggtgttaacgatcgta

SEQ ID NO: 106865 - DNA, 25 bp, Artificial
  probe
  misc_feature (1)..(25): SEQ ID NO: 2012; WAN024C7A_at; Start 72; Stop 96
gaacgttggttacaatagtcataaa

SEQ ID NO: 106866 - DNA, 25 bp, Artificial
  probe
  misc_feature (1)..(25): SEQ ID NO: 2012; WAN024C7A_at; Start 26; Stop 50
gcaaaccgcgtaaatcaaaagtaga

SEQ ID NO: 106867 - DNA, 25 bp, Artificial
  probe
  misc_feature (1)..(25): SEQ ID NO: 2012; WAN024C7A_at; Start 16; Stop 40
caattggttcgcaaaccgcgtaaat

SEQ ID NO: 106868 - DNA, 25 bp, Artificial
  probe
  misc_feature (1)..(25): SEQ ID NO: 2012; WAN024C7A_at; Start 130; Stop 154
cgtggtgttgcaactcgtgttggaa

SEQ ID NO: 106869 - DNA, 25 bp, Artificial
  probe
  misc_feature (1)..(25): SEQ ID NO: 2012; WAN024C7A_at; Start 235; Stop 259
tacatcccaggtatcggacacaact

SEQ ID NO: 106870 - DNA, 25 bp, Artificial
  probe
  misc_feature (1)..(25): SEQ ID NO: 2012; WAN024C7A_at; Start 228; Stop 252
tactgcctacatcccaggtatcgga

SEQ ID NO: 106871 - DNA, 25 bp, Artificial
  probe
  misc_feature (1)..(25): SEQ ID NO: 2012; WAN024C7A_at; Start 64; Stop 88
ccagctttgaacgttggttacaata

SEQ ID NO: 106872 - DNA, 25 bp, Artificial
  probe
  misc_feature (1)..(25): SEQ ID NO: 2012; WAN024C7A_at; Start 202; Stop 226
gtacgtttgagcaaccttatcgaag

SEQ ID NO: 106873 - DNA, 25 bp, Artificial
  probe
  misc_feature (1)..(25): SEQ ID NO: 1628; WAN024C7B_at; Start 213; Stop 237
tgtacttgaagtacgtgcacgtcgt

SEQ ID NO: 106874 - DNA, 25 bp, Artificial
  probe
  misc_feature (1)..(25): SEQ ID NO: 1628; WAN024C7B_at; Start 371; Stop 395
tcttggatgctgctaacaacactgg

SEQ ID NO: 106875 - DNA, 25 bp, Artificial
  probe
  misc_feature (1)..(25): SEQ ID NO: 1628; WAN024C7B_at; Start 240; Stop 264
tggtggttctaactaccaagtccca

SEQ ID NO: 106876 - DNA, 25 bp, Artificial
  probe
  misc_feature (1)..(25): SEQ ID NO: 1628; WAN024C7B_at; Start 337; Stop 361
gaacacacaatgcaagaccgtcttg

SEQ ID NO: 106877 - DNA, 25 bp, Artificial
  probe
  misc_feature (1)..(25): SEQ ID NO: 1628; WAN024C7B_at; Start 420; Stop 444
tactcaccgtatggctgaagctaac

SEQ ID NO: 106878 - DNA, 25 bp, Artificial
  probe
  misc_feature (1)..(25): SEQ ID NO: 1628; WAN024C7B_at; Start 452; Stop 476
tcgcacacttccgttggtaactaat

SEQ ID NO: 106879 - DNA, 25 bp, Artificial
  probe
  misc_feature (1)..(25): SEQ ID NO: 1628; WAN024C7B_at; Start 89; Stop 113
ttatgcttgatggtaaacgtggtac

SEQ ID NO: 106880 - DNA, 25 bp, Artificial
  probe
  misc_feature (1)..(25): SEQ ID NO: 1628; WAN024C7B_at; Start 331; Stop 355
cgtggtgaacacacaatgcaagacc

SEQ ID NO: 106881 - DNA, 25 bp, Artificial
  probe
  misc_feature (1)..(25): SEQ ID NO: 1628; WAN024C7B_at; Start 52; Stop 76
tacaattcacaactagttactcgtc

SEQ ID NO: 106882 - DNA, 25 bp, Artificial
  probe
  misc_feature (1)..(25): SEQ ID NO: 1628; WAN024C7B_at; Start 362; Stop 386
caaaagaaatcttggatgctgctaa

SEQ ID NO: 106883 - DNA, 25 bp, Artificial
  probe
  misc_feature (1)..(25): SEQ ID NO: 1628; WAN024C7B_at; Start 447; Stop 471
tgcattcgcacacttccgttggtaa

SEQ ID NO: 106884 - DNA, 25 bp, Artificial
  probe
  misc_feature (1)..(25): SEQ ID NO: 1628; WAN024C7B_at; Start 2; Stop 26
tgagtcgtaaaaatagagctccaaa

SEQ ID NO: 106885 - DNA, 25 bp, Artificial
  probe
  misc_feature (1)..(25): SEQ ID NO: 1628; WAN024C7B_at; Start 69; Stop 93
tactcgtcttatcaaccgcgttatg

SEQ ID NO: 106886 - DNA, 25 bp, Artificial
  probe
  misc_feature (1)..(25): SEQ ID NO: 1628; WAN024C7B_at; Start 26; Stop 50
aacgtgacgtattgccagatccgct

SEQ ID NO: 106887 - DNA, 25 bp, Artificial
  probe
  misc_feature (1)..(25): SEQ ID NO: 1628; WAN024C7B_at; Start 322; Stop 346
gctcgtcttcgtggtgaacacacaa

SEQ ID NO: 106888 - DNA, 25 bp, Artificial
  probe
  misc_feature (1)..(25): SEQ ID NO: 1628; WAN024C7B_at; Start 65; Stop 89
tagttactcgtcttatcaaccgcgt

SEQ ID NO: 106889 - DNA, 25 bp, Artificial
  probe
  misc_feature (1)..(25): SEQ ID NO: 1628; WAN024C7B_at; Start 278; Stop 302
cagaacgtcgtacaacacttggact

SEQ ID NO: 106890 - DNA, 25 bp, Artificial
  probe
  misc_feature (1)..(25): SEQ ID NO: 1628; WAN024C7B_at; Start 308; Stop 332
ggttggtaacaatcgctcgtcttcg

SEQ ID NO: 106891 - DNA, 25 bp, Artificial
  probe
  misc_feature (1)..(25): SEQ ID NO: 1628; WAN024C7B_at; Start 10; Stop 34
aaaaatagagctccaaaacgtgacg

SEQ ID NO: 106892 - DNA, 25 bp, Artificial
  probe
  misc_feature (1)..(25): SEQ ID NO: 1628; WAN024C7B_at; Start 15; Stop 39
tagagctccaaaacgtgacgtattg

SEQ ID NO: 106893 - DNA, 25 bp, Artificial
  probe
  misc_feature (1)..(25): SEQ ID NO: 1628; WAN024C7B_at; Start 156; Stop 180
agctactggcaacgatgcacttgaa

SEQ ID NO: 106894 - DNA, 25 bp, Artificial
  probe
  misc_feature (1)..(25): SEQ ID NO: 1628; WAN024C7B_at; Start 352; Stop 376
gaccgtcttgcaaaagaaatcttgg

SEQ ID NO: 106895 - DNA, 25 bp, Artificial
  probe
  misc_feature (1)..(25): SEQ ID NO: 1628; WAN024C7B_at; Start 81; Stop 105
caaccgcgttatgcttgatggtaaa

SEQ ID NO: 106896 - DNA, 25 bp, Artificial
  probe
  misc_feature (1)..(25): SEQ ID NO: 1628; WAN024C7B_at; Start 286; Stop 310
cgtacaacacttggacttcgttggt

SEQ ID NO: 106897 - DNA, 25 bp, Artificial
  probe
  misc_feature (1)..(25): SEQ ID NO: 1628; WAN024C7B_at; Start 270; Stop 294
agttcgtccagaacgtcgtacaaca

SEQ ID NO: 106898 - DNA, 25 bp, Artificial
  probe
  misc_feature (1)..(25): SEQ ID NO: 1628; WAN024C7B_at; Start 404; Stop 428
ttaagaaacgtgaagatactcaccg

SEQ ID NO: 106899 - DNA, 25 bp, Artificial
  probe
  misc_feature (1)..(25): SEQ ID NO: 1628; WAN024C7B_at; Start 228; Stop 252
tgcacgtcgtgttggtggttctaac

SEQ ID NO: 106900 - DNA, 25 bp, Artificial
  probe
  misc_feature (1)..(25): SEQ ID NO: 1628; WAN024C7B_at; Start 299; Stop 323
gacttcgttggttggtaacaatcgc

SEQ ID NO: 106901 - DNA, 25 bp, Artificial
  probe
  misc_feature (1)..(25): SEQ ID NO: 1628; WAN024C7B_at; Start 149; Stop 173
tcaaagaagctactggcaacgatgc

SEQ ID NO: 106902 - DNA, 25 bp, Artificial
  probe
  misc_feature (1)..(25): SEQ ID NO: 1628; WAN024C7B_at; Start 164; Stop 188
gcaacgatgcacttgaagtatttga

SEQ ID NO: 106903 - DNA, 25 bp, Artificial
  probe
  misc_feature (1)..(25): SEQ ID NO: 1628; WAN024C7B_at; Start 414; Stop 438
tgaagatactcaccgtatggctgaa

SEQ ID NO: 106904 - DNA, 25 bp, Artificial
  probe
  misc_feature (1)..(25): SEQ ID NO: 1628; WAN024C7B_at; Start 317; Stop 341
caatcgctcgtcttcgtggtgaaca

SEQ ID NO: 106905 - DNA, 25 bp, Artificial
  probe
  misc_feature (1)..(25): SEQ ID NO: 1628; WAN024C7B_at; Start 376; Stop 400
gatgctgctaacaacactggtgcag

SEQ ID NO: 106906 - DNA, 25 bp, Artificial
  probe
  misc_feature (1)..(25): SEQ ID NO: 1628; WAN024C7B_at; Start 141; Stop 165
tgagcaaatcaaagaagctactggc

SEQ ID NO: 106907 - DNA, 25 bp, Artificial
  probe
  misc_feature (1)..(25): SEQ ID NO: 1112; WAN024C7C_at; Start 357; Stop 381
gagtcctagacgtggtggatatatg

SEQ ID NO: 106908 - DNA, 25 bp, Artificial
  probe
  misc_feature (1)..(25): SEQ ID NO: 1112; WAN024C7C_at; Start 146; Stop 170
caagaataccaggaactaagggtgg

SEQ ID NO: 106909 - DNA, 25 bp, Artificial
  probe
  misc_feature (1)..(25): SEQ ID NO: 1112; WAN024C7C_at; Start 374; Stop 398
gatatatgtttgatggtttccctga

SEQ ID NO: 106910 - DNA, 25 bp, Artificial
  probe
  misc_feature (1)..(25): SEQ ID NO: 1112; WAN024C7C_at; Start 213; Stop 237
caggttgctttataaacggtatttg

SEQ ID NO: 106911 - DNA, 25 bp, Artificial
  probe
  misc_feature (1)..(25): SEQ ID NO: 1112; WAN024C7C_at; Start 236; Stop 260
tgtattttagttgcggtacctgtct

SEQ ID NO: 106912 - DNA, 25 bp, Artificial
  probe
  misc_feature (1)..(25): SEQ ID NO: 1112; WAN024C7C_at; Start 344; Stop 368
tagaaccagggtggagtcctagacg

SEQ ID NO: 106913 - DNA, 25 bp, Artificial
  probe
  misc_feature (1)..(25): SEQ ID NO: 1112; WAN024C7C_at; Start 206; Stop 230
gacggtgcaggttgctttataaacg

SEQ ID NO: 106914 - DNA, 25 bp, Artificial
  probe
  misc_feature (1)..(25): SEQ ID NO: 1112; WAN024C7C_at; Start 295; Stop 319
acggattgccaatattactgggagc

SEQ ID NO: 106915 - DNA, 25 bp, Artificial
  probe
  misc_feature (1)..(25): SEQ ID NO: 1112; WAN024C7C_at; Start 329; Stop 353
aagaagctagaaaggtagaaccagg

SEQ ID NO: 106916 - DNA, 25 bp, Artificial
  probe
  misc_feature (1)..(25): SEQ ID NO: 1112; WAN024C7C_at; Start 384; Stop 408
tgatggtttccctgaaagaccaaag

SEQ ID NO: 106917 - DNA, 25 bp, Artificial
  probe
  misc_feature (1)..(25): SEQ ID NO: 1112; WAN024C7C_at; Start 319; Stop 343
cttgcactaaaagaagctagaaagg

SEQ ID NO: 106918 - DNA, 25 bp, Artificial
  probe
  misc_feature (1)..(25): SEQ ID NO: 1112; WAN024C7C_at; Start 282; Stop 306
gaaccgcagtaaaacggattgccaa

SEQ ID NO: 106919 - DNA, 25 bp, Artificial
  probe
  misc_feature (1)..(25): SEQ ID NO: 1112; WAN024C7C_at; Start 26; Stop 50
tcactaaaccaatgaagctgagagg

SEQ ID NO: 106920 - DNA, 25 bp, Artificial
  probe
  misc_feature (1)..(25): SEQ ID NO: 1112; WAN024C7C_at; Start 2; Stop 26
tgaagcggttagcaatagaaacaat

SEQ ID NO: 106921 - DNA, 25 bp, Artificial
  probe
  misc_feature (1)..(25): SEQ ID NO: 1112; WAN024C7C_at; Start 250; Stop 274
ggtacctgtctagatatccacaaga

SEQ ID NO: 106922 - DNA, 25 bp, Artificial
  probe
  misc_feature (1)..(25): SEQ ID NO: 1112; WAN024C7C_at; Start 53; Stop 77
tatctaagggtatagccgagttgga

SEQ ID NO: 106923 - DNA, 25 bp, Artificial
  probe
  misc_feature (1)..(25): SEQ ID NO: 1112; WAN024C7C_at; Start 310; Stop 334
tactgggagcttgcactaaaagaag

SEQ ID NO: 106924 - DNA, 25 bp, Artificial
  probe
  misc_feature (1)..(25): SEQ ID NO: 1112; WAN024C7C_at; Start 118; Stop 142
gattttggtggagagtcatttgatt

SEQ ID NO: 106925 - DNA, 25 bp, Artificial
  probe
  misc_feature (1)..(25): SEQ ID NO: 1112; WAN024C7C_at; Start 260; Stop 284
tagatatccacaagagcaccctgaa

SEQ ID NO: 106926 - DNA, 25 bp, Artificial
  probe
  misc_feature (1)..(25): SEQ ID NO: 1112; WAN024C7C_at; Start 273; Stop 297
gagcaccctgaaccgcagtaaaacg

SEQ ID NO: 106927 - DNA, 25 bp, Artificial
  probe
  misc_feature (1)..(25): SEQ ID NO: 1112; WAN024C7C_at; Start 134; Stop 158
catttgatttagcaagaataccagg

SEQ ID NO: 106928 - DNA, 25 bp, Artificial
  probe
  misc_feature (1)..(25): SEQ ID NO: 1112; WAN024C7C_at; Start 63; Stop 87
tatagccgagttggacggtcaaggt

SEQ ID NO: 106929 - DNA, 25 bp, Artificial
  probe
  misc_feature (1)..(25): SEQ ID NO: 1112; WAN024C7C_at; Start 190; Stop 214
tgccctgattgtggtagacggtgca

SEQ ID NO: 106930 - DNA, 25 bp, Artificial
  probe
  misc_feature (1)..(25): SEQ ID NO: 1112; WAN024C7C_at; Start 474; Stop 498
tagattttggctgaatggtttgaga

SEQ ID NO: 106931 - DNA, 25 bp, Artificial
  probe
  misc_feature (1)..(25): SEQ ID NO: 1112; WAN024C7C_at; Start 11; Stop 35
tagcaatagaaacaatcactaaacc

SEQ ID NO: 106932 - DNA, 25 bp, Artificial
  probe
  misc_feature (1)..(25): SEQ ID NO: 1112; WAN024C7C_at; Start 401; Stop 425
gaccaaagtatatgaagcgtgacag

SEQ ID NO: 106933 - DNA, 25 bp, Artificial
  probe
  misc_feature (1)..(25): SEQ ID NO: 1112; WAN024C7C_at; Start 421; Stop 445
gacaggtatcataagcactataaga

SEQ ID NO: 106934 - DNA, 25 bp, Artificial
  probe
  misc_feature (1)..(25): SEQ ID NO: 1112; WAN024C7C_at; Start 186; Stop 210
tctttgccctgattgtggtagacgg

SEQ ID NO: 106935 - DNA, 25 bp, Artificial
  probe
  misc_feature (1)..(25): SEQ ID NO: 1112; WAN024C7C_at; Start 302; Stop 326
gccaatattactgggagcttgcact

SEQ ID NO: 106936 - DNA, 25 bp, Artificial
  probe
  misc_feature (1)..(25): SEQ ID NO: 1112; WAN024C7C_at; Start 432; Stop 456
taagcactataagaagtttttgaag

SEQ ID NO: 106937 - DNA, 25 bp, Artificial
  probe
  misc_feature (1)..(25): SEQ ID NO: 1112; WAN024C7C_at; Start 414; Stop 438
gaagcgtgacaggtatcataagcac

SEQ ID NO: 106938 - DNA, 25 bp, Artificial
  probe
  misc_feature (1)..(25): SEQ ID NO: 1112; WAN024C7C_at; Start 38; Stop 62
tgaagctgagaggaatatctaaggg

SEQ ID NO: 106939 - DNA, 25 bp, Artificial
  probe
  misc_feature (1)..(25): SEQ ID NO: 1112; WAN024C7C_at; Start 76; Stop 100
gacggtcaaggtttagagattgatt

SEQ ID NO: 106940 - DNA, 25 bp, Artificial
  probe
  misc_feature (1)..(25): SEQ ID NO: 1112; WAN024C7C_at; Start 172; Stop 196
tatcgttatttctttctttgccctg

SEQ ID NO: 106941 - DNA, 25 bp, Artificial
  probe
  misc_feature (1)..(25): SEQ ID NO: 5392; WAN024C7D_at; Start 45; Stop 69
tagcatccaccacttgcttagtcgg

SEQ ID NO: 106942 - DNA, 25 bp, Artificial
  probe
  misc_feature (1)..(25): SEQ ID NO: 5392; WAN024C7D_at; Start 52; Stop 76
caccacttgcttagtcggatggaaa

SEQ ID NO: 106943 - DNA, 25 bp, Artificial
  probe
  misc_feature (1)..(25): SEQ ID NO: 5392; WAN024C7D_at; Start 61; Stop 85
cttagtcggatggaaataatctttc

SEQ ID NO: 106944 - DNA, 25 bp, Artificial
  probe
  misc_feature (1)..(25): SEQ ID NO: 5392; WAN024C7D_at; Start 222; Stop 246
caataatagcatatacaatcggtag

SEQ ID NO: 106945 - DNA, 25 bp, Artificial
  probe
  misc_feature (1)..(25): SEQ ID NO: 5392; WAN024C7D_at; Start 209; Stop 233
cgtggattaccaccaataatagcat

SEQ ID NO: 106946 - DNA, 25 bp, Artificial
  probe
  misc_feature (1)..(25): SEQ ID NO: 5392; WAN024C7D_at; Start 69; Stop 93
gatggaaataatctttcaccgcctg

SEQ ID NO: 106947 - DNA, 25 bp, Artificial
  probe
  misc_feature (1)..(25): SEQ ID NO: 5392; WAN024C7D_at; Start 55; Stop 79
cacttgcttagtcggatggaaataa

SEQ ID NO: 106948 - DNA, 25 bp, Artificial
  probe
  misc_feature (1)..(25): SEQ ID NO: 5392; WAN024C7D_at; Start 8; Stop 32
taacgcaattcctgccagtgcggac

SEQ ID NO: 106949 - DNA, 25 bp, Artificial
  probe
  misc_feature (1)..(25): SEQ ID NO: 5392; WAN024C7D_at; Start 139; Stop 163
caagtctttgtcagcatggcccgct

SEQ ID NO: 106950 - DNA, 25 bp, Artificial
  probe
  misc_feature (1)..(25): SEQ ID NO: 5392; WAN024C7D_at; Start 71; Stop 95
tggaaataatctttcaccgcctgct

SEQ ID NO: 106951 - DNA, 25 bp, Artificial
  probe
  misc_feature (1)..(25): SEQ ID NO: 5392; WAN024C7D_at; Start 175; Stop 199
ctcacgataagcctgaatcaacttt

SEQ ID NO: 106952 - DNA, 25 bp, Artificial
  probe
  misc_feature (1)..(25): SEQ ID NO: 5392; WAN024C7D_at; Start 33; Stop 57
ggtctttggaaatagcatccaccac

SEQ ID NO: 106953 - DNA, 25 bp, Artificial
  probe
  misc_feature (1)..(25): SEQ ID NO: 5392; WAN024C7D_at; Start 22; Stop 46
ccagtgcggacggtctttggaaata

SEQ ID NO: 106954 - DNA, 25 bp, Artificial
  probe
  misc_feature (1)..(25): SEQ ID NO: 5392; WAN024C7D_at; Start 143; Stop 167
tctttgtcagcatggcccgcttcgc

SEQ ID NO: 106955 - DNA, 25 bp, Artificial
  probe
  misc_feature (1)..(25): SEQ ID NO: 5392; WAN024C7D_at; Start 2; Stop 26
tgctcataacgcaattcctgccagt

SEQ ID NO: 106956 - DNA, 25 bp, Artificial
  probe
  misc_feature (1)..(25): SEQ ID NO: 5392; WAN024C7D_at; Start 118; Stop 142
ccaagaatgggctcccactttcaag

SEQ ID NO: 106957 - DNA, 25 bp, Artificial
  probe
  misc_feature (1)..(25): SEQ ID NO: 5392; WAN024C7D_at; Start 161; Stop 185
gcttcgcttccaatctcacgataag

SEQ ID NO: 106958 - DNA, 25 bp, Artificial
  probe
  misc_feature (1)..(25): SEQ ID NO: 5392; WAN024C7D_at; Start 30; Stop 54
gacggtctttggaaatagcatccac

SEQ ID NO: 106959 - DNA, 25 bp, Artificial
  probe
  misc_feature (1)..(25): SEQ ID NO: 5392; WAN024C7D_at; Start 137; Stop 161
ttcaagtctttgtcagcatggcccg

SEQ ID NO: 106960 - DNA, 25 bp, Artificial
  probe
  misc_feature (1)..(25): SEQ ID NO: 5392; WAN024C7D_at; Start 12; Stop 36
gcaattcctgccagtgcggacggtc

SEQ ID NO: 106961 - DNA, 25 bp, Artificial
  probe
  misc_feature (1)..(25): SEQ ID NO: 5392; WAN024C7D_at; Start 27; Stop 51
gcggacggtctttggaaatagcatc

SEQ ID NO: 106962 - DNA, 25 bp, Artificial
  probe
  misc_feature (1)..(25): SEQ ID NO: 5392; WAN024C7D_at; Start 122; Stop 146
gaatgggctcccactttcaagtctt

SEQ ID NO: 106963 - DNA, 25 bp, Artificial
  probe
  misc_feature (1)..(25): SEQ ID NO: 5392; WAN024C7D_at; Start 41; Stop 65
gaaatagcatccaccacttgcttag

SEQ ID NO: 106964 - DNA, 25 bp, Artificial
  probe
  misc_feature (1)..(25): SEQ ID NO: 5392; WAN024C7D_at; Start 180; Stop 204
gataagcctgaatcaactttttaaa

SEQ ID NO: 106965 - DNA, 25 bp, Artificial
  probe
  misc_feature (1)..(25): SEQ ID NO: 5392; WAN024C7D_at; Start 6; Stop 30
cataacgcaattcctgccagtgcgg

SEQ ID NO: 106966 - DNA, 25 bp, Artificial
  probe
  misc_feature (1)..(25): SEQ ID NO: 5392; WAN024C7D_at; Start 166; Stop 190
gcttccaatctcacgataagcctga

SEQ ID NO: 106967 - DNA, 25 bp, Artificial
  probe
  misc_feature (1)..(25): SEQ ID NO: 5392; WAN024C7D_at; Start 74; Stop 98
aaataatctttcaccgcctgctcac

SEQ ID NO: 106968 - DNA, 25 bp, Artificial
  probe
  misc_feature (1)..(25): SEQ ID NO: 5392; WAN024C7D_at; Start 89; Stop 113
gcctgctcaccatcttccgcaatcc

SEQ ID NO: 106969 - DNA, 25 bp, Artificial
  probe
  misc_feature (1)..(25): SEQ ID NO: 5392; WAN024C7D_at; Start 37; Stop 61
tttggaaatagcatccaccacttgc

SEQ ID NO: 106970 - DNA, 25 bp, Artificial
  probe
  misc_feature (1)..(25): SEQ ID NO: 5392; WAN024C7D_at; Start 125; Stop 149
tgggctcccactttcaagtctttgt

SEQ ID NO: 106971 - DNA, 25 bp, Artificial
  probe
  misc_feature (1)..(25): SEQ ID NO: 5392; WAN024C7D_at; Start 14; Stop 38
aattcctgccagtgcggacggtctt

SEQ ID NO: 106972 - DNA, 25 bp, Artificial
  probe
  misc_feature (1)..(25): SEQ ID NO: 5392; WAN024C7D_at; Start 171; Stop 195
caatctcacgataagcctgaatcaa

SEQ ID NO: 106973 - DNA, 25 bp, Artificial
  probe
  misc_feature (1)..(25): SEQ ID NO: 5392; WAN024C7D_at; Start 18; Stop 42
cctgccagtgcggacggtctttgga

SEQ ID NO: 106974 - DNA, 25 bp, Artificial
  probe
  misc_feature (1)..(25): SEQ ID NO: 5392; WAN024C7D_at; Start 212; Stop 236
ggattaccaccaataatagcatata

SEQ ID NO: 106975 - DNA, 25 bp, Artificial
  probe
  misc_feature (1)..(25): SEQ ID NO: 3860; WAN024C7E_at; Start 244; Stop 268
tcaatctctgccaccaactggcgaa

SEQ ID NO: 106976 - DNA, 25 bp, Artificial
  probe
  misc_feature (1)..(25): SEQ ID NO: 3860; WAN024C7E_at; Start 176; Stop 200
atactgcaaaatccgcccgatggtg

SEQ ID NO: 106977 - DNA, 25 bp, Artificial
  probe
  misc_feature (1)..(25): SEQ ID NO: 3860; WAN024C7E_at; Start 232; Stop 256
ttgtcagccagctcaatctctgcca

SEQ ID NO: 106978 - DNA, 25 bp, Artificial
  probe
  misc_feature (1)..(25): SEQ ID NO: 3860; WAN024C7E_at; Start 105; Stop 129
gctgactgcactggtcaaacggatt

SEQ ID NO: 106979 - DNA, 25 bp, Artificial
  probe
  misc_feature (1)..(25): SEQ ID NO: 3860; WAN024C7E_at; Start 42; Stop 66
tgacaaagcatcgatagtggcatac

SEQ ID NO: 106980 - DNA, 25 bp, Artificial
  probe
  misc_feature (1)..(25): SEQ ID NO: 3860; WAN024C7E_at; Start 130; Stop 154
ttcttggtattgactgccccagcgg

SEQ ID NO: 106981 - DNA, 25 bp, Artificial
  probe
  misc_feature (1)..(25): SEQ ID NO: 3860; WAN024C7E_at; Start 45; Stop 69
caaagcatcgatagtggcatactgt

SEQ ID NO: 106982 - DNA, 25 bp, Artificial
  probe
  misc_feature (1)..(25): SEQ ID NO: 3860; WAN024C7E_at; Start 250; Stop 274
tctgccaccaactggcgaatgcgtt

SEQ ID NO: 106983 - DNA, 25 bp, Artificial
  probe
  misc_feature (1)..(25): SEQ ID NO: 3860; WAN024C7E_at; Start 258; Stop 282
caactggcgaatgcgttcagcatga

SEQ ID NO: 106984 - DNA, 25 bp, Artificial
  probe
  misc_feature (1)..(25): SEQ ID NO: 3860; WAN024C7E_at; Start 88; Stop 112
tccatgcttgacagaatgctgactg

SEQ ID NO: 106985 - DNA, 25 bp, Artificial
  probe
  misc_feature (1)..(25): SEQ ID NO: 3860; WAN024C7E_at; Start 38; Stop 62
catttgacaaagcatcgatagtggc

SEQ ID NO: 106986 - DNA, 25 bp, Artificial
  probe
  misc_feature (1)..(25): SEQ ID NO: 3860; WAN024C7E_at; Start 102; Stop 126
aatgctgactgcactggtcaaacgg

SEQ ID NO: 106987 - DNA, 25 bp, Artificial
  probe
  misc_feature (1)..(25): SEQ ID NO: 3860; WAN024C7E_at; Start 4; Stop 28
aaagagccccttccagccataatct

SEQ ID NO: 106988 - DNA, 25 bp, Artificial
  probe
  misc_feature (1)..(25): SEQ ID NO: 3860; WAN024C7E_at; Start 223; Stop 247
aaaccaaccttgtcagccagctcaa

SEQ ID NO: 106989 - DNA, 25 bp, Artificial
  probe
  misc_feature (1)..(25): SEQ ID NO: 3860; WAN024C7E_at; Start 53; Stop 77
cgatagtggcatactgttggaacaa

SEQ ID NO: 106990 - DNA, 25 bp, Artificial
  probe
  misc_feature (1)..(25): SEQ ID NO: 3860; WAN024C7E_at; Start 112; Stop 136
gcactggtcaaacggattttcttgg

SEQ ID NO: 106991 - DNA, 25 bp, Artificial
  probe
  misc_feature (1)..(25): SEQ ID NO: 3860; WAN024C7E_at; Start 161; Stop 185
caatctctggggctgatactgcaaa

SEQ ID NO: 106992 - DNA, 25 bp, Artificial
  probe
  misc_feature (1)..(25): SEQ ID NO: 3860; WAN024C7E_at; Start 255; Stop 279
caccaactggcgaatgcgttcagca

SEQ ID NO: 106993 - DNA, 25 bp, Artificial
  probe
  misc_feature (1)..(25): SEQ ID NO: 3860; WAN024C7E_at; Start 132; Stop 156
cttggtattgactgccccagcggcc

SEQ ID NO: 106994 - DNA, 25 bp, Artificial
  probe
  misc_feature (1)..(25): SEQ ID NO: 3860; WAN024C7E_at; Start 126; Stop 150
gattttcttggtattgactgcccca

SEQ ID NO: 106995 - DNA, 25 bp, Artificial
  probe
  misc_feature (1)..(25): SEQ ID NO: 3860; WAN024C7E_at; Start 28; Stop 52
tccgatcgtccatttgacaaagcat

SEQ ID NO: 106996 - DNA, 25 bp, Artificial
  probe
  misc_feature (1)..(25): SEQ ID NO: 3860; WAN024C7E_at; Start 55; Stop 79
atagtggcatactgttggaacaaac

SEQ ID NO: 106997 - DNA, 25 bp, Artificial
  probe
  misc_feature (1)..(25): SEQ ID NO: 3860; WAN024C7E_at; Start 1; Stop 25
gtgaaagagccccttccagccataa

SEQ ID NO: 106998 - DNA, 25 bp, Artificial
  probe
  misc_feature (1)..(25): SEQ ID NO: 3860; WAN024C7E_at; Start 31; Stop 55
gatcgtccatttgacaaagcatcga

SEQ ID NO: 106999 - DNA, 25 bp, Artificial
  probe
  misc_feature (1)..(25): SEQ ID NO: 3860; WAN024C7E_at; Start 171; Stop 195
ggctgatactgcaaaatccgcccga

SEQ ID NO: 107000 - DNA, 25 bp, Artificial
  probe
  misc_feature (1)..(25): SEQ ID NO: 3860; WAN024C7E_at; Start 99; Stop 123
cagaatgctgactgcactggtcaaa

SEQ ID NO: 107001 - DNA, 25 bp, Artificial
  probe
  misc_feature (1)..(25): SEQ ID NO: 3860; WAN024C7E_at; Start 122; Stop 146
aacggattttcttggtattgactgc

SEQ ID NO: 107002 - DNA, 25 bp, Artificial
  probe
  misc_feature (1)..(25): SEQ ID NO: 3860; WAN024C7E_at; Start 93; Stop 117
gcttgacagaatgctgactgcactg

SEQ ID NO: 107003 - DNA, 25 bp, Artificial
  probe
  misc_feature (1)..(25): SEQ ID NO: 3860; WAN024C7E_at; Start 17; Stop 41
cagccataatctccgatcgtccatt

SEQ ID NO: 107004 - DNA, 25 bp, Artificial
  probe
  misc_feature (1)..(25): SEQ ID NO: 3860; WAN024C7E_at; Start 174; Stop 198
tgatactgcaaaatccgcccgatgg

SEQ ID NO: 107005 - DNA, 25 bp, Artificial
  probe
  misc_feature (1)..(25): SEQ ID NO: 3860; WAN024C7E_at; Start 109; Stop 133
actgcactggtcaaacggattttct

SEQ ID NO: 107006 - DNA, 25 bp, Artificial
  probe
  misc_feature (1)..(25): SEQ ID NO: 3860; WAN024C7E_at; Start 96; Stop 120
tgacagaatgctgactgcactggtc

SEQ ID NO: 107007 - DNA, 25 bp, Artificial
  probe
  misc_feature (1)..(25): SEQ ID NO: 3860; WAN024C7E_at; Start 23; Stop 47
taatctccgatcgtccatttgacaa

SEQ ID NO: 107008 - DNA, 25 bp, Artificial
  probe
  misc_feature (1)..(25): SEQ ID NO: 3860; WAN024C7E_at; Start 50; Stop 74
catcgatagtggcatactgttggaa

SEQ ID NO: 107009 - DNA, 25 bp, Artificial
  probe
  misc_feature (1)..(25): SEQ ID NO: 2639; WAN024C7F_at; Start 468; Stop 492
gactcaaacgattgctggtaaagaa

SEQ ID NO: 107010 - DNA, 25 bp, Artificial
  probe
  misc_feature (1)..(25): SEQ ID NO: 2639; WAN024C7F_at; Start 765; Stop 789
taagcaagtggtggatgctatttcc

SEQ ID NO: 107011 - DNA, 25 bp, Artificial
  probe
  misc_feature (1)..(25): SEQ ID NO: 2639; WAN024C7F_at; Start 219; Stop 243
gaaaatccgtttgaccagtgcagtc

SEQ ID NO: 107012 - DNA, 25 bp, Artificial
  probe
  misc_feature (1)..(25): SEQ ID NO: 2639; WAN024C7F_at; Start 802; Stop 826
cactggcaggaattgcgttatgagc

SEQ ID NO: 107013 - DNA, 25 bp, Artificial
  probe
  misc_feature (1)..(25): SEQ ID NO: 2639; WAN024C7F_at; Start 825; Stop 849
gcaatatttggagcaggtagggcca

SEQ ID NO: 107014 - DNA, 25 bp, Artificial
  probe
  misc_feature (1)..(25): SEQ ID NO: 2639; WAN024C7F_at; Start 537; Stop 561
tacaggtggtcatgtcgaatcaaca

SEQ ID NO: 107015 - DNA, 25 bp, Artificial
  probe
  misc_feature (1)..(25): SEQ ID NO: 2639; WAN024C7F_at; Start 72; Stop 96
tgctgaacgcattcgccagttggtg

SEQ ID NO: 107016 - DNA, 25 bp, Artificial
  probe
  misc_feature (1)..(25): SEQ ID NO: 2639; WAN024C7F_at; Start 783; Stop 807
tatttccaaagaccgtccgcactgg

SEQ ID NO: 107017 - DNA, 25 bp, Artificial
  probe
  misc_feature (1)..(25): SEQ ID NO: 2639; WAN024C7F_at; Start 929; Stop 953
gcttcatgcttcatctaccgcttgg

SEQ ID NO: 107018 - DNA, 25 bp, Artificial
  probe
  misc_feature (1)..(25): SEQ ID NO: 2639; WAN024C7F_at; Start 879; Stop 903
tcaggtggccgaaaaattgattcgc

SEQ ID NO: 107019 - DNA, 25 bp, Artificial
  probe
  misc_feature (1)..(25): SEQ ID NO: 2639; WAN024C7F_at; Start 944; Stop 968
taccgcttggttctatgcctcatga

SEQ ID NO: 107020 - DNA, 25 bp, Artificial
  probe
  misc_feature (1)..(25): SEQ ID NO: 2639; WAN024C7F_at; Start 490; Stop 514
gaagtttatcctcgtccagttcagg

SEQ ID NO: 107021 - DNA, 25 bp, Artificial
  probe
  misc_feature (1)..(25): SEQ ID NO: 2639; WAN024C7F_at; Start 963; Stop 987
tcatgaccaggttctgagagctatt

SEQ ID NO: 107022 - DNA, 25 bp, Artificial
  probe
  misc_feature (1)..(25): SEQ ID NO: 2639; WAN024C7F_at; Start 910; Stop 934
gaggatttaggattggaccgcttca

SEQ ID NO: 107023 - DNA, 25 bp, Artificial
  probe
  misc_feature (1)..(25): SEQ ID NO: 2639; WAN024C7F_at; Start 516; Stop 540
caaattgcccttgtggatagctaca

SEQ ID NO: 107024 - DNA, 25 bp, Artificial
  probe
  misc_feature (1)..(25): SEQ ID NO: 2639; WAN024C7F_at; Start 451; Stop 475
gactggcaaggtcgattgactcaaa

SEQ ID NO: 107025 - DNA, 25 bp, Artificial
  probe
  misc_feature (1)..(25): SEQ ID NO: 2639; WAN024C7F_at; Start 275; Stop 299
tgttccaacagtatgccactatcga

SEQ ID NO: 107026 - DNA, 25 bp, Artificial
  probe
  misc_feature (1)..(25): SEQ ID NO: 2639; WAN024C7F_at; Start 436; Stop 460
gaaaagaccaagttagactggcaag

SEQ ID NO: 107027 - DNA, 25 bp, Artificial
  probe
  misc_feature (1)..(25): SEQ ID NO: 2639; WAN024C7F_at; Start 864; Stop 888
tgttggcaatccagatcaggtggcc

SEQ ID NO: 107028 - DNA, 25 bp, Artificial
  probe
  misc_feature (1)..(25): SEQ ID NO: 2639; WAN024C7F_at; Start 291; Stop 315
cactatcgatgctttgtcaaatgga

SEQ ID NO: 107029 - DNA, 25 bp, Artificial
  probe
  misc_feature (1)..(25): SEQ ID NO: 2639; WAN024C7F_at; Start 980; Stop 1004
gagctattgaactcttcggaacaca

SEQ ID NO: 107030 - DNA, 25 bp, Artificial
  probe
  misc_feature (1)..(25): SEQ ID NO: 2639; WAN024C7F_at; Start 1003; Stop 1027
caagttgcacccaaagtacgagctt

SEQ ID NO: 107031 - DNA, 25 bp, Artificial
  probe
  misc_feature (1)..(25): SEQ ID NO: 2639; WAN024C7F_at; Start 848; Stop 872
caaatggcgccatgtttgttggcaa

SEQ ID NO: 107032 - DNA, 25 bp, Artificial
  probe
  misc_feature (1)..(25): SEQ ID NO: 2639; WAN024C7F_at; Start 681; Stop 705
caaagacttgaaagtgggagcccat

SEQ ID NO: 107033 - DNA, 25 bp, Artificial
  probe
  misc_feature (1)..(25): SEQ ID NO: 2639; WAN024C7F_at; Start 733; Stop 757
gagcaggcggtgaaagattatttcc

SEQ ID NO: 107034 - DNA, 25 bp, Artificial
  probe
  misc_feature (1)..(25): SEQ ID NO: 2639; WAN024C7F_at; Start 203; Stop 227
gggcagtcaataccaagaaaatccg

SEQ ID NO: 107035 - DNA, 25 bp, Artificial
  probe
  misc_feature (1)..(25): SEQ ID NO: 2639; WAN024C7F_at; Start 56; Stop 80
gacaaacttacagtcatgctgaacg

SEQ ID NO: 107036 - DNA, 25 bp, Artificial
  probe
  misc_feature (1)..(25): SEQ ID NO: 2639; WAN024C7F_at; Start 162; Stop 186
ggattttgcagtatcagccccagag

SEQ ID NO: 107037 - DNA, 25 bp, Artificial
  probe
  misc_feature (1)..(25): SEQ ID NO: 2639; WAN024C7F_at; Start 35; Stop 59
taacggagcttgaagggactggaca

SEQ ID NO: 107038 - DNA, 25 bp, Artificial
  probe
  misc_feature (1)..(25): SEQ ID NO: 2639; WAN024C7F_at; Start 751; Stop 775
tatttccatccgactaagcaagtgg

SEQ ID NO: 107039 - DNA, 25 bp, Artificial
  probe
  misc_feature (1)..(25): SEQ ID NO: 2639; WAN024C7F_at; Start 373; Stop 397
tatgacttgaaagactacgactctc

SEQ ID NO: 107040 - DNA, 25 bp, Artificial
  probe
  misc_feature (1)..(25): SEQ ID NO: 2639; WAN024C7F_at; Start 564; Stop 588
gaagattgctcaggctggtctaccg

SEQ ID NO: 107041 - DNA, 25 bp, Artificial
  probe
  misc_feature (1)..(25): SEQ ID NO: 2639; WAN024C7F_at; Start 636; Stop 660
gattcaggcttatcgtgagattgga

SEQ ID NO: 107042 - DNA, 25 bp, Artificial
  probe
  misc_feature (1)..(25): SEQ ID NO: 2639; WAN024C7F_at; Start 239; Stop 263
cagtcagcattctgtcaagcatgga

SEQ ID NO: 107043 - DNA, 25 bp, Artificial
  probe
  misc_feature (1)..(25): SEQ ID NO: 2100; WAN024C7G_at; Start 173; Stop 197
taaccaaattctacaggaacgatgg

SEQ ID NO: 107044 - DNA, 25 bp, Artificial
  probe
  misc_feature (1)..(25): SEQ ID NO: 2100; WAN024C7G_at; Start 108; Stop 132
tatgataggctaccttaacagctgc

SEQ ID NO: 107045 - DNA, 25 bp, Artificial
  probe
  misc_feature (1)..(25): SEQ ID NO: 2100; WAN024C7G_at; Start 69; Stop 93
catggcaagccttaacagcccggct

SEQ ID NO: 107046 - DNA, 25 bp, Artificial
  probe
  misc_feature (1)..(25): SEQ ID NO: 2100; WAN024C7G_at; Start 45; Stop 69
caatcttggaatcaggcaaaagttc

SEQ ID NO: 107047 - DNA, 25 bp, Artificial
  probe
  misc_feature (1)..(25): SEQ ID NO: 2100; WAN024C7G_at; Start 97; Stop 121
ggccaattgtgtatgataggctacc

SEQ ID NO: 107048 - DNA, 25 bp, Artificial
  probe
  misc_feature (1)..(25): SEQ ID NO: 2100; WAN024C7G_at; Start 85; Stop 109
agcccggctgctggccaattgtgta

SEQ ID NO: 107049 - DNA, 25 bp, Artificial
  probe
  misc_feature (1)..(25): SEQ ID NO: 2100; WAN024C7G_at; Start 15; Stop 39
gataagccggtgtcaagttgaggac

SEQ ID NO: 107050 - DNA, 25 bp, Artificial
  probe
  misc_feature (1)..(25): SEQ ID NO: 2100; WAN024C7G_at; Start 115; Stop 139
ggctaccttaacagctgcctctgca

SEQ ID NO: 107051 - DNA, 25 bp, Artificial
  probe
  misc_feature (1)..(25): SEQ ID NO: 2100; WAN024C7G_at; Start 42; Stop 66
tcccaatcttggaatcaggcaaaag

SEQ ID NO: 107052 - DNA, 25 bp, Artificial
  probe
  misc_feature (1)..(25): SEQ ID NO: 2100; WAN024C7G_at; Start 89; Stop 113
cggctgctggccaattgtgtatgat

SEQ ID NO: 107053 - DNA, 25 bp, Artificial
  probe
  misc_feature (1)..(25): SEQ ID NO: 2100; WAN024C7G_at; Start 8; Stop 32
ctacgtggataagccggtgtcaagt

SEQ ID NO: 107054 - DNA, 25 bp, Artificial
  probe
  misc_feature (1)..(25): SEQ ID NO: 2100; WAN024C7G_at; Start 142; Stop 166
caccttatgtggataatgggcatca

SEQ ID NO: 107055 - DNA, 25 bp, Artificial
  probe
  misc_feature (1)..(25): SEQ ID NO: 2100; WAN024C7G_at; Start 23; Stop 47
ggtgtcaagttgaggacaatcccaa

SEQ ID NO: 107056 - DNA, 25 bp, Artificial
  probe
  misc_feature (1)..(25): SEQ ID NO: 2100; WAN024C7G_at; Start 192; Stop 216
cgatgggctcgttaaaggtaatcca

SEQ ID NO: 107057 - DNA, 25 bp, Artificial
  probe
  misc_feature (1)..(25): SEQ ID NO: 2100; WAN024C7G_at; Start 1; Stop 25
atgctggctacgtggataagccggt

SEQ ID NO: 107058 - DNA, 25 bp, Artificial
  probe
  misc_feature (1)..(25): SEQ ID NO: 2100; WAN024C7G_at; Start 196; Stop 220
gggctcgttaaaggtaatccattga

SEQ ID NO: 107059 - DNA, 25 bp, Artificial
  probe
  misc_feature (1)..(25): SEQ ID NO: 2100; WAN024C7G_at; Start 201; Stop 225
cgttaaaggtaatccattgatccac

SEQ ID NO: 107060 - DNA, 25 bp, Artificial
  probe
  misc_feature (1)..(25): SEQ ID NO: 2100; WAN024C7G_at; Start 204; Stop 228
taaaggtaatccattgatccactaa

SEQ ID NO: 107061 - DNA, 25 bp, Artificial
  probe
  misc_feature (1)..(25): SEQ ID NO: 2100; WAN024C7G_at; Start 36; Stop 60
ggacaatcccaatcttggaatcagg

SEQ ID NO: 107062 - DNA, 25 bp, Artificial
  probe
  misc_feature (1)..(25): SEQ ID NO: 2100; WAN024C7G_at; Start 73; Stop 97
gcaagccttaacagcccggctgctg

SEQ ID NO: 107063 - DNA, 25 bp, Artificial
  probe
  misc_feature (1)..(25): SEQ ID NO: 2100; WAN024C7G_at; Start 54; Stop 78
aatcaggcaaaagttcatggcaagc

SEQ ID NO: 107064 - DNA, 25 bp, Artificial
  probe
  misc_feature (1)..(25): SEQ ID NO: 2100; WAN024C7G_at; Start 67; Stop 91
ttcatggcaagccttaacagcccgg

SEQ ID NO: 107065 - DNA, 25 bp, Artificial
  probe
  misc_feature (1)..(25): SEQ ID NO: 2100; WAN024C7G_at; Start 184; Stop 208
tacaggaacgatgggctcgttaaag

SEQ ID NO: 107066 - DNA, 25 bp, Artificial
  probe
  misc_feature (1)..(25): SEQ ID NO: 2100; WAN024C7G_at; Start 159; Stop 183
gggcatcataaaaataaccaaattc

SEQ ID NO: 107067 - DNA, 25 bp, Artificial
  probe
  misc_feature (1)..(25): SEQ ID NO: 2100; WAN024C7G_at; Start 31; Stop 55
gttgaggacaatcccaatcttggaa

SEQ ID NO: 107068 - DNA, 25 bp, Artificial
  probe
  misc_feature (1)..(25): SEQ ID NO: 2100; WAN024C7G_at; Start 59; Stop 83
ggcaaaagttcatggcaagccttaa

SEQ ID NO: 107069 - DNA, 25 bp, Artificial
  probe
  misc_feature (1)..(25): SEQ ID NO: 2100; WAN024C7G_at; Start 26; Stop 50
gtcaagttgaggacaatcccaatct

SEQ ID NO: 107070 - DNA, 25 bp, Artificial
  probe
  misc_feature (1)..(25): SEQ ID NO: 2100; WAN024C7G_at; Start 153; Stop 177
gataatgggcatcataaaaataacc

SEQ ID NO: 107071 - DNA, 25 bp, Artificial
  probe
  misc_feature (1)..(25): SEQ ID NO: 2100; WAN024C7G_at; Start 81; Stop 105
taacagcccggctgctggccaattg

SEQ ID NO: 107072 - DNA, 25 bp, Artificial
  probe
  misc_feature (1)..(25): SEQ ID NO: 2100; WAN024C7G_at; Start 177; Stop 201
caaattctacaggaacgatgggctc

SEQ ID NO: 107073 - DNA, 25 bp, Artificial
  probe
  misc_feature (1)..(25): SEQ ID NO: 2100; WAN024C7G_at; Start 128; Stop 152
gctgcctctgcatccaccttatgtg

SEQ ID NO: 107074 - DNA, 25 bp, Artificial
  probe
  misc_feature (1)..(25): SEQ ID NO: 2100; WAN024C7G_at; Start 179; Stop 203
aattctacaggaacgatgggctcgt

SEQ ID NO: 107075 - DNA, 25 bp, Artificial
  probe
  misc_feature (1)..(25): SEQ ID NO: 2100; WAN024C7G_at; Start 50; Stop 74
ttggaatcaggcaaaagttcatggc

SEQ ID NO: 107076 - DNA, 25 bp, Artificial
  probe
  misc_feature (1)..(25): SEQ ID NO: 2100; WAN024C7G_at; Start 20; Stop 44
gccggtgtcaagttgaggacaatcc

SEQ ID NO: 107077 - DNA, 25 bp, Artificial
  probe
  misc_feature (1)..(25): SEQ ID NO: 1417; WAN024C7H_at; Start 200; Stop 224
ggcatcacataaggctcgtaaaaat

SEQ ID NO: 107078 - DNA, 25 bp, Artificial
  probe
  misc_feature (1)..(25): SEQ ID NO: 1417; WAN024C7H_at; Start 17; Stop 41
tcaatacggtaatcatcttgaatca

SEQ ID NO: 107079 - DNA, 25 bp, Artificial
  probe
  misc_feature (1)..(25): SEQ ID NO: 1417; WAN024C7H_at; Start 139; Stop 163
gatgtcataaatcccttgctcataa

SEQ ID NO: 107080 - DNA, 25 bp, Artificial
  probe
  misc_feature (1)..(25): SEQ ID NO: 1417; WAN024C7H_at; Start 129; Stop 153
tattttgggcgatgtcataaatccc

SEQ ID NO: 107081 - DNA, 25 bp, Artificial
  probe
  misc_feature (1)..(25): SEQ ID NO: 1417; WAN024C7H_at; Start 194; Stop 218
cgtccaggcatcacataaggctcgt

SEQ ID NO: 107082 - DNA, 25 bp, Artificial
  probe
  misc_feature (1)..(25): SEQ ID NO: 1417; WAN024C7H_at; Start 148; Stop 172
aatcccttgctcataaatctcccaa

SEQ ID NO: 107083 - DNA, 25 bp, Artificial
  probe
  misc_feature (1)..(25): SEQ ID NO: 1417; WAN024C7H_at; Start 35; Stop 59
tgaatcattccatcttgacggaatt

SEQ ID NO: 107084 - DNA, 25 bp, Artificial
  probe
  misc_feature (1)..(25): SEQ ID NO: 1417; WAN024C7H_at; Start 70; Stop 94
ttcaacacccataccattctcagtc

SEQ ID NO: 107085 - DNA, 25 bp, Artificial
  probe
  misc_feature (1)..(25): SEQ ID NO: 1417; WAN024C7H_at; Start 84; Stop 108
cattctcagtcaacatccactcaat

SEQ ID NO: 107086 - DNA, 25 bp, Artificial
  probe
  misc_feature (1)..(25): SEQ ID NO: 1417; WAN024C7H_at; Start 1; Stop 25
atgaccttttacaaagtcaatacgg

SEQ ID NO: 107087 - DNA, 25 bp, Artificial
  probe
  misc_feature (1)..(25): SEQ ID NO: 1417; WAN024C7H_at; Start 146; Stop 170
taaatcccttgctcataaatctccc

SEQ ID NO: 107088 - DNA, 25 bp, Artificial
  probe
  misc_feature (1)..(25): SEQ ID NO: 1417; WAN024C7H_at; Start 89; Stop 113
tcagtcaacatccactcaatattgc

SEQ ID NO: 107089 - DNA, 25 bp, Artificial
  probe
  misc_feature (1)..(25): SEQ ID NO: 1417; WAN024C7H_at; Start 123; Stop 147
ccttgatattttgggcgatgtcata

SEQ ID NO: 107090 - DNA, 25 bp, Artificial
  probe
  misc_feature (1)..(25): SEQ ID NO: 1417; WAN024C7H_at; Start 209; Stop 233
taaggctcgtaaaaatgttctggta

SEQ ID NO: 107091 - DNA, 25 bp, Artificial
  probe
  misc_feature (1)..(25): SEQ ID NO: 1417; WAN024C7H_at; Start 136; Stop 160
ggcgatgtcataaatcccttgctca

SEQ ID NO: 107092 - DNA, 25 bp, Artificial
  probe
  misc_feature (1)..(25): SEQ ID NO: 1417; WAN024C7H_at; Start 205; Stop 229
cacataaggctcgtaaaaatgttct

SEQ ID NO: 107093 - DNA, 25 bp, Artificial
  probe
  misc_feature (1)..(25): SEQ ID NO: 1417; WAN024C7H_at; Start 187; Stop 211
gattttacgtccaggcatcacataa

SEQ ID NO: 107094 - DNA, 25 bp, Artificial
  probe
  misc_feature (1)..(25): SEQ ID NO: 1417; WAN024C7H_at; Start 21; Stop 45
tacggtaatcatcttgaatcattcc

SEQ ID NO: 107095 - DNA, 25 bp, Artificial
  probe
  misc_feature (1)..(25): SEQ ID NO: 1417; WAN024C7H_at; Start 94; Stop 118
caacatccactcaatattgccataa

SEQ ID NO: 107096 - DNA, 25 bp, Artificial
  probe
  misc_feature (1)..(25): SEQ ID NO: 1417; WAN024C7H_at; Start 190; Stop 214
tttacgtccaggcatcacataaggc

SEQ ID NO: 107097 - DNA, 25 bp, Artificial
  probe
  misc_feature (1)..(25): SEQ ID NO: 1417; WAN024C7H_at; Start 10; Stop 34
tacaaagtcaatacggtaatcatct

SEQ ID NO: 107098 - DNA, 25 bp, Artificial
  probe
  misc_feature (1)..(25): SEQ ID NO: 1417; WAN024C7H_at; Start 116; Stop 140
taattttccttgatattttgggcga

SEQ ID NO: 107099 - DNA, 25 bp, Artificial
  probe
  misc_feature (1)..(25): SEQ ID NO: 1417; WAN024C7H_at; Start 192; Stop 216
tacgtccaggcatcacataaggctc

SEQ ID NO: 107100 - DNA, 25 bp, Artificial
  probe
  misc_feature (1)..(25): SEQ ID NO: 1417; WAN024C7H_at; Start 196; Stop 220
tccaggcatcacataaggctcgtaa

SEQ ID NO: 107101 - DNA, 25 bp, Artificial
  probe
  misc_feature (1)..(25): SEQ ID NO: 1417; WAN024C7H_at; Start 43; Stop 67
tccatcttgacggaatttttcttcc

SEQ ID NO: 107102 - DNA, 25 bp, Artificial
  probe
  misc_feature (1)..(25): SEQ ID NO: 1417; WAN024C7H_at; Start 120; Stop 144
tttccttgatattttgggcgatgtc

SEQ ID NO: 107103 - DNA, 25 bp, Artificial
  probe
  misc_feature (1)..(25): SEQ ID NO: 1417; WAN024C7H_at; Start 207; Stop 231
cataaggctcgtaaaaatgttctgg

SEQ ID NO: 107104 - DNA, 25 bp, Artificial
  probe
  misc_feature (1)..(25): SEQ ID NO: 1417; WAN024C7H_at; Start 182; Stop 206
gaattgattttacgtccaggcatca

SEQ ID NO: 107105 - DNA, 25 bp, Artificial
  probe
  misc_feature (1)..(25): SEQ ID NO: 1417; WAN024C7H_at; Start 24; Stop 48
ggtaatcatcttgaatcattccatc

SEQ ID NO: 107106 - DNA, 25 bp, Artificial
  probe
  misc_feature (1)..(25): SEQ ID NO: 1417; WAN024C7H_at; Start 198; Stop 222
caggcatcacataaggctcgtaaaa

SEQ ID NO: 107107 - DNA, 25 bp, Artificial
  probe
  misc_feature (1)..(25): SEQ ID NO: 1417; WAN024C7H_at; Start 32; Stop 56
tcttgaatcattccatcttgacgga

SEQ ID NO: 107108 - DNA, 25 bp, Artificial
  probe
  misc_feature (1)..(25): SEQ ID NO: 1417; WAN024C7H_at; Start 105; Stop 129
caatattgccataattttccttgat

SEQ ID NO: 107109 - DNA, 25 bp, Artificial
  probe
  misc_feature (1)..(25): SEQ ID NO: 1417; WAN024C7H_at; Start 179; Stop 203
tgagaattgattttacgtccaggca

SEQ ID NO: 107110 - DNA, 25 bp, Artificial
  probe
  misc_feature (1)..(25): SEQ ID NO: 1417; WAN024C7H_at; Start 133; Stop 157
ttgggcgatgtcataaatcccttgc

SEQ ID NO: 107111 - DNA, 25 bp, Artificial
  probe
  misc_feature (1)..(25): SEQ ID NO: 2063; WAN024C7I_at; Start 31; Stop 55
ggatcctctacttctggaccgcaga

SEQ ID NO: 107112 - DNA, 25 bp, Artificial
  probe
  misc_feature (1)..(25): SEQ ID NO: 2063; WAN024C7I_at; Start 771; Stop 795
gacttatccacaggagttggtagaa

SEQ ID NO: 107113 - DNA, 25 bp, Artificial
  probe
  misc_feature (1)..(25): SEQ ID NO: 2063; WAN024C7I_at; Start 1339; Stop 1363
ggccactggttcaaagaattaagcg

SEQ ID NO: 107114 - DNA, 25 bp, Artificial
  probe
  misc_feature (1)..(25): SEQ ID NO: 2063; WAN024C7I_at; Start 532; Stop 556
gatgcccattatccacataaggtgg

SEQ ID NO: 107115 - DNA, 25 bp, Artificial
  probe
  misc_feature (1)..(25): SEQ ID NO: 2063; WAN024C7I_at; Start 676; Stop 700
gcttatccacgtagccagcatcctg

SEQ ID NO: 107116 - DNA, 25 bp, Artificial
  probe
  misc_feature (1)..(25): SEQ ID NO: 2063; WAN024C7I_at; Start 496; Stop 520
gagcccatcgttcctgtagaatttg

SEQ ID NO: 107117 - DNA, 25 bp, Artificial
  probe
  misc_feature (1)..(25): SEQ ID NO: 2063; WAN024C7I_at; Start 481; Stop 505
tggattacctttaacgagcccatcg

SEQ ID NO: 107118 - DNA, 25 bp, Artificial
  probe
  misc_feature (1)..(25): SEQ ID NO: 2063; WAN024C7I_at; Start 1301; Stop 1325
tagacttggaaacgcaagaacgtcg

SEQ ID NO: 107119 - DNA, 25 bp, Artificial
  probe
  misc_feature (1)..(25): SEQ ID NO: 2063; WAN024C7I_at; Start 318; Stop 342
tattaaggctaaaggaattcgtctg

SEQ ID NO: 107120 - DNA, 25 bp, Artificial
  probe
  misc_feature (1)..(25): SEQ ID NO: 2063; WAN024C7I_at; Start 703; Stop 727
gatgtcaaggcagctcgtattgcgg

SEQ ID NO: 107121 - DNA, 25 bp, Artificial
  probe
  misc_feature (1)..(25): SEQ ID NO: 2063; WAN024C7I_at; Start 1209; Stop 1233
tggtgccaactgtaagggctacttg

SEQ ID NO: 107122 - DNA, 25 bp, Artificial
  probe
  misc_feature (1)..(25): SEQ ID NO: 2063; WAN024C7I_at; Start 242; Stop 266
ggtcacggatttttccacaaggctg

SEQ ID NO: 107123 - DNA, 25 bp, Artificial
  probe
  misc_feature (1)..(25): SEQ ID NO: 2063; WAN024C7I_at; Start 652; Stop 676
gggattgtcctcaacttgacaccgg

SEQ ID NO: 107124 - DNA, 25 bp, Artificial
  probe
  misc_feature (1)..(25): SEQ ID NO: 2063; WAN024C7I_at; Start 1233; Stop 1257
gatttggacctttattgactgctgg

SEQ ID NO: 107125 - DNA, 25 bp, Artificial
  probe
  misc_feature (1)..(25): SEQ ID NO: 2063; WAN024C7I_at; Start 583; Stop 607
tatcatacacaattggccagcagcc

SEQ ID NO: 107126 - DNA, 25 bp, Artificial
  probe
  misc_feature (1)..(25): SEQ ID NO: 2063; WAN024C7I_at; Start 894; Stop 918
acctttgcgtgttatggctcctcga

SEQ ID NO: 107127 - DNA, 25 bp, Artificial
  probe
  misc_feature (1)..(25): SEQ ID NO: 2063; WAN024C7I_at; Start 1318; Stop 1342
gaacgtcgtctgaagaaatcaggcc

SEQ ID NO: 107128 - DNA, 25 bp, Artificial
  probe
  misc_feature (1)..(25): SEQ ID NO: 2063; WAN024C7I_at; Start 825; Stop 849
tgctacagaggaagagttggaactc

SEQ ID NO: 107129 - DNA, 25 bp, Artificial
  probe
  misc_feature (1)..(25): SEQ ID NO: 2063; WAN024C7I_at; Start 1191; Stop 1215
tcaccgtgccattgaagatggtgcc

SEQ ID NO: 107130 - DNA, 25 bp, Artificial
  probe
  misc_feature (1)..(25): SEQ ID NO: 2063; WAN024C7I_at; Start 1024; Stop 1048
caagggatttatgacatcgcccaaa

SEQ ID NO: 107131 - DNA, 25 bp, Artificial
  probe
  misc_feature (1)..(25): SEQ ID NO: 2063; WAN024C7I_at; Start 72; Stop 96
tggtgacggtaagggagacaatctc

SEQ ID NO: 107132 - DNA, 25 bp, Artificial
  probe
  misc_feature (1)..(25): SEQ ID NO: 2063; WAN024C7I_at; Start 545; Stop 569
cacataaggtggatgcagaggcagc

SEQ ID NO: 107133 - DNA, 25 bp, Artificial
  probe
  misc_feature (1)..(25): SEQ ID NO: 2063; WAN024C7I_at; Start 861; Stop 885
tacggtggacttccttggtgtgaac

SEQ ID NO: 107134 - DNA, 25 bp, Artificial
  probe
  misc_feature (1)..(25): SEQ ID NO: 2063; WAN024C7I_at; Start 226; Stop 250
cggacttctattcagtggtcacgga

SEQ ID NO: 107135 - DNA, 25 bp, Artificial
  probe
  misc_feature (1)..(25): SEQ ID NO: 2063; WAN024C7I_at; Start 808; Stop 832
cacggtcttttacctgatgctacag

SEQ ID NO: 107136 - DNA, 25 bp, Artificial
  probe
  misc_feature (1)..(25): SEQ ID NO: 2063; WAN024C7I_at; Start 961; Stop 985
tacgagccttatgtgatgcctggac

SEQ ID NO: 107137 - DNA, 25 bp, Artificial
  probe
  misc_feature (1)..(25): SEQ ID NO: 2063; WAN024C7I_at; Start 1249; Stop 1273
gactgctggtcatggctcaacagct

SEQ ID NO: 107138 - DNA, 25 bp, Artificial
  probe
  misc_feature (1)..(25): SEQ ID NO: 2063; WAN024C7I_at; Start 193; Stop 217
gagcttttgttagagactggtcaca

SEQ ID NO: 107139 - DNA, 25 bp, Artificial
  probe
  misc_feature (1)..(25): SEQ ID NO: 2063; WAN024C7I_at; Start 419; Stop 443
tctcagcctatgaagactatgctcg

SEQ ID NO: 107140 - DNA, 25 bp, Artificial
  probe
  misc_feature (1)..(25): SEQ ID NO: 2063; WAN024C7I_at; Start 605; Stop 629
gccgggctgttaaggcttgccatga

SEQ ID NO: 107141 - DNA, 25 bp, Artificial
  probe
  misc_feature (1)..(25): SEQ ID NO: 2063; WAN024C7I_at; Start 790; Stop 814
gtagaaatcttgcatgaacacggtc

SEQ ID NO: 107142 - DNA, 25 bp, Artificial
  probe
  misc_feature (1)..(25): SEQ ID NO: 2063; WAN024C7I_at; Start 1172; Stop 1196
aaggtcatcttcgtgaacttcaccg

SEQ ID NO: 107143 - DNA, 25 bp, Artificial
  probe
  misc_feature (1)..(25): SEQ ID NO: 2063; WAN024C7I_at; Start 398; Stop 422
gttgggaaaataaggcgacagtctc

SEQ ID NO: 107144 - DNA, 25 bp, Artificial
  probe
  misc_feature (1)..(25): SEQ ID NO: 2063; WAN024C7I_at; Start 141; Stop 165
gattggttcagataagacatcgact

SEQ ID NO: 107145 - DNA, 25 bp, Artificial
  probe
  misc_feature (1)..(25): SEQ ID NO: 7406; WAN024C7J_at; Start 82; Stop 106
caaaggttgcaaagagagtcaagag

SEQ ID NO: 107146 - DNA, 25 bp, Artificial
  probe
  misc_feature (1)..(25): SEQ ID NO: 7406; WAN024C7J_at; Start 86; Stop 110
ggttgcaaagagagtcaagaggccc

SEQ ID NO: 107147 - DNA, 25 bp, Artificial
  probe
  misc_feature (1)..(25): SEQ ID NO: 7406; WAN024C7J_at; Start 155; Stop 179
catggctagcatggctacgattccg

SEQ ID NO: 107148 - DNA, 25 bp, Artificial
  probe
  misc_feature (1)..(25): SEQ ID NO: 7406; WAN024C7J_at; Start 167; Stop 191
ggctacgattccgattgctatctga

SEQ ID NO: 107149 - DNA, 25 bp, Artificial
  probe
  misc_feature (1)..(25): SEQ ID NO: 7406; WAN024C7J_at; Start 107; Stop 131
gccctccatcgtcatggtcgctaga

SEQ ID NO: 107150 - DNA, 25 bp, Artificial
  probe
  misc_feature (1)..(25): SEQ ID NO: 7406; WAN024C7J_at; Start 89; Stop 113
tgcaaagagagtcaagaggccctcc

SEQ ID NO: 107151 - DNA, 25 bp, Artificial
  probe
  misc_feature (1)..(25): SEQ ID NO: 7406; WAN024C7J_at; Start 180; Stop 204
attgctatctgaagcaagaggcccc

SEQ ID NO: 107152 - DNA, 25 bp, Artificial
  probe
  misc_feature (1)..(25): SEQ ID NO: 7406; WAN024C7J_at; Start 205; Stop 229
caatcattaaaattggtaggaaaat

SEQ ID NO: 107153 - DNA, 25 bp, Artificial
  probe
  misc_feature (1)..(25): SEQ ID NO: 7406; WAN024C7J_at; Start 44; Stop 68
caaaaaagtcaggtaattctccaag

SEQ ID NO: 107154 - DNA, 25 bp, Artificial
  probe
  misc_feature (1)..(25): SEQ ID NO: 7406; WAN024C7J_at; Start 137; Stop 161
tatcttcaaaagttcatgcatggct

SEQ ID NO: 107155 - DNA, 25 bp, Artificial
  probe
  misc_feature (1)..(25): SEQ ID NO: 7406; WAN024C7J_at; Start 122; Stop 146
ggtcgctagacctcttatcttcaaa

SEQ ID NO: 107156 - DNA, 25 bp, Artificial
  probe
  misc_feature (1)..(25): SEQ ID NO: 7406; WAN024C7J_at; Start 18; Stop 42
taggcaaccacattcccatcaactg

SEQ ID NO: 107157 - DNA, 25 bp, Artificial
  probe
  misc_feature (1)..(25): SEQ ID NO: 7406; WAN024C7J_at; Start 7; Stop 31
tcaaaacactataggcaaccacatt

SEQ ID NO: 107158 - DNA, 25 bp, Artificial
  probe
  misc_feature (1)..(25): SEQ ID NO: 7406; WAN024C7J_at; Start 173; Stop 197
gattccgattgctatctgaagcaag

SEQ ID NO: 107159 - DNA, 25 bp, Artificial
  probe
  misc_feature (1)..(25): SEQ ID NO: 7406; WAN024C7J_at; Start 34; Stop 58
catcaactggcaaaaaagtcaggta

SEQ ID NO: 107160 - DNA, 25 bp, Artificial
  probe
  misc_feature (1)..(25): SEQ ID NO: 7406; WAN024C7J_at; Start 2; Stop 26
tgaaatcaaaacactataggcaacc

SEQ ID NO: 107161 - DNA, 25 bp, Artificial
  probe
  misc_feature (1)..(25): SEQ ID NO: 7406; WAN024C7J_at; Start 141; Stop 165
ttcaaaagttcatgcatggctagca

SEQ ID NO: 107162 - DNA, 25 bp, Artificial
  probe
  misc_feature (1)..(25): SEQ ID NO: 7406; WAN024C7J_at; Start 151; Stop 175
catgcatggctagcatggctacgat

SEQ ID NO: 107163 - DNA, 25 bp, Artificial
  probe
  misc_feature (1)..(25): SEQ ID NO: 7406; WAN024C7J_at; Start 64; Stop 88
ccaagggaatggttaatgcaaaggt

SEQ ID NO: 107164 - DNA, 25 bp, Artificial
  probe
  misc_feature (1)..(25): SEQ ID NO: 7406; WAN024C7J_at; Start 77; Stop 101
taatgcaaaggttgcaaagagagtc

SEQ ID NO: 107165 - DNA, 25 bp, Artificial
  probe
  misc_feature (1)..(25): SEQ ID NO: 7406; WAN024C7J_at; Start 102; Stop 126
aagaggccctccatcgtcatggtcg

SEQ ID NO: 107166 - DNA, 25 bp, Artificial
  probe
  misc_feature (1)..(25): SEQ ID NO: 7406; WAN024C7J_at; Start 159; Stop 183
gctagcatggctacgattccgattg

SEQ ID NO: 107167 - DNA, 25 bp, Artificial
  probe
  misc_feature (1)..(25): SEQ ID NO: 7406; WAN024C7J_at; Start 163; Stop 187
gcatggctacgattccgattgctat

SEQ ID NO: 107168 - DNA, 25 bp, Artificial
  probe
  misc_feature (1)..(25): SEQ ID NO: 7406; WAN024C7J_at; Start 52; Stop 76
tcaggtaattctccaagggaatggt

SEQ ID NO: 107169 - DNA, 25 bp, Artificial
  probe
  misc_feature (1)..(25): SEQ ID NO: 7406; WAN024C7J_at; Start 100; Stop 124
tcaagaggccctccatcgtcatggt

SEQ ID NO: 107170 - DNA, 25 bp, Artificial
  probe
  misc_feature (1)..(25): SEQ ID NO: 7406; WAN024C7J_at; Start 130; Stop 154
gacctcttatcttcaaaagttcatg

SEQ ID NO: 107171 - DNA, 25 bp, Artificial
  probe
  misc_feature (1)..(25): SEQ ID NO: 7406; WAN024C7J_at; Start 113; Stop 137
catcgtcatggtcgctagacctctt

SEQ ID NO: 107172 - DNA, 25 bp, Artificial
  probe
  misc_feature (1)..(25): SEQ ID NO: 7406; WAN024C7J_at; Start 193; Stop 217
gcaagaggcccccaatcattaaaat

SEQ ID NO: 107173 - DNA, 25 bp, Artificial
  probe
  misc_feature (1)..(25): SEQ ID NO: 7406; WAN024C7J_at; Start 30; Stop 54
ttcccatcaactggcaaaaaagtca

SEQ ID NO: 107174 - DNA, 25 bp, Artificial
  probe
  misc_feature (1)..(25): SEQ ID NO: 7406; WAN024C7J_at; Start 92; Stop 116
aaagagagtcaagaggccctccatc

SEQ ID NO: 107175 - DNA, 25 bp, Artificial
  probe
  misc_feature (1)..(25): SEQ ID NO: 7406; WAN024C7J_at; Start 41; Stop 65
tggcaaaaaagtcaggtaattctcc

SEQ ID NO: 107176 - DNA, 25 bp, Artificial
  probe
  misc_feature (1)..(25): SEQ ID NO: 7406; WAN024C7J_at; Start 61; Stop 85
tctccaagggaatggttaatgcaaa

SEQ ID NO: 107177 - DNA, 25 bp, Artificial
  probe
  misc_feature (1)..(25): SEQ ID NO: 7406; WAN024C7J_at; Start 170; Stop 194
tacgattccgattgctatctgaagc

SEQ ID NO: 107178 - DNA, 25 bp, Artificial
  probe
  misc_feature (1)..(25): SEQ ID NO: 7406; WAN024C7J_at; Start 145; Stop 169
aaagttcatgcatggctagcatggc

SEQ ID NO: 107179 - DNA, 25 bp, Artificial
  probe
  misc_feature (1)..(25): SEQ ID NO: 1406; WAN024C7K_at; Start 385; Stop 409
gatgctcgtgttgcaggtttggaca

SEQ ID NO: 107180 - DNA, 25 bp, Artificial
  probe
  misc_feature (1)..(25): SEQ ID NO: 1406; WAN024C7K_at; Start 765; Stop 789
gcttgtatttccaatcatgcactta

SEQ ID NO: 107181 - DNA, 25 bp, Artificial
  probe
  misc_feature (1)..(25): SEQ ID NO: 1406; WAN024C7K_at; Start 691; Stop 715
cattttggtgttaaggattctggga

SEQ ID NO: 107182 - DNA, 25 bp, Artificial
  probe
  misc_feature (1)..(25): SEQ ID NO: 1406; WAN024C7K_at; Start 306; Stop 330
caagtcttatacgattgaggatgcg

SEQ ID NO: 107183 - DNA, 25 bp, Artificial
  probe
  misc_feature (1)..(25): SEQ ID NO: 1406; WAN024C7K_at; Start 23; Stop 47
gaaccttgtttgcagggattgccct

SEQ ID NO: 107184 - DNA, 25 bp, Artificial
  probe
  misc_feature (1)..(25): SEQ ID NO: 1406; WAN024C7K_at; Start 2; Stop 26
tgacccaggatttacagaaaagaac

SEQ ID NO: 107185 - DNA, 25 bp, Artificial
  probe
  misc_feature (1)..(25): SEQ ID NO: 1406; WAN024C7K_at; Start 434; Stop 458
tctgggcgacagacagtggtgccta

SEQ ID NO: 107186 - DNA, 25 bp, Artificial
  probe
  misc_feature (1)..(25): SEQ ID NO: 1406; WAN024C7K_at; Start 419; Stop 443
tagccttgtgtatcgtctgggcgac

SEQ ID NO: 107187 - DNA, 25 bp, Artificial
  probe
  misc_feature (1)..(25): SEQ ID NO: 1406; WAN024C7K_at; Start 79; Stop 103
ggcctcttgcttcagatagcaatcg

SEQ ID NO: 107188 - DNA, 25 bp, Artificial
  probe
  misc_feature (1)..(25): SEQ ID NO: 1406; WAN024C7K_at; Start 223; Stop 247
tacctgacttttttgccagttgatg

SEQ ID NO: 107189 - DNA, 25 bp, Artificial
  probe
  misc_feature (1)..(25): SEQ ID NO: 1406; WAN024C7K_at; Start 239; Stop 263
cagttgatgggaatgtggttgccta

SEQ ID NO: 107190 - DNA, 25 bp, Artificial
  probe
  misc_feature (1)..(25): SEQ ID NO: 1406; WAN024C7K_at; Start 713; Stop 737
ggaaatttatccctggacatggtgg

SEQ ID NO: 107191 - DNA, 25 bp, Artificial
  probe
  misc_feature (1)..(25): SEQ ID NO: 1406; WAN024C7K_at; Start 465; Stop 489
tgggatgaactatgggaaacgaaag

SEQ ID NO: 107192 - DNA, 25 bp, Artificial
  probe
  misc_feature (1)..(25): SEQ ID NO: 1406; WAN024C7K_at; Start 450; Stop 474
tggtgcctatcttgttgggatgaac

SEQ ID NO: 107193 - DNA, 25 bp, Artificial
  probe
  misc_feature (1)..(25): SEQ ID NO: 1406; WAN024C7K_at; Start 207; Stop 231
cattcccttggagaattacctgact

SEQ ID NO: 107194 - DNA, 25 bp, Artificial
  probe
  misc_feature (1)..(25): SEQ ID NO: 1406; WAN024C7K_at; Start 631; Stop 655
gctattttctttagcattgctggac

SEQ ID NO: 107195 - DNA, 25 bp, Artificial
  probe
  misc_feature (1)..(25): SEQ ID NO: 1406; WAN024C7K_at; Start 585; Stop 609
cagtacagttgctcttccatatgga

SEQ ID NO: 107196 - DNA, 25 bp, Artificial
  probe
  misc_feature (1)..(25): SEQ ID NO: 1406; WAN024C7K_at; Start 353; Stop 377
tctacgtgggctttggatttaatgc

SEQ ID NO: 107197 - DNA, 25 bp, Artificial
  probe
  misc_feature (1)..(25): SEQ ID NO: 1406; WAN024C7K_at; Start 368; Stop 392
gatttaatgctttactagatgctcg

SEQ ID NO: 107198 - DNA, 25 bp, Artificial
  probe
  misc_feature (1)..(25): SEQ ID NO: 1406; WAN024C7K_at; Start 324; Stop 348
ggatgcggttttccctcttgctatg

SEQ ID NO: 107199 - DNA, 25 bp, Artificial
  probe
  misc_feature (1)..(25): SEQ ID NO: 1406; WAN024C7K_at; Start 485; Stop 509
gaaagttagcaccaagggtatcgcc

SEQ ID NO: 107200 - DNA, 25 bp, Artificial
  probe
  misc_feature (1)..(25): SEQ ID NO: 1406; WAN024C7K_at; Start 649; Stop 673
gctggacaatttggtgatttactag

SEQ ID NO: 107201 - DNA, 25 bp, Artificial
  probe
  misc_feature (1)..(25): SEQ ID NO: 1406; WAN024C7K_at; Start 668; Stop 692
tactagaaagttcgatcaaacgtca

SEQ ID NO: 107202 - DNA, 25 bp, Artificial
  probe
  misc_feature (1)..(25): SEQ ID NO: 1406; WAN024C7K_at; Start 529; Stop 553
gccttgggtggtattttaggagcaa

SEQ ID NO: 107203 - DNA, 25 bp, Artificial
  probe
  misc_feature (1)..(25): SEQ ID NO: 1406; WAN024C7K_at; Start 601; Stop 625
ccatatggaatttacaagatgtcag

SEQ ID NO: 107204 - DNA, 25 bp, Artificial
  probe
  misc_feature (1)..(25): SEQ ID NO: 1406; WAN024C7K_at; Start 157; Stop 181
accatgacgatggagggcctcttga

SEQ ID NO: 107205 - DNA, 25 bp, Artificial
  probe
  misc_feature (1)..(25): SEQ ID NO: 1406; WAN024C7K_at; Start 745; Stop 769
gatcgtttcgatagtatgttgcttg

SEQ ID NO: 107206 - DNA, 25 bp, Artificial
  probe
  misc_feature (1)..(25): SEQ ID NO: 1406; WAN024C7K_at; Start 780; Stop 804
catgcacttatttggactcttttaa

SEQ ID NO: 107207 - DNA, 25 bp, Artificial
  probe
  misc_feature (1)..(25): SEQ ID NO: 1406; WAN024C7K_at; Start 339; Stop 363
tcttgctatgagcttctacgtgggc

SEQ ID NO: 107208 - DNA, 25 bp, Artificial
  probe
  misc_feature (1)..(25): SEQ ID NO: 1406; WAN024C7K_at; Start 730; Stop 754
catggtggtgttttggatcgtttcg

SEQ ID NO: 107209 - DNA, 25 bp, Artificial
  probe
  misc_feature (1)..(25): SEQ ID NO: 1406; WAN024C7K_at; Start 39; Stop 63
gattgccctggctattttcctacca

SEQ ID NO: 107210 - DNA, 25 bp, Artificial
  probe
  misc_feature (1)..(25): SEQ ID NO: 1406; WAN024C7K_at; Start 277; Stop 301
tcaatcatgttaggaacgaccgttt

SEQ ID NO: 107211 - DNA, 25 bp, Artificial
  probe
  misc_feature (1)..(25): SEQ ID NO: 1406; WAN024C7K_at; Start 572; Stop 596
ttatgatagttgacagtacagttgc

SEQ ID NO: 107212 - DNA, 25 bp, Artificial
  probe
  misc_feature (1)..(25): SEQ ID NO: 1406; WAN024C7K_at; Start 117; Stop 141
gctagccatgcatgaacttttgaag

SEQ ID NO: 107213 - DNA, 25 bp, Artificial
  probe
  misc_feature (1)..(25): SEQ ID NO: 4390; WAN024C7L_at; Start 48; Stop 72
tgccatccatgatgatgccgatatg

SEQ ID NO: 107214 - DNA, 25 bp, Artificial
  probe
  misc_feature (1)..(25): SEQ ID NO: 4390; WAN024C7L_at; Start 202; Stop 226
aagctatttattctcaggcaccaag

SEQ ID NO: 107215 - DNA, 25 bp, Artificial
  probe
  misc_feature (1)..(25): SEQ ID NO: 4390; WAN024C7L_at; Start 213; Stop 237
tctcaggcaccaagcccatttttca

SEQ ID NO: 107216 - DNA, 25 bp, Artificial
  probe
  misc_feature (1)..(25): SEQ ID NO: 4390; WAN024C7L_at; Start 6; Stop 30
caaaaactcgcggttgcatacgttt

SEQ ID NO: 107217 - DNA, 25 bp, Artificial
  probe
  misc_feature (1)..(25): SEQ ID NO: 4390; WAN024C7L_at; Start 29; Stop 53
tttttagcccaacggccattgccat

SEQ ID NO: 107218 - DNA, 25 bp, Artificial
  probe
  misc_feature (1)..(25): SEQ ID NO: 4390; WAN024C7L_at; Start 83; Stop 107
tgtgtcggaacctctacttccacag

SEQ ID NO: 107219 - DNA, 25 bp, Artificial
  probe
  misc_feature (1)..(25): SEQ ID NO: 4390; WAN024C7L_at; Start 75; Stop 99
caggaacctgtgtcggaacctctac

SEQ ID NO: 107220 - DNA, 25 bp, Artificial
  probe
  misc_feature (1)..(25): SEQ ID NO: 4390; WAN024C7L_at; Start 13; Stop 37
tcgcggttgcatacgttttttagcc

SEQ ID NO: 107221 - DNA, 25 bp, Artificial
  probe
  misc_feature (1)..(25): SEQ ID NO: 4390; WAN024C7L_at; Start 20; Stop 44
tgcatacgttttttagcccaacggc

SEQ ID NO: 107222 - DNA, 25 bp, Artificial
  probe
  misc_feature (1)..(25): SEQ ID NO: 4390; WAN024C7L_at; Start 58; Stop 82
gatgatgccgatatgagcaggaacc

SEQ ID NO: 107223 - DNA, 25 bp, Artificial
  probe
  misc_feature (1)..(25): SEQ ID NO: 4390; WAN024C7L_at; Start 51; Stop 75
catccatgatgatgccgatatgagc

SEQ ID NO: 107224 - DNA, 25 bp, Artificial
  probe
  misc_feature (1)..(25): SEQ ID NO: 4390; WAN024C7L_at; Start 55; Stop 79
catgatgatgccgatatgagcagga

SEQ ID NO: 107225 - DNA, 25 bp, Artificial
  probe
  misc_feature (1)..(25): SEQ ID NO: 4390; WAN024C7L_at; Start 72; Stop 96
gagcaggaacctgtgtcggaacctc

SEQ ID NO: 107226 - DNA, 25 bp, Artificial
  probe
  misc_feature (1)..(25): SEQ ID NO: 4390; WAN024C7L_at; Start 78; Stop 102
gaacctgtgtcggaacctctacttc

SEQ ID NO: 107227 - DNA, 25 bp, Artificial
  probe
  misc_feature (1)..(25): SEQ ID NO: 4390; WAN024C7L_at; Start 101; Stop 125
tccacagccttatctttcttaaaaa

SEQ ID NO: 107228 - DNA, 25 bp, Artificial
  probe
  misc_feature (1)..(25): SEQ ID NO: 4390; WAN024C7L_at; Start 199; Stop 223
actaagctatttattctcaggcacc

SEQ ID NO: 107229 - DNA, 25 bp, Artificial
  probe
  misc_feature (1)..(25): SEQ ID NO: 4390; WAN024C7L_at; Start 39; Stop 63
aacggccattgccatccatgatgat

SEQ ID NO: 107230 - DNA, 25 bp, Artificial
  probe
  misc_feature (1)..(25): SEQ ID NO: 4390; WAN024C7L_at; Start 210; Stop 234
tattctcaggcaccaagcccatttt

SEQ ID NO: 107231 - DNA, 25 bp, Artificial
  probe
  misc_feature (1)..(25): SEQ ID NO: 4390; WAN024C7L_at; Start 69; Stop 93
tatgagcaggaacctgtgtcggaac

SEQ ID NO: 107232 - DNA, 25 bp, Artificial
  probe
  misc_feature (1)..(25): SEQ ID NO: 4390; WAN024C7L_at; Start 89; Stop 113
ggaacctctacttccacagccttat

SEQ ID NO: 107233 - DNA, 25 bp, Artificial
  probe
  misc_feature (1)..(25): SEQ ID NO: 4390; WAN024C7L_at; Start 63; Stop 87
tgccgatatgagcaggaacctgtgt

SEQ ID NO: 107234 - DNA, 25 bp, Artificial
  probe
  misc_feature (1)..(25): SEQ ID NO: 4390; WAN024C7L_at; Start 195; Stop 219
tatcactaagctatttattctcagg

SEQ ID NO: 107235 - DNA, 25 bp, Artificial
  probe
  misc_feature (1)..(25): SEQ ID NO: 4390; WAN024C7L_at; Start 67; Stop 91
gatatgagcaggaacctgtgtcgga

SEQ ID NO: 107236 - DNA, 25 bp, Artificial
  probe
  misc_feature (1)..(25): SEQ ID NO: 4390; WAN024C7L_at; Start 43; Stop 67
gccattgccatccatgatgatgccg

SEQ ID NO: 107237 - DNA, 25 bp, Artificial
  probe
  misc_feature (1)..(25): SEQ ID NO: 4390; WAN024C7L_at; Start 118; Stop 142
cttaaaaaatccaaacatgatctta

SEQ ID NO: 107238 - DNA, 25 bp, Artificial
  probe
  misc_feature (1)..(25): SEQ ID NO: 4390; WAN024C7L_at; Start 2; Stop 26
tgtccaaaaactcgcggttgcatac

SEQ ID NO: 107239 - DNA, 25 bp, Artificial
  probe
  misc_feature (1)..(25): SEQ ID NO: 4390; WAN024C7L_at; Start 129; Stop 153
caaacatgatcttattcctattcaa

SEQ ID NO: 107240 - DNA, 25 bp, Artificial
  probe
  misc_feature (1)..(25): SEQ ID NO: 4390; WAN024C7L_at; Start 61; Stop 85
gatgccgatatgagcaggaacctgt

SEQ ID NO: 107241 - DNA, 25 bp, Artificial
  probe
  misc_feature (1)..(25): SEQ ID NO: 4390; WAN024C7L_at; Start 28; Stop 52
ttttttagcccaacggccattgcca

SEQ ID NO: 107242 - DNA, 25 bp, Artificial
  probe
  misc_feature (1)..(25): SEQ ID NO: 4390; WAN024C7L_at; Start 145; Stop 169
cctattcaaaaatctatcgtttcat

SEQ ID NO: 107243 - DNA, 25 bp, Artificial
  probe
  misc_feature (1)..(25): SEQ ID NO: 4390; WAN024C7L_at; Start 206; Stop 230
tatttattctcaggcaccaagccca

SEQ ID NO: 107244 - DNA, 25 bp, Artificial
  probe
  misc_feature (1)..(25): SEQ ID NO: 4390; WAN024C7L_at; Start 15; Stop 39
gcggttgcatacgttttttagccca

SEQ ID NO: 107245 - DNA, 25 bp, Artificial
  probe
  misc_feature (1)..(25): SEQ ID NO: 4390; WAN024C7L_at; Start 181; Stop 205
tccccattttcttctatcactaagc

SEQ ID NO: 107246 - DNA, 25 bp, Artificial
  probe
  misc_feature (1)..(25): SEQ ID NO: 4390; WAN024C7L_at; Start 170; Stop 194
tataccatatttccccattttcttc

SEQ ID NO: 107247 - DNA, 25 bp, Artificial
  probe
  misc_feature (1)..(25): SEQ ID NO: 4984; WAN024C7M_at; Start 276; Stop 300
tatcatgaacttgccagtagagttt

SEQ ID NO: 107248 - DNA, 25 bp, Artificial
  probe
  misc_feature (1)..(25): SEQ ID NO: 4984; WAN024C7M_at; Start 29; Stop 53
tttttaagaaagataaggctgtgga

SEQ ID NO: 107249 - DNA, 25 bp, Artificial
  probe
  misc_feature (1)..(25): SEQ ID NO: 4984; WAN024C7M_at; Start 358; Stop 382
gagacagaccgcctgcctaagcaaa

SEQ ID NO: 107250 - DNA, 25 bp, Artificial
  probe
  misc_feature (1)..(25): SEQ ID NO: 4984; WAN024C7M_at; Start 170; Stop 194
cattgcaaaccgtgaccaaggcagc

SEQ ID NO: 107251 - DNA, 25 bp, Artificial
  probe
  misc_feature (1)..(25): SEQ ID NO: 4984; WAN024C7M_at; Start 638; Stop 662
tgagcaatttccttccatggcaggg

SEQ ID NO: 107252 - DNA, 25 bp, Artificial
  probe
  misc_feature (1)..(25): SEQ ID NO: 4984; WAN024C7M_at; Start 261; Stop 285
tcaggaagtcaagtttatcatgaac

SEQ ID NO: 107253 - DNA, 25 bp, Artificial
  probe
  misc_feature (1)..(25): SEQ ID NO: 4984; WAN024C7M_at; Start 3; Stop 27
gaataggaataagatcatgtttgga

SEQ ID NO: 107254 - DNA, 25 bp, Artificial
  probe
  misc_feature (1)..(25): SEQ ID NO: 4984; WAN024C7M_at; Start 198; Stop 222
caaactgggcgtcaaggttattacg

SEQ ID NO: 107255 - DNA, 25 bp, Artificial
  probe
  misc_feature (1)..(25): SEQ ID NO: 4984; WAN024C7M_at; Start 154; Stop 178
aaggcgggcatggaagcattgcaaa

SEQ ID NO: 107256 - DNA, 25 bp, Artificial
  probe
  misc_feature (1)..(25): SEQ ID NO: 4984; WAN024C7M_at; Start 718; Stop 742
gccttgcaggaagctattcttgcct

SEQ ID NO: 107257 - DNA, 25 bp, Artificial
  probe
  misc_feature (1)..(25): SEQ ID NO: 4984; WAN024C7M_at; Start 679; Stop 703
tattttacggacaccttatggcctg

SEQ ID NO: 107258 - DNA, 25 bp, Artificial
  probe
  misc_feature (1)..(25): SEQ ID NO: 4984; WAN024C7M_at; Start 574; Stop 598
cagcatttgcctaaggacttacgag

SEQ ID NO: 107259 - DNA, 25 bp, Artificial
  probe
  misc_feature (1)..(25): SEQ ID NO: 4984; WAN024C7M_at; Start 727; Stop 751
gaagctattcttgcctataatcgtc

SEQ ID NO: 107260 - DNA, 25 bp, Artificial
  probe
  misc_feature (1)..(25): SEQ ID NO: 4984; WAN024C7M_at; Start 70; Stop 94
caggttcctgctcatatcggcatca

SEQ ID NO: 107261 - DNA, 25 bp, Artificial
  probe
  misc_feature (1)..(25): SEQ ID NO: 4984; WAN024C7M_at; Start 448; Stop 472
gctcttaactatggtggacgtgctg

SEQ ID NO: 107262 - DNA, 25 bp, Artificial
  probe
  misc_feature (1)..(25): SEQ ID NO: 4984; WAN024C7M_at; Start 41; Stop 65
ataaggctgtggaagtagaggttcc

SEQ ID NO: 107263 - DNA, 25 bp, Artificial
  probe
  misc_feature (1)..(25): SEQ ID NO: 4984; WAN024C7M_at; Start 90; Stop 114
catcatcatggatggcaatggccgt

SEQ ID NO: 107264 - DNA, 25 bp, Artificial
  probe
  misc_feature (1)..(25): SEQ ID NO: 4984; WAN024C7M_at; Start 219; Stop 243
tacggtctatgctttttctacggaa

SEQ ID NO: 107265 - DNA, 25 bp, Artificial
  probe
  misc_feature (1)..(25): SEQ ID NO: 4984; WAN024C7M_at; Start 301; Stop 325
tatgataattatgtcccggaactac

SEQ ID NO: 107266 - DNA, 25 bp, Artificial
  probe
  misc_feature (1)..(25): SEQ ID NO: 4984; WAN024C7M_at; Start 185; Stop 209
ccaaggcagccaacaaactgggcgt

SEQ ID NO: 107267 - DNA, 25 bp, Artificial
  probe
  misc_feature (1)..(25): SEQ ID NO: 4984; WAN024C7M_at; Start 56; Stop 80
tagaggttccgacacaggttcctgc

SEQ ID NO: 107268 - DNA, 25 bp, Artificial
  probe
  misc_feature (1)..(25): SEQ ID NO: 4984; WAN024C7M_at; Start 690; Stop 714
caccttatggcctgattttgacgaa

SEQ ID NO: 107269 - DNA, 25 bp, Artificial
  probe
  misc_feature (1)..(25): SEQ ID NO: 4984; WAN024C7M_at; Start 529; Stop 553
ccaggtgacatcacagaggaattga

SEQ ID NO: 107270 - DNA, 25 bp, Artificial
  probe
  misc_feature (1)..(25): SEQ ID NO: 4984; WAN024C7M_at; Start 588; Stop 612
ggacttacgagacccagacttgatt

SEQ ID NO: 107271 - DNA, 25 bp, Artificial
  probe
  misc_feature (1)..(25): SEQ ID NO: 4984; WAN024C7M_at; Start 102; Stop 126
tggcaatggccgttgggctaaaaaa

SEQ ID NO: 107272 - DNA, 25 bp, Artificial
  probe
  misc_feature (1)..(25): SEQ ID NO: 4984; WAN024C7M_at; Start 652; Stop 676
ccatggcagggagcctatagtgagc

SEQ ID NO: 107273 - DNA, 25 bp, Artificial
  probe
  misc_feature (1)..(25): SEQ ID NO: 4984; WAN024C7M_at; Start 313; Stop 337
gtcccggaactacatgcgaataatg

SEQ ID NO: 107274 - DNA, 25 bp, Artificial
  probe
  misc_feature (1)..(25): SEQ ID NO: 4984; WAN024C7M_at; Start 479; Stop 503
cacaggcgcttaagttgatttccca

SEQ ID NO: 107275 - DNA, 25 bp, Artificial
  probe
  misc_feature (1)..(25): SEQ ID NO: 4984; WAN024C7M_at; Start 409; Stop 433
gaattgactaagaacaacacaggat

SEQ ID NO: 107276 - DNA, 25 bp, Artificial
  probe
  misc_feature (1)..(25): SEQ ID NO: 4984; WAN024C7M_at; Start 602; Stop 626
cagacttgattatccgtactagtgg

SEQ ID NO: 107277 - DNA, 25 bp, Artificial
  probe
  misc_feature (1)..(25): SEQ ID NO: 4984; WAN024C7M_at; Start 495; Stop 519
gatttcccaggatgttttagatgcc

SEQ ID NO: 107278 - DNA, 25 bp, Artificial
  probe
  misc_feature (1)..(25): SEQ ID NO: 4984; WAN024C7M_at; Start 128; Stop 152
gtatgcaaccgcgagtttttggaca

SEQ ID NO: 107279 - DNA, 25 bp, Artificial
  probe
  misc_feature (1)..(25): SEQ ID NO: 4984; WAN024C7M_at; Start 117; Stop 141
ggctaaaaaacgtatgcaaccgcga

SEQ ID NO: 107280 - DNA, 25 bp, Artificial
  probe
  misc_feature (1)..(25): SEQ ID NO: 4984; WAN024C7M_at; Start 669; Stop 693
tagtgagctttattttacggacacc

SEQ ID NO: 107281 - DNA, 25 bp, Artificial
  probe
  misc_feature (1)..(25): SEQ ID NO: 5530; WAN024C7N_at; Start 372; Stop 396
cacgtttgtaacgactgaggatatc

SEQ ID NO: 107282 - DNA, 25 bp, Artificial
  probe
  misc_feature (1)..(25): SEQ ID NO: 5530; WAN024C7N_at; Start 393; Stop 417
tatcggttgcagtataaccttctgg

SEQ ID NO: 107283 - DNA, 25 bp, Artificial
  probe
  misc_feature (1)..(25): SEQ ID NO: 5530; WAN024C7N_at; Start 438; Stop 462
ctccagacggataagggaacatatc

SEQ ID NO: 107284 - DNA, 25 bp, Artificial
  probe
  misc_feature (1)..(25): SEQ ID NO: 5530; WAN024C7N_at; Start 362; Stop 386
tagccttgcgcacgtttgtaacgac

SEQ ID NO: 107285 - DNA, 25 bp, Artificial
  probe
  misc_feature (1)..(25): SEQ ID NO: 5530; WAN024C7N_at; Start 297; Stop 321
tatccatagcgtattgctctgcagg

SEQ ID NO: 107286 - DNA, 25 bp, Artificial
  probe
  misc_feature (1)..(25): SEQ ID NO: 5530; WAN024C7N_at; Start 73; Stop 97
ggcaatggcagttcccaattcctca

SEQ ID NO: 107287 - DNA, 25 bp, Artificial
  probe
  misc_feature (1)..(25): SEQ ID NO: 5530; WAN024C7N_at; Start 87; Stop 111
ccaattcctcaacccagtttactgg

SEQ ID NO: 107288 - DNA, 25 bp, Artificial
  probe
  misc_feature (1)..(25): SEQ ID NO: 5530; WAN024C7N_at; Start 268; Stop 292
cgctgtaaattctgctgggtcatta

SEQ ID NO: 107289 - DNA, 25 bp, Artificial
  probe
  misc_feature (1)..(25): SEQ ID NO: 5530; WAN024C7N_at; Start 139; Stop 163
ttcgtaaagcttggtgaaaatccat

SEQ ID NO: 107290 - DNA, 25 bp, Artificial
  probe
  misc_feature (1)..(25): SEQ ID NO: 5530; WAN024C7N_at; Start 169; Stop 193
ccacttgtagtagtttggatctgtt

SEQ ID NO: 107291 - DNA, 25 bp, Artificial
  probe
  misc_feature (1)..(25): SEQ ID NO: 5530; WAN024C7N_at; Start 25; Stop 49
tggatagcctccacgctcagaagtt

SEQ ID NO: 107292 - DNA, 25 bp, Artificial
  probe
  misc_feature (1)..(25): SEQ ID NO: 5530; WAN024C7N_at; Start 457; Stop 481
catatcaagcgcataaaacttaggt

SEQ ID NO: 107293 - DNA, 25 bp, Artificial
  probe
  misc_feature (1)..(25): SEQ ID NO: 5530; WAN024C7N_at; Start 198; Stop 222
tgacttcacgatcccagtcataaga

SEQ ID NO: 107294 - DNA, 25 bp, Artificial
  probe
  misc_feature (1)..(25): SEQ ID NO: 5530; WAN024C7N_at; Start 248; Stop 272
ttgaagttggcaatgttttccgctg

SEQ ID NO: 107295 - DNA, 25 bp, Artificial
  probe
  misc_feature (1)..(25): SEQ ID NO: 5530; WAN024C7N_at; Start 100; Stop 124
ccagtttactggcacttcagcttca

SEQ ID NO: 107296 - DNA, 25 bp, Artificial
  probe
  misc_feature (1)..(25): SEQ ID NO: 5530; WAN024C7N_at; Start 412; Stop 436
ttctgggtgtcctacgtgcagacca

SEQ ID NO: 107297 - DNA, 25 bp, Artificial
  probe
  misc_feature (1)..(25): SEQ ID NO: 5530; WAN024C7N_at; Start 110; Stop 134
ggcacttcagcttcataggccaagc

SEQ ID NO: 107298 - DNA, 25 bp, Artificial
  probe
  misc_feature (1)..(25): SEQ ID NO: 5530; WAN024C7N_at; Start 312; Stop 336
gctctgcaggcaaaccaaaagcatc

SEQ ID NO: 107299 - DNA, 25 bp, Artificial
  probe
  misc_feature (1)..(25): SEQ ID NO: 5530; WAN024C7N_at; Start 407; Stop 431
taaccttctgggtgtcctacgtgca

SEQ ID NO: 107300 - DNA, 25 bp, Artificial
  probe
  misc_feature (1)..(25): SEQ ID NO: 5530; WAN024C7N_at; Start 341; Stop 365
cccattgggtgaaggacattgtagc

SEQ ID NO: 107301 - DNA, 25 bp, Artificial
  probe
  misc_feature (1)..(25): SEQ ID NO: 5530; WAN024C7N_at; Start 212; Stop 236
cagtcataagaaaatccaagcgcat

SEQ ID NO: 107302 - DNA, 25 bp, Artificial
  probe
  misc_feature (1)..(25): SEQ ID NO: 5530; WAN024C7N_at; Start 2; Stop 26
tggcgcattggtttgcggacaactg

SEQ ID NO: 107303 - DNA, 25 bp, Artificial
  probe
  misc_feature (1)..(25): SEQ ID NO: 5530; WAN024C7N_at; Start 445; Stop 469
cggataagggaacatatcaagcgca

SEQ ID NO: 107304 - DNA, 25 bp, Artificial
  probe
  misc_feature (1)..(25): SEQ ID NO: 5530; WAN024C7N_at; Start 123; Stop 147
cataggccaagcctttttcgtaaag

SEQ ID NO: 107305 - DNA, 25 bp, Artificial
  probe
  misc_feature (1)..(25): SEQ ID NO: 5530; WAN024C7N_at; Start 154; Stop 178
gaaaatccattgagtccacttgtag

SEQ ID NO: 107306 - DNA, 25 bp, Artificial
  probe
  misc_feature (1)..(25): SEQ ID NO: 5530; WAN024C7N_at; Start 184; Stop 208
tggatctgttgtgttgacttcacga

SEQ ID NO: 107307 - DNA, 25 bp, Artificial
  probe
  misc_feature (1)..(25): SEQ ID NO: 5530; WAN024C7N_at; Start 380; Stop 404
taacgactgaggatatcggttgcag

SEQ ID NO: 107308 - DNA, 25 bp, Artificial
  probe
  misc_feature (1)..(25): SEQ ID NO: 5530; WAN024C7N_at; Start 327; Stop 351
caaaagcatcccaacccattgggtg

SEQ ID NO: 107309 - DNA, 25 bp, Artificial
  probe
  misc_feature (1)..(25): SEQ ID NO: 5530; WAN024C7N_at; Start 41; Stop 65
tcagaagttccgtcaggaagcactt

SEQ ID NO: 107310 - DNA, 25 bp, Artificial
  probe
  misc_feature (1)..(25): SEQ ID NO: 5530; WAN024C7N_at; Start 258; Stop 282
caatgttttccgctgtaaattctgc

SEQ ID NO: 107311 - DNA, 25 bp, Artificial
  probe
  misc_feature (1)..(25): SEQ ID NO: 5530; WAN024C7N_at; Start 283; Stop 307
tgggtcattaccagtatccatagcg

SEQ ID NO: 107312 - DNA, 25 bp, Artificial
  probe
  misc_feature (1)..(25): SEQ ID NO: 5530; WAN024C7N_at; Start 57; Stop 81
gaagcacttcttcattggcaatggc

SEQ ID NO: 107313 - DNA, 25 bp, Artificial
  probe
  misc_feature (1)..(25): SEQ ID NO: 5530; WAN024C7N_at; Start 351; Stop 375
gaaggacattgtagccttgcgcacg

SEQ ID NO: 107314 - DNA, 25 bp, Artificial
  probe
  misc_feature (1)..(25): SEQ ID NO: 5530; WAN024C7N_at; Start 13; Stop 37
tttgcggacaactggatagcctcca

SEQ ID NO: 107315 - DNA, 25 bp, Artificial
  probe
  misc_feature (1)..(25): SEQ ID NO: 2744; WAN024C7O_at; Start 235; Stop 259
gaggaggtcctcatcagccaatttc

SEQ ID NO: 107316 - DNA, 25 bp, Artificial
  probe
  misc_feature (1)..(25): SEQ ID NO: 2744; WAN024C7O_at; Start 53; Stop 77
ccacggtggtcacggtagcttgttc

SEQ ID NO: 107317 - DNA, 25 bp, Artificial
  probe
  misc_feature (1)..(25): SEQ ID NO: 2744; WAN024C7O_at; Start 125; Stop 149
ggaacaacaccgaggtcatagagga

SEQ ID NO: 107318 - DNA, 25 bp, Artificial
  probe
  misc_feature (1)..(25): SEQ ID NO: 2744; WAN024C7O_at; Start 70; Stop 94
gcttgttcccaaaatcatcccttgg

SEQ ID NO: 107319 - DNA, 25 bp, Artificial
  probe
  misc_feature (1)..(25): SEQ ID NO: 2744; WAN024C7O_at; Start 59; Stop 83
tggtcacggtagcttgttcccaaaa

SEQ ID NO: 107320 - DNA, 25 bp, Artificial
  probe
  misc_feature (1)..(25): SEQ ID NO: 2744; WAN024C7O_at; Start 14; Stop 38
ccatcacgtttttcaaccttgtcgg

SEQ ID NO: 107321 - DNA, 25 bp, Artificial
  probe
  misc_feature (1)..(25): SEQ ID NO: 2744; WAN024C7O_at; Start 50; Stop 74
gcaccacggtggtcacggtagcttg

SEQ ID NO: 107322 - DNA, 25 bp, Artificial
  probe
  misc_feature (1)..(25): SEQ ID NO: 2744; WAN024C7O_at; Start 197; Stop 221
gcaccacccacgtagatatctactg

SEQ ID NO: 107323 - DNA, 25 bp, Artificial
  probe
  misc_feature (1)..(25): SEQ ID NO: 2744; WAN024C7O_at; Start 223; Stop 247
caaccattgtttgaggaggtcctca

SEQ ID NO: 107324 - DNA, 25 bp, Artificial
  probe
  misc_feature (1)..(25): SEQ ID NO: 2744; WAN024C7O_at; Start 118; Stop 142
cttagtcggaacaacaccgaggtca

SEQ ID NO: 107325 - DNA, 25 bp, Artificial
  probe
  misc_feature (1)..(25): SEQ ID NO: 2744; WAN024C7O_at; Start 73; Stop 97
tgttcccaaaatcatcccttggtta

SEQ ID NO: 107326 - DNA, 25 bp, Artificial
  probe
  misc_feature (1)..(25): SEQ ID NO: 2744; WAN024C7O_at; Start 144; Stop 168
agaggaatttatgccagaaacgagc

SEQ ID NO: 107327 - DNA, 25 bp, Artificial
  probe
  misc_feature (1)..(25): SEQ ID NO: 2744; WAN024C7O_at; Start 279; Stop 303
tatagcggaggtagtaccagcttga

SEQ ID NO: 107328 - DNA, 25 bp, Artificial
  probe
  misc_feature (1)..(25): SEQ ID NO: 2744; WAN024C7O_at; Start 191; Stop 215
tgttccgcaccacccacgtagatat

SEQ ID NO: 107329 - DNA, 25 bp, Artificial
  probe
  misc_feature (1)..(25): SEQ ID NO: 2744; WAN024C7O_at; Start 40; Stop 64
tgccacaagagcaccacggtggtca

SEQ ID NO: 107330 - DNA, 25 bp, Artificial
  probe
  misc_feature (1)..(25): SEQ ID NO: 2744; WAN024C7O_at; Start 275; Stop 299
tcaatatagcggaggtagtaccagc

SEQ ID NO: 107331 - DNA, 25 bp, Artificial
  probe
  misc_feature (1)..(25): SEQ ID NO: 2744; WAN024C7O_at; Start 213; Stop 237
tatctactggcaaccattgtttgag

SEQ ID NO: 107332 - DNA, 25 bp, Artificial
  probe
  misc_feature (1)..(25): SEQ ID NO: 2744; WAN024C7O_at; Start 129; Stop 153
caacaccgaggtcatagaggaattt

SEQ ID NO: 107333 - DNA, 25 bp, Artificial
  probe
  misc_feature (1)..(25): SEQ ID NO: 2744; WAN024C7O_at; Start 217; Stop 241
tactggcaaccattgtttgaggagg

SEQ ID NO: 107334 - DNA, 25 bp, Artificial
  probe
  misc_feature (1)..(25): SEQ ID NO: 2744; WAN024C7O_at; Start 179; Stop 203
tgaagtacagcatgttccgcaccac

SEQ ID NO: 107335 - DNA, 25 bp, Artificial
  probe
  misc_feature (1)..(25): SEQ ID NO: 2744; WAN024C7O_at; Start 134; Stop 158
ccgaggtcatagaggaatttatgcc

SEQ ID NO: 107336 - DNA, 25 bp, Artificial
  probe
  misc_feature (1)..(25): SEQ ID NO: 2744; WAN024C7O_at; Start 239; Stop 263
aggtcctcatcagccaatttctcag

SEQ ID NO: 107337 - DNA, 25 bp, Artificial
  probe
  misc_feature (1)..(25): SEQ ID NO: 2744; WAN024C7O_at; Start 263; Stop 287
gtattgtgcgggtcaatatagcgga

SEQ ID NO: 107338 - DNA, 25 bp, Artificial
  probe
  misc_feature (1)..(25): SEQ ID NO: 2744; WAN024C7O_at; Start 63; Stop 87
cacggtagcttgttcccaaaatcat

SEQ ID NO: 107339 - DNA, 25 bp, Artificial
  probe
  misc_feature (1)..(25): SEQ ID NO: 2744; WAN024C7O_at; Start 32; Stop 56
ttgtcggttgccacaagagcaccac

SEQ ID NO: 107340 - DNA, 25 bp, Artificial
  probe
  misc_feature (1)..(25): SEQ ID NO: 2744; WAN024C7O_at; Start 207; Stop 231
cgtagatatctactggcaaccattg

SEQ ID NO: 107341 - DNA, 25 bp, Artificial
  probe
  misc_feature (1)..(25): SEQ ID NO: 2744; WAN024C7O_at; Start 141; Stop 165
catagaggaatttatgccagaaacg

SEQ ID NO: 107342 - DNA, 25 bp, Artificial
  probe
  misc_feature (1)..(25): SEQ ID NO: 2744; WAN024C7O_at; Start 165; Stop 189
gagcataaagcaagtgaagtacagc

SEQ ID NO: 107343 - DNA, 25 bp, Artificial
  probe
  misc_feature (1)..(25): SEQ ID NO: 2744; WAN024C7O_at; Start 37; Stop 61
ggttgccacaagagcaccacggtgg

SEQ ID NO: 107344 - DNA, 25 bp, Artificial
  probe
  misc_feature (1)..(25): SEQ ID NO: 2744; WAN024C7O_at; Start 175; Stop 199
caagtgaagtacagcatgttccgca

SEQ ID NO: 107345 - DNA, 25 bp, Artificial
  probe
  misc_feature (1)..(25): SEQ ID NO: 2744; WAN024C7O_at; Start 106; Stop 130
ttggaatggttccttagtcggaaca

SEQ ID NO: 107346 - DNA, 25 bp, Artificial
  probe
  misc_feature (1)..(25): SEQ ID NO: 2744; WAN024C7O_at; Start 26; Stop 50
tcaaccttgtcggttgccacaagag

SEQ ID NO: 107347 - DNA, 25 bp, Artificial
  probe
  misc_feature (1)..(25): SEQ ID NO: 2744; WAN024C7O_at; Start 253; Stop 277
caatttctcagtattgtgcgggtca

SEQ ID NO: 107348 - DNA, 25 bp, Artificial
  probe
  misc_feature (1)..(25): SEQ ID NO: 2744; WAN024C7O_at; Start 156; Stop 180
gccagaaacgagcataaagcaagtg

SEQ ID NO: 107349 - DNA, 25 bp, Artificial
  probe
  misc_feature (1)..(25): SEQ ID NO: 1955; WAN024C7P_at; Start 42; Stop 66
caccttcaagtacttcgacgattgg

SEQ ID NO: 107350 - DNA, 25 bp, Artificial
  probe
  misc_feature (1)..(25): SEQ ID NO: 1955; WAN024C7P_at; Start 26; Stop 50
gcttcttcgacatttccaccttcaa

SEQ ID NO: 107351 - DNA, 25 bp, Artificial
  probe
  misc_feature (1)..(25): SEQ ID NO: 1955; WAN024C7P_at; Start 34; Stop 58
gacatttccaccttcaagtacttcg

SEQ ID NO: 107352 - DNA, 25 bp, Artificial
  probe
  misc_feature (1)..(25): SEQ ID NO: 1955; WAN024C7P_at; Start 100; Stop 124
ttggtcgtgggcaggcacagccata

SEQ ID NO: 107353 - DNA, 25 bp, Artificial
  probe
  misc_feature (1)..(25): SEQ ID NO: 1955; WAN024C7P_at; Start 83; Stop 107
gcaaattcccagtcacgttggtcgt

SEQ ID NO: 107354 - DNA, 25 bp, Artificial
  probe
  misc_feature (1)..(25): SEQ ID NO: 1955; WAN024C7P_at; Start 182; Stop 206
ttaccattgacagggttgatggcat

SEQ ID NO: 107355 - DNA, 25 bp, Artificial
  probe
  misc_feature (1)..(25): SEQ ID NO: 1955; WAN024C7P_at; Start 112; Stop 136
aggcacagccataaccgcacctgtt

SEQ ID NO: 107356 - DNA, 25 bp, Artificial
  probe
  misc_feature (1)..(25): SEQ ID NO: 1955; WAN024C7P_at; Start 260; Stop 284
tcagacttaaggctggcttggtgtt

SEQ ID NO: 107357 - DNA, 25 bp, Artificial
  probe
  misc_feature (1)..(25): SEQ ID NO: 1955; WAN024C7P_at; Start 52; Stop 76
tacttcgacgattggaaggtcaaat

SEQ ID NO: 107358 - DNA, 25 bp, Artificial
  probe
  misc_feature (1)..(25): SEQ ID NO: 1955; WAN024C7P_at; Start 172; Stop 196
tggcatttccttaccattgacaggg

SEQ ID NO: 107359 - DNA, 25 bp, Artificial
  probe
  misc_feature (1)..(25): SEQ ID NO: 1955; WAN024C7P_at; Start 60; Stop 84
cgattggaaggtcaaattgtttggc

SEQ ID NO: 107360 - DNA, 25 bp, Artificial
  probe
  misc_feature (1)..(25): SEQ ID NO: 1955; WAN024C7P_at; Start 255; Stop 279
ccaagtcagacttaaggctggcttg

SEQ ID NO: 107361 - DNA, 25 bp, Artificial
  probe
  misc_feature (1)..(25): SEQ ID NO: 1955; WAN024C7P_at; Start 161; Stop 185
gcaatccagattggcatttccttac

SEQ ID NO: 107362 - DNA, 25 bp, Artificial
  probe
  misc_feature (1)..(25): SEQ ID NO: 1955; WAN024C7P_at; Start 89; Stop 113
tcccagtcacgttggtcgtgggcag

SEQ ID NO: 107363 - DNA, 25 bp, Artificial
  probe
  misc_feature (1)..(25): SEQ ID NO: 1955; WAN024C7P_at; Start 86; Stop 110
aattcccagtcacgttggtcgtggg

SEQ ID NO: 107364 - DNA, 25 bp, Artificial
  probe
  misc_feature (1)..(25): SEQ ID NO: 1955; WAN024C7P_at; Start 274; Stop 298
ggcttggtgtttatagtctgctaca

SEQ ID NO: 107365 - DNA, 25 bp, Artificial
  probe
  misc_feature (1)..(25): SEQ ID NO: 1955; WAN024C7P_at; Start 80; Stop 104
ttggcaaattcccagtcacgttggt

SEQ ID NO: 107366 - DNA, 25 bp, Artificial
  probe
  misc_feature (1)..(25): SEQ ID NO: 1955; WAN024C7P_at; Start 118; Stop 142
agccataaccgcacctgttccataa

SEQ ID NO: 107367 - DNA, 25 bp, Artificial
  probe
  misc_feature (1)..(25): SEQ ID NO: 1955; WAN024C7P_at; Start 56; Stop 80
tcgacgattggaaggtcaaattgtt

SEQ ID NO: 107368 - DNA, 25 bp, Artificial
  probe
  misc_feature (1)..(25): SEQ ID NO: 1955; WAN024C7P_at; Start 7; Stop 31
gccatcctctgtgtaggcagcttct

SEQ ID NO: 107369 - DNA, 25 bp, Artificial
  probe
  misc_feature (1)..(25): SEQ ID NO: 1955; WAN024C7P_at; Start 267; Stop 291
taaggctggcttggtgtttatagtc

SEQ ID NO: 107370 - DNA, 25 bp, Artificial
  probe
  misc_feature (1)..(25): SEQ ID NO: 1955; WAN024C7P_at; Start 18; Stop 42
tgtaggcagcttcttcgacatttcc

SEQ ID NO: 107371 - DNA, 25 bp, Artificial
  probe
  misc_feature (1)..(25): SEQ ID NO: 1955; WAN024C7P_at; Start 70; Stop 94
gtcaaattgtttggcaaattcccag

SEQ ID NO: 107372 - DNA, 25 bp, Artificial
  probe
  misc_feature (1)..(25): SEQ ID NO: 1955; WAN024C7P_at; Start 285; Stop 309
tatagtctgctacagcttctgcttg

SEQ ID NO: 107373 - DNA, 25 bp, Artificial
  probe
  misc_feature (1)..(25): SEQ ID NO: 1955; WAN024C7P_at; Start 21; Stop 45
aggcagcttcttcgacatttccacc

SEQ ID NO: 107374 - DNA, 25 bp, Artificial
  probe
  misc_feature (1)..(25): SEQ ID NO: 1955; WAN024C7P_at; Start 123; Stop 147
taaccgcacctgttccataactagc

SEQ ID NO: 107375 - DNA, 25 bp, Artificial
  probe
  misc_feature (1)..(25): SEQ ID NO: 1955; WAN024C7P_at; Start 104; Stop 128
tcgtgggcaggcacagccataaccg

SEQ ID NO: 107376 - DNA, 25 bp, Artificial
  probe
  misc_feature (1)..(25): SEQ ID NO: 1955; WAN024C7P_at; Start 2; Stop 26
tgcaggccatcctctgtgtaggcag

SEQ ID NO: 107377 - DNA, 25 bp, Artificial
  probe
  misc_feature (1)..(25): SEQ ID NO: 1955; WAN024C7P_at; Start 126; Stop 150
ccgcacctgttccataactagcaag

SEQ ID NO: 107378 - DNA, 25 bp, Artificial
  probe
  misc_feature (1)..(25): SEQ ID NO: 1955; WAN024C7P_at; Start 178; Stop 202
ttccttaccattgacagggttgatg

SEQ ID NO: 107379 - DNA, 25 bp, Artificial
  probe
  misc_feature (1)..(25): SEQ ID NO: 1955; WAN024C7P_at; Start 291; Stop 315
ctgctacagcttctgcttgctctga

SEQ ID NO: 107380 - DNA, 25 bp, Artificial
  probe
  misc_feature (1)..(25): SEQ ID NO: 1955; WAN024C7P_at; Start 75; Stop 99
attgtttggcaaattcccagtcacg

SEQ ID NO: 107381 - DNA, 25 bp, Artificial
  probe
  misc_feature (1)..(25): SEQ ID NO: 1955; WAN024C7P_at; Start 48; Stop 72
caagtacttcgacgattggaaggtc

SEQ ID NO: 107382 - DNA, 25 bp, Artificial
  probe
  misc_feature (1)..(25): SEQ ID NO: 1955; WAN024C7P_at; Start 13; Stop 37
ctctgtgtaggcagcttcttcgaca

SEQ ID NO: 107383 - DNA, 25 bp, Artificial
  probe
  misc_feature (1)..(25): SEQ ID NO: 3980; WAN024C7Q_at; Start 18; Stop 42
caatcaattgaataaagcctttggc

SEQ ID NO: 107384 - DNA, 25 bp, Artificial
  probe
  misc_feature (1)..(25): SEQ ID NO: 3980; WAN024C7Q_at; Start 183; Stop 207
cattgttttccgcaaggatttcttt

SEQ ID NO: 107385 - DNA, 25 bp, Artificial
  probe
  misc_feature (1)..(25): SEQ ID NO: 3980; WAN024C7Q_at; Start 246; Stop 270
ggcttccttccaaaccttcttctga

SEQ ID NO: 107386 - DNA, 25 bp, Artificial
  probe
  misc_feature (1)..(25): SEQ ID NO: 3980; WAN024C7Q_at; Start 211; Stop 235
tgtaatcaaacggtaaactcggtca

SEQ ID NO: 107387 - DNA, 25 bp, Artificial
  probe
  misc_feature (1)..(25): SEQ ID NO: 3980; WAN024C7Q_at; Start 100; Stop 124
ggcaatagctgtgttgaatttgaga

SEQ ID NO: 107388 - DNA, 25 bp, Artificial
  probe
  misc_feature (1)..(25): SEQ ID NO: 3980; WAN024C7Q_at; Start 195; Stop 219
caaggatttctttacttgtaatcaa

SEQ ID NO: 107389 - DNA, 25 bp, Artificial
  probe
  misc_feature (1)..(25): SEQ ID NO: 3980; WAN024C7Q_at; Start 5; Stop 29
ggtgcaaatggtgcaatcaattgaa

SEQ ID NO: 107390 - DNA, 25 bp, Artificial
  probe
  misc_feature (1)..(25): SEQ ID NO: 3980; WAN024C7Q_at; Start 13; Stop 37
tggtgcaatcaattgaataaagcct

SEQ ID NO: 107391 - DNA, 25 bp, Artificial
  probe
  misc_feature (1)..(25): SEQ ID NO: 3980; WAN024C7Q_at; Start 40; Stop 64
ggcatagtcaacataaagcttatct

SEQ ID NO: 107392 - DNA, 25 bp, Artificial
  probe
  misc_feature (1)..(25): SEQ ID NO: 3980; WAN024C7Q_at; Start 171; Stop 195
tgtcaagagcaccattgttttccgc

SEQ ID NO: 107393 - DNA, 25 bp, Artificial
  probe
  misc_feature (1)..(25): SEQ ID NO: 3980; WAN024C7Q_at; Start 177; Stop 201
gagcaccattgttttccgcaaggat

SEQ ID NO: 107394 - DNA, 25 bp, Artificial
  probe
  misc_feature (1)..(25): SEQ ID NO: 3980; WAN024C7Q_at; Start 69; Stop 93
tgttagcagcattgacaaagaccat

SEQ ID NO: 107395 - DNA, 25 bp, Artificial
  probe
  misc_feature (1)..(25): SEQ ID NO: 3980; WAN024C7Q_at; Start 107; Stop 131
gctgtgttgaatttgagagactcaa

SEQ ID NO: 107396 - DNA, 25 bp, Artificial
  probe
  misc_feature (1)..(25): SEQ ID NO: 3980; WAN024C7Q_at; Start 105; Stop 129
tagctgtgttgaatttgagagactc

SEQ ID NO: 107397 - DNA, 25 bp, Artificial
  probe
  misc_feature (1)..(25): SEQ ID NO: 3980; WAN024C7Q_at; Start 27; Stop 51
gaataaagcctttggcatagtcaac

SEQ ID NO: 107398 - DNA, 25 bp, Artificial
  probe
  misc_feature (1)..(25): SEQ ID NO: 3980; WAN024C7Q_at; Start 87; Stop 111
agaccataagttgggcaatagctgt

SEQ ID NO: 107399 - DNA, 25 bp, Artificial
  probe
  misc_feature (1)..(25): SEQ ID NO: 3980; WAN024C7Q_at; Start 60; Stop 84
tatcttccttgttagcagcattgac

SEQ ID NO: 107400 - DNA, 25 bp, Artificial
  probe
  misc_feature (1)..(25): SEQ ID NO: 3980; WAN024C7Q_at; Start 84; Stop 108
caaagaccataagttgggcaatagc

SEQ ID NO: 107401 - DNA, 25 bp, Artificial
  probe
  misc_feature (1)..(25): SEQ ID NO: 3980; WAN024C7Q_at; Start 46; Stop 70
gtcaacataaagcttatcttccttg

SEQ ID NO: 107402 - DNA, 25 bp, Artificial
  probe
  misc_feature (1)..(25): SEQ ID NO: 3980; WAN024C7Q_at; Start 54; Stop 78
aaagcttatcttccttgttagcagc

SEQ ID NO: 107403 - DNA, 25 bp, Artificial
  probe
  misc_feature (1)..(25): SEQ ID NO: 3980; WAN024C7Q_at; Start 1; Stop 25
gtgaggtgcaaatggtgcaatcaat

SEQ ID NO: 107404 - DNA, 25 bp, Artificial
  probe
  misc_feature (1)..(25): SEQ ID NO: 3980; WAN024C7Q_at; Start 78; Stop 102
cattgacaaagaccataagttgggc

SEQ ID NO: 107405 - DNA, 25 bp, Artificial
  probe
  misc_feature (1)..(25): SEQ ID NO: 3980; WAN024C7Q_at; Start 168; Stop 192
ccttgtcaagagcaccattgttttc

SEQ ID NO: 107406 - DNA, 25 bp, Artificial
  probe
  misc_feature (1)..(25): SEQ ID NO: 3980; WAN024C7Q_at; Start 111; Stop 135
tgttgaatttgagagactcaatttg

SEQ ID NO: 107407 - DNA, 25 bp, Artificial
  probe
  misc_feature (1)..(25): SEQ ID NO: 3980; WAN024C7Q_at; Start 35; Stop 59
cctttggcatagtcaacataaagct

SEQ ID NO: 107408 - DNA, 25 bp, Artificial
  probe
  misc_feature (1)..(25): SEQ ID NO: 3980; WAN024C7Q_at; Start 66; Stop 90
ccttgttagcagcattgacaaagac

SEQ ID NO: 107409 - DNA, 25 bp, Artificial
  probe
  misc_feature (1)..(25): SEQ ID NO: 3980; WAN024C7Q_at; Start 175; Stop 199
aagagcaccattgttttccgcaagg

SEQ ID NO: 107410 - DNA, 25 bp, Artificial
  probe
  misc_feature (1)..(25): SEQ ID NO: 3980; WAN024C7Q_at; Start 72; Stop 96
tagcagcattgacaaagaccataag

SEQ ID NO: 107411 - DNA, 25 bp, Artificial
  probe
  misc_feature (1)..(25): SEQ ID NO: 3980; WAN024C7Q_at; Start 93; Stop 117
taagttgggcaatagctgtgttgaa

SEQ ID NO: 107412 - DNA, 25 bp, Artificial
  probe
  misc_feature (1)..(25): SEQ ID NO: 3980; WAN024C7Q_at; Start 191; Stop 215
tccgcaaggatttctttacttgtaa

SEQ ID NO: 107413 - DNA, 25 bp, Artificial
  probe
  misc_feature (1)..(25): SEQ ID NO: 3980; WAN024C7Q_at; Start 81; Stop 105
tgacaaagaccataagttgggcaat

SEQ ID NO: 107414 - DNA, 25 bp, Artificial
  probe
  misc_feature (1)..(25): SEQ ID NO: 3980; WAN024C7Q_at; Start 31; Stop 55
aaagcctttggcatagtcaacataa

SEQ ID NO: 107415 - DNA, 25 bp, Artificial
  probe
  misc_feature (1)..(25): SEQ ID NO: 3980; WAN024C7Q_at; Start 180; Stop 204
caccattgttttccgcaaggatttc

SEQ ID NO: 107416 - DNA, 25 bp, Artificial
  probe
  misc_feature (1)..(25): SEQ ID NO: 3980; WAN024C7Q_at; Start 233; Stop 257
tcaaggaacttacggcttccttcca

SEQ ID NO: 107417 - DNA, 25 bp, Artificial
  probe
  misc_feature (1)..(25): SEQ ID NO: 1658; WAN024C7R_at; Start 1030; Stop 1054
gaccaacgtgactgggaatttgcca

SEQ ID NO: 107418 - DNA, 25 bp, Artificial
  probe
  misc_feature (1)..(25): SEQ ID NO: 1658; WAN024C7R_at; Start 524; Stop 548
gaacttctgagcgtggaggctatcc

SEQ ID NO: 107419 - DNA, 25 bp, Artificial
  probe
  misc_feature (1)..(25): SEQ ID NO: 1658; WAN024C7R_at; Start 450; Stop 474
tgaagctgaagtgccagtaaactgg

SEQ ID NO: 107420 - DNA, 25 bp, Artificial
  probe
  misc_feature (1)..(25): SEQ ID NO: 1658; WAN024C7R_at; Start 800; Stop 824
tagtagacgctatcacaagttcaga

SEQ ID NO: 107421 - DNA, 25 bp, Artificial
  probe
  misc_feature (1)..(25): SEQ ID NO: 1658; WAN024C7R_at; Start 539; Stop 563
gaggctatccagttgtccgcaaacc

SEQ ID NO: 107422 - DNA, 25 bp, Artificial
  probe
  misc_feature (1)..(25): SEQ ID NO: 1658; WAN024C7R_at; Start 2240; Stop 2264
cagtcgcagaaacaggtgagtcaat

SEQ ID NO: 107423 - DNA, 25 bp, Artificial
  probe
  misc_feature (1)..(25): SEQ ID NO: 1658; WAN024C7R_at; Start 581; Stop 605
tcaaaatcacggcttacgcagagcg

SEQ ID NO: 107424 - DNA, 25 bp, Artificial
  probe
  misc_feature (1)..(25): SEQ ID NO: 1658; WAN024C7R_at; Start 238; Stop 262
gatgcttttggtttgcctgcagagc

SEQ ID NO: 107425 - DNA, 25 bp, Artificial
  probe
  misc_feature (1)..(25): SEQ ID NO: 1658; WAN024C7R_at; Start 37; Stop 61
tggcagggctactgggcagaacatc

SEQ ID NO: 107426 - DNA, 25 bp, Artificial
  probe
  misc_feature (1)..(25): SEQ ID NO: 1658; WAN024C7R_at; Start 1561; Stop 1585
caatggttgccagtagatatctacg

SEQ ID NO: 107427 - DNA, 25 bp, Artificial
  probe
  misc_feature (1)..(25): SEQ ID NO: 1658; WAN024C7R_at; Start 1869; Stop 1893
tgtggtggaacaatacggtgccgat

SEQ ID NO: 107428 - DNA, 25 bp, Artificial
  probe
  misc_feature (1)..(25): SEQ ID NO: 1658; WAN024C7R_at; Start 112; Stop 136
gatatgttcccttatccgtctggag

SEQ ID NO: 107429 - DNA, 25 bp, Artificial
  probe
  misc_feature (1)..(25): SEQ ID NO: 1658; WAN024C7R_at; Start 933; Stop 957
catcaaccctgtcaatggtaaggaa

SEQ ID NO: 107430 - DNA, 25 bp, Artificial
  probe
  misc_feature (1)..(25): SEQ ID NO: 1658; WAN024C7R_at; Start 22; Stop 46
gaaattgagcctaagtggcagggct

SEQ ID NO: 107431 - DNA, 25 bp, Artificial
  probe
  misc_feature (1)..(25): SEQ ID NO: 1658; WAN024C7R_at; Start 1915; Stop 1939
tttatgggaccactcgatgcttcga

SEQ ID NO: 107432 - DNA, 25 bp, Artificial
  probe
  misc_feature (1)..(25): SEQ ID NO: 1658; WAN024C7R_at; Start 178; Stop 202
gatatcctcagtcgttacaaacgtg

SEQ ID NO: 107433 - DNA, 25 bp, Artificial
  probe
  misc_feature (1)..(25): SEQ ID NO: 1658; WAN024C7R_at; Start 2206; Stop 2230
tttgcacctcacttggcagaagaac

SEQ ID NO: 107434 - DNA, 25 bp, Artificial
  probe
  misc_feature (1)..(25): SEQ ID NO: 1658; WAN024C7R_at; Start 478; Stop 502
gaggaattgggaactgccattgcca

SEQ ID NO: 107435 - DNA, 25 bp, Artificial
  probe
  misc_feature (1)..(25): SEQ ID NO: 1658; WAN024C7R_at; Start 1840; Stop 1864
tcgctcaagaacgttgttaacccag

SEQ ID NO: 107436 - DNA, 25 bp, Artificial
  probe
  misc_feature (1)..(25): SEQ ID NO: 1658; WAN024C7R_at; Start 265; Stop 289
tacgctatggatactggtaatgacc

SEQ ID NO: 107437 - DNA, 25 bp, Artificial
  probe
  misc_feature (1)..(25): SEQ ID NO: 1658; WAN024C7R_at; Start 193; Stop 217
tacaaacgtgcgcaaggctacaatg

SEQ ID NO: 107438 - DNA, 25 bp, Artificial
  probe
  misc_feature (1)..(25): SEQ ID NO: 1658; WAN024C7R_at; Start 2224; Stop 2248
gaagaactctggcaaacagtcgcag

SEQ ID NO: 107439 - DNA, 25 bp, Artificial
  probe
  misc_feature (1)..(25): SEQ ID NO: 1658; WAN024C7R_at; Start 282; Stop 306
taatgacccagcagaatttacagcg

SEQ ID NO: 107440 - DNA, 25 bp, Artificial
  probe
  misc_feature (1)..(25): SEQ ID NO: 1658; WAN024C7R_at; Start 1515; Stop 1539
tgacccgcacaatactgagaaattg

SEQ ID NO: 107441 - DNA, 25 bp, Artificial
  probe
  misc_feature (1)..(25): SEQ ID NO: 1658; WAN024C7R_at; Start 143; Stop 167
tgcacgtaggacacccagaaggtta

SEQ ID NO: 107442 - DNA, 25 bp, Artificial
  probe
  misc_feature (1)..(25): SEQ ID NO: 1658; WAN024C7R_at; Start 566; Stop 590
tgcgccaatggatgctcaaaatcac

SEQ ID NO: 107443 - DNA, 25 bp, Artificial
  probe
  misc_feature (1)..(25): SEQ ID NO: 1658; WAN024C7R_at; Start 1815; Stop 1839
gcaagcgccagccaagatgtctaaa

SEQ ID NO: 107444 - DNA, 25 bp, Artificial
  probe
  misc_feature (1)..(25): SEQ ID NO: 1658; WAN024C7R_at; Start 1578; Stop 1602
tatctacgtgggtggtgcggaacat

SEQ ID NO: 107445 - DNA, 25 bp, Artificial
  probe
  misc_feature (1)..(25): SEQ ID NO: 1658; WAN024C7R_at; Start 2018; Stop 2042
tccttgcggaaaacaatggtgctct

SEQ ID NO: 107446 - DNA, 25 bp, Artificial
  probe
  misc_feature (1)..(25): SEQ ID NO: 1658; WAN024C7R_at; Start 1710; Stop 1734
tttgggaacaagctaccgtgaccac

SEQ ID NO: 107447 - DNA, 25 bp, Artificial
  probe
  misc_feature (1)..(25): SEQ ID NO: 1658; WAN024C7R_at; Start 298; Stop 322
tttacagcggaaaacattgccaact

SEQ ID NO: 107448 - DNA, 25 bp, Artificial
  probe
  misc_feature (1)..(25): SEQ ID NO: 1658; WAN024C7R_at; Start 501; Stop 525
caatgaagaagtgcttcctgacgga

SEQ ID NO: 107449 - DNA, 25 bp, Artificial
  probe
  misc_feature (1)..(25): SEQ ID NO: 1658; WAN024C7R_at; Start 774; Stop 798
cactgtcttggctcctgaacatgaa

SEQ ID NO: 107450 - DNA, 25 bp, Artificial
  probe
  misc_feature (1)..(25): SEQ ID NO: 1658; WAN024C7R_at; Start 1948; Stop 1972
tcagaagaaggtttggaaggaagcc

SEQ ID NO: 107451 - DNA, 25 bp, Artificial
  probe
  misc_feature (1)..(25): SEQ ID NO: 6704; WAN024C7S_at; Start 80; Stop 104
ggaaacaacattgtattgaatatgg

SEQ ID NO: 107452 - DNA, 25 bp, Artificial
  probe
  misc_feature (1)..(25): SEQ ID NO: 6704; WAN024C7S_at; Start 95; Stop 119
ttgaatatggtacccatgtaaacga

SEQ ID NO: 107453 - DNA, 25 bp, Artificial
  probe
  misc_feature (1)..(25): SEQ ID NO: 6704; WAN024C7S_at; Start 68; Stop 92
caacgtctctctggaaacaacattg

SEQ ID NO: 107454 - DNA, 25 bp, Artificial
  probe
  misc_feature (1)..(25): SEQ ID NO: 6704; WAN024C7S_at; Start 64; Stop 88
caatcaacgtctctctggaaacaac

SEQ ID NO: 107455 - DNA, 25 bp, Artificial
  probe
  misc_feature (1)..(25): SEQ ID NO: 6704; WAN024C7S_at; Start 57; Stop 81
tgagcgtcaatcaacgtctctctgg

SEQ ID NO: 107456 - DNA, 25 bp, Artificial
  probe
  misc_feature (1)..(25): SEQ ID NO: 6704; WAN024C7S_at; Start 45; Stop 69
tcaggatgtttctgagcgtcaatca

SEQ ID NO: 107457 - DNA, 25 bp, Artificial
  probe
  misc_feature (1)..(25): SEQ ID NO: 6704; WAN024C7S_at; Start 65; Stop 89
aatcaacgtctctctggaaacaaca

SEQ ID NO: 107458 - DNA, 25 bp, Artificial
  probe
  misc_feature (1)..(25): SEQ ID NO: 6704; WAN024C7S_at; Start 71; Stop 95
cgtctctctggaaacaacattgtat

SEQ ID NO: 107459 - DNA, 25 bp, Artificial
  probe
  misc_feature (1)..(25): SEQ ID NO: 6704; WAN024C7S_at; Start 93; Stop 117
tattgaatatggtacccatgtaaac

SEQ ID NO: 107460 - DNA, 25 bp, Artificial
  probe
  misc_feature (1)..(25): SEQ ID NO: 6704; WAN024C7S_at; Start 91; Stop 115
tgtattgaatatggtacccatgtaa

SEQ ID NO: 107461 - DNA, 25 bp, Artificial
  probe
  misc_feature (1)..(25): SEQ ID NO: 6704; WAN024C7S_at; Start 55; Stop 79
tctgagcgtcaatcaacgtctctct

SEQ ID NO: 107462 - DNA, 25 bp, Artificial
  probe
  misc_feature (1)..(25): SEQ ID NO: 6704; WAN024C7S_at; Start 54; Stop 78
ttctgagcgtcaatcaacgtctctc

SEQ ID NO: 107463 - DNA, 25 bp, Artificial
  probe
  misc_feature (1)..(25): SEQ ID NO: 6704; WAN024C7S_at; Start 61; Stop 85
cgtcaatcaacgtctctctggaaac

SEQ ID NO: 107464 - DNA, 25 bp, Artificial
  probe
  misc_feature (1)..(25): SEQ ID NO: 6704; WAN024C7S_at; Start 62; Stop 86
gtcaatcaacgtctctctggaaaca

SEQ ID NO: 107465 - DNA, 25 bp, Artificial
  probe
  misc_feature (1)..(25): SEQ ID NO: 6704; WAN024C7S_at; Start 70; Stop 94
acgtctctctggaaacaacattgta

SEQ ID NO: 107466 - DNA, 25 bp, Artificial
  probe
  misc_feature (1)..(25): SEQ ID NO: 6704; WAN024C7S_at; Start 52; Stop 76
gtttctgagcgtcaatcaacgtctc

SEQ ID NO: 107467 - DNA, 25 bp, Artificial
  probe
  misc_feature (1)..(25): SEQ ID NO: 6704; WAN024C7S_at; Start 48; Stop 72
ggatgtttctgagcgtcaatcaacg

SEQ ID NO: 107468 - DNA, 25 bp, Artificial
  probe
  misc_feature (1)..(25): SEQ ID NO: 6704; WAN024C7S_at; Start 72; Stop 96
gtctctctggaaacaacattgtatt

SEQ ID NO: 107469 - DNA, 25 bp, Artificial
  probe
  misc_feature (1)..(25): SEQ ID NO: 6704; WAN024C7S_at; Start 60; Stop 84
gcgtcaatcaacgtctctctggaaa

SEQ ID NO: 107470 - DNA, 25 bp, Artificial
  probe
  misc_feature (1)..(25): SEQ ID NO: 6704; WAN024C7S_at; Start 86; Stop 110
aacattgtattgaatatggtaccca

SEQ ID NO: 107471 - DNA, 25 bp, Artificial
  probe
  misc_feature (1)..(25): SEQ ID NO: 6704; WAN024C7S_at; Start 69; Stop 93
aacgtctctctggaaacaacattgt

SEQ ID NO: 107472 - DNA, 25 bp, Artificial
  probe
  misc_feature (1)..(25): SEQ ID NO: 6704; WAN024C7S_at; Start 88; Stop 112
cattgtattgaatatggtacccatg

SEQ ID NO: 107473 - DNA, 25 bp, Artificial
  probe
  misc_feature (1)..(25): SEQ ID NO: 6704; WAN024C7S_at; Start 59; Stop 83
agcgtcaatcaacgtctctctggaa

SEQ ID NO: 107474 - DNA, 25 bp, Artificial
  probe
  misc_feature (1)..(25): SEQ ID NO: 6704; WAN024C7S_at; Start 51; Stop 75
tgtttctgagcgtcaatcaacgtct

SEQ ID NO: 107475 - DNA, 25 bp, Artificial
  probe
  misc_feature (1)..(25): SEQ ID NO: 6704; WAN024C7S_at; Start 46; Stop 70
caggatgtttctgagcgtcaatcaa

SEQ ID NO: 107476 - DNA, 25 bp, Artificial
  probe
  misc_feature (1)..(25): SEQ ID NO: 6704; WAN024C7S_at; Start 58; Stop 82
gagcgtcaatcaacgtctctctgga

SEQ ID NO: 107477 - DNA, 25 bp, Artificial
  probe
  misc_feature (1)..(25): SEQ ID NO: 6704; WAN024C7S_at; Start 47; Stop 71
aggatgtttctgagcgtcaatcaac

SEQ ID NO: 107478 - DNA, 25 bp, Artificial
  probe
  misc_feature (1)..(25): SEQ ID NO: 6704; WAN024C7S_at; Start 67; Stop 91
tcaacgtctctctggaaacaacatt

SEQ ID NO: 107479 - DNA, 25 bp, Artificial
  probe
  misc_feature (1)..(25): SEQ ID NO: 6704; WAN024C7S_at; Start 73; Stop 97
tctctctggaaacaacattgtattg

SEQ ID NO: 107480 - DNA, 25 bp, Artificial
  probe
  misc_feature (1)..(25): SEQ ID NO: 6704; WAN024C7S_at; Start 75; Stop 99
tctctggaaacaacattgtattgaa

SEQ ID NO: 107481 - DNA, 25 bp, Artificial
  probe
  misc_feature (1)..(25): SEQ ID NO: 6704; WAN024C7S_at; Start 50; Stop 74
atgtttctgagcgtcaatcaacgtc

SEQ ID NO: 107482 - DNA, 25 bp, Artificial
  probe
  misc_feature (1)..(25): SEQ ID NO: 6704; WAN024C7S_at; Start 53; Stop 77
tttctgagcgtcaatcaacgtctct

SEQ ID NO: 107483 - DNA, 25 bp, Artificial
  probe
  misc_feature (1)..(25): SEQ ID NO: 6704; WAN024C7S_at; Start 85; Stop 109
caacattgtattgaatatggtaccc

SEQ ID NO: 107484 - DNA, 25 bp, Artificial
  probe
  misc_feature (1)..(25): SEQ ID NO: 6704; WAN024C7S_at; Start 63; Stop 87
tcaatcaacgtctctctggaaacaa

SEQ ID NO: 107485 - DNA, 25 bp, Artificial
  probe
  misc_feature (1)..(25): SEQ ID NO: 4176; WAN024C7T_at; Start 129; Stop 153
tcctataatgtcatcttgggttgcc

SEQ ID NO: 107486 - DNA, 25 bp, Artificial
  probe
  misc_feature (1)..(25): SEQ ID NO: 4176; WAN024C7T_at; Start 4; Stop 28
ggatttgaagttaccccagctagcg

SEQ ID NO: 107487 - DNA, 25 bp, Artificial
  probe
  misc_feature (1)..(25): SEQ ID NO: 4176; WAN024C7T_at; Start 161; Stop 185
gaacattgaagaatgcagagtatcc

SEQ ID NO: 107488 - DNA, 25 bp, Artificial
  probe
  misc_feature (1)..(25): SEQ ID NO: 4176; WAN024C7T_at; Start 98; Stop 122
cctctttattttacaaagtatgctc

SEQ ID NO: 107489 - DNA, 25 bp, Artificial
  probe
  misc_feature (1)..(25): SEQ ID NO: 4176; WAN024C7T_at; Start 139; Stop 163
tcatcttgggttgccttagaaagaa

SEQ ID NO: 107490 - DNA, 25 bp, Artificial
  probe
  misc_feature (1)..(25): SEQ ID NO: 4176; WAN024C7T_at; Start 116; Stop 140
tatgctcagtacgtcctataatgtc

SEQ ID NO: 107491 - DNA, 25 bp, Artificial
  probe
  misc_feature (1)..(25): SEQ ID NO: 4176; WAN024C7T_at; Start 54; Stop 78
ctcatctaaatttaatgtgtcaagc

SEQ ID NO: 107492 - DNA, 25 bp, Artificial
  probe
  misc_feature (1)..(25): SEQ ID NO: 4176; WAN024C7T_at; Start 147; Stop 171
ggttgccttagaaagaacattgaag

SEQ ID NO: 107493 - DNA, 25 bp, Artificial
  probe
  misc_feature (1)..(25): SEQ ID NO: 4176; WAN024C7T_at; Start 18; Stop 42
cccagctagcggcaaaatttcagac

SEQ ID NO: 107494 - DNA, 25 bp, Artificial
  probe
  misc_feature (1)..(25): SEQ ID NO: 4176; WAN024C7T_at; Start 119; Stop 143
gctcagtacgtcctataatgtcatc

SEQ ID NO: 107495 - DNA, 25 bp, Artificial
  probe
  misc_feature (1)..(25): SEQ ID NO: 4176; WAN024C7T_at; Start 142; Stop 166
tcttgggttgccttagaaagaacat

SEQ ID NO: 107496 - DNA, 25 bp, Artificial
  probe
  misc_feature (1)..(25): SEQ ID NO: 4176; WAN024C7T_at; Start 134; Stop 158
taatgtcatcttgggttgccttaga

SEQ ID NO: 107497 - DNA, 25 bp, Artificial
  probe
  misc_feature (1)..(25): SEQ ID NO: 4176; WAN024C7T_at; Start 104; Stop 128
tattttacaaagtatgctcagtacg

SEQ ID NO: 107498 - DNA, 25 bp, Artificial
  probe
  misc_feature (1)..(25): SEQ ID NO: 4176; WAN024C7T_at; Start 20; Stop 44
cagctagcggcaaaatttcagacca

SEQ ID NO: 107499 - DNA, 25 bp, Artificial
  probe
  misc_feature (1)..(25): SEQ ID NO: 4176; WAN024C7T_at; Start 122; Stop 146
cagtacgtcctataatgtcatcttg

SEQ ID NO: 107500 - DNA, 25 bp, Artificial
  probe
  misc_feature (1)..(25): SEQ ID NO: 4176; WAN024C7T_at; Start 109; Stop 133
tacaaagtatgctcagtacgtccta

SEQ ID NO: 107501 - DNA, 25 bp, Artificial
  probe
  misc_feature (1)..(25): SEQ ID NO: 4176; WAN024C7T_at; Start 107; Stop 131
tttacaaagtatgctcagtacgtcc

SEQ ID NO: 107502 - DNA, 25 bp, Artificial
  probe
  misc_feature (1)..(25): SEQ ID NO: 4176; WAN024C7T_at; Start 65; Stop 89
ttaatgtgtcaagcataaattccat

SEQ ID NO: 107503 - DNA, 25 bp, Artificial
  probe
  misc_feature (1)..(25): SEQ ID NO: 4176; WAN024C7T_at; Start 11; Stop 35
aagttaccccagctagcggcaaaat

SEQ ID NO: 107504 - DNA, 25 bp, Artificial
  probe
  misc_feature (1)..(25): SEQ ID NO: 4176; WAN024C7T_at; Start 137; Stop 161
tgtcatcttgggttgccttagaaag

SEQ ID NO: 107505 - DNA, 25 bp, Artificial
  probe
  misc_feature (1)..(25): SEQ ID NO: 4176; WAN024C7T_at; Start 124; Stop 148
gtacgtcctataatgtcatcttggg

SEQ ID NO: 107506 - DNA, 25 bp, Artificial
  probe
  misc_feature (1)..(25): SEQ ID NO: 4176; WAN024C7T_at; Start 22; Stop 46
gctagcggcaaaatttcagaccact

SEQ ID NO: 107507 - DNA, 25 bp, Artificial
  probe
  misc_feature (1)..(25): SEQ ID NO: 4176; WAN024C7T_at; Start 145; Stop 169
tgggttgccttagaaagaacattga

SEQ ID NO: 107508 - DNA, 25 bp, Artificial
  probe
  misc_feature (1)..(25): SEQ ID NO: 4176; WAN024C7T_at; Start 163; Stop 187
acattgaagaatgcagagtatcctg

SEQ ID NO: 107509 - DNA, 25 bp, Artificial
  probe
  misc_feature (1)..(25): SEQ ID NO: 4176; WAN024C7T_at; Start 152; Stop 176
ccttagaaagaacattgaagaatgc

SEQ ID NO: 107510 - DNA, 25 bp, Artificial
  probe
  misc_feature (1)..(25): SEQ ID NO: 4176; WAN024C7T_at; Start 38; Stop 62
cagaccactttttaatctcatctaa

SEQ ID NO: 107511 - DNA, 25 bp, Artificial
  probe
  misc_feature (1)..(25): SEQ ID NO: 4176; WAN024C7T_at; Start 157; Stop 181
gaaagaacattgaagaatgcagagt

SEQ ID NO: 107512 - DNA, 25 bp, Artificial
  probe
  misc_feature (1)..(25): SEQ ID NO: 4176; WAN024C7T_at; Start 24; Stop 48
tagcggcaaaatttcagaccacttt

SEQ ID NO: 107513 - DNA, 25 bp, Artificial
  probe
  misc_feature (1)..(25): SEQ ID NO: 4176; WAN024C7T_at; Start 14; Stop 38
ttaccccagctagcggcaaaatttc

SEQ ID NO: 107514 - DNA, 25 bp, Artificial
  probe
  misc_feature (1)..(25): SEQ ID NO: 4176; WAN024C7T_at; Start 8; Stop 32
ttgaagttaccccagctagcggcaa

SEQ ID NO: 107515 - DNA, 25 bp, Artificial
  probe
  misc_feature (1)..(25): SEQ ID NO: 4176; WAN024C7T_at; Start 78; Stop 102
cataaattccataaaaagaacctct

SEQ ID NO: 107516 - DNA, 25 bp, Artificial
  probe
  misc_feature (1)..(25): SEQ ID NO: 4176; WAN024C7T_at; Start 71; Stop 95
tgtcaagcataaattccataaaaag

SEQ ID NO: 107517 - DNA, 25 bp, Artificial
  probe
  misc_feature (1)..(25): SEQ ID NO: 4176; WAN024C7T_at; Start 111; Stop 135
caaagtatgctcagtacgtcctata

SEQ ID NO: 107518 - DNA, 25 bp, Artificial
  probe
  misc_feature (1)..(25): SEQ ID NO: 4176; WAN024C7T_at; Start 5; Stop 29
gatttgaagttaccccagctagcgg

SEQ ID NO: 107519 - DNA, 25 bp, Artificial
  probe
  misc_feature (1)..(25): SEQ ID NO: 2240; WAN024C7U_at; Start 511; Stop 535
aatgtagcacaagtaaataatgctt

SEQ ID NO: 107520 - DNA, 25 bp, Artificial
  probe
  misc_feature (1)..(25): SEQ ID NO: 2240; WAN024C7U_at; Start 305; Stop 329
aaaaagagggctaccatatcactgc

SEQ ID NO: 107521 - DNA, 25 bp, Artificial
  probe
  misc_feature (1)..(25): SEQ ID NO: 2240; WAN024C7U_at; Start 387; Stop 411
cctagctccatattataatagaatg

SEQ ID NO: 107522 - DNA, 25 bp, Artificial
  probe
  misc_feature (1)..(25): SEQ ID NO: 2240; WAN024C7U_at; Start 132; Stop 156
caaagatgtaagagaattgattggc

SEQ ID NO: 107523 - DNA, 25 bp, Artificial
  probe
  misc_feature (1)..(25): SEQ ID NO: 2240; WAN024C7U_at; Start 540; Stop 564
tgcaggtgcgcatgctgttacagca

SEQ ID NO: 107524 - DNA, 25 bp, Artificial
  probe
  misc_feature (1)..(25): SEQ ID NO: 2240; WAN024C7U_at; Start 427; Stop 451
gattcaaattctgtcattcgtcaat

SEQ ID NO: 107525 - DNA, 25 bp, Artificial
  probe
  misc_feature (1)..(25): SEQ ID NO: 2240; WAN024C7U_at; Start 196; Stop 220
tttgaaggcatcttaaaggatgctc

SEQ ID NO: 107526 - DNA, 25 bp, Artificial
  probe
  misc_feature (1)..(25): SEQ ID NO: 2240; WAN024C7U_at; Start 526; Stop 550
aataatgctttagctgcaggtgcgc

SEQ ID NO: 107527 - DNA, 25 bp, Artificial
  probe
  misc_feature (1)..(25): SEQ ID NO: 2240; WAN024C7U_at; Start 571; Stop 595
gatgtttttgaatcagctttcgcca

SEQ ID NO: 107528 - DNA, 25 bp, Artificial
  probe
  misc_feature (1)..(25): SEQ ID NO: 2240; WAN024C7U_at; Start 377; Stop 401
gagcggattacctagctccatatta

SEQ ID NO: 107529 - DNA, 25 bp, Artificial
  probe
  misc_feature (1)..(25): SEQ ID NO: 2240; WAN024C7U_at; Start 407; Stop 431
gaatggaaaatctgaacattgattc

SEQ ID NO: 107530 - DNA, 25 bp, Artificial
  probe
  misc_feature (1)..(25): SEQ ID NO: 2240; WAN024C7U_at; Start 178; Stop 202
caggtgatttctcaagattttgaag

SEQ ID NO: 107531 - DNA, 25 bp, Artificial
  probe
  misc_feature (1)..(25): SEQ ID NO: 2240; WAN024C7U_at; Start 42; Stop 66
aaagtggtctgaaattttgccgcta

SEQ ID NO: 107532 - DNA, 25 bp, Artificial
  probe
  misc_feature (1)..(25): SEQ ID NO: 2240; WAN024C7U_at; Start 12; Stop 36
gcttgacacattaaatttagatgag

SEQ ID NO: 107533 - DNA, 25 bp, Artificial
  probe
  misc_feature (1)..(25): SEQ ID NO: 2240; WAN024C7U_at; Start 119; Stop 143
tttttgaacgaatcaaagatgtaag

SEQ ID NO: 107534 - DNA, 25 bp, Artificial
  probe
  misc_feature (1)..(25): SEQ ID NO: 2240; WAN024C7U_at; Start 72; Stop 96
ggtaacttcaaatcccactattgca

SEQ ID NO: 107535 - DNA, 25 bp, Artificial
  probe
  misc_feature (1)..(25): SEQ ID NO: 2240; WAN024C7U_at; Start 466; Stop 490
gatagacagaactctcctagtaaga

SEQ ID NO: 107536 - DNA, 25 bp, Artificial
  probe
  misc_feature (1)..(25): SEQ ID NO: 2240; WAN024C7U_at; Start 235; Stop 259
caagcaggagatgatatatttatca

SEQ ID NO: 107537 - DNA, 25 bp, Artificial
  probe
  misc_feature (1)..(25): SEQ ID NO: 2240; WAN024C7U_at; Start 48; Stop 72
gtctgaaattttgccgctagctggg

SEQ ID NO: 107538 - DNA, 25 bp, Artificial
  probe
  misc_feature (1)..(25): SEQ ID NO: 2240; WAN024C7U_at; Start 612; Stop 636
ggcggttgatgatttttctgacgat

SEQ ID NO: 107539 - DNA, 25 bp, Artificial
  probe
  misc_feature (1)..(25): SEQ ID NO: 2240; WAN024C7U_at; Start 579; Stop 603
tgaatcagctttcgccatgccatct

SEQ ID NO: 107540 - DNA, 25 bp, Artificial
  probe
  misc_feature (1)..(25): SEQ ID NO: 2240; WAN024C7U_at; Start 334; Stop 358
gctatttatacagttattcagggat

SEQ ID NO: 107541 - DNA, 25 bp, Artificial
  probe
  misc_feature (1)..(25): SEQ ID NO: 2240; WAN024C7U_at; Start 589; Stop 613
ttcgccatgccatctatccaaaagg

SEQ ID NO: 107542 - DNA, 25 bp, Artificial
  probe
  misc_feature (1)..(25): SEQ ID NO: 2240; WAN024C7U_at; Start 273; Stop 297
tccagctggattacgtgcaataaag

SEQ ID NO: 107543 - DNA, 25 bp, Artificial
  probe
  misc_feature (1)..(25): SEQ ID NO: 2240; WAN024C7U_at; Start 159; Stop 183
tacaccctctattcatgttcaggtg

SEQ ID NO: 107544 - DNA, 25 bp, Artificial
  probe
  misc_feature (1)..(25): SEQ ID NO: 2240; WAN024C7U_at; Start 597; Stop 621
gccatctatccaaaaggcggttgat

SEQ ID NO: 107545 - DNA, 25 bp, Artificial
  probe
  misc_feature (1)..(25): SEQ ID NO: 2240; WAN024C7U_at; Start 310; Stop 334
gagggctaccatatcactgcaacag

SEQ ID NO: 107546 - DNA, 25 bp, Artificial
  probe
  misc_feature (1)..(25): SEQ ID NO: 2240; WAN024C7U_at; Start 224; Stop 248
aaattcgaagacaagcaggagatga

SEQ ID NO: 107547 - DNA, 25 bp, Artificial
  probe
  misc_feature (1)..(25): SEQ ID NO: 2240; WAN024C7U_at; Start 28; Stop 52
ttagatgagattaaaaagtggtctg

SEQ ID NO: 107548 - DNA, 25 bp, Artificial
  probe
  misc_feature (1)..(25): SEQ ID NO: 2240; WAN024C7U_at; Start 348; Stop 372
tattcagggattattagctatcgaa

SEQ ID NO: 107549 - DNA, 25 bp, Artificial
  probe
  misc_feature (1)..(25): SEQ ID NO: 2240; WAN024C7U_at; Start 258; Stop 282
caaagtacctgttactccagctgga

SEQ ID NO: 107550 - DNA, 25 bp, Artificial
  probe
  misc_feature (1)..(25): SEQ ID NO: 2240; WAN024C7U_at; Start 496; Stop 520
gctgcatcctttaaaaatgtagcac

SEQ ID NO: 107551 - DNA, 25 bp, Artificial
  probe
  misc_feature (1)..(25): SEQ ID NO: 2240; WAN024C7U_at; Start 87; Stop 111
cactattgcaaaaagagagggttct

SEQ ID NO: 107552 - DNA, 25 bp, Artificial
  probe
  misc_feature (1)..(25): SEQ ID NO: 2240; WAN024C7U_at; Start 145; Stop 169
gaattgattggctctacaccctcta

SEQ ID NO: 107553 - DNA, 25 bp, Artificial
  probe
  misc_feature (1)..(25): SEQ ID NO: 4099; WAN024C7V_at; Start 786; Stop 810
tagagtcccatatgaaccggcaact

SEQ ID NO: 107554 - DNA, 25 bp, Artificial
  probe
  misc_feature (1)..(25): SEQ ID NO: 4099; WAN024C7V_at; Start 1086; Stop 1110
gactcgagataagaaggatgctgtt

SEQ ID NO: 107555 - DNA, 25 bp, Artificial
  probe
  misc_feature (1)..(25): SEQ ID NO: 4099; WAN024C7V_at; Start 2315; Stop 2339
tgattgacgctcagaaacatcctga

SEQ ID NO: 107556 - DNA, 25 bp, Artificial
  probe
  misc_feature (1)..(25): SEQ ID NO: 4099; WAN024C7V_at; Start 771; Stop 795
tgcagatatttgctctagagtccca

SEQ ID NO: 107557 - DNA, 25 bp, Artificial
  probe
  misc_feature (1)..(25): SEQ ID NO: 4099; WAN024C7V_at; Start 1233; Stop 1257
gaaacttggttttggtatgcctgca

SEQ ID NO: 107558 - DNA, 25 bp, Artificial
  probe
  misc_feature (1)..(25): SEQ ID NO: 4099; WAN024C7V_at; Start 1636; Stop 1660
gattgtattggtcgtggaaaacacc

SEQ ID NO: 107559 - DNA, 25 bp, Artificial
  probe
  misc_feature (1)..(25): SEQ ID NO: 4099; WAN024C7V_at; Start 1170; Stop 1194
tctaactgtacgttaccatgcaggt

SEQ ID NO: 107560 - DNA, 25 bp, Artificial
  probe
  misc_feature (1)..(25): SEQ ID NO: 4099; WAN024C7V_at; Start 127; Stop 151
gagagagcagttctagcaacacgcg

SEQ ID NO: 107561 - DNA, 25 bp, Artificial
  probe
  misc_feature (1)..(25): SEQ ID NO: 4099; WAN024C7V_at; Start 1659; Stop 1683
ccttaaagaaggtggagcagtatat

SEQ ID NO: 107562 - DNA, 25 bp, Artificial
  probe
  misc_feature (1)..(25): SEQ ID NO: 4099; WAN024C7V_at; Start 110; Stop 134
aaccttatattgatgctgagagagc

SEQ ID NO: 107563 - DNA, 25 bp, Artificial
  probe
  misc_feature (1)..(25): SEQ ID NO: 4099; WAN024C7V_at; Start 2023; Stop 2047
cagggacgtggaacattagcaactc

SEQ ID NO: 107564 - DNA, 25 bp, Artificial
  probe
  misc_feature (1)..(25): SEQ ID NO: 4099; WAN024C7V_at; Start 252; Stop 276
gattgcgggaaatcaagcttcttcc

SEQ ID NO: 107565 - DNA, 25 bp, Artificial
  probe
  misc_feature (1)..(25): SEQ ID NO: 4099; WAN024C7V_at; Start 2039; Stop 2063
tagcaactccagatggacgcaacgc

SEQ ID NO: 107566 - DNA, 25 bp, Artificial
  probe
  misc_feature (1)..(25): SEQ ID NO: 4099; WAN024C7V_at; Start 1888; Stop 1912
gctgacaaattggttactgctgctt

SEQ ID NO: 107567 - DNA, 25 bp, Artificial
  probe
  misc_feature (1)..(25): SEQ ID NO: 4099; WAN024C7V_at; Start 2413; Stop 2437
gatgacattataggacgtactgagc

SEQ ID NO: 107568 - DNA, 25 bp, Artificial
  probe
  misc_feature (1)..(25): SEQ ID NO: 4099; WAN024C7V_at; Start 440; Stop 464
gagctggtgccttattacctgaaga

SEQ ID NO: 107569 - DNA, 25 bp, Artificial
  probe
  misc_feature (1)..(25): SEQ ID NO: 4099; WAN024C7V_at; Start 1754; Stop 1778
tgtttgaggaagaacgtataagccc

SEQ ID NO: 107570 - DNA, 25 bp, Artificial
  probe
  misc_feature (1)..(25): SEQ ID NO: 4099; WAN024C7V_at; Start 1847; Stop 1871
tgattcatgatgcacctaagtatgg

SEQ ID NO: 107571 - DNA, 25 bp, Artificial
  probe
  misc_feature (1)..(25): SEQ ID NO: 4099; WAN024C7V_at; Start 1346; Stop 1370
ttgaaacggcagttccagggaaatg

SEQ ID NO: 107572 - DNA, 25 bp, Artificial
  probe
  misc_feature (1)..(25): SEQ ID NO: 4099; WAN024C7V_at; Start 426; Stop 450
taatttacgtgctagagctggtgcc

SEQ ID NO: 107573 - DNA, 25 bp, Artificial
  probe
  misc_feature (1)..(25): SEQ ID NO: 4099; WAN024C7V_at; Start 142; Stop 166
gcaacacgcgcctatgaacgataca

SEQ ID NO: 107574 - DNA, 25 bp, Artificial
  probe
  misc_feature (1)..(25): SEQ ID NO: 4099; WAN024C7V_at; Start 1373; Stop 1397
gctatcgttgcacaggtatgagtta

SEQ ID NO: 107575 - DNA, 25 bp, Artificial
  probe
  misc_feature (1)..(25): SEQ ID NO: 4099; WAN024C7V_at; Start 507; Stop 531
taagatgaattctggagatgctcac

SEQ ID NO: 107576 - DNA, 25 bp, Artificial
  probe
  misc_feature (1)..(25): SEQ ID NO: 4099; WAN024C7V_at; Start 1071; Stop 1095
tacaattggtggacagactcgagat

SEQ ID NO: 107577 - DNA, 25 bp, Artificial
  probe
  misc_feature (1)..(25): SEQ ID NO: 4099; WAN024C7V_at; Start 2289; Stop 2313
atacaatgttgtttccagagagacg

SEQ ID NO: 107578 - DNA, 25 bp, Artificial
  probe
  misc_feature (1)..(25): SEQ ID NO: 4099; WAN024C7V_at; Start 1434; Stop 1458
tgatggaattgatccggcttcgggt

SEQ ID NO: 107579 - DNA, 25 bp, Artificial
  probe
  misc_feature (1)..(25): SEQ ID NO: 4099; WAN024C7V_at; Start 859; Stop 883
caaattgaatctaatggccactctc

SEQ ID NO: 107580 - DNA, 25 bp, Artificial
  probe
  misc_feature (1)..(25): SEQ ID NO: 4099; WAN024C7V_at; Start 180; Stop 204
tgtcctaaaacgtgcatatatgctg

SEQ ID NO: 107581 - DNA, 25 bp, Artificial
  probe
  misc_feature (1)..(25): SEQ ID NO: 4099; WAN024C7V_at; Start 2200; Stop 2224
cctcaaacgttagccaaagaagaag

SEQ ID NO: 107582 - DNA, 25 bp, Artificial
  probe
  misc_feature (1)..(25): SEQ ID NO: 4099; WAN024C7V_at; Start 1810; Stop 1834
tatgccggagaagaaggtaaggtca

SEQ ID NO: 107583 - DNA, 25 bp, Artificial
  probe
  misc_feature (1)..(25): SEQ ID NO: 4099; WAN024C7V_at; Start 2080; Stop 2104
gagggttgttcaccatcacataata

SEQ ID NO: 107584 - DNA, 25 bp, Artificial
  probe
  misc_feature (1)..(25): SEQ ID NO: 4099; WAN024C7V_at; Start 1011; Stop 1035
taaggttcgcagtcaatcacataca

SEQ ID NO: 107585 - DNA, 25 bp, Artificial
  probe
  misc_feature (1)..(25): SEQ ID NO: 4099; WAN024C7V_at; Start 588; Stop 612
ggctcgtaaagcaaaagtagctcta

SEQ ID NO: 107586 - DNA, 25 bp, Artificial
  probe
  misc_feature (1)..(25): SEQ ID NO: 4099; WAN024C7V_at; Start 2354; Stop 2378
taattgttcgtgttgcaggatactc

SEQ ID NO: 107587 - DNA, 25 bp, Artificial
  probe
  misc_feature (1)..(25): SEQ ID NO: 3022; WAN024C7W_at; Start 815; Stop 839
taaatacaagtaagaagcaagcatt

SEQ ID NO: 107588 - DNA, 25 bp, Artificial
  probe
  misc_feature (1)..(25): SEQ ID NO: 3022; WAN024C7W_at; Start 916; Stop 940
gctaataaaaaagctctagagcaag

SEQ ID NO: 107589 - DNA, 25 bp, Artificial
  probe
  misc_feature (1)..(25): SEQ ID NO: 3022; WAN024C7W_at; Start 52; Stop 76
gctgcttgctcaaacaatgcttcaa

SEQ ID NO: 107590 - DNA, 25 bp, Artificial
  probe
  misc_feature (1)..(25): SEQ ID NO: 3022; WAN024C7W_at; Start 787; Stop 811
ccttatgtaactgaacaagttggga

SEQ ID NO: 107591 - DNA, 25 bp, Artificial
  probe
  misc_feature (1)..(25): SEQ ID NO: 3022; WAN024C7W_at; Start 70; Stop 94
gcttcaaatacaaatcagtctactg

SEQ ID NO: 107592 - DNA, 25 bp, Artificial
  probe
  misc_feature (1)..(25): SEQ ID NO: 3022; WAN024C7W_at; Start 631; Stop 655
aatgcacacgtttatgcagaaggtg

SEQ ID NO: 107593 - DNA, 25 bp, Artificial
  probe
  misc_feature (1)..(25): SEQ ID NO: 3022; WAN024C7W_at; Start 233; Stop 257
tagctgaccgtttgattgcagaaaa

SEQ ID NO: 107594 - DNA, 25 bp, Artificial
  probe
  misc_feature (1)..(25): SEQ ID NO: 3022; WAN024C7W_at; Start 346; Stop 370
ccaaaatgggctgatgaagtagata

SEQ ID NO: 107595 - DNA, 25 bp, Artificial
  probe
  misc_feature (1)..(25): SEQ ID NO: 3022; WAN024C7W_at; Start 1018; Stop 1042
gattcttggattgaaaaagcacagc

SEQ ID NO: 107596 - DNA, 25 bp, Artificial
  probe
  misc_feature (1)..(25): SEQ ID NO: 3022; WAN024C7W_at; Start 369; Stop 393
tagctctttgggagattctgaaggg

SEQ ID NO: 107597 - DNA, 25 bp, Artificial
  probe
  misc_feature (1)..(25): SEQ ID NO: 3022; WAN024C7W_at; Start 590; Stop 614
tatctgatgaaggttggaaagttgc

SEQ ID NO: 107598 - DNA, 25 bp, Artificial
  probe
  misc_feature (1)..(25): SEQ ID NO: 3022; WAN024C7W_at; Start 152; Stop 176
atggacgtgcagattggttacaaac

SEQ ID NO: 107599 - DNA, 25 bp, Artificial
  probe
  misc_feature (1)..(25): SEQ ID NO: 3022; WAN024C7W_at; Start 452; Stop 476
tgccatccgactggacagattttac

SEQ ID NO: 107600 - DNA, 25 bp, Artificial
  probe
  misc_feature (1)..(25): SEQ ID NO: 3022; WAN024C7W_at; Start 249; Stop 273
tgcagaaaagaataatgctgtggct

SEQ ID NO: 107601 - DNA, 25 bp, Artificial
  probe
  misc_feature (1)..(25): SEQ ID NO: 3022; WAN024C7W_at; Start 333; Stop 357
tgtaaaatactcaccaaaatgggct

SEQ ID NO: 107602 - DNA, 25 bp, Artificial
  probe
  misc_feature (1)..(25): SEQ ID NO: 3022; WAN024C7W_at; Start 438; Stop 462
taaagatgctaaaatgccatccgac

SEQ ID NO: 107603 - DNA, 25 bp, Artificial
  probe
  misc_feature (1)..(25): SEQ ID NO: 3022; WAN024C7W_at; Start 516; Stop 540
aagtacaggtacatctaagaacatc

SEQ ID NO: 107604 - DNA, 25 bp, Artificial
  probe
  misc_feature (1)..(25): SEQ ID NO: 3022; WAN024C7W_at; Start 616; Stop 640
aaagcttaccttaaaaatgcacacg

SEQ ID NO: 107605 - DNA, 25 bp, Artificial
  probe
  misc_feature (1)..(25): SEQ ID NO: 3022; WAN024C7W_at; Start 264; Stop 288
tgctgtggctgatatggtaattgga

SEQ ID NO: 107606 - DNA, 25 bp, Artificial
  probe
  misc_feature (1)..(25): SEQ ID NO: 3022; WAN024C7W_at; Start 218; Stop 242
tttcaggtggagaactagctgaccg

SEQ ID NO: 107607 - DNA, 25 bp, Artificial
  probe
  misc_feature (1)..(25): SEQ ID NO: 3022; WAN024C7W_at; Start 38; Stop 62
cactaattttacttgctgcttgctc

SEQ ID NO: 107608 - DNA, 25 bp, Artificial
  probe
  misc_feature (1)..(25): SEQ ID NO: 3022; WAN024C7W_at; Start 757; Stop 781
ttccaagtaatgtcaccaaaagttg

SEQ ID NO: 107609 - DNA, 25 bp, Artificial
  probe
  misc_feature (1)..(25): SEQ ID NO: 3022; WAN024C7W_at; Start 930; Stop 954
tctagagcaagcaaaagatgaactc

SEQ ID NO: 107610 - DNA, 25 bp, Artificial
  probe
  misc_feature (1)..(25): SEQ ID NO: 3022; WAN024C7W_at; Start 537; Stop 561
catctttgcaagtattgtttcgaga

SEQ ID NO: 107611 - DNA, 25 bp, Artificial
  probe
  misc_feature (1)..(25): SEQ ID NO: 3022; WAN024C7W_at; Start 310; Stop 334
cgtattaaagctgaaaaacttcttg

SEQ ID NO: 107612 - DNA, 25 bp, Artificial
  probe
  misc_feature (1)..(25): SEQ ID NO: 3022; WAN024C7W_at; Start 714; Stop 738
gggatctggtgttctacaaaatcaa

SEQ ID NO: 107613 - DNA, 25 bp, Artificial
  probe
  misc_feature (1)..(25): SEQ ID NO: 3022; WAN024C7W_at; Start 645; Stop 669
tgcagaaggtgaagactatatctct

SEQ ID NO: 107614 - DNA, 25 bp, Artificial
  probe
  misc_feature (1)..(25): SEQ ID NO: 3022; WAN024C7W_at; Start 85; Stop 109
cagtctactgatgaaggaagtgttg

SEQ ID NO: 107615 - DNA, 25 bp, Artificial
  probe
  misc_feature (1)..(25): SEQ ID NO: 3022; WAN024C7W_at; Start 137; Stop 161
caaattcggcttctaatggacgtgc

SEQ ID NO: 107616 - DNA, 25 bp, Artificial
  probe
  misc_feature (1)..(25): SEQ ID NO: 3022; WAN024C7W_at; Start 853; Stop 877
gtagattggtttggctcttcagaac

SEQ ID NO: 107617 - DNA, 25 bp, Artificial
  probe
  misc_feature (1)..(25): SEQ ID NO: 3022; WAN024C7W_at; Start 895; Stop 919
gataaatttggttcaattccagcta

SEQ ID NO: 107618 - DNA, 25 bp, Artificial
  probe
  misc_feature (1)..(25): SEQ ID NO: 3022; WAN024C7W_at; Start 1033; Stop 1057
aaagcacagcttgaatttgttgaac

SEQ ID NO: 107619 - DNA, 25 bp, Artificial
  probe
  misc_feature (1)..(25): SEQ ID NO: 3022; WAN024C7W_at; Start 969; Stop 993
tagtgttaaaccacaagaacttgac

SEQ ID NO: 107620 - DNA, 25 bp, Artificial
  probe
  misc_feature (1)..(25): SEQ ID NO: 3022; WAN024C7W_at; Start 182; Stop 206
catcagagcaaggatacaatcttcg

SEQ ID NO: 107621 - DNA, 25 bp, Artificial
  probe
  misc_feature (1)..(25): SEQ ID NO: 4994; WAN024C7X_at; Start 60; Stop 84
tacaaacggaggaaatatattacaa

SEQ ID NO: 107622 - DNA, 25 bp, Artificial
  probe
  misc_feature (1)..(25): SEQ ID NO: 4994; WAN024C7X_at; Start 665; Stop 689
taagtgattcaattattctttcggc

SEQ ID NO: 107623 - DNA, 25 bp, Artificial
  probe
  misc_feature (1)..(25): SEQ ID NO: 4994; WAN024C7X_at; Start 160; Stop 184
gatggagaattttttgcatttcacg

SEQ ID NO: 107624 - DNA, 25 bp, Artificial
  probe
  misc_feature (1)..(25): SEQ ID NO: 4994; WAN024C7X_at; Start 370; Stop 394
tactgggataccttcctagataagt

SEQ ID NO: 107625 - DNA, 25 bp, Artificial
  probe
  misc_feature (1)..(25): SEQ ID NO: 4994; WAN024C7X_at; Start 521; Stop 545
tagattttgttctctcatttgaagg

SEQ ID NO: 107626 - DNA, 25 bp, Artificial
  probe
  misc_feature (1)..(25): SEQ ID NO: 4994; WAN024C7X_at; Start 834; Stop 858
gggagaactatcatgttcaaaaact

SEQ ID NO: 107627 - DNA, 25 bp, Artificial
  probe
  misc_feature (1)..(25): SEQ ID NO: 4994; WAN024C7X_at; Start 556; Stop 580
gtagctgtcgaacttgtattccaag

SEQ ID NO: 107628 - DNA, 25 bp, Artificial
  probe
  misc_feature (1)..(25): SEQ ID NO: 4994; WAN024C7X_at; Start 413; Stop 437
tgaatcaagttcttttaaaatcacc

SEQ ID NO: 107629 - DNA, 25 bp, Artificial
  probe
  misc_feature (1)..(25): SEQ ID NO: 4994; WAN024C7X_at; Start 240; Stop 264
tgaagagatccaaagaaaggaatgt

SEQ ID NO: 107630 - DNA, 25 bp, Artificial
  probe
  misc_feature (1)..(25): SEQ ID NO: 4994; WAN024C7X_at; Start 142; Stop 166
gatgtaattcgttcaaaagatggag

SEQ ID NO: 107631 - DNA, 25 bp, Artificial
  probe
  misc_feature (1)..(25): SEQ ID NO: 4994; WAN024C7X_at; Start 773; Stop 797
cagattggccattattactttatca

SEQ ID NO: 107632 - DNA, 25 bp, Artificial
  probe
  misc_feature (1)..(25): SEQ ID NO: 4994; WAN024C7X_at; Start 109; Stop 133
tccatacgccataacgcagatatgt

SEQ ID NO: 107633 - DNA, 25 bp, Artificial
  probe
  misc_feature (1)..(25): SEQ ID NO: 4994; WAN024C7X_at; Start 35; Stop 59
gtatactaattgcagcacaccgtgg

SEQ ID NO: 107634 - DNA, 25 bp, Artificial
  probe
  misc_feature (1)..(25): SEQ ID NO: 4994; WAN024C7X_at; Start 46; Stop 70
gcagcacaccgtggtacaaacggag

SEQ ID NO: 107635 - DNA, 25 bp, Artificial
  probe
  misc_feature (1)..(25): SEQ ID NO: 4994; WAN024C7X_at; Start 279; Stop 303
tgaacccatattacaaaagattgaa

SEQ ID NO: 107636 - DNA, 25 bp, Artificial
  probe
  misc_feature (1)..(25): SEQ ID NO: 4994; WAN024C7X_at; Start 2; Stop 26
tgaatccattaaaagaatgctatga

SEQ ID NO: 107637 - DNA, 25 bp, Artificial
  probe
  misc_feature (1)..(25): SEQ ID NO: 4994; WAN024C7X_at; Start 94; Stop 118
aaagcctatttgaattccatacgcc

SEQ ID NO: 107638 - DNA, 25 bp, Artificial
  probe
  misc_feature (1)..(25): SEQ ID NO: 4994; WAN024C7X_at; Start 77; Stop 101
tattacaaaacacatcaaaagccta

SEQ ID NO: 107639 - DNA, 25 bp, Artificial
  probe
  misc_feature (1)..(25): SEQ ID NO: 4994; WAN024C7X_at; Start 685; Stop 709
tcggctaagattgatgatgatacag

SEQ ID NO: 107640 - DNA, 25 bp, Artificial
  probe
  misc_feature (1)..(25): SEQ ID NO: 4994; WAN024C7X_at; Start 760; Stop 784
gatattattcaaacagattggccat

SEQ ID NO: 107641 - DNA, 25 bp, Artificial
  probe
  misc_feature (1)..(25): SEQ ID NO: 4994; WAN024C7X_at; Start 189; Stop 213
gcaagaacctttagtatttggtgaa

SEQ ID NO: 107642 - DNA, 25 bp, Artificial
  probe
  misc_feature (1)..(25): SEQ ID NO: 4994; WAN024C7X_at; Start 123; Stop 147
cgcagatatgtttgaggttgatgta

SEQ ID NO: 107643 - DNA, 25 bp, Artificial
  probe
  misc_feature (1)..(25): SEQ ID NO: 4994; WAN024C7X_at; Start 397; Stop 421
aaaacatatccatctttgaatcaag

SEQ ID NO: 107644 - DNA, 25 bp, Artificial
  probe
  misc_feature (1)..(25): SEQ ID NO: 4994; WAN024C7X_at; Start 711; Stop 735
tattgctcatgatggcgaatcttgg

SEQ ID NO: 107645 - DNA, 25 bp, Artificial
  probe
  misc_feature (1)..(25): SEQ ID NO: 4994; WAN024C7X_at; Start 227; Stop 251
gaactttgagttctgaagagatcca

SEQ ID NO: 107646 - DNA, 25 bp, Artificial
  probe
  misc_feature (1)..(25): SEQ ID NO: 4994; WAN024C7X_at; Start 616; Stop 640
gatgatttacatgaaaaaggattac

SEQ ID NO: 107647 - DNA, 25 bp, Artificial
  probe
  misc_feature (1)..(25): SEQ ID NO: 4994; WAN024C7X_at; Start 262; Stop 286
tgttttaattcactgaatgaaccca

SEQ ID NO: 107648 - DNA, 25 bp, Artificial
  probe
  misc_feature (1)..(25): SEQ ID NO: 4994; WAN024C7X_at; Start 452; Stop 476
tattggaaatgcttagagactctgg

SEQ ID NO: 107649 - DNA, 25 bp, Artificial
  probe
  misc_feature (1)..(25): SEQ ID NO: 4994; WAN024C7X_at; Start 703; Stop 727
gatacagctattgctcatgatggcg

SEQ ID NO: 107650 - DNA, 25 bp, Artificial
  probe
  misc_feature (1)..(25): SEQ ID NO: 4994; WAN024C7X_at; Start 355; Stop 379
gatagaagttggttttactgggata

SEQ ID NO: 107651 - DNA, 25 bp, Artificial
  probe
  misc_feature (1)..(25): SEQ ID NO: 4994; WAN024C7X_at; Start 27; Stop 51
aaaaaacggtatactaattgcagca

SEQ ID NO: 107652 - DNA, 25 bp, Artificial
  probe
  misc_feature (1)..(25): SEQ ID NO: 4994; WAN024C7X_at; Start 331; Stop 355
gagggacagtctttaataaatatag

SEQ ID NO: 107653 - DNA, 25 bp, Artificial
  probe
  misc_feature (1)..(25): SEQ ID NO: 4994; WAN024C7X_at; Start 174; Stop 198
tgcatttcacgatgggcaagaacct

SEQ ID NO: 107654 - DNA, 25 bp, Artificial
  probe
  misc_feature (1)..(25): SEQ ID NO: 4994; WAN024C7X_at; Start 584; Stop 608
tagaaaatccaatcataagtaagaa

SEQ ID NO: 107655 - DNA, 25 bp, Artificial
  probe
  misc_feature (1)..(25): SEQ ID NO: 5756; WAN024C7Y_at; Start 959; Stop 983
tatactcgtttacagactcgttgac

SEQ ID NO: 107656 - DNA, 25 bp, Artificial
  probe
  misc_feature (1)..(25): SEQ ID NO: 5756; WAN024C7Y_at; Start 635; Stop 659
tgacaggtctttcagcagtttctgc

SEQ ID NO: 107657 - DNA, 25 bp, Artificial
  probe
  misc_feature (1)..(25): SEQ ID NO: 5756; WAN024C7Y_at; Start 888; Stop 912
gaatactcttgctcacattgttgcg

SEQ ID NO: 107658 - DNA, 25 bp, Artificial
  probe
  misc_feature (1)..(25): SEQ ID NO: 5756; WAN024C7Y_at; Start 238; Stop 262
gggacattgattgttctactcacag

SEQ ID NO: 107659 - DNA, 25 bp, Artificial
  probe
  misc_feature (1)..(25): SEQ ID NO: 5756; WAN024C7Y_at; Start 830; Stop 854
tatctgtttcgaaaaccaaggctag

SEQ ID NO: 107660 - DNA, 25 bp, Artificial
  probe
  misc_feature (1)..(25): SEQ ID NO: 5756; WAN024C7Y_at; Start 649; Stop 673
gcagtttctgctcctttgatagtag

SEQ ID NO: 107661 - DNA, 25 bp, Artificial
  probe
  misc_feature (1)..(25): SEQ ID NO: 5756; WAN024C7Y_at; Start 322; Stop 346
tatggaggaattgtattagcgacag

SEQ ID NO: 107662 - DNA, 25 bp, Artificial
  probe
  misc_feature (1)..(25): SEQ ID NO: 5756; WAN024C7Y_at; Start 800; Stop 824
tgaatcatgtcgaaaaaggaggtaa

SEQ ID NO: 107663 - DNA, 25 bp, Artificial
  probe
  misc_feature (1)..(25): SEQ ID NO: 5756; WAN024C7Y_at; Start 711; Stop 735
cagtttcgctaaaactacaagttcg

SEQ ID NO: 107664 - DNA, 25 bp, Artificial
  probe
  misc_feature (1)..(25): SEQ ID NO: 5756; WAN024C7Y_at; Start 1634; Stop 1658
taatgattatgtctagtgcagctct

SEQ ID NO: 107665 - DNA, 25 bp, Artificial
  probe
  misc_feature (1)..(25): SEQ ID NO: 5756; WAN024C7Y_at; Start 420; Stop 444
taactggtttcaaggatttggtgca

SEQ ID NO: 107666 - DNA, 25 bp, Artificial
  probe
  misc_feature (1)..(25): SEQ ID NO: 5756; WAN024C7Y_at; Start 386; Stop 410
aaacgctctcaagtataattccagg

SEQ ID NO: 107667 - DNA, 25 bp, Artificial
  probe
  misc_feature (1)..(25): SEQ ID NO: 5756; WAN024C7Y_at; Start 1168; Stop 1192
gataaattctttgagtatggtgcac

SEQ ID NO: 107668 - DNA, 25 bp, Artificial
  probe
  misc_feature (1)..(25): SEQ ID NO: 5756; WAN024C7Y_at; Start 1550; Stop 1574
cattgggaatcgttattaaacagtc

SEQ ID NO: 107669 - DNA, 25 bp, Artificial
  probe
  misc_feature (1)..(25): SEQ ID NO: 5756; WAN024C7Y_at; Start 1425; Stop 1449
cactatggtgcgagttattataccg

SEQ ID NO: 107670 - DNA, 25 bp, Artificial
  probe
  misc_feature (1)..(25): SEQ ID NO: 5756; WAN024C7Y_at; Start 1209; Stop 1233
gccaggtacattgattgcactagga

SEQ ID NO: 107671 - DNA, 25 bp, Artificial
  probe
  misc_feature (1)..(25): SEQ ID NO: 5756; WAN024C7Y_at; Start 401; Stop 425
taattccaggtcttgcccctaactg

SEQ ID NO: 107672 - DNA, 25 bp, Artificial
  probe
  misc_feature (1)..(25): SEQ ID NO: 5756; WAN024C7Y_at; Start 1069; Stop 1093
tacctagtcagcgttgtttatgcaa

SEQ ID NO: 107673 - DNA, 25 bp, Artificial
  probe
  misc_feature (1)..(25): SEQ ID NO: 5756; WAN024C7Y_at; Start 120; Stop 144
aaatggttcatttactctagaggca

SEQ ID NO: 107674 - DNA, 25 bp, Artificial
  probe
  misc_feature (1)..(25): SEQ ID NO: 5756; WAN024C7Y_at; Start 1057; Stop 1081
tcatttcgtccttacctagtcagcg

SEQ ID NO: 107675 - DNA, 25 bp, Artificial
  probe
  misc_feature (1)..(25): SEQ ID NO: 5756; WAN024C7Y_at; Start 726; Stop 750
tacaagttcgagagatttagcagct

SEQ ID NO: 107676 - DNA, 25 bp, Artificial
  probe
  misc_feature (1)..(25): SEQ ID NO: 5756; WAN024C7Y_at; Start 364; Stop 388
ggcgctaatggtcttgtaactaaaa

SEQ ID NO: 107677 - DNA, 25 bp, Artificial
  probe
  misc_feature (1)..(25): SEQ ID NO: 5756; WAN024C7Y_at; Start 150; Stop 174
taagattatacactctcagagagcg

SEQ ID NO: 107678 - DNA, 25 bp, Artificial
  probe
  misc_feature (1)..(25): SEQ ID NO: 5756; WAN024C7Y_at; Start 1402; Stop 1426
agtatgggtgcatctagtttctaca

SEQ ID NO: 107679 - DNA, 25 bp, Artificial
  probe
  misc_feature (1)..(25): SEQ ID NO: 5756; WAN024C7Y_at; Start 1588; Stop 1612
gcaactttaaatgcacaggcaatga

SEQ ID NO: 107680 - DNA, 25 bp, Artificial
  probe
  misc_feature (1)..(25): SEQ ID NO: 5756; WAN024C7Y_at; Start 2; Stop 26
tgtgcatgagaaagagtctaaactg

SEQ ID NO: 107681 - DNA, 25 bp, Artificial
  probe
  misc_feature (1)..(25): SEQ ID NO: 5756; WAN024C7Y_at; Start 306; Stop 330
tatgagctctctagtatatggagga

SEQ ID NO: 107682 - DNA, 25 bp, Artificial
  probe
  misc_feature (1)..(25): SEQ ID NO: 5756; WAN024C7Y_at; Start 973; Stop 997
gactcgttgacgatcaagacgggaa

SEQ ID NO: 107683 - DNA, 25 bp, Artificial
  probe
  misc_feature (1)..(25): SEQ ID NO: 5756; WAN024C7Y_at; Start 254; Stop 278
tactcacagagtactgggatattag

SEQ ID NO: 107684 - DNA, 25 bp, Artificial
  probe
  misc_feature (1)..(25): SEQ ID NO: 5756; WAN024C7Y_at; Start 536; Stop 560
cagctaaaaatatgggtgcaagtcc

SEQ ID NO: 107685 - DNA, 25 bp, Artificial
  probe
  misc_feature (1)..(25): SEQ ID NO: 5756; WAN024C7Y_at; Start 204; Stop 228
ggcgatttcaatggtctttactgta

SEQ ID NO: 107686 - DNA, 25 bp, Artificial
  probe
  misc_feature (1)..(25): SEQ ID NO: 5756; WAN024C7Y_at; Start 845; Stop 869
ccaaggctagtattaagaagcagat

SEQ ID NO: 107687 - DNA, 25 bp, Artificial
  probe
  misc_feature (1)..(25): SEQ ID NO: 5756; WAN024C7Y_at; Start 987; Stop 1011
caagacgggaactttagatctatct

SEQ ID NO: 107688 - DNA, 25 bp, Artificial
  probe
  misc_feature (1)..(25): SEQ ID NO: 5756; WAN024C7Y_at; Start 1566; Stop 1590
taaacagtctactgatgaaacagca

SEQ ID NO: 107689 - DNA, 25 bp, Artificial
  probe
  misc_feature (1)..(25): SEQ ID NO: 4059; WAN024C7Z_at; Start 491; Stop 515
ctaaaattgctgattactacttggt

SEQ ID NO: 107690 - DNA, 25 bp, Artificial
  probe
  misc_feature (1)..(25): SEQ ID NO: 4059; WAN024C7Z_at; Start 263; Stop 287
gaatgggagcccaagtaattagtgg

SEQ ID NO: 107691 - DNA, 25 bp, Artificial
  probe
  misc_feature (1)..(25): SEQ ID NO: 4059; WAN024C7Z_at; Start 406; Stop 430
tatgaaggtgctattttagccggag

SEQ ID NO: 107692 - DNA, 25 bp, Artificial
  probe
  misc_feature (1)..(25): SEQ ID NO: 4059; WAN024C7Z_at; Start 91; Stop 115
cttcttaggtgctttttagcgattc

SEQ ID NO: 107693 - DNA, 25 bp, Artificial
  probe
  misc_feature (1)..(25): SEQ ID NO: 4059; WAN024C7Z_at; Start 561; Stop 585
tacatcgggtattaagattttagaa

SEQ ID NO: 107694 - DNA, 25 bp, Artificial
  probe
  misc_feature (1)..(25): SEQ ID NO: 4059; WAN024C7Z_at; Start 647; Stop 671
aagtgtcctgctatttatcattaaa

SEQ ID NO: 107695 - DNA, 25 bp, Artificial
  probe
  misc_feature (1)..(25): SEQ ID NO: 4059; WAN024C7Z_at; Start 37; Stop 61
aacgaggtaagagataatatgaatc

SEQ ID NO: 107696 - DNA, 25 bp, Artificial
  probe
  misc_feature (1)..(25): SEQ ID NO: 4059; WAN024C7Z_at; Start 422; Stop 446
tagccggagttgtactcatagcagt

SEQ ID NO: 107697 - DNA, 25 bp, Artificial
  probe
  misc_feature (1)..(25): SEQ ID NO: 4059; WAN024C7Z_at; Start 633; Stop 657
aattaagtcaacaaaagtgtcctgc

SEQ ID NO: 107698 - DNA, 25 bp, Artificial
  probe
  misc_feature (1)..(25): SEQ ID NO: 4059; WAN024C7Z_at; Start 347; Stop 371
caacagcagctggattatggtcttc

SEQ ID NO: 107699 - DNA, 25 bp, Artificial
  probe
  misc_feature (1)..(25): SEQ ID NO: 4059; WAN024C7Z_at; Start 241; Stop 265
tatggtagcggtgatcctagtcgaa

SEQ ID NO: 107700 - DNA, 25 bp, Artificial
  probe
  misc_feature (1)..(25): SEQ ID NO: 4059; WAN024C7Z_at; Start 302; Stop 326
gggcaggaacaatcatggtaactaa

SEQ ID NO: 107701 - DNA, 25 bp, Artificial
  probe
  misc_feature (1)..(25): SEQ ID NO: 4059; WAN024C7Z_at; Start 479; Stop 503
taaactcgaaaactaaaattgctga

SEQ ID NO: 107702 - DNA, 25 bp, Artificial
  probe
  misc_feature (1)..(25): SEQ ID NO: 4059; WAN024C7Z_at; Start 449; Stop 473
taactctatttactcctcttaaaga

SEQ ID NO: 107703 - DNA, 25 bp, Artificial
  probe
  misc_feature (1)..(25): SEQ ID NO: 4059; WAN024C7Z_at; Start 126; Stop 150
cattgttggctatgagcgaggagtc

SEQ ID NO: 107704 - DNA, 25 bp, Artificial
  probe
  misc_feature (1)..(25): SEQ ID NO: 4059; WAN024C7Z_at; Start 227; Stop 251
tcatcactagtcgttatggtagcgg

SEQ ID NO: 107705 - DNA, 25 bp, Artificial
  probe
  misc_feature (1)..(25): SEQ ID NO: 4059; WAN024C7Z_at; Start 359; Stop 383
gattatggtcttcagcaactattgg

SEQ ID NO: 107706 - DNA, 25 bp, Artificial
  probe
  misc_feature (1)..(25): SEQ ID NO: 4059; WAN024C7Z_at; Start 65; Stop 89
catacgaactgagtatttgggaaat

SEQ ID NO: 107707 - DNA, 25 bp, Artificial
  probe
  misc_feature (1)..(25): SEQ ID NO: 4059; WAN024C7Z_at; Start 78; Stop 102
tatttgggaaatacttcttaggtgc

SEQ ID NO: 107708 - DNA, 25 bp, Artificial
  probe
  misc_feature (1)..(25): SEQ ID NO: 4059; WAN024C7Z_at; Start 156; Stop 180
ccaagcagcagggattagaacctac

SEQ ID NO: 107709 - DNA, 25 bp, Artificial
  probe
  misc_feature (1)..(25): SEQ ID NO: 4059; WAN024C7Z_at; Start 253; Stop 277
gatcctagtcgaatgggagcccaag

SEQ ID NO: 107710 - DNA, 25 bp, Artificial
  probe
  misc_feature (1)..(25): SEQ ID NO: 4059; WAN024C7Z_at; Start 164; Stop 188
cagggattagaacctacttactagt

SEQ ID NO: 107711 - DNA, 25 bp, Artificial
  probe
  misc_feature (1)..(25): SEQ ID NO: 4059; WAN024C7Z_at; Start 335; Stop 359
ttaaaggtttaacaacagcagctgg

SEQ ID NO: 107712 - DNA, 25 bp, Artificial
  probe
  misc_feature (1)..(25): SEQ ID NO: 4059; WAN024C7Z_at; Start 195; Stop 219
gggaacttgtgttgtaatgatgaca

SEQ ID NO: 107713 - DNA, 25 bp, Artificial
  probe
  misc_feature (1)..(25): SEQ ID NO: 4059; WAN024C7Z_at; Start 111; Stop 135
gattcttttcggtggcattgttggc

SEQ ID NO: 107714 - DNA, 25 bp, Artificial
  probe
  misc_feature (1)..(25): SEQ ID NO: 4059; WAN024C7Z_at; Start 545; Stop 569
tacttatatatttaaatacatcggg

SEQ ID NO: 107715 - DNA, 25 bp, Artificial
  probe
  misc_feature (1)..(25): SEQ ID NO: 4059; WAN024C7Z_at; Start 54; Stop 78
tatgaatctttcatacgaactgagt

SEQ ID NO: 107716 - DNA, 25 bp, Artificial
  probe
  misc_feature (1)..(25): SEQ ID NO: 4059; WAN024C7Z_at; Start 374; Stop 398
caactattggtttagctataggcat

SEQ ID NO: 107717 - DNA, 25 bp, Artificial
  probe
  misc_feature (1)..(25): SEQ ID NO: 4059; WAN024C7Z_at; Start 598; Stop 622
ataggaaatcttgatgaagaacgtc

SEQ ID NO: 107718 - DNA, 25 bp, Artificial
  probe
  misc_feature (1)..(25): SEQ ID NO: 4059; WAN024C7Z_at; Start 724; Stop 748
gctggtgttatttatgttgaagaga

SEQ ID NO: 107719 - DNA, 25 bp, Artificial
  probe
  misc_feature (1)..(25): SEQ ID NO: 4059; WAN024C7Z_at; Start 215; Stop 239
tgacaaatcagttcatcactagtcg

SEQ ID NO: 107720 - DNA, 25 bp, Artificial
  probe
  misc_feature (1)..(25): SEQ ID NO: 4059; WAN024C7Z_at; Start 392; Stop 416
taggcattggtttttatgaaggtgc

SEQ ID NO: 107721 - DNA, 25 bp, Artificial
  probe
  misc_feature (1)..(25): SEQ ID NO: 4059; WAN024C7Z_at; Start 704; Stop 728
tggaagaaatgcataatattgctgg

SEQ ID NO: 107722 - DNA, 25 bp, Artificial
  probe
  misc_feature (1)..(25): SEQ ID NO: 4059; WAN024C7Z_at; Start 141; Stop 165
gcgaggagtcaaaaaccaagcagca

SEQ ID NO: 107723 - DNA, 25 bp, Artificial
  probe
  misc_feature (1)..(25): SEQ ID NO: 1209; WAN024C82_at; Start 549; Stop 573
aattaaagagcgtaaagagatctca

SEQ ID NO: 107724 - DNA, 25 bp, Artificial
  probe
  misc_feature (1)..(25): SEQ ID NO: 1209; WAN024C82_at; Start 119; Stop 143
ctaacttgtggattgatttggataa

SEQ ID NO: 107725 - DNA, 25 bp, Artificial
  probe
  misc_feature (1)..(25): SEQ ID NO: 1209; WAN024C82_at; Start 505; Stop 529
gaaaatgtagaagctgcaagaactc

SEQ ID NO: 107726 - DNA, 25 bp, Artificial
  probe
  misc_feature (1)..(25): SEQ ID NO: 1209; WAN024C82_at; Start 556; Stop 580
gagcgtaaagagatctcaaatatac

SEQ ID NO: 107727 - DNA, 25 bp, Artificial
  probe
  misc_feature (1)..(25): SEQ ID NO: 1209; WAN024C82_at; Start 199; Stop 223
caatatcaggatcaaattcatgagt

SEQ ID NO: 107728 - DNA, 25 bp, Artificial
  probe
  misc_feature (1)..(25): SEQ ID NO: 1209; WAN024C82_at; Start 427; Stop 451
caaaaagaaatttacttgtcattag

SEQ ID NO: 107729 - DNA, 25 bp, Artificial
  probe
  misc_feature (1)..(25): SEQ ID NO: 1209; WAN024C82_at; Start 187; Stop 211
gaaatgggacatcaatatcaggatc

SEQ ID NO: 107730 - DNA, 25 bp, Artificial
  probe
  misc_feature (1)..(25): SEQ ID NO: 1209; WAN024C82_at; Start 208; Stop 232
gatcaaattcatgagttagtatgga

SEQ ID NO: 107731 - DNA, 25 bp, Artificial
  probe
  misc_feature (1)..(25): SEQ ID NO: 1209; WAN024C82_at; Start 191; Stop 215
tgggacatcaatatcaggatcaaat

SEQ ID NO: 107732 - DNA, 25 bp, Artificial
  probe
  misc_feature (1)..(25): SEQ ID NO: 1209; WAN024C82_at; Start 109; Stop 133
gtatttcaatctaacttgtggattg

SEQ ID NO: 107733 - DNA, 25 bp, Artificial
  probe
  misc_feature (1)..(25): SEQ ID NO: 1209; WAN024C82_at; Start 227; Stop 251
tatggaattggtttaactatgttga

SEQ ID NO: 107734 - DNA, 25 bp, Artificial
  probe
  misc_feature (1)..(25): SEQ ID NO: 1209; WAN024C82_at; Start 385; Stop 409
gatggttacgtaatttcttgtgaag

SEQ ID NO: 107735 - DNA, 25 bp, Artificial
  probe
  misc_feature (1)..(25): SEQ ID NO: 1209; WAN024C82_at; Start 217; Stop 241
catgagttagtatggaattggttta

SEQ ID NO: 107736 - DNA, 25 bp, Artificial
  probe
  misc_feature (1)..(25): SEQ ID NO: 1209; WAN024C82_at; Start 153; Stop 177
tagtttagagttcttagagaatcaa

SEQ ID NO: 107737 - DNA, 25 bp, Artificial
  probe
  misc_feature (1)..(25): SEQ ID NO: 1209; WAN024C82_at; Start 416; Stop 440
tgatgaaaccacaaaaagaaattta

SEQ ID NO: 107738 - DNA, 25 bp, Artificial
  probe
  misc_feature (1)..(25): SEQ ID NO: 1209; WAN024C82_at; Start 569; Stop 593
tctcaaatatactaaaagatctctt

SEQ ID NO: 107739 - DNA, 25 bp, Artificial
  probe
  misc_feature (1)..(25): SEQ ID NO: 1209; WAN024C82_at; Start 61; Stop 85
tcaaaaatctgtaagaatgatttag

SEQ ID NO: 107740 - DNA, 25 bp, Artificial
  probe
  misc_feature (1)..(25): SEQ ID NO: 1209; WAN024C82_at; Start 241; Stop 265
aactatgttgatttatatgatgaag

SEQ ID NO: 107741 - DNA, 25 bp, Artificial
  probe
  misc_feature (1)..(25): SEQ ID NO: 1209; WAN024C82_at; Start 268; Stop 292
tatgaattaataaaacagctaaaga

SEQ ID NO: 107742 - DNA, 25 bp, Artificial
  probe
  misc_feature (1)..(25): SEQ ID NO: 1209; WAN024C82_at; Start 29; Stop 53
tgttgattgaatggaataaagaaaa

SEQ ID NO: 107743 - DNA, 25 bp, Artificial
  probe
  misc_feature (1)..(25): SEQ ID NO: 1209; WAN024C82_at; Start 401; Stop 425
cttgtgaagttaaaatgatgaaacc

SEQ ID NO: 107744 - DNA, 25 bp, Artificial
  probe
  misc_feature (1)..(25): SEQ ID NO: 1209; WAN024C82_at; Start 20; Stop 44
tagggaatgtgttgattgaatggaa

SEQ ID NO: 107745 - DNA, 25 bp, Artificial
  probe
  misc_feature (1)..(25): SEQ ID NO: 1209; WAN024C82_at; Start 510; Stop 534
tgtagaagctgcaagaactctaggt

SEQ ID NO: 107746 - DNA, 25 bp, Artificial
  probe
  misc_feature (1)..(25): SEQ ID NO: 1209; WAN024C82_at; Start 525; Stop 549
aactctaggtattaaagcatttcaa

SEQ ID NO: 107747 - DNA, 25 bp, Artificial
  probe
  misc_feature (1)..(25): SEQ ID NO: 1209; WAN024C82_at; Start 514; Stop 538
gaagctgcaagaactctaggtatta

SEQ ID NO: 107748 - DNA, 25 bp, Artificial
  probe
  misc_feature (1)..(25): SEQ ID NO: 1209; WAN024C82_at; Start 520; Stop 544
gcaagaactctaggtattaaagcat

SEQ ID NO: 107749 - DNA, 25 bp, Artificial
  probe
  misc_feature (1)..(25): SEQ ID NO: 1209; WAN024C82_at; Start 355; Stop 379
tctgttctatctaaagtatcatctg

SEQ ID NO: 107750 - DNA, 25 bp, Artificial
  probe
  misc_feature (1)..(25): SEQ ID NO: 1209; WAN024C82_at; Start 498; Stop 522
tttagaagaaaatgtagaagctgca

SEQ ID NO: 107751 - DNA, 25 bp, Artificial
  probe
  misc_feature (1)..(25): SEQ ID NO: 1209; WAN024C82_at; Start 371; Stop 395
tatcatctgttttagatggttacgt

SEQ ID NO: 107752 - DNA, 25 bp, Artificial
  probe
  misc_feature (1)..(25): SEQ ID NO: 1209; WAN024C82_at; Start 160; Stop 184
gagttcttagagaatcaattaatcg

SEQ ID NO: 107753 - DNA, 25 bp, Artificial
  probe
  misc_feature (1)..(25): SEQ ID NO: 1209; WAN024C82_at; Start 175; Stop 199
caattaatcgatgaaatgggacatc

SEQ ID NO: 107754 - DNA, 25 bp, Artificial
  probe
  misc_feature (1)..(25): SEQ ID NO: 1209; WAN024C82_at; Start 320; Stop 344
caaatacctcctcaatttttcatat

SEQ ID NO: 107755 - DNA, 25 bp, Artificial
  probe
  misc_feature (1)..(25): SEQ ID NO: 1209; WAN024C82_at; Start 310; Stop 334
tatgttttatcaaatacctcctcaa

SEQ ID NO: 107756 - DNA, 25 bp, Artificial
  probe
  misc_feature (1)..(25): SEQ ID NO: 1209; WAN024C82_at; Start 541; Stop 565
gcatttcaaattaaagagcgtaaag

SEQ ID NO: 107757 - DNA, 25 bp, Artificial
  probe
  misc_feature (1)..(25): SEQ ID NO: 836; WAN024C83_at; Start 220; Stop 244
cctgaacctgatagaattaaaaatg

SEQ ID NO: 107758 - DNA, 25 bp, Artificial
  probe
  misc_feature (1)..(25): SEQ ID NO: 836; WAN024C83_at; Start 194; Stop 218
tggcaactacaagaccaaacgtaat

SEQ ID NO: 107759 - DNA, 25 bp, Artificial
  probe
  misc_feature (1)..(25): SEQ ID NO: 836; WAN024C83_at; Start 175; Stop 199
gattttgctgcaaaaagcatggcaa

SEQ ID NO: 107760 - DNA, 25 bp, Artificial
  probe
  misc_feature (1)..(25): SEQ ID NO: 836; WAN024C83_at; Start 94; Stop 118
ggaaatccaaatacaactggctcat

SEQ ID NO: 107761 - DNA, 25 bp, Artificial
  probe
  misc_feature (1)..(25): SEQ ID NO: 836; WAN024C83_at; Start 206; Stop 230
gaccaaacgtaatccctgaacctga

SEQ ID NO: 107762 - DNA, 25 bp, Artificial
  probe
  misc_feature (1)..(25): SEQ ID NO: 836; WAN024C83_at; Start 32; Stop 56
tcacagctgcaagtacaggaacaag

SEQ ID NO: 107763 - DNA, 25 bp, Artificial
  probe
  misc_feature (1)..(25): SEQ ID NO: 836; WAN024C83_at; Start 13; Stop 37
gcaatagctccatatactatcacag

SEQ ID NO: 107764 - DNA, 25 bp, Artificial
  probe
  misc_feature (1)..(25): SEQ ID NO: 836; WAN024C83_at; Start 45; Stop 69
tacaggaacaagaatgaaaggtaca

SEQ ID NO: 107765 - DNA, 25 bp, Artificial
  probe
  misc_feature (1)..(25): SEQ ID NO: 836; WAN024C83_at; Start 141; Stop 165
agctgcaacttttcctaaggcttgg

SEQ ID NO: 107766 - DNA, 25 bp, Artificial
  probe
  misc_feature (1)..(25): SEQ ID NO: 836; WAN024C83_at; Start 99; Stop 123
tccaaatacaactggctcatttacg

SEQ ID NO: 107767 - DNA, 25 bp, Artificial
  probe
  misc_feature (1)..(25): SEQ ID NO: 836; WAN024C83_at; Start 27; Stop 51
tactatcacagctgcaagtacagga

SEQ ID NO: 107768 - DNA, 25 bp, Artificial
  probe
  misc_feature (1)..(25): SEQ ID NO: 836; WAN024C83_at; Start 21; Stop 45
tccatatactatcacagctgcaagt

SEQ ID NO: 107769 - DNA, 25 bp, Artificial
  probe
  misc_feature (1)..(25): SEQ ID NO: 836; WAN024C83_at; Start 191; Stop 215
gcatggcaactacaagaccaaacgt

SEQ ID NO: 107770 - DNA, 25 bp, Artificial
  probe
  misc_feature (1)..(25): SEQ ID NO: 836; WAN024C83_at; Start 119; Stop 143
ttacgttaaatattgctggaaaagc

SEQ ID NO: 107771 - DNA, 25 bp, Artificial
  probe
  misc_feature (1)..(25): SEQ ID NO: 836; WAN024C83_at; Start 209; Stop 233
caaacgtaatccctgaacctgatag

SEQ ID NO: 107772 - DNA, 25 bp, Artificial
  probe
  misc_feature (1)..(25): SEQ ID NO: 836; WAN024C83_at; Start 213; Stop 237
cgtaatccctgaacctgatagaatt

SEQ ID NO: 107773 - DNA, 25 bp, Artificial
  probe
  misc_feature (1)..(25): SEQ ID NO: 836; WAN024C83_at; Start 161; Stop 185
cttggtattgttttgattttgctgc

SEQ ID NO: 107774 - DNA, 25 bp, Artificial
  probe
  misc_feature (1)..(25): SEQ ID NO: 836; WAN024C83_at; Start 105; Stop 129
tacaactggctcatttacgttaaat

SEQ ID NO: 107775 - DNA, 25 bp, Artificial
  probe
  misc_feature (1)..(25): SEQ ID NO: 836; WAN024C83_at; Start 2; Stop 26
tgaaacctgttgcaatagctccata

SEQ ID NO: 107776 - DNA, 25 bp, Artificial
  probe
  misc_feature (1)..(25): SEQ ID NO: 836; WAN024C83_at; Start 7; Stop 31
cctgttgcaatagctccatatacta

SEQ ID NO: 107777 - DNA, 25 bp, Artificial
  probe
  misc_feature (1)..(25): SEQ ID NO: 836; WAN024C83_at; Start 137; Stop 161
gaaaagctgcaacttttcctaaggc

SEQ ID NO: 107778 - DNA, 25 bp, Artificial
  probe
  misc_feature (1)..(25): SEQ ID NO: 836; WAN024C83_at; Start 80; Stop 104
gattcatgacaatcggaaatccaaa

SEQ ID NO: 107779 - DNA, 25 bp, Artificial
  probe
  misc_feature (1)..(25): SEQ ID NO: 836; WAN024C83_at; Start 72; Stop 96
cataactggattcatgacaatcgga

SEQ ID NO: 107780 - DNA, 25 bp, Artificial
  probe
  misc_feature (1)..(25): SEQ ID NO: 836; WAN024C83_at; Start 185; Stop 209
caaaaagcatggcaactacaagacc

SEQ ID NO: 107781 - DNA, 25 bp, Artificial
  probe
  misc_feature (1)..(25): SEQ ID NO: 836; WAN024C83_at; Start 56; Stop 80
gaatgaaaggtacaaacataactgg

SEQ ID NO: 107782 - DNA, 25 bp, Artificial
  probe
  misc_feature (1)..(25): SEQ ID NO: 836; WAN024C83_at; Start 125; Stop 149
taaatattgctggaaaagctgcaac

SEQ ID NO: 107783 - DNA, 25 bp, Artificial
  probe
  misc_feature (1)..(25): SEQ ID NO: 836; WAN024C83_at; Start 129; Stop 153
tattgctggaaaagctgcaactttt

SEQ ID NO: 107784 - DNA, 25 bp, Artificial
  probe
  misc_feature (1)..(25): SEQ ID NO: 836; WAN024C83_at; Start 144; Stop 168
tgcaacttttcctaaggcttggtat

SEQ ID NO: 107785 - DNA, 25 bp, Artificial
  probe
  misc_feature (1)..(25): SEQ ID NO: 836; WAN024C83_at; Start 226; Stop 250
cctgatagaattaaaaatgaatcta

SEQ ID NO: 107786 - DNA, 25 bp, Artificial
  probe
  misc_feature (1)..(25): SEQ ID NO: 836; WAN024C83_at; Start 37; Stop 61
gctgcaagtacaggaacaagaatga

SEQ ID NO: 107787 - DNA, 25 bp, Artificial
  probe
  misc_feature (1)..(25): SEQ ID NO: 836; WAN024C83_at; Start 180; Stop 204
tgctgcaaaaagcatggcaactaca

SEQ ID NO: 107788 - DNA, 25 bp, Artificial
  probe
  misc_feature (1)..(25): SEQ ID NO: 836; WAN024C83_at; Start 153; Stop 177
tcctaaggcttggtattgttttgat

SEQ ID NO: 107789 - DNA, 25 bp, Artificial
  probe
  misc_feature (1)..(25): SEQ ID NO: 836; WAN024C83_at; Start 201; Stop 225
tacaagaccaaacgtaatccctgaa

SEQ ID NO: 107790 - DNA, 25 bp, Artificial
  probe
  misc_feature (1)..(25): SEQ ID NO: 836; WAN024C83_at; Start 90; Stop 114
aatcggaaatccaaatacaactggc

SEQ ID NO: 107791 - DNA, 25 bp, Artificial
  probe
  misc_feature (1)..(25): SEQ ID NO: 4186; WAN024C84_at; Start 306; Stop 330
gaatagcggagtagaggctttacca

SEQ ID NO: 107792 - DNA, 25 bp, Artificial
  probe
  misc_feature (1)..(25): SEQ ID NO: 4186; WAN024C84_at; Start 1131; Stop 1155
aggtttcatgcagccattctcaggg

SEQ ID NO: 107793 - DNA, 25 bp, Artificial
  probe
  misc_feature (1)..(25): SEQ ID NO: 4186; WAN024C84_at; Start 116; Stop 140
caattttgccattgacagtagttgg

SEQ ID NO: 107794 - DNA, 25 bp, Artificial
  probe
  misc_feature (1)..(25): SEQ ID NO: 4186; WAN024C84_at; Start 994; Stop 1018
gcagcttttccagcaatatttaacg

SEQ ID NO: 107795 - DNA, 25 bp, Artificial
  probe
  misc_feature (1)..(25): SEQ ID NO: 4186; WAN024C84_at; Start 554; Stop 578
aacagtttgaagcaatgattccagc

SEQ ID NO: 107796 - DNA, 25 bp, Artificial
  probe
  misc_feature (1)..(25): SEQ ID NO: 4186; WAN024C84_at; Start 1114; Stop 1138
tatggagctattgcaacaggtttca

SEQ ID NO: 107797 - DNA, 25 bp, Artificial
  probe
  misc_feature (1)..(25): SEQ ID NO: 4186; WAN024C84_at; Start 817; Stop 841
gctaataaagctatgttagcctctg

SEQ ID NO: 107798 - DNA, 25 bp, Artificial
  probe
  misc_feature (1)..(25): SEQ ID NO: 4186; WAN024C84_at; Start 244; Stop 268
tcaggaacttttgctattatgggtc

SEQ ID NO: 107799 - DNA, 25 bp, Artificial
  probe
  misc_feature (1)..(25): SEQ ID NO: 4186; WAN024C84_at; Start 737; Stop 761
catttttgtggtggtttggtgttca

SEQ ID NO: 107800 - DNA, 25 bp, Artificial
  probe
  misc_feature (1)..(25): SEQ ID NO: 4186; WAN024C84_at; Start 1010; Stop 1034
tatttaacgtaaatgagccagttgt

SEQ ID NO: 107801 - DNA, 25 bp, Artificial
  probe
  misc_feature (1)..(25): SEQ ID NO: 4186; WAN024C84_at; Start 167; Stop 191
tgccgttcgaaggattaaataagag

SEQ ID NO: 107802 - DNA, 25 bp, Artificial
  probe
  misc_feature (1)..(25): SEQ ID NO: 4186; WAN024C84_at; Start 529; Stop 553
gaacaagttccacaagctattgcca

SEQ ID NO: 107803 - DNA, 25 bp, Artificial
  probe
  misc_feature (1)..(25): SEQ ID NO: 4186; WAN024C84_at; Start 66; Stop 90
gaagtttgtgaatatgcgtggcatt

SEQ ID NO: 107804 - DNA, 25 bp, Artificial
  probe
  misc_feature (1)..(25): SEQ ID NO: 4186; WAN024C84_at; Start 1157; Stop 1181
taacattgccttggagtacaccagc

SEQ ID NO: 107805 - DNA, 25 bp, Artificial
  probe
  misc_feature (1)..(25): SEQ ID NO: 4186; WAN024C84_at; Start 432; Stop 456
tggaggccaaggaattatcggtgct

SEQ ID NO: 107806 - DNA, 25 bp, Artificial
  probe
  misc_feature (1)..(25): SEQ ID NO: 4186; WAN024C84_at; Start 85; Stop 109
ggcattatagctctaaaagatggga

SEQ ID NO: 107807 - DNA, 25 bp, Artificial
  probe
  misc_feature (1)..(25): SEQ ID NO: 4186; WAN024C84_at; Start 515; Stop 539
ttattaagatgccagaacaagttcc

SEQ ID NO: 107808 - DNA, 25 bp, Artificial
  probe
  misc_feature (1)..(25): SEQ ID NO: 4186; WAN024C84_at; Start 37; Stop 61
gatgttcagaaaatcattgcaccga

SEQ ID NO: 107809 - DNA, 25 bp, Artificial
  probe
  misc_feature (1)..(25): SEQ ID NO: 4186; WAN024C84_at; Start 1285; Stop 1309
gatcgtttagcttaccaaaatgaaa

SEQ ID NO: 107810 - DNA, 25 bp, Artificial
  probe
  misc_feature (1)..(25): SEQ ID NO: 4186; WAN024C84_at; Start 153; Stop 177
gattatgggacaattgccgttcgaa

SEQ ID NO: 107811 - DNA, 25 bp, Artificial
  probe
  misc_feature (1)..(25): SEQ ID NO: 4186; WAN024C84_at; Start 925; Stop 949
acgtttggtcttgtagttgccatgc

SEQ ID NO: 107812 - DNA, 25 bp, Artificial
  probe
  misc_feature (1)..(25): SEQ ID NO: 4186; WAN024C84_at; Start 443; Stop 467
gaattatcggtgctatcattatagg

SEQ ID NO: 107813 - DNA, 25 bp, Artificial
  probe
  misc_feature (1)..(25): SEQ ID NO: 4186; WAN024C84_at; Start 1024; Stop 1048
gagccagttgtatttggatttccga

SEQ ID NO: 107814 - DNA, 25 bp, Artificial
  probe
  misc_feature (1)..(25): SEQ ID NO: 4186; WAN024C84_at; Start 1040; Stop 1064
gatttccgattgtcatgaatccagt

SEQ ID NO: 107815 - DNA, 25 bp, Artificial
  probe
  misc_feature (1)..(25): SEQ ID NO: 4186; WAN024C84_at; Start 910; Stop 934
tcaggttcagggattacgtttggtc

SEQ ID NO: 107816 - DNA, 25 bp, Artificial
  probe
  misc_feature (1)..(25): SEQ ID NO: 4186; WAN024C84_at; Start 218; Stop 242
ggacagagccgtttatgcaagtata

SEQ ID NO: 107817 - DNA, 25 bp, Artificial
  probe
  misc_feature (1)..(25): SEQ ID NO: 4186; WAN024C84_at; Start 322; Stop 346
gctttaccagctggagttctatctg

SEQ ID NO: 107818 - DNA, 25 bp, Artificial
  probe
  misc_feature (1)..(25): SEQ ID NO: 4186; WAN024C84_at; Start 458; Stop 482
tcattataggtttggtagtaggaag

SEQ ID NO: 107819 - DNA, 25 bp, Artificial
  probe
  misc_feature (1)..(25): SEQ ID NO: 4186; WAN024C84_at; Start 776; Stop 800
taaatggagtagtgacagctctgct

SEQ ID NO: 107820 - DNA, 25 bp, Artificial
  probe
  misc_feature (1)..(25): SEQ ID NO: 4186; WAN024C84_at; Start 204; Stop 228
ttttggagctaattggacagagccg

SEQ ID NO: 107821 - DNA, 25 bp, Artificial
  probe
  misc_feature (1)..(25): SEQ ID NO: 4186; WAN024C84_at; Start 378; Stop 402
ttatatccctaaacaaggtgaggcg

SEQ ID NO: 107822 - DNA, 25 bp, Artificial
  probe
  misc_feature (1)..(25): SEQ ID NO: 4186; WAN024C84_at; Start 51; Stop 75
cattgcaccgatgatgaagtttgtg

SEQ ID NO: 107823 - DNA, 25 bp, Artificial
  probe
  misc_feature (1)..(25): SEQ ID NO: 4186; WAN024C84_at; Start 1097; Stop 1121
ttgcagctgtgatagtatatggagc

SEQ ID NO: 107824 - DNA, 25 bp, Artificial
  probe
  misc_feature (1)..(25): SEQ ID NO: 4186; WAN024C84_at; Start 1083; Stop 1107
tcttgttcctgtacttgcagctgtg

SEQ ID NO: 107825 - DNA, 25 bp, Artificial
  probe
  misc_feature (1)..(25): SEQ ID NO: 2694; WAN024C85_at; Start 744; Stop 768
gataggttcacgtgtttggttcgaa

SEQ ID NO: 107826 - DNA, 25 bp, Artificial
  probe
  misc_feature (1)..(25): SEQ ID NO: 2694; WAN024C85_at; Start 1727; Stop 1751
taggtggtggctcaattggaatttc

SEQ ID NO: 107827 - DNA, 25 bp, Artificial
  probe
  misc_feature (1)..(25): SEQ ID NO: 2694; WAN024C85_at; Start 1929; Stop 1953
tgggagtagaacaaaatggtacggc

SEQ ID NO: 107828 - DNA, 25 bp, Artificial
  probe
  misc_feature (1)..(25): SEQ ID NO: 2694; WAN024C85_at; Start 1171; Stop 1195
aatatttctaagtcggtgtctcgag

SEQ ID NO: 107829 - DNA, 25 bp, Artificial
  probe
  misc_feature (1)..(25): SEQ ID NO: 2694; WAN024C85_at; Start 98; Stop 122
taaagttagtagaagagactgcgaa

SEQ ID NO: 107830 - DNA, 25 bp, Artificial
  probe
  misc_feature (1)..(25): SEQ ID NO: 2694; WAN024C85_at; Start 1817; Stop 1841
ctattttactaacatctctgggtgg

SEQ ID NO: 107831 - DNA, 25 bp, Artificial
  probe
  misc_feature (1)..(25): SEQ ID NO: 2694; WAN024C85_at; Start 1968; Stop 1992
tagatttgagcagatgttagggcaa

SEQ ID NO: 107832 - DNA, 25 bp, Artificial
  probe
  misc_feature (1)..(25): SEQ ID NO: 2694; WAN024C85_at; Start 669; Stop 693
tgatgaagatttgatgcacacgcta

SEQ ID NO: 107833 - DNA, 25 bp, Artificial
  probe
  misc_feature (1)..(25): SEQ ID NO: 2694; WAN024C85_at; Start 69; Stop 93
taaaaaaggtaatgtctcagcagct

SEQ ID NO: 107834 - DNA, 25 bp, Artificial
  probe
  misc_feature (1)..(25): SEQ ID NO: 2694; WAN024C85_at; Start 1990; Stop 2014
caagagttaatagaaagtgtgaagc

SEQ ID NO: 107835 - DNA, 25 bp, Artificial
  probe
  misc_feature (1)..(25): SEQ ID NO: 2694; WAN024C85_at; Start 1465; Stop 1489
cctcggtttcgtgagagattagcac

SEQ ID NO: 107836 - DNA, 25 bp, Artificial
  probe
  misc_feature (1)..(25): SEQ ID NO: 2694; WAN024C85_at; Start 38; Stop 62
tctcacatgggacagtttcaaacgt

SEQ ID NO: 107837 - DNA, 25 bp, Artificial
  probe
  misc_feature (1)..(25): SEQ ID NO: 2694; WAN024C85_at; Start 1041; Stop 1065
gatgattgagtctggcgatgtttca

SEQ ID NO: 107838 - DNA, 25 bp, Artificial
  probe
  misc_feature (1)..(25): SEQ ID NO: 2694; WAN024C85_at; Start 480; Stop 504
ggttcggactgaaaagctatctaat

SEQ ID NO: 107839 - DNA, 25 bp, Artificial
  probe
  misc_feature (1)..(25): SEQ ID NO: 2694; WAN024C85_at; Start 204; Stop 228
taatgcacgcaaaaagtatgctgag

SEQ ID NO: 107840 - DNA, 25 bp, Artificial
  probe
  misc_feature (1)..(25): SEQ ID NO: 2694; WAN024C85_at; Start 1678; Stop 1702
gctcagtttgagtttgcaactgcca

SEQ ID NO: 107841 - DNA, 25 bp, Artificial
  probe
  misc_feature (1)..(25): SEQ ID NO: 2694; WAN024C85_at; Start 1430; Stop 1454
taagttcttcagtgagagcagcatg

SEQ ID NO: 107842 - DNA, 25 bp, Artificial
  probe
  misc_feature (1)..(25): SEQ ID NO: 2694; WAN024C85_at; Start 1534; Stop 1558
tatgagaaaagttatcagtttaccg

SEQ ID NO: 107843 - DNA, 25 bp, Artificial
  probe
  misc_feature (1)..(25): SEQ ID NO: 2694; WAN024C85_at; Start 148; Stop 172
caagctcagtttcttcgaaaaggcg

SEQ ID NO: 107844 - DNA, 25 bp, Artificial
  probe
  misc_feature (1)..(25): SEQ ID NO: 2694; WAN024C85_at; Start 803; Stop 827
gaatattggcactcaatactgccga

SEQ ID NO: 107845 - DNA, 25 bp, Artificial
  probe
  misc_feature (1)..(25): SEQ ID NO: 2694; WAN024C85_at; Start 1092; Stop 1116
tatggcttggcttccaacatttggg

SEQ ID NO: 107846 - DNA, 25 bp, Artificial
  probe
  misc_feature (1)..(25): SEQ ID NO: 2694; WAN024C85_at; Start 1660; Stop 1684
gatggtctcaatgtttctgctcagt

SEQ ID NO: 107847 - DNA, 25 bp, Artificial
  probe
  misc_feature (1)..(25): SEQ ID NO: 2694; WAN024C85_at; Start 1561; Stop 1585
aaatcatttaattcttcgtggaacg

SEQ ID NO: 107848 - DNA, 25 bp, Artificial
  probe
  misc_feature (1)..(25): SEQ ID NO: 2694; WAN024C85_at; Start 1853; Stop 1877
caaagtatgtcatgcaaaataggat

SEQ ID NO: 107849 - DNA, 25 bp, Artificial
  probe
  misc_feature (1)..(25): SEQ ID NO: 2694; WAN024C85_at; Start 465; Stop 489
gattgtacttgagttggttcggact

SEQ ID NO: 107850 - DNA, 25 bp, Artificial
  probe
  misc_feature (1)..(25): SEQ ID NO: 2694; WAN024C85_at; Start 1499; Stop 1523
tgaatcttgctgtacttcctcaggt

SEQ ID NO: 107851 - DNA, 25 bp, Artificial
  probe
  misc_feature (1)..(25): SEQ ID NO: 2694; WAN024C85_at; Start 163; Stop 187
cgaaaaggcgcttctagtaaatgtt

SEQ ID NO: 107852 - DNA, 25 bp, Artificial
  probe
  misc_feature (1)..(25): SEQ ID NO: 2694; WAN024C85_at; Start 1443; Stop 1467
gagagcagcatgtgaatttattcct

SEQ ID NO: 107853 - DNA, 25 bp, Artificial
  probe
  misc_feature (1)..(25): SEQ ID NO: 2694; WAN024C85_at; Start 850; Stop 874
tcaattgtaccagttaaagatggca

SEQ ID NO: 107854 - DNA, 25 bp, Artificial
  probe
  misc_feature (1)..(25): SEQ ID NO: 2694; WAN024C85_at; Start 1693; Stop 1717
gcaactgccactatacctggtaata

SEQ ID NO: 107855 - DNA, 25 bp, Artificial
  probe
  misc_feature (1)..(25): SEQ ID NO: 2694; WAN024C85_at; Start 1484; Stop 1508
tagcacaatctagaatgaatcttgc

SEQ ID NO: 107856 - DNA, 25 bp, Artificial
  probe
  misc_feature (1)..(25): SEQ ID NO: 2694; WAN024C85_at; Start 21; Stop 45
tgcaagagtgtctggagtctcacat

SEQ ID NO: 107857 - DNA, 25 bp, Artificial
  probe
  misc_feature (1)..(25): SEQ ID NO: 2694; WAN024C85_at; Start 583; Stop 607
catatacaagtgcaagaacgtttac

SEQ ID NO: 107858 - DNA, 25 bp, Artificial
  probe
  misc_feature (1)..(25): SEQ ID NO: 2694; WAN024C85_at; Start 1713; Stop 1737
taatactcctgtgataggtggtggc

SEQ ID NO: 107859 - DNA, 25 bp, Artificial
  probe
  misc_feature (1)..(25): SEQ ID NO: 5840; WAN024C86_at; Start 226; Stop 250
tgtatcatcgaagtaaaattctcca

SEQ ID NO: 107860 - DNA, 25 bp, Artificial
  probe
  misc_feature (1)..(25): SEQ ID NO: 5840; WAN024C86_at; Start 30; Stop 54
gctttcgatccgcatattgagcaat

SEQ ID NO: 107861 - DNA, 25 bp, Artificial
  probe
  misc_feature (1)..(25): SEQ ID NO: 5840; WAN024C86_at; Start 69; Stop 93
gatacttgttggtctgttgaatcaa

SEQ ID NO: 107862 - DNA, 25 bp, Artificial
  probe
  misc_feature (1)..(25): SEQ ID NO: 5840; WAN024C86_at; Start 131; Stop 155
gcaacgttgtctcggacagtcaaat

SEQ ID NO: 107863 - DNA, 25 bp, Artificial
  probe
  misc_feature (1)..(25): SEQ ID NO: 5840; WAN024C86_at; Start 136; Stop 160
gttgtctcggacagtcaaatgtggg

SEQ ID NO: 107864 - DNA, 25 bp, Artificial
  probe
  misc_feature (1)..(25): SEQ ID NO: 5840; WAN024C86_at; Start 86; Stop 110
tgaatcaattcttcttttggaacct

SEQ ID NO: 107865 - DNA, 25 bp, Artificial
  probe
  misc_feature (1)..(25): SEQ ID NO: 5840; WAN024C86_at; Start 116; Stop 140
tgcataagaccaaaagcaacgttgt

SEQ ID NO: 107866 - DNA, 25 bp, Artificial
  probe
  misc_feature (1)..(25): SEQ ID NO: 5840; WAN024C86_at; Start 35; Stop 59
cgatccgcatattgagcaatttgca

SEQ ID NO: 107867 - DNA, 25 bp, Artificial
  probe
  misc_feature (1)..(25): SEQ ID NO: 5840; WAN024C86_at; Start 188; Stop 212
ccgatattgcgtttgctgggttcca

SEQ ID NO: 107868 - DNA, 25 bp, Artificial
  probe
  misc_feature (1)..(25): SEQ ID NO: 5840; WAN024C86_at; Start 272; Stop 296
gcaatcatacgaagaagggtcgttt

SEQ ID NO: 107869 - DNA, 25 bp, Artificial
  probe
  misc_feature (1)..(25): SEQ ID NO: 5840; WAN024C86_at; Start 1; Stop 25
ttgttgttgtccaccactgagttta

SEQ ID NO: 107870 - DNA, 25 bp, Artificial
  probe
  misc_feature (1)..(25): SEQ ID NO: 5840; WAN024C86_at; Start 26; Stop 50
tcgggctttcgatccgcatattgag

SEQ ID NO: 107871 - DNA, 25 bp, Artificial
  probe
  misc_feature (1)..(25): SEQ ID NO: 5840; WAN024C86_at; Start 145; Stop 169
gacagtcaaatgtgggaaaatagcg

SEQ ID NO: 107872 - DNA, 25 bp, Artificial
  probe
  misc_feature (1)..(25): SEQ ID NO: 5840; WAN024C86_at; Start 269; Stop 293
cctgcaatcatacgaagaagggtcg

SEQ ID NO: 107873 - DNA, 25 bp, Artificial
  probe
  misc_feature (1)..(25): SEQ ID NO: 5840; WAN024C86_at; Start 21; Stop 45
gtttatcgggctttcgatccgcata

SEQ ID NO: 107874 - DNA, 25 bp, Artificial
  probe
  misc_feature (1)..(25): SEQ ID NO: 5840; WAN024C86_at; Start 13; Stop 37
accactgagtttatcgggctttcga

SEQ ID NO: 107875 - DNA, 25 bp, Artificial
  probe
  misc_feature (1)..(25): SEQ ID NO: 5840; WAN024C86_at; Start 256; Stop 280
gatactgttgaaacctgcaatcata

SEQ ID NO: 107876 - DNA, 25 bp, Artificial
  probe
  misc_feature (1)..(25): SEQ ID NO: 5840; WAN024C86_at; Start 8; Stop 32
tgtccaccactgagtttatcgggct

SEQ ID NO: 107877 - DNA, 25 bp, Artificial
  probe
  misc_feature (1)..(25): SEQ ID NO: 5840; WAN024C86_at; Start 190; Stop 214
gatattgcgtttgctgggttccata

SEQ ID NO: 107878 - DNA, 25 bp, Artificial
  probe
  misc_feature (1)..(25): SEQ ID NO: 5840; WAN024C86_at; Start 150; Stop 174
tcaaatgtgggaaaatagcgtagtt

SEQ ID NO: 107879 - DNA, 25 bp, Artificial
  probe
  misc_feature (1)..(25): SEQ ID NO: 5840; WAN024C86_at; Start 58; Stop 82
catgagttcaagatacttgttggtc

SEQ ID NO: 107880 - DNA, 25 bp, Artificial
  probe
  misc_feature (1)..(25): SEQ ID NO: 5840; WAN024C86_at; Start 140; Stop 164
tctcggacagtcaaatgtgggaaaa

SEQ ID NO: 107881 - DNA, 25 bp, Artificial
  probe
  misc_feature (1)..(25): SEQ ID NO: 5840; WAN024C86_at; Start 285; Stop 309
gaagggtcgttttcccacatcctga

SEQ ID NO: 107882 - DNA, 25 bp, Artificial
  probe
  misc_feature (1)..(25): SEQ ID NO: 5840; WAN024C86_at; Start 261; Stop 285
tgttgaaacctgcaatcatacgaag

SEQ ID NO: 107883 - DNA, 25 bp, Artificial
  probe
  misc_feature (1)..(25): SEQ ID NO: 5840; WAN024C86_at; Start 202; Stop 226
gctgggttccatattattgattttt

SEQ ID NO: 107884 - DNA, 25 bp, Artificial
  probe
  misc_feature (1)..(25): SEQ ID NO: 5840; WAN024C86_at; Start 5; Stop 29
tgttgtccaccactgagtttatcgg

SEQ ID NO: 107885 - DNA, 25 bp, Artificial
  probe
  misc_feature (1)..(25): SEQ ID NO: 5840; WAN024C86_at; Start 197; Stop 221
cgtttgctgggttccatattattga

SEQ ID NO: 107886 - DNA, 25 bp, Artificial
  probe
  misc_feature (1)..(25): SEQ ID NO: 5840; WAN024C86_at; Start 47; Stop 71
tgagcaatttgcatgagttcaagat

SEQ ID NO: 107887 - DNA, 25 bp, Artificial
  probe
  misc_feature (1)..(25): SEQ ID NO: 5840; WAN024C86_at; Start 75; Stop 99
tgttggtctgttgaatcaattcttc

SEQ ID NO: 107888 - DNA, 25 bp, Artificial
  probe
  misc_feature (1)..(25): SEQ ID NO: 5840; WAN024C86_at; Start 126; Stop 150
caaaagcaacgttgtctcggacagt

SEQ ID NO: 107889 - DNA, 25 bp, Artificial
  probe
  misc_feature (1)..(25): SEQ ID NO: 5840; WAN024C86_at; Start 155; Stop 179
tgtgggaaaatagcgtagttttgga

SEQ ID NO: 107890 - DNA, 25 bp, Artificial
  probe
  misc_feature (1)..(25): SEQ ID NO: 5840; WAN024C86_at; Start 120; Stop 144
taagaccaaaagcaacgttgtctcg

SEQ ID NO: 107891 - DNA, 25 bp, Artificial
  probe
  misc_feature (1)..(25): SEQ ID NO: 5840; WAN024C86_at; Start 95; Stop 119
tcttcttttggaaccttcttttgca

SEQ ID NO: 107892 - DNA, 25 bp, Artificial
  probe
  misc_feature (1)..(25): SEQ ID NO: 5840; WAN024C86_at; Start 104; Stop 128
ggaaccttcttttgcataagaccaa

SEQ ID NO: 107893 - DNA, 25 bp, Artificial
  probe
  misc_feature (1)..(25): SEQ ID NO: 1635; WAN024C87_at; Start 38; Stop 62
accacgatgtccctgttattgagaa

SEQ ID NO: 107894 - DNA, 25 bp, Artificial
  probe
  misc_feature (1)..(25): SEQ ID NO: 1635; WAN024C87_at; Start 604; Stop 628
gaccaaattgctgttatgaaagatg

SEQ ID NO: 107895 - DNA, 25 bp, Artificial
  probe
  misc_feature (1)..(25): SEQ ID NO: 1635; WAN024C87_at; Start 835; Stop 859
cgtcccgaagagtttatcaaagatg

SEQ ID NO: 107896 - DNA, 25 bp, Artificial
  probe
  misc_feature (1)..(25): SEQ ID NO: 1635; WAN024C87_at; Start 112; Stop 136
tcaggatgtgggaaaacgacccttc

SEQ ID NO: 107897 - DNA, 25 bp, Artificial
  probe
  misc_feature (1)..(25): SEQ ID NO: 1635; WAN024C87_at; Start 462; Stop 486
tctcctcatggacgagccacttagt

SEQ ID NO: 107898 - DNA, 25 bp, Artificial
  probe
  misc_feature (1)..(25): SEQ ID NO: 1635; WAN024C87_at; Start 86; Stop 110
gaagtctctttacccttcttggagc

SEQ ID NO: 107899 - DNA, 25 bp, Artificial
  probe
  misc_feature (1)..(25): SEQ ID NO: 1635; WAN024C87_at; Start 766; Stop 790
tcagatggctatgcccttcgaatgc

SEQ ID NO: 107900 - DNA, 25 bp, Artificial
  probe
  misc_feature (1)..(25): SEQ ID NO: 1635; WAN024C87_at; Start 919; Stop 943
tatttcattgagacaggttttgcct

SEQ ID NO: 107901 - DNA, 25 bp, Artificial
  probe
  misc_feature (1)..(25): SEQ ID NO: 1635; WAN024C87_at; Start 1054; Stop 1078
tcccaaaacctgataaaaggagtca

SEQ ID NO: 107902 - DNA, 25 bp, Artificial
  probe
  misc_feature (1)..(25): SEQ ID NO: 1635; WAN024C87_at; Start 295; Stop 319
ggtcttatgcaaaagaaggttccaa

SEQ ID NO: 107903 - DNA, 25 bp, Artificial
  probe
  misc_feature (1)..(25): SEQ ID NO: 1635; WAN024C87_at; Start 699; Stop 723
tatcggacgcacaaatattatccct

SEQ ID NO: 107904 - DNA, 25 bp, Artificial
  probe
  misc_feature (1)..(25): SEQ ID NO: 1635; WAN024C87_at; Start 100; Stop 124
cttcttggagcttcaggatgtggga

SEQ ID NO: 107905 - DNA, 25 bp, Artificial
  probe
  misc_feature (1)..(25): SEQ ID NO: 1635; WAN024C87_at; Start 893; Stop 917
gcgtctatcttggactaaatacgga

SEQ ID NO: 107906 - DNA, 25 bp, Artificial
  probe
  misc_feature (1)..(25): SEQ ID NO: 1635; WAN024C87_at; Start 447; Stop 471
ggttaatccaagtgttctcctcatg

SEQ ID NO: 107907 - DNA, 25 bp, Artificial
  probe
  misc_feature (1)..(25): SEQ ID NO: 1635; WAN024C87_at; Start 349; Stop 373
tatcttgaactcatgcaaattgctc

SEQ ID NO: 107908 - DNA, 25 bp, Artificial
  probe
  misc_feature (1)..(25): SEQ ID NO: 1635; WAN024C87_at; Start 386; Stop 410
gaaagcccgataaactcagtggtgg

SEQ ID NO: 107909 - DNA, 25 bp, Artificial
  probe
  misc_feature (1)..(25): SEQ ID NO: 1635; WAN024C87_at; Start 128; Stop 152
cgacccttcttcgtatgattgcagg

SEQ ID NO: 107910 - DNA, 25 bp, Artificial
  probe
  misc_feature (1)..(25): SEQ ID NO: 1635; WAN024C87_at; Start 372; Stop 396
tcaatatgcggatcgaaagcccgat

SEQ ID NO: 107911 - DNA, 25 bp, Artificial
  probe
  misc_feature (1)..(25): SEQ ID NO: 1635; WAN024C87_at; Start 669; Stop 693
taaaccagctaatgagtttgtggca

SEQ ID NO: 107912 - DNA, 25 bp, Artificial
  probe
  misc_feature (1)..(25): SEQ ID NO: 1635; WAN024C87_at; Start 741; Stop 765
gagcgacggcgcttatatcgtcttt

SEQ ID NO: 107913 - DNA, 25 bp, Artificial
  probe
  misc_feature (1)..(25): SEQ ID NO: 1635; WAN024C87_at; Start 685; Stop 709
tttgtggcaacctttatcggacgca

SEQ ID NO: 107914 - DNA, 25 bp, Artificial
  probe
  misc_feature (1)..(25): SEQ ID NO: 1635; WAN024C87_at; Start 209; Stop 233
tggaacccagcaaacgcaatatcgg

SEQ ID NO: 107915 - DNA, 25 bp, Artificial
  probe
  misc_feature (1)..(25): SEQ ID NO: 1635; WAN024C87_at; Start 1037; Stop 1061
tcttttctgcagatggttcccaaaa

SEQ ID NO: 107916 - DNA, 25 bp, Artificial
  probe
  misc_feature (1)..(25): SEQ ID NO: 1635; WAN024C87_at; Start 819; Stop 843
tattcatgtaagcattcgtcccgaa

SEQ ID NO: 107917 - DNA, 25 bp, Artificial
  probe
  misc_feature (1)..(25): SEQ ID NO: 1635; WAN024C87_at; Start 565; Stop 589
tatgtaacccacgaccaagaagaag

SEQ ID NO: 107918 - DNA, 25 bp, Artificial
  probe
  misc_feature (1)..(25): SEQ ID NO: 1635; WAN024C87_at; Start 795; Stop 819
tcttgatcaggttgaggagcaagct

SEQ ID NO: 107919 - DNA, 25 bp, Artificial
  probe
  misc_feature (1)..(25): SEQ ID NO: 1635; WAN024C87_at; Start 329; Stop 353
tgattcaacagaccaacaagtatct

SEQ ID NO: 107920 - DNA, 25 bp, Artificial
  probe
  misc_feature (1)..(25): SEQ ID NO: 1635; WAN024C87_at; Start 280; Stop 304
gacaacgttgcttttggtcttatgc

SEQ ID NO: 107921 - DNA, 25 bp, Artificial
  probe
  misc_feature (1)..(25): SEQ ID NO: 1635; WAN024C87_at; Start 727; Stop 751
aatcttgaaaaacggagcgacggcg

SEQ ID NO: 107922 - DNA, 25 bp, Artificial
  probe
  misc_feature (1)..(25): SEQ ID NO: 1635; WAN024C87_at; Start 478; Stop 502
ccacttagtaatctggaggccaaac

SEQ ID NO: 107923 - DNA, 25 bp, Artificial
  probe
  misc_feature (1)..(25): SEQ ID NO: 1635; WAN024C87_at; Start 433; Stop 457
gcatgcgccttagcggttaatccaa

SEQ ID NO: 107924 - DNA, 25 bp, Artificial
  probe
  misc_feature (1)..(25): SEQ ID NO: 1635; WAN024C87_at; Start 401; Stop 425
tcagtggtggacaacaacaacgtgt

SEQ ID NO: 107925 - DNA, 25 bp, Artificial
  probe
  misc_feature (1)..(25): SEQ ID NO: 1635; WAN024C87_at; Start 416; Stop 440
aacaacgtgtcaccttggcatgcgc

SEQ ID NO: 107926 - DNA, 25 bp, Artificial
  probe
  misc_feature (1)..(25): SEQ ID NO: 1635; WAN024C87_at; Start 586; Stop 610
gaagccatggctatttcagaccaaa

SEQ ID NO: 107927 - DNA, 25 bp, Artificial
  probe
  misc_feature (1)..(25): SEQ ID NO: 5419; WAN024C88_at; Start 132; Stop 156
tatggcgattatcattgccttggca

SEQ ID NO: 107928 - DNA, 25 bp, Artificial
  probe
  misc_feature (1)..(25): SEQ ID NO: 5419; WAN024C88_at; Start 904; Stop 928
gctatttatacagaggttctcagag

SEQ ID NO: 107929 - DNA, 25 bp, Artificial
  probe
  misc_feature (1)..(25): SEQ ID NO: 5419; WAN024C88_at; Start 35; Stop 59
gaacgcctatgttgattggcgaagg

SEQ ID NO: 107930 - DNA, 25 bp, Artificial
  probe
  misc_feature (1)..(25): SEQ ID NO: 5419; WAN024C88_at; Start 399; Stop 423
tatgggatctgctattttcaatacc

SEQ ID NO: 107931 - DNA, 25 bp, Artificial
  probe
  misc_feature (1)..(25): SEQ ID NO: 5419; WAN024C88_at; Start 523; Stop 547
gacagcctcagtatggtaccttata

SEQ ID NO: 107932 - DNA, 25 bp, Artificial
  probe
  misc_feature (1)..(25): SEQ ID NO: 5419; WAN024C88_at; Start 719; Stop 743
caccaagtattgaagaagctgctga

SEQ ID NO: 107933 - DNA, 25 bp, Artificial
  probe
  misc_feature (1)..(25): SEQ ID NO: 5419; WAN024C88_at; Start 556; Stop 580
ggaaccgttctagggattgccttca

SEQ ID NO: 107934 - DNA, 25 bp, Artificial
  probe
  misc_feature (1)..(25): SEQ ID NO: 5419; WAN024C88_at; Start 165; Stop 189
tatccaaaaacacattgcaaaccgc

SEQ ID NO: 107935 - DNA, 25 bp, Artificial
  probe
  misc_feature (1)..(25): SEQ ID NO: 5419; WAN024C88_at; Start 881; Stop 905
tcaaaacaagaacaatgactgtagc

SEQ ID NO: 107936 - DNA, 25 bp, Artificial
  probe
  misc_feature (1)..(25): SEQ ID NO: 5419; WAN024C88_at; Start 468; Stop 492
gacatttatctcctacctagccgtt

SEQ ID NO: 107937 - DNA, 25 bp, Artificial
  probe
  misc_feature (1)..(25): SEQ ID NO: 5419; WAN024C88_at; Start 614; Stop 638
gatttcttatgattacagggactgc

SEQ ID NO: 107938 - DNA, 25 bp, Artificial
  probe
  misc_feature (1)..(25): SEQ ID NO: 5419; WAN024C88_at; Start 579; Stop 603
catttcttccttcaatactggtcta

SEQ ID NO: 107939 - DNA, 25 bp, Artificial
  probe
  misc_feature (1)..(25): SEQ ID NO: 5419; WAN024C88_at; Start 15; Stop 39
gagagcattctcagactttggaacg

SEQ ID NO: 107940 - DNA, 25 bp, Artificial
  probe
  misc_feature (1)..(25): SEQ ID NO: 5419; WAN024C88_at; Start 98; Stop 122
ttagcgaggttggaggaaattctgc

SEQ ID NO: 107941 - DNA, 25 bp, Artificial
  probe
  misc_feature (1)..(25): SEQ ID NO: 5419; WAN024C88_at; Start 115; Stop 139
aattctgcttttgcaattatggcga

SEQ ID NO: 107942 - DNA, 25 bp, Artificial
  probe
  misc_feature (1)..(25): SEQ ID NO: 5419; WAN024C88_at; Start 920; Stop 944
ttctcagaggaaattacggtgtagc

SEQ ID NO: 107943 - DNA, 25 bp, Artificial
  probe
  misc_feature (1)..(25): SEQ ID NO: 5419; WAN024C88_at; Start 681; Stop 705
tactattcgctcatctgttgctagc

SEQ ID NO: 107944 - DNA, 25 bp, Artificial
  probe
  misc_feature (1)..(25): SEQ ID NO: 5419; WAN024C88_at; Start 81; Stop 105
gatttatacccaatttattagcgag

SEQ ID NO: 107945 - DNA, 25 bp, Artificial
  probe
  misc_feature (1)..(25): SEQ ID NO: 5419; WAN024C88_at; Start 64; Stop 88
cggactttccctgtcctgatttata

SEQ ID NO: 107946 - DNA, 25 bp, Artificial
  probe
  misc_feature (1)..(25): SEQ ID NO: 5419; WAN024C88_at; Start 256; Stop 280
gccatttatgcaacagtctacggaa

SEQ ID NO: 107947 - DNA, 25 bp, Artificial
  probe
  misc_feature (1)..(25): SEQ ID NO: 5419; WAN024C88_at; Start 509; Stop 533
ttacaaacttaattgacagcctcag

SEQ ID NO: 107948 - DNA, 25 bp, Artificial
  probe
  misc_feature (1)..(25): SEQ ID NO: 5419; WAN024C88_at; Start 775; Stop 799
gctaagattacaactccaatgatgc

SEQ ID NO: 107949 - DNA, 25 bp, Artificial
  probe
  misc_feature (1)..(25): SEQ ID NO: 5419; WAN024C88_at; Start 866; Stop 890
tcctcctctacaatgtcaaaacaag

SEQ ID NO: 107950 - DNA, 25 bp, Artificial
  probe
  misc_feature (1)..(25): SEQ ID NO: 5419; WAN024C88_at; Start 148; Stop 172
gccttggcaattttccttatccaaa

SEQ ID NO: 107951 - DNA, 25 bp, Artificial
  probe
  misc_feature (1)..(25): SEQ ID NO: 5419; WAN024C88_at; Start 629; Stop 653
cagggactgctttcatcttgattat

SEQ ID NO: 107952 - DNA, 25 bp, Artificial
  probe
  misc_feature (1)..(25): SEQ ID NO: 5419; WAN024C88_at; Start 200; Stop 224
gcatgaatctgctccatccaattga

SEQ ID NO: 107953 - DNA, 25 bp, Artificial
  probe
  misc_feature (1)..(25): SEQ ID NO: 5419; WAN024C88_at; Start 702; Stop 726
tagcttacaacaaatagcaccaagt

SEQ ID NO: 107954 - DNA, 25 bp, Artificial
  probe
  misc_feature (1)..(25): SEQ ID NO: 5419; WAN024C88_at; Start 955; Stop 979
tcaactatcctgactgttctaacag

SEQ ID NO: 107955 - DNA, 25 bp, Artificial
  probe
  misc_feature (1)..(25): SEQ ID NO: 5419; WAN024C88_at; Start 420; Stop 444
taccattcgtatccctttgattgcc

SEQ ID NO: 107956 - DNA, 25 bp, Artificial
  probe
  misc_feature (1)..(25): SEQ ID NO: 5419; WAN024C88_at; Start 544; Stop 568
tatattgtaccaggaaccgttctag

SEQ ID NO: 107957 - DNA, 25 bp, Artificial
  probe
  misc_feature (1)..(25): SEQ ID NO: 5419; WAN024C88_at; Start 181; Stop 205
gcaaaccgctacagtttcagcatga

SEQ ID NO: 107958 - DNA, 25 bp, Artificial
  probe
  misc_feature (1)..(25): SEQ ID NO: 5419; WAN024C88_at; Start 969; Stop 993
tgttctaacagtaggttccttgctc

SEQ ID NO: 107959 - DNA, 25 bp, Artificial
  probe
  misc_feature (1)..(25): SEQ ID NO: 5419; WAN024C88_at; Start 360; Stop 384
aggttattctccaaacagttacaag

SEQ ID NO: 107960 - DNA, 25 bp, Artificial
  probe
  misc_feature (1)..(25): SEQ ID NO: 5419; WAN024C88_at; Start 742; Stop 766
gaaagcttaggaagtagtcgtctca

SEQ ID NO: 107961 - DNA, 25 bp, Artificial
  probe
  misc_feature (1)..(25): SEQ ID NO: 2042; WAN024C89_at; Start 15; Stop 39
cattaatcagataaacaatggttcc

SEQ ID NO: 107962 - DNA, 25 bp, Artificial
  probe
  misc_feature (1)..(25): SEQ ID NO: 2042; WAN024C89_at; Start 112; Stop 136
aaagccttccttgattcggccactg

SEQ ID NO: 107963 - DNA, 25 bp, Artificial
  probe
  misc_feature (1)..(25): SEQ ID NO: 2042; WAN024C89_at; Start 363; Stop 387
taattcccatggtctgaatggtacg

SEQ ID NO: 107964 - DNA, 25 bp, Artificial
  probe
  misc_feature (1)..(25): SEQ ID NO: 2042; WAN024C89_at; Start 51; Stop 75
catggctgacaacaagggcgttacc

SEQ ID NO: 107965 - DNA, 25 bp, Artificial
  probe
  misc_feature (1)..(25): SEQ ID NO: 2042; WAN024C89_at; Start 216; Stop 240
gaacgtggtccacattaaagatacg

SEQ ID NO: 107966 - DNA, 25 bp, Artificial
  probe
  misc_feature (1)..(25): SEQ ID NO: 2042; WAN024C89_at; Start 338; Stop 362
ccctgcaagccaagttcttcaagga

SEQ ID NO: 107967 - DNA, 25 bp, Artificial
  probe
  misc_feature (1)..(25): SEQ ID NO: 2042; WAN024C89_at; Start 243; Stop 267
gaataatgcccatgaaaagatcgcc

SEQ ID NO: 107968 - DNA, 25 bp, Artificial
  probe
  misc_feature (1)..(25): SEQ ID NO: 2042; WAN024C89_at; Start 377; Stop 401
tgaatggtacgaccagaatcactcg

SEQ ID NO: 107969 - DNA, 25 bp, Artificial
  probe
  misc_feature (1)..(25): SEQ ID NO: 2042; WAN024C89_at; Start 231; Stop 255
taaagatacgaggaataatgcccat

SEQ ID NO: 107970 - DNA, 25 bp, Artificial
  probe
  misc_feature (1)..(25): SEQ ID NO: 2042; WAN024C89_at; Start 346; Stop 370
gccaagttcttcaaggataattccc

SEQ ID NO: 107971 - DNA, 25 bp, Artificial
  probe
  misc_feature (1)..(25): SEQ ID NO: 2042; WAN024C89_at; Start 256; Stop 280
gaaaagatcgccatcataggctcca

SEQ ID NO: 107972 - DNA, 25 bp, Artificial
  probe
  misc_feature (1)..(25): SEQ ID NO: 2042; WAN024C89_at; Start 188; Stop 212
tcagccagttcagcataagacaatt

SEQ ID NO: 107973 - DNA, 25 bp, Artificial
  probe
  misc_feature (1)..(25): SEQ ID NO: 2042; WAN024C89_at; Start 34; Stop 58
ggttccaatagtcattccatggctg

SEQ ID NO: 107974 - DNA, 25 bp, Artificial
  probe
  misc_feature (1)..(25): SEQ ID NO: 2042; WAN024C89_at; Start 356; Stop 380
tcaaggataattcccatggtctgaa

SEQ ID NO: 107975 - DNA, 25 bp, Artificial
  probe
  misc_feature (1)..(25): SEQ ID NO: 2042; WAN024C89_at; Start 307; Stop 331
gatacgcttgtccatgcgataaggg

SEQ ID NO: 107976 - DNA, 25 bp, Artificial
  probe
  misc_feature (1)..(25): SEQ ID NO: 2042; WAN024C89_at; Start 277; Stop 301
tccatcaaaactaccgaaacaccat

SEQ ID NO: 107977 - DNA, 25 bp, Artificial
  probe
  misc_feature (1)..(25): SEQ ID NO: 2042; WAN024C89_at; Start 384; Stop 408
tacgaccagaatcactcgaataagc

SEQ ID NO: 107978 - DNA, 25 bp, Artificial
  probe
  misc_feature (1)..(25): SEQ ID NO: 2042; WAN024C89_at; Start 100; Stop 124
tgcaatcatttcaaagccttccttg

SEQ ID NO: 107979 - DNA, 25 bp, Artificial
  probe
  misc_feature (1)..(25): SEQ ID NO: 2042; WAN024C89_at; Start 46; Stop 70
cattccatggctgacaacaagggcg

SEQ ID NO: 107980 - DNA, 25 bp, Artificial
  probe
  misc_feature (1)..(25): SEQ ID NO: 2042; WAN024C89_at; Start 181; Stop 205
caagccctcagccagttcagcataa

SEQ ID NO: 107981 - DNA, 25 bp, Artificial
  probe
  misc_feature (1)..(25): SEQ ID NO: 2042; WAN024C89_at; Start 292; Stop 316
gaaacaccattctctgatacgcttg

SEQ ID NO: 107982 - DNA, 25 bp, Artificial
  probe
  misc_feature (1)..(25): SEQ ID NO: 2042; WAN024C89_at; Start 310; Stop 334
acgcttgtccatgcgataagggatt

SEQ ID NO: 107983 - DNA, 25 bp, Artificial
  probe
  misc_feature (1)..(25): SEQ ID NO: 2042; WAN024C89_at; Start 124; Stop 148
gattcggccactgagtttttcccag

SEQ ID NO: 107984 - DNA, 25 bp, Artificial
  probe
  misc_feature (1)..(25): SEQ ID NO: 2042; WAN024C89_at; Start 201; Stop 225
cataagacaattggtgaacgtggtc

SEQ ID NO: 107985 - DNA, 25 bp, Artificial
  probe
  misc_feature (1)..(25): SEQ ID NO: 2042; WAN024C89_at; Start 66; Stop 90
gggcgttacctccaccttgatcttc

SEQ ID NO: 107986 - DNA, 25 bp, Artificial
  probe
  misc_feature (1)..(25): SEQ ID NO: 2042; WAN024C89_at; Start 270; Stop 294
cataggctccatcaaaactaccgaa

SEQ ID NO: 107987 - DNA, 25 bp, Artificial
  probe
  misc_feature (1)..(25): SEQ ID NO: 2042; WAN024C89_at; Start 22; Stop 46
cagataaacaatggttccaatagtc

SEQ ID NO: 107988 - DNA, 25 bp, Artificial
  probe
  misc_feature (1)..(25): SEQ ID NO: 2042; WAN024C89_at; Start 3; Stop 27
gcggatgcatgccattaatcagata

SEQ ID NO: 107989 - DNA, 25 bp, Artificial
  probe
  misc_feature (1)..(25): SEQ ID NO: 2042; WAN024C89_at; Start 79; Stop 103
accttgatcttccatttcttttgca

SEQ ID NO: 107990 - DNA, 25 bp, Artificial
  probe
  misc_feature (1)..(25): SEQ ID NO: 2042; WAN024C89_at; Start 246; Stop 270
taatgcccatgaaaagatcgccatc

SEQ ID NO: 107991 - DNA, 25 bp, Artificial
  probe
  misc_feature (1)..(25): SEQ ID NO: 2042; WAN024C89_at; Start 54; Stop 78
ggctgacaacaagggcgttacctcc

SEQ ID NO: 107992 - DNA, 25 bp, Artificial
  probe
  misc_feature (1)..(25): SEQ ID NO: 2042; WAN024C89_at; Start 135; Stop 159
tgagtttttcccagccttcagccca

SEQ ID NO: 107993 - DNA, 25 bp, Artificial
  probe
  misc_feature (1)..(25): SEQ ID NO: 2042; WAN024C89_at; Start 206; Stop 230
gacaattggtgaacgtggtccacat

SEQ ID NO: 107994 - DNA, 25 bp, Artificial
  probe
  misc_feature (1)..(25): SEQ ID NO: 2042; WAN024C89_at; Start 159; Stop 183
aaccagctgtatcgacctctaccaa

SEQ ID NO: 107995 - DNA, 25 bp, Artificial
  probe
  misc_feature (1)..(25): SEQ ID NO: 2610; WAN024C8A_at; Start 223; Stop 247
tattcgagtgattctggtcgtacca

SEQ ID NO: 107996 - DNA, 25 bp, Artificial
  probe
  misc_feature (1)..(25): SEQ ID NO: 2610; WAN024C8A_at; Start 358; Stop 382
gatggcgatcttttcatgggcatta

SEQ ID NO: 107997 - DNA, 25 bp, Artificial
  probe
  misc_feature (1)..(25): SEQ ID NO: 2610; WAN024C8A_at; Start 525; Stop 549
tgcaaaagaaatggaagatcaaggt

SEQ ID NO: 107998 - DNA, 25 bp, Artificial
  probe
  misc_feature (1)..(25): SEQ ID NO: 2610; WAN024C8A_at; Start 694; Stop 718
ggtgaccgtagttaccgagagctag

SEQ ID NO: 107999 - DNA, 25 bp, Artificial
  probe
  misc_feature (1)..(25): SEQ ID NO: 2610; WAN024C8A_at; Start 70; Stop 94
cgattgtatttggtacgtcatggca

SEQ ID NO: 108000 - DNA, 25 bp, Artificial
  probe
  misc_feature (1)..(25): SEQ ID NO: 2610; WAN024C8A_at; Start 372; Stop 396
catgggcattattcctcgtatcttt

SEQ ID NO: 108001 - DNA, 25 bp, Artificial
  probe
  misc_feature (1)..(25): SEQ ID NO: 2610; WAN024C8A_at; Start 172; Stop 196
caagagttaggaatcggtttgcgag

SEQ ID NO: 108002 - DNA, 25 bp, Artificial
  probe
  misc_feature (1)..(25): SEQ ID NO: 2610; WAN024C8A_at; Start 406; Stop 430
cacgttcaccaattgtcttatgctg

SEQ ID NO: 108003 - DNA, 25 bp, Artificial
  probe
  misc_feature (1)..(25): SEQ ID NO: 2610; WAN024C8A_at; Start 159; Stop 183
tgaacgagggattcaagagttagga

SEQ ID NO: 108004 - DNA, 25 bp, Artificial
  probe
  misc_feature (1)..(25): SEQ ID NO: 2610; WAN024C8A_at; Start 103; Stop 127
tttaacacgattggtcgcgcgcaag

SEQ ID NO: 108005 - DNA, 25 bp, Artificial
  probe
  misc_feature (1)..(25): SEQ ID NO: 2610; WAN024C8A_at; Start 570; Stop 594
cagccatggaatgactattggaacc

SEQ ID NO: 108006 - DNA, 25 bp, Artificial
  probe
  misc_feature (1)..(25): SEQ ID NO: 2610; WAN024C8A_at; Start 30; Stop 54
tataatagaagcaaacggaggacgg

SEQ ID NO: 108007 - DNA, 25 bp, Artificial
  probe
  misc_feature (1)..(25): SEQ ID NO: 2610; WAN024C8A_at; Start 194; Stop 218
gagaatctgatctacagtttgagcg

SEQ ID NO: 108008 - DNA, 25 bp, Artificial
  probe
  misc_feature (1)..(25): SEQ ID NO: 2610; WAN024C8A_at; Start 185; Stop 209
tcggtttgcgagaatctgatctaca

SEQ ID NO: 108009 - DNA, 25 bp, Artificial
  probe
  misc_feature (1)..(25): SEQ ID NO: 2610; WAN024C8A_at; Start 538; Stop 562
gaagatcaaggtggaggtaacgccc

SEQ ID NO: 108010 - DNA, 25 bp, Artificial
  probe
  misc_feature (1)..(25): SEQ ID NO: 2610; WAN024C8A_at; Start 445; Stop 469
ttggtagaggtcgatacagctggtt

SEQ ID NO: 108011 - DNA, 25 bp, Artificial
  probe
  misc_feature (1)..(25): SEQ ID NO: 2610; WAN024C8A_at; Start 421; Stop 445
tcttatgctgaactggctgagggct

SEQ ID NO: 108012 - DNA, 25 bp, Artificial
  probe
  misc_feature (1)..(25): SEQ ID NO: 2610; WAN024C8A_at; Start 608; Stop 632
ttaatggcatgcatccgcatggtct

SEQ ID NO: 108013 - DNA, 25 bp, Artificial
  probe
  misc_feature (1)..(25): SEQ ID NO: 2610; WAN024C8A_at; Start 582; Stop 606
gactattggaaccattgtttatctg

SEQ ID NO: 108014 - DNA, 25 bp, Artificial
  probe
  misc_feature (1)..(25): SEQ ID NO: 2610; WAN024C8A_at; Start 87; Stop 111
tcatggcaagaccatgtttaacacg

SEQ ID NO: 108015 - DNA, 25 bp, Artificial
  probe
  misc_feature (1)..(25): SEQ ID NO: 2610; WAN024C8A_at; Start 343; Stop 367
tttgatggagcctatgatggcgatc

SEQ ID NO: 108016 - DNA, 25 bp, Artificial
  probe
  misc_feature (1)..(25): SEQ ID NO: 2610; WAN024C8A_at; Start 331; Stop 355
tgtttcggtagttttgatggagcct

SEQ ID NO: 108017 - DNA, 25 bp, Artificial
  probe
  misc_feature (1)..(25): SEQ ID NO: 2610; WAN024C8A_at; Start 146; Stop 170
taactgctgaaggtgaacgagggat

SEQ ID NO: 108018 - DNA, 25 bp, Artificial
  probe
  misc_feature (1)..(25): SEQ ID NO: 2610; WAN024C8A_at; Start 132; Stop 156
gagcgatactcccttaactgctgaa

SEQ ID NO: 108019 - DNA, 25 bp, Artificial
  probe
  misc_feature (1)..(25): SEQ ID NO: 2610; WAN024C8A_at; Start 556; Stop 580
aacgcccttgttgtcagccatggaa

SEQ ID NO: 108020 - DNA, 25 bp, Artificial
  probe
  misc_feature (1)..(25): SEQ ID NO: 2610; WAN024C8A_at; Start 684; Stop 708
tgaagttgtcggtgaccgtagttac

SEQ ID NO: 108021 - DNA, 25 bp, Artificial
  probe
  misc_feature (1)..(25): SEQ ID NO: 2610; WAN024C8A_at; Start 706; Stop 730
taccgagagctaggacgtgagaaga

SEQ ID NO: 108022 - DNA, 25 bp, Artificial
  probe
  misc_feature (1)..(25): SEQ ID NO: 2610; WAN024C8A_at; Start 399; Stop 423
tgtggaccacgttcaccaattgtct

SEQ ID NO: 108023 - DNA, 25 bp, Artificial
  probe
  misc_feature (1)..(25): SEQ ID NO: 2610; WAN024C8A_at; Start 238; Stop 262
ggtcgtaccattcagaccatgggaa

SEQ ID NO: 108024 - DNA, 25 bp, Artificial
  probe
  misc_feature (1)..(25): SEQ ID NO: 2610; WAN024C8A_at; Start 385; Stop 409
cctcgtatctttaatgtggaccacg

SEQ ID NO: 108025 - DNA, 25 bp, Artificial
  probe
  misc_feature (1)..(25): SEQ ID NO: 2610; WAN024C8A_at; Start 297; Stop 321
cccttatcgcatggacaagcgtatc

SEQ ID NO: 108026 - DNA, 25 bp, Artificial
  probe
  misc_feature (1)..(25): SEQ ID NO: 2610; WAN024C8A_at; Start 118; Stop 142
cgcgcgcaaggttggagcgatactc

SEQ ID NO: 108027 - DNA, 25 bp, Artificial
  probe
  misc_feature (1)..(25): SEQ ID NO: 2610; WAN024C8A_at; Start 601; Stop 625
tatctgattaatggcatgcatccgc

SEQ ID NO: 108028 - DNA, 25 bp, Artificial
  probe
  misc_feature (1)..(25): SEQ ID NO: 2610; WAN024C8A_at; Start 312; Stop 336
caagcgtatcagagaatggtgtttc

SEQ ID NO: 108029 - DNA, 25 bp, Artificial
  probe
  misc_feature (1)..(25): SEQ ID NO: 2511; WAN024C8B_at; Start 86; Stop 110
caatcgtgacaactgaagctcgtgc

SEQ ID NO: 108030 - DNA, 25 bp, Artificial
  probe
  misc_feature (1)..(25): SEQ ID NO: 2511; WAN024C8B_at; Start 272; Stop 296
tgttctcagaaatcgcacctcgtta

SEQ ID NO: 108031 - DNA, 25 bp, Artificial
  probe
  misc_feature (1)..(25): SEQ ID NO: 2511; WAN024C8B_at; Start 225; Stop 249
tgatgaagcaactgataagtacact

SEQ ID NO: 108032 - DNA, 25 bp, Artificial
  probe
  misc_feature (1)..(25): SEQ ID NO: 2511; WAN024C8B_at; Start 53; Stop 77
gcgatttgacaactgaccttttgat

SEQ ID NO: 108033 - DNA, 25 bp, Artificial
  probe
  misc_feature (1)..(25): SEQ ID NO: 2511; WAN024C8B_at; Start 81; Stop 105
cgaatcaatcgtgacaactgaagct

SEQ ID NO: 108034 - DNA, 25 bp, Artificial
  probe
  misc_feature (1)..(25): SEQ ID NO: 2511; WAN024C8B_at; Start 214; Stop 238
tctgaaaactatgatgaagcaactg

SEQ ID NO: 108035 - DNA, 25 bp, Artificial
  probe
  misc_feature (1)..(25): SEQ ID NO: 2511; WAN024C8B_at; Start 106; Stop 130
cgtgctaaagaaatccgtaaaactg

SEQ ID NO: 108036 - DNA, 25 bp, Artificial
  probe
  misc_feature (1)..(25): SEQ ID NO: 2511; WAN024C8B_at; Start 295; Stop 319
tatgctgaacgtaacggtggataca

SEQ ID NO: 108037 - DNA, 25 bp, Artificial
  probe
  misc_feature (1)..(25): SEQ ID NO: 2511; WAN024C8B_at; Start 140; Stop 164
tgattactctaggtaaacgtggtga

SEQ ID NO: 108038 - DNA, 25 bp, Artificial
  probe
  misc_feature (1)..(25): SEQ ID NO: 2511; WAN024C8B_at; Start 280; Stop 304
gaaatcgcacctcgttatgctgaac

SEQ ID NO: 108039 - DNA, 25 bp, Artificial
  probe
  misc_feature (1)..(25): SEQ ID NO: 2511; WAN024C8B_at; Start 182; Stop 206
aagcagctgctttcgtacgtaatga

SEQ ID NO: 108040 - DNA, 25 bp, Artificial
  probe
  misc_feature (1)..(25): SEQ ID NO: 2511; WAN024C8B_at; Start 7; Stop 31
taccgtaaactaggacgcactagct

SEQ ID NO: 108041 - DNA, 25 bp, Artificial
  probe
  misc_feature (1)..(25): SEQ ID NO: 2511; WAN024C8B_at; Start 243; Stop 267
gtacacttctactacagcacttcaa

SEQ ID NO: 108042 - DNA, 25 bp, Artificial
  probe
  misc_feature (1)..(25): SEQ ID NO: 2511; WAN024C8B_at; Start 195; Stop 219
cgtacgtaatgaaatcgcatctgaa

SEQ ID NO: 108043 - DNA, 25 bp, Artificial
  probe
  misc_feature (1)..(25): SEQ ID NO: 2511; WAN024C8B_at; Start 160; Stop 184
ggtgatttgcatgcacgtcgtcaag

SEQ ID NO: 108044 - DNA, 25 bp, Artificial
  probe
  misc_feature (1)..(25): SEQ ID NO: 2511; WAN024C8B_at; Start 366; Stop 390
ggcgatcatcgaattagtataacta

SEQ ID NO: 108045 - DNA, 25 bp, Artificial
  probe
  misc_feature (1)..(25): SEQ ID NO: 2511; WAN024C8B_at; Start 89; Stop 113
tcgtgacaactgaagctcgtgctaa

SEQ ID NO: 108046 - DNA, 25 bp, Artificial
  probe
  misc_feature (1)..(25): SEQ ID NO: 2511; WAN024C8B_at; Start 2; Stop 26
tggcttaccgtaaactaggacgcac

SEQ ID NO: 108047 - DNA, 25 bp, Artificial
  probe
  misc_feature (1)..(25): SEQ ID NO: 2511; WAN024C8B_at; Start 314; Stop 338
gatacactcgtatccttaaaactga

SEQ ID NO: 108048 - DNA, 25 bp, Artificial
  probe
  misc_feature (1)..(25): SEQ ID NO: 2511; WAN024C8B_at; Start 45; Stop 69
aatgcttcgcgatttgacaactgac

SEQ ID NO: 108049 - DNA, 25 bp, Artificial
  probe
  misc_feature (1)..(25): SEQ ID NO: 2511; WAN024C8B_at; Start 29; Stop 53
gctcacaacgtaaagcaatgcttcg

SEQ ID NO: 108050 - DNA, 25 bp, Artificial
  probe
  misc_feature (1)..(25): SEQ ID NO: 2511; WAN024C8B_at; Start 342; Stop 366
acgtcgtggtgatgcagcgccaatg

SEQ ID NO: 108051 - DNA, 25 bp, Artificial
  probe
  misc_feature (1)..(25): SEQ ID NO: 2511; WAN024C8B_at; Start 301; Stop 325
gaacgtaacggtggatacactcgta

SEQ ID NO: 108052 - DNA, 25 bp, Artificial
  probe
  misc_feature (1)..(25): SEQ ID NO: 2511; WAN024C8B_at; Start 39; Stop 63
taaagcaatgcttcgcgatttgaca

SEQ ID NO: 108053 - DNA, 25 bp, Artificial
  probe
  misc_feature (1)..(25): SEQ ID NO: 2511; WAN024C8B_at; Start 286; Stop 310
gcacctcgttatgctgaacgtaacg

SEQ ID NO: 108054 - DNA, 25 bp, Artificial
  probe
  misc_feature (1)..(25): SEQ ID NO: 2511; WAN024C8B_at; Start 19; Stop 43
ggacgcactagctcacaacgtaaag

SEQ ID NO: 108055 - DNA, 25 bp, Artificial
  probe
  misc_feature (1)..(25): SEQ ID NO: 2511; WAN024C8B_at; Start 169; Stop 193
catgcacgtcgtcaagcagctgctt

SEQ ID NO: 108056 - DNA, 25 bp, Artificial
  probe
  misc_feature (1)..(25): SEQ ID NO: 2511; WAN024C8B_at; Start 204; Stop 228
tgaaatcgcatctgaaaactatgat

SEQ ID NO: 108057 - DNA, 25 bp, Artificial
  probe
  misc_feature (1)..(25): SEQ ID NO: 2511; WAN024C8B_at; Start 238; Stop 262
gataagtacacttctactacagcac

SEQ ID NO: 108058 - DNA, 25 bp, Artificial
  probe
  misc_feature (1)..(25): SEQ ID NO: 2511; WAN024C8B_at; Start 357; Stop 381
agcgccaatggcgatcatcgaatta

SEQ ID NO: 108059 - DNA, 25 bp, Artificial
  probe
  misc_feature (1)..(25): SEQ ID NO: 2511; WAN024C8B_at; Start 149; Stop 173
taggtaaacgtggtgatttgcatgc

SEQ ID NO: 108060 - DNA, 25 bp, Artificial
  probe
  misc_feature (1)..(25): SEQ ID NO: 2511; WAN024C8B_at; Start 125; Stop 149
aaactgttgaaaaaatgattactct

SEQ ID NO: 108061 - DNA, 25 bp, Artificial
  probe
  misc_feature (1)..(25): SEQ ID NO: 2511; WAN024C8B_at; Start 100; Stop 124
gaagctcgtgctaaagaaatccgta

SEQ ID NO: 108062 - DNA, 25 bp, Artificial
  probe
  misc_feature (1)..(25): SEQ ID NO: 2511; WAN024C8B_at; Start 269; Stop 293
aattgttctcagaaatcgcacctcg

SEQ ID NO: 108063 - DNA, 25 bp, Artificial
  probe
  misc_feature (1)..(25): SEQ ID NO: 1654; WAN024C8C_at; Start 295; Stop 319
ggaataattgttccatttgtcaaga

SEQ ID NO: 108064 - DNA, 25 bp, Artificial
  probe
  misc_feature (1)..(25): SEQ ID NO: 1654; WAN024C8C_at; Start 46; Stop 70
cgtactttcatcatctctgcttcag

SEQ ID NO: 108065 - DNA, 25 bp, Artificial
  probe
  misc_feature (1)..(25): SEQ ID NO: 1654; WAN024C8C_at; Start 328; Stop 352
gttaatttgtcgaaaccatcattgc

SEQ ID NO: 108066 - DNA, 25 bp, Artificial
  probe
  misc_feature (1)..(25): SEQ ID NO: 1654; WAN024C8C_at; Start 258; Stop 282
tgtcaaaatacgtgctgaaagccct

SEQ ID NO: 108067 - DNA, 25 bp, Artificial
  probe
  misc_feature (1)..(25): SEQ ID NO: 1654; WAN024C8C_at; Start 314; Stop 338
tcaagatttcaagggttaatttgtc

SEQ ID NO: 108068 - DNA, 25 bp, Artificial
  probe
  misc_feature (1)..(25): SEQ ID NO: 1654; WAN024C8C_at; Start 33; Stop 57
gcgtccaagatttcgtactttcatc

SEQ ID NO: 108069 - DNA, 25 bp, Artificial
  probe
  misc_feature (1)..(25): SEQ ID NO: 1654; WAN024C8C_at; Start 17; Stop 41
cttcttccaaactcttgcgtccaag

SEQ ID NO: 108070 - DNA, 25 bp, Artificial
  probe
  misc_feature (1)..(25): SEQ ID NO: 1654; WAN024C8C_at; Start 103; Stop 127
ccggcacgttttaaacagttgtatg

SEQ ID NO: 108071 - DNA, 25 bp, Artificial
  probe
  misc_feature (1)..(25): SEQ ID NO: 1654; WAN024C8C_at; Start 209; Stop 233
cagttgacttagcaatctcagtaag

SEQ ID NO: 108072 - DNA, 25 bp, Artificial
  probe
  misc_feature (1)..(25): SEQ ID NO: 1654; WAN024C8C_at; Start 220; Stop 244
gcaatctcagtaagatttgtaaaca

SEQ ID NO: 108073 - DNA, 25 bp, Artificial
  probe
  misc_feature (1)..(25): SEQ ID NO: 1654; WAN024C8C_at; Start 274; Stop 298
gaaagccctaaagcatcttctggaa

SEQ ID NO: 108074 - DNA, 25 bp, Artificial
  probe
  misc_feature (1)..(25): SEQ ID NO: 1654; WAN024C8C_at; Start 339; Stop 363
gaaaccatcattgctacctacacga

SEQ ID NO: 108075 - DNA, 25 bp, Artificial
  probe
  misc_feature (1)..(25): SEQ ID NO: 1654; WAN024C8C_at; Start 280; Stop 304
cctaaagcatcttctggaataattg

SEQ ID NO: 108076 - DNA, 25 bp, Artificial
  probe
  misc_feature (1)..(25): SEQ ID NO: 1654; WAN024C8C_at; Start 170; Stop 194
tacggtcgtcagattcagtatcagc

SEQ ID NO: 108077 - DNA, 25 bp, Artificial
  probe
  misc_feature (1)..(25): SEQ ID NO: 1654; WAN024C8C_at; Start 83; Stop 107
aatcatgcacagtattgataccggc

SEQ ID NO: 108078 - DNA, 25 bp, Artificial
  probe
  misc_feature (1)..(25): SEQ ID NO: 1654; WAN024C8C_at; Start 2; Stop 26
tgagtttgagtttcacttcttccaa

SEQ ID NO: 108079 - DNA, 25 bp, Artificial
  probe
  misc_feature (1)..(25): SEQ ID NO: 1654; WAN024C8C_at; Start 114; Stop 138
taaacagttgtatgaacgcacagac

SEQ ID NO: 108080 - DNA, 25 bp, Artificial
  probe
  misc_feature (1)..(25): SEQ ID NO: 1654; WAN024C8C_at; Start 90; Stop 114
cacagtattgataccggcacgtttt

SEQ ID NO: 108081 - DNA, 25 bp, Artificial
  probe
  misc_feature (1)..(25): SEQ ID NO: 1654; WAN024C8C_at; Start 138; Stop 162
caagtccagttcctcaatcgtacga

SEQ ID NO: 108082 - DNA, 25 bp, Artificial
  probe
  misc_feature (1)..(25): SEQ ID NO: 1654; WAN024C8C_at; Start 266; Stop 290
tacgtgctgaaagccctaaagcatc

SEQ ID NO: 108083 - DNA, 25 bp, Artificial
  probe
  misc_feature (1)..(25): SEQ ID NO: 1654; WAN024C8C_at; Start 123; Stop 147
gtatgaacgcacagacaagtccagt

SEQ ID NO: 108084 - DNA, 25 bp, Artificial
  probe
  misc_feature (1)..(25): SEQ ID NO: 1654; WAN024C8C_at; Start 307; Stop 331
ccatttgtcaagatttcaagggtta

SEQ ID NO: 108085 - DNA, 25 bp, Artificial
  probe
  misc_feature (1)..(25): SEQ ID NO: 1654; WAN024C8C_at; Start 346; Stop 370
tcattgctacctacacgagcaggtt

SEQ ID NO: 108086 - DNA, 25 bp, Artificial
  probe
  misc_feature (1)..(25): SEQ ID NO: 1654; WAN024C8C_at; Start 70; Stop 94
gatttttctgtcaaatcatgcacag

SEQ ID NO: 108087 - DNA, 25 bp, Artificial
  probe
  misc_feature (1)..(25): SEQ ID NO: 1654; WAN024C8C_at; Start 175; Stop 199
tcgtcagattcagtatcagcttctt

SEQ ID NO: 108088 - DNA, 25 bp, Artificial
  probe
  misc_feature (1)..(25): SEQ ID NO: 1654; WAN024C8C_at; Start 57; Stop 81
catctctgcttcagatttttctgtc

SEQ ID NO: 108089 - DNA, 25 bp, Artificial
  probe
  misc_feature (1)..(25): SEQ ID NO: 1654; WAN024C8C_at; Start 96; Stop 120
attgataccggcacgttttaaacag

SEQ ID NO: 108090 - DNA, 25 bp, Artificial
  probe
  misc_feature (1)..(25): SEQ ID NO: 1654; WAN024C8C_at; Start 237; Stop 261
tgtaaacaaatcaagatgttctgtc

SEQ ID NO: 108091 - DNA, 25 bp, Artificial
  probe
  misc_feature (1)..(25): SEQ ID NO: 1654; WAN024C8C_at; Start 353; Stop 377
tacctacacgagcaggttccacttg

SEQ ID NO: 108092 - DNA, 25 bp, Artificial
  probe
  misc_feature (1)..(25): SEQ ID NO: 1654; WAN024C8C_at; Start 201; Stop 225
catcacttcagttgacttagcaatc

SEQ ID NO: 108093 - DNA, 25 bp, Artificial
  probe
  misc_feature (1)..(25): SEQ ID NO: 1654; WAN024C8C_at; Start 251; Stop 275
gatgttctgtcaaaatacgtgctga

SEQ ID NO: 108094 - DNA, 25 bp, Artificial
  probe
  misc_feature (1)..(25): SEQ ID NO: 1654; WAN024C8C_at; Start 158; Stop 182
tacgatctaaaatacggtcgtcaga

SEQ ID NO: 108095 - DNA, 25 bp, Artificial
  probe
  misc_feature (1)..(25): SEQ ID NO: 1654; WAN024C8C_at; Start 187; Stop 211
gtatcagcttctttcatcacttcag

SEQ ID NO: 108096 - DNA, 25 bp, Artificial
  probe
  misc_feature (1)..(25): SEQ ID NO: 1654; WAN024C8C_at; Start 152; Stop 176
caatcgtacgatctaaaatacggtc

SEQ ID NO: 108097 - DNA, 25 bp, Artificial
  probe
  misc_feature (1)..(25): SEQ ID NO: 2850; WAN024C8D_at; Start 130; Stop 154
ggaactgtgtcaaactcatgtaaca

SEQ ID NO: 108098 - DNA, 25 bp, Artificial
  probe
  misc_feature (1)..(25): SEQ ID NO: 2850; WAN024C8D_at; Start 245; Stop 269
cacgttcaagtggttcgattacaaa

SEQ ID NO: 108099 - DNA, 25 bp, Artificial
  probe
  misc_feature (1)..(25): SEQ ID NO: 2850; WAN024C8D_at; Start 255; Stop 279
tggttcgattacaaacttgccataa

SEQ ID NO: 108100 - DNA, 25 bp, Artificial
  probe
  misc_feature (1)..(25): SEQ ID NO: 2850; WAN024C8D_at; Start 438; Stop 462
tgttacttcaagaccagcggcagca

SEQ ID NO: 108101 - DNA, 25 bp, Artificial
  probe
  misc_feature (1)..(25): SEQ ID NO: 2850; WAN024C8D_at; Start 44; Stop 68
cgatgattttttcgtcttcaacgta

SEQ ID NO: 108102 - DNA, 25 bp, Artificial
  probe
  misc_feature (1)..(25): SEQ ID NO: 2850; WAN024C8D_at; Start 187; Stop 211
cctggtagagaagctagaagtacac

SEQ ID NO: 108103 - DNA, 25 bp, Artificial
  probe
  misc_feature (1)..(25): SEQ ID NO: 2850; WAN024C8D_at; Start 85; Stop 109
cctttaatgttcagaatgatttgca

SEQ ID NO: 108104 - DNA, 25 bp, Artificial
  probe
  misc_feature (1)..(25): SEQ ID NO: 2850; WAN024C8D_at; Start 309; Stop 333
tggtttttcaaactcgatcatttag

SEQ ID NO: 108105 - DNA, 25 bp, Artificial
  probe
  misc_feature (1)..(25): SEQ ID NO: 2850; WAN024C8D_at; Start 70; Stop 94
gatttcactgcaattcctttaatgt

SEQ ID NO: 108106 - DNA, 25 bp, Artificial
  probe
  misc_feature (1)..(25): SEQ ID NO: 2850; WAN024C8D_at; Start 107; Stop 131
gcatcacgtcttcacgaacacctgg

SEQ ID NO: 108107 - DNA, 25 bp, Artificial
  probe
  misc_feature (1)..(25): SEQ ID NO: 2850; WAN024C8D_at; Start 400; Stop 424
gcaccattgtgtggcactggagtca

SEQ ID NO: 108108 - DNA, 25 bp, Artificial
  probe
  misc_feature (1)..(25): SEQ ID NO: 2850; WAN024C8D_at; Start 381; Stop 405
gcgacgttttggaggacgagcacca

SEQ ID NO: 108109 - DNA, 25 bp, Artificial
  probe
  misc_feature (1)..(25): SEQ ID NO: 2850; WAN024C8D_at; Start 323; Stop 347
cgatcatttagttactccctcttaa

SEQ ID NO: 108110 - DNA, 25 bp, Artificial
  probe
  misc_feature (1)..(25): SEQ ID NO: 2850; WAN024C8D_at; Start 362; Stop 386
aatgcgatgattatacacggcgacg

SEQ ID NO: 108111 - DNA, 25 bp, Artificial
  probe
  misc_feature (1)..(25): SEQ ID NO: 2850; WAN024C8D_at; Start 176; Stop 200
tcacagctgctcctggtagagaagc

SEQ ID NO: 108112 - DNA, 25 bp, Artificial
  probe
  misc_feature (1)..(25): SEQ ID NO: 2850; WAN024C8D_at; Start 98; Stop 122
gaatgatttgcatcacgtcttcacg

SEQ ID NO: 108113 - DNA, 25 bp, Artificial
  probe
  misc_feature (1)..(25): SEQ ID NO: 2850; WAN024C8D_at; Start 428; Stop 452
cacgaattgctgttacttcaagacc

SEQ ID NO: 108114 - DNA, 25 bp, Artificial
  probe
  misc_feature (1)..(25): SEQ ID NO: 2850; WAN024C8D_at; Start 414; Stop 438
cactggagtcacatcacgaattgct

SEQ ID NO: 108115 - DNA, 25 bp, Artificial
  probe
  misc_feature (1)..(25): SEQ ID NO: 2850; WAN024C8D_at; Start 224; Stop 248
taccaagagttgtaccgtagccacg

SEQ ID NO: 108116 - DNA, 25 bp, Artificial
  probe
  misc_feature (1)..(25): SEQ ID NO: 2850; WAN024C8D_at; Start 451; Stop 475
ccagcggcagcaagcgcacgaatag

SEQ ID NO: 108117 - DNA, 25 bp, Artificial
  probe
  misc_feature (1)..(25): SEQ ID NO: 2850; WAN024C8D_at; Start 388; Stop 412
tttggaggacgagcaccattgtgtg

SEQ ID NO: 108118 - DNA, 25 bp, Artificial
  probe
  misc_feature (1)..(25): SEQ ID NO: 2850; WAN024C8D_at; Start 338; Stop 362
tccctcttaaacgaaaagcagtgta

SEQ ID NO: 108119 - DNA, 25 bp, Artificial
  probe
  misc_feature (1)..(25): SEQ ID NO: 2850; WAN024C8D_at; Start 349; Stop 373
cgaaaagcagtgtaatgcgatgatt

SEQ ID NO: 108120 - DNA, 25 bp, Artificial
  probe
  misc_feature (1)..(25): SEQ ID NO: 2850; WAN024C8D_at; Start 121; Stop 145
cgaacacctggaactgtgtcaaact

SEQ ID NO: 108121 - DNA, 25 bp, Artificial
  probe
  misc_feature (1)..(25): SEQ ID NO: 2850; WAN024C8D_at; Start 25; Stop 49
ggaccttcaacatccagttcgatga

SEQ ID NO: 108122 - DNA, 25 bp, Artificial
  probe
  misc_feature (1)..(25): SEQ ID NO: 2850; WAN024C8D_at; Start 2; Stop 26
tgtcaccagctgttacttcagcagg

SEQ ID NO: 108123 - DNA, 25 bp, Artificial
  probe
  misc_feature (1)..(25): SEQ ID NO: 2850; WAN024C8D_at; Start 145; Stop 169
tcatgtaacacaccatcaatgttga

SEQ ID NO: 108124 - DNA, 25 bp, Artificial
  probe
  misc_feature (1)..(25): SEQ ID NO: 2850; WAN024C8D_at; Start 373; Stop 397
tatacacggcgacgttttggaggac

SEQ ID NO: 108125 - DNA, 25 bp, Artificial
  probe
  misc_feature (1)..(25): SEQ ID NO: 2850; WAN024C8D_at; Start 230; Stop 254
gagttgtaccgtagccacgttcaag

SEQ ID NO: 108126 - DNA, 25 bp, Artificial
  probe
  misc_feature (1)..(25): SEQ ID NO: 2850; WAN024C8D_at; Start 196; Stop 220
gaagctagaagtacacgacgaagag

SEQ ID NO: 108127 - DNA, 25 bp, Artificial
  probe
  misc_feature (1)..(25): SEQ ID NO: 2850; WAN024C8D_at; Start 57; Stop 81
gtcttcaacgtacgatttcactgca

SEQ ID NO: 108128 - DNA, 25 bp, Artificial
  probe
  misc_feature (1)..(25): SEQ ID NO: 2850; WAN024C8D_at; Start 10; Stop 34
gctgttacttcagcaggaccttcaa

SEQ ID NO: 108129 - DNA, 25 bp, Artificial
  probe
  misc_feature (1)..(25): SEQ ID NO: 2850; WAN024C8D_at; Start 209; Stop 233
cacgacgaagagagttaccaagagt

SEQ ID NO: 108130 - DNA, 25 bp, Artificial
  probe
  misc_feature (1)..(25): SEQ ID NO: 2850; WAN024C8D_at; Start 161; Stop 185
caatgttgatagatgtcacagctgc

SEQ ID NO: 108131 - DNA, 25 bp, Artificial
  probe
  misc_feature (1)..(25): SEQ ID NO: 44; WAN024C8E_at; Start 52; Stop 76
tatggcaagtttgtaatcgaaccac

SEQ ID NO: 108132 - DNA, 25 bp, Artificial
  probe
  misc_feature (1)..(25): SEQ ID NO: 44; WAN024C8E_at; Start 535; Stop 559
gaacctgctcgtgtaggtagcaatg

SEQ ID NO: 108133 - DNA, 25 bp, Artificial
  probe
  misc_feature (1)..(25): SEQ ID NO: 44; WAN024C8E_at; Start 70; Stop 94
gaaccacttgaacgtggctacggta

SEQ ID NO: 108134 - DNA, 25 bp, Artificial
  probe
  misc_feature (1)..(25): SEQ ID NO: 44; WAN024C8E_at; Start 609; Stop 633
tccagaagatgctttagggctttca

SEQ ID NO: 108135 - DNA, 25 bp, Artificial
  probe
  misc_feature (1)..(25): SEQ ID NO: 44; WAN024C8E_at; Start 521; Stop 545
tcaactatcaagtggaacctgctcg

SEQ ID NO: 108136 - DNA, 25 bp, Artificial
  probe
  misc_feature (1)..(25): SEQ ID NO: 44; WAN024C8E_at; Start 423; Stop 447
cagtggtcgtggatatgtacctgct

SEQ ID NO: 108137 - DNA, 25 bp, Artificial
  probe
  misc_feature (1)..(25): SEQ ID NO: 44; WAN024C8E_at; Start 84; Stop 108
tggctacggtacaactcttggtaac

SEQ ID NO: 108138 - DNA, 25 bp, Artificial
  probe
  misc_feature (1)..(25): SEQ ID NO: 44; WAN024C8E_at; Start 140; Stop 164
caggagcagctgtgacatctatcaa

SEQ ID NO: 108139 - DNA, 25 bp, Artificial
  probe
  misc_feature (1)..(25): SEQ ID NO: 44; WAN024C8E_at; Start 794; Stop 818
aacgtgccggtatcaatactgtgca

SEQ ID NO: 108140 - DNA, 25 bp, Artificial
  probe
  misc_feature (1)..(25): SEQ ID NO: 44; WAN024C8E_at; Start 99; Stop 123
tcttggtaactctcttcgtcgtgta

SEQ ID NO: 108141 - DNA, 25 bp, Artificial
  probe
  misc_feature (1)..(25): SEQ ID NO: 44; WAN024C8E_at; Start 245; Stop 269
gaattgcagtgaaatcgtacgttga

SEQ ID NO: 108142 - DNA, 25 bp, Artificial
  probe
  misc_feature (1)..(25): SEQ ID NO: 44; WAN024C8E_at; Start 835; Stop 859
tctgaagcagagatgatgaaagtac

SEQ ID NO: 108143 - DNA, 25 bp, Artificial
  probe
  misc_feature (1)..(25): SEQ ID NO: 44; WAN024C8E_at; Start 575; Stop 599
taacccttgaaatcttgacaaatgg

SEQ ID NO: 108144 - DNA, 25 bp, Artificial
  probe
  misc_feature (1)..(25): SEQ ID NO: 44; WAN024C8E_at; Start 162; Stop 186
caacattgatggtgtgttacatgag

SEQ ID NO: 108145 - DNA, 25 bp, Artificial
  probe
  misc_feature (1)..(25): SEQ ID NO: 44; WAN024C8E_at; Start 852; Stop 876
gaaagtacgaaatcttggacgcaag

SEQ ID NO: 108146 - DNA, 25 bp, Artificial
  probe
  misc_feature (1)..(25): SEQ ID NO: 44; WAN024C8E_at; Start 386; Stop 410
gtgaaggttcttctctaaaagcgac

SEQ ID NO: 108147 - DNA, 25 bp, Artificial
  probe
  misc_feature (1)..(25): SEQ ID NO: 44; WAN024C8E_at; Start 692; Stop 716
caactgaagtgatgaaagaagctga

SEQ ID NO: 108148 - DNA, 25 bp, Artificial
  probe
  misc_feature (1)..(25): SEQ ID NO: 44; WAN024C8E_at; Start 550; Stop 574
ggtagcaatgatggtttcgacaaat

SEQ ID NO: 108149 - DNA, 25 bp, Artificial
  probe
  misc_feature (1)..(25): SEQ ID NO: 44; WAN024C8E_at; Start 121; Stop 145
gtacttctagcttctctaccaggag

SEQ ID NO: 108150 - DNA, 25 bp, Artificial
  probe
  misc_feature (1)..(25): SEQ ID NO: 44; WAN024C8E_at; Start 880; Stop 904
ttggaagaagtgaaactcaaactca

SEQ ID NO: 108151 - DNA, 25 bp, Artificial
  probe
  misc_feature (1)..(25): SEQ ID NO: 44; WAN024C8E_at; Start 314; Stop 338
taacagctggtgacattttgacaga

SEQ ID NO: 108152 - DNA, 25 bp, Artificial
  probe
  misc_feature (1)..(25): SEQ ID NO: 44; WAN024C8E_at; Start 284; Stop 308
tcgaactggatgttgaaggtcctgc

SEQ ID NO: 108153 - DNA, 25 bp, Artificial
  probe
  misc_feature (1)..(25): SEQ ID NO: 44; WAN024C8E_at; Start 298; Stop 322
gaaggtcctgctgaagtaacagctg

SEQ ID NO: 108154 - DNA, 25 bp, Artificial
  probe
  misc_feature (1)..(25): SEQ ID NO: 44; WAN024C8E_at; Start 779; Stop 803
catacaactgtttaaaacgtgccgg

SEQ ID NO: 108155 - DNA, 25 bp, Artificial
  probe
  misc_feature (1)..(25): SEQ ID NO: 44; WAN024C8E_at; Start 179; Stop 203
tacatgagtttgacacagttccagg

SEQ ID NO: 108156 - DNA, 25 bp, Artificial
  probe
  misc_feature (1)..(25): SEQ ID NO: 44; WAN024C8E_at; Start 742; Stop 766
gatcgtacgattgaggaactggact

SEQ ID NO: 108157 - DNA, 25 bp, Artificial
  probe
  misc_feature (1)..(25): SEQ ID NO: 44; WAN024C8E_at; Start 712; Stop 736
gctgatactgaatctgacgaccgta

SEQ ID NO: 108158 - DNA, 25 bp, Artificial
  probe
  misc_feature (1)..(25): SEQ ID NO: 44; WAN024C8E_at; Start 759; Stop 783
actggacttgtctgtgcgttcatac

SEQ ID NO: 108159 - DNA, 25 bp, Artificial
  probe
  misc_feature (1)..(25): SEQ ID NO: 44; WAN024C8E_at; Start 262; Stop 286
tacgttgaagacgaaaaaatcatcg

SEQ ID NO: 108160 - DNA, 25 bp, Artificial
  probe
  misc_feature (1)..(25): SEQ ID NO: 44; WAN024C8E_at; Start 624; Stop 648
agggctttcagcacgtattttgaca

SEQ ID NO: 108161 - DNA, 25 bp, Artificial
  probe
  misc_feature (1)..(25): SEQ ID NO: 44; WAN024C8E_at; Start 727; Stop 751
gacgaccgtattttagatcgtacga

SEQ ID NO: 108162 - DNA, 25 bp, Artificial
  probe
  misc_feature (1)..(25): SEQ ID NO: 44; WAN024C8E_at; Start 458; Stop 482
aaaaggataatgcaccagttggaac

SEQ ID NO: 108163 - DNA, 25 bp, Artificial
  probe
  misc_feature (1)..(25): SEQ ID NO: 44; WAN024C8E_at; Start 473; Stop 497
cagttggaacacttgctgtagattc

SEQ ID NO: 108164 - DNA, 25 bp, Artificial
  probe
  misc_feature (1)..(25): SEQ ID NO: 44; WAN024C8E_at; Start 401; Stop 425
taaaagcgactatgactgttaacag

SEQ ID NO: 108165 - DNA, 25 bp, Artificial
  probe
  misc_feature (1)..(25): SEQ ID NO: 5533; WAN024C8F_at; Start 235; Stop 259
tcagttgaagttactgtaaaaggtc

SEQ ID NO: 108166 - DNA, 25 bp, Artificial
  probe
  misc_feature (1)..(25): SEQ ID NO: 5533; WAN024C8F_at; Start 282; Stop 306
tattcgtgcgcttgctgccgctggt

SEQ ID NO: 108167 - DNA, 25 bp, Artificial
  probe
  misc_feature (1)..(25): SEQ ID NO: 5533; WAN024C8F_at; Start 196; Stop 220
gaagctgctgctaaatctgcacaag

SEQ ID NO: 108168 - DNA, 25 bp, Artificial
  probe
  misc_feature (1)..(25): SEQ ID NO: 5533; WAN024C8F_at; Start 173; Stop 197
cattcgctgctcaaatggcttctga

SEQ ID NO: 108169 - DNA, 25 bp, Artificial
  probe
  misc_feature (1)..(25): SEQ ID NO: 5533; WAN024C8F_at; Start 149; Stop 173
tcaaaggttctcgtaaatctacacc

SEQ ID NO: 108170 - DNA, 25 bp, Artificial
  probe
  misc_feature (1)..(25): SEQ ID NO: 5533; WAN024C8F_at; Start 49; Stop 73
ggtattgctcatattcacgctacat

SEQ ID NO: 108171 - DNA, 25 bp, Artificial
  probe
  misc_feature (1)..(25): SEQ ID NO: 5533; WAN024C8F_at; Start 344; Stop 368
cacacaatggtgctcgtcctccaaa

SEQ ID NO: 108172 - DNA, 25 bp, Artificial
  probe
  misc_feature (1)..(25): SEQ ID NO: 5533; WAN024C8F_at; Start 83; Stop 107
ctattgttatgattactgatgtgca

SEQ ID NO: 108173 - DNA, 25 bp, Artificial
  probe
  misc_feature (1)..(25): SEQ ID NO: 5533; WAN024C8F_at; Start 44; Stop 68
aatctggtattgctcatattcacgc

SEQ ID NO: 108174 - DNA, 25 bp, Artificial
  probe
  misc_feature (1)..(25): SEQ ID NO: 5533; WAN024C8F_at; Start 116; Stop 140
caattgcttggtcatcagctggtgc

SEQ ID NO: 108175 - DNA, 25 bp, Artificial
  probe
  misc_feature (1)..(25): SEQ ID NO: 5533; WAN024C8F_at; Start 267; Stop 291
tggtcgtgagtcagctattcgtgcg

SEQ ID NO: 108176 - DNA, 25 bp, Artificial
  probe
  misc_feature (1)..(25): SEQ ID NO: 5533; WAN024C8F_at; Start 357; Stop 381
tcgtcctccaaaacgtcgccgtgta

SEQ ID NO: 108177 - DNA, 25 bp, Artificial
  probe
  misc_feature (1)..(25): SEQ ID NO: 5533; WAN024C8F_at; Start 184; Stop 208
caaatggcttctgaagctgctgcta

SEQ ID NO: 108178 - DNA, 25 bp, Artificial
  probe
  misc_feature (1)..(25): SEQ ID NO: 5533; WAN024C8F_at; Start 105; Stop 129
gcatggtaatgcaattgcttggtca

SEQ ID NO: 108179 - DNA, 25 bp, Artificial
  probe
  misc_feature (1)..(25): SEQ ID NO: 5533; WAN024C8F_at; Start 332; Stop 356
tgactccagtgccacacaatggtgc

SEQ ID NO: 108180 - DNA, 25 bp, Artificial
  probe
  misc_feature (1)..(25): SEQ ID NO: 5533; WAN024C8F_at; Start 251; Stop 275
taaaaggtccaggttctggtcgtga

SEQ ID NO: 108181 - DNA, 25 bp, Artificial
  probe
  misc_feature (1)..(25): SEQ ID NO: 5533; WAN024C8F_at; Start 161; Stop 185
gtaaatctacaccattcgctgctca

SEQ ID NO: 108182 - DNA, 25 bp, Artificial
  probe
  misc_feature (1)..(25): SEQ ID NO: 5533; WAN024C8F_at; Start 18; Stop 42
taaacgtcgtgtgaaaaagaatatc

SEQ ID NO: 108183 - DNA, 25 bp, Artificial
  probe
  misc_feature (1)..(25): SEQ ID NO: 5533; WAN024C8F_at; Start 259; Stop 283
ccaggttctggtcgtgagtcagcta

SEQ ID NO: 108184 - DNA, 25 bp, Artificial
  probe
  misc_feature (1)..(25): SEQ ID NO: 5533; WAN024C8F_at; Start 350; Stop 374
atggtgctcgtcctccaaaacgtcg

SEQ ID NO: 108185 - DNA, 25 bp, Artificial
  probe
  misc_feature (1)..(25): SEQ ID NO: 5533; WAN024C8F_at; Start 220; Stop 244
gaacacggtcttaaatcagttgaag

SEQ ID NO: 108186 - DNA, 25 bp, Artificial
  probe
  misc_feature (1)..(25): SEQ ID NO: 5533; WAN024C8F_at; Start 138; Stop 162
tgctcttggtttcaaaggttctcgt

SEQ ID NO: 108187 - DNA, 25 bp, Artificial
  probe
  misc_feature (1)..(25): SEQ ID NO: 5533; WAN024C8F_at; Start 93; Stop 117
gattactgatgtgcatggtaatgca

SEQ ID NO: 108188 - DNA, 25 bp, Artificial
  probe
  misc_feature (1)..(25): SEQ ID NO: 5533; WAN024C8F_at; Start 336; Stop 360
tccagtgccacacaatggtgctcgt

SEQ ID NO: 108189 - DNA, 25 bp, Artificial
  probe
  misc_feature (1)..(25): SEQ ID NO: 5533; WAN024C8F_at; Start 36; Stop 60
gaatatcgaatctggtattgctcat

SEQ ID NO: 108190 - DNA, 25 bp, Artificial
  probe
  misc_feature (1)..(25): SEQ ID NO: 5533; WAN024C8F_at; Start 365; Stop 389
caaaacgtcgccgtgtataactaat

SEQ ID NO: 108191 - DNA, 25 bp, Artificial
  probe
  misc_feature (1)..(25): SEQ ID NO: 5533; WAN024C8F_at; Start 193; Stop 217
tctgaagctgctgctaaatctgcac

SEQ ID NO: 108192 - DNA, 25 bp, Artificial
  probe
  misc_feature (1)..(25): SEQ ID NO: 5533; WAN024C8F_at; Start 294; Stop 318
tgctgccgctggtcttgaagtaaca

SEQ ID NO: 108193 - DNA, 25 bp, Artificial
  probe
  misc_feature (1)..(25): SEQ ID NO: 5533; WAN024C8F_at; Start 273; Stop 297
tgagtcagctattcgtgcgcttgct

SEQ ID NO: 108194 - DNA, 25 bp, Artificial
  probe
  misc_feature (1)..(25): SEQ ID NO: 5533; WAN024C8F_at; Start 304; Stop 328
ggtcttgaagtaacagcaattcgtg

SEQ ID NO: 108195 - DNA, 25 bp, Artificial
  probe
  misc_feature (1)..(25): SEQ ID NO: 5533; WAN024C8F_at; Start 22; Stop 46
cgtcgtgtgaaaaagaatatcgaat

SEQ ID NO: 108196 - DNA, 25 bp, Artificial
  probe
  misc_feature (1)..(25): SEQ ID NO: 5533; WAN024C8F_at; Start 128; Stop 152
catcagctggtgctcttggtttcaa

SEQ ID NO: 108197 - DNA, 25 bp, Artificial
  probe
  misc_feature (1)..(25): SEQ ID NO: 5533; WAN024C8F_at; Start 205; Stop 229
gctaaatctgcacaagaacacggtc

SEQ ID NO: 108198 - DNA, 25 bp, Artificial
  probe
  misc_feature (1)..(25): SEQ ID NO: 5533; WAN024C8F_at; Start 64; Stop 88
cacgctacatttaataacactattg

SEQ ID NO: 108199 - DNA, 25 bp, Artificial
  probe
  misc_feature (1)..(25): SEQ ID NO: 3058; WAN024C8G_at; Start 38; Stop 62
gattactacgcgtttgtcatttgga

SEQ ID NO: 108200 - DNA, 25 bp, Artificial
  probe
  misc_feature (1)..(25): SEQ ID NO: 3058; WAN024C8G_at; Start 10; Stop 34
gtccgataccataaacataagtcaa

SEQ ID NO: 108201 - DNA, 25 bp, Artificial
  probe
  misc_feature (1)..(25): SEQ ID NO: 3058; WAN024C8G_at; Start 2; Stop 26
tgttgcaagtccgataccataaaca

SEQ ID NO: 108202 - DNA, 25 bp, Artificial
  probe
  misc_feature (1)..(25): SEQ ID NO: 3058; WAN024C8G_at; Start 32; Stop 56
caatgagattactacgcgtttgtca

SEQ ID NO: 108203 - DNA, 25 bp, Artificial
  probe
  misc_feature (1)..(25): SEQ ID NO: 3058; WAN024C8G_at; Start 140; Stop 164
gggcaaattaccataacacgaccat

SEQ ID NO: 108204 - DNA, 25 bp, Artificial
  probe
  misc_feature (1)..(25): SEQ ID NO: 3058; WAN024C8G_at; Start 60; Stop 84
ggaatatcaactccagcaatacgag

SEQ ID NO: 108205 - DNA, 25 bp, Artificial
  probe
  misc_feature (1)..(25): SEQ ID NO: 3058; WAN024C8G_at; Start 79; Stop 103
tacgagccatgttttctcctttcta

SEQ ID NO: 108206 - DNA, 25 bp, Artificial
  probe
  misc_feature (1)..(25): SEQ ID NO: 3058; WAN024C8G_at; Start 66; Stop 90
tcaactccagcaatacgagccatgt

SEQ ID NO: 108207 - DNA, 25 bp, Artificial
  probe
  misc_feature (1)..(25): SEQ ID NO: 3058; WAN024C8G_at; Start 71; Stop 95
tccagcaatacgagccatgttttct

SEQ ID NO: 108208 - DNA, 25 bp, Artificial
  probe
  misc_feature (1)..(25): SEQ ID NO: 3058; WAN024C8G_at; Start 214; Stop 238
tactttcatttcttatccctccaag

SEQ ID NO: 108209 - DNA, 25 bp, Artificial
  probe
  misc_feature (1)..(25): SEQ ID NO: 3058; WAN024C8G_at; Start 272; Stop 296
ccacgtgtcaagtcatatggactca

SEQ ID NO: 108210 - DNA, 25 bp, Artificial
  probe
  misc_feature (1)..(25): SEQ ID NO: 3058; WAN024C8G_at; Start 6; Stop 30
gcaagtccgataccataaacataag

SEQ ID NO: 108211 - DNA, 25 bp, Artificial
  probe
  misc_feature (1)..(25): SEQ ID NO: 3058; WAN024C8G_at; Start 257; Stop 281
cggtaagtgatacgtccacgtgtca

SEQ ID NO: 108212 - DNA, 25 bp, Artificial
  probe
  misc_feature (1)..(25): SEQ ID NO: 3058; WAN024C8G_at; Start 299; Stop 323
tcgacagtaacacgatctcccgcta

SEQ ID NO: 108213 - DNA, 25 bp, Artificial
  probe
  misc_feature (1)..(25): SEQ ID NO: 3058; WAN024C8G_at; Start 110; Stop 134
ccttgacgttgtttgtgttttggat

SEQ ID NO: 108214 - DNA, 25 bp, Artificial
  probe
  misc_feature (1)..(25): SEQ ID NO: 3058; WAN024C8G_at; Start 102; Stop 126
tatcttatccttgacgttgtttgtg

SEQ ID NO: 108215 - DNA, 25 bp, Artificial
  probe
  misc_feature (1)..(25): SEQ ID NO: 3058; WAN024C8G_at; Start 52; Stop 76
tgtcatttggaatatcaactccagc

SEQ ID NO: 108216 - DNA, 25 bp, Artificial
  probe
  misc_feature (1)..(25): SEQ ID NO: 3058; WAN024C8G_at; Start 120; Stop 144
gtttgtgttttggatttgctgggca

SEQ ID NO: 108217 - DNA, 25 bp, Artificial
  probe
  misc_feature (1)..(25): SEQ ID NO: 3058; WAN024C8G_at; Start 161; Stop 185
ccattacgacgaataactttacagt

SEQ ID NO: 108218 - DNA, 25 bp, Artificial
  probe
  misc_feature (1)..(25): SEQ ID NO: 3058; WAN024C8G_at; Start 201; Stop 225
tgaccgatggtcttactttcatttc

SEQ ID NO: 108219 - DNA, 25 bp, Artificial
  probe
  misc_feature (1)..(25): SEQ ID NO: 3058; WAN024C8G_at; Start 182; Stop 206
cagtattcgcaaattggtttgaccg

SEQ ID NO: 108220 - DNA, 25 bp, Artificial
  probe
  misc_feature (1)..(25): SEQ ID NO: 3058; WAN024C8G_at; Start 147; Stop 171
ttaccataacacgaccattacgacg

SEQ ID NO: 108221 - DNA, 25 bp, Artificial
  probe
  misc_feature (1)..(25): SEQ ID NO: 3058; WAN024C8G_at; Start 25; Stop 49
cataagtcaatgagattactacgcg

SEQ ID NO: 108222 - DNA, 25 bp, Artificial
  probe
  misc_feature (1)..(25): SEQ ID NO: 3058; WAN024C8G_at; Start 189; Stop 213
cgcaaattggtttgaccgatggtct

SEQ ID NO: 108223 - DNA, 25 bp, Artificial
  probe
  misc_feature (1)..(25): SEQ ID NO: 3058; WAN024C8G_at; Start 153; Stop 177
taacacgaccattacgacgaataac

SEQ ID NO: 108224 - DNA, 25 bp, Artificial
  probe
  misc_feature (1)..(25): SEQ ID NO: 3058; WAN024C8G_at; Start 242; Stop 266
ttcgattatttaaagcggtaagtga

SEQ ID NO: 108225 - DNA, 25 bp, Artificial
  probe
  misc_feature (1)..(25): SEQ ID NO: 3058; WAN024C8G_at; Start 44; Stop 68
tacgcgtttgtcatttggaatatca

SEQ ID NO: 108226 - DNA, 25 bp, Artificial
  probe
  misc_feature (1)..(25): SEQ ID NO: 3058; WAN024C8G_at; Start 287; Stop 311
tatggactcatttcgacagtaacac

SEQ ID NO: 108227 - DNA, 25 bp, Artificial
  probe
  misc_feature (1)..(25): SEQ ID NO: 3058; WAN024C8G_at; Start 296; Stop 320
atttcgacagtaacacgatctcccg

SEQ ID NO: 108228 - DNA, 25 bp, Artificial
  probe
  misc_feature (1)..(25): SEQ ID NO: 3058; WAN024C8G_at; Start 93; Stop 117
tctcctttctatcttatccttgacg

SEQ ID NO: 108229 - DNA, 25 bp, Artificial
  probe
  misc_feature (1)..(25): SEQ ID NO: 3058; WAN024C8G_at; Start 252; Stop 276
taaagcggtaagtgatacgtccacg

SEQ ID NO: 108230 - DNA, 25 bp, Artificial
  probe
  misc_feature (1)..(25): SEQ ID NO: 3058; WAN024C8G_at; Start 135; Stop 159
ttgctgggcaaattaccataacacg

SEQ ID NO: 108231 - DNA, 25 bp, Artificial
  probe
  misc_feature (1)..(25): SEQ ID NO: 3058; WAN024C8G_at; Start 174; Stop 198
taactttacagtattcgcaaattgg

SEQ ID NO: 108232 - DNA, 25 bp, Artificial
  probe
  misc_feature (1)..(25): SEQ ID NO: 3058; WAN024C8G_at; Start 267; Stop 291
tacgtccacgtgtcaagtcatatgg

SEQ ID NO: 108233 - DNA, 25 bp, Artificial
  probe
  misc_feature (1)..(25): SEQ ID NO: 917; WAN024C8H_at; Start 46; Stop 70
gttattcgtcgtaatggtcgtgtta

SEQ ID NO: 108234 - DNA, 25 bp, Artificial
  probe
  misc_feature (1)..(25): SEQ ID NO: 917; WAN024C8H_at; Start 12; Stop 36
accatcggtcaaaccaatttgcgaa

SEQ ID NO: 108235 - DNA, 25 bp, Artificial
  probe
  misc_feature (1)..(25): SEQ ID NO: 917; WAN024C8H_at; Start 20; Stop 44
tcaaaccaatttgcgaatactgtaa

SEQ ID NO: 108236 - DNA, 25 bp, Artificial
  probe
  misc_feature (1)..(25): SEQ ID NO: 917; WAN024C8H_at; Start 34; Stop 58
gaatactgtaaagttattcgtcgta

SEQ ID NO: 108237 - DNA, 25 bp, Artificial
  probe
  misc_feature (1)..(25): SEQ ID NO: 917; WAN024C8H_at; Start 83; Stop 107
cagcaaatccaaaacacaaacaacg

SEQ ID NO: 108238 - DNA, 25 bp, Artificial
  probe
  misc_feature (1)..(25): SEQ ID NO: 917; WAN024C8H_at; Start 10; Stop 34
agaccatcggtcaaaccaatttgcg

SEQ ID NO: 108239 - DNA, 25 bp, Artificial
  probe
  misc_feature (1)..(25): SEQ ID NO: 917; WAN024C8H_at; Start 65; Stop 89
gtgttatggtaatttgcccagcaaa

SEQ ID NO: 108240 - DNA, 25 bp, Artificial
  probe
  misc_feature (1)..(25): SEQ ID NO: 917; WAN024C8H_at; Start 68; Stop 92
ttatggtaatttgcccagcaaatcc

SEQ ID NO: 108241 - DNA, 25 bp, Artificial
  probe
  misc_feature (1)..(25): SEQ ID NO: 917; WAN024C8H_at; Start 43; Stop 67
aaagttattcgtcgtaatggtcgtg

SEQ ID NO: 108242 - DNA, 25 bp, Artificial
  probe
  misc_feature (1)..(25): SEQ ID NO: 917; WAN024C8H_at; Start 85; Stop 109
gcaaatccaaaacacaaacaacgtc

SEQ ID NO: 108243 - DNA, 25 bp, Artificial
  probe
  misc_feature (1)..(25): SEQ ID NO: 917; WAN024C8H_at; Start 22; Stop 46
aaaccaatttgcgaatactgtaaag

SEQ ID NO: 108244 - DNA, 25 bp, Artificial
  probe
  misc_feature (1)..(25): SEQ ID NO: 917; WAN024C8H_at; Start 95; Stop 119
aacacaaacaacgtcaaggataact

SEQ ID NO: 108245 - DNA, 25 bp, Artificial
  probe
  misc_feature (1)..(25): SEQ ID NO: 917; WAN024C8H_at; Start 77; Stop 101
tttgcccagcaaatccaaaacacaa

SEQ ID NO: 108246 - DNA, 25 bp, Artificial
  probe
  misc_feature (1)..(25): SEQ ID NO: 917; WAN024C8H_at; Start 40; Stop 64
tgtaaagttattcgtcgtaatggtc

SEQ ID NO: 108247 - DNA, 25 bp, Artificial
  probe
  misc_feature (1)..(25): SEQ ID NO: 917; WAN024C8H_at; Start 25; Stop 49
ccaatttgcgaatactgtaaagtta

SEQ ID NO: 108248 - DNA, 25 bp, Artificial
  probe
  misc_feature (1)..(25): SEQ ID NO: 917; WAN024C8H_at; Start 90; Stop 114
tccaaaacacaaacaacgtcaagga

SEQ ID NO: 108249 - DNA, 25 bp, Artificial
  probe
  misc_feature (1)..(25): SEQ ID NO: 917; WAN024C8H_at; Start 18; Stop 42
ggtcaaaccaatttgcgaatactgt

SEQ ID NO: 108250 - DNA, 25 bp, Artificial
  probe
  misc_feature (1)..(25): SEQ ID NO: 917; WAN024C8H_at; Start 58; Stop 82
aatggtcgtgttatggtaatttgcc

SEQ ID NO: 108251 - DNA, 25 bp, Artificial
  probe
  misc_feature (1)..(25): SEQ ID NO: 917; WAN024C8H_at; Start 88; Stop 112
aatccaaaacacaaacaacgtcaag

SEQ ID NO: 108252 - DNA, 25 bp, Artificial
  probe
  misc_feature (1)..(25): SEQ ID NO: 917; WAN024C8H_at; Start 5; Stop 29
aagtaagaccatcggtcaaaccaat

SEQ ID NO: 108253 - DNA, 25 bp, Artificial
  probe
  misc_feature (1)..(25): SEQ ID NO: 917; WAN024C8H_at; Start 14; Stop 38
catcggtcaaaccaatttgcgaata

SEQ ID NO: 108254 - DNA, 25 bp, Artificial
  probe
  misc_feature (1)..(25): SEQ ID NO: 917; WAN024C8H_at; Start 98; Stop 122
acaaacaacgtcaaggataactaat

SEQ ID NO: 108255 - DNA, 25 bp, Artificial
  probe
  misc_feature (1)..(25): SEQ ID NO: 917; WAN024C8H_at; Start 38; Stop 62
actgtaaagttattcgtcgtaatgg

SEQ ID NO: 108256 - DNA, 25 bp, Artificial
  probe
  misc_feature (1)..(25): SEQ ID NO: 917; WAN024C8H_at; Start 92; Stop 116
caaaacacaaacaacgtcaaggata

SEQ ID NO: 108257 - DNA, 25 bp, Artificial
  probe
  misc_feature (1)..(25): SEQ ID NO: 917; WAN024C8H_at; Start 80; Stop 104
gcccagcaaatccaaaacacaaaca

SEQ ID NO: 108258 - DNA, 25 bp, Artificial
  probe
  misc_feature (1)..(25): SEQ ID NO: 917; WAN024C8H_at; Start 16; Stop 40
tcggtcaaaccaatttgcgaatact

SEQ ID NO: 108259 - DNA, 25 bp, Artificial
  probe
  misc_feature (1)..(25): SEQ ID NO: 917; WAN024C8H_at; Start 3; Stop 27
gaaagtaagaccatcggtcaaacca

SEQ ID NO: 108260 - DNA, 25 bp, Artificial
  probe
  misc_feature (1)..(25): SEQ ID NO: 917; WAN024C8H_at; Start 72; Stop 96
ggtaatttgcccagcaaatccaaaa

SEQ ID NO: 108261 - DNA, 25 bp, Artificial
  probe
  misc_feature (1)..(25): SEQ ID NO: 917; WAN024C8H_at; Start 97; Stop 121
cacaaacaacgtcaaggataactaa

SEQ ID NO: 108262 - DNA, 25 bp, Artificial
  probe
  misc_feature (1)..(25): SEQ ID NO: 917; WAN024C8H_at; Start 8; Stop 32
taagaccatcggtcaaaccaatttg

SEQ ID NO: 108263 - DNA, 25 bp, Artificial
  probe
  misc_feature (1)..(25): SEQ ID NO: 917; WAN024C8H_at; Start 11; Stop 35
gaccatcggtcaaaccaatttgcga

SEQ ID NO: 108264 - DNA, 25 bp, Artificial
  probe
  misc_feature (1)..(25): SEQ ID NO: 917; WAN024C8H_at; Start 61; Stop 85
ggtcgtgttatggtaatttgcccag

SEQ ID NO: 108265 - DNA, 25 bp, Artificial
  probe
  misc_feature (1)..(25): SEQ ID NO: 917; WAN024C8H_at; Start 2; Stop 26
tgaaagtaagaccatcggtcaaacc

SEQ ID NO: 108266 - DNA, 25 bp, Artificial
  probe
  misc_feature (1)..(25): SEQ ID NO: 917; WAN024C8H_at; Start 64; Stop 88
cgtgttatggtaatttgcccagcaa

SEQ ID NO: 108267 - DNA, 25 bp, Artificial
  probe
  misc_feature (1)..(25): SEQ ID NO: 5835; WAN024C8I_at; Start 225; Stop 249
gagtccatatgacttgacacgtgga

SEQ ID NO: 108268 - DNA, 25 bp, Artificial
  probe
  misc_feature (1)..(25): SEQ ID NO: 5835; WAN024C8I_at; Start 181; Stop 205
aactatattcgtattttagcgggag

SEQ ID NO: 108269 - DNA, 25 bp, Artificial
  probe
  misc_feature (1)..(25): SEQ ID NO: 5835; WAN024C8I_at; Start 72; Stop 96
gattgaagttgaaggcaaagtagtt

SEQ ID NO: 108270 - DNA, 25 bp, Artificial
  probe
  misc_feature (1)..(25): SEQ ID NO: 5835; WAN024C8I_at; Start 246; Stop 270
tggacgtatcacttaccgctttaaa

SEQ ID NO: 108271 - DNA, 25 bp, Artificial
  probe
  misc_feature (1)..(25): SEQ ID NO: 5835; WAN024C8I_at; Start 208; Stop 232
cgtgttactgtcgaaatgagtccat

SEQ ID NO: 108272 - DNA, 25 bp, Artificial
  probe
  misc_feature (1)..(25): SEQ ID NO: 5835; WAN024C8I_at; Start 91; Stop 115
gtagttgatacaatgccgaatgcaa

SEQ ID NO: 108273 - DNA, 25 bp, Artificial
  probe
  misc_feature (1)..(25): SEQ ID NO: 5835; WAN024C8I_at; Start 145; Stop 169
cagattttagcaacagtttctggta

SEQ ID NO: 108274 - DNA, 25 bp, Artificial
  probe
  misc_feature (1)..(25): SEQ ID NO: 5835; WAN024C8I_at; Start 123; Stop 147
ggttgaacttgaaaatggacatcag

SEQ ID NO: 108275 - DNA, 25 bp, Artificial
  probe
  misc_feature (1)..(25): SEQ ID NO: 5835; WAN024C8I_at; Start 82; Stop 106
gaaggcaaagtagttgatacaatgc

SEQ ID NO: 108276 - DNA, 25 bp, Artificial
  probe
  misc_feature (1)..(25): SEQ ID NO: 5835; WAN024C8I_at; Start 50; Stop 74
tttgcgtggcaaaagacgatgtgat

SEQ ID NO: 108277 - DNA, 25 bp, Artificial
  probe
  misc_feature (1)..(25): SEQ ID NO: 5835; WAN024C8I_at; Start 38; Stop 62
tatggaggtgcttttgcgtggcaaa

SEQ ID NO: 108278 - DNA, 25 bp, Artificial
  probe
  misc_feature (1)..(25): SEQ ID NO: 5835; WAN024C8I_at; Start 252; Stop 276
tatcacttaccgctttaaataacta

SEQ ID NO: 108279 - DNA, 25 bp, Artificial
  probe
  misc_feature (1)..(25): SEQ ID NO: 5835; WAN024C8I_at; Start 200; Stop 224
cgggagatcgtgttactgtcgaaat

SEQ ID NO: 108280 - DNA, 25 bp, Artificial
  probe
  misc_feature (1)..(25): SEQ ID NO: 5835; WAN024C8I_at; Start 240; Stop 264
gacacgtggacgtatcacttaccgc

SEQ ID NO: 108281 - DNA, 25 bp, Artificial
  probe
  misc_feature (1)..(25): SEQ ID NO: 5835; WAN024C8I_at; Start 138; Stop 162
tggacatcagattttagcaacagtt

SEQ ID NO: 108282 - DNA, 25 bp, Artificial
  probe
  misc_feature (1)..(25): SEQ ID NO: 5835; WAN024C8I_at; Start 107; Stop 131
cgaatgcaatgtttacggttgaact

SEQ ID NO: 108283 - DNA, 25 bp, Artificial
  probe
  misc_feature (1)..(25): SEQ ID NO: 5835; WAN024C8I_at; Start 19; Stop 43
gaggcatcgaatcgaaatttatgga

SEQ ID NO: 108284 - DNA, 25 bp, Artificial
  probe
  misc_feature (1)..(25): SEQ ID NO: 5835; WAN024C8I_at; Start 9; Stop 33
tctgtgtctagaggcatcgaatcga

SEQ ID NO: 108285 - DNA, 25 bp, Artificial
  probe
  misc_feature (1)..(25): SEQ ID NO: 5835; WAN024C8I_at; Start 219; Stop 243
cgaaatgagtccatatgacttgaca

SEQ ID NO: 108286 - DNA, 25 bp, Artificial
  probe
  misc_feature (1)..(25): SEQ ID NO: 5835; WAN024C8I_at; Start 87; Stop 111
caaagtagttgatacaatgccgaat

SEQ ID NO: 108287 - DNA, 25 bp, Artificial
  probe
  misc_feature (1)..(25): SEQ ID NO: 5835; WAN024C8I_at; Start 154; Stop 178
gcaacagtttctggtaaaattcgta

SEQ ID NO: 108288 - DNA, 25 bp, Artificial
  probe
  misc_feature (1)..(25): SEQ ID NO: 5835; WAN024C8I_at; Start 12; Stop 36
gtgtctagaggcatcgaatcgaaat

SEQ ID NO: 108289 - DNA, 25 bp, Artificial
  probe
  misc_feature (1)..(25): SEQ ID NO: 5835; WAN024C8I_at; Start 197; Stop 221
tagcgggagatcgtgttactgtcga

SEQ ID NO: 108290 - DNA, 25 bp, Artificial
  probe
  misc_feature (1)..(25): SEQ ID NO: 5835; WAN024C8I_at; Start 120; Stop 144
tacggttgaacttgaaaatggacat

SEQ ID NO: 108291 - DNA, 25 bp, Artificial
  probe
  misc_feature (1)..(25): SEQ ID NO: 5835; WAN024C8I_at; Start 2; Stop 26
tgttgtctctgtgtctagaggcatc

SEQ ID NO: 108292 - DNA, 25 bp, Artificial
  probe
  misc_feature (1)..(25): SEQ ID NO: 5835; WAN024C8I_at; Start 234; Stop 258
tgacttgacacgtggacgtatcact

SEQ ID NO: 108293 - DNA, 25 bp, Artificial
  probe
  misc_feature (1)..(25): SEQ ID NO: 5835; WAN024C8I_at; Start 64; Stop 88
gacgatgtgattgaagttgaaggca

SEQ ID NO: 108294 - DNA, 25 bp, Artificial
  probe
  misc_feature (1)..(25): SEQ ID NO: 5835; WAN024C8I_at; Start 54; Stop 78
cgtggcaaaagacgatgtgattgaa

SEQ ID NO: 108295 - DNA, 25 bp, Artificial
  probe
  misc_feature (1)..(25): SEQ ID NO: 5835; WAN024C8I_at; Start 99; Stop 123
tacaatgccgaatgcaatgtttacg

SEQ ID NO: 108296 - DNA, 25 bp, Artificial
  probe
  misc_feature (1)..(25): SEQ ID NO: 5835; WAN024C8I_at; Start 213; Stop 237
tactgtcgaaatgagtccatatgac

SEQ ID NO: 108297 - DNA, 25 bp, Artificial
  probe
  misc_feature (1)..(25): SEQ ID NO: 5835; WAN024C8I_at; Start 186; Stop 210
tattcgtattttagcgggagatcgt

SEQ ID NO: 108298 - DNA, 25 bp, Artificial
  probe
  misc_feature (1)..(25): SEQ ID NO: 5835; WAN024C8I_at; Start 26; Stop 50
cgaatcgaaatttatggaggtgctt

SEQ ID NO: 108299 - DNA, 25 bp, Artificial
  probe
  misc_feature (1)..(25): SEQ ID NO: 5835; WAN024C8I_at; Start 192; Stop 216
tattttagcgggagatcgtgttact

SEQ ID NO: 108300 - DNA, 25 bp, Artificial
  probe
  misc_feature (1)..(25): SEQ ID NO: 5835; WAN024C8I_at; Start 229; Stop 253
ccatatgacttgacacgtggacgta

SEQ ID NO: 108301 - DNA, 25 bp, Artificial
  probe
  misc_feature (1)..(25): SEQ ID NO: 2503; WAN024C8J_at; Start 208; Stop 232
cgtcgtgaagtaaacttgaacatca

SEQ ID NO: 108302 - DNA, 25 bp, Artificial
  probe
  misc_feature (1)..(25): SEQ ID NO: 2503; WAN024C8J_at; Start 98; Stop 122
ttttggctgctgctggaatctcaga

SEQ ID NO: 108303 - DNA, 25 bp, Artificial
  probe
  misc_feature (1)..(25): SEQ ID NO: 2503; WAN024C8J_at; Start 34; Stop 58
gacaaacgcgtagtaatctcattga

SEQ ID NO: 108304 - DNA, 25 bp, Artificial
  probe
  misc_feature (1)..(25): SEQ ID NO: 2503; WAN024C8J_at; Start 70; Stop 94
ggtatcggacttgcaacatctaaga

SEQ ID NO: 108305 - DNA, 25 bp, Artificial
  probe
  misc_feature (1)..(25): SEQ ID NO: 2503; WAN024C8J_at; Start 185; Stop 209
caatcaaagttgaaggtgaccttcg

SEQ ID NO: 108306 - DNA, 25 bp, Artificial
  probe
  misc_feature (1)..(25): SEQ ID NO: 2503; WAN024C8J_at; Start 264; Stop 288
tatccgtcaccgtcgtggacttcct

SEQ ID NO: 108307 - DNA, 25 bp, Artificial
  probe
  misc_feature (1)..(25): SEQ ID NO: 2503; WAN024C8J_at; Start 202; Stop 226
gaccttcgtcgtgaagtaaacttga

SEQ ID NO: 108308 - DNA, 25 bp, Artificial
  probe
  misc_feature (1)..(25): SEQ ID NO: 2503; WAN024C8J_at; Start 27; Stop 51
tccaaatgacaaacgcgtagtaatc

SEQ ID NO: 108309 - DNA, 25 bp, Artificial
  probe
  misc_feature (1)..(25): SEQ ID NO: 2503; WAN024C8J_at; Start 40; Stop 64
cgcgtagtaatctcattgacttatg

SEQ ID NO: 108310 - DNA, 25 bp, Artificial
  probe
  misc_feature (1)..(25): SEQ ID NO: 2503; WAN024C8J_at; Start 240; Stop 264
gatggaaatcggttcataccgtggt

SEQ ID NO: 108311 - DNA, 25 bp, Artificial
  probe
  misc_feature (1)..(25): SEQ ID NO: 2503; WAN024C8J_at; Start 86; Stop 110
catctaagaaaattttggctgctgc

SEQ ID NO: 108312 - DNA, 25 bp, Artificial
  probe
  misc_feature (1)..(25): SEQ ID NO: 2503; WAN024C8J_at; Start 7; Stop 31
cgtattgctggagttgatattccaa

SEQ ID NO: 108313 - DNA, 25 bp, Artificial
  probe
  misc_feature (1)..(25): SEQ ID NO: 2503; WAN024C8J_at; Start 196; Stop 220
gaaggtgaccttcgtcgtgaagtaa

SEQ ID NO: 108314 - DNA, 25 bp, Artificial
  probe
  misc_feature (1)..(25): SEQ ID NO: 2503; WAN024C8J_at; Start 319; Stop 343
cgcactcgtaaaggtaaagctgttg

SEQ ID NO: 108315 - DNA, 25 bp, Artificial
  probe
  misc_feature (1)..(25): SEQ ID NO: 2503; WAN024C8J_at; Start 231; Stop 255
caaacgtttgatggaaatcggttca

SEQ ID NO: 108316 - DNA, 25 bp, Artificial
  probe
  misc_feature (1)..(25): SEQ ID NO: 2503; WAN024C8J_at; Start 149; Stop 173
cagatcaagaagatgctatccgtcg

SEQ ID NO: 108317 - DNA, 25 bp, Artificial
  probe
  misc_feature (1)..(25): SEQ ID NO: 2503; WAN024C8J_at; Start 93; Stop 117
gaaaattttggctgctgctggaatc

SEQ ID NO: 108318 - DNA, 25 bp, Artificial
  probe
  misc_feature (1)..(25): SEQ ID NO: 2503; WAN024C8J_at; Start 277; Stop 301
cgtggacttcctgtccgtggacaaa

SEQ ID NO: 108319 - DNA, 25 bp, Artificial
  probe
  misc_feature (1)..(25): SEQ ID NO: 2503; WAN024C8J_at; Start 344; Stop 368
cgattgctggtaagaaaaaataact

SEQ ID NO: 108320 - DNA, 25 bp, Artificial
  probe
  misc_feature (1)..(25): SEQ ID NO: 2503; WAN024C8J_at; Start 259; Stop 283
cgtggtatccgtcaccgtcgtggac

SEQ ID NO: 108321 - DNA, 25 bp, Artificial
  probe
  misc_feature (1)..(25): SEQ ID NO: 2503; WAN024C8J_at; Start 216; Stop 240
agtaaacttgaacatcaaacgtttg

SEQ ID NO: 108322 - DNA, 25 bp, Artificial
  probe
  misc_feature (1)..(25): SEQ ID NO: 2503; WAN024C8J_at; Start 119; Stop 143
cagaagatgttcgtgtacgtgatct

SEQ ID NO: 108323 - DNA, 25 bp, Artificial
  probe
  misc_feature (1)..(25): SEQ ID NO: 2503; WAN024C8J_at; Start 3; Stop 27
ggctcgtattgctggagttgatatt

SEQ ID NO: 108324 - DNA, 25 bp, Artificial
  probe
  misc_feature (1)..(25): SEQ ID NO: 2503; WAN024C8J_at; Start 158; Stop 182
aagatgctatccgtcgtgaagtgga

SEQ ID NO: 108325 - DNA, 25 bp, Artificial
  probe
  misc_feature (1)..(25): SEQ ID NO: 2503; WAN024C8J_at; Start 74; Stop 98
tcggacttgcaacatctaagaaaat

SEQ ID NO: 108326 - DNA, 25 bp, Artificial
  probe
  misc_feature (1)..(25): SEQ ID NO: 2503; WAN024C8J_at; Start 22; Stop 46
gatattccaaatgacaaacgcgtag

SEQ ID NO: 108327 - DNA, 25 bp, Artificial
  probe
  misc_feature (1)..(25): SEQ ID NO: 2503; WAN024C8J_at; Start 334; Stop 358
aaagctgttgcgattgctggtaaga

SEQ ID NO: 108328 - DNA, 25 bp, Artificial
  probe
  misc_feature (1)..(25): SEQ ID NO: 2503; WAN024C8J_at; Start 113; Stop 137
gaatctcagaagatgttcgtgtacg

SEQ ID NO: 108329 - DNA, 25 bp, Artificial
  probe
  misc_feature (1)..(25): SEQ ID NO: 2503; WAN024C8J_at; Start 168; Stop 192
ccgtcgtgaagtggatgcaatcaaa

SEQ ID NO: 108330 - DNA, 25 bp, Artificial
  probe
  misc_feature (1)..(25): SEQ ID NO: 2503; WAN024C8J_at; Start 55; Stop 79
ttgacttatgtttatggtatcggac

SEQ ID NO: 108331 - DNA, 25 bp, Artificial
  probe
  misc_feature (1)..(25): SEQ ID NO: 2503; WAN024C8J_at; Start 154; Stop 178
caagaagatgctatccgtcgtgaag

SEQ ID NO: 108332 - DNA, 25 bp, Artificial
  probe
  misc_feature (1)..(25): SEQ ID NO: 2503; WAN024C8J_at; Start 327; Stop 351
taaaggtaaagctgttgcgattgct

SEQ ID NO: 108333 - DNA, 25 bp, Artificial
  probe
  misc_feature (1)..(25): SEQ ID NO: 2503; WAN024C8J_at; Start 181; Stop 205
gatgcaatcaaagttgaaggtgacc

SEQ ID NO: 108334 - DNA, 25 bp, Artificial
  probe
  misc_feature (1)..(25): SEQ ID NO: 2503; WAN024C8J_at; Start 253; Stop 277
tcataccgtggtatccgtcaccgtc

SEQ ID NO: 108335 - DNA, 25 bp, Artificial
  probe
  misc_feature (1)..(25): SEQ ID NO: 1026; WAN024C8K_at; Start 93; Stop 117
catcttcacgttggtagtaatcttc

SEQ ID NO: 108336 - DNA, 25 bp, Artificial
  probe
  misc_feature (1)..(25): SEQ ID NO: 1026; WAN024C8K_at; Start 79; Stop 103
tgtctcaggcttatcatcttcacgt

SEQ ID NO: 108337 - DNA, 25 bp, Artificial
  probe
  misc_feature (1)..(25): SEQ ID NO: 1026; WAN024C8K_at; Start 159; Stop 183
tttctccagttacgcggtggatgat

SEQ ID NO: 108338 - DNA, 25 bp, Artificial
  probe
  misc_feature (1)..(25): SEQ ID NO: 1026; WAN024C8K_at; Start 48; Stop 72
gagcaatattaacatccaaacgacg

SEQ ID NO: 108339 - DNA, 25 bp, Artificial
  probe
  misc_feature (1)..(25): SEQ ID NO: 1026; WAN024C8K_at; Start 50; Stop 74
gcaatattaacatccaaacgacgtt

SEQ ID NO: 108340 - DNA, 25 bp, Artificial
  probe
  misc_feature (1)..(25): SEQ ID NO: 1026; WAN024C8K_at; Start 162; Stop 186
ctccagttacgcggtggatgatacg

SEQ ID NO: 108341 - DNA, 25 bp, Artificial
  probe
  misc_feature (1)..(25): SEQ ID NO: 1026; WAN024C8K_at; Start 34; Stop 58
gattggttctccttgagcaatatta

SEQ ID NO: 108342 - DNA, 25 bp, Artificial
  probe
  misc_feature (1)..(25): SEQ ID NO: 1026; WAN024C8K_at; Start 116; Stop 140
tcttctttatagtcaactggtgggt

SEQ ID NO: 108343 - DNA, 25 bp, Artificial
  probe
  misc_feature (1)..(25): SEQ ID NO: 1026; WAN024C8K_at; Start 1; Stop 25
atgaaccaaacctttggcacggtag

SEQ ID NO: 108344 - DNA, 25 bp, Artificial
  probe
  misc_feature (1)..(25): SEQ ID NO: 1026; WAN024C8K_at; Start 64; Stop 88
caaacgacgttttactgtctcaggc

SEQ ID NO: 108345 - DNA, 25 bp, Artificial
  probe
  misc_feature (1)..(25): SEQ ID NO: 1026; WAN024C8K_at; Start 29; Stop 53
gcaatgattggttctccttgagcaa

SEQ ID NO: 108346 - DNA, 25 bp, Artificial
  probe
  misc_feature (1)..(25): SEQ ID NO: 1026; WAN024C8K_at; Start 212; Stop 236
tcagggttcacttcaatattgataa

SEQ ID NO: 108347 - DNA, 25 bp, Artificial
  probe
  misc_feature (1)..(25): SEQ ID NO: 1026; WAN024C8K_at; Start 11; Stop 35
cctttggcacggtagtgagcaatga

SEQ ID NO: 108348 - DNA, 25 bp, Artificial
  probe
  misc_feature (1)..(25): SEQ ID NO: 1026; WAN024C8K_at; Start 41; Stop 65
tctccttgagcaatattaacatcca

SEQ ID NO: 108349 - DNA, 25 bp, Artificial
  probe
  misc_feature (1)..(25): SEQ ID NO: 1026; WAN024C8K_at; Start 7; Stop 31
caaacctttggcacggtagtgagca

SEQ ID NO: 108350 - DNA, 25 bp, Artificial
  probe
  misc_feature (1)..(25): SEQ ID NO: 1026; WAN024C8K_at; Start 123; Stop 147
tatagtcaactggtgggttaaagac

SEQ ID NO: 108351 - DNA, 25 bp, Artificial
  probe
  misc_feature (1)..(25): SEQ ID NO: 1026; WAN024C8K_at; Start 105; Stop 129
ggtagtaatcttcttctttatagtc

SEQ ID NO: 108352 - DNA, 25 bp, Artificial
  probe
  misc_feature (1)..(25): SEQ ID NO: 1026; WAN024C8K_at; Start 96; Stop 120
cttcacgttggtagtaatcttcttc

SEQ ID NO: 108353 - DNA, 25 bp, Artificial
  probe
  misc_feature (1)..(25): SEQ ID NO: 1026; WAN024C8K_at; Start 69; Stop 93
gacgttttactgtctcaggcttatc

SEQ ID NO: 108354 - DNA, 25 bp, Artificial
  probe
  misc_feature (1)..(25): SEQ ID NO: 1026; WAN024C8K_at; Start 21; Stop 45
ggtagtgagcaatgattggttctcc

SEQ ID NO: 108355 - DNA, 25 bp, Artificial
  probe
  misc_feature (1)..(25): SEQ ID NO: 1026; WAN024C8K_at; Start 206; Stop 230
aggctgtcagggttcacttcaatat

SEQ ID NO: 108356 - DNA, 25 bp, Artificial
  probe
  misc_feature (1)..(25): SEQ ID NO: 1026; WAN024C8K_at; Start 18; Stop 42
cacggtagtgagcaatgattggttc

SEQ ID NO: 108357 - DNA, 25 bp, Artificial
  probe
  misc_feature (1)..(25): SEQ ID NO: 1026; WAN024C8K_at; Start 150; Stop 174
tgtggaaagtttctccagttacgcg

SEQ ID NO: 108358 - DNA, 25 bp, Artificial
  probe
  misc_feature (1)..(25): SEQ ID NO: 1026; WAN024C8K_at; Start 14; Stop 38
ttggcacggtagtgagcaatgattg

SEQ ID NO: 108359 - DNA, 25 bp, Artificial
  probe
  misc_feature (1)..(25): SEQ ID NO: 1026; WAN024C8K_at; Start 208; Stop 232
gctgtcagggttcacttcaatattg

SEQ ID NO: 108360 - DNA, 25 bp, Artificial
  probe
  misc_feature (1)..(25): SEQ ID NO: 1026; WAN024C8K_at; Start 27; Stop 51
gagcaatgattggttctccttgagc

SEQ ID NO: 108361 - DNA, 25 bp, Artificial
  probe
  misc_feature (1)..(25): SEQ ID NO: 1026; WAN024C8K_at; Start 156; Stop 180
aagtttctccagttacgcggtggat

SEQ ID NO: 108362 - DNA, 25 bp, Artificial
  probe
  misc_feature (1)..(25): SEQ ID NO: 1026; WAN024C8K_at; Start 143; Stop 167
aagaccttgtggaaagtttctccag

SEQ ID NO: 108363 - DNA, 25 bp, Artificial
  probe
  misc_feature (1)..(25): SEQ ID NO: 1026; WAN024C8K_at; Start 84; Stop 108
caggcttatcatcttcacgttggta

SEQ ID NO: 108364 - DNA, 25 bp, Artificial
  probe
  misc_feature (1)..(25): SEQ ID NO: 1026; WAN024C8K_at; Start 87; Stop 111
gcttatcatcttcacgttggtagta

SEQ ID NO: 108365 - DNA, 25 bp, Artificial
  probe
  misc_feature (1)..(25): SEQ ID NO: 1026; WAN024C8K_at; Start 129; Stop 153
caactggtgggttaaagaccttgtg

SEQ ID NO: 108366 - DNA, 25 bp, Artificial
  probe
  misc_feature (1)..(25): SEQ ID NO: 1026; WAN024C8K_at; Start 90; Stop 114
tatcatcttcacgttggtagtaatc

SEQ ID NO: 108367 - DNA, 25 bp, Artificial
  probe
  misc_feature (1)..(25): SEQ ID NO: 1026; WAN024C8K_at; Start 99; Stop 123
cacgttggtagtaatcttcttcttt

SEQ ID NO: 108368 - DNA, 25 bp, Artificial
  probe
  misc_feature (1)..(25): SEQ ID NO: 1026; WAN024C8K_at; Start 76; Stop 100
tactgtctcaggcttatcatcttca

SEQ ID NO: 108369 - DNA, 25 bp, Artificial
  probe
  misc_feature (1)..(25): SEQ ID NO: 1243; WAN024C8L_at; Start 218; Stop 242
cacaagatgatattaaagaaacagg

SEQ ID NO: 108370 - DNA, 25 bp, Artificial
  probe
  misc_feature (1)..(25): SEQ ID NO: 1243; WAN024C8L_at; Start 551; Stop 575
ccaaaggtttggttcatgacatcga

SEQ ID NO: 108371 - DNA, 25 bp, Artificial
  probe
  misc_feature (1)..(25): SEQ ID NO: 1243; WAN024C8L_at; Start 460; Stop 484
taccaacgtgaagatgataagcctg

SEQ ID NO: 108372 - DNA, 25 bp, Artificial
  probe
  misc_feature (1)..(25): SEQ ID NO: 1243; WAN024C8L_at; Start 510; Stop 534
taatattgctcaaggagaaccaatc

SEQ ID NO: 108373 - DNA, 25 bp, Artificial
  probe
  misc_feature (1)..(25): SEQ ID NO: 1243; WAN024C8L_at; Start 162; Stop 186
caagggtgaattggttcctgacgaa

SEQ ID NO: 108374 - DNA, 25 bp, Artificial
  probe
  misc_feature (1)..(25): SEQ ID NO: 1243; WAN024C8L_at; Start 477; Stop 501
taagcctgagacagtaaaacgtcgt

SEQ ID NO: 108375 - DNA, 25 bp, Artificial
  probe
  misc_feature (1)..(25): SEQ ID NO: 1243; WAN024C8L_at; Start 130; Stop 154
gaaatgggtgttcttgctaagtcat

SEQ ID NO: 108376 - DNA, 25 bp, Artificial
  probe
  misc_feature (1)..(25): SEQ ID NO: 1243; WAN024C8L_at; Start 178; Stop 202
cctgacgaagttacaaatggaatcg

SEQ ID NO: 108377 - DNA, 25 bp, Artificial
  probe
  misc_feature (1)..(25): SEQ ID NO: 1243; WAN024C8L_at; Start 526; Stop 550
gaaccaatcattgctcactaccgtg

SEQ ID NO: 108378 - DNA, 25 bp, Artificial
  probe
  misc_feature (1)..(25): SEQ ID NO: 1243; WAN024C8L_at; Start 303; Stop 327
ggctgaacttggcattgaactagaa

SEQ ID NO: 108379 - DNA, 25 bp, Artificial
  probe
  misc_feature (1)..(25): SEQ ID NO: 1243; WAN024C8L_at; Start 602; Stop 626
tctcagatattgaaaaagtattgac

SEQ ID NO: 108380 - DNA, 25 bp, Artificial
  probe
  misc_feature (1)..(25): SEQ ID NO: 1243; WAN024C8L_at; Start 387; Stop 411
catccaccgcgtaactggagaaact

SEQ ID NO: 108381 - DNA, 25 bp, Artificial
  probe
  misc_feature (1)..(25): SEQ ID NO: 1243; WAN024C8L_at; Start 4; Stop 28
aatcttttgattatgggcttacctg

SEQ ID NO: 108382 - DNA, 25 bp, Artificial
  probe
  misc_feature (1)..(25): SEQ ID NO: 1243; WAN024C8L_at; Start 537; Stop 561
tgctcactaccgtgccaaaggtttg

SEQ ID NO: 108383 - DNA, 25 bp, Artificial
  probe
  misc_feature (1)..(25): SEQ ID NO: 1243; WAN024C8L_at; Start 583; Stop 607
caagatatcaatgatgtcttctcag

SEQ ID NO: 108384 - DNA, 25 bp, Artificial
  probe
  misc_feature (1)..(25): SEQ ID NO: 1243; WAN024C8L_at; Start 75; Stop 99
tgttgcacatatctcaacaggtgat

SEQ ID NO: 108385 - DNA, 25 bp, Artificial
  probe
  misc_feature (1)..(25): SEQ ID NO: 1243; WAN024C8L_at; Start 60; Stop 84
cgtagaacaattccatgttgcacat

SEQ ID NO: 108386 - DNA, 25 bp, Artificial
  probe
  misc_feature (1)..(25): SEQ ID NO: 1243; WAN024C8L_at; Start 496; Stop 520
cgtcgtttggatgttaatattgctc

SEQ ID NO: 108387 - DNA, 25 bp, Artificial
  probe
  misc_feature (1)..(25): SEQ ID NO: 1243; WAN024C8L_at; Start 252; Stop 276
ggatggttacccacgtacaattgaa

SEQ ID NO: 108388 - DNA, 25 bp, Artificial
  probe
  misc_feature (1)..(25): SEQ ID NO: 1243; WAN024C8L_at; Start 426; Stop 450
taacccaccagttgactataaagaa

SEQ ID NO: 108389 - DNA, 25 bp, Artificial
  probe
  misc_feature (1)..(25): SEQ ID NO: 1243; WAN024C8L_at; Start 11; Stop 35
tgattatgggcttacctggtgcagg

SEQ ID NO: 108390 - DNA, 25 bp, Artificial
  probe
  misc_feature (1)..(25): SEQ ID NO: 1243; WAN024C8L_at; Start 287; Stop 311
ccttggacaaaacattggctgaact

SEQ ID NO: 108391 - DNA, 25 bp, Artificial
  probe
  misc_feature (1)..(25): SEQ ID NO: 1243; WAN024C8L_at; Start 118; Stop 142
gcaaatcaaactgaaatgggtgttc

SEQ ID NO: 108392 - DNA, 25 bp, Artificial
  probe
  misc_feature (1)..(25): SEQ ID NO: 1243; WAN024C8L_at; Start 564; Stop 588
tcatgacatcgaaggtaatcaagat

SEQ ID NO: 108393 - DNA, 25 bp, Artificial
  probe
  misc_feature (1)..(25): SEQ ID NO: 1243; WAN024C8L_at; Start 31; Stop 55
gcaggtaagggaactcaagcagcaa

SEQ ID NO: 108394 - DNA, 25 bp, Artificial
  probe
  misc_feature (1)..(25): SEQ ID NO: 1243; WAN024C8L_at; Start 273; Stop 297
tgaacaagctcatgccttggacaaa

SEQ ID NO: 108395 - DNA, 25 bp, Artificial
  probe
  misc_feature (1)..(25): SEQ ID NO: 1243; WAN024C8L_at; Start 45; Stop 69
tcaagcagcaaaaatcgtagaacaa

SEQ ID NO: 108396 - DNA, 25 bp, Artificial
  probe
  misc_feature (1)..(25): SEQ ID NO: 1243; WAN024C8L_at; Start 23; Stop 47
tacctggtgcaggtaagggaactca

SEQ ID NO: 108397 - DNA, 25 bp, Artificial
  probe
  misc_feature (1)..(25): SEQ ID NO: 1243; WAN024C8L_at; Start 90; Stop 114
aacaggtgatatgttccgcgctgca

SEQ ID NO: 108398 - DNA, 25 bp, Artificial
  probe
  misc_feature (1)..(25): SEQ ID NO: 1243; WAN024C8L_at; Start 145; Stop 169
gctaagtcatatattgacaagggtg

SEQ ID NO: 108399 - DNA, 25 bp, Artificial
  probe
  misc_feature (1)..(25): SEQ ID NO: 1243; WAN024C8L_at; Start 104; Stop 128
tccgcgctgcaatggcaaatcaaac

SEQ ID NO: 108400 - DNA, 25 bp, Artificial
  probe
  misc_feature (1)..(25): SEQ ID NO: 1243; WAN024C8L_at; Start 239; Stop 263
caggattcttattggatggttaccc

SEQ ID NO: 108401 - DNA, 25 bp, Artificial
  probe
  misc_feature (1)..(25): SEQ ID NO: 1243; WAN024C8L_at; Start 259; Stop 283
tacccacgtacaattgaacaagctc

SEQ ID NO: 108402 - DNA, 25 bp, Artificial
  probe
  misc_feature (1)..(25): SEQ ID NO: 1243; WAN024C8L_at; Start 337; Stop 361
aatattgaagtgaaccctgacagcc

SEQ ID NO: 108403 - DNA, 25 bp, Artificial
  probe
  misc_feature (1)..(25): SEQ ID NO: 1481; WAN024C8M_at; Start 12; Stop 36
tgaaccacctttagcagtgatagct

SEQ ID NO: 108404 - DNA, 25 bp, Artificial
  probe
  misc_feature (1)..(25): SEQ ID NO: 1481; WAN024C8M_at; Start 139; Stop 163
cctgcttcgataagaacaactggag

SEQ ID NO: 108405 - DNA, 25 bp, Artificial
  probe
  misc_feature (1)..(25): SEQ ID NO: 1481; WAN024C8M_at; Start 61; Stop 85
gctgctttcacagtcaatttcttag

SEQ ID NO: 108406 - DNA, 25 bp, Artificial
  probe
  misc_feature (1)..(25): SEQ ID NO: 1481; WAN024C8M_at; Start 252; Stop 276
tggaagacgacggaacaatggagtt

SEQ ID NO: 108407 - DNA, 25 bp, Artificial
  probe
  misc_feature (1)..(25): SEQ ID NO: 1481; WAN024C8M_at; Start 84; Stop 108
agtcaactcaccgttaccaagaatt

SEQ ID NO: 108408 - DNA, 25 bp, Artificial
  probe
  misc_feature (1)..(25): SEQ ID NO: 1481; WAN024C8M_at; Start 197; Stop 221
ggtcaaggttcacaattgcgtattc

SEQ ID NO: 108409 - DNA, 25 bp, Artificial
  probe
  misc_feature (1)..(25): SEQ ID NO: 1481; WAN024C8M_at; Start 231; Stop 255
gatgttagtgaatccacgttttgga

SEQ ID NO: 108410 - DNA, 25 bp, Artificial
  probe
  misc_feature (1)..(25): SEQ ID NO: 1481; WAN024C8M_at; Start 165; Stop 189
tacttcagcaccatcttcaaagacg

SEQ ID NO: 108411 - DNA, 25 bp, Artificial
  probe
  misc_feature (1)..(25): SEQ ID NO: 1481; WAN024C8M_at; Start 260; Stop 284
gacggaacaatggagtttgtccacc

SEQ ID NO: 108412 - DNA, 25 bp, Artificial
  probe
  misc_feature (1)..(25): SEQ ID NO: 1481; WAN024C8M_at; Start 118; Stop 142
gacttttcagctttaacaattcctg

SEQ ID NO: 108413 - DNA, 25 bp, Artificial
  probe
  misc_feature (1)..(25): SEQ ID NO: 1481; WAN024C8M_at; Start 181; Stop 205
tcaaagacgttcaattggtcaaggt

SEQ ID NO: 108414 - DNA, 25 bp, Artificial
  probe
  misc_feature (1)..(25): SEQ ID NO: 1481; WAN024C8M_at; Start 2; Stop 26
tgacttctactgaaccacctttagc

SEQ ID NO: 108415 - DNA, 25 bp, Artificial
  probe
  misc_feature (1)..(25): SEQ ID NO: 1481; WAN024C8M_at; Start 277; Stop 301
tgtccaccttcaaaaccaaggcgaa

SEQ ID NO: 108416 - DNA, 25 bp, Artificial
  probe
  misc_feature (1)..(25): SEQ ID NO: 1481; WAN024C8M_at; Start 17; Stop 41
cacctttagcagtgatagcttcttc

SEQ ID NO: 108417 - DNA, 25 bp, Artificial
  probe
  misc_feature (1)..(25): SEQ ID NO: 1481; WAN024C8M_at; Start 236; Stop 260
tagtgaatccacgttttggaagacg

SEQ ID NO: 108418 - DNA, 25 bp, Artificial
  probe
  misc_feature (1)..(25): SEQ ID NO: 1481; WAN024C8M_at; Start 176; Stop 200
catcttcaaagacgttcaattggtc

SEQ ID NO: 108419 - DNA, 25 bp, Artificial
  probe
  misc_feature (1)..(25): SEQ ID NO: 1481; WAN024C8M_at; Start 152; Stop 176
gaacaactggagttacttcagcacc

SEQ ID NO: 108420 - DNA, 25 bp, Artificial
  probe
  misc_feature (1)..(25): SEQ ID NO: 1481; WAN024C8M_at; Start 207; Stop 231
cacaattgcgtattctttagcgttg

SEQ ID NO: 108421 - DNA, 25 bp, Artificial
  probe
  misc_feature (1)..(25): SEQ ID NO: 1481; WAN024C8M_at; Start 23; Stop 47
tagcagtgatagcttcttcagctga

SEQ ID NO: 108422 - DNA, 25 bp, Artificial
  probe
  misc_feature (1)..(25): SEQ ID NO: 1481; WAN024C8M_at; Start 52; Stop 76
gagaatttagctgctttcacagtca

SEQ ID NO: 108423 - DNA, 25 bp, Artificial
  probe
  misc_feature (1)..(25): SEQ ID NO: 1481; WAN024C8M_at; Start 143; Stop 167
cttcgataagaacaactggagttac

SEQ ID NO: 108424 - DNA, 25 bp, Artificial
  probe
  misc_feature (1)..(25): SEQ ID NO: 1481; WAN024C8M_at; Start 30; Stop 54
gatagcttcttcagctgatttagag

SEQ ID NO: 108425 - DNA, 25 bp, Artificial
  probe
  misc_feature (1)..(25): SEQ ID NO: 1481; WAN024C8M_at; Start 75; Stop 99
caatttcttagtcaactcaccgtta

SEQ ID NO: 108426 - DNA, 25 bp, Artificial
  probe
  misc_feature (1)..(25): SEQ ID NO: 1481; WAN024C8M_at; Start 131; Stop 155
taacaattcctgcttcgataagaac

SEQ ID NO: 108427 - DNA, 25 bp, Artificial
  probe
  misc_feature (1)..(25): SEQ ID NO: 1481; WAN024C8M_at; Start 104; Stop 128
gaattttaatacctgacttttcagc

SEQ ID NO: 108428 - DNA, 25 bp, Artificial
  probe
  misc_feature (1)..(25): SEQ ID NO: 1481; WAN024C8M_at; Start 160; Stop 184
ggagttacttcagcaccatcttcaa

SEQ ID NO: 108429 - DNA, 25 bp, Artificial
  probe
  misc_feature (1)..(25): SEQ ID NO: 1481; WAN024C8M_at; Start 214; Stop 238
gcgtattctttagcgttgatgttag

SEQ ID NO: 108430 - DNA, 25 bp, Artificial
  probe
  misc_feature (1)..(25): SEQ ID NO: 1481; WAN024C8M_at; Start 270; Stop 294
tggagtttgtccaccttcaaaacca

SEQ ID NO: 108431 - DNA, 25 bp, Artificial
  probe
  misc_feature (1)..(25): SEQ ID NO: 1481; WAN024C8M_at; Start 264; Stop 288
gaacaatggagtttgtccaccttca

SEQ ID NO: 108432 - DNA, 25 bp, Artificial
  probe
  misc_feature (1)..(25): SEQ ID NO: 1481; WAN024C8M_at; Start 239; Stop 263
tgaatccacgttttggaagacgacg

SEQ ID NO: 108433 - DNA, 25 bp, Artificial
  probe
  misc_feature (1)..(25): SEQ ID NO: 1481; WAN024C8M_at; Start 38; Stop 62
cttcagctgatttagagaatttagc

SEQ ID NO: 108434 - DNA, 25 bp, Artificial
  probe
  misc_feature (1)..(25): SEQ ID NO: 1481; WAN024C8M_at; Start 186; Stop 210
gacgttcaattggtcaaggttcaca

SEQ ID NO: 108435 - DNA, 25 bp, Artificial
  probe
  misc_feature (1)..(25): SEQ ID NO: 1481; WAN024C8M_at; Start 224; Stop 248
tagcgttgatgttagtgaatccacg

SEQ ID NO: 108436 - DNA, 25 bp, Artificial
  probe
  misc_feature (1)..(25): SEQ ID NO: 1481; WAN024C8M_at; Start 303; Stop 327
tccgccaccgctacgagctttttga

SEQ ID NO: 108437 - DNA, 25 bp, Artificial
  probe
  misc_feature (1)..(25): SEQ ID NO: 868; WAN024C8N_at; Start 421; Stop 445
ggttcagtagaagtcatctaactaa

SEQ ID NO: 108438 - DNA, 25 bp, Artificial
  probe
  misc_feature (1)..(25): SEQ ID NO: 868; WAN024C8N_at; Start 387; Stop 411
taaatcagctgaagaagctatcact

SEQ ID NO: 108439 - DNA, 25 bp, Artificial
  probe
  misc_feature (1)..(25): SEQ ID NO: 868; WAN024C8N_at; Start 178; Stop 202
cgtcttccaaaacgtggattcacta

SEQ ID NO: 108440 - DNA, 25 bp, Artificial
  probe
  misc_feature (1)..(25): SEQ ID NO: 868; WAN024C8N_at; Start 412; Stop 436
gctaaaggtggttcagtagaagtca

SEQ ID NO: 108441 - DNA, 25 bp, Artificial
  probe
  misc_feature (1)..(25): SEQ ID NO: 868; WAN024C8N_at; Start 330; Stop 354
aattcttggtaacggtgagttgact

SEQ ID NO: 108442 - DNA, 25 bp, Artificial
  probe
  misc_feature (1)..(25): SEQ ID NO: 868; WAN024C8N_at; Start 91; Stop 115
tctggtcgtggtcaaaaaggtcaaa

SEQ ID NO: 108443 - DNA, 25 bp, Artificial
  probe
  misc_feature (1)..(25): SEQ ID NO: 868; WAN024C8N_at; Start 217; Stop 241
gaatacgcaattgtgaaccttgacc

SEQ ID NO: 108444 - DNA, 25 bp, Artificial
  probe
  misc_feature (1)..(25): SEQ ID NO: 868; WAN024C8N_at; Start 277; Stop 301
ccagttgttcttatcgaagcaggaa

SEQ ID NO: 108445 - DNA, 25 bp, Artificial
  probe
  misc_feature (1)..(25): SEQ ID NO: 868; WAN024C8N_at; Start 254; Stop 278
ttgaagatggtgctgaagtaactcc

SEQ ID NO: 108446 - DNA, 25 bp, Artificial
  probe
  misc_feature (1)..(25): SEQ ID NO: 868; WAN024C8N_at; Start 354; Stop 378
taagaaattgactgtgaaagcagct

SEQ ID NO: 108447 - DNA, 25 bp, Artificial
  probe
  misc_feature (1)..(25): SEQ ID NO: 868; WAN024C8N_at; Start 151; Stop 175
gaaggtggacaaactccattgttcc

SEQ ID NO: 108448 - DNA, 25 bp, Artificial
  probe
  misc_feature (1)..(25): SEQ ID NO: 868; WAN024C8N_at; Start 310; Stop 334
gctgaaaagtcaggtattaaaattc

SEQ ID NO: 108449 - DNA, 25 bp, Artificial
  probe
  misc_feature (1)..(25): SEQ ID NO: 868; WAN024C8N_at; Start 376; Stop 400
gctaaattctctaaatcagctgaag

SEQ ID NO: 108450 - DNA, 25 bp, Artificial
  probe
  misc_feature (1)..(25): SEQ ID NO: 868; WAN024C8N_at; Start 288; Stop 312
tatcgaagcaggaattgttaaagct

SEQ ID NO: 108451 - DNA, 25 bp, Artificial
  probe
  misc_feature (1)..(25): SEQ ID NO: 868; WAN024C8N_at; Start 24; Stop 48
tgcagaaggttctcgtaaagtacgt

SEQ ID NO: 108452 - DNA, 25 bp, Artificial
  probe
  misc_feature (1)..(25): SEQ ID NO: 868; WAN024C8N_at; Start 262; Stop 286
ggtgctgaagtaactccagttgttc

SEQ ID NO: 108453 - DNA, 25 bp, Artificial
  probe
  misc_feature (1)..(25): SEQ ID NO: 868; WAN024C8N_at; Start 228; Stop 252
tgtgaaccttgaccaattgaacgtc

SEQ ID NO: 108454 - DNA, 25 bp, Artificial
  probe
  misc_feature (1)..(25): SEQ ID NO: 868; WAN024C8N_at; Start 238; Stop 262
gaccaattgaacgtctttgaagatg

SEQ ID NO: 108455 - DNA, 25 bp, Artificial
  probe
  misc_feature (1)..(25): SEQ ID NO: 868; WAN024C8N_at; Start 48; Stop 72
taaccgcgttggtcgtggtacttca

SEQ ID NO: 108456 - DNA, 25 bp, Artificial
  probe
  misc_feature (1)..(25): SEQ ID NO: 868; WAN024C8N_at; Start 397; Stop 421
gaagaagctatcactgctaaaggtg

SEQ ID NO: 108457 - DNA, 25 bp, Artificial
  probe
  misc_feature (1)..(25): SEQ ID NO: 868; WAN024C8N_at; Start 138; Stop 162
tcgccttggttttgaaggtggacaa

SEQ ID NO: 108458 - DNA, 25 bp, Artificial
  probe
  misc_feature (1)..(25): SEQ ID NO: 868; WAN024C8N_at; Start 298; Stop 322
ggaattgttaaagctgaaaagtcag

SEQ ID NO: 108459 - DNA, 25 bp, Artificial
  probe
  misc_feature (1)..(25): SEQ ID NO: 868; WAN024C8N_at; Start 61; Stop 85
cgtggtacttcatcaggtaacggta

SEQ ID NO: 108460 - DNA, 25 bp, Artificial
  probe
  misc_feature (1)..(25): SEQ ID NO: 868; WAN024C8N_at; Start 9; Stop 33
tcatgaattgaaacctgcagaaggt

SEQ ID NO: 108461 - DNA, 25 bp, Artificial
  probe
  misc_feature (1)..(25): SEQ ID NO: 868; WAN024C8N_at; Start 207; Stop 231
caacgctaaagaatacgcaattgtg

SEQ ID NO: 108462 - DNA, 25 bp, Artificial
  probe
  misc_feature (1)..(25): SEQ ID NO: 868; WAN024C8N_at; Start 74; Stop 98
caggtaacggtaaaacatctggtcg

SEQ ID NO: 108463 - DNA, 25 bp, Artificial
  probe
  misc_feature (1)..(25): SEQ ID NO: 868; WAN024C8N_at; Start 167; Stop 191
cattgttccgtcgtcttccaaaacg

SEQ ID NO: 108464 - DNA, 25 bp, Artificial
  probe
  misc_feature (1)..(25): SEQ ID NO: 868; WAN024C8N_at; Start 111; Stop 135
tcaaaaagctcgtagcggtggcgga

SEQ ID NO: 108465 - DNA, 25 bp, Artificial
  probe
  misc_feature (1)..(25): SEQ ID NO: 868; WAN024C8N_at; Start 339; Stop 363
taacggtgagttgactaagaaattg

SEQ ID NO: 108466 - DNA, 25 bp, Artificial
  probe
  misc_feature (1)..(25): SEQ ID NO: 868; WAN024C8N_at; Start 363; Stop 387
gactgtgaaagcagctaaattctct

SEQ ID NO: 108467 - DNA, 25 bp, Artificial
  probe
  misc_feature (1)..(25): SEQ ID NO: 868; WAN024C8N_at; Start 193; Stop 217
ggattcactaacatcaacgctaaag

SEQ ID NO: 108468 - DNA, 25 bp, Artificial
  probe
  misc_feature (1)..(25): SEQ ID NO: 868; WAN024C8N_at; Start 81; Stop 105
cggtaaaacatctggtcgtggtcaa

SEQ ID NO: 108469 - DNA, 25 bp, Artificial
  probe
  misc_feature (1)..(25): SEQ ID NO: 868; WAN024C8N_at; Start 2; Stop 26
tgaaacttcatgaattgaaacctgc

SEQ ID NO: 108470 - DNA, 25 bp, Artificial
  probe
  misc_feature (1)..(25): SEQ ID NO: 868; WAN024C8N_at; Start 106; Stop 130
aaaggtcaaaaagctcgtagcggtg

SEQ ID NO: 108471 - DNA, 25 bp, Artificial
  probe
  misc_feature (1)..(25): SEQ ID NO: 3056; WAN024C8O_at; Start 225; Stop 249
acggattgcttctggaacttcttga

SEQ ID NO: 108472 - DNA, 25 bp, Artificial
  probe
  misc_feature (1)..(25): SEQ ID NO: 3056; WAN024C8O_at; Start 104; Stop 128
cttctacagcaggtttcaacaatac

SEQ ID NO: 108473 - DNA, 25 bp, Artificial
  probe
  misc_feature (1)..(25): SEQ ID NO: 3056; WAN024C8O_at; Start 214; Stop 238
tctactgctttacggattgcttctg

SEQ ID NO: 108474 - DNA, 25 bp, Artificial
  probe
  misc_feature (1)..(25): SEQ ID NO: 3056; WAN024C8O_at; Start 36; Stop 60
tgtaatatctgccacacctgccaat

SEQ ID NO: 108475 - DNA, 25 bp, Artificial
  probe
  misc_feature (1)..(25): SEQ ID NO: 3056; WAN024C8O_at; Start 10; Stop 34
ggagtgttagaaccaagtgatttag

SEQ ID NO: 108476 - DNA, 25 bp, Artificial
  probe
  misc_feature (1)..(25): SEQ ID NO: 3056; WAN024C8O_at; Start 217; Stop 241
actgctttacggattgcttctggaa

SEQ ID NO: 108477 - DNA, 25 bp, Artificial
  probe
  misc_feature (1)..(25): SEQ ID NO: 3056; WAN024C8O_at; Start 163; Stop 187
gggattgttgttccaaccataggaa

SEQ ID NO: 108478 - DNA, 25 bp, Artificial
  probe
  misc_feature (1)..(25): SEQ ID NO: 3056; WAN024C8O_at; Start 168; Stop 192
tgttgttccaaccataggaacttcg

SEQ ID NO: 108479 - DNA, 25 bp, Artificial
  probe
  misc_feature (1)..(25): SEQ ID NO: 3056; WAN024C8O_at; Start 38; Stop 62
taatatctgccacacctgccaattc

SEQ ID NO: 108480 - DNA, 25 bp, Artificial
  probe
  misc_feature (1)..(25): SEQ ID NO: 3056; WAN024C8O_at; Start 91; Stop 115
gcaactccagaaccttctacagcag

SEQ ID NO: 108481 - DNA, 25 bp, Artificial
  probe
  misc_feature (1)..(25): SEQ ID NO: 3056; WAN024C8O_at; Start 2; Stop 26
tgttgattggagtgttagaaccaag

SEQ ID NO: 108482 - DNA, 25 bp, Artificial
  probe
  misc_feature (1)..(25): SEQ ID NO: 3056; WAN024C8O_at; Start 191; Stop 215
cgatcaagtttttcttagcatcatc

SEQ ID NO: 108483 - DNA, 25 bp, Artificial
  probe
  misc_feature (1)..(25): SEQ ID NO: 3056; WAN024C8O_at; Start 55; Stop 79
gccaattccacaacggcacgaactg

SEQ ID NO: 108484 - DNA, 25 bp, Artificial
  probe
  misc_feature (1)..(25): SEQ ID NO: 3056; WAN024C8O_at; Start 135; Stop 159
tccaccgaattctgaaagaacttcg

SEQ ID NO: 108485 - DNA, 25 bp, Artificial
  probe
  misc_feature (1)..(25): SEQ ID NO: 3056; WAN024C8O_at; Start 34; Stop 58
gatgtaatatctgccacacctgcca

SEQ ID NO: 108486 - DNA, 25 bp, Artificial
  probe
  misc_feature (1)..(25): SEQ ID NO: 3056; WAN024C8O_at; Start 174; Stop 198
tccaaccataggaacttcgatcaag

SEQ ID NO: 108487 - DNA, 25 bp, Artificial
  probe
  misc_feature (1)..(25): SEQ ID NO: 3056; WAN024C8O_at; Start 145; Stop 169
tctgaaagaacttcgtgtgggattg

SEQ ID NO: 108488 - DNA, 25 bp, Artificial
  probe
  misc_feature (1)..(25): SEQ ID NO: 3056; WAN024C8O_at; Start 112; Stop 136
gcaggtttcaacaatactttagctc

SEQ ID NO: 108489 - DNA, 25 bp, Artificial
  probe
  misc_feature (1)..(25): SEQ ID NO: 3056; WAN024C8O_at; Start 126; Stop 150
tactttagctccaccgaattctgaa

SEQ ID NO: 108490 - DNA, 25 bp, Artificial
  probe
  misc_feature (1)..(25): SEQ ID NO: 3056; WAN024C8O_at; Start 87; Stop 111
agcggcaactccagaaccttctaca

SEQ ID NO: 108491 - DNA, 25 bp, Artificial
  probe
  misc_feature (1)..(25): SEQ ID NO: 3056; WAN024C8O_at; Start 180; Stop 204
cataggaacttcgatcaagtttttc

SEQ ID NO: 108492 - DNA, 25 bp, Artificial
  probe
  misc_feature (1)..(25): SEQ ID NO: 3056; WAN024C8O_at; Start 209; Stop 233
catcatctactgctttacggattgc

SEQ ID NO: 108493 - DNA, 25 bp, Artificial
  probe
  misc_feature (1)..(25): SEQ ID NO: 3056; WAN024C8O_at; Start 221; Stop 245
ctttacggattgcttctggaacttc

SEQ ID NO: 108494 - DNA, 25 bp, Artificial
  probe
  misc_feature (1)..(25): SEQ ID NO: 3056; WAN024C8O_at; Start 28; Stop 52
gatttagatgtaatatctgccacac

SEQ ID NO: 108495 - DNA, 25 bp, Artificial
  probe
  misc_feature (1)..(25): SEQ ID NO: 3056; WAN024C8O_at; Start 131; Stop 155
tagctccaccgaattctgaaagaac

SEQ ID NO: 108496 - DNA, 25 bp, Artificial
  probe
  misc_feature (1)..(25): SEQ ID NO: 3056; WAN024C8O_at; Start 115; Stop 139
ggtttcaacaatactttagctccac

SEQ ID NO: 108497 - DNA, 25 bp, Artificial
  probe
  misc_feature (1)..(25): SEQ ID NO: 3056; WAN024C8O_at; Start 157; Stop 181
tcgtgtgggattgttgttccaacca

SEQ ID NO: 108498 - DNA, 25 bp, Artificial
  probe
  misc_feature (1)..(25): SEQ ID NO: 3056; WAN024C8O_at; Start 120; Stop 144
caacaatactttagctccaccgaat

SEQ ID NO: 108499 - DNA, 25 bp, Artificial
  probe
  misc_feature (1)..(25): SEQ ID NO: 3056; WAN024C8O_at; Start 153; Stop 177
aacttcgtgtgggattgttgttcca

SEQ ID NO: 108500 - DNA, 25 bp, Artificial
  probe
  misc_feature (1)..(25): SEQ ID NO: 3056; WAN024C8O_at; Start 206; Stop 230
tagcatcatctactgctttacggat

SEQ ID NO: 108501 - DNA, 25 bp, Artificial
  probe
  misc_feature (1)..(25): SEQ ID NO: 3056; WAN024C8O_at; Start 15; Stop 39
gttagaaccaagtgatttagatgta

SEQ ID NO: 108502 - DNA, 25 bp, Artificial
  probe
  misc_feature (1)..(25): SEQ ID NO: 3056; WAN024C8O_at; Start 98; Stop 122
cagaaccttctacagcaggtttcaa

SEQ ID NO: 108503 - DNA, 25 bp, Artificial
  probe
  misc_feature (1)..(25): SEQ ID NO: 3056; WAN024C8O_at; Start 72; Stop 96
acgaactgcaccaccagcggcaact

SEQ ID NO: 108504 - DNA, 25 bp, Artificial
  probe
  misc_feature (1)..(25): SEQ ID NO: 3056; WAN024C8O_at; Start 141; Stop 165
gaattctgaaagaacttcgtgtggg

SEQ ID NO: 108505 - DNA, 25 bp, Artificial
  probe
  misc_feature (1)..(25): SEQ ID NO: 2446; WAN024C8P_at; Start 401; Stop 425
acattgttcgtgcaactgttgaagg

SEQ ID NO: 108506 - DNA, 25 bp, Artificial
  probe
  misc_feature (1)..(25): SEQ ID NO: 2446; WAN024C8P_at; Start 269; Stop 293
gagctaaagtattgttgaaacctgc

SEQ ID NO: 108507 - DNA, 25 bp, Artificial
  probe
  misc_feature (1)..(25): SEQ ID NO: 2446; WAN024C8P_at; Start 83; Stop 107
gtcgtcttcgtttcgcagctcttgt

SEQ ID NO: 108508 - DNA, 25 bp, Artificial
  probe
  misc_feature (1)..(25): SEQ ID NO: 2446; WAN024C8P_at; Start 75; Stop 99
aggtggacgtcgtcttcgtttcgca

SEQ ID NO: 108509 - DNA, 25 bp, Artificial
  probe
  misc_feature (1)..(25): SEQ ID NO: 2446; WAN024C8P_at; Start 250; Stop 274
gttctttcagaattcggtggagcta

SEQ ID NO: 108510 - DNA, 25 bp, Artificial
  probe
  misc_feature (1)..(25): SEQ ID NO: 2446; WAN024C8P_at; Start 150; Stop 174
taaagctcaagaagttccagaagca

SEQ ID NO: 108511 - DNA, 25 bp, Artificial
  probe
  misc_feature (1)..(25): SEQ ID NO: 2446; WAN024C8P_at; Start 136; Stop 160
ggatttggtactggtaaagctcaag

SEQ ID NO: 108512 - DNA, 25 bp, Artificial
  probe
  misc_feature (1)..(25): SEQ ID NO: 2446; WAN024C8P_at; Start 448; Stop 472
gaagaaattgctgcccttcgtggta

SEQ ID NO: 108513 - DNA, 25 bp, Artificial
  probe
  misc_feature (1)..(25): SEQ ID NO: 2446; WAN024C8P_at; Start 15; Stop 39
caatgcagttgaattagaagaacgc

SEQ ID NO: 108514 - DNA, 25 bp, Artificial
  probe
  misc_feature (1)..(25): SEQ ID NO: 2446; WAN024C8P_at; Start 311; Stop 335
ttgccgctggtggtgcagttcgtgc

SEQ ID NO: 108515 - DNA, 25 bp, Artificial
  probe
  misc_feature (1)..(25): SEQ ID NO: 2446; WAN024C8P_at; Start 409; Stop 433
cgtgcaactgttgaaggtttgaaac

SEQ ID NO: 108516 - DNA, 25 bp, Artificial
  probe
  misc_feature (1)..(25): SEQ ID NO: 2446; WAN024C8P_at; Start 361; Stop 385
gatattacatctaaatcacttggtt

SEQ ID NO: 108517 - DNA, 25 bp, Artificial
  probe
  misc_feature (1)..(25): SEQ ID NO: 2446; WAN024C8P_at; Start 219; Stop 243
tcctatggttggaacaacaatccca

SEQ ID NO: 108518 - DNA, 25 bp, Artificial
  probe
  misc_feature (1)..(25): SEQ ID NO: 2446; WAN024C8P_at; Start 347; Stop 371
tggcaggtgtggcagatattacatc

SEQ ID NO: 108519 - DNA, 25 bp, Artificial
  probe
  misc_feature (1)..(25): SEQ ID NO: 2446; WAN024C8P_at; Start 326; Stop 350
cagttcgtgccgttgtggaattggc

SEQ ID NO: 108520 - DNA, 25 bp, Artificial
  probe
  misc_feature (1)..(25): SEQ ID NO: 2446; WAN024C8P_at; Start 475; Stop 499
tcagtttctgatttggcataactaa

SEQ ID NO: 108521 - DNA, 25 bp, Artificial
  probe
  misc_feature (1)..(25): SEQ ID NO: 2446; WAN024C8P_at; Start 438; Stop 462
gaaacgcgctgaagaaattgctgcc

SEQ ID NO: 108522 - DNA, 25 bp, Artificial
  probe
  misc_feature (1)..(25): SEQ ID NO: 2446; WAN024C8P_at; Start 460; Stop 484
gcccttcgtggtatttcagtttctg

SEQ ID NO: 108523 - DNA, 25 bp, Artificial
  probe
  misc_feature (1)..(25): SEQ ID NO: 2446; WAN024C8P_at; Start 278; Stop 302
tattgttgaaacctgctgtagaagg

SEQ ID NO: 108524 - DNA, 25 bp, Artificial
  probe
  misc_feature (1)..(25): SEQ ID NO: 2446; WAN024C8P_at; Start 193; Stop 217
gatgctaagaaaaacttgatcgaag

SEQ ID NO: 108525 - DNA, 25 bp, Artificial
  probe
  misc_feature (1)..(25): SEQ ID NO: 2446; WAN024C8P_at; Start 111; Stop 135
tgttggtgaccacaatggtcgcgta

SEQ ID NO: 108526 - DNA, 25 bp, Artificial
  probe
  misc_feature (1)..(25): SEQ ID NO: 2446; WAN024C8P_at; Start 46; Stop 70
gctgtcaaccgtgttacaaaagttg

SEQ ID NO: 108527 - DNA, 25 bp, Artificial
  probe
  misc_feature (1)..(25): SEQ ID NO: 2446; WAN024C8P_at; Start 98; Stop 122
cagctcttgttgttgttggtgacca

SEQ ID NO: 108528 - DNA, 25 bp, Artificial
  probe
  misc_feature (1)..(25): SEQ ID NO: 2446; WAN024C8P_at; Start 424; Stop 448
ggtttgaaacaattgaaacgcgctg

SEQ ID NO: 108529 - DNA, 25 bp, Artificial
  probe
  misc_feature (1)..(25): SEQ ID NO: 2446; WAN024C8P_at; Start 178; Stop 202
cgtaaagcagtagatgatgctaaga

SEQ ID NO: 108530 - DNA, 25 bp, Artificial
  probe
  misc_feature (1)..(25): SEQ ID NO: 2446; WAN024C8P_at; Start 207; Stop 231
cttgatcgaagttcctatggttgga

SEQ ID NO: 108531 - DNA, 25 bp, Artificial
  probe
  misc_feature (1)..(25): SEQ ID NO: 2446; WAN024C8P_at; Start 256; Stop 280
tcagaattcggtggagctaaagtat

SEQ ID NO: 108532 - DNA, 25 bp, Artificial
  probe
  misc_feature (1)..(25): SEQ ID NO: 2446; WAN024C8P_at; Start 371; Stop 395
ctaaatcacttggttctaacactcc

SEQ ID NO: 108533 - DNA, 25 bp, Artificial
  probe
  misc_feature (1)..(25): SEQ ID NO: 2446; WAN024C8P_at; Start 236; Stop 260
caatcccacacgaagttctttcaga

SEQ ID NO: 108534 - DNA, 25 bp, Artificial
  probe
  misc_feature (1)..(25): SEQ ID NO: 2446; WAN024C8P_at; Start 2; Stop 26
tggcatttaaagacaatgcagttga

SEQ ID NO: 108535 - DNA, 25 bp, Artificial
  probe
  misc_feature (1)..(25): SEQ ID NO: 2446; WAN024C8P_at; Start 31; Stop 55
gaagaacgcgtagttgctgtcaacc

SEQ ID NO: 108536 - DNA, 25 bp, Artificial
  probe
  misc_feature (1)..(25): SEQ ID NO: 2446; WAN024C8P_at; Start 123; Stop 147
caatggtcgcgtaggatttggtact

SEQ ID NO: 108537 - DNA, 25 bp, Artificial
  probe
  misc_feature (1)..(25): SEQ ID NO: 2446; WAN024C8P_at; Start 228; Stop 252
tggaacaacaatcccacacgaagtt

SEQ ID NO: 108538 - DNA, 25 bp, Artificial
  probe
  misc_feature (1)..(25): SEQ ID NO: 2446; WAN024C8P_at; Start 294; Stop 318
tgtagaaggttctggagttgccgct

SEQ ID NO: 108539 - DNA, 25 bp, Artificial
  probe
  misc_feature (1)..(25): SEQ ID NO: 2020; WAN024C8Q_at; Start 270; Stop 294
tatggttctggtgaacgaaggctac

SEQ ID NO: 108540 - DNA, 25 bp, Artificial
  probe
  misc_feature (1)..(25): SEQ ID NO: 2020; WAN024C8Q_at; Start 68; Stop 92
cgcgacggtggcgtttttggcggag

SEQ ID NO: 108541 - DNA, 25 bp, Artificial
  probe
  misc_feature (1)..(25): SEQ ID NO: 2020; WAN024C8Q_at; Start 274; Stop 298
gttctggtgaacgaaggctacgtac

SEQ ID NO: 108542 - DNA, 25 bp, Artificial
  probe
  misc_feature (1)..(25): SEQ ID NO: 2020; WAN024C8Q_at; Start 286; Stop 310
gaaggctacgtacgtaagcagctgt

SEQ ID NO: 108543 - DNA, 25 bp, Artificial
  probe
  misc_feature (1)..(25): SEQ ID NO: 2020; WAN024C8Q_at; Start 38; Stop 62
gatcagcagttccagagagttttcc

SEQ ID NO: 108544 - DNA, 25 bp, Artificial
  probe
  misc_feature (1)..(25): SEQ ID NO: 2020; WAN024C8Q_at; Start 290; Stop 314
gctacgtacgtaagcagctgtttga

SEQ ID NO: 108545 - DNA, 25 bp, Artificial
  probe
  misc_feature (1)..(25): SEQ ID NO: 2020; WAN024C8Q_at; Start 43; Stop 67
gcagttccagagagttttccgcgaa

SEQ ID NO: 108546 - DNA, 25 bp, Artificial
  probe
  misc_feature (1)..(25): SEQ ID NO: 2020; WAN024C8Q_at; Start 316; Stop 340
caactacttcttttgaaattccgct

SEQ ID NO: 108547 - DNA, 25 bp, Artificial
  probe
  misc_feature (1)..(25): SEQ ID NO: 2020; WAN024C8Q_at; Start 167; Stop 191
aaaataggttggtggttgatgatca

SEQ ID NO: 108548 - DNA, 25 bp, Artificial
  probe
  misc_feature (1)..(25): SEQ ID NO: 2020; WAN024C8Q_at; Start 306; Stop 330
gctgtttgaccaactacttcttttg

SEQ ID NO: 108549 - DNA, 25 bp, Artificial
  probe
  misc_feature (1)..(25): SEQ ID NO: 2020; WAN024C8Q_at; Start 134; Stop 158
tagttttaaatcgtgtgctatgcac

SEQ ID NO: 108550 - DNA, 25 bp, Artificial
  probe
  misc_feature (1)..(25): SEQ ID NO: 2020; WAN024C8Q_at; Start 41; Stop 65
cagcagttccagagagttttccgcg

SEQ ID NO: 108551 - DNA, 25 bp, Artificial
  probe
  misc_feature (1)..(25): SEQ ID NO: 2020; WAN024C8Q_at; Start 145; Stop 169
cgtgtgctatgcacaaagttggaaa

SEQ ID NO: 108552 - DNA, 25 bp, Artificial
  probe
  misc_feature (1)..(25): SEQ ID NO: 2020; WAN024C8Q_at; Start 48; Stop 72
tccagagagttttccgcgaacgcga

SEQ ID NO: 108553 - DNA, 25 bp, Artificial
  probe
  misc_feature (1)..(25): SEQ ID NO: 2020; WAN024C8Q_at; Start 301; Stop 325
aagcagctgtttgaccaactacttc

SEQ ID NO: 108554 - DNA, 25 bp, Artificial
  probe
  misc_feature (1)..(25): SEQ ID NO: 2020; WAN024C8Q_at; Start 298; Stop 322
cgtaagcagctgtttgaccaactac

SEQ ID NO: 108555 - DNA, 25 bp, Artificial
  probe
  misc_feature (1)..(25): SEQ ID NO: 2020; WAN024C8Q_at; Start 29; Stop 53
aacgtgggcgatcagcagttccaga

SEQ ID NO: 108556 - DNA, 25 bp, Artificial
  probe
  misc_feature (1)..(25): SEQ ID NO: 2020; WAN024C8Q_at; Start 126; Stop 150
cacctctttagttttaaatcgtgtg

SEQ ID NO: 108557 - DNA, 25 bp, Artificial
  probe
  misc_feature (1)..(25): SEQ ID NO: 2020; WAN024C8Q_at; Start 112; Stop 136
gaaatcacagttttcacctctttag

SEQ ID NO: 108558 - DNA, 25 bp, Artificial
  probe
  misc_feature (1)..(25): SEQ ID NO: 2020; WAN024C8Q_at; Start 16; Stop 40
cggaatacgttcaaacgtgggcgat

SEQ ID NO: 108559 - DNA, 25 bp, Artificial
  probe
  misc_feature (1)..(25): SEQ ID NO: 2020; WAN024C8Q_at; Start 154; Stop 178
tgcacaaagttggaaaataggttgg

SEQ ID NO: 108560 - DNA, 25 bp, Artificial
  probe
  misc_feature (1)..(25): SEQ ID NO: 2020; WAN024C8Q_at; Start 2; Stop 26
tgcctgtattagaacggaatacgtt

SEQ ID NO: 108561 - DNA, 25 bp, Artificial
  probe
  misc_feature (1)..(25): SEQ ID NO: 2020; WAN024C8Q_at; Start 282; Stop 306
gaacgaaggctacgtacgtaagcag

SEQ ID NO: 108562 - DNA, 25 bp, Artificial
  probe
  misc_feature (1)..(25): SEQ ID NO: 2020; WAN024C8Q_at; Start 294; Stop 318
cgtacgtaagcagctgtttgaccaa

SEQ ID NO: 108563 - DNA, 25 bp, Artificial
  probe
  misc_feature (1)..(25): SEQ ID NO: 2020; WAN024C8Q_at; Start 53; Stop 77
agagttttccgcgaacgcgacggtg

SEQ ID NO: 108564 - DNA, 25 bp, Artificial
  probe
  misc_feature (1)..(25): SEQ ID NO: 2020; WAN024C8Q_at; Start 262; Stop 286
tacctttatatggttctggtgaacg

SEQ ID NO: 108565 - DNA, 25 bp, Artificial
  probe
  misc_feature (1)..(25): SEQ ID NO: 2020; WAN024C8Q_at; Start 276; Stop 300
tctggtgaacgaaggctacgtacgt

SEQ ID NO: 108566 - DNA, 25 bp, Artificial
  probe
  misc_feature (1)..(25): SEQ ID NO: 2020; WAN024C8Q_at; Start 96; Stop 120
gtttttatctggttttgaaatcaca

SEQ ID NO: 108567 - DNA, 25 bp, Artificial
  probe
  misc_feature (1)..(25): SEQ ID NO: 2020; WAN024C8Q_at; Start 26; Stop 50
tcaaacgtgggcgatcagcagttcc

SEQ ID NO: 108568 - DNA, 25 bp, Artificial
  probe
  misc_feature (1)..(25): SEQ ID NO: 2020; WAN024C8Q_at; Start 189; Stop 213
tcaaccactcaacattatttacctg

SEQ ID NO: 108569 - DNA, 25 bp, Artificial
  probe
  misc_feature (1)..(25): SEQ ID NO: 2020; WAN024C8Q_at; Start 184; Stop 208
gatgatcaaccactcaacattattt

SEQ ID NO: 108570 - DNA, 25 bp, Artificial
  probe
  misc_feature (1)..(25): SEQ ID NO: 2020; WAN024C8Q_at; Start 21; Stop 45
tacgttcaaacgtgggcgatcagca

SEQ ID NO: 108571 - DNA, 25 bp, Artificial
  probe
  misc_feature (1)..(25): SEQ ID NO: 2020; WAN024C8Q_at; Start 34; Stop 58
gggcgatcagcagttccagagagtt

SEQ ID NO: 108572 - DNA, 25 bp, Artificial
  probe
  misc_feature (1)..(25): SEQ ID NO: 2020; WAN024C8Q_at; Start 180; Stop 204
ggttgatgatcaaccactcaacatt

SEQ ID NO: 108573 - DNA, 25 bp, Artificial
  probe
  misc_feature (1)..(25): SEQ ID NO: 4032; WAN024C8R_at; Start 261; Stop 285
tatttcagaagtggtgttcgaccgc

SEQ ID NO: 108574 - DNA, 25 bp, Artificial
  probe
  misc_feature (1)..(25): SEQ ID NO: 4032; WAN024C8R_at; Start 311; Stop 335
tgaaagctttggctgatgcagctcg

SEQ ID NO: 108575 - DNA, 25 bp, Artificial
  probe
  misc_feature (1)..(25): SEQ ID NO: 4032; WAN024C8R_at; Start 264; Stop 288
ttcagaagtggtgttcgaccgcggt

SEQ ID NO: 108576 - DNA, 25 bp, Artificial
  probe
  misc_feature (1)..(25): SEQ ID NO: 4032; WAN024C8R_at; Start 139; Stop 163
gacgtagcgggtgtaacgctcgcaa

SEQ ID NO: 108577 - DNA, 25 bp, Artificial
  probe
  misc_feature (1)..(25): SEQ ID NO: 4032; WAN024C8R_at; Start 131; Stop 155
tgattgatgacgtagcgggtgtaac

SEQ ID NO: 108578 - DNA, 25 bp, Artificial
  probe
  misc_feature (1)..(25): SEQ ID NO: 4032; WAN024C8R_at; Start 146; Stop 170
cgggtgtaacgctcgcaagtgcttc

SEQ ID NO: 108579 - DNA, 25 bp, Artificial
  probe
  misc_feature (1)..(25): SEQ ID NO: 4032; WAN024C8R_at; Start 197; Stop 221
gaactaaaactgaacaagccgttgc

SEQ ID NO: 108580 - DNA, 25 bp, Artificial
  probe
  misc_feature (1)..(25): SEQ ID NO: 4032; WAN024C8R_at; Start 56; Stop 80
gcggaaaactctctggaactgctga

SEQ ID NO: 108581 - DNA, 25 bp, Artificial
  probe
  misc_feature (1)..(25): SEQ ID NO: 4032; WAN024C8R_at; Start 216; Stop 240
cgttgctgtcggtaaactcgttgca

SEQ ID NO: 108582 - DNA, 25 bp, Artificial
  probe
  misc_feature (1)..(25): SEQ ID NO: 4032; WAN024C8R_at; Start 247; Stop 271
gcaaacgctaaaggtatttcagaag

SEQ ID NO: 108583 - DNA, 25 bp, Artificial
  probe
  misc_feature (1)..(25): SEQ ID NO: 4032; WAN024C8R_at; Start 336; Stop 360
tgaaaacggattgaaattctaacta

SEQ ID NO: 108584 - DNA, 25 bp, Artificial
  probe
  misc_feature (1)..(25): SEQ ID NO: 4032; WAN024C8R_at; Start 75; Stop 99
tgctgatcgcccacgtttgaacgta

SEQ ID NO: 108585 - DNA, 25 bp, Artificial
  probe
  misc_feature (1)..(25): SEQ ID NO: 4032; WAN024C8R_at; Start 328; Stop 352
gcagctcgtgaaaacggattgaaat

SEQ ID NO: 108586 - DNA, 25 bp, Artificial
  probe
  misc_feature (1)..(25): SEQ ID NO: 4032; WAN024C8R_at; Start 173; Stop 197
ctcttgataaagaagtttcaaaagg

SEQ ID NO: 108587 - DNA, 25 bp, Artificial
  probe
  misc_feature (1)..(25): SEQ ID NO: 4032; WAN024C8R_at; Start 150; Stop 174
tgtaacgctcgcaagtgcttcaact

SEQ ID NO: 108588 - DNA, 25 bp, Artificial
  probe
  misc_feature (1)..(25): SEQ ID NO: 4032; WAN024C8R_at; Start 126; Stop 150
tcaagtgattgatgacgtagcgggt

SEQ ID NO: 108589 - DNA, 25 bp, Artificial
  probe
  misc_feature (1)..(25): SEQ ID NO: 4032; WAN024C8R_at; Start 43; Stop 67
caccgtcgcgttcgcggaaaactct

SEQ ID NO: 108590 - DNA, 25 bp, Artificial
  probe
  misc_feature (1)..(25): SEQ ID NO: 4032; WAN024C8R_at; Start 70; Stop 94
ggaactgctgatcgcccacgtttga

SEQ ID NO: 108591 - DNA, 25 bp, Artificial
  probe
  misc_feature (1)..(25): SEQ ID NO: 4032; WAN024C8R_at; Start 288; Stop 312
tggatatctatatcacggacgtgtg

SEQ ID NO: 108592 - DNA, 25 bp, Artificial
  probe
  misc_feature (1)..(25): SEQ ID NO: 4032; WAN024C8R_at; Start 113; Stop 137
caggcatctacgctcaagtgattga

SEQ ID NO: 108593 - DNA, 25 bp, Artificial
  probe
  misc_feature (1)..(25): SEQ ID NO: 4032; WAN024C8R_at; Start 1; Stop 25
gtgatttcaaaaccagataaaaaca

SEQ ID NO: 108594 - DNA, 25 bp, Artificial
  probe
  misc_feature (1)..(25): SEQ ID NO: 4032; WAN024C8R_at; Start 278; Stop 302
tcgaccgcggtggatatctatatca

SEQ ID NO: 108595 - DNA, 25 bp, Artificial
  probe
  misc_feature (1)..(25): SEQ ID NO: 4032; WAN024C8R_at; Start 201; Stop 225
taaaactgaacaagccgttgctgtc

SEQ ID NO: 108596 - DNA, 25 bp, Artificial
  probe
  misc_feature (1)..(25): SEQ ID NO: 4032; WAN024C8R_at; Start 301; Stop 325
cacggacgtgtgaaagctttggctg

SEQ ID NO: 108597 - DNA, 25 bp, Artificial
  probe
  misc_feature (1)..(25): SEQ ID NO: 4032; WAN024C8R_at; Start 48; Stop 72
tcgcgttcgcggaaaactctctgga

SEQ ID NO: 108598 - DNA, 25 bp, Artificial
  probe
  misc_feature (1)..(25): SEQ ID NO: 4032; WAN024C8R_at; Start 160; Stop 184
gcaagtgcttcaactcttgataaag

SEQ ID NO: 108599 - DNA, 25 bp, Artificial
  probe
  misc_feature (1)..(25): SEQ ID NO: 4032; WAN024C8R_at; Start 237; Stop 261
tgcagaacgtgcaaacgctaaaggt

SEQ ID NO: 108600 - DNA, 25 bp, Artificial
  probe
  misc_feature (1)..(25): SEQ ID NO: 4032; WAN024C8R_at; Start 321; Stop 345
ggctgatgcagctcgtgaaaacgga

SEQ ID NO: 108601 - DNA, 25 bp, Artificial
  probe
  misc_feature (1)..(25): SEQ ID NO: 4032; WAN024C8R_at; Start 211; Stop 235
caagccgttgctgtcggtaaactcg

SEQ ID NO: 108602 - DNA, 25 bp, Artificial
  probe
  misc_feature (1)..(25): SEQ ID NO: 4032; WAN024C8R_at; Start 62; Stop 86
aactctctggaactgctgatcgccc

SEQ ID NO: 108603 - DNA, 25 bp, Artificial
  probe
  misc_feature (1)..(25): SEQ ID NO: 4032; WAN024C8R_at; Start 108; Stop 132
taatacaggcatctacgctcaagtg

SEQ ID NO: 108604 - DNA, 25 bp, Artificial
  probe
  misc_feature (1)..(25): SEQ ID NO: 4032; WAN024C8R_at; Start 79; Stop 103
gatcgcccacgtttgaacgtattcc

SEQ ID NO: 108605 - DNA, 25 bp, Artificial
  probe
  misc_feature (1)..(25): SEQ ID NO: 4032; WAN024C8R_at; Start 224; Stop 248
tcggtaaactcgttgcagaacgtgc

SEQ ID NO: 108606 - DNA, 25 bp, Artificial
  probe
  misc_feature (1)..(25): SEQ ID NO: 4032; WAN024C8R_at; Start 93; Stop 117
gaacgtattccgttctaatacaggc

SEQ ID NO: 108607 - DNA, 25 bp, Artificial
  probe
  misc_feature (1)..(25): SEQ ID NO: 2853; WAN024C8S_at; Start 18; Stop 42
taaagttatcgtgttgcctgctggt

SEQ ID NO: 108608 - DNA, 25 bp, Artificial
  probe
  misc_feature (1)..(25): SEQ ID NO: 2853; WAN024C8S_at; Start 322; Stop 346
ggtaaatctcatccagacgaagttg

SEQ ID NO: 108609 - DNA, 25 bp, Artificial
  probe
  misc_feature (1)..(25): SEQ ID NO: 2853; WAN024C8S_at; Start 182; Stop 206
tgaaaactatccacggaactactcg

SEQ ID NO: 108610 - DNA, 25 bp, Artificial
  probe
  misc_feature (1)..(25): SEQ ID NO: 2853; WAN024C8S_at; Start 331; Stop 355
catccagacgaagttgaagctccag

SEQ ID NO: 108611 - DNA, 25 bp, Artificial
  probe
  misc_feature (1)..(25): SEQ ID NO: 2853; WAN024C8S_at; Start 427; Stop 451
caaacagctgcttacgtacgtagcc

SEQ ID NO: 108612 - DNA, 25 bp, Artificial
  probe
  misc_feature (1)..(25): SEQ ID NO: 2853; WAN024C8S_at; Start 369; Stop 393
tgaacttccaaacccaacaacaatc

SEQ ID NO: 108613 - DNA, 25 bp, Artificial
  probe
  misc_feature (1)..(25): SEQ ID NO: 2853; WAN024C8S_at; Start 86; Stop 110
ctaaaggagaacttactcgtgagtt

SEQ ID NO: 108614 - DNA, 25 bp, Artificial
  probe
  misc_feature (1)..(25): SEQ ID NO: 2853; WAN024C8S_at; Start 4; Stop 28
tcacgtattggtaataaagttatcg

SEQ ID NO: 108615 - DNA, 25 bp, Artificial
  probe
  misc_feature (1)..(25): SEQ ID NO: 2853; WAN024C8S_at; Start 295; Stop 319
caaggatctaaacttgttttggctg

SEQ ID NO: 108616 - DNA, 25 bp, Artificial
  probe
  misc_feature (1)..(25): SEQ ID NO: 2853; WAN024C8S_at; Start 396; Stop 420
tgttagcggaatttcaaaagaagta

SEQ ID NO: 108617 - DNA, 25 bp, Artificial
  probe
  misc_feature (1)..(25): SEQ ID NO: 2853; WAN024C8S_at; Start 60; Stop 84
tgacaacgttgtaactgtaaaagga

SEQ ID NO: 108618 - DNA, 25 bp, Artificial
  probe
  misc_feature (1)..(25): SEQ ID NO: 2853; WAN024C8S_at; Start 113; Stop 137
caaaagatattgaaatccgtgtgga

SEQ ID NO: 108619 - DNA, 25 bp, Artificial
  probe
  misc_feature (1)..(25): SEQ ID NO: 2853; WAN024C8S_at; Start 461; Stop 485
cagaaccatataaaggtaaaggtat

SEQ ID NO: 108620 - DNA, 25 bp, Artificial
  probe
  misc_feature (1)..(25): SEQ ID NO: 2853; WAN024C8S_at; Start 29; Stop 53
tgttgcctgctggtgttgaactcgc

SEQ ID NO: 108621 - DNA, 25 bp, Artificial
  probe
  misc_feature (1)..(25): SEQ ID NO: 2853; WAN024C8S_at; Start 349; Stop 373
gctccagaaggaattacttttgaac

SEQ ID NO: 108622 - DNA, 25 bp, Artificial
  probe
  misc_feature (1)..(25): SEQ ID NO: 2853; WAN024C8S_at; Start 236; Stop 260
tatcagaaggattcaagaaagaact

SEQ ID NO: 108623 - DNA, 25 bp, Artificial
  probe
  misc_feature (1)..(25): SEQ ID NO: 2853; WAN024C8S_at; Start 219; Stop 243
caacatggttgttggtgtatcagaa

SEQ ID NO: 108624 - DNA, 25 bp, Artificial
  probe
  misc_feature (1)..(25): SEQ ID NO: 2853; WAN024C8S_at; Start 454; Stop 478
cgttcaccagaaccatataaaggta

SEQ ID NO: 108625 - DNA, 25 bp, Artificial
  probe
  misc_feature (1)..(25): SEQ ID NO: 2853; WAN024C8S_at; Start 439; Stop 463
tacgtacgtagccttcgttcaccag

SEQ ID NO: 108626 - DNA, 25 bp, Artificial
  probe
  misc_feature (1)..(25): SEQ ID NO: 2853; WAN024C8S_at; Start 173; Stop 197
caaaagaaatgaaaactatccacgg

SEQ ID NO: 108627 - DNA, 25 bp, Artificial
  probe
  misc_feature (1)..(25): SEQ ID NO: 2853; WAN024C8S_at; Start 410; Stop 434
caaaagaagtagttggtcaaacagc

SEQ ID NO: 108628 - DNA, 25 bp, Artificial
  probe
  misc_feature (1)..(25): SEQ ID NO: 2853; WAN024C8S_at; Start 311; Stop 335
ttttggctgttggtaaatctcatcc

SEQ ID NO: 108629 - DNA, 25 bp, Artificial
  probe
  misc_feature (1)..(25): SEQ ID NO: 2853; WAN024C8S_at; Start 386; Stop 410
caacaatcgttgttagcggaatttc

SEQ ID NO: 108630 - DNA, 25 bp, Artificial
  probe
  misc_feature (1)..(25): SEQ ID NO: 2853; WAN024C8S_at; Start 337; Stop 361
gacgaagttgaagctccagaaggaa

SEQ ID NO: 108631 - DNA, 25 bp, Artificial
  probe
  misc_feature (1)..(25): SEQ ID NO: 2853; WAN024C8S_at; Start 196; Stop 220
ggaactactcgtgcccttttgaaca

SEQ ID NO: 108632 - DNA, 25 bp, Artificial
  probe
  misc_feature (1)..(25): SEQ ID NO: 2853; WAN024C8S_at; Start 123; Stop 147
tgaaatccgtgtggaaggtactgaa

SEQ ID NO: 108633 - DNA, 25 bp, Artificial
  probe
  misc_feature (1)..(25): SEQ ID NO: 2853; WAN024C8S_at; Start 282; Stop 306
ccgtgcacagcttcaaggatctaaa

SEQ ID NO: 108634 - DNA, 25 bp, Artificial
  probe
  misc_feature (1)..(25): SEQ ID NO: 2853; WAN024C8S_at; Start 39; Stop 63
tggtgttgaactcgctaacaatgac

SEQ ID NO: 108635 - DNA, 25 bp, Artificial
  probe
  misc_feature (1)..(25): SEQ ID NO: 2853; WAN024C8S_at; Start 100; Stop 124
actcgtgagttctcaaaagatattg

SEQ ID NO: 108636 - DNA, 25 bp, Artificial
  probe
  misc_feature (1)..(25): SEQ ID NO: 2853; WAN024C8S_at; Start 159; Stop 183
ccgtccaaacgattcaaaagaaatg

SEQ ID NO: 108637 - DNA, 25 bp, Artificial
  probe
  misc_feature (1)..(25): SEQ ID NO: 2853; WAN024C8S_at; Start 272; Stop 296
gggttggttaccgtgcacagcttca

SEQ ID NO: 108638 - DNA, 25 bp, Artificial
  probe
  misc_feature (1)..(25): SEQ ID NO: 2853; WAN024C8S_at; Start 418; Stop 442
gtagttggtcaaacagctgcttacg

SEQ ID NO: 108639 - DNA, 25 bp, Artificial
  probe
  misc_feature (1)..(25): SEQ ID NO: 2853; WAN024C8S_at; Start 205; Stop 229
cgtgcccttttgaacaacatggttg

SEQ ID NO: 108640 - DNA, 25 bp, Artificial
  probe
  misc_feature (1)..(25): SEQ ID NO: 2853; WAN024C8S_at; Start 46; Stop 70
gaactcgctaacaatgacaacgttg

SEQ ID NO: 108641 - DNA, 25 bp, Artificial
  probe
  misc_feature (1)..(25): SEQ ID NO: 3991; WAN024C8T_at; Start 3; Stop 27
gataactttctcaccatttggtccg

SEQ ID NO: 108642 - DNA, 25 bp, Artificial
  probe
  misc_feature (1)..(25): SEQ ID NO: 3991; WAN024C8T_at; Start 122; Stop 146
cttttttgatgtttgatgcaggtac

SEQ ID NO: 108643 - DNA, 25 bp, Artificial
  probe
  misc_feature (1)..(25): SEQ ID NO: 3991; WAN024C8T_at; Start 185; Stop 209
tacgagttaggaagtctgcgattgg

SEQ ID NO: 108644 - DNA, 25 bp, Artificial
  probe
  misc_feature (1)..(25): SEQ ID NO: 3991; WAN024C8T_at; Start 166; Stop 190
gcttggttagcattacgaatacgag

SEQ ID NO: 108645 - DNA, 25 bp, Artificial
  probe
  misc_feature (1)..(25): SEQ ID NO: 3991; WAN024C8T_at; Start 128; Stop 152
tgatgtttgatgcaggtacttcaag

SEQ ID NO: 108646 - DNA, 25 bp, Artificial
  probe
  misc_feature (1)..(25): SEQ ID NO: 3991; WAN024C8T_at; Start 131; Stop 155
tgtttgatgcaggtacttcaagtac

SEQ ID NO: 108647 - DNA, 25 bp, Artificial
  probe
  misc_feature (1)..(25): SEQ ID NO: 3991; WAN024C8T_at; Start 176; Stop 200
cattacgaatacgagttaggaagtc

SEQ ID NO: 108648 - DNA, 25 bp, Artificial
  probe
  misc_feature (1)..(25): SEQ ID NO: 3991; WAN024C8T_at; Start 59; Stop 83
tgtcatcttcaatgatttcaacgtt

SEQ ID NO: 108649 - DNA, 25 bp, Artificial
  probe
  misc_feature (1)..(25): SEQ ID NO: 3991; WAN024C8T_at; Start 99; Stop 123
gcgtttaaggatttcagcaatccct

SEQ ID NO: 108650 - DNA, 25 bp, Artificial
  probe
  misc_feature (1)..(25): SEQ ID NO: 3991; WAN024C8T_at; Start 189; Stop 213
agttaggaagtctgcgattgggtca

SEQ ID NO: 108651 - DNA, 25 bp, Artificial
  probe
  misc_feature (1)..(25): SEQ ID NO: 3991; WAN024C8T_at; Start 28; Stop 52
tatttaagaaatacacggatgacgc

SEQ ID NO: 108652 - DNA, 25 bp, Artificial
  probe
  misc_feature (1)..(25): SEQ ID NO: 3991; WAN024C8T_at; Start 136; Stop 160
gatgcaggtacttcaagtacttcgt

SEQ ID NO: 108653 - DNA, 25 bp, Artificial
  probe
  misc_feature (1)..(25): SEQ ID NO: 3991; WAN024C8T_at; Start 204; Stop 228
gattgggtcagtcataaccattttg

SEQ ID NO: 108654 - DNA, 25 bp, Artificial
  probe
  misc_feature (1)..(25): SEQ ID NO: 3991; WAN024C8T_at; Start 192; Stop 216
taggaagtctgcgattgggtcagtc

SEQ ID NO: 108655 - DNA, 25 bp, Artificial
  probe
  misc_feature (1)..(25): SEQ ID NO: 3991; WAN024C8T_at; Start 113; Stop 137
cagcaatcccttttttgatgtttga

SEQ ID NO: 108656 - DNA, 25 bp, Artificial
  probe
  misc_feature (1)..(25): SEQ ID NO: 3991; WAN024C8T_at; Start 153; Stop 177
tacttcgtgtttagcttggttagca

SEQ ID NO: 108657 - DNA, 25 bp, Artificial
  probe
  misc_feature (1)..(25): SEQ ID NO: 3991; WAN024C8T_at; Start 48; Stop 72
gacgccttgtttgtcatcttcaatg

SEQ ID NO: 108658 - DNA, 25 bp, Artificial
  probe
  misc_feature (1)..(25): SEQ ID NO: 3991; WAN024C8T_at; Start 41; Stop 65
cacggatgacgccttgtttgtcatc

SEQ ID NO: 108659 - DNA, 25 bp, Artificial
  probe
  misc_feature (1)..(25): SEQ ID NO: 3991; WAN024C8T_at; Start 195; Stop 219
gaagtctgcgattgggtcagtcata

SEQ ID NO: 108660 - DNA, 25 bp, Artificial
  probe
  misc_feature (1)..(25): SEQ ID NO: 3991; WAN024C8T_at; Start 181; Stop 205
cgaatacgagttaggaagtctgcga

SEQ ID NO: 108661 - DNA, 25 bp, Artificial
  probe
  misc_feature (1)..(25): SEQ ID NO: 3991; WAN024C8T_at; Start 207; Stop 231
tgggtcagtcataaccattttgttt

SEQ ID NO: 108662 - DNA, 25 bp, Artificial
  probe
  misc_feature (1)..(25): SEQ ID NO: 3991; WAN024C8T_at; Start 179; Stop 203
tacgaatacgagttaggaagtctgc

SEQ ID NO: 108663 - DNA, 25 bp, Artificial
  probe
  misc_feature (1)..(25): SEQ ID NO: 3991; WAN024C8T_at; Start 13; Stop 37
tcaccatttggtccgtatttaagaa

SEQ ID NO: 108664 - DNA, 25 bp, Artificial
  probe
  misc_feature (1)..(25): SEQ ID NO: 3991; WAN024C8T_at; Start 37; Stop 61
aatacacggatgacgccttgtttgt

SEQ ID NO: 108665 - DNA, 25 bp, Artificial
  probe
  misc_feature (1)..(25): SEQ ID NO: 3991; WAN024C8T_at; Start 199; Stop 223
tctgcgattgggtcagtcataacca

SEQ ID NO: 108666 - DNA, 25 bp, Artificial
  probe
  misc_feature (1)..(25): SEQ ID NO: 3991; WAN024C8T_at; Start 30; Stop 54
tttaagaaatacacggatgacgcct

SEQ ID NO: 108667 - DNA, 25 bp, Artificial
  probe
  misc_feature (1)..(25): SEQ ID NO: 3991; WAN024C8T_at; Start 170; Stop 194
ggttagcattacgaatacgagttag

SEQ ID NO: 108668 - DNA, 25 bp, Artificial
  probe
  misc_feature (1)..(25): SEQ ID NO: 3991; WAN024C8T_at; Start 67; Stop 91
tcaatgatttcaacgttttttacaa

SEQ ID NO: 108669 - DNA, 25 bp, Artificial
  probe
  misc_feature (1)..(25): SEQ ID NO: 3991; WAN024C8T_at; Start 93; Stop 117
accttcgcgtttaaggatttcagca

SEQ ID NO: 108670 - DNA, 25 bp, Artificial
  probe
  misc_feature (1)..(25): SEQ ID NO: 3991; WAN024C8T_at; Start 158; Stop 182
cgtgtttagcttggttagcattacg

SEQ ID NO: 108671 - DNA, 25 bp, Artificial
  probe
  misc_feature (1)..(25): SEQ ID NO: 3991; WAN024C8T_at; Start 144; Stop 168
tacttcaagtacttcgtgtttagct

SEQ ID NO: 108672 - DNA, 25 bp, Artificial
  probe
  misc_feature (1)..(25): SEQ ID NO: 3991; WAN024C8T_at; Start 33; Stop 57
aagaaatacacggatgacgccttgt

SEQ ID NO: 108673 - DNA, 25 bp, Artificial
  probe
  misc_feature (1)..(25): SEQ ID NO: 3991; WAN024C8T_at; Start 215; Stop 239
tcataaccattttgtttttctcctc

SEQ ID NO: 108674 - DNA, 25 bp, Artificial
  probe
  misc_feature (1)..(25): SEQ ID NO: 3991; WAN024C8T_at; Start 108; Stop 132
gatttcagcaatcccttttttgatg

SEQ ID NO: 108675 - DNA, 25 bp, Artificial
  probe
  misc_feature (1)..(25): SEQ ID NO: 2699; WAN024C8U_at; Start 12; Stop 36
tgacccaatcgcagacttcctaact

SEQ ID NO: 108676 - DNA, 25 bp, Artificial
  probe
  misc_feature (1)..(25): SEQ ID NO: 2699; WAN024C8U_at; Start 105; Stop 129
gattgctgaaatccttaaacgcgaa

SEQ ID NO: 108677 - DNA, 25 bp, Artificial
  probe
  misc_feature (1)..(25): SEQ ID NO: 2699; WAN024C8U_at; Start 58; Stop 82
gctaaacacgaagtacttgaagtac

SEQ ID NO: 108678 - DNA, 25 bp, Artificial
  probe
  misc_feature (1)..(25): SEQ ID NO: 2699; WAN024C8U_at; Start 255; Stop 279
tcgtgtctacaaaaaacgtgaagac

SEQ ID NO: 108679 - DNA, 25 bp, Artificial
  probe
  misc_feature (1)..(25): SEQ ID NO: 2699; WAN024C8U_at; Start 163; Stop 187
gacaaacaaggcgtcatccgtgtat

SEQ ID NO: 108680 - DNA, 25 bp, Artificial
  probe
  misc_feature (1)..(25): SEQ ID NO: 2699; WAN024C8U_at; Start 177; Stop 201
catccgtgtatttcttaaatacgga

SEQ ID NO: 108681 - DNA, 25 bp, Artificial
  probe
  misc_feature (1)..(25): SEQ ID NO: 2699; WAN024C8U_at; Start 88; Stop 112
tcaaacatcaaaaaagggattgctg

SEQ ID NO: 108682 - DNA, 25 bp, Artificial
  probe
  misc_feature (1)..(25): SEQ ID NO: 2699; WAN024C8U_at; Start 366; Stop 390
tgttggtggtgaggttatcgcttac

SEQ ID NO: 108683 - DNA, 25 bp, Artificial
  probe
  misc_feature (1)..(25): SEQ ID NO: 2699; WAN024C8U_at; Start 325; Stop 349
tctgaaggtttgcttactgataaag

SEQ ID NO: 108684 - DNA, 25 bp, Artificial
  probe
  misc_feature (1)..(25): SEQ ID NO: 2699; WAN024C8U_at; Start 375; Stop 399
tgaggttatcgcttacgtttggtaa

SEQ ID NO: 108685 - DNA, 25 bp, Artificial
  probe
  misc_feature (1)..(25): SEQ ID NO: 2699; WAN024C8U_at; Start 6; Stop 30
tatgactgacccaatcgcagacttc

SEQ ID NO: 108686 - DNA, 25 bp, Artificial
  probe
  misc_feature (1)..(25): SEQ ID NO: 2699; WAN024C8U_at; Start 353; Stop 377
cacgccaaaagaatgttggtggtga

SEQ ID NO: 108687 - DNA, 25 bp, Artificial
  probe
  misc_feature (1)..(25): SEQ ID NO: 2699; WAN024C8U_at; Start 251; Stop 275
gacttcgtgtctacaaaaaacgtga

SEQ ID NO: 108688 - DNA, 25 bp, Artificial
  probe
  misc_feature (1)..(25): SEQ ID NO: 2699; WAN024C8U_at; Start 304; Stop 328
ggaattgccatcctttcaacttctg

SEQ ID NO: 108689 - DNA, 25 bp, Artificial
  probe
  misc_feature (1)..(25): SEQ ID NO: 2699; WAN024C8U_at; Start 310; Stop 334
gccatcctttcaacttctgaaggtt

SEQ ID NO: 108690 - DNA, 25 bp, Artificial
  probe
  misc_feature (1)..(25): SEQ ID NO: 2699; WAN024C8U_at; Start 69; Stop 93
agtacttgaagtacctgcatcaaac

SEQ ID NO: 108691 - DNA, 25 bp, Artificial
  probe
  misc_feature (1)..(25): SEQ ID NO: 2699; WAN024C8U_at; Start 292; Stop 316
cttaacggacttggaattgccatcc

SEQ ID NO: 108692 - DNA, 25 bp, Artificial
  probe
  misc_feature (1)..(25): SEQ ID NO: 2699; WAN024C8U_at; Start 349; Stop 373
gaagcacgccaaaagaatgttggtg

SEQ ID NO: 108693 - DNA, 25 bp, Artificial
  probe
  misc_feature (1)..(25): SEQ ID NO: 2699; WAN024C8U_at; Start 343; Stop 367
gataaagaagcacgccaaaagaatg

SEQ ID NO: 108694 - DNA, 25 bp, Artificial
  probe
  misc_feature (1)..(25): SEQ ID NO: 2699; WAN024C8U_at; Start 48; Stop 72
tgctaaccaagctaaacacgaagta

SEQ ID NO: 108695 - DNA, 25 bp, Artificial
  probe
  misc_feature (1)..(25): SEQ ID NO: 2699; WAN024C8U_at; Start 219; Stop 243
tatcactaacttgaaacgtgtttct

SEQ ID NO: 108696 - DNA, 25 bp, Artificial
  probe
  misc_feature (1)..(25): SEQ ID NO: 2699; WAN024C8U_at; Start 36; Stop 60
tcgtattcgtaatgctaaccaagct

SEQ ID NO: 108697 - DNA, 25 bp, Artificial
  probe
  misc_feature (1)..(25): SEQ ID NO: 2699; WAN024C8U_at; Start 22; Stop 46
gcagacttcctaactcgtattcgta

SEQ ID NO: 108698 - DNA, 25 bp, Artificial
  probe
  misc_feature (1)..(25): SEQ ID NO: 2699; WAN024C8U_at; Start 108; Stop 132
tgctgaaatccttaaacgcgaaggt

SEQ ID NO: 108699 - DNA, 25 bp, Artificial
  probe
  misc_feature (1)..(25): SEQ ID NO: 2699; WAN024C8U_at; Start 298; Stop 322
ggacttggaattgccatcctttcaa

SEQ ID NO: 108700 - DNA, 25 bp, Artificial
  probe
  misc_feature (1)..(25): SEQ ID NO: 2699; WAN024C8U_at; Start 235; Stop 259
cgtgtttctaaaccaggacttcgtg

SEQ ID NO: 108701 - DNA, 25 bp, Artificial
  probe
  misc_feature (1)..(25): SEQ ID NO: 2699; WAN024C8U_at; Start 93; Stop 117
catcaaaaaagggattgctgaaatc

SEQ ID NO: 108702 - DNA, 25 bp, Artificial
  probe
  misc_feature (1)..(25): SEQ ID NO: 2699; WAN024C8U_at; Start 243; Stop 267
taaaccaggacttcgtgtctacaaa

SEQ ID NO: 108703 - DNA, 25 bp, Artificial
  probe
  misc_feature (1)..(25): SEQ ID NO: 2699; WAN024C8U_at; Start 172; Stop 196
ggcgtcatccgtgtatttcttaaat

SEQ ID NO: 108704 - DNA, 25 bp, Artificial
  probe
  misc_feature (1)..(25): SEQ ID NO: 2699; WAN024C8U_at; Start 157; Stop 181
gaagatgacaaacaaggcgtcatcc

SEQ ID NO: 108705 - DNA, 25 bp, Artificial
  probe
  misc_feature (1)..(25): SEQ ID NO: 2699; WAN024C8U_at; Start 289; Stop 313
gttcttaacggacttggaattgcca

SEQ ID NO: 108706 - DNA, 25 bp, Artificial
  probe
  misc_feature (1)..(25): SEQ ID NO: 2699; WAN024C8U_at; Start 336; Stop 360
gcttactgataaagaagcacgccaa

SEQ ID NO: 108707 - DNA, 25 bp, Artificial
  probe
  misc_feature (1)..(25): SEQ ID NO: 2699; WAN024C8U_at; Start 76; Stop 100
gaagtacctgcatcaaacatcaaaa

SEQ ID NO: 108708 - DNA, 25 bp, Artificial
  probe
  misc_feature (1)..(25): SEQ ID NO: 2699; WAN024C8U_at; Start 2; Stop 26
tggttatgactgacccaatcgcaga

SEQ ID NO: 108709 - DNA, 25 bp, Artificial
  probe
  misc_feature (1)..(25): SEQ ID NO: 2395; WAN024C8V_at; Start 387; Stop 411
cacacttggtgtgaaagaacaatta

SEQ ID NO: 108710 - DNA, 25 bp, Artificial
  probe
  misc_feature (1)..(25): SEQ ID NO: 2395; WAN024C8V_at; Start 442; Stop 466
gacaaaactcgtggtcttgacatcg

SEQ ID NO: 108711 - DNA, 25 bp, Artificial
  probe
  misc_feature (1)..(25): SEQ ID NO: 2395; WAN024C8V_at; Start 97; Stop 121
gataagattgttttgaacatgggtg

SEQ ID NO: 108712 - DNA, 25 bp, Artificial
  probe
  misc_feature (1)..(25): SEQ ID NO: 2395; WAN024C8V_at; Start 403; Stop 427
gaacaattaatcttcccagaaatca

SEQ ID NO: 108713 - DNA, 25 bp, Artificial
  probe
  misc_feature (1)..(25): SEQ ID NO: 2395; WAN024C8V_at; Start 451; Stop 475
cgtggtcttgacatcgttatcgtaa

SEQ ID NO: 108714 - DNA, 25 bp, Artificial
  probe
  misc_feature (1)..(25): SEQ ID NO: 2395; WAN024C8V_at; Start 416; Stop 440
tcccagaaatcaacttcgatgacgt

SEQ ID NO: 108715 - DNA, 25 bp, Artificial
  probe
  misc_feature (1)..(25): SEQ ID NO: 2395; WAN024C8V_at; Start 460; Stop 484
gacatcgttatcgtaacaactgcta

SEQ ID NO: 108716 - DNA, 25 bp, Artificial
  probe
  misc_feature (1)..(25): SEQ ID NO: 2395; WAN024C8V_at; Start 82; Stop 106
gctgtgcctaaagtagataagattg

SEQ ID NO: 108717 - DNA, 25 bp, Artificial
  probe
  misc_feature (1)..(25): SEQ ID NO: 2395; WAN024C8V_at; Start 142; Stop 166
gctaaaagccttgaaaaagctgctg

SEQ ID NO: 108718 - DNA, 25 bp, Artificial
  probe
  misc_feature (1)..(25): SEQ ID NO: 2395; WAN024C8V_at; Start 431; Stop 455
tcgatgacgttgacaaaactcgtgg

SEQ ID NO: 108719 - DNA, 25 bp, Artificial
  probe
  misc_feature (1)..(25): SEQ ID NO: 2395; WAN024C8V_at; Start 270; Stop 294
tacccttcgtggtgaacgtatgtac

SEQ ID NO: 108720 - DNA, 25 bp, Artificial
  probe
  misc_feature (1)..(25): SEQ ID NO: 2395; WAN024C8V_at; Start 222; Stop 246
aatcgccggcttccgtcttcgtgaa

SEQ ID NO: 108721 - DNA, 25 bp, Artificial
  probe
  misc_feature (1)..(25): SEQ ID NO: 2395; WAN024C8V_at; Start 513; Stop 537
tacaggccttggaatgccttttgca

SEQ ID NO: 108722 - DNA, 25 bp, Artificial
  probe
  misc_feature (1)..(25): SEQ ID NO: 2395; WAN024C8V_at; Start 173; Stop 197
tggcacttatctcaggtcaaaaacc

SEQ ID NO: 108723 - DNA, 25 bp, Artificial
  probe
  misc_feature (1)..(25): SEQ ID NO: 2395; WAN024C8V_at; Start 502; Stop 526
cgtgcattgcttacaggccttggaa

SEQ ID NO: 108724 - DNA, 25 bp, Artificial
  probe
  misc_feature (1)..(25): SEQ ID NO: 2395; WAN024C8V_at; Start 207; Stop 231
taaagctaaaaaatcaatcgccggc

SEQ ID NO: 108725 - DNA, 25 bp, Artificial
  probe
  misc_feature (1)..(25): SEQ ID NO: 2395; WAN024C8V_at; Start 159; Stop 183
agctgctgaagaattggcacttatc

SEQ ID NO: 108726 - DNA, 25 bp, Artificial
  probe
  misc_feature (1)..(25): SEQ ID NO: 2395; WAN024C8V_at; Start 237; Stop 261
tcttcgtgaaggtgttgcgatcggt

SEQ ID NO: 108727 - DNA, 25 bp, Artificial
  probe
  misc_feature (1)..(25): SEQ ID NO: 2395; WAN024C8V_at; Start 188; Stop 212
gtcaaaaaccacttatcactaaagc

SEQ ID NO: 108728 - DNA, 25 bp, Artificial
  probe
  misc_feature (1)..(25): SEQ ID NO: 2395; WAN024C8V_at; Start 317; Stop 341
cagtttcacttccacgtgtacgtga

SEQ ID NO: 108729 - DNA, 25 bp, Artificial
  probe
  misc_feature (1)..(25): SEQ ID NO: 2395; WAN024C8V_at; Start 252; Stop 276
tgcgatcggtgcaaaagttaccctt

SEQ ID NO: 108730 - DNA, 25 bp, Artificial
  probe
  misc_feature (1)..(25): SEQ ID NO: 2395; WAN024C8V_at; Start 372; Stop 396
tggacgcgggaactacacacttggt

SEQ ID NO: 108731 - DNA, 25 bp, Artificial
  probe
  misc_feature (1)..(25): SEQ ID NO: 2395; WAN024C8V_at; Start 308; Stop 332
aattggtatcagtttcacttccacg

SEQ ID NO: 108732 - DNA, 25 bp, Artificial
  probe
  misc_feature (1)..(25): SEQ ID NO: 2395; WAN024C8V_at; Start 489; Stop 513
tgacgaagagtcacgtgcattgctt

SEQ ID NO: 108733 - DNA, 25 bp, Artificial
  probe
  misc_feature (1)..(25): SEQ ID NO: 2395; WAN024C8V_at; Start 55; Stop 79
gaacaattcaactactcatcagtga

SEQ ID NO: 108734 - DNA, 25 bp, Artificial
  probe
  misc_feature (1)..(25): SEQ ID NO: 2395; WAN024C8V_at; Start 42; Stop 66
tcctgctttgacagaacaattcaac

SEQ ID NO: 108735 - DNA, 25 bp, Artificial
  probe
  misc_feature (1)..(25): SEQ ID NO: 2395; WAN024C8V_at; Start 357; Stop 381
aacaaaatcatttgatggacgcggg

SEQ ID NO: 108736 - DNA, 25 bp, Artificial
  probe
  misc_feature (1)..(25): SEQ ID NO: 2395; WAN024C8V_at; Start 127; Stop 151
gaagctgtatcaaacgctaaaagcc

SEQ ID NO: 108737 - DNA, 25 bp, Artificial
  probe
  misc_feature (1)..(25): SEQ ID NO: 2395; WAN024C8V_at; Start 473; Stop 497
taacaactgctaacactgacgaaga

SEQ ID NO: 108738 - DNA, 25 bp, Artificial
  probe
  misc_feature (1)..(25): SEQ ID NO: 2395; WAN024C8V_at; Start 69; Stop 93
ctcatcagtgatggctgtgcctaaa

SEQ ID NO: 108739 - DNA, 25 bp, Artificial
  probe
  misc_feature (1)..(25): SEQ ID NO: 2395; WAN024C8V_at; Start 114; Stop 138
catgggtgttggtgaagctgtatca

SEQ ID NO: 108740 - DNA, 25 bp, Artificial
  probe
  misc_feature (1)..(25): SEQ ID NO: 2395; WAN024C8V_at; Start 30; Stop 54
taatgaagtagttcctgctttgaca

SEQ ID NO: 108741 - DNA, 25 bp, Artificial
  probe
  misc_feature (1)..(25): SEQ ID NO: 2395; WAN024C8V_at; Start 523; Stop 547
ggaatgccttttgcaaaataactaa

SEQ ID NO: 108742 - DNA, 25 bp, Artificial
  probe
  misc_feature (1)..(25): SEQ ID NO: 2395; WAN024C8V_at; Start 283; Stop 307
gaacgtatgtacgaattcttggata

SEQ ID NO: 108743 - DNA, 25 bp, Artificial
  probe
  misc_feature (1)..(25): SEQ ID NO: 6541; WAN024C8W_at; Start 486; Stop 510
cgagaggccggtttacattgtgtac

SEQ ID NO: 108744 - DNA, 25 bp, Artificial
  probe
  misc_feature (1)..(25): SEQ ID NO: 6541; WAN024C8W_at; Start 179; Stop 203
aactgttcgacaggtacctcggtag

SEQ ID NO: 108745 - DNA, 25 bp, Artificial
  probe
  misc_feature (1)..(25): SEQ ID NO: 6541; WAN024C8W_at; Start 390; Stop 414
gctcatcataggttttgccagaagg

SEQ ID NO: 108746 - DNA, 25 bp, Artificial
  probe
  misc_feature (1)..(25): SEQ ID NO: 6541; WAN024C8W_at; Start 222; Stop 246
tgacctcgaaggaatatggtacgga

SEQ ID NO: 108747 - DNA, 25 bp, Artificial
  probe
  misc_feature (1)..(25): SEQ ID NO: 6541; WAN024C8W_at; Start 80; Stop 104
tcaaaaatgtctggaagggagttcc

SEQ ID NO: 108748 - DNA, 25 bp, Artificial
  probe
  misc_feature (1)..(25): SEQ ID NO: 6541; WAN024C8W_at; Start 368; Stop 392
tgccggagatcagtgaaaacgtgct

SEQ ID NO: 108749 - DNA, 25 bp, Artificial
  probe
  misc_feature (1)..(25): SEQ ID NO: 6541; WAN024C8W_at; Start 471; Stop 495
aattgtcaataattccgagaggccg

SEQ ID NO: 108750 - DNA, 25 bp, Artificial
  probe
  misc_feature (1)..(25): SEQ ID NO: 6541; WAN024C8W_at; Start 338; Stop 362
gaaacgaaaggcttggaatcaacga

SEQ ID NO: 108751 - DNA, 25 bp, Artificial
  probe
  misc_feature (1)..(25): SEQ ID NO: 6541; WAN024C8W_at; Start 99; Stop 123
agttccggtggaggagatccccatt

SEQ ID NO: 108752 - DNA, 25 bp, Artificial
  probe
  misc_feature (1)..(25): SEQ ID NO: 6541; WAN024C8W_at; Start 501; Stop 525
cattgtgtacgctggaaaggcccac

SEQ ID NO: 108753 - DNA, 25 bp, Artificial
  probe
  misc_feature (1)..(25): SEQ ID NO: 6541; WAN024C8W_at; Start 532; Stop 556
gacgaaggtggaaaggagtttctca

SEQ ID NO: 108754 - DNA, 25 bp, Artificial
  probe
  misc_feature (1)..(25): SEQ ID NO: 6541; WAN024C8W_at; Start 437; Stop 461
tcctgctcttcagcgatctggaaag

SEQ ID NO: 108755 - DNA, 25 bp, Artificial
  probe
  misc_feature (1)..(25): SEQ ID NO: 6541; WAN024C8W_at; Start 325; Stop 349
tccatcaaaaggagaaacgaaaggc

SEQ ID NO: 108756 - DNA, 25 bp, Artificial
  probe
  misc_feature (1)..(25): SEQ ID NO: 6541; WAN024C8W_at; Start 132; Stop 156
cacgaatggtgtccacatgggaacc

SEQ ID NO: 108757 - DNA, 25 bp, Artificial
  probe
  misc_feature (1)..(25): SEQ ID NO: 6541; WAN024C8W_at; Start 268; Stop 292
gaactctgggaagcgcatctgaacg

SEQ ID NO: 108758 - DNA, 25 bp, Artificial
  probe
  misc_feature (1)..(25): SEQ ID NO: 6541; WAN024C8W_at; Start 547; Stop 571
gagtttctcagaaggatctacgaag

SEQ ID NO: 108759 - DNA, 25 bp, Artificial
  probe
  misc_feature (1)..(25): SEQ ID NO: 6541; WAN024C8W_at; Start 58; Stop 82
gctgacgtatcgagaaggatgttca

SEQ ID NO: 108760 - DNA, 25 bp, Artificial
  probe
  misc_feature (1)..(25): SEQ ID NO: 6541; WAN024C8W_at; Start 405; Stop 429
tgccagaaggttcgcaacttacaag

SEQ ID NO: 108761 - DNA, 25 bp, Artificial
  probe
  misc_feature (1)..(25): SEQ ID NO: 6541; WAN024C8W_at; Start 353; Stop 377
gaatcaacgaaccactgccggagat

SEQ ID NO: 108762 - DNA, 25 bp, Artificial
  probe
  misc_feature (1)..(25): SEQ ID NO: 6541; WAN024C8W_at; Start 577; Stop 601
cagatgcccgatttcaagaacaaaa

SEQ ID NO: 108763 - DNA, 25 bp, Artificial
  probe
  misc_feature (1)..(25): SEQ ID NO: 6541; WAN024C8W_at; Start 517; Stop 541
aaggcccacccgagagacgaaggtg

SEQ ID NO: 108764 - DNA, 25 bp, Artificial
  probe
  misc_feature (1)..(25): SEQ ID NO: 6541; WAN024C8W_at; Start 197; Stop 221
tcggtagagtctggagggaacacac

SEQ ID NO: 108765 - DNA, 25 bp, Artificial
  probe
  misc_feature (1)..(25): SEQ ID NO: 6541; WAN024C8W_at; Start 45; Stop 69
gagcaaacttcacgctgacgtatcg

SEQ ID NO: 108766 - DNA, 25 bp, Artificial
  probe
  misc_feature (1)..(25): SEQ ID NO: 6541; WAN024C8W_at; Start 419; Stop 443
caacttacaagagagccgtcctgct

SEQ ID NO: 108767 - DNA, 25 bp, Artificial
  probe
  misc_feature (1)..(25): SEQ ID NO: 6541; WAN024C8W_at; Start 238; Stop 262
tggtacggagttgacagaatacccg

SEQ ID NO: 108768 - DNA, 25 bp, Artificial
  probe
  misc_feature (1)..(25): SEQ ID NO: 6541; WAN024C8W_at; Start 563; Stop 587
tctacgaagtttcacagatgcccga

SEQ ID NO: 108769 - DNA, 25 bp, Artificial
  probe
  misc_feature (1)..(25): SEQ ID NO: 6541; WAN024C8W_at; Start 162; Stop 186
caaccgcgagatgagaaaactgttc

SEQ ID NO: 108770 - DNA, 25 bp, Artificial
  probe
  misc_feature (1)..(25): SEQ ID NO: 6541; WAN024C8W_at; Start 146; Stop 170
acatgggaacctggatcaaccgcga

SEQ ID NO: 108771 - DNA, 25 bp, Artificial
  probe
  misc_feature (1)..(25): SEQ ID NO: 6541; WAN024C8W_at; Start 114; Stop 138
gatccccattgaaggcatcacgaat

SEQ ID NO: 108772 - DNA, 25 bp, Artificial
  probe
  misc_feature (1)..(25): SEQ ID NO: 6541; WAN024C8W_at; Start 453; Stop 477
tctggaaagactcaagagaattgtc

SEQ ID NO: 108773 - DNA, 25 bp, Artificial
  probe
  misc_feature (1)..(25): SEQ ID NO: 6541; WAN024C8W_at; Start 253; Stop 277
agaatacccgatgaagaactctggg

SEQ ID NO: 108774 - DNA, 25 bp, Artificial
  probe
  misc_feature (1)..(25): SEQ ID NO: 6541; WAN024C8W_at; Start 606; Stop 630
cgtactcgaaaactatgacatcggg

SEQ ID NO: 108775 - DNA, 25 bp, Artificial
  probe
  misc_feature (1)..(25): SEQ ID NO: 6541; WAN024C8W_at; Start 212; Stop 236
gggaacacactgacctcgaaggaat

SEQ ID NO: 108776 - DNA, 25 bp, Artificial
  probe
  misc_feature (1)..(25): SEQ ID NO: 6541; WAN024C8W_at; Start 282; Stop 306
gcatctgaacgcaaagaaacgattc

SEQ ID NO: 108777 - DNA, 25 bp, Artificial
  probe
  misc_feature (1)..(25): SEQ ID NO: 6997; WAN024C8X_at; Start 724; Stop 748
cgaagacggaaatttcaacatgacg

SEQ ID NO: 108778 - DNA, 25 bp, Artificial
  probe
  misc_feature (1)..(25): SEQ ID NO: 6997; WAN024C8X_at; Start 379; Stop 403
gactatctctacaatcccgagcctg

SEQ ID NO: 108779 - DNA, 25 bp, Artificial
  probe
  misc_feature (1)..(25): SEQ ID NO: 6997; WAN024C8X_at; Start 336; Stop 360
cactgacttcgaggaaaacgaggat

SEQ ID NO: 108780 - DNA, 25 bp, Artificial
  probe
  misc_feature (1)..(25): SEQ ID NO: 6997; WAN024C8X_at; Start 266; Stop 290
tagacaacgatactgtaaaagcgcg

SEQ ID NO: 108781 - DNA, 25 bp, Artificial
  probe
  misc_feature (1)..(25): SEQ ID NO: 6997; WAN024C8X_at; Start 129; Stop 153
caaacacgggtatttcactcaacag

SEQ ID NO: 108782 - DNA, 25 bp, Artificial
  probe
  misc_feature (1)..(25): SEQ ID NO: 6997; WAN024C8X_at; Start 190; Stop 214
gaatacgacatcgaagaactcccga

SEQ ID NO: 108783 - DNA, 25 bp, Artificial
  probe
  misc_feature (1)..(25): SEQ ID NO: 6997; WAN024C8X_at; Start 550; Stop 574
ggatattccttcaccgaggcccttg

SEQ ID NO: 108784 - DNA, 25 bp, Artificial
  probe
  misc_feature (1)..(25): SEQ ID NO: 6997; WAN024C8X_at; Start 67; Stop 91
ggagaccacctcaaatcagccagtg

SEQ ID NO: 108785 - DNA, 25 bp, Artificial
  probe
  misc_feature (1)..(25): SEQ ID NO: 6997; WAN024C8X_at; Start 8; Stop 32
tggaatacggactgacgaaagcact

SEQ ID NO: 108786 - DNA, 25 bp, Artificial
  probe
  misc_feature (1)..(25): SEQ ID NO: 6997; WAN024C8X_at; Start 174; Stop 198
gatcgagatctttccagaatacgac

SEQ ID NO: 108787 - DNA, 25 bp, Artificial
  probe
  misc_feature (1)..(25): SEQ ID NO: 6997; WAN024C8X_at; Start 434; Stop 458
gcattggtggaatgaaactcctgaa

SEQ ID NO: 108788 - DNA, 25 bp, Artificial
  probe
  misc_feature (1)..(25): SEQ ID NO: 6997; WAN024C8X_at; Start 318; Stop 342
gaaactgtatcttctcgacactgac

SEQ ID NO: 108789 - DNA, 25 bp, Artificial
  probe
  misc_feature (1)..(25): SEQ ID NO: 6997; WAN024C8X_at; Start 697; Stop 721
gaactgcttatgaacctttggaaaa

SEQ ID NO: 108790 - DNA, 25 bp, Artificial
  probe
  misc_feature (1)..(25): SEQ ID NO: 6997; WAN024C8X_at; Start 584; Stop 608
gacagaccacagttttcacgacaca

SEQ ID NO: 108791 - DNA, 25 bp, Artificial
  probe
  misc_feature (1)..(25): SEQ ID NO: 6997; WAN024C8X_at; Start 623; Stop 647
caggtcacgacaggttcccgttcga

SEQ ID NO: 108792 - DNA, 25 bp, Artificial
  probe
  misc_feature (1)..(25): SEQ ID NO: 6997; WAN024C8X_at; Start 304; Stop 328
caggtcggaagggtgaaactgtatc

SEQ ID NO: 108793 - DNA, 25 bp, Artificial
  probe
  misc_feature (1)..(25): SEQ ID NO: 6997; WAN024C8X_at; Start 144; Stop 168
cactcaacagatagacagtgacgga

SEQ ID NO: 108794 - DNA, 25 bp, Artificial
  probe
  misc_feature (1)..(25): SEQ ID NO: 6997; WAN024C8X_at; Start 205; Stop 229
gaactcccgatgaaacctctcaggg

SEQ ID NO: 108795 - DNA, 25 bp, Artificial
  probe
  misc_feature (1)..(25): SEQ ID NO: 6997; WAN024C8X_at; Start 241; Stop 265
aaccaggtgatcgtagaagtaccca

SEQ ID NO: 108796 - DNA, 25 bp, Artificial
  probe
  misc_feature (1)..(25): SEQ ID NO: 6997; WAN024C8X_at; Start 159; Stop 183
cagtgacggaagacagatcgagatc

SEQ ID NO: 108797 - DNA, 25 bp, Artificial
  probe
  misc_feature (1)..(25): SEQ ID NO: 6997; WAN024C8X_at; Start 477; Stop 501
tggagtcatccacctgaacgaaggt

SEQ ID NO: 108798 - DNA, 25 bp, Artificial
  probe
  misc_feature (1)..(25): SEQ ID NO: 6997; WAN024C8X_at; Start 95; Stop 119
ttggccttcctctcatagccgtagg

SEQ ID NO: 108799 - DNA, 25 bp, Artificial
  probe
  misc_feature (1)..(25): SEQ ID NO: 6997; WAN024C8X_at; Start 395; Stop 419
ccgagcctgatgtgagagtttccca

SEQ ID NO: 108800 - DNA, 25 bp, Artificial
  probe
  misc_feature (1)..(25): SEQ ID NO: 6997; WAN024C8X_at; Start 682; Stop 706
ggattcgaatccaaagaactgctta

SEQ ID NO: 108801 - DNA, 25 bp, Artificial
  probe
  misc_feature (1)..(25): SEQ ID NO: 6997; WAN024C8X_at; Start 455; Stop 479
tgaagactctcaagataaaacctgg

SEQ ID NO: 108802 - DNA, 25 bp, Artificial
  probe
  misc_feature (1)..(25): SEQ ID NO: 6997; WAN024C8X_at; Start 565; Stop 589
gaggcccttgagatcgtcagacaga

SEQ ID NO: 108803 - DNA, 25 bp, Artificial
  probe
  misc_feature (1)..(25): SEQ ID NO: 6997; WAN024C8X_at; Start 24; Stop 48
gaaagcacttccgatctactctgga

SEQ ID NO: 108804 - DNA, 25 bp, Artificial
  probe
  misc_feature (1)..(25): SEQ ID NO: 6997; WAN024C8X_at; Start 224; Stop 248
tcagggatgaagacggaaaccaggt

SEQ ID NO: 108805 - DNA, 25 bp, Artificial
  probe
  misc_feature (1)..(25): SEQ ID NO: 6997; WAN024C8X_at; Start 517; Stop 541
tccctcgaaaggataaagagctaca

SEQ ID NO: 108806 - DNA, 25 bp, Artificial
  probe
  misc_feature (1)..(25): SEQ ID NO: 6997; WAN024C8X_at; Start 281; Stop 305
taaaagcgcgtgtgttcgaggtaca

SEQ ID NO: 108807 - DNA, 25 bp, Artificial
  probe
  misc_feature (1)..(25): SEQ ID NO: 6997; WAN024C8X_at; Start 47; Stop 71
gaggactcggtatccttgccggaga

SEQ ID NO: 108808 - DNA, 25 bp, Artificial
  probe
  misc_feature (1)..(25): SEQ ID NO: 6997; WAN024C8X_at; Start 492; Stop 516
gaacgaaggtcatcccgctttttca

SEQ ID NO: 108809 - DNA, 25 bp, Artificial
  probe
  misc_feature (1)..(25): SEQ ID NO: 6997; WAN024C8X_at; Start 418; Stop 442
caggaaattctgctcggcattggtg

SEQ ID NO: 108810 - DNA, 25 bp, Artificial
  probe
  misc_feature (1)..(25): SEQ ID NO: 6997; WAN024C8X_at; Start 645; Stop 669
cgatttcgtggaaaagaagctgaca

SEQ ID NO: 108811 - DNA, 25 bp, Artificial
  probe
  misc_feature (1)..(25): SEQ ID NO: 1110; WAN024C8Y_at; Start 199; Stop 223
gcttgttttacagatgccacgataa

SEQ ID NO: 108812 - DNA, 25 bp, Artificial
  probe
  misc_feature (1)..(25): SEQ ID NO: 1110; WAN024C8Y_at; Start 3; Stop 27
gaagccaccttcacgcaattcacgt

SEQ ID NO: 108813 - DNA, 25 bp, Artificial
  probe
  misc_feature (1)..(25): SEQ ID NO: 1110; WAN024C8Y_at; Start 238; Stop 262
gcaaatttacgtcctgaaccaccaa

SEQ ID NO: 108814 - DNA, 25 bp, Artificial
  probe
  misc_feature (1)..(25): SEQ ID NO: 1110; WAN024C8Y_at; Start 29; Stop 53
caactgggccaaagatacgtgttcc

SEQ ID NO: 108815 - DNA, 25 bp, Artificial
  probe
  misc_feature (1)..(25): SEQ ID NO: 1110; WAN024C8Y_at; Start 176; Stop 200
ttttaaccgcaccaccaggagtagc

SEQ ID NO: 108816 - DNA, 25 bp, Artificial
  probe
  misc_feature (1)..(25): SEQ ID NO: 1110; WAN024C8Y_at; Start 122; Stop 146
cacgacgagcacctgatttagtacg

SEQ ID NO: 108817 - DNA, 25 bp, Artificial
  probe
  misc_feature (1)..(25): SEQ ID NO: 1110; WAN024C8Y_at; Start 231; Stop 255
gatgtttgcaaatttacgtcctgaa

SEQ ID NO: 108818 - DNA, 25 bp, Artificial
  probe
  misc_feature (1)..(25): SEQ ID NO: 1110; WAN024C8Y_at; Start 224; Stop 248
catcaccgatgtttgcaaatttacg

SEQ ID NO: 108819 - DNA, 25 bp, Artificial
  probe
  misc_feature (1)..(25): SEQ ID NO: 1110; WAN024C8Y_at; Start 256; Stop 280
ccaccaagaactttgatagtcaaga

SEQ ID NO: 108820 - DNA, 25 bp, Artificial
  probe
  misc_feature (1)..(25): SEQ ID NO: 1110; WAN024C8Y_at; Start 294; Stop 318
gctgttgtctgcgactttcaaacga

SEQ ID NO: 108821 - DNA, 25 bp, Artificial
  probe
  misc_feature (1)..(25): SEQ ID NO: 1110; WAN024C8Y_at; Start 211; Stop 235
gatgccacgataacatcaccgatgt

SEQ ID NO: 108822 - DNA, 25 bp, Artificial
  probe
  misc_feature (1)..(25): SEQ ID NO: 1110; WAN024C8Y_at; Start 18; Stop 42
caattcacgtgcaactgggccaaag

SEQ ID NO: 108823 - DNA, 25 bp, Artificial
  probe
  misc_feature (1)..(25): SEQ ID NO: 1110; WAN024C8Y_at; Start 150; Stop 174
gataactgctttaacaacgtcacct

SEQ ID NO: 108824 - DNA, 25 bp, Artificial
  probe
  misc_feature (1)..(25): SEQ ID NO: 1110; WAN024C8Y_at; Start 279; Stop 303
gatttcgcgagcaccgctgttgtct

SEQ ID NO: 108825 - DNA, 25 bp, Artificial
  probe
  misc_feature (1)..(25): SEQ ID NO: 1110; WAN024C8Y_at; Start 188; Stop 212
caccaggagtagcttgttttacaga

SEQ ID NO: 108826 - DNA, 25 bp, Artificial
  probe
  misc_feature (1)..(25): SEQ ID NO: 1110; WAN024C8Y_at; Start 55; Stop 79
cgaggagttttgtcttcacggatga

SEQ ID NO: 108827 - DNA, 25 bp, Artificial
  probe
  misc_feature (1)..(25): SEQ ID NO: 1110; WAN024C8Y_at; Start 65; Stop 89
tgtcttcacggatgataactgctgc

SEQ ID NO: 108828 - DNA, 25 bp, Artificial
  probe
  misc_feature (1)..(25): SEQ ID NO: 1110; WAN024C8Y_at; Start 22; Stop 46
tcacgtgcaactgggccaaagatac

SEQ ID NO: 108829 - DNA, 25 bp, Artificial
  probe
  misc_feature (1)..(25): SEQ ID NO: 1110; WAN024C8Y_at; Start 44; Stop 68
tacgtgttccgcgaggagttttgtc

SEQ ID NO: 108830 - DNA, 25 bp, Artificial
  probe
  misc_feature (1)..(25): SEQ ID NO: 1110; WAN024C8Y_at; Start 269; Stop 293
tgatagtcaagatttcgcgagcacc

SEQ ID NO: 108831 - DNA, 25 bp, Artificial
  probe
  misc_feature (1)..(25): SEQ ID NO: 1110; WAN024C8Y_at; Start 184; Stop 208
gcaccaccaggagtagcttgtttta

SEQ ID NO: 108832 - DNA, 25 bp, Artificial
  probe
  misc_feature (1)..(25): SEQ ID NO: 1110; WAN024C8Y_at; Start 272; Stop 296
tagtcaagatttcgcgagcaccgct

SEQ ID NO: 108833 - DNA, 25 bp, Artificial
  probe
  misc_feature (1)..(25): SEQ ID NO: 1110; WAN024C8Y_at; Start 118; Stop 142
tcagcacgacgagcacctgatttag

SEQ ID NO: 108834 - DNA, 25 bp, Artificial
  probe
  misc_feature (1)..(25): SEQ ID NO: 1110; WAN024C8Y_at; Start 38; Stop 62
caaagatacgtgttccgcgaggagt

SEQ ID NO: 108835 - DNA, 25 bp, Artificial
  probe
  misc_feature (1)..(25): SEQ ID NO: 1110; WAN024C8Y_at; Start 136; Stop 160
gatttagtacgaacgataactgctt

SEQ ID NO: 108836 - DNA, 25 bp, Artificial
  probe
  misc_feature (1)..(25): SEQ ID NO: 1110; WAN024C8Y_at; Start 82; Stop 106
actgctgcgttttcgtcaaatttga

SEQ ID NO: 108837 - DNA, 25 bp, Artificial
  probe
  misc_feature (1)..(25): SEQ ID NO: 1110; WAN024C8Y_at; Start 287; Stop 311
gagcaccgctgttgtctgcgacttt

SEQ ID NO: 108838 - DNA, 25 bp, Artificial
  probe
  misc_feature (1)..(25): SEQ ID NO: 1110; WAN024C8Y_at; Start 301; Stop 325
tctgcgactttcaaacgagtttctg

SEQ ID NO: 108839 - DNA, 25 bp, Artificial
  probe
  misc_feature (1)..(25): SEQ ID NO: 1110; WAN024C8Y_at; Start 95; Stop 119
cgtcaaatttgatgtatgaaccatc

SEQ ID NO: 108840 - DNA, 25 bp, Artificial
  probe
  misc_feature (1)..(25): SEQ ID NO: 1110; WAN024C8Y_at; Start 128; Stop 152
gagcacctgatttagtacgaacgat

SEQ ID NO: 108841 - DNA, 25 bp, Artificial
  probe
  misc_feature (1)..(25): SEQ ID NO: 1110; WAN024C8Y_at; Start 105; Stop 129
gatgtatgaaccatcagcacgacga

SEQ ID NO: 108842 - DNA, 25 bp, Artificial
  probe
  misc_feature (1)..(25): SEQ ID NO: 1110; WAN024C8Y_at; Start 247; Stop 271
cgtcctgaaccaccaagaactttga

SEQ ID NO: 108843 - DNA, 25 bp, Artificial
  probe
  misc_feature (1)..(25): SEQ ID NO: 1110; WAN024C8Y_at; Start 50; Stop 74
ttccgcgaggagttttgtcttcacg

SEQ ID NO: 108844 - DNA, 25 bp, Artificial
  probe
  misc_feature (1)..(25): SEQ ID NO: 1110; WAN024C8Y_at; Start 71; Stop 95
cacggatgataactgctgcgttttc

SEQ ID NO: 108845 - DNA, 25 bp, Artificial
  probe
  misc_feature (1)..(25): SEQ ID NO: 1812; WAN024C8Z_at; Start 163; Stop 187
ggtgacgttgttaaagcagttatcg

SEQ ID NO: 108846 - DNA, 25 bp, Artificial
  probe
  misc_feature (1)..(25): SEQ ID NO: 1812; WAN024C8Z_at; Start 268; Stop 292
gacaaaactcctcgcggaacacgta

SEQ ID NO: 108847 - DNA, 25 bp, Artificial
  probe
  misc_feature (1)..(25): SEQ ID NO: 1812; WAN024C8Z_at; Start 207; Stop 231
tcgtcgtgctgatggttcatacatc

SEQ ID NO: 108848 - DNA, 25 bp, Artificial
  probe
  misc_feature (1)..(25): SEQ ID NO: 1812; WAN024C8Z_at; Start 230; Stop 254
tcaaatttgacgaaaacgcagcagt

SEQ ID NO: 108849 - DNA, 25 bp, Artificial
  probe
  misc_feature (1)..(25): SEQ ID NO: 1812; WAN024C8Z_at; Start 336; Stop 360
gaagatcgtgtcacttgctccagaa

SEQ ID NO: 108850 - DNA, 25 bp, Artificial
  probe
  misc_feature (1)..(25): SEQ ID NO: 1812; WAN024C8Z_at; Start 56; Stop 80
tcttgactatcaaagttcttggtgg

SEQ ID NO: 108851 - DNA, 25 bp, Artificial
  probe
  misc_feature (1)..(25): SEQ ID NO: 1812; WAN024C8Z_at; Start 65; Stop 89
tcaaagttcttggtggttcaggacg

SEQ ID NO: 108852 - DNA, 25 bp, Artificial
  probe
  misc_feature (1)..(25): SEQ ID NO: 1812; WAN024C8Z_at; Start 113; Stop 137
ttatcgtggcatctgtaaaacaagc

SEQ ID NO: 108853 - DNA, 25 bp, Artificial
  probe
  misc_feature (1)..(25): SEQ ID NO: 1812; WAN024C8Z_at; Start 276; Stop 300
tcctcgcggaacacgtatctttggc

SEQ ID NO: 108854 - DNA, 25 bp, Artificial
  probe
  misc_feature (1)..(25): SEQ ID NO: 1812; WAN024C8Z_at; Start 128; Stop 152
taaaacaagctactcctggtggtgc

SEQ ID NO: 108855 - DNA, 25 bp, Artificial
  probe
  misc_feature (1)..(25): SEQ ID NO: 1812; WAN024C8Z_at; Start 291; Stop 315
tatctttggcccagttgcacgtgaa

SEQ ID NO: 108856 - DNA, 25 bp, Artificial
  probe
  misc_feature (1)..(25): SEQ ID NO: 1812; WAN024C8Z_at; Start 341; Stop 365
tcgtgtcacttgctccagaagtact

SEQ ID NO: 108857 - DNA, 25 bp, Artificial
  probe
  misc_feature (1)..(25): SEQ ID NO: 1812; WAN024C8Z_at; Start 349; Stop 373
cttgctccagaagtactttaactaa

SEQ ID NO: 108858 - DNA, 25 bp, Artificial
  probe
  misc_feature (1)..(25): SEQ ID NO: 1812; WAN024C8Z_at; Start 185; Stop 209
tcgttcgtactaaatcaggtgctcg

SEQ ID NO: 108859 - DNA, 25 bp, Artificial
  probe
  misc_feature (1)..(25): SEQ ID NO: 1812; WAN024C8Z_at; Start 76; Stop 100
ggtggttcaggacgtaaatttgcaa

SEQ ID NO: 108860 - DNA, 25 bp, Artificial
  probe
  misc_feature (1)..(25): SEQ ID NO: 1812; WAN024C8Z_at; Start 310; Stop 334
cgtgaattgcgtgaaggtggcttca

SEQ ID NO: 108861 - DNA, 25 bp, Artificial
  probe
  misc_feature (1)..(25): SEQ ID NO: 1812; WAN024C8Z_at; Start 200; Stop 224
caggtgctcgtcgtgctgatggttc

SEQ ID NO: 108862 - DNA, 25 bp, Artificial
  probe
  misc_feature (1)..(25): SEQ ID NO: 1812; WAN024C8Z_at; Start 192; Stop 216
tactaaatcaggtgctcgtcgtgct

SEQ ID NO: 108863 - DNA, 25 bp, Artificial
  probe
  misc_feature (1)..(25): SEQ ID NO: 1812; WAN024C8Z_at; Start 297; Stop 321
tggcccagttgcacgtgaattgcgt

SEQ ID NO: 108864 - DNA, 25 bp, Artificial
  probe
  misc_feature (1)..(25): SEQ ID NO: 1812; WAN024C8Z_at; Start 34; Stop 58
gacaacagcggtgctcgcgaaatct

SEQ ID NO: 108865 - DNA, 25 bp, Artificial
  probe
  misc_feature (1)..(25): SEQ ID NO: 1812; WAN024C8Z_at; Start 217; Stop 241
gatggttcatacatcaaatttgacg

SEQ ID NO: 108866 - DNA, 25 bp, Artificial
  probe
  misc_feature (1)..(25): SEQ ID NO: 1812; WAN024C8Z_at; Start 262; Stop 286
cgtgaagacaaaactcctcgcggaa

SEQ ID NO: 108867 - DNA, 25 bp, Artificial
  probe
  misc_feature (1)..(25): SEQ ID NO: 1812; WAN024C8Z_at; Start 23; Stop 47
tgaaagtcgcagacaacagcggtgc

SEQ ID NO: 108868 - DNA, 25 bp, Artificial
  probe
  misc_feature (1)..(25): SEQ ID NO: 1812; WAN024C8Z_at; Start 86; Stop 110
gacgtaaatttgcaaacatcggtga

SEQ ID NO: 108869 - DNA, 25 bp, Artificial
  probe
  misc_feature (1)..(25): SEQ ID NO: 1812; WAN024C8Z_at; Start 43; Stop 67
ggtgctcgcgaaatcttgactatca

SEQ ID NO: 108870 - DNA, 25 bp, Artificial
  probe
  misc_feature (1)..(25): SEQ ID NO: 1812; WAN024C8Z_at; Start 131; Stop 155
aacaagctactcctggtggtgcggt

SEQ ID NO: 108871 - DNA, 25 bp, Artificial
  probe
  misc_feature (1)..(25): SEQ ID NO: 1812; WAN024C8Z_at; Start 247; Stop 271
gcagcagttatcatccgtgaagaca

SEQ ID NO: 108872 - DNA, 25 bp, Artificial
  probe
  misc_feature (1)..(25): SEQ ID NO: 1812; WAN024C8Z_at; Start 283; Stop 307
ggaacacgtatctttggcccagttg

SEQ ID NO: 108873 - DNA, 25 bp, Artificial
  probe
  misc_feature (1)..(25): SEQ ID NO: 1812; WAN024C8Z_at; Start 11; Stop 35
cagaaactcgtttgaaagtcgcaga

SEQ ID NO: 108874 - DNA, 25 bp, Artificial
  probe
  misc_feature (1)..(25): SEQ ID NO: 1812; WAN024C8Z_at; Start 174; Stop 198
taaagcagttatcgttcgtactaaa

SEQ ID NO: 108875 - DNA, 25 bp, Artificial
  probe
  misc_feature (1)..(25): SEQ ID NO: 1812; WAN024C8Z_at; Start 241; Stop 265
gaaaacgcagcagttatcatccgtg

SEQ ID NO: 108876 - DNA, 25 bp, Artificial
  probe
  misc_feature (1)..(25): SEQ ID NO: 1812; WAN024C8Z_at; Start 255; Stop 279
tatcatccgtgaagacaaaactcct

SEQ ID NO: 108877 - DNA, 25 bp, Artificial
  probe
  misc_feature (1)..(25): SEQ ID NO: 1812; WAN024C8Z_at; Start 101; Stop 125
acatcggtgatgttatcgtggcatc

SEQ ID NO: 108878 - DNA, 25 bp, Artificial
  probe
  misc_feature (1)..(25): SEQ ID NO: 1812; WAN024C8Z_at; Start 325; Stop 349
ggtggcttcatgaagatcgtgtcac

SEQ ID NO: 108879 - DNA, 25 bp, Artificial
  probe
  misc_feature (1)..(25): SEQ ID NO: 5884; WAN024C92_at; Start 86; Stop 110
tcatggttcgggataaaatagttca

SEQ ID NO: 108880 - DNA, 25 bp, Artificial
  probe
  misc_feature (1)..(25): SEQ ID NO: 5884; WAN024C92_at; Start 76; Stop 100
cttttgaatttcatggttcgggata

SEQ ID NO: 108881 - DNA, 25 bp, Artificial
  probe
  misc_feature (1)..(25): SEQ ID NO: 5884; WAN024C92_at; Start 67; Stop 91
acggccgaacttttgaatttcatgg

SEQ ID NO: 108882 - DNA, 25 bp, Artificial
  probe
  misc_feature (1)..(25): SEQ ID NO: 5884; WAN024C92_at; Start 28; Stop 52
tcggataaaatccgaggggctagaa

SEQ ID NO: 108883 - DNA, 25 bp, Artificial
  probe
  misc_feature (1)..(25): SEQ ID NO: 5884; WAN024C92_at; Start 80; Stop 104
tgaatttcatggttcgggataaaat

SEQ ID NO: 108884 - DNA, 25 bp, Artificial
  probe
  misc_feature (1)..(25): SEQ ID NO: 5884; WAN024C92_at; Start 68; Stop 92
cggccgaacttttgaatttcatggt

SEQ ID NO: 108885 - DNA, 25 bp, Artificial
  probe
  misc_feature (1)..(25): SEQ ID NO: 5884; WAN024C92_at; Start 65; Stop 89
caacggccgaacttttgaatttcat

SEQ ID NO: 108886 - DNA, 25 bp, Artificial
  probe
  misc_feature (1)..(25): SEQ ID NO: 5884; WAN024C92_at; Start 19; Stop 43
aatagcccttcggataaaatccgag

SEQ ID NO: 108887 - DNA, 25 bp, Artificial
  probe
  misc_feature (1)..(25): SEQ ID NO: 5884; WAN024C92_at; Start 82; Stop 106
aatttcatggttcgggataaaatag

SEQ ID NO: 108888 - DNA, 25 bp, Artificial
  probe
  misc_feature (1)..(25): SEQ ID NO: 5884; WAN024C92_at; Start 77; Stop 101
ttttgaatttcatggttcgggataa

SEQ ID NO: 108889 - DNA, 25 bp, Artificial
  probe
  misc_feature (1)..(25): SEQ ID NO: 5884; WAN024C92_at; Start 81; Stop 105
gaatttcatggttcgggataaaata

SEQ ID NO: 108890 - DNA, 25 bp, Artificial
  probe
  misc_feature (1)..(25): SEQ ID NO: 5884; WAN024C92_at; Start 85; Stop 109
ttcatggttcgggataaaatagttc

SEQ ID NO: 108891 - DNA, 25 bp, Artificial
  probe
  misc_feature (1)..(25): SEQ ID NO: 5884; WAN024C92_at; Start 71; Stop 95
ccgaacttttgaatttcatggttcg

SEQ ID NO: 108892 - DNA, 25 bp, Artificial
  probe
  misc_feature (1)..(25): SEQ ID NO: 5884; WAN024C92_at; Start 66; Stop 90
aacggccgaacttttgaatttcatg

SEQ ID NO: 108893 - DNA, 25 bp, Artificial
  probe
  misc_feature (1)..(25): SEQ ID NO: 5884; WAN024C92_at; Start 87; Stop 111
catggttcgggataaaatagttcac

SEQ ID NO: 108894 - DNA, 25 bp, Artificial
  probe
  misc_feature (1)..(25): SEQ ID NO: 5884; WAN024C92_at; Start 27; Stop 51
ttcggataaaatccgaggggctaga

SEQ ID NO: 108895 - DNA, 25 bp, Artificial
  probe
  misc_feature (1)..(25): SEQ ID NO: 5884; WAN024C92_at; Start 79; Stop 103
ttgaatttcatggttcgggataaaa

SEQ ID NO: 108896 - DNA, 25 bp, Artificial
  probe
  misc_feature (1)..(25): SEQ ID NO: 5884; WAN024C92_at; Start 64; Stop 88
tcaacggccgaacttttgaatttca

SEQ ID NO: 108897 - DNA, 25 bp, Artificial
  probe
  misc_feature (1)..(25): SEQ ID NO: 5884; WAN024C92_at; Start 75; Stop 99
acttttgaatttcatggttcgggat

SEQ ID NO: 108898 - DNA, 25 bp, Artificial
  probe
  misc_feature (1)..(25): SEQ ID NO: 5884; WAN024C92_at; Start 83; Stop 107
atttcatggttcgggataaaatagt

SEQ ID NO: 108899 - DNA, 25 bp, Artificial
  probe
  misc_feature (1)..(25): SEQ ID NO: 5884; WAN024C92_at; Start 78; Stop 102
tttgaatttcatggttcgggataaa

SEQ ID NO: 108900 - DNA, 25 bp, Artificial
  probe
  misc_feature (1)..(25): SEQ ID NO: 5884; WAN024C92_at; Start 72; Stop 96
cgaacttttgaatttcatggttcgg

SEQ ID NO: 108901 - DNA, 25 bp, Artificial
  probe
  misc_feature (1)..(25): SEQ ID NO: 5884; WAN024C92_at; Start 26; Stop 50
cttcggataaaatccgaggggctag

SEQ ID NO: 108902 - DNA, 25 bp, Artificial
  probe
  misc_feature (1)..(25): SEQ ID NO: 5884; WAN024C92_at; Start 20; Stop 44
atagcccttcggataaaatccgagg

SEQ ID NO: 108903 - DNA, 25 bp, Artificial
  probe
  misc_feature (1)..(25): SEQ ID NO: 5884; WAN024C92_at; Start 70; Stop 94
gccgaacttttgaatttcatggttc

SEQ ID NO: 108904 - DNA, 25 bp, Artificial
  probe
  misc_feature (1)..(25): SEQ ID NO: 5884; WAN024C92_at; Start 6; Stop 30
ctctaaatacaaaaatagcccttcg

SEQ ID NO: 108905 - DNA, 25 bp, Artificial
  probe
  misc_feature (1)..(25): SEQ ID NO: 4936; WAN024C93_at; Start 346; Stop 370
aggtgcccctttaccagatcccata

SEQ ID NO: 108906 - DNA, 25 bp, Artificial
  probe
  misc_feature (1)..(25): SEQ ID NO: 4936; WAN024C93_at; Start 56; Stop 80
tgttccaattgaccagtagcagctt

SEQ ID NO: 108907 - DNA, 25 bp, Artificial
  probe
  misc_feature (1)..(25): SEQ ID NO: 4936; WAN024C93_at; Start 274; Stop 298
tgcaatctcttcagatacaccagcg

SEQ ID NO: 108908 - DNA, 25 bp, Artificial
  probe
  misc_feature (1)..(25): SEQ ID NO: 4936; WAN024C93_at; Start 246; Stop 270
tgtggctagcaagtcgaagcgcttc

SEQ ID NO: 108909 - DNA, 25 bp, Artificial
  probe
  misc_feature (1)..(25): SEQ ID NO: 4936; WAN024C93_at; Start 130; Stop 154
gagttcttcttgagaaagaccacga

SEQ ID NO: 108910 - DNA, 25 bp, Artificial
  probe
  misc_feature (1)..(25): SEQ ID NO: 4936; WAN024C93_at; Start 402; Stop 426
tgtgtgggaagattttaatccaaac

SEQ ID NO: 108911 - DNA, 25 bp, Artificial
  probe
  misc_feature (1)..(25): SEQ ID NO: 4936; WAN024C93_at; Start 29; Stop 53
tttttaacttctttcaagcgagctg

SEQ ID NO: 108912 - DNA, 25 bp, Artificial
  probe
  misc_feature (1)..(25): SEQ ID NO: 4936; WAN024C93_at; Start 328; Stop 352
tggtgctacccaaccttcaggtgcc

SEQ ID NO: 108913 - DNA, 25 bp, Artificial
  probe
  misc_feature (1)..(25): SEQ ID NO: 4936; WAN024C93_at; Start 46; Stop 70
gcgagctgtttgttccaattgacca

SEQ ID NO: 108914 - DNA, 25 bp, Artificial
  probe
  misc_feature (1)..(25): SEQ ID NO: 4936; WAN024C93_at; Start 192; Stop 216
tgccttctccttattctgcttcacg

SEQ ID NO: 108915 - DNA, 25 bp, Artificial
  probe
  misc_feature (1)..(25): SEQ ID NO: 4936; WAN024C93_at; Start 2; Stop 26
tgaactgttttgatgcgagcgattt

SEQ ID NO: 108916 - DNA, 25 bp, Artificial
  probe
  misc_feature (1)..(25): SEQ ID NO: 4936; WAN024C93_at; Start 137; Stop 161
tcttgagaaagaccacgaagttctt

SEQ ID NO: 108917 - DNA, 25 bp, Artificial
  probe
  misc_feature (1)..(25): SEQ ID NO: 4936; WAN024C93_at; Start 206; Stop 230
tctgcttcacgttttacgaatttac

SEQ ID NO: 108918 - DNA, 25 bp, Artificial
  probe
  misc_feature (1)..(25): SEQ ID NO: 4936; WAN024C93_at; Start 390; Stop 414
cagtgtatgatttgtgtgggaagat

SEQ ID NO: 108919 - DNA, 25 bp, Artificial
  probe
  misc_feature (1)..(25): SEQ ID NO: 4936; WAN024C93_at; Start 298; Stop 322
gatttcgaacatcactttaccacgt

SEQ ID NO: 108920 - DNA, 25 bp, Artificial
  probe
  misc_feature (1)..(25): SEQ ID NO: 4936; WAN024C93_at; Start 38; Stop 62
tctttcaagcgagctgtttgttcca

SEQ ID NO: 108921 - DNA, 25 bp, Artificial
  probe
  misc_feature (1)..(25): SEQ ID NO: 4936; WAN024C93_at; Start 264; Stop 288
gcgcttcacgtgcaatctcttcaga

SEQ ID NO: 108922 - DNA, 25 bp, Artificial
  probe
  misc_feature (1)..(25): SEQ ID NO: 4936; WAN024C93_at; Start 234; Stop 258
taactggcaatttgtggctagcaag

SEQ ID NO: 108923 - DNA, 25 bp, Artificial
  probe
  misc_feature (1)..(25): SEQ ID NO: 4936; WAN024C93_at; Start 284; Stop 308
tcagatacaccagcgatttcgaaca

SEQ ID NO: 108924 - DNA, 25 bp, Artificial
  probe
  misc_feature (1)..(25): SEQ ID NO: 4936; WAN024C93_at; Start 255; Stop 279
caagtcgaagcgcttcacgtgcaat

SEQ ID NO: 108925 - DNA, 25 bp, Artificial
  probe
  misc_feature (1)..(25): SEQ ID NO: 4936; WAN024C93_at; Start 74; Stop 98
gcagcttggaaacgaagttcaaaca

SEQ ID NO: 108926 - DNA, 25 bp, Artificial
  probe
  misc_feature (1)..(25): SEQ ID NO: 4936; WAN024C93_at; Start 69; Stop 93
cagtagcagcttggaaacgaagttc

SEQ ID NO: 108927 - DNA, 25 bp, Artificial
  probe
  misc_feature (1)..(25): SEQ ID NO: 4936; WAN024C93_at; Start 177; Stop 201
cttcattaagtttcatgccttctcc

SEQ ID NO: 108928 - DNA, 25 bp, Artificial
  probe
  misc_feature (1)..(25): SEQ ID NO: 4936; WAN024C93_at; Start 324; Stop 348
taactggtgctacccaaccttcagg

SEQ ID NO: 108929 - DNA, 25 bp, Artificial
  probe
  misc_feature (1)..(25): SEQ ID NO: 4936; WAN024C93_at; Start 120; Stop 144
cgcgcttcgcgagttcttcttgaga

SEQ ID NO: 108930 - DNA, 25 bp, Artificial
  probe
  misc_feature (1)..(25): SEQ ID NO: 4936; WAN024C93_at; Start 13; Stop 37
gatgcgagcgatttgttttttaact

SEQ ID NO: 108931 - DNA, 25 bp, Artificial
  probe
  misc_feature (1)..(25): SEQ ID NO: 4936; WAN024C93_at; Start 422; Stop 446
caaactttaccaccacgtttcatgt

SEQ ID NO: 108932 - DNA, 25 bp, Artificial
  probe
  misc_feature (1)..(25): SEQ ID NO: 4936; WAN024C93_at; Start 369; Stop 393
tacgcacaccgatagctttagcagt

SEQ ID NO: 108933 - DNA, 25 bp, Artificial
  probe
  misc_feature (1)..(25): SEQ ID NO: 4936; WAN024C93_at; Start 362; Stop 386
gatcccatacgcacaccgatagctt

SEQ ID NO: 108934 - DNA, 25 bp, Artificial
  probe
  misc_feature (1)..(25): SEQ ID NO: 4936; WAN024C93_at; Start 241; Stop 265
caatttgtggctagcaagtcgaagc

SEQ ID NO: 108935 - DNA, 25 bp, Artificial
  probe
  misc_feature (1)..(25): SEQ ID NO: 4936; WAN024C93_at; Start 106; Stop 130
tttcaattcgttttcgcgcttcgcg

SEQ ID NO: 108936 - DNA, 25 bp, Artificial
  probe
  misc_feature (1)..(25): SEQ ID NO: 4936; WAN024C93_at; Start 309; Stop 333
tcactttaccacgtttaactggtgc

SEQ ID NO: 108937 - DNA, 25 bp, Artificial
  probe
  misc_feature (1)..(25): SEQ ID NO: 4936; WAN024C93_at; Start 220; Stop 244
tacgaatttacatttaactggcaat

SEQ ID NO: 108938 - DNA, 25 bp, Artificial
  probe
  misc_feature (1)..(25): SEQ ID NO: 4936; WAN024C93_at; Start 375; Stop 399
caccgatagctttagcagtgtatga

SEQ ID NO: 108939 - DNA, 25 bp, Artificial
  probe
  misc_feature (1)..(25): SEQ ID NO: 866; WAN024C94_at; Start 57; Stop 81
agaactcgcgaagcgcgaaaacgaa

SEQ ID NO: 108940 - DNA, 25 bp, Artificial
  probe
  misc_feature (1)..(25): SEQ ID NO: 866; WAN024C94_at; Start 124; Stop 148
ggtcaattggaacaaacagctcgct

SEQ ID NO: 108941 - DNA, 25 bp, Artificial
  probe
  misc_feature (1)..(25): SEQ ID NO: 866; WAN024C94_at; Start 113; Stop 137
aagctgctactggtcaattggaaca

SEQ ID NO: 108942 - DNA, 25 bp, Artificial
  probe
  misc_feature (1)..(25): SEQ ID NO: 866; WAN024C94_at; Start 187; Stop 211
gttcaatctgaagcgaaataactaa

SEQ ID NO: 108943 - DNA, 25 bp, Artificial
  probe
  misc_feature (1)..(25): SEQ ID NO: 866; WAN024C94_at; Start 64; Stop 88
gcgaagcgcgaaaacgaattgaaaa

SEQ ID NO: 108944 - DNA, 25 bp, Artificial
  probe
  misc_feature (1)..(25): SEQ ID NO: 866; WAN024C94_at; Start 117; Stop 141
tgctactggtcaattggaacaaaca

SEQ ID NO: 108945 - DNA, 25 bp, Artificial
  probe
  misc_feature (1)..(25): SEQ ID NO: 866; WAN024C94_at; Start 42; Stop 66
tggtctttctcaagaagaactcgcg

SEQ ID NO: 108946 - DNA, 25 bp, Artificial
  probe
  misc_feature (1)..(25): SEQ ID NO: 866; WAN024C94_at; Start 184; Stop 208
acagttcaatctgaagcgaaataac

SEQ ID NO: 108947 - DNA, 25 bp, Artificial
  probe
  misc_feature (1)..(25): SEQ ID NO: 866; WAN024C94_at; Start 123; Stop 147
tggtcaattggaacaaacagctcgc

SEQ ID NO: 108948 - DNA, 25 bp, Artificial
  probe
  misc_feature (1)..(25): SEQ ID NO: 866; WAN024C94_at; Start 95; Stop 119
tgtttgaacttcgtttccaagctgc

SEQ ID NO: 108949 - DNA, 25 bp, Artificial
  probe
  misc_feature (1)..(25): SEQ ID NO: 866; WAN024C94_at; Start 120; Stop 144
tactggtcaattggaacaaacagct

SEQ ID NO: 108950 - DNA, 25 bp, Artificial
  probe
  misc_feature (1)..(25): SEQ ID NO: 866; WAN024C94_at; Start 47; Stop 71
tttctcaagaagaactcgcgaagcg

SEQ ID NO: 108951 - DNA, 25 bp, Artificial
  probe
  misc_feature (1)..(25): SEQ ID NO: 866; WAN024C94_at; Start 136; Stop 160
caaacagctcgcttgaaagaagtta

SEQ ID NO: 108952 - DNA, 25 bp, Artificial
  probe
  misc_feature (1)..(25): SEQ ID NO: 866; WAN024C94_at; Start 131; Stop 155
tggaacaaacagctcgcttgaaaga

SEQ ID NO: 108953 - DNA, 25 bp, Artificial
  probe
  misc_feature (1)..(25): SEQ ID NO: 866; WAN024C94_at; Start 62; Stop 86
tcgcgaagcgcgaaaacgaattgaa

SEQ ID NO: 108954 - DNA, 25 bp, Artificial
  probe
  misc_feature (1)..(25): SEQ ID NO: 866; WAN024C94_at; Start 112; Stop 136
caagctgctactggtcaattggaac

SEQ ID NO: 108955 - DNA, 25 bp, Artificial
  probe
  misc_feature (1)..(25): SEQ ID NO: 866; WAN024C94_at; Start 44; Stop 68
gtctttctcaagaagaactcgcgaa

SEQ ID NO: 108956 - DNA, 25 bp, Artificial
  probe
  misc_feature (1)..(25): SEQ ID NO: 866; WAN024C94_at; Start 133; Stop 157
gaacaaacagctcgcttgaaagaag

SEQ ID NO: 108957 - DNA, 25 bp, Artificial
  probe
  misc_feature (1)..(25): SEQ ID NO: 866; WAN024C94_at; Start 100; Stop 124
gaacttcgtttccaagctgctactg

SEQ ID NO: 108958 - DNA, 25 bp, Artificial
  probe
  misc_feature (1)..(25): SEQ ID NO: 866; WAN024C94_at; Start 51; Stop 75
tcaagaagaactcgcgaagcgcgaa

SEQ ID NO: 108959 - DNA, 25 bp, Artificial
  probe
  misc_feature (1)..(25): SEQ ID NO: 866; WAN024C94_at; Start 32; Stop 56
aagaacttcgtggtctttctcaaga

SEQ ID NO: 108960 - DNA, 25 bp, Artificial
  probe
  misc_feature (1)..(25): SEQ ID NO: 866; WAN024C94_at; Start 140; Stop 164
cagctcgcttgaaagaagttaaaaa

SEQ ID NO: 108961 - DNA, 25 bp, Artificial
  probe
  misc_feature (1)..(25): SEQ ID NO: 866; WAN024C94_at; Start 115; Stop 139
gctgctactggtcaattggaacaaa

SEQ ID NO: 108962 - DNA, 25 bp, Artificial
  probe
  misc_feature (1)..(25): SEQ ID NO: 866; WAN024C94_at; Start 34; Stop 58
gaacttcgtggtctttctcaagaag
